United States Patent Application Publication US 2005/0255487 A1 - sequence listing, part 31

SEQ ID NO: 840095 - RNA, 19 nt, Homo sapiens
  misc_RNA (1)...(19): siRNA sense strand
gggaaagugugccuugaau

SEQ ID NO: 840096 - RNA, 19 nt, Homo sapiens
  misc_RNA (1)...(19): siRNA sense strand
caacagcauuugcaggaau

SEQ ID NO: 840097 - RNA, 19 nt, Homo sapiens
  misc_RNA (1)...(19): siRNA sense strand
gaggaaggaccgaguagaa

SEQ ID NO: 840098 - RNA, 19 nt, Homo sapiens
  misc_RNA (1)...(19): siRNA sense strand
gaagaggaaagguaugaga

SEQ ID NO: 840099 - RNA, 19 nt, Homo sapiens
  misc_RNA (1)...(19): siRNA sense strand
gcagagagguuggcugaac

SEQ ID NO: 840100 - RNA, 19 nt, Homo sapiens
  misc_RNA (1)...(19): siRNA sense strand
ggaaggaccgaguagaaau

SEQ ID NO: 840101 - RNA, 19 nt, Homo sapiens
  misc_RNA (1)...(19): siRNA sense strand
uuacacaucuggacucagu

SEQ ID NO: 840102 - RNA, 19 nt, Homo sapiens
  misc_RNA (1)...(19): siRNA sense strand
gcauauacuggaacugaaa

SEQ ID NO: 840103 - RNA, 19 nt, Homo sapiens
  misc_RNA (1)...(19): siRNA sense strand
ggaagagcuuaugcaagaa

SEQ ID NO: 840104 - RNA, 19 nt, Homo sapiens
  misc_RNA (1)...(19): siRNA sense strand
cgaaaucccaauccauauu

SEQ ID NO: 840105 - RNA, 19 nt, Homo sapiens
  misc_RNA (1)...(19): siRNA sense strand
gccagcacaucuccauuga

SEQ ID NO: 840106 - RNA, 19 nt, Homo sapiens
  misc_RNA (1)...(19): siRNA sense strand
gagcuuaugcaagaacuuu

SEQ ID NO: 840107 - RNA, 19 nt, Homo sapiens
  misc_RNA (1)...(19): siRNA sense strand
gucaucaucuuacgacguu

SEQ ID NO: 840108 - RNA, 19 nt, Homo sapiens
  misc_RNA (1)...(19): siRNA sense strand
ucacauucauucugucauc

SEQ ID NO: 840109 - RNA, 19 nt, Homo sapiens
  misc_RNA (1)...(19): siRNA sense strand
ggaucaaggcuuuguagga

SEQ ID NO: 840110 - RNA, 19 nt, Homo sapiens
  misc_RNA (1)...(19): siRNA sense strand
caagccauguaccagauga

SEQ ID NO: 840111 - RNA, 19 nt, Homo sapiens
  misc_RNA (1)...(19): siRNA sense strand
ucauucccauccucauaua

SEQ ID NO: 840112 - RNA, 19 nt, Homo sapiens
  misc_RNA (1)...(19): siRNA sense strand
gcacacaagccauguacca

SEQ ID NO: 840113 - RNA, 19 nt, Homo sapiens
  misc_RNA (1)...(19): siRNA sense strand
gaaucgaaaucccaaucca

SEQ ID NO: 840114 - RNA, 19 nt, Homo sapiens
  misc_RNA (1)...(19): siRNA sense strand
cauagaagauaagaacaca

SEQ ID NO: 840115 - RNA, 19 nt, Homo sapiens
  misc_RNA (1)...(19): siRNA sense strand
aaagguugaugccgucaga

SEQ ID NO: 840116 - RNA, 19 nt, Homo sapiens
  misc_RNA (1)...(19): siRNA sense strand
ucaguaaccaagauccaua

SEQ ID NO: 840117 - RNA, 19 nt, Homo sapiens
  misc_RNA (1)...(19): siRNA sense strand
uaagaggaaggaccgagua

SEQ ID NO: 840118 - RNA, 19 nt, Homo sapiens
  misc_RNA (1)...(19): siRNA sense strand
uaucauucccauccucaua

SEQ ID NO: 840119 - RNA, 19 nt, Homo sapiens
  misc_RNA (1)...(19): siRNA sense strand
guugaugccgucagaauug

SEQ ID NO: 840120 - RNA, 19 nt, Homo sapiens
  misc_RNA (1)...(19): siRNA sense strand
agaaggaagaggaaaggua

SEQ ID NO: 840121 - RNA, 19 nt, Homo sapiens
  misc_RNA (1)...(19): siRNA sense strand
ggaguugaacgaugauaca

SEQ ID NO: 840122 - RNA, 19 nt, Homo sapiens
  misc_RNA (1)...(19): siRNA sense strand
uuacgacguucugauaaga

SEQ ID NO: 840123 - RNA, 19 nt, Homo sapiens
  misc_RNA (1)...(19): siRNA sense strand
gguaugagagaaucgaaau

SEQ ID NO: 840124 - RNA, 19 nt, Homo sapiens
  misc_RNA (1)...(19): siRNA sense strand
ucaaggcuuuguaggacuu

SEQ ID NO: 840125 - RNA, 19 nt, Homo sapiens
  misc_RNA (1)...(19): siRNA sense strand
ucaugucacuaucgggaaa

SEQ ID NO: 840126 - RNA, 19 nt, Homo sapiens
  misc_RNA (1)...(19): siRNA sense strand
gagaaucgaaaucccaauc

SEQ ID NO: 840127 - RNA, 19 nt, Homo sapiens
  misc_RNA (1)...(19): siRNA sense strand
cgguucaucucgagucuga

SEQ ID NO: 840128 - RNA, 19 nt, Homo sapiens
  misc_RNA (1)...(19): siRNA sense strand
gccggguacucuacacuug

SEQ ID NO: 840129 - RNA, 19 nt, Homo sapiens
  misc_RNA (1)...(19): siRNA sense strand
aaaggaagagcuuaugcaa

SEQ ID NO: 840130 - RNA, 19 nt, Homo sapiens
  misc_RNA (1)...(19): siRNA sense strand
gaggacagacuggagcaaa

SEQ ID NO: 840131 - RNA, 19 nt, Homo sapiens
  misc_RNA (1)...(19): siRNA sense strand
cacaagccauguaccagau

SEQ ID NO: 840132 - RNA, 19 nt, Homo sapiens
  misc_RNA (1)...(19): siRNA sense strand
gagcaaaaccaacagcauu

SEQ ID NO: 840133 - RNA, 19 nt, Homo sapiens
  misc_RNA (1)...(19): siRNA sense strand
gacuccaaauuugcauaua

SEQ ID NO: 840134 - RNA, 19 nt, Homo sapiens
  misc_RNA (1)...(19): siRNA sense strand
guaaccaagauccauaaug

SEQ ID NO: 840135 - RNA, 19 nt, Homo sapiens
  misc_RNA (1)...(19): siRNA sense strand
agagaaggaggaaguaaug

SEQ ID NO: 840136 - RNA, 19 nt, Homo sapiens
  misc_RNA (1)...(19): siRNA sense strand
acucuacacuugcuuccaa

SEQ ID NO: 840137 - RNA, 19 nt, Homo sapiens
  misc_RNA (1)...(19): siRNA sense strand
ccaacagcauuugcaggaa

SEQ ID NO: 840138 - RNA, 19 nt, Homo sapiens
  misc_RNA (1)...(19): siRNA sense strand
ggaaagugugccuugaauc

SEQ ID NO: 840139 - RNA, 19 nt, Homo sapiens
  misc_RNA (1)...(19): siRNA sense strand
cauauuguaccucauguca

SEQ ID NO: 840140 - RNA, 19 nt, Homo sapiens
  misc_RNA (1)...(19): siRNA sense strand
gcauuugcaggaauuacaa

SEQ ID NO: 840141 - RNA, 19 nt, Homo sapiens
  misc_RNA (1)...(19): siRNA sense strand
ucucgagucugacgcuuuc

SEQ ID NO: 840142 - RNA, 19 nt, Homo sapiens
  misc_RNA (1)...(19): siRNA sense strand
aggaggauccacagccuua

SEQ ID NO: 840143 - RNA, 19 nt, Homo sapiens
  misc_RNA (1)...(19): siRNA sense strand
ugagaguugugggcuggua

SEQ ID NO: 840144 - RNA, 19 nt, Homo sapiens
  misc_RNA (1)...(19): siRNA sense strand
acacaucuggacucaguaa

SEQ ID NO: 840145 - RNA, 19 nt, Homo sapiens
  misc_RNA (1)...(19): siRNA sense strand
gagcaggaugcguauagga

SEQ ID NO: 840146 - RNA, 19 nt, Homo sapiens
  misc_RNA (1)...(19): siRNA sense strand
gucugacgcuuuccucguu

SEQ ID NO: 840147 - RNA, 19 nt, Homo sapiens
  misc_RNA (1)...(19): siRNA sense strand
ccuguuucauagaagauaa

SEQ ID NO: 840148 - RNA, 19 nt, Homo sapiens
  misc_RNA (1)...(19): siRNA sense strand
gguugaugccgucagaauu

SEQ ID NO: 840149 - RNA, 19 nt, Homo sapiens
  misc_RNA (1)...(19): siRNA sense strand
uauuguaccucaugucacu

SEQ ID NO: 840150 - RNA, 19 nt, Homo sapiens
  misc_RNA (1)...(19): siRNA sense strand
cagagaaggaggaaguaau

SEQ ID NO: 840151 - RNA, 19 nt, Homo sapiens
  misc_RNA (1)...(19): siRNA sense strand
ccacagccuuacacaucug

SEQ ID NO: 840152 - RNA, 19 nt, Homo sapiens
  misc_RNA (1)...(19): siRNA sense strand
gaagagcuuaugcaagaac

SEQ ID NO: 840153 - RNA, 19 nt, Homo sapiens
  misc_RNA (1)...(19): siRNA sense strand
caguaaccaagauccauaa

SEQ ID NO: 840154 - RNA, 19 nt, Homo sapiens
  misc_RNA (1)...(19): siRNA sense strand
caucuggacucaguaacca

SEQ ID NO: 840155 - RNA, 19 nt, Homo sapiens
  misc_RNA (1)...(19): siRNA sense strand
gaugauacaaggagugacu

SEQ ID NO: 840156 - RNA, 19 nt, Homo sapiens
  misc_RNA (1)...(19): siRNA sense strand
ggaggagcaggaugcguau

SEQ ID NO: 840157 - RNA, 19 nt, Homo sapiens
  misc_RNA (1)...(19): siRNA sense strand
uguuuggccuucacauguu

SEQ ID NO: 840158 - RNA, 19 nt, Homo sapiens
  misc_RNA (1)...(19): siRNA sense strand
aacagcauuugcaggaauu

SEQ ID NO: 840159 - RNA, 19 nt, Homo sapiens
  misc_RNA (1)...(19): siRNA sense strand
ggacucaguaaccaagauc

SEQ ID NO: 840160 - RNA, 19 nt, Homo sapiens
  misc_RNA (1)...(19): siRNA sense strand
gauggaucaaggcuuugua

SEQ ID NO: 840161 - RNA, 19 nt, Homo sapiens
  misc_RNA (1)...(19): siRNA sense strand
gagcacagagaaggaggaa

SEQ ID NO: 840162 - RNA, 19 nt, Homo sapiens
  misc_RNA (1)...(19): siRNA sense strand
agucagaugucggcaguca

SEQ ID NO: 840163 - RNA, 19 nt, Homo sapiens
  misc_RNA (1)...(19): siRNA sense strand
ggagcaggaugcguauagg

SEQ ID NO: 840164 - RNA, 19 nt, Homo sapiens
  misc_RNA (1)...(19): siRNA sense strand
ccauugagggccagaagga

SEQ ID NO: 840165 - RNA, 19 nt, Homo sapiens
  misc_RNA (1)...(19): siRNA sense strand
cagagagguuggcugaacu

SEQ ID NO: 840166 - RNA, 19 nt, Homo sapiens
  misc_RNA (1)...(19): siRNA sense strand
gcgcacaguugcugaaaag

SEQ ID NO: 840167 - RNA, 19 nt, Homo sapiens
  misc_RNA (1)...(19): siRNA sense strand
ggcuuuguaggacuuauuu

SEQ ID NO: 840168 - RNA, 19 nt, Homo sapiens
  misc_RNA (1)...(19): siRNA sense strand
ugacuccaaauuugcauau

SEQ ID NO: 840169 - RNA, 19 nt, Homo sapiens
  misc_RNA (1)...(19): siRNA sense strand
aucgaaaucccaauccaua

SEQ ID NO: 840170 - RNA, 19 nt, Homo sapiens
  misc_RNA (1)...(19): siRNA sense strand
guuuggccuucacauguug

SEQ ID NO: 840171 - RNA, 19 nt, Homo sapiens
  misc_RNA (1)...(19): siRNA sense strand
agaggaaagguaugagaga

SEQ ID NO: 840172 - RNA, 19 nt, Homo sapiens
  misc_RNA (1)...(19): siRNA sense strand
cauccucauauaacuguuu

SEQ ID NO: 840173 - RNA, 19 nt, Homo sapiens
  misc_RNA (1)...(19): siRNA sense strand
acuccaaauuugcauauac

SEQ ID NO: 840174 - RNA, 19 nt, Homo sapiens
  misc_RNA (1)...(19): siRNA sense strand
acacuugcuuccaauccau

SEQ ID NO: 840175 - RNA, 19 nt, Homo sapiens
  misc_RNA (1)...(19): siRNA sense strand
ugcauauacuggaacugaa

SEQ ID NO: 840176 - RNA, 19 nt, Homo sapiens
  misc_RNA (1)...(19): siRNA sense strand
gaggauccacagccuuaca

SEQ ID NO: 840177 - RNA, 19 nt, Homo sapiens
  misc_RNA (1)...(19): siRNA sense strand
gaagaaauucagagcuuua

SEQ ID NO: 840178 - RNA, 19 nt, Homo sapiens
  misc_RNA (1)...(19): siRNA sense strand
uaucaaggcucgcgagaaa

SEQ ID NO: 840179 - RNA, 19 nt, Homo sapiens
  misc_RNA (1)...(19): siRNA sense strand
ugaaacagaugcugcugaa

SEQ ID NO: 840180 - RNA, 19 nt, Homo sapiens
  misc_RNA (1)...(19): siRNA sense strand
aaagaaggcaugcuuauga

SEQ ID NO: 840181 - RNA, 19 nt, Homo sapiens
  misc_RNA (1)...(19): siRNA sense strand
uacaugaacuuccguguga

SEQ ID NO: 840182 - RNA, 19 nt, Homo sapiens
  misc_RNA (1)...(19): siRNA sense strand
gcgggaaggugcaggauau

SEQ ID NO: 840183 - RNA, 19 nt, Homo sapiens
  misc_RNA (1)...(19): siRNA sense strand
gaaagaaggcaugcuuaug

SEQ ID NO: 840184 - RNA, 19 nt, Homo sapiens
  misc_RNA (1)...(19): siRNA sense strand
gcugugcgcugccugcaaa

SEQ ID NO: 840185 - RNA, 19 nt, Homo sapiens
  misc_RNA (1)...(19): siRNA sense strand
gaaggcaugcuuaugaaga

SEQ ID NO: 840186 - RNA, 19 nt, Homo sapiens
  misc_RNA (1)...(19): siRNA sense strand
gaaauucagagcuuuaucu

SEQ ID NO: 840187 - RNA, 19 nt, Homo sapiens
  misc_RNA (1)...(19): siRNA sense strand
gaugaggacagcaagauug

SEQ ID NO: 840188 - RNA, 19 nt, Homo sapiens
  misc_RNA (1)...(19): siRNA sense strand
acagcaagauugaccacua

SEQ ID NO: 840189 - RNA, 19 nt, Homo sapiens
  misc_RNA (1)...(19): siRNA sense strand
aagaaggcaugcuuaugaa

SEQ ID NO: 840190 - RNA, 19 nt, Homo sapiens
  misc_RNA (1)...(19): siRNA sense strand
ugaaagcgaaggucaguga

SEQ ID NO: 840191 - RNA, 19 nt, Homo sapiens
  misc_RNA (1)...(19): siRNA sense strand
ggaaggugcaggauaucaa

SEQ ID NO: 840192 - RNA, 19 nt, Homo sapiens
  misc_RNA (1)...(19): siRNA sense strand
ugaaagaaggcaugcuuau

SEQ ID NO: 840193 - RNA, 19 nt, Homo sapiens
  misc_RNA (1)...(19): siRNA sense strand
gguacuccaucucccaaga

SEQ ID NO: 840194 - RNA, 19 nt, Homo sapiens
  misc_RNA (1)...(19): siRNA sense strand
gcacugugacuuccaccaa

SEQ ID NO: 840195 - RNA, 19 nt, Homo sapiens
  misc_RNA (1)...(19): siRNA sense strand
cuacaaugcccgcaccaaa

SEQ ID NO: 840196 - RNA, 19 nt, Homo sapiens
  misc_RNA (1)...(19): siRNA sense strand
ggaugaggacagcaagauu

SEQ ID NO: 840197 - RNA, 19 nt, Homo sapiens
  misc_RNA (1)...(19): siRNA sense strand
gcuacgagccggacagcaa

SEQ ID NO: 840198 - RNA, 19 nt, Homo sapiens
  misc_RNA (1)...(19): siRNA sense strand
gcugaguccuacacaguuc

SEQ ID NO: 840199 - RNA, 19 nt, Homo sapiens
  misc_RNA (1)...(19): siRNA sense strand
gcaccuacgagcugcagaa

SEQ ID NO: 840200 - RNA, 19 nt, Homo sapiens
  misc_RNA (1)...(19): siRNA sense strand
gggaggcccugaggaagau

SEQ ID NO: 840201 - RNA, 19 nt, Homo sapiens
  misc_RNA (1)...(19): siRNA sense strand
aaacacuggcugugaagaa

SEQ ID NO: 840202 - RNA, 19 nt, Homo sapiens
  misc_RNA (1)...(19): siRNA sense strand
ucaaggcucgcgagaaaga

SEQ ID NO: 840203 - RNA, 19 nt, Homo sapiens
  misc_RNA (1)...(19): siRNA sense strand
ggagacagccaaccagacu

SEQ ID NO: 840204 - RNA, 19 nt, Homo sapiens
  misc_RNA (1)...(19): siRNA sense strand
ccuacgagcugcagaacca

SEQ ID NO: 840205 - RNA, 19 nt, Homo sapiens
  misc_RNA (1)...(19): siRNA sense strand
gcugaaagaaggcaugcuu

SEQ ID NO: 840206 - RNA, 19 nt, Homo sapiens
  misc_RNA (1)...(19): siRNA sense strand
ggaccucgaagcagaguuc

SEQ ID NO: 840207 - RNA, 19 nt, Homo sapiens
  misc_RNA (1)...(19): siRNA sense strand
cagcaagauugaccacuac

SEQ ID NO: 840208 - RNA, 19 nt, Homo sapiens
  misc_RNA (1)...(19): siRNA sense strand
gccugcacgucaacaauug

SEQ ID NO: 840209 - RNA, 19 nt, Homo sapiens
  misc_RNA (1)...(19): siRNA sense strand
ucaaaacacuggcugugaa

SEQ ID NO: 840210 - RNA, 19 nt, Homo sapiens
  misc_RNA (1)...(19): siRNA sense strand
auucagagcuuuaucuacu

SEQ ID NO: 840211 - RNA, 19 nt, Homo sapiens
  misc_RNA (1)...(19): siRNA sense strand
ggagacaccagcguucaug

SEQ ID NO: 840212 - RNA, 19 nt, Homo sapiens
  misc_RNA (1)...(19): siRNA sense strand
gaaggugcaggauaucaag

SEQ ID NO: 840213 - RNA, 19 nt, Homo sapiens
  misc_RNA (1)...(19): siRNA sense strand
gcuacaggcacucaaguuc

SEQ ID NO: 840214 - RNA, 19 nt, Homo sapiens
  misc_RNA (1)...(19): siRNA sense strand
cacuggcugugaagaauga

SEQ ID NO: 840215 - RNA, 19 nt, Homo sapiens
  misc_RNA (1)...(19): siRNA sense strand
gacaccagcguucauguuc

SEQ ID NO: 840216 - RNA, 19 nt, Homo sapiens
  misc_RNA (1)...(19): siRNA sense strand
gcauccggcagacagagua

SEQ ID NO: 840217 - RNA, 19 nt, Homo sapiens
  misc_RNA (1)...(19): siRNA sense strand
cugaaagaaggcaugcuua

SEQ ID NO: 840218 - RNA, 19 nt, Homo sapiens
  misc_RNA (1)...(19): siRNA sense strand
gcaagagcggcagaugcua

SEQ ID NO: 840219 - RNA, 19 nt, Homo sapiens
  misc_RNA (1)...(19): siRNA sense strand
caaaucaaagauggaguga

SEQ ID NO: 840220 - RNA, 19 nt, Homo sapiens
  misc_RNA (1)...(19): siRNA sense strand
gccaagcaaaucaaagaug

SEQ ID NO: 840221 - RNA, 19 nt, Homo sapiens
  misc_RNA (1)...(19): siRNA sense strand
ugaggaagaucaucaaaac

SEQ ID NO: 840222 - RNA, 19 nt, Homo sapiens
  misc_RNA (1)...(19): siRNA sense strand
caaaagcgaggcagugcua

SEQ ID NO: 840223 - RNA, 19 nt, Homo sapiens
  misc_RNA (1)...(19): siRNA sense strand
ucuacucccugaaacagau

SEQ ID NO: 840224 - RNA, 19 nt, Homo sapiens
  misc_RNA (1)...(19): siRNA sense strand
aaggcaugcuuaugaagau

SEQ ID NO: 840225 - RNA, 19 nt, Homo sapiens
  misc_RNA (1)...(19): siRNA sense strand
ucucugagccggugacucu

SEQ ID NO: 840226 - RNA, 19 nt, Homo sapiens
  misc_RNA (1)...(19): siRNA sense strand
gccugggugugcacuguga

SEQ ID NO: 840227 - RNA, 19 nt, Homo sapiens
  misc_RNA (1)...(19): siRNA sense strand
aggcaugcuuaugaagaua

SEQ ID NO: 840228 - RNA, 19 nt, Homo sapiens
  misc_RNA (1)...(19): siRNA sense strand
accacuacgugcuggagua

SEQ ID NO: 840229 - RNA, 19 nt, Homo sapiens
  misc_RNA (1)...(19): siRNA sense strand
ugugaaggccuguaacaag

SEQ ID NO: 840230 - RNA, 19 nt, Homo sapiens
  misc_RNA (1)...(19): siRNA sense strand
acaaugcccgcaccaaaca

SEQ ID NO: 840231 - RNA, 19 nt, Homo sapiens
  misc_RNA (1)...(19): siRNA sense strand
agacaccagcguucauguu

SEQ ID NO: 840232 - RNA, 19 nt, Homo sapiens
  misc_RNA (1)...(19): siRNA sense strand
gcuaccagcagcuccaaca

SEQ ID NO: 840233 - RNA, 19 nt, Homo sapiens
  misc_RNA (1)...(19): siRNA sense strand
ccaagcacgccaacaaggu

SEQ ID NO: 840234 - RNA, 19 nt, Homo sapiens
  misc_RNA (1)...(19): siRNA sense strand
cggccaagcacgccaacaa

SEQ ID NO: 840235 - RNA, 19 nt, Homo sapiens
  misc_RNA (1)...(19): siRNA sense strand
gcccugaggaagaucauca

SEQ ID NO: 840236 - RNA, 19 nt, Homo sapiens
  misc_RNA (1)...(19): siRNA sense strand
gggaaggugcaggauauca

SEQ ID NO: 840237 - RNA, 19 nt, Homo sapiens
  misc_RNA (1)...(19): siRNA sense strand
ggcgggaaggugcaggaua

SEQ ID NO: 840238 - RNA, 19 nt, Homo sapiens
  misc_RNA (1)...(19): siRNA sense strand
gagaacaugucaaaguuaa

SEQ ID NO: 840239 - RNA, 19 nt, Homo sapiens
  misc_RNA (1)...(19): siRNA sense strand
gcacaucauuggcgccuua

SEQ ID NO: 840240 - RNA, 19 nt, Homo sapiens
  misc_RNA (1)...(19): siRNA sense strand
gagagaacaugucaaaguu

SEQ ID NO: 840241 - RNA, 19 nt, Homo sapiens
  misc_RNA (1)...(19): siRNA sense strand
gaauggaggucagaaauca

SEQ ID NO: 840242 - RNA, 19 nt, Homo sapiens
  misc_RNA (1)...(19): siRNA sense strand
ggaggcacguggagaugua

SEQ ID NO: 840243 - RNA, 19 nt, Homo sapiens
  misc_RNA (1)...(19): siRNA sense strand
ggagagaacaugucaaagu

SEQ ID NO: 840244 - RNA, 19 nt, Homo sapiens
  misc_RNA (1)...(19): siRNA sense strand
cagaggagguguuucauag

SEQ ID NO: 840245 - RNA, 19 nt, Homo sapiens
  misc_RNA (1)...(19): siRNA sense strand
gcagaggagguguuucaua

SEQ ID NO: 840246 - RNA, 19 nt, Homo sapiens
  misc_RNA (1)...(19): siRNA sense strand
ggucaacauuggccugaaa

SEQ ID NO: 840247 - RNA, 19 nt, Homo sapiens
  misc_RNA (1)...(19): siRNA sense strand
uuacggacauccaagcuuu

SEQ ID NO: 840248 - RNA, 19 nt, Homo sapiens
  misc_RNA (1)...(19): siRNA sense strand
ggagguguuucauagagaa

SEQ ID NO: 840249 - RNA, 19 nt, Homo sapiens
  misc_RNA (1)...(19): siRNA sense strand
ggucagaaaucaucaacag

SEQ ID NO: 840250 - RNA, 19 nt, Homo sapiens
  misc_RNA (1)...(19): siRNA sense strand
gaagacggcaaccucauug

SEQ ID NO: 840251 - RNA, 19 nt, Homo sapiens
  misc_RNA (1)...(19): siRNA sense strand
ugaagaaggagacgaggua

SEQ ID NO: 840252 - RNA, 19 nt, Homo sapiens
  misc_RNA (1)...(19): siRNA sense strand
gaggagguguuucauagag

SEQ ID NO: 840253 - RNA, 19 nt, Homo sapiens
  misc_RNA (1)...(19): siRNA sense strand
aaacuucgaccgagagauu

SEQ ID NO: 840254 - RNA, 19 nt, Homo sapiens
  misc_RNA (1)...(19): siRNA sense strand
cauccaagcuuuugucuga

SEQ ID NO: 840255 - RNA, 19 nt, Homo sapiens
  misc_RNA (1)...(19): siRNA sense strand
gagacgagguauuccuaca

SEQ ID NO: 840256 - RNA, 19 nt, Homo sapiens
  misc_RNA (1)...(19): siRNA sense strand
cgucaggccucaucgacaa

SEQ ID NO: 840257 - RNA, 19 nt, Homo sapiens
  misc_RNA (1)...(19): siRNA sense strand
gaccucgggugggauguuu

SEQ ID NO: 840258 - RNA, 19 nt, Homo sapiens
  misc_RNA (1)...(19): siRNA sense strand
cagaaaucaucaacagcaa

SEQ ID NO: 840259 - RNA, 19 nt, Homo sapiens
  misc_RNA (1)...(19): siRNA sense strand
guggacugguuuccuguuu

SEQ ID NO: 840260 - RNA, 19 nt, Homo sapiens
  misc_RNA (1)...(19): siRNA sense strand
ccauggcaguggagucauu

SEQ ID NO: 840261 - RNA, 19 nt, Homo sapiens
  misc_RNA (1)...(19): siRNA sense strand
agagaacaugucaaaguua

SEQ ID NO: 840262 - RNA, 19 nt, Homo sapiens
  misc_RNA (1)...(19): siRNA sense strand
cagcagaggagguguuuca

SEQ ID NO: 840263 - RNA, 19 nt, Homo sapiens
  misc_RNA (1)...(19): siRNA sense strand
gugaccagcuagucccauu

SEQ ID NO: 840264 - RNA, 19 nt, Homo sapiens
  misc_RNA (1)...(19): siRNA sense strand
gguguuucauagagaacua

SEQ ID NO: 840265 - RNA, 19 nt, Homo sapiens
  misc_RNA (1)...(19): siRNA sense strand
gaaaucaucaacagcaaaa

SEQ ID NO: 840266 - RNA, 19 nt, Homo sapiens
  misc_RNA (1)...(19): siRNA sense strand
ucaugggccucaaccuuau

SEQ ID NO: 840267 - RNA, 19 nt, Homo sapiens
  misc_RNA (1)...(19): siRNA sense strand
ggaaggcuggugcacauca

SEQ ID NO: 840268 - RNA, 19 nt, Homo sapiens
  misc_RNA (1)...(19): siRNA sense strand
cagcucacguggucacugu

SEQ ID NO: 840269 - RNA, 19 nt, Homo sapiens
  misc_RNA (1)...(19): siRNA sense strand
gaaggcuggugcacaucau

SEQ ID NO: 840270 - RNA, 19 nt, Homo sapiens
  misc_RNA (1)...(19): siRNA sense strand
ccggagagaacaugucaaa

SEQ ID NO: 840271 - RNA, 19 nt, Homo sapiens
  misc_RNA (1)...(19): siRNA sense strand
ugaagacggcaaccucauu

SEQ ID NO: 840272 - RNA, 19 nt, Homo sapiens
  misc_RNA (1)...(19): siRNA sense strand
agaaggagacgagguauuc

SEQ ID NO: 840273 - RNA, 19 nt, Homo sapiens
  misc_RNA (1)...(19): siRNA sense strand
gaagaaggagacgagguau

SEQ ID NO: 840274 - RNA, 19 nt, Homo sapiens
  misc_RNA (1)...(19): siRNA sense strand
gacgagguauuccuacaac

SEQ ID NO: 840275 - RNA, 19 nt, Homo sapiens
  misc_RNA (1)...(19): siRNA sense strand
aaggaaggcuggugcacau

SEQ ID NO: 840276 - RNA, 19 nt, Homo sapiens
  misc_RNA (1)...(19): siRNA sense strand
ccgagagauuggccacaaa

SEQ ID NO: 840277 - RNA, 19 nt, Homo sapiens
  misc_RNA (1)...(19): siRNA sense strand
accaauggguagaaacuga

SEQ ID NO: 840278 - RNA, 19 nt, Homo sapiens
  misc_RNA (1)...(19): siRNA sense strand
cagcgaaaaucccaaguau

SEQ ID NO: 840279 - RNA, 19 nt, Homo sapiens
  misc_RNA (1)...(19): siRNA sense strand
ggacugguuuccuguuuuc

SEQ ID NO: 840280 - RNA, 19 nt, Homo sapiens
  misc_RNA (1)...(19): siRNA sense strand
gcucuccuucuaccuaauu

SEQ ID NO: 840281 - RNA, 19 nt, Homo sapiens
  misc_RNA (1)...(19): siRNA sense strand
guucaugggccucaaccuu

SEQ ID NO: 840282 - RNA, 19 nt, Homo sapiens
  misc_RNA (1)...(19): siRNA sense strand
ucaagucccugagccuauc

SEQ ID NO: 840283 - RNA, 19 nt, Homo sapiens
  misc_RNA (1)...(19): siRNA sense strand
ugacacggauccucuacac

SEQ ID NO: 840284 - RNA, 19 nt, Homo sapiens
  misc_RNA (1)...(19): siRNA sense strand
uucaugggccucaaccuua

SEQ ID NO: 840285 - RNA, 19 nt, Homo sapiens
  misc_RNA (1)...(19): siRNA sense strand
auagagaacuaaggagcaa

SEQ ID NO: 840286 - RNA, 19 nt, Homo sapiens
  misc_RNA (1)...(19): siRNA sense strand
cauucgccguggagacuuu

SEQ ID NO: 840287 - RNA, 19 nt, Homo sapiens
  misc_RNA (1)...(19): siRNA sense strand
ccugugggcccuccucauu

SEQ ID NO: 840288 - RNA, 19 nt, Homo sapiens
  misc_RNA (1)...(19): siRNA sense strand
gguauuccuacaacacuga

SEQ ID NO: 840289 - RNA, 19 nt, Homo sapiens
  misc_RNA (1)...(19): siRNA sense strand
acguggagauguaccaaug

SEQ ID NO: 840290 - RNA, 19 nt, Homo sapiens
  misc_RNA (1)...(19): siRNA sense strand
caguguggcuccggagaau

SEQ ID NO: 840291 - RNA, 19 nt, Homo sapiens
  misc_RNA (1)...(19): siRNA sense strand
ugaauggaggucagaaauc

SEQ ID NO: 840292 - RNA, 19 nt, Homo sapiens
  misc_RNA (1)...(19): siRNA sense strand
cugcucuccuucuaccuaa

SEQ ID NO: 840293 - RNA, 19 nt, Homo sapiens
  misc_RNA (1)...(19): siRNA sense strand
guguggcuccggagaauga

SEQ ID NO: 840294 - RNA, 19 nt, Homo sapiens
  misc_RNA (1)...(19): siRNA sense strand
ugucugauccaaacuaugg

SEQ ID NO: 840295 - RNA, 19 nt, Homo sapiens
  misc_RNA (1)...(19): siRNA sense strand
agaaaucaucaacagcaaa

SEQ ID NO: 840296 - RNA, 19 nt, Homo sapiens
  misc_RNA (1)...(19): siRNA sense strand
gaggaugggcaggugaaga

SEQ ID NO: 840297 - RNA, 19 nt, Homo sapiens
  misc_RNA (1)...(19): siRNA sense strand
ggcaguggagucauucaug

SEQ ID NO: 840298 - RNA, 19 nt, Homo sapiens
  misc_RNA (1)...(19): siRNA sense strand
aggaugggcaggugaagaa

SEQ ID NO: 840299 - RNA, 19 nt, Homo sapiens
  misc_RNA (1)...(19): siRNA sense strand
ggaggucagaaaucaucaa

SEQ ID NO: 840300 - RNA, 19 nt, Homo sapiens
  misc_RNA (1)...(19): siRNA sense strand
gcacguggagauguaccaa

SEQ ID NO: 840301 - RNA, 19 nt, Homo sapiens
  misc_RNA (1)...(19): siRNA sense strand
uuucauagagaacuaagga

SEQ ID NO: 840302 - RNA, 19 nt, Homo sapiens
  misc_RNA (1)...(19): siRNA sense strand
gcggagagcugguuaauga

SEQ ID NO: 840303 - RNA, 19 nt, Homo sapiens
  misc_RNA (1)...(19): siRNA sense strand
gcaagaagauaaagugaug

SEQ ID NO: 840304 - RNA, 19 nt, Homo sapiens
  misc_RNA (1)...(19): siRNA sense strand
gggaaauccuuuaccaaua

SEQ ID NO: 840305 - RNA, 19 nt, Homo sapiens
  misc_RNA (1)...(19): siRNA sense strand
gagcaacacucaacgaaug

SEQ ID NO: 840306 - RNA, 19 nt, Homo sapiens
  misc_RNA (1)...(19): siRNA sense strand
gaucuuaccuuacuguuca

SEQ ID NO: 840307 - RNA, 19 nt, Homo sapiens
  misc_RNA (1)...(19): siRNA sense strand
ggaaauccuuuaccaauag

SEQ ID NO: 840308 - RNA, 19 nt, Homo sapiens
  misc_RNA (1)...(19): siRNA sense strand
gaucuuaccuugcuguuca

SEQ ID NO: 840309 - RNA, 19 nt, Homo sapiens
  misc_RNA (1)...(19): siRNA sense strand
caacgaauguaaucagugu

SEQ ID NO: 840310 - RNA, 19 nt, Homo sapiens
  misc_RNA (1)...(19): siRNA sense strand
ccaaaggguuaacuccuaa

SEQ ID NO: 840311 - RNA, 19 nt, Homo sapiens
  misc_RNA (1)...(19): siRNA sense strand
ggagaggaaucaucuugga

SEQ ID NO: 840312 - RNA, 19 nt, Homo sapiens
  misc_RNA (1)...(19): siRNA sense strand
gccaaaggguuaacuccua

SEQ ID NO: 840313 - RNA, 19 nt, Homo sapiens
  misc_RNA (1)...(19): siRNA sense strand
gaagauucauacuggagaa

SEQ ID NO: 840314 - RNA, 19 nt, Homo sapiens
  misc_RNA (1)...(19): siRNA sense strand
ggagaaacccuaugaaugc

SEQ ID NO: 840315 - RNA, 19 nt, Homo sapiens
  misc_RNA (1)...(19): siRNA sense strand
ggcacgaggucaucucuuu

SEQ ID NO: 840316 - RNA, 19 nt, Homo sapiens
  misc_RNA (1)...(19): siRNA sense strand
gggaaauccuacagcagua

SEQ ID NO: 840317 - RNA, 19 nt, Homo sapiens
  misc_RNA (1)...(19): siRNA sense strand
ggaguacccuuacgaaugc

SEQ ID NO: 840318 - RNA, 19 nt, Homo sapiens
  misc_RNA (1)...(19): siRNA sense strand
gggaaaaccuucagcaauu

SEQ ID NO: 840319 - RNA, 19 nt, Homo sapiens
  misc_RNA (1)...(19): siRNA sense strand
ggagaaacccuacgaaugc

SEQ ID NO: 840320 - RNA, 19 nt, Homo sapiens
  misc_RNA (1)...(19): siRNA sense strand
gaaccaaguugauaaaccu

SEQ ID NO: 840321 - RNA, 19 nt, Homo sapiens
  misc_RNA (1)...(19): siRNA sense strand
cagcagaucuuaccuuacu

SEQ ID NO: 840322 - RNA, 19 nt, Homo sapiens
  misc_RNA (1)...(19): siRNA sense strand
ggagggucauuauguaugu

SEQ ID NO: 840323 - RNA, 19 nt, Homo sapiens
  misc_RNA (1)...(19): siRNA sense strand
accaauagcuuuucucuua

SEQ ID NO: 840324 - RNA, 19 nt, Homo sapiens
  misc_RNA (1)...(19): siRNA sense strand
gggagaaacccuaugaaug

SEQ ID NO: 840325 - RNA, 19 nt, Homo sapiens
  misc_RNA (1)...(19): siRNA sense strand
gaaacccuaugaaugcaau

SEQ ID NO: 840326 - RNA, 19 nt, Homo sapiens
  misc_RNA (1)...(19): siRNA sense strand
aagauaaagugaugacaga

SEQ ID NO: 840327 - RNA, 19 nt, Homo sapiens
  misc_RNA (1)...(19): siRNA sense strand
gggagaaacccuacgaaug

SEQ ID NO: 840328 - RNA, 19 nt, Homo sapiens
  misc_RNA (1)...(19): siRNA sense strand
gggaguacccuuacgaaug

SEQ ID NO: 840329 - RNA, 19 nt, Homo sapiens
  misc_RNA (1)...(19): siRNA sense strand
cauaagagaauccacaaug

SEQ ID NO: 840330 - RNA, 19 nt, Homo sapiens
  misc_RNA (1)...(19): siRNA sense strand
cauaagagaauccacaaug

SEQ ID NO: 840331 - RNA, 19 nt, Homo sapiens
  misc_RNA (1)...(19): siRNA sense strand
agaccgcacuugagaauuc

SEQ ID NO: 840332 - RNA, 19 nt, Homo sapiens
  misc_RNA (1)...(19): siRNA sense strand
aggaggaggucgaaucuga

SEQ ID NO: 840333 - RNA, 19 nt, Homo sapiens
  misc_RNA (1)...(19): siRNA sense strand
cagcacauaagaacucaua

SEQ ID NO: 840334 - RNA, 19 nt, Homo sapiens
  misc_RNA (1)...(19): siRNA sense strand
ggagcaagaagauaaagug

SEQ ID NO: 840335 - RNA, 19 nt, Homo sapiens
  misc_RNA (1)...(19): siRNA sense strand
auaaagugaugacagaaga

SEQ ID NO: 840336 - RNA, 19 nt, Homo sapiens
  misc_RNA (1)...(19): siRNA sense strand
gagcaagaagauaaaguga

SEQ ID NO: 840337 - RNA, 19 nt, Homo sapiens
  misc_RNA (1)...(19): siRNA sense strand
gauucauacuggagaaaga

SEQ ID NO: 840338 - RNA, 19 nt, Homo sapiens
  misc_RNA (1)...(19): siRNA sense strand
acaaauguaaccaguguuu

SEQ ID NO: 840339 - RNA, 19 nt, Homo sapiens
  misc_RNA (1)...(19): siRNA sense strand
agcagcagaucuuaccuua

SEQ ID NO: 840340 - RNA, 19 nt, Homo sapiens
  misc_RNA (1)...(19): siRNA sense strand
gagaaacccuaugaaugca

SEQ ID NO: 840341 - RNA, 19 nt, Homo sapiens
  misc_RNA (1)...(19): siRNA sense strand
gacagaagagagaggaauu

SEQ ID NO: 840342 - RNA, 19 nt, Homo sapiens
  misc_RNA (1)...(19): siRNA sense strand
uuuaaagucuucagcacaa

SEQ ID NO: 840343 - RNA, 19 nt, Homo sapiens
  misc_RNA (1)...(19): siRNA sense strand
caacacucaacgaauguaa

SEQ ID NO: 840344 - RNA, 19 nt, Homo sapiens
  misc_RNA (1)...(19): siRNA sense strand
gaauccauuuaaagccaaa

SEQ ID NO: 840345 - RNA, 19 nt, Homo sapiens
  misc_RNA (1)...(19): siRNA sense strand
ggaauucucucagguaccu

SEQ ID NO: 840346 - RNA, 19 nt, Homo sapiens
  misc_RNA (1)...(19): siRNA sense strand
gagaaacccuacgaaugca

SEQ ID NO: 840347 - RNA, 19 nt, Homo sapiens
  misc_RNA (1)...(19): siRNA sense strand
uuaaugagcuccugaaaag

SEQ ID NO: 840348 - RNA, 19 nt, Homo sapiens
  misc_RNA (1)...(19): siRNA sense strand
gaaucugacacagcacaua

SEQ ID NO: 840349 - RNA, 19 nt, Homo sapiens
  misc_RNA (1)...(19): siRNA sense strand
ucacaaggcacaagagagu

SEQ ID NO: 840350 - RNA, 19 nt, Homo sapiens
  misc_RNA (1)...(19): siRNA sense strand
cacaggagaauacauaaug

SEQ ID NO: 840351 - RNA, 19 nt, Homo sapiens
  misc_RNA (1)...(19): siRNA sense strand
caacugccgcucugucuuc

SEQ ID NO: 840352 - RNA, 19 nt, Homo sapiens
  misc_RNA (1)...(19): siRNA sense strand
ggaaccaaguugauaaacc

SEQ ID NO: 840353 - RNA, 19 nt, Homo sapiens
  misc_RNA (1)...(19): siRNA sense strand
uaauggagagaaauccuaa

SEQ ID NO: 840354 - RNA, 19 nt, Homo sapiens
  misc_RNA (1)...(19): siRNA sense strand
gauaaagugaugacagaag

SEQ ID NO: 840355 - RNA, 19 nt, Homo sapiens
  misc_RNA (1)...(19): siRNA sense strand
gaauacauaauggagagaa

SEQ ID NO: 840356 - RNA, 19 nt, Homo sapiens
  misc_RNA (1)...(19): siRNA sense strand
gcacauaagaacucauacu

SEQ ID NO: 840357 - RNA, 19 nt, Homo sapiens
  misc_RNA (1)...(19): siRNA sense strand
gagggucauuauguaugua

SEQ ID NO: 840358 - RNA, 19 nt, Homo sapiens
  misc_RNA (1)...(19): siRNA sense strand
auaagagaauccacaaugg

SEQ ID NO: 840359 - RNA, 19 nt, Homo sapiens
  misc_RNA (1)...(19): siRNA sense strand
ugacacagcacauaagaac

SEQ ID NO: 840360 - RNA, 19 nt, Homo sapiens
  misc_RNA (1)...(19): siRNA sense strand
gggacgugaugcuggagaa

SEQ ID NO: 840361 - RNA, 19 nt, Homo sapiens
  misc_RNA (1)...(19): siRNA sense strand
ggaaaaccuucagcaauuc

SEQ ID NO: 840362 - RNA, 19 nt, Homo sapiens
  misc_RNA (1)...(19): siRNA sense strand
auaagagaauccacaaugg

SEQ ID NO: 840363 - RNA, 19 nt, Homo sapiens
  misc_RNA (1)...(19): siRNA sense strand
ggagcaacacucaacgaau

SEQ ID NO: 840364 - RNA, 19 nt, Homo sapiens
  misc_RNA (1)...(19): siRNA sense strand
gagugugggaaauccuuua

SEQ ID NO: 840365 - RNA, 19 nt, Homo sapiens
  misc_RNA (1)...(19): siRNA sense strand
aaucugacacagcacauaa

SEQ ID NO: 840366 - RNA, 19 nt, Homo sapiens
  misc_RNA (1)...(19): siRNA sense strand
gcagaucuuaccuuacugu

SEQ ID NO: 840367 - RNA, 19 nt, Homo sapiens
  misc_RNA (1)...(19): siRNA sense strand
caguagaucuuaccuugcu

SEQ ID NO: 840368 - RNA, 19 nt, Homo sapiens
  misc_RNA (1)...(19): siRNA sense strand
cggcacaggaagauucaua

SEQ ID NO: 840369 - RNA, 19 nt, Homo sapiens
  misc_RNA (1)...(19): siRNA sense strand
gcaacacucaacgaaugua

SEQ ID NO: 840370 - RNA, 19 nt, Homo sapiens
  misc_RNA (1)...(19): siRNA sense strand
ggaggucgaaucugacaca

SEQ ID NO: 840371 - RNA, 19 nt, Homo sapiens
  misc_RNA (1)...(19): siRNA sense strand
auuuaaagccaaaggguua

SEQ ID NO: 840372 - RNA, 19 nt, Homo sapiens
  misc_RNA (1)...(19): siRNA sense strand
gaaauccuuuaccaauagc

SEQ ID NO: 840373 - RNA, 19 nt, Homo sapiens
  misc_RNA (1)...(19): siRNA sense strand
gcacgaggucaucucuuuc

SEQ ID NO: 840374 - RNA, 19 nt, Homo sapiens
  misc_RNA (1)...(19): siRNA sense strand
ugauaaaccuaggcugauc

SEQ ID NO: 840375 - RNA, 19 nt, Homo sapiens
  misc_RNA (1)...(19): siRNA sense strand
gagaauucacacuggagaa

SEQ ID NO: 840376 - RNA, 19 nt, Homo sapiens
  misc_RNA (1)...(19): siRNA sense strand
cacaaaaucuucccuuaca

SEQ ID NO: 840377 - RNA, 19 nt, Homo sapiens
  misc_RNA (1)...(19): siRNA sense strand
cccuauggcugcagugaau

SEQ ID NO: 840378 - RNA, 19 nt, Homo sapiens
  misc_RNA (1)...(19): siRNA sense strand
guaaugagugugggaaauc

SEQ ID NO: 840379 - RNA, 19 nt, Homo sapiens
  misc_RNA (1)...(19): siRNA sense strand
ggauguggccguggaguuc

SEQ ID NO: 840380 - RNA, 19 nt, Homo sapiens
  misc_RNA (1)...(19): siRNA sense strand
uuaccuugcuguucauaag

SEQ ID NO: 840381 - RNA, 19 nt, Homo sapiens
  misc_RNA (1)...(19): siRNA sense strand
gugaaugugggaaauccua

SEQ ID NO: 840382 - RNA, 19 nt, Homo sapiens
  misc_RNA (1)...(19): siRNA sense strand
gggagggucauuauguaug

SEQ ID NO: 840383 - RNA, 19 nt, Homo sapiens
  misc_RNA (1)...(19): siRNA sense strand
ugggaaauccuuuaccaau

SEQ ID NO: 840384 - RNA, 19 nt, Homo sapiens
  misc_RNA (1)...(19): siRNA sense strand
gaacucauacuggagaaaa

SEQ ID NO: 840385 - RNA, 19 nt, Homo sapiens
  misc_RNA (1)...(19): siRNA sense strand
cuucagcaauuccucauac

SEQ ID NO: 840386 - RNA, 19 nt, Homo sapiens
  misc_RNA (1)...(19): siRNA sense strand
acaggagaauacauaaugg

SEQ ID NO: 840387 - RNA, 19 nt, Homo sapiens
  misc_RNA (1)...(19): siRNA sense strand
uuacgaaugccacgauugu

SEQ ID NO: 840388 - RNA, 19 nt, Homo sapiens
  misc_RNA (1)...(19): siRNA sense strand
caucuuggagcaacacuca

SEQ ID NO: 840389 - RNA, 19 nt, Homo sapiens
  misc_RNA (1)...(19): siRNA sense strand
uguaaugagugugggaaau

SEQ ID NO: 840390 - RNA, 19 nt, Homo sapiens
  misc_RNA (1)...(19): siRNA sense strand
gcacuauagcauucauaca

SEQ ID NO: 840391 - RNA, 19 nt, Homo sapiens
  misc_RNA (1)...(19): siRNA sense strand
ucagaccgcacuugagaau

SEQ ID NO: 840392 - RNA, 19 nt, Homo sapiens
  misc_RNA (1)...(19): siRNA sense strand
uuaaagucuucagcacaaa

SEQ ID NO: 840393 - RNA, 19 nt, Homo sapiens
  misc_RNA (1)...(19): siRNA sense strand
acgaauguaaucaguguuu

SEQ ID NO: 840394 - RNA, 19 nt, Homo sapiens
  misc_RNA (1)...(19): siRNA sense strand
cuccuaagcugcauguuuu

SEQ ID NO: 840395 - RNA, 19 nt, Homo sapiens
  misc_RNA (1)...(19): siRNA sense strand
cacauaagaacucauacug

SEQ ID NO: 840396 - RNA, 19 nt, Homo sapiens
  misc_RNA (1)...(19): siRNA sense strand
ucucuuucuucgcacuaua

SEQ ID NO: 840397 - RNA, 19 nt, Homo sapiens
  misc_RNA (1)...(19): siRNA sense strand
gaccgcacuugagaauuca

SEQ ID NO: 840398 - RNA, 19 nt, Homo sapiens
  misc_RNA (1)...(19): siRNA sense strand
gcuggagcaagaagauaaa

SEQ ID NO: 840399 - RNA, 19 nt, Homo sapiens
  misc_RNA (1)...(19): siRNA sense strand
cugaaaagcuggcuaaagg

SEQ ID NO: 840400 - RNA, 19 nt, Homo sapiens
  misc_RNA (1)...(19): siRNA sense strand
gcacaagagaguucauacg

SEQ ID NO: 840401 - RNA, 19 nt, Homo sapiens
  misc_RNA (1)...(19): siRNA sense strand
agaauucacacuggagaaa

SEQ ID NO: 840402 - RNA, 19 nt, Homo sapiens
  misc_RNA (1)...(19): siRNA sense strand
guaggcagcuaucccauuu

SEQ ID NO: 840403 - RNA, 19 nt, Homo sapiens
  misc_RNA (1)...(19): siRNA sense strand
guacuugugucuaugaauu

SEQ ID NO: 840404 - RNA, 19 nt, Homo sapiens
  misc_RNA (1)...(19): siRNA sense strand
ggaguguacuugugucuau

SEQ ID NO: 840405 - RNA, 19 nt, Homo sapiens
  misc_RNA (1)...(19): siRNA sense strand
gaaacugcaucacguccuu

SEQ ID NO: 840406 - RNA, 19 nt, Homo sapiens
  misc_RNA (1)...(19): siRNA sense strand
ccacauggcuaugggauuc

SEQ ID NO: 840407 - RNA, 19 nt, Homo sapiens
  misc_RNA (1)...(19): siRNA sense strand
gaccuugacuuaacuaacu

SEQ ID NO: 840408 - RNA, 19 nt, Homo sapiens
  misc_RNA (1)...(19): siRNA sense strand
gaugaggaguguacuugug

SEQ ID NO: 840409 - RNA, 19 nt, Homo sapiens
  misc_RNA (1)...(19): siRNA sense strand
guggacggguuucuuugua

SEQ ID NO: 840410 - RNA, 19 nt, Homo sapiens
  misc_RNA (1)...(19): siRNA sense strand
ggacggguuucuuuguauc

SEQ ID NO: 840411 - RNA, 19 nt, Homo sapiens
  misc_RNA (1)...(19): siRNA sense strand
gcuaugggauucgcuuguu

SEQ ID NO: 840412 - RNA, 19 nt, Homo sapiens
  misc_RNA (1)...(19): siRNA sense strand
ccaacacauugucagauug

SEQ ID NO: 840413 - RNA, 19 nt, Homo sapiens
  misc_RNA (1)...(19): siRNA sense strand
ccuuacagcugcacccaaa

SEQ ID NO: 840414 - RNA, 19 nt, Homo sapiens
  misc_RNA (1)...(19): siRNA sense strand
ucaccucgcuguucucuac

SEQ ID NO: 840415 - RNA, 19 nt, Homo sapiens
  misc_RNA (1)...(19): siRNA sense strand
gagguuaacaccagauugu

SEQ ID NO: 840416 - RNA, 19 nt, Homo sapiens
  misc_RNA (1)...(19): siRNA sense strand
acaacaaaguucucuccaa

SEQ ID NO: 840417 - RNA, 19 nt, Homo sapiens
  misc_RNA (1)...(19): siRNA sense strand
aaaguucucuccaacacau

SEQ ID NO: 840418 - RNA, 19 nt, Homo sapiens
  misc_RNA (1)...(19): siRNA sense strand
gacaaacagugcagugaac

SEQ ID NO: 840419 - RNA, 19 nt, Homo sapiens
  misc_RNA (1)...(19): siRNA sense strand
ucucuguacucucauaaug

SEQ ID NO: 840420 - RNA, 19 nt, Homo sapiens
  misc_RNA (1)...(19): siRNA sense strand
uccaacacauugucagauu

SEQ ID NO: 840421 - RNA, 19 nt, Homo sapiens
  misc_RNA (1)...(19): siRNA sense strand
aaauagucuugaagucgua

SEQ ID NO: 840422 - RNA, 19 nt, Homo sapiens
  misc_RNA (1)...(19): siRNA sense strand
ggugauccguucucuguac

SEQ ID NO: 840423 - RNA, 19 nt, Homo sapiens
  misc_RNA (1)...(19): siRNA sense strand
caagcaacagugaugauga

SEQ ID NO: 840424 - RNA, 19 nt, Homo sapiens
  misc_RNA (1)...(19): siRNA sense strand
acgacugacucauuacauu

SEQ ID NO: 840425 - RNA, 19 nt, Homo sapiens
  misc_RNA (1)...(19): siRNA sense strand
cgacugacucauuacauug

SEQ ID NO: 840426 - RNA, 19 nt, Homo sapiens
  misc_RNA (1)...(19): siRNA sense strand
ugacaaacagugcagugaa

SEQ ID NO: 840427 - RNA, 19 nt, Homo sapiens
  misc_RNA (1)...(19): siRNA sense strand
gaugugguacugacaacaa

SEQ ID NO: 840428 - RNA, 19 nt, Homo sapiens
  misc_RNA (1)...(19): siRNA sense strand
acagugcagugaacuuguu

SEQ ID NO: 840429 - RNA, 19 nt, Homo sapiens
  misc_RNA (1)...(19): siRNA sense strand
cucuacgacugacucauua

SEQ ID NO: 840430 - RNA, 19 nt, Homo sapiens
  misc_RNA (1)...(19): siRNA sense strand
aaacagugcagugaacuug

SEQ ID NO: 840431 - RNA, 19 nt, Homo sapiens
  misc_RNA (1)...(19): siRNA sense strand
gcaugaccuugacuuaacu

SEQ ID NO: 840432 - RNA, 19 nt, Homo sapiens
  misc_RNA (1)...(19): siRNA sense strand
ggauucgcuuguugggauu

SEQ ID NO: 840433 - RNA, 19 nt, Homo sapiens
  misc_RNA (1)...(19): siRNA sense strand
ggauaucucuuaauuuugc

SEQ ID NO: 840434 - RNA, 19 nt, Homo sapiens
  misc_RNA (1)...(19): siRNA sense strand
ucaggaguuucaccacgaa

SEQ ID NO: 840435 - RNA, 19 nt, Homo sapiens
  misc_RNA (1)...(19): siRNA sense strand
gauggacgaaugauuucuu

SEQ ID NO: 840436 - RNA, 19 nt, Homo sapiens
  misc_RNA (1)...(19): siRNA sense strand
cccgauggacgaaugauuu

SEQ ID NO: 840437 - RNA, 19 nt, Homo sapiens
  misc_RNA (1)...(19): siRNA sense strand
ucucuacgacugacucauu

SEQ ID NO: 840438 - RNA, 19 nt, Homo sapiens
  misc_RNA (1)...(19): siRNA sense strand
uuaguggacggguuucuuu

SEQ ID NO: 840439 - RNA, 19 nt, Homo sapiens
  misc_RNA (1)...(19): siRNA sense strand
cucuggauaucucuuaauu

SEQ ID NO: 840440 - RNA, 19 nt, Homo sapiens
  misc_RNA (1)...(19): siRNA sense strand
aggcagcuaucccauuuua

SEQ ID NO: 840441 - RNA, 19 nt, Homo sapiens
  misc_RNA (1)...(19): siRNA sense strand
acaaaguucucuccaacac

SEQ ID NO: 840442 - RNA, 19 nt, Homo sapiens
  misc_RNA (1)...(19): siRNA sense strand
guacugacaacaaaguucu

SEQ ID NO: 840443 - RNA, 19 nt, Homo sapiens
  misc_RNA (1)...(19): siRNA sense strand
gacugacucauuacauuga

SEQ ID NO: 840444 - RNA, 19 nt, Homo sapiens
  misc_RNA (1)...(19): siRNA sense strand
uuaagagcaagaagaacua

SEQ ID NO: 840445 - RNA, 19 nt, Homo sapiens
  misc_RNA (1)...(19): siRNA sense strand
ugcaugaccuugacuuaac

SEQ ID NO: 840446 - RNA, 19 nt, Homo sapiens
  misc_RNA (1)...(19): siRNA sense strand
uggacggguuucuuuguau

SEQ ID NO: 840447 - RNA, 19 nt, Homo sapiens
  misc_RNA (1)...(19): siRNA sense strand
guugacugcuugcccaaag

SEQ ID NO: 840448 - RNA, 19 nt, Homo sapiens
  misc_RNA (1)...(19): siRNA sense strand
caaacagugcagugaacuu

SEQ ID NO: 840449 - RNA, 19 nt, Homo sapiens
  misc_RNA (1)...(19): siRNA sense strand
aagcaacagugaugaugag

SEQ ID NO: 840450 - RNA, 19 nt, Homo sapiens
  misc_RNA (1)...(19): siRNA sense strand
gcucaagcaacagugauga

SEQ ID NO: 840451 - RNA, 19 nt, Homo sapiens
  misc_RNA (1)...(19): siRNA sense strand
gaugaugaggaguguacuu

SEQ ID NO: 840452 - RNA, 19 nt, Homo sapiens
  misc_RNA (1)...(19): siRNA sense strand
gaguguacuugugucuaug

SEQ ID NO: 840453 - RNA, 19 nt, Homo sapiens
  misc_RNA (1)...(19): siRNA sense strand
cuaugggauucgcuuguug

SEQ ID NO: 840454 - RNA, 19 nt, Homo sapiens
  misc_RNA (1)...(19): siRNA sense strand
gugaacuuguugacugcuu

SEQ ID NO: 840455 - RNA, 19 nt, Homo sapiens
  misc_RNA (1)...(19): siRNA sense strand
uguaucagccaaaguuuua

SEQ ID NO: 840456 - RNA, 19 nt, Homo sapiens
  misc_RNA (1)...(19): siRNA sense strand
gauccguucucuguacucu

SEQ ID NO: 840457 - RNA, 19 nt, Homo sapiens
  misc_RNA (1)...(19): siRNA sense strand
uuucaacguccucuggaua

SEQ ID NO: 840458 - RNA, 19 nt, Homo sapiens
  misc_RNA (1)...(19): siRNA sense strand
ccagauuguuccaaaaugu

SEQ ID NO: 840459 - RNA, 19 nt, Homo sapiens
  misc_RNA (1)...(19): siRNA sense strand
uccguucucuguacucuca

SEQ ID NO: 840460 - RNA, 19 nt, Homo sapiens
  misc_RNA (1)...(19): siRNA sense strand
cgggugauccguucucugu

SEQ ID NO: 840461 - RNA, 19 nt, Homo sapiens
  misc_RNA (1)...(19): siRNA sense strand
ccacgaaauagucuugaag

SEQ ID NO: 840462 - RNA, 19 nt, Homo sapiens
  misc_RNA (1)...(19): siRNA sense strand
caacacauugucagauugc

SEQ ID NO: 840463 - RNA, 19 nt, Homo sapiens
  misc_RNA (1)...(19): siRNA sense strand
ugacucauuacauugaaga

SEQ ID NO: 840464 - RNA, 19 nt, Homo sapiens
  misc_RNA (1)...(19): siRNA sense strand
agagcaagaagaacuacuu

SEQ ID NO: 840465 - RNA, 19 nt, Homo sapiens
  misc_RNA (1)...(19): siRNA sense strand
ucaagcaacagugaugaug

SEQ ID NO: 840466 - RNA, 19 nt, Homo sapiens
  misc_RNA (1)...(19): siRNA sense strand
ugaaguucuuggugagagu

SEQ ID NO: 840467 - RNA, 19 nt, Homo sapiens
  misc_RNA (1)...(19): siRNA sense strand
ucaccacgaaauagucuug

SEQ ID NO: 840468 - RNA, 19 nt, Homo sapiens
  misc_RNA (1)...(19): siRNA sense strand
cguucucuguacucucaua

SEQ ID NO: 840469 - RNA, 19 nt, Homo sapiens
  misc_RNA (1)...(19): siRNA sense strand
ugacugcuugcccaaagaa

SEQ ID NO: 840470 - RNA, 19 nt, Homo sapiens
  misc_RNA (1)...(19): siRNA sense strand
ugucucaccucgcuguucu

SEQ ID NO: 840471 - RNA, 19 nt, Homo sapiens
  misc_RNA (1)...(19): siRNA sense strand
aaacugcaucacguccuua

SEQ ID NO: 840472 - RNA, 19 nt, Homo sapiens
  misc_RNA (1)...(19): siRNA sense strand
acgaaauagucuugaaguc

SEQ ID NO: 840473 - RNA, 19 nt, Homo sapiens
  misc_RNA (1)...(19): siRNA sense strand
ggaagaaggugaucgauga

SEQ ID NO: 840474 - RNA, 19 nt, Homo sapiens
  misc_RNA (1)...(19): siRNA sense strand
gaagacacccacacgauua

SEQ ID NO: 840475 - RNA, 19 nt, Homo sapiens
  misc_RNA (1)...(19): siRNA sense strand
gagagugccugugacauua

SEQ ID NO: 840476 - RNA, 19 nt, Homo sapiens
  misc_RNA (1)...(19): siRNA sense strand
ccacagcccucauccagua

SEQ ID NO: 840477 - RNA, 19 nt, Homo sapiens
  misc_RNA (1)...(19): siRNA sense strand
gcacuucccugucaucaga

SEQ ID NO: 840478 - RNA, 19 nt, Homo sapiens
  misc_RNA (1)...(19): siRNA sense strand
gcaaguacaucugccagua

SEQ ID NO: 840479 - RNA, 19 nt, Homo sapiens
  misc_RNA (1)...(19): siRNA sense strand
caaagaagguacugcaguu

SEQ ID NO: 840480 - RNA, 19 nt, Homo sapiens
  misc_RNA (1)...(19): siRNA sense strand
gcuaaggucuccaaauuca

SEQ ID NO: 840481 - RNA, 19 nt, Homo sapiens
  misc_RNA (1)...(19): siRNA sense strand
gaacaacguccaaagaaau

SEQ ID NO: 840482 - RNA, 19 nt, Homo sapiens
  misc_RNA (1)...(19): siRNA sense strand
gagcaggccuccagaaucu

SEQ ID NO: 840483 - RNA, 19 nt, Homo sapiens
  misc_RNA (1)...(19): siRNA sense strand
cagaagcuuugaaggaaua

SEQ ID NO: 840484 - RNA, 19 nt, Homo sapiens
  misc_RNA (1)...(19): siRNA sense strand
ugagaaggcuccacccaaa

SEQ ID NO: 840485 - RNA, 19 nt, Homo sapiens
  misc_RNA (1)...(19): siRNA sense strand
gaaggaggguacaaaucaa

SEQ ID NO: 840486 - RNA, 19 nt, Homo sapiens
  misc_RNA (1)...(19): siRNA sense strand
uggcuaaggucuccaaauu

SEQ ID NO: 840487 - RNA, 19 nt, Homo sapiens
  misc_RNA (1)...(19): siRNA sense strand
gcacagcuccgacccaaga

SEQ ID NO: 840488 - RNA, 19 nt, Homo sapiens
  misc_RNA (1)...(19): siRNA sense strand
gagaacaacguccaaagaa

SEQ ID NO: 840489 - RNA, 19 nt, Homo sapiens
  misc_RNA (1)...(19): siRNA sense strand
gaaaagggauaacuacgaa

SEQ ID NO: 840490 - RNA, 19 nt, Homo sapiens
  misc_RNA (1)...(19): siRNA sense strand
ucacgaagcucaucaccau

SEQ ID NO: 840491 - RNA, 19 nt, Homo sapiens
  misc_RNA (1)...(19): siRNA sense strand
ggacagaggagaacaucuu

SEQ ID NO: 840492 - RNA, 19 nt, Homo sapiens
  misc_RNA (1)...(19): siRNA sense strand
ccaaagggaaucugacuaa

SEQ ID NO: 840493 - RNA, 19 nt, Homo sapiens
  misc_RNA (1)...(19): siRNA sense strand
ggaagcggcugaccaaagg

SEQ ID NO: 840494 - RNA, 19 nt, Homo sapiens
  misc_RNA (1)...(19): siRNA sense strand
guaaaucagugcccuccuu

SEQ ID NO: 840495 - RNA, 19 nt, Homo sapiens
  misc_RNA (1)...(19): siRNA sense strand
gaucaucuuuggcaagugu

SEQ ID NO: 840496 - RNA, 19 nt, Homo sapiens
  misc_RNA (1)...(19): siRNA sense strand
guacugagucuggguauuu

SEQ ID NO: 840497 - RNA, 19 nt, Homo sapiens
  misc_RNA (1)...(19): siRNA sense strand
ggagaacaacguccaaaga

SEQ ID NO: 840498 - RNA, 19 nt, Homo sapiens
  misc_RNA (1)...(19): siRNA sense strand
gacauuaccugaaagaaaa

SEQ ID NO: 840499 - RNA, 19 nt, Homo sapiens
  misc_RNA (1)...(19): siRNA sense strand
uggcaaaccucaccgaaga

SEQ ID NO: 840500 - RNA, 19 nt, Homo sapiens
  misc_RNA (1)...(19): siRNA sense strand
ggaagaggccagagaaauc

SEQ ID NO: 840501 - RNA, 19 nt, Homo sapiens
  misc_RNA (1)...(19): siRNA sense strand
caaaucaaacgaagaguau

SEQ ID NO: 840502 - RNA, 19 nt, Homo sapiens
  misc_RNA (1)...(19): siRNA sense strand
caagaaggcugagggaagu

SEQ ID NO: 840503 - RNA, 19 nt, Homo sapiens
  misc_RNA (1)...(19): siRNA sense strand
gagccguggucccaaauga

SEQ ID NO: 840504 - RNA, 19 nt, Homo sapiens
  misc_RNA (1)...(19): siRNA sense strand
ccagagaaaucccacuuag

SEQ ID NO: 840505 - RNA, 19 nt, Homo sapiens
  misc_RNA (1)...(19): siRNA sense strand
agaacaacguccaaagaaa

SEQ ID NO: 840506 - RNA, 19 nt, Homo sapiens
  misc_RNA (1)...(19): siRNA sense strand
agagucagauugagcauga

SEQ ID NO: 840507 - RNA, 19 nt, Homo sapiens
  misc_RNA (1)...(19): siRNA sense strand
cgaagaguauguauaugug

SEQ ID NO: 840508 - RNA, 19 nt, Homo sapiens
  misc_RNA (1)...(19): siRNA sense strand
caaacgaagaguauguaua

SEQ ID NO: 840509 - RNA, 19 nt, Homo sapiens
  misc_RNA (1)...(19): siRNA sense strand
gcaaagagacauacaccau

SEQ ID NO: 840510 - RNA, 19 nt, Homo sapiens
  misc_RNA (1)...(19): siRNA sense strand
gcacccacauguugacugu

SEQ ID NO: 840511 - RNA, 19 nt, Homo sapiens
  misc_RNA (1)...(19): siRNA sense strand
ggaagagccaccugccuuu

SEQ ID NO: 840512 - RNA, 19 nt, Homo sapiens
  misc_RNA (1)...(19): siRNA sense strand
gcaaucgaauuaccuuugg

SEQ ID NO: 840513 - RNA, 19 nt, Homo sapiens
  misc_RNA (1)...(19): siRNA sense strand
ggagggagcuagaaaugcu

SEQ ID NO: 840514 - RNA, 19 nt, Homo sapiens
  misc_RNA (1)...(19): siRNA sense strand
ggaagaggaggaaagagaa

SEQ ID NO: 840515 - RNA, 19 nt, Homo sapiens
  misc_RNA (1)...(19): siRNA sense strand
ccgcagcagucacguguuu

SEQ ID NO: 840516 - RNA, 19 nt, Homo sapiens
  misc_RNA (1)...(19): siRNA sense strand
cgaaggaggguacaaauca

SEQ ID NO: 840517 - RNA, 19 nt, Homo sapiens
  misc_RNA (1)...(19): siRNA sense strand
gcucagaagcuuugaagga

SEQ ID NO: 840518 - RNA, 19 nt, Homo sapiens
  misc_RNA (1)...(19): siRNA sense strand
ugacauuaccugaaagaaa

SEQ ID NO: 840519 - RNA, 19 nt, Homo sapiens
  misc_RNA (1)...(19): siRNA sense strand
ccacacaucuccagaagcu

SEQ ID NO: 840520 - RNA, 19 nt, Homo sapiens
  misc_RNA (1)...(19): siRNA sense strand
gaaguggaacccaaggaaa

SEQ ID NO: 840521 - RNA, 19 nt, Homo sapiens
  misc_RNA (1)...(19): siRNA sense strand
gcagccggcaaucgaauua

SEQ ID NO: 840522 - RNA, 19 nt, Homo sapiens
  misc_RNA (1)...(19): siRNA sense strand
acucagaccuggacgaaga

SEQ ID NO: 840523 - RNA, 19 nt, Homo sapiens
  misc_RNA (1)...(19): siRNA sense strand
aagcaaacguguccuuuca

SEQ ID NO: 840524 - RNA, 19 nt, Homo sapiens
  misc_RNA (1)...(19): siRNA sense strand
uauggcagcuuguccuuga

SEQ ID NO: 840525 - RNA, 19 nt, Homo sapiens
  misc_RNA (1)...(19): siRNA sense strand
cagaagaggcacacaagaa

SEQ ID NO: 840526 - RNA, 19 nt, Homo sapiens
  misc_RNA (1)...(19): siRNA sense strand
gcuggaagccgaagaagga

SEQ ID NO: 840527 - RNA, 19 nt, Homo sapiens
  misc_RNA (1)...(19): siRNA sense strand
gaagguacggacucaaaga

SEQ ID NO: 840528 - RNA, 19 nt, Homo sapiens
  misc_RNA (1)...(19): siRNA sense strand
gagcagagccccaacguuu

SEQ ID NO: 840529 - RNA, 19 nt, Homo sapiens
  misc_RNA (1)...(19): siRNA sense strand
gcaaagacacagccuccaa

SEQ ID NO: 840530 - RNA, 19 nt, Homo sapiens
  misc_RNA (1)...(19): siRNA sense strand
aaccaagccugaacaauca

SEQ ID NO: 840531 - RNA, 19 nt, Homo sapiens
  misc_RNA (1)...(19): siRNA sense strand
ccugugacauuaccugaaa

SEQ ID NO: 840532 - RNA, 19 nt, Homo sapiens
  misc_RNA (1)...(19): siRNA sense strand
gcaauguacaccacccuuu

SEQ ID NO: 840533 - RNA, 19 nt, Homo sapiens
  misc_RNA (1)...(19): siRNA sense strand
cuaagcacaugaagucgaa

SEQ ID NO: 840534 - RNA, 19 nt, Homo sapiens
  misc_RNA (1)...(19): siRNA sense strand
caaggcagcucagcaacug

SEQ ID NO: 840535 - RNA, 19 nt, Homo sapiens
  misc_RNA (1)...(19): siRNA sense strand
aaaccaagccugaacaauc

SEQ ID NO: 840536 - RNA, 19 nt, Homo sapiens
  misc_RNA (1)...(19): siRNA sense strand
gcugguuggugcauaaguu

SEQ ID NO: 840537 - RNA, 19 nt, Homo sapiens
  misc_RNA (1)...(19): siRNA sense strand
gucaguuggugcuauuuaa

SEQ ID NO: 840538 - RNA, 19 nt, Homo sapiens
  misc_RNA (1)...(19): siRNA sense strand
gaagcaaacguguccuuuc

SEQ ID NO: 840539 - RNA, 19 nt, Homo sapiens
  misc_RNA (1)...(19): siRNA sense strand
uaacuacgaagcccacaaa

SEQ ID NO: 840540 - RNA, 19 nt, Homo sapiens
  misc_RNA (1)...(19): siRNA sense strand
agaccaauaugccguccua

SEQ ID NO: 840541 - RNA, 19 nt, Homo sapiens
  misc_RNA (1)...(19): siRNA sense strand
guacaaaucaaacgaagag

SEQ ID NO: 840542 - RNA, 19 nt, Homo sapiens
  misc_RNA (1)...(19): siRNA sense strand
ucaccucccuucacugguu

SEQ ID NO: 840543 - RNA, 19 nt, Homo sapiens
  misc_RNA (1)...(19): siRNA sense strand
ugagaagacugaggaguuc

SEQ ID NO: 840544 - RNA, 19 nt, Homo sapiens
  misc_RNA (1)...(19): siRNA sense strand
ccacugagcgugaagaaag

SEQ ID NO: 840545 - RNA, 19 nt, Homo sapiens
  misc_RNA (1)...(19): siRNA sense strand
caaaaggggugaucuacga

SEQ ID NO: 840546 - RNA, 19 nt, Homo sapiens
  misc_RNA (1)...(19): siRNA sense strand
gcaaacacucgcuaaccaa

SEQ ID NO: 840547 - RNA, 19 nt, Homo sapiens
  misc_RNA (1)...(19): siRNA sense strand
gaaagugagcaaagagaca

SEQ ID NO: 840548 - RNA, 19 nt, Homo sapiens
  misc_RNA (1)...(19): siRNA sense strand
ggaagcaaacguguccuuu

SEQ ID NO: 840549 - RNA, 19 nt, Homo sapiens
  misc_RNA (1)...(19): siRNA sense strand
uggcagagauggcccaauc

SEQ ID NO: 840550 - RNA, 19 nt, Homo sapiens
  misc_RNA (1)...(19): siRNA sense strand
cacaugggcuggagaugga

SEQ ID NO: 840551 - RNA, 19 nt, Homo sapiens
  misc_RNA (1)...(19): siRNA sense strand
ggacucggacucagacuca

SEQ ID NO: 840552 - RNA, 19 nt, Homo sapiens
  misc_RNA (1)...(19): siRNA sense strand
ugagagugccugugacauu

SEQ ID NO: 840553 - RNA, 19 nt, Homo sapiens
  misc_RNA (1)...(19): siRNA sense strand
gaagacaggagagcgaaga

SEQ ID NO: 840554 - RNA, 19 nt, Homo sapiens
  misc_RNA (1)...(19): siRNA sense strand
cacaccagcuccuuugaga

SEQ ID NO: 840555 - RNA, 19 nt, Homo sapiens
  misc_RNA (1)...(19): siRNA sense strand
caccagcuccuuugagaaa

SEQ ID NO: 840556 - RNA, 19 nt, Homo sapiens
  misc_RNA (1)...(19): siRNA sense strand
acaaaucaaacgaagagua

SEQ ID NO: 840557 - RNA, 19 nt, Homo sapiens
  misc_RNA (1)...(19): siRNA sense strand
caaagggaguacugagucu

SEQ ID NO: 840558 - RNA, 19 nt, Homo sapiens
  misc_RNA (1)...(19): siRNA sense strand
caaacacucgcuaaccaaa

SEQ ID NO: 840559 - RNA, 19 nt, Homo sapiens
  misc_RNA (1)...(19): siRNA sense strand
gagcuuucccaacuccaua

SEQ ID NO: 840560 - RNA, 19 nt, Homo sapiens
  misc_RNA (1)...(19): siRNA sense strand
gaccaagaaggguuugaaa

SEQ ID NO: 840561 - RNA, 19 nt, Homo sapiens
  misc_RNA (1)...(19): siRNA sense strand
ugaagacacccacacgauu

SEQ ID NO: 840562 - RNA, 19 nt, Homo sapiens
  misc_RNA (1)...(19): siRNA sense strand
gaugagcuguccagaccau

SEQ ID NO: 840563 - RNA, 19 nt, Homo sapiens
  misc_RNA (1)...(19): siRNA sense strand
gaaucugacuaagcacaug

SEQ ID NO: 840564 - RNA, 19 nt, Homo sapiens
  misc_RNA (1)...(19): siRNA sense strand
aagggaaucugacuaagca

SEQ ID NO: 840565 - RNA, 19 nt, Homo sapiens
  misc_RNA (1)...(19): siRNA sense strand
ccaggacagucuccagaau

SEQ ID NO: 840566 - RNA, 19 nt, Homo sapiens
  misc_RNA (1)...(19): siRNA sense strand
caugagccguggucccaaa

SEQ ID NO: 840567 - RNA, 19 nt, Homo sapiens
  misc_RNA (1)...(19): siRNA sense strand
gccuugaacuuaccaugga

SEQ ID NO: 840568 - RNA, 19 nt, Homo sapiens
  misc_RNA (1)...(19): siRNA sense strand
ugcaagcacugucacuuug

SEQ ID NO: 840569 - RNA, 19 nt, Homo sapiens
  misc_RNA (1)...(19): siRNA sense strand
gagggaaauauguuuguga

SEQ ID NO: 840570 - RNA, 19 nt, Homo sapiens
  misc_RNA (1)...(19): siRNA sense strand
uagcuagaguggagaagga

SEQ ID NO: 840571 - RNA, 19 nt, Homo sapiens
  misc_RNA (1)...(19): siRNA sense strand
agaaagaagauuccaagga

SEQ ID NO: 840572 - RNA, 19 nt, Homo sapiens
  misc_RNA (1)...(19): siRNA sense strand
gggaagaggccagagaaau

SEQ ID NO: 840573 - RNA, 19 nt, Homo sapiens
  misc_RNA (1)...(19): siRNA sense strand
gcaaagagauccaucagaa

SEQ ID NO: 840574 - RNA, 19 nt, Homo sapiens
  misc_RNA (1)...(19): siRNA sense strand
gagauaagcaccucaagua

SEQ ID NO: 840575 - RNA, 19 nt, Homo sapiens
  misc_RNA (1)...(19): siRNA sense strand
ggaacuggauguccuaugu

SEQ ID NO: 840576 - RNA, 19 nt, Homo sapiens
  misc_RNA (1)...(19): siRNA sense strand
uaugagagcugcaaagaga

SEQ ID NO: 840577 - RNA, 19 nt, Homo sapiens
  misc_RNA (1)...(19): siRNA sense strand
gcagaaggcuacagaugug

SEQ ID NO: 840578 - RNA, 19 nt, Homo sapiens
  misc_RNA (1)...(19): siRNA sense strand
ugaaagaugugggaaggua

SEQ ID NO: 840579 - RNA, 19 nt, Homo sapiens
  misc_RNA (1)...(19): siRNA sense strand
ggacaagggcgauaggaaa

SEQ ID NO: 840580 - RNA, 19 nt, Homo sapiens
  misc_RNA (1)...(19): siRNA sense strand
gauaaagacucccuucaac

SEQ ID NO: 840581 - RNA, 19 nt, Homo sapiens
  misc_RNA (1)...(19): siRNA sense strand
cuacagaugugaaagaugu

SEQ ID NO: 840582 - RNA, 19 nt, Homo sapiens
  misc_RNA (1)...(19): siRNA sense strand
caagggcgauaggaaauuu

SEQ ID NO: 840583 - RNA, 19 nt, Homo sapiens
  misc_RNA (1)...(19): siRNA sense strand
ccagugaagugaagaccua

SEQ ID NO: 840584 - RNA, 19 nt, Homo sapiens
  misc_RNA (1)...(19): siRNA sense strand
gcaccggccucacaagugu

SEQ ID NO: 840585 - RNA, 19 nt, Homo sapiens
  misc_RNA (1)...(19): siRNA sense strand
ucacaaguguucuacaugu

SEQ ID NO: 840586 - RNA, 19 nt, Homo sapiens
  misc_RNA (1)...(19): siRNA sense strand
guucacagccuccagcaua

SEQ ID NO: 840587 - RNA, 19 nt, Homo sapiens
  misc_RNA (1)...(19): siRNA sense strand
ggauaaagacucccuucaa

SEQ ID NO: 840588 - RNA, 19 nt, Homo sapiens
  misc_RNA (1)...(19): siRNA sense strand
agacugcuaugagaaauuu

SEQ ID NO: 840589 - RNA, 19 nt, Homo sapiens
  misc_RNA (1)...(19): siRNA sense strand
caaguacugugguaaaucu

SEQ ID NO: 840590 - RNA, 19 nt, Homo sapiens
  misc_RNA (1)...(19): siRNA sense strand
gaaguuucaugaagacuac

SEQ ID NO: 840591 - RNA, 19 nt, Homo sapiens
  misc_RNA (1)...(19): siRNA sense strand
gaucugggccaccaaauca

SEQ ID NO: 840592 - RNA, 19 nt, Homo sapiens
  misc_RNA (1)...(19): siRNA sense strand
uaaagacucccuucaacuu

SEQ ID NO: 840593 - RNA, 19 nt, Homo sapiens
  misc_RNA (1)...(19): siRNA sense strand
ggaccugacacuuuaauuc

SEQ ID NO: 840594 - RNA, 19 nt, Homo sapiens
  misc_RNA (1)...(19): siRNA sense strand
gaagaucugggccaccaaa

SEQ ID NO: 840595 - RNA, 19 nt, Homo sapiens
  misc_RNA (1)...(19): siRNA sense strand
gacgauggcugcucaugca

SEQ ID NO: 840596 - RNA, 19 nt, Homo sapiens
  misc_RNA (1)...(19): siRNA sense strand
gguguguucugcaguaguu

SEQ ID NO: 840597 - RNA, 19 nt, Homo sapiens
  misc_RNA (1)...(19): siRNA sense strand
ucuacgaucugcccuggua

SEQ ID NO: 840598 - RNA, 19 nt, Homo sapiens
  misc_RNA (1)...(19): siRNA sense strand
cucaaacucuggauaaaga

SEQ ID NO: 840599 - RNA, 19 nt, Homo sapiens
  misc_RNA (1)...(19): siRNA sense strand
gauaagcaccucaaguaca

SEQ ID NO: 840600 - RNA, 19 nt, Homo sapiens
  misc_RNA (1)...(19): siRNA sense strand
ggagacaauucugugaugu

SEQ ID NO: 840601 - RNA, 19 nt, Homo sapiens
  misc_RNA (1)...(19): siRNA sense strand
gagaguggcccguguugug

SEQ ID NO: 840602 - RNA, 19 nt, Homo sapiens
  misc_RNA (1)...(19): siRNA sense strand
uauggagacugcuaugaga

SEQ ID NO: 840603 - RNA, 19 nt, Homo sapiens
  misc_RNA (1)...(19): siRNA sense strand
gaagaccuacggagacaau

SEQ ID NO: 840604 - RNA, 19 nt, Homo sapiens
  misc_RNA (1)...(19): siRNA sense strand
ugcggaugcuucucuguua

SEQ ID NO: 840605 - RNA, 19 nt, Homo sapiens
  misc_RNA (1)...(19): siRNA sense strand
agacagcucuggaucugau

SEQ ID NO: 840606 - RNA, 19 nt, Homo sapiens
  misc_RNA (1)...(19): siRNA sense strand
ggagacugcuaugagaaau

SEQ ID NO: 840607 - RNA, 19 nt, Homo sapiens
  misc_RNA (1)...(19): siRNA sense strand
gagaagcaccggccucaca

SEQ ID NO: 840608 - RNA, 19 nt, Homo sapiens
  misc_RNA (1)...(19): siRNA sense strand
uuguggaccugacacuuua

SEQ ID NO: 840609 - RNA, 19 nt, Homo sapiens
  misc_RNA (1)...(19): siRNA sense strand
gauguccuaugucaacugu

SEQ ID NO: 840610 - RNA, 19 nt, Homo sapiens
  misc_RNA (1)...(19): siRNA sense strand
gaccugcacuucguucugu

SEQ ID NO: 840611 - RNA, 19 nt, Homo sapiens
  misc_RNA (1)...(19): siRNA sense strand
gaccauaccagugugugua

SEQ ID NO: 840612 - RNA, 19 nt, Homo sapiens
  misc_RNA (1)...(19): siRNA sense strand
gaaggcuacagaugugaaa

SEQ ID NO: 840613 - RNA, 19 nt, Homo sapiens
  misc_RNA (1)...(19): siRNA sense strand
caucugggcccucugaaga

SEQ ID NO: 840614 - RNA, 19 nt, Homo sapiens
  misc_RNA (1)...(19): siRNA sense strand
ggucauuugagccacuuua

SEQ ID NO: 840615 - RNA, 19 nt, Homo sapiens
  misc_RNA (1)...(19): siRNA sense strand
agacagaccauaccagugu

SEQ ID NO: 840616 - RNA, 19 nt, Homo sapiens
  misc_RNA (1)...(19): siRNA sense strand
cuuugaagauggucauuug

SEQ ID NO: 840617 - RNA, 19 nt, Homo sapiens
  misc_RNA (1)...(19): siRNA sense strand
aaaugcaaguacuguggua

SEQ ID NO: 840618 - RNA, 19 nt, Homo sapiens
  misc_RNA (1)...(19): siRNA sense strand
gaaagaugugggaagguau

SEQ ID NO: 840619 - RNA, 19 nt, Homo sapiens
  misc_RNA (1)...(19): siRNA sense strand
guuguggaccugacacuuu

SEQ ID NO: 840620 - RNA, 19 nt, Homo sapiens
  misc_RNA (1)...(19): siRNA sense strand
gucagaggauggucccaaa

SEQ ID NO: 840621 - RNA, 19 nt, Homo sapiens
  misc_RNA (1)...(19): siRNA sense strand
uuggugaagucccacauuu

SEQ ID NO: 840622 - RNA, 19 nt, Homo sapiens
  misc_RNA (1)...(19): siRNA sense strand
ccucacaaguguucuacau

SEQ ID NO: 840623 - RNA, 19 nt, Homo sapiens
  misc_RNA (1)...(19): siRNA sense strand
aaauuucccuguucucucu

SEQ ID NO: 840624 - RNA, 19 nt, Homo sapiens
  misc_RNA (1)...(19): siRNA sense strand
gacaagggcgauaggaaau

SEQ ID NO: 840625 - RNA, 19 nt, Homo sapiens
  misc_RNA (1)...(19): siRNA sense strand
ccaaggagcagaaccuagu

SEQ ID NO: 840626 - RNA, 19 nt, Homo sapiens
  misc_RNA (1)...(19): siRNA sense strand
cauuugagccacuuuauag

SEQ ID NO: 840627 - RNA, 19 nt, Homo sapiens
  misc_RNA (1)...(19): siRNA sense strand
cggagacaauucugugaug

SEQ ID NO: 840628 - RNA, 19 nt, Homo sapiens
  misc_RNA (1)...(19): siRNA sense strand
ggucaaugccagugaagug

SEQ ID NO: 840629 - RNA, 19 nt, Homo sapiens
  misc_RNA (1)...(19): siRNA sense strand
ucucagaucaagaaacauu

SEQ ID NO: 840630 - RNA, 19 nt, Homo sapiens
  misc_RNA (1)...(19): siRNA sense strand
ucauuugagccacuuuaua

SEQ ID NO: 840631 - RNA, 19 nt, Homo sapiens
  misc_RNA (1)...(19): siRNA sense strand
gugaagaccuacggagaca

SEQ ID NO: 840632 - RNA, 19 nt, Homo sapiens
  misc_RNA (1)...(19): siRNA sense strand
gggagccucucuacgaucu

SEQ ID NO: 840633 - RNA, 19 nt, Homo sapiens
  misc_RNA (1)...(19): siRNA sense strand
uauggacacuacagaaaca

SEQ ID NO: 840634 - RNA, 19 nt, Homo sapiens
  misc_RNA (1)...(19): siRNA sense strand
gucaagggcauauauuuua

SEQ ID NO: 840635 - RNA, 19 nt, Homo sapiens
  misc_RNA (1)...(19): siRNA sense strand
caguguguguauuguacua

SEQ ID NO: 840636 - RNA, 19 nt, Homo sapiens
  misc_RNA (1)...(19): siRNA sense strand
caaacccuccaaccaagaa

SEQ ID NO: 840637 - RNA, 19 nt, Homo sapiens
  misc_RNA (1)...(19): siRNA sense strand
gcaaguacugugguaaauc

SEQ ID NO: 840638 - RNA, 19 nt, Homo sapiens
  misc_RNA (1)...(19): siRNA sense strand
aagagcuccuuguguggua

SEQ ID NO: 840639 - RNA, 19 nt, Homo sapiens
  misc_RNA (1)...(19): siRNA sense strand
gagacugcuaugagaaauu

SEQ ID NO: 840640 - RNA, 19 nt, Homo sapiens
  misc_RNA (1)...(19): siRNA sense strand
guacugugguaaaucuuuu

SEQ ID NO: 840641 - RNA, 19 nt, Homo sapiens
  misc_RNA (1)...(19): siRNA sense strand
gagcagcagccacgaguac

SEQ ID NO: 840642 - RNA, 19 nt, Homo sapiens
  misc_RNA (1)...(19): siRNA sense strand
ccuauggacacuacagaaa

SEQ ID NO: 840643 - RNA, 19 nt, Homo sapiens
  misc_RNA (1)...(19): siRNA sense strand
gugucaagggcauauauuu

SEQ ID NO: 840644 - RNA, 19 nt, Homo sapiens
  misc_RNA (1)...(19): siRNA sense strand
cgccaaaggagucagguuu

SEQ ID NO: 840645 - RNA, 19 nt, Homo sapiens
  misc_RNA (1)...(19): siRNA sense strand
ggaggaggaccugcacuuc

SEQ ID NO: 840646 - RNA, 19 nt, Homo sapiens
  misc_RNA (1)...(19): siRNA sense strand
gagacaauucugugaugug

SEQ ID NO: 840647 - RNA, 19 nt, Homo sapiens
  misc_RNA (1)...(19): siRNA sense strand
aaagaugugggaagguauu

SEQ ID NO: 840648 - RNA, 19 nt, Homo sapiens
  misc_RNA (1)...(19): siRNA sense strand
gaacuggauguccuauguc

SEQ ID NO: 840649 - RNA, 19 nt, Homo sapiens
  misc_RNA (1)...(19): siRNA sense strand
gagccacuuuauagaugga

SEQ ID NO: 840650 - RNA, 19 nt, Homo sapiens
  misc_RNA (1)...(19): siRNA sense strand
caagguaaaguggucaaug

SEQ ID NO: 840651 - RNA, 19 nt, Homo sapiens
  misc_RNA (1)...(19): siRNA sense strand
gaugugggagaucuuugaa

SEQ ID NO: 840652 - RNA, 19 nt, Homo sapiens
  misc_RNA (1)...(19): siRNA sense strand
aagguaaaguggucaaugc

SEQ ID NO: 840653 - RNA, 19 nt, Homo sapiens
  misc_RNA (1)...(19): siRNA sense strand
uugagccacuuuauagaug

SEQ ID NO: 840654 - RNA, 19 nt, Homo sapiens
  misc_RNA (1)...(19): siRNA sense strand
aaauguuucucucagucuu

SEQ ID NO: 840655 - RNA, 19 nt, Homo sapiens
  misc_RNA (1)...(19): siRNA sense strand
ggcuacagaugugaaagau

SEQ ID NO: 840656 - RNA, 19 nt, Homo sapiens
  misc_RNA (1)...(19): siRNA sense strand
uuugguguguucugcagua

SEQ ID NO: 840657 - RNA, 19 nt, Homo sapiens
  misc_RNA (1)...(19): siRNA sense strand
ucucagucuuccagccuaa

SEQ ID NO: 840658 - RNA, 19 nt, Homo sapiens
  misc_RNA (1)...(19): siRNA sense strand
gaugugggaagguauuuac

SEQ ID NO: 840659 - RNA, 19 nt, Homo sapiens
  misc_RNA (1)...(19): siRNA sense strand
agagauccaucagaaccaa

SEQ ID NO: 840660 - RNA, 19 nt, Homo sapiens
  misc_RNA (1)...(19): siRNA sense strand
ccuaguugcugugcagugu

SEQ ID NO: 840661 - RNA, 19 nt, Homo sapiens
  misc_RNA (1)...(19): siRNA sense strand
caaugccagugaagugaag

SEQ ID NO: 840662 - RNA, 19 nt, Homo sapiens
  misc_RNA (1)...(19): siRNA sense strand
gcagacgguguuuggugaa

SEQ ID NO: 840663 - RNA, 19 nt, Homo sapiens
  misc_RNA (1)...(19): siRNA sense strand
acauucuacucccacauga

SEQ ID NO: 840664 - RNA, 19 nt, Homo sapiens
  misc_RNA (1)...(19): siRNA sense strand
guauggagacugcuaugag

SEQ ID NO: 840665 - RNA, 19 nt, Homo sapiens
  misc_RNA (1)...(19): siRNA sense strand
gguauggagacugcuauga

SEQ ID NO: 840666 - RNA, 19 nt, Homo sapiens
  misc_RNA (1)...(19): siRNA sense strand
gcagugucaagggcauaua

SEQ ID NO: 840667 - RNA, 19 nt, Homo sapiens
  misc_RNA (1)...(19): siRNA sense strand
caaggagcagaaccuaguu

SEQ ID NO: 840668 - RNA, 19 nt, Homo sapiens
  misc_RNA (1)...(19): siRNA sense strand
cugauucucuuccucaaac

SEQ ID NO: 840669 - RNA, 19 nt, Homo sapiens
  misc_RNA (1)...(19): siRNA sense strand
gcggaugcuucucuguuac

SEQ ID NO: 840670 - RNA, 19 nt, Homo sapiens
  misc_RNA (1)...(19): siRNA sense strand
ccaaacccuccaaccaaga

SEQ ID NO: 840671 - RNA, 19 nt, Homo sapiens
  misc_RNA (1)...(19): siRNA sense strand
gacgguguuuggugaaguc

SEQ ID NO: 840672 - RNA, 19 nt, Homo sapiens
  misc_RNA (1)...(19): siRNA sense strand
aaagacucccuucaacuuc

SEQ ID NO: 840673 - RNA, 19 nt, Homo sapiens
  misc_RNA (1)...(19): siRNA sense strand
gaacaaugaugaaggcaaa

SEQ ID NO: 840674 - RNA, 19 nt, Homo sapiens
  misc_RNA (1)...(19): siRNA sense strand
gagaggagcuggagaagag

SEQ ID NO: 840675 - RNA, 19 nt, Homo sapiens
  misc_RNA (1)...(19): siRNA sense strand
ccacaggcauugaggguaa

SEQ ID NO: 840676 - RNA, 19 nt, Homo sapiens
  misc_RNA (1)...(19): siRNA sense strand
gaagaggagggaacaauga

SEQ ID NO: 840677 - RNA, 19 nt, Homo sapiens
  misc_RNA (1)...(19): siRNA sense strand
gaaggaggaggaagagauu

SEQ ID NO: 840678 - RNA, 19 nt, Homo sapiens
  misc_RNA (1)...(19): siRNA sense strand
guacaucccuuccauuuug

SEQ ID NO: 840679 - RNA, 19 nt, Homo sapiens
  misc_RNA (1)...(19): siRNA sense strand
ggaagaggagggaacaaug

SEQ ID NO: 840680 - RNA, 19 nt, Homo sapiens
  misc_RNA (1)...(19): siRNA sense strand
gaggagggaacaaugauga

SEQ ID NO: 840681 - RNA, 19 nt, Homo sapiens
  misc_RNA (1)...(19): siRNA sense strand
ggagaagaguggccauggu

SEQ ID NO: 840682 - RNA, 19 nt, Homo sapiens
  misc_RNA (1)...(19): siRNA sense strand
ggaaagggcaguggaaugg

SEQ ID NO: 840683 - RNA, 19 nt, Homo sapiens
  misc_RNA (1)...(19): siRNA sense strand
ggaagagauuagugagaca

SEQ ID NO: 840684 - RNA, 19 nt, Homo sapiens
  misc_RNA (1)...(19): siRNA sense strand
gagaacugguuggcccuuu

SEQ ID NO: 840685 - RNA, 19 nt, Homo sapiens
  misc_RNA (1)...(19): siRNA sense strand
caguacaucccuuccauuu

SEQ ID NO: 840686 - RNA, 19 nt, Homo sapiens
  misc_RNA (1)...(19): siRNA sense strand
ggaagcaucugaaaagcau

SEQ ID NO: 840687 - RNA, 19 nt, Homo sapiens
  misc_RNA (1)...(19): siRNA sense strand
gaggaagagauuagugaga

SEQ ID NO: 840688 - RNA, 19 nt, Homo sapiens
  misc_RNA (1)...(19): siRNA sense strand
ggaaggugagggcugagaa

SEQ ID NO: 840689 - RNA, 19 nt, Homo sapiens
  misc_RNA (1)...(19): siRNA sense strand
gcacuguggaagcaucuga

SEQ ID NO: 840690 - RNA, 19 nt, Homo sapiens
  misc_RNA (1)...(19): siRNA sense strand
gcaguacaucccuuccauu

SEQ ID NO: 840691 - RNA, 19 nt, Homo sapiens
  misc_RNA (1)...(19): siRNA sense strand
gggaaagggcaguggaaug

SEQ ID NO: 840692 - RNA, 19 nt, Homo sapiens
  misc_RNA (1)...(19): siRNA sense strand
acagagaggagcuggagaa

SEQ ID NO: 840693 - RNA, 19 nt, Homo sapiens
  misc_RNA (1)...(19): siRNA sense strand
gcaccaucccaaccaguau

SEQ ID NO: 840694 - RNA, 19 nt, Homo sapiens
  misc_RNA (1)...(19): siRNA sense strand
gagggaaagggcaguggaa

SEQ ID NO: 840695 - RNA, 19 nt, Homo sapiens
  misc_RNA (1)...(19): siRNA sense strand
gaaaaggaggugcuuagga

SEQ ID NO: 840696 - RNA, 19 nt, Homo sapiens
  misc_RNA (1)...(19): siRNA sense strand
ugaaaagcaugcacagaga

SEQ ID NO: 840697 - RNA, 19 nt, Homo sapiens
  misc_RNA (1)...(19): siRNA sense strand
ugaaggaggaggaagagau

SEQ ID NO: 840698 - RNA, 19 nt, Homo sapiens
  misc_RNA (1)...(19): siRNA sense strand
aaagggccauccuggagau

SEQ ID NO: 840699 - RNA, 19 nt, Homo sapiens
  misc_RNA (1)...(19): siRNA sense strand
ggcaccaucccaaccagua

SEQ ID NO: 840700 - RNA, 19 nt, Homo sapiens
  misc_RNA (1)...(19): siRNA sense strand
ugagacaggagaacugguu

SEQ ID NO: 840701 - RNA, 19 nt, Homo sapiens
  misc_RNA (1)...(19): siRNA sense strand
gaaggugagggcugagaag

SEQ ID NO: 840702 - RNA, 19 nt, Homo sapiens
  misc_RNA (1)...(19): siRNA sense strand
ucugaggcaugggaauauu

SEQ ID NO: 840703 - RNA, 19 nt, Homo sapiens
  misc_RNA (1)...(19): siRNA sense strand
gaggaggaagagauuagug

SEQ ID NO: 840704 - RNA, 19 nt, Homo sapiens
  misc_RNA (1)...(19): siRNA sense strand
ucucugaggcaugggaaua

SEQ ID NO: 840705 - RNA, 19 nt, Homo sapiens
  misc_RNA (1)...(19): siRNA sense strand
gaaggcaaaaggggacuua

SEQ ID NO: 840706 - RNA, 19 nt, Homo sapiens
  misc_RNA (1)...(19): siRNA sense strand
uccuggagaugaaguggaa

SEQ ID NO: 840707 - RNA, 19 nt, Homo sapiens
  misc_RNA (1)...(19): siRNA sense strand
gcaaaaggggacuuagaga

SEQ ID NO: 840708 - RNA, 19 nt, Homo sapiens
  misc_RNA (1)...(19): siRNA sense strand
ggagggaacaaugaugaag

SEQ ID NO: 840709 - RNA, 19 nt, Homo sapiens
  misc_RNA (1)...(19): siRNA sense strand
caugccagcgggagaaaga

SEQ ID NO: 840710 - RNA, 19 nt, Homo sapiens
  misc_RNA (1)...(19): siRNA sense strand
aaaggggacuuagagauga

SEQ ID NO: 840711 - RNA, 19 nt, Homo sapiens
  misc_RNA (1)...(19): siRNA sense strand
gcuaugcccacuccaaugc

SEQ ID NO: 840712 - RNA, 19 nt, Homo sapiens
  misc_RNA (1)...(19): siRNA sense strand
gcauguaccagauccagua

SEQ ID NO: 840713 - RNA, 19 nt, Homo sapiens
  misc_RNA (1)...(19): siRNA sense strand
ugacaggccugcugcaucu

SEQ ID NO: 840714 - RNA, 19 nt, Homo sapiens
  misc_RNA (1)...(19): siRNA sense strand
ggccacagcugcucuuguc

SEQ ID NO: 840715 - RNA, 19 nt, Homo sapiens
  misc_RNA (1)...(19): siRNA sense strand
gcaaccggcugaccucacu

SEQ ID NO: 840716 - RNA, 19 nt, Homo sapiens
  misc_RNA (1)...(19): siRNA sense strand
ccaaccgccugaccacaau

SEQ ID NO: 840717 - RNA, 19 nt, Homo sapiens
  misc_RNA (1)...(19): siRNA sense strand
caacuugcgccaccucauc

SEQ ID NO: 840718 - RNA, 19 nt, Homo sapiens
  misc_RNA (1)...(19): siRNA sense strand
caucguagccucgguacug

SEQ ID NO: 840719 - RNA, 19 nt, Homo sapiens
  misc_RNA (1)...(19): siRNA sense strand
ggccggaccuacgaucugu

SEQ ID NO: 840720 - RNA, 19 nt, Homo sapiens
  misc_RNA (1)...(19): siRNA sense strand
acaaccugcuggcuucugu

SEQ ID NO: 840721 - RNA, 19 nt, Homo sapiens
  misc_RNA (1)...(19): siRNA sense strand
cccaccaccuccucagcua

SEQ ID NO: 840722 - RNA, 19 nt, Homo sapiens
  misc_RNA (1)...(19): siRNA sense strand
gguacuggucuucaucuuc

SEQ ID NO: 840723 - RNA, 19 nt, Homo sapiens
  misc_RNA (1)...(19): siRNA sense strand
uaccagauccaguacaaca

SEQ ID NO: 840724 - RNA, 19 nt, Homo sapiens
  misc_RNA (1)...(19): siRNA sense strand
cgaccuggccaacaugaca

SEQ ID NO: 840725 - RNA, 19 nt, Homo sapiens
  misc_RNA (1)...(19): siRNA sense strand
gcauccgcauguaccagau

SEQ ID NO: 840726 - RNA, 19 nt, Homo sapiens
  misc_RNA (1)...(19): siRNA sense strand
ggacggagcucccagauuc

SEQ ID NO: 840727 - RNA, 19 nt, Homo sapiens
  misc_RNA (1)...(19): siRNA sense strand
gcacaaagcuuggcagaag

SEQ ID NO: 840728 - RNA, 19 nt, Homo sapiens
  misc_RNA (1)...(19): siRNA sense strand
gaaaucgguuguuugaaga

SEQ ID NO: 840729 - RNA, 19 nt, Homo sapiens
  misc_RNA (1)...(19): siRNA sense strand
gaagauggcaaugaaauaa

SEQ ID NO: 840730 - RNA, 19 nt, Homo sapiens
  misc_RNA (1)...(19): siRNA sense strand
uaauggagcugcccuuuga

SEQ ID NO: 840731 - RNA, 19 nt, Homo sapiens
  misc_RNA (1)...(19): siRNA sense strand
gcagaaaucgguuguuuga

SEQ ID NO: 840732 - RNA, 19 nt, Homo sapiens
  misc_RNA (1)...(19): siRNA sense strand
ugaagaagcucacucuguu

SEQ ID NO: 840733 - RNA, 19 nt, Homo sapiens
  misc_RNA (1)...(19): siRNA sense strand
ggagcugcccuuugaauua

SEQ ID NO: 840734 - RNA, 19 nt, Homo sapiens
  misc_RNA (1)...(19): siRNA sense strand
gagcugcccuuugaauuaa

SEQ ID NO: 840735 - RNA, 19 nt, Homo sapiens
  misc_RNA (1)...(19): siRNA sense strand
gagaaucuguucccagcua

SEQ ID NO: 840736 - RNA, 19 nt, Homo sapiens
  misc_RNA (1)...(19): siRNA sense strand
gaagagcauuccuccagaa

SEQ ID NO: 840737 - RNA, 19 nt, Homo sapiens
  misc_RNA (1)...(19): siRNA sense strand
guagauaucucagcaaaca

SEQ ID NO: 840738 - RNA, 19 nt, Homo sapiens
  misc_RNA (1)...(19): siRNA sense strand
gcagugcguuuguguuuga

SEQ ID NO: 840739 - RNA, 19 nt, Homo sapiens
  misc_RNA (1)...(19): siRNA sense strand
gcaaugaaauaauggaaag

SEQ ID NO: 840740 - RNA, 19 nt, Homo sapiens
  misc_RNA (1)...(19): siRNA sense strand
gaaaggaacacucucacaa

SEQ ID NO: 840741 - RNA, 19 nt, Homo sapiens
  misc_RNA (1)...(19): siRNA sense strand
gaagaagcucacucuguua

SEQ ID NO: 840742 - RNA, 19 nt, Homo sapiens
  misc_RNA (1)...(19): siRNA sense strand
cagcagaaaucgguuguuu

SEQ ID NO: 840743 - RNA, 19 nt, Homo sapiens
  misc_RNA (1)...(19): siRNA sense strand
ugaccuaccuucccuauuc

SEQ ID NO: 840744 - RNA, 19 nt, Homo sapiens
  misc_RNA (1)...(19): siRNA sense strand
caauguggguuucaacuau

SEQ ID NO: 840745 - RNA, 19 nt, Homo sapiens
  misc_RNA (1)...(19): siRNA sense strand
gagcagugcguuuguguuu

SEQ ID NO: 840746 - RNA, 19 nt, Homo sapiens
  misc_RNA (1)...(19): siRNA sense strand
aagaauggcuucauagaca

SEQ ID NO: 840747 - RNA, 19 nt, Homo sapiens
  misc_RNA (1)...(19): siRNA sense strand
cauaagcaauaccuugauu

SEQ ID NO: 840748 - RNA, 19 nt, Homo sapiens
  misc_RNA (1)...(19): siRNA sense strand
gaaugguacauaagcaaua

SEQ ID NO: 840749 - RNA, 19 nt, Homo sapiens
  misc_RNA (1)...(19): siRNA sense strand
aaccaaaucucacaucuuc

SEQ ID NO: 840750 - RNA, 19 nt, Homo sapiens
  misc_RNA (1)...(19): siRNA sense strand
gcaagaauggcuucauaga

SEQ ID NO: 840751 - RNA, 19 nt, Homo sapiens
  misc_RNA (1)...(19): siRNA sense strand
ugaagaaccugaaagaacu

SEQ ID NO: 840752 - RNA, 19 nt, Homo sapiens
  misc_RNA (1)...(19): siRNA sense strand
agaaaucgguuguuugaag

SEQ ID NO: 840753 - RNA, 19 nt, Homo sapiens
  misc_RNA (1)...(19): siRNA sense strand
cugcaagaauggcuucaua

SEQ ID NO: 840754 - RNA, 19 nt, Homo sapiens
  misc_RNA (1)...(19): siRNA sense strand
ugaagcaaguuacauuugu

SEQ ID NO: 840755 - RNA, 19 nt, Homo sapiens
  misc_RNA (1)...(19): siRNA sense strand
gaacgggaucgccaacauu

SEQ ID NO: 840756 - RNA, 19 nt, Homo sapiens
  misc_RNA (1)...(19): siRNA sense strand
uagagagacuggauuguuc

SEQ ID NO: 840757 - RNA, 19 nt, Homo sapiens
  misc_RNA (1)...(19): siRNA sense strand
gggaaacucgugucaagaa

SEQ ID NO: 840758 - RNA, 19 nt, Homo sapiens
  misc_RNA (1)...(19): siRNA sense strand
ugaccgaccugccgcaaga

SEQ ID NO: 840759 - RNA, 19 nt, Homo sapiens
  misc_RNA (1)...(19): siRNA sense strand
gaagcucacucuguuaguc

SEQ ID NO: 840760 - RNA, 19 nt, Homo sapiens
  misc_RNA (1)...(19): siRNA sense strand
ugacucauccacaccuuua

SEQ ID NO: 840761 - RNA, 19 nt, Homo sapiens
  misc_RNA (1)...(19): siRNA sense strand
gaagagcgccuuggagaag

SEQ ID NO: 840762 - RNA, 19 nt, Homo sapiens
  misc_RNA (1)...(19): siRNA sense strand
uggaaaggcuugagaagag

SEQ ID NO: 840763 - RNA, 19 nt, Homo sapiens
  misc_RNA (1)...(19): siRNA sense strand
ugaagauggcaaugaaaua

SEQ ID NO: 840764 - RNA, 19 nt, Homo sapiens
  misc_RNA (1)...(19): siRNA sense strand
ucaacuaucugaagagcau

SEQ ID NO: 840765 - RNA, 19 nt, Homo sapiens
  misc_RNA (1)...(19): siRNA sense strand
agacacaccugagagaaug

SEQ ID NO: 840766 - RNA, 19 nt, Homo sapiens
  misc_RNA (1)...(19): siRNA sense strand
uugaagaccuuaaagaaag

SEQ ID NO: 840767 - RNA, 19 nt, Homo sapiens
  misc_RNA (1)...(19): siRNA sense strand
gaaagccuauauugaagac

SEQ ID NO: 840768 - RNA, 19 nt, Homo sapiens
  misc_RNA (1)...(19): siRNA sense strand
gaaguuaugaaagccuaua

SEQ ID NO: 840769 - RNA, 19 nt, Homo sapiens
  misc_RNA (1)...(19): siRNA sense strand
ggaaaucuagaauuaaugg

SEQ ID NO: 840770 - RNA, 19 nt, Homo sapiens
  misc_RNA (1)...(19): siRNA sense strand
gcuguauacugcaagaaug

SEQ ID NO: 840771 - RNA, 19 nt, Homo sapiens
  misc_RNA (1)...(19): siRNA sense strand
guuaugaaagccuauauug

SEQ ID NO: 840772 - RNA, 19 nt, Homo sapiens
  misc_RNA (1)...(19): siRNA sense strand
ggaaacucgugucaagaag

SEQ ID NO: 840773 - RNA, 19 nt, Homo sapiens
  misc_RNA (1)...(19): siRNA sense strand
cugagagaaugguacauaa

SEQ ID NO: 840774 - RNA, 19 nt, Homo sapiens
  misc_RNA (1)...(19): siRNA sense strand
agaguucacuucccaagga

SEQ ID NO: 840775 - RNA, 19 nt, Homo sapiens
  misc_RNA (1)...(19): siRNA sense strand
uggacaagauugaaaggaa

SEQ ID NO: 840776 - RNA, 19 nt, Homo sapiens
  misc_RNA (1)...(19): siRNA sense strand
ggaacuuuguggccgaaug

SEQ ID NO: 840777 - RNA, 19 nt, Homo sapiens
  misc_RNA (1)...(19): siRNA sense strand
ugaagaccuuaaagaaaga

SEQ ID NO: 840778 - RNA, 19 nt, Homo sapiens
  misc_RNA (1)...(19): siRNA sense strand
gaauugggagauugugaaa

SEQ ID NO: 840779 - RNA, 19 nt, Homo sapiens
  misc_RNA (1)...(19): siRNA sense strand
gcucccaacugcccuuugu

SEQ ID NO: 840780 - RNA, 19 nt, Homo sapiens
  misc_RNA (1)...(19): siRNA sense strand
gaaauaauggaaagugaac

SEQ ID NO: 840781 - RNA, 19 nt, Homo sapiens
  misc_RNA (1)...(19): siRNA sense strand
gauaaugcccaaugugaag

SEQ ID NO: 840782 - RNA, 19 nt, Homo sapiens
  misc_RNA (1)...(19): siRNA sense strand
gaaccugaaagaacucaau

SEQ ID NO: 840783 - RNA, 19 nt, Homo sapiens
  misc_RNA (1)...(19): siRNA sense strand
cgaccugccgcaagauaua

SEQ ID NO: 840784 - RNA, 19 nt, Homo sapiens
  misc_RNA (1)...(19): siRNA sense strand
aaagaaagagaaucuguuc

SEQ ID NO: 840785 - RNA, 19 nt, Homo sapiens
  misc_RNA (1)...(19): siRNA sense strand
gugggaaacucgugucaag

SEQ ID NO: 840786 - RNA, 19 nt, Homo sapiens
  misc_RNA (1)...(19): siRNA sense strand
gagaaugguacauaagcaa

SEQ ID NO: 840787 - RNA, 19 nt, Homo sapiens
  misc_RNA (1)...(19): siRNA sense strand
gcguuuguguuugaacuuu

SEQ ID NO: 840788 - RNA, 19 nt, Homo sapiens
  misc_RNA (1)...(19): siRNA sense strand
agauggcaaugaaauaaug

SEQ ID NO: 840789 - RNA, 19 nt, Homo sapiens
  misc_RNA (1)...(19): siRNA sense strand
ggagcucccagauucauug

SEQ ID NO: 840790 - RNA, 19 nt, Homo sapiens
  misc_RNA (1)...(19): siRNA sense strand
agacuggauuguucuggaa

SEQ ID NO: 840791 - RNA, 19 nt, Homo sapiens
  misc_RNA (1)...(19): siRNA sense strand
uaagcaauaccuugauuca

SEQ ID NO: 840792 - RNA, 19 nt, Homo sapiens
  misc_RNA (1)...(19): siRNA sense strand
gaugagaauucuggaucug

SEQ ID NO: 840793 - RNA, 19 nt, Homo sapiens
  misc_RNA (1)...(19): siRNA sense strand
uaaaggaggaguggaacuu

SEQ ID NO: 840794 - RNA, 19 nt, Homo sapiens
  misc_RNA (1)...(19): siRNA sense strand
gaaucuguucccagcuaua

SEQ ID NO: 840795 - RNA, 19 nt, Homo sapiens
  misc_RNA (1)...(19): siRNA sense strand
uuggauaucagcagcaaua

SEQ ID NO: 840796 - RNA, 19 nt, Homo sapiens
  misc_RNA (1)...(19): siRNA sense strand
cacaaagcuuggcagaaga

SEQ ID NO: 840797 - RNA, 19 nt, Homo sapiens
  misc_RNA (1)...(19): siRNA sense strand
gcagacacaccugagagaa

SEQ ID NO: 840798 - RNA, 19 nt, Homo sapiens
  misc_RNA (1)...(19): siRNA sense strand
aaacucgugucaagaagca

SEQ ID NO: 840799 - RNA, 19 nt, Homo sapiens
  misc_RNA (1)...(19): siRNA sense strand
ccugagagaaugguacaua

SEQ ID NO: 840800 - RNA, 19 nt, Homo sapiens
  misc_RNA (1)...(19): siRNA sense strand
gugaagauggcaaugaaau

SEQ ID NO: 840801 - RNA, 19 nt, Homo sapiens
  misc_RNA (1)...(19): siRNA sense strand
ugucgaauuugcagugguu

SEQ ID NO: 840802 - RNA, 19 nt, Homo sapiens
  misc_RNA (1)...(19): siRNA sense strand
ucaauguggguuucaacua

SEQ ID NO: 840803 - RNA, 19 nt, Homo sapiens
  misc_RNA (1)...(19): siRNA sense strand
ugaacgggaucgccaacau

SEQ ID NO: 840804 - RNA, 19 nt, Homo sapiens
  misc_RNA (1)...(19): siRNA sense strand
gaagaaggagguggaaagg

SEQ ID NO: 840805 - RNA, 19 nt, Homo sapiens
  misc_RNA (1)...(19): siRNA sense strand
aaggaggaguggaacuuug

SEQ ID NO: 840806 - RNA, 19 nt, Homo sapiens
  misc_RNA (1)...(19): siRNA sense strand
ggcaaugaaauaauggaaa

SEQ ID NO: 840807 - RNA, 19 nt, Homo sapiens
  misc_RNA (1)...(19): siRNA sense strand
cuagagagacuggauuguu

SEQ ID NO: 840808 - RNA, 19 nt, Homo sapiens
  misc_RNA (1)...(19): siRNA sense strand
aauuugcagugguuggaua

SEQ ID NO: 840809 - RNA, 19 nt, Homo sapiens
  misc_RNA (1)...(19): siRNA sense strand
ggagcagacacaccugaga

SEQ ID NO: 840810 - RNA, 19 nt, Homo sapiens
  misc_RNA (1)...(19): siRNA sense strand
uacauaagcaauaccuuga

SEQ ID NO: 840811 - RNA, 19 nt, Homo sapiens
  misc_RNA (1)...(19): siRNA sense strand
gcgugcggcuucuggacaa

SEQ ID NO: 840812 - RNA, 19 nt, Homo sapiens
  misc_RNA (1)...(19): siRNA sense strand
ugaaagccuauauugaaga

SEQ ID NO: 840813 - RNA, 19 nt, Homo sapiens
  misc_RNA (1)...(19): siRNA sense strand
gauaucagcagcaauaacc

SEQ ID NO: 840814 - RNA, 19 nt, Homo sapiens
  misc_RNA (1)...(19): siRNA sense strand
uuguagauaucucagcaaa

SEQ ID NO: 840815 - RNA, 19 nt, Homo sapiens
  misc_RNA (1)...(19): siRNA sense strand
gaacucaauguggguuuca

SEQ ID NO: 840816 - RNA, 19 nt, Homo sapiens
  misc_RNA (1)...(19): siRNA sense strand
auaaagugguugucuucga

SEQ ID NO: 840817 - RNA, 19 nt, Homo sapiens
  misc_RNA (1)...(19): siRNA sense strand
gagagaaugguacauaagc

SEQ ID NO: 840818 - RNA, 19 nt, Homo sapiens
  misc_RNA (1)...(19): siRNA sense strand
guggaaaggcuugagaaga

SEQ ID NO: 840819 - RNA, 19 nt, Homo sapiens
  misc_RNA (1)...(19): siRNA sense strand
gaccuuaaagaaagagaau

SEQ ID NO: 840820 - RNA, 19 nt, Homo sapiens
  misc_RNA (1)...(19): siRNA sense strand
ccaaaucucacaucuucca

SEQ ID NO: 840821 - RNA, 19 nt, Homo sapiens
  misc_RNA (1)...(19): siRNA sense strand
caagaauggcuucauagac

SEQ ID NO: 840822 - RNA, 19 nt, Homo sapiens
  misc_RNA (1)...(19): siRNA sense strand
gccaacauuuugauaaaga

SEQ ID NO: 840823 - RNA, 19 nt, Homo sapiens
  misc_RNA (1)...(19): siRNA sense strand
agauaaaggaggaguggaa

SEQ ID NO: 840824 - RNA, 19 nt, Homo sapiens
  misc_RNA (1)...(19): siRNA sense strand
ugauaaugcccaaugugaa

SEQ ID NO: 840825 - RNA, 19 nt, Homo sapiens
  misc_RNA (1)...(19): siRNA sense strand
guuugaagaaccugaaaga

SEQ ID NO: 840826 - RNA, 19 nt, Homo sapiens
  misc_RNA (1)...(19): siRNA sense strand
ggacggagcucccagauuc

SEQ ID NO: 840827 - RNA, 19 nt, Homo sapiens
  misc_RNA (1)...(19): siRNA sense strand
gcacaaagcuuggcagaag

SEQ ID NO: 840828 - RNA, 19 nt, Homo sapiens
  misc_RNA (1)...(19): siRNA sense strand
gaaaucgguuguuugaaga

SEQ ID NO: 840829 - RNA, 19 nt, Homo sapiens
  misc_RNA (1)...(19): siRNA sense strand
gaagauggcaaugaaauaa

SEQ ID NO: 840830 - RNA, 19 nt, Homo sapiens
  misc_RNA (1)...(19): siRNA sense strand
uaauggagcugcccuuuga

SEQ ID NO: 840831 - RNA, 19 nt, Homo sapiens
  misc_RNA (1)...(19): siRNA sense strand
gcagaaaucgguuguuuga

SEQ ID NO: 840832 - RNA, 19 nt, Homo sapiens
  misc_RNA (1)...(19): siRNA sense strand
ugaagaagcucacucuguu

SEQ ID NO: 840833 - RNA, 19 nt, Homo sapiens
  misc_RNA (1)...(19): siRNA sense strand
ggagcugcccuuugaauua

SEQ ID NO: 840834 - RNA, 19 nt, Homo sapiens
  misc_RNA (1)...(19): siRNA sense strand
gagcugcccuuugaauuaa

SEQ ID NO: 840835 - RNA, 19 nt, Homo sapiens
  misc_RNA (1)...(19): siRNA sense strand
gagaaucuguucccagcua

SEQ ID NO: 840836 - RNA, 19 nt, Homo sapiens
  misc_RNA (1)...(19): siRNA sense strand
gaagagcauuccuccagaa

SEQ ID NO: 840837 - RNA, 19 nt, Homo sapiens
  misc_RNA (1)...(19): siRNA sense strand
guagauaucucagcaaaca

SEQ ID NO: 840838 - RNA, 19 nt, Homo sapiens
  misc_RNA (1)...(19): siRNA sense strand
gcagugcguuuguguuuga

SEQ ID NO: 840839 - RNA, 19 nt, Homo sapiens
  misc_RNA (1)...(19): siRNA sense strand
gcaaugaaauaauggaaag

SEQ ID NO: 840840 - RNA, 19 nt, Homo sapiens
  misc_RNA (1)...(19): siRNA sense strand
gaaaggaacacucucacaa

SEQ ID NO: 840841 - RNA, 19 nt, Homo sapiens
  misc_RNA (1)...(19): siRNA sense strand
gaagaagcucacucuguua

SEQ ID NO: 840842 - RNA, 19 nt, Homo sapiens
  misc_RNA (1)...(19): siRNA sense strand
cagcagaaaucgguuguuu

SEQ ID NO: 840843 - RNA, 19 nt, Homo sapiens
  misc_RNA (1)...(19): siRNA sense strand
ugaccuaccuucccuauuc

SEQ ID NO: 840844 - RNA, 19 nt, Homo sapiens
  misc_RNA (1)...(19): siRNA sense strand
caauguggguuucaacuau

SEQ ID NO: 840845 - RNA, 19 nt, Homo sapiens
  misc_RNA (1)...(19): siRNA sense strand
gagcagugcguuuguguuu

SEQ ID NO: 840846 - RNA, 19 nt, Homo sapiens
  misc_RNA (1)...(19): siRNA sense strand
aagaauggcuucauagaca

SEQ ID NO: 840847 - RNA, 19 nt, Homo sapiens
  misc_RNA (1)...(19): siRNA sense strand
cauaagcaauaccuugauu

SEQ ID NO: 840848 - RNA, 19 nt, Homo sapiens
  misc_RNA (1)...(19): siRNA sense strand
gaaugguacauaagcaaua

SEQ ID NO: 840849 - RNA, 19 nt, Homo sapiens
  misc_RNA (1)...(19): siRNA sense strand
aaccaaaucucacaucuuc

SEQ ID NO: 840850 - RNA, 19 nt, Homo sapiens
  misc_RNA (1)...(19): siRNA sense strand
gcaagaauggcuucauaga

SEQ ID NO: 840851 - RNA, 19 nt, Homo sapiens
  misc_RNA (1)...(19): siRNA sense strand
ugaagaaccugaaagaacu

SEQ ID NO: 840852 - RNA, 19 nt, Homo sapiens
  misc_RNA (1)...(19): siRNA sense strand
agaaaucgguuguuugaag

SEQ ID NO: 840853 - RNA, 19 nt, Homo sapiens
  misc_RNA (1)...(19): siRNA sense strand
cugcaagaauggcuucaua

SEQ ID NO: 840854 - RNA, 19 nt, Homo sapiens
  misc_RNA (1)...(19): siRNA sense strand
ugaagcaaguuacauuugu

SEQ ID NO: 840855 - RNA, 19 nt, Homo sapiens
  misc_RNA (1)...(19): siRNA sense strand
gaacgggaucgccaacauu

SEQ ID NO: 840856 - RNA, 19 nt, Homo sapiens
  misc_RNA (1)...(19): siRNA sense strand
uagagagacuggauuguuc

SEQ ID NO: 840857 - RNA, 19 nt, Homo sapiens
  misc_RNA (1)...(19): siRNA sense strand
gggaaacucgugucaagaa

SEQ ID NO: 840858 - RNA, 19 nt, Homo sapiens
  misc_RNA (1)...(19): siRNA sense strand
ugaccgaccugccgcaaga

SEQ ID NO: 840859 - RNA, 19 nt, Homo sapiens
  misc_RNA (1)...(19): siRNA sense strand
gaagcucacucuguuaguc

SEQ ID NO: 840860 - RNA, 19 nt, Homo sapiens
  misc_RNA (1)...(19): siRNA sense strand
ugacucauccacaccuuua

SEQ ID NO: 840861 - RNA, 19 nt, Homo sapiens
  misc_RNA (1)...(19): siRNA sense strand
gaagagcgccuuggagaag

SEQ ID NO: 840862 - RNA, 19 nt, Homo sapiens
  misc_RNA (1)...(19): siRNA sense strand
uggaaaggcuugagaagag

SEQ ID NO: 840863 - RNA, 19 nt, Homo sapiens
  misc_RNA (1)...(19): siRNA sense strand
ugaagauggcaaugaaaua

SEQ ID NO: 840864 - RNA, 19 nt, Homo sapiens
  misc_RNA (1)...(19): siRNA sense strand
ucaacuaucugaagagcau

SEQ ID NO: 840865 - RNA, 19 nt, Homo sapiens
  misc_RNA (1)...(19): siRNA sense strand
agacacaccugagagaaug

SEQ ID NO: 840866 - RNA, 19 nt, Homo sapiens
  misc_RNA (1)...(19): siRNA sense strand
uugaagaccuuaaagaaag

SEQ ID NO: 840867 - RNA, 19 nt, Homo sapiens
  misc_RNA (1)...(19): siRNA sense strand
gaaagccuauauugaagac

SEQ ID NO: 840868 - RNA, 19 nt, Homo sapiens
  misc_RNA (1)...(19): siRNA sense strand
gaaguuaugaaagccuaua

SEQ ID NO: 840869 - RNA, 19 nt, Homo sapiens
  misc_RNA (1)...(19): siRNA sense strand
ggaaaucuagaauuaaugg

SEQ ID NO: 840870 - RNA, 19 nt, Homo sapiens
  misc_RNA (1)...(19): siRNA sense strand
gcuguauacugcaagaaug

SEQ ID NO: 840871 - RNA, 19 nt, Homo sapiens
  misc_RNA (1)...(19): siRNA sense strand
guuaugaaagccuauauug

SEQ ID NO: 840872 - RNA, 19 nt, Homo sapiens
  misc_RNA (1)...(19): siRNA sense strand
ggaaacucgugucaagaag

SEQ ID NO: 840873 - RNA, 19 nt, Homo sapiens
  misc_RNA (1)...(19): siRNA sense strand
cugagagaaugguacauaa

SEQ ID NO: 840874 - RNA, 19 nt, Homo sapiens
  misc_RNA (1)...(19): siRNA sense strand
agaguucacuucccaagga

SEQ ID NO: 840875 - RNA, 19 nt, Homo sapiens
  misc_RNA (1)...(19): siRNA sense strand
uggacaagauugaaaggaa

SEQ ID NO: 840876 - RNA, 19 nt, Homo sapiens
  misc_RNA (1)...(19): siRNA sense strand
ggaacuuuguggccgaaug

SEQ ID NO: 840877 - RNA, 19 nt, Homo sapiens
  misc_RNA (1)...(19): siRNA sense strand
ugaagaccuuaaagaaaga

SEQ ID NO: 840878 - RNA, 19 nt, Homo sapiens
  misc_RNA (1)...(19): siRNA sense strand
gaauugggagauugugaaa

SEQ ID NO: 840879 - RNA, 19 nt, Homo sapiens
  misc_RNA (1)...(19): siRNA sense strand
gcucccaacugcccuuugu

SEQ ID NO: 840880 - RNA, 19 nt, Homo sapiens
  misc_RNA (1)...(19): siRNA sense strand
gaaauaauggaaagugaac

SEQ ID NO: 840881 - RNA, 19 nt, Homo sapiens
  misc_RNA (1)...(19): siRNA sense strand
gauaaugcccaaugugaag

SEQ ID NO: 840882 - RNA, 19 nt, Homo sapiens
  misc_RNA (1)...(19): siRNA sense strand
gaaccugaaagaacucaau

SEQ ID NO: 840883 - RNA, 19 nt, Homo sapiens
  misc_RNA (1)...(19): siRNA sense strand
cgaccugccgcaagauaua

SEQ ID NO: 840884 - RNA, 19 nt, Homo sapiens
  misc_RNA (1)...(19): siRNA sense strand
aaagaaagagaaucuguuc

SEQ ID NO: 840885 - RNA, 19 nt, Homo sapiens
  misc_RNA (1)...(19): siRNA sense strand
gugggaaacucgugucaag

SEQ ID NO: 840886 - RNA, 19 nt, Homo sapiens
  misc_RNA (1)...(19): siRNA sense strand
gagaaugguacauaagcaa

SEQ ID NO: 840887 - RNA, 19 nt, Homo sapiens
  misc_RNA (1)...(19): siRNA sense strand
gcguuuguguuugaacuuu

SEQ ID NO: 840888 - RNA, 19 nt, Homo sapiens
  misc_RNA (1)...(19): siRNA sense strand
agauggcaaugaaauaaug

SEQ ID NO: 840889 - RNA, 19 nt, Homo sapiens
  misc_RNA (1)...(19): siRNA sense strand
ggagcucccagauucauug

SEQ ID NO: 840890 - RNA, 19 nt, Homo sapiens
  misc_RNA (1)...(19): siRNA sense strand
agacuggauuguucuggaa

SEQ ID NO: 840891 - RNA, 19 nt, Homo sapiens
  misc_RNA (1)...(19): siRNA sense strand
uaagcaauaccuugauuca

SEQ ID NO: 840892 - RNA, 19 nt, Homo sapiens
  misc_RNA (1)...(19): siRNA sense strand
gaugagaauucuggaucug

SEQ ID NO: 840893 - RNA, 19 nt, Homo sapiens
  misc_RNA (1)...(19): siRNA sense strand
uaaaggaggaguggaacuu

SEQ ID NO: 840894 - RNA, 19 nt, Homo sapiens
  misc_RNA (1)...(19): siRNA sense strand
gaaucuguucccagcuaua

SEQ ID NO: 840895 - RNA, 19 nt, Homo sapiens
  misc_RNA (1)...(19): siRNA sense strand
uuggauaucagcagcaaua

SEQ ID NO: 840896 - RNA, 19 nt, Homo sapiens
  misc_RNA (1)...(19): siRNA sense strand
cacaaagcuuggcagaaga

SEQ ID NO: 840897 - RNA, 19 nt, Homo sapiens
  misc_RNA (1)...(19): siRNA sense strand
gcagacacaccugagagaa

SEQ ID NO: 840898 - RNA, 19 nt, Homo sapiens
  misc_RNA (1)...(19): siRNA sense strand
aaacucgugucaagaagca

SEQ ID NO: 840899 - RNA, 19 nt, Homo sapiens
  misc_RNA (1)...(19): siRNA sense strand
ccugagagaaugguacaua

SEQ ID NO: 840900 - RNA, 19 nt, Homo sapiens
  misc_RNA (1)...(19): siRNA sense strand
gugaagauggcaaugaaau

SEQ ID NO: 840901 - RNA, 19 nt, Homo sapiens
  misc_RNA (1)...(19): siRNA sense strand
ugucgaauuugcagugguu

SEQ ID NO: 840902 - RNA, 19 nt, Homo sapiens
  misc_RNA (1)...(19): siRNA sense strand
ucaauguggguuucaacua

SEQ ID NO: 840903 - RNA, 19 nt, Homo sapiens
  misc_RNA (1)...(19): siRNA sense strand
ugaacgggaucgccaacau

SEQ ID NO: 840904 - RNA, 19 nt, Homo sapiens
  misc_RNA (1)...(19): siRNA sense strand
gaagaaggagguggaaagg

SEQ ID NO: 840905 - RNA, 19 nt, Homo sapiens
  misc_RNA (1)...(19): siRNA sense strand
aaggaggaguggaacuuug

SEQ ID NO: 840906 - RNA, 19 nt, Homo sapiens
  misc_RNA (1)...(19): siRNA sense strand
ggcaaugaaauaauggaaa

SEQ ID NO: 840907 - RNA, 19 nt, Homo sapiens
  misc_RNA (1)...(19): siRNA sense strand
cuagagagacuggauuguu

SEQ ID NO: 840908 - RNA, 19 nt, Homo sapiens
  misc_RNA (1)...(19): siRNA sense strand
aauuugcagugguuggaua

SEQ ID NO: 840909 - RNA, 19 nt, Homo sapiens
  misc_RNA (1)...(19): siRNA sense strand
ggagcagacacaccugaga

SEQ ID NO: 840910 - RNA, 19 nt, Homo sapiens
  misc_RNA (1)...(19): siRNA sense strand
uacauaagcaauaccuuga

SEQ ID NO: 840911 - RNA, 19 nt, Homo sapiens
  misc_RNA (1)...(19): siRNA sense strand
gcgugcggcuucuggacaa

SEQ ID NO: 840912 - RNA, 19 nt, Homo sapiens
  misc_RNA (1)...(19): siRNA sense strand
ugaaagccuauauugaaga

SEQ ID NO: 840913 - RNA, 19 nt, Homo sapiens
  misc_RNA (1)...(19): siRNA sense strand
gauaucagcagcaauaacc

SEQ ID NO: 840914 - RNA, 19 nt, Homo sapiens
  misc_RNA (1)...(19): siRNA sense strand
uuguagauaucucagcaaa

SEQ ID NO: 840915 - RNA, 19 nt, Homo sapiens
  misc_RNA (1)...(19): siRNA sense strand
gaacucaauguggguuuca

SEQ ID NO: 840916 - RNA, 19 nt, Homo sapiens
  misc_RNA (1)...(19): siRNA sense strand
auaaagugguugucuucga

SEQ ID NO: 840917 - RNA, 19 nt, Homo sapiens
  misc_RNA (1)...(19): siRNA sense strand
gagagaaugguacauaagc

SEQ ID NO: 840918 - RNA, 19 nt, Homo sapiens
  misc_RNA (1)...(19): siRNA sense strand
guggaaaggcuugagaaga

SEQ ID NO: 840919 - RNA, 19 nt, Homo sapiens
  misc_RNA (1)...(19): siRNA sense strand
gaccuuaaagaaagagaau

SEQ ID NO: 840920 - RNA, 19 nt, Homo sapiens
  misc_RNA (1)...(19): siRNA sense strand
ccaaaucucacaucuucca

SEQ ID NO: 840921 - RNA, 19 nt, Homo sapiens
  misc_RNA (1)...(19): siRNA sense strand
caagaauggcuucauagac

SEQ ID NO: 840922 - RNA, 19 nt, Homo sapiens
  misc_RNA (1)...(19): siRNA sense strand
gccaacauuuugauaaaga

SEQ ID NO: 840923 - RNA, 19 nt, Homo sapiens
  misc_RNA (1)...(19): siRNA sense strand
agauaaaggaggaguggaa

SEQ ID NO: 840924 - RNA, 19 nt, Homo sapiens
  misc_RNA (1)...(19): siRNA sense strand
ugauaaugcccaaugugaa

SEQ ID NO: 840925 - RNA, 19 nt, Homo sapiens
  misc_RNA (1)...(19): siRNA sense strand
guuugaagaaccugaaaga

SEQ ID NO: 840926 - RNA, 19 nt, Homo sapiens
  misc_RNA (1)...(19): siRNA sense strand
gaagucagaugcccuggaa

SEQ ID NO: 840927 - RNA, 19 nt, Homo sapiens
  misc_RNA (1)...(19): siRNA sense strand
ugaaggagcugcagacaug

SEQ ID NO: 840928 - RNA, 19 nt, Homo sapiens
  misc_RNA (1)...(19): siRNA sense strand
gaaugaagcccuuaacaga

SEQ ID NO: 840929 - RNA, 19 nt, Homo sapiens
  misc_RNA (1)...(19): siRNA sense strand
gaaaggaagagcauuuauu

SEQ ID NO: 840930 - RNA, 19 nt, Homo sapiens
  misc_RNA (1)...(19): siRNA sense strand
gcacuugggugaccagaug

SEQ ID NO: 840931 - RNA, 19 nt, Homo sapiens
  misc_RNA (1)...(19): siRNA sense strand
ccaagaguauuacaacaaa

SEQ ID NO: 840932 - RNA, 19 nt, Homo sapiens
  misc_RNA (1)...(19): siRNA sense strand
agaaggagcuacagaaugu

SEQ ID NO: 840933 - RNA, 19 nt, Homo sapiens
  misc_RNA (1)...(19): siRNA sense strand
ugacagaacuaagcaaaga

SEQ ID NO: 840934 - RNA, 19 nt, Homo sapiens
  misc_RNA (1)...(19): siRNA sense strand
gcaccagcuugcauaaauu

SEQ ID NO: 840935 - RNA, 19 nt, Homo sapiens
  misc_RNA (1)...(19): siRNA sense strand
gaacuaagcaaagaauuuc

SEQ ID NO: 840936 - RNA, 19 nt, Homo sapiens
  misc_RNA (1)...(19): siRNA sense strand
ggacgacgcuguguuugau

SEQ ID NO: 840937 - RNA, 19 nt, Homo sapiens
  misc_RNA (1)...(19): siRNA sense strand
gagaugguguccaacuuug

SEQ ID NO: 840938 - RNA, 19 nt, Homo sapiens
  misc_RNA (1)...(19): siRNA sense strand
gcugagugcugaaaucaug

SEQ ID NO: 840939 - RNA, 19 nt, Homo sapiens
  misc_RNA (1)...(19): siRNA sense strand
acagggagcuggagaagga

SEQ ID NO: 840940 - RNA, 19 nt, Homo sapiens
  misc_RNA (1)...(19): siRNA sense strand
gggagcaacugcagacaga

SEQ ID NO: 840941 - RNA, 19 nt, Homo sapiens
  misc_RNA (1)...(19): siRNA sense strand
ucucaagguuugucucuaa

SEQ ID NO: 840942 - RNA, 19 nt, Homo sapiens
  misc_RNA (1)...(19): siRNA sense strand
caacagaaccaagaaguau

SEQ ID NO: 840943 - RNA, 19 nt, Homo sapiens
  misc_RNA (1)...(19): siRNA sense strand
gugcugaaaucauggacua

SEQ ID NO: 840944 - RNA, 19 nt, Homo sapiens
  misc_RNA (1)...(19): siRNA sense strand
gggacucacuggacaagaa

SEQ ID NO: 840945 - RNA, 19 nt, Homo sapiens
  misc_RNA (1)...(19): siRNA sense strand
uaagaaugcuggugaagag

SEQ ID NO: 840946 - RNA, 19 nt, Homo sapiens
  misc_RNA (1)...(19): siRNA sense strand
uggaacagcuggucaagga

SEQ ID NO: 840947 - RNA, 19 nt, Homo sapiens
  misc_RNA (1)...(19): siRNA sense strand
gaucuacgauggaagugau

SEQ ID NO: 840948 - RNA, 19 nt, Homo sapiens
  misc_RNA (1)...(19): siRNA sense strand
gcagagugcccaacuggaa

SEQ ID NO: 840949 - RNA, 19 nt, Homo sapiens
  misc_RNA (1)...(19): siRNA sense strand
ugacaaaucgugagaggaa

SEQ ID NO: 840950 - RNA, 19 nt, Homo sapiens
  misc_RNA (1)...(19): siRNA sense strand
cuacugggauuacuucugu

SEQ ID NO: 840951 - RNA, 19 nt, Homo sapiens
  misc_RNA (1)...(19): siRNA sense strand
gcugaagucuggagaacug

SEQ ID NO: 840952 - RNA, 19 nt, Homo sapiens
  misc_RNA (1)...(19): siRNA sense strand
ggacaacguucgccucacu

SEQ ID NO: 840953 - RNA, 19 nt, Homo sapiens
  misc_RNA (1)...(19): siRNA sense strand
gggaaaggaagagcauuua

SEQ ID NO: 840954 - RNA, 19 nt, Homo sapiens
  misc_RNA (1)...(19): siRNA sense strand
gaugggauccgauuuguca

SEQ ID NO: 840955 - RNA, 19 nt, Homo sapiens
  misc_RNA (1)...(19): siRNA sense strand
uugaguaucuccugcaauu

SEQ ID NO: 840956 - RNA, 19 nt, Homo sapiens
  misc_RNA (1)...(19): siRNA sense strand
gcaaggagggcgaguguca

SEQ ID NO: 840957 - RNA, 19 nt, Homo sapiens
  misc_RNA (1)...(19): siRNA sense strand
gaguaucuccugcaauuug

SEQ ID NO: 840958 - RNA, 19 nt, Homo sapiens
  misc_RNA (1)...(19): siRNA sense strand
ugaggacacugaagacaug

SEQ ID NO: 840959 - RNA, 19 nt, Homo sapiens
  misc_RNA (1)...(19): siRNA sense strand
acaccaaagugaccaguga

SEQ ID NO: 840960 - RNA, 19 nt, Homo sapiens
  misc_RNA (1)...(19): siRNA sense strand
gaaccuauucccagugaug

SEQ ID NO: 840961 - RNA, 19 nt, Homo sapiens
  misc_RNA (1)...(19): siRNA sense strand
ggagggcuuugaugagaug

SEQ ID NO: 840962 - RNA, 19 nt, Homo sapiens
  misc_RNA (1)...(19): siRNA sense strand
gcaauuugaucagaaagag

SEQ ID NO: 840963 - RNA, 19 nt, Homo sapiens
  misc_RNA (1)...(19): siRNA sense strand
gcucaacacccucaaguuc

SEQ ID NO: 840964 - RNA, 19 nt, Homo sapiens
  misc_RNA (1)...(19): siRNA sense strand
gagaaggagcuacagaaug

SEQ ID NO: 840965 - RNA, 19 nt, Homo sapiens
  misc_RNA (1)...(19): siRNA sense strand
aaaggaagagcauuuauuc

SEQ ID NO: 840966 - RNA, 19 nt, Homo sapiens
  misc_RNA (1)...(19): siRNA sense strand
ggaaaggaagagcauuuau

SEQ ID NO: 840967 - RNA, 19 nt, Homo sapiens
  misc_RNA (1)...(19): siRNA sense strand
ggagaaggagcuacagaau

SEQ ID NO: 840968 - RNA, 19 nt, Homo sapiens
  misc_RNA (1)...(19): siRNA sense strand
caaagaauuucaggaagca

SEQ ID NO: 840969 - RNA, 19 nt, Homo sapiens
  misc_RNA (1)...(19): siRNA sense strand
gaacaggauacuacaucaa

SEQ ID NO: 840970 - RNA, 19 nt, Homo sapiens
  misc_RNA (1)...(19): siRNA sense strand
uaccagagcagacuuaaga

SEQ ID NO: 840971 - RNA, 19 nt, Homo sapiens
  misc_RNA (1)...(19): siRNA sense strand
gagaaucauccgagacuug

SEQ ID NO: 840972 - RNA, 19 nt, Homo sapiens
  misc_RNA (1)...(19): siRNA sense strand
gaaaucugccugcugaagu

SEQ ID NO: 840973 - RNA, 19 nt, Homo sapiens
  misc_RNA (1)...(19): siRNA sense strand
agaagaagcagcucauuca

SEQ ID NO: 840974 - RNA, 19 nt, Homo sapiens
  misc_RNA (1)...(19): siRNA sense strand
gcaacaagaaggacuacug

SEQ ID NO: 840975 - RNA, 19 nt, Homo sapiens
  misc_RNA (1)...(19): siRNA sense strand
gagcaagcacgguggcaaa

SEQ ID NO: 840976 - RNA, 19 nt, Homo sapiens
  misc_RNA (1)...(19): siRNA sense strand
uccaggagcugcugcaaug

SEQ ID NO: 840977 - RNA, 19 nt, Homo sapiens
  misc_RNA (1)...(19): siRNA sense strand
gcacaggugagccaacaug

SEQ ID NO: 840978 - RNA, 19 nt, Homo sapiens
  misc_RNA (1)...(19): siRNA sense strand
ucucagagcuccgaacauc

SEQ ID NO: 840979 - RNA, 19 nt, Homo sapiens
  misc_RNA (1)...(19): siRNA sense strand
aagaaggacuacugggauu

SEQ ID NO: 840980 - RNA, 19 nt, Homo sapiens
  misc_RNA (1)...(19): siRNA sense strand
ggacuacugggauuacuuc

SEQ ID NO: 840981 - RNA, 19 nt, Homo sapiens
  misc_RNA (1)...(19): siRNA sense strand
cggcaccacugcaggauau

SEQ ID NO: 840982 - RNA, 19 nt, Homo sapiens
  misc_RNA (1)...(19): siRNA sense strand
gccaggaggugacaaaucg

SEQ ID NO: 840983 - RNA, 19 nt, Homo sapiens
  misc_RNA (1)...(19): siRNA sense strand
ugaggaagcuguggagaag

SEQ ID NO: 840984 - RNA, 19 nt, Homo sapiens
  misc_RNA (1)...(19): siRNA sense strand
ggagcacgcugagcugcaa

SEQ ID NO: 840985 - RNA, 19 nt, Homo sapiens
  misc_RNA (1)...(19): siRNA sense strand
caggugagccaacauguga

SEQ ID NO: 840986 - RNA, 19 nt, Homo sapiens
  misc_RNA (1)...(19): siRNA sense strand
gauccgauuugucaagucu

SEQ ID NO: 840987 - RNA, 19 nt, Homo sapiens
  misc_RNA (1)...(19): siRNA sense strand
ugaacaggauacuacauca

SEQ ID NO: 840988 - RNA, 19 nt, Homo sapiens
  misc_RNA (1)...(19): siRNA sense strand
ucaacagaaccaagaagua

SEQ ID NO: 840989 - RNA, 19 nt, Homo sapiens
  misc_RNA (1)...(19): siRNA sense strand
caaaugcagcuccgaggaa

SEQ ID NO: 840990 - RNA, 19 nt, Homo sapiens
  misc_RNA (1)...(19): siRNA sense strand
ccacuggcucuucugcuua

SEQ ID NO: 840991 - RNA, 19 nt, Homo sapiens
  misc_RNA (1)...(19): siRNA sense strand
ggacucacuggacaagaaa

SEQ ID NO: 840992 - RNA, 19 nt, Homo sapiens
  misc_RNA (1)...(19): siRNA sense strand
gacagcaccagcuugcaua

SEQ ID NO: 840993 - RNA, 19 nt, Homo sapiens
  misc_RNA (1)...(19): siRNA sense strand
cugauucucuugacccaaa

SEQ ID NO: 840994 - RNA, 19 nt, Homo sapiens
  misc_RNA (1)...(19): siRNA sense strand
gagcugcacuagcaaccau

SEQ ID NO: 840995 - RNA, 19 nt, Homo sapiens
  misc_RNA (1)...(19): siRNA sense strand
gaaggaggccauucuacag

SEQ ID NO: 840996 - RNA, 19 nt, Homo sapiens
  misc_RNA (1)...(19): siRNA sense strand
gaacuccagucugcaagag

SEQ ID NO: 840997 - RNA, 19 nt, Homo sapiens
  misc_RNA (1)...(19): siRNA sense strand
aggaggagcuagcagaguu

SEQ ID NO: 840998 - RNA, 19 nt, Homo sapiens
  misc_RNA (1)...(19): siRNA sense strand
aagcaaagaauuucaggaa

SEQ ID NO: 840999 - RNA, 19 nt, Homo sapiens
  misc_RNA (1)...(19): siRNA sense strand
aagaaccuauucccaguga

SEQ ID NO: 841000 - RNA, 19 nt, Homo sapiens
  misc_RNA (1)...(19): siRNA sense strand
aaacacccacugaaacuga

SEQ ID NO: 841001 - RNA, 19 nt, Homo sapiens
  misc_RNA (1)...(19): siRNA sense strand
ucgccucacuugcuuggua

SEQ ID NO: 841002 - RNA, 19 nt, Homo sapiens
  misc_RNA (1)...(19): siRNA sense strand
uggaugagaucgccagcuu

SEQ ID NO: 841003 - RNA, 19 nt, Homo sapiens
  misc_RNA (1)...(19): siRNA sense strand
gaggcacaguuagacgaua

SEQ ID NO: 841004 - RNA, 19 nt, Homo sapiens
  misc_RNA (1)...(19): siRNA sense strand
ccaaugaugggauccgauu

SEQ ID NO: 841005 - RNA, 19 nt, Homo sapiens
  misc_RNA (1)...(19): siRNA sense strand
gaggaauugugccagauac

SEQ ID NO: 841006 - RNA, 19 nt, Homo sapiens
  misc_RNA (1)...(19): siRNA sense strand
ugagaggaaugaccagaag

SEQ ID NO: 841007 - RNA, 19 nt, Homo sapiens
  misc_RNA (1)...(19): siRNA sense strand
cagagcagacuuaagaaug

SEQ ID NO: 841008 - RNA, 19 nt, Homo sapiens
  misc_RNA (1)...(19): siRNA sense strand
gagcaaggagggcgagugu

SEQ ID NO: 841009 - RNA, 19 nt, Homo sapiens
  misc_RNA (1)...(19): siRNA sense strand
ucgaggaggucaacagaca

SEQ ID NO: 841010 - RNA, 19 nt, Homo sapiens
  misc_RNA (1)...(19): siRNA sense strand
ggaggaggacuaccacaca

SEQ ID NO: 841011 - RNA, 19 nt, Homo sapiens
  misc_RNA (1)...(19): siRNA sense strand
gcuaggagcagcagagaag

SEQ ID NO: 841012 - RNA, 19 nt, Homo sapiens
  misc_RNA (1)...(19): siRNA sense strand
cucaagagaugguguccaa

SEQ ID NO: 841013 - RNA, 19 nt, Homo sapiens
  misc_RNA (1)...(19): siRNA sense strand
ccacugaaacugauucucu

SEQ ID NO: 841014 - RNA, 19 nt, Homo sapiens
  misc_RNA (1)...(19): siRNA sense strand
gaugcuugcugaccuggau

SEQ ID NO: 841015 - RNA, 19 nt, Homo sapiens
  misc_RNA (1)...(19): siRNA sense strand
ggaaugaccagaagaugcu

SEQ ID NO: 841016 - RNA, 19 nt, Homo sapiens
  misc_RNA (1)...(19): siRNA sense strand
uagaaaggacccagaagga

SEQ ID NO: 841017 - RNA, 19 nt, Homo sapiens
  misc_RNA (1)...(19): siRNA sense strand
aagcagacaugggagagaa

SEQ ID NO: 841018 - RNA, 19 nt, Homo sapiens
  misc_RNA (1)...(19): siRNA sense strand
cagagaaggaggaggacua

SEQ ID NO: 841019 - RNA, 19 nt, Homo sapiens
  misc_RNA (1)...(19): siRNA sense strand
gagcaacugcagacagaga

SEQ ID NO: 841020 - RNA, 19 nt, Homo sapiens
  misc_RNA (1)...(19): siRNA sense strand
gaugcugccuggccaacau

SEQ ID NO: 841021 - RNA, 19 nt, Homo sapiens
  misc_RNA (1)...(19): siRNA sense strand
acaacuacguccugagcaa

SEQ ID NO: 841022 - RNA, 19 nt, Homo sapiens
  misc_RNA (1)...(19): siRNA sense strand
gagcagaaugaagcccuua

SEQ ID NO: 841023 - RNA, 19 nt, Homo sapiens
  misc_RNA (1)...(19): siRNA sense strand
gugcagagccagcuaagca

SEQ ID NO: 841024 - RNA, 19 nt, Homo sapiens
  misc_RNA (1)...(19): siRNA sense strand
gcagcucauucaggacaaa

SEQ ID NO: 841025 - RNA, 19 nt, Homo sapiens
  misc_RNA (1)...(19): siRNA sense strand
gcacugcagcggaggacaa

SEQ ID NO: 841026 - RNA, 19 nt, Homo sapiens
  misc_RNA (1)...(19): siRNA sense strand
gaaaugaaagcuugggaua

SEQ ID NO: 841027 - RNA, 19 nt, Homo sapiens
  misc_RNA (1)...(19): siRNA sense strand
aaugaaagcuugggauaua

SEQ ID NO: 841028 - RNA, 19 nt, Homo sapiens
  misc_RNA (1)...(19): siRNA sense strand
uagaaucacuaccuugaaa

SEQ ID NO: 841029 - RNA, 19 nt, Homo sapiens
  misc_RNA (1)...(19): siRNA sense strand
gcaaggugaugagaagcua

SEQ ID NO: 841030 - RNA, 19 nt, Homo sapiens
  misc_RNA (1)...(19): siRNA sense strand
gcaacuaccuggcccuuuu

SEQ ID NO: 841031 - RNA, 19 nt, Homo sapiens
  misc_RNA (1)...(19): siRNA sense strand
gcaccuaacagaccuugaa

SEQ ID NO: 841032 - RNA, 19 nt, Homo sapiens
  misc_RNA (1)...(19): siRNA sense strand
acaggaacccagcuauuua

SEQ ID NO: 841033 - RNA, 19 nt, Homo sapiens
  misc_RNA (1)...(19): siRNA sense strand
gaaucacuaccuugaaauu

SEQ ID NO: 841034 - RNA, 19 nt, Homo sapiens
  misc_RNA (1)...(19): siRNA sense strand
gaaacaggaacccagcuau

SEQ ID NO: 841035 - RNA, 19 nt, Homo sapiens
  misc_RNA (1)...(19): siRNA sense strand
gcugaccgcaccauuauug

SEQ ID NO: 841036 - RNA, 19 nt, Homo sapiens
  misc_RNA (1)...(19): siRNA sense strand
ucagcugaccgcaccauua

SEQ ID NO: 841037 - RNA, 19 nt, Homo sapiens
  misc_RNA (1)...(19): siRNA sense strand
aaacaggaacccagcuauu

SEQ ID NO: 841038 - RNA, 19 nt, Homo sapiens
  misc_RNA (1)...(19): siRNA sense strand
cauccucagugguggcuuu

SEQ ID NO: 841039 - RNA, 19 nt, Homo sapiens
  misc_RNA (1)...(19): siRNA sense strand
cagcugaccgcaccauuau

SEQ ID NO: 841040 - RNA, 19 nt, Homo sapiens
  misc_RNA (1)...(19): siRNA sense strand
gaaauuccauccaaaagac

SEQ ID NO: 841041 - RNA, 19 nt, Homo sapiens
  misc_RNA (1)...(19): siRNA sense strand
gugcugugcugguuucaag

SEQ ID NO: 841042 - RNA, 19 nt, Homo sapiens
  misc_RNA (1)...(19): siRNA sense strand
ccuaacagaccuugaaaca

SEQ ID NO: 841043 - RNA, 19 nt, Homo sapiens
  misc_RNA (1)...(19): siRNA sense strand
ccuacucccugcacacaga

SEQ ID NO: 841044 - RNA, 19 nt, Homo sapiens
  misc_RNA (1)...(19): siRNA sense strand
gcuauuuaguggucgaagu

SEQ ID NO: 841045 - RNA, 19 nt, Homo sapiens
  misc_RNA (1)...(19): siRNA sense strand
aacaggaacccagcuauuu

SEQ ID NO: 841046 - RNA, 19 nt, Homo sapiens
  misc_RNA (1)...(19): siRNA sense strand
ugaaacaggaacccagcua

SEQ ID NO: 841047 - RNA, 19 nt, Homo sapiens
  misc_RNA (1)...(19): siRNA sense strand
ggaacccagcuauuuagug

SEQ ID NO: 841048 - RNA, 19 nt, Homo sapiens
  misc_RNA (1)...(19): siRNA sense strand
caagguggagggcuacuca

SEQ ID NO: 841049 - RNA, 19 nt, Homo sapiens
  misc_RNA (1)...(19): siRNA sense strand
ccuugaaauuccauccaaa

SEQ ID NO: 841050 - RNA, 19 nt, Homo sapiens
  misc_RNA (1)...(19): siRNA sense strand
gaccuuggacauccuguuc

SEQ ID NO: 841051 - RNA, 19 nt, Homo sapiens
  misc_RNA (1)...(19): siRNA sense strand
augaaagcuugggauauaa

SEQ ID NO: 841052 - RNA, 19 nt, Homo sapiens
  misc_RNA (1)...(19): siRNA sense strand
ugacuucgcgcugcaccua

SEQ ID NO: 841053 - RNA, 19 nt, Homo sapiens
  misc_RNA (1)...(19): siRNA sense strand
gcacagaccaauggcaacu

SEQ ID NO: 841054 - RNA, 19 nt, Homo sapiens
  misc_RNA (1)...(19): siRNA sense strand
caggaacccagcuauuuag

SEQ ID NO: 841055 - RNA, 19 nt, Homo sapiens
  misc_RNA (1)...(19): siRNA sense strand
cgagagagcccguguuccu

SEQ ID NO: 841056 - RNA, 19 nt, Homo sapiens
  misc_RNA (1)...(19): siRNA sense strand
ucacuaccuugaaauucca

SEQ ID NO: 841057 - RNA, 19 nt, Homo sapiens
  misc_RNA (1)...(19): siRNA sense strand
guguggcccuaccggauga

SEQ ID NO: 841058 - RNA, 19 nt, Homo sapiens
  misc_RNA (1)...(19): siRNA sense strand
uuuagaaucacuaccuuga

SEQ ID NO: 841059 - RNA, 19 nt, Homo sapiens
  misc_RNA (1)...(19): siRNA sense strand
gcuaugaagggcacaaggu

SEQ ID NO: 841060 - RNA, 19 nt, Homo sapiens
  misc_RNA (1)...(19): siRNA sense strand
acagaccaauggcaacuac

SEQ ID NO: 841061 - RNA, 19 nt, Homo sapiens
  misc_RNA (1)...(19): siRNA sense strand
gaagcuacaaggcgaccau

SEQ ID NO: 841062 - RNA, 19 nt, Homo sapiens
  misc_RNA (1)...(19): siRNA sense strand
gaaagcuugggauauaagg

SEQ ID NO: 841063 - RNA, 19 nt, Homo sapiens
  misc_RNA (1)...(19): siRNA sense strand
aaaugaaagcuugggauau

SEQ ID NO: 841064 - RNA, 19 nt, Homo sapiens
  misc_RNA (1)...(19): siRNA sense strand
ggacuggcaaggugaugag

SEQ ID NO: 841065 - RNA, 19 nt, Homo sapiens
  misc_RNA (1)...(19): siRNA sense strand
ccaaaggacucccugauug

SEQ ID NO: 841066 - RNA, 19 nt, Homo sapiens
  misc_RNA (1)...(19): siRNA sense strand
caaagaagaggaagaggaa

SEQ ID NO: 841067 - RNA, 19 nt, Homo sapiens
  misc_RNA (1)...(19): siRNA sense strand
caaaggacucccugauuga

SEQ ID NO: 841068 - RNA, 19 nt, Homo sapiens
  misc_RNA (1)...(19): siRNA sense strand
gaaauccagcggcucuaug

SEQ ID NO: 841069 - RNA, 19 nt, Homo sapiens
  misc_RNA (1)...(19): siRNA sense strand
ccacggaauuugauuuuga

SEQ ID NO: 841070 - RNA, 19 nt, Homo sapiens
  misc_RNA (1)...(19): siRNA sense strand
acacaugcccacggaauuu

SEQ ID NO: 841071 - RNA, 19 nt, Homo sapiens
  misc_RNA (1)...(19): siRNA sense strand
gacaugaagagacacaaga

SEQ ID NO: 841072 - RNA, 19 nt, Homo sapiens
  misc_RNA (1)...(19): siRNA sense strand
ggacaugaagagacacaag

SEQ ID NO: 841073 - RNA, 19 nt, Homo sapiens
  misc_RNA (1)...(19): siRNA sense strand
aaauccagcggcucuauga

SEQ ID NO: 841074 - RNA, 19 nt, Homo sapiens
  misc_RNA (1)...(19): siRNA sense strand
ccacacaugcccacggaau

SEQ ID NO: 841075 - RNA, 19 nt, Homo sapiens
  misc_RNA (1)...(19): siRNA sense strand
gcucuggccguggaggaua

SEQ ID NO: 841076 - RNA, 19 nt, Homo sapiens
  misc_RNA (1)...(19): siRNA sense strand
gaugagccagugacaccaa

SEQ ID NO: 841077 - RNA, 19 nt, Homo sapiens
  misc_RNA (1)...(19): siRNA sense strand
aagaggagagauccgauga

SEQ ID NO: 841078 - RNA, 19 nt, Homo sapiens
  misc_RNA (1)...(19): siRNA sense strand
cgaaauccagcggcucuau

SEQ ID NO: 841079 - RNA, 19 nt, Homo sapiens
  misc_RNA (1)...(19): siRNA sense strand
ggaggccaaagaagaggaa

SEQ ID NO: 841080 - RNA, 19 nt, Homo sapiens
  misc_RNA (1)...(19): siRNA sense strand
ggagccggaggccaaagaa

SEQ ID NO: 841081 - RNA, 19 nt, Homo sapiens
  misc_RNA (1)...(19): siRNA sense strand
acaugaagagacacaagaa

SEQ ID NO: 841082 - RNA, 19 nt, Homo sapiens
  misc_RNA (1)...(19): siRNA sense strand
acacugagcuggaggauuu

SEQ ID NO: 841083 - RNA, 19 nt, Homo sapiens
  misc_RNA (1)...(19): siRNA sense strand
gacaaggucuuaucuaugg

SEQ ID NO: 841084 - RNA, 19 nt, Homo sapiens
  misc_RNA (1)...(19): siRNA sense strand
gugacaaggucuuaucuau

SEQ ID NO: 841085 - RNA, 19 nt, Homo sapiens
  misc_RNA (1)...(19): siRNA sense strand
aggcuuagcucaacccaaa

SEQ ID NO: 841086 - RNA, 19 nt, Homo sapiens
  misc_RNA (1)...(19): siRNA sense strand
caggaugucuugugagugu

SEQ ID NO: 841087 - RNA, 19 nt, Homo sapiens
  misc_RNA (1)...(19): siRNA sense strand
ggacugaccaccuucuuca

SEQ ID NO: 841088 - RNA, 19 nt, Homo sapiens
  misc_RNA (1)...(19): siRNA sense strand
gaaaguggacagugguuca

SEQ ID NO: 841089 - RNA, 19 nt, Homo sapiens
  misc_RNA (1)...(19): siRNA sense strand
cauccucccuggcaucuga

SEQ ID NO: 841090 - RNA, 19 nt, Homo sapiens
  misc_RNA (1)...(19): siRNA sense strand
gaaaacaacuggaaaugcu

SEQ ID NO: 841091 - RNA, 19 nt, Homo sapiens
  misc_RNA (1)...(19): siRNA sense strand
gaucuuggcaguucagcuu

SEQ ID NO: 841092 - RNA, 19 nt, Homo sapiens
  misc_RNA (1)...(19): siRNA sense strand
gagccaggcggaugaaaga

SEQ ID NO: 841093 - RNA, 19 nt, Homo sapiens
  misc_RNA (1)...(19): siRNA sense strand
ccaggcggaugaaagagaa

SEQ ID NO: 841094 - RNA, 19 nt, Homo sapiens
  misc_RNA (1)...(19): siRNA sense strand
gguauaacuucaccaucau

SEQ ID NO: 841095 - RNA, 19 nt, Homo sapiens
  misc_RNA (1)...(19): siRNA sense strand
gagaagugggagaaggaua

SEQ ID NO: 841096 - RNA, 19 nt, Homo sapiens
  misc_RNA (1)...(19): siRNA sense strand
ccagguggaucagaagaau

SEQ ID NO: 841097 - RNA, 19 nt, Homo sapiens
  misc_RNA (1)...(19): siRNA sense strand
uagaagagcagcuguaugc

SEQ ID NO: 841098 - RNA, 19 nt, Homo sapiens
  misc_RNA (1)...(19): siRNA sense strand
ugaaagagaagugggagaa

SEQ ID NO: 841099 - RNA, 19 nt, Homo sapiens
  misc_RNA (1)...(19): siRNA sense strand
gcagugacaaggucuuauc

SEQ ID NO: 841100 - RNA, 19 nt, Homo sapiens
  misc_RNA (1)...(19): siRNA sense strand
ugacaaggucuuaucuaug

SEQ ID NO: 841101 - RNA, 19 nt, Homo sapiens
  misc_RNA (1)...(19): siRNA sense strand
gcaguucagcuucgaugga

SEQ ID NO: 841102 - RNA, 19 nt, Homo sapiens
  misc_RNA (1)...(19): siRNA sense strand
ucaaugagagacugcaaga

SEQ ID NO: 841103 - RNA, 19 nt, Homo sapiens
  misc_RNA (1)...(19): siRNA sense strand
cccuggagcuuccucauca

SEQ ID NO: 841104 - RNA, 19 nt, Homo sapiens
  misc_RNA (1)...(19): siRNA sense strand
agagccagguggaucagaa

SEQ ID NO: 841105 - RNA, 19 nt, Homo sapiens
  misc_RNA (1)...(19): siRNA sense strand
gucaggaugucuugugagu

SEQ ID NO: 841106 - RNA, 19 nt, Homo sapiens
  misc_RNA (1)...(19): siRNA sense strand
uaacuucaccaucauucau

SEQ ID NO: 841107 - RNA, 19 nt, Homo sapiens
  misc_RNA (1)...(19): siRNA sense strand
gcuuagggacuuccugaug

SEQ ID NO: 841108 - RNA, 19 nt, Homo sapiens
  misc_RNA (1)...(19): siRNA sense strand
gcagaggcucagacuggaa

SEQ ID NO: 841109 - RNA, 19 nt, Homo sapiens
  misc_RNA (1)...(19): siRNA sense strand
gaaagagaagugggagaag

SEQ ID NO: 841110 - RNA, 19 nt, Homo sapiens
  misc_RNA (1)...(19): siRNA sense strand
cucacucucucugguauaa

SEQ ID NO: 841111 - RNA, 19 nt, Homo sapiens
  misc_RNA (1)...(19): siRNA sense strand
guauaacuucaccaucauu

SEQ ID NO: 841112 - RNA, 19 nt, Homo sapiens
  misc_RNA (1)...(19): siRNA sense strand
agguggaucagaagaauuu

SEQ ID NO: 841113 - RNA, 19 nt, Homo sapiens
  misc_RNA (1)...(19): siRNA sense strand
ggaugucuugugaguguga

SEQ ID NO: 841114 - RNA, 19 nt, Homo sapiens
  misc_RNA (1)...(19): siRNA sense strand
ggagccaggcggaugaaag

SEQ ID NO: 841115 - RNA, 19 nt, Homo sapiens
  misc_RNA (1)...(19): siRNA sense strand
caccauggccccaggcuua

SEQ ID NO: 841116 - RNA, 19 nt, Homo sapiens
  misc_RNA (1)...(19): siRNA sense strand
gagaaggauagcggacuga

SEQ ID NO: 841117 - RNA, 19 nt, Homo sapiens
  misc_RNA (1)...(19): siRNA sense strand
gugugaagccgauggauac

SEQ ID NO: 841118 - RNA, 19 nt, Homo sapiens
  misc_RNA (1)...(19): siRNA sense strand
gagcuggcuuagggacuuc

SEQ ID NO: 841119 - RNA, 19 nt, Homo sapiens
  misc_RNA (1)...(19): siRNA sense strand
ccguggaucuuggcaguuc

SEQ ID NO: 841120 - RNA, 19 nt, Homo sapiens
  misc_RNA (1)...(19): siRNA sense strand
agagcuggcuuagggacuu

SEQ ID NO: 841121 - RNA, 19 nt, Homo sapiens
  misc_RNA (1)...(19): siRNA sense strand
uucaagauggucucaauga

SEQ ID NO: 841122 - RNA, 19 nt, Homo sapiens
  misc_RNA (1)...(19): siRNA sense strand
agaagugggagaaggauag

SEQ ID NO: 841123 - RNA, 19 nt, Homo sapiens
  misc_RNA (1)...(19): siRNA sense strand
gcucacucucucugguaua

SEQ ID NO: 841124 - RNA, 19 nt, Homo sapiens
  misc_RNA (1)...(19): siRNA sense strand
gacugcaagagcuggcuua

SEQ ID NO: 841125 - RNA, 19 nt, Homo sapiens
  misc_RNA (1)...(19): siRNA sense strand
ccacagcaccacccaccau

SEQ ID NO: 841126 - RNA, 19 nt, Homo sapiens
  misc_RNA (1)...(19): siRNA sense strand
gaacaggcuuucuauaaca

SEQ ID NO: 841127 - RNA, 19 nt, Homo sapiens
  misc_RNA (1)...(19): siRNA sense strand
gggaacaggcuuucuauaa

SEQ ID NO: 841128 - RNA, 19 nt, Homo sapiens
  misc_RNA (1)...(19): siRNA sense strand
cccauaaucucuacccuua

SEQ ID NO: 841129 - RNA, 19 nt, Homo sapiens
  misc_RNA (1)...(19): siRNA sense strand
cggaauuucugucuauuaa

SEQ ID NO: 841130 - RNA, 19 nt, Homo sapiens
  misc_RNA (1)...(19): siRNA sense strand
ggaacaggcuuucuauaac

SEQ ID NO: 841131 - RNA, 19 nt, Homo sapiens
  misc_RNA (1)...(19): siRNA sense strand
caagaucgaugagcuguau

SEQ ID NO: 841132 - RNA, 19 nt, Homo sapiens
  misc_RNA (1)...(19): siRNA sense strand
uaugagaucugcaugaaau

SEQ ID NO: 841133 - RNA, 19 nt, Homo sapiens
  misc_RNA (1)...(19): siRNA sense strand
agacgaagaugaagacaau

SEQ ID NO: 841134 - RNA, 19 nt, Homo sapiens
  misc_RNA (1)...(19): siRNA sense strand
gaauuucugucuauuaagg

SEQ ID NO: 841135 - RNA, 19 nt, Homo sapiens
  misc_RNA (1)...(19): siRNA sense strand
ucacggaauuucugucuau

SEQ ID NO: 841136 - RNA, 19 nt, Homo sapiens
  misc_RNA (1)...(19): siRNA sense strand
ugacuaccguggccaguuu

SEQ ID NO: 841137 - RNA, 19 nt, Homo sapiens
  misc_RNA (1)...(19): siRNA sense strand
gaggugacccgccuagaaa

SEQ ID NO: 841138 - RNA, 19 nt, Homo sapiens
  misc_RNA (1)...(19): siRNA sense strand
cauggucccugucaucuga

SEQ ID NO: 841139 - RNA, 19 nt, Homo sapiens
  misc_RNA (1)...(19): siRNA sense strand
gcucugggcccuuggauga

SEQ ID NO: 841140 - RNA, 19 nt, Homo sapiens
  misc_RNA (1)...(19): siRNA sense strand
ggaggugacccgccuagaa

SEQ ID NO: 841141 - RNA, 19 nt, Homo sapiens
  misc_RNA (1)...(19): siRNA sense strand
caccuagacucaguucaua

SEQ ID NO: 841142 - RNA, 19 nt, Homo sapiens
  misc_RNA (1)...(19): siRNA sense strand
caaugaagacgaagaugaa

SEQ ID NO: 841143 - RNA, 19 nt, Homo sapiens
  misc_RNA (1)...(19): siRNA sense strand
cgucagcgcuggaaacuac

SEQ ID NO: 841144 - RNA, 19 nt, Homo sapiens
  misc_RNA (1)...(19): siRNA sense strand
ccuaauggcugcccuggau

SEQ ID NO: 841145 - RNA, 19 nt, Homo sapiens
  misc_RNA (1)...(19): siRNA sense strand
acuacaggcucuaccuaua

SEQ ID NO: 841146 - RNA, 19 nt, Homo sapiens
  misc_RNA (1)...(19): siRNA sense strand
gaagaugaagacaaugaug

SEQ ID NO: 841147 - RNA, 19 nt, Homo sapiens
  misc_RNA (1)...(19): siRNA sense strand
uguaugaucuggacaagca

SEQ ID NO: 841148 - RNA, 19 nt, Homo sapiens
  misc_RNA (1)...(19): siRNA sense strand
ccagaucccucagagucua

SEQ ID NO: 841149 - RNA, 19 nt, Homo sapiens
  misc_RNA (1)...(19): siRNA sense strand
ggauaucaaugaccuuggu

SEQ ID NO: 841150 - RNA, 19 nt, Homo sapiens
  misc_RNA (1)...(19): siRNA sense strand
aggaggagcuggagaaugg

SEQ ID NO: 841151 - RNA, 19 nt, Homo sapiens
  misc_RNA (1)...(19): siRNA sense strand
uagaaagucugcucaugca

SEQ ID NO: 841152 - RNA, 19 nt, Homo sapiens
  misc_RNA (1)...(19): siRNA sense strand
ucaaugaagacgaagauga

SEQ ID NO: 841153 - RNA, 19 nt, Homo sapiens
  misc_RNA (1)...(19): siRNA sense strand
ggccagcacagcauucuaa

SEQ ID NO: 841154 - RNA, 19 nt, Homo sapiens
  misc_RNA (1)...(19): siRNA sense strand
ccacaagucccacccacaa

SEQ ID NO: 841155 - RNA, 19 nt, Homo sapiens
  misc_RNA (1)...(19): siRNA sense strand
gaauugaggguaguggaaa

SEQ ID NO: 841156 - RNA, 19 nt, Homo sapiens
  misc_RNA (1)...(19): siRNA sense strand
uggaccagcuggaggauga

SEQ ID NO: 841157 - RNA, 19 nt, Homo sapiens
  misc_RNA (1)...(19): siRNA sense strand
ucaaugaccuugguaccau

SEQ ID NO: 841158 - RNA, 19 nt, Homo sapiens
  misc_RNA (1)...(19): siRNA sense strand
uaagggaguccaagaggaa

SEQ ID NO: 841159 - RNA, 19 nt, Homo sapiens
  misc_RNA (1)...(19): siRNA sense strand
gcugaaggcccugagauug

SEQ ID NO: 841160 - RNA, 19 nt, Homo sapiens
  misc_RNA (1)...(19): siRNA sense strand
cauaaucucuacccuuacu

SEQ ID NO: 841161 - RNA, 19 nt, Homo sapiens
  misc_RNA (1)...(19): siRNA sense strand
uggcugcccuggaugacua

SEQ ID NO: 841162 - RNA, 19 nt, Homo sapiens
  misc_RNA (1)...(19): siRNA sense strand
gcugaaacugggcacauuu

SEQ ID NO: 841163 - RNA, 19 nt, Homo sapiens
  misc_RNA (1)...(19): siRNA sense strand
ggauggugccuacaacaug

SEQ ID NO: 841164 - RNA, 19 nt, Homo sapiens
  misc_RNA (1)...(19): siRNA sense strand
cugccaaacugacacagaa

SEQ ID NO: 841165 - RNA, 19 nt, Homo sapiens
  misc_RNA (1)...(19): siRNA sense strand
gcucacagucuuccaguuc

SEQ ID NO: 841166 - RNA, 19 nt, Homo sapiens
  misc_RNA (1)...(19): siRNA sense strand
ggaccuagcccaccuacac

SEQ ID NO: 841167 - RNA, 19 nt, Homo sapiens
  misc_RNA (1)...(19): siRNA sense strand
gcccucagcugcuucuucu

SEQ ID NO: 841168 - RNA, 19 nt, Homo sapiens
  misc_RNA (1)...(19): siRNA sense strand
ggaaucugaacucggauga

SEQ ID NO: 841169 - RNA, 19 nt, Homo sapiens
  misc_RNA (1)...(19): siRNA sense strand
aacaaggccuccacaguca

SEQ ID NO: 841170 - RNA, 19 nt, Homo sapiens
  misc_RNA (1)...(19): siRNA sense strand
gcuugggcuuccuguauga

SEQ ID NO: 841171 - RNA, 19 nt, Homo sapiens
  misc_RNA (1)...(19): siRNA sense strand
ggcccuacccucaauauca

SEQ ID NO: 841172 - RNA, 19 nt, Homo sapiens
  misc_RNA (1)...(19): siRNA sense strand
cgaguuucaucuccgaaug

SEQ ID NO: 841173 - RNA, 19 nt, Homo sapiens
  misc_RNA (1)...(19): siRNA sense strand
aaucugaacucggaugauc

SEQ ID NO: 841174 - RNA, 19 nt, Homo sapiens
  misc_RNA (1)...(19): siRNA sense strand
gcccuacccucaauaucau

SEQ ID NO: 841175 - RNA, 19 nt, Homo sapiens
  misc_RNA (1)...(19): siRNA sense strand
gagaucugcaugaaauaug

SEQ ID NO: 841176 - RNA, 19 nt, Homo sapiens
  misc_RNA (1)...(19): siRNA sense strand
aguaugagaucugcaugaa

SEQ ID NO: 841177 - RNA, 19 nt, Homo sapiens
  misc_RNA (1)...(19): siRNA sense strand
gcaagaucgaugagcugua

SEQ ID NO: 841178 - RNA, 19 nt, Homo sapiens
  misc_RNA (1)...(19): siRNA sense strand
ucucuacccuuacuacuac

SEQ ID NO: 841179 - RNA, 19 nt, Homo sapiens
  misc_RNA (1)...(19): siRNA sense strand
ccaagcgcuucuccaccua

SEQ ID NO: 841180 - RNA, 19 nt, Homo sapiens
  misc_RNA (1)...(19): siRNA sense strand
cagugaggcuaguguagau

SEQ ID NO: 841181 - RNA, 19 nt, Homo sapiens
  misc_RNA (1)...(19): siRNA sense strand
ccuagaaagucugcucaug

SEQ ID NO: 841182 - RNA, 19 nt, Homo sapiens
  misc_RNA (1)...(19): siRNA sense strand
ccacaagcccauaaucucu

SEQ ID NO: 841183 - RNA, 19 nt, Homo sapiens
  misc_RNA (1)...(19): siRNA sense strand
cuauuaaggugacagaacu

SEQ ID NO: 841184 - RNA, 19 nt, Homo sapiens
  misc_RNA (1)...(19): siRNA sense strand
cagagagacucagcugcuu

SEQ ID NO: 841185 - RNA, 19 nt, Homo sapiens
  misc_RNA (1)...(19): siRNA sense strand
gaucuggacaagcaaguca

SEQ ID NO: 841186 - RNA, 19 nt, Homo sapiens
  misc_RNA (1)...(19): siRNA sense strand
gauaucaaugaccuuggua

SEQ ID NO: 841187 - RNA, 19 nt, Homo sapiens
  misc_RNA (1)...(19): siRNA sense strand
gggacagucugcccaucga

SEQ ID NO: 841188 - RNA, 19 nt, Homo sapiens
  misc_RNA (1)...(19): siRNA sense strand
gcauugagccccuggugua

SEQ ID NO: 841189 - RNA, 19 nt, Homo sapiens
  misc_RNA (1)...(19): siRNA sense strand
cccaggaaguggugcaguu

SEQ ID NO: 841190 - RNA, 19 nt, Homo sapiens
  misc_RNA (1)...(19): siRNA sense strand
aauguaagcccuuccacuu

SEQ ID NO: 841191 - RNA, 19 nt, Homo sapiens
  misc_RNA (1)...(19): siRNA sense strand
aagcgcuucuccaccuaua

SEQ ID NO: 841192 - RNA, 19 nt, Homo sapiens
  misc_RNA (1)...(19): siRNA sense strand
uguaagcccuuccacuucu

SEQ ID NO: 841193 - RNA, 19 nt, Homo sapiens
  misc_RNA (1)...(19): siRNA sense strand
cuacuggugcggaaucuga

SEQ ID NO: 841194 - RNA, 19 nt, Homo sapiens
  misc_RNA (1)...(19): siRNA sense strand
cagcaucacuguggagcau

SEQ ID NO: 841195 - RNA, 19 nt, Homo sapiens
  misc_RNA (1)...(19): siRNA sense strand
aggcacagcugggcgaguu

SEQ ID NO: 841196 - RNA, 19 nt, Homo sapiens
  misc_RNA (1)...(19): siRNA sense strand
gcucguccauggcaacaac

SEQ ID NO: 841197 - RNA, 19 nt, Homo sapiens
  misc_RNA (1)...(19): siRNA sense strand
gcuucagcuuccucaauga

SEQ ID NO: 841198 - RNA, 19 nt, Homo sapiens
  misc_RNA (1)...(19): siRNA sense strand
ccacuacaggcucuaccua

SEQ ID NO: 841199 - RNA, 19 nt, Homo sapiens
  misc_RNA (1)...(19): siRNA sense strand
ccacaucagugaggcuagu

SEQ ID NO: 841200 - RNA, 19 nt, Homo sapiens
  misc_RNA (1)...(19): siRNA sense strand
gguuguggcuguggauauc

SEQ ID NO: 841201 - RNA, 19 nt, Homo sapiens
  misc_RNA (1)...(19): siRNA sense strand
cgaauugaggguaguggaa

SEQ ID NO: 841202 - RNA, 19 nt, Homo sapiens
  misc_RNA (1)...(19): siRNA sense strand
ggugugggacagugaagaa

SEQ ID NO: 841203 - RNA, 19 nt, Homo sapiens
  misc_RNA (1)...(19): siRNA sense strand
acaagcaagucaaguccau

SEQ ID NO: 841204 - RNA, 19 nt, Homo sapiens
  misc_RNA (1)...(19): siRNA sense strand
ggaggcaguaugcgaguuc

SEQ ID NO: 841205 - RNA, 19 nt, Homo sapiens
  misc_RNA (1)...(19): siRNA sense strand
cagauaagggaguccaaga

SEQ ID NO: 841206 - RNA, 19 nt, Homo sapiens
  misc_RNA (1)...(19): siRNA sense strand
gcacaccuagacucaguuc

SEQ ID NO: 841207 - RNA, 19 nt, Homo sapiens
  misc_RNA (1)...(19): siRNA sense strand
caucagugaggcuagugua

SEQ ID NO: 841208 - RNA, 19 nt, Homo sapiens
  misc_RNA (1)...(19): siRNA sense strand
ccacaaaaccaguauguca

SEQ ID NO: 841209 - RNA, 19 nt, Homo sapiens
  misc_RNA (1)...(19): siRNA sense strand
cuacaggcucuaccuauag

SEQ ID NO: 841210 - RNA, 19 nt, Homo sapiens
  misc_RNA (1)...(19): siRNA sense strand
guguguaggcgaucaguau

SEQ ID NO: 841211 - RNA, 19 nt, Homo sapiens
  misc_RNA (1)...(19): siRNA sense strand
ggaccagugcacagagaga

SEQ ID NO: 841212 - RNA, 19 nt, Homo sapiens
  misc_RNA (1)...(19): siRNA sense strand
acaagucccacccauccua

SEQ ID NO: 841213 - RNA, 19 nt, Homo sapiens
  misc_RNA (1)...(19): siRNA sense strand
ccacucauacuuccacaag

SEQ ID NO: 841214 - RNA, 19 nt, Homo sapiens
  misc_RNA (1)...(19): siRNA sense strand
cacaagcccauaaucucua

SEQ ID NO: 841215 - RNA, 19 nt, Homo sapiens
  misc_RNA (1)...(19): siRNA sense strand
guaugagaucugcaugaaa

SEQ ID NO: 841216 - RNA, 19 nt, Homo sapiens
  misc_RNA (1)...(19): siRNA sense strand
ucaacaaggccuccacagu

SEQ ID NO: 841217 - RNA, 19 nt, Homo sapiens
  misc_RNA (1)...(19): siRNA sense strand
cuacagcaguguggagaag

SEQ ID NO: 841218 - RNA, 19 nt, Homo sapiens
  misc_RNA (1)...(19): siRNA sense strand
gaugaagacaaugauguuc

SEQ ID NO: 841219 - RNA, 19 nt, Homo sapiens
  misc_RNA (1)...(19): siRNA sense strand
ccucagagucuacgguuca

SEQ ID NO: 841220 - RNA, 19 nt, Homo sapiens
  misc_RNA (1)...(19): siRNA sense strand
cuacaggcccuacccucaa

SEQ ID NO: 841221 - RNA, 19 nt, Homo sapiens
  misc_RNA (1)...(19): siRNA sense strand
ggcaggaggagcuggagaa

SEQ ID NO: 841222 - RNA, 19 nt, Homo sapiens
  misc_RNA (1)...(19): siRNA sense strand
ugagaccaaggaccuguuu

SEQ ID NO: 841223 - RNA, 19 nt, Homo sapiens
  misc_RNA (1)...(19): siRNA sense strand
acgaagaugaagacaauga

SEQ ID NO: 841224 - RNA, 19 nt, Homo sapiens
  misc_RNA (1)...(19): siRNA sense strand
uaauggcugcccuggauga

SEQ ID NO: 841225 - RNA, 19 nt, Homo sapiens
  misc_RNA (1)...(19): siRNA sense strand
ccgcuugggcuuccuguau

SEQ ID NO: 841226 - RNA, 19 nt, Homo sapiens
  misc_RNA (1)...(19): siRNA sense strand
gaaggaaguuuguuaacau

SEQ ID NO: 841227 - RNA, 19 nt, Homo sapiens
  misc_RNA (1)...(19): siRNA sense strand
ggaaggaaguuuguuaaca

SEQ ID NO: 841228 - RNA, 19 nt, Homo sapiens
  misc_RNA (1)...(19): siRNA sense strand
cuacaugcauugaaagaaa

SEQ ID NO: 841229 - RNA, 19 nt, Homo sapiens
  misc_RNA (1)...(19): siRNA sense strand
gcaucuccauuuacuauga

SEQ ID NO: 841230 - RNA, 19 nt, Homo sapiens
  misc_RNA (1)...(19): siRNA sense strand
gacaaagaguucagcauca

SEQ ID NO: 841231 - RNA, 19 nt, Homo sapiens
  misc_RNA (1)...(19): siRNA sense strand
gccaguguauuccagguua

SEQ ID NO: 841232 - RNA, 19 nt, Homo sapiens
  misc_RNA (1)...(19): siRNA sense strand
ggaagaacuuguggccaaa

SEQ ID NO: 841233 - RNA, 19 nt, Homo sapiens
  misc_RNA (1)...(19): siRNA sense strand
aaaggaaggaaguuuguua

SEQ ID NO: 841234 - RNA, 19 nt, Homo sapiens
  misc_RNA (1)...(19): siRNA sense strand
ggaguucacacaaggagua

SEQ ID NO: 841235 - RNA, 19 nt, Homo sapiens
  misc_RNA (1)...(19): siRNA sense strand
ggugcuacaugcauugaaa

SEQ ID NO: 841236 - RNA, 19 nt, Homo sapiens
  misc_RNA (1)...(19): siRNA sense strand
gagaaaggaaggaaguuug

SEQ ID NO: 841237 - RNA, 19 nt, Homo sapiens
  misc_RNA (1)...(19): siRNA sense strand
gggccuauuucgacaaaga

SEQ ID NO: 841238 - RNA, 19 nt, Homo sapiens
  misc_RNA (1)...(19): siRNA sense strand
gcuggccgcucguuugcua

SEQ ID NO: 841239 - RNA, 19 nt, Homo sapiens
  misc_RNA (1)...(19): siRNA sense strand
guguaaauuugaucuguug

SEQ ID NO: 841240 - RNA, 19 nt, Homo sapiens
  misc_RNA (1)...(19): siRNA sense strand
uggguuaggacucgaauua

SEQ ID NO: 841241 - RNA, 19 nt, Homo sapiens
  misc_RNA (1)...(19): siRNA sense strand
gguuaggacucgaauuaag

SEQ ID NO: 841242 - RNA, 19 nt, Homo sapiens
  misc_RNA (1)...(19): siRNA sense strand
aauuugaucuguuggaaga

SEQ ID NO: 841243 - RNA, 19 nt, Homo sapiens
  misc_RNA (1)...(19): siRNA sense strand
ccgcagccuucgcuucuuu

SEQ ID NO: 841244 - RNA, 19 nt, Homo sapiens
  misc_RNA (1)...(19): siRNA sense strand
aaaaugcccuugcugcuaa

SEQ ID NO: 841245 - RNA, 19 nt, Homo sapiens
  misc_RNA (1)...(19): siRNA sense strand
gaaaggaaggaaguuuguu

SEQ ID NO: 841246 - RNA, 19 nt, Homo sapiens
  misc_RNA (1)...(19): siRNA sense strand
uguggaaacuaaacaacuu

SEQ ID NO: 841247 - RNA, 19 nt, Homo sapiens
  misc_RNA (1)...(19): siRNA sense strand
gaauguggaaacuaaacaa

SEQ ID NO: 841248 - RNA, 19 nt, Homo sapiens
  misc_RNA (1)...(19): siRNA sense strand
aagaggagccaguguauuc

SEQ ID NO: 841249 - RNA, 19 nt, Homo sapiens
  misc_RNA (1)...(19): siRNA sense strand
ggccacacuuugcuacuuc

SEQ ID NO: 841250 - RNA, 19 nt, Homo sapiens
  misc_RNA (1)...(19): siRNA sense strand
uuacuucacuaccugacaa

SEQ ID NO: 841251 - RNA, 19 nt, Homo sapiens
  misc_RNA (1)...(19): siRNA sense strand
ggaaucagaauguggaaac

SEQ ID NO: 841252 - RNA, 19 nt, Homo sapiens
  misc_RNA (1)...(19): siRNA sense strand
aagccugacuggaccauug

SEQ ID NO: 841253 - RNA, 19 nt, Homo sapiens
  misc_RNA (1)...(19): siRNA sense strand
gaugagaaaggaaggaagu

SEQ ID NO: 841254 - RNA, 19 nt, Homo sapiens
  misc_RNA (1)...(19): siRNA sense strand
aucagaauguggaaacuaa

SEQ ID NO: 841255 - RNA, 19 nt, Homo sapiens
  misc_RNA (1)...(19): siRNA sense strand
ccaguguauuccagguuaa

SEQ ID NO: 841256 - RNA, 19 nt, Homo sapiens
  misc_RNA (1)...(19): siRNA sense strand
ugcccuugcugcuaacaua

SEQ ID NO: 841257 - RNA, 19 nt, Homo sapiens
  misc_RNA (1)...(19): siRNA sense strand
ugagaaaggaaggaaguuu

SEQ ID NO: 841258 - RNA, 19 nt, Homo sapiens
  misc_RNA (1)...(19): siRNA sense strand
uauccaaguugcugucaca

SEQ ID NO: 841259 - RNA, 19 nt, Homo sapiens
  misc_RNA (1)...(19): siRNA sense strand
aaacaacuucuuagugcaa

SEQ ID NO: 841260 - RNA, 19 nt, Homo sapiens
  misc_RNA (1)...(19): siRNA sense strand
aagaggugcuacaugcauu

SEQ ID NO: 841261 - RNA, 19 nt, Homo sapiens
  misc_RNA (1)...(19): siRNA sense strand
gaaagaaaagguuacuuca

SEQ ID NO: 841262 - RNA, 19 nt, Homo sapiens
  misc_RNA (1)...(19): siRNA sense strand
cagagggaguucacacaag

SEQ ID NO: 841263 - RNA, 19 nt, Homo sapiens
  misc_RNA (1)...(19): siRNA sense strand
cugcuaacauagaugaaau

SEQ ID NO: 841264 - RNA, 19 nt, Homo sapiens
  misc_RNA (1)...(19): siRNA sense strand
ggaaguuuguuaacauccu

SEQ ID NO: 841265 - RNA, 19 nt, Homo sapiens
  misc_RNA (1)...(19): siRNA sense strand
gcuaacauagaugaaauug

SEQ ID NO: 841266 - RNA, 19 nt, Homo sapiens
  misc_RNA (1)...(19): siRNA sense strand
guaaauuugaucuguugga

SEQ ID NO: 841267 - RNA, 19 nt, Homo sapiens
  misc_RNA (1)...(19): siRNA sense strand
uuacuaugaugagaaagga

SEQ ID NO: 841268 - RNA, 19 nt, Homo sapiens
  misc_RNA (1)...(19): siRNA sense strand
caguguaaauuugaucugu

SEQ ID NO: 841269 - RNA, 19 nt, Homo sapiens
  misc_RNA (1)...(19): siRNA sense strand
ggaaacuaaacaacuucuu

SEQ ID NO: 841270 - RNA, 19 nt, Homo sapiens
  misc_RNA (1)...(19): siRNA sense strand
gaaucagaauguggaaacu

SEQ ID NO: 841271 - RNA, 19 nt, Homo sapiens
  misc_RNA (1)...(19): siRNA sense strand
aaggaaggaaguuuguuaa

SEQ ID NO: 841272 - RNA, 19 nt, Homo sapiens
  misc_RNA (1)...(19): siRNA sense strand
aagaacuuguggccaaaga

SEQ ID NO: 841273 - RNA, 19 nt, Homo sapiens
  misc_RNA (1)...(19): siRNA sense strand
ugucacaguguaaauuuga

SEQ ID NO: 841274 - RNA, 19 nt, Homo sapiens
  misc_RNA (1)...(19): siRNA sense strand
ggguuaggacucgaauuaa

SEQ ID NO: 841275 - RNA, 19 nt, Homo sapiens
  misc_RNA (1)...(19): siRNA sense strand
gcugcuaacauagaugaaa

SEQ ID NO: 841276 - RNA, 19 nt, Homo sapiens
  misc_RNA (1)...(19): siRNA sense strand
agaaaggaaggaaguuugu

SEQ ID NO: 841277 - RNA, 19 nt, Homo sapiens
  misc_RNA (1)...(19): siRNA sense strand
uaagaggagccaguguauu

SEQ ID NO: 841278 - RNA, 19 nt, Homo sapiens
  misc_RNA (1)...(19): siRNA sense strand
uuaagaggagccaguguau

SEQ ID NO: 841279 - RNA, 19 nt, Homo sapiens
  misc_RNA (1)...(19): siRNA sense strand
uuuaagaggagccagugua

SEQ ID NO: 841280 - RNA, 19 nt, Homo sapiens
  misc_RNA (1)...(19): siRNA sense strand
aaggaaguuuguuaacauc

SEQ ID NO: 841281 - RNA, 19 nt, Homo sapiens
  misc_RNA (1)...(19): siRNA sense strand
gaguucagcaucacagagu

SEQ ID NO: 841282 - RNA, 19 nt, Homo sapiens
  misc_RNA (1)...(19): siRNA sense strand
gaccauugcacggauugaa

SEQ ID NO: 841283 - RNA, 19 nt, Homo sapiens
  misc_RNA (1)...(19): siRNA sense strand
ucagagggaguucacacaa

SEQ ID NO: 841284 - RNA, 19 nt, Homo sapiens
  misc_RNA (1)...(19): siRNA sense strand
caucuccauuuacuaugau

SEQ ID NO: 841285 - RNA, 19 nt, Homo sapiens
  misc_RNA (1)...(19): siRNA sense strand
gaugaucguccugggauuc

SEQ ID NO: 841286 - RNA, 19 nt, Homo sapiens
  misc_RNA (1)...(19): siRNA sense strand
agaaaagguuacuucacua

SEQ ID NO: 841287 - RNA, 19 nt, Homo sapiens
  misc_RNA (1)...(19): siRNA sense strand
cuugggagcggcguuauuu

SEQ ID NO: 841288 - RNA, 19 nt, Homo sapiens
  misc_RNA (1)...(19): siRNA sense strand
aggcaucuccauuuacuau

SEQ ID NO: 841289 - RNA, 19 nt, Homo sapiens
  misc_RNA (1)...(19): siRNA sense strand
gcauugaaagaaaagguua

SEQ ID NO: 841290 - RNA, 19 nt, Homo sapiens
  misc_RNA (1)...(19): siRNA sense strand
uugcucauguauccaaguu

SEQ ID NO: 841291 - RNA, 19 nt, Homo sapiens
  misc_RNA (1)...(19): siRNA sense strand
ucuaaccagugccaacauc

SEQ ID NO: 841292 - RNA, 19 nt, Homo sapiens
  misc_RNA (1)...(19): siRNA sense strand
gcuacaugcauugaaagaa

SEQ ID NO: 841293 - RNA, 19 nt, Homo sapiens
  misc_RNA (1)...(19): siRNA sense strand
caaagaggugcuacaugca

SEQ ID NO: 841294 - RNA, 19 nt, Homo sapiens
  misc_RNA (1)...(19): siRNA sense strand
caaagaguucagcaucaca

SEQ ID NO: 841295 - RNA, 19 nt, Homo sapiens
  misc_RNA (1)...(19): siRNA sense strand
guucacacaaggaguaaag

SEQ ID NO: 841296 - RNA, 19 nt, Homo sapiens
  misc_RNA (1)...(19): siRNA sense strand
uagugcaagcuaugaguuu

SEQ ID NO: 841297 - RNA, 19 nt, Homo sapiens
  misc_RNA (1)...(19): siRNA sense strand
cggccacacuuugcuacuu

SEQ ID NO: 841298 - RNA, 19 nt, Homo sapiens
  misc_RNA (1)...(19): siRNA sense strand
gcggcguuauuuccacgaa

SEQ ID NO: 841299 - RNA, 19 nt, Homo sapiens
  misc_RNA (1)...(19): siRNA sense strand
ccauuuacuaugaugagaa

SEQ ID NO: 841300 - RNA, 19 nt, Homo sapiens
  misc_RNA (1)...(19): siRNA sense strand
gccaaagaggugcuacaug

SEQ ID NO: 841301 - RNA, 19 nt, Homo sapiens
  misc_RNA (1)...(19): siRNA sense strand
aagaaaagguuacuucacu

SEQ ID NO: 841302 - RNA, 19 nt, Homo sapiens
  misc_RNA (1)...(19): siRNA sense strand
aaucagaauguggaaacua

SEQ ID NO: 841303 - RNA, 19 nt, Homo sapiens
  misc_RNA (1)...(19): siRNA sense strand
ggacagcuuugacuucauc

SEQ ID NO: 841304 - RNA, 19 nt, Homo sapiens
  misc_RNA (1)...(19): siRNA sense strand
gaggacagcuuugacuuca

SEQ ID NO: 841305 - RNA, 19 nt, Homo sapiens
  misc_RNA (1)...(19): siRNA sense strand
ggaaugcauuuaucaucug

SEQ ID NO: 841306 - RNA, 19 nt, Homo sapiens
  misc_RNA (1)...(19): siRNA sense strand
cagaagacgucgcauuuac

SEQ ID NO: 841307 - RNA, 19 nt, Homo sapiens
  misc_RNA (1)...(19): siRNA sense strand
ccagaagacgucgcauuua

SEQ ID NO: 841308 - RNA, 19 nt, Homo sapiens
  misc_RNA (1)...(19): siRNA sense strand
ggaccaccaugucaucucu

SEQ ID NO: 841309 - RNA, 19 nt, Homo sapiens
  misc_RNA (1)...(19): siRNA sense strand
ggaggaggaggacagcuuu

SEQ ID NO: 841310 - RNA, 19 nt, Homo sapiens
  misc_RNA (1)...(19): siRNA sense strand
ggaccgggacuucaucaug

SEQ ID NO: 841311 - RNA, 19 nt, Homo sapiens
  misc_RNA (1)...(19): siRNA sense strand
uaucaucugcuucuacuug

SEQ ID NO: 841312 - RNA, 19 nt, Homo sapiens
  misc_RNA (1)...(19): siRNA sense strand
ggaggacagcuuugacuuc

SEQ ID NO: 841313 - RNA, 19 nt, Homo sapiens
  misc_RNA (1)...(19): siRNA sense strand
caucaugaccuucaacaca

SEQ ID NO: 841314 - RNA, 19 nt, Homo sapiens
  misc_RNA (1)...(19): siRNA sense strand
cccgguaccucauccugua

SEQ ID NO: 841315 - RNA, 19 nt, Homo sapiens
  misc_RNA (1)...(19): siRNA sense strand
cccagaagacgucgcauuu

SEQ ID NO: 841316 - RNA, 19 nt, Homo sapiens
  misc_RNA (1)...(19): siRNA sense strand
gcucuggguuggcuggaau

SEQ ID NO: 841317 - RNA, 19 nt, Homo sapiens
  misc_RNA (1)...(19): siRNA sense strand
uggaaugcauuuaucaucu

SEQ ID NO: 841318 - RNA, 19 nt, Homo sapiens
  misc_RNA (1)...(19): siRNA sense strand
gaagacgucgcauuuacag

SEQ ID NO: 841319 - RNA, 19 nt, Homo sapiens
  misc_RNA (1)...(19): siRNA sense strand
gcauuuaucaucugcuucu

SEQ ID NO: 841320 - RNA, 19 nt, Homo sapiens
  misc_RNA (1)...(19): siRNA sense strand
ggaggaccaccaugucauc

SEQ ID NO: 841321 - RNA, 19 nt, Homo sapiens
  misc_RNA (1)...(19): siRNA sense strand
ccugguggauggagaaugg

SEQ ID NO: 841322 - RNA, 19 nt, Homo sapiens
  misc_RNA (1)...(19): siRNA sense strand
gcuuugacuccuacggaua

SEQ ID NO: 841323 - RNA, 19 nt, Homo sapiens
  misc_RNA (1)...(19): siRNA sense strand
uggcuggaaugcauuuauc

SEQ ID NO: 841324 - RNA, 19 nt, Homo sapiens
  misc_RNA (1)...(19): siRNA sense strand
caccaugucaucucuguca

SEQ ID NO: 841325 - RNA, 19 nt, Homo sapiens
  misc_RNA (1)...(19): siRNA sense strand
uggguuggcuggaaugcau

SEQ ID NO: 841326 - RNA, 19 nt, Homo sapiens
  misc_RNA (1)...(19): siRNA sense strand
gcagucauccugggcaucu

SEQ ID NO: 841327 - RNA, 19 nt, Homo sapiens
  misc_RNA (1)...(19): siRNA sense strand
gaucuuccuggcacuguuc

SEQ ID NO: 841328 - RNA, 19 nt, Homo sapiens
  misc_RNA (1)...(19): siRNA sense strand
gaggaggacagcuuugacu

SEQ ID NO: 841329 - RNA, 19 nt, Homo sapiens
  misc_RNA (1)...(19): siRNA sense strand
gaagaaccaucagauuuaa

SEQ ID NO: 841330 - RNA, 19 nt, Homo sapiens
  misc_RNA (1)...(19): siRNA sense strand
gagaaaugguuuacagaaa

SEQ ID NO: 841331 - RNA, 19 nt, Homo sapiens
  misc_RNA (1)...(19): siRNA sense strand
cagaagagauuaagugaga

SEQ ID NO: 841332 - RNA, 19 nt, Homo sapiens
  misc_RNA (1)...(19): siRNA sense strand
gaaacagacuccagugaug

SEQ ID NO: 841333 - RNA, 19 nt, Homo sapiens
  misc_RNA (1)...(19): siRNA sense strand
gaaaugguuuacagaaaga

SEQ ID NO: 841334 - RNA, 19 nt, Homo sapiens
  misc_RNA (1)...(19): siRNA sense strand
gugaagaaauugcaucauu

SEQ ID NO: 841335 - RNA, 19 nt, Homo sapiens
  misc_RNA (1)...(19): siRNA sense strand
ugaagaaccaucagauuua

SEQ ID NO: 841336 - RNA, 19 nt, Homo sapiens
  misc_RNA (1)...(19): siRNA sense strand
aaacacagaucgaagaaau

SEQ ID NO: 841337 - RNA, 19 nt, Homo sapiens
  misc_RNA (1)...(19): siRNA sense strand
gaagaagucuagccguuca

SEQ ID NO: 841338 - RNA, 19 nt, Homo sapiens
  misc_RNA (1)...(19): siRNA sense strand
acacuuaccucucaagaug

SEQ ID NO: 841339 - RNA, 19 nt, Homo sapiens
  misc_RNA (1)...(19): siRNA sense strand
gauaaaccuuugaacuaug

SEQ ID NO: 841340 - RNA, 19 nt, Homo sapiens
  misc_RNA (1)...(19): siRNA sense strand
gagcaaagaaagccaagaa

SEQ ID NO: 841341 - RNA, 19 nt, Homo sapiens
  misc_RNA (1)...(19): siRNA sense strand
agggaaggaugacaaauaa

SEQ ID NO: 841342 - RNA, 19 nt, Homo sapiens
  misc_RNA (1)...(19): siRNA sense strand
acaagauucuggccaguuu

SEQ ID NO: 841343 - RNA, 19 nt, Homo sapiens
  misc_RNA (1)...(19): siRNA sense strand
gaaaagagaaccagaucua

SEQ ID NO: 841344 - RNA, 19 nt, Homo sapiens
  misc_RNA (1)...(19): siRNA sense strand
aaagaaagguccaagaaaa

SEQ ID NO: 841345 - RNA, 19 nt, Homo sapiens
  misc_RNA (1)...(19): siRNA sense strand
ggaugaagagccaaagaaa

SEQ ID NO: 841346 - RNA, 19 nt, Homo sapiens
  misc_RNA (1)...(19): siRNA sense strand
uaaagaaucccaagaagag

SEQ ID NO: 841347 - RNA, 19 nt, Homo sapiens
  misc_RNA (1)...(19): siRNA sense strand
auugggagcuccugaagua

SEQ ID NO: 841348 - RNA, 19 nt, Homo sapiens
  misc_RNA (1)...(19): siRNA sense strand
gaaagagagagaacaagau

SEQ ID NO: 841349 - RNA, 19 nt, Homo sapiens
  misc_RNA (1)...(19): siRNA sense strand
gaagauagcgacagugacu

SEQ ID NO: 841350 - RNA, 19 nt, Homo sapiens
  misc_RNA (1)...(19): siRNA sense strand
gaaguauucugaagauagc

SEQ ID NO: 841351 - RNA, 19 nt, Homo sapiens
  misc_RNA (1)...(19): siRNA sense strand
cuauggccaugcucuguua

SEQ ID NO: 841352 - RNA, 19 nt, Homo sapiens
  misc_RNA (1)...(19): siRNA sense strand
cuacagugcugaugagaag

SEQ ID NO: 841353 - RNA, 19 nt, Homo sapiens
  misc_RNA (1)...(19): siRNA sense strand
cgaaagagagagaacaaga

SEQ ID NO: 841354 - RNA, 19 nt, Homo sapiens
  misc_RNA (1)...(19): siRNA sense strand
agaaaugguuuacagaaag

SEQ ID NO: 841355 - RNA, 19 nt, Homo sapiens
  misc_RNA (1)...(19): siRNA sense strand
gaagagauuaagugagaga

SEQ ID NO: 841356 - RNA, 19 nt, Homo sapiens
  misc_RNA (1)...(19): siRNA sense strand
ugaaugcucagguuaugua

SEQ ID NO: 841357 - RNA, 19 nt, Homo sapiens
  misc_RNA (1)...(19): siRNA sense strand
aaagagagagaacaagauu

SEQ ID NO: 841358 - RNA, 19 nt, Homo sapiens
  misc_RNA (1)...(19): siRNA sense strand
ccacgaagaggugaaauug

SEQ ID NO: 841359 - RNA, 19 nt, Homo sapiens
  misc_RNA (1)...(19): siRNA sense strand
caaagggaaggaugacaaa

SEQ ID NO: 841360 - RNA, 19 nt, Homo sapiens
  misc_RNA (1)...(19): siRNA sense strand
aaagaauccugaaccagau

SEQ ID NO: 841361 - RNA, 19 nt, Homo sapiens
  misc_RNA (1)...(19): siRNA sense strand
cgagaaaugguuuacagaa

SEQ ID NO: 841362 - RNA, 19 nt, Homo sapiens
  misc_RNA (1)...(19): siRNA sense strand
caagaagagagacgaaaga

SEQ ID NO: 841363 - RNA, 19 nt, Homo sapiens
  misc_RNA (1)...(19): siRNA sense strand
gagagcccuugcauccuuu

SEQ ID NO: 841364 - RNA, 19 nt, Homo sapiens
  misc_RNA (1)...(19): siRNA sense strand
gcaaagaaagccaagaaaa

SEQ ID NO: 841365 - RNA, 19 nt, Homo sapiens
  misc_RNA (1)...(19): siRNA sense strand
aagggaaggaugacaaaua

SEQ ID NO: 841366 - RNA, 19 nt, Homo sapiens
  misc_RNA (1)...(19): siRNA sense strand
ucaagaugauaaaccuuug

SEQ ID NO: 841367 - RNA, 19 nt, Homo sapiens
  misc_RNA (1)...(19): siRNA sense strand
gaucuacagugcugaugag

SEQ ID NO: 841368 - RNA, 19 nt, Homo sapiens
  misc_RNA (1)...(19): siRNA sense strand
agagagcccuugcauccuu

SEQ ID NO: 841369 - RNA, 19 nt, Homo sapiens
  misc_RNA (1)...(19): siRNA sense strand
aaacguaucccacgaagag

SEQ ID NO: 841370 - RNA, 19 nt, Homo sapiens
  misc_RNA (1)...(19): siRNA sense strand
cuaaagaaucccaagaaga

SEQ ID NO: 841371 - RNA, 19 nt, Homo sapiens
  misc_RNA (1)...(19): siRNA sense strand
gaugauaaaccuuugaacu

SEQ ID NO: 841372 - RNA, 19 nt, Homo sapiens
  misc_RNA (1)...(19): siRNA sense strand
gaaccaucagauuuaauug

SEQ ID NO: 841373 - RNA, 19 nt, Homo sapiens
  misc_RNA (1)...(19): siRNA sense strand
agcuauggcugaauaugua

SEQ ID NO: 841374 - RNA, 19 nt, Homo sapiens
  misc_RNA (1)...(19): siRNA sense strand
gagaagagagcccuugcau

SEQ ID NO: 841375 - RNA, 19 nt, Homo sapiens
  misc_RNA (1)...(19): siRNA sense strand
uagcaggcaucgccgaaug

SEQ ID NO: 841376 - RNA, 19 nt, Homo sapiens
  misc_RNA (1)...(19): siRNA sense strand
ugacucugauucugaaaca

SEQ ID NO: 841377 - RNA, 19 nt, Homo sapiens
  misc_RNA (1)...(19): siRNA sense strand
ggucuaagaagagcagaaa

SEQ ID NO: 841378 - RNA, 19 nt, Homo sapiens
  misc_RNA (1)...(19): siRNA sense strand
gaaacacagaucgaagaaa

SEQ ID NO: 841379 - RNA, 19 nt, Homo sapiens
  misc_RNA (1)...(19): siRNA sense strand
acacagaucgaagaaauau

SEQ ID NO: 841380 - RNA, 19 nt, Homo sapiens
  misc_RNA (1)...(19): siRNA sense strand
ccaaagggaaggaugacaa

SEQ ID NO: 841381 - RNA, 19 nt, Homo sapiens
  misc_RNA (1)...(19): siRNA sense strand
ggccuagccuccucgacaa

SEQ ID NO: 841382 - RNA, 19 nt, Homo sapiens
  misc_RNA (1)...(19): siRNA sense strand
aacaaaggcugaagaacca

SEQ ID NO: 841383 - RNA, 19 nt, Homo sapiens
  misc_RNA (1)...(19): siRNA sense strand
auacaccaguggaggauga

SEQ ID NO: 841384 - RNA, 19 nt, Homo sapiens
  misc_RNA (1)...(19): siRNA sense strand
aaacagacuccagugauga

SEQ ID NO: 841385 - RNA, 19 nt, Homo sapiens
  misc_RNA (1)...(19): siRNA sense strand
caaaagaaagguccaagaa

SEQ ID NO: 841386 - RNA, 19 nt, Homo sapiens
  misc_RNA (1)...(19): siRNA sense strand
gaaaagaguccagugauuc

SEQ ID NO: 841387 - RNA, 19 nt, Homo sapiens
  misc_RNA (1)...(19): siRNA sense strand
cagugacucugauucugaa

SEQ ID NO: 841388 - RNA, 19 nt, Homo sapiens
  misc_RNA (1)...(19): siRNA sense strand
ggcagaagagauuaaguga

SEQ ID NO: 841389 - RNA, 19 nt, Homo sapiens
  misc_RNA (1)...(19): siRNA sense strand
gacgaaagagagagaacaa

SEQ ID NO: 841390 - RNA, 19 nt, Homo sapiens
  misc_RNA (1)...(19): siRNA sense strand
ucuaaagaaucccaagaag

SEQ ID NO: 841391 - RNA, 19 nt, Homo sapiens
  misc_RNA (1)...(19): siRNA sense strand
augcucagguuauguaaug

SEQ ID NO: 841392 - RNA, 19 nt, Homo sapiens
  misc_RNA (1)...(19): siRNA sense strand
gacagugacucugauucug

SEQ ID NO: 841393 - RNA, 19 nt, Homo sapiens
  misc_RNA (1)...(19): siRNA sense strand
aaagagaaccagaucuaca

SEQ ID NO: 841394 - RNA, 19 nt, Homo sapiens
  misc_RNA (1)...(19): siRNA sense strand
ugaaacagacuccagugau

SEQ ID NO: 841395 - RNA, 19 nt, Homo sapiens
  misc_RNA (1)...(19): siRNA sense strand
gagagacgaaagagagaga

SEQ ID NO: 841396 - RNA, 19 nt, Homo sapiens
  misc_RNA (1)...(19): siRNA sense strand
gggagcuccugaaguaugg

SEQ ID NO: 841397 - RNA, 19 nt, Homo sapiens
  misc_RNA (1)...(19): siRNA sense strand
uaagugagagagagagaau

SEQ ID NO: 841398 - RNA, 19 nt, Homo sapiens
  misc_RNA (1)...(19): siRNA sense strand
caagaugauaaaccuuuga

SEQ ID NO: 841399 - RNA, 19 nt, Homo sapiens
  misc_RNA (1)...(19): siRNA sense strand
agaaaagaguccagugauu

SEQ ID NO: 841400 - RNA, 19 nt, Homo sapiens
  misc_RNA (1)...(19): siRNA sense strand
agacuccagugaugaagau

SEQ ID NO: 841401 - RNA, 19 nt, Homo sapiens
  misc_RNA (1)...(19): siRNA sense strand
gguuauguaaugaguggua

SEQ ID NO: 841402 - RNA, 19 nt, Homo sapiens
  misc_RNA (1)...(19): siRNA sense strand
gaaugcucagguuauguaa

SEQ ID NO: 841403 - RNA, 19 nt, Homo sapiens
  misc_RNA (1)...(19): siRNA sense strand
aagaaacacagaucgaaga

SEQ ID NO: 841404 - RNA, 19 nt, Homo sapiens
  misc_RNA (1)...(19): siRNA sense strand
gaggaugaagagccaaaga

SEQ ID NO: 841405 - RNA, 19 nt, Homo sapiens
  misc_RNA (1)...(19): siRNA sense strand
gcagaaaagaguccaguga

SEQ ID NO: 841406 - RNA, 19 nt, Homo sapiens
  misc_RNA (1)...(19): siRNA sense strand
gaaaagaagaagaaacaca

SEQ ID NO: 841407 - RNA, 19 nt, Homo sapiens
  misc_RNA (1)...(19): siRNA sense strand
gaauugggagcuccugaag

SEQ ID NO: 841408 - RNA, 19 nt, Homo sapiens
  misc_RNA (1)...(19): siRNA sense strand
cuacuucagcuucuacuuc

SEQ ID NO: 841409 - RNA, 19 nt, Homo sapiens
  misc_RNA (1)...(19): siRNA sense strand
gcucuaaagaaucccaaga

SEQ ID NO: 841410 - RNA, 19 nt, Homo sapiens
  misc_RNA (1)...(19): siRNA sense strand
ccuccucgucagucuauua

SEQ ID NO: 841411 - RNA, 19 nt, Homo sapiens
  misc_RNA (1)...(19): siRNA sense strand
agaagaaacacagaucgaa

SEQ ID NO: 841412 - RNA, 19 nt, Homo sapiens
  misc_RNA (1)...(19): siRNA sense strand
cgacagugacucugauucu

SEQ ID NO: 841413 - RNA, 19 nt, Homo sapiens
  misc_RNA (1)...(19): siRNA sense strand
uacuucagcuucuacuuca

SEQ ID NO: 841414 - RNA, 19 nt, Homo sapiens
  misc_RNA (1)...(19): siRNA sense strand
acagugacucugauucuga

SEQ ID NO: 841415 - RNA, 19 nt, Homo sapiens
  misc_RNA (1)...(19): siRNA sense strand
gaaagaccaaagggaagga

SEQ ID NO: 841416 - RNA, 19 nt, Homo sapiens
  misc_RNA (1)...(19): siRNA sense strand
ccaagaagagagacgaaag

SEQ ID NO: 841417 - RNA, 19 nt, Homo sapiens
  misc_RNA (1)...(19): siRNA sense strand
cggcagaagagauuaagug

SEQ ID NO: 841418 - RNA, 19 nt, Homo sapiens
  misc_RNA (1)...(19): siRNA sense strand
uguaaaagcuggaaaacgu

SEQ ID NO: 841419 - RNA, 19 nt, Homo sapiens
  misc_RNA (1)...(19): siRNA sense strand
ugagagagagagaauugga

SEQ ID NO: 841420 - RNA, 19 nt, Homo sapiens
  misc_RNA (1)...(19): siRNA sense strand
ugauucaagcucuaaagaa

SEQ ID NO: 841421 - RNA, 19 nt, Homo sapiens
  misc_RNA (1)...(19): siRNA sense strand
gugauucaagcucuaaaga

SEQ ID NO: 841422 - RNA, 19 nt, Homo sapiens
  misc_RNA (1)...(19): siRNA sense strand
caaaaggagagcaaagaaa

SEQ ID NO: 841423 - RNA, 19 nt, Homo sapiens
  misc_RNA (1)...(19): siRNA sense strand
gcuauggcugaauauguaa

SEQ ID NO: 841424 - RNA, 19 nt, Homo sapiens
  misc_RNA (1)...(19): siRNA sense strand
auaaaccuuugaacuaugg

SEQ ID NO: 841425 - RNA, 19 nt, Homo sapiens
  misc_RNA (1)...(19): siRNA sense strand
gagagagagaauuggagaa

SEQ ID NO: 841426 - RNA, 19 nt, Homo sapiens
  misc_RNA (1)...(19): siRNA sense strand
agaaacacagaucgaagaa

SEQ ID NO: 841427 - RNA, 19 nt, Homo sapiens
  misc_RNA (1)...(19): siRNA sense strand
cuggaaggaucgaacaaag

SEQ ID NO: 841428 - RNA, 19 nt, Homo sapiens
  misc_RNA (1)...(19): siRNA sense strand
uugcauccuuuaaccaaga

SEQ ID NO: 841429 - RNA, 19 nt, Homo sapiens
  misc_RNA (1)...(19): siRNA sense strand
gaucaagugcuuucucuuu

SEQ ID NO: 841430 - RNA, 19 nt, Homo sapiens
  misc_RNA (1)...(19): siRNA sense strand
ucaagugcuuucucuuuua

SEQ ID NO: 841431 - RNA, 19 nt, Homo sapiens
  misc_RNA (1)...(19): siRNA sense strand
ggccuuuccugcccucugu

SEQ ID NO: 841432 - RNA, 19 nt, Homo sapiens
  misc_RNA (1)...(19): siRNA sense strand
uggaucaagugcuuucucu

SEQ ID NO: 841433 - RNA, 19 nt, Homo sapiens
  misc_RNA (1)...(19): siRNA sense strand
gcucggcgcuguugcuaug

SEQ ID NO: 841434 - RNA, 19 nt, Homo sapiens
  misc_RNA (1)...(19): siRNA sense strand
ccaacgcgcugaccaaugg

SEQ ID NO: 841435 - RNA, 19 nt, Homo sapiens
  misc_RNA (1)...(19): siRNA sense strand
cagcaucuaucacguguuc

SEQ ID NO: 841436 - RNA, 19 nt, Homo sapiens
  misc_RNA (1)...(19): siRNA sense strand
ccugccaccucgcuucuua

SEQ ID NO: 841437 - RNA, 19 nt, Homo sapiens
  misc_RNA (1)...(19): siRNA sense strand
gcaggacaguugcauucug

SEQ ID NO: 841438 - RNA, 19 nt, Homo sapiens
  misc_RNA (1)...(19): siRNA sense strand
ucacuuuccugcccuucuu

SEQ ID NO: 841439 - RNA, 19 nt, Homo sapiens
  misc_RNA (1)...(19): siRNA sense strand
uaccugugguggucaaaga

SEQ ID NO: 841440 - RNA, 19 nt, Homo sapiens
  misc_RNA (1)...(19): siRNA sense strand
uaaggccuaucagcuucua

SEQ ID NO: 841441 - RNA, 19 nt, Homo sapiens
  misc_RNA (1)...(19): siRNA sense strand
uuacgucucugugcuugug

SEQ ID NO: 841442 - RNA, 19 nt, Homo sapiens
  misc_RNA (1)...(19): siRNA sense strand
ucuuagcacuggccuuugu

SEQ ID NO: 841443 - RNA, 19 nt, Homo sapiens
  misc_RNA (1)...(19): siRNA sense strand
gcauucuguggccuucuua

SEQ ID NO: 841444 - RNA, 19 nt, Homo sapiens
  misc_RNA (1)...(19): siRNA sense strand
ucgacuuccuugagcguuu

SEQ ID NO: 841445 - RNA, 19 nt, Homo sapiens
  misc_RNA (1)...(19): siRNA sense strand
gugccucgaaugucacuuu

SEQ ID NO: 841446 - RNA, 19 nt, Homo sapiens
  misc_RNA (1)...(19): siRNA sense strand
cagaggaagagguggaaga

SEQ ID NO: 841447 - RNA, 19 nt, Homo sapiens
  misc_RNA (1)...(19): siRNA sense strand
cuucuuagcacuggccuuu

SEQ ID NO: 841448 - RNA, 19 nt, Homo sapiens
  misc_RNA (1)...(19): siRNA sense strand
ugucgugggugcugugucu

SEQ ID NO: 841449 - RNA, 19 nt, Homo sapiens
  misc_RNA (1)...(19): siRNA sense strand
ccaccaacgcgcugaccaa

SEQ ID NO: 841450 - RNA, 19 nt, Homo sapiens
  misc_RNA (1)...(19): siRNA sense strand
gaacaacucuggccucuuu

SEQ ID NO: 841451 - RNA, 19 nt, Homo sapiens
  misc_RNA (1)...(19): siRNA sense strand
ccagauaccucaccuuaaa

SEQ ID NO: 841452 - RNA, 19 nt, Homo sapiens
  misc_RNA (1)...(19): siRNA sense strand
caaggacaauucaacaaua

SEQ ID NO: 841453 - RNA, 19 nt, Homo sapiens
  misc_RNA (1)...(19): siRNA sense strand
cagcauaacuaaugacaaa

SEQ ID NO: 841454 - RNA, 19 nt, Homo sapiens
  misc_RNA (1)...(19): siRNA sense strand
gaacaacccgaacuaguuu

SEQ ID NO: 841455 - RNA, 19 nt, Homo sapiens
  misc_RNA (1)...(19): siRNA sense strand
gaacgaugaugaugauaca

SEQ ID NO: 841456 - RNA, 19 nt, Homo sapiens
  misc_RNA (1)...(19): siRNA sense strand
uaacaacccaucaauauga

SEQ ID NO: 841457 - RNA, 19 nt, Homo sapiens
  misc_RNA (1)...(19): siRNA sense strand
gcacaccaaucaaaaguua

SEQ ID NO: 841458 - RNA, 19 nt, Homo sapiens
  misc_RNA (1)...(19): siRNA sense strand
cggaagaaauaaagucuaa

SEQ ID NO: 841459 - RNA, 19 nt, Homo sapiens
  misc_RNA (1)...(19): siRNA sense strand
gaaaggaucaugucuugga

SEQ ID NO: 841460 - RNA, 19 nt, Homo sapiens
  misc_RNA (1)...(19): siRNA sense strand
gcacaaaccggaccuggaa

SEQ ID NO: 841461 - RNA, 19 nt, Homo sapiens
  misc_RNA (1)...(19): siRNA sense strand
gaucaugucuuggauauac

SEQ ID NO: 841462 - RNA, 19 nt, Homo sapiens
  misc_RNA (1)...(19): siRNA sense strand
cauggaagcucaaggucua

SEQ ID NO: 841463 - RNA, 19 nt, Homo sapiens
  misc_RNA (1)...(19): siRNA sense strand
aaucugaccuugucuguga

SEQ ID NO: 841464 - RNA, 19 nt, Homo sapiens
  misc_RNA (1)...(19): siRNA sense strand
gacaauggauguaugaaag

SEQ ID NO: 841465 - RNA, 19 nt, Homo sapiens
  misc_RNA (1)...(19): siRNA sense strand
ugagauccuucauucauaa

SEQ ID NO: 841466 - RNA, 19 nt, Homo sapiens
  misc_RNA (1)...(19): siRNA sense strand
caacuaacccuuacugcuu

SEQ ID NO: 841467 - RNA, 19 nt, Homo sapiens
  misc_RNA (1)...(19): siRNA sense strand
ccgagaaccugaagaaugu

SEQ ID NO: 841468 - RNA, 19 nt, Homo sapiens
  misc_RNA (1)...(19): siRNA sense strand
ccgaaaggaucaugucuug

SEQ ID NO: 841469 - RNA, 19 nt, Homo sapiens
  misc_RNA (1)...(19): siRNA sense strand
acaaaggguuuccaccuaa

SEQ ID NO: 841470 - RNA, 19 nt, Homo sapiens
  misc_RNA (1)...(19): siRNA sense strand
ggacaauggauguaugaaa

SEQ ID NO: 841471 - RNA, 19 nt, Homo sapiens
  misc_RNA (1)...(19): siRNA sense strand
gaucgaaauucuggauuga

SEQ ID NO: 841472 - RNA, 19 nt, Homo sapiens
  misc_RNA (1)...(19): siRNA sense strand
ggacuuggguaucuuguac

SEQ ID NO: 841473 - RNA, 19 nt, Homo sapiens
  misc_RNA (1)...(19): siRNA sense strand
ccugaagaauguaccguua

SEQ ID NO: 841474 - RNA, 19 nt, Homo sapiens
  misc_RNA (1)...(19): siRNA sense strand
caaaggguuuccaccuaaa

SEQ ID NO: 841475 - RNA, 19 nt, Homo sapiens
  misc_RNA (1)...(19): siRNA sense strand
acaaauggguagaucgaaa

SEQ ID NO: 841476 - RNA, 19 nt, Homo sapiens
  misc_RNA (1)...(19): siRNA sense strand
gcaaugaagggacuaacaa

SEQ ID NO: 841477 - RNA, 19 nt, Homo sapiens
  misc_RNA (1)...(19): siRNA sense strand
uaccuucccucaccagaua

SEQ ID NO: 841478 - RNA, 19 nt, Homo sapiens
  misc_RNA (1)...(19): siRNA sense strand
ccaaaggccuucuguacca

SEQ ID NO: 841479 - RNA, 19 nt, Homo sapiens
  misc_RNA (1)...(19): siRNA sense strand
gggaacuuaugauuuagaa

SEQ ID NO: 841480 - RNA, 19 nt, Homo sapiens
  misc_RNA (1)...(19): siRNA sense strand
cuuaaaugcuagccaaauu

SEQ ID NO: 841481 - RNA, 19 nt, Homo sapiens
  misc_RNA (1)...(19): siRNA sense strand
gcucacagguuccaaucug

SEQ ID NO: 841482 - RNA, 19 nt, Homo sapiens
  misc_RNA (1)...(19): siRNA sense strand
caccagauaccucaccuua

SEQ ID NO: 841483 - RNA, 19 nt, Homo sapiens
  misc_RNA (1)...(19): siRNA sense strand
uacaaaggguuuccaccua

SEQ ID NO: 841484 - RNA, 19 nt, Homo sapiens
  misc_RNA (1)...(19): siRNA sense strand
aagcagaaguacagaauca

SEQ ID NO: 841485 - RNA, 19 nt, Homo sapiens
  misc_RNA (1)...(19): siRNA sense strand
ggacuaacaacccaucaau

SEQ ID NO: 841486 - RNA, 19 nt, Homo sapiens
  misc_RNA (1)...(19): siRNA sense strand
uuacaaaccugagauccuu

SEQ ID NO: 841487 - RNA, 19 nt, Homo sapiens
  misc_RNA (1)...(19): siRNA sense strand
uagacaauguuccugguuu

SEQ ID NO: 841488 - RNA, 19 nt, Homo sapiens
  misc_RNA (1)...(19): siRNA sense strand
uaaauggucugggcgaugu

SEQ ID NO: 841489 - RNA, 19 nt, Homo sapiens
  misc_RNA (1)...(19): siRNA sense strand
uaccucaccuuaaaugcua

SEQ ID NO: 841490 - RNA, 19 nt, Homo sapiens
  misc_RNA (1)...(19): siRNA sense strand
caugucaaguuucaaauag

SEQ ID NO: 841491 - RNA, 19 nt, Homo sapiens
  misc_RNA (1)...(19): siRNA sense strand
gaauguaccguuacuugau

SEQ ID NO: 841492 - RNA, 19 nt, Homo sapiens
  misc_RNA (1)...(19): siRNA sense strand
gcaccuucaugcccucuau

SEQ ID NO: 841493 - RNA, 19 nt, Homo sapiens
  misc_RNA (1)...(19): siRNA sense strand
ccacuaagcagaccuugga

SEQ ID NO: 841494 - RNA, 19 nt, Homo sapiens
  misc_RNA (1)...(19): siRNA sense strand
cugagauccuucauucaua

SEQ ID NO: 841495 - RNA, 19 nt, Homo sapiens
  misc_RNA (1)...(19): siRNA sense strand
cacuaucuaucuugacuaa

SEQ ID NO: 841496 - RNA, 19 nt, Homo sapiens
  misc_RNA (1)...(19): siRNA sense strand
gaccuauucuggacaaugg

SEQ ID NO: 841497 - RNA, 19 nt, Homo sapiens
  misc_RNA (1)...(19): siRNA sense strand
cuaaacauuuccaaagcaa

SEQ ID NO: 841498 - RNA, 19 nt, Homo sapiens
  misc_RNA (1)...(19): siRNA sense strand
gugaacaucuagauaaugc

SEQ ID NO: 841499 - RNA, 19 nt, Homo sapiens
  misc_RNA (1)...(19): siRNA sense strand
gcucagcuguucccuugau

SEQ ID NO: 841500 - RNA, 19 nt, Homo sapiens
  misc_RNA (1)...(19): siRNA sense strand
caggaacgaugaugaugau

SEQ ID NO: 841501 - RNA, 19 nt, Homo sapiens
  misc_RNA (1)...(19): siRNA sense strand
gaugaugauacaaguguuu

SEQ ID NO: 841502 - RNA, 19 nt, Homo sapiens
  misc_RNA (1)...(19): siRNA sense strand
ucuaauugcugguuaugug

SEQ ID NO: 841503 - RNA, 19 nt, Homo sapiens
  misc_RNA (1)...(19): siRNA sense strand
gcaccugcuugcuccaguu

SEQ ID NO: 841504 - RNA, 19 nt, Homo sapiens
  misc_RNA (1)...(19): siRNA sense strand
cuaucuaucuugacuaauc

SEQ ID NO: 841505 - RNA, 19 nt, Homo sapiens
  misc_RNA (1)...(19): siRNA sense strand
guacagaaucacucuacuu

SEQ ID NO: 841506 - RNA, 19 nt, Homo sapiens
  misc_RNA (1)...(19): siRNA sense strand
gacuaacaacccaucaaua

SEQ ID NO: 841507 - RNA, 19 nt, Homo sapiens
  misc_RNA (1)...(19): siRNA sense strand
aaccugagauccuucauuc

SEQ ID NO: 841508 - RNA, 19 nt, Homo sapiens
  misc_RNA (1)...(19): siRNA sense strand
agaacaacccgaacuaguu

SEQ ID NO: 841509 - RNA, 19 nt, Homo sapiens
  misc_RNA (1)...(19): siRNA sense strand
gauccuucauucauaaagu

SEQ ID NO: 841510 - RNA, 19 nt, Homo sapiens
  misc_RNA (1)...(19): siRNA sense strand
gauguggacuuggguaucu

SEQ ID NO: 841511 - RNA, 19 nt, Homo sapiens
  misc_RNA (1)...(19): siRNA sense strand
gaaauggagaugugcagau

SEQ ID NO: 841512 - RNA, 19 nt, Homo sapiens
  misc_RNA (1)...(19): siRNA sense strand
ccuaaacaauacuguaauc

SEQ ID NO: 841513 - RNA, 19 nt, Homo sapiens
  misc_RNA (1)...(19): siRNA sense strand
ucagucuaauugcugguua

SEQ ID NO: 841514 - RNA, 19 nt, Homo sapiens
  misc_RNA (1)...(19): siRNA sense strand
acuaacaacccaucaauau

SEQ ID NO: 841515 - RNA, 19 nt, Homo sapiens
  misc_RNA (1)...(19): siRNA sense strand
aaucuauguucgugucuuu

SEQ ID NO: 841516 - RNA, 19 nt, Homo sapiens
  misc_RNA (1)...(19): siRNA sense strand
aguguugccucuauauaaa

SEQ ID NO: 841517 - RNA, 19 nt, Homo sapiens
  misc_RNA (1)...(19): siRNA sense strand
caguguugccucuauauaa

SEQ ID NO: 841518 - RNA, 19 nt, Homo sapiens
  misc_RNA (1)...(19): siRNA sense strand
cauaaaguaacaccgcaua

SEQ ID NO: 841519 - RNA, 19 nt, Homo sapiens
  misc_RNA (1)...(19): siRNA sense strand
ccagcuauuucgcaaccua

SEQ ID NO: 841520 - RNA, 19 nt, Homo sapiens
  misc_RNA (1)...(19): siRNA sense strand
agacaauguuccugguuug

SEQ ID NO: 841521 - RNA, 19 nt, Homo sapiens
  misc_RNA (1)...(19): siRNA sense strand
gacaauccaccucuguauu

SEQ ID NO: 841522 - RNA, 19 nt, Homo sapiens
  misc_RNA (1)...(19): siRNA sense strand
ccaaggagacacagacaau

SEQ ID NO: 841523 - RNA, 19 nt, Homo sapiens
  misc_RNA (1)...(19): siRNA sense strand
uaaaguaacaccgcauaga

SEQ ID NO: 841524 - RNA, 19 nt, Homo sapiens
  misc_RNA (1)...(19): siRNA sense strand
gacagaggcacaugggaaa

SEQ ID NO: 841525 - RNA, 19 nt, Homo sapiens
  misc_RNA (1)...(19): siRNA sense strand
aaauggagaugugcagaug

SEQ ID NO: 841526 - RNA, 19 nt, Homo sapiens
  misc_RNA (1)...(19): siRNA sense strand
caugggaaauggagaugug

SEQ ID NO: 841527 - RNA, 19 nt, Homo sapiens
  misc_RNA (1)...(19): siRNA sense strand
ggacccuuccuagguaaua

SEQ ID NO: 841528 - RNA, 19 nt, Homo sapiens
  misc_RNA (1)...(19): siRNA sense strand
ggagacugguucagaucau

SEQ ID NO: 841529 - RNA, 19 nt, Homo sapiens
  misc_RNA (1)...(19): siRNA sense strand
aauguaccguuacuugauu

SEQ ID NO: 841530 - RNA, 19 nt, Homo sapiens
  misc_RNA (1)...(19): siRNA sense strand
ccaaggacaauucaacaau

SEQ ID NO: 841531 - RNA, 19 nt, Homo sapiens
  misc_RNA (1)...(19): siRNA sense strand
gcacaugggaaauggagau

SEQ ID NO: 841532 - RNA, 19 nt, Homo sapiens
  misc_RNA (1)...(19): siRNA sense strand
gacacuaucuaucuugacu

SEQ ID NO: 841533 - RNA, 19 nt, Homo sapiens
  misc_RNA (1)...(19): siRNA sense strand
gcaaucagcacagcuccuu

SEQ ID NO: 841534 - RNA, 19 nt, Homo sapiens
  misc_RNA (1)...(19): siRNA sense strand
guuccaaucugaccuuguc

SEQ ID NO: 841535 - RNA, 19 nt, Homo sapiens
  misc_RNA (1)...(19): siRNA sense strand
ucacucuacuuccuccuau

SEQ ID NO: 841536 - RNA, 19 nt, Homo sapiens
  misc_RNA (1)...(19): siRNA sense strand
agaucgaaauucuggauug

SEQ ID NO: 841537 - RNA, 19 nt, Homo sapiens
  misc_RNA (1)...(19): siRNA sense strand
caaauggguagaucgaaau

SEQ ID NO: 841538 - RNA, 19 nt, Homo sapiens
  misc_RNA (1)...(19): siRNA sense strand
ccaggaacgaugaugauga

SEQ ID NO: 841539 - RNA, 19 nt, Homo sapiens
  misc_RNA (1)...(19): siRNA sense strand
gcuauuucgcaaccuauuu

SEQ ID NO: 841540 - RNA, 19 nt, Homo sapiens
  misc_RNA (1)...(19): siRNA sense strand
aacuaacccuuacugcuuu

SEQ ID NO: 841541 - RNA, 19 nt, Homo sapiens
  misc_RNA (1)...(19): siRNA sense strand
gagacugguucagaucaug

SEQ ID NO: 841542 - RNA, 19 nt, Homo sapiens
  misc_RNA (1)...(19): siRNA sense strand
gcaaugggguguacaaagg

SEQ ID NO: 841543 - RNA, 19 nt, Homo sapiens
  misc_RNA (1)...(19): siRNA sense strand
aguggacccuuccuaggua

SEQ ID NO: 841544 - RNA, 19 nt, Homo sapiens
  misc_RNA (1)...(19): siRNA sense strand
gcuaugugcuuuuaauugu

SEQ ID NO: 841545 - RNA, 19 nt, Homo sapiens
  misc_RNA (1)...(19): siRNA sense strand
gaaaaggcaauucuaaaca

SEQ ID NO: 841546 - RNA, 19 nt, Homo sapiens
  misc_RNA (1)...(19): siRNA sense strand
ggacaauucaacaauaagg

SEQ ID NO: 841547 - RNA, 19 nt, Homo sapiens
  misc_RNA (1)...(19): siRNA sense strand
aaaguaacaccgcauagau

SEQ ID NO: 841548 - RNA, 19 nt, Homo sapiens
  misc_RNA (1)...(19): siRNA sense strand
ggaacgaugaugaugauac

SEQ ID NO: 841549 - RNA, 19 nt, Homo sapiens
  misc_RNA (1)...(19): siRNA sense strand
gaaguacagaaucacucua

SEQ ID NO: 841550 - RNA, 19 nt, Homo sapiens
  misc_RNA (1)...(19): siRNA sense strand
agaggcagcuguacuguua

SEQ ID NO: 841551 - RNA, 19 nt, Homo sapiens
  misc_RNA (1)...(19): siRNA sense strand
gcaggaaccacaucaaauc

SEQ ID NO: 841552 - RNA, 19 nt, Homo sapiens
  misc_RNA (1)...(19): siRNA sense strand
ggaaccacaucaaaucaag

SEQ ID NO: 841553 - RNA, 19 nt, Homo sapiens
  misc_RNA (1)...(19): siRNA sense strand
gcacgcaggcccaugagaa

SEQ ID NO: 841554 - RNA, 19 nt, Homo sapiens
  misc_RNA (1)...(19): siRNA sense strand
gccagcugcuccuauauga

SEQ ID NO: 841555 - RNA, 19 nt, Homo sapiens
  misc_RNA (1)...(19): siRNA sense strand
gggcugccauucagaccua

SEQ ID NO: 841556 - RNA, 19 nt, Homo sapiens
  misc_RNA (1)...(19): siRNA sense strand
caugagaacagcagggaua

SEQ ID NO: 841557 - RNA, 19 nt, Homo sapiens
  misc_RNA (1)...(19): siRNA sense strand
gggagcaccuugugucuac

SEQ ID NO: 841558 - RNA, 19 nt, Homo sapiens
  misc_RNA (1)...(19): siRNA sense strand
gcagcaggcaccacuguga

SEQ ID NO: 841559 - RNA, 19 nt, Homo sapiens
  misc_RNA (1)...(19): siRNA sense strand
ccgcaaggcuguggaguuc

SEQ ID NO: 841560 - RNA, 19 nt, Homo sapiens
  misc_RNA (1)...(19): siRNA sense strand
gggcagcugugacugaucu

SEQ ID NO: 841561 - RNA, 19 nt, Homo sapiens
  misc_RNA (1)...(19): siRNA sense strand
ggacuucucgcccuuugau

SEQ ID NO: 841562 - RNA, 19 nt, Homo sapiens
  misc_RNA (1)...(19): siRNA sense strand
gaugacguguucccagaca

SEQ ID NO: 841563 - RNA, 19 nt, Homo sapiens
  misc_RNA (1)...(19): siRNA sense strand
aggaggagcugcugaaugc

SEQ ID NO: 841564 - RNA, 19 nt, Homo sapiens
  misc_RNA (1)...(19): siRNA sense strand
acaagcagcugcggaucuu

SEQ ID NO: 841565 - RNA, 19 nt, Homo sapiens
  misc_RNA (1)...(19): siRNA sense strand
cgucaugggcugcgaggua

SEQ ID NO: 841566 - RNA, 19 nt, Homo sapiens
  misc_RNA (1)...(19): siRNA sense strand
gcuucaggguguccaaguu

SEQ ID NO: 841567 - RNA, 19 nt, Homo sapiens
  misc_RNA (1)...(19): siRNA sense strand
caagcgaggguuucucuuc

SEQ ID NO: 841568 - RNA, 19 nt, Homo sapiens
  misc_RNA (1)...(19): siRNA sense strand
ucacaggccacacggagaa

SEQ ID NO: 841569 - RNA, 19 nt, Homo sapiens
  misc_RNA (1)...(19): siRNA sense strand
gcaccgagacagccacauc

SEQ ID NO: 841570 - RNA, 19 nt, Homo sapiens
  misc_RNA (1)...(19): siRNA sense strand
ccacaucaccaaccucaag

SEQ ID NO: 841571 - RNA, 19 nt, Homo sapiens
  misc_RNA (1)...(19): siRNA sense strand
gagaggcagcuguacuguu

SEQ ID NO: 841572 - RNA, 19 nt, Homo sapiens
  misc_RNA (1)...(19): siRNA sense strand
gaaggaggagcugcugaau

SEQ ID NO: 841573 - RNA, 19 nt, Homo sapiens
  misc_RNA (1)...(19): siRNA sense strand
acgcggagcucgcauuguc

SEQ ID NO: 841574 - RNA, 19 nt, Homo sapiens
  misc_RNA (1)...(19): siRNA sense strand
gcgcaguaccuggaagaaa

SEQ ID NO: 841575 - RNA, 19 nt, Homo sapiens
  misc_RNA (1)...(19): siRNA sense strand
cgaccguccugguguacug

SEQ ID NO: 841576 - RNA, 19 nt, Homo sapiens
  misc_RNA (1)...(19): siRNA sense strand
agaaaagucugaccagcaa

SEQ ID NO: 841577 - RNA, 19 nt, Homo sapiens
  misc_RNA (1)...(19): siRNA sense strand
gcgagaggcagcuguacug

SEQ ID NO: 841578 - RNA, 19 nt, Homo sapiens
  misc_RNA (1)...(19): siRNA sense strand
cagcugcuccuauaugaag

SEQ ID NO: 841579 - RNA, 19 nt, Homo sapiens
  misc_RNA (1)...(19): siRNA sense strand
caccuugugucuacuggau

SEQ ID NO: 841580 - RNA, 19 nt, Homo sapiens
  misc_RNA (1)...(19): siRNA sense strand
cgcaguaccuggaagaaaa

SEQ ID NO: 841581 - RNA, 19 nt, Homo sapiens
  misc_RNA (1)...(19): siRNA sense strand
gcuggugucuggcuuugac

SEQ ID NO: 841582 - RNA, 19 nt, Homo sapiens
  misc_RNA (1)...(19): siRNA sense strand
ccaccugggcugccauuca

SEQ ID NO: 841583 - RNA, 19 nt, Homo sapiens
  misc_RNA (1)...(19): siRNA sense strand
caggaaccacaucaaauca

SEQ ID NO: 841584 - RNA, 19 nt, Homo sapiens
  misc_RNA (1)...(19): siRNA sense strand
agaaggaggagcugcugaa

SEQ ID NO: 841585 - RNA, 19 nt, Homo sapiens
  misc_RNA (1)...(19): siRNA sense strand
gagacagccacaucaccaa

SEQ ID NO: 841586 - RNA, 19 nt, Homo sapiens
  misc_RNA (1)...(19): siRNA sense strand
gcccaucggcuaccaugug

SEQ ID NO: 841587 - RNA, 19 nt, Homo sapiens
  misc_RNA (1)...(19): siRNA sense strand
cgagguacuccgcguccua

SEQ ID NO: 841588 - RNA, 19 nt, Homo sapiens
  misc_RNA (1)...(19): siRNA sense strand
cagcaggcaccacugugaa

SEQ ID NO: 841589 - RNA, 19 nt, Homo sapiens
  misc_RNA (1)...(19): siRNA sense strand
cuuccaggaugacguguuc

SEQ ID NO: 841590 - RNA, 19 nt, Homo sapiens
  misc_RNA (1)...(19): siRNA sense strand
acaaccagcaggugcagaa

SEQ ID NO: 841591 - RNA, 19 nt, Homo sapiens
  misc_RNA (1)...(19): siRNA sense strand
caccugggcugccauucag

SEQ ID NO: 841592 - RNA, 19 nt, Homo sapiens
  misc_RNA (1)...(19): siRNA sense strand
gcaccugggagcaccuugu

SEQ ID NO: 841593 - RNA, 19 nt, Homo sapiens
  misc_RNA (1)...(19): siRNA sense strand
gacaagcagcugcggaucu

SEQ ID NO: 841594 - RNA, 19 nt, Homo sapiens
  misc_RNA (1)...(19): siRNA sense strand
ccugcagccuccugacaug

SEQ ID NO: 841595 - RNA, 19 nt, Homo sapiens
  misc_RNA (1)...(19): siRNA sense strand
cggcuucugugccaacaag

SEQ ID NO: 841596 - RNA, 19 nt, Homo sapiens
  misc_RNA (1)...(19): siRNA sense strand
ccuugugucuacuggauuc

SEQ ID NO: 841597 - RNA, 19 nt, Homo sapiens
  misc_RNA (1)...(19): siRNA sense strand
agcgccagcugcuccuaua

SEQ ID NO: 841598 - RNA, 19 nt, Homo sapiens
  misc_RNA (1)...(19): siRNA sense strand
ucaccacgccagagacugu

SEQ ID NO: 841599 - RNA, 19 nt, Homo sapiens
  misc_RNA (1)...(19): siRNA sense strand
ugagagugacggcuucugu

SEQ ID NO: 841600 - RNA, 19 nt, Homo sapiens
  misc_RNA (1)...(19): siRNA sense strand
ccaaugagaugaauauuuc

SEQ ID NO: 841601 - RNA, 19 nt, Homo sapiens
  misc_RNA (1)...(19): siRNA sense strand
gagaaguccugcuguguuu

SEQ ID NO: 841602 - RNA, 19 nt, Homo sapiens
  misc_RNA (1)...(19): siRNA sense strand
caucaucucuuacuuugaa

SEQ ID NO: 841603 - RNA, 19 nt, Homo sapiens
  misc_RNA (1)...(19): siRNA sense strand
gcucauauguuagauuuga

SEQ ID NO: 841604 - RNA, 19 nt, Homo sapiens
  misc_RNA (1)...(19): siRNA sense strand
agacaaguauggcaaauug

SEQ ID NO: 841605 - RNA, 19 nt, Homo sapiens
  misc_RNA (1)...(19): siRNA sense strand
gaagccgccuccugguaua

SEQ ID NO: 841606 - RNA, 19 nt, Homo sapiens
  misc_RNA (1)...(19): siRNA sense strand
caugcuugcucauauguua

SEQ ID NO: 841607 - RNA, 19 nt, Homo sapiens
  misc_RNA (1)...(19): siRNA sense strand
gcaaaucaacaguacguuu

SEQ ID NO: 841608 - RNA, 19 nt, Homo sapiens
  misc_RNA (1)...(19): siRNA sense strand
ggacgcacgugccuacaug

SEQ ID NO: 841609 - RNA, 19 nt, Homo sapiens
  misc_RNA (1)...(19): siRNA sense strand
gccaucaucucuuacuuug

SEQ ID NO: 841610 - RNA, 19 nt, Homo sapiens
  misc_RNA (1)...(19): siRNA sense strand
gaccaacuguauaugauca

SEQ ID NO: 841611 - RNA, 19 nt, Homo sapiens
  misc_RNA (1)...(19): siRNA sense strand
gcucugccaucgcuaguau

SEQ ID NO: 841612 - RNA, 19 nt, Homo sapiens
  misc_RNA (1)...(19): siRNA sense strand
ggacauggcagcccugaag

SEQ ID NO: 841613 - RNA, 19 nt, Homo sapiens
  misc_RNA (1)...(19): siRNA sense strand
ggacagaagcaguacaaca

SEQ ID NO: 841614 - RNA, 19 nt, Homo sapiens
  misc_RNA (1)...(19): siRNA sense strand
gccaaugagaugaauauuu

SEQ ID NO: 841615 - RNA, 19 nt, Homo sapiens
  misc_RNA (1)...(19): siRNA sense strand
gaaggauccuaaccaaggu

SEQ ID NO: 841616 - RNA, 19 nt, Homo sapiens
  misc_RNA (1)...(19): siRNA sense strand
gagccaaugagaugaauau

SEQ ID NO: 841617 - RNA, 19 nt, Homo sapiens
  misc_RNA (1)...(19): siRNA sense strand
ggcagcagcuccuagaaag

SEQ ID NO: 841618 - RNA, 19 nt, Homo sapiens
  misc_RNA (1)...(19): siRNA sense strand
caaaagagccaaugagaug

SEQ ID NO: 841619 - RNA, 19 nt, Homo sapiens
  misc_RNA (1)...(19): siRNA sense strand
caaaucaacaguacguuuc

SEQ ID NO: 841620 - RNA, 19 nt, Homo sapiens
  misc_RNA (1)...(19): siRNA sense strand
ggagacaaguauggcaaau

SEQ ID NO: 841621 - RNA, 19 nt, Homo sapiens
  misc_RNA (1)...(19): siRNA sense strand
ggugauggguauuacagau

SEQ ID NO: 841622 - RNA, 19 nt, Homo sapiens
  misc_RNA (1)...(19): siRNA sense strand
gacagaagcaguacaacau

SEQ ID NO: 841623 - RNA, 19 nt, Homo sapiens
  misc_RNA (1)...(19): siRNA sense strand
gcagaagguccggcaguuu

SEQ ID NO: 841624 - RNA, 19 nt, Homo sapiens
  misc_RNA (1)...(19): siRNA sense strand
gcuaguaugguauuuggaa

SEQ ID NO: 841625 - RNA, 19 nt, Homo sapiens
  misc_RNA (1)...(19): siRNA sense strand
auuaaggacuuucugaaga

SEQ ID NO: 841626 - RNA, 19 nt, Homo sapiens
  misc_RNA (1)...(19): siRNA sense strand
agacgggugugcaggugua

SEQ ID NO: 841627 - RNA, 19 nt, Homo sapiens
  misc_RNA (1)...(19): siRNA sense strand
ucucuuacuuugaacaguu

SEQ ID NO: 841628 - RNA, 19 nt, Homo sapiens
  misc_RNA (1)...(19): siRNA sense strand
cagaagguccggcaguuug

SEQ ID NO: 841629 - RNA, 19 nt, Homo sapiens
  misc_RNA (1)...(19): siRNA sense strand
cgaaaauauuccucagaua

SEQ ID NO: 841630 - RNA, 19 nt, Homo sapiens
  misc_RNA (1)...(19): siRNA sense strand
ggcagaagguccggcaguu

SEQ ID NO: 841631 - RNA, 19 nt, Homo sapiens
  misc_RNA (1)...(19): siRNA sense strand
uuggugccaucaucucuua

SEQ ID NO: 841632 - RNA, 19 nt, Homo sapiens
  misc_RNA (1)...(19): siRNA sense strand
ggccaugcuugcucauaug

SEQ ID NO: 841633 - RNA, 19 nt, Homo sapiens
  misc_RNA (1)...(19): siRNA sense strand
cgagaaguccugcuguguu

SEQ ID NO: 841634 - RNA, 19 nt, Homo sapiens
  misc_RNA (1)...(19): siRNA sense strand
gcaccaagagggccgugaa

SEQ ID NO: 841635 - RNA, 19 nt, Homo sapiens
  misc_RNA (1)...(19): siRNA sense strand
gcucagccaucgacuacag

SEQ ID NO: 841636 - RNA, 19 nt, Homo sapiens
  misc_RNA (1)...(19): siRNA sense strand
gagacaaguauggcaaauu

SEQ ID NO: 841637 - RNA, 19 nt, Homo sapiens
  misc_RNA (1)...(19): siRNA sense strand
gcuguggaccaacuguaua

SEQ ID NO: 841638 - RNA, 19 nt, Homo sapiens
  misc_RNA (1)...(19): siRNA sense strand
gaaccugaagggccgagaa

SEQ ID NO: 841639 - RNA, 19 nt, Homo sapiens
  misc_RNA (1)...(19): siRNA sense strand
gcacgccaaaggcaaagaa

SEQ ID NO: 841640 - RNA, 19 nt, Homo sapiens
  misc_RNA (1)...(19): siRNA sense strand
gaggguaaccgaaaauauu

SEQ ID NO: 841641 - RNA, 19 nt, Homo sapiens
  misc_RNA (1)...(19): siRNA sense strand
ccucagauaauuucuuuca

SEQ ID NO: 841642 - RNA, 19 nt, Homo sapiens
  misc_RNA (1)...(19): siRNA sense strand
cgaagccgccuccugguau

SEQ ID NO: 841643 - RNA, 19 nt, Homo sapiens
  misc_RNA (1)...(19): siRNA sense strand
ugggauagauuuagcuuuu

SEQ ID NO: 841644 - RNA, 19 nt, Homo sapiens
  misc_RNA (1)...(19): siRNA sense strand
ugauggguauuacagaugu

SEQ ID NO: 841645 - RNA, 19 nt, Homo sapiens
  misc_RNA (1)...(19): siRNA sense strand
cgccaaaggcaaagaagaa

SEQ ID NO: 841646 - RNA, 19 nt, Homo sapiens
  misc_RNA (1)...(19): siRNA sense strand
cagcgaggcuaccuugcau

SEQ ID NO: 841647 - RNA, 19 nt, Homo sapiens
  misc_RNA (1)...(19): siRNA sense strand
uggccaugcuugcucauau

SEQ ID NO: 841648 - RNA, 19 nt, Homo sapiens
  misc_RNA (1)...(19): siRNA sense strand
ggaccaacuguauaugauc

SEQ ID NO: 841649 - RNA, 19 nt, Homo sapiens
  misc_RNA (1)...(19): siRNA sense strand
guauagcuguggaccaacu

SEQ ID NO: 841650 - RNA, 19 nt, Homo sapiens
  misc_RNA (1)...(19): siRNA sense strand
guggaccaacuguauauga

SEQ ID NO: 841651 - RNA, 19 nt, Homo sapiens
  misc_RNA (1)...(19): siRNA sense strand
aaagagccaaugagaugaa

SEQ ID NO: 841652 - RNA, 19 nt, Homo sapiens
  misc_RNA (1)...(19): siRNA sense strand
gcagcgaggcuaccuugca

SEQ ID NO: 841653 - RNA, 19 nt, Homo sapiens
  misc_RNA (1)...(19): siRNA sense strand
gaaguccugcuguguuugg

SEQ ID NO: 841654 - RNA, 19 nt, Homo sapiens
  misc_RNA (1)...(19): siRNA sense strand
gccaaaggcaaagaagaaa

SEQ ID NO: 841655 - RNA, 19 nt, Homo sapiens
  misc_RNA (1)...(19): siRNA sense strand
ccauucaggugggauagau

SEQ ID NO: 841656 - RNA, 19 nt, Homo sapiens
  misc_RNA (1)...(19): siRNA sense strand
uaugguauuuggaagucaa

SEQ ID NO: 841657 - RNA, 19 nt, Homo sapiens
  misc_RNA (1)...(19): siRNA sense strand
cggcagcagcuccuagaaa

SEQ ID NO: 841658 - RNA, 19 nt, Homo sapiens
  misc_RNA (1)...(19): siRNA sense strand
ccaacuguauaugaucaug

SEQ ID NO: 841659 - RNA, 19 nt, Homo sapiens
  misc_RNA (1)...(19): siRNA sense strand
uuaaggacuuucugaagac

SEQ ID NO: 841660 - RNA, 19 nt, Homo sapiens
  misc_RNA (1)...(19): siRNA sense strand
aaaaggcaaugucuacuuc

SEQ ID NO: 841661 - RNA, 19 nt, Homo sapiens
  misc_RNA (1)...(19): siRNA sense strand
uggaccaacuguauaugau

SEQ ID NO: 841662 - RNA, 19 nt, Homo sapiens
  misc_RNA (1)...(19): siRNA sense strand
gcccacggcaucaacauca

SEQ ID NO: 841663 - RNA, 19 nt, Homo sapiens
  misc_RNA (1)...(19): siRNA sense strand
uggcagcccugaagguucu

SEQ ID NO: 841664 - RNA, 19 nt, Homo sapiens
  misc_RNA (1)...(19): siRNA sense strand
guccaaaucauuaaagaac

SEQ ID NO: 841665 - RNA, 19 nt, Homo sapiens
  misc_RNA (1)...(19): siRNA sense strand
ugcgaagucuuucaucagu

SEQ ID NO: 841666 - RNA, 19 nt, Homo sapiens
  misc_RNA (1)...(19): siRNA sense strand
caucgcuaguaugguauuu

SEQ ID NO: 841667 - RNA, 19 nt, Homo sapiens
  misc_RNA (1)...(19): siRNA sense strand
ucgcuaguaugguauuugg

SEQ ID NO: 841668 - RNA, 19 nt, Homo sapiens
  misc_RNA (1)...(19): siRNA sense strand
gcagcauagucauggugau

SEQ ID NO: 841669 - RNA, 19 nt, Homo sapiens
  misc_RNA (1)...(19): siRNA sense strand
gccaucgacuacagugaca

SEQ ID NO: 841670 - RNA, 19 nt, Homo sapiens
  misc_RNA (1)...(19): siRNA sense strand
gucauggugauggguauua

SEQ ID NO: 841671 - RNA, 19 nt, Homo sapiens
  misc_RNA (1)...(19): siRNA sense strand
uuugauaucauucgaagga

SEQ ID NO: 841672 - RNA, 19 nt, Homo sapiens
  misc_RNA (1)...(19): siRNA sense strand
ccgaaaauauuccucagau

SEQ ID NO: 841673 - RNA, 19 nt, Homo sapiens
  misc_RNA (1)...(19): siRNA sense strand
gugccaucaucucuuacuu

SEQ ID NO: 841674 - RNA, 19 nt, Homo sapiens
  misc_RNA (1)...(19): siRNA sense strand
ugacagcgccaugcuccaa

SEQ ID NO: 841675 - RNA, 19 nt, Homo sapiens
  misc_RNA (1)...(19): siRNA sense strand
ccacaucaugagaacgaaa

SEQ ID NO: 841676 - RNA, 19 nt, Homo sapiens
  misc_RNA (1)...(19): siRNA sense strand
acaagcgucaugccaguga

SEQ ID NO: 841677 - RNA, 19 nt, Homo sapiens
  misc_RNA (1)...(19): siRNA sense strand
cuauuaaggacuuucugaa

SEQ ID NO: 841678 - RNA, 19 nt, Homo sapiens
  misc_RNA (1)...(19): siRNA sense strand
caucaugagaacgaaauug

SEQ ID NO: 841679 - RNA, 19 nt, Homo sapiens
  misc_RNA (1)...(19): siRNA sense strand
cagcauagucauggugaug

SEQ ID NO: 841680 - RNA, 19 nt, Homo sapiens
  misc_RNA (1)...(19): siRNA sense strand
ugccaucaucucuuacuuu

SEQ ID NO: 841681 - RNA, 19 nt, Homo sapiens
  misc_RNA (1)...(19): siRNA sense strand
ggucagccuugauaaauuu

SEQ ID NO: 841682 - RNA, 19 nt, Homo sapiens
  misc_RNA (1)...(19): siRNA sense strand
uaacacacaugaugaagga

SEQ ID NO: 841683 - RNA, 19 nt, Homo sapiens
  misc_RNA (1)...(19): siRNA sense strand
ggagaaaccuggucuucca

SEQ ID NO: 841684 - RNA, 19 nt, Homo sapiens
  misc_RNA (1)...(19): siRNA sense strand
gaugguagaguuuauugua

SEQ ID NO: 841685 - RNA, 19 nt, Homo sapiens
  misc_RNA (1)...(19): siRNA sense strand
ugaaguuccuuaugucaaa

SEQ ID NO: 841686 - RNA, 19 nt, Homo sapiens
  misc_RNA (1)...(19): siRNA sense strand
ucacauaucccaacuguca

SEQ ID NO: 841687 - RNA, 19 nt, Homo sapiens
  misc_RNA (1)...(19): siRNA sense strand
gaaggcagcagacaagaau

SEQ ID NO: 841688 - RNA, 19 nt, Homo sapiens
  misc_RNA (1)...(19): siRNA sense strand
gcagcuaugaugaacuuua

SEQ ID NO: 841689 - RNA, 19 nt, Homo sapiens
  misc_RNA (1)...(19): siRNA sense strand
gcaccaacguccggagaaa

SEQ ID NO: 841690 - RNA, 19 nt, Homo sapiens
  misc_RNA (1)...(19): siRNA sense strand
gaagaaggcagcagacaag

SEQ ID NO: 841691 - RNA, 19 nt, Homo sapiens
  misc_RNA (1)...(19): siRNA sense strand
gagcugguucgauccauua

SEQ ID NO: 841692 - RNA, 19 nt, Homo sapiens
  misc_RNA (1)...(19): siRNA sense strand
cagcagcuaugaugaacuu

SEQ ID NO: 841693 - RNA, 19 nt, Homo sapiens
  misc_RNA (1)...(19): siRNA sense strand
uacauuagcccuuaugauu

SEQ ID NO: 841694 - RNA, 19 nt, Homo sapiens
  misc_RNA (1)...(19): siRNA sense strand
ggaagaaggcagcagacaa

SEQ ID NO: 841695 - RNA, 19 nt, Homo sapiens
  misc_RNA (1)...(19): siRNA sense strand
caaggugacccaugcauug

SEQ ID NO: 841696 - RNA, 19 nt, Homo sapiens
  misc_RNA (1)...(19): siRNA sense strand
gaugaacuuuacuaugaga

SEQ ID NO: 841697 - RNA, 19 nt, Homo sapiens
  misc_RNA (1)...(19): siRNA sense strand
gcucuggucagccuugaua

SEQ ID NO: 841698 - RNA, 19 nt, Homo sapiens
  misc_RNA (1)...(19): siRNA sense strand
caaaugagacuguacuuuu

SEQ ID NO: 841699 - RNA, 19 nt, Homo sapiens
  misc_RNA (1)...(19): siRNA sense strand
ucacauauggcgacacauu

SEQ ID NO: 841700 - RNA, 19 nt, Homo sapiens
  misc_RNA (1)...(19): siRNA sense strand
cauuagcccuuaugauugu

SEQ ID NO: 841701 - RNA, 19 nt, Homo sapiens
  misc_RNA (1)...(19): siRNA sense strand
uacacaaacugcucugcua

SEQ ID NO: 841702 - RNA, 19 nt, Homo sapiens
  misc_RNA (1)...(19): siRNA sense strand
gcaaggugacccaugcauu

SEQ ID NO: 841703 - RNA, 19 nt, Homo sapiens
  misc_RNA (1)...(19): siRNA sense strand
uccuauggaucucuauaua

SEQ ID NO: 841704 - RNA, 19 nt, Homo sapiens
  misc_RNA (1)...(19): siRNA sense strand
gccaagaaguccugcucaa

SEQ ID NO: 841705 - RNA, 19 nt, Homo sapiens
  misc_RNA (1)...(19): siRNA sense strand
guccuacgcugcugugaau

SEQ ID NO: 841706 - RNA, 19 nt, Homo sapiens
  misc_RNA (1)...(19): siRNA sense strand
gcuaugaugaacuuuacua

SEQ ID NO: 841707 - RNA, 19 nt, Homo sapiens
  misc_RNA (1)...(19): siRNA sense strand
aaucacauaucccaacugu

SEQ ID NO: 841708 - RNA, 19 nt, Homo sapiens
  misc_RNA (1)...(19): siRNA sense strand
gaaguuccuuaugucaaau

SEQ ID NO: 841709 - RNA, 19 nt, Homo sapiens
  misc_RNA (1)...(19): siRNA sense strand
ggaaggaagcagcuagcaa

SEQ ID NO: 841710 - RNA, 19 nt, Homo sapiens
  misc_RNA (1)...(19): siRNA sense strand
uaucacauauggcgacaca

SEQ ID NO: 841711 - RNA, 19 nt, Homo sapiens
  misc_RNA (1)...(19): siRNA sense strand
gguagaguuuauuguaaca

SEQ ID NO: 841712 - RNA, 19 nt, Homo sapiens
  misc_RNA (1)...(19): siRNA sense strand
uaaauuugcugaaguuccu

SEQ ID NO: 841713 - RNA, 19 nt, Homo sapiens
  misc_RNA (1)...(19): siRNA sense strand
gaccugaugguagaguuua

SEQ ID NO: 841714 - RNA, 19 nt, Homo sapiens
  misc_RNA (1)...(19): siRNA sense strand
ggugacccaugcauugguu

SEQ ID NO: 841715 - RNA, 19 nt, Homo sapiens
  misc_RNA (1)...(19): siRNA sense strand
uugcugaaguuccuuaugu

SEQ ID NO: 841716 - RNA, 19 nt, Homo sapiens
  misc_RNA (1)...(19): siRNA sense strand
ggaccugaugguagaguuu

SEQ ID NO: 841717 - RNA, 19 nt, Homo sapiens
  misc_RNA (1)...(19): siRNA sense strand
acccaugcauugguuaaua

SEQ ID NO: 841718 - RNA, 19 nt, Homo sapiens
  misc_RNA (1)...(19): siRNA sense strand
cagcuaugaugaacuuuac

SEQ ID NO: 841719 - RNA, 19 nt, Homo sapiens
  misc_RNA (1)...(19): siRNA sense strand
ucaaaugagacuguacuuu

SEQ ID NO: 841720 - RNA, 19 nt, Homo sapiens
  misc_RNA (1)...(19): siRNA sense strand
gcauccagguaguacacaa

SEQ ID NO: 841721 - RNA, 19 nt, Homo sapiens
  misc_RNA (1)...(19): siRNA sense strand
gccaucaucaaccacuuua

SEQ ID NO: 841722 - RNA, 19 nt, Homo sapiens
  misc_RNA (1)...(19): siRNA sense strand
ucccugccguccuuuagua

SEQ ID NO: 841723 - RNA, 19 nt, Homo sapiens
  misc_RNA (1)...(19): siRNA sense strand
aaucuucccugccguccuu

SEQ ID NO: 841724 - RNA, 19 nt, Homo sapiens
  misc_RNA (1)...(19): siRNA sense strand
ucagagccaucaucaacca

SEQ ID NO: 841725 - RNA, 19 nt, Homo sapiens
  misc_RNA (1)...(19): siRNA sense strand
uaucagagccaucaucaac

SEQ ID NO: 841726 - RNA, 19 nt, Homo sapiens
  misc_RNA (1)...(19): siRNA sense strand
guuaauaucagagccauca

SEQ ID NO: 841727 - RNA, 19 nt, Homo sapiens
  misc_RNA (1)...(19): siRNA sense strand
cccaugcauugguuaauau

SEQ ID NO: 841728 - RNA, 19 nt, Homo sapiens
  misc_RNA (1)...(19): siRNA sense strand
acucagagcagcacaagga

SEQ ID NO: 841729 - RNA, 19 nt, Homo sapiens
  misc_RNA (1)...(19): siRNA sense strand
uggucagccuugauaaauu

SEQ ID NO: 841730 - RNA, 19 nt, Homo sapiens
  misc_RNA (1)...(19): siRNA sense strand
gagccaucaucaaccacuu

SEQ ID NO: 841731 - RNA, 19 nt, Homo sapiens
  misc_RNA (1)...(19): siRNA sense strand
uuccuuaugucaaaugaga

SEQ ID NO: 841732 - RNA, 19 nt, Homo sapiens
  misc_RNA (1)...(19): siRNA sense strand
ccacacacucagccaagaa

SEQ ID NO: 841733 - RNA, 19 nt, Homo sapiens
  misc_RNA (1)...(19): siRNA sense strand
cacauauggcgacacauuu

SEQ ID NO: 841734 - RNA, 19 nt, Homo sapiens
  misc_RNA (1)...(19): siRNA sense strand
acauuagcccuuaugauug

SEQ ID NO: 841735 - RNA, 19 nt, Homo sapiens
  misc_RNA (1)...(19): siRNA sense strand
uaugucaaaugagacugua

SEQ ID NO: 841736 - RNA, 19 nt, Homo sapiens
  misc_RNA (1)...(19): siRNA sense strand
gagcucuggucagccuuga

SEQ ID NO: 841737 - RNA, 19 nt, Homo sapiens
  misc_RNA (1)...(19): siRNA sense strand
gugcaguacuggaccugau

SEQ ID NO: 841738 - RNA, 19 nt, Homo sapiens
  misc_RNA (1)...(19): siRNA sense strand
aaaugagacuguacuuuug

SEQ ID NO: 841739 - RNA, 19 nt, Homo sapiens
  misc_RNA (1)...(19): siRNA sense strand
ccuaugagacacaggaaga

SEQ ID NO: 841740 - RNA, 19 nt, Homo sapiens
  misc_RNA (1)...(19): siRNA sense strand
cuauggaucucuauauacg

SEQ ID NO: 841741 - RNA, 19 nt, Homo sapiens
  misc_RNA (1)...(19): siRNA sense strand
gcugaaguuccuuauguca

SEQ ID NO: 841742 - RNA, 19 nt, Homo sapiens
  misc_RNA (1)...(19): siRNA sense strand
ggugagagccaacuaugac

SEQ ID NO: 841743 - RNA, 19 nt, Homo sapiens
  misc_RNA (1)...(19): siRNA sense strand
gcaugcaccagagcuuuga

SEQ ID NO: 841744 - RNA, 19 nt, Homo sapiens
  misc_RNA (1)...(19): siRNA sense strand
ugaaucacauaucccaacu

SEQ ID NO: 841745 - RNA, 19 nt, Homo sapiens
  misc_RNA (1)...(19): siRNA sense strand
cacacaugaugaaggaguu

SEQ ID NO: 841746 - RNA, 19 nt, Homo sapiens
  misc_RNA (1)...(19): siRNA sense strand
uacuggaccugaugguaga

SEQ ID NO: 841747 - RNA, 19 nt, Homo sapiens
  misc_RNA (1)...(19): siRNA sense strand
agagcugguucgauccauu

SEQ ID NO: 841748 - RNA, 19 nt, Homo sapiens
  misc_RNA (1)...(19): siRNA sense strand
ugaugaacuuuacuaugag

SEQ ID NO: 841749 - RNA, 19 nt, Homo sapiens
  misc_RNA (1)...(19): siRNA sense strand
ccaaugcaggccaguggaa

SEQ ID NO: 841750 - RNA, 19 nt, Homo sapiens
  misc_RNA (1)...(19): siRNA sense strand
ccagguaguacacaaacug

SEQ ID NO: 841751 - RNA, 19 nt, Homo sapiens
  misc_RNA (1)...(19): siRNA sense strand
caucaucaaccacuuuaac

SEQ ID NO: 841752 - RNA, 19 nt, Homo sapiens
  misc_RNA (1)...(19): siRNA sense strand
uauuguaacacacaugaug

SEQ ID NO: 841753 - RNA, 19 nt, Homo sapiens
  misc_RNA (1)...(19): siRNA sense strand
cuugauaaauuugcugaag

SEQ ID NO: 841754 - RNA, 19 nt, Homo sapiens
  misc_RNA (1)...(19): siRNA sense strand
gcaccagagcuuugacaac

SEQ ID NO: 841755 - RNA, 19 nt, Homo sapiens
  misc_RNA (1)...(19): siRNA sense strand
ugcauugguuaauaucaga

SEQ ID NO: 841756 - RNA, 19 nt, Homo sapiens
  misc_RNA (1)...(19): siRNA sense strand
agaaggcagcagacaagaa

SEQ ID NO: 841757 - RNA, 19 nt, Homo sapiens
  misc_RNA (1)...(19): siRNA sense strand
ugacccaugcauugguuaa

SEQ ID NO: 841758 - RNA, 19 nt, Homo sapiens
  misc_RNA (1)...(19): siRNA sense strand
ccaagaaguccugcucaag

SEQ ID NO: 841759 - RNA, 19 nt, Homo sapiens
  misc_RNA (1)...(19): siRNA sense strand
acaaacugcucugcuacca

SEQ ID NO: 841760 - RNA, 19 nt, Homo sapiens
  misc_RNA (1)...(19): siRNA sense strand
cugguucgauccauuagca

SEQ ID NO: 841761 - RNA, 19 nt, Homo sapiens
  misc_RNA (1)...(19): siRNA sense strand
aauaucagagccaucauca

SEQ ID NO: 841762 - RNA, 19 nt, Homo sapiens
  misc_RNA (1)...(19): siRNA sense strand
gcucaaagaucauucauca

SEQ ID NO: 841763 - RNA, 19 nt, Homo sapiens
  misc_RNA (1)...(19): siRNA sense strand
gaagagcgccuguguagug

SEQ ID NO: 841764 - RNA, 19 nt, Homo sapiens
  misc_RNA (1)...(19): siRNA sense strand
ucauuugggugaagauuua

SEQ ID NO: 841765 - RNA, 19 nt, Homo sapiens
  misc_RNA (1)...(19): siRNA sense strand
ggugaagauuuaaagagua

SEQ ID NO: 841766 - RNA, 19 nt, Homo sapiens
  misc_RNA (1)...(19): siRNA sense strand
ucaaagaucauucaucaga

SEQ ID NO: 841767 - RNA, 19 nt, Homo sapiens
  misc_RNA (1)...(19): siRNA sense strand
ccacccaccuuuggaauga

SEQ ID NO: 841768 - RNA, 19 nt, Homo sapiens
  misc_RNA (1)...(19): siRNA sense strand
ggagcugugcggucuguua

SEQ ID NO: 841769 - RNA, 19 nt, Homo sapiens
  misc_RNA (1)...(19): siRNA sense strand
gggugaagauuuaaagagu

SEQ ID NO: 841770 - RNA, 19 nt, Homo sapiens
  misc_RNA (1)...(19): siRNA sense strand
ggcaugcaguacuaucuaa

SEQ ID NO: 841771 - RNA, 19 nt, Homo sapiens
  misc_RNA (1)...(19): siRNA sense strand
ccaacacagugcccuuuga

SEQ ID NO: 841772 - RNA, 19 nt, Homo sapiens
  misc_RNA (1)...(19): siRNA sense strand
gaaccacccaccuuuggaa

SEQ ID NO: 841773 - RNA, 19 nt, Homo sapiens
  misc_RNA (1)...(19): siRNA sense strand
ccaaacaaggcaugcagua

SEQ ID NO: 841774 - RNA, 19 nt, Homo sapiens
  misc_RNA (1)...(19): siRNA sense strand
gaaaaugcgugccuuaugc

SEQ ID NO: 841775 - RNA, 19 nt, Homo sapiens
  misc_RNA (1)...(19): siRNA sense strand
ggaaugauugcucaaagau

SEQ ID NO: 841776 - RNA, 19 nt, Homo sapiens
  misc_RNA (1)...(19): siRNA sense strand
gccuuaugcuguuauagaa

SEQ ID NO: 841777 - RNA, 19 nt, Homo sapiens
  misc_RNA (1)...(19): siRNA sense strand
gagcugugcggucuguuaa

SEQ ID NO: 841778 - RNA, 19 nt, Homo sapiens
  misc_RNA (1)...(19): siRNA sense strand
aacaaggcaugcaguacua

SEQ ID NO: 841779 - RNA, 19 nt, Homo sapiens
  misc_RNA (1)...(19): siRNA sense strand
uggaaugauugcucaaaga

SEQ ID NO: 841780 - RNA, 19 nt, Homo sapiens
  misc_RNA (1)...(19): siRNA sense strand
uagagaccguguaugagaa

SEQ ID NO: 841781 - RNA, 19 nt, Homo sapiens
  misc_RNA (1)...(19): siRNA sense strand
uaacagccaguuuguggaa

SEQ ID NO: 841782 - RNA, 19 nt, Homo sapiens
  misc_RNA (1)...(19): siRNA sense strand
gagcgccuguguagugugu

SEQ ID NO: 841783 - RNA, 19 nt, Homo sapiens
  misc_RNA (1)...(19): siRNA sense strand
ccgaggagaugcugaaggu

SEQ ID NO: 841784 - RNA, 19 nt, Homo sapiens
  misc_RNA (1)...(19): siRNA sense strand
cuagagaccguguaugaga

SEQ ID NO: 841785 - RNA, 19 nt, Homo sapiens
  misc_RNA (1)...(19): siRNA sense strand
cuucaaguccugcgucuuu

SEQ ID NO: 841786 - RNA, 19 nt, Homo sapiens
  misc_RNA (1)...(19): siRNA sense strand
aagaugguguggaaucgaa

SEQ ID NO: 841787 - RNA, 19 nt, Homo sapiens
  misc_RNA (1)...(19): siRNA sense strand
cccaagaagugcccuaucu

SEQ ID NO: 841788 - RNA, 19 nt, Homo sapiens
  misc_RNA (1)...(19): siRNA sense strand
gaccguguaugagaaguuc

SEQ ID NO: 841789 - RNA, 19 nt, Homo sapiens
  misc_RNA (1)...(19): siRNA sense strand
gaggacagggagagucuga

SEQ ID NO: 841790 - RNA, 19 nt, Homo sapiens
  misc_RNA (1)...(19): siRNA sense strand
ggacagggagagucugaag

SEQ ID NO: 841791 - RNA, 19 nt, Homo sapiens
  misc_RNA (1)...(19): siRNA sense strand
ugugcggucuguuaaagaa

SEQ ID NO: 841792 - RNA, 19 nt, Homo sapiens
  misc_RNA (1)...(19): siRNA sense strand
gcugugcggucuguuaaag

SEQ ID NO: 841793 - RNA, 19 nt, Homo sapiens
  misc_RNA (1)...(19): siRNA sense strand
aaucgaaccacccaccuuu

SEQ ID NO: 841794 - RNA, 19 nt, Homo sapiens
  misc_RNA (1)...(19): siRNA sense strand
gaaucgaaccacccaccuu

SEQ ID NO: 841795 - RNA, 19 nt, Homo sapiens
  misc_RNA (1)...(19): siRNA sense strand
gaccaacacagugcccuuu

SEQ ID NO: 841796 - RNA, 19 nt, Homo sapiens
  misc_RNA (1)...(19): siRNA sense strand
gccacccucuucuucauuc

SEQ ID NO: 841797 - RNA, 19 nt, Homo sapiens
  misc_RNA (1)...(19): siRNA sense strand
gaaugauugcucaaagauc

SEQ ID NO: 841798 - RNA, 19 nt, Homo sapiens
  misc_RNA (1)...(19): siRNA sense strand
ggaaaaugcgugccuuaug

SEQ ID NO: 841799 - RNA, 19 nt, Homo sapiens
  misc_RNA (1)...(19): siRNA sense strand
cugaagagcgccuguguag

SEQ ID NO: 841800 - RNA, 19 nt, Homo sapiens
  misc_RNA (1)...(19): siRNA sense strand
ccaagagaccgaggagaug

SEQ ID NO: 841801 - RNA, 19 nt, Homo sapiens
  misc_RNA (1)...(19): siRNA sense strand
ugccagaacccaagaagug

SEQ ID NO: 841802 - RNA, 19 nt, Homo sapiens
  misc_RNA (1)...(19): siRNA sense strand
aaacaaggcaugcaguacu

SEQ ID NO: 841803 - RNA, 19 nt, Homo sapiens
  misc_RNA (1)...(19): siRNA sense strand
caguggaucugggucuaga

SEQ ID NO: 841804 - RNA, 19 nt, Homo sapiens
  misc_RNA (1)...(19): siRNA sense strand
cccaaaggcauccaagaga

SEQ ID NO: 841805 - RNA, 19 nt, Homo sapiens
  misc_RNA (1)...(19): siRNA sense strand
gcccaaaggcauccaagag

SEQ ID NO: 841806 - RNA, 19 nt, Homo sapiens
  misc_RNA (1)...(19): siRNA sense strand
ccacaugugccacccucuu

SEQ ID NO: 841807 - RNA, 19 nt, Homo sapiens
  misc_RNA (1)...(19): siRNA sense strand
gcagaugcaggaggaguuc

SEQ ID NO: 841808 - RNA, 19 nt, Homo sapiens
  misc_RNA (1)...(19): siRNA sense strand
ucuguuaaagaaacgcuua

SEQ ID NO: 841809 - RNA, 19 nt, Homo sapiens
  misc_RNA (1)...(19): siRNA sense strand
ggagugugggcacguuugu

SEQ ID NO: 841810 - RNA, 19 nt, Homo sapiens
  misc_RNA (1)...(19): siRNA sense strand
ugucugagcagcuucaagu

SEQ ID NO: 841811 - RNA, 19 nt, Homo sapiens
  misc_RNA (1)...(19): siRNA sense strand
gugccacccucuucuucau

SEQ ID NO: 841812 - RNA, 19 nt, Homo sapiens
  misc_RNA (1)...(19): siRNA sense strand
ccaagaagugcccuaucug

SEQ ID NO: 841813 - RNA, 19 nt, Homo sapiens
  misc_RNA (1)...(19): siRNA sense strand
gacagggagagucugaaga

SEQ ID NO: 841814 - RNA, 19 nt, Homo sapiens
  misc_RNA (1)...(19): siRNA sense strand
uucagaagcuccaggaaaa

SEQ ID NO: 841815 - RNA, 19 nt, Homo sapiens
  misc_RNA (1)...(19): siRNA sense strand
caaacaaggcaugcaguac

SEQ ID NO: 841816 - RNA, 19 nt, Homo sapiens
  misc_RNA (1)...(19): siRNA sense strand
gaacaugaauacagugaug

SEQ ID NO: 841817 - RNA, 19 nt, Homo sapiens
  misc_RNA (1)...(19): siRNA sense strand
gaaggucgguggcgaguga

SEQ ID NO: 841818 - RNA, 19 nt, Homo sapiens
  misc_RNA (1)...(19): siRNA sense strand
gaagguggucuuuggauua

SEQ ID NO: 841819 - RNA, 19 nt, Homo sapiens
  misc_RNA (1)...(19): siRNA sense strand
cagacuggcucaaggauaa

SEQ ID NO: 841820 - RNA, 19 nt, Homo sapiens
  misc_RNA (1)...(19): siRNA sense strand
ugaagaggaugcacuguga

SEQ ID NO: 841821 - RNA, 19 nt, Homo sapiens
  misc_RNA (1)...(19): siRNA sense strand
ggaagaauuuguuuguaag

SEQ ID NO: 841822 - RNA, 19 nt, Homo sapiens
  misc_RNA (1)...(19): siRNA sense strand
guauugcucuucugauuau

SEQ ID NO: 841823 - RNA, 19 nt, Homo sapiens
  misc_RNA (1)...(19): siRNA sense strand
gcucaaggauaaugacuuc

SEQ ID NO: 841824 - RNA, 19 nt, Homo sapiens
  misc_RNA (1)...(19): siRNA sense strand
ucucuuagguuguguauuc

SEQ ID NO: 841825 - RNA, 19 nt, Homo sapiens
  misc_RNA (1)...(19): siRNA sense strand
gguggucuuuggauuauuu

SEQ ID NO: 841826 - RNA, 19 nt, Homo sapiens
  misc_RNA (1)...(19): siRNA sense strand
gggcauugcagccauuaua

SEQ ID NO: 841827 - RNA, 19 nt, Homo sapiens
  misc_RNA (1)...(19): siRNA sense strand
ucucucggcucuucucuaa

SEQ ID NO: 841828 - RNA, 19 nt, Homo sapiens
  misc_RNA (1)...(19): siRNA sense strand
gguauugcucuucugauua

SEQ ID NO: 841829 - RNA, 19 nt, Homo sapiens
  misc_RNA (1)...(19): siRNA sense strand
gcucugaggaacaugaaua

SEQ ID NO: 841830 - RNA, 19 nt, Homo sapiens
  misc_RNA (1)...(19): siRNA sense strand
caucagcuguuucauaucu

SEQ ID NO: 841831 - RNA, 19 nt, Homo sapiens
  misc_RNA (1)...(19): siRNA sense strand
gcagauaggcugguugaug

SEQ ID NO: 841832 - RNA, 19 nt, Homo sapiens
  misc_RNA (1)...(19): siRNA sense strand
ucaggaagaugagggcuuu

SEQ ID NO: 841833 - RNA, 19 nt, Homo sapiens
  misc_RNA (1)...(19): siRNA sense strand
aguaagagcaggaguguuu

SEQ ID NO: 841834 - RNA, 19 nt, Homo sapiens
  misc_RNA (1)...(19): siRNA sense strand
gaagaugagggcuuuaugg

SEQ ID NO: 841835 - RNA, 19 nt, Homo sapiens
  misc_RNA (1)...(19): siRNA sense strand
aaacuggauuacucuggua

SEQ ID NO: 841836 - RNA, 19 nt, Homo sapiens
  misc_RNA (1)...(19): siRNA sense strand
ggauaaugacuuccucuug

SEQ ID NO: 841837 - RNA, 19 nt, Homo sapiens
  misc_RNA (1)...(19): siRNA sense strand
agugaucccucaugaugua

SEQ ID NO: 841838 - RNA, 19 nt, Homo sapiens
  misc_RNA (1)...(19): siRNA sense strand
gaaacaggcaacauuugga

SEQ ID NO: 841839 - RNA, 19 nt, Homo sapiens
  misc_RNA (1)...(19): siRNA sense strand
ucacuuccauggugucuca

SEQ ID NO: 841840 - RNA, 19 nt, Homo sapiens
  misc_RNA (1)...(19): siRNA sense strand
ugaggaacaugaauacagu

SEQ ID NO: 841841 - RNA, 19 nt, Homo sapiens
  misc_RNA (1)...(19): siRNA sense strand
ggaguuucguuucaugauc

SEQ ID NO: 841842 - RNA, 19 nt, Homo sapiens
  misc_RNA (1)...(19): siRNA sense strand
gcucuucucuaaacuggau

SEQ ID NO: 841843 - RNA, 19 nt, Homo sapiens
  misc_RNA (1)...(19): siRNA sense strand
cgagugaucccucaugaug

SEQ ID NO: 841844 - RNA, 19 nt, Homo sapiens
  misc_RNA (1)...(19): siRNA sense strand
gccauucucugccuuucuu

SEQ ID NO: 841845 - RNA, 19 nt, Homo sapiens
  misc_RNA (1)...(19): siRNA sense strand
cucaucagcuguuucauau

SEQ ID NO: 841846 - RNA, 19 nt, Homo sapiens
  misc_RNA (1)...(19): siRNA sense strand
acagaaacaggcaacauuu

SEQ ID NO: 841847 - RNA, 19 nt, Homo sapiens
  misc_RNA (1)...(19): siRNA sense strand
uuccuuggcuuuauuauuc

SEQ ID NO: 841848 - RNA, 19 nt, Homo sapiens
  misc_RNA (1)...(19): siRNA sense strand
guucuaucuucccaucaua

SEQ ID NO: 841849 - RNA, 19 nt, Homo sapiens
  misc_RNA (1)...(19): siRNA sense strand
ucagcuguuucauaucuuu

SEQ ID NO: 841850 - RNA, 19 nt, Homo sapiens
  misc_RNA (1)...(19): siRNA sense strand
ucucuaaacuggauuacuc

SEQ ID NO: 841851 - RNA, 19 nt, Homo sapiens
  misc_RNA (1)...(19): siRNA sense strand
agaggcaucuguucuaucu

SEQ ID NO: 841852 - RNA, 19 nt, Homo sapiens
  misc_RNA (1)...(19): siRNA sense strand
ucucaucagcuguuucaua

SEQ ID NO: 841853 - RNA, 19 nt, Homo sapiens
  misc_RNA (1)...(19): siRNA sense strand
ccacaaccuugcuucaucu

SEQ ID NO: 841854 - RNA, 19 nt, Homo sapiens
  misc_RNA (1)...(19): siRNA sense strand
agaagguggucuuuggauu

SEQ ID NO: 841855 - RNA, 19 nt, Homo sapiens
  misc_RNA (1)...(19): siRNA sense strand
ggccuccuaugccuucuuu

SEQ ID NO: 841856 - RNA, 19 nt, Homo sapiens
  misc_RNA (1)...(19): siRNA sense strand
ggcgagugaucccucauga

SEQ ID NO: 841857 - RNA, 19 nt, Homo sapiens
  misc_RNA (1)...(19): siRNA sense strand
ccagauauaaggcucagaa

SEQ ID NO: 841858 - RNA, 19 nt, Homo sapiens
  misc_RNA (1)...(19): siRNA sense strand
gaucccucaugauguacua

SEQ ID NO: 841859 - RNA, 19 nt, Homo sapiens
  misc_RNA (1)...(19): siRNA sense strand
gggcauguccccucucuua

SEQ ID NO: 841860 - RNA, 19 nt, Homo sapiens
  misc_RNA (1)...(19): siRNA sense strand
ugguauugcucuucugauu

SEQ ID NO: 841861 - RNA, 19 nt, Homo sapiens
  misc_RNA (1)...(19): siRNA sense strand
ggauuacucugguauugcu

SEQ ID NO: 841862 - RNA, 19 nt, Homo sapiens
  misc_RNA (1)...(19): siRNA sense strand
cauuuggacacaucucuua

SEQ ID NO: 841863 - RNA, 19 nt, Homo sapiens
  misc_RNA (1)...(19): siRNA sense strand
ggaagaugagggcuuuaug

SEQ ID NO: 841864 - RNA, 19 nt, Homo sapiens
  misc_RNA (1)...(19): siRNA sense strand
cagaauacacacagaaaca

SEQ ID NO: 841865 - RNA, 19 nt, Homo sapiens
  misc_RNA (1)...(19): siRNA sense strand
ccaggaguuucguuucaug

SEQ ID NO: 841866 - RNA, 19 nt, Homo sapiens
  misc_RNA (1)...(19): siRNA sense strand
gggcagauaggcugguuga

SEQ ID NO: 841867 - RNA, 19 nt, Homo sapiens
  misc_RNA (1)...(19): siRNA sense strand
cuacuugauugucaucugu

SEQ ID NO: 841868 - RNA, 19 nt, Homo sapiens
  misc_RNA (1)...(19): siRNA sense strand
caaccuugcuucaucuacu

SEQ ID NO: 841869 - RNA, 19 nt, Homo sapiens
  misc_RNA (1)...(19): siRNA sense strand
cacagaaacaggcaacauu

SEQ ID NO: 841870 - RNA, 19 nt, Homo sapiens
  misc_RNA (1)...(19): siRNA sense strand
gggcugcagugaagaggau

SEQ ID NO: 841871 - RNA, 19 nt, Homo sapiens
  misc_RNA (1)...(19): siRNA sense strand
ugaauacagugaugaagcu

SEQ ID NO: 841872 - RNA, 19 nt, Homo sapiens
  misc_RNA (1)...(19): siRNA sense strand
ggggaucuuuuauauguuu

SEQ ID NO: 841873 - RNA, 19 nt, Homo sapiens
  misc_RNA (1)...(19): siRNA sense strand
cagaaacaggcaacauuug

SEQ ID NO: 841874 - RNA, 19 nt, Homo sapiens
  misc_RNA (1)...(19): siRNA sense strand
aggcaucuguucuaucuuc

SEQ ID NO: 841875 - RNA, 19 nt, Homo sapiens
  misc_RNA (1)...(19): siRNA sense strand
uuacaagcccaucaugcua

SEQ ID NO: 841876 - RNA, 19 nt, Homo sapiens
  misc_RNA (1)...(19): siRNA sense strand
ggaguaagagcaggagugu

SEQ ID NO: 841877 - RNA, 19 nt, Homo sapiens
  misc_RNA (1)...(19): siRNA sense strand
ggagauuuggagcccauuu

SEQ ID NO: 841878 - RNA, 19 nt, Homo sapiens
  misc_RNA (1)...(19): siRNA sense strand
ggcaacauuuggacacauc

SEQ ID NO: 841879 - RNA, 19 nt, Homo sapiens
  misc_RNA (1)...(19): siRNA sense strand
gauauaaggcucagaaaag

SEQ ID NO: 841880 - RNA, 19 nt, Homo sapiens
  misc_RNA (1)...(19): siRNA sense strand
ggacuccagagccagauau

SEQ ID NO: 841881 - RNA, 19 nt, Homo sapiens
  misc_RNA (1)...(19): siRNA sense strand
gagaagguggucuuuggau

SEQ ID NO: 841882 - RNA, 19 nt, Homo sapiens
  misc_RNA (1)...(19): siRNA sense strand
uauauguuucgcccaaaua

SEQ ID NO: 841883 - RNA, 19 nt, Homo sapiens
  misc_RNA (1)...(19): siRNA sense strand
acgaagaggugauaaugac

SEQ ID NO: 841884 - RNA, 19 nt, Homo sapiens
  misc_RNA (1)...(19): siRNA sense strand
ucucggcucuucucuaaac

SEQ ID NO: 841885 - RNA, 19 nt, Homo sapiens
  misc_RNA (1)...(19): siRNA sense strand
gaagaauuuguuuguaagg

SEQ ID NO: 841886 - RNA, 19 nt, Homo sapiens
  misc_RNA (1)...(19): siRNA sense strand
acacgaagaggugauaaug

SEQ ID NO: 841887 - RNA, 19 nt, Homo sapiens
  misc_RNA (1)...(19): siRNA sense strand
aagguggucuuuggauuau

SEQ ID NO: 841888 - RNA, 19 nt, Homo sapiens
  misc_RNA (1)...(19): siRNA sense strand
caacuggaugguacacgaa

SEQ ID NO: 841889 - RNA, 19 nt, Homo sapiens
  misc_RNA (1)...(19): siRNA sense strand
ucacucucaucagcuguuu

SEQ ID NO: 841890 - RNA, 19 nt, Homo sapiens
  misc_RNA (1)...(19): siRNA sense strand
ggagccauucucugccuuu

SEQ ID NO: 841891 - RNA, 19 nt, Homo sapiens
  misc_RNA (1)...(19): siRNA sense strand
cuggauuacucugguauug

SEQ ID NO: 841892 - RNA, 19 nt, Homo sapiens
  misc_RNA (1)...(19): siRNA sense strand
gguacacgaagaggugaua

SEQ ID NO: 841893 - RNA, 19 nt, Homo sapiens
  misc_RNA (1)...(19): siRNA sense strand
acaagcccaucaugcuaug

SEQ ID NO: 841894 - RNA, 19 nt, Homo sapiens
  misc_RNA (1)...(19): siRNA sense strand
gcauugcagccauuauagu

SEQ ID NO: 841895 - RNA, 19 nt, Homo sapiens
  misc_RNA (1)...(19): siRNA sense strand
cacgaagaggugauaauga

SEQ ID NO: 841896 - RNA, 19 nt, Homo sapiens
  misc_RNA (1)...(19): siRNA sense strand
gagccauucucugccuuuc

SEQ ID NO: 841897 - RNA, 19 nt, Homo sapiens
  misc_RNA (1)...(19): siRNA sense strand
cauggacaccggccuccua

SEQ ID NO: 841898 - RNA, 19 nt, Homo sapiens
  misc_RNA (1)...(19): siRNA sense strand
uccacaaccuugcuucauc

SEQ ID NO: 841899 - RNA, 19 nt, Homo sapiens
  misc_RNA (1)...(19): siRNA sense strand
ugacagccaccaaggagau

SEQ ID NO: 841900 - RNA, 19 nt, Homo sapiens
  misc_RNA (1)...(19): siRNA sense strand
guacacgaagaggugauaa

SEQ ID NO: 841901 - RNA, 19 nt, Homo sapiens
  misc_RNA (1)...(19): siRNA sense strand
guuccuuggcuuuauuauu

SEQ ID NO: 841902 - RNA, 19 nt, Homo sapiens
  misc_RNA (1)...(19): siRNA sense strand
uuauauguuucgcccaaau

SEQ ID NO: 841903 - RNA, 19 nt, Homo sapiens
  misc_RNA (1)...(19): siRNA sense strand
agaaacaggcaacauuugg

SEQ ID NO: 841904 - RNA, 19 nt, Homo sapiens
  misc_RNA (1)...(19): siRNA sense strand
auaaugacuuccucuugca

SEQ ID NO: 841905 - RNA, 19 nt, Homo sapiens
  misc_RNA (1)...(19): siRNA sense strand
gcuguuucauaucuuugug

SEQ ID NO: 841906 - RNA, 19 nt, Homo sapiens
  misc_RNA (1)...(19): siRNA sense strand
gacuccagagccagauaua

SEQ ID NO: 841907 - RNA, 19 nt, Homo sapiens
  misc_RNA (1)...(19): siRNA sense strand
ugacaucugguuucacucu

SEQ ID NO: 841908 - RNA, 19 nt, Homo sapiens
  misc_RNA (1)...(19): siRNA sense strand
auuccuaccuugcacuaug

SEQ ID NO: 841909 - RNA, 19 nt, Homo sapiens
  misc_RNA (1)...(19): siRNA sense strand
aggccugaguggaaucauu

SEQ ID NO: 841910 - RNA, 19 nt, Homo sapiens
  misc_RNA (1)...(19): siRNA sense strand
uaaugacagccaccaagga

SEQ ID NO: 841911 - RNA, 19 nt, Homo sapiens
  misc_RNA (1)...(19): siRNA sense strand
ucgcccaaauaucuccuuu

SEQ ID NO: 841912 - RNA, 19 nt, Homo sapiens
  misc_RNA (1)...(19): siRNA sense strand
cuuagguuguguauucuuc

SEQ ID NO: 841913 - RNA, 19 nt, Homo sapiens
  misc_RNA (1)...(19): siRNA sense strand
gagugaucccucaugaugu

SEQ ID NO: 841914 - RNA, 19 nt, Homo sapiens
  misc_RNA (1)...(19): siRNA sense strand
cagauauaaggcucagaaa

SEQ ID NO: 841915 - RNA, 19 nt, Homo sapiens
  misc_RNA (1)...(19): siRNA sense strand
uacaagcccaucaugcuau

SEQ ID NO: 841916 - RNA, 19 nt, Homo sapiens
  misc_RNA (1)...(19): siRNA sense strand
ccuguaagauggucaacua

SEQ ID NO: 841917 - RNA, 19 nt, Homo sapiens
  misc_RNA (1)...(19): siRNA sense strand
ucaacuacaugcaguauca

SEQ ID NO: 841918 - RNA, 19 nt, Homo sapiens
  misc_RNA (1)...(19): siRNA sense strand
guucuggucuugccucauu

SEQ ID NO: 841919 - RNA, 19 nt, Homo sapiens
  misc_RNA (1)...(19): siRNA sense strand
ucaacgggcuucugauguu

SEQ ID NO: 841920 - RNA, 19 nt, Homo sapiens
  misc_RNA (1)...(19): siRNA sense strand
uaaucaggcugcccuuuga

SEQ ID NO: 841921 - RNA, 19 nt, Homo sapiens
  misc_RNA (1)...(19): siRNA sense strand
gcacacaacagccacauag

SEQ ID NO: 841922 - RNA, 19 nt, Homo sapiens
  misc_RNA (1)...(19): siRNA sense strand
ccaggaaccucugcagcua

SEQ ID NO: 841923 - RNA, 19 nt, Homo sapiens
  misc_RNA (1)...(19): siRNA sense strand
guaagauggucaacuacau

SEQ ID NO: 841924 - RNA, 19 nt, Homo sapiens
  misc_RNA (1)...(19): siRNA sense strand
gagaaggacauucguagug

SEQ ID NO: 841925 - RNA, 19 nt, Homo sapiens
  misc_RNA (1)...(19): siRNA sense strand
gcaggacagguucugguua

SEQ ID NO: 841926 - RNA, 19 nt, Homo sapiens
  misc_RNA (1)...(19): siRNA sense strand
guagugauguagaagaauc

SEQ ID NO: 841927 - RNA, 19 nt, Homo sapiens
  misc_RNA (1)...(19): siRNA sense strand
agaaggacauucguaguga

SEQ ID NO: 841928 - RNA, 19 nt, Homo sapiens
  misc_RNA (1)...(19): siRNA sense strand
gcuggagguuucucuucua

SEQ ID NO: 841929 - RNA, 19 nt, Homo sapiens
  misc_RNA (1)...(19): siRNA sense strand
gaaggacauucguagugau

SEQ ID NO: 841930 - RNA, 19 nt, Homo sapiens
  misc_RNA (1)...(19): siRNA sense strand
gaggccagcuggagguuuc

SEQ ID NO: 841931 - RNA, 19 nt, Homo sapiens
  misc_RNA (1)...(19): siRNA sense strand
gaaccucugcagcuaaaga

SEQ ID NO: 841932 - RNA, 19 nt, Homo sapiens
  misc_RNA (1)...(19): siRNA sense strand
ucaaggagcaggugauaca

SEQ ID NO: 841933 - RNA, 19 nt, Homo sapiens
  misc_RNA (1)...(19): siRNA sense strand
caucuucuccuuugucuuc

SEQ ID NO: 841934 - RNA, 19 nt, Homo sapiens
  misc_RNA (1)...(19): siRNA sense strand
ccaugcgccuugccuuuga

SEQ ID NO: 841935 - RNA, 19 nt, Homo sapiens
  misc_RNA (1)...(19): siRNA sense strand
gcuggaggccuguaagaug

SEQ ID NO: 841936 - RNA, 19 nt, Homo sapiens
  misc_RNA (1)...(19): siRNA sense strand
gcugugggcaccaguaaug

SEQ ID NO: 841937 - RNA, 19 nt, Homo sapiens
  misc_RNA (1)...(19): siRNA sense strand
caggacagguucugguuac

SEQ ID NO: 841938 - RNA, 19 nt, Homo sapiens
  misc_RNA (1)...(19): siRNA sense strand
gaugucaagcgcaaggauu

SEQ ID NO: 841939 - RNA, 19 nt, Homo sapiens
  misc_RNA (1)...(19): siRNA sense strand
aggaaccucugcagcuaaa

SEQ ID NO: 841940 - RNA, 19 nt, Homo sapiens
  misc_RNA (1)...(19): siRNA sense strand
ggagaaggacauucguagu

SEQ ID NO: 841941 - RNA, 19 nt, Homo sapiens
  misc_RNA (1)...(19): siRNA sense strand
uaagauggucaacuacaug

SEQ ID NO: 841942 - RNA, 19 nt, Homo sapiens
  misc_RNA (1)...(19): siRNA sense strand
cugaugaccuucuccuaca

SEQ ID NO: 841943 - RNA, 19 nt, Homo sapiens
  misc_RNA (1)...(19): siRNA sense strand
gaccccagcugaccaagaa

SEQ ID NO: 841944 - RNA, 19 nt, Homo sapiens
  misc_RNA (1)...(19): siRNA sense strand
ugaagaagggccagaugga

SEQ ID NO: 841945 - RNA, 19 nt, Homo sapiens
  misc_RNA (1)...(19): siRNA sense strand
ucuuggagcuggguuucua

SEQ ID NO: 841946 - RNA, 19 nt, Homo sapiens
  misc_RNA (1)...(19): siRNA sense strand
ucguagugauguagaagaa

SEQ ID NO: 841947 - RNA, 19 nt, Homo sapiens
  misc_RNA (1)...(19): siRNA sense strand
ggccaugcgccuugccuuu

SEQ ID NO: 841948 - RNA, 19 nt, Homo sapiens
  misc_RNA (1)...(19): siRNA sense strand
gacgcucucuuccucaucu

SEQ ID NO: 841949 - RNA, 19 nt, Homo sapiens
  misc_RNA (1)...(19): siRNA sense strand
acgccacgcuggagaaaca

SEQ ID NO: 841950 - RNA, 19 nt, Homo sapiens
  misc_RNA (1)...(19): siRNA sense strand
gcgccuugccuuugagaga

SEQ ID NO: 841951 - RNA, 19 nt, Homo sapiens
  misc_RNA (1)...(19): siRNA sense strand
gcucucuggugcugcuguu

SEQ ID NO: 841952 - RNA, 19 nt, Homo sapiens
  misc_RNA (1)...(19): siRNA sense strand
caacgccacgcuggagaaa

SEQ ID NO: 841953 - RNA, 19 nt, Homo sapiens
  misc_RNA (1)...(19): siRNA sense strand
ccacccagauccucuacac

SEQ ID NO: 841954 - RNA, 19 nt, Homo sapiens
  misc_RNA (1)...(19): siRNA sense strand
ggucaacuacaugcaguau

SEQ ID NO: 841955 - RNA, 19 nt, Homo sapiens
  misc_RNA (1)...(19): siRNA sense strand
aagaaucagacuccaguga

SEQ ID NO: 841956 - RNA, 19 nt, Homo sapiens
  misc_RNA (1)...(19): siRNA sense strand
agaagggccagauggagaa

SEQ ID NO: 841957 - RNA, 19 nt, Homo sapiens
  misc_RNA (1)...(19): siRNA sense strand
uuccucaucuucuccuuug

SEQ ID NO: 841958 - RNA, 19 nt, Homo sapiens
  misc_RNA (1)...(19): siRNA sense strand
gcgacgcucucuuccucau

SEQ ID NO: 841959 - RNA, 19 nt, Homo sapiens
  misc_RNA (1)...(19): siRNA sense strand
cuacaugcaguaucagcaa

SEQ ID NO: 841960 - RNA, 19 nt, Homo sapiens
  misc_RNA (1)...(19): siRNA sense strand
caggaaccucugcagcuaa

SEQ ID NO: 841961 - RNA, 19 nt, Homo sapiens
  misc_RNA (1)...(19): siRNA sense strand
gccuugccuuugagagauu

SEQ ID NO: 841962 - RNA, 19 nt, Homo sapiens
  misc_RNA (1)...(19): siRNA sense strand
gccaugcgccuugccuuug

SEQ ID NO: 841963 - RNA, 19 nt, Homo sapiens
  misc_RNA (1)...(19): siRNA sense strand
gaccaacaggcacacaaca

SEQ ID NO: 841964 - RNA, 19 nt, Homo sapiens
  misc_RNA (1)...(19): siRNA sense strand
cgcaugcucuauagcuuca

SEQ ID NO: 841965 - RNA, 19 nt, Homo sapiens
  misc_RNA (1)...(19): siRNA sense strand
gccaaccugcugcgcauug

SEQ ID NO: 841966 - RNA, 19 nt, Homo sapiens
  misc_RNA (1)...(19): siRNA sense strand
ucacguggacagagcuaga

SEQ ID NO: 841967 - RNA, 19 nt, Homo sapiens
  misc_RNA (1)...(19): siRNA sense strand
ccagauggagaaggacauu

SEQ ID NO: 841968 - RNA, 19 nt, Homo sapiens
  misc_RNA (1)...(19): siRNA sense strand
ccacauacuacgaguccau

SEQ ID NO: 841969 - RNA, 19 nt, Homo sapiens
  misc_RNA (1)...(19): siRNA sense strand
cagcagacccagcgauggu

SEQ ID NO: 841970 - RNA, 19 nt, Homo sapiens
  misc_RNA (1)...(19): siRNA sense strand
cagauccucuacaccacau

SEQ ID NO: 841971 - RNA, 19 nt, Homo sapiens
  misc_RNA (1)...(19): siRNA sense strand
ggcaggacagguucugguu

SEQ ID NO: 841972 - RNA, 19 nt, Homo sapiens
  misc_RNA (1)...(19): siRNA sense strand
gcauaaaucugaccuagaa

SEQ ID NO: 841973 - RNA, 19 nt, Homo sapiens
  misc_RNA (1)...(19): siRNA sense strand
gaaauaagaggcuguagua

SEQ ID NO: 841974 - RNA, 19 nt, Homo sapiens
  misc_RNA (1)...(19): siRNA sense strand
aaauggagcccucguauua

SEQ ID NO: 841975 - RNA, 19 nt, Homo sapiens
  misc_RNA (1)...(19): siRNA sense strand
cagaaacucucuccucgua

SEQ ID NO: 841976 - RNA, 19 nt, Homo sapiens
  misc_RNA (1)...(19): siRNA sense strand
ggauuaaagucaucuccua

SEQ ID NO: 841977 - RNA, 19 nt, Homo sapiens
  misc_RNA (1)...(19): siRNA sense strand
gagagaaggucagcuaaau

SEQ ID NO: 841978 - RNA, 19 nt, Homo sapiens
  misc_RNA (1)...(19): siRNA sense strand
uaagaagccucgagaacuu

SEQ ID NO: 841979 - RNA, 19 nt, Homo sapiens
  misc_RNA (1)...(19): siRNA sense strand
agaaaugucuccaugaaga

SEQ ID NO: 841980 - RNA, 19 nt, Homo sapiens
  misc_RNA (1)...(19): siRNA sense strand
gauaaucucuuggaacugu

SEQ ID NO: 841981 - RNA, 19 nt, Homo sapiens
  misc_RNA (1)...(19): siRNA sense strand
aaucugaccuagaacauuu

SEQ ID NO: 841982 - RNA, 19 nt, Homo sapiens
  misc_RNA (1)...(19): siRNA sense strand
ucagaaaugucuccaugaa

SEQ ID NO: 841983 - RNA, 19 nt, Homo sapiens
  misc_RNA (1)...(19): siRNA sense strand
caaggacuguuuauaugaa

SEQ ID NO: 841984 - RNA, 19 nt, Homo sapiens
  misc_RNA (1)...(19): siRNA sense strand
gagccaggccucugauaua

SEQ ID NO: 841985 - RNA, 19 nt, Homo sapiens
  misc_RNA (1)...(19): siRNA sense strand
acaagaaccugguccaugu

SEQ ID NO: 841986 - RNA, 19 nt, Homo sapiens
  misc_RNA (1)...(19): siRNA sense strand
agacguagaugaguucaaa

SEQ ID NO: 841987 - RNA, 19 nt, Homo sapiens
  misc_RNA (1)...(19): siRNA sense strand
gaggagacguagaugaguu

SEQ ID NO: 841988 - RNA, 19 nt, Homo sapiens
  misc_RNA (1)...(19): siRNA sense strand
agucaaagauggaagauuc

SEQ ID NO: 841989 - RNA, 19 nt, Homo sapiens
  misc_RNA (1)...(19): siRNA sense strand
cagcagggauggugagaga

SEQ ID NO: 841990 - RNA, 19 nt, Homo sapiens
  misc_RNA (1)...(19): siRNA sense strand
ucaagcgacugacauguga

SEQ ID NO: 841991 - RNA, 19 nt, Homo sapiens
  misc_RNA (1)...(19): siRNA sense strand
caggaacacugaagucaug

SEQ ID NO: 841992 - RNA, 19 nt, Homo sapiens
  misc_RNA (1)...(19): siRNA sense strand
acacugaagucaugagaga

SEQ ID NO: 841993 - RNA, 19 nt, Homo sapiens
  misc_RNA (1)...(19): siRNA sense strand
gaacuugugcuagugauug

SEQ ID NO: 841994 - RNA, 19 nt, Homo sapiens
  misc_RNA (1)...(19): siRNA sense strand
gauggaagauucuggaaaa

SEQ ID NO: 841995 - RNA, 19 nt, Homo sapiens
  misc_RNA (1)...(19): siRNA sense strand
ugagagaaauucagaaacu

SEQ ID NO: 841996 - RNA, 19 nt, Homo sapiens
  misc_RNA (1)...(19): siRNA sense strand
ggaacuguaugcagcagau

SEQ ID NO: 841997 - RNA, 19 nt, Homo sapiens
  misc_RNA (1)...(19): siRNA sense strand
ugaccuuacugaugagaaa

SEQ ID NO: 841998 - RNA, 19 nt, Homo sapiens
  misc_RNA (1)...(19): siRNA sense strand
cccaugaccuuauccagaa

SEQ ID NO: 841999 - RNA, 19 nt, Homo sapiens
  misc_RNA (1)...(19): siRNA sense strand
gaacacugaagucaugaga

SEQ ID NO: 842000 - RNA, 19 nt, Homo sapiens
  misc_RNA (1)...(19): siRNA sense strand
gagaaggucagcuaaaugg

SEQ ID NO: 842001 - RNA, 19 nt, Homo sapiens
  misc_RNA (1)...(19): siRNA sense strand
ggacuguuuauaugaagua

SEQ ID NO: 842002 - RNA, 19 nt, Homo sapiens
  misc_RNA (1)...(19): siRNA sense strand
ggagaggagacguagauga

SEQ ID NO: 842003 - RNA, 19 nt, Homo sapiens
  misc_RNA (1)...(19): siRNA sense strand
aagcugagcguguugcaua

SEQ ID NO: 842004 - RNA, 19 nt, Homo sapiens
  misc_RNA (1)...(19): siRNA sense strand
uggcgaaccucccaccaaa

SEQ ID NO: 842005 - RNA, 19 nt, Homo sapiens
  misc_RNA (1)...(19): siRNA sense strand
ucaaggacuguuuauauga

SEQ ID NO: 842006 - RNA, 19 nt, Homo sapiens
  misc_RNA (1)...(19): siRNA sense strand
gagaaaacaugcuggacaa

SEQ ID NO: 842007 - RNA, 19 nt, Homo sapiens
  misc_RNA (1)...(19): siRNA sense strand
gagaaauucagaaacucua

SEQ ID NO: 842008 - RNA, 19 nt, Homo sapiens
  misc_RNA (1)...(19): siRNA sense strand
uggaggcugucaagcauaa

SEQ ID NO: 842009 - RNA, 19 nt, Homo sapiens
  misc_RNA (1)...(19): siRNA sense strand
gcagcacacagugaaauaa

SEQ ID NO: 842010 - RNA, 19 nt, Homo sapiens
  misc_RNA (1)...(19): siRNA sense strand
ggugagagaaggucagcua

SEQ ID NO: 842011 - RNA, 19 nt, Homo sapiens
  misc_RNA (1)...(19): siRNA sense strand
augccgaucuuccagaaua

SEQ ID NO: 842012 - RNA, 19 nt, Homo sapiens
  misc_RNA (1)...(19): siRNA sense strand
gaauauuucaagcgacuga

SEQ ID NO: 842013 - RNA, 19 nt, Homo sapiens
  misc_RNA (1)...(19): siRNA sense strand
caugagagaaauucagaaa

SEQ ID NO: 842014 - RNA, 19 nt, Homo sapiens
  misc_RNA (1)...(19): siRNA sense strand
caccaacccuaguggcauu

SEQ ID NO: 842015 - RNA, 19 nt, Homo sapiens
  misc_RNA (1)...(19): siRNA sense strand
gaagucaugagagaaauuc

SEQ ID NO: 842016 - RNA, 19 nt, Homo sapiens
  misc_RNA (1)...(19): siRNA sense strand
gagaggagacguagaugag

SEQ ID NO: 842017 - RNA, 19 nt, Homo sapiens
  misc_RNA (1)...(19): siRNA sense strand
ggagccaggccucugauau

SEQ ID NO: 842018 - RNA, 19 nt, Homo sapiens
  misc_RNA (1)...(19): siRNA sense strand
cgacugacaugugagaucu

SEQ ID NO: 842019 - RNA, 19 nt, Homo sapiens
  misc_RNA (1)...(19): siRNA sense strand
gagagaaauucagaaacuc

SEQ ID NO: 842020 - RNA, 19 nt, Homo sapiens
  misc_RNA (1)...(19): siRNA sense strand
cccuugaccuuacugauga

SEQ ID NO: 842021 - RNA, 19 nt, Homo sapiens
  misc_RNA (1)...(19): siRNA sense strand
gauuaaagucaucuccuau

SEQ ID NO: 842022 - RNA, 19 nt, Homo sapiens
  misc_RNA (1)...(19): siRNA sense strand
uucaaggacuguuuauaug

SEQ ID NO: 842023 - RNA, 19 nt, Homo sapiens
  misc_RNA (1)...(19): siRNA sense strand
uuaaagucaucuccuaugg

SEQ ID NO: 842024 - RNA, 19 nt, Homo sapiens
  misc_RNA (1)...(19): siRNA sense strand
ggagcccucguauuaacua

SEQ ID NO: 842025 - RNA, 19 nt, Homo sapiens
  misc_RNA (1)...(19): siRNA sense strand
gaaaauggagcccucguau

SEQ ID NO: 842026 - RNA, 19 nt, Homo sapiens
  misc_RNA (1)...(19): siRNA sense strand
gugauuggaacaggcauua

SEQ ID NO: 842027 - RNA, 19 nt, Homo sapiens
  misc_RNA (1)...(19): siRNA sense strand
ugaccuagaacauuucaug

SEQ ID NO: 842028 - RNA, 19 nt, Homo sapiens
  misc_RNA (1)...(19): siRNA sense strand
gggcucaggagaagcguaa

SEQ ID NO: 842029 - RNA, 19 nt, Homo sapiens
  misc_RNA (1)...(19): siRNA sense strand
gcccucguauuaacuacaa

SEQ ID NO: 842030 - RNA, 19 nt, Homo sapiens
  misc_RNA (1)...(19): siRNA sense strand
cgagugggcucaggagaag

SEQ ID NO: 842031 - RNA, 19 nt, Homo sapiens
  misc_RNA (1)...(19): siRNA sense strand
gcacacagugaaauaagag

SEQ ID NO: 842032 - RNA, 19 nt, Homo sapiens
  misc_RNA (1)...(19): siRNA sense strand
ugagagaaggucagcuaaa

SEQ ID NO: 842033 - RNA, 19 nt, Homo sapiens
  misc_RNA (1)...(19): siRNA sense strand
gaccuuauccagaaacucu

SEQ ID NO: 842034 - RNA, 19 nt, Homo sapiens
  misc_RNA (1)...(19): siRNA sense strand
gagaacuugugcuagugau

SEQ ID NO: 842035 - RNA, 19 nt, Homo sapiens
  misc_RNA (1)...(19): siRNA sense strand
ucagcuaaauggcucaucu

SEQ ID NO: 842036 - RNA, 19 nt, Homo sapiens
  misc_RNA (1)...(19): siRNA sense strand
ccucguaccaguaauguuc

SEQ ID NO: 842037 - RNA, 19 nt, Homo sapiens
  misc_RNA (1)...(19): siRNA sense strand
gaucuuccagaauauuuca

SEQ ID NO: 842038 - RNA, 19 nt, Homo sapiens
  misc_RNA (1)...(19): siRNA sense strand
ccaaguuccagcccucaaa

SEQ ID NO: 842039 - RNA, 19 nt, Homo sapiens
  misc_RNA (1)...(19): siRNA sense strand
ccucugauauagacgagau

SEQ ID NO: 842040 - RNA, 19 nt, Homo sapiens
  misc_RNA (1)...(19): siRNA sense strand
uugauaaucucuuggaacu

SEQ ID NO: 842041 - RNA, 19 nt, Homo sapiens
  misc_RNA (1)...(19): siRNA sense strand
gcuugaaucccuugaccuu

SEQ ID NO: 842042 - RNA, 19 nt, Homo sapiens
  misc_RNA (1)...(19): siRNA sense strand
gcagggauggugagagaag

SEQ ID NO: 842043 - RNA, 19 nt, Homo sapiens
  misc_RNA (1)...(19): siRNA sense strand
ccaugaccuuauccagaaa

SEQ ID NO: 842044 - RNA, 19 nt, Homo sapiens
  misc_RNA (1)...(19): siRNA sense strand
uaaagucaucuccuaugga

SEQ ID NO: 842045 - RNA, 19 nt, Homo sapiens
  misc_RNA (1)...(19): siRNA sense strand
ccaggccucugauauagac

SEQ ID NO: 842046 - RNA, 19 nt, Homo sapiens
  misc_RNA (1)...(19): siRNA sense strand
cuaguggcauuguccuuca

SEQ ID NO: 842047 - RNA, 19 nt, Homo sapiens
  misc_RNA (1)...(19): siRNA sense strand
uggaugcugccauugauuu

SEQ ID NO: 842048 - RNA, 19 nt, Homo sapiens
  misc_RNA (1)...(19): siRNA sense strand
ugaaauaagaggcuguagu

SEQ ID NO: 842049 - RNA, 19 nt, Homo sapiens
  misc_RNA (1)...(19): siRNA sense strand
gauuggaacaggcauuagu

SEQ ID NO: 842050 - RNA, 19 nt, Homo sapiens
  misc_RNA (1)...(19): siRNA sense strand
cgagaacuugugcuaguga

SEQ ID NO: 842051 - RNA, 19 nt, Homo sapiens
  misc_RNA (1)...(19): siRNA sense strand
caagaaccugguccauguu

SEQ ID NO: 842052 - RNA, 19 nt, Homo sapiens
  misc_RNA (1)...(19): siRNA sense strand
cuaugccgaucuuccagaa

SEQ ID NO: 842053 - RNA, 19 nt, Homo sapiens
  misc_RNA (1)...(19): siRNA sense strand
cuuacuggaugcugccauu

SEQ ID NO: 842054 - RNA, 19 nt, Homo sapiens
  misc_RNA (1)...(19): siRNA sense strand
uagaagaugaggagagcaa

SEQ ID NO: 842055 - RNA, 19 nt, Homo sapiens
  misc_RNA (1)...(19): siRNA sense strand
ggaaaauggagcccucgua

SEQ ID NO: 842056 - RNA, 19 nt, Homo sapiens
  misc_RNA (1)...(19): siRNA sense strand
ggaagauucuggaaaacag

SEQ ID NO: 842057 - RNA, 19 nt, Homo sapiens
  misc_RNA (1)...(19): siRNA sense strand
uugaaucccuugaccuuac

SEQ ID NO: 842058 - RNA, 19 nt, Homo sapiens
  misc_RNA (1)...(19): siRNA sense strand
caaguuccagcccucaaau

SEQ ID NO: 842059 - RNA, 19 nt, Homo sapiens
  misc_RNA (1)...(19): siRNA sense strand
ugaagucaugagagaaauu

SEQ ID NO: 842060 - RNA, 19 nt, Homo sapiens
  misc_RNA (1)...(19): siRNA sense strand
gggagccaggccucugaua

SEQ ID NO: 842061 - RNA, 19 nt, Homo sapiens
  misc_RNA (1)...(19): siRNA sense strand
cuaagaagccucgagaacu

SEQ ID NO: 842062 - RNA, 19 nt, Homo sapiens
  misc_RNA (1)...(19): siRNA sense strand
agagaaggucagcuaaaug

SEQ ID NO: 842063 - RNA, 19 nt, Homo sapiens
  misc_RNA (1)...(19): siRNA sense strand
gugagagaaggucagcuaa

SEQ ID NO: 842064 - RNA, 19 nt, Homo sapiens
  misc_RNA (1)...(19): siRNA sense strand
ccgaucuuccagaauauuu

SEQ ID NO: 842065 - RNA, 19 nt, Homo sapiens
  misc_RNA (1)...(19): siRNA sense strand
uaaaucugaccuagaacau

SEQ ID NO: 842066 - RNA, 19 nt, Homo sapiens
  misc_RNA (1)...(19): siRNA sense strand
auucagaaacucuacgaaa

SEQ ID NO: 842067 - RNA, 19 nt, Homo sapiens
  misc_RNA (1)...(19): siRNA sense strand
cugagcguguugcauauuc

SEQ ID NO: 842068 - RNA, 19 nt, Homo sapiens
  misc_RNA (1)...(19): siRNA sense strand
ggaaaacagcuacuucagu

SEQ ID NO: 842069 - RNA, 19 nt, Homo sapiens
  misc_RNA (1)...(19): siRNA sense strand
gaagaugaggagagcaaaa

SEQ ID NO: 842070 - RNA, 19 nt, Homo sapiens
  misc_RNA (1)...(19): siRNA sense strand
caucugcagcacacaguga

SEQ ID NO: 842071 - RNA, 19 nt, Homo sapiens
  misc_RNA (1)...(19): siRNA sense strand
aggcauuagugcugcaguu

SEQ ID NO: 842072 - RNA, 19 nt, Homo sapiens
  misc_RNA (1)...(19): siRNA sense strand
ccauuguccuuucuaaaua

SEQ ID NO: 842073 - RNA, 19 nt, Homo sapiens
  misc_RNA (1)...(19): siRNA sense strand
ucaccgaucuugaggaauu

SEQ ID NO: 842074 - RNA, 19 nt, Homo sapiens
  misc_RNA (1)...(19): siRNA sense strand
ggaagaaauagaaggcuuu

SEQ ID NO: 842075 - RNA, 19 nt, Homo sapiens
  misc_RNA (1)...(19): siRNA sense strand
ccacccgacuucauacuga

SEQ ID NO: 842076 - RNA, 19 nt, Homo sapiens
  misc_RNA (1)...(19): siRNA sense strand
gccauuguccuuucuaaau

SEQ ID NO: 842077 - RNA, 19 nt, Homo sapiens
  misc_RNA (1)...(19): siRNA sense strand
guacagugcuacgacuaca

SEQ ID NO: 842078 - RNA, 19 nt, Homo sapiens
  misc_RNA (1)...(19): siRNA sense strand
aagacuugcugaagaugaa

SEQ ID NO: 842079 - RNA, 19 nt, Homo sapiens
  misc_RNA (1)...(19): siRNA sense strand
acugauggccgacugcaua

SEQ ID NO: 842080 - RNA, 19 nt, Homo sapiens
  misc_RNA (1)...(19): siRNA sense strand
agucaccgaucuugaggaa

SEQ ID NO: 842081 - RNA, 19 nt, Homo sapiens
  misc_RNA (1)...(19): siRNA sense strand
ccucggggcugauguugua

SEQ ID NO: 842082 - RNA, 19 nt, Homo sapiens
  misc_RNA (1)...(19): siRNA sense strand
gugggacgcugccauuguc

SEQ ID NO: 842083 - RNA, 19 nt, Homo sapiens
  misc_RNA (1)...(19): siRNA sense strand
gcgggaugguacagugcua

SEQ ID NO: 842084 - RNA, 19 nt, Homo sapiens
  misc_RNA (1)...(19): siRNA sense strand
cuacgacuacagcaguaua

SEQ ID NO: 842085 - RNA, 19 nt, Homo sapiens
  misc_RNA (1)...(19): siRNA sense strand
gauggccgacugcauauac

SEQ ID NO: 842086 - RNA, 19 nt, Homo sapiens
  misc_RNA (1)...(19): siRNA sense strand
uggcguggguugcguugug

SEQ ID NO: 842087 - RNA, 19 nt, Homo sapiens
  misc_RNA (1)...(19): siRNA sense strand
gcggagcuuugugcgaguu

SEQ ID NO: 842088 - RNA, 19 nt, Homo sapiens
  misc_RNA (1)...(19): siRNA sense strand
cauuguccuuucuaaauac

SEQ ID NO: 842089 - RNA, 19 nt, Homo sapiens
  misc_RNA (1)...(19): siRNA sense strand
ggagaagcgggaugguaca

SEQ ID NO: 842090 - RNA, 19 nt, Homo sapiens
  misc_RNA (1)...(19): siRNA sense strand
cugccauuguccuuucuaa

SEQ ID NO: 842091 - RNA, 19 nt, Homo sapiens
  misc_RNA (1)...(19): siRNA sense strand
ugucacugguucuguucaa

SEQ ID NO: 842092 - RNA, 19 nt, Homo sapiens
  misc_RNA (1)...(19): siRNA sense strand
uugaggaauugcaagacuu

SEQ ID NO: 842093 - RNA, 19 nt, Homo sapiens
  misc_RNA (1)...(19): siRNA sense strand
ucuugucacugguucuguu

SEQ ID NO: 842094 - RNA, 19 nt, Homo sapiens
  misc_RNA (1)...(19): siRNA sense strand
gaagaaggcuauuuguaug

SEQ ID NO: 842095 - RNA, 19 nt, Homo sapiens
  misc_RNA (1)...(19): siRNA sense strand
gugggcagcuucugacuua

SEQ ID NO: 842096 - RNA, 19 nt, Homo sapiens
  misc_RNA (1)...(19): siRNA sense strand
gggauacgcugucaugcua

SEQ ID NO: 842097 - RNA, 19 nt, Homo sapiens
  misc_RNA (1)...(19): siRNA sense strand
uggaguagcugccuuguuu

SEQ ID NO: 842098 - RNA, 19 nt, Homo sapiens
  misc_RNA (1)...(19): siRNA sense strand
gaaggcuauuuguauguua

SEQ ID NO: 842099 - RNA, 19 nt, Homo sapiens
  misc_RNA (1)...(19): siRNA sense strand
gaaaugcaguguuugucaa

SEQ ID NO: 842100 - RNA, 19 nt, Homo sapiens
  misc_RNA (1)...(19): siRNA sense strand
ucgaguggaugauguaaua

SEQ ID NO: 842101 - RNA, 19 nt, Homo sapiens
  misc_RNA (1)...(19): siRNA sense strand
gaaauugugaaacacguua

SEQ ID NO: 842102 - RNA, 19 nt, Homo sapiens
  misc_RNA (1)...(19): siRNA sense strand
gaacacccacuguauauuc

SEQ ID NO: 842103 - RNA, 19 nt, Homo sapiens
  misc_RNA (1)...(19): siRNA sense strand
ggaagaaucaggaagcauu

SEQ ID NO: 842104 - RNA, 19 nt, Homo sapiens
  misc_RNA (1)...(19): siRNA sense strand
guacguaccacuuguagaa

SEQ ID NO: 842105 - RNA, 19 nt, Homo sapiens
  misc_RNA (1)...(19): siRNA sense strand
ggagaacgaugugauguag

SEQ ID NO: 842106 - RNA, 19 nt, Homo sapiens
  misc_RNA (1)...(19): siRNA sense strand
ucucauauuuggaggauuu

SEQ ID NO: 842107 - RNA, 19 nt, Homo sapiens
  misc_RNA (1)...(19): siRNA sense strand
aagcaaccuuuaccuauaa

SEQ ID NO: 842108 - RNA, 19 nt, Homo sapiens
  misc_RNA (1)...(19): siRNA sense strand
ugaagaaggcuauuuguau

SEQ ID NO: 842109 - RNA, 19 nt, Homo sapiens
  misc_RNA (1)...(19): siRNA sense strand
cauccacagucucauauuu

SEQ ID NO: 842110 - RNA, 19 nt, Homo sapiens
  misc_RNA (1)...(19): siRNA sense strand
ggcaagccauacaagauaa

SEQ ID NO: 842111 - RNA, 19 nt, Homo sapiens
  misc_RNA (1)...(19): siRNA sense strand
gggaagcaguacucucuga

SEQ ID NO: 842112 - RNA, 19 nt, Homo sapiens
  misc_RNA (1)...(19): siRNA sense strand
uggaagaaauugugaaaca

SEQ ID NO: 842113 - RNA, 19 nt, Homo sapiens
  misc_RNA (1)...(19): siRNA sense strand
ccaaaacgcuggagaacaa

SEQ ID NO: 842114 - RNA, 19 nt, Homo sapiens
  misc_RNA (1)...(19): siRNA sense strand
ucagaacacccacuguaua

SEQ ID NO: 842115 - RNA, 19 nt, Homo sapiens
  misc_RNA (1)...(19): siRNA sense strand
gucaaugucuuccauauac

SEQ ID NO: 842116 - RNA, 19 nt, Homo sapiens
  misc_RNA (1)...(19): siRNA sense strand
ggaugaagaaggcuauuug

SEQ ID NO: 842117 - RNA, 19 nt, Homo sapiens
  misc_RNA (1)...(19): siRNA sense strand
gcucgguguuuaggaaaua

SEQ ID NO: 842118 - RNA, 19 nt, Homo sapiens
  misc_RNA (1)...(19): siRNA sense strand
ggucaaugucuuccauaua

SEQ ID NO: 842119 - RNA, 19 nt, Homo sapiens
  misc_RNA (1)...(19): siRNA sense strand
gaaggaggguagaguacgu

SEQ ID NO: 842120 - RNA, 19 nt, Homo sapiens
  misc_RNA (1)...(19): siRNA sense strand
ugaaacacguuagacagaa

SEQ ID NO: 842121 - RNA, 19 nt, Homo sapiens
  misc_RNA (1)...(19): siRNA sense strand
caggaagcauucaagcauu

SEQ ID NO: 842122 - RNA, 19 nt, Homo sapiens
  misc_RNA (1)...(19): siRNA sense strand
ggucaagcauggcaucaag

SEQ ID NO: 842123 - RNA, 19 nt, Homo sapiens
  misc_RNA (1)...(19): siRNA sense strand
ggaagcauucaagcauuua

SEQ ID NO: 842124 - RNA, 19 nt, Homo sapiens
  misc_RNA (1)...(19): siRNA sense strand
acugaaggcucgguguuua

SEQ ID NO: 842125 - RNA, 19 nt, Homo sapiens
  misc_RNA (1)...(19): siRNA sense strand
gucccaggauacaauguua

SEQ ID NO: 842126 - RNA, 19 nt, Homo sapiens
  misc_RNA (1)...(19): siRNA sense strand
cagaacacccacuguauau

SEQ ID NO: 842127 - RNA, 19 nt, Homo sapiens
  misc_RNA (1)...(19): siRNA sense strand
gaaaggugacacugugguu

SEQ ID NO: 842128 - RNA, 19 nt, Homo sapiens
  misc_RNA (1)...(19): siRNA sense strand
caugggaacacaacaguuu

SEQ ID NO: 842129 - RNA, 19 nt, Homo sapiens
  misc_RNA (1)...(19): siRNA sense strand
caacugcaauuagagcaau

SEQ ID NO: 842130 - RNA, 19 nt, Homo sapiens
  misc_RNA (1)...(19): siRNA sense strand
gauauuaugauaccaugga

SEQ ID NO: 842131 - RNA, 19 nt, Homo sapiens
  misc_RNA (1)...(19): siRNA sense strand
guuggcaugugcaaggaua

SEQ ID NO: 842132 - RNA, 19 nt, Homo sapiens
  misc_RNA (1)...(19): siRNA sense strand
gaaacacguuagacagaac

SEQ ID NO: 842133 - RNA, 19 nt, Homo sapiens
  misc_RNA (1)...(19): siRNA sense strand
ucaggacucuggaagaauc

SEQ ID NO: 842134 - RNA, 19 nt, Homo sapiens
  misc_RNA (1)...(19): siRNA sense strand
guacaagcccuggaccaaa

SEQ ID NO: 842135 - RNA, 19 nt, Homo sapiens
  misc_RNA (1)...(19): siRNA sense strand
cauacaagauaacuucuac

SEQ ID NO: 842136 - RNA, 19 nt, Homo sapiens
  misc_RNA (1)...(19): siRNA sense strand
ucaauccuuucccauggua

SEQ ID NO: 842137 - RNA, 19 nt, Homo sapiens
  misc_RNA (1)...(19): siRNA sense strand
ggaaauauugugguaaagu

SEQ ID NO: 842138 - RNA, 19 nt, Homo sapiens
  misc_RNA (1)...(19): siRNA sense strand
gagcagaucagcugguaca

SEQ ID NO: 842139 - RNA, 19 nt, Homo sapiens
  misc_RNA (1)...(19): siRNA sense strand
cuucagaguaccugucuua

SEQ ID NO: 842140 - RNA, 19 nt, Homo sapiens
  misc_RNA (1)...(19): siRNA sense strand
ggaguagcugccuuguuua

SEQ ID NO: 842141 - RNA, 19 nt, Homo sapiens
  misc_RNA (1)...(19): siRNA sense strand
ggacaacacaaaccagaca

SEQ ID NO: 842142 - RNA, 19 nt, Homo sapiens
  misc_RNA (1)...(19): siRNA sense strand
ugauugggaugaagagaug

SEQ ID NO: 842143 - RNA, 19 nt, Homo sapiens
  misc_RNA (1)...(19): siRNA sense strand
aggaagcauucaagcauuu

SEQ ID NO: 842144 - RNA, 19 nt, Homo sapiens
  misc_RNA (1)...(19): siRNA sense strand
gacuuaggcuggguuguug

SEQ ID NO: 842145 - RNA, 19 nt, Homo sapiens
  misc_RNA (1)...(19): siRNA sense strand
guagucgcauugaucaugu

SEQ ID NO: 842146 - RNA, 19 nt, Homo sapiens
  misc_RNA (1)...(19): siRNA sense strand
caacagaggagcaaguuuu

SEQ ID NO: 842147 - RNA, 19 nt, Homo sapiens
  misc_RNA (1)...(19): siRNA sense strand
ugacaagguucaaaacauu

SEQ ID NO: 842148 - RNA, 19 nt, Homo sapiens
  misc_RNA (1)...(19): siRNA sense strand
cagcaucauuuggcauuga

SEQ ID NO: 842149 - RNA, 19 nt, Homo sapiens
  misc_RNA (1)...(19): siRNA sense strand
ggcgauguauaccauguug

SEQ ID NO: 842150 - RNA, 19 nt, Homo sapiens
  misc_RNA (1)...(19): siRNA sense strand
ggaagaaauugugaaacac

SEQ ID NO: 842151 - RNA, 19 nt, Homo sapiens
  misc_RNA (1)...(19): siRNA sense strand
gaguggaugauguaauaaa

SEQ ID NO: 842152 - RNA, 19 nt, Homo sapiens
  misc_RNA (1)...(19): siRNA sense strand
ugcgucauguguuggauua

SEQ ID NO: 842153 - RNA, 19 nt, Homo sapiens
  misc_RNA (1)...(19): siRNA sense strand
aacaaacacucgcccucua

SEQ ID NO: 842154 - RNA, 19 nt, Homo sapiens
  misc_RNA (1)...(19): siRNA sense strand
cgaaaugcaguguuuguca

SEQ ID NO: 842155 - RNA, 19 nt, Homo sapiens
  misc_RNA (1)...(19): siRNA sense strand
ggcagacugugcuguuguu

SEQ ID NO: 842156 - RNA, 19 nt, Homo sapiens
  misc_RNA (1)...(19): siRNA sense strand
guagaguacguaccacuug

SEQ ID NO: 842157 - RNA, 19 nt, Homo sapiens
  misc_RNA (1)...(19): siRNA sense strand
gugacacugugguuaucua

SEQ ID NO: 842158 - RNA, 19 nt, Homo sapiens
  misc_RNA (1)...(19): siRNA sense strand
gugaaacacguuagacaga

SEQ ID NO: 842159 - RNA, 19 nt, Homo sapiens
  misc_RNA (1)...(19): siRNA sense strand
ccgagcagaucagcuggua

SEQ ID NO: 842160 - RNA, 19 nt, Homo sapiens
  misc_RNA (1)...(19): siRNA sense strand
cagaugcuggcgcuuauuu

SEQ ID NO: 842161 - RNA, 19 nt, Homo sapiens
  misc_RNA (1)...(19): siRNA sense strand
ucgcauugaucauguaaag

SEQ ID NO: 842162 - RNA, 19 nt, Homo sapiens
  misc_RNA (1)...(19): siRNA sense strand
uaaguagucgcauugauca

SEQ ID NO: 842163 - RNA, 19 nt, Homo sapiens
  misc_RNA (1)...(19): siRNA sense strand
gcuauggaccucuucuuca

SEQ ID NO: 842164 - RNA, 19 nt, Homo sapiens
  misc_RNA (1)...(19): siRNA sense strand
gcaacagaggagcaaguuu

SEQ ID NO: 842165 - RNA, 19 nt, Homo sapiens
  misc_RNA (1)...(19): siRNA sense strand
agaaggcuauuuguauguu

SEQ ID NO: 842166 - RNA, 19 nt, Homo sapiens
  misc_RNA (1)...(19): siRNA sense strand
aagcaguacucucugacaa

SEQ ID NO: 842167 - RNA, 19 nt, Homo sapiens
  misc_RNA (1)...(19): siRNA sense strand
gggaugaagagauggcaaa

SEQ ID NO: 842168 - RNA, 19 nt, Homo sapiens
  misc_RNA (1)...(19): siRNA sense strand
gaugaagaaggcuauuugu

SEQ ID NO: 842169 - RNA, 19 nt, Homo sapiens
  misc_RNA (1)...(19): siRNA sense strand
agaacgaugugauguagag

SEQ ID NO: 842170 - RNA, 19 nt, Homo sapiens
  misc_RNA (1)...(19): siRNA sense strand
guagcugccuuguuuacag

SEQ ID NO: 842171 - RNA, 19 nt, Homo sapiens
  misc_RNA (1)...(19): siRNA sense strand
gauacgcugucaugcuaca

SEQ ID NO: 842172 - RNA, 19 nt, Homo sapiens
  misc_RNA (1)...(19): siRNA sense strand
gcacaacgggguuaccuaa

SEQ ID NO: 842173 - RNA, 19 nt, Homo sapiens
  misc_RNA (1)...(19): siRNA sense strand
acacugugguuaucuacau

SEQ ID NO: 842174 - RNA, 19 nt, Homo sapiens
  misc_RNA (1)...(19): siRNA sense strand
uuucaggacucuggaagaa

SEQ ID NO: 842175 - RNA, 19 nt, Homo sapiens
  misc_RNA (1)...(19): siRNA sense strand
cacccacuguauauucuuu

SEQ ID NO: 842176 - RNA, 19 nt, Homo sapiens
  misc_RNA (1)...(19): siRNA sense strand
acacaaaccagacaaaauu

SEQ ID NO: 842177 - RNA, 19 nt, Homo sapiens
  misc_RNA (1)...(19): siRNA sense strand
uggaaggaaugcuuaacau

SEQ ID NO: 842178 - RNA, 19 nt, Homo sapiens
  misc_RNA (1)...(19): siRNA sense strand
gaagcaguacucucugaca

SEQ ID NO: 842179 - RNA, 19 nt, Homo sapiens
  misc_RNA (1)...(19): siRNA sense strand
ugacuuaggcuggguuguu

SEQ ID NO: 842180 - RNA, 19 nt, Homo sapiens
  misc_RNA (1)...(19): siRNA sense strand
uauaaucguccaaauaugg

SEQ ID NO: 842181 - RNA, 19 nt, Homo sapiens
  misc_RNA (1)...(19): siRNA sense strand
aaaggugacacugugguua

SEQ ID NO: 842182 - RNA, 19 nt, Homo sapiens
  misc_RNA (1)...(19): siRNA sense strand
cugguuacauggaugaaga

SEQ ID NO: 842183 - RNA, 19 nt, Homo sapiens
  misc_RNA (1)...(19): siRNA sense strand
gaagcauucaagcauuuau

SEQ ID NO: 842184 - RNA, 19 nt, Homo sapiens
  misc_RNA (1)...(19): siRNA sense strand
cuauggaccucuucuucau

SEQ ID NO: 842185 - RNA, 19 nt, Homo sapiens
  misc_RNA (1)...(19): siRNA sense strand
caaaagcccagucacauga

SEQ ID NO: 842186 - RNA, 19 nt, Homo sapiens
  misc_RNA (1)...(19): siRNA sense strand
ucaagaaaggugacacugu

SEQ ID NO: 842187 - RNA, 19 nt, Homo sapiens
  misc_RNA (1)...(19): siRNA sense strand
ucagaguaccugucuuaga

SEQ ID NO: 842188 - RNA, 19 nt, Homo sapiens
  misc_RNA (1)...(19): siRNA sense strand
ugacuguguuccuguucuu

SEQ ID NO: 842189 - RNA, 19 nt, Homo sapiens
  misc_RNA (1)...(19): siRNA sense strand
uagaguacguaccacuugu

SEQ ID NO: 842190 - RNA, 19 nt, Homo sapiens
  misc_RNA (1)...(19): siRNA sense strand
cuaaguagucgcauugauc

SEQ ID NO: 842191 - RNA, 19 nt, Homo sapiens
  misc_RNA (1)...(19): siRNA sense strand
ucaagcauggcaucaagaa

SEQ ID NO: 842192 - RNA, 19 nt, Homo sapiens
  misc_RNA (1)...(19): siRNA sense strand
augcuacacuggucaaugu

SEQ ID NO: 842193 - RNA, 19 nt, Homo sapiens
  misc_RNA (1)...(19): siRNA sense strand
uguugcaggucacagaauu

SEQ ID NO: 842194 - RNA, 19 nt, Homo sapiens
  misc_RNA (1)...(19): siRNA sense strand
ggucagaggucauacaguu

SEQ ID NO: 842195 - RNA, 19 nt, Homo sapiens
  misc_RNA (1)...(19): siRNA sense strand
gcaaugcaguuauacagaa

SEQ ID NO: 842196 - RNA, 19 nt, Homo sapiens
  misc_RNA (1)...(19): siRNA sense strand
ggaaagaugucaccaacuc

SEQ ID NO: 842197 - RNA, 19 nt, Homo sapiens
  misc_RNA (1)...(19): siRNA sense strand
ggaccuagauguagaugau

SEQ ID NO: 842198 - RNA, 19 nt, Homo sapiens
  misc_RNA (1)...(19): siRNA sense strand
gaggagagccaauauugaa

SEQ ID NO: 842199 - RNA, 19 nt, Homo sapiens
  misc_RNA (1)...(19): siRNA sense strand
gcaaagagggaagaaauug

SEQ ID NO: 842200 - RNA, 19 nt, Homo sapiens
  misc_RNA (1)...(19): siRNA sense strand
gagaaucaauacccagaug

SEQ ID NO: 842201 - RNA, 19 nt, Homo sapiens
  misc_RNA (1)...(19): siRNA sense strand
gcgauuaucuacauccaau

SEQ ID NO: 842202 - RNA, 19 nt, Homo sapiens
  misc_RNA (1)...(19): siRNA sense strand
ccaacgaaaucaagacaga

SEQ ID NO: 842203 - RNA, 19 nt, Homo sapiens
  misc_RNA (1)...(19): siRNA sense strand
cagaggcccuggaugauga

SEQ ID NO: 842204 - RNA, 19 nt, Homo sapiens
  misc_RNA (1)...(19): siRNA sense strand
gcaaacagcaugggucaga

SEQ ID NO: 842205 - RNA, 19 nt, Homo sapiens
  misc_RNA (1)...(19): siRNA sense strand
uuaccucccugaaaguaua

SEQ ID NO: 842206 - RNA, 19 nt, Homo sapiens
  misc_RNA (1)...(19): siRNA sense strand
gaagaggaccuagauguag

SEQ ID NO: 842207 - RNA, 19 nt, Homo sapiens
  misc_RNA (1)...(19): siRNA sense strand
agauguagaugauaaagug

SEQ ID NO: 842208 - RNA, 19 nt, Homo sapiens
  misc_RNA (1)...(19): siRNA sense strand
agacagaggcccuggauga

SEQ ID NO: 842209 - RNA, 19 nt, Homo sapiens
  misc_RNA (1)...(19): siRNA sense strand
ugucagaucuggaaagagu

SEQ ID NO: 842210 - RNA, 19 nt, Homo sapiens
  misc_RNA (1)...(19): siRNA sense strand
gaaggaaggagaucaagag

SEQ ID NO: 842211 - RNA, 19 nt, Homo sapiens
  misc_RNA (1)...(19): siRNA sense strand
ggacagcagugugauaaaa

SEQ ID NO: 842212 - RNA, 19 nt, Homo sapiens
  misc_RNA (1)...(19): siRNA sense strand
ggaaauggcagcagucaac

SEQ ID NO: 842213 - RNA, 19 nt, Homo sapiens
  misc_RNA (1)...(19): siRNA sense strand
gugccuggcuguuauggaa

SEQ ID NO: 842214 - RNA, 19 nt, Homo sapiens
  misc_RNA (1)...(19): siRNA sense strand
gacaaacccuggcgcuaca

SEQ ID NO: 842215 - RNA, 19 nt, Homo sapiens
  misc_RNA (1)...(19): siRNA sense strand
cagcaauccuggagaguca

SEQ ID NO: 842216 - RNA, 19 nt, Homo sapiens
  misc_RNA (1)...(19): siRNA sense strand
uggcuguuauggaaaguua

SEQ ID NO: 842217 - RNA, 19 nt, Homo sapiens
  misc_RNA (1)...(19): siRNA sense strand
cgauuuaccuggagaaagg

SEQ ID NO: 842218 - RNA, 19 nt, Homo sapiens
  misc_RNA (1)...(19): siRNA sense strand
gacccugaauggagacaaa

SEQ ID NO: 842219 - RNA, 19 nt, Homo sapiens
  misc_RNA (1)...(19): siRNA sense strand
gaaucaauacccagaugaa

SEQ ID NO: 842220 - RNA, 19 nt, Homo sapiens
  misc_RNA (1)...(19): siRNA sense strand
ccaacucgcuaccaugcaa

SEQ ID NO: 842221 - RNA, 19 nt, Homo sapiens
  misc_RNA (1)...(19): siRNA sense strand
gcugucagaucuggaaaga

SEQ ID NO: 842222 - RNA, 19 nt, Homo sapiens
  misc_RNA (1)...(19): siRNA sense strand
agaagaggaccuagaugua

SEQ ID NO: 842223 - RNA, 19 nt, Homo sapiens
  misc_RNA (1)...(19): siRNA sense strand
agaguuaccucccugaaag

SEQ ID NO: 842224 - RNA, 19 nt, Homo sapiens
  misc_RNA (1)...(19): siRNA sense strand
caauagaggacccugaaug

SEQ ID NO: 842225 - RNA, 19 nt, Homo sapiens
  misc_RNA (1)...(19): siRNA sense strand
caagaggagagccaauauu

SEQ ID NO: 842226 - RNA, 19 nt, Homo sapiens
  misc_RNA (1)...(19): siRNA sense strand
ggcccuggaugaugacuga

SEQ ID NO: 842227 - RNA, 19 nt, Homo sapiens
  misc_RNA (1)...(19): siRNA sense strand
cgacaaggagccaacgaaa

SEQ ID NO: 842228 - RNA, 19 nt, Homo sapiens
  misc_RNA (1)...(19): siRNA sense strand
gaugacaguacgagccaua

SEQ ID NO: 842229 - RNA, 19 nt, Homo sapiens
  misc_RNA (1)...(19): siRNA sense strand
acaaggagccaacgaaauc

SEQ ID NO: 842230 - RNA, 19 nt, Homo sapiens
  misc_RNA (1)...(19): siRNA sense strand
cagaagaggaccuagaugu

SEQ ID NO: 842231 - RNA, 19 nt, Homo sapiens
  misc_RNA (1)...(19): siRNA sense strand
ucagaucuggaaagaguua

SEQ ID NO: 842232 - RNA, 19 nt, Homo sapiens
  misc_RNA (1)...(19): siRNA sense strand
gcacagguaacagguauca

SEQ ID NO: 842233 - RNA, 19 nt, Homo sapiens
  misc_RNA (1)...(19): siRNA sense strand
aagaggaccuagauguaga

SEQ ID NO: 842234 - RNA, 19 nt, Homo sapiens
  misc_RNA (1)...(19): siRNA sense strand
cgacgggaaugacuacucu

SEQ ID NO: 842235 - RNA, 19 nt, Homo sapiens
  misc_RNA (1)...(19): siRNA sense strand
ggagagucaugggauagau

SEQ ID NO: 842236 - RNA, 19 nt, Homo sapiens
  misc_RNA (1)...(19): siRNA sense strand
aagaggagagccaauauug

SEQ ID NO: 842237 - RNA, 19 nt, Homo sapiens
  misc_RNA (1)...(19): siRNA sense strand
gaggauuucccaagcaguu

SEQ ID NO: 842238 - RNA, 19 nt, Homo sapiens
  misc_RNA (1)...(19): siRNA sense strand
aaugagcgauuaucuacau

SEQ ID NO: 842239 - RNA, 19 nt, Homo sapiens
  misc_RNA (1)...(19): siRNA sense strand
uaauugguuugcuaacaga

SEQ ID NO: 842240 - RNA, 19 nt, Homo sapiens
  misc_RNA (1)...(19): siRNA sense strand
gaagcaaagagggaagaaa

SEQ ID NO: 842241 - RNA, 19 nt, Homo sapiens
  misc_RNA (1)...(19): siRNA sense strand
gcagucaaccacacuaucu

SEQ ID NO: 842242 - RNA, 19 nt, Homo sapiens
  misc_RNA (1)...(19): siRNA sense strand
gagggacagcagugugaua

SEQ ID NO: 842243 - RNA, 19 nt, Homo sapiens
  misc_RNA (1)...(19): siRNA sense strand
gggagaauaaugagcgauu

SEQ ID NO: 842244 - RNA, 19 nt, Homo sapiens
  misc_RNA (1)...(19): siRNA sense strand
ccuggagagucaugggaua

SEQ ID NO: 842245 - RNA, 19 nt, Homo sapiens
  misc_RNA (1)...(19): siRNA sense strand
gcaugggucagaggucaua

SEQ ID NO: 842246 - RNA, 19 nt, Homo sapiens
  misc_RNA (1)...(19): siRNA sense strand
gacaaggagccaacgaaau

SEQ ID NO: 842247 - RNA, 19 nt, Homo sapiens
  misc_RNA (1)...(19): siRNA sense strand
ggcauuggcccgacaagga

SEQ ID NO: 842248 - RNA, 19 nt, Homo sapiens
  misc_RNA (1)...(19): siRNA sense strand
ugacuacucugagcaggau

SEQ ID NO: 842249 - RNA, 19 nt, Homo sapiens
  misc_RNA (1)...(19): siRNA sense strand
gagagccaauauugaagca

SEQ ID NO: 842250 - RNA, 19 nt, Homo sapiens
  misc_RNA (1)...(19): siRNA sense strand
gaugauaaaguggaagaau

SEQ ID NO: 842251 - RNA, 19 nt, Homo sapiens
  misc_RNA (1)...(19): siRNA sense strand
aagcaaagagggaagaaau

SEQ ID NO: 842252 - RNA, 19 nt, Homo sapiens
  misc_RNA (1)...(19): siRNA sense strand
gcaguuguugcacagguaa

SEQ ID NO: 842253 - RNA, 19 nt, Homo sapiens
  misc_RNA (1)...(19): siRNA sense strand
uagcaacaguuaugacacu

SEQ ID NO: 842254 - RNA, 19 nt, Homo sapiens
  misc_RNA (1)...(19): siRNA sense strand
ccacagccuugcacuacca

SEQ ID NO: 842255 - RNA, 19 nt, Homo sapiens
  misc_RNA (1)...(19): siRNA sense strand
ugccacaucugguacuuuc

SEQ ID NO: 842256 - RNA, 19 nt, Homo sapiens
  misc_RNA (1)...(19): siRNA sense strand
cgucaccuagcaacaguua

SEQ ID NO: 842257 - RNA, 19 nt, Homo sapiens
  misc_RNA (1)...(19): siRNA sense strand
ucaagaggagagccaauau

SEQ ID NO: 842258 - RNA, 19 nt, Homo sapiens
  misc_RNA (1)...(19): siRNA sense strand
ucaccuagcaacaguuaug

SEQ ID NO: 842259 - RNA, 19 nt, Homo sapiens
  misc_RNA (1)...(19): siRNA sense strand
gaucucucauuggcuguug

SEQ ID NO: 842260 - RNA, 19 nt, Homo sapiens
  misc_RNA (1)...(19): siRNA sense strand
ccaagaccccaucucauua

SEQ ID NO: 842261 - RNA, 19 nt, Homo sapiens
  misc_RNA (1)...(19): siRNA sense strand
cccugaaaguauauaauug

SEQ ID NO: 842262 - RNA, 19 nt, Homo sapiens
  misc_RNA (1)...(19): siRNA sense strand
caaugcaguuauacagaag

SEQ ID NO: 842263 - RNA, 19 nt, Homo sapiens
  misc_RNA (1)...(19): siRNA sense strand
ccaggaggccacucaaaca

SEQ ID NO: 842264 - RNA, 19 nt, Homo sapiens
  misc_RNA (1)...(19): siRNA sense strand
gagcgauuaucuacaucca

SEQ ID NO: 842265 - RNA, 19 nt, Homo sapiens
  misc_RNA (1)...(19): siRNA sense strand
caagacagaggcccuggau

SEQ ID NO: 842266 - RNA, 19 nt, Homo sapiens
  misc_RNA (1)...(19): siRNA sense strand
gagccauagugaccaccaa

SEQ ID NO: 842267 - RNA, 19 nt, Homo sapiens
  misc_RNA (1)...(19): siRNA sense strand
gacaguacgagccauagug

SEQ ID NO: 842268 - RNA, 19 nt, Homo sapiens
  misc_RNA (1)...(19): siRNA sense strand
ggcgcuacacuaaguauga

SEQ ID NO: 842269 - RNA, 19 nt, Homo sapiens
  misc_RNA (1)...(19): siRNA sense strand
aaaaugggagggagaauaa

SEQ ID NO: 842270 - RNA, 19 nt, Homo sapiens
  misc_RNA (1)...(19): siRNA sense strand
aggagugccuggcuguuau

SEQ ID NO: 842271 - RNA, 19 nt, Homo sapiens
  misc_RNA (1)...(19): siRNA sense strand
aaggagugccuggcuguua

SEQ ID NO: 842272 - RNA, 19 nt, Homo sapiens
  misc_RNA (1)...(19): siRNA sense strand
caaaaugggagggagaaua

SEQ ID NO: 842273 - RNA, 19 nt, Homo sapiens
  misc_RNA (1)...(19): siRNA sense strand
accuagauguagaugauaa

SEQ ID NO: 842274 - RNA, 19 nt, Homo sapiens
  misc_RNA (1)...(19): siRNA sense strand
ggagccaacgaaaucaaga

SEQ ID NO: 842275 - RNA, 19 nt, Homo sapiens
  misc_RNA (1)...(19): siRNA sense strand
uguagaugauaaaguggaa

SEQ ID NO: 842276 - RNA, 19 nt, Homo sapiens
  misc_RNA (1)...(19): siRNA sense strand
uugcacagguaacagguau

SEQ ID NO: 842277 - RNA, 19 nt, Homo sapiens
  misc_RNA (1)...(19): siRNA sense strand
gcagcagucaaccacacua

SEQ ID NO: 842278 - RNA, 19 nt, Homo sapiens
  misc_RNA (1)...(19): siRNA sense strand
ucaauacccagaugaagca

SEQ ID NO: 842279 - RNA, 19 nt, Homo sapiens
  misc_RNA (1)...(19): siRNA sense strand
gcaacaguuaugacacuuc

SEQ ID NO: 842280 - RNA, 19 nt, Homo sapiens
  misc_RNA (1)...(19): siRNA sense strand
guaacagguaucagucaga

SEQ ID NO: 842281 - RNA, 19 nt, Homo sapiens
  misc_RNA (1)...(19): siRNA sense strand
ugggauagaugugcagagu

SEQ ID NO: 842282 - RNA, 19 nt, Homo sapiens
  misc_RNA (1)...(19): siRNA sense strand
agaggagagccaauauuga

SEQ ID NO: 842283 - RNA, 19 nt, Homo sapiens
  misc_RNA (1)...(19): siRNA sense strand
gauuaucuacauccaaugg

SEQ ID NO: 842284 - RNA, 19 nt, Homo sapiens
  misc_RNA (1)...(19): siRNA sense strand
acaguacgagccauaguga

SEQ ID NO: 842285 - RNA, 19 nt, Homo sapiens
  misc_RNA (1)...(19): siRNA sense strand
gagagucaugggauagaug

SEQ ID NO: 842286 - RNA, 19 nt, Homo sapiens
  misc_RNA (1)...(19): siRNA sense strand
gaccugagugaacagaaga

SEQ ID NO: 842287 - RNA, 19 nt, Homo sapiens
  misc_RNA (1)...(19): siRNA sense strand
gaccuagauguagaugaua

SEQ ID NO: 842288 - RNA, 19 nt, Homo sapiens
  misc_RNA (1)...(19): siRNA sense strand
auaauugguuugcuaacag

SEQ ID NO: 842289 - RNA, 19 nt, Homo sapiens
  misc_RNA (1)...(19): siRNA sense strand
auacccagaugaagcaaag

SEQ ID NO: 842290 - RNA, 19 nt, Homo sapiens
  misc_RNA (1)...(19): siRNA sense strand
gcgcuacacuaaguaugag

SEQ ID NO: 842291 - RNA, 19 nt, Homo sapiens
  misc_RNA (1)...(19): siRNA sense strand
cacacuaucuuggcauugg

SEQ ID NO: 842292 - RNA, 19 nt, Homo sapiens
  misc_RNA (1)...(19): siRNA sense strand
aagaguuaccucccugaaa

SEQ ID NO: 842293 - RNA, 19 nt, Homo sapiens
  misc_RNA (1)...(19): siRNA sense strand
aaagagggaagaaauugca

SEQ ID NO: 842294 - RNA, 19 nt, Homo sapiens
  misc_RNA (1)...(19): siRNA sense strand
cuacagagcuucccaagaa

SEQ ID NO: 842295 - RNA, 19 nt, Homo sapiens
  misc_RNA (1)...(19): siRNA sense strand
gagcagagaucaagaggaa

SEQ ID NO: 842296 - RNA, 19 nt, Homo sapiens
  misc_RNA (1)...(19): siRNA sense strand
gaagacagaaguagugaua

SEQ ID NO: 842297 - RNA, 19 nt, Homo sapiens
  misc_RNA (1)...(19): siRNA sense strand
gagagacacuuggccauua

SEQ ID NO: 842298 - RNA, 19 nt, Homo sapiens
  misc_RNA (1)...(19): siRNA sense strand
ggagaaagcuagucaagag

SEQ ID NO: 842299 - RNA, 19 nt, Homo sapiens
  misc_RNA (1)...(19): siRNA sense strand
agacagaaguagugauaua

SEQ ID NO: 842300 - RNA, 19 nt, Homo sapiens
  misc_RNA (1)...(19): siRNA sense strand
gagauuugcuugaaagaug

SEQ ID NO: 842301 - RNA, 19 nt, Homo sapiens
  misc_RNA (1)...(19): siRNA sense strand
ugaaagaccuagaugcauu

SEQ ID NO: 842302 - RNA, 19 nt, Homo sapiens
  misc_RNA (1)...(19): siRNA sense strand
gaaagcagccuccaaacug

SEQ ID NO: 842303 - RNA, 19 nt, Homo sapiens
  misc_RNA (1)...(19): siRNA sense strand
cuugaaagaugcaucauuu

SEQ ID NO: 842304 - RNA, 19 nt, Homo sapiens
  misc_RNA (1)...(19): siRNA sense strand
cauaagaccuugucagagu

SEQ ID NO: 842305 - RNA, 19 nt, Homo sapiens
  misc_RNA (1)...(19): siRNA sense strand
caagugaacugcacaaacu

SEQ ID NO: 842306 - RNA, 19 nt, Homo sapiens
  misc_RNA (1)...(19): siRNA sense strand
gaacuuaacagcagcagau

SEQ ID NO: 842307 - RNA, 19 nt, Homo sapiens
  misc_RNA (1)...(19): siRNA sense strand
cagcauugcagaagaaaua

SEQ ID NO: 842308 - RNA, 19 nt, Homo sapiens
  misc_RNA (1)...(19): siRNA sense strand
gaaagaccuagaugcauuu

SEQ ID NO: 842309 - RNA, 19 nt, Homo sapiens
  misc_RNA (1)...(19): siRNA sense strand
ggaaagagccugccuucag

SEQ ID NO: 842310 - RNA, 19 nt, Homo sapiens
  misc_RNA (1)...(19): siRNA sense strand
gccgaucacuccgaaauaa

SEQ ID NO: 842311 - RNA, 19 nt, Homo sapiens
  misc_RNA (1)...(19): siRNA sense strand
aaagcucccugcugcauaa

SEQ ID NO: 842312 - RNA, 19 nt, Homo sapiens
  misc_RNA (1)...(19): siRNA sense strand
agaccuagaugcauuugaa

SEQ ID NO: 842313 - RNA, 19 nt, Homo sapiens
  misc_RNA (1)...(19): siRNA sense strand
gagccugccuucagcaaga

SEQ ID NO: 842314 - RNA, 19 nt, Homo sapiens
  misc_RNA (1)...(19): siRNA sense strand
gagauuugcuccaggucuu

SEQ ID NO: 842315 - RNA, 19 nt, Homo sapiens
  misc_RNA (1)...(19): siRNA sense strand
gaacaacugguaaccuuca

SEQ ID NO: 842316 - RNA, 19 nt, Homo sapiens
  misc_RNA (1)...(19): siRNA sense strand
ucaccaacaugaucauaga

SEQ ID NO: 842317 - RNA, 19 nt, Homo sapiens
  misc_RNA (1)...(19): siRNA sense strand
gaucacccauauuuguuug

SEQ ID NO: 842318 - RNA, 19 nt, Homo sapiens
  misc_RNA (1)...(19): siRNA sense strand
ugacccagauguuggauau

SEQ ID NO: 842319 - RNA, 19 nt, Homo sapiens
  misc_RNA (1)...(19): siRNA sense strand
uaaaggcaguguucucauc

SEQ ID NO: 842320 - RNA, 19 nt, Homo sapiens
  misc_RNA (1)...(19): siRNA sense strand
aggaagaggugggagauuu

SEQ ID NO: 842321 - RNA, 19 nt, Homo sapiens
  misc_RNA (1)...(19): siRNA sense strand
cuaaagagcccaguaagga

SEQ ID NO: 842322 - RNA, 19 nt, Homo sapiens
  misc_RNA (1)...(19): siRNA sense strand
caagaagacagaaguagug

SEQ ID NO: 842323 - RNA, 19 nt, Homo sapiens
  misc_RNA (1)...(19): siRNA sense strand
cgaaauaaaggcaguguuc

SEQ ID NO: 842324 - RNA, 19 nt, Homo sapiens
  misc_RNA (1)...(19): siRNA sense strand
gagacacuguggaagaaau

SEQ ID NO: 842325 - RNA, 19 nt, Homo sapiens
  misc_RNA (1)...(19): siRNA sense strand
agagacacuuggccauuaa

SEQ ID NO: 842326 - RNA, 19 nt, Homo sapiens
  misc_RNA (1)...(19): siRNA sense strand
cuacuagcauuccuguauu

SEQ ID NO: 842327 - RNA, 19 nt, Homo sapiens
  misc_RNA (1)...(19): siRNA sense strand
ccuaugagauuugcuugaa

SEQ ID NO: 842328 - RNA, 19 nt, Homo sapiens
  misc_RNA (1)...(19): siRNA sense strand
gagcaccauggaugaaaua

SEQ ID NO: 842329 - RNA, 19 nt, Homo sapiens
  misc_RNA (1)...(19): siRNA sense strand
ggagcaccauggaugaaau

SEQ ID NO: 842330 - RNA, 19 nt, Homo sapiens
  misc_RNA (1)...(19): siRNA sense strand
ccaaaugacccagauguug

SEQ ID NO: 842331 - RNA, 19 nt, Homo sapiens
  misc_RNA (1)...(19): siRNA sense strand
gaugaaagaccuagaugca

SEQ ID NO: 842332 - RNA, 19 nt, Homo sapiens
  misc_RNA (1)...(19): siRNA sense strand
gaacucccauccagaacag

SEQ ID NO: 842333 - RNA, 19 nt, Homo sapiens
  misc_RNA (1)...(19): siRNA sense strand
uguggagccugaucucuuu

SEQ ID NO: 842334 - RNA, 19 nt, Homo sapiens
  misc_RNA (1)...(19): siRNA sense strand
cuaccaggauauugagaaa

SEQ ID NO: 842335 - RNA, 19 nt, Homo sapiens
  misc_RNA (1)...(19): siRNA sense strand
auucaacgcuaccaggaua

SEQ ID NO: 842336 - RNA, 19 nt, Homo sapiens
  misc_RNA (1)...(19): siRNA sense strand
auaaacugcuggccucuga

SEQ ID NO: 842337 - RNA, 19 nt, Homo sapiens
  misc_RNA (1)...(19): siRNA sense strand
uuacagaggcuacagcuau

SEQ ID NO: 842338 - RNA, 19 nt, Homo sapiens
  misc_RNA (1)...(19): siRNA sense strand
ucuacucccuccucaguuu

SEQ ID NO: 842339 - RNA, 19 nt, Homo sapiens
  misc_RNA (1)...(19): siRNA sense strand
ggaucacccauauuuguuu

SEQ ID NO: 842340 - RNA, 19 nt, Homo sapiens
  misc_RNA (1)...(19): siRNA sense strand
ugagaaagaaucugaguca

SEQ ID NO: 842341 - RNA, 19 nt, Homo sapiens
  misc_RNA (1)...(19): siRNA sense strand
ggaaagcagccuccaaacu

SEQ ID NO: 842342 - RNA, 19 nt, Homo sapiens
  misc_RNA (1)...(19): siRNA sense strand
gaaacccgcugccgaugcu

SEQ ID NO: 842343 - RNA, 19 nt, Homo sapiens
  misc_RNA (1)...(19): siRNA sense strand
ugccagggcucaucgcauu

SEQ ID NO: 842344 - RNA, 19 nt, Homo sapiens
  misc_RNA (1)...(19): siRNA sense strand
uaaagagcccaguaaggaa

SEQ ID NO: 842345 - RNA, 19 nt, Homo sapiens
  misc_RNA (1)...(19): siRNA sense strand
gagauacucaaauuugguu

SEQ ID NO: 842346 - RNA, 19 nt, Homo sapiens
  misc_RNA (1)...(19): siRNA sense strand
caaagcucccugcugcaua

SEQ ID NO: 842347 - RNA, 19 nt, Homo sapiens
  misc_RNA (1)...(19): siRNA sense strand
uaggaaagcagccuccaaa

SEQ ID NO: 842348 - RNA, 19 nt, Homo sapiens
  misc_RNA (1)...(19): siRNA sense strand
gaaauacuacaaggccauu

SEQ ID NO: 842349 - RNA, 19 nt, Homo sapiens
  misc_RNA (1)...(19): siRNA sense strand
caacaugaucauagaagga

SEQ ID NO: 842350 - RNA, 19 nt, Homo sapiens
  misc_RNA (1)...(19): siRNA sense strand
ugucagcauugcagaagaa

SEQ ID NO: 842351 - RNA, 19 nt, Homo sapiens
  misc_RNA (1)...(19): siRNA sense strand
caacugguaaccuucagaa

SEQ ID NO: 842352 - RNA, 19 nt, Homo sapiens
  misc_RNA (1)...(19): siRNA sense strand
gagacggcaaagaaaguua

SEQ ID NO: 842353 - RNA, 19 nt, Homo sapiens
  misc_RNA (1)...(19): siRNA sense strand
gcagaagaaauacuacaag

SEQ ID NO: 842354 - RNA, 19 nt, Homo sapiens
  misc_RNA (1)...(19): siRNA sense strand
ccaguaaggaagacagaaa

SEQ ID NO: 842355 - RNA, 19 nt, Homo sapiens
  misc_RNA (1)...(19): siRNA sense strand
gaaggagggagcagagauc

SEQ ID NO: 842356 - RNA, 19 nt, Homo sapiens
  misc_RNA (1)...(19): siRNA sense strand
caccauggaugaaauagac

SEQ ID NO: 842357 - RNA, 19 nt, Homo sapiens
  misc_RNA (1)...(19): siRNA sense strand
gaccuccaguugagugaga

SEQ ID NO: 842358 - RNA, 19 nt, Homo sapiens
  misc_RNA (1)...(19): siRNA sense strand
uaugagauuugcuugaaag

SEQ ID NO: 842359 - RNA, 19 nt, Homo sapiens
  misc_RNA (1)...(19): siRNA sense strand
cccaagacuauauggauua

SEQ ID NO: 842360 - RNA, 19 nt, Homo sapiens
  misc_RNA (1)...(19): siRNA sense strand
guguggaucacccauauuu

SEQ ID NO: 842361 - RNA, 19 nt, Homo sapiens
  misc_RNA (1)...(19): siRNA sense strand
accaggauauugagaaaga

SEQ ID NO: 842362 - RNA, 19 nt, Homo sapiens
  misc_RNA (1)...(19): siRNA sense strand
uugaacaacugguaaccuu

SEQ ID NO: 842363 - RNA, 19 nt, Homo sapiens
  misc_RNA (1)...(19): siRNA sense strand
aaaguuauucggcugauug

SEQ ID NO: 842364 - RNA, 19 nt, Homo sapiens
  misc_RNA (1)...(19): siRNA sense strand
gcucaucgcauuggccaaa

SEQ ID NO: 842365 - RNA, 19 nt, Homo sapiens
  misc_RNA (1)...(19): siRNA sense strand
gagaucaagaggaaggaaa

SEQ ID NO: 842366 - RNA, 19 nt, Homo sapiens
  misc_RNA (1)...(19): siRNA sense strand
uaaaguuauucggcugauu

SEQ ID NO: 842367 - RNA, 19 nt, Homo sapiens
  misc_RNA (1)...(19): siRNA sense strand
guguguggaucacccauau

SEQ ID NO: 842368 - RNA, 19 nt, Homo sapiens
  misc_RNA (1)...(19): siRNA sense strand
aagcuucaccugcuggaua

SEQ ID NO: 842369 - RNA, 19 nt, Homo sapiens
  misc_RNA (1)...(19): siRNA sense strand
ugucagaguucucaguagu

SEQ ID NO: 842370 - RNA, 19 nt, Homo sapiens
  misc_RNA (1)...(19): siRNA sense strand
gaaauaaaggcaguguucu

SEQ ID NO: 842371 - RNA, 19 nt, Homo sapiens
  misc_RNA (1)...(19): siRNA sense strand
ggagggagcagagaucaag

SEQ ID NO: 842372 - RNA, 19 nt, Homo sapiens
  misc_RNA (1)...(19): siRNA sense strand
ucgagacacuguggaagaa

SEQ ID NO: 842373 - RNA, 19 nt, Homo sapiens
  misc_RNA (1)...(19): siRNA sense strand
gcaagugaacugcacaaac

SEQ ID NO: 842374 - RNA, 19 nt, Homo sapiens
  misc_RNA (1)...(19): siRNA sense strand
cuaugagauuugcuugaaa

SEQ ID NO: 842375 - RNA, 19 nt, Homo sapiens
  misc_RNA (1)...(19): siRNA sense strand
aaaaugagacggcaaagaa

SEQ ID NO: 842376 - RNA, 19 nt, Homo sapiens
  misc_RNA (1)...(19): siRNA sense strand
gaagaggugggagauuuua

SEQ ID NO: 842377 - RNA, 19 nt, Homo sapiens
  misc_RNA (1)...(19): siRNA sense strand
ggaacucccauccagaaca

SEQ ID NO: 842378 - RNA, 19 nt, Homo sapiens
  misc_RNA (1)...(19): siRNA sense strand
gcaccauggaugaaauaga

SEQ ID NO: 842379 - RNA, 19 nt, Homo sapiens
  misc_RNA (1)...(19): siRNA sense strand
gaugcugaccuccaguuga

SEQ ID NO: 842380 - RNA, 19 nt, Homo sapiens
  misc_RNA (1)...(19): siRNA sense strand
cugacuaccuaugagauuu

SEQ ID NO: 842381 - RNA, 19 nt, Homo sapiens
  misc_RNA (1)...(19): siRNA sense strand
cagcagauacugugauuuu

SEQ ID NO: 842382 - RNA, 19 nt, Homo sapiens
  misc_RNA (1)...(19): siRNA sense strand
gcagguggaguuggcauga

SEQ ID NO: 842383 - RNA, 19 nt, Homo sapiens
  misc_RNA (1)...(19): siRNA sense strand
guguggagccggagccuuu

SEQ ID NO: 842384 - RNA, 19 nt, Homo sapiens
  misc_RNA (1)...(19): siRNA sense strand
guggaucacccauauuugu

SEQ ID NO: 842385 - RNA, 19 nt, Homo sapiens
  misc_RNA (1)...(19): siRNA sense strand
cagaaguagugauauacca

SEQ ID NO: 842386 - RNA, 19 nt, Homo sapiens
  misc_RNA (1)...(19): siRNA sense strand
gcgagugaaagcugaggua

SEQ ID NO: 842387 - RNA, 19 nt, Homo sapiens
  misc_RNA (1)...(19): siRNA sense strand
ggugggagauuuuauucaa

SEQ ID NO: 842388 - RNA, 19 nt, Homo sapiens
  misc_RNA (1)...(19): siRNA sense strand
agucuucagucuccuguug

SEQ ID NO: 842389 - RNA, 19 nt, Homo sapiens
  misc_RNA (1)...(19): siRNA sense strand
ggccgaucacuccgaaaua

SEQ ID NO: 842390 - RNA, 19 nt, Homo sapiens
  misc_RNA (1)...(19): siRNA sense strand
acuuuaauccucagaauga

SEQ ID NO: 842391 - RNA, 19 nt, Homo sapiens
  misc_RNA (1)...(19): siRNA sense strand
uacagaggcuacagcuaug

SEQ ID NO: 842392 - RNA, 19 nt, Homo sapiens
  misc_RNA (1)...(19): siRNA sense strand
ccaagaagacagaaguagu

SEQ ID NO: 842393 - RNA, 19 nt, Homo sapiens
  misc_RNA (1)...(19): siRNA sense strand
ggagggaucuaccaaaagg

SEQ ID NO: 842394 - RNA, 19 nt, Homo sapiens
  misc_RNA (1)...(19): siRNA sense strand
cuacaucccuaaagaauua

SEQ ID NO: 842395 - RNA, 19 nt, Homo sapiens
  misc_RNA (1)...(19): siRNA sense strand
gcaaagagaagacauuaaa

SEQ ID NO: 842396 - RNA, 19 nt, Homo sapiens
  misc_RNA (1)...(19): siRNA sense strand
gauaacguguuuccaaauu

SEQ ID NO: 842397 - RNA, 19 nt, Homo sapiens
  misc_RNA (1)...(19): siRNA sense strand
cuaaagauuugaagacuga

SEQ ID NO: 842398 - RNA, 19 nt, Homo sapiens
  misc_RNA (1)...(19): siRNA sense strand
ugacaagaguggaaugaaa

SEQ ID NO: 842399 - RNA, 19 nt, Homo sapiens
  misc_RNA (1)...(19): siRNA sense strand
gaagaggauuauauucguu

SEQ ID NO: 842400 - RNA, 19 nt, Homo sapiens
  misc_RNA (1)...(19): siRNA sense strand
gccauuuacuuguucaaua

SEQ ID NO: 842401 - RNA, 19 nt, Homo sapiens
  misc_RNA (1)...(19): siRNA sense strand
caaggaagaggauuauauu

SEQ ID NO: 842402 - RNA, 19 nt, Homo sapiens
  misc_RNA (1)...(19): siRNA sense strand
ggaagaggauuauauucgu

SEQ ID NO: 842403 - RNA, 19 nt, Homo sapiens
  misc_RNA (1)...(19): siRNA sense strand
ucagaaggcuuuggcuaaa

SEQ ID NO: 842404 - RNA, 19 nt, Homo sapiens
  misc_RNA (1)...(19): siRNA sense strand
ccuaaagaauuaagugaug

SEQ ID NO: 842405 - RNA, 19 nt, Homo sapiens
  misc_RNA (1)...(19): siRNA sense strand
agaaggagccauuuacuug

SEQ ID NO: 842406 - RNA, 19 nt, Homo sapiens
  misc_RNA (1)...(19): siRNA sense strand
gagaaggagccauuuacuu

SEQ ID NO: 842407 - RNA, 19 nt, Homo sapiens
  misc_RNA (1)...(19): siRNA sense strand
cagcaaagagaagacauua

SEQ ID NO: 842408 - RNA, 19 nt, Homo sapiens
  misc_RNA (1)...(19): siRNA sense strand
gaaacuuccuggacuugag

SEQ ID NO: 842409 - RNA, 19 nt, Homo sapiens
  misc_RNA (1)...(19): siRNA sense strand
ucugauaucugacuacauc

SEQ ID NO: 842410 - RNA, 19 nt, Homo sapiens
  misc_RNA (1)...(19): siRNA sense strand
caaauccuccaucaaagaa

SEQ ID NO: 842411 - RNA, 19 nt, Homo sapiens
  misc_RNA (1)...(19): siRNA sense strand
cagcacguguuccugguuu

SEQ ID NO: 842412 - RNA, 19 nt, Homo sapiens
  misc_RNA (1)...(19): siRNA sense strand
gaaggagccauuuacuugu

SEQ ID NO: 842413 - RNA, 19 nt, Homo sapiens
  misc_RNA (1)...(19): siRNA sense strand
guuccugguuucagaauau

SEQ ID NO: 842414 - RNA, 19 nt, Homo sapiens
  misc_RNA (1)...(19): siRNA sense strand
cccauggucugauaucuga

SEQ ID NO: 842415 - RNA, 19 nt, Homo sapiens
  misc_RNA (1)...(19): siRNA sense strand
gcugaaacuuccuggacuu

SEQ ID NO: 842416 - RNA, 19 nt, Homo sapiens
  misc_RNA (1)...(19): siRNA sense strand
ucauaaaggcugauaagga

SEQ ID NO: 842417 - RNA, 19 nt, Homo sapiens
  misc_RNA (1)...(19): siRNA sense strand
ccaaauccuccaucaaaga

SEQ ID NO: 842418 - RNA, 19 nt, Homo sapiens
  misc_RNA (1)...(19): siRNA sense strand
caaauugcaucuuguugcu

SEQ ID NO: 842419 - RNA, 19 nt, Homo sapiens
  misc_RNA (1)...(19): siRNA sense strand
guuaucagaugagccugua

SEQ ID NO: 842420 - RNA, 19 nt, Homo sapiens
  misc_RNA (1)...(19): siRNA sense strand
acaaggaagaggauuauau

SEQ ID NO: 842421 - RNA, 19 nt, Homo sapiens
  misc_RNA (1)...(19): siRNA sense strand
caggagaaggagccauuua

SEQ ID NO: 842422 - RNA, 19 nt, Homo sapiens
  misc_RNA (1)...(19): siRNA sense strand
acauuaaaguggcuggaaa

SEQ ID NO: 842423 - RNA, 19 nt, Homo sapiens
  misc_RNA (1)...(19): siRNA sense strand
ugccaaauccuccaucaaa

SEQ ID NO: 842424 - RNA, 19 nt, Homo sapiens
  misc_RNA (1)...(19): siRNA sense strand
gccaaauccuccaucaaag

SEQ ID NO: 842425 - RNA, 19 nt, Homo sapiens
  misc_RNA (1)...(19): siRNA sense strand
gaccaagcuuccacugaca

SEQ ID NO: 842426 - RNA, 19 nt, Homo sapiens
  misc_RNA (1)...(19): siRNA sense strand
ugugguggauaacguguuu

SEQ ID NO: 842427 - RNA, 19 nt, Homo sapiens
  misc_RNA (1)...(19): siRNA sense strand
aaggagccauuuacuuguu

SEQ ID NO: 842428 - RNA, 19 nt, Homo sapiens
  misc_RNA (1)...(19): siRNA sense strand
uaacguguuuccaaauugc

SEQ ID NO: 842429 - RNA, 19 nt, Homo sapiens
  misc_RNA (1)...(19): siRNA sense strand
cugacuacaucccuaaaga

SEQ ID NO: 842430 - RNA, 19 nt, Homo sapiens
  misc_RNA (1)...(19): siRNA sense strand
ggucugauaucugacuaca

SEQ ID NO: 842431 - RNA, 19 nt, Homo sapiens
  misc_RNA (1)...(19): siRNA sense strand
ggauaacguguuuccaaau

SEQ ID NO: 842432 - RNA, 19 nt, Homo sapiens
  misc_RNA (1)...(19): siRNA sense strand
ggcuaaaguugacaagagu

SEQ ID NO: 842433 - RNA, 19 nt, Homo sapiens
  misc_RNA (1)...(19): siRNA sense strand
ccagaaauagacaacaaga

SEQ ID NO: 842434 - RNA, 19 nt, Homo sapiens
  misc_RNA (1)...(19): siRNA sense strand
aaaaugggcuaauguuugu

SEQ ID NO: 842435 - RNA, 19 nt, Homo sapiens
  misc_RNA (1)...(19): siRNA sense strand
cuucuccacuaccucauaa

SEQ ID NO: 842436 - RNA, 19 nt, Homo sapiens
  misc_RNA (1)...(19): siRNA sense strand
gacuacaucccuaaagaau

SEQ ID NO: 842437 - RNA, 19 nt, Homo sapiens
  misc_RNA (1)...(19): siRNA sense strand
ucaaacuguggcagcauua

SEQ ID NO: 842438 - RNA, 19 nt, Homo sapiens
  misc_RNA (1)...(19): siRNA sense strand
ugacuacaucccuaaagaa

SEQ ID NO: 842439 - RNA, 19 nt, Homo sapiens
  misc_RNA (1)...(19): siRNA sense strand
uggcuaaaguugacaagag

SEQ ID NO: 842440 - RNA, 19 nt, Homo sapiens
  misc_RNA (1)...(19): siRNA sense strand
gaucaaguugugguggaua

SEQ ID NO: 842441 - RNA, 19 nt, Homo sapiens
  misc_RNA (1)...(19): siRNA sense strand
ggagaaggagccauuuacu

SEQ ID NO: 842442 - RNA, 19 nt, Homo sapiens
  misc_RNA (1)...(19): siRNA sense strand
ccugguuucagaauauuua

SEQ ID NO: 842443 - RNA, 19 nt, Homo sapiens
  misc_RNA (1)...(19): siRNA sense strand
acaaguacagcaaagagaa

SEQ ID NO: 842444 - RNA, 19 nt, Homo sapiens
  misc_RNA (1)...(19): siRNA sense strand
auaacguguuuccaaauug

SEQ ID NO: 842445 - RNA, 19 nt, Homo sapiens
  misc_RNA (1)...(19): siRNA sense strand
ugacaaggaagaggauuau

SEQ ID NO: 842446 - RNA, 19 nt, Homo sapiens
  misc_RNA (1)...(19): siRNA sense strand
aagagaagacauuaaagug

SEQ ID NO: 842447 - RNA, 19 nt, Homo sapiens
  misc_RNA (1)...(19): siRNA sense strand
caaagagaagacauuaaag

SEQ ID NO: 842448 - RNA, 19 nt, Homo sapiens
  misc_RNA (1)...(19): siRNA sense strand
aaacuguggcagcauuaaa

SEQ ID NO: 842449 - RNA, 19 nt, Homo sapiens
  misc_RNA (1)...(19): siRNA sense strand
cagaaauagacaacaagaa

SEQ ID NO: 842450 - RNA, 19 nt, Homo sapiens
  misc_RNA (1)...(19): siRNA sense strand
uuaugcccauggucugaua

SEQ ID NO: 842451 - RNA, 19 nt, Homo sapiens
  misc_RNA (1)...(19): siRNA sense strand
gacaaggaagaggauuaua

SEQ ID NO: 842452 - RNA, 19 nt, Homo sapiens
  misc_RNA (1)...(19): siRNA sense strand
gcagcugcuugaaguaaaa

SEQ ID NO: 842453 - RNA, 19 nt, Homo sapiens
  misc_RNA (1)...(19): siRNA sense strand
uauuucugcuucuccacua

SEQ ID NO: 842454 - RNA, 19 nt, Homo sapiens
  misc_RNA (1)...(19): siRNA sense strand
caaacuguggcagcauuaa

SEQ ID NO: 842455 - RNA, 19 nt, Homo sapiens
  misc_RNA (1)...(19): siRNA sense strand
ggagccauuuacuuguuca

SEQ ID NO: 842456 - RNA, 19 nt, Homo sapiens
  misc_RNA (1)...(19): siRNA sense strand
accuguggauccucuauuu

SEQ ID NO: 842457 - RNA, 19 nt, Homo sapiens
  misc_RNA (1)...(19): siRNA sense strand
agaugagccuguagaagca

SEQ ID NO: 842458 - RNA, 19 nt, Homo sapiens
  misc_RNA (1)...(19): siRNA sense strand
guuuccaaauugcaucuug

SEQ ID NO: 842459 - RNA, 19 nt, Homo sapiens
  misc_RNA (1)...(19): siRNA sense strand
aagguaauccagaaauaga

SEQ ID NO: 842460 - RNA, 19 nt, Homo sapiens
  misc_RNA (1)...(19): siRNA sense strand
uaucagaugagccuguaga

SEQ ID NO: 842461 - RNA, 19 nt, Homo sapiens
  misc_RNA (1)...(19): siRNA sense strand
uaucugacuacaucccuaa

SEQ ID NO: 842462 - RNA, 19 nt, Homo sapiens
  misc_RNA (1)...(19): siRNA sense strand
cugacaaggaagaggauua

SEQ ID NO: 842463 - RNA, 19 nt, Homo sapiens
  misc_RNA (1)...(19): siRNA sense strand
gacaagaguggaaugaaaa

SEQ ID NO: 842464 - RNA, 19 nt, Homo sapiens
  misc_RNA (1)...(19): siRNA sense strand
cucagaaggcuuuggcuaa

SEQ ID NO: 842465 - RNA, 19 nt, Homo sapiens
  misc_RNA (1)...(19): siRNA sense strand
gcaaaagaagauuacacua

SEQ ID NO: 842466 - RNA, 19 nt, Homo sapiens
  misc_RNA (1)...(19): siRNA sense strand
auacuuaaagcuuccagaa

SEQ ID NO: 842467 - RNA, 19 nt, Homo sapiens
  misc_RNA (1)...(19): siRNA sense strand
gacauuaaaguggcuggaa

SEQ ID NO: 842468 - RNA, 19 nt, Homo sapiens
  misc_RNA (1)...(19): siRNA sense strand
gcacguguuccugguuuca

SEQ ID NO: 842469 - RNA, 19 nt, Homo sapiens
  misc_RNA (1)...(19): siRNA sense strand
aaagguaauccagaaauag

SEQ ID NO: 842470 - RNA, 19 nt, Homo sapiens
  misc_RNA (1)...(19): siRNA sense strand
aaaguugacaagaguggaa

SEQ ID NO: 842471 - RNA, 19 nt, Homo sapiens
  misc_RNA (1)...(19): siRNA sense strand
gcuucuccacuaccucaua

SEQ ID NO: 842472 - RNA, 19 nt, Homo sapiens
  misc_RNA (1)...(19): siRNA sense strand
gguaauccagaaauagaca

SEQ ID NO: 842473 - RNA, 19 nt, Homo sapiens
  misc_RNA (1)...(19): siRNA sense strand
cugcagcucagaaggcuuu

SEQ ID NO: 842474 - RNA, 19 nt, Homo sapiens
  misc_RNA (1)...(19): siRNA sense strand
gcaucuuguugcugaaacu

SEQ ID NO: 842475 - RNA, 19 nt, Homo sapiens
  misc_RNA (1)...(19): siRNA sense strand
ccucauaaaggcugauaag

SEQ ID NO: 842476 - RNA, 19 nt, Homo sapiens
  misc_RNA (1)...(19): siRNA sense strand
guacagcaaagagaagaca

SEQ ID NO: 842477 - RNA, 19 nt, Homo sapiens
  misc_RNA (1)...(19): siRNA sense strand
auccagaaauagacaacaa

SEQ ID NO: 842478 - RNA, 19 nt, Homo sapiens
  misc_RNA (1)...(19): siRNA sense strand
aucaaguugugguggauaa

SEQ ID NO: 842479 - RNA, 19 nt, Homo sapiens
  misc_RNA (1)...(19): siRNA sense strand
gcagcacguguuccugguu

SEQ ID NO: 842480 - RNA, 19 nt, Homo sapiens
  misc_RNA (1)...(19): siRNA sense strand
aggauuauauucguuaugc

SEQ ID NO: 842481 - RNA, 19 nt, Homo sapiens
  misc_RNA (1)...(19): siRNA sense strand
gaggauuauauucguuaug

SEQ ID NO: 842482 - RNA, 19 nt, Homo sapiens
  misc_RNA (1)...(19): siRNA sense strand
caaguacagcaaagagaag

SEQ ID NO: 842483 - RNA, 19 nt, Homo sapiens
  misc_RNA (1)...(19): siRNA sense strand
aaugggcuaauguuuguaa

SEQ ID NO: 842484 - RNA, 19 nt, Homo sapiens
  misc_RNA (1)...(19): siRNA sense strand
gaaagaagcuccgagacua

SEQ ID NO: 842485 - RNA, 19 nt, Homo sapiens
  misc_RNA (1)...(19): siRNA sense strand
caagauggauggagaagua

SEQ ID NO: 842486 - RNA, 19 nt, Homo sapiens
  misc_RNA (1)...(19): siRNA sense strand
gaagucaacucccaaauag

SEQ ID NO: 842487 - RNA, 19 nt, Homo sapiens
  misc_RNA (1)...(19): siRNA sense strand
gagagaaacucacggaaga

SEQ ID NO: 842488 - RNA, 19 nt, Homo sapiens
  misc_RNA (1)...(19): siRNA sense strand
ccaaauagcccuagaauac

SEQ ID NO: 842489 - RNA, 19 nt, Homo sapiens
  misc_RNA (1)...(19): siRNA sense strand
gaagaaggccauccagaga

SEQ ID NO: 842490 - RNA, 19 nt, Homo sapiens
  misc_RNA (1)...(19): siRNA sense strand
agaaggccauccagagaua

SEQ ID NO: 842491 - RNA, 19 nt, Homo sapiens
  misc_RNA (1)...(19): siRNA sense strand
gaagaagucaacucccaaa

SEQ ID NO: 842492 - RNA, 19 nt, Homo sapiens
  misc_RNA (1)...(19): siRNA sense strand
gaaacucacggaagacaga

SEQ ID NO: 842493 - RNA, 19 nt, Homo sapiens
  misc_RNA (1)...(19): siRNA sense strand
agaagucaacucccaaaua

SEQ ID NO: 842494 - RNA, 19 nt, Homo sapiens
  misc_RNA (1)...(19): siRNA sense strand
gagacgagguuuccuucau

SEQ ID NO: 842495 - RNA, 19 nt, Homo sapiens
  misc_RNA (1)...(19): siRNA sense strand
gaauacggccaggcaauga

SEQ ID NO: 842496 - RNA, 19 nt, Homo sapiens
  misc_RNA (1)...(19): siRNA sense strand
gcaaugacgguccgagugu

SEQ ID NO: 842497 - RNA, 19 nt, Homo sapiens
  misc_RNA (1)...(19): siRNA sense strand
gacgagguuuccuucauca

SEQ ID NO: 842498 - RNA, 19 nt, Homo sapiens
  misc_RNA (1)...(19): siRNA sense strand
agagauacgugcagcucaa

SEQ ID NO: 842499 - RNA, 19 nt, Homo sapiens
  misc_RNA (1)...(19): siRNA sense strand
cgagguuuccuucaucaaa

SEQ ID NO: 842500 - RNA, 19 nt, Homo sapiens
  misc_RNA (1)...(19): siRNA sense strand
uggaggacguaccaucuga

SEQ ID NO: 842501 - RNA, 19 nt, Homo sapiens
  misc_RNA (1)...(19): siRNA sense strand
agacgagguuuccuucauc

SEQ ID NO: 842502 - RNA, 19 nt, Homo sapiens
  misc_RNA (1)...(19): siRNA sense strand
gagguuuccuucaucaaaa

SEQ ID NO: 842503 - RNA, 19 nt, Homo sapiens
  misc_RNA (1)...(19): siRNA sense strand
gauggauggagaaguaaug

SEQ ID NO: 842504 - RNA, 19 nt, Homo sapiens
  misc_RNA (1)...(19): siRNA sense strand
gagaaacucacggaagaca

SEQ ID NO: 842505 - RNA, 19 nt, Homo sapiens
  misc_RNA (1)...(19): siRNA sense strand
ucacggaagacagaaagaa

SEQ ID NO: 842506 - RNA, 19 nt, Homo sapiens
  misc_RNA (1)...(19): siRNA sense strand
cccaaauagcccuagaaua

SEQ ID NO: 842507 - RNA, 19 nt, Homo sapiens
  misc_RNA (1)...(19): siRNA sense strand
guaaugcccgugguuguag

SEQ ID NO: 842508 - RNA, 19 nt, Homo sapiens
  misc_RNA (1)...(19): siRNA sense strand
agaaagaagcuccgagacu

SEQ ID NO: 842509 - RNA, 19 nt, Homo sapiens
  misc_RNA (1)...(19): siRNA sense strand
ggaaucgagacgagguuuc

SEQ ID NO: 842510 - RNA, 19 nt, Homo sapiens
  misc_RNA (1)...(19): siRNA sense strand
aguaaugcccgugguugua

SEQ ID NO: 842511 - RNA, 19 nt, Homo sapiens
  misc_RNA (1)...(19): siRNA sense strand
gguccgagugugcaagaug

SEQ ID NO: 842512 - RNA, 19 nt, Homo sapiens
  misc_RNA (1)...(19): siRNA sense strand
gauacgugcagcucaagca

SEQ ID NO: 842513 - RNA, 19 nt, Homo sapiens
  misc_RNA (1)...(19): siRNA sense strand
uagaauacggccaggcaau

SEQ ID NO: 842514 - RNA, 19 nt, Homo sapiens
  misc_RNA (1)...(19): siRNA sense strand
guaaacagcucaucaaauu

SEQ ID NO: 842515 - RNA, 19 nt, Homo sapiens
  misc_RNA (1)...(19): siRNA sense strand
gugaaaugcuugcgcaaua

SEQ ID NO: 842516 - RNA, 19 nt, Homo sapiens
  misc_RNA (1)...(19): siRNA sense strand
gcaagaagcucaguuccau

SEQ ID NO: 842517 - RNA, 19 nt, Homo sapiens
  misc_RNA (1)...(19): siRNA sense strand
gcaaggaaaucgucgucaa

SEQ ID NO: 842518 - RNA, 19 nt, Homo sapiens
  misc_RNA (1)...(19): siRNA sense strand
gaaaugccaacacguauau

SEQ ID NO: 842519 - RNA, 19 nt, Homo sapiens
  misc_RNA (1)...(19): siRNA sense strand
gagaauaucuacccugaac

SEQ ID NO: 842520 - RNA, 19 nt, Homo sapiens
  misc_RNA (1)...(19): siRNA sense strand
gaaaucuccuuccgagugu

SEQ ID NO: 842521 - RNA, 19 nt, Homo sapiens
  misc_RNA (1)...(19): siRNA sense strand
ggaaaugccaacacguaua

SEQ ID NO: 842522 - RNA, 19 nt, Homo sapiens
  misc_RNA (1)...(19): siRNA sense strand
gaggacaccuugcuguaug

SEQ ID NO: 842523 - RNA, 19 nt, Homo sapiens
  misc_RNA (1)...(19): siRNA sense strand
gaccauccgcaguguauua

SEQ ID NO: 842524 - RNA, 19 nt, Homo sapiens
  misc_RNA (1)...(19): siRNA sense strand
ugaaaugcuugcgcaauaa

SEQ ID NO: 842525 - RNA, 19 nt, Homo sapiens
  misc_RNA (1)...(19): siRNA sense strand
gauccgggaaaucauauua

SEQ ID NO: 842526 - RNA, 19 nt, Homo sapiens
  misc_RNA (1)...(19): siRNA sense strand
gauuggaccugaggaagaa

SEQ ID NO: 842527 - RNA, 19 nt, Homo sapiens
  misc_RNA (1)...(19): siRNA sense strand
caaugacccugaugacugu

SEQ ID NO: 842528 - RNA, 19 nt, Homo sapiens
  misc_RNA (1)...(19): siRNA sense strand
gccaacacguauauaaaga

SEQ ID NO: 842529 - RNA, 19 nt, Homo sapiens
  misc_RNA (1)...(19): siRNA sense strand
guggaugacuucagcaaug

SEQ ID NO: 842530 - RNA, 19 nt, Homo sapiens
  misc_RNA (1)...(19): siRNA sense strand
agaagugccuggaaucuca

SEQ ID NO: 842531 - RNA, 19 nt, Homo sapiens
  misc_RNA (1)...(19): siRNA sense strand
agacagaagugccuggaau

SEQ ID NO: 842532 - RNA, 19 nt, Homo sapiens
  misc_RNA (1)...(19): siRNA sense strand
agugguaccuggagaauau

SEQ ID NO: 842533 - RNA, 19 nt, Homo sapiens
  misc_RNA (1)...(19): siRNA sense strand
ggagaugaccgacagcaau

SEQ ID NO: 842534 - RNA, 19 nt, Homo sapiens
  misc_RNA (1)...(19): siRNA sense strand
gaugcaaagucccagguau

SEQ ID NO: 842535 - RNA, 19 nt, Homo sapiens
  misc_RNA (1)...(19): siRNA sense strand
gagaggcccuucgggaaug

SEQ ID NO: 842536 - RNA, 19 nt, Homo sapiens
  misc_RNA (1)...(19): siRNA sense strand
ucauuaaccuggacaccuu

SEQ ID NO: 842537 - RNA, 19 nt, Homo sapiens
  misc_RNA (1)...(19): siRNA sense strand
aaguguggauggaugaaua

SEQ ID NO: 842538 - RNA, 19 nt, Homo sapiens
  misc_RNA (1)...(19): siRNA sense strand
caagaaaccccaaaccuaa

SEQ ID NO: 842539 - RNA, 19 nt, Homo sapiens
  misc_RNA (1)...(19): siRNA sense strand
ucacggugcugcuguucuu

SEQ ID NO: 842540 - RNA, 19 nt, Homo sapiens
  misc_RNA (1)...(19): siRNA sense strand
gaagcucaguuccauuugc

SEQ ID NO: 842541 - RNA, 19 nt, Homo sapiens
  misc_RNA (1)...(19): siRNA sense strand
ggagaggcccuucgggaau

SEQ ID NO: 842542 - RNA, 19 nt, Homo sapiens
  misc_RNA (1)...(19): siRNA sense strand
guggauggaugaauacaag

SEQ ID NO: 842543 - RNA, 19 nt, Homo sapiens
  misc_RNA (1)...(19): siRNA sense strand
caacacguauauaaagaac

SEQ ID NO: 842544 - RNA, 19 nt, Homo sapiens
  misc_RNA (1)...(19): siRNA sense strand
gaaaugcuugcgcaauaau

SEQ ID NO: 842545 - RNA, 19 nt, Homo sapiens
  misc_RNA (1)...(19): siRNA sense strand
aagaagcucaguuccauuu

SEQ ID NO: 842546 - RNA, 19 nt, Homo sapiens
  misc_RNA (1)...(19): siRNA sense strand
gagcugugccugucaguca

SEQ ID NO: 842547 - RNA, 19 nt, Homo sapiens
  misc_RNA (1)...(19): siRNA sense strand
ggucaaaggcgaagaugca

SEQ ID NO: 842548 - RNA, 19 nt, Homo sapiens
  misc_RNA (1)...(19): siRNA sense strand
gaucgacaaagcuugguuu

SEQ ID NO: 842549 - RNA, 19 nt, Homo sapiens
  misc_RNA (1)...(19): siRNA sense strand
ucaaauugcccaaggugaa

SEQ ID NO: 842550 - RNA, 19 nt, Homo sapiens
  misc_RNA (1)...(19): siRNA sense strand
caaauugcccaaggugaaa

SEQ ID NO: 842551 - RNA, 19 nt, Homo sapiens
  misc_RNA (1)...(19): siRNA sense strand
acagauauguucggugaug

SEQ ID NO: 842552 - RNA, 19 nt, Homo sapiens
  misc_RNA (1)...(19): siRNA sense strand
gagaugaccgacagcaaug

SEQ ID NO: 842553 - RNA, 19 nt, Homo sapiens
  misc_RNA (1)...(19): siRNA sense strand
gccagagcuucaaguggua

SEQ ID NO: 842554 - RNA, 19 nt, Homo sapiens
  misc_RNA (1)...(19): siRNA sense strand
ggaggacaccuugcuguau

SEQ ID NO: 842555 - RNA, 19 nt, Homo sapiens
  misc_RNA (1)...(19): siRNA sense strand
cgacagcaauggaccaaaa

SEQ ID NO: 842556 - RNA, 19 nt, Homo sapiens
  misc_RNA (1)...(19): siRNA sense strand
ggaaaucauauuaguggau

SEQ ID NO: 842557 - RNA, 19 nt, Homo sapiens
  misc_RNA (1)...(19): siRNA sense strand
ggacauggugagcucuuga

SEQ ID NO: 842558 - RNA, 19 nt, Homo sapiens
  misc_RNA (1)...(19): siRNA sense strand
ggaucacggugcugcuguu

SEQ ID NO: 842559 - RNA, 19 nt, Homo sapiens
  misc_RNA (1)...(19): siRNA sense strand
gaauaucuacccugaacuc

SEQ ID NO: 842560 - RNA, 19 nt, Homo sapiens
  misc_RNA (1)...(19): siRNA sense strand
gcagauuggaccugaggaa

SEQ ID NO: 842561 - RNA, 19 nt, Homo sapiens
  misc_RNA (1)...(19): siRNA sense strand
ucacauacacccagcagau

SEQ ID NO: 842562 - RNA, 19 nt, Homo sapiens
  misc_RNA (1)...(19): siRNA sense strand
acucaggucuuucuucaag

SEQ ID NO: 842563 - RNA, 19 nt, Homo sapiens
  misc_RNA (1)...(19): siRNA sense strand
ggucuuucuucaagucaga

SEQ ID NO: 842564 - RNA, 19 nt, Homo sapiens
  misc_RNA (1)...(19): siRNA sense strand
gcaccacucugacuuuccu

SEQ ID NO: 842565 - RNA, 19 nt, Homo sapiens
  misc_RNA (1)...(19): siRNA sense strand
cauauuaguggaugacuuc

SEQ ID NO: 842566 - RNA, 19 nt, Homo sapiens
  misc_RNA (1)...(19): siRNA sense strand
ucccaccucugccucgaua

SEQ ID NO: 842567 - RNA, 19 nt, Homo sapiens
  misc_RNA (1)...(19): siRNA sense strand
ccacaucgagcacauagca

SEQ ID NO: 842568 - RNA, 19 nt, Homo sapiens
  misc_RNA (1)...(19): siRNA sense strand
caaaggcgaagaugcaaag

SEQ ID NO: 842569 - RNA, 19 nt, Homo sapiens
  misc_RNA (1)...(19): siRNA sense strand
gggcaccacucugacuuuc

SEQ ID NO: 842570 - RNA, 19 nt, Homo sapiens
  misc_RNA (1)...(19): siRNA sense strand
uggaugacuucagcaauga

SEQ ID NO: 842571 - RNA, 19 nt, Homo sapiens
  misc_RNA (1)...(19): siRNA sense strand
cugcuguucuucuggguaa

SEQ ID NO: 842572 - RNA, 19 nt, Homo sapiens
  misc_RNA (1)...(19): siRNA sense strand
ccaacacguauauaaagaa

SEQ ID NO: 842573 - RNA, 19 nt, Homo sapiens
  misc_RNA (1)...(19): siRNA sense strand
cagcugaaguguggaugga

SEQ ID NO: 842574 - RNA, 19 nt, Homo sapiens
  misc_RNA (1)...(19): siRNA sense strand
ccaagaaaccccaaaccua

SEQ ID NO: 842575 - RNA, 19 nt, Homo sapiens
  misc_RNA (1)...(19): siRNA sense strand
uaaacagcucaucaaauug

SEQ ID NO: 842576 - RNA, 19 nt, Homo sapiens
  misc_RNA (1)...(19): siRNA sense strand
gaauguugagagcagauug

SEQ ID NO: 842577 - RNA, 19 nt, Homo sapiens
  misc_RNA (1)...(19): siRNA sense strand
aaacagcucaucaaauugc

SEQ ID NO: 842578 - RNA, 19 nt, Homo sapiens
  misc_RNA (1)...(19): siRNA sense strand
uggaugaauacaagcaaua

SEQ ID NO: 842579 - RNA, 19 nt, Homo sapiens
  misc_RNA (1)...(19): siRNA sense strand
gcaccgagaacggcaagga

SEQ ID NO: 842580 - RNA, 19 nt, Homo sapiens
  misc_RNA (1)...(19): siRNA sense strand
caucaucaccuuccacaac

SEQ ID NO: 842581 - RNA, 19 nt, Homo sapiens
  misc_RNA (1)...(19): siRNA sense strand
ugucagucaucaccuuguu

SEQ ID NO: 842582 - RNA, 19 nt, Homo sapiens
  misc_RNA (1)...(19): siRNA sense strand
caagaagcucaguuccauu

SEQ ID NO: 842583 - RNA, 19 nt, Homo sapiens
  misc_RNA (1)...(19): siRNA sense strand
ugacccugaugacuguaaa

SEQ ID NO: 842584 - RNA, 19 nt, Homo sapiens
  misc_RNA (1)...(19): siRNA sense strand
cauccgcaguguauuaaac

SEQ ID NO: 842585 - RNA, 19 nt, Homo sapiens
  misc_RNA (1)...(19): siRNA sense strand
aaaggcagaacaaccaaga

SEQ ID NO: 842586 - RNA, 19 nt, Homo sapiens
  misc_RNA (1)...(19): siRNA sense strand
ggagaauaucuacccugaa

SEQ ID NO: 842587 - RNA, 19 nt, Homo sapiens
  misc_RNA (1)...(19): siRNA sense strand
ggacagcugaaguguggau

SEQ ID NO: 842588 - RNA, 19 nt, Homo sapiens
  misc_RNA (1)...(19): siRNA sense strand
acacguauauaaagaacac

SEQ ID NO: 842589 - RNA, 19 nt, Homo sapiens
  misc_RNA (1)...(19): siRNA sense strand
ucaggucuuucuucaaguc

SEQ ID NO: 842590 - RNA, 19 nt, Homo sapiens
  misc_RNA (1)...(19): siRNA sense strand
ggggagaacuuugaaaucu

SEQ ID NO: 842591 - RNA, 19 nt, Homo sapiens
  misc_RNA (1)...(19): siRNA sense strand
gggacauggugagcucuug

SEQ ID NO: 842592 - RNA, 19 nt, Homo sapiens
  misc_RNA (1)...(19): siRNA sense strand
cagugguucuuguccuuug

SEQ ID NO: 842593 - RNA, 19 nt, Homo sapiens
  misc_RNA (1)...(19): siRNA sense strand
aaugccaacacguauauaa

SEQ ID NO: 842594 - RNA, 19 nt, Homo sapiens
  misc_RNA (1)...(19): siRNA sense strand
gaagaagcaccccuacguu

SEQ ID NO: 842595 - RNA, 19 nt, Homo sapiens
  misc_RNA (1)...(19): siRNA sense strand
ggugugcccugugaucgau

SEQ ID NO: 842596 - RNA, 19 nt, Homo sapiens
  misc_RNA (1)...(19): siRNA sense strand
gcagaacaaccaagaaacc

SEQ ID NO: 842597 - RNA, 19 nt, Homo sapiens
  misc_RNA (1)...(19): siRNA sense strand
aggcagaacaaccaagaaa

SEQ ID NO: 842598 - RNA, 19 nt, Homo sapiens
  misc_RNA (1)...(19): siRNA sense strand
ggaauguugagagcagauu

SEQ ID NO: 842599 - RNA, 19 nt, Homo sapiens
  misc_RNA (1)...(19): siRNA sense strand
gugcagaccccuaagguuu

SEQ ID NO: 842600 - RNA, 19 nt, Homo sapiens
  misc_RNA (1)...(19): siRNA sense strand
uugauuaccuggggaaaua

SEQ ID NO: 842601 - RNA, 19 nt, Homo sapiens
  misc_RNA (1)...(19): siRNA sense strand
ccacuagcaucaucaucac

SEQ ID NO: 842602 - RNA, 19 nt, Homo sapiens
  misc_RNA (1)...(19): siRNA sense strand
gcaauauccgacagagaca

SEQ ID NO: 842603 - RNA, 19 nt, Homo sapiens
  misc_RNA (1)...(19): siRNA sense strand
gaaguguggauggaugaau

SEQ ID NO: 842604 - RNA, 19 nt, Homo sapiens
  misc_RNA (1)...(19): siRNA sense strand
uguaaacagcucaucaaau

SEQ ID NO: 842605 - RNA, 19 nt, Homo sapiens
  misc_RNA (1)...(19): siRNA sense strand
cuggagggcucuucgugau

SEQ ID NO: 842606 - RNA, 19 nt, Homo sapiens
  misc_RNA (1)...(19): siRNA sense strand
caaggucaaaggcgaagau

SEQ ID NO: 842607 - RNA, 19 nt, Homo sapiens
  misc_RNA (1)...(19): siRNA sense strand
gacagaagugccuggaauc

SEQ ID NO: 842608 - RNA, 19 nt, Homo sapiens
  misc_RNA (1)...(19): siRNA sense strand
ucauuucccaugucucuug

SEQ ID NO: 842609 - RNA, 19 nt, Homo sapiens
  misc_RNA (1)...(19): siRNA sense strand
ugcccaaggugaaaugcuu

SEQ ID NO: 842610 - RNA, 19 nt, Homo sapiens
  misc_RNA (1)...(19): siRNA sense strand
ucaaaggcgaagaugcaaa

SEQ ID NO: 842611 - RNA, 19 nt, Homo sapiens
  misc_RNA (1)...(19): siRNA sense strand
caagcggacagcugaagug

SEQ ID NO: 842612 - RNA, 19 nt, Homo sapiens
  misc_RNA (1)...(19): siRNA sense strand
gcucuucgugaucgacaaa

SEQ ID NO: 842613 - RNA, 19 nt, Homo sapiens
  misc_RNA (1)...(19): siRNA sense strand
uguaugucauuucccaugu

SEQ ID NO: 842614 - RNA, 19 nt, Homo sapiens
  misc_RNA (1)...(19): siRNA sense strand
gcaaacagauaaaccauuu

SEQ ID NO: 842615 - RNA, 19 nt, Homo sapiens
  misc_RNA (1)...(19): siRNA sense strand
gcaccacucuguaccauaa

SEQ ID NO: 842616 - RNA, 19 nt, Homo sapiens
  misc_RNA (1)...(19): siRNA sense strand
guacucaccugcaacaauu

SEQ ID NO: 842617 - RNA, 19 nt, Homo sapiens
  misc_RNA (1)...(19): siRNA sense strand
gauuugagcuuguuacaga

SEQ ID NO: 842618 - RNA, 19 nt, Homo sapiens
  misc_RNA (1)...(19): siRNA sense strand
ggaaugaauugcaaacaga

SEQ ID NO: 842619 - RNA, 19 nt, Homo sapiens
  misc_RNA (1)...(19): siRNA sense strand
ggaaauaagugugaucugu

SEQ ID NO: 842620 - RNA, 19 nt, Homo sapiens
  misc_RNA (1)...(19): siRNA sense strand
ugacuuauaugcugaacua

SEQ ID NO: 842621 - RNA, 19 nt, Homo sapiens
  misc_RNA (1)...(19): siRNA sense strand
gauaagaacuauugaagac

SEQ ID NO: 842622 - RNA, 19 nt, Homo sapiens
  misc_RNA (1)...(19): siRNA sense strand
uaccacagaucuuaacuaa

SEQ ID NO: 842623 - RNA, 19 nt, Homo sapiens
  misc_RNA (1)...(19): siRNA sense strand
ucacaggaauccaucauug

SEQ ID NO: 842624 - RNA, 19 nt, Homo sapiens
  misc_RNA (1)...(19): siRNA sense strand
caucuuuggucauugcuua

SEQ ID NO: 842625 - RNA, 19 nt, Homo sapiens
  misc_RNA (1)...(19): siRNA sense strand
ggaaucaguaccuagaaua

SEQ ID NO: 842626 - RNA, 19 nt, Homo sapiens
  misc_RNA (1)...(19): siRNA sense strand
gaacaucuuuggucauugc

SEQ ID NO: 842627 - RNA, 19 nt, Homo sapiens
  misc_RNA (1)...(19): siRNA sense strand
ccucugaacuggcuacuga

SEQ ID NO: 842628 - RNA, 19 nt, Homo sapiens
  misc_RNA (1)...(19): siRNA sense strand
cagaauaccacagaucuua

SEQ ID NO: 842629 - RNA, 19 nt, Homo sapiens
  misc_RNA (1)...(19): siRNA sense strand
gaauaucaacagagucuuu

SEQ ID NO: 842630 - RNA, 19 nt, Homo sapiens
  misc_RNA (1)...(19): siRNA sense strand
aaaaucagcugaaagauga

SEQ ID NO: 842631 - RNA, 19 nt, Homo sapiens
  misc_RNA (1)...(19): siRNA sense strand
gguugcaccugacuuauau

SEQ ID NO: 842632 - RNA, 19 nt, Homo sapiens
  misc_RNA (1)...(19): siRNA sense strand
aauauuagccgacuucuug

SEQ ID NO: 842633 - RNA, 19 nt, Homo sapiens
  misc_RNA (1)...(19): siRNA sense strand
ugaaugauauggaacaucu

SEQ ID NO: 842634 - RNA, 19 nt, Homo sapiens
  misc_RNA (1)...(19): siRNA sense strand
acagaaggcacauuuaauu

SEQ ID NO: 842635 - RNA, 19 nt, Homo sapiens
  misc_RNA (1)...(19): siRNA sense strand
gcuuagcaauugcaagaaa

SEQ ID NO: 842636 - RNA, 19 nt, Homo sapiens
  misc_RNA (1)...(19): siRNA sense strand
cuacagaaggcacauuuaa

SEQ ID NO: 842637 - RNA, 19 nt, Homo sapiens
  misc_RNA (1)...(19): siRNA sense strand
gaaguugacaggugacaga

SEQ ID NO: 842638 - RNA, 19 nt, Homo sapiens
  misc_RNA (1)...(19): siRNA sense strand
gcuacuagaguguauauug

SEQ ID NO: 842639 - RNA, 19 nt, Homo sapiens
  misc_RNA (1)...(19): siRNA sense strand
cagaaggcacauuuaauuu

SEQ ID NO: 842640 - RNA, 19 nt, Homo sapiens
  misc_RNA (1)...(19): siRNA sense strand
gguuguugguagaauguua

SEQ ID NO: 842641 - RNA, 19 nt, Homo sapiens
  misc_RNA (1)...(19): siRNA sense strand
cugcaacaauugauaagaa

SEQ ID NO: 842642 - RNA, 19 nt, Homo sapiens
  misc_RNA (1)...(19): siRNA sense strand
ggaguuuucuguuccauuu

SEQ ID NO: 842643 - RNA, 19 nt, Homo sapiens
  misc_RNA (1)...(19): siRNA sense strand
gaaucaguaccuagaauau

SEQ ID NO: 842644 - RNA, 19 nt, Homo sapiens
  misc_RNA (1)...(19): siRNA sense strand
gacaggacgugggaucauu

SEQ ID NO: 842645 - RNA, 19 nt, Homo sapiens
  misc_RNA (1)...(19): siRNA sense strand
cuacuagaguguauauugu

SEQ ID NO: 842646 - RNA, 19 nt, Homo sapiens
  misc_RNA (1)...(19): siRNA sense strand
gaagaauucaugaagcaau

SEQ ID NO: 842647 - RNA, 19 nt, Homo sapiens
  misc_RNA (1)...(19): siRNA sense strand
ugaacuggcuacugagguu

SEQ ID NO: 842648 - RNA, 19 nt, Homo sapiens
  misc_RNA (1)...(19): siRNA sense strand
cuaucucucuccuuucuaa

SEQ ID NO: 842649 - RNA, 19 nt, Homo sapiens
  misc_RNA (1)...(19): siRNA sense strand
uggaacaucuuuggucauu

SEQ ID NO: 842650 - RNA, 19 nt, Homo sapiens
  misc_RNA (1)...(19): siRNA sense strand
caacagagucuuuuaaaug

SEQ ID NO: 842651 - RNA, 19 nt, Homo sapiens
  misc_RNA (1)...(19): siRNA sense strand
aggaauccaucauugcuuu

SEQ ID NO: 842652 - RNA, 19 nt, Homo sapiens
  misc_RNA (1)...(19): siRNA sense strand
cagaauaccaauguacuaa

SEQ ID NO: 842653 - RNA, 19 nt, Homo sapiens
  misc_RNA (1)...(19): siRNA sense strand
ggaauccaucauugcuuua

SEQ ID NO: 842654 - RNA, 19 nt, Homo sapiens
  misc_RNA (1)...(19): siRNA sense strand
caucauugcuuuauguacu

SEQ ID NO: 842655 - RNA, 19 nt, Homo sapiens
  misc_RNA (1)...(19): siRNA sense strand
ccuagaauaucaacagagu

SEQ ID NO: 842656 - RNA, 19 nt, Homo sapiens
  misc_RNA (1)...(19): siRNA sense strand
uacauugcaucgacauaaa

SEQ ID NO: 842657 - RNA, 19 nt, Homo sapiens
  misc_RNA (1)...(19): siRNA sense strand
gaaaaucagcugaaagaug

SEQ ID NO: 842658 - RNA, 19 nt, Homo sapiens
  misc_RNA (1)...(19): siRNA sense strand
uuaaacuucugcagauuuc

SEQ ID NO: 842659 - RNA, 19 nt, Homo sapiens
  misc_RNA (1)...(19): siRNA sense strand
gggaucauuugcauaucuu

SEQ ID NO: 842660 - RNA, 19 nt, Homo sapiens
  misc_RNA (1)...(19): siRNA sense strand
ucucucuccuuucuaaauu

SEQ ID NO: 842661 - RNA, 19 nt, Homo sapiens
  misc_RNA (1)...(19): siRNA sense strand
ugagcuuguuacagauuua

SEQ ID NO: 842662 - RNA, 19 nt, Homo sapiens
  misc_RNA (1)...(19): siRNA sense strand
ucucgauaauucuggauuu

SEQ ID NO: 842663 - RNA, 19 nt, Homo sapiens
  misc_RNA (1)...(19): siRNA sense strand
ugagaaacacggagaggaa

SEQ ID NO: 842664 - RNA, 19 nt, Homo sapiens
  misc_RNA (1)...(19): siRNA sense strand
cguggaagcugaaaagaaa

SEQ ID NO: 842665 - RNA, 19 nt, Homo sapiens
  misc_RNA (1)...(19): siRNA sense strand
aaagacagaauaccacaga

SEQ ID NO: 842666 - RNA, 19 nt, Homo sapiens
  misc_RNA (1)...(19): siRNA sense strand
uauauggaaucaguaccua

SEQ ID NO: 842667 - RNA, 19 nt, Homo sapiens
  misc_RNA (1)...(19): siRNA sense strand
ucagaauaccaauguacua

SEQ ID NO: 842668 - RNA, 19 nt, Homo sapiens
  misc_RNA (1)...(19): siRNA sense strand
aaauaagugugaucugucu

SEQ ID NO: 842669 - RNA, 19 nt, Homo sapiens
  misc_RNA (1)...(19): siRNA sense strand
ucgaagaauucaugaagca

SEQ ID NO: 842670 - RNA, 19 nt, Homo sapiens
  misc_RNA (1)...(19): siRNA sense strand
ggguuuaccacaaucauau

SEQ ID NO: 842671 - RNA, 19 nt, Homo sapiens
  misc_RNA (1)...(19): siRNA sense strand
ggaacaucuuuggucauug

SEQ ID NO: 842672 - RNA, 19 nt, Homo sapiens
  misc_RNA (1)...(19): siRNA sense strand
gaacuacagaaggcacauu

SEQ ID NO: 842673 - RNA, 19 nt, Homo sapiens
  misc_RNA (1)...(19): siRNA sense strand
gaacagguaaaacacagua

SEQ ID NO: 842674 - RNA, 19 nt, Homo sapiens
  misc_RNA (1)...(19): siRNA sense strand
gacgugggaucauuugcau

SEQ ID NO: 842675 - RNA, 19 nt, Homo sapiens
  misc_RNA (1)...(19): siRNA sense strand
gaaugaauugcaaacagau

SEQ ID NO: 842676 - RNA, 19 nt, Homo sapiens
  misc_RNA (1)...(19): siRNA sense strand
caagggugauuugaauuac

SEQ ID NO: 842677 - RNA, 19 nt, Homo sapiens
  misc_RNA (1)...(19): siRNA sense strand
cgauaauucuggauuugag

SEQ ID NO: 842678 - RNA, 19 nt, Homo sapiens
  misc_RNA (1)...(19): siRNA sense strand
gaccuaaaaccuuucauuu

SEQ ID NO: 842679 - RNA, 19 nt, Homo sapiens
  misc_RNA (1)...(19): siRNA sense strand
ggacgugggaucauuugca

SEQ ID NO: 842680 - RNA, 19 nt, Homo sapiens
  misc_RNA (1)...(19): siRNA sense strand
ucaccugcaacaauugaua

SEQ ID NO: 842681 - RNA, 19 nt, Homo sapiens
  misc_RNA (1)...(19): siRNA sense strand
agaguccaccaaucgauua

SEQ ID NO: 842682 - RNA, 19 nt, Homo sapiens
  misc_RNA (1)...(19): siRNA sense strand
ccaccaaucgauuacuuug

SEQ ID NO: 842683 - RNA, 19 nt, Homo sapiens
  misc_RNA (1)...(19): siRNA sense strand
gauuugaauuacaggaagu

SEQ ID NO: 842684 - RNA, 19 nt, Homo sapiens
  misc_RNA (1)...(19): siRNA sense strand
gacagaauaccacagaucu

SEQ ID NO: 842685 - RNA, 19 nt, Homo sapiens
  misc_RNA (1)...(19): siRNA sense strand
uugguuaauugaacaggua

SEQ ID NO: 842686 - RNA, 19 nt, Homo sapiens
  misc_RNA (1)...(19): siRNA sense strand
gauacauugcaucgacaua

SEQ ID NO: 842687 - RNA, 19 nt, Homo sapiens
  misc_RNA (1)...(19): siRNA sense strand
uggaagaccuaaaaccuuu

SEQ ID NO: 842688 - RNA, 19 nt, Homo sapiens
  misc_RNA (1)...(19): siRNA sense strand
ccaaucgauuacuuugaug

SEQ ID NO: 842689 - RNA, 19 nt, Homo sapiens
  misc_RNA (1)...(19): siRNA sense strand
guccaccaaucgauuacuu

SEQ ID NO: 842690 - RNA, 19 nt, Homo sapiens
  misc_RNA (1)...(19): siRNA sense strand
gacugggaagaguauauua

SEQ ID NO: 842691 - RNA, 19 nt, Homo sapiens
  misc_RNA (1)...(19): siRNA sense strand
cggaaugaauugcaaacag

SEQ ID NO: 842692 - RNA, 19 nt, Homo sapiens
  misc_RNA (1)...(19): siRNA sense strand
gggcugacugggaagagua

SEQ ID NO: 842693 - RNA, 19 nt, Homo sapiens
  misc_RNA (1)...(19): siRNA sense strand
uuccaugguuuguuucuga

SEQ ID NO: 842694 - RNA, 19 nt, Homo sapiens
  misc_RNA (1)...(19): siRNA sense strand
ggaaggcguggaagcugaa

SEQ ID NO: 842695 - RNA, 19 nt, Homo sapiens
  misc_RNA (1)...(19): siRNA sense strand
gagcuuguuacagauuuaa

SEQ ID NO: 842696 - RNA, 19 nt, Homo sapiens
  misc_RNA (1)...(19): siRNA sense strand
uggaaucaguaccuagaau

SEQ ID NO: 842697 - RNA, 19 nt, Homo sapiens
  misc_RNA (1)...(19): siRNA sense strand
guacgaugguccccuuuga

SEQ ID NO: 842698 - RNA, 19 nt, Homo sapiens
  misc_RNA (1)...(19): siRNA sense strand
guugacaggugacagaaaa

SEQ ID NO: 842699 - RNA, 19 nt, Homo sapiens
  misc_RNA (1)...(19): siRNA sense strand
uuuggacucugccucauga

SEQ ID NO: 842700 - RNA, 19 nt, Homo sapiens
  misc_RNA (1)...(19): siRNA sense strand
gguuuaccacaaucauaua

SEQ ID NO: 842701 - RNA, 19 nt, Homo sapiens
  misc_RNA (1)...(19): siRNA sense strand
gaauccaucauugcuuuau

SEQ ID NO: 842702 - RNA, 19 nt, Homo sapiens
  misc_RNA (1)...(19): siRNA sense strand
guaccuagaauaucaacag

SEQ ID NO: 842703 - RNA, 19 nt, Homo sapiens
  misc_RNA (1)...(19): siRNA sense strand
agaauaccacagaucuuaa

SEQ ID NO: 842704 - RNA, 19 nt, Homo sapiens
  misc_RNA (1)...(19): siRNA sense strand
gaauaccacagaucuuaac

SEQ ID NO: 842705 - RNA, 19 nt, Homo sapiens
  misc_RNA (1)...(19): siRNA sense strand
ccucaugaguacugugcaa

SEQ ID NO: 842706 - RNA, 19 nt, Homo sapiens
  misc_RNA (1)...(19): siRNA sense strand
uauugaagaccuagaugaa

SEQ ID NO: 842707 - RNA, 19 nt, Homo sapiens
  misc_RNA (1)...(19): siRNA sense strand
accaaucgauuacuuugau

SEQ ID NO: 842708 - RNA, 19 nt, Homo sapiens
  misc_RNA (1)...(19): siRNA sense strand
aucaguaccuagaauauca

SEQ ID NO: 842709 - RNA, 19 nt, Homo sapiens
  misc_RNA (1)...(19): siRNA sense strand
cgugggaucauuugcauau

SEQ ID NO: 842710 - RNA, 19 nt, Homo sapiens
  misc_RNA (1)...(19): siRNA sense strand
gaacuauugaagaccuaga

SEQ ID NO: 842711 - RNA, 19 nt, Homo sapiens
  misc_RNA (1)...(19): siRNA sense strand
auacauugcaucgacauaa

SEQ ID NO: 842712 - RNA, 19 nt, Homo sapiens
  misc_RNA (1)...(19): siRNA sense strand
uaucgaagaauucaugaag

SEQ ID NO: 842713 - RNA, 19 nt, Homo sapiens
  misc_RNA (1)...(19): siRNA sense strand
uaccuagaauaucaacaga

SEQ ID NO: 842714 - RNA, 19 nt, Homo sapiens
  misc_RNA (1)...(19): siRNA sense strand
gcagugaggugcuagauga

SEQ ID NO: 842715 - RNA, 19 nt, Homo sapiens
  misc_RNA (1)...(19): siRNA sense strand
ucaaggaccugaucaaagu

SEQ ID NO: 842716 - RNA, 19 nt, Homo sapiens
  misc_RNA (1)...(19): siRNA sense strand
gcaccgcaauggcuccuuu

SEQ ID NO: 842717 - RNA, 19 nt, Homo sapiens
  misc_RNA (1)...(19): siRNA sense strand
gggaugugcugcuagaguu

SEQ ID NO: 842718 - RNA, 19 nt, Homo sapiens
  misc_RNA (1)...(19): siRNA sense strand
gaugagcucuaccgugugu

SEQ ID NO: 842719 - RNA, 19 nt, Homo sapiens
  misc_RNA (1)...(19): siRNA sense strand
gcagagaagaagcuacuga

SEQ ID NO: 842720 - RNA, 19 nt, Homo sapiens
  misc_RNA (1)...(19): siRNA sense strand
ugacggcacuuaccuuugg

SEQ ID NO: 842721 - RNA, 19 nt, Homo sapiens
  misc_RNA (1)...(19): siRNA sense strand
ccacguguuugaucacuuc

SEQ ID NO: 842722 - RNA, 19 nt, Homo sapiens
  misc_RNA (1)...(19): siRNA sense strand
uggcucaucucuucauaga

SEQ ID NO: 842723 - RNA, 19 nt, Homo sapiens
  misc_RNA (1)...(19): siRNA sense strand
gaucaaaguggccaucaag

SEQ ID NO: 842724 - RNA, 19 nt, Homo sapiens
  misc_RNA (1)...(19): siRNA sense strand
ugacuucacucagcaccuu

SEQ ID NO: 842725 - RNA, 19 nt, Homo sapiens
  misc_RNA (1)...(19): siRNA sense strand
caugacggcacuuaccuuu

SEQ ID NO: 842726 - RNA, 19 nt, Homo sapiens
  misc_RNA (1)...(19): siRNA sense strand
gcaagcagagaagaagcua

SEQ ID NO: 842727 - RNA, 19 nt, Homo sapiens
  misc_RNA (1)...(19): siRNA sense strand
ccgcauccgccacguguuu

SEQ ID NO: 842728 - RNA, 19 nt, Homo sapiens
  misc_RNA (1)...(19): siRNA sense strand
gccgggaugugcugcuaga

SEQ ID NO: 842729 - RNA, 19 nt, Homo sapiens
  misc_RNA (1)...(19): siRNA sense strand
cuucgaggcugcuguucug

SEQ ID NO: 842730 - RNA, 19 nt, Homo sapiens
  misc_RNA (1)...(19): siRNA sense strand
uagaugagacaagcaguga

SEQ ID NO: 842731 - RNA, 19 nt, Homo sapiens
  misc_RNA (1)...(19): siRNA sense strand
ucaaaguggccaucaaggu

SEQ ID NO: 842732 - RNA, 19 nt, Homo sapiens
  misc_RNA (1)...(19): siRNA sense strand
gugccgggaugugcugcua

SEQ ID NO: 842733 - RNA, 19 nt, Homo sapiens
  misc_RNA (1)...(19): siRNA sense strand
uguggcucaucucuucaua

SEQ ID NO: 842734 - RNA, 19 nt, Homo sapiens
  misc_RNA (1)...(19): siRNA sense strand
ggaugugcugcuagaguug

SEQ ID NO: 842735 - RNA, 19 nt, Homo sapiens
  misc_RNA (1)...(19): siRNA sense strand
ccaccucacgcccaaguca

SEQ ID NO: 842736 - RNA, 19 nt, Homo sapiens
  misc_RNA (1)...(19): siRNA sense strand
uguuugaucacuucucuga

SEQ ID NO: 842737 - RNA, 19 nt, Homo sapiens
  misc_RNA (1)...(19): siRNA sense strand
gaaauucgaugaccaagga

SEQ ID NO: 842738 - RNA, 19 nt, Homo sapiens
  misc_RNA (1)...(19): siRNA sense strand
ccaagaagauuguguuuga

SEQ ID NO: 842739 - RNA, 19 nt, Homo sapiens
  misc_RNA (1)...(19): siRNA sense strand
ggagggaguuugagaugaa

SEQ ID NO: 842740 - RNA, 19 nt, Homo sapiens
  misc_RNA (1)...(19): siRNA sense strand
gcaaagaccaagaagauug

SEQ ID NO: 842741 - RNA, 19 nt, Homo sapiens
  misc_RNA (1)...(19): siRNA sense strand
agacucagauccagaaauu

SEQ ID NO: 842742 - RNA, 19 nt, Homo sapiens
  misc_RNA (1)...(19): siRNA sense strand
gaaggaggcccaaguugca

SEQ ID NO: 842743 - RNA, 19 nt, Homo sapiens
  misc_RNA (1)...(19): siRNA sense strand
gcacaacccggacggaagu

SEQ ID NO: 842744 - RNA, 19 nt, Homo sapiens
  misc_RNA (1)...(19): siRNA sense strand
gaccaagaagauuguguuu

SEQ ID NO: 842745 - RNA, 19 nt, Homo sapiens
  misc_RNA (1)...(19): siRNA sense strand
caaagaccaagaagauugu

SEQ ID NO: 842746 - RNA, 19 nt, Homo sapiens
  misc_RNA (1)...(19): siRNA sense strand
ccagaaggaggcccaaguu

SEQ ID NO: 842747 - RNA, 19 nt, Homo sapiens
  misc_RNA (1)...(19): siRNA sense strand
gaagauuguguuugaggau

SEQ ID NO: 842748 - RNA, 19 nt, Homo sapiens
  misc_RNA (1)...(19): siRNA sense strand
ucaagacucagauccagaa

SEQ ID NO: 842749 - RNA, 19 nt, Homo sapiens
  misc_RNA (1)...(19): siRNA sense strand
ggaccaguacggagaguuc

SEQ ID NO: 842750 - RNA, 19 nt, Homo sapiens
  misc_RNA (1)...(19): siRNA sense strand
ccagaaauucgaugaccaa

SEQ ID NO: 842751 - RNA, 19 nt, Homo sapiens
  misc_RNA (1)...(19): siRNA sense strand
aggcaaagaccaagaagau

SEQ ID NO: 842752 - RNA, 19 nt, Homo sapiens
  misc_RNA (1)...(19): siRNA sense strand
caagaagauuguguuugag

SEQ ID NO: 842753 - RNA, 19 nt, Homo sapiens
  misc_RNA (1)...(19): siRNA sense strand
ccgacuaugagcuuaagua

SEQ ID NO: 842754 - RNA, 19 nt, Homo sapiens
  misc_RNA (1)...(19): siRNA sense strand
ggcaaagaccaagaagauu

SEQ ID NO: 842755 - RNA, 19 nt, Homo sapiens
  misc_RNA (1)...(19): siRNA sense strand
cagaaggaggcccaaguug

SEQ ID NO: 842756 - RNA, 19 nt, Homo sapiens
  misc_RNA (1)...(19): siRNA sense strand
agauuguguuugaggauga

SEQ ID NO: 842757 - RNA, 19 nt, Homo sapiens
  misc_RNA (1)...(19): siRNA sense strand
gggcuccguguacuucuaa

SEQ ID NO: 842758 - RNA, 19 nt, Homo sapiens
  misc_RNA (1)...(19): siRNA sense strand
acaaggcaaagaccaagaa

SEQ ID NO: 842759 - RNA, 19 nt, Homo sapiens
  misc_RNA (1)...(19): siRNA sense strand
uggagggaguuugagauga

SEQ ID NO: 842760 - RNA, 19 nt, Homo sapiens
  misc_RNA (1)...(19): siRNA sense strand
gugcccgacuaugagcuua

SEQ ID NO: 842761 - RNA, 19 nt, Homo sapiens
  misc_RNA (1)...(19): siRNA sense strand
agaccaagaagauuguguu

SEQ ID NO: 842762 - RNA, 19 nt, Homo sapiens
  misc_RNA (1)...(19): siRNA sense strand
ggaaaccccugagcugcuu

SEQ ID NO: 842763 - RNA, 19 nt, Homo sapiens
  misc_RNA (1)...(19): siRNA sense strand
gccgcuaugucgcaguguu

SEQ ID NO: 842764 - RNA, 19 nt, Homo sapiens
  misc_RNA (1)...(19): siRNA sense strand
aguuugagaugaagcgaau

SEQ ID NO: 842765 - RNA, 19 nt, Homo sapiens
  misc_RNA (1)...(19): siRNA sense strand
ggguuuggagggaguuuga

SEQ ID NO: 842766 - RNA, 19 nt, Homo sapiens
  misc_RNA (1)...(19): siRNA sense strand
acccagugcccgacuauga

SEQ ID NO: 842767 - RNA, 19 nt, Homo sapiens
  misc_RNA (1)...(19): siRNA sense strand
gagggaguuugagaugaag

SEQ ID NO: 842768 - RNA, 19 nt, Homo sapiens
  misc_RNA (1)...(19): siRNA sense strand
cuuaaguacccgccaguga

SEQ ID NO: 842769 - RNA, 19 nt, Homo sapiens
  misc_RNA (1)...(19): siRNA sense strand
ggacauaacagaagcaaua

SEQ ID NO: 842770 - RNA, 19 nt, Homo sapiens
  misc_RNA (1)...(19): siRNA sense strand
gcaauagagacuaccauua

SEQ ID NO: 842771 - RNA, 19 nt, Homo sapiens
  misc_RNA (1)...(19): siRNA sense strand
gggagaggaugaauauuau

SEQ ID NO: 842772 - RNA, 19 nt, Homo sapiens
  misc_RNA (1)...(19): siRNA sense strand
cagguggucuauuauuaua

SEQ ID NO: 842773 - RNA, 19 nt, Homo sapiens
  misc_RNA (1)...(19): siRNA sense strand
auuaucagguggucuauua

SEQ ID NO: 842774 - RNA, 19 nt, Homo sapiens
  misc_RNA (1)...(19): siRNA sense strand
gugcagauuucaccauuga

SEQ ID NO: 842775 - RNA, 19 nt, Homo sapiens
  misc_RNA (1)...(19): siRNA sense strand
ugggagaggaugaauauua

SEQ ID NO: 842776 - RNA, 19 nt, Homo sapiens
  misc_RNA (1)...(19): siRNA sense strand
caccauugauuacuccaua

SEQ ID NO: 842777 - RNA, 19 nt, Homo sapiens
  misc_RNA (1)...(19): siRNA sense strand
caauagagacuaccauuag

SEQ ID NO: 842778 - RNA, 19 nt, Homo sapiens
  misc_RNA (1)...(19): siRNA sense strand
gcagauuucaccauugauu

SEQ ID NO: 842779 - RNA, 19 nt, Homo sapiens
  misc_RNA (1)...(19): siRNA sense strand
gaaccuaguccagaucuga

SEQ ID NO: 842780 - RNA, 19 nt, Homo sapiens
  misc_RNA (1)...(19): siRNA sense strand
acaagaauaugaggaugaa

SEQ ID NO: 842781 - RNA, 19 nt, Homo sapiens
  misc_RNA (1)...(19): siRNA sense strand
gauaaggacauaacagaag

SEQ ID NO: 842782 - RNA, 19 nt, Homo sapiens
  misc_RNA (1)...(19): siRNA sense strand
ggauaaggacauaacagaa

SEQ ID NO: 842783 - RNA, 19 nt, Homo sapiens
  misc_RNA (1)...(19): siRNA sense strand
cagauuucaccauugauua

SEQ ID NO: 842784 - RNA, 19 nt, Homo sapiens
  misc_RNA (1)...(19): siRNA sense strand
gagaggaugaauauuauca

SEQ ID NO: 842785 - RNA, 19 nt, Homo sapiens
  misc_RNA (1)...(19): siRNA sense strand
gacaagaauaugaggauga

SEQ ID NO: 842786 - RNA, 19 nt, Homo sapiens
  misc_RNA (1)...(19): siRNA sense strand
gguggucuauuauuauaca

SEQ ID NO: 842787 - RNA, 19 nt, Homo sapiens
  misc_RNA (1)...(19): siRNA sense strand
ugaacagguuggauaagga

SEQ ID NO: 842788 - RNA, 19 nt, Homo sapiens
  misc_RNA (1)...(19): siRNA sense strand
cagguuggauaaggacaua

SEQ ID NO: 842789 - RNA, 19 nt, Homo sapiens
  misc_RNA (1)...(19): siRNA sense strand
ugacuuuagugcagauuuc

SEQ ID NO: 842790 - RNA, 19 nt, Homo sapiens
  misc_RNA (1)...(19): siRNA sense strand
aucagguggucuauuauua

SEQ ID NO: 842791 - RNA, 19 nt, Homo sapiens
  misc_RNA (1)...(19): siRNA sense strand
auaugaggaugaagaaaga

SEQ ID NO: 842792 - RNA, 19 nt, Homo sapiens
  misc_RNA (1)...(19): siRNA sense strand
cagaagcaauagagacuac

SEQ ID NO: 842793 - RNA, 19 nt, Homo sapiens
  misc_RNA (1)...(19): siRNA sense strand
uagugcagauuucaccauu

SEQ ID NO: 842794 - RNA, 19 nt, Homo sapiens
  misc_RNA (1)...(19): siRNA sense strand
acgaugccguguccaguuu

SEQ ID NO: 842795 - RNA, 19 nt, Homo sapiens
  misc_RNA (1)...(19): siRNA sense strand
gaauaugaggaugaagaaa

SEQ ID NO: 842796 - RNA, 19 nt, Homo sapiens
  misc_RNA (1)...(19): siRNA sense strand
uaucagguggucuauuauu

SEQ ID NO: 842797 - RNA, 19 nt, Homo sapiens
  misc_RNA (1)...(19): siRNA sense strand
aagaauaugaggaugaaga

SEQ ID NO: 842798 - RNA, 19 nt, Homo sapiens
  misc_RNA (1)...(19): siRNA sense strand
caucuuugcugugccacuu

SEQ ID NO: 842799 - RNA, 19 nt, Homo sapiens
  misc_RNA (1)...(19): siRNA sense strand
ucagguggucuauuauuau

SEQ ID NO: 842800 - RNA, 19 nt, Homo sapiens
  misc_RNA (1)...(19): siRNA sense strand
aauauuaucagguggucua

SEQ ID NO: 842801 - RNA, 19 nt, Homo sapiens
  misc_RNA (1)...(19): siRNA sense strand
gaccauccgaagccuguaa

SEQ ID NO: 842802 - RNA, 19 nt, Homo sapiens
  misc_RNA (1)...(19): siRNA sense strand
uaccauuagucuugaaaca

SEQ ID NO: 842803 - RNA, 19 nt, Homo sapiens
  misc_RNA (1)...(19): siRNA sense strand
aggacaggcugaacagguu

SEQ ID NO: 842804 - RNA, 19 nt, Homo sapiens
  misc_RNA (1)...(19): siRNA sense strand
ccaguuaugaugacuuuag

SEQ ID NO: 842805 - RNA, 19 nt, Homo sapiens
  misc_RNA (1)...(19): siRNA sense strand
ccacuuauccugggacaag

SEQ ID NO: 842806 - RNA, 19 nt, Homo sapiens
  misc_RNA (1)...(19): siRNA sense strand
cauaacagaagcaauagag

SEQ ID NO: 842807 - RNA, 19 nt, Homo sapiens
  misc_RNA (1)...(19): siRNA sense strand
cgaagccuguaacugugaa

SEQ ID NO: 842808 - RNA, 19 nt, Homo sapiens
  misc_RNA (1)...(19): siRNA sense strand
agaauaugaggaugaagaa

SEQ ID NO: 842809 - RNA, 19 nt, Homo sapiens
  misc_RNA (1)...(19): siRNA sense strand
uggauaaggacauaacaga

SEQ ID NO: 842810 - RNA, 19 nt, Homo sapiens
  misc_RNA (1)...(19): siRNA sense strand
aggcugaacagguuggaua

SEQ ID NO: 842811 - RNA, 19 nt, Homo sapiens
  misc_RNA (1)...(19): siRNA sense strand
gggacaagaauaugaggau

SEQ ID NO: 842812 - RNA, 19 nt, Homo sapiens
  misc_RNA (1)...(19): siRNA sense strand
ccauugauuacuccauauu

SEQ ID NO: 842813 - RNA, 19 nt, Homo sapiens
  misc_RNA (1)...(19): siRNA sense strand
uauccugggacaagaauau

SEQ ID NO: 842814 - RNA, 19 nt, Homo sapiens
  misc_RNA (1)...(19): siRNA sense strand
ggagaggaugaauauuauc

SEQ ID NO: 842815 - RNA, 19 nt, Homo sapiens
  misc_RNA (1)...(19): siRNA sense strand
ggggauguauuucauguag

SEQ ID NO: 842816 - RNA, 19 nt, Homo sapiens
  misc_RNA (1)...(19): siRNA sense strand
caguuaugaugacuuuagu

SEQ ID NO: 842817 - RNA, 19 nt, Homo sapiens
  misc_RNA (1)...(19): siRNA sense strand
aauaugaggaugaagaaag

SEQ ID NO: 842818 - RNA, 19 nt, Homo sapiens
  misc_RNA (1)...(19): siRNA sense strand
gacugggagaggaugaaua

SEQ ID NO: 842819 - RNA, 19 nt, Homo sapiens
  misc_RNA (1)...(19): siRNA sense strand
ggaaccuaguccagaucug

SEQ ID NO: 842820 - RNA, 19 nt, Homo sapiens
  misc_RNA (1)...(19): siRNA sense strand
gaagcaauagagacuacca

SEQ ID NO: 842821 - RNA, 19 nt, Homo sapiens
  misc_RNA (1)...(19): siRNA sense strand
ggcugaacagguuggauaa

SEQ ID NO: 842822 - RNA, 19 nt, Homo sapiens
  misc_RNA (1)...(19): siRNA sense strand
acugggagaggaugaauau

SEQ ID NO: 842823 - RNA, 19 nt, Homo sapiens
  misc_RNA (1)...(19): siRNA sense strand
cugaacagguuggauaagg

SEQ ID NO: 842824 - RNA, 19 nt, Homo sapiens
  misc_RNA (1)...(19): siRNA sense strand
ccaguaacaacggaaccua

SEQ ID NO: 842825 - RNA, 19 nt, Homo sapiens
  misc_RNA (1)...(19): siRNA sense strand
gcucagaaauggaauauga

SEQ ID NO: 842826 - RNA, 19 nt, Homo sapiens
  misc_RNA (1)...(19): siRNA sense strand
caacacaccucgcccuaga

SEQ ID NO: 842827 - RNA, 19 nt, Homo sapiens
  misc_RNA (1)...(19): siRNA sense strand
gauagugacucccaugaau

SEQ ID NO: 842828 - RNA, 19 nt, Homo sapiens
  misc_RNA (1)...(19): siRNA sense strand
gagcaagcaguuugacuua

SEQ ID NO: 842829 - RNA, 19 nt, Homo sapiens
  misc_RNA (1)...(19): siRNA sense strand
gggagaagccaaugguaua

SEQ ID NO: 842830 - RNA, 19 nt, Homo sapiens
  misc_RNA (1)...(19): siRNA sense strand
ugacuuaccagccuucaua

SEQ ID NO: 842831 - RNA, 19 nt, Homo sapiens
  misc_RNA (1)...(19): siRNA sense strand
gaauugcaucuuccuauaa

SEQ ID NO: 842832 - RNA, 19 nt, Homo sapiens
  misc_RNA (1)...(19): siRNA sense strand
uaagggaugguaauacuuu

SEQ ID NO: 842833 - RNA, 19 nt, Homo sapiens
  misc_RNA (1)...(19): siRNA sense strand
gcagaaggccacugucuag

SEQ ID NO: 842834 - RNA, 19 nt, Homo sapiens
  misc_RNA (1)...(19): siRNA sense strand
gaaggccacugucuagaac

SEQ ID NO: 842835 - RNA, 19 nt, Homo sapiens
  misc_RNA (1)...(19): siRNA sense strand
aaucuucacuugcucagaa

SEQ ID NO: 842836 - RNA, 19 nt, Homo sapiens
  misc_RNA (1)...(19): siRNA sense strand
gagaagccaaugguauaua

SEQ ID NO: 842837 - RNA, 19 nt, Homo sapiens
  misc_RNA (1)...(19): siRNA sense strand
ggagcaagcaguuugacuu

SEQ ID NO: 842838 - RNA, 19 nt, Homo sapiens
  misc_RNA (1)...(19): siRNA sense strand
ccaaaucuucuacguucua

SEQ ID NO: 842839 - RNA, 19 nt, Homo sapiens
  misc_RNA (1)...(19): siRNA sense strand
guaauacuuuggaaaugca

SEQ ID NO: 842840 - RNA, 19 nt, Homo sapiens
  misc_RNA (1)...(19): siRNA sense strand
uauaagggaugguaauacu

SEQ ID NO: 842841 - RNA, 19 nt, Homo sapiens
  misc_RNA (1)...(19): siRNA sense strand
gguaauacuuuggaaaugc

SEQ ID NO: 842842 - RNA, 19 nt, Homo sapiens
  misc_RNA (1)...(19): siRNA sense strand
ggagaagccaaugguauau

SEQ ID NO: 842843 - RNA, 19 nt, Homo sapiens
  misc_RNA (1)...(19): siRNA sense strand
ugaugcagaugaugaagau

SEQ ID NO: 842844 - RNA, 19 nt, Homo sapiens
  misc_RNA (1)...(19): siRNA sense strand
caaaucuucuacguucuau

SEQ ID NO: 842845 - RNA, 19 nt, Homo sapiens
  misc_RNA (1)...(19): siRNA sense strand
ucaagucaaugaaucugau

SEQ ID NO: 842846 - RNA, 19 nt, Homo sapiens
  misc_RNA (1)...(19): siRNA sense strand
uaucucaagucaaugaauc

SEQ ID NO: 842847 - RNA, 19 nt, Homo sapiens
  misc_RNA (1)...(19): siRNA sense strand
ggaugguaauacuuuggaa

SEQ ID NO: 842848 - RNA, 19 nt, Homo sapiens
  misc_RNA (1)...(19): siRNA sense strand
gcaagcaguuugacuuacc

SEQ ID NO: 842849 - RNA, 19 nt, Homo sapiens
  misc_RNA (1)...(19): siRNA sense strand
ggcaucacaugguucuaga

SEQ ID NO: 842850 - RNA, 19 nt, Homo sapiens
  misc_RNA (1)...(19): siRNA sense strand
ccuagaaacccaaguaucu

SEQ ID NO: 842851 - RNA, 19 nt, Homo sapiens
  misc_RNA (1)...(19): siRNA sense strand
gaugguaauacuuuggaaa

SEQ ID NO: 842852 - RNA, 19 nt, Homo sapiens
  misc_RNA (1)...(19): siRNA sense strand
ccuauaagggaugguaaua

SEQ ID NO: 842853 - RNA, 19 nt, Homo sapiens
  misc_RNA (1)...(19): siRNA sense strand
agaagccaaugguauauac

SEQ ID NO: 842854 - RNA, 19 nt, Homo sapiens
  misc_RNA (1)...(19): siRNA sense strand
gaaguggagaggcucaaca

SEQ ID NO: 842855 - RNA, 19 nt, Homo sapiens
  misc_RNA (1)...(19): siRNA sense strand
gcagaugaugaagauaauu

SEQ ID NO: 842856 - RNA, 19 nt, Homo sapiens
  misc_RNA (1)...(19): siRNA sense strand
agaaggccacugucuagaa

SEQ ID NO: 842857 - RNA, 19 nt, Homo sapiens
  misc_RNA (1)...(19): siRNA sense strand
cuucauauggucaagguuu

SEQ ID NO: 842858 - RNA, 19 nt, Homo sapiens
  misc_RNA (1)...(19): siRNA sense strand
caugggaggucuucuucag

SEQ ID NO: 842859 - RNA, 19 nt, Homo sapiens
  misc_RNA (1)...(19): siRNA sense strand
ccaaugguauauacuucca

SEQ ID NO: 842860 - RNA, 19 nt, Homo sapiens
  misc_RNA (1)...(19): siRNA sense strand
uauagaaacagcccagcaa

SEQ ID NO: 842861 - RNA, 19 nt, Homo sapiens
  misc_RNA (1)...(19): siRNA sense strand
acacaccucgcccuagaaa

SEQ ID NO: 842862 - RNA, 19 nt, Homo sapiens
  misc_RNA (1)...(19): siRNA sense strand
augcagaugaugaagauaa

SEQ ID NO: 842863 - RNA, 19 nt, Homo sapiens
  misc_RNA (1)...(19): siRNA sense strand
aaucuucuacguucuauag

SEQ ID NO: 842864 - RNA, 19 nt, Homo sapiens
  misc_RNA (1)...(19): siRNA sense strand
caagcaguuugacuuacca

SEQ ID NO: 842865 - RNA, 19 nt, Homo sapiens
  misc_RNA (1)...(19): siRNA sense strand
uccaaauuaucucaaguca

SEQ ID NO: 842866 - RNA, 19 nt, Homo sapiens
  misc_RNA (1)...(19): siRNA sense strand
aauugcaucuuccuauaag

SEQ ID NO: 842867 - RNA, 19 nt, Homo sapiens
  misc_RNA (1)...(19): siRNA sense strand
ccacucagcaugcccaacu

SEQ ID NO: 842868 - RNA, 19 nt, Homo sapiens
  misc_RNA (1)...(19): siRNA sense strand
ucagaaauggaauaugaca

SEQ ID NO: 842869 - RNA, 19 nt, Homo sapiens
  misc_RNA (1)...(19): siRNA sense strand
gggaugguaauacuuugga

SEQ ID NO: 842870 - RNA, 19 nt, Homo sapiens
  misc_RNA (1)...(19): siRNA sense strand
ugcagaugaugaagauaau

SEQ ID NO: 842871 - RNA, 19 nt, Homo sapiens
  misc_RNA (1)...(19): siRNA sense strand
uugagaaccagcucccuaa

SEQ ID NO: 842872 - RNA, 19 nt, Homo sapiens
  misc_RNA (1)...(19): siRNA sense strand
gaccagggagucgccuaaa

SEQ ID NO: 842873 - RNA, 19 nt, Homo sapiens
  misc_RNA (1)...(19): siRNA sense strand
ugguaauacuuuggaaaug

SEQ ID NO: 842874 - RNA, 19 nt, Homo sapiens
  misc_RNA (1)...(19): siRNA sense strand
gcagccgauugggcagauu

SEQ ID NO: 842875 - RNA, 19 nt, Homo sapiens
  misc_RNA (1)...(19): siRNA sense strand
ccaaauuaucucaagucaa

SEQ ID NO: 842876 - RNA, 19 nt, Homo sapiens
  misc_RNA (1)...(19): siRNA sense strand
ugauagugacucccaugaa

SEQ ID NO: 842877 - RNA, 19 nt, Homo sapiens
  misc_RNA (1)...(19): siRNA sense strand
gcuacaagcuucuaaauaa

SEQ ID NO: 842878 - RNA, 19 nt, Homo sapiens
  misc_RNA (1)...(19): siRNA sense strand
uacaagaggugguuuauuu

SEQ ID NO: 842879 - RNA, 19 nt, Homo sapiens
  misc_RNA (1)...(19): siRNA sense strand
ucacaacaguuuccugaua

SEQ ID NO: 842880 - RNA, 19 nt, Homo sapiens
  misc_RNA (1)...(19): siRNA sense strand
gagaagaaguuugugauga

SEQ ID NO: 842881 - RNA, 19 nt, Homo sapiens
  misc_RNA (1)...(19): siRNA sense strand
ccacauauuucacaacuau

SEQ ID NO: 842882 - RNA, 19 nt, Homo sapiens
  misc_RNA (1)...(19): siRNA sense strand
cgucuuaaguguacauaua

SEQ ID NO: 842883 - RNA, 19 nt, Homo sapiens
  misc_RNA (1)...(19): siRNA sense strand
ggaaauucuucgagauaaa

SEQ ID NO: 842884 - RNA, 19 nt, Homo sapiens
  misc_RNA (1)...(19): siRNA sense strand
caagagggaguucguaaua

SEQ ID NO: 842885 - RNA, 19 nt, Homo sapiens
  misc_RNA (1)...(19): siRNA sense strand
agaaagaacuauucagaga

SEQ ID NO: 842886 - RNA, 19 nt, Homo sapiens
  misc_RNA (1)...(19): siRNA sense strand
ugaggaaacuggagaaaga

SEQ ID NO: 842887 - RNA, 19 nt, Homo sapiens
  misc_RNA (1)...(19): siRNA sense strand
ucagagagauggaaucaau

SEQ ID NO: 842888 - RNA, 19 nt, Homo sapiens
  misc_RNA (1)...(19): siRNA sense strand
gcaagcaugguuucuauuu

SEQ ID NO: 842889 - RNA, 19 nt, Homo sapiens
  misc_RNA (1)...(19): siRNA sense strand
ggagaaagaacuauucaga

SEQ ID NO: 842890 - RNA, 19 nt, Homo sapiens
  misc_RNA (1)...(19): siRNA sense strand
gaagaagcacuauuaggaa

SEQ ID NO: 842891 - RNA, 19 nt, Homo sapiens
  misc_RNA (1)...(19): siRNA sense strand
gaagagaagaaguuuguga

SEQ ID NO: 842892 - RNA, 19 nt, Homo sapiens
  misc_RNA (1)...(19): siRNA sense strand
gagaacgucuuaaguguac

SEQ ID NO: 842893 - RNA, 19 nt, Homo sapiens
  misc_RNA (1)...(19): siRNA sense strand
guauuuagcuaucacaaca

SEQ ID NO: 842894 - RNA, 19 nt, Homo sapiens
  misc_RNA (1)...(19): siRNA sense strand
gaauggaccuugucagacu

SEQ ID NO: 842895 - RNA, 19 nt, Homo sapiens
  misc_RNA (1)...(19): siRNA sense strand
agaagaaguuugugaugaa

SEQ ID NO: 842896 - RNA, 19 nt, Homo sapiens
  misc_RNA (1)...(19): siRNA sense strand
ugaugaagaagcacuauua

SEQ ID NO: 842897 - RNA, 19 nt, Homo sapiens
  misc_RNA (1)...(19): siRNA sense strand
aaagaacuauucagagaga

SEQ ID NO: 842898 - RNA, 19 nt, Homo sapiens
  misc_RNA (1)...(19): siRNA sense strand
ccugauagcugauaggaau

SEQ ID NO: 842899 - RNA, 19 nt, Homo sapiens
  misc_RNA (1)...(19): siRNA sense strand
gggagaacgucuuaagugu

SEQ ID NO: 842900 - RNA, 19 nt, Homo sapiens
  misc_RNA (1)...(19): siRNA sense strand
guagaaugguauuuagcua

SEQ ID NO: 842901 - RNA, 19 nt, Homo sapiens
  misc_RNA (1)...(19): siRNA sense strand
ucaaguuccugaaacauau

SEQ ID NO: 842902 - RNA, 19 nt, Homo sapiens
  misc_RNA (1)...(19): siRNA sense strand
ggagaacgucuuaagugua

SEQ ID NO: 842903 - RNA, 19 nt, Homo sapiens
  misc_RNA (1)...(19): siRNA sense strand
gaggguagaaugguauuua

SEQ ID NO: 842904 - RNA, 19 nt, Homo sapiens
  misc_RNA (1)...(19): siRNA sense strand
gagcauggaguuugcauug

SEQ ID NO: 842905 - RNA, 19 nt, Homo sapiens
  misc_RNA (1)...(19): siRNA sense strand
ugaagaagcacuauuagga

SEQ ID NO: 842906 - RNA, 19 nt, Homo sapiens
  misc_RNA (1)...(19): siRNA sense strand
gauaaaccaaguggcauua

SEQ ID NO: 842907 - RNA, 19 nt, Homo sapiens
  misc_RNA (1)...(19): siRNA sense strand
guuaaucucuuuccucagu

SEQ ID NO: 842908 - RNA, 19 nt, Homo sapiens
  misc_RNA (1)...(19): siRNA sense strand
gaaacuggagaaagaacua

SEQ ID NO: 842909 - RNA, 19 nt, Homo sapiens
  misc_RNA (1)...(19): siRNA sense strand
agagggaguucguaauauu

SEQ ID NO: 842910 - RNA, 19 nt, Homo sapiens
  misc_RNA (1)...(19): siRNA sense strand
caaguggcauuaauaugga

SEQ ID NO: 842911 - RNA, 19 nt, Homo sapiens
  misc_RNA (1)...(19): siRNA sense strand
aaaccaaguggcauuaaua

SEQ ID NO: 842912 - RNA, 19 nt, Homo sapiens
  misc_RNA (1)...(19): siRNA sense strand
gcacaaaggaaauauaacu

SEQ ID NO: 842913 - RNA, 19 nt, Homo sapiens
  misc_RNA (1)...(19): siRNA sense strand
cagccaagaugaugacuuc

SEQ ID NO: 842914 - RNA, 19 nt, Homo sapiens
  misc_RNA (1)...(19): siRNA sense strand
caacaggcauuggaaguag

SEQ ID NO: 842915 - RNA, 19 nt, Homo sapiens
  misc_RNA (1)...(19): siRNA sense strand
ggcauuaccuccagcaaca

SEQ ID NO: 842916 - RNA, 19 nt, Homo sapiens
  misc_RNA (1)...(19): siRNA sense strand
gaagaaguuugugaugaag

SEQ ID NO: 842917 - RNA, 19 nt, Homo sapiens
  misc_RNA (1)...(19): siRNA sense strand
gaaacaaugauggaaauuc

SEQ ID NO: 842918 - RNA, 19 nt, Homo sapiens
  misc_RNA (1)...(19): siRNA sense strand
gggaagagaagaaguuugu

SEQ ID NO: 842919 - RNA, 19 nt, Homo sapiens
  misc_RNA (1)...(19): siRNA sense strand
uaaaccaaguggcauuaau

SEQ ID NO: 842920 - RNA, 19 nt, Homo sapiens
  misc_RNA (1)...(19): siRNA sense strand
gagggaguucguaauauuu

SEQ ID NO: 842921 - RNA, 19 nt, Homo sapiens
  misc_RNA (1)...(19): siRNA sense strand
gauggaaauucuucgagau

SEQ ID NO: 842922 - RNA, 19 nt, Homo sapiens
  misc_RNA (1)...(19): siRNA sense strand
gcauauuccuaucuugaca

SEQ ID NO: 842923 - RNA, 19 nt, Homo sapiens
  misc_RNA (1)...(19): siRNA sense strand
ucaccaacauuugaacuug

SEQ ID NO: 842924 - RNA, 19 nt, Homo sapiens
  misc_RNA (1)...(19): siRNA sense strand
ccaaguggcauuaauaugg

SEQ ID NO: 842925 - RNA, 19 nt, Homo sapiens
  misc_RNA (1)...(19): siRNA sense strand
agaaguuugugaugaagaa

SEQ ID NO: 842926 - RNA, 19 nt, Homo sapiens
  misc_RNA (1)...(19): siRNA sense strand
cagucaaaguuaguucuua

SEQ ID NO: 842927 - RNA, 19 nt, Homo sapiens
  misc_RNA (1)...(19): siRNA sense strand
uggaaauucuucgagauaa

SEQ ID NO: 842928 - RNA, 19 nt, Homo sapiens
  misc_RNA (1)...(19): siRNA sense strand
cuaaucaacuuuccauaac

SEQ ID NO: 842929 - RNA, 19 nt, Homo sapiens
  misc_RNA (1)...(19): siRNA sense strand
gaagcacuauuaggaaugg

SEQ ID NO: 842930 - RNA, 19 nt, Homo sapiens
  misc_RNA (1)...(19): siRNA sense strand
cacagaggguagaauggua

SEQ ID NO: 842931 - RNA, 19 nt, Homo sapiens
  misc_RNA (1)...(19): siRNA sense strand
cauuugaacuugaagaucu

SEQ ID NO: 842932 - RNA, 19 nt, Homo sapiens
  misc_RNA (1)...(19): siRNA sense strand
ccaaugagcauggaguuug

SEQ ID NO: 842933 - RNA, 19 nt, Homo sapiens
  misc_RNA (1)...(19): siRNA sense strand
gcauuggaaguaguaaaua

SEQ ID NO: 842934 - RNA, 19 nt, Homo sapiens
  misc_RNA (1)...(19): siRNA sense strand
cuaaauaagcacaaaggaa

SEQ ID NO: 842935 - RNA, 19 nt, Homo sapiens
  misc_RNA (1)...(19): siRNA sense strand
cacaacaguuuccugauag

SEQ ID NO: 842936 - RNA, 19 nt, Homo sapiens
  misc_RNA (1)...(19): siRNA sense strand
cagcauauuccuaucuuga

SEQ ID NO: 842937 - RNA, 19 nt, Homo sapiens
  misc_RNA (1)...(19): siRNA sense strand
gaagacacccacucuacca

SEQ ID NO: 842938 - RNA, 19 nt, Homo sapiens
  misc_RNA (1)...(19): siRNA sense strand
gauaccaguucaccaacau

SEQ ID NO: 842939 - RNA, 19 nt, Homo sapiens
  misc_RNA (1)...(19): siRNA sense strand
ggauaccaguucaccaaca

SEQ ID NO: 842940 - RNA, 19 nt, Homo sapiens
  misc_RNA (1)...(19): siRNA sense strand
ggcuacaagcuucuaaaua

SEQ ID NO: 842941 - RNA, 19 nt, Homo sapiens
  misc_RNA (1)...(19): siRNA sense strand
gaaguacugggcagcagaa

SEQ ID NO: 842942 - RNA, 19 nt, Homo sapiens
  misc_RNA (1)...(19): siRNA sense strand
caccaacauuugaacuuga

SEQ ID NO: 842943 - RNA, 19 nt, Homo sapiens
  misc_RNA (1)...(19): siRNA sense strand
cuacaagcuucuaaauaag

SEQ ID NO: 842944 - RNA, 19 nt, Homo sapiens
  misc_RNA (1)...(19): siRNA sense strand
gcagcauauuccuaucuug

SEQ ID NO: 842945 - RNA, 19 nt, Homo sapiens
  misc_RNA (1)...(19): siRNA sense strand
aaacuaugcuaagcggaaa

SEQ ID NO: 842946 - RNA, 19 nt, Homo sapiens
  misc_RNA (1)...(19): siRNA sense strand
gacaugagaaacuaugcua

SEQ ID NO: 842947 - RNA, 19 nt, Homo sapiens
  misc_RNA (1)...(19): siRNA sense strand
ggaacacccagacaugaga

SEQ ID NO: 842948 - RNA, 19 nt, Homo sapiens
  misc_RNA (1)...(19): siRNA sense strand
aagaagcacuauuaggaau

SEQ ID NO: 842949 - RNA, 19 nt, Homo sapiens
  misc_RNA (1)...(19): siRNA sense strand
cugcaagcaugguuucuau

SEQ ID NO: 842950 - RNA, 19 nt, Homo sapiens
  misc_RNA (1)...(19): siRNA sense strand
uaauauggagggagaauuc

SEQ ID NO: 842951 - RNA, 19 nt, Homo sapiens
  misc_RNA (1)...(19): siRNA sense strand
gaacacccagacaugagaa

SEQ ID NO: 842952 - RNA, 19 nt, Homo sapiens
  misc_RNA (1)...(19): siRNA sense strand
ugucagacuuggccuugaa

SEQ ID NO: 842953 - RNA, 19 nt, Homo sapiens
  misc_RNA (1)...(19): siRNA sense strand
ccaguucaccaacauuuga

SEQ ID NO: 842954 - RNA, 19 nt, Homo sapiens
  misc_RNA (1)...(19): siRNA sense strand
gaaugguauuuagcuauca

SEQ ID NO: 842955 - RNA, 19 nt, Homo sapiens
  misc_RNA (1)...(19): siRNA sense strand
agaaugguauuuagcuauc

SEQ ID NO: 842956 - RNA, 19 nt, Homo sapiens
  misc_RNA (1)...(19): siRNA sense strand
guacaagaggugguuuauu

SEQ ID NO: 842957 - RNA, 19 nt, Homo sapiens
  misc_RNA (1)...(19): siRNA sense strand
guacaagagggaguucgua

SEQ ID NO: 842958 - RNA, 19 nt, Homo sapiens
  misc_RNA (1)...(19): siRNA sense strand
cagcaacagucgauaacag

SEQ ID NO: 842959 - RNA, 19 nt, Homo sapiens
  misc_RNA (1)...(19): siRNA sense strand
ucaacaggcauuggaagua

SEQ ID NO: 842960 - RNA, 19 nt, Homo sapiens
  misc_RNA (1)...(19): siRNA sense strand
aaagguuggugggauggua

SEQ ID NO: 842961 - RNA, 19 nt, Homo sapiens
  misc_RNA (1)...(19): siRNA sense strand
ggaguucguaauauuucua

SEQ ID NO: 842962 - RNA, 19 nt, Homo sapiens
  misc_RNA (1)...(19): siRNA sense strand
gcagaaaugggagccaaug

SEQ ID NO: 842963 - RNA, 19 nt, Homo sapiens
  misc_RNA (1)...(19): siRNA sense strand
gcacagaggguagaauggu

SEQ ID NO: 842964 - RNA, 19 nt, Homo sapiens
  misc_RNA (1)...(19): siRNA sense strand
gaugaagaagcacuauuag

SEQ ID NO: 842965 - RNA, 19 nt, Homo sapiens
  misc_RNA (1)...(19): siRNA sense strand
uuagcuaucacaacaguuu

SEQ ID NO: 842966 - RNA, 19 nt, Homo sapiens
  misc_RNA (1)...(19): siRNA sense strand
gauggaaucaauccuucaa

SEQ ID NO: 842967 - RNA, 19 nt, Homo sapiens
  misc_RNA (1)...(19): siRNA sense strand
ugaucaaguuccugaaaca

SEQ ID NO: 842968 - RNA, 19 nt, Homo sapiens
  misc_RNA (1)...(19): siRNA sense strand
gaaauucuucgagauaaac

SEQ ID NO: 842969 - RNA, 19 nt, Homo sapiens
  misc_RNA (1)...(19): siRNA sense strand
cugcuguaguucaugauaa

SEQ ID NO: 842970 - RNA, 19 nt, Homo sapiens
  misc_RNA (1)...(19): siRNA sense strand
aagagggaguucguaauau

SEQ ID NO: 842971 - RNA, 19 nt, Homo sapiens
  misc_RNA (1)...(19): siRNA sense strand
ucacaacuauuggauacca

SEQ ID NO: 842972 - RNA, 19 nt, Homo sapiens
  misc_RNA (1)...(19): siRNA sense strand
caagcaugguuucuauuuu

SEQ ID NO: 842973 - RNA, 19 nt, Homo sapiens
  misc_RNA (1)...(19): siRNA sense strand
ugacacagccaagaugaug

SEQ ID NO: 842974 - RNA, 19 nt, Homo sapiens
  misc_RNA (1)...(19): siRNA sense strand
cagaagacacccacucuac

SEQ ID NO: 842975 - RNA, 19 nt, Homo sapiens
  misc_RNA (1)...(19): siRNA sense strand
agucaaaguuaguucuuag

SEQ ID NO: 842976 - RNA, 19 nt, Homo sapiens
  misc_RNA (1)...(19): siRNA sense strand
ggcauuggaaguaguaaau

SEQ ID NO: 842977 - RNA, 19 nt, Homo sapiens
  misc_RNA (1)...(19): siRNA sense strand
gaagagagcuuaauaugaa

SEQ ID NO: 842978 - RNA, 19 nt, Homo sapiens
  misc_RNA (1)...(19): siRNA sense strand
gaacaaauuucagugcuua

SEQ ID NO: 842979 - RNA, 19 nt, Homo sapiens
  misc_RNA (1)...(19): siRNA sense strand
cauaaucagugccuaaaua

SEQ ID NO: 842980 - RNA, 19 nt, Homo sapiens
  misc_RNA (1)...(19): siRNA sense strand
ggacauugcuauauuaaag

SEQ ID NO: 842981 - RNA, 19 nt, Homo sapiens
  misc_RNA (1)...(19): siRNA sense strand
gagggacauugcuauauua

SEQ ID NO: 842982 - RNA, 19 nt, Homo sapiens
  misc_RNA (1)...(19): siRNA sense strand
gaucugaacaagcauauaa

SEQ ID NO: 842983 - RNA, 19 nt, Homo sapiens
  misc_RNA (1)...(19): siRNA sense strand
gaacgaagaagacaagaau

SEQ ID NO: 842984 - RNA, 19 nt, Homo sapiens
  misc_RNA (1)...(19): siRNA sense strand
uggaauaccugacuaacaa

SEQ ID NO: 842985 - RNA, 19 nt, Homo sapiens
  misc_RNA (1)...(19): siRNA sense strand
gcagcaaagcgguuuauuu

SEQ ID NO: 842986 - RNA, 19 nt, Homo sapiens
  misc_RNA (1)...(19): siRNA sense strand
uggaacagcuauuuacaaa

SEQ ID NO: 842987 - RNA, 19 nt, Homo sapiens
  misc_RNA (1)...(19): siRNA sense strand
gagcaagcccagaaacuaa

SEQ ID NO: 842988 - RNA, 19 nt, Homo sapiens
  misc_RNA (1)...(19): siRNA sense strand
ugagacagcuucaaagaca

SEQ ID NO: 842989 - RNA, 19 nt, Homo sapiens
  misc_RNA (1)...(19): siRNA sense strand
ugagggacauugcuauauu

SEQ ID NO: 842990 - RNA, 19 nt, Homo sapiens
  misc_RNA (1)...(19): siRNA sense strand
gaaucagccuccagauaug

SEQ ID NO: 842991 - RNA, 19 nt, Homo sapiens
  misc_RNA (1)...(19): siRNA sense strand
gcaaggaagucauaaucag

SEQ ID NO: 842992 - RNA, 19 nt, Homo sapiens
  misc_RNA (1)...(19): siRNA sense strand
aaacagcgcucuugcaaaa

SEQ ID NO: 842993 - RNA, 19 nt, Homo sapiens
  misc_RNA (1)...(19): siRNA sense strand
gaaaauauccaauccaguu

SEQ ID NO: 842994 - RNA, 19 nt, Homo sapiens
  misc_RNA (1)...(19): siRNA sense strand
aaagauuacuggagaaaca

SEQ ID NO: 842995 - RNA, 19 nt, Homo sapiens
  misc_RNA (1)...(19): siRNA sense strand
uaacaaaacugaagaguac

SEQ ID NO: 842996 - RNA, 19 nt, Homo sapiens
  misc_RNA (1)...(19): siRNA sense strand
gguauggaacagcuauuua

SEQ ID NO: 842997 - RNA, 19 nt, Homo sapiens
  misc_RNA (1)...(19): siRNA sense strand
gaaacuaacggcuacucaa

SEQ ID NO: 842998 - RNA, 19 nt, Homo sapiens
  misc_RNA (1)...(19): siRNA sense strand
agaaucagccuccagauau

SEQ ID NO: 842999 - RNA, 19 nt, Homo sapiens
  misc_RNA (1)...(19): siRNA sense strand
ggagaaagaaauacagaca

SEQ ID NO: 843000 - RNA, 19 nt, Homo sapiens
  misc_RNA (1)...(19): siRNA sense strand
gcaguucaagaaggaauua

SEQ ID NO: 843001 - RNA, 19 nt, Homo sapiens
  misc_RNA (1)...(19): siRNA sense strand
cagauaugcagaacaaauu

SEQ ID NO: 843002 - RNA, 19 nt, Homo sapiens
  misc_RNA (1)...(19): siRNA sense strand
acucaaagccacuuagaaa

SEQ ID NO: 843003 - RNA, 19 nt, Homo sapiens
  misc_RNA (1)...(19): siRNA sense strand
aaacuaacggcuacucaaa

SEQ ID NO: 843004 - RNA, 19 nt, Homo sapiens
  misc_RNA (1)...(19): siRNA sense strand
agaagagagcuuaauauga

SEQ ID NO: 843005 - RNA, 19 nt, Homo sapiens
  misc_RNA (1)...(19): siRNA sense strand
ggagagauugaacgaagaa

SEQ ID NO: 843006 - RNA, 19 nt, Homo sapiens
  misc_RNA (1)...(19): siRNA sense strand
cagcaaagcgguuuauuuu

SEQ ID NO: 843007 - RNA, 19 nt, Homo sapiens
  misc_RNA (1)...(19): siRNA sense strand
acacagagcaaccugagaa

SEQ ID NO: 843008 - RNA, 19 nt, Homo sapiens
  misc_RNA (1)...(19): siRNA sense strand
gacaggauguuccaaagac

SEQ ID NO: 843009 - RNA, 19 nt, Homo sapiens
  misc_RNA (1)...(19): siRNA sense strand
gaagguauggaacagcuau

SEQ ID NO: 843010 - RNA, 19 nt, Homo sapiens
  misc_RNA (1)...(19): siRNA sense strand
gaaaguccaagcugagaca

SEQ ID NO: 843011 - RNA, 19 nt, Homo sapiens
  misc_RNA (1)...(19): siRNA sense strand
gaauacuccuguggcauca

SEQ ID NO: 843012 - RNA, 19 nt, Homo sapiens
  misc_RNA (1)...(19): siRNA sense strand
acaggaggcuacugggaaa

SEQ ID NO: 843013 - RNA, 19 nt, Homo sapiens
  misc_RNA (1)...(19): siRNA sense strand
caacugagcgagccagaca

SEQ ID NO: 843014 - RNA, 19 nt, Homo sapiens
  misc_RNA (1)...(19): siRNA sense strand
aagaaucagccuccagaua

SEQ ID NO: 843015 - RNA, 19 nt, Homo sapiens
  misc_RNA (1)...(19): siRNA sense strand
aagaagagagcuuaauaug

SEQ ID NO: 843016 - RNA, 19 nt, Homo sapiens
  misc_RNA (1)...(19): siRNA sense strand
aaacugaagaguacacaga

SEQ ID NO: 843017 - RNA, 19 nt, Homo sapiens
  misc_RNA (1)...(19): siRNA sense strand
ggaggaauccagggagcua

SEQ ID NO: 843018 - RNA, 19 nt, Homo sapiens
  misc_RNA (1)...(19): siRNA sense strand
aauauccaauccaguuuga

SEQ ID NO: 843019 - RNA, 19 nt, Homo sapiens
  misc_RNA (1)...(19): siRNA sense strand
ccagauaugcagaacaaau

SEQ ID NO: 843020 - RNA, 19 nt, Homo sapiens
  misc_RNA (1)...(19): siRNA sense strand
ggaauaccugacuaacaaa

SEQ ID NO: 843021 - RNA, 19 nt, Homo sapiens
  misc_RNA (1)...(19): siRNA sense strand
ugagcaagcccagaaacua

SEQ ID NO: 843022 - RNA, 19 nt, Homo sapiens
  misc_RNA (1)...(19): siRNA sense strand
cuccagauaugcagaacaa

SEQ ID NO: 843023 - RNA, 19 nt, Homo sapiens
  misc_RNA (1)...(19): siRNA sense strand
aaagcaggagaaagaaaua

SEQ ID NO: 843024 - RNA, 19 nt, Homo sapiens
  misc_RNA (1)...(19): siRNA sense strand
gaaggaauuacugcagcua

SEQ ID NO: 843025 - RNA, 19 nt, Homo sapiens
  misc_RNA (1)...(19): siRNA sense strand
agaacaaauuucagugcuu

SEQ ID NO: 843026 - RNA, 19 nt, Homo sapiens
  misc_RNA (1)...(19): siRNA sense strand
uaauugagcaagcccagaa

SEQ ID NO: 843027 - RNA, 19 nt, Homo sapiens
  misc_RNA (1)...(19): siRNA sense strand
cuaaauagacaggauguuc

SEQ ID NO: 843028 - RNA, 19 nt, Homo sapiens
  misc_RNA (1)...(19): siRNA sense strand
acagagagaaccagcaguu

SEQ ID NO: 843029 - RNA, 19 nt, Homo sapiens
  misc_RNA (1)...(19): siRNA sense strand
gaaaagcaggagaaagaaa

SEQ ID NO: 843030 - RNA, 19 nt, Homo sapiens
  misc_RNA (1)...(19): siRNA sense strand
caaggaagucauaaucagu

SEQ ID NO: 843031 - RNA, 19 nt, Homo sapiens
  misc_RNA (1)...(19): siRNA sense strand
caaagacacgggaaguaca

SEQ ID NO: 843032 - RNA, 19 nt, Homo sapiens
  misc_RNA (1)...(19): siRNA sense strand
gagaaagaaauacagacau

SEQ ID NO: 843033 - RNA, 19 nt, Homo sapiens
  misc_RNA (1)...(19): siRNA sense strand
gaaaagauuacuggagaaa

SEQ ID NO: 843034 - RNA, 19 nt, Homo sapiens
  misc_RNA (1)...(19): siRNA sense strand
gauaugcagaacaaauuuc

SEQ ID NO: 843035 - RNA, 19 nt, Homo sapiens
  misc_RNA (1)...(19): siRNA sense strand
uagacaggauguuccaaag

SEQ ID NO: 843036 - RNA, 19 nt, Homo sapiens
  misc_RNA (1)...(19): siRNA sense strand
agugguaucuggaguccuu

SEQ ID NO: 843037 - RNA, 19 nt, Homo sapiens
  misc_RNA (1)...(19): siRNA sense strand
ccuugaaguuggcagcaaa

SEQ ID NO: 843038 - RNA, 19 nt, Homo sapiens
  misc_RNA (1)...(19): siRNA sense strand
ggagacaaagaaaguccaa

SEQ ID NO: 843039 - RNA, 19 nt, Homo sapiens
  misc_RNA (1)...(19): siRNA sense strand
guauggaacagcuauuuac

SEQ ID NO: 843040 - RNA, 19 nt, Homo sapiens
  misc_RNA (1)...(19): siRNA sense strand
caaggcaccaaaucaagga

SEQ ID NO: 843041 - RNA, 19 nt, Homo sapiens
  misc_RNA (1)...(19): siRNA sense strand
uacaggaggagacaaagaa

SEQ ID NO: 843042 - RNA, 19 nt, Homo sapiens
  misc_RNA (1)...(19): siRNA sense strand
gcucaaacccagcggaaac

SEQ ID NO: 843043 - RNA, 19 nt, Homo sapiens
  misc_RNA (1)...(19): siRNA sense strand
gagauugaacgaagaagac

SEQ ID NO: 843044 - RNA, 19 nt, Homo sapiens
  misc_RNA (1)...(19): siRNA sense strand
gggacauugcuauauuaaa

SEQ ID NO: 843045 - RNA, 19 nt, Homo sapiens
  misc_RNA (1)...(19): siRNA sense strand
cauuacaggaggagacaaa

SEQ ID NO: 843046 - RNA, 19 nt, Homo sapiens
  misc_RNA (1)...(19): siRNA sense strand
uggagagauugaacgaaga

SEQ ID NO: 843047 - RNA, 19 nt, Homo sapiens
  misc_RNA (1)...(19): siRNA sense strand
caggagaaagaaauacaga

SEQ ID NO: 843048 - RNA, 19 nt, Homo sapiens
  misc_RNA (1)...(19): siRNA sense strand
acgaagaagacaagaauca

SEQ ID NO: 843049 - RNA, 19 nt, Homo sapiens
  misc_RNA (1)...(19): siRNA sense strand
uaaaacagcgcucuugcaa

SEQ ID NO: 843050 - RNA, 19 nt, Homo sapiens
  misc_RNA (1)...(19): siRNA sense strand
agacaggauguuccaaaga

SEQ ID NO: 843051 - RNA, 19 nt, Homo sapiens
  misc_RNA (1)...(19): siRNA sense strand
gugccuaaauagacaggau

SEQ ID NO: 843052 - RNA, 19 nt, Homo sapiens
  misc_RNA (1)...(19): siRNA sense strand
caaagccacuuagaaaaca

SEQ ID NO: 843053 - RNA, 19 nt, Homo sapiens
  misc_RNA (1)...(19): siRNA sense strand
ugaacgaagaagacaagaa

SEQ ID NO: 843054 - RNA, 19 nt, Homo sapiens
  misc_RNA (1)...(19): siRNA sense strand
ucaaagacacgggaaguac

SEQ ID NO: 843055 - RNA, 19 nt, Homo sapiens
  misc_RNA (1)...(19): siRNA sense strand
gcaaaaggaaaauauccaa

SEQ ID NO: 843056 - RNA, 19 nt, Homo sapiens
  misc_RNA (1)...(19): siRNA sense strand
uaucuggaguccuuaaucc

SEQ ID NO: 843057 - RNA, 19 nt, Homo sapiens
  misc_RNA (1)...(19): siRNA sense strand
aaauauccaauccaguuug

SEQ ID NO: 843058 - RNA, 19 nt, Homo sapiens
  misc_RNA (1)...(19): siRNA sense strand
guucaagaaggaauuacug

SEQ ID NO: 843059 - RNA, 19 nt, Homo sapiens
  misc_RNA (1)...(19): siRNA sense strand
ggaggcuacugggaaagag

SEQ ID NO: 843060 - RNA, 19 nt, Homo sapiens
  misc_RNA (1)...(19): siRNA sense strand
ggaucugaacaagcauaua

SEQ ID NO: 843061 - RNA, 19 nt, Homo sapiens
  misc_RNA (1)...(19): siRNA sense strand
gcaggagaaagaaauacag

SEQ ID NO: 843062 - RNA, 19 nt, Homo sapiens
  misc_RNA (1)...(19): siRNA sense strand
cuacucaaagccacuuaga

SEQ ID NO: 843063 - RNA, 19 nt, Homo sapiens
  misc_RNA (1)...(19): siRNA sense strand
uuucuggaauaccugacua

SEQ ID NO: 843064 - RNA, 19 nt, Homo sapiens
  misc_RNA (1)...(19): siRNA sense strand
auagacaggauguuccaaa

SEQ ID NO: 843065 - RNA, 19 nt, Homo sapiens
  misc_RNA (1)...(19): siRNA sense strand
gcucuuugauuaugagauu

SEQ ID NO: 843066 - RNA, 19 nt, Homo sapiens
  misc_RNA (1)...(19): siRNA sense strand
cagcaacgguggcgucaug

SEQ ID NO: 843067 - RNA, 19 nt, Homo sapiens
  misc_RNA (1)...(19): siRNA sense strand
ggcccgagcucuaccucua

SEQ ID NO: 843068 - RNA, 19 nt, Homo sapiens
  misc_RNA (1)...(19): siRNA sense strand
aaaaggggcugcaucguaa

SEQ ID NO: 843069 - RNA, 19 nt, Homo sapiens
  misc_RNA (1)...(19): siRNA sense strand
cucgagggcugacgaagua

SEQ ID NO: 843070 - RNA, 19 nt, Homo sapiens
  misc_RNA (1)...(19): siRNA sense strand
gugacuacccuacuuacua

SEQ ID NO: 843071 - RNA, 19 nt, Homo sapiens
  misc_RNA (1)...(19): siRNA sense strand
caaguacagugccaucuac

SEQ ID NO: 843072 - RNA, 19 nt, Homo sapiens
  misc_RNA (1)...(19): siRNA sense strand
cggcagagcuggacuacac

SEQ ID NO: 843073 - RNA, 19 nt, Homo sapiens
  misc_RNA (1)...(19): siRNA sense strand
ugacuacccuacuuacuac

SEQ ID NO: 843074 - RNA, 19 nt, Homo sapiens
  misc_RNA (1)...(19): siRNA sense strand
ggacuacaccaucgagauc

SEQ ID NO: 843075 - RNA, 19 nt, Homo sapiens
  misc_RNA (1)...(19): siRNA sense strand
auuaugagauugagaagga

SEQ ID NO: 843076 - RNA, 19 nt, Homo sapiens
  misc_RNA (1)...(19): siRNA sense strand
ccaaguacagugccaucua

SEQ ID NO: 843077 - RNA, 19 nt, Homo sapiens
  misc_RNA (1)...(19): siRNA sense strand
caaaaggggcugcaucgua

SEQ ID NO: 843078 - RNA, 19 nt, Homo sapiens
  misc_RNA (1)...(19): siRNA sense strand
acagugccaucuaccacaa

SEQ ID NO: 843079 - RNA, 19 nt, Homo sapiens
  misc_RNA (1)...(19): siRNA sense strand
ggguaucccuucacuucgu

SEQ ID NO: 843080 - RNA, 19 nt, Homo sapiens
  misc_RNA (1)...(19): siRNA sense strand
ucagccaccuccgugacua

SEQ ID NO: 843081 - RNA, 19 nt, Homo sapiens
  misc_RNA (1)...(19): siRNA sense strand
ggucuucuucuccgaguca

SEQ ID NO: 843082 - RNA, 19 nt, Homo sapiens
  misc_RNA (1)...(19): siRNA sense strand
aaguaguccuggccagaga

SEQ ID NO: 843083 - RNA, 19 nt, Homo sapiens
  misc_RNA (1)...(19): siRNA sense strand
aagccucugugucgacuuc

SEQ ID NO: 843084 - RNA, 19 nt, Homo sapiens
  misc_RNA (1)...(19): siRNA sense strand
aguccuggccagagacaua

SEQ ID NO: 843085 - RNA, 19 nt, Homo sapiens
  misc_RNA (1)...(19): siRNA sense strand
gaccagagcuaccaguuca

SEQ ID NO: 843086 - RNA, 19 nt, Homo sapiens
  misc_RNA (1)...(19): siRNA sense strand
gcaagagaacuucauccua

SEQ ID NO: 843087 - RNA, 19 nt, Homo sapiens
  misc_RNA (1)...(19): siRNA sense strand
gccagcagcucaaggacaa

SEQ ID NO: 843088 - RNA, 19 nt, Homo sapiens
  misc_RNA (1)...(19): siRNA sense strand
ugaagcagcugcaggacau

SEQ ID NO: 843089 - RNA, 19 nt, Homo sapiens
  misc_RNA (1)...(19): siRNA sense strand
ggacaagaucuccguguuc

SEQ ID NO: 843090 - RNA, 19 nt, Homo sapiens
  misc_RNA (1)...(19): siRNA sense strand
gacaagaucuccguguucu

SEQ ID NO: 843091 - RNA, 19 nt, Homo sapiens
  misc_RNA (1)...(19): siRNA sense strand
cagcccaacuccaccaaga

SEQ ID NO: 843092 - RNA, 19 nt, Homo sapiens
  misc_RNA (1)...(19): siRNA sense strand
caugugagccaagccauuu

SEQ ID NO: 843093 - RNA, 19 nt, Homo sapiens
  misc_RNA (1)...(19): siRNA sense strand
gcugauggacgcagugaug

SEQ ID NO: 843094 - RNA, 19 nt, Homo sapiens
  misc_RNA (1)...(19): siRNA sense strand
ggaccagagcuaccaguuc

SEQ ID NO: 843095 - RNA, 19 nt, Homo sapiens
  misc_RNA (1)...(19): siRNA sense strand
caaaguggagugcgugauc

SEQ ID NO: 843096 - RNA, 19 nt, Homo sapiens
  misc_RNA (1)...(19): siRNA sense strand
ugaagggugugcugacucu

SEQ ID NO: 843097 - RNA, 19 nt, Homo sapiens
  misc_RNA (1)...(19): siRNA sense strand
caacgacgcccuggucuac

SEQ ID NO: 843098 - RNA, 19 nt, Homo sapiens
  misc_RNA (1)...(19): siRNA sense strand
gggaggacaagcaguggaa

SEQ ID NO: 843099 - RNA, 19 nt, Homo sapiens
  misc_RNA (1)...(19): siRNA sense strand
cuacaucaaccucaacaag

SEQ ID NO: 843100 - RNA, 19 nt, Homo sapiens
  misc_RNA (1)...(19): siRNA sense strand
cgaggugcacgcuguguug

SEQ ID NO: 843101 - RNA, 19 nt, Homo sapiens
  misc_RNA (1)...(19): siRNA sense strand
aggacaagaucuccguguu

SEQ ID NO: 843102 - RNA, 19 nt, Homo sapiens
  misc_RNA (1)...(19): siRNA sense strand
aggcggaugugaaccugaa

SEQ ID NO: 843103 - RNA, 19 nt, Homo sapiens
  misc_RNA (1)...(19): siRNA sense strand
ccaacuccaccaagaacuu

SEQ ID NO: 843104 - RNA, 19 nt, Homo sapiens
  misc_RNA (1)...(19): siRNA sense strand
ggugcacgcuguguugaag

SEQ ID NO: 843105 - RNA, 19 nt, Homo sapiens
  misc_RNA (1)...(19): siRNA sense strand
ggucaacgucuacaucaac

SEQ ID NO: 843106 - RNA, 19 nt, Homo sapiens
  misc_RNA (1)...(19): siRNA sense strand
caagcaagagaacuucauc

SEQ ID NO: 843107 - RNA, 19 nt, Homo sapiens
  misc_RNA (1)...(19): siRNA sense strand
ugagccacgugcacaaagu

SEQ ID NO: 843108 - RNA, 19 nt, Homo sapiens
  misc_RNA (1)...(19): siRNA sense strand
ggugaagggugugcugacu

SEQ ID NO: 843109 - RNA, 19 nt, Homo sapiens
  misc_RNA (1)...(19): siRNA sense strand
gaugccagaaaccauguga

SEQ ID NO: 843110 - RNA, 19 nt, Homo sapiens
  misc_RNA (1)...(19): siRNA sense strand
caacuccaccaagaacuuc

SEQ ID NO: 843111 - RNA, 19 nt, Homo sapiens
  misc_RNA (1)...(19): siRNA sense strand
ggugagccacgugcacaaa

SEQ ID NO: 843112 - RNA, 19 nt, Homo sapiens
  misc_RNA (1)...(19): siRNA sense strand
ucaacgacgcccuggucua

SEQ ID NO: 843113 - RNA, 19 nt, Homo sapiens
  misc_RNA (1)...(19): siRNA sense strand
ggaugugaaccugaagaug

SEQ ID NO: 843114 - RNA, 19 nt, Homo sapiens
  misc_RNA (1)...(19): siRNA sense strand
acaucaaccucaacaagcu

SEQ ID NO: 843115 - RNA, 19 nt, Homo sapiens
  misc_RNA (1)...(19): siRNA sense strand
ggaaauugcuuacaggaaa

SEQ ID NO: 843116 - RNA, 19 nt, Homo sapiens
  misc_RNA (1)...(19): siRNA sense strand
gaacacuaccgauccauua

SEQ ID NO: 843117 - RNA, 19 nt, Homo sapiens
  misc_RNA (1)...(19): siRNA sense strand
gaucagggauuuagagaug

SEQ ID NO: 843118 - RNA, 19 nt, Homo sapiens
  misc_RNA (1)...(19): siRNA sense strand
gagaguacagcaaaucuua

SEQ ID NO: 843119 - RNA, 19 nt, Homo sapiens
  misc_RNA (1)...(19): siRNA sense strand
gaaggagguuggauauuca

SEQ ID NO: 843120 - RNA, 19 nt, Homo sapiens
  misc_RNA (1)...(19): siRNA sense strand
gauccgggcuguaggcuuu

SEQ ID NO: 843121 - RNA, 19 nt, Homo sapiens
  misc_RNA (1)...(19): siRNA sense strand
ccacacagauguacacuca

SEQ ID NO: 843122 - RNA, 19 nt, Homo sapiens
  misc_RNA (1)...(19): siRNA sense strand
gcagguauuucgaacacua

SEQ ID NO: 843123 - RNA, 19 nt, Homo sapiens
  misc_RNA (1)...(19): siRNA sense strand
gaagaggauuugauaccuu

SEQ ID NO: 843124 - RNA, 19 nt, Homo sapiens
  misc_RNA (1)...(19): siRNA sense strand
gggaguaacuggccucuca

SEQ ID NO: 843125 - RNA, 19 nt, Homo sapiens
  misc_RNA (1)...(19): siRNA sense strand
guaaggaacuugugcacau

SEQ ID NO: 843126 - RNA, 19 nt, Homo sapiens
  misc_RNA (1)...(19): siRNA sense strand
gugcauagcccacuucuga

SEQ ID NO: 843127 - RNA, 19 nt, Homo sapiens
  misc_RNA (1)...(19): siRNA sense strand
caacgcauauggucggaaa

SEQ ID NO: 843128 - RNA, 19 nt, Homo sapiens
  misc_RNA (1)...(19): siRNA sense strand
gaaauugcuuacaggaaau

SEQ ID NO: 843129 - RNA, 19 nt, Homo sapiens
  misc_RNA (1)...(19): siRNA sense strand
ugaaggagguuggauauuc

SEQ ID NO: 843130 - RNA, 19 nt, Homo sapiens
  misc_RNA (1)...(19): siRNA sense strand
gcuguaggcuuugugcaua

SEQ ID NO: 843131 - RNA, 19 nt, Homo sapiens
  misc_RNA (1)...(19): siRNA sense strand
uaacagguauccaggaauc

SEQ ID NO: 843132 - RNA, 19 nt, Homo sapiens
  misc_RNA (1)...(19): siRNA sense strand
gaaaauggcacuuggguuu

SEQ ID NO: 843133 - RNA, 19 nt, Homo sapiens
  misc_RNA (1)...(19): siRNA sense strand
gaacggaucaccuugucaa

SEQ ID NO: 843134 - RNA, 19 nt, Homo sapiens
  misc_RNA (1)...(19): siRNA sense strand
cauuggcucuaaagacuua

SEQ ID NO: 843135 - RNA, 19 nt, Homo sapiens
  misc_RNA (1)...(19): siRNA sense strand
caagcucgcugccgaagga

SEQ ID NO: 843136 - RNA, 19 nt, Homo sapiens
  misc_RNA (1)...(19): siRNA sense strand
ggcuaugacuuguaugaaa

SEQ ID NO: 843137 - RNA, 19 nt, Homo sapiens
  misc_RNA (1)...(19): siRNA sense strand
acacagauguacacucaga

SEQ ID NO: 843138 - RNA, 19 nt, Homo sapiens
  misc_RNA (1)...(19): siRNA sense strand
caucacagccgacccauau

SEQ ID NO: 843139 - RNA, 19 nt, Homo sapiens
  misc_RNA (1)...(19): siRNA sense strand
gacauuggcucuaaagacu

SEQ ID NO: 843140 - RNA, 19 nt, Homo sapiens
  misc_RNA (1)...(19): siRNA sense strand
gcacuuggguuuuaacaga

SEQ ID NO: 843141 - RNA, 19 nt, Homo sapiens
  misc_RNA (1)...(19): siRNA sense strand
ggacuucaacauucuauca

SEQ ID NO: 843142 - RNA, 19 nt, Homo sapiens
  misc_RNA (1)...(19): siRNA sense strand
ggaaagaugcuagcaaugg

SEQ ID NO: 843143 - RNA, 19 nt, Homo sapiens
  misc_RNA (1)...(19): siRNA sense strand
ucaacuagauggcuaugau

SEQ ID NO: 843144 - RNA, 19 nt, Homo sapiens
  misc_RNA (1)...(19): siRNA sense strand
ucuaaagacuuaugguuuc

SEQ ID NO: 843145 - RNA, 19 nt, Homo sapiens
  misc_RNA (1)...(19): siRNA sense strand
aaucuuagcuucccauaac

SEQ ID NO: 843146 - RNA, 19 nt, Homo sapiens
  misc_RNA (1)...(19): siRNA sense strand
caacuagauggcuaugaua

SEQ ID NO: 843147 - RNA, 19 nt, Homo sapiens
  misc_RNA (1)...(19): siRNA sense strand
gcauagcccacuucugaaa

SEQ ID NO: 843148 - RNA, 19 nt, Homo sapiens
  misc_RNA (1)...(19): siRNA sense strand
caacagcauuaucauuuac

SEQ ID NO: 843149 - RNA, 19 nt, Homo sapiens
  misc_RNA (1)...(19): siRNA sense strand
cuaucaagcuguucauuca

SEQ ID NO: 843150 - RNA, 19 nt, Homo sapiens
  misc_RNA (1)...(19): siRNA sense strand
aagaggauuugauaccuuu

SEQ ID NO: 843151 - RNA, 19 nt, Homo sapiens
  misc_RNA (1)...(19): siRNA sense strand
gcauuaucauuuacucuuc

SEQ ID NO: 843152 - RNA, 19 nt, Homo sapiens
  misc_RNA (1)...(19): siRNA sense strand
ucucagagguagcaaagga

SEQ ID NO: 843153 - RNA, 19 nt, Homo sapiens
  misc_RNA (1)...(19): siRNA sense strand
caacauaaacaggagaaga

SEQ ID NO: 843154 - RNA, 19 nt, Homo sapiens
  misc_RNA (1)...(19): siRNA sense strand
acaccggacuucaacauuc

SEQ ID NO: 843155 - RNA, 19 nt, Homo sapiens
  misc_RNA (1)...(19): siRNA sense strand
gaugaggacauucaacuag

SEQ ID NO: 843156 - RNA, 19 nt, Homo sapiens
  misc_RNA (1)...(19): siRNA sense strand
gaagauaugcugccaugcu

SEQ ID NO: 843157 - RNA, 19 nt, Homo sapiens
  misc_RNA (1)...(19): siRNA sense strand
ggcauauacuccacacaga

SEQ ID NO: 843158 - RNA, 19 nt, Homo sapiens
  misc_RNA (1)...(19): siRNA sense strand
gcaauccagucagccauca

SEQ ID NO: 843159 - RNA, 19 nt, Homo sapiens
  misc_RNA (1)...(19): siRNA sense strand
ucuaacagguauccaggaa

SEQ ID NO: 843160 - RNA, 19 nt, Homo sapiens
  misc_RNA (1)...(19): siRNA sense strand
gcucuaaagacuuaugguu

SEQ ID NO: 843161 - RNA, 19 nt, Homo sapiens
  misc_RNA (1)...(19): siRNA sense strand
cuacccaacccaacuguuu

SEQ ID NO: 843162 - RNA, 19 nt, Homo sapiens
  misc_RNA (1)...(19): siRNA sense strand
ucacagccgacccauauga

SEQ ID NO: 843163 - RNA, 19 nt, Homo sapiens
  misc_RNA (1)...(19): siRNA sense strand
gcuaugacuuguaugaaaa

SEQ ID NO: 843164 - RNA, 19 nt, Homo sapiens
  misc_RNA (1)...(19): siRNA sense strand
gaaugcaugcccaccagaa

SEQ ID NO: 843165 - RNA, 19 nt, Homo sapiens
  misc_RNA (1)...(19): siRNA sense strand
gauuuagagauguggguua

SEQ ID NO: 843166 - RNA, 19 nt, Homo sapiens
  misc_RNA (1)...(19): siRNA sense strand
cggaucaccuugucaacug

SEQ ID NO: 843167 - RNA, 19 nt, Homo sapiens
  misc_RNA (1)...(19): siRNA sense strand
gaaccgguggcacaaugaa

SEQ ID NO: 843168 - RNA, 19 nt, Homo sapiens
  misc_RNA (1)...(19): siRNA sense strand
cuggaaagaugcuagcaau

SEQ ID NO: 843169 - RNA, 19 nt, Homo sapiens
  misc_RNA (1)...(19): siRNA sense strand
guacagcaaaucuuagcuu

SEQ ID NO: 843170 - RNA, 19 nt, Homo sapiens
  misc_RNA (1)...(19): siRNA sense strand
ggauuacuauacacacuac

SEQ ID NO: 843171 - RNA, 19 nt, Homo sapiens
  misc_RNA (1)...(19): siRNA sense strand
uccaggagucaguuuauua

SEQ ID NO: 843172 - RNA, 19 nt, Homo sapiens
  misc_RNA (1)...(19): siRNA sense strand
acagauugaugaggacauu

SEQ ID NO: 843173 - RNA, 19 nt, Homo sapiens
  misc_RNA (1)...(19): siRNA sense strand
ugccaugcuuuccugcuua

SEQ ID NO: 843174 - RNA, 19 nt, Homo sapiens
  misc_RNA (1)...(19): siRNA sense strand
gauguguggcuaugacuug

SEQ ID NO: 843175 - RNA, 19 nt, Homo sapiens
  misc_RNA (1)...(19): siRNA sense strand
aagauaugcugccaugcuu

SEQ ID NO: 843176 - RNA, 19 nt, Homo sapiens
  misc_RNA (1)...(19): siRNA sense strand
gguagcaaaggaacauauu

SEQ ID NO: 843177 - RNA, 19 nt, Homo sapiens
  misc_RNA (1)...(19): siRNA sense strand
gauacacaccggacuucaa

SEQ ID NO: 843178 - RNA, 19 nt, Homo sapiens
  misc_RNA (1)...(19): siRNA sense strand
ccgaaccgguggcacaaug

SEQ ID NO: 843179 - RNA, 19 nt, Homo sapiens
  misc_RNA (1)...(19): siRNA sense strand
gcauauacuccacacagau

SEQ ID NO: 843180 - RNA, 19 nt, Homo sapiens
  misc_RNA (1)...(19): siRNA sense strand
ugacaguccugggaugugu

SEQ ID NO: 843181 - RNA, 19 nt, Homo sapiens
  misc_RNA (1)...(19): siRNA sense strand
gggauuacuauacacacua

SEQ ID NO: 843182 - RNA, 19 nt, Homo sapiens
  misc_RNA (1)...(19): siRNA sense strand
gauaugcugccaugcuuuc

SEQ ID NO: 843183 - RNA, 19 nt, Homo sapiens
  misc_RNA (1)...(19): siRNA sense strand
gggaacaguguguaaggaa

SEQ ID NO: 843184 - RNA, 19 nt, Homo sapiens
  misc_RNA (1)...(19): siRNA sense strand
guagcaaaggaacauauug

SEQ ID NO: 843185 - RNA, 19 nt, Homo sapiens
  misc_RNA (1)...(19): siRNA sense strand
ugaggacauucaacuagau

SEQ ID NO: 843186 - RNA, 19 nt, Homo sapiens
  misc_RNA (1)...(19): siRNA sense strand
cacuaccgauccauuauca

SEQ ID NO: 843187 - RNA, 19 nt, Homo sapiens
  misc_RNA (1)...(19): siRNA sense strand
acaaugaacggaucaccuu

SEQ ID NO: 843188 - RNA, 19 nt, Homo sapiens
  misc_RNA (1)...(19): siRNA sense strand
gcugaaggacagauugaug

SEQ ID NO: 843189 - RNA, 19 nt, Homo sapiens
  misc_RNA (1)...(19): siRNA sense strand
caaaucuuagcuucccaua

SEQ ID NO: 843190 - RNA, 19 nt, Homo sapiens
  misc_RNA (1)...(19): siRNA sense strand
uaaggaacuugugcacauc

SEQ ID NO: 843191 - RNA, 19 nt, Homo sapiens
  misc_RNA (1)...(19): siRNA sense strand
gaacaguguguaaggaacu

SEQ ID NO: 843192 - RNA, 19 nt, Homo sapiens
  misc_RNA (1)...(19): siRNA sense strand
ccgauccauuaucaacaua

SEQ ID NO: 843193 - RNA, 19 nt, Homo sapiens
  misc_RNA (1)...(19): siRNA sense strand
uaaacuggagaacuacuau

SEQ ID NO: 843194 - RNA, 19 nt, Homo sapiens
  misc_RNA (1)...(19): siRNA sense strand
gccugugucuguccuggaa

SEQ ID NO: 843195 - RNA, 19 nt, Homo sapiens
  misc_RNA (1)...(19): siRNA sense strand
gcagcaggcuaugggaucu

SEQ ID NO: 843196 - RNA, 19 nt, Homo sapiens
  misc_RNA (1)...(19): siRNA sense strand
ucugggagaccauaaguga

SEQ ID NO: 843197 - RNA, 19 nt, Homo sapiens
  misc_RNA (1)...(19): siRNA sense strand
acaagggaacaguguguaa

SEQ ID NO: 843198 - RNA, 19 nt, Homo sapiens
  misc_RNA (1)...(19): siRNA sense strand
cauauacuccacacagaug

SEQ ID NO: 843199 - RNA, 19 nt, Homo sapiens
  misc_RNA (1)...(19): siRNA sense strand
uacccaacccaacuguuua

SEQ ID NO: 843200 - RNA, 19 nt, Homo sapiens
  misc_RNA (1)...(19): siRNA sense strand
accagaagaggauuugaua

SEQ ID NO: 843201 - RNA, 19 nt, Homo sapiens
  misc_RNA (1)...(19): siRNA sense strand
aaacaccuacucuugacaa

SEQ ID NO: 843202 - RNA, 19 nt, Homo sapiens
  misc_RNA (1)...(19): siRNA sense strand
aaacaagggaacagugugu

SEQ ID NO: 843203 - RNA, 19 nt, Homo sapiens
  misc_RNA (1)...(19): siRNA sense strand
caacgugacauuggcucua

SEQ ID NO: 843204 - RNA, 19 nt, Homo sapiens
  misc_RNA (1)...(19): siRNA sense strand
caaucaacaacgugacauu

SEQ ID NO: 843205 - RNA, 19 nt, Homo sapiens
  misc_RNA (1)...(19): siRNA sense strand
ugucuguccuggaaagaug

SEQ ID NO: 843206 - RNA, 19 nt, Homo sapiens
  misc_RNA (1)...(19): siRNA sense strand
guguggcuaugacuuguau

SEQ ID NO: 843207 - RNA, 19 nt, Homo sapiens
  misc_RNA (1)...(19): siRNA sense strand
aaauggcacuuggguuuua

SEQ ID NO: 843208 - RNA, 19 nt, Homo sapiens
  misc_RNA (1)...(19): siRNA sense strand
cugaaggacagauugauga

SEQ ID NO: 843209 - RNA, 19 nt, Homo sapiens
  misc_RNA (1)...(19): siRNA sense strand
uagaugaagcaaucaacaa

SEQ ID NO: 843210 - RNA, 19 nt, Homo sapiens
  misc_RNA (1)...(19): siRNA sense strand
auaaacaggagaagauaug

SEQ ID NO: 843211 - RNA, 19 nt, Homo sapiens
  misc_RNA (1)...(19): siRNA sense strand
cauaaacaggagaagauau

SEQ ID NO: 843212 - RNA, 19 nt, Homo sapiens
  misc_RNA (1)...(19): siRNA sense strand
acauaaacaggagaagaua

SEQ ID NO: 843213 - RNA, 19 nt, Homo sapiens
  misc_RNA (1)...(19): siRNA sense strand
gauaucugggagaccauaa

SEQ ID NO: 843214 - RNA, 19 nt, Homo sapiens
  misc_RNA (1)...(19): siRNA sense strand
aacgugacauuggcucuaa

SEQ ID NO: 843215 - RNA, 19 nt, Homo sapiens
  misc_RNA (1)...(19): siRNA sense strand
uagcagagcugaugaucua

SEQ ID NO: 843216 - RNA, 19 nt, Homo sapiens
  misc_RNA (1)...(19): siRNA sense strand
caguauaagugccauguua

SEQ ID NO: 843217 - RNA, 19 nt, Homo sapiens
  misc_RNA (1)...(19): siRNA sense strand
gcacggugguuccauauuc

SEQ ID NO: 843218 - RNA, 19 nt, Homo sapiens
  misc_RNA (1)...(19): siRNA sense strand
ggcacugucugcauucuua

SEQ ID NO: 843219 - RNA, 19 nt, Homo sapiens
  misc_RNA (1)...(19): siRNA sense strand
caagcacggugguuccaua

SEQ ID NO: 843220 - RNA, 19 nt, Homo sapiens
  misc_RNA (1)...(19): siRNA sense strand
gagacugguuugaauaugu

SEQ ID NO: 843221 - RNA, 19 nt, Homo sapiens
  misc_RNA (1)...(19): siRNA sense strand
gagcugaugaucuacguuu

SEQ ID NO: 843222 - RNA, 19 nt, Homo sapiens
  misc_RNA (1)...(19): siRNA sense strand
caucugcccaucaguauaa

SEQ ID NO: 843223 - RNA, 19 nt, Homo sapiens
  misc_RNA (1)...(19): siRNA sense strand
ggucaucugcccaucagua

SEQ ID NO: 843224 - RNA, 19 nt, Homo sapiens
  misc_RNA (1)...(19): siRNA sense strand
ggagacugguuugaauaug

SEQ ID NO: 843225 - RNA, 19 nt, Homo sapiens
  misc_RNA (1)...(19): siRNA sense strand
guuuuggacuugucuauua

SEQ ID NO: 843226 - RNA, 19 nt, Homo sapiens
  misc_RNA (1)...(19): siRNA sense strand
gucagugucuucuccaaug

SEQ ID NO: 843227 - RNA, 19 nt, Homo sapiens
  misc_RNA (1)...(19): siRNA sense strand
agacugguuugaauauguu

SEQ ID NO: 843228 - RNA, 19 nt, Homo sapiens
  misc_RNA (1)...(19): siRNA sense strand
uaacugugcugagccaagu

SEQ ID NO: 843229 - RNA, 19 nt, Homo sapiens
  misc_RNA (1)...(19): siRNA sense strand
cuucaugguuugcucagaa

SEQ ID NO: 843230 - RNA, 19 nt, Homo sapiens
  misc_RNA (1)...(19): siRNA sense strand
aagcaggaguggucauuca

SEQ ID NO: 843231 - RNA, 19 nt, Homo sapiens
  misc_RNA (1)...(19): siRNA sense strand
gcaggaaugccuacauaac

SEQ ID NO: 843232 - RNA, 19 nt, Homo sapiens
  misc_RNA (1)...(19): siRNA sense strand
caggaaugccuacauaaca

SEQ ID NO: 843233 - RNA, 19 nt, Homo sapiens
  misc_RNA (1)...(19): siRNA sense strand
cugcacagcuuacgaagac

SEQ ID NO: 843234 - RNA, 19 nt, Homo sapiens
  misc_RNA (1)...(19): siRNA sense strand
ucuccaaugucaugauuca

SEQ ID NO: 843235 - RNA, 19 nt, Homo sapiens
  misc_RNA (1)...(19): siRNA sense strand
uaagugccauguuauucuc

SEQ ID NO: 843236 - RNA, 19 nt, Homo sapiens
  misc_RNA (1)...(19): siRNA sense strand
aagcaaauuugucucuuac

SEQ ID NO: 843237 - RNA, 19 nt, Homo sapiens
  misc_RNA (1)...(19): siRNA sense strand
uaaagcaggaguggucauu

SEQ ID NO: 843238 - RNA, 19 nt, Homo sapiens
  misc_RNA (1)...(19): siRNA sense strand
ggcuaguggugacaaaugu

SEQ ID NO: 843239 - RNA, 19 nt, Homo sapiens
  misc_RNA (1)...(19): siRNA sense strand
cuacuuagcagagcugaug

SEQ ID NO: 843240 - RNA, 19 nt, Homo sapiens
  misc_RNA (1)...(19): siRNA sense strand
ucucggcaaucucaggaaa

SEQ ID NO: 843241 - RNA, 19 nt, Homo sapiens
  misc_RNA (1)...(19): siRNA sense strand
ucucuuacccgaagcauag

SEQ ID NO: 843242 - RNA, 19 nt, Homo sapiens
  misc_RNA (1)...(19): siRNA sense strand
cuucuccaaugucaugauu

SEQ ID NO: 843243 - RNA, 19 nt, Homo sapiens
  misc_RNA (1)...(19): siRNA sense strand
gcaguacuguuuuggacuu

SEQ ID NO: 843244 - RNA, 19 nt, Homo sapiens
  misc_RNA (1)...(19): siRNA sense strand
guuauucucggcaaucuca

SEQ ID NO: 843245 - RNA, 19 nt, Homo sapiens
  misc_RNA (1)...(19): siRNA sense strand
ucucagugcuguggaaugg

SEQ ID NO: 843246 - RNA, 19 nt, Homo sapiens
  misc_RNA (1)...(19): siRNA sense strand
gguggcuaguggugacaaa

SEQ ID NO: 843247 - RNA, 19 nt, Homo sapiens
  misc_RNA (1)...(19): siRNA sense strand
ccacaggaucccauuugga

SEQ ID NO: 843248 - RNA, 19 nt, Homo sapiens
  misc_RNA (1)...(19): siRNA sense strand
ugucuauuauguccuuguu

SEQ ID NO: 843249 - RNA, 19 nt, Homo sapiens
  misc_RNA (1)...(19): siRNA sense strand
ucagugucuucuccaaugu

SEQ ID NO: 843250 - RNA, 19 nt, Homo sapiens
  misc_RNA (1)...(19): siRNA sense strand
uaaccacaggaucccauuu

SEQ ID NO: 843251 - RNA, 19 nt, Homo sapiens
  misc_RNA (1)...(19): siRNA sense strand
uuuggagacugguuugaau

SEQ ID NO: 843252 - RNA, 19 nt, Homo sapiens
  misc_RNA (1)...(19): siRNA sense strand
cauauucuugggaugauga

SEQ ID NO: 843253 - RNA, 19 nt, Homo sapiens
  misc_RNA (1)...(19): siRNA sense strand
guaaccacaggaucccauu

SEQ ID NO: 843254 - RNA, 19 nt, Homo sapiens
  misc_RNA (1)...(19): siRNA sense strand
uuccauggccgucaccuuu

SEQ ID NO: 843255 - RNA, 19 nt, Homo sapiens
  misc_RNA (1)...(19): siRNA sense strand
ugagccaagugccaaugga

SEQ ID NO: 843256 - RNA, 19 nt, Homo sapiens
  misc_RNA (1)...(19): siRNA sense strand
ucaucucagugcuguggaa

SEQ ID NO: 843257 - RNA, 19 nt, Homo sapiens
  misc_RNA (1)...(19): siRNA sense strand
gagccaagugccaauggau

SEQ ID NO: 843258 - RNA, 19 nt, Homo sapiens
  misc_RNA (1)...(19): siRNA sense strand
aggaaugccuacauaacag

SEQ ID NO: 843259 - RNA, 19 nt, Homo sapiens
  misc_RNA (1)...(19): siRNA sense strand
uaucagagguggagacauu

SEQ ID NO: 843260 - RNA, 19 nt, Homo sapiens
  misc_RNA (1)...(19): siRNA sense strand
caaacuagcagaacaauau

SEQ ID NO: 843261 - RNA, 19 nt, Homo sapiens
  misc_RNA (1)...(19): siRNA sense strand
ggacaaggccaacaagcua

SEQ ID NO: 843262 - RNA, 19 nt, Homo sapiens
  misc_RNA (1)...(19): siRNA sense strand
gaauauagucguuaucaga

SEQ ID NO: 843263 - RNA, 19 nt, Homo sapiens
  misc_RNA (1)...(19): siRNA sense strand
guggagacauuuagaaguu

SEQ ID NO: 843264 - RNA, 19 nt, Homo sapiens
  misc_RNA (1)...(19): siRNA sense strand
ccgacaaguuggcauaaua

SEQ ID NO: 843265 - RNA, 19 nt, Homo sapiens
  misc_RNA (1)...(19): siRNA sense strand
gagcaaauccucaauacca

SEQ ID NO: 843266 - RNA, 19 nt, Homo sapiens
  misc_RNA (1)...(19): siRNA sense strand
gaaggaccagcccacauuu

SEQ ID NO: 843267 - RNA, 19 nt, Homo sapiens
  misc_RNA (1)...(19): siRNA sense strand
gaaguuguucuuaaucaga

SEQ ID NO: 843268 - RNA, 19 nt, Homo sapiens
  misc_RNA (1)...(19): siRNA sense strand
ggagacauuuagaaguugu

SEQ ID NO: 843269 - RNA, 19 nt, Homo sapiens
  misc_RNA (1)...(19): siRNA sense strand
gcagaacaauaugaaucuu

SEQ ID NO: 843270 - RNA, 19 nt, Homo sapiens
  misc_RNA (1)...(19): siRNA sense strand
gcaaauccucaauaccaaa

SEQ ID NO: 843271 - RNA, 19 nt, Homo sapiens
  misc_RNA (1)...(19): siRNA sense strand
ggaggaguaugagcaaauc

SEQ ID NO: 843272 - RNA, 19 nt, Homo sapiens
  misc_RNA (1)...(19): siRNA sense strand
gaaauucacacaugaucag

SEQ ID NO: 843273 - RNA, 19 nt, Homo sapiens
  misc_RNA (1)...(19): siRNA sense strand
cgacaaguuggcauaauau

SEQ ID NO: 843274 - RNA, 19 nt, Homo sapiens
  misc_RNA (1)...(19): siRNA sense strand
uaugugagcgccucuuaaa

SEQ ID NO: 843275 - RNA, 19 nt, Homo sapiens
  misc_RNA (1)...(19): siRNA sense strand
ucacacaugaucagauuau

SEQ ID NO: 843276 - RNA, 19 nt, Homo sapiens
  misc_RNA (1)...(19): siRNA sense strand
agaaggaccagcccacauu

SEQ ID NO: 843277 - RNA, 19 nt, Homo sapiens
  misc_RNA (1)...(19): siRNA sense strand
ucagagguggagacauuua

SEQ ID NO: 843278 - RNA, 19 nt, Homo sapiens
  misc_RNA (1)...(19): siRNA sense strand
caacaagcuaugugucaug

SEQ ID NO: 843279 - RNA, 19 nt, Homo sapiens
  misc_RNA (1)...(19): siRNA sense strand
auucacacaugaucagauu

SEQ ID NO: 843280 - RNA, 19 nt, Homo sapiens
  misc_RNA (1)...(19): siRNA sense strand
ccaaacuagcagaacaaua

SEQ ID NO: 843281 - RNA, 19 nt, Homo sapiens
  misc_RNA (1)...(19): siRNA sense strand
gagguggagacauuuagaa

SEQ ID NO: 843282 - RNA, 19 nt, Homo sapiens
  misc_RNA (1)...(19): siRNA sense strand
aauccucaauaccaaacua

SEQ ID NO: 843283 - RNA, 19 nt, Homo sapiens
  misc_RNA (1)...(19): siRNA sense strand
uagcagaacaauaugaauc

SEQ ID NO: 843284 - RNA, 19 nt, Homo sapiens
  misc_RNA (1)...(19): siRNA sense strand
gggaggaguaugagcaaau

SEQ ID NO: 843285 - RNA, 19 nt, Homo sapiens
  misc_RNA (1)...(19): siRNA sense strand
aacaagcuaugugucauga

SEQ ID NO: 843286 - RNA, 19 nt, Homo sapiens
  misc_RNA (1)...(19): siRNA sense strand
ccaacaagcuaugugucau

SEQ ID NO: 843287 - RNA, 19 nt, Homo sapiens
  misc_RNA (1)...(19): siRNA sense strand
gccaacaagcuauguguca

SEQ ID NO: 843288 - RNA, 19 nt, Homo sapiens
  misc_RNA (1)...(19): siRNA sense strand
auaccaaacuagcagaaca

SEQ ID NO: 843289 - RNA, 19 nt, Homo sapiens
  misc_RNA (1)...(19): siRNA sense strand
aauaugugagcgccucuua

SEQ ID NO: 843290 - RNA, 19 nt, Homo sapiens
  misc_RNA (1)...(19): siRNA sense strand
cagauuaugcgacgguaug

SEQ ID NO: 843291 - RNA, 19 nt, Homo sapiens
  misc_RNA (1)...(19): siRNA sense strand
gacaaggccaacaagcuau

SEQ ID NO: 843292 - RNA, 19 nt, Homo sapiens
  misc_RNA (1)...(19): siRNA sense strand
ccaacuccggagcaaauuu

SEQ ID NO: 843293 - RNA, 19 nt, Homo sapiens
  misc_RNA (1)...(19): siRNA sense strand
aaggaccagcccacauuua

SEQ ID NO: 843294 - RNA, 19 nt, Homo sapiens
  misc_RNA (1)...(19): siRNA sense strand
uaaucagagugaagcuugu

SEQ ID NO: 843295 - RNA, 19 nt, Homo sapiens
  misc_RNA (1)...(19): siRNA sense strand
caauaccaaacuagcagaa

SEQ ID NO: 843296 - RNA, 19 nt, Homo sapiens
  misc_RNA (1)...(19): siRNA sense strand
agcaaauccucaauaccaa

SEQ ID NO: 843297 - RNA, 19 nt, Homo sapiens
  misc_RNA (1)...(19): siRNA sense strand
aaacuagcagaacaauaug

SEQ ID NO: 843298 - RNA, 19 nt, Homo sapiens
  misc_RNA (1)...(19): siRNA sense strand
aaauucgggaggaguauga

SEQ ID NO: 843299 - RNA, 19 nt, Homo sapiens
  misc_RNA (1)...(19): siRNA sense strand
gguggagacauuuagaagu

SEQ ID NO: 843300 - RNA, 19 nt, Homo sapiens
  misc_RNA (1)...(19): siRNA sense strand
uggagacauuuagaaguug

SEQ ID NO: 843301 - RNA, 19 nt, Homo sapiens
  misc_RNA (1)...(19): siRNA sense strand
caacuccggagcaaauuuu

SEQ ID NO: 843302 - RNA, 19 nt, Homo sapiens
  misc_RNA (1)...(19): siRNA sense strand
gauaagagauuucagaaga

SEQ ID NO: 843303 - RNA, 19 nt, Homo sapiens
  misc_RNA (1)...(19): siRNA sense strand
gagaagagauuacaagaga

SEQ ID NO: 843304 - RNA, 19 nt, Homo sapiens
  misc_RNA (1)...(19): siRNA sense strand
gcuauggucuuuagaauug

SEQ ID NO: 843305 - RNA, 19 nt, Homo sapiens
  misc_RNA (1)...(19): siRNA sense strand
gaagagaaguaucguuugu

SEQ ID NO: 843306 - RNA, 19 nt, Homo sapiens
  misc_RNA (1)...(19): siRNA sense strand
gaacacuuaucaagccuaa

SEQ ID NO: 843307 - RNA, 19 nt, Homo sapiens
  misc_RNA (1)...(19): siRNA sense strand
ggagagaacaagcauauuu

SEQ ID NO: 843308 - RNA, 19 nt, Homo sapiens
  misc_RNA (1)...(19): siRNA sense strand
gaaaauggcuaaagagcua

SEQ ID NO: 843309 - RNA, 19 nt, Homo sapiens
  misc_RNA (1)...(19): siRNA sense strand
ucaaguaucugucugagaa

SEQ ID NO: 843310 - RNA, 19 nt, Homo sapiens
  misc_RNA (1)...(19): siRNA sense strand
ugauguaccuauucucuua

SEQ ID NO: 843311 - RNA, 19 nt, Homo sapiens
  misc_RNA (1)...(19): siRNA sense strand
uaaaucaaguccucagaaa

SEQ ID NO: 843312 - RNA, 19 nt, Homo sapiens
  misc_RNA (1)...(19): siRNA sense strand
gaagcaccuuugaacauuu

SEQ ID NO: 843313 - RNA, 19 nt, Homo sapiens
  misc_RNA (1)...(19): siRNA sense strand
gaaagcaacagucaaguau

SEQ ID NO: 843314 - RNA, 19 nt, Homo sapiens
  misc_RNA (1)...(19): siRNA sense strand
gaacauuagucaugacaag

SEQ ID NO: 843315 - RNA, 19 nt, Homo sapiens
  misc_RNA (1)...(19): siRNA sense strand
gaaaggaaguuggaaggau

SEQ ID NO: 843316 - RNA, 19 nt, Homo sapiens
  misc_RNA (1)...(19): siRNA sense strand
caguugacauuaccaauuu

SEQ ID NO: 843317 - RNA, 19 nt, Homo sapiens
  misc_RNA (1)...(19): siRNA sense strand
agaaaugggucuuagauuc

SEQ ID NO: 843318 - RNA, 19 nt, Homo sapiens
  misc_RNA (1)...(19): siRNA sense strand
ugacaagcaugccaucuga

SEQ ID NO: 843319 - RNA, 19 nt, Homo sapiens
  misc_RNA (1)...(19): siRNA sense strand
gcugcuggguucucucuua

SEQ ID NO: 843320 - RNA, 19 nt, Homo sapiens
  misc_RNA (1)...(19): siRNA sense strand
gaagaagcccuaagguguu

SEQ ID NO: 843321 - RNA, 19 nt, Homo sapiens
  misc_RNA (1)...(19): siRNA sense strand
gaagaaagcaacagucaag

SEQ ID NO: 843322 - RNA, 19 nt, Homo sapiens
  misc_RNA (1)...(19): siRNA sense strand
uacaagagaugaaggagaa

SEQ ID NO: 843323 - RNA, 19 nt, Homo sapiens
  misc_RNA (1)...(19): siRNA sense strand
ucacucaccucgauaaauc

SEQ ID NO: 843324 - RNA, 19 nt, Homo sapiens
  misc_RNA (1)...(19): siRNA sense strand
ugauuuaacuccuuuggaa

SEQ ID NO: 843325 - RNA, 19 nt, Homo sapiens
  misc_RNA (1)...(19): siRNA sense strand
auacuuugcugguggcuua

SEQ ID NO: 843326 - RNA, 19 nt, Homo sapiens
  misc_RNA (1)...(19): siRNA sense strand
ggauacaguggaaguguua

SEQ ID NO: 843327 - RNA, 19 nt, Homo sapiens
  misc_RNA (1)...(19): siRNA sense strand
guaugcagcccaaagauuu

SEQ ID NO: 843328 - RNA, 19 nt, Homo sapiens
  misc_RNA (1)...(19): siRNA sense strand
gaagagauuacaagagaug

SEQ ID NO: 843329 - RNA, 19 nt, Homo sapiens
  misc_RNA (1)...(19): siRNA sense strand
gcuggguucucucuuauga

SEQ ID NO: 843330 - RNA, 19 nt, Homo sapiens
  misc_RNA (1)...(19): siRNA sense strand
ugaagcaccuuugaacauu

SEQ ID NO: 843331 - RNA, 19 nt, Homo sapiens
  misc_RNA (1)...(19): siRNA sense strand
ugacucaugugacggcuuu

SEQ ID NO: 843332 - RNA, 19 nt, Homo sapiens
  misc_RNA (1)...(19): siRNA sense strand
gaaagaagaaagcaacagu

SEQ ID NO: 843333 - RNA, 19 nt, Homo sapiens
  misc_RNA (1)...(19): siRNA sense strand
acaagaacauuagucauga

SEQ ID NO: 843334 - RNA, 19 nt, Homo sapiens
  misc_RNA (1)...(19): siRNA sense strand
gagagaacaagcauauuug

SEQ ID NO: 843335 - RNA, 19 nt, Homo sapiens
  misc_RNA (1)...(19): siRNA sense strand
agaauugggucacuggauu

SEQ ID NO: 843336 - RNA, 19 nt, Homo sapiens
  misc_RNA (1)...(19): siRNA sense strand
aaucaaguccucagaaauu

SEQ ID NO: 843337 - RNA, 19 nt, Homo sapiens
  misc_RNA (1)...(19): siRNA sense strand
cgaacugucucaccacuuc

SEQ ID NO: 843338 - RNA, 19 nt, Homo sapiens
  misc_RNA (1)...(19): siRNA sense strand
gaugaugauuuaacuccuu

SEQ ID NO: 843339 - RNA, 19 nt, Homo sapiens
  misc_RNA (1)...(19): siRNA sense strand
ucacuuguauugaaagcaa

SEQ ID NO: 843340 - RNA, 19 nt, Homo sapiens
  misc_RNA (1)...(19): siRNA sense strand
gagaaaugggucuuagauu

SEQ ID NO: 843341 - RNA, 19 nt, Homo sapiens
  misc_RNA (1)...(19): siRNA sense strand
guguauuucuucacuugua

SEQ ID NO: 843342 - RNA, 19 nt, Homo sapiens
  misc_RNA (1)...(19): siRNA sense strand
gguuguggauaaauugaaa

SEQ ID NO: 843343 - RNA, 19 nt, Homo sapiens
  misc_RNA (1)...(19): siRNA sense strand
caaguaacucucuguguga

SEQ ID NO: 843344 - RNA, 19 nt, Homo sapiens
  misc_RNA (1)...(19): siRNA sense strand
ggagacgucuacagaagag

SEQ ID NO: 843345 - RNA, 19 nt, Homo sapiens
  misc_RNA (1)...(19): siRNA sense strand
gagaacaagcauauuugaa

SEQ ID NO: 843346 - RNA, 19 nt, Homo sapiens
  misc_RNA (1)...(19): siRNA sense strand
aaggaaagguauucagaga

SEQ ID NO: 843347 - RNA, 19 nt, Homo sapiens
  misc_RNA (1)...(19): siRNA sense strand
gaaaucaggaaaggaaguu

SEQ ID NO: 843348 - RNA, 19 nt, Homo sapiens
  misc_RNA (1)...(19): siRNA sense strand
gaauugggucacuggauuu

SEQ ID NO: 843349 - RNA, 19 nt, Homo sapiens
  misc_RNA (1)...(19): siRNA sense strand
ccagaacaguugacauuac

SEQ ID NO: 843350 - RNA, 19 nt, Homo sapiens
  misc_RNA (1)...(19): siRNA sense strand
caguugagcugcagaaguc

SEQ ID NO: 843351 - RNA, 19 nt, Homo sapiens
  misc_RNA (1)...(19): siRNA sense strand
aaagugauguguguauuuc

SEQ ID NO: 843352 - RNA, 19 nt, Homo sapiens
  misc_RNA (1)...(19): siRNA sense strand
acacuuaucaagccuaauu

SEQ ID NO: 843353 - RNA, 19 nt, Homo sapiens
  misc_RNA (1)...(19): siRNA sense strand
uauauacucccacaauuga

SEQ ID NO: 843354 - RNA, 19 nt, Homo sapiens
  misc_RNA (1)...(19): siRNA sense strand
ugaaugugcugcugggaau

SEQ ID NO: 843355 - RNA, 19 nt, Homo sapiens
  misc_RNA (1)...(19): siRNA sense strand
gaacaguugacauuaccaa

SEQ ID NO: 843356 - RNA, 19 nt, Homo sapiens
  misc_RNA (1)...(19): siRNA sense strand
gaaggagagaacaagcaua

SEQ ID NO: 843357 - RNA, 19 nt, Homo sapiens
  misc_RNA (1)...(19): siRNA sense strand
guaccuauucucuuauuug

SEQ ID NO: 843358 - RNA, 19 nt, Homo sapiens
  misc_RNA (1)...(19): siRNA sense strand
gaaucuuccuccugaaucu

SEQ ID NO: 843359 - RNA, 19 nt, Homo sapiens
  misc_RNA (1)...(19): siRNA sense strand
cugauaaucuuaaggaaag

SEQ ID NO: 843360 - RNA, 19 nt, Homo sapiens
  misc_RNA (1)...(19): siRNA sense strand
uggguucucucuuaugauu

SEQ ID NO: 843361 - RNA, 19 nt, Homo sapiens
  misc_RNA (1)...(19): siRNA sense strand
auucagcagucucaugaua

SEQ ID NO: 843362 - RNA, 19 nt, Homo sapiens
  misc_RNA (1)...(19): siRNA sense strand
agaaagcaacagucaagua

SEQ ID NO: 843363 - RNA, 19 nt, Homo sapiens
  misc_RNA (1)...(19): siRNA sense strand
ucguuugucuccuaccuua

SEQ ID NO: 843364 - RNA, 19 nt, Homo sapiens
  misc_RNA (1)...(19): siRNA sense strand
gauacuuuguguucagaug

SEQ ID NO: 843365 - RNA, 19 nt, Homo sapiens
  misc_RNA (1)...(19): siRNA sense strand
gaacauuucacgugauacu

SEQ ID NO: 843366 - RNA, 19 nt, Homo sapiens
  misc_RNA (1)...(19): siRNA sense strand
aggacaugaugaugauuua

SEQ ID NO: 843367 - RNA, 19 nt, Homo sapiens
  misc_RNA (1)...(19): siRNA sense strand
ucagcagucucaugauaau

SEQ ID NO: 843368 - RNA, 19 nt, Homo sapiens
  misc_RNA (1)...(19): siRNA sense strand
aaacuuacccggaggauac

SEQ ID NO: 843369 - RNA, 19 nt, Homo sapiens
  misc_RNA (1)...(19): siRNA sense strand
caucaagcccugcucaguu

SEQ ID NO: 843370 - RNA, 19 nt, Homo sapiens
  misc_RNA (1)...(19): siRNA sense strand
aaucucagcugccaucaag

SEQ ID NO: 843371 - RNA, 19 nt, Homo sapiens
  misc_RNA (1)...(19): siRNA sense strand
caggagacguuugaagaga

SEQ ID NO: 843372 - RNA, 19 nt, Homo sapiens
  misc_RNA (1)...(19): siRNA sense strand
ggaaggauccauuaaugac

SEQ ID NO: 843373 - RNA, 19 nt, Homo sapiens
  misc_RNA (1)...(19): siRNA sense strand
gccaagcucugugaacuag

SEQ ID NO: 843374 - RNA, 19 nt, Homo sapiens
  misc_RNA (1)...(19): siRNA sense strand
ccacuucgcacccugaaug

SEQ ID NO: 843375 - RNA, 19 nt, Homo sapiens
  misc_RNA (1)...(19): siRNA sense strand
ccaacaagaacauuaguca

SEQ ID NO: 843376 - RNA, 19 nt, Homo sapiens
  misc_RNA (1)...(19): siRNA sense strand
uagacaggcugggaaagaa

SEQ ID NO: 843377 - RNA, 19 nt, Homo sapiens
  misc_RNA (1)...(19): siRNA sense strand
gcccuaagguguuguagac

SEQ ID NO: 843378 - RNA, 19 nt, Homo sapiens
  misc_RNA (1)...(19): siRNA sense strand
ggagacguuugaagagaag

SEQ ID NO: 843379 - RNA, 19 nt, Homo sapiens
  misc_RNA (1)...(19): siRNA sense strand
ucuccuaccuuaucuucaa

SEQ ID NO: 843380 - RNA, 19 nt, Homo sapiens
  misc_RNA (1)...(19): siRNA sense strand
aagcaacagucaaguaucu

SEQ ID NO: 843381 - RNA, 19 nt, Homo sapiens
  misc_RNA (1)...(19): siRNA sense strand
gugcuauggucuuuagaau

SEQ ID NO: 843382 - RNA, 19 nt, Homo sapiens
  misc_RNA (1)...(19): siRNA sense strand
ggacaugaugaugauuuaa

SEQ ID NO: 843383 - RNA, 19 nt, Homo sapiens
  misc_RNA (1)...(19): siRNA sense strand
gaaggauccauuaaugaca

SEQ ID NO: 843384 - RNA, 19 nt, Homo sapiens
  misc_RNA (1)...(19): siRNA sense strand
agaagcgguuggucugaaa

SEQ ID NO: 843385 - RNA, 19 nt, Homo sapiens
  misc_RNA (1)...(19): siRNA sense strand
guagacaggcugggaaaga

SEQ ID NO: 843386 - RNA, 19 nt, Homo sapiens
  misc_RNA (1)...(19): siRNA sense strand
gagaaucuuccuccugaau

SEQ ID NO: 843387 - RNA, 19 nt, Homo sapiens
  misc_RNA (1)...(19): siRNA sense strand
guggaaaucaggaaaggaa

SEQ ID NO: 843388 - RNA, 19 nt, Homo sapiens
  misc_RNA (1)...(19): siRNA sense strand
caagcucugugaacuaguc

SEQ ID NO: 843389 - RNA, 19 nt, Homo sapiens
  misc_RNA (1)...(19): siRNA sense strand
aaagccaacaagaacauua

SEQ ID NO: 843390 - RNA, 19 nt, Homo sapiens
  misc_RNA (1)...(19): siRNA sense strand
gaaaagcacacagaacaaa

SEQ ID NO: 843391 - RNA, 19 nt, Homo sapiens
  misc_RNA (1)...(19): siRNA sense strand
caaaaggacaugaugauga

SEQ ID NO: 843392 - RNA, 19 nt, Homo sapiens
  misc_RNA (1)...(19): siRNA sense strand
uuaccaauuucacagcaaa

SEQ ID NO: 843393 - RNA, 19 nt, Homo sapiens
  misc_RNA (1)...(19): siRNA sense strand
ggaaaggaaguuggaagga

SEQ ID NO: 843394 - RNA, 19 nt, Homo sapiens
  misc_RNA (1)...(19): siRNA sense strand
gcugguggcuuacacucau

SEQ ID NO: 843395 - RNA, 19 nt, Homo sapiens
  misc_RNA (1)...(19): siRNA sense strand
gaggagccguucgaacugu

SEQ ID NO: 843396 - RNA, 19 nt, Homo sapiens
  misc_RNA (1)...(19): siRNA sense strand
caaagguaccacuuccaaa

SEQ ID NO: 843397 - RNA, 19 nt, Homo sapiens
  misc_RNA (1)...(19): siRNA sense strand
guguguauuucuucacuug

SEQ ID NO: 843398 - RNA, 19 nt, Homo sapiens
  misc_RNA (1)...(19): siRNA sense strand
ggaagaaauaaacuugcaa

SEQ ID NO: 843399 - RNA, 19 nt, Homo sapiens
  misc_RNA (1)...(19): siRNA sense strand
gaaaugggucuuagauucc

SEQ ID NO: 843400 - RNA, 19 nt, Homo sapiens
  misc_RNA (1)...(19): siRNA sense strand
ggcaugauguuuuagauga

SEQ ID NO: 843401 - RNA, 19 nt, Homo sapiens
  misc_RNA (1)...(19): siRNA sense strand
agagaaguaucguuugucu

SEQ ID NO: 843402 - RNA, 19 nt, Homo sapiens
  misc_RNA (1)...(19): siRNA sense strand
uuccacagauucuucuuua

SEQ ID NO: 843403 - RNA, 19 nt, Homo sapiens
  misc_RNA (1)...(19): siRNA sense strand
uuacaccaaucaagagaaa

SEQ ID NO: 843404 - RNA, 19 nt, Homo sapiens
  misc_RNA (1)...(19): siRNA sense strand
gagaaaaccaggaccuuua

SEQ ID NO: 843405 - RNA, 19 nt, Homo sapiens
  misc_RNA (1)...(19): siRNA sense strand
gcaagucugggaacaaguu

SEQ ID NO: 843406 - RNA, 19 nt, Homo sapiens
  misc_RNA (1)...(19): siRNA sense strand
gaauucaaccucaccacuu

SEQ ID NO: 843407 - RNA, 19 nt, Homo sapiens
  misc_RNA (1)...(19): siRNA sense strand
gcucugaaagcccguauga

SEQ ID NO: 843408 - RNA, 19 nt, Homo sapiens
  misc_RNA (1)...(19): siRNA sense strand
gcagagauuuccaguaccu

SEQ ID NO: 843409 - RNA, 19 nt, Homo sapiens
  misc_RNA (1)...(19): siRNA sense strand
acagugugcugaacauguu

SEQ ID NO: 843410 - RNA, 19 nt, Homo sapiens
  misc_RNA (1)...(19): siRNA sense strand
gagcaaguccgcugcaagu

SEQ ID NO: 843411 - RNA, 19 nt, Homo sapiens
  misc_RNA (1)...(19): siRNA sense strand
aauucaaccucaccacuuu

SEQ ID NO: 843412 - RNA, 19 nt, Homo sapiens
  misc_RNA (1)...(19): siRNA sense strand
ggacagagucauggaggaa

SEQ ID NO: 843413 - RNA, 19 nt, Homo sapiens
  misc_RNA (1)...(19): siRNA sense strand
aggcagagauuuccaguac

SEQ ID NO: 843414 - RNA, 19 nt, Homo sapiens
  misc_RNA (1)...(19): siRNA sense strand
ggaucugcuugauguguug

SEQ ID NO: 843415 - RNA, 19 nt, Homo sapiens
  misc_RNA (1)...(19): siRNA sense strand
acagagucauggaggaauu

SEQ ID NO: 843416 - RNA, 19 nt, Homo sapiens
  misc_RNA (1)...(19): siRNA sense strand
uuucagagguggacagagu

SEQ ID NO: 843417 - RNA, 19 nt, Homo sapiens
  misc_RNA (1)...(19): siRNA sense strand
guggauggguuugaagaug

SEQ ID NO: 843418 - RNA, 19 nt, Homo sapiens
  misc_RNA (1)...(19): siRNA sense strand
cuaccaggauccuucuuuc

SEQ ID NO: 843419 - RNA, 19 nt, Homo sapiens
  misc_RNA (1)...(19): siRNA sense strand
ugaccuccuuccacagauu

SEQ ID NO: 843420 - RNA, 19 nt, Homo sapiens
  misc_RNA (1)...(19): siRNA sense strand
ggaccuuuauugggcuuga

SEQ ID NO: 843421 - RNA, 19 nt, Homo sapiens
  misc_RNA (1)...(19): siRNA sense strand
cacagauucuucuuuacug

SEQ ID NO: 843422 - RNA, 19 nt, Homo sapiens
  misc_RNA (1)...(19): siRNA sense strand
gcaaguccgcugcaagucu

SEQ ID NO: 843423 - RNA, 19 nt, Homo sapiens
  misc_RNA (1)...(19): siRNA sense strand
ccacagauucuucuuuacu

SEQ ID NO: 843424 - RNA, 19 nt, Homo sapiens
  misc_RNA (1)...(19): siRNA sense strand
aaucguggauggguuugaa

SEQ ID NO: 843425 - RNA, 19 nt, Homo sapiens
  misc_RNA (1)...(19): siRNA sense strand
gccaaccagguaaagauuu

SEQ ID NO: 843426 - RNA, 19 nt, Homo sapiens
  misc_RNA (1)...(19): siRNA sense strand
gacagugugcugaacaugu

SEQ ID NO: 843427 - RNA, 19 nt, Homo sapiens
  misc_RNA (1)...(19): siRNA sense strand
ggcaaucguggauggguuu

SEQ ID NO: 843428 - RNA, 19 nt, Homo sapiens
  misc_RNA (1)...(19): siRNA sense strand
ggccacccacgucuaugua

SEQ ID NO: 843429 - RNA, 19 nt, Homo sapiens
  misc_RNA (1)...(19): siRNA sense strand
caaccucaccacuuucuac

SEQ ID NO: 843430 - RNA, 19 nt, Homo sapiens
  misc_RNA (1)...(19): siRNA sense strand
ugguaaggaugaagguguu

SEQ ID NO: 843431 - RNA, 19 nt, Homo sapiens
  misc_RNA (1)...(19): siRNA sense strand
uggaucugcuugauguguu

SEQ ID NO: 843432 - RNA, 19 nt, Homo sapiens
  misc_RNA (1)...(19): siRNA sense strand
gaagaugacagcacaaaac

SEQ ID NO: 843433 - RNA, 19 nt, Homo sapiens
  misc_RNA (1)...(19): siRNA sense strand
aaaccaggaccuuuauugg

SEQ ID NO: 843434 - RNA, 19 nt, Homo sapiens
  misc_RNA (1)...(19): siRNA sense strand
uaugaccuccuuccacaga

SEQ ID NO: 843435 - RNA, 19 nt, Homo sapiens
  misc_RNA (1)...(19): siRNA sense strand
cucgaugccuuugaaguga

SEQ ID NO: 843436 - RNA, 19 nt, Homo sapiens
  misc_RNA (1)...(19): siRNA sense strand
ugcaggaacuacaggcaau

SEQ ID NO: 843437 - RNA, 19 nt, Homo sapiens
  misc_RNA (1)...(19): siRNA sense strand
uccuggaccugguuucaga

SEQ ID NO: 843438 - RNA, 19 nt, Homo sapiens
  misc_RNA (1)...(19): siRNA sense strand
uccuggaucugcuugaugu

SEQ ID NO: 843439 - RNA, 19 nt, Homo sapiens
  misc_RNA (1)...(19): siRNA sense strand
gaaaaccaggaccuuuauu

SEQ ID NO: 843440 - RNA, 19 nt, Homo sapiens
  misc_RNA (1)...(19): siRNA sense strand
gggccacccacgucuaugu

SEQ ID NO: 843441 - RNA, 19 nt, Homo sapiens
  misc_RNA (1)...(19): siRNA sense strand
ucucgaugccuuugaagug

SEQ ID NO: 843442 - RNA, 19 nt, Homo sapiens
  misc_RNA (1)...(19): siRNA sense strand
gcucgugacuuucuacaga

SEQ ID NO: 843443 - RNA, 19 nt, Homo sapiens
  misc_RNA (1)...(19): siRNA sense strand
ucaucgggcucgugacuuu

SEQ ID NO: 843444 - RNA, 19 nt, Homo sapiens
  misc_RNA (1)...(19): siRNA sense strand
cuacagaauuggccauaca

SEQ ID NO: 843445 - RNA, 19 nt, Homo sapiens
  misc_RNA (1)...(19): siRNA sense strand
cauggccgcugcauuccaa

SEQ ID NO: 843446 - RNA, 19 nt, Homo sapiens
  misc_RNA (1)...(19): siRNA sense strand
gguggacgcacaugacugu

SEQ ID NO: 843447 - RNA, 19 nt, Homo sapiens
  misc_RNA (1)...(19): siRNA sense strand
ucucacucauccucaacaa

SEQ ID NO: 843448 - RNA, 19 nt, Homo sapiens
  misc_RNA (1)...(19): siRNA sense strand
ccaagaagcucaaggagua

SEQ ID NO: 843449 - RNA, 19 nt, Homo sapiens
  misc_RNA (1)...(19): siRNA sense strand
gcacuugugucugaaauga

SEQ ID NO: 843450 - RNA, 19 nt, Homo sapiens
  misc_RNA (1)...(19): siRNA sense strand
ggaggcagcugguacaaca

SEQ ID NO: 843451 - RNA, 19 nt, Homo sapiens
  misc_RNA (1)...(19): siRNA sense strand
ccaaggagauuccaaguac

SEQ ID NO: 843452 - RNA, 19 nt, Homo sapiens
  misc_RNA (1)...(19): siRNA sense strand
ggaugaaacugaaauugca

SEQ ID NO: 843453 - RNA, 19 nt, Homo sapiens
  misc_RNA (1)...(19): siRNA sense strand
gaaagaugcagucccuaaa

SEQ ID NO: 843454 - RNA, 19 nt, Homo sapiens
  misc_RNA (1)...(19): siRNA sense strand
acaaguauauccuagacaa

SEQ ID NO: 843455 - RNA, 19 nt, Homo sapiens
  misc_RNA (1)...(19): siRNA sense strand
acaagaaacuguggaugaa

SEQ ID NO: 843456 - RNA, 19 nt, Homo sapiens
  misc_RNA (1)...(19): siRNA sense strand
ggacaaguauauccuagac

SEQ ID NO: 843457 - RNA, 19 nt, Homo sapiens
  misc_RNA (1)...(19): siRNA sense strand
ggagaaauggcaccagcua

SEQ ID NO: 843458 - RNA, 19 nt, Homo sapiens
  misc_RNA (1)...(19): siRNA sense strand
gaagcgggauuuggguuga

SEQ ID NO: 843459 - RNA, 19 nt, Homo sapiens
  misc_RNA (1)...(19): siRNA sense strand
ucuccaaagucaacaagua

SEQ ID NO: 843460 - RNA, 19 nt, Homo sapiens
  misc_RNA (1)...(19): siRNA sense strand
ucagagaguguuuguauga

SEQ ID NO: 843461 - RNA, 19 nt, Homo sapiens
  misc_RNA (1)...(19): siRNA sense strand
guguuuguaugacagaaua

SEQ ID NO: 843462 - RNA, 19 nt, Homo sapiens
  misc_RNA (1)...(19): siRNA sense strand
cagaauagcacaagaaacu

SEQ ID NO: 843463 - RNA, 19 nt, Homo sapiens
  misc_RNA (1)...(19): siRNA sense strand
gacagaauagcacaagaaa

SEQ ID NO: 843464 - RNA, 19 nt, Homo sapiens
  misc_RNA (1)...(19): siRNA sense strand
gaaauggcaccagcuacaa

SEQ ID NO: 843465 - RNA, 19 nt, Homo sapiens
  misc_RNA (1)...(19): siRNA sense strand
gaauagcacaagaaacugu

SEQ ID NO: 843466 - RNA, 19 nt, Homo sapiens
  misc_RNA (1)...(19): siRNA sense strand
cgucagagaguguuuguau

SEQ ID NO: 843467 - RNA, 19 nt, Homo sapiens
  misc_RNA (1)...(19): siRNA sense strand
caaguaacccaaggagauu

SEQ ID NO: 843468 - RNA, 19 nt, Homo sapiens
  misc_RNA (1)...(19): siRNA sense strand
caacaaguacaucugugaa

SEQ ID NO: 843469 - RNA, 19 nt, Homo sapiens
  misc_RNA (1)...(19): siRNA sense strand
gcaacuaccagcagcaaca

SEQ ID NO: 843470 - RNA, 19 nt, Homo sapiens
  misc_RNA (1)...(19): siRNA sense strand
ugacagaauagcacaagaa

SEQ ID NO: 843471 - RNA, 19 nt, Homo sapiens
  misc_RNA (1)...(19): siRNA sense strand
ccucucgccucgcaaacua

SEQ ID NO: 843472 - RNA, 19 nt, Homo sapiens
  misc_RNA (1)...(19): siRNA sense strand
agaaagaugcagucccuaa

SEQ ID NO: 843473 - RNA, 19 nt, Homo sapiens
  misc_RNA (1)...(19): siRNA sense strand
gaagaacgaagggaagcaa

SEQ ID NO: 843474 - RNA, 19 nt, Homo sapiens
  misc_RNA (1)...(19): siRNA sense strand
aagcaaauacgucguccua

SEQ ID NO: 843475 - RNA, 19 nt, Homo sapiens
  misc_RNA (1)...(19): siRNA sense strand
caaacuaagcaucgucaga

SEQ ID NO: 843476 - RNA, 19 nt, Homo sapiens
  misc_RNA (1)...(19): siRNA sense strand
acaaguaacccaaggagau

SEQ ID NO: 843477 - RNA, 19 nt, Homo sapiens
  misc_RNA (1)...(19): siRNA sense strand
gagauuccaaguacacgaa

SEQ ID NO: 843478 - RNA, 19 nt, Homo sapiens
  misc_RNA (1)...(19): siRNA sense strand
caagaaacuguggaugaaa

SEQ ID NO: 843479 - RNA, 19 nt, Homo sapiens
  misc_RNA (1)...(19): siRNA sense strand
gggcacuugugucugaaau

SEQ ID NO: 843480 - RNA, 19 nt, Homo sapiens
  misc_RNA (1)...(19): siRNA sense strand
ucaacaaguacaucuguga

SEQ ID NO: 843481 - RNA, 19 nt, Homo sapiens
  misc_RNA (1)...(19): siRNA sense strand
caaggagauuccaaguaca

SEQ ID NO: 843482 - RNA, 19 nt, Homo sapiens
  misc_RNA (1)...(19): siRNA sense strand
aaaguaaagucagaauguc

SEQ ID NO: 843483 - RNA, 19 nt, Homo sapiens
  misc_RNA (1)...(19): siRNA sense strand
gaaacugaaauugcacaga

SEQ ID NO: 843484 - RNA, 19 nt, Homo sapiens
  misc_RNA (1)...(19): siRNA sense strand
aaacuguggaugaaacuga

SEQ ID NO: 843485 - RNA, 19 nt, Homo sapiens
  misc_RNA (1)...(19): siRNA sense strand
gcagcaacaggaagagaug

SEQ ID NO: 843486 - RNA, 19 nt, Homo sapiens
  misc_RNA (1)...(19): siRNA sense strand
aagaaacuguggaugaaac

SEQ ID NO: 843487 - RNA, 19 nt, Homo sapiens
  misc_RNA (1)...(19): siRNA sense strand
ggagcuccgugaccuuaac

SEQ ID NO: 843488 - RNA, 19 nt, Homo sapiens
  misc_RNA (1)...(19): siRNA sense strand
agagaguguuuguaugaca

SEQ ID NO: 843489 - RNA, 19 nt, Homo sapiens
  misc_RNA (1)...(19): siRNA sense strand
agaaauggcaccagcuaca

SEQ ID NO: 843490 - RNA, 19 nt, Homo sapiens
  misc_RNA (1)...(19): siRNA sense strand
gaagggaagcaaaauacaa

SEQ ID NO: 843491 - RNA, 19 nt, Homo sapiens
  misc_RNA (1)...(19): siRNA sense strand
gucagagaguguuuguaug

SEQ ID NO: 843492 - RNA, 19 nt, Homo sapiens
  misc_RNA (1)...(19): siRNA sense strand
gauuccaaguacacgaaga

SEQ ID NO: 843493 - RNA, 19 nt, Homo sapiens
  misc_RNA (1)...(19): siRNA sense strand
ggaguuacggagcacuuuc

SEQ ID NO: 843494 - RNA, 19 nt, Homo sapiens
  misc_RNA (1)...(19): siRNA sense strand
cccaaggagauuccaagua

SEQ ID NO: 843495 - RNA, 19 nt, Homo sapiens
  misc_RNA (1)...(19): siRNA sense strand
acaaguacaucugugaaaa

SEQ ID NO: 843496 - RNA, 19 nt, Homo sapiens
  misc_RNA (1)...(19): siRNA sense strand
uggcaccagcuacaaguaa

SEQ ID NO: 843497 - RNA, 19 nt, Homo sapiens
  misc_RNA (1)...(19): siRNA sense strand
caucugggaagcgggauuu

SEQ ID NO: 843498 - RNA, 19 nt, Homo sapiens
  misc_RNA (1)...(19): siRNA sense strand
ggguugaugaggagaaaug

SEQ ID NO: 843499 - RNA, 19 nt, Homo sapiens
  misc_RNA (1)...(19): siRNA sense strand
gaguuacggagcacuuuca

SEQ ID NO: 843500 - RNA, 19 nt, Homo sapiens
  misc_RNA (1)...(19): siRNA sense strand
gaacgaagggaagcaaaau

SEQ ID NO: 843501 - RNA, 19 nt, Homo sapiens
  misc_RNA (1)...(19): siRNA sense strand
ucagugaggaagcaaauac

SEQ ID NO: 843502 - RNA, 19 nt, Homo sapiens
  misc_RNA (1)...(19): siRNA sense strand
caaguauauccuagacaau

SEQ ID NO: 843503 - RNA, 19 nt, Homo sapiens
  misc_RNA (1)...(19): siRNA sense strand
cauggacaaguauauccua

SEQ ID NO: 843504 - RNA, 19 nt, Homo sapiens
  misc_RNA (1)...(19): siRNA sense strand
aaguauauccuagacaaug

SEQ ID NO: 843505 - RNA, 19 nt, Homo sapiens
  misc_RNA (1)...(19): siRNA sense strand
caaagucaacaaguacauc

SEQ ID NO: 843506 - RNA, 19 nt, Homo sapiens
  misc_RNA (1)...(19): siRNA sense strand
gaacagagcgucagcauau

SEQ ID NO: 843507 - RNA, 19 nt, Homo sapiens
  misc_RNA (1)...(19): siRNA sense strand
gaagagaauuuaccuccua

SEQ ID NO: 843508 - RNA, 19 nt, Homo sapiens
  misc_RNA (1)...(19): siRNA sense strand
gaugaugucuuucuugauu

SEQ ID NO: 843509 - RNA, 19 nt, Homo sapiens
  misc_RNA (1)...(19): siRNA sense strand
ugaagaaacugguaauuug

SEQ ID NO: 843510 - RNA, 19 nt, Homo sapiens
  misc_RNA (1)...(19): siRNA sense strand
gcaguugccuugaauagaa

SEQ ID NO: 843511 - RNA, 19 nt, Homo sapiens
  misc_RNA (1)...(19): siRNA sense strand
gcaauugacugcuacacaa

SEQ ID NO: 843512 - RNA, 19 nt, Homo sapiens
  misc_RNA (1)...(19): siRNA sense strand
gaaguuauacaaaggcuua

SEQ ID NO: 843513 - RNA, 19 nt, Homo sapiens
  misc_RNA (1)...(19): siRNA sense strand
gaacuaagaagacagaaug

SEQ ID NO: 843514 - RNA, 19 nt, Homo sapiens
  misc_RNA (1)...(19): siRNA sense strand
aaaggaagcugacauagug

SEQ ID NO: 843515 - RNA, 19 nt, Homo sapiens
  misc_RNA (1)...(19): siRNA sense strand
gaagaaaggcaaagcuaaa

SEQ ID NO: 843516 - RNA, 19 nt, Homo sapiens
  misc_RNA (1)...(19): siRNA sense strand
gaaagaguauuagaacuag

SEQ ID NO: 843517 - RNA, 19 nt, Homo sapiens
  misc_RNA (1)...(19): siRNA sense strand
uaacagagcuauggccuau

SEQ ID NO: 843518 - RNA, 19 nt, Homo sapiens
  misc_RNA (1)...(19): siRNA sense strand
caacuaaaccacucaagaa

SEQ ID NO: 843519 - RNA, 19 nt, Homo sapiens
  misc_RNA (1)...(19): siRNA sense strand
gaagaaacugguaauuuga

SEQ ID NO: 843520 - RNA, 19 nt, Homo sapiens
  misc_RNA (1)...(19): siRNA sense strand
ggaauuaauugagaaagga

SEQ ID NO: 843521 - RNA, 19 nt, Homo sapiens
  misc_RNA (1)...(19): siRNA sense strand
acacugggaugaugucuuu

SEQ ID NO: 843522 - RNA, 19 nt, Homo sapiens
  misc_RNA (1)...(19): siRNA sense strand
gggaugaugucuuucuuga

SEQ ID NO: 843523 - RNA, 19 nt, Homo sapiens
  misc_RNA (1)...(19): siRNA sense strand
gaaaaucagucaggcuuua

SEQ ID NO: 843524 - RNA, 19 nt, Homo sapiens
  misc_RNA (1)...(19): siRNA sense strand
ggaaauaagcaagcaguaa

SEQ ID NO: 843525 - RNA, 19 nt, Homo sapiens
  misc_RNA (1)...(19): siRNA sense strand
gaaacaaaaugcagaagaa

SEQ ID NO: 843526 - RNA, 19 nt, Homo sapiens
  misc_RNA (1)...(19): siRNA sense strand
uugaugagcuugacaaaga

SEQ ID NO: 843527 - RNA, 19 nt, Homo sapiens
  misc_RNA (1)...(19): siRNA sense strand
gaaggauaguucugucgaa

SEQ ID NO: 843528 - RNA, 19 nt, Homo sapiens
  misc_RNA (1)...(19): siRNA sense strand
gcaauugaaugcuauacuc

SEQ ID NO: 843529 - RNA, 19 nt, Homo sapiens
  misc_RNA (1)...(19): siRNA sense strand
gaaaaugcccauagagaua

SEQ ID NO: 843530 - RNA, 19 nt, Homo sapiens
  misc_RNA (1)...(19): siRNA sense strand
ggaagaagaugggauucau

SEQ ID NO: 843531 - RNA, 19 nt, Homo sapiens
  misc_RNA (1)...(19): siRNA sense strand
gaaaaguucuccagauaug

SEQ ID NO: 843532 - RNA, 19 nt, Homo sapiens
  misc_RNA (1)...(19): siRNA sense strand
gcaaauaaagcaaucgaau

SEQ ID NO: 843533 - RNA, 19 nt, Homo sapiens
  misc_RNA (1)...(19): siRNA sense strand
aaacucauauccaaaggaa

SEQ ID NO: 843534 - RNA, 19 nt, Homo sapiens
  misc_RNA (1)...(19): siRNA sense strand
gaagaugggauucauguag

SEQ ID NO: 843535 - RNA, 19 nt, Homo sapiens
  misc_RNA (1)...(19): siRNA sense strand
gaagcugacauagugauua

SEQ ID NO: 843536 - RNA, 19 nt, Homo sapiens
  misc_RNA (1)...(19): siRNA sense strand
gcucauauucuaaagcuuu

SEQ ID NO: 843537 - RNA, 19 nt, Homo sapiens
  misc_RNA (1)...(19): siRNA sense strand
gaauuacaacuacaaguga

SEQ ID NO: 843538 - RNA, 19 nt, Homo sapiens
  misc_RNA (1)...(19): siRNA sense strand
uaacugaacucuccaaaau

SEQ ID NO: 843539 - RNA, 19 nt, Homo sapiens
  misc_RNA (1)...(19): siRNA sense strand
gcagaagaauuacaagacu

SEQ ID NO: 843540 - RNA, 19 nt, Homo sapiens
  misc_RNA (1)...(19): siRNA sense strand
gaaccaucuuuguauccua

SEQ ID NO: 843541 - RNA, 19 nt, Homo sapiens
  misc_RNA (1)...(19): siRNA sense strand
gcaaucgaauuacaacuac

SEQ ID NO: 843542 - RNA, 19 nt, Homo sapiens
  misc_RNA (1)...(19): siRNA sense strand
gauauggcagugauguuua

SEQ ID NO: 843543 - RNA, 19 nt, Homo sapiens
  misc_RNA (1)...(19): siRNA sense strand
gaacuagaaccaaauaacu

SEQ ID NO: 843544 - RNA, 19 nt, Homo sapiens
  misc_RNA (1)...(19): siRNA sense strand
caacuguucuuccuccaau

SEQ ID NO: 843545 - RNA, 19 nt, Homo sapiens
  misc_RNA (1)...(19): siRNA sense strand
ccacaggcaccacaaguaa

SEQ ID NO: 843546 - RNA, 19 nt, Homo sapiens
  misc_RNA (1)...(19): siRNA sense strand
aagcugacauagugauuaa

SEQ ID NO: 843547 - RNA, 19 nt, Homo sapiens
  misc_RNA (1)...(19): siRNA sense strand
gcuauggccuaucugaaga

SEQ ID NO: 843548 - RNA, 19 nt, Homo sapiens
  misc_RNA (1)...(19): siRNA sense strand
ggagagcgaaagcaaauug

SEQ ID NO: 843549 - RNA, 19 nt, Homo sapiens
  misc_RNA (1)...(19): siRNA sense strand
gaaggagagcgaaagcaaa

SEQ ID NO: 843550 - RNA, 19 nt, Homo sapiens
  misc_RNA (1)...(19): siRNA sense strand
caacuacaagugaaacaaa

SEQ ID NO: 843551 - RNA, 19 nt, Homo sapiens
  misc_RNA (1)...(19): siRNA sense strand
gaaauaagcaagcaguaac

SEQ ID NO: 843552 - RNA, 19 nt, Homo sapiens
  misc_RNA (1)...(19): siRNA sense strand
caaaugaacucaggaaaau

SEQ ID NO: 843553 - RNA, 19 nt, Homo sapiens
  misc_RNA (1)...(19): siRNA sense strand
gaaaagauacggugguuga

SEQ ID NO: 843554 - RNA, 19 nt, Homo sapiens
  misc_RNA (1)...(19): siRNA sense strand
caacaaaugaacucaggaa

SEQ ID NO: 843555 - RNA, 19 nt, Homo sapiens
  misc_RNA (1)...(19): siRNA sense strand
gaaaagccauuacucaucu

SEQ ID NO: 843556 - RNA, 19 nt, Homo sapiens
  misc_RNA (1)...(19): siRNA sense strand
gauacagacuauugaugug

SEQ ID NO: 843557 - RNA, 19 nt, Homo sapiens
  misc_RNA (1)...(19): siRNA sense strand
gaaauaugaagaagcugaa

SEQ ID NO: 843558 - RNA, 19 nt, Homo sapiens
  misc_RNA (1)...(19): siRNA sense strand
ggauauggaacuaagaaga

SEQ ID NO: 843559 - RNA, 19 nt, Homo sapiens
  misc_RNA (1)...(19): siRNA sense strand
uauccuaaguuguuucaga

SEQ ID NO: 843560 - RNA, 19 nt, Homo sapiens
  misc_RNA (1)...(19): siRNA sense strand
aagaggaacugcaagaaca

SEQ ID NO: 843561 - RNA, 19 nt, Homo sapiens
  misc_RNA (1)...(19): siRNA sense strand
ucagaaauaugaagaagcu

SEQ ID NO: 843562 - RNA, 19 nt, Homo sapiens
  misc_RNA (1)...(19): siRNA sense strand
gugauuaagucaacagaag

SEQ ID NO: 843563 - RNA, 19 nt, Homo sapiens
  misc_RNA (1)...(19): siRNA sense strand
guauucaaccagaucguua

SEQ ID NO: 843564 - RNA, 19 nt, Homo sapiens
  misc_RNA (1)...(19): siRNA sense strand
ccacaaguaagaagaauuc

SEQ ID NO: 843565 - RNA, 19 nt, Homo sapiens
  misc_RNA (1)...(19): siRNA sense strand
agaaugguguuccugaaga

SEQ ID NO: 843566 - RNA, 19 nt, Homo sapiens
  misc_RNA (1)...(19): siRNA sense strand
cagaagaauuacaagacuu

SEQ ID NO: 843567 - RNA, 19 nt, Homo sapiens
  misc_RNA (1)...(19): siRNA sense strand
gaaaauagaagaagucagu

SEQ ID NO: 843568 - RNA, 19 nt, Homo sapiens
  misc_RNA (1)...(19): siRNA sense strand
cuaaaccacucaagaaggu

SEQ ID NO: 843569 - RNA, 19 nt, Homo sapiens
  misc_RNA (1)...(19): siRNA sense strand
caaaggaagcugacauagu

SEQ ID NO: 843570 - RNA, 19 nt, Homo sapiens
  misc_RNA (1)...(19): siRNA sense strand
gaagaagaugggauucaug

SEQ ID NO: 843571 - RNA, 19 nt, Homo sapiens
  misc_RNA (1)...(19): siRNA sense strand
caaguaagaagaauucaag

SEQ ID NO: 843572 - RNA, 19 nt, Homo sapiens
  misc_RNA (1)...(19): siRNA sense strand
caacagaaggagagcgaaa

SEQ ID NO: 843573 - RNA, 19 nt, Homo sapiens
  misc_RNA (1)...(19): siRNA sense strand
gauuguaauuuagcaguug

SEQ ID NO: 843574 - RNA, 19 nt, Homo sapiens
  misc_RNA (1)...(19): siRNA sense strand
ugaaagagcaauugaaugc

SEQ ID NO: 843575 - RNA, 19 nt, Homo sapiens
  misc_RNA (1)...(19): siRNA sense strand
gaaaggacacugggaugau

SEQ ID NO: 843576 - RNA, 19 nt, Homo sapiens
  misc_RNA (1)...(19): siRNA sense strand
acugaacucuccaaaauua

SEQ ID NO: 843577 - RNA, 19 nt, Homo sapiens
  misc_RNA (1)...(19): siRNA sense strand
gaaaggcaaagcuaaagag

SEQ ID NO: 843578 - RNA, 19 nt, Homo sapiens
  misc_RNA (1)...(19): siRNA sense strand
gcaccacaaguaagaagaa

SEQ ID NO: 843579 - RNA, 19 nt, Homo sapiens
  misc_RNA (1)...(19): siRNA sense strand
cgaauuacaacuacaagug

SEQ ID NO: 843580 - RNA, 19 nt, Homo sapiens
  misc_RNA (1)...(19): siRNA sense strand
caaauugaagcacaacaga

SEQ ID NO: 843581 - RNA, 19 nt, Homo sapiens
  misc_RNA (1)...(19): siRNA sense strand
aggcaaagcuaaagagucu

SEQ ID NO: 843582 - RNA, 19 nt, Homo sapiens
  misc_RNA (1)...(19): siRNA sense strand
ggcaauaaauacuucaaac

SEQ ID NO: 843583 - RNA, 19 nt, Homo sapiens
  misc_RNA (1)...(19): siRNA sense strand
gaagaggaacugcaagaac

SEQ ID NO: 843584 - RNA, 19 nt, Homo sapiens
  misc_RNA (1)...(19): siRNA sense strand
aagaugggauucauguaga

SEQ ID NO: 843585 - RNA, 19 nt, Homo sapiens
  misc_RNA (1)...(19): siRNA sense strand
gaagaauucaagccaagau

SEQ ID NO: 843586 - RNA, 19 nt, Homo sapiens
  misc_RNA (1)...(19): siRNA sense strand
aaagggcaauaaauacuuc

SEQ ID NO: 843587 - RNA, 19 nt, Homo sapiens
  misc_RNA (1)...(19): siRNA sense strand
ggauucauguagauucaca

SEQ ID NO: 843588 - RNA, 19 nt, Homo sapiens
  misc_RNA (1)...(19): siRNA sense strand
ccauagagauagaacaaaa

SEQ ID NO: 843589 - RNA, 19 nt, Homo sapiens
  misc_RNA (1)...(19): siRNA sense strand
gcacacaagccauuuuauu

SEQ ID NO: 843590 - RNA, 19 nt, Homo sapiens
  misc_RNA (1)...(19): siRNA sense strand
agaagaaaggcaaagcuaa

SEQ ID NO: 843591 - RNA, 19 nt, Homo sapiens
  misc_RNA (1)...(19): siRNA sense strand
ccacucaagaagguuauua

SEQ ID NO: 843592 - RNA, 19 nt, Homo sapiens
  misc_RNA (1)...(19): siRNA sense strand
aaaggacacugggaugaug

SEQ ID NO: 843593 - RNA, 19 nt, Homo sapiens
  misc_RNA (1)...(19): siRNA sense strand
ucaaagaggggaaauauga

SEQ ID NO: 843594 - RNA, 19 nt, Homo sapiens
  misc_RNA (1)...(19): siRNA sense strand
aaccaucuuuguauccuaa

SEQ ID NO: 843595 - RNA, 19 nt, Homo sapiens
  misc_RNA (1)...(19): siRNA sense strand
uagaagaagucagugauac

SEQ ID NO: 843596 - RNA, 19 nt, Homo sapiens
  misc_RNA (1)...(19): siRNA sense strand
gaaugguguuccugaagag

SEQ ID NO: 843597 - RNA, 19 nt, Homo sapiens
  misc_RNA (1)...(19): siRNA sense strand
ggaagcugacauagugauu

SEQ ID NO: 843598 - RNA, 19 nt, Homo sapiens
  misc_RNA (1)...(19): siRNA sense strand
ggauccagauguauucaac

SEQ ID NO: 843599 - RNA, 19 nt, Homo sapiens
  misc_RNA (1)...(19): siRNA sense strand
gggcaauaaauacuucaaa

SEQ ID NO: 843600 - RNA, 19 nt, Homo sapiens
  misc_RNA (1)...(19): siRNA sense strand
ccauuacucaucuuugaaa

SEQ ID NO: 843601 - RNA, 19 nt, Homo sapiens
  misc_RNA (1)...(19): siRNA sense strand
ucaacuaaaccacucaaga

SEQ ID NO: 843602 - RNA, 19 nt, Homo sapiens
  misc_RNA (1)...(19): siRNA sense strand
acagagcuauggccuaucu

SEQ ID NO: 843603 - RNA, 19 nt, Homo sapiens
  misc_RNA (1)...(19): siRNA sense strand
aaagcaaauugaagcacaa

SEQ ID NO: 843604 - RNA, 19 nt, Homo sapiens
  misc_RNA (1)...(19): siRNA sense strand
acagaaugguguuccugaa

SEQ ID NO: 843605 - RNA, 19 nt, Homo sapiens
  misc_RNA (1)...(19): siRNA sense strand
ugauauggcagugauguuu

SEQ ID NO: 843606 - RNA, 19 nt, Homo sapiens
  misc_RNA (1)...(19): siRNA sense strand
caagagagguuugccuuua

SEQ ID NO: 843607 - RNA, 19 nt, Homo sapiens
  misc_RNA (1)...(19): siRNA sense strand
gcagauuacuuagacuuua

SEQ ID NO: 843608 - RNA, 19 nt, Homo sapiens
  misc_RNA (1)...(19): siRNA sense strand
gaauggaguuugcugugua

SEQ ID NO: 843609 - RNA, 19 nt, Homo sapiens
  misc_RNA (1)...(19): siRNA sense strand
gauaugccauucaacauca

SEQ ID NO: 843610 - RNA, 19 nt, Homo sapiens
  misc_RNA (1)...(19): siRNA sense strand
gaauauccuuugaccaguu

SEQ ID NO: 843611 - RNA, 19 nt, Homo sapiens
  misc_RNA (1)...(19): siRNA sense strand
gaagagcuacacagacuuu

SEQ ID NO: 843612 - RNA, 19 nt, Homo sapiens
  misc_RNA (1)...(19): siRNA sense strand
ggcaagaacuauaggauca

SEQ ID NO: 843613 - RNA, 19 nt, Homo sapiens
  misc_RNA (1)...(19): siRNA sense strand
gaucauccgggcugaguua

SEQ ID NO: 843614 - RNA, 19 nt, Homo sapiens
  misc_RNA (1)...(19): siRNA sense strand
ucaccgagcuccuagacaa

SEQ ID NO: 843615 - RNA, 19 nt, Homo sapiens
  misc_RNA (1)...(19): siRNA sense strand
ccacugaggccuuguauuc

SEQ ID NO: 843616 - RNA, 19 nt, Homo sapiens
  misc_RNA (1)...(19): siRNA sense strand
gagaagaccgugaaaauaa

SEQ ID NO: 843617 - RNA, 19 nt, Homo sapiens
  misc_RNA (1)...(19): siRNA sense strand
gcagagagcgagagcuuug

SEQ ID NO: 843618 - RNA, 19 nt, Homo sapiens
  misc_RNA (1)...(19): siRNA sense strand
ucaaaguguucucggaauu

SEQ ID NO: 843619 - RNA, 19 nt, Homo sapiens
  misc_RNA (1)...(19): siRNA sense strand
gaccacgucugccuugaga

SEQ ID NO: 843620 - RNA, 19 nt, Homo sapiens
  misc_RNA (1)...(19): siRNA sense strand
acacagacuuuccuuguca

SEQ ID NO: 843621 - RNA, 19 nt, Homo sapiens
  misc_RNA (1)...(19): siRNA sense strand
caacagaggcaagaacuau

SEQ ID NO: 843622 - RNA, 19 nt, Homo sapiens
  misc_RNA (1)...(19): siRNA sense strand
aagagagguuugccuuuaa

SEQ ID NO: 843623 - RNA, 19 nt, Homo sapiens
  misc_RNA (1)...(19): siRNA sense strand
caacaucaccgagcuccua

SEQ ID NO: 843624 - RNA, 19 nt, Homo sapiens
  misc_RNA (1)...(19): siRNA sense strand
ggacaucgaguacagauac

SEQ ID NO: 843625 - RNA, 19 nt, Homo sapiens
  misc_RNA (1)...(19): siRNA sense strand
gaaccucgcauuugagaag

SEQ ID NO: 843626 - RNA, 19 nt, Homo sapiens
  misc_RNA (1)...(19): siRNA sense strand
gcacugcgaagguucagaa

SEQ ID NO: 843627 - RNA, 19 nt, Homo sapiens
  misc_RNA (1)...(19): siRNA sense strand
ggaguuugcuguguacuac

SEQ ID NO: 843628 - RNA, 19 nt, Homo sapiens
  misc_RNA (1)...(19): siRNA sense strand
ggaccggauuugggaauau

SEQ ID NO: 843629 - RNA, 19 nt, Homo sapiens
  misc_RNA (1)...(19): siRNA sense strand
ccuuuaagaucucaccaaa

SEQ ID NO: 843630 - RNA, 19 nt, Homo sapiens
  misc_RNA (1)...(19): siRNA sense strand
ggacacuuaugccgguuca

SEQ ID NO: 843631 - RNA, 19 nt, Homo sapiens
  misc_RNA (1)...(19): siRNA sense strand
gcaauggacagacguacug

SEQ ID NO: 843632 - RNA, 19 nt, Homo sapiens
  misc_RNA (1)...(19): siRNA sense strand
gcaacagaggcaagaacua

SEQ ID NO: 843633 - RNA, 19 nt, Homo sapiens
  misc_RNA (1)...(19): siRNA sense strand
aaauaaggaugacguucga

SEQ ID NO: 843634 - RNA, 19 nt, Homo sapiens
  misc_RNA (1)...(19): siRNA sense strand
cagauuacuuagacuuuag

SEQ ID NO: 843635 - RNA, 19 nt, Homo sapiens
  misc_RNA (1)...(19): siRNA sense strand
uucagaaccucgcauuuga

SEQ ID NO: 843636 - RNA, 19 nt, Homo sapiens
  misc_RNA (1)...(19): siRNA sense strand
uggaagagcuacacagacu

SEQ ID NO: 843637 - RNA, 19 nt, Homo sapiens
  misc_RNA (1)...(19): siRNA sense strand
caagaacuauaggaucauc

SEQ ID NO: 843638 - RNA, 19 nt, Homo sapiens
  misc_RNA (1)...(19): siRNA sense strand
gagguuugccuuuaagauc

SEQ ID NO: 843639 - RNA, 19 nt, Homo sapiens
  misc_RNA (1)...(19): siRNA sense strand
guacugggacagcaacaga

SEQ ID NO: 843640 - RNA, 19 nt, Homo sapiens
  misc_RNA (1)...(19): siRNA sense strand
uuuaagaucucaccaaagc

SEQ ID NO: 843641 - RNA, 19 nt, Homo sapiens
  misc_RNA (1)...(19): siRNA sense strand
cgagagcuuuguucuggau

SEQ ID NO: 843642 - RNA, 19 nt, Homo sapiens
  misc_RNA (1)...(19): siRNA sense strand
gcccucugcagauuacuua

SEQ ID NO: 843643 - RNA, 19 nt, Homo sapiens
  misc_RNA (1)...(19): siRNA sense strand
ucgaugacccgcuagauau

SEQ ID NO: 843644 - RNA, 19 nt, Homo sapiens
  misc_RNA (1)...(19): siRNA sense strand
guacuacgagugcaaugga

SEQ ID NO: 843645 - RNA, 19 nt, Homo sapiens
  misc_RNA (1)...(19): siRNA sense strand
cuacacagacuuuccuugu

SEQ ID NO: 843646 - RNA, 19 nt, Homo sapiens
  misc_RNA (1)...(19): siRNA sense strand
ccaagagagguuugccuuu

SEQ ID NO: 843647 - RNA, 19 nt, Homo sapiens
  misc_RNA (1)...(19): siRNA sense strand
agacuuuccuugucaguac

SEQ ID NO: 843648 - RNA, 19 nt, Homo sapiens
  misc_RNA (1)...(19): siRNA sense strand
cuagauaugccauucaaca

SEQ ID NO: 843649 - RNA, 19 nt, Homo sapiens
  misc_RNA (1)...(19): siRNA sense strand
agaacugugugcucaagga

SEQ ID NO: 843650 - RNA, 19 nt, Homo sapiens
  misc_RNA (1)...(19): siRNA sense strand
gacaauggucaaaguguuc

SEQ ID NO: 843651 - RNA, 19 nt, Homo sapiens
  misc_RNA (1)...(19): siRNA sense strand
cagcagagagcgagagcuu

SEQ ID NO: 843652 - RNA, 19 nt, Homo sapiens
  misc_RNA (1)...(19): siRNA sense strand
gucaaaguguucucggaau

SEQ ID NO: 843653 - RNA, 19 nt, Homo sapiens
  misc_RNA (1)...(19): siRNA sense strand
agagcuuuguucuggauuu

SEQ ID NO: 843654 - RNA, 19 nt, Homo sapiens
  misc_RNA (1)...(19): siRNA sense strand
guacgugaaggacacuuau

SEQ ID NO: 843655 - RNA, 19 nt, Homo sapiens
  misc_RNA (1)...(19): siRNA sense strand
caaaguguucucggaauuc

SEQ ID NO: 843656 - RNA, 19 nt, Homo sapiens
  misc_RNA (1)...(19): siRNA sense strand
guucagacagggacacguu

SEQ ID NO: 843657 - RNA, 19 nt, Homo sapiens
  misc_RNA (1)...(19): siRNA sense strand
guguuccuauggucuguuu

SEQ ID NO: 843658 - RNA, 19 nt, Homo sapiens
  misc_RNA (1)...(19): siRNA sense strand
gauuugggaauauccuuug

SEQ ID NO: 843659 - RNA, 19 nt, Homo sapiens
  misc_RNA (1)...(19): siRNA sense strand
gaccggauuugggaauauc

SEQ ID NO: 843660 - RNA, 19 nt, Homo sapiens
  misc_RNA (1)...(19): siRNA sense strand
cagaaccucgcauuugaga

SEQ ID NO: 843661 - RNA, 19 nt, Homo sapiens
  misc_RNA (1)...(19): siRNA sense strand
agaauggaguuugcugugu

SEQ ID NO: 843662 - RNA, 19 nt, Homo sapiens
  misc_RNA (1)...(19): siRNA sense strand
ggaagagcuacacagacuu

SEQ ID NO: 843663 - RNA, 19 nt, Homo sapiens
  misc_RNA (1)...(19): siRNA sense strand
gaggcaagaacuauaggau

SEQ ID NO: 843664 - RNA, 19 nt, Homo sapiens
  misc_RNA (1)...(19): siRNA sense strand
ucccagcccucugcagauu

SEQ ID NO: 843665 - RNA, 19 nt, Homo sapiens
  misc_RNA (1)...(19): siRNA sense strand
agagagguuugccuuuaag

SEQ ID NO: 843666 - RNA, 19 nt, Homo sapiens
  misc_RNA (1)...(19): siRNA sense strand
ucaguuugcccgagaagau

SEQ ID NO: 843667 - RNA, 19 nt, Homo sapiens
  misc_RNA (1)...(19): siRNA sense strand
ugagaagaccgugaaaaua

SEQ ID NO: 843668 - RNA, 19 nt, Homo sapiens
  misc_RNA (1)...(19): siRNA sense strand
gagcgagagcuuuguucug

SEQ ID NO: 843669 - RNA, 19 nt, Homo sapiens
  misc_RNA (1)...(19): siRNA sense strand
uuccagaguggccaaguua

SEQ ID NO: 843670 - RNA, 19 nt, Homo sapiens
  misc_RNA (1)...(19): siRNA sense strand
cauccgggcugaguuaaaa

SEQ ID NO: 843671 - RNA, 19 nt, Homo sapiens
  misc_RNA (1)...(19): siRNA sense strand
gacaucgaguacagauaca

SEQ ID NO: 843672 - RNA, 19 nt, Homo sapiens
  misc_RNA (1)...(19): siRNA sense strand
uaugaaagaauggaguuug

SEQ ID NO: 843673 - RNA, 19 nt, Homo sapiens
  misc_RNA (1)...(19): siRNA sense strand
cgcuagauaugccauucaa

SEQ ID NO: 843674 - RNA, 19 nt, Homo sapiens
  misc_RNA (1)...(19): siRNA sense strand
gggacacguucuccuucga

SEQ ID NO: 843675 - RNA, 19 nt, Homo sapiens
  misc_RNA (1)...(19): siRNA sense strand
gcucaaggacaaggccauu

SEQ ID NO: 843676 - RNA, 19 nt, Homo sapiens
  misc_RNA (1)...(19): siRNA sense strand
gagcuuuguucuggauuuu

SEQ ID NO: 843677 - RNA, 19 nt, Homo sapiens
  misc_RNA (1)...(19): siRNA sense strand
uggaccggauuugggaaua

SEQ ID NO: 843678 - RNA, 19 nt, Homo sapiens
  misc_RNA (1)...(19): siRNA sense strand
gagagguuugccuuuaaga

SEQ ID NO: 843679 - RNA, 19 nt, Homo sapiens
  misc_RNA (1)...(19): siRNA sense strand
aaaccacugaggccuugua

SEQ ID NO: 843680 - RNA, 19 nt, Homo sapiens
  misc_RNA (1)...(19): siRNA sense strand
ccagcccucugcagauuac

SEQ ID NO: 843681 - RNA, 19 nt, Homo sapiens
  misc_RNA (1)...(19): siRNA sense strand
gagcuccuagacaacauug

SEQ ID NO: 843682 - RNA, 19 nt, Homo sapiens
  misc_RNA (1)...(19): siRNA sense strand
acagaggcaagaacuauag

SEQ ID NO: 843683 - RNA, 19 nt, Homo sapiens
  misc_RNA (1)...(19): siRNA sense strand
aacagaggcaagaacuaua

SEQ ID NO: 843684 - RNA, 19 nt, Homo sapiens
  misc_RNA (1)...(19): siRNA sense strand
acacuuaugccgguucaga

SEQ ID NO: 843685 - RNA, 19 nt, Homo sapiens
  misc_RNA (1)...(19): siRNA sense strand
gagagcgagagcuuuguuc

SEQ ID NO: 843686 - RNA, 19 nt, Homo sapiens
  misc_RNA (1)...(19): siRNA sense strand
cuuaggauaugaaaagcua

SEQ ID NO: 843687 - RNA, 19 nt, Homo sapiens
  misc_RNA (1)...(19): siRNA sense strand
aauauccuuugaccaguuc

SEQ ID NO: 843688 - RNA, 19 nt, Homo sapiens
  misc_RNA (1)...(19): siRNA sense strand
ccuggaagagcuacacaga

SEQ ID NO: 843689 - RNA, 19 nt, Homo sapiens
  misc_RNA (1)...(19): siRNA sense strand
gacuuuagaaaucgacuuc

SEQ ID NO: 843690 - RNA, 19 nt, Homo sapiens
  misc_RNA (1)...(19): siRNA sense strand
gaccagagguucuucaaug

SEQ ID NO: 843691 - RNA, 19 nt, Homo sapiens
  misc_RNA (1)...(19): siRNA sense strand
ggaccaagcugcagaaucc

SEQ ID NO: 843692 - RNA, 19 nt, Homo sapiens
  misc_RNA (1)...(19): siRNA sense strand
gcaaagagagaccuuccua

SEQ ID NO: 843693 - RNA, 19 nt, Homo sapiens
  misc_RNA (1)...(19): siRNA sense strand
gagcugcgccugauacuga

SEQ ID NO: 843694 - RNA, 19 nt, Homo sapiens
  misc_RNA (1)...(19): siRNA sense strand
ccaaggaagugguccaguu

SEQ ID NO: 843695 - RNA, 19 nt, Homo sapiens
  misc_RNA (1)...(19): siRNA sense strand
ggacuuugcugccuuucga

SEQ ID NO: 843696 - RNA, 19 nt, Homo sapiens
  misc_RNA (1)...(19): siRNA sense strand
gcaaggagcugcgccugau

SEQ ID NO: 843697 - RNA, 19 nt, Homo sapiens
  misc_RNA (1)...(19): siRNA sense strand
ggaggacuuugcugccuuu

SEQ ID NO: 843698 - RNA, 19 nt, Homo sapiens
  misc_RNA (1)...(19): siRNA sense strand
uacgaaaccuagcggauaa

SEQ ID NO: 843699 - RNA, 19 nt, Homo sapiens
  misc_RNA (1)...(19): siRNA sense strand
agagagaccuuccuaagag

SEQ ID NO: 843700 - RNA, 19 nt, Homo sapiens
  misc_RNA (1)...(19): siRNA sense strand
ccagccaguuugugaauga

SEQ ID NO: 843701 - RNA, 19 nt, Homo sapiens
  misc_RNA (1)...(19): siRNA sense strand
gggagagugugcuacgaaa

SEQ ID NO: 843702 - RNA, 19 nt, Homo sapiens
  misc_RNA (1)...(19): siRNA sense strand
guggagaaguccucuguca

SEQ ID NO: 843703 - RNA, 19 nt, Homo sapiens
  misc_RNA (1)...(19): siRNA sense strand
caaagagagaccuuccuaa

SEQ ID NO: 843704 - RNA, 19 nt, Homo sapiens
  misc_RNA (1)...(19): siRNA sense strand
cuacgaaaccuagcggaua

SEQ ID NO: 843705 - RNA, 19 nt, Homo sapiens
  misc_RNA (1)...(19): siRNA sense strand
caaggaagugguccaguug

SEQ ID NO: 843706 - RNA, 19 nt, Homo sapiens
  misc_RNA (1)...(19): siRNA sense strand
ugacaucccauccuuggaa

SEQ ID NO: 843707 - RNA, 19 nt, Homo sapiens
  misc_RNA (1)...(19): siRNA sense strand
aaagagagaccuuccuaag

SEQ ID NO: 843708 - RNA, 19 nt, Homo sapiens
  misc_RNA (1)...(19): siRNA sense strand
acccugaggugcccuuuga

SEQ ID NO: 843709 - RNA, 19 nt, Homo sapiens
  misc_RNA (1)...(19): siRNA sense strand
aagagagaccuuccuaaga

SEQ ID NO: 843710 - RNA, 19 nt, Homo sapiens
  misc_RNA (1)...(19): siRNA sense strand
gccagaagauaaggaccaa

SEQ ID NO: 843711 - RNA, 19 nt, Homo sapiens
  misc_RNA (1)...(19): siRNA sense strand
caaggagcugcgccugaua

SEQ ID NO: 843712 - RNA, 19 nt, Homo sapiens
  misc_RNA (1)...(19): siRNA sense strand
ggaccagagguucuucaau

SEQ ID NO: 843713 - RNA, 19 nt, Homo sapiens
  misc_RNA (1)...(19): siRNA sense strand
acccugagccagaagauaa

SEQ ID NO: 843714 - RNA, 19 nt, Homo sapiens
  misc_RNA (1)...(19): siRNA sense strand
uagcggauaaggccuuuga

SEQ ID NO: 843715 - RNA, 19 nt, Homo sapiens
  misc_RNA (1)...(19): siRNA sense strand
ggacacgaagggcaaagag

SEQ ID NO: 843716 - RNA, 19 nt, Homo sapiens
  misc_RNA (1)...(19): siRNA sense strand
aggcugacaucccauccuu

SEQ ID NO: 843717 - RNA, 19 nt, Homo sapiens
  misc_RNA (1)...(19): siRNA sense strand
gcaggaguaccagcaguuc

SEQ ID NO: 843718 - RNA, 19 nt, Homo sapiens
  misc_RNA (1)...(19): siRNA sense strand
guucagggagagugugcua

SEQ ID NO: 843719 - RNA, 19 nt, Homo sapiens
  misc_RNA (1)...(19): siRNA sense strand
gacccugagccagaagaua

SEQ ID NO: 843720 - RNA, 19 nt, Homo sapiens
  misc_RNA (1)...(19): siRNA sense strand
gacacgaagggcaaagaga

SEQ ID NO: 843721 - RNA, 19 nt, Homo sapiens
  misc_RNA (1)...(19): siRNA sense strand
cagaguggaggacgcuuug

SEQ ID NO: 843722 - RNA, 19 nt, Homo sapiens
  misc_RNA (1)...(19): siRNA sense strand
uaaggaccaagcugcagaa

SEQ ID NO: 843723 - RNA, 19 nt, Homo sapiens
  misc_RNA (1)...(19): siRNA sense strand
cagaccugcuggagcuaug

SEQ ID NO: 843724 - RNA, 19 nt, Homo sapiens
  misc_RNA (1)...(19): siRNA sense strand
gggcgcaagucccgcaaaa

SEQ ID NO: 843725 - RNA, 19 nt, Homo sapiens
  misc_RNA (1)...(19): siRNA sense strand
gaagacaauuuccaguuua

SEQ ID NO: 843726 - RNA, 19 nt, Homo sapiens
  misc_RNA (1)...(19): siRNA sense strand
gaaauuaccucagaagaau

SEQ ID NO: 843727 - RNA, 19 nt, Homo sapiens
  misc_RNA (1)...(19): siRNA sense strand
gcaauugucugguccuuca

SEQ ID NO: 843728 - RNA, 19 nt, Homo sapiens
  misc_RNA (1)...(19): siRNA sense strand
guaggaaaccagacuaaua

SEQ ID NO: 843729 - RNA, 19 nt, Homo sapiens
  misc_RNA (1)...(19): siRNA sense strand
ggaagaaauuaccucagaa

SEQ ID NO: 843730 - RNA, 19 nt, Homo sapiens
  misc_RNA (1)...(19): siRNA sense strand
ggaggguuccuacuuguua

SEQ ID NO: 843731 - RNA, 19 nt, Homo sapiens
  misc_RNA (1)...(19): siRNA sense strand
ccaccgaaaucacuggaua

SEQ ID NO: 843732 - RNA, 19 nt, Homo sapiens
  misc_RNA (1)...(19): siRNA sense strand
gaagaauaccuuguacuuu

SEQ ID NO: 843733 - RNA, 19 nt, Homo sapiens
  misc_RNA (1)...(19): siRNA sense strand
ggaagaauaccuuguacuu

SEQ ID NO: 843734 - RNA, 19 nt, Homo sapiens
  misc_RNA (1)...(19): siRNA sense strand
agaagacaauuuccaguuu

SEQ ID NO: 843735 - RNA, 19 nt, Homo sapiens
  misc_RNA (1)...(19): siRNA sense strand
cuuauggacugaaaguuua

SEQ ID NO: 843736 - RNA, 19 nt, Homo sapiens
  misc_RNA (1)...(19): siRNA sense strand
guaccagaauugcccuuaa

SEQ ID NO: 843737 - RNA, 19 nt, Homo sapiens
  misc_RNA (1)...(19): siRNA sense strand
auucuucacuccugauuua

SEQ ID NO: 843738 - RNA, 19 nt, Homo sapiens
  misc_RNA (1)...(19): siRNA sense strand
ggacuauguugaagauaca

SEQ ID NO: 843739 - RNA, 19 nt, Homo sapiens
  misc_RNA (1)...(19): siRNA sense strand
uggaagaaauuaccucaga

SEQ ID NO: 843740 - RNA, 19 nt, Homo sapiens
  misc_RNA (1)...(19): siRNA sense strand
uggauggccuucugcauuu

SEQ ID NO: 843741 - RNA, 19 nt, Homo sapiens
  misc_RNA (1)...(19): siRNA sense strand
cacucaagauuuccaauuu

SEQ ID NO: 843742 - RNA, 19 nt, Homo sapiens
  misc_RNA (1)...(19): siRNA sense strand
gcacucaagauuuccaauu

SEQ ID NO: 843743 - RNA, 19 nt, Homo sapiens
  misc_RNA (1)...(19): siRNA sense strand
uagaguaucaagcuuguua

SEQ ID NO: 843744 - RNA, 19 nt, Homo sapiens
  misc_RNA (1)...(19): siRNA sense strand
gacaagaccacguucuaaa

SEQ ID NO: 843745 - RNA, 19 nt, Homo sapiens
  misc_RNA (1)...(19): siRNA sense strand
ccugaagagucauguguuu

SEQ ID NO: 843746 - RNA, 19 nt, Homo sapiens
  misc_RNA (1)...(19): siRNA sense strand
gaaaguuuauugcauucca

SEQ ID NO: 843747 - RNA, 19 nt, Homo sapiens
  misc_RNA (1)...(19): siRNA sense strand
gagacaagaccacguucua

SEQ ID NO: 843748 - RNA, 19 nt, Homo sapiens
  misc_RNA (1)...(19): siRNA sense strand
aaaggacgauugccauaug

SEQ ID NO: 843749 - RNA, 19 nt, Homo sapiens
  misc_RNA (1)...(19): siRNA sense strand
cuucacuccugauuuauaa

SEQ ID NO: 843750 - RNA, 19 nt, Homo sapiens
  misc_RNA (1)...(19): siRNA sense strand
gaacuucaggacuauguug

SEQ ID NO: 843751 - RNA, 19 nt, Homo sapiens
  misc_RNA (1)...(19): siRNA sense strand
uguuguggguucuaacuua

SEQ ID NO: 843752 - RNA, 19 nt, Homo sapiens
  misc_RNA (1)...(19): siRNA sense strand
gcuuauggacugaaaguuu

SEQ ID NO: 843753 - RNA, 19 nt, Homo sapiens
  misc_RNA (1)...(19): siRNA sense strand
cagaauugcccuuaaugaa

SEQ ID NO: 843754 - RNA, 19 nt, Homo sapiens
  misc_RNA (1)...(19): siRNA sense strand
uaacauccuccaacacauu

SEQ ID NO: 843755 - RNA, 19 nt, Homo sapiens
  misc_RNA (1)...(19): siRNA sense strand
gaagaaauuaccucagaag

SEQ ID NO: 843756 - RNA, 19 nt, Homo sapiens
  misc_RNA (1)...(19): siRNA sense strand
uauaaggccucugauggaa

SEQ ID NO: 843757 - RNA, 19 nt, Homo sapiens
  misc_RNA (1)...(19): siRNA sense strand
guuguggguucuaacuuaa

SEQ ID NO: 843758 - RNA, 19 nt, Homo sapiens
  misc_RNA (1)...(19): siRNA sense strand
agaaauuaccucagaagaa

SEQ ID NO: 843759 - RNA, 19 nt, Homo sapiens
  misc_RNA (1)...(19): siRNA sense strand
gaagagucauguguuuuaa

SEQ ID NO: 843760 - RNA, 19 nt, Homo sapiens
  misc_RNA (1)...(19): siRNA sense strand
cauggaagaauaccuugua

SEQ ID NO: 843761 - RNA, 19 nt, Homo sapiens
  misc_RNA (1)...(19): siRNA sense strand
uaauagugauggaaagaca

SEQ ID NO: 843762 - RNA, 19 nt, Homo sapiens
  misc_RNA (1)...(19): siRNA sense strand
ggacugaaaguuuauugca

SEQ ID NO: 843763 - RNA, 19 nt, Homo sapiens
  misc_RNA (1)...(19): siRNA sense strand
gaacuuugucgcuuaugga

SEQ ID NO: 843764 - RNA, 19 nt, Homo sapiens
  misc_RNA (1)...(19): siRNA sense strand
gaagauacaucggaauacc

SEQ ID NO: 843765 - RNA, 19 nt, Homo sapiens
  misc_RNA (1)...(19): siRNA sense strand
uuucagcacucaagauuuc

SEQ ID NO: 843766 - RNA, 19 nt, Homo sapiens
  misc_RNA (1)...(19): siRNA sense strand
ucaggacuauguugaagau

SEQ ID NO: 843767 - RNA, 19 nt, Homo sapiens
  misc_RNA (1)...(19): siRNA sense strand
uaggacagcauacaauuug

SEQ ID NO: 843768 - RNA, 19 nt, Homo sapiens
  misc_RNA (1)...(19): siRNA sense strand
uaaguuauuuagccugcaa

SEQ ID NO: 843769 - RNA, 19 nt, Homo sapiens
  misc_RNA (1)...(19): siRNA sense strand
ccagaauugcccuuaauga

SEQ ID NO: 843770 - RNA, 19 nt, Homo sapiens
  misc_RNA (1)...(19): siRNA sense strand
gaguugaagcucugacuga

SEQ ID NO: 843771 - RNA, 19 nt, Homo sapiens
  misc_RNA (1)...(19): siRNA sense strand
cagaagacaauuuccaguu

SEQ ID NO: 843772 - RNA, 19 nt, Homo sapiens
  misc_RNA (1)...(19): siRNA sense strand
cagaccagcuaguccaaau

SEQ ID NO: 843773 - RNA, 19 nt, Homo sapiens
  misc_RNA (1)...(19): siRNA sense strand
gacaauuuccaguuuaugu

SEQ ID NO: 843774 - RNA, 19 nt, Homo sapiens
  misc_RNA (1)...(19): siRNA sense strand
gaucccagccuguuauuac

SEQ ID NO: 843775 - RNA, 19 nt, Homo sapiens
  misc_RNA (1)...(19): siRNA sense strand
gaggguuccuacuuguuau

SEQ ID NO: 843776 - RNA, 19 nt, Homo sapiens
  misc_RNA (1)...(19): siRNA sense strand
agaauugcccuuaaugaau

SEQ ID NO: 843777 - RNA, 19 nt, Homo sapiens
  misc_RNA (1)...(19): siRNA sense strand
uaccagaauugcccuuaau

SEQ ID NO: 843778 - RNA, 19 nt, Homo sapiens
  misc_RNA (1)...(19): siRNA sense strand
ccagaaaaguaccagaauu

SEQ ID NO: 843779 - RNA, 19 nt, Homo sapiens
  misc_RNA (1)...(19): siRNA sense strand
guuccuacuuguuaucuca

SEQ ID NO: 843780 - RNA, 19 nt, Homo sapiens
  misc_RNA (1)...(19): siRNA sense strand
ucgaugcauuuacuucaaa

SEQ ID NO: 843781 - RNA, 19 nt, Homo sapiens
  misc_RNA (1)...(19): siRNA sense strand
caguuuauguacuaccaaa

SEQ ID NO: 843782 - RNA, 19 nt, Homo sapiens
  misc_RNA (1)...(19): siRNA sense strand
gaccagcuaguccaaauuc

SEQ ID NO: 843783 - RNA, 19 nt, Homo sapiens
  misc_RNA (1)...(19): siRNA sense strand
aaugcaggaugagcucuua

SEQ ID NO: 843784 - RNA, 19 nt, Homo sapiens
  misc_RNA (1)...(19): siRNA sense strand
ggaaaccagacuaauacug

SEQ ID NO: 843785 - RNA, 19 nt, Homo sapiens
  misc_RNA (1)...(19): siRNA sense strand
agacuaauacugcuuguag

SEQ ID NO: 843786 - RNA, 19 nt, Homo sapiens
  misc_RNA (1)...(19): siRNA sense strand
aaaccuaucaaacgaguau

SEQ ID NO: 843787 - RNA, 19 nt, Homo sapiens
  misc_RNA (1)...(19): siRNA sense strand
gauaccacaacacaacaaa

SEQ ID NO: 843788 - RNA, 19 nt, Homo sapiens
  misc_RNA (1)...(19): siRNA sense strand
gcuuucagcacucaagauu

SEQ ID NO: 843789 - RNA, 19 nt, Homo sapiens
  misc_RNA (1)...(19): siRNA sense strand
agacaagaccacguucuaa

SEQ ID NO: 843790 - RNA, 19 nt, Homo sapiens
  misc_RNA (1)...(19): siRNA sense strand
gagcaauugucugguccuu

SEQ ID NO: 843791 - RNA, 19 nt, Homo sapiens
  misc_RNA (1)...(19): siRNA sense strand
uugaagauacaucggaaua

SEQ ID NO: 843792 - RNA, 19 nt, Homo sapiens
  misc_RNA (1)...(19): siRNA sense strand
gacugaaaguuuauugcau

SEQ ID NO: 843793 - RNA, 19 nt, Homo sapiens
  misc_RNA (1)...(19): siRNA sense strand
aaaguagaguaucaagcuu

SEQ ID NO: 843794 - RNA, 19 nt, Homo sapiens
  misc_RNA (1)...(19): siRNA sense strand
ggaagaaaaucagaagaca

SEQ ID NO: 843795 - RNA, 19 nt, Homo sapiens
  misc_RNA (1)...(19): siRNA sense strand
ugaagagucauguguuuua

SEQ ID NO: 843796 - RNA, 19 nt, Homo sapiens
  misc_RNA (1)...(19): siRNA sense strand
caucauggaagaauaccuu

SEQ ID NO: 843797 - RNA, 19 nt, Homo sapiens
  misc_RNA (1)...(19): siRNA sense strand
cagcuguuguggguucuaa

SEQ ID NO: 843798 - RNA, 19 nt, Homo sapiens
  misc_RNA (1)...(19): siRNA sense strand
cuaaagaaacuaaguagcu

SEQ ID NO: 843799 - RNA, 19 nt, Homo sapiens
  misc_RNA (1)...(19): siRNA sense strand
uaggaaaccagacuaauac

SEQ ID NO: 843800 - RNA, 19 nt, Homo sapiens
  misc_RNA (1)...(19): siRNA sense strand
ugcaagaccuguuguuacu

SEQ ID NO: 843801 - RNA, 19 nt, Homo sapiens
  misc_RNA (1)...(19): siRNA sense strand
cuaggacagcauacaauuu

SEQ ID NO: 843802 - RNA, 19 nt, Homo sapiens
  misc_RNA (1)...(19): siRNA sense strand
uugaagcucugacugaaag

SEQ ID NO: 843803 - RNA, 19 nt, Homo sapiens
  misc_RNA (1)...(19): siRNA sense strand
uauuuaacauccuccaaca

SEQ ID NO: 843804 - RNA, 19 nt, Homo sapiens
  misc_RNA (1)...(19): siRNA sense strand
aaggacgauugccauauga

SEQ ID NO: 843805 - RNA, 19 nt, Homo sapiens
  misc_RNA (1)...(19): siRNA sense strand
cagcuaguccaaauucuuc

SEQ ID NO: 843806 - RNA, 19 nt, Homo sapiens
  misc_RNA (1)...(19): siRNA sense strand
ccuaucaaacgaguauaua

SEQ ID NO: 843807 - RNA, 19 nt, Homo sapiens
  misc_RNA (1)...(19): siRNA sense strand
uaaggccucugauggaaaa

SEQ ID NO: 843808 - RNA, 19 nt, Homo sapiens
  misc_RNA (1)...(19): siRNA sense strand
gcauuccaacagcucauuu

SEQ ID NO: 843809 - RNA, 19 nt, Homo sapiens
  misc_RNA (1)...(19): siRNA sense strand
ccugcaagaccuguuguua

SEQ ID NO: 843810 - RNA, 19 nt, Homo sapiens
  misc_RNA (1)...(19): siRNA sense strand
caaaaggacgauugccaua

SEQ ID NO: 843811 - RNA, 19 nt, Homo sapiens
  misc_RNA (1)...(19): siRNA sense strand
gcaggaugagcucuuaaag

SEQ ID NO: 843812 - RNA, 19 nt, Homo sapiens
  misc_RNA (1)...(19): siRNA sense strand
gauggaaagacagcuguug

SEQ ID NO: 843813 - RNA, 19 nt, Homo sapiens
  misc_RNA (1)...(19): siRNA sense strand
uuaaagccaauuuccagaa

SEQ ID NO: 843814 - RNA, 19 nt, Homo sapiens
  misc_RNA (1)...(19): siRNA sense strand
ccuucagacuccucuaguu

SEQ ID NO: 843815 - RNA, 19 nt, Homo sapiens
  misc_RNA (1)...(19): siRNA sense strand
ggauaccacaacacaacaa

SEQ ID NO: 843816 - RNA, 19 nt, Homo sapiens
  misc_RNA (1)...(19): siRNA sense strand
ugauuuauaaggccucuga

SEQ ID NO: 843817 - RNA, 19 nt, Homo sapiens
  misc_RNA (1)...(19): siRNA sense strand
ugaacuuugucgcuuaugg

SEQ ID NO: 843818 - RNA, 19 nt, Homo sapiens
  misc_RNA (1)...(19): siRNA sense strand
agauacaucggaauaccua

SEQ ID NO: 843819 - RNA, 19 nt, Homo sapiens
  misc_RNA (1)...(19): siRNA sense strand
ggauggccuucugcauuuc

SEQ ID NO: 843820 - RNA, 19 nt, Homo sapiens
  misc_RNA (1)...(19): siRNA sense strand
uuauaaggccucugaugga

SEQ ID NO: 843821 - RNA, 19 nt, Homo sapiens
  misc_RNA (1)...(19): siRNA sense strand
gagcucuuaaagccaauuu

SEQ ID NO: 843822 - RNA, 19 nt, Homo sapiens
  misc_RNA (1)...(19): siRNA sense strand
cagaaaaguaccagaauug

SEQ ID NO: 843823 - RNA, 19 nt, Homo sapiens
  misc_RNA (1)...(19): siRNA sense strand
ggaacgagaaugccuacac

SEQ ID NO: 843824 - RNA, 19 nt, Homo sapiens
  misc_RNA (1)...(19): siRNA sense strand
cugaaaguuuauugcauuc

SEQ ID NO: 843825 - RNA, 19 nt, Homo sapiens
  misc_RNA (1)...(19): siRNA sense strand
gaagacaauuuccaguuua

SEQ ID NO: 843826 - RNA, 19 nt, Homo sapiens
  misc_RNA (1)...(19): siRNA sense strand
gaaauuaccucagaagaau

SEQ ID NO: 843827 - RNA, 19 nt, Homo sapiens
  misc_RNA (1)...(19): siRNA sense strand
gcaauugucugguccuuca

SEQ ID NO: 843828 - RNA, 19 nt, Homo sapiens
  misc_RNA (1)...(19): siRNA sense strand
ggaagaaauuaccucagaa

SEQ ID NO: 843829 - RNA, 19 nt, Homo sapiens
  misc_RNA (1)...(19): siRNA sense strand
ggaggguuccuacuuguua

SEQ ID NO: 843830 - RNA, 19 nt, Homo sapiens
  misc_RNA (1)...(19): siRNA sense strand
ccaccgaaaucacuggaua

SEQ ID NO: 843831 - RNA, 19 nt, Homo sapiens
  misc_RNA (1)...(19): siRNA sense strand
gaagaauaccuuguacuuu

SEQ ID NO: 843832 - RNA, 19 nt, Homo sapiens
  misc_RNA (1)...(19): siRNA sense strand
ggaagaauaccuuguacuu

SEQ ID NO: 843833 - RNA, 19 nt, Homo sapiens
  misc_RNA (1)...(19): siRNA sense strand
agaagacaauuuccaguuu

SEQ ID NO: 843834 - RNA, 19 nt, Homo sapiens
  misc_RNA (1)...(19): siRNA sense strand
cuuauggacugaaaguuua

SEQ ID NO: 843835 - RNA, 19 nt, Homo sapiens
  misc_RNA (1)...(19): siRNA sense strand
guaccagaauugcccuuaa

SEQ ID NO: 843836 - RNA, 19 nt, Homo sapiens
  misc_RNA (1)...(19): siRNA sense strand
auucuucacuccugauuua

SEQ ID NO: 843837 - RNA, 19 nt, Homo sapiens
  misc_RNA (1)...(19): siRNA sense strand
ggacuauguugaagauaca

SEQ ID NO: 843838 - RNA, 19 nt, Homo sapiens
  misc_RNA (1)...(19): siRNA sense strand
uggaagaaauuaccucaga

SEQ ID NO: 843839 - RNA, 19 nt, Homo sapiens
  misc_RNA (1)...(19): siRNA sense strand
uggauggccuucugcauuu

SEQ ID NO: 843840 - RNA, 19 nt, Homo sapiens
  misc_RNA (1)...(19): siRNA sense strand
cacucaagauuuccaauuu

SEQ ID NO: 843841 - RNA, 19 nt, Homo sapiens
  misc_RNA (1)...(19): siRNA sense strand
gcacucaagauuuccaauu

SEQ ID NO: 843842 - RNA, 19 nt, Homo sapiens
  misc_RNA (1)...(19): siRNA sense strand
uagaguaucaagcuuguua

SEQ ID NO: 843843 - RNA, 19 nt, Homo sapiens
  misc_RNA (1)...(19): siRNA sense strand
gacaagaccacguucuaaa

SEQ ID NO: 843844 - RNA, 19 nt, Homo sapiens
  misc_RNA (1)...(19): siRNA sense strand
aaaggacgauugccauaug

SEQ ID NO: 843845 - RNA, 19 nt, Homo sapiens
  misc_RNA (1)...(19): siRNA sense strand
gaaaguuuauugcauucca

SEQ ID NO: 843846 - RNA, 19 nt, Homo sapiens
  misc_RNA (1)...(19): siRNA sense strand
gagacaagaccacguucua

SEQ ID NO: 843847 - RNA, 19 nt, Homo sapiens
  misc_RNA (1)...(19): siRNA sense strand
cuucacuccugauuuauaa

SEQ ID NO: 843848 - RNA, 19 nt, Homo sapiens
  misc_RNA (1)...(19): siRNA sense strand
gaacuucaggacuauguug

SEQ ID NO: 843849 - RNA, 19 nt, Homo sapiens
  misc_RNA (1)...(19): siRNA sense strand
gcuuauggacugaaaguuu

SEQ ID NO: 843850 - RNA, 19 nt, Homo sapiens
  misc_RNA (1)...(19): siRNA sense strand
cagaauugcccuuaaugaa

SEQ ID NO: 843851 - RNA, 19 nt, Homo sapiens
  misc_RNA (1)...(19): siRNA sense strand
uaacauccuccaacacauu

SEQ ID NO: 843852 - RNA, 19 nt, Homo sapiens
  misc_RNA (1)...(19): siRNA sense strand
gaagaaauuaccucagaag

SEQ ID NO: 843853 - RNA, 19 nt, Homo sapiens
  misc_RNA (1)...(19): siRNA sense strand
uauaaggccucugauggaa

SEQ ID NO: 843854 - RNA, 19 nt, Homo sapiens
  misc_RNA (1)...(19): siRNA sense strand
agaaauuaccucagaagaa

SEQ ID NO: 843855 - RNA, 19 nt, Homo sapiens
  misc_RNA (1)...(19): siRNA sense strand
gaagauacaucggaauacc

SEQ ID NO: 843856 - RNA, 19 nt, Homo sapiens
  misc_RNA (1)...(19): siRNA sense strand
cauggaagaauaccuugua

SEQ ID NO: 843857 - RNA, 19 nt, Homo sapiens
  misc_RNA (1)...(19): siRNA sense strand
ggacugaaaguuuauugca

SEQ ID NO: 843858 - RNA, 19 nt, Homo sapiens
  misc_RNA (1)...(19): siRNA sense strand
gaacuuugucgcuuaugga

SEQ ID NO: 843859 - RNA, 19 nt, Homo sapiens
  misc_RNA (1)...(19): siRNA sense strand
uuucagcacucaagauuuc

SEQ ID NO: 843860 - RNA, 19 nt, Homo sapiens
  misc_RNA (1)...(19): siRNA sense strand
ucaggacuauguugaagau

SEQ ID NO: 843861 - RNA, 19 nt, Homo sapiens
  misc_RNA (1)...(19): siRNA sense strand
uaggacagcauacaauuug

SEQ ID NO: 843862 - RNA, 19 nt, Homo sapiens
  misc_RNA (1)...(19): siRNA sense strand
uaaguuauuuagccugcaa

SEQ ID NO: 843863 - RNA, 19 nt, Homo sapiens
  misc_RNA (1)...(19): siRNA sense strand
ccagaauugcccuuaauga

SEQ ID NO: 843864 - RNA, 19 nt, Homo sapiens
  misc_RNA (1)...(19): siRNA sense strand
gaguugaagcucugacuga

SEQ ID NO: 843865 - RNA, 19 nt, Homo sapiens
  misc_RNA (1)...(19): siRNA sense strand
cagaagacaauuuccaguu

SEQ ID NO: 843866 - RNA, 19 nt, Homo sapiens
  misc_RNA (1)...(19): siRNA sense strand
gacaauuuccaguuuaugu

SEQ ID NO: 843867 - RNA, 19 nt, Homo sapiens
  misc_RNA (1)...(19): siRNA sense strand
gaucccagccuguuauuac

SEQ ID NO: 843868 - RNA, 19 nt, Homo sapiens
  misc_RNA (1)...(19): siRNA sense strand
gaggguuccuacuuguuau

SEQ ID NO: 843869 - RNA, 19 nt, Homo sapiens
  misc_RNA (1)...(19): siRNA sense strand
agaauugcccuuaaugaau

SEQ ID NO: 843870 - RNA, 19 nt, Homo sapiens
  misc_RNA (1)...(19): siRNA sense strand
uaccagaauugcccuuaau

SEQ ID NO: 843871 - RNA, 19 nt, Homo sapiens
  misc_RNA (1)...(19): siRNA sense strand
caguuuauguacuaccaaa

SEQ ID NO: 843872 - RNA, 19 nt, Homo sapiens
  misc_RNA (1)...(19): siRNA sense strand
ccagaaaaguaccagaauu

SEQ ID NO: 843873 - RNA, 19 nt, Homo sapiens
  misc_RNA (1)...(19): siRNA sense strand
guuccuacuuguuaucuca

SEQ ID NO: 843874 - RNA, 19 nt, Homo sapiens
  misc_RNA (1)...(19): siRNA sense strand
ucgaugcauuuacuucaaa

SEQ ID NO: 843875 - RNA, 19 nt, Homo sapiens
  misc_RNA (1)...(19): siRNA sense strand
gagcaauugucugguccuu

SEQ ID NO: 843876 - RNA, 19 nt, Homo sapiens
  misc_RNA (1)...(19): siRNA sense strand
gauaccacaacacaacaaa

SEQ ID NO: 843877 - RNA, 19 nt, Homo sapiens
  misc_RNA (1)...(19): siRNA sense strand
gcuuucagcacucaagauu

SEQ ID NO: 843878 - RNA, 19 nt, Homo sapiens
  misc_RNA (1)...(19): siRNA sense strand
agacaagaccacguucuaa

SEQ ID NO: 843879 - RNA, 19 nt, Homo sapiens
  misc_RNA (1)...(19): siRNA sense strand
uugaagauacaucggaaua

SEQ ID NO: 843880 - RNA, 19 nt, Homo sapiens
  misc_RNA (1)...(19): siRNA sense strand
gacugaaaguuuauugcau

SEQ ID NO: 843881 - RNA, 19 nt, Homo sapiens
  misc_RNA (1)...(19): siRNA sense strand
aaaguagaguaucaagcuu

SEQ ID NO: 843882 - RNA, 19 nt, Homo sapiens
  misc_RNA (1)...(19): siRNA sense strand
ggaagaaaaucagaagaca

SEQ ID NO: 843883 - RNA, 19 nt, Homo sapiens
  misc_RNA (1)...(19): siRNA sense strand
cuaaagaaacuaaguagcu

SEQ ID NO: 843884 - RNA, 19 nt, Homo sapiens
  misc_RNA (1)...(19): siRNA sense strand
caucauggaagaauaccuu

SEQ ID NO: 843885 - RNA, 19 nt, Homo sapiens
  misc_RNA (1)...(19): siRNA sense strand
ugcaagaccuguuguuacu

SEQ ID NO: 843886 - RNA, 19 nt, Homo sapiens
  misc_RNA (1)...(19): siRNA sense strand
cuaggacagcauacaauuu

SEQ ID NO: 843887 - RNA, 19 nt, Homo sapiens
  misc_RNA (1)...(19): siRNA sense strand
uugaagcucugacugaaag

SEQ ID NO: 843888 - RNA, 19 nt, Homo sapiens
  misc_RNA (1)...(19): siRNA sense strand
uauuuaacauccuccaaca

SEQ ID NO: 843889 - RNA, 19 nt, Homo sapiens
  misc_RNA (1)...(19): siRNA sense strand
aaggacgauugccauauga

SEQ ID NO: 843890 - RNA, 19 nt, Homo sapiens
  misc_RNA (1)...(19): siRNA sense strand
caaaaggacgauugccaua

SEQ ID NO: 843891 - RNA, 19 nt, Homo sapiens
  misc_RNA (1)...(19): siRNA sense strand
uaaggccucugauggaaaa

SEQ ID NO: 843892 - RNA, 19 nt, Homo sapiens
  misc_RNA (1)...(19): siRNA sense strand
gcauuccaacagcucauuu

SEQ ID NO: 843893 - RNA, 19 nt, Homo sapiens
  misc_RNA (1)...(19): siRNA sense strand
ccugcaagaccuguuguua

SEQ ID NO: 843894 - RNA, 19 nt, Homo sapiens
  misc_RNA (1)...(19): siRNA sense strand
gcaggaugagcucuuaaag

SEQ ID NO: 843895 - RNA, 19 nt, Homo sapiens
  misc_RNA (1)...(19): siRNA sense strand
uuaaagccaauuuccagaa

SEQ ID NO: 843896 - RNA, 19 nt, Homo sapiens
  misc_RNA (1)...(19): siRNA sense strand
agauacaucggaauaccua

SEQ ID NO: 843897 - RNA, 19 nt, Homo sapiens
  misc_RNA (1)...(19): siRNA sense strand
ggauaccacaacacaacaa

SEQ ID NO: 843898 - RNA, 19 nt, Homo sapiens
  misc_RNA (1)...(19): siRNA sense strand
ugauuuauaaggccucuga

SEQ ID NO: 843899 - RNA, 19 nt, Homo sapiens
  misc_RNA (1)...(19): siRNA sense strand
ugaacuuugucgcuuaugg

SEQ ID NO: 843900 - RNA, 19 nt, Homo sapiens
  misc_RNA (1)...(19): siRNA sense strand
ccuucagacuccucuaguu

SEQ ID NO: 843901 - RNA, 19 nt, Homo sapiens
  misc_RNA (1)...(19): siRNA sense strand
ggauggccuucugcauuuc

SEQ ID NO: 843902 - RNA, 19 nt, Homo sapiens
  misc_RNA (1)...(19): siRNA sense strand
gagcucuuaaagccaauuu

SEQ ID NO: 843903 - RNA, 19 nt, Homo sapiens
  misc_RNA (1)...(19): siRNA sense strand
uuauaaggccucugaugga

SEQ ID NO: 843904 - RNA, 19 nt, Homo sapiens
  misc_RNA (1)...(19): siRNA sense strand
cugaaaguuuauugcauuc

SEQ ID NO: 843905 - RNA, 19 nt, Homo sapiens
  misc_RNA (1)...(19): siRNA sense strand
ggaacgagaaugccuacac

SEQ ID NO: 843906 - RNA, 19 nt, Homo sapiens
  misc_RNA (1)...(19): siRNA sense strand
cuggauggccuucugcauu

SEQ ID NO: 843907 - RNA, 19 nt, Homo sapiens
  misc_RNA (1)...(19): siRNA sense strand
cagaaaaguaccagaauug

SEQ ID NO: 843908 - RNA, 19 nt, Homo sapiens
  misc_RNA (1)...(19): siRNA sense strand
gaagaaaaucagaagacaa

SEQ ID NO: 843909 - RNA, 19 nt, Homo sapiens
  misc_RNA (1)...(19): siRNA sense strand
uuacuaggacagcauacaa

SEQ ID NO: 843910 - RNA, 19 nt, Homo sapiens
  misc_RNA (1)...(19): siRNA sense strand
guuaucucaugcagcagaa

SEQ ID NO: 843911 - RNA, 19 nt, Homo sapiens
  misc_RNA (1)...(19): siRNA sense strand
cuucagacuccucuaguug

SEQ ID NO: 843912 - RNA, 19 nt, Homo sapiens
  misc_RNA (1)...(19): siRNA sense strand
uccaacagcucauuuuaug

SEQ ID NO: 843913 - RNA, 19 nt, Homo sapiens
  misc_RNA (1)...(19): siRNA sense strand
guugaagcucugacugaaa

SEQ ID NO: 843914 - RNA, 19 nt, Homo sapiens
  misc_RNA (1)...(19): siRNA sense strand
ggacgauugccauaugaac

SEQ ID NO: 843915 - RNA, 19 nt, Homo sapiens
  misc_RNA (1)...(19): siRNA sense strand
gcccuuaaugaauuuagaa

SEQ ID NO: 843916 - RNA, 19 nt, Homo sapiens
  misc_RNA (1)...(19): siRNA sense strand
uaccaaaaguagaguauca

SEQ ID NO: 843917 - RNA, 19 nt, Homo sapiens
  misc_RNA (1)...(19): siRNA sense strand
acacgcagccacaggaauc

SEQ ID NO: 843918 - RNA, 19 nt, Homo sapiens
  misc_RNA (1)...(19): siRNA sense strand
gguguaccuuccagucucu

SEQ ID NO: 843919 - RNA, 19 nt, Homo sapiens
  misc_RNA (1)...(19): siRNA sense strand
aggacuauguugaagauac

SEQ ID NO: 843920 - RNA, 19 nt, Homo sapiens
  misc_RNA (1)...(19): siRNA sense strand
gauucuucacuccugauuu

SEQ ID NO: 843921 - RNA, 19 nt, Homo sapiens
  misc_RNA (1)...(19): siRNA sense strand
cuccaacacauucuaaaga

SEQ ID NO: 843922 - RNA, 19 nt, Homo sapiens
  misc_RNA (1)...(19): siRNA sense strand
aguagaguaucaagcuugu

SEQ ID NO: 843923 - RNA, 19 nt, Homo sapiens
  misc_RNA (1)...(19): siRNA sense strand
uuagaucccagccuguuau

SEQ ID NO: 843924 - RNA, 19 nt, Homo sapiens
  misc_RNA (1)...(19): siRNA sense strand
ccagccuguuauuaccaua

SEQ ID NO: 843925 - RNA, 19 nt, Homo sapiens
  misc_RNA (1)...(19): siRNA sense strand
gagaauaacuugucugacu

SEQ ID NO: 843926 - RNA, 19 nt, Homo sapiens
  misc_RNA (1)...(19): siRNA sense strand
agaauaacuugucugacua

SEQ ID NO: 843927 - RNA, 19 nt, Homo sapiens
  misc_RNA (1)...(19): siRNA sense strand
gggagaauaacuugucuga

SEQ ID NO: 843928 - RNA, 19 nt, Homo sapiens
  misc_RNA (1)...(19): siRNA sense strand
ggagacgggacuuacuuug

SEQ ID NO: 843929 - RNA, 19 nt, Homo sapiens
  misc_RNA (1)...(19): siRNA sense strand
gggagacgggacuuacuuu

SEQ ID NO: 843930 - RNA, 19 nt, Homo sapiens
  misc_RNA (1)...(19): siRNA sense strand
caccaacuccggacaguca

SEQ ID NO: 843931 - RNA, 19 nt, Homo sapiens
  misc_RNA (1)...(19): siRNA sense strand
gaauaacuugucugacuac

SEQ ID NO: 843932 - RNA, 19 nt, Homo sapiens
  misc_RNA (1)...(19): siRNA sense strand
gcgggagaauaacuugucu

SEQ ID NO: 843933 - RNA, 19 nt, Homo sapiens
  misc_RNA (1)...(19): siRNA sense strand
gagacgggacuuacuuugc

SEQ ID NO: 843934 - RNA, 19 nt, Homo sapiens
  misc_RNA (1)...(19): siRNA sense strand
cugacuaccaguauucuug

SEQ ID NO: 843935 - RNA, 19 nt, Homo sapiens
  misc_RNA (1)...(19): siRNA sense strand
gggagcagcugcagacaga

SEQ ID NO: 843936 - RNA, 19 nt, Homo sapiens
  misc_RNA (1)...(19): siRNA sense strand
gccgacagcugcagaagga

SEQ ID NO: 843937 - RNA, 19 nt, Homo sapiens
  misc_RNA (1)...(19): siRNA sense strand
gcucacaacugcgaugaca

SEQ ID NO: 843938 - RNA, 19 nt, Homo sapiens
  misc_RNA (1)...(19): siRNA sense strand
ucccagaccuccucucaga

SEQ ID NO: 843939 - RNA, 19 nt, Homo sapiens
  misc_RNA (1)...(19): siRNA sense strand
gagcagugcagagggauuu

SEQ ID NO: 843940 - RNA, 19 nt, Homo sapiens
  misc_RNA (1)...(19): siRNA sense strand
gagguaaagcgguugaaug

SEQ ID NO: 843941 - RNA, 19 nt, Homo sapiens
  misc_RNA (1)...(19): siRNA sense strand
gaccuccucucagaacaga

SEQ ID NO: 843942 - RNA, 19 nt, Homo sapiens
  misc_RNA (1)...(19): siRNA sense strand
cggagaagcugcgggagau

SEQ ID NO: 843943 - RNA, 19 nt, Homo sapiens
  misc_RNA (1)...(19): siRNA sense strand
agguaaagcgguugaauga

SEQ ID NO: 843944 - RNA, 19 nt, Homo sapiens
  misc_RNA (1)...(19): siRNA sense strand
ggccugagacggagcaaug

SEQ ID NO: 843945 - RNA, 19 nt, Homo sapiens
  misc_RNA (1)...(19): siRNA sense strand
gcaggacugugaggagaag

SEQ ID NO: 843946 - RNA, 19 nt, Homo sapiens
  misc_RNA (1)...(19): siRNA sense strand
gaucguacugcccauggaa

SEQ ID NO: 843947 - RNA, 19 nt, Homo sapiens
  misc_RNA (1)...(19): siRNA sense strand
ggacugugccaagcagaug

SEQ ID NO: 843948 - RNA, 19 nt, Homo sapiens
  misc_RNA (1)...(19): siRNA sense strand
ccagaucaccgcccugaag

SEQ ID NO: 843949 - RNA, 19 nt, Homo sapiens
  misc_RNA (1)...(19): siRNA sense strand
gcgccuccaucuccuccuu

SEQ ID NO: 843950 - RNA, 19 nt, Homo sapiens
  misc_RNA (1)...(19): siRNA sense strand
gcagggcgaggaggaauca

SEQ ID NO: 843951 - RNA, 19 nt, Homo sapiens
  misc_RNA (1)...(19): siRNA sense strand
gcuccaagagggccugaga

SEQ ID NO: 843952 - RNA, 19 nt, Homo sapiens
  misc_RNA (1)...(19): siRNA sense strand
gaagcugcgggagaucgua

SEQ ID NO: 843953 - RNA, 19 nt, Homo sapiens
  misc_RNA (1)...(19): siRNA sense strand
ggagaucgaggagcugaag

SEQ ID NO: 843954 - RNA, 19 nt, Homo sapiens
  misc_RNA (1)...(19): siRNA sense strand
gcucccagaccuccucuca

SEQ ID NO: 843955 - RNA, 19 nt, Homo sapiens
  misc_RNA (1)...(19): siRNA sense strand
gggccgaggagcugauuca

SEQ ID NO: 843956 - RNA, 19 nt, Homo sapiens
  misc_RNA (1)...(19): siRNA sense strand
cagaacagagggccaaggu

SEQ ID NO: 843957 - RNA, 19 nt, Homo sapiens
  misc_RNA (1)...(19): siRNA sense strand
caacaucccucuugcucua

SEQ ID NO: 843958 - RNA, 19 nt, Homo sapiens
  misc_RNA (1)...(19): siRNA sense strand
ugaaguauaugaugaguga

SEQ ID NO: 843959 - RNA, 19 nt, Homo sapiens
  misc_RNA (1)...(19): siRNA sense strand
ccgaaaggcucacagaugu

SEQ ID NO: 843960 - RNA, 19 nt, Homo sapiens
  misc_RNA (1)...(19): siRNA sense strand
ggauuuccgugaucagaau

SEQ ID NO: 843961 - RNA, 19 nt, Homo sapiens
  misc_RNA (1)...(19): siRNA sense strand
uaacguaugaccugcaauu

SEQ ID NO: 843962 - RNA, 19 nt, Homo sapiens
  misc_RNA (1)...(19): siRNA sense strand
cguaugaccugcaauuugg

SEQ ID NO: 843963 - RNA, 19 nt, Homo sapiens
  misc_RNA (1)...(19): siRNA sense strand
gaucagaauauaccugguu

SEQ ID NO: 843964 - RNA, 19 nt, Homo sapiens
  misc_RNA (1)...(19): siRNA sense strand
gcaguaacuuauguugaug

SEQ ID NO: 843965 - RNA, 19 nt, Homo sapiens
  misc_RNA (1)...(19): siRNA sense strand
ugcaguaacuuauguugau

SEQ ID NO: 843966 - RNA, 19 nt, Homo sapiens
  misc_RNA (1)...(19): siRNA sense strand
gcauuuugcuacaggauuu

SEQ ID NO: 843967 - RNA, 19 nt, Homo sapiens
  misc_RNA (1)...(19): siRNA sense strand
cuacaggauuuccgugauc

SEQ ID NO: 843968 - RNA, 19 nt, Homo sapiens
  misc_RNA (1)...(19): siRNA sense strand
uaugaugagugaggaguug

SEQ ID NO: 843969 - RNA, 19 nt, Homo sapiens
  misc_RNA (1)...(19): siRNA sense strand
gcuacaggauuuccgugau

SEQ ID NO: 843970 - RNA, 19 nt, Homo sapiens
  misc_RNA (1)...(19): siRNA sense strand
gaagauuccagaggagugu

SEQ ID NO: 843971 - RNA, 19 nt, Homo sapiens
  misc_RNA (1)...(19): siRNA sense strand
gaucaucaccuccauuuuc

SEQ ID NO: 843972 - RNA, 19 nt, Homo sapiens
  misc_RNA (1)...(19): siRNA sense strand
cuaggugucauuacaguga

SEQ ID NO: 843973 - RNA, 19 nt, Homo sapiens
  misc_RNA (1)...(19): siRNA sense strand
agaggaguguguugcugaa

SEQ ID NO: 843974 - RNA, 19 nt, Homo sapiens
  misc_RNA (1)...(19): siRNA sense strand
cgcccucucugagucguua

SEQ ID NO: 843975 - RNA, 19 nt, Homo sapiens
  misc_RNA (1)...(19): siRNA sense strand
ccucuugcucuaugaauga

SEQ ID NO: 843976 - RNA, 19 nt, Homo sapiens
  misc_RNA (1)...(19): siRNA sense strand
cagaauauaccugguugug

SEQ ID NO: 843977 - RNA, 19 nt, Homo sapiens
  misc_RNA (1)...(19): siRNA sense strand
caguugaaauaguggacuu

SEQ ID NO: 843978 - RNA, 19 nt, Homo sapiens
  misc_RNA (1)...(19): siRNA sense strand
uuuccuaggugucauuaca

SEQ ID NO: 843979 - RNA, 19 nt, Homo sapiens
  misc_RNA (1)...(19): siRNA sense strand
ucucugagucguuauuuua

SEQ ID NO: 843980 - RNA, 19 nt, Homo sapiens
  misc_RNA (1)...(19): siRNA sense strand
caaaacauucuucaucaug

SEQ ID NO: 843981 - RNA, 19 nt, Homo sapiens
  misc_RNA (1)...(19): siRNA sense strand
agaauauaccugguuguga

SEQ ID NO: 843982 - RNA, 19 nt, Homo sapiens
  misc_RNA (1)...(19): siRNA sense strand
aaacauucuucaucaugcu

SEQ ID NO: 843983 - RNA, 19 nt, Homo sapiens
  misc_RNA (1)...(19): siRNA sense strand
ucaccgaaaggcucacaga

SEQ ID NO: 843984 - RNA, 19 nt, Homo sapiens
  misc_RNA (1)...(19): siRNA sense strand
cuuaugucuugcugcagua

SEQ ID NO: 843985 - RNA, 19 nt, Homo sapiens
  misc_RNA (1)...(19): siRNA sense strand
gaguuggugcugggcauuu

SEQ ID NO: 843986 - RNA, 19 nt, Homo sapiens
  misc_RNA (1)...(19): siRNA sense strand
aguaacguaugaccugcaa

SEQ ID NO: 843987 - RNA, 19 nt, Homo sapiens
  misc_RNA (1)...(19): siRNA sense strand
gcaggaauaugucuaacua

SEQ ID NO: 843988 - RNA, 19 nt, Homo sapiens
  misc_RNA (1)...(19): siRNA sense strand
ggaagaaacuccagagaca

SEQ ID NO: 843989 - RNA, 19 nt, Homo sapiens
  misc_RNA (1)...(19): siRNA sense strand
gaaagcauaugccauggaa

SEQ ID NO: 843990 - RNA, 19 nt, Homo sapiens
  misc_RNA (1)...(19): siRNA sense strand
guagagaaguaaccacaua

SEQ ID NO: 843991 - RNA, 19 nt, Homo sapiens
  misc_RNA (1)...(19): siRNA sense strand
ggacagauggcaaggauuu

SEQ ID NO: 843992 - RNA, 19 nt, Homo sapiens
  misc_RNA (1)...(19): siRNA sense strand
gaaagagauuggugagaga

SEQ ID NO: 843993 - RNA, 19 nt, Homo sapiens
  misc_RNA (1)...(19): siRNA sense strand
gaaguuguguagcaaaguu

SEQ ID NO: 843994 - RNA, 19 nt, Homo sapiens
  misc_RNA (1)...(19): siRNA sense strand
gagcauucguuucaccaua

SEQ ID NO: 843995 - RNA, 19 nt, Homo sapiens
  misc_RNA (1)...(19): siRNA sense strand
gaagacagccuuacagaag

SEQ ID NO: 843996 - RNA, 19 nt, Homo sapiens
  misc_RNA (1)...(19): siRNA sense strand
gaaaccaagcucauaguaa

SEQ ID NO: 843997 - RNA, 19 nt, Homo sapiens
  misc_RNA (1)...(19): siRNA sense strand
caucugauaucaugaguug

SEQ ID NO: 843998 - RNA, 19 nt, Homo sapiens
  misc_RNA (1)...(19): siRNA sense strand
gucagaaacuguuaaagaa

SEQ ID NO: 843999 - RNA, 19 nt, Homo sapiens
  misc_RNA (1)...(19): siRNA sense strand
cagcaucucucuuucagaa

SEQ ID NO: 844000 - RNA, 19 nt, Homo sapiens
  misc_RNA (1)...(19): siRNA sense strand
ggaagaaaccaagcucaua

SEQ ID NO: 844001 - RNA, 19 nt, Homo sapiens
  misc_RNA (1)...(19): siRNA sense strand
gaaguaaccacauaucugu

SEQ ID NO: 844002 - RNA, 19 nt, Homo sapiens
  misc_RNA (1)...(19): siRNA sense strand
guugaaaucuguaucacaa

SEQ ID NO: 844003 - RNA, 19 nt, Homo sapiens
  misc_RNA (1)...(19): siRNA sense strand
ucagagaauuugucagaaa

SEQ ID NO: 844004 - RNA, 19 nt, Homo sapiens
  misc_RNA (1)...(19): siRNA sense strand
gaacugugcaggaauaugu

SEQ ID NO: 844005 - RNA, 19 nt, Homo sapiens
  misc_RNA (1)...(19): siRNA sense strand
gcauguagcagcaaagaaa

SEQ ID NO: 844006 - RNA, 19 nt, Homo sapiens
  misc_RNA (1)...(19): siRNA sense strand
caacauggagcauucguuu

SEQ ID NO: 844007 - RNA, 19 nt, Homo sapiens
  misc_RNA (1)...(19): siRNA sense strand
gcauguggaugaagagaga

SEQ ID NO: 844008 - RNA, 19 nt, Homo sapiens
  misc_RNA (1)...(19): siRNA sense strand
caauagaacucagcaaagu

SEQ ID NO: 844009 - RNA, 19 nt, Homo sapiens
  misc_RNA (1)...(19): siRNA sense strand
acacggaaguuauaguaaa

SEQ ID NO: 844010 - RNA, 19 nt, Homo sapiens
  misc_RNA (1)...(19): siRNA sense strand
aaaggaaagucuaaagaug

SEQ ID NO: 844011 - RNA, 19 nt, Homo sapiens
  misc_RNA (1)...(19): siRNA sense strand
gaagaaaccaagcucauag

SEQ ID NO: 844012 - RNA, 19 nt, Homo sapiens
  misc_RNA (1)...(19): siRNA sense strand
agagacaucuuccgcauga

SEQ ID NO: 844013 - RNA, 19 nt, Homo sapiens
  misc_RNA (1)...(19): siRNA sense strand
gaaguguauuccuuuccua

SEQ ID NO: 844014 - RNA, 19 nt, Homo sapiens
  misc_RNA (1)...(19): siRNA sense strand
caagucagauggaaguuca

SEQ ID NO: 844015 - RNA, 19 nt, Homo sapiens
  misc_RNA (1)...(19): siRNA sense strand
gugcaacaauccugagaaa

SEQ ID NO: 844016 - RNA, 19 nt, Homo sapiens
  misc_RNA (1)...(19): siRNA sense strand
gagguucuuugacguguuu

SEQ ID NO: 844017 - RNA, 19 nt, Homo sapiens
  misc_RNA (1)...(19): siRNA sense strand
gcucacagcuuugaaacug

SEQ ID NO: 844018 - RNA, 19 nt, Homo sapiens
  misc_RNA (1)...(19): siRNA sense strand
guucagaaguguauuccuu

SEQ ID NO: 844019 - RNA, 19 nt, Homo sapiens
  misc_RNA (1)...(19): siRNA sense strand
gaaauuggaaagaagauuc

SEQ ID NO: 844020 - RNA, 19 nt, Homo sapiens
  misc_RNA (1)...(19): siRNA sense strand
cagauuaccaaaccaauaa

SEQ ID NO: 844021 - RNA, 19 nt, Homo sapiens
  misc_RNA (1)...(19): siRNA sense strand
ucagcaaagugaaagcaua

SEQ ID NO: 844022 - RNA, 19 nt, Homo sapiens
  misc_RNA (1)...(19): siRNA sense strand
cauauagacucagagaauu

SEQ ID NO: 844023 - RNA, 19 nt, Homo sapiens
  misc_RNA (1)...(19): siRNA sense strand
ugaaaucuguaucacaaga

SEQ ID NO: 844024 - RNA, 19 nt, Homo sapiens
  misc_RNA (1)...(19): siRNA sense strand
gaagaaugcagcagaaugg

SEQ ID NO: 844025 - RNA, 19 nt, Homo sapiens
  misc_RNA (1)...(19): siRNA sense strand
gauaucaugaguugcauuu

SEQ ID NO: 844026 - RNA, 19 nt, Homo sapiens
  misc_RNA (1)...(19): siRNA sense strand
ccuauagaauaccaagaua

SEQ ID NO: 844027 - RNA, 19 nt, Homo sapiens
  misc_RNA (1)...(19): siRNA sense strand
cagaauggcuccagugcau

SEQ ID NO: 844028 - RNA, 19 nt, Homo sapiens
  misc_RNA (1)...(19): siRNA sense strand
cagaucauguuucuauuuc

SEQ ID NO: 844029 - RNA, 19 nt, Homo sapiens
  misc_RNA (1)...(19): siRNA sense strand
ggucauuacugccuauaca

SEQ ID NO: 844030 - RNA, 19 nt, Homo sapiens
  misc_RNA (1)...(19): siRNA sense strand
aagauaagcucuacuugca

SEQ ID NO: 844031 - RNA, 19 nt, Homo sapiens
  misc_RNA (1)...(19): siRNA sense strand
ggcaguaguugaaaucugu

SEQ ID NO: 844032 - RNA, 19 nt, Homo sapiens
  misc_RNA (1)...(19): siRNA sense strand
ugagaagaaugcagcagaa

SEQ ID NO: 844033 - RNA, 19 nt, Homo sapiens
  misc_RNA (1)...(19): siRNA sense strand
ugaaggcuguggccaagaa

SEQ ID NO: 844034 - RNA, 19 nt, Homo sapiens
  misc_RNA (1)...(19): siRNA sense strand
aaaccaagcucauaguaac

SEQ ID NO: 844035 - RNA, 19 nt, Homo sapiens
  misc_RNA (1)...(19): siRNA sense strand
aaggaacugugcaggaaua

SEQ ID NO: 844036 - RNA, 19 nt, Homo sapiens
  misc_RNA (1)...(19): siRNA sense strand
ccacagaggcaacaaggaa

SEQ ID NO: 844037 - RNA, 19 nt, Homo sapiens
  misc_RNA (1)...(19): siRNA sense strand
gaaaucuucacagacaaua

SEQ ID NO: 844038 - RNA, 19 nt, Homo sapiens
  misc_RNA (1)...(19): siRNA sense strand
caacaauccugagaaagca

SEQ ID NO: 844039 - RNA, 19 nt, Homo sapiens
  misc_RNA (1)...(19): siRNA sense strand
gaagacacugugagaaguu

SEQ ID NO: 844040 - RNA, 19 nt, Homo sapiens
  misc_RNA (1)...(19): siRNA sense strand
guguauuccuuuccuaauu

SEQ ID NO: 844041 - RNA, 19 nt, Homo sapiens
  misc_RNA (1)...(19): siRNA sense strand
acaaggaacugugcaggaa

SEQ ID NO: 844042 - RNA, 19 nt, Homo sapiens
  misc_RNA (1)...(19): siRNA sense strand
gaacucagcaaaguacaga

SEQ ID NO: 844043 - RNA, 19 nt, Homo sapiens
  misc_RNA (1)...(19): siRNA sense strand
ucaguuucauacccaaaua

SEQ ID NO: 844044 - RNA, 19 nt, Homo sapiens
  misc_RNA (1)...(19): siRNA sense strand
ucacacggaaguuauagua

SEQ ID NO: 844045 - RNA, 19 nt, Homo sapiens
  misc_RNA (1)...(19): siRNA sense strand
aaucgcaucugauaucaug

SEQ ID NO: 844046 - RNA, 19 nt, Homo sapiens
  misc_RNA (1)...(19): siRNA sense strand
guagcaaaguuguucuuca

SEQ ID NO: 844047 - RNA, 19 nt, Homo sapiens
  misc_RNA (1)...(19): siRNA sense strand
gagaaguuguguagcaaag

SEQ ID NO: 844048 - RNA, 19 nt, Homo sapiens
  misc_RNA (1)...(19): siRNA sense strand
cugcaaguccuauagaaua

SEQ ID NO: 844049 - RNA, 19 nt, Homo sapiens
  misc_RNA (1)...(19): siRNA sense strand
augacaagcugccguuuaa

SEQ ID NO: 844050 - RNA, 19 nt, Homo sapiens
  misc_RNA (1)...(19): siRNA sense strand
cgaagacacuccucaugca

SEQ ID NO: 844051 - RNA, 19 nt, Homo sapiens
  misc_RNA (1)...(19): siRNA sense strand
gagaccgaguccauugaaa

SEQ ID NO: 844052 - RNA, 19 nt, Homo sapiens
  misc_RNA (1)...(19): siRNA sense strand
aagggaaaguagagaagua

SEQ ID NO: 844053 - RNA, 19 nt, Homo sapiens
  misc_RNA (1)...(19): siRNA sense strand
caagauggccagccucuca

SEQ ID NO: 844054 - RNA, 19 nt, Homo sapiens
  misc_RNA (1)...(19): siRNA sense strand
ccagaucauguuucuauuu

SEQ ID NO: 844055 - RNA, 19 nt, Homo sapiens
  misc_RNA (1)...(19): siRNA sense strand
caaaggguguggguucaga

SEQ ID NO: 844056 - RNA, 19 nt, Homo sapiens
  misc_RNA (1)...(19): siRNA sense strand
gauauagucugggccaagu

SEQ ID NO: 844057 - RNA, 19 nt, Homo sapiens
  misc_RNA (1)...(19): siRNA sense strand
uuagaugacucugagauug

SEQ ID NO: 844058 - RNA, 19 nt, Homo sapiens
  misc_RNA (1)...(19): siRNA sense strand
auaauuagcucaucuucag

SEQ ID NO: 844059 - RNA, 19 nt, Homo sapiens
  misc_RNA (1)...(19): siRNA sense strand
caaagaaagggaaaguaga

SEQ ID NO: 844060 - RNA, 19 nt, Homo sapiens
  misc_RNA (1)...(19): siRNA sense strand
ccaaagaaagggaaaguag

SEQ ID NO: 844061 - RNA, 19 nt, Homo sapiens
  misc_RNA (1)...(19): siRNA sense strand
ccauggaaauuggaaagaa

SEQ ID NO: 844062 - RNA, 19 nt, Homo sapiens
  misc_RNA (1)...(19): siRNA sense strand
gacagacacugagagauca

SEQ ID NO: 844063 - RNA, 19 nt, Homo sapiens
  misc_RNA (1)...(19): siRNA sense strand
gacaagcugccguuuaaga

SEQ ID NO: 844064 - RNA, 19 nt, Homo sapiens
  misc_RNA (1)...(19): siRNA sense strand
gcugaucacacggaaguua

SEQ ID NO: 844065 - RNA, 19 nt, Homo sapiens
  misc_RNA (1)...(19): siRNA sense strand
gcaacaauccugagaaagc

SEQ ID NO: 844066 - RNA, 19 nt, Homo sapiens
  misc_RNA (1)...(19): siRNA sense strand
gcauaugccauggaaauug

SEQ ID NO: 844067 - RNA, 19 nt, Homo sapiens
  misc_RNA (1)...(19): siRNA sense strand
ugucagaaacuguuaaaga

SEQ ID NO: 844068 - RNA, 19 nt, Homo sapiens
  misc_RNA (1)...(19): siRNA sense strand
gaauuugucagaaacuguu

SEQ ID NO: 844069 - RNA, 19 nt, Homo sapiens
  misc_RNA (1)...(19): siRNA sense strand
gaagacacuccucaugcaa

SEQ ID NO: 844070 - RNA, 19 nt, Homo sapiens
  misc_RNA (1)...(19): siRNA sense strand
gaucauguuucuauuucag

SEQ ID NO: 844071 - RNA, 19 nt, Homo sapiens
  misc_RNA (1)...(19): siRNA sense strand
ucagauuaccaaaccaaua

SEQ ID NO: 844072 - RNA, 19 nt, Homo sapiens
  misc_RNA (1)...(19): siRNA sense strand
ccugaucaguguaccauug

SEQ ID NO: 844073 - RNA, 19 nt, Homo sapiens
  misc_RNA (1)...(19): siRNA sense strand
gagauugaagacagccuua

SEQ ID NO: 844074 - RNA, 19 nt, Homo sapiens
  misc_RNA (1)...(19): siRNA sense strand
caacuguucagacugguuu

SEQ ID NO: 844075 - RNA, 19 nt, Homo sapiens
  misc_RNA (1)...(19): siRNA sense strand
gaaaucuguaucacaagaa

SEQ ID NO: 844076 - RNA, 19 nt, Homo sapiens
  misc_RNA (1)...(19): siRNA sense strand
gcauucguuucaccauauu

SEQ ID NO: 844077 - RNA, 19 nt, Homo sapiens
  misc_RNA (1)...(19): siRNA sense strand
aguguuaccugcuguguau

SEQ ID NO: 844078 - RNA, 19 nt, Homo sapiens
  misc_RNA (1)...(19): siRNA sense strand
gaaagggaaaguagagaag

SEQ ID NO: 844079 - RNA, 19 nt, Homo sapiens
  misc_RNA (1)...(19): siRNA sense strand
gaagaaacuccagagacaa

SEQ ID NO: 844080 - RNA, 19 nt, Homo sapiens
  misc_RNA (1)...(19): siRNA sense strand
uguauuccuuuccuaauug

SEQ ID NO: 844081 - RNA, 19 nt, Homo sapiens
  misc_RNA (1)...(19): siRNA sense strand
cagccucagccaauuaaua

SEQ ID NO: 844082 - RNA, 19 nt, Homo sapiens
  misc_RNA (1)...(19): siRNA sense strand
uaacaaugaccaggcagua

SEQ ID NO: 844083 - RNA, 19 nt, Homo sapiens
  misc_RNA (1)...(19): siRNA sense strand
cuaccucacuggacagaug

SEQ ID NO: 844084 - RNA, 19 nt, Homo sapiens
  misc_RNA (1)...(19): siRNA sense strand
gaaggaaaacuuaaagaga

SEQ ID NO: 844085 - RNA, 19 nt, Homo sapiens
  misc_RNA (1)...(19): siRNA sense strand
uacagaagcuuuggagcaa

SEQ ID NO: 844086 - RNA, 19 nt, Homo sapiens
  misc_RNA (1)...(19): siRNA sense strand
ggccaaggaugagaagaau

SEQ ID NO: 844087 - RNA, 19 nt, Homo sapiens
  misc_RNA (1)...(19): siRNA sense strand
gagcugggcugccacuaug

SEQ ID NO: 844088 - RNA, 19 nt, Homo sapiens
  misc_RNA (1)...(19): siRNA sense strand
gaugagggcuucggugaug

SEQ ID NO: 844089 - RNA, 19 nt, Homo sapiens
  misc_RNA (1)...(19): siRNA sense strand
uggaagagcuggagcacuu

SEQ ID NO: 844090 - RNA, 19 nt, Homo sapiens
  misc_RNA (1)...(19): siRNA sense strand
ccaacaccaugaacaacua

SEQ ID NO: 844091 - RNA, 19 nt, Homo sapiens
  misc_RNA (1)...(19): siRNA sense strand
ggagucagcagcuaggaaa

SEQ ID NO: 844092 - RNA, 19 nt, Homo sapiens
  misc_RNA (1)...(19): siRNA sense strand
gggcaggagucagcagcua

SEQ ID NO: 844093 - RNA, 19 nt, Homo sapiens
  misc_RNA (1)...(19): siRNA sense strand
ggagcugggcugccacuau

SEQ ID NO: 844094 - RNA, 19 nt, Homo sapiens
  misc_RNA (1)...(19): siRNA sense strand
gggcugccacuaugauaau

SEQ ID NO: 844095 - RNA, 19 nt, Homo sapiens
  misc_RNA (1)...(19): siRNA sense strand
gggaggcccaacaccauga

SEQ ID NO: 844096 - RNA, 19 nt, Homo sapiens
  misc_RNA (1)...(19): siRNA sense strand
ggacgagccgcugaugaca

SEQ ID NO: 844097 - RNA, 19 nt, Homo sapiens
  misc_RNA (1)...(19): siRNA sense strand
ggcccaacaccaugaacaa

SEQ ID NO: 844098 - RNA, 19 nt, Homo sapiens
  misc_RNA (1)...(19): siRNA sense strand
gcugauggcccugcuguac

SEQ ID NO: 844099 - RNA, 19 nt, Homo sapiens
  misc_RNA (1)...(19): siRNA sense strand
ggaggagaagcgcaucuac

SEQ ID NO: 844100 - RNA, 19 nt, Homo sapiens
  misc_RNA (1)...(19): siRNA sense strand
gaagauaucucaugacaaa

SEQ ID NO: 844101 - RNA, 19 nt, Homo sapiens
  misc_RNA (1)...(19): siRNA sense strand
gaagaauucuccaaacauu

SEQ ID NO: 844102 - RNA, 19 nt, Homo sapiens
  misc_RNA (1)...(19): siRNA sense strand
gagagaaagucuucccuua

SEQ ID NO: 844103 - RNA, 19 nt, Homo sapiens
  misc_RNA (1)...(19): siRNA sense strand
gaagaaugcuaagaugauu

SEQ ID NO: 844104 - RNA, 19 nt, Homo sapiens
  misc_RNA (1)...(19): siRNA sense strand
gaaagaacacauuccauga

SEQ ID NO: 844105 - RNA, 19 nt, Homo sapiens
  misc_RNA (1)...(19): siRNA sense strand
gaacacauuccaugaaaga

SEQ ID NO: 844106 - RNA, 19 nt, Homo sapiens
  misc_RNA (1)...(19): siRNA sense strand
gaaccaaacguaaaggaaa

SEQ ID NO: 844107 - RNA, 19 nt, Homo sapiens
  misc_RNA (1)...(19): siRNA sense strand
caagugaaaucgaaucugu

SEQ ID NO: 844108 - RNA, 19 nt, Homo sapiens
  misc_RNA (1)...(19): siRNA sense strand
gcuaagaugauuucagaua

SEQ ID NO: 844109 - RNA, 19 nt, Homo sapiens
  misc_RNA (1)...(19): siRNA sense strand
aggaagaaaucaagaagua

SEQ ID NO: 844110 - RNA, 19 nt, Homo sapiens
  misc_RNA (1)...(19): siRNA sense strand
gaccuuugauccuccuuua

SEQ ID NO: 844111 - RNA, 19 nt, Homo sapiens
  misc_RNA (1)...(19): siRNA sense strand
aaagagaacuuggcaauag

SEQ ID NO: 844112 - RNA, 19 nt, Homo sapiens
  misc_RNA (1)...(19): siRNA sense strand
gaaagccaucugcgaaaua

SEQ ID NO: 844113 - RNA, 19 nt, Homo sapiens
  misc_RNA (1)...(19): siRNA sense strand
gggaagauaucucaugaca

SEQ ID NO: 844114 - RNA, 19 nt, Homo sapiens
  misc_RNA (1)...(19): siRNA sense strand
ggaaaugaagcaagugaaa

SEQ ID NO: 844115 - RNA, 19 nt, Homo sapiens
  misc_RNA (1)...(19): siRNA sense strand
ugagaaagaugaagaaacu

SEQ ID NO: 844116 - RNA, 19 nt, Homo sapiens
  misc_RNA (1)...(19): siRNA sense strand
cuucagaacuuucagagaa

SEQ ID NO: 844117 - RNA, 19 nt, Homo sapiens
  misc_RNA (1)...(19): siRNA sense strand
gagaaagucuucccuuagg

SEQ ID NO: 844118 - RNA, 19 nt, Homo sapiens
  misc_RNA (1)...(19): siRNA sense strand
gaagaaagugauacaagga

SEQ ID NO: 844119 - RNA, 19 nt, Homo sapiens
  misc_RNA (1)...(19): siRNA sense strand
aaagaaagccagauguuga

SEQ ID NO: 844120 - RNA, 19 nt, Homo sapiens
  misc_RNA (1)...(19): siRNA sense strand
cacauuccaugaaagauaa

SEQ ID NO: 844121 - RNA, 19 nt, Homo sapiens
  misc_RNA (1)...(19): siRNA sense strand
agaaagcucaggcccauua

SEQ ID NO: 844122 - RNA, 19 nt, Homo sapiens
  misc_RNA (1)...(19): siRNA sense strand
ugacaaaucugaaaaggaa

SEQ ID NO: 844123 - RNA, 19 nt, Homo sapiens
  misc_RNA (1)...(19): siRNA sense strand
ccagugacaucaaggaguu

SEQ ID NO: 844124 - RNA, 19 nt, Homo sapiens
  misc_RNA (1)...(19): siRNA sense strand
aagaacacauuccaugaaa

SEQ ID NO: 844125 - RNA, 19 nt, Homo sapiens
  misc_RNA (1)...(19): siRNA sense strand
uaaaggaaacguaugauuc

SEQ ID NO: 844126 - RNA, 19 nt, Homo sapiens
  misc_RNA (1)...(19): siRNA sense strand
ggaagaaugcuaagaugau

SEQ ID NO: 844127 - RNA, 19 nt, Homo sapiens
  misc_RNA (1)...(19): siRNA sense strand
ugaagcaagugaaaucgaa

SEQ ID NO: 844128 - RNA, 19 nt, Homo sapiens
  misc_RNA (1)...(19): siRNA sense strand
aaagccagauguugacaaa

SEQ ID NO: 844129 - RNA, 19 nt, Homo sapiens
  misc_RNA (1)...(19): siRNA sense strand
guaaaggaaacguaugauu

SEQ ID NO: 844130 - RNA, 19 nt, Homo sapiens
  misc_RNA (1)...(19): siRNA sense strand
gcaagccuauugacguguu

SEQ ID NO: 844131 - RNA, 19 nt, Homo sapiens
  misc_RNA (1)...(19): siRNA sense strand
ugaaagcauugaagaaagu

SEQ ID NO: 844132 - RNA, 19 nt, Homo sapiens
  misc_RNA (1)...(19): siRNA sense strand
gcucaagaaccaaacguaa

SEQ ID NO: 844133 - RNA, 19 nt, Homo sapiens
  misc_RNA (1)...(19): siRNA sense strand
ucugaugucucaagcauug

SEQ ID NO: 844134 - RNA, 19 nt, Homo sapiens
  misc_RNA (1)...(19): siRNA sense strand
ugauugaaguccaggauga

SEQ ID NO: 844135 - RNA, 19 nt, Homo sapiens
  misc_RNA (1)...(19): siRNA sense strand
gcgcaagacguucaaagaa

SEQ ID NO: 844136 - RNA, 19 nt, Homo sapiens
  misc_RNA (1)...(19): siRNA sense strand
ggaagaaaucaagaaguaa

SEQ ID NO: 844137 - RNA, 19 nt, Homo sapiens
  misc_RNA (1)...(19): siRNA sense strand
gaaaugaagcaagugaaau

SEQ ID NO: 844138 - RNA, 19 nt, Homo sapiens
  misc_RNA (1)...(19): siRNA sense strand
uuccagcucuguuauuuaa

SEQ ID NO: 844139 - RNA, 19 nt, Homo sapiens
  misc_RNA (1)...(19): siRNA sense strand
aaacuuaugagaccuuuga

SEQ ID NO: 844140 - RNA, 19 nt, Homo sapiens
  misc_RNA (1)...(19): siRNA sense strand
gagcaucaacaaagaauag

SEQ ID NO: 844141 - RNA, 19 nt, Homo sapiens
  misc_RNA (1)...(19): siRNA sense strand
gcccagcccucuguugaaa

SEQ ID NO: 844142 - RNA, 19 nt, Homo sapiens
  misc_RNA (1)...(19): siRNA sense strand
gaaaauaaguacacaacgu

SEQ ID NO: 844143 - RNA, 19 nt, Homo sapiens
  misc_RNA (1)...(19): siRNA sense strand
aaaguuaaaucagcagaga

SEQ ID NO: 844144 - RNA, 19 nt, Homo sapiens
  misc_RNA (1)...(19): siRNA sense strand
gaaagugauacaaggagaa

SEQ ID NO: 844145 - RNA, 19 nt, Homo sapiens
  misc_RNA (1)...(19): siRNA sense strand
ugaugacucugaaagcauu

SEQ ID NO: 844146 - RNA, 19 nt, Homo sapiens
  misc_RNA (1)...(19): siRNA sense strand
gaaauaucaaccaucaguu

SEQ ID NO: 844147 - RNA, 19 nt, Homo sapiens
  misc_RNA (1)...(19): siRNA sense strand
ccuagagcaucaacaaaga

SEQ ID NO: 844148 - RNA, 19 nt, Homo sapiens
  misc_RNA (1)...(19): siRNA sense strand
gccauaggcucagauacuu

SEQ ID NO: 844149 - RNA, 19 nt, Homo sapiens
  misc_RNA (1)...(19): siRNA sense strand
aagggaagauaucucauga

SEQ ID NO: 844150 - RNA, 19 nt, Homo sapiens
  misc_RNA (1)...(19): siRNA sense strand
cgacuuuccugauaauucu

SEQ ID NO: 844151 - RNA, 19 nt, Homo sapiens
  misc_RNA (1)...(19): siRNA sense strand
acacauuccaugaaagaua

SEQ ID NO: 844152 - RNA, 19 nt, Homo sapiens
  misc_RNA (1)...(19): siRNA sense strand
gaaccacagcgucuucaga

SEQ ID NO: 844153 - RNA, 19 nt, Homo sapiens
  misc_RNA (1)...(19): siRNA sense strand
caauagaaagucaaucgaa

SEQ ID NO: 844154 - RNA, 19 nt, Homo sapiens
  misc_RNA (1)...(19): siRNA sense strand
uaaagaaagccagauguug

SEQ ID NO: 844155 - RNA, 19 nt, Homo sapiens
  misc_RNA (1)...(19): siRNA sense strand
agacacuucuggaaaugaa

SEQ ID NO: 844156 - RNA, 19 nt, Homo sapiens
  misc_RNA (1)...(19): siRNA sense strand
cgaaagccaucugcgaaau

SEQ ID NO: 844157 - RNA, 19 nt, Homo sapiens
  misc_RNA (1)...(19): siRNA sense strand
aaaggcagcguaugauuga

SEQ ID NO: 844158 - RNA, 19 nt, Homo sapiens
  misc_RNA (1)...(19): siRNA sense strand
ugauaauucugaugucuca

SEQ ID NO: 844159 - RNA, 19 nt, Homo sapiens
  misc_RNA (1)...(19): siRNA sense strand
guguucgacuuuccugaua

SEQ ID NO: 844160 - RNA, 19 nt, Homo sapiens
  misc_RNA (1)...(19): siRNA sense strand
aaagccaucugcgaaauau

SEQ ID NO: 844161 - RNA, 19 nt, Homo sapiens
  misc_RNA (1)...(19): siRNA sense strand
ggaugaacugcuucgguua

SEQ ID NO: 844162 - RNA, 19 nt, Homo sapiens
  misc_RNA (1)...(19): siRNA sense strand
gauacaaggagaaaaguua

SEQ ID NO: 844163 - RNA, 19 nt, Homo sapiens
  misc_RNA (1)...(19): siRNA sense strand
cugagucugucacuucuaa

SEQ ID NO: 844164 - RNA, 19 nt, Homo sapiens
  misc_RNA (1)...(19): siRNA sense strand
gcucuguuauuuaaagcaa

SEQ ID NO: 844165 - RNA, 19 nt, Homo sapiens
  misc_RNA (1)...(19): siRNA sense strand
aaaggaaacguaugauuca

SEQ ID NO: 844166 - RNA, 19 nt, Homo sapiens
  misc_RNA (1)...(19): siRNA sense strand
gcagcauauuucuuaucua

SEQ ID NO: 844167 - RNA, 19 nt, Homo sapiens
  misc_RNA (1)...(19): siRNA sense strand
gaugaagaaacuuaugaga

SEQ ID NO: 844168 - RNA, 19 nt, Homo sapiens
  misc_RNA (1)...(19): siRNA sense strand
cgaaauaucaaccaucagu

SEQ ID NO: 844169 - RNA, 19 nt, Homo sapiens
  misc_RNA (1)...(19): siRNA sense strand
augcuaagaugauuucaga

SEQ ID NO: 844170 - RNA, 19 nt, Homo sapiens
  misc_RNA (1)...(19): siRNA sense strand
aaagaacacauuccaugaa

SEQ ID NO: 844171 - RNA, 19 nt, Homo sapiens
  misc_RNA (1)...(19): siRNA sense strand
gauguugacaaaucugaaa

SEQ ID NO: 844172 - RNA, 19 nt, Homo sapiens
  misc_RNA (1)...(19): siRNA sense strand
gaugauuucagauaucgaa

SEQ ID NO: 844173 - RNA, 19 nt, Homo sapiens
  misc_RNA (1)...(19): siRNA sense strand
gaaagucaaucgaaaacuc

SEQ ID NO: 844174 - RNA, 19 nt, Homo sapiens
  misc_RNA (1)...(19): siRNA sense strand
aaacccaccuagagcauca

SEQ ID NO: 844175 - RNA, 19 nt, Homo sapiens
  misc_RNA (1)...(19): siRNA sense strand
gcacauuugguguccagaa

SEQ ID NO: 844176 - RNA, 19 nt, Homo sapiens
  misc_RNA (1)...(19): siRNA sense strand
aagagaacuuggcaauaga

SEQ ID NO: 844177 - RNA, 19 nt, Homo sapiens
  misc_RNA (1)...(19): siRNA sense strand
ccagcucuguuauuuaaag

SEQ ID NO: 844178 - RNA, 19 nt, Homo sapiens
  misc_RNA (1)...(19): siRNA sense strand
cagcugaaacaacuacaaa

SEQ ID NO: 844179 - RNA, 19 nt, Homo sapiens
  misc_RNA (1)...(19): siRNA sense strand
gaaaaccagugacaucaag

SEQ ID NO: 844180 - RNA, 19 nt, Homo sapiens
  misc_RNA (1)...(19): siRNA sense strand
aaaggaagaaugcuaagau

SEQ ID NO: 844181 - RNA, 19 nt, Homo sapiens
  misc_RNA (1)...(19): siRNA sense strand
gcugaaacaacuacaaaca

SEQ ID NO: 844182 - RNA, 19 nt, Homo sapiens
  misc_RNA (1)...(19): siRNA sense strand
gaaaaggcagcguaugauu

SEQ ID NO: 844183 - RNA, 19 nt, Homo sapiens
  misc_RNA (1)...(19): siRNA sense strand
aaggaagaaugcuaagaug

SEQ ID NO: 844184 - RNA, 19 nt, Homo sapiens
  misc_RNA (1)...(19): siRNA sense strand
ggaguugaauauuguuuug

SEQ ID NO: 844185 - RNA, 19 nt, Homo sapiens
  misc_RNA (1)...(19): siRNA sense strand
ccuuccagcucuguuauuu

SEQ ID NO: 844186 - RNA, 19 nt, Homo sapiens
  misc_RNA (1)...(19): siRNA sense strand
caagauuauucagauguuc

SEQ ID NO: 844187 - RNA, 19 nt, Homo sapiens
  misc_RNA (1)...(19): siRNA sense strand
gaaagccagauguugacaa

SEQ ID NO: 844188 - RNA, 19 nt, Homo sapiens
  misc_RNA (1)...(19): siRNA sense strand
ccaccuagagcaucaacaa

SEQ ID NO: 844189 - RNA, 19 nt, Homo sapiens
  misc_RNA (1)...(19): siRNA sense strand
gauccuccuuuacauagca

SEQ ID NO: 844190 - RNA, 19 nt, Homo sapiens
  misc_RNA (1)...(19): siRNA sense strand
uuaaagaaagccagauguu

SEQ ID NO: 844191 - RNA, 19 nt, Homo sapiens
  misc_RNA (1)...(19): siRNA sense strand
cuauauaugcugaugaaga

SEQ ID NO: 844192 - RNA, 19 nt, Homo sapiens
  misc_RNA (1)...(19): siRNA sense strand
ugcgaaauaucaaccauca

SEQ ID NO: 844193 - RNA, 19 nt, Homo sapiens
  misc_RNA (1)...(19): siRNA sense strand
gcaauagaaagucaaucga

SEQ ID NO: 844194 - RNA, 19 nt, Homo sapiens
  misc_RNA (1)...(19): siRNA sense strand
cacagcgucuucagaacuu

SEQ ID NO: 844195 - RNA, 19 nt, Homo sapiens
  misc_RNA (1)...(19): siRNA sense strand
aaagauaaagcuggucaaa

SEQ ID NO: 844196 - RNA, 19 nt, Homo sapiens
  misc_RNA (1)...(19): siRNA sense strand
ucugaaagcauugaagaaa

SEQ ID NO: 844197 - RNA, 19 nt, Homo sapiens
  misc_RNA (1)...(19): siRNA sense strand
gguuagagccacagcugaa

SEQ ID NO: 844198 - RNA, 19 nt, Homo sapiens
  misc_RNA (1)...(19): siRNA sense strand
agauaaagcuggucaaaag

SEQ ID NO: 844199 - RNA, 19 nt, Homo sapiens
  misc_RNA (1)...(19): siRNA sense strand
agccagauguugacaaauc

SEQ ID NO: 844200 - RNA, 19 nt, Homo sapiens
  misc_RNA (1)...(19): siRNA sense strand
ggaaagauguuuacuacaa

SEQ ID NO: 844201 - RNA, 19 nt, Homo sapiens
  misc_RNA (1)...(19): siRNA sense strand
ggaaagaggauauccguua

SEQ ID NO: 844202 - RNA, 19 nt, Homo sapiens
  misc_RNA (1)...(19): siRNA sense strand
ucaaggagcuggagucaga

SEQ ID NO: 844203 - RNA, 19 nt, Homo sapiens
  misc_RNA (1)...(19): siRNA sense strand
ugaaauaccugucacaaag

SEQ ID NO: 844204 - RNA, 19 nt, Homo sapiens
  misc_RNA (1)...(19): siRNA sense strand
ggauauccguuaccauuau

SEQ ID NO: 844205 - RNA, 19 nt, Homo sapiens
  misc_RNA (1)...(19): siRNA sense strand
gaucaggaauuggaugaaa

SEQ ID NO: 844206 - RNA, 19 nt, Homo sapiens
  misc_RNA (1)...(19): siRNA sense strand
gugggaauguuguucaaua

SEQ ID NO: 844207 - RNA, 19 nt, Homo sapiens
  misc_RNA (1)...(19): siRNA sense strand
gaggauauccguuaccauu

SEQ ID NO: 844208 - RNA, 19 nt, Homo sapiens
  misc_RNA (1)...(19): siRNA sense strand
gcagaauauuguacagauu

SEQ ID NO: 844209 - RNA, 19 nt, Homo sapiens
  misc_RNA (1)...(19): siRNA sense strand
gaaagaggauauccguuac

SEQ ID NO: 844210 - RNA, 19 nt, Homo sapiens
  misc_RNA (1)...(19): siRNA sense strand
gcaagcgacuucgggagua

SEQ ID NO: 844211 - RNA, 19 nt, Homo sapiens
  misc_RNA (1)...(19): siRNA sense strand
ccaaauccaucuacaucaa

SEQ ID NO: 844212 - RNA, 19 nt, Homo sapiens
  misc_RNA (1)...(19): siRNA sense strand
caacagaucaggaauugga

SEQ ID NO: 844213 - RNA, 19 nt, Homo sapiens
  misc_RNA (1)...(19): siRNA sense strand
ggaauuggaugaaauaccu

SEQ ID NO: 844214 - RNA, 19 nt, Homo sapiens
  misc_RNA (1)...(19): siRNA sense strand
agagagacaucaugcagaa

SEQ ID NO: 844215 - RNA, 19 nt, Homo sapiens
  misc_RNA (1)...(19): siRNA sense strand
cuaauaaacuggccauuuu

SEQ ID NO: 844216 - RNA, 19 nt, Homo sapiens
  misc_RNA (1)...(19): siRNA sense strand
gaaauaccugucacaaaga

SEQ ID NO: 844217 - RNA, 19 nt, Homo sapiens
  misc_RNA (1)...(19): siRNA sense strand
cauggaaauugacuggaua

SEQ ID NO: 844218 - RNA, 19 nt, Homo sapiens
  misc_RNA (1)...(19): siRNA sense strand
gaacccacccgaauuaucu

SEQ ID NO: 844219 - RNA, 19 nt, Homo sapiens
  misc_RNA (1)...(19): siRNA sense strand
gcagcacuauggaggacua

SEQ ID NO: 844220 - RNA, 19 nt, Homo sapiens
  misc_RNA (1)...(19): siRNA sense strand
agagaucacuauuagcaaa

SEQ ID NO: 844221 - RNA, 19 nt, Homo sapiens
  misc_RNA (1)...(19): siRNA sense strand
gagacaucaugcagaauau

SEQ ID NO: 844222 - RNA, 19 nt, Homo sapiens
  misc_RNA (1)...(19): siRNA sense strand
gcuuggagcugcacaugga

SEQ ID NO: 844223 - RNA, 19 nt, Homo sapiens
  misc_RNA (1)...(19): siRNA sense strand
gcaaagauuggguugguau

SEQ ID NO: 844224 - RNA, 19 nt, Homo sapiens
  misc_RNA (1)...(19): siRNA sense strand
ggcuccaucuuucuaauaa

SEQ ID NO: 844225 - RNA, 19 nt, Homo sapiens
  misc_RNA (1)...(19): siRNA sense strand
ccacccgaauuaucuauug

SEQ ID NO: 844226 - RNA, 19 nt, Homo sapiens
  misc_RNA (1)...(19): siRNA sense strand
ccugaaggacggaucauua

SEQ ID NO: 844227 - RNA, 19 nt, Homo sapiens
  misc_RNA (1)...(19): siRNA sense strand
aaaaugaacuggaaagaug

SEQ ID NO: 844228 - RNA, 19 nt, Homo sapiens
  misc_RNA (1)...(19): siRNA sense strand
cauuacagguggaaauaga

SEQ ID NO: 844229 - RNA, 19 nt, Homo sapiens
  misc_RNA (1)...(19): siRNA sense strand
aagauuggguugguauuaa

SEQ ID NO: 844230 - RNA, 19 nt, Homo sapiens
  misc_RNA (1)...(19): siRNA sense strand
agagacaucaugcagaaua

SEQ ID NO: 844231 - RNA, 19 nt, Homo sapiens
  misc_RNA (1)...(19): siRNA sense strand
auagaacccacccgaauua

SEQ ID NO: 844232 - RNA, 19 nt, Homo sapiens
  misc_RNA (1)...(19): siRNA sense strand
ucaggaauuggaugaaaua

SEQ ID NO: 844233 - RNA, 19 nt, Homo sapiens
  misc_RNA (1)...(19): siRNA sense strand
gcacagaagagagacauca

SEQ ID NO: 844234 - RNA, 19 nt, Homo sapiens
  misc_RNA (1)...(19): siRNA sense strand
aaagauuggguugguauua

SEQ ID NO: 844235 - RNA, 19 nt, Homo sapiens
  misc_RNA (1)...(19): siRNA sense strand
gaacuggaaagauguuuac

SEQ ID NO: 844236 - RNA, 19 nt, Homo sapiens
  misc_RNA (1)...(19): siRNA sense strand
gcacuauggaggacuauuc

SEQ ID NO: 844237 - RNA, 19 nt, Homo sapiens
  misc_RNA (1)...(19): siRNA sense strand
gauauccguuaccauuaug

SEQ ID NO: 844238 - RNA, 19 nt, Homo sapiens
  misc_RNA (1)...(19): siRNA sense strand
uuucaaggcuccaucuuuc

SEQ ID NO: 844239 - RNA, 19 nt, Homo sapiens
  misc_RNA (1)...(19): siRNA sense strand
gagcugcacauggaaauug

SEQ ID NO: 844240 - RNA, 19 nt, Homo sapiens
  misc_RNA (1)...(19): siRNA sense strand
ccaucuacaucaaauuugu

SEQ ID NO: 844241 - RNA, 19 nt, Homo sapiens
  misc_RNA (1)...(19): siRNA sense strand
cuggaaagauguuuacuac

SEQ ID NO: 844242 - RNA, 19 nt, Homo sapiens
  misc_RNA (1)...(19): siRNA sense strand
caaauccaucuacaucaaa

SEQ ID NO: 844243 - RNA, 19 nt, Homo sapiens
  misc_RNA (1)...(19): siRNA sense strand
cagcaaagauuggguuggu

SEQ ID NO: 844244 - RNA, 19 nt, Homo sapiens
  misc_RNA (1)...(19): siRNA sense strand
ugaagaagcacagaagaga

SEQ ID NO: 844245 - RNA, 19 nt, Homo sapiens
  misc_RNA (1)...(19): siRNA sense strand
uggaaucgguacaguugaa

SEQ ID NO: 844246 - RNA, 19 nt, Homo sapiens
  misc_RNA (1)...(19): siRNA sense strand
gacaucaugcagaauauug

SEQ ID NO: 844247 - RNA, 19 nt, Homo sapiens
  misc_RNA (1)...(19): siRNA sense strand
uccaacagaucaggaauug

SEQ ID NO: 844248 - RNA, 19 nt, Homo sapiens
  misc_RNA (1)...(19): siRNA sense strand
uuucagagcuggacagacu

SEQ ID NO: 844249 - RNA, 19 nt, Homo sapiens
  misc_RNA (1)...(19): siRNA sense strand
gggaauguuguucaauauu

SEQ ID NO: 844250 - RNA, 19 nt, Homo sapiens
  misc_RNA (1)...(19): siRNA sense strand
gaugaaauaccugucacaa

SEQ ID NO: 844251 - RNA, 19 nt, Homo sapiens
  misc_RNA (1)...(19): siRNA sense strand
ucuaauaaacuggccauuu

SEQ ID NO: 844252 - RNA, 19 nt, Homo sapiens
  misc_RNA (1)...(19): siRNA sense strand
ucaaggcuccaucuuucua

SEQ ID NO: 844253 - RNA, 19 nt, Homo sapiens
  misc_RNA (1)...(19): siRNA sense strand
ugggaauguuguucaauau

SEQ ID NO: 844254 - RNA, 19 nt, Homo sapiens
  misc_RNA (1)...(19): siRNA sense strand
gcuccaucuuucuaauaaa

SEQ ID NO: 844255 - RNA, 19 nt, Homo sapiens
  misc_RNA (1)...(19): siRNA sense strand
caucaugcagaauauugua

SEQ ID NO: 844256 - RNA, 19 nt, Homo sapiens
  misc_RNA (1)...(19): siRNA sense strand
aaauagaacccacccgaau

SEQ ID NO: 844257 - RNA, 19 nt, Homo sapiens
  misc_RNA (1)...(19): siRNA sense strand
ugaacuggaaagauguuua

SEQ ID NO: 844258 - RNA, 19 nt, Homo sapiens
  misc_RNA (1)...(19): siRNA sense strand
ugucacaaagagaacauua

SEQ ID NO: 844259 - RNA, 19 nt, Homo sapiens
  misc_RNA (1)...(19): siRNA sense strand
ucagaacuguauuguggau

SEQ ID NO: 844260 - RNA, 19 nt, Homo sapiens
  misc_RNA (1)...(19): siRNA sense strand
ucagauggcagcacuaugg

SEQ ID NO: 844261 - RNA, 19 nt, Homo sapiens
  misc_RNA (1)...(19): siRNA sense strand
caaggcuccaucuuucuaa

SEQ ID NO: 844262 - RNA, 19 nt, Homo sapiens
  misc_RNA (1)...(19): siRNA sense strand
uuaguugagugccuggaaa

SEQ ID NO: 844263 - RNA, 19 nt, Homo sapiens
  misc_RNA (1)...(19): siRNA sense strand
aauagaacccacccgaauu

SEQ ID NO: 844264 - RNA, 19 nt, Homo sapiens
  misc_RNA (1)...(19): siRNA sense strand
ccacacauggagcaaaguu

SEQ ID NO: 844265 - RNA, 19 nt, Homo sapiens
  misc_RNA (1)...(19): siRNA sense strand
uauaacacccguuggaaag

SEQ ID NO: 844266 - RNA, 19 nt, Homo sapiens
  misc_RNA (1)...(19): siRNA sense strand
uuagagaucacuauuagca

SEQ ID NO: 844267 - RNA, 19 nt, Homo sapiens
  misc_RNA (1)...(19): siRNA sense strand
uaacacccguuggaaagag

SEQ ID NO: 844268 - RNA, 19 nt, Homo sapiens
  misc_RNA (1)...(19): siRNA sense strand
guagagagggauuuucuuu

SEQ ID NO: 844269 - RNA, 19 nt, Homo sapiens
  misc_RNA (1)...(19): siRNA sense strand
caccacacauggagcaaag

SEQ ID NO: 844270 - RNA, 19 nt, Homo sapiens
  misc_RNA (1)...(19): siRNA sense strand
acauggaaauugacuggau

SEQ ID NO: 844271 - RNA, 19 nt, Homo sapiens
  misc_RNA (1)...(19): siRNA sense strand
gcacgguguucggcagcaa

SEQ ID NO: 844272 - RNA, 19 nt, Homo sapiens
  misc_RNA (1)...(19): siRNA sense strand
uauuguggaucccggaguu

SEQ ID NO: 844273 - RNA, 19 nt, Homo sapiens
  misc_RNA (1)...(19): siRNA sense strand
caaagauuggguugguauu

SEQ ID NO: 844274 - RNA, 19 nt, Homo sapiens
  misc_RNA (1)...(19): siRNA sense strand
gaaaccacagucaggaucu

SEQ ID NO: 844275 - RNA, 19 nt, Homo sapiens
  misc_RNA (1)...(19): siRNA sense strand
gguuauaacacccguugga

SEQ ID NO: 844276 - RNA, 19 nt, Homo sapiens
  misc_RNA (1)...(19): siRNA sense strand
ugcagaauauuguacagau

SEQ ID NO: 844277 - RNA, 19 nt, Homo sapiens
  misc_RNA (1)...(19): siRNA sense strand
ggaaucgguacaguugaaa

SEQ ID NO: 844278 - RNA, 19 nt, Homo sapiens
  misc_RNA (1)...(19): siRNA sense strand
gaaaaugaacuggaaagau

SEQ ID NO: 844279 - RNA, 19 nt, Homo sapiens
  misc_RNA (1)...(19): siRNA sense strand
aagaagcacagaagagaga

SEQ ID NO: 844280 - RNA, 19 nt, Homo sapiens
  misc_RNA (1)...(19): siRNA sense strand
uuacauuuccaagcgaaua

SEQ ID NO: 844281 - RNA, 19 nt, Homo sapiens
  misc_RNA (1)...(19): siRNA sense strand
cagaucaggaauuggauga

SEQ ID NO: 844282 - RNA, 19 nt, Homo sapiens
  misc_RNA (1)...(19): siRNA sense strand
ccauggcuauccaacagau

SEQ ID NO: 844283 - RNA, 19 nt, Homo sapiens
  misc_RNA (1)...(19): siRNA sense strand
aaauaccugucacaaagag

SEQ ID NO: 844284 - RNA, 19 nt, Homo sapiens
  misc_RNA (1)...(19): siRNA sense strand
uccgcaggcucuuuaguug

SEQ ID NO: 844285 - RNA, 19 nt, Homo sapiens
  misc_RNA (1)...(19): siRNA sense strand
gcuaugaagaauguauuga

SEQ ID NO: 844286 - RNA, 19 nt, Homo sapiens
  misc_RNA (1)...(19): siRNA sense strand
aggauauccguuaccauua

SEQ ID NO: 844287 - RNA, 19 nt, Homo sapiens
  misc_RNA (1)...(19): siRNA sense strand
uuauaacacccguuggaaa

SEQ ID NO: 844288 - RNA, 19 nt, Homo sapiens
  misc_RNA (1)...(19): siRNA sense strand
gucacaaagagaacauuaa

SEQ ID NO: 844289 - RNA, 19 nt, Homo sapiens
  misc_RNA (1)...(19): siRNA sense strand
guagaaguagagagggauu

SEQ ID NO: 844290 - RNA, 19 nt, Homo sapiens
  misc_RNA (1)...(19): siRNA sense strand
cccgaauuaucuauugcua

SEQ ID NO: 844291 - RNA, 19 nt, Homo sapiens
  misc_RNA (1)...(19): siRNA sense strand
cagcacaagccucauuaca

SEQ ID NO: 844292 - RNA, 19 nt, Homo sapiens
  misc_RNA (1)...(19): siRNA sense strand
ucagagcuggacagacuuu

SEQ ID NO: 844293 - RNA, 19 nt, Homo sapiens
  misc_RNA (1)...(19): siRNA sense strand
gaaucgguacaguugaaau

SEQ ID NO: 844294 - RNA, 19 nt, Homo sapiens
  misc_RNA (1)...(19): siRNA sense strand
ugaaggacggaucauuaug

SEQ ID NO: 844295 - RNA, 19 nt, Homo sapiens
  misc_RNA (1)...(19): siRNA sense strand
cugaaggacggaucauuau

SEQ ID NO: 844296 - RNA, 19 nt, Homo sapiens
  misc_RNA (1)...(19): siRNA sense strand
guuauaacacccguuggaa

SEQ ID NO: 844297 - RNA, 19 nt, Homo sapiens
  misc_RNA (1)...(19): siRNA sense strand
caaauuuguagaaguagag

SEQ ID NO: 844298 - RNA, 19 nt, Homo sapiens
  misc_RNA (1)...(19): siRNA sense strand
ggagcugcacauggaaauu

SEQ ID NO: 844299 - RNA, 19 nt, Homo sapiens
  misc_RNA (1)...(19): siRNA sense strand
uggauaccccuuaaaauuu

SEQ ID NO: 844300 - RNA, 19 nt, Homo sapiens
  misc_RNA (1)...(19): siRNA sense strand
gaacauaccugugaaugaa

SEQ ID NO: 844301 - RNA, 19 nt, Homo sapiens
  misc_RNA (1)...(19): siRNA sense strand
gcaagaggguccagaagag

SEQ ID NO: 844302 - RNA, 19 nt, Homo sapiens
  misc_RNA (1)...(19): siRNA sense strand
ggaagaggaagacaaguga

SEQ ID NO: 844303 - RNA, 19 nt, Homo sapiens
  misc_RNA (1)...(19): siRNA sense strand
ggaacauaccugugaauga

SEQ ID NO: 844304 - RNA, 19 nt, Homo sapiens
  misc_RNA (1)...(19): siRNA sense strand
gagcguaaggcaccuauau

SEQ ID NO: 844305 - RNA, 19 nt, Homo sapiens
  misc_RNA (1)...(19): siRNA sense strand
guaaggcaccuauauaucu

SEQ ID NO: 844306 - RNA, 19 nt, Homo sapiens
  misc_RNA (1)...(19): siRNA sense strand
uaaacgacacuacaaguug

SEQ ID NO: 844307 - RNA, 19 nt, Homo sapiens
  misc_RNA (1)...(19): siRNA sense strand
gcaccuauauaucugugau

SEQ ID NO: 844308 - RNA, 19 nt, Homo sapiens
  misc_RNA (1)...(19): siRNA sense strand
gcguaaggcaccuauauau

SEQ ID NO: 844309 - RNA, 19 nt, Homo sapiens
  misc_RNA (1)...(19): siRNA sense strand
gagcaucucgcagaagaaa

SEQ ID NO: 844310 - RNA, 19 nt, Homo sapiens
  misc_RNA (1)...(19): siRNA sense strand
gcacgacacugacauuccu

SEQ ID NO: 844311 - RNA, 19 nt, Homo sapiens
  misc_RNA (1)...(19): siRNA sense strand
aagagcaucucgcagaaga

SEQ ID NO: 844312 - RNA, 19 nt, Homo sapiens
  misc_RNA (1)...(19): siRNA sense strand
gaccagaccaggcuucaau

SEQ ID NO: 844313 - RNA, 19 nt, Homo sapiens
  misc_RNA (1)...(19): siRNA sense strand
agaagagcaucucgcagaa

SEQ ID NO: 844314 - RNA, 19 nt, Homo sapiens
  misc_RNA (1)...(19): siRNA sense strand
ugaacacccuacgacguua

SEQ ID NO: 844315 - RNA, 19 nt, Homo sapiens
  misc_RNA (1)...(19): siRNA sense strand
agaccaggcuucaauaagg

SEQ ID NO: 844316 - RNA, 19 nt, Homo sapiens
  misc_RNA (1)...(19): siRNA sense strand
aagagacccuugccuacuu

SEQ ID NO: 844317 - RNA, 19 nt, Homo sapiens
  misc_RNA (1)...(19): siRNA sense strand
uaaggcaccuauauaucug

SEQ ID NO: 844318 - RNA, 19 nt, Homo sapiens
  misc_RNA (1)...(19): siRNA sense strand
gaaauaaaaggaagaggaa

SEQ ID NO: 844319 - RNA, 19 nt, Homo sapiens
  misc_RNA (1)...(19): siRNA sense strand
gugaacacccuacgacguu

SEQ ID NO: 844320 - RNA, 19 nt, Homo sapiens
  misc_RNA (1)...(19): siRNA sense strand
gugaagaguaacaagagua

SEQ ID NO: 844321 - RNA, 19 nt, Homo sapiens
  misc_RNA (1)...(19): siRNA sense strand
ccagaccaggcuucaauaa

SEQ ID NO: 844322 - RNA, 19 nt, Homo sapiens
  misc_RNA (1)...(19): siRNA sense strand
ucuacauggugaagaguaa

SEQ ID NO: 844323 - RNA, 19 nt, Homo sapiens
  misc_RNA (1)...(19): siRNA sense strand
gaacacccuacgacguuau

SEQ ID NO: 844324 - RNA, 19 nt, Homo sapiens
  misc_RNA (1)...(19): siRNA sense strand
ggugaagaguaacaagagu

SEQ ID NO: 844325 - RNA, 19 nt, Homo sapiens
  misc_RNA (1)...(19): siRNA sense strand
guuauaaacgacacuacaa

SEQ ID NO: 844326 - RNA, 19 nt, Homo sapiens
  misc_RNA (1)...(19): siRNA sense strand
ccagaguguccgaaauaaa

SEQ ID NO: 844327 - RNA, 19 nt, Homo sapiens
  misc_RNA (1)...(19): siRNA sense strand
ugacauuccugagguugau

SEQ ID NO: 844328 - RNA, 19 nt, Homo sapiens
  misc_RNA (1)...(19): siRNA sense strand
caauaaggcccaguuagca

SEQ ID NO: 844329 - RNA, 19 nt, Homo sapiens
  misc_RNA (1)...(19): siRNA sense strand
cauccagaguguccgaaau

SEQ ID NO: 844330 - RNA, 19 nt, Homo sapiens
  misc_RNA (1)...(19): siRNA sense strand
uccagaguguccgaaauaa

SEQ ID NO: 844331 - RNA, 19 nt, Homo sapiens
  misc_RNA (1)...(19): siRNA sense strand
aaaggaagaggaagacaag

SEQ ID NO: 844332 - RNA, 19 nt, Homo sapiens
  misc_RNA (1)...(19): siRNA sense strand
agucgacacuucaggaaca

SEQ ID NO: 844333 - RNA, 19 nt, Homo sapiens
  misc_RNA (1)...(19): siRNA sense strand
auaaacgacacuacaaguu

SEQ ID NO: 844334 - RNA, 19 nt, Homo sapiens
  misc_RNA (1)...(19): siRNA sense strand
cagaguguccgaaauaaaa

SEQ ID NO: 844335 - RNA, 19 nt, Homo sapiens
  misc_RNA (1)...(19): siRNA sense strand
uauaaacgacacuacaagu

SEQ ID NO: 844336 - RNA, 19 nt, Homo sapiens
  misc_RNA (1)...(19): siRNA sense strand
gagcacgacacugacauuc

SEQ ID NO: 844337 - RNA, 19 nt, Homo sapiens
  misc_RNA (1)...(19): siRNA sense strand
ucaauaaggcccaguuagc

SEQ ID NO: 844338 - RNA, 19 nt, Homo sapiens
  misc_RNA (1)...(19): siRNA sense strand
uuccugagguugaucuguu

SEQ ID NO: 844339 - RNA, 19 nt, Homo sapiens
  misc_RNA (1)...(19): siRNA sense strand
gaggaagacaagugacgau

SEQ ID NO: 844340 - RNA, 19 nt, Homo sapiens
  misc_RNA (1)...(19): siRNA sense strand
gaagaguaacaagaguaga

SEQ ID NO: 844341 - RNA, 19 nt, Homo sapiens
  misc_RNA (1)...(19): siRNA sense strand
ugaagaguaacaagaguag

SEQ ID NO: 844342 - RNA, 19 nt, Homo sapiens
  misc_RNA (1)...(19): siRNA sense strand
ucaucuacauggugaagag

SEQ ID NO: 844343 - RNA, 19 nt, Homo sapiens
  misc_RNA (1)...(19): siRNA sense strand
gaagagcaucucgcagaag

SEQ ID NO: 844344 - RNA, 19 nt, Homo sapiens
  misc_RNA (1)...(19): siRNA sense strand
cuucaauaaggcccaguua

SEQ ID NO: 844345 - RNA, 19 nt, Homo sapiens
  misc_RNA (1)...(19): siRNA sense strand
gacaucgacaagagcguaa

SEQ ID NO: 844346 - RNA, 19 nt, Homo sapiens
  misc_RNA (1)...(19): siRNA sense strand
gcaucucgcagaagaaacu

SEQ ID NO: 844347 - RNA, 19 nt, Homo sapiens
  misc_RNA (1)...(19): siRNA sense strand
cguaaggcaccuauauauc

SEQ ID NO: 844348 - RNA, 19 nt, Homo sapiens
  misc_RNA (1)...(19): siRNA sense strand
gaaacugugagucgacacu

SEQ ID NO: 844349 - RNA, 19 nt, Homo sapiens
  misc_RNA (1)...(19): siRNA sense strand
cgagcacgacacugacauu

SEQ ID NO: 844350 - RNA, 19 nt, Homo sapiens
  misc_RNA (1)...(19): siRNA sense strand
agagacccuugccuacuuc

SEQ ID NO: 844351 - RNA, 19 nt, Homo sapiens
  misc_RNA (1)...(19): siRNA sense strand
gcaacgccuccuucagcaa

SEQ ID NO: 844352 - RNA, 19 nt, Homo sapiens
  misc_RNA (1)...(19): siRNA sense strand
ucagcaagaggguccagaa

SEQ ID NO: 844353 - RNA, 19 nt, Homo sapiens
  misc_RNA (1)...(19): siRNA sense strand
auccagaguguccgaaaua

SEQ ID NO: 844354 - RNA, 19 nt, Homo sapiens
  misc_RNA (1)...(19): siRNA sense strand
gaaacucaagcuggacauc

SEQ ID NO: 844355 - RNA, 19 nt, Homo sapiens
  misc_RNA (1)...(19): siRNA sense strand
ccagagcugcugccucauc

SEQ ID NO: 844356 - RNA, 19 nt, Homo sapiens
  misc_RNA (1)...(19): siRNA sense strand
gacccuugccuacuucauc

SEQ ID NO: 844357 - RNA, 19 nt, Homo sapiens
  misc_RNA (1)...(19): siRNA sense strand
caagaagucugacaucaua

SEQ ID NO: 844358 - RNA, 19 nt, Homo sapiens
  misc_RNA (1)...(19): siRNA sense strand
gcaagagacuguauguauu

SEQ ID NO: 844359 - RNA, 19 nt, Homo sapiens
  misc_RNA (1)...(19): siRNA sense strand
gcagaagucuugagcuauu

SEQ ID NO: 844360 - RNA, 19 nt, Homo sapiens
  misc_RNA (1)...(19): siRNA sense strand
cagaguaccuugcucauuu

SEQ ID NO: 844361 - RNA, 19 nt, Homo sapiens
  misc_RNA (1)...(19): siRNA sense strand
gaagaucacugggauugaa

SEQ ID NO: 844362 - RNA, 19 nt, Homo sapiens
  misc_RNA (1)...(19): siRNA sense strand
ggagaaaacuuguauagau

SEQ ID NO: 844363 - RNA, 19 nt, Homo sapiens
  misc_RNA (1)...(19): siRNA sense strand
acagagagcauuaugauuu

SEQ ID NO: 844364 - RNA, 19 nt, Homo sapiens
  misc_RNA (1)...(19): siRNA sense strand
caagagacuguauguauuu

SEQ ID NO: 844365 - RNA, 19 nt, Homo sapiens
  misc_RNA (1)...(19): siRNA sense strand
gugcagaagucuugagcua

SEQ ID NO: 844366 - RNA, 19 nt, Homo sapiens
  misc_RNA (1)...(19): siRNA sense strand
gcacuuccucuuacuauga

SEQ ID NO: 844367 - RNA, 19 nt, Homo sapiens
  misc_RNA (1)...(19): siRNA sense strand
gagacguaaucuacccuua

SEQ ID NO: 844368 - RNA, 19 nt, Homo sapiens
  misc_RNA (1)...(19): siRNA sense strand
ugauggauauuguucguaa

SEQ ID NO: 844369 - RNA, 19 nt, Homo sapiens
  misc_RNA (1)...(19): siRNA sense strand
gacguaaucuacccuuaug

SEQ ID NO: 844370 - RNA, 19 nt, Homo sapiens
  misc_RNA (1)...(19): siRNA sense strand
aaagagugauggauauugu

SEQ ID NO: 844371 - RNA, 19 nt, Homo sapiens
  misc_RNA (1)...(19): siRNA sense strand
caaaucguaucuuuccaau

SEQ ID NO: 844372 - RNA, 19 nt, Homo sapiens
  misc_RNA (1)...(19): siRNA sense strand
guaaucuacccuuauguuu

SEQ ID NO: 844373 - RNA, 19 nt, Homo sapiens
  misc_RNA (1)...(19): siRNA sense strand
gcaacaaccucaaaaucaa

SEQ ID NO: 844374 - RNA, 19 nt, Homo sapiens
  misc_RNA (1)...(19): siRNA sense strand
aagcaaagagugauggaua

SEQ ID NO: 844375 - RNA, 19 nt, Homo sapiens
  misc_RNA (1)...(19): siRNA sense strand
ggauauuguucguaaucuu

SEQ ID NO: 844376 - RNA, 19 nt, Homo sapiens
  misc_RNA (1)...(19): siRNA sense strand
gagaaaacuuguauagaug

SEQ ID NO: 844377 - RNA, 19 nt, Homo sapiens
  misc_RNA (1)...(19): siRNA sense strand
gauauuguucguaaucuug

SEQ ID NO: 844378 - RNA, 19 nt, Homo sapiens
  misc_RNA (1)...(19): siRNA sense strand
gcaaagagugauggauauu

SEQ ID NO: 844379 - RNA, 19 nt, Homo sapiens
  misc_RNA (1)...(19): siRNA sense strand
caaucaauauccagaaucu

SEQ ID NO: 844380 - RNA, 19 nt, Homo sapiens
  misc_RNA (1)...(19): siRNA sense strand
ccacagagagcauuaugau

SEQ ID NO: 844381 - RNA, 19 nt, Homo sapiens
  misc_RNA (1)...(19): siRNA sense strand
cagcaaagccaagcaaaga

SEQ ID NO: 844382 - RNA, 19 nt, Homo sapiens
  misc_RNA (1)...(19): siRNA sense strand
uuaccucccugguguuauu

SEQ ID NO: 844383 - RNA, 19 nt, Homo sapiens
  misc_RNA (1)...(19): siRNA sense strand
gccaagaagucugacauca

SEQ ID NO: 844384 - RNA, 19 nt, Homo sapiens
  misc_RNA (1)...(19): siRNA sense strand
uauaagagacguaaucuac

SEQ ID NO: 844385 - RNA, 19 nt, Homo sapiens
  misc_RNA (1)...(19): siRNA sense strand
auagaugcacuuccucuua

SEQ ID NO: 844386 - RNA, 19 nt, Homo sapiens
  misc_RNA (1)...(19): siRNA sense strand
gcagaguaccuugcucauu

SEQ ID NO: 844387 - RNA, 19 nt, Homo sapiens
  misc_RNA (1)...(19): siRNA sense strand
cagaaucuaaugcagagua

SEQ ID NO: 844388 - RNA, 19 nt, Homo sapiens
  misc_RNA (1)...(19): siRNA sense strand
ucauagcaauccacagaga

SEQ ID NO: 844389 - RNA, 19 nt, Homo sapiens
  misc_RNA (1)...(19): siRNA sense strand
ccagugugguuauucuguu

SEQ ID NO: 844390 - RNA, 19 nt, Homo sapiens
  misc_RNA (1)...(19): siRNA sense strand
cugcagcuauuuccaaugu

SEQ ID NO: 844391 - RNA, 19 nt, Homo sapiens
  misc_RNA (1)...(19): siRNA sense strand
caaagagugauggauauug

SEQ ID NO: 844392 - RNA, 19 nt, Homo sapiens
  misc_RNA (1)...(19): siRNA sense strand
gcaaagccaagcaaagagu

SEQ ID NO: 844393 - RNA, 19 nt, Homo sapiens
  misc_RNA (1)...(19): siRNA sense strand
aaucauagcaauccacaga

SEQ ID NO: 844394 - RNA, 19 nt, Homo sapiens
  misc_RNA (1)...(19): siRNA sense strand
cauuccaaaucguaucuuu

SEQ ID NO: 844395 - RNA, 19 nt, Homo sapiens
  misc_RNA (1)...(19): siRNA sense strand
guucguaaucuuggacuua

SEQ ID NO: 844396 - RNA, 19 nt, Homo sapiens
  misc_RNA (1)...(19): siRNA sense strand
guguggaaaugacagcaaa

SEQ ID NO: 844397 - RNA, 19 nt, Homo sapiens
  misc_RNA (1)...(19): siRNA sense strand
uguuauugcugccauucua

SEQ ID NO: 844398 - RNA, 19 nt, Homo sapiens
  misc_RNA (1)...(19): siRNA sense strand
cagagagcauuaugauuuu

SEQ ID NO: 844399 - RNA, 19 nt, Homo sapiens
  misc_RNA (1)...(19): siRNA sense strand
uagaugcacuuccucuuac

SEQ ID NO: 844400 - RNA, 19 nt, Homo sapiens
  misc_RNA (1)...(19): siRNA sense strand
ccaaaucguaucuuuccaa

SEQ ID NO: 844401 - RNA, 19 nt, Homo sapiens
  misc_RNA (1)...(19): siRNA sense strand
caucagcaacaaccucaaa

SEQ ID NO: 844402 - RNA, 19 nt, Homo sapiens
  misc_RNA (1)...(19): siRNA sense strand
agaguaccuugcucauuug

SEQ ID NO: 844403 - RNA, 19 nt, Homo sapiens
  misc_RNA (1)...(19): siRNA sense strand
gaagucugacaucauaauc

SEQ ID NO: 844404 - RNA, 19 nt, Homo sapiens
  misc_RNA (1)...(19): siRNA sense strand
ggaagaucacugggauuga

SEQ ID NO: 844405 - RNA, 19 nt, Homo sapiens
  misc_RNA (1)...(19): siRNA sense strand
ccaauaacagcaccuuaca

SEQ ID NO: 844406 - RNA, 19 nt, Homo sapiens
  misc_RNA (1)...(19): siRNA sense strand
gcccaguggugcagaaguc

SEQ ID NO: 844407 - RNA, 19 nt, Homo sapiens
  misc_RNA (1)...(19): siRNA sense strand
cguaaucuacccuuauguu

SEQ ID NO: 844408 - RNA, 19 nt, Homo sapiens
  misc_RNA (1)...(19): siRNA sense strand
ggagguuccccuucuauuu

SEQ ID NO: 844409 - RNA, 19 nt, Homo sapiens
  misc_RNA (1)...(19): siRNA sense strand
agcaaagagugauggauau

SEQ ID NO: 844410 - RNA, 19 nt, Homo sapiens
  misc_RNA (1)...(19): siRNA sense strand
agcaagagacuguauguau

SEQ ID NO: 844411 - RNA, 19 nt, Homo sapiens
  misc_RNA (1)...(19): siRNA sense strand
caauauccagaaucuaaug

SEQ ID NO: 844412 - RNA, 19 nt, Homo sapiens
  misc_RNA (1)...(19): siRNA sense strand
ccaagaagucugacaucau

SEQ ID NO: 844413 - RNA, 19 nt, Homo sapiens
  misc_RNA (1)...(19): siRNA sense strand
gcaagucggcagguguuug

SEQ ID NO: 844414 - RNA, 19 nt, Homo sapiens
  misc_RNA (1)...(19): siRNA sense strand
caagucggcagguguuugu

SEQ ID NO: 844415 - RNA, 19 nt, Homo sapiens
  misc_RNA (1)...(19): siRNA sense strand
gcuccagugugguuauucu

SEQ ID NO: 844416 - RNA, 19 nt, Homo sapiens
  misc_RNA (1)...(19): siRNA sense strand
uuacacugcuugcuuuggu

SEQ ID NO: 844417 - RNA, 19 nt, Homo sapiens
  misc_RNA (1)...(19): siRNA sense strand
gcugugugucuucuuguuu

SEQ ID NO: 844418 - RNA, 19 nt, Homo sapiens
  misc_RNA (1)...(19): siRNA sense strand
gauggauauuguucguaau

SEQ ID NO: 844419 - RNA, 19 nt, Homo sapiens
  misc_RNA (1)...(19): siRNA sense strand
gcaauccacagagagcauu

SEQ ID NO: 844420 - RNA, 19 nt, Homo sapiens
  misc_RNA (1)...(19): siRNA sense strand
gaaaagcaagagacuguau

SEQ ID NO: 844421 - RNA, 19 nt, Homo sapiens
  misc_RNA (1)...(19): siRNA sense strand
gcagccaaagaaauugaaa

SEQ ID NO: 844422 - RNA, 19 nt, Homo sapiens
  misc_RNA (1)...(19): siRNA sense strand
cagaagucuugagcuauuc

SEQ ID NO: 844423 - RNA, 19 nt, Homo sapiens
  misc_RNA (1)...(19): siRNA sense strand
gaugcacuuccucuuacua

SEQ ID NO: 844424 - RNA, 19 nt, Homo sapiens
  misc_RNA (1)...(19): siRNA sense strand
cagugugguuauucuguug

SEQ ID NO: 844425 - RNA, 19 nt, Homo sapiens
  misc_RNA (1)...(19): siRNA sense strand
caucauaaucauagcaauc

SEQ ID NO: 844426 - RNA, 19 nt, Homo sapiens
  misc_RNA (1)...(19): siRNA sense strand
gucuugagcuauucagaag

SEQ ID NO: 844427 - RNA, 19 nt, Homo sapiens
  misc_RNA (1)...(19): siRNA sense strand
agacguaaucuacccuuau

SEQ ID NO: 844428 - RNA, 19 nt, Homo sapiens
  misc_RNA (1)...(19): siRNA sense strand
agucugacaucauaaucau

SEQ ID NO: 844429 - RNA, 19 nt, Homo sapiens
  misc_RNA (1)...(19): siRNA sense strand
caauccacagagagcauua

SEQ ID NO: 844430 - RNA, 19 nt, Homo sapiens
  misc_RNA (1)...(19): siRNA sense strand
gacaucauaaucauagcaa

SEQ ID NO: 844431 - RNA, 19 nt, Homo sapiens
  misc_RNA (1)...(19): siRNA sense strand
cagaagcagccaagaaguc

SEQ ID NO: 844432 - RNA, 19 nt, Homo sapiens
  misc_RNA (1)...(19): siRNA sense strand
ccagaagaccacccuacug

SEQ ID NO: 844433 - RNA, 19 nt, Homo sapiens
  misc_RNA (1)...(19): siRNA sense strand
ugucugcugugcugugugu

SEQ ID NO: 844434 - RNA, 19 nt, Homo sapiens
  misc_RNA (1)...(19): siRNA sense strand
cacuuccucuuacuaugaa

SEQ ID NO: 844435 - RNA, 19 nt, Homo sapiens
  misc_RNA (1)...(19): siRNA sense strand
gacagcaaagccaagcaaa

SEQ ID NO: 844436 - RNA, 19 nt, Homo sapiens
  misc_RNA (1)...(19): siRNA sense strand
uggaagaucacugggauug

SEQ ID NO: 844437 - RNA, 19 nt, Homo sapiens
  misc_RNA (1)...(19): siRNA sense strand
aaagcaagagacuguaugu

SEQ ID NO: 844438 - RNA, 19 nt, Homo sapiens
  misc_RNA (1)...(19): siRNA sense strand
guuuaccucccugguguua

SEQ ID NO: 844439 - RNA, 19 nt, Homo sapiens
  misc_RNA (1)...(19): siRNA sense strand
caggagcccacgugguaaa

SEQ ID NO: 844440 - RNA, 19 nt, Homo sapiens
  misc_RNA (1)...(19): siRNA sense strand
cauuucguauggcuauuuc

SEQ ID NO: 844441 - RNA, 19 nt, Homo sapiens
  misc_RNA (1)...(19): siRNA sense strand
ugacagcaaagccaagcaa

SEQ ID NO: 844442 - RNA, 19 nt, Homo sapiens
  misc_RNA (1)...(19): siRNA sense strand
cuacccuuauguuuaugaa

SEQ ID NO: 844443 - RNA, 19 nt, Homo sapiens
  misc_RNA (1)...(19): siRNA sense strand
cuugagcuauucagaagca

SEQ ID NO: 844444 - RNA, 19 nt, Homo sapiens
  misc_RNA (1)...(19): siRNA sense strand
gcauuaugauuuucucaca

SEQ ID NO: 844445 - RNA, 19 nt, Homo sapiens
  misc_RNA (1)...(19): siRNA sense strand
caacuguaccgaggcacaa

SEQ ID NO: 844446 - RNA, 19 nt, Homo sapiens
  misc_RNA (1)...(19): siRNA sense strand
ucacugggauugaaaaugc

SEQ ID NO: 844447 - RNA, 19 nt, Homo sapiens
  misc_RNA (1)...(19): siRNA sense strand
gagguuccccuucuauuug

SEQ ID NO: 844448 - RNA, 19 nt, Homo sapiens
  misc_RNA (1)...(19): siRNA sense strand
aagcagccaagaagucuga

SEQ ID NO: 844449 - RNA, 19 nt, Homo sapiens
  misc_RNA (1)...(19): siRNA sense strand
ucugacaucauaaucauag

SEQ ID NO: 844450 - RNA, 19 nt, Homo sapiens
  misc_RNA (1)...(19): siRNA sense strand
caccuuacacugcuugcuu

SEQ ID NO: 844451 - RNA, 19 nt, Homo sapiens
  misc_RNA (1)...(19): siRNA sense strand
aauaacagcaccuuacacu

SEQ ID NO: 844452 - RNA, 19 nt, Homo sapiens
  misc_RNA (1)...(19): siRNA sense strand
ugugcugugugucuucuug

SEQ ID NO: 844453 - RNA, 19 nt, Homo sapiens
  misc_RNA (1)...(19): siRNA sense strand
ugguagacaucagcaacaa

SEQ ID NO: 844454 - RNA, 19 nt, Homo sapiens
  misc_RNA (1)...(19): siRNA sense strand
ucagauagauggucauaua

SEQ ID NO: 844455 - RNA, 19 nt, Homo sapiens
  misc_RNA (1)...(19): siRNA sense strand
cgagaaaccuuauaaaugu

SEQ ID NO: 844456 - RNA, 19 nt, Homo sapiens
  misc_RNA (1)...(19): siRNA sense strand
cagaggagcuacacuauaa

SEQ ID NO: 844457 - RNA, 19 nt, Homo sapiens
  misc_RNA (1)...(19): siRNA sense strand
guccaaagcucagaucuua

SEQ ID NO: 844458 - RNA, 19 nt, Homo sapiens
  misc_RNA (1)...(19): siRNA sense strand
gacaaaugcuucaguagaa

SEQ ID NO: 844459 - RNA, 19 nt, Homo sapiens
  misc_RNA (1)...(19): siRNA sense strand
gcucagaucuuacuucaca

SEQ ID NO: 844460 - RNA, 19 nt, Homo sapiens
  misc_RNA (1)...(19): siRNA sense strand
ggaaaggcccuacaaaugu

SEQ ID NO: 844461 - RNA, 19 nt, Homo sapiens
  misc_RNA (1)...(19): siRNA sense strand
gaaaucagaucuuauuagc

SEQ ID NO: 844462 - RNA, 19 nt, Homo sapiens
  misc_RNA (1)...(19): siRNA sense strand
gcucagaucuuauuguaca

SEQ ID NO: 844463 - RNA, 19 nt, Homo sapiens
  misc_RNA (1)...(19): siRNA sense strand
gagaacacaugcagguaaa

SEQ ID NO: 844464 - RNA, 19 nt, Homo sapiens
  misc_RNA (1)...(19): siRNA sense strand
ggagaaaccuuauaaaagu

SEQ ID NO: 844465 - RNA, 19 nt, Homo sapiens
  misc_RNA (1)...(19): siRNA sense strand
uagcucagaucuuauugua

SEQ ID NO: 844466 - RNA, 19 nt, Homo sapiens
  misc_RNA (1)...(19): siRNA sense strand
gggaaaggcccuacaaaug

SEQ ID NO: 844467 - RNA, 19 nt, Homo sapiens
  misc_RNA (1)...(19): siRNA sense strand
ggccagaaaucagaccuua

SEQ ID NO: 844468 - RNA, 19 nt, Homo sapiens
  misc_RNA (1)...(19): siRNA sense strand
gauccacaauuacgagaaa

SEQ ID NO: 844469 - RNA, 19 nt, Homo sapiens
  misc_RNA (1)...(19): siRNA sense strand
gauagauggucauauauac

SEQ ID NO: 844470 - RNA, 19 nt, Homo sapiens
  misc_RNA (1)...(19): siRNA sense strand
gaagagaaaccacaucagu

SEQ ID NO: 844471 - RNA, 19 nt, Homo sapiens
  misc_RNA (1)...(19): siRNA sense strand
auaaaugccuggaauguau

SEQ ID NO: 844472 - RNA, 19 nt, Homo sapiens
  misc_RNA (1)...(19): siRNA sense strand
gugagaagccguauaaaug

SEQ ID NO: 844473 - RNA, 19 nt, Homo sapiens
  misc_RNA (1)...(19): siRNA sense strand
gagcuacacuauaaauaca

SEQ ID NO: 844474 - RNA, 19 nt, Homo sapiens
  misc_RNA (1)...(19): siRNA sense strand
gggagaagcccuauaagug

SEQ ID NO: 844475 - RNA, 19 nt, Homo sapiens
  misc_RNA (1)...(19): siRNA sense strand
caacucacacucacacuuu

SEQ ID NO: 844476 - RNA, 19 nt, Homo sapiens
  misc_RNA (1)...(19): siRNA sense strand
uuaagugucucgaguguga

SEQ ID NO: 844477 - RNA, 19 nt, Homo sapiens
  misc_RNA (1)...(19): siRNA sense strand
gcaugagauuauucagaua

SEQ ID NO: 844478 - RNA, 19 nt, Homo sapiens
  misc_RNA (1)...(19): siRNA sense strand
ggagaagcccuauaagugu

SEQ ID NO: 844479 - RNA, 19 nt, Homo sapiens
  misc_RNA (1)...(19): siRNA sense strand
accagaggauccacaauua

SEQ ID NO: 844480 - RNA, 19 nt, Homo sapiens
  misc_RNA (1)...(19): siRNA sense strand
ucagaagccucacagaugu

SEQ ID NO: 844481 - RNA, 19 nt, Homo sapiens
  misc_RNA (1)...(19): siRNA sense strand
aaacagaggagcuacacua

SEQ ID NO: 844482 - RNA, 19 nt, Homo sapiens
  misc_RNA (1)...(19): siRNA sense strand
ggaaaucagaucuuauuag

SEQ ID NO: 844483 - RNA, 19 nt, Homo sapiens
  misc_RNA (1)...(19): siRNA sense strand
guucagcccuucuucaaca

SEQ ID NO: 844484 - RNA, 19 nt, Homo sapiens
  misc_RNA (1)...(19): siRNA sense strand
acaauuacgagaaaccuua

SEQ ID NO: 844485 - RNA, 19 nt, Homo sapiens
  misc_RNA (1)...(19): siRNA sense strand
ggacaucagagaacacaug

SEQ ID NO: 844486 - RNA, 19 nt, Homo sapiens
  misc_RNA (1)...(19): siRNA sense strand
aacuguagcucagaucuua

SEQ ID NO: 844487 - RNA, 19 nt, Homo sapiens
  misc_RNA (1)...(19): siRNA sense strand
gggaaaucagaucuuauua

SEQ ID NO: 844488 - RNA, 19 nt, Homo sapiens
  misc_RNA (1)...(19): siRNA sense strand
aaagugauaugugugagaa

SEQ ID NO: 844489 - RNA, 19 nt, Homo sapiens
  misc_RNA (1)...(19): siRNA sense strand
ggugagaagccguauaaau

SEQ ID NO: 844490 - RNA, 19 nt, Homo sapiens
  misc_RNA (1)...(19): siRNA sense strand
caggugagaagccguauaa

SEQ ID NO: 844491 - RNA, 19 nt, Homo sapiens
  misc_RNA (1)...(19): siRNA sense strand
ugugacaaaugcuucagua

SEQ ID NO: 844492 - RNA, 19 nt, Homo sapiens
  misc_RNA (1)...(19): siRNA sense strand
aagcaaaacuucugugaaa

SEQ ID NO: 844493 - RNA, 19 nt, Homo sapiens
  misc_RNA (1)...(19): siRNA sense strand
ugagaaaccauuuaagugu

SEQ ID NO: 844494 - RNA, 19 nt, Homo sapiens
  misc_RNA (1)...(19): siRNA sense strand
ugacaaaugcuucaguaga

SEQ ID NO: 844495 - RNA, 19 nt, Homo sapiens
  misc_RNA (1)...(19): siRNA sense strand
gcaaaugugagaagagcuu

SEQ ID NO: 844496 - RNA, 19 nt, Homo sapiens
  misc_RNA (1)...(19): siRNA sense strand
caucagacaguacacauug

SEQ ID NO: 844497 - RNA, 19 nt, Homo sapiens
  misc_RNA (1)...(19): siRNA sense strand
uggaauguaugagaaguuu

SEQ ID NO: 844498 - RNA, 19 nt, Homo sapiens
  misc_RNA (1)...(19): siRNA sense strand
ugacauuuguggcaagaau

SEQ ID NO: 844499 - RNA, 19 nt, Homo sapiens
  misc_RNA (1)...(19): siRNA sense strand
ggugagaaaccauuuaagu

SEQ ID NO: 844500 - RNA, 19 nt, Homo sapiens
  misc_RNA (1)...(19): siRNA sense strand
ggagcuacacuauaaauac

SEQ ID NO: 844501 - RNA, 19 nt, Homo sapiens
  misc_RNA (1)...(19): siRNA sense strand
gaucuuauuguacaucaga

SEQ ID NO: 844502 - RNA, 19 nt, Homo sapiens
  misc_RNA (1)...(19): siRNA sense strand
guagugagugugacaaaug

SEQ ID NO: 844503 - RNA, 19 nt, Homo sapiens
  misc_RNA (1)...(19): siRNA sense strand
ccagaaaucagaccuuauc

SEQ ID NO: 844504 - RNA, 19 nt, Homo sapiens
  misc_RNA (1)...(19): siRNA sense strand
cagccuucauuguacauaa

SEQ ID NO: 844505 - RNA, 19 nt, Homo sapiens
  misc_RNA (1)...(19): siRNA sense strand
uggcaucacuuagcgcuuu

SEQ ID NO: 844506 - RNA, 19 nt, Homo sapiens
  misc_RNA (1)...(19): siRNA sense strand
agugggaaaucagaucuua

SEQ ID NO: 844507 - RNA, 19 nt, Homo sapiens
  misc_RNA (1)...(19): siRNA sense strand
acgagaaaccuuauaaaug

SEQ ID NO: 844508 - RNA, 19 nt, Homo sapiens
  misc_RNA (1)...(19): siRNA sense strand
ccguuugucuguaauguga

SEQ ID NO: 844509 - RNA, 19 nt, Homo sapiens
  misc_RNA (1)...(19): siRNA sense strand
gagauuauucagauagaug

SEQ ID NO: 844510 - RNA, 19 nt, Homo sapiens
  misc_RNA (1)...(19): siRNA sense strand
caccagaggauccacaauu

SEQ ID NO: 844511 - RNA, 19 nt, Homo sapiens
  misc_RNA (1)...(19): siRNA sense strand
cggagugccaaccuaauua

SEQ ID NO: 844512 - RNA, 19 nt, Homo sapiens
  misc_RNA (1)...(19): siRNA sense strand
uauaaaugccuggaaugua

SEQ ID NO: 844513 - RNA, 19 nt, Homo sapiens
  misc_RNA (1)...(19): siRNA sense strand
ugugaaaacuuagcucuua

SEQ ID NO: 844514 - RNA, 19 nt, Homo sapiens
  misc_RNA (1)...(19): siRNA sense strand
aagcucagaucuuacuuca

SEQ ID NO: 844515 - RNA, 19 nt, Homo sapiens
  misc_RNA (1)...(19): siRNA sense strand
gucagaagccucacagaug

SEQ ID NO: 844516 - RNA, 19 nt, Homo sapiens
  misc_RNA (1)...(19): siRNA sense strand
gaggagcuacacuauaaau

SEQ ID NO: 844517 - RNA, 19 nt, Homo sapiens
  misc_RNA (1)...(19): siRNA sense strand
uaaguguggugccugugaa

SEQ ID NO: 844518 - RNA, 19 nt, Homo sapiens
  misc_RNA (1)...(19): siRNA sense strand
gugagaaaccauuuaagug

SEQ ID NO: 844519 - RNA, 19 nt, Homo sapiens
  misc_RNA (1)...(19): siRNA sense strand
ggcgagaaaccauaucuau

SEQ ID NO: 844520 - RNA, 19 nt, Homo sapiens
  misc_RNA (1)...(19): siRNA sense strand
agaaguacaaaccucauaa

SEQ ID NO: 844521 - RNA, 19 nt, Homo sapiens
  misc_RNA (1)...(19): siRNA sense strand
ugggaaaucagaucuuauu

SEQ ID NO: 844522 - RNA, 19 nt, Homo sapiens
  misc_RNA (1)...(19): siRNA sense strand
caggugagaaaccauuuaa

SEQ ID NO: 844523 - RNA, 19 nt, Homo sapiens
  misc_RNA (1)...(19): siRNA sense strand
cauaaggcaucgaagaacu

SEQ ID NO: 844524 - RNA, 19 nt, Homo sapiens
  misc_RNA (1)...(19): siRNA sense strand
gaaguacaaaccucauaag

SEQ ID NO: 844525 - RNA, 19 nt, Homo sapiens
  misc_RNA (1)...(19): siRNA sense strand
agagaacacaugcagguaa

SEQ ID NO: 844526 - RNA, 19 nt, Homo sapiens
  misc_RNA (1)...(19): siRNA sense strand
gaguucagcccuucuucaa

SEQ ID NO: 844527 - RNA, 19 nt, Homo sapiens
  misc_RNA (1)...(19): siRNA sense strand
acagaggagcuacacuaua

SEQ ID NO: 844528 - RNA, 19 nt, Homo sapiens
  misc_RNA (1)...(19): siRNA sense strand
gcaacucacacucacacuu

SEQ ID NO: 844529 - RNA, 19 nt, Homo sapiens
  misc_RNA (1)...(19): siRNA sense strand
guauaaaugccuggaaugu

SEQ ID NO: 844530 - RNA, 19 nt, Homo sapiens
  misc_RNA (1)...(19): siRNA sense strand
aaauguagcaaaugugaga

SEQ ID NO: 844531 - RNA, 19 nt, Homo sapiens
  misc_RNA (1)...(19): siRNA sense strand
uagaaguacaaaccucaua

SEQ ID NO: 844532 - RNA, 19 nt, Homo sapiens
  misc_RNA (1)...(19): siRNA sense strand
uagcucuuauuauguguga

SEQ ID NO: 844533 - RNA, 19 nt, Homo sapiens
  misc_RNA (1)...(19): siRNA sense strand
cuuauuaugugugagagaa

SEQ ID NO: 844534 - RNA, 19 nt, Homo sapiens
  misc_RNA (1)...(19): siRNA sense strand
ggggagaaaccuuauaaaa

SEQ ID NO: 844535 - RNA, 19 nt, Homo sapiens
  misc_RNA (1)...(19): siRNA sense strand
gcucuuauuaugugugaga

SEQ ID NO: 844536 - RNA, 19 nt, Homo sapiens
  misc_RNA (1)...(19): siRNA sense strand
cuuauuagccaccagagaa

SEQ ID NO: 844537 - RNA, 19 nt, Homo sapiens
  misc_RNA (1)...(19): siRNA sense strand
cagaucuuauuguacauca

SEQ ID NO: 844538 - RNA, 19 nt, Homo sapiens
  misc_RNA (1)...(19): siRNA sense strand
ccguucagccuucauugua

SEQ ID NO: 844539 - RNA, 19 nt, Homo sapiens
  misc_RNA (1)...(19): siRNA sense strand
ggagugccaaccuaauuag

SEQ ID NO: 844540 - RNA, 19 nt, Homo sapiens
  misc_RNA (1)...(19): siRNA sense strand
ccguauaaaugccuggaau

SEQ ID NO: 844541 - RNA, 19 nt, Homo sapiens
  misc_RNA (1)...(19): siRNA sense strand
ccaaagcucagaucuuacu

SEQ ID NO: 844542 - RNA, 19 nt, Homo sapiens
  misc_RNA (1)...(19): siRNA sense strand
ccucauaaggcaucgaaga

SEQ ID NO: 844543 - RNA, 19 nt, Homo sapiens
  misc_RNA (1)...(19): siRNA sense strand
agaaaccauuuaagugucu

SEQ ID NO: 844544 - RNA, 19 nt, Homo sapiens
  misc_RNA (1)...(19): siRNA sense strand
gacaguacacauuggugaa

SEQ ID NO: 844545 - RNA, 19 nt, Homo sapiens
  misc_RNA (1)...(19): siRNA sense strand
gagaaaccuuauaaaagug

SEQ ID NO: 844546 - RNA, 19 nt, Homo sapiens
  misc_RNA (1)...(19): siRNA sense strand
guucagccuucauuguaca

SEQ ID NO: 844547 - RNA, 19 nt, Homo sapiens
  misc_RNA (1)...(19): siRNA sense strand
cagauagauggucauauau

SEQ ID NO: 844548 - RNA, 19 nt, Homo sapiens
  misc_RNA (1)...(19): siRNA sense strand
ugagaguggcuuccuccua

SEQ ID NO: 844549 - RNA, 19 nt, Homo sapiens
  misc_RNA (1)...(19): siRNA sense strand
acuuagcucuuauuaugug

SEQ ID NO: 844550 - RNA, 19 nt, Homo sapiens
  misc_RNA (1)...(19): siRNA sense strand
gggagaaaccuuauaaaag

SEQ ID NO: 844551 - RNA, 19 nt, Homo sapiens
  misc_RNA (1)...(19): siRNA sense strand
acaggugagaaaccauuua

SEQ ID NO: 844552 - RNA, 19 nt, Homo sapiens
  misc_RNA (1)...(19): siRNA sense strand
ugagaagccguauaaaugc

SEQ ID NO: 844553 - RNA, 19 nt, Homo sapiens
  misc_RNA (1)...(19): siRNA sense strand
cgacaccguucagccuuca

SEQ ID NO: 844554 - RNA, 19 nt, Homo sapiens
  misc_RNA (1)...(19): siRNA sense strand
gcaaugcucuuccuauguu

SEQ ID NO: 844555 - RNA, 19 nt, Homo sapiens
  misc_RNA (1)...(19): siRNA sense strand
acaaauggcuuuacuuaug

SEQ ID NO: 844556 - RNA, 19 nt, Homo sapiens
  misc_RNA (1)...(19): siRNA sense strand
ccacaaauggcuuuacuua

SEQ ID NO: 844557 - RNA, 19 nt, Homo sapiens
  misc_RNA (1)...(19): siRNA sense strand
aagagcaacuuaugcauua

SEQ ID NO: 844558 - RNA, 19 nt, Homo sapiens
  misc_RNA (1)...(19): siRNA sense strand
gaaucaaugggaaguauua

SEQ ID NO: 844559 - RNA, 19 nt, Homo sapiens
  misc_RNA (1)...(19): siRNA sense strand
gaaaucauccggccuuuua

SEQ ID NO: 844560 - RNA, 19 nt, Homo sapiens
  misc_RNA (1)...(19): siRNA sense strand
guacccaccugauguaaau

SEQ ID NO: 844561 - RNA, 19 nt, Homo sapiens
  misc_RNA (1)...(19): siRNA sense strand
caaaugcgcucagcuucaa

SEQ ID NO: 844562 - RNA, 19 nt, Homo sapiens
  misc_RNA (1)...(19): siRNA sense strand
ugaaggaacucagauugaa

SEQ ID NO: 844563 - RNA, 19 nt, Homo sapiens
  misc_RNA (1)...(19): siRNA sense strand
gcucaucacaucagaauug

SEQ ID NO: 844564 - RNA, 19 nt, Homo sapiens
  misc_RNA (1)...(19): siRNA sense strand
ggaaagagcaacuuaugca

SEQ ID NO: 844565 - RNA, 19 nt, Homo sapiens
  misc_RNA (1)...(19): siRNA sense strand
caaauggcuuuacuuaugg

SEQ ID NO: 844566 - RNA, 19 nt, Homo sapiens
  misc_RNA (1)...(19): siRNA sense strand
gaauugggcuagccuaaaa

SEQ ID NO: 844567 - RNA, 19 nt, Homo sapiens
  misc_RNA (1)...(19): siRNA sense strand
gaaggaacucagauugaaa

SEQ ID NO: 844568 - RNA, 19 nt, Homo sapiens
  misc_RNA (1)...(19): siRNA sense strand
ccagcugccuguuucuuaa

SEQ ID NO: 844569 - RNA, 19 nt, Homo sapiens
  misc_RNA (1)...(19): siRNA sense strand
ucaaugggaaguauuauga

SEQ ID NO: 844570 - RNA, 19 nt, Homo sapiens
  misc_RNA (1)...(19): siRNA sense strand
gcgcucagcuucaauuggu

SEQ ID NO: 844571 - RNA, 19 nt, Homo sapiens
  misc_RNA (1)...(19): siRNA sense strand
uagauuaccguccucauaa

SEQ ID NO: 844572 - RNA, 19 nt, Homo sapiens
  misc_RNA (1)...(19): siRNA sense strand
uaugauggacuguuuauug

SEQ ID NO: 844573 - RNA, 19 nt, Homo sapiens
  misc_RNA (1)...(19): siRNA sense strand
caccugauguaaaugauga

SEQ ID NO: 844574 - RNA, 19 nt, Homo sapiens
  misc_RNA (1)...(19): siRNA sense strand
ggcccaggauacauagaua

SEQ ID NO: 844575 - RNA, 19 nt, Homo sapiens
  misc_RNA (1)...(19): siRNA sense strand
gagaaccuacugauaacuu

SEQ ID NO: 844576 - RNA, 19 nt, Homo sapiens
  misc_RNA (1)...(19): siRNA sense strand
cuagauuaccguccucaua

SEQ ID NO: 844577 - RNA, 19 nt, Homo sapiens
  misc_RNA (1)...(19): siRNA sense strand
ggaaguauuaugaaauugg

SEQ ID NO: 844578 - RNA, 19 nt, Homo sapiens
  misc_RNA (1)...(19): siRNA sense strand
gccagcugccuguuucuua

SEQ ID NO: 844579 - RNA, 19 nt, Homo sapiens
  misc_RNA (1)...(19): siRNA sense strand
gcaugaaggaacucagauu

SEQ ID NO: 844580 - RNA, 19 nt, Homo sapiens
  misc_RNA (1)...(19): siRNA sense strand
aaaaugggccaaucuguua

SEQ ID NO: 844581 - RNA, 19 nt, Homo sapiens
  misc_RNA (1)...(19): siRNA sense strand
ccauauagcaaucgagaug

SEQ ID NO: 844582 - RNA, 19 nt, Homo sapiens
  misc_RNA (1)...(19): siRNA sense strand
aaagagcaacuuaugcauu

SEQ ID NO: 844583 - RNA, 19 nt, Homo sapiens
  misc_RNA (1)...(19): siRNA sense strand
uacuagcccucucuuggua

SEQ ID NO: 844584 - RNA, 19 nt, Homo sapiens
  misc_RNA (1)...(19): siRNA sense strand
uggcaaugcucuuccuaug

SEQ ID NO: 844585 - RNA, 19 nt, Homo sapiens
  misc_RNA (1)...(19): siRNA sense strand
gaaagagcaacuuaugcau

SEQ ID NO: 844586 - RNA, 19 nt, Homo sapiens
  misc_RNA (1)...(19): siRNA sense strand
ccucauaaaccaggucuuu

SEQ ID NO: 844587 - RNA, 19 nt, Homo sapiens
  misc_RNA (1)...(19): siRNA sense strand
gaucgccagcugccuguuu

SEQ ID NO: 844588 - RNA, 19 nt, Homo sapiens
  misc_RNA (1)...(19): siRNA sense strand
cauagaaccauauagcaau

SEQ ID NO: 844589 - RNA, 19 nt, Homo sapiens
  misc_RNA (1)...(19): siRNA sense strand
gagcaacuuaugcauuaga

SEQ ID NO: 844590 - RNA, 19 nt, Homo sapiens
  misc_RNA (1)...(19): siRNA sense strand
gggaaguauuaugaaauug

SEQ ID NO: 844591 - RNA, 19 nt, Homo sapiens
  misc_RNA (1)...(19): siRNA sense strand
ccgaaucaaugggaaguau

SEQ ID NO: 844592 - RNA, 19 nt, Homo sapiens
  misc_RNA (1)...(19): siRNA sense strand
uauauuaccaagccugaaa

SEQ ID NO: 844593 - RNA, 19 nt, Homo sapiens
  misc_RNA (1)...(19): siRNA sense strand
caugaaggaacucagauug

SEQ ID NO: 844594 - RNA, 19 nt, Homo sapiens
  misc_RNA (1)...(19): siRNA sense strand
agauuaccguccucauaaa

SEQ ID NO: 844595 - RNA, 19 nt, Homo sapiens
  misc_RNA (1)...(19): siRNA sense strand
auggagaaccuacugauaa

SEQ ID NO: 844596 - RNA, 19 nt, Homo sapiens
  misc_RNA (1)...(19): siRNA sense strand
agaaccuacugauaacuug

SEQ ID NO: 844597 - RNA, 19 nt, Homo sapiens
  misc_RNA (1)...(19): siRNA sense strand
guuuauugcccuucuggua

SEQ ID NO: 844598 - RNA, 19 nt, Homo sapiens
  misc_RNA (1)...(19): siRNA sense strand
caauucuccuuaugaugga

SEQ ID NO: 844599 - RNA, 19 nt, Homo sapiens
  misc_RNA (1)...(19): siRNA sense strand
agacaaaugcgcucagcuu

SEQ ID NO: 844600 - RNA, 19 nt, Homo sapiens
  misc_RNA (1)...(19): siRNA sense strand
uaacuugguacccacuauu

SEQ ID NO: 844601 - RNA, 19 nt, Homo sapiens
  misc_RNA (1)...(19): siRNA sense strand
caaaagaaccaguaauaca

SEQ ID NO: 844602 - RNA, 19 nt, Homo sapiens
  misc_RNA (1)...(19): siRNA sense strand
caaugcucuuccuauguuu

SEQ ID NO: 844603 - RNA, 19 nt, Homo sapiens
  misc_RNA (1)...(19): siRNA sense strand
gagaugaucaaaacaugua

SEQ ID NO: 844604 - RNA, 19 nt, Homo sapiens
  misc_RNA (1)...(19): siRNA sense strand
ucgcaauucuccuuaugau

SEQ ID NO: 844605 - RNA, 19 nt, Homo sapiens
  misc_RNA (1)...(19): siRNA sense strand
gacgaagacuggcaaugcu

SEQ ID NO: 844606 - RNA, 19 nt, Homo sapiens
  misc_RNA (1)...(19): siRNA sense strand
gauauucuucaaagugguu

SEQ ID NO: 844607 - RNA, 19 nt, Homo sapiens
  misc_RNA (1)...(19): siRNA sense strand
acucgcaaguggucugaaa

SEQ ID NO: 844608 - RNA, 19 nt, Homo sapiens
  misc_RNA (1)...(19): siRNA sense strand
guacuagcccucucuuggu

SEQ ID NO: 844609 - RNA, 19 nt, Homo sapiens
  misc_RNA (1)...(19): siRNA sense strand
cagaauugggcuagccuaa

SEQ ID NO: 844610 - RNA, 19 nt, Homo sapiens
  misc_RNA (1)...(19): siRNA sense strand
acuuauggcucaucacauc

SEQ ID NO: 844611 - RNA, 19 nt, Homo sapiens
  misc_RNA (1)...(19): siRNA sense strand
caagugugggcccaggaua

SEQ ID NO: 844612 - RNA, 19 nt, Homo sapiens
  misc_RNA (1)...(19): siRNA sense strand
ucacauagaaccauauagc

SEQ ID NO: 844613 - RNA, 19 nt, Homo sapiens
  misc_RNA (1)...(19): siRNA sense strand
aaggaaagagcaacuuaug

SEQ ID NO: 844614 - RNA, 19 nt, Homo sapiens
  misc_RNA (1)...(19): siRNA sense strand
ggucuuuaccuagaacuga

SEQ ID NO: 844615 - RNA, 19 nt, Homo sapiens
  misc_RNA (1)...(19): siRNA sense strand
aauggagaaccuacugaua

SEQ ID NO: 844616 - RNA, 19 nt, Homo sapiens
  misc_RNA (1)...(19): siRNA sense strand
acauagaaccauauagcaa

SEQ ID NO: 844617 - RNA, 19 nt, Homo sapiens
  misc_RNA (1)...(19): siRNA sense strand
caaugggaaguauuaugaa

SEQ ID NO: 844618 - RNA, 19 nt, Homo sapiens
  misc_RNA (1)...(19): siRNA sense strand
uuauugcccuucugguaga

SEQ ID NO: 844619 - RNA, 19 nt, Homo sapiens
  misc_RNA (1)...(19): siRNA sense strand
guauucgcaauucuccuua

SEQ ID NO: 844620 - RNA, 19 nt, Homo sapiens
  misc_RNA (1)...(19): siRNA sense strand
gauaacuugguacccacua

SEQ ID NO: 844621 - RNA, 19 nt, Homo sapiens
  misc_RNA (1)...(19): siRNA sense strand
uggagaaccuacugauaac

SEQ ID NO: 844622 - RNA, 19 nt, Homo sapiens
  misc_RNA (1)...(19): siRNA sense strand
ucuaucaccucuuuuaaug

SEQ ID NO: 844623 - RNA, 19 nt, Homo sapiens
  misc_RNA (1)...(19): siRNA sense strand
cacaaauggcuuuacuuau

SEQ ID NO: 844624 - RNA, 19 nt, Homo sapiens
  misc_RNA (1)...(19): siRNA sense strand
ggcaaugcucuuccuaugu

SEQ ID NO: 844625 - RNA, 19 nt, Homo sapiens
  misc_RNA (1)...(19): siRNA sense strand
cccaaaagaaccaguaaua

SEQ ID NO: 844626 - RNA, 19 nt, Homo sapiens
  misc_RNA (1)...(19): siRNA sense strand
gggcuagccuaaaauuaau

SEQ ID NO: 844627 - RNA, 19 nt, Homo sapiens
  misc_RNA (1)...(19): siRNA sense strand
gguacccaccugauguaaa

SEQ ID NO: 844628 - RNA, 19 nt, Homo sapiens
  misc_RNA (1)...(19): siRNA sense strand
cgaaucaaugggaaguauu

SEQ ID NO: 844629 - RNA, 19 nt, Homo sapiens
  misc_RNA (1)...(19): siRNA sense strand
gaaaauggagaaccuacug

SEQ ID NO: 844630 - RNA, 19 nt, Homo sapiens
  misc_RNA (1)...(19): siRNA sense strand
acaaaugcgcucagcuuca

SEQ ID NO: 844631 - RNA, 19 nt, Homo sapiens
  misc_RNA (1)...(19): siRNA sense strand
uuuaaugaguggcaugaag

SEQ ID NO: 844632 - RNA, 19 nt, Homo sapiens
  misc_RNA (1)...(19): siRNA sense strand
auagaaccauauagcaauc

SEQ ID NO: 844633 - RNA, 19 nt, Homo sapiens
  misc_RNA (1)...(19): siRNA sense strand
gauaccagcauccguccau

SEQ ID NO: 844634 - RNA, 19 nt, Homo sapiens
  misc_RNA (1)...(19): siRNA sense strand
aaagaaccaguaauacagu

SEQ ID NO: 844635 - RNA, 19 nt, Homo sapiens
  misc_RNA (1)...(19): siRNA sense strand
ucucggaguauucgcaauu

SEQ ID NO: 844636 - RNA, 19 nt, Homo sapiens
  misc_RNA (1)...(19): siRNA sense strand
ugaguggcaugaaggaacu

SEQ ID NO: 844637 - RNA, 19 nt, Homo sapiens
  misc_RNA (1)...(19): siRNA sense strand
agaauugggcuagccuaaa

SEQ ID NO: 844638 - RNA, 19 nt, Homo sapiens
  misc_RNA (1)...(19): siRNA sense strand
uggaaaucauccggccuuu

SEQ ID NO: 844639 - RNA, 19 nt, Homo sapiens
  misc_RNA (1)...(19): siRNA sense strand
uuaugaaauuggucugagu

SEQ ID NO: 844640 - RNA, 19 nt, Homo sapiens
  misc_RNA (1)...(19): siRNA sense strand
auauagcaaucgagaugau

SEQ ID NO: 844641 - RNA, 19 nt, Homo sapiens
  misc_RNA (1)...(19): siRNA sense strand
ugugggcccaggauacaua

SEQ ID NO: 844642 - RNA, 19 nt, Homo sapiens
  misc_RNA (1)...(19): siRNA sense strand
caaucgagaugaucaaaac

SEQ ID NO: 844643 - RNA, 19 nt, Homo sapiens
  misc_RNA (1)...(19): siRNA sense strand
gaaagcagcugcgaagugu

SEQ ID NO: 844644 - RNA, 19 nt, Homo sapiens
  misc_RNA (1)...(19): siRNA sense strand
gccauuuguuucucuauua

SEQ ID NO: 844645 - RNA, 19 nt, Homo sapiens
  misc_RNA (1)...(19): siRNA sense strand
gcuggaaccuggagauuug

SEQ ID NO: 844646 - RNA, 19 nt, Homo sapiens
  misc_RNA (1)...(19): siRNA sense strand
gaaccgcuuucauggagaa

SEQ ID NO: 844647 - RNA, 19 nt, Homo sapiens
  misc_RNA (1)...(19): siRNA sense strand
gcgaagaaccgcuuucaug

SEQ ID NO: 844648 - RNA, 19 nt, Homo sapiens
  misc_RNA (1)...(19): siRNA sense strand
gcauucagauucuaaggau

SEQ ID NO: 844649 - RNA, 19 nt, Homo sapiens
  misc_RNA (1)...(19): siRNA sense strand
ggaagaaaauguggaguuu

SEQ ID NO: 844650 - RNA, 19 nt, Homo sapiens
  misc_RNA (1)...(19): siRNA sense strand
gcaagcugaugccauggaa

SEQ ID NO: 844651 - RNA, 19 nt, Homo sapiens
  misc_RNA (1)...(19): siRNA sense strand
gaagaaccgcuuucaugga

SEQ ID NO: 844652 - RNA, 19 nt, Homo sapiens
  misc_RNA (1)...(19): siRNA sense strand
cuggagauuugcuguauuu

SEQ ID NO: 844653 - RNA, 19 nt, Homo sapiens
  misc_RNA (1)...(19): siRNA sense strand
cccgagacuucauggauua

SEQ ID NO: 844654 - RNA, 19 nt, Homo sapiens
  misc_RNA (1)...(19): siRNA sense strand
gugcaccgcgcaacacuua

SEQ ID NO: 844655 - RNA, 19 nt, Homo sapiens
  misc_RNA (1)...(19): siRNA sense strand
aaacagaaguccauaugcu

SEQ ID NO: 844656 - RNA, 19 nt, Homo sapiens
  misc_RNA (1)...(19): siRNA sense strand
aggaaacucuggcguguau

SEQ ID NO: 844657 - RNA, 19 nt, Homo sapiens
  misc_RNA (1)...(19): siRNA sense strand
gcaacgaggaggugcaguu

SEQ ID NO: 844658 - RNA, 19 nt, Homo sapiens
  misc_RNA (1)...(19): siRNA sense strand
ccgcaggcuuucucuacua

SEQ ID NO: 844659 - RNA, 19 nt, Homo sapiens
  misc_RNA (1)...(19): siRNA sense strand
ggaaaacucccguguguau

SEQ ID NO: 844660 - RNA, 19 nt, Homo sapiens
  misc_RNA (1)...(19): siRNA sense strand
ggccauuuguuucucuauu

SEQ ID NO: 844661 - RNA, 19 nt, Homo sapiens
  misc_RNA (1)...(19): siRNA sense strand
ccgcugaccuggauucgau

SEQ ID NO: 844662 - RNA, 19 nt, Homo sapiens
  misc_RNA (1)...(19): siRNA sense strand
acacuuugcuccuguugau

SEQ ID NO: 844663 - RNA, 19 nt, Homo sapiens
  misc_RNA (1)...(19): siRNA sense strand
caagagcaguuuggaagca

SEQ ID NO: 844664 - RNA, 19 nt, Homo sapiens
  misc_RNA (1)...(19): siRNA sense strand
ggcaggaccacaccuacua

SEQ ID NO: 844665 - RNA, 19 nt, Homo sapiens
  misc_RNA (1)...(19): siRNA sense strand
gcaguucggccagcauuug

SEQ ID NO: 844666 - RNA, 19 nt, Homo sapiens
  misc_RNA (1)...(19): siRNA sense strand
cgaaagcagcugcgaagug

SEQ ID NO: 844667 - RNA, 19 nt, Homo sapiens
  misc_RNA (1)...(19): siRNA sense strand
gaaacucuggcguguauac

SEQ ID NO: 844668 - RNA, 19 nt, Homo sapiens
  misc_RNA (1)...(19): siRNA sense strand
gaaggugcgggucuugguu

SEQ ID NO: 844669 - RNA, 19 nt, Homo sapiens
  misc_RNA (1)...(19): siRNA sense strand
agaaacagaaguccauaug

SEQ ID NO: 844670 - RNA, 19 nt, Homo sapiens
  misc_RNA (1)...(19): siRNA sense strand
guucuuauccagaguuugu

SEQ ID NO: 844671 - RNA, 19 nt, Homo sapiens
  misc_RNA (1)...(19): siRNA sense strand
ccaggaagauacgaaagca

SEQ ID NO: 844672 - RNA, 19 nt, Homo sapiens
  misc_RNA (1)...(19): siRNA sense strand
gggcugcugcucacuaaga

SEQ ID NO: 844673 - RNA, 19 nt, Homo sapiens
  misc_RNA (1)...(19): siRNA sense strand
gaaacagaaguccauaugc

SEQ ID NO: 844674 - RNA, 19 nt, Homo sapiens
  misc_RNA (1)...(19): siRNA sense strand
gagacuucauggauuacau

SEQ ID NO: 844675 - RNA, 19 nt, Homo sapiens
  misc_RNA (1)...(19): siRNA sense strand
uggaagaacccaagugcuu

SEQ ID NO: 844676 - RNA, 19 nt, Homo sapiens
  misc_RNA (1)...(19): siRNA sense strand
gagccaaagacuucauuca

SEQ ID NO: 844677 - RNA, 19 nt, Homo sapiens
  misc_RNA (1)...(19): siRNA sense strand
ccagcgagccaaagacuuc

SEQ ID NO: 844678 - RNA, 19 nt, Homo sapiens
  misc_RNA (1)...(19): siRNA sense strand
gcagcuggaagguaggaaa

SEQ ID NO: 844679 - RNA, 19 nt, Homo sapiens
  misc_RNA (1)...(19): siRNA sense strand
uaccuggggugacuucuua

SEQ ID NO: 844680 - RNA, 19 nt, Homo sapiens
  misc_RNA (1)...(19): siRNA sense strand
gcccagcauucagauucua

SEQ ID NO: 844681 - RNA, 19 nt, Homo sapiens
  misc_RNA (1)...(19): siRNA sense strand
gauagggagagggcacuaa

SEQ ID NO: 844682 - RNA, 19 nt, Homo sapiens
  misc_RNA (1)...(19): siRNA sense strand
gggcccagcauucagauuc

SEQ ID NO: 844683 - RNA, 19 nt, Homo sapiens
  misc_RNA (1)...(19): siRNA sense strand
aacuguugcuugguucuua

SEQ ID NO: 844684 - RNA, 19 nt, Homo sapiens
  misc_RNA (1)...(19): siRNA sense strand
ggagaaggugcgggucuug

SEQ ID NO: 844685 - RNA, 19 nt, Homo sapiens
  misc_RNA (1)...(19): siRNA sense strand
agacuucauucacgauucu

SEQ ID NO: 844686 - RNA, 19 nt, Homo sapiens
  misc_RNA (1)...(19): siRNA sense strand
guggaaaacucccgugugu

SEQ ID NO: 844687 - RNA, 19 nt, Homo sapiens
  misc_RNA (1)...(19): siRNA sense strand
ccauuuguuucucuauuac

SEQ ID NO: 844688 - RNA, 19 nt, Homo sapiens
  misc_RNA (1)...(19): siRNA sense strand
caacgaggaggugcaguuc

SEQ ID NO: 844689 - RNA, 19 nt, Homo sapiens
  misc_RNA (1)...(19): siRNA sense strand
aagcagcugcgaaguguug

SEQ ID NO: 844690 - RNA, 19 nt, Homo sapiens
  misc_RNA (1)...(19): siRNA sense strand
gacaacagaaacagaaguc

SEQ ID NO: 844691 - RNA, 19 nt, Homo sapiens
  misc_RNA (1)...(19): siRNA sense strand
gaggcuggagaaccuguaa

SEQ ID NO: 844692 - RNA, 19 nt, Homo sapiens
  misc_RNA (1)...(19): siRNA sense strand
gaacuggcucugacaucca

SEQ ID NO: 844693 - RNA, 19 nt, Homo sapiens
  misc_RNA (1)...(19): siRNA sense strand
uggcaggcuccaacguuua

SEQ ID NO: 844694 - RNA, 19 nt, Homo sapiens
  misc_RNA (1)...(19): siRNA sense strand
cagaaacagaaguccauau

SEQ ID NO: 844695 - RNA, 19 nt, Homo sapiens
  misc_RNA (1)...(19): siRNA sense strand
ggacacuuugcuccuguug

SEQ ID NO: 844696 - RNA, 19 nt, Homo sapiens
  misc_RNA (1)...(19): siRNA sense strand
gguccaggaagauacgaaa

SEQ ID NO: 844697 - RNA, 19 nt, Homo sapiens
  misc_RNA (1)...(19): siRNA sense strand
ccacguaccagcgcaauac

SEQ ID NO: 844698 - RNA, 19 nt, Homo sapiens
  misc_RNA (1)...(19): siRNA sense strand
gggacacuuugcuccuguu

SEQ ID NO: 844699 - RNA, 19 nt, Homo sapiens
  misc_RNA (1)...(19): siRNA sense strand
cccuugagguccaggaaga

SEQ ID NO: 844700 - RNA, 19 nt, Homo sapiens
  misc_RNA (1)...(19): siRNA sense strand
gcuggaagguaggaaacuc

SEQ ID NO: 844701 - RNA, 19 nt, Homo sapiens
  misc_RNA (1)...(19): siRNA sense strand
gcugcgaaguguuguaucc

SEQ ID NO: 844702 - RNA, 19 nt, Homo sapiens
  misc_RNA (1)...(19): siRNA sense strand
ccuggagauuugcuguauu

SEQ ID NO: 844703 - RNA, 19 nt, Homo sapiens
  misc_RNA (1)...(19): siRNA sense strand
cauggcaggcuccaacguu

SEQ ID NO: 844704 - RNA, 19 nt, Homo sapiens
  misc_RNA (1)...(19): siRNA sense strand
caaagacuucauucacgau

SEQ ID NO: 844705 - RNA, 19 nt, Homo sapiens
  misc_RNA (1)...(19): siRNA sense strand
gcagcugcgaaguguugua

SEQ ID NO: 844706 - RNA, 19 nt, Homo sapiens
  misc_RNA (1)...(19): siRNA sense strand
gcgagccaaagacuucauu

SEQ ID NO: 844707 - RNA, 19 nt, Homo sapiens
  misc_RNA (1)...(19): siRNA sense strand
guguguaucaucuggaaga

SEQ ID NO: 844708 - RNA, 19 nt, Homo sapiens
  misc_RNA (1)...(19): siRNA sense strand
ccguguguaucaucuggaa

SEQ ID NO: 844709 - RNA, 19 nt, Homo sapiens
  misc_RNA (1)...(19): siRNA sense strand
aaagacuucauucacgauu

SEQ ID NO: 844710 - RNA, 19 nt, Homo sapiens
  misc_RNA (1)...(19): siRNA sense strand
caggcuuucucuacuacug

SEQ ID NO: 844711 - RNA, 19 nt, Homo sapiens
  misc_RNA (1)...(19): siRNA sense strand
cugaugccauggaacuguu

SEQ ID NO: 844712 - RNA, 19 nt, Homo sapiens
  misc_RNA (1)...(19): siRNA sense strand
ggaggcuggagaaccugua

SEQ ID NO: 844713 - RNA, 19 nt, Homo sapiens
  misc_RNA (1)...(19): siRNA sense strand
auggcaggcuccaacguuu

SEQ ID NO: 844714 - RNA, 19 nt, Homo sapiens
  misc_RNA (1)...(19): siRNA sense strand
agaccaaccugaagaauaa

SEQ ID NO: 844715 - RNA, 19 nt, Homo sapiens
  misc_RNA (1)...(19): siRNA sense strand
gaagagauucagacagaua

SEQ ID NO: 844716 - RNA, 19 nt, Homo sapiens
  misc_RNA (1)...(19): siRNA sense strand
aagaagagauucagacaga

SEQ ID NO: 844717 - RNA, 19 nt, Homo sapiens
  misc_RNA (1)...(19): siRNA sense strand
cgauauugaucaggauuua

SEQ ID NO: 844718 - RNA, 19 nt, Homo sapiens
  misc_RNA (1)...(19): siRNA sense strand
ccaagaggcuccggucaga

SEQ ID NO: 844719 - RNA, 19 nt, Homo sapiens
  misc_RNA (1)...(19): siRNA sense strand
gcaucucccuaucaaagaa

SEQ ID NO: 844720 - RNA, 19 nt, Homo sapiens
  misc_RNA (1)...(19): siRNA sense strand
ggucgcaucucccuaucaa

SEQ ID NO: 844721 - RNA, 19 nt, Homo sapiens
  misc_RNA (1)...(19): siRNA sense strand
caacaugucauucacuuca

SEQ ID NO: 844722 - RNA, 19 nt, Homo sapiens
  misc_RNA (1)...(19): siRNA sense strand
gagaagaccccauuaaaga

SEQ ID NO: 844723 - RNA, 19 nt, Homo sapiens
  misc_RNA (1)...(19): siRNA sense strand
gaucuaaacaccagaccaa

SEQ ID NO: 844724 - RNA, 19 nt, Homo sapiens
  misc_RNA (1)...(19): siRNA sense strand
ugugcagccugguuuaaua

SEQ ID NO: 844725 - RNA, 19 nt, Homo sapiens
  misc_RNA (1)...(19): siRNA sense strand
cagaccaaccugaagaaua

SEQ ID NO: 844726 - RNA, 19 nt, Homo sapiens
  misc_RNA (1)...(19): siRNA sense strand
gaaguccuccgauauugau

SEQ ID NO: 844727 - RNA, 19 nt, Homo sapiens
  misc_RNA (1)...(19): siRNA sense strand
caaagaagagauucagaca

SEQ ID NO: 844728 - RNA, 19 nt, Homo sapiens
  misc_RNA (1)...(19): siRNA sense strand
gguggccgauucccauuau

SEQ ID NO: 844729 - RNA, 19 nt, Homo sapiens
  misc_RNA (1)...(19): siRNA sense strand
aagaguugcuuuguuagaa

SEQ ID NO: 844730 - RNA, 19 nt, Homo sapiens
  misc_RNA (1)...(19): siRNA sense strand
gaagugaugccgacauggu

SEQ ID NO: 844731 - RNA, 19 nt, Homo sapiens
  misc_RNA (1)...(19): siRNA sense strand
ggucugaggcgcaauuaca

SEQ ID NO: 844732 - RNA, 19 nt, Homo sapiens
  misc_RNA (1)...(19): siRNA sense strand
gagagaagaccccauuaaa

SEQ ID NO: 844733 - RNA, 19 nt, Homo sapiens
  misc_RNA (1)...(19): siRNA sense strand
gaggcgcaauuacagaugu

SEQ ID NO: 844734 - RNA, 19 nt, Homo sapiens
  misc_RNA (1)...(19): siRNA sense strand
caagaguugcuuuguuaga

SEQ ID NO: 844735 - RNA, 19 nt, Homo sapiens
  misc_RNA (1)...(19): siRNA sense strand
ugauggcccagcaacauua

SEQ ID NO: 844736 - RNA, 19 nt, Homo sapiens
  misc_RNA (1)...(19): siRNA sense strand
gcacagcugaucuccgaau

SEQ ID NO: 844737 - RNA, 19 nt, Homo sapiens
  misc_RNA (1)...(19): siRNA sense strand
acauuaugauggcaagaaa

SEQ ID NO: 844738 - RNA, 19 nt, Homo sapiens
  misc_RNA (1)...(19): siRNA sense strand
gugcagccugguuuaauaa

SEQ ID NO: 844739 - RNA, 19 nt, Homo sapiens
  misc_RNA (1)...(19): siRNA sense strand
ggagagaagaccccauuaa

SEQ ID NO: 844740 - RNA, 19 nt, Homo sapiens
  misc_RNA (1)...(19): siRNA sense strand
aaagaaugcggcaagaguu

SEQ ID NO: 844741 - RNA, 19 nt, Homo sapiens
  misc_RNA (1)...(19): siRNA sense strand
gcucugugcagccugguuu

SEQ ID NO: 844742 - RNA, 19 nt, Homo sapiens
  misc_RNA (1)...(19): siRNA sense strand
uggaagugaugccgacaug

SEQ ID NO: 844743 - RNA, 19 nt, Homo sapiens
  misc_RNA (1)...(19): siRNA sense strand
ccgacaugguggauaagaa

SEQ ID NO: 844744 - RNA, 19 nt, Homo sapiens
  misc_RNA (1)...(19): siRNA sense strand
caggauuuauucacagaca

SEQ ID NO: 844745 - RNA, 19 nt, Homo sapiens
  misc_RNA (1)...(19): siRNA sense strand
ugaucaggauuuauucaca

SEQ ID NO: 844746 - RNA, 19 nt, Homo sapiens
  misc_RNA (1)...(19): siRNA sense strand
guaucaugcccaucugaaa

SEQ ID NO: 844747 - RNA, 19 nt, Homo sapiens
  misc_RNA (1)...(19): siRNA sense strand
ucccuaaacucaauagaac

SEQ ID NO: 844748 - RNA, 19 nt, Homo sapiens
  misc_RNA (1)...(19): siRNA sense strand
aagaggcuccggucagaaa

SEQ ID NO: 844749 - RNA, 19 nt, Homo sapiens
  misc_RNA (1)...(19): siRNA sense strand
ucaauagaacaguaucaug

SEQ ID NO: 844750 - RNA, 19 nt, Homo sapiens
  misc_RNA (1)...(19): siRNA sense strand
augccgacaugguggauaa

SEQ ID NO: 844751 - RNA, 19 nt, Homo sapiens
  misc_RNA (1)...(19): siRNA sense strand
ccaaccugaagaauaagua

SEQ ID NO: 844752 - RNA, 19 nt, Homo sapiens
  misc_RNA (1)...(19): siRNA sense strand
gguggucgcaucucccuau

SEQ ID NO: 844753 - RNA, 19 nt, Homo sapiens
  misc_RNA (1)...(19): siRNA sense strand
ugcaacaugucauucacuu

SEQ ID NO: 844754 - RNA, 19 nt, Homo sapiens
  misc_RNA (1)...(19): siRNA sense strand
gaggguguccugccaagag

SEQ ID NO: 844755 - RNA, 19 nt, Homo sapiens
  misc_RNA (1)...(19): siRNA sense strand
ucgaaaacaugcaagcaaa

SEQ ID NO: 844756 - RNA, 19 nt, Homo sapiens
  misc_RNA (1)...(19): siRNA sense strand
gaggucugaggcgcaauua

SEQ ID NO: 844757 - RNA, 19 nt, Homo sapiens
  misc_RNA (1)...(19): siRNA sense strand
caccagaccaaccugaaga

SEQ ID NO: 844758 - RNA, 19 nt, Homo sapiens
  misc_RNA (1)...(19): siRNA sense strand
caucugaaaggaucuaaac

SEQ ID NO: 844759 - RNA, 19 nt, Homo sapiens
  misc_RNA (1)...(19): siRNA sense strand
gcaacaugucauucacuuc

SEQ ID NO: 844760 - RNA, 19 nt, Homo sapiens
  misc_RNA (1)...(19): siRNA sense strand
gcccagcaacauuaugaug

SEQ ID NO: 844761 - RNA, 19 nt, Homo sapiens
  misc_RNA (1)...(19): siRNA sense strand
uaucaugcccaucugaaag

SEQ ID NO: 844762 - RNA, 19 nt, Homo sapiens
  misc_RNA (1)...(19): siRNA sense strand
gggacaacccuggauaugg

SEQ ID NO: 844763 - RNA, 19 nt, Homo sapiens
  misc_RNA (1)...(19): siRNA sense strand
ucgcaucucccuaucaaag

SEQ ID NO: 844764 - RNA, 19 nt, Homo sapiens
  misc_RNA (1)...(19): siRNA sense strand
ggauuuauucacagacagu

SEQ ID NO: 844765 - RNA, 19 nt, Homo sapiens
  misc_RNA (1)...(19): siRNA sense strand
aagaaugcggcaagaguug

SEQ ID NO: 844766 - RNA, 19 nt, Homo sapiens
  misc_RNA (1)...(19): siRNA sense strand
cgacaugguggauaagaac

SEQ ID NO: 844767 - RNA, 19 nt, Homo sapiens
  misc_RNA (1)...(19): siRNA sense strand
caaccugaagaauaaguag

SEQ ID NO: 844768 - RNA, 19 nt, Homo sapiens
  misc_RNA (1)...(19): siRNA sense strand
uguaccaucugcagugucu

SEQ ID NO: 844769 - RNA, 19 nt, Homo sapiens
  misc_RNA (1)...(19): siRNA sense strand
gaggaggacuuccgguuau

SEQ ID NO: 844770 - RNA, 19 nt, Homo sapiens
  misc_RNA (1)...(19): siRNA sense strand
ggagggcgguucauguuca

SEQ ID NO: 844771 - RNA, 19 nt, Homo sapiens
  misc_RNA (1)...(19): siRNA sense strand
ccaacuaccuggaggacuu

SEQ ID NO: 844772 - RNA, 19 nt, Homo sapiens
  misc_RNA (1)...(19): siRNA sense strand
ggaggagggugccaacaag

SEQ ID NO: 844773 - RNA, 19 nt, Homo sapiens
  misc_RNA (1)...(19): siRNA sense strand
uugugaaccuguacagaua

SEQ ID NO: 844774 - RNA, 19 nt, Homo sapiens
  misc_RNA (1)...(19): siRNA sense strand
ggaggaagcggagcggauu

SEQ ID NO: 844775 - RNA, 19 nt, Homo sapiens
  misc_RNA (1)...(19): siRNA sense strand
gaaccuguacagauacuuc

SEQ ID NO: 844776 - RNA, 19 nt, Homo sapiens
  misc_RNA (1)...(19): siRNA sense strand
gaagguccagcucaccauu

SEQ ID NO: 844777 - RNA, 19 nt, Homo sapiens
  misc_RNA (1)...(19): siRNA sense strand
agaggaggacuuccgguua

SEQ ID NO: 844778 - RNA, 19 nt, Homo sapiens
  misc_RNA (1)...(19): siRNA sense strand
ggucgcgucuccuucuuca

SEQ ID NO: 844779 - RNA, 19 nt, Homo sapiens
  misc_RNA (1)...(19): siRNA sense strand
ugaccaagcccaccuucuu

SEQ ID NO: 844780 - RNA, 19 nt, Homo sapiens
  misc_RNA (1)...(19): siRNA sense strand
cagaggccguggcuaagga

SEQ ID NO: 844781 - RNA, 19 nt, Homo sapiens
  misc_RNA (1)...(19): siRNA sense strand
uggcagaggccguggcuaa

SEQ ID NO: 844782 - RNA, 19 nt, Homo sapiens
  misc_RNA (1)...(19): siRNA sense strand
ggaagcacuuugugaaccu

SEQ ID NO: 844783 - RNA, 19 nt, Homo sapiens
  misc_RNA (1)...(19): siRNA sense strand
gcggagggcgguucauguu

SEQ ID NO: 844784 - RNA, 19 nt, Homo sapiens
  misc_RNA (1)...(19): siRNA sense strand
gaccaagcccaccuucuuc

SEQ ID NO: 844785 - RNA, 19 nt, Homo sapiens
  misc_RNA (1)...(19): siRNA sense strand
ugcuguaccucuccaacua

SEQ ID NO: 844786 - RNA, 19 nt, Homo sapiens
  misc_RNA (1)...(19): siRNA sense strand
ggagcagcaccaagaagga

SEQ ID NO: 844787 - RNA, 19 nt, Homo sapiens
  misc_RNA (1)...(19): siRNA sense strand
gaggagggugccaacaaga

SEQ ID NO: 844788 - RNA, 19 nt, Homo sapiens
  misc_RNA (1)...(19): siRNA sense strand
aggaggacuuccgguuaua

SEQ ID NO: 844789 - RNA, 19 nt, Homo sapiens
  misc_RNA (1)...(19): siRNA sense strand
ggucguggcagggagauuc

SEQ ID NO: 844790 - RNA, 19 nt, Homo sapiens
  misc_RNA (1)...(19): siRNA sense strand
gagggcgguucauguucau

SEQ ID NO: 844791 - RNA, 19 nt, Homo sapiens
  misc_RNA (1)...(19): siRNA sense strand
gggauaaaauacagaacau

SEQ ID NO: 844792 - RNA, 19 nt, Homo sapiens
  misc_RNA (1)...(19): siRNA sense strand
gcccugcucugaggacuac

SEQ ID NO: 844793 - RNA, 19 nt, Homo sapiens
  misc_RNA (1)...(19): siRNA sense strand
acaccucgcugcuguaccu

SEQ ID NO: 844794 - RNA, 19 nt, Homo sapiens
  misc_RNA (1)...(19): siRNA sense strand
cuacggcuccuucgacuac

SEQ ID NO: 844795 - RNA, 19 nt, Homo sapiens
  misc_RNA (1)...(19): siRNA sense strand
ggcaugcgcacguggacaa

SEQ ID NO: 844796 - RNA, 19 nt, Homo sapiens
  misc_RNA (1)...(19): siRNA sense strand
aaccggagcagcaccaaga

SEQ ID NO: 844797 - RNA, 19 nt, Homo sapiens
  misc_RNA (1)...(19): siRNA sense strand
gaggaggacuuccgguuau

SEQ ID NO: 844798 - RNA, 19 nt, Homo sapiens
  misc_RNA (1)...(19): siRNA sense strand
ggagggcgguucauguuca

SEQ ID NO: 844799 - RNA, 19 nt, Homo sapiens
  misc_RNA (1)...(19): siRNA sense strand
ccaacuaccuggaggacuu

SEQ ID NO: 844800 - RNA, 19 nt, Homo sapiens
  misc_RNA (1)...(19): siRNA sense strand
ggaggagggugccaacaag

SEQ ID NO: 844801 - RNA, 19 nt, Homo sapiens
  misc_RNA (1)...(19): siRNA sense strand
uugugaaccuguacagaua

SEQ ID NO: 844802 - RNA, 19 nt, Homo sapiens
  misc_RNA (1)...(19): siRNA sense strand
ggaggaagcggagcggauu

SEQ ID NO: 844803 - RNA, 19 nt, Homo sapiens
  misc_RNA (1)...(19): siRNA sense strand
gaaccuguacagauacuuc

SEQ ID NO: 844804 - RNA, 19 nt, Homo sapiens
  misc_RNA (1)...(19): siRNA sense strand
gaagguccagcucaccauu

SEQ ID NO: 844805 - RNA, 19 nt, Homo sapiens
  misc_RNA (1)...(19): siRNA sense strand
agaggaggacuuccgguua

SEQ ID NO: 844806 - RNA, 19 nt, Homo sapiens
  misc_RNA (1)...(19): siRNA sense strand
ugaccaagcccaccuucuu

SEQ ID NO: 844807 - RNA, 19 nt, Homo sapiens
  misc_RNA (1)...(19): siRNA sense strand
cagaggccguggcuaagga

SEQ ID NO: 844808 - RNA, 19 nt, Homo sapiens
  misc_RNA (1)...(19): siRNA sense strand
uggcagaggccguggcuaa

SEQ ID NO: 844809 - RNA, 19 nt, Homo sapiens
  misc_RNA (1)...(19): siRNA sense strand
ggaagcacuuugugaaccu

SEQ ID NO: 844810 - RNA, 19 nt, Homo sapiens
  misc_RNA (1)...(19): siRNA sense strand
gcggagggcgguucauguu

SEQ ID NO: 844811 - RNA, 19 nt, Homo sapiens
  misc_RNA (1)...(19): siRNA sense strand
gaccaagcccaccuucuuc

SEQ ID NO: 844812 - RNA, 19 nt, Homo sapiens
  misc_RNA (1)...(19): siRNA sense strand
ugcuguaccucuccaacua

SEQ ID NO: 844813 - RNA, 19 nt, Homo sapiens
  misc_RNA (1)...(19): siRNA sense strand
ggagcagcaccaagaagga

SEQ ID NO: 844814 - RNA, 19 nt, Homo sapiens
  misc_RNA (1)...(19): siRNA sense strand
gaggagggugccaacaaga

SEQ ID NO: 844815 - RNA, 19 nt, Homo sapiens
  misc_RNA (1)...(19): siRNA sense strand
aggaggacuuccgguuaua

SEQ ID NO: 844816 - RNA, 19 nt, Homo sapiens
  misc_RNA (1)...(19): siRNA sense strand
ggucguggcagggagauuc

SEQ ID NO: 844817 - RNA, 19 nt, Homo sapiens
  misc_RNA (1)...(19): siRNA sense strand
gagggcgguucauguucau

SEQ ID NO: 844818 - RNA, 19 nt, Homo sapiens
  misc_RNA (1)...(19): siRNA sense strand
gggauaaaauacagaacau

SEQ ID NO: 844819 - RNA, 19 nt, Homo sapiens
  misc_RNA (1)...(19): siRNA sense strand
gcccugcucugaggacuac

SEQ ID NO: 844820 - RNA, 19 nt, Homo sapiens
  misc_RNA (1)...(19): siRNA sense strand
acaccucgcugcuguaccu

SEQ ID NO: 844821 - RNA, 19 nt, Homo sapiens
  misc_RNA (1)...(19): siRNA sense strand
cuacggcuccuucgacuac

SEQ ID NO: 844822 - RNA, 19 nt, Homo sapiens
  misc_RNA (1)...(19): siRNA sense strand
ggcaugcgcacguggacaa

SEQ ID NO: 844823 - RNA, 19 nt, Homo sapiens
  misc_RNA (1)...(19): siRNA sense strand
aaccggagcagcaccaaga

SEQ ID NO: 844824 - RNA, 19 nt, Homo sapiens
  misc_RNA (1)...(19): siRNA sense strand
caaagaagaugaaacuuga

SEQ ID NO: 844825 - RNA, 19 nt, Homo sapiens
  misc_RNA (1)...(19): siRNA sense strand
ggacaaagcaguuccaauu

SEQ ID NO: 844826 - RNA, 19 nt, Homo sapiens
  misc_RNA (1)...(19): siRNA sense strand
ggaagaagcgccagaaguu

SEQ ID NO: 844827 - RNA, 19 nt, Homo sapiens
  misc_RNA (1)...(19): siRNA sense strand
gcaaagaagaugaaacuug

SEQ ID NO: 844828 - RNA, 19 nt, Homo sapiens
  misc_RNA (1)...(19): siRNA sense strand
gaagaagcgccagaaguua

SEQ ID NO: 844829 - RNA, 19 nt, Homo sapiens
  misc_RNA (1)...(19): siRNA sense strand
agaaauuacuggcaaagaa

SEQ ID NO: 844830 - RNA, 19 nt, Homo sapiens
  misc_RNA (1)...(19): siRNA sense strand
gaugaaacuugaacagaag

SEQ ID NO: 844831 - RNA, 19 nt, Homo sapiens
  misc_RNA (1)...(19): siRNA sense strand
agaugaaacuugaacagaa

SEQ ID NO: 844832 - RNA, 19 nt, Homo sapiens
  misc_RNA (1)...(19): siRNA sense strand
gaacagaagaaacaagaag

SEQ ID NO: 844833 - RNA, 19 nt, Homo sapiens
  misc_RNA (1)...(19): siRNA sense strand
gaagaacccggacaaagca

SEQ ID NO: 844834 - RNA, 19 nt, Homo sapiens
  misc_RNA (1)...(19): siRNA sense strand
aaaauuggaugcagaguuu

SEQ ID NO: 844835 - RNA, 19 nt, Homo sapiens
  misc_RNA (1)...(19): siRNA sense strand
gaaauuacuggcaaagaag

SEQ ID NO: 844836 - RNA, 19 nt, Homo sapiens
  misc_RNA (1)...(19): siRNA sense strand
agaaaagacuggaaaagaa

SEQ ID NO: 844837 - RNA, 19 nt, Homo sapiens
  misc_RNA (1)...(19): siRNA sense strand
caaagcaguuccaauucca

SEQ ID NO: 844838 - RNA, 19 nt, Homo sapiens
  misc_RNA (1)...(19): siRNA sense strand
aggaggaagugcccaguuu

SEQ ID NO: 844839 - RNA, 19 nt, Homo sapiens
  misc_RNA (1)...(19): siRNA sense strand
agaagaaauuacuggcaaa

SEQ ID NO: 844840 - RNA, 19 nt, Homo sapiens
  misc_RNA (1)...(19): siRNA sense strand
cagaggagcagaccgcaaa

SEQ ID NO: 844841 - RNA, 19 nt, Homo sapiens
  misc_RNA (1)...(19): siRNA sense strand
aagaagcgccagaaguuaa

SEQ ID NO: 844842 - RNA, 19 nt, Homo sapiens
  misc_RNA (1)...(19): siRNA sense strand
gacaaagcaguuccaauuc

SEQ ID NO: 844843 - RNA, 19 nt, Homo sapiens
  misc_RNA (1)...(19): siRNA sense strand
gaauuuguccgagauguca

SEQ ID NO: 844844 - RNA, 19 nt, Homo sapiens
  misc_RNA (1)...(19): siRNA sense strand
gaagaugaaacuugaacag

SEQ ID NO: 844845 - RNA, 19 nt, Homo sapiens
  misc_RNA (1)...(19): siRNA sense strand
gaaacuugaacagaagaaa

SEQ ID NO: 844846 - RNA, 19 nt, Homo sapiens
  misc_RNA (1)...(19): siRNA sense strand
caccgaggcccaagaaaga

SEQ ID NO: 844847 - RNA, 19 nt, Homo sapiens
  misc_RNA (1)...(19): siRNA sense strand
gaggaagugcccaguuuca

SEQ ID NO: 844848 - RNA, 19 nt, Homo sapiens
  misc_RNA (1)...(19): siRNA sense strand
gaaaagacuggaaaagaau

SEQ ID NO: 844849 - RNA, 19 nt, Homo sapiens
  misc_RNA (1)...(19): siRNA sense strand
gaacccggacaaagcaguu

SEQ ID NO: 844850 - RNA, 19 nt, Homo sapiens
  misc_RNA (1)...(19): siRNA sense strand
gcaguuccaauuccagaga

SEQ ID NO: 844851 - RNA, 19 nt, Homo sapiens
  misc_RNA (1)...(19): siRNA sense strand
gaagaaauuacuggcaaag

SEQ ID NO: 844852 - RNA, 19 nt, Homo sapiens
  misc_RNA (1)...(19): siRNA sense strand
ggaggaagugcccaguuuc

SEQ ID NO: 844853 - RNA, 19 nt, Homo sapiens
  misc_RNA (1)...(19): siRNA sense strand
ugaagaacccggacaaagc

SEQ ID NO: 844854 - RNA, 19 nt, Homo sapiens
  misc_RNA (1)...(19): siRNA sense strand
uggaugccauggcugagaa

SEQ ID NO: 844855 - RNA, 19 nt, Homo sapiens
  misc_RNA (1)...(19): siRNA sense strand
gaccaccgaggcccaagaa

SEQ ID NO: 844856 - RNA, 19 nt, Homo sapiens
  misc_RNA (1)...(19): siRNA sense strand
cagaauuuguccgagaugu

SEQ ID NO: 844857 - RNA, 19 nt, Homo sapiens
  misc_RNA (1)...(19): siRNA sense strand
gaggaggaagugcccaguu

SEQ ID NO: 844858 - RNA, 19 nt, Homo sapiens
  misc_RNA (1)...(19): siRNA sense strand
acaaagcaguuccaauucc

SEQ ID NO: 844859 - RNA, 19 nt, Homo sapiens
  misc_RNA (1)...(19): siRNA sense strand
ccaccgaggcccaagaaag

SEQ ID NO: 844860 - RNA, 19 nt, Homo sapiens
  misc_RNA (1)...(19): siRNA sense strand
gaugucauggguucaagug

SEQ ID NO: 844861 - RNA, 19 nt, Homo sapiens
  misc_RNA (1)...(19): siRNA sense strand
ugccauggcugagaagcaa

SEQ ID NO: 844862 - RNA, 19 nt, Homo sapiens
  misc_RNA (1)...(19): siRNA sense strand
gagaugucauggguucaag

SEQ ID NO: 844863 - RNA, 19 nt, Homo sapiens
  misc_RNA (1)...(19): siRNA sense strand
agaagcgccagaaguuaaa

SEQ ID NO: 844864 - RNA, 19 nt, Homo sapiens
  misc_RNA (1)...(19): siRNA sense strand
aauaucagcgacaggacua

SEQ ID NO: 844865 - RNA, 19 nt, Homo sapiens
  misc_RNA (1)...(19): siRNA sense strand
uggcaaagaagaugaaacu

SEQ ID NO: 844866 - RNA, 19 nt, Homo sapiens
  misc_RNA (1)...(19): siRNA sense strand
cagaaaagacuggaaaaga

SEQ ID NO: 844867 - RNA, 19 nt, Homo sapiens
  misc_RNA (1)...(19): siRNA sense strand
caguuccaauuccagagaa

SEQ ID NO: 844868 - RNA, 19 nt, Homo sapiens
  misc_RNA (1)...(19): siRNA sense strand
acagaagaaacaagaagga

SEQ ID NO: 844869 - RNA, 19 nt, Homo sapiens
  misc_RNA (1)...(19): siRNA sense strand
cggaagaagcgccagaagu

SEQ ID NO: 844870 - RNA, 19 nt, Homo sapiens
  misc_RNA (1)...(19): siRNA sense strand
cagaggaggaggaggaagu

SEQ ID NO: 844871 - RNA, 19 nt, Homo sapiens
  misc_RNA (1)...(19): siRNA sense strand
gcgacaggacuacauggau

SEQ ID NO: 844872 - RNA, 19 nt, Homo sapiens
  misc_RNA (1)...(19): siRNA sense strand
aagaugaaacuugaacaga

SEQ ID NO: 844873 - RNA, 19 nt, Homo sapiens
  misc_RNA (1)...(19): siRNA sense strand
caugaagaacccggacaaa

SEQ ID NO: 844874 - RNA, 19 nt, Homo sapiens
  misc_RNA (1)...(19): siRNA sense strand
gccagaaguuaaaagagaa

SEQ ID NO: 844875 - RNA, 19 nt, Homo sapiens
  misc_RNA (1)...(19): siRNA sense strand
cgccagaaguuaaaagaga

SEQ ID NO: 844876 - RNA, 19 nt, Homo sapiens
  misc_RNA (1)...(19): siRNA sense strand
ggagagggauuuccaauau

SEQ ID NO: 844877 - RNA, 19 nt, Homo sapiens
  misc_RNA (1)...(19): siRNA sense strand
ggacaucugcuuuauauuu

SEQ ID NO: 844878 - RNA, 19 nt, Homo sapiens
  misc_RNA (1)...(19): siRNA sense strand
caagagaccagauauuaua

SEQ ID NO: 844879 - RNA, 19 nt, Homo sapiens
  misc_RNA (1)...(19): siRNA sense strand
gcagagagauucagaggau

SEQ ID NO: 844880 - RNA, 19 nt, Homo sapiens
  misc_RNA (1)...(19): siRNA sense strand
gauauauccugucaagaaa

SEQ ID NO: 844881 - RNA, 19 nt, Homo sapiens
  misc_RNA (1)...(19): siRNA sense strand
gagaccagauauuauaaga

SEQ ID NO: 844882 - RNA, 19 nt, Homo sapiens
  misc_RNA (1)...(19): siRNA sense strand
aaauucaggucucugcuua

SEQ ID NO: 844883 - RNA, 19 nt, Homo sapiens
  misc_RNA (1)...(19): siRNA sense strand
ggauacaaccaaauucuuu

SEQ ID NO: 844884 - RNA, 19 nt, Homo sapiens
  misc_RNA (1)...(19): siRNA sense strand
caauauggauacaaccaaa

SEQ ID NO: 844885 - RNA, 19 nt, Homo sapiens
  misc_RNA (1)...(19): siRNA sense strand
gcaaagacugcuacacauu

SEQ ID NO: 844886 - RNA, 19 nt, Homo sapiens
  misc_RNA (1)...(19): siRNA sense strand
ccggacaucugcuuuauau

SEQ ID NO: 844887 - RNA, 19 nt, Homo sapiens
  misc_RNA (1)...(19): siRNA sense strand
caacagaaccuagggaaga

SEQ ID NO: 844888 - RNA, 19 nt, Homo sapiens
  misc_RNA (1)...(19): siRNA sense strand
gcaagagaccagauauuau

SEQ ID NO: 844889 - RNA, 19 nt, Homo sapiens
  misc_RNA (1)...(19): siRNA sense strand
gcacaaaacaacccauuua

SEQ ID NO: 844890 - RNA, 19 nt, Homo sapiens
  misc_RNA (1)...(19): siRNA sense strand
ccaaggaucuggaaagcau

SEQ ID NO: 844891 - RNA, 19 nt, Homo sapiens
  misc_RNA (1)...(19): siRNA sense strand
ccaagugccaaguuauuua

SEQ ID NO: 844892 - RNA, 19 nt, Homo sapiens
  misc_RNA (1)...(19): siRNA sense strand
gacaucugcuuuauauuuc

SEQ ID NO: 844893 - RNA, 19 nt, Homo sapiens
  misc_RNA (1)...(19): siRNA sense strand
gaagaugcucggccuuaaa

SEQ ID NO: 844894 - RNA, 19 nt, Homo sapiens
  misc_RNA (1)...(19): siRNA sense strand
agacccaagugccaaguua

SEQ ID NO: 844895 - RNA, 19 nt, Homo sapiens
  misc_RNA (1)...(19): siRNA sense strand
ugauauauccugucaagaa

SEQ ID NO: 844896 - RNA, 19 nt, Homo sapiens
  misc_RNA (1)...(19): siRNA sense strand
gagaaccaguugauauauc

SEQ ID NO: 844897 - RNA, 19 nt, Homo sapiens
  misc_RNA (1)...(19): siRNA sense strand
guugaucccugugacauuu

SEQ ID NO: 844898 - RNA, 19 nt, Homo sapiens
  misc_RNA (1)...(19): siRNA sense strand
caaagacugcuacacauug

SEQ ID NO: 844899 - RNA, 19 nt, Homo sapiens
  misc_RNA (1)...(19): siRNA sense strand
gagagggauuuccaauaug

SEQ ID NO: 844900 - RNA, 19 nt, Homo sapiens
  misc_RNA (1)...(19): siRNA sense strand
aaauccaccucgucagaua

SEQ ID NO: 844901 - RNA, 19 nt, Homo sapiens
  misc_RNA (1)...(19): siRNA sense strand
cagaggauuuauugaagaa

SEQ ID NO: 844902 - RNA, 19 nt, Homo sapiens
  misc_RNA (1)...(19): siRNA sense strand
auaaacagcugguggaucu

SEQ ID NO: 844903 - RNA, 19 nt, Homo sapiens
  misc_RNA (1)...(19): siRNA sense strand
ugcaagagaccagauauua

SEQ ID NO: 844904 - RNA, 19 nt, Homo sapiens
  misc_RNA (1)...(19): siRNA sense strand
gagacugugucguuuauac

SEQ ID NO: 844905 - RNA, 19 nt, Homo sapiens
  misc_RNA (1)...(19): siRNA sense strand
ucagaggauuuauugaaga

SEQ ID NO: 844906 - RNA, 19 nt, Homo sapiens
  misc_RNA (1)...(19): siRNA sense strand
guuauuuacuuucccauca

SEQ ID NO: 844907 - RNA, 19 nt, Homo sapiens
  misc_RNA (1)...(19): siRNA sense strand
gacaagaauauuuggguaa

SEQ ID NO: 844908 - RNA, 19 nt, Homo sapiens
  misc_RNA (1)...(19): siRNA sense strand
gcagauucaugcccaagca

SEQ ID NO: 844909 - RNA, 19 nt, Homo sapiens
  misc_RNA (1)...(19): siRNA sense strand
gcugguggaucuucuucaa

SEQ ID NO: 844910 - RNA, 19 nt, Homo sapiens
  misc_RNA (1)...(19): siRNA sense strand
guuggaagcuguguacugu

SEQ ID NO: 844911 - RNA, 19 nt, Homo sapiens
  misc_RNA (1)...(19): siRNA sense strand
gagauucagaggauuuauu

SEQ ID NO: 844912 - RNA, 19 nt, Homo sapiens
  misc_RNA (1)...(19): siRNA sense strand
gagagauucagaggauuua

SEQ ID NO: 844913 - RNA, 19 nt, Homo sapiens
  misc_RNA (1)...(19): siRNA sense strand
uauauccugucaagaaaug

SEQ ID NO: 844914 - RNA, 19 nt, Homo sapiens
  misc_RNA (1)...(19): siRNA sense strand
agaagaugcucggccuuaa

SEQ ID NO: 844915 - RNA, 19 nt, Homo sapiens
  misc_RNA (1)...(19): siRNA sense strand
ccugguggcugaugugguu

SEQ ID NO: 844916 - RNA, 19 nt, Homo sapiens
  misc_RNA (1)...(19): siRNA sense strand
uggcugaugugguuguauu

SEQ ID NO: 844917 - RNA, 19 nt, Homo sapiens
  misc_RNA (1)...(19): siRNA sense strand
gguuuaucccgaaauauuu

SEQ ID NO: 844918 - RNA, 19 nt, Homo sapiens
  misc_RNA (1)...(19): siRNA sense strand
acaaccaaauucuuucaug

SEQ ID NO: 844919 - RNA, 19 nt, Homo sapiens
  misc_RNA (1)...(19): siRNA sense strand
guuaggagacugugucguu

SEQ ID NO: 844920 - RNA, 19 nt, Homo sapiens
  misc_RNA (1)...(19): siRNA sense strand
agacaggaaucagacuuga

SEQ ID NO: 844921 - RNA, 19 nt, Homo sapiens
  misc_RNA (1)...(19): siRNA sense strand
aaagacugcuacacauugu

SEQ ID NO: 844922 - RNA, 19 nt, Homo sapiens
  misc_RNA (1)...(19): siRNA sense strand
aauucaagcucucaucaug

SEQ ID NO: 844923 - RNA, 19 nt, Homo sapiens
  misc_RNA (1)...(19): siRNA sense strand
acaggaaucagacuugaaa

SEQ ID NO: 844924 - RNA, 19 nt, Homo sapiens
  misc_RNA (1)...(19): siRNA sense strand
acgagaaccaguugauaua

SEQ ID NO: 844925 - RNA, 19 nt, Homo sapiens
  misc_RNA (1)...(19): siRNA sense strand
ccucaucauugaagcauuc

SEQ ID NO: 844926 - RNA, 19 nt, Homo sapiens
  misc_RNA (1)...(19): siRNA sense strand
caacccauuuaaagaagau

SEQ ID NO: 844927 - RNA, 19 nt, Homo sapiens
  misc_RNA (1)...(19): siRNA sense strand
caaaacaacccauuuaaag

SEQ ID NO: 844928 - RNA, 19 nt, Homo sapiens
  misc_RNA (1)...(19): siRNA sense strand
gcccggacaucugcuuuau

SEQ ID NO: 844929 - RNA, 19 nt, Homo sapiens
  misc_RNA (1)...(19): siRNA sense strand
uuuauacccuuccugcaaa

SEQ ID NO: 844930 - RNA, 19 nt, Homo sapiens
  misc_RNA (1)...(19): siRNA sense strand
uuaggagacugugucguuu

SEQ ID NO: 844931 - RNA, 19 nt, Homo sapiens
  misc_RNA (1)...(19): siRNA sense strand
ucacgagaaccaguugaua

SEQ ID NO: 844932 - RNA, 19 nt, Homo sapiens
  misc_RNA (1)...(19): siRNA sense strand
gaaccuagggaagauuugu

SEQ ID NO: 844933 - RNA, 19 nt, Homo sapiens
  misc_RNA (1)...(19): siRNA sense strand
cacauugucuggccucaca

SEQ ID NO: 844934 - RNA, 19 nt, Homo sapiens
  misc_RNA (1)...(19): siRNA sense strand
aagaagaugcucggccuua

SEQ ID NO: 844935 - RNA, 19 nt, Homo sapiens
  misc_RNA (1)...(19): siRNA sense strand
uggaaucauuucucacuuc

SEQ ID NO: 844936 - RNA, 19 nt, Homo sapiens
  misc_RNA (1)...(19): siRNA sense strand
gauacaaccaaauucuuuc

SEQ ID NO: 844937 - RNA, 19 nt, Homo sapiens
  misc_RNA (1)...(19): siRNA sense strand
agagggauuuccaauaugg

SEQ ID NO: 844938 - RNA, 19 nt, Homo sapiens
  misc_RNA (1)...(19): siRNA sense strand
caucauugaagcauucuau

SEQ ID NO: 844939 - RNA, 19 nt, Homo sapiens
  misc_RNA (1)...(19): siRNA sense strand
ucaggucucugcuuacaac

SEQ ID NO: 844940 - RNA, 19 nt, Homo sapiens
  misc_RNA (1)...(19): siRNA sense strand
gaucuggaaagcaucauca

SEQ ID NO: 844941 - RNA, 19 nt, Homo sapiens
  misc_RNA (1)...(19): siRNA sense strand
cacgagaaccaguugauau

SEQ ID NO: 844942 - RNA, 19 nt, Homo sapiens
  misc_RNA (1)...(19): siRNA sense strand
caagaagaguuaggagacu

SEQ ID NO: 844943 - RNA, 19 nt, Homo sapiens
  misc_RNA (1)...(19): siRNA sense strand
agagagauucagaggauuu

SEQ ID NO: 844944 - RNA, 19 nt, Homo sapiens
  misc_RNA (1)...(19): siRNA sense strand
caaguucagugcuuaaccu

SEQ ID NO: 844945 - RNA, 19 nt, Homo sapiens
  misc_RNA (1)...(19): siRNA sense strand
cagaaccuagggaagauuu

SEQ ID NO: 844946 - RNA, 19 nt, Homo sapiens
  misc_RNA (1)...(19): siRNA sense strand
uaggagacugugucguuua

SEQ ID NO: 844947 - RNA, 19 nt, Homo sapiens
  misc_RNA (1)...(19): siRNA sense strand
caguugauauauccuguca

SEQ ID NO: 844948 - RNA, 19 nt, Homo sapiens
  misc_RNA (1)...(19): siRNA sense strand
aaucauuucucacuuccau

SEQ ID NO: 844949 - RNA, 19 nt, Homo sapiens
  misc_RNA (1)...(19): siRNA sense strand
uuugguuuaucccgaaaua

SEQ ID NO: 844950 - RNA, 19 nt, Homo sapiens
  misc_RNA (1)...(19): siRNA sense strand
ggccugaccuugggaaacu

SEQ ID NO: 844951 - RNA, 19 nt, Homo sapiens
  misc_RNA (1)...(19): siRNA sense strand
ucucagaccauucccauca

SEQ ID NO: 844952 - RNA, 19 nt, Homo sapiens
  misc_RNA (1)...(19): siRNA sense strand
gauuugguuuaucccgaaa

SEQ ID NO: 844953 - RNA, 19 nt, Homo sapiens
  misc_RNA (1)...(19): siRNA sense strand
guuuauacccuuccugcaa

SEQ ID NO: 844954 - RNA, 19 nt, Homo sapiens
  misc_RNA (1)...(19): siRNA sense strand
gauacugcacgacaagaau

SEQ ID NO: 844955 - RNA, 19 nt, Homo sapiens
  misc_RNA (1)...(19): siRNA sense strand
cgagaaccaguugauauau

SEQ ID NO: 844956 - RNA, 19 nt, Homo sapiens
  misc_RNA (1)...(19): siRNA sense strand
cauugaagcauucuaugga

SEQ ID NO: 844957 - RNA, 19 nt, Homo sapiens
  misc_RNA (1)...(19): siRNA sense strand
guuacccacuuuguccuaa

SEQ ID NO: 844958 - RNA, 19 nt, Homo sapiens
  misc_RNA (1)...(19): siRNA sense strand
aggagacugugucguuuau

SEQ ID NO: 844959 - RNA, 19 nt, Homo sapiens
  misc_RNA (1)...(19): siRNA sense strand
gcauuacaggacccucuuu

SEQ ID NO: 844960 - RNA, 19 nt, Homo sapiens
  misc_RNA (1)...(19): siRNA sense strand
uaaauucaggucucugcuu

SEQ ID NO: 844961 - RNA, 19 nt, Homo sapiens
  misc_RNA (1)...(19): siRNA sense strand
ugguuuaucccgaaauauu

SEQ ID NO: 844962 - RNA, 19 nt, Homo sapiens
  misc_RNA (1)...(19): siRNA sense strand
auacugcacgacaagaaua

SEQ ID NO: 844963 - RNA, 19 nt, Homo sapiens
  misc_RNA (1)...(19): siRNA sense strand
agauucagaggauuuauug

SEQ ID NO: 844964 - RNA, 19 nt, Homo sapiens
  misc_RNA (1)...(19): siRNA sense strand
uacccuuccugcaaagaaa

SEQ ID NO: 844965 - RNA, 19 nt, Homo sapiens
  misc_RNA (1)...(19): siRNA sense strand
gauaauucaagcucucauc

SEQ ID NO: 844966 - RNA, 19 nt, Homo sapiens
  misc_RNA (1)...(19): siRNA sense strand
gcggugcgguucuguccau

SEQ ID NO: 844967 - RNA, 19 nt, Homo sapiens
  misc_RNA (1)...(19): siRNA sense strand
gaaauggcggugcgguucu

SEQ ID NO: 844968 - RNA, 19 nt, Homo sapiens
  misc_RNA (1)...(19): siRNA sense strand
ggacccucuuugcaaguuc

SEQ ID NO: 844969 - RNA, 19 nt, Homo sapiens
  misc_RNA (1)...(19): siRNA sense strand
uaagacaggaaucagacuu

SEQ ID NO: 844970 - RNA, 19 nt, Homo sapiens
  misc_RNA (1)...(19): siRNA sense strand
ggagacugugucguuuaua

SEQ ID NO: 844971 - RNA, 19 nt, Homo sapiens
  misc_RNA (1)...(19): siRNA sense strand
gcacgacaagaauauuugg

SEQ ID NO: 844972 - RNA, 19 nt, Homo sapiens
  misc_RNA (1)...(19): siRNA sense strand
aggagagggauuuccaaua

SEQ ID NO: 844973 - RNA, 19 nt, Homo sapiens
  misc_RNA (1)...(19): siRNA sense strand
gacaggaaucagacuugaa

SEQ ID NO: 844974 - RNA, 19 nt, Homo sapiens
  misc_RNA (1)...(19): siRNA sense strand
cauuaagacaggaaucaga

SEQ ID NO: 844975 - RNA, 19 nt, Homo sapiens
  misc_RNA (1)...(19): siRNA sense strand
cagagagauucagaggauu

SEQ ID NO: 844976 - RNA, 19 nt, Homo sapiens
  misc_RNA (1)...(19): siRNA sense strand
gaaggaggccucacuacuu

SEQ ID NO: 844977 - RNA, 19 nt, Homo sapiens
  misc_RNA (1)...(19): siRNA sense strand
uggaagagcugauuguacu

SEQ ID NO: 844978 - RNA, 19 nt, Homo sapiens
  misc_RNA (1)...(19): siRNA sense strand
uagcgauccuccuguuuau

SEQ ID NO: 844979 - RNA, 19 nt, Homo sapiens
  misc_RNA (1)...(19): siRNA sense strand
ggagaaagccgaccccuau

SEQ ID NO: 844980 - RNA, 19 nt, Homo sapiens
  misc_RNA (1)...(19): siRNA sense strand
ucaaugaccacggcgauuu

SEQ ID NO: 844981 - RNA, 19 nt, Homo sapiens
  misc_RNA (1)...(19): siRNA sense strand
aaggaggccucacuacuuc

SEQ ID NO: 844982 - RNA, 19 nt, Homo sapiens
  misc_RNA (1)...(19): siRNA sense strand
gcgauccuccuguuuauuc

SEQ ID NO: 844983 - RNA, 19 nt, Homo sapiens
  misc_RNA (1)...(19): siRNA sense strand
ugauagcgauccuccuguu

SEQ ID NO: 844984 - RNA, 19 nt, Homo sapiens
  misc_RNA (1)...(19): siRNA sense strand
ccacggcgauuucguaacg

SEQ ID NO: 844985 - RNA, 19 nt, Homo sapiens
  misc_RNA (1)...(19): siRNA sense strand
ggaaggaggccucacuacu

SEQ ID NO: 844986 - RNA, 19 nt, Homo sapiens
  misc_RNA (1)...(19): siRNA sense strand
ugaccacggcgauuucgua

SEQ ID NO: 844987 - RNA, 19 nt, Homo sapiens
  misc_RNA (1)...(19): siRNA sense strand
gguccaccuuugccuauuc

SEQ ID NO: 844988 - RNA, 19 nt, Homo sapiens
  misc_RNA (1)...(19): siRNA sense strand
gaccacggcgauuucguaa

SEQ ID NO: 844989 - RNA, 19 nt, Homo sapiens
  misc_RNA (1)...(19): siRNA sense strand
gauagcgauccuccuguuu

SEQ ID NO: 844990 - RNA, 19 nt, Homo sapiens
  misc_RNA (1)...(19): siRNA sense strand
auagcgauccuccuguuua

SEQ ID NO: 844991 - RNA, 19 nt, Homo sapiens
  misc_RNA (1)...(19): siRNA sense strand
ugucucgccuccuggauga

SEQ ID NO: 844992 - RNA, 19 nt, Homo sapiens
  misc_RNA (1)...(19): siRNA sense strand
acaccuggccgcaagauau

SEQ ID NO: 844993 - RNA, 19 nt, Homo sapiens
  misc_RNA (1)...(19): siRNA sense strand
gcuggaagagcugauugua

SEQ ID NO: 844994 - RNA, 19 nt, Homo sapiens
  misc_RNA (1)...(19): siRNA sense strand
gcagcucaccagcaaguuc

SEQ ID NO: 844995 - RNA, 19 nt, Homo sapiens
  misc_RNA (1)...(19): siRNA sense strand
gaaaacugcggacucaaug

SEQ ID NO: 844996 - RNA, 19 nt, Homo sapiens
  misc_RNA (1)...(19): siRNA sense strand
ggaaaacugcggacucaau

SEQ ID NO: 844997 - RNA, 19 nt, Homo sapiens
  misc_RNA (1)...(19): siRNA sense strand
gcgcagcucaccagcaagu

SEQ ID NO: 844998 - RNA, 19 nt, Homo sapiens
  misc_RNA (1)...(19): siRNA sense strand
caaugaccacggcgauuuc

SEQ ID NO: 844999 - RNA, 19 nt, Homo sapiens
  misc_RNA (1)...(19): siRNA sense strand
ggaacccagacaacaagug

SEQ ID NO: 845000 - RNA, 19 nt, Homo sapiens
  misc_RNA (1)...(19): siRNA sense strand
gggcucugauugagauggu

SEQ ID NO: 845001 - RNA, 19 nt, Homo sapiens
  misc_RNA (1)...(19): siRNA sense strand
gacaccuggccgcaagaua

SEQ ID NO: 845002 - RNA, 19 nt, Homo sapiens
  misc_RNA (1)...(19): siRNA sense strand
gaaacgagcuggauuuguu

SEQ ID NO: 845003 - RNA, 19 nt, Homo sapiens
  misc_RNA (1)...(19): siRNA sense strand
ggaccucucugaauacaua

SEQ ID NO: 845004 - RNA, 19 nt, Homo sapiens
  misc_RNA (1)...(19): siRNA sense strand
gcauggaccucucugaaua

SEQ ID NO: 845005 - RNA, 19 nt, Homo sapiens
  misc_RNA (1)...(19): siRNA sense strand
ggccaaagcugucuugaaa

SEQ ID NO: 845006 - RNA, 19 nt, Homo sapiens
  misc_RNA (1)...(19): siRNA sense strand
ccaaagcugucuugaaauu

SEQ ID NO: 845007 - RNA, 19 nt, Homo sapiens
  misc_RNA (1)...(19): siRNA sense strand
ugaagacgcucacugauga

SEQ ID NO: 845008 - RNA, 19 nt, Homo sapiens
  misc_RNA (1)...(19): siRNA sense strand
ggaauaugguggacuauca

SEQ ID NO: 845009 - RNA, 19 nt, Homo sapiens
  misc_RNA (1)...(19): siRNA sense strand
ggauuggccugcagcauaa

SEQ ID NO: 845010 - RNA, 19 nt, Homo sapiens
  misc_RNA (1)...(19): siRNA sense strand
gaacacaggcagacuauuc

SEQ ID NO: 845011 - RNA, 19 nt, Homo sapiens
  misc_RNA (1)...(19): siRNA sense strand
gcaaaguugugaagcuauu

SEQ ID NO: 845012 - RNA, 19 nt, Homo sapiens
  misc_RNA (1)...(19): siRNA sense strand
caaaggaauuucaggagaa

SEQ ID NO: 845013 - RNA, 19 nt, Homo sapiens
  misc_RNA (1)...(19): siRNA sense strand
gaaaagacccugaggagua

SEQ ID NO: 845014 - RNA, 19 nt, Homo sapiens
  misc_RNA (1)...(19): siRNA sense strand
gaucagagugaauguauuu

SEQ ID NO: 845015 - RNA, 19 nt, Homo sapiens
  misc_RNA (1)...(19): siRNA sense strand
gugggaagauuuaaugaaa

SEQ ID NO: 845016 - RNA, 19 nt, Homo sapiens
  misc_RNA (1)...(19): siRNA sense strand
uaagaagugucucgucauu

SEQ ID NO: 845017 - RNA, 19 nt, Homo sapiens
  misc_RNA (1)...(19): siRNA sense strand
gguaauacuucaucacaug

SEQ ID NO: 845018 - RNA, 19 nt, Homo sapiens
  misc_RNA (1)...(19): siRNA sense strand
ccacaaggccucugaaguu

SEQ ID NO: 845019 - RNA, 19 nt, Homo sapiens
  misc_RNA (1)...(19): siRNA sense strand
caagaacucucccaaugau

SEQ ID NO: 845020 - RNA, 19 nt, Homo sapiens
  misc_RNA (1)...(19): siRNA sense strand
gcaagaaguugaagaacag

SEQ ID NO: 845021 - RNA, 19 nt, Homo sapiens
  misc_RNA (1)...(19): siRNA sense strand
guuccaagauccagacuuu

SEQ ID NO: 845022 - RNA, 19 nt, Homo sapiens
  misc_RNA (1)...(19): siRNA sense strand
ugaagcggcuggagaugua

SEQ ID NO: 845023 - RNA, 19 nt, Homo sapiens
  misc_RNA (1)...(19): siRNA sense strand
gaaguuagaggccaaacaa

SEQ ID NO: 845024 - RNA, 19 nt, Homo sapiens
  misc_RNA (1)...(19): siRNA sense strand
agaagugucucgucauuga

SEQ ID NO: 845025 - RNA, 19 nt, Homo sapiens
  misc_RNA (1)...(19): siRNA sense strand
aggaacaucuggauuauga

SEQ ID NO: 845026 - RNA, 19 nt, Homo sapiens
  misc_RNA (1)...(19): siRNA sense strand
gaauggaacacugaacaua

SEQ ID NO: 845027 - RNA, 19 nt, Homo sapiens
  misc_RNA (1)...(19): siRNA sense strand
gggccaggcugaacuaguu

SEQ ID NO: 845028 - RNA, 19 nt, Homo sapiens
  misc_RNA (1)...(19): siRNA sense strand
ugaacucacucaagcaauu

SEQ ID NO: 845029 - RNA, 19 nt, Homo sapiens
  misc_RNA (1)...(19): siRNA sense strand
ggccaucucucgcaucuau

SEQ ID NO: 845030 - RNA, 19 nt, Homo sapiens
  misc_RNA (1)...(19): siRNA sense strand
caacaucacucggauaguc

SEQ ID NO: 845031 - RNA, 19 nt, Homo sapiens
  misc_RNA (1)...(19): siRNA sense strand
gcaccacugcugagaauaa

SEQ ID NO: 845032 - RNA, 19 nt, Homo sapiens
  misc_RNA (1)...(19): siRNA sense strand
uacaagaacucucccaaug

SEQ ID NO: 845033 - RNA, 19 nt, Homo sapiens
  misc_RNA (1)...(19): siRNA sense strand
cagaagugcuugcuguuau

SEQ ID NO: 845034 - RNA, 19 nt, Homo sapiens
  misc_RNA (1)...(19): siRNA sense strand
ucagugcugugguguuaua

SEQ ID NO: 845035 - RNA, 19 nt, Homo sapiens
  misc_RNA (1)...(19): siRNA sense strand
ggaaugaaguuuugaacaa

SEQ ID NO: 845036 - RNA, 19 nt, Homo sapiens
  misc_RNA (1)...(19): siRNA sense strand
uaacaaagcagugaucaga

SEQ ID NO: 845037 - RNA, 19 nt, Homo sapiens
  misc_RNA (1)...(19): siRNA sense strand
gggauuggccugcagcaua

SEQ ID NO: 845038 - RNA, 19 nt, Homo sapiens
  misc_RNA (1)...(19): siRNA sense strand
gcugugguguuauaagaaa

SEQ ID NO: 845039 - RNA, 19 nt, Homo sapiens
  misc_RNA (1)...(19): siRNA sense strand
aaacagagcaagaaguuga

SEQ ID NO: 845040 - RNA, 19 nt, Homo sapiens
  misc_RNA (1)...(19): siRNA sense strand
ggcagacuauucaguauau

SEQ ID NO: 845041 - RNA, 19 nt, Homo sapiens
  misc_RNA (1)...(19): siRNA sense strand
ggccaggacuguagaaaca

SEQ ID NO: 845042 - RNA, 19 nt, Homo sapiens
  misc_RNA (1)...(19): siRNA sense strand
cgaaggauguggucaugga

SEQ ID NO: 845043 - RNA, 19 nt, Homo sapiens
  misc_RNA (1)...(19): siRNA sense strand
gaacaucuggauuaugaga

SEQ ID NO: 845044 - RNA, 19 nt, Homo sapiens
  misc_RNA (1)...(19): siRNA sense strand
gauuugaugcucugcaaua

SEQ ID NO: 845045 - RNA, 19 nt, Homo sapiens
  misc_RNA (1)...(19): siRNA sense strand
uaaccuccauacucuguuu

SEQ ID NO: 845046 - RNA, 19 nt, Homo sapiens
  misc_RNA (1)...(19): siRNA sense strand
ggaagggucguucgcauug

SEQ ID NO: 845047 - RNA, 19 nt, Homo sapiens
  misc_RNA (1)...(19): siRNA sense strand
guauauacauccugcagau

SEQ ID NO: 845048 - RNA, 19 nt, Homo sapiens
  misc_RNA (1)...(19): siRNA sense strand
ucagucggcucuucucuug

SEQ ID NO: 845049 - RNA, 19 nt, Homo sapiens
  misc_RNA (1)...(19): siRNA sense strand
gaacagagagacaaagaac

SEQ ID NO: 845050 - RNA, 19 nt, Homo sapiens
  misc_RNA (1)...(19): siRNA sense strand
ccaaacagagcaagaaguu

SEQ ID NO: 845051 - RNA, 19 nt, Homo sapiens
  misc_RNA (1)...(19): siRNA sense strand
ugugaacuguacuauguua

SEQ ID NO: 845052 - RNA, 19 nt, Homo sapiens
  misc_RNA (1)...(19): siRNA sense strand
gaugaagaguggaaugaag

SEQ ID NO: 845053 - RNA, 19 nt, Homo sapiens
  misc_RNA (1)...(19): siRNA sense strand
cacaaggccucugaaguuu

SEQ ID NO: 845054 - RNA, 19 nt, Homo sapiens
  misc_RNA (1)...(19): siRNA sense strand
cuucagugcugugguguua

SEQ ID NO: 845055 - RNA, 19 nt, Homo sapiens
  misc_RNA (1)...(19): siRNA sense strand
ccacaaacauucgcuacug

SEQ ID NO: 845056 - RNA, 19 nt, Homo sapiens
  misc_RNA (1)...(19): siRNA sense strand
ggcaauaccuucggcaugu

SEQ ID NO: 845057 - RNA, 19 nt, Homo sapiens
  misc_RNA (1)...(19): siRNA sense strand
ggaccugccuccuuuacuc

SEQ ID NO: 845058 - RNA, 19 nt, Homo sapiens
  misc_RNA (1)...(19): siRNA sense strand
cuacguggcuucucacuac

SEQ ID NO: 845059 - RNA, 19 nt, Homo sapiens
  misc_RNA (1)...(19): siRNA sense strand
gauguggugggaagauuua

SEQ ID NO: 845060 - RNA, 19 nt, Homo sapiens
  misc_RNA (1)...(19): siRNA sense strand
gcagacuauucaguauaua

SEQ ID NO: 845061 - RNA, 19 nt, Homo sapiens
  misc_RNA (1)...(19): siRNA sense strand
caucacauguuauccaaag

SEQ ID NO: 845062 - RNA, 19 nt, Homo sapiens
  misc_RNA (1)...(19): siRNA sense strand
gagcauggaccucucugaa

SEQ ID NO: 845063 - RNA, 19 nt, Homo sapiens
  misc_RNA (1)...(19): siRNA sense strand
cacaagauccugggcaaua

SEQ ID NO: 845064 - RNA, 19 nt, Homo sapiens
  misc_RNA (1)...(19): siRNA sense strand
gugaagcuauuuaaugaag

SEQ ID NO: 845065 - RNA, 19 nt, Homo sapiens
  misc_RNA (1)...(19): siRNA sense strand
gagauacccucuuuugcua

SEQ ID NO: 845066 - RNA, 19 nt, Homo sapiens
  misc_RNA (1)...(19): siRNA sense strand
cuugugaacuguacuaugu

SEQ ID NO: 845067 - RNA, 19 nt, Homo sapiens
  misc_RNA (1)...(19): siRNA sense strand
guggagaaguggcugaaug

SEQ ID NO: 845068 - RNA, 19 nt, Homo sapiens
  misc_RNA (1)...(19): siRNA sense strand
gaacuaguugugauugaug

SEQ ID NO: 845069 - RNA, 19 nt, Homo sapiens
  misc_RNA (1)...(19): siRNA sense strand
gugcugugguguuauaaga

SEQ ID NO: 845070 - RNA, 19 nt, Homo sapiens
  misc_RNA (1)...(19): siRNA sense strand
gggaagauuuaaugaaagg

SEQ ID NO: 845071 - RNA, 19 nt, Homo sapiens
  misc_RNA (1)...(19): siRNA sense strand
gcagccuucuggaaagauu

SEQ ID NO: 845072 - RNA, 19 nt, Homo sapiens
  misc_RNA (1)...(19): siRNA sense strand
guacuccaauaucuuuguu

SEQ ID NO: 845073 - RNA, 19 nt, Homo sapiens
  misc_RNA (1)...(19): siRNA sense strand
uccauacucuguuugaauu

SEQ ID NO: 845074 - RNA, 19 nt, Homo sapiens
  misc_RNA (1)...(19): siRNA sense strand
aaacaagaacccaaacaga

SEQ ID NO: 845075 - RNA, 19 nt, Homo sapiens
  misc_RNA (1)...(19): siRNA sense strand
ccagaagugcuugcuguua

SEQ ID NO: 845076 - RNA, 19 nt, Homo sapiens
  misc_RNA (1)...(19): siRNA sense strand
gggaugcaguggagaagug

SEQ ID NO: 845077 - RNA, 19 nt, Homo sapiens
  misc_RNA (1)...(19): siRNA sense strand
gaauuuaacaaagcaguga

SEQ ID NO: 845078 - RNA, 19 nt, Homo sapiens
  misc_RNA (1)...(19): siRNA sense strand
cauagcagccacaaacauu

SEQ ID NO: 845079 - RNA, 19 nt, Homo sapiens
  misc_RNA (1)...(19): siRNA sense strand
ccgcaaaguugugaagcua

SEQ ID NO: 845080 - RNA, 19 nt, Homo sapiens
  misc_RNA (1)...(19): siRNA sense strand
agccuuaacuccaaacuug

SEQ ID NO: 845081 - RNA, 19 nt, Homo sapiens
  misc_RNA (1)...(19): siRNA sense strand
caacgagacccacaagauc

SEQ ID NO: 845082 - RNA, 19 nt, Homo sapiens
  misc_RNA (1)...(19): siRNA sense strand
ugcgacagcugcagaagaa

SEQ ID NO: 845083 - RNA, 19 nt, Homo sapiens
  misc_RNA (1)...(19): siRNA sense strand
gccugaagcuugugaacug

SEQ ID NO: 845084 - RNA, 19 nt, Homo sapiens
  misc_RNA (1)...(19): siRNA sense strand
gaaaagaucaggugguaau

SEQ ID NO: 845085 - RNA, 19 nt, Homo sapiens
  misc_RNA (1)...(19): siRNA sense strand
gagaacacaggcagacuau

SEQ ID NO: 845086 - RNA, 19 nt, Homo sapiens
  misc_RNA (1)...(19): siRNA sense strand
ucaggaacaucuggauuau

SEQ ID NO: 845087 - RNA, 19 nt, Homo sapiens
  misc_RNA (1)...(19): siRNA sense strand
gaucaggugguaauacuuc

SEQ ID NO: 845088 - RNA, 19 nt, Homo sapiens
  misc_RNA (1)...(19): siRNA sense strand
ggaagguggugggcuagug

SEQ ID NO: 845089 - RNA, 19 nt, Homo sapiens
  misc_RNA (1)...(19): siRNA sense strand
gaacacugaacauaaagca

SEQ ID NO: 845090 - RNA, 19 nt, Homo sapiens
  misc_RNA (1)...(19): siRNA sense strand
aaacugaagcggaagaaau

SEQ ID NO: 845091 - RNA, 19 nt, Homo sapiens
  misc_RNA (1)...(19): siRNA sense strand
uagggaagcugaagagcau

SEQ ID NO: 845092 - RNA, 19 nt, Homo sapiens
  misc_RNA (1)...(19): siRNA sense strand
gaauguauuucgagaacac

SEQ ID NO: 845093 - RNA, 19 nt, Homo sapiens
  misc_RNA (1)...(19): siRNA sense strand
acaaagcagugaucagagu

SEQ ID NO: 845094 - RNA, 19 nt, Homo sapiens
  misc_RNA (1)...(19): siRNA sense strand
ggacugcuguaagacucua

SEQ ID NO: 845095 - RNA, 19 nt, Homo sapiens
  misc_RNA (1)...(19): siRNA sense strand
ugugugugcugcaggauuu

SEQ ID NO: 845096 - RNA, 19 nt, Homo sapiens
  misc_RNA (1)...(19): siRNA sense strand
ccagaaugcccuuccagaa

SEQ ID NO: 845097 - RNA, 19 nt, Homo sapiens
  misc_RNA (1)...(19): siRNA sense strand
guuagaggccaaacaagaa

SEQ ID NO: 845098 - RNA, 19 nt, Homo sapiens
  misc_RNA (1)...(19): siRNA sense strand
gaagaguggaaugaaguuu

SEQ ID NO: 845099 - RNA, 19 nt, Homo sapiens
  misc_RNA (1)...(19): siRNA sense strand
gaaguagggaagcugaaga

SEQ ID NO: 845100 - RNA, 19 nt, Homo sapiens
  misc_RNA (1)...(19): siRNA sense strand
cgaugaagacccucaguga

SEQ ID NO: 845101 - RNA, 19 nt, Homo sapiens
  misc_RNA (1)...(19): siRNA sense strand
gaaauucacaccguaagca

SEQ ID NO: 845102 - RNA, 19 nt, Homo sapiens
  misc_RNA (1)...(19): siRNA sense strand
ggaaggcuuuggaaauuua

SEQ ID NO: 845103 - RNA, 19 nt, Homo sapiens
  misc_RNA (1)...(19): siRNA sense strand
gaaaccaaguuauugcuau

SEQ ID NO: 845104 - RNA, 19 nt, Homo sapiens
  misc_RNA (1)...(19): siRNA sense strand
caaugaagauggugccaaa

SEQ ID NO: 845105 - RNA, 19 nt, Homo sapiens
  misc_RNA (1)...(19): siRNA sense strand
cgacaguccuuuguguuua

SEQ ID NO: 845106 - RNA, 19 nt, Homo sapiens
  misc_RNA (1)...(19): siRNA sense strand
caguagaguucaccacuuu

SEQ ID NO: 845107 - RNA, 19 nt, Homo sapiens
  misc_RNA (1)...(19): siRNA sense strand
agaaugcacuuccggguuu

SEQ ID NO: 845108 - RNA, 19 nt, Homo sapiens
  misc_RNA (1)...(19): siRNA sense strand
ugaaaugccugaacacaag

SEQ ID NO: 845109 - RNA, 19 nt, Homo sapiens
  misc_RNA (1)...(19): siRNA sense strand
gcaguagaguucaccacuu

SEQ ID NO: 845110 - RNA, 19 nt, Homo sapiens
  misc_RNA (1)...(19): siRNA sense strand
ggaaauuuaucagcaucaa

SEQ ID NO: 845111 - RNA, 19 nt, Homo sapiens
  misc_RNA (1)...(19): siRNA sense strand
ccacuuuggcggacuauuu

SEQ ID NO: 845112 - RNA, 19 nt, Homo sapiens
  misc_RNA (1)...(19): siRNA sense strand
caaaacugcuuucuccuuu

SEQ ID NO: 845113 - RNA, 19 nt, Homo sapiens
  misc_RNA (1)...(19): siRNA sense strand
ucggaaggcuuuggaaauu

SEQ ID NO: 845114 - RNA, 19 nt, Homo sapiens
  misc_RNA (1)...(19): siRNA sense strand
ggaaaccaaguuauugcua

SEQ ID NO: 845115 - RNA, 19 nt, Homo sapiens
  misc_RNA (1)...(19): siRNA sense strand
gacaguccuuuguguuuau

SEQ ID NO: 845116 - RNA, 19 nt, Homo sapiens
  misc_RNA (1)...(19): siRNA sense strand
gcgcugggcugagguuaug

SEQ ID NO: 845117 - RNA, 19 nt, Homo sapiens
  misc_RNA (1)...(19): siRNA sense strand
gcaccuuccuggcaguaga

SEQ ID NO: 845118 - RNA, 19 nt, Homo sapiens
  misc_RNA (1)...(19): siRNA sense strand
ggugguggcuaauauccuu

SEQ ID NO: 845119 - RNA, 19 nt, Homo sapiens
  misc_RNA (1)...(19): siRNA sense strand
gcagauaacaaugaagaug

SEQ ID NO: 845120 - RNA, 19 nt, Homo sapiens
  misc_RNA (1)...(19): siRNA sense strand
ucacgacaguccuuugugu

SEQ ID NO: 845121 - RNA, 19 nt, Homo sapiens
  misc_RNA (1)...(19): siRNA sense strand
ccacugcagauaacaauga

SEQ ID NO: 845122 - RNA, 19 nt, Homo sapiens
  misc_RNA (1)...(19): siRNA sense strand
cggaaggcuuuggaaauuu

SEQ ID NO: 845123 - RNA, 19 nt, Homo sapiens
  misc_RNA (1)...(19): siRNA sense strand
gcucccaaagcauuuauaa

SEQ ID NO: 845124 - RNA, 19 nt, Homo sapiens
  misc_RNA (1)...(19): siRNA sense strand
ccuuuaaguuggagacuga

SEQ ID NO: 845125 - RNA, 19 nt, Homo sapiens
  misc_RNA (1)...(19): siRNA sense strand
ugugucagauuucuauguu

SEQ ID NO: 845126 - RNA, 19 nt, Homo sapiens
  misc_RNA (1)...(19): siRNA sense strand
ccaaagacucggaaaccaa

SEQ ID NO: 845127 - RNA, 19 nt, Homo sapiens
  misc_RNA (1)...(19): siRNA sense strand
gaacacaagauccagucau

SEQ ID NO: 845128 - RNA, 19 nt, Homo sapiens
  misc_RNA (1)...(19): siRNA sense strand
caaguggugguggcuaaua

SEQ ID NO: 845129 - RNA, 19 nt, Homo sapiens
  misc_RNA (1)...(19): siRNA sense strand
cugcggcugugucagauuu

SEQ ID NO: 845130 - RNA, 19 nt, Homo sapiens
  misc_RNA (1)...(19): siRNA sense strand
gaaaugccugaacacaaga

SEQ ID NO: 845131 - RNA, 19 nt, Homo sapiens
  misc_RNA (1)...(19): siRNA sense strand
ucucugaaaugccugaaca

SEQ ID NO: 845132 - RNA, 19 nt, Homo sapiens
  misc_RNA (1)...(19): siRNA sense strand
aaaccaaguuauugcuauc

SEQ ID NO: 845133 - RNA, 19 nt, Homo sapiens
  misc_RNA (1)...(19): siRNA sense strand
aaacugcuuucuccuuugg

SEQ ID NO: 845134 - RNA, 19 nt, Homo sapiens
  misc_RNA (1)...(19): siRNA sense strand
gcucggaaggcuuuggaaa

SEQ ID NO: 845135 - RNA, 19 nt, Homo sapiens
  misc_RNA (1)...(19): siRNA sense strand
ggacuauuugcaucuguug

SEQ ID NO: 845136 - RNA, 19 nt, Homo sapiens
  misc_RNA (1)...(19): siRNA sense strand
ucaccacuuuggcggacua

SEQ ID NO: 845137 - RNA, 19 nt, Homo sapiens
  misc_RNA (1)...(19): siRNA sense strand
ccaaguuauugcuaucaag

SEQ ID NO: 845138 - RNA, 19 nt, Homo sapiens
  misc_RNA (1)...(19): siRNA sense strand
agacucggaaaccaaguua

SEQ ID NO: 845139 - RNA, 19 nt, Homo sapiens
  misc_RNA (1)...(19): siRNA sense strand
uuauugcuaucaaggaaga

SEQ ID NO: 845140 - RNA, 19 nt, Homo sapiens
  misc_RNA (1)...(19): siRNA sense strand
aacacaagauccagucauc

SEQ ID NO: 845141 - RNA, 19 nt, Homo sapiens
  misc_RNA (1)...(19): siRNA sense strand
gaaauuuaucagcaucaag

SEQ ID NO: 845142 - RNA, 19 nt, Homo sapiens
  misc_RNA (1)...(19): siRNA sense strand
acucggaaaccaaguuauu

SEQ ID NO: 845143 - RNA, 19 nt, Homo sapiens
  misc_RNA (1)...(19): siRNA sense strand
cggacuauuugcaucuguu

SEQ ID NO: 845144 - RNA, 19 nt, Homo sapiens
  misc_RNA (1)...(19): siRNA sense strand
agauaacaaugaagauggu

SEQ ID NO: 845145 - RNA, 19 nt, Homo sapiens
  misc_RNA (1)...(19): siRNA sense strand
cugcagauaacaaugaaga

SEQ ID NO: 845146 - RNA, 19 nt, Homo sapiens
  misc_RNA (1)...(19): siRNA sense strand
aaguggugguggcuaauau

SEQ ID NO: 845147 - RNA, 19 nt, Homo sapiens
  misc_RNA (1)...(19): siRNA sense strand
gaaggcuuuggaaauuuau

SEQ ID NO: 845148 - RNA, 19 nt, Homo sapiens
  misc_RNA (1)...(19): siRNA sense strand
cuauguuccugucucugaa

SEQ ID NO: 845149 - RNA, 19 nt, Homo sapiens
  misc_RNA (1)...(19): siRNA sense strand
aguuauugcuaucaaggaa

SEQ ID NO: 845150 - RNA, 19 nt, Homo sapiens
  misc_RNA (1)...(19): siRNA sense strand
acgacaguccuuuguguuu

SEQ ID NO: 845151 - RNA, 19 nt, Homo sapiens
  misc_RNA (1)...(19): siRNA sense strand
cacugcagauaacaaugaa

SEQ ID NO: 845152 - RNA, 19 nt, Homo sapiens
  misc_RNA (1)...(19): siRNA sense strand
ucuauguuccugucucuga

SEQ ID NO: 845153 - RNA, 19 nt, Homo sapiens
  misc_RNA (1)...(19): siRNA sense strand
gcuuucuccuuugguuaaa

SEQ ID NO: 845154 - RNA, 19 nt, Homo sapiens
  misc_RNA (1)...(19): siRNA sense strand
guagaguucaccacuuugg

SEQ ID NO: 845155 - RNA, 19 nt, Homo sapiens
  misc_RNA (1)...(19): siRNA sense strand
cugaaaugccugaacacaa

SEQ ID NO: 845156 - RNA, 19 nt, Homo sapiens
  misc_RNA (1)...(19): siRNA sense strand
caccaaggucccacuggaa

SEQ ID NO: 845157 - RNA, 19 nt, Homo sapiens
  misc_RNA (1)...(19): siRNA sense strand
gagcucggaaggcuuugga

SEQ ID NO: 845158 - RNA, 19 nt, Homo sapiens
  misc_RNA (1)...(19): siRNA sense strand
gaacauggcagagaaguuu

SEQ ID NO: 845159 - RNA, 19 nt, Homo sapiens
  misc_RNA (1)...(19): siRNA sense strand
ggaagacacugagaacaug

SEQ ID NO: 845160 - RNA, 19 nt, Homo sapiens
  misc_RNA (1)...(19): siRNA sense strand
ugacggagauggugcagaa

SEQ ID NO: 845161 - RNA, 19 nt, Homo sapiens
  misc_RNA (1)...(19): siRNA sense strand
gggccaagauugaggaaga

SEQ ID NO: 845162 - RNA, 19 nt, Homo sapiens
  misc_RNA (1)...(19): siRNA sense strand
cacagaauguucagcuuaa

SEQ ID NO: 845163 - RNA, 19 nt, Homo sapiens
  misc_RNA (1)...(19): siRNA sense strand
acacagaauguucagcuua

SEQ ID NO: 845164 - RNA, 19 nt, Homo sapiens
  misc_RNA (1)...(19): siRNA sense strand
gaagaccaaauuagacaga

SEQ ID NO: 845165 - RNA, 19 nt, Homo sapiens
  misc_RNA (1)...(19): siRNA sense strand
ggagaacuuccucuggauu

SEQ ID NO: 845166 - RNA, 19 nt, Homo sapiens
  misc_RNA (1)...(19): siRNA sense strand
gaggagacacagaauguuc

SEQ ID NO: 845167 - RNA, 19 nt, Homo sapiens
  misc_RNA (1)...(19): siRNA sense strand
gagaacuuccucuggauuc

SEQ ID NO: 845168 - RNA, 19 nt, Homo sapiens
  misc_RNA (1)...(19): siRNA sense strand
cagcuuaacaaagaaauga

SEQ ID NO: 845169 - RNA, 19 nt, Homo sapiens
  misc_RNA (1)...(19): siRNA sense strand
cugagaacauggcagagaa

SEQ ID NO: 845170 - RNA, 19 nt, Homo sapiens
  misc_RNA (1)...(19): siRNA sense strand
gacacagaauguucagcuu

SEQ ID NO: 845171 - RNA, 19 nt, Homo sapiens
  misc_RNA (1)...(19): siRNA sense strand
ccucuggauuccuucauug

SEQ ID NO: 845172 - RNA, 19 nt, Homo sapiens
  misc_RNA (1)...(19): siRNA sense strand
ggaggagacacagaauguu

SEQ ID NO: 845173 - RNA, 19 nt, Homo sapiens
  misc_RNA (1)...(19): siRNA sense strand
cuggauuccuucauugaug

SEQ ID NO: 845174 - RNA, 19 nt, Homo sapiens
  misc_RNA (1)...(19): siRNA sense strand
cggagauggugcagaagau

SEQ ID NO: 845175 - RNA, 19 nt, Homo sapiens
  misc_RNA (1)...(19): siRNA sense strand
ggagauggugcagaagaug

SEQ ID NO: 845176 - RNA, 19 nt, Homo sapiens
  misc_RNA (1)...(19): siRNA sense strand
aaagaagaccaaauuagac

SEQ ID NO: 845177 - RNA, 19 nt, Homo sapiens
  misc_RNA (1)...(19): siRNA sense strand
uuacugcggccaugaguuc

SEQ ID NO: 845178 - RNA, 19 nt, Homo sapiens
  misc_RNA (1)...(19): siRNA sense strand
uaucagagcaaacggaaac

SEQ ID NO: 845179 - RNA, 19 nt, Homo sapiens
  misc_RNA (1)...(19): siRNA sense strand
uggauuccuucauugaugu

SEQ ID NO: 845180 - RNA, 19 nt, Homo sapiens
  misc_RNA (1)...(19): siRNA sense strand
aagaagaccaaauuagaca

SEQ ID NO: 845181 - RNA, 19 nt, Homo sapiens
  misc_RNA (1)...(19): siRNA sense strand
gagacccuguuagcacuuc

SEQ ID NO: 845182 - RNA, 19 nt, Homo sapiens
  misc_RNA (1)...(19): siRNA sense strand
uggaggagacacagaaugu

SEQ ID NO: 845183 - RNA, 19 nt, Homo sapiens
  misc_RNA (1)...(19): siRNA sense strand
gcagaaggggccaagauug

SEQ ID NO: 845184 - RNA, 19 nt, Homo sapiens
  misc_RNA (1)...(19): siRNA sense strand
cagauaaagaagaccaaau

SEQ ID NO: 845185 - RNA, 19 nt, Homo sapiens
  misc_RNA (1)...(19): siRNA sense strand
ccacaugcgacgggugaaa

SEQ ID NO: 845186 - RNA, 19 nt, Homo sapiens
  misc_RNA (1)...(19): siRNA sense strand
agaccaaauuagacagaca

SEQ ID NO: 845187 - RNA, 19 nt, Homo sapiens
  misc_RNA (1)...(19): siRNA sense strand
aggauucucuucgcaguuc

SEQ ID NO: 845188 - RNA, 19 nt, Homo sapiens
  misc_RNA (1)...(19): siRNA sense strand
uggagaacuuccucuggau

SEQ ID NO: 845189 - RNA, 19 nt, Homo sapiens
  misc_RNA (1)...(19): siRNA sense strand
gaggaagacacugagaaca

SEQ ID NO: 845190 - RNA, 19 nt, Homo sapiens
  misc_RNA (1)...(19): siRNA sense strand
gauggaggagacacagaau

SEQ ID NO: 845191 - RNA, 19 nt, Homo sapiens
  misc_RNA (1)...(19): siRNA sense strand
gagccuggcagaaggaaac

SEQ ID NO: 845192 - RNA, 19 nt, Homo sapiens
  misc_RNA (1)...(19): siRNA sense strand
gaacaugccugcagauuca

SEQ ID NO: 845193 - RNA, 19 nt, Homo sapiens
  misc_RNA (1)...(19): siRNA sense strand
gagaaagccugcuguguuu

SEQ ID NO: 845194 - RNA, 19 nt, Homo sapiens
  misc_RNA (1)...(19): siRNA sense strand
ggaaggacaugaagaaaug

SEQ ID NO: 845195 - RNA, 19 nt, Homo sapiens
  misc_RNA (1)...(19): siRNA sense strand
gcacaaggagcaaauauaa

SEQ ID NO: 845196 - RNA, 19 nt, Homo sapiens
  misc_RNA (1)...(19): siRNA sense strand
caaagaaagugcucuaaca

SEQ ID NO: 845197 - RNA, 19 nt, Homo sapiens
  misc_RNA (1)...(19): siRNA sense strand
gaaacacugcgcuaacuua

SEQ ID NO: 845198 - RNA, 19 nt, Homo sapiens
  misc_RNA (1)...(19): siRNA sense strand
guugcagacuuucuuauua

SEQ ID NO: 845199 - RNA, 19 nt, Homo sapiens
  misc_RNA (1)...(19): siRNA sense strand
ugaauuagcacaaguauug

SEQ ID NO: 845200 - RNA, 19 nt, Homo sapiens
  misc_RNA (1)...(19): siRNA sense strand
ggagaaagccugcuguguu

SEQ ID NO: 845201 - RNA, 19 nt, Homo sapiens
  misc_RNA (1)...(19): siRNA sense strand
gaugaaggcagaaguguaa

SEQ ID NO: 845202 - RNA, 19 nt, Homo sapiens
  misc_RNA (1)...(19): siRNA sense strand
ggagguuacuuagauauug

SEQ ID NO: 845203 - RNA, 19 nt, Homo sapiens
  misc_RNA (1)...(19): siRNA sense strand
ggauaugguucgcuuucua

SEQ ID NO: 845204 - RNA, 19 nt, Homo sapiens
  misc_RNA (1)...(19): siRNA sense strand
caucaacacucauucuaau

SEQ ID NO: 845205 - RNA, 19 nt, Homo sapiens
  misc_RNA (1)...(19): siRNA sense strand
gcagaagcuuguucagaug

SEQ ID NO: 845206 - RNA, 19 nt, Homo sapiens
  misc_RNA (1)...(19): siRNA sense strand
gcuagaagcagcaggaauu

SEQ ID NO: 845207 - RNA, 19 nt, Homo sapiens
  misc_RNA (1)...(19): siRNA sense strand
gaauuggcagcucuacuua

SEQ ID NO: 845208 - RNA, 19 nt, Homo sapiens
  misc_RNA (1)...(19): siRNA sense strand
gaagaucgagggaauaaag

SEQ ID NO: 845209 - RNA, 19 nt, Homo sapiens
  misc_RNA (1)...(19): siRNA sense strand
agaagaaacucaagaaacu

SEQ ID NO: 845210 - RNA, 19 nt, Homo sapiens
  misc_RNA (1)...(19): siRNA sense strand
gaugcacacugccuuaaug

SEQ ID NO: 845211 - RNA, 19 nt, Homo sapiens
  misc_RNA (1)...(19): siRNA sense strand
gcagaaguguaaaugaaca

SEQ ID NO: 845212 - RNA, 19 nt, Homo sapiens
  misc_RNA (1)...(19): siRNA sense strand
guucguaaauugcuagaug

SEQ ID NO: 845213 - RNA, 19 nt, Homo sapiens
  misc_RNA (1)...(19): siRNA sense strand
gcacuacucuuagcacaag

SEQ ID NO: 845214 - RNA, 19 nt, Homo sapiens
  misc_RNA (1)...(19): siRNA sense strand
ggacauacucccuuaaugg

SEQ ID NO: 845215 - RNA, 19 nt, Homo sapiens
  misc_RNA (1)...(19): siRNA sense strand
gugcaaauauagaagauca

SEQ ID NO: 845216 - RNA, 19 nt, Homo sapiens
  misc_RNA (1)...(19): siRNA sense strand
aaauggacauacucccuua

SEQ ID NO: 845217 - RNA, 19 nt, Homo sapiens
  misc_RNA (1)...(19): siRNA sense strand
uggaggacauguugaauug

SEQ ID NO: 845218 - RNA, 19 nt, Homo sapiens
  misc_RNA (1)...(19): siRNA sense strand
gaauaaaggagacauaacu

SEQ ID NO: 845219 - RNA, 19 nt, Homo sapiens
  misc_RNA (1)...(19): siRNA sense strand
ggauaguggugcucaagug

SEQ ID NO: 845220 - RNA, 19 nt, Homo sapiens
  misc_RNA (1)...(19): siRNA sense strand
agaaacugcucuuacuuug

SEQ ID NO: 845221 - RNA, 19 nt, Homo sapiens
  misc_RNA (1)...(19): siRNA sense strand
agcaggguauuaugaauua

SEQ ID NO: 845222 - RNA, 19 nt, Homo sapiens
  misc_RNA (1)...(19): siRNA sense strand
gcaucaacacucauucuaa

SEQ ID NO: 845223 - RNA, 19 nt, Homo sapiens
  misc_RNA (1)...(19): siRNA sense strand
aaauauaaaugcccagaca

SEQ ID NO: 845224 - RNA, 19 nt, Homo sapiens
  misc_RNA (1)...(19): siRNA sense strand
agacacagccuuaaccuau

SEQ ID NO: 845225 - RNA, 19 nt, Homo sapiens
  misc_RNA (1)...(19): siRNA sense strand
gaggauuuguugacauugu

SEQ ID NO: 845226 - RNA, 19 nt, Homo sapiens
  misc_RNA (1)...(19): siRNA sense strand
gggaauaaaggagacauaa

SEQ ID NO: 845227 - RNA, 19 nt, Homo sapiens
  misc_RNA (1)...(19): siRNA sense strand
ggacaccuggaauugguua

SEQ ID NO: 845228 - RNA, 19 nt, Homo sapiens
  misc_RNA (1)...(19): siRNA sense strand
uggcagcucuacuuauuga

SEQ ID NO: 845229 - RNA, 19 nt, Homo sapiens
  misc_RNA (1)...(19): siRNA sense strand
gcacugacacggaugaaag

SEQ ID NO: 845230 - RNA, 19 nt, Homo sapiens
  misc_RNA (1)...(19): siRNA sense strand
gagguuacuuagauauugu

SEQ ID NO: 845231 - RNA, 19 nt, Homo sapiens
  misc_RNA (1)...(19): siRNA sense strand
uguccgagguugaaucauu

SEQ ID NO: 845232 - RNA, 19 nt, Homo sapiens
  misc_RNA (1)...(19): siRNA sense strand
aggcagaaguguaaaugaa

SEQ ID NO: 845233 - RNA, 19 nt, Homo sapiens
  misc_RNA (1)...(19): siRNA sense strand
guccgagguugaaucauuu

SEQ ID NO: 845234 - RNA, 19 nt, Homo sapiens
  misc_RNA (1)...(19): siRNA sense strand
gagguacuccggagacuga

SEQ ID NO: 845235 - RNA, 19 nt, Homo sapiens
  misc_RNA (1)...(19): siRNA sense strand
ggagggacaccuggaauug

SEQ ID NO: 845236 - RNA, 19 nt, Homo sapiens
  misc_RNA (1)...(19): siRNA sense strand
gcagcucuacuuauugaaa

SEQ ID NO: 845237 - RNA, 19 nt, Homo sapiens
  misc_RNA (1)...(19): siRNA sense strand
ucauuugaaucuccauuga

SEQ ID NO: 845238 - RNA, 19 nt, Homo sapiens
  misc_RNA (1)...(19): siRNA sense strand
gaaggcagaaguguaaaug

SEQ ID NO: 845239 - RNA, 19 nt, Homo sapiens
  misc_RNA (1)...(19): siRNA sense strand
ccaagaagaucuggauaac

SEQ ID NO: 845240 - RNA, 19 nt, Homo sapiens
  misc_RNA (1)...(19): siRNA sense strand
gugcaggcaucaacacuca

SEQ ID NO: 845241 - RNA, 19 nt, Homo sapiens
  misc_RNA (1)...(19): siRNA sense strand
caguggagguuacuuagau

SEQ ID NO: 845242 - RNA, 19 nt, Homo sapiens
  misc_RNA (1)...(19): siRNA sense strand
gcacaaaacagaugagaug

SEQ ID NO: 845243 - RNA, 19 nt, Homo sapiens
  misc_RNA (1)...(19): siRNA sense strand
gacacagccuuaaccuaug

SEQ ID NO: 845244 - RNA, 19 nt, Homo sapiens
  misc_RNA (1)...(19): siRNA sense strand
gacagaagaaacucaagaa

SEQ ID NO: 845245 - RNA, 19 nt, Homo sapiens
  misc_RNA (1)...(19): siRNA sense strand
caacaucagagauauucuu

SEQ ID NO: 845246 - RNA, 19 nt, Homo sapiens
  misc_RNA (1)...(19): siRNA sense strand
uggaggauuuguugacauu

SEQ ID NO: 845247 - RNA, 19 nt, Homo sapiens
  misc_RNA (1)...(19): siRNA sense strand
uaaaugcccagacagaaga

SEQ ID NO: 845248 - RNA, 19 nt, Homo sapiens
  misc_RNA (1)...(19): siRNA sense strand
aaugguggcacuacucuua

SEQ ID NO: 845249 - RNA, 19 nt, Homo sapiens
  misc_RNA (1)...(19): siRNA sense strand
acacugcgcuaacuuaugc

SEQ ID NO: 845250 - RNA, 19 nt, Homo sapiens
  misc_RNA (1)...(19): siRNA sense strand
gggaaggacaugaagaaau

SEQ ID NO: 845251 - RNA, 19 nt, Homo sapiens
  misc_RNA (1)...(19): siRNA sense strand
ugaauuggcagcucuacuu

SEQ ID NO: 845252 - RNA, 19 nt, Homo sapiens
  misc_RNA (1)...(19): siRNA sense strand
ggaccaagaagaucuggau

SEQ ID NO: 845253 - RNA, 19 nt, Homo sapiens
  misc_RNA (1)...(19): siRNA sense strand
auacggauguugcagaugu

SEQ ID NO: 845254 - RNA, 19 nt, Homo sapiens
  misc_RNA (1)...(19): siRNA sense strand
gauaguggugcucaaguga

SEQ ID NO: 845255 - RNA, 19 nt, Homo sapiens
  misc_RNA (1)...(19): siRNA sense strand
gcaggcaucaacacucauu

SEQ ID NO: 845256 - RNA, 19 nt, Homo sapiens
  misc_RNA (1)...(19): siRNA sense strand
ugcaugugcuggaggauuu

SEQ ID NO: 845257 - RNA, 19 nt, Homo sapiens
  misc_RNA (1)...(19): siRNA sense strand
ggaaacacugcgcuaacuu

SEQ ID NO: 845258 - RNA, 19 nt, Homo sapiens
  misc_RNA (1)...(19): siRNA sense strand
agacauaacuccccugaug

SEQ ID NO: 845259 - RNA, 19 nt, Homo sapiens
  misc_RNA (1)...(19): siRNA sense strand
gucaacugcugaugguaaa

SEQ ID NO: 845260 - RNA, 19 nt, Homo sapiens
  misc_RNA (1)...(19): siRNA sense strand
agaaguuaaugaugaagga

SEQ ID NO: 845261 - RNA, 19 nt, Homo sapiens
  misc_RNA (1)...(19): siRNA sense strand
ccacaaugcaggacaagug

SEQ ID NO: 845262 - RNA, 19 nt, Homo sapiens
  misc_RNA (1)...(19): siRNA sense strand
guucagcaggguauuauga

SEQ ID NO: 845263 - RNA, 19 nt, Homo sapiens
  misc_RNA (1)...(19): siRNA sense strand
gagcagacuuacgcacugu

SEQ ID NO: 845264 - RNA, 19 nt, Homo sapiens
  misc_RNA (1)...(19): siRNA sense strand
gaaaugguggcacuacucu

SEQ ID NO: 845265 - RNA, 19 nt, Homo sapiens
  misc_RNA (1)...(19): siRNA sense strand
gacauacucccuuaaugga

SEQ ID NO: 845266 - RNA, 19 nt, Homo sapiens
  misc_RNA (1)...(19): siRNA sense strand
ggauuuguugacauuguua

SEQ ID NO: 845267 - RNA, 19 nt, Homo sapiens
  misc_RNA (1)...(19): siRNA sense strand
uaaugcuguucguaaauug

SEQ ID NO: 845268 - RNA, 19 nt, Homo sapiens
  misc_RNA (1)...(19): siRNA sense strand
ggauaacccagugcuuaaa

SEQ ID NO: 845269 - RNA, 19 nt, Homo sapiens
  misc_RNA (1)...(19): siRNA sense strand
agcagaagcuuguucagau

SEQ ID NO: 845270 - RNA, 19 nt, Homo sapiens
  misc_RNA (1)...(19): siRNA sense strand
gaagaaaugguggcacuac

SEQ ID NO: 845271 - RNA, 19 nt, Homo sapiens
  misc_RNA (1)...(19): siRNA sense strand
gaaaggggagcaaaucuug

SEQ ID NO: 845272 - RNA, 19 nt, Homo sapiens
  misc_RNA (1)...(19): siRNA sense strand
gagguggcacguuugcuuu

SEQ ID NO: 845273 - RNA, 19 nt, Homo sapiens
  misc_RNA (1)...(19): siRNA sense strand
ugagaugcacacugccuua

SEQ ID NO: 845274 - RNA, 19 nt, Homo sapiens
  misc_RNA (1)...(19): siRNA sense strand
uaaagugcuccuuaaugaa

SEQ ID NO: 845275 - RNA, 19 nt, Homo sapiens
  misc_RNA (1)...(19): siRNA sense strand
ggcgcuggauuucaaguug

SEQ ID NO: 845276 - RNA, 19 nt, Homo sapiens
  misc_RNA (1)...(19): siRNA sense strand
cagcaggguauuaugaauu

SEQ ID NO: 845277 - RNA, 19 nt, Homo sapiens
  misc_RNA (1)...(19): siRNA sense strand
guaaaugaacauacagaag

SEQ ID NO: 845278 - RNA, 19 nt, Homo sapiens
  misc_RNA (1)...(19): siRNA sense strand
uguuaaugcuguucguaaa

SEQ ID NO: 845279 - RNA, 19 nt, Homo sapiens
  misc_RNA (1)...(19): siRNA sense strand
aggaggaccuggacucugu

SEQ ID NO: 845280 - RNA, 19 nt, Homo sapiens
  misc_RNA (1)...(19): siRNA sense strand
uaaugugcaugcuacaaca

SEQ ID NO: 845281 - RNA, 19 nt, Homo sapiens
  misc_RNA (1)...(19): siRNA sense strand
ggcaggggcugauauagaa

SEQ ID NO: 845282 - RNA, 19 nt, Homo sapiens
  misc_RNA (1)...(19): siRNA sense strand
gauacacucccuugaugga

SEQ ID NO: 845283 - RNA, 19 nt, Homo sapiens
  misc_RNA (1)...(19): siRNA sense strand
auuggcagcucuacuuauu

SEQ ID NO: 845284 - RNA, 19 nt, Homo sapiens
  misc_RNA (1)...(19): siRNA sense strand
gagaugcacacugccuuaa

SEQ ID NO: 845285 - RNA, 19 nt, Homo sapiens
  misc_RNA (1)...(19): siRNA sense strand
gacacaggcacgacuagaa

SEQ ID NO: 845286 - RNA, 19 nt, Homo sapiens
  misc_RNA (1)...(19): siRNA sense strand
gaaagccugcuguguuugg

SEQ ID NO: 845287 - RNA, 19 nt, Homo sapiens
  misc_RNA (1)...(19): siRNA sense strand
augguucgcuuucuacuug

SEQ ID NO: 845288 - RNA, 19 nt, Homo sapiens
  misc_RNA (1)...(19): siRNA sense strand
gagacacagccuuaaccua

SEQ ID NO: 845289 - RNA, 19 nt, Homo sapiens
  misc_RNA (1)...(19): siRNA sense strand
gaagaaacucaagaaacug

SEQ ID NO: 845290 - RNA, 19 nt, Homo sapiens
  misc_RNA (1)...(19): siRNA sense strand
aggauacacucccuugaug

SEQ ID NO: 845291 - RNA, 19 nt, Homo sapiens
  misc_RNA (1)...(19): siRNA sense strand
gaccaagaagaucuggaua

SEQ ID NO: 845292 - RNA, 19 nt, Homo sapiens
  misc_RNA (1)...(19): siRNA sense strand
gaacaugccugcagauuca

SEQ ID NO: 845293 - RNA, 19 nt, Homo sapiens
  misc_RNA (1)...(19): siRNA sense strand
gagaaagccugcuguguuu

SEQ ID NO: 845294 - RNA, 19 nt, Homo sapiens
  misc_RNA (1)...(19): siRNA sense strand
ggaaggacaugaagaaaug

SEQ ID NO: 845295 - RNA, 19 nt, Homo sapiens
  misc_RNA (1)...(19): siRNA sense strand
gcacaaggagcaaauauaa

SEQ ID NO: 845296 - RNA, 19 nt, Homo sapiens
  misc_RNA (1)...(19): siRNA sense strand
caaagaaagugcucuaaca

SEQ ID NO: 845297 - RNA, 19 nt, Homo sapiens
  misc_RNA (1)...(19): siRNA sense strand
gaaacacugcgcuaacuua

SEQ ID NO: 845298 - RNA, 19 nt, Homo sapiens
  misc_RNA (1)...(19): siRNA sense strand
guugcagacuuucuuauua

SEQ ID NO: 845299 - RNA, 19 nt, Homo sapiens
  misc_RNA (1)...(19): siRNA sense strand
ugaauuagcacaaguauug

SEQ ID NO: 845300 - RNA, 19 nt, Homo sapiens
  misc_RNA (1)...(19): siRNA sense strand
ggagaaagccugcuguguu

SEQ ID NO: 845301 - RNA, 19 nt, Homo sapiens
  misc_RNA (1)...(19): siRNA sense strand
gaugaaggcagaaguguaa

SEQ ID NO: 845302 - RNA, 19 nt, Homo sapiens
  misc_RNA (1)...(19): siRNA sense strand
ggagguuacuuagauauug

SEQ ID NO: 845303 - RNA, 19 nt, Homo sapiens
  misc_RNA (1)...(19): siRNA sense strand
ggauaugguucgcuuucua

SEQ ID NO: 845304 - RNA, 19 nt, Homo sapiens
  misc_RNA (1)...(19): siRNA sense strand
caucaacacucauucuaau

SEQ ID NO: 845305 - RNA, 19 nt, Homo sapiens
  misc_RNA (1)...(19): siRNA sense strand
gcagaagcuuguucagaug

SEQ ID NO: 845306 - RNA, 19 nt, Homo sapiens
  misc_RNA (1)...(19): siRNA sense strand
gaauuggcagcucuacuua

SEQ ID NO: 845307 - RNA, 19 nt, Homo sapiens
  misc_RNA (1)...(19): siRNA sense strand
gaagaucgagggaauaaag

SEQ ID NO: 845308 - RNA, 19 nt, Homo sapiens
  misc_RNA (1)...(19): siRNA sense strand
agaagaaacucaagaaacu

SEQ ID NO: 845309 - RNA, 19 nt, Homo sapiens
  misc_RNA (1)...(19): siRNA sense strand
gaugcacacugccuuaaug

SEQ ID NO: 845310 - RNA, 19 nt, Homo sapiens
  misc_RNA (1)...(19): siRNA sense strand
gcagaaguguaaaugaaca

SEQ ID NO: 845311 - RNA, 19 nt, Homo sapiens
  misc_RNA (1)...(19): siRNA sense strand
guucguaaauugcuagaug

SEQ ID NO: 845312 - RNA, 19 nt, Homo sapiens
  misc_RNA (1)...(19): siRNA sense strand
gcacuacucuuagcacaag

SEQ ID NO: 845313 - RNA, 19 nt, Homo sapiens
  misc_RNA (1)...(19): siRNA sense strand
ggacauacucccuuaaugg

SEQ ID NO: 845314 - RNA, 19 nt, Homo sapiens
  misc_RNA (1)...(19): siRNA sense strand
gugcaaauauagaagauca

SEQ ID NO: 845315 - RNA, 19 nt, Homo sapiens
  misc_RNA (1)...(19): siRNA sense strand
aaauggacauacucccuua

SEQ ID NO: 845316 - RNA, 19 nt, Homo sapiens
  misc_RNA (1)...(19): siRNA sense strand
uggaggacauguugaauug

SEQ ID NO: 845317 - RNA, 19 nt, Homo sapiens
  misc_RNA (1)...(19): siRNA sense strand
gaauaaaggagacauaacu

SEQ ID NO: 845318 - RNA, 19 nt, Homo sapiens
  misc_RNA (1)...(19): siRNA sense strand
ggauaguggugcucaagug

SEQ ID NO: 845319 - RNA, 19 nt, Homo sapiens
  misc_RNA (1)...(19): siRNA sense strand
agaaacugcucuuacuuug

SEQ ID NO: 845320 - RNA, 19 nt, Homo sapiens
  misc_RNA (1)...(19): siRNA sense strand
agcaggguauuaugaauua

SEQ ID NO: 845321 - RNA, 19 nt, Homo sapiens
  misc_RNA (1)...(19): siRNA sense strand
gcaucaacacucauucuaa

SEQ ID NO: 845322 - RNA, 19 nt, Homo sapiens
  misc_RNA (1)...(19): siRNA sense strand
aaauauaaaugcccagaca

SEQ ID NO: 845323 - RNA, 19 nt, Homo sapiens
  misc_RNA (1)...(19): siRNA sense strand
agacacagccuuaaccuau

SEQ ID NO: 845324 - RNA, 19 nt, Homo sapiens
  misc_RNA (1)...(19): siRNA sense strand
gaggauuuguugacauugu

SEQ ID NO: 845325 - RNA, 19 nt, Homo sapiens
  misc_RNA (1)...(19): siRNA sense strand
gggaauaaaggagacauaa

SEQ ID NO: 845326 - RNA, 19 nt, Homo sapiens
  misc_RNA (1)...(19): siRNA sense strand
ggacaccuggaauugguua

SEQ ID NO: 845327 - RNA, 19 nt, Homo sapiens
  misc_RNA (1)...(19): siRNA sense strand
uggcagcucuacuuauuga

SEQ ID NO: 845328 - RNA, 19 nt, Homo sapiens
  misc_RNA (1)...(19): siRNA sense strand
aggcagaaguguaaaugaa

SEQ ID NO: 845329 - RNA, 19 nt, Homo sapiens
  misc_RNA (1)...(19): siRNA sense strand
gagguuacuuagauauugu

SEQ ID NO: 845330 - RNA, 19 nt, Homo sapiens
  misc_RNA (1)...(19): siRNA sense strand
gaaggcagaaguguaaaug

SEQ ID NO: 845331 - RNA, 19 nt, Homo sapiens
  misc_RNA (1)...(19): siRNA sense strand
ggagggacaccuggaauug

SEQ ID NO: 845332 - RNA, 19 nt, Homo sapiens
  misc_RNA (1)...(19): siRNA sense strand
gcagcucuacuuauugaaa

SEQ ID NO: 845333 - RNA, 19 nt, Homo sapiens
  misc_RNA (1)...(19): siRNA sense strand
ucauuugaaucuccauuga

SEQ ID NO: 845334 - RNA, 19 nt, Homo sapiens
  misc_RNA (1)...(19): siRNA sense strand
caguggagguuacuuagau

SEQ ID NO: 845335 - RNA, 19 nt, Homo sapiens
  misc_RNA (1)...(19): siRNA sense strand
gugcaggcaucaacacuca

SEQ ID NO: 845336 - RNA, 19 nt, Homo sapiens
  misc_RNA (1)...(19): siRNA sense strand
gcacaaaacagaugagaug

SEQ ID NO: 845337 - RNA, 19 nt, Homo sapiens
  misc_RNA (1)...(19): siRNA sense strand
gacacagccuuaaccuaug

SEQ ID NO: 845338 - RNA, 19 nt, Homo sapiens
  misc_RNA (1)...(19): siRNA sense strand
gacagaagaaacucaagaa

SEQ ID NO: 845339 - RNA, 19 nt, Homo sapiens
  misc_RNA (1)...(19): siRNA sense strand
uggaggauuuguugacauu

SEQ ID NO: 845340 - RNA, 19 nt, Homo sapiens
  misc_RNA (1)...(19): siRNA sense strand
uaaaugcccagacagaaga

SEQ ID NO: 845341 - RNA, 19 nt, Homo sapiens
  misc_RNA (1)...(19): siRNA sense strand
aaugguggcacuacucuua

SEQ ID NO: 845342 - RNA, 19 nt, Homo sapiens
  misc_RNA (1)...(19): siRNA sense strand
acacugcgcuaacuuaugc

SEQ ID NO: 845343 - RNA, 19 nt, Homo sapiens
  misc_RNA (1)...(19): siRNA sense strand
gggaaggacaugaagaaau

SEQ ID NO: 845344 - RNA, 19 nt, Homo sapiens
  misc_RNA (1)...(19): siRNA sense strand
ugaauuggcagcucuacuu

SEQ ID NO: 845345 - RNA, 19 nt, Homo sapiens
  misc_RNA (1)...(19): siRNA sense strand
agacauaacuccccugaug

SEQ ID NO: 845346 - RNA, 19 nt, Homo sapiens
  misc_RNA (1)...(19): siRNA sense strand
auacggauguugcagaugu

SEQ ID NO: 845347 - RNA, 19 nt, Homo sapiens
  misc_RNA (1)...(19): siRNA sense strand
gauaguggugcucaaguga

SEQ ID NO: 845348 - RNA, 19 nt, Homo sapiens
  misc_RNA (1)...(19): siRNA sense strand
gcaggcaucaacacucauu

SEQ ID NO: 845349 - RNA, 19 nt, Homo sapiens
  misc_RNA (1)...(19): siRNA sense strand
ugcaugugcuggaggauuu

SEQ ID NO: 845350 - RNA, 19 nt, Homo sapiens
  misc_RNA (1)...(19): siRNA sense strand
ggaaacacugcgcuaacuu

SEQ ID NO: 845351 - RNA, 19 nt, Homo sapiens
  misc_RNA (1)...(19): siRNA sense strand
ccacaaugcaggacaagug

SEQ ID NO: 845352 - RNA, 19 nt, Homo sapiens
  misc_RNA (1)...(19): siRNA sense strand
agaaguuaaugaugaagga

SEQ ID NO: 845353 - RNA, 19 nt, Homo sapiens
  misc_RNA (1)...(19): siRNA sense strand
guucagcaggguauuauga

SEQ ID NO: 845354 - RNA, 19 nt, Homo sapiens
  misc_RNA (1)...(19): siRNA sense strand
gaaaugguggcacuacucu

SEQ ID NO: 845355 - RNA, 19 nt, Homo sapiens
  misc_RNA (1)...(19): siRNA sense strand
gacauacucccuuaaugga

SEQ ID NO: 845356 - RNA, 19 nt, Homo sapiens
  misc_RNA (1)...(19): siRNA sense strand
ggauuuguugacauuguua

SEQ ID NO: 845357 - RNA, 19 nt, Homo sapiens
  misc_RNA (1)...(19): siRNA sense strand
uaaugcuguucguaaauug

SEQ ID NO: 845358 - RNA, 19 nt, Homo sapiens
  misc_RNA (1)...(19): siRNA sense strand
guaaaugaacauacagaag

SEQ ID NO: 845359 - RNA, 19 nt, Homo sapiens
  misc_RNA (1)...(19): siRNA sense strand
gaagaaaugguggcacuac

SEQ ID NO: 845360 - RNA, 19 nt, Homo sapiens
  misc_RNA (1)...(19): siRNA sense strand
gaaaggggagcaaaucuug

SEQ ID NO: 845361 - RNA, 19 nt, Homo sapiens
  misc_RNA (1)...(19): siRNA sense strand
gagguggcacguuugcuuu

SEQ ID NO: 845362 - RNA, 19 nt, Homo sapiens
  misc_RNA (1)...(19): siRNA sense strand
ugagaugcacacugccuua

SEQ ID NO: 845363 - RNA, 19 nt, Homo sapiens
  misc_RNA (1)...(19): siRNA sense strand
agcagaagcuuguucagau

SEQ ID NO: 845364 - RNA, 19 nt, Homo sapiens
  misc_RNA (1)...(19): siRNA sense strand
uaaagugcuccuuaaugaa

SEQ ID NO: 845365 - RNA, 19 nt, Homo sapiens
  misc_RNA (1)...(19): siRNA sense strand
uguuaaugcuguucguaaa

SEQ ID NO: 845366 - RNA, 19 nt, Homo sapiens
  misc_RNA (1)...(19): siRNA sense strand
cagcaggguauuaugaauu

SEQ ID NO: 845367 - RNA, 19 nt, Homo sapiens
  misc_RNA (1)...(19): siRNA sense strand
gagaugcacacugccuuaa

SEQ ID NO: 845368 - RNA, 19 nt, Homo sapiens
  misc_RNA (1)...(19): siRNA sense strand
uaaugugcaugcuacaaca

SEQ ID NO: 845369 - RNA, 19 nt, Homo sapiens
  misc_RNA (1)...(19): siRNA sense strand
gaaagccugcuguguuugg

SEQ ID NO: 845370 - RNA, 19 nt, Homo sapiens
  misc_RNA (1)...(19): siRNA sense strand
ggcaggggcugauauagaa

SEQ ID NO: 845371 - RNA, 19 nt, Homo sapiens
  misc_RNA (1)...(19): siRNA sense strand
gauacacucccuugaugga

SEQ ID NO: 845372 - RNA, 19 nt, Homo sapiens
  misc_RNA (1)...(19): siRNA sense strand
auuggcagcucuacuuauu

SEQ ID NO: 845373 - RNA, 19 nt, Homo sapiens
  misc_RNA (1)...(19): siRNA sense strand
uguggaaguugcaagaguu

SEQ ID NO: 845374 - RNA, 19 nt, Homo sapiens
  misc_RNA (1)...(19): siRNA sense strand
gagacacagccuuaaccua

SEQ ID NO: 845375 - RNA, 19 nt, Homo sapiens
  misc_RNA (1)...(19): siRNA sense strand
gaagaaacucaagaaacug

SEQ ID NO: 845376 - RNA, 19 nt, Homo sapiens
  misc_RNA (1)...(19): siRNA sense strand
aggauacacucccuugaug

SEQ ID NO: 845377 - RNA, 19 nt, Homo sapiens
  misc_RNA (1)...(19): siRNA sense strand
augguucgcuuucuacuug

SEQ ID NO: 845378 - RNA, 19 nt, Homo sapiens
  misc_RNA (1)...(19): siRNA sense strand
ugaaggugcaaauauagaa

SEQ ID NO: 845379 - RNA, 19 nt, Homo sapiens
  misc_RNA (1)...(19): siRNA sense strand
ggcuugcuguggaggauuu

SEQ ID NO: 845380 - RNA, 19 nt, Homo sapiens
  misc_RNA (1)...(19): siRNA sense strand
cagugcaggucauguggaa

SEQ ID NO: 845381 - RNA, 19 nt, Homo sapiens
  misc_RNA (1)...(19): siRNA sense strand
aacacuugcuugcuacaaa

SEQ ID NO: 845382 - RNA, 19 nt, Homo sapiens
  misc_RNA (1)...(19): siRNA sense strand
gaaacugcucuuacuuugg

SEQ ID NO: 845383 - RNA, 19 nt, Homo sapiens
  misc_RNA (1)...(19): siRNA sense strand
cagaagaaacucaagaaac

SEQ ID NO: 845384 - RNA, 19 nt, Homo sapiens
  misc_RNA (1)...(19): siRNA sense strand
gcagaaaacagccacaaug

SEQ ID NO: 845385 - RNA, 19 nt, Homo sapiens
  misc_RNA (1)...(19): siRNA sense strand
guggaggacauguugaauu

SEQ ID NO: 845386 - RNA, 19 nt, Homo sapiens
  misc_RNA (1)...(19): siRNA sense strand
gcaugcuaauguugaagau

SEQ ID NO: 845387 - RNA, 19 nt, Homo sapiens
  misc_RNA (1)...(19): siRNA sense strand
caaggagcaaauauaaaug

SEQ ID NO: 845388 - RNA, 19 nt, Homo sapiens
  misc_RNA (1)...(19): siRNA sense strand
gcuggaggauuuguugaca

SEQ ID NO: 845389 - RNA, 19 nt, Homo sapiens
  misc_RNA (1)...(19): siRNA sense strand
ggauguugcagauguuuua

SEQ ID NO: 845390 - RNA, 19 nt, Homo sapiens
  misc_RNA (1)...(19): siRNA sense strand
ggcaucaacacucauucua

SEQ ID NO: 845391 - RNA, 19 nt, Homo sapiens
  misc_RNA (1)...(19): siRNA sense strand
ucagcaggguauuaugaau

SEQ ID NO: 845392 - RNA, 19 nt, Homo sapiens
  misc_RNA (1)...(19): siRNA sense strand
gaagugagcaggauuuauu

SEQ ID NO: 845393 - RNA, 19 nt, Homo sapiens
  misc_RNA (1)...(19): siRNA sense strand
gcagagagcccaucagaag

SEQ ID NO: 845394 - RNA, 19 nt, Homo sapiens
  misc_RNA (1)...(19): siRNA sense strand
agaaaccgcuggcccguaa

SEQ ID NO: 845395 - RNA, 19 nt, Homo sapiens
  misc_RNA (1)...(19): siRNA sense strand
ugccagauguuacuagaua

SEQ ID NO: 845396 - RNA, 19 nt, Homo sapiens
  misc_RNA (1)...(19): siRNA sense strand
gagaaccucugcggacaaa

SEQ ID NO: 845397 - RNA, 19 nt, Homo sapiens
  misc_RNA (1)...(19): siRNA sense strand
ggcaauaacuuccuaacag

SEQ ID NO: 845398 - RNA, 19 nt, Homo sapiens
  misc_RNA (1)...(19): siRNA sense strand
gagcagagagcccaucaga

SEQ ID NO: 845399 - RNA, 19 nt, Homo sapiens
  misc_RNA (1)...(19): siRNA sense strand
gaagaaaaccucagacaau

SEQ ID NO: 845400 - RNA, 19 nt, Homo sapiens
  misc_RNA (1)...(19): siRNA sense strand
caacgugcucaaccaaaua

SEQ ID NO: 845401 - RNA, 19 nt, Homo sapiens
  misc_RNA (1)...(19): siRNA sense strand
uggcuaugguugaauuuaa

SEQ ID NO: 845402 - RNA, 19 nt, Homo sapiens
  misc_RNA (1)...(19): siRNA sense strand
cagaagagagugaacauuc

SEQ ID NO: 845403 - RNA, 19 nt, Homo sapiens
  misc_RNA (1)...(19): siRNA sense strand
ggacaccucagaagucaau

SEQ ID NO: 845404 - RNA, 19 nt, Homo sapiens
  misc_RNA (1)...(19): siRNA sense strand
ggacugugucuucuucuga

SEQ ID NO: 845405 - RNA, 19 nt, Homo sapiens
  misc_RNA (1)...(19): siRNA sense strand
gcucugcuccucaucauau

SEQ ID NO: 845406 - RNA, 19 nt, Homo sapiens
  misc_RNA (1)...(19): siRNA sense strand
gcaauuccaagucaacgaa

SEQ ID NO: 845407 - RNA, 19 nt, Homo sapiens
  misc_RNA (1)...(19): siRNA sense strand
aaucagggaucuuccuuuc

SEQ ID NO: 845408 - RNA, 19 nt, Homo sapiens
  misc_RNA (1)...(19): siRNA sense strand
ucaacgugcucaaccaaau

SEQ ID NO: 845409 - RNA, 19 nt, Homo sapiens
  misc_RNA (1)...(19): siRNA sense strand
caagaaagaagagcagaga

SEQ ID NO: 845410 - RNA, 19 nt, Homo sapiens
  misc_RNA (1)...(19): siRNA sense strand
caccuucgccaucuacaua

SEQ ID NO: 845411 - RNA, 19 nt, Homo sapiens
  misc_RNA (1)...(19): siRNA sense strand
gcagggaccgauacagaga

SEQ ID NO: 845412 - RNA, 19 nt, Homo sapiens
  misc_RNA (1)...(19): siRNA sense strand
ccaucacccugggcaauaa

SEQ ID NO: 845413 - RNA, 19 nt, Homo sapiens
  misc_RNA (1)...(19): siRNA sense strand
gccagauguuacuagauaa

SEQ ID NO: 845414 - RNA, 19 nt, Homo sapiens
  misc_RNA (1)...(19): siRNA sense strand
gaagagagugaacauucug

SEQ ID NO: 845415 - RNA, 19 nt, Homo sapiens
  misc_RNA (1)...(19): siRNA sense strand
cagcagggaccgauacaga

SEQ ID NO: 845416 - RNA, 19 nt, Homo sapiens
  misc_RNA (1)...(19): siRNA sense strand
auaagcugcuggacagauu

SEQ ID NO: 845417 - RNA, 19 nt, Homo sapiens
  misc_RNA (1)...(19): siRNA sense strand
ccuggaagagugauucuaa

SEQ ID NO: 845418 - RNA, 19 nt, Homo sapiens
  misc_RNA (1)...(19): siRNA sense strand
gcugccagauguuacuaga

SEQ ID NO: 845419 - RNA, 19 nt, Homo sapiens
  misc_RNA (1)...(19): siRNA sense strand
gcagaagagagugaacauu

SEQ ID NO: 845420 - RNA, 19 nt, Homo sapiens
  misc_RNA (1)...(19): siRNA sense strand
ucagguggcuaugguugaa

SEQ ID NO: 845421 - RNA, 19 nt, Homo sapiens
  misc_RNA (1)...(19): siRNA sense strand
caaccaaauauucugcaaa

SEQ ID NO: 845422 - RNA, 19 nt, Homo sapiens
  misc_RNA (1)...(19): siRNA sense strand
guaaggggcuuccaccaau

SEQ ID NO: 845423 - RNA, 19 nt, Homo sapiens
  misc_RNA (1)...(19): siRNA sense strand
gacaucaucaccaccuuug

SEQ ID NO: 845424 - RNA, 19 nt, Homo sapiens
  misc_RNA (1)...(19): siRNA sense strand
gcccagcgaucucagaaaa

SEQ ID NO: 845425 - RNA, 19 nt, Homo sapiens
  misc_RNA (1)...(19): siRNA sense strand
gaaaaccucagacaauuca

SEQ ID NO: 845426 - RNA, 19 nt, Homo sapiens
  misc_RNA (1)...(19): siRNA sense strand
gguaccaacugccaagaac

SEQ ID NO: 845427 - RNA, 19 nt, Homo sapiens
  misc_RNA (1)...(19): siRNA sense strand
aagaaaaccucagacaauu

SEQ ID NO: 845428 - RNA, 19 nt, Homo sapiens
  misc_RNA (1)...(19): siRNA sense strand
caccagugaugaaaauuaa

SEQ ID NO: 845429 - RNA, 19 nt, Homo sapiens
  misc_RNA (1)...(19): siRNA sense strand
caaccuagcuccccuacca

SEQ ID NO: 845430 - RNA, 19 nt, Homo sapiens
  misc_RNA (1)...(19): siRNA sense strand
ccaucuacauaauccauca

SEQ ID NO: 845431 - RNA, 19 nt, Homo sapiens
  misc_RNA (1)...(19): siRNA sense strand
gggcuuccaccaaucagaa

SEQ ID NO: 845432 - RNA, 19 nt, Homo sapiens
  misc_RNA (1)...(19): siRNA sense strand
acacagcacagcagcagaa

SEQ ID NO: 845433 - RNA, 19 nt, Homo sapiens
  misc_RNA (1)...(19): siRNA sense strand
ccgagugcuuccugcaauu

SEQ ID NO: 845434 - RNA, 19 nt, Homo sapiens
  misc_RNA (1)...(19): siRNA sense strand
ucaaccaaauauucugcaa

SEQ ID NO: 845435 - RNA, 19 nt, Homo sapiens
  misc_RNA (1)...(19): siRNA sense strand
gugaucagguggcuauggu

SEQ ID NO: 845436 - RNA, 19 nt, Homo sapiens
  misc_RNA (1)...(19): siRNA sense strand
ggagaaccucugcggacaa

SEQ ID NO: 845437 - RNA, 19 nt, Homo sapiens
  misc_RNA (1)...(19): siRNA sense strand
ucagggaucuuccuuucac

SEQ ID NO: 845438 - RNA, 19 nt, Homo sapiens
  misc_RNA (1)...(19): siRNA sense strand
gggcaauaacuuccuaaca

SEQ ID NO: 845439 - RNA, 19 nt, Homo sapiens
  misc_RNA (1)...(19): siRNA sense strand
cagagucucccacccauca

SEQ ID NO: 845440 - RNA, 19 nt, Homo sapiens
  misc_RNA (1)...(19): siRNA sense strand
ccucagacaauucaaaaua

SEQ ID NO: 845441 - RNA, 19 nt, Homo sapiens
  misc_RNA (1)...(19): siRNA sense strand
cagcacagcagcagaagag

SEQ ID NO: 845442 - RNA, 19 nt, Homo sapiens
  misc_RNA (1)...(19): siRNA sense strand
gacugugucuucuucugau

SEQ ID NO: 845443 - RNA, 19 nt, Homo sapiens
  misc_RNA (1)...(19): siRNA sense strand
aaaccucagacaauucaaa

SEQ ID NO: 845444 - RNA, 19 nt, Homo sapiens
  misc_RNA (1)...(19): siRNA sense strand
ugacaucaucaccaccuuu

SEQ ID NO: 845445 - RNA, 19 nt, Homo sapiens
  misc_RNA (1)...(19): siRNA sense strand
ccaagucaacgaagacaca

SEQ ID NO: 845446 - RNA, 19 nt, Homo sapiens
  misc_RNA (1)...(19): siRNA sense strand
ggcuaugguugaauuuaag

SEQ ID NO: 845447 - RNA, 19 nt, Homo sapiens
  misc_RNA (1)...(19): siRNA sense strand
ucagguauuuuccuacaaa

SEQ ID NO: 845448 - RNA, 19 nt, Homo sapiens
  misc_RNA (1)...(19): siRNA sense strand
aagugagcaggauuuauua

SEQ ID NO: 845449 - RNA, 19 nt, Homo sapiens
  misc_RNA (1)...(19): siRNA sense strand
aagaacagccuggugauca

SEQ ID NO: 845450 - RNA, 19 nt, Homo sapiens
  misc_RNA (1)...(19): siRNA sense strand
gacaaaauuuucagcaucu

SEQ ID NO: 845451 - RNA, 19 nt, Homo sapiens
  misc_RNA (1)...(19): siRNA sense strand
cuaaucagguauuuuccua

SEQ ID NO: 845452 - RNA, 19 nt, Homo sapiens
  misc_RNA (1)...(19): siRNA sense strand
gauaagcugcuggacagau

SEQ ID NO: 845453 - RNA, 19 nt, Homo sapiens
  misc_RNA (1)...(19): siRNA sense strand
ccaaacagacacaaaauca

SEQ ID NO: 845454 - RNA, 19 nt, Homo sapiens
  misc_RNA (1)...(19): siRNA sense strand
agagagcccaucagaagga

SEQ ID NO: 845455 - RNA, 19 nt, Homo sapiens
  misc_RNA (1)...(19): siRNA sense strand
ccaccagugaugaaaauua

SEQ ID NO: 845456 - RNA, 19 nt, Homo sapiens
  misc_RNA (1)...(19): siRNA sense strand
gagagcccaucagaaggau

SEQ ID NO: 845457 - RNA, 19 nt, Homo sapiens
  misc_RNA (1)...(19): siRNA sense strand
ccugggcaauaacuuccua

SEQ ID NO: 845458 - RNA, 19 nt, Homo sapiens
  misc_RNA (1)...(19): siRNA sense strand
gcuaugguugaauuuaaga

SEQ ID NO: 845459 - RNA, 19 nt, Homo sapiens
  misc_RNA (1)...(19): siRNA sense strand
caccacaccuucgccaucu

SEQ ID NO: 845460 - RNA, 19 nt, Homo sapiens
  misc_RNA (1)...(19): siRNA sense strand
cuggaagagugauucuaau

SEQ ID NO: 845461 - RNA, 19 nt, Homo sapiens
  misc_RNA (1)...(19): siRNA sense strand
guggcuaugguugaauuua

SEQ ID NO: 845462 - RNA, 19 nt, Homo sapiens
  misc_RNA (1)...(19): siRNA sense strand
caagaacagccuggugauc

SEQ ID NO: 845463 - RNA, 19 nt, Homo sapiens
  misc_RNA (1)...(19): siRNA sense strand
cagcagcagaagagaguga

SEQ ID NO: 845464 - RNA, 19 nt, Homo sapiens
  misc_RNA (1)...(19): siRNA sense strand
gcggacaaaccgagugcuu

SEQ ID NO: 845465 - RNA, 19 nt, Homo sapiens
  misc_RNA (1)...(19): siRNA sense strand
ucgaagugagcaggauuua

SEQ ID NO: 845466 - RNA, 19 nt, Homo sapiens
  misc_RNA (1)...(19): siRNA sense strand
caacagaggauguccauua

SEQ ID NO: 845467 - RNA, 19 nt, Homo sapiens
  misc_RNA (1)...(19): siRNA sense strand
gaagagcaaucaagugaau

SEQ ID NO: 845468 - RNA, 19 nt, Homo sapiens
  misc_RNA (1)...(19): siRNA sense strand
ggacucaucucacccaaug

SEQ ID NO: 845469 - RNA, 19 nt, Homo sapiens
  misc_RNA (1)...(19): siRNA sense strand
gagcaagaguuugacuuua

SEQ ID NO: 845470 - RNA, 19 nt, Homo sapiens
  misc_RNA (1)...(19): siRNA sense strand
ccagaaaucaguccaaaua

SEQ ID NO: 845471 - RNA, 19 nt, Homo sapiens
  misc_RNA (1)...(19): siRNA sense strand
gcaagaguuugacuuuauu

SEQ ID NO: 845472 - RNA, 19 nt, Homo sapiens
  misc_RNA (1)...(19): siRNA sense strand
cagaggaacuuaauguuga

SEQ ID NO: 845473 - RNA, 19 nt, Homo sapiens
  misc_RNA (1)...(19): siRNA sense strand
ggagccagcuggagaaaga

SEQ ID NO: 845474 - RNA, 19 nt, Homo sapiens
  misc_RNA (1)...(19): siRNA sense strand
caagaaaguucauguuaca

SEQ ID NO: 845475 - RNA, 19 nt, Homo sapiens
  misc_RNA (1)...(19): siRNA sense strand
guaaugagccagaaauuug

SEQ ID NO: 845476 - RNA, 19 nt, Homo sapiens
  misc_RNA (1)...(19): siRNA sense strand
caacaaagcugagaguucu

SEQ ID NO: 845477 - RNA, 19 nt, Homo sapiens
  misc_RNA (1)...(19): siRNA sense strand
gaauagagucuguuaaugu

SEQ ID NO: 845478 - RNA, 19 nt, Homo sapiens
  misc_RNA (1)...(19): siRNA sense strand
gaaagaauaugagcaagag

SEQ ID NO: 845479 - RNA, 19 nt, Homo sapiens
  misc_RNA (1)...(19): siRNA sense strand
ggagaaagaggcucaaaga

SEQ ID NO: 845480 - RNA, 19 nt, Homo sapiens
  misc_RNA (1)...(19): siRNA sense strand
gaaaacaccucugaaagaa

SEQ ID NO: 845481 - RNA, 19 nt, Homo sapiens
  misc_RNA (1)...(19): siRNA sense strand
gcucgcagcuauuuguaaa

SEQ ID NO: 845482 - RNA, 19 nt, Homo sapiens
  misc_RNA (1)...(19): siRNA sense strand
gauaguaagccuagaaguu

SEQ ID NO: 845483 - RNA, 19 nt, Homo sapiens
  misc_RNA (1)...(19): siRNA sense strand
gaucggagaaagauaaauu

SEQ ID NO: 845484 - RNA, 19 nt, Homo sapiens
  misc_RNA (1)...(19): siRNA sense strand
gaagggccaccaacuauga

SEQ ID NO: 845485 - RNA, 19 nt, Homo sapiens
  misc_RNA (1)...(19): siRNA sense strand
gcucagccauuguaaacuu

SEQ ID NO: 845486 - RNA, 19 nt, Homo sapiens
  misc_RNA (1)...(19): siRNA sense strand
gcagaggaacuuaauguug

SEQ ID NO: 845487 - RNA, 19 nt, Homo sapiens
  misc_RNA (1)...(19): siRNA sense strand
caaagacuguauacacgaa

SEQ ID NO: 845488 - RNA, 19 nt, Homo sapiens
  misc_RNA (1)...(19): siRNA sense strand
guaacaccguugaagcuaa

SEQ ID NO: 845489 - RNA, 19 nt, Homo sapiens
  misc_RNA (1)...(19): siRNA sense strand
gaaagugaucggagaaaga

SEQ ID NO: 845490 - RNA, 19 nt, Homo sapiens
  misc_RNA (1)...(19): siRNA sense strand
guaaacagccgcaaagaca

SEQ ID NO: 845491 - RNA, 19 nt, Homo sapiens
  misc_RNA (1)...(19): siRNA sense strand
agaaguugcugccaagauu

SEQ ID NO: 845492 - RNA, 19 nt, Homo sapiens
  misc_RNA (1)...(19): siRNA sense strand
caacagaaguggauuaccu

SEQ ID NO: 845493 - RNA, 19 nt, Homo sapiens
  misc_RNA (1)...(19): siRNA sense strand
ccaagaauagagucuguua

SEQ ID NO: 845494 - RNA, 19 nt, Homo sapiens
  misc_RNA (1)...(19): siRNA sense strand
gagaaggcagccaaugaua

SEQ ID NO: 845495 - RNA, 19 nt, Homo sapiens
  misc_RNA (1)...(19): siRNA sense strand
cgacacccaucucuuauca

SEQ ID NO: 845496 - RNA, 19 nt, Homo sapiens
  misc_RNA (1)...(19): siRNA sense strand
auuaggagguuguaugaua

SEQ ID NO: 845497 - RNA, 19 nt, Homo sapiens
  misc_RNA (1)...(19): siRNA sense strand
aaacaccucugaaagaauc

SEQ ID NO: 845498 - RNA, 19 nt, Homo sapiens
  misc_RNA (1)...(19): siRNA sense strand
cuagagaguuuacauaugg

SEQ ID NO: 845499 - RNA, 19 nt, Homo sapiens
  misc_RNA (1)...(19): siRNA sense strand
acacccaucucuuaucaaa

SEQ ID NO: 845500 - RNA, 19 nt, Homo sapiens
  misc_RNA (1)...(19): siRNA sense strand
ccacagaugccaccacuga

SEQ ID NO: 845501 - RNA, 19 nt, Homo sapiens
  misc_RNA (1)...(19): siRNA sense strand
gguaaagaguauagaaagu

SEQ ID NO: 845502 - RNA, 19 nt, Homo sapiens
  misc_RNA (1)...(19): siRNA sense strand
acccaucucuuaucaaauu

SEQ ID NO: 845503 - RNA, 19 nt, Homo sapiens
  misc_RNA (1)...(19): siRNA sense strand
gcaccacccacucuucuaa

SEQ ID NO: 845504 - RNA, 19 nt, Homo sapiens
  misc_RNA (1)...(19): siRNA sense strand
ugauauagcuaauguucug

SEQ ID NO: 845505 - RNA, 19 nt, Homo sapiens
  misc_RNA (1)...(19): siRNA sense strand
ccaaauggacaaucaguug

SEQ ID NO: 845506 - RNA, 19 nt, Homo sapiens
  misc_RNA (1)...(19): siRNA sense strand
gcgacacaaucucaacaaa

SEQ ID NO: 845507 - RNA, 19 nt, Homo sapiens
  misc_RNA (1)...(19): siRNA sense strand
ucaagugaauccagacaga

SEQ ID NO: 845508 - RNA, 19 nt, Homo sapiens
  misc_RNA (1)...(19): siRNA sense strand
uagaagagcaaucaaguga

SEQ ID NO: 845509 - RNA, 19 nt, Homo sapiens
  misc_RNA (1)...(19): siRNA sense strand
gguaaugagccagaaauuu

SEQ ID NO: 845510 - RNA, 19 nt, Homo sapiens
  misc_RNA (1)...(19): siRNA sense strand
gacaagucuuuaaggguaa

SEQ ID NO: 845511 - RNA, 19 nt, Homo sapiens
  misc_RNA (1)...(19): siRNA sense strand
gacagaaagugaaaguaca

SEQ ID NO: 845512 - RNA, 19 nt, Homo sapiens
  misc_RNA (1)...(19): siRNA sense strand
uagcuaauguucugaguag

SEQ ID NO: 845513 - RNA, 19 nt, Homo sapiens
  misc_RNA (1)...(19): siRNA sense strand
gaaguugcugccaagauuu

SEQ ID NO: 845514 - RNA, 19 nt, Homo sapiens
  misc_RNA (1)...(19): siRNA sense strand
aacagaggauguccauuaa

SEQ ID NO: 845515 - RNA, 19 nt, Homo sapiens
  misc_RNA (1)...(19): siRNA sense strand
ugaacucacugcuguuaau

SEQ ID NO: 845516 - RNA, 19 nt, Homo sapiens
  misc_RNA (1)...(19): siRNA sense strand
gaaaucaguccaaauacca

SEQ ID NO: 845517 - RNA, 19 nt, Homo sapiens
  misc_RNA (1)...(19): siRNA sense strand
ucaagaaaguucauguuac

SEQ ID NO: 845518 - RNA, 19 nt, Homo sapiens
  misc_RNA (1)...(19): siRNA sense strand
ugaguagccuggaucuuau

SEQ ID NO: 845519 - RNA, 19 nt, Homo sapiens
  misc_RNA (1)...(19): siRNA sense strand
uauagaggaucauaucauc

SEQ ID NO: 845520 - RNA, 19 nt, Homo sapiens
  misc_RNA (1)...(19): siRNA sense strand
caaagggucacaauuagug

SEQ ID NO: 845521 - RNA, 19 nt, Homo sapiens
  misc_RNA (1)...(19): siRNA sense strand
uaacaccguugaagcuaau

SEQ ID NO: 845522 - RNA, 19 nt, Homo sapiens
  misc_RNA (1)...(19): siRNA sense strand
ugacaacagaaguggauua

SEQ ID NO: 845523 - RNA, 19 nt, Homo sapiens
  misc_RNA (1)...(19): siRNA sense strand
ggccagagccagccaaaug

SEQ ID NO: 845524 - RNA, 19 nt, Homo sapiens
  misc_RNA (1)...(19): siRNA sense strand
gaaaguacagcuggcaaga

SEQ ID NO: 845525 - RNA, 19 nt, Homo sapiens
  misc_RNA (1)...(19): siRNA sense strand
gaacguccuagagaguuua

SEQ ID NO: 845526 - RNA, 19 nt, Homo sapiens
  misc_RNA (1)...(19): siRNA sense strand
gcaguuagaagagcaauca

SEQ ID NO: 845527 - RNA, 19 nt, Homo sapiens
  misc_RNA (1)...(19): siRNA sense strand
gcccagaaaucaguccaaa

SEQ ID NO: 845528 - RNA, 19 nt, Homo sapiens
  misc_RNA (1)...(19): siRNA sense strand
cugaguagccuggaucuua

SEQ ID NO: 845529 - RNA, 19 nt, Homo sapiens
  misc_RNA (1)...(19): siRNA sense strand
gaacucacugcuguuaauu

SEQ ID NO: 845530 - RNA, 19 nt, Homo sapiens
  misc_RNA (1)...(19): siRNA sense strand
gaacccaagcucagccauu

SEQ ID NO: 845531 - RNA, 19 nt, Homo sapiens
  misc_RNA (1)...(19): siRNA sense strand
gaauccaccacagcaaaua

SEQ ID NO: 845532 - RNA, 19 nt, Homo sapiens
  misc_RNA (1)...(19): siRNA sense strand
gacaucaucugaacucacu

SEQ ID NO: 845533 - RNA, 19 nt, Homo sapiens
  misc_RNA (1)...(19): siRNA sense strand
cgaggacagugguuccaaa

SEQ ID NO: 845534 - RNA, 19 nt, Homo sapiens
  misc_RNA (1)...(19): siRNA sense strand
guaaagaguauagaaagug

SEQ ID NO: 845535 - RNA, 19 nt, Homo sapiens
  misc_RNA (1)...(19): siRNA sense strand
ugagaaaucccaaccaagu

SEQ ID NO: 845536 - RNA, 19 nt, Homo sapiens
  misc_RNA (1)...(19): siRNA sense strand
guuaaugucgcaccagaaa

SEQ ID NO: 845537 - RNA, 19 nt, Homo sapiens
  misc_RNA (1)...(19): siRNA sense strand
agaauagagucuguuaaug

SEQ ID NO: 845538 - RNA, 19 nt, Homo sapiens
  misc_RNA (1)...(19): siRNA sense strand
gucaacgccucagauagua

SEQ ID NO: 845539 - RNA, 19 nt, Homo sapiens
  misc_RNA (1)...(19): siRNA sense strand
agcaagaguuugacuuuau

SEQ ID NO: 845540 - RNA, 19 nt, Homo sapiens
  misc_RNA (1)...(19): siRNA sense strand
ugaacguccuagagaguuu

SEQ ID NO: 845541 - RNA, 19 nt, Homo sapiens
  misc_RNA (1)...(19): siRNA sense strand
ccuagagaguuuacauaug

SEQ ID NO: 845542 - RNA, 19 nt, Homo sapiens
  misc_RNA (1)...(19): siRNA sense strand
ccagccaaauggacaauca

SEQ ID NO: 845543 - RNA, 19 nt, Homo sapiens
  misc_RNA (1)...(19): siRNA sense strand
uguggaagauuuggauaaa

SEQ ID NO: 845544 - RNA, 19 nt, Homo sapiens
  misc_RNA (1)...(19): siRNA sense strand
ggugucaacgccucagaua

SEQ ID NO: 845545 - RNA, 19 nt, Homo sapiens
  misc_RNA (1)...(19): siRNA sense strand
uaaguacgccgagcagauu

SEQ ID NO: 845546 - RNA, 19 nt, Homo sapiens
  misc_RNA (1)...(19): siRNA sense strand
gaauccagacagaaaguga

SEQ ID NO: 845547 - RNA, 19 nt, Homo sapiens
  misc_RNA (1)...(19): siRNA sense strand
uuaggagguuguaugauau

SEQ ID NO: 845548 - RNA, 19 nt, Homo sapiens
  misc_RNA (1)...(19): siRNA sense strand
ggaggaccauguggaagau

SEQ ID NO: 845549 - RNA, 19 nt, Homo sapiens
  misc_RNA (1)...(19): siRNA sense strand
ugagcaagaguuugacuuu

SEQ ID NO: 845550 - RNA, 19 nt, Homo sapiens
  misc_RNA (1)...(19): siRNA sense strand
cgucgacgcauuuacgaua

SEQ ID NO: 845551 - RNA, 19 nt, Homo sapiens
  misc_RNA (1)...(19): siRNA sense strand
cccaaagggucacaauuag

SEQ ID NO: 845552 - RNA, 19 nt, Homo sapiens
  misc_RNA (1)...(19): siRNA sense strand
ggaagggccaccaacuaug

SEQ ID NO: 845553 - RNA, 19 nt, Homo sapiens
  misc_RNA (1)...(19): siRNA sense strand
ccagugacaucaucugaac

SEQ ID NO: 845554 - RNA, 19 nt, Homo sapiens
  misc_RNA (1)...(19): siRNA sense strand
ucaaaagacuccacagaug

SEQ ID NO: 845555 - RNA, 19 nt, Homo sapiens
  misc_RNA (1)...(19): siRNA sense strand
acucgacacccaucucuua

SEQ ID NO: 845556 - RNA, 19 nt, Homo sapiens
  misc_RNA (1)...(19): siRNA sense strand
cgugggaaaccaaacuuua

SEQ ID NO: 845557 - RNA, 19 nt, Homo sapiens
  misc_RNA (1)...(19): siRNA sense strand
aaagagaacugugccaaaa

SEQ ID NO: 845558 - RNA, 19 nt, Homo sapiens
  misc_RNA (1)...(19): siRNA sense strand
ccagcccagucauucauuu

SEQ ID NO: 845559 - RNA, 19 nt, Homo sapiens
  misc_RNA (1)...(19): siRNA sense strand
gggaggaccauguggaaga

SEQ ID NO: 845560 - RNA, 19 nt, Homo sapiens
  misc_RNA (1)...(19): siRNA sense strand
agaaauuugugaugcuguu

SEQ ID NO: 845561 - RNA, 19 nt, Homo sapiens
  misc_RNA (1)...(19): siRNA sense strand
aauaugagcaagaguuuga

SEQ ID NO: 845562 - RNA, 19 nt, Homo sapiens
  misc_RNA (1)...(19): siRNA sense strand
gaacgucgacgcauuuacg

SEQ ID NO: 845563 - RNA, 19 nt, Homo sapiens
  misc_RNA (1)...(19): siRNA sense strand
caagaauagagucuguuaa

SEQ ID NO: 845564 - RNA, 19 nt, Homo sapiens
  misc_RNA (1)...(19): siRNA sense strand
gagguuguaugauauagcu

SEQ ID NO: 845565 - RNA, 19 nt, Homo sapiens
  misc_RNA (1)...(19): siRNA sense strand
caacagagaucagaaaagg

SEQ ID NO: 845566 - RNA, 19 nt, Homo sapiens
  misc_RNA (1)...(19): siRNA sense strand
ucaaagaccggauggaaga

SEQ ID NO: 845567 - RNA, 19 nt, Homo sapiens
  misc_RNA (1)...(19): siRNA sense strand
aggaggagcucacgcaaau

SEQ ID NO: 845568 - RNA, 19 nt, Homo sapiens
  misc_RNA (1)...(19): siRNA sense strand
gcaagcuggugcuggacaa

SEQ ID NO: 845569 - RNA, 19 nt, Homo sapiens
  misc_RNA (1)...(19): siRNA sense strand
ggaggaagccgaguucuac

SEQ ID NO: 845570 - RNA, 19 nt, Homo sapiens
  misc_RNA (1)...(19): siRNA sense strand
gcaagugggugcggcucaa

SEQ ID NO: 845571 - RNA, 19 nt, Homo sapiens
  misc_RNA (1)...(19): siRNA sense strand
gaagccgaguucuacaaca

SEQ ID NO: 845572 - RNA, 19 nt, Homo sapiens
  misc_RNA (1)...(19): siRNA sense strand
ggauggaagagaaggacua

SEQ ID NO: 845573 - RNA, 19 nt, Homo sapiens
  misc_RNA (1)...(19): siRNA sense strand
gaggaggagcucacgcaaa

SEQ ID NO: 845574 - RNA, 19 nt, Homo sapiens
  misc_RNA (1)...(19): siRNA sense strand
aggcagaguuccugugugu

SEQ ID NO: 845575 - RNA, 19 nt, Homo sapiens
  misc_RNA (1)...(19): siRNA sense strand
gcgaggaccaggcagaguu

SEQ ID NO: 845576 - RNA, 19 nt, Homo sapiens
  misc_RNA (1)...(19): siRNA sense strand
ucgagcagcuggugaacau

SEQ ID NO: 845577 - RNA, 19 nt, Homo sapiens
  misc_RNA (1)...(19): siRNA sense strand
gaggagcucacgcaaaugg

SEQ ID NO: 845578 - RNA, 19 nt, Homo sapiens
  misc_RNA (1)...(19): siRNA sense strand
gcugccaucccugcuguua

SEQ ID NO: 845579 - RNA, 19 nt, Homo sapiens
  misc_RNA (1)...(19): siRNA sense strand
ugccaucccugcuguuaca

SEQ ID NO: 845580 - RNA, 19 nt, Homo sapiens
  misc_RNA (1)...(19): siRNA sense strand
gaucaccuccagggacuug

SEQ ID NO: 845581 - RNA, 19 nt, Homo sapiens
  misc_RNA (1)...(19): siRNA sense strand
aagccgaguucuacaacau

SEQ ID NO: 845582 - RNA, 19 nt, Homo sapiens
  misc_RNA (1)...(19): siRNA sense strand
ggaagccgaguucuacaac

SEQ ID NO: 845583 - RNA, 19 nt, Homo sapiens
  misc_RNA (1)...(19): siRNA sense strand
cagaggcacccggauguga

SEQ ID NO: 845584 - RNA, 19 nt, Homo sapiens
  misc_RNA (1)...(19): siRNA sense strand
aagaccggauggaagagaa

SEQ ID NO: 845585 - RNA, 19 nt, Homo sapiens
  misc_RNA (1)...(19): siRNA sense strand
uggaggaagccgaguucua

SEQ ID NO: 845586 - RNA, 19 nt, Homo sapiens
  misc_RNA (1)...(19): siRNA sense strand
gcagguggaggcagaugca

SEQ ID NO: 845587 - RNA, 19 nt, Homo sapiens
  misc_RNA (1)...(19): siRNA sense strand
gcaugaagcugcaguggaa

SEQ ID NO: 845588 - RNA, 19 nt, Homo sapiens
  misc_RNA (1)...(19): siRNA sense strand
gcacugggcuccuguagag

SEQ ID NO: 845589 - RNA, 19 nt, Homo sapiens
  misc_RNA (1)...(19): siRNA sense strand
ucaacgagcugacuaugaa

SEQ ID NO: 845590 - RNA, 19 nt, Homo sapiens
  misc_RNA (1)...(19): siRNA sense strand
caagggaacuuugaagaga

SEQ ID NO: 845591 - RNA, 19 nt, Homo sapiens
  misc_RNA (1)...(19): siRNA sense strand
agaacgagguggaugcuuu

SEQ ID NO: 845592 - RNA, 19 nt, Homo sapiens
  misc_RNA (1)...(19): siRNA sense strand
gcuacagggugguguuuga

SEQ ID NO: 845593 - RNA, 19 nt, Homo sapiens
  misc_RNA (1)...(19): siRNA sense strand
gaugaguauuuccgcauga

SEQ ID NO: 845594 - RNA, 19 nt, Homo sapiens
  misc_RNA (1)...(19): siRNA sense strand
gcacugacaggaccaacaa

SEQ ID NO: 845595 - RNA, 19 nt, Homo sapiens
  misc_RNA (1)...(19): siRNA sense strand
gaugugagccgcacugaca

SEQ ID NO: 845596 - RNA, 19 nt, Homo sapiens
  misc_RNA (1)...(19): siRNA sense strand
ucucaucgcuggugucauc

SEQ ID NO: 845597 - RNA, 19 nt, Homo sapiens
  misc_RNA (1)...(19): siRNA sense strand
gcaagaaaacggaugagua

SEQ ID NO: 845598 - RNA, 19 nt, Homo sapiens
  misc_RNA (1)...(19): siRNA sense strand
caccagcgcuaagaaguau

SEQ ID NO: 845599 - RNA, 19 nt, Homo sapiens
  misc_RNA (1)...(19): siRNA sense strand
gaacgagguggaugcuuuc

SEQ ID NO: 845600 - RNA, 19 nt, Homo sapiens
  misc_RNA (1)...(19): siRNA sense strand
gcaagggaacuuugaagag

SEQ ID NO: 845601 - RNA, 19 nt, Homo sapiens
  misc_RNA (1)...(19): siRNA sense strand
gaggaggaaccaaccuuug

SEQ ID NO: 845602 - RNA, 19 nt, Homo sapiens
  misc_RNA (1)...(19): siRNA sense strand
cugcucaucugguucaaga

SEQ ID NO: 845603 - RNA, 19 nt, Homo sapiens
  misc_RNA (1)...(19): siRNA sense strand
ugacaggaccaacaaguuc

SEQ ID NO: 845604 - RNA, 19 nt, Homo sapiens
  misc_RNA (1)...(19): siRNA sense strand
gagcggagaaacucacuuc

SEQ ID NO: 845605 - RNA, 19 nt, Homo sapiens
  misc_RNA (1)...(19): siRNA sense strand
gcacagcugaggagcacaa

SEQ ID NO: 845606 - RNA, 19 nt, Homo sapiens
  misc_RNA (1)...(19): siRNA sense strand
cagcugggccuaccugguu

SEQ ID NO: 845607 - RNA, 19 nt, Homo sapiens
  misc_RNA (1)...(19): siRNA sense strand
ugucauccgugucguggaa

SEQ ID NO: 845608 - RNA, 19 nt, Homo sapiens
  misc_RNA (1)...(19): siRNA sense strand
gguggcugcucaucugguu

SEQ ID NO: 845609 - RNA, 19 nt, Homo sapiens
  misc_RNA (1)...(19): siRNA sense strand
gggcaugagugaucuucuc

SEQ ID NO: 845610 - RNA, 19 nt, Homo sapiens
  misc_RNA (1)...(19): siRNA sense strand
ggaccaacaaguucuacga

SEQ ID NO: 845611 - RNA, 19 nt, Homo sapiens
  misc_RNA (1)...(19): siRNA sense strand
caagaaaacggaugaguau

SEQ ID NO: 845612 - RNA, 19 nt, Homo sapiens
  misc_RNA (1)...(19): siRNA sense strand
ggagcacaaggcccacaua

SEQ ID NO: 845613 - RNA, 19 nt, Homo sapiens
  misc_RNA (1)...(19): siRNA sense strand
gaccaggacagcuccaaug

SEQ ID NO: 845614 - RNA, 19 nt, Homo sapiens
  misc_RNA (1)...(19): siRNA sense strand
acucacuucugcauggaua

SEQ ID NO: 845615 - RNA, 19 nt, Homo sapiens
  misc_RNA (1)...(19): siRNA sense strand
gcacaccagcgcuaagaag

SEQ ID NO: 845616 - RNA, 19 nt, Homo sapiens
  misc_RNA (1)...(19): siRNA sense strand
acagggugguguuugagaa

SEQ ID NO: 845617 - RNA, 19 nt, Homo sapiens
  misc_RNA (1)...(19): siRNA sense strand
gaugcuuucugguguuucu

SEQ ID NO: 845618 - RNA, 19 nt, Homo sapiens
  misc_RNA (1)...(19): siRNA sense strand
acaccagcgcuaagaagua

SEQ ID NO: 845619 - RNA, 19 nt, Homo sapiens
  misc_RNA (1)...(19): siRNA sense strand
gagcaggagcggagaaacu

SEQ ID NO: 845620 - RNA, 19 nt, Homo sapiens
  misc_RNA (1)...(19): siRNA sense strand
agaaaacggaugaguauuu

SEQ ID NO: 845621 - RNA, 19 nt, Homo sapiens
  misc_RNA (1)...(19): siRNA sense strand
ggcuucggcuccaaugaga

SEQ ID NO: 845622 - RNA, 19 nt, Homo sapiens
  misc_RNA (1)...(19): siRNA sense strand
cccaaauccucuucuccaa

SEQ ID NO: 845623 - RNA, 19 nt, Homo sapiens
  misc_RNA (1)...(19): siRNA sense strand
ccucugcucucuccaacuc

SEQ ID NO: 845624 - RNA, 19 nt, Homo sapiens
  misc_RNA (1)...(19): siRNA sense strand
ugaggaggaaccaaccuuu

SEQ ID NO: 845625 - RNA, 19 nt, Homo sapiens
  misc_RNA (1)...(19): siRNA sense strand
uaccgcagccucaucgaaa

SEQ ID NO: 845626 - RNA, 19 nt, Homo sapiens
  misc_RNA (1)...(19): siRNA sense strand
acgauauccuccucaccua

SEQ ID NO: 845627 - RNA, 19 nt, Homo sapiens
  misc_RNA (1)...(19): siRNA sense strand
cuacgagggucccgagaac

SEQ ID NO: 845628 - RNA, 19 nt, Homo sapiens
  misc_RNA (1)...(19): siRNA sense strand
gcucugcgacuuccuggau

SEQ ID NO: 845629 - RNA, 19 nt, Homo sapiens
  misc_RNA (1)...(19): siRNA sense strand
ggacucccgccucuaccuu

SEQ ID NO: 845630 - RNA, 19 nt, Homo sapiens
  misc_RNA (1)...(19): siRNA sense strand
guggaugcuuucugguguu

SEQ ID NO: 845631 - RNA, 19 nt, Homo sapiens
  misc_RNA (1)...(19): siRNA sense strand
gagcacaaggcccacauac

SEQ ID NO: 845632 - RNA, 19 nt, Homo sapiens
  misc_RNA (1)...(19): siRNA sense strand
aaacucacuucugcaugga

SEQ ID NO: 845633 - RNA, 19 nt, Homo sapiens
  misc_RNA (1)...(19): siRNA sense strand
aggaggaaccaaccuuuga

SEQ ID NO: 845634 - RNA, 19 nt, Homo sapiens
  misc_RNA (1)...(19): siRNA sense strand
gcacaucaacgagcugacu

SEQ ID NO: 845635 - RNA, 19 nt, Homo sapiens
  misc_RNA (1)...(19): siRNA sense strand
guguuucuguggcuucaug

SEQ ID NO: 845636 - RNA, 19 nt, Homo sapiens
  misc_RNA (1)...(19): siRNA sense strand
uggaugcuuucugguguuu

SEQ ID NO: 845637 - RNA, 19 nt, Homo sapiens
  misc_RNA (1)...(19): siRNA sense strand
ccuacugcauguaucacuu

SEQ ID NO: 845638 - RNA, 19 nt, Homo sapiens
  misc_RNA (1)...(19): siRNA sense strand
agaggaggcuggagauucc

SEQ ID NO: 845639 - RNA, 19 nt, Homo sapiens
  misc_RNA (1)...(19): siRNA sense strand
gagauccucaagcacauca

SEQ ID NO: 845640 - RNA, 19 nt, Homo sapiens
  misc_RNA (1)...(19): siRNA sense strand
ugagaagggcggaguguac

SEQ ID NO: 845641 - RNA, 19 nt, Homo sapiens
  misc_RNA (1)...(19): siRNA sense strand
uagaggaggcuggagauuc

SEQ ID NO: 845642 - RNA, 19 nt, Homo sapiens
  misc_RNA (1)...(19): siRNA sense strand
ccacccaaauccucuucuc

SEQ ID NO: 845643 - RNA, 19 nt, Homo sapiens
  misc_RNA (1)...(19): siRNA sense strand
guagaggaggcuggagauu

SEQ ID NO: 845644 - RNA, 19 nt, Homo sapiens
  misc_RNA (1)...(19): siRNA sense strand
ucaccuacugcauguauca

SEQ ID NO: 845645 - RNA, 19 nt, Homo sapiens
  misc_RNA (1)...(19): siRNA sense strand
gcucgugcaagggaacuuu

SEQ ID NO: 845646 - RNA, 19 nt, Homo sapiens
  misc_RNA (1)...(19): siRNA sense strand
ccucaccuacugcauguau

SEQ ID NO: 845647 - RNA, 19 nt, Homo sapiens
  misc_RNA (1)...(19): siRNA sense strand
gaagagauuuccucgauca

SEQ ID NO: 845648 - RNA, 19 nt, Homo sapiens
  misc_RNA (1)...(19): siRNA sense strand
gagauuuccucgaucauuu

SEQ ID NO: 845649 - RNA, 19 nt, Homo sapiens
  misc_RNA (1)...(19): siRNA sense strand
gaaaagagcuagugaagca

SEQ ID NO: 845650 - RNA, 19 nt, Homo sapiens
  misc_RNA (1)...(19): siRNA sense strand
aaacaggacuauccauuca

SEQ ID NO: 845651 - RNA, 19 nt, Homo sapiens
  misc_RNA (1)...(19): siRNA sense strand
caugcuguaugccuuauua

SEQ ID NO: 845652 - RNA, 19 nt, Homo sapiens
  misc_RNA (1)...(19): siRNA sense strand
uagaagagauuuccucgau

SEQ ID NO: 845653 - RNA, 19 nt, Homo sapiens
  misc_RNA (1)...(19): siRNA sense strand
gaacucaucucuguuucca

SEQ ID NO: 845654 - RNA, 19 nt, Homo sapiens
  misc_RNA (1)...(19): siRNA sense strand
ggaauauacucaucaucag

SEQ ID NO: 845655 - RNA, 19 nt, Homo sapiens
  misc_RNA (1)...(19): siRNA sense strand
cuacugaacuacaaagagu

SEQ ID NO: 845656 - RNA, 19 nt, Homo sapiens
  misc_RNA (1)...(19): siRNA sense strand
aaagaugccuaaagcagau

SEQ ID NO: 845657 - RNA, 19 nt, Homo sapiens
  misc_RNA (1)...(19): siRNA sense strand
gcuguaugccuuauuaaau

SEQ ID NO: 845658 - RNA, 19 nt, Homo sapiens
  misc_RNA (1)...(19): siRNA sense strand
gccuaaagcagauuucuau

SEQ ID NO: 845659 - RNA, 19 nt, Homo sapiens
  misc_RNA (1)...(19): siRNA sense strand
gaauauacucaucaucagu

SEQ ID NO: 845660 - RNA, 19 nt, Homo sapiens
  misc_RNA (1)...(19): siRNA sense strand
acucaucucuguuuccaau

SEQ ID NO: 845661 - RNA, 19 nt, Homo sapiens
  misc_RNA (1)...(19): siRNA sense strand
gagaggaauauacucauca

SEQ ID NO: 845662 - RNA, 19 nt, Homo sapiens
  misc_RNA (1)...(19): siRNA sense strand
ucucuucgauucuauacug

SEQ ID NO: 845663 - RNA, 19 nt, Homo sapiens
  misc_RNA (1)...(19): siRNA sense strand
acaggacuauccauucaga

SEQ ID NO: 845664 - RNA, 19 nt, Homo sapiens
  misc_RNA (1)...(19): siRNA sense strand
cuaaagcagauuucuaugu

SEQ ID NO: 845665 - RNA, 19 nt, Homo sapiens
  misc_RNA (1)...(19): siRNA sense strand
uagcaguguuugacucuca

SEQ ID NO: 845666 - RNA, 19 nt, Homo sapiens
  misc_RNA (1)...(19): siRNA sense strand
guucuucccaucagauaaa

SEQ ID NO: 845667 - RNA, 19 nt, Homo sapiens
  misc_RNA (1)...(19): siRNA sense strand
uuucaaagaugccuaaagc

SEQ ID NO: 845668 - RNA, 19 nt, Homo sapiens
  misc_RNA (1)...(19): siRNA sense strand
uuuccucgaucauuucaaa

SEQ ID NO: 845669 - RNA, 19 nt, Homo sapiens
  misc_RNA (1)...(19): siRNA sense strand
agauuucuauguucuggaa

SEQ ID NO: 845670 - RNA, 19 nt, Homo sapiens
  misc_RNA (1)...(19): siRNA sense strand
ccaauacuguuacauuuuc

SEQ ID NO: 845671 - RNA, 19 nt, Homo sapiens
  misc_RNA (1)...(19): siRNA sense strand
caguuucucuucgauucua

SEQ ID NO: 845672 - RNA, 19 nt, Homo sapiens
  misc_RNA (1)...(19): siRNA sense strand
aaagcagauuucuauguuc

SEQ ID NO: 845673 - RNA, 19 nt, Homo sapiens
  misc_RNA (1)...(19): siRNA sense strand
cucaucaucagucuauuua

SEQ ID NO: 845674 - RNA, 19 nt, Homo sapiens
  misc_RNA (1)...(19): siRNA sense strand
acaaagaguagaagagcuu

SEQ ID NO: 845675 - RNA, 19 nt, Homo sapiens
  misc_RNA (1)...(19): siRNA sense strand
aggaauauacucaucauca

SEQ ID NO: 845676 - RNA, 19 nt, Homo sapiens
  misc_RNA (1)...(19): siRNA sense strand
aagcagauuucuauguucu

SEQ ID NO: 845677 - RNA, 19 nt, Homo sapiens
  misc_RNA (1)...(19): siRNA sense strand
gaacugaugauuggugacu

SEQ ID NO: 845678 - RNA, 19 nt, Homo sapiens
  misc_RNA (1)...(19): siRNA sense strand
gacuauccauucagaacuc

SEQ ID NO: 845679 - RNA, 19 nt, Homo sapiens
  misc_RNA (1)...(19): siRNA sense strand
ccucgaucauuucaaagau

SEQ ID NO: 845680 - RNA, 19 nt, Homo sapiens
  misc_RNA (1)...(19): siRNA sense strand
auacucaucaucagucuau

SEQ ID NO: 845681 - RNA, 19 nt, Homo sapiens
  misc_RNA (1)...(19): siRNA sense strand
ggacuauccauucagaacu

SEQ ID NO: 845682 - RNA, 19 nt, Homo sapiens
  misc_RNA (1)...(19): siRNA sense strand
ucacuacagacagauguuu

SEQ ID NO: 845683 - RNA, 19 nt, Homo sapiens
  misc_RNA (1)...(19): siRNA sense strand
agaggaauauacucaucau

SEQ ID NO: 845684 - RNA, 19 nt, Homo sapiens
  misc_RNA (1)...(19): siRNA sense strand
uggaagccaugcuguaugc

SEQ ID NO: 845685 - RNA, 19 nt, Homo sapiens
  misc_RNA (1)...(19): siRNA sense strand
gaaaugcaguggggaagca

SEQ ID NO: 845686 - RNA, 19 nt, Homo sapiens
  misc_RNA (1)...(19): siRNA sense strand
ucuaugaauuagcaguguu

SEQ ID NO: 845687 - RNA, 19 nt, Homo sapiens
  misc_RNA (1)...(19): siRNA sense strand
ucaucucuguuuccaauac

SEQ ID NO: 845688 - RNA, 19 nt, Homo sapiens
  misc_RNA (1)...(19): siRNA sense strand
acucaucaucagucuauuu

SEQ ID NO: 845689 - RNA, 19 nt, Homo sapiens
  misc_RNA (1)...(19): siRNA sense strand
cuaugaauuagcaguguuu

SEQ ID NO: 845690 - RNA, 19 nt, Homo sapiens
  misc_RNA (1)...(19): siRNA sense strand
ggaagcauuuugaacugau

SEQ ID NO: 845691 - RNA, 19 nt, Homo sapiens
  misc_RNA (1)...(19): siRNA sense strand
agagauuuccucgaucauu

SEQ ID NO: 845692 - RNA, 19 nt, Homo sapiens
  misc_RNA (1)...(19): siRNA sense strand
gaauuagcaguguuugacu

SEQ ID NO: 845693 - RNA, 19 nt, Homo sapiens
  misc_RNA (1)...(19): siRNA sense strand
ucauuucaaagaugccuaa

SEQ ID NO: 845694 - RNA, 19 nt, Homo sapiens
  misc_RNA (1)...(19): siRNA sense strand
ugaaauugcuuccuuauca

SEQ ID NO: 845695 - RNA, 19 nt, Homo sapiens
  misc_RNA (1)...(19): siRNA sense strand
gaaggaaguuguugagaag

SEQ ID NO: 845696 - RNA, 19 nt, Homo sapiens
  misc_RNA (1)...(19): siRNA sense strand
uauaaggacugcaaaguau

SEQ ID NO: 845697 - RNA, 19 nt, Homo sapiens
  misc_RNA (1)...(19): siRNA sense strand
caagaaacauggcauugau

SEQ ID NO: 845698 - RNA, 19 nt, Homo sapiens
  misc_RNA (1)...(19): siRNA sense strand
guaaaaggcucuaauacaa

SEQ ID NO: 845699 - RNA, 19 nt, Homo sapiens
  misc_RNA (1)...(19): siRNA sense strand
ugaaggaaguuguugagaa

SEQ ID NO: 845700 - RNA, 19 nt, Homo sapiens
  misc_RNA (1)...(19): siRNA sense strand
gcucuaauacaaccuauaa

SEQ ID NO: 845701 - RNA, 19 nt, Homo sapiens
  misc_RNA (1)...(19): siRNA sense strand
gaaauugcuuccuuaucau

SEQ ID NO: 845702 - RNA, 19 nt, Homo sapiens
  misc_RNA (1)...(19): siRNA sense strand
ggaguauaaugccuugguu

SEQ ID NO: 845703 - RNA, 19 nt, Homo sapiens
  misc_RNA (1)...(19): siRNA sense strand
uggaguaccucaagaaaca

SEQ ID NO: 845704 - RNA, 19 nt, Homo sapiens
  misc_RNA (1)...(19): siRNA sense strand
ggaggugucuuccauucca

SEQ ID NO: 845705 - RNA, 19 nt, Homo sapiens
  misc_RNA (1)...(19): siRNA sense strand
cuauaaggacugcaaagua

SEQ ID NO: 845706 - RNA, 19 nt, Homo sapiens
  misc_RNA (1)...(19): siRNA sense strand
ggagagaaacaggaacuga

SEQ ID NO: 845707 - RNA, 19 nt, Homo sapiens
  misc_RNA (1)...(19): siRNA sense strand
guacagacucuugugauug

SEQ ID NO: 845708 - RNA, 19 nt, Homo sapiens
  misc_RNA (1)...(19): siRNA sense strand
gcagugaaggaguauaaug

SEQ ID NO: 845709 - RNA, 19 nt, Homo sapiens
  misc_RNA (1)...(19): siRNA sense strand
uguacagacucuugugauu

SEQ ID NO: 845710 - RNA, 19 nt, Homo sapiens
  misc_RNA (1)...(19): siRNA sense strand
agacagagcaggcagugaa

SEQ ID NO: 845711 - RNA, 19 nt, Homo sapiens
  misc_RNA (1)...(19): siRNA sense strand
aaacaggaacugagcauuc

SEQ ID NO: 845712 - RNA, 19 nt, Homo sapiens
  misc_RNA (1)...(19): siRNA sense strand
ggugggaggugucuuccau

SEQ ID NO: 845713 - RNA, 19 nt, Homo sapiens
  misc_RNA (1)...(19): siRNA sense strand
gaaacaggaacugagcauu

SEQ ID NO: 845714 - RNA, 19 nt, Homo sapiens
  misc_RNA (1)...(19): siRNA sense strand
ugagaaggguguacagacu

SEQ ID NO: 845715 - RNA, 19 nt, Homo sapiens
  misc_RNA (1)...(19): siRNA sense strand
cuaauacaaccuauaagga

SEQ ID NO: 845716 - RNA, 19 nt, Homo sapiens
  misc_RNA (1)...(19): siRNA sense strand
ggacuugggauuggagaga

SEQ ID NO: 845717 - RNA, 19 nt, Homo sapiens
  misc_RNA (1)...(19): siRNA sense strand
cugcagaugugaaggaagu

SEQ ID NO: 845718 - RNA, 19 nt, Homo sapiens
  misc_RNA (1)...(19): siRNA sense strand
caaccuauaaggacugcaa

SEQ ID NO: 845719 - RNA, 19 nt, Homo sapiens
  misc_RNA (1)...(19): siRNA sense strand
uacagacucuugugauugg

SEQ ID NO: 845720 - RNA, 19 nt, Homo sapiens
  misc_RNA (1)...(19): siRNA sense strand
cccugaaauugcuuccuua

SEQ ID NO: 845721 - RNA, 19 nt, Homo sapiens
  misc_RNA (1)...(19): siRNA sense strand
gugauuggccgagggauga

SEQ ID NO: 845722 - RNA, 19 nt, Homo sapiens
  misc_RNA (1)...(19): siRNA sense strand
cuucaucaacuguggagua

SEQ ID NO: 845723 - RNA, 19 nt, Homo sapiens
  misc_RNA (1)...(19): siRNA sense strand
gacuugggauuggagagaa

SEQ ID NO: 845724 - RNA, 19 nt, Homo sapiens
  misc_RNA (1)...(19): siRNA sense strand
gaaaguaaaaggcucuaau

SEQ ID NO: 845725 - RNA, 19 nt, Homo sapiens
  misc_RNA (1)...(19): siRNA sense strand
gauuggagagaaacaggaa

SEQ ID NO: 845726 - RNA, 19 nt, Homo sapiens
  misc_RNA (1)...(19): siRNA sense strand
caucaacuguggaguaccu

SEQ ID NO: 845727 - RNA, 19 nt, Homo sapiens
  misc_RNA (1)...(19): siRNA sense strand
ugggaggugucuuccauuc

SEQ ID NO: 845728 - RNA, 19 nt, Homo sapiens
  misc_RNA (1)...(19): siRNA sense strand
gcagaugugaaggaaguug

SEQ ID NO: 845729 - RNA, 19 nt, Homo sapiens
  misc_RNA (1)...(19): siRNA sense strand
gguguacagacucuuguga

SEQ ID NO: 845730 - RNA, 19 nt, Homo sapiens
  misc_RNA (1)...(19): siRNA sense strand
aggcagugaaggaguauaa

SEQ ID NO: 845731 - RNA, 19 nt, Homo sapiens
  misc_RNA (1)...(19): siRNA sense strand
agcaggcagugaaggagua

SEQ ID NO: 845732 - RNA, 19 nt, Homo sapiens
  misc_RNA (1)...(19): siRNA sense strand
gaugugaaggaaguuguug

SEQ ID NO: 845733 - RNA, 19 nt, Homo sapiens
  misc_RNA (1)...(19): siRNA sense strand
ggaugagugaggccuugaa

SEQ ID NO: 845734 - RNA, 19 nt, Homo sapiens
  misc_RNA (1)...(19): siRNA sense strand
agaaggguguacagacucu

SEQ ID NO: 845735 - RNA, 19 nt, Homo sapiens
  misc_RNA (1)...(19): siRNA sense strand
cagagcaggcagugaagga

SEQ ID NO: 845736 - RNA, 19 nt, Homo sapiens
  misc_RNA (1)...(19): siRNA sense strand
ccucaagaaacauggcauu

SEQ ID NO: 845737 - RNA, 19 nt, Homo sapiens
  misc_RNA (1)...(19): siRNA sense strand
aacaggaacugagcauucu

SEQ ID NO: 845738 - RNA, 19 nt, Homo sapiens
  misc_RNA (1)...(19): siRNA sense strand
ucuaauacaaccuauaagg

SEQ ID NO: 845739 - RNA, 19 nt, Homo sapiens
  misc_RNA (1)...(19): siRNA sense strand
uaaggacugcaaaguaugg

SEQ ID NO: 845740 - RNA, 19 nt, Homo sapiens
  misc_RNA (1)...(19): siRNA sense strand
caacuguggaguaccucaa

SEQ ID NO: 845741 - RNA, 19 nt, Homo sapiens
  misc_RNA (1)...(19): siRNA sense strand
gaaauagccugcagaagua

SEQ ID NO: 845742 - RNA, 19 nt, Homo sapiens
  misc_RNA (1)...(19): siRNA sense strand
gaaauuaucucaagacauc

SEQ ID NO: 845743 - RNA, 19 nt, Homo sapiens
  misc_RNA (1)...(19): siRNA sense strand
gaaguaagccuauaacaaa

SEQ ID NO: 845744 - RNA, 19 nt, Homo sapiens
  misc_RNA (1)...(19): siRNA sense strand
gaauugagcuguucuggaa

SEQ ID NO: 845745 - RNA, 19 nt, Homo sapiens
  misc_RNA (1)...(19): siRNA sense strand
gaccauagcuuaagugaau

SEQ ID NO: 845746 - RNA, 19 nt, Homo sapiens
  misc_RNA (1)...(19): siRNA sense strand
agaaacagcucuacuuauu

SEQ ID NO: 845747 - RNA, 19 nt, Homo sapiens
  misc_RNA (1)...(19): siRNA sense strand
gaaacagcucuacuuauua

SEQ ID NO: 845748 - RNA, 19 nt, Homo sapiens
  misc_RNA (1)...(19): siRNA sense strand
cagaagaguucccagauuu

SEQ ID NO: 845749 - RNA, 19 nt, Homo sapiens
  misc_RNA (1)...(19): siRNA sense strand
aagaauagcuuuccauaug

SEQ ID NO: 845750 - RNA, 19 nt, Homo sapiens
  misc_RNA (1)...(19): siRNA sense strand
agaaugagcuuuccuuaga

SEQ ID NO: 845751 - RNA, 19 nt, Homo sapiens
  misc_RNA (1)...(19): siRNA sense strand
caaagaauccuuggaauug

SEQ ID NO: 845752 - RNA, 19 nt, Homo sapiens
  misc_RNA (1)...(19): siRNA sense strand
gaauagcuuuccauaugaa

SEQ ID NO: 845753 - RNA, 19 nt, Homo sapiens
  misc_RNA (1)...(19): siRNA sense strand
ggauuacacuugcagaaga

SEQ ID NO: 845754 - RNA, 19 nt, Homo sapiens
  misc_RNA (1)...(19): siRNA sense strand
gcaauugucuuggguguuc

SEQ ID NO: 845755 - RNA, 19 nt, Homo sapiens
  misc_RNA (1)...(19): siRNA sense strand
ggacuugagagauucuuua

SEQ ID NO: 845756 - RNA, 19 nt, Homo sapiens
  misc_RNA (1)...(19): siRNA sense strand
cagaguccaucaucaagua

SEQ ID NO: 845757 - RNA, 19 nt, Homo sapiens
  misc_RNA (1)...(19): siRNA sense strand
uaagucagauuuccacaga

SEQ ID NO: 845758 - RNA, 19 nt, Homo sapiens
  misc_RNA (1)...(19): siRNA sense strand
gaagauagucgaacuggau

SEQ ID NO: 845759 - RNA, 19 nt, Homo sapiens
  misc_RNA (1)...(19): siRNA sense strand
ugagaaacagcucuacuua

SEQ ID NO: 845760 - RNA, 19 nt, Homo sapiens
  misc_RNA (1)...(19): siRNA sense strand
gaagaggaauuugaagaag

SEQ ID NO: 845761 - RNA, 19 nt, Homo sapiens
  misc_RNA (1)...(19): siRNA sense strand
cagaaaauauugugccuua

SEQ ID NO: 845762 - RNA, 19 nt, Homo sapiens
  misc_RNA (1)...(19): siRNA sense strand
acacacagcucuuuuauug

SEQ ID NO: 845763 - RNA, 19 nt, Homo sapiens
  misc_RNA (1)...(19): siRNA sense strand
gaagaauagcuuuccauau

SEQ ID NO: 845764 - RNA, 19 nt, Homo sapiens
  misc_RNA (1)...(19): siRNA sense strand
gaaagacucaacuuacuuc

SEQ ID NO: 845765 - RNA, 19 nt, Homo sapiens
  misc_RNA (1)...(19): siRNA sense strand
ucagaagaguucccagauu

SEQ ID NO: 845766 - RNA, 19 nt, Homo sapiens
  misc_RNA (1)...(19): siRNA sense strand
cgaacuggaugauacuuau

SEQ ID NO: 845767 - RNA, 19 nt, Homo sapiens
  misc_RNA (1)...(19): siRNA sense strand
gccaaucacugaauauaag

SEQ ID NO: 845768 - RNA, 19 nt, Homo sapiens
  misc_RNA (1)...(19): siRNA sense strand
aaagaugggucagaaauca

SEQ ID NO: 845769 - RNA, 19 nt, Homo sapiens
  misc_RNA (1)...(19): siRNA sense strand
agaauagcuuuccauauga

SEQ ID NO: 845770 - RNA, 19 nt, Homo sapiens
  misc_RNA (1)...(19): siRNA sense strand
agaaauagccugcagaagu

SEQ ID NO: 845771 - RNA, 19 nt, Homo sapiens
  misc_RNA (1)...(19): siRNA sense strand
uagagcugcuucugaaauu

SEQ ID NO: 845772 - RNA, 19 nt, Homo sapiens
  misc_RNA (1)...(19): siRNA sense strand
ucaaagaauccuuggaauu

SEQ ID NO: 845773 - RNA, 19 nt, Homo sapiens
  misc_RNA (1)...(19): siRNA sense strand
gaaugagcuuuccuuagau

SEQ ID NO: 845774 - RNA, 19 nt, Homo sapiens
  misc_RNA (1)...(19): siRNA sense strand
guacaacacacagcucuuu

SEQ ID NO: 845775 - RNA, 19 nt, Homo sapiens
  misc_RNA (1)...(19): siRNA sense strand
agacucaacuuacuuccuu

SEQ ID NO: 845776 - RNA, 19 nt, Homo sapiens
  misc_RNA (1)...(19): siRNA sense strand
gaugcacaguguucucaaa

SEQ ID NO: 845777 - RNA, 19 nt, Homo sapiens
  misc_RNA (1)...(19): siRNA sense strand
agagagaccugaaccaucu

SEQ ID NO: 845778 - RNA, 19 nt, Homo sapiens
  misc_RNA (1)...(19): siRNA sense strand
ucagauacguucccacauc

SEQ ID NO: 845779 - RNA, 19 nt, Homo sapiens
  misc_RNA (1)...(19): siRNA sense strand
aaagaauccuuggaauuga

SEQ ID NO: 845780 - RNA, 19 nt, Homo sapiens
  misc_RNA (1)...(19): siRNA sense strand
caucaaagaauccuuggaa

SEQ ID NO: 845781 - RNA, 19 nt, Homo sapiens
  misc_RNA (1)...(19): siRNA sense strand
gagaaacagcucuacuuau

SEQ ID NO: 845782 - RNA, 19 nt, Homo sapiens
  misc_RNA (1)...(19): siRNA sense strand
caagaaauagccugcagaa

SEQ ID NO: 845783 - RNA, 19 nt, Homo sapiens
  misc_RNA (1)...(19): siRNA sense strand
caagcaacaugucaucaca

SEQ ID NO: 845784 - RNA, 19 nt, Homo sapiens
  misc_RNA (1)...(19): siRNA sense strand
ccacagauuuccuuaagac

SEQ ID NO: 845785 - RNA, 19 nt, Homo sapiens
  misc_RNA (1)...(19): siRNA sense strand
ugaauaugcugauaaugca

SEQ ID NO: 845786 - RNA, 19 nt, Homo sapiens
  misc_RNA (1)...(19): siRNA sense strand
uauaagaggccaagcuuug

SEQ ID NO: 845787 - RNA, 19 nt, Homo sapiens
  misc_RNA (1)...(19): siRNA sense strand
acacuaccguggucaaaga

SEQ ID NO: 845788 - RNA, 19 nt, Homo sapiens
  misc_RNA (1)...(19): siRNA sense strand
gagcuguucuggaagagau

SEQ ID NO: 845789 - RNA, 19 nt, Homo sapiens
  misc_RNA (1)...(19): siRNA sense strand
cuacugaucaacauacuuu

SEQ ID NO: 845790 - RNA, 19 nt, Homo sapiens
  misc_RNA (1)...(19): siRNA sense strand
gccaagcuuugaagaauca

SEQ ID NO: 845791 - RNA, 19 nt, Homo sapiens
  misc_RNA (1)...(19): siRNA sense strand
ggaugauacuuaugaagag

SEQ ID NO: 845792 - RNA, 19 nt, Homo sapiens
  misc_RNA (1)...(19): siRNA sense strand
caacaugucaucacacuac

SEQ ID NO: 845793 - RNA, 19 nt, Homo sapiens
  misc_RNA (1)...(19): siRNA sense strand
gaauauaagucagauuucc

SEQ ID NO: 845794 - RNA, 19 nt, Homo sapiens
  misc_RNA (1)...(19): siRNA sense strand
ugagcaaucuguauaagag

SEQ ID NO: 845795 - RNA, 19 nt, Homo sapiens
  misc_RNA (1)...(19): siRNA sense strand
gcagacagucaacgaaguu

SEQ ID NO: 845796 - RNA, 19 nt, Homo sapiens
  misc_RNA (1)...(19): siRNA sense strand
ggaauuugaagaagcagaa

SEQ ID NO: 845797 - RNA, 19 nt, Homo sapiens
  misc_RNA (1)...(19): siRNA sense strand
gaagagauaccaaaauuca

SEQ ID NO: 845798 - RNA, 19 nt, Homo sapiens
  misc_RNA (1)...(19): siRNA sense strand
ccagaaugagcuuuccuua

SEQ ID NO: 845799 - RNA, 19 nt, Homo sapiens
  misc_RNA (1)...(19): siRNA sense strand
gaccuucaacagcaaauuu

SEQ ID NO: 845800 - RNA, 19 nt, Homo sapiens
  misc_RNA (1)...(19): siRNA sense strand
caacuuacuuccuucucau

SEQ ID NO: 845801 - RNA, 19 nt, Homo sapiens
  misc_RNA (1)...(19): siRNA sense strand
agagagacuucuuaaaucu

SEQ ID NO: 845802 - RNA, 19 nt, Homo sapiens
  misc_RNA (1)...(19): siRNA sense strand
ugaagaggaauuugaagaa

SEQ ID NO: 845803 - RNA, 19 nt, Homo sapiens
  misc_RNA (1)...(19): siRNA sense strand
agucagauuuccacagauu

SEQ ID NO: 845804 - RNA, 19 nt, Homo sapiens
  misc_RNA (1)...(19): siRNA sense strand
gaagaguucccagauuuca

SEQ ID NO: 845805 - RNA, 19 nt, Homo sapiens
  misc_RNA (1)...(19): siRNA sense strand
gcacaguguucucaaaaug

SEQ ID NO: 845806 - RNA, 19 nt, Homo sapiens
  misc_RNA (1)...(19): siRNA sense strand
agaagaauagcuuuccaua

SEQ ID NO: 845807 - RNA, 19 nt, Homo sapiens
  misc_RNA (1)...(19): siRNA sense strand
aaagucaucacuguuguua

SEQ ID NO: 845808 - RNA, 19 nt, Homo sapiens
  misc_RNA (1)...(19): siRNA sense strand
cauccucgaucaagaagug

SEQ ID NO: 845809 - RNA, 19 nt, Homo sapiens
  misc_RNA (1)...(19): siRNA sense strand
uuccaacucuguuaaagaa

SEQ ID NO: 845810 - RNA, 19 nt, Homo sapiens
  misc_RNA (1)...(19): siRNA sense strand
gcucagaguccaucaucaa

SEQ ID NO: 845811 - RNA, 19 nt, Homo sapiens
  misc_RNA (1)...(19): siRNA sense strand
caaaugaaagacucaacuu

SEQ ID NO: 845812 - RNA, 19 nt, Homo sapiens
  misc_RNA (1)...(19): siRNA sense strand
aggagaaacuucaaacaca

SEQ ID NO: 845813 - RNA, 19 nt, Homo sapiens
  misc_RNA (1)...(19): siRNA sense strand
ccacuuuccaacucuguua

SEQ ID NO: 845814 - RNA, 19 nt, Homo sapiens
  misc_RNA (1)...(19): siRNA sense strand
gauuccagaccauagcuua

SEQ ID NO: 845815 - RNA, 19 nt, Homo sapiens
  misc_RNA (1)...(19): siRNA sense strand
guguaucacuugaaagcaa

SEQ ID NO: 845816 - RNA, 19 nt, Homo sapiens
  misc_RNA (1)...(19): siRNA sense strand
cuaccguggucaaagagua

SEQ ID NO: 845817 - RNA, 19 nt, Homo sapiens
  misc_RNA (1)...(19): siRNA sense strand
ugauauuacugaccagaau

SEQ ID NO: 845818 - RNA, 19 nt, Homo sapiens
  misc_RNA (1)...(19): siRNA sense strand
ucaacuuacuuccuucuca

SEQ ID NO: 845819 - RNA, 19 nt, Homo sapiens
  misc_RNA (1)...(19): siRNA sense strand
agaaguaagccuauaacaa

SEQ ID NO: 845820 - RNA, 19 nt, Homo sapiens
  misc_RNA (1)...(19): siRNA sense strand
uuugcuagguagagauuua

SEQ ID NO: 845821 - RNA, 19 nt, Homo sapiens
  misc_RNA (1)...(19): siRNA sense strand
caaggacacuuugcuaggu

SEQ ID NO: 845822 - RNA, 19 nt, Homo sapiens
  misc_RNA (1)...(19): siRNA sense strand
ccaacucuguuaaagaaag

SEQ ID NO: 845823 - RNA, 19 nt, Homo sapiens
  misc_RNA (1)...(19): siRNA sense strand
gcucaaucaucaucuagag

SEQ ID NO: 845824 - RNA, 19 nt, Homo sapiens
  misc_RNA (1)...(19): siRNA sense strand
gaagugcagcugcucaauc

SEQ ID NO: 845825 - RNA, 19 nt, Homo sapiens
  misc_RNA (1)...(19): siRNA sense strand
uuaaagaaagcuccaguug

SEQ ID NO: 845826 - RNA, 19 nt, Homo sapiens
  misc_RNA (1)...(19): siRNA sense strand
aaacauagagagaccugaa

SEQ ID NO: 845827 - RNA, 19 nt, Homo sapiens
  misc_RNA (1)...(19): siRNA sense strand
ugacacuacugaucaacau

SEQ ID NO: 845828 - RNA, 19 nt, Homo sapiens
  misc_RNA (1)...(19): siRNA sense strand
gagcuuuccuuagaugaca

SEQ ID NO: 845829 - RNA, 19 nt, Homo sapiens
  misc_RNA (1)...(19): siRNA sense strand
gcugcucaaucaucaucua

SEQ ID NO: 845830 - RNA, 19 nt, Homo sapiens
  misc_RNA (1)...(19): siRNA sense strand
agucaucacuguuguuaca

SEQ ID NO: 845831 - RNA, 19 nt, Homo sapiens
  misc_RNA (1)...(19): siRNA sense strand
guauucuucugacauugaa

SEQ ID NO: 845832 - RNA, 19 nt, Homo sapiens
  misc_RNA (1)...(19): siRNA sense strand
caacaagcaacaugucauc

SEQ ID NO: 845833 - RNA, 19 nt, Homo sapiens
  misc_RNA (1)...(19): siRNA sense strand
aagugcagcugcucaauca

SEQ ID NO: 845834 - RNA, 19 nt, Homo sapiens
  misc_RNA (1)...(19): siRNA sense strand
ucacagagaccuucaacag

SEQ ID NO: 845835 - RNA, 19 nt, Homo sapiens
  misc_RNA (1)...(19): siRNA sense strand
ccugaaccaucucugaaga

SEQ ID NO: 845836 - RNA, 19 nt, Homo sapiens
  misc_RNA (1)...(19): siRNA sense strand
uggaagagauaccaaaauu

SEQ ID NO: 845837 - RNA, 19 nt, Homo sapiens
  misc_RNA (1)...(19): siRNA sense strand
cagcuuaaccucagaagag

SEQ ID NO: 845838 - RNA, 19 nt, Homo sapiens
  misc_RNA (1)...(19): siRNA sense strand
gaacuggaugauacuuaug

SEQ ID NO: 845839 - RNA, 19 nt, Homo sapiens
  misc_RNA (1)...(19): siRNA sense strand
ggaggaagauuuucucaac

SEQ ID NO: 845840 - RNA, 19 nt, Homo sapiens
  misc_RNA (1)...(19): siRNA sense strand
guugaggaauugagcuguu

SEQ ID NO: 845841 - RNA, 19 nt, Homo sapiens
  misc_RNA (1)...(19): siRNA sense strand
ggaagacgcuuauuaaaug

SEQ ID NO: 845842 - RNA, 19 nt, Homo sapiens
  misc_RNA (1)...(19): siRNA sense strand
gaagguaucuuuacuagga

SEQ ID NO: 845843 - RNA, 19 nt, Homo sapiens
  misc_RNA (1)...(19): siRNA sense strand
gaugaacgauugcauagua

SEQ ID NO: 845844 - RNA, 19 nt, Homo sapiens
  misc_RNA (1)...(19): siRNA sense strand
ccaagaaacuucaagcuaa

SEQ ID NO: 845845 - RNA, 19 nt, Homo sapiens
  misc_RNA (1)...(19): siRNA sense strand
ggacguagcauaccagaua

SEQ ID NO: 845846 - RNA, 19 nt, Homo sapiens
  misc_RNA (1)...(19): siRNA sense strand
gaagagauauacuaaagga

SEQ ID NO: 845847 - RNA, 19 nt, Homo sapiens
  misc_RNA (1)...(19): siRNA sense strand
gaagaggucuaaugaagga

SEQ ID NO: 845848 - RNA, 19 nt, Homo sapiens
  misc_RNA (1)...(19): siRNA sense strand
guagaacccuugacaaaug

SEQ ID NO: 845849 - RNA, 19 nt, Homo sapiens
  misc_RNA (1)...(19): siRNA sense strand
gaacaaagaacucucaaag

SEQ ID NO: 845850 - RNA, 19 nt, Homo sapiens
  misc_RNA (1)...(19): siRNA sense strand
caagaaacuucaagcuaaa

SEQ ID NO: 845851 - RNA, 19 nt, Homo sapiens
  misc_RNA (1)...(19): siRNA sense strand
gaagacgcuuauuaaauga

SEQ ID NO: 845852 - RNA, 19 nt, Homo sapiens
  misc_RNA (1)...(19): siRNA sense strand
caaguaaauucccaacaaa

SEQ ID NO: 845853 - RNA, 19 nt, Homo sapiens
  misc_RNA (1)...(19): siRNA sense strand
ccaaguaaauucccaacaa

SEQ ID NO: 845854 - RNA, 19 nt, Homo sapiens
  misc_RNA (1)...(19): siRNA sense strand
gcaauuagagauucaagaa

SEQ ID NO: 845855 - RNA, 19 nt, Homo sapiens
  misc_RNA (1)...(19): siRNA sense strand
ugagagagguacaauaaau

SEQ ID NO: 845856 - RNA, 19 nt, Homo sapiens
  misc_RNA (1)...(19): siRNA sense strand
gagauauacuaaaggauga

SEQ ID NO: 845857 - RNA, 19 nt, Homo sapiens
  misc_RNA (1)...(19): siRNA sense strand
ugaaagguguuaauggaaa

SEQ ID NO: 845858 - RNA, 19 nt, Homo sapiens
  misc_RNA (1)...(19): siRNA sense strand
ggaagggaaaggcguaaua

SEQ ID NO: 845859 - RNA, 19 nt, Homo sapiens
  misc_RNA (1)...(19): siRNA sense strand
gagauaaagacacaacuaa

SEQ ID NO: 845860 - RNA, 19 nt, Homo sapiens
  misc_RNA (1)...(19): siRNA sense strand
ccaggagacugauguagaa

SEQ ID NO: 845861 - RNA, 19 nt, Homo sapiens
  misc_RNA (1)...(19): siRNA sense strand
cuacacaacugaagaguca

SEQ ID NO: 845862 - RNA, 19 nt, Homo sapiens
  misc_RNA (1)...(19): siRNA sense strand
guuguuaccuuaagccaaa

SEQ ID NO: 845863 - RNA, 19 nt, Homo sapiens
  misc_RNA (1)...(19): siRNA sense strand
gaagagguauaauaauagg

SEQ ID NO: 845864 - RNA, 19 nt, Homo sapiens
  misc_RNA (1)...(19): siRNA sense strand
gaugaagaaucaggugaaa

SEQ ID NO: 845865 - RNA, 19 nt, Homo sapiens
  misc_RNA (1)...(19): siRNA sense strand
gggaagacgcuuauuaaau

SEQ ID NO: 845866 - RNA, 19 nt, Homo sapiens
  misc_RNA (1)...(19): siRNA sense strand
gcuuaaacaucaagauuca

SEQ ID NO: 845867 - RNA, 19 nt, Homo sapiens
  misc_RNA (1)...(19): siRNA sense strand
ggcaaagaauuauuacuca

SEQ ID NO: 845868 - RNA, 19 nt, Homo sapiens
  misc_RNA (1)...(19): siRNA sense strand
accaaucagugcacaauua

SEQ ID NO: 845869 - RNA, 19 nt, Homo sapiens
  misc_RNA (1)...(19): siRNA sense strand
ccgagagacugauaaagaa

SEQ ID NO: 845870 - RNA, 19 nt, Homo sapiens
  misc_RNA (1)...(19): siRNA sense strand
caucaagacucaaugucaa

SEQ ID NO: 845871 - RNA, 19 nt, Homo sapiens
  misc_RNA (1)...(19): siRNA sense strand
aaaccuaccuauaaagugu

SEQ ID NO: 845872 - RNA, 19 nt, Homo sapiens
  misc_RNA (1)...(19): siRNA sense strand
caagacguuuccuuuagaa

SEQ ID NO: 845873 - RNA, 19 nt, Homo sapiens
  misc_RNA (1)...(19): siRNA sense strand
acacaagacguuuccuuua

SEQ ID NO: 845874 - RNA, 19 nt, Homo sapiens
  misc_RNA (1)...(19): siRNA sense strand
ggaaagacacaagacguuu

SEQ ID NO: 845875 - RNA, 19 nt, Homo sapiens
  misc_RNA (1)...(19): siRNA sense strand
gaaaggcguaauacucgua

SEQ ID NO: 845876 - RNA, 19 nt, Homo sapiens
  misc_RNA (1)...(19): siRNA sense strand
ggaagagguauaauaauag

SEQ ID NO: 845877 - RNA, 19 nt, Homo sapiens
  misc_RNA (1)...(19): siRNA sense strand
agaaagaguuacccugaga

SEQ ID NO: 845878 - RNA, 19 nt, Homo sapiens
  misc_RNA (1)...(19): siRNA sense strand
ggccugauauagaacaauu

SEQ ID NO: 845879 - RNA, 19 nt, Homo sapiens
  misc_RNA (1)...(19): siRNA sense strand
ucaagaagcgaaucucaaa

SEQ ID NO: 845880 - RNA, 19 nt, Homo sapiens
  misc_RNA (1)...(19): siRNA sense strand
aaucagaaaugcaagugaa

SEQ ID NO: 845881 - RNA, 19 nt, Homo sapiens
  misc_RNA (1)...(19): siRNA sense strand
gcaagugaaggaacaaaga

SEQ ID NO: 845882 - RNA, 19 nt, Homo sapiens
  misc_RNA (1)...(19): siRNA sense strand
gaacaucaagauucagugu

SEQ ID NO: 845883 - RNA, 19 nt, Homo sapiens
  misc_RNA (1)...(19): siRNA sense strand
uggaagagauauacuaaag

SEQ ID NO: 845884 - RNA, 19 nt, Homo sapiens
  misc_RNA (1)...(19): siRNA sense strand
gagaggugcuuugggaaga

SEQ ID NO: 845885 - RNA, 19 nt, Homo sapiens
  misc_RNA (1)...(19): siRNA sense strand
ccacucaccacuccugaua

SEQ ID NO: 845886 - RNA, 19 nt, Homo sapiens
  misc_RNA (1)...(19): siRNA sense strand
cacaagacguuuccuuuag

SEQ ID NO: 845887 - RNA, 19 nt, Homo sapiens
  misc_RNA (1)...(19): siRNA sense strand
agaacaaacuuaccaagca

SEQ ID NO: 845888 - RNA, 19 nt, Homo sapiens
  misc_RNA (1)...(19): siRNA sense strand
agacauccaccuuccuuua

SEQ ID NO: 845889 - RNA, 19 nt, Homo sapiens
  misc_RNA (1)...(19): siRNA sense strand
ugaguacucuucacccuau

SEQ ID NO: 845890 - RNA, 19 nt, Homo sapiens
  misc_RNA (1)...(19): siRNA sense strand
agaggaaacuuaugaguac

SEQ ID NO: 845891 - RNA, 19 nt, Homo sapiens
  misc_RNA (1)...(19): siRNA sense strand
acaaagauauguccguaca

SEQ ID NO: 845892 - RNA, 19 nt, Homo sapiens
  misc_RNA (1)...(19): siRNA sense strand
ggauauaucacuugaacau

SEQ ID NO: 845893 - RNA, 19 nt, Homo sapiens
  misc_RNA (1)...(19): siRNA sense strand
gacacaagacguuuccuuu

SEQ ID NO: 845894 - RNA, 19 nt, Homo sapiens
  misc_RNA (1)...(19): siRNA sense strand
caacuaaggacucacuaug

SEQ ID NO: 845895 - RNA, 19 nt, Homo sapiens
  misc_RNA (1)...(19): siRNA sense strand
uggaagaggucuaaugaag

SEQ ID NO: 845896 - RNA, 19 nt, Homo sapiens
  misc_RNA (1)...(19): siRNA sense strand
caacauacagucaaagagu

SEQ ID NO: 845897 - RNA, 19 nt, Homo sapiens
  misc_RNA (1)...(19): siRNA sense strand
gacguagcauaccagauaa

SEQ ID NO: 845898 - RNA, 19 nt, Homo sapiens
  misc_RNA (1)...(19): siRNA sense strand
caucaagaaucauugucaa

SEQ ID NO: 845899 - RNA, 19 nt, Homo sapiens
  misc_RNA (1)...(19): siRNA sense strand
aauaaauucuggaguggaa

SEQ ID NO: 845900 - RNA, 19 nt, Homo sapiens
  misc_RNA (1)...(19): siRNA sense strand
acaagacguuuccuuuaga

SEQ ID NO: 845901 - RNA, 19 nt, Homo sapiens
  misc_RNA (1)...(19): siRNA sense strand
augaaaggcuuguaguuga

SEQ ID NO: 845902 - RNA, 19 nt, Homo sapiens
  misc_RNA (1)...(19): siRNA sense strand
gcuauuggaagagauauaa

SEQ ID NO: 845903 - RNA, 19 nt, Homo sapiens
  misc_RNA (1)...(19): siRNA sense strand
caagugcaauuagagauuc

SEQ ID NO: 845904 - RNA, 19 nt, Homo sapiens
  misc_RNA (1)...(19): siRNA sense strand
caauuuaucacccuuugaa

SEQ ID NO: 845905 - RNA, 19 nt, Homo sapiens
  misc_RNA (1)...(19): siRNA sense strand
gauaaagacacaacuaagg

SEQ ID NO: 845906 - RNA, 19 nt, Homo sapiens
  misc_RNA (1)...(19): siRNA sense strand
ccaaucagugcacaauuaa

SEQ ID NO: 845907 - RNA, 19 nt, Homo sapiens
  misc_RNA (1)...(19): siRNA sense strand
acaauugacagaugcauuu

SEQ ID NO: 845908 - RNA, 19 nt, Homo sapiens
  misc_RNA (1)...(19): siRNA sense strand
ucaucaagauucaaaguca

SEQ ID NO: 845909 - RNA, 19 nt, Homo sapiens
  misc_RNA (1)...(19): siRNA sense strand
ggagaaggacguagcauac

SEQ ID NO: 845910 - RNA, 19 nt, Homo sapiens
  misc_RNA (1)...(19): siRNA sense strand
gaacuucuuugccuaugcu

SEQ ID NO: 845911 - RNA, 19 nt, Homo sapiens
  misc_RNA (1)...(19): siRNA sense strand
cgaaaguuguuaccuuaag

SEQ ID NO: 845912 - RNA, 19 nt, Homo sapiens
  misc_RNA (1)...(19): siRNA sense strand
uucgaaaguuguuaccuua

SEQ ID NO: 845913 - RNA, 19 nt, Homo sapiens
  misc_RNA (1)...(19): siRNA sense strand
ggaacaaagaacucucaaa

SEQ ID NO: 845914 - RNA, 19 nt, Homo sapiens
  misc_RNA (1)...(19): siRNA sense strand
gaaaguuguuaccuuaagc

SEQ ID NO: 845915 - RNA, 19 nt, Homo sapiens
  misc_RNA (1)...(19): siRNA sense strand
gcuauuggaagagguauaa

SEQ ID NO: 845916 - RNA, 19 nt, Homo sapiens
  misc_RNA (1)...(19): siRNA sense strand
caaccacgacacaauuaaa

SEQ ID NO: 845917 - RNA, 19 nt, Homo sapiens
  misc_RNA (1)...(19): siRNA sense strand
cuugaaagguguuaaugga

SEQ ID NO: 845918 - RNA, 19 nt, Homo sapiens
  misc_RNA (1)...(19): siRNA sense strand
agacgcaguuaaagagaaa

SEQ ID NO: 845919 - RNA, 19 nt, Homo sapiens
  misc_RNA (1)...(19): siRNA sense strand
ugagacugaugaacgauug

SEQ ID NO: 845920 - RNA, 19 nt, Homo sapiens
  misc_RNA (1)...(19): siRNA sense strand
aaacuggaaaugcaaauug

SEQ ID NO: 845921 - RNA, 19 nt, Homo sapiens
  misc_RNA (1)...(19): siRNA sense strand
gccaaucacuacacaacug

SEQ ID NO: 845922 - RNA, 19 nt, Homo sapiens
  misc_RNA (1)...(19): siRNA sense strand
gagagagguacaauaaaug

SEQ ID NO: 845923 - RNA, 19 nt, Homo sapiens
  misc_RNA (1)...(19): siRNA sense strand
agacugauauagaaagcuu

SEQ ID NO: 845924 - RNA, 19 nt, Homo sapiens
  misc_RNA (1)...(19): siRNA sense strand
gcaucaagacucaauguca

SEQ ID NO: 845925 - RNA, 19 nt, Homo sapiens
  misc_RNA (1)...(19): siRNA sense strand
ucaucaagauucaguguca

SEQ ID NO: 845926 - RNA, 19 nt, Homo sapiens
  misc_RNA (1)...(19): siRNA sense strand
gggcaaagaauuauuacuc

SEQ ID NO: 845927 - RNA, 19 nt, Homo sapiens
  misc_RNA (1)...(19): siRNA sense strand
ccaccuuccuuuacugaau

SEQ ID NO: 845928 - RNA, 19 nt, Homo sapiens
  misc_RNA (1)...(19): siRNA sense strand
aagaggaaacuuaugagua

SEQ ID NO: 845929 - RNA, 19 nt, Homo sapiens
  misc_RNA (1)...(19): siRNA sense strand
gaacgauugcauaguacaa

SEQ ID NO: 845930 - RNA, 19 nt, Homo sapiens
  misc_RNA (1)...(19): siRNA sense strand
gcgaaucucaaaccaagaa

SEQ ID NO: 845931 - RNA, 19 nt, Homo sapiens
  misc_RNA (1)...(19): siRNA sense strand
ucucaaagggcaaagaauu

SEQ ID NO: 845932 - RNA, 19 nt, Homo sapiens
  misc_RNA (1)...(19): siRNA sense strand
acucaccacuccugauaaa

SEQ ID NO: 845933 - RNA, 19 nt, Homo sapiens
  misc_RNA (1)...(19): siRNA sense strand
gaaagguguuaauggaaaa

SEQ ID NO: 845934 - RNA, 19 nt, Homo sapiens
  misc_RNA (1)...(19): siRNA sense strand
caccacuccugauaaagaa

SEQ ID NO: 845935 - RNA, 19 nt, Homo sapiens
  misc_RNA (1)...(19): siRNA sense strand
acugagagagguacaauaa

SEQ ID NO: 845936 - RNA, 19 nt, Homo sapiens
  misc_RNA (1)...(19): siRNA sense strand
guauuguaguaccaaauga

SEQ ID NO: 845937 - RNA, 19 nt, Homo sapiens
  misc_RNA (1)...(19): siRNA sense strand
cauaaugaaguaccaaaug

SEQ ID NO: 845938 - RNA, 19 nt, Homo sapiens
  misc_RNA (1)...(19): siRNA sense strand
aaacuuaugaguacucuuc

SEQ ID NO: 845939 - RNA, 19 nt, Homo sapiens
  misc_RNA (1)...(19): siRNA sense strand
ggcagaugcuauuggaaga

SEQ ID NO: 845940 - RNA, 19 nt, Homo sapiens
  misc_RNA (1)...(19): siRNA sense strand
caagugaaggaacaaagaa

SEQ ID NO: 845941 - RNA, 19 nt, Homo sapiens
  misc_RNA (1)...(19): siRNA sense strand
ccaaagaccugcagcauug

SEQ ID NO: 845942 - RNA, 19 nt, Homo sapiens
  misc_RNA (1)...(19): siRNA sense strand
gcaaauuacucagaugauu

SEQ ID NO: 845943 - RNA, 19 nt, Homo sapiens
  misc_RNA (1)...(19): siRNA sense strand
ggacaucuauuugcaagaa

SEQ ID NO: 845944 - RNA, 19 nt, Homo sapiens
  misc_RNA (1)...(19): siRNA sense strand
gaaauaagaucugacaacu

SEQ ID NO: 845945 - RNA, 19 nt, Homo sapiens
  misc_RNA (1)...(19): siRNA sense strand
gaagaaauaagaucugaca

SEQ ID NO: 845946 - RNA, 19 nt, Homo sapiens
  misc_RNA (1)...(19): siRNA sense strand
acagagagguuccagaaau

SEQ ID NO: 845947 - RNA, 19 nt, Homo sapiens
  misc_RNA (1)...(19): siRNA sense strand
gcccugagcuguucuuucu

SEQ ID NO: 845948 - RNA, 19 nt, Homo sapiens
  misc_RNA (1)...(19): siRNA sense strand
uuacucagaugauuccaaa

SEQ ID NO: 845949 - RNA, 19 nt, Homo sapiens
  misc_RNA (1)...(19): siRNA sense strand
ccgauuccuugcuuucuua

SEQ ID NO: 845950 - RNA, 19 nt, Homo sapiens
  misc_RNA (1)...(19): siRNA sense strand
aaacagagagguuccagaa

SEQ ID NO: 845951 - RNA, 19 nt, Homo sapiens
  misc_RNA (1)...(19): siRNA sense strand
ggacuuuccucggucuuga

SEQ ID NO: 845952 - RNA, 19 nt, Homo sapiens
  misc_RNA (1)...(19): siRNA sense strand
cagagagguuccagaaaug

SEQ ID NO: 845953 - RNA, 19 nt, Homo sapiens
  misc_RNA (1)...(19): siRNA sense strand
ucagaaccagcuacaauuu

SEQ ID NO: 845954 - RNA, 19 nt, Homo sapiens
  misc_RNA (1)...(19): siRNA sense strand
caaauuacucagaugauuc

SEQ ID NO: 845955 - RNA, 19 nt, Homo sapiens
  misc_RNA (1)...(19): siRNA sense strand
uuagacuggucagcaaaua

SEQ ID NO: 845956 - RNA, 19 nt, Homo sapiens
  misc_RNA (1)...(19): siRNA sense strand
cgagaucucagacaggaaa

SEQ ID NO: 845957 - RNA, 19 nt, Homo sapiens
  misc_RNA (1)...(19): siRNA sense strand
gucagaaccagcuacaauu

SEQ ID NO: 845958 - RNA, 19 nt, Homo sapiens
  misc_RNA (1)...(19): siRNA sense strand
uuuccucggucuugauaaa

SEQ ID NO: 845959 - RNA, 19 nt, Homo sapiens
  misc_RNA (1)...(19): siRNA sense strand
gcaaauaucaaaacgagau

SEQ ID NO: 845960 - RNA, 19 nt, Homo sapiens
  misc_RNA (1)...(19): siRNA sense strand
cuucuucccuuucuucucu

SEQ ID NO: 845961 - RNA, 19 nt, Homo sapiens
  misc_RNA (1)...(19): siRNA sense strand
ggccagagagaacuaaagu

SEQ ID NO: 845962 - RNA, 19 nt, Homo sapiens
  misc_RNA (1)...(19): siRNA sense strand
gcaucgggacaucuauuug

SEQ ID NO: 845963 - RNA, 19 nt, Homo sapiens
  misc_RNA (1)...(19): siRNA sense strand
cuaaaguuccuguguaugc

SEQ ID NO: 845964 - RNA, 19 nt, Homo sapiens
  misc_RNA (1)...(19): siRNA sense strand
agaaccagcuacaauuuug

SEQ ID NO: 845965 - RNA, 19 nt, Homo sapiens
  misc_RNA (1)...(19): siRNA sense strand
cccaaagaccugcagcauu

SEQ ID NO: 845966 - RNA, 19 nt, Homo sapiens
  misc_RNA (1)...(19): siRNA sense strand
agaaauaagaucugacaac

SEQ ID NO: 845967 - RNA, 19 nt, Homo sapiens
  misc_RNA (1)...(19): siRNA sense strand
agucagaaccagcuacaau

SEQ ID NO: 845968 - RNA, 19 nt, Homo sapiens
  misc_RNA (1)...(19): siRNA sense strand
gagcguguccugcggaaaa

SEQ ID NO: 845969 - RNA, 19 nt, Homo sapiens
  misc_RNA (1)...(19): siRNA sense strand
uccuguguaugcugagaua

SEQ ID NO: 845970 - RNA, 19 nt, Homo sapiens
  misc_RNA (1)...(19): siRNA sense strand
caagucagaaccagcuaca

SEQ ID NO: 845971 - RNA, 19 nt, Homo sapiens
  misc_RNA (1)...(19): siRNA sense strand
uaaaguuccuguguaugcu

SEQ ID NO: 845972 - RNA, 19 nt, Homo sapiens
  misc_RNA (1)...(19): siRNA sense strand
cugcaaauuacucagauga

SEQ ID NO: 845973 - RNA, 19 nt, Homo sapiens
  misc_RNA (1)...(19): siRNA sense strand
ucuuuagacuggucagcaa

SEQ ID NO: 845974 - RNA, 19 nt, Homo sapiens
  misc_RNA (1)...(19): siRNA sense strand
caaagaccugcagcauuga

SEQ ID NO: 845975 - RNA, 19 nt, Homo sapiens
  misc_RNA (1)...(19): siRNA sense strand
aaucugugccucugcauca

SEQ ID NO: 845976 - RNA, 19 nt, Homo sapiens
  misc_RNA (1)...(19): siRNA sense strand
agacuggucagcaaauauc

SEQ ID NO: 845977 - RNA, 19 nt, Homo sapiens
  misc_RNA (1)...(19): siRNA sense strand
agacaaagacgaacaaaua

SEQ ID NO: 845978 - RNA, 19 nt, Homo sapiens
  misc_RNA (1)...(19): siRNA sense strand
caucucaccuguguucaaa

SEQ ID NO: 845979 - RNA, 19 nt, Homo sapiens
  misc_RNA (1)...(19): siRNA sense strand
gacaaagacgaacaaauau

SEQ ID NO: 845980 - RNA, 19 nt, Homo sapiens
  misc_RNA (1)...(19): siRNA sense strand
caagcagaaugcaugcaaa

SEQ ID NO: 845981 - RNA, 19 nt, Homo sapiens
  misc_RNA (1)...(19): siRNA sense strand
gagcaucucaccuguguuc

SEQ ID NO: 845982 - RNA, 19 nt, Homo sapiens
  misc_RNA (1)...(19): siRNA sense strand
caaccuauaucugauuucu

SEQ ID NO: 845983 - RNA, 19 nt, Homo sapiens
  misc_RNA (1)...(19): siRNA sense strand
aguaguaggugccgugaga

SEQ ID NO: 845984 - RNA, 19 nt, Homo sapiens
  misc_RNA (1)...(19): siRNA sense strand
uguaucugcugaaucauau

SEQ ID NO: 845985 - RNA, 19 nt, Homo sapiens
  misc_RNA (1)...(19): siRNA sense strand
accuauaucugauuucugu

SEQ ID NO: 845986 - RNA, 19 nt, Homo sapiens
  misc_RNA (1)...(19): siRNA sense strand
caacagccgugagcaucuc

SEQ ID NO: 845987 - RNA, 19 nt, Homo sapiens
  misc_RNA (1)...(19): siRNA sense strand
gcagaaugcaugcaaaaga

SEQ ID NO: 845988 - RNA, 19 nt, Homo sapiens
  misc_RNA (1)...(19): siRNA sense strand
ccaagcagaaugcaugcaa

SEQ ID NO: 845989 - RNA, 19 nt, Homo sapiens
  misc_RNA (1)...(19): siRNA sense strand
uccaaccuauaucugauuu

SEQ ID NO: 845990 - RNA, 19 nt, Homo sapiens
  misc_RNA (1)...(19): siRNA sense strand
gcaucucaccuguguucaa

SEQ ID NO: 845991 - RNA, 19 nt, Homo sapiens
  misc_RNA (1)...(19): siRNA sense strand
aagcagggcccagcucuga

SEQ ID NO: 845992 - RNA, 19 nt, Homo sapiens
  misc_RNA (1)...(19): siRNA sense strand
caagacaaagacgaacaaa

SEQ ID NO: 845993 - RNA, 19 nt, Homo sapiens
  misc_RNA (1)...(19): siRNA sense strand
ucacagucccaccagauuc

SEQ ID NO: 845994 - RNA, 19 nt, Homo sapiens
  misc_RNA (1)...(19): siRNA sense strand
acaagacaaagacgaacaa

SEQ ID NO: 845995 - RNA, 19 nt, Homo sapiens
  misc_RNA (1)...(19): siRNA sense strand
uauuccaaccuauaucuga

SEQ ID NO: 845996 - RNA, 19 nt, Homo sapiens
  misc_RNA (1)...(19): siRNA sense strand
caacugagaucaccucuaa

SEQ ID NO: 845997 - RNA, 19 nt, Homo sapiens
  misc_RNA (1)...(19): siRNA sense strand
caaaggaccuguuaauaaa

SEQ ID NO: 845998 - RNA, 19 nt, Homo sapiens
  misc_RNA (1)...(19): siRNA sense strand
gcaaaggaccuguuaauaa

SEQ ID NO: 845999 - RNA, 19 nt, Homo sapiens
  misc_RNA (1)...(19): siRNA sense strand
gaaagcaaaucauaucaug

SEQ ID NO: 846000 - RNA, 19 nt, Homo sapiens
  misc_RNA (1)...(19): siRNA sense strand
caacuuaaacagcacauua

SEQ ID NO: 846001 - RNA, 19 nt, Homo sapiens
  misc_RNA (1)...(19): siRNA sense strand
ucagaaagcuguaauaaac

SEQ ID NO: 846002 - RNA, 19 nt, Homo sapiens
  misc_RNA (1)...(19): siRNA sense strand
ggcaauagcucauguccuu

SEQ ID NO: 846003 - RNA, 19 nt, Homo sapiens
  misc_RNA (1)...(19): siRNA sense strand
gaagaaagcaaaucauauc

SEQ ID NO: 846004 - RNA, 19 nt, Homo sapiens
  misc_RNA (1)...(19): siRNA sense strand
gcacgaaacaugccaagaa

SEQ ID NO: 846005 - RNA, 19 nt, Homo sapiens
  misc_RNA (1)...(19): siRNA sense strand
aaccaucgcuggauauuaa

SEQ ID NO: 846006 - RNA, 19 nt, Homo sapiens
  misc_RNA (1)...(19): siRNA sense strand
gcuguuugcuccuuacuaa

SEQ ID NO: 846007 - RNA, 19 nt, Homo sapiens
  misc_RNA (1)...(19): siRNA sense strand
caaaucauaucaugcaaca

SEQ ID NO: 846008 - RNA, 19 nt, Homo sapiens
  misc_RNA (1)...(19): siRNA sense strand
gaucaccucuaaaguggaa

SEQ ID NO: 846009 - RNA, 19 nt, Homo sapiens
  misc_RNA (1)...(19): siRNA sense strand
gcacaacagugguacuaag

SEQ ID NO: 846010 - RNA, 19 nt, Homo sapiens
  misc_RNA (1)...(19): siRNA sense strand
gcucauguccuucuacuga

SEQ ID NO: 846011 - RNA, 19 nt, Homo sapiens
  misc_RNA (1)...(19): siRNA sense strand
aaacagcacauuagcagua

SEQ ID NO: 846012 - RNA, 19 nt, Homo sapiens
  misc_RNA (1)...(19): siRNA sense strand
acacaggccuccaaaauaa

SEQ ID NO: 846013 - RNA, 19 nt, Homo sapiens
  misc_RNA (1)...(19): siRNA sense strand
auacaguccuuacaacaaa

SEQ ID NO: 846014 - RNA, 19 nt, Homo sapiens
  misc_RNA (1)...(19): siRNA sense strand
uaaaccauuucuucccuuu

SEQ ID NO: 846015 - RNA, 19 nt, Homo sapiens
  misc_RNA (1)...(19): siRNA sense strand
ggcaaaggaccuguuaaua

SEQ ID NO: 846016 - RNA, 19 nt, Homo sapiens
  misc_RNA (1)...(19): siRNA sense strand
ccgaagaaagcaaaucaua

SEQ ID NO: 846017 - RNA, 19 nt, Homo sapiens
  misc_RNA (1)...(19): siRNA sense strand
ggaaacacaggccuccaaa

SEQ ID NO: 846018 - RNA, 19 nt, Homo sapiens
  misc_RNA (1)...(19): siRNA sense strand
cgaagaaagcaaaucauau

SEQ ID NO: 846019 - RNA, 19 nt, Homo sapiens
  misc_RNA (1)...(19): siRNA sense strand
uaaauacaguccuuacaac

SEQ ID NO: 846020 - RNA, 19 nt, Homo sapiens
  misc_RNA (1)...(19): siRNA sense strand
caaaacggcuucuuuacug

SEQ ID NO: 846021 - RNA, 19 nt, Homo sapiens
  misc_RNA (1)...(19): siRNA sense strand
gacgacaacuguggaaauc

SEQ ID NO: 846022 - RNA, 19 nt, Homo sapiens
  misc_RNA (1)...(19): siRNA sense strand
gcagggacaccagcaauau

SEQ ID NO: 846023 - RNA, 19 nt, Homo sapiens
  misc_RNA (1)...(19): siRNA sense strand
cuaaauacaguccuuacaa

SEQ ID NO: 846024 - RNA, 19 nt, Homo sapiens
  misc_RNA (1)...(19): siRNA sense strand
ugagaucaccucuaaagug

SEQ ID NO: 846025 - RNA, 19 nt, Homo sapiens
  misc_RNA (1)...(19): siRNA sense strand
gaaaggcaaaggaccuguu

SEQ ID NO: 846026 - RNA, 19 nt, Homo sapiens
  misc_RNA (1)...(19): siRNA sense strand
cuacugagaccgaggaaga

SEQ ID NO: 846027 - RNA, 19 nt, Homo sapiens
  misc_RNA (1)...(19): siRNA sense strand
aaaccuaaauacaguccuu

SEQ ID NO: 846028 - RNA, 19 nt, Homo sapiens
  misc_RNA (1)...(19): siRNA sense strand
gcaguagaaggcacaaaga

SEQ ID NO: 846029 - RNA, 19 nt, Homo sapiens
  misc_RNA (1)...(19): siRNA sense strand
aaaggcaaaggaccuguua

SEQ ID NO: 846030 - RNA, 19 nt, Homo sapiens
  misc_RNA (1)...(19): siRNA sense strand
guaauaaaccauacauucg

SEQ ID NO: 846031 - RNA, 19 nt, Homo sapiens
  misc_RNA (1)...(19): siRNA sense strand
caguugagauuuaauucug

SEQ ID NO: 846032 - RNA, 19 nt, Homo sapiens
  misc_RNA (1)...(19): siRNA sense strand
caaccaucgcuggauauua

SEQ ID NO: 846033 - RNA, 19 nt, Homo sapiens
  misc_RNA (1)...(19): siRNA sense strand
uuucuucccuuuccucuug

SEQ ID NO: 846034 - RNA, 19 nt, Homo sapiens
  misc_RNA (1)...(19): siRNA sense strand
gcgauggacccgauucaga

SEQ ID NO: 846035 - RNA, 19 nt, Homo sapiens
  misc_RNA (1)...(19): siRNA sense strand
gcacaaaaccauguuagaa

SEQ ID NO: 846036 - RNA, 19 nt, Homo sapiens
  misc_RNA (1)...(19): siRNA sense strand
caaaagcaguguuaugaca

SEQ ID NO: 846037 - RNA, 19 nt, Homo sapiens
  misc_RNA (1)...(19): siRNA sense strand
uugcaaccaucgcuggaua

SEQ ID NO: 846038 - RNA, 19 nt, Homo sapiens
  misc_RNA (1)...(19): siRNA sense strand
cgauggacccgauucagaa

SEQ ID NO: 846039 - RNA, 19 nt, Homo sapiens
  misc_RNA (1)...(19): siRNA sense strand
gauucagaaagcuguaaua

SEQ ID NO: 846040 - RNA, 19 nt, Homo sapiens
  misc_RNA (1)...(19): siRNA sense strand
gcgcacaacagugguacua

SEQ ID NO: 846041 - RNA, 19 nt, Homo sapiens
  misc_RNA (1)...(19): siRNA sense strand
uaucaacgacgacaacugu

SEQ ID NO: 846042 - RNA, 19 nt, Homo sapiens
  misc_RNA (1)...(19): siRNA sense strand
cacgaaacaugccaagaag

SEQ ID NO: 846043 - RNA, 19 nt, Homo sapiens
  misc_RNA (1)...(19): siRNA sense strand
gcuggauauuaaaccauuu

SEQ ID NO: 846044 - RNA, 19 nt, Homo sapiens
  misc_RNA (1)...(19): siRNA sense strand
gcaaccaucgcuggauauu

SEQ ID NO: 846045 - RNA, 19 nt, Homo sapiens
  misc_RNA (1)...(19): siRNA sense strand
agaaagcuguaauaaacca

SEQ ID NO: 846046 - RNA, 19 nt, Homo sapiens
  misc_RNA (1)...(19): siRNA sense strand
caauaccagcucugacaaa

SEQ ID NO: 846047 - RNA, 19 nt, Homo sapiens
  misc_RNA (1)...(19): siRNA sense strand
gagauuuaauucugauagc

SEQ ID NO: 846048 - RNA, 19 nt, Homo sapiens
  misc_RNA (1)...(19): siRNA sense strand
gauggacccgauucagaaa

SEQ ID NO: 846049 - RNA, 19 nt, Homo sapiens
  misc_RNA (1)...(19): siRNA sense strand
gaagcucaaagcacuggaa

SEQ ID NO: 846050 - RNA, 19 nt, Homo sapiens
  misc_RNA (1)...(19): siRNA sense strand
ucaccuccaucacuaccaa

SEQ ID NO: 846051 - RNA, 19 nt, Homo sapiens
  misc_RNA (1)...(19): siRNA sense strand
acaacaaacuacagaagac

SEQ ID NO: 846052 - RNA, 19 nt, Homo sapiens
  misc_RNA (1)...(19): siRNA sense strand
cgacgacaacuguggaaau

SEQ ID NO: 846053 - RNA, 19 nt, Homo sapiens
  misc_RNA (1)...(19): siRNA sense strand
uacaaaggcacgaaacaug

SEQ ID NO: 846054 - RNA, 19 nt, Homo sapiens
  misc_RNA (1)...(19): siRNA sense strand
cccgaaaccuaaauacagu

SEQ ID NO: 846055 - RNA, 19 nt, Homo sapiens
  misc_RNA (1)...(19): siRNA sense strand
uuagaagcccggaauggaa

SEQ ID NO: 846056 - RNA, 19 nt, Homo sapiens
  misc_RNA (1)...(19): siRNA sense strand
aaggacagcgcaaagacua

SEQ ID NO: 846057 - RNA, 19 nt, Homo sapiens
  misc_RNA (1)...(19): siRNA sense strand
guuagaagcccggaaugga

SEQ ID NO: 846058 - RNA, 19 nt, Homo sapiens
  misc_RNA (1)...(19): siRNA sense strand
ccacuacaaaggcacgaaa

SEQ ID NO: 846059 - RNA, 19 nt, Homo sapiens
  misc_RNA (1)...(19): siRNA sense strand
caacaaacuacagaagaca

SEQ ID NO: 846060 - RNA, 19 nt, Homo sapiens
  misc_RNA (1)...(19): siRNA sense strand
cagcugcagucaaccucuu

SEQ ID NO: 846061 - RNA, 19 nt, Homo sapiens
  misc_RNA (1)...(19): siRNA sense strand
cggaaacgcaacuuaaaca

SEQ ID NO: 846062 - RNA, 19 nt, Homo sapiens
  misc_RNA (1)...(19): siRNA sense strand
cuucuuuacuguucgcuau

SEQ ID NO: 846063 - RNA, 19 nt, Homo sapiens
  misc_RNA (1)...(19): siRNA sense strand
aagcaaaucauaucaugca

SEQ ID NO: 846064 - RNA, 19 nt, Homo sapiens
  misc_RNA (1)...(19): siRNA sense strand
uacaacaaacuacagaaga

SEQ ID NO: 846065 - RNA, 19 nt, Homo sapiens
  misc_RNA (1)...(19): siRNA sense strand
gcaauaucaacgacgacaa

SEQ ID NO: 846066 - RNA, 19 nt, Homo sapiens
  misc_RNA (1)...(19): siRNA sense strand
cuaccaauaccaucaauac

SEQ ID NO: 846067 - RNA, 19 nt, Homo sapiens
  misc_RNA (1)...(19): siRNA sense strand
gcgcaaagacuaccuucac

SEQ ID NO: 846068 - RNA, 19 nt, Homo sapiens
  misc_RNA (1)...(19): siRNA sense strand
cagcacauuagcaguagaa

SEQ ID NO: 846069 - RNA, 19 nt, Homo sapiens
  misc_RNA (1)...(19): siRNA sense strand
ggaaacgcaacuuaaacag

SEQ ID NO: 846070 - RNA, 19 nt, Homo sapiens
  misc_RNA (1)...(19): siRNA sense strand
cgaaacaugccaagaagcu

SEQ ID NO: 846071 - RNA, 19 nt, Homo sapiens
  misc_RNA (1)...(19): siRNA sense strand
acucggaaacgcaacuuaa

SEQ ID NO: 846072 - RNA, 19 nt, Homo sapiens
  misc_RNA (1)...(19): siRNA sense strand
cgcuggauauuaaaccauu

SEQ ID NO: 846073 - RNA, 19 nt, Homo sapiens
  misc_RNA (1)...(19): siRNA sense strand
ucauguccuucuacugaga

SEQ ID NO: 846074 - RNA, 19 nt, Homo sapiens
  misc_RNA (1)...(19): siRNA sense strand
caccgaagaaagcaaauca

SEQ ID NO: 846075 - RNA, 19 nt, Homo sapiens
  misc_RNA (1)...(19): siRNA sense strand
aaacacaggccuccaaaau

SEQ ID NO: 846076 - RNA, 19 nt, Homo sapiens
  misc_RNA (1)...(19): siRNA sense strand
aauacaguccuuacaacaa

SEQ ID NO: 846077 - RNA, 19 nt, Homo sapiens
  misc_RNA (1)...(19): siRNA sense strand
ggacaccagcaauaucaac

SEQ ID NO: 846078 - RNA, 19 nt, Homo sapiens
  misc_RNA (1)...(19): siRNA sense strand
aaauacaguccuuacaaca

SEQ ID NO: 846079 - RNA, 19 nt, Homo sapiens
  misc_RNA (1)...(19): siRNA sense strand
aaagcaguguuaugacaac

SEQ ID NO: 846080 - RNA, 19 nt, Homo sapiens
  misc_RNA (1)...(19): siRNA sense strand
uagaaggcacaaagacaga

SEQ ID NO: 846081 - RNA, 19 nt, Homo sapiens
  misc_RNA (1)...(19): siRNA sense strand
aggcaaaggaccuguuaau

SEQ ID NO: 846082 - RNA, 19 nt, Homo sapiens
  misc_RNA (1)...(19): siRNA sense strand
aaacggcuucuuuacuguu

SEQ ID NO: 846083 - RNA, 19 nt, Homo sapiens
  misc_RNA (1)...(19): siRNA sense strand
gcaaaacggcuucuuuacu

SEQ ID NO: 846084 - RNA, 19 nt, Homo sapiens
  misc_RNA (1)...(19): siRNA sense strand
cuacaaaggcacgaaacau

SEQ ID NO: 846085 - RNA, 19 nt, Homo sapiens
  misc_RNA (1)...(19): siRNA sense strand
gaccuguuaauaaaggaaa

SEQ ID NO: 846086 - RNA, 19 nt, Homo sapiens
  misc_RNA (1)...(19): siRNA sense strand
ggaccuguuaauaaaggaa

SEQ ID NO: 846087 - RNA, 19 nt, Homo sapiens
  misc_RNA (1)...(19): siRNA sense strand
guacuaagcacaaaaccau

SEQ ID NO: 846088 - RNA, 19 nt, Homo sapiens
  misc_RNA (1)...(19): siRNA sense strand
gaggcgcacaacaguggua

SEQ ID NO: 846089 - RNA, 19 nt, Homo sapiens
  misc_RNA (1)...(19): siRNA sense strand
caauagcucauguccuucu

SEQ ID NO: 846090 - RNA, 19 nt, Homo sapiens
  misc_RNA (1)...(19): siRNA sense strand
caauaucaacgacgacaac

SEQ ID NO: 846091 - RNA, 19 nt, Homo sapiens
  misc_RNA (1)...(19): siRNA sense strand
gccaaggacagcgcaaaga

SEQ ID NO: 846092 - RNA, 19 nt, Homo sapiens
  misc_RNA (1)...(19): siRNA sense strand
gcacuggaagccaugaaaa

SEQ ID NO: 846093 - RNA, 19 nt, Homo sapiens
  misc_RNA (1)...(19): siRNA sense strand
acauuugccaguugagauu

SEQ ID NO: 846094 - RNA, 19 nt, Homo sapiens
  misc_RNA (1)...(19): siRNA sense strand
ucugugaugugcacgucaa

SEQ ID NO: 846095 - RNA, 19 nt, Homo sapiens
  misc_RNA (1)...(19): siRNA sense strand
aauagcucauguccuucua

SEQ ID NO: 846096 - RNA, 19 nt, Homo sapiens
  misc_RNA (1)...(19): siRNA sense strand
gcaguuauauguccuuauu

SEQ ID NO: 846097 - RNA, 19 nt, Homo sapiens
  misc_RNA (1)...(19): siRNA sense strand
gaagacagaucaacauaca

SEQ ID NO: 846098 - RNA, 19 nt, Homo sapiens
  misc_RNA (1)...(19): siRNA sense strand
ugaaacagcugcaaagguu

SEQ ID NO: 846099 - RNA, 19 nt, Homo sapiens
  misc_RNA (1)...(19): siRNA sense strand
uggaauaucucaaugauga

SEQ ID NO: 846100 - RNA, 19 nt, Homo sapiens
  misc_RNA (1)...(19): siRNA sense strand
caaagacugugcugagaga

SEQ ID NO: 846101 - RNA, 19 nt, Homo sapiens
  misc_RNA (1)...(19): siRNA sense strand
gauaagucauuaccacaga

SEQ ID NO: 846102 - RNA, 19 nt, Homo sapiens
  misc_RNA (1)...(19): siRNA sense strand
ucacauuacuucaggagaa

SEQ ID NO: 846103 - RNA, 19 nt, Homo sapiens
  misc_RNA (1)...(19): siRNA sense strand
ccacagacagaaagaauuu

SEQ ID NO: 846104 - RNA, 19 nt, Homo sapiens
  misc_RNA (1)...(19): siRNA sense strand
gcaaguaaacgauggaaag

SEQ ID NO: 846105 - RNA, 19 nt, Homo sapiens
  misc_RNA (1)...(19): siRNA sense strand
ugaggugacuguaaucaau

SEQ ID NO: 846106 - RNA, 19 nt, Homo sapiens
  misc_RNA (1)...(19): siRNA sense strand
aaaccuggauugcuaagga

SEQ ID NO: 846107 - RNA, 19 nt, Homo sapiens
  misc_RNA (1)...(19): siRNA sense strand
cucagaaacuuguuaaaga

SEQ ID NO: 846108 - RNA, 19 nt, Homo sapiens
  misc_RNA (1)...(19): siRNA sense strand
gaugauuguucaggaauau

SEQ ID NO: 846109 - RNA, 19 nt, Homo sapiens
  misc_RNA (1)...(19): siRNA sense strand
gagaagagcaaaccaaugc

SEQ ID NO: 846110 - RNA, 19 nt, Homo sapiens
  misc_RNA (1)...(19): siRNA sense strand
ucagucagaucaugagugu

SEQ ID NO: 846111 - RNA, 19 nt, Homo sapiens
  misc_RNA (1)...(19): siRNA sense strand
uuggaaaccuggauugcua

SEQ ID NO: 846112 - RNA, 19 nt, Homo sapiens
  misc_RNA (1)...(19): siRNA sense strand
gagacaccgucaucaguca

SEQ ID NO: 846113 - RNA, 19 nt, Homo sapiens
  misc_RNA (1)...(19): siRNA sense strand
ggagaaacagcaaguaaac

SEQ ID NO: 846114 - RNA, 19 nt, Homo sapiens
  misc_RNA (1)...(19): siRNA sense strand
ugauggcgauaagucauua

SEQ ID NO: 846115 - RNA, 19 nt, Homo sapiens
  misc_RNA (1)...(19): siRNA sense strand
ugaugauuguucaggaaua

SEQ ID NO: 846116 - RNA, 19 nt, Homo sapiens
  misc_RNA (1)...(19): siRNA sense strand
ucucaaugaugaagaacaa

SEQ ID NO: 846117 - RNA, 19 nt, Homo sapiens
  misc_RNA (1)...(19): siRNA sense strand
guggaaauauaaucuugga

SEQ ID NO: 846118 - RNA, 19 nt, Homo sapiens
  misc_RNA (1)...(19): siRNA sense strand
caggagaaacagcaaguaa

SEQ ID NO: 846119 - RNA, 19 nt, Homo sapiens
  misc_RNA (1)...(19): siRNA sense strand
uguugaaucuuacuuggaa

SEQ ID NO: 846120 - RNA, 19 nt, Homo sapiens
  misc_RNA (1)...(19): siRNA sense strand
ucagaaacuuguuaaagac

SEQ ID NO: 846121 - RNA, 19 nt, Homo sapiens
  misc_RNA (1)...(19): siRNA sense strand
gagcaaagagaagagcaaa

SEQ ID NO: 846122 - RNA, 19 nt, Homo sapiens
  misc_RNA (1)...(19): siRNA sense strand
gagaagccuuacccuugga

SEQ ID NO: 846123 - RNA, 19 nt, Homo sapiens
  misc_RNA (1)...(19): siRNA sense strand
guccugaggugacuguaau

SEQ ID NO: 846124 - RNA, 19 nt, Homo sapiens
  misc_RNA (1)...(19): siRNA sense strand
ccacucagaaacuuguuaa

SEQ ID NO: 846125 - RNA, 19 nt, Homo sapiens
  misc_RNA (1)...(19): siRNA sense strand
caucuuacccaugcucuuu

SEQ ID NO: 846126 - RNA, 19 nt, Homo sapiens
  misc_RNA (1)...(19): siRNA sense strand
cuaaagggagcaaagagaa

SEQ ID NO: 846127 - RNA, 19 nt, Homo sapiens
  misc_RNA (1)...(19): siRNA sense strand
gccuuacccuuggaucaua

SEQ ID NO: 846128 - RNA, 19 nt, Homo sapiens
  misc_RNA (1)...(19): siRNA sense strand
agacugugcugagagagaa

SEQ ID NO: 846129 - RNA, 19 nt, Homo sapiens
  misc_RNA (1)...(19): siRNA sense strand
agucagaucaugaguguga

SEQ ID NO: 846130 - RNA, 19 nt, Homo sapiens
  misc_RNA (1)...(19): siRNA sense strand
gaaacagcaaguaaacgau

SEQ ID NO: 846131 - RNA, 19 nt, Homo sapiens
  misc_RNA (1)...(19): siRNA sense strand
cagggagucucaugguugu

SEQ ID NO: 846132 - RNA, 19 nt, Homo sapiens
  misc_RNA (1)...(19): siRNA sense strand
gaucauacuuuggaaaccu

SEQ ID NO: 846133 - RNA, 19 nt, Homo sapiens
  misc_RNA (1)...(19): siRNA sense strand
ccauuugugugugaugauu

SEQ ID NO: 846134 - RNA, 19 nt, Homo sapiens
  misc_RNA (1)...(19): siRNA sense strand
gagauuuucuuccauuugu

SEQ ID NO: 846135 - RNA, 19 nt, Homo sapiens
  misc_RNA (1)...(19): siRNA sense strand
cauuauugauuccaagaca

SEQ ID NO: 846136 - RNA, 19 nt, Homo sapiens
  misc_RNA (1)...(19): siRNA sense strand
agacagaucaacauacauc

SEQ ID NO: 846137 - RNA, 19 nt, Homo sapiens
  misc_RNA (1)...(19): siRNA sense strand
aaagagaagagcaaaccaa

SEQ ID NO: 846138 - RNA, 19 nt, Homo sapiens
  misc_RNA (1)...(19): siRNA sense strand
agaaacagcaaguaaacga

SEQ ID NO: 846139 - RNA, 19 nt, Homo sapiens
  misc_RNA (1)...(19): siRNA sense strand
cgucaucagucagaucaug

SEQ ID NO: 846140 - RNA, 19 nt, Homo sapiens
  misc_RNA (1)...(19): siRNA sense strand
ggauugcuaaggaggauug

SEQ ID NO: 846141 - RNA, 19 nt, Homo sapiens
  misc_RNA (1)...(19): siRNA sense strand
gaaaucccaaagccucgaa

SEQ ID NO: 846142 - RNA, 19 nt, Homo sapiens
  misc_RNA (1)...(19): siRNA sense strand
cugaagacagaucaacaua

SEQ ID NO: 846143 - RNA, 19 nt, Homo sapiens
  misc_RNA (1)...(19): siRNA sense strand
gaggugacuguaaucaaug

SEQ ID NO: 846144 - RNA, 19 nt, Homo sapiens
  misc_RNA (1)...(19): siRNA sense strand
caaugaugaagaacaauuc

SEQ ID NO: 846145 - RNA, 19 nt, Homo sapiens
  misc_RNA (1)...(19): siRNA sense strand
ggaauaucucaaugaugaa

SEQ ID NO: 846146 - RNA, 19 nt, Homo sapiens
  misc_RNA (1)...(19): siRNA sense strand
gcaaagagaagagcaaacc

SEQ ID NO: 846147 - RNA, 19 nt, Homo sapiens
  misc_RNA (1)...(19): siRNA sense strand
aagguugcauugaugaaau

SEQ ID NO: 846148 - RNA, 19 nt, Homo sapiens
  misc_RNA (1)...(19): siRNA sense strand
augagagacugaagacaga

SEQ ID NO: 846149 - RNA, 19 nt, Homo sapiens
  misc_RNA (1)...(19): siRNA sense strand
ugguggaaauauaaucuug

SEQ ID NO: 846150 - RNA, 19 nt, Homo sapiens
  misc_RNA (1)...(19): siRNA sense strand
agacuuugccgcuucucua

SEQ ID NO: 846151 - RNA, 19 nt, Homo sapiens
  misc_RNA (1)...(19): siRNA sense strand
ugccaccgauggagcauug

SEQ ID NO: 846152 - RNA, 19 nt, Homo sapiens
  misc_RNA (1)...(19): siRNA sense strand
ggagcaaagagaagagcaa

SEQ ID NO: 846153 - RNA, 19 nt, Homo sapiens
  misc_RNA (1)...(19): siRNA sense strand
caaagguugcauugaugaa

SEQ ID NO: 846154 - RNA, 19 nt, Homo sapiens
  misc_RNA (1)...(19): siRNA sense strand
ugugaugauuguucaggaa

SEQ ID NO: 846155 - RNA, 19 nt, Homo sapiens
  misc_RNA (1)...(19): siRNA sense strand
guaaucaaugagagacuga

SEQ ID NO: 846156 - RNA, 19 nt, Homo sapiens
  misc_RNA (1)...(19): siRNA sense strand
ccuaaagggagcaaagaga

SEQ ID NO: 846157 - RNA, 19 nt, Homo sapiens
  misc_RNA (1)...(19): siRNA sense strand
uggcaguuauauguccuua

SEQ ID NO: 846158 - RNA, 19 nt, Homo sapiens
  misc_RNA (1)...(19): siRNA sense strand
gaauaucucaaugaugaag

SEQ ID NO: 846159 - RNA, 19 nt, Homo sapiens
  misc_RNA (1)...(19): siRNA sense strand
cuuggaauaucucaaugau

SEQ ID NO: 846160 - RNA, 19 nt, Homo sapiens
  misc_RNA (1)...(19): siRNA sense strand
acccuuggaucauacuuug

SEQ ID NO: 846161 - RNA, 19 nt, Homo sapiens
  misc_RNA (1)...(19): siRNA sense strand
gcaugcugauggcgauaag

SEQ ID NO: 846162 - RNA, 19 nt, Homo sapiens
  misc_RNA (1)...(19): siRNA sense strand
gacauuauugauuccaaga

SEQ ID NO: 846163 - RNA, 19 nt, Homo sapiens
  misc_RNA (1)...(19): siRNA sense strand
gcauuggaaaggccauaga

SEQ ID NO: 846164 - RNA, 19 nt, Homo sapiens
  misc_RNA (1)...(19): siRNA sense strand
gagcauuggaaaggccaua

SEQ ID NO: 846165 - RNA, 19 nt, Homo sapiens
  misc_RNA (1)...(19): siRNA sense strand
aaagggagcaaagagaaga

SEQ ID NO: 846166 - RNA, 19 nt, Homo sapiens
  misc_RNA (1)...(19): siRNA sense strand
aaagguugcauugaugaaa

SEQ ID NO: 846167 - RNA, 19 nt, Homo sapiens
  misc_RNA (1)...(19): siRNA sense strand
aggagaaacagcaaguaaa

SEQ ID NO: 846168 - RNA, 19 nt, Homo sapiens
  misc_RNA (1)...(19): siRNA sense strand
uuacccaugcucuuucaaa

SEQ ID NO: 846169 - RNA, 19 nt, Homo sapiens
  misc_RNA (1)...(19): siRNA sense strand
gacaggagaaacagcaagu

SEQ ID NO: 846170 - RNA, 19 nt, Homo sapiens
  misc_RNA (1)...(19): siRNA sense strand
gccacucagaaacuuguua

SEQ ID NO: 846171 - RNA, 19 nt, Homo sapiens
  misc_RNA (1)...(19): siRNA sense strand
gugaaacagcugcaaaggu

SEQ ID NO: 846172 - RNA, 19 nt, Homo sapiens
  misc_RNA (1)...(19): siRNA sense strand
gcgagauuuucuuccauuu

SEQ ID NO: 846173 - RNA, 19 nt, Homo sapiens
  misc_RNA (1)...(19): siRNA sense strand
aagagaagagcaaaccaau

SEQ ID NO: 846174 - RNA, 19 nt, Homo sapiens
  misc_RNA (1)...(19): siRNA sense strand
uaaagggagcaaagagaag

SEQ ID NO: 846175 - RNA, 19 nt, Homo sapiens
  misc_RNA (1)...(19): siRNA sense strand
gaaauuaaagaugcaugcu

SEQ ID NO: 846176 - RNA, 19 nt, Homo sapiens
  misc_RNA (1)...(19): siRNA sense strand
gcagcgagauuuucuucca

SEQ ID NO: 846177 - RNA, 19 nt, Homo sapiens
  misc_RNA (1)...(19): siRNA sense strand
ggaaagcccuucaaguaua

SEQ ID NO: 846178 - RNA, 19 nt, Homo sapiens
  misc_RNA (1)...(19): siRNA sense strand
gaaagcccuucaaguauaa

SEQ ID NO: 846179 - RNA, 19 nt, Homo sapiens
  misc_RNA (1)...(19): siRNA sense strand
gaaguauggucuuuguaaa

SEQ ID NO: 846180 - RNA, 19 nt, Homo sapiens
  misc_RNA (1)...(19): siRNA sense strand
caggaaagcccuucaagua

SEQ ID NO: 846181 - RNA, 19 nt, Homo sapiens
  misc_RNA (1)...(19): siRNA sense strand
caccagaguuuccacauaa

SEQ ID NO: 846182 - RNA, 19 nt, Homo sapiens
  misc_RNA (1)...(19): siRNA sense strand
ccaguaagccucaauguug

SEQ ID NO: 846183 - RNA, 19 nt, Homo sapiens
  misc_RNA (1)...(19): siRNA sense strand
aaugagaagucacaucuuu

SEQ ID NO: 846184 - RNA, 19 nt, Homo sapiens
  misc_RNA (1)...(19): siRNA sense strand
ccaagugcccuaaaucuaa

SEQ ID NO: 846185 - RNA, 19 nt, Homo sapiens
  misc_RNA (1)...(19): siRNA sense strand
ccaccagaguuuccacaua

SEQ ID NO: 846186 - RNA, 19 nt, Homo sapiens
  misc_RNA (1)...(19): siRNA sense strand
gcucucaccugcuugaaga

SEQ ID NO: 846187 - RNA, 19 nt, Homo sapiens
  misc_RNA (1)...(19): siRNA sense strand
ucaaagagcggaagccaaa

SEQ ID NO: 846188 - RNA, 19 nt, Homo sapiens
  misc_RNA (1)...(19): siRNA sense strand
cuucaggccuguuaagaaa

SEQ ID NO: 846189 - RNA, 19 nt, Homo sapiens
  misc_RNA (1)...(19): siRNA sense strand
ugaaguauggucuuuguaa

SEQ ID NO: 846190 - RNA, 19 nt, Homo sapiens
  misc_RNA (1)...(19): siRNA sense strand
gccgauuccuuacggauuu

SEQ ID NO: 846191 - RNA, 19 nt, Homo sapiens
  misc_RNA (1)...(19): siRNA sense strand
gcaaugagaagucacaucu

SEQ ID NO: 846192 - RNA, 19 nt, Homo sapiens
  misc_RNA (1)...(19): siRNA sense strand
caaaagaggacaagucuaa

SEQ ID NO: 846193 - RNA, 19 nt, Homo sapiens
  misc_RNA (1)...(19): siRNA sense strand
ggaaaccgccagcuucuca

SEQ ID NO: 846194 - RNA, 19 nt, Homo sapiens
  misc_RNA (1)...(19): siRNA sense strand
ggagcucgccugaguguga

SEQ ID NO: 846195 - RNA, 19 nt, Homo sapiens
  misc_RNA (1)...(19): siRNA sense strand
gggaagacaucaaggaaaa

SEQ ID NO: 846196 - RNA, 19 nt, Homo sapiens
  misc_RNA (1)...(19): siRNA sense strand
ccaagucugucgcaaaugg

SEQ ID NO: 846197 - RNA, 19 nt, Homo sapiens
  misc_RNA (1)...(19): siRNA sense strand
gccaagaggcccaguguga

SEQ ID NO: 846198 - RNA, 19 nt, Homo sapiens
  misc_RNA (1)...(19): siRNA sense strand
caagacacacccacacuga

SEQ ID NO: 846199 - RNA, 19 nt, Homo sapiens
  misc_RNA (1)...(19): siRNA sense strand
ucagagcucucaccugcuu

SEQ ID NO: 846200 - RNA, 19 nt, Homo sapiens
  misc_RNA (1)...(19): siRNA sense strand
caugaaguauggucuuugu

SEQ ID NO: 846201 - RNA, 19 nt, Homo sapiens
  misc_RNA (1)...(19): siRNA sense strand
uccaagaaaucagagauaa

SEQ ID NO: 846202 - RNA, 19 nt, Homo sapiens
  misc_RNA (1)...(19): siRNA sense strand
gcaggaccuuccacucaau

SEQ ID NO: 846203 - RNA, 19 nt, Homo sapiens
  misc_RNA (1)...(19): siRNA sense strand
ggaaccugcugcugcuguu

SEQ ID NO: 846204 - RNA, 19 nt, Homo sapiens
  misc_RNA (1)...(19): siRNA sense strand
caaugucccuuuacuugca

SEQ ID NO: 846205 - RNA, 19 nt, Homo sapiens
  misc_RNA (1)...(19): siRNA sense strand
uuaaucacaugaaguaugg

SEQ ID NO: 846206 - RNA, 19 nt, Homo sapiens
  misc_RNA (1)...(19): siRNA sense strand
gacacuggcuuuacacaac

SEQ ID NO: 846207 - RNA, 19 nt, Homo sapiens
  misc_RNA (1)...(19): siRNA sense strand
ccaagaaaucagagauaaa

SEQ ID NO: 846208 - RNA, 19 nt, Homo sapiens
  misc_RNA (1)...(19): siRNA sense strand
uguacgaccucuccaacaa

SEQ ID NO: 846209 - RNA, 19 nt, Homo sapiens
  misc_RNA (1)...(19): siRNA sense strand
cacaugaaguauggucuuu

SEQ ID NO: 846210 - RNA, 19 nt, Homo sapiens
  misc_RNA (1)...(19): siRNA sense strand
acagaagacugggacagaa

SEQ ID NO: 846211 - RNA, 19 nt, Homo sapiens
  misc_RNA (1)...(19): siRNA sense strand
caagaaaucagagauaaac

SEQ ID NO: 846212 - RNA, 19 nt, Homo sapiens
  misc_RNA (1)...(19): siRNA sense strand
caguaagccucaauguugu

SEQ ID NO: 846213 - RNA, 19 nt, Homo sapiens
  misc_RNA (1)...(19): siRNA sense strand
cccuaaaucuaacucacua

SEQ ID NO: 846214 - RNA, 19 nt, Homo sapiens
  misc_RNA (1)...(19): siRNA sense strand
acagcagagucuccaguaa

SEQ ID NO: 846215 - RNA, 19 nt, Homo sapiens
  misc_RNA (1)...(19): siRNA sense strand
ccgagacacuggcuuuaca

SEQ ID NO: 846216 - RNA, 19 nt, Homo sapiens
  misc_RNA (1)...(19): siRNA sense strand
caagugcccuaaaucuaac

SEQ ID NO: 846217 - RNA, 19 nt, Homo sapiens
  misc_RNA (1)...(19): siRNA sense strand
cagaguacccgccucacuu

SEQ ID NO: 846218 - RNA, 19 nt, Homo sapiens
  misc_RNA (1)...(19): siRNA sense strand
guucccaagugcccuaaau

SEQ ID NO: 846219 - RNA, 19 nt, Homo sapiens
  misc_RNA (1)...(19): siRNA sense strand
cauacgaucacuacagguu

SEQ ID NO: 846220 - RNA, 19 nt, Homo sapiens
  misc_RNA (1)...(19): siRNA sense strand
cuaaccugccgauuccuua

SEQ ID NO: 846221 - RNA, 19 nt, Homo sapiens
  misc_RNA (1)...(19): siRNA sense strand
uccaaugucccuuuacuug

SEQ ID NO: 846222 - RNA, 19 nt, Homo sapiens
  misc_RNA (1)...(19): siRNA sense strand
gagccaagaggcccagugu

SEQ ID NO: 846223 - RNA, 19 nt, Homo sapiens
  misc_RNA (1)...(19): siRNA sense strand
cucgaguccuuccagguua

SEQ ID NO: 846224 - RNA, 19 nt, Homo sapiens
  misc_RNA (1)...(19): siRNA sense strand
aggaaagcccuucaaguau

SEQ ID NO: 846225 - RNA, 19 nt, Homo sapiens
  misc_RNA (1)...(19): siRNA sense strand
cagcucggccuucugcauu

SEQ ID NO: 846226 - RNA, 19 nt, Homo sapiens
  misc_RNA (1)...(19): siRNA sense strand
gcucggccuucugcauuug

SEQ ID NO: 846227 - RNA, 19 nt, Homo sapiens
  misc_RNA (1)...(19): siRNA sense strand
caaccucuccaagaaauca

SEQ ID NO: 846228 - RNA, 19 nt, Homo sapiens
  misc_RNA (1)...(19): siRNA sense strand
uauccagccucgaguccuu

SEQ ID NO: 846229 - RNA, 19 nt, Homo sapiens
  misc_RNA (1)...(19): siRNA sense strand
cagggaagacaucaaggaa

SEQ ID NO: 846230 - RNA, 19 nt, Homo sapiens
  misc_RNA (1)...(19): siRNA sense strand
ccucagacccaaaggacaa

SEQ ID NO: 846231 - RNA, 19 nt, Homo sapiens
  misc_RNA (1)...(19): siRNA sense strand
ucgaguccuuccagguuaa

SEQ ID NO: 846232 - RNA, 19 nt, Homo sapiens
  misc_RNA (1)...(19): siRNA sense strand
ccacauacgaucacuacag

SEQ ID NO: 846233 - RNA, 19 nt, Homo sapiens
  misc_RNA (1)...(19): siRNA sense strand
agaguacccgccucacuuu

SEQ ID NO: 846234 - RNA, 19 nt, Homo sapiens
  misc_RNA (1)...(19): siRNA sense strand
uuccaagucugucgcaaau

SEQ ID NO: 846235 - RNA, 19 nt, Homo sapiens
  misc_RNA (1)...(19): siRNA sense strand
ucuaagggaugcuggaaaa

SEQ ID NO: 846236 - RNA, 19 nt, Homo sapiens
  misc_RNA (1)...(19): siRNA sense strand
guccaauuccugaggcuaa

SEQ ID NO: 846237 - RNA, 19 nt, Homo sapiens
  misc_RNA (1)...(19): siRNA sense strand
cgaguucgaaaguccaauu

SEQ ID NO: 846238 - RNA, 19 nt, Homo sapiens
  misc_RNA (1)...(19): siRNA sense strand
cccaagugcccuaaaucua

SEQ ID NO: 846239 - RNA, 19 nt, Homo sapiens
  misc_RNA (1)...(19): siRNA sense strand
ccacauaaaaucucaucua

SEQ ID NO: 846240 - RNA, 19 nt, Homo sapiens
  misc_RNA (1)...(19): siRNA sense strand
ccaaggccgugucuuucca

SEQ ID NO: 846241 - RNA, 19 nt, Homo sapiens
  misc_RNA (1)...(19): siRNA sense strand
ccagggaagacaucaagga

SEQ ID NO: 846242 - RNA, 19 nt, Homo sapiens
  misc_RNA (1)...(19): siRNA sense strand
gaacccaagacccgagaca

SEQ ID NO: 846243 - RNA, 19 nt, Homo sapiens
  misc_RNA (1)...(19): siRNA sense strand
gcagcgaggagcagaagca

SEQ ID NO: 846244 - RNA, 19 nt, Homo sapiens
  misc_RNA (1)...(19): siRNA sense strand
ccucuaaccugccgauucc

SEQ ID NO: 846245 - RNA, 19 nt, Homo sapiens
  misc_RNA (1)...(19): siRNA sense strand
gccagccucuuccaagucu

SEQ ID NO: 846246 - RNA, 19 nt, Homo sapiens
  misc_RNA (1)...(19): siRNA sense strand
ugcaggaccuuccacucaa

SEQ ID NO: 846247 - RNA, 19 nt, Homo sapiens
  misc_RNA (1)...(19): siRNA sense strand
cacagcagagucuccagua

SEQ ID NO: 846248 - RNA, 19 nt, Homo sapiens
  misc_RNA (1)...(19): siRNA sense strand
ccaggaaagcccuucaagu

SEQ ID NO: 846249 - RNA, 19 nt, Homo sapiens
  misc_RNA (1)...(19): siRNA sense strand
uguuuccaaugucccuuua

SEQ ID NO: 846250 - RNA, 19 nt, Homo sapiens
  misc_RNA (1)...(19): siRNA sense strand
cagcagagucuccaguaag

SEQ ID NO: 846251 - RNA, 19 nt, Homo sapiens
  misc_RNA (1)...(19): siRNA sense strand
ggcccagugugaccucaga

SEQ ID NO: 846252 - RNA, 19 nt, Homo sapiens
  misc_RNA (1)...(19): siRNA sense strand
gcccuucaaguauaaaugu

SEQ ID NO: 846253 - RNA, 19 nt, Homo sapiens
  misc_RNA (1)...(19): siRNA sense strand
cucaaccucuccaagaaau

SEQ ID NO: 846254 - RNA, 19 nt, Homo sapiens
  misc_RNA (1)...(19): siRNA sense strand
ccucaaccucuccaagaaa

SEQ ID NO: 846255 - RNA, 19 nt, Homo sapiens
  misc_RNA (1)...(19): siRNA sense strand
cccucaaccucuccaagaa

SEQ ID NO: 846256 - RNA, 19 nt, Homo sapiens
  misc_RNA (1)...(19): siRNA sense strand
cugccaaggccgugucuuu

SEQ ID NO: 846257 - RNA, 19 nt, Homo sapiens
  misc_RNA (1)...(19): siRNA sense strand
ggacaaaagaggacaaguc

SEQ ID NO: 846258 - RNA, 19 nt, Homo sapiens
  misc_RNA (1)...(19): siRNA sense strand
ccucgaguccuuccagguu

SEQ ID NO: 846259 - RNA, 19 nt, Homo sapiens
  misc_RNA (1)...(19): siRNA sense strand
ccagcaauaucccucuaac

SEQ ID NO: 846260 - RNA, 19 nt, Homo sapiens
  misc_RNA (1)...(19): siRNA sense strand
ccaagacccgagacacuuc

SEQ ID NO: 846261 - RNA, 19 nt, Homo sapiens
  misc_RNA (1)...(19): siRNA sense strand
gcccgagacacuggcuuua

SEQ ID NO: 846262 - RNA, 19 nt, Homo sapiens
  misc_RNA (1)...(19): siRNA sense strand
cacucaaucucucggugaa

SEQ ID NO: 846263 - RNA, 19 nt, Homo sapiens
  misc_RNA (1)...(19): siRNA sense strand
cuccaaggcugggcagaga

SEQ ID NO: 846264 - RNA, 19 nt, Homo sapiens
  misc_RNA (1)...(19): siRNA sense strand
ucacaugaaguauggucuu

SEQ ID NO: 846265 - RNA, 19 nt, Homo sapiens
  misc_RNA (1)...(19): siRNA sense strand
ccacgaacccacguaccaa

SEQ ID NO: 846266 - RNA, 19 nt, Homo sapiens
  misc_RNA (1)...(19): siRNA sense strand
guucgaaaguccaauuccu

SEQ ID NO: 846267 - RNA, 19 nt, Homo sapiens
  misc_RNA (1)...(19): siRNA sense strand
caagucggccuuccacacu

SEQ ID NO: 846268 - RNA, 19 nt, Homo sapiens
  misc_RNA (1)...(19): siRNA sense strand
cggcucaccuuuccuucca

SEQ ID NO: 846269 - RNA, 19 nt, Homo sapiens
  misc_RNA (1)...(19): siRNA sense strand
aagccagccucuuccaagu

SEQ ID NO: 846270 - RNA, 19 nt, Homo sapiens
  misc_RNA (1)...(19): siRNA sense strand
ccaaggcugggcagagaga

SEQ ID NO: 846271 - RNA, 19 nt, Homo sapiens
  misc_RNA (1)...(19): siRNA sense strand
cuccaucuccagccacaua

SEQ ID NO: 846272 - RNA, 19 nt, Homo sapiens
  misc_RNA (1)...(19): siRNA sense strand
guaagccucaauguuguga

SEQ ID NO: 846273 - RNA, 19 nt, Homo sapiens
  misc_RNA (1)...(19): siRNA sense strand
cacagaagacugggacaga

SEQ ID NO: 846274 - RNA, 19 nt, Homo sapiens
  misc_RNA (1)...(19): siRNA sense strand
gaccuuccacucaaucucu

SEQ ID NO: 846275 - RNA, 19 nt, Homo sapiens
  misc_RNA (1)...(19): siRNA sense strand
cugcaggaccuuccacuca

SEQ ID NO: 846276 - RNA, 19 nt, Homo sapiens
  misc_RNA (1)...(19): siRNA sense strand
cuccaagaaaucagagaua

SEQ ID NO: 846277 - RNA, 19 nt, Homo sapiens
  misc_RNA (1)...(19): siRNA sense strand
gaacgucauuucugccuua

SEQ ID NO: 846278 - RNA, 19 nt, Homo sapiens
  misc_RNA (1)...(19): siRNA sense strand
guacuggaaucaucuuaua

SEQ ID NO: 846279 - RNA, 19 nt, Homo sapiens
  misc_RNA (1)...(19): siRNA sense strand
gcacagaugucgugaaguc

SEQ ID NO: 846280 - RNA, 19 nt, Homo sapiens
  misc_RNA (1)...(19): siRNA sense strand
gaaccugucugcagucaug

SEQ ID NO: 846281 - RNA, 19 nt, Homo sapiens
  misc_RNA (1)...(19): siRNA sense strand
caacaagccuaccauuaau

SEQ ID NO: 846282 - RNA, 19 nt, Homo sapiens
  misc_RNA (1)...(19): siRNA sense strand
aaaggaaacucauagaaga

SEQ ID NO: 846283 - RNA, 19 nt, Homo sapiens
  misc_RNA (1)...(19): siRNA sense strand
gggaagaaccaauauguuu

SEQ ID NO: 846284 - RNA, 19 nt, Homo sapiens
  misc_RNA (1)...(19): siRNA sense strand
gaauuauggugacguagaa

SEQ ID NO: 846285 - RNA, 19 nt, Homo sapiens
  misc_RNA (1)...(19): siRNA sense strand
ugaaauagccagacugaaa

SEQ ID NO: 846286 - RNA, 19 nt, Homo sapiens
  misc_RNA (1)...(19): siRNA sense strand
gcaaagaagaagcaaguuu

SEQ ID NO: 846287 - RNA, 19 nt, Homo sapiens
  misc_RNA (1)...(19): siRNA sense strand
ggaggaaacucuaaaacua

SEQ ID NO: 846288 - RNA, 19 nt, Homo sapiens
  misc_RNA (1)...(19): siRNA sense strand
gcccuuauguugaggauuu

SEQ ID NO: 846289 - RNA, 19 nt, Homo sapiens
  misc_RNA (1)...(19): siRNA sense strand
ucaacaagccuaccauuaa

SEQ ID NO: 846290 - RNA, 19 nt, Homo sapiens
  misc_RNA (1)...(19): siRNA sense strand
ggacaaauaaguggaauga

SEQ ID NO: 846291 - RNA, 19 nt, Homo sapiens
  misc_RNA (1)...(19): siRNA sense strand
gaaagaagggauuggaguu

SEQ ID NO: 846292 - RNA, 19 nt, Homo sapiens
  misc_RNA (1)...(19): siRNA sense strand
cagauuacguuucacaaga

SEQ ID NO: 846293 - RNA, 19 nt, Homo sapiens
  misc_RNA (1)...(19): siRNA sense strand
uaaaggaaggucagacaua

SEQ ID NO: 846294 - RNA, 19 nt, Homo sapiens
  misc_RNA (1)...(19): siRNA sense strand
ggaccaagaccuucaccua

SEQ ID NO: 846295 - RNA, 19 nt, Homo sapiens
  misc_RNA (1)...(19): siRNA sense strand
gagcauugcaucuuugaaa

SEQ ID NO: 846296 - RNA, 19 nt, Homo sapiens
  misc_RNA (1)...(19): siRNA sense strand
ugaacugccucauuugauu

SEQ ID NO: 846297 - RNA, 19 nt, Homo sapiens
  misc_RNA (1)...(19): siRNA sense strand
ccaagaccuucaccuauga

SEQ ID NO: 846298 - RNA, 19 nt, Homo sapiens
  misc_RNA (1)...(19): siRNA sense strand
gggauucuguguugacuug

SEQ ID NO: 846299 - RNA, 19 nt, Homo sapiens
  misc_RNA (1)...(19): siRNA sense strand
gcaacagcgugaagaacuu

SEQ ID NO: 846300 - RNA, 19 nt, Homo sapiens
  misc_RNA (1)...(19): siRNA sense strand
aaacgacaaucacaaacuu

SEQ ID NO: 846301 - RNA, 19 nt, Homo sapiens
  misc_RNA (1)...(19): siRNA sense strand
accaauauguuucgcuuua

SEQ ID NO: 846302 - RNA, 19 nt, Homo sapiens
  misc_RNA (1)...(19): siRNA sense strand
gagugagcauugcaucuuu

SEQ ID NO: 846303 - RNA, 19 nt, Homo sapiens
  misc_RNA (1)...(19): siRNA sense strand
ggagaaacccuaaguacuc

SEQ ID NO: 846304 - RNA, 19 nt, Homo sapiens
  misc_RNA (1)...(19): siRNA sense strand
gaccuucaccuaugacuuu

SEQ ID NO: 846305 - RNA, 19 nt, Homo sapiens
  misc_RNA (1)...(19): siRNA sense strand
ggucagacauacguuggua

SEQ ID NO: 846306 - RNA, 19 nt, Homo sapiens
  misc_RNA (1)...(19): siRNA sense strand
caaguucacucaggcuaaa

SEQ ID NO: 846307 - RNA, 19 nt, Homo sapiens
  misc_RNA (1)...(19): siRNA sense strand
ccaaggaauggacaaauaa

SEQ ID NO: 846308 - RNA, 19 nt, Homo sapiens
  misc_RNA (1)...(19): siRNA sense strand
aagcaagaguucaagaauu

SEQ ID NO: 846309 - RNA, 19 nt, Homo sapiens
  misc_RNA (1)...(19): siRNA sense strand
ccaaacauuuaguacagaa

SEQ ID NO: 846310 - RNA, 19 nt, Homo sapiens
  misc_RNA (1)...(19): siRNA sense strand
gaagcaagaguucaagaau

SEQ ID NO: 846311 - RNA, 19 nt, Homo sapiens
  misc_RNA (1)...(19): siRNA sense strand
uaaaugaaaccaccagaug

SEQ ID NO: 846312 - RNA, 19 nt, Homo sapiens
  misc_RNA (1)...(19): siRNA sense strand
auucugaacugccucauuu

SEQ ID NO: 846313 - RNA, 19 nt, Homo sapiens
  misc_RNA (1)...(19): siRNA sense strand
gaugccaacgucaaacuua

SEQ ID NO: 846314 - RNA, 19 nt, Homo sapiens
  misc_RNA (1)...(19): siRNA sense strand
gaagagaacggaccaagac

SEQ ID NO: 846315 - RNA, 19 nt, Homo sapiens
  misc_RNA (1)...(19): siRNA sense strand
ggaagaaccaauauguuuc

SEQ ID NO: 846316 - RNA, 19 nt, Homo sapiens
  misc_RNA (1)...(19): siRNA sense strand
cgugaagucugcauuugaa

SEQ ID NO: 846317 - RNA, 19 nt, Homo sapiens
  misc_RNA (1)...(19): siRNA sense strand
ggaaacucauagaagaaau

SEQ ID NO: 846318 - RNA, 19 nt, Homo sapiens
  misc_RNA (1)...(19): siRNA sense strand
ccaauauguuucgcuuuaa

SEQ ID NO: 846319 - RNA, 19 nt, Homo sapiens
  misc_RNA (1)...(19): siRNA sense strand
accaaggaauggacaaaua

SEQ ID NO: 846320 - RNA, 19 nt, Homo sapiens
  misc_RNA (1)...(19): siRNA sense strand
agcaagaguucaagaauug

SEQ ID NO: 846321 - RNA, 19 nt, Homo sapiens
  misc_RNA (1)...(19): siRNA sense strand
aaagauagccuuggaggaa

SEQ ID NO: 846322 - RNA, 19 nt, Homo sapiens
  misc_RNA (1)...(19): siRNA sense strand
gaggccaaguucauuauuc

SEQ ID NO: 846323 - RNA, 19 nt, Homo sapiens
  misc_RNA (1)...(19): siRNA sense strand
ucacucaggcuaaauuuga

SEQ ID NO: 846324 - RNA, 19 nt, Homo sapiens
  misc_RNA (1)...(19): siRNA sense strand
gaacggaccaagaccuuca

SEQ ID NO: 846325 - RNA, 19 nt, Homo sapiens
  misc_RNA (1)...(19): siRNA sense strand
agacauacguugguagaga

SEQ ID NO: 846326 - RNA, 19 nt, Homo sapiens
  misc_RNA (1)...(19): siRNA sense strand
gaacugccucauuugauug

SEQ ID NO: 846327 - RNA, 19 nt, Homo sapiens
  misc_RNA (1)...(19): siRNA sense strand
ugccuuagcugauuuaucu

SEQ ID NO: 846328 - RNA, 19 nt, Homo sapiens
  misc_RNA (1)...(19): siRNA sense strand
ggaagagaacggaccaaga

SEQ ID NO: 846329 - RNA, 19 nt, Homo sapiens
  misc_RNA (1)...(19): siRNA sense strand
ggaaugaaacccaaaauau

SEQ ID NO: 846330 - RNA, 19 nt, Homo sapiens
  misc_RNA (1)...(19): siRNA sense strand
acucuucgcuaugcaaaua

SEQ ID NO: 846331 - RNA, 19 nt, Homo sapiens
  misc_RNA (1)...(19): siRNA sense strand
uguguugacuugguuguua

SEQ ID NO: 846332 - RNA, 19 nt, Homo sapiens
  misc_RNA (1)...(19): siRNA sense strand
cugcagucauguuguauaa

SEQ ID NO: 846333 - RNA, 19 nt, Homo sapiens
  misc_RNA (1)...(19): siRNA sense strand
gaccaagaccuucaccuau

SEQ ID NO: 846334 - RNA, 19 nt, Homo sapiens
  misc_RNA (1)...(19): siRNA sense strand
acagaauuauggugacgua

SEQ ID NO: 846335 - RNA, 19 nt, Homo sapiens
  misc_RNA (1)...(19): siRNA sense strand
caaacuggaucuggaaagu

SEQ ID NO: 846336 - RNA, 19 nt, Homo sapiens
  misc_RNA (1)...(19): siRNA sense strand
gagaaacccuaaguacucu

SEQ ID NO: 846337 - RNA, 19 nt, Homo sapiens
  misc_RNA (1)...(19): siRNA sense strand
gaaacucauagaagaaaug

SEQ ID NO: 846338 - RNA, 19 nt, Homo sapiens
  misc_RNA (1)...(19): siRNA sense strand
ugaccgaccucucgaaguc

SEQ ID NO: 846339 - RNA, 19 nt, Homo sapiens
  misc_RNA (1)...(19): siRNA sense strand
ggccacacaucuaaaucaa

SEQ ID NO: 846340 - RNA, 19 nt, Homo sapiens
  misc_RNA (1)...(19): siRNA sense strand
gaagggauuggaguuguuu

SEQ ID NO: 846341 - RNA, 19 nt, Homo sapiens
  misc_RNA (1)...(19): siRNA sense strand
uaacgaacgugugagagau

SEQ ID NO: 846342 - RNA, 19 nt, Homo sapiens
  misc_RNA (1)...(19): siRNA sense strand
caaguucauuauucagaug

SEQ ID NO: 846343 - RNA, 19 nt, Homo sapiens
  misc_RNA (1)...(19): siRNA sense strand
ucaguaagauccacuuggu

SEQ ID NO: 846344 - RNA, 19 nt, Homo sapiens
  misc_RNA (1)...(19): siRNA sense strand
caugugaaaccgucaguaa

SEQ ID NO: 846345 - RNA, 19 nt, Homo sapiens
  misc_RNA (1)...(19): siRNA sense strand
ugacguagaagaacuuaug

SEQ ID NO: 846346 - RNA, 19 nt, Homo sapiens
  misc_RNA (1)...(19): siRNA sense strand
gaaauagccagacugaaaa

SEQ ID NO: 846347 - RNA, 19 nt, Homo sapiens
  misc_RNA (1)...(19): siRNA sense strand
ccuaaguacucuucgcuau

SEQ ID NO: 846348 - RNA, 19 nt, Homo sapiens
  misc_RNA (1)...(19): siRNA sense strand
uaucaugauugccaccauu

SEQ ID NO: 846349 - RNA, 19 nt, Homo sapiens
  misc_RNA (1)...(19): siRNA sense strand
ugucugcagucauguugua

SEQ ID NO: 846350 - RNA, 19 nt, Homo sapiens
  misc_RNA (1)...(19): siRNA sense strand
ccacggagcaagauauugu

SEQ ID NO: 846351 - RNA, 19 nt, Homo sapiens
  misc_RNA (1)...(19): siRNA sense strand
gcugaaauagccagacuga

SEQ ID NO: 846352 - RNA, 19 nt, Homo sapiens
  misc_RNA (1)...(19): siRNA sense strand
ucuggaaagucauacacua

SEQ ID NO: 846353 - RNA, 19 nt, Homo sapiens
  misc_RNA (1)...(19): siRNA sense strand
uagaagaaauggaggaaaa

SEQ ID NO: 846354 - RNA, 19 nt, Homo sapiens
  misc_RNA (1)...(19): siRNA sense strand
ccaaguucauuauucagau

SEQ ID NO: 846355 - RNA, 19 nt, Homo sapiens
  misc_RNA (1)...(19): siRNA sense strand
gcagaaugaagcaagaguu

SEQ ID NO: 846356 - RNA, 19 nt, Homo sapiens
  misc_RNA (1)...(19): siRNA sense strand
aggcuaaauuugauucuga

SEQ ID NO: 846357 - RNA, 19 nt, Homo sapiens
  misc_RNA (1)...(19): siRNA sense strand
ggaugaagcuucuuuucga

SEQ ID NO: 846358 - RNA, 19 nt, Homo sapiens
  misc_RNA (1)...(19): siRNA sense strand
cuuaauaccucggaucugu

SEQ ID NO: 846359 - RNA, 19 nt, Homo sapiens
  misc_RNA (1)...(19): siRNA sense strand
gagcugaaauagccagacu

SEQ ID NO: 846360 - RNA, 19 nt, Homo sapiens
  misc_RNA (1)...(19): siRNA sense strand
gcaaaacgacaaucacaaa

SEQ ID NO: 846361 - RNA, 19 nt, Homo sapiens
  misc_RNA (1)...(19): siRNA sense strand
gaugggaugaagcuucuuu

SEQ ID NO: 846362 - RNA, 19 nt, Homo sapiens
  misc_RNA (1)...(19): siRNA sense strand
gagaaccugucugcaguca

SEQ ID NO: 846363 - RNA, 19 nt, Homo sapiens
  misc_RNA (1)...(19): siRNA sense strand
aaaggaaggucagacauac

SEQ ID NO: 846364 - RNA, 19 nt, Homo sapiens
  misc_RNA (1)...(19): siRNA sense strand
agauuacguuucacaagaa

SEQ ID NO: 846365 - RNA, 19 nt, Homo sapiens
  misc_RNA (1)...(19): siRNA sense strand
ugaugucaauuauggagaa

SEQ ID NO: 846366 - RNA, 19 nt, Homo sapiens
  misc_RNA (1)...(19): siRNA sense strand
caccugcugaugucaauua

SEQ ID NO: 846367 - RNA, 19 nt, Homo sapiens
  misc_RNA (1)...(19): siRNA sense strand
agucugcauuugaagguua

SEQ ID NO: 846368 - RNA, 19 nt, Homo sapiens
  misc_RNA (1)...(19): siRNA sense strand
gcagucauguuguauaacc

SEQ ID NO: 846369 - RNA, 19 nt, Homo sapiens
  misc_RNA (1)...(19): siRNA sense strand
gaugaugaccuuuugagua

SEQ ID NO: 846370 - RNA, 19 nt, Homo sapiens
  misc_RNA (1)...(19): siRNA sense strand
caaagaagaagcaaguuuu

SEQ ID NO: 846371 - RNA, 19 nt, Homo sapiens
  misc_RNA (1)...(19): siRNA sense strand
gagaacggaccaagaccuu

SEQ ID NO: 846372 - RNA, 19 nt, Homo sapiens
  misc_RNA (1)...(19): siRNA sense strand
gaaaguaaaaggaaacuca

SEQ ID NO: 846373 - RNA, 19 nt, Homo sapiens
  misc_RNA (1)...(19): siRNA sense strand
caaauaaguggaaugaaac

SEQ ID NO: 846374 - RNA, 19 nt, Homo sapiens
  misc_RNA (1)...(19): siRNA sense strand
uaaguacucuucgcuaugc

SEQ ID NO: 846375 - RNA, 19 nt, Homo sapiens
  misc_RNA (1)...(19): siRNA sense strand
cggcacagaugucgugaag

SEQ ID NO: 846376 - RNA, 19 nt, Homo sapiens
  misc_RNA (1)...(19): siRNA sense strand
gaagaaccaauauguuucg

SEQ ID NO: 846377 - RNA, 19 nt, Homo sapiens
  misc_RNA (1)...(19): siRNA sense strand
gaacgucauuucugccuua

SEQ ID NO: 846378 - RNA, 19 nt, Homo sapiens
  misc_RNA (1)...(19): siRNA sense strand
ucaaagaacucaacaacaa

SEQ ID NO: 846379 - RNA, 19 nt, Homo sapiens
  misc_RNA (1)...(19): siRNA sense strand
guacuggaaucaucuuaua

SEQ ID NO: 846380 - RNA, 19 nt, Homo sapiens
  misc_RNA (1)...(19): siRNA sense strand
ggaagugccucaagauuuc

SEQ ID NO: 846381 - RNA, 19 nt, Homo sapiens
  misc_RNA (1)...(19): siRNA sense strand
gcacagaugucgugaaguc

SEQ ID NO: 846382 - RNA, 19 nt, Homo sapiens
  misc_RNA (1)...(19): siRNA sense strand
gaaccugucugcagucaug

SEQ ID NO: 846383 - RNA, 19 nt, Homo sapiens
  misc_RNA (1)...(19): siRNA sense strand
gaugagacauggacuguau

SEQ ID NO: 846384 - RNA, 19 nt, Homo sapiens
  misc_RNA (1)...(19): siRNA sense strand
gaugaaggauaaugagaaa

SEQ ID NO: 846385 - RNA, 19 nt, Homo sapiens
  misc_RNA (1)...(19): siRNA sense strand
agaacaagcuaaaggauuu

SEQ ID NO: 846386 - RNA, 19 nt, Homo sapiens
  misc_RNA (1)...(19): siRNA sense strand
aagaacagcuugcacagua

SEQ ID NO: 846387 - RNA, 19 nt, Homo sapiens
  misc_RNA (1)...(19): siRNA sense strand
cgagaaggcugagaaguuu

SEQ ID NO: 846388 - RNA, 19 nt, Homo sapiens
  misc_RNA (1)...(19): siRNA sense strand
caacaagccuaccauuaau

SEQ ID NO: 846389 - RNA, 19 nt, Homo sapiens
  misc_RNA (1)...(19): siRNA sense strand
aaaggaaacucauagaaga

SEQ ID NO: 846390 - RNA, 19 nt, Homo sapiens
  misc_RNA (1)...(19): siRNA sense strand
gggaagaaccaauauguuu

SEQ ID NO: 846391 - RNA, 19 nt, Homo sapiens
  misc_RNA (1)...(19): siRNA sense strand
ugaauucacugccaacauu

SEQ ID NO: 846392 - RNA, 19 nt, Homo sapiens
  misc_RNA (1)...(19): siRNA sense strand
gaauuauggugacguagaa

SEQ ID NO: 846393 - RNA, 19 nt, Homo sapiens
  misc_RNA (1)...(19): siRNA sense strand
gcagaaagacauccugaaa

SEQ ID NO: 846394 - RNA, 19 nt, Homo sapiens
  misc_RNA (1)...(19): siRNA sense strand
ugaaauagccagacugaaa

SEQ ID NO: 846395 - RNA, 19 nt, Homo sapiens
  misc_RNA (1)...(19): siRNA sense strand
gcaaagaagaagcaaguuu

SEQ ID NO: 846396 - RNA, 19 nt, Homo sapiens
  misc_RNA (1)...(19): siRNA sense strand
ggaggaaacucuaaaacua

SEQ ID NO: 846397 - RNA, 19 nt, Homo sapiens
  misc_RNA (1)...(19): siRNA sense strand
gcccuuauguugaggauuu

SEQ ID NO: 846398 - RNA, 19 nt, Homo sapiens
  misc_RNA (1)...(19): siRNA sense strand
ucaacaagccuaccauuaa

SEQ ID NO: 846399 - RNA, 19 nt, Homo sapiens
  misc_RNA (1)...(19): siRNA sense strand
aaagacgccuucaggauuu

SEQ ID NO: 846400 - RNA, 19 nt, Homo sapiens
  misc_RNA (1)...(19): siRNA sense strand
ggacaaauaaguggaauga

SEQ ID NO: 846401 - RNA, 19 nt, Homo sapiens
  misc_RNA (1)...(19): siRNA sense strand
caacacucuuuaucaagua

SEQ ID NO: 846402 - RNA, 19 nt, Homo sapiens
  misc_RNA (1)...(19): siRNA sense strand
caaagacgccuucaggauu

SEQ ID NO: 846403 - RNA, 19 nt, Homo sapiens
  misc_RNA (1)...(19): siRNA sense strand
caagauuacuguccuagau

SEQ ID NO: 846404 - RNA, 19 nt, Homo sapiens
  misc_RNA (1)...(19): siRNA sense strand
gaaagaagggauuggaguu

SEQ ID NO: 846405 - RNA, 19 nt, Homo sapiens
  misc_RNA (1)...(19): siRNA sense strand
agacaacacucuuuaucaa

SEQ ID NO: 846406 - RNA, 19 nt, Homo sapiens
  misc_RNA (1)...(19): siRNA sense strand
gaagaagagacaagaagaa

SEQ ID NO: 846407 - RNA, 19 nt, Homo sapiens
  misc_RNA (1)...(19): siRNA sense strand
cagauuacguuucacaaga

SEQ ID NO: 846408 - RNA, 19 nt, Homo sapiens
  misc_RNA (1)...(19): siRNA sense strand
gagcagaggcagaaacuug

SEQ ID NO: 846409 - RNA, 19 nt, Homo sapiens
  misc_RNA (1)...(19): siRNA sense strand
aaaucgagcugcagaagaa

SEQ ID NO: 846410 - RNA, 19 nt, Homo sapiens
  misc_RNA (1)...(19): siRNA sense strand
uaaaggaaggucagacaua

SEQ ID NO: 846411 - RNA, 19 nt, Homo sapiens
  misc_RNA (1)...(19): siRNA sense strand
ggaccaagaccuucaccua

SEQ ID NO: 846412 - RNA, 19 nt, Homo sapiens
  misc_RNA (1)...(19): siRNA sense strand
cagacacgaugaaggauaa

SEQ ID NO: 846413 - RNA, 19 nt, Homo sapiens
  misc_RNA (1)...(19): siRNA sense strand
ggauuugcaucgugugauu

SEQ ID NO: 846414 - RNA, 19 nt, Homo sapiens
  misc_RNA (1)...(19): siRNA sense strand
gagcauugcaucuuugaaa

SEQ ID NO: 846415 - RNA, 19 nt, Homo sapiens
  misc_RNA (1)...(19): siRNA sense strand
ugaacugccucauuugauu

SEQ ID NO: 846416 - RNA, 19 nt, Homo sapiens
  misc_RNA (1)...(19): siRNA sense strand
ccaagaccuucaccuauga

SEQ ID NO: 846417 - RNA, 19 nt, Homo sapiens
  misc_RNA (1)...(19): siRNA sense strand
gagagaagcagcagagaga

SEQ ID NO: 846418 - RNA, 19 nt, Homo sapiens
  misc_RNA (1)...(19): siRNA sense strand
aguacaggcugcaauauaa

SEQ ID NO: 846419 - RNA, 19 nt, Homo sapiens
  misc_RNA (1)...(19): siRNA sense strand
gggauucuguguugacuug

SEQ ID NO: 846420 - RNA, 19 nt, Homo sapiens
  misc_RNA (1)...(19): siRNA sense strand
gaguacaggcugcaauaua

SEQ ID NO: 846421 - RNA, 19 nt, Homo sapiens
  misc_RNA (1)...(19): siRNA sense strand
gaagaacuccaacgacuca

SEQ ID NO: 846422 - RNA, 19 nt, Homo sapiens
  misc_RNA (1)...(19): siRNA sense strand
gcaacagcgugaagaacuu

SEQ ID NO: 846423 - RNA, 19 nt, Homo sapiens
  misc_RNA (1)...(19): siRNA sense strand
aaacgacaaucacaaacuu

SEQ ID NO: 846424 - RNA, 19 nt, Homo sapiens
  misc_RNA (1)...(19): siRNA sense strand
cgaaacauaccauuuguga

SEQ ID NO: 846425 - RNA, 19 nt, Homo sapiens
  misc_RNA (1)...(19): siRNA sense strand
aaauaaagccaguggagua

SEQ ID NO: 846426 - RNA, 19 nt, Homo sapiens
  misc_RNA (1)...(19): siRNA sense strand
accaauauguuucgcuuua

SEQ ID NO: 846427 - RNA, 19 nt, Homo sapiens
  misc_RNA (1)...(19): siRNA sense strand
gagugagcauugcaucuuu

SEQ ID NO: 846428 - RNA, 19 nt, Homo sapiens
  misc_RNA (1)...(19): siRNA sense strand
ggagaaacccuaaguacuc

SEQ ID NO: 846429 - RNA, 19 nt, Homo sapiens
  misc_RNA (1)...(19): siRNA sense strand
gaccuucaccuaugacuuu

SEQ ID NO: 846430 - RNA, 19 nt, Homo sapiens
  misc_RNA (1)...(19): siRNA sense strand
ggucagacauacguuggua

SEQ ID NO: 846431 - RNA, 19 nt, Homo sapiens
  misc_RNA (1)...(19): siRNA sense strand
gaacaugacaaagaaucua

SEQ ID NO: 846432 - RNA, 19 nt, Homo sapiens
  misc_RNA (1)...(19): siRNA sense strand
caacugcguuucuucgaau

SEQ ID NO: 846433 - RNA, 19 nt, Homo sapiens
  misc_RNA (1)...(19): siRNA sense strand
ucacggaagugccucaaga

SEQ ID NO: 846434 - RNA, 19 nt, Homo sapiens
  misc_RNA (1)...(19): siRNA sense strand
ucacagaugucacggaagu

SEQ ID NO: 846435 - RNA, 19 nt, Homo sapiens
  misc_RNA (1)...(19): siRNA sense strand
caaguucacucaggcuaaa

SEQ ID NO: 846436 - RNA, 19 nt, Homo sapiens
  misc_RNA (1)...(19): siRNA sense strand
ccaaggaauggacaaauaa

SEQ ID NO: 846437 - RNA, 19 nt, Homo sapiens
  misc_RNA (1)...(19): siRNA sense strand
aagcaagaguucaagaauu

SEQ ID NO: 846438 - RNA, 19 nt, Homo sapiens
  misc_RNA (1)...(19): siRNA sense strand
ccaaacauuuaguacagaa

SEQ ID NO: 846439 - RNA, 19 nt, Homo sapiens
  misc_RNA (1)...(19): siRNA sense strand
gaagcaagaguucaagaau

SEQ ID NO: 846440 - RNA, 19 nt, Homo sapiens
  misc_RNA (1)...(19): siRNA sense strand
uaaaugaaaccaccagaug

SEQ ID NO: 846441 - RNA, 19 nt, Homo sapiens
  misc_RNA (1)...(19): siRNA sense strand
agaaauaccucagggacuu

SEQ ID NO: 846442 - RNA, 19 nt, Homo sapiens
  misc_RNA (1)...(19): siRNA sense strand
ggacuguauucaggcguua

SEQ ID NO: 846443 - RNA, 19 nt, Homo sapiens
  misc_RNA (1)...(19): siRNA sense strand
gaccugaaggacccaauua

SEQ ID NO: 846444 - RNA, 19 nt, Homo sapiens
  misc_RNA (1)...(19): siRNA sense strand
gcagacacgaugaaggaua

SEQ ID NO: 846445 - RNA, 19 nt, Homo sapiens
  misc_RNA (1)...(19): siRNA sense strand
gaagagacaagaagaagag

SEQ ID NO: 846446 - RNA, 19 nt, Homo sapiens
  misc_RNA (1)...(19): siRNA sense strand
auucugaacugccucauuu

SEQ ID NO: 846447 - RNA, 19 nt, Homo sapiens
  misc_RNA (1)...(19): siRNA sense strand
gaugccaacgucaaacuua

SEQ ID NO: 846448 - RNA, 19 nt, Homo sapiens
  misc_RNA (1)...(19): siRNA sense strand
ggaagaaccaauauguuuc

SEQ ID NO: 846449 - RNA, 19 nt, Homo sapiens
  misc_RNA (1)...(19): siRNA sense strand
gaaggauaaugagaaacuu

SEQ ID NO: 846450 - RNA, 19 nt, Homo sapiens
  misc_RNA (1)...(19): siRNA sense strand
ugaagaagaaguccaaaga

SEQ ID NO: 846451 - RNA, 19 nt, Homo sapiens
  misc_RNA (1)...(19): siRNA sense strand
gaagagaacggaccaagac

SEQ ID NO: 846452 - RNA, 19 nt, Homo sapiens
  misc_RNA (1)...(19): siRNA sense strand
cgugaagucugcauuugaa

SEQ ID NO: 846453 - RNA, 19 nt, Homo sapiens
  misc_RNA (1)...(19): siRNA sense strand
gggacugacucucucgaaa

SEQ ID NO: 846454 - RNA, 19 nt, Homo sapiens
  misc_RNA (1)...(19): siRNA sense strand
gaugguuucucgcucuuug

SEQ ID NO: 846455 - RNA, 19 nt, Homo sapiens
  misc_RNA (1)...(19): siRNA sense strand
gagagaagcaggagaugau

SEQ ID NO: 846456 - RNA, 19 nt, Homo sapiens
  misc_RNA (1)...(19): siRNA sense strand
ucagauauuucaagaacug

SEQ ID NO: 846457 - RNA, 19 nt, Homo sapiens
  misc_RNA (1)...(19): siRNA sense strand
gaggccaaguucauuauuc

SEQ ID NO: 846458 - RNA, 19 nt, Homo sapiens
  misc_RNA (1)...(19): siRNA sense strand
ggaaacucauagaagaaau

SEQ ID NO: 846459 - RNA, 19 nt, Homo sapiens
  misc_RNA (1)...(19): siRNA sense strand
ccaauauguuucgcuuuaa

SEQ ID NO: 846460 - RNA, 19 nt, Homo sapiens
  misc_RNA (1)...(19): siRNA sense strand
accaaggaauggacaaaua

SEQ ID NO: 846461 - RNA, 19 nt, Homo sapiens
  misc_RNA (1)...(19): siRNA sense strand
agcaagaguucaagaauug

SEQ ID NO: 846462 - RNA, 19 nt, Homo sapiens
  misc_RNA (1)...(19): siRNA sense strand
aaagauagccuuggaggaa

SEQ ID NO: 846463 - RNA, 19 nt, Homo sapiens
  misc_RNA (1)...(19): siRNA sense strand
ucacucaggcuaaauuuga

SEQ ID NO: 846464 - RNA, 19 nt, Homo sapiens
  misc_RNA (1)...(19): siRNA sense strand
ugccuuagcugauuuaucu

SEQ ID NO: 846465 - RNA, 19 nt, Homo sapiens
  misc_RNA (1)...(19): siRNA sense strand
aaacauaccauuugugagu

SEQ ID NO: 846466 - RNA, 19 nt, Homo sapiens
  misc_RNA (1)...(19): siRNA sense strand
cagaaucacuugccaacuc

SEQ ID NO: 846467 - RNA, 19 nt, Homo sapiens
  misc_RNA (1)...(19): siRNA sense strand
uacaguaccuccugcagaa

SEQ ID NO: 846468 - RNA, 19 nt, Homo sapiens
  misc_RNA (1)...(19): siRNA sense strand
ggaccugguucagcagaaa

SEQ ID NO: 846469 - RNA, 19 nt, Homo sapiens
  misc_RNA (1)...(19): siRNA sense strand
gaaaucgagcugcagaaga

SEQ ID NO: 846470 - RNA, 19 nt, Homo sapiens
  misc_RNA (1)...(19): siRNA sense strand
agacauacguugguagaga

SEQ ID NO: 846471 - RNA, 19 nt, Homo sapiens
  misc_RNA (1)...(19): siRNA sense strand
gaacugccucauuugauug

SEQ ID NO: 846472 - RNA, 19 nt, Homo sapiens
  misc_RNA (1)...(19): siRNA sense strand
gaacggaccaagaccuuca

SEQ ID NO: 846473 - RNA, 19 nt, Homo sapiens
  misc_RNA (1)...(19): siRNA sense strand
uguguugacuugguuguua

SEQ ID NO: 846474 - RNA, 19 nt, Homo sapiens
  misc_RNA (1)...(19): siRNA sense strand
ggaagagaacggaccaaga

SEQ ID NO: 846475 - RNA, 19 nt, Homo sapiens
  misc_RNA (1)...(19): siRNA sense strand
ggaaugaaacccaaaauau

SEQ ID NO: 846476 - RNA, 19 nt, Homo sapiens
  misc_RNA (1)...(19): siRNA sense strand
acucuucgcuaugcaaaua

SEQ ID NO: 846477 - RNA, 19 nt, Homo sapiens
  misc_RNA (1)...(19): siRNA sense strand
aaagagagcucacagaaga

SEQ ID NO: 846478 - RNA, 19 nt, Homo sapiens
  misc_RNA (1)...(19): siRNA sense strand
gaaagaacaccauuugaug

SEQ ID NO: 846479 - RNA, 19 nt, Homo sapiens
  misc_RNA (1)...(19): siRNA sense strand
caaagcaacugcccuugaa

SEQ ID NO: 846480 - RNA, 19 nt, Homo sapiens
  misc_RNA (1)...(19): siRNA sense strand
cagguugcauggucaauaa

SEQ ID NO: 846481 - RNA, 19 nt, Homo sapiens
  misc_RNA (1)...(19): siRNA sense strand
ccaagcaaaucuggaaauu

SEQ ID NO: 846482 - RNA, 19 nt, Homo sapiens
  misc_RNA (1)...(19): siRNA sense strand
ggaggaauguugguucaga

SEQ ID NO: 846483 - RNA, 19 nt, Homo sapiens
  misc_RNA (1)...(19): siRNA sense strand
gcaaagcaacugcccuuga

SEQ ID NO: 846484 - RNA, 19 nt, Homo sapiens
  misc_RNA (1)...(19): siRNA sense strand
cacagaagauggacuugaa

SEQ ID NO: 846485 - RNA, 19 nt, Homo sapiens
  misc_RNA (1)...(19): siRNA sense strand
ccaauacucugggugugua

SEQ ID NO: 846486 - RNA, 19 nt, Homo sapiens
  misc_RNA (1)...(19): siRNA sense strand
gaggaauguugguucagaa

SEQ ID NO: 846487 - RNA, 19 nt, Homo sapiens
  misc_RNA (1)...(19): siRNA sense strand
cgaaagaacaccauuugau

SEQ ID NO: 846488 - RNA, 19 nt, Homo sapiens
  misc_RNA (1)...(19): siRNA sense strand
gaauguugguucagaaacu

SEQ ID NO: 846489 - RNA, 19 nt, Homo sapiens
  misc_RNA (1)...(19): siRNA sense strand
gcaggaacauaaacuccau

SEQ ID NO: 846490 - RNA, 19 nt, Homo sapiens
  misc_RNA (1)...(19): siRNA sense strand
uccauguucugaucaauaa

SEQ ID NO: 846491 - RNA, 19 nt, Homo sapiens
  misc_RNA (1)...(19): siRNA sense strand
uaaacuccauguucugauc

SEQ ID NO: 846492 - RNA, 19 nt, Homo sapiens
  misc_RNA (1)...(19): siRNA sense strand
gcagguugcauggucaaua

SEQ ID NO: 846493 - RNA, 19 nt, Homo sapiens
  misc_RNA (1)...(19): siRNA sense strand
aaacuuugcugccaauacu

SEQ ID NO: 846494 - RNA, 19 nt, Homo sapiens
  misc_RNA (1)...(19): siRNA sense strand
gaucuccaguccgaaagaa

SEQ ID NO: 846495 - RNA, 19 nt, Homo sapiens
  misc_RNA (1)...(19): siRNA sense strand
ggaggaaacagcggcauug

SEQ ID NO: 846496 - RNA, 19 nt, Homo sapiens
  misc_RNA (1)...(19): siRNA sense strand
aaacugaacaccaaugauc

SEQ ID NO: 846497 - RNA, 19 nt, Homo sapiens
  misc_RNA (1)...(19): siRNA sense strand
aaacagcggcauuggcaaa

SEQ ID NO: 846498 - RNA, 19 nt, Homo sapiens
  misc_RNA (1)...(19): siRNA sense strand
gaaucugcauguaaagacu

SEQ ID NO: 846499 - RNA, 19 nt, Homo sapiens
  misc_RNA (1)...(19): siRNA sense strand
caggaggaauguugguuca

SEQ ID NO: 846500 - RNA, 19 nt, Homo sapiens
  misc_RNA (1)...(19): siRNA sense strand
ugauggaacuauggucuau

SEQ ID NO: 846501 - RNA, 19 nt, Homo sapiens
  misc_RNA (1)...(19): siRNA sense strand
cauaaacuccauguucuga

SEQ ID NO: 846502 - RNA, 19 nt, Homo sapiens
  misc_RNA (1)...(19): siRNA sense strand
gcucacagaagauggacuu

SEQ ID NO: 846503 - RNA, 19 nt, Homo sapiens
  misc_RNA (1)...(19): siRNA sense strand
gaaacugaacaccaaugau

SEQ ID NO: 846504 - RNA, 19 nt, Homo sapiens
  misc_RNA (1)...(19): siRNA sense strand
uaaaagagagcucacagaa

SEQ ID NO: 846505 - RNA, 19 nt, Homo sapiens
  misc_RNA (1)...(19): siRNA sense strand
caagaggcagcaagugguu

SEQ ID NO: 846506 - RNA, 19 nt, Homo sapiens
  misc_RNA (1)...(19): siRNA sense strand
ucccugugcuggagaaaga

SEQ ID NO: 846507 - RNA, 19 nt, Homo sapiens
  misc_RNA (1)...(19): siRNA sense strand
ugucugaucccaagcaaau

SEQ ID NO: 846508 - RNA, 19 nt, Homo sapiens
  misc_RNA (1)...(19): siRNA sense strand
agaaacugaacaccaauga

SEQ ID NO: 846509 - RNA, 19 nt, Homo sapiens
  misc_RNA (1)...(19): siRNA sense strand
ucacagaagauggacuuga

SEQ ID NO: 846510 - RNA, 19 nt, Homo sapiens
  misc_RNA (1)...(19): siRNA sense strand
cuuugucccucaugacuug

SEQ ID NO: 846511 - RNA, 19 nt, Homo sapiens
  misc_RNA (1)...(19): siRNA sense strand
ccgaaagaacaccauuuga

SEQ ID NO: 846512 - RNA, 19 nt, Homo sapiens
  misc_RNA (1)...(19): siRNA sense strand
cauguucugaucaauaaug

SEQ ID NO: 846513 - RNA, 19 nt, Homo sapiens
  misc_RNA (1)...(19): siRNA sense strand
acuauggucuaugcacaaa

SEQ ID NO: 846514 - RNA, 19 nt, Homo sapiens
  misc_RNA (1)...(19): siRNA sense strand
gcaacugcccuugaaaucg

SEQ ID NO: 846515 - RNA, 19 nt, Homo sapiens
  misc_RNA (1)...(19): siRNA sense strand
cagcggcauuggcaaagca

SEQ ID NO: 846516 - RNA, 19 nt, Homo sapiens
  misc_RNA (1)...(19): siRNA sense strand
aagacuuugucccucauga

SEQ ID NO: 846517 - RNA, 19 nt, Homo sapiens
  misc_RNA (1)...(19): siRNA sense strand
aagcaacugcccuugaaau

SEQ ID NO: 846518 - RNA, 19 nt, Homo sapiens
  misc_RNA (1)...(19): siRNA sense strand
uccgaaagaacaccauuug

SEQ ID NO: 846519 - RNA, 19 nt, Homo sapiens
  misc_RNA (1)...(19): siRNA sense strand
cuccauguucugaucaaua

SEQ ID NO: 846520 - RNA, 19 nt, Homo sapiens
  misc_RNA (1)...(19): siRNA sense strand
guccgaaagaacaccauuu

SEQ ID NO: 846521 - RNA, 19 nt, Homo sapiens
  misc_RNA (1)...(19): siRNA sense strand
acagaagauggacuugaaa

SEQ ID NO: 846522 - RNA, 19 nt, Homo sapiens
  misc_RNA (1)...(19): siRNA sense strand
ggccagagguuccugaaau

SEQ ID NO: 846523 - RNA, 19 nt, Homo sapiens
  misc_RNA (1)...(19): siRNA sense strand
cauauaccuucaagccaua

SEQ ID NO: 846524 - RNA, 19 nt, Homo sapiens
  misc_RNA (1)...(19): siRNA sense strand
gcucaagaaucccuggaau

SEQ ID NO: 846525 - RNA, 19 nt, Homo sapiens
  misc_RNA (1)...(19): siRNA sense strand
ucccauagcucaagaaucc

SEQ ID NO: 846526 - RNA, 19 nt, Homo sapiens
  misc_RNA (1)...(19): siRNA sense strand
gccagagguuccugaaauc

SEQ ID NO: 846527 - RNA, 19 nt, Homo sapiens
  misc_RNA (1)...(19): siRNA sense strand
gcgcugcuccgauguagug

SEQ ID NO: 846528 - RNA, 19 nt, Homo sapiens
  misc_RNA (1)...(19): siRNA sense strand
gcaaacuccagugaacauu

SEQ ID NO: 846529 - RNA, 19 nt, Homo sapiens
  misc_RNA (1)...(19): siRNA sense strand
ggauguggccaacuucuac

SEQ ID NO: 846530 - RNA, 19 nt, Homo sapiens
  misc_RNA (1)...(19): siRNA sense strand
gcugcagacucccauaggu

SEQ ID NO: 846531 - RNA, 19 nt, Homo sapiens
  misc_RNA (1)...(19): siRNA sense strand
caaacuccagugaacauuc

SEQ ID NO: 846532 - RNA, 19 nt, Homo sapiens
  misc_RNA (1)...(19): siRNA sense strand
gaggcgcugcuccgaugua

SEQ ID NO: 846533 - RNA, 19 nt, Homo sapiens
  misc_RNA (1)...(19): siRNA sense strand
ccaggagugucccauagcu

SEQ ID NO: 846534 - RNA, 19 nt, Homo sapiens
  misc_RNA (1)...(19): siRNA sense strand
ucccauaggugugcaagca

SEQ ID NO: 846535 - RNA, 19 nt, Homo sapiens
  misc_RNA (1)...(19): siRNA sense strand
ggucaucaggugagcuuca

SEQ ID NO: 846536 - RNA, 19 nt, Homo sapiens
  misc_RNA (1)...(19): siRNA sense strand
ucaaggagauccagaaacu

SEQ ID NO: 846537 - RNA, 19 nt, Homo sapiens
  misc_RNA (1)...(19): siRNA sense strand
uccagaaacucaucaagga

SEQ ID NO: 846538 - RNA, 19 nt, Homo sapiens
  misc_RNA (1)...(19): siRNA sense strand
gaacucccuccuccacuga

SEQ ID NO: 846539 - RNA, 19 nt, Homo sapiens
  misc_RNA (1)...(19): siRNA sense strand
gaaguuccgccacaacauc

SEQ ID NO: 846540 - RNA, 19 nt, Homo sapiens
  misc_RNA (1)...(19): siRNA sense strand
gugcugcucuguggcauug

SEQ ID NO: 846541 - RNA, 19 nt, Homo sapiens
  misc_RNA (1)...(19): siRNA sense strand
gccacaacaucgccuacuu

SEQ ID NO: 846542 - RNA, 19 nt, Homo sapiens
  misc_RNA (1)...(19): siRNA sense strand
gagaaguuccgccacaaca

SEQ ID NO: 846543 - RNA, 19 nt, Homo sapiens
  misc_RNA (1)...(19): siRNA sense strand
ugugugacaugcaggagaa

SEQ ID NO: 846544 - RNA, 19 nt, Homo sapiens
  misc_RNA (1)...(19): siRNA sense strand
ccacaacaucgccuacuuc

SEQ ID NO: 846545 - RNA, 19 nt, Homo sapiens
  misc_RNA (1)...(19): siRNA sense strand
ggcacaggccugcaucuug

SEQ ID NO: 846546 - RNA, 19 nt, Homo sapiens
  misc_RNA (1)...(19): siRNA sense strand
guucaaggagauccagaaa

SEQ ID NO: 846547 - RNA, 19 nt, Homo sapiens
  misc_RNA (1)...(19): siRNA sense strand
aaggagauccagaaacuca

SEQ ID NO: 846548 - RNA, 19 nt, Homo sapiens
  misc_RNA (1)...(19): siRNA sense strand
ggagauccagaaacucauc

SEQ ID NO: 846549 - RNA, 19 nt, Homo sapiens
  misc_RNA (1)...(19): siRNA sense strand
ucccacagaucgucucagu

SEQ ID NO: 846550 - RNA, 19 nt, Homo sapiens
  misc_RNA (1)...(19): siRNA sense strand
gguuggcccugaccucucu

SEQ ID NO: 846551 - RNA, 19 nt, Homo sapiens
  misc_RNA (1)...(19): siRNA sense strand
ggagaaguuccgccacaac

SEQ ID NO: 846552 - RNA, 19 nt, Homo sapiens
  misc_RNA (1)...(19): siRNA sense strand
ggauguagaugcuuauuua

SEQ ID NO: 846553 - RNA, 19 nt, Homo sapiens
  misc_RNA (1)...(19): siRNA sense strand
gaauguagcuuuaacuuuc

SEQ ID NO: 846554 - RNA, 19 nt, Homo sapiens
  misc_RNA (1)...(19): siRNA sense strand
guaauaagauugaggauca

SEQ ID NO: 846555 - RNA, 19 nt, Homo sapiens
  misc_RNA (1)...(19): siRNA sense strand
gagauugaauguagcuuua

SEQ ID NO: 846556 - RNA, 19 nt, Homo sapiens
  misc_RNA (1)...(19): siRNA sense strand
gaacauauuugguuaacuc

SEQ ID NO: 846557 - RNA, 19 nt, Homo sapiens
  misc_RNA (1)...(19): siRNA sense strand
gcugugacauggcaaauaa

SEQ ID NO: 846558 - RNA, 19 nt, Homo sapiens
  misc_RNA (1)...(19): siRNA sense strand
acaguuggcugcuuacaua

SEQ ID NO: 846559 - RNA, 19 nt, Homo sapiens
  misc_RNA (1)...(19): siRNA sense strand
ugaaggagguuaagaaauc

SEQ ID NO: 846560 - RNA, 19 nt, Homo sapiens
  misc_RNA (1)...(19): siRNA sense strand
ucacuuggcugcuguguug

SEQ ID NO: 846561 - RNA, 19 nt, Homo sapiens
  misc_RNA (1)...(19): siRNA sense strand
ucagaaacccacaauguua

SEQ ID NO: 846562 - RNA, 19 nt, Homo sapiens
  misc_RNA (1)...(19): siRNA sense strand
gaaagagaaguauaaguga

SEQ ID NO: 846563 - RNA, 19 nt, Homo sapiens
  misc_RNA (1)...(19): siRNA sense strand
ggucagaacuaucauccaa

SEQ ID NO: 846564 - RNA, 19 nt, Homo sapiens
  misc_RNA (1)...(19): siRNA sense strand
ucauugaucuuccuagaaa

SEQ ID NO: 846565 - RNA, 19 nt, Homo sapiens
  misc_RNA (1)...(19): siRNA sense strand
gauugaggaucauuucauu

SEQ ID NO: 846566 - RNA, 19 nt, Homo sapiens
  misc_RNA (1)...(19): siRNA sense strand
caucaucccuuuccaaauc

SEQ ID NO: 846567 - RNA, 19 nt, Homo sapiens
  misc_RNA (1)...(19): siRNA sense strand
gcaggaauaugagauugaa

SEQ ID NO: 846568 - RNA, 19 nt, Homo sapiens
  misc_RNA (1)...(19): siRNA sense strand
caaaacaguuggcugcuua

SEQ ID NO: 846569 - RNA, 19 nt, Homo sapiens
  misc_RNA (1)...(19): siRNA sense strand
ccaaauccuuguuacagaa

SEQ ID NO: 846570 - RNA, 19 nt, Homo sapiens
  misc_RNA (1)...(19): siRNA sense strand
aaagugaucuaucgcagaa

SEQ ID NO: 846571 - RNA, 19 nt, Homo sapiens
  misc_RNA (1)...(19): siRNA sense strand
acaauuaaguggauuaugg

SEQ ID NO: 846572 - RNA, 19 nt, Homo sapiens
  misc_RNA (1)...(19): siRNA sense strand
gcagaaagaaaguucauca

SEQ ID NO: 846573 - RNA, 19 nt, Homo sapiens
  misc_RNA (1)...(19): siRNA sense strand
gaacuuguagcuuauuugu

SEQ ID NO: 846574 - RNA, 19 nt, Homo sapiens
  misc_RNA (1)...(19): siRNA sense strand
ugacauggcaaauaaagaa

SEQ ID NO: 846575 - RNA, 19 nt, Homo sapiens
  misc_RNA (1)...(19): siRNA sense strand
ggaaaaccaucuuacuuug

SEQ ID NO: 846576 - RNA, 19 nt, Homo sapiens
  misc_RNA (1)...(19): siRNA sense strand
acuuguagcuuauuuguug

SEQ ID NO: 846577 - RNA, 19 nt, Homo sapiens
  misc_RNA (1)...(19): siRNA sense strand
agucgaacauauuugguua

SEQ ID NO: 846578 - RNA, 19 nt, Homo sapiens
  misc_RNA (1)...(19): siRNA sense strand
uuacuuugguuccaggaua

SEQ ID NO: 846579 - RNA, 19 nt, Homo sapiens
  misc_RNA (1)...(19): siRNA sense strand
caugauagucgaacauauu

SEQ ID NO: 846580 - RNA, 19 nt, Homo sapiens
  misc_RNA (1)...(19): siRNA sense strand
agaaagagaaguauaagug

SEQ ID NO: 846581 - RNA, 19 nt, Homo sapiens
  misc_RNA (1)...(19): siRNA sense strand
caucagaaacccacaaugu

SEQ ID NO: 846582 - RNA, 19 nt, Homo sapiens
  misc_RNA (1)...(19): siRNA sense strand
cagaaacccacaauguuaa

SEQ ID NO: 846583 - RNA, 19 nt, Homo sapiens
  misc_RNA (1)...(19): siRNA sense strand
acagaaagcccaucaucaa

SEQ ID NO: 846584 - RNA, 19 nt, Homo sapiens
  misc_RNA (1)...(19): siRNA sense strand
ccagauaaacuucguaaag

SEQ ID NO: 846585 - RNA, 19 nt, Homo sapiens
  misc_RNA (1)...(19): siRNA sense strand
gaacaggaaaaccaucuua

SEQ ID NO: 846586 - RNA, 19 nt, Homo sapiens
  misc_RNA (1)...(19): siRNA sense strand
gguuuaaacuggcuucaag

SEQ ID NO: 846587 - RNA, 19 nt, Homo sapiens
  misc_RNA (1)...(19): siRNA sense strand
gaaggagguuaagaaaucu

SEQ ID NO: 846588 - RNA, 19 nt, Homo sapiens
  misc_RNA (1)...(19): siRNA sense strand
uagaagaucuuggcguugu

SEQ ID NO: 846589 - RNA, 19 nt, Homo sapiens
  misc_RNA (1)...(19): siRNA sense strand
gaaagcccaucaucaaaau

SEQ ID NO: 846590 - RNA, 19 nt, Homo sapiens
  misc_RNA (1)...(19): siRNA sense strand
cagaaagcccaucaucaaa

SEQ ID NO: 846591 - RNA, 19 nt, Homo sapiens
  misc_RNA (1)...(19): siRNA sense strand
cuaauaagaacaugaagga

SEQ ID NO: 846592 - RNA, 19 nt, Homo sapiens
  misc_RNA (1)...(19): siRNA sense strand
gugaacuuguagcuuauuu

SEQ ID NO: 846593 - RNA, 19 nt, Homo sapiens
  misc_RNA (1)...(19): siRNA sense strand
gaaaagcccagauaaacuu

SEQ ID NO: 846594 - RNA, 19 nt, Homo sapiens
  misc_RNA (1)...(19): siRNA sense strand
uugguuaacuccagugauu

SEQ ID NO: 846595 - RNA, 19 nt, Homo sapiens
  misc_RNA (1)...(19): siRNA sense strand
ucaggaccaugaaacaaug

SEQ ID NO: 846596 - RNA, 19 nt, Homo sapiens
  misc_RNA (1)...(19): siRNA sense strand
ccaauuguuuacaggaaga

SEQ ID NO: 846597 - RNA, 19 nt, Homo sapiens
  misc_RNA (1)...(19): siRNA sense strand
ggaauaugagauugaaugu

SEQ ID NO: 846598 - RNA, 19 nt, Homo sapiens
  misc_RNA (1)...(19): siRNA sense strand
uggagaaagagaaguauaa

SEQ ID NO: 846599 - RNA, 19 nt, Homo sapiens
  misc_RNA (1)...(19): siRNA sense strand
caugaaggagguuaagaaa

SEQ ID NO: 846600 - RNA, 19 nt, Homo sapiens
  misc_RNA (1)...(19): siRNA sense strand
gacagaaagcccaucauca

SEQ ID NO: 846601 - RNA, 19 nt, Homo sapiens
  misc_RNA (1)...(19): siRNA sense strand
guuggcugcuuacauaaau

SEQ ID NO: 846602 - RNA, 19 nt, Homo sapiens
  misc_RNA (1)...(19): siRNA sense strand
cagcaggaauaugagauug

SEQ ID NO: 846603 - RNA, 19 nt, Homo sapiens
  misc_RNA (1)...(19): siRNA sense strand
uaagaaaucuccaaaacag

SEQ ID NO: 846604 - RNA, 19 nt, Homo sapiens
  misc_RNA (1)...(19): siRNA sense strand
uagcuuauuuguugaggau

SEQ ID NO: 846605 - RNA, 19 nt, Homo sapiens
  misc_RNA (1)...(19): siRNA sense strand
caccaauuguuuacaggaa

SEQ ID NO: 846606 - RNA, 19 nt, Homo sapiens
  misc_RNA (1)...(19): siRNA sense strand
gauagucgaacauauuugg

SEQ ID NO: 846607 - RNA, 19 nt, Homo sapiens
  misc_RNA (1)...(19): siRNA sense strand
gaacaugaaggagguuaag

SEQ ID NO: 846608 - RNA, 19 nt, Homo sapiens
  misc_RNA (1)...(19): siRNA sense strand
aaauagaacaguuggacaa

SEQ ID NO: 846609 - RNA, 19 nt, Homo sapiens
  misc_RNA (1)...(19): siRNA sense strand
gcucaccaauuguuuacag

SEQ ID NO: 846610 - RNA, 19 nt, Homo sapiens
  misc_RNA (1)...(19): siRNA sense strand
agaaagaaaguucaucauc

SEQ ID NO: 846611 - RNA, 19 nt, Homo sapiens
  misc_RNA (1)...(19): siRNA sense strand
gagaaagagaaguauaagu

SEQ ID NO: 846612 - RNA, 19 nt, Homo sapiens
  misc_RNA (1)...(19): siRNA sense strand
uccaaauccuuguuacaga

SEQ ID NO: 846613 - RNA, 19 nt, Homo sapiens
  misc_RNA (1)...(19): siRNA sense strand
guaauauagcuaaggaugu

SEQ ID NO: 846614 - RNA, 19 nt, Homo sapiens
  misc_RNA (1)...(19): siRNA sense strand
ucagaacuaucauccaaaa

SEQ ID NO: 846615 - RNA, 19 nt, Homo sapiens
  misc_RNA (1)...(19): siRNA sense strand
uggcugcuguguugacuug

SEQ ID NO: 846616 - RNA, 19 nt, Homo sapiens
  misc_RNA (1)...(19): siRNA sense strand
uaagauugaggaucauuuc

SEQ ID NO: 846617 - RNA, 19 nt, Homo sapiens
  misc_RNA (1)...(19): siRNA sense strand
ccaugauagucgaacauau

SEQ ID NO: 846618 - RNA, 19 nt, Homo sapiens
  misc_RNA (1)...(19): siRNA sense strand
gcccagauaaacuucguaa

SEQ ID NO: 846619 - RNA, 19 nt, Homo sapiens
  misc_RNA (1)...(19): siRNA sense strand
gcugcuguguugacuuguu

SEQ ID NO: 846620 - RNA, 19 nt, Homo sapiens
  misc_RNA (1)...(19): siRNA sense strand
gcuuauuuguugaggauag

SEQ ID NO: 846621 - RNA, 19 nt, Homo sapiens
  misc_RNA (1)...(19): siRNA sense strand
ggagaaagagaaguauaag

SEQ ID NO: 846622 - RNA, 19 nt, Homo sapiens
  misc_RNA (1)...(19): siRNA sense strand
gauugaauguagcuuuaac

SEQ ID NO: 846623 - RNA, 19 nt, Homo sapiens
  misc_RNA (1)...(19): siRNA sense strand
ugagauugaauguagcuuu

SEQ ID NO: 846624 - RNA, 19 nt, Homo sapiens
  misc_RNA (1)...(19): siRNA sense strand
caaauccuuguuacagaaa

SEQ ID NO: 846625 - RNA, 19 nt, Homo sapiens
  misc_RNA (1)...(19): siRNA sense strand
gaucuaucgcagaaagaaa

SEQ ID NO: 846626 - RNA, 19 nt, Homo sapiens
  misc_RNA (1)...(19): siRNA sense strand
ugacuuguugccucuagua

SEQ ID NO: 846627 - RNA, 19 nt, Homo sapiens
  misc_RNA (1)...(19): siRNA sense strand
uuccugugcucaccaauug

SEQ ID NO: 846628 - RNA, 19 nt, Homo sapiens
  misc_RNA (1)...(19): siRNA sense strand
ugaaacaauggcccaaguu

SEQ ID NO: 846629 - RNA, 19 nt, Homo sapiens
  misc_RNA (1)...(19): siRNA sense strand
gacauggcaaauaaagaaa

SEQ ID NO: 846630 - RNA, 19 nt, Homo sapiens
  misc_RNA (1)...(19): siRNA sense strand
cuuguugccucuaguaaag

SEQ ID NO: 846631 - RNA, 19 nt, Homo sapiens
  misc_RNA (1)...(19): siRNA sense strand
uugaggaucauuucauuga

SEQ ID NO: 846632 - RNA, 19 nt, Homo sapiens
  misc_RNA (1)...(19): siRNA sense strand
acaugaaggagguuaagaa

SEQ ID NO: 846633 - RNA, 19 nt, Homo sapiens
  misc_RNA (1)...(19): siRNA sense strand
guuaagaaaucuccaaaac

SEQ ID NO: 846634 - RNA, 19 nt, Homo sapiens
  misc_RNA (1)...(19): siRNA sense strand
uuucauugaucuuccuaga

SEQ ID NO: 846635 - RNA, 19 nt, Homo sapiens
  misc_RNA (1)...(19): siRNA sense strand
agaaacccacaauguuaaa

SEQ ID NO: 846636 - RNA, 19 nt, Homo sapiens
  misc_RNA (1)...(19): siRNA sense strand
agacagaaagcccaucauc

SEQ ID NO: 846637 - RNA, 19 nt, Homo sapiens
  misc_RNA (1)...(19): siRNA sense strand
gaacuaucauccaaaacag

SEQ ID NO: 846638 - RNA, 19 nt, Homo sapiens
  misc_RNA (1)...(19): siRNA sense strand
cugguaauauagcuaagga

SEQ ID NO: 846639 - RNA, 19 nt, Homo sapiens
  misc_RNA (1)...(19): siRNA sense strand
gagguuaagaaaucuccaa

SEQ ID NO: 846640 - RNA, 19 nt, Homo sapiens
  misc_RNA (1)...(19): siRNA sense strand
ucagcaggaauaugagauu

SEQ ID NO: 846641 - RNA, 19 nt, Homo sapiens
  misc_RNA (1)...(19): siRNA sense strand
aggaauaugagauugaaug

SEQ ID NO: 846642 - RNA, 19 nt, Homo sapiens
  misc_RNA (1)...(19): siRNA sense strand
gcugcuuacauaaauagaa

SEQ ID NO: 846643 - RNA, 19 nt, Homo sapiens
  misc_RNA (1)...(19): siRNA sense strand
gugguggucagaacuauca

SEQ ID NO: 846644 - RNA, 19 nt, Homo sapiens
  misc_RNA (1)...(19): siRNA sense strand
cugcuguguugacuuguug

SEQ ID NO: 846645 - RNA, 19 nt, Homo sapiens
  misc_RNA (1)...(19): siRNA sense strand
cagugauucugguucuuca

SEQ ID NO: 846646 - RNA, 19 nt, Homo sapiens
  misc_RNA (1)...(19): siRNA sense strand
gaaaaugaacuggcuugug

SEQ ID NO: 846647 - RNA, 19 nt, Homo sapiens
  misc_RNA (1)...(19): siRNA sense strand
uacuuugguuccaggauau

SEQ ID NO: 846648 - RNA, 19 nt, Homo sapiens
  misc_RNA (1)...(19): siRNA sense strand
gaagaauacuaccagauua

SEQ ID NO: 846649 - RNA, 19 nt, Homo sapiens
  misc_RNA (1)...(19): siRNA sense strand
ggaagaauacuaccagauu

SEQ ID NO: 846650 - RNA, 19 nt, Homo sapiens
  misc_RNA (1)...(19): siRNA sense strand
aacgaaggcucgaagauua

SEQ ID NO: 846651 - RNA, 19 nt, Homo sapiens
  misc_RNA (1)...(19): siRNA sense strand
caggauaucugguucuuau

SEQ ID NO: 846652 - RNA, 19 nt, Homo sapiens
  misc_RNA (1)...(19): siRNA sense strand
gaucugggacuguuuguuu

SEQ ID NO: 846653 - RNA, 19 nt, Homo sapiens
  misc_RNA (1)...(19): siRNA sense strand
gcuguuagaugcucuuguu

SEQ ID NO: 846654 - RNA, 19 nt, Homo sapiens
  misc_RNA (1)...(19): siRNA sense strand
ggauaucugguucuuauaa

SEQ ID NO: 846655 - RNA, 19 nt, Homo sapiens
  misc_RNA (1)...(19): siRNA sense strand
acaaugugcugcuggcaua

SEQ ID NO: 846656 - RNA, 19 nt, Homo sapiens
  misc_RNA (1)...(19): siRNA sense strand
gcgauaaguuuaagcagau

SEQ ID NO: 846657 - RNA, 19 nt, Homo sapiens
  misc_RNA (1)...(19): siRNA sense strand
uaacgaaggcucgaagauu

SEQ ID NO: 846658 - RNA, 19 nt, Homo sapiens
  misc_RNA (1)...(19): siRNA sense strand
agaggacccuguacaaugu

SEQ ID NO: 846659 - RNA, 19 nt, Homo sapiens
  misc_RNA (1)...(19): siRNA sense strand
gaauacuaccagauuacua

SEQ ID NO: 846660 - RNA, 19 nt, Homo sapiens
  misc_RNA (1)...(19): siRNA sense strand
gacauuugcgauaaguuua

SEQ ID NO: 846661 - RNA, 19 nt, Homo sapiens
  misc_RNA (1)...(19): siRNA sense strand
guuagaugcucuuguugga

SEQ ID NO: 846662 - RNA, 19 nt, Homo sapiens
  misc_RNA (1)...(19): siRNA sense strand
caccagcguuccagacauu

SEQ ID NO: 846663 - RNA, 19 nt, Homo sapiens
  misc_RNA (1)...(19): siRNA sense strand
cagaggacccuguacaaug

SEQ ID NO: 846664 - RNA, 19 nt, Homo sapiens
  misc_RNA (1)...(19): siRNA sense strand
agacauuugcgauaaguuu

SEQ ID NO: 846665 - RNA, 19 nt, Homo sapiens
  misc_RNA (1)...(19): siRNA sense strand
caaagggagcuucgugaug

SEQ ID NO: 846666 - RNA, 19 nt, Homo sapiens
  misc_RNA (1)...(19): siRNA sense strand
gauaucugguucuuauaac

SEQ ID NO: 846667 - RNA, 19 nt, Homo sapiens
  misc_RNA (1)...(19): siRNA sense strand
cgauaaguuuaagcagaua

SEQ ID NO: 846668 - RNA, 19 nt, Homo sapiens
  misc_RNA (1)...(19): siRNA sense strand
gcaggauaucugguucuua

SEQ ID NO: 846669 - RNA, 19 nt, Homo sapiens
  misc_RNA (1)...(19): siRNA sense strand
ggguggcccugaccuuaau

SEQ ID NO: 846670 - RNA, 19 nt, Homo sapiens
  misc_RNA (1)...(19): siRNA sense strand
uuccagacauuugcgauaa

SEQ ID NO: 846671 - RNA, 19 nt, Homo sapiens
  misc_RNA (1)...(19): siRNA sense strand
uuaagcagauaaccaaagg

SEQ ID NO: 846672 - RNA, 19 nt, Homo sapiens
  misc_RNA (1)...(19): siRNA sense strand
gggaaugaauuuuauagca

SEQ ID NO: 846673 - RNA, 19 nt, Homo sapiens
  misc_RNA (1)...(19): siRNA sense strand
ccagacauuugcgauaagu

SEQ ID NO: 846674 - RNA, 19 nt, Homo sapiens
  misc_RNA (1)...(19): siRNA sense strand
gggacuguuuguuuaacga

SEQ ID NO: 846675 - RNA, 19 nt, Homo sapiens
  misc_RNA (1)...(19): siRNA sense strand
ggacuguuuguuuaacgaa

SEQ ID NO: 846676 - RNA, 19 nt, Homo sapiens
  misc_RNA (1)...(19): siRNA sense strand
uuaagcagcaccaggaguu

SEQ ID NO: 846677 - RNA, 19 nt, Homo sapiens
  misc_RNA (1)...(19): siRNA sense strand
guuccagacauuugcgaua

SEQ ID NO: 846678 - RNA, 19 nt, Homo sapiens
  misc_RNA (1)...(19): siRNA sense strand
agacagugcuucggaucug

SEQ ID NO: 846679 - RNA, 19 nt, Homo sapiens
  misc_RNA (1)...(19): siRNA sense strand
uauagcaggauaucugguu

SEQ ID NO: 846680 - RNA, 19 nt, Homo sapiens
  misc_RNA (1)...(19): siRNA sense strand
aacgugaaguuccggaaga

SEQ ID NO: 846681 - RNA, 19 nt, Homo sapiens
  misc_RNA (1)...(19): siRNA sense strand
ccaaagggagcuucgugau

SEQ ID NO: 846682 - RNA, 19 nt, Homo sapiens
  misc_RNA (1)...(19): siRNA sense strand
ugguucaucugccuguuug

SEQ ID NO: 846683 - RNA, 19 nt, Homo sapiens
  misc_RNA (1)...(19): siRNA sense strand
cuucggaucugggacuguu

SEQ ID NO: 846684 - RNA, 19 nt, Homo sapiens
  misc_RNA (1)...(19): siRNA sense strand
ccaccagcguuccagacau

SEQ ID NO: 846685 - RNA, 19 nt, Homo sapiens
  misc_RNA (1)...(19): siRNA sense strand
gccagggaaugaauuuuau

SEQ ID NO: 846686 - RNA, 19 nt, Homo sapiens
  misc_RNA (1)...(19): siRNA sense strand
aucugggacuguuuguuua

SEQ ID NO: 846687 - RNA, 19 nt, Homo sapiens
  misc_RNA (1)...(19): siRNA sense strand
cagcaccaggaguugauuu

SEQ ID NO: 846688 - RNA, 19 nt, Homo sapiens
  misc_RNA (1)...(19): siRNA sense strand
cggguggcccugaccuuaa

SEQ ID NO: 846689 - RNA, 19 nt, Homo sapiens
  misc_RNA (1)...(19): siRNA sense strand
ccagaaucccggcuacuac

SEQ ID NO: 846690 - RNA, 19 nt, Homo sapiens
  misc_RNA (1)...(19): siRNA sense strand
gaaaggagcugaggucuac

SEQ ID NO: 846691 - RNA, 19 nt, Homo sapiens
  misc_RNA (1)...(19): siRNA sense strand
gaaaaugagcgguuuauaa

SEQ ID NO: 846692 - RNA, 19 nt, Homo sapiens
  misc_RNA (1)...(19): siRNA sense strand
cagcaggccuugagguuau

SEQ ID NO: 846693 - RNA, 19 nt, Homo sapiens
  misc_RNA (1)...(19): siRNA sense strand
guuuauaacugaugaguac

SEQ ID NO: 846694 - RNA, 19 nt, Homo sapiens
  misc_RNA (1)...(19): siRNA sense strand
ggaaccagcaccagagaga

SEQ ID NO: 846695 - RNA, 19 nt, Homo sapiens
  misc_RNA (1)...(19): siRNA sense strand
gcaggaggaggcagagaaa

SEQ ID NO: 846696 - RNA, 19 nt, Homo sapiens
  misc_RNA (1)...(19): siRNA sense strand
aaugagcgguuuauaacug

SEQ ID NO: 846697 - RNA, 19 nt, Homo sapiens
  misc_RNA (1)...(19): siRNA sense strand
gguagugggaugagucuga

SEQ ID NO: 846698 - RNA, 19 nt, Homo sapiens
  misc_RNA (1)...(19): siRNA sense strand
aggcauuucuguauucgaa

SEQ ID NO: 846699 - RNA, 19 nt, Homo sapiens
  misc_RNA (1)...(19): siRNA sense strand
ccagcaggccuugagguua

SEQ ID NO: 846700 - RNA, 19 nt, Homo sapiens
  misc_RNA (1)...(19): siRNA sense strand
ucuguggccuuacaaaaua

SEQ ID NO: 846701 - RNA, 19 nt, Homo sapiens
  misc_RNA (1)...(19): siRNA sense strand
ucucaggacaggauuauuc

SEQ ID NO: 846702 - RNA, 19 nt, Homo sapiens
  misc_RNA (1)...(19): siRNA sense strand
ccacguguguuagauaucg

SEQ ID NO: 846703 - RNA, 19 nt, Homo sapiens
  misc_RNA (1)...(19): siRNA sense strand
agaaaggagcugaggucua

SEQ ID NO: 846704 - RNA, 19 nt, Homo sapiens
  misc_RNA (1)...(19): siRNA sense strand
aaaaggcauuucuguauuc

SEQ ID NO: 846705 - RNA, 19 nt, Homo sapiens
  misc_RNA (1)...(19): siRNA sense strand
ggcaggaggaggcagagaa

SEQ ID NO: 846706 - RNA, 19 nt, Homo sapiens
  misc_RNA (1)...(19): siRNA sense strand
ggaggaggcagagaaagag

SEQ ID NO: 846707 - RNA, 19 nt, Homo sapiens
  misc_RNA (1)...(19): siRNA sense strand
gaugaguacagcagcacuu

SEQ ID NO: 846708 - RNA, 19 nt, Homo sapiens
  misc_RNA (1)...(19): siRNA sense strand
gccagcaggccuugagguu

SEQ ID NO: 846709 - RNA, 19 nt, Homo sapiens
  misc_RNA (1)...(19): siRNA sense strand
gguuuauaacugaugagua

SEQ ID NO: 846710 - RNA, 19 nt, Homo sapiens
  misc_RNA (1)...(19): siRNA sense strand
ucacuucucaggacaggau

SEQ ID NO: 846711 - RNA, 19 nt, Homo sapiens
  misc_RNA (1)...(19): siRNA sense strand
ugggcugucuguggccuua

SEQ ID NO: 846712 - RNA, 19 nt, Homo sapiens
  misc_RNA (1)...(19): siRNA sense strand
ggaggcagagaaagagaag

SEQ ID NO: 846713 - RNA, 19 nt, Homo sapiens
  misc_RNA (1)...(19): siRNA sense strand
gaggaggcagagaaagaga

SEQ ID NO: 846714 - RNA, 19 nt, Homo sapiens
  misc_RNA (1)...(19): siRNA sense strand
cuacaucacugaaaugaaa

SEQ ID NO: 846715 - RNA, 19 nt, Homo sapiens
  misc_RNA (1)...(19): siRNA sense strand
cagaggacauguuugguua

SEQ ID NO: 846716 - RNA, 19 nt, Homo sapiens
  misc_RNA (1)...(19): siRNA sense strand
ccagagaccuuccugagaa

SEQ ID NO: 846717 - RNA, 19 nt, Homo sapiens
  misc_RNA (1)...(19): siRNA sense strand
ggaaagagcagguugugaa

SEQ ID NO: 846718 - RNA, 19 nt, Homo sapiens
  misc_RNA (1)...(19): siRNA sense strand
ggacauguuugguuacuuc

SEQ ID NO: 846719 - RNA, 19 nt, Homo sapiens
  misc_RNA (1)...(19): siRNA sense strand
gaagagaugcugcgauucu

SEQ ID NO: 846720 - RNA, 19 nt, Homo sapiens
  misc_RNA (1)...(19): siRNA sense strand
gcagaggacauguuugguu

SEQ ID NO: 846721 - RNA, 19 nt, Homo sapiens
  misc_RNA (1)...(19): siRNA sense strand
ggaacagucugggcaagau

SEQ ID NO: 846722 - RNA, 19 nt, Homo sapiens
  misc_RNA (1)...(19): siRNA sense strand
gaaagagcagguugugaau

SEQ ID NO: 846723 - RNA, 19 nt, Homo sapiens
  misc_RNA (1)...(19): siRNA sense strand
uccagaaccugcccaagaa

SEQ ID NO: 846724 - RNA, 19 nt, Homo sapiens
  misc_RNA (1)...(19): siRNA sense strand
ugaaacugguggcacagaa

SEQ ID NO: 846725 - RNA, 19 nt, Homo sapiens
  misc_RNA (1)...(19): siRNA sense strand
augaagagaugcugcgauu

SEQ ID NO: 846726 - RNA, 19 nt, Homo sapiens
  misc_RNA (1)...(19): siRNA sense strand
ggucacagguuggaaagag

SEQ ID NO: 846727 - RNA, 19 nt, Homo sapiens
  misc_RNA (1)...(19): siRNA sense strand
aagagcagguugugaaugg

SEQ ID NO: 846728 - RNA, 19 nt, Homo sapiens
  misc_RNA (1)...(19): siRNA sense strand
caguggcucuuccgaaugu

SEQ ID NO: 846729 - RNA, 19 nt, Homo sapiens
  misc_RNA (1)...(19): siRNA sense strand
gaaagcgugaucccaggaa

SEQ ID NO: 846730 - RNA, 19 nt, Homo sapiens
  misc_RNA (1)...(19): siRNA sense strand
ggcagcaucuggaggaaag

SEQ ID NO: 846731 - RNA, 19 nt, Homo sapiens
  misc_RNA (1)...(19): siRNA sense strand
gguggcagaggacauguuu

SEQ ID NO: 846732 - RNA, 19 nt, Homo sapiens
  misc_RNA (1)...(19): siRNA sense strand
gguugugaauggagauguu

SEQ ID NO: 846733 - RNA, 19 nt, Homo sapiens
  misc_RNA (1)...(19): siRNA sense strand
gaacagucugggcaagaug

SEQ ID NO: 846734 - RNA, 19 nt, Homo sapiens
  misc_RNA (1)...(19): siRNA sense strand
aagagaugcugcgauucua

SEQ ID NO: 846735 - RNA, 19 nt, Homo sapiens
  misc_RNA (1)...(19): siRNA sense strand
gcuggagccugagcugguu

SEQ ID NO: 846736 - RNA, 19 nt, Homo sapiens
  misc_RNA (1)...(19): siRNA sense strand
agaaggugaucgacacagu

SEQ ID NO: 846737 - RNA, 19 nt, Homo sapiens
  misc_RNA (1)...(19): siRNA sense strand
gaggacauguuugguuacu

SEQ ID NO: 846738 - RNA, 19 nt, Homo sapiens
  misc_RNA (1)...(19): siRNA sense strand
gaaacugguggcacagaag

SEQ ID NO: 846739 - RNA, 19 nt, Homo sapiens
  misc_RNA (1)...(19): siRNA sense strand
uccaguggcucuuccgaau

SEQ ID NO: 846740 - RNA, 19 nt, Homo sapiens
  misc_RNA (1)...(19): siRNA sense strand
gagaugcugcgauucuaca

SEQ ID NO: 846741 - RNA, 19 nt, Homo sapiens
  misc_RNA (1)...(19): siRNA sense strand
cugccuacaucacugaaau

SEQ ID NO: 846742 - RNA, 19 nt, Homo sapiens
  misc_RNA (1)...(19): siRNA sense strand
gagcccgacugccagaaac

SEQ ID NO: 846743 - RNA, 19 nt, Homo sapiens
  misc_RNA (1)...(19): siRNA sense strand
cagugagcgucauccagaa

SEQ ID NO: 846744 - RNA, 19 nt, Homo sapiens
  misc_RNA (1)...(19): siRNA sense strand
augcugcgauucuacaguu

SEQ ID NO: 846745 - RNA, 19 nt, Homo sapiens
  misc_RNA (1)...(19): siRNA sense strand
gauucuacaguuacuacaa

SEQ ID NO: 846746 - RNA, 19 nt, Homo sapiens
  misc_RNA (1)...(19): siRNA sense strand
ggacaguucgagcacuaca

SEQ ID NO: 846747 - RNA, 19 nt, Homo sapiens
  misc_RNA (1)...(19): siRNA sense strand
ggggacaguucgagcacua

SEQ ID NO: 846748 - RNA, 19 nt, Homo sapiens
  misc_RNA (1)...(19): siRNA sense strand
gugaauaucugcaacauga

SEQ ID NO: 846749 - RNA, 19 nt, Homo sapiens
  misc_RNA (1)...(19): siRNA sense strand
ggaaggaggaggagaagaa

SEQ ID NO: 846750 - RNA, 19 nt, Homo sapiens
  misc_RNA (1)...(19): siRNA sense strand
gaaggucucaggcagcuuu

SEQ ID NO: 846751 - RNA, 19 nt, Homo sapiens
  misc_RNA (1)...(19): siRNA sense strand
ggaggaacuuggcugaauc

SEQ ID NO: 846752 - RNA, 19 nt, Homo sapiens
  misc_RNA (1)...(19): siRNA sense strand
ggauggagagcgaaucuga

SEQ ID NO: 846753 - RNA, 19 nt, Homo sapiens
  misc_RNA (1)...(19): siRNA sense strand
ggagaugacgcugaggaua

SEQ ID NO: 846754 - RNA, 19 nt, Homo sapiens
  misc_RNA (1)...(19): siRNA sense strand
gaaggaggaggagaagaaa

SEQ ID NO: 846755 - RNA, 19 nt, Homo sapiens
  misc_RNA (1)...(19): siRNA sense strand
gagaugacgcugaggauag

SEQ ID NO: 846756 - RNA, 19 nt, Homo sapiens
  misc_RNA (1)...(19): siRNA sense strand
gguaaaagcaccaccuuaa

SEQ ID NO: 846757 - RNA, 19 nt, Homo sapiens
  misc_RNA (1)...(19): siRNA sense strand
ccgcugagcacgagcagua

SEQ ID NO: 846758 - RNA, 19 nt, Homo sapiens
  misc_RNA (1)...(19): siRNA sense strand
ccucaaaccacacucaguu

SEQ ID NO: 846759 - RNA, 19 nt, Homo sapiens
  misc_RNA (1)...(19): siRNA sense strand
gcccgaggcucugaaguca

SEQ ID NO: 846760 - RNA, 19 nt, Homo sapiens
  misc_RNA (1)...(19): siRNA sense strand
gcacgagcaguaccucuca

SEQ ID NO: 846761 - RNA, 19 nt, Homo sapiens
  misc_RNA (1)...(19): siRNA sense strand
gaacaagaggaggaucaga

SEQ ID NO: 846762 - RNA, 19 nt, Homo sapiens
  misc_RNA (1)...(19): siRNA sense strand
gaacgaccgcagugacauc

SEQ ID NO: 846763 - RNA, 19 nt, Homo sapiens
  misc_RNA (1)...(19): siRNA sense strand
aaaguccgcccucguguga

SEQ ID NO: 846764 - RNA, 19 nt, Homo sapiens
  misc_RNA (1)...(19): siRNA sense strand
ggagaagaaaccucaccuu

SEQ ID NO: 846765 - RNA, 19 nt, Homo sapiens
  misc_RNA (1)...(19): siRNA sense strand
agaggaagaaguccaaguu

SEQ ID NO: 846766 - RNA, 19 nt, Homo sapiens
  misc_RNA (1)...(19): siRNA sense strand
gaggaagaaguccaaguuc

SEQ ID NO: 846767 - RNA, 19 nt, Homo sapiens
  misc_RNA (1)...(19): siRNA sense strand
gagcaccagccuccaggaa

SEQ ID NO: 846768 - RNA, 19 nt, Homo sapiens
  misc_RNA (1)...(19): siRNA sense strand
ggacugguucuggcucauu

SEQ ID NO: 846769 - RNA, 19 nt, Homo sapiens
  misc_RNA (1)...(19): siRNA sense strand
agaggcagcugcaggacau

SEQ ID NO: 846770 - RNA, 19 nt, Homo sapiens
  misc_RNA (1)...(19): siRNA sense strand
caaaccacacucaguucaa

SEQ ID NO: 846771 - RNA, 19 nt, Homo sapiens
  misc_RNA (1)...(19): siRNA sense strand
gcuggaaggaggaggagaa

SEQ ID NO: 846772 - RNA, 19 nt, Homo sapiens
  misc_RNA (1)...(19): siRNA sense strand
aaaccacacucaguucaag

SEQ ID NO: 846773 - RNA, 19 nt, Homo sapiens
  misc_RNA (1)...(19): siRNA sense strand
gcccucgugugaccaauag

SEQ ID NO: 846774 - RNA, 19 nt, Homo sapiens
  misc_RNA (1)...(19): siRNA sense strand
gacugguucuggcucauuc

SEQ ID NO: 846775 - RNA, 19 nt, Homo sapiens
  misc_RNA (1)...(19): siRNA sense strand
gggaacaagaggaggauca

SEQ ID NO: 846776 - RNA, 19 nt, Homo sapiens
  misc_RNA (1)...(19): siRNA sense strand
aggaggaacuuggcugaau

SEQ ID NO: 846777 - RNA, 19 nt, Homo sapiens
  misc_RNA (1)...(19): siRNA sense strand
gauggagagcgaaucugaa

SEQ ID NO: 846778 - RNA, 19 nt, Homo sapiens
  misc_RNA (1)...(19): siRNA sense strand
cagagcugauguacaaguc

SEQ ID NO: 846779 - RNA, 19 nt, Homo sapiens
  misc_RNA (1)...(19): siRNA sense strand
ucaaaccacacucaguuca

SEQ ID NO: 846780 - RNA, 19 nt, Homo sapiens
  misc_RNA (1)...(19): siRNA sense strand
acaagaggaggaucagaug

SEQ ID NO: 846781 - RNA, 19 nt, Homo sapiens
  misc_RNA (1)...(19): siRNA sense strand
ggacucugaagcccaagga

SEQ ID NO: 846782 - RNA, 19 nt, Homo sapiens
  misc_RNA (1)...(19): siRNA sense strand
ccgaggcucugaagucacu

SEQ ID NO: 846783 - RNA, 19 nt, Homo sapiens
  misc_RNA (1)...(19): siRNA sense strand
ugcgggacaugauugagaa

SEQ ID NO: 846784 - RNA, 19 nt, Homo sapiens
  misc_RNA (1)...(19): siRNA sense strand
ccacaagcaagucccuuag

SEQ ID NO: 846785 - RNA, 19 nt, Homo sapiens
  misc_RNA (1)...(19): siRNA sense strand
ucccuuagccaagccguua

SEQ ID NO: 846786 - RNA, 19 nt, Homo sapiens
  misc_RNA (1)...(19): siRNA sense strand
cgaguggcagcuccucaaa

SEQ ID NO: 846787 - RNA, 19 nt, Homo sapiens
  misc_RNA (1)...(19): siRNA sense strand
ugaagcaccacaagcaagu

SEQ ID NO: 846788 - RNA, 19 nt, Homo sapiens
  misc_RNA (1)...(19): siRNA sense strand
cgucacuuguucuauccaa

SEQ ID NO: 846789 - RNA, 19 nt, Homo sapiens
  misc_RNA (1)...(19): siRNA sense strand
gggacaugauugagaagcu

SEQ ID NO: 846790 - RNA, 19 nt, Homo sapiens
  misc_RNA (1)...(19): siRNA sense strand
agaaggcccaggaggcaaa

SEQ ID NO: 846791 - RNA, 19 nt, Homo sapiens
  misc_RNA (1)...(19): siRNA sense strand
gcugggaguguccacauca

SEQ ID NO: 846792 - RNA, 19 nt, Homo sapiens
  misc_RNA (1)...(19): siRNA sense strand
gggcuaccgcgacgugaau

SEQ ID NO: 846793 - RNA, 19 nt, Homo sapiens
  misc_RNA (1)...(19): siRNA sense strand
gugcuuggccucccuucga

SEQ ID NO: 846794 - RNA, 19 nt, Homo sapiens
  misc_RNA (1)...(19): siRNA sense strand
ccaaggacagcagcaagga

SEQ ID NO: 846795 - RNA, 19 nt, Homo sapiens
  misc_RNA (1)...(19): siRNA sense strand
gugaauaucugcaacauga

SEQ ID NO: 846796 - RNA, 19 nt, Homo sapiens
  misc_RNA (1)...(19): siRNA sense strand
ggaaggaggaggagaagaa

SEQ ID NO: 846797 - RNA, 19 nt, Homo sapiens
  misc_RNA (1)...(19): siRNA sense strand
gaaggucucaggcagcuuu

SEQ ID NO: 846798 - RNA, 19 nt, Homo sapiens
  misc_RNA (1)...(19): siRNA sense strand
ggaggaacuuggcugaauc

SEQ ID NO: 846799 - RNA, 19 nt, Homo sapiens
  misc_RNA (1)...(19): siRNA sense strand
ggauggagagcgaaucuga

SEQ ID NO: 846800 - RNA, 19 nt, Homo sapiens
  misc_RNA (1)...(19): siRNA sense strand
ggagaugacgcugaggaua

SEQ ID NO: 846801 - RNA, 19 nt, Homo sapiens
  misc_RNA (1)...(19): siRNA sense strand
gaaggaggaggagaagaaa

SEQ ID NO: 846802 - RNA, 19 nt, Homo sapiens
  misc_RNA (1)...(19): siRNA sense strand
gagaugacgcugaggauag

SEQ ID NO: 846803 - RNA, 19 nt, Homo sapiens
  misc_RNA (1)...(19): siRNA sense strand
gguaaaagcaccaccuuaa

SEQ ID NO: 846804 - RNA, 19 nt, Homo sapiens
  misc_RNA (1)...(19): siRNA sense strand
ccgcugagcacgagcagua

SEQ ID NO: 846805 - RNA, 19 nt, Homo sapiens
  misc_RNA (1)...(19): siRNA sense strand
ccucaaaccacacucaguu

SEQ ID NO: 846806 - RNA, 19 nt, Homo sapiens
  misc_RNA (1)...(19): siRNA sense strand
gcccgaggcucugaaguca

SEQ ID NO: 846807 - RNA, 19 nt, Homo sapiens
  misc_RNA (1)...(19): siRNA sense strand
gcacgagcaguaccucuca

SEQ ID NO: 846808 - RNA, 19 nt, Homo sapiens
  misc_RNA (1)...(19): siRNA sense strand
gaacaagaggaggaucaga

SEQ ID NO: 846809 - RNA, 19 nt, Homo sapiens
  misc_RNA (1)...(19): siRNA sense strand
gaacgaccgcagugacauc

SEQ ID NO: 846810 - RNA, 19 nt, Homo sapiens
  misc_RNA (1)...(19): siRNA sense strand
aaaguccgcccucguguga

SEQ ID NO: 846811 - RNA, 19 nt, Homo sapiens
  misc_RNA (1)...(19): siRNA sense strand
ggagaagaaaccucaccuu

SEQ ID NO: 846812 - RNA, 19 nt, Homo sapiens
  misc_RNA (1)...(19): siRNA sense strand
agaggaagaaguccaaguu

SEQ ID NO: 846813 - RNA, 19 nt, Homo sapiens
  misc_RNA (1)...(19): siRNA sense strand
gaggaagaaguccaaguuc

SEQ ID NO: 846814 - RNA, 19 nt, Homo sapiens
  misc_RNA (1)...(19): siRNA sense strand
gagcaccagccuccaggaa

SEQ ID NO: 846815 - RNA, 19 nt, Homo sapiens
  misc_RNA (1)...(19): siRNA sense strand
ggacugguucuggcucauu

SEQ ID NO: 846816 - RNA, 19 nt, Homo sapiens
  misc_RNA (1)...(19): siRNA sense strand
agaggcagcugcaggacau

SEQ ID NO: 846817 - RNA, 19 nt, Homo sapiens
  misc_RNA (1)...(19): siRNA sense strand
caaaccacacucaguucaa

SEQ ID NO: 846818 - RNA, 19 nt, Homo sapiens
  misc_RNA (1)...(19): siRNA sense strand
gcuggaaggaggaggagaa

SEQ ID NO: 846819 - RNA, 19 nt, Homo sapiens
  misc_RNA (1)...(19): siRNA sense strand
aaaccacacucaguucaag

SEQ ID NO: 846820 - RNA, 19 nt, Homo sapiens
  misc_RNA (1)...(19): siRNA sense strand
gcccucgugugaccaauag

SEQ ID NO: 846821 - RNA, 19 nt, Homo sapiens
  misc_RNA (1)...(19): siRNA sense strand
gacugguucuggcucauuc

SEQ ID NO: 846822 - RNA, 19 nt, Homo sapiens
  misc_RNA (1)...(19): siRNA sense strand
gggaacaagaggaggauca

SEQ ID NO: 846823 - RNA, 19 nt, Homo sapiens
  misc_RNA (1)...(19): siRNA sense strand
aggaggaacuuggcugaau

SEQ ID NO: 846824 - RNA, 19 nt, Homo sapiens
  misc_RNA (1)...(19): siRNA sense strand
gauggagagcgaaucugaa

SEQ ID NO: 846825 - RNA, 19 nt, Homo sapiens
  misc_RNA (1)...(19): siRNA sense strand
cagagcugauguacaaguc

SEQ ID NO: 846826 - RNA, 19 nt, Homo sapiens
  misc_RNA (1)...(19): siRNA sense strand
ucaaaccacacucaguuca

SEQ ID NO: 846827 - RNA, 19 nt, Homo sapiens
  misc_RNA (1)...(19): siRNA sense strand
acaagaggaggaucagaug

SEQ ID NO: 846828 - RNA, 19 nt, Homo sapiens
  misc_RNA (1)...(19): siRNA sense strand
ggacucugaagcccaagga

SEQ ID NO: 846829 - RNA, 19 nt, Homo sapiens
  misc_RNA (1)...(19): siRNA sense strand
ccgaggcucugaagucacu

SEQ ID NO: 846830 - RNA, 19 nt, Homo sapiens
  misc_RNA (1)...(19): siRNA sense strand
ugcgggacaugauugagaa

SEQ ID NO: 846831 - RNA, 19 nt, Homo sapiens
  misc_RNA (1)...(19): siRNA sense strand
ccacaagcaagucccuuag

SEQ ID NO: 846832 - RNA, 19 nt, Homo sapiens
  misc_RNA (1)...(19): siRNA sense strand
ucccuuagccaagccguua

SEQ ID NO: 846833 - RNA, 19 nt, Homo sapiens
  misc_RNA (1)...(19): siRNA sense strand
cgaguggcagcuccucaaa

SEQ ID NO: 846834 - RNA, 19 nt, Homo sapiens
  misc_RNA (1)...(19): siRNA sense strand
ugaagcaccacaagcaagu

SEQ ID NO: 846835 - RNA, 19 nt, Homo sapiens
  misc_RNA (1)...(19): siRNA sense strand
cgucacuuguucuauccaa

SEQ ID NO: 846836 - RNA, 19 nt, Homo sapiens
  misc_RNA (1)...(19): siRNA sense strand
gggacaugauugagaagcu

SEQ ID NO: 846837 - RNA, 19 nt, Homo sapiens
  misc_RNA (1)...(19): siRNA sense strand
agaaggcccaggaggcaaa

SEQ ID NO: 846838 - RNA, 19 nt, Homo sapiens
  misc_RNA (1)...(19): siRNA sense strand
gcugggaguguccacauca

SEQ ID NO: 846839 - RNA, 19 nt, Homo sapiens
  misc_RNA (1)...(19): siRNA sense strand
gggcuaccgcgacgugaau

SEQ ID NO: 846840 - RNA, 19 nt, Homo sapiens
  misc_RNA (1)...(19): siRNA sense strand
gugcuuggccucccuucga

SEQ ID NO: 846841 - RNA, 19 nt, Homo sapiens
  misc_RNA (1)...(19): siRNA sense strand
ccaaggacagcagcaagga

SEQ ID NO: 846842 - RNA, 19 nt, Homo sapiens
  misc_RNA (1)...(19): siRNA sense strand
gcauugaagucauuaguua

SEQ ID NO: 846843 - RNA, 19 nt, Homo sapiens
  misc_RNA (1)...(19): siRNA sense strand
caacaagugucuagauuug

SEQ ID NO: 846844 - RNA, 19 nt, Homo sapiens
  misc_RNA (1)...(19): siRNA sense strand
gaauaacuguggauuaaca

SEQ ID NO: 846845 - RNA, 19 nt, Homo sapiens
  misc_RNA (1)...(19): siRNA sense strand
ugauugagcuuguggauug

SEQ ID NO: 846846 - RNA, 19 nt, Homo sapiens
  misc_RNA (1)...(19): siRNA sense strand
ggagaagcauuugagauga

SEQ ID NO: 846847 - RNA, 19 nt, Homo sapiens
  misc_RNA (1)...(19): siRNA sense strand
gaugauuccugaacuugaa

SEQ ID NO: 846848 - RNA, 19 nt, Homo sapiens
  misc_RNA (1)...(19): siRNA sense strand
guacuugaucuuuccauua

SEQ ID NO: 846849 - RNA, 19 nt, Homo sapiens
  misc_RNA (1)...(19): siRNA sense strand
ggucauuccuuuacuuuca

SEQ ID NO: 846850 - RNA, 19 nt, Homo sapiens
  misc_RNA (1)...(19): siRNA sense strand
gaacuugaagagcuaaauu

SEQ ID NO: 846851 - RNA, 19 nt, Homo sapiens
  misc_RNA (1)...(19): siRNA sense strand
gaccugagcuacaaugaca

SEQ ID NO: 846852 - RNA, 19 nt, Homo sapiens
  misc_RNA (1)...(19): siRNA sense strand
gagcuaaauuugucuugga

SEQ ID NO: 846853 - RNA, 19 nt, Homo sapiens
  misc_RNA (1)...(19): siRNA sense strand
gcugcaaagucucgaagua

SEQ ID NO: 846854 - RNA, 19 nt, Homo sapiens
  misc_RNA (1)...(19): siRNA sense strand
caacagcggacaugaaaga

SEQ ID NO: 846855 - RNA, 19 nt, Homo sapiens
  misc_RNA (1)...(19): siRNA sense strand
ggacaaugguuuagacacu

SEQ ID NO: 846856 - RNA, 19 nt, Homo sapiens
  misc_RNA (1)...(19): siRNA sense strand
ggauuuaucagccaacaaa

SEQ ID NO: 846857 - RNA, 19 nt, Homo sapiens
  misc_RNA (1)...(19): siRNA sense strand
ugaccaagcuuccucagau

SEQ ID NO: 846858 - RNA, 19 nt, Homo sapiens
  misc_RNA (1)...(19): siRNA sense strand
gauauuagccuucgaccau

SEQ ID NO: 846859 - RNA, 19 nt, Homo sapiens
  misc_RNA (1)...(19): siRNA sense strand
gacuucaacugucaacaaa

SEQ ID NO: 846860 - RNA, 19 nt, Homo sapiens
  misc_RNA (1)...(19): siRNA sense strand
ggaagaacuagaaugcuuu

SEQ ID NO: 846861 - RNA, 19 nt, Homo sapiens
  misc_RNA (1)...(19): siRNA sense strand
gcuaaagcaucuacaaguc

SEQ ID NO: 846862 - RNA, 19 nt, Homo sapiens
  misc_RNA (1)...(19): siRNA sense strand
caguauugcucagggauua

SEQ ID NO: 846863 - RNA, 19 nt, Homo sapiens
  misc_RNA (1)...(19): siRNA sense strand
ggagcaagauacaaaugau

SEQ ID NO: 846864 - RNA, 19 nt, Homo sapiens
  misc_RNA (1)...(19): siRNA sense strand
cuucaacugucaacaaauu

SEQ ID NO: 846865 - RNA, 19 nt, Homo sapiens
  misc_RNA (1)...(19): siRNA sense strand
ugaaaguacugaaguuaca

SEQ ID NO: 846866 - RNA, 19 nt, Homo sapiens
  misc_RNA (1)...(19): siRNA sense strand
cagcggacaugaaagaaau

SEQ ID NO: 846867 - RNA, 19 nt, Homo sapiens
  misc_RNA (1)...(19): siRNA sense strand
uuagaucuuuccugcaaua

SEQ ID NO: 846868 - RNA, 19 nt, Homo sapiens
  misc_RNA (1)...(19): siRNA sense strand
gagaagcauuugagaugau

SEQ ID NO: 846869 - RNA, 19 nt, Homo sapiens
  misc_RNA (1)...(19): siRNA sense strand
gggagaagcauuugagaug

SEQ ID NO: 846870 - RNA, 19 nt, Homo sapiens
  misc_RNA (1)...(19): siRNA sense strand
acaagugucuagauuugaa

SEQ ID NO: 846871 - RNA, 19 nt, Homo sapiens
  misc_RNA (1)...(19): siRNA sense strand
gaucuuuccugcaauaagg

SEQ ID NO: 846872 - RNA, 19 nt, Homo sapiens
  misc_RNA (1)...(19): siRNA sense strand
gucagaagaugggacauuu

SEQ ID NO: 846873 - RNA, 19 nt, Homo sapiens
  misc_RNA (1)...(19): siRNA sense strand
gucaacaagugucuagauu

SEQ ID NO: 846874 - RNA, 19 nt, Homo sapiens
  misc_RNA (1)...(19): siRNA sense strand
ugggugagcugaggaaauu

SEQ ID NO: 846875 - RNA, 19 nt, Homo sapiens
  misc_RNA (1)...(19): siRNA sense strand
uaaagugggaggaaauuug

SEQ ID NO: 846876 - RNA, 19 nt, Homo sapiens
  misc_RNA (1)...(19): siRNA sense strand
ucacugagauaggaaugaa

SEQ ID NO: 846877 - RNA, 19 nt, Homo sapiens
  misc_RNA (1)...(19): siRNA sense strand
uaacaacagcggacaugaa

SEQ ID NO: 846878 - RNA, 19 nt, Homo sapiens
  misc_RNA (1)...(19): siRNA sense strand
gaaagaaaugggagaagca

SEQ ID NO: 846879 - RNA, 19 nt, Homo sapiens
  misc_RNA (1)...(19): siRNA sense strand
gaagaacuagaaugcuuug

SEQ ID NO: 846880 - RNA, 19 nt, Homo sapiens
  misc_RNA (1)...(19): siRNA sense strand
ucaccucucugcucuggaa

SEQ ID NO: 846881 - RNA, 19 nt, Homo sapiens
  misc_RNA (1)...(19): siRNA sense strand
caacugugcuuuggagagu

SEQ ID NO: 846882 - RNA, 19 nt, Homo sapiens
  misc_RNA (1)...(19): siRNA sense strand
gcaagauacaaaugauuga

SEQ ID NO: 846883 - RNA, 19 nt, Homo sapiens
  misc_RNA (1)...(19): siRNA sense strand
aaagggagcaagauacaaa

SEQ ID NO: 846884 - RNA, 19 nt, Homo sapiens
  misc_RNA (1)...(19): siRNA sense strand
agaggacaaugaccuuaaa

SEQ ID NO: 846885 - RNA, 19 nt, Homo sapiens
  misc_RNA (1)...(19): siRNA sense strand
agaaugcuuugaccaagaa

SEQ ID NO: 846886 - RNA, 19 nt, Homo sapiens
  misc_RNA (1)...(19): siRNA sense strand
gaugggcaguucuucugaa

SEQ ID NO: 846887 - RNA, 19 nt, Homo sapiens
  misc_RNA (1)...(19): siRNA sense strand
aauuagaucuuuccugcaa

SEQ ID NO: 846888 - RNA, 19 nt, Homo sapiens
  misc_RNA (1)...(19): siRNA sense strand
ccucaaaucugaaaguacu

SEQ ID NO: 846889 - RNA, 19 nt, Homo sapiens
  misc_RNA (1)...(19): siRNA sense strand
gagcaagauacaaaugauu

SEQ ID NO: 846890 - RNA, 19 nt, Homo sapiens
  misc_RNA (1)...(19): siRNA sense strand
aaaagcaccucaaaucuga

SEQ ID NO: 846891 - RNA, 19 nt, Homo sapiens
  misc_RNA (1)...(19): siRNA sense strand
ugagaugauuccugaacuu

SEQ ID NO: 846892 - RNA, 19 nt, Homo sapiens
  misc_RNA (1)...(19): siRNA sense strand
uagaaugcuuugaccaaga

SEQ ID NO: 846893 - RNA, 19 nt, Homo sapiens
  misc_RNA (1)...(19): siRNA sense strand
cacuaaagcuuuccauguc

SEQ ID NO: 846894 - RNA, 19 nt, Homo sapiens
  misc_RNA (1)...(19): siRNA sense strand
cugaggaaauuagaucuuu

SEQ ID NO: 846895 - RNA, 19 nt, Homo sapiens
  misc_RNA (1)...(19): siRNA sense strand
caccucaaaucugaaagua

SEQ ID NO: 846896 - RNA, 19 nt, Homo sapiens
  misc_RNA (1)...(19): siRNA sense strand
ggacauuucugggucaacu

SEQ ID NO: 846897 - RNA, 19 nt, Homo sapiens
  misc_RNA (1)...(19): siRNA sense strand
ucaacaagugucuagauuu

SEQ ID NO: 846898 - RNA, 19 nt, Homo sapiens
  misc_RNA (1)...(19): siRNA sense strand
ggaggaagaacuagaaugc

SEQ ID NO: 846899 - RNA, 19 nt, Homo sapiens
  misc_RNA (1)...(19): siRNA sense strand
gacaaugguuuagacacuu

SEQ ID NO: 846900 - RNA, 19 nt, Homo sapiens
  misc_RNA (1)...(19): siRNA sense strand
ucucugcucuggaaguauu

SEQ ID NO: 846901 - RNA, 19 nt, Homo sapiens
  misc_RNA (1)...(19): siRNA sense strand
uugaagagcuaaauuuguc

SEQ ID NO: 846902 - RNA, 19 nt, Homo sapiens
  misc_RNA (1)...(19): siRNA sense strand
aggaagaacuagaaugcuu

SEQ ID NO: 846903 - RNA, 19 nt, Homo sapiens
  misc_RNA (1)...(19): siRNA sense strand
gguuuagacacuuguuaua

SEQ ID NO: 846904 - RNA, 19 nt, Homo sapiens
  misc_RNA (1)...(19): siRNA sense strand
gaugcaggguggaccaugu

SEQ ID NO: 846905 - RNA, 19 nt, Homo sapiens
  misc_RNA (1)...(19): siRNA sense strand
cuaaauuugucuuggaaca

SEQ ID NO: 846906 - RNA, 19 nt, Homo sapiens
  misc_RNA (1)...(19): siRNA sense strand
uauucaaccuuucuuggaa

SEQ ID NO: 846907 - RNA, 19 nt, Homo sapiens
  misc_RNA (1)...(19): siRNA sense strand
gggagcaagauacaaauga

SEQ ID NO: 846908 - RNA, 19 nt, Homo sapiens
  misc_RNA (1)...(19): siRNA sense strand
ccaggucauuccuuuacuu

SEQ ID NO: 846909 - RNA, 19 nt, Homo sapiens
  misc_RNA (1)...(19): siRNA sense strand
gcagaaaagaggacaauga

SEQ ID NO: 846910 - RNA, 19 nt, Homo sapiens
  misc_RNA (1)...(19): siRNA sense strand
gaccaagcuuccucagauc

SEQ ID NO: 846911 - RNA, 19 nt, Homo sapiens
  misc_RNA (1)...(19): siRNA sense strand
cuggaaguauucaaccuuu

SEQ ID NO: 846912 - RNA, 19 nt, Homo sapiens
  misc_RNA (1)...(19): siRNA sense strand
uaccagcauugaagucauu

SEQ ID NO: 846913 - RNA, 19 nt, Homo sapiens
  misc_RNA (1)...(19): siRNA sense strand
gagaugauuccugaacuug

SEQ ID NO: 846914 - RNA, 19 nt, Homo sapiens
  misc_RNA (1)...(19): siRNA sense strand
guaaagugggaggaaauuu

SEQ ID NO: 846915 - RNA, 19 nt, Homo sapiens
  misc_RNA (1)...(19): siRNA sense strand
gaaauuugccucugauccu

SEQ ID NO: 846916 - RNA, 19 nt, Homo sapiens
  misc_RNA (1)...(19): siRNA sense strand
ggaucuagguggagguuuu

SEQ ID NO: 846917 - RNA, 19 nt, Homo sapiens
  misc_RNA (1)...(19): siRNA sense strand
gagcugaggaaauuagauc

SEQ ID NO: 846918 - RNA, 19 nt, Homo sapiens
  misc_RNA (1)...(19): siRNA sense strand
ucgaaguacuugaucuuuc

SEQ ID NO: 846919 - RNA, 19 nt, Homo sapiens
  misc_RNA (1)...(19): siRNA sense strand
acaaugguuuagacacuug

SEQ ID NO: 846920 - RNA, 19 nt, Homo sapiens
  misc_RNA (1)...(19): siRNA sense strand
gcuaaucgagcuggauauu

SEQ ID NO: 846921 - RNA, 19 nt, Homo sapiens
  misc_RNA (1)...(19): siRNA sense strand
acacuaaagcuuuccaugu

SEQ ID NO: 846922 - RNA, 19 nt, Homo sapiens
  misc_RNA (1)...(19): siRNA sense strand
ccucagaaggagaaacuaa

SEQ ID NO: 846923 - RNA, 19 nt, Homo sapiens
  misc_RNA (1)...(19): siRNA sense strand
ggaaguauucaaccuuucu

SEQ ID NO: 846924 - RNA, 19 nt, Homo sapiens
  misc_RNA (1)...(19): siRNA sense strand
ccucucugcucuggaagua

SEQ ID NO: 846925 - RNA, 19 nt, Homo sapiens
  misc_RNA (1)...(19): siRNA sense strand
cugcuaagccucucaguuc

SEQ ID NO: 846926 - RNA, 19 nt, Homo sapiens
  misc_RNA (1)...(19): siRNA sense strand
acaguaaagugggaggaaa

SEQ ID NO: 846927 - RNA, 19 nt, Homo sapiens
  misc_RNA (1)...(19): siRNA sense strand
agaagcauuugagaugauu

SEQ ID NO: 846928 - RNA, 19 nt, Homo sapiens
  misc_RNA (1)...(19): siRNA sense strand
aacaacagcggacaugaaa

SEQ ID NO: 846929 - RNA, 19 nt, Homo sapiens
  misc_RNA (1)...(19): siRNA sense strand
guauucaaccuuucuugga

SEQ ID NO: 846930 - RNA, 19 nt, Homo sapiens
  misc_RNA (1)...(19): siRNA sense strand
uaucaacaacugugcuuug

SEQ ID NO: 846931 - RNA, 19 nt, Homo sapiens
  misc_RNA (1)...(19): siRNA sense strand
cuacaaguccuagaucuuc

SEQ ID NO: 846932 - RNA, 19 nt, Homo sapiens
  misc_RNA (1)...(19): siRNA sense strand
aaagaggacaaugaccuua

SEQ ID NO: 846933 - RNA, 19 nt, Homo sapiens
  misc_RNA (1)...(19): siRNA sense strand
cgaaguacuugaucuuucc

SEQ ID NO: 846934 - RNA, 19 nt, Homo sapiens
  misc_RNA (1)...(19): siRNA sense strand
acaaugaccuuaaaacaag

SEQ ID NO: 846935 - RNA, 19 nt, Homo sapiens
  misc_RNA (1)...(19): siRNA sense strand
gaaguauucaaccuuucuu

SEQ ID NO: 846936 - RNA, 19 nt, Homo sapiens
  misc_RNA (1)...(19): siRNA sense strand
cuaagccucucaguucaga

SEQ ID NO: 846937 - RNA, 19 nt, Homo sapiens
  misc_RNA (1)...(19): siRNA sense strand
aaacuaagccccagacuuc

SEQ ID NO: 846938 - RNA, 19 nt, Homo sapiens
  misc_RNA (1)...(19): siRNA sense strand
uuccaugucucuucaagug

SEQ ID NO: 846939 - RNA, 19 nt, Homo sapiens
  misc_RNA (1)...(19): siRNA sense strand
aacagcagaugacgugaug

SEQ ID NO: 846940 - RNA, 19 nt, Homo sapiens
  misc_RNA (1)...(19): siRNA sense strand
ucugaaaguacugaaguua

SEQ ID NO: 846941 - RNA, 19 nt, Homo sapiens
  misc_RNA (1)...(19): siRNA sense strand
gcaccucaaaucugaaagu

SEQ ID NO: 846942 - RNA, 19 nt, Homo sapiens
  misc_RNA (1)...(19): siRNA sense strand
ggacagaaaguacauauua

SEQ ID NO: 846943 - RNA, 19 nt, Homo sapiens
  misc_RNA (1)...(19): siRNA sense strand
ggaaaggacuguucauuga

SEQ ID NO: 846944 - RNA, 19 nt, Homo sapiens
  misc_RNA (1)...(19): siRNA sense strand
ucacauagcugcaaauuau

SEQ ID NO: 846945 - RNA, 19 nt, Homo sapiens
  misc_RNA (1)...(19): siRNA sense strand
ccacuggccuguaugcaua

SEQ ID NO: 846946 - RNA, 19 nt, Homo sapiens
  misc_RNA (1)...(19): siRNA sense strand
uauuauggcuggauugaua

SEQ ID NO: 846947 - RNA, 19 nt, Homo sapiens
  misc_RNA (1)...(19): siRNA sense strand
ggaaauaaccagcaguuug

SEQ ID NO: 846948 - RNA, 19 nt, Homo sapiens
  misc_RNA (1)...(19): siRNA sense strand
gcaaggguauuacacaaug

SEQ ID NO: 846949 - RNA, 19 nt, Homo sapiens
  misc_RNA (1)...(19): siRNA sense strand
ggucagacagguccaauuu

SEQ ID NO: 846950 - RNA, 19 nt, Homo sapiens
  misc_RNA (1)...(19): siRNA sense strand
ggauuugccugaguugauu

SEQ ID NO: 846951 - RNA, 19 nt, Homo sapiens
  misc_RNA (1)...(19): siRNA sense strand
aagaagaacugaccagcaa

SEQ ID NO: 846952 - RNA, 19 nt, Homo sapiens
  misc_RNA (1)...(19): siRNA sense strand
gggaaaggacuguucauug

SEQ ID NO: 846953 - RNA, 19 nt, Homo sapiens
  misc_RNA (1)...(19): siRNA sense strand
gaaauaaccagcaguuugc

SEQ ID NO: 846954 - RNA, 19 nt, Homo sapiens
  misc_RNA (1)...(19): siRNA sense strand
aaaggacuguucauugauu

SEQ ID NO: 846955 - RNA, 19 nt, Homo sapiens
  misc_RNA (1)...(19): siRNA sense strand
gaucuuggagcagaaguua

SEQ ID NO: 846956 - RNA, 19 nt, Homo sapiens
  misc_RNA (1)...(19): siRNA sense strand
ggauggcuauauuguaguu

SEQ ID NO: 846957 - RNA, 19 nt, Homo sapiens
  misc_RNA (1)...(19): siRNA sense strand
gagcagaaguuauaaaagu

SEQ ID NO: 846958 - RNA, 19 nt, Homo sapiens
  misc_RNA (1)...(19): siRNA sense strand
gaauuuaggagaucuugga

SEQ ID NO: 846959 - RNA, 19 nt, Homo sapiens
  misc_RNA (1)...(19): siRNA sense strand
caucccagguggcguguuu

SEQ ID NO: 846960 - RNA, 19 nt, Homo sapiens
  misc_RNA (1)...(19): siRNA sense strand
gagcuauuauggcuggauu

SEQ ID NO: 846961 - RNA, 19 nt, Homo sapiens
  misc_RNA (1)...(19): siRNA sense strand
aaccaaggauggcuauauu

SEQ ID NO: 846962 - RNA, 19 nt, Homo sapiens
  misc_RNA (1)...(19): siRNA sense strand
gcaguggagucccguaugg

SEQ ID NO: 846963 - RNA, 19 nt, Homo sapiens
  misc_RNA (1)...(19): siRNA sense strand
ugccugaguugauugauaa

SEQ ID NO: 846964 - RNA, 19 nt, Homo sapiens
  misc_RNA (1)...(19): siRNA sense strand
caaggauggcuauauugua

SEQ ID NO: 846965 - RNA, 19 nt, Homo sapiens
  misc_RNA (1)...(19): siRNA sense strand
gcagucagauaugaacaau

SEQ ID NO: 846966 - RNA, 19 nt, Homo sapiens
  misc_RNA (1)...(19): siRNA sense strand
cagcaaggguauuacacaa

SEQ ID NO: 846967 - RNA, 19 nt, Homo sapiens
  misc_RNA (1)...(19): siRNA sense strand
gcuguugccucggcuguuu

SEQ ID NO: 846968 - RNA, 19 nt, Homo sapiens
  misc_RNA (1)...(19): siRNA sense strand
gaagaauguauuugcagaa

SEQ ID NO: 846969 - RNA, 19 nt, Homo sapiens
  misc_RNA (1)...(19): siRNA sense strand
ucagacagguccaauuucu

SEQ ID NO: 846970 - RNA, 19 nt, Homo sapiens
  misc_RNA (1)...(19): siRNA sense strand
acaauggccucguuaugga

SEQ ID NO: 846971 - RNA, 19 nt, Homo sapiens
  misc_RNA (1)...(19): siRNA sense strand
gcugcaaauuaucuuauug

SEQ ID NO: 846972 - RNA, 19 nt, Homo sapiens
  misc_RNA (1)...(19): siRNA sense strand
gaaaggacuguucauugau

SEQ ID NO: 846973 - RNA, 19 nt, Homo sapiens
  misc_RNA (1)...(19): siRNA sense strand
guacauauuaucucagugu

SEQ ID NO: 846974 - RNA, 19 nt, Homo sapiens
  misc_RNA (1)...(19): siRNA sense strand
guaugcauauggagcuauu

SEQ ID NO: 846975 - RNA, 19 nt, Homo sapiens
  misc_RNA (1)...(19): siRNA sense strand
aaggauggcuauauuguag

SEQ ID NO: 846976 - RNA, 19 nt, Homo sapiens
  misc_RNA (1)...(19): siRNA sense strand
gcaagugguuauaucuuuu

SEQ ID NO: 846977 - RNA, 19 nt, Homo sapiens
  misc_RNA (1)...(19): siRNA sense strand
guaguuggagcaggaaaua

SEQ ID NO: 846978 - RNA, 19 nt, Homo sapiens
  misc_RNA (1)...(19): siRNA sense strand
uacaguaaguucaagaugu

SEQ ID NO: 846979 - RNA, 19 nt, Homo sapiens
  misc_RNA (1)...(19): siRNA sense strand
ggacuguucauugauugua

SEQ ID NO: 846980 - RNA, 19 nt, Homo sapiens
  misc_RNA (1)...(19): siRNA sense strand
gacuguucauugauuguaa

SEQ ID NO: 846981 - RNA, 19 nt, Homo sapiens
  misc_RNA (1)...(19): siRNA sense strand
ugaacgguuugaagaagaa

SEQ ID NO: 846982 - RNA, 19 nt, Homo sapiens
  misc_RNA (1)...(19): siRNA sense strand
gaguagcuaugacugaucu

SEQ ID NO: 846983 - RNA, 19 nt, Homo sapiens
  misc_RNA (1)...(19): siRNA sense strand
gaauguauuugcagaaccu

SEQ ID NO: 846984 - RNA, 19 nt, Homo sapiens
  misc_RNA (1)...(19): siRNA sense strand
agcaagugguuauaucuuu

SEQ ID NO: 846985 - RNA, 19 nt, Homo sapiens
  misc_RNA (1)...(19): siRNA sense strand
gaagaacugaccagcaagu

SEQ ID NO: 846986 - RNA, 19 nt, Homo sapiens
  misc_RNA (1)...(19): siRNA sense strand
guacagcucauggcaguau

SEQ ID NO: 846987 - RNA, 19 nt, Homo sapiens
  misc_RNA (1)...(19): siRNA sense strand
caugaagaauguauuugca

SEQ ID NO: 846988 - RNA, 19 nt, Homo sapiens
  misc_RNA (1)...(19): siRNA sense strand
uaucugaacgguuugaaga

SEQ ID NO: 846989 - RNA, 19 nt, Homo sapiens
  misc_RNA (1)...(19): siRNA sense strand
caaaaggggugaaaaucau

SEQ ID NO: 846990 - RNA, 19 nt, Homo sapiens
  misc_RNA (1)...(19): siRNA sense strand
cugaguugauugauaauuc

SEQ ID NO: 846991 - RNA, 19 nt, Homo sapiens
  misc_RNA (1)...(19): siRNA sense strand
ccaaggauggcuauauugu

SEQ ID NO: 846992 - RNA, 19 nt, Homo sapiens
  misc_RNA (1)...(19): siRNA sense strand
ucuuggagcagaaguuaua

SEQ ID NO: 846993 - RNA, 19 nt, Homo sapiens
  misc_RNA (1)...(19): siRNA sense strand
acacaacgcacauccugaa

SEQ ID NO: 846994 - RNA, 19 nt, Homo sapiens
  misc_RNA (1)...(19): siRNA sense strand
acaguaaguucaagauguc

SEQ ID NO: 846995 - RNA, 19 nt, Homo sapiens
  misc_RNA (1)...(19): siRNA sense strand
uccaaagccugcugcauuc

SEQ ID NO: 846996 - RNA, 19 nt, Homo sapiens
  misc_RNA (1)...(19): siRNA sense strand
gcaguaucguuccuuacca

SEQ ID NO: 846997 - RNA, 19 nt, Homo sapiens
  misc_RNA (1)...(19): siRNA sense strand
gaucagcaaggguauuaca

SEQ ID NO: 846998 - RNA, 19 nt, Homo sapiens
  misc_RNA (1)...(19): siRNA sense strand
ccaaucaacaacaugaaga

SEQ ID NO: 846999 - RNA, 19 nt, Homo sapiens
  misc_RNA (1)...(19): siRNA sense strand
agacagguccaauuucuca

SEQ ID NO: 847000 - RNA, 19 nt, Homo sapiens
  misc_RNA (1)...(19): siRNA sense strand
caccuucggguacacaaua

SEQ ID NO: 847001 - RNA, 19 nt, Homo sapiens
  misc_RNA (1)...(19): siRNA sense strand
gggugaaaaucaucuauug

SEQ ID NO: 847002 - RNA, 19 nt, Homo sapiens
  misc_RNA (1)...(19): siRNA sense strand
ugagauacaguaaguucaa

SEQ ID NO: 847003 - RNA, 19 nt, Homo sapiens
  misc_RNA (1)...(19): siRNA sense strand
caaucaacaacaugaagaa

SEQ ID NO: 847004 - RNA, 19 nt, Homo sapiens
  misc_RNA (1)...(19): siRNA sense strand
aaaccaaggauggcuauau

SEQ ID NO: 847005 - RNA, 19 nt, Homo sapiens
  misc_RNA (1)...(19): siRNA sense strand
gagauacaguaaguucaag

SEQ ID NO: 847006 - RNA, 19 nt, Homo sapiens
  misc_RNA (1)...(19): siRNA sense strand
guauaaaacuaaccaccuu

SEQ ID NO: 847007 - RNA, 19 nt, Homo sapiens
  misc_RNA (1)...(19): siRNA sense strand
uugccugaguugauugaua

SEQ ID NO: 847008 - RNA, 19 nt, Homo sapiens
  misc_RNA (1)...(19): siRNA sense strand
caucuauuguuccaucaca

SEQ ID NO: 847009 - RNA, 19 nt, Homo sapiens
  misc_RNA (1)...(19): siRNA sense strand
gcuauuauggcuggauuga

SEQ ID NO: 847010 - RNA, 19 nt, Homo sapiens
  misc_RNA (1)...(19): siRNA sense strand
caggaaauaaccagcaguu

SEQ ID NO: 847011 - RNA, 19 nt, Homo sapiens
  misc_RNA (1)...(19): siRNA sense strand
uuacacaauggccucguua

SEQ ID NO: 847012 - RNA, 19 nt, Homo sapiens
  misc_RNA (1)...(19): siRNA sense strand
cugaacgguuugaagaaga

SEQ ID NO: 847013 - RNA, 19 nt, Homo sapiens
  misc_RNA (1)...(19): siRNA sense strand
uuccaaagccugcugcauu

SEQ ID NO: 847014 - RNA, 19 nt, Homo sapiens
  misc_RNA (1)...(19): siRNA sense strand
acacaauggccucguuaug

SEQ ID NO: 847015 - RNA, 19 nt, Homo sapiens
  misc_RNA (1)...(19): siRNA sense strand
gauacaguaaguucaagau

SEQ ID NO: 847016 - RNA, 19 nt, Homo sapiens
  misc_RNA (1)...(19): siRNA sense strand
guaaguucaagaugucaga

SEQ ID NO: 847017 - RNA, 19 nt, Homo sapiens
  misc_RNA (1)...(19): siRNA sense strand
aggaucagcaaggguauua

SEQ ID NO: 847018 - RNA, 19 nt, Homo sapiens
  misc_RNA (1)...(19): siRNA sense strand
gggacagaaaguacauauu

SEQ ID NO: 847019 - RNA, 19 nt, Homo sapiens
  misc_RNA (1)...(19): siRNA sense strand
cacaggguauggucagaca

SEQ ID NO: 847020 - RNA, 19 nt, Homo sapiens
  misc_RNA (1)...(19): siRNA sense strand
cacaauggccucguuaugg

SEQ ID NO: 847021 - RNA, 19 nt, Homo sapiens
  misc_RNA (1)...(19): siRNA sense strand
caaggguauuacacaaugg

SEQ ID NO: 847022 - RNA, 19 nt, Homo sapiens
  misc_RNA (1)...(19): siRNA sense strand
cagcaagugguuauaucuu

SEQ ID NO: 847023 - RNA, 19 nt, Homo sapiens
  misc_RNA (1)...(19): siRNA sense strand
ugucucacauagcugcaaa

SEQ ID NO: 847024 - RNA, 19 nt, Homo sapiens
  misc_RNA (1)...(19): siRNA sense strand
auacaaaacugggaaagga

SEQ ID NO: 847025 - RNA, 19 nt, Homo sapiens
  misc_RNA (1)...(19): siRNA sense strand
aaagccugcugcauuccuu

SEQ ID NO: 847026 - RNA, 19 nt, Homo sapiens
  misc_RNA (1)...(19): siRNA sense strand
ccaaaaggggugaaaauca

SEQ ID NO: 847027 - RNA, 19 nt, Homo sapiens
  misc_RNA (1)...(19): siRNA sense strand
ggcccaaucaacaacauga

SEQ ID NO: 847028 - RNA, 19 nt, Homo sapiens
  misc_RNA (1)...(19): siRNA sense strand
gauuguaaccugcugucau

SEQ ID NO: 847029 - RNA, 19 nt, Homo sapiens
  misc_RNA (1)...(19): siRNA sense strand
aaggacuguucauugauug

SEQ ID NO: 847030 - RNA, 19 nt, Homo sapiens
  misc_RNA (1)...(19): siRNA sense strand
aauucuggaucuaacaaga

SEQ ID NO: 847031 - RNA, 19 nt, Homo sapiens
  misc_RNA (1)...(19): siRNA sense strand
ccaguucgcccaggaguag

SEQ ID NO: 847032 - RNA, 19 nt, Homo sapiens
  misc_RNA (1)...(19): siRNA sense strand
ccagguggcguguuugucu

SEQ ID NO: 847033 - RNA, 19 nt, Homo sapiens
  misc_RNA (1)...(19): siRNA sense strand
auuguaaccugcugucauc

SEQ ID NO: 847034 - RNA, 19 nt, Homo sapiens
  misc_RNA (1)...(19): siRNA sense strand
caggaguagcuaugacuga

SEQ ID NO: 847035 - RNA, 19 nt, Homo sapiens
  misc_RNA (1)...(19): siRNA sense strand
guuaauaucaaggauccaa

SEQ ID NO: 847036 - RNA, 19 nt, Homo sapiens
  misc_RNA (1)...(19): siRNA sense strand
ggcuguuucuggucugaug

SEQ ID NO: 847037 - RNA, 19 nt, Homo sapiens
  misc_RNA (1)...(19): siRNA sense strand
caaaaggaagcaaaacguu

SEQ ID NO: 847038 - RNA, 19 nt, Homo sapiens
  misc_RNA (1)...(19): siRNA sense strand
guagcuaugacugaucuug

SEQ ID NO: 847039 - RNA, 19 nt, Homo sapiens
  misc_RNA (1)...(19): siRNA sense strand
cguauggcccaaucaacaa

SEQ ID NO: 847040 - RNA, 19 nt, Homo sapiens
  misc_RNA (1)...(19): siRNA sense strand
gcguguuugucucacauag

SEQ ID NO: 847041 - RNA, 19 nt, Homo sapiens
  misc_RNA (1)...(19): siRNA sense strand
gcuaggaguuugugaaaug

SEQ ID NO: 847042 - RNA, 19 nt, Homo sapiens
  misc_RNA (1)...(19): siRNA sense strand
caaaugacaucacauacag

SEQ ID NO: 847043 - RNA, 19 nt, Homo sapiens
  misc_RNA (1)...(19): siRNA sense strand
ggucagugcucagcuauca

SEQ ID NO: 847044 - RNA, 19 nt, Homo sapiens
  misc_RNA (1)...(19): siRNA sense strand
ccagacuucuagcaacuuu

SEQ ID NO: 847045 - RNA, 19 nt, Homo sapiens
  misc_RNA (1)...(19): siRNA sense strand
caccaaaugacaucacaua

SEQ ID NO: 847046 - RNA, 19 nt, Homo sapiens
  misc_RNA (1)...(19): siRNA sense strand
gcacaucaggagcauaaau

SEQ ID NO: 847047 - RNA, 19 nt, Homo sapiens
  misc_RNA (1)...(19): siRNA sense strand
cacaucaggagcauaaaua

SEQ ID NO: 847048 - RNA, 19 nt, Homo sapiens
  misc_RNA (1)...(19): siRNA sense strand
ccaaaugacaucacauaca

SEQ ID NO: 847049 - RNA, 19 nt, Homo sapiens
  misc_RNA (1)...(19): siRNA sense strand
ccacagcccaggaugcauu

SEQ ID NO: 847050 - RNA, 19 nt, Homo sapiens
  misc_RNA (1)...(19): siRNA sense strand
gcucagcuaucaaggucau

SEQ ID NO: 847051 - RNA, 19 nt, Homo sapiens
  misc_RNA (1)...(19): siRNA sense strand
gugcuaggaguuugugaaa

SEQ ID NO: 847052 - RNA, 19 nt, Homo sapiens
  misc_RNA (1)...(19): siRNA sense strand
ccacuggcugcaacaagua

SEQ ID NO: 847053 - RNA, 19 nt, Homo sapiens
  misc_RNA (1)...(19): siRNA sense strand
cuaggaguuugugaaauga

SEQ ID NO: 847054 - RNA, 19 nt, Homo sapiens
  misc_RNA (1)...(19): siRNA sense strand
gcacagcaggccugaggau

SEQ ID NO: 847055 - RNA, 19 nt, Homo sapiens
  misc_RNA (1)...(19): siRNA sense strand
gaaagggaggaggucguaa

SEQ ID NO: 847056 - RNA, 19 nt, Homo sapiens
  misc_RNA (1)...(19): siRNA sense strand
auacagaaggccucagaaa

SEQ ID NO: 847057 - RNA, 19 nt, Homo sapiens
  misc_RNA (1)...(19): siRNA sense strand
cugcacaucaggagcauaa

SEQ ID NO: 847058 - RNA, 19 nt, Homo sapiens
  misc_RNA (1)...(19): siRNA sense strand
gcagcaaagcacaaagugu

SEQ ID NO: 847059 - RNA, 19 nt, Homo sapiens
  misc_RNA (1)...(19): siRNA sense strand
acagaaggccucagaaagg

SEQ ID NO: 847060 - RNA, 19 nt, Homo sapiens
  misc_RNA (1)...(19): siRNA sense strand
ggccagacuucuagcaacu

SEQ ID NO: 847061 - RNA, 19 nt, Homo sapiens
  misc_RNA (1)...(19): siRNA sense strand
cagcaggccugaggaucau

SEQ ID NO: 847062 - RNA, 19 nt, Homo sapiens
  misc_RNA (1)...(19): siRNA sense strand
agaaagggaggaggucgua

SEQ ID NO: 847063 - RNA, 19 nt, Homo sapiens
  misc_RNA (1)...(19): siRNA sense strand
gcaggccugaggaucauga

SEQ ID NO: 847064 - RNA, 19 nt, Homo sapiens
  misc_RNA (1)...(19): siRNA sense strand
aaugacaucacauacagaa

SEQ ID NO: 847065 - RNA, 19 nt, Homo sapiens
  misc_RNA (1)...(19): siRNA sense strand
acaucaggagcauaaauaa

SEQ ID NO: 847066 - RNA, 19 nt, Homo sapiens
  misc_RNA (1)...(19): siRNA sense strand
aagggucagugcucagcua

SEQ ID NO: 847067 - RNA, 19 nt, Homo sapiens
  misc_RNA (1)...(19): siRNA sense strand
ucucuucagugcccagugu

SEQ ID NO: 847068 - RNA, 19 nt, Homo sapiens
  misc_RNA (1)...(19): siRNA sense strand
cuaucaaggucaucuucug

SEQ ID NO: 847069 - RNA, 19 nt, Homo sapiens
  misc_RNA (1)...(19): siRNA sense strand
ggacacacagcugaugaag

SEQ ID NO: 847070 - RNA, 19 nt, Homo sapiens
  misc_RNA (1)...(19): siRNA sense strand
guaaggacacacagcugau

SEQ ID NO: 847071 - RNA, 19 nt, Homo sapiens
  misc_RNA (1)...(19): siRNA sense strand
cccacuggcugcaacaagu

SEQ ID NO: 847072 - RNA, 19 nt, Homo sapiens
  misc_RNA (1)...(19): siRNA sense strand
ggaguuugugaaaugaaug

SEQ ID NO: 847073 - RNA, 19 nt, Homo sapiens
  misc_RNA (1)...(19): siRNA sense strand
caucaggagcauaaauaag

SEQ ID NO: 847074 - RNA, 19 nt, Homo sapiens
  misc_RNA (1)...(19): siRNA sense strand
guaaauggcugcuguaaug

SEQ ID NO: 847075 - RNA, 19 nt, Homo sapiens
  misc_RNA (1)...(19): siRNA sense strand
ggaaggauuugcugguaaa

SEQ ID NO: 847076 - RNA, 19 nt, Homo sapiens
  misc_RNA (1)...(19): siRNA sense strand
gaagaucacuuugaguugu

SEQ ID NO: 847077 - RNA, 19 nt, Homo sapiens
  misc_RNA (1)...(19): siRNA sense strand
gaggaaggauuugcuggua

SEQ ID NO: 847078 - RNA, 19 nt, Homo sapiens
  misc_RNA (1)...(19): siRNA sense strand
cguggaaagugcaguuuaa

SEQ ID NO: 847079 - RNA, 19 nt, Homo sapiens
  misc_RNA (1)...(19): siRNA sense strand
gaugaacucggcuacguuu

SEQ ID NO: 847080 - RNA, 19 nt, Homo sapiens
  misc_RNA (1)...(19): siRNA sense strand
ggaaucuccuccagguuca

SEQ ID NO: 847081 - RNA, 19 nt, Homo sapiens
  misc_RNA (1)...(19): siRNA sense strand
gagagggcagugagagaua

SEQ ID NO: 847082 - RNA, 19 nt, Homo sapiens
  misc_RNA (1)...(19): siRNA sense strand
ugcaggaccucaucucaga

SEQ ID NO: 847083 - RNA, 19 nt, Homo sapiens
  misc_RNA (1)...(19): siRNA sense strand
gcagugagagauaggaauc

SEQ ID NO: 847084 - RNA, 19 nt, Homo sapiens
  misc_RNA (1)...(19): siRNA sense strand
ggcugucgcucgucuacuu

SEQ ID NO: 847085 - RNA, 19 nt, Homo sapiens
  misc_RNA (1)...(19): siRNA sense strand
ucgaagaucacuuugaguu

SEQ ID NO: 847086 - RNA, 19 nt, Homo sapiens
  misc_RNA (1)...(19): siRNA sense strand
ggcagucgaagaucacuuu

SEQ ID NO: 847087 - RNA, 19 nt, Homo sapiens
  misc_RNA (1)...(19): siRNA sense strand
aggaaggauuugcugguaa

SEQ ID NO: 847088 - RNA, 19 nt, Homo sapiens
  misc_RNA (1)...(19): siRNA sense strand
cgaagaucacuuugaguug

SEQ ID NO: 847089 - RNA, 19 nt, Homo sapiens
  misc_RNA (1)...(19): siRNA sense strand
ccagguucaugaccauaau

SEQ ID NO: 847090 - RNA, 19 nt, Homo sapiens
  misc_RNA (1)...(19): siRNA sense strand
caagggaagcaccucauca

SEQ ID NO: 847091 - RNA, 19 nt, Homo sapiens
  misc_RNA (1)...(19): siRNA sense strand
ggagagggcagugagagau

SEQ ID NO: 847092 - RNA, 19 nt, Homo sapiens
  misc_RNA (1)...(19): siRNA sense strand
ggaugaacucggcuacguu

SEQ ID NO: 847093 - RNA, 19 nt, Homo sapiens
  misc_RNA (1)...(19): siRNA sense strand
gguaaauggcugcuguaau

SEQ ID NO: 847094 - RNA, 19 nt, Homo sapiens
  misc_RNA (1)...(19): siRNA sense strand
gcagucguccgagcaauca

SEQ ID NO: 847095 - RNA, 19 nt, Homo sapiens
  misc_RNA (1)...(19): siRNA sense strand
agucgaagaucacuuugag

SEQ ID NO: 847096 - RNA, 19 nt, Homo sapiens
  misc_RNA (1)...(19): siRNA sense strand
ucauggcagucgaagauca

SEQ ID NO: 847097 - RNA, 19 nt, Homo sapiens
  misc_RNA (1)...(19): siRNA sense strand
ggaggagagggcagugaga

SEQ ID NO: 847098 - RNA, 19 nt, Homo sapiens
  misc_RNA (1)...(19): siRNA sense strand
guauugcuauggagaaagc

SEQ ID NO: 847099 - RNA, 19 nt, Homo sapiens
  misc_RNA (1)...(19): siRNA sense strand
ccaaaugcaggaccucauc

SEQ ID NO: 847100 - RNA, 19 nt, Homo sapiens
  misc_RNA (1)...(19): siRNA sense strand
aauggcugcuguaauguca

SEQ ID NO: 847101 - RNA, 19 nt, Homo sapiens
  misc_RNA (1)...(19): siRNA sense strand
aagaucacuuugaguugug

SEQ ID NO: 847102 - RNA, 19 nt, Homo sapiens
  misc_RNA (1)...(19): siRNA sense strand
aaguauugcuauggagaaa

SEQ ID NO: 847103 - RNA, 19 nt, Homo sapiens
  misc_RNA (1)...(19): siRNA sense strand
cggaugaacucggcuacgu

SEQ ID NO: 847104 - RNA, 19 nt, Homo sapiens
  misc_RNA (1)...(19): siRNA sense strand
aaaguauugcuauggagaa

SEQ ID NO: 847105 - RNA, 19 nt, Homo sapiens
  misc_RNA (1)...(19): siRNA sense strand
gcugcagcgccuaugagua

SEQ ID NO: 847106 - RNA, 19 nt, Homo sapiens
  misc_RNA (1)...(19): siRNA sense strand
aguugugccuggccaaaug

SEQ ID NO: 847107 - RNA, 19 nt, Homo sapiens
  misc_RNA (1)...(19): siRNA sense strand
ccguggaaagugcaguuua

SEQ ID NO: 847108 - RNA, 19 nt, Homo sapiens
  misc_RNA (1)...(19): siRNA sense strand
cugcagcgccuaugaguac

SEQ ID NO: 847109 - RNA, 19 nt, Homo sapiens
  misc_RNA (1)...(19): siRNA sense strand
gaagagccauccagauaua

SEQ ID NO: 847110 - RNA, 19 nt, Homo sapiens
  misc_RNA (1)...(19): siRNA sense strand
ugacuucucuuauggaaua

SEQ ID NO: 847111 - RNA, 19 nt, Homo sapiens
  misc_RNA (1)...(19): siRNA sense strand
ccagaaauguuaccacuuu

SEQ ID NO: 847112 - RNA, 19 nt, Homo sapiens
  misc_RNA (1)...(19): siRNA sense strand
gaacaaagcaggacaaguc

SEQ ID NO: 847113 - RNA, 19 nt, Homo sapiens
  misc_RNA (1)...(19): siRNA sense strand
guacagaacccugguauuu

SEQ ID NO: 847114 - RNA, 19 nt, Homo sapiens
  misc_RNA (1)...(19): siRNA sense strand
gaauuucaauguagccuuu

SEQ ID NO: 847115 - RNA, 19 nt, Homo sapiens
  misc_RNA (1)...(19): siRNA sense strand
ccuaguagcuucuguaugu

SEQ ID NO: 847116 - RNA, 19 nt, Homo sapiens
  misc_RNA (1)...(19): siRNA sense strand
gcaagaauucuacaaacua

SEQ ID NO: 847117 - RNA, 19 nt, Homo sapiens
  misc_RNA (1)...(19): siRNA sense strand
aaacacagguggaagaguu

SEQ ID NO: 847118 - RNA, 19 nt, Homo sapiens
  misc_RNA (1)...(19): siRNA sense strand
caacaucucugacugugau

SEQ ID NO: 847119 - RNA, 19 nt, Homo sapiens
  misc_RNA (1)...(19): siRNA sense strand
gcacgugagucgaaugaug

SEQ ID NO: 847120 - RNA, 19 nt, Homo sapiens
  misc_RNA (1)...(19): siRNA sense strand
uagaagagccauccagaua

SEQ ID NO: 847121 - RNA, 19 nt, Homo sapiens
  misc_RNA (1)...(19): siRNA sense strand
gggaaggguuucagacuug

SEQ ID NO: 847122 - RNA, 19 nt, Homo sapiens
  misc_RNA (1)...(19): siRNA sense strand
cagugcagcucuugguuua

SEQ ID NO: 847123 - RNA, 19 nt, Homo sapiens
  misc_RNA (1)...(19): siRNA sense strand
cgaguuaucugggaacaaa

SEQ ID NO: 847124 - RNA, 19 nt, Homo sapiens
  misc_RNA (1)...(19): siRNA sense strand
ggacaagacuuccauugcu

SEQ ID NO: 847125 - RNA, 19 nt, Homo sapiens
  misc_RNA (1)...(19): siRNA sense strand
ucucagcacuggcauguuu

SEQ ID NO: 847126 - RNA, 19 nt, Homo sapiens
  misc_RNA (1)...(19): siRNA sense strand
gauaucgccuggagcacua

SEQ ID NO: 847127 - RNA, 19 nt, Homo sapiens
  misc_RNA (1)...(19): siRNA sense strand
gcugauggcccucauacua

SEQ ID NO: 847128 - RNA, 19 nt, Homo sapiens
  misc_RNA (1)...(19): siRNA sense strand
gcucuugguuuacccauug

SEQ ID NO: 847129 - RNA, 19 nt, Homo sapiens
  misc_RNA (1)...(19): siRNA sense strand
caauguagccuuugcuuug

SEQ ID NO: 847130 - RNA, 19 nt, Homo sapiens
  misc_RNA (1)...(19): siRNA sense strand
ucauggaccugaucuuuau

SEQ ID NO: 847131 - RNA, 19 nt, Homo sapiens
  misc_RNA (1)...(19): siRNA sense strand
ugacaugaaugaccagaau

SEQ ID NO: 847132 - RNA, 19 nt, Homo sapiens
  misc_RNA (1)...(19): siRNA sense strand
gaauuuaggccacccguau

SEQ ID NO: 847133 - RNA, 19 nt, Homo sapiens
  misc_RNA (1)...(19): siRNA sense strand
cugcagagauuucauguuc

SEQ ID NO: 847134 - RNA, 19 nt, Homo sapiens
  misc_RNA (1)...(19): siRNA sense strand
ugaaggaucuacugcuuuc

SEQ ID NO: 847135 - RNA, 19 nt, Homo sapiens
  misc_RNA (1)...(19): siRNA sense strand
gccauuauuuaguggauuu

SEQ ID NO: 847136 - RNA, 19 nt, Homo sapiens
  misc_RNA (1)...(19): siRNA sense strand
cgaauuggcuggcauuagg

SEQ ID NO: 847137 - RNA, 19 nt, Homo sapiens
  misc_RNA (1)...(19): siRNA sense strand
gaaugaugcuagccuucuu

SEQ ID NO: 847138 - RNA, 19 nt, Homo sapiens
  misc_RNA (1)...(19): siRNA sense strand
ucacaaagaggagagauuu

SEQ ID NO: 847139 - RNA, 19 nt, Homo sapiens
  misc_RNA (1)...(19): siRNA sense strand
gagauuucauguucagaau

SEQ ID NO: 847140 - RNA, 19 nt, Homo sapiens
  misc_RNA (1)...(19): siRNA sense strand
ccacugacuucucuuaugg

SEQ ID NO: 847141 - RNA, 19 nt, Homo sapiens
  misc_RNA (1)...(19): siRNA sense strand
gaugcuagccuucuugguu

SEQ ID NO: 847142 - RNA, 19 nt, Homo sapiens
  misc_RNA (1)...(19): siRNA sense strand
gccauucgcuccuaugcuu

SEQ ID NO: 847143 - RNA, 19 nt, Homo sapiens
  misc_RNA (1)...(19): siRNA sense strand
ccauccagauauauugaua

SEQ ID NO: 847144 - RNA, 19 nt, Homo sapiens
  misc_RNA (1)...(19): siRNA sense strand
ucauugacagcuacuauua

SEQ ID NO: 847145 - RNA, 19 nt, Homo sapiens
  misc_RNA (1)...(19): siRNA sense strand
ugacugugaugaaacauuc

SEQ ID NO: 847146 - RNA, 19 nt, Homo sapiens
  misc_RNA (1)...(19): siRNA sense strand
gaacccugguauuucuauu

SEQ ID NO: 847147 - RNA, 19 nt, Homo sapiens
  misc_RNA (1)...(19): siRNA sense strand
gcagagauuucauguucag

SEQ ID NO: 847148 - RNA, 19 nt, Homo sapiens
  misc_RNA (1)...(19): siRNA sense strand
cagcauuccuuccuaguag

SEQ ID NO: 847149 - RNA, 19 nt, Homo sapiens
  misc_RNA (1)...(19): siRNA sense strand
ccagaaggcagaccuguga

SEQ ID NO: 847150 - RNA, 19 nt, Homo sapiens
  misc_RNA (1)...(19): siRNA sense strand
gaugguauauggacaagac

SEQ ID NO: 847151 - RNA, 19 nt, Homo sapiens
  misc_RNA (1)...(19): siRNA sense strand
gaacugucuuccuguuugg

SEQ ID NO: 847152 - RNA, 19 nt, Homo sapiens
  misc_RNA (1)...(19): siRNA sense strand
ggaccugaucuuuauggua

SEQ ID NO: 847153 - RNA, 19 nt, Homo sapiens
  misc_RNA (1)...(19): siRNA sense strand
uggaucagcuuggccuaua

SEQ ID NO: 847154 - RNA, 19 nt, Homo sapiens
  misc_RNA (1)...(19): siRNA sense strand
gaaauguuaccacuuugug

SEQ ID NO: 847155 - RNA, 19 nt, Homo sapiens
  misc_RNA (1)...(19): siRNA sense strand
acccugguauuucuauuua

SEQ ID NO: 847156 - RNA, 19 nt, Homo sapiens
  misc_RNA (1)...(19): siRNA sense strand
gaaaagagugguaucgauu

SEQ ID NO: 847157 - RNA, 19 nt, Homo sapiens
  misc_RNA (1)...(19): siRNA sense strand
aaacuacaccauccucaaa

SEQ ID NO: 847158 - RNA, 19 nt, Homo sapiens
  misc_RNA (1)...(19): siRNA sense strand
gcuuucaagugucugcuuu

SEQ ID NO: 847159 - RNA, 19 nt, Homo sapiens
  misc_RNA (1)...(19): siRNA sense strand
uauagaccauuccuugaug

SEQ ID NO: 847160 - RNA, 19 nt, Homo sapiens
  misc_RNA (1)...(19): siRNA sense strand
cauccacacugucccagaa

SEQ ID NO: 847161 - RNA, 19 nt, Homo sapiens
  misc_RNA (1)...(19): siRNA sense strand
gaucuacugcuuucaagug

SEQ ID NO: 847162 - RNA, 19 nt, Homo sapiens
  misc_RNA (1)...(19): siRNA sense strand
gagcuguauuugugaacuu

SEQ ID NO: 847163 - RNA, 19 nt, Homo sapiens
  misc_RNA (1)...(19): siRNA sense strand
cacacuaccucaucuaugg

SEQ ID NO: 847164 - RNA, 19 nt, Homo sapiens
  misc_RNA (1)...(19): siRNA sense strand
gaaggcagaccugugaaug

SEQ ID NO: 847165 - RNA, 19 nt, Homo sapiens
  misc_RNA (1)...(19): siRNA sense strand
ugauggcccucauacuauu

SEQ ID NO: 847166 - RNA, 19 nt, Homo sapiens
  misc_RNA (1)...(19): siRNA sense strand
uauguacacuacguugaua

SEQ ID NO: 847167 - RNA, 19 nt, Homo sapiens
  misc_RNA (1)...(19): siRNA sense strand
aaagagugguaucgauuuc

SEQ ID NO: 847168 - RNA, 19 nt, Homo sapiens
  misc_RNA (1)...(19): siRNA sense strand
uguuugggcucuugucauu

SEQ ID NO: 847169 - RNA, 19 nt, Homo sapiens
  misc_RNA (1)...(19): siRNA sense strand
ucagaucaguauacagugu

SEQ ID NO: 847170 - RNA, 19 nt, Homo sapiens
  misc_RNA (1)...(19): siRNA sense strand
caaagcugcugcgggcauu

SEQ ID NO: 847171 - RNA, 19 nt, Homo sapiens
  misc_RNA (1)...(19): siRNA sense strand
ugaaugaccagaaucuaga

SEQ ID NO: 847172 - RNA, 19 nt, Homo sapiens
  misc_RNA (1)...(19): siRNA sense strand
cccagcagcuuccuucuuc

SEQ ID NO: 847173 - RNA, 19 nt, Homo sapiens
  misc_RNA (1)...(19): siRNA sense strand
ggaaaagagugguaucgau

SEQ ID NO: 847174 - RNA, 19 nt, Homo sapiens
  misc_RNA (1)...(19): siRNA sense strand
caacacacuaccucaucua

SEQ ID NO: 847175 - RNA, 19 nt, Homo sapiens
  misc_RNA (1)...(19): siRNA sense strand
uuugugagcuguauuugug

SEQ ID NO: 847176 - RNA, 19 nt, Homo sapiens
  misc_RNA (1)...(19): siRNA sense strand
guucagaggucaguuacca

SEQ ID NO: 847177 - RNA, 19 nt, Homo sapiens
  misc_RNA (1)...(19): siRNA sense strand
aagcaaagcaaaucaggaa

SEQ ID NO: 847178 - RNA, 19 nt, Homo sapiens
  misc_RNA (1)...(19): siRNA sense strand
ccugaaggaucuacugcuu

SEQ ID NO: 847179 - RNA, 19 nt, Homo sapiens
  misc_RNA (1)...(19): siRNA sense strand
ugcgaugucuucuggcuuu

SEQ ID NO: 847180 - RNA, 19 nt, Homo sapiens
  misc_RNA (1)...(19): siRNA sense strand
uaucuuuacuccucaugga

SEQ ID NO: 847181 - RNA, 19 nt, Homo sapiens
  misc_RNA (1)...(19): siRNA sense strand
gagccauccagauauauug

SEQ ID NO: 847182 - RNA, 19 nt, Homo sapiens
  misc_RNA (1)...(19): siRNA sense strand
acaauuggcagcuucaguu

SEQ ID NO: 847183 - RNA, 19 nt, Homo sapiens
  misc_RNA (1)...(19): siRNA sense strand
cagaaauguuaccacuuug

SEQ ID NO: 847184 - RNA, 19 nt, Homo sapiens
  misc_RNA (1)...(19): siRNA sense strand
gagcaacaucucugacugu

SEQ ID NO: 847185 - RNA, 19 nt, Homo sapiens
  misc_RNA (1)...(19): siRNA sense strand
uaugggaaguuggugauug

SEQ ID NO: 847186 - RNA, 19 nt, Homo sapiens
  misc_RNA (1)...(19): siRNA sense strand
gaaugaccagaaucuagaa

SEQ ID NO: 847187 - RNA, 19 nt, Homo sapiens
  misc_RNA (1)...(19): siRNA sense strand
cauaugccauucgcuccua

SEQ ID NO: 847188 - RNA, 19 nt, Homo sapiens
  misc_RNA (1)...(19): siRNA sense strand
ucagaggucaguuaccaaa

SEQ ID NO: 847189 - RNA, 19 nt, Homo sapiens
  misc_RNA (1)...(19): siRNA sense strand
cuggagcacuauacuguga

SEQ ID NO: 847190 - RNA, 19 nt, Homo sapiens
  misc_RNA (1)...(19): siRNA sense strand
acaaggcugugugcaagaa

SEQ ID NO: 847191 - RNA, 19 nt, Homo sapiens
  misc_RNA (1)...(19): siRNA sense strand
caugcaagaauucuacaaa

SEQ ID NO: 847192 - RNA, 19 nt, Homo sapiens
  misc_RNA (1)...(19): siRNA sense strand
gauuguuccuacugacaug

SEQ ID NO: 847193 - RNA, 19 nt, Homo sapiens
  misc_RNA (1)...(19): siRNA sense strand
ccaacacacuaccucaucu

SEQ ID NO: 847194 - RNA, 19 nt, Homo sapiens
  misc_RNA (1)...(19): siRNA sense strand
ggagcacuauacugugaca

SEQ ID NO: 847195 - RNA, 19 nt, Homo sapiens
  misc_RNA (1)...(19): siRNA sense strand
ccucauggaccugaucuuu

SEQ ID NO: 847196 - RNA, 19 nt, Homo sapiens
  misc_RNA (1)...(19): siRNA sense strand
gauugcaccacucaacauu

SEQ ID NO: 847197 - RNA, 19 nt, Homo sapiens
  misc_RNA (1)...(19): siRNA sense strand
uugauuugcuggucaugaa

SEQ ID NO: 847198 - RNA, 19 nt, Homo sapiens
  misc_RNA (1)...(19): siRNA sense strand
ggaucagcuuggccuauag

SEQ ID NO: 847199 - RNA, 19 nt, Homo sapiens
  misc_RNA (1)...(19): siRNA sense strand
ggauuuggacaccaugaga

SEQ ID NO: 847200 - RNA, 19 nt, Homo sapiens
  misc_RNA (1)...(19): siRNA sense strand
agaguucagaggucaguua

SEQ ID NO: 847201 - RNA, 19 nt, Homo sapiens
  misc_RNA (1)...(19): siRNA sense strand
cauccagccucacaaagag

SEQ ID NO: 847202 - RNA, 19 nt, Homo sapiens
  misc_RNA (1)...(19): siRNA sense strand
cuaccacugacuucucuua

SEQ ID NO: 847203 - RNA, 19 nt, Homo sapiens
  misc_RNA (1)...(19): siRNA sense strand
gcuuaccuguugcuucaug

SEQ ID NO: 847204 - RNA, 19 nt, Homo sapiens
  misc_RNA (1)...(19): siRNA sense strand
gaucagcuuggccuauaga

SEQ ID NO: 847205 - RNA, 19 nt, Homo sapiens
  misc_RNA (1)...(19): siRNA sense strand
uggcuccaauguauauuug

SEQ ID NO: 847206 - RNA, 19 nt, Homo sapiens
  misc_RNA (1)...(19): siRNA sense strand
cagcuucaguucauuccau

SEQ ID NO: 847207 - RNA, 19 nt, Homo sapiens
  misc_RNA (1)...(19): siRNA sense strand
agaagagccauccagauau

SEQ ID NO: 847208 - RNA, 19 nt, Homo sapiens
  misc_RNA (1)...(19): siRNA sense strand
ugaccagaaucuagaagag

SEQ ID NO: 847209 - RNA, 19 nt, Homo sapiens
  misc_RNA (1)...(19): siRNA sense strand
ggacaaagaggcagcugua

SEQ ID NO: 847210 - RNA, 19 nt, Homo sapiens
  misc_RNA (1)...(19): siRNA sense strand
gaccgaauuuccaaggaua

SEQ ID NO: 847211 - RNA, 19 nt, Homo sapiens
  misc_RNA (1)...(19): siRNA sense strand
uaaagaagcacgcauuugu

SEQ ID NO: 847212 - RNA, 19 nt, Homo sapiens
  misc_RNA (1)...(19): siRNA sense strand
gagacauccucgcuuuaaa

SEQ ID NO: 847213 - RNA, 19 nt, Homo sapiens
  misc_RNA (1)...(19): siRNA sense strand
gaggagaaccugucauuag

SEQ ID NO: 847214 - RNA, 19 nt, Homo sapiens
  misc_RNA (1)...(19): siRNA sense strand
cuacagcugugccaccuaa

SEQ ID NO: 847215 - RNA, 19 nt, Homo sapiens
  misc_RNA (1)...(19): siRNA sense strand
gcagaaccuugcauagauc

SEQ ID NO: 847216 - RNA, 19 nt, Homo sapiens
  misc_RNA (1)...(19): siRNA sense strand
ggaggagaaccugucauua

SEQ ID NO: 847217 - RNA, 19 nt, Homo sapiens
  misc_RNA (1)...(19): siRNA sense strand
ggaccgaauuuccaaggau

SEQ ID NO: 847218 - RNA, 19 nt, Homo sapiens
  misc_RNA (1)...(19): siRNA sense strand
ggagaagggcgagggagua

SEQ ID NO: 847219 - RNA, 19 nt, Homo sapiens
  misc_RNA (1)...(19): siRNA sense strand
ggugagcccuggacuuaag

SEQ ID NO: 847220 - RNA, 19 nt, Homo sapiens
  misc_RNA (1)...(19): siRNA sense strand
gcacagaugccaccugaac

SEQ ID NO: 847221 - RNA, 19 nt, Homo sapiens
  misc_RNA (1)...(19): siRNA sense strand
gagaagggcgagggaguaa

SEQ ID NO: 847222 - RNA, 19 nt, Homo sapiens
  misc_RNA (1)...(19): siRNA sense strand
ggaagaaggcgcugcaacu

SEQ ID NO: 847223 - RNA, 19 nt, Homo sapiens
  misc_RNA (1)...(19): siRNA sense strand
caaagaggcagcuguagca

SEQ ID NO: 847224 - RNA, 19 nt, Homo sapiens
  misc_RNA (1)...(19): siRNA sense strand
ggagccaguuucucaucuu

SEQ ID NO: 847225 - RNA, 19 nt, Homo sapiens
  misc_RNA (1)...(19): siRNA sense strand
gaaguggagucugcuguac

SEQ ID NO: 847226 - RNA, 19 nt, Homo sapiens
  misc_RNA (1)...(19): siRNA sense strand
gaagggcgagggaguaaag

SEQ ID NO: 847227 - RNA, 19 nt, Homo sapiens
  misc_RNA (1)...(19): siRNA sense strand
guacgcagggccucaaaga

SEQ ID NO: 847228 - RNA, 19 nt, Homo sapiens
  misc_RNA (1)...(19): siRNA sense strand
cagcagaaccuugcauaga

SEQ ID NO: 847229 - RNA, 19 nt, Homo sapiens
  misc_RNA (1)...(19): siRNA sense strand
ggccacaagcccuuucuuu

SEQ ID NO: 847230 - RNA, 19 nt, Homo sapiens
  misc_RNA (1)...(19): siRNA sense strand
gagccaguuucucaucuuc

SEQ ID NO: 847231 - RNA, 19 nt, Homo sapiens
  misc_RNA (1)...(19): siRNA sense strand
guaccgguguggagagugu

SEQ ID NO: 847232 - RNA, 19 nt, Homo sapiens
  misc_RNA (1)...(19): siRNA sense strand
gccacaagcccuuucuuug

SEQ ID NO: 847233 - RNA, 19 nt, Homo sapiens
  misc_RNA (1)...(19): siRNA sense strand
uggcuggacuagcuuggua

SEQ ID NO: 847234 - RNA, 19 nt, Homo sapiens
  misc_RNA (1)...(19): siRNA sense strand
gcuaauccauaaggacaug

SEQ ID NO: 847235 - RNA, 19 nt, Homo sapiens
  misc_RNA (1)...(19): siRNA sense strand
caaccugcgugggcauuug

SEQ ID NO: 847236 - RNA, 19 nt, Homo sapiens
  misc_RNA (1)...(19): siRNA sense strand
cacaagcccuuucuuugca

SEQ ID NO: 847237 - RNA, 19 nt, Homo sapiens
  misc_RNA (1)...(19): siRNA sense strand
ggcuucaucugcaagugua

SEQ ID NO: 847238 - RNA, 19 nt, Homo sapiens
  misc_RNA (1)...(19): siRNA sense strand
cgagaggcuucaucugcaa

SEQ ID NO: 847239 - RNA, 19 nt, Homo sapiens
  misc_RNA (1)...(19): siRNA sense strand
gaagaaggcgcugcaacuc

SEQ ID NO: 847240 - RNA, 19 nt, Homo sapiens
  misc_RNA (1)...(19): siRNA sense strand
aaggauagccagccacuug

SEQ ID NO: 847241 - RNA, 19 nt, Homo sapiens
  misc_RNA (1)...(19): siRNA sense strand
gcaggaagcuccccaaagc

SEQ ID NO: 847242 - RNA, 19 nt, Homo sapiens
  misc_RNA (1)...(19): siRNA sense strand
gccuggugcuaauccauaa

SEQ ID NO: 847243 - RNA, 19 nt, Homo sapiens
  misc_RNA (1)...(19): siRNA sense strand
cuaccuggccaagaaguua

SEQ ID NO: 847244 - RNA, 19 nt, Homo sapiens
  misc_RNA (1)...(19): siRNA sense strand
ccacaagcccuuucuuugc

SEQ ID NO: 847245 - RNA, 19 nt, Homo sapiens
  misc_RNA (1)...(19): siRNA sense strand
gacauccucgcuuuaaaga

SEQ ID NO: 847246 - RNA, 19 nt, Homo sapiens
  misc_RNA (1)...(19): siRNA sense strand
gaguguggcaagagcuaua

SEQ ID NO: 847247 - RNA, 19 nt, Homo sapiens
  misc_RNA (1)...(19): siRNA sense strand
ccuaaagaagcacgcauuu

SEQ ID NO: 847248 - RNA, 19 nt, Homo sapiens
  misc_RNA (1)...(19): siRNA sense strand
cgacguggaugaggaaugc

SEQ ID NO: 847249 - RNA, 19 nt, Homo sapiens
  misc_RNA (1)...(19): siRNA sense strand
agcagaaccuugcauagau

SEQ ID NO: 847250 - RNA, 19 nt, Homo sapiens
  misc_RNA (1)...(19): siRNA sense strand
uagcaguggugacagaagu

SEQ ID NO: 847251 - RNA, 19 nt, Homo sapiens
  misc_RNA (1)...(19): siRNA sense strand
cagaaagccaggagaagug

SEQ ID NO: 847252 - RNA, 19 nt, Homo sapiens
  misc_RNA (1)...(19): siRNA sense strand
gcauccaggcagagaauau

SEQ ID NO: 847253 - RNA, 19 nt, Homo sapiens
  misc_RNA (1)...(19): siRNA sense strand
ggagagugagggaaaugug

SEQ ID NO: 847254 - RNA, 19 nt, Homo sapiens
  misc_RNA (1)...(19): siRNA sense strand
cacaacugcuggacacaca

SEQ ID NO: 847255 - RNA, 19 nt, Homo sapiens
  misc_RNA (1)...(19): siRNA sense strand
gagaguguggcaaggcauu

SEQ ID NO: 847256 - RNA, 19 nt, Homo sapiens
  misc_RNA (1)...(19): siRNA sense strand
aggagaaccugucauuagg

SEQ ID NO: 847257 - RNA, 19 nt, Homo sapiens
  misc_RNA (1)...(19): siRNA sense strand
ggcgccaccucaaaucuca

SEQ ID NO: 847258 - RNA, 19 nt, Homo sapiens
  misc_RNA (1)...(19): siRNA sense strand
cuaaagaagcacgcauuug

SEQ ID NO: 847259 - RNA, 19 nt, Homo sapiens
  misc_RNA (1)...(19): siRNA sense strand
cagcugugccaccuaaaga

SEQ ID NO: 847260 - RNA, 19 nt, Homo sapiens
  misc_RNA (1)...(19): siRNA sense strand
agaaguggagucugcugua

SEQ ID NO: 847261 - RNA, 19 nt, Homo sapiens
  misc_RNA (1)...(19): siRNA sense strand
gcagcagaaccuugcauag

SEQ ID NO: 847262 - RNA, 19 nt, Homo sapiens
  misc_RNA (1)...(19): siRNA sense strand
aaagaagcacgcauuugug

SEQ ID NO: 847263 - RNA, 19 nt, Homo sapiens
  misc_RNA (1)...(19): siRNA sense strand
ggccuggacuuaggaugga

SEQ ID NO: 847264 - RNA, 19 nt, Homo sapiens
  misc_RNA (1)...(19): siRNA sense strand
gccaguuucucaucuucug

SEQ ID NO: 847265 - RNA, 19 nt, Homo sapiens
  misc_RNA (1)...(19): siRNA sense strand
cgucugcacuccggagaga

SEQ ID NO: 847266 - RNA, 19 nt, Homo sapiens
  misc_RNA (1)...(19): siRNA sense strand
ugaggucaccauuucagaa

SEQ ID NO: 847267 - RNA, 19 nt, Homo sapiens
  misc_RNA (1)...(19): siRNA sense strand
ucagaaagccaggagaagu

SEQ ID NO: 847268 - RNA, 19 nt, Homo sapiens
  misc_RNA (1)...(19): siRNA sense strand
acagaugccaccugaacuu

SEQ ID NO: 847269 - RNA, 19 nt, Homo sapiens
  misc_RNA (1)...(19): siRNA sense strand
ccaccucaaaucucacuug

SEQ ID NO: 847270 - RNA, 19 nt, Homo sapiens
  misc_RNA (1)...(19): siRNA sense strand
cuuacacgcuggccaccaa

SEQ ID NO: 847271 - RNA, 19 nt, Homo sapiens
  misc_RNA (1)...(19): siRNA sense strand
gcaaccugcgugggcauuu

SEQ ID NO: 847272 - RNA, 19 nt, Homo sapiens
  misc_RNA (1)...(19): siRNA sense strand
caguggagccaguuucuca

SEQ ID NO: 847273 - RNA, 19 nt, Homo sapiens
  misc_RNA (1)...(19): siRNA sense strand
auggugagcccuggacuua

SEQ ID NO: 847274 - RNA, 19 nt, Homo sapiens
  misc_RNA (1)...(19): siRNA sense strand
gcuggagagugagggaaau

SEQ ID NO: 847275 - RNA, 19 nt, Homo sapiens
  misc_RNA (1)...(19): siRNA sense strand
guuguugaggucaccauuu

SEQ ID NO: 847276 - RNA, 19 nt, Homo sapiens
  misc_RNA (1)...(19): siRNA sense strand
uuguugaggucaccauuuc

SEQ ID NO: 847277 - RNA, 19 nt, Homo sapiens
  misc_RNA (1)...(19): siRNA sense strand
aggaggagaaccugucauu

SEQ ID NO: 847278 - RNA, 19 nt, Homo sapiens
  misc_RNA (1)...(19): siRNA sense strand
cgccagggauguuguugag

SEQ ID NO: 847279 - RNA, 19 nt, Homo sapiens
  misc_RNA (1)...(19): siRNA sense strand
ggcgccaucucaucucaca

SEQ ID NO: 847280 - RNA, 19 nt, Homo sapiens
  misc_RNA (1)...(19): siRNA sense strand
ccagcgagaccucaaagag

SEQ ID NO: 847281 - RNA, 19 nt, Homo sapiens
  misc_RNA (1)...(19): siRNA sense strand
gcacccagcgagaccucaa

SEQ ID NO: 847282 - RNA, 19 nt, Homo sapiens
  misc_RNA (1)...(19): siRNA sense strand
agacauccucgcuuuaaag

SEQ ID NO: 847283 - RNA, 19 nt, Homo sapiens
  misc_RNA (1)...(19): siRNA sense strand
aaucucacuuggaggacaa

SEQ ID NO: 847284 - RNA, 19 nt, Homo sapiens
  misc_RNA (1)...(19): siRNA sense strand
uggacuagcuugguacaac

SEQ ID NO: 847285 - RNA, 19 nt, Homo sapiens
  misc_RNA (1)...(19): siRNA sense strand
ggaagaagagggaagagaa

SEQ ID NO: 847286 - RNA, 19 nt, Homo sapiens
  misc_RNA (1)...(19): siRNA sense strand
ccagauacccuaacucuag

SEQ ID NO: 847287 - RNA, 19 nt, Homo sapiens
  misc_RNA (1)...(19): siRNA sense strand
gcauggcacccucguauug

SEQ ID NO: 847288 - RNA, 19 nt, Homo sapiens
  misc_RNA (1)...(19): siRNA sense strand
ccacugugcuggugcuguu

SEQ ID NO: 847289 - RNA, 19 nt, Homo sapiens
  misc_RNA (1)...(19): siRNA sense strand
gcgcagacucggaggcaua

SEQ ID NO: 847290 - RNA, 19 nt, Homo sapiens
  misc_RNA (1)...(19): siRNA sense strand
uggaggugcugguagauga

SEQ ID NO: 847291 - RNA, 19 nt, Homo sapiens
  misc_RNA (1)...(19): siRNA sense strand
cagauacccuaacucuaga

SEQ ID NO: 847292 - RNA, 19 nt, Homo sapiens
  misc_RNA (1)...(19): siRNA sense strand
ggacccagauacccuaacu

SEQ ID NO: 847293 - RNA, 19 nt, Homo sapiens
  misc_RNA (1)...(19): siRNA sense strand
gaagaagagggaagagaag

SEQ ID NO: 847294 - RNA, 19 nt, Homo sapiens
  misc_RNA (1)...(19): siRNA sense strand
gcgcauggcacccucguau

SEQ ID NO: 847295 - RNA, 19 nt, Homo sapiens
  misc_RNA (1)...(19): siRNA sense strand
gaacuuagccauggaaccu

SEQ ID NO: 847296 - RNA, 19 nt, Homo sapiens
  misc_RNA (1)...(19): siRNA sense strand
uggcuuggaucuacugaug

SEQ ID NO: 847297 - RNA, 19 nt, Homo sapiens
  misc_RNA (1)...(19): siRNA sense strand
gcguggaggugcugguaga

SEQ ID NO: 847298 - RNA, 19 nt, Homo sapiens
  misc_RNA (1)...(19): siRNA sense strand
ggaggaagaagagggaaga

SEQ ID NO: 847299 - RNA, 19 nt, Homo sapiens
  misc_RNA (1)...(19): siRNA sense strand
gggcuggucugugcuucuu

SEQ ID NO: 847300 - RNA, 19 nt, Homo sapiens
  misc_RNA (1)...(19): siRNA sense strand
agacagacagcauccagaa

SEQ ID NO: 847301 - RNA, 19 nt, Homo sapiens
  misc_RNA (1)...(19): siRNA sense strand
gcuggucugugcuucuuuc

SEQ ID NO: 847302 - RNA, 19 nt, Homo sapiens
  misc_RNA (1)...(19): siRNA sense strand
gcugguggcuuggaucuac

SEQ ID NO: 847303 - RNA, 19 nt, Homo sapiens
  misc_RNA (1)...(19): siRNA sense strand
gauccucgccaaccugugu

SEQ ID NO: 847304 - RNA, 19 nt, Homo sapiens
  misc_RNA (1)...(19): siRNA sense strand
uauuguggcugcccuugug

SEQ ID NO: 847305 - RNA, 19 nt, Homo sapiens
  misc_RNA (1)...(19): siRNA sense strand
cgagggaaccauucugauc

SEQ ID NO: 847306 - RNA, 19 nt, Homo sapiens
  misc_RNA (1)...(19): siRNA sense strand
aaccucaccuucccacuca

SEQ ID NO: 847307 - RNA, 19 nt, Homo sapiens
  misc_RNA (1)...(19): siRNA sense strand
uguacggccugcugaccua

SEQ ID NO: 847308 - RNA, 19 nt, Homo sapiens
  misc_RNA (1)...(19): siRNA sense strand
ggaccgaagugcgcagacu

SEQ ID NO: 847309 - RNA, 19 nt, Homo sapiens
  misc_RNA (1)...(19): siRNA sense strand
ccacgugcacugcgcauuc

SEQ ID NO: 847310 - RNA, 19 nt, Homo sapiens
  misc_RNA (1)...(19): siRNA sense strand
uacccuaacucuagaugca

SEQ ID NO: 847311 - RNA, 19 nt, Homo sapiens
  misc_RNA (1)...(19): siRNA sense strand
ugucacgccucaccugcaa

SEQ ID NO: 847312 - RNA, 19 nt, Homo sapiens
  misc_RNA (1)...(19): siRNA sense strand
gcaugaagacagacagcau

SEQ ID NO: 847313 - RNA, 19 nt, Homo sapiens
  misc_RNA (1)...(19): siRNA sense strand
cggacucgcucucguucug

SEQ ID NO: 847314 - RNA, 19 nt, Homo sapiens
  misc_RNA (1)...(19): siRNA sense strand
accgagagcugggugaguu

SEQ ID NO: 847315 - RNA, 19 nt, Homo sapiens
  misc_RNA (1)...(19): siRNA sense strand
ucacggacucgcucucguu

SEQ ID NO: 847316 - RNA, 19 nt, Homo sapiens
  misc_RNA (1)...(19): siRNA sense strand
gcugcaggcucugggacuu

SEQ ID NO: 847317 - RNA, 19 nt, Homo sapiens
  misc_RNA (1)...(19): siRNA sense strand
ucagcauccuagccgauug

SEQ ID NO: 847318 - RNA, 19 nt, Homo sapiens
  misc_RNA (1)...(19): siRNA sense strand
ggaugcugguggcuuggau

SEQ ID NO: 847319 - RNA, 19 nt, Homo sapiens
  misc_RNA (1)...(19): siRNA sense strand
ugaccauucuucagugcau

SEQ ID NO: 847320 - RNA, 19 nt, Homo sapiens
  misc_RNA (1)...(19): siRNA sense strand
gccauugguucagcacugu

SEQ ID NO: 847321 - RNA, 19 nt, Homo sapiens
  misc_RNA (1)...(19): siRNA sense strand
gaggcauacucccuuuggu

SEQ ID NO: 847322 - RNA, 19 nt, Homo sapiens
  misc_RNA (1)...(19): siRNA sense strand
gcugaucuccgagggcuau

SEQ ID NO: 847323 - RNA, 19 nt, Homo sapiens
  misc_RNA (1)...(19): siRNA sense strand
gcugugucgucgucuaguc

SEQ ID NO: 847324 - RNA, 19 nt, Homo sapiens
  misc_RNA (1)...(19): siRNA sense strand
uaacauagcucacaugaag

SEQ ID NO: 847325 - RNA, 19 nt, Homo sapiens
  misc_RNA (1)...(19): siRNA sense strand
gcuaugagauuaucaagaa

SEQ ID NO: 847326 - RNA, 19 nt, Homo sapiens
  misc_RNA (1)...(19): siRNA sense strand
gaacagucauuaccgauuc

SEQ ID NO: 847327 - RNA, 19 nt, Homo sapiens
  misc_RNA (1)...(19): siRNA sense strand
gaaaccaacuacgauguaa

SEQ ID NO: 847328 - RNA, 19 nt, Homo sapiens
  misc_RNA (1)...(19): siRNA sense strand
caaaggagcagcuguagaa

SEQ ID NO: 847329 - RNA, 19 nt, Homo sapiens
  misc_RNA (1)...(19): siRNA sense strand
caacuacgauguaaugcuu

SEQ ID NO: 847330 - RNA, 19 nt, Homo sapiens
  misc_RNA (1)...(19): siRNA sense strand
aggagcagcuguagaaaua

SEQ ID NO: 847331 - RNA, 19 nt, Homo sapiens
  misc_RNA (1)...(19): siRNA sense strand
gagcagcuguagaaauaaa

SEQ ID NO: 847332 - RNA, 19 nt, Homo sapiens
  misc_RNA (1)...(19): siRNA sense strand
gcacuacucuauagaugug

SEQ ID NO: 847333 - RNA, 19 nt, Homo sapiens
  misc_RNA (1)...(19): siRNA sense strand
uaaagagaaugcuaugaga

SEQ ID NO: 847334 - RNA, 19 nt, Homo sapiens
  misc_RNA (1)...(19): siRNA sense strand
gggaagaguuuuauaguaa

SEQ ID NO: 847335 - RNA, 19 nt, Homo sapiens
  misc_RNA (1)...(19): siRNA sense strand
uaucaagaauucaccauga

SEQ ID NO: 847336 - RNA, 19 nt, Homo sapiens
  misc_RNA (1)...(19): siRNA sense strand
gaaugaaugggaucuauga

SEQ ID NO: 847337 - RNA, 19 nt, Homo sapiens
  misc_RNA (1)...(19): siRNA sense strand
ggaaaccaacuacgaugua

SEQ ID NO: 847338 - RNA, 19 nt, Homo sapiens
  misc_RNA (1)...(19): siRNA sense strand
gcugagauauggcuaauac

SEQ ID NO: 847339 - RNA, 19 nt, Homo sapiens
  misc_RNA (1)...(19): siRNA sense strand
caacugcuauauucuuguu

SEQ ID NO: 847340 - RNA, 19 nt, Homo sapiens
  misc_RNA (1)...(19): siRNA sense strand
ggacuaacagacagaauga

SEQ ID NO: 847341 - RNA, 19 nt, Homo sapiens
  misc_RNA (1)...(19): siRNA sense strand
agagaaugcuaugagauua

SEQ ID NO: 847342 - RNA, 19 nt, Homo sapiens
  misc_RNA (1)...(19): siRNA sense strand
ggaaggcccacuacauuau

SEQ ID NO: 847343 - RNA, 19 nt, Homo sapiens
  misc_RNA (1)...(19): siRNA sense strand
gauaacauagcucacauga

SEQ ID NO: 847344 - RNA, 19 nt, Homo sapiens
  misc_RNA (1)...(19): siRNA sense strand
ugaagaagcuacaggaaac

SEQ ID NO: 847345 - RNA, 19 nt, Homo sapiens
  misc_RNA (1)...(19): siRNA sense strand
gagcgaagcugugggaaac

SEQ ID NO: 847346 - RNA, 19 nt, Homo sapiens
  misc_RNA (1)...(19): siRNA sense strand
ugugagagcuuuaucuaca

SEQ ID NO: 847347 - RNA, 19 nt, Homo sapiens
  misc_RNA (1)...(19): siRNA sense strand
uaugacaagcgaagauuua

SEQ ID NO: 847348 - RNA, 19 nt, Homo sapiens
  misc_RNA (1)...(19): siRNA sense strand
gcuuauagacccugugauu

SEQ ID NO: 847349 - RNA, 19 nt, Homo sapiens
  misc_RNA (1)...(19): siRNA sense strand
gauucaggauuacgacuau

SEQ ID NO: 847350 - RNA, 19 nt, Homo sapiens
  misc_RNA (1)...(19): siRNA sense strand
cagcuccacuuuccuaugu

SEQ ID NO: 847351 - RNA, 19 nt, Homo sapiens
  misc_RNA (1)...(19): siRNA sense strand
ggacagaacagaagaaaau

SEQ ID NO: 847352 - RNA, 19 nt, Homo sapiens
  misc_RNA (1)...(19): siRNA sense strand
guaaaccugccaaagcuuu

SEQ ID NO: 847353 - RNA, 19 nt, Homo sapiens
  misc_RNA (1)...(19): siRNA sense strand
ggcaacugcuauauucuug

SEQ ID NO: 847354 - RNA, 19 nt, Homo sapiens
  misc_RNA (1)...(19): siRNA sense strand
gugcucacacuuagaauuu

SEQ ID NO: 847355 - RNA, 19 nt, Homo sapiens
  misc_RNA (1)...(19): siRNA sense strand
gaacauauugggauuuuga

SEQ ID NO: 847356 - RNA, 19 nt, Homo sapiens
  misc_RNA (1)...(19): siRNA sense strand
ggaucuaugaagcuauuua

SEQ ID NO: 847357 - RNA, 19 nt, Homo sapiens
  misc_RNA (1)...(19): siRNA sense strand
guuggaggauugcacugua

SEQ ID NO: 847358 - RNA, 19 nt, Homo sapiens
  misc_RNA (1)...(19): siRNA sense strand
uaggaaggcccacuacauu

SEQ ID NO: 847359 - RNA, 19 nt, Homo sapiens
  misc_RNA (1)...(19): siRNA sense strand
cagcacuacucuauagaug

SEQ ID NO: 847360 - RNA, 19 nt, Homo sapiens
  misc_RNA (1)...(19): siRNA sense strand
gaagaaaaggcuaauauca

SEQ ID NO: 847361 - RNA, 19 nt, Homo sapiens
  misc_RNA (1)...(19): siRNA sense strand
gagauauggcuaauacgaa

SEQ ID NO: 847362 - RNA, 19 nt, Homo sapiens
  misc_RNA (1)...(19): siRNA sense strand
gggaaaagcugagauaugg

SEQ ID NO: 847363 - RNA, 19 nt, Homo sapiens
  misc_RNA (1)...(19): siRNA sense strand
ugaauuuccucaaccauac

SEQ ID NO: 847364 - RNA, 19 nt, Homo sapiens
  misc_RNA (1)...(19): siRNA sense strand
gaaugucuugccaggcuua

SEQ ID NO: 847365 - RNA, 19 nt, Homo sapiens
  misc_RNA (1)...(19): siRNA sense strand
uguggcaacugcuauauuc

SEQ ID NO: 847366 - RNA, 19 nt, Homo sapiens
  misc_RNA (1)...(19): siRNA sense strand
cccaugaccucaccugguu

SEQ ID NO: 847367 - RNA, 19 nt, Homo sapiens
  misc_RNA (1)...(19): siRNA sense strand
ucaccaugaucaaccugua

SEQ ID NO: 847368 - RNA, 19 nt, Homo sapiens
  misc_RNA (1)...(19): siRNA sense strand
gagaaugcuaugagauuau

SEQ ID NO: 847369 - RNA, 19 nt, Homo sapiens
  misc_RNA (1)...(19): siRNA sense strand
gcgaagcugugggaaacuu

SEQ ID NO: 847370 - RNA, 19 nt, Homo sapiens
  misc_RNA (1)...(19): siRNA sense strand
cauauuuggugaucagcuu

SEQ ID NO: 847371 - RNA, 19 nt, Homo sapiens
  misc_RNA (1)...(19): siRNA sense strand
gcuuugagaacagucauua

SEQ ID NO: 847372 - RNA, 19 nt, Homo sapiens
  misc_RNA (1)...(19): siRNA sense strand
ugaccuagcucugaauguc

SEQ ID NO: 847373 - RNA, 19 nt, Homo sapiens
  misc_RNA (1)...(19): siRNA sense strand
ggaaugaaugggaucuaug

SEQ ID NO: 847374 - RNA, 19 nt, Homo sapiens
  misc_RNA (1)...(19): siRNA sense strand
ccacagaagguguuaugga

SEQ ID NO: 847375 - RNA, 19 nt, Homo sapiens
  misc_RNA (1)...(19): siRNA sense strand
cauaccaaccuaacuuuga

SEQ ID NO: 847376 - RNA, 19 nt, Homo sapiens
  misc_RNA (1)...(19): siRNA sense strand
auacgaacauauugggauu

SEQ ID NO: 847377 - RNA, 19 nt, Homo sapiens
  misc_RNA (1)...(19): siRNA sense strand
gaaggcccacuacauuaug

SEQ ID NO: 847378 - RNA, 19 nt, Homo sapiens
  misc_RNA (1)...(19): siRNA sense strand
ggauucaggauuacgacua

SEQ ID NO: 847379 - RNA, 19 nt, Homo sapiens
  misc_RNA (1)...(19): siRNA sense strand
aaacuuccagcuccacuuu

SEQ ID NO: 847380 - RNA, 19 nt, Homo sapiens
  misc_RNA (1)...(19): siRNA sense strand
gcgaucagcugcccaugac

SEQ ID NO: 847381 - RNA, 19 nt, Homo sapiens
  misc_RNA (1)...(19): siRNA sense strand
caagaauucaccaugauca

SEQ ID NO: 847382 - RNA, 19 nt, Homo sapiens
  misc_RNA (1)...(19): siRNA sense strand
ggccaaaggagcagcugua

SEQ ID NO: 847383 - RNA, 19 nt, Homo sapiens
  misc_RNA (1)...(19): siRNA sense strand
ccucaaccauaccaaccua

SEQ ID NO: 847384 - RNA, 19 nt, Homo sapiens
  misc_RNA (1)...(19): siRNA sense strand
ggagcgaagcugugggaaa

SEQ ID NO: 847385 - RNA, 19 nt, Homo sapiens
  misc_RNA (1)...(19): siRNA sense strand
aagagaaugcuaugagauu

SEQ ID NO: 847386 - RNA, 19 nt, Homo sapiens
  misc_RNA (1)...(19): siRNA sense strand
acaaucagacgcuuaugaa

SEQ ID NO: 847387 - RNA, 19 nt, Homo sapiens
  misc_RNA (1)...(19): siRNA sense strand
uuaccgauuccucuuauaa

SEQ ID NO: 847388 - RNA, 19 nt, Homo sapiens
  misc_RNA (1)...(19): siRNA sense strand
aaucagacgcuuaugaaga

SEQ ID NO: 847389 - RNA, 19 nt, Homo sapiens
  misc_RNA (1)...(19): siRNA sense strand
cuaugaagcuauuuaccau

SEQ ID NO: 847390 - RNA, 19 nt, Homo sapiens
  misc_RNA (1)...(19): siRNA sense strand
ugaguuuguuggaggauug

SEQ ID NO: 847391 - RNA, 19 nt, Homo sapiens
  misc_RNA (1)...(19): siRNA sense strand
gugagagcuuuaucuacaa

SEQ ID NO: 847392 - RNA, 19 nt, Homo sapiens
  misc_RNA (1)...(19): siRNA sense strand
aggaaggcccacuacauua

SEQ ID NO: 847393 - RNA, 19 nt, Homo sapiens
  misc_RNA (1)...(19): siRNA sense strand
uaacagacagaaugaccuu

SEQ ID NO: 847394 - RNA, 19 nt, Homo sapiens
  misc_RNA (1)...(19): siRNA sense strand
aucagacgcuuaugaagaa

SEQ ID NO: 847395 - RNA, 19 nt, Homo sapiens
  misc_RNA (1)...(19): siRNA sense strand
cauuaccgauuccucuuau

SEQ ID NO: 847396 - RNA, 19 nt, Homo sapiens
  misc_RNA (1)...(19): siRNA sense strand
acuucuggauucaggauua

SEQ ID NO: 847397 - RNA, 19 nt, Homo sapiens
  misc_RNA (1)...(19): siRNA sense strand
gacaagcgaagauuuacug

SEQ ID NO: 847398 - RNA, 19 nt, Homo sapiens
  misc_RNA (1)...(19): siRNA sense strand
ugggaucuaugaagcuauu

SEQ ID NO: 847399 - RNA, 19 nt, Homo sapiens
  misc_RNA (1)...(19): siRNA sense strand
uuauggagguacaaaggaa

SEQ ID NO: 847400 - RNA, 19 nt, Homo sapiens
  misc_RNA (1)...(19): siRNA sense strand
gagaccugauggcugaguu

SEQ ID NO: 847401 - RNA, 19 nt, Homo sapiens
  misc_RNA (1)...(19): siRNA sense strand
caaccuggcaaucaguuau

SEQ ID NO: 847402 - RNA, 19 nt, Homo sapiens
  misc_RNA (1)...(19): siRNA sense strand
ugagagcuuuaucuacaau

SEQ ID NO: 847403 - RNA, 19 nt, Homo sapiens
  misc_RNA (1)...(19): siRNA sense strand
uaugugagacugugggaaa

SEQ ID NO: 847404 - RNA, 19 nt, Homo sapiens
  misc_RNA (1)...(19): siRNA sense strand
gcauuaggaaggcccacua

SEQ ID NO: 847405 - RNA, 19 nt, Homo sapiens
  misc_RNA (1)...(19): siRNA sense strand
ccugauggcugaguugcuu

SEQ ID NO: 847406 - RNA, 19 nt, Homo sapiens
  misc_RNA (1)...(19): siRNA sense strand
ccacaggacagaacagaag

SEQ ID NO: 847407 - RNA, 19 nt, Homo sapiens
  misc_RNA (1)...(19): siRNA sense strand
uuacugagggcuuugagaa

SEQ ID NO: 847408 - RNA, 19 nt, Homo sapiens
  misc_RNA (1)...(19): siRNA sense strand
uggaaugaaugggaucuau

SEQ ID NO: 847409 - RNA, 19 nt, Homo sapiens
  misc_RNA (1)...(19): siRNA sense strand
ggauuacgacuaucauuuu

SEQ ID NO: 847410 - RNA, 19 nt, Homo sapiens
  misc_RNA (1)...(19): siRNA sense strand
gaaacuuccagcuccacuu

SEQ ID NO: 847411 - RNA, 19 nt, Homo sapiens
  misc_RNA (1)...(19): siRNA sense strand
ucauuaccgauuccucuua

SEQ ID NO: 847412 - RNA, 19 nt, Homo sapiens
  misc_RNA (1)...(19): siRNA sense strand
uauaguaaggcauuaggaa

SEQ ID NO: 847413 - RNA, 19 nt, Homo sapiens
  misc_RNA (1)...(19): siRNA sense strand
aaugaugugugagagcuuu

SEQ ID NO: 847414 - RNA, 19 nt, Homo sapiens
  misc_RNA (1)...(19): siRNA sense strand
aaugggaucuaugaagcua

SEQ ID NO: 847415 - RNA, 19 nt, Homo sapiens
  misc_RNA (1)...(19): siRNA sense strand
aagaugguauugugguguu

SEQ ID NO: 847416 - RNA, 19 nt, Homo sapiens
  misc_RNA (1)...(19): siRNA sense strand
gcacuguaaaccugccaaa

SEQ ID NO: 847417 - RNA, 19 nt, Homo sapiens
  misc_RNA (1)...(19): siRNA sense strand
ugagauauggcuaauacga

SEQ ID NO: 847418 - RNA, 19 nt, Homo sapiens
  misc_RNA (1)...(19): siRNA sense strand
ucacaugaaggccaaagga

SEQ ID NO: 847419 - RNA, 19 nt, Homo sapiens
  misc_RNA (1)...(19): siRNA sense strand
aagauuuacugagggcuuu

SEQ ID NO: 847420 - RNA, 19 nt, Homo sapiens
  misc_RNA (1)...(19): siRNA sense strand
cuucagcccuugcccagau

SEQ ID NO: 847421 - RNA, 19 nt, Homo sapiens
  misc_RNA (1)...(19): siRNA sense strand
agaaugcuaugagauuauc

SEQ ID NO: 847422 - RNA, 19 nt, Homo sapiens
  misc_RNA (1)...(19): siRNA sense strand
ccaaagcuuuuaucacuca

SEQ ID NO: 847423 - RNA, 19 nt, Homo sapiens
  misc_RNA (1)...(19): siRNA sense strand
aggauuacgacuaucauuu

SEQ ID NO: 847424 - RNA, 19 nt, Homo sapiens
  misc_RNA (1)...(19): siRNA sense strand
acuguuaguuccuguauuu

SEQ ID NO: 847425 - RNA, 19 nt, Homo sapiens
  misc_RNA (1)...(19): siRNA sense strand
cgauuuaggucgccagcuu

SEQ ID NO: 847426 - RNA, 19 nt, Homo sapiens
  misc_RNA (1)...(19): siRNA sense strand
gcacuguuaguuccuguau

SEQ ID NO: 847427 - RNA, 19 nt, Homo sapiens
  misc_RNA (1)...(19): siRNA sense strand
cguucuagcugccugaaga

SEQ ID NO: 847428 - RNA, 19 nt, Homo sapiens
  misc_RNA (1)...(19): siRNA sense strand
cuuccauccugguuaaauu

SEQ ID NO: 847429 - RNA, 19 nt, Homo sapiens
  misc_RNA (1)...(19): siRNA sense strand
gauuuaggucgccagcuuu

SEQ ID NO: 847430 - RNA, 19 nt, Homo sapiens
  misc_RNA (1)...(19): siRNA sense strand
cauccugguuaaauucuca

SEQ ID NO: 847431 - RNA, 19 nt, Homo sapiens
  misc_RNA (1)...(19): siRNA sense strand
cagagcgggucgcacuguu

SEQ ID NO: 847432 - RNA, 19 nt, Homo sapiens
  misc_RNA (1)...(19): siRNA sense strand
gucgccagcuuuccaguca

SEQ ID NO: 847433 - RNA, 19 nt, Homo sapiens
  misc_RNA (1)...(19): siRNA sense strand
gagcgggucgcacuguuag

SEQ ID NO: 847434 - RNA, 19 nt, Homo sapiens
  misc_RNA (1)...(19): siRNA sense strand
ggugggcaggcuagaguaa

SEQ ID NO: 847435 - RNA, 19 nt, Homo sapiens
  misc_RNA (1)...(19): siRNA sense strand
uuucuuccguuccguucua

SEQ ID NO: 847436 - RNA, 19 nt, Homo sapiens
  misc_RNA (1)...(19): siRNA sense strand
ugggcaggcuagaguaaau

SEQ ID NO: 847437 - RNA, 19 nt, Homo sapiens
  misc_RNA (1)...(19): siRNA sense strand
agagcgggucgcacuguua

SEQ ID NO: 847438 - RNA, 19 nt, Homo sapiens
  misc_RNA (1)...(19): siRNA sense strand
gcgggucgcacuguuaguu

SEQ ID NO: 847439 - RNA, 19 nt, Homo sapiens
  misc_RNA (1)...(19): siRNA sense strand
ggaccagagcgcgaucaga

SEQ ID NO: 847440 - RNA, 19 nt, Homo sapiens
  misc_RNA (1)...(19): siRNA sense strand
gauccaauuucuccauuua

SEQ ID NO: 847441 - RNA, 19 nt, Homo sapiens
  misc_RNA (1)...(19): siRNA sense strand
gaaagccugugcugaaguu

SEQ ID NO: 847442 - RNA, 19 nt, Homo sapiens
  misc_RNA (1)...(19): siRNA sense strand
ccaaagaggugaguagaga

SEQ ID NO: 847443 - RNA, 19 nt, Homo sapiens
  misc_RNA (1)...(19): siRNA sense strand
ugaacagcauccaaacuua

SEQ ID NO: 847444 - RNA, 19 nt, Homo sapiens
  misc_RNA (1)...(19): siRNA sense strand
guagaacgaucagacaauu

SEQ ID NO: 847445 - RNA, 19 nt, Homo sapiens
  misc_RNA (1)...(19): siRNA sense strand
ggccaaaccuggugacaga

SEQ ID NO: 847446 - RNA, 19 nt, Homo sapiens
  misc_RNA (1)...(19): siRNA sense strand
cugagaagcugguagaauu

SEQ ID NO: 847447 - RNA, 19 nt, Homo sapiens
  misc_RNA (1)...(19): siRNA sense strand
ggaugcaucuuuccucuuc

SEQ ID NO: 847448 - RNA, 19 nt, Homo sapiens
  misc_RNA (1)...(19): siRNA sense strand
gguagaauuuccauugcua

SEQ ID NO: 847449 - RNA, 19 nt, Homo sapiens
  misc_RNA (1)...(19): siRNA sense strand
gaaaguggcauucucaaag

SEQ ID NO: 847450 - RNA, 19 nt, Homo sapiens
  misc_RNA (1)...(19): siRNA sense strand
acagaaggcugauggaguu

SEQ ID NO: 847451 - RNA, 19 nt, Homo sapiens
  misc_RNA (1)...(19): siRNA sense strand
ggcagaagcucaagcaaca

SEQ ID NO: 847452 - RNA, 19 nt, Homo sapiens
  misc_RNA (1)...(19): siRNA sense strand
gaccaaccauggccaaguu

SEQ ID NO: 847453 - RNA, 19 nt, Homo sapiens
  misc_RNA (1)...(19): siRNA sense strand
ccaagagucuggaacugaa

SEQ ID NO: 847454 - RNA, 19 nt, Homo sapiens
  misc_RNA (1)...(19): siRNA sense strand
gaacagcauccaaacuuau

SEQ ID NO: 847455 - RNA, 19 nt, Homo sapiens
  misc_RNA (1)...(19): siRNA sense strand
caacugaacagcauccaaa

SEQ ID NO: 847456 - RNA, 19 nt, Homo sapiens
  misc_RNA (1)...(19): siRNA sense strand
gauguugaaauacggauua

SEQ ID NO: 847457 - RNA, 19 nt, Homo sapiens
  misc_RNA (1)...(19): siRNA sense strand
guaauuaucagcaggaaau

SEQ ID NO: 847458 - RNA, 19 nt, Homo sapiens
  misc_RNA (1)...(19): siRNA sense strand
gaaauacuacagcuagaga

SEQ ID NO: 847459 - RNA, 19 nt, Homo sapiens
  misc_RNA (1)...(19): siRNA sense strand
ucucaaagcucacaguaca

SEQ ID NO: 847460 - RNA, 19 nt, Homo sapiens
  misc_RNA (1)...(19): siRNA sense strand
ggcaggagcucccaccaau

SEQ ID NO: 847461 - RNA, 19 nt, Homo sapiens
  misc_RNA (1)...(19): siRNA sense strand
ccagaaauccuaugaagca

SEQ ID NO: 847462 - RNA, 19 nt, Homo sapiens
  misc_RNA (1)...(19): siRNA sense strand
cauccaaacuuaugugaag

SEQ ID NO: 847463 - RNA, 19 nt, Homo sapiens
  misc_RNA (1)...(19): siRNA sense strand
ggauccaauuucuccauuu

SEQ ID NO: 847464 - RNA, 19 nt, Homo sapiens
  misc_RNA (1)...(19): siRNA sense strand
gcauaaugaugauaaacuc

SEQ ID NO: 847465 - RNA, 19 nt, Homo sapiens
  misc_RNA (1)...(19): siRNA sense strand
gguaacaaaucaggccaaa

SEQ ID NO: 847466 - RNA, 19 nt, Homo sapiens
  misc_RNA (1)...(19): siRNA sense strand
gugacagaauuguggauuu

SEQ ID NO: 847467 - RNA, 19 nt, Homo sapiens
  misc_RNA (1)...(19): siRNA sense strand
caaaccuggugacagaauu

SEQ ID NO: 847468 - RNA, 19 nt, Homo sapiens
  misc_RNA (1)...(19): siRNA sense strand
gaacucaccaucccuuugg

SEQ ID NO: 847469 - RNA, 19 nt, Homo sapiens
  misc_RNA (1)...(19): siRNA sense strand
ugacagaauuguggauuuc

SEQ ID NO: 847470 - RNA, 19 nt, Homo sapiens
  misc_RNA (1)...(19): siRNA sense strand
caacuauaccuguagaaau

SEQ ID NO: 847471 - RNA, 19 nt, Homo sapiens
  misc_RNA (1)...(19): siRNA sense strand
acuaagagaugaccugauc

SEQ ID NO: 847472 - RNA, 19 nt, Homo sapiens
  misc_RNA (1)...(19): siRNA sense strand
acagaaggaugcaucuuuc

SEQ ID NO: 847473 - RNA, 19 nt, Homo sapiens
  misc_RNA (1)...(19): siRNA sense strand
aaagaggugaguagagaua

SEQ ID NO: 847474 - RNA, 19 nt, Homo sapiens
  misc_RNA (1)...(19): siRNA sense strand
gaaaagggcauugaaguga

SEQ ID NO: 847475 - RNA, 19 nt, Homo sapiens
  misc_RNA (1)...(19): siRNA sense strand
gggauccaauuucuccauu

SEQ ID NO: 847476 - RNA, 19 nt, Homo sapiens
  misc_RNA (1)...(19): siRNA sense strand
gcugguagaauuuccauug

SEQ ID NO: 847477 - RNA, 19 nt, Homo sapiens
  misc_RNA (1)...(19): siRNA sense strand
ugagacacauaauccagaa

SEQ ID NO: 847478 - RNA, 19 nt, Homo sapiens
  misc_RNA (1)...(19): siRNA sense strand
gcaggagcucccaccaaua

SEQ ID NO: 847479 - RNA, 19 nt, Homo sapiens
  misc_RNA (1)...(19): siRNA sense strand
gagcauguguuugcagaag

SEQ ID NO: 847480 - RNA, 19 nt, Homo sapiens
  misc_RNA (1)...(19): siRNA sense strand
cuacuuggacucuugauug

SEQ ID NO: 847481 - RNA, 19 nt, Homo sapiens
  misc_RNA (1)...(19): siRNA sense strand
aaacagcagcuucuaagug

SEQ ID NO: 847482 - RNA, 19 nt, Homo sapiens
  misc_RNA (1)...(19): siRNA sense strand
ugaggaagcagcaacaguu

SEQ ID NO: 847483 - RNA, 19 nt, Homo sapiens
  misc_RNA (1)...(19): siRNA sense strand
aacagcagcuucuaagugu

SEQ ID NO: 847484 - RNA, 19 nt, Homo sapiens
  misc_RNA (1)...(19): siRNA sense strand
caucuuuccucuucauaca

SEQ ID NO: 847485 - RNA, 19 nt, Homo sapiens
  misc_RNA (1)...(19): siRNA sense strand
gcuuaguugucaccaaaga

SEQ ID NO: 847486 - RNA, 19 nt, Homo sapiens
  misc_RNA (1)...(19): siRNA sense strand
ggacuuuucucaccaaaca

SEQ ID NO: 847487 - RNA, 19 nt, Homo sapiens
  misc_RNA (1)...(19): siRNA sense strand
gaacuucugggcuuuaaaa

SEQ ID NO: 847488 - RNA, 19 nt, Homo sapiens
  misc_RNA (1)...(19): siRNA sense strand
gcuguuguauugagacaca

SEQ ID NO: 847489 - RNA, 19 nt, Homo sapiens
  misc_RNA (1)...(19): siRNA sense strand
caccaucccuuuggcuauu

SEQ ID NO: 847490 - RNA, 19 nt, Homo sapiens
  misc_RNA (1)...(19): siRNA sense strand
aggacuugcuguuguauug

SEQ ID NO: 847491 - RNA, 19 nt, Homo sapiens
  misc_RNA (1)...(19): siRNA sense strand
ugaagucccagguguagaa

SEQ ID NO: 847492 - RNA, 19 nt, Homo sapiens
  misc_RNA (1)...(19): siRNA sense strand
uagaaauacuacagcuaga

SEQ ID NO: 847493 - RNA, 19 nt, Homo sapiens
  misc_RNA (1)...(19): siRNA sense strand
gagugcauaaugaugauaa

SEQ ID NO: 847494 - RNA, 19 nt, Homo sapiens
  misc_RNA (1)...(19): siRNA sense strand
gcauugaagugauguuuuc

SEQ ID NO: 847495 - RNA, 19 nt, Homo sapiens
  misc_RNA (1)...(19): siRNA sense strand
ugagaagcugguagaauuu

SEQ ID NO: 847496 - RNA, 19 nt, Homo sapiens
  misc_RNA (1)...(19): siRNA sense strand
uggcagauauugugcucuu

SEQ ID NO: 847497 - RNA, 19 nt, Homo sapiens
  misc_RNA (1)...(19): siRNA sense strand
ugaaaguggcauucucaaa

SEQ ID NO: 847498 - RNA, 19 nt, Homo sapiens
  misc_RNA (1)...(19): siRNA sense strand
gaacugaaaguggcauucu

SEQ ID NO: 847499 - RNA, 19 nt, Homo sapiens
  misc_RNA (1)...(19): siRNA sense strand
cuguuugccugcaguagua

SEQ ID NO: 847500 - RNA, 19 nt, Homo sapiens
  misc_RNA (1)...(19): siRNA sense strand
caaccuugucuauguggua

SEQ ID NO: 847501 - RNA, 19 nt, Homo sapiens
  misc_RNA (1)...(19): siRNA sense strand
gguaaaauguccagugauc

SEQ ID NO: 847502 - RNA, 19 nt, Homo sapiens
  misc_RNA (1)...(19): siRNA sense strand
aaagggcauugaagugaug

SEQ ID NO: 847503 - RNA, 19 nt, Homo sapiens
  misc_RNA (1)...(19): siRNA sense strand
ggaagugccaggaguaaaa

SEQ ID NO: 847504 - RNA, 19 nt, Homo sapiens
  misc_RNA (1)...(19): siRNA sense strand
uauccaucauuucuuggua

SEQ ID NO: 847505 - RNA, 19 nt, Homo sapiens
  misc_RNA (1)...(19): siRNA sense strand
gaagaaccagcuacuacca

SEQ ID NO: 847506 - RNA, 19 nt, Homo sapiens
  misc_RNA (1)...(19): siRNA sense strand
cuuuggcuauugagaauuu

SEQ ID NO: 847507 - RNA, 19 nt, Homo sapiens
  misc_RNA (1)...(19): siRNA sense strand
uugcuuaguugucaccaaa

SEQ ID NO: 847508 - RNA, 19 nt, Homo sapiens
  misc_RNA (1)...(19): siRNA sense strand
cagaagaagaauaccugua

SEQ ID NO: 847509 - RNA, 19 nt, Homo sapiens
  misc_RNA (1)...(19): siRNA sense strand
ccaacuauaccuguagaaa

SEQ ID NO: 847510 - RNA, 19 nt, Homo sapiens
  misc_RNA (1)...(19): siRNA sense strand
caggagcucccaccaauag

SEQ ID NO: 847511 - RNA, 19 nt, Homo sapiens
  misc_RNA (1)...(19): siRNA sense strand
uaacaaaucaggccaaacc

SEQ ID NO: 847512 - RNA, 19 nt, Homo sapiens
  misc_RNA (1)...(19): siRNA sense strand
guacaggaagaaccagcua

SEQ ID NO: 847513 - RNA, 19 nt, Homo sapiens
  misc_RNA (1)...(19): siRNA sense strand
uuagagugcauaaugauga

SEQ ID NO: 847514 - RNA, 19 nt, Homo sapiens
  misc_RNA (1)...(19): siRNA sense strand
ggaccaggcuaugugaacu

SEQ ID NO: 847515 - RNA, 19 nt, Homo sapiens
  misc_RNA (1)...(19): siRNA sense strand
gacacauaauccagaaauc

SEQ ID NO: 847516 - RNA, 19 nt, Homo sapiens
  misc_RNA (1)...(19): siRNA sense strand
guccagugaucgagcuuug

SEQ ID NO: 847517 - RNA, 19 nt, Homo sapiens
  misc_RNA (1)...(19): siRNA sense strand
cuuggacucuugauuggaa

SEQ ID NO: 847518 - RNA, 19 nt, Homo sapiens
  misc_RNA (1)...(19): siRNA sense strand
uaagugugggauccaauuu

SEQ ID NO: 847519 - RNA, 19 nt, Homo sapiens
  misc_RNA (1)...(19): siRNA sense strand
uuagugagccuguuagagu

SEQ ID NO: 847520 - RNA, 19 nt, Homo sapiens
  misc_RNA (1)...(19): siRNA sense strand
gaaggaacuuuuggaacuu

SEQ ID NO: 847521 - RNA, 19 nt, Homo sapiens
  misc_RNA (1)...(19): siRNA sense strand
aacagaaggaugcaucuuu

SEQ ID NO: 847522 - RNA, 19 nt, Homo sapiens
  misc_RNA (1)...(19): siRNA sense strand
acacacaggaaacaucuga

SEQ ID NO: 847523 - RNA, 19 nt, Homo sapiens
  misc_RNA (1)...(19): siRNA sense strand
agagcaagguccacacaca

SEQ ID NO: 847524 - RNA, 19 nt, Homo sapiens
  misc_RNA (1)...(19): siRNA sense strand
aagcuuagugagccuguua

SEQ ID NO: 847525 - RNA, 19 nt, Homo sapiens
  misc_RNA (1)...(19): siRNA sense strand
cuugaaagccugugcugaa

SEQ ID NO: 847526 - RNA, 19 nt, Homo sapiens
  misc_RNA (1)...(19): siRNA sense strand
ucuaugugguaacaaauca

SEQ ID NO: 847527 - RNA, 19 nt, Homo sapiens
  misc_RNA (1)...(19): siRNA sense strand
gggcauugaagugauguuu

SEQ ID NO: 847528 - RNA, 19 nt, Homo sapiens
  misc_RNA (1)...(19): siRNA sense strand
ucaggaagugccaggagua

SEQ ID NO: 847529 - RNA, 19 nt, Homo sapiens
  misc_RNA (1)...(19): siRNA sense strand
ggacuugcuguuguauuga

SEQ ID NO: 847530 - RNA, 19 nt, Homo sapiens
  misc_RNA (1)...(19): siRNA sense strand
caauuucuccauuuaccaa

SEQ ID NO: 847531 - RNA, 19 nt, Homo sapiens
  misc_RNA (1)...(19): siRNA sense strand
ccuguuagagugcauaaug

SEQ ID NO: 847532 - RNA, 19 nt, Homo sapiens
  misc_RNA (1)...(19): siRNA sense strand
gaggugaguagagauaguu

SEQ ID NO: 847533 - RNA, 19 nt, Homo sapiens
  misc_RNA (1)...(19): siRNA sense strand
caaccauggccaaguuaau

SEQ ID NO: 847534 - RNA, 19 nt, Homo sapiens
  misc_RNA (1)...(19): siRNA sense strand
gaagagcaaagcgauccuu

SEQ ID NO: 847535 - RNA, 19 nt, Homo sapiens
  misc_RNA (1)...(19): siRNA sense strand
ccagaggauucaggaagug

SEQ ID NO: 847536 - RNA, 19 nt, Homo sapiens
  misc_RNA (1)...(19): siRNA sense strand
gagaagcugguagaauuuc

SEQ ID NO: 847537 - RNA, 19 nt, Homo sapiens
  misc_RNA (1)...(19): siRNA sense strand
agaagaagaauaccuguac

SEQ ID NO: 847538 - RNA, 19 nt, Homo sapiens
  misc_RNA (1)...(19): siRNA sense strand
cuguauccaucauuucuug

SEQ ID NO: 847539 - RNA, 19 nt, Homo sapiens
  misc_RNA (1)...(19): siRNA sense strand
gcaggcagaagcucaagca

SEQ ID NO: 847540 - RNA, 19 nt, Homo sapiens
  misc_RNA (1)...(19): siRNA sense strand
ggaaguggcuccggauuua

SEQ ID NO: 847541 - RNA, 19 nt, Homo sapiens
  misc_RNA (1)...(19): siRNA sense strand
gaacaaagguugagagaac

SEQ ID NO: 847542 - RNA, 19 nt, Homo sapiens
  misc_RNA (1)...(19): siRNA sense strand
gaacggugauuauucauga

SEQ ID NO: 847543 - RNA, 19 nt, Homo sapiens
  misc_RNA (1)...(19): siRNA sense strand
gaaaugaacuuagagaauc

SEQ ID NO: 847544 - RNA, 19 nt, Homo sapiens
  misc_RNA (1)...(19): siRNA sense strand
gaaaggagaacggugauua

SEQ ID NO: 847545 - RNA, 19 nt, Homo sapiens
  misc_RNA (1)...(19): siRNA sense strand
uaaggaagcugaacggauu

SEQ ID NO: 847546 - RNA, 19 nt, Homo sapiens
  misc_RNA (1)...(19): siRNA sense strand
ggagaacggugauuauuca

SEQ ID NO: 847547 - RNA, 19 nt, Homo sapiens
  misc_RNA (1)...(19): siRNA sense strand
caacagaacagauuuaaug

SEQ ID NO: 847548 - RNA, 19 nt, Homo sapiens
  misc_RNA (1)...(19): siRNA sense strand
uaaaggagaucauuguaga

SEQ ID NO: 847549 - RNA, 19 nt, Homo sapiens
  misc_RNA (1)...(19): siRNA sense strand
gauaaagacuacagaagga

SEQ ID NO: 847550 - RNA, 19 nt, Homo sapiens
  misc_RNA (1)...(19): siRNA sense strand
cgagaacgcauuagaauaa

SEQ ID NO: 847551 - RNA, 19 nt, Homo sapiens
  misc_RNA (1)...(19): siRNA sense strand
gaaagggaacgcauucgua

SEQ ID NO: 847552 - RNA, 19 nt, Homo sapiens
  misc_RNA (1)...(19): siRNA sense strand
ggaagaacgggaacgcuua

SEQ ID NO: 847553 - RNA, 19 nt, Homo sapiens
  misc_RNA (1)...(19): siRNA sense strand
gauccaagcuucgaaagau

SEQ ID NO: 847554 - RNA, 19 nt, Homo sapiens
  misc_RNA (1)...(19): siRNA sense strand
agauacagaugcacgauuu

SEQ ID NO: 847555 - RNA, 19 nt, Homo sapiens
  misc_RNA (1)...(19): siRNA sense strand
gaacggauugcucgagaaa

SEQ ID NO: 847556 - RNA, 19 nt, Homo sapiens
  misc_RNA (1)...(19): siRNA sense strand
gagagcgccuagaaauuga

SEQ ID NO: 847557 - RNA, 19 nt, Homo sapiens
  misc_RNA (1)...(19): siRNA sense strand
guacaaaucaguggcaauu

SEQ ID NO: 847558 - RNA, 19 nt, Homo sapiens
  misc_RNA (1)...(19): siRNA sense strand
gaacuuagagaaucagaca

SEQ ID NO: 847559 - RNA, 19 nt, Homo sapiens
  misc_RNA (1)...(19): siRNA sense strand
gaaacgcccacgugaugua

SEQ ID NO: 847560 - RNA, 19 nt, Homo sapiens
  misc_RNA (1)...(19): siRNA sense strand
gaacgggaacgcuuacaga

SEQ ID NO: 847561 - RNA, 19 nt, Homo sapiens
  misc_RNA (1)...(19): siRNA sense strand
gcaguacagucuucaucuu

SEQ ID NO: 847562 - RNA, 19 nt, Homo sapiens
  misc_RNA (1)...(19): siRNA sense strand
gagcagagagggagacaga

SEQ ID NO: 847563 - RNA, 19 nt, Homo sapiens
  misc_RNA (1)...(19): siRNA sense strand
ggcaggagcaggcaugaua

SEQ ID NO: 847564 - RNA, 19 nt, Homo sapiens
  misc_RNA (1)...(19): siRNA sense strand
ggaacgcauucguauugaa

SEQ ID NO: 847565 - RNA, 19 nt, Homo sapiens
  misc_RNA (1)...(19): siRNA sense strand
gaacaggaacgucguaagg

SEQ ID NO: 847566 - RNA, 19 nt, Homo sapiens
  misc_RNA (1)...(19): siRNA sense strand
gcgagaacgcauuagaaua

SEQ ID NO: 847567 - RNA, 19 nt, Homo sapiens
  misc_RNA (1)...(19): siRNA sense strand
aaaguugucucuagauaca

SEQ ID NO: 847568 - RNA, 19 nt, Homo sapiens
  misc_RNA (1)...(19): siRNA sense strand
gagagagcgccuagaaauu

SEQ ID NO: 847569 - RNA, 19 nt, Homo sapiens
  misc_RNA (1)...(19): siRNA sense strand
cagaacagauuuaaugacu

SEQ ID NO: 847570 - RNA, 19 nt, Homo sapiens
  misc_RNA (1)...(19): siRNA sense strand
uaacccaacauucaaguaa

SEQ ID NO: 847571 - RNA, 19 nt, Homo sapiens
  misc_RNA (1)...(19): siRNA sense strand
caacagcagcuucguuaug

SEQ ID NO: 847572 - RNA, 19 nt, Homo sapiens
  misc_RNA (1)...(19): siRNA sense strand
caugauaacccaacauuca

SEQ ID NO: 847573 - RNA, 19 nt, Homo sapiens
  misc_RNA (1)...(19): siRNA sense strand
ugauaucacucauccuaga

SEQ ID NO: 847574 - RNA, 19 nt, Homo sapiens
  misc_RNA (1)...(19): siRNA sense strand
cgagagcgagaacgcauua

SEQ ID NO: 847575 - RNA, 19 nt, Homo sapiens
  misc_RNA (1)...(19): siRNA sense strand
ugacaggccugauaucacu

SEQ ID NO: 847576 - RNA, 19 nt, Homo sapiens
  misc_RNA (1)...(19): siRNA sense strand
gaagaggaagauaugagaa

SEQ ID NO: 847577 - RNA, 19 nt, Homo sapiens
  misc_RNA (1)...(19): siRNA sense strand
gagcgagaacgcauuagaa

SEQ ID NO: 847578 - RNA, 19 nt, Homo sapiens
  misc_RNA (1)...(19): siRNA sense strand
guugagagaacauuuaguu

SEQ ID NO: 847579 - RNA, 19 nt, Homo sapiens
  misc_RNA (1)...(19): siRNA sense strand
ggagaucauuguagaccau

SEQ ID NO: 847580 - RNA, 19 nt, Homo sapiens
  misc_RNA (1)...(19): siRNA sense strand
gaacgcgaacgcuuggaaa

SEQ ID NO: 847581 - RNA, 19 nt, Homo sapiens
  misc_RNA (1)...(19): siRNA sense strand
gaaaggcugcgacgagcaa

SEQ ID NO: 847582 - RNA, 19 nt, Homo sapiens
  misc_RNA (1)...(19): siRNA sense strand
agaaagagaggaacucaga

SEQ ID NO: 847583 - RNA, 19 nt, Homo sapiens
  misc_RNA (1)...(19): siRNA sense strand
gcaggagcaggcaugauaa

SEQ ID NO: 847584 - RNA, 19 nt, Homo sapiens
  misc_RNA (1)...(19): siRNA sense strand
gagagagagcgccuagaaa

SEQ ID NO: 847585 - RNA, 19 nt, Homo sapiens
  misc_RNA (1)...(19): siRNA sense strand
ggagcgacaugugguugaa

SEQ ID NO: 847586 - RNA, 19 nt, Homo sapiens
  misc_RNA (1)...(19): siRNA sense strand
caagaaaugaacuuagaga

SEQ ID NO: 847587 - RNA, 19 nt, Homo sapiens
  misc_RNA (1)...(19): siRNA sense strand
gaagggaagauccaagcuu

SEQ ID NO: 847588 - RNA, 19 nt, Homo sapiens
  misc_RNA (1)...(19): siRNA sense strand
ucaagaagaggaagauaug

SEQ ID NO: 847589 - RNA, 19 nt, Homo sapiens
  misc_RNA (1)...(19): siRNA sense strand
aacagcagcuucguuauga

SEQ ID NO: 847590 - RNA, 19 nt, Homo sapiens
  misc_RNA (1)...(19): siRNA sense strand
gaaagagaggaacucagaa

SEQ ID NO: 847591 - RNA, 19 nt, Homo sapiens
  misc_RNA (1)...(19): siRNA sense strand
acaggaacgucguaaggaa

SEQ ID NO: 847592 - RNA, 19 nt, Homo sapiens
  misc_RNA (1)...(19): siRNA sense strand
gggaacgcauucguauuga

SEQ ID NO: 847593 - RNA, 19 nt, Homo sapiens
  misc_RNA (1)...(19): siRNA sense strand
gaaaauucauggaagaagu

SEQ ID NO: 847594 - RNA, 19 nt, Homo sapiens
  misc_RNA (1)...(19): siRNA sense strand
acagaggagucaucacaga

SEQ ID NO: 847595 - RNA, 19 nt, Homo sapiens
  misc_RNA (1)...(19): siRNA sense strand
ggaaacaagaguugaaagg

SEQ ID NO: 847596 - RNA, 19 nt, Homo sapiens
  misc_RNA (1)...(19): siRNA sense strand
ugacaaacgggaaacaaga

SEQ ID NO: 847597 - RNA, 19 nt, Homo sapiens
  misc_RNA (1)...(19): siRNA sense strand
cgacuacucucgccaacag

SEQ ID NO: 847598 - RNA, 19 nt, Homo sapiens
  misc_RNA (1)...(19): siRNA sense strand
gcagcuucguuaugaacaa

SEQ ID NO: 847599 - RNA, 19 nt, Homo sapiens
  misc_RNA (1)...(19): siRNA sense strand
aacaacagcagcuucguua

SEQ ID NO: 847600 - RNA, 19 nt, Homo sapiens
  misc_RNA (1)...(19): siRNA sense strand
agagagcgccuagaaauug

SEQ ID NO: 847601 - RNA, 19 nt, Homo sapiens
  misc_RNA (1)...(19): siRNA sense strand
ccaccaagaaaugaacuua

SEQ ID NO: 847602 - RNA, 19 nt, Homo sapiens
  misc_RNA (1)...(19): siRNA sense strand
caacaacagcagcuucguu

SEQ ID NO: 847603 - RNA, 19 nt, Homo sapiens
  misc_RNA (1)...(19): siRNA sense strand
gaacucagaaggcaacaac

SEQ ID NO: 847604 - RNA, 19 nt, Homo sapiens
  misc_RNA (1)...(19): siRNA sense strand
guaauacuagaccaaacua

SEQ ID NO: 847605 - RNA, 19 nt, Homo sapiens
  misc_RNA (1)...(19): siRNA sense strand
gaaguggcuccggauuuaa

SEQ ID NO: 847606 - RNA, 19 nt, Homo sapiens
  misc_RNA (1)...(19): siRNA sense strand
accaagaaaugaacuuaga

SEQ ID NO: 847607 - RNA, 19 nt, Homo sapiens
  misc_RNA (1)...(19): siRNA sense strand
agagagagcgccuagaaau

SEQ ID NO: 847608 - RNA, 19 nt, Homo sapiens
  misc_RNA (1)...(19): siRNA sense strand
cauuguagaccaucaagaa

SEQ ID NO: 847609 - RNA, 19 nt, Homo sapiens
  misc_RNA (1)...(19): siRNA sense strand
agaacgaucugggagagaa

SEQ ID NO: 847610 - RNA, 19 nt, Homo sapiens
  misc_RNA (1)...(19): siRNA sense strand
aaggaagcauguccacuga

SEQ ID NO: 847611 - RNA, 19 nt, Homo sapiens
  misc_RNA (1)...(19): siRNA sense strand
aaacuaaaggagaucauug

SEQ ID NO: 847612 - RNA, 19 nt, Homo sapiens
  misc_RNA (1)...(19): siRNA sense strand
guucagcaguacagucuuc

SEQ ID NO: 847613 - RNA, 19 nt, Homo sapiens
  misc_RNA (1)...(19): siRNA sense strand
acggauugcucgagaaaga

SEQ ID NO: 847614 - RNA, 19 nt, Homo sapiens
  misc_RNA (1)...(19): siRNA sense strand
agaccaaacuaaaggagau

SEQ ID NO: 847615 - RNA, 19 nt, Homo sapiens
  misc_RNA (1)...(19): siRNA sense strand
agagagagagcgccuagaa

SEQ ID NO: 847616 - RNA, 19 nt, Homo sapiens
  misc_RNA (1)...(19): siRNA sense strand
gacacaagcggaccaagga

SEQ ID NO: 847617 - RNA, 19 nt, Homo sapiens
  misc_RNA (1)...(19): siRNA sense strand
gagauaaagacuacagaag

SEQ ID NO: 847618 - RNA, 19 nt, Homo sapiens
  misc_RNA (1)...(19): siRNA sense strand
caaacuaaaggagaucauu

SEQ ID NO: 847619 - RNA, 19 nt, Homo sapiens
  misc_RNA (1)...(19): siRNA sense strand
uaaagacuacagaaggaaa

SEQ ID NO: 847620 - RNA, 19 nt, Homo sapiens
  misc_RNA (1)...(19): siRNA sense strand
ccugauaucacucauccua

SEQ ID NO: 847621 - RNA, 19 nt, Homo sapiens
  misc_RNA (1)...(19): siRNA sense strand
ggaacgcgaacgcuuggaa

SEQ ID NO: 847622 - RNA, 19 nt, Homo sapiens
  misc_RNA (1)...(19): siRNA sense strand
gccaacagaacagauuuaa

SEQ ID NO: 847623 - RNA, 19 nt, Homo sapiens
  misc_RNA (1)...(19): siRNA sense strand
gaacgcauucguauugaac

SEQ ID NO: 847624 - RNA, 19 nt, Homo sapiens
  misc_RNA (1)...(19): siRNA sense strand
aaagggaacgcauucguau

SEQ ID NO: 847625 - RNA, 19 nt, Homo sapiens
  misc_RNA (1)...(19): siRNA sense strand
cauggaagaaguaaggaaa

SEQ ID NO: 847626 - RNA, 19 nt, Homo sapiens
  misc_RNA (1)...(19): siRNA sense strand
caguacagucuucaucuuu

SEQ ID NO: 847627 - RNA, 19 nt, Homo sapiens
  misc_RNA (1)...(19): siRNA sense strand
gcaauggaacuucgaagac

SEQ ID NO: 847628 - RNA, 19 nt, Homo sapiens
  misc_RNA (1)...(19): siRNA sense strand
ggagacagaggagucauca

SEQ ID NO: 847629 - RNA, 19 nt, Homo sapiens
  misc_RNA (1)...(19): siRNA sense strand
ggaacaaagguugagagaa

SEQ ID NO: 847630 - RNA, 19 nt, Homo sapiens
  misc_RNA (1)...(19): siRNA sense strand
gcuccggauuuaagccauu

SEQ ID NO: 847631 - RNA, 19 nt, Homo sapiens
  misc_RNA (1)...(19): siRNA sense strand
ggcaugauaacccaacauu

SEQ ID NO: 847632 - RNA, 19 nt, Homo sapiens
  misc_RNA (1)...(19): siRNA sense strand
agacagaggagucaucaca

SEQ ID NO: 847633 - RNA, 19 nt, Homo sapiens
  misc_RNA (1)...(19): siRNA sense strand
ggaaagggaacgcauucgu

SEQ ID NO: 847634 - RNA, 19 nt, Homo sapiens
  misc_RNA (1)...(19): siRNA sense strand
caagaagaggaagauauga

SEQ ID NO: 847635 - RNA, 19 nt, Homo sapiens
  misc_RNA (1)...(19): siRNA sense strand
aaacgggaaacaagaguug

SEQ ID NO: 847636 - RNA, 19 nt, Homo sapiens
  misc_RNA (1)...(19): siRNA sense strand
gagcgagacgaaaggagaa

SEQ ID NO: 847637 - RNA, 19 nt, Homo sapiens
  misc_RNA (1)...(19): siRNA sense strand
gagccuccaccaccaagaa

SEQ ID NO: 847638 - RNA, 19 nt, Homo sapiens
  misc_RNA (1)...(19): siRNA sense strand
gaaggaacaaagguugaga

SEQ ID NO: 847639 - RNA, 19 nt, Homo sapiens
  misc_RNA (1)...(19): siRNA sense strand
ucaagggccuagcuaucau

SEQ ID NO: 847640 - RNA, 19 nt, Homo sapiens
  misc_RNA (1)...(19): siRNA sense strand
ggaaagcccugccugguaa

SEQ ID NO: 847641 - RNA, 19 nt, Homo sapiens
  misc_RNA (1)...(19): siRNA sense strand
ggaagaagcagcagaaaga

SEQ ID NO: 847642 - RNA, 19 nt, Homo sapiens
  misc_RNA (1)...(19): siRNA sense strand
gcaacgacgucaagaaugu

SEQ ID NO: 847643 - RNA, 19 nt, Homo sapiens
  misc_RNA (1)...(19): siRNA sense strand
gcagaagggugagcgagua

SEQ ID NO: 847644 - RNA, 19 nt, Homo sapiens
  misc_RNA (1)...(19): siRNA sense strand
ccacauacaucaacauugg

SEQ ID NO: 847645 - RNA, 19 nt, Homo sapiens
  misc_RNA (1)...(19): siRNA sense strand
uggaggagcuuuaaccaaa

SEQ ID NO: 847646 - RNA, 19 nt, Homo sapiens
  misc_RNA (1)...(19): siRNA sense strand
gcgaguaugguuugaguua

SEQ ID NO: 847647 - RNA, 19 nt, Homo sapiens
  misc_RNA (1)...(19): siRNA sense strand
gggcacgaguucccugaua

SEQ ID NO: 847648 - RNA, 19 nt, Homo sapiens
  misc_RNA (1)...(19): siRNA sense strand
guacuagccucucugaucu

SEQ ID NO: 847649 - RNA, 19 nt, Homo sapiens
  misc_RNA (1)...(19): siRNA sense strand
ggacugcaauugccagaag

SEQ ID NO: 847650 - RNA, 19 nt, Homo sapiens
  misc_RNA (1)...(19): siRNA sense strand
gcagugagcguugaauuug

SEQ ID NO: 847651 - RNA, 19 nt, Homo sapiens
  misc_RNA (1)...(19): siRNA sense strand
ggacgagacuuucgaucag

SEQ ID NO: 847652 - RNA, 19 nt, Homo sapiens
  misc_RNA (1)...(19): siRNA sense strand
gagcaacgacgucaagaau

SEQ ID NO: 847653 - RNA, 19 nt, Homo sapiens
  misc_RNA (1)...(19): siRNA sense strand
cuuacuagcucuuugcaaa

SEQ ID NO: 847654 - RNA, 19 nt, Homo sapiens
  misc_RNA (1)...(19): siRNA sense strand
gcacguggaugagaucaag

SEQ ID NO: 847655 - RNA, 19 nt, Homo sapiens
  misc_RNA (1)...(19): siRNA sense strand
agaagucucugaucaugga

SEQ ID NO: 847656 - RNA, 19 nt, Homo sapiens
  misc_RNA (1)...(19): siRNA sense strand
gagcgaguaugguuugagu

SEQ ID NO: 847657 - RNA, 19 nt, Homo sapiens
  misc_RNA (1)...(19): siRNA sense strand
gcaauugccagaagcucua

SEQ ID NO: 847658 - RNA, 19 nt, Homo sapiens
  misc_RNA (1)...(19): siRNA sense strand
ggaagagggacaagaagga

SEQ ID NO: 847659 - RNA, 19 nt, Homo sapiens
  misc_RNA (1)...(19): siRNA sense strand
gauggaagcaaaucaaaca

SEQ ID NO: 847660 - RNA, 19 nt, Homo sapiens
  misc_RNA (1)...(19): siRNA sense strand
uggaggagcugcaggugaa

SEQ ID NO: 847661 - RNA, 19 nt, Homo sapiens
  misc_RNA (1)...(19): siRNA sense strand
gggaggaggaguugcagua

SEQ ID NO: 847662 - RNA, 19 nt, Homo sapiens
  misc_RNA (1)...(19): siRNA sense strand
gaaagucaaagucauguac

SEQ ID NO: 847663 - RNA, 19 nt, Homo sapiens
  misc_RNA (1)...(19): siRNA sense strand
ggccuucuaugccagcuuu

SEQ ID NO: 847664 - RNA, 19 nt, Homo sapiens
  misc_RNA (1)...(19): siRNA sense strand
cuucaaaccuggccaccuu

SEQ ID NO: 847665 - RNA, 19 nt, Homo sapiens
  misc_RNA (1)...(19): siRNA sense strand
gcccaggcuuccaguacua

SEQ ID NO: 847666 - RNA, 19 nt, Homo sapiens
  misc_RNA (1)...(19): siRNA sense strand
gaagagggacaagaaggaa

SEQ ID NO: 847667 - RNA, 19 nt, Homo sapiens
  misc_RNA (1)...(19): siRNA sense strand
gauguggacaccaaauuga

SEQ ID NO: 847668 - RNA, 19 nt, Homo sapiens
  misc_RNA (1)...(19): siRNA sense strand
cgaguaugguuugaguuaa

SEQ ID NO: 847669 - RNA, 19 nt, Homo sapiens
  misc_RNA (1)...(19): siRNA sense strand
ccaggaaccucaggaugga

SEQ ID NO: 847670 - RNA, 19 nt, Homo sapiens
  misc_RNA (1)...(19): siRNA sense strand
gcagcuacuucccugaaca

SEQ ID NO: 847671 - RNA, 19 nt, Homo sapiens
  misc_RNA (1)...(19): siRNA sense strand
gagacuuucgaucagauua

SEQ ID NO: 847672 - RNA, 19 nt, Homo sapiens
  misc_RNA (1)...(19): siRNA sense strand
gaggaggaguugcaguaca

SEQ ID NO: 847673 - RNA, 19 nt, Homo sapiens
  misc_RNA (1)...(19): siRNA sense strand
ucucagagcugcacaugac

SEQ ID NO: 847674 - RNA, 19 nt, Homo sapiens
  misc_RNA (1)...(19): siRNA sense strand
augccgaccucaucaagua

SEQ ID NO: 847675 - RNA, 19 nt, Homo sapiens
  misc_RNA (1)...(19): siRNA sense strand
ccaccuugcugcagugauc

SEQ ID NO: 847676 - RNA, 19 nt, Homo sapiens
  misc_RNA (1)...(19): siRNA sense strand
uguccaagcuggucaccuu

SEQ ID NO: 847677 - RNA, 19 nt, Homo sapiens
  misc_RNA (1)...(19): siRNA sense strand
ccagaaagucaaagucaug

SEQ ID NO: 847678 - RNA, 19 nt, Homo sapiens
  misc_RNA (1)...(19): siRNA sense strand
caaagccugcacagccuua

SEQ ID NO: 847679 - RNA, 19 nt, Homo sapiens
  misc_RNA (1)...(19): siRNA sense strand
guggacaccuuccuacaag

SEQ ID NO: 847680 - RNA, 19 nt, Homo sapiens
  misc_RNA (1)...(19): siRNA sense strand
gcacgaguucccugauaga

SEQ ID NO: 847681 - RNA, 19 nt, Homo sapiens
  misc_RNA (1)...(19): siRNA sense strand
gacgagacuuucgaucaga

SEQ ID NO: 847682 - RNA, 19 nt, Homo sapiens
  misc_RNA (1)...(19): siRNA sense strand
gaguaugguuugaguuaac

SEQ ID NO: 847683 - RNA, 19 nt, Homo sapiens
  misc_RNA (1)...(19): siRNA sense strand
gcuccagacugccagaaag

SEQ ID NO: 847684 - RNA, 19 nt, Homo sapiens
  misc_RNA (1)...(19): siRNA sense strand
ggacaccuuccuacaagug

SEQ ID NO: 847685 - RNA, 19 nt, Homo sapiens
  misc_RNA (1)...(19): siRNA sense strand
uugcugcagugaucaauga

SEQ ID NO: 847686 - RNA, 19 nt, Homo sapiens
  misc_RNA (1)...(19): siRNA sense strand
uggaaagcccugccuggua

SEQ ID NO: 847687 - RNA, 19 nt, Homo sapiens
  misc_RNA (1)...(19): siRNA sense strand
caauggcagucugguguug

SEQ ID NO: 847688 - RNA, 19 nt, Homo sapiens
  misc_RNA (1)...(19): siRNA sense strand
ucaaacagggcacgaguuc

SEQ ID NO: 847689 - RNA, 19 nt, Homo sapiens
  misc_RNA (1)...(19): siRNA sense strand
gcaggaaagggaagaagca

SEQ ID NO: 847690 - RNA, 19 nt, Homo sapiens
  misc_RNA (1)...(19): siRNA sense strand
ggaucaauaacaaagagaa

SEQ ID NO: 847691 - RNA, 19 nt, Homo sapiens
  misc_RNA (1)...(19): siRNA sense strand
acccagggaucaauaacaa

SEQ ID NO: 847692 - RNA, 19 nt, Homo sapiens
  misc_RNA (1)...(19): siRNA sense strand
gaaguucaacaccacauac

SEQ ID NO: 847693 - RNA, 19 nt, Homo sapiens
  misc_RNA (1)...(19): siRNA sense strand
gcagaaagaccuggaagcu

SEQ ID NO: 847694 - RNA, 19 nt, Homo sapiens
  misc_RNA (1)...(19): siRNA sense strand
ggcacgaguucccugauag

SEQ ID NO: 847695 - RNA, 19 nt, Homo sapiens
  misc_RNA (1)...(19): siRNA sense strand
gaacuuccaagggcucaug

SEQ ID NO: 847696 - RNA, 19 nt, Homo sapiens
  misc_RNA (1)...(19): siRNA sense strand
gcucuuccacagccucuuu

SEQ ID NO: 847697 - RNA, 19 nt, Homo sapiens
  misc_RNA (1)...(19): siRNA sense strand
uggaugagaucaaggaacu

SEQ ID NO: 847698 - RNA, 19 nt, Homo sapiens
  misc_RNA (1)...(19): siRNA sense strand
ccacguggacaccuuccua

SEQ ID NO: 847699 - RNA, 19 nt, Homo sapiens
  misc_RNA (1)...(19): siRNA sense strand
cugcagugauggaagcaaa

SEQ ID NO: 847700 - RNA, 19 nt, Homo sapiens
  misc_RNA (1)...(19): siRNA sense strand
guuaacccagggaucaaua

SEQ ID NO: 847701 - RNA, 19 nt, Homo sapiens
  misc_RNA (1)...(19): siRNA sense strand
gccagaaagucaaagucau

SEQ ID NO: 847702 - RNA, 19 nt, Homo sapiens
  misc_RNA (1)...(19): siRNA sense strand
ggugagcgaguaugguuug

SEQ ID NO: 847703 - RNA, 19 nt, Homo sapiens
  misc_RNA (1)...(19): siRNA sense strand
gaagggugagcgaguaugg

SEQ ID NO: 847704 - RNA, 19 nt, Homo sapiens
  misc_RNA (1)...(19): siRNA sense strand
gcgugauccugauggagaa

SEQ ID NO: 847705 - RNA, 19 nt, Homo sapiens
  misc_RNA (1)...(19): siRNA sense strand
uguaccaggucaagcagaa

SEQ ID NO: 847706 - RNA, 19 nt, Homo sapiens
  misc_RNA (1)...(19): siRNA sense strand
caacaccacauacaucaac

SEQ ID NO: 847707 - RNA, 19 nt, Homo sapiens
  misc_RNA (1)...(19): siRNA sense strand
ucaccuuacuagcucuuug

SEQ ID NO: 847708 - RNA, 19 nt, Homo sapiens
  misc_RNA (1)...(19): siRNA sense strand
cgauguggacaccaaauug

SEQ ID NO: 847709 - RNA, 19 nt, Homo sapiens
  misc_RNA (1)...(19): siRNA sense strand
caacugcgagcaccacgau

SEQ ID NO: 847710 - RNA, 19 nt, Homo sapiens
  misc_RNA (1)...(19): siRNA sense strand
gaugagaucaaggaacugu

SEQ ID NO: 847711 - RNA, 19 nt, Homo sapiens
  misc_RNA (1)...(19): siRNA sense strand
gcagggaggaggaguugca

SEQ ID NO: 847712 - RNA, 19 nt, Homo sapiens
  misc_RNA (1)...(19): siRNA sense strand
aggccaagguccaggagaa

SEQ ID NO: 847713 - RNA, 19 nt, Homo sapiens
  misc_RNA (1)...(19): siRNA sense strand
gggaagaagcagcagaaag

SEQ ID NO: 847714 - RNA, 19 nt, Homo sapiens
  misc_RNA (1)...(19): siRNA sense strand
uuacccaggccauaagaaa

SEQ ID NO: 847715 - RNA, 19 nt, Homo sapiens
  misc_RNA (1)...(19): siRNA sense strand
ugaguuaacccagggauca

SEQ ID NO: 847716 - RNA, 19 nt, Homo sapiens
  misc_RNA (1)...(19): siRNA sense strand
cguggugucuaccuguuug

SEQ ID NO: 847717 - RNA, 19 nt, Homo sapiens
  misc_RNA (1)...(19): siRNA sense strand
guucaacaccacauacauc

SEQ ID NO: 847718 - RNA, 19 nt, Homo sapiens
  misc_RNA (1)...(19): siRNA sense strand
cagagaaauuccucaucca

SEQ ID NO: 847719 - RNA, 19 nt, Homo sapiens
  misc_RNA (1)...(19): siRNA sense strand
ggaacuguacuccgaaucg

SEQ ID NO: 847720 - RNA, 19 nt, Homo sapiens
  misc_RNA (1)...(19): siRNA sense strand
gaucaauaacaaagagaag

SEQ ID NO: 847721 - RNA, 19 nt, Homo sapiens
  misc_RNA (1)...(19): siRNA sense strand
caccacauacaucaacauu

SEQ ID NO: 847722 - RNA, 19 nt, Homo sapiens
  misc_RNA (1)...(19): siRNA sense strand
gaucauggaggagaacaag

SEQ ID NO: 847723 - RNA, 19 nt, Homo sapiens
  misc_RNA (1)...(19): siRNA sense strand
caagcuggucaccuuacua

SEQ ID NO: 847724 - RNA, 19 nt, Homo sapiens
  misc_RNA (1)...(19): siRNA sense strand
caaugagguugaggugcaa

SEQ ID NO: 847725 - RNA, 19 nt, Homo sapiens
  misc_RNA (1)...(19): siRNA sense strand
cagcagcuacuucccugaa

SEQ ID NO: 847726 - RNA, 19 nt, Homo sapiens
  misc_RNA (1)...(19): siRNA sense strand
auccugagcuugcuguuca

SEQ ID NO: 847727 - RNA, 19 nt, Homo sapiens
  misc_RNA (1)...(19): siRNA sense strand
ccaguacuagccucucuga

SEQ ID NO: 847728 - RNA, 19 nt, Homo sapiens
  misc_RNA (1)...(19): siRNA sense strand
gcaacaggaacagcaggaa

SEQ ID NO: 847729 - RNA, 19 nt, Homo sapiens
  misc_RNA (1)...(19): siRNA sense strand
ugggccagcugcagaggaa

SEQ ID NO: 847730 - RNA, 19 nt, Homo sapiens
  misc_RNA (1)...(19): siRNA sense strand
aaacagagaaauuccucau

SEQ ID NO: 847731 - RNA, 19 nt, Homo sapiens
  misc_RNA (1)...(19): siRNA sense strand
ggaccagucagcuucaaac

SEQ ID NO: 847732 - RNA, 19 nt, Homo sapiens
  misc_RNA (1)...(19): siRNA sense strand
ccagggaucaauaacaaag

SEQ ID NO: 847733 - RNA, 19 nt, Homo sapiens
  misc_RNA (1)...(19): siRNA sense strand
ugcagugagcguugaauuu

SEQ ID NO: 847734 - RNA, 19 nt, Homo sapiens
  misc_RNA (1)...(19): siRNA sense strand
cggacgagacuuucgauca

SEQ ID NO: 847735 - RNA, 19 nt, Homo sapiens
  misc_RNA (1)...(19): siRNA sense strand
aagccgauguggacaccaa

SEQ ID NO: 847736 - RNA, 19 nt, Homo sapiens
  misc_RNA (1)...(19): siRNA sense strand
gccaggccaucuccagagu

SEQ ID NO: 847737 - RNA, 19 nt, Homo sapiens
  misc_RNA (1)...(19): siRNA sense strand
ucauggaggagaacaagga

SEQ ID NO: 847738 - RNA, 19 nt, Homo sapiens
  misc_RNA (1)...(19): siRNA sense strand
gcagcagaaagaccuggaa

SEQ ID NO: 847739 - RNA, 19 nt, Homo sapiens
  misc_RNA (1)...(19): siRNA sense strand
guacgugaaggacugcaau

SEQ ID NO: 847740 - RNA, 19 nt, Homo sapiens
  misc_RNA (1)...(19): siRNA sense strand
caagaacaguacaguauua

SEQ ID NO: 847741 - RNA, 19 nt, Homo sapiens
  misc_RNA (1)...(19): siRNA sense strand
gaacauauuuacuggugaa

SEQ ID NO: 847742 - RNA, 19 nt, Homo sapiens
  misc_RNA (1)...(19): siRNA sense strand
ccacgaaacucuacaauac

SEQ ID NO: 847743 - RNA, 19 nt, Homo sapiens
  misc_RNA (1)...(19): siRNA sense strand
caacaguggugccaguuaa

SEQ ID NO: 847744 - RNA, 19 nt, Homo sapiens
  misc_RNA (1)...(19): siRNA sense strand
gaaacuuggugaucaguau

SEQ ID NO: 847745 - RNA, 19 nt, Homo sapiens
  misc_RNA (1)...(19): siRNA sense strand
gcaacagucuuauauugau

SEQ ID NO: 847746 - RNA, 19 nt, Homo sapiens
  misc_RNA (1)...(19): siRNA sense strand
gaaaaggaaugaagcauau

SEQ ID NO: 847747 - RNA, 19 nt, Homo sapiens
  misc_RNA (1)...(19): siRNA sense strand
gaaauauucucaccuucag

SEQ ID NO: 847748 - RNA, 19 nt, Homo sapiens
  misc_RNA (1)...(19): siRNA sense strand
gcaagaacaguacaguauu

SEQ ID NO: 847749 - RNA, 19 nt, Homo sapiens
  misc_RNA (1)...(19): siRNA sense strand
gacgagcugucacugaauu

SEQ ID NO: 847750 - RNA, 19 nt, Homo sapiens
  misc_RNA (1)...(19): siRNA sense strand
caucauugcagguaucaua

SEQ ID NO: 847751 - RNA, 19 nt, Homo sapiens
  misc_RNA (1)...(19): siRNA sense strand
gauggcaguuccugaucua

SEQ ID NO: 847752 - RNA, 19 nt, Homo sapiens
  misc_RNA (1)...(19): siRNA sense strand
guagugccauuauuucugu

SEQ ID NO: 847753 - RNA, 19 nt, Homo sapiens
  misc_RNA (1)...(19): siRNA sense strand
cauugcagguaucauauuu

SEQ ID NO: 847754 - RNA, 19 nt, Homo sapiens
  misc_RNA (1)...(19): siRNA sense strand
gcaacuaacuuaccccauu

SEQ ID NO: 847755 - RNA, 19 nt, Homo sapiens
  misc_RNA (1)...(19): siRNA sense strand
ucucaggcaugaucacuuu

SEQ ID NO: 847756 - RNA, 19 nt, Homo sapiens
  misc_RNA (1)...(19): siRNA sense strand
cugcaacagucuuauauug

SEQ ID NO: 847757 - RNA, 19 nt, Homo sapiens
  misc_RNA (1)...(19): siRNA sense strand
gaacuuugcagccuaugga

SEQ ID NO: 847758 - RNA, 19 nt, Homo sapiens
  misc_RNA (1)...(19): siRNA sense strand
cauauuuacuggugaacuu

SEQ ID NO: 847759 - RNA, 19 nt, Homo sapiens
  misc_RNA (1)...(19): siRNA sense strand
gaaugaagcauauggugau

SEQ ID NO: 847760 - RNA, 19 nt, Homo sapiens
  misc_RNA (1)...(19): siRNA sense strand
caagucaaguuccugaauc

SEQ ID NO: 847761 - RNA, 19 nt, Homo sapiens
  misc_RNA (1)...(19): siRNA sense strand
guacgacacuggcauuugc

SEQ ID NO: 847762 - RNA, 19 nt, Homo sapiens
  misc_RNA (1)...(19): siRNA sense strand
gcauucuccuguauuucua

SEQ ID NO: 847763 - RNA, 19 nt, Homo sapiens
  misc_RNA (1)...(19): siRNA sense strand
aaauauaacucaggcaauc

SEQ ID NO: 847764 - RNA, 19 nt, Homo sapiens
  misc_RNA (1)...(19): siRNA sense strand
ggccauacuucaagagugu

SEQ ID NO: 847765 - RNA, 19 nt, Homo sapiens
  misc_RNA (1)...(19): siRNA sense strand
uacaaucagugccaucauu

SEQ ID NO: 847766 - RNA, 19 nt, Homo sapiens
  misc_RNA (1)...(19): siRNA sense strand
ggaaccagauucaccuuuu

SEQ ID NO: 847767 - RNA, 19 nt, Homo sapiens
  misc_RNA (1)...(19): siRNA sense strand
gucauuccuugguguauuu

SEQ ID NO: 847768 - RNA, 19 nt, Homo sapiens
  misc_RNA (1)...(19): siRNA sense strand
gaaauauuccugacacaac

SEQ ID NO: 847769 - RNA, 19 nt, Homo sapiens
  misc_RNA (1)...(19): siRNA sense strand
ccaaggccauacuucaaga

SEQ ID NO: 847770 - RNA, 19 nt, Homo sapiens
  misc_RNA (1)...(19): siRNA sense strand
gaacaucugcaacagucuu

SEQ ID NO: 847771 - RNA, 19 nt, Homo sapiens
  misc_RNA (1)...(19): siRNA sense strand
gauagcaucuuguguuuuc

SEQ ID NO: 847772 - RNA, 19 nt, Homo sapiens
  misc_RNA (1)...(19): siRNA sense strand
caugauagcaucuuguguu

SEQ ID NO: 847773 - RNA, 19 nt, Homo sapiens
  misc_RNA (1)...(19): siRNA sense strand
ggugaucaguauuucucua

SEQ ID NO: 847774 - RNA, 19 nt, Homo sapiens
  misc_RNA (1)...(19): siRNA sense strand
ggcaguuccugaucuaugu

SEQ ID NO: 847775 - RNA, 19 nt, Homo sapiens
  misc_RNA (1)...(19): siRNA sense strand
ggaaacuuggugaucagua

SEQ ID NO: 847776 - RNA, 19 nt, Homo sapiens
  misc_RNA (1)...(19): siRNA sense strand
gccacgaaacucuacaaua

SEQ ID NO: 847777 - RNA, 19 nt, Homo sapiens
  misc_RNA (1)...(19): siRNA sense strand
caacuaacuuaccccauuu

SEQ ID NO: 847778 - RNA, 19 nt, Homo sapiens
  misc_RNA (1)...(19): siRNA sense strand
acagguagugccauuauuu

SEQ ID NO: 847779 - RNA, 19 nt, Homo sapiens
  misc_RNA (1)...(19): siRNA sense strand
agaaaggcuuggagggaaa

SEQ ID NO: 847780 - RNA, 19 nt, Homo sapiens
  misc_RNA (1)...(19): siRNA sense strand
uuaggaaacuuggugauca

SEQ ID NO: 847781 - RNA, 19 nt, Homo sapiens
  misc_RNA (1)...(19): siRNA sense strand
uggacgagcugucacugaa

SEQ ID NO: 847782 - RNA, 19 nt, Homo sapiens
  misc_RNA (1)...(19): siRNA sense strand
ugaagcauauggugauucu

SEQ ID NO: 847783 - RNA, 19 nt, Homo sapiens
  misc_RNA (1)...(19): siRNA sense strand
caggcaaucucagcaagaa

SEQ ID NO: 847784 - RNA, 19 nt, Homo sapiens
  misc_RNA (1)...(19): siRNA sense strand
uaacuuaccccauuuucua

SEQ ID NO: 847785 - RNA, 19 nt, Homo sapiens
  misc_RNA (1)...(19): siRNA sense strand
cagcaagaacaguacagua

SEQ ID NO: 847786 - RNA, 19 nt, Homo sapiens
  misc_RNA (1)...(19): siRNA sense strand
caucugcaacagucuuaua

SEQ ID NO: 847787 - RNA, 19 nt, Homo sapiens
  misc_RNA (1)...(19): siRNA sense strand
gaguuuugcuggcuauuuu

SEQ ID NO: 847788 - RNA, 19 nt, Homo sapiens
  misc_RNA (1)...(19): siRNA sense strand
gaacaguacaguauuaccu

SEQ ID NO: 847789 - RNA, 19 nt, Homo sapiens
  misc_RNA (1)...(19): siRNA sense strand
ggauggcaguuccugaucu

SEQ ID NO: 847790 - RNA, 19 nt, Homo sapiens
  misc_RNA (1)...(19): siRNA sense strand
gcauuugcaggaacauauu

SEQ ID NO: 847791 - RNA, 19 nt, Homo sapiens
  misc_RNA (1)...(19): siRNA sense strand
gugaucaguauuucucuaa

SEQ ID NO: 847792 - RNA, 19 nt, Homo sapiens
  misc_RNA (1)...(19): siRNA sense strand
uggcaauucuagccucauu

SEQ ID NO: 847793 - RNA, 19 nt, Homo sapiens
  misc_RNA (1)...(19): siRNA sense strand
ucugcauucuccuguauuu

SEQ ID NO: 847794 - RNA, 19 nt, Homo sapiens
  misc_RNA (1)...(19): siRNA sense strand
augauagcaucuuguguuu

SEQ ID NO: 847795 - RNA, 19 nt, Homo sapiens
  misc_RNA (1)...(19): siRNA sense strand
ggugccaguuaaucauauu

SEQ ID NO: 847796 - RNA, 19 nt, Homo sapiens
  misc_RNA (1)...(19): siRNA sense strand
cucauugacuguuauuuca

SEQ ID NO: 847797 - RNA, 19 nt, Homo sapiens
  misc_RNA (1)...(19): siRNA sense strand
acgaaacucuacaauacga

SEQ ID NO: 847798 - RNA, 19 nt, Homo sapiens
  misc_RNA (1)...(19): siRNA sense strand
caaauauaacucaggcaau

SEQ ID NO: 847799 - RNA, 19 nt, Homo sapiens
  misc_RNA (1)...(19): siRNA sense strand
cuagccucauugacuguua

SEQ ID NO: 847800 - RNA, 19 nt, Homo sapiens
  misc_RNA (1)...(19): siRNA sense strand
cauauggugauucugcuaa

SEQ ID NO: 847801 - RNA, 19 nt, Homo sapiens
  misc_RNA (1)...(19): siRNA sense strand
aaucucagcaagaacagua

SEQ ID NO: 847802 - RNA, 19 nt, Homo sapiens
  misc_RNA (1)...(19): siRNA sense strand
ucugaaagacaauuugaga

SEQ ID NO: 847803 - RNA, 19 nt, Homo sapiens
  misc_RNA (1)...(19): siRNA sense strand
caaaauacaaccagauuca

SEQ ID NO: 847804 - RNA, 19 nt, Homo sapiens
  misc_RNA (1)...(19): siRNA sense strand
gcauauggugauucugcua

SEQ ID NO: 847805 - RNA, 19 nt, Homo sapiens
  misc_RNA (1)...(19): siRNA sense strand
acacuggcauuugcaggaa

SEQ ID NO: 847806 - RNA, 19 nt, Homo sapiens
  misc_RNA (1)...(19): siRNA sense strand
acaacaguggugccaguua

SEQ ID NO: 847807 - RNA, 19 nt, Homo sapiens
  misc_RNA (1)...(19): siRNA sense strand
ggcauuugcaggaacauau

SEQ ID NO: 847808 - RNA, 19 nt, Homo sapiens
  misc_RNA (1)...(19): siRNA sense strand
auacaaccagauucacaua

SEQ ID NO: 847809 - RNA, 19 nt, Homo sapiens
  misc_RNA (1)...(19): siRNA sense strand
ugucauuccuugguguauu

SEQ ID NO: 847810 - RNA, 19 nt, Homo sapiens
  misc_RNA (1)...(19): siRNA sense strand
ccucauugacuguuauuuc

SEQ ID NO: 847811 - RNA, 19 nt, Homo sapiens
  misc_RNA (1)...(19): siRNA sense strand
uuccugaucuaugugauuu

SEQ ID NO: 847812 - RNA, 19 nt, Homo sapiens
  misc_RNA (1)...(19): siRNA sense strand
uacagguagugccauuauu

SEQ ID NO: 847813 - RNA, 19 nt, Homo sapiens
  misc_RNA (1)...(19): siRNA sense strand
ggacgagcugucacugaau

SEQ ID NO: 847814 - RNA, 19 nt, Homo sapiens
  misc_RNA (1)...(19): siRNA sense strand
ccaagucaaguuccugaau

SEQ ID NO: 847815 - RNA, 19 nt, Homo sapiens
  misc_RNA (1)...(19): siRNA sense strand
gcacccaaggccauacuuc

SEQ ID NO: 847816 - RNA, 19 nt, Homo sapiens
  misc_RNA (1)...(19): siRNA sense strand
gccauuauuucuguuacau

SEQ ID NO: 847817 - RNA, 19 nt, Homo sapiens
  misc_RNA (1)...(19): siRNA sense strand
uuacagguagugccauuau

SEQ ID NO: 847818 - RNA, 19 nt, Homo sapiens
  misc_RNA (1)...(19): siRNA sense strand
ggucacaagaaaucgagaa

SEQ ID NO: 847819 - RNA, 19 nt, Homo sapiens
  misc_RNA (1)...(19): siRNA sense strand
gcagguaucauauuuuauc

SEQ ID NO: 847820 - RNA, 19 nt, Homo sapiens
  misc_RNA (1)...(19): siRNA sense strand
guggugccaguuaaucaua

SEQ ID NO: 847821 - RNA, 19 nt, Homo sapiens
  misc_RNA (1)...(19): siRNA sense strand
gauuugcucccauuacucu

SEQ ID NO: 847822 - RNA, 19 nt, Homo sapiens
  misc_RNA (1)...(19): siRNA sense strand
ugcaacagucuuauauuga

SEQ ID NO: 847823 - RNA, 19 nt, Homo sapiens
  misc_RNA (1)...(19): siRNA sense strand
cuuugcagccuauggauuu

SEQ ID NO: 847824 - RNA, 19 nt, Homo sapiens
  misc_RNA (1)...(19): siRNA sense strand
cacaagaaaucgagaaaag

SEQ ID NO: 847825 - RNA, 19 nt, Homo sapiens
  misc_RNA (1)...(19): siRNA sense strand
aagucaaguuccugaauca

SEQ ID NO: 847826 - RNA, 19 nt, Homo sapiens
  misc_RNA (1)...(19): siRNA sense strand
ccugaucuaugugauuuua

SEQ ID NO: 847827 - RNA, 19 nt, Homo sapiens
  misc_RNA (1)...(19): siRNA sense strand
ggcaaucucagcaagaaca

SEQ ID NO: 847828 - RNA, 19 nt, Homo sapiens
  misc_RNA (1)...(19): siRNA sense strand
gguagugccauuauuucug

SEQ ID NO: 847829 - RNA, 19 nt, Homo sapiens
  misc_RNA (1)...(19): siRNA sense strand
gacaaaauacaaccagauu

SEQ ID NO: 847830 - RNA, 19 nt, Homo sapiens
  misc_RNA (1)...(19): siRNA sense strand
aaaggaacaucugcaacag

SEQ ID NO: 847831 - RNA, 19 nt, Homo sapiens
  misc_RNA (1)...(19): siRNA sense strand
caagaaaucgagaaaagga

SEQ ID NO: 847832 - RNA, 19 nt, Homo sapiens
  misc_RNA (1)...(19): siRNA sense strand
agcaagaacaguacaguau

SEQ ID NO: 847833 - RNA, 19 nt, Homo sapiens
  misc_RNA (1)...(19): siRNA sense strand
aaugaagcauauggugauu

SEQ ID NO: 847834 - RNA, 19 nt, Homo sapiens
  misc_RNA (1)...(19): siRNA sense strand
aaauacaaccagauucaca

SEQ ID NO: 847835 - RNA, 19 nt, Homo sapiens
  misc_RNA (1)...(19): siRNA sense strand
gaaucaagccacgaaacuc

SEQ ID NO: 847836 - RNA, 19 nt, Homo sapiens
  misc_RNA (1)...(19): siRNA sense strand
uguuacagguagugccauu

SEQ ID NO: 847837 - RNA, 19 nt, Homo sapiens
  misc_RNA (1)...(19): siRNA sense strand
gcuuggagggaaacaaaug

SEQ ID NO: 847838 - RNA, 19 nt, Homo sapiens
  misc_RNA (1)...(19): siRNA sense strand
gguacgacacuggcauuug

SEQ ID NO: 847839 - RNA, 19 nt, Homo sapiens
  misc_RNA (1)...(19): siRNA sense strand
aaacuuggugaucaguauu

SEQ ID NO: 847840 - RNA, 19 nt, Homo sapiens
  misc_RNA (1)...(19): siRNA sense strand
gagcaacucuggcggauuu

SEQ ID NO: 847841 - RNA, 19 nt, Homo sapiens
  misc_RNA (1)...(19): siRNA sense strand
ucagggaccucaaggguua

SEQ ID NO: 847842 - RNA, 19 nt, Homo sapiens
  misc_RNA (1)...(19): siRNA sense strand
caauucaagucucagauaa

SEQ ID NO: 847843 - RNA, 19 nt, Homo sapiens
  misc_RNA (1)...(19): siRNA sense strand
gaccagaggaccaucauga

SEQ ID NO: 847844 - RNA, 19 nt, Homo sapiens
  misc_RNA (1)...(19): siRNA sense strand
ccaauucaagucucagaua

SEQ ID NO: 847845 - RNA, 19 nt, Homo sapiens
  misc_RNA (1)...(19): siRNA sense strand
ucaugaaaccucuggagua

SEQ ID NO: 847846 - RNA, 19 nt, Homo sapiens
  misc_RNA (1)...(19): siRNA sense strand
gcugugacgucucuuccaa

SEQ ID NO: 847847 - RNA, 19 nt, Homo sapiens
  misc_RNA (1)...(19): siRNA sense strand
ccagaggaccaucaugaaa

SEQ ID NO: 847848 - RNA, 19 nt, Homo sapiens
  misc_RNA (1)...(19): siRNA sense strand
caagacaggaacacaaguu

SEQ ID NO: 847849 - RNA, 19 nt, Homo sapiens
  misc_RNA (1)...(19): siRNA sense strand
caugaaaccucuggaguac

SEQ ID NO: 847850 - RNA, 19 nt, Homo sapiens
  misc_RNA (1)...(19): siRNA sense strand
ugacgucucuuccaacaac

SEQ ID NO: 847851 - RNA, 19 nt, Homo sapiens
  misc_RNA (1)...(19): siRNA sense strand
ugaaaccucuggaguacca

SEQ ID NO: 847852 - RNA, 19 nt, Homo sapiens
  misc_RNA (1)...(19): siRNA sense strand
ggucaagggcuacaacauc

SEQ ID NO: 847853 - RNA, 19 nt, Homo sapiens
  misc_RNA (1)...(19): siRNA sense strand
gaaagcaaggcaccaggau

SEQ ID NO: 847854 - RNA, 19 nt, Homo sapiens
  misc_RNA (1)...(19): siRNA sense strand
ucaagaguaucguggucaa

SEQ ID NO: 847855 - RNA, 19 nt, Homo sapiens
  misc_RNA (1)...(19): siRNA sense strand
guucaccuguggcagaaga

SEQ ID NO: 847856 - RNA, 19 nt, Homo sapiens
  misc_RNA (1)...(19): siRNA sense strand
gucaagggcuacaacaucu

SEQ ID NO: 847857 - RNA, 19 nt, Homo sapiens
  misc_RNA (1)...(19): siRNA sense strand
caaggguuauccugaugga

SEQ ID NO: 847858 - RNA, 19 nt, Homo sapiens
  misc_RNA (1)...(19): siRNA sense strand
ccucaaggguuauccugau

SEQ ID NO: 847859 - RNA, 19 nt, Homo sapiens
  misc_RNA (1)...(19): siRNA sense strand
ccugaggacuuugaagaug

SEQ ID NO: 847860 - RNA, 19 nt, Homo sapiens
  misc_RNA (1)...(19): siRNA sense strand
gggcaagcguuggaaugga

SEQ ID NO: 847861 - RNA, 19 nt, Homo sapiens
  misc_RNA (1)...(19): siRNA sense strand
gcucaccgguggcuacaac

SEQ ID NO: 847862 - RNA, 19 nt, Homo sapiens
  misc_RNA (1)...(19): siRNA sense strand
auucaagucucagauaaug

SEQ ID NO: 847863 - RNA, 19 nt, Homo sapiens
  misc_RNA (1)...(19): siRNA sense strand
gagagccaccugccuauac

SEQ ID NO: 847864 - RNA, 19 nt, Homo sapiens
  misc_RNA (1)...(19): siRNA sense strand
cugauggagucaagaguau

SEQ ID NO: 847865 - RNA, 19 nt, Homo sapiens
  misc_RNA (1)...(19): siRNA sense strand
ccagugguguggucaggau

SEQ ID NO: 847866 - RNA, 19 nt, Homo sapiens
  misc_RNA (1)...(19): siRNA sense strand
gcagaagaggcaucaaggu

SEQ ID NO: 847867 - RNA, 19 nt, Homo sapiens
  misc_RNA (1)...(19): siRNA sense strand
cgacuuccuuggcgucuac

SEQ ID NO: 847868 - RNA, 19 nt, Homo sapiens
  misc_RNA (1)...(19): siRNA sense strand
ccugauggagucaagagua

SEQ ID NO: 847869 - RNA, 19 nt, Homo sapiens
  misc_RNA (1)...(19): siRNA sense strand
agacccauguccugaagau

SEQ ID NO: 847870 - RNA, 19 nt, Homo sapiens
  misc_RNA (1)...(19): siRNA sense strand
gcauggaagaggccagaug

SEQ ID NO: 847871 - RNA, 19 nt, Homo sapiens
  misc_RNA (1)...(19): siRNA sense strand
ggcaaagcccagagacaga

SEQ ID NO: 847872 - RNA, 19 nt, Homo sapiens
  misc_RNA (1)...(19): siRNA sense strand
cgaggugccugagaugucu

SEQ ID NO: 847873 - RNA, 19 nt, Homo sapiens
  misc_RNA (1)...(19): siRNA sense strand
ccacggccaucagcagcuu

SEQ ID NO: 847874 - RNA, 19 nt, Homo sapiens
  misc_RNA (1)...(19): siRNA sense strand
ggaguaccaauucaagucu

SEQ ID NO: 847875 - RNA, 19 nt, Homo sapiens
  misc_RNA (1)...(19): siRNA sense strand
ccucuggaguaccaauuca

SEQ ID NO: 847876 - RNA, 19 nt, Homo sapiens
  misc_RNA (1)...(19): siRNA sense strand
gcguuggaauggacgacuu

SEQ ID NO: 847877 - RNA, 19 nt, Homo sapiens
  misc_RNA (1)...(19): siRNA sense strand
agagccaccugccuauaca

SEQ ID NO: 847878 - RNA, 19 nt, Homo sapiens
  misc_RNA (1)...(19): siRNA sense strand
ugugacgucucuuccaaca

SEQ ID NO: 847879 - RNA, 19 nt, Homo sapiens
  misc_RNA (1)...(19): siRNA sense strand
ccugaggguucccaagaca

SEQ ID NO: 847880 - RNA, 19 nt, Homo sapiens
  misc_RNA (1)...(19): siRNA sense strand
cugggacccugaggacuuu

SEQ ID NO: 847881 - RNA, 19 nt, Homo sapiens
  misc_RNA (1)...(19): siRNA sense strand
uguaccagaucaccuacug

SEQ ID NO: 847882 - RNA, 19 nt, Homo sapiens
  misc_RNA (1)...(19): siRNA sense strand
ugagagccaccugccuaua

SEQ ID NO: 847883 - RNA, 19 nt, Homo sapiens
  misc_RNA (1)...(19): siRNA sense strand
cagaggaccaucaugaaac

SEQ ID NO: 847884 - RNA, 19 nt, Homo sapiens
  misc_RNA (1)...(19): siRNA sense strand
ugaggacuuugaagaugca

SEQ ID NO: 847885 - RNA, 19 nt, Homo sapiens
  misc_RNA (1)...(19): siRNA sense strand
guaccagaucaccuacuga

SEQ ID NO: 847886 - RNA, 19 nt, Homo sapiens
  misc_RNA (1)...(19): siRNA sense strand
ucugggaccugcgggauca

SEQ ID NO: 847887 - RNA, 19 nt, Homo sapiens
  misc_RNA (1)...(19): siRNA sense strand
acagacccauguccugaag

SEQ ID NO: 847888 - RNA, 19 nt, Homo sapiens
  misc_RNA (1)...(19): siRNA sense strand
gaaauccucuagcaaauau

SEQ ID NO: 847889 - RNA, 19 nt, Homo sapiens
  misc_RNA (1)...(19): siRNA sense strand
ggagaaaggccauaugaau

SEQ ID NO: 847890 - RNA, 19 nt, Homo sapiens
  misc_RNA (1)...(19): siRNA sense strand
ccaaagauauacucaguca

SEQ ID NO: 847891 - RNA, 19 nt, Homo sapiens
  misc_RNA (1)...(19): siRNA sense strand
gcaaaucucuucacuucgu

SEQ ID NO: 847892 - RNA, 19 nt, Homo sapiens
  misc_RNA (1)...(19): siRNA sense strand
ggaaauccucuagcaaaua

SEQ ID NO: 847893 - RNA, 19 nt, Homo sapiens
  misc_RNA (1)...(19): siRNA sense strand
gccgaaagcuccagucuca

SEQ ID NO: 847894 - RNA, 19 nt, Homo sapiens
  misc_RNA (1)...(19): siRNA sense strand
gcacaaguaccaccucauu

SEQ ID NO: 847895 - RNA, 19 nt, Homo sapiens
  misc_RNA (1)...(19): siRNA sense strand
uaugacagcuucaguaauc

SEQ ID NO: 847896 - RNA, 19 nt, Homo sapiens
  misc_RNA (1)...(19): siRNA sense strand
ugggauaugugggaaauua

SEQ ID NO: 847897 - RNA, 19 nt, Homo sapiens
  misc_RNA (1)...(19): siRNA sense strand
gagaaaggccauaugaaug

SEQ ID NO: 847898 - RNA, 19 nt, Homo sapiens
  misc_RNA (1)...(19): siRNA sense strand
gggaaauccucuagcaaau

SEQ ID NO: 847899 - RNA, 19 nt, Homo sapiens
  misc_RNA (1)...(19): siRNA sense strand
ccauaugaaugcagugauu

SEQ ID NO: 847900 - RNA, 19 nt, Homo sapiens
  misc_RNA (1)...(19): siRNA sense strand
aguccagucucauuaaaua

SEQ ID NO: 847901 - RNA, 19 nt, Homo sapiens
  misc_RNA (1)...(19): siRNA sense strand
aggcaaaucucuucacuuc

SEQ ID NO: 847902 - RNA, 19 nt, Homo sapiens
  misc_RNA (1)...(19): siRNA sense strand
ucaaggaguucacacuaga

SEQ ID NO: 847903 - RNA, 19 nt, Homo sapiens
  misc_RNA (1)...(19): siRNA sense strand
ggaguucacacuagagaaa

SEQ ID NO: 847904 - RNA, 19 nt, Homo sapiens
  misc_RNA (1)...(19): siRNA sense strand
ggagagaagccauaugagu

SEQ ID NO: 847905 - RNA, 19 nt, Homo sapiens
  misc_RNA (1)...(19): siRNA sense strand
gcuccagucucacuaaaca

SEQ ID NO: 847906 - RNA, 19 nt, Homo sapiens
  misc_RNA (1)...(19): siRNA sense strand
caccaaagauauacucagu

SEQ ID NO: 847907 - RNA, 19 nt, Homo sapiens
  misc_RNA (1)...(19): siRNA sense strand
ggauaugugggaaauuauu

SEQ ID NO: 847908 - RNA, 19 nt, Homo sapiens
  misc_RNA (1)...(19): siRNA sense strand
ccagucucauuaaauauug

SEQ ID NO: 847909 - RNA, 19 nt, Homo sapiens
  misc_RNA (1)...(19): siRNA sense strand
cuacauuccguguucauaa

SEQ ID NO: 847910 - RNA, 19 nt, Homo sapiens
  misc_RNA (1)...(19): siRNA sense strand
caaaagaaagggcuuauga

SEQ ID NO: 847911 - RNA, 19 nt, Homo sapiens
  misc_RNA (1)...(19): siRNA sense strand
aaauaugacagcuucagua

SEQ ID NO: 847912 - RNA, 19 nt, Homo sapiens
  misc_RNA (1)...(19): siRNA sense strand
gaaagcuccagucucacua

SEQ ID NO: 847913 - RNA, 19 nt, Homo sapiens
  misc_RNA (1)...(19): siRNA sense strand
acacuggucagaagccuua

SEQ ID NO: 847914 - RNA, 19 nt, Homo sapiens
  misc_RNA (1)...(19): siRNA sense strand
caucaaggaguucacacua

SEQ ID NO: 847915 - RNA, 19 nt, Homo sapiens
  misc_RNA (1)...(19): siRNA sense strand
gauugugggaagucauuua

SEQ ID NO: 847916 - RNA, 19 nt, Homo sapiens
  misc_RNA (1)...(19): siRNA sense strand
gaaaggccauaugaaugca

SEQ ID NO: 847917 - RNA, 19 nt, Homo sapiens
  misc_RNA (1)...(19): siRNA sense strand
ugagguuugucagaaauuu

SEQ ID NO: 847918 - RNA, 19 nt, Homo sapiens
  misc_RNA (1)...(19): siRNA sense strand
ccauaugagugugagguuu

SEQ ID NO: 847919 - RNA, 19 nt, Homo sapiens
  misc_RNA (1)...(19): siRNA sense strand
ucagagaguucacaaaaga

SEQ ID NO: 847920 - RNA, 19 nt, Homo sapiens
  misc_RNA (1)...(19): siRNA sense strand
gugaaugugggaaaucuuu

SEQ ID NO: 847921 - RNA, 19 nt, Homo sapiens
  misc_RNA (1)...(19): siRNA sense strand
ggucagaagccuuaugagu

SEQ ID NO: 847922 - RNA, 19 nt, Homo sapiens
  misc_RNA (1)...(19): siRNA sense strand
aauaugacagcuucaguaa

SEQ ID NO: 847923 - RNA, 19 nt, Homo sapiens
  misc_RNA (1)...(19): siRNA sense strand
aaagaaagggcuuaugagu

SEQ ID NO: 847924 - RNA, 19 nt, Homo sapiens
  misc_RNA (1)...(19): siRNA sense strand
agagacugcucccuacaga

SEQ ID NO: 847925 - RNA, 19 nt, Homo sapiens
  misc_RNA (1)...(19): siRNA sense strand
ugggaaauccucuagcaaa

SEQ ID NO: 847926 - RNA, 19 nt, Homo sapiens
  misc_RNA (1)...(19): siRNA sense strand
cagcuucaguaaucaucaa

SEQ ID NO: 847927 - RNA, 19 nt, Homo sapiens
  misc_RNA (1)...(19): siRNA sense strand
gugugagguuugucagaaa

SEQ ID NO: 847928 - RNA, 19 nt, Homo sapiens
  misc_RNA (1)...(19): siRNA sense strand
gcuuaugagugcagugagu

SEQ ID NO: 847929 - RNA, 19 nt, Homo sapiens
  misc_RNA (1)...(19): siRNA sense strand
gaauucacacuggagagaa

SEQ ID NO: 847930 - RNA, 19 nt, Homo sapiens
  misc_RNA (1)...(19): siRNA sense strand
gaaugugggaaauccucua

SEQ ID NO: 847931 - RNA, 19 nt, Homo sapiens
  misc_RNA (1)...(19): siRNA sense strand
cauaugagugugagguuug

SEQ ID NO: 847932 - RNA, 19 nt, Homo sapiens
  misc_RNA (1)...(19): siRNA sense strand
cuggagagaagccauauga

SEQ ID NO: 847933 - RNA, 19 nt, Homo sapiens
  misc_RNA (1)...(19): siRNA sense strand
cuucaguaaucaucaagga

SEQ ID NO: 847934 - RNA, 19 nt, Homo sapiens
  misc_RNA (1)...(19): siRNA sense strand
ucucuucacuucgucauca

SEQ ID NO: 847935 - RNA, 19 nt, Homo sapiens
  misc_RNA (1)...(19): siRNA sense strand
uaagucccaccuccuugua

SEQ ID NO: 847936 - RNA, 19 nt, Homo sapiens
  misc_RNA (1)...(19): siRNA sense strand
guaagucccaccuccuugu

SEQ ID NO: 847937 - RNA, 19 nt, Homo sapiens
  misc_RNA (1)...(19): siRNA sense strand
ccuuauacgugugggauau

SEQ ID NO: 847938 - RNA, 19 nt, Homo sapiens
  misc_RNA (1)...(19): siRNA sense strand
caguaaucaucaaggaguu

SEQ ID NO: 847939 - RNA, 19 nt, Homo sapiens
  misc_RNA (1)...(19): siRNA sense strand
caucagagaguucacaaaa

SEQ ID NO: 847940 - RNA, 19 nt, Homo sapiens
  misc_RNA (1)...(19): siRNA sense strand
caaauaugacagcuucagu

SEQ ID NO: 847941 - RNA, 19 nt, Homo sapiens
  misc_RNA (1)...(19): siRNA sense strand
agaaaggccauaugaaugc

SEQ ID NO: 847942 - RNA, 19 nt, Homo sapiens
  misc_RNA (1)...(19): siRNA sense strand
ccuuaugagugcagugaau

SEQ ID NO: 847943 - RNA, 19 nt, Homo sapiens
  misc_RNA (1)...(19): siRNA sense strand
acacuggagagaagccaua

SEQ ID NO: 847944 - RNA, 19 nt, Homo sapiens
  misc_RNA (1)...(19): siRNA sense strand
gggcuuaugagugcaguga

SEQ ID NO: 847945 - RNA, 19 nt, Homo sapiens
  misc_RNA (1)...(19): siRNA sense strand
aagcuccagucucacuaaa

SEQ ID NO: 847946 - RNA, 19 nt, Homo sapiens
  misc_RNA (1)...(19): siRNA sense strand
cauuuuagcaccaaagaua

SEQ ID NO: 847947 - RNA, 19 nt, Homo sapiens
  misc_RNA (1)...(19): siRNA sense strand
gcaaauaugacagcuucag

SEQ ID NO: 847948 - RNA, 19 nt, Homo sapiens
  misc_RNA (1)...(19): siRNA sense strand
agugugagguuugucagaa

SEQ ID NO: 847949 - RNA, 19 nt, Homo sapiens
  misc_RNA (1)...(19): siRNA sense strand
agagaagccauaugagugu

SEQ ID NO: 847950 - RNA, 19 nt, Homo sapiens
  misc_RNA (1)...(19): siRNA sense strand
ugugggaaauccucuagca

SEQ ID NO: 847951 - RNA, 19 nt, Homo sapiens
  misc_RNA (1)...(19): siRNA sense strand
ugugagguuugucagaaau

SEQ ID NO: 847952 - RNA, 19 nt, Homo sapiens
  misc_RNA (1)...(19): siRNA sense strand
ucacuucgucaucaucaga

SEQ ID NO: 847953 - RNA, 19 nt, Homo sapiens
  misc_RNA (1)...(19): siRNA sense strand
cgaaagcuccagucucacu

SEQ ID NO: 847954 - RNA, 19 nt, Homo sapiens
  misc_RNA (1)...(19): siRNA sense strand
uacauuccguguucauaag

SEQ ID NO: 847955 - RNA, 19 nt, Homo sapiens
  misc_RNA (1)...(19): siRNA sense strand
gugauugugggaagucauu

SEQ ID NO: 847956 - RNA, 19 nt, Homo sapiens
  misc_RNA (1)...(19): siRNA sense strand
cuggagaaaggccauauga

SEQ ID NO: 847957 - RNA, 19 nt, Homo sapiens
  misc_RNA (1)...(19): siRNA sense strand
ccucauugcacaccagaga

SEQ ID NO: 847958 - RNA, 19 nt, Homo sapiens
  misc_RNA (1)...(19): siRNA sense strand
ucauuuacccacagcucua

SEQ ID NO: 847959 - RNA, 19 nt, Homo sapiens
  misc_RNA (1)...(19): siRNA sense strand
aaagcuccagucucacuaa

SEQ ID NO: 847960 - RNA, 19 nt, Homo sapiens
  misc_RNA (1)...(19): siRNA sense strand
caaguaccaccucauugca

SEQ ID NO: 847961 - RNA, 19 nt, Homo sapiens
  misc_RNA (1)...(19): siRNA sense strand
gaguccagucucauuaaau

SEQ ID NO: 847962 - RNA, 19 nt, Homo sapiens
  misc_RNA (1)...(19): siRNA sense strand
agacugcucccuacagaag

SEQ ID NO: 847963 - RNA, 19 nt, Homo sapiens
  misc_RNA (1)...(19): siRNA sense strand
gggauaugugggaaauuau

SEQ ID NO: 847964 - RNA, 19 nt, Homo sapiens
  misc_RNA (1)...(19): siRNA sense strand
gcagugaaugugggaaauc

SEQ ID NO: 847965 - RNA, 19 nt, Homo sapiens
  misc_RNA (1)...(19): siRNA sense strand
gcucuacauuccguguuca

SEQ ID NO: 847966 - RNA, 19 nt, Homo sapiens
  misc_RNA (1)...(19): siRNA sense strand
cacaaguaccaccucauug

SEQ ID NO: 847967 - RNA, 19 nt, Homo sapiens
  misc_RNA (1)...(19): siRNA sense strand
cgggugcagugaaugugaa

SEQ ID NO: 847968 - RNA, 19 nt, Homo sapiens
  misc_RNA (1)...(19): siRNA sense strand
gagaguucacacuggagaa

SEQ ID NO: 847969 - RNA, 19 nt, Homo sapiens
  misc_RNA (1)...(19): siRNA sense strand
aaacacaggagaguucaca

SEQ ID NO: 847970 - RNA, 19 nt, Homo sapiens
  misc_RNA (1)...(19): siRNA sense strand
ucacuaaacacaggagagu

SEQ ID NO: 847971 - RNA, 19 nt, Homo sapiens
  misc_RNA (1)...(19): siRNA sense strand
cagugaaugugggaaaucu

SEQ ID NO: 847972 - RNA, 19 nt, Homo sapiens
  misc_RNA (1)...(19): siRNA sense strand
gagacugcucccuacagaa

SEQ ID NO: 847973 - RNA, 19 nt, Homo sapiens
  misc_RNA (1)...(19): siRNA sense strand
gagaguucacacuggagaa

SEQ ID NO: 847974 - RNA, 19 nt, Homo sapiens
  misc_RNA (1)...(19): siRNA sense strand
gugcagugaaugugggaaa

SEQ ID NO: 847975 - RNA, 19 nt, Homo sapiens
  misc_RNA (1)...(19): siRNA sense strand
ccuuacgggugcagugaau

SEQ ID NO: 847976 - RNA, 19 nt, Homo sapiens
  misc_RNA (1)...(19): siRNA sense strand
ucagaaggcugguguguuu

SEQ ID NO: 847977 - RNA, 19 nt, Homo sapiens
  misc_RNA (1)...(19): siRNA sense strand
gcaaagaaagggaaacuga

SEQ ID NO: 847978 - RNA, 19 nt, Homo sapiens
  misc_RNA (1)...(19): siRNA sense strand
ggaaagcgaugguauuugc

SEQ ID NO: 847979 - RNA, 19 nt, Homo sapiens
  misc_RNA (1)...(19): siRNA sense strand
guacagagccagccuuguu

SEQ ID NO: 847980 - RNA, 19 nt, Homo sapiens
  misc_RNA (1)...(19): siRNA sense strand
gacaauacaggaaauguuu

SEQ ID NO: 847981 - RNA, 19 nt, Homo sapiens
  misc_RNA (1)...(19): siRNA sense strand
cgacauguaucuguaagaa

SEQ ID NO: 847982 - RNA, 19 nt, Homo sapiens
  misc_RNA (1)...(19): siRNA sense strand
ggaaggacauuuugacauu

SEQ ID NO: 847983 - RNA, 19 nt, Homo sapiens
  misc_RNA (1)...(19): siRNA sense strand
ggaauacuuuaaaccaguu

SEQ ID NO: 847984 - RNA, 19 nt, Homo sapiens
  misc_RNA (1)...(19): siRNA sense strand
ggacauauaugaagaaaac

SEQ ID NO: 847985 - RNA, 19 nt, Homo sapiens
  misc_RNA (1)...(19): siRNA sense strand
acauguaucuguaagaaga

SEQ ID NO: 847986 - RNA, 19 nt, Homo sapiens
  misc_RNA (1)...(19): siRNA sense strand
gugcauggguccaauauac

SEQ ID NO: 847987 - RNA, 19 nt, Homo sapiens
  misc_RNA (1)...(19): siRNA sense strand
gcucaugguugcuauuucu

SEQ ID NO: 847988 - RNA, 19 nt, Homo sapiens
  misc_RNA (1)...(19): siRNA sense strand
caagacaucaucacaagga

SEQ ID NO: 847989 - RNA, 19 nt, Homo sapiens
  misc_RNA (1)...(19): siRNA sense strand
gaaaaggccaucagaaaug

SEQ ID NO: 847990 - RNA, 19 nt, Homo sapiens
  misc_RNA (1)...(19): siRNA sense strand
aauaguggauccuugaaug

SEQ ID NO: 847991 - RNA, 19 nt, Homo sapiens
  misc_RNA (1)...(19): siRNA sense strand
gcugguuucuguauccaaa

SEQ ID NO: 847992 - RNA, 19 nt, Homo sapiens
  misc_RNA (1)...(19): siRNA sense strand
gaugauugccugcgacaug

SEQ ID NO: 847993 - RNA, 19 nt, Homo sapiens
  misc_RNA (1)...(19): siRNA sense strand
caaagaaagggaaacugaa

SEQ ID NO: 847994 - RNA, 19 nt, Homo sapiens
  misc_RNA (1)...(19): siRNA sense strand
cuuaccagcuuugacaaua

SEQ ID NO: 847995 - RNA, 19 nt, Homo sapiens
  misc_RNA (1)...(19): siRNA sense strand
caucuucuguccugaauac

SEQ ID NO: 847996 - RNA, 19 nt, Homo sapiens
  misc_RNA (1)...(19): siRNA sense strand
ggaaaacccggacauauau

SEQ ID NO: 847997 - RNA, 19 nt, Homo sapiens
  misc_RNA (1)...(19): siRNA sense strand
cugaagagguuuuggcuua

SEQ ID NO: 847998 - RNA, 19 nt, Homo sapiens
  misc_RNA (1)...(19): siRNA sense strand
uaacagaaggcaaagaaag

SEQ ID NO: 847999 - RNA, 19 nt, Homo sapiens
  misc_RNA (1)...(19): siRNA sense strand
cagccuuguugaugcaaua

SEQ ID NO: 848000 - RNA, 19 nt, Homo sapiens
  misc_RNA (1)...(19): siRNA sense strand
cauaauaguggauccuuga

SEQ ID NO: 848001 - RNA, 19 nt, Homo sapiens
  misc_RNA (1)...(19): siRNA sense strand
ccucaagcacaauaauaua

SEQ ID NO: 848002 - RNA, 19 nt, Homo sapiens
  misc_RNA (1)...(19): siRNA sense strand
ucuguuaacugaugggaau

SEQ ID NO: 848003 - RNA, 19 nt, Homo sapiens
  misc_RNA (1)...(19): siRNA sense strand
agaugucucucaacuggaa

SEQ ID NO: 848004 - RNA, 19 nt, Homo sapiens
  misc_RNA (1)...(19): siRNA sense strand
gaugggauaaugagacaga

SEQ ID NO: 848005 - RNA, 19 nt, Homo sapiens
  misc_RNA (1)...(19): siRNA sense strand
gcauggguccaauauacaa

SEQ ID NO: 848006 - RNA, 19 nt, Homo sapiens
  misc_RNA (1)...(19): siRNA sense strand
gaaggcaaagaaagggaaa

SEQ ID NO: 848007 - RNA, 19 nt, Homo sapiens
  misc_RNA (1)...(19): siRNA sense strand
cugcagaugucaaagaagu

SEQ ID NO: 848008 - RNA, 19 nt, Homo sapiens
  misc_RNA (1)...(19): siRNA sense strand
guggauccuugaauguuga

SEQ ID NO: 848009 - RNA, 19 nt, Homo sapiens
  misc_RNA (1)...(19): siRNA sense strand
ugacaauacaggaaauguu

SEQ ID NO: 848010 - RNA, 19 nt, Homo sapiens
  misc_RNA (1)...(19): siRNA sense strand
caucagaaaugugcaagac

SEQ ID NO: 848011 - RNA, 19 nt, Homo sapiens
  misc_RNA (1)...(19): siRNA sense strand
guaacagaaggcaaagaaa

SEQ ID NO: 848012 - RNA, 19 nt, Homo sapiens
  misc_RNA (1)...(19): siRNA sense strand
gggauaaugagacagaugu

SEQ ID NO: 848013 - RNA, 19 nt, Homo sapiens
  misc_RNA (1)...(19): siRNA sense strand
gagggaauacuuuaaacca

SEQ ID NO: 848014 - RNA, 19 nt, Homo sapiens
  misc_RNA (1)...(19): siRNA sense strand
ccugcgacauguaucugua

SEQ ID NO: 848015 - RNA, 19 nt, Homo sapiens
  misc_RNA (1)...(19): siRNA sense strand
ccuugaauguugaagaugu

SEQ ID NO: 848016 - RNA, 19 nt, Homo sapiens
  misc_RNA (1)...(19): siRNA sense strand
gccgagggaauacuuuaaa

SEQ ID NO: 848017 - RNA, 19 nt, Homo sapiens
  misc_RNA (1)...(19): siRNA sense strand
gaaggcugguguguuuaag

SEQ ID NO: 848018 - RNA, 19 nt, Homo sapiens
  misc_RNA (1)...(19): siRNA sense strand
gcagaugucaaagaaguuc

SEQ ID NO: 848019 - RNA, 19 nt, Homo sapiens
  misc_RNA (1)...(19): siRNA sense strand
gcaucuggccaucugaaga

SEQ ID NO: 848020 - RNA, 19 nt, Homo sapiens
  misc_RNA (1)...(19): siRNA sense strand
agaaggcugguguguuuaa

SEQ ID NO: 848021 - RNA, 19 nt, Homo sapiens
  misc_RNA (1)...(19): siRNA sense strand
ugcaagacaucaucacaag

SEQ ID NO: 848022 - RNA, 19 nt, Homo sapiens
  misc_RNA (1)...(19): siRNA sense strand
gccucaagcacaauaauau

SEQ ID NO: 848023 - RNA, 19 nt, Homo sapiens
  misc_RNA (1)...(19): siRNA sense strand
aguaucuccuuaaggcaua

SEQ ID NO: 848024 - RNA, 19 nt, Homo sapiens
  misc_RNA (1)...(19): siRNA sense strand
gaaggacauuuugacauug

SEQ ID NO: 848025 - RNA, 19 nt, Homo sapiens
  misc_RNA (1)...(19): siRNA sense strand
gggcucaugguugcuauuu

SEQ ID NO: 848026 - RNA, 19 nt, Homo sapiens
  misc_RNA (1)...(19): siRNA sense strand
caggaaauguuugcaucug

SEQ ID NO: 848027 - RNA, 19 nt, Homo sapiens
  misc_RNA (1)...(19): siRNA sense strand
gugcaagacaucaucacaa

SEQ ID NO: 848028 - RNA, 19 nt, Homo sapiens
  misc_RNA (1)...(19): siRNA sense strand
gacaucaucacaaggaauc

SEQ ID NO: 848029 - RNA, 19 nt, Homo sapiens
  misc_RNA (1)...(19): siRNA sense strand
gaauguugaagauguccuu

SEQ ID NO: 848030 - RNA, 19 nt, Homo sapiens
  misc_RNA (1)...(19): siRNA sense strand
uuucaaacuuccacuccaa

SEQ ID NO: 848031 - RNA, 19 nt, Homo sapiens
  misc_RNA (1)...(19): siRNA sense strand
guuaacugaugggaaugaa

SEQ ID NO: 848032 - RNA, 19 nt, Homo sapiens
  misc_RNA (1)...(19): siRNA sense strand
aaagaaagggaaacugaag

SEQ ID NO: 848033 - RNA, 19 nt, Homo sapiens
  misc_RNA (1)...(19): siRNA sense strand
aagauguccuuaccagcuu

SEQ ID NO: 848034 - RNA, 19 nt, Homo sapiens
  misc_RNA (1)...(19): siRNA sense strand
gauccuugaauguugaaga

SEQ ID NO: 848035 - RNA, 19 nt, Homo sapiens
  misc_RNA (1)...(19): siRNA sense strand
ccggacauauaugaagaaa

SEQ ID NO: 848036 - RNA, 19 nt, Homo sapiens
  misc_RNA (1)...(19): siRNA sense strand
aguaacagaaggcaaagaa

SEQ ID NO: 848037 - RNA, 19 nt, Homo sapiens
  misc_RNA (1)...(19): siRNA sense strand
aguggauccuugaauguug

SEQ ID NO: 848038 - RNA, 19 nt, Homo sapiens
  misc_RNA (1)...(19): siRNA sense strand
caauauacaagcaucuucu

SEQ ID NO: 848039 - RNA, 19 nt, Homo sapiens
  misc_RNA (1)...(19): siRNA sense strand
uaacugaugggaaugaaaa

SEQ ID NO: 848040 - RNA, 19 nt, Homo sapiens
  misc_RNA (1)...(19): siRNA sense strand
uaccagcuuugacaauaca

SEQ ID NO: 848041 - RNA, 19 nt, Homo sapiens
  misc_RNA (1)...(19): siRNA sense strand
cauuacccgcuucugcuua

SEQ ID NO: 848042 - RNA, 19 nt, Homo sapiens
  misc_RNA (1)...(19): siRNA sense strand
gggaaagcgaugguauuug

SEQ ID NO: 848043 - RNA, 19 nt, Homo sapiens
  misc_RNA (1)...(19): siRNA sense strand
gcuuugacaauacaggaaa

SEQ ID NO: 848044 - RNA, 19 nt, Homo sapiens
  misc_RNA (1)...(19): siRNA sense strand
aggaaaacccggacauaua

SEQ ID NO: 848045 - RNA, 19 nt, Homo sapiens
  misc_RNA (1)...(19): siRNA sense strand
ggacauuuugacauuguua

SEQ ID NO: 848046 - RNA, 19 nt, Homo sapiens
  misc_RNA (1)...(19): siRNA sense strand
ggaaacugaagaggagguu

SEQ ID NO: 848047 - RNA, 19 nt, Homo sapiens
  misc_RNA (1)...(19): siRNA sense strand
ccaauauacaagcaucuuc

SEQ ID NO: 848048 - RNA, 19 nt, Homo sapiens
  misc_RNA (1)...(19): siRNA sense strand
uuaccagcuuugacaauac

SEQ ID NO: 848049 - RNA, 19 nt, Homo sapiens
  misc_RNA (1)...(19): siRNA sense strand
ccacgccgagggaauacuu

SEQ ID NO: 848050 - RNA, 19 nt, Homo sapiens
  misc_RNA (1)...(19): siRNA sense strand
ggggaaagcgaugguauuu

SEQ ID NO: 848051 - RNA, 19 nt, Homo sapiens
  misc_RNA (1)...(19): siRNA sense strand
uaauaguggauccuugaau

SEQ ID NO: 848052 - RNA, 19 nt, Homo sapiens
  misc_RNA (1)...(19): siRNA sense strand
cagaaggcugguguguuua

SEQ ID NO: 848053 - RNA, 19 nt, Homo sapiens
  misc_RNA (1)...(19): siRNA sense strand
ggugcauggguccaauaua

SEQ ID NO: 848054 - RNA, 19 nt, Homo sapiens
  misc_RNA (1)...(19): siRNA sense strand
ugccucaagcacaauaaua

SEQ ID NO: 848055 - RNA, 19 nt, Homo sapiens
  misc_RNA (1)...(19): siRNA sense strand
acuacugccucaagcacaa

SEQ ID NO: 848056 - RNA, 19 nt, Homo sapiens
  misc_RNA (1)...(19): siRNA sense strand
ccgagggaauacuuuaaac

SEQ ID NO: 848057 - RNA, 19 nt, Homo sapiens
  misc_RNA (1)...(19): siRNA sense strand
ugaaaaggccaucagaaau

SEQ ID NO: 848058 - RNA, 19 nt, Homo sapiens
  misc_RNA (1)...(19): siRNA sense strand
ugagcacgcuggacgcuuu

SEQ ID NO: 848059 - RNA, 19 nt, Homo sapiens
  misc_RNA (1)...(19): siRNA sense strand
aggcagaguugcagcagaa

SEQ ID NO: 848060 - RNA, 19 nt, Homo sapiens
  misc_RNA (1)...(19): siRNA sense strand
gcagaagguggaagagaau

SEQ ID NO: 848061 - RNA, 19 nt, Homo sapiens
  misc_RNA (1)...(19): siRNA sense strand
ggaccugaacauaucgaaa

SEQ ID NO: 848062 - RNA, 19 nt, Homo sapiens
  misc_RNA (1)...(19): siRNA sense strand
agcagaagguggaagagaa

SEQ ID NO: 848063 - RNA, 19 nt, Homo sapiens
  misc_RNA (1)...(19): siRNA sense strand
gagcuggaggccugcauug

SEQ ID NO: 848064 - RNA, 19 nt, Homo sapiens
  misc_RNA (1)...(19): siRNA sense strand
gcuccgggaccugaacaua

SEQ ID NO: 848065 - RNA, 19 nt, Homo sapiens
  misc_RNA (1)...(19): siRNA sense strand
ggcuggagcugcagauggu

SEQ ID NO: 848066 - RNA, 19 nt, Homo sapiens
  misc_RNA (1)...(19): siRNA sense strand
gaccugaacauaucgaaaa

SEQ ID NO: 848067 - RNA, 19 nt, Homo sapiens
  misc_RNA (1)...(19): siRNA sense strand
gacuuacuuuggucacuuc

SEQ ID NO: 848068 - RNA, 19 nt, Homo sapiens
  misc_RNA (1)...(19): siRNA sense strand
ggagcuggaggccugcauu

SEQ ID NO: 848069 - RNA, 19 nt, Homo sapiens
  misc_RNA (1)...(19): siRNA sense strand
ugaggaggaggcagaguug

SEQ ID NO: 848070 - RNA, 19 nt, Homo sapiens
  misc_RNA (1)...(19): siRNA sense strand
uccgggaccugaacauauc

SEQ ID NO: 848071 - RNA, 19 nt, Homo sapiens
  misc_RNA (1)...(19): siRNA sense strand
cagcagaagguggaagaga

SEQ ID NO: 848072 - RNA, 19 nt, Homo sapiens
  misc_RNA (1)...(19): siRNA sense strand
gaagguggaagagaaugag

SEQ ID NO: 848073 - RNA, 19 nt, Homo sapiens
  misc_RNA (1)...(19): siRNA sense strand
gaagagagaccuaaugaaa

SEQ ID NO: 848074 - RNA, 19 nt, Homo sapiens
  misc_RNA (1)...(19): siRNA sense strand
caacgaagcugggaaggaa

SEQ ID NO: 848075 - RNA, 19 nt, Homo sapiens
  misc_RNA (1)...(19): siRNA sense strand
ggaaagacaaagaaagaua

SEQ ID NO: 848076 - RNA, 19 nt, Homo sapiens
  misc_RNA (1)...(19): siRNA sense strand
agagagaccuaaugaaauu

SEQ ID NO: 848077 - RNA, 19 nt, Homo sapiens
  misc_RNA (1)...(19): siRNA sense strand
cagagcccauuguguauua

SEQ ID NO: 848078 - RNA, 19 nt, Homo sapiens
  misc_RNA (1)...(19): siRNA sense strand
guggagccaugucaucuua

SEQ ID NO: 848079 - RNA, 19 nt, Homo sapiens
  misc_RNA (1)...(19): siRNA sense strand
agaaagauaugaggaagaa

SEQ ID NO: 848080 - RNA, 19 nt, Homo sapiens
  misc_RNA (1)...(19): siRNA sense strand
ggagccaugucaucuuaaa

SEQ ID NO: 848081 - RNA, 19 nt, Homo sapiens
  misc_RNA (1)...(19): siRNA sense strand
ccuguaagguuaagaauuc

SEQ ID NO: 848082 - RNA, 19 nt, Homo sapiens
  misc_RNA (1)...(19): siRNA sense strand
gaagaagagagaccuaaug

SEQ ID NO: 848083 - RNA, 19 nt, Homo sapiens
  misc_RNA (1)...(19): siRNA sense strand
caaccacccuggacgaguu

SEQ ID NO: 848084 - RNA, 19 nt, Homo sapiens
  misc_RNA (1)...(19): siRNA sense strand
caaagaaagauaugaggaa

SEQ ID NO: 848085 - RNA, 19 nt, Homo sapiens
  misc_RNA (1)...(19): siRNA sense strand
acacugagaucaagagagu

SEQ ID NO: 848086 - RNA, 19 nt, Homo sapiens
  misc_RNA (1)...(19): siRNA sense strand
gagcagagccuuccaaacg

SEQ ID NO: 848087 - RNA, 19 nt, Homo sapiens
  misc_RNA (1)...(19): siRNA sense strand
gaaaccacacccagcauga

SEQ ID NO: 848088 - RNA, 19 nt, Homo sapiens
  misc_RNA (1)...(19): siRNA sense strand
gaacgucugccucccaaau

SEQ ID NO: 848089 - RNA, 19 nt, Homo sapiens
  misc_RNA (1)...(19): siRNA sense strand
cauccaagcccaaguguga

SEQ ID NO: 848090 - RNA, 19 nt, Homo sapiens
  misc_RNA (1)...(19): siRNA sense strand
gaaaguccaccaugcuaau

SEQ ID NO: 848091 - RNA, 19 nt, Homo sapiens
  misc_RNA (1)...(19): siRNA sense strand
cuaaugaaauucgagaaga

SEQ ID NO: 848092 - RNA, 19 nt, Homo sapiens
  misc_RNA (1)...(19): siRNA sense strand
gaauggcugcucaccgaua

SEQ ID NO: 848093 - RNA, 19 nt, Homo sapiens
  misc_RNA (1)...(19): siRNA sense strand
ggccuuugcuuccaauuuc

SEQ ID NO: 848094 - RNA, 19 nt, Homo sapiens
  misc_RNA (1)...(19): siRNA sense strand
gucgucaugucuacaauaa

SEQ ID NO: 848095 - RNA, 19 nt, Homo sapiens
  misc_RNA (1)...(19): siRNA sense strand
gauaaugaagggaaccaaa

SEQ ID NO: 848096 - RNA, 19 nt, Homo sapiens
  misc_RNA (1)...(19): siRNA sense strand
gaaggaaagacaaagaaag

SEQ ID NO: 848097 - RNA, 19 nt, Homo sapiens
  misc_RNA (1)...(19): siRNA sense strand
aagacacucuggauauuga

SEQ ID NO: 848098 - RNA, 19 nt, Homo sapiens
  misc_RNA (1)...(19): siRNA sense strand
ggaaggagagcugacagaa

SEQ ID NO: 848099 - RNA, 19 nt, Homo sapiens
  misc_RNA (1)...(19): siRNA sense strand
gaaagagggagaggaugaa

SEQ ID NO: 848100 - RNA, 19 nt, Homo sapiens
  misc_RNA (1)...(19): siRNA sense strand
caagagaguggcagaggaa

SEQ ID NO: 848101 - RNA, 19 nt, Homo sapiens
  misc_RNA (1)...(19): siRNA sense strand
ggaagaagagagaccuaau

SEQ ID NO: 848102 - RNA, 19 nt, Homo sapiens
  misc_RNA (1)...(19): siRNA sense strand
gcuggagcccugcugauuu

SEQ ID NO: 848103 - RNA, 19 nt, Homo sapiens
  misc_RNA (1)...(19): siRNA sense strand
cuucuccucuugcuaguuu

SEQ ID NO: 848104 - RNA, 19 nt, Homo sapiens
  misc_RNA (1)...(19): siRNA sense strand
aaagauaugaggaagaaga

SEQ ID NO: 848105 - RNA, 19 nt, Homo sapiens
  misc_RNA (1)...(19): siRNA sense strand
aagaagagagaccuaauga

SEQ ID NO: 848106 - RNA, 19 nt, Homo sapiens
  misc_RNA (1)...(19): siRNA sense strand
cgaaggaaagacaaagaaa

SEQ ID NO: 848107 - RNA, 19 nt, Homo sapiens
  misc_RNA (1)...(19): siRNA sense strand
agaaagagggagaggauga

SEQ ID NO: 848108 - RNA, 19 nt, Homo sapiens
  misc_RNA (1)...(19): siRNA sense strand
cgucaugucuacaauaacu

SEQ ID NO: 848109 - RNA, 19 nt, Homo sapiens
  misc_RNA (1)...(19): siRNA sense strand
uaacuugacugaggaacag

SEQ ID NO: 848110 - RNA, 19 nt, Homo sapiens
  misc_RNA (1)...(19): siRNA sense strand
gaaggagagcugacagaag

SEQ ID NO: 848111 - RNA, 19 nt, Homo sapiens
  misc_RNA (1)...(19): siRNA sense strand
aaggaaagacaaagaaaga

SEQ ID NO: 848112 - RNA, 19 nt, Homo sapiens
  misc_RNA (1)...(19): siRNA sense strand
gcagcgaauccgagagaaa

SEQ ID NO: 848113 - RNA, 19 nt, Homo sapiens
  misc_RNA (1)...(19): siRNA sense strand
aauggcugcucaccgauaa

SEQ ID NO: 848114 - RNA, 19 nt, Homo sapiens
  misc_RNA (1)...(19): siRNA sense strand
gugcacagcaggcaacgaa

SEQ ID NO: 848115 - RNA, 19 nt, Homo sapiens
  misc_RNA (1)...(19): siRNA sense strand
gaugccuccuugcagauug

SEQ ID NO: 848116 - RNA, 19 nt, Homo sapiens
  misc_RNA (1)...(19): siRNA sense strand
agaaggaagugaccugacu

SEQ ID NO: 848117 - RNA, 19 nt, Homo sapiens
  misc_RNA (1)...(19): siRNA sense strand
ugaccugacuuugcagugu

SEQ ID NO: 848118 - RNA, 19 nt, Homo sapiens
  misc_RNA (1)...(19): siRNA sense strand
agaaaguccaccaugcuaa

SEQ ID NO: 848119 - RNA, 19 nt, Homo sapiens
  misc_RNA (1)...(19): siRNA sense strand
gcaacgaagcugggaagga

SEQ ID NO: 848120 - RNA, 19 nt, Homo sapiens
  misc_RNA (1)...(19): siRNA sense strand
aaaagacacucuggauauu

SEQ ID NO: 848121 - RNA, 19 nt, Homo sapiens
  misc_RNA (1)...(19): siRNA sense strand
ugcagaaucuuaccauguc

SEQ ID NO: 848122 - RNA, 19 nt, Homo sapiens
  misc_RNA (1)...(19): siRNA sense strand
ccaaaagcccgucuuguga

SEQ ID NO: 848123 - RNA, 19 nt, Homo sapiens
  misc_RNA (1)...(19): siRNA sense strand
ucgagaagaugcugaagcu

SEQ ID NO: 848124 - RNA, 19 nt, Homo sapiens
  misc_RNA (1)...(19): siRNA sense strand
aagagagaccuaaugaaau

SEQ ID NO: 848125 - RNA, 19 nt, Homo sapiens
  misc_RNA (1)...(19): siRNA sense strand
aagaaaguccaccaugcua

SEQ ID NO: 848126 - RNA, 19 nt, Homo sapiens
  misc_RNA (1)...(19): siRNA sense strand
ccgaaggaaagacaaagaa

SEQ ID NO: 848127 - RNA, 19 nt, Homo sapiens
  misc_RNA (1)...(19): siRNA sense strand
gaggaagaagagagaccua

SEQ ID NO: 848128 - RNA, 19 nt, Homo sapiens
  misc_RNA (1)...(19): siRNA sense strand
aaagacacucuggauauug

SEQ ID NO: 848129 - RNA, 19 nt, Homo sapiens
  misc_RNA (1)...(19): siRNA sense strand
ggagagcugacagaaggaa

SEQ ID NO: 848130 - RNA, 19 nt, Homo sapiens
  misc_RNA (1)...(19): siRNA sense strand
gcugcucaccgauaaugaa

SEQ ID NO: 848131 - RNA, 19 nt, Homo sapiens
  misc_RNA (1)...(19): siRNA sense strand
cagagcagagccuuccaaa

SEQ ID NO: 848132 - RNA, 19 nt, Homo sapiens
  misc_RNA (1)...(19): siRNA sense strand
gaguggccuuugcuuccaa

SEQ ID NO: 848133 - RNA, 19 nt, Homo sapiens
  misc_RNA (1)...(19): siRNA sense strand
aaacccagcuccucuuccu

SEQ ID NO: 848134 - RNA, 19 nt, Homo sapiens
  misc_RNA (1)...(19): siRNA sense strand
agagaaagagggagaggau

SEQ ID NO: 848135 - RNA, 19 nt, Homo sapiens
  misc_RNA (1)...(19): siRNA sense strand
gaccauccaagcccaagug

SEQ ID NO: 848136 - RNA, 19 nt, Homo sapiens
  misc_RNA (1)...(19): siRNA sense strand
agacaaagaaagauaugag

SEQ ID NO: 848137 - RNA, 19 nt, Homo sapiens
  misc_RNA (1)...(19): siRNA sense strand
ccucugaagcccagugaug

SEQ ID NO: 848138 - RNA, 19 nt, Homo sapiens
  misc_RNA (1)...(19): siRNA sense strand
acaaagcaucggcaugguu

SEQ ID NO: 848139 - RNA, 19 nt, Homo sapiens
  misc_RNA (1)...(19): siRNA sense strand
gagaccuaaugaaauucga

SEQ ID NO: 848140 - RNA, 19 nt, Homo sapiens
  misc_RNA (1)...(19): siRNA sense strand
ccagucgucaugucuacaa

SEQ ID NO: 848141 - RNA, 19 nt, Homo sapiens
  misc_RNA (1)...(19): siRNA sense strand
augcuaaucugaccaaagc

SEQ ID NO: 848142 - RNA, 19 nt, Homo sapiens
  misc_RNA (1)...(19): siRNA sense strand
aaaagcccgucuugugaaa

SEQ ID NO: 848143 - RNA, 19 nt, Homo sapiens
  misc_RNA (1)...(19): siRNA sense strand
agaagagagaccuaaugaa

SEQ ID NO: 848144 - RNA, 19 nt, Homo sapiens
  misc_RNA (1)...(19): siRNA sense strand
cagcgaauccgagagaaag

SEQ ID NO: 848145 - RNA, 19 nt, Homo sapiens
  misc_RNA (1)...(19): siRNA sense strand
gagaugccuccuugcagau

SEQ ID NO: 848146 - RNA, 19 nt, Homo sapiens
  misc_RNA (1)...(19): siRNA sense strand
caaaagcccgucuugugaa

SEQ ID NO: 848147 - RNA, 19 nt, Homo sapiens
  misc_RNA (1)...(19): siRNA sense strand
ccuccuccuucuccucuug

SEQ ID NO: 848148 - RNA, 19 nt, Homo sapiens
  misc_RNA (1)...(19): siRNA sense strand
ucuacaauaacuugacuga

SEQ ID NO: 848149 - RNA, 19 nt, Homo sapiens
  misc_RNA (1)...(19): siRNA sense strand
ccuacuauguuggaaccuu

SEQ ID NO: 848150 - RNA, 19 nt, Homo sapiens
  misc_RNA (1)...(19): siRNA sense strand
gagagaagcuaguaaauac

SEQ ID NO: 848151 - RNA, 19 nt, Homo sapiens
  misc_RNA (1)...(19): siRNA sense strand
gaucguaauuggcuguuga

SEQ ID NO: 848152 - RNA, 19 nt, Homo sapiens
  misc_RNA (1)...(19): siRNA sense strand
uauggagacuggauuguuu

SEQ ID NO: 848153 - RNA, 19 nt, Homo sapiens
  misc_RNA (1)...(19): siRNA sense strand
gacaggacauuguuuaucu

SEQ ID NO: 848154 - RNA, 19 nt, Homo sapiens
  misc_RNA (1)...(19): siRNA sense strand
caaugccacuuucaggaua

SEQ ID NO: 848155 - RNA, 19 nt, Homo sapiens
  misc_RNA (1)...(19): siRNA sense strand
gaagagaaggcgagagaau

SEQ ID NO: 848156 - RNA, 19 nt, Homo sapiens
  misc_RNA (1)...(19): siRNA sense strand
gcaguggucuaaggaagaa

SEQ ID NO: 848157 - RNA, 19 nt, Homo sapiens
  misc_RNA (1)...(19): siRNA sense strand
aagagcaaguuaaguauga

SEQ ID NO: 848158 - RNA, 19 nt, Homo sapiens
  misc_RNA (1)...(19): siRNA sense strand
ggacacauuuuacaagauu

SEQ ID NO: 848159 - RNA, 19 nt, Homo sapiens
  misc_RNA (1)...(19): siRNA sense strand
uggaagagcaaguuaagua

SEQ ID NO: 848160 - RNA, 19 nt, Homo sapiens
  misc_RNA (1)...(19): siRNA sense strand
gaaaaguucugguucuuca

SEQ ID NO: 848161 - RNA, 19 nt, Homo sapiens
  misc_RNA (1)...(19): siRNA sense strand
guaaauacugggacacauu

SEQ ID NO: 848162 - RNA, 19 nt, Homo sapiens
  misc_RNA (1)...(19): siRNA sense strand
ggaagagcaaguuaaguau

SEQ ID NO: 848163 - RNA, 19 nt, Homo sapiens
  misc_RNA (1)...(19): siRNA sense strand
uguaugugaugauggcuua

SEQ ID NO: 848164 - RNA, 19 nt, Homo sapiens
  misc_RNA (1)...(19): siRNA sense strand
agagagaagcuaguaaaua

SEQ ID NO: 848165 - RNA, 19 nt, Homo sapiens
  misc_RNA (1)...(19): siRNA sense strand
gaagagcaaguuaaguaug

SEQ ID NO: 848166 - RNA, 19 nt, Homo sapiens
  misc_RNA (1)...(19): siRNA sense strand
gaugauggcuuaccuuacc

SEQ ID NO: 848167 - RNA, 19 nt, Homo sapiens
  misc_RNA (1)...(19): siRNA sense strand
agaaugcacuguccuacug

SEQ ID NO: 848168 - RNA, 19 nt, Homo sapiens
  misc_RNA (1)...(19): siRNA sense strand
uaaagucacacucguccua

SEQ ID NO: 848169 - RNA, 19 nt, Homo sapiens
  misc_RNA (1)...(19): siRNA sense strand
ugagagagaagcuaguaaa

SEQ ID NO: 848170 - RNA, 19 nt, Homo sapiens
  misc_RNA (1)...(19): siRNA sense strand
gugaugauggcuuaccuua

SEQ ID NO: 848171 - RNA, 19 nt, Homo sapiens
  misc_RNA (1)...(19): siRNA sense strand
cuacaaaucguuucucaag

SEQ ID NO: 848172 - RNA, 19 nt, Homo sapiens
  misc_RNA (1)...(19): siRNA sense strand
gagagagaagcuaguaaau

SEQ ID NO: 848173 - RNA, 19 nt, Homo sapiens
  misc_RNA (1)...(19): siRNA sense strand
cggaguccuuucuguauug

SEQ ID NO: 848174 - RNA, 19 nt, Homo sapiens
  misc_RNA (1)...(19): siRNA sense strand
gcaaugccacuuucaggau

SEQ ID NO: 848175 - RNA, 19 nt, Homo sapiens
  misc_RNA (1)...(19): siRNA sense strand
cugaaauucuuccaguuga

SEQ ID NO: 848176 - RNA, 19 nt, Homo sapiens
  misc_RNA (1)...(19): siRNA sense strand
gcaaguuaaguaugagaga

SEQ ID NO: 848177 - RNA, 19 nt, Homo sapiens
  misc_RNA (1)...(19): siRNA sense strand
cuacagagcaacccagugu

SEQ ID NO: 848178 - RNA, 19 nt, Homo sapiens
  misc_RNA (1)...(19): siRNA sense strand
caugauguaugugaugaug

SEQ ID NO: 848179 - RNA, 19 nt, Homo sapiens
  misc_RNA (1)...(19): siRNA sense strand
ucaagaaugcacuguccua

SEQ ID NO: 848180 - RNA, 19 nt, Homo sapiens
  misc_RNA (1)...(19): siRNA sense strand
acagagcaacccaguguuu

SEQ ID NO: 848181 - RNA, 19 nt, Homo sapiens
  misc_RNA (1)...(19): siRNA sense strand
guccuacugugccugauga

SEQ ID NO: 848182 - RNA, 19 nt, Homo sapiens
  misc_RNA (1)...(19): siRNA sense strand
gaagaagcagcagccagaa

SEQ ID NO: 848183 - RNA, 19 nt, Homo sapiens
  misc_RNA (1)...(19): siRNA sense strand
ccggaguccuuucuguauu

SEQ ID NO: 848184 - RNA, 19 nt, Homo sapiens
  misc_RNA (1)...(19): siRNA sense strand
gauacuagagguugguugu

SEQ ID NO: 848185 - RNA, 19 nt, Homo sapiens
  misc_RNA (1)...(19): siRNA sense strand
gaaauucuuccaguugauc

SEQ ID NO: 848186 - RNA, 19 nt, Homo sapiens
  misc_RNA (1)...(19): siRNA sense strand
uacaaaucguuucucaaga

SEQ ID NO: 848187 - RNA, 19 nt, Homo sapiens
  misc_RNA (1)...(19): siRNA sense strand
uuugugcucucuucuauuc

SEQ ID NO: 848188 - RNA, 19 nt, Homo sapiens
  misc_RNA (1)...(19): siRNA sense strand
ugaaauucuuccaguugau

SEQ ID NO: 848189 - RNA, 19 nt, Homo sapiens
  misc_RNA (1)...(19): siRNA sense strand
uuucaaggaucguaauugg

SEQ ID NO: 848190 - RNA, 19 nt, Homo sapiens
  misc_RNA (1)...(19): siRNA sense strand
gaaggcgagagaaucauca

SEQ ID NO: 848191 - RNA, 19 nt, Homo sapiens
  misc_RNA (1)...(19): siRNA sense strand
uuuccaaccuagacucuga

SEQ ID NO: 848192 - RNA, 19 nt, Homo sapiens
  misc_RNA (1)...(19): siRNA sense strand
agagaaggcgagagaauca

SEQ ID NO: 848193 - RNA, 19 nt, Homo sapiens
  misc_RNA (1)...(19): siRNA sense strand
uggcuuaccuuacccuuuu

SEQ ID NO: 848194 - RNA, 19 nt, Homo sapiens
  misc_RNA (1)...(19): siRNA sense strand
ccugaaauucuuccaguug

SEQ ID NO: 848195 - RNA, 19 nt, Homo sapiens
  misc_RNA (1)...(19): siRNA sense strand
ucuuugugcucucuucuau

SEQ ID NO: 848196 - RNA, 19 nt, Homo sapiens
  misc_RNA (1)...(19): siRNA sense strand
uaugagagagaagcuagua

SEQ ID NO: 848197 - RNA, 19 nt, Homo sapiens
  misc_RNA (1)...(19): siRNA sense strand
gagcaaguuaaguaugaga

SEQ ID NO: 848198 - RNA, 19 nt, Homo sapiens
  misc_RNA (1)...(19): siRNA sense strand
gauguuauucuccuugucu

SEQ ID NO: 848199 - RNA, 19 nt, Homo sapiens
  misc_RNA (1)...(19): siRNA sense strand
cuguggagcucguaaaguc

SEQ ID NO: 848200 - RNA, 19 nt, Homo sapiens
  misc_RNA (1)...(19): siRNA sense strand
ggaguccuuucuguauugu

SEQ ID NO: 848201 - RNA, 19 nt, Homo sapiens
  misc_RNA (1)...(19): siRNA sense strand
aguccuuucuguauuguug

SEQ ID NO: 848202 - RNA, 19 nt, Homo sapiens
  misc_RNA (1)...(19): siRNA sense strand
aaacuagugcuacaaaucg

SEQ ID NO: 848203 - RNA, 19 nt, Homo sapiens
  misc_RNA (1)...(19): siRNA sense strand
guuauucuccuugucuuug

SEQ ID NO: 848204 - RNA, 19 nt, Homo sapiens
  misc_RNA (1)...(19): siRNA sense strand
gguuguggagcuggaaaua

SEQ ID NO: 848205 - RNA, 19 nt, Homo sapiens
  misc_RNA (1)...(19): siRNA sense strand
ggucaaagcaaaacagaau

SEQ ID NO: 848206 - RNA, 19 nt, Homo sapiens
  misc_RNA (1)...(19): siRNA sense strand
ugccuuuguucaugaugua

SEQ ID NO: 848207 - RNA, 19 nt, Homo sapiens
  misc_RNA (1)...(19): siRNA sense strand
cugaagagaaggcgagaga

SEQ ID NO: 848208 - RNA, 19 nt, Homo sapiens
  misc_RNA (1)...(19): siRNA sense strand
caggacauuguuuaucuga

SEQ ID NO: 848209 - RNA, 19 nt, Homo sapiens
  misc_RNA (1)...(19): siRNA sense strand
ugacaggacauuguuuauc

SEQ ID NO: 848210 - RNA, 19 nt, Homo sapiens
  misc_RNA (1)...(19): siRNA sense strand
ggaucguaauuggcuguug

SEQ ID NO: 848211 - RNA, 19 nt, Homo sapiens
  misc_RNA (1)...(19): siRNA sense strand
uuguggagcuggaaauagu

SEQ ID NO: 848212 - RNA, 19 nt, Homo sapiens
  misc_RNA (1)...(19): siRNA sense strand
uucagagggucaaagcaaa

SEQ ID NO: 848213 - RNA, 19 nt, Homo sapiens
  misc_RNA (1)...(19): siRNA sense strand
gaaugcacuguccuacugu

SEQ ID NO: 848214 - RNA, 19 nt, Homo sapiens
  misc_RNA (1)...(19): siRNA sense strand
cuagugcuacaaaucguuu

SEQ ID NO: 848215 - RNA, 19 nt, Homo sapiens
  misc_RNA (1)...(19): siRNA sense strand
ggauguuauucuccuuguc

SEQ ID NO: 848216 - RNA, 19 nt, Homo sapiens
  misc_RNA (1)...(19): siRNA sense strand
ggagcuggaaauagugugu

SEQ ID NO: 848217 - RNA, 19 nt, Homo sapiens
  misc_RNA (1)...(19): siRNA sense strand
ggaccuauggagacuggau

SEQ ID NO: 848218 - RNA, 19 nt, Homo sapiens
  misc_RNA (1)...(19): siRNA sense strand
cuucagagggucaaagcaa

SEQ ID NO: 848219 - RNA, 19 nt, Homo sapiens
  misc_RNA (1)...(19): siRNA sense strand
gaccuauggagacuggauu

SEQ ID NO: 848220 - RNA, 19 nt, Homo sapiens
  misc_RNA (1)...(19): siRNA sense strand
guucaugauguaugugaug

SEQ ID NO: 848221 - RNA, 19 nt, Homo sapiens
  misc_RNA (1)...(19): siRNA sense strand
gagaagcguugcaauuuga

SEQ ID NO: 848222 - RNA, 19 nt, Homo sapiens
  misc_RNA (1)...(19): siRNA sense strand
gcacacagaugaagaaggu

SEQ ID NO: 848223 - RNA, 19 nt, Homo sapiens
  misc_RNA (1)...(19): siRNA sense strand
gggaggaaaugacagauga

SEQ ID NO: 848224 - RNA, 19 nt, Homo sapiens
  misc_RNA (1)...(19): siRNA sense strand
gaugaagaagguuauguua

SEQ ID NO: 848225 - RNA, 19 nt, Homo sapiens
  misc_RNA (1)...(19): siRNA sense strand
gcaaagccaaggagaagaa

SEQ ID NO: 848226 - RNA, 19 nt, Homo sapiens
  misc_RNA (1)...(19): siRNA sense strand
gauagaaacggguugaaug

SEQ ID NO: 848227 - RNA, 19 nt, Homo sapiens
  misc_RNA (1)...(19): siRNA sense strand
gcuaugaagugcaguugga

SEQ ID NO: 848228 - RNA, 19 nt, Homo sapiens
  misc_RNA (1)...(19): siRNA sense strand
cagagaagcguugcaauuu

SEQ ID NO: 848229 - RNA, 19 nt, Homo sapiens
  misc_RNA (1)...(19): siRNA sense strand
aaacgaauaugcaaaccau

SEQ ID NO: 848230 - RNA, 19 nt, Homo sapiens
  misc_RNA (1)...(19): siRNA sense strand
gggagaaagucaagcaaag

SEQ ID NO: 848231 - RNA, 19 nt, Homo sapiens
  misc_RNA (1)...(19): siRNA sense strand
gggaugaaguccuguacug

SEQ ID NO: 848232 - RNA, 19 nt, Homo sapiens
  misc_RNA (1)...(19): siRNA sense strand
agagaagcguugcaauuug

SEQ ID NO: 848233 - RNA, 19 nt, Homo sapiens
  misc_RNA (1)...(19): siRNA sense strand
gagagaaacgggaggaaau

SEQ ID NO: 848234 - RNA, 19 nt, Homo sapiens
  misc_RNA (1)...(19): siRNA sense strand
gaagugcaguuggaaagca

SEQ ID NO: 848235 - RNA, 19 nt, Homo sapiens
  misc_RNA (1)...(19): siRNA sense strand
ucagagaagcguugcaauu

SEQ ID NO: 848236 - RNA, 19 nt, Homo sapiens
  misc_RNA (1)...(19): siRNA sense strand
ccaaggagaagaagcagaa

SEQ ID NO: 848237 - RNA, 19 nt, Homo sapiens
  misc_RNA (1)...(19): siRNA sense strand
gccaacagcacacagauga

SEQ ID NO: 848238 - RNA, 19 nt, Homo sapiens
  misc_RNA (1)...(19): siRNA sense strand
acacagaugaagaagguua

SEQ ID NO: 848239 - RNA, 19 nt, Homo sapiens
  misc_RNA (1)...(19): siRNA sense strand
ucccaguguucaagaaaua

SEQ ID NO: 848240 - RNA, 19 nt, Homo sapiens
  misc_RNA (1)...(19): siRNA sense strand
ggaaaggccuggggaaguu

SEQ ID NO: 848241 - RNA, 19 nt, Homo sapiens
  misc_RNA (1)...(19): siRNA sense strand
gaaguccuguacugcuaug

SEQ ID NO: 848242 - RNA, 19 nt, Homo sapiens
  misc_RNA (1)...(19): siRNA sense strand
gaauaugcaaaccauguau

SEQ ID NO: 848243 - RNA, 19 nt, Homo sapiens
  misc_RNA (1)...(19): siRNA sense strand
gaaacgggaggaaaugaca

SEQ ID NO: 848244 - RNA, 19 nt, Homo sapiens
  misc_RNA (1)...(19): siRNA sense strand
cgaauaugcaaaccaugua

SEQ ID NO: 848245 - RNA, 19 nt, Homo sapiens
  misc_RNA (1)...(19): siRNA sense strand
agaaacggguugaaugucu

SEQ ID NO: 848246 - RNA, 19 nt, Homo sapiens
  misc_RNA (1)...(19): siRNA sense strand
gagaaacgggaggaaauga

SEQ ID NO: 848247 - RNA, 19 nt, Homo sapiens
  misc_RNA (1)...(19): siRNA sense strand
caagcaaagccaaggagaa

SEQ ID NO: 848248 - RNA, 19 nt, Homo sapiens
  misc_RNA (1)...(19): siRNA sense strand
ggauugcuccuaugagauc

SEQ ID NO: 848249 - RNA, 19 nt, Homo sapiens
  misc_RNA (1)...(19): siRNA sense strand
ggagcgagcagccauggau

SEQ ID NO: 848250 - RNA, 19 nt, Homo sapiens
  misc_RNA (1)...(19): siRNA sense strand
cagaugaccgagccuggua

SEQ ID NO: 848251 - RNA, 19 nt, Homo sapiens
  misc_RNA (1)...(19): siRNA sense strand
gaagcguugcaauuugaaa

SEQ ID NO: 848252 - RNA, 19 nt, Homo sapiens
  misc_RNA (1)...(19): siRNA sense strand
cgagagaaacgggaggaaa

SEQ ID NO: 848253 - RNA, 19 nt, Homo sapiens
  misc_RNA (1)...(19): siRNA sense strand
caacagcacacagaugaag

SEQ ID NO: 848254 - RNA, 19 nt, Homo sapiens
  misc_RNA (1)...(19): siRNA sense strand
ggaaggaccgagagaaacg

SEQ ID NO: 848255 - RNA, 19 nt, Homo sapiens
  misc_RNA (1)...(19): siRNA sense strand
cuccgucccuguugccuuu

SEQ ID NO: 848256 - RNA, 19 nt, Homo sapiens
  misc_RNA (1)...(19): siRNA sense strand
ccuaccaguucuucagaga

SEQ ID NO: 848257 - RNA, 19 nt, Homo sapiens
  misc_RNA (1)...(19): siRNA sense strand
gaaguuccucauacagauc

SEQ ID NO: 848258 - RNA, 19 nt, Homo sapiens
  misc_RNA (1)...(19): siRNA sense strand
augaaguccuguacugcua

SEQ ID NO: 848259 - RNA, 19 nt, Homo sapiens
  misc_RNA (1)...(19): siRNA sense strand
agccauggaugccguuugu

SEQ ID NO: 848260 - RNA, 19 nt, Homo sapiens
  misc_RNA (1)...(19): siRNA sense strand
gaccugaccaaaacgaaua

SEQ ID NO: 848261 - RNA, 19 nt, Homo sapiens
  misc_RNA (1)...(19): siRNA sense strand
agaugaagaagguuauguu

SEQ ID NO: 848262 - RNA, 19 nt, Homo sapiens
  misc_RNA (1)...(19): siRNA sense strand
auagaaacggguugaaugu

SEQ ID NO: 848263 - RNA, 19 nt, Homo sapiens
  misc_RNA (1)...(19): siRNA sense strand
cuggaaggaccgagagaaa

SEQ ID NO: 848264 - RNA, 19 nt, Homo sapiens
  misc_RNA (1)...(19): siRNA sense strand
gagccggaggaccaaguuu

SEQ ID NO: 848265 - RNA, 19 nt, Homo sapiens
  misc_RNA (1)...(19): siRNA sense strand
guccuguacugcuaugaag

SEQ ID NO: 848266 - RNA, 19 nt, Homo sapiens
  misc_RNA (1)...(19): siRNA sense strand
ggagaaagucaagcaaagc

SEQ ID NO: 848267 - RNA, 19 nt, Homo sapiens
  misc_RNA (1)...(19): siRNA sense strand
gcaaauacaucgugaauga

SEQ ID NO: 848268 - RNA, 19 nt, Homo sapiens
  misc_RNA (1)...(19): siRNA sense strand
gagcaacccugcacaaaga

SEQ ID NO: 848269 - RNA, 19 nt, Homo sapiens
  misc_RNA (1)...(19): siRNA sense strand
ccacugagcucuucuacga

SEQ ID NO: 848270 - RNA, 19 nt, Homo sapiens
  misc_RNA (1)...(19): siRNA sense strand
acacgcaccuucuccauaa

SEQ ID NO: 848271 - RNA, 19 nt, Homo sapiens
  misc_RNA (1)...(19): siRNA sense strand
ggacauccuucuuaaaguc

SEQ ID NO: 848272 - RNA, 19 nt, Homo sapiens
  misc_RNA (1)...(19): siRNA sense strand
gaaguggaguuuggaguau

SEQ ID NO: 848273 - RNA, 19 nt, Homo sapiens
  misc_RNA (1)...(19): siRNA sense strand
guaaagaagaccugaaguu

SEQ ID NO: 848274 - RNA, 19 nt, Homo sapiens
  misc_RNA (1)...(19): siRNA sense strand
agacacaccucccuggaaa

SEQ ID NO: 848275 - RNA, 19 nt, Homo sapiens
  misc_RNA (1)...(19): siRNA sense strand
guacacagaugaggaaugg

SEQ ID NO: 848276 - RNA, 19 nt, Homo sapiens
  misc_RNA (1)...(19): siRNA sense strand
aagaagaccugaaguugga

SEQ ID NO: 848277 - RNA, 19 nt, Homo sapiens
  misc_RNA (1)...(19): siRNA sense strand
gcacauggcaggacguaga

SEQ ID NO: 848278 - RNA, 19 nt, Homo sapiens
  misc_RNA (1)...(19): siRNA sense strand
gauuccagaugugaaguua

SEQ ID NO: 848279 - RNA, 19 nt, Homo sapiens
  misc_RNA (1)...(19): siRNA sense strand
gaggaaaucaccaucaaug

SEQ ID NO: 848280 - RNA, 19 nt, Homo sapiens
  misc_RNA (1)...(19): siRNA sense strand
uaaagaagaccugaaguug

SEQ ID NO: 848281 - RNA, 19 nt, Homo sapiens
  misc_RNA (1)...(19): siRNA sense strand
ggccagagaaggcacuuua

SEQ ID NO: 848282 - RNA, 19 nt, Homo sapiens
  misc_RNA (1)...(19): siRNA sense strand
gaaguugguucgagguaca

SEQ ID NO: 848283 - RNA, 19 nt, Homo sapiens
  misc_RNA (1)...(19): siRNA sense strand
guccgucccuccagcauuu

SEQ ID NO: 848284 - RNA, 19 nt, Homo sapiens
  misc_RNA (1)...(19): siRNA sense strand
ggcaggacguagacaaaga

SEQ ID NO: 848285 - RNA, 19 nt, Homo sapiens
  misc_RNA (1)...(19): siRNA sense strand
ggagcguggugacauuguu

SEQ ID NO: 848286 - RNA, 19 nt, Homo sapiens
  misc_RNA (1)...(19): siRNA sense strand
ggagaaucccgaccuggaa

SEQ ID NO: 848287 - RNA, 19 nt, Homo sapiens
  misc_RNA (1)...(19): siRNA sense strand
ucaacgaguucaucagcaa

SEQ ID NO: 848288 - RNA, 19 nt, Homo sapiens
  misc_RNA (1)...(19): siRNA sense strand
gaccagaucccggaguuga

SEQ ID NO: 848289 - RNA, 19 nt, Homo sapiens
  misc_RNA (1)...(19): siRNA sense strand
gggacauccuucuuaaagu

SEQ ID NO: 848290 - RNA, 19 nt, Homo sapiens
  misc_RNA (1)...(19): siRNA sense strand
gagaaucccgaccuggaaa

SEQ ID NO: 848291 - RNA, 19 nt, Homo sapiens
  misc_RNA (1)...(19): siRNA sense strand
gacacgcaccuucuccaua

SEQ ID NO: 848292 - RNA, 19 nt, Homo sapiens
  misc_RNA (1)...(19): siRNA sense strand
gaaaaguuccccaaguuug

SEQ ID NO: 848293 - RNA, 19 nt, Homo sapiens
  misc_RNA (1)...(19): siRNA sense strand
agaaguggaguuuggagua

SEQ ID NO: 848294 - RNA, 19 nt, Homo sapiens
  misc_RNA (1)...(19): siRNA sense strand
caagggcggaccaugguuu

SEQ ID NO: 848295 - RNA, 19 nt, Homo sapiens
  misc_RNA (1)...(19): siRNA sense strand
ccagagaaggcacuuuaug

SEQ ID NO: 848296 - RNA, 19 nt, Homo sapiens
  misc_RNA (1)...(19): siRNA sense strand
ggaggcccgugauccugaa

SEQ ID NO: 848297 - RNA, 19 nt, Homo sapiens
  misc_RNA (1)...(19): siRNA sense strand
agaggagcguggugacauu

SEQ ID NO: 848298 - RNA, 19 nt, Homo sapiens
  misc_RNA (1)...(19): siRNA sense strand
ggcggaccaugguuugauu

SEQ ID NO: 848299 - RNA, 19 nt, Homo sapiens
  misc_RNA (1)...(19): siRNA sense strand
gagguacacagaugaggaa

SEQ ID NO: 848300 - RNA, 19 nt, Homo sapiens
  misc_RNA (1)...(19): siRNA sense strand
gcucagcaccagcucuuug

SEQ ID NO: 848301 - RNA, 19 nt, Homo sapiens
  misc_RNA (1)...(19): siRNA sense strand
cagcaaauacaucgugaau

SEQ ID NO: 848302 - RNA, 19 nt, Homo sapiens
  misc_RNA (1)...(19): siRNA sense strand
uuccagaugugaaguuaga

SEQ ID NO: 848303 - RNA, 19 nt, Homo sapiens
  misc_RNA (1)...(19): siRNA sense strand
ggaggaaaucaccaucaau

SEQ ID NO: 848304 - RNA, 19 nt, Homo sapiens
  misc_RNA (1)...(19): siRNA sense strand
ggccgugcaugcagaagug

SEQ ID NO: 848305 - RNA, 19 nt, Homo sapiens
  misc_RNA (1)...(19): siRNA sense strand
gcaugcagaaguggaguuu

SEQ ID NO: 848306 - RNA, 19 nt, Homo sapiens
  misc_RNA (1)...(19): siRNA sense strand
cagagaaggcacuuuaugg

SEQ ID NO: 848307 - RNA, 19 nt, Homo sapiens
  misc_RNA (1)...(19): siRNA sense strand
gaggaggaaaucaccauca

SEQ ID NO: 848308 - RNA, 19 nt, Homo sapiens
  misc_RNA (1)...(19): siRNA sense strand
ccagaugugaaguuagaaa

SEQ ID NO: 848309 - RNA, 19 nt, Homo sapiens
  misc_RNA (1)...(19): siRNA sense strand
aggaggaaaucaccaucaa

SEQ ID NO: 848310 - RNA, 19 nt, Homo sapiens
  misc_RNA (1)...(19): siRNA sense strand
gguucgagguacacagaug

SEQ ID NO: 848311 - RNA, 19 nt, Homo sapiens
  misc_RNA (1)...(19): siRNA sense strand
caacgaguucaucagcaaa

SEQ ID NO: 848312 - RNA, 19 nt, Homo sapiens
  misc_RNA (1)...(19): siRNA sense strand
ccggugaaauacuggcauu

SEQ ID NO: 848313 - RNA, 19 nt, Homo sapiens
  misc_RNA (1)...(19): siRNA sense strand
gcaacccugcacaaagaaa

SEQ ID NO: 848314 - RNA, 19 nt, Homo sapiens
  misc_RNA (1)...(19): siRNA sense strand
caucggcugccuccugaaa

SEQ ID NO: 848315 - RNA, 19 nt, Homo sapiens
  misc_RNA (1)...(19): siRNA sense strand
cuggagagauccuguucau

SEQ ID NO: 848316 - RNA, 19 nt, Homo sapiens
  misc_RNA (1)...(19): siRNA sense strand
gagcguggugacauuguug

SEQ ID NO: 848317 - RNA, 19 nt, Homo sapiens
  misc_RNA (1)...(19): siRNA sense strand
acgaguucaucagcaaaua

SEQ ID NO: 848318 - RNA, 19 nt, Homo sapiens
  misc_RNA (1)...(19): siRNA sense strand
cagagcaacccugcacaaa

SEQ ID NO: 848319 - RNA, 19 nt, Homo sapiens
  misc_RNA (1)...(19): siRNA sense strand
ugacaugggccugcugaug

SEQ ID NO: 848320 - RNA, 19 nt, Homo sapiens
  misc_RNA (1)...(19): siRNA sense strand
aaguggaguuuggaguaua

SEQ ID NO: 848321 - RNA, 19 nt, Homo sapiens
  misc_RNA (1)...(19): siRNA sense strand
gagaggagcguggugacau

SEQ ID NO: 848322 - RNA, 19 nt, Homo sapiens
  misc_RNA (1)...(19): siRNA sense strand
ggaaccaucuccccacuac

SEQ ID NO: 848323 - RNA, 19 nt, Homo sapiens
  misc_RNA (1)...(19): siRNA sense strand
gugaaauacuggcauuacg

SEQ ID NO: 848324 - RNA, 19 nt, Homo sapiens
  misc_RNA (1)...(19): siRNA sense strand
ccagagcaacccugcacaa

SEQ ID NO: 848325 - RNA, 19 nt, Homo sapiens
  misc_RNA (1)...(19): siRNA sense strand
gcauuucagggagcaguuu

SEQ ID NO: 848326 - RNA, 19 nt, Homo sapiens
  misc_RNA (1)...(19): siRNA sense strand
gcaagggcggaccaugguu

SEQ ID NO: 848327 - RNA, 19 nt, Homo sapiens
  misc_RNA (1)...(19): siRNA sense strand
cagacacaccucccuggaa

SEQ ID NO: 848328 - RNA, 19 nt, Homo sapiens
  misc_RNA (1)...(19): siRNA sense strand
cgugcgggcucuggauuug

SEQ ID NO: 848329 - RNA, 19 nt, Homo sapiens
  misc_RNA (1)...(19): siRNA sense strand
gaguucaucagcaaauaca

SEQ ID NO: 848330 - RNA, 19 nt, Homo sapiens
  misc_RNA (1)...(19): siRNA sense strand
aguggaguuuggaguauau

SEQ ID NO: 848331 - RNA, 19 nt, Homo sapiens
  misc_RNA (1)...(19): siRNA sense strand
gcaggagggacgagugucu

SEQ ID NO: 848332 - RNA, 19 nt, Homo sapiens
  misc_RNA (1)...(19): siRNA sense strand
acacaccucccuggaaaga

SEQ ID NO: 848333 - RNA, 19 nt, Homo sapiens
  misc_RNA (1)...(19): siRNA sense strand
ggaccaugguuugauucca

SEQ ID NO: 848334 - RNA, 19 nt, Homo sapiens
  misc_RNA (1)...(19): siRNA sense strand
ggugaaauacuggcauuac

SEQ ID NO: 848335 - RNA, 19 nt, Homo sapiens
  misc_RNA (1)...(19): siRNA sense strand
gggcacauggcaggacgua

SEQ ID NO: 848336 - RNA, 19 nt, Homo sapiens
  misc_RNA (1)...(19): siRNA sense strand
gcucuguacccucaugaca

SEQ ID NO: 848337 - RNA, 19 nt, Homo sapiens
  misc_RNA (1)...(19): siRNA sense strand
guucgagguacacagauga

SEQ ID NO: 848338 - RNA, 19 nt, Homo sapiens
  misc_RNA (1)...(19): siRNA sense strand
augcagaaguggaguuugg

SEQ ID NO: 848339 - RNA, 19 nt, Homo sapiens
  misc_RNA (1)...(19): siRNA sense strand
gcagagcagcgaggugauc

SEQ ID NO: 848340 - RNA, 19 nt, Homo sapiens
  misc_RNA (1)...(19): siRNA sense strand
gcuccugccgcacaguaaa

SEQ ID NO: 848341 - RNA, 19 nt, Homo sapiens
  misc_RNA (1)...(19): siRNA sense strand
ggagaggagcguggugaca

SEQ ID NO: 848342 - RNA, 19 nt, Homo sapiens
  misc_RNA (1)...(19): siRNA sense strand
gaggagcguggugacauug

SEQ ID NO: 848343 - RNA, 19 nt, Homo sapiens
  misc_RNA (1)...(19): siRNA sense strand
cugaaagcccugugucugu

SEQ ID NO: 848344 - RNA, 19 nt, Homo sapiens
  misc_RNA (1)...(19): siRNA sense strand
caguaaagaagaccugaag

SEQ ID NO: 848345 - RNA, 19 nt, Homo sapiens
  misc_RNA (1)...(19): siRNA sense strand
ugaaauacuggcauuacgu

SEQ ID NO: 848346 - RNA, 19 nt, Homo sapiens
  misc_RNA (1)...(19): siRNA sense strand
guucaucagcaaauacauc

SEQ ID NO: 848347 - RNA, 19 nt, Homo sapiens
  misc_RNA (1)...(19): siRNA sense strand
ucaaagcccucaacaaaua

SEQ ID NO: 848348 - RNA, 19 nt, Homo sapiens
  misc_RNA (1)...(19): siRNA sense strand
gaaaagagcuaaaggaaaa

SEQ ID NO: 848349 - RNA, 19 nt, Homo sapiens
  misc_RNA (1)...(19): siRNA sense strand
gggaacagauauuuacuua

SEQ ID NO: 848350 - RNA, 19 nt, Homo sapiens
  misc_RNA (1)...(19): siRNA sense strand
ucacagcacuccuuacaua

SEQ ID NO: 848351 - RNA, 19 nt, Homo sapiens
  misc_RNA (1)...(19): siRNA sense strand
gaaaucagguuacugugaa

SEQ ID NO: 848352 - RNA, 19 nt, Homo sapiens
  misc_RNA (1)...(19): siRNA sense strand
aaagaaagcuugacucaga

SEQ ID NO: 848353 - RNA, 19 nt, Homo sapiens
  misc_RNA (1)...(19): siRNA sense strand
gaacagcacgaucaaauaa

SEQ ID NO: 848354 - RNA, 19 nt, Homo sapiens
  misc_RNA (1)...(19): siRNA sense strand
gcucaagaaucaacuuaua

SEQ ID NO: 848355 - RNA, 19 nt, Homo sapiens
  misc_RNA (1)...(19): siRNA sense strand
gauggaaggucauguuauu

SEQ ID NO: 848356 - RNA, 19 nt, Homo sapiens
  misc_RNA (1)...(19): siRNA sense strand
gcagcaacauccucucaua

SEQ ID NO: 848357 - RNA, 19 nt, Homo sapiens
  misc_RNA (1)...(19): siRNA sense strand
guacaucccuuccuucaga

SEQ ID NO: 848358 - RNA, 19 nt, Homo sapiens
  misc_RNA (1)...(19): siRNA sense strand
ucagaaagcugccaugaug

SEQ ID NO: 848359 - RNA, 19 nt, Homo sapiens
  misc_RNA (1)...(19): siRNA sense strand
caacuuaaccaacaaauug

SEQ ID NO: 848360 - RNA, 19 nt, Homo sapiens
  misc_RNA (1)...(19): siRNA sense strand
gcaagaaccucuccacucu

SEQ ID NO: 848361 - RNA, 19 nt, Homo sapiens
  misc_RNA (1)...(19): siRNA sense strand
gcaguucuguauuaaguaa

SEQ ID NO: 848362 - RNA, 19 nt, Homo sapiens
  misc_RNA (1)...(19): siRNA sense strand
ggaaagccacagaauauaa

SEQ ID NO: 848363 - RNA, 19 nt, Homo sapiens
  misc_RNA (1)...(19): siRNA sense strand
gcaaaguucuggcccauuc

SEQ ID NO: 848364 - RNA, 19 nt, Homo sapiens
  misc_RNA (1)...(19): siRNA sense strand
caacauccucucauacuua

SEQ ID NO: 848365 - RNA, 19 nt, Homo sapiens
  misc_RNA (1)...(19): siRNA sense strand
caccaucucucucugcuua

SEQ ID NO: 848366 - RNA, 19 nt, Homo sapiens
  misc_RNA (1)...(19): siRNA sense strand
gaaauaaaccuucacaaac

SEQ ID NO: 848367 - RNA, 19 nt, Homo sapiens
  misc_RNA (1)...(19): siRNA sense strand
gaacagauauuuacuuacc

SEQ ID NO: 848368 - RNA, 19 nt, Homo sapiens
  misc_RNA (1)...(19): siRNA sense strand
gaaacagucugcuaccaau

SEQ ID NO: 848369 - RNA, 19 nt, Homo sapiens
  misc_RNA (1)...(19): siRNA sense strand
ccacaaauaagguugaaua

SEQ ID NO: 848370 - RNA, 19 nt, Homo sapiens
  misc_RNA (1)...(19): siRNA sense strand
ccagaugguucguacauuu

SEQ ID NO: 848371 - RNA, 19 nt, Homo sapiens
  misc_RNA (1)...(19): siRNA sense strand
guucaaagcccucaacaaa

SEQ ID NO: 848372 - RNA, 19 nt, Homo sapiens
  misc_RNA (1)...(19): siRNA sense strand
cuaccaaucuugaaucuga

SEQ ID NO: 848373 - RNA, 19 nt, Homo sapiens
  misc_RNA (1)...(19): siRNA sense strand
gaagacaacaguaaucaga

SEQ ID NO: 848374 - RNA, 19 nt, Homo sapiens
  misc_RNA (1)...(19): siRNA sense strand
uagaagacauagagacuuu

SEQ ID NO: 848375 - RNA, 19 nt, Homo sapiens
  misc_RNA (1)...(19): siRNA sense strand
ggaacagcacgaucaaaua

SEQ ID NO: 848376 - RNA, 19 nt, Homo sapiens
  misc_RNA (1)...(19): siRNA sense strand
cagagagcgugaugaauuu

SEQ ID NO: 848377 - RNA, 19 nt, Homo sapiens
  misc_RNA (1)...(19): siRNA sense strand
gaugacagauauucucaga

SEQ ID NO: 848378 - RNA, 19 nt, Homo sapiens
  misc_RNA (1)...(19): siRNA sense strand
gaaagccacagaauauaaa

SEQ ID NO: 848379 - RNA, 19 nt, Homo sapiens
  misc_RNA (1)...(19): siRNA sense strand
cagcuacccuugaucuuaa

SEQ ID NO: 848380 - RNA, 19 nt, Homo sapiens
  misc_RNA (1)...(19): siRNA sense strand
ugacacaacuuaaccaaca

SEQ ID NO: 848381 - RNA, 19 nt, Homo sapiens
  misc_RNA (1)...(19): siRNA sense strand
aauacagacuccacaaaua

SEQ ID NO: 848382 - RNA, 19 nt, Homo sapiens
  misc_RNA (1)...(19): siRNA sense strand
caacugcuuuggcauuuga

SEQ ID NO: 848383 - RNA, 19 nt, Homo sapiens
  misc_RNA (1)...(19): siRNA sense strand
gcagcuacccuugaucuua

SEQ ID NO: 848384 - RNA, 19 nt, Homo sapiens
  misc_RNA (1)...(19): siRNA sense strand
guucaacucucuuuacuag

SEQ ID NO: 848385 - RNA, 19 nt, Homo sapiens
  misc_RNA (1)...(19): siRNA sense strand
ggacacuguugccauagaa

SEQ ID NO: 848386 - RNA, 19 nt, Homo sapiens
  misc_RNA (1)...(19): siRNA sense strand
ugacagauauucucagagu

SEQ ID NO: 848387 - RNA, 19 nt, Homo sapiens
  misc_RNA (1)...(19): siRNA sense strand
ggaaaucagguuacuguga

SEQ ID NO: 848388 - RNA, 19 nt, Homo sapiens
  misc_RNA (1)...(19): siRNA sense strand
guaggaaagccacagaaua

SEQ ID NO: 848389 - RNA, 19 nt, Homo sapiens
  misc_RNA (1)...(19): siRNA sense strand
ggaguuacaccuacugauu

SEQ ID NO: 848390 - RNA, 19 nt, Homo sapiens
  misc_RNA (1)...(19): siRNA sense strand
caacuuauaaggugucaaa

SEQ ID NO: 848391 - RNA, 19 nt, Homo sapiens
  misc_RNA (1)...(19): siRNA sense strand
gguaacaguccaucagaua

SEQ ID NO: 848392 - RNA, 19 nt, Homo sapiens
  misc_RNA (1)...(19): siRNA sense strand
gcaacauccucucauacuu

SEQ ID NO: 848393 - RNA, 19 nt, Homo sapiens
  misc_RNA (1)...(19): siRNA sense strand
aaaggcagaugacagauau

SEQ ID NO: 848394 - RNA, 19 nt, Homo sapiens
  misc_RNA (1)...(19): siRNA sense strand
gauauagucaagaugcuua

SEQ ID NO: 848395 - RNA, 19 nt, Homo sapiens
  misc_RNA (1)...(19): siRNA sense strand
ccugggcaguucuguauua

SEQ ID NO: 848396 - RNA, 19 nt, Homo sapiens
  misc_RNA (1)...(19): siRNA sense strand
gaguuuguuucuaguagua

SEQ ID NO: 848397 - RNA, 19 nt, Homo sapiens
  misc_RNA (1)...(19): siRNA sense strand
gggcaguucuguauuaagu

SEQ ID NO: 848398 - RNA, 19 nt, Homo sapiens
  misc_RNA (1)...(19): siRNA sense strand
gaaaagaaccuccagcuau

SEQ ID NO: 848399 - RNA, 19 nt, Homo sapiens
  misc_RNA (1)...(19): siRNA sense strand
caaccaggcagucaucuuu

SEQ ID NO: 848400 - RNA, 19 nt, Homo sapiens
  misc_RNA (1)...(19): siRNA sense strand
caaccucaauuuaguuugu

SEQ ID NO: 848401 - RNA, 19 nt, Homo sapiens
  misc_RNA (1)...(19): siRNA sense strand
gcuaucugauggagaaauu

SEQ ID NO: 848402 - RNA, 19 nt, Homo sapiens
  misc_RNA (1)...(19): siRNA sense strand
caaagcccauugaacuuga

SEQ ID NO: 848403 - RNA, 19 nt, Homo sapiens
  misc_RNA (1)...(19): siRNA sense strand
ggaaggucauguuauucaa

SEQ ID NO: 848404 - RNA, 19 nt, Homo sapiens
  misc_RNA (1)...(19): siRNA sense strand
caucaggcaucucuuccua

SEQ ID NO: 848405 - RNA, 19 nt, Homo sapiens
  misc_RNA (1)...(19): siRNA sense strand
cuucgagaauguaguguua

SEQ ID NO: 848406 - RNA, 19 nt, Homo sapiens
  misc_RNA (1)...(19): siRNA sense strand
caagcuaagccaaguagua

SEQ ID NO: 848407 - RNA, 19 nt, Homo sapiens
  misc_RNA (1)...(19): siRNA sense strand
caaacaagaaggaauaugu

SEQ ID NO: 848408 - RNA, 19 nt, Homo sapiens
  misc_RNA (1)...(19): siRNA sense strand
agacaacaguaaucagaaa

SEQ ID NO: 848409 - RNA, 19 nt, Homo sapiens
  misc_RNA (1)...(19): siRNA sense strand
gagagugaauuuaccuuag

SEQ ID NO: 848410 - RNA, 19 nt, Homo sapiens
  misc_RNA (1)...(19): siRNA sense strand
caaaggcagaugacagaua

SEQ ID NO: 848411 - RNA, 19 nt, Homo sapiens
  misc_RNA (1)...(19): siRNA sense strand
caggauuuauugcuucuuu

SEQ ID NO: 848412 - RNA, 19 nt, Homo sapiens
  misc_RNA (1)...(19): siRNA sense strand
ucaaagagguggaggaaaa

SEQ ID NO: 848413 - RNA, 19 nt, Homo sapiens
  misc_RNA (1)...(19): siRNA sense strand
gcaggcagguuuaggucaa

SEQ ID NO: 848414 - RNA, 19 nt, Homo sapiens
  misc_RNA (1)...(19): siRNA sense strand
acagcacgaucaaauaauu

SEQ ID NO: 848415 - RNA, 19 nt, Homo sapiens
  misc_RNA (1)...(19): siRNA sense strand
acagagagcgugaugaauu

SEQ ID NO: 848416 - RNA, 19 nt, Homo sapiens
  misc_RNA (1)...(19): siRNA sense strand
uaggaaagccacagaauau

SEQ ID NO: 848417 - RNA, 19 nt, Homo sapiens
  misc_RNA (1)...(19): siRNA sense strand
ugaagauggugauucuaaa

SEQ ID NO: 848418 - RNA, 19 nt, Homo sapiens
  misc_RNA (1)...(19): siRNA sense strand
agaaguaauucccgucuug

SEQ ID NO: 848419 - RNA, 19 nt, Homo sapiens
  misc_RNA (1)...(19): siRNA sense strand
ggaugcuacuucugauaaa

SEQ ID NO: 848420 - RNA, 19 nt, Homo sapiens
  misc_RNA (1)...(19): siRNA sense strand
gaguuacaccuacugauuu

SEQ ID NO: 848421 - RNA, 19 nt, Homo sapiens
  misc_RNA (1)...(19): siRNA sense strand
gaagaaaguguuguugguu

SEQ ID NO: 848422 - RNA, 19 nt, Homo sapiens
  misc_RNA (1)...(19): siRNA sense strand
caacaacaucuaacaacaa

SEQ ID NO: 848423 - RNA, 19 nt, Homo sapiens
  misc_RNA (1)...(19): siRNA sense strand
gaagauggugauucuaaau

SEQ ID NO: 848424 - RNA, 19 nt, Homo sapiens
  misc_RNA (1)...(19): siRNA sense strand
cagcacuccuuacauaguu

SEQ ID NO: 848425 - RNA, 19 nt, Homo sapiens
  misc_RNA (1)...(19): siRNA sense strand
gaacacaagagcaaugaag

SEQ ID NO: 848426 - RNA, 19 nt, Homo sapiens
  misc_RNA (1)...(19): siRNA sense strand
caagaaggaauaugucaga

SEQ ID NO: 848427 - RNA, 19 nt, Homo sapiens
  misc_RNA (1)...(19): siRNA sense strand
gccaagcacuggaacacuu

SEQ ID NO: 848428 - RNA, 19 nt, Homo sapiens
  misc_RNA (1)...(19): siRNA sense strand
gugaugaauuugugguaaa

SEQ ID NO: 848429 - RNA, 19 nt, Homo sapiens
  misc_RNA (1)...(19): siRNA sense strand
aagcgucucuacucccuua

SEQ ID NO: 848430 - RNA, 19 nt, Homo sapiens
  misc_RNA (1)...(19): siRNA sense strand
guaacaguccaucagauaa

SEQ ID NO: 848431 - RNA, 19 nt, Homo sapiens
  misc_RNA (1)...(19): siRNA sense strand
cuacaacacccacaccuuu

SEQ ID NO: 848432 - RNA, 19 nt, Homo sapiens
  misc_RNA (1)...(19): siRNA sense strand
gaaaagggcaaguuaaaga

SEQ ID NO: 848433 - RNA, 19 nt, Homo sapiens
  misc_RNA (1)...(19): siRNA sense strand
gcaugugacuucagauuuu

SEQ ID NO: 848434 - RNA, 19 nt, Homo sapiens
  misc_RNA (1)...(19): siRNA sense strand
gaucuuaagaacucaacua

SEQ ID NO: 848435 - RNA, 19 nt, Homo sapiens
  misc_RNA (1)...(19): siRNA sense strand
auacagacuccacaaauaa

SEQ ID NO: 848436 - RNA, 19 nt, Homo sapiens
  misc_RNA (1)...(19): siRNA sense strand
uucaggaacuacucucuua

SEQ ID NO: 848437 - RNA, 19 nt, Homo sapiens
  misc_RNA (1)...(19): siRNA sense strand
gagaugcaaagaguaaaua

SEQ ID NO: 848438 - RNA, 19 nt, Homo sapiens
  misc_RNA (1)...(19): siRNA sense strand
uaacaguccaucagauaaa

SEQ ID NO: 848439 - RNA, 19 nt, Homo sapiens
  misc_RNA (1)...(19): siRNA sense strand
gcagcagcuuguggaguua

SEQ ID NO: 848440 - RNA, 19 nt, Homo sapiens
  misc_RNA (1)...(19): siRNA sense strand
gaaggucauguuauucaaa

SEQ ID NO: 848441 - RNA, 19 nt, Homo sapiens
  misc_RNA (1)...(19): siRNA sense strand
ccagaggcagugcuucuua

SEQ ID NO: 848442 - RNA, 19 nt, Homo sapiens
  misc_RNA (1)...(19): siRNA sense strand
caagagcaaugaaggaaac

SEQ ID NO: 848443 - RNA, 19 nt, Homo sapiens
  misc_RNA (1)...(19): siRNA sense strand
ccugagauccauacuagua

SEQ ID NO: 848444 - RNA, 19 nt, Homo sapiens
  misc_RNA (1)...(19): siRNA sense strand
gaaauucgagauggucaaa

SEQ ID NO: 848445 - RNA, 19 nt, Homo sapiens
  misc_RNA (1)...(19): siRNA sense strand
gguaaagauagaagacaua

SEQ ID NO: 848446 - RNA, 19 nt, Homo sapiens
  misc_RNA (1)...(19): siRNA sense strand
gaaccucuccacucuacuu

SEQ ID NO: 848447 - RNA, 19 nt, Homo sapiens
  misc_RNA (1)...(19): siRNA sense strand
gagcagagcuagagagauu

SEQ ID NO: 848448 - RNA, 19 nt, Homo sapiens
  misc_RNA (1)...(19): siRNA sense strand
ggaaauacuugaaagagaa

SEQ ID NO: 848449 - RNA, 19 nt, Homo sapiens
  misc_RNA (1)...(19): siRNA sense strand
caauaaaucugccuuugga

SEQ ID NO: 848450 - RNA, 19 nt, Homo sapiens
  misc_RNA (1)...(19): siRNA sense strand
caagaacugucaggcaaua

SEQ ID NO: 848451 - RNA, 19 nt, Homo sapiens
  misc_RNA (1)...(19): siRNA sense strand
aagaugagcuugaugauuc

SEQ ID NO: 848452 - RNA, 19 nt, Homo sapiens
  misc_RNA (1)...(19): siRNA sense strand
caacaugccuacuauaaac

SEQ ID NO: 848453 - RNA, 19 nt, Homo sapiens
  misc_RNA (1)...(19): siRNA sense strand
cagagugauuugugaguua

SEQ ID NO: 848454 - RNA, 19 nt, Homo sapiens
  misc_RNA (1)...(19): siRNA sense strand
gaagagaaagaaagaaaug

SEQ ID NO: 848455 - RNA, 19 nt, Homo sapiens
  misc_RNA (1)...(19): siRNA sense strand
gacaauaccaggcaaauau

SEQ ID NO: 848456 - RNA, 19 nt, Homo sapiens
  misc_RNA (1)...(19): siRNA sense strand
gggaaauacuugaaagaga

SEQ ID NO: 848457 - RNA, 19 nt, Homo sapiens
  misc_RNA (1)...(19): siRNA sense strand
gaacugucaggcaauauaa

SEQ ID NO: 848458 - RNA, 19 nt, Homo sapiens
  misc_RNA (1)...(19): siRNA sense strand
ugaaagaguuugacauucu

SEQ ID NO: 848459 - RNA, 19 nt, Homo sapiens
  misc_RNA (1)...(19): siRNA sense strand
ucuagaugguguugauuua

SEQ ID NO: 848460 - RNA, 19 nt, Homo sapiens
  misc_RNA (1)...(19): siRNA sense strand
gaacucaggcacuugcaaa

SEQ ID NO: 848461 - RNA, 19 nt, Homo sapiens
  misc_RNA (1)...(19): siRNA sense strand
uggaagagcuuuuggauaa

SEQ ID NO: 848462 - RNA, 19 nt, Homo sapiens
  misc_RNA (1)...(19): siRNA sense strand
gaagaugagcuugaugauu

SEQ ID NO: 848463 - RNA, 19 nt, Homo sapiens
  misc_RNA (1)...(19): siRNA sense strand
gagaaaugcgcacagcuuu

SEQ ID NO: 848464 - RNA, 19 nt, Homo sapiens
  misc_RNA (1)...(19): siRNA sense strand
gaaguggaaguaugaagaa

SEQ ID NO: 848465 - RNA, 19 nt, Homo sapiens
  misc_RNA (1)...(19): siRNA sense strand
ggaaguggaaguaugaaga

SEQ ID NO: 848466 - RNA, 19 nt, Homo sapiens
  misc_RNA (1)...(19): siRNA sense strand
gcagaaguaaagaaacuaa

SEQ ID NO: 848467 - RNA, 19 nt, Homo sapiens
  misc_RNA (1)...(19): siRNA sense strand
gaagaauccaaaucucaaa

SEQ ID NO: 848468 - RNA, 19 nt, Homo sapiens
  misc_RNA (1)...(19): siRNA sense strand
ggaagaauccaaaucucaa

SEQ ID NO: 848469 - RNA, 19 nt, Homo sapiens
  misc_RNA (1)...(19): siRNA sense strand
gaaguaugaagaacugaaa

SEQ ID NO: 848470 - RNA, 19 nt, Homo sapiens
  misc_RNA (1)...(19): siRNA sense strand
gaaaauagaaggcugaaga

SEQ ID NO: 848471 - RNA, 19 nt, Homo sapiens
  misc_RNA (1)...(19): siRNA sense strand
ggacaagagggaaauacuu

SEQ ID NO: 848472 - RNA, 19 nt, Homo sapiens
  misc_RNA (1)...(19): siRNA sense strand
cagcaaagacagagugauu

SEQ ID NO: 848473 - RNA, 19 nt, Homo sapiens
  misc_RNA (1)...(19): siRNA sense strand
uggaaacggugaaacgaaa

SEQ ID NO: 848474 - RNA, 19 nt, Homo sapiens
  misc_RNA (1)...(19): siRNA sense strand
caaauugaucugcaagaaa

SEQ ID NO: 848475 - RNA, 19 nt, Homo sapiens
  misc_RNA (1)...(19): siRNA sense strand
ucaaaguccugauuucaag

SEQ ID NO: 848476 - RNA, 19 nt, Homo sapiens
  misc_RNA (1)...(19): siRNA sense strand
gaaagaaauggaagagcuu

SEQ ID NO: 848477 - RNA, 19 nt, Homo sapiens
  misc_RNA (1)...(19): siRNA sense strand
aaacugggcugagacugaa

SEQ ID NO: 848478 - RNA, 19 nt, Homo sapiens
  misc_RNA (1)...(19): siRNA sense strand
uucaagaugucacaaauug

SEQ ID NO: 848479 - RNA, 19 nt, Homo sapiens
  misc_RNA (1)...(19): siRNA sense strand
caaucuagaugguguugau

SEQ ID NO: 848480 - RNA, 19 nt, Homo sapiens
  misc_RNA (1)...(19): siRNA sense strand
acaaauugaucugcaagaa

SEQ ID NO: 848481 - RNA, 19 nt, Homo sapiens
  misc_RNA (1)...(19): siRNA sense strand
gcaggugcauuuggaugaa

SEQ ID NO: 848482 - RNA, 19 nt, Homo sapiens
  misc_RNA (1)...(19): siRNA sense strand
gaagauccaggugaaagaa

SEQ ID NO: 848483 - RNA, 19 nt, Homo sapiens
  misc_RNA (1)...(19): siRNA sense strand
ggaugaagagaaagaaaga

SEQ ID NO: 848484 - RNA, 19 nt, Homo sapiens
  misc_RNA (1)...(19): siRNA sense strand
gcaauaaaucugccuuugg

SEQ ID NO: 848485 - RNA, 19 nt, Homo sapiens
  misc_RNA (1)...(19): siRNA sense strand
ugaagcagaaguaaagaaa

SEQ ID NO: 848486 - RNA, 19 nt, Homo sapiens
  misc_RNA (1)...(19): siRNA sense strand
uagauuaagugcaaacucu

SEQ ID NO: 848487 - RNA, 19 nt, Homo sapiens
  misc_RNA (1)...(19): siRNA sense strand
augaagaacugaaagaauc

SEQ ID NO: 848488 - RNA, 19 nt, Homo sapiens
  misc_RNA (1)...(19): siRNA sense strand
gaacuaaagcagggacuca

SEQ ID NO: 848489 - RNA, 19 nt, Homo sapiens
  misc_RNA (1)...(19): siRNA sense strand
caagaugucacaaauugau

SEQ ID NO: 848490 - RNA, 19 nt, Homo sapiens
  misc_RNA (1)...(19): siRNA sense strand
gaaaugcgcacagcuuugg

SEQ ID NO: 848491 - RNA, 19 nt, Homo sapiens
  misc_RNA (1)...(19): siRNA sense strand
gggcugagacugaaagcaa

SEQ ID NO: 848492 - RNA, 19 nt, Homo sapiens
  misc_RNA (1)...(19): siRNA sense strand
ggaaguaugaagaacugaa

SEQ ID NO: 848493 - RNA, 19 nt, Homo sapiens
  misc_RNA (1)...(19): siRNA sense strand
ucaacaugccuacuauaaa

SEQ ID NO: 848494 - RNA, 19 nt, Homo sapiens
  misc_RNA (1)...(19): siRNA sense strand
gugaaagaguuugacauuc

SEQ ID NO: 848495 - RNA, 19 nt, Homo sapiens
  misc_RNA (1)...(19): siRNA sense strand
gaacugaaagaaucaaagc

SEQ ID NO: 848496 - RNA, 19 nt, Homo sapiens
  misc_RNA (1)...(19): siRNA sense strand
aaaugaagcagaaguaaag

SEQ ID NO: 848497 - RNA, 19 nt, Homo sapiens
  misc_RNA (1)...(19): siRNA sense strand
ugaaagaaucaaagccaaa

SEQ ID NO: 848498 - RNA, 19 nt, Homo sapiens
  misc_RNA (1)...(19): siRNA sense strand
gaagagcuuuuggauaaga

SEQ ID NO: 848499 - RNA, 19 nt, Homo sapiens
  misc_RNA (1)...(19): siRNA sense strand
gagggaaauacuugaaaga

SEQ ID NO: 848500 - RNA, 19 nt, Homo sapiens
  misc_RNA (1)...(19): siRNA sense strand
gaguuugacauucuucuug

SEQ ID NO: 848501 - RNA, 19 nt, Homo sapiens
  misc_RNA (1)...(19): siRNA sense strand
guggaaguaugaagaacug

SEQ ID NO: 848502 - RNA, 19 nt, Homo sapiens
  misc_RNA (1)...(19): siRNA sense strand
gaacugacucaugcaaaca

SEQ ID NO: 848503 - RNA, 19 nt, Homo sapiens
  misc_RNA (1)...(19): siRNA sense strand
agagugauuugugaguuaa

SEQ ID NO: 848504 - RNA, 19 nt, Homo sapiens
  misc_RNA (1)...(19): siRNA sense strand
agaacugucaggcaauaua

SEQ ID NO: 848505 - RNA, 19 nt, Homo sapiens
  misc_RNA (1)...(19): siRNA sense strand
ugugaaagaguuugacauu

SEQ ID NO: 848506 - RNA, 19 nt, Homo sapiens
  misc_RNA (1)...(19): siRNA sense strand
uaaaggaagaauccaaauc

SEQ ID NO: 848507 - RNA, 19 nt, Homo sapiens
  misc_RNA (1)...(19): siRNA sense strand
aagaagaugagcuugauga

SEQ ID NO: 848508 - RNA, 19 nt, Homo sapiens
  misc_RNA (1)...(19): siRNA sense strand
aagcagaaguaaagaaacu

SEQ ID NO: 848509 - RNA, 19 nt, Homo sapiens
  misc_RNA (1)...(19): siRNA sense strand
caaacaaccgaguggauca

SEQ ID NO: 848510 - RNA, 19 nt, Homo sapiens
  misc_RNA (1)...(19): siRNA sense strand
gcagaacugacucaugcaa

SEQ ID NO: 848511 - RNA, 19 nt, Homo sapiens
  misc_RNA (1)...(19): siRNA sense strand
gcugagacugaaagcaaua

SEQ ID NO: 848512 - RNA, 19 nt, Homo sapiens
  misc_RNA (1)...(19): siRNA sense strand
aagacagagugauuuguga

SEQ ID NO: 848513 - RNA, 19 nt, Homo sapiens
  misc_RNA (1)...(19): siRNA sense strand
aaaggaagaauccaaaucu

SEQ ID NO: 848514 - RNA, 19 nt, Homo sapiens
  misc_RNA (1)...(19): siRNA sense strand
agacaauaccaggcaaaua

SEQ ID NO: 848515 - RNA, 19 nt, Homo sapiens
  misc_RNA (1)...(19): siRNA sense strand
guaugaagaacugaaagaa

SEQ ID NO: 848516 - RNA, 19 nt, Homo sapiens
  misc_RNA (1)...(19): siRNA sense strand
ggcugaagauccaggugaa

SEQ ID NO: 848517 - RNA, 19 nt, Homo sapiens
  misc_RNA (1)...(19): siRNA sense strand
caggcaauauaaaggaaga

SEQ ID NO: 848518 - RNA, 19 nt, Homo sapiens
  misc_RNA (1)...(19): siRNA sense strand
gcaagaacugucaggcaau

SEQ ID NO: 848519 - RNA, 19 nt, Homo sapiens
  misc_RNA (1)...(19): siRNA sense strand
agacugaaagcaauaaauc

SEQ ID NO: 848520 - RNA, 19 nt, Homo sapiens
  misc_RNA (1)...(19): siRNA sense strand
gagacugaaagcaauaaau

SEQ ID NO: 848521 - RNA, 19 nt, Homo sapiens
  misc_RNA (1)...(19): siRNA sense strand
gaagcccaaucuagauggu

SEQ ID NO: 848522 - RNA, 19 nt, Homo sapiens
  misc_RNA (1)...(19): siRNA sense strand
ugaaaugcaagaacuguca

SEQ ID NO: 848523 - RNA, 19 nt, Homo sapiens
  misc_RNA (1)...(19): siRNA sense strand
gaaagaaucaaagccaaaa

SEQ ID NO: 848524 - RNA, 19 nt, Homo sapiens
  misc_RNA (1)...(19): siRNA sense strand
gcaauauaaaggaagaauc

SEQ ID NO: 848525 - RNA, 19 nt, Homo sapiens
  misc_RNA (1)...(19): siRNA sense strand
auagaaggcugaagaucca

SEQ ID NO: 848526 - RNA, 19 nt, Homo sapiens
  misc_RNA (1)...(19): siRNA sense strand
aaagacagagugauuugug

SEQ ID NO: 848527 - RNA, 19 nt, Homo sapiens
  misc_RNA (1)...(19): siRNA sense strand
aagcagggacucaaccaaa

SEQ ID NO: 848528 - RNA, 19 nt, Homo sapiens
  misc_RNA (1)...(19): siRNA sense strand
acagagugauuugugaguu

SEQ ID NO: 848529 - RNA, 19 nt, Homo sapiens
  misc_RNA (1)...(19): siRNA sense strand
gaugaaaugcaagaacugu

SEQ ID NO: 848530 - RNA, 19 nt, Homo sapiens
  misc_RNA (1)...(19): siRNA sense strand
gauuucaagaugucacaaa

SEQ ID NO: 848531 - RNA, 19 nt, Homo sapiens
  misc_RNA (1)...(19): siRNA sense strand
auaaaucugccuuuggaaa

SEQ ID NO: 848532 - RNA, 19 nt, Homo sapiens
  misc_RNA (1)...(19): siRNA sense strand
agagggaaauacuugaaag

SEQ ID NO: 848533 - RNA, 19 nt, Homo sapiens
  misc_RNA (1)...(19): siRNA sense strand
ugaguuaagagcagagcua

SEQ ID NO: 848534 - RNA, 19 nt, Homo sapiens
  misc_RNA (1)...(19): siRNA sense strand
ggaucaaaaugaagcagaa

SEQ ID NO: 848535 - RNA, 19 nt, Homo sapiens
  misc_RNA (1)...(19): siRNA sense strand
agaacugacucaugcaaac

SEQ ID NO: 848536 - RNA, 19 nt, Homo sapiens
  misc_RNA (1)...(19): siRNA sense strand
caugccuacuauaaacuaa

SEQ ID NO: 848537 - RNA, 19 nt, Homo sapiens
  misc_RNA (1)...(19): siRNA sense strand
ugaagauccaggugaaaga

SEQ ID NO: 848538 - RNA, 19 nt, Homo sapiens
  misc_RNA (1)...(19): siRNA sense strand
gaagaacugaaagaaucaa

SEQ ID NO: 848539 - RNA, 19 nt, Homo sapiens
  misc_RNA (1)...(19): siRNA sense strand
gucaggcaauauaaaggaa

SEQ ID NO: 848540 - RNA, 19 nt, Homo sapiens
  misc_RNA (1)...(19): siRNA sense strand
gaauccaaaucucaaaaca

SEQ ID NO: 848541 - RNA, 19 nt, Homo sapiens
  misc_RNA (1)...(19): siRNA sense strand
ugaaucagauccguaagcu

SEQ ID NO: 848542 - RNA, 19 nt, Homo sapiens
  misc_RNA (1)...(19): siRNA sense strand
uucaacaugccuacuauaa

SEQ ID NO: 848543 - RNA, 19 nt, Homo sapiens
  misc_RNA (1)...(19): siRNA sense strand
agaugguguugauuuauuc

SEQ ID NO: 848544 - RNA, 19 nt, Homo sapiens
  misc_RNA (1)...(19): siRNA sense strand
guuaagagcagagcuagag

SEQ ID NO: 848545 - RNA, 19 nt, Homo sapiens
  misc_RNA (1)...(19): siRNA sense strand
caauauaaaggaagaaucc

SEQ ID NO: 848546 - RNA, 19 nt, Homo sapiens
  misc_RNA (1)...(19): siRNA sense strand
gauuaagugcaaacucuca

SEQ ID NO: 848547 - RNA, 19 nt, Homo sapiens
  misc_RNA (1)...(19): siRNA sense strand
gcagagaccucagcuguca

SEQ ID NO: 848548 - RNA, 19 nt, Homo sapiens
  misc_RNA (1)...(19): siRNA sense strand
gggcaugagucuggcauua

SEQ ID NO: 848549 - RNA, 19 nt, Homo sapiens
  misc_RNA (1)...(19): siRNA sense strand
gaagacagaaccauuugaa

SEQ ID NO: 848550 - RNA, 19 nt, Homo sapiens
  misc_RNA (1)...(19): siRNA sense strand
gcagggcuaugccuuguug

SEQ ID NO: 848551 - RNA, 19 nt, Homo sapiens
  misc_RNA (1)...(19): siRNA sense strand
ugucaaaggucaagaggaa

SEQ ID NO: 848552 - RNA, 19 nt, Homo sapiens
  misc_RNA (1)...(19): siRNA sense strand
aaacagugcuucccugcaa

SEQ ID NO: 848553 - RNA, 19 nt, Homo sapiens
  misc_RNA (1)...(19): siRNA sense strand
caaggggucucuucaguua

SEQ ID NO: 848554 - RNA, 19 nt, Homo sapiens
  misc_RNA (1)...(19): siRNA sense strand
cuagcaacguuacuucaua

SEQ ID NO: 848555 - RNA, 19 nt, Homo sapiens
  misc_RNA (1)...(19): siRNA sense strand
ugagggagcuagcaacguu

SEQ ID NO: 848556 - RNA, 19 nt, Homo sapiens
  misc_RNA (1)...(19): siRNA sense strand
gacagaaccauuugaagaa

SEQ ID NO: 848557 - RNA, 19 nt, Homo sapiens
  misc_RNA (1)...(19): siRNA sense strand
gcaugagucuggcauuaca

SEQ ID NO: 848558 - RNA, 19 nt, Homo sapiens
  misc_RNA (1)...(19): siRNA sense strand
caacagguguggcaugaac

SEQ ID NO: 848559 - RNA, 19 nt, Homo sapiens
  misc_RNA (1)...(19): siRNA sense strand
ggcuaugccuuguugguuu

SEQ ID NO: 848560 - RNA, 19 nt, Homo sapiens
  misc_RNA (1)...(19): siRNA sense strand
ggcuacagcuugcagagaa

SEQ ID NO: 848561 - RNA, 19 nt, Homo sapiens
  misc_RNA (1)...(19): siRNA sense strand
gcaacguuacuucauauga

SEQ ID NO: 848562 - RNA, 19 nt, Homo sapiens
  misc_RNA (1)...(19): siRNA sense strand
agacagaaccauuugaaga

SEQ ID NO: 848563 - RNA, 19 nt, Homo sapiens
  misc_RNA (1)...(19): siRNA sense strand
gaauuuccacugcaugcua

SEQ ID NO: 848564 - RNA, 19 nt, Homo sapiens
  misc_RNA (1)...(19): siRNA sense strand
ugaaagaccuagagaucca

SEQ ID NO: 848565 - RNA, 19 nt, Homo sapiens
  misc_RNA (1)...(19): siRNA sense strand
uagcaacguuacuucauau

SEQ ID NO: 848566 - RNA, 19 nt, Homo sapiens
  misc_RNA (1)...(19): siRNA sense strand
gaacagguggacacuagug

SEQ ID NO: 848567 - RNA, 19 nt, Homo sapiens
  misc_RNA (1)...(19): siRNA sense strand
cagcuuuccucugucauuu

SEQ ID NO: 848568 - RNA, 19 nt, Homo sapiens
  misc_RNA (1)...(19): siRNA sense strand
gagaucgauugaagacaga

SEQ ID NO: 848569 - RNA, 19 nt, Homo sapiens
  misc_RNA (1)...(19): siRNA sense strand
acagaaccauuugaagaaa

SEQ ID NO: 848570 - RNA, 19 nt, Homo sapiens
  misc_RNA (1)...(19): siRNA sense strand
gagauccucauaccucaaa

SEQ ID NO: 848571 - RNA, 19 nt, Homo sapiens
  misc_RNA (1)...(19): siRNA sense strand
ucaugaaucugcaggaucu

SEQ ID NO: 848572 - RNA, 19 nt, Homo sapiens
  misc_RNA (1)...(19): siRNA sense strand
gcagaugcacugauucuac

SEQ ID NO: 848573 - RNA, 19 nt, Homo sapiens
  misc_RNA (1)...(19): siRNA sense strand
cagcauuggugauggaaag

SEQ ID NO: 848574 - RNA, 19 nt, Homo sapiens
  misc_RNA (1)...(19): siRNA sense strand
gagccaaggagcugaacaa

SEQ ID NO: 848575 - RNA, 19 nt, Homo sapiens
  misc_RNA (1)...(19): siRNA sense strand
gauugaagacagaaccauu

SEQ ID NO: 848576 - RNA, 19 nt, Homo sapiens
  misc_RNA (1)...(19): siRNA sense strand
gcagcuuuccucugucauu

SEQ ID NO: 848577 - RNA, 19 nt, Homo sapiens
  misc_RNA (1)...(19): siRNA sense strand
gcuaccuucuccugugauu

SEQ ID NO: 848578 - RNA, 19 nt, Homo sapiens
  misc_RNA (1)...(19): siRNA sense strand
aggaaucgauagccaaugu

SEQ ID NO: 848579 - RNA, 19 nt, Homo sapiens
  misc_RNA (1)...(19): siRNA sense strand
uaugaaagaccuagagauc

SEQ ID NO: 848580 - RNA, 19 nt, Homo sapiens
  misc_RNA (1)...(19): siRNA sense strand
uguggcagaugcacugauu

SEQ ID NO: 848581 - RNA, 19 nt, Homo sapiens
  misc_RNA (1)...(19): siRNA sense strand
gcuaugccuuguugguuuc

SEQ ID NO: 848582 - RNA, 19 nt, Homo sapiens
  misc_RNA (1)...(19): siRNA sense strand
ggaacaauuuaugauagag

SEQ ID NO: 848583 - RNA, 19 nt, Homo sapiens
  misc_RNA (1)...(19): siRNA sense strand
ucccuggucucccaacauu

SEQ ID NO: 848584 - RNA, 19 nt, Homo sapiens
  misc_RNA (1)...(19): siRNA sense strand
gaaucgauagccaaugugu

SEQ ID NO: 848585 - RNA, 19 nt, Homo sapiens
  misc_RNA (1)...(19): siRNA sense strand
ucaaaggucaagaggaaga

SEQ ID NO: 848586 - RNA, 19 nt, Homo sapiens
  misc_RNA (1)...(19): siRNA sense strand
gagcuagcaacguuacuuc

SEQ ID NO: 848587 - RNA, 19 nt, Homo sapiens
  misc_RNA (1)...(19): siRNA sense strand
ggagcaaggccuguugaug

SEQ ID NO: 848588 - RNA, 19 nt, Homo sapiens
  misc_RNA (1)...(19): siRNA sense strand
caaggaaucgauagccaau

SEQ ID NO: 848589 - RNA, 19 nt, Homo sapiens
  misc_RNA (1)...(19): siRNA sense strand
ucauuuggauaaucuccuu

SEQ ID NO: 848590 - RNA, 19 nt, Homo sapiens
  misc_RNA (1)...(19): siRNA sense strand
aagcuaccuucuccuguga

SEQ ID NO: 848591 - RNA, 19 nt, Homo sapiens
  misc_RNA (1)...(19): siRNA sense strand
gagggagcuagcaacguua

SEQ ID NO: 848592 - RNA, 19 nt, Homo sapiens
  misc_RNA (1)...(19): siRNA sense strand
accuagagauccaagacua

SEQ ID NO: 848593 - RNA, 19 nt, Homo sapiens
  misc_RNA (1)...(19): siRNA sense strand
ggagcuagcaacguuacuu

SEQ ID NO: 848594 - RNA, 19 nt, Homo sapiens
  misc_RNA (1)...(19): siRNA sense strand
ucaaggcgcuggagauccu

SEQ ID NO: 848595 - RNA, 19 nt, Homo sapiens
  misc_RNA (1)...(19): siRNA sense strand
gaaucugcaggaucuguau

SEQ ID NO: 848596 - RNA, 19 nt, Homo sapiens
  misc_RNA (1)...(19): siRNA sense strand
gguuucagaucuucaacag

SEQ ID NO: 848597 - RNA, 19 nt, Homo sapiens
  misc_RNA (1)...(19): siRNA sense strand
augaacagguggacacuag

SEQ ID NO: 848598 - RNA, 19 nt, Homo sapiens
  misc_RNA (1)...(19): siRNA sense strand
uaaucuccuucgcccauug

SEQ ID NO: 848599 - RNA, 19 nt, Homo sapiens
  misc_RNA (1)...(19): siRNA sense strand
gcaucaaggcgcuggagau

SEQ ID NO: 848600 - RNA, 19 nt, Homo sapiens
  misc_RNA (1)...(19): siRNA sense strand
gcuuuccucugucauuugg

SEQ ID NO: 848601 - RNA, 19 nt, Homo sapiens
  misc_RNA (1)...(19): siRNA sense strand
ugaaucugcaggaucugua

SEQ ID NO: 848602 - RNA, 19 nt, Homo sapiens
  misc_RNA (1)...(19): siRNA sense strand
cauaugaaagaccuagaga

SEQ ID NO: 848603 - RNA, 19 nt, Homo sapiens
  misc_RNA (1)...(19): siRNA sense strand
ccuggucucccaacauuug

SEQ ID NO: 848604 - RNA, 19 nt, Homo sapiens
  misc_RNA (1)...(19): siRNA sense strand
aucgauagccaauguguaa

SEQ ID NO: 848605 - RNA, 19 nt, Homo sapiens
  misc_RNA (1)...(19): siRNA sense strand
gaaagaccuagagauccaa

SEQ ID NO: 848606 - RNA, 19 nt, Homo sapiens
  misc_RNA (1)...(19): siRNA sense strand
gggcuaugccuuguugguu

SEQ ID NO: 848607 - RNA, 19 nt, Homo sapiens
  misc_RNA (1)...(19): siRNA sense strand
ggucucccaacauuugauu

SEQ ID NO: 848608 - RNA, 19 nt, Homo sapiens
  misc_RNA (1)...(19): siRNA sense strand
ugaagacagaaccauuuga

SEQ ID NO: 848609 - RNA, 19 nt, Homo sapiens
  misc_RNA (1)...(19): siRNA sense strand
aagcagggcuaugccuugu

SEQ ID NO: 848610 - RNA, 19 nt, Homo sapiens
  misc_RNA (1)...(19): siRNA sense strand
ccacacaagagguccaagu

SEQ ID NO: 848611 - RNA, 19 nt, Homo sapiens
  misc_RNA (1)...(19): siRNA sense strand
agagaccucagcugucaaa

SEQ ID NO: 848612 - RNA, 19 nt, Homo sapiens
  misc_RNA (1)...(19): siRNA sense strand
gcuagcaacguuacuucau

SEQ ID NO: 848613 - RNA, 19 nt, Homo sapiens
  misc_RNA (1)...(19): siRNA sense strand
uaaaccagccagaacaacu

SEQ ID NO: 848614 - RNA, 19 nt, Homo sapiens
  misc_RNA (1)...(19): siRNA sense strand
cugcagcuuuccucuguca

SEQ ID NO: 848615 - RNA, 19 nt, Homo sapiens
  misc_RNA (1)...(19): siRNA sense strand
uucaacagguguggcauga

SEQ ID NO: 848616 - RNA, 19 nt, Homo sapiens
  misc_RNA (1)...(19): siRNA sense strand
cagaaccauuugaagaaaa

SEQ ID NO: 848617 - RNA, 19 nt, Homo sapiens
  misc_RNA (1)...(19): siRNA sense strand
cauuugauucguccucuga

SEQ ID NO: 848618 - RNA, 19 nt, Homo sapiens
  misc_RNA (1)...(19): siRNA sense strand
uaccuucuccugugauugu

SEQ ID NO: 848619 - RNA, 19 nt, Homo sapiens
  misc_RNA (1)...(19): siRNA sense strand
caaaggucaagaggaagaa

SEQ ID NO: 848620 - RNA, 19 nt, Homo sapiens
  misc_RNA (1)...(19): siRNA sense strand
ggagauccucauaccucaa

SEQ ID NO: 848621 - RNA, 19 nt, Homo sapiens
  misc_RNA (1)...(19): siRNA sense strand
caucaaggcgcuggagauc

SEQ ID NO: 848622 - RNA, 19 nt, Homo sapiens
  misc_RNA (1)...(19): siRNA sense strand
gcaaauggaucaacaacug

SEQ ID NO: 848623 - RNA, 19 nt, Homo sapiens
  misc_RNA (1)...(19): siRNA sense strand
ggaaauacauugccuacgu

SEQ ID NO: 848624 - RNA, 19 nt, Homo sapiens
  misc_RNA (1)...(19): siRNA sense strand
gaagaugucaagaauauga

SEQ ID NO: 848625 - RNA, 19 nt, Homo sapiens
  misc_RNA (1)...(19): siRNA sense strand
cagaagccauacucaauaa

SEQ ID NO: 848626 - RNA, 19 nt, Homo sapiens
  misc_RNA (1)...(19): siRNA sense strand
ccaagaagaugaccaccuu

SEQ ID NO: 848627 - RNA, 19 nt, Homo sapiens
  misc_RNA (1)...(19): siRNA sense strand
guaugaagaugucaagaau

SEQ ID NO: 848628 - RNA, 19 nt, Homo sapiens
  misc_RNA (1)...(19): siRNA sense strand
gcaaauggacaaaggaguu

SEQ ID NO: 848629 - RNA, 19 nt, Homo sapiens
  misc_RNA (1)...(19): siRNA sense strand
ugacagugcugaaagugaa

SEQ ID NO: 848630 - RNA, 19 nt, Homo sapiens
  misc_RNA (1)...(19): siRNA sense strand
gcaaagaagagaguucaaa

SEQ ID NO: 848631 - RNA, 19 nt, Homo sapiens
  misc_RNA (1)...(19): siRNA sense strand
ccagaagccauacucaaua

SEQ ID NO: 848632 - RNA, 19 nt, Homo sapiens
  misc_RNA (1)...(19): siRNA sense strand
gaagagaguucaaaacauc

SEQ ID NO: 848633 - RNA, 19 nt, Homo sapiens
  misc_RNA (1)...(19): siRNA sense strand
ccgaguauaucuacacuug

SEQ ID NO: 848634 - RNA, 19 nt, Homo sapiens
  misc_RNA (1)...(19): siRNA sense strand
gaagccauacucaauaaug

SEQ ID NO: 848635 - RNA, 19 nt, Homo sapiens
  misc_RNA (1)...(19): siRNA sense strand
gaccaccacugcaaaugga

SEQ ID NO: 848636 - RNA, 19 nt, Homo sapiens
  misc_RNA (1)...(19): siRNA sense strand
gugggaagccggaauuauu

SEQ ID NO: 848637 - RNA, 19 nt, Homo sapiens
  misc_RNA (1)...(19): siRNA sense strand
gaaacaacagagcccauga

SEQ ID NO: 848638 - RNA, 19 nt, Homo sapiens
  misc_RNA (1)...(19): siRNA sense strand
gaugaccaccuuugaguau

SEQ ID NO: 848639 - RNA, 19 nt, Homo sapiens
  misc_RNA (1)...(19): siRNA sense strand
gaagacccguguccaucug

SEQ ID NO: 848640 - RNA, 19 nt, Homo sapiens
  misc_RNA (1)...(19): siRNA sense strand
gguaugaagaugucaagaa

SEQ ID NO: 848641 - RNA, 19 nt, Homo sapiens
  misc_RNA (1)...(19): siRNA sense strand
gaaagauccauacgugcaa

SEQ ID NO: 848642 - RNA, 19 nt, Homo sapiens
  misc_RNA (1)...(19): siRNA sense strand
ggaauuauugguucuucuu

SEQ ID NO: 848643 - RNA, 19 nt, Homo sapiens
  misc_RNA (1)...(19): siRNA sense strand
aagccauacucaauaauga

SEQ ID NO: 848644 - RNA, 19 nt, Homo sapiens
  misc_RNA (1)...(19): siRNA sense strand
ggaacucccggcugauuug

SEQ ID NO: 848645 - RNA, 19 nt, Homo sapiens
  misc_RNA (1)...(19): siRNA sense strand
caagagcucccugcugauu

SEQ ID NO: 848646 - RNA, 19 nt, Homo sapiens
  misc_RNA (1)...(19): siRNA sense strand
gaagaugaccaccuuugag

SEQ ID NO: 848647 - RNA, 19 nt, Homo sapiens
  misc_RNA (1)...(19): siRNA sense strand
ucagacucaugaagaacua

SEQ ID NO: 848648 - RNA, 19 nt, Homo sapiens
  misc_RNA (1)...(19): siRNA sense strand
uuaauaaccgcaaagaaga

SEQ ID NO: 848649 - RNA, 19 nt, Homo sapiens
  misc_RNA (1)...(19): siRNA sense strand
caacagagcccaugaaaac

SEQ ID NO: 848650 - RNA, 19 nt, Homo sapiens
  misc_RNA (1)...(19): siRNA sense strand
uguauguccucguccagua

SEQ ID NO: 848651 - RNA, 19 nt, Homo sapiens
  misc_RNA (1)...(19): siRNA sense strand
cacaagcacuuaugucacu

SEQ ID NO: 848652 - RNA, 19 nt, Homo sapiens
  misc_RNA (1)...(19): siRNA sense strand
gaagccggaauuauugguu

SEQ ID NO: 848653 - RNA, 19 nt, Homo sapiens
  misc_RNA (1)...(19): siRNA sense strand
gcacaggaagcagaugaug

SEQ ID NO: 848654 - RNA, 19 nt, Homo sapiens
  misc_RNA (1)...(19): siRNA sense strand
gcacggaccccagguauga

SEQ ID NO: 848655 - RNA, 19 nt, Homo sapiens
  misc_RNA (1)...(19): siRNA sense strand
aaacaacagagcccaugaa

SEQ ID NO: 848656 - RNA, 19 nt, Homo sapiens
  misc_RNA (1)...(19): siRNA sense strand
ucacuucugcacuucagua

SEQ ID NO: 848657 - RNA, 19 nt, Homo sapiens
  misc_RNA (1)...(19): siRNA sense strand
aaagauccauacgugcaaa

SEQ ID NO: 848658 - RNA, 19 nt, Homo sapiens
  misc_RNA (1)...(19): siRNA sense strand
gaugaagacccguguccau

SEQ ID NO: 848659 - RNA, 19 nt, Homo sapiens
  misc_RNA (1)...(19): siRNA sense strand
gccauacucaauaaugaaa

SEQ ID NO: 848660 - RNA, 19 nt, Homo sapiens
  misc_RNA (1)...(19): siRNA sense strand
gaugaugccccgaguauau

SEQ ID NO: 848661 - RNA, 19 nt, Homo sapiens
  misc_RNA (1)...(19): siRNA sense strand
gcucccugcugauucacaa

SEQ ID NO: 848662 - RNA, 19 nt, Homo sapiens
  misc_RNA (1)...(19): siRNA sense strand
caaagaagagaguucaaaa

SEQ ID NO: 848663 - RNA, 19 nt, Homo sapiens
  misc_RNA (1)...(19): siRNA sense strand
gcacacgugauccagaauc

SEQ ID NO: 848664 - RNA, 19 nt, Homo sapiens
  misc_RNA (1)...(19): siRNA sense strand
agagcucccugcugauuca

SEQ ID NO: 848665 - RNA, 19 nt, Homo sapiens
  misc_RNA (1)...(19): siRNA sense strand
agaagaugaccaccuuuga

SEQ ID NO: 848666 - RNA, 19 nt, Homo sapiens
  misc_RNA (1)...(19): siRNA sense strand
gaauuauugguucuucuuc

SEQ ID NO: 848667 - RNA, 19 nt, Homo sapiens
  misc_RNA (1)...(19): siRNA sense strand
uuaugucacuucugcacuu

SEQ ID NO: 848668 - RNA, 19 nt, Homo sapiens
  misc_RNA (1)...(19): siRNA sense strand
cuucugcacuucaguaaac

SEQ ID NO: 848669 - RNA, 19 nt, Homo sapiens
  misc_RNA (1)...(19): siRNA sense strand
ugggaagccggaauuauug

SEQ ID NO: 848670 - RNA, 19 nt, Homo sapiens
  misc_RNA (1)...(19): siRNA sense strand
caagaagaugaccaccuuu

SEQ ID NO: 848671 - RNA, 19 nt, Homo sapiens
  misc_RNA (1)...(19): siRNA sense strand
ugaccaccuuugaguaucu

SEQ ID NO: 848672 - RNA, 19 nt, Homo sapiens
  misc_RNA (1)...(19): siRNA sense strand
ucucauuaauaaccgcaaa

SEQ ID NO: 848673 - RNA, 19 nt, Homo sapiens
  misc_RNA (1)...(19): siRNA sense strand
cugcucaucuuccacaucu

SEQ ID NO: 848674 - RNA, 19 nt, Homo sapiens
  misc_RNA (1)...(19): siRNA sense strand
caaauggacaaaggaguuc

SEQ ID NO: 848675 - RNA, 19 nt, Homo sapiens
  misc_RNA (1)...(19): siRNA sense strand
aagaagaugaccaccuuug

SEQ ID NO: 848676 - RNA, 19 nt, Homo sapiens
  misc_RNA (1)...(19): siRNA sense strand
gaaaaccaaacacugcauu

SEQ ID NO: 848677 - RNA, 19 nt, Homo sapiens
  misc_RNA (1)...(19): siRNA sense strand
gcugauucacaagcacuua

SEQ ID NO: 848678 - RNA, 19 nt, Homo sapiens
  misc_RNA (1)...(19): siRNA sense strand
cccagaagccauacucaau

SEQ ID NO: 848679 - RNA, 19 nt, Homo sapiens
  misc_RNA (1)...(19): siRNA sense strand
aaaccaaacacugcauuuc

SEQ ID NO: 848680 - RNA, 19 nt, Homo sapiens
  misc_RNA (1)...(19): siRNA sense strand
acacguggcugcuguuccu

SEQ ID NO: 848681 - RNA, 19 nt, Homo sapiens
  misc_RNA (1)...(19): siRNA sense strand
ugcugaaagugaagacuga

SEQ ID NO: 848682 - RNA, 19 nt, Homo sapiens
  misc_RNA (1)...(19): siRNA sense strand
caggaacucccggcugauu

SEQ ID NO: 848683 - RNA, 19 nt, Homo sapiens
  misc_RNA (1)...(19): siRNA sense strand
ccucacgcguggaaauaca

SEQ ID NO: 848684 - RNA, 19 nt, Homo sapiens
  misc_RNA (1)...(19): siRNA sense strand
augcacacgugauccagaa

SEQ ID NO: 848685 - RNA, 19 nt, Homo sapiens
  misc_RNA (1)...(19): siRNA sense strand
aacaacagagcccaugaaa

SEQ ID NO: 848686 - RNA, 19 nt, Homo sapiens
  misc_RNA (1)...(19): siRNA sense strand
auuaauaaccgcaaagaag

SEQ ID NO: 848687 - RNA, 19 nt, Homo sapiens
  misc_RNA (1)...(19): siRNA sense strand
uccaaugucagacucauga

SEQ ID NO: 848688 - RNA, 19 nt, Homo sapiens
  misc_RNA (1)...(19): siRNA sense strand
gcucaucuuccacaucuac

SEQ ID NO: 848689 - RNA, 19 nt, Homo sapiens
  misc_RNA (1)...(19): siRNA sense strand
aaugucagacucaugaaga

SEQ ID NO: 848690 - RNA, 19 nt, Homo sapiens
  misc_RNA (1)...(19): siRNA sense strand
ugaucgccauccugcugua

SEQ ID NO: 848691 - RNA, 19 nt, Homo sapiens
  misc_RNA (1)...(19): siRNA sense strand
cauuaauaaccgcaaagaa

SEQ ID NO: 848692 - RNA, 19 nt, Homo sapiens
  misc_RNA (1)...(19): siRNA sense strand
gcauuuccugcaauaagug

SEQ ID NO: 848693 - RNA, 19 nt, Homo sapiens
  misc_RNA (1)...(19): siRNA sense strand
ggccgacuccaaugucaga

SEQ ID NO: 848694 - RNA, 19 nt, Homo sapiens
  misc_RNA (1)...(19): siRNA sense strand
guggugaccugggcugucu

SEQ ID NO: 848695 - RNA, 19 nt, Homo sapiens
  misc_RNA (1)...(19): siRNA sense strand
agaugaccaccuuugagua

SEQ ID NO: 848696 - RNA, 19 nt, Homo sapiens
  misc_RNA (1)...(19): siRNA sense strand
ucgccauccugcuguaugu

SEQ ID NO: 848697 - RNA, 19 nt, Homo sapiens
  misc_RNA (1)...(19): siRNA sense strand
gcaagugucuggugaaaug

SEQ ID NO: 848698 - RNA, 19 nt, Homo sapiens
  misc_RNA (1)...(19): siRNA sense strand
gccaagaaguuacaauuau

SEQ ID NO: 848699 - RNA, 19 nt, Homo sapiens
  misc_RNA (1)...(19): siRNA sense strand
gaacauugggauucuauug

SEQ ID NO: 848700 - RNA, 19 nt, Homo sapiens
  misc_RNA (1)...(19): siRNA sense strand
gcacaggcaucuuugucuu

SEQ ID NO: 848701 - RNA, 19 nt, Homo sapiens
  misc_RNA (1)...(19): siRNA sense strand
caacaucuauauggucauc

SEQ ID NO: 848702 - RNA, 19 nt, Homo sapiens
  misc_RNA (1)...(19): siRNA sense strand
uaaaggugaugccaagaag

SEQ ID NO: 848703 - RNA, 19 nt, Homo sapiens
  misc_RNA (1)...(19): siRNA sense strand
ggaaccaggcacagaguga

SEQ ID NO: 848704 - RNA, 19 nt, Homo sapiens
  misc_RNA (1)...(19): siRNA sense strand
ugccaagaaguuacaauua

SEQ ID NO: 848705 - RNA, 19 nt, Homo sapiens
  misc_RNA (1)...(19): siRNA sense strand
agagugagcgauacggaua

SEQ ID NO: 848706 - RNA, 19 nt, Homo sapiens
  misc_RNA (1)...(19): siRNA sense strand
ccgcaagugucuggugaaa

SEQ ID NO: 848707 - RNA, 19 nt, Homo sapiens
  misc_RNA (1)...(19): siRNA sense strand
acauugggauucuauugga

SEQ ID NO: 848708 - RNA, 19 nt, Homo sapiens
  misc_RNA (1)...(19): siRNA sense strand
uaacaagcccauugcuagu

SEQ ID NO: 848709 - RNA, 19 nt, Homo sapiens
  misc_RNA (1)...(19): siRNA sense strand
uuaaaggugaugccaagaa

SEQ ID NO: 848710 - RNA, 19 nt, Homo sapiens
  misc_RNA (1)...(19): siRNA sense strand
agugagcgauacggauaua

SEQ ID NO: 848711 - RNA, 19 nt, Homo sapiens
  misc_RNA (1)...(19): siRNA sense strand
ggugaaauggcuggaaguu

SEQ ID NO: 848712 - RNA, 19 nt, Homo sapiens
  misc_RNA (1)...(19): siRNA sense strand
acaggcaucuuugucuuca

SEQ ID NO: 848713 - RNA, 19 nt, Homo sapiens
  misc_RNA (1)...(19): siRNA sense strand
uguaacaagcccauugcua

SEQ ID NO: 848714 - RNA, 19 nt, Homo sapiens
  misc_RNA (1)...(19): siRNA sense strand
aggcaucuuugucuucaug

SEQ ID NO: 848715 - RNA, 19 nt, Homo sapiens
  misc_RNA (1)...(19): siRNA sense strand
acaucuauauggucaucuu

SEQ ID NO: 848716 - RNA, 19 nt, Homo sapiens
  misc_RNA (1)...(19): siRNA sense strand
aaggugaugccaagaaguu

SEQ ID NO: 848717 - RNA, 19 nt, Homo sapiens
  misc_RNA (1)...(19): siRNA sense strand
uccaggaccuuccgcucaa

SEQ ID NO: 848718 - RNA, 19 nt, Homo sapiens
  misc_RNA (1)...(19): siRNA sense strand
caaggggaaggaugaguua

SEQ ID NO: 848719 - RNA, 19 nt, Homo sapiens
  misc_RNA (1)...(19): siRNA sense strand
ggagguggugcuuaaaggu

SEQ ID NO: 848720 - RNA, 19 nt, Homo sapiens
  misc_RNA (1)...(19): siRNA sense strand
gagcgauacggauauaagg

SEQ ID NO: 848721 - RNA, 19 nt, Homo sapiens
  misc_RNA (1)...(19): siRNA sense strand
aggcacagagugagcgaua

SEQ ID NO: 848722 - RNA, 19 nt, Homo sapiens
  misc_RNA (1)...(19): siRNA sense strand
cuuaucuucugcugcuauu

SEQ ID NO: 848723 - RNA, 19 nt, Homo sapiens
  misc_RNA (1)...(19): siRNA sense strand
cuucggcacaggcaucuuu

SEQ ID NO: 848724 - RNA, 19 nt, Homo sapiens
  misc_RNA (1)...(19): siRNA sense strand
ggaccuuccgcucaacauc

SEQ ID NO: 848725 - RNA, 19 nt, Homo sapiens
  misc_RNA (1)...(19): siRNA sense strand
gcacagagugagcgauacg

SEQ ID NO: 848726 - RNA, 19 nt, Homo sapiens
  misc_RNA (1)...(19): siRNA sense strand
ucagcaaacugcggaacca

SEQ ID NO: 848727 - RNA, 19 nt, Homo sapiens
  misc_RNA (1)...(19): siRNA sense strand
gaauaugugugguuucuga

SEQ ID NO: 848728 - RNA, 19 nt, Homo sapiens
  misc_RNA (1)...(19): siRNA sense strand
gaacugagcacuccguuug

SEQ ID NO: 848729 - RNA, 19 nt, Homo sapiens
  misc_RNA (1)...(19): siRNA sense strand
ccucguagcuccucagauc

SEQ ID NO: 848730 - RNA, 19 nt, Homo sapiens
  misc_RNA (1)...(19): siRNA sense strand
cgaaaccgccucaugauca

SEQ ID NO: 848731 - RNA, 19 nt, Homo sapiens
  misc_RNA (1)...(19): siRNA sense strand
gggaauaugugugguuucu

SEQ ID NO: 848732 - RNA, 19 nt, Homo sapiens
  misc_RNA (1)...(19): siRNA sense strand
ccauguaccucugugaaug

SEQ ID NO: 848733 - RNA, 19 nt, Homo sapiens
  misc_RNA (1)...(19): siRNA sense strand
gaaggcaguccggcucuuu

SEQ ID NO: 848734 - RNA, 19 nt, Homo sapiens
  misc_RNA (1)...(19): siRNA sense strand
ggccaaugccuuccucgua

SEQ ID NO: 848735 - RNA, 19 nt, Homo sapiens
  misc_RNA (1)...(19): siRNA sense strand
ugugguuucugauuccaua

SEQ ID NO: 848736 - RNA, 19 nt, Homo sapiens
  misc_RNA (1)...(19): siRNA sense strand
gacuaagccugcuccaagu

SEQ ID NO: 848737 - RNA, 19 nt, Homo sapiens
  misc_RNA (1)...(19): siRNA sense strand
ccucagaucuacugguucu

SEQ ID NO: 848738 - RNA, 19 nt, Homo sapiens
  misc_RNA (1)...(19): siRNA sense strand
gaaaccgccucaugaucac

SEQ ID NO: 848739 - RNA, 19 nt, Homo sapiens
  misc_RNA (1)...(19): siRNA sense strand
uguacaaggugaauggaau

SEQ ID NO: 848740 - RNA, 19 nt, Homo sapiens
  misc_RNA (1)...(19): siRNA sense strand
uaugugugguuucugauuc

SEQ ID NO: 848741 - RNA, 19 nt, Homo sapiens
  misc_RNA (1)...(19): siRNA sense strand
ggaaggcaguccggcucuu

SEQ ID NO: 848742 - RNA, 19 nt, Homo sapiens
  misc_RNA (1)...(19): siRNA sense strand
ccgggaauaugugugguuu

SEQ ID NO: 848743 - RNA, 19 nt, Homo sapiens
  misc_RNA (1)...(19): siRNA sense strand
gcacacccuucuguacaag

SEQ ID NO: 848744 - RNA, 19 nt, Homo sapiens
  misc_RNA (1)...(19): siRNA sense strand
agucgaaaccgccucauga

SEQ ID NO: 848745 - RNA, 19 nt, Homo sapiens
  misc_RNA (1)...(19): siRNA sense strand
gcagcacacccuucuguac

SEQ ID NO: 848746 - RNA, 19 nt, Homo sapiens
  misc_RNA (1)...(19): siRNA sense strand
gcaguccggcucuuugaca

SEQ ID NO: 848747 - RNA, 19 nt, Homo sapiens
  misc_RNA (1)...(19): siRNA sense strand
cagcagcacacccuucugu

SEQ ID NO: 848748 - RNA, 19 nt, Homo sapiens
  misc_RNA (1)...(19): siRNA sense strand
cagcacacccuucuguaca

SEQ ID NO: 848749 - RNA, 19 nt, Homo sapiens
  misc_RNA (1)...(19): siRNA sense strand
guacaaggugaauggaauc

SEQ ID NO: 848750 - RNA, 19 nt, Homo sapiens
  misc_RNA (1)...(19): siRNA sense strand
cuccucagaucuacugguu

SEQ ID NO: 848751 - RNA, 19 nt, Homo sapiens
  misc_RNA (1)...(19): siRNA sense strand
caucuucacggcagaacug

SEQ ID NO: 848752 - RNA, 19 nt, Homo sapiens
  misc_RNA (1)...(19): siRNA sense strand
cuaaagaccugcucaauaa

SEQ ID NO: 848753 - RNA, 19 nt, Homo sapiens
  misc_RNA (1)...(19): siRNA sense strand
acacuuaucuggagaaauu

SEQ ID NO: 848754 - RNA, 19 nt, Homo sapiens
  misc_RNA (1)...(19): siRNA sense strand
gaaauaaacgagacugaaa

SEQ ID NO: 848755 - RNA, 19 nt, Homo sapiens
  misc_RNA (1)...(19): siRNA sense strand
gaagacugaggaagaauua

SEQ ID NO: 848756 - RNA, 19 nt, Homo sapiens
  misc_RNA (1)...(19): siRNA sense strand
ucaauaauguggccucuga

SEQ ID NO: 848757 - RNA, 19 nt, Homo sapiens
  misc_RNA (1)...(19): siRNA sense strand
ugacuuaucuggaacaaca

SEQ ID NO: 848758 - RNA, 19 nt, Homo sapiens
  misc_RNA (1)...(19): siRNA sense strand
gagaagcgccugcucaaga

SEQ ID NO: 848759 - RNA, 19 nt, Homo sapiens
  misc_RNA (1)...(19): siRNA sense strand
ugacgaggaugacgauuug

SEQ ID NO: 848760 - RNA, 19 nt, Homo sapiens
  misc_RNA (1)...(19): siRNA sense strand
aaauugacauggaagauga

SEQ ID NO: 848761 - RNA, 19 nt, Homo sapiens
  misc_RNA (1)...(19): siRNA sense strand
gcaagaaagguuugaggaa

SEQ ID NO: 848762 - RNA, 19 nt, Homo sapiens
  misc_RNA (1)...(19): siRNA sense strand
ggaaauaaacgagacugaa

SEQ ID NO: 848763 - RNA, 19 nt, Homo sapiens
  misc_RNA (1)...(19): siRNA sense strand
ugagaagacugaggaagaa

SEQ ID NO: 848764 - RNA, 19 nt, Homo sapiens
  misc_RNA (1)...(19): siRNA sense strand
gaaauugacauggaagaug

SEQ ID NO: 848765 - RNA, 19 nt, Homo sapiens
  misc_RNA (1)...(19): siRNA sense strand
gagugacaaugacuucuga

SEQ ID NO: 848766 - RNA, 19 nt, Homo sapiens
  misc_RNA (1)...(19): siRNA sense strand
gcaaggaagaccuggcaaa

SEQ ID NO: 848767 - RNA, 19 nt, Homo sapiens
  misc_RNA (1)...(19): siRNA sense strand
gagugaaauugacauggaa

SEQ ID NO: 848768 - RNA, 19 nt, Homo sapiens
  misc_RNA (1)...(19): siRNA sense strand
ugacacagguucagaagac

SEQ ID NO: 848769 - RNA, 19 nt, Homo sapiens
  misc_RNA (1)...(19): siRNA sense strand
acuaaagaccugcucaaua

SEQ ID NO: 848770 - RNA, 19 nt, Homo sapiens
  misc_RNA (1)...(19): siRNA sense strand
gugaugagaauugcaauaa

SEQ ID NO: 848771 - RNA, 19 nt, Homo sapiens
  misc_RNA (1)...(19): siRNA sense strand
gacagugaguuggaagaaa

SEQ ID NO: 848772 - RNA, 19 nt, Homo sapiens
  misc_RNA (1)...(19): siRNA sense strand
ggauggagcaagaaagguu

SEQ ID NO: 848773 - RNA, 19 nt, Homo sapiens
  misc_RNA (1)...(19): siRNA sense strand
agagugaaauugacaugga

SEQ ID NO: 848774 - RNA, 19 nt, Homo sapiens
  misc_RNA (1)...(19): siRNA sense strand
gagaugcucaugcaaggaa

SEQ ID NO: 848775 - RNA, 19 nt, Homo sapiens
  misc_RNA (1)...(19): siRNA sense strand
aaaucugacuuaucuggaa

SEQ ID NO: 848776 - RNA, 19 nt, Homo sapiens
  misc_RNA (1)...(19): siRNA sense strand
uaauguggccucugaugaa

SEQ ID NO: 848777 - RNA, 19 nt, Homo sapiens
  misc_RNA (1)...(19): siRNA sense strand
uaacgaugacucggacaua

SEQ ID NO: 848778 - RNA, 19 nt, Homo sapiens
  misc_RNA (1)...(19): siRNA sense strand
uggaugagagugacaauga

SEQ ID NO: 848779 - RNA, 19 nt, Homo sapiens
  misc_RNA (1)...(19): siRNA sense strand
ggaggagagugaaauugac

SEQ ID NO: 848780 - RNA, 19 nt, Homo sapiens
  misc_RNA (1)...(19): siRNA sense strand
aaagcaguaugacacuuau

SEQ ID NO: 848781 - RNA, 19 nt, Homo sapiens
  misc_RNA (1)...(19): siRNA sense strand
acagugaguuggaagaaag

SEQ ID NO: 848782 - RNA, 19 nt, Homo sapiens
  misc_RNA (1)...(19): siRNA sense strand
gcucaagaguggaaguaac

SEQ ID NO: 848783 - RNA, 19 nt, Homo sapiens
  misc_RNA (1)...(19): siRNA sense strand
cggaggagagugaaauuga

SEQ ID NO: 848784 - RNA, 19 nt, Homo sapiens
  misc_RNA (1)...(19): siRNA sense strand
gagacuccgaugacaauga

SEQ ID NO: 848785 - RNA, 19 nt, Homo sapiens
  misc_RNA (1)...(19): siRNA sense strand
gaacaagcucaaggaggaa

SEQ ID NO: 848786 - RNA, 19 nt, Homo sapiens
  misc_RNA (1)...(19): siRNA sense strand
cauggaagaugaugaugac

SEQ ID NO: 848787 - RNA, 19 nt, Homo sapiens
  misc_RNA (1)...(19): siRNA sense strand
ccucugaugaagcuaauuu

SEQ ID NO: 848788 - RNA, 19 nt, Homo sapiens
  misc_RNA (1)...(19): siRNA sense strand
gauggagcaagaaagguuu

SEQ ID NO: 848789 - RNA, 19 nt, Homo sapiens
  misc_RNA (1)...(19): siRNA sense strand
ugacacuuaucuggagaaa

SEQ ID NO: 848790 - RNA, 19 nt, Homo sapiens
  misc_RNA (1)...(19): siRNA sense strand
aaagaccugcucaauaaug

SEQ ID NO: 848791 - RNA, 19 nt, Homo sapiens
  misc_RNA (1)...(19): siRNA sense strand
ggagagugaaauugacaug

SEQ ID NO: 848792 - RNA, 19 nt, Homo sapiens
  misc_RNA (1)...(19): siRNA sense strand
ugacauggaagaugaugau

SEQ ID NO: 848793 - RNA, 19 nt, Homo sapiens
  misc_RNA (1)...(19): siRNA sense strand
ggaugacgauuuggaagac

SEQ ID NO: 848794 - RNA, 19 nt, Homo sapiens
  misc_RNA (1)...(19): siRNA sense strand
gaaaucggaagcgacuaga

SEQ ID NO: 848795 - RNA, 19 nt, Homo sapiens
  misc_RNA (1)...(19): siRNA sense strand
ggaagacgagagcauuucu

SEQ ID NO: 848796 - RNA, 19 nt, Homo sapiens
  misc_RNA (1)...(19): siRNA sense strand
aagaccugcucaauaaugu

SEQ ID NO: 848797 - RNA, 19 nt, Homo sapiens
  misc_RNA (1)...(19): siRNA sense strand
gcucaaggaggaagagaag

SEQ ID NO: 848798 - RNA, 19 nt, Homo sapiens
  misc_RNA (1)...(19): siRNA sense strand
cagcuugaagaccaucaua

SEQ ID NO: 848799 - RNA, 19 nt, Homo sapiens
  misc_RNA (1)...(19): siRNA sense strand
ggaugagagugacaaugac

SEQ ID NO: 848800 - RNA, 19 nt, Homo sapiens
  misc_RNA (1)...(19): siRNA sense strand
gaggagagugaaauugaca

SEQ ID NO: 848801 - RNA, 19 nt, Homo sapiens
  misc_RNA (1)...(19): siRNA sense strand
aaacacucucugccugaua

SEQ ID NO: 848802 - RNA, 19 nt, Homo sapiens
  misc_RNA (1)...(19): siRNA sense strand
cauaggauggagcaagaaa

SEQ ID NO: 848803 - RNA, 19 nt, Homo sapiens
  misc_RNA (1)...(19): siRNA sense strand
agaagcgccugcucaagag

SEQ ID NO: 848804 - RNA, 19 nt, Homo sapiens
  misc_RNA (1)...(19): siRNA sense strand
aaagugaugagaauugcaa

SEQ ID NO: 848805 - RNA, 19 nt, Homo sapiens
  misc_RNA (1)...(19): siRNA sense strand
agaagacugaggaagaauu

SEQ ID NO: 848806 - RNA, 19 nt, Homo sapiens
  misc_RNA (1)...(19): siRNA sense strand
cgaggaugacgauuuggaa

SEQ ID NO: 848807 - RNA, 19 nt, Homo sapiens
  misc_RNA (1)...(19): siRNA sense strand
cgacagugaguuggaagaa

SEQ ID NO: 848808 - RNA, 19 nt, Homo sapiens
  misc_RNA (1)...(19): siRNA sense strand
ggacgaugaauccgacagu

SEQ ID NO: 848809 - RNA, 19 nt, Homo sapiens
  misc_RNA (1)...(19): siRNA sense strand
ggaacaacagcuugaagac

SEQ ID NO: 848810 - RNA, 19 nt, Homo sapiens
  misc_RNA (1)...(19): siRNA sense strand
aaaagcaguaugacacuua

SEQ ID NO: 848811 - RNA, 19 nt, Homo sapiens
  misc_RNA (1)...(19): siRNA sense strand
gacuaaagaccugcucaau

SEQ ID NO: 848812 - RNA, 19 nt, Homo sapiens
  misc_RNA (1)...(19): siRNA sense strand
ugaauccgacagugaguug

SEQ ID NO: 848813 - RNA, 19 nt, Homo sapiens
  misc_RNA (1)...(19): siRNA sense strand
uggaacaacagcuugaaga

SEQ ID NO: 848814 - RNA, 19 nt, Homo sapiens
  misc_RNA (1)...(19): siRNA sense strand
aaucggaagcgacuagaga

SEQ ID NO: 848815 - RNA, 19 nt, Homo sapiens
  misc_RNA (1)...(19): siRNA sense strand
ccaaccaagcccaaucgaa

SEQ ID NO: 848816 - RNA, 19 nt, Homo sapiens
  misc_RNA (1)...(19): siRNA sense strand
agacuccgaugacaaugag

SEQ ID NO: 848817 - RNA, 19 nt, Homo sapiens
  misc_RNA (1)...(19): siRNA sense strand
uaaagaccugcucaauaau

SEQ ID NO: 848818 - RNA, 19 nt, Homo sapiens
  misc_RNA (1)...(19): siRNA sense strand
cagagugucaggccauguu

SEQ ID NO: 848819 - RNA, 19 nt, Homo sapiens
  misc_RNA (1)...(19): siRNA sense strand
cacagguucagaagacuaa

SEQ ID NO: 848820 - RNA, 19 nt, Homo sapiens
  misc_RNA (1)...(19): siRNA sense strand
ggaugaguaugagaagacu

SEQ ID NO: 848821 - RNA, 19 nt, Homo sapiens
  misc_RNA (1)...(19): siRNA sense strand
gagaaaauuagaacuggaa

SEQ ID NO: 848822 - RNA, 19 nt, Homo sapiens
  misc_RNA (1)...(19): siRNA sense strand
caaggaagaccuggcaaac

SEQ ID NO: 848823 - RNA, 19 nt, Homo sapiens
  misc_RNA (1)...(19): siRNA sense strand
agacagccauggagaugcu

SEQ ID NO: 848824 - RNA, 19 nt, Homo sapiens
  misc_RNA (1)...(19): siRNA sense strand
agacugaggaagaauuaca

SEQ ID NO: 848825 - RNA, 19 nt, Homo sapiens
  misc_RNA (1)...(19): siRNA sense strand
acauggaagaugaugauga

SEQ ID NO: 848826 - RNA, 19 nt, Homo sapiens
  misc_RNA (1)...(19): siRNA sense strand
auaauguggccucugauga

SEQ ID NO: 848827 - RNA, 19 nt, Homo sapiens
  misc_RNA (1)...(19): siRNA sense strand
gacugaggaagaauuacaa

SEQ ID NO: 848828 - RNA, 19 nt, Homo sapiens
  misc_RNA (1)...(19): siRNA sense strand
ugagagugacaaugacuuc

SEQ ID NO: 848829 - RNA, 19 nt, Homo sapiens
  misc_RNA (1)...(19): siRNA sense strand
acacagguucagaagacua

SEQ ID NO: 848830 - RNA, 19 nt, Homo sapiens
  misc_RNA (1)...(19): siRNA sense strand
aagagaagcgccugcucaa

SEQ ID NO: 848831 - RNA, 19 nt, Homo sapiens
  misc_RNA (1)...(19): siRNA sense strand
gcaguaugacacuuaucug

SEQ ID NO: 848832 - RNA, 19 nt, Homo sapiens
  misc_RNA (1)...(19): siRNA sense strand
gaggaagaauuacaaaagc

SEQ ID NO: 848833 - RNA, 19 nt, Homo sapiens
  misc_RNA (1)...(19): siRNA sense strand
ccgagaagcugcugucuau

SEQ ID NO: 848834 - RNA, 19 nt, Homo sapiens
  misc_RNA (1)...(19): siRNA sense strand
ggagaaggacacuuacuug

SEQ ID NO: 848835 - RNA, 19 nt, Homo sapiens
  misc_RNA (1)...(19): siRNA sense strand
cagagccgcuuccauguug

SEQ ID NO: 848836 - RNA, 19 nt, Homo sapiens
  misc_RNA (1)...(19): siRNA sense strand
gagaagcugcugucuaugu

SEQ ID NO: 848837 - RNA, 19 nt, Homo sapiens
  misc_RNA (1)...(19): siRNA sense strand
gcucgaggccuuccuuuau

SEQ ID NO: 848838 - RNA, 19 nt, Homo sapiens
  misc_RNA (1)...(19): siRNA sense strand
cccaggagaugcaccagua

SEQ ID NO: 848839 - RNA, 19 nt, Homo sapiens
  misc_RNA (1)...(19): siRNA sense strand
ugcaagaccugcuggacua

SEQ ID NO: 848840 - RNA, 19 nt, Homo sapiens
  misc_RNA (1)...(19): siRNA sense strand
cgaaaccucuucaggaacu

SEQ ID NO: 848841 - RNA, 19 nt, Homo sapiens
  misc_RNA (1)...(19): siRNA sense strand
ccaugucgguguaccaaga

SEQ ID NO: 848842 - RNA, 19 nt, Homo sapiens
  misc_RNA (1)...(19): siRNA sense strand
guacaugugggccuucuug

SEQ ID NO: 848843 - RNA, 19 nt, Homo sapiens
  misc_RNA (1)...(19): siRNA sense strand
ucgaggccuuccuuuauaa

SEQ ID NO: 848844 - RNA, 19 nt, Homo sapiens
  misc_RNA (1)...(19): siRNA sense strand
cucgaggccuuccuuuaua

SEQ ID NO: 848845 - RNA, 19 nt, Homo sapiens
  misc_RNA (1)...(19): siRNA sense strand
gggagaaggacacuuacuu

SEQ ID NO: 848846 - RNA, 19 nt, Homo sapiens
  misc_RNA (1)...(19): siRNA sense strand
gagaugcaccaguacaugu

SEQ ID NO: 848847 - RNA, 19 nt, Homo sapiens
  misc_RNA (1)...(19): siRNA sense strand
cugcacggcuucccugaga

SEQ ID NO: 848848 - RNA, 19 nt, Homo sapiens
  misc_RNA (1)...(19): siRNA sense strand
accgaaaccucuucaggaa

SEQ ID NO: 848849 - RNA, 19 nt, Homo sapiens
  misc_RNA (1)...(19): siRNA sense strand
ggccuuccuuuauaacuuc

SEQ ID NO: 848850 - RNA, 19 nt, Homo sapiens
  misc_RNA (1)...(19): siRNA sense strand
ggagaugcaccaguacaug

SEQ ID NO: 848851 - RNA, 19 nt, Homo sapiens
  misc_RNA (1)...(19): siRNA sense strand
ggaugcaccucgggaugug

SEQ ID NO: 848852 - RNA, 19 nt, Homo sapiens
  misc_RNA (1)...(19): siRNA sense strand
gagcugaccacacccacau

SEQ ID NO: 848853 - RNA, 19 nt, Homo sapiens
  misc_RNA (1)...(19): siRNA sense strand
agaaggacacuuacuugga

SEQ ID NO: 848854 - RNA, 19 nt, Homo sapiens
  misc_RNA (1)...(19): siRNA sense strand
ccagagccgcuuccauguu

SEQ ID NO: 848855 - RNA, 19 nt, Homo sapiens
  misc_RNA (1)...(19): siRNA sense strand
caugugggccuucuugcaa

SEQ ID NO: 848856 - RNA, 19 nt, Homo sapiens
  misc_RNA (1)...(19): siRNA sense strand
guucuuccguucccacuac

SEQ ID NO: 848857 - RNA, 19 nt, Homo sapiens
  misc_RNA (1)...(19): siRNA sense strand
gcauuucuccaucuacuac

SEQ ID NO: 848858 - RNA, 19 nt, Homo sapiens
  misc_RNA (1)...(19): siRNA sense strand
ccacaucagccaguucuuc

SEQ ID NO: 848859 - RNA, 19 nt, Homo sapiens
  misc_RNA (1)...(19): siRNA sense strand
agaagcugcugucuauguc

SEQ ID NO: 848860 - RNA, 19 nt, Homo sapiens
  misc_RNA (1)...(19): siRNA sense strand
gcugaccacacccacauug

SEQ ID NO: 848861 - RNA, 19 nt, Homo sapiens
  misc_RNA (1)...(19): siRNA sense strand
gaaaccucuucaggaacuu

SEQ ID NO: 848862 - RNA, 19 nt, Homo sapiens
  misc_RNA (1)...(19): siRNA sense strand
gagcucgaggccuuccuuu

SEQ ID NO: 848863 - RNA, 19 nt, Homo sapiens
  misc_RNA (1)...(19): siRNA sense strand
gggcauuggaucccacaga

SEQ ID NO: 848864 - RNA, 19 nt, Homo sapiens
  misc_RNA (1)...(19): siRNA sense strand
ccuggcauuucuccaucua

SEQ ID NO: 848865 - RNA, 19 nt, Homo sapiens
  misc_RNA (1)...(19): siRNA sense strand
uguuguggcuguggacuug

SEQ ID NO: 848866 - RNA, 19 nt, Homo sapiens
  misc_RNA (1)...(19): siRNA sense strand
gggccugcgucugcacuau

SEQ ID NO: 848867 - RNA, 19 nt, Homo sapiens
  misc_RNA (1)...(19): siRNA sense strand
gccugcgucugcacuaugu

SEQ ID NO: 848868 - RNA, 19 nt, Homo sapiens
  misc_RNA (1)...(19): siRNA sense strand
gcggaugguuguggucagu

SEQ ID NO: 848869 - RNA, 19 nt, Homo sapiens
  misc_RNA (1)...(19): siRNA sense strand
gcauccuuguggcccauga

SEQ ID NO: 848870 - RNA, 19 nt, Homo sapiens
  misc_RNA (1)...(19): siRNA sense strand
gcugguggacaucaaagau

SEQ ID NO: 848871 - RNA, 19 nt, Homo sapiens
  misc_RNA (1)...(19): siRNA sense strand
cccacuacauguuccuguu

SEQ ID NO: 848872 - RNA, 19 nt, Homo sapiens
  misc_RNA (1)...(19): siRNA sense strand
ccacuacauguuccuguuc

SEQ ID NO: 848873 - RNA, 19 nt, Homo sapiens
  misc_RNA (1)...(19): siRNA sense strand
ugagcacgguuuccugaac

SEQ ID NO: 848874 - RNA, 19 nt, Homo sapiens
  misc_RNA (1)...(19): siRNA sense strand
gaacuggaauguuucuuuc

SEQ ID NO: 848875 - RNA, 19 nt, Homo sapiens
  misc_RNA (1)...(19): siRNA sense strand
ucaauaaacccaccaguaa

SEQ ID NO: 848876 - RNA, 19 nt, Homo sapiens
  misc_RNA (1)...(19): siRNA sense strand
gcgaagaagucaaauugug

SEQ ID NO: 848877 - RNA, 19 nt, Homo sapiens
  misc_RNA (1)...(19): siRNA sense strand
gaagaagucaaauugugua

SEQ ID NO: 848878 - RNA, 19 nt, Homo sapiens
  misc_RNA (1)...(19): siRNA sense strand
caacaguaaugccaauugu

SEQ ID NO: 848879 - RNA, 19 nt, Homo sapiens
  misc_RNA (1)...(19): siRNA sense strand
gaagaccaauuuucucaaa

SEQ ID NO: 848880 - RNA, 19 nt, Homo sapiens
  misc_RNA (1)...(19): siRNA sense strand
gaaaacaaacauaggcuua

SEQ ID NO: 848881 - RNA, 19 nt, Homo sapiens
  misc_RNA (1)...(19): siRNA sense strand
caacaacaauguccuugac

SEQ ID NO: 848882 - RNA, 19 nt, Homo sapiens
  misc_RNA (1)...(19): siRNA sense strand
gaauguuucuuucaucacu

SEQ ID NO: 848883 - RNA, 19 nt, Homo sapiens
  misc_RNA (1)...(19): siRNA sense strand
aaacaucagugacauucau

SEQ ID NO: 848884 - RNA, 19 nt, Homo sapiens
  misc_RNA (1)...(19): siRNA sense strand
gcaacaguaaugccaauug

SEQ ID NO: 848885 - RNA, 19 nt, Homo sapiens
  misc_RNA (1)...(19): siRNA sense strand
gcaacaacaauguccuuga

SEQ ID NO: 848886 - RNA, 19 nt, Homo sapiens
  misc_RNA (1)...(19): siRNA sense strand
gcgaguggcuggagagcau

SEQ ID NO: 848887 - RNA, 19 nt, Homo sapiens
  misc_RNA (1)...(19): siRNA sense strand
ggaguaguucucaauguga

SEQ ID NO: 848888 - RNA, 19 nt, Homo sapiens
  misc_RNA (1)...(19): siRNA sense strand
aaacaaacauaggcuuauc

SEQ ID NO: 848889 - RNA, 19 nt, Homo sapiens
  misc_RNA (1)...(19): siRNA sense strand
ugugauaccucuaauuguc

SEQ ID NO: 848890 - RNA, 19 nt, Homo sapiens
  misc_RNA (1)...(19): siRNA sense strand
aagguccucucauguguaa

SEQ ID NO: 848891 - RNA, 19 nt, Homo sapiens
  misc_RNA (1)...(19): siRNA sense strand
aagcgaagaagucaaauug

SEQ ID NO: 848892 - RNA, 19 nt, Homo sapiens
  misc_RNA (1)...(19): siRNA sense strand
uuaggucuauugcuuguug

SEQ ID NO: 848893 - RNA, 19 nt, Homo sapiens
  misc_RNA (1)...(19): siRNA sense strand
cauccaggcucucuuaaaa

SEQ ID NO: 848894 - RNA, 19 nt, Homo sapiens
  misc_RNA (1)...(19): siRNA sense strand
aacauaggcuuauccacuu

SEQ ID NO: 848895 - RNA, 19 nt, Homo sapiens
  misc_RNA (1)...(19): siRNA sense strand
uauaggagcaggucugaug

SEQ ID NO: 848896 - RNA, 19 nt, Homo sapiens
  misc_RNA (1)...(19): siRNA sense strand
gguccucucauguguaauu

SEQ ID NO: 848897 - RNA, 19 nt, Homo sapiens
  misc_RNA (1)...(19): siRNA sense strand
acaguaaugccaauuguga

SEQ ID NO: 848898 - RNA, 19 nt, Homo sapiens
  misc_RNA (1)...(19): siRNA sense strand
cgaagaagucaaauugugu

SEQ ID NO: 848899 - RNA, 19 nt, Homo sapiens
  misc_RNA (1)...(19): siRNA sense strand
gaguaguucucaaugugau

SEQ ID NO: 848900 - RNA, 19 nt, Homo sapiens
  misc_RNA (1)...(19): siRNA sense strand
aaugugauaccucuaauug

SEQ ID NO: 848901 - RNA, 19 nt, Homo sapiens
  misc_RNA (1)...(19): siRNA sense strand
gcuuauccacuucucagua

SEQ ID NO: 848902 - RNA, 19 nt, Homo sapiens
  misc_RNA (1)...(19): siRNA sense strand
gagcaucuaguuuccacuu

SEQ ID NO: 848903 - RNA, 19 nt, Homo sapiens
  misc_RNA (1)...(19): siRNA sense strand
uggaauguuucuuucauca

SEQ ID NO: 848904 - RNA, 19 nt, Homo sapiens
  misc_RNA (1)...(19): siRNA sense strand
caacaacagaacuggaaug

SEQ ID NO: 848905 - RNA, 19 nt, Homo sapiens
  misc_RNA (1)...(19): siRNA sense strand
ucuauugcuuguuggaauu

SEQ ID NO: 848906 - RNA, 19 nt, Homo sapiens
  misc_RNA (1)...(19): siRNA sense strand
cuuauccacuucucaguau

SEQ ID NO: 848907 - RNA, 19 nt, Homo sapiens
  misc_RNA (1)...(19): siRNA sense strand
agucauuggugcucuguau

SEQ ID NO: 848908 - RNA, 19 nt, Homo sapiens
  misc_RNA (1)...(19): siRNA sense strand
uaggaguaguucucaaugu

SEQ ID NO: 848909 - RNA, 19 nt, Homo sapiens
  misc_RNA (1)...(19): siRNA sense strand
gugcaccuccuacugguuu

SEQ ID NO: 848910 - RNA, 19 nt, Homo sapiens
  misc_RNA (1)...(19): siRNA sense strand
ucaaugugauaccucuaau

SEQ ID NO: 848911 - RNA, 19 nt, Homo sapiens
  misc_RNA (1)...(19): siRNA sense strand
uccagaauccuucaacuug

SEQ ID NO: 848912 - RNA, 19 nt, Homo sapiens
  misc_RNA (1)...(19): siRNA sense strand
ucuaagcgaagaagucaaa

SEQ ID NO: 848913 - RNA, 19 nt, Homo sapiens
  misc_RNA (1)...(19): siRNA sense strand
cagaauccuucaacuugca

SEQ ID NO: 848914 - RNA, 19 nt, Homo sapiens
  misc_RNA (1)...(19): siRNA sense strand
uaagcgaagaagucaaauu

SEQ ID NO: 848915 - RNA, 19 nt, Homo sapiens
  misc_RNA (1)...(19): siRNA sense strand
aggaguaguucucaaugug

SEQ ID NO: 848916 - RNA, 19 nt, Homo sapiens
  misc_RNA (1)...(19): siRNA sense strand
caaugugauaccucuaauu

SEQ ID NO: 848917 - RNA, 19 nt, Homo sapiens
  misc_RNA (1)...(19): siRNA sense strand
gucagauagucaucgguuu

SEQ ID NO: 848918 - RNA, 19 nt, Homo sapiens
  misc_RNA (1)...(19): siRNA sense strand
uguauugcaugcugauauc

SEQ ID NO: 848919 - RNA, 19 nt, Homo sapiens
  misc_RNA (1)...(19): siRNA sense strand
gauagucaucgguuuccuu

SEQ ID NO: 848920 - RNA, 19 nt, Homo sapiens
  misc_RNA (1)...(19): siRNA sense strand
uauccacuucucaguauuu

SEQ ID NO: 848921 - RNA, 19 nt, Homo sapiens
  misc_RNA (1)...(19): siRNA sense strand
gcuggagagcaucuaguuu

SEQ ID NO: 848922 - RNA, 19 nt, Homo sapiens
  misc_RNA (1)...(19): siRNA sense strand
ucauuggugcucuguauug

SEQ ID NO: 848923 - RNA, 19 nt, Homo sapiens
  misc_RNA (1)...(19): siRNA sense strand
gcaacaacagaacuggaau

SEQ ID NO: 848924 - RNA, 19 nt, Homo sapiens
  misc_RNA (1)...(19): siRNA sense strand
caucuaguuuccacuucga

SEQ ID NO: 848925 - RNA, 19 nt, Homo sapiens
  misc_RNA (1)...(19): siRNA sense strand
aagcaacaguaaugccaau

SEQ ID NO: 848926 - RNA, 19 nt, Homo sapiens
  misc_RNA (1)...(19): siRNA sense strand
cuuaaaagguccucucaug

SEQ ID NO: 848927 - RNA, 19 nt, Homo sapiens
  misc_RNA (1)...(19): siRNA sense strand
guuaggaguaguucucaau

SEQ ID NO: 848928 - RNA, 19 nt, Homo sapiens
  misc_RNA (1)...(19): siRNA sense strand
ucagauagucaucgguuuc

SEQ ID NO: 848929 - RNA, 19 nt, Homo sapiens
  misc_RNA (1)...(19): siRNA sense strand
gucuauugcuuguuggaau

SEQ ID NO: 848930 - RNA, 19 nt, Homo sapiens
  misc_RNA (1)...(19): siRNA sense strand
uucaauaaacccaccagua

SEQ ID NO: 848931 - RNA, 19 nt, Homo sapiens
  misc_RNA (1)...(19): siRNA sense strand
cagcuuaguugaggaagac

SEQ ID NO: 848932 - RNA, 19 nt, Homo sapiens
  misc_RNA (1)...(19): siRNA sense strand
caauaaacccaccaguaac

SEQ ID NO: 848933 - RNA, 19 nt, Homo sapiens
  misc_RNA (1)...(19): siRNA sense strand
ccauccaggcucucuuaaa

SEQ ID NO: 848934 - RNA, 19 nt, Homo sapiens
  misc_RNA (1)...(19): siRNA sense strand
gauggccauuccagcaaca

SEQ ID NO: 848935 - RNA, 19 nt, Homo sapiens
  misc_RNA (1)...(19): siRNA sense strand
ucagcuuaguugaggaaga

SEQ ID NO: 848936 - RNA, 19 nt, Homo sapiens
  misc_RNA (1)...(19): siRNA sense strand
cagugacauucauccagaa

SEQ ID NO: 848937 - RNA, 19 nt, Homo sapiens
  misc_RNA (1)...(19): siRNA sense strand
uaaaagguccucucaugug

SEQ ID NO: 848938 - RNA, 19 nt, Homo sapiens
  misc_RNA (1)...(19): siRNA sense strand
agagcgugcugcaacaaca

SEQ ID NO: 848939 - RNA, 19 nt, Homo sapiens
  misc_RNA (1)...(19): siRNA sense strand
cuggagagcaucuaguuuc

SEQ ID NO: 848940 - RNA, 19 nt, Homo sapiens
  misc_RNA (1)...(19): siRNA sense strand
ccuccuacugguuucaaua

SEQ ID NO: 848941 - RNA, 19 nt, Homo sapiens
  misc_RNA (1)...(19): siRNA sense strand
ucuccaagcaacaguaaug

SEQ ID NO: 848942 - RNA, 19 nt, Homo sapiens
  misc_RNA (1)...(19): siRNA sense strand
aaagguccucucaugugua

SEQ ID NO: 848943 - RNA, 19 nt, Homo sapiens
  misc_RNA (1)...(19): siRNA sense strand
cagcaacaacaauguccuu

SEQ ID NO: 848944 - RNA, 19 nt, Homo sapiens
  misc_RNA (1)...(19): siRNA sense strand
aaaagguccucucaugugu

SEQ ID NO: 848945 - RNA, 19 nt, Homo sapiens
  misc_RNA (1)...(19): siRNA sense strand
gggcucagucagauaguca

SEQ ID NO: 848946 - RNA, 19 nt, Homo sapiens
  misc_RNA (1)...(19): siRNA sense strand
ggcuggagagcaucuaguu

SEQ ID NO: 848947 - RNA, 19 nt, Homo sapiens
  misc_RNA (1)...(19): siRNA sense strand
cauccagaauccuucaacu

SEQ ID NO: 848948 - RNA, 19 nt, Homo sapiens
  misc_RNA (1)...(19): siRNA sense strand
ccucucauguguaauucuc

SEQ ID NO: 848949 - RNA, 19 nt, Homo sapiens
  misc_RNA (1)...(19): siRNA sense strand
gaacaaacaccgacaguga

SEQ ID NO: 848950 - RNA, 19 nt, Homo sapiens
  misc_RNA (1)...(19): siRNA sense strand
ggaugggucugaggaauuu

SEQ ID NO: 848951 - RNA, 19 nt, Homo sapiens
  misc_RNA (1)...(19): siRNA sense strand
gcaggagagugaggagaaa

SEQ ID NO: 848952 - RNA, 19 nt, Homo sapiens
  misc_RNA (1)...(19): siRNA sense strand
ggaccugcccgauccugua

SEQ ID NO: 848953 - RNA, 19 nt, Homo sapiens
  misc_RNA (1)...(19): siRNA sense strand
gcacaaucgccucccacua

SEQ ID NO: 848954 - RNA, 19 nt, Homo sapiens
  misc_RNA (1)...(19): siRNA sense strand
cgacagugaaggagaguga

SEQ ID NO: 848955 - RNA, 19 nt, Homo sapiens
  misc_RNA (1)...(19): siRNA sense strand
gaaaaggggagggaaguuu

SEQ ID NO: 848956 - RNA, 19 nt, Homo sapiens
  misc_RNA (1)...(19): siRNA sense strand
cacaaucgccucccacuag

SEQ ID NO: 848957 - RNA, 19 nt, Homo sapiens
  misc_RNA (1)...(19): siRNA sense strand
ggcccuacgucuccgcaaa

SEQ ID NO: 848958 - RNA, 19 nt, Homo sapiens
  misc_RNA (1)...(19): siRNA sense strand
ggcaggggcuucuucauug

SEQ ID NO: 848959 - RNA, 19 nt, Homo sapiens
  misc_RNA (1)...(19): siRNA sense strand
gaccugcccgauccuguaa

SEQ ID NO: 848960 - RNA, 19 nt, Homo sapiens
  misc_RNA (1)...(19): siRNA sense strand
agagugaccugagcaagca

SEQ ID NO: 848961 - RNA, 19 nt, Homo sapiens
  misc_RNA (1)...(19): siRNA sense strand
ccacuagcggugacuguug

SEQ ID NO: 848962 - RNA, 19 nt, Homo sapiens
  misc_RNA (1)...(19): siRNA sense strand
aaacaccgacagugaagga

SEQ ID NO: 848963 - RNA, 19 nt, Homo sapiens
  misc_RNA (1)...(19): siRNA sense strand
ggcaggagagugaggagaa

SEQ ID NO: 848964 - RNA, 19 nt, Homo sapiens
  misc_RNA (1)...(19): siRNA sense strand
ggucugaggaauuugaaca

SEQ ID NO: 848965 - RNA, 19 nt, Homo sapiens
  misc_RNA (1)...(19): siRNA sense strand
guggaugggucugaggaau

SEQ ID NO: 848966 - RNA, 19 nt, Homo sapiens
  misc_RNA (1)...(19): siRNA sense strand
uguaacaacccucgugcuu

SEQ ID NO: 848967 - RNA, 19 nt, Homo sapiens
  misc_RNA (1)...(19): siRNA sense strand
aaaaggggagggaaguuua

SEQ ID NO: 848968 - RNA, 19 nt, Homo sapiens
  misc_RNA (1)...(19): siRNA sense strand
gaaguuuagaugggaagug

SEQ ID NO: 848969 - RNA, 19 nt, Homo sapiens
  misc_RNA (1)...(19): siRNA sense strand
aacaaacaccgacagugaa

SEQ ID NO: 848970 - RNA, 19 nt, Homo sapiens
  misc_RNA (1)...(19): siRNA sense strand
ucaagaagcuguacaaagu

SEQ ID NO: 848971 - RNA, 19 nt, Homo sapiens
  misc_RNA (1)...(19): siRNA sense strand
ccaaggaguuacuggaauu

SEQ ID NO: 848972 - RNA, 19 nt, Homo sapiens
  misc_RNA (1)...(19): siRNA sense strand
cgaaacgccugcccaacug

SEQ ID NO: 848973 - RNA, 19 nt, Homo sapiens
  misc_RNA (1)...(19): siRNA sense strand
ggaggugcccaaggaguua

SEQ ID NO: 848974 - RNA, 19 nt, Homo sapiens
  misc_RNA (1)...(19): siRNA sense strand
ccauguggaucccuauguu

SEQ ID NO: 848975 - RNA, 19 nt, Homo sapiens
  misc_RNA (1)...(19): siRNA sense strand
ggcagggcuuggaggcuua

SEQ ID NO: 848976 - RNA, 19 nt, Homo sapiens
  misc_RNA (1)...(19): siRNA sense strand
gaucaagaagcuguacaaa

SEQ ID NO: 848977 - RNA, 19 nt, Homo sapiens
  misc_RNA (1)...(19): siRNA sense strand
cagcaucagcccagauaaa

SEQ ID NO: 848978 - RNA, 19 nt, Homo sapiens
  misc_RNA (1)...(19): siRNA sense strand
cagagucgcugcccaacgu

SEQ ID NO: 848979 - RNA, 19 nt, Homo sapiens
  misc_RNA (1)...(19): siRNA sense strand
cagauaaagcccagccaaa

SEQ ID NO: 848980 - RNA, 19 nt, Homo sapiens
  misc_RNA (1)...(19): siRNA sense strand
gauaaagcccagccaaagg

SEQ ID NO: 848981 - RNA, 19 nt, Homo sapiens
  misc_RNA (1)...(19): siRNA sense strand
ggaucaagaagcuguacaa

SEQ ID NO: 848982 - RNA, 19 nt, Homo sapiens
  misc_RNA (1)...(19): siRNA sense strand
ccaacgugguggugaaugg

SEQ ID NO: 848983 - RNA, 19 nt, Homo sapiens
  misc_RNA (1)...(19): siRNA sense strand
caagaagcuguacaaagug

SEQ ID NO: 848984 - RNA, 19 nt, Homo sapiens
  misc_RNA (1)...(19): siRNA sense strand
gcccaaggaguuacuggaa

SEQ ID NO: 848985 - RNA, 19 nt, Homo sapiens
  misc_RNA (1)...(19): siRNA sense strand
gcacaagcggaucaagaag

SEQ ID NO: 848986 - RNA, 19 nt, Homo sapiens
  misc_RNA (1)...(19): siRNA sense strand
accaggaggugcccaagga

SEQ ID NO: 848987 - RNA, 19 nt, Homo sapiens
  misc_RNA (1)...(19): siRNA sense strand
cucuacagcuucagcauca

SEQ ID NO: 848988 - RNA, 19 nt, Homo sapiens
  misc_RNA (1)...(19): siRNA sense strand
cauguggaucccuauguuu

SEQ ID NO: 848989 - RNA, 19 nt, Homo sapiens
  misc_RNA (1)...(19): siRNA sense strand
cccaaggaguuacuggaau

SEQ ID NO: 848990 - RNA, 19 nt, Homo sapiens
  misc_RNA (1)...(19): siRNA sense strand
acaagcggaucaagaagcu

SEQ ID NO: 848991 - RNA, 19 nt, Homo sapiens
  misc_RNA (1)...(19): siRNA sense strand
gggcuuggaggcuuacauc

SEQ ID NO: 848992 - RNA, 19 nt, Homo sapiens
  misc_RNA (1)...(19): siRNA sense strand
ugcacaagcggaucaagaa

SEQ ID NO: 848993 - RNA, 19 nt, Homo sapiens
  misc_RNA (1)...(19): siRNA sense strand
ggaccagaggguuggaaca

SEQ ID NO: 848994 - RNA, 19 nt, Homo sapiens
  misc_RNA (1)...(19): siRNA sense strand
agauaaagcccagccaaag

SEQ ID NO: 848995 - RNA, 19 nt, Homo sapiens
  misc_RNA (1)...(19): siRNA sense strand
gcggagaguuggcgacuuu

SEQ ID NO: 848996 - RNA, 19 nt, Homo sapiens
  misc_RNA (1)...(19): siRNA sense strand
cgaagcacguggucuguca

SEQ ID NO: 848997 - RNA, 19 nt, Homo sapiens
  misc_RNA (1)...(19): siRNA sense strand
gaacgcaccgggagcaaaa

SEQ ID NO: 848998 - RNA, 19 nt, Homo sapiens
  misc_RNA (1)...(19): siRNA sense strand
ggagaguuggcgacuuuca

SEQ ID NO: 848999 - RNA, 19 nt, Homo sapiens
  misc_RNA (1)...(19): siRNA sense strand
caucagcaaaccacauugu

SEQ ID NO: 849000 - RNA, 19 nt, Homo sapiens
  misc_RNA (1)...(19): siRNA sense strand
gggcuggacauucggacaa

SEQ ID NO: 849001 - RNA, 19 nt, Homo sapiens
  misc_RNA (1)...(19): siRNA sense strand
gcccugcggaguucacuga

SEQ ID NO: 849002 - RNA, 19 nt, Homo sapiens
  misc_RNA (1)...(19): siRNA sense strand
gcgacuuucacucugcuuu

SEQ ID NO: 849003 - RNA, 19 nt, Homo sapiens
  misc_RNA (1)...(19): siRNA sense strand
gaauauagcagaaagacua

SEQ ID NO: 849004 - RNA, 19 nt, Homo sapiens
  misc_RNA (1)...(19): siRNA sense strand
gagcauuucugcacuggua

SEQ ID NO: 849005 - RNA, 19 nt, Homo sapiens
  misc_RNA (1)...(19): siRNA sense strand
gcacacaaaugcaucuuuc

SEQ ID NO: 849006 - RNA, 19 nt, Homo sapiens
  misc_RNA (1)...(19): siRNA sense strand
acaaaugcaucuuucgaua

SEQ ID NO: 849007 - RNA, 19 nt, Homo sapiens
  misc_RNA (1)...(19): siRNA sense strand
gaauguagaccuaauugaa

SEQ ID NO: 849008 - RNA, 19 nt, Homo sapiens
  misc_RNA (1)...(19): siRNA sense strand
uaugauauaugccaucgua

SEQ ID NO: 849009 - RNA, 19 nt, Homo sapiens
  misc_RNA (1)...(19): siRNA sense strand
caaauggcguuguucuuga

SEQ ID NO: 849010 - RNA, 19 nt, Homo sapiens
  misc_RNA (1)...(19): siRNA sense strand
gaggcacucuguucaguuu

SEQ ID NO: 849011 - RNA, 19 nt, Homo sapiens
  misc_RNA (1)...(19): siRNA sense strand
ggaggaugcugccaacaau

SEQ ID NO: 849012 - RNA, 19 nt, Homo sapiens
  misc_RNA (1)...(19): siRNA sense strand
ggaagugaaugcagcaauc

SEQ ID NO: 849013 - RNA, 19 nt, Homo sapiens
  misc_RNA (1)...(19): siRNA sense strand
caucgucucugcugacaaa

SEQ ID NO: 849014 - RNA, 19 nt, Homo sapiens
  misc_RNA (1)...(19): siRNA sense strand
ggagccaacuguuauagau

SEQ ID NO: 849015 - RNA, 19 nt, Homo sapiens
  misc_RNA (1)...(19): siRNA sense strand
ggaacucuauugccuggaa

SEQ ID NO: 849016 - RNA, 19 nt, Homo sapiens
  misc_RNA (1)...(19): siRNA sense strand
caucaccacugcuugcuuu

SEQ ID NO: 849017 - RNA, 19 nt, Homo sapiens
  misc_RNA (1)...(19): siRNA sense strand
ggagagggacuaugaggaa

SEQ ID NO: 849018 - RNA, 19 nt, Homo sapiens
  misc_RNA (1)...(19): siRNA sense strand
ggacaacgaggccgucuau

SEQ ID NO: 849019 - RNA, 19 nt, Homo sapiens
  misc_RNA (1)...(19): siRNA sense strand
gacaagagcugggaagcau

SEQ ID NO: 849020 - RNA, 19 nt, Homo sapiens
  misc_RNA (1)...(19): siRNA sense strand
ccacaaguuugaccucaug

SEQ ID NO: 849021 - RNA, 19 nt, Homo sapiens
  misc_RNA (1)...(19): siRNA sense strand
ggguuuacgucucucuuaa

SEQ ID NO: 849022 - RNA, 19 nt, Homo sapiens
  misc_RNA (1)...(19): siRNA sense strand
gaaagacuaagcuggaguu

SEQ ID NO: 849023 - RNA, 19 nt, Homo sapiens
  misc_RNA (1)...(19): siRNA sense strand
ggaaguggcgcaaaguuuc

SEQ ID NO: 849024 - RNA, 19 nt, Homo sapiens
  misc_RNA (1)...(19): siRNA sense strand
agacuaagcuggaguucuc

SEQ ID NO: 849025 - RNA, 19 nt, Homo sapiens
  misc_RNA (1)...(19): siRNA sense strand
caacgaggccgucuaugau

SEQ ID NO: 849026 - RNA, 19 nt, Homo sapiens
  misc_RNA (1)...(19): siRNA sense strand
ugacaaagccuaccaugag

SEQ ID NO: 849027 - RNA, 19 nt, Homo sapiens
  misc_RNA (1)...(19): siRNA sense strand
ccaaauggcguuguucuug

SEQ ID NO: 849028 - RNA, 19 nt, Homo sapiens
  misc_RNA (1)...(19): siRNA sense strand
gcacugguaccucagagaa

SEQ ID NO: 849029 - RNA, 19 nt, Homo sapiens
  misc_RNA (1)...(19): siRNA sense strand
uuacgucucucuuaaugga

SEQ ID NO: 849030 - RNA, 19 nt, Homo sapiens
  misc_RNA (1)...(19): siRNA sense strand
uaaacucgguguugaaugc

SEQ ID NO: 849031 - RNA, 19 nt, Homo sapiens
  misc_RNA (1)...(19): siRNA sense strand
gcacucuguucaguuugua

SEQ ID NO: 849032 - RNA, 19 nt, Homo sapiens
  misc_RNA (1)...(19): siRNA sense strand
gaagcuggcagaacagugu

SEQ ID NO: 849033 - RNA, 19 nt, Homo sapiens
  misc_RNA (1)...(19): siRNA sense strand
gcccuugaauguagaccua

SEQ ID NO: 849034 - RNA, 19 nt, Homo sapiens
  misc_RNA (1)...(19): siRNA sense strand
ggugguaucuuccaucacu

SEQ ID NO: 849035 - RNA, 19 nt, Homo sapiens
  misc_RNA (1)...(19): siRNA sense strand
guuuacgucucucuuaaug

SEQ ID NO: 849036 - RNA, 19 nt, Homo sapiens
  misc_RNA (1)...(19): siRNA sense strand
gauaccuucuucugugaga

SEQ ID NO: 849037 - RNA, 19 nt, Homo sapiens
  misc_RNA (1)...(19): siRNA sense strand
acaacgaggccgucuauga

SEQ ID NO: 849038 - RNA, 19 nt, Homo sapiens
  misc_RNA (1)...(19): siRNA sense strand
caugagcaguucucugugu

SEQ ID NO: 849039 - RNA, 19 nt, Homo sapiens
  misc_RNA (1)...(19): siRNA sense strand
gugguggacuucagggauu

SEQ ID NO: 849040 - RNA, 19 nt, Homo sapiens
  misc_RNA (1)...(19): siRNA sense strand
aggaugcugccaacaauua

SEQ ID NO: 849041 - RNA, 19 nt, Homo sapiens
  misc_RNA (1)...(19): siRNA sense strand
ugauauaugccaucguaaa

SEQ ID NO: 849042 - RNA, 19 nt, Homo sapiens
  misc_RNA (1)...(19): siRNA sense strand
guucaggguuuacgucucu

SEQ ID NO: 849043 - RNA, 19 nt, Homo sapiens
  misc_RNA (1)...(19): siRNA sense strand
caggugguaucuuccauca

SEQ ID NO: 849044 - RNA, 19 nt, Homo sapiens
  misc_RNA (1)...(19): siRNA sense strand
gaggaaguggcgcaaaguu

SEQ ID NO: 849045 - RNA, 19 nt, Homo sapiens
  misc_RNA (1)...(19): siRNA sense strand
gggagugccuuuccaucca

SEQ ID NO: 849046 - RNA, 19 nt, Homo sapiens
  misc_RNA (1)...(19): siRNA sense strand
gagggacuaugaggaagug

SEQ ID NO: 849047 - RNA, 19 nt, Homo sapiens
  misc_RNA (1)...(19): siRNA sense strand
gaggcucacaggagaauau

SEQ ID NO: 849048 - RNA, 19 nt, Homo sapiens
  misc_RNA (1)...(19): siRNA sense strand
ccucagagaaggcauggaa

SEQ ID NO: 849049 - RNA, 19 nt, Homo sapiens
  misc_RNA (1)...(19): siRNA sense strand
ucaacaggaucagcuggaa

SEQ ID NO: 849050 - RNA, 19 nt, Homo sapiens
  misc_RNA (1)...(19): siRNA sense strand
caacaggaucagcuggaaa

SEQ ID NO: 849051 - RNA, 19 nt, Homo sapiens
  misc_RNA (1)...(19): siRNA sense strand
gauauaugccaucguaaac

SEQ ID NO: 849052 - RNA, 19 nt, Homo sapiens
  misc_RNA (1)...(19): siRNA sense strand
cgaggccgucuaugauaua

SEQ ID NO: 849053 - RNA, 19 nt, Homo sapiens
  misc_RNA (1)...(19): siRNA sense strand
ggagaauauagcagaaaga

SEQ ID NO: 849054 - RNA, 19 nt, Homo sapiens
  misc_RNA (1)...(19): siRNA sense strand
ucgauaccuucuucuguga

SEQ ID NO: 849055 - RNA, 19 nt, Homo sapiens
  misc_RNA (1)...(19): siRNA sense strand
ucagagaaggcauggaaga

SEQ ID NO: 849056 - RNA, 19 nt, Homo sapiens
  misc_RNA (1)...(19): siRNA sense strand
ggccgucuaugauauaugc

SEQ ID NO: 849057 - RNA, 19 nt, Homo sapiens
  misc_RNA (1)...(19): siRNA sense strand
gcguuguucuugacacuca

SEQ ID NO: 849058 - RNA, 19 nt, Homo sapiens
  misc_RNA (1)...(19): siRNA sense strand
ggcacugguucaggguuua

SEQ ID NO: 849059 - RNA, 19 nt, Homo sapiens
  misc_RNA (1)...(19): siRNA sense strand
cccggaagcuggcagaaca

SEQ ID NO: 849060 - RNA, 19 nt, Homo sapiens
  misc_RNA (1)...(19): siRNA sense strand
ccagcaccguucacucuuc

SEQ ID NO: 849061 - RNA, 19 nt, Homo sapiens
  misc_RNA (1)...(19): siRNA sense strand
caaaugcaucuuucgauac

SEQ ID NO: 849062 - RNA, 19 nt, Homo sapiens
  misc_RNA (1)...(19): siRNA sense strand
gcaacaccacggcgauugu

SEQ ID NO: 849063 - RNA, 19 nt, Homo sapiens
  misc_RNA (1)...(19): siRNA sense strand
caaggugggcaucaacaau

SEQ ID NO: 849064 - RNA, 19 nt, Homo sapiens
  misc_RNA (1)...(19): siRNA sense strand
gaggccgucuaugauauau

SEQ ID NO: 849065 - RNA, 19 nt, Homo sapiens
  misc_RNA (1)...(19): siRNA sense strand
guaccuucaugguggacaa

SEQ ID NO: 849066 - RNA, 19 nt, Homo sapiens
  misc_RNA (1)...(19): siRNA sense strand
acaggagaauauagcagaa

SEQ ID NO: 849067 - RNA, 19 nt, Homo sapiens
  misc_RNA (1)...(19): siRNA sense strand
caagagcugggaagcaugu

SEQ ID NO: 849068 - RNA, 19 nt, Homo sapiens
  misc_RNA (1)...(19): siRNA sense strand
gagcaacaccacggcgauu

SEQ ID NO: 849069 - RNA, 19 nt, Homo sapiens
  misc_RNA (1)...(19): siRNA sense strand
uauaugccaucguaaacuc

SEQ ID NO: 849070 - RNA, 19 nt, Homo sapiens
  misc_RNA (1)...(19): siRNA sense strand
gaacagugugguggacuuc

SEQ ID NO: 849071 - RNA, 19 nt, Homo sapiens
  misc_RNA (1)...(19): siRNA sense strand
gaggaugcugccaacaauu

SEQ ID NO: 849072 - RNA, 19 nt, Homo sapiens
  misc_RNA (1)...(19): siRNA sense strand
caucguaaacucgguguug

SEQ ID NO: 849073 - RNA, 19 nt, Homo sapiens
  misc_RNA (1)...(19): siRNA sense strand
cgaagucgaggcacucugu

SEQ ID NO: 849074 - RNA, 19 nt, Homo sapiens
  misc_RNA (1)...(19): siRNA sense strand
gaaguggcgcaaaguuucu

SEQ ID NO: 849075 - RNA, 19 nt, Homo sapiens
  misc_RNA (1)...(19): siRNA sense strand
cauggaagaagcagaguuc

SEQ ID NO: 849076 - RNA, 19 nt, Homo sapiens
  misc_RNA (1)...(19): siRNA sense strand
cagagaaggcauggaagaa

SEQ ID NO: 849077 - RNA, 19 nt, Homo sapiens
  misc_RNA (1)...(19): siRNA sense strand
ggcacucuguucaguuugu

SEQ ID NO: 849078 - RNA, 19 nt, Homo sapiens
  misc_RNA (1)...(19): siRNA sense strand
ggagaggcucacaggagaa

SEQ ID NO: 849079 - RNA, 19 nt, Homo sapiens
  misc_RNA (1)...(19): siRNA sense strand
aaauggagcacacaaaugc

SEQ ID NO: 849080 - RNA, 19 nt, Homo sapiens
  misc_RNA (1)...(19): siRNA sense strand
gagcacucuucguggacuu

SEQ ID NO: 849081 - RNA, 19 nt, Homo sapiens
  misc_RNA (1)...(19): siRNA sense strand
acgaggccgucuaugauau

SEQ ID NO: 849082 - RNA, 19 nt, Homo sapiens
  misc_RNA (1)...(19): siRNA sense strand
gagccaacuguuauagaug

SEQ ID NO: 849083 - RNA, 19 nt, Homo sapiens
  misc_RNA (1)...(19): siRNA sense strand
gagaauauagcagaaagac

SEQ ID NO: 849084 - RNA, 19 nt, Homo sapiens
  misc_RNA (1)...(19): siRNA sense strand
caaguuugaccucauguac

SEQ ID NO: 849085 - RNA, 19 nt, Homo sapiens
  misc_RNA (1)...(19): siRNA sense strand
gguaccuuauccgagaaua

SEQ ID NO: 849086 - RNA, 19 nt, Homo sapiens
  misc_RNA (1)...(19): siRNA sense strand
agaacagugugguggacuu

SEQ ID NO: 849087 - RNA, 19 nt, Homo sapiens
  misc_RNA (1)...(19): siRNA sense strand
guacgccaagagagcauuu

SEQ ID NO: 849088 - RNA, 19 nt, Homo sapiens
  misc_RNA (1)...(19): siRNA sense strand
cacacggacuguaccuuca

SEQ ID NO: 849089 - RNA, 19 nt, Homo sapiens
  misc_RNA (1)...(19): siRNA sense strand
acacaaaugcaucuuucga

SEQ ID NO: 849090 - RNA, 19 nt, Homo sapiens
  misc_RNA (1)...(19): siRNA sense strand
gcauggaagaagcagaguu

SEQ ID NO: 849091 - RNA, 19 nt, Homo sapiens
  misc_RNA (1)...(19): siRNA sense strand
ccucauguacgccaagaga

SEQ ID NO: 849092 - RNA, 19 nt, Homo sapiens
  misc_RNA (1)...(19): siRNA sense strand
gaccucauguacgccaaga

SEQ ID NO: 849093 - RNA, 19 nt, Homo sapiens
  misc_RNA (1)...(19): siRNA sense strand
ccgccuggaccacaaguuu

SEQ ID NO: 849094 - RNA, 19 nt, Homo sapiens
  misc_RNA (1)...(19): siRNA sense strand
ucagacaucaccacugcuu

SEQ ID NO: 849095 - RNA, 19 nt, Homo sapiens
  misc_RNA (1)...(19): siRNA sense strand
ugaauguagaccuaauuga

SEQ ID NO: 849096 - RNA, 19 nt, Homo sapiens
  misc_RNA (1)...(19): siRNA sense strand
aggcacugguucaggguuu

SEQ ID NO: 849097 - RNA, 19 nt, Homo sapiens
  misc_RNA (1)...(19): siRNA sense strand
aggaaguggcgcaaaguuu

SEQ ID NO: 849098 - RNA, 19 nt, Homo sapiens
  misc_RNA (1)...(19): siRNA sense strand
ucuguucaguuuguagauu

SEQ ID NO: 849099 - RNA, 19 nt, Homo sapiens
  misc_RNA (1)...(19): siRNA sense strand
gaagucgaggcacucuguu

SEQ ID NO: 849100 - RNA, 19 nt, Homo sapiens
  misc_RNA (1)...(19): siRNA sense strand
aacgaggccgucuaugaua

SEQ ID NO: 849101 - RNA, 19 nt, Homo sapiens
  misc_RNA (1)...(19): siRNA sense strand
gagaggcucacaggagaau

SEQ ID NO: 849102 - RNA, 19 nt, Homo sapiens
  misc_RNA (1)...(19): siRNA sense strand
gccuggaccacaaguuuga

SEQ ID NO: 849103 - RNA, 19 nt, Homo sapiens
  misc_RNA (1)...(19): siRNA sense strand
gaacauuucuacuggauua

SEQ ID NO: 849104 - RNA, 19 nt, Homo sapiens
  misc_RNA (1)...(19): siRNA sense strand
gaaagacccuauaaaugua

SEQ ID NO: 849105 - RNA, 19 nt, Homo sapiens
  misc_RNA (1)...(19): siRNA sense strand
uaaagaagauggucaguau

SEQ ID NO: 849106 - RNA, 19 nt, Homo sapiens
  misc_RNA (1)...(19): siRNA sense strand
gaaccuggcuucuguagga

SEQ ID NO: 849107 - RNA, 19 nt, Homo sapiens
  misc_RNA (1)...(19): siRNA sense strand
ggaaagaccagaauauuga

SEQ ID NO: 849108 - RNA, 19 nt, Homo sapiens
  misc_RNA (1)...(19): siRNA sense strand
gguaaagcauucacuguuu

SEQ ID NO: 849109 - RNA, 19 nt, Homo sapiens
  misc_RNA (1)...(19): siRNA sense strand
gaagagggcugguugaaac

SEQ ID NO: 849110 - RNA, 19 nt, Homo sapiens
  misc_RNA (1)...(19): siRNA sense strand
ggagaaagacccuauaaau

SEQ ID NO: 849111 - RNA, 19 nt, Homo sapiens
  misc_RNA (1)...(19): siRNA sense strand
gauaaagccuucagcuguu

SEQ ID NO: 849112 - RNA, 19 nt, Homo sapiens
  misc_RNA (1)...(19): siRNA sense strand
ggaaugggcuuugcuagau

SEQ ID NO: 849113 - RNA, 19 nt, Homo sapiens
  misc_RNA (1)...(19): siRNA sense strand
gagaaagacccuauaaaug

SEQ ID NO: 849114 - RNA, 19 nt, Homo sapiens
  misc_RNA (1)...(19): siRNA sense strand
ggauguggcugugaacuuu

SEQ ID NO: 849115 - RNA, 19 nt, Homo sapiens
  misc_RNA (1)...(19): siRNA sense strand
gagaaacccuaugaaugua

SEQ ID NO: 849116 - RNA, 19 nt, Homo sapiens
  misc_RNA (1)...(19): siRNA sense strand
guacgucauucccucuuua

SEQ ID NO: 849117 - RNA, 19 nt, Homo sapiens
  misc_RNA (1)...(19): siRNA sense strand
gaagacacaugauaaugca

SEQ ID NO: 849118 - RNA, 19 nt, Homo sapiens
  misc_RNA (1)...(19): siRNA sense strand
gagaaacccuacgaaugua

SEQ ID NO: 849119 - RNA, 19 nt, Homo sapiens
  misc_RNA (1)...(19): siRNA sense strand
gagagaagcaauauaaaug

SEQ ID NO: 849120 - RNA, 19 nt, Homo sapiens
  misc_RNA (1)...(19): siRNA sense strand
gaaacccuaugaauguaaa

SEQ ID NO: 849121 - RNA, 19 nt, Homo sapiens
  misc_RNA (1)...(19): siRNA sense strand
guaggaaccuggcuucugu

SEQ ID NO: 849122 - RNA, 19 nt, Homo sapiens
  misc_RNA (1)...(19): siRNA sense strand
gagagaaacccuaugaaug

SEQ ID NO: 849123 - RNA, 19 nt, Homo sapiens
  misc_RNA (1)...(19): siRNA sense strand
gaaauccagcuuauaaaug

SEQ ID NO: 849124 - RNA, 19 nt, Homo sapiens
  misc_RNA (1)...(19): siRNA sense strand
agaaagacccuauaaaugu

SEQ ID NO: 849125 - RNA, 19 nt, Homo sapiens
  misc_RNA (1)...(19): siRNA sense strand
gaucugaacgagaacauuu

SEQ ID NO: 849126 - RNA, 19 nt, Homo sapiens
  misc_RNA (1)...(19): siRNA sense strand
gaaguugucagccaaauuc

SEQ ID NO: 849127 - RNA, 19 nt, Homo sapiens
  misc_RNA (1)...(19): siRNA sense strand
gagagaaacccuacgaaug

SEQ ID NO: 849128 - RNA, 19 nt, Homo sapiens
  misc_RNA (1)...(19): siRNA sense strand
ggaaauccagcuuauaaau

SEQ ID NO: 849129 - RNA, 19 nt, Homo sapiens
  misc_RNA (1)...(19): siRNA sense strand
ggagagaagcaauauaaau

SEQ ID NO: 849130 - RNA, 19 nt, Homo sapiens
  misc_RNA (1)...(19): siRNA sense strand
ccaugugaaugcaguauuu

SEQ ID NO: 849131 - RNA, 19 nt, Homo sapiens
  misc_RNA (1)...(19): siRNA sense strand
gguaaagccuacacucguu

SEQ ID NO: 849132 - RNA, 19 nt, Homo sapiens
  misc_RNA (1)...(19): siRNA sense strand
gaaugggcuuugcuagauu

SEQ ID NO: 849133 - RNA, 19 nt, Homo sapiens
  misc_RNA (1)...(19): siRNA sense strand
ggagagaaacccuaugaau

SEQ ID NO: 849134 - RNA, 19 nt, Homo sapiens
  misc_RNA (1)...(19): siRNA sense strand
gagaagcaauauaaaugug

SEQ ID NO: 849135 - RNA, 19 nt, Homo sapiens
  misc_RNA (1)...(19): siRNA sense strand
guucuugucuaauacauga

SEQ ID NO: 849136 - RNA, 19 nt, Homo sapiens
  misc_RNA (1)...(19): siRNA sense strand
uaaacaaugugguaaagca

SEQ ID NO: 849137 - RNA, 19 nt, Homo sapiens
  misc_RNA (1)...(19): siRNA sense strand
gaaagaagucaugauauag

SEQ ID NO: 849138 - RNA, 19 nt, Homo sapiens
  misc_RNA (1)...(19): siRNA sense strand
ggagagagacccuaugagu

SEQ ID NO: 849139 - RNA, 19 nt, Homo sapiens
  misc_RNA (1)...(19): siRNA sense strand
guaaagcauucacuguuuc

SEQ ID NO: 849140 - RNA, 19 nt, Homo sapiens
  misc_RNA (1)...(19): siRNA sense strand
gcucaguccucuucuguuc

SEQ ID NO: 849141 - RNA, 19 nt, Homo sapiens
  misc_RNA (1)...(19): siRNA sense strand
gagacugugugaaaguaaa

SEQ ID NO: 849142 - RNA, 19 nt, Homo sapiens
  misc_RNA (1)...(19): siRNA sense strand
ucagaagaaucucuacaga

SEQ ID NO: 849143 - RNA, 19 nt, Homo sapiens
  misc_RNA (1)...(19): siRNA sense strand
cgucauucccucuuuaaua

SEQ ID NO: 849144 - RNA, 19 nt, Homo sapiens
  misc_RNA (1)...(19): siRNA sense strand
guuagaagacacaugauaa

SEQ ID NO: 849145 - RNA, 19 nt, Homo sapiens
  misc_RNA (1)...(19): siRNA sense strand
agagaaacccuaugaaugu

SEQ ID NO: 849146 - RNA, 19 nt, Homo sapiens
  misc_RNA (1)...(19): siRNA sense strand
guaaagaagauggucagua

SEQ ID NO: 849147 - RNA, 19 nt, Homo sapiens
  misc_RNA (1)...(19): siRNA sense strand
cagagacugugugaaagua

SEQ ID NO: 849148 - RNA, 19 nt, Homo sapiens
  misc_RNA (1)...(19): siRNA sense strand
gagagacccuaugagugua

SEQ ID NO: 849149 - RNA, 19 nt, Homo sapiens
  misc_RNA (1)...(19): siRNA sense strand
ggagagaaacccuacgaau

SEQ ID NO: 849150 - RNA, 19 nt, Homo sapiens
  misc_RNA (1)...(19): siRNA sense strand
gucauucccucuuuaauag

SEQ ID NO: 849151 - RNA, 19 nt, Homo sapiens
  misc_RNA (1)...(19): siRNA sense strand
gggcuuugcuagauucuuc

SEQ ID NO: 849152 - RNA, 19 nt, Homo sapiens
  misc_RNA (1)...(19): siRNA sense strand
agagaaacccuacgaaugu

SEQ ID NO: 849153 - RNA, 19 nt, Homo sapiens
  misc_RNA (1)...(19): siRNA sense strand
gaaagaccagaauauugaa

SEQ ID NO: 849154 - RNA, 19 nt, Homo sapiens
  misc_RNA (1)...(19): siRNA sense strand
gagaagugaugcaggaaac

SEQ ID NO: 849155 - RNA, 19 nt, Homo sapiens
  misc_RNA (1)...(19): siRNA sense strand
aaccauagaaguacucaua

SEQ ID NO: 849156 - RNA, 19 nt, Homo sapiens
  misc_RNA (1)...(19): siRNA sense strand
caaaccauauggagagaag

SEQ ID NO: 849157 - RNA, 19 nt, Homo sapiens
  misc_RNA (1)...(19): siRNA sense strand
guagugacucagccuauaa

SEQ ID NO: 849158 - RNA, 19 nt, Homo sapiens
  misc_RNA (1)...(19): siRNA sense strand
ggaggaaugggcuuugcua

SEQ ID NO: 849159 - RNA, 19 nt, Homo sapiens
  misc_RNA (1)...(19): siRNA sense strand
gaacucacacuggagagaa

SEQ ID NO: 849160 - RNA, 19 nt, Homo sapiens
  misc_RNA (1)...(19): siRNA sense strand
gaacuuuacccaggaggaa

SEQ ID NO: 849161 - RNA, 19 nt, Homo sapiens
  misc_RNA (1)...(19): siRNA sense strand
ugugggaaauucuucguuu

SEQ ID NO: 849162 - RNA, 19 nt, Homo sapiens
  misc_RNA (1)...(19): siRNA sense strand
gagaagagggcugguugaa

SEQ ID NO: 849163 - RNA, 19 nt, Homo sapiens
  misc_RNA (1)...(19): siRNA sense strand
gaauguaaacaaugugauc

SEQ ID NO: 849164 - RNA, 19 nt, Homo sapiens
  misc_RNA (1)...(19): siRNA sense strand
guaggaagccaauggaaag

SEQ ID NO: 849165 - RNA, 19 nt, Homo sapiens
  misc_RNA (1)...(19): siRNA sense strand
cguuugaguucccuuugua

SEQ ID NO: 849166 - RNA, 19 nt, Homo sapiens
  misc_RNA (1)...(19): siRNA sense strand
caauggaaagaccagaaua

SEQ ID NO: 849167 - RNA, 19 nt, Homo sapiens
  misc_RNA (1)...(19): siRNA sense strand
ggccaaggcguguggauug

SEQ ID NO: 849168 - RNA, 19 nt, Homo sapiens
  misc_RNA (1)...(19): siRNA sense strand
ccuauaaucccagcacuuu

SEQ ID NO: 849169 - RNA, 19 nt, Homo sapiens
  misc_RNA (1)...(19): siRNA sense strand
agagagacccuaugagugu

SEQ ID NO: 849170 - RNA, 19 nt, Homo sapiens
  misc_RNA (1)...(19): siRNA sense strand
gauaaugcacaguggaaau

SEQ ID NO: 849171 - RNA, 19 nt, Homo sapiens
  misc_RNA (1)...(19): siRNA sense strand
uuccaaaucuugaucugaa

SEQ ID NO: 849172 - RNA, 19 nt, Homo sapiens
  misc_RNA (1)...(19): siRNA sense strand
gagaaguugucagccaaau

SEQ ID NO: 849173 - RNA, 19 nt, Homo sapiens
  misc_RNA (1)...(19): siRNA sense strand
cauauggagagaagcaaua

SEQ ID NO: 849174 - RNA, 19 nt, Homo sapiens
  misc_RNA (1)...(19): siRNA sense strand
uguagugacucagccuaua

SEQ ID NO: 849175 - RNA, 19 nt, Homo sapiens
  misc_RNA (1)...(19): siRNA sense strand
uaccauggaagcauucaua

SEQ ID NO: 849176 - RNA, 19 nt, Homo sapiens
  misc_RNA (1)...(19): siRNA sense strand
gacucacacuggagaaaga

SEQ ID NO: 849177 - RNA, 19 nt, Homo sapiens
  misc_RNA (1)...(19): siRNA sense strand
uggaaagaccagaauauug

SEQ ID NO: 849178 - RNA, 19 nt, Homo sapiens
  misc_RNA (1)...(19): siRNA sense strand
cuacgaauguaaggaaugu

SEQ ID NO: 849179 - RNA, 19 nt, Homo sapiens
  misc_RNA (1)...(19): siRNA sense strand
ugaaagacaucagagaacu

SEQ ID NO: 849180 - RNA, 19 nt, Homo sapiens
  misc_RNA (1)...(19): siRNA sense strand
gaaugcaguauuuguggaa

SEQ ID NO: 849181 - RNA, 19 nt, Homo sapiens
  misc_RNA (1)...(19): siRNA sense strand
ggagaagagggcugguuga

SEQ ID NO: 849182 - RNA, 19 nt, Homo sapiens
  misc_RNA (1)...(19): siRNA sense strand
ucuaauacaugaacgaacu

SEQ ID NO: 849183 - RNA, 19 nt, Homo sapiens
  misc_RNA (1)...(19): siRNA sense strand
guugaaagacaucagagaa

SEQ ID NO: 849184 - RNA, 19 nt, Homo sapiens
  misc_RNA (1)...(19): siRNA sense strand
gaacagugugggaaauucu

SEQ ID NO: 849185 - RNA, 19 nt, Homo sapiens
  misc_RNA (1)...(19): siRNA sense strand
ucaccuuacucgccaugaa

SEQ ID NO: 849186 - RNA, 19 nt, Homo sapiens
  misc_RNA (1)...(19): siRNA sense strand
uuccgguucuugucuaaua

SEQ ID NO: 849187 - RNA, 19 nt, Homo sapiens
  misc_RNA (1)...(19): siRNA sense strand
gauguggcugugaacuuua

SEQ ID NO: 849188 - RNA, 19 nt, Homo sapiens
  misc_RNA (1)...(19): siRNA sense strand
uguaagaaaugcgguaaag

SEQ ID NO: 849189 - RNA, 19 nt, Homo sapiens
  misc_RNA (1)...(19): siRNA sense strand
ggagaaguugucagccaaa

SEQ ID NO: 849190 - RNA, 19 nt, Homo sapiens
  misc_RNA (1)...(19): siRNA sense strand
caaggcguguggauugcuu

SEQ ID NO: 849191 - RNA, 19 nt, Homo sapiens
  misc_RNA (1)...(19): siRNA sense strand
cauggaagcauucauacug

SEQ ID NO: 849192 - RNA, 19 nt, Homo sapiens
  misc_RNA (1)...(19): siRNA sense strand
cagccaaauuccaaaucuu

SEQ ID NO: 849193 - RNA, 19 nt, Homo sapiens
  misc_RNA (1)...(19): siRNA sense strand
ccacuucccuucguuacca

SEQ ID NO: 849194 - RNA, 19 nt, Homo sapiens
  misc_RNA (1)...(19): siRNA sense strand
gccuucagcuguuccacuu

SEQ ID NO: 849195 - RNA, 19 nt, Homo sapiens
  misc_RNA (1)...(19): siRNA sense strand
auggagagaagcaauauaa

SEQ ID NO: 849196 - RNA, 19 nt, Homo sapiens
  misc_RNA (1)...(19): siRNA sense strand
ugaacagugugggaaauuc

SEQ ID NO: 849197 - RNA, 19 nt, Homo sapiens
  misc_RNA (1)...(19): siRNA sense strand
accagaauauugaagauca

SEQ ID NO: 849198 - RNA, 19 nt, Homo sapiens
  misc_RNA (1)...(19): siRNA sense strand
cccuauaaauguaccaaau

SEQ ID NO: 849199 - RNA, 19 nt, Homo sapiens
  misc_RNA (1)...(19): siRNA sense strand
gggaaagauauaagaaauc

SEQ ID NO: 849200 - RNA, 19 nt, Homo sapiens
  misc_RNA (1)...(19): siRNA sense strand
ucagccaaauuccaaaucu

SEQ ID NO: 849201 - RNA, 19 nt, Homo sapiens
  misc_RNA (1)...(19): siRNA sense strand
gagacccuaugaguguaaa

SEQ ID NO: 849202 - RNA, 19 nt, Homo sapiens
  misc_RNA (1)...(19): siRNA sense strand
ccggagagaaacccuauga

SEQ ID NO: 849203 - RNA, 19 nt, Homo sapiens
  misc_RNA (1)...(19): siRNA sense strand
gcgaggagguugaagauga

SEQ ID NO: 849204 - RNA, 19 nt, Homo sapiens
  misc_RNA (1)...(19): siRNA sense strand
caagaaauuugccucgaaa

SEQ ID NO: 849205 - RNA, 19 nt, Homo sapiens
  misc_RNA (1)...(19): siRNA sense strand
agaacuggcucaagaaauu

SEQ ID NO: 849206 - RNA, 19 nt, Homo sapiens
  misc_RNA (1)...(19): siRNA sense strand
ugaacggccuccucuauaa

SEQ ID NO: 849207 - RNA, 19 nt, Homo sapiens
  misc_RNA (1)...(19): siRNA sense strand
acaagcagauuauggagua

SEQ ID NO: 849208 - RNA, 19 nt, Homo sapiens
  misc_RNA (1)...(19): siRNA sense strand
gagaggagguggcagaaca

SEQ ID NO: 849209 - RNA, 19 nt, Homo sapiens
  misc_RNA (1)...(19): siRNA sense strand
caagggaaaugcagcucua

SEQ ID NO: 849210 - RNA, 19 nt, Homo sapiens
  misc_RNA (1)...(19): siRNA sense strand
caggacagcucccucaaga

SEQ ID NO: 849211 - RNA, 19 nt, Homo sapiens
  misc_RNA (1)...(19): siRNA sense strand
acagcucccucaagaguua

SEQ ID NO: 849212 - RNA, 19 nt, Homo sapiens
  misc_RNA (1)...(19): siRNA sense strand
ucaagaaauuugccucgaa

SEQ ID NO: 849213 - RNA, 19 nt, Homo sapiens
  misc_RNA (1)...(19): siRNA sense strand
ccacagagccgaccacaag

SEQ ID NO: 849214 - RNA, 19 nt, Homo sapiens
  misc_RNA (1)...(19): siRNA sense strand
ggacagcucccucaagagu

SEQ ID NO: 849215 - RNA, 19 nt, Homo sapiens
  misc_RNA (1)...(19): siRNA sense strand
gcaagaacuggcucaagaa

SEQ ID NO: 849216 - RNA, 19 nt, Homo sapiens
  misc_RNA (1)...(19): siRNA sense strand
gcagguggcugagcugaca

SEQ ID NO: 849217 - RNA, 19 nt, Homo sapiens
  misc_RNA (1)...(19): siRNA sense strand
uuacaaaccauccaaguug

SEQ ID NO: 849218 - RNA, 19 nt, Homo sapiens
  misc_RNA (1)...(19): siRNA sense strand
gaacuggcucaagaaauuu

SEQ ID NO: 849219 - RNA, 19 nt, Homo sapiens
  misc_RNA (1)...(19): siRNA sense strand
ugcaagaacuggcucaaga

SEQ ID NO: 849220 - RNA, 19 nt, Homo sapiens
  misc_RNA (1)...(19): siRNA sense strand
cagcagacccugaggaaug

SEQ ID NO: 849221 - RNA, 19 nt, Homo sapiens
  misc_RNA (1)...(19): siRNA sense strand
caagaacuggcucaagaaa

SEQ ID NO: 849222 - RNA, 19 nt, Homo sapiens
  misc_RNA (1)...(19): siRNA sense strand
ccgcgaugcugcgcuauuu

SEQ ID NO: 849223 - RNA, 19 nt, Homo sapiens
  misc_RNA (1)...(19): siRNA sense strand
ccucaagaguuaccuguca

SEQ ID NO: 849224 - RNA, 19 nt, Homo sapiens
  misc_RNA (1)...(19): siRNA sense strand
gcucugcugucuccugcaa

SEQ ID NO: 849225 - RNA, 19 nt, Homo sapiens
  misc_RNA (1)...(19): siRNA sense strand
gauaguguuuguucaagac

SEQ ID NO: 849226 - RNA, 19 nt, Homo sapiens
  misc_RNA (1)...(19): siRNA sense strand
cgauaguguuuguucaaga

SEQ ID NO: 849227 - RNA, 19 nt, Homo sapiens
  misc_RNA (1)...(19): siRNA sense strand
caaguuggaauuccucaug

SEQ ID NO: 849228 - RNA, 19 nt, Homo sapiens
  misc_RNA (1)...(19): siRNA sense strand
ggaguuggaggcagagaga

SEQ ID NO: 849229 - RNA, 19 nt, Homo sapiens
  misc_RNA (1)...(19): siRNA sense strand
ugugugggaucgaucauga

SEQ ID NO: 849230 - RNA, 19 nt, Homo sapiens
  misc_RNA (1)...(19): siRNA sense strand
caggagcuguaugaccuua

SEQ ID NO: 849231 - RNA, 19 nt, Homo sapiens
  misc_RNA (1)...(19): siRNA sense strand
ucacucgacuuacaaacca

SEQ ID NO: 849232 - RNA, 19 nt, Homo sapiens
  misc_RNA (1)...(19): siRNA sense strand
gaacggccuccucuauaag

SEQ ID NO: 849233 - RNA, 19 nt, Homo sapiens
  misc_RNA (1)...(19): siRNA sense strand
ugagucaggagcuguauga

SEQ ID NO: 849234 - RNA, 19 nt, Homo sapiens
  misc_RNA (1)...(19): siRNA sense strand
ggaaugugccaccgauagu

SEQ ID NO: 849235 - RNA, 19 nt, Homo sapiens
  misc_RNA (1)...(19): siRNA sense strand
ggagcuguaugaccuuaac

SEQ ID NO: 849236 - RNA, 19 nt, Homo sapiens
  misc_RNA (1)...(19): siRNA sense strand
gcgcacaugaggcaccuuu

SEQ ID NO: 849237 - RNA, 19 nt, Homo sapiens
  misc_RNA (1)...(19): siRNA sense strand
cugaacggccuccucuaua

SEQ ID NO: 849238 - RNA, 19 nt, Homo sapiens
  misc_RNA (1)...(19): siRNA sense strand
gguaugaaaguccuuccuu

SEQ ID NO: 849239 - RNA, 19 nt, Homo sapiens
  misc_RNA (1)...(19): siRNA sense strand
uggguucucacucgacuua

SEQ ID NO: 849240 - RNA, 19 nt, Homo sapiens
  misc_RNA (1)...(19): siRNA sense strand
gaggaaugugccaccgaua

SEQ ID NO: 849241 - RNA, 19 nt, Homo sapiens
  misc_RNA (1)...(19): siRNA sense strand
gaggcuguccugcagagaa

SEQ ID NO: 849242 - RNA, 19 nt, Homo sapiens
  misc_RNA (1)...(19): siRNA sense strand
aaguuggaauuccucauga

SEQ ID NO: 849243 - RNA, 19 nt, Homo sapiens
  misc_RNA (1)...(19): siRNA sense strand
accacaagcuccagucugu

SEQ ID NO: 849244 - RNA, 19 nt, Homo sapiens
  misc_RNA (1)...(19): siRNA sense strand
ccaccgauaguguuuguuc

SEQ ID NO: 849245 - RNA, 19 nt, Homo sapiens
  misc_RNA (1)...(19): siRNA sense strand
cgagcguacuggaagacaa

SEQ ID NO: 849246 - RNA, 19 nt, Homo sapiens
  misc_RNA (1)...(19): siRNA sense strand
gggaugaaagagacaacuu

SEQ ID NO: 849247 - RNA, 19 nt, Homo sapiens
  misc_RNA (1)...(19): siRNA sense strand
gguucucacucgacuuaca

SEQ ID NO: 849248 - RNA, 19 nt, Homo sapiens
  misc_RNA (1)...(19): siRNA sense strand
gaaugugccaccgauagug

SEQ ID NO: 849249 - RNA, 19 nt, Homo sapiens
  misc_RNA (1)...(19): siRNA sense strand
acaaaaggaggaaagauaa

SEQ ID NO: 849250 - RNA, 19 nt, Homo sapiens
  misc_RNA (1)...(19): siRNA sense strand
cgacuuacaaaccauccaa

SEQ ID NO: 849251 - RNA, 19 nt, Homo sapiens
  misc_RNA (1)...(19): siRNA sense strand
gcaggacagcucccucaag

SEQ ID NO: 849252 - RNA, 19 nt, Homo sapiens
  misc_RNA (1)...(19): siRNA sense strand
gcacaugaggcaccuuuug

SEQ ID NO: 849253 - RNA, 19 nt, Homo sapiens
  misc_RNA (1)...(19): siRNA sense strand
ucuauaaggcacugacaga

SEQ ID NO: 849254 - RNA, 19 nt, Homo sapiens
  misc_RNA (1)...(19): siRNA sense strand
ccugaacggccuccucuau

SEQ ID NO: 849255 - RNA, 19 nt, Homo sapiens
  misc_RNA (1)...(19): siRNA sense strand
uacaaaaggaggaaagaua

SEQ ID NO: 849256 - RNA, 19 nt, Homo sapiens
  misc_RNA (1)...(19): siRNA sense strand
gagagaggagguggcagaa

SEQ ID NO: 849257 - RNA, 19 nt, Homo sapiens
  misc_RNA (1)...(19): siRNA sense strand
ucugcugucuccugcaaga

SEQ ID NO: 849258 - RNA, 19 nt, Homo sapiens
  misc_RNA (1)...(19): siRNA sense strand
gcagauuauggaguacaaa

SEQ ID NO: 849259 - RNA, 19 nt, Homo sapiens
  misc_RNA (1)...(19): siRNA sense strand
cuuacaaaccauccaaguu

SEQ ID NO: 849260 - RNA, 19 nt, Homo sapiens
  misc_RNA (1)...(19): siRNA sense strand
cgaggagguugaagaugac

SEQ ID NO: 849261 - RNA, 19 nt, Homo sapiens
  misc_RNA (1)...(19): siRNA sense strand
caaaaggaggaaagauaaa

SEQ ID NO: 849262 - RNA, 19 nt, Homo sapiens
  misc_RNA (1)...(19): siRNA sense strand
gaagauaaauggcaucaaa

SEQ ID NO: 849263 - RNA, 19 nt, Homo sapiens
  misc_RNA (1)...(19): siRNA sense strand
gaagaaaguuuaccugaaa

SEQ ID NO: 849264 - RNA, 19 nt, Homo sapiens
  misc_RNA (1)...(19): siRNA sense strand
cacaacagcuaaagaauua

SEQ ID NO: 849265 - RNA, 19 nt, Homo sapiens
  misc_RNA (1)...(19): siRNA sense strand
acaccaagcugaaagguua

SEQ ID NO: 849266 - RNA, 19 nt, Homo sapiens
  misc_RNA (1)...(19): siRNA sense strand
gaaagugaaucccaacuca

SEQ ID NO: 849267 - RNA, 19 nt, Homo sapiens
  misc_RNA (1)...(19): siRNA sense strand
caucaaaucugacucauca

SEQ ID NO: 849268 - RNA, 19 nt, Homo sapiens
  misc_RNA (1)...(19): siRNA sense strand
gaaaggcucucaguuuguu

SEQ ID NO: 849269 - RNA, 19 nt, Homo sapiens
  misc_RNA (1)...(19): siRNA sense strand
gaacacuggucucaauaug

SEQ ID NO: 849270 - RNA, 19 nt, Homo sapiens
  misc_RNA (1)...(19): siRNA sense strand
gaacaaccuuaaugaacuu

SEQ ID NO: 849271 - RNA, 19 nt, Homo sapiens
  misc_RNA (1)...(19): siRNA sense strand
caacaaagccugaaucgau

SEQ ID NO: 849272 - RNA, 19 nt, Homo sapiens
  misc_RNA (1)...(19): siRNA sense strand
cagaaaggcucucaguuug

SEQ ID NO: 849273 - RNA, 19 nt, Homo sapiens
  misc_RNA (1)...(19): siRNA sense strand
gacaagacgucuauucaga

SEQ ID NO: 849274 - RNA, 19 nt, Homo sapiens
  misc_RNA (1)...(19): siRNA sense strand
gcagaaggcuuuggaauac

SEQ ID NO: 849275 - RNA, 19 nt, Homo sapiens
  misc_RNA (1)...(19): siRNA sense strand
gcacaacagcuaaagaauu

SEQ ID NO: 849276 - RNA, 19 nt, Homo sapiens
  misc_RNA (1)...(19): siRNA sense strand
gacccgaacuggaagagua

SEQ ID NO: 849277 - RNA, 19 nt, Homo sapiens
  misc_RNA (1)...(19): siRNA sense strand
aaagaaaccuccaauacau

SEQ ID NO: 849278 - RNA, 19 nt, Homo sapiens
  misc_RNA (1)...(19): siRNA sense strand
caagcucacuuugggauua

SEQ ID NO: 849279 - RNA, 19 nt, Homo sapiens
  misc_RNA (1)...(19): siRNA sense strand
gaaagagaguccacagagu

SEQ ID NO: 849280 - RNA, 19 nt, Homo sapiens
  misc_RNA (1)...(19): siRNA sense strand
caaaguccuucacaucgua

SEQ ID NO: 849281 - RNA, 19 nt, Homo sapiens
  misc_RNA (1)...(19): siRNA sense strand
gaaauuccauucuucuucu

SEQ ID NO: 849282 - RNA, 19 nt, Homo sapiens
  misc_RNA (1)...(19): siRNA sense strand
ccagaaaggcucucaguuu

SEQ ID NO: 849283 - RNA, 19 nt, Homo sapiens
  misc_RNA (1)...(19): siRNA sense strand
gaagaaagaagacuuacau

SEQ ID NO: 849284 - RNA, 19 nt, Homo sapiens
  misc_RNA (1)...(19): siRNA sense strand
ccaaagaaaccaagugaaa

SEQ ID NO: 849285 - RNA, 19 nt, Homo sapiens
  misc_RNA (1)...(19): siRNA sense strand
gcuaaagaauuaccaggaa

SEQ ID NO: 849286 - RNA, 19 nt, Homo sapiens
  misc_RNA (1)...(19): siRNA sense strand
ggacagcucuuuagaaaau

SEQ ID NO: 849287 - RNA, 19 nt, Homo sapiens
  misc_RNA (1)...(19): siRNA sense strand
ucaaagagcacaacagcua

SEQ ID NO: 849288 - RNA, 19 nt, Homo sapiens
  misc_RNA (1)...(19): siRNA sense strand
gagugcagcuucuuuacuu

SEQ ID NO: 849289 - RNA, 19 nt, Homo sapiens
  misc_RNA (1)...(19): siRNA sense strand
ucaaacagccuuauacaga

SEQ ID NO: 849290 - RNA, 19 nt, Homo sapiens
  misc_RNA (1)...(19): siRNA sense strand
gcucucaguuuguuuauca

SEQ ID NO: 849291 - RNA, 19 nt, Homo sapiens
  misc_RNA (1)...(19): siRNA sense strand
cagaaagccucacgcaaga

SEQ ID NO: 849292 - RNA, 19 nt, Homo sapiens
  misc_RNA (1)...(19): siRNA sense strand
gguuagagcuucuccagau

SEQ ID NO: 849293 - RNA, 19 nt, Homo sapiens
  misc_RNA (1)...(19): siRNA sense strand
caaagaaaccuccaauaca

SEQ ID NO: 849294 - RNA, 19 nt, Homo sapiens
  misc_RNA (1)...(19): siRNA sense strand
gagcacaacagcuaaagaa

SEQ ID NO: 849295 - RNA, 19 nt, Homo sapiens
  misc_RNA (1)...(19): siRNA sense strand
gacaaggucuuaucuaaaa

SEQ ID NO: 849296 - RNA, 19 nt, Homo sapiens
  misc_RNA (1)...(19): siRNA sense strand
cauaaauacucauggauca

SEQ ID NO: 849297 - RNA, 19 nt, Homo sapiens
  misc_RNA (1)...(19): siRNA sense strand
gagauuaugugccauucug

SEQ ID NO: 849298 - RNA, 19 nt, Homo sapiens
  misc_RNA (1)...(19): siRNA sense strand
ggcagaaggcuuuggaaua

SEQ ID NO: 849299 - RNA, 19 nt, Homo sapiens
  misc_RNA (1)...(19): siRNA sense strand
ucacauaaauacucaugga

SEQ ID NO: 849300 - RNA, 19 nt, Homo sapiens
  misc_RNA (1)...(19): siRNA sense strand
acacuggucucaauaugaa

SEQ ID NO: 849301 - RNA, 19 nt, Homo sapiens
  misc_RNA (1)...(19): siRNA sense strand
uaacaggcaacaaccaaua

SEQ ID NO: 849302 - RNA, 19 nt, Homo sapiens
  misc_RNA (1)...(19): siRNA sense strand
caaaauaagccucuugaua

SEQ ID NO: 849303 - RNA, 19 nt, Homo sapiens
  misc_RNA (1)...(19): siRNA sense strand
caaaacaagucaaggagua

SEQ ID NO: 849304 - RNA, 19 nt, Homo sapiens
  misc_RNA (1)...(19): siRNA sense strand
caucgauccugaagauaaa

SEQ ID NO: 849305 - RNA, 19 nt, Homo sapiens
  misc_RNA (1)...(19): siRNA sense strand
caacucaaacagccuuaua

SEQ ID NO: 849306 - RNA, 19 nt, Homo sapiens
  misc_RNA (1)...(19): siRNA sense strand
agaagaaaguuuaccugaa

SEQ ID NO: 849307 - RNA, 19 nt, Homo sapiens
  misc_RNA (1)...(19): siRNA sense strand
acggacagcucuuuagaaa

SEQ ID NO: 849308 - RNA, 19 nt, Homo sapiens
  misc_RNA (1)...(19): siRNA sense strand
uaaagaaagaggacacaaa

SEQ ID NO: 849309 - RNA, 19 nt, Homo sapiens
  misc_RNA (1)...(19): siRNA sense strand
acucugggcugaauguuaa

SEQ ID NO: 849310 - RNA, 19 nt, Homo sapiens
  misc_RNA (1)...(19): siRNA sense strand
gcacuuagaagccacaauc

SEQ ID NO: 849311 - RNA, 19 nt, Homo sapiens
  misc_RNA (1)...(19): siRNA sense strand
acagugaccuggaggagaa

SEQ ID NO: 849312 - RNA, 19 nt, Homo sapiens
  misc_RNA (1)...(19): siRNA sense strand
cuucugacauggugaauga

SEQ ID NO: 849313 - RNA, 19 nt, Homo sapiens
  misc_RNA (1)...(19): siRNA sense strand
ggacucuuaucuucaacuu

SEQ ID NO: 849314 - RNA, 19 nt, Homo sapiens
  misc_RNA (1)...(19): siRNA sense strand
gaagaggaagcaaguggaa

SEQ ID NO: 849315 - RNA, 19 nt, Homo sapiens
  misc_RNA (1)...(19): siRNA sense strand
caggaacacuggucucaau

SEQ ID NO: 849316 - RNA, 19 nt, Homo sapiens
  misc_RNA (1)...(19): siRNA sense strand
gcuaugacccgaacuggaa

SEQ ID NO: 849317 - RNA, 19 nt, Homo sapiens
  misc_RNA (1)...(19): siRNA sense strand
cgaaggaaauccaaacaac

SEQ ID NO: 849318 - RNA, 19 nt, Homo sapiens
  misc_RNA (1)...(19): siRNA sense strand
gaacuuagaaauguuaugg

SEQ ID NO: 849319 - RNA, 19 nt, Homo sapiens
  misc_RNA (1)...(19): siRNA sense strand
uugacaaggucuuaucuaa

SEQ ID NO: 849320 - RNA, 19 nt, Homo sapiens
  misc_RNA (1)...(19): siRNA sense strand
gaaggaaauccaaacaaca

SEQ ID NO: 849321 - RNA, 19 nt, Homo sapiens
  misc_RNA (1)...(19): siRNA sense strand
gaagacacuauccauucua

SEQ ID NO: 849322 - RNA, 19 nt, Homo sapiens
  misc_RNA (1)...(19): siRNA sense strand
ggcugaauguuaauaaaga

SEQ ID NO: 849323 - RNA, 19 nt, Homo sapiens
  misc_RNA (1)...(19): siRNA sense strand
caagagggcaaccuucuga

SEQ ID NO: 849324 - RNA, 19 nt, Homo sapiens
  misc_RNA (1)...(19): siRNA sense strand
gaaagccucacgcaagaga

SEQ ID NO: 849325 - RNA, 19 nt, Homo sapiens
  misc_RNA (1)...(19): siRNA sense strand
ucagagagaagccaaagaa

SEQ ID NO: 849326 - RNA, 19 nt, Homo sapiens
  misc_RNA (1)...(19): siRNA sense strand
ugaacaaccuuaaugaacu

SEQ ID NO: 849327 - RNA, 19 nt, Homo sapiens
  misc_RNA (1)...(19): siRNA sense strand
ucaaagaaaccuccaauac

SEQ ID NO: 849328 - RNA, 19 nt, Homo sapiens
  misc_RNA (1)...(19): siRNA sense strand
uaugugccauucugaguuu

SEQ ID NO: 849329 - RNA, 19 nt, Homo sapiens
  misc_RNA (1)...(19): siRNA sense strand
caaagaccaagaagagaaa

SEQ ID NO: 849330 - RNA, 19 nt, Homo sapiens
  misc_RNA (1)...(19): siRNA sense strand
ggcuguggcugcuuucaaa

SEQ ID NO: 849331 - RNA, 19 nt, Homo sapiens
  misc_RNA (1)...(19): siRNA sense strand
ugucaaggguagaaaguga

SEQ ID NO: 849332 - RNA, 19 nt, Homo sapiens
  misc_RNA (1)...(19): siRNA sense strand
aacaaagccugaaucgauu

SEQ ID NO: 849333 - RNA, 19 nt, Homo sapiens
  misc_RNA (1)...(19): siRNA sense strand
ugggaaagaagaaaguuua

SEQ ID NO: 849334 - RNA, 19 nt, Homo sapiens
  misc_RNA (1)...(19): siRNA sense strand
guaagaacaccaagcugaa

SEQ ID NO: 849335 - RNA, 19 nt, Homo sapiens
  misc_RNA (1)...(19): siRNA sense strand
uacaggaacuuagaaaugu

SEQ ID NO: 849336 - RNA, 19 nt, Homo sapiens
  misc_RNA (1)...(19): siRNA sense strand
acucuuaucuucaacuuca

SEQ ID NO: 849337 - RNA, 19 nt, Homo sapiens
  misc_RNA (1)...(19): siRNA sense strand
gaagacuuacaucggauuu

SEQ ID NO: 849338 - RNA, 19 nt, Homo sapiens
  misc_RNA (1)...(19): siRNA sense strand
cccaaaccaucaaaucuga

SEQ ID NO: 849339 - RNA, 19 nt, Homo sapiens
  misc_RNA (1)...(19): siRNA sense strand
caagcucucuauucaaucu

SEQ ID NO: 849340 - RNA, 19 nt, Homo sapiens
  misc_RNA (1)...(19): siRNA sense strand
aaacagccuuauacagaga

SEQ ID NO: 849341 - RNA, 19 nt, Homo sapiens
  misc_RNA (1)...(19): siRNA sense strand
ugacaaggucuuaucuaaa

SEQ ID NO: 849342 - RNA, 19 nt, Homo sapiens
  misc_RNA (1)...(19): siRNA sense strand
ccaucgauccugaagauaa

SEQ ID NO: 849343 - RNA, 19 nt, Homo sapiens
  misc_RNA (1)...(19): siRNA sense strand
ggaaaaugcugccaucgau

SEQ ID NO: 849344 - RNA, 19 nt, Homo sapiens
  misc_RNA (1)...(19): siRNA sense strand
gcagcuucuuuacuuggua

SEQ ID NO: 849345 - RNA, 19 nt, Homo sapiens
  misc_RNA (1)...(19): siRNA sense strand
gcaaaaggaauaugcaaaa

SEQ ID NO: 849346 - RNA, 19 nt, Homo sapiens
  misc_RNA (1)...(19): siRNA sense strand
cccaagcucucuauucaau

SEQ ID NO: 849347 - RNA, 19 nt, Homo sapiens
  misc_RNA (1)...(19): siRNA sense strand
ggaacacuggucucaauau

SEQ ID NO: 849348 - RNA, 19 nt, Homo sapiens
  misc_RNA (1)...(19): siRNA sense strand
caaagagcacaacagcuaa

SEQ ID NO: 849349 - RNA, 19 nt, Homo sapiens
  misc_RNA (1)...(19): siRNA sense strand
gagcucaaguucacauaac

SEQ ID NO: 849350 - RNA, 19 nt, Homo sapiens
  misc_RNA (1)...(19): siRNA sense strand
agaaaccuccaauacauuu

SEQ ID NO: 849351 - RNA, 19 nt, Homo sapiens
  misc_RNA (1)...(19): siRNA sense strand
cagccaagcucaagauucg

SEQ ID NO: 849352 - RNA, 19 nt, Homo sapiens
  misc_RNA (1)...(19): siRNA sense strand
aaguuuaccugaaaucuca

SEQ ID NO: 849353 - RNA, 19 nt, Homo sapiens
  misc_RNA (1)...(19): siRNA sense strand
gacacuauccauucuauca

SEQ ID NO: 849354 - RNA, 19 nt, Homo sapiens
  misc_RNA (1)...(19): siRNA sense strand
gaaaccaagugaaaauuag

SEQ ID NO: 849355 - RNA, 19 nt, Homo sapiens
  misc_RNA (1)...(19): siRNA sense strand
acacaaagaccaagaagag

SEQ ID NO: 849356 - RNA, 19 nt, Homo sapiens
  misc_RNA (1)...(19): siRNA sense strand
agacuuacaucggauuuca

SEQ ID NO: 849357 - RNA, 19 nt, Homo sapiens
  misc_RNA (1)...(19): siRNA sense strand
ggaaauacugcagaacaga

SEQ ID NO: 849358 - RNA, 19 nt, Homo sapiens
  misc_RNA (1)...(19): siRNA sense strand
gaaagaagaaaguuuaccu

SEQ ID NO: 849359 - RNA, 19 nt, Homo sapiens
  misc_RNA (1)...(19): siRNA sense strand
ugaagacacuauccauucu

SEQ ID NO: 849360 - RNA, 19 nt, Homo sapiens
  misc_RNA (1)...(19): siRNA sense strand
gagcuucuccagauucaug

SEQ ID NO: 849361 - RNA, 19 nt, Homo sapiens
  misc_RNA (1)...(19): siRNA sense strand
ccacacacccaccuuugaa

SEQ ID NO: 849362 - RNA, 19 nt, Homo sapiens
  misc_RNA (1)...(19): siRNA sense strand
gaacauuccuuucacacau

SEQ ID NO: 849363 - RNA, 19 nt, Homo sapiens
  misc_RNA (1)...(19): siRNA sense strand
cagaauccaucuccacuaa

SEQ ID NO: 849364 - RNA, 19 nt, Homo sapiens
  misc_RNA (1)...(19): siRNA sense strand
gcagaucucuccucaacag

SEQ ID NO: 849365 - RNA, 19 nt, Homo sapiens
  misc_RNA (1)...(19): siRNA sense strand
gaauccaucuccacuaagu

SEQ ID NO: 849366 - RNA, 19 nt, Homo sapiens
  misc_RNA (1)...(19): siRNA sense strand
ucacacaucuggacaacau

SEQ ID NO: 849367 - RNA, 19 nt, Homo sapiens
  misc_RNA (1)...(19): siRNA sense strand
gaucauggucuauggguuu

SEQ ID NO: 849368 - RNA, 19 nt, Homo sapiens
  misc_RNA (1)...(19): siRNA sense strand
cagcagaucucuccucaac

SEQ ID NO: 849369 - RNA, 19 nt, Homo sapiens
  misc_RNA (1)...(19): siRNA sense strand
ucaagaagaagaaguguga

SEQ ID NO: 849370 - RNA, 19 nt, Homo sapiens
  misc_RNA (1)...(19): siRNA sense strand
ggcuacagcuucacugcua

SEQ ID NO: 849371 - RNA, 19 nt, Homo sapiens
  misc_RNA (1)...(19): siRNA sense strand
agagacacauggcaagcua

SEQ ID NO: 849372 - RNA, 19 nt, Homo sapiens
  misc_RNA (1)...(19): siRNA sense strand
ccacuggugugaugguguu

SEQ ID NO: 849373 - RNA, 19 nt, Homo sapiens
  misc_RNA (1)...(19): siRNA sense strand
uaaaugggcagcuucacuu

SEQ ID NO: 849374 - RNA, 19 nt, Homo sapiens
  misc_RNA (1)...(19): siRNA sense strand
gugcagugcuccuauaagg

SEQ ID NO: 849375 - RNA, 19 nt, Homo sapiens
  misc_RNA (1)...(19): siRNA sense strand
caccuugccuaggcucuua

SEQ ID NO: 849376 - RNA, 19 nt, Homo sapiens
  misc_RNA (1)...(19): siRNA sense strand
cugccuaacuucccuaaau

SEQ ID NO: 849377 - RNA, 19 nt, Homo sapiens
  misc_RNA (1)...(19): siRNA sense strand
ucaggcaccaggauguuua

SEQ ID NO: 849378 - RNA, 19 nt, Homo sapiens
  misc_RNA (1)...(19): siRNA sense strand
gaagaccagagcccuaugu

SEQ ID NO: 849379 - RNA, 19 nt, Homo sapiens
  misc_RNA (1)...(19): siRNA sense strand
gugcagcgauccuucuaca

SEQ ID NO: 849380 - RNA, 19 nt, Homo sapiens
  misc_RNA (1)...(19): siRNA sense strand
ggguggaacugucacaacu

SEQ ID NO: 849381 - RNA, 19 nt, Homo sapiens
  misc_RNA (1)...(19): siRNA sense strand
aaagugaggcuccuugaag

SEQ ID NO: 849382 - RNA, 19 nt, Homo sapiens
  misc_RNA (1)...(19): siRNA sense strand
gaccgcgucucccagcaau

SEQ ID NO: 849383 - RNA, 19 nt, Homo sapiens
  misc_RNA (1)...(19): siRNA sense strand
ucugugcagugcuccuaua

SEQ ID NO: 849384 - RNA, 19 nt, Homo sapiens
  misc_RNA (1)...(19): siRNA sense strand
gccacaggguugcgucuca

SEQ ID NO: 849385 - RNA, 19 nt, Homo sapiens
  misc_RNA (1)...(19): siRNA sense strand
ugccuaacuucccuaaaug

SEQ ID NO: 849386 - RNA, 19 nt, Homo sapiens
  misc_RNA (1)...(19): siRNA sense strand
gaucucuccucaacagacu

SEQ ID NO: 849387 - RNA, 19 nt, Homo sapiens
  misc_RNA (1)...(19): siRNA sense strand
ccagaauccaucuccacua

SEQ ID NO: 849388 - RNA, 19 nt, Homo sapiens
  misc_RNA (1)...(19): siRNA sense strand
acacgugacccaccuggaa

SEQ ID NO: 849389 - RNA, 19 nt, Homo sapiens
  misc_RNA (1)...(19): siRNA sense strand
caaacugagaggaacauuc

SEQ ID NO: 849390 - RNA, 19 nt, Homo sapiens
  misc_RNA (1)...(19): siRNA sense strand
gucccacacugccuaacuu

SEQ ID NO: 849391 - RNA, 19 nt, Homo sapiens
  misc_RNA (1)...(19): siRNA sense strand
ggugcaaaaucaagaagaa

SEQ ID NO: 849392 - RNA, 19 nt, Homo sapiens
  misc_RNA (1)...(19): siRNA sense strand
gcaaaaucaagaagaagaa

SEQ ID NO: 849393 - RNA, 19 nt, Homo sapiens
  misc_RNA (1)...(19): siRNA sense strand
aagacaggcuacagcuuca

SEQ ID NO: 849394 - RNA, 19 nt, Homo sapiens
  misc_RNA (1)...(19): siRNA sense strand
aaaucaagaagaagaagug

SEQ ID NO: 849395 - RNA, 19 nt, Homo sapiens
  misc_RNA (1)...(19): siRNA sense strand
ucaacagacuacccuccau

SEQ ID NO: 849396 - RNA, 19 nt, Homo sapiens
  misc_RNA (1)...(19): siRNA sense strand
ccaccagaccugccuccaa

SEQ ID NO: 849397 - RNA, 19 nt, Homo sapiens
  misc_RNA (1)...(19): siRNA sense strand
aaaugggcagcuucacuuu

SEQ ID NO: 849398 - RNA, 19 nt, Homo sapiens
  misc_RNA (1)...(19): siRNA sense strand
augggcagcuucacuuuua

SEQ ID NO: 849399 - RNA, 19 nt, Homo sapiens
  misc_RNA (1)...(19): siRNA sense strand
gcccgagucugggugaaag

SEQ ID NO: 849400 - RNA, 19 nt, Homo sapiens
  misc_RNA (1)...(19): siRNA sense strand
ggaagaccagagcccuaug

SEQ ID NO: 849401 - RNA, 19 nt, Homo sapiens
  misc_RNA (1)...(19): siRNA sense strand
aggccaagguggucaacau

SEQ ID NO: 849402 - RNA, 19 nt, Homo sapiens
  misc_RNA (1)...(19): siRNA sense strand
gccaagguggucaacauca

SEQ ID NO: 849403 - RNA, 19 nt, Homo sapiens
  misc_RNA (1)...(19): siRNA sense strand
gaaaguuacugcaaagaaa

SEQ ID NO: 849404 - RNA, 19 nt, Homo sapiens
  misc_RNA (1)...(19): siRNA sense strand
gaugagaccacuuggauua

SEQ ID NO: 849405 - RNA, 19 nt, Homo sapiens
  misc_RNA (1)...(19): siRNA sense strand
gaaauagacccagaagaua

SEQ ID NO: 849406 - RNA, 19 nt, Homo sapiens
  misc_RNA (1)...(19): siRNA sense strand
caaaggaaguuuacuguuc

SEQ ID NO: 849407 - RNA, 19 nt, Homo sapiens
  misc_RNA (1)...(19): siRNA sense strand
caaagaaagugaugcacaa

SEQ ID NO: 849408 - RNA, 19 nt, Homo sapiens
  misc_RNA (1)...(19): siRNA sense strand
gcaguaacauucagaugga

SEQ ID NO: 849409 - RNA, 19 nt, Homo sapiens
  misc_RNA (1)...(19): siRNA sense strand
gaagcaauauuauggauac

SEQ ID NO: 849410 - RNA, 19 nt, Homo sapiens
  misc_RNA (1)...(19): siRNA sense strand
caugugaaguugagaguaa

SEQ ID NO: 849411 - RNA, 19 nt, Homo sapiens
  misc_RNA (1)...(19): siRNA sense strand
guucaaacaucacuagaga

SEQ ID NO: 849412 - RNA, 19 nt, Homo sapiens
  misc_RNA (1)...(19): siRNA sense strand
gaacaaaggaaguuuacug

SEQ ID NO: 849413 - RNA, 19 nt, Homo sapiens
  misc_RNA (1)...(19): siRNA sense strand
ucgucaagcuuuauacuua

SEQ ID NO: 849414 - RNA, 19 nt, Homo sapiens
  misc_RNA (1)...(19): siRNA sense strand
uuaaggagccgguugauaa

SEQ ID NO: 849415 - RNA, 19 nt, Homo sapiens
  misc_RNA (1)...(19): siRNA sense strand
gaaguuuacuguucauucu

SEQ ID NO: 849416 - RNA, 19 nt, Homo sapiens
  misc_RNA (1)...(19): siRNA sense strand
gcaaauaacaccagaaacu

SEQ ID NO: 849417 - RNA, 19 nt, Homo sapiens
  misc_RNA (1)...(19): siRNA sense strand
gaaagaauuagcacuguug

SEQ ID NO: 849418 - RNA, 19 nt, Homo sapiens
  misc_RNA (1)...(19): siRNA sense strand
gaauauuccuuccacagau

SEQ ID NO: 849419 - RNA, 19 nt, Homo sapiens
  misc_RNA (1)...(19): siRNA sense strand
cauggaugcugcuggaaua

SEQ ID NO: 849420 - RNA, 19 nt, Homo sapiens
  misc_RNA (1)...(19): siRNA sense strand
gcuauaauacgcagaauug

SEQ ID NO: 849421 - RNA, 19 nt, Homo sapiens
  misc_RNA (1)...(19): siRNA sense strand
gcagugucauuccuuguga

SEQ ID NO: 849422 - RNA, 19 nt, Homo sapiens
  misc_RNA (1)...(19): siRNA sense strand
cagaaguccuuauauagau

SEQ ID NO: 849423 - RNA, 19 nt, Homo sapiens
  misc_RNA (1)...(19): siRNA sense strand
gcaauauuauggauacagu

SEQ ID NO: 849424 - RNA, 19 nt, Homo sapiens
  misc_RNA (1)...(19): siRNA sense strand
gagaaagaauuagcacugu

SEQ ID NO: 849425 - RNA, 19 nt, Homo sapiens
  misc_RNA (1)...(19): siRNA sense strand
ugaaaguccuagugauuau

SEQ ID NO: 849426 - RNA, 19 nt, Homo sapiens
  misc_RNA (1)...(19): siRNA sense strand
gaucaacuagcuguaauaa

SEQ ID NO: 849427 - RNA, 19 nt, Homo sapiens
  misc_RNA (1)...(19): siRNA sense strand
gaauacaccuacggcaguu

SEQ ID NO: 849428 - RNA, 19 nt, Homo sapiens
  misc_RNA (1)...(19): siRNA sense strand
caauaacacuguggauaug

SEQ ID NO: 849429 - RNA, 19 nt, Homo sapiens
  misc_RNA (1)...(19): siRNA sense strand
ugaggaagauaaagagaau

SEQ ID NO: 849430 - RNA, 19 nt, Homo sapiens
  misc_RNA (1)...(19): siRNA sense strand
gacaauaacacuguggaua

SEQ ID NO: 849431 - RNA, 19 nt, Homo sapiens
  misc_RNA (1)...(19): siRNA sense strand
aauagugacucuccaguug

SEQ ID NO: 849432 - RNA, 19 nt, Homo sapiens
  misc_RNA (1)...(19): siRNA sense strand
ggaagcaauauuauggaua

SEQ ID NO: 849433 - RNA, 19 nt, Homo sapiens
  misc_RNA (1)...(19): siRNA sense strand
cuacggcaguuuaguaaug

SEQ ID NO: 849434 - RNA, 19 nt, Homo sapiens
  misc_RNA (1)...(19): siRNA sense strand
cuaugagacuucagaugua

SEQ ID NO: 849435 - RNA, 19 nt, Homo sapiens
  misc_RNA (1)...(19): siRNA sense strand
aaaggaaguuuacuguuca

SEQ ID NO: 849436 - RNA, 19 nt, Homo sapiens
  misc_RNA (1)...(19): siRNA sense strand
agaaauagacccagaagau

SEQ ID NO: 849437 - RNA, 19 nt, Homo sapiens
  misc_RNA (1)...(19): siRNA sense strand
gaagcaagaccacacaaca

SEQ ID NO: 849438 - RNA, 19 nt, Homo sapiens
  misc_RNA (1)...(19): siRNA sense strand
aaagggagaaagacaauaa

SEQ ID NO: 849439 - RNA, 19 nt, Homo sapiens
  misc_RNA (1)...(19): siRNA sense strand
auaaagauguggaagacaa

SEQ ID NO: 849440 - RNA, 19 nt, Homo sapiens
  misc_RNA (1)...(19): siRNA sense strand
cgucaagcuuuauacuuaa

SEQ ID NO: 849441 - RNA, 19 nt, Homo sapiens
  misc_RNA (1)...(19): siRNA sense strand
ggaaucaaagaugcaaaua

SEQ ID NO: 849442 - RNA, 19 nt, Homo sapiens
  misc_RNA (1)...(19): siRNA sense strand
agaaagugaugcacaaaca

SEQ ID NO: 849443 - RNA, 19 nt, Homo sapiens
  misc_RNA (1)...(19): siRNA sense strand
gugaagaugaggaagauaa

SEQ ID NO: 849444 - RNA, 19 nt, Homo sapiens
  misc_RNA (1)...(19): siRNA sense strand
aagcaucuccgacuccuua

SEQ ID NO: 849445 - RNA, 19 nt, Homo sapiens
  misc_RNA (1)...(19): siRNA sense strand
ggaccucagugauucagau

SEQ ID NO: 849446 - RNA, 19 nt, Homo sapiens
  misc_RNA (1)...(19): siRNA sense strand
ucgaauagauaaagaugug

SEQ ID NO: 849447 - RNA, 19 nt, Homo sapiens
  misc_RNA (1)...(19): siRNA sense strand
gaaagggagaaagacaaua

SEQ ID NO: 849448 - RNA, 19 nt, Homo sapiens
  misc_RNA (1)...(19): siRNA sense strand
ucagaaguccuuauauaga

SEQ ID NO: 849449 - RNA, 19 nt, Homo sapiens
  misc_RNA (1)...(19): siRNA sense strand
uaacuaguccuucgccuau

SEQ ID NO: 849450 - RNA, 19 nt, Homo sapiens
  misc_RNA (1)...(19): siRNA sense strand
ggagaaagacaauaacacu

SEQ ID NO: 849451 - RNA, 19 nt, Homo sapiens
  misc_RNA (1)...(19): siRNA sense strand
gaaagcaguaacauucaga

SEQ ID NO: 849452 - RNA, 19 nt, Homo sapiens
  misc_RNA (1)...(19): siRNA sense strand
gaaagcagugucauuccuu

SEQ ID NO: 849453 - RNA, 19 nt, Homo sapiens
  misc_RNA (1)...(19): siRNA sense strand
gaagauauucaucgucaag

SEQ ID NO: 849454 - RNA, 19 nt, Homo sapiens
  misc_RNA (1)...(19): siRNA sense strand
gguugauccuauagagaua

SEQ ID NO: 849455 - RNA, 19 nt, Homo sapiens
  misc_RNA (1)...(19): siRNA sense strand
ucagaacaaaggaaguuua

SEQ ID NO: 849456 - RNA, 19 nt, Homo sapiens
  misc_RNA (1)...(19): siRNA sense strand
ggaaguuuacuguucauuc

SEQ ID NO: 849457 - RNA, 19 nt, Homo sapiens
  misc_RNA (1)...(19): siRNA sense strand
gguugauaauggcaguuua

SEQ ID NO: 849458 - RNA, 19 nt, Homo sapiens
  misc_RNA (1)...(19): siRNA sense strand
acaauaacacuguggauau

SEQ ID NO: 849459 - RNA, 19 nt, Homo sapiens
  misc_RNA (1)...(19): siRNA sense strand
uaucggaccucagugauuc

SEQ ID NO: 849460 - RNA, 19 nt, Homo sapiens
  misc_RNA (1)...(19): siRNA sense strand
ccaacuccagggaaauuua

SEQ ID NO: 849461 - RNA, 19 nt, Homo sapiens
  misc_RNA (1)...(19): siRNA sense strand
aaauagacccagaagauau

SEQ ID NO: 849462 - RNA, 19 nt, Homo sapiens
  misc_RNA (1)...(19): siRNA sense strand
ggaaggaucccuguuuuaa

SEQ ID NO: 849463 - RNA, 19 nt, Homo sapiens
  misc_RNA (1)...(19): siRNA sense strand
ccagggaaauuuagauggu

SEQ ID NO: 849464 - RNA, 19 nt, Homo sapiens
  misc_RNA (1)...(19): siRNA sense strand
agaaagaauuagcacuguu

SEQ ID NO: 849465 - RNA, 19 nt, Homo sapiens
  misc_RNA (1)...(19): siRNA sense strand
caguaaaugcacuaacaua

SEQ ID NO: 849466 - RNA, 19 nt, Homo sapiens
  misc_RNA (1)...(19): siRNA sense strand
caugucaccucuugcugaa

SEQ ID NO: 849467 - RNA, 19 nt, Homo sapiens
  misc_RNA (1)...(19): siRNA sense strand
auagauuugucuccuguaa

SEQ ID NO: 849468 - RNA, 19 nt, Homo sapiens
  misc_RNA (1)...(19): siRNA sense strand
gaaaguccuagugauuauu

SEQ ID NO: 849469 - RNA, 19 nt, Homo sapiens
  misc_RNA (1)...(19): siRNA sense strand
ggauuaaggagccgguuga

SEQ ID NO: 849470 - RNA, 19 nt, Homo sapiens
  misc_RNA (1)...(19): siRNA sense strand
aaacagcuuucacaauguc

SEQ ID NO: 849471 - RNA, 19 nt, Homo sapiens
  misc_RNA (1)...(19): siRNA sense strand
guuuacccaugacugauuu

SEQ ID NO: 849472 - RNA, 19 nt, Homo sapiens
  misc_RNA (1)...(19): siRNA sense strand
gcugaaagcagugucauuc

SEQ ID NO: 849473 - RNA, 19 nt, Homo sapiens
  misc_RNA (1)...(19): siRNA sense strand
gauggucuauugaucaacu

SEQ ID NO: 849474 - RNA, 19 nt, Homo sapiens
  misc_RNA (1)...(19): siRNA sense strand
acaaacaugugaaguugag

SEQ ID NO: 849475 - RNA, 19 nt, Homo sapiens
  misc_RNA (1)...(19): siRNA sense strand
gcauugccuucaguauuga

SEQ ID NO: 849476 - RNA, 19 nt, Homo sapiens
  misc_RNA (1)...(19): siRNA sense strand
acuaauccguguaucagaa

SEQ ID NO: 849477 - RNA, 19 nt, Homo sapiens
  misc_RNA (1)...(19): siRNA sense strand
caucuggaacaaauucuaa

SEQ ID NO: 849478 - RNA, 19 nt, Homo sapiens
  misc_RNA (1)...(19): siRNA sense strand
ggaagcauaacuaguccuu

SEQ ID NO: 849479 - RNA, 19 nt, Homo sapiens
  misc_RNA (1)...(19): siRNA sense strand
acagagguguuggaugaaa

SEQ ID NO: 849480 - RNA, 19 nt, Homo sapiens
  misc_RNA (1)...(19): siRNA sense strand
uugaaaguccuagugauua

SEQ ID NO: 849481 - RNA, 19 nt, Homo sapiens
  misc_RNA (1)...(19): siRNA sense strand
ugugaaagcaguaacauuc

SEQ ID NO: 849482 - RNA, 19 nt, Homo sapiens
  misc_RNA (1)...(19): siRNA sense strand
agaaagacaauaacacugu

SEQ ID NO: 849483 - RNA, 19 nt, Homo sapiens
  misc_RNA (1)...(19): siRNA sense strand
gugacugccaugucuguua

SEQ ID NO: 849484 - RNA, 19 nt, Homo sapiens
  misc_RNA (1)...(19): siRNA sense strand
agauuugucuccuguaaag

SEQ ID NO: 849485 - RNA, 19 nt, Homo sapiens
  misc_RNA (1)...(19): siRNA sense strand
caagaccacacaacacaga

SEQ ID NO: 849486 - RNA, 19 nt, Homo sapiens
  misc_RNA (1)...(19): siRNA sense strand
gaaagugaugcacaaacau

SEQ ID NO: 849487 - RNA, 19 nt, Homo sapiens
  misc_RNA (1)...(19): siRNA sense strand
caaaaucaguccagugcuu

SEQ ID NO: 849488 - RNA, 19 nt, Homo sapiens
  misc_RNA (1)...(19): siRNA sense strand
uaugagacuucagauguau

SEQ ID NO: 849489 - RNA, 19 nt, Homo sapiens
  misc_RNA (1)...(19): siRNA sense strand
ccuaugagacuucagaugu

SEQ ID NO: 849490 - RNA, 19 nt, Homo sapiens
  misc_RNA (1)...(19): siRNA sense strand
acuaguccuucgccuauuu

SEQ ID NO: 849491 - RNA, 19 nt, Homo sapiens
  misc_RNA (1)...(19): siRNA sense strand
ggaaaccucaguucuucau

SEQ ID NO: 849492 - RNA, 19 nt, Homo sapiens
  misc_RNA (1)...(19): siRNA sense strand
ugccaugucuguuacacaa

SEQ ID NO: 849493 - RNA, 19 nt, Homo sapiens
  misc_RNA (1)...(19): siRNA sense strand
uguaucagaaguccuuaua

SEQ ID NO: 849494 - RNA, 19 nt, Homo sapiens
  misc_RNA (1)...(19): siRNA sense strand
agacuccacucucagaaca

SEQ ID NO: 849495 - RNA, 19 nt, Homo sapiens
  misc_RNA (1)...(19): siRNA sense strand
caacuagcuguaauaaauc

SEQ ID NO: 849496 - RNA, 19 nt, Homo sapiens
  misc_RNA (1)...(19): siRNA sense strand
agaaaguuacugcaaagaa

SEQ ID NO: 849497 - RNA, 19 nt, Homo sapiens
  misc_RNA (1)...(19): siRNA sense strand
cagaugagaccacuuggau

SEQ ID NO: 849498 - RNA, 19 nt, Homo sapiens
  misc_RNA (1)...(19): siRNA sense strand
uagcagaugagaccacuug

SEQ ID NO: 849499 - RNA, 19 nt, Homo sapiens
  misc_RNA (1)...(19): siRNA sense strand
auucuaaucuccaugaaca

SEQ ID NO: 849500 - RNA, 19 nt, Homo sapiens
  misc_RNA (1)...(19): siRNA sense strand
uccaguaaaugcacuaaca

SEQ ID NO: 849501 - RNA, 19 nt, Homo sapiens
  misc_RNA (1)...(19): siRNA sense strand
ucagauaccuuuuacucuu

SEQ ID NO: 849502 - RNA, 19 nt, Homo sapiens
  misc_RNA (1)...(19): siRNA sense strand
gcugaugaauuugcagauc

SEQ ID NO: 849503 - RNA, 19 nt, Homo sapiens
  misc_RNA (1)...(19): siRNA sense strand
gaauucaucucgguuuaua

SEQ ID NO: 849504 - RNA, 19 nt, Homo sapiens
  misc_RNA (1)...(19): siRNA sense strand
gcaauguuaugucuaauga

SEQ ID NO: 849505 - RNA, 19 nt, Homo sapiens
  misc_RNA (1)...(19): siRNA sense strand
gaaggucccucuacaaugg

SEQ ID NO: 849506 - RNA, 19 nt, Homo sapiens
  misc_RNA (1)...(19): siRNA sense strand
ggacauagcucaggcaaac

SEQ ID NO: 849507 - RNA, 19 nt, Homo sapiens
  misc_RNA (1)...(19): siRNA sense strand
gcaguacuauuucaaucua

SEQ ID NO: 849508 - RNA, 19 nt, Homo sapiens
  misc_RNA (1)...(19): siRNA sense strand
gcuaugauaacuucucuua

SEQ ID NO: 849509 - RNA, 19 nt, Homo sapiens
  misc_RNA (1)...(19): siRNA sense strand
cagaugaguugugugaaua

SEQ ID NO: 849510 - RNA, 19 nt, Homo sapiens
  misc_RNA (1)...(19): siRNA sense strand
ucaaauucauggugcuaua

SEQ ID NO: 849511 - RNA, 19 nt, Homo sapiens
  misc_RNA (1)...(19): siRNA sense strand
gaggagagaagauggcaua

SEQ ID NO: 849512 - RNA, 19 nt, Homo sapiens
  misc_RNA (1)...(19): siRNA sense strand
gagagaagauggcauacag

SEQ ID NO: 849513 - RNA, 19 nt, Homo sapiens
  misc_RNA (1)...(19): siRNA sense strand
acagacagcuggcaauguu

SEQ ID NO: 849514 - RNA, 19 nt, Homo sapiens
  misc_RNA (1)...(19): siRNA sense strand
gaucaaaccguuccucaau

SEQ ID NO: 849515 - RNA, 19 nt, Homo sapiens
  misc_RNA (1)...(19): siRNA sense strand
gugcagagccagacuauga

SEQ ID NO: 849516 - RNA, 19 nt, Homo sapiens
  misc_RNA (1)...(19): siRNA sense strand
ccagagcuaugauaacuuc

SEQ ID NO: 849517 - RNA, 19 nt, Homo sapiens
  misc_RNA (1)...(19): siRNA sense strand
ggacacaguuaccucauac

SEQ ID NO: 849518 - RNA, 19 nt, Homo sapiens
  misc_RNA (1)...(19): siRNA sense strand
ggcgauaucaugaagaaua

SEQ ID NO: 849519 - RNA, 19 nt, Homo sapiens
  misc_RNA (1)...(19): siRNA sense strand
ccaaugcacuacucacaga

SEQ ID NO: 849520 - RNA, 19 nt, Homo sapiens
  misc_RNA (1)...(19): siRNA sense strand
gaauaaggagucccaguau

SEQ ID NO: 849521 - RNA, 19 nt, Homo sapiens
  misc_RNA (1)...(19): siRNA sense strand
gaagaugaugggaaauauu

SEQ ID NO: 849522 - RNA, 19 nt, Homo sapiens
  misc_RNA (1)...(19): siRNA sense strand
ccagaugaguugugugaau

SEQ ID NO: 849523 - RNA, 19 nt, Homo sapiens
  misc_RNA (1)...(19): siRNA sense strand
ugaauaaggagucccagua

SEQ ID NO: 849524 - RNA, 19 nt, Homo sapiens
  misc_RNA (1)...(19): siRNA sense strand
cagcuccagucuuaucuaa

SEQ ID NO: 849525 - RNA, 19 nt, Homo sapiens
  misc_RNA (1)...(19): siRNA sense strand
gcagcuuccugugccaaua

SEQ ID NO: 849526 - RNA, 19 nt, Homo sapiens
  misc_RNA (1)...(19): siRNA sense strand
cagaagaugaugggaaaua

SEQ ID NO: 849527 - RNA, 19 nt, Homo sapiens
  misc_RNA (1)...(19): siRNA sense strand
gaaaaugggcgauaucaug

SEQ ID NO: 849528 - RNA, 19 nt, Homo sapiens
  misc_RNA (1)...(19): siRNA sense strand
cagcaaacuugucucuuca

SEQ ID NO: 849529 - RNA, 19 nt, Homo sapiens
  misc_RNA (1)...(19): siRNA sense strand
ggaugagacugcuuaugca

SEQ ID NO: 849530 - RNA, 19 nt, Homo sapiens
  misc_RNA (1)...(19): siRNA sense strand
ggaaauauugcagcaguug

SEQ ID NO: 849531 - RNA, 19 nt, Homo sapiens
  misc_RNA (1)...(19): siRNA sense strand
acagcaaacuugucucuuc

SEQ ID NO: 849532 - RNA, 19 nt, Homo sapiens
  misc_RNA (1)...(19): siRNA sense strand
ugaguugugugaauaagga

SEQ ID NO: 849533 - RNA, 19 nt, Homo sapiens
  misc_RNA (1)...(19): siRNA sense strand
ccacuucaguuuccucaca

SEQ ID NO: 849534 - RNA, 19 nt, Homo sapiens
  misc_RNA (1)...(19): siRNA sense strand
uguuccagcuccagucuua

SEQ ID NO: 849535 - RNA, 19 nt, Homo sapiens
  misc_RNA (1)...(19): siRNA sense strand
ggcaauggccagagugaaa

SEQ ID NO: 849536 - RNA, 19 nt, Homo sapiens
  misc_RNA (1)...(19): siRNA sense strand
uagcacaacugcaucuaca

SEQ ID NO: 849537 - RNA, 19 nt, Homo sapiens
  misc_RNA (1)...(19): siRNA sense strand
guagagaauuauccagucu

SEQ ID NO: 849538 - RNA, 19 nt, Homo sapiens
  misc_RNA (1)...(19): siRNA sense strand
aggaauucaucucgguuua

SEQ ID NO: 849539 - RNA, 19 nt, Homo sapiens
  misc_RNA (1)...(19): siRNA sense strand
uauaaauccugggccaauu

SEQ ID NO: 849540 - RNA, 19 nt, Homo sapiens
  misc_RNA (1)...(19): siRNA sense strand
uauggugguucuucucaaa

SEQ ID NO: 849541 - RNA, 19 nt, Homo sapiens
  misc_RNA (1)...(19): siRNA sense strand
acacacggcaggccagaua

SEQ ID NO: 849542 - RNA, 19 nt, Homo sapiens
  misc_RNA (1)...(19): siRNA sense strand
agaagaugaugggaaauau

SEQ ID NO: 849543 - RNA, 19 nt, Homo sapiens
  misc_RNA (1)...(19): siRNA sense strand
ggagggcaauggccagagu

SEQ ID NO: 849544 - RNA, 19 nt, Homo sapiens
  misc_RNA (1)...(19): siRNA sense strand
gggaaauauugcagcaguu

SEQ ID NO: 849545 - RNA, 19 nt, Homo sapiens
  misc_RNA (1)...(19): siRNA sense strand
caaauucauggugcuauaa

SEQ ID NO: 849546 - RNA, 19 nt, Homo sapiens
  misc_RNA (1)...(19): siRNA sense strand
agagaauuauccagucuau

SEQ ID NO: 849547 - RNA, 19 nt, Homo sapiens
  misc_RNA (1)...(19): siRNA sense strand
ucaguuuccucacagaaug

SEQ ID NO: 849548 - RNA, 19 nt, Homo sapiens
  misc_RNA (1)...(19): siRNA sense strand
gagcuaugauaacuucucu

SEQ ID NO: 849549 - RNA, 19 nt, Homo sapiens
  misc_RNA (1)...(19): siRNA sense strand
gcagucuauuauccaguaa

SEQ ID NO: 849550 - RNA, 19 nt, Homo sapiens
  misc_RNA (1)...(19): siRNA sense strand
gcggaagcaucagcaaaug

SEQ ID NO: 849551 - RNA, 19 nt, Homo sapiens
  misc_RNA (1)...(19): siRNA sense strand
gcagagccagacuaugaaa

SEQ ID NO: 849552 - RNA, 19 nt, Homo sapiens
  misc_RNA (1)...(19): siRNA sense strand
ucauggagcagucuauuau

SEQ ID NO: 849553 - RNA, 19 nt, Homo sapiens
  misc_RNA (1)...(19): siRNA sense strand
uaggauugcagugcuauua

SEQ ID NO: 849554 - RNA, 19 nt, Homo sapiens
  misc_RNA (1)...(19): siRNA sense strand
gggaugagacugcuuaugc

SEQ ID NO: 849555 - RNA, 19 nt, Homo sapiens
  misc_RNA (1)...(19): siRNA sense strand
agaauuauccagucuauac

SEQ ID NO: 849556 - RNA, 19 nt, Homo sapiens
  misc_RNA (1)...(19): siRNA sense strand
gcagcuucauguagagaau

SEQ ID NO: 849557 - RNA, 19 nt, Homo sapiens
  misc_RNA (1)...(19): siRNA sense strand
aaagucauguucuaugucu

SEQ ID NO: 849558 - RNA, 19 nt, Homo sapiens
  misc_RNA (1)...(19): siRNA sense strand
caacugcaucuacagcaaa

SEQ ID NO: 849559 - RNA, 19 nt, Homo sapiens
  misc_RNA (1)...(19): siRNA sense strand
gagccagacuaugaaacuu

SEQ ID NO: 849560 - RNA, 19 nt, Homo sapiens
  misc_RNA (1)...(19): siRNA sense strand
ggagucccaguauggauuu

SEQ ID NO: 849561 - RNA, 19 nt, Homo sapiens
  misc_RNA (1)...(19): siRNA sense strand
cuggcaauguuaugucuaa

SEQ ID NO: 849562 - RNA, 19 nt, Homo sapiens
  misc_RNA (1)...(19): siRNA sense strand
aagaugaugggaaauauug

SEQ ID NO: 849563 - RNA, 19 nt, Homo sapiens
  misc_RNA (1)...(19): siRNA sense strand
ccagauuauuccuguguuc

SEQ ID NO: 849564 - RNA, 19 nt, Homo sapiens
  misc_RNA (1)...(19): siRNA sense strand
acagugaggugaggagaga

SEQ ID NO: 849565 - RNA, 19 nt, Homo sapiens
  misc_RNA (1)...(19): siRNA sense strand
aauaaggagucccaguaug

SEQ ID NO: 849566 - RNA, 19 nt, Homo sapiens
  misc_RNA (1)...(19): siRNA sense strand
ucaaaccguuccucaaugc

SEQ ID NO: 849567 - RNA, 19 nt, Homo sapiens
  misc_RNA (1)...(19): siRNA sense strand
ggaauucaucucgguuuau

SEQ ID NO: 849568 - RNA, 19 nt, Homo sapiens
  misc_RNA (1)...(19): siRNA sense strand
ucucguucauuuagacgua

SEQ ID NO: 849569 - RNA, 19 nt, Homo sapiens
  misc_RNA (1)...(19): siRNA sense strand
gcucaggcaaacagacuuu

SEQ ID NO: 849570 - RNA, 19 nt, Homo sapiens
  misc_RNA (1)...(19): siRNA sense strand
gggcuuggaagaaacuauu

SEQ ID NO: 849571 - RNA, 19 nt, Homo sapiens
  misc_RNA (1)...(19): siRNA sense strand
ucaugaaggucccucuaca

SEQ ID NO: 849572 - RNA, 19 nt, Homo sapiens
  misc_RNA (1)...(19): siRNA sense strand
cuauacagccucucuuugu

SEQ ID NO: 849573 - RNA, 19 nt, Homo sapiens
  misc_RNA (1)...(19): siRNA sense strand
gcuccagucuuaucuaacg

SEQ ID NO: 849574 - RNA, 19 nt, Homo sapiens
  misc_RNA (1)...(19): siRNA sense strand
aggacacaguuaccucaua

SEQ ID NO: 849575 - RNA, 19 nt, Homo sapiens
  misc_RNA (1)...(19): siRNA sense strand
gaaagucauguucuauguc

SEQ ID NO: 849576 - RNA, 19 nt, Homo sapiens
  misc_RNA (1)...(19): siRNA sense strand
gcagcacaguaugcauuau

SEQ ID NO: 849577 - RNA, 19 nt, Homo sapiens
  misc_RNA (1)...(19): siRNA sense strand
gagaauuauccagucuaua

SEQ ID NO: 849578 - RNA, 19 nt, Homo sapiens
  misc_RNA (1)...(19): siRNA sense strand
gcuauacagccucucuuug

SEQ ID NO: 849579 - RNA, 19 nt, Homo sapiens
  misc_RNA (1)...(19): siRNA sense strand
ugggcgauaucaugaagaa

SEQ ID NO: 849580 - RNA, 19 nt, Homo sapiens
  misc_RNA (1)...(19): siRNA sense strand
ggugguucuucucaaauuc

SEQ ID NO: 849581 - RNA, 19 nt, Homo sapiens
  misc_RNA (1)...(19): siRNA sense strand
gcagcagcagcuucaugua

SEQ ID NO: 849582 - RNA, 19 nt, Homo sapiens
  misc_RNA (1)...(19): siRNA sense strand
ggcacuccauggucuaugu

SEQ ID NO: 849583 - RNA, 19 nt, Homo sapiens
  misc_RNA (1)...(19): siRNA sense strand
cguagucaccgccagauga

SEQ ID NO: 849584 - RNA, 19 nt, Homo sapiens
  misc_RNA (1)...(19): siRNA sense strand
agcagucuauuauccagua

SEQ ID NO: 849585 - RNA, 19 nt, Homo sapiens
  misc_RNA (1)...(19): siRNA sense strand
gaauuuagaggagggcaau

SEQ ID NO: 849586 - RNA, 19 nt, Homo sapiens
  misc_RNA (1)...(19): siRNA sense strand
gaugagacugcuuaugcaa

SEQ ID NO: 849587 - RNA, 19 nt, Homo sapiens
  misc_RNA (1)...(19): siRNA sense strand
gcugccagagcuaugauaa

SEQ ID NO: 849588 - RNA, 19 nt, Homo sapiens
  misc_RNA (1)...(19): siRNA sense strand
ccuaugggcagccaccuuu

SEQ ID NO: 849589 - RNA, 19 nt, Homo sapiens
  misc_RNA (1)...(19): siRNA sense strand
gcagcagcuucauguagag

SEQ ID NO: 849590 - RNA, 19 nt, Homo sapiens
  misc_RNA (1)...(19): siRNA sense strand
ucuuauagaucucguucau

SEQ ID NO: 849591 - RNA, 19 nt, Homo sapiens
  misc_RNA (1)...(19): siRNA sense strand
caacuuuuccuaaucauga

SEQ ID NO: 849592 - RNA, 19 nt, Homo sapiens
  misc_RNA (1)...(19): siRNA sense strand
ugagacugcuuaugcaacu

SEQ ID NO: 849593 - RNA, 19 nt, Homo sapiens
  misc_RNA (1)...(19): siRNA sense strand
gaugaguugugugaauaag

SEQ ID NO: 849594 - RNA, 19 nt, Homo sapiens
  misc_RNA (1)...(19): siRNA sense strand
cccagcuucucauuaugua

SEQ ID NO: 849595 - RNA, 19 nt, Homo sapiens
  misc_RNA (1)...(19): siRNA sense strand
uggugguucuucucaaauu

SEQ ID NO: 849596 - RNA, 19 nt, Homo sapiens
  misc_RNA (1)...(19): siRNA sense strand
ggcggaagcaucagcaaau

SEQ ID NO: 849597 - RNA, 19 nt, Homo sapiens
  misc_RNA (1)...(19): siRNA sense strand
ggagagaagauggcauaca

SEQ ID NO: 849598 - RNA, 19 nt, Homo sapiens
  misc_RNA (1)...(19): siRNA sense strand
cagcuuccugugccaauaa

SEQ ID NO: 849599 - RNA, 19 nt, Homo sapiens
  misc_RNA (1)...(19): siRNA sense strand
acaacugcaucuacagcaa

SEQ ID NO: 849600 - RNA, 19 nt, Homo sapiens
  misc_RNA (1)...(19): siRNA sense strand
ucaggauacuguguuggaa

SEQ ID NO: 849601 - RNA, 19 nt, Homo sapiens
  misc_RNA (1)...(19): siRNA sense strand
cagcagcagcuucauguag

SEQ ID NO: 849602 - RNA, 19 nt, Homo sapiens
  misc_RNA (1)...(19): siRNA sense strand
agcagcagcuucauguaga

SEQ ID NO: 849603 - RNA, 19 nt, Homo sapiens
  misc_RNA (1)...(19): siRNA sense strand
ggacagaagucgaagaauc

SEQ ID NO: 849604 - RNA, 19 nt, Homo sapiens
  misc_RNA (1)...(19): siRNA sense strand
gaagucaccauuaauguaa

SEQ ID NO: 849605 - RNA, 19 nt, Homo sapiens
  misc_RNA (1)...(19): siRNA sense strand
caaaagaagucaccauuaa

SEQ ID NO: 849606 - RNA, 19 nt, Homo sapiens
  misc_RNA (1)...(19): siRNA sense strand
uaaaagagaugcuaagaga

SEQ ID NO: 849607 - RNA, 19 nt, Homo sapiens
  misc_RNA (1)...(19): siRNA sense strand
gagaaugccugcaaaagaa

SEQ ID NO: 849608 - RNA, 19 nt, Homo sapiens
  misc_RNA (1)...(19): siRNA sense strand
agaagaagacgaacuguga

SEQ ID NO: 849609 - RNA, 19 nt, Homo sapiens
  misc_RNA (1)...(19): siRNA sense strand
aaagaacugugucaacuag

SEQ ID NO: 849610 - RNA, 19 nt, Homo sapiens
  misc_RNA (1)...(19): siRNA sense strand
caaagaacugugucaacua

SEQ ID NO: 849611 - RNA, 19 nt, Homo sapiens
  misc_RNA (1)...(19): siRNA sense strand
gcaaaagaagucaccauua

SEQ ID NO: 849612 - RNA, 19 nt, Homo sapiens
  misc_RNA (1)...(19): siRNA sense strand
gacagaagucgaagaauca

SEQ ID NO: 849613 - RNA, 19 nt, Homo sapiens
  misc_RNA (1)...(19): siRNA sense strand
cuaagagaaugccugcaaa

SEQ ID NO: 849614 - RNA, 19 nt, Homo sapiens
  misc_RNA (1)...(19): siRNA sense strand
acagauagcauccaacaga

SEQ ID NO: 849615 - RNA, 19 nt, Homo sapiens
  misc_RNA (1)...(19): siRNA sense strand
aaagaagucaccauuaaug

SEQ ID NO: 849616 - RNA, 19 nt, Homo sapiens
  misc_RNA (1)...(19): siRNA sense strand
aaagagaugcuaagagaau

SEQ ID NO: 849617 - RNA, 19 nt, Homo sapiens
  misc_RNA (1)...(19): siRNA sense strand
gcuaagagaaugccugcaa

SEQ ID NO: 849618 - RNA, 19 nt, Homo sapiens
  misc_RNA (1)...(19): siRNA sense strand
uaacagauagcauccaaca

SEQ ID NO: 849619 - RNA, 19 nt, Homo sapiens
  misc_RNA (1)...(19): siRNA sense strand
gaaacagaauggccuucag

SEQ ID NO: 849620 - RNA, 19 nt, Homo sapiens
  misc_RNA (1)...(19): siRNA sense strand
acaaagaacugugucaacu

SEQ ID NO: 849621 - RNA, 19 nt, Homo sapiens
  misc_RNA (1)...(19): siRNA sense strand
gucgaagaaucacaaagaa

SEQ ID NO: 849622 - RNA, 19 nt, Homo sapiens
  misc_RNA (1)...(19): siRNA sense strand
agaagucaccauuaaugua

SEQ ID NO: 849623 - RNA, 19 nt, Homo sapiens
  misc_RNA (1)...(19): siRNA sense strand
ccauuaauguaacagauag

SEQ ID NO: 849624 - RNA, 19 nt, Homo sapiens
  misc_RNA (1)...(19): siRNA sense strand
ggaauacccaacccagaga

SEQ ID NO: 849625 - RNA, 19 nt, Homo sapiens
  misc_RNA (1)...(19): siRNA sense strand
cagauagcauccaacagau

SEQ ID NO: 849626 - RNA, 19 nt, Homo sapiens
  misc_RNA (1)...(19): siRNA sense strand
uguaacagauagcauccaa

SEQ ID NO: 849627 - RNA, 19 nt, Homo sapiens
  misc_RNA (1)...(19): siRNA sense strand
caacagauggacagaaguc

SEQ ID NO: 849628 - RNA, 19 nt, Homo sapiens
  misc_RNA (1)...(19): siRNA sense strand
aaacagaauggccuucaga

SEQ ID NO: 849629 - RNA, 19 nt, Homo sapiens
  misc_RNA (1)...(19): siRNA sense strand
gaagaaucacaaagaacug

SEQ ID NO: 849630 - RNA, 19 nt, Homo sapiens
  misc_RNA (1)...(19): siRNA sense strand
gaagucgaagaaucacaaa

SEQ ID NO: 849631 - RNA, 19 nt, Homo sapiens
  misc_RNA (1)...(19): siRNA sense strand
cgaagaaucacaaagaacu

SEQ ID NO: 849632 - RNA, 19 nt, Homo sapiens
  misc_RNA (1)...(19): siRNA sense strand
ccacagaggcuaaaagaga

SEQ ID NO: 849633 - RNA, 19 nt, Homo sapiens
  misc_RNA (1)...(19): siRNA sense strand
gagacccagugcccaaauc

SEQ ID NO: 849634 - RNA, 19 nt, Homo sapiens
  misc_RNA (1)...(19): siRNA sense strand
ccaccuggcucaccuacac

SEQ ID NO: 849635 - RNA, 19 nt, Homo sapiens
  misc_RNA (1)...(19): siRNA sense strand
gaauacccaacccagagaa

SEQ ID NO: 849636 - RNA, 19 nt, Homo sapiens
  misc_RNA (1)...(19): siRNA sense strand
caccauuaauguaacagau

SEQ ID NO: 849637 - RNA, 19 nt, Homo sapiens
  misc_RNA (1)...(19): siRNA sense strand
cagagaagaagacgaacug

SEQ ID NO: 849638 - RNA, 19 nt, Homo sapiens
  misc_RNA (1)...(19): siRNA sense strand
cagauggacagaagucgaa

SEQ ID NO: 849639 - RNA, 19 nt, Homo sapiens
  misc_RNA (1)...(19): siRNA sense strand
agucgaagaaucacaaaga

SEQ ID NO: 849640 - RNA, 19 nt, Homo sapiens
  misc_RNA (1)...(19): siRNA sense strand
agaagucgaagaaucacaa

SEQ ID NO: 849641 - RNA, 19 nt, Homo sapiens
  misc_RNA (1)...(19): siRNA sense strand
aagagaugcuaagagaaug

SEQ ID NO: 849642 - RNA, 19 nt, Homo sapiens
  misc_RNA (1)...(19): siRNA sense strand
aagaagucaccauuaaugu

SEQ ID NO: 849643 - RNA, 19 nt, Homo sapiens
  misc_RNA (1)...(19): siRNA sense strand
acucgggcaugcuggaaga

SEQ ID NO: 849644 - RNA, 19 nt, Homo sapiens
  misc_RNA (1)...(19): siRNA sense strand
aaagaaagcuggucacaaa

SEQ ID NO: 849645 - RNA, 19 nt, Homo sapiens
  misc_RNA (1)...(19): siRNA sense strand
ggaaagagaaacuuacuua

SEQ ID NO: 849646 - RNA, 19 nt, Homo sapiens
  misc_RNA (1)...(19): siRNA sense strand
ggagaaagaugcuacaugu

SEQ ID NO: 849647 - RNA, 19 nt, Homo sapiens
  misc_RNA (1)...(19): siRNA sense strand
gaaguacaguuaugcagua

SEQ ID NO: 849648 - RNA, 19 nt, Homo sapiens
  misc_RNA (1)...(19): siRNA sense strand
guuaggcgauugcaaauua

SEQ ID NO: 849649 - RNA, 19 nt, Homo sapiens
  misc_RNA (1)...(19): siRNA sense strand
ucacaaagcuaacuccaaa

SEQ ID NO: 849650 - RNA, 19 nt, Homo sapiens
  misc_RNA (1)...(19): siRNA sense strand
gagaaaagcucuacauauu

SEQ ID NO: 849651 - RNA, 19 nt, Homo sapiens
  misc_RNA (1)...(19): siRNA sense strand
gaaagaugcuacaugugaa

SEQ ID NO: 849652 - RNA, 19 nt, Homo sapiens
  misc_RNA (1)...(19): siRNA sense strand
uuaaaccacugccaaguua

SEQ ID NO: 849653 - RNA, 19 nt, Homo sapiens
  misc_RNA (1)...(19): siRNA sense strand
aaggaaagcugaacuagaa

SEQ ID NO: 849654 - RNA, 19 nt, Homo sapiens
  misc_RNA (1)...(19): siRNA sense strand
gaagagaggcauccugauu

SEQ ID NO: 849655 - RNA, 19 nt, Homo sapiens
  misc_RNA (1)...(19): siRNA sense strand
gaauggacuuuaauugcua

SEQ ID NO: 849656 - RNA, 19 nt, Homo sapiens
  misc_RNA (1)...(19): siRNA sense strand
gagaagaaguacaguuaug

SEQ ID NO: 849657 - RNA, 19 nt, Homo sapiens
  misc_RNA (1)...(19): siRNA sense strand
gaagacagaagaaacauug

SEQ ID NO: 849658 - RNA, 19 nt, Homo sapiens
  misc_RNA (1)...(19): siRNA sense strand
gaauuaugcuucugugugu

SEQ ID NO: 849659 - RNA, 19 nt, Homo sapiens
  misc_RNA (1)...(19): siRNA sense strand
aagaagaacuugaugaaga

SEQ ID NO: 849660 - RNA, 19 nt, Homo sapiens
  misc_RNA (1)...(19): siRNA sense strand
ggaaacagaccaaauucaa

SEQ ID NO: 849661 - RNA, 19 nt, Homo sapiens
  misc_RNA (1)...(19): siRNA sense strand
gaugaacguucuauuguca

SEQ ID NO: 849662 - RNA, 19 nt, Homo sapiens
  misc_RNA (1)...(19): siRNA sense strand
cgacaauccuagccacuuu

SEQ ID NO: 849663 - RNA, 19 nt, Homo sapiens
  misc_RNA (1)...(19): siRNA sense strand
gaaagugaauacaguaggu

SEQ ID NO: 849664 - RNA, 19 nt, Homo sapiens
  misc_RNA (1)...(19): siRNA sense strand
cagauuacauugggagaua

SEQ ID NO: 849665 - RNA, 19 nt, Homo sapiens
  misc_RNA (1)...(19): siRNA sense strand
gcaguuaggcgauugcaaa

SEQ ID NO: 849666 - RNA, 19 nt, Homo sapiens
  misc_RNA (1)...(19): siRNA sense strand
gaaaagcucuacauauugu

SEQ ID NO: 849667 - RNA, 19 nt, Homo sapiens
  misc_RNA (1)...(19): siRNA sense strand
gaaagucuaaccaucauau

SEQ ID NO: 849668 - RNA, 19 nt, Homo sapiens
  misc_RNA (1)...(19): siRNA sense strand
uacaguaggucagaaauaa

SEQ ID NO: 849669 - RNA, 19 nt, Homo sapiens
  misc_RNA (1)...(19): siRNA sense strand
ugaaggagacuuugauuga

SEQ ID NO: 849670 - RNA, 19 nt, Homo sapiens
  misc_RNA (1)...(19): siRNA sense strand
ggaauggacuuuaauugcu

SEQ ID NO: 849671 - RNA, 19 nt, Homo sapiens
  misc_RNA (1)...(19): siRNA sense strand
cagaagaguuccuaaugga

SEQ ID NO: 849672 - RNA, 19 nt, Homo sapiens
  misc_RNA (1)...(19): siRNA sense strand
cagcuuggaugagucuuua

SEQ ID NO: 849673 - RNA, 19 nt, Homo sapiens
  misc_RNA (1)...(19): siRNA sense strand
caaagaacagacaguagua

SEQ ID NO: 849674 - RNA, 19 nt, Homo sapiens
  misc_RNA (1)...(19): siRNA sense strand
gaacagacaguaguagaug

SEQ ID NO: 849675 - RNA, 19 nt, Homo sapiens
  misc_RNA (1)...(19): siRNA sense strand
gaagauugaauuugagaga

SEQ ID NO: 849676 - RNA, 19 nt, Homo sapiens
  misc_RNA (1)...(19): siRNA sense strand
ugaugaagaugacauaauc

SEQ ID NO: 849677 - RNA, 19 nt, Homo sapiens
  misc_RNA (1)...(19): siRNA sense strand
guacaguuaugcaguaaag

SEQ ID NO: 849678 - RNA, 19 nt, Homo sapiens
  misc_RNA (1)...(19): siRNA sense strand
agaagaagcugggaauugu

SEQ ID NO: 849679 - RNA, 19 nt, Homo sapiens
  misc_RNA (1)...(19): siRNA sense strand
aaacagacaaguacuuuga

SEQ ID NO: 849680 - RNA, 19 nt, Homo sapiens
  misc_RNA (1)...(19): siRNA sense strand
caaguacuuugaaacaaga

SEQ ID NO: 849681 - RNA, 19 nt, Homo sapiens
  misc_RNA (1)...(19): siRNA sense strand
gaagaagcugggaauugua

SEQ ID NO: 849682 - RNA, 19 nt, Homo sapiens
  misc_RNA (1)...(19): siRNA sense strand
gaacuuucagguuaacaaa

SEQ ID NO: 849683 - RNA, 19 nt, Homo sapiens
  misc_RNA (1)...(19): siRNA sense strand
guucgaacuuucagguuaa

SEQ ID NO: 849684 - RNA, 19 nt, Homo sapiens
  misc_RNA (1)...(19): siRNA sense strand
caugugaacuuccuuuaca

SEQ ID NO: 849685 - RNA, 19 nt, Homo sapiens
  misc_RNA (1)...(19): siRNA sense strand
agaaagaugcuacauguga

SEQ ID NO: 849686 - RNA, 19 nt, Homo sapiens
  misc_RNA (1)...(19): siRNA sense strand
ccaggaaacagaccaaauu

SEQ ID NO: 849687 - RNA, 19 nt, Homo sapiens
  misc_RNA (1)...(19): siRNA sense strand
gaacaaaguggccauucug

SEQ ID NO: 849688 - RNA, 19 nt, Homo sapiens
  misc_RNA (1)...(19): siRNA sense strand
ugaacuuccuuuacagaaa

SEQ ID NO: 849689 - RNA, 19 nt, Homo sapiens
  misc_RNA (1)...(19): siRNA sense strand
gaaggagacuuugauugag

SEQ ID NO: 849690 - RNA, 19 nt, Homo sapiens
  misc_RNA (1)...(19): siRNA sense strand
gaauacaguaggucagaaa

SEQ ID NO: 849691 - RNA, 19 nt, Homo sapiens
  misc_RNA (1)...(19): siRNA sense strand
acagugaugucguggauga

SEQ ID NO: 849692 - RNA, 19 nt, Homo sapiens
  misc_RNA (1)...(19): siRNA sense strand
gagcaugauuccaccuuuc

SEQ ID NO: 849693 - RNA, 19 nt, Homo sapiens
  misc_RNA (1)...(19): siRNA sense strand
gacaaguacuuugaaacaa

SEQ ID NO: 849694 - RNA, 19 nt, Homo sapiens
  misc_RNA (1)...(19): siRNA sense strand
gaccacagcugcaccaaaa

SEQ ID NO: 849695 - RNA, 19 nt, Homo sapiens
  misc_RNA (1)...(19): siRNA sense strand
ggaugaacguucuauuguc

SEQ ID NO: 849696 - RNA, 19 nt, Homo sapiens
  misc_RNA (1)...(19): siRNA sense strand
ucaggaagguaugguguuu

SEQ ID NO: 849697 - RNA, 19 nt, Homo sapiens
  misc_RNA (1)...(19): siRNA sense strand
acacaaaccugcggaaugg

SEQ ID NO: 849698 - RNA, 19 nt, Homo sapiens
  misc_RNA (1)...(19): siRNA sense strand
gauuccaccuuuccacuga

SEQ ID NO: 849699 - RNA, 19 nt, Homo sapiens
  misc_RNA (1)...(19): siRNA sense strand
ugaagaaaccaccaaauca

SEQ ID NO: 849700 - RNA, 19 nt, Homo sapiens
  misc_RNA (1)...(19): siRNA sense strand
aaagcuaacuccaaacaca

SEQ ID NO: 849701 - RNA, 19 nt, Homo sapiens
  misc_RNA (1)...(19): siRNA sense strand
gauaguagcagugacaaug

SEQ ID NO: 849702 - RNA, 19 nt, Homo sapiens
  misc_RNA (1)...(19): siRNA sense strand
uggagaagaaguacaguua

SEQ ID NO: 849703 - RNA, 19 nt, Homo sapiens
  misc_RNA (1)...(19): siRNA sense strand
cccgaagccucucugguua

SEQ ID NO: 849704 - RNA, 19 nt, Homo sapiens
  misc_RNA (1)...(19): siRNA sense strand
ggagauauuuacacacaac

SEQ ID NO: 849705 - RNA, 19 nt, Homo sapiens
  misc_RNA (1)...(19): siRNA sense strand
gaaaacgcaucguacuuga

SEQ ID NO: 849706 - RNA, 19 nt, Homo sapiens
  misc_RNA (1)...(19): siRNA sense strand
ggucagaaauaacucuagu

SEQ ID NO: 849707 - RNA, 19 nt, Homo sapiens
  misc_RNA (1)...(19): siRNA sense strand
cacccuccuugaagaauua

SEQ ID NO: 849708 - RNA, 19 nt, Homo sapiens
  misc_RNA (1)...(19): siRNA sense strand
cagaacagcuuggaugagu

SEQ ID NO: 849709 - RNA, 19 nt, Homo sapiens
  misc_RNA (1)...(19): siRNA sense strand
gaauauuacagaagaguuc

SEQ ID NO: 849710 - RNA, 19 nt, Homo sapiens
  misc_RNA (1)...(19): siRNA sense strand
aaaguugaguaaaguguug

SEQ ID NO: 849711 - RNA, 19 nt, Homo sapiens
  misc_RNA (1)...(19): siRNA sense strand
agaagaacuugaugaagau

SEQ ID NO: 849712 - RNA, 19 nt, Homo sapiens
  misc_RNA (1)...(19): siRNA sense strand
cgaagccucucugguuaaa

SEQ ID NO: 849713 - RNA, 19 nt, Homo sapiens
  misc_RNA (1)...(19): siRNA sense strand
acagacaaguacuuugaaa

SEQ ID NO: 849714 - RNA, 19 nt, Homo sapiens
  misc_RNA (1)...(19): siRNA sense strand
gagugugggagguucauua

SEQ ID NO: 849715 - RNA, 19 nt, Homo sapiens
  misc_RNA (1)...(19): siRNA sense strand
ggacuuuaauugcuauggu

SEQ ID NO: 849716 - RNA, 19 nt, Homo sapiens
  misc_RNA (1)...(19): siRNA sense strand
uguucgaacuuucagguua

SEQ ID NO: 849717 - RNA, 19 nt, Homo sapiens
  misc_RNA (1)...(19): siRNA sense strand
aaacgcaucguacuugaaa

SEQ ID NO: 849718 - RNA, 19 nt, Homo sapiens
  misc_RNA (1)...(19): siRNA sense strand
caucagauaucgacaaucc

SEQ ID NO: 849719 - RNA, 19 nt, Homo sapiens
  misc_RNA (1)...(19): siRNA sense strand
agacuuugauugaguggaa

SEQ ID NO: 849720 - RNA, 19 nt, Homo sapiens
  misc_RNA (1)...(19): siRNA sense strand
gaaacauucucaggaaggu

SEQ ID NO: 849721 - RNA, 19 nt, Homo sapiens
  misc_RNA (1)...(19): siRNA sense strand
caaguuacgagaauuugaa

SEQ ID NO: 849722 - RNA, 19 nt, Homo sapiens
  misc_RNA (1)...(19): siRNA sense strand
ggagaagaaguacaguuau

SEQ ID NO: 849723 - RNA, 19 nt, Homo sapiens
  misc_RNA (1)...(19): siRNA sense strand
ggaugagucuuuaccuuuu

SEQ ID NO: 849724 - RNA, 19 nt, Homo sapiens
  misc_RNA (1)...(19): siRNA sense strand
gaacuagaagcagcuguga

SEQ ID NO: 849725 - RNA, 19 nt, Homo sapiens
  misc_RNA (1)...(19): siRNA sense strand
ugacaaugagcaagacuuu

SEQ ID NO: 849726 - RNA, 19 nt, Homo sapiens
  misc_RNA (1)...(19): siRNA sense strand
gcagugacaaugagcaaga

SEQ ID NO: 849727 - RNA, 19 nt, Homo sapiens
  misc_RNA (1)...(19): siRNA sense strand
acucugugguuauccuuua

SEQ ID NO: 849728 - RNA, 19 nt, Homo sapiens
  misc_RNA (1)...(19): siRNA sense strand
gcucagguacagccauuaa

SEQ ID NO: 849729 - RNA, 19 nt, Homo sapiens
  misc_RNA (1)...(19): siRNA sense strand
aggagaauauuacagaaga

SEQ ID NO: 849730 - RNA, 19 nt, Homo sapiens
  misc_RNA (1)...(19): siRNA sense strand
ggaagacagaagaaacauu

SEQ ID NO: 849731 - RNA, 19 nt, Homo sapiens
  misc_RNA (1)...(19): siRNA sense strand
agacaaagaacagacagua

SEQ ID NO: 849732 - RNA, 19 nt, Homo sapiens
  misc_RNA (1)...(19): siRNA sense strand
ugaacguucuauugucaaa

SEQ ID NO: 849733 - RNA, 19 nt, Homo sapiens
  misc_RNA (1)...(19): siRNA sense strand
gaagaaaccaccaaaucac

SEQ ID NO: 849734 - RNA, 19 nt, Homo sapiens
  misc_RNA (1)...(19): siRNA sense strand
aagccucucugguuaaaga

SEQ ID NO: 849735 - RNA, 19 nt, Homo sapiens
  misc_RNA (1)...(19): siRNA sense strand
gcuaaaggaagaacaaagu

SEQ ID NO: 849736 - RNA, 19 nt, Homo sapiens
  misc_RNA (1)...(19): siRNA sense strand
cagaagaagcugggaauug

SEQ ID NO: 849737 - RNA, 19 nt, Homo sapiens
  misc_RNA (1)...(19): siRNA sense strand
acagaagaguuccuaaugg

SEQ ID NO: 849738 - RNA, 19 nt, Homo sapiens
  misc_RNA (1)...(19): siRNA sense strand
caaaucacaagacucagaa

SEQ ID NO: 849739 - RNA, 19 nt, Homo sapiens
  misc_RNA (1)...(19): siRNA sense strand
gugaagaaaccaccaaauc

SEQ ID NO: 849740 - RNA, 19 nt, Homo sapiens
  misc_RNA (1)...(19): siRNA sense strand
acaaguacuuugaaacaag

SEQ ID NO: 849741 - RNA, 19 nt, Homo sapiens
  misc_RNA (1)...(19): siRNA sense strand
aaacagaccaaauucaaca

SEQ ID NO: 849742 - RNA, 19 nt, Homo sapiens
  misc_RNA (1)...(19): siRNA sense strand
ucagauaucgacaauccua

SEQ ID NO: 849743 - RNA, 19 nt, Homo sapiens
  misc_RNA (1)...(19): siRNA sense strand
gaugagucuuuaccuuuua

SEQ ID NO: 849744 - RNA, 19 nt, Homo sapiens
  misc_RNA (1)...(19): siRNA sense strand
caagauauagaccguauua

SEQ ID NO: 849745 - RNA, 19 nt, Homo sapiens
  misc_RNA (1)...(19): siRNA sense strand
gcagacgaauuccuauaaa

SEQ ID NO: 849746 - RNA, 19 nt, Homo sapiens
  misc_RNA (1)...(19): siRNA sense strand
gaagaacgguaugacugua

SEQ ID NO: 849747 - RNA, 19 nt, Homo sapiens
  misc_RNA (1)...(19): siRNA sense strand
gggaaugaguccugguaua

SEQ ID NO: 849748 - RNA, 19 nt, Homo sapiens
  misc_RNA (1)...(19): siRNA sense strand
cuauaaagcucaucuccaa

SEQ ID NO: 849749 - RNA, 19 nt, Homo sapiens
  misc_RNA (1)...(19): siRNA sense strand
gacaagauauagaccguau

SEQ ID NO: 849750 - RNA, 19 nt, Homo sapiens
  misc_RNA (1)...(19): siRNA sense strand
aaguguggauugccuauua

SEQ ID NO: 849751 - RNA, 19 nt, Homo sapiens
  misc_RNA (1)...(19): siRNA sense strand
ggaaugaguccugguauau

SEQ ID NO: 849752 - RNA, 19 nt, Homo sapiens
  misc_RNA (1)...(19): siRNA sense strand
guucaagggugcaagagaa

SEQ ID NO: 849753 - RNA, 19 nt, Homo sapiens
  misc_RNA (1)...(19): siRNA sense strand
gagguucucucuucaugug

SEQ ID NO: 849754 - RNA, 19 nt, Homo sapiens
  misc_RNA (1)...(19): siRNA sense strand
gaugccaccuuauaugaau

SEQ ID NO: 849755 - RNA, 19 nt, Homo sapiens
  misc_RNA (1)...(19): siRNA sense strand
gcccagaugccaccuuaua

SEQ ID NO: 849756 - RNA, 19 nt, Homo sapiens
  misc_RNA (1)...(19): siRNA sense strand
caagagaacauauuugucu

SEQ ID NO: 849757 - RNA, 19 nt, Homo sapiens
  misc_RNA (1)...(19): siRNA sense strand
caaagcagcauaucaugau

SEQ ID NO: 849758 - RNA, 19 nt, Homo sapiens
  misc_RNA (1)...(19): siRNA sense strand
uauauggccugcaccaaga

SEQ ID NO: 849759 - RNA, 19 nt, Homo sapiens
  misc_RNA (1)...(19): siRNA sense strand
ccagaucagacaagauaua

SEQ ID NO: 849760 - RNA, 19 nt, Homo sapiens
  misc_RNA (1)...(19): siRNA sense strand
gaugaagaaggauuugauu

SEQ ID NO: 849761 - RNA, 19 nt, Homo sapiens
  misc_RNA (1)...(19): siRNA sense strand
aaauucaggugcuagagaa

SEQ ID NO: 849762 - RNA, 19 nt, Homo sapiens
  misc_RNA (1)...(19): siRNA sense strand
cacaugagcacuauaauca

SEQ ID NO: 849763 - RNA, 19 nt, Homo sapiens
  misc_RNA (1)...(19): siRNA sense strand
uaucaaccaucgccauaug

SEQ ID NO: 849764 - RNA, 19 nt, Homo sapiens
  misc_RNA (1)...(19): siRNA sense strand
cgaacucaaagaacuauaa

SEQ ID NO: 849765 - RNA, 19 nt, Homo sapiens
  misc_RNA (1)...(19): siRNA sense strand
ccaauaagccauccaaugc

SEQ ID NO: 849766 - RNA, 19 nt, Homo sapiens
  misc_RNA (1)...(19): siRNA sense strand
gcaccgcgaacucaaagaa

SEQ ID NO: 849767 - RNA, 19 nt, Homo sapiens
  misc_RNA (1)...(19): siRNA sense strand
acuccgagcccuccauuua

SEQ ID NO: 849768 - RNA, 19 nt, Homo sapiens
  misc_RNA (1)...(19): siRNA sense strand
guacuccucacuugguaua

SEQ ID NO: 849769 - RNA, 19 nt, Homo sapiens
  misc_RNA (1)...(19): siRNA sense strand
ccaaagcagcauaucauga

SEQ ID NO: 849770 - RNA, 19 nt, Homo sapiens
  misc_RNA (1)...(19): siRNA sense strand
ucacacugacaaugaguua

SEQ ID NO: 849771 - RNA, 19 nt, Homo sapiens
  misc_RNA (1)...(19): siRNA sense strand
gaacuccgagcccuccauu

SEQ ID NO: 849772 - RNA, 19 nt, Homo sapiens
  misc_RNA (1)...(19): siRNA sense strand
gaguuacaaggcacuaaua

SEQ ID NO: 849773 - RNA, 19 nt, Homo sapiens
  misc_RNA (1)...(19): siRNA sense strand
gaagaagaacgguaugacu

SEQ ID NO: 849774 - RNA, 19 nt, Homo sapiens
  misc_RNA (1)...(19): siRNA sense strand
gauauagaccguauuacca

SEQ ID NO: 849775 - RNA, 19 nt, Homo sapiens
  misc_RNA (1)...(19): siRNA sense strand
cagaugccaccuuauauga

SEQ ID NO: 849776 - RNA, 19 nt, Homo sapiens
  misc_RNA (1)...(19): siRNA sense strand
gauaaacaucuuaggugaa

SEQ ID NO: 849777 - RNA, 19 nt, Homo sapiens
  misc_RNA (1)...(19): siRNA sense strand
ggggugagcuguuugcaaa

SEQ ID NO: 849778 - RNA, 19 nt, Homo sapiens
  misc_RNA (1)...(19): siRNA sense strand
gguucucucuucaugugua

SEQ ID NO: 849779 - RNA, 19 nt, Homo sapiens
  misc_RNA (1)...(19): siRNA sense strand
ggugcaagagaacauauuu

SEQ ID NO: 849780 - RNA, 19 nt, Homo sapiens
  misc_RNA (1)...(19): siRNA sense strand
ucaccaucauccugaauau

SEQ ID NO: 849781 - RNA, 19 nt, Homo sapiens
  misc_RNA (1)...(19): siRNA sense strand
cauaucaaccaucgccaua

SEQ ID NO: 849782 - RNA, 19 nt, Homo sapiens
  misc_RNA (1)...(19): siRNA sense strand
aaagggagauaagaugugu

SEQ ID NO: 849783 - RNA, 19 nt, Homo sapiens
  misc_RNA (1)...(19): siRNA sense strand
gaccacaucauccagauca

SEQ ID NO: 849784 - RNA, 19 nt, Homo sapiens
  misc_RNA (1)...(19): siRNA sense strand
gaaugaguccugguauaug

SEQ ID NO: 849785 - RNA, 19 nt, Homo sapiens
  misc_RNA (1)...(19): siRNA sense strand
guaucgcacccucaucaua

SEQ ID NO: 849786 - RNA, 19 nt, Homo sapiens
  misc_RNA (1)...(19): siRNA sense strand
caaauucaggugcuagaga

SEQ ID NO: 849787 - RNA, 19 nt, Homo sapiens
  misc_RNA (1)...(19): siRNA sense strand
caagaaaacacagcaauuu

SEQ ID NO: 849788 - RNA, 19 nt, Homo sapiens
  misc_RNA (1)...(19): siRNA sense strand
ccagacaagcaccauauga

SEQ ID NO: 849789 - RNA, 19 nt, Homo sapiens
  misc_RNA (1)...(19): siRNA sense strand
gaucagacaagauauagac

SEQ ID NO: 849790 - RNA, 19 nt, Homo sapiens
  misc_RNA (1)...(19): siRNA sense strand
cagacgaauuccuauaaag

SEQ ID NO: 849791 - RNA, 19 nt, Homo sapiens
  misc_RNA (1)...(19): siRNA sense strand
uagaccguauuaccaauga

SEQ ID NO: 849792 - RNA, 19 nt, Homo sapiens
  misc_RNA (1)...(19): siRNA sense strand
uaaagcucaucuccaaaca

SEQ ID NO: 849793 - RNA, 19 nt, Homo sapiens
  misc_RNA (1)...(19): siRNA sense strand
agaacgguaugacuguaaa

SEQ ID NO: 849794 - RNA, 19 nt, Homo sapiens
  misc_RNA (1)...(19): siRNA sense strand
ggugagcuguuugcaaauc

SEQ ID NO: 849795 - RNA, 19 nt, Homo sapiens
  misc_RNA (1)...(19): siRNA sense strand
ccagaugccaccuuauaug

SEQ ID NO: 849796 - RNA, 19 nt, Homo sapiens
  misc_RNA (1)...(19): siRNA sense strand
uacacgagguucucucuuc

SEQ ID NO: 849797 - RNA, 19 nt, Homo sapiens
  misc_RNA (1)...(19): siRNA sense strand
aagcucaucuccaaacaag

SEQ ID NO: 849798 - RNA, 19 nt, Homo sapiens
  misc_RNA (1)...(19): siRNA sense strand
ggaucacacugacaaugag

SEQ ID NO: 849799 - RNA, 19 nt, Homo sapiens
  misc_RNA (1)...(19): siRNA sense strand
uauuaugccuccacagcaa

SEQ ID NO: 849800 - RNA, 19 nt, Homo sapiens
  misc_RNA (1)...(19): siRNA sense strand
uaucgcacccucaucauau

SEQ ID NO: 849801 - RNA, 19 nt, Homo sapiens
  misc_RNA (1)...(19): siRNA sense strand
ccacaugagcacuauaauc

SEQ ID NO: 849802 - RNA, 19 nt, Homo sapiens
  misc_RNA (1)...(19): siRNA sense strand
uaaugaagaagaacgguau

SEQ ID NO: 849803 - RNA, 19 nt, Homo sapiens
  misc_RNA (1)...(19): siRNA sense strand
caggaugacucaaauucag

SEQ ID NO: 849804 - RNA, 19 nt, Homo sapiens
  misc_RNA (1)...(19): siRNA sense strand
aaaggaugauacaccaguu

SEQ ID NO: 849805 - RNA, 19 nt, Homo sapiens
  misc_RNA (1)...(19): siRNA sense strand
acacgagguucucucuuca

SEQ ID NO: 849806 - RNA, 19 nt, Homo sapiens
  misc_RNA (1)...(19): siRNA sense strand
gcucaucuccaaacaagca

SEQ ID NO: 849807 - RNA, 19 nt, Homo sapiens
  misc_RNA (1)...(19): siRNA sense strand
gacauauuauugcccagau

SEQ ID NO: 849808 - RNA, 19 nt, Homo sapiens
  misc_RNA (1)...(19): siRNA sense strand
ccaguucauuucugugaca

SEQ ID NO: 849809 - RNA, 19 nt, Homo sapiens
  misc_RNA (1)...(19): siRNA sense strand
ccauuauaauccuaacuca

SEQ ID NO: 849810 - RNA, 19 nt, Homo sapiens
  misc_RNA (1)...(19): siRNA sense strand
uugcccagaugccaccuua

SEQ ID NO: 849811 - RNA, 19 nt, Homo sapiens
  misc_RNA (1)...(19): siRNA sense strand
acuccucacuugguauaua

SEQ ID NO: 849812 - RNA, 19 nt, Homo sapiens
  misc_RNA (1)...(19): siRNA sense strand
acacagcaauuuaauaacc

SEQ ID NO: 849813 - RNA, 19 nt, Homo sapiens
  misc_RNA (1)...(19): siRNA sense strand
ccaccuccuuugcaacaug

SEQ ID NO: 849814 - RNA, 19 nt, Homo sapiens
  misc_RNA (1)...(19): siRNA sense strand
gcaagagaacauauuuguc

SEQ ID NO: 849815 - RNA, 19 nt, Homo sapiens
  misc_RNA (1)...(19): siRNA sense strand
gcagcgaauugagcagugu

SEQ ID NO: 849816 - RNA, 19 nt, Homo sapiens
  misc_RNA (1)...(19): siRNA sense strand
ucauuucugugacaagugu

SEQ ID NO: 849817 - RNA, 19 nt, Homo sapiens
  misc_RNA (1)...(19): siRNA sense strand
ugcuaugacugugcuauuu

SEQ ID NO: 849818 - RNA, 19 nt, Homo sapiens
  misc_RNA (1)...(19): siRNA sense strand
ugaaaucccugagcguuuu

SEQ ID NO: 849819 - RNA, 19 nt, Homo sapiens
  misc_RNA (1)...(19): siRNA sense strand
gauccugugcagcgaauug

SEQ ID NO: 849820 - RNA, 19 nt, Homo sapiens
  misc_RNA (1)...(19): siRNA sense strand
aaugaguccugguauaugg

SEQ ID NO: 849821 - RNA, 19 nt, Homo sapiens
  misc_RNA (1)...(19): siRNA sense strand
cgcagacgaauuccuauaa

SEQ ID NO: 849822 - RNA, 19 nt, Homo sapiens
  misc_RNA (1)...(19): siRNA sense strand
acuauaaucagccacauga

SEQ ID NO: 849823 - RNA, 19 nt, Homo sapiens
  misc_RNA (1)...(19): siRNA sense strand
gccaccaccuccuuugcaa

SEQ ID NO: 849824 - RNA, 19 nt, Homo sapiens
  misc_RNA (1)...(19): siRNA sense strand
ugagccauauuccgccaaa

SEQ ID NO: 849825 - RNA, 19 nt, Homo sapiens
  misc_RNA (1)...(19): siRNA sense strand
caucuuaggugaaaaggau

SEQ ID NO: 849826 - RNA, 19 nt, Homo sapiens
  misc_RNA (1)...(19): siRNA sense strand
gcacuauaaucagccacau

SEQ ID NO: 849827 - RNA, 19 nt, Homo sapiens
  misc_RNA (1)...(19): siRNA sense strand
uguccaggcuguagugauc

SEQ ID NO: 849828 - RNA, 19 nt, Homo sapiens
  misc_RNA (1)...(19): siRNA sense strand
guucauuucugugacaagu

SEQ ID NO: 849829 - RNA, 19 nt, Homo sapiens
  misc_RNA (1)...(19): siRNA sense strand
uaaaaucuaugggagaaug

SEQ ID NO: 849830 - RNA, 19 nt, Homo sapiens
  misc_RNA (1)...(19): siRNA sense strand
cuucauguguagcauuguu

SEQ ID NO: 849831 - RNA, 19 nt, Homo sapiens
  misc_RNA (1)...(19): siRNA sense strand
cuaugacugugcuauuuua

SEQ ID NO: 849832 - RNA, 19 nt, Homo sapiens
  misc_RNA (1)...(19): siRNA sense strand
ggucagucaggaaaccuuu

SEQ ID NO: 849833 - RNA, 19 nt, Homo sapiens
  misc_RNA (1)...(19): siRNA sense strand
aaagcagcauaucaugaug

SEQ ID NO: 849834 - RNA, 19 nt, Homo sapiens
  misc_RNA (1)...(19): siRNA sense strand
caccagacaagcaccauau

SEQ ID NO: 849835 - RNA, 19 nt, Homo sapiens
  misc_RNA (1)...(19): siRNA sense strand
aaauguucauccuccuauu

SEQ ID NO: 849836 - RNA, 19 nt, Homo sapiens
  misc_RNA (1)...(19): siRNA sense strand
gaaaauguucauccuccua

SEQ ID NO: 849837 - RNA, 19 nt, Homo sapiens
  misc_RNA (1)...(19): siRNA sense strand
aagauuuccuggacaccuu

SEQ ID NO: 849838 - RNA, 19 nt, Homo sapiens
  misc_RNA (1)...(19): siRNA sense strand
uauagaccguauuaccaau

SEQ ID NO: 849839 - RNA, 19 nt, Homo sapiens
  misc_RNA (1)...(19): siRNA sense strand
auccagaucagacaagaua

SEQ ID NO: 849840 - RNA, 19 nt, Homo sapiens
  misc_RNA (1)...(19): siRNA sense strand
gugagcuguuugcaaauca

SEQ ID NO: 849841 - RNA, 19 nt, Homo sapiens
  misc_RNA (1)...(19): siRNA sense strand
gagacuuacaggcucauau

SEQ ID NO: 849842 - RNA, 19 nt, Homo sapiens
  misc_RNA (1)...(19): siRNA sense strand
uuugggacuuucagauaaa

SEQ ID NO: 849843 - RNA, 19 nt, Homo sapiens
  misc_RNA (1)...(19): siRNA sense strand
ccucaccauuauaauccua

SEQ ID NO: 849844 - RNA, 19 nt, Homo sapiens
  misc_RNA (1)...(19): siRNA sense strand
ggaaggugauggaggaaga

SEQ ID NO: 849845 - RNA, 19 nt, Homo sapiens
  misc_RNA (1)...(19): siRNA sense strand
ggaaugagaagaaagguau

SEQ ID NO: 849846 - RNA, 19 nt, Homo sapiens
  misc_RNA (1)...(19): siRNA sense strand
cccaagagcuacccuguga

SEQ ID NO: 849847 - RNA, 19 nt, Homo sapiens
  misc_RNA (1)...(19): siRNA sense strand
aaagguauuugggauauga

SEQ ID NO: 849848 - RNA, 19 nt, Homo sapiens
  misc_RNA (1)...(19): siRNA sense strand
agaaagguauuugggauau

SEQ ID NO: 849849 - RNA, 19 nt, Homo sapiens
  misc_RNA (1)...(19): siRNA sense strand
gaaagguauuugggauaug

SEQ ID NO: 849850 - RNA, 19 nt, Homo sapiens
  misc_RNA (1)...(19): siRNA sense strand
cuucagggauccucuguug

SEQ ID NO: 849851 - RNA, 19 nt, Homo sapiens
  misc_RNA (1)...(19): siRNA sense strand
guggaauucucaagacuuc

SEQ ID NO: 849852 - RNA, 19 nt, Homo sapiens
  misc_RNA (1)...(19): siRNA sense strand
caacagcgggacagugguu

SEQ ID NO: 849853 - RNA, 19 nt, Homo sapiens
  misc_RNA (1)...(19): siRNA sense strand
ccagacaguguggguguua

SEQ ID NO: 849854 - RNA, 19 nt, Homo sapiens
  misc_RNA (1)...(19): siRNA sense strand
uuauaacucuuugguggaa

SEQ ID NO: 849855 - RNA, 19 nt, Homo sapiens
  misc_RNA (1)...(19): siRNA sense strand
caagagcuacccugugauc

SEQ ID NO: 849856 - RNA, 19 nt, Homo sapiens
  misc_RNA (1)...(19): siRNA sense strand
aagaaagguauuugggaua

SEQ ID NO: 849857 - RNA, 19 nt, Homo sapiens
  misc_RNA (1)...(19): siRNA sense strand
gaaugagaagaaagguauu

SEQ ID NO: 849858 - RNA, 19 nt, Homo sapiens
  misc_RNA (1)...(19): siRNA sense strand
ggacugacaggcggcagaa

SEQ ID NO: 849859 - RNA, 19 nt, Homo sapiens
  misc_RNA (1)...(19): siRNA sense strand
gcagagggguggcaugaag

SEQ ID NO: 849860 - RNA, 19 nt, Homo sapiens
  misc_RNA (1)...(19): siRNA sense strand
gcugcgagcccaugacauc

SEQ ID NO: 849861 - RNA, 19 nt, Homo sapiens
  misc_RNA (1)...(19): siRNA sense strand
aggaugaggugcuacugau

SEQ ID NO: 849862 - RNA, 19 nt, Homo sapiens
  misc_RNA (1)...(19): siRNA sense strand
gccaggcacccucucauuc

SEQ ID NO: 849863 - RNA, 19 nt, Homo sapiens
  misc_RNA (1)...(19): siRNA sense strand
ucagggauccucuguuguc

SEQ ID NO: 849864 - RNA, 19 nt, Homo sapiens
  misc_RNA (1)...(19): siRNA sense strand
ggaggaagaccugcaaagc

SEQ ID NO: 849865 - RNA, 19 nt, Homo sapiens
  misc_RNA (1)...(19): siRNA sense strand
acucuuugguggaaugaga

SEQ ID NO: 849866 - RNA, 19 nt, Homo sapiens
  misc_RNA (1)...(19): siRNA sense strand
guauuugggauaugaucaa

SEQ ID NO: 849867 - RNA, 19 nt, Homo sapiens
  misc_RNA (1)...(19): siRNA sense strand
gauggaggaagaccugcaa

SEQ ID NO: 849868 - RNA, 19 nt, Homo sapiens
  misc_RNA (1)...(19): siRNA sense strand
caggaugaggugcuacuga

SEQ ID NO: 849869 - RNA, 19 nt, Homo sapiens
  misc_RNA (1)...(19): siRNA sense strand
gcucguggcuaccuuuacc

SEQ ID NO: 849870 - RNA, 19 nt, Homo sapiens
  misc_RNA (1)...(19): siRNA sense strand
gcacugugagcccgagaca

SEQ ID NO: 849871 - RNA, 19 nt, Homo sapiens
  misc_RNA (1)...(19): siRNA sense strand
gguggaauucucaagacuu

SEQ ID NO: 849872 - RNA, 19 nt, Homo sapiens
  misc_RNA (1)...(19): siRNA sense strand
cagguggaauucucaagac

SEQ ID NO: 849873 - RNA, 19 nt, Homo sapiens
  misc_RNA (1)...(19): siRNA sense strand
uggcaucuguuugaaugug

SEQ ID NO: 849874 - RNA, 19 nt, Homo sapiens
  misc_RNA (1)...(19): siRNA sense strand
ccaggcacccucucauucu

SEQ ID NO: 849875 - RNA, 19 nt, Homo sapiens
  misc_RNA (1)...(19): siRNA sense strand
acagguggaauucucaaga

SEQ ID NO: 849876 - RNA, 19 nt, Homo sapiens
  misc_RNA (1)...(19): siRNA sense strand
gcacagaccuucccaguca

SEQ ID NO: 849877 - RNA, 19 nt, Homo sapiens
  misc_RNA (1)...(19): siRNA sense strand
gaugaggaaugcaacauga

SEQ ID NO: 849878 - RNA, 19 nt, Homo sapiens
  misc_RNA (1)...(19): siRNA sense strand
ggacagaggacccgugaug

SEQ ID NO: 849879 - RNA, 19 nt, Homo sapiens
  misc_RNA (1)...(19): siRNA sense strand
gcacagaagcacucaugaa

SEQ ID NO: 849880 - RNA, 19 nt, Homo sapiens
  misc_RNA (1)...(19): siRNA sense strand
ggaggugauuuguguuaga

SEQ ID NO: 849881 - RNA, 19 nt, Homo sapiens
  misc_RNA (1)...(19): siRNA sense strand
ugaagaggcuccugagagu

SEQ ID NO: 849882 - RNA, 19 nt, Homo sapiens
  misc_RNA (1)...(19): siRNA sense strand
gcaaggacaaguacuacaa

SEQ ID NO: 849883 - RNA, 19 nt, Homo sapiens
  misc_RNA (1)...(19): siRNA sense strand
gaugacaugacucuaagua

SEQ ID NO: 849884 - RNA, 19 nt, Homo sapiens
  misc_RNA (1)...(19): siRNA sense strand
gaaagaaugcagacaccuu

SEQ ID NO: 849885 - RNA, 19 nt, Homo sapiens
  misc_RNA (1)...(19): siRNA sense strand
cagaagcacucaugaagag

SEQ ID NO: 849886 - RNA, 19 nt, Homo sapiens
  misc_RNA (1)...(19): siRNA sense strand
gggaugugguugacgauga

SEQ ID NO: 849887 - RNA, 19 nt, Homo sapiens
  misc_RNA (1)...(19): siRNA sense strand
gaggagcccugcaacaucu

SEQ ID NO: 849888 - RNA, 19 nt, Homo sapiens
  misc_RNA (1)...(19): siRNA sense strand
caacagagggaggugauuu

SEQ ID NO: 849889 - RNA, 19 nt, Homo sapiens
  misc_RNA (1)...(19): siRNA sense strand
gaggugauuuguguuagaa

SEQ ID NO: 849890 - RNA, 19 nt, Homo sapiens
  misc_RNA (1)...(19): siRNA sense strand
ggaucgcaguacccuauuu

SEQ ID NO: 849891 - RNA, 19 nt, Homo sapiens
  misc_RNA (1)...(19): siRNA sense strand
agagggaggugauuugugu

SEQ ID NO: 849892 - RNA, 19 nt, Homo sapiens
  misc_RNA (1)...(19): siRNA sense strand
ggaacgaggagaaggaaga

SEQ ID NO: 849893 - RNA, 19 nt, Homo sapiens
  misc_RNA (1)...(19): siRNA sense strand
ugacaugacucuaaguaac

SEQ ID NO: 849894 - RNA, 19 nt, Homo sapiens
  misc_RNA (1)...(19): siRNA sense strand
aagaggcuccugagaguua

SEQ ID NO: 849895 - RNA, 19 nt, Homo sapiens
  misc_RNA (1)...(19): siRNA sense strand
ggaggagggagaacagaaa

SEQ ID NO: 849896 - RNA, 19 nt, Homo sapiens
  misc_RNA (1)...(19): siRNA sense strand
ccuacaagcguccaaauga

SEQ ID NO: 849897 - RNA, 19 nt, Homo sapiens
  misc_RNA (1)...(19): siRNA sense strand
ggagccaaaugguuuagca

SEQ ID NO: 849898 - RNA, 19 nt, Homo sapiens
  misc_RNA (1)...(19): siRNA sense strand
gaaugcagacaccuuugaa

SEQ ID NO: 849899 - RNA, 19 nt, Homo sapiens
  misc_RNA (1)...(19): siRNA sense strand
gcacuacgaguacgugauc

SEQ ID NO: 849900 - RNA, 19 nt, Homo sapiens
  misc_RNA (1)...(19): siRNA sense strand
ggaggaacgaggagaagga

SEQ ID NO: 849901 - RNA, 19 nt, Homo sapiens
  misc_RNA (1)...(19): siRNA sense strand
gaaaccagaagagagagaa

SEQ ID NO: 849902 - RNA, 19 nt, Homo sapiens
  misc_RNA (1)...(19): siRNA sense strand
ggaggagcccugcaacauc

SEQ ID NO: 849903 - RNA, 19 nt, Homo sapiens
  misc_RNA (1)...(19): siRNA sense strand
guugaaaccagaagagaga

SEQ ID NO: 849904 - RNA, 19 nt, Homo sapiens
  misc_RNA (1)...(19): siRNA sense strand
gagagagaaucuuguaacc

SEQ ID NO: 849905 - RNA, 19 nt, Homo sapiens
  misc_RNA (1)...(19): siRNA sense strand
ggugauuuguguuagaaag

SEQ ID NO: 849906 - RNA, 19 nt, Homo sapiens
  misc_RNA (1)...(19): siRNA sense strand
cagaggacccgugauguga

SEQ ID NO: 849907 - RNA, 19 nt, Homo sapiens
  misc_RNA (1)...(19): siRNA sense strand
gacucugugucuacaacua

SEQ ID NO: 849908 - RNA, 19 nt, Homo sapiens
  misc_RNA (1)...(19): siRNA sense strand
cuacaagcguccaaaugag

SEQ ID NO: 849909 - RNA, 19 nt, Homo sapiens
  misc_RNA (1)...(19): siRNA sense strand
gaggacccgugaugugaag

SEQ ID NO: 849910 - RNA, 19 nt, Homo sapiens
  misc_RNA (1)...(19): siRNA sense strand
gaagaggcuccugagaguu

SEQ ID NO: 849911 - RNA, 19 nt, Homo sapiens
  misc_RNA (1)...(19): siRNA sense strand
ucugaugacaugacucuaa

SEQ ID NO: 849912 - RNA, 19 nt, Homo sapiens
  misc_RNA (1)...(19): siRNA sense strand
gauguucaccucagaaucg

SEQ ID NO: 849913 - RNA, 19 nt, Homo sapiens
  misc_RNA (1)...(19): siRNA sense strand
ggaugugguugacgaugag

SEQ ID NO: 849914 - RNA, 19 nt, Homo sapiens
  misc_RNA (1)...(19): siRNA sense strand
gagauguucaccucagaau

SEQ ID NO: 849915 - RNA, 19 nt, Homo sapiens
  misc_RNA (1)...(19): siRNA sense strand
gaagugugugagcaacauu

SEQ ID NO: 849916 - RNA, 19 nt, Homo sapiens
  misc_RNA (1)...(19): siRNA sense strand
agucaggcauccagacaga

SEQ ID NO: 849917 - RNA, 19 nt, Homo sapiens
  misc_RNA (1)...(19): siRNA sense strand
uacugugacuccagcauga

SEQ ID NO: 849918 - RNA, 19 nt, Homo sapiens
  misc_RNA (1)...(19): siRNA sense strand
gucuacaacuacuacaaga

SEQ ID NO: 849919 - RNA, 19 nt, Homo sapiens
  misc_RNA (1)...(19): siRNA sense strand
cgggcaagguggagugguu

SEQ ID NO: 849920 - RNA, 19 nt, Homo sapiens
  misc_RNA (1)...(19): siRNA sense strand
ucaggcauccagacagauu

SEQ ID NO: 849921 - RNA, 19 nt, Homo sapiens
  misc_RNA (1)...(19): siRNA sense strand
ugcggugucugucugauga

SEQ ID NO: 849922 - RNA, 19 nt, Homo sapiens
  misc_RNA (1)...(19): siRNA sense strand
ggagcuggagucaguguuc

SEQ ID NO: 849923 - RNA, 19 nt, Homo sapiens
  misc_RNA (1)...(19): siRNA sense strand
cacagaagcacucaugaag

SEQ ID NO: 849924 - RNA, 19 nt, Homo sapiens
  misc_RNA (1)...(19): siRNA sense strand
uugcggagccaaaugguuu

SEQ ID NO: 849925 - RNA, 19 nt, Homo sapiens
  misc_RNA (1)...(19): siRNA sense strand
acagaagcacucaugaaga

SEQ ID NO: 849926 - RNA, 19 nt, Homo sapiens
  misc_RNA (1)...(19): siRNA sense strand
gagaacagaaagggaggaa

SEQ ID NO: 849927 - RNA, 19 nt, Homo sapiens
  misc_RNA (1)...(19): siRNA sense strand
ugaagugugugagcaacau

SEQ ID NO: 849928 - RNA, 19 nt, Homo sapiens
  misc_RNA (1)...(19): siRNA sense strand
gcaccugccaacucaagau

SEQ ID NO: 849929 - RNA, 19 nt, Homo sapiens
  misc_RNA (1)...(19): siRNA sense strand
gaggaacgaggagaaggaa

SEQ ID NO: 849930 - RNA, 19 nt, Homo sapiens
  misc_RNA (1)...(19): siRNA sense strand
gggaggugauuuguguuag

SEQ ID NO: 849931 - RNA, 19 nt, Homo sapiens
  misc_RNA (1)...(19): siRNA sense strand
ggaagugcggugucugucu

SEQ ID NO: 849932 - RNA, 19 nt, Homo sapiens
  misc_RNA (1)...(19): siRNA sense strand
gcaauccugccaccucaag

SEQ ID NO: 849933 - RNA, 19 nt, Homo sapiens
  misc_RNA (1)...(19): siRNA sense strand
cgaggagaaggaagacuug

SEQ ID NO: 849934 - RNA, 19 nt, Homo sapiens
  misc_RNA (1)...(19): siRNA sense strand
ucugugacccucaguugaa

SEQ ID NO: 849935 - RNA, 19 nt, Homo sapiens
  misc_RNA (1)...(19): siRNA sense strand
ccgaauggagcauguguuc

SEQ ID NO: 849936 - RNA, 19 nt, Homo sapiens
  misc_RNA (1)...(19): siRNA sense strand
agaaugcagacaccuuuga

SEQ ID NO: 849937 - RNA, 19 nt, Homo sapiens
  misc_RNA (1)...(19): siRNA sense strand
gaggaggagcccugcaaca

SEQ ID NO: 849938 - RNA, 19 nt, Homo sapiens
  misc_RNA (1)...(19): siRNA sense strand
cagaaucggcacagaccuu

SEQ ID NO: 849939 - RNA, 19 nt, Homo sapiens
  misc_RNA (1)...(19): siRNA sense strand
agggaggugauuuguguua

SEQ ID NO: 849940 - RNA, 19 nt, Homo sapiens
  misc_RNA (1)...(19): siRNA sense strand
cccgugaugugaagugugu

SEQ ID NO: 849941 - RNA, 19 nt, Homo sapiens
  misc_RNA (1)...(19): siRNA sense strand
ccaucgaccggacaacuug

SEQ ID NO: 849942 - RNA, 19 nt, Homo sapiens
  misc_RNA (1)...(19): siRNA sense strand
gacucuaaguaaccucugu

SEQ ID NO: 849943 - RNA, 19 nt, Homo sapiens
  misc_RNA (1)...(19): siRNA sense strand
cugaugacaugacucuaag

SEQ ID NO: 849944 - RNA, 19 nt, Homo sapiens
  misc_RNA (1)...(19): siRNA sense strand
gcaacagagggaggugauu

SEQ ID NO: 849945 - RNA, 19 nt, Homo sapiens
  misc_RNA (1)...(19): siRNA sense strand
ugauacaccagcagccaaa

SEQ ID NO: 849946 - RNA, 19 nt, Homo sapiens
  misc_RNA (1)...(19): siRNA sense strand
ggagggcugugggaacaac

SEQ ID NO: 849947 - RNA, 19 nt, Homo sapiens
  misc_RNA (1)...(19): siRNA sense strand
cggaaggucccaccaacga

SEQ ID NO: 849948 - RNA, 19 nt, Homo sapiens
  misc_RNA (1)...(19): siRNA sense strand
cagcuugggacaacagaau

SEQ ID NO: 849949 - RNA, 19 nt, Homo sapiens
  misc_RNA (1)...(19): siRNA sense strand
gccgggaucacaacuggaa

SEQ ID NO: 849950 - RNA, 19 nt, Homo sapiens
  misc_RNA (1)...(19): siRNA sense strand
aaggaucgcaguacccuau

SEQ ID NO: 849951 - RNA, 19 nt, Homo sapiens
  misc_RNA (1)...(19): siRNA sense strand
uacaagcguccaaaugaga

SEQ ID NO: 849952 - RNA, 19 nt, Homo sapiens
  misc_RNA (1)...(19): siRNA sense strand
acagaggacccgugaugug

SEQ ID NO: 849953 - RNA, 19 nt, Homo sapiens
  misc_RNA (1)...(19): siRNA sense strand
gggcaagguggagugguuu

SEQ ID NO: 849954 - RNA, 19 nt, Homo sapiens
  misc_RNA (1)...(19): siRNA sense strand
aacgagaucuuggaugucu

SEQ ID NO: 849955 - RNA, 19 nt, Homo sapiens
  misc_RNA (1)...(19): siRNA sense strand
ggagucaguguuccaucga

SEQ ID NO: 849956 - RNA, 19 nt, Homo sapiens
  misc_RNA (1)...(19): siRNA sense strand
gaggagggagaacagaaag

SEQ ID NO: 849957 - RNA, 19 nt, Homo sapiens
  misc_RNA (1)...(19): siRNA sense strand
guauugagcugguaucuga

SEQ ID NO: 849958 - RNA, 19 nt, Homo sapiens
  misc_RNA (1)...(19): siRNA sense strand
ggacaaacauggauggaau

SEQ ID NO: 849959 - RNA, 19 nt, Homo sapiens
  misc_RNA (1)...(19): siRNA sense strand
gaacuagccaauaugaaua

SEQ ID NO: 849960 - RNA, 19 nt, Homo sapiens
  misc_RNA (1)...(19): siRNA sense strand
ggaagcagcaggaggaaua

SEQ ID NO: 849961 - RNA, 19 nt, Homo sapiens
  misc_RNA (1)...(19): siRNA sense strand
agacuuaccugaaggaauu

SEQ ID NO: 849962 - RNA, 19 nt, Homo sapiens
  misc_RNA (1)...(19): siRNA sense strand
gcucagaggugguggauuc

SEQ ID NO: 849963 - RNA, 19 nt, Homo sapiens
  misc_RNA (1)...(19): siRNA sense strand
guaaguugcuacucuuuga

SEQ ID NO: 849964 - RNA, 19 nt, Homo sapiens
  misc_RNA (1)...(19): siRNA sense strand
gaagcucgaaugacaauaa

SEQ ID NO: 849965 - RNA, 19 nt, Homo sapiens
  misc_RNA (1)...(19): siRNA sense strand
gcucgaaugacaauaaaua

SEQ ID NO: 849966 - RNA, 19 nt, Homo sapiens
  misc_RNA (1)...(19): siRNA sense strand
gagauaauccaugaagaua

SEQ ID NO: 849967 - RNA, 19 nt, Homo sapiens
  misc_RNA (1)...(19): siRNA sense strand
ggaacuagccaauaugaau

SEQ ID NO: 849968 - RNA, 19 nt, Homo sapiens
  misc_RNA (1)...(19): siRNA sense strand
gaacauacucugaggaaca

SEQ ID NO: 849969 - RNA, 19 nt, Homo sapiens
  misc_RNA (1)...(19): siRNA sense strand
gcugggaucuuaguacaaa

SEQ ID NO: 849970 - RNA, 19 nt, Homo sapiens
  misc_RNA (1)...(19): siRNA sense strand
aacaagagguuauacaaga

SEQ ID NO: 849971 - RNA, 19 nt, Homo sapiens
  misc_RNA (1)...(19): siRNA sense strand
gaaacgaaugggaauugua

SEQ ID NO: 849972 - RNA, 19 nt, Homo sapiens
  misc_RNA (1)...(19): siRNA sense strand
gaagccaaauccucagugu

SEQ ID NO: 849973 - RNA, 19 nt, Homo sapiens
  misc_RNA (1)...(19): siRNA sense strand
acaagaagaggaagagaua

SEQ ID NO: 849974 - RNA, 19 nt, Homo sapiens
  misc_RNA (1)...(19): siRNA sense strand
aaacgaaugggaauuguaa

SEQ ID NO: 849975 - RNA, 19 nt, Homo sapiens
  misc_RNA (1)...(19): siRNA sense strand
gaagagauaauccaugaag

SEQ ID NO: 849976 - RNA, 19 nt, Homo sapiens
  misc_RNA (1)...(19): siRNA sense strand
gcaggaggaauauaagaaa

SEQ ID NO: 849977 - RNA, 19 nt, Homo sapiens
  misc_RNA (1)...(19): siRNA sense strand
caagcaggauuaaguaaag

SEQ ID NO: 849978 - RNA, 19 nt, Homo sapiens
  misc_RNA (1)...(19): siRNA sense strand
aauaaguaaugguggguua

SEQ ID NO: 849979 - RNA, 19 nt, Homo sapiens
  misc_RNA (1)...(19): siRNA sense strand
aggaagagauaauccauga

SEQ ID NO: 849980 - RNA, 19 nt, Homo sapiens
  misc_RNA (1)...(19): siRNA sense strand
gaacuuggacaaacaugga

SEQ ID NO: 849981 - RNA, 19 nt, Homo sapiens
  misc_RNA (1)...(19): siRNA sense strand
guaaugaacuuggacaaac

SEQ ID NO: 849982 - RNA, 19 nt, Homo sapiens
  misc_RNA (1)...(19): siRNA sense strand
gagcugguaucugagguuu

SEQ ID NO: 849983 - RNA, 19 nt, Homo sapiens
  misc_RNA (1)...(19): siRNA sense strand
ggaagauucuggugaaagc

SEQ ID NO: 849984 - RNA, 19 nt, Homo sapiens
  misc_RNA (1)...(19): siRNA sense strand
gacaagauguggcauuggu

SEQ ID NO: 849985 - RNA, 19 nt, Homo sapiens
  misc_RNA (1)...(19): siRNA sense strand
gcuuauaauuccuggagaa

SEQ ID NO: 849986 - RNA, 19 nt, Homo sapiens
  misc_RNA (1)...(19): siRNA sense strand
caucaagcaggauuaagua

SEQ ID NO: 849987 - RNA, 19 nt, Homo sapiens
  misc_RNA (1)...(19): siRNA sense strand
gcugguaucugagguuuca

SEQ ID NO: 849988 - RNA, 19 nt, Homo sapiens
  misc_RNA (1)...(19): siRNA sense strand
acaagagguuauacaagaa

SEQ ID NO: 849989 - RNA, 19 nt, Homo sapiens
  misc_RNA (1)...(19): siRNA sense strand
caagauguggcauugguaa

SEQ ID NO: 849990 - RNA, 19 nt, Homo sapiens
  misc_RNA (1)...(19): siRNA sense strand
gauguggcauugguaaguu

SEQ ID NO: 849991 - RNA, 19 nt, Homo sapiens
  misc_RNA (1)...(19): siRNA sense strand
gaaaugcugacaagaugug

SEQ ID NO: 849992 - RNA, 19 nt, Homo sapiens
  misc_RNA (1)...(19): siRNA sense strand
uaaugaacuuggacaaaca

SEQ ID NO: 849993 - RNA, 19 nt, Homo sapiens
  misc_RNA (1)...(19): siRNA sense strand
cugaaaugcugacaagaug

SEQ ID NO: 849994 - RNA, 19 nt, Homo sapiens
  misc_RNA (1)...(19): siRNA sense strand
cguguuaaaguuucuguua

SEQ ID NO: 849995 - RNA, 19 nt, Homo sapiens
  misc_RNA (1)...(19): siRNA sense strand
gccaauaugaauagacuuu

SEQ ID NO: 849996 - RNA, 19 nt, Homo sapiens
  misc_RNA (1)...(19): siRNA sense strand
uuagcuguguggacaauuu

SEQ ID NO: 849997 - RNA, 19 nt, Homo sapiens
  misc_RNA (1)...(19): siRNA sense strand
caacauuucauggauagaa

SEQ ID NO: 849998 - RNA, 19 nt, Homo sapiens
  misc_RNA (1)...(19): siRNA sense strand
gagaaaauccguaccuuug

SEQ ID NO: 849999 - RNA, 19 nt, Homo sapiens
  misc_RNA (1)...(19): siRNA sense strand
gauaaugaaugggguauug

SEQ ID NO: 850000 - RNA, 19 nt, Homo sapiens
  misc_RNA (1)...(19): siRNA sense strand
gcugaaaugcugacaagau

SEQ ID NO: 850001 - RNA, 19 nt, Homo sapiens
  misc_RNA (1)...(19): siRNA sense strand
gaauagacuuuucuuccaa

SEQ ID NO: 850002 - RNA, 19 nt, Homo sapiens
  misc_RNA (1)...(19): siRNA sense strand
gaauuguaagcgacuauga

SEQ ID NO: 850003 - RNA, 19 nt, Homo sapiens
  misc_RNA (1)...(19): siRNA sense strand
uguaagcgacuaugagaaa

SEQ ID NO: 850004 - RNA, 19 nt, Homo sapiens
  misc_RNA (1)...(19): siRNA sense strand
uagugugacugcugaaaug

SEQ ID NO: 850005 - RNA, 19 nt, Homo sapiens
  misc_RNA (1)...(19): siRNA sense strand
cagaggugguggauucgaa

SEQ ID NO: 850006 - RNA, 19 nt, Homo sapiens
  misc_RNA (1)...(19): siRNA sense strand
ugugguugcugggaucuua

SEQ ID NO: 850007 - RNA, 19 nt, Homo sapiens
  misc_RNA (1)...(19): siRNA sense strand
ucagugugaugacagaaau

SEQ ID NO: 850008 - RNA, 19 nt, Homo sapiens
  misc_RNA (1)...(19): siRNA sense strand
gaauuacaguggcauacac

SEQ ID NO: 850009 - RNA, 19 nt, Homo sapiens
  misc_RNA (1)...(19): siRNA sense strand
ucaagcaggauuaaguaaa

SEQ ID NO: 850010 - RNA, 19 nt, Homo sapiens
  misc_RNA (1)...(19): siRNA sense strand
aagauucugucacugaguu

SEQ ID NO: 850011 - RNA, 19 nt, Homo sapiens
  misc_RNA (1)...(19): siRNA sense strand
cauacucugaggaacauua

SEQ ID NO: 850012 - RNA, 19 nt, Homo sapiens
  misc_RNA (1)...(19): siRNA sense strand
aagcucgaaugacaauaaa

SEQ ID NO: 850013 - RNA, 19 nt, Homo sapiens
  misc_RNA (1)...(19): siRNA sense strand
ucgagaagaugagcucaga

SEQ ID NO: 850014 - RNA, 19 nt, Homo sapiens
  misc_RNA (1)...(19): siRNA sense strand
guacaaaacguguuaaagu

SEQ ID NO: 850015 - RNA, 19 nt, Homo sapiens
  misc_RNA (1)...(19): siRNA sense strand
guaaugguggguuagaaga

SEQ ID NO: 850016 - RNA, 19 nt, Homo sapiens
  misc_RNA (1)...(19): siRNA sense strand
cauuaauccugauguucuu

SEQ ID NO: 850017 - RNA, 19 nt, Homo sapiens
  misc_RNA (1)...(19): siRNA sense strand
gaaaaccuguugaucuagu

SEQ ID NO: 850018 - RNA, 19 nt, Homo sapiens
  misc_RNA (1)...(19): siRNA sense strand
ugaaacgaaugggaauugu

SEQ ID NO: 850019 - RNA, 19 nt, Homo sapiens
  misc_RNA (1)...(19): siRNA sense strand
uggagaaucugcuuguuuu

SEQ ID NO: 850020 - RNA, 19 nt, Homo sapiens
  misc_RNA (1)...(19): siRNA sense strand
acaguggcauacacaauuc

SEQ ID NO: 850021 - RNA, 19 nt, Homo sapiens
  misc_RNA (1)...(19): siRNA sense strand
ggaauuacaguggcauaca

SEQ ID NO: 850022 - RNA, 19 nt, Homo sapiens
  misc_RNA (1)...(19): siRNA sense strand
cagcacugccuaaacaaga

SEQ ID NO: 850023 - RNA, 19 nt, Homo sapiens
  misc_RNA (1)...(19): siRNA sense strand
caaauccucagugugauga

SEQ ID NO: 850024 - RNA, 19 nt, Homo sapiens
  misc_RNA (1)...(19): siRNA sense strand
gguaaguugcuacucuuug

SEQ ID NO: 850025 - RNA, 19 nt, Homo sapiens
  misc_RNA (1)...(19): siRNA sense strand
aguggaagauucuggugaa

SEQ ID NO: 850026 - RNA, 19 nt, Homo sapiens
  misc_RNA (1)...(19): siRNA sense strand
uacaguggcauacacaauu

SEQ ID NO: 850027 - RNA, 19 nt, Homo sapiens
  misc_RNA (1)...(19): siRNA sense strand
guuccagacuuaccugaag

SEQ ID NO: 850028 - RNA, 19 nt, Homo sapiens
  misc_RNA (1)...(19): siRNA sense strand
caagaagaggaagagauaa

SEQ ID NO: 850029 - RNA, 19 nt, Homo sapiens
  misc_RNA (1)...(19): siRNA sense strand
agccaaauccucaguguga

SEQ ID NO: 850030 - RNA, 19 nt, Homo sapiens
  misc_RNA (1)...(19): siRNA sense strand
aggaaaaccuguugaucua

SEQ ID NO: 850031 - RNA, 19 nt, Homo sapiens
  misc_RNA (1)...(19): siRNA sense strand
guggaacuagccaauauga

SEQ ID NO: 850032 - RNA, 19 nt, Homo sapiens
  misc_RNA (1)...(19): siRNA sense strand
gguuauacaagaagaggaa

SEQ ID NO: 850033 - RNA, 19 nt, Homo sapiens
  misc_RNA (1)...(19): siRNA sense strand
cuauguccaugaagccaaa

SEQ ID NO: 850034 - RNA, 19 nt, Homo sapiens
  misc_RNA (1)...(19): siRNA sense strand
aagagauaauccaugaaga

SEQ ID NO: 850035 - RNA, 19 nt, Homo sapiens
  misc_RNA (1)...(19): siRNA sense strand
aaacaagagguuauacaag

SEQ ID NO: 850036 - RNA, 19 nt, Homo sapiens
  misc_RNA (1)...(19): siRNA sense strand
agguggaacuagccaauau

SEQ ID NO: 850037 - RNA, 19 nt, Homo sapiens
  misc_RNA (1)...(19): siRNA sense strand
agagauaauccaugaagau

SEQ ID NO: 850038 - RNA, 19 nt, Homo sapiens
  misc_RNA (1)...(19): siRNA sense strand
ggaagagauaauccaugaa

SEQ ID NO: 850039 - RNA, 19 nt, Homo sapiens
  misc_RNA (1)...(19): siRNA sense strand
cgaaugacaauaaauacag

SEQ ID NO: 850040 - RNA, 19 nt, Homo sapiens
  misc_RNA (1)...(19): siRNA sense strand
gaagaaggaaaaccuguug

SEQ ID NO: 850041 - RNA, 19 nt, Homo sapiens
  misc_RNA (1)...(19): siRNA sense strand
cuuccaaccucaucaagca

SEQ ID NO: 850042 - RNA, 19 nt, Homo sapiens
  misc_RNA (1)...(19): siRNA sense strand
aguugcuacucuuugauua

SEQ ID NO: 850043 - RNA, 19 nt, Homo sapiens
  misc_RNA (1)...(19): siRNA sense strand
guggaagauucuggugaaa

SEQ ID NO: 850044 - RNA, 19 nt, Homo sapiens
  misc_RNA (1)...(19): siRNA sense strand
guagugugacugcugaaau

SEQ ID NO: 850045 - RNA, 19 nt, Homo sapiens
  misc_RNA (1)...(19): siRNA sense strand
gaagcagcaggaggaauau

SEQ ID NO: 850046 - RNA, 19 nt, Homo sapiens
  misc_RNA (1)...(19): siRNA sense strand
gcaggauuaaguaaaguuc

SEQ ID NO: 850047 - RNA, 19 nt, Homo sapiens
  misc_RNA (1)...(19): siRNA sense strand
uagccaauaugaauagacu

SEQ ID NO: 850048 - RNA, 19 nt, Homo sapiens
  misc_RNA (1)...(19): siRNA sense strand
cugacaagauguggcauug

SEQ ID NO: 850049 - RNA, 19 nt, Homo sapiens
  misc_RNA (1)...(19): siRNA sense strand
uaccuuggauacaaugcaa

SEQ ID NO: 850050 - RNA, 19 nt, Homo sapiens
  misc_RNA (1)...(19): siRNA sense strand
caagguggaacuagccaau

SEQ ID NO: 850051 - RNA, 19 nt, Homo sapiens
  misc_RNA (1)...(19): siRNA sense strand
uugauggcauugaaacgaa

SEQ ID NO: 850052 - RNA, 19 nt, Homo sapiens
  misc_RNA (1)...(19): siRNA sense strand
uggcauacacaauuccaaa

SEQ ID NO: 850053 - RNA, 19 nt, Homo sapiens
  misc_RNA (1)...(19): siRNA sense strand
cugcugaaaugcugacaag

SEQ ID NO: 850054 - RNA, 19 nt, Homo sapiens
  misc_RNA (1)...(19): siRNA sense strand
cagcaggaggaauauaaga

SEQ ID NO: 850055 - RNA, 19 nt, Homo sapiens
  misc_RNA (1)...(19): siRNA sense strand
cagggcauauacagcuuau

SEQ ID NO: 850056 - RNA, 19 nt, Homo sapiens
  misc_RNA (1)...(19): siRNA sense strand
gaagaggaagagauaaucc

SEQ ID NO: 850057 - RNA, 19 nt, Homo sapiens
  misc_RNA (1)...(19): siRNA sense strand
guauugagcugguaucuga

SEQ ID NO: 850058 - RNA, 19 nt, Homo sapiens
  misc_RNA (1)...(19): siRNA sense strand
ggacaaacauggauggaau

SEQ ID NO: 850059 - RNA, 19 nt, Homo sapiens
  misc_RNA (1)...(19): siRNA sense strand
gaacuagccaauaugaaua

SEQ ID NO: 850060 - RNA, 19 nt, Homo sapiens
  misc_RNA (1)...(19): siRNA sense strand
ggaagcagcaggaggaaua

SEQ ID NO: 850061 - RNA, 19 nt, Homo sapiens
  misc_RNA (1)...(19): siRNA sense strand
agacuuaccugaaggaauu

SEQ ID NO: 850062 - RNA, 19 nt, Homo sapiens
  misc_RNA (1)...(19): siRNA sense strand
guaaguugcuacucuuuga

SEQ ID NO: 850063 - RNA, 19 nt, Homo sapiens
  misc_RNA (1)...(19): siRNA sense strand
gaagcucgaaugacaauaa

SEQ ID NO: 850064 - RNA, 19 nt, Homo sapiens
  misc_RNA (1)...(19): siRNA sense strand
gcucgaaugacaauaaaua

SEQ ID NO: 850065 - RNA, 19 nt, Homo sapiens
  misc_RNA (1)...(19): siRNA sense strand
gagauaauccaugaagaua

SEQ ID NO: 850066 - RNA, 19 nt, Homo sapiens
  misc_RNA (1)...(19): siRNA sense strand
ggaacuagccaauaugaau

SEQ ID NO: 850067 - RNA, 19 nt, Homo sapiens
  misc_RNA (1)...(19): siRNA sense strand
gaacauacucugaggaaca

SEQ ID NO: 850068 - RNA, 19 nt, Homo sapiens
  misc_RNA (1)...(19): siRNA sense strand
gcugggaucuuaguacaaa

SEQ ID NO: 850069 - RNA, 19 nt, Homo sapiens
  misc_RNA (1)...(19): siRNA sense strand
aacaagagguuauacaaga

SEQ ID NO: 850070 - RNA, 19 nt, Homo sapiens
  misc_RNA (1)...(19): siRNA sense strand
gaaacgaaugggaauugua

SEQ ID NO: 850071 - RNA, 19 nt, Homo sapiens
  misc_RNA (1)...(19): siRNA sense strand
gaagccaaauccucagugu

SEQ ID NO: 850072 - RNA, 19 nt, Homo sapiens
  misc_RNA (1)...(19): siRNA sense strand
acaagaagaggaagagaua

SEQ ID NO: 850073 - RNA, 19 nt, Homo sapiens
  misc_RNA (1)...(19): siRNA sense strand
caagcaggauuaaguaaag

SEQ ID NO: 850074 - RNA, 19 nt, Homo sapiens
  misc_RNA (1)...(19): siRNA sense strand
aaacgaaugggaauuguaa

SEQ ID NO: 850075 - RNA, 19 nt, Homo sapiens
  misc_RNA (1)...(19): siRNA sense strand
gaagagauaauccaugaag

SEQ ID NO: 850076 - RNA, 19 nt, Homo sapiens
  misc_RNA (1)...(19): siRNA sense strand
gcaggaggaauauaagaaa

SEQ ID NO: 850077 - RNA, 19 nt, Homo sapiens
  misc_RNA (1)...(19): siRNA sense strand
aauaaguaaugguggguua

SEQ ID NO: 850078 - RNA, 19 nt, Homo sapiens
  misc_RNA (1)...(19): siRNA sense strand
aggaagagauaauccauga

SEQ ID NO: 850079 - RNA, 19 nt, Homo sapiens
  misc_RNA (1)...(19): siRNA sense strand
gaacuuggacaaacaugga

SEQ ID NO: 850080 - RNA, 19 nt, Homo sapiens
  misc_RNA (1)...(19): siRNA sense strand
guaaugaacuuggacaaac

SEQ ID NO: 850081 - RNA, 19 nt, Homo sapiens
  misc_RNA (1)...(19): siRNA sense strand
gagcugguaucugagguuu

SEQ ID NO: 850082 - RNA, 19 nt, Homo sapiens
  misc_RNA (1)...(19): siRNA sense strand
ggaagauucuggugaaagc

SEQ ID NO: 850083 - RNA, 19 nt, Homo sapiens
  misc_RNA (1)...(19): siRNA sense strand
gacaagauguggcauuggu

SEQ ID NO: 850084 - RNA, 19 nt, Homo sapiens
  misc_RNA (1)...(19): siRNA sense strand
gcuuauaauuccuggagaa

SEQ ID NO: 850085 - RNA, 19 nt, Homo sapiens
  misc_RNA (1)...(19): siRNA sense strand
caucaagcaggauuaagua

SEQ ID NO: 850086 - RNA, 19 nt, Homo sapiens
  misc_RNA (1)...(19): siRNA sense strand
gcugguaucugagguuuca

SEQ ID NO: 850087 - RNA, 19 nt, Homo sapiens
  misc_RNA (1)...(19): siRNA sense strand
acaagagguuauacaagaa

SEQ ID NO: 850088 - RNA, 19 nt, Homo sapiens
  misc_RNA (1)...(19): siRNA sense strand
caagauguggcauugguaa

SEQ ID NO: 850089 - RNA, 19 nt, Homo sapiens
  misc_RNA (1)...(19): siRNA sense strand
gauguggcauugguaaguu

SEQ ID NO: 850090 - RNA, 19 nt, Homo sapiens
  misc_RNA (1)...(19): siRNA sense strand
gaaaugcugacaagaugug

SEQ ID NO: 850091 - RNA, 19 nt, Homo sapiens
  misc_RNA (1)...(19): siRNA sense strand
uaaugaacuuggacaaaca

SEQ ID NO: 850092 - RNA, 19 nt, Homo sapiens
  misc_RNA (1)...(19): siRNA sense strand
cugaaaugcugacaagaug

SEQ ID NO: 850093 - RNA, 19 nt, Homo sapiens
  misc_RNA (1)...(19): siRNA sense strand
cguguuaaaguuucuguua

SEQ ID NO: 850094 - RNA, 19 nt, Homo sapiens
  misc_RNA (1)...(19): siRNA sense strand
gccaauaugaauagacuuu

SEQ ID NO: 850095 - RNA, 19 nt, Homo sapiens
  misc_RNA (1)...(19): siRNA sense strand
uuagcuguguggacaauuu

SEQ ID NO: 850096 - RNA, 19 nt, Homo sapiens
  misc_RNA (1)...(19): siRNA sense strand
caacauuucauggauagaa

SEQ ID NO: 850097 - RNA, 19 nt, Homo sapiens
  misc_RNA (1)...(19): siRNA sense strand
gagaaaauccguaccuuug

SEQ ID NO: 850098 - RNA, 19 nt, Homo sapiens
  misc_RNA (1)...(19): siRNA sense strand
gauaaugaaugggguauug

SEQ ID NO: 850099 - RNA, 19 nt, Homo sapiens
  misc_RNA (1)...(19): siRNA sense strand
gcugaaaugcugacaagau

SEQ ID NO: 850100 - RNA, 19 nt, Homo sapiens
  misc_RNA (1)...(19): siRNA sense strand
gaauagacuuuucuuccaa

SEQ ID NO: 850101 - RNA, 19 nt, Homo sapiens
  misc_RNA (1)...(19): siRNA sense strand
gaauuguaagcgacuauga

SEQ ID NO: 850102 - RNA, 19 nt, Homo sapiens
  misc_RNA (1)...(19): siRNA sense strand
uguaagcgacuaugagaaa

SEQ ID NO: 850103 - RNA, 19 nt, Homo sapiens
  misc_RNA (1)...(19): siRNA sense strand
uagugugacugcugaaaug

SEQ ID NO: 850104 - RNA, 19 nt, Homo sapiens
  misc_RNA (1)...(19): siRNA sense strand
ugugguugcugggaucuua

SEQ ID NO: 850105 - RNA, 19 nt, Homo sapiens
  misc_RNA (1)...(19): siRNA sense strand
ucagugugaugacagaaau

SEQ ID NO: 850106 - RNA, 19 nt, Homo sapiens
  misc_RNA (1)...(19): siRNA sense strand
gaauuacaguggcauacac

SEQ ID NO: 850107 - RNA, 19 nt, Homo sapiens
  misc_RNA (1)...(19): siRNA sense strand
ucaagcaggauuaaguaaa

SEQ ID NO: 850108 - RNA, 19 nt, Homo sapiens
  misc_RNA (1)...(19): siRNA sense strand
aagauucugucacugaguu

SEQ ID NO: 850109 - RNA, 19 nt, Homo sapiens
  misc_RNA (1)...(19): siRNA sense strand
cauacucugaggaacauua

SEQ ID NO: 850110 - RNA, 19 nt, Homo sapiens
  misc_RNA (1)...(19): siRNA sense strand
aagcucgaaugacaauaaa

SEQ ID NO: 850111 - RNA, 19 nt, Homo sapiens
  misc_RNA (1)...(19): siRNA sense strand
guaaugguggguuagaaga

SEQ ID NO: 850112 - RNA, 19 nt, Homo sapiens
  misc_RNA (1)...(19): siRNA sense strand
guacaaaacguguuaaagu

SEQ ID NO: 850113 - RNA, 19 nt, Homo sapiens
  misc_RNA (1)...(19): siRNA sense strand
cauuaauccugauguucuu

SEQ ID NO: 850114 - RNA, 19 nt, Homo sapiens
  misc_RNA (1)...(19): siRNA sense strand
gaaaaccuguugaucuagu

SEQ ID NO: 850115 - RNA, 19 nt, Homo sapiens
  misc_RNA (1)...(19): siRNA sense strand
ugaaacgaaugggaauugu

SEQ ID NO: 850116 - RNA, 19 nt, Homo sapiens
  misc_RNA (1)...(19): siRNA sense strand
uggagaaucugcuuguuuu

SEQ ID NO: 850117 - RNA, 19 nt, Homo sapiens
  misc_RNA (1)...(19): siRNA sense strand
acaguggcauacacaauuc

SEQ ID NO: 850118 - RNA, 19 nt, Homo sapiens
  misc_RNA (1)...(19): siRNA sense strand
ggaauuacaguggcauaca

SEQ ID NO: 850119 - RNA, 19 nt, Homo sapiens
  misc_RNA (1)...(19): siRNA sense strand
cagcacugccuaaacaaga

SEQ ID NO: 850120 - RNA, 19 nt, Homo sapiens
  misc_RNA (1)...(19): siRNA sense strand
caaauccucagugugauga

SEQ ID NO: 850121 - RNA, 19 nt, Homo sapiens
  misc_RNA (1)...(19): siRNA sense strand
gguaaguugcuacucuuug

SEQ ID NO: 850122 - RNA, 19 nt, Homo sapiens
  misc_RNA (1)...(19): siRNA sense strand
aguggaagauucuggugaa

SEQ ID NO: 850123 - RNA, 19 nt, Homo sapiens
  misc_RNA (1)...(19): siRNA sense strand
uacaguggcauacacaauu

SEQ ID NO: 850124 - RNA, 19 nt, Homo sapiens
  misc_RNA (1)...(19): siRNA sense strand
guuccagacuuaccugaag

SEQ ID NO: 850125 - RNA, 19 nt, Homo sapiens
  misc_RNA (1)...(19): siRNA sense strand
caagaagaggaagagauaa

SEQ ID NO: 850126 - RNA, 19 nt, Homo sapiens
  misc_RNA (1)...(19): siRNA sense strand
agccaaauccucaguguga

SEQ ID NO: 850127 - RNA, 19 nt, Homo sapiens
  misc_RNA (1)...(19): siRNA sense strand
aggaaaaccuguugaucua

SEQ ID NO: 850128 - RNA, 19 nt, Homo sapiens
  misc_RNA (1)...(19): siRNA sense strand
guggaacuagccaauauga

SEQ ID NO: 850129 - RNA, 19 nt, Homo sapiens
  misc_RNA (1)...(19): siRNA sense strand
gguuauacaagaagaggaa

SEQ ID NO: 850130 - RNA, 19 nt, Homo sapiens
  misc_RNA (1)...(19): siRNA sense strand
cuauguccaugaagccaaa

SEQ ID NO: 850131 - RNA, 19 nt, Homo sapiens
  misc_RNA (1)...(19): siRNA sense strand
aagagauaauccaugaaga

SEQ ID NO: 850132 - RNA, 19 nt, Homo sapiens
  misc_RNA (1)...(19): siRNA sense strand
aaacaagagguuauacaag

SEQ ID NO: 850133 - RNA, 19 nt, Homo sapiens
  misc_RNA (1)...(19): siRNA sense strand
agguggaacuagccaauau

SEQ ID NO: 850134 - RNA, 19 nt, Homo sapiens
  misc_RNA (1)...(19): siRNA sense strand
agagauaauccaugaagau

SEQ ID NO: 850135 - RNA, 19 nt, Homo sapiens
  misc_RNA (1)...(19): siRNA sense strand
ggaagagauaauccaugaa

SEQ ID NO: 850136 - RNA, 19 nt, Homo sapiens
  misc_RNA (1)...(19): siRNA sense strand
cgaaugacaauaaauacag

SEQ ID NO: 850137 - RNA, 19 nt, Homo sapiens
  misc_RNA (1)...(19): siRNA sense strand
gaagaaggaaaaccuguug

SEQ ID NO: 850138 - RNA, 19 nt, Homo sapiens
  misc_RNA (1)...(19): siRNA sense strand
cuuccaaccucaucaagca

SEQ ID NO: 850139 - RNA, 19 nt, Homo sapiens
  misc_RNA (1)...(19): siRNA sense strand
uagccaauaugaauagacu

SEQ ID NO: 850140 - RNA, 19 nt, Homo sapiens
  misc_RNA (1)...(19): siRNA sense strand
guggaagauucuggugaaa

SEQ ID NO: 850141 - RNA, 19 nt, Homo sapiens
  misc_RNA (1)...(19): siRNA sense strand
guagugugacugcugaaau

SEQ ID NO: 850142 - RNA, 19 nt, Homo sapiens
  misc_RNA (1)...(19): siRNA sense strand
aguugcuacucuuugauua

SEQ ID NO: 850143 - RNA, 19 nt, Homo sapiens
  misc_RNA (1)...(19): siRNA sense strand
gaagcagcaggaggaauau

SEQ ID NO: 850144 - RNA, 19 nt, Homo sapiens
  misc_RNA (1)...(19): siRNA sense strand
cugacaagauguggcauug

SEQ ID NO: 850145 - RNA, 19 nt, Homo sapiens
  misc_RNA (1)...(19): siRNA sense strand
gcaggauuaaguaaaguuc

SEQ ID NO: 850146 - RNA, 19 nt, Homo sapiens
  misc_RNA (1)...(19): siRNA sense strand
uaccuuggauacaaugcaa

SEQ ID NO: 850147 - RNA, 19 nt, Homo sapiens
  misc_RNA (1)...(19): siRNA sense strand
cagggcauauacagcuuau

SEQ ID NO: 850148 - RNA, 19 nt, Homo sapiens
  misc_RNA (1)...(19): siRNA sense strand
uggcauacacaauuccaaa

SEQ ID NO: 850149 - RNA, 19 nt, Homo sapiens
  misc_RNA (1)...(19): siRNA sense strand
cagcaggaggaauauaaga

SEQ ID NO: 850150 - RNA, 19 nt, Homo sapiens
  misc_RNA (1)...(19): siRNA sense strand
caagguggaacuagccaau

SEQ ID NO: 850151 - RNA, 19 nt, Homo sapiens
  misc_RNA (1)...(19): siRNA sense strand
cugcugaaaugcugacaag

SEQ ID NO: 850152 - RNA, 19 nt, Homo sapiens
  misc_RNA (1)...(19): siRNA sense strand
ccaaauccucagugugaug

SEQ ID NO: 850153 - RNA, 19 nt, Homo sapiens
  misc_RNA (1)...(19): siRNA sense strand
gaagaggaagagauaaucc

SEQ ID NO: 850154 - RNA, 19 nt, Homo sapiens
  misc_RNA (1)...(19): siRNA sense strand
aagaagaggaagagauaau

SEQ ID NO: 850155 - RNA, 19 nt, Homo sapiens
  misc_RNA (1)...(19): siRNA sense strand
uugcuacucuuugauuaug

SEQ ID NO: 850156 - RNA, 19 nt, Homo sapiens
  misc_RNA (1)...(19): siRNA sense strand
cuaaacaagagguuauaca

SEQ ID NO: 850157 - RNA, 19 nt, Homo sapiens
  misc_RNA (1)...(19): siRNA sense strand
gaaaggaaguggagcaauu

SEQ ID NO: 850158 - RNA, 19 nt, Homo sapiens
  misc_RNA (1)...(19): siRNA sense strand
ggaaugagcuucuugaaac

SEQ ID NO: 850159 - RNA, 19 nt, Homo sapiens
  misc_RNA (1)...(19): siRNA sense strand
gauuagaucuucucaauuc

SEQ ID NO: 850160 - RNA, 19 nt, Homo sapiens
  misc_RNA (1)...(19): siRNA sense strand
ggacuacagugaccaggaa

SEQ ID NO: 850161 - RNA, 19 nt, Homo sapiens
  misc_RNA (1)...(19): siRNA sense strand
gaccacauuugaaguauau

SEQ ID NO: 850162 - RNA, 19 nt, Homo sapiens
  misc_RNA (1)...(19): siRNA sense strand
ugaaguauauguugaagug

SEQ ID NO: 850163 - RNA, 19 nt, Homo sapiens
  misc_RNA (1)...(19): siRNA sense strand
guggacagccucacaguua

SEQ ID NO: 850164 - RNA, 19 nt, Homo sapiens
  misc_RNA (1)...(19): siRNA sense strand
gaagagcagcugccaaaga

SEQ ID NO: 850165 - RNA, 19 nt, Homo sapiens
  misc_RNA (1)...(19): siRNA sense strand
caaacgacgugaucucuuc

SEQ ID NO: 850166 - RNA, 19 nt, Homo sapiens
  misc_RNA (1)...(19): siRNA sense strand
cagcauaccugagaauaga

SEQ ID NO: 850167 - RNA, 19 nt, Homo sapiens
  misc_RNA (1)...(19): siRNA sense strand
guuuauugauggucgauua

SEQ ID NO: 850168 - RNA, 19 nt, Homo sapiens
  misc_RNA (1)...(19): siRNA sense strand
ggaaguggagcaauucuga

SEQ ID NO: 850169 - RNA, 19 nt, Homo sapiens
  misc_RNA (1)...(19): siRNA sense strand
gagcugcuucuguaucuua

SEQ ID NO: 850170 - RNA, 19 nt, Homo sapiens
  misc_RNA (1)...(19): siRNA sense strand
cagagaacuucccagcaua

SEQ ID NO: 850171 - RNA, 19 nt, Homo sapiens
  misc_RNA (1)...(19): siRNA sense strand
uuaacauccuggcagauua

SEQ ID NO: 850172 - RNA, 19 nt, Homo sapiens
  misc_RNA (1)...(19): siRNA sense strand
ccagagaacuucccagcau

SEQ ID NO: 850173 - RNA, 19 nt, Homo sapiens
  misc_RNA (1)...(19): siRNA sense strand
ucacugacauugacagcaa

SEQ ID NO: 850174 - RNA, 19 nt, Homo sapiens
  misc_RNA (1)...(19): siRNA sense strand
cggaggagccgaucacuuu

SEQ ID NO: 850175 - RNA, 19 nt, Homo sapiens
  misc_RNA (1)...(19): siRNA sense strand
ccucauaggaauccauuua

SEQ ID NO: 850176 - RNA, 19 nt, Homo sapiens
  misc_RNA (1)...(19): siRNA sense strand
ggagaaagucagaaacaug

SEQ ID NO: 850177 - RNA, 19 nt, Homo sapiens
  misc_RNA (1)...(19): siRNA sense strand
gugacaaacuguaccauca

SEQ ID NO: 850178 - RNA, 19 nt, Homo sapiens
  misc_RNA (1)...(19): siRNA sense strand
ucgauuagaucuucucaau

SEQ ID NO: 850179 - RNA, 19 nt, Homo sapiens
  misc_RNA (1)...(19): siRNA sense strand
cagaagagcagcugccaaa

SEQ ID NO: 850180 - RNA, 19 nt, Homo sapiens
  misc_RNA (1)...(19): siRNA sense strand
gaaacauggcccuggauga

SEQ ID NO: 850181 - RNA, 19 nt, Homo sapiens
  misc_RNA (1)...(19): siRNA sense strand
gauggucgauuagaucuuc

SEQ ID NO: 850182 - RNA, 19 nt, Homo sapiens
  misc_RNA (1)...(19): siRNA sense strand
gcuccaggaucaagcagaa

SEQ ID NO: 850183 - RNA, 19 nt, Homo sapiens
  misc_RNA (1)...(19): siRNA sense strand
gcaaauccggccaugaaga

SEQ ID NO: 850184 - RNA, 19 nt, Homo sapiens
  misc_RNA (1)...(19): siRNA sense strand
gcucuccacuguccggaaa

SEQ ID NO: 850185 - RNA, 19 nt, Homo sapiens
  misc_RNA (1)...(19): siRNA sense strand
aaacagagauucggguucu

SEQ ID NO: 850186 - RNA, 19 nt, Homo sapiens
  misc_RNA (1)...(19): siRNA sense strand
gaagguuucagugauguuu

SEQ ID NO: 850187 - RNA, 19 nt, Homo sapiens
  misc_RNA (1)...(19): siRNA sense strand
gccaaucacaguccacuuu

SEQ ID NO: 850188 - RNA, 19 nt, Homo sapiens
  misc_RNA (1)...(19): siRNA sense strand
gagaccacauuugaaguau

SEQ ID NO: 850189 - RNA, 19 nt, Homo sapiens
  misc_RNA (1)...(19): siRNA sense strand
gaacgccggauacucauca

SEQ ID NO: 850190 - RNA, 19 nt, Homo sapiens
  misc_RNA (1)...(19): siRNA sense strand
gaaugagcuucuugaaacu

SEQ ID NO: 850191 - RNA, 19 nt, Homo sapiens
  misc_RNA (1)...(19): siRNA sense strand
gcagcaaacucagcacucu

SEQ ID NO: 850192 - RNA, 19 nt, Homo sapiens
  misc_RNA (1)...(19): siRNA sense strand
ggcccaggcugcuuucuuc

SEQ ID NO: 850193 - RNA, 19 nt, Homo sapiens
  misc_RNA (1)...(19): siRNA sense strand
gaaacucugcacaaacuuc

SEQ ID NO: 850194 - RNA, 19 nt, Homo sapiens
  misc_RNA (1)...(19): siRNA sense strand
agaaaagcauuacccauuu

SEQ ID NO: 850195 - RNA, 19 nt, Homo sapiens
  misc_RNA (1)...(19): siRNA sense strand
aagcaaauccggccaugaa

SEQ ID NO: 850196 - RNA, 19 nt, Homo sapiens
  misc_RNA (1)...(19): siRNA sense strand
agaccacauuugaaguaua

SEQ ID NO: 850197 - RNA, 19 nt, Homo sapiens
  misc_RNA (1)...(19): siRNA sense strand
ccucacaguuagccaaguu

SEQ ID NO: 850198 - RNA, 19 nt, Homo sapiens
  misc_RNA (1)...(19): siRNA sense strand
guaaagaccaaagcaaauc

SEQ ID NO: 850199 - RNA, 19 nt, Homo sapiens
  misc_RNA (1)...(19): siRNA sense strand
ugaauacuguaaagaccaa

SEQ ID NO: 850200 - RNA, 19 nt, Homo sapiens
  misc_RNA (1)...(19): siRNA sense strand
gccggauacucaucauuug

SEQ ID NO: 850201 - RNA, 19 nt, Homo sapiens
  misc_RNA (1)...(19): siRNA sense strand
ggcgaagguuucagugaug

SEQ ID NO: 850202 - RNA, 19 nt, Homo sapiens
  misc_RNA (1)...(19): siRNA sense strand
gaaacgcucugaaaaucga

SEQ ID NO: 850203 - RNA, 19 nt, Homo sapiens
  misc_RNA (1)...(19): siRNA sense strand
ccaggaaguucuacagacu

SEQ ID NO: 850204 - RNA, 19 nt, Homo sapiens
  misc_RNA (1)...(19): siRNA sense strand
gagcaacaucgcaguggaa

SEQ ID NO: 850205 - RNA, 19 nt, Homo sapiens
  misc_RNA (1)...(19): siRNA sense strand
gaauccagagaccacauuu

SEQ ID NO: 850206 - RNA, 19 nt, Homo sapiens
  misc_RNA (1)...(19): siRNA sense strand
gaaguggagcaauucugaa

SEQ ID NO: 850207 - RNA, 19 nt, Homo sapiens
  misc_RNA (1)...(19): siRNA sense strand
ggacagguggcacucuuuc

SEQ ID NO: 850208 - RNA, 19 nt, Homo sapiens
  misc_RNA (1)...(19): siRNA sense strand
ccagagaccacauuugaag

SEQ ID NO: 850209 - RNA, 19 nt, Homo sapiens
  misc_RNA (1)...(19): siRNA sense strand
agagaccacauuugaagua

SEQ ID NO: 850210 - RNA, 19 nt, Homo sapiens
  misc_RNA (1)...(19): siRNA sense strand
gacauugacagcaaacaga

SEQ ID NO: 850211 - RNA, 19 nt, Homo sapiens
  misc_RNA (1)...(19): siRNA sense strand
cgcaaaagaucaugcaaaa

SEQ ID NO: 850212 - RNA, 19 nt, Homo sapiens
  misc_RNA (1)...(19): siRNA sense strand
ucauaggaauccauuuaag

SEQ ID NO: 850213 - RNA, 19 nt, Homo sapiens
  misc_RNA (1)...(19): siRNA sense strand
cggcgaagguuucagugau

SEQ ID NO: 850214 - RNA, 19 nt, Homo sapiens
  misc_RNA (1)...(19): siRNA sense strand
ucagcgugcauucuuauuu

SEQ ID NO: 850215 - RNA, 19 nt, Homo sapiens
  misc_RNA (1)...(19): siRNA sense strand
uaauggagaaagucagaaa

SEQ ID NO: 850216 - RNA, 19 nt, Homo sapiens
  misc_RNA (1)...(19): siRNA sense strand
gcauaccugagaauagaaa

SEQ ID NO: 850217 - RNA, 19 nt, Homo sapiens
  misc_RNA (1)...(19): siRNA sense strand
ucccaugcccuaccucaua

SEQ ID NO: 850218 - RNA, 19 nt, Homo sapiens
  misc_RNA (1)...(19): siRNA sense strand
caggacagguggcacucuu

SEQ ID NO: 850219 - RNA, 19 nt, Homo sapiens
  misc_RNA (1)...(19): siRNA sense strand
gcgaagguuucagugaugu

SEQ ID NO: 850220 - RNA, 19 nt, Homo sapiens
  misc_RNA (1)...(19): siRNA sense strand
ggccagagcguuccucaag

SEQ ID NO: 850221 - RNA, 19 nt, Homo sapiens
  misc_RNA (1)...(19): siRNA sense strand
ggacaccaacacccuggaa

SEQ ID NO: 850222 - RNA, 19 nt, Homo sapiens
  misc_RNA (1)...(19): siRNA sense strand
aaacauggcccuggaugau

SEQ ID NO: 850223 - RNA, 19 nt, Homo sapiens
  misc_RNA (1)...(19): siRNA sense strand
cagcgugcauucuuauuuu

SEQ ID NO: 850224 - RNA, 19 nt, Homo sapiens
  misc_RNA (1)...(19): siRNA sense strand
cgccgcaucugcuggacua

SEQ ID NO: 850225 - RNA, 19 nt, Homo sapiens
  misc_RNA (1)...(19): siRNA sense strand
gguucgagguauuuuauaa

SEQ ID NO: 850226 - RNA, 19 nt, Homo sapiens
  misc_RNA (1)...(19): siRNA sense strand
guccacauguuguuaagag

SEQ ID NO: 850227 - RNA, 19 nt, Homo sapiens
  misc_RNA (1)...(19): siRNA sense strand
aagagcagcugccaaagac

SEQ ID NO: 850228 - RNA, 19 nt, Homo sapiens
  misc_RNA (1)...(19): siRNA sense strand
aaaucaacaugggcgagua

SEQ ID NO: 850229 - RNA, 19 nt, Homo sapiens
  misc_RNA (1)...(19): siRNA sense strand
gaccaggaaguucuacaga

SEQ ID NO: 850230 - RNA, 19 nt, Homo sapiens
  misc_RNA (1)...(19): siRNA sense strand
cuaccgaaacgcucugaaa

SEQ ID NO: 850231 - RNA, 19 nt, Homo sapiens
  misc_RNA (1)...(19): siRNA sense strand
ucaaggcccaggcugcuuu

SEQ ID NO: 850232 - RNA, 19 nt, Homo sapiens
  misc_RNA (1)...(19): siRNA sense strand
cauaggaauccauuuaagu

SEQ ID NO: 850233 - RNA, 19 nt, Homo sapiens
  misc_RNA (1)...(19): siRNA sense strand
ucuugaaacucugcacaaa

SEQ ID NO: 850234 - RNA, 19 nt, Homo sapiens
  misc_RNA (1)...(19): siRNA sense strand
uggaaugagcuucuugaaa

SEQ ID NO: 850235 - RNA, 19 nt, Homo sapiens
  misc_RNA (1)...(19): siRNA sense strand
uugaaacucugcacaaacu

SEQ ID NO: 850236 - RNA, 19 nt, Homo sapiens
  misc_RNA (1)...(19): siRNA sense strand
cagaaaagcauuacccauu

SEQ ID NO: 850237 - RNA, 19 nt, Homo sapiens
  misc_RNA (1)...(19): siRNA sense strand
cgccggauacucaucauuu

SEQ ID NO: 850238 - RNA, 19 nt, Homo sapiens
  misc_RNA (1)...(19): siRNA sense strand
caucucagcgugcauucuu

SEQ ID NO: 850239 - RNA, 19 nt, Homo sapiens
  misc_RNA (1)...(19): siRNA sense strand
ggucugcggcgaugcucua

SEQ ID NO: 850240 - RNA, 19 nt, Homo sapiens
  misc_RNA (1)...(19): siRNA sense strand
gcuguacgaacgccggaua

SEQ ID NO: 850241 - RNA, 19 nt, Homo sapiens
  misc_RNA (1)...(19): siRNA sense strand
uaagcuaucuccccugguu

SEQ ID NO: 850242 - RNA, 19 nt, Homo sapiens
  misc_RNA (1)...(19): siRNA sense strand
ggaccucuucaucacauug

SEQ ID NO: 850243 - RNA, 19 nt, Homo sapiens
  misc_RNA (1)...(19): siRNA sense strand
ggcaauucccggaggacua

SEQ ID NO: 850244 - RNA, 19 nt, Homo sapiens
  misc_RNA (1)...(19): siRNA sense strand
guuguuaagagaccaaaga

SEQ ID NO: 850245 - RNA, 19 nt, Homo sapiens
  misc_RNA (1)...(19): siRNA sense strand
ccaaucacaguccacuuug

SEQ ID NO: 850246 - RNA, 19 nt, Homo sapiens
  misc_RNA (1)...(19): siRNA sense strand
gcgaguacgcuggcaguga

SEQ ID NO: 850247 - RNA, 19 nt, Homo sapiens
  misc_RNA (1)...(19): siRNA sense strand
ucaauuccggcgaagguuu

SEQ ID NO: 850248 - RNA, 19 nt, Homo sapiens
  misc_RNA (1)...(19): siRNA sense strand
aagagcugcuucuguaucu

SEQ ID NO: 850249 - RNA, 19 nt, Homo sapiens
  misc_RNA (1)...(19): siRNA sense strand
ccaccucguccacauguug

SEQ ID NO: 850250 - RNA, 19 nt, Homo sapiens
  misc_RNA (1)...(19): siRNA sense strand
ggaaaggaaguggagcaau

SEQ ID NO: 850251 - RNA, 19 nt, Homo sapiens
  misc_RNA (1)...(19): siRNA sense strand
uacgaacgccggauacuca

SEQ ID NO: 850252 - RNA, 19 nt, Homo sapiens
  misc_RNA (1)...(19): siRNA sense strand
caaucacaguccacuuugg

SEQ ID NO: 850253 - RNA, 19 nt, Homo sapiens
  misc_RNA (1)...(19): siRNA sense strand
uguaaagaccaaagcaaau

SEQ ID NO: 850254 - RNA, 19 nt, Homo sapiens
  misc_RNA (1)...(19): siRNA sense strand
ugaagaggaaaucaacaug

SEQ ID NO: 850255 - RNA, 19 nt, Homo sapiens
  misc_RNA (1)...(19): siRNA sense strand
cgauuagaucuucucaauu

SEQ ID NO: 850256 - RNA, 19 nt, Homo sapiens
  misc_RNA (1)...(19): siRNA sense strand
gcaauucccggaggacuac

SEQ ID NO: 850257 - RNA, 19 nt, Homo sapiens
  misc_RNA (1)...(19): siRNA sense strand
gaagagaaacgccgaaaga

SEQ ID NO: 850258 - RNA, 19 nt, Homo sapiens
  misc_RNA (1)...(19): siRNA sense strand
gcacugacccuuuccagaa

SEQ ID NO: 850259 - RNA, 19 nt, Homo sapiens
  misc_RNA (1)...(19): siRNA sense strand
cgaggauugugcacuauua

SEQ ID NO: 850260 - RNA, 19 nt, Homo sapiens
  misc_RNA (1)...(19): siRNA sense strand
gagaaacgccgaaagaaag

SEQ ID NO: 850261 - RNA, 19 nt, Homo sapiens
  misc_RNA (1)...(19): siRNA sense strand
gagcagcuguuggcacuga

SEQ ID NO: 850262 - RNA, 19 nt, Homo sapiens
  misc_RNA (1)...(19): siRNA sense strand
gcucaccgcugcugaugug

SEQ ID NO: 850263 - RNA, 19 nt, Homo sapiens
  misc_RNA (1)...(19): siRNA sense strand
ugagaaagacuccaacuuc

SEQ ID NO: 850264 - RNA, 19 nt, Homo sapiens
  misc_RNA (1)...(19): siRNA sense strand
gccuggagaucuacaagaa

SEQ ID NO: 850265 - RNA, 19 nt, Homo sapiens
  misc_RNA (1)...(19): siRNA sense strand
gaucccagucugaguuaua

SEQ ID NO: 850266 - RNA, 19 nt, Homo sapiens
  misc_RNA (1)...(19): siRNA sense strand
gaagauguuugaggugaag

SEQ ID NO: 850267 - RNA, 19 nt, Homo sapiens
  misc_RNA (1)...(19): siRNA sense strand
gauugugcacuauuacuuu

SEQ ID NO: 850268 - RNA, 19 nt, Homo sapiens
  misc_RNA (1)...(19): siRNA sense strand
agagaaacgccgaaagaaa

SEQ ID NO: 850269 - RNA, 19 nt, Homo sapiens
  misc_RNA (1)...(19): siRNA sense strand
caacuuccagaacccauuu

SEQ ID NO: 850270 - RNA, 19 nt, Homo sapiens
  misc_RNA (1)...(19): siRNA sense strand
cuggagaucuacaagaaga

SEQ ID NO: 850271 - RNA, 19 nt, Homo sapiens
  misc_RNA (1)...(19): siRNA sense strand
uggcacagcugaacgacau

SEQ ID NO: 850272 - RNA, 19 nt, Homo sapiens
  misc_RNA (1)...(19): siRNA sense strand
ccugagagaagaagagaaa

SEQ ID NO: 850273 - RNA, 19 nt, Homo sapiens
  misc_RNA (1)...(19): siRNA sense strand
ggauugugcacuauuacuu

SEQ ID NO: 850274 - RNA, 19 nt, Homo sapiens
  misc_RNA (1)...(19): siRNA sense strand
agaaggcccugagagaaga

SEQ ID NO: 850275 - RNA, 19 nt, Homo sapiens
  misc_RNA (1)...(19): siRNA sense strand
ccagaaggcccugagagaa

SEQ ID NO: 850276 - RNA, 19 nt, Homo sapiens
  misc_RNA (1)...(19): siRNA sense strand
caacuggaaccuccucauc

SEQ ID NO: 850277 - RNA, 19 nt, Homo sapiens
  misc_RNA (1)...(19): siRNA sense strand
acccaagccuggagaucua

SEQ ID NO: 850278 - RNA, 19 nt, Homo sapiens
  misc_RNA (1)...(19): siRNA sense strand
ggaaggagauccgaaaagg

SEQ ID NO: 850279 - RNA, 19 nt, Homo sapiens
  misc_RNA (1)...(19): siRNA sense strand
agaagauguuugaggugaa

SEQ ID NO: 850280 - RNA, 19 nt, Homo sapiens
  misc_RNA (1)...(19): siRNA sense strand
ucccgaggauugugcacua

SEQ ID NO: 850281 - RNA, 19 nt, Homo sapiens
  misc_RNA (1)...(19): siRNA sense strand
cagaaggcccugagagaag

SEQ ID NO: 850282 - RNA, 19 nt, Homo sapiens
  misc_RNA (1)...(19): siRNA sense strand
ucaaggggcucuuuaaggu

SEQ ID NO: 850283 - RNA, 19 nt, Homo sapiens
  misc_RNA (1)...(19): siRNA sense strand
acuauuacuuugaccacaa

SEQ ID NO: 850284 - RNA, 19 nt, Homo sapiens
  misc_RNA (1)...(19): siRNA sense strand
ucuacaagaagauguuuga

SEQ ID NO: 850285 - RNA, 19 nt, Homo sapiens
  misc_RNA (1)...(19): siRNA sense strand
gcugaugugcucccagaug

SEQ ID NO: 850286 - RNA, 19 nt, Homo sapiens
  misc_RNA (1)...(19): siRNA sense strand
ucccagcacugacccuuuc

SEQ ID NO: 850287 - RNA, 19 nt, Homo sapiens
  misc_RNA (1)...(19): siRNA sense strand
gugagaaagacuccaacuu

SEQ ID NO: 850288 - RNA, 19 nt, Homo sapiens
  misc_RNA (1)...(19): siRNA sense strand
agaaacgccgaaagaaaga

SEQ ID NO: 850289 - RNA, 19 nt, Homo sapiens
  misc_RNA (1)...(19): siRNA sense strand
gccgaaagaaagaggagaa

SEQ ID NO: 850290 - RNA, 19 nt, Homo sapiens
  misc_RNA (1)...(19): siRNA sense strand
gaaccuggcacagcugaac

SEQ ID NO: 850291 - RNA, 19 nt, Homo sapiens
  misc_RNA (1)...(19): siRNA sense strand
aagagaaacgccgaaagaa

SEQ ID NO: 850292 - RNA, 19 nt, Homo sapiens
  misc_RNA (1)...(19): siRNA sense strand
gacccaagccuggagaucu

SEQ ID NO: 850293 - RNA, 19 nt, Homo sapiens
  misc_RNA (1)...(19): siRNA sense strand
cgaaaaggcccaaggaucu

SEQ ID NO: 850294 - RNA, 19 nt, Homo sapiens
  misc_RNA (1)...(19): siRNA sense strand
caaaagagcugucucaaga

SEQ ID NO: 850295 - RNA, 19 nt, Homo sapiens
  misc_RNA (1)...(19): siRNA sense strand
aaagagcugucucaagaua

SEQ ID NO: 850296 - RNA, 19 nt, Homo sapiens
  misc_RNA (1)...(19): siRNA sense strand
guucagaguuguccagaaa

SEQ ID NO: 850297 - RNA, 19 nt, Homo sapiens
  misc_RNA (1)...(19): siRNA sense strand
ucagaguuguccagaaaua

SEQ ID NO: 850298 - RNA, 19 nt, Homo sapiens
  misc_RNA (1)...(19): siRNA sense strand
gaagggcgauggguugaug

SEQ ID NO: 850299 - RNA, 19 nt, Homo sapiens
  misc_RNA (1)...(19): siRNA sense strand
ggauuaugcuggugugugu

SEQ ID NO: 850300 - RNA, 19 nt, Homo sapiens
  misc_RNA (1)...(19): siRNA sense strand
agaaauagcucaguguaag

SEQ ID NO: 850301 - RNA, 19 nt, Homo sapiens
  misc_RNA (1)...(19): siRNA sense strand
cagcaugacuaccugaaau

SEQ ID NO: 850302 - RNA, 19 nt, Homo sapiens
  misc_RNA (1)...(19): siRNA sense strand
gcccacagcacaggaaaua

SEQ ID NO: 850303 - RNA, 19 nt, Homo sapiens
  misc_RNA (1)...(19): siRNA sense strand
uaccugaaauucuuaguca

SEQ ID NO: 850304 - RNA, 19 nt, Homo sapiens
  misc_RNA (1)...(19): siRNA sense strand
ccagaaauagcucagugua

SEQ ID NO: 850305 - RNA, 19 nt, Homo sapiens
  misc_RNA (1)...(19): siRNA sense strand
cagaaauagcucaguguaa

SEQ ID NO: 850306 - RNA, 19 nt, Homo sapiens
  misc_RNA (1)...(19): siRNA sense strand
ucucuguucuguuccauga

SEQ ID NO: 850307 - RNA, 19 nt, Homo sapiens
  misc_RNA (1)...(19): siRNA sense strand
gaacaauuuuccaaagauc

SEQ ID NO: 850308 - RNA, 19 nt, Homo sapiens
  misc_RNA (1)...(19): siRNA sense strand
ccacagcacaggaaauagu

SEQ ID NO: 850309 - RNA, 19 nt, Homo sapiens
  misc_RNA (1)...(19): siRNA sense strand
ugacuaccugaaauucuua

SEQ ID NO: 850310 - RNA, 19 nt, Homo sapiens
  misc_RNA (1)...(19): siRNA sense strand
gaaauagcucaguguaagg

SEQ ID NO: 850311 - RNA, 19 nt, Homo sapiens
  misc_RNA (1)...(19): siRNA sense strand
gagaagggcgauggguuga

SEQ ID NO: 850312 - RNA, 19 nt, Homo sapiens
  misc_RNA (1)...(19): siRNA sense strand
guccacugguucagaguug

SEQ ID NO: 850313 - RNA, 19 nt, Homo sapiens
  misc_RNA (1)...(19): siRNA sense strand
ucaguguaaggaacaauuu

SEQ ID NO: 850314 - RNA, 19 nt, Homo sapiens
  misc_RNA (1)...(19): siRNA sense strand
gcaugacuaccugaaauuc

SEQ ID NO: 850315 - RNA, 19 nt, Homo sapiens
  misc_RNA (1)...(19): siRNA sense strand
aaauaguccugcccuucga

SEQ ID NO: 850316 - RNA, 19 nt, Homo sapiens
  misc_RNA (1)...(19): siRNA sense strand
augacuaccugaaauucuu

SEQ ID NO: 850317 - RNA, 19 nt, Homo sapiens
  misc_RNA (1)...(19): siRNA sense strand
gguucagaguuguccagaa

SEQ ID NO: 850318 - RNA, 19 nt, Homo sapiens
  misc_RNA (1)...(19): siRNA sense strand
gggagcguguccagagaag

SEQ ID NO: 850319 - RNA, 19 nt, Homo sapiens
  misc_RNA (1)...(19): siRNA sense strand
gaucaaaagagcugucuca

SEQ ID NO: 850320 - RNA, 19 nt, Homo sapiens
  misc_RNA (1)...(19): siRNA sense strand
acagguguauacagcacaa

SEQ ID NO: 850321 - RNA, 19 nt, Homo sapiens
  misc_RNA (1)...(19): siRNA sense strand
aaguggacguccugugguu

SEQ ID NO: 850322 - RNA, 19 nt, Homo sapiens
  misc_RNA (1)...(19): siRNA sense strand
ggaagaagaugaugauuac

SEQ ID NO: 850323 - RNA, 19 nt, Homo sapiens
  misc_RNA (1)...(19): siRNA sense strand
gcccuucuauugaaauuua

SEQ ID NO: 850324 - RNA, 19 nt, Homo sapiens
  misc_RNA (1)...(19): siRNA sense strand
guagucagcucugccguua

SEQ ID NO: 850325 - RNA, 19 nt, Homo sapiens
  misc_RNA (1)...(19): siRNA sense strand
guacuggccugcuuguaaa

SEQ ID NO: 850326 - RNA, 19 nt, Homo sapiens
  misc_RNA (1)...(19): siRNA sense strand
gauggaaugucccuucuau

SEQ ID NO: 850327 - RNA, 19 nt, Homo sapiens
  misc_RNA (1)...(19): siRNA sense strand
cgacaugccuugaaaugga

SEQ ID NO: 850328 - RNA, 19 nt, Homo sapiens
  misc_RNA (1)...(19): siRNA sense strand
gaaugucccuucuaucauc

SEQ ID NO: 850329 - RNA, 19 nt, Homo sapiens
  misc_RNA (1)...(19): siRNA sense strand
ugacgaagaccucaacuuu

SEQ ID NO: 850330 - RNA, 19 nt, Homo sapiens
  misc_RNA (1)...(19): siRNA sense strand
uuaaacagguugcaauuuc

SEQ ID NO: 850331 - RNA, 19 nt, Homo sapiens
  misc_RNA (1)...(19): siRNA sense strand
caacagcagcagaauagua

SEQ ID NO: 850332 - RNA, 19 nt, Homo sapiens
  misc_RNA (1)...(19): siRNA sense strand
agauagugguguucauuua

SEQ ID NO: 850333 - RNA, 19 nt, Homo sapiens
  misc_RNA (1)...(19): siRNA sense strand
gcaaguagaaaugcagaua

SEQ ID NO: 850334 - RNA, 19 nt, Homo sapiens
  misc_RNA (1)...(19): siRNA sense strand
gagaagaggaggaagaaga

SEQ ID NO: 850335 - RNA, 19 nt, Homo sapiens
  misc_RNA (1)...(19): siRNA sense strand
gugguaaguucaguuguua

SEQ ID NO: 850336 - RNA, 19 nt, Homo sapiens
  misc_RNA (1)...(19): siRNA sense strand
gaaauggauucgaccucaa

SEQ ID NO: 850337 - RNA, 19 nt, Homo sapiens
  misc_RNA (1)...(19): siRNA sense strand
aaacagacacuuccaguug

SEQ ID NO: 850338 - RNA, 19 nt, Homo sapiens
  misc_RNA (1)...(19): siRNA sense strand
guaaauaugaugcaaagug

SEQ ID NO: 850339 - RNA, 19 nt, Homo sapiens
  misc_RNA (1)...(19): siRNA sense strand
gcagaguaguuggguauau

SEQ ID NO: 850340 - RNA, 19 nt, Homo sapiens
  misc_RNA (1)...(19): siRNA sense strand
gcaggagaaucccuuaucu

SEQ ID NO: 850341 - RNA, 19 nt, Homo sapiens
  misc_RNA (1)...(19): siRNA sense strand
cuuaacagcuuagaagaaa

SEQ ID NO: 850342 - RNA, 19 nt, Homo sapiens
  misc_RNA (1)...(19): siRNA sense strand
gauagugguguucauuuaa

SEQ ID NO: 850343 - RNA, 19 nt, Homo sapiens
  misc_RNA (1)...(19): siRNA sense strand
gaaacagacacuuccaguu

SEQ ID NO: 850344 - RNA, 19 nt, Homo sapiens
  misc_RNA (1)...(19): siRNA sense strand
uaaacagguugcaauuuca

SEQ ID NO: 850345 - RNA, 19 nt, Homo sapiens
  misc_RNA (1)...(19): siRNA sense strand
gauugucccuucacucaug

SEQ ID NO: 850346 - RNA, 19 nt, Homo sapiens
  misc_RNA (1)...(19): siRNA sense strand
gaacucgaacuucucaaga

SEQ ID NO: 850347 - RNA, 19 nt, Homo sapiens
  misc_RNA (1)...(19): siRNA sense strand
acgaagaccucaacuuugu

SEQ ID NO: 850348 - RNA, 19 nt, Homo sapiens
  misc_RNA (1)...(19): siRNA sense strand
gaaaguugccugugguaag

SEQ ID NO: 850349 - RNA, 19 nt, Homo sapiens
  misc_RNA (1)...(19): siRNA sense strand
cuaaacaagcuaacaagaa

SEQ ID NO: 850350 - RNA, 19 nt, Homo sapiens
  misc_RNA (1)...(19): siRNA sense strand
gcaaagccuuccccaauug

SEQ ID NO: 850351 - RNA, 19 nt, Homo sapiens
  misc_RNA (1)...(19): siRNA sense strand
gcucaagaauccguaacaa

SEQ ID NO: 850352 - RNA, 19 nt, Homo sapiens
  misc_RNA (1)...(19): siRNA sense strand
gcagauagugguguucauu

SEQ ID NO: 850353 - RNA, 19 nt, Homo sapiens
  misc_RNA (1)...(19): siRNA sense strand
aggaagaagaugaugauua

SEQ ID NO: 850354 - RNA, 19 nt, Homo sapiens
  misc_RNA (1)...(19): siRNA sense strand
gaugcaaaguguacuaaac

SEQ ID NO: 850355 - RNA, 19 nt, Homo sapiens
  misc_RNA (1)...(19): siRNA sense strand
cagaggugcuuaacagcuu

SEQ ID NO: 850356 - RNA, 19 nt, Homo sapiens
  misc_RNA (1)...(19): siRNA sense strand
uagaagaauuccaguacug

SEQ ID NO: 850357 - RNA, 19 nt, Homo sapiens
  misc_RNA (1)...(19): siRNA sense strand
gguaaguucaguuguuaaa

SEQ ID NO: 850358 - RNA, 19 nt, Homo sapiens
  misc_RNA (1)...(19): siRNA sense strand
aaaugaguauggaggauga

SEQ ID NO: 850359 - RNA, 19 nt, Homo sapiens
  misc_RNA (1)...(19): siRNA sense strand
ggaggaagaagaugaugau

SEQ ID NO: 850360 - RNA, 19 nt, Homo sapiens
  misc_RNA (1)...(19): siRNA sense strand
ccacagaaacagacacuuc

SEQ ID NO: 850361 - RNA, 19 nt, Homo sapiens
  misc_RNA (1)...(19): siRNA sense strand
cagaguaguuggguauaug

SEQ ID NO: 850362 - RNA, 19 nt, Homo sapiens
  misc_RNA (1)...(19): siRNA sense strand
ggcuauaucugaagcucaa

SEQ ID NO: 850363 - RNA, 19 nt, Homo sapiens
  misc_RNA (1)...(19): siRNA sense strand
gagaaaguugccuguggua

SEQ ID NO: 850364 - RNA, 19 nt, Homo sapiens
  misc_RNA (1)...(19): siRNA sense strand
gacgaagaccucaacuuug

SEQ ID NO: 850365 - RNA, 19 nt, Homo sapiens
  misc_RNA (1)...(19): siRNA sense strand
caagcuaacaagaaucuga

SEQ ID NO: 850366 - RNA, 19 nt, Homo sapiens
  misc_RNA (1)...(19): siRNA sense strand
ugagaugagugaacugagu

SEQ ID NO: 850367 - RNA, 19 nt, Homo sapiens
  misc_RNA (1)...(19): siRNA sense strand
guaguuggguauaugaaac

SEQ ID NO: 850368 - RNA, 19 nt, Homo sapiens
  misc_RNA (1)...(19): siRNA sense strand
guagaagaauuccaguacu

SEQ ID NO: 850369 - RNA, 19 nt, Homo sapiens
  misc_RNA (1)...(19): siRNA sense strand
gaguagaagaauuccagua

SEQ ID NO: 850370 - RNA, 19 nt, Homo sapiens
  misc_RNA (1)...(19): siRNA sense strand
cagcuuagaagaaacguau

SEQ ID NO: 850371 - RNA, 19 nt, Homo sapiens
  misc_RNA (1)...(19): siRNA sense strand
gaaccagaggugcuuaaca

SEQ ID NO: 850372 - RNA, 19 nt, Homo sapiens
  misc_RNA (1)...(19): siRNA sense strand
aaaguugccugugguaagu

SEQ ID NO: 850373 - RNA, 19 nt, Homo sapiens
  misc_RNA (1)...(19): siRNA sense strand
uggaaugucccuucuauca

SEQ ID NO: 850374 - RNA, 19 nt, Homo sapiens
  misc_RNA (1)...(19): siRNA sense strand
gcaccaccuuccaguaguc

SEQ ID NO: 850375 - RNA, 19 nt, Homo sapiens
  misc_RNA (1)...(19): siRNA sense strand
cagauagugguguucauuu

SEQ ID NO: 850376 - RNA, 19 nt, Homo sapiens
  misc_RNA (1)...(19): siRNA sense strand
ugugguaaguucaguuguu

SEQ ID NO: 850377 - RNA, 19 nt, Homo sapiens
  misc_RNA (1)...(19): siRNA sense strand
agaggugcuuaacagcuua

SEQ ID NO: 850378 - RNA, 19 nt, Homo sapiens
  misc_RNA (1)...(19): siRNA sense strand
ggacugcacauucuaccau

SEQ ID NO: 850379 - RNA, 19 nt, Homo sapiens
  misc_RNA (1)...(19): siRNA sense strand
guuuaacacucaauguaca

SEQ ID NO: 850380 - RNA, 19 nt, Homo sapiens
  misc_RNA (1)...(19): siRNA sense strand
cagauugucccuucacuca

SEQ ID NO: 850381 - RNA, 19 nt, Homo sapiens
  misc_RNA (1)...(19): siRNA sense strand
ucaagaauccguaacaaaa

SEQ ID NO: 850382 - RNA, 19 nt, Homo sapiens
  misc_RNA (1)...(19): siRNA sense strand
gcuuaacagcuuagaagaa

SEQ ID NO: 850383 - RNA, 19 nt, Homo sapiens
  misc_RNA (1)...(19): siRNA sense strand
ucaugugaguagaagaauu

SEQ ID NO: 850384 - RNA, 19 nt, Homo sapiens
  misc_RNA (1)...(19): siRNA sense strand
ggaaugucccuucuaucau

SEQ ID NO: 850385 - RNA, 19 nt, Homo sapiens
  misc_RNA (1)...(19): siRNA sense strand
gaagcucaagaauccguaa

SEQ ID NO: 850386 - RNA, 19 nt, Homo sapiens
  misc_RNA (1)...(19): siRNA sense strand
gaccucaaaccagcgaaua

SEQ ID NO: 850387 - RNA, 19 nt, Homo sapiens
  misc_RNA (1)...(19): siRNA sense strand
gacaugccuugaaauggau

SEQ ID NO: 850388 - RNA, 19 nt, Homo sapiens
  misc_RNA (1)...(19): siRNA sense strand
cacccaaauuguaaauaug

SEQ ID NO: 850389 - RNA, 19 nt, Homo sapiens
  misc_RNA (1)...(19): siRNA sense strand
aaaucaagcugagaugagu

SEQ ID NO: 850390 - RNA, 19 nt, Homo sapiens
  misc_RNA (1)...(19): siRNA sense strand
aagaauugcuagcagaagu

SEQ ID NO: 850391 - RNA, 19 nt, Homo sapiens
  misc_RNA (1)...(19): siRNA sense strand
gaugauuacgggucucgaa

SEQ ID NO: 850392 - RNA, 19 nt, Homo sapiens
  misc_RNA (1)...(19): siRNA sense strand
aaccagaggugcuuaacag

SEQ ID NO: 850393 - RNA, 19 nt, Homo sapiens
  misc_RNA (1)...(19): siRNA sense strand
ggaugagugugccuaccau

SEQ ID NO: 850394 - RNA, 19 nt, Homo sapiens
  misc_RNA (1)...(19): siRNA sense strand
caacuaacuacucuacagu

SEQ ID NO: 850395 - RNA, 19 nt, Homo sapiens
  misc_RNA (1)...(19): siRNA sense strand
acaacuaacuacucuacag

SEQ ID NO: 850396 - RNA, 19 nt, Homo sapiens
  misc_RNA (1)...(19): siRNA sense strand
uuugaaggcuauaucugaa

SEQ ID NO: 850397 - RNA, 19 nt, Homo sapiens
  misc_RNA (1)...(19): siRNA sense strand
uauggaggaugaaaacuuu

SEQ ID NO: 850398 - RNA, 19 nt, Homo sapiens
  misc_RNA (1)...(19): siRNA sense strand
caugugaguagaagaauuc

SEQ ID NO: 850399 - RNA, 19 nt, Homo sapiens
  misc_RNA (1)...(19): siRNA sense strand
aaaugcagauagugguguu

SEQ ID NO: 850400 - RNA, 19 nt, Homo sapiens
  misc_RNA (1)...(19): siRNA sense strand
ucaacuuugugcaggagaa

SEQ ID NO: 850401 - RNA, 19 nt, Homo sapiens
  misc_RNA (1)...(19): siRNA sense strand
aaguagaaaugcagauagu

SEQ ID NO: 850402 - RNA, 19 nt, Homo sapiens
  misc_RNA (1)...(19): siRNA sense strand
aaaguguacuaaaccagau

SEQ ID NO: 850403 - RNA, 19 nt, Homo sapiens
  misc_RNA (1)...(19): siRNA sense strand
caaguagaaaugcagauag

SEQ ID NO: 850404 - RNA, 19 nt, Homo sapiens
  misc_RNA (1)...(19): siRNA sense strand
agaaacaacucggagaaaa

SEQ ID NO: 850405 - RNA, 19 nt, Homo sapiens
  misc_RNA (1)...(19): siRNA sense strand
acacuuacauaugguucuu

SEQ ID NO: 850406 - RNA, 19 nt, Homo sapiens
  misc_RNA (1)...(19): siRNA sense strand
aguacuggccugcuuguaa

SEQ ID NO: 850407 - RNA, 19 nt, Homo sapiens
  misc_RNA (1)...(19): siRNA sense strand
aaacaacuaacuacucuac

SEQ ID NO: 850408 - RNA, 19 nt, Homo sapiens
  misc_RNA (1)...(19): siRNA sense strand
gauuacgggucucgaacag

SEQ ID NO: 850409 - RNA, 19 nt, Homo sapiens
  misc_RNA (1)...(19): siRNA sense strand
acguauaguccguucuuua

SEQ ID NO: 850410 - RNA, 19 nt, Homo sapiens
  misc_RNA (1)...(19): siRNA sense strand
uaccaucccaccauuaaug

SEQ ID NO: 850411 - RNA, 19 nt, Homo sapiens
  misc_RNA (1)...(19): siRNA sense strand
ucuaccaucccaccauuaa

SEQ ID NO: 850412 - RNA, 19 nt, Homo sapiens
  misc_RNA (1)...(19): siRNA sense strand
gcugagaugagugaacuga

SEQ ID NO: 850413 - RNA, 19 nt, Homo sapiens
  misc_RNA (1)...(19): siRNA sense strand
guucuucucgcccuucuau

SEQ ID NO: 850414 - RNA, 19 nt, Homo sapiens
  misc_RNA (1)...(19): siRNA sense strand
acucuacaguuccacagaa

SEQ ID NO: 850415 - RNA, 19 nt, Homo sapiens
  misc_RNA (1)...(19): siRNA sense strand
uaucugaagcucaagaauc

SEQ ID NO: 850416 - RNA, 19 nt, Homo sapiens
  misc_RNA (1)...(19): siRNA sense strand
gaaaaugaguauggaggau

SEQ ID NO: 850417 - RNA, 19 nt, Homo sapiens
  misc_RNA (1)...(19): siRNA sense strand
gaaacaacucggagaaaau

SEQ ID NO: 850418 - RNA, 19 nt, Homo sapiens
  misc_RNA (1)...(19): siRNA sense strand
cguauaguccguucuuuag

SEQ ID NO: 850419 - RNA, 19 nt, Homo sapiens
  misc_RNA (1)...(19): siRNA sense strand
gaagaggaggaagaagaug

SEQ ID NO: 850420 - RNA, 19 nt, Homo sapiens
  misc_RNA (1)...(19): siRNA sense strand
aaauggauucgaccucaaa

SEQ ID NO: 850421 - RNA, 19 nt, Homo sapiens
  misc_RNA (1)...(19): siRNA sense strand
agaccggacugcacauucu

SEQ ID NO: 850422 - RNA, 19 nt, Homo sapiens
  misc_RNA (1)...(19): siRNA sense strand
gagcuuaaccuggccuaua

SEQ ID NO: 850423 - RNA, 19 nt, Homo sapiens
  misc_RNA (1)...(19): siRNA sense strand
gaacaaccagcuccaggaa

SEQ ID NO: 850424 - RNA, 19 nt, Homo sapiens
  misc_RNA (1)...(19): siRNA sense strand
agaacaaucucaucuccaa

SEQ ID NO: 850425 - RNA, 19 nt, Homo sapiens
  misc_RNA (1)...(19): siRNA sense strand
gucccaaacauucuaguua

SEQ ID NO: 850426 - RNA, 19 nt, Homo sapiens
  misc_RNA (1)...(19): siRNA sense strand
agcuuaaccuggccuauaa

SEQ ID NO: 850427 - RNA, 19 nt, Homo sapiens
  misc_RNA (1)...(19): siRNA sense strand
acaaccagcugaccacagu

SEQ ID NO: 850428 - RNA, 19 nt, Homo sapiens
  misc_RNA (1)...(19): siRNA sense strand
ccguguaccuccacaacaa

SEQ ID NO: 850429 - RNA, 19 nt, Homo sapiens
  misc_RNA (1)...(19): siRNA sense strand
agucagggcuggccaugug

SEQ ID NO: 850430 - RNA, 19 nt, Homo sapiens
  misc_RNA (1)...(19): siRNA sense strand
ccaaccaagugauggagau

SEQ ID NO: 850431 - RNA, 19 nt, Homo sapiens
  misc_RNA (1)...(19): siRNA sense strand
gacagacaguggccuggau

SEQ ID NO: 850432 - RNA, 19 nt, Homo sapiens
  misc_RNA (1)...(19): siRNA sense strand
ucccaaacauucuaguuag

SEQ ID NO: 850433 - RNA, 19 nt, Homo sapiens
  misc_RNA (1)...(19): siRNA sense strand
gcaaccagcugcggaugcu

SEQ ID NO: 850434 - RNA, 19 nt, Homo sapiens
  misc_RNA (1)...(19): siRNA sense strand
cauucuaguuagcugguaa

SEQ ID NO: 850435 - RNA, 19 nt, Homo sapiens
  misc_RNA (1)...(19): siRNA sense strand
gcuuggaccuucgaguguu

SEQ ID NO: 850436 - RNA, 19 nt, Homo sapiens
  misc_RNA (1)...(19): siRNA sense strand
ccacgucccaaacauucua

SEQ ID NO: 850437 - RNA, 19 nt, Homo sapiens
  misc_RNA (1)...(19): siRNA sense strand
acaaccagcuccaggaacu

SEQ ID NO: 850438 - RNA, 19 nt, Homo sapiens
  misc_RNA (1)...(19): siRNA sense strand
cugcguggcucacaacaag

SEQ ID NO: 850439 - RNA, 19 nt, Homo sapiens
  misc_RNA (1)...(19): siRNA sense strand
cgcguggucugcgcuauuu

SEQ ID NO: 850440 - RNA, 19 nt, Homo sapiens
  misc_RNA (1)...(19): siRNA sense strand
gcacacgcugcaccucuau

SEQ ID NO: 850441 - RNA, 19 nt, Homo sapiens
  misc_RNA (1)...(19): siRNA sense strand
gucaggcacaggcugguua

SEQ ID NO: 850442 - RNA, 19 nt, Homo sapiens
  misc_RNA (1)...(19): siRNA sense strand
ucgacacuguggacuguga

SEQ ID NO: 850443 - RNA, 19 nt, Homo sapiens
  misc_RNA (1)...(19): siRNA sense strand
acaacaaccagcugagcaa

SEQ ID NO: 850444 - RNA, 19 nt, Homo sapiens
  misc_RNA (1)...(19): siRNA sense strand
ggcuccaccugcagaacaa

SEQ ID NO: 850445 - RNA, 19 nt, Homo sapiens
  misc_RNA (1)...(19): siRNA sense strand
ggagaaggauggacuagaa

SEQ ID NO: 850446 - RNA, 19 nt, Homo sapiens
  misc_RNA (1)...(19): siRNA sense strand
ugacacagaugaucacuuu

SEQ ID NO: 850447 - RNA, 19 nt, Homo sapiens
  misc_RNA (1)...(19): siRNA sense strand
gugaugagauuguuucuuu

SEQ ID NO: 850448 - RNA, 19 nt, Homo sapiens
  misc_RNA (1)...(19): siRNA sense strand
gaacuacuuuccaggauga

SEQ ID NO: 850449 - RNA, 19 nt, Homo sapiens
  misc_RNA (1)...(19): siRNA sense strand
gugaagacauuguuguaaa

SEQ ID NO: 850450 - RNA, 19 nt, Homo sapiens
  misc_RNA (1)...(19): siRNA sense strand
gauuauggaugaugacaga

SEQ ID NO: 850451 - RNA, 19 nt, Homo sapiens
  misc_RNA (1)...(19): siRNA sense strand
uaacaagucuagcaucauc

SEQ ID NO: 850452 - RNA, 19 nt, Homo sapiens
  misc_RNA (1)...(19): siRNA sense strand
gacaaaggaguucugaaua

SEQ ID NO: 850453 - RNA, 19 nt, Homo sapiens
  misc_RNA (1)...(19): siRNA sense strand
gaugaucacuuuaaaccau

SEQ ID NO: 850454 - RNA, 19 nt, Homo sapiens
  misc_RNA (1)...(19): siRNA sense strand
cagaacaguugauccacua

SEQ ID NO: 850455 - RNA, 19 nt, Homo sapiens
  misc_RNA (1)...(19): siRNA sense strand
gaaaagauccaaaugaaga

SEQ ID NO: 850456 - RNA, 19 nt, Homo sapiens
  misc_RNA (1)...(19): siRNA sense strand
guugagaaauccaaggaaa

SEQ ID NO: 850457 - RNA, 19 nt, Homo sapiens
  misc_RNA (1)...(19): siRNA sense strand
cagaugacuuugacaguga

SEQ ID NO: 850458 - RNA, 19 nt, Homo sapiens
  misc_RNA (1)...(19): siRNA sense strand
aagcacaucuucagcagaa

SEQ ID NO: 850459 - RNA, 19 nt, Homo sapiens
  misc_RNA (1)...(19): siRNA sense strand
acacagaugaucacuuuaa

SEQ ID NO: 850460 - RNA, 19 nt, Homo sapiens
  misc_RNA (1)...(19): siRNA sense strand
gaggauucaugcuuaacaa

SEQ ID NO: 850461 - RNA, 19 nt, Homo sapiens
  misc_RNA (1)...(19): siRNA sense strand
ugaauacucagaugacuuu

SEQ ID NO: 850462 - RNA, 19 nt, Homo sapiens
  misc_RNA (1)...(19): siRNA sense strand
gaugaugacagaacaguug

SEQ ID NO: 850463 - RNA, 19 nt, Homo sapiens
  misc_RNA (1)...(19): siRNA sense strand
acaaaggaguucugaauac

SEQ ID NO: 850464 - RNA, 19 nt, Homo sapiens
  misc_RNA (1)...(19): siRNA sense strand
caaaugaagaaaucacuga

SEQ ID NO: 850465 - RNA, 19 nt, Homo sapiens
  misc_RNA (1)...(19): siRNA sense strand
caacagccuugacacagau

SEQ ID NO: 850466 - RNA, 19 nt, Homo sapiens
  misc_RNA (1)...(19): siRNA sense strand
cgaauggcauacaauuaga

SEQ ID NO: 850467 - RNA, 19 nt, Homo sapiens
  misc_RNA (1)...(19): siRNA sense strand
cugaugaccuugaagaaga

SEQ ID NO: 850468 - RNA, 19 nt, Homo sapiens
  misc_RNA (1)...(19): siRNA sense strand
aagcggaacugauuaugga

SEQ ID NO: 850469 - RNA, 19 nt, Homo sapiens
  misc_RNA (1)...(19): siRNA sense strand
ggacuagaagauaaagaaa

SEQ ID NO: 850470 - RNA, 19 nt, Homo sapiens
  misc_RNA (1)...(19): siRNA sense strand
acaauuagaagcugagaaa

SEQ ID NO: 850471 - RNA, 19 nt, Homo sapiens
  misc_RNA (1)...(19): siRNA sense strand
uaacauaaccaaagaugag

SEQ ID NO: 850472 - RNA, 19 nt, Homo sapiens
  misc_RNA (1)...(19): siRNA sense strand
ccuaaacccagaauucuuu

SEQ ID NO: 850473 - RNA, 19 nt, Homo sapiens
  misc_RNA (1)...(19): siRNA sense strand
gcaccacuuuggcauauac

SEQ ID NO: 850474 - RNA, 19 nt, Homo sapiens
  misc_RNA (1)...(19): siRNA sense strand
gugaagaauuggaguuaca

SEQ ID NO: 850475 - RNA, 19 nt, Homo sapiens
  misc_RNA (1)...(19): siRNA sense strand
cacagaugaucacuuuaaa

SEQ ID NO: 850476 - RNA, 19 nt, Homo sapiens
  misc_RNA (1)...(19): siRNA sense strand
gccagugugugccaucaaa

SEQ ID NO: 850477 - RNA, 19 nt, Homo sapiens
  misc_RNA (1)...(19): siRNA sense strand
cuaucuaaaucucagagua

SEQ ID NO: 850478 - RNA, 19 nt, Homo sapiens
  misc_RNA (1)...(19): siRNA sense strand
cuacugcaguugagaaauc

SEQ ID NO: 850479 - RNA, 19 nt, Homo sapiens
  misc_RNA (1)...(19): siRNA sense strand
aaagucacauggaggagaa

SEQ ID NO: 850480 - RNA, 19 nt, Homo sapiens
  misc_RNA (1)...(19): siRNA sense strand
caaaggaguucugaauacu

SEQ ID NO: 850481 - RNA, 19 nt, Homo sapiens
  misc_RNA (1)...(19): siRNA sense strand
aggauggacuagaagauaa

SEQ ID NO: 850482 - RNA, 19 nt, Homo sapiens
  misc_RNA (1)...(19): siRNA sense strand
ugacagugaugagauuguu

SEQ ID NO: 850483 - RNA, 19 nt, Homo sapiens
  misc_RNA (1)...(19): siRNA sense strand
acaaagaguccaaaaguua

SEQ ID NO: 850484 - RNA, 19 nt, Homo sapiens
  misc_RNA (1)...(19): siRNA sense strand
gagggaaacgcaucuggaa

SEQ ID NO: 850485 - RNA, 19 nt, Homo sapiens
  misc_RNA (1)...(19): siRNA sense strand
cuagcaucaucaucacuua

SEQ ID NO: 850486 - RNA, 19 nt, Homo sapiens
  misc_RNA (1)...(19): siRNA sense strand
gaagaauuggaguuacauu

SEQ ID NO: 850487 - RNA, 19 nt, Homo sapiens
  misc_RNA (1)...(19): siRNA sense strand
acaacagccuugacacaga

SEQ ID NO: 850488 - RNA, 19 nt, Homo sapiens
  misc_RNA (1)...(19): siRNA sense strand
ccaauaaaucaaacgguaa

SEQ ID NO: 850489 - RNA, 19 nt, Homo sapiens
  misc_RNA (1)...(19): siRNA sense strand
aaaccuaaacccagaauuc

SEQ ID NO: 850490 - RNA, 19 nt, Homo sapiens
  misc_RNA (1)...(19): siRNA sense strand
gaacugauuauggaugaug

SEQ ID NO: 850491 - RNA, 19 nt, Homo sapiens
  misc_RNA (1)...(19): siRNA sense strand
cggaacugauuauggauga

SEQ ID NO: 850492 - RNA, 19 nt, Homo sapiens
  misc_RNA (1)...(19): siRNA sense strand
gccgaauggcauacaauua

SEQ ID NO: 850493 - RNA, 19 nt, Homo sapiens
  misc_RNA (1)...(19): siRNA sense strand
agacaaaggaguucugaau

SEQ ID NO: 850494 - RNA, 19 nt, Homo sapiens
  misc_RNA (1)...(19): siRNA sense strand
gauccacuacuaucuaaau

SEQ ID NO: 850495 - RNA, 19 nt, Homo sapiens
  misc_RNA (1)...(19): siRNA sense strand
ggccaaggaguauguuaaa

SEQ ID NO: 850496 - RNA, 19 nt, Homo sapiens
  misc_RNA (1)...(19): siRNA sense strand
gaggaaauggcaccugaug

SEQ ID NO: 850497 - RNA, 19 nt, Homo sapiens
  misc_RNA (1)...(19): siRNA sense strand
ccacuacuaucuaaaucuc

SEQ ID NO: 850498 - RNA, 19 nt, Homo sapiens
  misc_RNA (1)...(19): siRNA sense strand
gaugagauuguuucuuuag

SEQ ID NO: 850499 - RNA, 19 nt, Homo sapiens
  misc_RNA (1)...(19): siRNA sense strand
cuuaacaagucuagcauca

SEQ ID NO: 850500 - RNA, 19 nt, Homo sapiens
  misc_RNA (1)...(19): siRNA sense strand
gauucaugcuuaacaaguc

SEQ ID NO: 850501 - RNA, 19 nt, Homo sapiens
  misc_RNA (1)...(19): siRNA sense strand
gaauggcauacaauuagaa

SEQ ID NO: 850502 - RNA, 19 nt, Homo sapiens
  misc_RNA (1)...(19): siRNA sense strand
uagcaccacuuuggcauau

SEQ ID NO: 850503 - RNA, 19 nt, Homo sapiens
  misc_RNA (1)...(19): siRNA sense strand
ugaugggugugaagacauu

SEQ ID NO: 850504 - RNA, 19 nt, Homo sapiens
  misc_RNA (1)...(19): siRNA sense strand
gguaacauaaccaaagaug

SEQ ID NO: 850505 - RNA, 19 nt, Homo sapiens
  misc_RNA (1)...(19): siRNA sense strand
gcaaaagcggaacugauua

SEQ ID NO: 850506 - RNA, 19 nt, Homo sapiens
  misc_RNA (1)...(19): siRNA sense strand
ccaugugacuacugcaguu

SEQ ID NO: 850507 - RNA, 19 nt, Homo sapiens
  misc_RNA (1)...(19): siRNA sense strand
ccugaggauucaugcuuaa

SEQ ID NO: 850508 - RNA, 19 nt, Homo sapiens
  misc_RNA (1)...(19): siRNA sense strand
gaaggauggacuagaagau

SEQ ID NO: 850509 - RNA, 19 nt, Homo sapiens
  misc_RNA (1)...(19): siRNA sense strand
ggauggacuagaagauaaa

SEQ ID NO: 850510 - RNA, 19 nt, Homo sapiens
  misc_RNA (1)...(19): siRNA sense strand
cauaauuccuugaaaucag

SEQ ID NO: 850511 - RNA, 19 nt, Homo sapiens
  misc_RNA (1)...(19): siRNA sense strand
gaaaagaauccuucaaaac

SEQ ID NO: 850512 - RNA, 19 nt, Homo sapiens
  misc_RNA (1)...(19): siRNA sense strand
ccgaauggcauacaauuag

SEQ ID NO: 850513 - RNA, 19 nt, Homo sapiens
  misc_RNA (1)...(19): siRNA sense strand
ggaggagaaggauggacua

SEQ ID NO: 850514 - RNA, 19 nt, Homo sapiens
  misc_RNA (1)...(19): siRNA sense strand
ugagauuguuucuuuaggu

SEQ ID NO: 850515 - RNA, 19 nt, Homo sapiens
  misc_RNA (1)...(19): siRNA sense strand
aacaguugauccacuacua

SEQ ID NO: 850516 - RNA, 19 nt, Homo sapiens
  misc_RNA (1)...(19): siRNA sense strand
ucaagugacugcugaugac

SEQ ID NO: 850517 - RNA, 19 nt, Homo sapiens
  misc_RNA (1)...(19): siRNA sense strand
guaacauaaccaaagauga

SEQ ID NO: 850518 - RNA, 19 nt, Homo sapiens
  misc_RNA (1)...(19): siRNA sense strand
gaaaacaacagccuugaca

SEQ ID NO: 850519 - RNA, 19 nt, Homo sapiens
  misc_RNA (1)...(19): siRNA sense strand
ugaugaccuugaagaagaa

SEQ ID NO: 850520 - RNA, 19 nt, Homo sapiens
  misc_RNA (1)...(19): siRNA sense strand
gaaauccaaggaaagucaa

SEQ ID NO: 850521 - RNA, 19 nt, Homo sapiens
  misc_RNA (1)...(19): siRNA sense strand
cagugaagaauuggaguua

SEQ ID NO: 850522 - RNA, 19 nt, Homo sapiens
  misc_RNA (1)...(19): siRNA sense strand
aaacaacagccuugacaca

SEQ ID NO: 850523 - RNA, 19 nt, Homo sapiens
  misc_RNA (1)...(19): siRNA sense strand
uuuccaggaugagcuaaua

SEQ ID NO: 850524 - RNA, 19 nt, Homo sapiens
  misc_RNA (1)...(19): siRNA sense strand
uugauccacuacuaucuaa

SEQ ID NO: 850525 - RNA, 19 nt, Homo sapiens
  misc_RNA (1)...(19): siRNA sense strand
cagcagaccaugugacuac

SEQ ID NO: 850526 - RNA, 19 nt, Homo sapiens
  misc_RNA (1)...(19): siRNA sense strand
gauuguuucuuuaggugau

SEQ ID NO: 850527 - RNA, 19 nt, Homo sapiens
  misc_RNA (1)...(19): siRNA sense strand
gaugagcuaauaagagcaa

SEQ ID NO: 850528 - RNA, 19 nt, Homo sapiens
  misc_RNA (1)...(19): siRNA sense strand
gcauauacaaagaguccaa

SEQ ID NO: 850529 - RNA, 19 nt, Homo sapiens
  misc_RNA (1)...(19): siRNA sense strand
aaggauggacuagaagaua

SEQ ID NO: 850530 - RNA, 19 nt, Homo sapiens
  misc_RNA (1)...(19): siRNA sense strand
guugauccacuacuaucua

SEQ ID NO: 850531 - RNA, 19 nt, Homo sapiens
  misc_RNA (1)...(19): siRNA sense strand
caaagaugagccagugugu

SEQ ID NO: 850532 - RNA, 19 nt, Homo sapiens
  misc_RNA (1)...(19): siRNA sense strand
gugcaacagcaucuucaaa

SEQ ID NO: 850533 - RNA, 19 nt, Homo sapiens
  misc_RNA (1)...(19): siRNA sense strand
ugacagaacaguugaucca

SEQ ID NO: 850534 - RNA, 19 nt, Homo sapiens
  misc_RNA (1)...(19): siRNA sense strand
gcaccuucuucccuuccaa

SEQ ID NO: 850535 - RNA, 19 nt, Homo sapiens
  misc_RNA (1)...(19): siRNA sense strand
gaaaccuaaacccagaauu

SEQ ID NO: 850536 - RNA, 19 nt, Homo sapiens
  misc_RNA (1)...(19): siRNA sense strand
gagccagugugugccauca

SEQ ID NO: 850537 - RNA, 19 nt, Homo sapiens
  misc_RNA (1)...(19): siRNA sense strand
ggcaaaagcggaacugauu

SEQ ID NO: 850538 - RNA, 19 nt, Homo sapiens
  misc_RNA (1)...(19): siRNA sense strand
gggaaacgcaucuggaaaa

SEQ ID NO: 850539 - RNA, 19 nt, Homo sapiens
  misc_RNA (1)...(19): siRNA sense strand
ggauucaugcuuaacaagu

SEQ ID NO: 850540 - RNA, 19 nt, Homo sapiens
  misc_RNA (1)...(19): siRNA sense strand
acgguaacauaaccaaaga

SEQ ID NO: 850541 - RNA, 19 nt, Homo sapiens
  misc_RNA (1)...(19): siRNA sense strand
auaaggaugaggaauuuga

SEQ ID NO: 850542 - RNA, 19 nt, Homo sapiens
  misc_RNA (1)...(19): siRNA sense strand
gugugaagacauuguugua

SEQ ID NO: 850543 - RNA, 19 nt, Homo sapiens
  misc_RNA (1)...(19): siRNA sense strand
ugagaaauccaaggaaagu

SEQ ID NO: 850544 - RNA, 19 nt, Homo sapiens
  misc_RNA (1)...(19): siRNA sense strand
agaaauccaaggaaaguca

SEQ ID NO: 850545 - RNA, 19 nt, Homo sapiens
  misc_RNA (1)...(19): siRNA sense strand
gcacagaggaugaugagua

SEQ ID NO: 850546 - RNA, 19 nt, Homo sapiens
  misc_RNA (1)...(19): siRNA sense strand
caucauugcugacuccaua

SEQ ID NO: 850547 - RNA, 19 nt, Homo sapiens
  misc_RNA (1)...(19): siRNA sense strand
gaugaugaguaccuggaua

SEQ ID NO: 850548 - RNA, 19 nt, Homo sapiens
  misc_RNA (1)...(19): siRNA sense strand
gcgcacagcccgcaucauu

SEQ ID NO: 850549 - RNA, 19 nt, Homo sapiens
  misc_RNA (1)...(19): siRNA sense strand
gagcucaagugguccuuug

SEQ ID NO: 850550 - RNA, 19 nt, Homo sapiens
  misc_RNA (1)...(19): siRNA sense strand
gagaggaacaucaagaaau

SEQ ID NO: 850551 - RNA, 19 nt, Homo sapiens
  misc_RNA (1)...(19): siRNA sense strand
ggagaggaacaucaagaaa

SEQ ID NO: 850552 - RNA, 19 nt, Homo sapiens
  misc_RNA (1)...(19): siRNA sense strand
uggauaagguggagaggaa

SEQ ID NO: 850553 - RNA, 19 nt, Homo sapiens
  misc_RNA (1)...(19): siRNA sense strand
gaagcugcaucccuuugau

SEQ ID NO: 850554 - RNA, 19 nt, Homo sapiens
  misc_RNA (1)...(19): siRNA sense strand
agaggaacaucaagaaauc

SEQ ID NO: 850555 - RNA, 19 nt, Homo sapiens
  misc_RNA (1)...(19): siRNA sense strand
gcaaagugaucaauuuccu

SEQ ID NO: 850556 - RNA, 19 nt, Homo sapiens
  misc_RNA (1)...(19): siRNA sense strand
cacacgaggcgcuaucuua

SEQ ID NO: 850557 - RNA, 19 nt, Homo sapiens
  misc_RNA (1)...(19): siRNA sense strand
gccaucaaguuucuguuug

SEQ ID NO: 850558 - RNA, 19 nt, Homo sapiens
  misc_RNA (1)...(19): siRNA sense strand
ccagacaggaggaaccaua

SEQ ID NO: 850559 - RNA, 19 nt, Homo sapiens
  misc_RNA (1)...(19): siRNA sense strand
acacgaggcgcuaucuuaa

SEQ ID NO: 850560 - RNA, 19 nt, Homo sapiens
  misc_RNA (1)...(19): siRNA sense strand
acgaggcgcuaucuuaaug

SEQ ID NO: 850561 - RNA, 19 nt, Homo sapiens
  misc_RNA (1)...(19): siRNA sense strand
gagacacccuggccaaucg

SEQ ID NO: 850562 - RNA, 19 nt, Homo sapiens
  misc_RNA (1)...(19): siRNA sense strand
caagugguccuuugcuguu

SEQ ID NO: 850563 - RNA, 19 nt, Homo sapiens
  misc_RNA (1)...(19): siRNA sense strand
cgacaagcguguguacauc

SEQ ID NO: 850564 - RNA, 19 nt, Homo sapiens
  misc_RNA (1)...(19): siRNA sense strand
ggagaagcugcaucccuuu

SEQ ID NO: 850565 - RNA, 19 nt, Homo sapiens
  misc_RNA (1)...(19): siRNA sense strand
caaagugaucaauuuccua

SEQ ID NO: 850566 - RNA, 19 nt, Homo sapiens
  misc_RNA (1)...(19): siRNA sense strand
gcuacaacaucaccuucau

SEQ ID NO: 850567 - RNA, 19 nt, Homo sapiens
  misc_RNA (1)...(19): siRNA sense strand
cuccauacuuaaucuguuu

SEQ ID NO: 850568 - RNA, 19 nt, Homo sapiens
  misc_RNA (1)...(19): siRNA sense strand
cuccagggcuaccaucauu

SEQ ID NO: 850569 - RNA, 19 nt, Homo sapiens
  misc_RNA (1)...(19): siRNA sense strand
gacaggaggaaccauaaug

SEQ ID NO: 850570 - RNA, 19 nt, Homo sapiens
  misc_RNA (1)...(19): siRNA sense strand
ggggcaaagugaucaauuu

SEQ ID NO: 850571 - RNA, 19 nt, Homo sapiens
  misc_RNA (1)...(19): siRNA sense strand
auugcugacuccauacuua

SEQ ID NO: 850572 - RNA, 19 nt, Homo sapiens
  misc_RNA (1)...(19): siRNA sense strand
gcacagcccgcaucauugc

SEQ ID NO: 850573 - RNA, 19 nt, Homo sapiens
  misc_RNA (1)...(19): siRNA sense strand
gagaagcugcaucccuuug

SEQ ID NO: 850574 - RNA, 19 nt, Homo sapiens
  misc_RNA (1)...(19): siRNA sense strand
gggcaaagugaucaauuuc

SEQ ID NO: 850575 - RNA, 19 nt, Homo sapiens
  misc_RNA (1)...(19): siRNA sense strand
cacagaggaugaugaguac

SEQ ID NO: 850576 - RNA, 19 nt, Homo sapiens
  misc_RNA (1)...(19): siRNA sense strand
ccagggcuaccaucauuga

SEQ ID NO: 850577 - RNA, 19 nt, Homo sapiens
  misc_RNA (1)...(19): siRNA sense strand
gagacuucauggacgacaa

SEQ ID NO: 850578 - RNA, 19 nt, Homo sapiens
  misc_RNA (1)...(19): siRNA sense strand
cagacaggaggaaccauaa

SEQ ID NO: 850579 - RNA, 19 nt, Homo sapiens
  misc_RNA (1)...(19): siRNA sense strand
gacaagcguguguacauca

SEQ ID NO: 850580 - RNA, 19 nt, Homo sapiens
  misc_RNA (1)...(19): siRNA sense strand
gcacacgaggcgcuaucuu

SEQ ID NO: 850581 - RNA, 19 nt, Homo sapiens
  misc_RNA (1)...(19): siRNA sense strand
ggacgacaagcguguguac

SEQ ID NO: 850582 - RNA, 19 nt, Homo sapiens
  misc_RNA (1)...(19): siRNA sense strand
guugcuaccaucacagaaa

SEQ ID NO: 850583 - RNA, 19 nt, Homo sapiens
  misc_RNA (1)...(19): siRNA sense strand
ggaaaauggggcaaaguga

SEQ ID NO: 850584 - RNA, 19 nt, Homo sapiens
  misc_RNA (1)...(19): siRNA sense strand
gaggcgcuaucuuaaugag

SEQ ID NO: 850585 - RNA, 19 nt, Homo sapiens
  misc_RNA (1)...(19): siRNA sense strand
acaucacgcucgccaucaa

SEQ ID NO: 850586 - RNA, 19 nt, Homo sapiens
  misc_RNA (1)...(19): siRNA sense strand
cgacguggugguauacaau

SEQ ID NO: 850587 - RNA, 19 nt, Homo sapiens
  misc_RNA (1)...(19): siRNA sense strand
ugcccgacguggugguaua

SEQ ID NO: 850588 - RNA, 19 nt, Homo sapiens
  misc_RNA (1)...(19): siRNA sense strand
gaaaauggggcaaagugau

SEQ ID NO: 850589 - RNA, 19 nt, Homo sapiens
  misc_RNA (1)...(19): siRNA sense strand
cgccaucaaguuucuguuu

SEQ ID NO: 850590 - RNA, 19 nt, Homo sapiens
  misc_RNA (1)...(19): siRNA sense strand
gauaagguggagaggaaca

SEQ ID NO: 850591 - RNA, 19 nt, Homo sapiens
  misc_RNA (1)...(19): siRNA sense strand
guggagaggaacaucaaga

SEQ ID NO: 850592 - RNA, 19 nt, Homo sapiens
  misc_RNA (1)...(19): siRNA sense strand
uugcuaccaucacagaaau

SEQ ID NO: 850593 - RNA, 19 nt, Homo sapiens
  misc_RNA (1)...(19): siRNA sense strand
ccgacguggugguauacaa

SEQ ID NO: 850594 - RNA, 19 nt, Homo sapiens
  misc_RNA (1)...(19): siRNA sense strand
uggagaggaacaucaagaa

SEQ ID NO: 850595 - RNA, 19 nt, Homo sapiens
  misc_RNA (1)...(19): siRNA sense strand
cuacaaccgccacaucuac

SEQ ID NO: 850596 - RNA, 19 nt, Homo sapiens
  misc_RNA (1)...(19): siRNA sense strand
gggcacagaggaugaugag

SEQ ID NO: 850597 - RNA, 19 nt, Homo sapiens
  misc_RNA (1)...(19): siRNA sense strand
agaagcugcaucccuuuga

SEQ ID NO: 850598 - RNA, 19 nt, Homo sapiens
  misc_RNA (1)...(19): siRNA sense strand
aaugaaagcuggugauaua

SEQ ID NO: 850599 - RNA, 19 nt, Homo sapiens
  misc_RNA (1)...(19): siRNA sense strand
ggagaaagacauugagaaa

SEQ ID NO: 850600 - RNA, 19 nt, Homo sapiens
  misc_RNA (1)...(19): siRNA sense strand
gaugggaucugauuuaguc

SEQ ID NO: 850601 - RNA, 19 nt, Homo sapiens
  misc_RNA (1)...(19): siRNA sense strand
uagaugaccuggagaaaga

SEQ ID NO: 850602 - RNA, 19 nt, Homo sapiens
  misc_RNA (1)...(19): siRNA sense strand
gaugcuuccugauguguua

SEQ ID NO: 850603 - RNA, 19 nt, Homo sapiens
  misc_RNA (1)...(19): siRNA sense strand
gagaaacggcgcaaacgua

SEQ ID NO: 850604 - RNA, 19 nt, Homo sapiens
  misc_RNA (1)...(19): siRNA sense strand
ggaauggacucugauaugg

SEQ ID NO: 850605 - RNA, 19 nt, Homo sapiens
  misc_RNA (1)...(19): siRNA sense strand
aagugaagcuggucagaua

SEQ ID NO: 850606 - RNA, 19 nt, Homo sapiens
  misc_RNA (1)...(19): siRNA sense strand
gcacagugaccuugaagaa

SEQ ID NO: 850607 - RNA, 19 nt, Homo sapiens
  misc_RNA (1)...(19): siRNA sense strand
ggaagcagaugaugguucu

SEQ ID NO: 850608 - RNA, 19 nt, Homo sapiens
  misc_RNA (1)...(19): siRNA sense strand
guauaaaugcagaugcuua

SEQ ID NO: 850609 - RNA, 19 nt, Homo sapiens
  misc_RNA (1)...(19): siRNA sense strand
gaaagcuggugauauaaaa

SEQ ID NO: 850610 - RNA, 19 nt, Homo sapiens
  misc_RNA (1)...(19): siRNA sense strand
gcagugcuucuguauuaua

SEQ ID NO: 850611 - RNA, 19 nt, Homo sapiens
  misc_RNA (1)...(19): siRNA sense strand
ggacuggaccugacugugu

SEQ ID NO: 850612 - RNA, 19 nt, Homo sapiens
  misc_RNA (1)...(19): siRNA sense strand
acaauggaauggacucuga

SEQ ID NO: 850613 - RNA, 19 nt, Homo sapiens
  misc_RNA (1)...(19): siRNA sense strand
aguuagagcuccugucuga

SEQ ID NO: 850614 - RNA, 19 nt, Homo sapiens
  misc_RNA (1)...(19): siRNA sense strand
uaaaugcagaugcuuauga

SEQ ID NO: 850615 - RNA, 19 nt, Homo sapiens
  misc_RNA (1)...(19): siRNA sense strand
cagcaggaaacuaaauaua

SEQ ID NO: 850616 - RNA, 19 nt, Homo sapiens
  misc_RNA (1)...(19): siRNA sense strand
ggaagauagugauguacuc

SEQ ID NO: 850617 - RNA, 19 nt, Homo sapiens
  misc_RNA (1)...(19): siRNA sense strand
gaaaauacaguccaaagug

SEQ ID NO: 850618 - RNA, 19 nt, Homo sapiens
  misc_RNA (1)...(19): siRNA sense strand
gcagaugaugguucuaaga

SEQ ID NO: 850619 - RNA, 19 nt, Homo sapiens
  misc_RNA (1)...(19): siRNA sense strand
ugaaagcuggugauauaaa

SEQ ID NO: 850620 - RNA, 19 nt, Homo sapiens
  misc_RNA (1)...(19): siRNA sense strand
aauggacucugauauggaa

SEQ ID NO: 850621 - RNA, 19 nt, Homo sapiens
  misc_RNA (1)...(19): siRNA sense strand
gaagauagugauguacuca

SEQ ID NO: 850622 - RNA, 19 nt, Homo sapiens
  misc_RNA (1)...(19): siRNA sense strand
ccugaagguuuggaauuaa

SEQ ID NO: 850623 - RNA, 19 nt, Homo sapiens
  misc_RNA (1)...(19): siRNA sense strand
gagaauaagcaaccugaag

SEQ ID NO: 850624 - RNA, 19 nt, Homo sapiens
  misc_RNA (1)...(19): siRNA sense strand
cagcaagacaucuguauag

SEQ ID NO: 850625 - RNA, 19 nt, Homo sapiens
  misc_RNA (1)...(19): siRNA sense strand
gcugugggaacgccaauuu

SEQ ID NO: 850626 - RNA, 19 nt, Homo sapiens
  misc_RNA (1)...(19): siRNA sense strand
ggaagaggaagcagaugau

SEQ ID NO: 850627 - RNA, 19 nt, Homo sapiens
  misc_RNA (1)...(19): siRNA sense strand
cugaagguuuggaauuaaa

SEQ ID NO: 850628 - RNA, 19 nt, Homo sapiens
  misc_RNA (1)...(19): siRNA sense strand
uuagagcuccugucugaaa

SEQ ID NO: 850629 - RNA, 19 nt, Homo sapiens
  misc_RNA (1)...(19): siRNA sense strand
gaugagggcaagagcgauu

SEQ ID NO: 850630 - RNA, 19 nt, Homo sapiens
  misc_RNA (1)...(19): siRNA sense strand
gaauggacucugauaugga

SEQ ID NO: 850631 - RNA, 19 nt, Homo sapiens
  misc_RNA (1)...(19): siRNA sense strand
gugcuucuguauuauagga

SEQ ID NO: 850632 - RNA, 19 nt, Homo sapiens
  misc_RNA (1)...(19): siRNA sense strand
gcagcaggaaacuaaauau

SEQ ID NO: 850633 - RNA, 19 nt, Homo sapiens
  misc_RNA (1)...(19): siRNA sense strand
gaaaaggggaagauaguga

SEQ ID NO: 850634 - RNA, 19 nt, Homo sapiens
  misc_RNA (1)...(19): siRNA sense strand
gaagaggaagcagaugaug

SEQ ID NO: 850635 - RNA, 19 nt, Homo sapiens
  misc_RNA (1)...(19): siRNA sense strand
aaaauacaguccaaaguga

SEQ ID NO: 850636 - RNA, 19 nt, Homo sapiens
  misc_RNA (1)...(19): siRNA sense strand
ucagcaagacaucuguaua

SEQ ID NO: 850637 - RNA, 19 nt, Homo sapiens
  misc_RNA (1)...(19): siRNA sense strand
cuaaugaaagcuggugaua

SEQ ID NO: 850638 - RNA, 19 nt, Homo sapiens
  misc_RNA (1)...(19): siRNA sense strand
uuccugauguguuaaagaa

SEQ ID NO: 850639 - RNA, 19 nt, Homo sapiens
  misc_RNA (1)...(19): siRNA sense strand
uuaaagcccuaaugaaagc

SEQ ID NO: 850640 - RNA, 19 nt, Homo sapiens
  misc_RNA (1)...(19): siRNA sense strand
agaaagacauugagaaaag

SEQ ID NO: 850641 - RNA, 19 nt, Homo sapiens
  misc_RNA (1)...(19): siRNA sense strand
gauagaugaccuggagaaa

SEQ ID NO: 850642 - RNA, 19 nt, Homo sapiens
  misc_RNA (1)...(19): siRNA sense strand
cuguauagauucugcuuca

SEQ ID NO: 850643 - RNA, 19 nt, Homo sapiens
  misc_RNA (1)...(19): siRNA sense strand
gcaacuggagcugcuagaa

SEQ ID NO: 850644 - RNA, 19 nt, Homo sapiens
  misc_RNA (1)...(19): siRNA sense strand
gaagcuggucagauagaug

SEQ ID NO: 850645 - RNA, 19 nt, Homo sapiens
  misc_RNA (1)...(19): siRNA sense strand
uggaauggacucugauaug

SEQ ID NO: 850646 - RNA, 19 nt, Homo sapiens
  misc_RNA (1)...(19): siRNA sense strand
gaaagacauugagaaaagu

SEQ ID NO: 850647 - RNA, 19 nt, Homo sapiens
  misc_RNA (1)...(19): siRNA sense strand
guauagauucugcuucauc

SEQ ID NO: 850648 - RNA, 19 nt, Homo sapiens
  misc_RNA (1)...(19): siRNA sense strand
ggagaaacggcgcaaacgu

SEQ ID NO: 850649 - RNA, 19 nt, Homo sapiens
  misc_RNA (1)...(19): siRNA sense strand
cagaugaugguucuaagau

SEQ ID NO: 850650 - RNA, 19 nt, Homo sapiens
  misc_RNA (1)...(19): siRNA sense strand
aagcagaugaugguucuaa

SEQ ID NO: 850651 - RNA, 19 nt, Homo sapiens
  misc_RNA (1)...(19): siRNA sense strand
gagaaaagugugaaugaga

SEQ ID NO: 850652 - RNA, 19 nt, Homo sapiens
  misc_RNA (1)...(19): siRNA sense strand
uggaagaggaagcagauga

SEQ ID NO: 850653 - RNA, 19 nt, Homo sapiens
  misc_RNA (1)...(19): siRNA sense strand
uaaugaaagcuggugauau

SEQ ID NO: 850654 - RNA, 19 nt, Homo sapiens
  misc_RNA (1)...(19): siRNA sense strand
agaugaugguucuaagaug

SEQ ID NO: 850655 - RNA, 19 nt, Homo sapiens
  misc_RNA (1)...(19): siRNA sense strand
aagcuggucagauagauga

SEQ ID NO: 850656 - RNA, 19 nt, Homo sapiens
  misc_RNA (1)...(19): siRNA sense strand
ccuugcagcaggaaacuaa

SEQ ID NO: 850657 - RNA, 19 nt, Homo sapiens
  misc_RNA (1)...(19): siRNA sense strand
gcugcuagaacuugagaug

SEQ ID NO: 850658 - RNA, 19 nt, Homo sapiens
  misc_RNA (1)...(19): siRNA sense strand
cagugcuucuguauuauag

SEQ ID NO: 850659 - RNA, 19 nt, Homo sapiens
  misc_RNA (1)...(19): siRNA sense strand
caguauaaaugcagaugcu

SEQ ID NO: 850660 - RNA, 19 nt, Homo sapiens
  misc_RNA (1)...(19): siRNA sense strand
agauagugauguacucagu

SEQ ID NO: 850661 - RNA, 19 nt, Homo sapiens
  misc_RNA (1)...(19): siRNA sense strand
agcaagacaucuguauaga

SEQ ID NO: 850662 - RNA, 19 nt, Homo sapiens
  misc_RNA (1)...(19): siRNA sense strand
gagcugcuagaacuugaga

SEQ ID NO: 850663 - RNA, 19 nt, Homo sapiens
  misc_RNA (1)...(19): siRNA sense strand
caacuggagcugcuagaac

SEQ ID NO: 850664 - RNA, 19 nt, Homo sapiens
  misc_RNA (1)...(19): siRNA sense strand
ccugauguguuaaagaacu

SEQ ID NO: 850665 - RNA, 19 nt, Homo sapiens
  misc_RNA (1)...(19): siRNA sense strand
acuaugccaggaacaguua

SEQ ID NO: 850666 - RNA, 19 nt, Homo sapiens
  misc_RNA (1)...(19): siRNA sense strand
aaauacaguccaaagugaa

SEQ ID NO: 850667 - RNA, 19 nt, Homo sapiens
  misc_RNA (1)...(19): siRNA sense strand
agagcacagugaccuugaa

SEQ ID NO: 850668 - RNA, 19 nt, Homo sapiens
  misc_RNA (1)...(19): siRNA sense strand
aaaugcagaugcuuaugac

SEQ ID NO: 850669 - RNA, 19 nt, Homo sapiens
  misc_RNA (1)...(19): siRNA sense strand
gagaaagacauugagaaaa

SEQ ID NO: 850670 - RNA, 19 nt, Homo sapiens
  misc_RNA (1)...(19): siRNA sense strand
caaagugaagcuggucaga

SEQ ID NO: 850671 - RNA, 19 nt, Homo sapiens
  misc_RNA (1)...(19): siRNA sense strand
agaaggcccaugcaacgaa

SEQ ID NO: 850672 - RNA, 19 nt, Homo sapiens
  misc_RNA (1)...(19): siRNA sense strand
gugaagcuggucagauaga

SEQ ID NO: 850673 - RNA, 19 nt, Homo sapiens
  misc_RNA (1)...(19): siRNA sense strand
ucauugaaaccaguuaguu

SEQ ID NO: 850674 - RNA, 19 nt, Homo sapiens
  misc_RNA (1)...(19): siRNA sense strand
gaaaagugugaaugagauu

SEQ ID NO: 850675 - RNA, 19 nt, Homo sapiens
  misc_RNA (1)...(19): siRNA sense strand
cuucauccgugagagagaa

SEQ ID NO: 850676 - RNA, 19 nt, Homo sapiens
  misc_RNA (1)...(19): siRNA sense strand
gggcaagagcgauuaaagc

SEQ ID NO: 850677 - RNA, 19 nt, Homo sapiens
  misc_RNA (1)...(19): siRNA sense strand
ucaaccuucugcacagcaa

SEQ ID NO: 850678 - RNA, 19 nt, Homo sapiens
  misc_RNA (1)...(19): siRNA sense strand
aaacggcgcaaacguagca

SEQ ID NO: 850679 - RNA, 19 nt, Homo sapiens
  misc_RNA (1)...(19): siRNA sense strand
aauggaauggacucugaua

SEQ ID NO: 850680 - RNA, 19 nt, Homo sapiens
  misc_RNA (1)...(19): siRNA sense strand
ggcagagucuagcccaaac

SEQ ID NO: 850681 - RNA, 19 nt, Homo sapiens
  misc_RNA (1)...(19): siRNA sense strand
ugaagcuggucagauagau

SEQ ID NO: 850682 - RNA, 19 nt, Homo sapiens
  misc_RNA (1)...(19): siRNA sense strand
gggaagauagugauguacu

SEQ ID NO: 850683 - RNA, 19 nt, Homo sapiens
  misc_RNA (1)...(19): siRNA sense strand
ugcagcaggaaacuaaaua

SEQ ID NO: 850684 - RNA, 19 nt, Homo sapiens
  misc_RNA (1)...(19): siRNA sense strand
agaggaagcagaugauggu

SEQ ID NO: 850685 - RNA, 19 nt, Homo sapiens
  misc_RNA (1)...(19): siRNA sense strand
uggagcugcuagaacuuga

SEQ ID NO: 850686 - RNA, 19 nt, Homo sapiens
  misc_RNA (1)...(19): siRNA sense strand
agaaaagugugaaugagau

SEQ ID NO: 850687 - RNA, 19 nt, Homo sapiens
  misc_RNA (1)...(19): siRNA sense strand
uggagaaagacauugagaa

SEQ ID NO: 850688 - RNA, 19 nt, Homo sapiens
  misc_RNA (1)...(19): siRNA sense strand
ugaccuggagaaagacauu

SEQ ID NO: 850689 - RNA, 19 nt, Homo sapiens
  misc_RNA (1)...(19): siRNA sense strand
ggacuacucuuaugauuua

SEQ ID NO: 850690 - RNA, 19 nt, Homo sapiens
  misc_RNA (1)...(19): siRNA sense strand
gaagagggcuauauuagaa

SEQ ID NO: 850691 - RNA, 19 nt, Homo sapiens
  misc_RNA (1)...(19): siRNA sense strand
ggacauugcuccgcucuua

SEQ ID NO: 850692 - RNA, 19 nt, Homo sapiens
  misc_RNA (1)...(19): siRNA sense strand
gaaccacagucuugacaaa

SEQ ID NO: 850693 - RNA, 19 nt, Homo sapiens
  misc_RNA (1)...(19): siRNA sense strand
acacaaagguggcagauau

SEQ ID NO: 850694 - RNA, 19 nt, Homo sapiens
  misc_RNA (1)...(19): siRNA sense strand
caaaggcacucuguacauu

SEQ ID NO: 850695 - RNA, 19 nt, Homo sapiens
  misc_RNA (1)...(19): siRNA sense strand
gaacucaccuaacccaagu

SEQ ID NO: 850696 - RNA, 19 nt, Homo sapiens
  misc_RNA (1)...(19): siRNA sense strand
gcaccuauaacaaucaaua

SEQ ID NO: 850697 - RNA, 19 nt, Homo sapiens
  misc_RNA (1)...(19): siRNA sense strand
gcagauaucuaccuagcau

SEQ ID NO: 850698 - RNA, 19 nt, Homo sapiens
  misc_RNA (1)...(19): siRNA sense strand
caaagaagagggcuauauu

SEQ ID NO: 850699 - RNA, 19 nt, Homo sapiens
  misc_RNA (1)...(19): siRNA sense strand
gaauaguguuggagaucua

SEQ ID NO: 850700 - RNA, 19 nt, Homo sapiens
  misc_RNA (1)...(19): siRNA sense strand
caagguggccucccuguuu

SEQ ID NO: 850701 - RNA, 19 nt, Homo sapiens
  misc_RNA (1)...(19): siRNA sense strand
aaagaagagggcuauauua

SEQ ID NO: 850702 - RNA, 19 nt, Homo sapiens
  misc_RNA (1)...(19): siRNA sense strand
ggagcaaauuccuacauau

SEQ ID NO: 850703 - RNA, 19 nt, Homo sapiens
  misc_RNA (1)...(19): siRNA sense strand
gauauuggcccuccuacaa

SEQ ID NO: 850704 - RNA, 19 nt, Homo sapiens
  misc_RNA (1)...(19): siRNA sense strand
cggcauccaugaaauauau

SEQ ID NO: 850705 - RNA, 19 nt, Homo sapiens
  misc_RNA (1)...(19): siRNA sense strand
uggauaaagugcaggauuu

SEQ ID NO: 850706 - RNA, 19 nt, Homo sapiens
  misc_RNA (1)...(19): siRNA sense strand
gcaaagaagagggcuauau

SEQ ID NO: 850707 - RNA, 19 nt, Homo sapiens
  misc_RNA (1)...(19): siRNA sense strand
caagggaaagugacugaua

SEQ ID NO: 850708 - RNA, 19 nt, Homo sapiens
  misc_RNA (1)...(19): siRNA sense strand
uggagucucuggaugauuu

SEQ ID NO: 850709 - RNA, 19 nt, Homo sapiens
  misc_RNA (1)...(19): siRNA sense strand
cacgaaaccuuccaucaug

SEQ ID NO: 850710 - RNA, 19 nt, Homo sapiens
  misc_RNA (1)...(19): siRNA sense strand
ccagaggucuacaacuuug

SEQ ID NO: 850711 - RNA, 19 nt, Homo sapiens
  misc_RNA (1)...(19): siRNA sense strand
gcaguagucgccucucuuu

SEQ ID NO: 850712 - RNA, 19 nt, Homo sapiens
  misc_RNA (1)...(19): siRNA sense strand
gaagggacaaagccaauga

SEQ ID NO: 850713 - RNA, 19 nt, Homo sapiens
  misc_RNA (1)...(19): siRNA sense strand
gagcaaauuccuacauaug

SEQ ID NO: 850714 - RNA, 19 nt, Homo sapiens
  misc_RNA (1)...(19): siRNA sense strand
ugaaugaccacuacacaaa

SEQ ID NO: 850715 - RNA, 19 nt, Homo sapiens
  misc_RNA (1)...(19): siRNA sense strand
gaggugggcagacaucuuu

SEQ ID NO: 850716 - RNA, 19 nt, Homo sapiens
  misc_RNA (1)...(19): siRNA sense strand
uggagcaaauuccuacaua

SEQ ID NO: 850717 - RNA, 19 nt, Homo sapiens
  misc_RNA (1)...(19): siRNA sense strand
gaugggacaugggacauug

SEQ ID NO: 850718 - RNA, 19 nt, Homo sapiens
  misc_RNA (1)...(19): siRNA sense strand
ccaauaugauggcagauag

SEQ ID NO: 850719 - RNA, 19 nt, Homo sapiens
  misc_RNA (1)...(19): siRNA sense strand
ugaagaaaguaaagcugaa

SEQ ID NO: 850720 - RNA, 19 nt, Homo sapiens
  misc_RNA (1)...(19): siRNA sense strand
ucaagguucuuccuggauu

SEQ ID NO: 850721 - RNA, 19 nt, Homo sapiens
  misc_RNA (1)...(19): siRNA sense strand
caauguuccuuuccaugaa

SEQ ID NO: 850722 - RNA, 19 nt, Homo sapiens
  misc_RNA (1)...(19): siRNA sense strand
auacaacucuggcaccuau

SEQ ID NO: 850723 - RNA, 19 nt, Homo sapiens
  misc_RNA (1)...(19): siRNA sense strand
gggcagacaucuuuucaaa

SEQ ID NO: 850724 - RNA, 19 nt, Homo sapiens
  misc_RNA (1)...(19): siRNA sense strand
caagguucuuccuggauuu

SEQ ID NO: 850725 - RNA, 19 nt, Homo sapiens
  misc_RNA (1)...(19): siRNA sense strand
gauacggcauccaugaaau

SEQ ID NO: 850726 - RNA, 19 nt, Homo sapiens
  misc_RNA (1)...(19): siRNA sense strand
gauaaagauaccagcagua

SEQ ID NO: 850727 - RNA, 19 nt, Homo sapiens
  misc_RNA (1)...(19): siRNA sense strand
gcuauccacuguuaguuca

SEQ ID NO: 850728 - RNA, 19 nt, Homo sapiens
  misc_RNA (1)...(19): siRNA sense strand
gguggcagauaucuaccua

SEQ ID NO: 850729 - RNA, 19 nt, Homo sapiens
  misc_RNA (1)...(19): siRNA sense strand
ucaaagaauacaagacuga

SEQ ID NO: 850730 - RNA, 19 nt, Homo sapiens
  misc_RNA (1)...(19): siRNA sense strand
ugccagaggucuacaacuu

SEQ ID NO: 850731 - RNA, 19 nt, Homo sapiens
  misc_RNA (1)...(19): siRNA sense strand
caaugacccuguuccagau

SEQ ID NO: 850732 - RNA, 19 nt, Homo sapiens
  misc_RNA (1)...(19): siRNA sense strand
caaagccaaugacccuguu

SEQ ID NO: 850733 - RNA, 19 nt, Homo sapiens
  misc_RNA (1)...(19): siRNA sense strand
gccuauggcuuuuacaaua

SEQ ID NO: 850734 - RNA, 19 nt, Homo sapiens
  misc_RNA (1)...(19): siRNA sense strand
cagccaugcucaggauaua

SEQ ID NO: 850735 - RNA, 19 nt, Homo sapiens
  misc_RNA (1)...(19): siRNA sense strand
gccaugcucaggauauaua

SEQ ID NO: 850736 - RNA, 19 nt, Homo sapiens
  misc_RNA (1)...(19): siRNA sense strand
caacaaaacucuacaucag

SEQ ID NO: 850737 - RNA, 19 nt, Homo sapiens
  misc_RNA (1)...(19): siRNA sense strand
gaaaagacaguacaaguca

SEQ ID NO: 850738 - RNA, 19 nt, Homo sapiens
  misc_RNA (1)...(19): siRNA sense strand
acacaugaaugaccacuac

SEQ ID NO: 850739 - RNA, 19 nt, Homo sapiens
  misc_RNA (1)...(19): siRNA sense strand
ucuuagcaguggauugaua

SEQ ID NO: 850740 - RNA, 19 nt, Homo sapiens
  misc_RNA (1)...(19): siRNA sense strand
ggacuucaacaucauagau

SEQ ID NO: 850741 - RNA, 19 nt, Homo sapiens
  misc_RNA (1)...(19): siRNA sense strand
gagcaaagaagagggcuau

SEQ ID NO: 850742 - RNA, 19 nt, Homo sapiens
  misc_RNA (1)...(19): siRNA sense strand
gaccugaacucaccuaacc

SEQ ID NO: 850743 - RNA, 19 nt, Homo sapiens
  misc_RNA (1)...(19): siRNA sense strand
uauaaacacugggacuuca

SEQ ID NO: 850744 - RNA, 19 nt, Homo sapiens
  misc_RNA (1)...(19): siRNA sense strand
gacuucaacaucauagaua

SEQ ID NO: 850745 - RNA, 19 nt, Homo sapiens
  misc_RNA (1)...(19): siRNA sense strand
acccacagcugaucacgaa

SEQ ID NO: 850746 - RNA, 19 nt, Homo sapiens
  misc_RNA (1)...(19): siRNA sense strand
gcuccgcucuuaucaaggu

SEQ ID NO: 850747 - RNA, 19 nt, Homo sapiens
  misc_RNA (1)...(19): siRNA sense strand
aaagauaccagcaguaguc

SEQ ID NO: 850748 - RNA, 19 nt, Homo sapiens
  misc_RNA (1)...(19): siRNA sense strand
aaagacaguacaagucaaa

SEQ ID NO: 850749 - RNA, 19 nt, Homo sapiens
  misc_RNA (1)...(19): siRNA sense strand
gggcuuggacuacucuuau

SEQ ID NO: 850750 - RNA, 19 nt, Homo sapiens
  misc_RNA (1)...(19): siRNA sense strand
ggcaagaggugggcagaca

SEQ ID NO: 850751 - RNA, 19 nt, Homo sapiens
  misc_RNA (1)...(19): siRNA sense strand
caucauagauaaagauacc

SEQ ID NO: 850752 - RNA, 19 nt, Homo sapiens
  misc_RNA (1)...(19): siRNA sense strand
agaagagggcuauauuaga

SEQ ID NO: 850753 - RNA, 19 nt, Homo sapiens
  misc_RNA (1)...(19): siRNA sense strand
caaagguggcagauaucua

SEQ ID NO: 850754 - RNA, 19 nt, Homo sapiens
  misc_RNA (1)...(19): siRNA sense strand
ugacaaaggcacucuguac

SEQ ID NO: 850755 - RNA, 19 nt, Homo sapiens
  misc_RNA (1)...(19): siRNA sense strand
gccagaggucuacaacuuu

SEQ ID NO: 850756 - RNA, 19 nt, Homo sapiens
  misc_RNA (1)...(19): siRNA sense strand
ggagaucagagcuggcuau

SEQ ID NO: 850757 - RNA, 19 nt, Homo sapiens
  misc_RNA (1)...(19): siRNA sense strand
acaauguuccuuuccauga

SEQ ID NO: 850758 - RNA, 19 nt, Homo sapiens
  misc_RNA (1)...(19): siRNA sense strand
ucacgaaaccuuccaucau

SEQ ID NO: 850759 - RNA, 19 nt, Homo sapiens
  misc_RNA (1)...(19): siRNA sense strand
gcugggaccguuucaacaa

SEQ ID NO: 850760 - RNA, 19 nt, Homo sapiens
  misc_RNA (1)...(19): siRNA sense strand
gacaaaggcacucuguaca

SEQ ID NO: 850761 - RNA, 19 nt, Homo sapiens
  misc_RNA (1)...(19): siRNA sense strand
aagaagagggcuauauuag

SEQ ID NO: 850762 - RNA, 19 nt, Homo sapiens
  misc_RNA (1)...(19): siRNA sense strand
gcagccaugcucaggauau

SEQ ID NO: 850763 - RNA, 19 nt, Homo sapiens
  misc_RNA (1)...(19): siRNA sense strand
guacauuguggagcaaauu

SEQ ID NO: 850764 - RNA, 19 nt, Homo sapiens
  misc_RNA (1)...(19): siRNA sense strand
auacggcauccaugaaaua

SEQ ID NO: 850765 - RNA, 19 nt, Homo sapiens
  misc_RNA (1)...(19): siRNA sense strand
cagcugaucacgaaaccuu

SEQ ID NO: 850766 - RNA, 19 nt, Homo sapiens
  misc_RNA (1)...(19): siRNA sense strand
aagcugaaccacagucuug

SEQ ID NO: 850767 - RNA, 19 nt, Homo sapiens
  misc_RNA (1)...(19): siRNA sense strand
aaacggcagccuaaagguu

SEQ ID NO: 850768 - RNA, 19 nt, Homo sapiens
  misc_RNA (1)...(19): siRNA sense strand
gaucugauucccucacucu

SEQ ID NO: 850769 - RNA, 19 nt, Homo sapiens
  misc_RNA (1)...(19): siRNA sense strand
ugauacggcauccaugaaa

SEQ ID NO: 850770 - RNA, 19 nt, Homo sapiens
  misc_RNA (1)...(19): siRNA sense strand
gcaguggauugauauugcu

SEQ ID NO: 850771 - RNA, 19 nt, Homo sapiens
  misc_RNA (1)...(19): siRNA sense strand
cuacaauguuccuuuccau

SEQ ID NO: 850772 - RNA, 19 nt, Homo sapiens
  misc_RNA (1)...(19): siRNA sense strand
ugaauaguguuggagaucu

SEQ ID NO: 850773 - RNA, 19 nt, Homo sapiens
  misc_RNA (1)...(19): siRNA sense strand
acaacucuggcaccuauaa

SEQ ID NO: 850774 - RNA, 19 nt, Homo sapiens
  misc_RNA (1)...(19): siRNA sense strand
gaguccguguggccaauau

SEQ ID NO: 850775 - RNA, 19 nt, Homo sapiens
  misc_RNA (1)...(19): siRNA sense strand
uguuggagaucuauuggau

SEQ ID NO: 850776 - RNA, 19 nt, Homo sapiens
  misc_RNA (1)...(19): siRNA sense strand
aaagguggcagauaucuac

SEQ ID NO: 850777 - RNA, 19 nt, Homo sapiens
  misc_RNA (1)...(19): siRNA sense strand
aagggaaagugacugauac

SEQ ID NO: 850778 - RNA, 19 nt, Homo sapiens
  misc_RNA (1)...(19): siRNA sense strand
ccuauggcuuuuacaauaa

SEQ ID NO: 850779 - RNA, 19 nt, Homo sapiens
  misc_RNA (1)...(19): siRNA sense strand
gaaugaccacuacacaaac

SEQ ID NO: 850780 - RNA, 19 nt, Homo sapiens
  misc_RNA (1)...(19): siRNA sense strand
cacugggacuucaacauca

SEQ ID NO: 850781 - RNA, 19 nt, Homo sapiens
  misc_RNA (1)...(19): siRNA sense strand
gauguucuacggaaaggau

SEQ ID NO: 850782 - RNA, 19 nt, Homo sapiens
  misc_RNA (1)...(19): siRNA sense strand
ccuagcaucucaguacaca

SEQ ID NO: 850783 - RNA, 19 nt, Homo sapiens
  misc_RNA (1)...(19): siRNA sense strand
cuaccuagcaucucaguac

SEQ ID NO: 850784 - RNA, 19 nt, Homo sapiens
  misc_RNA (1)...(19): siRNA sense strand
gacacaaagguggcagaua

SEQ ID NO: 850785 - RNA, 19 nt, Homo sapiens
  misc_RNA (1)...(19): siRNA sense strand
guagucgccucucuuucag

SEQ ID NO: 850786 - RNA, 19 nt, Homo sapiens
  misc_RNA (1)...(19): siRNA sense strand
cugggaccguuucaacaaa

SEQ ID NO: 850787 - RNA, 19 nt, Homo sapiens
  misc_RNA (1)...(19): siRNA sense strand
uagcaucucaguacacauc

SEQ ID NO: 850788 - RNA, 19 nt, Homo sapiens
  misc_RNA (1)...(19): siRNA sense strand
gaagaaaguaaagcugaac

SEQ ID NO: 850789 - RNA, 19 nt, Homo sapiens
  misc_RNA (1)...(19): siRNA sense strand
ugacauauguggcccaaua

SEQ ID NO: 850790 - RNA, 19 nt, Homo sapiens
  misc_RNA (1)...(19): siRNA sense strand
ggaaaggccuuaugugugu

SEQ ID NO: 850791 - RNA, 19 nt, Homo sapiens
  misc_RNA (1)...(19): siRNA sense strand
gggaaagccuucacucaaa

SEQ ID NO: 850792 - RNA, 19 nt, Homo sapiens
  misc_RNA (1)...(19): siRNA sense strand
gcuaugaccucuuuaaaca

SEQ ID NO: 850793 - RNA, 19 nt, Homo sapiens
  misc_RNA (1)...(19): siRNA sense strand
gggaaauucuuuagacaaa

SEQ ID NO: 850794 - RNA, 19 nt, Homo sapiens
  misc_RNA (1)...(19): siRNA sense strand
ggaaagcaauucugguuca

SEQ ID NO: 850795 - RNA, 19 nt, Homo sapiens
  misc_RNA (1)...(19): siRNA sense strand
gggaaggccuuuagccaaa

SEQ ID NO: 850796 - RNA, 19 nt, Homo sapiens
  misc_RNA (1)...(19): siRNA sense strand
agccaaagcucccaccuua

SEQ ID NO: 850797 - RNA, 19 nt, Homo sapiens
  misc_RNA (1)...(19): siRNA sense strand
aaugggagcuucuugauga

SEQ ID NO: 850798 - RNA, 19 nt, Homo sapiens
  misc_RNA (1)...(19): siRNA sense strand
ggcccaauauugaaagaua

SEQ ID NO: 850799 - RNA, 19 nt, Homo sapiens
  misc_RNA (1)...(19): siRNA sense strand
ccuuacaccuggcuaaaua

SEQ ID NO: 850800 - RNA, 19 nt, Homo sapiens
  misc_RNA (1)...(19): siRNA sense strand
gagaagagcccugggugua

SEQ ID NO: 850801 - RNA, 19 nt, Homo sapiens
  misc_RNA (1)...(19): siRNA sense strand
gggaaauucuucagccaaa

SEQ ID NO: 850802 - RNA, 19 nt, Homo sapiens
  misc_RNA (1)...(19): siRNA sense strand
gcagaaaccauacuugugu

SEQ ID NO: 850803 - RNA, 19 nt, Homo sapiens
  misc_RNA (1)...(19): siRNA sense strand
gaagagcccuggguguaug

SEQ ID NO: 850804 - RNA, 19 nt, Homo sapiens
  misc_RNA (1)...(19): siRNA sense strand
gaaacuagagcgaggagaa

SEQ ID NO: 850805 - RNA, 19 nt, Homo sapiens
  misc_RNA (1)...(19): siRNA sense strand
agaaaggccuuaugagugu

SEQ ID NO: 850806 - RNA, 19 nt, Homo sapiens
  misc_RNA (1)...(19): siRNA sense strand
uggcagagcuggagucuca

SEQ ID NO: 850807 - RNA, 19 nt, Homo sapiens
  misc_RNA (1)...(19): siRNA sense strand
ggagaacuuugcacuuuua

SEQ ID NO: 850808 - RNA, 19 nt, Homo sapiens
  misc_RNA (1)...(19): siRNA sense strand
ggagaaaggccuuaugagu

SEQ ID NO: 850809 - RNA, 19 nt, Homo sapiens
  misc_RNA (1)...(19): siRNA sense strand
ggagaaaggccuuaugagu

SEQ ID NO: 850810 - RNA, 19 nt, Homo sapiens
  misc_RNA (1)...(19): siRNA sense strand
gagaagacccucacaugug

SEQ ID NO: 850811 - RNA, 19 nt, Homo sapiens
  misc_RNA (1)...(19): siRNA sense strand
ggaaagccuucacucaaag

SEQ ID NO: 850812 - RNA, 19 nt, Homo sapiens
  misc_RNA (1)...(19): siRNA sense strand
aagcaauucugguucagua

SEQ ID NO: 850813 - RNA, 19 nt, Homo sapiens
  misc_RNA (1)...(19): siRNA sense strand
gaauucauccggaaacaga

SEQ ID NO: 850814 - RNA, 19 nt, Homo sapiens
  misc_RNA (1)...(19): siRNA sense strand
ggacuuagaccugguuguu

SEQ ID NO: 850815 - RNA, 19 nt, Homo sapiens
  misc_RNA (1)...(19): siRNA sense strand
gaguguagcagauguggua

SEQ ID NO: 850816 - RNA, 19 nt, Homo sapiens
  misc_RNA (1)...(19): siRNA sense strand
gcagaugugguaaagcuuu

SEQ ID NO: 850817 - RNA, 19 nt, Homo sapiens
  misc_RNA (1)...(19): siRNA sense strand
gaaaggccuuaugagugua

SEQ ID NO: 850818 - RNA, 19 nt, Homo sapiens
  misc_RNA (1)...(19): siRNA sense strand
gaaaggccuuaugugugua

SEQ ID NO: 850819 - RNA, 19 nt, Homo sapiens
  misc_RNA (1)...(19): siRNA sense strand
aaaguucacucuggagaaa

SEQ ID NO: 850820 - RNA, 19 nt, Homo sapiens
  misc_RNA (1)...(19): siRNA sense strand
caguaagucuaaucucauu

SEQ ID NO: 850821 - RNA, 19 nt, Homo sapiens
  misc_RNA (1)...(19): siRNA sense strand
gaaaguucacucuggagaa

SEQ ID NO: 850822 - RNA, 19 nt, Homo sapiens
  misc_RNA (1)...(19): siRNA sense strand
ccaaagcucccaccuuaau

SEQ ID NO: 850823 - RNA, 19 nt, Homo sapiens
  misc_RNA (1)...(19): siRNA sense strand
cagcagugauuaugagugu

SEQ ID NO: 850824 - RNA, 19 nt, Homo sapiens
  misc_RNA (1)...(19): siRNA sense strand
cuggagaacuuugcacuuu

SEQ ID NO: 850825 - RNA, 19 nt, Homo sapiens
  misc_RNA (1)...(19): siRNA sense strand
ggauguguuuguauacuuc

SEQ ID NO: 850826 - RNA, 19 nt, Homo sapiens
  misc_RNA (1)...(19): siRNA sense strand
uugaggauguguuuguaua

SEQ ID NO: 850827 - RNA, 19 nt, Homo sapiens
  misc_RNA (1)...(19): siRNA sense strand
aauguacacuggagaauuc

SEQ ID NO: 850828 - RNA, 19 nt, Homo sapiens
  misc_RNA (1)...(19): siRNA sense strand
gcuggagucucacccaugu

SEQ ID NO: 850829 - RNA, 19 nt, Homo sapiens
  misc_RNA (1)...(19): siRNA sense strand
ggccuuauguguguaguga

SEQ ID NO: 850830 - RNA, 19 nt, Homo sapiens
  misc_RNA (1)...(19): siRNA sense strand
gauuaugaguguagcagau

SEQ ID NO: 850831 - RNA, 19 nt, Homo sapiens
  misc_RNA (1)...(19): siRNA sense strand
ggugaaagacucuaucagu

SEQ ID NO: 850832 - RNA, 19 nt, Homo sapiens
  misc_RNA (1)...(19): siRNA sense strand
ggcauggaguggaggauga

SEQ ID NO: 850833 - RNA, 19 nt, Homo sapiens
  misc_RNA (1)...(19): siRNA sense strand
gaaagaguucagucggaaa

SEQ ID NO: 850834 - RNA, 19 nt, Homo sapiens
  misc_RNA (1)...(19): siRNA sense strand
gagaauucauccggaaaca

SEQ ID NO: 850835 - RNA, 19 nt, Homo sapiens
  misc_RNA (1)...(19): siRNA sense strand
cagaucacgugcagucaug

SEQ ID NO: 850836 - RNA, 19 nt, Homo sapiens
  misc_RNA (1)...(19): siRNA sense strand
ggagccaggccuuauguau

SEQ ID NO: 850837 - RNA, 19 nt, Homo sapiens
  misc_RNA (1)...(19): siRNA sense strand
cagagaagacccucacaug

SEQ ID NO: 850838 - RNA, 19 nt, Homo sapiens
  misc_RNA (1)...(19): siRNA sense strand
ugaaagacucuaucagugu

SEQ ID NO: 850839 - RNA, 19 nt, Homo sapiens
  misc_RNA (1)...(19): siRNA sense strand
gaaugggagcuucuugaug

SEQ ID NO: 850840 - RNA, 19 nt, Homo sapiens
  misc_RNA (1)...(19): siRNA sense strand
ucaaagacccaaccucauc

SEQ ID NO: 850841 - RNA, 19 nt, Homo sapiens
  misc_RNA (1)...(19): siRNA sense strand
gagccaggccuuauguaug

SEQ ID NO: 850842 - RNA, 19 nt, Homo sapiens
  misc_RNA (1)...(19): siRNA sense strand
uagcagaugugguaaagcu

SEQ ID NO: 850843 - RNA, 19 nt, Homo sapiens
  misc_RNA (1)...(19): siRNA sense strand
gaaagccuucacucaaaga

SEQ ID NO: 850844 - RNA, 19 nt, Homo sapiens
  misc_RNA (1)...(19): siRNA sense strand
ggucuuugaggauguguuu

SEQ ID NO: 850845 - RNA, 19 nt, Homo sapiens
  misc_RNA (1)...(19): siRNA sense strand
gaggguucaugcuggagaa

SEQ ID NO: 850846 - RNA, 19 nt, Homo sapiens
  misc_RNA (1)...(19): siRNA sense strand
gcucccaccuuaauguaca

SEQ ID NO: 850847 - RNA, 19 nt, Homo sapiens
  misc_RNA (1)...(19): siRNA sense strand
gaugaugcucagagacuuu

SEQ ID NO: 850848 - RNA, 19 nt, Homo sapiens
  misc_RNA (1)...(19): siRNA sense strand
aguggaggaugaagaggua

SEQ ID NO: 850849 - RNA, 19 nt, Homo sapiens
  misc_RNA (1)...(19): siRNA sense strand
gagagaauucauccggaaa

SEQ ID NO: 850850 - RNA, 19 nt, Homo sapiens
  misc_RNA (1)...(19): siRNA sense strand
ggaaauucuucagccaaag

SEQ ID NO: 850851 - RNA, 19 nt, Homo sapiens
  misc_RNA (1)...(19): siRNA sense strand
guggaaagcaauucugguu

SEQ ID NO: 850852 - RNA, 19 nt, Homo sapiens
  misc_RNA (1)...(19): siRNA sense strand
gcaguaagucuaaucucau

SEQ ID NO: 850853 - RNA, 19 nt, Homo sapiens
  misc_RNA (1)...(19): siRNA sense strand
caaagacccaaccucauca

SEQ ID NO: 850854 - RNA, 19 nt, Homo sapiens
  misc_RNA (1)...(19): siRNA sense strand
gcagugauuaugaguguag

SEQ ID NO: 850855 - RNA, 19 nt, Homo sapiens
  misc_RNA (1)...(19): siRNA sense strand
gaacucacacuggagaaag

SEQ ID NO: 850856 - RNA, 19 nt, Homo sapiens
  misc_RNA (1)...(19): siRNA sense strand
gugcagucaugaaacuaga

SEQ ID NO: 850857 - RNA, 19 nt, Homo sapiens
  misc_RNA (1)...(19): siRNA sense strand
gaaugugggaaggccuuua

SEQ ID NO: 850858 - RNA, 19 nt, Homo sapiens
  misc_RNA (1)...(19): siRNA sense strand
gaaagcaauucugguucag

SEQ ID NO: 850859 - RNA, 19 nt, Homo sapiens
  misc_RNA (1)...(19): siRNA sense strand
gcgaaugugggaaagaguu

SEQ ID NO: 850860 - RNA, 19 nt, Homo sapiens
  misc_RNA (1)...(19): siRNA sense strand
gugggaaauucuuuagaca

SEQ ID NO: 850861 - RNA, 19 nt, Homo sapiens
  misc_RNA (1)...(19): siRNA sense strand
cgggaaagccuucacucaa

SEQ ID NO: 850862 - RNA, 19 nt, Homo sapiens
  misc_RNA (1)...(19): siRNA sense strand
gaggauguguuuguauacu

SEQ ID NO: 850863 - RNA, 19 nt, Homo sapiens
  misc_RNA (1)...(19): siRNA sense strand
gcaauucugguucaguaca

SEQ ID NO: 850864 - RNA, 19 nt, Homo sapiens
  misc_RNA (1)...(19): siRNA sense strand
agagaagacccucacaugu

SEQ ID NO: 850865 - RNA, 19 nt, Homo sapiens
  misc_RNA (1)...(19): siRNA sense strand
gacuucagccacagaaaga

SEQ ID NO: 850866 - RNA, 19 nt, Homo sapiens
  misc_RNA (1)...(19): siRNA sense strand
uaauguacacuggagaauu

SEQ ID NO: 850867 - RNA, 19 nt, Homo sapiens
  misc_RNA (1)...(19): siRNA sense strand
gagcacaggcgaguucaca

SEQ ID NO: 850868 - RNA, 19 nt, Homo sapiens
  misc_RNA (1)...(19): siRNA sense strand
ggaaagguaggagagacuu

SEQ ID NO: 850869 - RNA, 19 nt, Homo sapiens
  misc_RNA (1)...(19): siRNA sense strand
gaguccaugugccagagaa

SEQ ID NO: 850870 - RNA, 19 nt, Homo sapiens
  misc_RNA (1)...(19): siRNA sense strand
cccaauggagggaaacuuu

SEQ ID NO: 850871 - RNA, 19 nt, Homo sapiens
  misc_RNA (1)...(19): siRNA sense strand
uguaugaccagguggauau

SEQ ID NO: 850872 - RNA, 19 nt, Homo sapiens
  misc_RNA (1)...(19): siRNA sense strand
caaagcucccaccuuaaug

SEQ ID NO: 850873 - RNA, 19 nt, Homo sapiens
  misc_RNA (1)...(19): siRNA sense strand
acacaggagccaggccuua

SEQ ID NO: 850874 - RNA, 19 nt, Homo sapiens
  misc_RNA (1)...(19): siRNA sense strand
agcaguaagucuaaucuca

SEQ ID NO: 850875 - RNA, 19 nt, Homo sapiens
  misc_RNA (1)...(19): siRNA sense strand
caccagaaccagcccaaug

SEQ ID NO: 850876 - RNA, 19 nt, Homo sapiens
  misc_RNA (1)...(19): siRNA sense strand
gggcauguggaaagcaauu

SEQ ID NO: 850877 - RNA, 19 nt, Homo sapiens
  misc_RNA (1)...(19): siRNA sense strand
gaucacgugcagucaugaa

SEQ ID NO: 850878 - RNA, 19 nt, Homo sapiens
  misc_RNA (1)...(19): siRNA sense strand
acaccuggcuaaauaccau

SEQ ID NO: 850879 - RNA, 19 nt, Homo sapiens
  misc_RNA (1)...(19): siRNA sense strand
gcgggaaagccuucacuca

SEQ ID NO: 850880 - RNA, 19 nt, Homo sapiens
  misc_RNA (1)...(19): siRNA sense strand
cagaugugguaaagcuuuc

SEQ ID NO: 850881 - RNA, 19 nt, Homo sapiens
  misc_RNA (1)...(19): siRNA sense strand
cagcgaaugugggaaagag

SEQ ID NO: 850882 - RNA, 19 nt, Homo sapiens
  misc_RNA (1)...(19): siRNA sense strand
gugcagcgaaugugggaaa

SEQ ID NO: 850883 - RNA, 19 nt, Homo sapiens
  misc_RNA (1)...(19): siRNA sense strand
gaaagccuucacccgcaaa

SEQ ID NO: 850884 - RNA, 19 nt, Homo sapiens
  misc_RNA (1)...(19): siRNA sense strand
ggcagaaaccauacuugug

SEQ ID NO: 850885 - RNA, 19 nt, Homo sapiens
  misc_RNA (1)...(19): siRNA sense strand
guaacgaaugugggaaauu

SEQ ID NO: 850886 - RNA, 19 nt, Homo sapiens
  misc_RNA (1)...(19): siRNA sense strand
ccacaagagcacuaagcuu

SEQ ID NO: 850887 - RNA, 19 nt, Homo sapiens
  misc_RNA (1)...(19): siRNA sense strand
caaggaaggagggcagaga

SEQ ID NO: 850888 - RNA, 19 nt, Homo sapiens
  misc_RNA (1)...(19): siRNA sense strand
gccaaagcucccaccuuaa

SEQ ID NO: 850889 - RNA, 19 nt, Homo sapiens
  misc_RNA (1)...(19): siRNA sense strand
gaacacuuguaucgaauua

SEQ ID NO: 850890 - RNA, 19 nt, Homo sapiens
  misc_RNA (1)...(19): siRNA sense strand
gaacaugaaccauuugaaa

SEQ ID NO: 850891 - RNA, 19 nt, Homo sapiens
  misc_RNA (1)...(19): siRNA sense strand
gaagaugacuuuguggaaa

SEQ ID NO: 850892 - RNA, 19 nt, Homo sapiens
  misc_RNA (1)...(19): siRNA sense strand
gaaauuucguugcaugauu

SEQ ID NO: 850893 - RNA, 19 nt, Homo sapiens
  misc_RNA (1)...(19): siRNA sense strand
gagaauucaugugaucuua

SEQ ID NO: 850894 - RNA, 19 nt, Homo sapiens
  misc_RNA (1)...(19): siRNA sense strand
ggcagaagguggauuauga

SEQ ID NO: 850895 - RNA, 19 nt, Homo sapiens
  misc_RNA (1)...(19): siRNA sense strand
gaacuugucuucuccuuuu

SEQ ID NO: 850896 - RNA, 19 nt, Homo sapiens
  misc_RNA (1)...(19): siRNA sense strand
gauuuaaacucuccacgaa

SEQ ID NO: 850897 - RNA, 19 nt, Homo sapiens
  misc_RNA (1)...(19): siRNA sense strand
uagagaacaugaaccauuu

SEQ ID NO: 850898 - RNA, 19 nt, Homo sapiens
  misc_RNA (1)...(19): siRNA sense strand
cgaauugucuccagucaga

SEQ ID NO: 850899 - RNA, 19 nt, Homo sapiens
  misc_RNA (1)...(19): siRNA sense strand
gaauuccccugcaauauua

SEQ ID NO: 850900 - RNA, 19 nt, Homo sapiens
  misc_RNA (1)...(19): siRNA sense strand
caagaggaguuaugaagau

SEQ ID NO: 850901 - RNA, 19 nt, Homo sapiens
  misc_RNA (1)...(19): siRNA sense strand
cagcaauacuucccuugua

SEQ ID NO: 850902 - RNA, 19 nt, Homo sapiens
  misc_RNA (1)...(19): siRNA sense strand
gaucuuagcccagaaguug

SEQ ID NO: 850903 - RNA, 19 nt, Homo sapiens
  misc_RNA (1)...(19): siRNA sense strand
caccaaacauggaggagua

SEQ ID NO: 850904 - RNA, 19 nt, Homo sapiens
  misc_RNA (1)...(19): siRNA sense strand
cgaaauaccacuuuggaaa

SEQ ID NO: 850905 - RNA, 19 nt, Homo sapiens
  misc_RNA (1)...(19): siRNA sense strand
ccaaggcaguugaagauga

SEQ ID NO: 850906 - RNA, 19 nt, Homo sapiens
  misc_RNA (1)...(19): siRNA sense strand
aagcacauguucuucauuu

SEQ ID NO: 850907 - RNA, 19 nt, Homo sapiens
  misc_RNA (1)...(19): siRNA sense strand
caucucaucuccacaguau

SEQ ID NO: 850908 - RNA, 19 nt, Homo sapiens
  misc_RNA (1)...(19): siRNA sense strand
acaguuaacuugagugguu

SEQ ID NO: 850909 - RNA, 19 nt, Homo sapiens
  misc_RNA (1)...(19): siRNA sense strand
aaaccaagcucgagucagu

SEQ ID NO: 850910 - RNA, 19 nt, Homo sapiens
  misc_RNA (1)...(19): siRNA sense strand
acagaacacuuguaucgaa

SEQ ID NO: 850911 - RNA, 19 nt, Homo sapiens
  misc_RNA (1)...(19): siRNA sense strand
gcagaugacuauagagaac

SEQ ID NO: 850912 - RNA, 19 nt, Homo sapiens
  misc_RNA (1)...(19): siRNA sense strand
gaaauaaccaaggcaguug

SEQ ID NO: 850913 - RNA, 19 nt, Homo sapiens
  misc_RNA (1)...(19): siRNA sense strand
gcugaacucucugaacuug

SEQ ID NO: 850914 - RNA, 19 nt, Homo sapiens
  misc_RNA (1)...(19): siRNA sense strand
gcagaaagaccaacaugca

SEQ ID NO: 850915 - RNA, 19 nt, Homo sapiens
  misc_RNA (1)...(19): siRNA sense strand
gaauaguaccuucacagaa

SEQ ID NO: 850916 - RNA, 19 nt, Homo sapiens
  misc_RNA (1)...(19): siRNA sense strand
ggaauaguaccuucacaga

SEQ ID NO: 850917 - RNA, 19 nt, Homo sapiens
  misc_RNA (1)...(19): siRNA sense strand
caaguuucauguccgaauu

SEQ ID NO: 850918 - RNA, 19 nt, Homo sapiens
  misc_RNA (1)...(19): siRNA sense strand
ggcaacagcugaacucucu

SEQ ID NO: 850919 - RNA, 19 nt, Homo sapiens
  misc_RNA (1)...(19): siRNA sense strand
gaagguuuaugaagauugg

SEQ ID NO: 850920 - RNA, 19 nt, Homo sapiens
  misc_RNA (1)...(19): siRNA sense strand
aaagaagccuauguuaaug

SEQ ID NO: 850921 - RNA, 19 nt, Homo sapiens
  misc_RNA (1)...(19): siRNA sense strand
gaaauucauuccccacaaa

SEQ ID NO: 850922 - RNA, 19 nt, Homo sapiens
  misc_RNA (1)...(19): siRNA sense strand
caacacaucaacccauuau

SEQ ID NO: 850923 - RNA, 19 nt, Homo sapiens
  misc_RNA (1)...(19): siRNA sense strand
gggauuguuucaaaguaaa

SEQ ID NO: 850924 - RNA, 19 nt, Homo sapiens
  misc_RNA (1)...(19): siRNA sense strand
agacagacuuucuauugug

SEQ ID NO: 850925 - RNA, 19 nt, Homo sapiens
  misc_RNA (1)...(19): siRNA sense strand
acacaucaacccauuauug

SEQ ID NO: 850926 - RNA, 19 nt, Homo sapiens
  misc_RNA (1)...(19): siRNA sense strand
gagaagaaaguaauugagu

SEQ ID NO: 850927 - RNA, 19 nt, Homo sapiens
  misc_RNA (1)...(19): siRNA sense strand
ugaagaugaugacgauaug

SEQ ID NO: 850928 - RNA, 19 nt, Homo sapiens
  misc_RNA (1)...(19): siRNA sense strand
agauugggauuguuucaaa

SEQ ID NO: 850929 - RNA, 19 nt, Homo sapiens
  misc_RNA (1)...(19): siRNA sense strand
uaacaaagaggagagcaaa

SEQ ID NO: 850930 - RNA, 19 nt, Homo sapiens
  misc_RNA (1)...(19): siRNA sense strand
gcaacacaucaacccauua

SEQ ID NO: 850931 - RNA, 19 nt, Homo sapiens
  misc_RNA (1)...(19): siRNA sense strand
gcccagaaguugcaacaca

SEQ ID NO: 850932 - RNA, 19 nt, Homo sapiens
  misc_RNA (1)...(19): siRNA sense strand
ggaguuaugaagaugauga

SEQ ID NO: 850933 - RNA, 19 nt, Homo sapiens
  misc_RNA (1)...(19): siRNA sense strand
cagcugaacucucugaacu

SEQ ID NO: 850934 - RNA, 19 nt, Homo sapiens
  misc_RNA (1)...(19): siRNA sense strand
gaacgauggcugagagcaa

SEQ ID NO: 850935 - RNA, 19 nt, Homo sapiens
  misc_RNA (1)...(19): siRNA sense strand
gugcugaguauacugaaua

SEQ ID NO: 850936 - RNA, 19 nt, Homo sapiens
  misc_RNA (1)...(19): siRNA sense strand
gggagaagaaaguaauuga

SEQ ID NO: 850937 - RNA, 19 nt, Homo sapiens
  misc_RNA (1)...(19): siRNA sense strand
aggaaaagcugaaggaaaa

SEQ ID NO: 850938 - RNA, 19 nt, Homo sapiens
  misc_RNA (1)...(19): siRNA sense strand
cacaguauauacaagaaga

SEQ ID NO: 850939 - RNA, 19 nt, Homo sapiens
  misc_RNA (1)...(19): siRNA sense strand
gacagacuuucuauugugu

SEQ ID NO: 850940 - RNA, 19 nt, Homo sapiens
  misc_RNA (1)...(19): siRNA sense strand
uuuaaacucuccacgaaau

SEQ ID NO: 850941 - RNA, 19 nt, Homo sapiens
  misc_RNA (1)...(19): siRNA sense strand
gacuucagcuaccaucaga

SEQ ID NO: 850942 - RNA, 19 nt, Homo sapiens
  misc_RNA (1)...(19): siRNA sense strand
agcaauacuucccuuguaa

SEQ ID NO: 850943 - RNA, 19 nt, Homo sapiens
  misc_RNA (1)...(19): siRNA sense strand
gagaacaugaaccauuuga

SEQ ID NO: 850944 - RNA, 19 nt, Homo sapiens
  misc_RNA (1)...(19): siRNA sense strand
gaggaguuaugaagaugau

SEQ ID NO: 850945 - RNA, 19 nt, Homo sapiens
  misc_RNA (1)...(19): siRNA sense strand
guaaaagaagccuauguua

SEQ ID NO: 850946 - RNA, 19 nt, Homo sapiens
  misc_RNA (1)...(19): siRNA sense strand
aagccuauguuaaugcaaa

SEQ ID NO: 850947 - RNA, 19 nt, Homo sapiens
  misc_RNA (1)...(19): siRNA sense strand
aauaguaccuucacagaac

SEQ ID NO: 850948 - RNA, 19 nt, Homo sapiens
  misc_RNA (1)...(19): siRNA sense strand
gaauucaugugaucuuagc

SEQ ID NO: 850949 - RNA, 19 nt, Homo sapiens
  misc_RNA (1)...(19): siRNA sense strand
gaagauugggauuguuuca

SEQ ID NO: 850950 - RNA, 19 nt, Homo sapiens
  misc_RNA (1)...(19): siRNA sense strand
caacagcugaacucucuga

SEQ ID NO: 850951 - RNA, 19 nt, Homo sapiens
  misc_RNA (1)...(19): siRNA sense strand
gaacaggggcagcuggaua

SEQ ID NO: 850952 - RNA, 19 nt, Homo sapiens
  misc_RNA (1)...(19): siRNA sense strand
aaauuucguugcaugauuc

SEQ ID NO: 850953 - RNA, 19 nt, Homo sapiens
  misc_RNA (1)...(19): siRNA sense strand
ugggauuguuucaaaguaa

SEQ ID NO: 850954 - RNA, 19 nt, Homo sapiens
  misc_RNA (1)...(19): siRNA sense strand
uaccaucacugaacgaagu

SEQ ID NO: 850955 - RNA, 19 nt, Homo sapiens
  misc_RNA (1)...(19): siRNA sense strand
uaaccaaggcaguugaaga

SEQ ID NO: 850956 - RNA, 19 nt, Homo sapiens
  misc_RNA (1)...(19): siRNA sense strand
ugaaauaaccaaggcaguu

SEQ ID NO: 850957 - RNA, 19 nt, Homo sapiens
  misc_RNA (1)...(19): siRNA sense strand
ggaauuccccugcaauauu

SEQ ID NO: 850958 - RNA, 19 nt, Homo sapiens
  misc_RNA (1)...(19): siRNA sense strand
cagaacacuuguaucgaau

SEQ ID NO: 850959 - RNA, 19 nt, Homo sapiens
  misc_RNA (1)...(19): siRNA sense strand
ucacagaacacuuguaucg

SEQ ID NO: 850960 - RNA, 19 nt, Homo sapiens
  misc_RNA (1)...(19): siRNA sense strand
guauauacaagaagagaug

SEQ ID NO: 850961 - RNA, 19 nt, Homo sapiens
  misc_RNA (1)...(19): siRNA sense strand
ugacauucuugagcuauau

SEQ ID NO: 850962 - RNA, 19 nt, Homo sapiens
  misc_RNA (1)...(19): siRNA sense strand
cuuccgugcugaacaaauu

SEQ ID NO: 850963 - RNA, 19 nt, Homo sapiens
  misc_RNA (1)...(19): siRNA sense strand
gcugcugaauaccuuauau

SEQ ID NO: 850964 - RNA, 19 nt, Homo sapiens
  misc_RNA (1)...(19): siRNA sense strand
uaguuuggcugcugaauac

SEQ ID NO: 850965 - RNA, 19 nt, Homo sapiens
  misc_RNA (1)...(19): siRNA sense strand
gugugggccucaacaagaa

SEQ ID NO: 850966 - RNA, 19 nt, Homo sapiens
  misc_RNA (1)...(19): siRNA sense strand
aagaugacuuuguggaaau

SEQ ID NO: 850967 - RNA, 19 nt, Homo sapiens
  misc_RNA (1)...(19): siRNA sense strand
acacaguccuccugcuuca

SEQ ID NO: 850968 - RNA, 19 nt, Homo sapiens
  misc_RNA (1)...(19): siRNA sense strand
guacacaguccuccugcuu

SEQ ID NO: 850969 - RNA, 19 nt, Homo sapiens
  misc_RNA (1)...(19): siRNA sense strand
ugaacucucugaacuuguc

SEQ ID NO: 850970 - RNA, 19 nt, Homo sapiens
  misc_RNA (1)...(19): siRNA sense strand
aagacagacuuucuauugu

SEQ ID NO: 850971 - RNA, 19 nt, Homo sapiens
  misc_RNA (1)...(19): siRNA sense strand
gcaaaccaagcucgaguca

SEQ ID NO: 850972 - RNA, 19 nt, Homo sapiens
  misc_RNA (1)...(19): siRNA sense strand
gcaauacuucccuuguaau

SEQ ID NO: 850973 - RNA, 19 nt, Homo sapiens
  misc_RNA (1)...(19): siRNA sense strand
gaaacugaagcuucuacug

SEQ ID NO: 850974 - RNA, 19 nt, Homo sapiens
  misc_RNA (1)...(19): siRNA sense strand
uuaugaagaugaugacgau

SEQ ID NO: 850975 - RNA, 19 nt, Homo sapiens
  misc_RNA (1)...(19): siRNA sense strand
gaaaagcugaaggaaaaua

SEQ ID NO: 850976 - RNA, 19 nt, Homo sapiens
  misc_RNA (1)...(19): siRNA sense strand
gccgagaauucaugugauc

SEQ ID NO: 850977 - RNA, 19 nt, Homo sapiens
  misc_RNA (1)...(19): siRNA sense strand
ugugaagguuuaugaagau

SEQ ID NO: 850978 - RNA, 19 nt, Homo sapiens
  misc_RNA (1)...(19): siRNA sense strand
ucucagugcuggucagaca

SEQ ID NO: 850979 - RNA, 19 nt, Homo sapiens
  misc_RNA (1)...(19): siRNA sense strand
auacuucccuuguaaucga

SEQ ID NO: 850980 - RNA, 19 nt, Homo sapiens
  misc_RNA (1)...(19): siRNA sense strand
ucucaucuccacaguauau

SEQ ID NO: 850981 - RNA, 19 nt, Homo sapiens
  misc_RNA (1)...(19): siRNA sense strand
ccuguaaguuuguuucaag

SEQ ID NO: 850982 - RNA, 19 nt, Homo sapiens
  misc_RNA (1)...(19): siRNA sense strand
gaaaauaaugcuccuaagu

SEQ ID NO: 850983 - RNA, 19 nt, Homo sapiens
  misc_RNA (1)...(19): siRNA sense strand
uuacaugggaguuuaugaa

SEQ ID NO: 850984 - RNA, 19 nt, Homo sapiens
  misc_RNA (1)...(19): siRNA sense strand
ucaacauccuacacuccua

SEQ ID NO: 850985 - RNA, 19 nt, Homo sapiens
  misc_RNA (1)...(19): siRNA sense strand
gcuaauuccaccaaacaug

SEQ ID NO: 850986 - RNA, 19 nt, Homo sapiens
  misc_RNA (1)...(19): siRNA sense strand
cugccugccuuaacaaaga

SEQ ID NO: 850987 - RNA, 19 nt, Homo sapiens
  misc_RNA (1)...(19): siRNA sense strand
auagagaacaugaaccauu

SEQ ID NO: 850988 - RNA, 19 nt, Homo sapiens
  misc_RNA (1)...(19): siRNA sense strand
ugaagaugacuuuguggaa

SEQ ID NO: 850989 - RNA, 19 nt, Homo sapiens
  misc_RNA (1)...(19): siRNA sense strand
gaaacagacuucauagaaa

SEQ ID NO: 850990 - RNA, 19 nt, Homo sapiens
  misc_RNA (1)...(19): siRNA sense strand
guacauggguccaaacuaa

SEQ ID NO: 850991 - RNA, 19 nt, Homo sapiens
  misc_RNA (1)...(19): siRNA sense strand
cgagagaccucaggaaaua

SEQ ID NO: 850992 - RNA, 19 nt, Homo sapiens
  misc_RNA (1)...(19): siRNA sense strand
uaagagaacucaagcaaga

SEQ ID NO: 850993 - RNA, 19 nt, Homo sapiens
  misc_RNA (1)...(19): siRNA sense strand
gcaagauacugaaauguga

SEQ ID NO: 850994 - RNA, 19 nt, Homo sapiens
  misc_RNA (1)...(19): siRNA sense strand
gaacuaaugucgcaggaau

SEQ ID NO: 850995 - RNA, 19 nt, Homo sapiens
  misc_RNA (1)...(19): siRNA sense strand
ggaaacagacuucauagaa

SEQ ID NO: 850996 - RNA, 19 nt, Homo sapiens
  misc_RNA (1)...(19): siRNA sense strand
gaacuugacugcagcaaag

SEQ ID NO: 850997 - RNA, 19 nt, Homo sapiens
  misc_RNA (1)...(19): siRNA sense strand
agauauagcucaagaagaa

SEQ ID NO: 850998 - RNA, 19 nt, Homo sapiens
  misc_RNA (1)...(19): siRNA sense strand
gcaacaggaucuaaguauu

SEQ ID NO: 850999 - RNA, 19 nt, Homo sapiens
  misc_RNA (1)...(19): siRNA sense strand
gaauaauggugcacagcua

SEQ ID NO: 851000 - RNA, 19 nt, Homo sapiens
  misc_RNA (1)...(19): siRNA sense strand
gaaauaccaugcacacagu

SEQ ID NO: 851001 - RNA, 19 nt, Homo sapiens
  misc_RNA (1)...(19): siRNA sense strand
gcacugaaggcauuuguaa

SEQ ID NO: 851002 - RNA, 19 nt, Homo sapiens
  misc_RNA (1)...(19): siRNA sense strand
gaaggcauuuguaaucaug

SEQ ID NO: 851003 - RNA, 19 nt, Homo sapiens
  misc_RNA (1)...(19): siRNA sense strand
gaagagaaaggcaugcaaa

SEQ ID NO: 851004 - RNA, 19 nt, Homo sapiens
  misc_RNA (1)...(19): siRNA sense strand
uaauaaauacugccgguua

SEQ ID NO: 851005 - RNA, 19 nt, Homo sapiens
  misc_RNA (1)...(19): siRNA sense strand
gacaauagauauagcucaa

SEQ ID NO: 851006 - RNA, 19 nt, Homo sapiens
  misc_RNA (1)...(19): siRNA sense strand
ggugaugacucuuguguuc

SEQ ID NO: 851007 - RNA, 19 nt, Homo sapiens
  misc_RNA (1)...(19): siRNA sense strand
caauagauauagcucaaga

SEQ ID NO: 851008 - RNA, 19 nt, Homo sapiens
  misc_RNA (1)...(19): siRNA sense strand
caacaggaucuaaguauug

SEQ ID NO: 851009 - RNA, 19 nt, Homo sapiens
  misc_RNA (1)...(19): siRNA sense strand
gacagcaucugaaggagaa

SEQ ID NO: 851010 - RNA, 19 nt, Homo sapiens
  misc_RNA (1)...(19): siRNA sense strand
ggaaaucuuuaucucacaa

SEQ ID NO: 851011 - RNA, 19 nt, Homo sapiens
  misc_RNA (1)...(19): siRNA sense strand
gacaacggcuggagcaaau

SEQ ID NO: 851012 - RNA, 19 nt, Homo sapiens
  misc_RNA (1)...(19): siRNA sense strand
ggaaugcagggaugaagua

SEQ ID NO: 851013 - RNA, 19 nt, Homo sapiens
  misc_RNA (1)...(19): siRNA sense strand
gugcacagcuaaagcaguu

SEQ ID NO: 851014 - RNA, 19 nt, Homo sapiens
  misc_RNA (1)...(19): siRNA sense strand
guaagaagaauaagagaug

SEQ ID NO: 851015 - RNA, 19 nt, Homo sapiens
  misc_RNA (1)...(19): siRNA sense strand
caguugcacuccuuagaua

SEQ ID NO: 851016 - RNA, 19 nt, Homo sapiens
  misc_RNA (1)...(19): siRNA sense strand
caaagaggaugauggugau

SEQ ID NO: 851017 - RNA, 19 nt, Homo sapiens
  misc_RNA (1)...(19): siRNA sense strand
gcaaagacaauagauauag

SEQ ID NO: 851018 - RNA, 19 nt, Homo sapiens
  misc_RNA (1)...(19): siRNA sense strand
gcuugggaauucaucuuua

SEQ ID NO: 851019 - RNA, 19 nt, Homo sapiens
  misc_RNA (1)...(19): siRNA sense strand
aaagcaagauacugaaaug

SEQ ID NO: 851020 - RNA, 19 nt, Homo sapiens
  misc_RNA (1)...(19): siRNA sense strand
caacggcuggagcaaauua

SEQ ID NO: 851021 - RNA, 19 nt, Homo sapiens
  misc_RNA (1)...(19): siRNA sense strand
gagcauacaauauccuuau

SEQ ID NO: 851022 - RNA, 19 nt, Homo sapiens
  misc_RNA (1)...(19): siRNA sense strand
aauaaauacugccgguuaa

SEQ ID NO: 851023 - RNA, 19 nt, Homo sapiens
  misc_RNA (1)...(19): siRNA sense strand
ugacgauggugauggaauu

SEQ ID NO: 851024 - RNA, 19 nt, Homo sapiens
  misc_RNA (1)...(19): siRNA sense strand
gaauaagagaugucaguug

SEQ ID NO: 851025 - RNA, 19 nt, Homo sapiens
  misc_RNA (1)...(19): siRNA sense strand
gaucacaagaggcccauuu

SEQ ID NO: 851026 - RNA, 19 nt, Homo sapiens
  misc_RNA (1)...(19): siRNA sense strand
gauuguggauauucaucua

SEQ ID NO: 851027 - RNA, 19 nt, Homo sapiens
  misc_RNA (1)...(19): siRNA sense strand
gcaggagggcgaagagaaa

SEQ ID NO: 851028 - RNA, 19 nt, Homo sapiens
  misc_RNA (1)...(19): siRNA sense strand
guaacuagaagcugcauga

SEQ ID NO: 851029 - RNA, 19 nt, Homo sapiens
  misc_RNA (1)...(19): siRNA sense strand
gaaaauagcagcugcaaag

SEQ ID NO: 851030 - RNA, 19 nt, Homo sapiens
  misc_RNA (1)...(19): siRNA sense strand
ggaaguaagccaagagaag

SEQ ID NO: 851031 - RNA, 19 nt, Homo sapiens
  misc_RNA (1)...(19): siRNA sense strand
ugauauuccuacucccuua

SEQ ID NO: 851032 - RNA, 19 nt, Homo sapiens
  misc_RNA (1)...(19): siRNA sense strand
gauguugccugcacugaag

SEQ ID NO: 851033 - RNA, 19 nt, Homo sapiens
  misc_RNA (1)...(19): siRNA sense strand
caucugaaggagaaauuua

SEQ ID NO: 851034 - RNA, 19 nt, Homo sapiens
  misc_RNA (1)...(19): siRNA sense strand
ggugauaguuguguugaau

SEQ ID NO: 851035 - RNA, 19 nt, Homo sapiens
  misc_RNA (1)...(19): siRNA sense strand
gccaagagcuuaguugaac

SEQ ID NO: 851036 - RNA, 19 nt, Homo sapiens
  misc_RNA (1)...(19): siRNA sense strand
cuaauaaccagucuuucua

SEQ ID NO: 851037 - RNA, 19 nt, Homo sapiens
  misc_RNA (1)...(19): siRNA sense strand
ggaguccugucuguaacua

SEQ ID NO: 851038 - RNA, 19 nt, Homo sapiens
  misc_RNA (1)...(19): siRNA sense strand
cuacagcaauagagaacaa

SEQ ID NO: 851039 - RNA, 19 nt, Homo sapiens
  misc_RNA (1)...(19): siRNA sense strand
aaagauacacauccugaaa

SEQ ID NO: 851040 - RNA, 19 nt, Homo sapiens
  misc_RNA (1)...(19): siRNA sense strand
ccaagggaguccugucugu

SEQ ID NO: 851041 - RNA, 19 nt, Homo sapiens
  misc_RNA (1)...(19): siRNA sense strand
gaaagacugcaucgaaucu

SEQ ID NO: 851042 - RNA, 19 nt, Homo sapiens
  misc_RNA (1)...(19): siRNA sense strand
auacauguuugcugugaaa

SEQ ID NO: 851043 - RNA, 19 nt, Homo sapiens
  misc_RNA (1)...(19): siRNA sense strand
gaugucaguugcacuccuu

SEQ ID NO: 851044 - RNA, 19 nt, Homo sapiens
  misc_RNA (1)...(19): siRNA sense strand
gcuaauaaccagucuuucu

SEQ ID NO: 851045 - RNA, 19 nt, Homo sapiens
  misc_RNA (1)...(19): siRNA sense strand
ucuccacacuguaauggua

SEQ ID NO: 851046 - RNA, 19 nt, Homo sapiens
  misc_RNA (1)...(19): siRNA sense strand
uaugaaagacugcaucgaa

SEQ ID NO: 851047 - RNA, 19 nt, Homo sapiens
  misc_RNA (1)...(19): siRNA sense strand
agaaaggcaugcaaagaca

SEQ ID NO: 851048 - RNA, 19 nt, Homo sapiens
  misc_RNA (1)...(19): siRNA sense strand
cuaaaugacaugauagaug

SEQ ID NO: 851049 - RNA, 19 nt, Homo sapiens
  misc_RNA (1)...(19): siRNA sense strand
uguaguggcugguugacaa

SEQ ID NO: 851050 - RNA, 19 nt, Homo sapiens
  misc_RNA (1)...(19): siRNA sense strand
ggauguaugggaacuaaug

SEQ ID NO: 851051 - RNA, 19 nt, Homo sapiens
  misc_RNA (1)...(19): siRNA sense strand
gagaaaggcaugcaaagac

SEQ ID NO: 851052 - RNA, 19 nt, Homo sapiens
  misc_RNA (1)...(19): siRNA sense strand
gaagggagugaaacagguu

SEQ ID NO: 851053 - RNA, 19 nt, Homo sapiens
  misc_RNA (1)...(19): siRNA sense strand
ucauguaccuguccuagca

SEQ ID NO: 851054 - RNA, 19 nt, Homo sapiens
  misc_RNA (1)...(19): siRNA sense strand
gguaauacuuguguagaag

SEQ ID NO: 851055 - RNA, 19 nt, Homo sapiens
  misc_RNA (1)...(19): siRNA sense strand
gguccaaacuaaaugacau

SEQ ID NO: 851056 - RNA, 19 nt, Homo sapiens
  misc_RNA (1)...(19): siRNA sense strand
ggaugauggugauaguugu

SEQ ID NO: 851057 - RNA, 19 nt, Homo sapiens
  misc_RNA (1)...(19): siRNA sense strand
aggcuuaucuccacacugu

SEQ ID NO: 851058 - RNA, 19 nt, Homo sapiens
  misc_RNA (1)...(19): siRNA sense strand
gccaagagaaggaaacaga

SEQ ID NO: 851059 - RNA, 19 nt, Homo sapiens
  misc_RNA (1)...(19): siRNA sense strand
aaacauaucugcgaaaaca

SEQ ID NO: 851060 - RNA, 19 nt, Homo sapiens
  misc_RNA (1)...(19): siRNA sense strand
cagcuugucccauguguug

SEQ ID NO: 851061 - RNA, 19 nt, Homo sapiens
  misc_RNA (1)...(19): siRNA sense strand
gugaugaacauauccagaa

SEQ ID NO: 851062 - RNA, 19 nt, Homo sapiens
  misc_RNA (1)...(19): siRNA sense strand
gcuuaucuccacacuguaa

SEQ ID NO: 851063 - RNA, 19 nt, Homo sapiens
  misc_RNA (1)...(19): siRNA sense strand
uggaaauccugcucuugaa

SEQ ID NO: 851064 - RNA, 19 nt, Homo sapiens
  misc_RNA (1)...(19): siRNA sense strand
gguagugauuguggauauu

SEQ ID NO: 851065 - RNA, 19 nt, Homo sapiens
  misc_RNA (1)...(19): siRNA sense strand
uuaauugacucgaguuguc

SEQ ID NO: 851066 - RNA, 19 nt, Homo sapiens
  misc_RNA (1)...(19): siRNA sense strand
augcagggaugaaguaguu

SEQ ID NO: 851067 - RNA, 19 nt, Homo sapiens
  misc_RNA (1)...(19): siRNA sense strand
auaguuguguugaauguug

SEQ ID NO: 851068 - RNA, 19 nt, Homo sapiens
  misc_RNA (1)...(19): siRNA sense strand
gaagaugguaauacuugug

SEQ ID NO: 851069 - RNA, 19 nt, Homo sapiens
  misc_RNA (1)...(19): siRNA sense strand
gaaaggcaugcaaagacaa

SEQ ID NO: 851070 - RNA, 19 nt, Homo sapiens
  misc_RNA (1)...(19): siRNA sense strand
guuguuggauggauguaug

SEQ ID NO: 851071 - RNA, 19 nt, Homo sapiens
  misc_RNA (1)...(19): siRNA sense strand
ugauaguuguguugaaugu

SEQ ID NO: 851072 - RNA, 19 nt, Homo sapiens
  misc_RNA (1)...(19): siRNA sense strand
caaagacaauagauauagc

SEQ ID NO: 851073 - RNA, 19 nt, Homo sapiens
  misc_RNA (1)...(19): siRNA sense strand
gcggugcuguccacaugaa

SEQ ID NO: 851074 - RNA, 19 nt, Homo sapiens
  misc_RNA (1)...(19): siRNA sense strand
auaaaguccuccgagcaua

SEQ ID NO: 851075 - RNA, 19 nt, Homo sapiens
  misc_RNA (1)...(19): siRNA sense strand
ugacucgaguugucuuuua

SEQ ID NO: 851076 - RNA, 19 nt, Homo sapiens
  misc_RNA (1)...(19): siRNA sense strand
gaccaaagauacacauccu

SEQ ID NO: 851077 - RNA, 19 nt, Homo sapiens
  misc_RNA (1)...(19): siRNA sense strand
gcacugaagaugguaauac

SEQ ID NO: 851078 - RNA, 19 nt, Homo sapiens
  misc_RNA (1)...(19): siRNA sense strand
gcagauuccccucuacaua

SEQ ID NO: 851079 - RNA, 19 nt, Homo sapiens
  misc_RNA (1)...(19): siRNA sense strand
gggcagaagagcagacaug

SEQ ID NO: 851080 - RNA, 19 nt, Homo sapiens
  misc_RNA (1)...(19): siRNA sense strand
uacagucauuuauggcuaa

SEQ ID NO: 851081 - RNA, 19 nt, Homo sapiens
  misc_RNA (1)...(19): siRNA sense strand
guugaugcuuuacgcaaga

SEQ ID NO: 851082 - RNA, 19 nt, Homo sapiens
  misc_RNA (1)...(19): siRNA sense strand
gaagaggaacgaguaagag

SEQ ID NO: 851083 - RNA, 19 nt, Homo sapiens
  misc_RNA (1)...(19): siRNA sense strand
gaugaggaaaucuuuaucu

SEQ ID NO: 851084 - RNA, 19 nt, Homo sapiens
  misc_RNA (1)...(19): siRNA sense strand
ugacaagaccaaagauaca

SEQ ID NO: 851085 - RNA, 19 nt, Homo sapiens
  misc_RNA (1)...(19): siRNA sense strand
gaaaagcaagauacugaaa

SEQ ID NO: 851086 - RNA, 19 nt, Homo sapiens
  misc_RNA (1)...(19): siRNA sense strand
cugaagagaacgacacaaa

SEQ ID NO: 851087 - RNA, 19 nt, Homo sapiens
  misc_RNA (1)...(19): siRNA sense strand
ugaacacggugaugacucu

SEQ ID NO: 851088 - RNA, 19 nt, Homo sapiens
  misc_RNA (1)...(19): siRNA sense strand
ugguaauacuuguguagaa

SEQ ID NO: 851089 - RNA, 19 nt, Homo sapiens
  misc_RNA (1)...(19): siRNA sense strand
gcacugcccucgucuuuga

SEQ ID NO: 851090 - RNA, 19 nt, Homo sapiens
  misc_RNA (1)...(19): siRNA sense strand
ggcaagagcuucugcuaca

SEQ ID NO: 851091 - RNA, 19 nt, Homo sapiens
  misc_RNA (1)...(19): siRNA sense strand
gcucggaccucaccaagca

SEQ ID NO: 851092 - RNA, 19 nt, Homo sapiens
  misc_RNA (1)...(19): siRNA sense strand
gggagaaacccuucaagug

SEQ ID NO: 851093 - RNA, 19 nt, Homo sapiens
  misc_RNA (1)...(19): siRNA sense strand
guacgcauguggcgacugu

SEQ ID NO: 851094 - RNA, 19 nt, Homo sapiens
  misc_RNA (1)...(19): siRNA sense strand
ggcaagugcuuuggcaaga

SEQ ID NO: 851095 - RNA, 19 nt, Homo sapiens
  misc_RNA (1)...(19): siRNA sense strand
ccgcuuccguugccuagaa

SEQ ID NO: 851096 - RNA, 19 nt, Homo sapiens
  misc_RNA (1)...(19): siRNA sense strand
gcacacacacgggcgagaa

SEQ ID NO: 851097 - RNA, 19 nt, Homo sapiens
  misc_RNA (1)...(19): siRNA sense strand
gccacaagccacacaaaug

SEQ ID NO: 851098 - RNA, 19 nt, Homo sapiens
  misc_RNA (1)...(19): siRNA sense strand
ggccagacccucuacaucu

SEQ ID NO: 851099 - RNA, 19 nt, Homo sapiens
  misc_RNA (1)...(19): siRNA sense strand
gcaagugcuuuggcaagag

SEQ ID NO: 851100 - RNA, 19 nt, Homo sapiens
  misc_RNA (1)...(19): siRNA sense strand
ccacaugcgugcgccacuu

SEQ ID NO: 851101 - RNA, 19 nt, Homo sapiens
  misc_RNA (1)...(19): siRNA sense strand
ccacaagccacacaaaugc

SEQ ID NO: 851102 - RNA, 19 nt, Homo sapiens
  misc_RNA (1)...(19): siRNA sense strand
gagaagccguacgcaugug

SEQ ID NO: 851103 - RNA, 19 nt, Homo sapiens
  misc_RNA (1)...(19): siRNA sense strand
cgagaagccguacgcaugu

SEQ ID NO: 851104 - RNA, 19 nt, Homo sapiens
  misc_RNA (1)...(19): siRNA sense strand
gcaagagcuucugcuacag

SEQ ID NO: 851105 - RNA, 19 nt, Homo sapiens
  misc_RNA (1)...(19): siRNA sense strand
aagccaggguucucugugu

SEQ ID NO: 851106 - RNA, 19 nt, Homo sapiens
  misc_RNA (1)...(19): siRNA sense strand
ggccacaagccacacaaau

SEQ ID NO: 851107 - RNA, 19 nt, Homo sapiens
  misc_RNA (1)...(19): siRNA sense strand
gaauguggcaagagcuucu

SEQ ID NO: 851108 - RNA, 19 nt, Homo sapiens
  misc_RNA (1)...(19): siRNA sense strand
gcgaauguggcaagagcuu

SEQ ID NO: 851109 - RNA, 19 nt, Homo sapiens
  misc_RNA (1)...(19): siRNA sense strand
guacagaccugccuaacau

SEQ ID NO: 851110 - RNA, 19 nt, Homo sapiens
  misc_RNA (1)...(19): siRNA sense strand
cuacaacccuugccaaaca

SEQ ID NO: 851111 - RNA, 19 nt, Homo sapiens
  misc_RNA (1)...(19): siRNA sense strand
aaacacagcccacuccauu

SEQ ID NO: 851112 - RNA, 19 nt, Homo sapiens
  misc_RNA (1)...(19): siRNA sense strand
gagccaagcagauuccaaa

SEQ ID NO: 851113 - RNA, 19 nt, Homo sapiens
  misc_RNA (1)...(19): siRNA sense strand
ccaagcagauuccaaacca

SEQ ID NO: 851114 - RNA, 19 nt, Homo sapiens
  misc_RNA (1)...(19): siRNA sense strand
gccaacgcuuccucaauga

SEQ ID NO: 851115 - RNA, 19 nt, Homo sapiens
  misc_RNA (1)...(19): siRNA sense strand
agccaacgcuuccucaaug

SEQ ID NO: 851116 - RNA, 19 nt, Homo sapiens
  misc_RNA (1)...(19): siRNA sense strand
agacucaggguuccaguaa

SEQ ID NO: 851117 - RNA, 19 nt, Homo sapiens
  misc_RNA (1)...(19): siRNA sense strand
acacagcccacuccauuuc

SEQ ID NO: 851118 - RNA, 19 nt, Homo sapiens
  misc_RNA (1)...(19): siRNA sense strand
cgggaucccucggugaaga

SEQ ID NO: 851119 - RNA, 19 nt, Homo sapiens
  misc_RNA (1)...(19): siRNA sense strand
caacgcuuccucaaugauc

SEQ ID NO: 851120 - RNA, 19 nt, Homo sapiens
  misc_RNA (1)...(19): siRNA sense strand
gcagauuccaaaccacuac

SEQ ID NO: 851121 - RNA, 19 nt, Homo sapiens
  misc_RNA (1)...(19): siRNA sense strand
cagccaacgcuuccucaau

SEQ ID NO: 851122 - RNA, 19 nt, Homo sapiens
  misc_RNA (1)...(19): siRNA sense strand
gaacuuggaucauucauua

SEQ ID NO: 851123 - RNA, 19 nt, Homo sapiens
  misc_RNA (1)...(19): siRNA sense strand
gaucauucauuacagacua

SEQ ID NO: 851124 - RNA, 19 nt, Homo sapiens
  misc_RNA (1)...(19): siRNA sense strand
gcaagugguuucuccuuuc

SEQ ID NO: 851125 - RNA, 19 nt, Homo sapiens
  misc_RNA (1)...(19): siRNA sense strand
agagugaacuuggaucauu

SEQ ID NO: 851126 - RNA, 19 nt, Homo sapiens
  misc_RNA (1)...(19): siRNA sense strand
gaagagugaacuuggauca

SEQ ID NO: 851127 - RNA, 19 nt, Homo sapiens
  misc_RNA (1)...(19): siRNA sense strand
gcaaagcaacgagcucuau

SEQ ID NO: 851128 - RNA, 19 nt, Homo sapiens
  misc_RNA (1)...(19): siRNA sense strand
gaccacuucuucacugaga

SEQ ID NO: 851129 - RNA, 19 nt, Homo sapiens
  misc_RNA (1)...(19): siRNA sense strand
gagugaacuuggaucauuc

SEQ ID NO: 851130 - RNA, 19 nt, Homo sapiens
  misc_RNA (1)...(19): siRNA sense strand
ugaaugagauggucuugac

SEQ ID NO: 851131 - RNA, 19 nt, Homo sapiens
  misc_RNA (1)...(19): siRNA sense strand
caaggugacuguccugaac

SEQ ID NO: 851132 - RNA, 19 nt, Homo sapiens
  misc_RNA (1)...(19): siRNA sense strand
uggaggagcuggugaagca

SEQ ID NO: 851133 - RNA, 19 nt, Homo sapiens
  misc_RNA (1)...(19): siRNA sense strand
gaacuaugccuccccgaua

SEQ ID NO: 851134 - RNA, 19 nt, Homo sapiens
  misc_RNA (1)...(19): siRNA sense strand
aagcugcccucguccauug

SEQ ID NO: 851135 - RNA, 19 nt, Homo sapiens
  misc_RNA (1)...(19): siRNA sense strand
aagccuaccuggagaagug

SEQ ID NO: 851136 - RNA, 19 nt, Homo sapiens
  misc_RNA (1)...(19): siRNA sense strand
gaaccagcuucuugcaaaa

SEQ ID NO: 851137 - RNA, 19 nt, Homo sapiens
  misc_RNA (1)...(19): siRNA sense strand
caagcugugugaaggugaa

SEQ ID NO: 851138 - RNA, 19 nt, Homo sapiens
  misc_RNA (1)...(19): siRNA sense strand
guugaagagugaacuugga

SEQ ID NO: 851139 - RNA, 19 nt, Homo sapiens
  misc_RNA (1)...(19): siRNA sense strand
caagugagaguuauuugca

SEQ ID NO: 851140 - RNA, 19 nt, Homo sapiens
  misc_RNA (1)...(19): siRNA sense strand
gggaccacuucuucacuga

SEQ ID NO: 851141 - RNA, 19 nt, Homo sapiens
  misc_RNA (1)...(19): siRNA sense strand
ugacuguccugaacuaugc

SEQ ID NO: 851142 - RNA, 19 nt, Homo sapiens
  misc_RNA (1)...(19): siRNA sense strand
gaggaggccagcagugaga

SEQ ID NO: 851143 - RNA, 19 nt, Homo sapiens
  misc_RNA (1)...(19): siRNA sense strand
ucaggcggcuguugaagag

SEQ ID NO: 851144 - RNA, 19 nt, Homo sapiens
  misc_RNA (1)...(19): siRNA sense strand
gaagaucaagcugugugaa

SEQ ID NO: 851145 - RNA, 19 nt, Homo sapiens
  misc_RNA (1)...(19): siRNA sense strand
cggcuucgcucccauucug

SEQ ID NO: 851146 - RNA, 19 nt, Homo sapiens
  misc_RNA (1)...(19): siRNA sense strand
caaagcaacgagcucuaug

SEQ ID NO: 851147 - RNA, 19 nt, Homo sapiens
  misc_RNA (1)...(19): siRNA sense strand
gcccaagugagaguuauuu

SEQ ID NO: 851148 - RNA, 19 nt, Homo sapiens
  misc_RNA (1)...(19): siRNA sense strand
ggcaauauuuuauccaguu

SEQ ID NO: 851149 - RNA, 19 nt, Homo sapiens
  misc_RNA (1)...(19): siRNA sense strand
agcaagugguuucuccuuu

SEQ ID NO: 851150 - RNA, 19 nt, Homo sapiens
  misc_RNA (1)...(19): siRNA sense strand
agacugcugugaucaacgu

SEQ ID NO: 851151 - RNA, 19 nt, Homo sapiens
  misc_RNA (1)...(19): siRNA sense strand
gcucuaugcccugaacgaa

SEQ ID NO: 851152 - RNA, 19 nt, Homo sapiens
  misc_RNA (1)...(19): siRNA sense strand
ccucguccauuguccagau

SEQ ID NO: 851153 - RNA, 19 nt, Homo sapiens
  misc_RNA (1)...(19): siRNA sense strand
ccaaggugacuguccugaa

SEQ ID NO: 851154 - RNA, 19 nt, Homo sapiens
  misc_RNA (1)...(19): siRNA sense strand
gaucaagcugugugaaggu

SEQ ID NO: 851155 - RNA, 19 nt, Homo sapiens
  misc_RNA (1)...(19): siRNA sense strand
ucuaugcccugaacgaaaa

SEQ ID NO: 851156 - RNA, 19 nt, Homo sapiens
  misc_RNA (1)...(19): siRNA sense strand
uuggaucauucauuacaga

SEQ ID NO: 851157 - RNA, 19 nt, Homo sapiens
  misc_RNA (1)...(19): siRNA sense strand
ggccagcagugagaacaag

SEQ ID NO: 851158 - RNA, 19 nt, Homo sapiens
  misc_RNA (1)...(19): siRNA sense strand
caagugguuucuccuuucc

SEQ ID NO: 851159 - RNA, 19 nt, Homo sapiens
  misc_RNA (1)...(19): siRNA sense strand
ccuagaccgcgcuucauga

SEQ ID NO: 851160 - RNA, 19 nt, Homo sapiens
  misc_RNA (1)...(19): siRNA sense strand
agacgaagcugccuuguua

SEQ ID NO: 851161 - RNA, 19 nt, Homo sapiens
  misc_RNA (1)...(19): siRNA sense strand
gcagaugacugaacaaguu

SEQ ID NO: 851162 - RNA, 19 nt, Homo sapiens
  misc_RNA (1)...(19): siRNA sense strand
guaaggauguagauguuua

SEQ ID NO: 851163 - RNA, 19 nt, Homo sapiens
  misc_RNA (1)...(19): siRNA sense strand
caauggagcucaucuggaa

SEQ ID NO: 851164 - RNA, 19 nt, Homo sapiens
  misc_RNA (1)...(19): siRNA sense strand
gaacagaaacaggugauuu

SEQ ID NO: 851165 - RNA, 19 nt, Homo sapiens
  misc_RNA (1)...(19): siRNA sense strand
ccauugaucugcacuacua

SEQ ID NO: 851166 - RNA, 19 nt, Homo sapiens
  misc_RNA (1)...(19): siRNA sense strand
gaacagacuuaugaguuga

SEQ ID NO: 851167 - RNA, 19 nt, Homo sapiens
  misc_RNA (1)...(19): siRNA sense strand
gcuccaggaugaugacaua

SEQ ID NO: 851168 - RNA, 19 nt, Homo sapiens
  misc_RNA (1)...(19): siRNA sense strand
gagcauguauggaggaaau

SEQ ID NO: 851169 - RNA, 19 nt, Homo sapiens
  misc_RNA (1)...(19): siRNA sense strand
gggagaugcugguauguga

SEQ ID NO: 851170 - RNA, 19 nt, Homo sapiens
  misc_RNA (1)...(19): siRNA sense strand
ggauguagauguuuacucu

SEQ ID NO: 851171 - RNA, 19 nt, Homo sapiens
  misc_RNA (1)...(19): siRNA sense strand
cagcagaacagacuuauga

SEQ ID NO: 851172 - RNA, 19 nt, Homo sapiens
  misc_RNA (1)...(19): siRNA sense strand
ccaagaagaaccaaaugua

SEQ ID NO: 851173 - RNA, 19 nt, Homo sapiens
  misc_RNA (1)...(19): siRNA sense strand
cgacgcagcuucucuccuu

SEQ ID NO: 851174 - RNA, 19 nt, Homo sapiens
  misc_RNA (1)...(19): siRNA sense strand
ugagaaaacucuucaauga

SEQ ID NO: 851175 - RNA, 19 nt, Homo sapiens
  misc_RNA (1)...(19): siRNA sense strand
ugacauccaucaaguaauc

SEQ ID NO: 851176 - RNA, 19 nt, Homo sapiens
  misc_RNA (1)...(19): siRNA sense strand
caaguucgcagcauuugua

SEQ ID NO: 851177 - RNA, 19 nt, Homo sapiens
  misc_RNA (1)...(19): siRNA sense strand
ugaaucccauggaaucuuu

SEQ ID NO: 851178 - RNA, 19 nt, Homo sapiens
  misc_RNA (1)...(19): siRNA sense strand
gggaaaguaucgcgaguuc

SEQ ID NO: 851179 - RNA, 19 nt, Homo sapiens
  misc_RNA (1)...(19): siRNA sense strand
caagaagaaccaaauguau

SEQ ID NO: 851180 - RNA, 19 nt, Homo sapiens
  misc_RNA (1)...(19): siRNA sense strand
agaacagacuuaugaguug

SEQ ID NO: 851181 - RNA, 19 nt, Homo sapiens
  misc_RNA (1)...(19): siRNA sense strand
gacagaugcucuccaagga

SEQ ID NO: 851182 - RNA, 19 nt, Homo sapiens
  misc_RNA (1)...(19): siRNA sense strand
gagaauugacgaagaguug

SEQ ID NO: 851183 - RNA, 19 nt, Homo sapiens
  misc_RNA (1)...(19): siRNA sense strand
guagauguuuacucucaaa

SEQ ID NO: 851184 - RNA, 19 nt, Homo sapiens
  misc_RNA (1)...(19): siRNA sense strand
gauguuuacucucaaaucu

SEQ ID NO: 851185 - RNA, 19 nt, Homo sapiens
  misc_RNA (1)...(19): siRNA sense strand
cagaaaaucucaauugguu

SEQ ID NO: 851186 - RNA, 19 nt, Homo sapiens
  misc_RNA (1)...(19): siRNA sense strand
gacgaagaguugacuggaa

SEQ ID NO: 851187 - RNA, 19 nt, Homo sapiens
  misc_RNA (1)...(19): siRNA sense strand
gaaaguaucgcgaguucca

SEQ ID NO: 851188 - RNA, 19 nt, Homo sapiens
  misc_RNA (1)...(19): siRNA sense strand
gaaccugugugagauucuu

SEQ ID NO: 851189 - RNA, 19 nt, Homo sapiens
  misc_RNA (1)...(19): siRNA sense strand
cagaacagacuuaugaguu

SEQ ID NO: 851190 - RNA, 19 nt, Homo sapiens
  misc_RNA (1)...(19): siRNA sense strand
guggaaaugcugagacuuu

SEQ ID NO: 851191 - RNA, 19 nt, Homo sapiens
  misc_RNA (1)...(19): siRNA sense strand
gcagugagaauccaagcaa

SEQ ID NO: 851192 - RNA, 19 nt, Homo sapiens
  misc_RNA (1)...(19): siRNA sense strand
guuggcagccuuugaguuu

SEQ ID NO: 851193 - RNA, 19 nt, Homo sapiens
  misc_RNA (1)...(19): siRNA sense strand
cagagauggugccaaguug

SEQ ID NO: 851194 - RNA, 19 nt, Homo sapiens
  misc_RNA (1)...(19): siRNA sense strand
caugacagcuucuggaacu

SEQ ID NO: 851195 - RNA, 19 nt, Homo sapiens
  misc_RNA (1)...(19): siRNA sense strand
acgaagaguugacuggaaa

SEQ ID NO: 851196 - RNA, 19 nt, Homo sapiens
  misc_RNA (1)...(19): siRNA sense strand
ccagagaauugacgaagag

SEQ ID NO: 851197 - RNA, 19 nt, Homo sapiens
  misc_RNA (1)...(19): siRNA sense strand
gcaagcuccuccagucaca

SEQ ID NO: 851198 - RNA, 19 nt, Homo sapiens
  misc_RNA (1)...(19): siRNA sense strand
ggaugaggcccgacagaug

SEQ ID NO: 851199 - RNA, 19 nt, Homo sapiens
  misc_RNA (1)...(19): siRNA sense strand
gggaacacccagacacuga

SEQ ID NO: 851200 - RNA, 19 nt, Homo sapiens
  misc_RNA (1)...(19): siRNA sense strand
caaugaaucccauggaauc

SEQ ID NO: 851201 - RNA, 19 nt, Homo sapiens
  misc_RNA (1)...(19): siRNA sense strand
gagaugcugguaugugaaa

SEQ ID NO: 851202 - RNA, 19 nt, Homo sapiens
  misc_RNA (1)...(19): siRNA sense strand
acagguuccucagggauua

SEQ ID NO: 851203 - RNA, 19 nt, Homo sapiens
  misc_RNA (1)...(19): siRNA sense strand
guucgcagcauuuguaaga

SEQ ID NO: 851204 - RNA, 19 nt, Homo sapiens
  misc_RNA (1)...(19): siRNA sense strand
gagaauccaagcaaacaug

SEQ ID NO: 851205 - RNA, 19 nt, Homo sapiens
  misc_RNA (1)...(19): siRNA sense strand
cugaguaauugguaucauu

SEQ ID NO: 851206 - RNA, 19 nt, Homo sapiens
  misc_RNA (1)...(19): siRNA sense strand
gaaagccguccgcaacaau

SEQ ID NO: 851207 - RNA, 19 nt, Homo sapiens
  misc_RNA (1)...(19): siRNA sense strand
ucaauugguucgagugagu

SEQ ID NO: 851208 - RNA, 19 nt, Homo sapiens
  misc_RNA (1)...(19): siRNA sense strand
gugcauggagaaucugaua

SEQ ID NO: 851209 - RNA, 19 nt, Homo sapiens
  misc_RNA (1)...(19): siRNA sense strand
aagaagaccugugcaugga

SEQ ID NO: 851210 - RNA, 19 nt, Homo sapiens
  misc_RNA (1)...(19): siRNA sense strand
ugacucggcucuuguacuc

SEQ ID NO: 851211 - RNA, 19 nt, Homo sapiens
  misc_RNA (1)...(19): siRNA sense strand
ugugcgagguggacaguuu

SEQ ID NO: 851212 - RNA, 19 nt, Homo sapiens
  misc_RNA (1)...(19): siRNA sense strand
cuaaagauccagccaaugg

SEQ ID NO: 851213 - RNA, 19 nt, Homo sapiens
  misc_RNA (1)...(19): siRNA sense strand
gaaaccuccuucaacaaaa

SEQ ID NO: 851214 - RNA, 19 nt, Homo sapiens
  misc_RNA (1)...(19): siRNA sense strand
gagcggauaccucugaaca

SEQ ID NO: 851215 - RNA, 19 nt, Homo sapiens
  misc_RNA (1)...(19): siRNA sense strand
cccuggagcugcacauuga

SEQ ID NO: 851216 - RNA, 19 nt, Homo sapiens
  misc_RNA (1)...(19): siRNA sense strand
guacgccucgggacuguuu

SEQ ID NO: 851217 - RNA, 19 nt, Homo sapiens
  misc_RNA (1)...(19): siRNA sense strand
gagccaacagucacuuuga

SEQ ID NO: 851218 - RNA, 19 nt, Homo sapiens
  misc_RNA (1)...(19): siRNA sense strand
gcagccaggucuccauuuu

SEQ ID NO: 851219 - RNA, 19 nt, Homo sapiens
  misc_RNA (1)...(19): siRNA sense strand
uguuuacucucaaaucuug

SEQ ID NO: 851220 - RNA, 19 nt, Homo sapiens
  misc_RNA (1)...(19): siRNA sense strand
ugaaagccguccgcaacaa

SEQ ID NO: 851221 - RNA, 19 nt, Homo sapiens
  misc_RNA (1)...(19): siRNA sense strand
gaacuucugaguaauuggu

SEQ ID NO: 851222 - RNA, 19 nt, Homo sapiens
  misc_RNA (1)...(19): siRNA sense strand
ugcaauugcugcuaaagau

SEQ ID NO: 851223 - RNA, 19 nt, Homo sapiens
  misc_RNA (1)...(19): siRNA sense strand
cuauuucgguuccaacaug

SEQ ID NO: 851224 - RNA, 19 nt, Homo sapiens
  misc_RNA (1)...(19): siRNA sense strand
ccguaaggauguagauguu

SEQ ID NO: 851225 - RNA, 19 nt, Homo sapiens
  misc_RNA (1)...(19): siRNA sense strand
gagacgaagcugccuuguu

SEQ ID NO: 851226 - RNA, 19 nt, Homo sapiens
  misc_RNA (1)...(19): siRNA sense strand
cagccaugaugcucaguga

SEQ ID NO: 851227 - RNA, 19 nt, Homo sapiens
  misc_RNA (1)...(19): siRNA sense strand
ucagagauggugccaaguu

SEQ ID NO: 851228 - RNA, 19 nt, Homo sapiens
  misc_RNA (1)...(19): siRNA sense strand
ggcgugaauuccaagaaga

SEQ ID NO: 851229 - RNA, 19 nt, Homo sapiens
  misc_RNA (1)...(19): siRNA sense strand
uugaugacgucucggauug

SEQ ID NO: 851230 - RNA, 19 nt, Homo sapiens
  misc_RNA (1)...(19): siRNA sense strand
uggcagccuuugaguuuga

SEQ ID NO: 851231 - RNA, 19 nt, Homo sapiens
  misc_RNA (1)...(19): siRNA sense strand
ccuagugacucggcucuug

SEQ ID NO: 851232 - RNA, 19 nt, Homo sapiens
  misc_RNA (1)...(19): siRNA sense strand
gcagaacagacuuaugagu

SEQ ID NO: 851233 - RNA, 19 nt, Homo sapiens
  misc_RNA (1)...(19): siRNA sense strand
gcacuggcacgaggaaugu

SEQ ID NO: 851234 - RNA, 19 nt, Homo sapiens
  misc_RNA (1)...(19): siRNA sense strand
ccaggaugaugacauagag

SEQ ID NO: 851235 - RNA, 19 nt, Homo sapiens
  misc_RNA (1)...(19): siRNA sense strand
cugagcaacuggugguuug

SEQ ID NO: 851236 - RNA, 19 nt, Homo sapiens
  misc_RNA (1)...(19): siRNA sense strand
ggaggaaaugcaccagguu

SEQ ID NO: 851237 - RNA, 19 nt, Homo sapiens
  misc_RNA (1)...(19): siRNA sense strand
aagagaaggcucacuggaa

SEQ ID NO: 851238 - RNA, 19 nt, Homo sapiens
  misc_RNA (1)...(19): siRNA sense strand
ucgauuacuuugauuacug

SEQ ID NO: 851239 - RNA, 19 nt, Homo sapiens
  misc_RNA (1)...(19): siRNA sense strand
caccuggagucucucuuga

SEQ ID NO: 851240 - RNA, 19 nt, Homo sapiens
  misc_RNA (1)...(19): siRNA sense strand
gcccucaccuggagucucu

SEQ ID NO: 851241 - RNA, 19 nt, Homo sapiens
  misc_RNA (1)...(19): siRNA sense strand
ucacacaaccucuauuucg

SEQ ID NO: 851242 - RNA, 19 nt, Homo sapiens
  misc_RNA (1)...(19): siRNA sense strand
gcaccagguugcaauugcu

SEQ ID NO: 851243 - RNA, 19 nt, Homo sapiens
  misc_RNA (1)...(19): siRNA sense strand
ccaacagucacuuugauuc

SEQ ID NO: 851244 - RNA, 19 nt, Homo sapiens
  misc_RNA (1)...(19): siRNA sense strand
cagugagaauccaagcaaa

SEQ ID NO: 851245 - RNA, 19 nt, Homo sapiens
  misc_RNA (1)...(19): siRNA sense strand
gcaauugcugcuaaagauc

SEQ ID NO: 851246 - RNA, 19 nt, Homo sapiens
  misc_RNA (1)...(19): siRNA sense strand
gagcgaggcugcuuuucug

SEQ ID NO: 851247 - RNA, 19 nt, Homo sapiens
  misc_RNA (1)...(19): siRNA sense strand
guuccaacaugagagaguu

SEQ ID NO: 851248 - RNA, 19 nt, Homo sapiens
  misc_RNA (1)...(19): siRNA sense strand
gccaacagucacuuugauu

SEQ ID NO: 851249 - RNA, 19 nt, Homo sapiens
  misc_RNA (1)...(19): siRNA sense strand
agucacacaaccucuauuu

SEQ ID NO: 851250 - RNA, 19 nt, Homo sapiens
  misc_RNA (1)...(19): siRNA sense strand
cuaccgaucagucaucaga

SEQ ID NO: 851251 - RNA, 19 nt, Homo sapiens
  misc_RNA (1)...(19): siRNA sense strand
ggugagagcagcccagaac

SEQ ID NO: 851252 - RNA, 19 nt, Homo sapiens
  misc_RNA (1)...(19): siRNA sense strand
gaacacccagacacugaca

SEQ ID NO: 851253 - RNA, 19 nt, Homo sapiens
  misc_RNA (1)...(19): siRNA sense strand
ggagaugcugguaugugaa

SEQ ID NO: 851254 - RNA, 19 nt, Homo sapiens
  misc_RNA (1)...(19): siRNA sense strand
gguugcaauugcugcuaaa

SEQ ID NO: 851255 - RNA, 19 nt, Homo sapiens
  misc_RNA (1)...(19): siRNA sense strand
gggucgauuacuuugauua

SEQ ID NO: 851256 - RNA, 19 nt, Homo sapiens
  misc_RNA (1)...(19): siRNA sense strand
ucucagcagaacagacuua

SEQ ID NO: 851257 - RNA, 19 nt, Homo sapiens
  misc_RNA (1)...(19): siRNA sense strand
ggaacagaaacaggugauu

SEQ ID NO: 851258 - RNA, 19 nt, Homo sapiens
  misc_RNA (1)...(19): siRNA sense strand
acagaugccuugccccuuu

SEQ ID NO: 851259 - RNA, 19 nt, Homo sapiens
  misc_RNA (1)...(19): siRNA sense strand
gacagguuccucagggauu

SEQ ID NO: 851260 - RNA, 19 nt, Homo sapiens
  misc_RNA (1)...(19): siRNA sense strand
gauaguagcugaaauuaag

SEQ ID NO: 851261 - RNA, 19 nt, Homo sapiens
  misc_RNA (1)...(19): siRNA sense strand
cggcauagguucccucuua

SEQ ID NO: 851262 - RNA, 19 nt, Homo sapiens
  misc_RNA (1)...(19): siRNA sense strand
uaaagaggauggagauauu

SEQ ID NO: 851263 - RNA, 19 nt, Homo sapiens
  misc_RNA (1)...(19): siRNA sense strand
gauaucacauccaacaaga

SEQ ID NO: 851264 - RNA, 19 nt, Homo sapiens
  misc_RNA (1)...(19): siRNA sense strand
aaagauggcuucaccuaug

SEQ ID NO: 851265 - RNA, 19 nt, Homo sapiens
  misc_RNA (1)...(19): siRNA sense strand
cuacagaggugccauugug

SEQ ID NO: 851266 - RNA, 19 nt, Homo sapiens
  misc_RNA (1)...(19): siRNA sense strand
caacacagcaauaaacuuc

SEQ ID NO: 851267 - RNA, 19 nt, Homo sapiens
  misc_RNA (1)...(19): siRNA sense strand
ggauggagauauucuagca

SEQ ID NO: 851268 - RNA, 19 nt, Homo sapiens
  misc_RNA (1)...(19): siRNA sense strand
ggaaugauaguagcugaaa

SEQ ID NO: 851269 - RNA, 19 nt, Homo sapiens
  misc_RNA (1)...(19): siRNA sense strand
acacagcaauaaacuucua

SEQ ID NO: 851270 - RNA, 19 nt, Homo sapiens
  misc_RNA (1)...(19): siRNA sense strand
gagauauucuagcauccaa

SEQ ID NO: 851271 - RNA, 19 nt, Homo sapiens
  misc_RNA (1)...(19): siRNA sense strand
caacaacacagcaauaaac

SEQ ID NO: 851272 - RNA, 19 nt, Homo sapiens
  misc_RNA (1)...(19): siRNA sense strand
ggaccaaaauacauaaaga

SEQ ID NO: 851273 - RNA, 19 nt, Homo sapiens
  misc_RNA (1)...(19): siRNA sense strand
ucaaagauggcuucaccua

SEQ ID NO: 851274 - RNA, 19 nt, Homo sapiens
  misc_RNA (1)...(19): siRNA sense strand
uagguucccucuuacuuga

SEQ ID NO: 851275 - RNA, 19 nt, Homo sapiens
  misc_RNA (1)...(19): siRNA sense strand
gcaccugggcucugcacua

SEQ ID NO: 851276 - RNA, 19 nt, Homo sapiens
  misc_RNA (1)...(19): siRNA sense strand
gaaugauaguagcugaaau

SEQ ID NO: 851277 - RNA, 19 nt, Homo sapiens
  misc_RNA (1)...(19): siRNA sense strand
cacccucccuggacgauuu

SEQ ID NO: 851278 - RNA, 19 nt, Homo sapiens
  misc_RNA (1)...(19): siRNA sense strand
caagucgcguacauccuaa

SEQ ID NO: 851279 - RNA, 19 nt, Homo sapiens
  misc_RNA (1)...(19): siRNA sense strand
gaguacagccggaccaugu

SEQ ID NO: 851280 - RNA, 19 nt, Homo sapiens
  misc_RNA (1)...(19): siRNA sense strand
uaaaggaucacauaucaac

SEQ ID NO: 851281 - RNA, 19 nt, Homo sapiens
  misc_RNA (1)...(19): siRNA sense strand
caaagauggcuucaccuau

SEQ ID NO: 851282 - RNA, 19 nt, Homo sapiens
  misc_RNA (1)...(19): siRNA sense strand
ucacauccaacaagaaguu

SEQ ID NO: 851283 - RNA, 19 nt, Homo sapiens
  misc_RNA (1)...(19): siRNA sense strand
ggucgggcaucucuuccaa

SEQ ID NO: 851284 - RNA, 19 nt, Homo sapiens
  misc_RNA (1)...(19): siRNA sense strand
uagcugaaauuaagaacag

SEQ ID NO: 851285 - RNA, 19 nt, Homo sapiens
  misc_RNA (1)...(19): siRNA sense strand
gaggugccauugugggaau

SEQ ID NO: 851286 - RNA, 19 nt, Homo sapiens
  misc_RNA (1)...(19): siRNA sense strand
ugacauagacacugugaag

SEQ ID NO: 851287 - RNA, 19 nt, Homo sapiens
  misc_RNA (1)...(19): siRNA sense strand
acaagucgcguacauccua

SEQ ID NO: 851288 - RNA, 19 nt, Homo sapiens
  misc_RNA (1)...(19): siRNA sense strand
acacacaagucgcguacau

SEQ ID NO: 851289 - RNA, 19 nt, Homo sapiens
  misc_RNA (1)...(19): siRNA sense strand
ccaacaacacagcaauaaa

SEQ ID NO: 851290 - RNA, 19 nt, Homo sapiens
  misc_RNA (1)...(19): siRNA sense strand
cagcaauaaacuucuauga

SEQ ID NO: 851291 - RNA, 19 nt, Homo sapiens
  misc_RNA (1)...(19): siRNA sense strand
ccaagaguggcaucgagua

SEQ ID NO: 851292 - RNA, 19 nt, Homo sapiens
  misc_RNA (1)...(19): siRNA sense strand
gguucccucuuacuugaaa

SEQ ID NO: 851293 - RNA, 19 nt, Homo sapiens
  misc_RNA (1)...(19): siRNA sense strand
caccaacaacacagcaaua

SEQ ID NO: 851294 - RNA, 19 nt, Homo sapiens
  misc_RNA (1)...(19): siRNA sense strand
gaugacauagacacuguga

SEQ ID NO: 851295 - RNA, 19 nt, Homo sapiens
  misc_RNA (1)...(19): siRNA sense strand
ucaagcagcaccacuaucu

SEQ ID NO: 851296 - RNA, 19 nt, Homo sapiens
  misc_RNA (1)...(19): siRNA sense strand
gaacaggaccaaaauacau

SEQ ID NO: 851297 - RNA, 19 nt, Homo sapiens
  misc_RNA (1)...(19): siRNA sense strand
gaggauggagauauucuag

SEQ ID NO: 851298 - RNA, 19 nt, Homo sapiens
  misc_RNA (1)...(19): siRNA sense strand
guacagccggaccauguga

SEQ ID NO: 851299 - RNA, 19 nt, Homo sapiens
  misc_RNA (1)...(19): siRNA sense strand
ccucugccacgaugacaua

SEQ ID NO: 851300 - RNA, 19 nt, Homo sapiens
  misc_RNA (1)...(19): siRNA sense strand
guucaggaagcacggcaua

SEQ ID NO: 851301 - RNA, 19 nt, Homo sapiens
  misc_RNA (1)...(19): siRNA sense strand
caaagccauuuaccugcau

SEQ ID NO: 851302 - RNA, 19 nt, Homo sapiens
  misc_RNA (1)...(19): siRNA sense strand
aagauggcuucaccuaugu

SEQ ID NO: 851303 - RNA, 19 nt, Homo sapiens
  misc_RNA (1)...(19): siRNA sense strand
caccugggcucugcacuag

SEQ ID NO: 851304 - RNA, 19 nt, Homo sapiens
  misc_RNA (1)...(19): siRNA sense strand
auaaagaggauggagauau

SEQ ID NO: 851305 - RNA, 19 nt, Homo sapiens
  misc_RNA (1)...(19): siRNA sense strand
accacuaucuccccuauua

SEQ ID NO: 851306 - RNA, 19 nt, Homo sapiens
  misc_RNA (1)...(19): siRNA sense strand
ggaccacugcaaagccauu

SEQ ID NO: 851307 - RNA, 19 nt, Homo sapiens
  misc_RNA (1)...(19): siRNA sense strand
ucgcguacauccuaagucu

SEQ ID NO: 851308 - RNA, 19 nt, Homo sapiens
  misc_RNA (1)...(19): siRNA sense strand
cauagguucccucuuacuu

SEQ ID NO: 851309 - RNA, 19 nt, Homo sapiens
  misc_RNA (1)...(19): siRNA sense strand
cauaaagaggauggagaua

SEQ ID NO: 851310 - RNA, 19 nt, Homo sapiens
  misc_RNA (1)...(19): siRNA sense strand
acgaugacauagacacugu

SEQ ID NO: 851311 - RNA, 19 nt, Homo sapiens
  misc_RNA (1)...(19): siRNA sense strand
gcaccacuaucuccccuau

SEQ ID NO: 851312 - RNA, 19 nt, Homo sapiens
  misc_RNA (1)...(19): siRNA sense strand
uaucacauccaacaagaag

SEQ ID NO: 851313 - RNA, 19 nt, Homo sapiens
  misc_RNA (1)...(19): siRNA sense strand
guuuaaaggaucacauauc

SEQ ID NO: 851314 - RNA, 19 nt, Homo sapiens
  misc_RNA (1)...(19): siRNA sense strand
ggcauagguucccucuuac

SEQ ID NO: 851315 - RNA, 19 nt, Homo sapiens
  misc_RNA (1)...(19): siRNA sense strand
uaagaacaggaccaaaaua

SEQ ID NO: 851316 - RNA, 19 nt, Homo sapiens
  misc_RNA (1)...(19): siRNA sense strand
acauaaagaggauggagau

SEQ ID NO: 851317 - RNA, 19 nt, Homo sapiens
  misc_RNA (1)...(19): siRNA sense strand
gggaaugauaguagcugaa

SEQ ID NO: 851318 - RNA, 19 nt, Homo sapiens
  misc_RNA (1)...(19): siRNA sense strand
gauauucuagcauccaacu

SEQ ID NO: 851319 - RNA, 19 nt, Homo sapiens
  misc_RNA (1)...(19): siRNA sense strand
ggagauauucuagcaucca

SEQ ID NO: 851320 - RNA, 19 nt, Homo sapiens
  misc_RNA (1)...(19): siRNA sense strand
gacaagaggaggaccaauu

SEQ ID NO: 851321 - RNA, 19 nt, Homo sapiens
  misc_RNA (1)...(19): siRNA sense strand
cuugacaucuuaacuacuu

SEQ ID NO: 851322 - RNA, 19 nt, Homo sapiens
  misc_RNA (1)...(19): siRNA sense strand
cuacuucacugcaggaaag

SEQ ID NO: 851323 - RNA, 19 nt, Homo sapiens
  misc_RNA (1)...(19): siRNA sense strand
ggacacggagacccacauu

SEQ ID NO: 851324 - RNA, 19 nt, Homo sapiens
  misc_RNA (1)...(19): siRNA sense strand
gaacccacgccugguacua

SEQ ID NO: 851325 - RNA, 19 nt, Homo sapiens
  misc_RNA (1)...(19): siRNA sense strand
ggagacccacauuagguuu

SEQ ID NO: 851326 - RNA, 19 nt, Homo sapiens
  misc_RNA (1)...(19): siRNA sense strand
cugguacuaucugaauuua

SEQ ID NO: 851327 - RNA, 19 nt, Homo sapiens
  misc_RNA (1)...(19): siRNA sense strand
uugcuuccauucccacuaa

SEQ ID NO: 851328 - RNA, 19 nt, Homo sapiens
  misc_RNA (1)...(19): siRNA sense strand
acacggagacccacauuag

SEQ ID NO: 851329 - RNA, 19 nt, Homo sapiens
  misc_RNA (1)...(19): siRNA sense strand
gacacggagacccacauua

SEQ ID NO: 851330 - RNA, 19 nt, Homo sapiens
  misc_RNA (1)...(19): siRNA sense strand
acaagaggaggaccaauuc

SEQ ID NO: 851331 - RNA, 19 nt, Homo sapiens
  misc_RNA (1)...(19): siRNA sense strand
gugcuuggcagacagaguu

SEQ ID NO: 851332 - RNA, 19 nt, Homo sapiens
  misc_RNA (1)...(19): siRNA sense strand
uuagaguguuccuaugugu

SEQ ID NO: 851333 - RNA, 19 nt, Homo sapiens
  misc_RNA (1)...(19): siRNA sense strand
ccugguacuaucugaauuu

SEQ ID NO: 851334 - RNA, 19 nt, Homo sapiens
  misc_RNA (1)...(19): siRNA sense strand
ggucugggacuuagcugau

SEQ ID NO: 851335 - RNA, 19 nt, Homo sapiens
  misc_RNA (1)...(19): siRNA sense strand
gccugguacuaucugaauu

SEQ ID NO: 851336 - RNA, 19 nt, Homo sapiens
  misc_RNA (1)...(19): siRNA sense strand
uugcuugacaucuuaacua

SEQ ID NO: 851337 - RNA, 19 nt, Homo sapiens
  misc_RNA (1)...(19): siRNA sense strand
ucugggacuuagcugauga

SEQ ID NO: 851338 - RNA, 19 nt, Homo sapiens
  misc_RNA (1)...(19): siRNA sense strand
caaauuccuucuuucgaua

SEQ ID NO: 851339 - RNA, 19 nt, Homo sapiens
  misc_RNA (1)...(19): siRNA sense strand
cacgggaaguuguuauuua

SEQ ID NO: 851340 - RNA, 19 nt, Homo sapiens
  misc_RNA (1)...(19): siRNA sense strand
gcucaggggucaccuauua

SEQ ID NO: 851341 - RNA, 19 nt, Homo sapiens
  misc_RNA (1)...(19): siRNA sense strand
ggaccgggauggacaagug

SEQ ID NO: 851342 - RNA, 19 nt, Homo sapiens
  misc_RNA (1)...(19): siRNA sense strand
caccuucucuggacaguuu

SEQ ID NO: 851343 - RNA, 19 nt, Homo sapiens
  misc_RNA (1)...(19): siRNA sense strand
ccaaauuccuucuuucgau

SEQ ID NO: 851344 - RNA, 19 nt, Homo sapiens
  misc_RNA (1)...(19): siRNA sense strand
guuauggugucuacguaua

SEQ ID NO: 851345 - RNA, 19 nt, Homo sapiens
  misc_RNA (1)...(19): siRNA sense strand
gaacgguuauggugucuac

SEQ ID NO: 851346 - RNA, 19 nt, Homo sapiens
  misc_RNA (1)...(19): siRNA sense strand
ggacagagacaaccaagag

SEQ ID NO: 851347 - RNA, 19 nt, Homo sapiens
  misc_RNA (1)...(19): siRNA sense strand
gggaaguuguuauuuaaag

SEQ ID NO: 851348 - RNA, 19 nt, Homo sapiens
  misc_RNA (1)...(19): siRNA sense strand
gcacagcgacgucuucagu

SEQ ID NO: 851349 - RNA, 19 nt, Homo sapiens
  misc_RNA (1)...(19): siRNA sense strand
ggcagaugcucuuucagaa

SEQ ID NO: 851350 - RNA, 19 nt, Homo sapiens
  misc_RNA (1)...(19): siRNA sense strand
gggcagaugcucuuucaga

SEQ ID NO: 851351 - RNA, 19 nt, Homo sapiens
  misc_RNA (1)...(19): siRNA sense strand
acgggaaguuguuauuuaa

SEQ ID NO: 851352 - RNA, 19 nt, Homo sapiens
  misc_RNA (1)...(19): siRNA sense strand
gggaguacgugcucaugau

SEQ ID NO: 851353 - RNA, 19 nt, Homo sapiens
  misc_RNA (1)...(19): siRNA sense strand
gcuacggcgucauggagua

SEQ ID NO: 851354 - RNA, 19 nt, Homo sapiens
  misc_RNA (1)...(19): siRNA sense strand
ucagaacggugacaaguac

SEQ ID NO: 851355 - RNA, 19 nt, Homo sapiens
  misc_RNA (1)...(19): siRNA sense strand
auacccaaauuccuucuuu

SEQ ID NO: 851356 - RNA, 19 nt, Homo sapiens
  misc_RNA (1)...(19): siRNA sense strand
uauuauggguuguggauca

SEQ ID NO: 851357 - RNA, 19 nt, Homo sapiens
  misc_RNA (1)...(19): siRNA sense strand
gauaugaaggagaauggaa

SEQ ID NO: 851358 - RNA, 19 nt, Homo sapiens
  misc_RNA (1)...(19): siRNA sense strand
gcauuugggugcccuccau

SEQ ID NO: 851359 - RNA, 19 nt, Homo sapiens
  misc_RNA (1)...(19): siRNA sense strand
gugccgaguucacagaugu

SEQ ID NO: 851360 - RNA, 19 nt, Homo sapiens
  misc_RNA (1)...(19): siRNA sense strand
guccggaggugauggaagu

SEQ ID NO: 851361 - RNA, 19 nt, Homo sapiens
  misc_RNA (1)...(19): siRNA sense strand
ggacagccuccacaagaag

SEQ ID NO: 851362 - RNA, 19 nt, Homo sapiens
  misc_RNA (1)...(19): siRNA sense strand
ggagagaucacgggagaag

SEQ ID NO: 851363 - RNA, 19 nt, Homo sapiens
  misc_RNA (1)...(19): siRNA sense strand
gcgggaaggacacggguuu

SEQ ID NO: 851364 - RNA, 19 nt, Homo sapiens
  misc_RNA (1)...(19): siRNA sense strand
ucacgggaaguuguuauuu

SEQ ID NO: 851365 - RNA, 19 nt, Homo sapiens
  misc_RNA (1)...(19): siRNA sense strand
agauggcaguuauuacgaa

SEQ ID NO: 851366 - RNA, 19 nt, Homo sapiens
  misc_RNA (1)...(19): siRNA sense strand
caaccaagagacacucauc

SEQ ID NO: 851367 - RNA, 19 nt, Homo sapiens
  misc_RNA (1)...(19): siRNA sense strand
cgguuauggugucuacgua

SEQ ID NO: 851368 - RNA, 19 nt, Homo sapiens
  misc_RNA (1)...(19): siRNA sense strand
ggaaggacacggguuucug

SEQ ID NO: 851369 - RNA, 19 nt, Homo sapiens
  misc_RNA (1)...(19): siRNA sense strand
caaaguggacagagacaac

SEQ ID NO: 851370 - RNA, 19 nt, Homo sapiens
  misc_RNA (1)...(19): siRNA sense strand
gcagaugcucuuucagaac

SEQ ID NO: 851371 - RNA, 19 nt, Homo sapiens
  misc_RNA (1)...(19): siRNA sense strand
ggaguacgugcucaugauc

SEQ ID NO: 851372 - RNA, 19 nt, Homo sapiens
  misc_RNA (1)...(19): siRNA sense strand
cagaacaagcuacgaggau

SEQ ID NO: 851373 - RNA, 19 nt, Homo sapiens
  misc_RNA (1)...(19): siRNA sense strand
gacagagacaaccaagaga

SEQ ID NO: 851374 - RNA, 19 nt, Homo sapiens
  misc_RNA (1)...(19): siRNA sense strand
ggaaagcagggaggaagca

SEQ ID NO: 851375 - RNA, 19 nt, Homo sapiens
  misc_RNA (1)...(19): siRNA sense strand
ucaaggcuacggcgucaug

SEQ ID NO: 851376 - RNA, 19 nt, Homo sapiens
  misc_RNA (1)...(19): siRNA sense strand
gcacggucacgggaaguug

SEQ ID NO: 851377 - RNA, 19 nt, Homo sapiens
  misc_RNA (1)...(19): siRNA sense strand
uaaagauggcaguuauuac

SEQ ID NO: 851378 - RNA, 19 nt, Homo sapiens
  misc_RNA (1)...(19): siRNA sense strand
cugggcagaugcucuuuca

SEQ ID NO: 851379 - RNA, 19 nt, Homo sapiens
  misc_RNA (1)...(19): siRNA sense strand
aaagauggcaguuauuacg

SEQ ID NO: 851380 - RNA, 19 nt, Homo sapiens
  misc_RNA (1)...(19): siRNA sense strand
uauggguuguggaucaaug

SEQ ID NO: 851381 - RNA, 19 nt, Homo sapiens
  misc_RNA (1)...(19): siRNA sense strand
guucgaaugcaucccuuau

SEQ ID NO: 851382 - RNA, 19 nt, Homo sapiens
  misc_RNA (1)...(19): siRNA sense strand
ggucucccuucucggugaa

SEQ ID NO: 851383 - RNA, 19 nt, Homo sapiens
  misc_RNA (1)...(19): siRNA sense strand
caauggccacccagcagaa

SEQ ID NO: 851384 - RNA, 19 nt, Homo sapiens
  misc_RNA (1)...(19): siRNA sense strand
ugaaggagaauggaaagca

SEQ ID NO: 851385 - RNA, 19 nt, Homo sapiens
  misc_RNA (1)...(19): siRNA sense strand
cuacucugaggucaacuuu

SEQ ID NO: 851386 - RNA, 19 nt, Homo sapiens
  misc_RNA (1)...(19): siRNA sense strand
gucuacguauacccaaauu

SEQ ID NO: 851387 - RNA, 19 nt, Homo sapiens
  misc_RNA (1)...(19): siRNA sense strand
gagaccuggagcugcauuu

SEQ ID NO: 851388 - RNA, 19 nt, Homo sapiens
  misc_RNA (1)...(19): siRNA sense strand
ucgaaugcaucccuuaucc

SEQ ID NO: 851389 - RNA, 19 nt, Homo sapiens
  misc_RNA (1)...(19): siRNA sense strand
ucaggaggcugggaucuua

SEQ ID NO: 851390 - RNA, 19 nt, Homo sapiens
  misc_RNA (1)...(19): siRNA sense strand
gaucuuagcauucacacuu

SEQ ID NO: 851391 - RNA, 19 nt, Homo sapiens
  misc_RNA (1)...(19): siRNA sense strand
gcugggaucuuagcauuca

SEQ ID NO: 851392 - RNA, 19 nt, Homo sapiens
  misc_RNA (1)...(19): siRNA sense strand
cgaaggcuguggaguggau

SEQ ID NO: 851393 - RNA, 19 nt, Homo sapiens
  misc_RNA (1)...(19): siRNA sense strand
ggacuggagagccuggaaa

SEQ ID NO: 851394 - RNA, 19 nt, Homo sapiens
  misc_RNA (1)...(19): siRNA sense strand
gcuguggaguggauagauc

SEQ ID NO: 851395 - RNA, 19 nt, Homo sapiens
  misc_RNA (1)...(19): siRNA sense strand
aggcugggaucuuagcauu

SEQ ID NO: 851396 - RNA, 19 nt, Homo sapiens
  misc_RNA (1)...(19): siRNA sense strand
ucccuacccugucgaguug

SEQ ID NO: 851397 - RNA, 19 nt, Homo sapiens
  misc_RNA (1)...(19): siRNA sense strand
uggagagccuggaaauaca

SEQ ID NO: 851398 - RNA, 19 nt, Homo sapiens
  misc_RNA (1)...(19): siRNA sense strand
agcaguggcugucagaaga

SEQ ID NO: 851399 - RNA, 19 nt, Homo sapiens
  misc_RNA (1)...(19): siRNA sense strand
gggcaaguuuccagaagcu

SEQ ID NO: 851400 - RNA, 19 nt, Homo sapiens
  misc_RNA (1)...(19): siRNA sense strand
cuucuguacuguccaggaa

SEQ ID NO: 851401 - RNA, 19 nt, Homo sapiens
  misc_RNA (1)...(19): siRNA sense strand
cagggcaaguuuccagaag

SEQ ID NO: 851402 - RNA, 19 nt, Homo sapiens
  misc_RNA (1)...(19): siRNA sense strand
ggagaagcaguggcuguca

SEQ ID NO: 851403 - RNA, 19 nt, Homo sapiens
  misc_RNA (1)...(19): siRNA sense strand
gaacuggacuggagaagaa

SEQ ID NO: 851404 - RNA, 19 nt, Homo sapiens
  misc_RNA (1)...(19): siRNA sense strand
gcaccuggcuaccaaagua

SEQ ID NO: 851405 - RNA, 19 nt, Homo sapiens
  misc_RNA (1)...(19): siRNA sense strand
ggacaaaacuggugaagga

SEQ ID NO: 851406 - RNA, 19 nt, Homo sapiens
  misc_RNA (1)...(19): siRNA sense strand
ggaaggaccagccauuuau

SEQ ID NO: 851407 - RNA, 19 nt, Homo sapiens
  misc_RNA (1)...(19): siRNA sense strand
agacaugcauggccuguuu

SEQ ID NO: 851408 - RNA, 19 nt, Homo sapiens
  misc_RNA (1)...(19): siRNA sense strand
gggaaggaccagccauuua

SEQ ID NO: 851409 - RNA, 19 nt, Homo sapiens
  misc_RNA (1)...(19): siRNA sense strand
gcacggacaggcagaauug

SEQ ID NO: 851410 - RNA, 19 nt, Homo sapiens
  misc_RNA (1)...(19): siRNA sense strand
gggcucaguuccucucauu

SEQ ID NO: 851411 - RNA, 19 nt, Homo sapiens
  misc_RNA (1)...(19): siRNA sense strand
ggauuaguucccagucuua

SEQ ID NO: 851412 - RNA, 19 nt, Homo sapiens
  misc_RNA (1)...(19): siRNA sense strand
cgggauauguugauagaga

SEQ ID NO: 851413 - RNA, 19 nt, Homo sapiens
  misc_RNA (1)...(19): siRNA sense strand
ggaauccaggguacagaua

SEQ ID NO: 851414 - RNA, 19 nt, Homo sapiens
  misc_RNA (1)...(19): siRNA sense strand
acagauaggagauaccuuu

SEQ ID NO: 851415 - RNA, 19 nt, Homo sapiens
  misc_RNA (1)...(19): siRNA sense strand
ucauuuccaucacgggaua

SEQ ID NO: 851416 - RNA, 19 nt, Homo sapiens
  misc_RNA (1)...(19): siRNA sense strand
acucugcuguggccuauuu

SEQ ID NO: 851417 - RNA, 19 nt, Homo sapiens
  misc_RNA (1)...(19): siRNA sense strand
gaaggaccagccauuuaug

SEQ ID NO: 851418 - RNA, 19 nt, Homo sapiens
  misc_RNA (1)...(19): siRNA sense strand
uuaugcagaugccacagua

SEQ ID NO: 851419 - RNA, 19 nt, Homo sapiens
  misc_RNA (1)...(19): siRNA sense strand
guuggaugcuggccucuau

SEQ ID NO: 851420 - RNA, 19 nt, Homo sapiens
  misc_RNA (1)...(19): siRNA sense strand
ucuccaaauuccaguguaa

SEQ ID NO: 851421 - RNA, 19 nt, Homo sapiens
  misc_RNA (1)...(19): siRNA sense strand
cacgggauauguugauaga

SEQ ID NO: 851422 - RNA, 19 nt, Homo sapiens
  misc_RNA (1)...(19): siRNA sense strand
gcagggacaggaucagaga

SEQ ID NO: 851423 - RNA, 19 nt, Homo sapiens
  misc_RNA (1)...(19): siRNA sense strand
cucuaugggugcaggauua

SEQ ID NO: 851424 - RNA, 19 nt, Homo sapiens
  misc_RNA (1)...(19): siRNA sense strand
gcucaguuccucucauuuc

SEQ ID NO: 851425 - RNA, 19 nt, Homo sapiens
  misc_RNA (1)...(19): siRNA sense strand
ccuguuuccugucuccuaa

SEQ ID NO: 851426 - RNA, 19 nt, Homo sapiens
  misc_RNA (1)...(19): siRNA sense strand
acgcagcauucuccuguuu

SEQ ID NO: 851427 - RNA, 19 nt, Homo sapiens
  misc_RNA (1)...(19): siRNA sense strand
ggacaaacagagacaugca

SEQ ID NO: 851428 - RNA, 19 nt, Homo sapiens
  misc_RNA (1)...(19): siRNA sense strand
ugauagagacauccagcua

SEQ ID NO: 851429 - RNA, 19 nt, Homo sapiens
  misc_RNA (1)...(19): siRNA sense strand
ccacagacuccaggacaaa

SEQ ID NO: 851430 - RNA, 19 nt, Homo sapiens
  misc_RNA (1)...(19): siRNA sense strand
ggaacuggacuggagaaga

SEQ ID NO: 851431 - RNA, 19 nt, Homo sapiens
  misc_RNA (1)...(19): siRNA sense strand
gcagaugccacaguaucaa

SEQ ID NO: 851432 - RNA, 19 nt, Homo sapiens
  misc_RNA (1)...(19): siRNA sense strand
caaaacuggugaaggauuc

SEQ ID NO: 851433 - RNA, 19 nt, Homo sapiens
  misc_RNA (1)...(19): siRNA sense strand
ggaggugacucuggaucca

SEQ ID NO: 851434 - RNA, 19 nt, Homo sapiens
  misc_RNA (1)...(19): siRNA sense strand
gaauccaggguacagauag

SEQ ID NO: 851435 - RNA, 19 nt, Homo sapiens
  misc_RNA (1)...(19): siRNA sense strand
ugcauggccuguuugaugu

SEQ ID NO: 851436 - RNA, 19 nt, Homo sapiens
  misc_RNA (1)...(19): siRNA sense strand
gggagcauauccuguucca

SEQ ID NO: 851437 - RNA, 19 nt, Homo sapiens
  misc_RNA (1)...(19): siRNA sense strand
uaccaaaguacugggaaua

SEQ ID NO: 851438 - RNA, 19 nt, Homo sapiens
  misc_RNA (1)...(19): siRNA sense strand
cuaccaaaguacugggaau

SEQ ID NO: 851439 - RNA, 19 nt, Homo sapiens
  misc_RNA (1)...(19): siRNA sense strand
caaugcagaggccauggaa

SEQ ID NO: 851440 - RNA, 19 nt, Homo sapiens
  misc_RNA (1)...(19): siRNA sense strand
ccagcugcuucucuucuuc

SEQ ID NO: 851441 - RNA, 19 nt, Homo sapiens
  misc_RNA (1)...(19): siRNA sense strand
ggccggugccuuauucaug

SEQ ID NO: 851442 - RNA, 19 nt, Homo sapiens
  misc_RNA (1)...(19): siRNA sense strand
cguggcaccuggcuaccaa

SEQ ID NO: 851443 - RNA, 19 nt, Homo sapiens
  misc_RNA (1)...(19): siRNA sense strand
aggauuaguucccagucuu

SEQ ID NO: 851444 - RNA, 19 nt, Homo sapiens
  misc_RNA (1)...(19): siRNA sense strand
cugcuucucuucuucuagu

SEQ ID NO: 851445 - RNA, 19 nt, Homo sapiens
  misc_RNA (1)...(19): siRNA sense strand
gccgggagcauauccuguu

SEQ ID NO: 851446 - RNA, 19 nt, Homo sapiens
  misc_RNA (1)...(19): siRNA sense strand
acauccagcuacucuguca

SEQ ID NO: 851447 - RNA, 19 nt, Homo sapiens
  misc_RNA (1)...(19): siRNA sense strand
ccauggaagugcgguucuu

SEQ ID NO: 851448 - RNA, 19 nt, Homo sapiens
  misc_RNA (1)...(19): siRNA sense strand
ccgaagcucugcguuucug

SEQ ID NO: 851449 - RNA, 19 nt, Homo sapiens
  misc_RNA (1)...(19): siRNA sense strand
augcauggccuguuugaug

SEQ ID NO: 851450 - RNA, 19 nt, Homo sapiens
  misc_RNA (1)...(19): siRNA sense strand
gcagcauucuccuguuucc

SEQ ID NO: 851451 - RNA, 19 nt, Homo sapiens
  misc_RNA (1)...(19): siRNA sense strand
gacgcagcauucuccuguu

SEQ ID NO: 851452 - RNA, 19 nt, Homo sapiens
  misc_RNA (1)...(19): siRNA sense strand
caggauuaguucccagucu

SEQ ID NO: 851453 - RNA, 19 nt, Homo sapiens
  misc_RNA (1)...(19): siRNA sense strand
agacauccagcuacucugu

SEQ ID NO: 851454 - RNA, 19 nt, Homo sapiens
  misc_RNA (1)...(19): siRNA sense strand
cgggaaggaccagccauuu

SEQ ID NO: 851455 - RNA, 19 nt, Homo sapiens
  misc_RNA (1)...(19): siRNA sense strand
acauccagcugcuucucuu

SEQ ID NO: 851456 - RNA, 19 nt, Homo sapiens
  misc_RNA (1)...(19): siRNA sense strand
gcucucaugcucaguuugg

SEQ ID NO: 851457 - RNA, 19 nt, Homo sapiens
  misc_RNA (1)...(19): siRNA sense strand
uaugggugcaggauuaguu

SEQ ID NO: 851458 - RNA, 19 nt, Homo sapiens
  misc_RNA (1)...(19): siRNA sense strand
gcggugaacucaagaaauu

SEQ ID NO: 851459 - RNA, 19 nt, Homo sapiens
  misc_RNA (1)...(19): siRNA sense strand
ucacagcgcuccaauccuu

SEQ ID NO: 851460 - RNA, 19 nt, Homo sapiens
  misc_RNA (1)...(19): siRNA sense strand
ggaaagguacaaugguuaa

SEQ ID NO: 851461 - RNA, 19 nt, Homo sapiens
  misc_RNA (1)...(19): siRNA sense strand
gggaaagguacaaugguua

SEQ ID NO: 851462 - RNA, 19 nt, Homo sapiens
  misc_RNA (1)...(19): siRNA sense strand
cgacugcggugaacucaag

SEQ ID NO: 851463 - RNA, 19 nt, Homo sapiens
  misc_RNA (1)...(19): siRNA sense strand
ggugaacucaagaaauuaa

SEQ ID NO: 851464 - RNA, 19 nt, Homo sapiens
  misc_RNA (1)...(19): siRNA sense strand
aaccaaaccuccucuccaa

SEQ ID NO: 851465 - RNA, 19 nt, Homo sapiens
  misc_RNA (1)...(19): siRNA sense strand
uaaacccacuuggcaaaga

SEQ ID NO: 851466 - RNA, 19 nt, Homo sapiens
  misc_RNA (1)...(19): siRNA sense strand
gcgacgaggucagaggaaa

SEQ ID NO: 851467 - RNA, 19 nt, Homo sapiens
  misc_RNA (1)...(19): siRNA sense strand
aaccugcgcugcaacuaaa

SEQ ID NO: 851468 - RNA, 19 nt, Homo sapiens
  misc_RNA (1)...(19): siRNA sense strand
uaaccugcgcugcaacuaa

SEQ ID NO: 851469 - RNA, 19 nt, Homo sapiens
  misc_RNA (1)...(19): siRNA sense strand
ggagauggacuuggaaugg

SEQ ID NO: 851470 - RNA, 19 nt, Homo sapiens
  misc_RNA (1)...(19): siRNA sense strand
aaauuaaccugcgcugcaa

SEQ ID NO: 851471 - RNA, 19 nt, Homo sapiens
  misc_RNA (1)...(19): siRNA sense strand
cgaccgagauagagaaagc

SEQ ID NO: 851472 - RNA, 19 nt, Homo sapiens
  misc_RNA (1)...(19): siRNA sense strand
ggggaaagguacaaugguu

SEQ ID NO: 851473 - RNA, 19 nt, Homo sapiens
  misc_RNA (1)...(19): siRNA sense strand
gagcgaccgagauagagaa

SEQ ID NO: 851474 - RNA, 19 nt, Homo sapiens
  misc_RNA (1)...(19): siRNA sense strand
cguaaacccacuuggcaaa

SEQ ID NO: 851475 - RNA, 19 nt, Homo sapiens
  misc_RNA (1)...(19): siRNA sense strand
cuccaagccuccacgucua

SEQ ID NO: 851476 - RNA, 19 nt, Homo sapiens
  misc_RNA (1)...(19): siRNA sense strand
gcagggacguagggaacca

SEQ ID NO: 851477 - RNA, 19 nt, Homo sapiens
  misc_RNA (1)...(19): siRNA sense strand
gaacucaagaaauuaaccu

SEQ ID NO: 851478 - RNA, 19 nt, Homo sapiens
  misc_RNA (1)...(19): siRNA sense strand
acacgccucagaccucgua

SEQ ID NO: 851479 - RNA, 19 nt, Homo sapiens
  misc_RNA (1)...(19): siRNA sense strand
gggagaugguggcuuucag

SEQ ID NO: 851480 - RNA, 19 nt, Homo sapiens
  misc_RNA (1)...(19): siRNA sense strand
gaagaacacugcauuguaa

SEQ ID NO: 851481 - RNA, 19 nt, Homo sapiens
  misc_RNA (1)...(19): siRNA sense strand
gaugggagcugucuuaauu

SEQ ID NO: 851482 - RNA, 19 nt, Homo sapiens
  misc_RNA (1)...(19): siRNA sense strand
caugaaggcuugaaucuua

SEQ ID NO: 851483 - RNA, 19 nt, Homo sapiens
  misc_RNA (1)...(19): siRNA sense strand
gaaaguggaugaucauaug

SEQ ID NO: 851484 - RNA, 19 nt, Homo sapiens
  misc_RNA (1)...(19): siRNA sense strand
gcaaucagcacguauauaa

SEQ ID NO: 851485 - RNA, 19 nt, Homo sapiens
  misc_RNA (1)...(19): siRNA sense strand
gaaacuaugugugaaguaa

SEQ ID NO: 851486 - RNA, 19 nt, Homo sapiens
  misc_RNA (1)...(19): siRNA sense strand
gcaguuggcuacucacuuu

SEQ ID NO: 851487 - RNA, 19 nt, Homo sapiens
  misc_RNA (1)...(19): siRNA sense strand
gaagugauuugggccauua

SEQ ID NO: 851488 - RNA, 19 nt, Homo sapiens
  misc_RNA (1)...(19): siRNA sense strand
uaaagcaacugaagaguga

SEQ ID NO: 851489 - RNA, 19 nt, Homo sapiens
  misc_RNA (1)...(19): siRNA sense strand
ugacauggauuucagcuuu

SEQ ID NO: 851490 - RNA, 19 nt, Homo sapiens
  misc_RNA (1)...(19): siRNA sense strand
caggaugaguuuagaauuu

SEQ ID NO: 851491 - RNA, 19 nt, Homo sapiens
  misc_RNA (1)...(19): siRNA sense strand
gaauuaaugcugagaugua

SEQ ID NO: 851492 - RNA, 19 nt, Homo sapiens
  misc_RNA (1)...(19): siRNA sense strand
gaagaacaaucaaguacca

SEQ ID NO: 851493 - RNA, 19 nt, Homo sapiens
  misc_RNA (1)...(19): siRNA sense strand
aaaggaagcuagaagcaaa

SEQ ID NO: 851494 - RNA, 19 nt, Homo sapiens
  misc_RNA (1)...(19): siRNA sense strand
agaauucgauguugaagaa

SEQ ID NO: 851495 - RNA, 19 nt, Homo sapiens
  misc_RNA (1)...(19): siRNA sense strand
acacaucccuuccugauau

SEQ ID NO: 851496 - RNA, 19 nt, Homo sapiens
  misc_RNA (1)...(19): siRNA sense strand
agacagugcucaggaauuu

SEQ ID NO: 851497 - RNA, 19 nt, Homo sapiens
  misc_RNA (1)...(19): siRNA sense strand
acaaucaaguaccauguua

SEQ ID NO: 851498 - RNA, 19 nt, Homo sapiens
  misc_RNA (1)...(19): siRNA sense strand
uaaagcagauaauguagga

SEQ ID NO: 851499 - RNA, 19 nt, Homo sapiens
  misc_RNA (1)...(19): siRNA sense strand
caaguaccauguuaggaaa

SEQ ID NO: 851500 - RNA, 19 nt, Homo sapiens
  misc_RNA (1)...(19): siRNA sense strand
uauagaaucuggcguaaag

SEQ ID NO: 851501 - RNA, 19 nt, Homo sapiens
  misc_RNA (1)...(19): siRNA sense strand
ggacgaggaauacaucaaa

SEQ ID NO: 851502 - RNA, 19 nt, Homo sapiens
  misc_RNA (1)...(19): siRNA sense strand
ggaagaauucgauguugaa

SEQ ID NO: 851503 - RNA, 19 nt, Homo sapiens
  misc_RNA (1)...(19): siRNA sense strand
gaacggugguauugcacuu

SEQ ID NO: 851504 - RNA, 19 nt, Homo sapiens
  misc_RNA (1)...(19): siRNA sense strand
aaccaaaguugauauguga

SEQ ID NO: 851505 - RNA, 19 nt, Homo sapiens
  misc_RNA (1)...(19): siRNA sense strand
aaaucuaccuucaggauga

SEQ ID NO: 851506 - RNA, 19 nt, Homo sapiens
  misc_RNA (1)...(19): siRNA sense strand
ugaaggcugugaagugauu

SEQ ID NO: 851507 - RNA, 19 nt, Homo sapiens
  misc_RNA (1)...(19): siRNA sense strand
guugauaugugaaggaaau

SEQ ID NO: 851508 - RNA, 19 nt, Homo sapiens
  misc_RNA (1)...(19): siRNA sense strand
cagcuucuccuguuauuaa

SEQ ID NO: 851509 - RNA, 19 nt, Homo sapiens
  misc_RNA (1)...(19): siRNA sense strand
caccaaauguagaaccuuu

SEQ ID NO: 851510 - RNA, 19 nt, Homo sapiens
  misc_RNA (1)...(19): siRNA sense strand
cuacaggaguuacaccaaa

SEQ ID NO: 851511 - RNA, 19 nt, Homo sapiens
  misc_RNA (1)...(19): siRNA sense strand
ugaagaacacugcauugua

SEQ ID NO: 851512 - RNA, 19 nt, Homo sapiens
  misc_RNA (1)...(19): siRNA sense strand
gcacagggcuuagguucag

SEQ ID NO: 851513 - RNA, 19 nt, Homo sapiens
  misc_RNA (1)...(19): siRNA sense strand
gauguggccugucuaugug

SEQ ID NO: 851514 - RNA, 19 nt, Homo sapiens
  misc_RNA (1)...(19): siRNA sense strand
gcugagauguaccaaagga

SEQ ID NO: 851515 - RNA, 19 nt, Homo sapiens
  misc_RNA (1)...(19): siRNA sense strand
gggcuuagguucagaucau

SEQ ID NO: 851516 - RNA, 19 nt, Homo sapiens
  misc_RNA (1)...(19): siRNA sense strand
aaaccaaaguugauaugug

SEQ ID NO: 851517 - RNA, 19 nt, Homo sapiens
  misc_RNA (1)...(19): siRNA sense strand
agauaaagcuauagggaau

SEQ ID NO: 851518 - RNA, 19 nt, Homo sapiens
  misc_RNA (1)...(19): siRNA sense strand
aggagcagcugaauucuug

SEQ ID NO: 851519 - RNA, 19 nt, Homo sapiens
  misc_RNA (1)...(19): siRNA sense strand
ggaaauccuuauguauuag

SEQ ID NO: 851520 - RNA, 19 nt, Homo sapiens
  misc_RNA (1)...(19): siRNA sense strand
cuagacagaugggauggua

SEQ ID NO: 851521 - RNA, 19 nt, Homo sapiens
  misc_RNA (1)...(19): siRNA sense strand
gcacacaucccuuccugau

SEQ ID NO: 851522 - RNA, 19 nt, Homo sapiens
  misc_RNA (1)...(19): siRNA sense strand
gaacaaucaaguaccaugu

SEQ ID NO: 851523 - RNA, 19 nt, Homo sapiens
  misc_RNA (1)...(19): siRNA sense strand
caagagaccauaagucagu

SEQ ID NO: 851524 - RNA, 19 nt, Homo sapiens
  misc_RNA (1)...(19): siRNA sense strand
cagcugaauucuugacuuc

SEQ ID NO: 851525 - RNA, 19 nt, Homo sapiens
  misc_RNA (1)...(19): siRNA sense strand
ucaaguaccauguuaggaa

SEQ ID NO: 851526 - RNA, 19 nt, Homo sapiens
  misc_RNA (1)...(19): siRNA sense strand
gcagcugaauucuugacuu

SEQ ID NO: 851527 - RNA, 19 nt, Homo sapiens
  misc_RNA (1)...(19): siRNA sense strand
gcacguauauaagaaacuc

SEQ ID NO: 851528 - RNA, 19 nt, Homo sapiens
  misc_RNA (1)...(19): siRNA sense strand
ggagcuaaaccaaaguuga

SEQ ID NO: 851529 - RNA, 19 nt, Homo sapiens
  misc_RNA (1)...(19): siRNA sense strand
uaccaaaggacgaggaaua

SEQ ID NO: 851530 - RNA, 19 nt, Homo sapiens
  misc_RNA (1)...(19): siRNA sense strand
gagacucuauugacaugga

SEQ ID NO: 851531 - RNA, 19 nt, Homo sapiens
  misc_RNA (1)...(19): siRNA sense strand
guauugcacuugaguuagu

SEQ ID NO: 851532 - RNA, 19 nt, Homo sapiens
  misc_RNA (1)...(19): siRNA sense strand
gagcuaaaccaaaguugau

SEQ ID NO: 851533 - RNA, 19 nt, Homo sapiens
  misc_RNA (1)...(19): siRNA sense strand
gauauucucuugguaacag

SEQ ID NO: 851534 - RNA, 19 nt, Homo sapiens
  misc_RNA (1)...(19): siRNA sense strand
uggaagaauucgauguuga

SEQ ID NO: 851535 - RNA, 19 nt, Homo sapiens
  misc_RNA (1)...(19): siRNA sense strand
ucaggagacucuauugaca

SEQ ID NO: 851536 - RNA, 19 nt, Homo sapiens
  misc_RNA (1)...(19): siRNA sense strand
agaagaugguggccugaaa

SEQ ID NO: 851537 - RNA, 19 nt, Homo sapiens
  misc_RNA (1)...(19): siRNA sense strand
guauuaggaauccgugaua

SEQ ID NO: 851538 - RNA, 19 nt, Homo sapiens
  misc_RNA (1)...(19): siRNA sense strand
gaaccagauauacaacuga

SEQ ID NO: 851539 - RNA, 19 nt, Homo sapiens
  misc_RNA (1)...(19): siRNA sense strand
gaaauugaaggcugugaag

SEQ ID NO: 851540 - RNA, 19 nt, Homo sapiens
  misc_RNA (1)...(19): siRNA sense strand
gacauggauuucagcuuug

SEQ ID NO: 851541 - RNA, 19 nt, Homo sapiens
  misc_RNA (1)...(19): siRNA sense strand
gacccaggcuagacagaug

SEQ ID NO: 851542 - RNA, 19 nt, Homo sapiens
  misc_RNA (1)...(19): siRNA sense strand
uaacagaagauggcaauca

SEQ ID NO: 851543 - RNA, 19 nt, Homo sapiens
  misc_RNA (1)...(19): siRNA sense strand
gauaaagcuauagggaaua

SEQ ID NO: 851544 - RNA, 19 nt, Homo sapiens
  misc_RNA (1)...(19): siRNA sense strand
uauaagaaacucugucugu

SEQ ID NO: 851545 - RNA, 19 nt, Homo sapiens
  misc_RNA (1)...(19): siRNA sense strand
cucauaagauucaccuuga

SEQ ID NO: 851546 - RNA, 19 nt, Homo sapiens
  misc_RNA (1)...(19): siRNA sense strand
guuauagaaucuggcguaa

SEQ ID NO: 851547 - RNA, 19 nt, Homo sapiens
  misc_RNA (1)...(19): siRNA sense strand
caucaaagucgucaugcaa

SEQ ID NO: 851548 - RNA, 19 nt, Homo sapiens
  misc_RNA (1)...(19): siRNA sense strand
gaacuguuugcucauguga

SEQ ID NO: 851549 - RNA, 19 nt, Homo sapiens
  misc_RNA (1)...(19): siRNA sense strand
uaagaaacucugucugugu

SEQ ID NO: 851550 - RNA, 19 nt, Homo sapiens
  misc_RNA (1)...(19): siRNA sense strand
acacugcauuguaacagaa

SEQ ID NO: 851551 - RNA, 19 nt, Homo sapiens
  misc_RNA (1)...(19): siRNA sense strand
aaugaugggagcugucuua

SEQ ID NO: 851552 - RNA, 19 nt, Homo sapiens
  misc_RNA (1)...(19): siRNA sense strand
gauauauggcugcgauuuc

SEQ ID NO: 851553 - RNA, 19 nt, Homo sapiens
  misc_RNA (1)...(19): siRNA sense strand
gaccauaagucaguuacag

SEQ ID NO: 851554 - RNA, 19 nt, Homo sapiens
  misc_RNA (1)...(19): siRNA sense strand
gaguuaguguaugaaauug

SEQ ID NO: 851555 - RNA, 19 nt, Homo sapiens
  misc_RNA (1)...(19): siRNA sense strand
ucagaaacagcuuacuaaa

SEQ ID NO: 851556 - RNA, 19 nt, Homo sapiens
  misc_RNA (1)...(19): siRNA sense strand
aaucagcacguauauaaga

SEQ ID NO: 851557 - RNA, 19 nt, Homo sapiens
  misc_RNA (1)...(19): siRNA sense strand
gggaugguaugcagcaaag

SEQ ID NO: 851558 - RNA, 19 nt, Homo sapiens
  misc_RNA (1)...(19): siRNA sense strand
ucaaagcucauugcugaaa

SEQ ID NO: 851559 - RNA, 19 nt, Homo sapiens
  misc_RNA (1)...(19): siRNA sense strand
gaagaugguggccugaaag

SEQ ID NO: 851560 - RNA, 19 nt, Homo sapiens
  misc_RNA (1)...(19): siRNA sense strand
ggaccagauuggcaugaag

SEQ ID NO: 851561 - RNA, 19 nt, Homo sapiens
  misc_RNA (1)...(19): siRNA sense strand
uauagggaauacuuucuuc

SEQ ID NO: 851562 - RNA, 19 nt, Homo sapiens
  misc_RNA (1)...(19): siRNA sense strand
caaaggacgaggaauacau

SEQ ID NO: 851563 - RNA, 19 nt, Homo sapiens
  misc_RNA (1)...(19): siRNA sense strand
ugaaaguggaugaucauau

SEQ ID NO: 851564 - RNA, 19 nt, Homo sapiens
  misc_RNA (1)...(19): siRNA sense strand
cagaaacagcuuacuaaag

SEQ ID NO: 851565 - RNA, 19 nt, Homo sapiens
  misc_RNA (1)...(19): siRNA sense strand
ugucagugcuacaggaguu

SEQ ID NO: 851566 - RNA, 19 nt, Homo sapiens
  misc_RNA (1)...(19): siRNA sense strand
gauuugggccauuaaagau

SEQ ID NO: 851567 - RNA, 19 nt, Homo sapiens
  misc_RNA (1)...(19): siRNA sense strand
gcuaaaccaaaguugauau

SEQ ID NO: 851568 - RNA, 19 nt, Homo sapiens
  misc_RNA (1)...(19): siRNA sense strand
gggaccagauuggcaugaa

SEQ ID NO: 851569 - RNA, 19 nt, Homo sapiens
  misc_RNA (1)...(19): siRNA sense strand
uuugggccauuaaagauaa

SEQ ID NO: 851570 - RNA, 19 nt, Homo sapiens
  misc_RNA (1)...(19): siRNA sense strand
ugauuugggccauuaaaga

SEQ ID NO: 851571 - RNA, 19 nt, Homo sapiens
  misc_RNA (1)...(19): siRNA sense strand
gacgaggaauacaucaaag

SEQ ID NO: 851572 - RNA, 19 nt, Homo sapiens
  misc_RNA (1)...(19): siRNA sense strand
gaugguaugcagcaaagug

SEQ ID NO: 851573 - RNA, 19 nt, Homo sapiens
  misc_RNA (1)...(19): siRNA sense strand
gcaacugaagagugaagaa

SEQ ID NO: 851574 - RNA, 19 nt, Homo sapiens
  misc_RNA (1)...(19): siRNA sense strand
gccugaaaguggaugauca

SEQ ID NO: 851575 - RNA, 19 nt, Homo sapiens
  misc_RNA (1)...(19): siRNA sense strand
gaaaaucuaccuucaggau

SEQ ID NO: 851576 - RNA, 19 nt, Homo sapiens
  misc_RNA (1)...(19): siRNA sense strand
gcaugaaggcuugaaucuu

SEQ ID NO: 851577 - RNA, 19 nt, Homo sapiens
  misc_RNA (1)...(19): siRNA sense strand
gcagauaauguaggaagug

SEQ ID NO: 851578 - RNA, 19 nt, Homo sapiens
  misc_RNA (1)...(19): siRNA sense strand
aaccagauauacaacugaa

SEQ ID NO: 851579 - RNA, 19 nt, Homo sapiens
  misc_RNA (1)...(19): siRNA sense strand
guucaggagacucuauuga

SEQ ID NO: 851580 - RNA, 19 nt, Homo sapiens
  misc_RNA (1)...(19): siRNA sense strand
cagcagcacuucccuaguu

SEQ ID NO: 851581 - RNA, 19 nt, Homo sapiens
  misc_RNA (1)...(19): siRNA sense strand
ggacgacgcucaagaagac

SEQ ID NO: 851582 - RNA, 19 nt, Homo sapiens
  misc_RNA (1)...(19): siRNA sense strand
uaacgcaccuccccaauug

SEQ ID NO: 851583 - RNA, 19 nt, Homo sapiens
  misc_RNA (1)...(19): siRNA sense strand
cagcaccguugguuagaga

SEQ ID NO: 851584 - RNA, 19 nt, Homo sapiens
  misc_RNA (1)...(19): siRNA sense strand
cccaauugauccaggguaa

SEQ ID NO: 851585 - RNA, 19 nt, Homo sapiens
  misc_RNA (1)...(19): siRNA sense strand
ccacaucaacggagaguca

SEQ ID NO: 851586 - RNA, 19 nt, Homo sapiens
  misc_RNA (1)...(19): siRNA sense strand
ccucagggcaaacuaugua

SEQ ID NO: 851587 - RNA, 19 nt, Homo sapiens
  misc_RNA (1)...(19): siRNA sense strand
gguaccaucucauccuucu

SEQ ID NO: 851588 - RNA, 19 nt, Homo sapiens
  misc_RNA (1)...(19): siRNA sense strand
cagguaccaucucauccuu

SEQ ID NO: 851589 - RNA, 19 nt, Homo sapiens
  misc_RNA (1)...(19): siRNA sense strand
uaccaucucauccuucuau

SEQ ID NO: 851590 - RNA, 19 nt, Homo sapiens
  misc_RNA (1)...(19): siRNA sense strand
gcgcugaggaucccaacga

SEQ ID NO: 851591 - RNA, 19 nt, Homo sapiens
  misc_RNA (1)...(19): siRNA sense strand
ggagcugguucgcgguuac

SEQ ID NO: 851592 - RNA, 19 nt, Homo sapiens
  misc_RNA (1)...(19): siRNA sense strand
gcuagugcccagcgaggaa

SEQ ID NO: 851593 - RNA, 19 nt, Homo sapiens
  misc_RNA (1)...(19): siRNA sense strand
gcuuuggccucaccuuagg

SEQ ID NO: 851594 - RNA, 19 nt, Homo sapiens
  misc_RNA (1)...(19): siRNA sense strand
gggaggaggugcugacuga

SEQ ID NO: 851595 - RNA, 19 nt, Homo sapiens
  misc_RNA (1)...(19): siRNA sense strand
gaucuuacaucaguuguug

SEQ ID NO: 851596 - RNA, 19 nt, Homo sapiens
  misc_RNA (1)...(19): siRNA sense strand
ggagacagcugcuucaaaa

SEQ ID NO: 851597 - RNA, 19 nt, Homo sapiens
  misc_RNA (1)...(19): siRNA sense strand
gaagagggagccuuuguga

SEQ ID NO: 851598 - RNA, 19 nt, Homo sapiens
  misc_RNA (1)...(19): siRNA sense strand
gagcugaccaccacacuaa

SEQ ID NO: 851599 - RNA, 19 nt, Homo sapiens
  misc_RNA (1)...(19): siRNA sense strand
agagggagccuuugugaua

SEQ ID NO: 851600 - RNA, 19 nt, Homo sapiens
  misc_RNA (1)...(19): siRNA sense strand
ccacucagcccauuccuaa

SEQ ID NO: 851601 - RNA, 19 nt, Homo sapiens
  misc_RNA (1)...(19): siRNA sense strand
ucacaacgccaaucuagaa

SEQ ID NO: 851602 - RNA, 19 nt, Homo sapiens
  misc_RNA (1)...(19): siRNA sense strand
ggcaacugauucauaugua

SEQ ID NO: 851603 - RNA, 19 nt, Homo sapiens
  misc_RNA (1)...(19): siRNA sense strand
gaccuaugccacagacuua

SEQ ID NO: 851604 - RNA, 19 nt, Homo sapiens
  misc_RNA (1)...(19): siRNA sense strand
ucacaaauauucccaagcu

SEQ ID NO: 851605 - RNA, 19 nt, Homo sapiens
  misc_RNA (1)...(19): siRNA sense strand
caacgccaaucuagaauac

SEQ ID NO: 851606 - RNA, 19 nt, Homo sapiens
  misc_RNA (1)...(19): siRNA sense strand
ugaccaagguuuacucagu

SEQ ID NO: 851607 - RNA, 19 nt, Homo sapiens
  misc_RNA (1)...(19): siRNA sense strand
gagggaacagcaagccuua

SEQ ID NO: 851608 - RNA, 19 nt, Homo sapiens
  misc_RNA (1)...(19): siRNA sense strand
uagaauacucugcgaauug

SEQ ID NO: 851609 - RNA, 19 nt, Homo sapiens
  misc_RNA (1)...(19): siRNA sense strand
gcaacugauucauauguac

SEQ ID NO: 851610 - RNA, 19 nt, Homo sapiens
  misc_RNA (1)...(19): siRNA sense strand
agacauacuaaaccacuua

SEQ ID NO: 851611 - RNA, 19 nt, Homo sapiens
  misc_RNA (1)...(19): siRNA sense strand
uaaggaagucuaugcgaaa

SEQ ID NO: 851612 - RNA, 19 nt, Homo sapiens
  misc_RNA (1)...(19): siRNA sense strand
ugauucauauguacgguuu

SEQ ID NO: 851613 - RNA, 19 nt, Homo sapiens
  misc_RNA (1)...(19): siRNA sense strand
gcgcugggauuuccuaugc

SEQ ID NO: 851614 - RNA, 19 nt, Homo sapiens
  misc_RNA (1)...(19): siRNA sense strand
gccugacgaucacaaauau

SEQ ID NO: 851615 - RNA, 19 nt, Homo sapiens
  misc_RNA (1)...(19): siRNA sense strand
caacacuuaugggcaaaug

SEQ ID NO: 851616 - RNA, 19 nt, Homo sapiens
  misc_RNA (1)...(19): siRNA sense strand
gagggagccuuugugauag

SEQ ID NO: 851617 - RNA, 19 nt, Homo sapiens
  misc_RNA (1)...(19): siRNA sense strand
gagggcagccugacgauca

SEQ ID NO: 851618 - RNA, 19 nt, Homo sapiens
  misc_RNA (1)...(19): siRNA sense strand
gaccaccacacuaaaggua

SEQ ID NO: 851619 - RNA, 19 nt, Homo sapiens
  misc_RNA (1)...(19): siRNA sense strand
ggaagucuaugcgaaacuc

SEQ ID NO: 851620 - RNA, 19 nt, Homo sapiens
  misc_RNA (1)...(19): siRNA sense strand
ugugauggccuauagcuuu

SEQ ID NO: 851621 - RNA, 19 nt, Homo sapiens
  misc_RNA (1)...(19): siRNA sense strand
agaauacucugcgaauugu

SEQ ID NO: 851622 - RNA, 19 nt, Homo sapiens
  misc_RNA (1)...(19): siRNA sense strand
cuagaauacucugcgaauu

SEQ ID NO: 851623 - RNA, 19 nt, Homo sapiens
  misc_RNA (1)...(19): siRNA sense strand
ggaggaagaagaggaugaa

SEQ ID NO: 851624 - RNA, 19 nt, Homo sapiens
  misc_RNA (1)...(19): siRNA sense strand
gcugggauuuccuaugcaa

SEQ ID NO: 851625 - RNA, 19 nt, Homo sapiens
  misc_RNA (1)...(19): siRNA sense strand
gaauugucuucggauggua

SEQ ID NO: 851626 - RNA, 19 nt, Homo sapiens
  misc_RNA (1)...(19): siRNA sense strand
ccacuuagccaaucacaac

SEQ ID NO: 851627 - RNA, 19 nt, Homo sapiens
  misc_RNA (1)...(19): siRNA sense strand
uaaaccacuuagccaauca

SEQ ID NO: 851628 - RNA, 19 nt, Homo sapiens
  misc_RNA (1)...(19): siRNA sense strand
ggaagagggagccuuugug

SEQ ID NO: 851629 - RNA, 19 nt, Homo sapiens
  misc_RNA (1)...(19): siRNA sense strand
ccuaaaggccaugagauuu

SEQ ID NO: 851630 - RNA, 19 nt, Homo sapiens
  misc_RNA (1)...(19): siRNA sense strand
aaaggcaccuaguguacga

SEQ ID NO: 851631 - RNA, 19 nt, Homo sapiens
  misc_RNA (1)...(19): siRNA sense strand
gagaaggauuuggccaaca

SEQ ID NO: 851632 - RNA, 19 nt, Homo sapiens
  misc_RNA (1)...(19): siRNA sense strand
gcugguggcccuugugaug

SEQ ID NO: 851633 - RNA, 19 nt, Homo sapiens
  misc_RNA (1)...(19): siRNA sense strand
guaauaaggaagucuaugc

SEQ ID NO: 851634 - RNA, 19 nt, Homo sapiens
  misc_RNA (1)...(19): siRNA sense strand
caaauauucccaagcucaa

SEQ ID NO: 851635 - RNA, 19 nt, Homo sapiens
  misc_RNA (1)...(19): siRNA sense strand
gcugaaaggcaccuagugu

SEQ ID NO: 851636 - RNA, 19 nt, Homo sapiens
  misc_RNA (1)...(19): siRNA sense strand
acuggcaacugauucauau

SEQ ID NO: 851637 - RNA, 19 nt, Homo sapiens
  misc_RNA (1)...(19): siRNA sense strand
gugauggccuauagcuuuc

SEQ ID NO: 851638 - RNA, 19 nt, Homo sapiens
  misc_RNA (1)...(19): siRNA sense strand
acagcaagccuuacagguu

SEQ ID NO: 851639 - RNA, 19 nt, Homo sapiens
  misc_RNA (1)...(19): siRNA sense strand
gaggaguucagagagcuua

SEQ ID NO: 851640 - RNA, 19 nt, Homo sapiens
  misc_RNA (1)...(19): siRNA sense strand
agaaggauuuggccaacau

SEQ ID NO: 851641 - RNA, 19 nt, Homo sapiens
  misc_RNA (1)...(19): siRNA sense strand
ugacaacacagaugacaca

SEQ ID NO: 851642 - RNA, 19 nt, Homo sapiens
  misc_RNA (1)...(19): siRNA sense strand
ccggagagcugcuguucgu

SEQ ID NO: 851643 - RNA, 19 nt, Homo sapiens
  misc_RNA (1)...(19): siRNA sense strand
gguagccacucagcccauu

SEQ ID NO: 851644 - RNA, 19 nt, Homo sapiens
  misc_RNA (1)...(19): siRNA sense strand
gggaagagggagccuuugu

SEQ ID NO: 851645 - RNA, 19 nt, Homo sapiens
  misc_RNA (1)...(19): siRNA sense strand
ggagcugaccaccacacua

SEQ ID NO: 851646 - RNA, 19 nt, Homo sapiens
  misc_RNA (1)...(19): siRNA sense strand
ggaagaagaggaugaaaag

SEQ ID NO: 851647 - RNA, 19 nt, Homo sapiens
  misc_RNA (1)...(19): siRNA sense strand
cagguucgcuauggucaga

SEQ ID NO: 851648 - RNA, 19 nt, Homo sapiens
  misc_RNA (1)...(19): siRNA sense strand
cugaaaggcaccuagugua

SEQ ID NO: 851649 - RNA, 19 nt, Homo sapiens
  misc_RNA (1)...(19): siRNA sense strand
gggaacagcaagccuuaca

SEQ ID NO: 851650 - RNA, 19 nt, Homo sapiens
  misc_RNA (1)...(19): siRNA sense strand
aggaggugcugacugaaga

SEQ ID NO: 851651 - RNA, 19 nt, Homo sapiens
  misc_RNA (1)...(19): siRNA sense strand
ggaguucagagagcuuaaa

SEQ ID NO: 851652 - RNA, 19 nt, Homo sapiens
  misc_RNA (1)...(19): siRNA sense strand
gcuuggagcacccgauguu

SEQ ID NO: 851653 - RNA, 19 nt, Homo sapiens
  misc_RNA (1)...(19): siRNA sense strand
ucaguaauaaggaagucua

SEQ ID NO: 851654 - RNA, 19 nt, Homo sapiens
  misc_RNA (1)...(19): siRNA sense strand
acaacgccaaucuagaaua

SEQ ID NO: 851655 - RNA, 19 nt, Homo sapiens
  misc_RNA (1)...(19): siRNA sense strand
gcuauggucagaagaugau

SEQ ID NO: 851656 - RNA, 19 nt, Homo sapiens
  misc_RNA (1)...(19): siRNA sense strand
guucagagagcuuaaagac

SEQ ID NO: 851657 - RNA, 19 nt, Homo sapiens
  misc_RNA (1)...(19): siRNA sense strand
uaugcaaacuggagauggu

SEQ ID NO: 851658 - RNA, 19 nt, Homo sapiens
  misc_RNA (1)...(19): siRNA sense strand
ugaaaggcaccuaguguac

SEQ ID NO: 851659 - RNA, 19 nt, Homo sapiens
  misc_RNA (1)...(19): siRNA sense strand
guugaaccauauccugaca

SEQ ID NO: 851660 - RNA, 19 nt, Homo sapiens
  misc_RNA (1)...(19): siRNA sense strand
caacauccgcagcgaguac

SEQ ID NO: 851661 - RNA, 19 nt, Homo sapiens
  misc_RNA (1)...(19): siRNA sense strand
acauucagauggugacagu

SEQ ID NO: 851662 - RNA, 19 nt, Homo sapiens
  misc_RNA (1)...(19): siRNA sense strand
gaggaggugcugacugaag

SEQ ID NO: 851663 - RNA, 19 nt, Homo sapiens
  misc_RNA (1)...(19): siRNA sense strand
aaucacaacgccaaucuag

SEQ ID NO: 851664 - RNA, 19 nt, Homo sapiens
  misc_RNA (1)...(19): siRNA sense strand
gcagccugacgaucacaaa

SEQ ID NO: 851665 - RNA, 19 nt, Homo sapiens
  misc_RNA (1)...(19): siRNA sense strand
ugaaccauauccugacaac

SEQ ID NO: 851666 - RNA, 19 nt, Homo sapiens
  misc_RNA (1)...(19): siRNA sense strand
auggcuaacuggcaacuga

SEQ ID NO: 851667 - RNA, 19 nt, Homo sapiens
  misc_RNA (1)...(19): siRNA sense strand
cagacauacuaaaccacuu

SEQ ID NO: 851668 - RNA, 19 nt, Homo sapiens
  misc_RNA (1)...(19): siRNA sense strand
uaccugaggccguggagaa

SEQ ID NO: 851669 - RNA, 19 nt, Homo sapiens
  misc_RNA (1)...(19): siRNA sense strand
cuaaaggccaugagauuuu

SEQ ID NO: 851670 - RNA, 19 nt, Homo sapiens
  misc_RNA (1)...(19): siRNA sense strand
caaucacaacgccaaucua

SEQ ID NO: 851671 - RNA, 19 nt, Homo sapiens
  misc_RNA (1)...(19): siRNA sense strand
agccugacgaucacaaaua

SEQ ID NO: 851672 - RNA, 19 nt, Homo sapiens
  misc_RNA (1)...(19): siRNA sense strand
gcuuaaagaccaggaugga

SEQ ID NO: 851673 - RNA, 19 nt, Homo sapiens
  misc_RNA (1)...(19): siRNA sense strand
ggccuauagcuuucaggua

SEQ ID NO: 851674 - RNA, 19 nt, Homo sapiens
  misc_RNA (1)...(19): siRNA sense strand
cugcagacauacuaaacca

SEQ ID NO: 851675 - RNA, 19 nt, Homo sapiens
  misc_RNA (1)...(19): siRNA sense strand
ccaaucacaacgccaaucu

SEQ ID NO: 851676 - RNA, 19 nt, Homo sapiens
  misc_RNA (1)...(19): siRNA sense strand
cugacgaucacaaauauuc

SEQ ID NO: 851677 - RNA, 19 nt, Homo sapiens
  misc_RNA (1)...(19): siRNA sense strand
cagcauuacagggaacaaa

SEQ ID NO: 851678 - RNA, 19 nt, Homo sapiens
  misc_RNA (1)...(19): siRNA sense strand
cacuaaagguacugugcau

SEQ ID NO: 851679 - RNA, 19 nt, Homo sapiens
  misc_RNA (1)...(19): siRNA sense strand
ccaccacacuaaagguacu

SEQ ID NO: 851680 - RNA, 19 nt, Homo sapiens
  misc_RNA (1)...(19): siRNA sense strand
uccuaaaggccaugagauu

SEQ ID NO: 851681 - RNA, 19 nt, Homo sapiens
  misc_RNA (1)...(19): siRNA sense strand
gaggaagaagaggaugaaa

SEQ ID NO: 851682 - RNA, 19 nt, Homo sapiens
  misc_RNA (1)...(19): siRNA sense strand
guacgagcgcugggauuuc

SEQ ID NO: 851683 - RNA, 19 nt, Homo sapiens
  misc_RNA (1)...(19): siRNA sense strand
uguacgagcgcugggauuu

SEQ ID NO: 851684 - RNA, 19 nt, Homo sapiens
  misc_RNA (1)...(19): siRNA sense strand
gcuggaggcccuacuuugc

SEQ ID NO: 851685 - RNA, 19 nt, Homo sapiens
  misc_RNA (1)...(19): siRNA sense strand
gaugacacagcugacauuc

SEQ ID NO: 851686 - RNA, 19 nt, Homo sapiens
  misc_RNA (1)...(19): siRNA sense strand
uggcaacugauucauaugu

SEQ ID NO: 851687 - RNA, 19 nt, Homo sapiens
  misc_RNA (1)...(19): siRNA sense strand
cuuaugggcaaauggcuaa

SEQ ID NO: 851688 - RNA, 19 nt, Homo sapiens
  misc_RNA (1)...(19): siRNA sense strand
gagggcagcuugagaagaa

SEQ ID NO: 851689 - RNA, 19 nt, Homo sapiens
  misc_RNA (1)...(19): siRNA sense strand
ggaccuuggugccaucuac

SEQ ID NO: 851690 - RNA, 19 nt, Homo sapiens
  misc_RNA (1)...(19): siRNA sense strand
ggagaacaaucagcuucca

SEQ ID NO: 851691 - RNA, 19 nt, Homo sapiens
  misc_RNA (1)...(19): siRNA sense strand
ggacaaguuccaggucuuc

SEQ ID NO: 851692 - RNA, 19 nt, Homo sapiens
  misc_RNA (1)...(19): siRNA sense strand
ccugagggcagcuugagaa

SEQ ID NO: 851693 - RNA, 19 nt, Homo sapiens
  misc_RNA (1)...(19): siRNA sense strand
ugcagcagaugcccggauu

SEQ ID NO: 851694 - RNA, 19 nt, Homo sapiens
  misc_RNA (1)...(19): siRNA sense strand
ugguggugcugcucuguug

SEQ ID NO: 851695 - RNA, 19 nt, Homo sapiens
  misc_RNA (1)...(19): siRNA sense strand
ugcagagcaucuuccagaa

SEQ ID NO: 851696 - RNA, 19 nt, Homo sapiens
  misc_RNA (1)...(19): siRNA sense strand
ggauaaggaccggaucucu

SEQ ID NO: 851697 - RNA, 19 nt, Homo sapiens
  misc_RNA (1)...(19): siRNA sense strand
gaaguacuuugccauauuu

SEQ ID NO: 851698 - RNA, 19 nt, Homo sapiens
  misc_RNA (1)...(19): siRNA sense strand
uaaagaagaugccagaugu

SEQ ID NO: 851699 - RNA, 19 nt, Homo sapiens
  misc_RNA (1)...(19): siRNA sense strand
ccacaaauuccuugaaaua

SEQ ID NO: 851700 - RNA, 19 nt, Homo sapiens
  misc_RNA (1)...(19): siRNA sense strand
ccaaguggcuuuacagaug

SEQ ID NO: 851701 - RNA, 19 nt, Homo sapiens
  misc_RNA (1)...(19): siRNA sense strand
gaaauaugucccuuuagua

SEQ ID NO: 851702 - RNA, 19 nt, Homo sapiens
  misc_RNA (1)...(19): siRNA sense strand
gaacuuucgucaugaggaa

SEQ ID NO: 851703 - RNA, 19 nt, Homo sapiens
  misc_RNA (1)...(19): siRNA sense strand
ggaaauuucguaaucguaa

SEQ ID NO: 851704 - RNA, 19 nt, Homo sapiens
  misc_RNA (1)...(19): siRNA sense strand
gaaacaaaggacuauauga

SEQ ID NO: 851705 - RNA, 19 nt, Homo sapiens
  misc_RNA (1)...(19): siRNA sense strand
ugaaauaugucccuuuagu

SEQ ID NO: 851706 - RNA, 19 nt, Homo sapiens
  misc_RNA (1)...(19): siRNA sense strand
gcaggcaugcccaaacuua

SEQ ID NO: 851707 - RNA, 19 nt, Homo sapiens
  misc_RNA (1)...(19): siRNA sense strand
gaagaugccagauguugaa

SEQ ID NO: 851708 - RNA, 19 nt, Homo sapiens
  misc_RNA (1)...(19): siRNA sense strand
ugaaguacuuugccauauu

SEQ ID NO: 851709 - RNA, 19 nt, Homo sapiens
  misc_RNA (1)...(19): siRNA sense strand
gaaauuugcacacuauugu

SEQ ID NO: 851710 - RNA, 19 nt, Homo sapiens
  misc_RNA (1)...(19): siRNA sense strand
cuugaaauaugucccuuua

SEQ ID NO: 851711 - RNA, 19 nt, Homo sapiens
  misc_RNA (1)...(19): siRNA sense strand
cuuaagaacuuucgucaug

SEQ ID NO: 851712 - RNA, 19 nt, Homo sapiens
  misc_RNA (1)...(19): siRNA sense strand
gaaaugacagcagaugaaa

SEQ ID NO: 851713 - RNA, 19 nt, Homo sapiens
  misc_RNA (1)...(19): siRNA sense strand
gauaucauguguauggaau

SEQ ID NO: 851714 - RNA, 19 nt, Homo sapiens
  misc_RNA (1)...(19): siRNA sense strand
ggugaauguuccugaaauu

SEQ ID NO: 851715 - RNA, 19 nt, Homo sapiens
  misc_RNA (1)...(19): siRNA sense strand
uguaucagcuuaagaacuu

SEQ ID NO: 851716 - RNA, 19 nt, Homo sapiens
  misc_RNA (1)...(19): siRNA sense strand
ugaaguagaucuugguuac

SEQ ID NO: 851717 - RNA, 19 nt, Homo sapiens
  misc_RNA (1)...(19): siRNA sense strand
uguggaaacuucucauuug

SEQ ID NO: 851718 - RNA, 19 nt, Homo sapiens
  misc_RNA (1)...(19): siRNA sense strand
gaagacaguuggagaucag

SEQ ID NO: 851719 - RNA, 19 nt, Homo sapiens
  misc_RNA (1)...(19): siRNA sense strand
acaaaggacuauaugaauc

SEQ ID NO: 851720 - RNA, 19 nt, Homo sapiens
  misc_RNA (1)...(19): siRNA sense strand
gacagcagaugaaacaaag

SEQ ID NO: 851721 - RNA, 19 nt, Homo sapiens
  misc_RNA (1)...(19): siRNA sense strand
gagccaaaauucaaacuuu

SEQ ID NO: 851722 - RNA, 19 nt, Homo sapiens
  misc_RNA (1)...(19): siRNA sense strand
caaaggacuauaugaauca

SEQ ID NO: 851723 - RNA, 19 nt, Homo sapiens
  misc_RNA (1)...(19): siRNA sense strand
gaaauuccagaagaaauga

SEQ ID NO: 851724 - RNA, 19 nt, Homo sapiens
  misc_RNA (1)...(19): siRNA sense strand
gaagaaaugacagcagaug

SEQ ID NO: 851725 - RNA, 19 nt, Homo sapiens
  misc_RNA (1)...(19): siRNA sense strand
gcccguagguuacaugaag

SEQ ID NO: 851726 - RNA, 19 nt, Homo sapiens
  misc_RNA (1)...(19): siRNA sense strand
ccacagccauuuaaagacu

SEQ ID NO: 851727 - RNA, 19 nt, Homo sapiens
  misc_RNA (1)...(19): siRNA sense strand
gaucuugguuaccucaaca

SEQ ID NO: 851728 - RNA, 19 nt, Homo sapiens
  misc_RNA (1)...(19): siRNA sense strand
gugcaggacccacaaauuc

SEQ ID NO: 851729 - RNA, 19 nt, Homo sapiens
  misc_RNA (1)...(19): siRNA sense strand
caugaaguacuuugccaua

SEQ ID NO: 851730 - RNA, 19 nt, Homo sapiens
  misc_RNA (1)...(19): siRNA sense strand
ucacuaaaccacagccauu

SEQ ID NO: 851731 - RNA, 19 nt, Homo sapiens
  misc_RNA (1)...(19): siRNA sense strand
gggugaauguuccugaaau

SEQ ID NO: 851732 - RNA, 19 nt, Homo sapiens
  misc_RNA (1)...(19): siRNA sense strand
aggaagcagugacccuaua

SEQ ID NO: 851733 - RNA, 19 nt, Homo sapiens
  misc_RNA (1)...(19): siRNA sense strand
gagaucaggugguuuuaga

SEQ ID NO: 851734 - RNA, 19 nt, Homo sapiens
  misc_RNA (1)...(19): siRNA sense strand
gaaacucggaacacuuaga

SEQ ID NO: 851735 - RNA, 19 nt, Homo sapiens
  misc_RNA (1)...(19): siRNA sense strand
ugaaauuccagaagaaaug

SEQ ID NO: 851736 - RNA, 19 nt, Homo sapiens
  misc_RNA (1)...(19): siRNA sense strand
ggaagcagugacccuauau

SEQ ID NO: 851737 - RNA, 19 nt, Homo sapiens
  misc_RNA (1)...(19): siRNA sense strand
ugacagcagaugaaacaaa

SEQ ID NO: 851738 - RNA, 19 nt, Homo sapiens
  misc_RNA (1)...(19): siRNA sense strand
uuaagaacuuucgucauga

SEQ ID NO: 851739 - RNA, 19 nt, Homo sapiens
  misc_RNA (1)...(19): siRNA sense strand
cuugagaggcgaagaguaa

SEQ ID NO: 851740 - RNA, 19 nt, Homo sapiens
  misc_RNA (1)...(19): siRNA sense strand
ugcaggauaucauguguau

SEQ ID NO: 851741 - RNA, 19 nt, Homo sapiens
  misc_RNA (1)...(19): siRNA sense strand
agaaaugacagcagaugaa

SEQ ID NO: 851742 - RNA, 19 nt, Homo sapiens
  misc_RNA (1)...(19): siRNA sense strand
caggauaucauguguaugg

SEQ ID NO: 851743 - RNA, 19 nt, Homo sapiens
  misc_RNA (1)...(19): siRNA sense strand
aaacuuaguggguguggaa

SEQ ID NO: 851744 - RNA, 19 nt, Homo sapiens
  misc_RNA (1)...(19): siRNA sense strand
gaugaaacaaaggacuaua

SEQ ID NO: 851745 - RNA, 19 nt, Homo sapiens
  misc_RNA (1)...(19): siRNA sense strand
ugaaacaaaggacuauaug

SEQ ID NO: 851746 - RNA, 19 nt, Homo sapiens
  misc_RNA (1)...(19): siRNA sense strand
gggaaauuucguaaucgua

SEQ ID NO: 851747 - RNA, 19 nt, Homo sapiens
  misc_RNA (1)...(19): siRNA sense strand
ggaguugguagaauccauu

SEQ ID NO: 851748 - RNA, 19 nt, Homo sapiens
  misc_RNA (1)...(19): siRNA sense strand
gacccuauaucugcgaguu

SEQ ID NO: 851749 - RNA, 19 nt, Homo sapiens
  misc_RNA (1)...(19): siRNA sense strand
cccuaaagauggcagaguu

SEQ ID NO: 851750 - RNA, 19 nt, Homo sapiens
  misc_RNA (1)...(19): siRNA sense strand
ugaagacaguuggagauca

SEQ ID NO: 851751 - RNA, 19 nt, Homo sapiens
  misc_RNA (1)...(19): siRNA sense strand
uaagaacuuucgucaugag

SEQ ID NO: 851752 - RNA, 19 nt, Homo sapiens
  misc_RNA (1)...(19): siRNA sense strand
cagaugaaacaaaggacua

SEQ ID NO: 851753 - RNA, 19 nt, Homo sapiens
  misc_RNA (1)...(19): siRNA sense strand
guggaaacuucucauuugg

SEQ ID NO: 851754 - RNA, 19 nt, Homo sapiens
  misc_RNA (1)...(19): siRNA sense strand
acccacaaauuccuugaaa

SEQ ID NO: 851755 - RNA, 19 nt, Homo sapiens
  misc_RNA (1)...(19): siRNA sense strand
uaucauguguauggaaugu

SEQ ID NO: 851756 - RNA, 19 nt, Homo sapiens
  misc_RNA (1)...(19): siRNA sense strand
aaaaugcucuugaaguaga

SEQ ID NO: 851757 - RNA, 19 nt, Homo sapiens
  misc_RNA (1)...(19): siRNA sense strand
aaacucggaacacuuagaa

SEQ ID NO: 851758 - RNA, 19 nt, Homo sapiens
  misc_RNA (1)...(19): siRNA sense strand
aaccacagccauuuaaaga

SEQ ID NO: 851759 - RNA, 19 nt, Homo sapiens
  misc_RNA (1)...(19): siRNA sense strand
uuaaagaagaugccagaug

SEQ ID NO: 851760 - RNA, 19 nt, Homo sapiens
  misc_RNA (1)...(19): siRNA sense strand
gauggcagaguuggaguuu

SEQ ID NO: 851761 - RNA, 19 nt, Homo sapiens
  misc_RNA (1)...(19): siRNA sense strand
guguggaaacuucucauuu

SEQ ID NO: 851762 - RNA, 19 nt, Homo sapiens
  misc_RNA (1)...(19): siRNA sense strand
ccuuguaucccaaugcuaa

SEQ ID NO: 851763 - RNA, 19 nt, Homo sapiens
  misc_RNA (1)...(19): siRNA sense strand
gaaaugguucgaguuccuu

SEQ ID NO: 851764 - RNA, 19 nt, Homo sapiens
  misc_RNA (1)...(19): siRNA sense strand
uuccugaaauuccuuguau

SEQ ID NO: 851765 - RNA, 19 nt, Homo sapiens
  misc_RNA (1)...(19): siRNA sense strand
ggauaucauguguauggaa

SEQ ID NO: 851766 - RNA, 19 nt, Homo sapiens
  misc_RNA (1)...(19): siRNA sense strand
agaaauuugcacacuauug

SEQ ID NO: 851767 - RNA, 19 nt, Homo sapiens
  misc_RNA (1)...(19): siRNA sense strand
ucaggugguuuuagaaauu

SEQ ID NO: 851768 - RNA, 19 nt, Homo sapiens
  misc_RNA (1)...(19): siRNA sense strand
auaugucccuuuaguaaca

SEQ ID NO: 851769 - RNA, 19 nt, Homo sapiens
  misc_RNA (1)...(19): siRNA sense strand
ccaugaggcuuuuagcauu

SEQ ID NO: 851770 - RNA, 19 nt, Homo sapiens
  misc_RNA (1)...(19): siRNA sense strand
gaggucuuauccaacaugu

SEQ ID NO: 851771 - RNA, 19 nt, Homo sapiens
  misc_RNA (1)...(19): siRNA sense strand
guaccucccucugcaggau

SEQ ID NO: 851772 - RNA, 19 nt, Homo sapiens
  misc_RNA (1)...(19): siRNA sense strand
agaaaagugugaaaacaug

SEQ ID NO: 851773 - RNA, 19 nt, Homo sapiens
  misc_RNA (1)...(19): siRNA sense strand
gauccagccuucccuaacc

SEQ ID NO: 851774 - RNA, 19 nt, Homo sapiens
  misc_RNA (1)...(19): siRNA sense strand
cagcagaugaaacaaagga

SEQ ID NO: 851775 - RNA, 19 nt, Homo sapiens
  misc_RNA (1)...(19): siRNA sense strand
ggaacacuuagaaaugguu

SEQ ID NO: 851776 - RNA, 19 nt, Homo sapiens
  misc_RNA (1)...(19): siRNA sense strand
gaaagaaaagugugaaaac

SEQ ID NO: 851777 - RNA, 19 nt, Homo sapiens
  misc_RNA (1)...(19): siRNA sense strand
aaugacagcagaugaaaca

SEQ ID NO: 851778 - RNA, 19 nt, Homo sapiens
  misc_RNA (1)...(19): siRNA sense strand
cuugguuaccucaacauua

SEQ ID NO: 851779 - RNA, 19 nt, Homo sapiens
  misc_RNA (1)...(19): siRNA sense strand
aagaagaugccagauguug

SEQ ID NO: 851780 - RNA, 19 nt, Homo sapiens
  misc_RNA (1)...(19): siRNA sense strand
uugguuaccucaacauuac

SEQ ID NO: 851781 - RNA, 19 nt, Homo sapiens
  misc_RNA (1)...(19): siRNA sense strand
gguucgaguuccuuuccuu

SEQ ID NO: 851782 - RNA, 19 nt, Homo sapiens
  misc_RNA (1)...(19): siRNA sense strand
ucggaacacuuagaaaugg

SEQ ID NO: 851783 - RNA, 19 nt, Homo sapiens
  misc_RNA (1)...(19): siRNA sense strand
ggguaagacucacuaaacc

SEQ ID NO: 851784 - RNA, 19 nt, Homo sapiens
  misc_RNA (1)...(19): siRNA sense strand
caauuccuccugaaaauaa

SEQ ID NO: 851785 - RNA, 19 nt, Homo sapiens
  misc_RNA (1)...(19): siRNA sense strand
uuagaaaugguucgaguuc

SEQ ID NO: 851786 - RNA, 19 nt, Homo sapiens
  misc_RNA (1)...(19): siRNA sense strand
agaagaugccagauguuga

SEQ ID NO: 851787 - RNA, 19 nt, Homo sapiens
  misc_RNA (1)...(19): siRNA sense strand
ggaggucuuauccaacaug

SEQ ID NO: 851788 - RNA, 19 nt, Homo sapiens
  misc_RNA (1)...(19): siRNA sense strand
gguguggaaacuucucauu

SEQ ID NO: 851789 - RNA, 19 nt, Homo sapiens
  misc_RNA (1)...(19): siRNA sense strand
ucauguguauggaaugucu

SEQ ID NO: 851790 - RNA, 19 nt, Homo sapiens
  misc_RNA (1)...(19): siRNA sense strand
gaucaggugguuuuagaaa

SEQ ID NO: 851791 - RNA, 19 nt, Homo sapiens
  misc_RNA (1)...(19): siRNA sense strand
gaagcagugacccuauauc

SEQ ID NO: 851792 - RNA, 19 nt, Homo sapiens
  misc_RNA (1)...(19): siRNA sense strand
gaguugguagaauccauuu

SEQ ID NO: 851793 - RNA, 19 nt, Homo sapiens
  misc_RNA (1)...(19): siRNA sense strand
uauaugaaguggguaagac

SEQ ID NO: 851794 - RNA, 19 nt, Homo sapiens
  misc_RNA (1)...(19): siRNA sense strand
ucgaguuccuuuccuugga

SEQ ID NO: 851795 - RNA, 19 nt, Homo sapiens
  misc_RNA (1)...(19): siRNA sense strand
ggacccacaaauuccuuga

SEQ ID NO: 851796 - RNA, 19 nt, Homo sapiens
  misc_RNA (1)...(19): siRNA sense strand
aaaccacagccauuuaaag

SEQ ID NO: 851797 - RNA, 19 nt, Homo sapiens
  misc_RNA (1)...(19): siRNA sense strand
ggaaggccuuaauguaaua

SEQ ID NO: 851798 - RNA, 19 nt, Homo sapiens
  misc_RNA (1)...(19): siRNA sense strand
ggaacagucccuucuauaa

SEQ ID NO: 851799 - RNA, 19 nt, Homo sapiens
  misc_RNA (1)...(19): siRNA sense strand
gcaauggugugacgcagaa

SEQ ID NO: 851800 - RNA, 19 nt, Homo sapiens
  misc_RNA (1)...(19): siRNA sense strand
caaauucuccugccaguga

SEQ ID NO: 851801 - RNA, 19 nt, Homo sapiens
  misc_RNA (1)...(19): siRNA sense strand
gggaaggccuuaauguaau

SEQ ID NO: 851802 - RNA, 19 nt, Homo sapiens
  misc_RNA (1)...(19): siRNA sense strand
ccauggaucugcuuauuca

SEQ ID NO: 851803 - RNA, 19 nt, Homo sapiens
  misc_RNA (1)...(19): siRNA sense strand
cacaaaccauggauuuauu

SEQ ID NO: 851804 - RNA, 19 nt, Homo sapiens
  misc_RNA (1)...(19): siRNA sense strand
aaccauggauuuauuccua

SEQ ID NO: 851805 - RNA, 19 nt, Homo sapiens
  misc_RNA (1)...(19): siRNA sense strand
ggaacaaucaggccuggaa

SEQ ID NO: 851806 - RNA, 19 nt, Homo sapiens
  misc_RNA (1)...(19): siRNA sense strand
gaacagucccuucuauaac

SEQ ID NO: 851807 - RNA, 19 nt, Homo sapiens
  misc_RNA (1)...(19): siRNA sense strand
gcaugcaguuccagccaaa

SEQ ID NO: 851808 - RNA, 19 nt, Homo sapiens
  misc_RNA (1)...(19): siRNA sense strand
ccacaaaccauggauuuau

SEQ ID NO: 851809 - RNA, 19 nt, Homo sapiens
  misc_RNA (1)...(19): siRNA sense strand
cagaaggccucagcaccua

SEQ ID NO: 851810 - RNA, 19 nt, Homo sapiens
  misc_RNA (1)...(19): siRNA sense strand
gaagacaaggucccaguca

SEQ ID NO: 851811 - RNA, 19 nt, Homo sapiens
  misc_RNA (1)...(19): siRNA sense strand
caaggucccagucaagaaa

SEQ ID NO: 851812 - RNA, 19 nt, Homo sapiens
  misc_RNA (1)...(19): siRNA sense strand
cagcagaccacuagguauu

SEQ ID NO: 851813 - RNA, 19 nt, Homo sapiens
  misc_RNA (1)...(19): siRNA sense strand
gcaagaacucuccaacauc

SEQ ID NO: 851814 - RNA, 19 nt, Homo sapiens
  misc_RNA (1)...(19): siRNA sense strand
cagaagaccagaacugugu

SEQ ID NO: 851815 - RNA, 19 nt, Homo sapiens
  misc_RNA (1)...(19): siRNA sense strand
ugaagcauccgacuguaaa

SEQ ID NO: 851816 - RNA, 19 nt, Homo sapiens
  misc_RNA (1)...(19): siRNA sense strand
gcauccgacuguaaagaau

SEQ ID NO: 851817 - RNA, 19 nt, Homo sapiens
  misc_RNA (1)...(19): siRNA sense strand
gaacccgacugggaaccuu

SEQ ID NO: 851818 - RNA, 19 nt, Homo sapiens
  misc_RNA (1)...(19): siRNA sense strand
ugcaagaacucuccaacau

SEQ ID NO: 851819 - RNA, 19 nt, Homo sapiens
  misc_RNA (1)...(19): siRNA sense strand
gaacaugcaaccugaagac

SEQ ID NO: 851820 - RNA, 19 nt, Homo sapiens
  misc_RNA (1)...(19): siRNA sense strand
ggagcaaccagacccagaa

SEQ ID NO: 851821 - RNA, 19 nt, Homo sapiens
  misc_RNA (1)...(19): siRNA sense strand
cuaaacuacuccaugaaca

SEQ ID NO: 851822 - RNA, 19 nt, Homo sapiens
  misc_RNA (1)...(19): siRNA sense strand
cuauaacuguggagaggaa

SEQ ID NO: 851823 - RNA, 19 nt, Homo sapiens
  misc_RNA (1)...(19): siRNA sense strand
uaauacagcagaccacuag

SEQ ID NO: 851824 - RNA, 19 nt, Homo sapiens
  misc_RNA (1)...(19): siRNA sense strand
gaguguggauccagcuugu

SEQ ID NO: 851825 - RNA, 19 nt, Homo sapiens
  misc_RNA (1)...(19): siRNA sense strand
accagagaaugaaaucuaa

SEQ ID NO: 851826 - RNA, 19 nt, Homo sapiens
  misc_RNA (1)...(19): siRNA sense strand
guaauacagcagaccacua

SEQ ID NO: 851827 - RNA, 19 nt, Homo sapiens
  misc_RNA (1)...(19): siRNA sense strand
ggggaaggccuuaauguaa

SEQ ID NO: 851828 - RNA, 19 nt, Homo sapiens
  misc_RNA (1)...(19): siRNA sense strand
ucuaagagguggcagaaaa

SEQ ID NO: 851829 - RNA, 19 nt, Homo sapiens
  misc_RNA (1)...(19): siRNA sense strand
uauccauccuugcaaaugu

SEQ ID NO: 851830 - RNA, 19 nt, Homo sapiens
  misc_RNA (1)...(19): siRNA sense strand
cuuggaggcugcuuuggaa

SEQ ID NO: 851831 - RNA, 19 nt, Homo sapiens
  misc_RNA (1)...(19): siRNA sense strand
gcaaccagacccagaacau

SEQ ID NO: 851832 - RNA, 19 nt, Homo sapiens
  misc_RNA (1)...(19): siRNA sense strand
acaacuggccgaagaauag

SEQ ID NO: 851833 - RNA, 19 nt, Homo sapiens
  misc_RNA (1)...(19): siRNA sense strand
aaacagaagaccagaacug

SEQ ID NO: 851834 - RNA, 19 nt, Homo sapiens
  misc_RNA (1)...(19): siRNA sense strand
gacaaggucccagucaaga

SEQ ID NO: 851835 - RNA, 19 nt, Homo sapiens
  misc_RNA (1)...(19): siRNA sense strand
uuccuaaacuacuccauga

SEQ ID NO: 851836 - RNA, 19 nt, Homo sapiens
  misc_RNA (1)...(19): siRNA sense strand
ccagcuguguguacucaau

SEQ ID NO: 851837 - RNA, 19 nt, Homo sapiens
  misc_RNA (1)...(19): siRNA sense strand
cagagaaugaaaucuaaga

SEQ ID NO: 851838 - RNA, 19 nt, Homo sapiens
  misc_RNA (1)...(19): siRNA sense strand
aaccagagaaugaaaucua

SEQ ID NO: 851839 - RNA, 19 nt, Homo sapiens
  misc_RNA (1)...(19): siRNA sense strand
caaaugucuucugcugaga

SEQ ID NO: 851840 - RNA, 19 nt, Homo sapiens
  misc_RNA (1)...(19): siRNA sense strand
gcagaccacuagguauuuu

SEQ ID NO: 851841 - RNA, 19 nt, Homo sapiens
  misc_RNA (1)...(19): siRNA sense strand
uggaacagucccuucuaua

SEQ ID NO: 851842 - RNA, 19 nt, Homo sapiens
  misc_RNA (1)...(19): siRNA sense strand
gaagaaaacuauccauccu

SEQ ID NO: 851843 - RNA, 19 nt, Homo sapiens
  misc_RNA (1)...(19): siRNA sense strand
aagaauagcaaugguguga

SEQ ID NO: 851844 - RNA, 19 nt, Homo sapiens
  misc_RNA (1)...(19): siRNA sense strand
gaaccucagcuacaaacag

SEQ ID NO: 851845 - RNA, 19 nt, Homo sapiens
  misc_RNA (1)...(19): siRNA sense strand
cagagaauagugucgcaaa

SEQ ID NO: 851846 - RNA, 19 nt, Homo sapiens
  misc_RNA (1)...(19): siRNA sense strand
caccuaugccugugauuug

SEQ ID NO: 851847 - RNA, 19 nt, Homo sapiens
  misc_RNA (1)...(19): siRNA sense strand
cuggaacagucccuucuau

SEQ ID NO: 851848 - RNA, 19 nt, Homo sapiens
  misc_RNA (1)...(19): siRNA sense strand
uacagcagaccacuaggua

SEQ ID NO: 851849 - RNA, 19 nt, Homo sapiens
  misc_RNA (1)...(19): siRNA sense strand
caacccacuucugcagaga

SEQ ID NO: 851850 - RNA, 19 nt, Homo sapiens
  misc_RNA (1)...(19): siRNA sense strand
ccagaaccagagaaugaaa

SEQ ID NO: 851851 - RNA, 19 nt, Homo sapiens
  misc_RNA (1)...(19): siRNA sense strand
aagacaaggucccagucaa

SEQ ID NO: 851852 - RNA, 19 nt, Homo sapiens
  misc_RNA (1)...(19): siRNA sense strand
cuccauggaucugcuuauu

SEQ ID NO: 851853 - RNA, 19 nt, Homo sapiens
  misc_RNA (1)...(19): siRNA sense strand
ugacuuggaggcugcuuug

SEQ ID NO: 851854 - RNA, 19 nt, Homo sapiens
  misc_RNA (1)...(19): siRNA sense strand
uuccagaaccagagaauga

SEQ ID NO: 851855 - RNA, 19 nt, Homo sapiens
  misc_RNA (1)...(19): siRNA sense strand
uaaacuacuccaugaacau

SEQ ID NO: 851856 - RNA, 19 nt, Homo sapiens
  misc_RNA (1)...(19): siRNA sense strand
aacagucccuucuauaacu

SEQ ID NO: 851857 - RNA, 19 nt, Homo sapiens
  misc_RNA (1)...(19): siRNA sense strand
uguguguacucaaugauag

SEQ ID NO: 851858 - RNA, 19 nt, Homo sapiens
  misc_RNA (1)...(19): siRNA sense strand
gcaaccugaagacguguga

SEQ ID NO: 851859 - RNA, 19 nt, Homo sapiens
  misc_RNA (1)...(19): siRNA sense strand
gcaguuccagccaaauucu

SEQ ID NO: 851860 - RNA, 19 nt, Homo sapiens
  misc_RNA (1)...(19): siRNA sense strand
accauggauuuauuccuaa

SEQ ID NO: 851861 - RNA, 19 nt, Homo sapiens
  misc_RNA (1)...(19): siRNA sense strand
guacucaaugauagauuuc

SEQ ID NO: 851862 - RNA, 19 nt, Homo sapiens
  misc_RNA (1)...(19): siRNA sense strand
caaccagacccagaacauc

SEQ ID NO: 851863 - RNA, 19 nt, Homo sapiens
  misc_RNA (1)...(19): siRNA sense strand
aaacuauccauccuugcaa

SEQ ID NO: 851864 - RNA, 19 nt, Homo sapiens
  misc_RNA (1)...(19): siRNA sense strand
acaaggucccagucaagaa

SEQ ID NO: 851865 - RNA, 19 nt, Homo sapiens
  misc_RNA (1)...(19): siRNA sense strand
aacuauccauccuugcaaa

SEQ ID NO: 851866 - RNA, 19 nt, Homo sapiens
  misc_RNA (1)...(19): siRNA sense strand
acaaaccauggauuuauuc

SEQ ID NO: 851867 - RNA, 19 nt, Homo sapiens
  misc_RNA (1)...(19): siRNA sense strand
gauuugugggccugaagaa

SEQ ID NO: 851868 - RNA, 19 nt, Homo sapiens
  misc_RNA (1)...(19): siRNA sense strand
ccacccagcuguguguacu

SEQ ID NO: 851869 - RNA, 19 nt, Homo sapiens
  misc_RNA (1)...(19): siRNA sense strand
gcacggcuuugcacacgua

SEQ ID NO: 851870 - RNA, 19 nt, Homo sapiens
  misc_RNA (1)...(19): siRNA sense strand
ccagagauguggagcagaa

SEQ ID NO: 851871 - RNA, 19 nt, Homo sapiens
  misc_RNA (1)...(19): siRNA sense strand
uaaacacccugaaauugug

SEQ ID NO: 851872 - RNA, 19 nt, Homo sapiens
  misc_RNA (1)...(19): siRNA sense strand
cuaaacacccugaaauugu

SEQ ID NO: 851873 - RNA, 19 nt, Homo sapiens
  misc_RNA (1)...(19): siRNA sense strand
ccuaaacacccugaaauug

SEQ ID NO: 851874 - RNA, 19 nt, Homo sapiens
  misc_RNA (1)...(19): siRNA sense strand
gagccuaaacacccugaaa

SEQ ID NO: 851875 - RNA, 19 nt, Homo sapiens
  misc_RNA (1)...(19): siRNA sense strand
gccuaaacacccugaaauu

SEQ ID NO: 851876 - RNA, 19 nt, Homo sapiens
  misc_RNA (1)...(19): siRNA sense strand
guaaaccuaggcuggucua

SEQ ID NO: 851877 - RNA, 19 nt, Homo sapiens
  misc_RNA (1)...(19): siRNA sense strand
gcagugcugguacgucaag

SEQ ID NO: 851878 - RNA, 19 nt, Homo sapiens
  misc_RNA (1)...(19): siRNA sense strand
gcagaagcugggcccugaa

SEQ ID NO: 851879 - RNA, 19 nt, Homo sapiens
  misc_RNA (1)...(19): siRNA sense strand
agacagaggugacguggua

SEQ ID NO: 851880 - RNA, 19 nt, Homo sapiens
  misc_RNA (1)...(19): siRNA sense strand
guacaaggaugggaagaag

SEQ ID NO: 851881 - RNA, 19 nt, Homo sapiens
  misc_RNA (1)...(19): siRNA sense strand
ggauggagaaacugugauu

SEQ ID NO: 851882 - RNA, 19 nt, Homo sapiens
  misc_RNA (1)...(19): siRNA sense strand
gguggcaggucagugcuuu

SEQ ID NO: 851883 - RNA, 19 nt, Homo sapiens
  misc_RNA (1)...(19): siRNA sense strand
gaccugggcaguaucuuug

SEQ ID NO: 851884 - RNA, 19 nt, Homo sapiens
  misc_RNA (1)...(19): siRNA sense strand
ugaccugggcaguaucuuu

SEQ ID NO: 851885 - RNA, 19 nt, Homo sapiens
  misc_RNA (1)...(19): siRNA sense strand
cacaguggauggagaaacu

SEQ ID NO: 851886 - RNA, 19 nt, Homo sapiens
  misc_RNA (1)...(19): siRNA sense strand
gaagguucuguuucuccua

SEQ ID NO: 851887 - RNA, 19 nt, Homo sapiens
  misc_RNA (1)...(19): siRNA sense strand
gguacaaggaugggaagaa

SEQ ID NO: 851888 - RNA, 19 nt, Homo sapiens
  misc_RNA (1)...(19): siRNA sense strand
gaugggaagaagcugaguu

SEQ ID NO: 851889 - RNA, 19 nt, Homo sapiens
  misc_RNA (1)...(19): siRNA sense strand
ucuccuacuuucucgucua

SEQ ID NO: 851890 - RNA, 19 nt, Homo sapiens
  misc_RNA (1)...(19): siRNA sense strand
guggauggagaaacuguga

SEQ ID NO: 851891 - RNA, 19 nt, Homo sapiens
  misc_RNA (1)...(19): siRNA sense strand
gcuugggaagguucuguuu

SEQ ID NO: 851892 - RNA, 19 nt, Homo sapiens
  misc_RNA (1)...(19): siRNA sense strand
guucuguuucuccuacuuu

SEQ ID NO: 851893 - RNA, 19 nt, Homo sapiens
  misc_RNA (1)...(19): siRNA sense strand
uugggaagguucuguuucu

SEQ ID NO: 851894 - RNA, 19 nt, Homo sapiens
  misc_RNA (1)...(19): siRNA sense strand
cugauucccucaucuucua

SEQ ID NO: 851895 - RNA, 19 nt, Homo sapiens
  misc_RNA (1)...(19): siRNA sense strand
aggcuucggugaacaaaga

SEQ ID NO: 851896 - RNA, 19 nt, Homo sapiens
  misc_RNA (1)...(19): siRNA sense strand
gcaaggcuucggugaacaa

SEQ ID NO: 851897 - RNA, 19 nt, Homo sapiens
  misc_RNA (1)...(19): siRNA sense strand
cagcaaggcuucggugaac

SEQ ID NO: 851898 - RNA, 19 nt, Homo sapiens
  misc_RNA (1)...(19): siRNA sense strand
gaaaaggacaccccucuuc

SEQ ID NO: 851899 - RNA, 19 nt, Homo sapiens
  misc_RNA (1)...(19): siRNA sense strand
gcugggugccuuugcguaa

SEQ ID NO: 851900 - RNA, 19 nt, Homo sapiens
  misc_RNA (1)...(19): siRNA sense strand
aaggagcgcuucuucaacu

SEQ ID NO: 851901 - RNA, 19 nt, Homo sapiens
  misc_RNA (1)...(19): siRNA sense strand
ccagcaaggcuucggugaa

SEQ ID NO: 851902 - RNA, 19 nt, Homo sapiens
  misc_RNA (1)...(19): siRNA sense strand
gagcgcuucuucaacuacu

SEQ ID NO: 851903 - RNA, 19 nt, Homo sapiens
  misc_RNA (1)...(19): siRNA sense strand
ccgacaaagccaaguaugu

SEQ ID NO: 851904 - RNA, 19 nt, Homo sapiens
  misc_RNA (1)...(19): siRNA sense strand
caaagccaaguaugucaag

SEQ ID NO: 851905 - RNA, 19 nt, Homo sapiens
  misc_RNA (1)...(19): siRNA sense strand
ggaagaaguucacuccuaa

SEQ ID NO: 851906 - RNA, 19 nt, Homo sapiens
  misc_RNA (1)...(19): siRNA sense strand
caagauccacaaagacaaa

SEQ ID NO: 851907 - RNA, 19 nt, Homo sapiens
  misc_RNA (1)...(19): siRNA sense strand
ggagugaagcccucaagau

SEQ ID NO: 851908 - RNA, 19 nt, Homo sapiens
  misc_RNA (1)...(19): siRNA sense strand
gagugaagcccucaagauc

SEQ ID NO: 851909 - RNA, 19 nt, Homo sapiens
  misc_RNA (1)...(19): siRNA sense strand
ucccagaggugaggaagaa

SEQ ID NO: 851910 - RNA, 19 nt, Homo sapiens
  misc_RNA (1)...(19): siRNA sense strand
cagcagugaccacgucgua

SEQ ID NO: 851911 - RNA, 19 nt, Homo sapiens
  misc_RNA (1)...(19): siRNA sense strand
gugaagcccucaagaucca

SEQ ID NO: 851912 - RNA, 19 nt, Homo sapiens
  misc_RNA (1)...(19): siRNA sense strand
gcagugaccacgucguaca

SEQ ID NO: 851913 - RNA, 19 nt, Homo sapiens
  misc_RNA (1)...(19): siRNA sense strand
cccucaagauccacaaaga

SEQ ID NO: 851914 - RNA, 19 nt, Homo sapiens
  misc_RNA (1)...(19): siRNA sense strand
gaggugaggaagaaguuca

SEQ ID NO: 851915 - RNA, 19 nt, Homo sapiens
  misc_RNA (1)...(19): siRNA sense strand
cagcgggacuucggcuugu

SEQ ID NO: 851916 - RNA, 19 nt, Homo sapiens
  misc_RNA (1)...(19): siRNA sense strand
acgugccgcucacucagua

SEQ ID NO: 851917 - RNA, 19 nt, Homo sapiens
  misc_RNA (1)...(19): siRNA sense strand
cagaggugaggaagaaguu

SEQ ID NO: 851918 - RNA, 19 nt, Homo sapiens
  misc_RNA (1)...(19): siRNA sense strand
ggcuuggacuggagugaag

SEQ ID NO: 851919 - RNA, 19 nt, Homo sapiens
  misc_RNA (1)...(19): siRNA sense strand
gaagaaguucacuccuaac

SEQ ID NO: 851920 - RNA, 19 nt, Homo sapiens
  misc_RNA (1)...(19): siRNA sense strand
ucaagauccacaaagacaa

SEQ ID NO: 851921 - RNA, 19 nt, Homo sapiens
  misc_RNA (1)...(19): siRNA sense strand
gcaaugagcaccucuauga

SEQ ID NO: 851922 - RNA, 19 nt, Homo sapiens
  misc_RNA (1)...(19): siRNA sense strand
gcaggaagugggcgaguuu

SEQ ID NO: 851923 - RNA, 19 nt, Homo sapiens
  misc_RNA (1)...(19): siRNA sense strand
ccagcagcaugucaaguuu

SEQ ID NO: 851924 - RNA, 19 nt, Homo sapiens
  misc_RNA (1)...(19): siRNA sense strand
ggugugggcucugcuguau

SEQ ID NO: 851925 - RNA, 19 nt, Homo sapiens
  misc_RNA (1)...(19): siRNA sense strand
gagccagacugcgaucaga

SEQ ID NO: 851926 - RNA, 19 nt, Homo sapiens
  misc_RNA (1)...(19): siRNA sense strand
ccacaacggccaggacuug

SEQ ID NO: 851927 - RNA, 19 nt, Homo sapiens
  misc_RNA (1)...(19): siRNA sense strand
ccacaaccagucccaucua

SEQ ID NO: 851928 - RNA, 19 nt, Homo sapiens
  misc_RNA (1)...(19): siRNA sense strand
ccggagagcuucgggagau

SEQ ID NO: 851929 - RNA, 19 nt, Homo sapiens
  misc_RNA (1)...(19): siRNA sense strand
gacgggaaguggccagaag

SEQ ID NO: 851930 - RNA, 19 nt, Homo sapiens
  misc_RNA (1)...(19): siRNA sense strand
ggcaggaagugggcgaguu

SEQ ID NO: 851931 - RNA, 19 nt, Homo sapiens
  misc_RNA (1)...(19): siRNA sense strand
gagccugccgcuacugcua

SEQ ID NO: 851932 - RNA, 19 nt, Homo sapiens
  misc_RNA (1)...(19): siRNA sense strand
gaggaaaacuccaucuacu

SEQ ID NO: 851933 - RNA, 19 nt, Homo sapiens
  misc_RNA (1)...(19): siRNA sense strand
ccagucccaucuaccacaa

SEQ ID NO: 851934 - RNA, 19 nt, Homo sapiens
  misc_RNA (1)...(19): siRNA sense strand
augagcaccucuaugagaa

SEQ ID NO: 851935 - RNA, 19 nt, Homo sapiens
  misc_RNA (1)...(19): siRNA sense strand
aaugagcaccucuaugaga

SEQ ID NO: 851936 - RNA, 19 nt, Homo sapiens
  misc_RNA (1)...(19): siRNA sense strand
cagcuggcccuaccacuuc

SEQ ID NO: 851937 - RNA, 19 nt, Homo sapiens
  misc_RNA (1)...(19): siRNA sense strand
caugucaaguuuggcaaga

SEQ ID NO: 851938 - RNA, 19 nt, Homo sapiens
  misc_RNA (1)...(19): siRNA sense strand
caaccagucccaucuacca

SEQ ID NO: 851939 - RNA, 19 nt, Homo sapiens
  misc_RNA (1)...(19): siRNA sense strand
gaugcccagucucccaaga

SEQ ID NO: 851940 - RNA, 19 nt, Homo sapiens
  misc_RNA (1)...(19): siRNA sense strand
ugucaaguuuggcaagaag

SEQ ID NO: 851941 - RNA, 19 nt, Homo sapiens
  misc_RNA (1)...(19): siRNA sense strand
ggacgggaaguggccagaa

SEQ ID NO: 851942 - RNA, 19 nt, Homo sapiens
  misc_RNA (1)...(19): siRNA sense strand
ucuaugagaaccugugugu

SEQ ID NO: 851943 - RNA, 19 nt, Homo sapiens
  misc_RNA (1)...(19): siRNA sense strand
cacaaccagucccaucuac

SEQ ID NO: 851944 - RNA, 19 nt, Homo sapiens
  misc_RNA (1)...(19): siRNA sense strand
caucagcccuaucaacuua

SEQ ID NO: 851945 - RNA, 19 nt, Homo sapiens
  misc_RNA (1)...(19): siRNA sense strand
gcagagagccuccaagaga

SEQ ID NO: 851946 - RNA, 19 nt, Homo sapiens
  misc_RNA (1)...(19): siRNA sense strand
gaaaggaggagacgaagaa

SEQ ID NO: 851947 - RNA, 19 nt, Homo sapiens
  misc_RNA (1)...(19): siRNA sense strand
guacagaaccuggaugaaa

SEQ ID NO: 851948 - RNA, 19 nt, Homo sapiens
  misc_RNA (1)...(19): siRNA sense strand
ggacagguaugugguggaa

SEQ ID NO: 851949 - RNA, 19 nt, Homo sapiens
  misc_RNA (1)...(19): siRNA sense strand
caucaaggcucuagauuuu

SEQ ID NO: 851950 - RNA, 19 nt, Homo sapiens
  misc_RNA (1)...(19): siRNA sense strand
gcaucaaggcucuagauuu

SEQ ID NO: 851951 - RNA, 19 nt, Homo sapiens
  misc_RNA (1)...(19): siRNA sense strand
cagagagccuccaagagaa

SEQ ID NO: 851952 - RNA, 19 nt, Homo sapiens
  misc_RNA (1)...(19): siRNA sense strand
ccaacuaccaccucgguua

SEQ ID NO: 851953 - RNA, 19 nt, Homo sapiens
  misc_RNA (1)...(19): siRNA sense strand
gaaauauucacccaacauc

SEQ ID NO: 851954 - RNA, 19 nt, Homo sapiens
  misc_RNA (1)...(19): siRNA sense strand
ggaaauauucacccaacau

SEQ ID NO: 851955 - RNA, 19 nt, Homo sapiens
  misc_RNA (1)...(19): siRNA sense strand
gcagagagccaagaaguac

SEQ ID NO: 851956 - RNA, 19 nt, Homo sapiens
  misc_RNA (1)...(19): siRNA sense strand
gggugcagcucuuugaaca

SEQ ID NO: 851957 - RNA, 19 nt, Homo sapiens
  misc_RNA (1)...(19): siRNA sense strand
caacuaccaccucgguuau

SEQ ID NO: 851958 - RNA, 19 nt, Homo sapiens
  misc_RNA (1)...(19): siRNA sense strand
ggaaaggaggagacgaaga

SEQ ID NO: 851959 - RNA, 19 nt, Homo sapiens
  misc_RNA (1)...(19): siRNA sense strand
ccaggagauucgccgguuu

SEQ ID NO: 851960 - RNA, 19 nt, Homo sapiens
  misc_RNA (1)...(19): siRNA sense strand
ccacugcucucucccuuuu

SEQ ID NO: 851961 - RNA, 19 nt, Homo sapiens
  misc_RNA (1)...(19): siRNA sense strand
agaaucugguccugaagaa

SEQ ID NO: 851962 - RNA, 19 nt, Homo sapiens
  misc_RNA (1)...(19): siRNA sense strand
guggggagcuguuugcuaa

SEQ ID NO: 851963 - RNA, 19 nt, Homo sapiens
  misc_RNA (1)...(19): siRNA sense strand
gagcccaucuggagaacag

SEQ ID NO: 851964 - RNA, 19 nt, Homo sapiens
  misc_RNA (1)...(19): siRNA sense strand
ggcagagagccaagaagua

SEQ ID NO: 851965 - RNA, 19 nt, Homo sapiens
  misc_RNA (1)...(19): siRNA sense strand
caagggcagcggccaacua

SEQ ID NO: 851966 - RNA, 19 nt, Homo sapiens
  misc_RNA (1)...(19): siRNA sense strand
gugcagagagccuccaaga

SEQ ID NO: 851967 - RNA, 19 nt, Homo sapiens
  misc_RNA (1)...(19): siRNA sense strand
gaccaaaugcaggacaauu

SEQ ID NO: 851968 - RNA, 19 nt, Homo sapiens
  misc_RNA (1)...(19): siRNA sense strand
gacccugccucacgugaca

SEQ ID NO: 851969 - RNA, 19 nt, Homo sapiens
  misc_RNA (1)...(19): siRNA sense strand
gcuucuaucuuccuaucug

SEQ ID NO: 851970 - RNA, 19 nt, Homo sapiens
  misc_RNA (1)...(19): siRNA sense strand
ccaaagggguacuuauguu

SEQ ID NO: 851971 - RNA, 19 nt, Homo sapiens
  misc_RNA (1)...(19): siRNA sense strand
ccaagccagcuaugacaaa

SEQ ID NO: 851972 - RNA, 19 nt, Homo sapiens
  misc_RNA (1)...(19): siRNA sense strand
gcaucagcccuaucaacuu

SEQ ID NO: 851973 - RNA, 19 nt, Homo sapiens
  misc_RNA (1)...(19): siRNA sense strand
uugaugggcucgugaaugg

SEQ ID NO: 851974 - RNA, 19 nt, Homo sapiens
  misc_RNA (1)...(19): siRNA sense strand
gcgagcagcgcaucucugu

SEQ ID NO: 851975 - RNA, 19 nt, Homo sapiens
  misc_RNA (1)...(19): siRNA sense strand
acuaccaccucgguuauuu

SEQ ID NO: 851976 - RNA, 19 nt, Homo sapiens
  misc_RNA (1)...(19): siRNA sense strand
uacagaaccuggaugaaaa

SEQ ID NO: 851977 - RNA, 19 nt, Homo sapiens
  misc_RNA (1)...(19): siRNA sense strand
ucagcccuaucaacuuaaa

SEQ ID NO: 851978 - RNA, 19 nt, Homo sapiens
  misc_RNA (1)...(19): siRNA sense strand
uaaaagaggccaagaccaa

SEQ ID NO: 851979 - RNA, 19 nt, Homo sapiens
  misc_RNA (1)...(19): siRNA sense strand
ugcuaucgcugguacagaa

SEQ ID NO: 851980 - RNA, 19 nt, Homo sapiens
  misc_RNA (1)...(19): siRNA sense strand
gcuccaagacucguucuau

SEQ ID NO: 851981 - RNA, 19 nt, Homo sapiens
  misc_RNA (1)...(19): siRNA sense strand
cuccaccgcuucuaucuuc

SEQ ID NO: 851982 - RNA, 19 nt, Homo sapiens
  misc_RNA (1)...(19): siRNA sense strand
caagccagcuaugacaaag

SEQ ID NO: 851983 - RNA, 19 nt, Homo sapiens
  misc_RNA (1)...(19): siRNA sense strand
ggaacuggcacgggucgaa

SEQ ID NO: 851984 - RNA, 19 nt, Homo sapiens
  misc_RNA (1)...(19): siRNA sense strand
caccagaacaggauugcaa

SEQ ID NO: 851985 - RNA, 19 nt, Homo sapiens
  misc_RNA (1)...(19): siRNA sense strand
ucaaggcucuagauuuuau

SEQ ID NO: 851986 - RNA, 19 nt, Homo sapiens
  misc_RNA (1)...(19): siRNA sense strand
cuccaagacucguucuaug

SEQ ID NO: 851987 - RNA, 19 nt, Homo sapiens
  misc_RNA (1)...(19): siRNA sense strand
aaucugguccugaagaaga

SEQ ID NO: 851988 - RNA, 19 nt, Homo sapiens
  misc_RNA (1)...(19): siRNA sense strand
gccaccagcucccuguaca

SEQ ID NO: 851989 - RNA, 19 nt, Homo sapiens
  misc_RNA (1)...(19): siRNA sense strand
ggcccgaacucucccuaag

SEQ ID NO: 851990 - RNA, 19 nt, Homo sapiens
  misc_RNA (1)...(19): siRNA sense strand
ccagcuccaagcaucuuua

SEQ ID NO: 851991 - RNA, 19 nt, Homo sapiens
  misc_RNA (1)...(19): siRNA sense strand
gggcaucaaggcucuagau

SEQ ID NO: 851992 - RNA, 19 nt, Homo sapiens
  misc_RNA (1)...(19): siRNA sense strand
ugccucacgugacaccuaa

SEQ ID NO: 851993 - RNA, 19 nt, Homo sapiens
  misc_RNA (1)...(19): siRNA sense strand
caaagggguacuuauguuu

SEQ ID NO: 851994 - RNA, 19 nt, Homo sapiens
  misc_RNA (1)...(19): siRNA sense strand
ccaagacucguucuaugca

SEQ ID NO: 851995 - RNA, 19 nt, Homo sapiens
  misc_RNA (1)...(19): siRNA sense strand
caacuucaugcagccagua

SEQ ID NO: 851996 - RNA, 19 nt, Homo sapiens
  misc_RNA (1)...(19): siRNA sense strand
ggacccggaagcagauguu

SEQ ID NO: 851997 - RNA, 19 nt, Homo sapiens
  misc_RNA (1)...(19): siRNA sense strand
cagcuccaagcaucuuuaa

SEQ ID NO: 851998 - RNA, 19 nt, Homo sapiens
  misc_RNA (1)...(19): siRNA sense strand
ccgcuucuaucuuccuauc

SEQ ID NO: 851999 - RNA, 19 nt, Homo sapiens
  misc_RNA (1)...(19): siRNA sense strand
cgggaaaggaggagacgaa

SEQ ID NO: 852000 - RNA, 19 nt, Homo sapiens
  misc_RNA (1)...(19): siRNA sense strand
aaagaggccaagaccaaau

SEQ ID NO: 852001 - RNA, 19 nt, Homo sapiens
  misc_RNA (1)...(19): siRNA sense strand
ggauugcaagcucaugugu

SEQ ID NO: 852002 - RNA, 19 nt, Homo sapiens
  misc_RNA (1)...(19): siRNA sense strand
cggcagagagccaagaagu

SEQ ID NO: 852003 - RNA, 19 nt, Homo sapiens
  misc_RNA (1)...(19): siRNA sense strand
ggcaucagcccuaucaacu

SEQ ID NO: 852004 - RNA, 19 nt, Homo sapiens
  misc_RNA (1)...(19): siRNA sense strand
ggcaucaaggcucuagauu

SEQ ID NO: 852005 - RNA, 19 nt, Homo sapiens
  misc_RNA (1)...(19): siRNA sense strand
ugggagggcagcugaguga

SEQ ID NO: 852006 - RNA, 19 nt, Homo sapiens
  misc_RNA (1)...(19): siRNA sense strand
gcagcugagugaggucucu

SEQ ID NO: 852007 - RNA, 19 nt, Homo sapiens
  misc_RNA (1)...(19): siRNA sense strand
cuuccuaucugcgccuuug

SEQ ID NO: 852008 - RNA, 19 nt, Homo sapiens
  misc_RNA (1)...(19): siRNA sense strand
aagaccaaaugcaggacaa

SEQ ID NO: 852009 - RNA, 19 nt, Homo sapiens
  misc_RNA (1)...(19): siRNA sense strand
ccaaaugcaggacaauugc

SEQ ID NO: 852010 - RNA, 19 nt, Homo sapiens
  misc_RNA (1)...(19): siRNA sense strand
gagccgugcggacagguau

SEQ ID NO: 852011 - RNA, 19 nt, Homo sapiens
  misc_RNA (1)...(19): siRNA sense strand
ugaccuccaccgcuucuau

SEQ ID NO: 852012 - RNA, 19 nt, Homo sapiens
  misc_RNA (1)...(19): siRNA sense strand
aaagggguacuuauguuua

SEQ ID NO: 852013 - RNA, 19 nt, Homo sapiens
  misc_RNA (1)...(19): siRNA sense strand
gggcguggcuugccuguuu

SEQ ID NO: 852014 - RNA, 19 nt, Homo sapiens
  misc_RNA (1)...(19): siRNA sense strand
aaacugagguccggaacuu

SEQ ID NO: 852015 - RNA, 19 nt, Homo sapiens
  misc_RNA (1)...(19): siRNA sense strand
gcgguucaccugcuugauu

SEQ ID NO: 852016 - RNA, 19 nt, Homo sapiens
  misc_RNA (1)...(19): siRNA sense strand
ucgccgaagucauggagua

SEQ ID NO: 852017 - RNA, 19 nt, Homo sapiens
  misc_RNA (1)...(19): siRNA sense strand
gcagggagaacgcgaguac

SEQ ID NO: 852018 - RNA, 19 nt, Homo sapiens
  misc_RNA (1)...(19): siRNA sense strand
cacuuuaucuggcgguuca

SEQ ID NO: 852019 - RNA, 19 nt, Homo sapiens
  misc_RNA (1)...(19): siRNA sense strand
gggucuggcuggugacaca

SEQ ID NO: 852020 - RNA, 19 nt, Homo sapiens
  misc_RNA (1)...(19): siRNA sense strand
cgguucaccugcuugauuc

SEQ ID NO: 852021 - RNA, 19 nt, Homo sapiens
  misc_RNA (1)...(19): siRNA sense strand
cggcucgggccuaucguua

SEQ ID NO: 852022 - RNA, 19 nt, Homo sapiens
  misc_RNA (1)...(19): siRNA sense strand
uggcuggugacacacuuua

SEQ ID NO: 852023 - RNA, 19 nt, Homo sapiens
  misc_RNA (1)...(19): siRNA sense strand
gaaacugagguccggaacu

SEQ ID NO: 852024 - RNA, 19 nt, Homo sapiens
  misc_RNA (1)...(19): siRNA sense strand
gcuggugacacacuuuauc

SEQ ID NO: 852025 - RNA, 19 nt, Homo sapiens
  misc_RNA (1)...(19): siRNA sense strand
gaacagacaugaagauaug

SEQ ID NO: 852026 - RNA, 19 nt, Homo sapiens
  misc_RNA (1)...(19): siRNA sense strand
ggaggaaucuuuuaccuuu

SEQ ID NO: 852027 - RNA, 19 nt, Homo sapiens
  misc_RNA (1)...(19): siRNA sense strand
gaagauaugguaccgauuc

SEQ ID NO: 852028 - RNA, 19 nt, Homo sapiens
  misc_RNA (1)...(19): siRNA sense strand
uagaauguuugcuggguua

SEQ ID NO: 852029 - RNA, 19 nt, Homo sapiens
  misc_RNA (1)...(19): siRNA sense strand
gcaagcagaggguuaaaug

SEQ ID NO: 852030 - RNA, 19 nt, Homo sapiens
  misc_RNA (1)...(19): siRNA sense strand
cauguucuauuuaguggua

SEQ ID NO: 852031 - RNA, 19 nt, Homo sapiens
  misc_RNA (1)...(19): siRNA sense strand
aagagaagcuugagagucu

SEQ ID NO: 852032 - RNA, 19 nt, Homo sapiens
  misc_RNA (1)...(19): siRNA sense strand
gcccaggacuucagaugga

SEQ ID NO: 852033 - RNA, 19 nt, Homo sapiens
  misc_RNA (1)...(19): siRNA sense strand
gcagcagccuguagggaau

SEQ ID NO: 852034 - RNA, 19 nt, Homo sapiens
  misc_RNA (1)...(19): siRNA sense strand
uagggaauguuaucagugu

SEQ ID NO: 852035 - RNA, 19 nt, Homo sapiens
  misc_RNA (1)...(19): siRNA sense strand
cagaacagacaugaagaua

SEQ ID NO: 852036 - RNA, 19 nt, Homo sapiens
  misc_RNA (1)...(19): siRNA sense strand
ccgauucccuuggugcuaa

SEQ ID NO: 852037 - RNA, 19 nt, Homo sapiens
  misc_RNA (1)...(19): siRNA sense strand
ggaggacaugggagaguuu

SEQ ID NO: 852038 - RNA, 19 nt, Homo sapiens
  misc_RNA (1)...(19): siRNA sense strand
gacuucagauggagugcuu

SEQ ID NO: 852039 - RNA, 19 nt, Homo sapiens
  misc_RNA (1)...(19): siRNA sense strand
ucaggagggaggaaucuuu

SEQ ID NO: 852040 - RNA, 19 nt, Homo sapiens
  misc_RNA (1)...(19): siRNA sense strand
ccuugugacugcuguguug

SEQ ID NO: 852041 - RNA, 19 nt, Homo sapiens
  misc_RNA (1)...(19): siRNA sense strand
gagccauguucuauuuagu

SEQ ID NO: 852042 - RNA, 19 nt, Homo sapiens
  misc_RNA (1)...(19): siRNA sense strand
gggaauguuaucaguguug

SEQ ID NO: 852043 - RNA, 19 nt, Homo sapiens
  misc_RNA (1)...(19): siRNA sense strand
cagccuguagggaauguua

SEQ ID NO: 852044 - RNA, 19 nt, Homo sapiens
  misc_RNA (1)...(19): siRNA sense strand
uuucucgucuuuauucuca

SEQ ID NO: 852045 - RNA, 19 nt, Homo sapiens
  misc_RNA (1)...(19): siRNA sense strand
agaacagacaugaagauau

SEQ ID NO: 852046 - RNA, 19 nt, Homo sapiens
  misc_RNA (1)...(19): siRNA sense strand
ccaccucucuccccaaguu

SEQ ID NO: 852047 - RNA, 19 nt, Homo sapiens
  misc_RNA (1)...(19): siRNA sense strand
uguagggaauguuaucagu

SEQ ID NO: 852048 - RNA, 19 nt, Homo sapiens
  misc_RNA (1)...(19): siRNA sense strand
ccuggugccuggacugcaa

SEQ ID NO: 852049 - RNA, 19 nt, Homo sapiens
  misc_RNA (1)...(19): siRNA sense strand
gaggaaucuuuuaccuuuu

SEQ ID NO: 852050 - RNA, 19 nt, Homo sapiens
  misc_RNA (1)...(19): siRNA sense strand
cagacaugaagauauggua

SEQ ID NO: 852051 - RNA, 19 nt, Homo sapiens
  misc_RNA (1)...(19): siRNA sense strand
cuauuuagugguagaaugu

SEQ ID NO: 852052 - RNA, 19 nt, Homo sapiens
  misc_RNA (1)...(19): siRNA sense strand
gagaagcuugagagucugu

SEQ ID NO: 852053 - RNA, 19 nt, Homo sapiens
  misc_RNA (1)...(19): siRNA sense strand
guuggcaagcagaggguua

SEQ ID NO: 852054 - RNA, 19 nt, Homo sapiens
  misc_RNA (1)...(19): siRNA sense strand
ggaaaucucuguuguuguu

SEQ ID NO: 852055 - RNA, 19 nt, Homo sapiens
  misc_RNA (1)...(19): siRNA sense strand
ggacuggaaaucucuguug

SEQ ID NO: 852056 - RNA, 19 nt, Homo sapiens
  misc_RNA (1)...(19): siRNA sense strand
caugaacuccuuucucuga

SEQ ID NO: 852057 - RNA, 19 nt, Homo sapiens
  misc_RNA (1)...(19): siRNA sense strand
cuggaaaucucuguuguug

SEQ ID NO: 852058 - RNA, 19 nt, Homo sapiens
  misc_RNA (1)...(19): siRNA sense strand
gacuggaaaucucuguugu

SEQ ID NO: 852059 - RNA, 19 nt, Homo sapiens
  misc_RNA (1)...(19): siRNA sense strand
gcccaucccugcuccaaac

SEQ ID NO: 852060 - RNA, 19 nt, Homo sapiens
  misc_RNA (1)...(19): siRNA sense strand
ggaaggacuggaaaucucu

SEQ ID NO: 852061 - RNA, 19 nt, Homo sapiens
  misc_RNA (1)...(19): siRNA sense strand
gguaguggaaggacuggaa

SEQ ID NO: 852062 - RNA, 19 nt, Homo sapiens
  misc_RNA (1)...(19): siRNA sense strand
gaaauuucgaggccuccuu

SEQ ID NO: 852063 - RNA, 19 nt, Homo sapiens
  misc_RNA (1)...(19): siRNA sense strand
aaaucucuguuguuguuug

SEQ ID NO: 852064 - RNA, 19 nt, Homo sapiens
  misc_RNA (1)...(19): siRNA sense strand
gaaaucucuguuguuguuu

SEQ ID NO: 852065 - RNA, 19 nt, Homo sapiens
  misc_RNA (1)...(19): siRNA sense strand
uggaaggacuggaaaucuc

SEQ ID NO: 852066 - RNA, 19 nt, Homo sapiens
  misc_RNA (1)...(19): siRNA sense strand
agcaugaacuccuuucucu

SEQ ID NO: 852067 - RNA, 19 nt, Homo sapiens
  misc_RNA (1)...(19): siRNA sense strand
guaguggaaggacuggaaa

SEQ ID NO: 852068 - RNA, 19 nt, Homo sapiens
  misc_RNA (1)...(19): siRNA sense strand
gcuucaguccuucggagua

SEQ ID NO: 852069 - RNA, 19 nt, Homo sapiens
  misc_RNA (1)...(19): siRNA sense strand
cuucaguccuucggaguau

SEQ ID NO: 852070 - RNA, 19 nt, Homo sapiens
  misc_RNA (1)...(19): siRNA sense strand
gcuggagggauguucauag

SEQ ID NO: 852071 - RNA, 19 nt, Homo sapiens
  misc_RNA (1)...(19): siRNA sense strand
gcccacaggugcuaaagag

SEQ ID NO: 852072 - RNA, 19 nt, Homo sapiens
  misc_RNA (1)...(19): siRNA sense strand
ucucuuggccuuugugaaa

SEQ ID NO: 852073 - RNA, 19 nt, Homo sapiens
  misc_RNA (1)...(19): siRNA sense strand
agaguggccucgagucaga

SEQ ID NO: 852074 - RNA, 19 nt, Homo sapiens
  misc_RNA (1)...(19): siRNA sense strand
ggagagcccacaggugcua

SEQ ID NO: 852075 - RNA, 19 nt, Homo sapiens
  misc_RNA (1)...(19): siRNA sense strand
agagagcaguacccugaug

SEQ ID NO: 852076 - RNA, 19 nt, Homo sapiens
  misc_RNA (1)...(19): siRNA sense strand
gagcaacgcagcuacaaag

SEQ ID NO: 852077 - RNA, 19 nt, Homo sapiens
  misc_RNA (1)...(19): siRNA sense strand
ggccgaccauguaugugua

SEQ ID NO: 852078 - RNA, 19 nt, Homo sapiens
  misc_RNA (1)...(19): siRNA sense strand
gggaauaccaccgcuucua

SEQ ID NO: 852079 - RNA, 19 nt, Homo sapiens
  misc_RNA (1)...(19): siRNA sense strand
gcaacgcagcuacaaagug

SEQ ID NO: 852080 - RNA, 19 nt, Homo sapiens
  misc_RNA (1)...(19): siRNA sense strand
ggaauaccaccgcuucuac

SEQ ID NO: 852081 - RNA, 19 nt, Homo sapiens
  misc_RNA (1)...(19): siRNA sense strand
ggagcaacgcagcuacaaa

SEQ ID NO: 852082 - RNA, 19 nt, Homo sapiens
  misc_RNA (1)...(19): siRNA sense strand
gagcggagcaacgcagcua

SEQ ID NO: 852083 - RNA, 19 nt, Homo sapiens
  misc_RNA (1)...(19): siRNA sense strand
gggccgaccauguaugugu

SEQ ID NO: 852084 - RNA, 19 nt, Homo sapiens
  misc_RNA (1)...(19): siRNA sense strand
gaaacacauugcauucaua

SEQ ID NO: 852085 - RNA, 19 nt, Homo sapiens
  misc_RNA (1)...(19): siRNA sense strand
gaaggagagcugucacuuu

SEQ ID NO: 852086 - RNA, 19 nt, Homo sapiens
  misc_RNA (1)...(19): siRNA sense strand
aaggagagcugucacuuug

SEQ ID NO: 852087 - RNA, 19 nt, Homo sapiens
  misc_RNA (1)...(19): siRNA sense strand
gcagaaggcccgagacaug

SEQ ID NO: 852088 - RNA, 19 nt, Homo sapiens
  misc_RNA (1)...(19): siRNA sense strand
gcauacacaucccgucaug

SEQ ID NO: 852089 - RNA, 19 nt, Homo sapiens
  misc_RNA (1)...(19): siRNA sense strand
ggaccaggcuacagugaca

SEQ ID NO: 852090 - RNA, 19 nt, Homo sapiens
  misc_RNA (1)...(19): siRNA sense strand
gcggcugagugacuucuua

SEQ ID NO: 852091 - RNA, 19 nt, Homo sapiens
  misc_RNA (1)...(19): siRNA sense strand
cugagucucugcuugauaa

SEQ ID NO: 852092 - RNA, 19 nt, Homo sapiens
  misc_RNA (1)...(19): siRNA sense strand
gaagaacuacaacaagugu

SEQ ID NO: 852093 - RNA, 19 nt, Homo sapiens
  misc_RNA (1)...(19): siRNA sense strand
cuugauaagugccucuaua

SEQ ID NO: 852094 - RNA, 19 nt, Homo sapiens
  misc_RNA (1)...(19): siRNA sense strand
cgaaacacauugcauucau

SEQ ID NO: 852095 - RNA, 19 nt, Homo sapiens
  misc_RNA (1)...(19): siRNA sense strand
gagaagugcggcugaguga

SEQ ID NO: 852096 - RNA, 19 nt, Homo sapiens
  misc_RNA (1)...(19): siRNA sense strand
ccacgaagaacuacaacaa

SEQ ID NO: 852097 - RNA, 19 nt, Homo sapiens
  misc_RNA (1)...(19): siRNA sense strand
gaaguucagccgcuugaug

SEQ ID NO: 852098 - RNA, 19 nt, Homo sapiens
  misc_RNA (1)...(19): siRNA sense strand
gcaaugcugugagagagau

SEQ ID NO: 852099 - RNA, 19 nt, Homo sapiens
  misc_RNA (1)...(19): siRNA sense strand
gaugaaccauagcaugcuu

SEQ ID NO: 852100 - RNA, 19 nt, Homo sapiens
  misc_RNA (1)...(19): siRNA sense strand
cugagugacuucuuacuau

SEQ ID NO: 852101 - RNA, 19 nt, Homo sapiens
  misc_RNA (1)...(19): siRNA sense strand
gauaagugccucuauacca

SEQ ID NO: 852102 - RNA, 19 nt, Homo sapiens
  misc_RNA (1)...(19): siRNA sense strand
gaaggacacgcuugcacaa

SEQ ID NO: 852103 - RNA, 19 nt, Homo sapiens
  misc_RNA (1)...(19): siRNA sense strand
gcugagugacuucuuacua

SEQ ID NO: 852104 - RNA, 19 nt, Homo sapiens
  misc_RNA (1)...(19): siRNA sense strand
ggacacgcuugcacaaacu

SEQ ID NO: 852105 - RNA, 19 nt, Homo sapiens
  misc_RNA (1)...(19): siRNA sense strand
acaaguguuuccuguaugu

SEQ ID NO: 852106 - RNA, 19 nt, Homo sapiens
  misc_RNA (1)...(19): siRNA sense strand
auaagugccucuauaccaa

SEQ ID NO: 852107 - RNA, 19 nt, Homo sapiens
  misc_RNA (1)...(19): siRNA sense strand
cauaaaggcaggcccaaug

SEQ ID NO: 852108 - RNA, 19 nt, Homo sapiens
  misc_RNA (1)...(19): siRNA sense strand
guucugugccaacaucaua

SEQ ID NO: 852109 - RNA, 19 nt, Homo sapiens
  misc_RNA (1)...(19): siRNA sense strand
ugagugacuucuuacuaug

SEQ ID NO: 852110 - RNA, 19 nt, Homo sapiens
  misc_RNA (1)...(19): siRNA sense strand
acgaagaacuacaacaagu

SEQ ID NO: 852111 - RNA, 19 nt, Homo sapiens
  misc_RNA (1)...(19): siRNA sense strand
ggaaggagagcugucacuu

SEQ ID NO: 852112 - RNA, 19 nt, Homo sapiens
  misc_RNA (1)...(19): siRNA sense strand
acucugcggugguguuuga

SEQ ID NO: 852113 - RNA, 19 nt, Homo sapiens
  misc_RNA (1)...(19): siRNA sense strand
aggagaaacugcagaagca

SEQ ID NO: 852114 - RNA, 19 nt, Homo sapiens
  misc_RNA (1)...(19): siRNA sense strand
uagacgggcuuauggaucu

SEQ ID NO: 852115 - RNA, 19 nt, Homo sapiens
  misc_RNA (1)...(19): siRNA sense strand
gcugauugcacaagcugua

SEQ ID NO: 852116 - RNA, 19 nt, Homo sapiens
  misc_RNA (1)...(19): siRNA sense strand
gaagugcggcugagugacu

SEQ ID NO: 852117 - RNA, 19 nt, Homo sapiens
  misc_RNA (1)...(19): siRNA sense strand
gaaccugggcauccuagag

SEQ ID NO: 852118 - RNA, 19 nt, Homo sapiens
  misc_RNA (1)...(19): siRNA sense strand
gaaggcccgagacauguau

SEQ ID NO: 852119 - RNA, 19 nt, Homo sapiens
  misc_RNA (1)...(19): siRNA sense strand
gcgguucugugccaacauc

SEQ ID NO: 852120 - RNA, 19 nt, Homo sapiens
  misc_RNA (1)...(19): siRNA sense strand
gagcgguucugugccaaca

SEQ ID NO: 852121 - RNA, 19 nt, Homo sapiens
  misc_RNA (1)...(19): siRNA sense strand
cgaagaacuacaacaagug

SEQ ID NO: 852122 - RNA, 19 nt, Homo sapiens
  misc_RNA (1)...(19): siRNA sense strand
ggugacagucuacgcauuc

SEQ ID NO: 852123 - RNA, 19 nt, Homo sapiens
  misc_RNA (1)...(19): siRNA sense strand
ugggcgaucugcacuuguu

SEQ ID NO: 852124 - RNA, 19 nt, Homo sapiens
  misc_RNA (1)...(19): siRNA sense strand
guacaggccacgaagaacu

SEQ ID NO: 852125 - RNA, 19 nt, Homo sapiens
  misc_RNA (1)...(19): siRNA sense strand
caaggaaggagagcuguca

SEQ ID NO: 852126 - RNA, 19 nt, Homo sapiens
  misc_RNA (1)...(19): siRNA sense strand
gagguagacgggcuuaugg

SEQ ID NO: 852127 - RNA, 19 nt, Homo sapiens
  misc_RNA (1)...(19): siRNA sense strand
ucaaacgcuccaagaguga

SEQ ID NO: 852128 - RNA, 19 nt, Homo sapiens
  misc_RNA (1)...(19): siRNA sense strand
gucaugagaucagcaaugc

SEQ ID NO: 852129 - RNA, 19 nt, Homo sapiens
  misc_RNA (1)...(19): siRNA sense strand
gcuccaagagugagguaga

SEQ ID NO: 852130 - RNA, 19 nt, Homo sapiens
  misc_RNA (1)...(19): siRNA sense strand
caaccgcucuccucauccu

SEQ ID NO: 852131 - RNA, 19 nt, Homo sapiens
  misc_RNA (1)...(19): siRNA sense strand
agucucugcuugauaagug

SEQ ID NO: 852132 - RNA, 19 nt, Homo sapiens
  misc_RNA (1)...(19): siRNA sense strand
acacaucccgucaugagau

SEQ ID NO: 852133 - RNA, 19 nt, Homo sapiens
  misc_RNA (1)...(19): siRNA sense strand
cugcaggccuuggaacuca

SEQ ID NO: 852134 - RNA, 19 nt, Homo sapiens
  misc_RNA (1)...(19): siRNA sense strand
ucgaggccauccugcaguu

SEQ ID NO: 852135 - RNA, 19 nt, Homo sapiens
  misc_RNA (1)...(19): siRNA sense strand
agaaggcccgagacaugua

SEQ ID NO: 852136 - RNA, 19 nt, Homo sapiens
  misc_RNA (1)...(19): siRNA sense strand
gaacucaagcgagcugacu

SEQ ID NO: 852137 - RNA, 19 nt, Homo sapiens
  misc_RNA (1)...(19): siRNA sense strand
gccgaaacacauugcauuc

SEQ ID NO: 852138 - RNA, 19 nt, Homo sapiens
  misc_RNA (1)...(19): siRNA sense strand
cauucagcauugagaacuu

SEQ ID NO: 852139 - RNA, 19 nt, Homo sapiens
  misc_RNA (1)...(19): siRNA sense strand
ggagagggaccaggcuaca

SEQ ID NO: 852140 - RNA, 19 nt, Homo sapiens
  misc_RNA (1)...(19): siRNA sense strand
cagaaggcccgagacaugu

SEQ ID NO: 852141 - RNA, 19 nt, Homo sapiens
  misc_RNA (1)...(19): siRNA sense strand
ucucugagucucugcuuga

SEQ ID NO: 852142 - RNA, 19 nt, Homo sapiens
  misc_RNA (1)...(19): siRNA sense strand
ggagcaaggccuguuggau

SEQ ID NO: 852143 - RNA, 19 nt, Homo sapiens
  misc_RNA (1)...(19): siRNA sense strand
ccugggcgaucugcacuug

SEQ ID NO: 852144 - RNA, 19 nt, Homo sapiens
  misc_RNA (1)...(19): siRNA sense strand
cagaaguucagccgcuuga

SEQ ID NO: 852145 - RNA, 19 nt, Homo sapiens
  misc_RNA (1)...(19): siRNA sense strand
ugagguagacgggcuuaug

SEQ ID NO: 852146 - RNA, 19 nt, Homo sapiens
  misc_RNA (1)...(19): siRNA sense strand
gguagacgggcuuauggau

SEQ ID NO: 852147 - RNA, 19 nt, Homo sapiens
  misc_RNA (1)...(19): siRNA sense strand
guggccagaguauacauuu

SEQ ID NO: 852148 - RNA, 19 nt, Homo sapiens
  misc_RNA (1)...(19): siRNA sense strand
gcacuuguugcccuuggau

SEQ ID NO: 852149 - RNA, 19 nt, Homo sapiens
  misc_RNA (1)...(19): siRNA sense strand
ggaucccagugauaucucu

SEQ ID NO: 852150 - RNA, 19 nt, Homo sapiens
  misc_RNA (1)...(19): siRNA sense strand
uacaggccacgaagaacua

SEQ ID NO: 852151 - RNA, 19 nt, Homo sapiens
  misc_RNA (1)...(19): siRNA sense strand
gcccaaugccgaaacacau

SEQ ID NO: 852152 - RNA, 19 nt, Homo sapiens
  misc_RNA (1)...(19): siRNA sense strand
cagcagaaggcccgagaca

SEQ ID NO: 852153 - RNA, 19 nt, Homo sapiens
  misc_RNA (1)...(19): siRNA sense strand
agucuacgcauucagcauu

SEQ ID NO: 852154 - RNA, 19 nt, Homo sapiens
  misc_RNA (1)...(19): siRNA sense strand
accaaccgcucuccucauc

SEQ ID NO: 852155 - RNA, 19 nt, Homo sapiens
  misc_RNA (1)...(19): siRNA sense strand
ucacgcagaucacgcagua

SEQ ID NO: 852156 - RNA, 19 nt, Homo sapiens
  misc_RNA (1)...(19): siRNA sense strand
agaacaagaucccgaagga

SEQ ID NO: 852157 - RNA, 19 nt, Homo sapiens
  misc_RNA (1)...(19): siRNA sense strand
ggaggaggacgaagaggaa

SEQ ID NO: 852158 - RNA, 19 nt, Homo sapiens
  misc_RNA (1)...(19): siRNA sense strand
ccaaggagaagaacaagau

SEQ ID NO: 852159 - RNA, 19 nt, Homo sapiens
  misc_RNA (1)...(19): siRNA sense strand
uuaccacacucccuucuuc

SEQ ID NO: 852160 - RNA, 19 nt, Homo sapiens
  misc_RNA (1)...(19): siRNA sense strand
ccaccaaggagaagaacaa

SEQ ID NO: 852161 - RNA, 19 nt, Homo sapiens
  misc_RNA (1)...(19): siRNA sense strand
gagggcuacuuccgcaaga

SEQ ID NO: 852162 - RNA, 19 nt, Homo sapiens
  misc_RNA (1)...(19): siRNA sense strand
caucguauccuuguacuuc

SEQ ID NO: 852163 - RNA, 19 nt, Homo sapiens
  misc_RNA (1)...(19): siRNA sense strand
ggagcugaccgaccucuuc

SEQ ID NO: 852164 - RNA, 19 nt, Homo sapiens
  misc_RNA (1)...(19): siRNA sense strand
gagaacauggugaccuuca

SEQ ID NO: 852165 - RNA, 19 nt, Homo sapiens
  misc_RNA (1)...(19): siRNA sense strand
ggaagaggaggaggaggaa

SEQ ID NO: 852166 - RNA, 19 nt, Homo sapiens
  misc_RNA (1)...(19): siRNA sense strand
ggaagaggaggaggacgaa

SEQ ID NO: 852167 - RNA, 19 nt, Homo sapiens
  misc_RNA (1)...(19): siRNA sense strand
gagcugaccgaccucuuca

SEQ ID NO: 852168 - RNA, 19 nt, Homo sapiens
  misc_RNA (1)...(19): siRNA sense strand
gcugcaacuucaacuccuu

SEQ ID NO: 852169 - RNA, 19 nt, Homo sapiens
  misc_RNA (1)...(19): siRNA sense strand
aggagaacauggugaccuu

SEQ ID NO: 852170 - RNA, 19 nt, Homo sapiens
  misc_RNA (1)...(19): siRNA sense strand
gcuccgacuccucgcagua

SEQ ID NO: 852171 - RNA, 19 nt, Homo sapiens
  misc_RNA (1)...(19): siRNA sense strand
ucguggagcugcccauagu

SEQ ID NO: 852172 - RNA, 19 nt, Homo sapiens
  misc_RNA (1)...(19): siRNA sense strand
ugacgcuucugcccugcuu

SEQ ID NO: 852173 - RNA, 19 nt, Homo sapiens
  misc_RNA (1)...(19): siRNA sense strand
ccgagggcauguuguacug

SEQ ID NO: 852174 - RNA, 19 nt, Homo sapiens
  misc_RNA (1)...(19): siRNA sense strand
ggccacgacucgguuuauc

SEQ ID NO: 852175 - RNA, 19 nt, Homo sapiens
  misc_RNA (1)...(19): siRNA sense strand
cuucuuccaucguauccuu

SEQ ID NO: 852176 - RNA, 19 nt, Homo sapiens
  misc_RNA (1)...(19): siRNA sense strand
ggccacggguuaccacacu

SEQ ID NO: 852177 - RNA, 19 nt, Homo sapiens
  misc_RNA (1)...(19): siRNA sense strand
aagaggaggaggaggaaga

SEQ ID NO: 852178 - RNA, 19 nt, Homo sapiens
  misc_RNA (1)...(19): siRNA sense strand
aagaggaggaggacgaaga

SEQ ID NO: 852179 - RNA, 19 nt, Homo sapiens
  misc_RNA (1)...(19): siRNA sense strand
ugaagcccauccuggucuu

SEQ ID NO: 852180 - RNA, 19 nt, Homo sapiens
  misc_RNA (1)...(19): siRNA sense strand
cauccuggucuucgccuuu

SEQ ID NO: 852181 - RNA, 19 nt, Homo sapiens
  misc_RNA (1)...(19): siRNA sense strand
guacuucaacucggucauc

SEQ ID NO: 852182 - RNA, 19 nt, Homo sapiens
  misc_RNA (1)...(19): siRNA sense strand
gaacggaguugcuucuaua

SEQ ID NO: 852183 - RNA, 19 nt, Homo sapiens
  misc_RNA (1)...(19): siRNA sense strand
caagcaaaguuauuccuua

SEQ ID NO: 852184 - RNA, 19 nt, Homo sapiens
  misc_RNA (1)...(19): siRNA sense strand
gcaaaguuauuccuuagaa

SEQ ID NO: 852185 - RNA, 19 nt, Homo sapiens
  misc_RNA (1)...(19): siRNA sense strand
ggacaguuauacuuuagug

SEQ ID NO: 852186 - RNA, 19 nt, Homo sapiens
  misc_RNA (1)...(19): siRNA sense strand
uaagggacaguuauacuuu

SEQ ID NO: 852187 - RNA, 19 nt, Homo sapiens
  misc_RNA (1)...(19): siRNA sense strand
aagggacaguuauacuuua

SEQ ID NO: 852188 - RNA, 19 nt, Homo sapiens
  misc_RNA (1)...(19): siRNA sense strand
ggauuaucaagcaaaguua

SEQ ID NO: 852189 - RNA, 19 nt, Homo sapiens
  misc_RNA (1)...(19): siRNA sense strand
ucucgucauuucauuauug

SEQ ID NO: 852190 - RNA, 19 nt, Homo sapiens
  misc_RNA (1)...(19): siRNA sense strand
aagcaaaguuauuccuuag

SEQ ID NO: 852191 - RNA, 19 nt, Homo sapiens
  misc_RNA (1)...(19): siRNA sense strand
gguugucucugauucuugu

SEQ ID NO: 852192 - RNA, 19 nt, Homo sapiens
  misc_RNA (1)...(19): siRNA sense strand
aaaggauuaucaagcaaag

SEQ ID NO: 852193 - RNA, 19 nt, Homo sapiens
  misc_RNA (1)...(19): siRNA sense strand
gcccuucucuucucgucau

SEQ ID NO: 852194 - RNA, 19 nt, Homo sapiens
  misc_RNA (1)...(19): siRNA sense strand
ucaagcaaaguuauuccuu

SEQ ID NO: 852195 - RNA, 19 nt, Homo sapiens
  misc_RNA (1)...(19): siRNA sense strand
ugguggcggugguugcuuu

SEQ ID NO: 852196 - RNA, 19 nt, Homo sapiens
  misc_RNA (1)...(19): siRNA sense strand
aggauuaucaagcaaaguu

SEQ ID NO: 852197 - RNA, 19 nt, Homo sapiens
  misc_RNA (1)...(19): siRNA sense strand
gaguagauaagggacaguu

SEQ ID NO: 852198 - RNA, 19 nt, Homo sapiens
  misc_RNA (1)...(19): siRNA sense strand
gggugaggagaguagauaa

SEQ ID NO: 852199 - RNA, 19 nt, Homo sapiens
  misc_RNA (1)...(19): siRNA sense strand
gaagauggcaugcggcuuu

SEQ ID NO: 852200 - RNA, 19 nt, Homo sapiens
  misc_RNA (1)...(19): siRNA sense strand
gcucggcucuuguguuuga

SEQ ID NO: 852201 - RNA, 19 nt, Homo sapiens
  misc_RNA (1)...(19): siRNA sense strand
gaagaaaagucgauauugu

SEQ ID NO: 852202 - RNA, 19 nt, Homo sapiens
  misc_RNA (1)...(19): siRNA sense strand
caaaggagaggaagaggaa

SEQ ID NO: 852203 - RNA, 19 nt, Homo sapiens
  misc_RNA (1)...(19): siRNA sense strand
ucagauugauugcguucua

SEQ ID NO: 852204 - RNA, 19 nt, Homo sapiens
  misc_RNA (1)...(19): siRNA sense strand
gugcucgaauacaccauua

SEQ ID NO: 852205 - RNA, 19 nt, Homo sapiens
  misc_RNA (1)...(19): siRNA sense strand
ggugcucuguguccacuuu

SEQ ID NO: 852206 - RNA, 19 nt, Homo sapiens
  misc_RNA (1)...(19): siRNA sense strand
aggcucggcucuuguguuu

SEQ ID NO: 852207 - RNA, 19 nt, Homo sapiens
  misc_RNA (1)...(19): siRNA sense strand
cgaauacaccauuaaggaa

SEQ ID NO: 852208 - RNA, 19 nt, Homo sapiens
  misc_RNA (1)...(19): siRNA sense strand
ggugguggcugggauguuc

SEQ ID NO: 852209 - RNA, 19 nt, Homo sapiens
  misc_RNA (1)...(19): siRNA sense strand
gcaucagcauccuggagaa

SEQ ID NO: 852210 - RNA, 19 nt, Homo sapiens
  misc_RNA (1)...(19): siRNA sense strand
ggaaggcucggcucuugug

SEQ ID NO: 852211 - RNA, 19 nt, Homo sapiens
  misc_RNA (1)...(19): siRNA sense strand
ccacuuuccuucucugaac

SEQ ID NO: 852212 - RNA, 19 nt, Homo sapiens
  misc_RNA (1)...(19): siRNA sense strand
ucgaauacaccauuaagga

SEQ ID NO: 852213 - RNA, 19 nt, Homo sapiens
  misc_RNA (1)...(19): siRNA sense strand
ggaagaggaagaggaagau

SEQ ID NO: 852214 - RNA, 19 nt, Homo sapiens
  misc_RNA (1)...(19): siRNA sense strand
aggcagagguggccaggau

SEQ ID NO: 852215 - RNA, 19 nt, Homo sapiens
  misc_RNA (1)...(19): siRNA sense strand
aauacaccauuaaggaaga

SEQ ID NO: 852216 - RNA, 19 nt, Homo sapiens
  misc_RNA (1)...(19): siRNA sense strand
cuggaaggcucggcucuug

SEQ ID NO: 852217 - RNA, 19 nt, Homo sapiens
  misc_RNA (1)...(19): siRNA sense strand
ugauugcguucuacugugu

SEQ ID NO: 852218 - RNA, 19 nt, Homo sapiens
  misc_RNA (1)...(19): siRNA sense strand
ggaagaaaagucgauauug

SEQ ID NO: 852219 - RNA, 19 nt, Homo sapiens
  misc_RNA (1)...(19): siRNA sense strand
agaggaagaggaagaggaa

SEQ ID NO: 852220 - RNA, 19 nt, Homo sapiens
  misc_RNA (1)...(19): siRNA sense strand
gaagaggaagaggaagaug

SEQ ID NO: 852221 - RNA, 19 nt, Homo sapiens
  misc_RNA (1)...(19): siRNA sense strand
gguuccaguuguuggcaaa

SEQ ID NO: 852222 - RNA, 19 nt, Homo sapiens
  misc_RNA (1)...(19): siRNA sense strand
cugugucaguagagacuua

SEQ ID NO: 852223 - RNA, 19 nt, Homo sapiens
  misc_RNA (1)...(19): siRNA sense strand
gcucgaauacaccauuaag

SEQ ID NO: 852224 - RNA, 19 nt, Homo sapiens
  misc_RNA (1)...(19): siRNA sense strand
uggagaagcucaucaaaac

SEQ ID NO: 852225 - RNA, 19 nt, Homo sapiens
  misc_RNA (1)...(19): siRNA sense strand
gaagauggcaugcggcuuu

SEQ ID NO: 852226 - RNA, 19 nt, Homo sapiens
  misc_RNA (1)...(19): siRNA sense strand
gcucggcucuuguguuuga

SEQ ID NO: 852227 - RNA, 19 nt, Homo sapiens
  misc_RNA (1)...(19): siRNA sense strand
gaagaaaagucgauauugu

SEQ ID NO: 852228 - RNA, 19 nt, Homo sapiens
  misc_RNA (1)...(19): siRNA sense strand
caaaggagaggaagaggaa

SEQ ID NO: 852229 - RNA, 19 nt, Homo sapiens
  misc_RNA (1)...(19): siRNA sense strand
ucagauugauugcguucua

SEQ ID NO: 852230 - RNA, 19 nt, Homo sapiens
  misc_RNA (1)...(19): siRNA sense strand
gugcucgaauacaccauua

SEQ ID NO: 852231 - RNA, 19 nt, Homo sapiens
  misc_RNA (1)...(19): siRNA sense strand
ggugcucuguguccacuuu

SEQ ID NO: 852232 - RNA, 19 nt, Homo sapiens
  misc_RNA (1)...(19): siRNA sense strand
aggcucggcucuuguguuu

SEQ ID NO: 852233 - RNA, 19 nt, Homo sapiens
  misc_RNA (1)...(19): siRNA sense strand
cgaauacaccauuaaggaa

SEQ ID NO: 852234 - RNA, 19 nt, Homo sapiens
  misc_RNA (1)...(19): siRNA sense strand
ggugguggcugggauguuc

SEQ ID NO: 852235 - RNA, 19 nt, Homo sapiens
  misc_RNA (1)...(19): siRNA sense strand
gcaucagcauccuggagaa

SEQ ID NO: 852236 - RNA, 19 nt, Homo sapiens
  misc_RNA (1)...(19): siRNA sense strand
ggaaggcucggcucuugug

SEQ ID NO: 852237 - RNA, 19 nt, Homo sapiens
  misc_RNA (1)...(19): siRNA sense strand
ccacuuuccuucucugaac

SEQ ID NO: 852238 - RNA, 19 nt, Homo sapiens
  misc_RNA (1)...(19): siRNA sense strand
ucgaauacaccauuaagga

SEQ ID NO: 852239 - RNA, 19 nt, Homo sapiens
  misc_RNA (1)...(19): siRNA sense strand
ggaagaggaagaggaagau

SEQ ID NO: 852240 - RNA, 19 nt, Homo sapiens
  misc_RNA (1)...(19): siRNA sense strand
aggcagagguggccaggau

SEQ ID NO: 852241 - RNA, 19 nt, Homo sapiens
  misc_RNA (1)...(19): siRNA sense strand
aauacaccauuaaggaaga

SEQ ID NO: 852242 - RNA, 19 nt, Homo sapiens
  misc_RNA (1)...(19): siRNA sense strand
cuggaaggcucggcucuug

SEQ ID NO: 852243 - RNA, 19 nt, Homo sapiens
  misc_RNA (1)...(19): siRNA sense strand
ugauugcguucuacugugu

SEQ ID NO: 852244 - RNA, 19 nt, Homo sapiens
  misc_RNA (1)...(19): siRNA sense strand
ggaagaaaagucgauauug

SEQ ID NO: 852245 - RNA, 19 nt, Homo sapiens
  misc_RNA (1)...(19): siRNA sense strand
agaggaagaggaagaggaa

SEQ ID NO: 852246 - RNA, 19 nt, Homo sapiens
  misc_RNA (1)...(19): siRNA sense strand
gaagaggaagaggaagaug

SEQ ID NO: 852247 - RNA, 19 nt, Homo sapiens
  misc_RNA (1)...(19): siRNA sense strand
gguuccaguuguuggcaaa

SEQ ID NO: 852248 - RNA, 19 nt, Homo sapiens
  misc_RNA (1)...(19): siRNA sense strand
cugugucaguagagacuua

SEQ ID NO: 852249 - RNA, 19 nt, Homo sapiens
  misc_RNA (1)...(19): siRNA sense strand
gcucgaauacaccauuaag

SEQ ID NO: 852250 - RNA, 19 nt, Homo sapiens
  misc_RNA (1)...(19): siRNA sense strand
uggagaagcucaucaaaac

SEQ ID NO: 852251 - RNA, 19 nt, Homo sapiens
  misc_RNA (1)...(19): siRNA sense strand
caagaggaaugguuuaauu

SEQ ID NO: 852252 - RNA, 19 nt, Homo sapiens
  misc_RNA (1)...(19): siRNA sense strand
ccucucagcugaugacaua

SEQ ID NO: 852253 - RNA, 19 nt, Homo sapiens
  misc_RNA (1)...(19): siRNA sense strand
gagauggucuggugucugu

SEQ ID NO: 852254 - RNA, 19 nt, Homo sapiens
  misc_RNA (1)...(19): siRNA sense strand
gaaguucauugaccucuca

SEQ ID NO: 852255 - RNA, 19 nt, Homo sapiens
  misc_RNA (1)...(19): siRNA sense strand
ccaaagacagccucgagua

SEQ ID NO: 852256 - RNA, 19 nt, Homo sapiens
  misc_RNA (1)...(19): siRNA sense strand
caagaacaaccaccuguga

SEQ ID NO: 852257 - RNA, 19 nt, Homo sapiens
  misc_RNA (1)...(19): siRNA sense strand
gcaugcuggugcacaguaa

SEQ ID NO: 852258 - RNA, 19 nt, Homo sapiens
  misc_RNA (1)...(19): siRNA sense strand
caucgcagccuucuacuug

SEQ ID NO: 852259 - RNA, 19 nt, Homo sapiens
  misc_RNA (1)...(19): siRNA sense strand
gaggaaugguuuaauuaac

SEQ ID NO: 852260 - RNA, 19 nt, Homo sapiens
  misc_RNA (1)...(19): siRNA sense strand
caacaucauccucuauuca

SEQ ID NO: 852261 - RNA, 19 nt, Homo sapiens
  misc_RNA (1)...(19): siRNA sense strand
ucgccuaccucuccaagaa

SEQ ID NO: 852262 - RNA, 19 nt, Homo sapiens
  misc_RNA (1)...(19): siRNA sense strand
ccaacaucauccucuauuc

SEQ ID NO: 852263 - RNA, 19 nt, Homo sapiens
  misc_RNA (1)...(19): siRNA sense strand
ggacaauuuccucaugaug

SEQ ID NO: 852264 - RNA, 19 nt, Homo sapiens
  misc_RNA (1)...(19): siRNA sense strand
cagagagugaggacaauuu

SEQ ID NO: 852265 - RNA, 19 nt, Homo sapiens
  misc_RNA (1)...(19): siRNA sense strand
gcaagaggaaugguuuaau

SEQ ID NO: 852266 - RNA, 19 nt, Homo sapiens
  misc_RNA (1)...(19): siRNA sense strand
cauugggacuggcgucuau

SEQ ID NO: 852267 - RNA, 19 nt, Homo sapiens
  misc_RNA (1)...(19): siRNA sense strand
gauggucuggugucuguuu

SEQ ID NO: 852268 - RNA, 19 nt, Homo sapiens
  misc_RNA (1)...(19): siRNA sense strand
ggaaugguuuaauuaacac

SEQ ID NO: 852269 - RNA, 19 nt, Homo sapiens
  misc_RNA (1)...(19): siRNA sense strand
acacagagagugaggacaa

SEQ ID NO: 852270 - RNA, 19 nt, Homo sapiens
  misc_RNA (1)...(19): siRNA sense strand
ggcccaacaucauccucua

SEQ ID NO: 852271 - RNA, 19 nt, Homo sapiens
  misc_RNA (1)...(19): siRNA sense strand
ggcaagaggaaugguuuaa

SEQ ID NO: 852272 - RNA, 19 nt, Homo sapiens
  misc_RNA (1)...(19): siRNA sense strand
gggcaucgcagccuucuac

SEQ ID NO: 852273 - RNA, 19 nt, Homo sapiens
  misc_RNA (1)...(19): siRNA sense strand
caaagacagccucgaguac

SEQ ID NO: 852274 - RNA, 19 nt, Homo sapiens
  misc_RNA (1)...(19): siRNA sense strand
caagcgacacagagaguga

SEQ ID NO: 852275 - RNA, 19 nt, Homo sapiens
  misc_RNA (1)...(19): siRNA sense strand
guacccggaugggaaguuc

SEQ ID NO: 852276 - RNA, 19 nt, Homo sapiens
  misc_RNA (1)...(19): siRNA sense strand
cggaugggaaguucauuga

SEQ ID NO: 852277 - RNA, 19 nt, Homo sapiens
  misc_RNA (1)...(19): siRNA sense strand
uaacaccagaaacuugaug

SEQ ID NO: 852278 - RNA, 19 nt, Homo sapiens
  misc_RNA (1)...(19): siRNA sense strand
gccuaccucuccaagaaca

SEQ ID NO: 852279 - RNA, 19 nt, Homo sapiens
  misc_RNA (1)...(19): siRNA sense strand
ucucagcugaugacauaaa

SEQ ID NO: 852280 - RNA, 19 nt, Homo sapiens
  misc_RNA (1)...(19): siRNA sense strand
uggcaucauugaacagaag

SEQ ID NO: 852281 - RNA, 19 nt, Homo sapiens
  misc_RNA (1)...(19): siRNA sense strand
uggcaagaggaaugguuua

SEQ ID NO: 852282 - RNA, 19 nt, Homo sapiens
  misc_RNA (1)...(19): siRNA sense strand
gaugcuggcaagaggaaug

SEQ ID NO: 852283 - RNA, 19 nt, Homo sapiens
  misc_RNA (1)...(19): siRNA sense strand
ggaggaggaggaggaguuc

SEQ ID NO: 852284 - RNA, 19 nt, Homo sapiens
  misc_RNA (1)...(19): siRNA sense strand
cccaacaucauccucuauu

SEQ ID NO: 852285 - RNA, 19 nt, Homo sapiens
  misc_RNA (1)...(19): siRNA sense strand
aauuaacaccagaaacuug

SEQ ID NO: 852286 - RNA, 19 nt, Homo sapiens
  misc_RNA (1)...(19): siRNA sense strand
acaucauccucuauucaga

SEQ ID NO: 852287 - RNA, 19 nt, Homo sapiens
  misc_RNA (1)...(19): siRNA sense strand
gcaucgcagccuucuacuu

SEQ ID NO: 852288 - RNA, 19 nt, Homo sapiens
  misc_RNA (1)...(19): siRNA sense strand
ucaaugaggugaagauuua

SEQ ID NO: 852289 - RNA, 19 nt, Homo sapiens
  misc_RNA (1)...(19): siRNA sense strand
caacuugaccgaagaauua

SEQ ID NO: 852290 - RNA, 19 nt, Homo sapiens
  misc_RNA (1)...(19): siRNA sense strand
gaaacuacaucgacaagaa

SEQ ID NO: 852291 - RNA, 19 nt, Homo sapiens
  misc_RNA (1)...(19): siRNA sense strand
acaaagagcuggcacuuaa

SEQ ID NO: 852292 - RNA, 19 nt, Homo sapiens
  misc_RNA (1)...(19): siRNA sense strand
gaagaaagauguagauguc

SEQ ID NO: 852293 - RNA, 19 nt, Homo sapiens
  misc_RNA (1)...(19): siRNA sense strand
gcagaaaucuacauggaaa

SEQ ID NO: 852294 - RNA, 19 nt, Homo sapiens
  misc_RNA (1)...(19): siRNA sense strand
gaucaaagcaggagaagaa

SEQ ID NO: 852295 - RNA, 19 nt, Homo sapiens
  misc_RNA (1)...(19): siRNA sense strand
gcacagagaguccaguuaa

SEQ ID NO: 852296 - RNA, 19 nt, Homo sapiens
  misc_RNA (1)...(19): siRNA sense strand
ugaagagagugaagaauuu

SEQ ID NO: 852297 - RNA, 19 nt, Homo sapiens
  misc_RNA (1)...(19): siRNA sense strand
caauugacauucacguuaa

SEQ ID NO: 852298 - RNA, 19 nt, Homo sapiens
  misc_RNA (1)...(19): siRNA sense strand
gaagaucguuugaaaauug

SEQ ID NO: 852299 - RNA, 19 nt, Homo sapiens
  misc_RNA (1)...(19): siRNA sense strand
gaagagagugaagaauuua

SEQ ID NO: 852300 - RNA, 19 nt, Homo sapiens
  misc_RNA (1)...(19): siRNA sense strand
caaagcaggagaagaauuu

SEQ ID NO: 852301 - RNA, 19 nt, Homo sapiens
  misc_RNA (1)...(19): siRNA sense strand
gaagagagcgcuacagaag

SEQ ID NO: 852302 - RNA, 19 nt, Homo sapiens
  misc_RNA (1)...(19): siRNA sense strand
ccaaguagaugaagagagu

SEQ ID NO: 852303 - RNA, 19 nt, Homo sapiens
  misc_RNA (1)...(19): siRNA sense strand
gaaguugucaccuuugaaa

SEQ ID NO: 852304 - RNA, 19 nt, Homo sapiens
  misc_RNA (1)...(19): siRNA sense strand
gcagaaaguucggagaguu

SEQ ID NO: 852305 - RNA, 19 nt, Homo sapiens
  misc_RNA (1)...(19): siRNA sense strand
caacaagaacuucgugaaa

SEQ ID NO: 852306 - RNA, 19 nt, Homo sapiens
  misc_RNA (1)...(19): siRNA sense strand
cacagcagauucagagaua

SEQ ID NO: 852307 - RNA, 19 nt, Homo sapiens
  misc_RNA (1)...(19): siRNA sense strand
gagcaugaccuuaaugaug

SEQ ID NO: 852308 - RNA, 19 nt, Homo sapiens
  misc_RNA (1)...(19): siRNA sense strand
gaugacuacucaaagauug

SEQ ID NO: 852309 - RNA, 19 nt, Homo sapiens
  misc_RNA (1)...(19): siRNA sense strand
ccaacaaucucugcuuuga

SEQ ID NO: 852310 - RNA, 19 nt, Homo sapiens
  misc_RNA (1)...(19): siRNA sense strand
guucugaaguuuauagguu

SEQ ID NO: 852311 - RNA, 19 nt, Homo sapiens
  misc_RNA (1)...(19): siRNA sense strand
gaacaaaacccuugaagau

SEQ ID NO: 852312 - RNA, 19 nt, Homo sapiens
  misc_RNA (1)...(19): siRNA sense strand
agagagcgcuacagaagaa

SEQ ID NO: 852313 - RNA, 19 nt, Homo sapiens
  misc_RNA (1)...(19): siRNA sense strand
gaauuuaggcuucugaauc

SEQ ID NO: 852314 - RNA, 19 nt, Homo sapiens
  misc_RNA (1)...(19): siRNA sense strand
gcacagucuaugaugauua

SEQ ID NO: 852315 - RNA, 19 nt, Homo sapiens
  misc_RNA (1)...(19): siRNA sense strand
guugucaccuuugaaauuu

SEQ ID NO: 852316 - RNA, 19 nt, Homo sapiens
  misc_RNA (1)...(19): siRNA sense strand
ugacauaaauucagugcau

SEQ ID NO: 852317 - RNA, 19 nt, Homo sapiens
  misc_RNA (1)...(19): siRNA sense strand
ugaaaugccuacugugugu

SEQ ID NO: 852318 - RNA, 19 nt, Homo sapiens
  misc_RNA (1)...(19): siRNA sense strand
gagaagaauuuagaagcuu

SEQ ID NO: 852319 - RNA, 19 nt, Homo sapiens
  misc_RNA (1)...(19): siRNA sense strand
ggagaagaauuuagaagcu

SEQ ID NO: 852320 - RNA, 19 nt, Homo sapiens
  misc_RNA (1)...(19): siRNA sense strand
cuaauauucucaccgauga

SEQ ID NO: 852321 - RNA, 19 nt, Homo sapiens
  misc_RNA (1)...(19): siRNA sense strand
aacaaucucugcuuugaaa

SEQ ID NO: 852322 - RNA, 19 nt, Homo sapiens
  misc_RNA (1)...(19): siRNA sense strand
cccaagaacucgaaacaga

SEQ ID NO: 852323 - RNA, 19 nt, Homo sapiens
  misc_RNA (1)...(19): siRNA sense strand
guguuuagauucagaaguu

SEQ ID NO: 852324 - RNA, 19 nt, Homo sapiens
  misc_RNA (1)...(19): siRNA sense strand
guaggagaauugaacuuau

SEQ ID NO: 852325 - RNA, 19 nt, Homo sapiens
  misc_RNA (1)...(19): siRNA sense strand
gaagaaacacgugcacaga

SEQ ID NO: 852326 - RNA, 19 nt, Homo sapiens
  misc_RNA (1)...(19): siRNA sense strand
caaagauucugccacaaag

SEQ ID NO: 852327 - RNA, 19 nt, Homo sapiens
  misc_RNA (1)...(19): siRNA sense strand
gaaagcacagucuaugaug

SEQ ID NO: 852328 - RNA, 19 nt, Homo sapiens
  misc_RNA (1)...(19): siRNA sense strand
caauuauccuugaaguuug

SEQ ID NO: 852329 - RNA, 19 nt, Homo sapiens
  misc_RNA (1)...(19): siRNA sense strand
ugaauccucuacaaacuga

SEQ ID NO: 852330 - RNA, 19 nt, Homo sapiens
  misc_RNA (1)...(19): siRNA sense strand
aaagauggacaguacauuu

SEQ ID NO: 852331 - RNA, 19 nt, Homo sapiens
  misc_RNA (1)...(19): siRNA sense strand
acaauugacauucacguua

SEQ ID NO: 852332 - RNA, 19 nt, Homo sapiens
  misc_RNA (1)...(19): siRNA sense strand
agagcuggcacuuaaauua

SEQ ID NO: 852333 - RNA, 19 nt, Homo sapiens
  misc_RNA (1)...(19): siRNA sense strand
guagauguccguaggagaa

SEQ ID NO: 852334 - RNA, 19 nt, Homo sapiens
  misc_RNA (1)...(19): siRNA sense strand
cagaaguugucaccuuuga

SEQ ID NO: 852335 - RNA, 19 nt, Homo sapiens
  misc_RNA (1)...(19): siRNA sense strand
ccuugaagaucguuugaaa

SEQ ID NO: 852336 - RNA, 19 nt, Homo sapiens
  misc_RNA (1)...(19): siRNA sense strand
ccacaaagcagaaacugau

SEQ ID NO: 852337 - RNA, 19 nt, Homo sapiens
  misc_RNA (1)...(19): siRNA sense strand
ucaaagauucugccacaaa

SEQ ID NO: 852338 - RNA, 19 nt, Homo sapiens
  misc_RNA (1)...(19): siRNA sense strand
agaaacacgugcacagaga

SEQ ID NO: 852339 - RNA, 19 nt, Homo sapiens
  misc_RNA (1)...(19): siRNA sense strand
aagcagaaaucuacaugga

SEQ ID NO: 852340 - RNA, 19 nt, Homo sapiens
  misc_RNA (1)...(19): siRNA sense strand
acaggaggcugagaaacua

SEQ ID NO: 852341 - RNA, 19 nt, Homo sapiens
  misc_RNA (1)...(19): siRNA sense strand
gaauuuagaagcuucaaag

SEQ ID NO: 852342 - RNA, 19 nt, Homo sapiens
  misc_RNA (1)...(19): siRNA sense strand
gaacccugaccuccaagua

SEQ ID NO: 852343 - RNA, 19 nt, Homo sapiens
  misc_RNA (1)...(19): siRNA sense strand
ugagaacccugaccuccaa

SEQ ID NO: 852344 - RNA, 19 nt, Homo sapiens
  misc_RNA (1)...(19): siRNA sense strand
uaccaacaaucucugcuuu

SEQ ID NO: 852345 - RNA, 19 nt, Homo sapiens
  misc_RNA (1)...(19): siRNA sense strand
agaggacggucguuucauu

SEQ ID NO: 852346 - RNA, 19 nt, Homo sapiens
  misc_RNA (1)...(19): siRNA sense strand
gcaacaagaacuucgugaa

SEQ ID NO: 852347 - RNA, 19 nt, Homo sapiens
  misc_RNA (1)...(19): siRNA sense strand
guuaugacaccuaucaauu

SEQ ID NO: 852348 - RNA, 19 nt, Homo sapiens
  misc_RNA (1)...(19): siRNA sense strand
gcagcaaacaauugacauu

SEQ ID NO: 852349 - RNA, 19 nt, Homo sapiens
  misc_RNA (1)...(19): siRNA sense strand
gaggagaagcagaaaucua

SEQ ID NO: 852350 - RNA, 19 nt, Homo sapiens
  misc_RNA (1)...(19): siRNA sense strand
caaggacgauaccugaauc

SEQ ID NO: 852351 - RNA, 19 nt, Homo sapiens
  misc_RNA (1)...(19): siRNA sense strand
agauuucucuuaccacuau

SEQ ID NO: 852352 - RNA, 19 nt, Homo sapiens
  misc_RNA (1)...(19): siRNA sense strand
ggugcaaguucugaaguuu

SEQ ID NO: 852353 - RNA, 19 nt, Homo sapiens
  misc_RNA (1)...(19): siRNA sense strand
gcaacaggaggcugagaaa

SEQ ID NO: 852354 - RNA, 19 nt, Homo sapiens
  misc_RNA (1)...(19): siRNA sense strand
gagaguccaguuaaagaaa

SEQ ID NO: 852355 - RNA, 19 nt, Homo sapiens
  misc_RNA (1)...(19): siRNA sense strand
cacagucuaugaugauuau

SEQ ID NO: 852356 - RNA, 19 nt, Homo sapiens
  misc_RNA (1)...(19): siRNA sense strand
aaagcacagucuaugauga

SEQ ID NO: 852357 - RNA, 19 nt, Homo sapiens
  misc_RNA (1)...(19): siRNA sense strand
ucggugguguuccuucuua

SEQ ID NO: 852358 - RNA, 19 nt, Homo sapiens
  misc_RNA (1)...(19): siRNA sense strand
gauguuaugacaccuauca

SEQ ID NO: 852359 - RNA, 19 nt, Homo sapiens
  misc_RNA (1)...(19): siRNA sense strand
aaaccagaauaccaaaguu

SEQ ID NO: 852360 - RNA, 19 nt, Homo sapiens
  misc_RNA (1)...(19): siRNA sense strand
ucugaugacuacucaaaga

SEQ ID NO: 852361 - RNA, 19 nt, Homo sapiens
  misc_RNA (1)...(19): siRNA sense strand
gcaaacaauugacauucac

SEQ ID NO: 852362 - RNA, 19 nt, Homo sapiens
  misc_RNA (1)...(19): siRNA sense strand
cacagagaguccaguuaaa

SEQ ID NO: 852363 - RNA, 19 nt, Homo sapiens
  misc_RNA (1)...(19): siRNA sense strand
cguaggagaauugaacuua

SEQ ID NO: 852364 - RNA, 19 nt, Homo sapiens
  misc_RNA (1)...(19): siRNA sense strand
uccauuugcuuaugaagaa

SEQ ID NO: 852365 - RNA, 19 nt, Homo sapiens
  misc_RNA (1)...(19): siRNA sense strand
ccuguuagacugcgccuua

SEQ ID NO: 852366 - RNA, 19 nt, Homo sapiens
  misc_RNA (1)...(19): siRNA sense strand
gugcaaguucugaaguuua

SEQ ID NO: 852367 - RNA, 19 nt, Homo sapiens
  misc_RNA (1)...(19): siRNA sense strand
gagaauaauguuugugaca

SEQ ID NO: 852368 - RNA, 19 nt, Homo sapiens
  misc_RNA (1)...(19): siRNA sense strand
cugaguggcuuucugauag

SEQ ID NO: 852369 - RNA, 19 nt, Homo sapiens
  misc_RNA (1)...(19): siRNA sense strand
gaguccaguuaaagaaauu

SEQ ID NO: 852370 - RNA, 19 nt, Homo sapiens
  misc_RNA (1)...(19): siRNA sense strand
ccgaagaauuagaagagaa

SEQ ID NO: 852371 - RNA, 19 nt, Homo sapiens
  misc_RNA (1)...(19): siRNA sense strand
uuuagcaacuggaacauau

SEQ ID NO: 852372 - RNA, 19 nt, Homo sapiens
  misc_RNA (1)...(19): siRNA sense strand
gaacuuauucaggacuuug

SEQ ID NO: 852373 - RNA, 19 nt, Homo sapiens
  misc_RNA (1)...(19): siRNA sense strand
aaacugaugcugcggagaa

SEQ ID NO: 852374 - RNA, 19 nt, Homo sapiens
  misc_RNA (1)...(19): siRNA sense strand
gaaguuugaaagguguuua

SEQ ID NO: 852375 - RNA, 19 nt, Homo sapiens
  misc_RNA (1)...(19): siRNA sense strand
agcagaaacugaugaacaa

SEQ ID NO: 852376 - RNA, 19 nt, Homo sapiens
  misc_RNA (1)...(19): siRNA sense strand
guucggagaguucagauga

SEQ ID NO: 852377 - RNA, 19 nt, Homo sapiens
  misc_RNA (1)...(19): siRNA sense strand
aggaagagccggaaggaaa

SEQ ID NO: 852378 - RNA, 19 nt, Homo sapiens
  misc_RNA (1)...(19): siRNA sense strand
cagaaagcacagucuauga

SEQ ID NO: 852379 - RNA, 19 nt, Homo sapiens
  misc_RNA (1)...(19): siRNA sense strand
gaagagaauccagaaagca

SEQ ID NO: 852380 - RNA, 19 nt, Homo sapiens
  misc_RNA (1)...(19): siRNA sense strand
gggcaucuauuacauucca

SEQ ID NO: 852381 - RNA, 19 nt, Homo sapiens
  misc_RNA (1)...(19): siRNA sense strand
caaagcagaaacugaugaa

SEQ ID NO: 852382 - RNA, 19 nt, Homo sapiens
  misc_RNA (1)...(19): siRNA sense strand
gaccauggcaguuggaaca

SEQ ID NO: 852383 - RNA, 19 nt, Homo sapiens
  misc_RNA (1)...(19): siRNA sense strand
caagugaugcagaaaguuc

SEQ ID NO: 852384 - RNA, 19 nt, Homo sapiens
  misc_RNA (1)...(19): siRNA sense strand
gaagaggagaagcagaaau

SEQ ID NO: 852385 - RNA, 19 nt, Homo sapiens
  misc_RNA (1)...(19): siRNA sense strand
ggaagaagaaacuaagacu

SEQ ID NO: 852386 - RNA, 19 nt, Homo sapiens
  misc_RNA (1)...(19): siRNA sense strand
aaacuacaucgacaagaaa

SEQ ID NO: 852387 - RNA, 19 nt, Homo sapiens
  misc_RNA (1)...(19): siRNA sense strand
gcaggagaagaauuuagaa

SEQ ID NO: 852388 - RNA, 19 nt, Homo sapiens
  misc_RNA (1)...(19): siRNA sense strand
gagaagaacuggauuuguu

SEQ ID NO: 852389 - RNA, 19 nt, Homo sapiens
  misc_RNA (1)...(19): siRNA sense strand
gcaguucccuccagacuuc

SEQ ID NO: 852390 - RNA, 19 nt, Homo sapiens
  misc_RNA (1)...(19): siRNA sense strand
gcagagccuucuaauguau

SEQ ID NO: 852391 - RNA, 19 nt, Homo sapiens
  misc_RNA (1)...(19): siRNA sense strand
gugcagagccuucuaaugu

SEQ ID NO: 852392 - RNA, 19 nt, Homo sapiens
  misc_RNA (1)...(19): siRNA sense strand
gcagaggaacuucuucaaa

SEQ ID NO: 852393 - RNA, 19 nt, Homo sapiens
  misc_RNA (1)...(19): siRNA sense strand
gcaaccagacgauaagaaa

SEQ ID NO: 852394 - RNA, 19 nt, Homo sapiens
  misc_RNA (1)...(19): siRNA sense strand
caaggcagcugaagauuuu

SEQ ID NO: 852395 - RNA, 19 nt, Homo sapiens
  misc_RNA (1)...(19): siRNA sense strand
cagcaacgccucccaauca

SEQ ID NO: 852396 - RNA, 19 nt, Homo sapiens
  misc_RNA (1)...(19): siRNA sense strand
ggccgacaaucuaaagaaa

SEQ ID NO: 852397 - RNA, 19 nt, Homo sapiens
  misc_RNA (1)...(19): siRNA sense strand
ccaggaagcuaugcagaug

SEQ ID NO: 852398 - RNA, 19 nt, Homo sapiens
  misc_RNA (1)...(19): siRNA sense strand
gagauucuggacagucuua

SEQ ID NO: 852399 - RNA, 19 nt, Homo sapiens
  misc_RNA (1)...(19): siRNA sense strand
gcucugggccgacaaucua

SEQ ID NO: 852400 - RNA, 19 nt, Homo sapiens
  misc_RNA (1)...(19): siRNA sense strand
gcagauggugccuaaauuc

SEQ ID NO: 852401 - RNA, 19 nt, Homo sapiens
  misc_RNA (1)...(19): siRNA sense strand
gagcccagcccuccagaaa

SEQ ID NO: 852402 - RNA, 19 nt, Homo sapiens
  misc_RNA (1)...(19): siRNA sense strand
cagaggaacuucuucaaaa

SEQ ID NO: 852403 - RNA, 19 nt, Homo sapiens
  misc_RNA (1)...(19): siRNA sense strand
gaagaacuggauuuguuga

SEQ ID NO: 852404 - RNA, 19 nt, Homo sapiens
  misc_RNA (1)...(19): siRNA sense strand
ccacaaggcagcugaagau

SEQ ID NO: 852405 - RNA, 19 nt, Homo sapiens
  misc_RNA (1)...(19): siRNA sense strand
gauggcaaccagacgauaa

SEQ ID NO: 852406 - RNA, 19 nt, Homo sapiens
  misc_RNA (1)...(19): siRNA sense strand
cccaaucacucagcacuuu

SEQ ID NO: 852407 - RNA, 19 nt, Homo sapiens
  misc_RNA (1)...(19): siRNA sense strand
ugcagagccuucuaaugua

SEQ ID NO: 852408 - RNA, 19 nt, Homo sapiens
  misc_RNA (1)...(19): siRNA sense strand
ucacucagcacuuuggaaa

SEQ ID NO: 852409 - RNA, 19 nt, Homo sapiens
  misc_RNA (1)...(19): siRNA sense strand
cuaugcagauggugccuaa

SEQ ID NO: 852410 - RNA, 19 nt, Homo sapiens
  misc_RNA (1)...(19): siRNA sense strand
caaacccucuccucucaca

SEQ ID NO: 852411 - RNA, 19 nt, Homo sapiens
  misc_RNA (1)...(19): siRNA sense strand
gcccaugcccuaccucauu

SEQ ID NO: 852412 - RNA, 19 nt, Homo sapiens
  misc_RNA (1)...(19): siRNA sense strand
gggcuucucagaucaauuc

SEQ ID NO: 852413 - RNA, 19 nt, Homo sapiens
  misc_RNA (1)...(19): siRNA sense strand
guucaaacaguucaucgaa

SEQ ID NO: 852414 - RNA, 19 nt, Homo sapiens
  misc_RNA (1)...(19): siRNA sense strand
acaaggcagcugaagauuu

SEQ ID NO: 852415 - RNA, 19 nt, Homo sapiens
  misc_RNA (1)...(19): siRNA sense strand
cccaaacccucuccucuca

SEQ ID NO: 852416 - RNA, 19 nt, Homo sapiens
  misc_RNA (1)...(19): siRNA sense strand
gccgagagaguacgagaaa

SEQ ID NO: 852417 - RNA, 19 nt, Homo sapiens
  misc_RNA (1)...(19): siRNA sense strand
gggagggcuucucagauca

SEQ ID NO: 852418 - RNA, 19 nt, Homo sapiens
  misc_RNA (1)...(19): siRNA sense strand
gccaccagcucuucaaagg

SEQ ID NO: 852419 - RNA, 19 nt, Homo sapiens
  misc_RNA (1)...(19): siRNA sense strand
gcgagauucuggacagucu

SEQ ID NO: 852420 - RNA, 19 nt, Homo sapiens
  misc_RNA (1)...(19): siRNA sense strand
ggagaagaacuggauuugu

SEQ ID NO: 852421 - RNA, 19 nt, Homo sapiens
  misc_RNA (1)...(19): siRNA sense strand
ucagccaccugccuugguu

SEQ ID NO: 852422 - RNA, 19 nt, Homo sapiens
  misc_RNA (1)...(19): siRNA sense strand
ggagacgccagcuggaaga

SEQ ID NO: 852423 - RNA, 19 nt, Homo sapiens
  misc_RNA (1)...(19): siRNA sense strand
ccuuggagacgaccuuuaa

SEQ ID NO: 852424 - RNA, 19 nt, Homo sapiens
  misc_RNA (1)...(19): siRNA sense strand
ugcagauggugccuaaauu

SEQ ID NO: 852425 - RNA, 19 nt, Homo sapiens
  misc_RNA (1)...(19): siRNA sense strand
agagccuucuaauguauaa

SEQ ID NO: 852426 - RNA, 19 nt, Homo sapiens
  misc_RNA (1)...(19): siRNA sense strand
gggccgacaaucuaaagaa

SEQ ID NO: 852427 - RNA, 19 nt, Homo sapiens
  misc_RNA (1)...(19): siRNA sense strand
ccucagaguccgaccaaga

SEQ ID NO: 852428 - RNA, 19 nt, Homo sapiens
  misc_RNA (1)...(19): siRNA sense strand
ccgacaaucuaaagaaagg

SEQ ID NO: 852429 - RNA, 19 nt, Homo sapiens
  misc_RNA (1)...(19): siRNA sense strand
ugagaccgagccagaguuu

SEQ ID NO: 852430 - RNA, 19 nt, Homo sapiens
  misc_RNA (1)...(19): siRNA sense strand
cccaugcccuaccucauug

SEQ ID NO: 852431 - RNA, 19 nt, Homo sapiens
  misc_RNA (1)...(19): siRNA sense strand
caagaagucacgucuccau

SEQ ID NO: 852432 - RNA, 19 nt, Homo sapiens
  misc_RNA (1)...(19): siRNA sense strand
agaagaacuggauuuguug

SEQ ID NO: 852433 - RNA, 19 nt, Homo sapiens
  misc_RNA (1)...(19): siRNA sense strand
gaacguggacgccaauacc

SEQ ID NO: 852434 - RNA, 19 nt, Homo sapiens
  misc_RNA (1)...(19): siRNA sense strand
aagcccaacuuugauauag

SEQ ID NO: 852435 - RNA, 19 nt, Homo sapiens
  misc_RNA (1)...(19): siRNA sense strand
ggccgugacugacgagaac

SEQ ID NO: 852436 - RNA, 19 nt, Homo sapiens
  misc_RNA (1)...(19): siRNA sense strand
ucagggaccaggaagcuau

SEQ ID NO: 852437 - RNA, 19 nt, Homo sapiens
  misc_RNA (1)...(19): siRNA sense strand
gggcuccccugcuguguuu

SEQ ID NO: 852438 - RNA, 19 nt, Homo sapiens
  misc_RNA (1)...(19): siRNA sense strand
gcagcaacgccucccaauc

SEQ ID NO: 852439 - RNA, 19 nt, Homo sapiens
  misc_RNA (1)...(19): siRNA sense strand
ugccauccaucccugagaa

SEQ ID NO: 852440 - RNA, 19 nt, Homo sapiens
  misc_RNA (1)...(19): siRNA sense strand
agaccgagccagaguuuag

SEQ ID NO: 852441 - RNA, 19 nt, Homo sapiens
  misc_RNA (1)...(19): siRNA sense strand
caaccagccgucaagaaca

SEQ ID NO: 852442 - RNA, 19 nt, Homo sapiens
  misc_RNA (1)...(19): siRNA sense strand
ggggagggcuucucagauc

SEQ ID NO: 852443 - RNA, 19 nt, Homo sapiens
  misc_RNA (1)...(19): siRNA sense strand
ggagggcuucucagaucaa

SEQ ID NO: 852444 - RNA, 19 nt, Homo sapiens
  misc_RNA (1)...(19): siRNA sense strand
ucacagagccccuaauucu

SEQ ID NO: 852445 - RNA, 19 nt, Homo sapiens
  misc_RNA (1)...(19): siRNA sense strand
cagccugcccaacauacua

SEQ ID NO: 852446 - RNA, 19 nt, Homo sapiens
  misc_RNA (1)...(19): siRNA sense strand
gagcgagauucuggacagu

SEQ ID NO: 852447 - RNA, 19 nt, Homo sapiens
  misc_RNA (1)...(19): siRNA sense strand
gccggcaaccgcagauuug

SEQ ID NO: 852448 - RNA, 19 nt, Homo sapiens
  misc_RNA (1)...(19): siRNA sense strand
cagagccuucuaauguaua

SEQ ID NO: 852449 - RNA, 19 nt, Homo sapiens
  misc_RNA (1)...(19): siRNA sense strand
ccaaccagccgucaagaac

SEQ ID NO: 852450 - RNA, 19 nt, Homo sapiens
  misc_RNA (1)...(19): siRNA sense strand
gagggcuucucagaucaau

SEQ ID NO: 852451 - RNA, 19 nt, Homo sapiens
  misc_RNA (1)...(19): siRNA sense strand
gcaccugcagcuguucaaa

SEQ ID NO: 852452 - RNA, 19 nt, Homo sapiens
  misc_RNA (1)...(19): siRNA sense strand
uaaauucugcuucccuuuu

SEQ ID NO: 852453 - RNA, 19 nt, Homo sapiens
  misc_RNA (1)...(19): siRNA sense strand
gcuccuggccgagagaaga

SEQ ID NO: 852454 - RNA, 19 nt, Homo sapiens
  misc_RNA (1)...(19): siRNA sense strand
gagaccgagccagaguuua

SEQ ID NO: 852455 - RNA, 19 nt, Homo sapiens
  misc_RNA (1)...(19): siRNA sense strand
gaaggggugucccgucucu

SEQ ID NO: 852456 - RNA, 19 nt, Homo sapiens
  misc_RNA (1)...(19): siRNA sense strand
ggcaaccagacgauaagaa

SEQ ID NO: 852457 - RNA, 19 nt, Homo sapiens
  misc_RNA (1)...(19): siRNA sense strand
gaccuggacagcugcuuca

SEQ ID NO: 852458 - RNA, 19 nt, Homo sapiens
  misc_RNA (1)...(19): siRNA sense strand
aaccagccgucaagaacau

SEQ ID NO: 852459 - RNA, 19 nt, Homo sapiens
  misc_RNA (1)...(19): siRNA sense strand
ggcaacaaaugaagaaaua

SEQ ID NO: 852460 - RNA, 19 nt, Homo sapiens
  misc_RNA (1)...(19): siRNA sense strand
gggcgaagcucuaugaguu

SEQ ID NO: 852461 - RNA, 19 nt, Homo sapiens
  misc_RNA (1)...(19): siRNA sense strand
gaagaaauacaucggaguu

SEQ ID NO: 852462 - RNA, 19 nt, Homo sapiens
  misc_RNA (1)...(19): siRNA sense strand
caaccagaccucagacuuu

SEQ ID NO: 852463 - RNA, 19 nt, Homo sapiens
  misc_RNA (1)...(19): siRNA sense strand
aaccagaccucagacuuua

SEQ ID NO: 852464 - RNA, 19 nt, Homo sapiens
  misc_RNA (1)...(19): siRNA sense strand
gauccaggcugcguaugaa

SEQ ID NO: 852465 - RNA, 19 nt, Homo sapiens
  misc_RNA (1)...(19): siRNA sense strand
ggucagcauuucucacuuc

SEQ ID NO: 852466 - RNA, 19 nt, Homo sapiens
  misc_RNA (1)...(19): siRNA sense strand
gaagcucuaugaguuuguu

SEQ ID NO: 852467 - RNA, 19 nt, Homo sapiens
  misc_RNA (1)...(19): siRNA sense strand
ucacuucaccuaucuucua

SEQ ID NO: 852468 - RNA, 19 nt, Homo sapiens
  misc_RNA (1)...(19): siRNA sense strand
gcgaagcucuaugaguuug

SEQ ID NO: 852469 - RNA, 19 nt, Homo sapiens
  misc_RNA (1)...(19): siRNA sense strand
cguaugaaguccugaguca

SEQ ID NO: 852470 - RNA, 19 nt, Homo sapiens
  misc_RNA (1)...(19): siRNA sense strand
ucacaggcccacuggcaua

SEQ ID NO: 852471 - RNA, 19 nt, Homo sapiens
  misc_RNA (1)...(19): siRNA sense strand
gcauuucucacuucaccua

SEQ ID NO: 852472 - RNA, 19 nt, Homo sapiens
  misc_RNA (1)...(19): siRNA sense strand
gcaaccagaccucagacuu

SEQ ID NO: 852473 - RNA, 19 nt, Homo sapiens
  misc_RNA (1)...(19): siRNA sense strand
gggcuuggcuuaccuugcu

SEQ ID NO: 852474 - RNA, 19 nt, Homo sapiens
  misc_RNA (1)...(19): siRNA sense strand
gcacugauuagccuuucuu

SEQ ID NO: 852475 - RNA, 19 nt, Homo sapiens
  misc_RNA (1)...(19): siRNA sense strand
auggucaacuucuauauug

SEQ ID NO: 852476 - RNA, 19 nt, Homo sapiens
  misc_RNA (1)...(19): siRNA sense strand
ggccuuguggcacugauua

SEQ ID NO: 852477 - RNA, 19 nt, Homo sapiens
  misc_RNA (1)...(19): siRNA sense strand
caucgccgcuacaaagcuu

SEQ ID NO: 852478 - RNA, 19 nt, Homo sapiens
  misc_RNA (1)...(19): siRNA sense strand
ggaguuaccaggagcuagu

SEQ ID NO: 852479 - RNA, 19 nt, Homo sapiens
  misc_RNA (1)...(19): siRNA sense strand
agaaauacaucggaguuac

SEQ ID NO: 852480 - RNA, 19 nt, Homo sapiens
  misc_RNA (1)...(19): siRNA sense strand
gggcaacaaaugaagaaau

SEQ ID NO: 852481 - RNA, 19 nt, Homo sapiens
  misc_RNA (1)...(19): siRNA sense strand
ggagauccaggcugcguau

SEQ ID NO: 852482 - RNA, 19 nt, Homo sapiens
  misc_RNA (1)...(19): siRNA sense strand
cauggucaacuucuauauu

SEQ ID NO: 852483 - RNA, 19 nt, Homo sapiens
  misc_RNA (1)...(19): siRNA sense strand
ggucaacuucuauauugug

SEQ ID NO: 852484 - RNA, 19 nt, Homo sapiens
  misc_RNA (1)...(19): siRNA sense strand
ugauuagccuuucuuccau

SEQ ID NO: 852485 - RNA, 19 nt, Homo sapiens
  misc_RNA (1)...(19): siRNA sense strand
aagaaauacaucggaguua

SEQ ID NO: 852486 - RNA, 19 nt, Homo sapiens
  misc_RNA (1)...(19): siRNA sense strand
gaucuggaggcuacugaug

SEQ ID NO: 852487 - RNA, 19 nt, Homo sapiens
  misc_RNA (1)...(19): siRNA sense strand
aagcuuugguggcaucaga

SEQ ID NO: 852488 - RNA, 19 nt, Homo sapiens
  misc_RNA (1)...(19): siRNA sense strand
ccucagcuauguggcagaa

SEQ ID NO: 852489 - RNA, 19 nt, Homo sapiens
  misc_RNA (1)...(19): siRNA sense strand
cuauguggcagaaaccuuu

SEQ ID NO: 852490 - RNA, 19 nt, Homo sapiens
  misc_RNA (1)...(19): siRNA sense strand
ggagugggcgaagcucuau

SEQ ID NO: 852491 - RNA, 19 nt, Homo sapiens
  misc_RNA (1)...(19): siRNA sense strand
cacuucaccuaucuucuau

SEQ ID NO: 852492 - RNA, 19 nt, Homo sapiens
  misc_RNA (1)...(19): siRNA sense strand
ggcgaagcucuaugaguuu

SEQ ID NO: 852493 - RNA, 19 nt, Homo sapiens
  misc_RNA (1)...(19): siRNA sense strand
gaccucagacuuuaagaac

SEQ ID NO: 852494 - RNA, 19 nt, Homo sapiens
  misc_RNA (1)...(19): siRNA sense strand
ccucagacuuuaagaacac

SEQ ID NO: 852495 - RNA, 19 nt, Homo sapiens
  misc_RNA (1)...(19): siRNA sense strand
gaauugguucagcuucuuc

SEQ ID NO: 852496 - RNA, 19 nt, Homo sapiens
  misc_RNA (1)...(19): siRNA sense strand
uuucuuccauggucaacuu

SEQ ID NO: 852497 - RNA, 19 nt, Homo sapiens
  misc_RNA (1)...(19): siRNA sense strand
gcuccuucuugaauugguu

SEQ ID NO: 852498 - RNA, 19 nt, Homo sapiens
  misc_RNA (1)...(19): siRNA sense strand
cuucaccuaucuucuaugg

SEQ ID NO: 852499 - RNA, 19 nt, Homo sapiens
  misc_RNA (1)...(19): siRNA sense strand
uagccauacugcccauuag

SEQ ID NO: 852500 - RNA, 19 nt, Homo sapiens
  misc_RNA (1)...(19): siRNA sense strand
augaguuuguucacaguuu

SEQ ID NO: 852501 - RNA, 19 nt, Homo sapiens
  misc_RNA (1)...(19): siRNA sense strand
cagaaaccuuuggcuccuu

SEQ ID NO: 852502 - RNA, 19 nt, Homo sapiens
  misc_RNA (1)...(19): siRNA sense strand
ucagcuauguggcagaaac

SEQ ID NO: 852503 - RNA, 19 nt, Homo sapiens
  misc_RNA (1)...(19): siRNA sense strand
auagccauacugcccauua

SEQ ID NO: 852504 - RNA, 19 nt, Homo sapiens
  misc_RNA (1)...(19): siRNA sense strand
accaggagcuagugaaggu

SEQ ID NO: 852505 - RNA, 19 nt, Homo sapiens
  misc_RNA (1)...(19): siRNA sense strand
uggcuuaccuugcuuucac

SEQ ID NO: 852506 - RNA, 19 nt, Homo sapiens
  misc_RNA (1)...(19): siRNA sense strand
gaaauacaucggaguuacc

SEQ ID NO: 852507 - RNA, 19 nt, Homo sapiens
  misc_RNA (1)...(19): siRNA sense strand
cuuccauggucaacuucua

SEQ ID NO: 852508 - RNA, 19 nt, Homo sapiens
  misc_RNA (1)...(19): siRNA sense strand
gaagaaagcagccaucaga

SEQ ID NO: 852509 - RNA, 19 nt, Homo sapiens
  misc_RNA (1)...(19): siRNA sense strand
gaaagcagccaucagaaau

SEQ ID NO: 852510 - RNA, 19 nt, Homo sapiens
  misc_RNA (1)...(19): siRNA sense strand
cgaaguagaggaacucaua

SEQ ID NO: 852511 - RNA, 19 nt, Homo sapiens
  misc_RNA (1)...(19): siRNA sense strand
caaggaauauuaugagaca

SEQ ID NO: 852512 - RNA, 19 nt, Homo sapiens
  misc_RNA (1)...(19): siRNA sense strand
caacagagcaucaguaagg

SEQ ID NO: 852513 - RNA, 19 nt, Homo sapiens
  misc_RNA (1)...(19): siRNA sense strand
ggaggaggaaccagucaua

SEQ ID NO: 852514 - RNA, 19 nt, Homo sapiens
  misc_RNA (1)...(19): siRNA sense strand
uagaggaacucauaccaau

SEQ ID NO: 852515 - RNA, 19 nt, Homo sapiens
  misc_RNA (1)...(19): siRNA sense strand
cagaaucucuccacgaagu

SEQ ID NO: 852516 - RNA, 19 nt, Homo sapiens
  misc_RNA (1)...(19): siRNA sense strand
gcagccaucagaaauguuu

SEQ ID NO: 852517 - RNA, 19 nt, Homo sapiens
  misc_RNA (1)...(19): siRNA sense strand
gcaaaaguacuuccauuaa

SEQ ID NO: 852518 - RNA, 19 nt, Homo sapiens
  misc_RNA (1)...(19): siRNA sense strand
ggcaacagagcaucaguaa

SEQ ID NO: 852519 - RNA, 19 nt, Homo sapiens
  misc_RNA (1)...(19): siRNA sense strand
gcaaaugcacucacuacuc

SEQ ID NO: 852520 - RNA, 19 nt, Homo sapiens
  misc_RNA (1)...(19): siRNA sense strand
ucacugugucccaaacuua

SEQ ID NO: 852521 - RNA, 19 nt, Homo sapiens
  misc_RNA (1)...(19): siRNA sense strand
cacaaggaauauuaugaga

SEQ ID NO: 852522 - RNA, 19 nt, Homo sapiens
  misc_RNA (1)...(19): siRNA sense strand
gaacucacugugucccaaa

SEQ ID NO: 852523 - RNA, 19 nt, Homo sapiens
  misc_RNA (1)...(19): siRNA sense strand
gaauaaagacccaguuuuc

SEQ ID NO: 852524 - RNA, 19 nt, Homo sapiens
  misc_RNA (1)...(19): siRNA sense strand
ggaauauuaugagacaaag

SEQ ID NO: 852525 - RNA, 19 nt, Homo sapiens
  misc_RNA (1)...(19): siRNA sense strand
ggaggaaccagucauaacu

SEQ ID NO: 852526 - RNA, 19 nt, Homo sapiens
  misc_RNA (1)...(19): siRNA sense strand
gaggaggaaccagucauaa

SEQ ID NO: 852527 - RNA, 19 nt, Homo sapiens
  misc_RNA (1)...(19): siRNA sense strand
caauggagcuggcaaaagu

SEQ ID NO: 852528 - RNA, 19 nt, Homo sapiens
  misc_RNA (1)...(19): siRNA sense strand
agaaagcagccaucagaaa

SEQ ID NO: 852529 - RNA, 19 nt, Homo sapiens
  misc_RNA (1)...(19): siRNA sense strand
gaaagaguccaagcagcaa

SEQ ID NO: 852530 - RNA, 19 nt, Homo sapiens
  misc_RNA (1)...(19): siRNA sense strand
gacaacagccucaaguucu

SEQ ID NO: 852531 - RNA, 19 nt, Homo sapiens
  misc_RNA (1)...(19): siRNA sense strand
gcuguuuacacaaggaaua

SEQ ID NO: 852532 - RNA, 19 nt, Homo sapiens
  misc_RNA (1)...(19): siRNA sense strand
acaacagccucaaguucuu

SEQ ID NO: 852533 - RNA, 19 nt, Homo sapiens
  misc_RNA (1)...(19): siRNA sense strand
guagaggaacucauaccaa

SEQ ID NO: 852534 - RNA, 19 nt, Homo sapiens
  misc_RNA (1)...(19): siRNA sense strand
ugacaacagccucaaguuc

SEQ ID NO: 852535 - RNA, 19 nt, Homo sapiens
  misc_RNA (1)...(19): siRNA sense strand
gaaguauggaaaugaaauc

SEQ ID NO: 852536 - RNA, 19 nt, Homo sapiens
  misc_RNA (1)...(19): siRNA sense strand
cauaacugcaagcuguuua

SEQ ID NO: 852537 - RNA, 19 nt, Homo sapiens
  misc_RNA (1)...(19): siRNA sense strand
gagcaucaguaaggcaaca

SEQ ID NO: 852538 - RNA, 19 nt, Homo sapiens
  misc_RNA (1)...(19): siRNA sense strand
uucagaaucucuccacgaa

SEQ ID NO: 852539 - RNA, 19 nt, Homo sapiens
  misc_RNA (1)...(19): siRNA sense strand
guacugcccucaggagaac

SEQ ID NO: 852540 - RNA, 19 nt, Homo sapiens
  misc_RNA (1)...(19): siRNA sense strand
aagcagccaucagaaaugu

SEQ ID NO: 852541 - RNA, 19 nt, Homo sapiens
  misc_RNA (1)...(19): siRNA sense strand
ggcaaaaguacuuccauua

SEQ ID NO: 852542 - RNA, 19 nt, Homo sapiens
  misc_RNA (1)...(19): siRNA sense strand
acucacuacuccaaacuug

SEQ ID NO: 852543 - RNA, 19 nt, Homo sapiens
  misc_RNA (1)...(19): siRNA sense strand
aaagugaaguuuugggauu

SEQ ID NO: 852544 - RNA, 19 nt, Homo sapiens
  misc_RNA (1)...(19): siRNA sense strand
acugcaagcuguuuacaca

SEQ ID NO: 852545 - RNA, 19 nt, Homo sapiens
  misc_RNA (1)...(19): siRNA sense strand
gcagcaaaugcacucacua

SEQ ID NO: 852546 - RNA, 19 nt, Homo sapiens
  misc_RNA (1)...(19): siRNA sense strand
caggaguggugguguuaca

SEQ ID NO: 852547 - RNA, 19 nt, Homo sapiens
  misc_RNA (1)...(19): siRNA sense strand
caacaacaaggaagaaagc

SEQ ID NO: 852548 - RNA, 19 nt, Homo sapiens
  misc_RNA (1)...(19): siRNA sense strand
caagcuguuuacacaagga

SEQ ID NO: 852549 - RNA, 19 nt, Homo sapiens
  misc_RNA (1)...(19): siRNA sense strand
gguacugcccucaggagaa

SEQ ID NO: 852550 - RNA, 19 nt, Homo sapiens
  misc_RNA (1)...(19): siRNA sense strand
ggauuacuaggacacaaug

SEQ ID NO: 852551 - RNA, 19 nt, Homo sapiens
  misc_RNA (1)...(19): siRNA sense strand
uaugagacaaagaaaguug

SEQ ID NO: 852552 - RNA, 19 nt, Homo sapiens
  misc_RNA (1)...(19): siRNA sense strand
gaaguagaggaacucauac

SEQ ID NO: 852553 - RNA, 19 nt, Homo sapiens
  misc_RNA (1)...(19): siRNA sense strand
cagcaaaugcacucacuac

SEQ ID NO: 852554 - RNA, 19 nt, Homo sapiens
  misc_RNA (1)...(19): siRNA sense strand
gaggaacucauaccaaucc

SEQ ID NO: 852555 - RNA, 19 nt, Homo sapiens
  misc_RNA (1)...(19): siRNA sense strand
gggauuacuaggacacaau

SEQ ID NO: 852556 - RNA, 19 nt, Homo sapiens
  misc_RNA (1)...(19): siRNA sense strand
aaagcagccaucagaaaug

SEQ ID NO: 852557 - RNA, 19 nt, Homo sapiens
  misc_RNA (1)...(19): siRNA sense strand
ggaagaaagcagccaucag

SEQ ID NO: 852558 - RNA, 19 nt, Homo sapiens
  misc_RNA (1)...(19): siRNA sense strand
acacaaggaauauuaugag

SEQ ID NO: 852559 - RNA, 19 nt, Homo sapiens
  misc_RNA (1)...(19): siRNA sense strand
ggaguggugguguuacaag

SEQ ID NO: 852560 - RNA, 19 nt, Homo sapiens
  misc_RNA (1)...(19): siRNA sense strand
ucauaccaauccagaagag

SEQ ID NO: 852561 - RNA, 19 nt, Homo sapiens
  misc_RNA (1)...(19): siRNA sense strand
ugucccaaacuuacaauga

SEQ ID NO: 852562 - RNA, 19 nt, Homo sapiens
  misc_RNA (1)...(19): siRNA sense strand
cugcaggaguggugguguu

SEQ ID NO: 852563 - RNA, 19 nt, Homo sapiens
  misc_RNA (1)...(19): siRNA sense strand
ugcaagcuguuuacacaag

SEQ ID NO: 852564 - RNA, 19 nt, Homo sapiens
  misc_RNA (1)...(19): siRNA sense strand
gcacucacuacuccaaacu

SEQ ID NO: 852565 - RNA, 19 nt, Homo sapiens
  misc_RNA (1)...(19): siRNA sense strand
gugacaacagccucaaguu

SEQ ID NO: 852566 - RNA, 19 nt, Homo sapiens
  misc_RNA (1)...(19): siRNA sense strand
ggcaacagcgugacaacag

SEQ ID NO: 852567 - RNA, 19 nt, Homo sapiens
  misc_RNA (1)...(19): siRNA sense strand
acacaauggagcuggcaaa

SEQ ID NO: 852568 - RNA, 19 nt, Homo sapiens
  misc_RNA (1)...(19): siRNA sense strand
guaaggcaacagcgugaca

SEQ ID NO: 852569 - RNA, 19 nt, Homo sapiens
  misc_RNA (1)...(19): siRNA sense strand
gaagagcucucaaucaaga

SEQ ID NO: 852570 - RNA, 19 nt, Homo sapiens
  misc_RNA (1)...(19): siRNA sense strand
gggcauauauugaaaguca

SEQ ID NO: 852571 - RNA, 19 nt, Homo sapiens
  misc_RNA (1)...(19): siRNA sense strand
aggaagagcucucaaucaa

SEQ ID NO: 852572 - RNA, 19 nt, Homo sapiens
  misc_RNA (1)...(19): siRNA sense strand
gaaggaagagcucucaauc

SEQ ID NO: 852573 - RNA, 19 nt, Homo sapiens
  misc_RNA (1)...(19): siRNA sense strand
cauauuggguggcuguuug

SEQ ID NO: 852574 - RNA, 19 nt, Homo sapiens
  misc_RNA (1)...(19): siRNA sense strand
gcaucaagggcauauauug

SEQ ID NO: 852575 - RNA, 19 nt, Homo sapiens
  misc_RNA (1)...(19): siRNA sense strand
guccggauccagagaaaua

SEQ ID NO: 852576 - RNA, 19 nt, Homo sapiens
  misc_RNA (1)...(19): siRNA sense strand
gaacaucgucuggaggaau

SEQ ID NO: 852577 - RNA, 19 nt, Homo sapiens
  misc_RNA (1)...(19): siRNA sense strand
ccauggcuuuccagaauga

SEQ ID NO: 852578 - RNA, 19 nt, Homo sapiens
  misc_RNA (1)...(19): siRNA sense strand
gcacauccagaaagaagga

SEQ ID NO: 852579 - RNA, 19 nt, Homo sapiens
  misc_RNA (1)...(19): siRNA sense strand
cacagcacauccagaaaga

SEQ ID NO: 852580 - RNA, 19 nt, Homo sapiens
  misc_RNA (1)...(19): siRNA sense strand
gaaauacacagcacaucca

SEQ ID NO: 852581 - RNA, 19 nt, Homo sapiens
  misc_RNA (1)...(19): siRNA sense strand
cuccauggcuuuccagaau

SEQ ID NO: 852582 - RNA, 19 nt, Homo sapiens
  misc_RNA (1)...(19): siRNA sense strand
gagaaagcuugacgucacu

SEQ ID NO: 852583 - RNA, 19 nt, Homo sapiens
  misc_RNA (1)...(19): siRNA sense strand
ggaaugucguccugaugag

SEQ ID NO: 852584 - RNA, 19 nt, Homo sapiens
  misc_RNA (1)...(19): siRNA sense strand
gaaagcuugacgucacuga

SEQ ID NO: 852585 - RNA, 19 nt, Homo sapiens
  misc_RNA (1)...(19): siRNA sense strand
auacacagcacauccagaa

SEQ ID NO: 852586 - RNA, 19 nt, Homo sapiens
  misc_RNA (1)...(19): siRNA sense strand
caccacaaguacucagaga

SEQ ID NO: 852587 - RNA, 19 nt, Homo sapiens
  misc_RNA (1)...(19): siRNA sense strand
agucacccuucccggauua

SEQ ID NO: 852588 - RNA, 19 nt, Homo sapiens
  misc_RNA (1)...(19): siRNA sense strand
ggaagagcucucaaucaag

SEQ ID NO: 852589 - RNA, 19 nt, Homo sapiens
  misc_RNA (1)...(19): siRNA sense strand
caagaggcagcgugugaga

SEQ ID NO: 852590 - RNA, 19 nt, Homo sapiens
  misc_RNA (1)...(19): siRNA sense strand
cuucccggauuacacauuu

SEQ ID NO: 852591 - RNA, 19 nt, Homo sapiens
  misc_RNA (1)...(19): siRNA sense strand
cagcacauccagaaagaag

SEQ ID NO: 852592 - RNA, 19 nt, Homo sapiens
  misc_RNA (1)...(19): siRNA sense strand
ggcuucuucuucucccaua

SEQ ID NO: 852593 - RNA, 19 nt, Homo sapiens
  misc_RNA (1)...(19): siRNA sense strand
uagcuuuguuacauacuca

SEQ ID NO: 852594 - RNA, 19 nt, Homo sapiens
  misc_RNA (1)...(19): siRNA sense strand
aucgagauguuauugagaa

SEQ ID NO: 852595 - RNA, 19 nt, Homo sapiens
  misc_RNA (1)...(19): siRNA sense strand
cauuguaaccacuccgaaa

SEQ ID NO: 852596 - RNA, 19 nt, Homo sapiens
  misc_RNA (1)...(19): siRNA sense strand
ggcaucaagggcauauauu

SEQ ID NO: 852597 - RNA, 19 nt, Homo sapiens
  misc_RNA (1)...(19): siRNA sense strand
uggcaucaagggcauauau

SEQ ID NO: 852598 - RNA, 19 nt, Homo sapiens
  misc_RNA (1)...(19): siRNA sense strand
agaaggaagagcucucaau

SEQ ID NO: 852599 - RNA, 19 nt, Homo sapiens
  misc_RNA (1)...(19): siRNA sense strand
acacagcacauccagaaag

SEQ ID NO: 852600 - RNA, 19 nt, Homo sapiens
  misc_RNA (1)...(19): siRNA sense strand
aacaucgucuggaggaaug

SEQ ID NO: 852601 - RNA, 19 nt, Homo sapiens
  misc_RNA (1)...(19): siRNA sense strand
gagaaauacacagcacauc

SEQ ID NO: 852602 - RNA, 19 nt, Homo sapiens
  misc_RNA (1)...(19): siRNA sense strand
agaggcagcgugugagaug

SEQ ID NO: 852603 - RNA, 19 nt, Homo sapiens
  misc_RNA (1)...(19): siRNA sense strand
aaggaagagcucucaauca

SEQ ID NO: 852604 - RNA, 19 nt, Homo sapiens
  misc_RNA (1)...(19): siRNA sense strand
ccaacuccauggcuuucca

SEQ ID NO: 852605 - RNA, 19 nt, Homo sapiens
  misc_RNA (1)...(19): siRNA sense strand
aaagaaggaagagcucuca

SEQ ID NO: 852606 - RNA, 19 nt, Homo sapiens
  misc_RNA (1)...(19): siRNA sense strand
aagggcauauauugaaagu

SEQ ID NO: 852607 - RNA, 19 nt, Homo sapiens
  misc_RNA (1)...(19): siRNA sense strand
gaagaugccuccacuuuaa

SEQ ID NO: 852608 - RNA, 19 nt, Homo sapiens
  misc_RNA (1)...(19): siRNA sense strand
gaaagaagccuaagagaga

SEQ ID NO: 852609 - RNA, 19 nt, Homo sapiens
  misc_RNA (1)...(19): siRNA sense strand
guagaaaucuuccaugaga

SEQ ID NO: 852610 - RNA, 19 nt, Homo sapiens
  misc_RNA (1)...(19): siRNA sense strand
gaaagagggugcauucguu

SEQ ID NO: 852611 - RNA, 19 nt, Homo sapiens
  misc_RNA (1)...(19): siRNA sense strand
gaagauggaguuuauguuu

SEQ ID NO: 852612 - RNA, 19 nt, Homo sapiens
  misc_RNA (1)...(19): siRNA sense strand
gaagagguguauagaaaug

SEQ ID NO: 852613 - RNA, 19 nt, Homo sapiens
  misc_RNA (1)...(19): siRNA sense strand
ggaaugagcaagccaagua

SEQ ID NO: 852614 - RNA, 19 nt, Homo sapiens
  misc_RNA (1)...(19): siRNA sense strand
agaugaaacuccuuuguua

SEQ ID NO: 852615 - RNA, 19 nt, Homo sapiens
  misc_RNA (1)...(19): siRNA sense strand
gggauuaucuagcauuaaa

SEQ ID NO: 852616 - RNA, 19 nt, Homo sapiens
  misc_RNA (1)...(19): siRNA sense strand
gauuauaccuccaaagaug

SEQ ID NO: 852617 - RNA, 19 nt, Homo sapiens
  misc_RNA (1)...(19): siRNA sense strand
gagcuaugauggcacguua

SEQ ID NO: 852618 - RNA, 19 nt, Homo sapiens
  misc_RNA (1)...(19): siRNA sense strand
ggaagagacugaagaacau

SEQ ID NO: 852619 - RNA, 19 nt, Homo sapiens
  misc_RNA (1)...(19): siRNA sense strand
gaagucagccuuugauuuc

SEQ ID NO: 852620 - RNA, 19 nt, Homo sapiens
  misc_RNA (1)...(19): siRNA sense strand
agacaacaaugaacgauuu

SEQ ID NO: 852621 - RNA, 19 nt, Homo sapiens
  misc_RNA (1)...(19): siRNA sense strand
gagaagggauuaucuagca

SEQ ID NO: 852622 - RNA, 19 nt, Homo sapiens
  misc_RNA (1)...(19): siRNA sense strand
gaaguggcguguaagaaga

SEQ ID NO: 852623 - RNA, 19 nt, Homo sapiens
  misc_RNA (1)...(19): siRNA sense strand
gaacauacaaagagcauug

SEQ ID NO: 852624 - RNA, 19 nt, Homo sapiens
  misc_RNA (1)...(19): siRNA sense strand
acaaugaaguggcguguaa

SEQ ID NO: 852625 - RNA, 19 nt, Homo sapiens
  misc_RNA (1)...(19): siRNA sense strand
gaagauaccguuuacaaag

SEQ ID NO: 852626 - RNA, 19 nt, Homo sapiens
  misc_RNA (1)...(19): siRNA sense strand
acaagaagacugugucaua

SEQ ID NO: 852627 - RNA, 19 nt, Homo sapiens
  misc_RNA (1)...(19): siRNA sense strand
gaaaggaagagacugaaga

SEQ ID NO: 852628 - RNA, 19 nt, Homo sapiens
  misc_RNA (1)...(19): siRNA sense strand
ggguagaaaucuuccauga

SEQ ID NO: 852629 - RNA, 19 nt, Homo sapiens
  misc_RNA (1)...(19): siRNA sense strand
gcaagacuccgugaaauga

SEQ ID NO: 852630 - RNA, 19 nt, Homo sapiens
  misc_RNA (1)...(19): siRNA sense strand
gcacccaacucgguauauu

SEQ ID NO: 852631 - RNA, 19 nt, Homo sapiens
  misc_RNA (1)...(19): siRNA sense strand
gcagcuguauaucuucuaa

SEQ ID NO: 852632 - RNA, 19 nt, Homo sapiens
  misc_RNA (1)...(19): siRNA sense strand
gagggauacucauauuuau

SEQ ID NO: 852633 - RNA, 19 nt, Homo sapiens
  misc_RNA (1)...(19): siRNA sense strand
uugaagagguguauagaaa

SEQ ID NO: 852634 - RNA, 19 nt, Homo sapiens
  misc_RNA (1)...(19): siRNA sense strand
gaagagacagccuccuaaa

SEQ ID NO: 852635 - RNA, 19 nt, Homo sapiens
  misc_RNA (1)...(19): siRNA sense strand
ccacaugugcugauuguaa

SEQ ID NO: 852636 - RNA, 19 nt, Homo sapiens
  misc_RNA (1)...(19): siRNA sense strand
ccaguuagcugucuuuacu

SEQ ID NO: 852637 - RNA, 19 nt, Homo sapiens
  misc_RNA (1)...(19): siRNA sense strand
caagaagacugugucauag

SEQ ID NO: 852638 - RNA, 19 nt, Homo sapiens
  misc_RNA (1)...(19): siRNA sense strand
gagaagagacagccuccua

SEQ ID NO: 852639 - RNA, 19 nt, Homo sapiens
  misc_RNA (1)...(19): siRNA sense strand
cagaagaugccuccacuuu

SEQ ID NO: 852640 - RNA, 19 nt, Homo sapiens
  misc_RNA (1)...(19): siRNA sense strand
gcaaggcgauugaauucca

SEQ ID NO: 852641 - RNA, 19 nt, Homo sapiens
  misc_RNA (1)...(19): siRNA sense strand
gaaggauuauaccuccaaa

SEQ ID NO: 852642 - RNA, 19 nt, Homo sapiens
  misc_RNA (1)...(19): siRNA sense strand
ggacaccuggaacuucuua

SEQ ID NO: 852643 - RNA, 19 nt, Homo sapiens
  misc_RNA (1)...(19): siRNA sense strand
gauaccguuuacaaaguua

SEQ ID NO: 852644 - RNA, 19 nt, Homo sapiens
  misc_RNA (1)...(19): siRNA sense strand
agaagacugugucauaguu

SEQ ID NO: 852645 - RNA, 19 nt, Homo sapiens
  misc_RNA (1)...(19): siRNA sense strand
gaccacaugugcugauugu

SEQ ID NO: 852646 - RNA, 19 nt, Homo sapiens
  misc_RNA (1)...(19): siRNA sense strand
acacugggauggaaauaug

SEQ ID NO: 852647 - RNA, 19 nt, Homo sapiens
  misc_RNA (1)...(19): siRNA sense strand
ggcgauggcugaccagguu

SEQ ID NO: 852648 - RNA, 19 nt, Homo sapiens
  misc_RNA (1)...(19): siRNA sense strand
cgacauuaguagcagauga

SEQ ID NO: 852649 - RNA, 19 nt, Homo sapiens
  misc_RNA (1)...(19): siRNA sense strand
caucagaaacuagaacuuu

SEQ ID NO: 852650 - RNA, 19 nt, Homo sapiens
  misc_RNA (1)...(19): siRNA sense strand
gaagagacugaagaacaua

SEQ ID NO: 852651 - RNA, 19 nt, Homo sapiens
  misc_RNA (1)...(19): siRNA sense strand
gaugcaaggcgauugaauu

SEQ ID NO: 852652 - RNA, 19 nt, Homo sapiens
  misc_RNA (1)...(19): siRNA sense strand
agaagaugccuccacuuua

SEQ ID NO: 852653 - RNA, 19 nt, Homo sapiens
  misc_RNA (1)...(19): siRNA sense strand
gggauuggauguagaaggu

SEQ ID NO: 852654 - RNA, 19 nt, Homo sapiens
  misc_RNA (1)...(19): siRNA sense strand
gaaaguaacaagcuacaac

SEQ ID NO: 852655 - RNA, 19 nt, Homo sapiens
  misc_RNA (1)...(19): siRNA sense strand
guaguaagaacacugagaa

SEQ ID NO: 852656 - RNA, 19 nt, Homo sapiens
  misc_RNA (1)...(19): siRNA sense strand
caugugggauccuaaacaa

SEQ ID NO: 852657 - RNA, 19 nt, Homo sapiens
  misc_RNA (1)...(19): siRNA sense strand
gaagggauuaucuagcauu

SEQ ID NO: 852658 - RNA, 19 nt, Homo sapiens
  misc_RNA (1)...(19): siRNA sense strand
gaacacugagaagggauua

SEQ ID NO: 852659 - RNA, 19 nt, Homo sapiens
  misc_RNA (1)...(19): siRNA sense strand
cgaugaaucucaguguuga

SEQ ID NO: 852660 - RNA, 19 nt, Homo sapiens
  misc_RNA (1)...(19): siRNA sense strand
gcuacaaagccaauuuaaa

SEQ ID NO: 852661 - RNA, 19 nt, Homo sapiens
  misc_RNA (1)...(19): siRNA sense strand
caacaccgccgacauuagu

SEQ ID NO: 852662 - RNA, 19 nt, Homo sapiens
  misc_RNA (1)...(19): siRNA sense strand
gaacggcagaugcgaugaa

SEQ ID NO: 852663 - RNA, 19 nt, Homo sapiens
  misc_RNA (1)...(19): siRNA sense strand
ccagcaaccuaaagaagau

SEQ ID NO: 852664 - RNA, 19 nt, Homo sapiens
  misc_RNA (1)...(19): siRNA sense strand
ccaaaucccuaucagaaaa

SEQ ID NO: 852665 - RNA, 19 nt, Homo sapiens
  misc_RNA (1)...(19): siRNA sense strand
ucaagaagacaacaaugaa

SEQ ID NO: 852666 - RNA, 19 nt, Homo sapiens
  misc_RNA (1)...(19): siRNA sense strand
gaaucucaguguugaugug

SEQ ID NO: 852667 - RNA, 19 nt, Homo sapiens
  misc_RNA (1)...(19): siRNA sense strand
guaggacacugggauggaa

SEQ ID NO: 852668 - RNA, 19 nt, Homo sapiens
  misc_RNA (1)...(19): siRNA sense strand
gugaagauaccguuuacaa

SEQ ID NO: 852669 - RNA, 19 nt, Homo sapiens
  misc_RNA (1)...(19): siRNA sense strand
ggaaaguagucaggaugga

SEQ ID NO: 852670 - RNA, 19 nt, Homo sapiens
  misc_RNA (1)...(19): siRNA sense strand
aagacuccgugaaaugaua

SEQ ID NO: 852671 - RNA, 19 nt, Homo sapiens
  misc_RNA (1)...(19): siRNA sense strand
aagggauuaucuagcauua

SEQ ID NO: 852672 - RNA, 19 nt, Homo sapiens
  misc_RNA (1)...(19): siRNA sense strand
gcacacaugggcaggaaug

SEQ ID NO: 852673 - RNA, 19 nt, Homo sapiens
  misc_RNA (1)...(19): siRNA sense strand
aaagaagccuaagagagaa

SEQ ID NO: 852674 - RNA, 19 nt, Homo sapiens
  misc_RNA (1)...(19): siRNA sense strand
ugccuccacuuuaauagua

SEQ ID NO: 852675 - RNA, 19 nt, Homo sapiens
  misc_RNA (1)...(19): siRNA sense strand
ugaagauaccguuuacaaa

SEQ ID NO: 852676 - RNA, 19 nt, Homo sapiens
  misc_RNA (1)...(19): siRNA sense strand
gacaacaaugaacgauuua

SEQ ID NO: 852677 - RNA, 19 nt, Homo sapiens
  misc_RNA (1)...(19): siRNA sense strand
gaaaugacuucugaaaauc

SEQ ID NO: 852678 - RNA, 19 nt, Homo sapiens
  misc_RNA (1)...(19): siRNA sense strand
ggaaagagggugcauucgu

SEQ ID NO: 852679 - RNA, 19 nt, Homo sapiens
  misc_RNA (1)...(19): siRNA sense strand
gcauugcuuccgccuauuu

SEQ ID NO: 852680 - RNA, 19 nt, Homo sapiens
  misc_RNA (1)...(19): siRNA sense strand
ggauggagacagugaugaa

SEQ ID NO: 852681 - RNA, 19 nt, Homo sapiens
  misc_RNA (1)...(19): siRNA sense strand
agaagucagccuuugauuu

SEQ ID NO: 852682 - RNA, 19 nt, Homo sapiens
  misc_RNA (1)...(19): siRNA sense strand
ggagaagucagccuuugau

SEQ ID NO: 852683 - RNA, 19 nt, Homo sapiens
  misc_RNA (1)...(19): siRNA sense strand
cgauugaauuccaggagaa

SEQ ID NO: 852684 - RNA, 19 nt, Homo sapiens
  misc_RNA (1)...(19): siRNA sense strand
agagacagccuccuaaauc

SEQ ID NO: 852685 - RNA, 19 nt, Homo sapiens
  misc_RNA (1)...(19): siRNA sense strand
gcgaugaaucucaguguug

SEQ ID NO: 852686 - RNA, 19 nt, Homo sapiens
  misc_RNA (1)...(19): siRNA sense strand
gugcauagacaguauuuua

SEQ ID NO: 852687 - RNA, 19 nt, Homo sapiens
  misc_RNA (1)...(19): siRNA sense strand
caaguaguaagaacacuga

SEQ ID NO: 852688 - RNA, 19 nt, Homo sapiens
  misc_RNA (1)...(19): siRNA sense strand
uaaaggauuucugcacaca

SEQ ID NO: 852689 - RNA, 19 nt, Homo sapiens
  misc_RNA (1)...(19): siRNA sense strand
cagaugaaacuccuuuguu

SEQ ID NO: 852690 - RNA, 19 nt, Homo sapiens
  misc_RNA (1)...(19): siRNA sense strand
gcagaugaaacuccuuugu

SEQ ID NO: 852691 - RNA, 19 nt, Homo sapiens
  misc_RNA (1)...(19): siRNA sense strand
ggagacagugaugaagaua

SEQ ID NO: 852692 - RNA, 19 nt, Homo sapiens
  misc_RNA (1)...(19): siRNA sense strand
gaagacugugucauaguug

SEQ ID NO: 852693 - RNA, 19 nt, Homo sapiens
  misc_RNA (1)...(19): siRNA sense strand
gauagacggacaccuggaa

SEQ ID NO: 852694 - RNA, 19 nt, Homo sapiens
  misc_RNA (1)...(19): siRNA sense strand
gaaaugaaagaaguagcuu

SEQ ID NO: 852695 - RNA, 19 nt, Homo sapiens
  misc_RNA (1)...(19): siRNA sense strand
ggcccaauauucucuaugg

SEQ ID NO: 852696 - RNA, 19 nt, Homo sapiens
  misc_RNA (1)...(19): siRNA sense strand
gaaggucaaugcgauuacu

SEQ ID NO: 852697 - RNA, 19 nt, Homo sapiens
  misc_RNA (1)...(19): siRNA sense strand
gaaaaugggauuggaugua

SEQ ID NO: 852698 - RNA, 19 nt, Homo sapiens
  misc_RNA (1)...(19): siRNA sense strand
gagacagccuccuaaaucc

SEQ ID NO: 852699 - RNA, 19 nt, Homo sapiens
  misc_RNA (1)...(19): siRNA sense strand
gcugcaagacuccgugaaa

SEQ ID NO: 852700 - RNA, 19 nt, Homo sapiens
  misc_RNA (1)...(19): siRNA sense strand
cacaugugcugauuguaau

SEQ ID NO: 852701 - RNA, 19 nt, Homo sapiens
  misc_RNA (1)...(19): siRNA sense strand
gagaagucagccuuugauu

SEQ ID NO: 852702 - RNA, 19 nt, Homo sapiens
  misc_RNA (1)...(19): siRNA sense strand
caggagaagucagccuuug

SEQ ID NO: 852703 - RNA, 19 nt, Homo sapiens
  misc_RNA (1)...(19): siRNA sense strand
gauuugacccagcaaccua

SEQ ID NO: 852704 - RNA, 19 nt, Homo sapiens
  misc_RNA (1)...(19): siRNA sense strand
gacauuaguagcagaugaa

SEQ ID NO: 852705 - RNA, 19 nt, Homo sapiens
  misc_RNA (1)...(19): siRNA sense strand
ggacacugggauggaaaua

SEQ ID NO: 852706 - RNA, 19 nt, Homo sapiens
  misc_RNA (1)...(19): siRNA sense strand
ugacugaacauacaaagag

SEQ ID NO: 852707 - RNA, 19 nt, Homo sapiens
  misc_RNA (1)...(19): siRNA sense strand
cgagaacucuuccaguaua

SEQ ID NO: 852708 - RNA, 19 nt, Homo sapiens
  misc_RNA (1)...(19): siRNA sense strand
ggcgagaacucuuccagua

SEQ ID NO: 852709 - RNA, 19 nt, Homo sapiens
  misc_RNA (1)...(19): siRNA sense strand
gaucuacagcagcaaauua

SEQ ID NO: 852710 - RNA, 19 nt, Homo sapiens
  misc_RNA (1)...(19): siRNA sense strand
cagcaaauuaugaccauua

SEQ ID NO: 852711 - RNA, 19 nt, Homo sapiens
  misc_RNA (1)...(19): siRNA sense strand
caucaaaguuggauacaag

SEQ ID NO: 852712 - RNA, 19 nt, Homo sapiens
  misc_RNA (1)...(19): siRNA sense strand
uaaccgccauguuguuuau

SEQ ID NO: 852713 - RNA, 19 nt, Homo sapiens
  misc_RNA (1)...(19): siRNA sense strand
ugaauaagcacuacaaucu

SEQ ID NO: 852714 - RNA, 19 nt, Homo sapiens
  misc_RNA (1)...(19): siRNA sense strand
gagaacucuuccaguauau

SEQ ID NO: 852715 - RNA, 19 nt, Homo sapiens
  misc_RNA (1)...(19): siRNA sense strand
cagaguaaccgccauguug

SEQ ID NO: 852716 - RNA, 19 nt, Homo sapiens
  misc_RNA (1)...(19): siRNA sense strand
gaacucuuccaguauaugu

SEQ ID NO: 852717 - RNA, 19 nt, Homo sapiens
  misc_RNA (1)...(19): siRNA sense strand
gcagaaggagcgaguggaa

SEQ ID NO: 852718 - RNA, 19 nt, Homo sapiens
  misc_RNA (1)...(19): siRNA sense strand
ggaaaaggagccauuauug

SEQ ID NO: 852719 - RNA, 19 nt, Homo sapiens
  misc_RNA (1)...(19): siRNA sense strand
aaggagccauuauugguuu

SEQ ID NO: 852720 - RNA, 19 nt, Homo sapiens
  misc_RNA (1)...(19): siRNA sense strand
agggagacaucaagccaua

SEQ ID NO: 852721 - RNA, 19 nt, Homo sapiens
  misc_RNA (1)...(19): siRNA sense strand
gagggcaacucgacacucu

SEQ ID NO: 852722 - RNA, 19 nt, Homo sapiens
  misc_RNA (1)...(19): siRNA sense strand
gaagcucuuuguacuggau

SEQ ID NO: 852723 - RNA, 19 nt, Homo sapiens
  misc_RNA (1)...(19): siRNA sense strand
cuacagcagcaaauuauga

SEQ ID NO: 852724 - RNA, 19 nt, Homo sapiens
  misc_RNA (1)...(19): siRNA sense strand
gccaaggcccagaaucuuu

SEQ ID NO: 852725 - RNA, 19 nt, Homo sapiens
  misc_RNA (1)...(19): siRNA sense strand
guaaccgccauguuguuua

SEQ ID NO: 852726 - RNA, 19 nt, Homo sapiens
  misc_RNA (1)...(19): siRNA sense strand
gaauaagcacuacaaucug

SEQ ID NO: 852727 - RNA, 19 nt, Homo sapiens
  misc_RNA (1)...(19): siRNA sense strand
gagcagagggagacaucaa

SEQ ID NO: 852728 - RNA, 19 nt, Homo sapiens
  misc_RNA (1)...(19): siRNA sense strand
gaagcugccacccaagaga

SEQ ID NO: 852729 - RNA, 19 nt, Homo sapiens
  misc_RNA (1)...(19): siRNA sense strand
gcgagaacucuuccaguau

SEQ ID NO: 852730 - RNA, 19 nt, Homo sapiens
  misc_RNA (1)...(19): siRNA sense strand
uccaguauauguugcagaa

SEQ ID NO: 852731 - RNA, 19 nt, Homo sapiens
  misc_RNA (1)...(19): siRNA sense strand
ucccacaggugaacaacuu

SEQ ID NO: 852732 - RNA, 19 nt, Homo sapiens
  misc_RNA (1)...(19): siRNA sense strand
gcagaguaaccgccauguu

SEQ ID NO: 852733 - RNA, 19 nt, Homo sapiens
  misc_RNA (1)...(19): siRNA sense strand
gcagcaaauuaugaccauu

SEQ ID NO: 852734 - RNA, 19 nt, Homo sapiens
  misc_RNA (1)...(19): siRNA sense strand
cagaaucuuuccgcuccua

SEQ ID NO: 852735 - RNA, 19 nt, Homo sapiens
  misc_RNA (1)...(19): siRNA sense strand
gggaaacucaccagaacga

SEQ ID NO: 852736 - RNA, 19 nt, Homo sapiens
  misc_RNA (1)...(19): siRNA sense strand
ggaguucccguucgaugug

SEQ ID NO: 852737 - RNA, 19 nt, Homo sapiens
  misc_RNA (1)...(19): siRNA sense strand
cgcaccaacuggcaauuga

SEQ ID NO: 852738 - RNA, 19 nt, Homo sapiens
  misc_RNA (1)...(19): siRNA sense strand
aaaggagccauuauugguu

SEQ ID NO: 852739 - RNA, 19 nt, Homo sapiens
  misc_RNA (1)...(19): siRNA sense strand
gaguaaccgccauguuguu

SEQ ID NO: 852740 - RNA, 19 nt, Homo sapiens
  misc_RNA (1)...(19): siRNA sense strand
gaaaaggagccauuauugg

SEQ ID NO: 852741 - RNA, 19 nt, Homo sapiens
  misc_RNA (1)...(19): siRNA sense strand
gagagcagagggagacauc

SEQ ID NO: 852742 - RNA, 19 nt, Homo sapiens
  misc_RNA (1)...(19): siRNA sense strand
ccaaggcccagaaucuuuc

SEQ ID NO: 852743 - RNA, 19 nt, Homo sapiens
  misc_RNA (1)...(19): siRNA sense strand
caaaguuggauacaagaag

SEQ ID NO: 852744 - RNA, 19 nt, Homo sapiens
  misc_RNA (1)...(19): siRNA sense strand
ccgccauguuguuuauauu

SEQ ID NO: 852745 - RNA, 19 nt, Homo sapiens
  misc_RNA (1)...(19): siRNA sense strand
gaacugggcaaggcuucug

SEQ ID NO: 852746 - RNA, 19 nt, Homo sapiens
  misc_RNA (1)...(19): siRNA sense strand
gccauguuguuuauauucu

SEQ ID NO: 852747 - RNA, 19 nt, Homo sapiens
  misc_RNA (1)...(19): siRNA sense strand
ucaucaaaguuggauacaa

SEQ ID NO: 852748 - RNA, 19 nt, Homo sapiens
  misc_RNA (1)...(19): siRNA sense strand
ccacaggugaacaacuuug

SEQ ID NO: 852749 - RNA, 19 nt, Homo sapiens
  misc_RNA (1)...(19): siRNA sense strand
caauugaccgacccucuca

SEQ ID NO: 852750 - RNA, 19 nt, Homo sapiens
  misc_RNA (1)...(19): siRNA sense strand
ugaccgacccucucagaag

SEQ ID NO: 852751 - RNA, 19 nt, Homo sapiens
  misc_RNA (1)...(19): siRNA sense strand
ucaaaguuggauacaagaa

SEQ ID NO: 852752 - RNA, 19 nt, Homo sapiens
  misc_RNA (1)...(19): siRNA sense strand
ggagacaucaagccauacu

SEQ ID NO: 852753 - RNA, 19 nt, Homo sapiens
  misc_RNA (1)...(19): siRNA sense strand
caacuuugugaucuuugaa

SEQ ID NO: 852754 - RNA, 19 nt, Homo sapiens
  misc_RNA (1)...(19): siRNA sense strand
gccauuauugguuucauca

SEQ ID NO: 852755 - RNA, 19 nt, Homo sapiens
  misc_RNA (1)...(19): siRNA sense strand
aagccauacuccucuagug

SEQ ID NO: 852756 - RNA, 19 nt, Homo sapiens
  misc_RNA (1)...(19): siRNA sense strand
ccacagucccacaggugaa

SEQ ID NO: 852757 - RNA, 19 nt, Homo sapiens
  misc_RNA (1)...(19): siRNA sense strand
ggaagcugccacccaagag

SEQ ID NO: 852758 - RNA, 19 nt, Homo sapiens
  misc_RNA (1)...(19): siRNA sense strand
aguauauguugcagaagga

SEQ ID NO: 852759 - RNA, 19 nt, Homo sapiens
  misc_RNA (1)...(19): siRNA sense strand
gaguggaaccgcaccaacu

SEQ ID NO: 852760 - RNA, 19 nt, Homo sapiens
  misc_RNA (1)...(19): siRNA sense strand
agaagaagcuggcugauug

SEQ ID NO: 852761 - RNA, 19 nt, Homo sapiens
  misc_RNA (1)...(19): siRNA sense strand
gaagacagccguggaguuc

SEQ ID NO: 852762 - RNA, 19 nt, Homo sapiens
  misc_RNA (1)...(19): siRNA sense strand
gagaagaagcuggcugauu

SEQ ID NO: 852763 - RNA, 19 nt, Homo sapiens
  misc_RNA (1)...(19): siRNA sense strand
ggaaggagcccugcaacug

SEQ ID NO: 852764 - RNA, 19 nt, Homo sapiens
  misc_RNA (1)...(19): siRNA sense strand
aaaccgggauggccgagaa

SEQ ID NO: 852765 - RNA, 19 nt, Homo sapiens
  misc_RNA (1)...(19): siRNA sense strand
uggagaaccugcugcacaa

SEQ ID NO: 852766 - RNA, 19 nt, Homo sapiens
  misc_RNA (1)...(19): siRNA sense strand
ccauggagaggaagauuga

SEQ ID NO: 852767 - RNA, 19 nt, Homo sapiens
  misc_RNA (1)...(19): siRNA sense strand
ucaccugcuuucccuagaa

SEQ ID NO: 852768 - RNA, 19 nt, Homo sapiens
  misc_RNA (1)...(19): siRNA sense strand
gagaaccugcugcacaaca

SEQ ID NO: 852769 - RNA, 19 nt, Homo sapiens
  misc_RNA (1)...(19): siRNA sense strand
guccagaugcagaaacuga

SEQ ID NO: 852770 - RNA, 19 nt, Homo sapiens
  misc_RNA (1)...(19): siRNA sense strand
ggccgcagcuccgauuucu

SEQ ID NO: 852771 - RNA, 19 nt, Homo sapiens
  misc_RNA (1)...(19): siRNA sense strand
gaagaagcuggcugauugc

SEQ ID NO: 852772 - RNA, 19 nt, Homo sapiens
  misc_RNA (1)...(19): siRNA sense strand
agaagacagccguggaguu

SEQ ID NO: 852773 - RNA, 19 nt, Homo sapiens
  misc_RNA (1)...(19): siRNA sense strand
ggaagaaacuguacagaaa

SEQ ID NO: 852774 - RNA, 19 nt, Homo sapiens
  misc_RNA (1)...(19): siRNA sense strand
gaagcuggaagaaacugua

SEQ ID NO: 852775 - RNA, 19 nt, Homo sapiens
  misc_RNA (1)...(19): siRNA sense strand
gaagaaacuguacagaaaa

SEQ ID NO: 852776 - RNA, 19 nt, Homo sapiens
  misc_RNA (1)...(19): siRNA sense strand
uggaagaaacuguacagaa

SEQ ID NO: 852777 - RNA, 19 nt, Homo sapiens
  misc_RNA (1)...(19): siRNA sense strand
uugcagauauggagaccaa

SEQ ID NO: 852778 - RNA, 19 nt, Homo sapiens
  misc_RNA (1)...(19): siRNA sense strand
gagaauccguaggcuugau

SEQ ID NO: 852779 - RNA, 19 nt, Homo sapiens
  misc_RNA (1)...(19): siRNA sense strand
uccguaggcuugauguuga

SEQ ID NO: 852780 - RNA, 19 nt, Homo sapiens
  misc_RNA (1)...(19): siRNA sense strand
ccagaaggccucaguaucc

SEQ ID NO: 852781 - RNA, 19 nt, Homo sapiens
  misc_RNA (1)...(19): siRNA sense strand
ucagugcggucaguaaagu

SEQ ID NO: 852782 - RNA, 19 nt, Homo sapiens
  misc_RNA (1)...(19): siRNA sense strand
ggaacuguagacuggauga

SEQ ID NO: 852783 - RNA, 19 nt, Homo sapiens
  misc_RNA (1)...(19): siRNA sense strand
guugagguccuucgguuug

SEQ ID NO: 852784 - RNA, 19 nt, Homo sapiens
  misc_RNA (1)...(19): siRNA sense strand
agucugccuuucccucuaa

SEQ ID NO: 852785 - RNA, 19 nt, Homo sapiens
  misc_RNA (1)...(19): siRNA sense strand
ggagaauccguaggcuuga

SEQ ID NO: 852786 - RNA, 19 nt, Homo sapiens
  misc_RNA (1)...(19): siRNA sense strand
gguuugucuuucugccuuu

SEQ ID NO: 852787 - RNA, 19 nt, Homo sapiens
  misc_RNA (1)...(19): siRNA sense strand
ucuccaggcuuuauuuuga

SEQ ID NO: 852788 - RNA, 19 nt, Homo sapiens
  misc_RNA (1)...(19): siRNA sense strand
ccucagugcggucaguaaa

SEQ ID NO: 852789 - RNA, 19 nt, Homo sapiens
  misc_RNA (1)...(19): siRNA sense strand
cagggaugcugggaacugu

SEQ ID NO: 852790 - RNA, 19 nt, Homo sapiens
  misc_RNA (1)...(19): siRNA sense strand
accagggccuugccuucua

SEQ ID NO: 852791 - RNA, 19 nt, Homo sapiens
  misc_RNA (1)...(19): siRNA sense strand
guuucauucuccaggcuuu

SEQ ID NO: 852792 - RNA, 19 nt, Homo sapiens
  misc_RNA (1)...(19): siRNA sense strand
gccagaaggccucaguauc

SEQ ID NO: 852793 - RNA, 19 nt, Homo sapiens
  misc_RNA (1)...(19): siRNA sense strand
guccuucgguuugucuuuc

SEQ ID NO: 852794 - RNA, 19 nt, Homo sapiens
  misc_RNA (1)...(19): siRNA sense strand
gguaaagccuuccguauuu

SEQ ID NO: 852795 - RNA, 19 nt, Homo sapiens
  misc_RNA (1)...(19): siRNA sense strand
gagaaacccuauaaaugua

SEQ ID NO: 852796 - RNA, 19 nt, Homo sapiens
  misc_RNA (1)...(19): siRNA sense strand
gaaagaaacgcuaugauug

SEQ ID NO: 852797 - RNA, 19 nt, Homo sapiens
  misc_RNA (1)...(19): siRNA sense strand
gaaagucgccagccagaua

SEQ ID NO: 852798 - RNA, 19 nt, Homo sapiens
  misc_RNA (1)...(19): siRNA sense strand
gagagaagaugcaugaaug

SEQ ID NO: 852799 - RNA, 19 nt, Homo sapiens
  misc_RNA (1)...(19): siRNA sense strand
ccuaagaugucauaucaua

SEQ ID NO: 852800 - RNA, 19 nt, Homo sapiens
  misc_RNA (1)...(19): siRNA sense strand
ggaaagaaacgcuaugauu

SEQ ID NO: 852801 - RNA, 19 nt, Homo sapiens
  misc_RNA (1)...(19): siRNA sense strand
ccaaagccuucccugauua

SEQ ID NO: 852802 - RNA, 19 nt, Homo sapiens
  misc_RNA (1)...(19): siRNA sense strand
ggacagccuucaauuauca

SEQ ID NO: 852803 - RNA, 19 nt, Homo sapiens
  misc_RNA (1)...(19): siRNA sense strand
ucacauaccuuucucaaca

SEQ ID NO: 852804 - RNA, 19 nt, Homo sapiens
  misc_RNA (1)...(19): siRNA sense strand
uguaaagccuucccuauuu

SEQ ID NO: 852805 - RNA, 19 nt, Homo sapiens
  misc_RNA (1)...(19): siRNA sense strand
ggaaagcauucaguuguuu

SEQ ID NO: 852806 - RNA, 19 nt, Homo sapiens
  misc_RNA (1)...(19): siRNA sense strand
gagagaaacccuauaaaug

SEQ ID NO: 852807 - RNA, 19 nt, Homo sapiens
  misc_RNA (1)...(19): siRNA sense strand
gagaaacccuaugaaugua

SEQ ID NO: 852808 - RNA, 19 nt, Homo sapiens
  misc_RNA (1)...(19): siRNA sense strand
gguaaagccuucacucguu

SEQ ID NO: 852809 - RNA, 19 nt, Homo sapiens
  misc_RNA (1)...(19): siRNA sense strand
ggaaagcguuaucucauca

SEQ ID NO: 852810 - RNA, 19 nt, Homo sapiens
  misc_RNA (1)...(19): siRNA sense strand
ggagagaaacccuauaaau

SEQ ID NO: 852811 - RNA, 19 nt, Homo sapiens
  misc_RNA (1)...(19): siRNA sense strand
acacaaacauugaagauca

SEQ ID NO: 852812 - RNA, 19 nt, Homo sapiens
  misc_RNA (1)...(19): siRNA sense strand
gaaacccuaugaauguaaa

SEQ ID NO: 852813 - RNA, 19 nt, Homo sapiens
  misc_RNA (1)...(19): siRNA sense strand
gaagaugcaugaauguaag

SEQ ID NO: 852814 - RNA, 19 nt, Homo sapiens
  misc_RNA (1)...(19): siRNA sense strand
gggaaagccuucauuuauc

SEQ ID NO: 852815 - RNA, 19 nt, Homo sapiens
  misc_RNA (1)...(19): siRNA sense strand
gagagaaaccguaugaaug

SEQ ID NO: 852816 - RNA, 19 nt, Homo sapiens
  misc_RNA (1)...(19): siRNA sense strand
gagagaaacccuaugaaug

SEQ ID NO: 852817 - RNA, 19 nt, Homo sapiens
  misc_RNA (1)...(19): siRNA sense strand
ggagauggaccucauaaau

SEQ ID NO: 852818 - RNA, 19 nt, Homo sapiens
  misc_RNA (1)...(19): siRNA sense strand
gagagaaacccuaugaaug

SEQ ID NO: 852819 - RNA, 19 nt, Homo sapiens
  misc_RNA (1)...(19): siRNA sense strand
gaagucauaugauaaugca

SEQ ID NO: 852820 - RNA, 19 nt, Homo sapiens
  misc_RNA (1)...(19): siRNA sense strand
gagagaagccauaugaaug

SEQ ID NO: 852821 - RNA, 19 nt, Homo sapiens
  misc_RNA (1)...(19): siRNA sense strand
aagaaagccuucagucauu

SEQ ID NO: 852822 - RNA, 19 nt, Homo sapiens
  misc_RNA (1)...(19): siRNA sense strand
gaagccacauacacauaaa

SEQ ID NO: 852823 - RNA, 19 nt, Homo sapiens
  misc_RNA (1)...(19): siRNA sense strand
gggaaagcauucaguuguu

SEQ ID NO: 852824 - RNA, 19 nt, Homo sapiens
  misc_RNA (1)...(19): siRNA sense strand
gaagacacauaauaguaca

SEQ ID NO: 852825 - RNA, 19 nt, Homo sapiens
  misc_RNA (1)...(19): siRNA sense strand
ggaaugaaaugggaagaca

SEQ ID NO: 852826 - RNA, 19 nt, Homo sapiens
  misc_RNA (1)...(19): siRNA sense strand
gagauggaccucauaaaug

SEQ ID NO: 852827 - RNA, 19 nt, Homo sapiens
  misc_RNA (1)...(19): siRNA sense strand
guucauuccuuaauugcua

SEQ ID NO: 852828 - RNA, 19 nt, Homo sapiens
  misc_RNA (1)...(19): siRNA sense strand
uaucaccacuccuuucaaa

SEQ ID NO: 852829 - RNA, 19 nt, Homo sapiens
  misc_RNA (1)...(19): siRNA sense strand
gagaagccauaugaaugua

SEQ ID NO: 852830 - RNA, 19 nt, Homo sapiens
  misc_RNA (1)...(19): siRNA sense strand
ggagagaagccauaugaau

SEQ ID NO: 852831 - RNA, 19 nt, Homo sapiens
  misc_RNA (1)...(19): siRNA sense strand
ggagagaaacccuaugaau

SEQ ID NO: 852832 - RNA, 19 nt, Homo sapiens
  misc_RNA (1)...(19): siRNA sense strand
ggagagaaacccuaugaau

SEQ ID NO: 852833 - RNA, 19 nt, Homo sapiens
  misc_RNA (1)...(19): siRNA sense strand
gagaaaccguaugaaugua

SEQ ID NO: 852834 - RNA, 19 nt, Homo sapiens
  misc_RNA (1)...(19): siRNA sense strand
ggagagaaaccguaugaau

SEQ ID NO: 852835 - RNA, 19 nt, Homo sapiens
  misc_RNA (1)...(19): siRNA sense strand
gaaccuggacuguauagga

SEQ ID NO: 852836 - RNA, 19 nt, Homo sapiens
  misc_RNA (1)...(19): siRNA sense strand
ugagaaacccuaugaaugu

SEQ ID NO: 852837 - RNA, 19 nt, Homo sapiens
  misc_RNA (1)...(19): siRNA sense strand
gagaagccacauacacaua

SEQ ID NO: 852838 - RNA, 19 nt, Homo sapiens
  misc_RNA (1)...(19): siRNA sense strand
gagauggaccucacaaaug

SEQ ID NO: 852839 - RNA, 19 nt, Homo sapiens
  misc_RNA (1)...(19): siRNA sense strand
gaaacgcuaugauuguaag

SEQ ID NO: 852840 - RNA, 19 nt, Homo sapiens
  misc_RNA (1)...(19): siRNA sense strand
gaaagaauucacacuggaa

SEQ ID NO: 852841 - RNA, 19 nt, Homo sapiens
  misc_RNA (1)...(19): siRNA sense strand
caacauagaaggacucaca

SEQ ID NO: 852842 - RNA, 19 nt, Homo sapiens
  misc_RNA (1)...(19): siRNA sense strand
gaauguaagcaguguugua

SEQ ID NO: 852843 - RNA, 19 nt, Homo sapiens
  misc_RNA (1)...(19): siRNA sense strand
uuaggaaccuggacuguau

SEQ ID NO: 852844 - RNA, 19 nt, Homo sapiens
  misc_RNA (1)...(19): siRNA sense strand
agagaaacccuauaaaugu

SEQ ID NO: 852845 - RNA, 19 nt, Homo sapiens
  misc_RNA (1)...(19): siRNA sense strand
ggagauggaccucacaaau

SEQ ID NO: 852846 - RNA, 19 nt, Homo sapiens
  misc_RNA (1)...(19): siRNA sense strand
ggagaaaccauaugaaugc

SEQ ID NO: 852847 - RNA, 19 nt, Homo sapiens
  misc_RNA (1)...(19): siRNA sense strand
aaucauggguuguucauuc

SEQ ID NO: 852848 - RNA, 19 nt, Homo sapiens
  misc_RNA (1)...(19): siRNA sense strand
aagaaacgcuaugauugua

SEQ ID NO: 852849 - RNA, 19 nt, Homo sapiens
  misc_RNA (1)...(19): siRNA sense strand
agauggaccucauaaaugu

SEQ ID NO: 852850 - RNA, 19 nt, Homo sapiens
  misc_RNA (1)...(19): siRNA sense strand
gagagaagccacauacaca

SEQ ID NO: 852851 - RNA, 19 nt, Homo sapiens
  misc_RNA (1)...(19): siRNA sense strand
gaauguaaagaauguggua

SEQ ID NO: 852852 - RNA, 19 nt, Homo sapiens
  misc_RNA (1)...(19): siRNA sense strand
ggaaagccuucauuuaucc

SEQ ID NO: 852853 - RNA, 19 nt, Homo sapiens
  misc_RNA (1)...(19): siRNA sense strand
gggaaagcguuaucucauc

SEQ ID NO: 852854 - RNA, 19 nt, Homo sapiens
  misc_RNA (1)...(19): siRNA sense strand
gcaaagucaugaaagaacu

SEQ ID NO: 852855 - RNA, 19 nt, Homo sapiens
  misc_RNA (1)...(19): siRNA sense strand
guaagaaagccuucaguca

SEQ ID NO: 852856 - RNA, 19 nt, Homo sapiens
  misc_RNA (1)...(19): siRNA sense strand
ggaaggcacugaguucucu

SEQ ID NO: 852857 - RNA, 19 nt, Homo sapiens
  misc_RNA (1)...(19): siRNA sense strand
gggaagacacaaacauuga

SEQ ID NO: 852858 - RNA, 19 nt, Homo sapiens
  misc_RNA (1)...(19): siRNA sense strand
gagaagaugcaugaaugua

SEQ ID NO: 852859 - RNA, 19 nt, Homo sapiens
  misc_RNA (1)...(19): siRNA sense strand
ggagagaagaugcaugaau

SEQ ID NO: 852860 - RNA, 19 nt, Homo sapiens
  misc_RNA (1)...(19): siRNA sense strand
gagaagccauaugagugua

SEQ ID NO: 852861 - RNA, 19 nt, Homo sapiens
  misc_RNA (1)...(19): siRNA sense strand
ggagagaagccauaugagu

SEQ ID NO: 852862 - RNA, 19 nt, Homo sapiens
  misc_RNA (1)...(19): siRNA sense strand
ggagaaaucauggguuguu

SEQ ID NO: 852863 - RNA, 19 nt, Homo sapiens
  misc_RNA (1)...(19): siRNA sense strand
gaagaucagcacagaaauc

SEQ ID NO: 852864 - RNA, 19 nt, Homo sapiens
  misc_RNA (1)...(19): siRNA sense strand
gauaguacugugaaugaaa

SEQ ID NO: 852865 - RNA, 19 nt, Homo sapiens
  misc_RNA (1)...(19): siRNA sense strand
gcaggaaagcauucucuug

SEQ ID NO: 852866 - RNA, 19 nt, Homo sapiens
  misc_RNA (1)...(19): siRNA sense strand
gugggaaagccuucauuua

SEQ ID NO: 852867 - RNA, 19 nt, Homo sapiens
  misc_RNA (1)...(19): siRNA sense strand
ggaagacacaaacauugaa

SEQ ID NO: 852868 - RNA, 19 nt, Homo sapiens
  misc_RNA (1)...(19): siRNA sense strand
gaagccauaugaauguaag

SEQ ID NO: 852869 - RNA, 19 nt, Homo sapiens
  misc_RNA (1)...(19): siRNA sense strand
uaagaaagccuucagucau

SEQ ID NO: 852870 - RNA, 19 nt, Homo sapiens
  misc_RNA (1)...(19): siRNA sense strand
ugggaaagccuucauuuau

SEQ ID NO: 852871 - RNA, 19 nt, Homo sapiens
  misc_RNA (1)...(19): siRNA sense strand
cuaguucacugcaaaguca

SEQ ID NO: 852872 - RNA, 19 nt, Homo sapiens
  misc_RNA (1)...(19): siRNA sense strand
ucuaagacaugaaagaaca

SEQ ID NO: 852873 - RNA, 19 nt, Homo sapiens
  misc_RNA (1)...(19): siRNA sense strand
ccacauacacauaaacaau

SEQ ID NO: 852874 - RNA, 19 nt, Homo sapiens
  misc_RNA (1)...(19): siRNA sense strand
cagaugagugucaggaaua

SEQ ID NO: 852875 - RNA, 19 nt, Homo sapiens
  misc_RNA (1)...(19): siRNA sense strand
gaaugucaacaauguggua

SEQ ID NO: 852876 - RNA, 19 nt, Homo sapiens
  misc_RNA (1)...(19): siRNA sense strand
uggccuaguuuauuucgua

SEQ ID NO: 852877 - RNA, 19 nt, Homo sapiens
  misc_RNA (1)...(19): siRNA sense strand
gcaugaauguaaggaaugu

SEQ ID NO: 852878 - RNA, 19 nt, Homo sapiens
  misc_RNA (1)...(19): siRNA sense strand
ggacucacauggcugaaaa

SEQ ID NO: 852879 - RNA, 19 nt, Homo sapiens
  misc_RNA (1)...(19): siRNA sense strand
gggagaaaccauaugaaug

SEQ ID NO: 852880 - RNA, 19 nt, Homo sapiens
  misc_RNA (1)...(19): siRNA sense strand
gaaaccguaugaauguaag

SEQ ID NO: 852881 - RNA, 19 nt, Homo sapiens
  misc_RNA (1)...(19): siRNA sense strand
cagauaguacugugaauga

SEQ ID NO: 852882 - RNA, 19 nt, Homo sapiens
  misc_RNA (1)...(19): siRNA sense strand
agaaagccuucagucauuu

SEQ ID NO: 852883 - RNA, 19 nt, Homo sapiens
  misc_RNA (1)...(19): siRNA sense strand
guaaagccuuccguauuuc

SEQ ID NO: 852884 - RNA, 19 nt, Homo sapiens
  misc_RNA (1)...(19): siRNA sense strand
gugagaaacccuaugaaug

SEQ ID NO: 852885 - RNA, 19 nt, Homo sapiens
  misc_RNA (1)...(19): siRNA sense strand
gaacucacacuggagagaa

SEQ ID NO: 852886 - RNA, 19 nt, Homo sapiens
  misc_RNA (1)...(19): siRNA sense strand
gaacucacacuggagagaa

SEQ ID NO: 852887 - RNA, 19 nt, Homo sapiens
  misc_RNA (1)...(19): siRNA sense strand
gaacucacacuggagagaa

SEQ ID NO: 852888 - RNA, 19 nt, Homo sapiens
  misc_RNA (1)...(19): siRNA sense strand
gggaaaaccuucaguucuu

SEQ ID NO: 852889 - RNA, 19 nt, Homo sapiens
  misc_RNA (1)...(19): siRNA sense strand
aaagaaacgcuaugauugu

SEQ ID NO: 852890 - RNA, 19 nt, Homo sapiens
  misc_RNA (1)...(19): siRNA sense strand
ggagaagacagaagugauc

SEQ ID NO: 852891 - RNA, 19 nt, Homo sapiens
  misc_RNA (1)...(19): siRNA sense strand
guuguucauuccuuaauug

SEQ ID NO: 852892 - RNA, 19 nt, Homo sapiens
  misc_RNA (1)...(19): siRNA sense strand
agaagaugcaugaauguaa

SEQ ID NO: 852893 - RNA, 19 nt, Homo sapiens
  misc_RNA (1)...(19): siRNA sense strand
gaaaugggaagacacaaac

SEQ ID NO: 852894 - RNA, 19 nt, Homo sapiens
  misc_RNA (1)...(19): siRNA sense strand
gcagaagacccaacaaaga

SEQ ID NO: 852895 - RNA, 19 nt, Homo sapiens
  misc_RNA (1)...(19): siRNA sense strand
guucgggucuguuucguuu

SEQ ID NO: 852896 - RNA, 19 nt, Homo sapiens
  misc_RNA (1)...(19): siRNA sense strand
cagcagaagacccaacaaa

SEQ ID NO: 852897 - RNA, 19 nt, Homo sapiens
  misc_RNA (1)...(19): siRNA sense strand
cagaagacccaacaaagac

SEQ ID NO: 852898 - RNA, 19 nt, Homo sapiens
  misc_RNA (1)...(19): siRNA sense strand
gacgcggcaugaagggaaa

SEQ ID NO: 852899 - RNA, 19 nt, Homo sapiens
  misc_RNA (1)...(19): siRNA sense strand
gcgagaagacgugguagca

SEQ ID NO: 852900 - RNA, 19 nt, Homo sapiens
  misc_RNA (1)...(19): siRNA sense strand
gaagacgugguagcagguu

SEQ ID NO: 852901 - RNA, 19 nt, Homo sapiens
  misc_RNA (1)...(19): siRNA sense strand
guucgguucgggucuguuu

SEQ ID NO: 852902 - RNA, 19 nt, Homo sapiens
  misc_RNA (1)...(19): siRNA sense strand
uagcaaagcuuuacaagaa

SEQ ID NO: 852903 - RNA, 19 nt, Homo sapiens
  misc_RNA (1)...(19): siRNA sense strand
gagaugaacagcucaaaua

SEQ ID NO: 852904 - RNA, 19 nt, Homo sapiens
  misc_RNA (1)...(19): siRNA sense strand
caaagcagaugaaagaaga

SEQ ID NO: 852905 - RNA, 19 nt, Homo sapiens
  misc_RNA (1)...(19): siRNA sense strand
gcaauaaacccauucauag

SEQ ID NO: 852906 - RNA, 19 nt, Homo sapiens
  misc_RNA (1)...(19): siRNA sense strand
gaaggagacugacgaugug

SEQ ID NO: 852907 - RNA, 19 nt, Homo sapiens
  misc_RNA (1)...(19): siRNA sense strand
ggaccggacagguguauua

SEQ ID NO: 852908 - RNA, 19 nt, Homo sapiens
  misc_RNA (1)...(19): siRNA sense strand
gaagauuucacaccaguuu

SEQ ID NO: 852909 - RNA, 19 nt, Homo sapiens
  misc_RNA (1)...(19): siRNA sense strand
ccacagcgccuaucucaaa

SEQ ID NO: 852910 - RNA, 19 nt, Homo sapiens
  misc_RNA (1)...(19): siRNA sense strand
gaagagauugcauauaaug

SEQ ID NO: 852911 - RNA, 19 nt, Homo sapiens
  misc_RNA (1)...(19): siRNA sense strand
gacaucaaguggcacauuu

SEQ ID NO: 852912 - RNA, 19 nt, Homo sapiens
  misc_RNA (1)...(19): siRNA sense strand
guacauguaugaucagaca

SEQ ID NO: 852913 - RNA, 19 nt, Homo sapiens
  misc_RNA (1)...(19): siRNA sense strand
ugauucagauugacacaua

SEQ ID NO: 852914 - RNA, 19 nt, Homo sapiens
  misc_RNA (1)...(19): siRNA sense strand
ggacuuccuuugaugauuc

SEQ ID NO: 852915 - RNA, 19 nt, Homo sapiens
  misc_RNA (1)...(19): siRNA sense strand
gagaagauagcaaagcuuu

SEQ ID NO: 852916 - RNA, 19 nt, Homo sapiens
  misc_RNA (1)...(19): siRNA sense strand
ggaaggagacugacgaugu

SEQ ID NO: 852917 - RNA, 19 nt, Homo sapiens
  misc_RNA (1)...(19): siRNA sense strand
caacacggaugaugaacga

SEQ ID NO: 852918 - RNA, 19 nt, Homo sapiens
  misc_RNA (1)...(19): siRNA sense strand
gaagagcaacgagugguua

SEQ ID NO: 852919 - RNA, 19 nt, Homo sapiens
  misc_RNA (1)...(19): siRNA sense strand
caaagcgagugcucuugua

SEQ ID NO: 852920 - RNA, 19 nt, Homo sapiens
  misc_RNA (1)...(19): siRNA sense strand
ggacgcagccacagagaaa

SEQ ID NO: 852921 - RNA, 19 nt, Homo sapiens
  misc_RNA (1)...(19): siRNA sense strand
aaggagagcuuuaauacga

SEQ ID NO: 852922 - RNA, 19 nt, Homo sapiens
  misc_RNA (1)...(19): siRNA sense strand
ucacaagagucggacaaua

SEQ ID NO: 852923 - RNA, 19 nt, Homo sapiens
  misc_RNA (1)...(19): siRNA sense strand
ccaaaucucuccgucagaa

SEQ ID NO: 852924 - RNA, 19 nt, Homo sapiens
  misc_RNA (1)...(19): siRNA sense strand
ugacaucaccuacuucaaa

SEQ ID NO: 852925 - RNA, 19 nt, Homo sapiens
  misc_RNA (1)...(19): siRNA sense strand
gcaacgagugguuaucuuu

SEQ ID NO: 852926 - RNA, 19 nt, Homo sapiens
  misc_RNA (1)...(19): siRNA sense strand
gaagcgauaucugagaaau

SEQ ID NO: 852927 - RNA, 19 nt, Homo sapiens
  misc_RNA (1)...(19): siRNA sense strand
ccagugaaccuuucccuaa

SEQ ID NO: 852928 - RNA, 19 nt, Homo sapiens
  misc_RNA (1)...(19): siRNA sense strand
cacaagagucggacaauaa

SEQ ID NO: 852929 - RNA, 19 nt, Homo sapiens
  misc_RNA (1)...(19): siRNA sense strand
ugacaaaggagcagaaaga

SEQ ID NO: 852930 - RNA, 19 nt, Homo sapiens
  misc_RNA (1)...(19): siRNA sense strand
ggagagcuuuaauacgauu

SEQ ID NO: 852931 - RNA, 19 nt, Homo sapiens
  misc_RNA (1)...(19): siRNA sense strand
caacaaaggacaguucuau

SEQ ID NO: 852932 - RNA, 19 nt, Homo sapiens
  misc_RNA (1)...(19): siRNA sense strand
acaagaggcugcugucugu

SEQ ID NO: 852933 - RNA, 19 nt, Homo sapiens
  misc_RNA (1)...(19): siRNA sense strand
gcagaggguccuugacauu

SEQ ID NO: 852934 - RNA, 19 nt, Homo sapiens
  misc_RNA (1)...(19): siRNA sense strand
ggacaaagcgagugcucuu

SEQ ID NO: 852935 - RNA, 19 nt, Homo sapiens
  misc_RNA (1)...(19): siRNA sense strand
caauaaacccauucauaga

SEQ ID NO: 852936 - RNA, 19 nt, Homo sapiens
  misc_RNA (1)...(19): siRNA sense strand
cgagagcucugccaucauc

SEQ ID NO: 852937 - RNA, 19 nt, Homo sapiens
  misc_RNA (1)...(19): siRNA sense strand
ggucuucugugacaaagga

SEQ ID NO: 852938 - RNA, 19 nt, Homo sapiens
  misc_RNA (1)...(19): siRNA sense strand
aagaucaccuggagaauuc

SEQ ID NO: 852939 - RNA, 19 nt, Homo sapiens
  misc_RNA (1)...(19): siRNA sense strand
cagugaaccuuucccuaaa

SEQ ID NO: 852940 - RNA, 19 nt, Homo sapiens
  misc_RNA (1)...(19): siRNA sense strand
gaagauagcaaagcuuuac

SEQ ID NO: 852941 - RNA, 19 nt, Homo sapiens
  misc_RNA (1)...(19): siRNA sense strand
gcacauacagcgagagcuu

SEQ ID NO: 852942 - RNA, 19 nt, Homo sapiens
  misc_RNA (1)...(19): siRNA sense strand
caagaucaccuggagaauu

SEQ ID NO: 852943 - RNA, 19 nt, Homo sapiens
  misc_RNA (1)...(19): siRNA sense strand
gaacaggaagaacgggaaa

SEQ ID NO: 852944 - RNA, 19 nt, Homo sapiens
  misc_RNA (1)...(19): siRNA sense strand
gggcugaggaguacaugua

SEQ ID NO: 852945 - RNA, 19 nt, Homo sapiens
  misc_RNA (1)...(19): siRNA sense strand
ccagugaagcccagaguaa

SEQ ID NO: 852946 - RNA, 19 nt, Homo sapiens
  misc_RNA (1)...(19): siRNA sense strand
ugaccuaccucaacaaagg

SEQ ID NO: 852947 - RNA, 19 nt, Homo sapiens
  misc_RNA (1)...(19): siRNA sense strand
ccaagaagaccaggagaaa

SEQ ID NO: 852948 - RNA, 19 nt, Homo sapiens
  misc_RNA (1)...(19): siRNA sense strand
gaacgaggacaccuucauc

SEQ ID NO: 852949 - RNA, 19 nt, Homo sapiens
  misc_RNA (1)...(19): siRNA sense strand
gaaagaagaagggacaaag

SEQ ID NO: 852950 - RNA, 19 nt, Homo sapiens
  misc_RNA (1)...(19): siRNA sense strand
caaaggagcagaaagaaaa

SEQ ID NO: 852951 - RNA, 19 nt, Homo sapiens
  misc_RNA (1)...(19): siRNA sense strand
gaaccuuucccuaaaucaa

SEQ ID NO: 852952 - RNA, 19 nt, Homo sapiens
  misc_RNA (1)...(19): siRNA sense strand
gaaugaagaggcgaagauu

SEQ ID NO: 852953 - RNA, 19 nt, Homo sapiens
  misc_RNA (1)...(19): siRNA sense strand
gugguuaucuuugaacaga

SEQ ID NO: 852954 - RNA, 19 nt, Homo sapiens
  misc_RNA (1)...(19): siRNA sense strand
gaagagccuacaccaguga

SEQ ID NO: 852955 - RNA, 19 nt, Homo sapiens
  misc_RNA (1)...(19): siRNA sense strand
uaauuugaguggaggagaa

SEQ ID NO: 852956 - RNA, 19 nt, Homo sapiens
  misc_RNA (1)...(19): siRNA sense strand
gcaaagcuuuacaagaaaa

SEQ ID NO: 852957 - RNA, 19 nt, Homo sapiens
  misc_RNA (1)...(19): siRNA sense strand
ugcaacagcuccucugaug

SEQ ID NO: 852958 - RNA, 19 nt, Homo sapiens
  misc_RNA (1)...(19): siRNA sense strand
acagauuucuccucccaaa

SEQ ID NO: 852959 - RNA, 19 nt, Homo sapiens
  misc_RNA (1)...(19): siRNA sense strand
ggaugaagccuggaaguca

SEQ ID NO: 852960 - RNA, 19 nt, Homo sapiens
  misc_RNA (1)...(19): siRNA sense strand
uggaaacauugaagagauu

SEQ ID NO: 852961 - RNA, 19 nt, Homo sapiens
  misc_RNA (1)...(19): siRNA sense strand
acagccaguucucuucaua

SEQ ID NO: 852962 - RNA, 19 nt, Homo sapiens
  misc_RNA (1)...(19): siRNA sense strand
agaucaaggucuucuguga

SEQ ID NO: 852963 - RNA, 19 nt, Homo sapiens
  misc_RNA (1)...(19): siRNA sense strand
caagagucggacaauaaua

SEQ ID NO: 852964 - RNA, 19 nt, Homo sapiens
  misc_RNA (1)...(19): siRNA sense strand
ugccauaccuuuacagaag

SEQ ID NO: 852965 - RNA, 19 nt, Homo sapiens
  misc_RNA (1)...(19): siRNA sense strand
gcaguguccuuguuaaacg

SEQ ID NO: 852966 - RNA, 19 nt, Homo sapiens
  misc_RNA (1)...(19): siRNA sense strand
aagagucggacaauaauaa

SEQ ID NO: 852967 - RNA, 19 nt, Homo sapiens
  misc_RNA (1)...(19): siRNA sense strand
caagguuccucgagacaag

SEQ ID NO: 852968 - RNA, 19 nt, Homo sapiens
  misc_RNA (1)...(19): siRNA sense strand
uggaagcgauaucugagaa

SEQ ID NO: 852969 - RNA, 19 nt, Homo sapiens
  misc_RNA (1)...(19): siRNA sense strand
cauaccugauguucacuuu

SEQ ID NO: 852970 - RNA, 19 nt, Homo sapiens
  misc_RNA (1)...(19): siRNA sense strand
gcaagugacagccaagaag

SEQ ID NO: 852971 - RNA, 19 nt, Homo sapiens
  misc_RNA (1)...(19): siRNA sense strand
uacaaggagagcuuuaaua

SEQ ID NO: 852972 - RNA, 19 nt, Homo sapiens
  misc_RNA (1)...(19): siRNA sense strand
augaacagcucaaauacug

SEQ ID NO: 852973 - RNA, 19 nt, Homo sapiens
  misc_RNA (1)...(19): siRNA sense strand
caaguggcacauuucagua

SEQ ID NO: 852974 - RNA, 19 nt, Homo sapiens
  misc_RNA (1)...(19): siRNA sense strand
gugaagcccagaguaauuu

SEQ ID NO: 852975 - RNA, 19 nt, Homo sapiens
  misc_RNA (1)...(19): siRNA sense strand
caagugacagccaagaaga

SEQ ID NO: 852976 - RNA, 19 nt, Homo sapiens
  misc_RNA (1)...(19): siRNA sense strand
agcaauaaacccauucaua

SEQ ID NO: 852977 - RNA, 19 nt, Homo sapiens
  misc_RNA (1)...(19): siRNA sense strand
uccuugacauugccgauua

SEQ ID NO: 852978 - RNA, 19 nt, Homo sapiens
  misc_RNA (1)...(19): siRNA sense strand
gcucaaauacuggaaauac

SEQ ID NO: 852979 - RNA, 19 nt, Homo sapiens
  misc_RNA (1)...(19): siRNA sense strand
ccagugacccuccauucaa

SEQ ID NO: 852980 - RNA, 19 nt, Homo sapiens
  misc_RNA (1)...(19): siRNA sense strand
aggaguacauguaugauca

SEQ ID NO: 852981 - RNA, 19 nt, Homo sapiens
  misc_RNA (1)...(19): siRNA sense strand
caacgagugguuaucuuug

SEQ ID NO: 852982 - RNA, 19 nt, Homo sapiens
  misc_RNA (1)...(19): siRNA sense strand
ggaagagcaacgagugguu

SEQ ID NO: 852983 - RNA, 19 nt, Homo sapiens
  misc_RNA (1)...(19): siRNA sense strand
gcacuccggacagcacaua

SEQ ID NO: 852984 - RNA, 19 nt, Homo sapiens
  misc_RNA (1)...(19): siRNA sense strand
gguggcaguguccuuguua

SEQ ID NO: 852985 - RNA, 19 nt, Homo sapiens
  misc_RNA (1)...(19): siRNA sense strand
agauugacacauacaguua

SEQ ID NO: 852986 - RNA, 19 nt, Homo sapiens
  misc_RNA (1)...(19): siRNA sense strand
cauauaaugcuguuuccuu

SEQ ID NO: 852987 - RNA, 19 nt, Homo sapiens
  misc_RNA (1)...(19): siRNA sense strand
ugacauugccgauuacaag

SEQ ID NO: 852988 - RNA, 19 nt, Homo sapiens
  misc_RNA (1)...(19): siRNA sense strand
uugaacagacucaguauga

SEQ ID NO: 852989 - RNA, 19 nt, Homo sapiens
  misc_RNA (1)...(19): siRNA sense strand
caaggucacgcucauggaa

SEQ ID NO: 852990 - RNA, 19 nt, Homo sapiens
  misc_RNA (1)...(19): siRNA sense strand
gccauaccuuuacagaaga

SEQ ID NO: 852991 - RNA, 19 nt, Homo sapiens
  misc_RNA (1)...(19): siRNA sense strand
caaggucuucugugacaaa

SEQ ID NO: 852992 - RNA, 19 nt, Homo sapiens
  misc_RNA (1)...(19): siRNA sense strand
ccugggacgugaaugaaga

SEQ ID NO: 852993 - RNA, 19 nt, Homo sapiens
  misc_RNA (1)...(19): siRNA sense strand
cagcucaaauacuggaaau

SEQ ID NO: 852994 - RNA, 19 nt, Homo sapiens
  misc_RNA (1)...(19): siRNA sense strand
gauuacaaggagagcuuua

SEQ ID NO: 852995 - RNA, 19 nt, Homo sapiens
  misc_RNA (1)...(19): siRNA sense strand
gacaaaggagcagaaagaa

SEQ ID NO: 852996 - RNA, 19 nt, Homo sapiens
  misc_RNA (1)...(19): siRNA sense strand
acaaggagagcuuuaauac

SEQ ID NO: 852997 - RNA, 19 nt, Homo sapiens
  misc_RNA (1)...(19): siRNA sense strand
gcugaggaguacauguaug

SEQ ID NO: 852998 - RNA, 19 nt, Homo sapiens
  misc_RNA (1)...(19): siRNA sense strand
ggagacugacgauguguuc

SEQ ID NO: 852999 - RNA, 19 nt, Homo sapiens
  misc_RNA (1)...(19): siRNA sense strand
uuacaacacggaugaugaa

SEQ ID NO: 853000 - RNA, 19 nt, Homo sapiens
  misc_RNA (1)...(19): siRNA sense strand
gcuuuaauacgauuggaaa

SEQ ID NO: 853001 - RNA, 19 nt, Homo sapiens
  misc_RNA (1)...(19): siRNA sense strand
ugaugguggucuucaguga

SEQ ID NO: 853002 - RNA, 19 nt, Homo sapiens
  misc_RNA (1)...(19): siRNA sense strand
gagccucugugcauaauaa

SEQ ID NO: 853003 - RNA, 19 nt, Homo sapiens
  misc_RNA (1)...(19): siRNA sense strand
cugcaacccugcuaaguuu

SEQ ID NO: 853004 - RNA, 19 nt, Homo sapiens
  misc_RNA (1)...(19): siRNA sense strand
gcauucaacaagcaaguua

SEQ ID NO: 853005 - RNA, 19 nt, Homo sapiens
  misc_RNA (1)...(19): siRNA sense strand
ggaacggagucuaguccuu

SEQ ID NO: 853006 - RNA, 19 nt, Homo sapiens
  misc_RNA (1)...(19): siRNA sense strand
gaggaggucuggacagcau

SEQ ID NO: 853007 - RNA, 19 nt, Homo sapiens
  misc_RNA (1)...(19): siRNA sense strand
gagaguaggguagguuauu

SEQ ID NO: 853008 - RNA, 19 nt, Homo sapiens
  misc_RNA (1)...(19): siRNA sense strand
uaauaacugcugucccuaa

SEQ ID NO: 853009 - RNA, 19 nt, Homo sapiens
  misc_RNA (1)...(19): siRNA sense strand
agaguaggguagguuauug

SEQ ID NO: 853010 - RNA, 19 nt, Homo sapiens
  misc_RNA (1)...(19): siRNA sense strand
uuacggaacagcaguuaug

SEQ ID NO: 853011 - RNA, 19 nt, Homo sapiens
  misc_RNA (1)...(19): siRNA sense strand
uuaaggggauuucaaagaa

SEQ ID NO: 853012 - RNA, 19 nt, Homo sapiens
  misc_RNA (1)...(19): siRNA sense strand
uaacugcugucccuaaccu

SEQ ID NO: 853013 - RNA, 19 nt, Homo sapiens
  misc_RNA (1)...(19): siRNA sense strand
gggaagacacgcggaaaca

SEQ ID NO: 853014 - RNA, 19 nt, Homo sapiens
  misc_RNA (1)...(19): siRNA sense strand
ucaacaagcaaguuauuac

SEQ ID NO: 853015 - RNA, 19 nt, Homo sapiens
  misc_RNA (1)...(19): siRNA sense strand
gcugagucuucugagagua

SEQ ID NO: 853016 - RNA, 19 nt, Homo sapiens
  misc_RNA (1)...(19): siRNA sense strand
caacaagcaaguuauuacg

SEQ ID NO: 853017 - RNA, 19 nt, Homo sapiens
  misc_RNA (1)...(19): siRNA sense strand
gagggaagacacgcggaaa

SEQ ID NO: 853018 - RNA, 19 nt, Homo sapiens
  misc_RNA (1)...(19): siRNA sense strand
ccugagccucugugcauaa

SEQ ID NO: 853019 - RNA, 19 nt, Homo sapiens
  misc_RNA (1)...(19): siRNA sense strand
ucugcaacccugcuaaguu

SEQ ID NO: 853020 - RNA, 19 nt, Homo sapiens
  misc_RNA (1)...(19): siRNA sense strand
gcgcccaucucccacucau

SEQ ID NO: 853021 - RNA, 19 nt, Homo sapiens
  misc_RNA (1)...(19): siRNA sense strand
guccugagccucugugcau

SEQ ID NO: 853022 - RNA, 19 nt, Homo sapiens
  misc_RNA (1)...(19): siRNA sense strand
gcagggaacggagucuagu

SEQ ID NO: 853023 - RNA, 19 nt, Homo sapiens
  misc_RNA (1)...(19): siRNA sense strand
agagaaaccuuacaaaugu

SEQ ID NO: 853024 - RNA, 19 nt, Homo sapiens
  misc_RNA (1)...(19): siRNA sense strand
gagagaaaccuuacaaaug

SEQ ID NO: 853025 - RNA, 19 nt, Homo sapiens
  misc_RNA (1)...(19): siRNA sense strand
ugaagaaugugacaaaguu

SEQ ID NO: 853026 - RNA, 19 nt, Homo sapiens
  misc_RNA (1)...(19): siRNA sense strand
ugagaaaccuuacaagugu

SEQ ID NO: 853027 - RNA, 19 nt, Homo sapiens
  misc_RNA (1)...(19): siRNA sense strand
ggcaaggucuuuaaucaga

SEQ ID NO: 853028 - RNA, 19 nt, Homo sapiens
  misc_RNA (1)...(19): siRNA sense strand
agagaaaccucacaagugu

SEQ ID NO: 853029 - RNA, 19 nt, Homo sapiens
  misc_RNA (1)...(19): siRNA sense strand
ggagagaaaccuuacaaau

SEQ ID NO: 853030 - RNA, 19 nt, Homo sapiens
  misc_RNA (1)...(19): siRNA sense strand
ggcaagaccuucaguuaca

SEQ ID NO: 853031 - RNA, 19 nt, Homo sapiens
  misc_RNA (1)...(19): siRNA sense strand
gagagaaaccucacaagug

SEQ ID NO: 853032 - RNA, 19 nt, Homo sapiens
  misc_RNA (1)...(19): siRNA sense strand
aauuguagcucacuguuaa

SEQ ID NO: 853033 - RNA, 19 nt, Homo sapiens
  misc_RNA (1)...(19): siRNA sense strand
ucacaaguguaaugaaugu

SEQ ID NO: 853034 - RNA, 19 nt, Homo sapiens
  misc_RNA (1)...(19): siRNA sense strand
gcaaggucuuuaaucagaa

SEQ ID NO: 853035 - RNA, 19 nt, Homo sapiens
  misc_RNA (1)...(19): siRNA sense strand
uaaugaauguggcaagguu

SEQ ID NO: 853036 - RNA, 19 nt, Homo sapiens
  misc_RNA (1)...(19): siRNA sense strand
gaccuucaguuacaaguca

SEQ ID NO: 853037 - RNA, 19 nt, Homo sapiens
  misc_RNA (1)...(19): siRNA sense strand
caucauagacuucauacug

SEQ ID NO: 853038 - RNA, 19 nt, Homo sapiens
  misc_RNA (1)...(19): siRNA sense strand
ggagagaaaccucacaagu

SEQ ID NO: 853039 - RNA, 19 nt, Homo sapiens
  misc_RNA (1)...(19): siRNA sense strand
gaagaaugugacaaaguuu

SEQ ID NO: 853040 - RNA, 19 nt, Homo sapiens
  misc_RNA (1)...(19): siRNA sense strand
guggcaaggucuuuaauca

SEQ ID NO: 853041 - RNA, 19 nt, Homo sapiens
  misc_RNA (1)...(19): siRNA sense strand
gcaagaccuucaguuacaa

SEQ ID NO: 853042 - RNA, 19 nt, Homo sapiens
  misc_RNA (1)...(19): siRNA sense strand
gagaaaccuuacaaaugug

SEQ ID NO: 853043 - RNA, 19 nt, Homo sapiens
  misc_RNA (1)...(19): siRNA sense strand
guggcaagaccuucaguua

SEQ ID NO: 853044 - RNA, 19 nt, Homo sapiens
  misc_RNA (1)...(19): siRNA sense strand
ccucacaaguguaaugaau

SEQ ID NO: 853045 - RNA, 19 nt, Homo sapiens
  misc_RNA (1)...(19): siRNA sense strand
agucaucccuuguaauuca

SEQ ID NO: 853046 - RNA, 19 nt, Homo sapiens
  misc_RNA (1)...(19): siRNA sense strand
gugagaaaccuuacaagug

SEQ ID NO: 853047 - RNA, 19 nt, Homo sapiens
  misc_RNA (1)...(19): siRNA sense strand
agaaaccucacaaguguaa

SEQ ID NO: 853048 - RNA, 19 nt, Homo sapiens
  misc_RNA (1)...(19): siRNA sense strand
gaagcgauaccuugcauac

SEQ ID NO: 853049 - RNA, 19 nt, Homo sapiens
  misc_RNA (1)...(19): siRNA sense strand
uaccuugcauaccaucaua

SEQ ID NO: 853050 - RNA, 19 nt, Homo sapiens
  misc_RNA (1)...(19): siRNA sense strand
uaauuguagcucacuguua

SEQ ID NO: 853051 - RNA, 19 nt, Homo sapiens
  misc_RNA (1)...(19): siRNA sense strand
ucagauaauccauuuagga

SEQ ID NO: 853052 - RNA, 19 nt, Homo sapiens
  misc_RNA (1)...(19): siRNA sense strand
gagaaaccucacaagugua

SEQ ID NO: 853053 - RNA, 19 nt, Homo sapiens
  misc_RNA (1)...(19): siRNA sense strand
ggugagaaaccuuacaagu

SEQ ID NO: 853054 - RNA, 19 nt, Homo sapiens
  misc_RNA (1)...(19): siRNA sense strand
cagaagcgauaccuugcau

SEQ ID NO: 853055 - RNA, 19 nt, Homo sapiens
  misc_RNA (1)...(19): siRNA sense strand
acacuggugagaaaccuua

SEQ ID NO: 853056 - RNA, 19 nt, Homo sapiens
  misc_RNA (1)...(19): siRNA sense strand
caaggucuuuaaucagaag

SEQ ID NO: 853057 - RNA, 19 nt, Homo sapiens
  misc_RNA (1)...(19): siRNA sense strand
acaaaugugaagaauguga

SEQ ID NO: 853058 - RNA, 19 nt, Homo sapiens
  misc_RNA (1)...(19): siRNA sense strand
uguaaucaguguggcaaga

SEQ ID NO: 853059 - RNA, 19 nt, Homo sapiens
  misc_RNA (1)...(19): siRNA sense strand
auacuggagagaaaccuua

SEQ ID NO: 853060 - RNA, 19 nt, Homo sapiens
  misc_RNA (1)...(19): siRNA sense strand
gcgauaccuugcauaccau

SEQ ID NO: 853061 - RNA, 19 nt, Homo sapiens
  misc_RNA (1)...(19): siRNA sense strand
aaaccucacaaguguaaug

SEQ ID NO: 853062 - RNA, 19 nt, Homo sapiens
  misc_RNA (1)...(19): siRNA sense strand
gugaagaaugugacaaagu

SEQ ID NO: 853063 - RNA, 19 nt, Homo sapiens
  misc_RNA (1)...(19): siRNA sense strand
ucuuuaaucagaagcgaua

SEQ ID NO: 853064 - RNA, 19 nt, Homo sapiens
  misc_RNA (1)...(19): siRNA sense strand
ugucagauaauccauuuag

SEQ ID NO: 853065 - RNA, 19 nt, Homo sapiens
  misc_RNA (1)...(19): siRNA sense strand
ucacaaggcaauucauacu

SEQ ID NO: 853066 - RNA, 19 nt, Homo sapiens
  misc_RNA (1)...(19): siRNA sense strand
gcaauucauacuggagaga

SEQ ID NO: 853067 - RNA, 19 nt, Homo sapiens
  misc_RNA (1)...(19): siRNA sense strand
uauguggcaaggucuuuaa

SEQ ID NO: 853068 - RNA, 19 nt, Homo sapiens
  misc_RNA (1)...(19): siRNA sense strand
auucacaaggcaauucaua

SEQ ID NO: 853069 - RNA, 19 nt, Homo sapiens
  misc_RNA (1)...(19): siRNA sense strand
gaaaccuuacaaaugugaa

SEQ ID NO: 853070 - RNA, 19 nt, Homo sapiens
  misc_RNA (1)...(19): siRNA sense strand
agaaaccuuacaaauguga

SEQ ID NO: 853071 - RNA, 19 nt, Homo sapiens
  misc_RNA (1)...(19): siRNA sense strand
guaaugagaguggcaaagc

SEQ ID NO: 853072 - RNA, 19 nt, Homo sapiens
  misc_RNA (1)...(19): siRNA sense strand
agcgauaccuugcauacca

SEQ ID NO: 853073 - RNA, 19 nt, Homo sapiens
  misc_RNA (1)...(19): siRNA sense strand
caauucauacuggagagaa

SEQ ID NO: 853074 - RNA, 19 nt, Homo sapiens
  misc_RNA (1)...(19): siRNA sense strand
aagcauauuuugcaaguca

SEQ ID NO: 853075 - RNA, 19 nt, Homo sapiens
  misc_RNA (1)...(19): siRNA sense strand
aauucauacuggagagaaa

SEQ ID NO: 853076 - RNA, 19 nt, Homo sapiens
  misc_RNA (1)...(19): siRNA sense strand
gggaauaccuugcccuuaa

SEQ ID NO: 853077 - RNA, 19 nt, Homo sapiens
  misc_RNA (1)...(19): siRNA sense strand
gaagaaagguaggaagauu

SEQ ID NO: 853078 - RNA, 19 nt, Homo sapiens
  misc_RNA (1)...(19): siRNA sense strand
gaucauagcugggagagaa

SEQ ID NO: 853079 - RNA, 19 nt, Homo sapiens
  misc_RNA (1)...(19): siRNA sense strand
ugaagcagcuggauuuaaa

SEQ ID NO: 853080 - RNA, 19 nt, Homo sapiens
  misc_RNA (1)...(19): siRNA sense strand
gcuaaugucugcuacaaga

SEQ ID NO: 853081 - RNA, 19 nt, Homo sapiens
  misc_RNA (1)...(19): siRNA sense strand
uagaggagcuacuuucaaa

SEQ ID NO: 853082 - RNA, 19 nt, Homo sapiens
  misc_RNA (1)...(19): siRNA sense strand
gaagaaaugggccaaagaa

SEQ ID NO: 853083 - RNA, 19 nt, Homo sapiens
  misc_RNA (1)...(19): siRNA sense strand
gauacuaauuuguggauug

SEQ ID NO: 853084 - RNA, 19 nt, Homo sapiens
  misc_RNA (1)...(19): siRNA sense strand
gcucggugcuauauuauga

SEQ ID NO: 853085 - RNA, 19 nt, Homo sapiens
  misc_RNA (1)...(19): siRNA sense strand
gcucacaaguuuaaugaug

SEQ ID NO: 853086 - RNA, 19 nt, Homo sapiens
  misc_RNA (1)...(19): siRNA sense strand
ugauuuaccucaacucauu

SEQ ID NO: 853087 - RNA, 19 nt, Homo sapiens
  misc_RNA (1)...(19): siRNA sense strand
gauuggauauugugccuuu

SEQ ID NO: 853088 - RNA, 19 nt, Homo sapiens
  misc_RNA (1)...(19): siRNA sense strand
ccugggaacuuuaucuuaa

SEQ ID NO: 853089 - RNA, 19 nt, Homo sapiens
  misc_RNA (1)...(19): siRNA sense strand
gaagugcuccauuuacuga

SEQ ID NO: 853090 - RNA, 19 nt, Homo sapiens
  misc_RNA (1)...(19): siRNA sense strand
gaagaagaggauacuaauu

SEQ ID NO: 853091 - RNA, 19 nt, Homo sapiens
  misc_RNA (1)...(19): siRNA sense strand
caaguuggauuacuaugau

SEQ ID NO: 853092 - RNA, 19 nt, Homo sapiens
  misc_RNA (1)...(19): siRNA sense strand
ucaagaugauguacaagaa

SEQ ID NO: 853093 - RNA, 19 nt, Homo sapiens
  misc_RNA (1)...(19): siRNA sense strand
aaacagaguguccaucuaa

SEQ ID NO: 853094 - RNA, 19 nt, Homo sapiens
  misc_RNA (1)...(19): siRNA sense strand
ggaauaccuugcccuuaau

SEQ ID NO: 853095 - RNA, 19 nt, Homo sapiens
  misc_RNA (1)...(19): siRNA sense strand
gagaagugcuccauuuacu

SEQ ID NO: 853096 - RNA, 19 nt, Homo sapiens
  misc_RNA (1)...(19): siRNA sense strand
gugcauggcuuccuguuuc

SEQ ID NO: 853097 - RNA, 19 nt, Homo sapiens
  misc_RNA (1)...(19): siRNA sense strand
agaagaggauacuaauuug

SEQ ID NO: 853098 - RNA, 19 nt, Homo sapiens
  misc_RNA (1)...(19): siRNA sense strand
caaagagacccuucgagaa

SEQ ID NO: 853099 - RNA, 19 nt, Homo sapiens
  misc_RNA (1)...(19): siRNA sense strand
uaccucaacucauuuaaga

SEQ ID NO: 853100 - RNA, 19 nt, Homo sapiens
  misc_RNA (1)...(19): siRNA sense strand
gcuacuacaaguuggauua

SEQ ID NO: 853101 - RNA, 19 nt, Homo sapiens
  misc_RNA (1)...(19): siRNA sense strand
ucuuacagcucauugcuaa

SEQ ID NO: 853102 - RNA, 19 nt, Homo sapiens
  misc_RNA (1)...(19): siRNA sense strand
gaacucaucaggcacaauc

SEQ ID NO: 853103 - RNA, 19 nt, Homo sapiens
  misc_RNA (1)...(19): siRNA sense strand
ugaugugucucaagaaguu

SEQ ID NO: 853104 - RNA, 19 nt, Homo sapiens
  misc_RNA (1)...(19): siRNA sense strand
gaauaagaaaccaagacua

SEQ ID NO: 853105 - RNA, 19 nt, Homo sapiens
  misc_RNA (1)...(19): siRNA sense strand
gaaagaagaaagguaggaa

SEQ ID NO: 853106 - RNA, 19 nt, Homo sapiens
  misc_RNA (1)...(19): siRNA sense strand
agacuagccugggaacuuu

SEQ ID NO: 853107 - RNA, 19 nt, Homo sapiens
  misc_RNA (1)...(19): siRNA sense strand
gcaauuugaugauguuuug

SEQ ID NO: 853108 - RNA, 19 nt, Homo sapiens
  misc_RNA (1)...(19): siRNA sense strand
gaucagcuagugaauguga

SEQ ID NO: 853109 - RNA, 19 nt, Homo sapiens
  misc_RNA (1)...(19): siRNA sense strand
cuuaaagccuguaaccauu

SEQ ID NO: 853110 - RNA, 19 nt, Homo sapiens
  misc_RNA (1)...(19): siRNA sense strand
caacaggcaauaccaguga

SEQ ID NO: 853111 - RNA, 19 nt, Homo sapiens
  misc_RNA (1)...(19): siRNA sense strand
aggcuaaacuuggugauuu

SEQ ID NO: 853112 - RNA, 19 nt, Homo sapiens
  misc_RNA (1)...(19): siRNA sense strand
gauccaaagugagaagaug

SEQ ID NO: 853113 - RNA, 19 nt, Homo sapiens
  misc_RNA (1)...(19): siRNA sense strand
gauccuaacccugaauauu

SEQ ID NO: 853114 - RNA, 19 nt, Homo sapiens
  misc_RNA (1)...(19): siRNA sense strand
ccaucgcacucaaucuuaa

SEQ ID NO: 853115 - RNA, 19 nt, Homo sapiens
  misc_RNA (1)...(19): siRNA sense strand
ggaguauauucucaaagga

SEQ ID NO: 853116 - RNA, 19 nt, Homo sapiens
  misc_RNA (1)...(19): siRNA sense strand
cacagaagaucaacucagu

SEQ ID NO: 853117 - RNA, 19 nt, Homo sapiens
  misc_RNA (1)...(19): siRNA sense strand
uugagaggcuggauccuaa

SEQ ID NO: 853118 - RNA, 19 nt, Homo sapiens
  misc_RNA (1)...(19): siRNA sense strand
caaugcuucuucauccuuu

SEQ ID NO: 853119 - RNA, 19 nt, Homo sapiens
  misc_RNA (1)...(19): siRNA sense strand
gauggacaaugcuucuuca

SEQ ID NO: 853120 - RNA, 19 nt, Homo sapiens
  misc_RNA (1)...(19): siRNA sense strand
gaagaggauacuaauuugu

SEQ ID NO: 853121 - RNA, 19 nt, Homo sapiens
  misc_RNA (1)...(19): siRNA sense strand
ucaaaggaguggucaaugc

SEQ ID NO: 853122 - RNA, 19 nt, Homo sapiens
  misc_RNA (1)...(19): siRNA sense strand
ucaggaguauauucucaaa

SEQ ID NO: 853123 - RNA, 19 nt, Homo sapiens
  misc_RNA (1)...(19): siRNA sense strand
cagagcagcugaggcagaa

SEQ ID NO: 853124 - RNA, 19 nt, Homo sapiens
  misc_RNA (1)...(19): siRNA sense strand
ggauuacuaugaugugucu

SEQ ID NO: 853125 - RNA, 19 nt, Homo sapiens
  misc_RNA (1)...(19): siRNA sense strand
aagcgaauacugcuagaua

SEQ ID NO: 853126 - RNA, 19 nt, Homo sapiens
  misc_RNA (1)...(19): siRNA sense strand
aagaagaagaggauacuaa

SEQ ID NO: 853127 - RNA, 19 nt, Homo sapiens
  misc_RNA (1)...(19): siRNA sense strand
ccaaguagaauacaugauc

SEQ ID NO: 853128 - RNA, 19 nt, Homo sapiens
  misc_RNA (1)...(19): siRNA sense strand
guaacacccaaguagaaua

SEQ ID NO: 853129 - RNA, 19 nt, Homo sapiens
  misc_RNA (1)...(19): siRNA sense strand
gaauacugcuagauaacag

SEQ ID NO: 853130 - RNA, 19 nt, Homo sapiens
  misc_RNA (1)...(19): siRNA sense strand
cagcaaauuccugauagua

SEQ ID NO: 853131 - RNA, 19 nt, Homo sapiens
  misc_RNA (1)...(19): siRNA sense strand
gcuacaagaugggccaguu

SEQ ID NO: 853132 - RNA, 19 nt, Homo sapiens
  misc_RNA (1)...(19): siRNA sense strand
gcuagugaaugugauacaa

SEQ ID NO: 853133 - RNA, 19 nt, Homo sapiens
  misc_RNA (1)...(19): siRNA sense strand
gaagaagaagaggauacua

SEQ ID NO: 853134 - RNA, 19 nt, Homo sapiens
  misc_RNA (1)...(19): siRNA sense strand
acuacaaguuggauuacua

SEQ ID NO: 853135 - RNA, 19 nt, Homo sapiens
  misc_RNA (1)...(19): siRNA sense strand
uuacugagaagcacaggua

SEQ ID NO: 853136 - RNA, 19 nt, Homo sapiens
  misc_RNA (1)...(19): siRNA sense strand
acuaugaugugucucaaga

SEQ ID NO: 853137 - RNA, 19 nt, Homo sapiens
  misc_RNA (1)...(19): siRNA sense strand
ugaauuugcuaaagaacuc

SEQ ID NO: 853138 - RNA, 19 nt, Homo sapiens
  misc_RNA (1)...(19): siRNA sense strand
agauuucacuggagcuauu

SEQ ID NO: 853139 - RNA, 19 nt, Homo sapiens
  misc_RNA (1)...(19): siRNA sense strand
cuauuacccuguuggaguu

SEQ ID NO: 853140 - RNA, 19 nt, Homo sapiens
  misc_RNA (1)...(19): siRNA sense strand
aggaucagcuagugaaugu

SEQ ID NO: 853141 - RNA, 19 nt, Homo sapiens
  misc_RNA (1)...(19): siRNA sense strand
uaccuugcccuuaauguuu

SEQ ID NO: 853142 - RNA, 19 nt, Homo sapiens
  misc_RNA (1)...(19): siRNA sense strand
ucgagaagugcuccauuua

SEQ ID NO: 853143 - RNA, 19 nt, Homo sapiens
  misc_RNA (1)...(19): siRNA sense strand
uaugcgaucucacuaccaa

SEQ ID NO: 853144 - RNA, 19 nt, Homo sapiens
  misc_RNA (1)...(19): siRNA sense strand
gauaguaccaucgcacuca

SEQ ID NO: 853145 - RNA, 19 nt, Homo sapiens
  misc_RNA (1)...(19): siRNA sense strand
ccucaggaguauauucuca

SEQ ID NO: 853146 - RNA, 19 nt, Homo sapiens
  misc_RNA (1)...(19): siRNA sense strand
gcacagguaacacccaagu

SEQ ID NO: 853147 - RNA, 19 nt, Homo sapiens
  misc_RNA (1)...(19): siRNA sense strand
aauaagaaaccaagacuag

SEQ ID NO: 853148 - RNA, 19 nt, Homo sapiens
  misc_RNA (1)...(19): siRNA sense strand
ucacuaccaagaagcuaua

SEQ ID NO: 853149 - RNA, 19 nt, Homo sapiens
  misc_RNA (1)...(19): siRNA sense strand
gcguuccucuugauccaaa

SEQ ID NO: 853150 - RNA, 19 nt, Homo sapiens
  misc_RNA (1)...(19): siRNA sense strand
gggaggaucagcuagugaa

SEQ ID NO: 853151 - RNA, 19 nt, Homo sapiens
  misc_RNA (1)...(19): siRNA sense strand
guacaagaagcuuauaacu

SEQ ID NO: 853152 - RNA, 19 nt, Homo sapiens
  misc_RNA (1)...(19): siRNA sense strand
ggaguucaaacgucauguu

SEQ ID NO: 853153 - RNA, 19 nt, Homo sapiens
  misc_RNA (1)...(19): siRNA sense strand
uaccaagaagcuauagaua

SEQ ID NO: 853154 - RNA, 19 nt, Homo sapiens
  misc_RNA (1)...(19): siRNA sense strand
uucgagaagugcuccauuu

SEQ ID NO: 853155 - RNA, 19 nt, Homo sapiens
  misc_RNA (1)...(19): siRNA sense strand
gaaggggcuuugcagguuu

SEQ ID NO: 853156 - RNA, 19 nt, Homo sapiens
  misc_RNA (1)...(19): siRNA sense strand
acaaguuggauuacuauga

SEQ ID NO: 853157 - RNA, 19 nt, Homo sapiens
  misc_RNA (1)...(19): siRNA sense strand
acauuuaccucagcugguu

SEQ ID NO: 853158 - RNA, 19 nt, Homo sapiens
  misc_RNA (1)...(19): siRNA sense strand
uaauuaugcccaagccaaa

SEQ ID NO: 853159 - RNA, 19 nt, Homo sapiens
  misc_RNA (1)...(19): siRNA sense strand
uaugaugugucucaagaag

SEQ ID NO: 853160 - RNA, 19 nt, Homo sapiens
  misc_RNA (1)...(19): siRNA sense strand
cucacaaguuuaaugauga

SEQ ID NO: 853161 - RNA, 19 nt, Homo sapiens
  misc_RNA (1)...(19): siRNA sense strand
gaguucaaacgucauguug

SEQ ID NO: 853162 - RNA, 19 nt, Homo sapiens
  misc_RNA (1)...(19): siRNA sense strand
ggauacuaauuuguggauu

SEQ ID NO: 853163 - RNA, 19 nt, Homo sapiens
  misc_RNA (1)...(19): siRNA sense strand
agcgaauacugcuagauaa

SEQ ID NO: 853164 - RNA, 19 nt, Homo sapiens
  misc_RNA (1)...(19): siRNA sense strand
uggccucaauccacuauau

SEQ ID NO: 853165 - RNA, 19 nt, Homo sapiens
  misc_RNA (1)...(19): siRNA sense strand
ugaagaaaugggccaaaga

SEQ ID NO: 853166 - RNA, 19 nt, Homo sapiens
  misc_RNA (1)...(19): siRNA sense strand
agaagaagaggauacuaau

SEQ ID NO: 853167 - RNA, 19 nt, Homo sapiens
  misc_RNA (1)...(19): siRNA sense strand
gccugggaacuuuaucuua

SEQ ID NO: 853168 - RNA, 19 nt, Homo sapiens
  misc_RNA (1)...(19): siRNA sense strand
aaacuagaggagcuacuuu

SEQ ID NO: 853169 - RNA, 19 nt, Homo sapiens
  misc_RNA (1)...(19): siRNA sense strand
cuguuuaccuucagcaaau

SEQ ID NO: 853170 - RNA, 19 nt, Homo sapiens
  misc_RNA (1)...(19): siRNA sense strand
gaaaugggccaaagaaaac

SEQ ID NO: 853171 - RNA, 19 nt, Homo sapiens
  misc_RNA (1)...(19): siRNA sense strand
gggagagaacccaaagaga

SEQ ID NO: 853172 - RNA, 19 nt, Homo sapiens
  misc_RNA (1)...(19): siRNA sense strand
gaaaauugcccagcaguuc

SEQ ID NO: 853173 - RNA, 19 nt, Homo sapiens
  misc_RNA (1)...(19): siRNA sense strand
caaaggaguggucaaugca

SEQ ID NO: 853174 - RNA, 19 nt, Homo sapiens
  misc_RNA (1)...(19): siRNA sense strand
gguuuuaccuccccuaguu

SEQ ID NO: 853175 - RNA, 19 nt, Homo sapiens
  misc_RNA (1)...(19): siRNA sense strand
uuaaagccuguaaccauuu

SEQ ID NO: 853176 - RNA, 19 nt, Homo sapiens
  misc_RNA (1)...(19): siRNA sense strand
gcaagcaccuauuaucuau

SEQ ID NO: 853177 - RNA, 19 nt, Homo sapiens
  misc_RNA (1)...(19): siRNA sense strand
gcuguacaccgacuuggua

SEQ ID NO: 853178 - RNA, 19 nt, Homo sapiens
  misc_RNA (1)...(19): siRNA sense strand
guuuagcaagcaccuauua

SEQ ID NO: 853179 - RNA, 19 nt, Homo sapiens
  misc_RNA (1)...(19): siRNA sense strand
guacaccgacuugguauca

SEQ ID NO: 853180 - RNA, 19 nt, Homo sapiens
  misc_RNA (1)...(19): siRNA sense strand
gugcgcagcccucagcaaa

SEQ ID NO: 853181 - RNA, 19 nt, Homo sapiens
  misc_RNA (1)...(19): siRNA sense strand
cauaaagccaggguuguug

SEQ ID NO: 853182 - RNA, 19 nt, Homo sapiens
  misc_RNA (1)...(19): siRNA sense strand
ccaggguuguugaaagcuu

SEQ ID NO: 853183 - RNA, 19 nt, Homo sapiens
  misc_RNA (1)...(19): siRNA sense strand
gaucccaccgcucauaaag

SEQ ID NO: 853184 - RNA, 19 nt, Homo sapiens
  misc_RNA (1)...(19): siRNA sense strand
caagcaccuauuaucuaua

SEQ ID NO: 853185 - RNA, 19 nt, Homo sapiens
  misc_RNA (1)...(19): siRNA sense strand
uagcaagcaccuauuaucu

SEQ ID NO: 853186 - RNA, 19 nt, Homo sapiens
  misc_RNA (1)...(19): siRNA sense strand
ucauaaagccaggguuguu

SEQ ID NO: 853187 - RNA, 19 nt, Homo sapiens
  misc_RNA (1)...(19): siRNA sense strand
acaccgacuugguaucauc

SEQ ID NO: 853188 - RNA, 19 nt, Homo sapiens
  misc_RNA (1)...(19): siRNA sense strand
cgagguagcaggcgaacca

SEQ ID NO: 853189 - RNA, 19 nt, Homo sapiens
  misc_RNA (1)...(19): siRNA sense strand
gcagcucacgggacuaugg

SEQ ID NO: 853190 - RNA, 19 nt, Homo sapiens
  misc_RNA (1)...(19): siRNA sense strand
ccucuggcagugucuuuaa

SEQ ID NO: 853191 - RNA, 19 nt, Homo sapiens
  misc_RNA (1)...(19): siRNA sense strand
agcaagcaccuauuaucua

SEQ ID NO: 853192 - RNA, 19 nt, Homo sapiens
  misc_RNA (1)...(19): siRNA sense strand
gggcagcucacgggacuau

SEQ ID NO: 853193 - RNA, 19 nt, Homo sapiens
  misc_RNA (1)...(19): siRNA sense strand
uaaagccaggguuguugaa

SEQ ID NO: 853194 - RNA, 19 nt, Homo sapiens
  misc_RNA (1)...(19): siRNA sense strand
gcgcaugcucaucuguaaa

SEQ ID NO: 853195 - RNA, 19 nt, Homo sapiens
  misc_RNA (1)...(19): siRNA sense strand
aagccaggguuguugaaag

SEQ ID NO: 853196 - RNA, 19 nt, Homo sapiens
  misc_RNA (1)...(19): siRNA sense strand
uuagcaagcaccuauuauc

SEQ ID NO: 853197 - RNA, 19 nt, Homo sapiens
  misc_RNA (1)...(19): siRNA sense strand
gaacaaagucuccuugaag

SEQ ID NO: 853198 - RNA, 19 nt, Homo sapiens
  misc_RNA (1)...(19): siRNA sense strand
cgaacaaagucuccuugaa

SEQ ID NO: 853199 - RNA, 19 nt, Homo sapiens
  misc_RNA (1)...(19): siRNA sense strand
uggcugcgauucugucuga

SEQ ID NO: 853200 - RNA, 19 nt, Homo sapiens
  misc_RNA (1)...(19): siRNA sense strand
gaagcuggcacucagaaag

SEQ ID NO: 853201 - RNA, 19 nt, Homo sapiens
  misc_RNA (1)...(19): siRNA sense strand
gcgaacaaagucuccuuga

SEQ ID NO: 853202 - RNA, 19 nt, Homo sapiens
  misc_RNA (1)...(19): siRNA sense strand
ggaagcuggcacucagaaa

SEQ ID NO: 853203 - RNA, 19 nt, Homo sapiens
  misc_RNA (1)...(19): siRNA sense strand
agacggcgaucgggagcua

SEQ ID NO: 853204 - RNA, 19 nt, Homo sapiens
  misc_RNA (1)...(19): siRNA sense strand
ccaugcagcaggcgaacaa

SEQ ID NO: 853205 - RNA, 19 nt, Homo sapiens
  misc_RNA (1)...(19): siRNA sense strand
gcagcaggcgaacaaaguc

SEQ ID NO: 853206 - RNA, 19 nt, Homo sapiens
  misc_RNA (1)...(19): siRNA sense strand
gcucaucucuggugaacag

SEQ ID NO: 853207 - RNA, 19 nt, Homo sapiens
  misc_RNA (1)...(19): siRNA sense strand
gcacaugccccucauaugg

SEQ ID NO: 853208 - RNA, 19 nt, Homo sapiens
  misc_RNA (1)...(19): siRNA sense strand
ccucugggcucuguuacug

SEQ ID NO: 853209 - RNA, 19 nt, Homo sapiens
  misc_RNA (1)...(19): siRNA sense strand
gggcucaucucuggugaac

SEQ ID NO: 853210 - RNA, 19 nt, Homo sapiens
  misc_RNA (1)...(19): siRNA sense strand
cccuguggguggacacuuu

SEQ ID NO: 853211 - RNA, 19 nt, Homo sapiens
  misc_RNA (1)...(19): siRNA sense strand
gccuggaggucugcgaguu

SEQ ID NO: 853212 - RNA, 19 nt, Homo sapiens
  misc_RNA (1)...(19): siRNA sense strand
gaaaugagacacuaucaaa

SEQ ID NO: 853213 - RNA, 19 nt, Homo sapiens
  misc_RNA (1)...(19): siRNA sense strand
gcagauaggugcucagugu

SEQ ID NO: 853214 - RNA, 19 nt, Homo sapiens
  misc_RNA (1)...(19): siRNA sense strand
guaaaccgcuacacucaaa

SEQ ID NO: 853215 - RNA, 19 nt, Homo sapiens
  misc_RNA (1)...(19): siRNA sense strand
gaagaaaugucugauucaa

SEQ ID NO: 853216 - RNA, 19 nt, Homo sapiens
  misc_RNA (1)...(19): siRNA sense strand
ugaaagcuaugcaagaauu

SEQ ID NO: 853217 - RNA, 19 nt, Homo sapiens
  misc_RNA (1)...(19): siRNA sense strand
ugaagacgaugaagaaaug

SEQ ID NO: 853218 - RNA, 19 nt, Homo sapiens
  misc_RNA (1)...(19): siRNA sense strand
ccaauucccuauucacaaa

SEQ ID NO: 853219 - RNA, 19 nt, Homo sapiens
  misc_RNA (1)...(19): siRNA sense strand
ccagaaggaucuugcacua

SEQ ID NO: 853220 - RNA, 19 nt, Homo sapiens
  misc_RNA (1)...(19): siRNA sense strand
gaucggagguguugguuca

SEQ ID NO: 853221 - RNA, 19 nt, Homo sapiens
  misc_RNA (1)...(19): siRNA sense strand
gcaagaauuuacucugaga

SEQ ID NO: 853222 - RNA, 19 nt, Homo sapiens
  misc_RNA (1)...(19): siRNA sense strand
gcugaaagcuaugcaagaa

SEQ ID NO: 853223 - RNA, 19 nt, Homo sapiens
  misc_RNA (1)...(19): siRNA sense strand
caaauuaugcugaaagcua

SEQ ID NO: 853224 - RNA, 19 nt, Homo sapiens
  misc_RNA (1)...(19): siRNA sense strand
gcuacaagauuccacaguu

SEQ ID NO: 853225 - RNA, 19 nt, Homo sapiens
  misc_RNA (1)...(19): siRNA sense strand
gaaagagcccugcagauag

SEQ ID NO: 853226 - RNA, 19 nt, Homo sapiens
  misc_RNA (1)...(19): siRNA sense strand
agaaagagcccugcagaua

SEQ ID NO: 853227 - RNA, 19 nt, Homo sapiens
  misc_RNA (1)...(19): siRNA sense strand
ucaaacagcccaccaauuc

SEQ ID NO: 853228 - RNA, 19 nt, Homo sapiens
  misc_RNA (1)...(19): siRNA sense strand
ggaggcugcugcuaugauu

SEQ ID NO: 853229 - RNA, 19 nt, Homo sapiens
  misc_RNA (1)...(19): siRNA sense strand
caaagaagcagaagcacuu

SEQ ID NO: 853230 - RNA, 19 nt, Homo sapiens
  misc_RNA (1)...(19): siRNA sense strand
ggaagaugaugaagacgau

SEQ ID NO: 853231 - RNA, 19 nt, Homo sapiens
  misc_RNA (1)...(19): siRNA sense strand
ggaaaggauuugcguuugg

SEQ ID NO: 853232 - RNA, 19 nt, Homo sapiens
  misc_RNA (1)...(19): siRNA sense strand
gcacuuuacccuauuucua

SEQ ID NO: 853233 - RNA, 19 nt, Homo sapiens
  misc_RNA (1)...(19): siRNA sense strand
uggaggaucuggacaaaga

SEQ ID NO: 853234 - RNA, 19 nt, Homo sapiens
  misc_RNA (1)...(19): siRNA sense strand
aucaaaggcugccagauua

SEQ ID NO: 853235 - RNA, 19 nt, Homo sapiens
  misc_RNA (1)...(19): siRNA sense strand
caagcuaccauguucauuu

SEQ ID NO: 853236 - RNA, 19 nt, Homo sapiens
  misc_RNA (1)...(19): siRNA sense strand
ggaguuagaccaguaauuc

SEQ ID NO: 853237 - RNA, 19 nt, Homo sapiens
  misc_RNA (1)...(19): siRNA sense strand
uaucaaaggcugccagauu

SEQ ID NO: 853238 - RNA, 19 nt, Homo sapiens
  misc_RNA (1)...(19): siRNA sense strand
gguaauuugugcaucgaaa

SEQ ID NO: 853239 - RNA, 19 nt, Homo sapiens
  misc_RNA (1)...(19): siRNA sense strand
cauagaagccucccucaga

SEQ ID NO: 853240 - RNA, 19 nt, Homo sapiens
  misc_RNA (1)...(19): siRNA sense strand
agaaaugucugauucaaac

SEQ ID NO: 853241 - RNA, 19 nt, Homo sapiens
  misc_RNA (1)...(19): siRNA sense strand
cuacaagauuccacaguug

SEQ ID NO: 853242 - RNA, 19 nt, Homo sapiens
  misc_RNA (1)...(19): siRNA sense strand
gacaacuaauggauacaaa

SEQ ID NO: 853243 - RNA, 19 nt, Homo sapiens
  misc_RNA (1)...(19): siRNA sense strand
caacugaaaucugcucgau

SEQ ID NO: 853244 - RNA, 19 nt, Homo sapiens
  misc_RNA (1)...(19): siRNA sense strand
gacagaugcugcuaaugga

SEQ ID NO: 853245 - RNA, 19 nt, Homo sapiens
  misc_RNA (1)...(19): siRNA sense strand
agaaggaucuugcacuaca

SEQ ID NO: 853246 - RNA, 19 nt, Homo sapiens
  misc_RNA (1)...(19): siRNA sense strand
ccaggaggcugcugcuaug

SEQ ID NO: 853247 - RNA, 19 nt, Homo sapiens
  misc_RNA (1)...(19): siRNA sense strand
ccaaccacauuaacuugaa

SEQ ID NO: 853248 - RNA, 19 nt, Homo sapiens
  misc_RNA (1)...(19): siRNA sense strand
gaaaggauuugcguuuggu

SEQ ID NO: 853249 - RNA, 19 nt, Homo sapiens
  misc_RNA (1)...(19): siRNA sense strand
gaauguagaagccgacaau

SEQ ID NO: 853250 - RNA, 19 nt, Homo sapiens
  misc_RNA (1)...(19): siRNA sense strand
ugaggaagcucuccacaac

SEQ ID NO: 853251 - RNA, 19 nt, Homo sapiens
  misc_RNA (1)...(19): siRNA sense strand
acacagggaauuacucuuu

SEQ ID NO: 853252 - RNA, 19 nt, Homo sapiens
  misc_RNA (1)...(19): siRNA sense strand
aagccaagcucuucagugu

SEQ ID NO: 853253 - RNA, 19 nt, Homo sapiens
  misc_RNA (1)...(19): siRNA sense strand
ucagacagaugcugcuaau

SEQ ID NO: 853254 - RNA, 19 nt, Homo sapiens
  misc_RNA (1)...(19): siRNA sense strand
gaaaaugggacaacuaaug

SEQ ID NO: 853255 - RNA, 19 nt, Homo sapiens
  misc_RNA (1)...(19): siRNA sense strand
ccucuuaucugcuggaaag

SEQ ID NO: 853256 - RNA, 19 nt, Homo sapiens
  misc_RNA (1)...(19): siRNA sense strand
gaaagcuaugcaagaauuu

SEQ ID NO: 853257 - RNA, 19 nt, Homo sapiens
  misc_RNA (1)...(19): siRNA sense strand
gaacggagccccuuuuauc

SEQ ID NO: 853258 - RNA, 19 nt, Homo sapiens
  misc_RNA (1)...(19): siRNA sense strand
gaugaagaaaugucugauu

SEQ ID NO: 853259 - RNA, 19 nt, Homo sapiens
  misc_RNA (1)...(19): siRNA sense strand
uaaggacucucagugaaau

SEQ ID NO: 853260 - RNA, 19 nt, Homo sapiens
  misc_RNA (1)...(19): siRNA sense strand
ugaaauggaagaugaugaa

SEQ ID NO: 853261 - RNA, 19 nt, Homo sapiens
  misc_RNA (1)...(19): siRNA sense strand
gauggagaccuuaaugaau

SEQ ID NO: 853262 - RNA, 19 nt, Homo sapiens
  misc_RNA (1)...(19): siRNA sense strand
ggauuugcguuugguauca

SEQ ID NO: 853263 - RNA, 19 nt, Homo sapiens
  misc_RNA (1)...(19): siRNA sense strand
caggaaaggauuugcguuu

SEQ ID NO: 853264 - RNA, 19 nt, Homo sapiens
  misc_RNA (1)...(19): siRNA sense strand
uaucggcuguggagaaaga

SEQ ID NO: 853265 - RNA, 19 nt, Homo sapiens
  misc_RNA (1)...(19): siRNA sense strand
agacuugguucaugugguu

SEQ ID NO: 853266 - RNA, 19 nt, Homo sapiens
  misc_RNA (1)...(19): siRNA sense strand
gaaaacaugauucuucuga

SEQ ID NO: 853267 - RNA, 19 nt, Homo sapiens
  misc_RNA (1)...(19): siRNA sense strand
caacuaauggauacaaauc

SEQ ID NO: 853268 - RNA, 19 nt, Homo sapiens
  misc_RNA (1)...(19): siRNA sense strand
augaaaccuuccacauuua

SEQ ID NO: 853269 - RNA, 19 nt, Homo sapiens
  misc_RNA (1)...(19): siRNA sense strand
ggauuuagauaaugaaacc

SEQ ID NO: 853270 - RNA, 19 nt, Homo sapiens
  misc_RNA (1)...(19): siRNA sense strand
gcuaugauucccacacaaa

SEQ ID NO: 853271 - RNA, 19 nt, Homo sapiens
  misc_RNA (1)...(19): siRNA sense strand
ucacaggaaaggucaguuu

SEQ ID NO: 853272 - RNA, 19 nt, Homo sapiens
  misc_RNA (1)...(19): siRNA sense strand
ugaugaagacgaugaagaa

SEQ ID NO: 853273 - RNA, 19 nt, Homo sapiens
  misc_RNA (1)...(19): siRNA sense strand
caacaaagaagaggagaca

SEQ ID NO: 853274 - RNA, 19 nt, Homo sapiens
  misc_RNA (1)...(19): siRNA sense strand
gguggaggaucuggacaaa

SEQ ID NO: 853275 - RNA, 19 nt, Homo sapiens
  misc_RNA (1)...(19): siRNA sense strand
gagaucaagcuaccauguu

SEQ ID NO: 853276 - RNA, 19 nt, Homo sapiens
  misc_RNA (1)...(19): siRNA sense strand
gcccaccaauucccuauuc

SEQ ID NO: 853277 - RNA, 19 nt, Homo sapiens
  misc_RNA (1)...(19): siRNA sense strand
ggacaacuaauggauacaa

SEQ ID NO: 853278 - RNA, 19 nt, Homo sapiens
  misc_RNA (1)...(19): siRNA sense strand
cuuaaggacucucagugaa

SEQ ID NO: 853279 - RNA, 19 nt, Homo sapiens
  misc_RNA (1)...(19): siRNA sense strand
cugaaaaccugcugaguaa

SEQ ID NO: 853280 - RNA, 19 nt, Homo sapiens
  misc_RNA (1)...(19): siRNA sense strand
ggccaagucucccaaucug

SEQ ID NO: 853281 - RNA, 19 nt, Homo sapiens
  misc_RNA (1)...(19): siRNA sense strand
gcgaugaccuagacaagcu

SEQ ID NO: 853282 - RNA, 19 nt, Homo sapiens
  misc_RNA (1)...(19): siRNA sense strand
aaagagcccugcagauagg

SEQ ID NO: 853283 - RNA, 19 nt, Homo sapiens
  misc_RNA (1)...(19): siRNA sense strand
aagaggauuucgauauuuc

SEQ ID NO: 853284 - RNA, 19 nt, Homo sapiens
  misc_RNA (1)...(19): siRNA sense strand
augaagaaaugucugauuc

SEQ ID NO: 853285 - RNA, 19 nt, Homo sapiens
  misc_RNA (1)...(19): siRNA sense strand
gcuaacaguugccagaaaa

SEQ ID NO: 853286 - RNA, 19 nt, Homo sapiens
  misc_RNA (1)...(19): siRNA sense strand
cacaaaaccuggauuuaga

SEQ ID NO: 853287 - RNA, 19 nt, Homo sapiens
  misc_RNA (1)...(19): siRNA sense strand
auggagaccuuaaugaaug

SEQ ID NO: 853288 - RNA, 19 nt, Homo sapiens
  misc_RNA (1)...(19): siRNA sense strand
cgauggagaccuuaaugaa

SEQ ID NO: 853289 - RNA, 19 nt, Homo sapiens
  misc_RNA (1)...(19): siRNA sense strand
ggagaucaagcuaccaugu

SEQ ID NO: 853290 - RNA, 19 nt, Homo sapiens
  misc_RNA (1)...(19): siRNA sense strand
cgacaauccucugcuucuu

SEQ ID NO: 853291 - RNA, 19 nt, Homo sapiens
  misc_RNA (1)...(19): siRNA sense strand
caaucugccugaacacauc

SEQ ID NO: 853292 - RNA, 19 nt, Homo sapiens
  misc_RNA (1)...(19): siRNA sense strand
gcggagggcauuucagaga

SEQ ID NO: 853293 - RNA, 19 nt, Homo sapiens
  misc_RNA (1)...(19): siRNA sense strand
guccucugcuggugaauug

SEQ ID NO: 853294 - RNA, 19 nt, Homo sapiens
  misc_RNA (1)...(19): siRNA sense strand
caagcgauuucuaccagau

SEQ ID NO: 853295 - RNA, 19 nt, Homo sapiens
  misc_RNA (1)...(19): siRNA sense strand
agacagaugcugcuaaugg

SEQ ID NO: 853296 - RNA, 19 nt, Homo sapiens
  misc_RNA (1)...(19): siRNA sense strand
uagacaagcugcuggaaaa

SEQ ID NO: 853297 - RNA, 19 nt, Homo sapiens
  misc_RNA (1)...(19): siRNA sense strand
augcaagaauuuacucuga

SEQ ID NO: 853298 - RNA, 19 nt, Homo sapiens
  misc_RNA (1)...(19): siRNA sense strand
cacagggaauuacucuuug

SEQ ID NO: 853299 - RNA, 19 nt, Homo sapiens
  misc_RNA (1)...(19): siRNA sense strand
cugaacacauccuaguuug

SEQ ID NO: 853300 - RNA, 19 nt, Homo sapiens
  misc_RNA (1)...(19): siRNA sense strand
gaaaaucagaggaaaugaa

SEQ ID NO: 853301 - RNA, 19 nt, Homo sapiens
  misc_RNA (1)...(19): siRNA sense strand
gaagccucccucagaugua

SEQ ID NO: 853302 - RNA, 19 nt, Homo sapiens
  misc_RNA (1)...(19): siRNA sense strand
ugaccagcauccuuucuca

SEQ ID NO: 853303 - RNA, 19 nt, Homo sapiens
  misc_RNA (1)...(19): siRNA sense strand
cuauggcacuuuacccuau

SEQ ID NO: 853304 - RNA, 19 nt, Homo sapiens
  misc_RNA (1)...(19): siRNA sense strand
cccacuaacuggaauuuua

SEQ ID NO: 853305 - RNA, 19 nt, Homo sapiens
  misc_RNA (1)...(19): siRNA sense strand
aagcuaccauguucauuuc

SEQ ID NO: 853306 - RNA, 19 nt, Homo sapiens
  misc_RNA (1)...(19): siRNA sense strand
agaucaagcuaccauguuc

SEQ ID NO: 853307 - RNA, 19 nt, Homo sapiens
  misc_RNA (1)...(19): siRNA sense strand
gacaauccucugcuucuug

SEQ ID NO: 853308 - RNA, 19 nt, Homo sapiens
  misc_RNA (1)...(19): siRNA sense strand
cagauguaguaguguggua

SEQ ID NO: 853309 - RNA, 19 nt, Homo sapiens
  misc_RNA (1)...(19): siRNA sense strand
ccugaacacauccuaguuu

SEQ ID NO: 853310 - RNA, 19 nt, Homo sapiens
  misc_RNA (1)...(19): siRNA sense strand
gagaaagagcccugcagau

SEQ ID NO: 853311 - RNA, 19 nt, Homo sapiens
  misc_RNA (1)...(19): siRNA sense strand
gcuucuugccacucuauua

SEQ ID NO: 853312 - RNA, 19 nt, Homo sapiens
  misc_RNA (1)...(19): siRNA sense strand
ggacguggcucgcuucuuc

SEQ ID NO: 853313 - RNA, 19 nt, Homo sapiens
  misc_RNA (1)...(19): siRNA sense strand
gaagagaauuccauaugca

SEQ ID NO: 853314 - RNA, 19 nt, Homo sapiens
  misc_RNA (1)...(19): siRNA sense strand
ggaggaguuuguaaagauu

SEQ ID NO: 853315 - RNA, 19 nt, Homo sapiens
  misc_RNA (1)...(19): siRNA sense strand
gcucagcguugccauaaga

SEQ ID NO: 853316 - RNA, 19 nt, Homo sapiens
  misc_RNA (1)...(19): siRNA sense strand
gcccagcagucaauuguuu

SEQ ID NO: 853317 - RNA, 19 nt, Homo sapiens
  misc_RNA (1)...(19): siRNA sense strand
gaagacauccugagcuuuc

SEQ ID NO: 853318 - RNA, 19 nt, Homo sapiens
  misc_RNA (1)...(19): siRNA sense strand
gggaggaguuuguaaagau

SEQ ID NO: 853319 - RNA, 19 nt, Homo sapiens
  misc_RNA (1)...(19): siRNA sense strand
ccacucaacucuaccugaa

SEQ ID NO: 853320 - RNA, 19 nt, Homo sapiens
  misc_RNA (1)...(19): siRNA sense strand
agagguggcucguuucuug

SEQ ID NO: 853321 - RNA, 19 nt, Homo sapiens
  misc_RNA (1)...(19): siRNA sense strand
ggacgagaccgacuuaauc

SEQ ID NO: 853322 - RNA, 19 nt, Homo sapiens
  misc_RNA (1)...(19): siRNA sense strand
auaagaaggugaugaagga

SEQ ID NO: 853323 - RNA, 19 nt, Homo sapiens
  misc_RNA (1)...(19): siRNA sense strand
gacuuaauccuccuaguuu

SEQ ID NO: 853324 - RNA, 19 nt, Homo sapiens
  misc_RNA (1)...(19): siRNA sense strand
ggcgaugccuucauucaga

SEQ ID NO: 853325 - RNA, 19 nt, Homo sapiens
  misc_RNA (1)...(19): siRNA sense strand
gaacuacacagccuacuac

SEQ ID NO: 853326 - RNA, 19 nt, Homo sapiens
  misc_RNA (1)...(19): siRNA sense strand
ucaaagagcccagcaguca

SEQ ID NO: 853327 - RNA, 19 nt, Homo sapiens
  misc_RNA (1)...(19): siRNA sense strand
cgaagagaauuccauaugc

SEQ ID NO: 853328 - RNA, 19 nt, Homo sapiens
  misc_RNA (1)...(19): siRNA sense strand
cacuagagguggcucguuu

SEQ ID NO: 853329 - RNA, 19 nt, Homo sapiens
  misc_RNA (1)...(19): siRNA sense strand
ggaagucaagacaauggua

SEQ ID NO: 853330 - RNA, 19 nt, Homo sapiens
  misc_RNA (1)...(19): siRNA sense strand
acaagggcaugcuggguaa

SEQ ID NO: 853331 - RNA, 19 nt, Homo sapiens
  misc_RNA (1)...(19): siRNA sense strand
gcgauacauugaacucuuc

SEQ ID NO: 853332 - RNA, 19 nt, Homo sapiens
  misc_RNA (1)...(19): siRNA sense strand
cgacuuaauccuccuaguu

SEQ ID NO: 853333 - RNA, 19 nt, Homo sapiens
  misc_RNA (1)...(19): siRNA sense strand
gguaagcgauacauugaac

SEQ ID NO: 853334 - RNA, 19 nt, Homo sapiens
  misc_RNA (1)...(19): siRNA sense strand
guuuaggacuggagacaga

SEQ ID NO: 853335 - RNA, 19 nt, Homo sapiens
  misc_RNA (1)...(19): siRNA sense strand
ugauaaagcagaaauacga

SEQ ID NO: 853336 - RNA, 19 nt, Homo sapiens
  misc_RNA (1)...(19): siRNA sense strand
ggagacggcagcucuauac

SEQ ID NO: 853337 - RNA, 19 nt, Homo sapiens
  misc_RNA (1)...(19): siRNA sense strand
ccaaggaauggguguguuu

SEQ ID NO: 853338 - RNA, 19 nt, Homo sapiens
  misc_RNA (1)...(19): siRNA sense strand
ccacagaggaugacuuugg

SEQ ID NO: 853339 - RNA, 19 nt, Homo sapiens
  misc_RNA (1)...(19): siRNA sense strand
ccacaugggcguccgcuau

SEQ ID NO: 853340 - RNA, 19 nt, Homo sapiens
  misc_RNA (1)...(19): siRNA sense strand
ggaccuagcgcugcagaga

SEQ ID NO: 853341 - RNA, 19 nt, Homo sapiens
  misc_RNA (1)...(19): siRNA sense strand
uauccuccaucuacucaaa

SEQ ID NO: 853342 - RNA, 19 nt, Homo sapiens
  misc_RNA (1)...(19): siRNA sense strand
ggacugggagggacugugu

SEQ ID NO: 853343 - RNA, 19 nt, Homo sapiens
  misc_RNA (1)...(19): siRNA sense strand
ggaauggguguguuuguag

SEQ ID NO: 853344 - RNA, 19 nt, Homo sapiens
  misc_RNA (1)...(19): siRNA sense strand
aggaauggguguguuugua

SEQ ID NO: 853345 - RNA, 19 nt, Homo sapiens
  misc_RNA (1)...(19): siRNA sense strand
agacaaugguagcuguuau

SEQ ID NO: 853346 - RNA, 19 nt, Homo sapiens
  misc_RNA (1)...(19): siRNA sense strand
gcaugcagggugucccaua

SEQ ID NO: 853347 - RNA, 19 nt, Homo sapiens
  misc_RNA (1)...(19): siRNA sense strand
uacaugcucugcacugaug

SEQ ID NO: 853348 - RNA, 19 nt, Homo sapiens
  misc_RNA (1)...(19): siRNA sense strand
ucuaugaccuccgaagaga

SEQ ID NO: 853349 - RNA, 19 nt, Homo sapiens
  misc_RNA (1)...(19): siRNA sense strand
gaucacuggucguccucuu

SEQ ID NO: 853350 - RNA, 19 nt, Homo sapiens
  misc_RNA (1)...(19): siRNA sense strand
ccgaagagaauuccauaug

SEQ ID NO: 853351 - RNA, 19 nt, Homo sapiens
  misc_RNA (1)...(19): siRNA sense strand
gaacggggauguggcuuug

SEQ ID NO: 853352 - RNA, 19 nt, Homo sapiens
  misc_RNA (1)...(19): siRNA sense strand
gcuguuauccuccaucuac

SEQ ID NO: 853353 - RNA, 19 nt, Homo sapiens
  misc_RNA (1)...(19): siRNA sense strand
cagagccgcuggacaaggu

SEQ ID NO: 853354 - RNA, 19 nt, Homo sapiens
  misc_RNA (1)...(19): siRNA sense strand
gcuacccgcugaugacuac

SEQ ID NO: 853355 - RNA, 19 nt, Homo sapiens
  misc_RNA (1)...(19): siRNA sense strand
gccauaagaaggugaugaa

SEQ ID NO: 853356 - RNA, 19 nt, Homo sapiens
  misc_RNA (1)...(19): siRNA sense strand
caccauggcacaggguuua

SEQ ID NO: 853357 - RNA, 19 nt, Homo sapiens
  misc_RNA (1)...(19): siRNA sense strand
gagcccagcagucaauugu

SEQ ID NO: 853358 - RNA, 19 nt, Homo sapiens
  misc_RNA (1)...(19): siRNA sense strand
gacauguucuucuccuucu

SEQ ID NO: 853359 - RNA, 19 nt, Homo sapiens
  misc_RNA (1)...(19): siRNA sense strand
gcgaugccuucauucagau

SEQ ID NO: 853360 - RNA, 19 nt, Homo sapiens
  misc_RNA (1)...(19): siRNA sense strand
uugaagacauccugagcuu

SEQ ID NO: 853361 - RNA, 19 nt, Homo sapiens
  misc_RNA (1)...(19): siRNA sense strand
cacaugggcguccgcuaua

SEQ ID NO: 853362 - RNA, 19 nt, Homo sapiens
  misc_RNA (1)...(19): siRNA sense strand
ugaacuacacagccuacua

SEQ ID NO: 853363 - RNA, 19 nt, Homo sapiens
  misc_RNA (1)...(19): siRNA sense strand
gcacaaaucgcugguucgu

SEQ ID NO: 853364 - RNA, 19 nt, Homo sapiens
  misc_RNA (1)...(19): siRNA sense strand
ucugggaagucaagacaau

SEQ ID NO: 853365 - RNA, 19 nt, Homo sapiens
  misc_RNA (1)...(19): siRNA sense strand
gcagucaauuguuuucgaa

SEQ ID NO: 853366 - RNA, 19 nt, Homo sapiens
  misc_RNA (1)...(19): siRNA sense strand
cuacacggccaccauugaa

SEQ ID NO: 853367 - RNA, 19 nt, Homo sapiens
  misc_RNA (1)...(19): siRNA sense strand
guggcucgcuucuucaaag

SEQ ID NO: 853368 - RNA, 19 nt, Homo sapiens
  misc_RNA (1)...(19): siRNA sense strand
caaagagcccagcagucaa

SEQ ID NO: 853369 - RNA, 19 nt, Homo sapiens
  misc_RNA (1)...(19): siRNA sense strand
aaagagcccagcagucaau

SEQ ID NO: 853370 - RNA, 19 nt, Homo sapiens
  misc_RNA (1)...(19): siRNA sense strand
cugaugugguggacaguga

SEQ ID NO: 853371 - RNA, 19 nt, Homo sapiens
  misc_RNA (1)...(19): siRNA sense strand
caagcugcccugccucuca

SEQ ID NO: 853372 - RNA, 19 nt, Homo sapiens
  misc_RNA (1)...(19): siRNA sense strand
acugugggcuaccucacua

SEQ ID NO: 853373 - RNA, 19 nt, Homo sapiens
  misc_RNA (1)...(19): siRNA sense strand
gccagccacucaacucuac

SEQ ID NO: 853374 - RNA, 19 nt, Homo sapiens
  misc_RNA (1)...(19): siRNA sense strand
gaggugauaaagcagaaau

SEQ ID NO: 853375 - RNA, 19 nt, Homo sapiens
  misc_RNA (1)...(19): siRNA sense strand
ccuacaugcucugcacuga

SEQ ID NO: 853376 - RNA, 19 nt, Homo sapiens
  misc_RNA (1)...(19): siRNA sense strand
gacaaugguagcuguuauc

SEQ ID NO: 853377 - RNA, 19 nt, Homo sapiens
  misc_RNA (1)...(19): siRNA sense strand
gaagugcagcaggucuuga

SEQ ID NO: 853378 - RNA, 19 nt, Homo sapiens
  misc_RNA (1)...(19): siRNA sense strand
uggguaagcgauacauuga

SEQ ID NO: 853379 - RNA, 19 nt, Homo sapiens
  misc_RNA (1)...(19): siRNA sense strand
gaggaguuuguaaagauug

SEQ ID NO: 853380 - RNA, 19 nt, Homo sapiens
  misc_RNA (1)...(19): siRNA sense strand
ccgaggugauaaagcagaa

SEQ ID NO: 853381 - RNA, 19 nt, Homo sapiens
  misc_RNA (1)...(19): siRNA sense strand
auauugagguguauaaagc

SEQ ID NO: 853382 - RNA, 19 nt, Homo sapiens
  misc_RNA (1)...(19): siRNA sense strand
caaggaauggguguguuug

SEQ ID NO: 853383 - RNA, 19 nt, Homo sapiens
  misc_RNA (1)...(19): siRNA sense strand
ugccacagaggaugacuuu

SEQ ID NO: 853384 - RNA, 19 nt, Homo sapiens
  misc_RNA (1)...(19): siRNA sense strand
gcucccaccucaguguugu

SEQ ID NO: 853385 - RNA, 19 nt, Homo sapiens
  misc_RNA (1)...(19): siRNA sense strand
ggugauaaagcagaaauac

SEQ ID NO: 853386 - RNA, 19 nt, Homo sapiens
  misc_RNA (1)...(19): siRNA sense strand
caagacaaugguagcuguu

SEQ ID NO: 853387 - RNA, 19 nt, Homo sapiens
  misc_RNA (1)...(19): siRNA sense strand
ccacuccuuccuacacuga

SEQ ID NO: 853388 - RNA, 19 nt, Homo sapiens
  misc_RNA (1)...(19): siRNA sense strand
cggcugguaugaaggaucu

SEQ ID NO: 853389 - RNA, 19 nt, Homo sapiens
  misc_RNA (1)...(19): siRNA sense strand
ggccagccacucaacucua

SEQ ID NO: 853390 - RNA, 19 nt, Homo sapiens
  misc_RNA (1)...(19): siRNA sense strand
cagaugccacagaggauga

SEQ ID NO: 853391 - RNA, 19 nt, Homo sapiens
  misc_RNA (1)...(19): siRNA sense strand
caacucuaccugaacuaca

SEQ ID NO: 853392 - RNA, 19 nt, Homo sapiens
  misc_RNA (1)...(19): siRNA sense strand
cggagacggcagcucuaua

SEQ ID NO: 853393 - RNA, 19 nt, Homo sapiens
  misc_RNA (1)...(19): siRNA sense strand
ggccaccauugaagacauc

SEQ ID NO: 853394 - RNA, 19 nt, Homo sapiens
  misc_RNA (1)...(19): siRNA sense strand
acacggccaccauugaaga

SEQ ID NO: 853395 - RNA, 19 nt, Homo sapiens
  misc_RNA (1)...(19): siRNA sense strand
aagacaaugguagcuguua

SEQ ID NO: 853396 - RNA, 19 nt, Homo sapiens
  misc_RNA (1)...(19): siRNA sense strand
cgaagcccgaggugauaaa

SEQ ID NO: 853397 - RNA, 19 nt, Homo sapiens
  misc_RNA (1)...(19): siRNA sense strand
caugcagggugucccauac

SEQ ID NO: 853398 - RNA, 19 nt, Homo sapiens
  misc_RNA (1)...(19): siRNA sense strand
ccuccuaguuuggcaagug

SEQ ID NO: 853399 - RNA, 19 nt, Homo sapiens
  misc_RNA (1)...(19): siRNA sense strand
gcaugcuggguaagcgaua

SEQ ID NO: 853400 - RNA, 19 nt, Homo sapiens
  misc_RNA (1)...(19): siRNA sense strand
caugggcguccgcuauauu

SEQ ID NO: 853401 - RNA, 19 nt, Homo sapiens
  misc_RNA (1)...(19): siRNA sense strand
gagacacaagcaccacaug

SEQ ID NO: 853402 - RNA, 19 nt, Homo sapiens
  misc_RNA (1)...(19): siRNA sense strand
uccgcuauauugaggugua

SEQ ID NO: 853403 - RNA, 19 nt, Homo sapiens
  misc_RNA (1)...(19): siRNA sense strand
uaugaccuccgaagagaau

SEQ ID NO: 853404 - RNA, 19 nt, Homo sapiens
  misc_RNA (1)...(19): siRNA sense strand
acuuaauccuccuaguuug

SEQ ID NO: 853405 - RNA, 19 nt, Homo sapiens
  misc_RNA (1)...(19): siRNA sense strand
cggacgagaccgacuuaau

SEQ ID NO: 853406 - RNA, 19 nt, Homo sapiens
  misc_RNA (1)...(19): siRNA sense strand
gaacacacaucuugguaug

SEQ ID NO: 853407 - RNA, 19 nt, Homo sapiens
  misc_RNA (1)...(19): siRNA sense strand
gagaaugugugucuacguu

SEQ ID NO: 853408 - RNA, 19 nt, Homo sapiens
  misc_RNA (1)...(19): siRNA sense strand
gagcauauuugcaaccaau

SEQ ID NO: 853409 - RNA, 19 nt, Homo sapiens
  misc_RNA (1)...(19): siRNA sense strand
gauguuagguugucuuugg

SEQ ID NO: 853410 - RNA, 19 nt, Homo sapiens
  misc_RNA (1)...(19): siRNA sense strand
gacaaguucucagcguuua

SEQ ID NO: 853411 - RNA, 19 nt, Homo sapiens
  misc_RNA (1)...(19): siRNA sense strand
gaaaugugcaauaccaauu

SEQ ID NO: 853412 - RNA, 19 nt, Homo sapiens
  misc_RNA (1)...(19): siRNA sense strand
gaaugugugucuacguuug

SEQ ID NO: 853413 - RNA, 19 nt, Homo sapiens
  misc_RNA (1)...(19): siRNA sense strand
ucacuggagccaucuauua

SEQ ID NO: 853414 - RNA, 19 nt, Homo sapiens
  misc_RNA (1)...(19): siRNA sense strand
ggagagaccuuuuccaguu

SEQ ID NO: 853415 - RNA, 19 nt, Homo sapiens
  misc_RNA (1)...(19): siRNA sense strand
ucucagcguuuaaaucuuu

SEQ ID NO: 853416 - RNA, 19 nt, Homo sapiens
  misc_RNA (1)...(19): siRNA sense strand
gaacuuaaaccggauuguu

SEQ ID NO: 853417 - RNA, 19 nt, Homo sapiens
  misc_RNA (1)...(19): siRNA sense strand
gaaaacaaaucuaggugaa

SEQ ID NO: 853418 - RNA, 19 nt, Homo sapiens
  misc_RNA (1)...(19): siRNA sense strand
aagaauggcuccagguuau

SEQ ID NO: 853419 - RNA, 19 nt, Homo sapiens
  misc_RNA (1)...(19): siRNA sense strand
auaacaaacugcagugaaa

SEQ ID NO: 853420 - RNA, 19 nt, Homo sapiens
  misc_RNA (1)...(19): siRNA sense strand
gcaaucaaguuguaaaaga

SEQ ID NO: 853421 - RNA, 19 nt, Homo sapiens
  misc_RNA (1)...(19): siRNA sense strand
ggaaagcugcauccaaguu

SEQ ID NO: 853422 - RNA, 19 nt, Homo sapiens
  misc_RNA (1)...(19): siRNA sense strand
aaacaaaucuaggugaaag

SEQ ID NO: 853423 - RNA, 19 nt, Homo sapiens
  misc_RNA (1)...(19): siRNA sense strand
uaaaccggauuguuguauu

SEQ ID NO: 853424 - RNA, 19 nt, Homo sapiens
  misc_RNA (1)...(19): siRNA sense strand
gguaucuucugccauuaaa

SEQ ID NO: 853425 - RNA, 19 nt, Homo sapiens
  misc_RNA (1)...(19): siRNA sense strand
caaccucaccuauguuuau

SEQ ID NO: 853426 - RNA, 19 nt, Homo sapiens
  misc_RNA (1)...(19): siRNA sense strand
gaaauuggaacacacaucu

SEQ ID NO: 853427 - RNA, 19 nt, Homo sapiens
  misc_RNA (1)...(19): siRNA sense strand
ucaaagaaauuggaacaca

SEQ ID NO: 853428 - RNA, 19 nt, Homo sapiens
  misc_RNA (1)...(19): siRNA sense strand
guacuuauacugccuaaag

SEQ ID NO: 853429 - RNA, 19 nt, Homo sapiens
  misc_RNA (1)...(19): siRNA sense strand
ggaguaacaguaauuggaa

SEQ ID NO: 853430 - RNA, 19 nt, Homo sapiens
  misc_RNA (1)...(19): siRNA sense strand
ggauacacgccaguacuua

SEQ ID NO: 853431 - RNA, 19 nt, Homo sapiens
  misc_RNA (1)...(19): siRNA sense strand
aaaccggauuguuguauug

SEQ ID NO: 853432 - RNA, 19 nt, Homo sapiens
  misc_RNA (1)...(19): siRNA sense strand
gaguaacaguaauuggaaa

SEQ ID NO: 853433 - RNA, 19 nt, Homo sapiens
  misc_RNA (1)...(19): siRNA sense strand
gccuaaagccaaagaauga

SEQ ID NO: 853434 - RNA, 19 nt, Homo sapiens
  misc_RNA (1)...(19): siRNA sense strand
ugcaguggcugaacuuaaa

SEQ ID NO: 853435 - RNA, 19 nt, Homo sapiens
  misc_RNA (1)...(19): siRNA sense strand
aaagaauggcuccagguua

SEQ ID NO: 853436 - RNA, 19 nt, Homo sapiens
  misc_RNA (1)...(19): siRNA sense strand
gagagaccuuuuccaguua

SEQ ID NO: 853437 - RNA, 19 nt, Homo sapiens
  misc_RNA (1)...(19): siRNA sense strand
gaaagcugcauccaaguuc

SEQ ID NO: 853438 - RNA, 19 nt, Homo sapiens
  misc_RNA (1)...(19): siRNA sense strand
gacaaccucaccuauguuu

SEQ ID NO: 853439 - RNA, 19 nt, Homo sapiens
  misc_RNA (1)...(19): siRNA sense strand
ccagccaacuucaaagaau

SEQ ID NO: 853440 - RNA, 19 nt, Homo sapiens
  misc_RNA (1)...(19): siRNA sense strand
ggagccaucuauuauguac

SEQ ID NO: 853441 - RNA, 19 nt, Homo sapiens
  misc_RNA (1)...(19): siRNA sense strand
ugugguaucuucugccauu

SEQ ID NO: 853442 - RNA, 19 nt, Homo sapiens
  misc_RNA (1)...(19): siRNA sense strand
guacagggacugcaaagca

SEQ ID NO: 853443 - RNA, 19 nt, Homo sapiens
  misc_RNA (1)...(19): siRNA sense strand
caaagaauggcuccagguu

SEQ ID NO: 853444 - RNA, 19 nt, Homo sapiens
  misc_RNA (1)...(19): siRNA sense strand
uauaucagcguucauaaug

SEQ ID NO: 853445 - RNA, 19 nt, Homo sapiens
  misc_RNA (1)...(19): siRNA sense strand
ugacuuuaccacagaauuu

SEQ ID NO: 853446 - RNA, 19 nt, Homo sapiens
  misc_RNA (1)...(19): siRNA sense strand
gguaugugcugugaguuau

SEQ ID NO: 853447 - RNA, 19 nt, Homo sapiens
  misc_RNA (1)...(19): siRNA sense strand
ugacaucgcacaagucugu

SEQ ID NO: 853448 - RNA, 19 nt, Homo sapiens
  misc_RNA (1)...(19): siRNA sense strand
acuaacagacacauucuua

SEQ ID NO: 853449 - RNA, 19 nt, Homo sapiens
  misc_RNA (1)...(19): siRNA sense strand
ggaaaugugcaauaccaau

SEQ ID NO: 853450 - RNA, 19 nt, Homo sapiens
  misc_RNA (1)...(19): siRNA sense strand
ugugacugaugaaguauuu

SEQ ID NO: 853451 - RNA, 19 nt, Homo sapiens
  misc_RNA (1)...(19): siRNA sense strand
gcaauaccagauaccguaa

SEQ ID NO: 853452 - RNA, 19 nt, Homo sapiens
  misc_RNA (1)...(19): siRNA sense strand
gaagucaaagaaauuggaa

SEQ ID NO: 853453 - RNA, 19 nt, Homo sapiens
  misc_RNA (1)...(19): siRNA sense strand
ccacagaauuuugggaaua

SEQ ID NO: 853454 - RNA, 19 nt, Homo sapiens
  misc_RNA (1)...(19): siRNA sense strand
ggaacacacaucuugguau

SEQ ID NO: 853455 - RNA, 19 nt, Homo sapiens
  misc_RNA (1)...(19): siRNA sense strand
caucaugaagucaaagaaa

SEQ ID NO: 853456 - RNA, 19 nt, Homo sapiens
  misc_RNA (1)...(19): siRNA sense strand
gggaguaacaguaauugga

SEQ ID NO: 853457 - RNA, 19 nt, Homo sapiens
  misc_RNA (1)...(19): siRNA sense strand
gucaagagcauauuugcaa

SEQ ID NO: 853458 - RNA, 19 nt, Homo sapiens
  misc_RNA (1)...(19): siRNA sense strand
uaagggaguaacaguaauu

SEQ ID NO: 853459 - RNA, 19 nt, Homo sapiens
  misc_RNA (1)...(19): siRNA sense strand
caaauuucagguucucaaa

SEQ ID NO: 853460 - RNA, 19 nt, Homo sapiens
  misc_RNA (1)...(19): siRNA sense strand
gagauguuagguugucuuu

SEQ ID NO: 853461 - RNA, 19 nt, Homo sapiens
  misc_RNA (1)...(19): siRNA sense strand
gauacacgccaguacuuau

SEQ ID NO: 853462 - RNA, 19 nt, Homo sapiens
  misc_RNA (1)...(19): siRNA sense strand
gcagagagugaccucaguu

SEQ ID NO: 853463 - RNA, 19 nt, Homo sapiens
  misc_RNA (1)...(19): siRNA sense strand
cauacaucaugaagucaaa

SEQ ID NO: 853464 - RNA, 19 nt, Homo sapiens
  misc_RNA (1)...(19): siRNA sense strand
gcagugaaaggacuaugga

SEQ ID NO: 853465 - RNA, 19 nt, Homo sapiens
  misc_RNA (1)...(19): siRNA sense strand
cagauaccguaaaccuuga

SEQ ID NO: 853466 - RNA, 19 nt, Homo sapiens
  misc_RNA (1)...(19): siRNA sense strand
cagccaacuucaaagaaug

SEQ ID NO: 853467 - RNA, 19 nt, Homo sapiens
  misc_RNA (1)...(19): siRNA sense strand
ccaguuauaucagcguuca

SEQ ID NO: 853468 - RNA, 19 nt, Homo sapiens
  misc_RNA (1)...(19): siRNA sense strand
uuacagaccagccaacuuc

SEQ ID NO: 853469 - RNA, 19 nt, Homo sapiens
  misc_RNA (1)...(19): siRNA sense strand
agagugaccucaguucugu

SEQ ID NO: 853470 - RNA, 19 nt, Homo sapiens
  misc_RNA (1)...(19): siRNA sense strand
ucaaaccauuggaugugaa

SEQ ID NO: 853471 - RNA, 19 nt, Homo sapiens
  misc_RNA (1)...(19): siRNA sense strand
gaccagccaacuucaaaga

SEQ ID NO: 853472 - RNA, 19 nt, Homo sapiens
  misc_RNA (1)...(19): siRNA sense strand
uauacugccuaaagccaaa

SEQ ID NO: 853473 - RNA, 19 nt, Homo sapiens
  misc_RNA (1)...(19): siRNA sense strand
caaguucucagcguuuaaa

SEQ ID NO: 853474 - RNA, 19 nt, Homo sapiens
  misc_RNA (1)...(19): siRNA sense strand
gagagugaccucaguucug

SEQ ID NO: 853475 - RNA, 19 nt, Homo sapiens
  misc_RNA (1)...(19): siRNA sense strand
guucucagcguuuaaaucu

SEQ ID NO: 853476 - RNA, 19 nt, Homo sapiens
  misc_RNA (1)...(19): siRNA sense strand
auacacgccaguacuuaua

SEQ ID NO: 853477 - RNA, 19 nt, Homo sapiens
  misc_RNA (1)...(19): siRNA sense strand
cauuaagggaguaacagua

SEQ ID NO: 853478 - RNA, 19 nt, Homo sapiens
  misc_RNA (1)...(19): siRNA sense strand
cuaacagacacauucuuaa

SEQ ID NO: 853479 - RNA, 19 nt, Homo sapiens
  misc_RNA (1)...(19): siRNA sense strand
cagaccagccaacuucaaa

SEQ ID NO: 853480 - RNA, 19 nt, Homo sapiens
  misc_RNA (1)...(19): siRNA sense strand
agacaaguucucagcguuu

SEQ ID NO: 853481 - RNA, 19 nt, Homo sapiens
  misc_RNA (1)...(19): siRNA sense strand
ugaaaggacuauggaucug

SEQ ID NO: 853482 - RNA, 19 nt, Homo sapiens
  misc_RNA (1)...(19): siRNA sense strand
uaccguaaaccuugaagaa

SEQ ID NO: 853483 - RNA, 19 nt, Homo sapiens
  misc_RNA (1)...(19): siRNA sense strand
cuggagccaucuauuaugu

SEQ ID NO: 853484 - RNA, 19 nt, Homo sapiens
  misc_RNA (1)...(19): siRNA sense strand
ccucaccuauguuuaugga

SEQ ID NO: 853485 - RNA, 19 nt, Homo sapiens
  misc_RNA (1)...(19): siRNA sense strand
agccaucuauuauguacaa

SEQ ID NO: 853486 - RNA, 19 nt, Homo sapiens
  misc_RNA (1)...(19): siRNA sense strand
uuacucugcuuucuucagu

SEQ ID NO: 853487 - RNA, 19 nt, Homo sapiens
  misc_RNA (1)...(19): siRNA sense strand
gauagcaaucaaguuguaa

SEQ ID NO: 853488 - RNA, 19 nt, Homo sapiens
  misc_RNA (1)...(19): siRNA sense strand
caaaccauuggaugugaaa

SEQ ID NO: 853489 - RNA, 19 nt, Homo sapiens
  misc_RNA (1)...(19): siRNA sense strand
gugaaaggacuauggaucu

SEQ ID NO: 853490 - RNA, 19 nt, Homo sapiens
  misc_RNA (1)...(19): siRNA sense strand
gaaaggggaagguuacaga

SEQ ID NO: 853491 - RNA, 19 nt, Homo sapiens
  misc_RNA (1)...(19): siRNA sense strand
caccuauguuuauggagaa

SEQ ID NO: 853492 - RNA, 19 nt, Homo sapiens
  misc_RNA (1)...(19): siRNA sense strand
augacaaccucaccuaugu

SEQ ID NO: 853493 - RNA, 19 nt, Homo sapiens
  misc_RNA (1)...(19): siRNA sense strand
ugguaugugcugugaguua

SEQ ID NO: 853494 - RNA, 19 nt, Homo sapiens
  misc_RNA (1)...(19): siRNA sense strand
ccggauuguuguauugaug

SEQ ID NO: 853495 - RNA, 19 nt, Homo sapiens
  misc_RNA (1)...(19): siRNA sense strand
guguggaauuucaggaaga

SEQ ID NO: 853496 - RNA, 19 nt, Homo sapiens
  misc_RNA (1)...(19): siRNA sense strand
ggauuguuguauugaugau

SEQ ID NO: 853497 - RNA, 19 nt, Homo sapiens
  misc_RNA (1)...(19): siRNA sense strand
guaugugcugugaguuaua

SEQ ID NO: 853498 - RNA, 19 nt, Homo sapiens
  misc_RNA (1)...(19): siRNA sense strand
gcuggagaaugugugucua

SEQ ID NO: 853499 - RNA, 19 nt, Homo sapiens
  misc_RNA (1)...(19): siRNA sense strand
uaugacaaccucaccuaug

SEQ ID NO: 853500 - RNA, 19 nt, Homo sapiens
  misc_RNA (1)...(19): siRNA sense strand
caggaagacagcugggaaa

SEQ ID NO: 853501 - RNA, 19 nt, Homo sapiens
  misc_RNA (1)...(19): siRNA sense strand
caugaagucaaagaaauug

SEQ ID NO: 853502 - RNA, 19 nt, Homo sapiens
  misc_RNA (1)...(19): siRNA sense strand
auuaagggaguaacaguaa

SEQ ID NO: 853503 - RNA, 19 nt, Homo sapiens
  misc_RNA (1)...(19): siRNA sense strand
uuaagggaguaacaguaau

SEQ ID NO: 853504 - RNA, 19 nt, Homo sapiens
  misc_RNA (1)...(19): siRNA sense strand
gugguaucuucugccauua

SEQ ID NO: 853505 - RNA, 19 nt, Homo sapiens
  misc_RNA (1)...(19): siRNA sense strand
acaagucugugugguaucu

SEQ ID NO: 853506 - RNA, 19 nt, Homo sapiens
  misc_RNA (1)...(19): siRNA sense strand
gaaaguaagugacaacuca

SEQ ID NO: 853507 - RNA, 19 nt, Homo sapiens
  misc_RNA (1)...(19): siRNA sense strand
gcacauugaugauaagauu

SEQ ID NO: 853508 - RNA, 19 nt, Homo sapiens
  misc_RNA (1)...(19): siRNA sense strand
gaacgugacugaaaacuua

SEQ ID NO: 853509 - RNA, 19 nt, Homo sapiens
  misc_RNA (1)...(19): siRNA sense strand
caagaaauauggaagugua

SEQ ID NO: 853510 - RNA, 19 nt, Homo sapiens
  misc_RNA (1)...(19): siRNA sense strand
gaaauaagaccgaguguca

SEQ ID NO: 853511 - RNA, 19 nt, Homo sapiens
  misc_RNA (1)...(19): siRNA sense strand
ggacuacaauccucaucua

SEQ ID NO: 853512 - RNA, 19 nt, Homo sapiens
  misc_RNA (1)...(19): siRNA sense strand
gcucagcaguugauggaua

SEQ ID NO: 853513 - RNA, 19 nt, Homo sapiens
  misc_RNA (1)...(19): siRNA sense strand
gcaagaauguuuguacugu

SEQ ID NO: 853514 - RNA, 19 nt, Homo sapiens
  misc_RNA (1)...(19): siRNA sense strand
ggauaccucuaagacauua

SEQ ID NO: 853515 - RNA, 19 nt, Homo sapiens
  misc_RNA (1)...(19): siRNA sense strand
gaaaaccccugcuuccuuu

SEQ ID NO: 853516 - RNA, 19 nt, Homo sapiens
  misc_RNA (1)...(19): siRNA sense strand
guaagugacaacucaaaua

SEQ ID NO: 853517 - RNA, 19 nt, Homo sapiens
  misc_RNA (1)...(19): siRNA sense strand
gcaauggccucuuucuuac

SEQ ID NO: 853518 - RNA, 19 nt, Homo sapiens
  misc_RNA (1)...(19): siRNA sense strand
cuugaugaguguaaaguua

SEQ ID NO: 853519 - RNA, 19 nt, Homo sapiens
  misc_RNA (1)...(19): siRNA sense strand
ggagaggaguacuguggaa

SEQ ID NO: 853520 - RNA, 19 nt, Homo sapiens
  misc_RNA (1)...(19): siRNA sense strand
gcucuaggaucaaggauag

SEQ ID NO: 853521 - RNA, 19 nt, Homo sapiens
  misc_RNA (1)...(19): siRNA sense strand
guacacaugagaucaguuu

SEQ ID NO: 853522 - RNA, 19 nt, Homo sapiens
  misc_RNA (1)...(19): siRNA sense strand
gacaagguccaaaccauaa

SEQ ID NO: 853523 - RNA, 19 nt, Homo sapiens
  misc_RNA (1)...(19): siRNA sense strand
gcauaugauuggacuacaa

SEQ ID NO: 853524 - RNA, 19 nt, Homo sapiens
  misc_RNA (1)...(19): siRNA sense strand
gaaaggcaguguguguuca

SEQ ID NO: 853525 - RNA, 19 nt, Homo sapiens
  misc_RNA (1)...(19): siRNA sense strand
ugcaauggccucuuucuua

SEQ ID NO: 853526 - RNA, 19 nt, Homo sapiens
  misc_RNA (1)...(19): siRNA sense strand
ggaugacagugaacaugaa

SEQ ID NO: 853527 - RNA, 19 nt, Homo sapiens
  misc_RNA (1)...(19): siRNA sense strand
uuacauugaucagcgaaua

SEQ ID NO: 853528 - RNA, 19 nt, Homo sapiens
  misc_RNA (1)...(19): siRNA sense strand
aaauaaaguugcucuccuu

SEQ ID NO: 853529 - RNA, 19 nt, Homo sapiens
  misc_RNA (1)...(19): siRNA sense strand
uaagauugcuuuguuacug

SEQ ID NO: 853530 - RNA, 19 nt, Homo sapiens
  misc_RNA (1)...(19): siRNA sense strand
caaagaaaguaagugacaa

SEQ ID NO: 853531 - RNA, 19 nt, Homo sapiens
  misc_RNA (1)...(19): siRNA sense strand
ugauggaggugaagaaauc

SEQ ID NO: 853532 - RNA, 19 nt, Homo sapiens
  misc_RNA (1)...(19): siRNA sense strand
gaauggaagagcaaucuau

SEQ ID NO: 853533 - RNA, 19 nt, Homo sapiens
  misc_RNA (1)...(19): siRNA sense strand
ugacaagguccaaaccaua

SEQ ID NO: 853534 - RNA, 19 nt, Homo sapiens
  misc_RNA (1)...(19): siRNA sense strand
gaaaccacaacgacaaaga

SEQ ID NO: 853535 - RNA, 19 nt, Homo sapiens
  misc_RNA (1)...(19): siRNA sense strand
gagaaaccacaacgacaaa

SEQ ID NO: 853536 - RNA, 19 nt, Homo sapiens
  misc_RNA (1)...(19): siRNA sense strand
uuaggaaccuuaaacaagu

SEQ ID NO: 853537 - RNA, 19 nt, Homo sapiens
  misc_RNA (1)...(19): siRNA sense strand
gggcaauucuggauacaag

SEQ ID NO: 853538 - RNA, 19 nt, Homo sapiens
  misc_RNA (1)...(19): siRNA sense strand
gauacaagcauaugauugg

SEQ ID NO: 853539 - RNA, 19 nt, Homo sapiens
  misc_RNA (1)...(19): siRNA sense strand
guagucaaguuaaucaucu

SEQ ID NO: 853540 - RNA, 19 nt, Homo sapiens
  misc_RNA (1)...(19): siRNA sense strand
ccacaacgacaaagaugaa

SEQ ID NO: 853541 - RNA, 19 nt, Homo sapiens
  misc_RNA (1)...(19): siRNA sense strand
ucuaagacauuaugacucu

SEQ ID NO: 853542 - RNA, 19 nt, Homo sapiens
  misc_RNA (1)...(19): siRNA sense strand
cauuaugacucuggagaaa

SEQ ID NO: 853543 - RNA, 19 nt, Homo sapiens
  misc_RNA (1)...(19): siRNA sense strand
gcaaauucuucaacaagcu

SEQ ID NO: 853544 - RNA, 19 nt, Homo sapiens
  misc_RNA (1)...(19): siRNA sense strand
aggagcacauugaugauaa

SEQ ID NO: 853545 - RNA, 19 nt, Homo sapiens
  misc_RNA (1)...(19): siRNA sense strand
ccaaagaaaguaagugaca

SEQ ID NO: 853546 - RNA, 19 nt, Homo sapiens
  misc_RNA (1)...(19): siRNA sense strand
ggauacaagcauaugauug

SEQ ID NO: 853547 - RNA, 19 nt, Homo sapiens
  misc_RNA (1)...(19): siRNA sense strand
gagcucagcaguugaugga

SEQ ID NO: 853548 - RNA, 19 nt, Homo sapiens
  misc_RNA (1)...(19): siRNA sense strand
uuaugacucuggagaaaga

SEQ ID NO: 853549 - RNA, 19 nt, Homo sapiens
  misc_RNA (1)...(19): siRNA sense strand
gaacgcauucuugguguug

SEQ ID NO: 853550 - RNA, 19 nt, Homo sapiens
  misc_RNA (1)...(19): siRNA sense strand
caagcauggugaacgcauu

SEQ ID NO: 853551 - RNA, 19 nt, Homo sapiens
  misc_RNA (1)...(19): siRNA sense strand
uggaagagcaaucuauuug

SEQ ID NO: 853552 - RNA, 19 nt, Homo sapiens
  misc_RNA (1)...(19): siRNA sense strand
caguguguguucaucagua

SEQ ID NO: 853553 - RNA, 19 nt, Homo sapiens
  misc_RNA (1)...(19): siRNA sense strand
guaaaguuaugccucaaaa

SEQ ID NO: 853554 - RNA, 19 nt, Homo sapiens
  misc_RNA (1)...(19): siRNA sense strand
ucaguaaaguugugguaca

SEQ ID NO: 853555 - RNA, 19 nt, Homo sapiens
  misc_RNA (1)...(19): siRNA sense strand
agugacaacucaaauauac

SEQ ID NO: 853556 - RNA, 19 nt, Homo sapiens
  misc_RNA (1)...(19): siRNA sense strand
cagaauuuauguagucaag

SEQ ID NO: 853557 - RNA, 19 nt, Homo sapiens
  misc_RNA (1)...(19): siRNA sense strand
acaauccucaucuaccuua

SEQ ID NO: 853558 - RNA, 19 nt, Homo sapiens
  misc_RNA (1)...(19): siRNA sense strand
ggaauggaagagcaaucua

SEQ ID NO: 853559 - RNA, 19 nt, Homo sapiens
  misc_RNA (1)...(19): siRNA sense strand
aaaaugcaauggccucuuu

SEQ ID NO: 853560 - RNA, 19 nt, Homo sapiens
  misc_RNA (1)...(19): siRNA sense strand
guucaucaguaaaguugug

SEQ ID NO: 853561 - RNA, 19 nt, Homo sapiens
  misc_RNA (1)...(19): siRNA sense strand
aacaagcucuccugcucua

SEQ ID NO: 853562 - RNA, 19 nt, Homo sapiens
  misc_RNA (1)...(19): siRNA sense strand
gggcaagaauguuuguacu

SEQ ID NO: 853563 - RNA, 19 nt, Homo sapiens
  misc_RNA (1)...(19): siRNA sense strand
ugggauaccucuaagacau

SEQ ID NO: 853564 - RNA, 19 nt, Homo sapiens
  misc_RNA (1)...(19): siRNA sense strand
gucaggaucuggugauuuu

SEQ ID NO: 853565 - RNA, 19 nt, Homo sapiens
  misc_RNA (1)...(19): siRNA sense strand
gaugacagugaacaugaaa

SEQ ID NO: 853566 - RNA, 19 nt, Homo sapiens
  misc_RNA (1)...(19): siRNA sense strand
cacacaugcuuguaaaaua

SEQ ID NO: 853567 - RNA, 19 nt, Homo sapiens
  misc_RNA (1)...(19): siRNA sense strand
ggagcacauugaugauaag

SEQ ID NO: 853568 - RNA, 19 nt, Homo sapiens
  misc_RNA (1)...(19): siRNA sense strand
gaucagcgaauacaugaac

SEQ ID NO: 853569 - RNA, 19 nt, Homo sapiens
  misc_RNA (1)...(19): siRNA sense strand
caaaaccauuccuuucuug

SEQ ID NO: 853570 - RNA, 19 nt, Homo sapiens
  misc_RNA (1)...(19): siRNA sense strand
caagcuugaugaguguaaa

SEQ ID NO: 853571 - RNA, 19 nt, Homo sapiens
  misc_RNA (1)...(19): siRNA sense strand
ccacugggauaccucuaag

SEQ ID NO: 853572 - RNA, 19 nt, Homo sapiens
  misc_RNA (1)...(19): siRNA sense strand
gauaagauugcuuuguuac

SEQ ID NO: 853573 - RNA, 19 nt, Homo sapiens
  misc_RNA (1)...(19): siRNA sense strand
caggagcacauugaugaua

SEQ ID NO: 853574 - RNA, 19 nt, Homo sapiens
  misc_RNA (1)...(19): siRNA sense strand
uaccaaagaaaguaaguga

SEQ ID NO: 853575 - RNA, 19 nt, Homo sapiens
  misc_RNA (1)...(19): siRNA sense strand
cgaaaggcaguguguguuc

SEQ ID NO: 853576 - RNA, 19 nt, Homo sapiens
  misc_RNA (1)...(19): siRNA sense strand
gggauaccucuaagacauu

SEQ ID NO: 853577 - RNA, 19 nt, Homo sapiens
  misc_RNA (1)...(19): siRNA sense strand
gaugauaagauugcuuugu

SEQ ID NO: 853578 - RNA, 19 nt, Homo sapiens
  misc_RNA (1)...(19): siRNA sense strand
gcaagaaauauggaagugu

SEQ ID NO: 853579 - RNA, 19 nt, Homo sapiens
  misc_RNA (1)...(19): siRNA sense strand
agagaaaccacaacgacaa

SEQ ID NO: 853580 - RNA, 19 nt, Homo sapiens
  misc_RNA (1)...(19): siRNA sense strand
caucugggaacgugacuga

SEQ ID NO: 853581 - RNA, 19 nt, Homo sapiens
  misc_RNA (1)...(19): siRNA sense strand
ggucaggaucuggugauuu

SEQ ID NO: 853582 - RNA, 19 nt, Homo sapiens
  misc_RNA (1)...(19): siRNA sense strand
caucaguaaaguuguggua

SEQ ID NO: 853583 - RNA, 19 nt, Homo sapiens
  misc_RNA (1)...(19): siRNA sense strand
uccaggagcacauugauga

SEQ ID NO: 853584 - RNA, 19 nt, Homo sapiens
  misc_RNA (1)...(19): siRNA sense strand
agaauucuaccaagcuuga

SEQ ID NO: 853585 - RNA, 19 nt, Homo sapiens
  misc_RNA (1)...(19): siRNA sense strand
agagaauucuaccaagcuu

SEQ ID NO: 853586 - RNA, 19 nt, Homo sapiens
  misc_RNA (1)...(19): siRNA sense strand
agaacuggauugacaucug

SEQ ID NO: 853587 - RNA, 19 nt, Homo sapiens
  misc_RNA (1)...(19): siRNA sense strand
gcaguugauggauaugguu

SEQ ID NO: 853588 - RNA, 19 nt, Homo sapiens
  misc_RNA (1)...(19): siRNA sense strand
uaagaccgagugucaggaa

SEQ ID NO: 853589 - RNA, 19 nt, Homo sapiens
  misc_RNA (1)...(19): siRNA sense strand
aaaccauuccuuucuugaa

SEQ ID NO: 853590 - RNA, 19 nt, Homo sapiens
  misc_RNA (1)...(19): siRNA sense strand
guggagagaauucuaccaa

SEQ ID NO: 853591 - RNA, 19 nt, Homo sapiens
  misc_RNA (1)...(19): siRNA sense strand
ugucagcagcggaauugua

SEQ ID NO: 853592 - RNA, 19 nt, Homo sapiens
  misc_RNA (1)...(19): siRNA sense strand
ggugucagcagcggaauug

SEQ ID NO: 853593 - RNA, 19 nt, Homo sapiens
  misc_RNA (1)...(19): siRNA sense strand
gcgaaaggcaguguguguu

SEQ ID NO: 853594 - RNA, 19 nt, Homo sapiens
  misc_RNA (1)...(19): siRNA sense strand
ucaaguuaaucaucuccau

SEQ ID NO: 853595 - RNA, 19 nt, Homo sapiens
  misc_RNA (1)...(19): siRNA sense strand
ugaugaguguaaaguuaug

SEQ ID NO: 853596 - RNA, 19 nt, Homo sapiens
  misc_RNA (1)...(19): siRNA sense strand
cuacaauccucaucuaccu

SEQ ID NO: 853597 - RNA, 19 nt, Homo sapiens
  misc_RNA (1)...(19): siRNA sense strand
gcaauucuggauacaagca

SEQ ID NO: 853598 - RNA, 19 nt, Homo sapiens
  misc_RNA (1)...(19): siRNA sense strand
cuccacacaugcuuguaaa

SEQ ID NO: 853599 - RNA, 19 nt, Homo sapiens
  misc_RNA (1)...(19): siRNA sense strand
gaggaguacuguggaacca

SEQ ID NO: 853600 - RNA, 19 nt, Homo sapiens
  misc_RNA (1)...(19): siRNA sense strand
ucaaaaccauuccuuucuu

SEQ ID NO: 853601 - RNA, 19 nt, Homo sapiens
  misc_RNA (1)...(19): siRNA sense strand
uaccaagcuugaugagugu

SEQ ID NO: 853602 - RNA, 19 nt, Homo sapiens
  misc_RNA (1)...(19): siRNA sense strand
gucagcagcggaauuguau

SEQ ID NO: 853603 - RNA, 19 nt, Homo sapiens
  misc_RNA (1)...(19): siRNA sense strand
caagguccaaaccauaaug

SEQ ID NO: 853604 - RNA, 19 nt, Homo sapiens
  misc_RNA (1)...(19): siRNA sense strand
gagagaauucuaccaagcu

SEQ ID NO: 853605 - RNA, 19 nt, Homo sapiens
  misc_RNA (1)...(19): siRNA sense strand
ugaacgcauucuugguguu

SEQ ID NO: 853606 - RNA, 19 nt, Homo sapiens
  misc_RNA (1)...(19): siRNA sense strand
gaagaucacuugguauauu

SEQ ID NO: 853607 - RNA, 19 nt, Homo sapiens
  misc_RNA (1)...(19): siRNA sense strand
aaacagcccuccuuaaauu

SEQ ID NO: 853608 - RNA, 19 nt, Homo sapiens
  misc_RNA (1)...(19): siRNA sense strand
gaaagaacauuggagcuau

SEQ ID NO: 853609 - RNA, 19 nt, Homo sapiens
  misc_RNA (1)...(19): siRNA sense strand
ccaugaagaucacuuggua

SEQ ID NO: 853610 - RNA, 19 nt, Homo sapiens
  misc_RNA (1)...(19): siRNA sense strand
gaagugaaagcaaaugauu

SEQ ID NO: 853611 - RNA, 19 nt, Homo sapiens
  misc_RNA (1)...(19): siRNA sense strand
gaaguguguuugcaaucua

SEQ ID NO: 853612 - RNA, 19 nt, Homo sapiens
  misc_RNA (1)...(19): siRNA sense strand
gcaaggagaaaucgauaaa

SEQ ID NO: 853613 - RNA, 19 nt, Homo sapiens
  misc_RNA (1)...(19): siRNA sense strand
caauggaagugaaagcaaa

SEQ ID NO: 853614 - RNA, 19 nt, Homo sapiens
  misc_RNA (1)...(19): siRNA sense strand
guaagggaaacucagauua

SEQ ID NO: 853615 - RNA, 19 nt, Homo sapiens
  misc_RNA (1)...(19): siRNA sense strand
agacaaaccuacaucuguu

SEQ ID NO: 853616 - RNA, 19 nt, Homo sapiens
  misc_RNA (1)...(19): siRNA sense strand
gaacauuggagcuaucaug

SEQ ID NO: 853617 - RNA, 19 nt, Homo sapiens
  misc_RNA (1)...(19): siRNA sense strand
gcagagucauagagacaaa

SEQ ID NO: 853618 - RNA, 19 nt, Homo sapiens
  misc_RNA (1)...(19): siRNA sense strand
gaaacucagauuaucauga

SEQ ID NO: 853619 - RNA, 19 nt, Homo sapiens
  misc_RNA (1)...(19): siRNA sense strand
gaggaucaauggaagugaa

SEQ ID NO: 853620 - RNA, 19 nt, Homo sapiens
  misc_RNA (1)...(19): siRNA sense strand
ucacucuccuccuuaaauu

SEQ ID NO: 853621 - RNA, 19 nt, Homo sapiens
  misc_RNA (1)...(19): siRNA sense strand
caguguagcuccucugguu

SEQ ID NO: 853622 - RNA, 19 nt, Homo sapiens
  misc_RNA (1)...(19): siRNA sense strand
ggaaguguguuugcaaucu

SEQ ID NO: 853623 - RNA, 19 nt, Homo sapiens
  misc_RNA (1)...(19): siRNA sense strand
aaaccacacuggaagauca

SEQ ID NO: 853624 - RNA, 19 nt, Homo sapiens
  misc_RNA (1)...(19): siRNA sense strand
aacacuaccugucaucuaa

SEQ ID NO: 853625 - RNA, 19 nt, Homo sapiens
  misc_RNA (1)...(19): siRNA sense strand
gagacaaaccuacaucugu

SEQ ID NO: 853626 - RNA, 19 nt, Homo sapiens
  misc_RNA (1)...(19): siRNA sense strand
uaagggaaacucagauuau

SEQ ID NO: 853627 - RNA, 19 nt, Homo sapiens
  misc_RNA (1)...(19): siRNA sense strand
uggaauacccgaaugauug

SEQ ID NO: 853628 - RNA, 19 nt, Homo sapiens
  misc_RNA (1)...(19): siRNA sense strand
ggagaaaucgauaaacuac

SEQ ID NO: 853629 - RNA, 19 nt, Homo sapiens
  misc_RNA (1)...(19): siRNA sense strand
gaagaucaacaaucaugga

SEQ ID NO: 853630 - RNA, 19 nt, Homo sapiens
  misc_RNA (1)...(19): siRNA sense strand
caagacaccgaaagaaaga

SEQ ID NO: 853631 - RNA, 19 nt, Homo sapiens
  misc_RNA (1)...(19): siRNA sense strand
cuacaucuguucucuuaag

SEQ ID NO: 853632 - RNA, 19 nt, Homo sapiens
  misc_RNA (1)...(19): siRNA sense strand
ugucagcacuuuaacuuca

SEQ ID NO: 853633 - RNA, 19 nt, Homo sapiens
  misc_RNA (1)...(19): siRNA sense strand
gcaauagugaucacauuca

SEQ ID NO: 853634 - RNA, 19 nt, Homo sapiens
  misc_RNA (1)...(19): siRNA sense strand
acuggaagaucaacaauca

SEQ ID NO: 853635 - RNA, 19 nt, Homo sapiens
  misc_RNA (1)...(19): siRNA sense strand
cuaaaggaaacauggauuu

SEQ ID NO: 853636 - RNA, 19 nt, Homo sapiens
  misc_RNA (1)...(19): siRNA sense strand
ggagcuaucaugucuggaa

SEQ ID NO: 853637 - RNA, 19 nt, Homo sapiens
  misc_RNA (1)...(19): siRNA sense strand
accuacaucuguucucuua

SEQ ID NO: 853638 - RNA, 19 nt, Homo sapiens
  misc_RNA (1)...(19): siRNA sense strand
cuuguagaaucauggaaua

SEQ ID NO: 853639 - RNA, 19 nt, Homo sapiens
  misc_RNA (1)...(19): siRNA sense strand
cggagaaacugagagcauu

SEQ ID NO: 853640 - RNA, 19 nt, Homo sapiens
  misc_RNA (1)...(19): siRNA sense strand
uaacacuaccugucaucua

SEQ ID NO: 853641 - RNA, 19 nt, Homo sapiens
  misc_RNA (1)...(19): siRNA sense strand
guauacacauuucuuugca

SEQ ID NO: 853642 - RNA, 19 nt, Homo sapiens
  misc_RNA (1)...(19): siRNA sense strand
ggaauacccgaaugauugu

SEQ ID NO: 853643 - RNA, 19 nt, Homo sapiens
  misc_RNA (1)...(19): siRNA sense strand
gaagugauucggagaaacu

SEQ ID NO: 853644 - RNA, 19 nt, Homo sapiens
  misc_RNA (1)...(19): siRNA sense strand
gaaacugagagcauugaau

SEQ ID NO: 853645 - RNA, 19 nt, Homo sapiens
  misc_RNA (1)...(19): siRNA sense strand
ccuauucacucuccuccuu

SEQ ID NO: 853646 - RNA, 19 nt, Homo sapiens
  misc_RNA (1)...(19): siRNA sense strand
ggagaaacugagagcauug

SEQ ID NO: 853647 - RNA, 19 nt, Homo sapiens
  misc_RNA (1)...(19): siRNA sense strand
caauagugaucacauucau

SEQ ID NO: 853648 - RNA, 19 nt, Homo sapiens
  misc_RNA (1)...(19): siRNA sense strand
aauaucacuuguuccauga

SEQ ID NO: 853649 - RNA, 19 nt, Homo sapiens
  misc_RNA (1)...(19): siRNA sense strand
gccggaauauuucaagaca

SEQ ID NO: 853650 - RNA, 19 nt, Homo sapiens
  misc_RNA (1)...(19): siRNA sense strand
agaaagaacauuggagcua

SEQ ID NO: 853651 - RNA, 19 nt, Homo sapiens
  misc_RNA (1)...(19): siRNA sense strand
ggaacaaacaucaaaaguu

SEQ ID NO: 853652 - RNA, 19 nt, Homo sapiens
  misc_RNA (1)...(19): siRNA sense strand
cauuggagcuaucaugucu

SEQ ID NO: 853653 - RNA, 19 nt, Homo sapiens
  misc_RNA (1)...(19): siRNA sense strand
uggcaauagugaucacauu

SEQ ID NO: 853654 - RNA, 19 nt, Homo sapiens
  misc_RNA (1)...(19): siRNA sense strand
aaggagaaaucgauaaacu

SEQ ID NO: 853655 - RNA, 19 nt, Homo sapiens
  misc_RNA (1)...(19): siRNA sense strand
gcuaucaugucuggaagug

SEQ ID NO: 853656 - RNA, 19 nt, Homo sapiens
  misc_RNA (1)...(19): siRNA sense strand
caggagaggaucaauggaa

SEQ ID NO: 853657 - RNA, 19 nt, Homo sapiens
  misc_RNA (1)...(19): siRNA sense strand
cauccucacuauccgcaaa

SEQ ID NO: 853658 - RNA, 19 nt, Homo sapiens
  misc_RNA (1)...(19): siRNA sense strand
ggaagugaaagcaaaugau

SEQ ID NO: 853659 - RNA, 19 nt, Homo sapiens
  misc_RNA (1)...(19): siRNA sense strand
ccucguguuugguuuguga

SEQ ID NO: 853660 - RNA, 19 nt, Homo sapiens
  misc_RNA (1)...(19): siRNA sense strand
gagaaacugagagcauuga

SEQ ID NO: 853661 - RNA, 19 nt, Homo sapiens
  misc_RNA (1)...(19): siRNA sense strand
cgaaagaaagaacauugga

SEQ ID NO: 853662 - RNA, 19 nt, Homo sapiens
  misc_RNA (1)...(19): siRNA sense strand
cagcccuccuuaaauuauu

SEQ ID NO: 853663 - RNA, 19 nt, Homo sapiens
  misc_RNA (1)...(19): siRNA sense strand
caccuugucagcacuuuaa

SEQ ID NO: 853664 - RNA, 19 nt, Homo sapiens
  misc_RNA (1)...(19): siRNA sense strand
gaaugugcagguucuuuca

SEQ ID NO: 853665 - RNA, 19 nt, Homo sapiens
  misc_RNA (1)...(19): siRNA sense strand
gcaccuggagauggauaua

SEQ ID NO: 853666 - RNA, 19 nt, Homo sapiens
  misc_RNA (1)...(19): siRNA sense strand
uauucacucuccuccuuaa

SEQ ID NO: 853667 - RNA, 19 nt, Homo sapiens
  misc_RNA (1)...(19): siRNA sense strand
ccgaaugauuguauacaca

SEQ ID NO: 853668 - RNA, 19 nt, Homo sapiens
  misc_RNA (1)...(19): siRNA sense strand
agaaaucgauaaacuacac

SEQ ID NO: 853669 - RNA, 19 nt, Homo sapiens
  misc_RNA (1)...(19): siRNA sense strand
ucaagacaccgaaagaaag

SEQ ID NO: 853670 - RNA, 19 nt, Homo sapiens
  misc_RNA (1)...(19): siRNA sense strand
gaggaagugauucggagaa

SEQ ID NO: 853671 - RNA, 19 nt, Homo sapiens
  misc_RNA (1)...(19): siRNA sense strand
augaagaucacuugguaua

SEQ ID NO: 853672 - RNA, 19 nt, Homo sapiens
  misc_RNA (1)...(19): siRNA sense strand
aaagaacauuggagcuauc

SEQ ID NO: 853673 - RNA, 19 nt, Homo sapiens
  misc_RNA (1)...(19): siRNA sense strand
cccaauuccagaacuauaa

SEQ ID NO: 853674 - RNA, 19 nt, Homo sapiens
  misc_RNA (1)...(19): siRNA sense strand
gggaaacucagauuaucau

SEQ ID NO: 853675 - RNA, 19 nt, Homo sapiens
  misc_RNA (1)...(19): siRNA sense strand
aauauaacacuaccuguca

SEQ ID NO: 853676 - RNA, 19 nt, Homo sapiens
  misc_RNA (1)...(19): siRNA sense strand
ccaguaagggaaacucaga

SEQ ID NO: 853677 - RNA, 19 nt, Homo sapiens
  misc_RNA (1)...(19): siRNA sense strand
ggaagugauucggagaaac

SEQ ID NO: 853678 - RNA, 19 nt, Homo sapiens
  misc_RNA (1)...(19): siRNA sense strand
aaaccuacaucuguucucu

SEQ ID NO: 853679 - RNA, 19 nt, Homo sapiens
  misc_RNA (1)...(19): siRNA sense strand
guuugugagucuaaaggaa

SEQ ID NO: 853680 - RNA, 19 nt, Homo sapiens
  misc_RNA (1)...(19): siRNA sense strand
aagggaaacucagauuauc

SEQ ID NO: 853681 - RNA, 19 nt, Homo sapiens
  misc_RNA (1)...(19): siRNA sense strand
caaaaguggcagagucaua

SEQ ID NO: 853682 - RNA, 19 nt, Homo sapiens
  misc_RNA (1)...(19): siRNA sense strand
aagcaaggagaaaucgaua

SEQ ID NO: 853683 - RNA, 19 nt, Homo sapiens
  misc_RNA (1)...(19): siRNA sense strand
caagcaaggagaaaucgau

SEQ ID NO: 853684 - RNA, 19 nt, Homo sapiens
  misc_RNA (1)...(19): siRNA sense strand
gagaggaucaauggaagug

SEQ ID NO: 853685 - RNA, 19 nt, Homo sapiens
  misc_RNA (1)...(19): siRNA sense strand
aaguguguuugcaaucuaa

SEQ ID NO: 853686 - RNA, 19 nt, Homo sapiens
  misc_RNA (1)...(19): siRNA sense strand
guucuuaucaggagaggau

SEQ ID NO: 853687 - RNA, 19 nt, Homo sapiens
  misc_RNA (1)...(19): siRNA sense strand
accuggagauggauauaaa

SEQ ID NO: 853688 - RNA, 19 nt, Homo sapiens
  misc_RNA (1)...(19): siRNA sense strand
uggaagaucaacaaucaug

SEQ ID NO: 853689 - RNA, 19 nt, Homo sapiens
  misc_RNA (1)...(19): siRNA sense strand
ggcaauagugaucacauuc

SEQ ID NO: 853690 - RNA, 19 nt, Homo sapiens
  misc_RNA (1)...(19): siRNA sense strand
aggagaaaucgauaaacua

SEQ ID NO: 853691 - RNA, 19 nt, Homo sapiens
  misc_RNA (1)...(19): siRNA sense strand
aggaagugauucggagaaa

SEQ ID NO: 853692 - RNA, 19 nt, Homo sapiens
  misc_RNA (1)...(19): siRNA sense strand
ggaaacucagauuaucaug

SEQ ID NO: 853693 - RNA, 19 nt, Homo sapiens
  misc_RNA (1)...(19): siRNA sense strand
ggccagagaagagugcaaa

SEQ ID NO: 853694 - RNA, 19 nt, Homo sapiens
  misc_RNA (1)...(19): siRNA sense strand
aaaaugugcuccucguguu

SEQ ID NO: 853695 - RNA, 19 nt, Homo sapiens
  misc_RNA (1)...(19): siRNA sense strand
ugaaugugcagguucuuuc

SEQ ID NO: 853696 - RNA, 19 nt, Homo sapiens
  misc_RNA (1)...(19): siRNA sense strand
gacaaaccuacaucuguuc

SEQ ID NO: 853697 - RNA, 19 nt, Homo sapiens
  misc_RNA (1)...(19): siRNA sense strand
agucauagagacaaaccua

SEQ ID NO: 853698 - RNA, 19 nt, Homo sapiens
  misc_RNA (1)...(19): siRNA sense strand
gagccaagcaaggagaaau

SEQ ID NO: 853699 - RNA, 19 nt, Homo sapiens
  misc_RNA (1)...(19): siRNA sense strand
ggagaggaucaauggaagu

SEQ ID NO: 853700 - RNA, 19 nt, Homo sapiens
  misc_RNA (1)...(19): siRNA sense strand
uacaucuguucucuuaaga

SEQ ID NO: 853701 - RNA, 19 nt, Homo sapiens
  misc_RNA (1)...(19): siRNA sense strand
ucacuuguuccaugaagau

SEQ ID NO: 853702 - RNA, 19 nt, Homo sapiens
  misc_RNA (1)...(19): siRNA sense strand
gaauacccgaaugauugua

SEQ ID NO: 853703 - RNA, 19 nt, Homo sapiens
  misc_RNA (1)...(19): siRNA sense strand
gagaaaucgauaaacuaca

SEQ ID NO: 853704 - RNA, 19 nt, Homo sapiens
  misc_RNA (1)...(19): siRNA sense strand
uuggaggaauauaacacua

SEQ ID NO: 853705 - RNA, 19 nt, Homo sapiens
  misc_RNA (1)...(19): siRNA sense strand
ccacuuggaggaauauaac

SEQ ID NO: 853706 - RNA, 19 nt, Homo sapiens
  misc_RNA (1)...(19): siRNA sense strand
ggaaaucucucaaguucug

SEQ ID NO: 853707 - RNA, 19 nt, Homo sapiens
  misc_RNA (1)...(19): siRNA sense strand
agaagaaacuguccagaaa

SEQ ID NO: 853708 - RNA, 19 nt, Homo sapiens
  misc_RNA (1)...(19): siRNA sense strand
gcagaaaugucaaagagau

SEQ ID NO: 853709 - RNA, 19 nt, Homo sapiens
  misc_RNA (1)...(19): siRNA sense strand
gcaaaggugucugauggua

SEQ ID NO: 853710 - RNA, 19 nt, Homo sapiens
  misc_RNA (1)...(19): siRNA sense strand
cuaaagaagcgguuaaaua

SEQ ID NO: 853711 - RNA, 19 nt, Homo sapiens
  misc_RNA (1)...(19): siRNA sense strand
acagguaguuccucaaaua

SEQ ID NO: 853712 - RNA, 19 nt, Homo sapiens
  misc_RNA (1)...(19): siRNA sense strand
ggucaacuauguacagaaa

SEQ ID NO: 853713 - RNA, 19 nt, Homo sapiens
  misc_RNA (1)...(19): siRNA sense strand
gauagccauuccuuaaaua

SEQ ID NO: 853714 - RNA, 19 nt, Homo sapiens
  misc_RNA (1)...(19): siRNA sense strand
gcaaagccuucacgaaugu

SEQ ID NO: 853715 - RNA, 19 nt, Homo sapiens
  misc_RNA (1)...(19): siRNA sense strand
aagaacagauggaaacuaa

SEQ ID NO: 853716 - RNA, 19 nt, Homo sapiens
  misc_RNA (1)...(19): siRNA sense strand
ggugguauuuggaguauaa

SEQ ID NO: 853717 - RNA, 19 nt, Homo sapiens
  misc_RNA (1)...(19): siRNA sense strand
gauuugugcugucuaauga

SEQ ID NO: 853718 - RNA, 19 nt, Homo sapiens
  misc_RNA (1)...(19): siRNA sense strand
ugaaguagaugcucuuuua

SEQ ID NO: 853719 - RNA, 19 nt, Homo sapiens
  misc_RNA (1)...(19): siRNA sense strand
caaaggaaguuacaacagu

SEQ ID NO: 853720 - RNA, 19 nt, Homo sapiens
  misc_RNA (1)...(19): siRNA sense strand
gauggaaacuaaggaauug

SEQ ID NO: 853721 - RNA, 19 nt, Homo sapiens
  misc_RNA (1)...(19): siRNA sense strand
gaggaaagaauacaacaaa

SEQ ID NO: 853722 - RNA, 19 nt, Homo sapiens
  misc_RNA (1)...(19): siRNA sense strand
gaacaaaugacuaaugaag

SEQ ID NO: 853723 - RNA, 19 nt, Homo sapiens
  misc_RNA (1)...(19): siRNA sense strand
ggaaagaauacaacaaaug

SEQ ID NO: 853724 - RNA, 19 nt, Homo sapiens
  misc_RNA (1)...(19): siRNA sense strand
gcagcuaacugauggaauc

SEQ ID NO: 853725 - RNA, 19 nt, Homo sapiens
  misc_RNA (1)...(19): siRNA sense strand
agaagaauaugcccaagaa

SEQ ID NO: 853726 - RNA, 19 nt, Homo sapiens
  misc_RNA (1)...(19): siRNA sense strand
gcauuaaucuuucuauugc

SEQ ID NO: 853727 - RNA, 19 nt, Homo sapiens
  misc_RNA (1)...(19): siRNA sense strand
caaaccagcaguucagaua

SEQ ID NO: 853728 - RNA, 19 nt, Homo sapiens
  misc_RNA (1)...(19): siRNA sense strand
gcagauuaauuccuugguu

SEQ ID NO: 853729 - RNA, 19 nt, Homo sapiens
  misc_RNA (1)...(19): siRNA sense strand
gaacuuagagacagauaau

SEQ ID NO: 853730 - RNA, 19 nt, Homo sapiens
  misc_RNA (1)...(19): siRNA sense strand
uaacagaaaugccgaucga

SEQ ID NO: 853731 - RNA, 19 nt, Homo sapiens
  misc_RNA (1)...(19): siRNA sense strand
caucaaaccuaucuauaca

SEQ ID NO: 853732 - RNA, 19 nt, Homo sapiens
  misc_RNA (1)...(19): siRNA sense strand
gagccagaauuuguuauuu

SEQ ID NO: 853733 - RNA, 19 nt, Homo sapiens
  misc_RNA (1)...(19): siRNA sense strand
ccaaacaauucuaacgaaa

SEQ ID NO: 853734 - RNA, 19 nt, Homo sapiens
  misc_RNA (1)...(19): siRNA sense strand
uaacuggauucaagaagaa

SEQ ID NO: 853735 - RNA, 19 nt, Homo sapiens
  misc_RNA (1)...(19): siRNA sense strand
auagagagguggucaacua

SEQ ID NO: 853736 - RNA, 19 nt, Homo sapiens
  misc_RNA (1)...(19): siRNA sense strand
uuacugaucugagggauuu

SEQ ID NO: 853737 - RNA, 19 nt, Homo sapiens
  misc_RNA (1)...(19): siRNA sense strand
ccaaaugaauaaacaagug

SEQ ID NO: 853738 - RNA, 19 nt, Homo sapiens
  misc_RNA (1)...(19): siRNA sense strand
guacuggcauuacaagaug

SEQ ID NO: 853739 - RNA, 19 nt, Homo sapiens
  misc_RNA (1)...(19): siRNA sense strand
ucagauagccauuccuuaa

SEQ ID NO: 853740 - RNA, 19 nt, Homo sapiens
  misc_RNA (1)...(19): siRNA sense strand
ccacaagacagucaaguuu

SEQ ID NO: 853741 - RNA, 19 nt, Homo sapiens
  misc_RNA (1)...(19): siRNA sense strand
caacaaauaaugacacuuc

SEQ ID NO: 853742 - RNA, 19 nt, Homo sapiens
  misc_RNA (1)...(19): siRNA sense strand
gcuaacugauggaaucgua

SEQ ID NO: 853743 - RNA, 19 nt, Homo sapiens
  misc_RNA (1)...(19): siRNA sense strand
gaggaaccaucaaaccuau

SEQ ID NO: 853744 - RNA, 19 nt, Homo sapiens
  misc_RNA (1)...(19): siRNA sense strand
gagagguggucaacuaugu

SEQ ID NO: 853745 - RNA, 19 nt, Homo sapiens
  misc_RNA (1)...(19): siRNA sense strand
guuaggaggugaaguagau

SEQ ID NO: 853746 - RNA, 19 nt, Homo sapiens
  misc_RNA (1)...(19): siRNA sense strand
gcuggaagcuuguauuaac

SEQ ID NO: 853747 - RNA, 19 nt, Homo sapiens
  misc_RNA (1)...(19): siRNA sense strand
augaugagcuuacaacaaa

SEQ ID NO: 853748 - RNA, 19 nt, Homo sapiens
  misc_RNA (1)...(19): siRNA sense strand
gaaaacauucccagaguua

SEQ ID NO: 853749 - RNA, 19 nt, Homo sapiens
  misc_RNA (1)...(19): siRNA sense strand
gagcuuacaacaaauaaug

SEQ ID NO: 853750 - RNA, 19 nt, Homo sapiens
  misc_RNA (1)...(19): siRNA sense strand
cugaacaaaugacuaauga

SEQ ID NO: 853751 - RNA, 19 nt, Homo sapiens
  misc_RNA (1)...(19): siRNA sense strand
auacagaaguugagaggaa

SEQ ID NO: 853752 - RNA, 19 nt, Homo sapiens
  misc_RNA (1)...(19): siRNA sense strand
caaauaccauucccacaag

SEQ ID NO: 853753 - RNA, 19 nt, Homo sapiens
  misc_RNA (1)...(19): siRNA sense strand
uaaugacacuuccucagaa

SEQ ID NO: 853754 - RNA, 19 nt, Homo sapiens
  misc_RNA (1)...(19): siRNA sense strand
ggaaccugaucuuguaguu

SEQ ID NO: 853755 - RNA, 19 nt, Homo sapiens
  misc_RNA (1)...(19): siRNA sense strand
gaugagcuuacaacaaaua

SEQ ID NO: 853756 - RNA, 19 nt, Homo sapiens
  misc_RNA (1)...(19): siRNA sense strand
ucaaaccuaucuauacaug

SEQ ID NO: 853757 - RNA, 19 nt, Homo sapiens
  misc_RNA (1)...(19): siRNA sense strand
aagaaacuguccagaaaga

SEQ ID NO: 853758 - RNA, 19 nt, Homo sapiens
  misc_RNA (1)...(19): siRNA sense strand
uuuaugcucugcagauuaa

SEQ ID NO: 853759 - RNA, 19 nt, Homo sapiens
  misc_RNA (1)...(19): siRNA sense strand
gaaugugacuaguauugca

SEQ ID NO: 853760 - RNA, 19 nt, Homo sapiens
  misc_RNA (1)...(19): siRNA sense strand
cuauuugucuguucuaaug

SEQ ID NO: 853761 - RNA, 19 nt, Homo sapiens
  misc_RNA (1)...(19): siRNA sense strand
caucagagaauagcauuaa

SEQ ID NO: 853762 - RNA, 19 nt, Homo sapiens
  misc_RNA (1)...(19): siRNA sense strand
gaacagauggaaacuaagg

SEQ ID NO: 853763 - RNA, 19 nt, Homo sapiens
  misc_RNA (1)...(19): siRNA sense strand
uguucuagauccugcauua

SEQ ID NO: 853764 - RNA, 19 nt, Homo sapiens
  misc_RNA (1)...(19): siRNA sense strand
gaaauacuuacuagcuuga

SEQ ID NO: 853765 - RNA, 19 nt, Homo sapiens
  misc_RNA (1)...(19): siRNA sense strand
cuaaggaauugcaaccauu

SEQ ID NO: 853766 - RNA, 19 nt, Homo sapiens
  misc_RNA (1)...(19): siRNA sense strand
uguauuaacuggauucaag

SEQ ID NO: 853767 - RNA, 19 nt, Homo sapiens
  misc_RNA (1)...(19): siRNA sense strand
gaacaccuugagaaucuaa

SEQ ID NO: 853768 - RNA, 19 nt, Homo sapiens
  misc_RNA (1)...(19): siRNA sense strand
cuggaaaucucucaaguuc

SEQ ID NO: 853769 - RNA, 19 nt, Homo sapiens
  misc_RNA (1)...(19): siRNA sense strand
ucaaauaccauucccacaa

SEQ ID NO: 853770 - RNA, 19 nt, Homo sapiens
  misc_RNA (1)...(19): siRNA sense strand
gauggaaucguacaaauac

SEQ ID NO: 853771 - RNA, 19 nt, Homo sapiens
  misc_RNA (1)...(19): siRNA sense strand
aaaaggauccucuucaaua

SEQ ID NO: 853772 - RNA, 19 nt, Homo sapiens
  misc_RNA (1)...(19): siRNA sense strand
uuacaacagugaaagugaa

SEQ ID NO: 853773 - RNA, 19 nt, Homo sapiens
  misc_RNA (1)...(19): siRNA sense strand
ucuuguaguuucagucaua

SEQ ID NO: 853774 - RNA, 19 nt, Homo sapiens
  misc_RNA (1)...(19): siRNA sense strand
aaaugccgaucgaaguaua

SEQ ID NO: 853775 - RNA, 19 nt, Homo sapiens
  misc_RNA (1)...(19): siRNA sense strand
uuaacuggauucaagaaga

SEQ ID NO: 853776 - RNA, 19 nt, Homo sapiens
  misc_RNA (1)...(19): siRNA sense strand
uggaacaccuugagaaucu

SEQ ID NO: 853777 - RNA, 19 nt, Homo sapiens
  misc_RNA (1)...(19): siRNA sense strand
ugacuaguauugcauuaag

SEQ ID NO: 853778 - RNA, 19 nt, Homo sapiens
  misc_RNA (1)...(19): siRNA sense strand
gaccaaaacaggaguauuu

SEQ ID NO: 853779 - RNA, 19 nt, Homo sapiens
  misc_RNA (1)...(19): siRNA sense strand
caacaaaugaucuaguuac

SEQ ID NO: 853780 - RNA, 19 nt, Homo sapiens
  misc_RNA (1)...(19): siRNA sense strand
gaagaaacuguccagaaag

SEQ ID NO: 853781 - RNA, 19 nt, Homo sapiens
  misc_RNA (1)...(19): siRNA sense strand
gaaccugaucuuguaguuu

SEQ ID NO: 853782 - RNA, 19 nt, Homo sapiens
  misc_RNA (1)...(19): siRNA sense strand
gaaguugagaggaaagaau

SEQ ID NO: 853783 - RNA, 19 nt, Homo sapiens
  misc_RNA (1)...(19): siRNA sense strand
uggaaggguugcagaaaug

SEQ ID NO: 853784 - RNA, 19 nt, Homo sapiens
  misc_RNA (1)...(19): siRNA sense strand
ggaaguuacaacagugaaa

SEQ ID NO: 853785 - RNA, 19 nt, Homo sapiens
  misc_RNA (1)...(19): siRNA sense strand
agaaaugccgaucgaagua

SEQ ID NO: 853786 - RNA, 19 nt, Homo sapiens
  misc_RNA (1)...(19): siRNA sense strand
uagaagaaacuguccagaa

SEQ ID NO: 853787 - RNA, 19 nt, Homo sapiens
  misc_RNA (1)...(19): siRNA sense strand
gguguucucuuauugaaac

SEQ ID NO: 853788 - RNA, 19 nt, Homo sapiens
  misc_RNA (1)...(19): siRNA sense strand
ugauggaaucguacaaaua

SEQ ID NO: 853789 - RNA, 19 nt, Homo sapiens
  misc_RNA (1)...(19): siRNA sense strand
aagcaaagccuucacgaau

SEQ ID NO: 853790 - RNA, 19 nt, Homo sapiens
  misc_RNA (1)...(19): siRNA sense strand
gaagaauaugcccaagaaa

SEQ ID NO: 853791 - RNA, 19 nt, Homo sapiens
  misc_RNA (1)...(19): siRNA sense strand
ggaacaccuugagaaucua

SEQ ID NO: 853792 - RNA, 19 nt, Homo sapiens
  misc_RNA (1)...(19): siRNA sense strand
aaaggauccucuucaauac

SEQ ID NO: 853793 - RNA, 19 nt, Homo sapiens
  misc_RNA (1)...(19): siRNA sense strand
cagugaaagugaaagcauu

SEQ ID NO: 853794 - RNA, 19 nt, Homo sapiens
  misc_RNA (1)...(19): siRNA sense strand
agauagccauuccuuaaau

SEQ ID NO: 853795 - RNA, 19 nt, Homo sapiens
  misc_RNA (1)...(19): siRNA sense strand
acaaaugacuaaugaagac

SEQ ID NO: 853796 - RNA, 19 nt, Homo sapiens
  misc_RNA (1)...(19): siRNA sense strand
ccacagguaguuccucaaa

SEQ ID NO: 853797 - RNA, 19 nt, Homo sapiens
  misc_RNA (1)...(19): siRNA sense strand
guacuugcaagauuaauag

SEQ ID NO: 853798 - RNA, 19 nt, Homo sapiens
  misc_RNA (1)...(19): siRNA sense strand
aaccugaucuuguaguuuc

SEQ ID NO: 853799 - RNA, 19 nt, Homo sapiens
  misc_RNA (1)...(19): siRNA sense strand
gaaagcauuuauuguaacc

SEQ ID NO: 853800 - RNA, 19 nt, Homo sapiens
  misc_RNA (1)...(19): siRNA sense strand
cuauugccauggauuugua

SEQ ID NO: 853801 - RNA, 19 nt, Homo sapiens
  misc_RNA (1)...(19): siRNA sense strand
gaaaugccgaucgaaguau

SEQ ID NO: 853802 - RNA, 19 nt, Homo sapiens
  misc_RNA (1)...(19): siRNA sense strand
gaugaaauacuuacuagcu

SEQ ID NO: 853803 - RNA, 19 nt, Homo sapiens
  misc_RNA (1)...(19): siRNA sense strand
gaauugcaaccauugacuu

SEQ ID NO: 853804 - RNA, 19 nt, Homo sapiens
  misc_RNA (1)...(19): siRNA sense strand
gaaaugucaaagagaucua

SEQ ID NO: 853805 - RNA, 19 nt, Homo sapiens
  misc_RNA (1)...(19): siRNA sense strand
cagauagccauuccuuaaa

SEQ ID NO: 853806 - RNA, 19 nt, Homo sapiens
  misc_RNA (1)...(19): siRNA sense strand
ugaaagaacugaaggaaua

SEQ ID NO: 853807 - RNA, 19 nt, Homo sapiens
  misc_RNA (1)...(19): siRNA sense strand
gaugguaaccuuauuauca

SEQ ID NO: 853808 - RNA, 19 nt, Homo sapiens
  misc_RNA (1)...(19): siRNA sense strand
gaacaagaaggaaguggaa

SEQ ID NO: 853809 - RNA, 19 nt, Homo sapiens
  misc_RNA (1)...(19): siRNA sense strand
gaugaugguaaccuuauua

SEQ ID NO: 853810 - RNA, 19 nt, Homo sapiens
  misc_RNA (1)...(19): siRNA sense strand
gaaaagaaacugacuguga

SEQ ID NO: 853811 - RNA, 19 nt, Homo sapiens
  misc_RNA (1)...(19): siRNA sense strand
gagaccaacuuccuugaug

SEQ ID NO: 853812 - RNA, 19 nt, Homo sapiens
  misc_RNA (1)...(19): siRNA sense strand
caggagcugugaagcauaa

SEQ ID NO: 853813 - RNA, 19 nt, Homo sapiens
  misc_RNA (1)...(19): siRNA sense strand
gaacugaaggaauacagaa

SEQ ID NO: 853814 - RNA, 19 nt, Homo sapiens
  misc_RNA (1)...(19): siRNA sense strand
ucaagaagguuggaauuuc

SEQ ID NO: 853815 - RNA, 19 nt, Homo sapiens
  misc_RNA (1)...(19): siRNA sense strand
gcaagaagaaugggagaaa

SEQ ID NO: 853816 - RNA, 19 nt, Homo sapiens
  misc_RNA (1)...(19): siRNA sense strand
caacuuccuugaugagguu

SEQ ID NO: 853817 - RNA, 19 nt, Homo sapiens
  misc_RNA (1)...(19): siRNA sense strand
cugaaggaauacagaaaua

SEQ ID NO: 853818 - RNA, 19 nt, Homo sapiens
  misc_RNA (1)...(19): siRNA sense strand
gagaagaagaacugaaaga

SEQ ID NO: 853819 - RNA, 19 nt, Homo sapiens
  misc_RNA (1)...(19): siRNA sense strand
gcaacgaagagaagaagaa

SEQ ID NO: 853820 - RNA, 19 nt, Homo sapiens
  misc_RNA (1)...(19): siRNA sense strand
gaaagauugucuccuccau

SEQ ID NO: 853821 - RNA, 19 nt, Homo sapiens
  misc_RNA (1)...(19): siRNA sense strand
aagaagaacugaaagaacu

SEQ ID NO: 853822 - RNA, 19 nt, Homo sapiens
  misc_RNA (1)...(19): siRNA sense strand
ggaagcagcaggaguacga

SEQ ID NO: 853823 - RNA, 19 nt, Homo sapiens
  misc_RNA (1)...(19): siRNA sense strand
gaagagaagaagaacugaa

SEQ ID NO: 853824 - RNA, 19 nt, Homo sapiens
  misc_RNA (1)...(19): siRNA sense strand
ggaugaugguaaccuuauu

SEQ ID NO: 853825 - RNA, 19 nt, Homo sapiens
  misc_RNA (1)...(19): siRNA sense strand
gacccucgaucucuauaug

SEQ ID NO: 853826 - RNA, 19 nt, Homo sapiens
  misc_RNA (1)...(19): siRNA sense strand
gaagaagaacugaaagaac

SEQ ID NO: 853827 - RNA, 19 nt, Homo sapiens
  misc_RNA (1)...(19): siRNA sense strand
cagcaggaacuaauagaaa

SEQ ID NO: 853828 - RNA, 19 nt, Homo sapiens
  misc_RNA (1)...(19): siRNA sense strand
gagaguggcaacaguguga

SEQ ID NO: 853829 - RNA, 19 nt, Homo sapiens
  misc_RNA (1)...(19): siRNA sense strand
guccagaggagguuuauga

SEQ ID NO: 853830 - RNA, 19 nt, Homo sapiens
  misc_RNA (1)...(19): siRNA sense strand
aaaagaaacugacugugaa

SEQ ID NO: 853831 - RNA, 19 nt, Homo sapiens
  misc_RNA (1)...(19): siRNA sense strand
agaccaacuuccuugauga

SEQ ID NO: 853832 - RNA, 19 nt, Homo sapiens
  misc_RNA (1)...(19): siRNA sense strand
acaggaagcagcaggagua

SEQ ID NO: 853833 - RNA, 19 nt, Homo sapiens
  misc_RNA (1)...(19): siRNA sense strand
caagaagaaugggagaaag

SEQ ID NO: 853834 - RNA, 19 nt, Homo sapiens
  misc_RNA (1)...(19): siRNA sense strand
gaaggaauacagaaauaac

SEQ ID NO: 853835 - RNA, 19 nt, Homo sapiens
  misc_RNA (1)...(19): siRNA sense strand
gaagaaugggagaaaguuc

SEQ ID NO: 853836 - RNA, 19 nt, Homo sapiens
  misc_RNA (1)...(19): siRNA sense strand
gaagaacugaaagaacuga

SEQ ID NO: 853837 - RNA, 19 nt, Homo sapiens
  misc_RNA (1)...(19): siRNA sense strand
gcaagucucucggaaacac

SEQ ID NO: 853838 - RNA, 19 nt, Homo sapiens
  misc_RNA (1)...(19): siRNA sense strand
acagaaauaaccucaagaa

SEQ ID NO: 853839 - RNA, 19 nt, Homo sapiens
  misc_RNA (1)...(19): siRNA sense strand
aagagaagaagaacugaaa

SEQ ID NO: 853840 - RNA, 19 nt, Homo sapiens
  misc_RNA (1)...(19): siRNA sense strand
auacagaaauaaccucaag

SEQ ID NO: 853841 - RNA, 19 nt, Homo sapiens
  misc_RNA (1)...(19): siRNA sense strand
ugagccagaugacaagaau

SEQ ID NO: 853842 - RNA, 19 nt, Homo sapiens
  misc_RNA (1)...(19): siRNA sense strand
gaaaggcuacaggaacaga

SEQ ID NO: 853843 - RNA, 19 nt, Homo sapiens
  misc_RNA (1)...(19): siRNA sense strand
gaaggaaguggaaaagaaa

SEQ ID NO: 853844 - RNA, 19 nt, Homo sapiens
  misc_RNA (1)...(19): siRNA sense strand
agaagaagaacugaaagaa

SEQ ID NO: 853845 - RNA, 19 nt, Homo sapiens
  misc_RNA (1)...(19): siRNA sense strand
ggcaggagcugugaagcau

SEQ ID NO: 853846 - RNA, 19 nt, Homo sapiens
  misc_RNA (1)...(19): siRNA sense strand
agaaggaaguggaaaagaa

SEQ ID NO: 853847 - RNA, 19 nt, Homo sapiens
  misc_RNA (1)...(19): siRNA sense strand
gggaugaugguaaccuuau

SEQ ID NO: 853848 - RNA, 19 nt, Homo sapiens
  misc_RNA (1)...(19): siRNA sense strand
gauugucuccuccaucuuc

SEQ ID NO: 853849 - RNA, 19 nt, Homo sapiens
  misc_RNA (1)...(19): siRNA sense strand
aaaagagguuugugucuga

SEQ ID NO: 853850 - RNA, 19 nt, Homo sapiens
  misc_RNA (1)...(19): siRNA sense strand
cagaugacaagaaucaaga

SEQ ID NO: 853851 - RNA, 19 nt, Homo sapiens
  misc_RNA (1)...(19): siRNA sense strand
gcaggagcugugaagcaua

SEQ ID NO: 853852 - RNA, 19 nt, Homo sapiens
  misc_RNA (1)...(19): siRNA sense strand
cuauagaaaccaagaacaa

SEQ ID NO: 853853 - RNA, 19 nt, Homo sapiens
  misc_RNA (1)...(19): siRNA sense strand
uagaaaccaagaacaaguu

SEQ ID NO: 853854 - RNA, 19 nt, Homo sapiens
  misc_RNA (1)...(19): siRNA sense strand
caaugccaccggaaagauu

SEQ ID NO: 853855 - RNA, 19 nt, Homo sapiens
  misc_RNA (1)...(19): siRNA sense strand
gcaaaaggaggcaagaaga

SEQ ID NO: 853856 - RNA, 19 nt, Homo sapiens
  misc_RNA (1)...(19): siRNA sense strand
gcauaagagcucagagagu

SEQ ID NO: 853857 - RNA, 19 nt, Homo sapiens
  misc_RNA (1)...(19): siRNA sense strand
uuaugacccucgaucucua

SEQ ID NO: 853858 - RNA, 19 nt, Homo sapiens
  misc_RNA (1)...(19): siRNA sense strand
gaaagaacugaaggaauac

SEQ ID NO: 853859 - RNA, 19 nt, Homo sapiens
  misc_RNA (1)...(19): siRNA sense strand
gaaaagcaacgaagagaag

SEQ ID NO: 853860 - RNA, 19 nt, Homo sapiens
  misc_RNA (1)...(19): siRNA sense strand
gcagcaggaguacgaggaa

SEQ ID NO: 853861 - RNA, 19 nt, Homo sapiens
  misc_RNA (1)...(19): siRNA sense strand
cgacagcaggaacuaauag

SEQ ID NO: 853862 - RNA, 19 nt, Homo sapiens
  misc_RNA (1)...(19): siRNA sense strand
cugaagauccagaagaaug

SEQ ID NO: 853863 - RNA, 19 nt, Homo sapiens
  misc_RNA (1)...(19): siRNA sense strand
aggcuuagaugaagaugag

SEQ ID NO: 853864 - RNA, 19 nt, Homo sapiens
  misc_RNA (1)...(19): siRNA sense strand
ugaagauccagaagaaugu

SEQ ID NO: 853865 - RNA, 19 nt, Homo sapiens
  misc_RNA (1)...(19): siRNA sense strand
cagcgaaggcaccaucaau

SEQ ID NO: 853866 - RNA, 19 nt, Homo sapiens
  misc_RNA (1)...(19): siRNA sense strand
ugaagccuauagaaaccaa

SEQ ID NO: 853867 - RNA, 19 nt, Homo sapiens
  misc_RNA (1)...(19): siRNA sense strand
gguuggaauuucucaagag

SEQ ID NO: 853868 - RNA, 19 nt, Homo sapiens
  misc_RNA (1)...(19): siRNA sense strand
aaaggaggcaagaagaaug

SEQ ID NO: 853869 - RNA, 19 nt, Homo sapiens
  misc_RNA (1)...(19): siRNA sense strand
ggagaaaguucgaaaaccu

SEQ ID NO: 853870 - RNA, 19 nt, Homo sapiens
  misc_RNA (1)...(19): siRNA sense strand
ccucaagaagguuggaauu

SEQ ID NO: 853871 - RNA, 19 nt, Homo sapiens
  misc_RNA (1)...(19): siRNA sense strand
augaaaggcuacaggaaca

SEQ ID NO: 853872 - RNA, 19 nt, Homo sapiens
  misc_RNA (1)...(19): siRNA sense strand
aagcauaagagcucagaga

SEQ ID NO: 853873 - RNA, 19 nt, Homo sapiens
  misc_RNA (1)...(19): siRNA sense strand
accugaagauccagaagaa

SEQ ID NO: 853874 - RNA, 19 nt, Homo sapiens
  misc_RNA (1)...(19): siRNA sense strand
gcgaaggcaccaucaaugc

SEQ ID NO: 853875 - RNA, 19 nt, Homo sapiens
  misc_RNA (1)...(19): siRNA sense strand
cugcaagucucucggaaac

SEQ ID NO: 853876 - RNA, 19 nt, Homo sapiens
  misc_RNA (1)...(19): siRNA sense strand
gacagcaggaacuaauaga

SEQ ID NO: 853877 - RNA, 19 nt, Homo sapiens
  misc_RNA (1)...(19): siRNA sense strand
caaaaggaggcaagaagaa

SEQ ID NO: 853878 - RNA, 19 nt, Homo sapiens
  misc_RNA (1)...(19): siRNA sense strand
ugaggcagaacuagaugaa

SEQ ID NO: 853879 - RNA, 19 nt, Homo sapiens
  misc_RNA (1)...(19): siRNA sense strand
cccucgaucucuauaugaa

SEQ ID NO: 853880 - RNA, 19 nt, Homo sapiens
  misc_RNA (1)...(19): siRNA sense strand
agaagaaugggagaaaguu

SEQ ID NO: 853881 - RNA, 19 nt, Homo sapiens
  misc_RNA (1)...(19): siRNA sense strand
gaagguuggaauuucucaa

SEQ ID NO: 853882 - RNA, 19 nt, Homo sapiens
  misc_RNA (1)...(19): siRNA sense strand
ggagcugugaagcauaaga

SEQ ID NO: 853883 - RNA, 19 nt, Homo sapiens
  misc_RNA (1)...(19): siRNA sense strand
cggaaacaccucccugagu

SEQ ID NO: 853884 - RNA, 19 nt, Homo sapiens
  misc_RNA (1)...(19): siRNA sense strand
ccagaugacaagaaucaag

SEQ ID NO: 853885 - RNA, 19 nt, Homo sapiens
  misc_RNA (1)...(19): siRNA sense strand
uagaugaagaugagaccaa

SEQ ID NO: 853886 - RNA, 19 nt, Homo sapiens
  misc_RNA (1)...(19): siRNA sense strand
gaguggcaacagugugaaa

SEQ ID NO: 853887 - RNA, 19 nt, Homo sapiens
  misc_RNA (1)...(19): siRNA sense strand
acugugaagccuauagaaa

SEQ ID NO: 853888 - RNA, 19 nt, Homo sapiens
  misc_RNA (1)...(19): siRNA sense strand
ugacugugaagccuauaga

SEQ ID NO: 853889 - RNA, 19 nt, Homo sapiens
  misc_RNA (1)...(19): siRNA sense strand
ucgacagcaggaacuaaua

SEQ ID NO: 853890 - RNA, 19 nt, Homo sapiens
  misc_RNA (1)...(19): siRNA sense strand
caucaaugccaccggaaag

SEQ ID NO: 853891 - RNA, 19 nt, Homo sapiens
  misc_RNA (1)...(19): siRNA sense strand
gagcugugaagcauaagag

SEQ ID NO: 853892 - RNA, 19 nt, Homo sapiens
  misc_RNA (1)...(19): siRNA sense strand
cucaagagaacaagaagga

SEQ ID NO: 853893 - RNA, 19 nt, Homo sapiens
  misc_RNA (1)...(19): siRNA sense strand
acgaagagaagaagaacug

SEQ ID NO: 853894 - RNA, 19 nt, Homo sapiens
  misc_RNA (1)...(19): siRNA sense strand
gaaugaaacuucuugguau

SEQ ID NO: 853895 - RNA, 19 nt, Homo sapiens
  misc_RNA (1)...(19): siRNA sense strand
gaacaagccagaagaguuu

SEQ ID NO: 853896 - RNA, 19 nt, Homo sapiens
  misc_RNA (1)...(19): siRNA sense strand
uaaauuagauccagaagga

SEQ ID NO: 853897 - RNA, 19 nt, Homo sapiens
  misc_RNA (1)...(19): siRNA sense strand
ugucauaccuugugugaua

SEQ ID NO: 853898 - RNA, 19 nt, Homo sapiens
  misc_RNA (1)...(19): siRNA sense strand
ggaaugaaacuucuuggua

SEQ ID NO: 853899 - RNA, 19 nt, Homo sapiens
  misc_RNA (1)...(19): siRNA sense strand
ugaggaaacugcuaguauu

SEQ ID NO: 853900 - RNA, 19 nt, Homo sapiens
  misc_RNA (1)...(19): siRNA sense strand
guucagaaguuuaccagaa

SEQ ID NO: 853901 - RNA, 19 nt, Homo sapiens
  misc_RNA (1)...(19): siRNA sense strand
agagggaucugcauuagaa

SEQ ID NO: 853902 - RNA, 19 nt, Homo sapiens
  misc_RNA (1)...(19): siRNA sense strand
cuugauagauccuguauau

SEQ ID NO: 853903 - RNA, 19 nt, Homo sapiens
  misc_RNA (1)...(19): siRNA sense strand
gaagaucccaugcuacaga

SEQ ID NO: 853904 - RNA, 19 nt, Homo sapiens
  misc_RNA (1)...(19): siRNA sense strand
ucgaagagcuuggcuuuga

SEQ ID NO: 853905 - RNA, 19 nt, Homo sapiens
  misc_RNA (1)...(19): siRNA sense strand
acagaugacacuccuauua

SEQ ID NO: 853906 - RNA, 19 nt, Homo sapiens
  misc_RNA (1)...(19): siRNA sense strand
gauagagagugcucaggaa

SEQ ID NO: 853907 - RNA, 19 nt, Homo sapiens
  misc_RNA (1)...(19): siRNA sense strand
gcgauuucaugcauuaauu

SEQ ID NO: 853908 - RNA, 19 nt, Homo sapiens
  misc_RNA (1)...(19): siRNA sense strand
ugagcgauuucaugcauua

SEQ ID NO: 853909 - RNA, 19 nt, Homo sapiens
  misc_RNA (1)...(19): siRNA sense strand
gaggaaacugcuaguauuu

SEQ ID NO: 853910 - RNA, 19 nt, Homo sapiens
  misc_RNA (1)...(19): siRNA sense strand
gauagauccuguauaugga

SEQ ID NO: 853911 - RNA, 19 nt, Homo sapiens
  misc_RNA (1)...(19): siRNA sense strand
aaagaucguucagaaguuu

SEQ ID NO: 853912 - RNA, 19 nt, Homo sapiens
  misc_RNA (1)...(19): siRNA sense strand
uaacacuaauggaagcuuu

SEQ ID NO: 853913 - RNA, 19 nt, Homo sapiens
  misc_RNA (1)...(19): siRNA sense strand
ccaaggauauggcuuuagu

SEQ ID NO: 853914 - RNA, 19 nt, Homo sapiens
  misc_RNA (1)...(19): siRNA sense strand
cagaugacacuccuauuaa

SEQ ID NO: 853915 - RNA, 19 nt, Homo sapiens
  misc_RNA (1)...(19): siRNA sense strand
aauggaagcuuuaagauac

SEQ ID NO: 853916 - RNA, 19 nt, Homo sapiens
  misc_RNA (1)...(19): siRNA sense strand
agacucaccucaccguauu

SEQ ID NO: 853917 - RNA, 19 nt, Homo sapiens
  misc_RNA (1)...(19): siRNA sense strand
cauuggaccuuguuucaga

SEQ ID NO: 853918 - RNA, 19 nt, Homo sapiens
  misc_RNA (1)...(19): siRNA sense strand
ggaucauacugcuugguuu

SEQ ID NO: 853919 - RNA, 19 nt, Homo sapiens
  misc_RNA (1)...(19): siRNA sense strand
gaagauaauggauucauac

SEQ ID NO: 853920 - RNA, 19 nt, Homo sapiens
  misc_RNA (1)...(19): siRNA sense strand
ggacaugcuguuucuaaug

SEQ ID NO: 853921 - RNA, 19 nt, Homo sapiens
  misc_RNA (1)...(19): siRNA sense strand
ugaagaagcuccuguuuuc

SEQ ID NO: 853922 - RNA, 19 nt, Homo sapiens
  misc_RNA (1)...(19): siRNA sense strand
agaugacacuccuauuaaa

SEQ ID NO: 853923 - RNA, 19 nt, Homo sapiens
  misc_RNA (1)...(19): siRNA sense strand
acaagcagcaguaggauuu

SEQ ID NO: 853924 - RNA, 19 nt, Homo sapiens
  misc_RNA (1)...(19): siRNA sense strand
agagagugcucaggaauga

SEQ ID NO: 853925 - RNA, 19 nt, Homo sapiens
  misc_RNA (1)...(19): siRNA sense strand
ggaaagacaacugaggaaa

SEQ ID NO: 853926 - RNA, 19 nt, Homo sapiens
  misc_RNA (1)...(19): siRNA sense strand
auuaaacgcugucugcaaa

SEQ ID NO: 853927 - RNA, 19 nt, Homo sapiens
  misc_RNA (1)...(19): siRNA sense strand
cugcuugguuucaugguua

SEQ ID NO: 853928 - RNA, 19 nt, Homo sapiens
  misc_RNA (1)...(19): siRNA sense strand
caaaccaaauggccauaca

SEQ ID NO: 853929 - RNA, 19 nt, Homo sapiens
  misc_RNA (1)...(19): siRNA sense strand
gcagccaaaguuuaauuaa

SEQ ID NO: 853930 - RNA, 19 nt, Homo sapiens
  misc_RNA (1)...(19): siRNA sense strand
acgcaaggguuuguguuua

SEQ ID NO: 853931 - RNA, 19 nt, Homo sapiens
  misc_RNA (1)...(19): siRNA sense strand
gaucugcauuagaacaguu

SEQ ID NO: 853932 - RNA, 19 nt, Homo sapiens
  misc_RNA (1)...(19): siRNA sense strand
gguugguucuuacuugaaa

SEQ ID NO: 853933 - RNA, 19 nt, Homo sapiens
  misc_RNA (1)...(19): siRNA sense strand
gaaagacaacugaggaaac

SEQ ID NO: 853934 - RNA, 19 nt, Homo sapiens
  misc_RNA (1)...(19): siRNA sense strand
gaaacuucuugguauacau

SEQ ID NO: 853935 - RNA, 19 nt, Homo sapiens
  misc_RNA (1)...(19): siRNA sense strand
aaacgaaauugaagaugca

SEQ ID NO: 853936 - RNA, 19 nt, Homo sapiens
  misc_RNA (1)...(19): siRNA sense strand
ucagaaguuuaccagaauu

SEQ ID NO: 853937 - RNA, 19 nt, Homo sapiens
  misc_RNA (1)...(19): siRNA sense strand
gaaagcauuggaccuuguu

SEQ ID NO: 853938 - RNA, 19 nt, Homo sapiens
  misc_RNA (1)...(19): siRNA sense strand
gaugaaagcauuggaccuu

SEQ ID NO: 853939 - RNA, 19 nt, Homo sapiens
  misc_RNA (1)...(19): siRNA sense strand
gcucaggaaugaaacuucu

SEQ ID NO: 853940 - RNA, 19 nt, Homo sapiens
  misc_RNA (1)...(19): siRNA sense strand
cagaaguuuaccagaauua

SEQ ID NO: 853941 - RNA, 19 nt, Homo sapiens
  misc_RNA (1)...(19): siRNA sense strand
ggccauacauugaguuacu

SEQ ID NO: 853942 - RNA, 19 nt, Homo sapiens
  misc_RNA (1)...(19): siRNA sense strand
agaagggacugcaguugug

SEQ ID NO: 853943 - RNA, 19 nt, Homo sapiens
  misc_RNA (1)...(19): siRNA sense strand
ugauagauccuguauaugg

SEQ ID NO: 853944 - RNA, 19 nt, Homo sapiens
  misc_RNA (1)...(19): siRNA sense strand
uaagaggaaagacaacuga

SEQ ID NO: 853945 - RNA, 19 nt, Homo sapiens
  misc_RNA (1)...(19): siRNA sense strand
ccagugguccagaaucuuu

SEQ ID NO: 853946 - RNA, 19 nt, Homo sapiens
  misc_RNA (1)...(19): siRNA sense strand
uguaugggauggugauaga

SEQ ID NO: 853947 - RNA, 19 nt, Homo sapiens
  misc_RNA (1)...(19): siRNA sense strand
gggacaugcuguuucuaau

SEQ ID NO: 853948 - RNA, 19 nt, Homo sapiens
  misc_RNA (1)...(19): siRNA sense strand
ugaacaagcagcaguagga

SEQ ID NO: 853949 - RNA, 19 nt, Homo sapiens
  misc_RNA (1)...(19): siRNA sense strand
aaagacaacugaggaaacu

SEQ ID NO: 853950 - RNA, 19 nt, Homo sapiens
  misc_RNA (1)...(19): siRNA sense strand
gcucuccuucacuaaauua

SEQ ID NO: 853951 - RNA, 19 nt, Homo sapiens
  misc_RNA (1)...(19): siRNA sense strand
ugaaagcauuggaccuugu

SEQ ID NO: 853952 - RNA, 19 nt, Homo sapiens
  misc_RNA (1)...(19): siRNA sense strand
ucuggaagaugugaugaaa

SEQ ID NO: 853953 - RNA, 19 nt, Homo sapiens
  misc_RNA (1)...(19): siRNA sense strand
ggcagccaaaguuuaauua

SEQ ID NO: 853954 - RNA, 19 nt, Homo sapiens
  misc_RNA (1)...(19): siRNA sense strand
ugaccacucuggaucauac

SEQ ID NO: 853955 - RNA, 19 nt, Homo sapiens
  misc_RNA (1)...(19): siRNA sense strand
gcaaggguuuguguuuagu

SEQ ID NO: 853956 - RNA, 19 nt, Homo sapiens
  misc_RNA (1)...(19): siRNA sense strand
gaagaugugaugaaagcau

SEQ ID NO: 853957 - RNA, 19 nt, Homo sapiens
  misc_RNA (1)...(19): siRNA sense strand
cccagaagauaauggauuc

SEQ ID NO: 853958 - RNA, 19 nt, Homo sapiens
  misc_RNA (1)...(19): siRNA sense strand
gcuuuaagauacuguaagg

SEQ ID NO: 853959 - RNA, 19 nt, Homo sapiens
  misc_RNA (1)...(19): siRNA sense strand
gaucauacugcuugguuuc

SEQ ID NO: 853960 - RNA, 19 nt, Homo sapiens
  misc_RNA (1)...(19): siRNA sense strand
cauauuauugggcccauuu

SEQ ID NO: 853961 - RNA, 19 nt, Homo sapiens
  misc_RNA (1)...(19): siRNA sense strand
aagaugugaugaaagcauu

SEQ ID NO: 853962 - RNA, 19 nt, Homo sapiens
  misc_RNA (1)...(19): siRNA sense strand
gacgcaaggguuuguguuu

SEQ ID NO: 853963 - RNA, 19 nt, Homo sapiens
  misc_RNA (1)...(19): siRNA sense strand
gaacuccuuugucauaccu

SEQ ID NO: 853964 - RNA, 19 nt, Homo sapiens
  misc_RNA (1)...(19): siRNA sense strand
ggguuuguguuuagugaau

SEQ ID NO: 853965 - RNA, 19 nt, Homo sapiens
  misc_RNA (1)...(19): siRNA sense strand
agaacaagccagaagaguu

SEQ ID NO: 853966 - RNA, 19 nt, Homo sapiens
  misc_RNA (1)...(19): siRNA sense strand
gagacucaccucaccguau

SEQ ID NO: 853967 - RNA, 19 nt, Homo sapiens
  misc_RNA (1)...(19): siRNA sense strand
gacgggacaugcuguuucu

SEQ ID NO: 853968 - RNA, 19 nt, Homo sapiens
  misc_RNA (1)...(19): siRNA sense strand
aauugaagaugcaagugaa

SEQ ID NO: 853969 - RNA, 19 nt, Homo sapiens
  misc_RNA (1)...(19): siRNA sense strand
gaacaagcagcaguaggau

SEQ ID NO: 853970 - RNA, 19 nt, Homo sapiens
  misc_RNA (1)...(19): siRNA sense strand
gaagggacugcaguuguga

SEQ ID NO: 853971 - RNA, 19 nt, Homo sapiens
  misc_RNA (1)...(19): siRNA sense strand
uggaagaugugaugaaagc

SEQ ID NO: 853972 - RNA, 19 nt, Homo sapiens
  misc_RNA (1)...(19): siRNA sense strand
gggcuccagugguccagaa

SEQ ID NO: 853973 - RNA, 19 nt, Homo sapiens
  misc_RNA (1)...(19): siRNA sense strand
ggacgcaaggguuuguguu

SEQ ID NO: 853974 - RNA, 19 nt, Homo sapiens
  misc_RNA (1)...(19): siRNA sense strand
ccuacgacccagaagauaa

SEQ ID NO: 853975 - RNA, 19 nt, Homo sapiens
  misc_RNA (1)...(19): siRNA sense strand
gaagcuuuaagauacugua

SEQ ID NO: 853976 - RNA, 19 nt, Homo sapiens
  misc_RNA (1)...(19): siRNA sense strand
gaaauugaagaugcaagug

SEQ ID NO: 853977 - RNA, 19 nt, Homo sapiens
  misc_RNA (1)...(19): siRNA sense strand
cgggacaugcuguuucuaa

SEQ ID NO: 853978 - RNA, 19 nt, Homo sapiens
  misc_RNA (1)...(19): siRNA sense strand
guucaggcauuucuuuuga

SEQ ID NO: 853979 - RNA, 19 nt, Homo sapiens
  misc_RNA (1)...(19): siRNA sense strand
agacagaugacacuccuau

SEQ ID NO: 853980 - RNA, 19 nt, Homo sapiens
  misc_RNA (1)...(19): siRNA sense strand
cuugaaaucuccaaaauuc

SEQ ID NO: 853981 - RNA, 19 nt, Homo sapiens
  misc_RNA (1)...(19): siRNA sense strand
ugacaaagggcauugaaaa

SEQ ID NO: 853982 - RNA, 19 nt, Homo sapiens
  misc_RNA (1)...(19): siRNA sense strand
cgcaaggguuuguguuuag

SEQ ID NO: 853983 - RNA, 19 nt, Homo sapiens
  misc_RNA (1)...(19): siRNA sense strand
aagguugguucuuacuuga

SEQ ID NO: 853984 - RNA, 19 nt, Homo sapiens
  misc_RNA (1)...(19): siRNA sense strand
ugaaacuucuugguauaca

SEQ ID NO: 853985 - RNA, 19 nt, Homo sapiens
  misc_RNA (1)...(19): siRNA sense strand
guucagaggaagagcagaa

SEQ ID NO: 853986 - RNA, 19 nt, Homo sapiens
  misc_RNA (1)...(19): siRNA sense strand
agugaacccuugauagauc

SEQ ID NO: 853987 - RNA, 19 nt, Homo sapiens
  misc_RNA (1)...(19): siRNA sense strand
aaauugaagaugcaaguga

SEQ ID NO: 853988 - RNA, 19 nt, Homo sapiens
  misc_RNA (1)...(19): siRNA sense strand
caugcuguuucuaauguau

SEQ ID NO: 853989 - RNA, 19 nt, Homo sapiens
  misc_RNA (1)...(19): siRNA sense strand
guagaagggacugcaguug

SEQ ID NO: 853990 - RNA, 19 nt, Homo sapiens
  misc_RNA (1)...(19): siRNA sense strand
gcgggauuguucagaggaa

SEQ ID NO: 853991 - RNA, 19 nt, Homo sapiens
  misc_RNA (1)...(19): siRNA sense strand
acuaauggaagcuuuaaga

SEQ ID NO: 853992 - RNA, 19 nt, Homo sapiens
  misc_RNA (1)...(19): siRNA sense strand
agaucgcucuccuucacua

SEQ ID NO: 853993 - RNA, 19 nt, Homo sapiens
  misc_RNA (1)...(19): siRNA sense strand
cugcaguugugauggguuu

SEQ ID NO: 853994 - RNA, 19 nt, Homo sapiens
  misc_RNA (1)...(19): siRNA sense strand
gcaaggacacagucucaaa

SEQ ID NO: 853995 - RNA, 19 nt, Homo sapiens
  misc_RNA (1)...(19): siRNA sense strand
gccaagagcuaugcuaagu

SEQ ID NO: 853996 - RNA, 19 nt, Homo sapiens
  misc_RNA (1)...(19): siRNA sense strand
gcccagagccccuguuuua

SEQ ID NO: 853997 - RNA, 19 nt, Homo sapiens
  misc_RNA (1)...(19): siRNA sense strand
uuacggcaguuuccaguca

SEQ ID NO: 853998 - RNA, 19 nt, Homo sapiens
  misc_RNA (1)...(19): siRNA sense strand
acaggagaguggccacaga

SEQ ID NO: 853999 - RNA, 19 nt, Homo sapiens
  misc_RNA (1)...(19): siRNA sense strand
caaggacacagucucaaag

SEQ ID NO: 854000 - RNA, 19 nt, Homo sapiens
  misc_RNA (1)...(19): siRNA sense strand
ggugguuggacucccauuu

SEQ ID NO: 854001 - RNA, 19 nt, Homo sapiens
  misc_RNA (1)...(19): siRNA sense strand
cagagccccuguuuuaguu

SEQ ID NO: 854002 - RNA, 19 nt, Homo sapiens
  misc_RNA (1)...(19): siRNA sense strand
ucucaaaggagcaucagau

SEQ ID NO: 854003 - RNA, 19 nt, Homo sapiens
  misc_RNA (1)...(19): siRNA sense strand
gugguuggacucccauuuc

SEQ ID NO: 854004 - RNA, 19 nt, Homo sapiens
  misc_RNA (1)...(19): siRNA sense strand
gagccccuguuuuaguuuu

SEQ ID NO: 854005 - RNA, 19 nt, Homo sapiens
  misc_RNA (1)...(19): siRNA sense strand
gaagagggauuaacccaua

SEQ ID NO: 854006 - RNA, 19 nt, Homo sapiens
  misc_RNA (1)...(19): siRNA sense strand
gcaaauauaucaaccaguu

SEQ ID NO: 854007 - RNA, 19 nt, Homo sapiens
  misc_RNA (1)...(19): siRNA sense strand
ggaaagcgauuuauugaga

SEQ ID NO: 854008 - RNA, 19 nt, Homo sapiens
  misc_RNA (1)...(19): siRNA sense strand
gaggagaccuugugguuaa

SEQ ID NO: 854009 - RNA, 19 nt, Homo sapiens
  misc_RNA (1)...(19): siRNA sense strand
gagaauugauguuaaggua

SEQ ID NO: 854010 - RNA, 19 nt, Homo sapiens
  misc_RNA (1)...(19): siRNA sense strand
gaagaaaguucccaauagu

SEQ ID NO: 854011 - RNA, 19 nt, Homo sapiens
  misc_RNA (1)...(19): siRNA sense strand
cagauaaacuguugaagaa

SEQ ID NO: 854012 - RNA, 19 nt, Homo sapiens
  misc_RNA (1)...(19): siRNA sense strand
gagagaaguugacaaguga

SEQ ID NO: 854013 - RNA, 19 nt, Homo sapiens
  misc_RNA (1)...(19): siRNA sense strand
ggagagaaguugacaagug

SEQ ID NO: 854014 - RNA, 19 nt, Homo sapiens
  misc_RNA (1)...(19): siRNA sense strand
gcaagcagauaaacuguug

SEQ ID NO: 854015 - RNA, 19 nt, Homo sapiens
  misc_RNA (1)...(19): siRNA sense strand
gaggaagccuuuacucuug

SEQ ID NO: 854016 - RNA, 19 nt, Homo sapiens
  misc_RNA (1)...(19): siRNA sense strand
ggauugauauucuucguuu

SEQ ID NO: 854017 - RNA, 19 nt, Homo sapiens
  misc_RNA (1)...(19): siRNA sense strand
gcaauugguuuacagagaa

SEQ ID NO: 854018 - RNA, 19 nt, Homo sapiens
  misc_RNA (1)...(19): siRNA sense strand
gaccacaucuagcuaaauu

SEQ ID NO: 854019 - RNA, 19 nt, Homo sapiens
  misc_RNA (1)...(19): siRNA sense strand
gaaagauaccucagaauau

SEQ ID NO: 854020 - RNA, 19 nt, Homo sapiens
  misc_RNA (1)...(19): siRNA sense strand
gagaagaucccagaguuua

SEQ ID NO: 854021 - RNA, 19 nt, Homo sapiens
  misc_RNA (1)...(19): siRNA sense strand
ggagaagacugccgagaau

SEQ ID NO: 854022 - RNA, 19 nt, Homo sapiens
  misc_RNA (1)...(19): siRNA sense strand
uuacugggcuucagacuuu

SEQ ID NO: 854023 - RNA, 19 nt, Homo sapiens
  misc_RNA (1)...(19): siRNA sense strand
ccaaagaacucggagaaga

SEQ ID NO: 854024 - RNA, 19 nt, Homo sapiens
  misc_RNA (1)...(19): siRNA sense strand
gauagaagcugaggcugaa

SEQ ID NO: 854025 - RNA, 19 nt, Homo sapiens
  misc_RNA (1)...(19): siRNA sense strand
gaaagcgauuuauugagaa

SEQ ID NO: 854026 - RNA, 19 nt, Homo sapiens
  misc_RNA (1)...(19): siRNA sense strand
gcagauaaacuguugaaga

SEQ ID NO: 854027 - RNA, 19 nt, Homo sapiens
  misc_RNA (1)...(19): siRNA sense strand
ccagaaagauaccucagaa

SEQ ID NO: 854028 - RNA, 19 nt, Homo sapiens
  misc_RNA (1)...(19): siRNA sense strand
gaaauugaguguggucaga

SEQ ID NO: 854029 - RNA, 19 nt, Homo sapiens
  misc_RNA (1)...(19): siRNA sense strand
gaaauuaggagagaaguug

SEQ ID NO: 854030 - RNA, 19 nt, Homo sapiens
  misc_RNA (1)...(19): siRNA sense strand
ugaagaaaguucccaauag

SEQ ID NO: 854031 - RNA, 19 nt, Homo sapiens
  misc_RNA (1)...(19): siRNA sense strand
agaaagauaccucagaaua

SEQ ID NO: 854032 - RNA, 19 nt, Homo sapiens
  misc_RNA (1)...(19): siRNA sense strand
ggucagagaauugauguua

SEQ ID NO: 854033 - RNA, 19 nt, Homo sapiens
  misc_RNA (1)...(19): siRNA sense strand
gugaugagcuuaauuaugc

SEQ ID NO: 854034 - RNA, 19 nt, Homo sapiens
  misc_RNA (1)...(19): siRNA sense strand
ggugaccucuuagaaguua

SEQ ID NO: 854035 - RNA, 19 nt, Homo sapiens
  misc_RNA (1)...(19): siRNA sense strand
ggugaaagaggacaagaua

SEQ ID NO: 854036 - RNA, 19 nt, Homo sapiens
  misc_RNA (1)...(19): siRNA sense strand
uuaaagggcuugaaacaca

SEQ ID NO: 854037 - RNA, 19 nt, Homo sapiens
  misc_RNA (1)...(19): siRNA sense strand
gcauggcuauguacaagaa

SEQ ID NO: 854038 - RNA, 19 nt, Homo sapiens
  misc_RNA (1)...(19): siRNA sense strand
acagagaacuggaaagcaa

SEQ ID NO: 854039 - RNA, 19 nt, Homo sapiens
  misc_RNA (1)...(19): siRNA sense strand
gauaaacuguugaagaaac

SEQ ID NO: 854040 - RNA, 19 nt, Homo sapiens
  misc_RNA (1)...(19): siRNA sense strand
gaccggaguuaguuacaaa

SEQ ID NO: 854041 - RNA, 19 nt, Homo sapiens
  misc_RNA (1)...(19): siRNA sense strand
gguguuuguugaccucuua

SEQ ID NO: 854042 - RNA, 19 nt, Homo sapiens
  misc_RNA (1)...(19): siRNA sense strand
ugagaaggauauucaguau

SEQ ID NO: 854043 - RNA, 19 nt, Homo sapiens
  misc_RNA (1)...(19): siRNA sense strand
auaaaugcauggcuaugua

SEQ ID NO: 854044 - RNA, 19 nt, Homo sapiens
  misc_RNA (1)...(19): siRNA sense strand
uaacuucgcacucagguuu

SEQ ID NO: 854045 - RNA, 19 nt, Homo sapiens
  misc_RNA (1)...(19): siRNA sense strand
gaaagaggacaagauagaa

SEQ ID NO: 854046 - RNA, 19 nt, Homo sapiens
  misc_RNA (1)...(19): siRNA sense strand
ggaaggugcagagcaguua

SEQ ID NO: 854047 - RNA, 19 nt, Homo sapiens
  misc_RNA (1)...(19): siRNA sense strand
gaaggagaaguacauuauu

SEQ ID NO: 854048 - RNA, 19 nt, Homo sapiens
  misc_RNA (1)...(19): siRNA sense strand
ggugaacacucuuuagaag

SEQ ID NO: 854049 - RNA, 19 nt, Homo sapiens
  misc_RNA (1)...(19): siRNA sense strand
ccaccugucuuuaccaguu

SEQ ID NO: 854050 - RNA, 19 nt, Homo sapiens
  misc_RNA (1)...(19): siRNA sense strand
ccaaugcucaguucaaauu

SEQ ID NO: 854051 - RNA, 19 nt, Homo sapiens
  misc_RNA (1)...(19): siRNA sense strand
ugaacacucuuuagaagga

SEQ ID NO: 854052 - RNA, 19 nt, Homo sapiens
  misc_RNA (1)...(19): siRNA sense strand
gugaagaaaguucccaaua

SEQ ID NO: 854053 - RNA, 19 nt, Homo sapiens
  misc_RNA (1)...(19): siRNA sense strand
ggaggagaccuugugguua

SEQ ID NO: 854054 - RNA, 19 nt, Homo sapiens
  misc_RNA (1)...(19): siRNA sense strand
uaaagucaaugaaccuuag

SEQ ID NO: 854055 - RNA, 19 nt, Homo sapiens
  misc_RNA (1)...(19): siRNA sense strand
cuaagcauauccagcauga

SEQ ID NO: 854056 - RNA, 19 nt, Homo sapiens
  misc_RNA (1)...(19): siRNA sense strand
ugacuuauuucgauucugu

SEQ ID NO: 854057 - RNA, 19 nt, Homo sapiens
  misc_RNA (1)...(19): siRNA sense strand
gaaguugacaagugagauu

SEQ ID NO: 854058 - RNA, 19 nt, Homo sapiens
  misc_RNA (1)...(19): siRNA sense strand
gcauggcucuauauaagau

SEQ ID NO: 854059 - RNA, 19 nt, Homo sapiens
  misc_RNA (1)...(19): siRNA sense strand
gauucugucuuucgacuga

SEQ ID NO: 854060 - RNA, 19 nt, Homo sapiens
  misc_RNA (1)...(19): siRNA sense strand
cuacgaccauacaaacuaa

SEQ ID NO: 854061 - RNA, 19 nt, Homo sapiens
  misc_RNA (1)...(19): siRNA sense strand
ugaggcagcugugaagaaa

SEQ ID NO: 854062 - RNA, 19 nt, Homo sapiens
  misc_RNA (1)...(19): siRNA sense strand
gcacucacuucuggaaaug

SEQ ID NO: 854063 - RNA, 19 nt, Homo sapiens
  misc_RNA (1)...(19): siRNA sense strand
ugaaagaggacaagauaga

SEQ ID NO: 854064 - RNA, 19 nt, Homo sapiens
  misc_RNA (1)...(19): siRNA sense strand
ccaauguuguggaucauau

SEQ ID NO: 854065 - RNA, 19 nt, Homo sapiens
  misc_RNA (1)...(19): siRNA sense strand
ggcaauugguuuacagaga

SEQ ID NO: 854066 - RNA, 19 nt, Homo sapiens
  misc_RNA (1)...(19): siRNA sense strand
caggaaagcgauuuauuga

SEQ ID NO: 854067 - RNA, 19 nt, Homo sapiens
  misc_RNA (1)...(19): siRNA sense strand
ggauaacggaagaaucuaa

SEQ ID NO: 854068 - RNA, 19 nt, Homo sapiens
  misc_RNA (1)...(19): siRNA sense strand
uggcauggcucuauauaag

SEQ ID NO: 854069 - RNA, 19 nt, Homo sapiens
  misc_RNA (1)...(19): siRNA sense strand
ugaaacacaucuaauugca

SEQ ID NO: 854070 - RNA, 19 nt, Homo sapiens
  misc_RNA (1)...(19): siRNA sense strand
gcacaaguccguacugaac

SEQ ID NO: 854071 - RNA, 19 nt, Homo sapiens
  misc_RNA (1)...(19): siRNA sense strand
gcugugaaguuuauagaag

SEQ ID NO: 854072 - RNA, 19 nt, Homo sapiens
  misc_RNA (1)...(19): siRNA sense strand
gcaguucuaucugacuuau

SEQ ID NO: 854073 - RNA, 19 nt, Homo sapiens
  misc_RNA (1)...(19): siRNA sense strand
caucaugccaccugucuuu

SEQ ID NO: 854074 - RNA, 19 nt, Homo sapiens
  misc_RNA (1)...(19): siRNA sense strand
gggcuucagacuuuaauuu

SEQ ID NO: 854075 - RNA, 19 nt, Homo sapiens
  misc_RNA (1)...(19): siRNA sense strand
acgauuaucuugacaaugg

SEQ ID NO: 854076 - RNA, 19 nt, Homo sapiens
  misc_RNA (1)...(19): siRNA sense strand
gcuugaaacacaucuaauu

SEQ ID NO: 854077 - RNA, 19 nt, Homo sapiens
  misc_RNA (1)...(19): siRNA sense strand
aaagaaaccagcaucauca

SEQ ID NO: 854078 - RNA, 19 nt, Homo sapiens
  misc_RNA (1)...(19): siRNA sense strand
gaaaacacauccuacucuu

SEQ ID NO: 854079 - RNA, 19 nt, Homo sapiens
  misc_RNA (1)...(19): siRNA sense strand
gcagaaaguauaaagucaa

SEQ ID NO: 854080 - RNA, 19 nt, Homo sapiens
  misc_RNA (1)...(19): siRNA sense strand
caguuuagcagaaaguaua

SEQ ID NO: 854081 - RNA, 19 nt, Homo sapiens
  misc_RNA (1)...(19): siRNA sense strand
ucccagaguuuaucgcuuu

SEQ ID NO: 854082 - RNA, 19 nt, Homo sapiens
  misc_RNA (1)...(19): siRNA sense strand
gauaacggaagaaucuaaa

SEQ ID NO: 854083 - RNA, 19 nt, Homo sapiens
  misc_RNA (1)...(19): siRNA sense strand
aaggagaaguacauuauuc

SEQ ID NO: 854084 - RNA, 19 nt, Homo sapiens
  misc_RNA (1)...(19): siRNA sense strand
gcaauucagcaagcagaua

SEQ ID NO: 854085 - RNA, 19 nt, Homo sapiens
  misc_RNA (1)...(19): siRNA sense strand
guugagacuauuucuguua

SEQ ID NO: 854086 - RNA, 19 nt, Homo sapiens
  misc_RNA (1)...(19): siRNA sense strand
gagacaggaaagcgauuua

SEQ ID NO: 854087 - RNA, 19 nt, Homo sapiens
  misc_RNA (1)...(19): siRNA sense strand
caauucagcaagcagauaa

SEQ ID NO: 854088 - RNA, 19 nt, Homo sapiens
  misc_RNA (1)...(19): siRNA sense strand
gcgagacaacagagacuua

SEQ ID NO: 854089 - RNA, 19 nt, Homo sapiens
  misc_RNA (1)...(19): siRNA sense strand
ucagagaauugauguuaag

SEQ ID NO: 854090 - RNA, 19 nt, Homo sapiens
  misc_RNA (1)...(19): siRNA sense strand
gucagagaauugauguuaa

SEQ ID NO: 854091 - RNA, 19 nt, Homo sapiens
  misc_RNA (1)...(19): siRNA sense strand
acauaaggaucuucauugu

SEQ ID NO: 854092 - RNA, 19 nt, Homo sapiens
  misc_RNA (1)...(19): siRNA sense strand
guacugaacggaugcuguu

SEQ ID NO: 854093 - RNA, 19 nt, Homo sapiens
  misc_RNA (1)...(19): siRNA sense strand
ucaguuacuuggaguuguu

SEQ ID NO: 854094 - RNA, 19 nt, Homo sapiens
  misc_RNA (1)...(19): siRNA sense strand
guugaccucuuaccugcua

SEQ ID NO: 854095 - RNA, 19 nt, Homo sapiens
  misc_RNA (1)...(19): siRNA sense strand
guucgaaucuacuguaugc

SEQ ID NO: 854096 - RNA, 19 nt, Homo sapiens
  misc_RNA (1)...(19): siRNA sense strand
ggagguggcagcccuugaa

SEQ ID NO: 854097 - RNA, 19 nt, Homo sapiens
  misc_RNA (1)...(19): siRNA sense strand
acagggacguuucugaaga

SEQ ID NO: 854098 - RNA, 19 nt, Homo sapiens
  misc_RNA (1)...(19): siRNA sense strand
agaagaagaugacauucca

SEQ ID NO: 854099 - RNA, 19 nt, Homo sapiens
  misc_RNA (1)...(19): siRNA sense strand
ccgauaugcugaaucucua

SEQ ID NO: 854100 - RNA, 19 nt, Homo sapiens
  misc_RNA (1)...(19): siRNA sense strand
agaaggagaaguacauuau

SEQ ID NO: 854101 - RNA, 19 nt, Homo sapiens
  misc_RNA (1)...(19): siRNA sense strand
cauauuaaagggcuugaaa

SEQ ID NO: 854102 - RNA, 19 nt, Homo sapiens
  misc_RNA (1)...(19): siRNA sense strand
acaggaaagcgauuuauug

SEQ ID NO: 854103 - RNA, 19 nt, Homo sapiens
  misc_RNA (1)...(19): siRNA sense strand
gacaggaaagcgauuuauu

SEQ ID NO: 854104 - RNA, 19 nt, Homo sapiens
  misc_RNA (1)...(19): siRNA sense strand
gacccgauaugcugaaucu

SEQ ID NO: 854105 - RNA, 19 nt, Homo sapiens
  misc_RNA (1)...(19): siRNA sense strand
cagcaguugucacccauuu

SEQ ID NO: 854106 - RNA, 19 nt, Homo sapiens
  misc_RNA (1)...(19): siRNA sense strand
gcuccuaccugcaccucuu

SEQ ID NO: 854107 - RNA, 19 nt, Homo sapiens
  misc_RNA (1)...(19): siRNA sense strand
ucacuguguuggaagauca

SEQ ID NO: 854108 - RNA, 19 nt, Homo sapiens
  misc_RNA (1)...(19): siRNA sense strand
gaggauggcaagugguaug

SEQ ID NO: 854109 - RNA, 19 nt, Homo sapiens
  misc_RNA (1)...(19): siRNA sense strand
gugaguuccugguguugga

SEQ ID NO: 854110 - RNA, 19 nt, Homo sapiens
  misc_RNA (1)...(19): siRNA sense strand
augccgagcugcaaucguu

SEQ ID NO: 854111 - RNA, 19 nt, Homo sapiens
  misc_RNA (1)...(19): siRNA sense strand
cagacuauccagcccaaga

SEQ ID NO: 854112 - RNA, 19 nt, Homo sapiens
  misc_RNA (1)...(19): siRNA sense strand
ggcccucacuguguuggaa

SEQ ID NO: 854113 - RNA, 19 nt, Homo sapiens
  misc_RNA (1)...(19): siRNA sense strand
ccaguggccagucaugguu

SEQ ID NO: 854114 - RNA, 19 nt, Homo sapiens
  misc_RNA (1)...(19): siRNA sense strand
ccucuucugggccaugaua

SEQ ID NO: 854115 - RNA, 19 nt, Homo sapiens
  misc_RNA (1)...(19): siRNA sense strand
uguggcagcuggaguucug

SEQ ID NO: 854116 - RNA, 19 nt, Homo sapiens
  misc_RNA (1)...(19): siRNA sense strand
uggaggauggcaaguggua

SEQ ID NO: 854117 - RNA, 19 nt, Homo sapiens
  misc_RNA (1)...(19): siRNA sense strand
accugcaccucuucuauga

SEQ ID NO: 854118 - RNA, 19 nt, Homo sapiens
  misc_RNA (1)...(19): siRNA sense strand
gaguucugcucgccaucug

SEQ ID NO: 854119 - RNA, 19 nt, Homo sapiens
  misc_RNA (1)...(19): siRNA sense strand
ggaaagcccucaagguguu

SEQ ID NO: 854120 - RNA, 19 nt, Homo sapiens
  misc_RNA (1)...(19): siRNA sense strand
gaaaucagcauacuggaaa

SEQ ID NO: 854121 - RNA, 19 nt, Homo sapiens
  misc_RNA (1)...(19): siRNA sense strand
gaccggguaucuucuaaua

SEQ ID NO: 854122 - RNA, 19 nt, Homo sapiens
  misc_RNA (1)...(19): siRNA sense strand
ggacaaggaugaccagaac

SEQ ID NO: 854123 - RNA, 19 nt, Homo sapiens
  misc_RNA (1)...(19): siRNA sense strand
ggaccuauggugucuauga

SEQ ID NO: 854124 - RNA, 19 nt, Homo sapiens
  misc_RNA (1)...(19): siRNA sense strand
ggagaaggaaaucagcaua

SEQ ID NO: 854125 - RNA, 19 nt, Homo sapiens
  misc_RNA (1)...(19): siRNA sense strand
gcuuguauguguucuaugu

SEQ ID NO: 854126 - RNA, 19 nt, Homo sapiens
  misc_RNA (1)...(19): siRNA sense strand
ggaaaucagcauacuggaa

SEQ ID NO: 854127 - RNA, 19 nt, Homo sapiens
  misc_RNA (1)...(19): siRNA sense strand
ggacaucguuuucuacaug

SEQ ID NO: 854128 - RNA, 19 nt, Homo sapiens
  misc_RNA (1)...(19): siRNA sense strand
caagguguguggccugaau

SEQ ID NO: 854129 - RNA, 19 nt, Homo sapiens
  misc_RNA (1)...(19): siRNA sense strand
ugacuacggugaugaguac

SEQ ID NO: 854130 - RNA, 19 nt, Homo sapiens
  misc_RNA (1)...(19): siRNA sense strand
uaccugggcuuguaugugu

SEQ ID NO: 854131 - RNA, 19 nt, Homo sapiens
  misc_RNA (1)...(19): siRNA sense strand
gggcuuguauguguucuau

SEQ ID NO: 854132 - RNA, 19 nt, Homo sapiens
  misc_RNA (1)...(19): siRNA sense strand
uacaugaaguggagaagga

SEQ ID NO: 854133 - RNA, 19 nt, Homo sapiens
  misc_RNA (1)...(19): siRNA sense strand
uggcaugggcucuggguua

SEQ ID NO: 854134 - RNA, 19 nt, Homo sapiens
  misc_RNA (1)...(19): siRNA sense strand
aaucugcgcugggcacuga

SEQ ID NO: 854135 - RNA, 19 nt, Homo sapiens
  misc_RNA (1)...(19): siRNA sense strand
cacugaagcucucccacaa

SEQ ID NO: 854136 - RNA, 19 nt, Homo sapiens
  misc_RNA (1)...(19): siRNA sense strand
gaaggaaaucagcauacug

SEQ ID NO: 854137 - RNA, 19 nt, Homo sapiens
  misc_RNA (1)...(19): siRNA sense strand
guaccuggacuaccuggaa

SEQ ID NO: 854138 - RNA, 19 nt, Homo sapiens
  misc_RNA (1)...(19): siRNA sense strand
uggguuaccugggcuugua

SEQ ID NO: 854139 - RNA, 19 nt, Homo sapiens
  misc_RNA (1)...(19): siRNA sense strand
caagcugccuguggaguuc

SEQ ID NO: 854140 - RNA, 19 nt, Homo sapiens
  misc_RNA (1)...(19): siRNA sense strand
gggaacagcauuggagaug

SEQ ID NO: 854141 - RNA, 19 nt, Homo sapiens
  misc_RNA (1)...(19): siRNA sense strand
caacuugucggccauuucu

SEQ ID NO: 854142 - RNA, 19 nt, Homo sapiens
  misc_RNA (1)...(19): siRNA sense strand
uacaggagcucacauuagc

SEQ ID NO: 854143 - RNA, 19 nt, Homo sapiens
  misc_RNA (1)...(19): siRNA sense strand
cagagguggugaacaucuu

SEQ ID NO: 854144 - RNA, 19 nt, Homo sapiens
  misc_RNA (1)...(19): siRNA sense strand
gagaaggaaaucagcauac

SEQ ID NO: 854145 - RNA, 19 nt, Homo sapiens
  misc_RNA (1)...(19): siRNA sense strand
ggcugucacucucuacguu

SEQ ID NO: 854146 - RNA, 19 nt, Homo sapiens
  misc_RNA (1)...(19): siRNA sense strand
ccuccucacugaauuugga

SEQ ID NO: 854147 - RNA, 19 nt, Homo sapiens
  misc_RNA (1)...(19): siRNA sense strand
aggcuucacuggcucuuug

SEQ ID NO: 854148 - RNA, 19 nt, Homo sapiens
  misc_RNA (1)...(19): siRNA sense strand
gaggaccggguaucuucua

SEQ ID NO: 854149 - RNA, 19 nt, Homo sapiens
  misc_RNA (1)...(19): siRNA sense strand
gccaguuacuccagagauc

SEQ ID NO: 854150 - RNA, 19 nt, Homo sapiens
  misc_RNA (1)...(19): siRNA sense strand
gaauggugcaccugacauc

SEQ ID NO: 854151 - RNA, 19 nt, Homo sapiens
  misc_RNA (1)...(19): siRNA sense strand
ccuauggugucuaugagau

SEQ ID NO: 854152 - RNA, 19 nt, Homo sapiens
  misc_RNA (1)...(19): siRNA sense strand
gaccuauggugucuaugag

SEQ ID NO: 854153 - RNA, 19 nt, Homo sapiens
  misc_RNA (1)...(19): siRNA sense strand
cuacaggagcucacauuag

SEQ ID NO: 854154 - RNA, 19 nt, Homo sapiens
  misc_RNA (1)...(19): siRNA sense strand
uucacuggcucuuugcuuu

SEQ ID NO: 854155 - RNA, 19 nt, Homo sapiens
  misc_RNA (1)...(19): siRNA sense strand
ucuacaggagcucacauua

SEQ ID NO: 854156 - RNA, 19 nt, Homo sapiens
  misc_RNA (1)...(19): siRNA sense strand
ugaccgcugugacuucauc

SEQ ID NO: 854157 - RNA, 19 nt, Homo sapiens
  misc_RNA (1)...(19): siRNA sense strand
ggagaccacggcucagauc

SEQ ID NO: 854158 - RNA, 19 nt, Homo sapiens
  misc_RNA (1)...(19): siRNA sense strand
caacggcaacggagaggau

SEQ ID NO: 854159 - RNA, 19 nt, Homo sapiens
  misc_RNA (1)...(19): siRNA sense strand
cuucuaauaccaacagcua

SEQ ID NO: 854160 - RNA, 19 nt, Homo sapiens
  misc_RNA (1)...(19): siRNA sense strand
ucagggacaucguuuucua

SEQ ID NO: 854161 - RNA, 19 nt, Homo sapiens
  misc_RNA (1)...(19): siRNA sense strand
gaaguggagaaggaaauca

SEQ ID NO: 854162 - RNA, 19 nt, Homo sapiens
  misc_RNA (1)...(19): siRNA sense strand
gcucuaccuguuucugauu

SEQ ID NO: 854163 - RNA, 19 nt, Homo sapiens
  misc_RNA (1)...(19): siRNA sense strand
gaagccacacagaagugaa

SEQ ID NO: 854164 - RNA, 19 nt, Homo sapiens
  misc_RNA (1)...(19): siRNA sense strand
agucaccgcagccaaguuu

SEQ ID NO: 854165 - RNA, 19 nt, Homo sapiens
  misc_RNA (1)...(19): siRNA sense strand
ucaagcugccuguggaguu

SEQ ID NO: 854166 - RNA, 19 nt, Homo sapiens
  misc_RNA (1)...(19): siRNA sense strand
agaaggaaaucagcauacu

SEQ ID NO: 854167 - RNA, 19 nt, Homo sapiens
  misc_RNA (1)...(19): siRNA sense strand
gaggaggaccggguaucuu

SEQ ID NO: 854168 - RNA, 19 nt, Homo sapiens
  misc_RNA (1)...(19): siRNA sense strand
ucaccuuccuggcauuugg

SEQ ID NO: 854169 - RNA, 19 nt, Homo sapiens
  misc_RNA (1)...(19): siRNA sense strand
gcugucacucucuacguuu

SEQ ID NO: 854170 - RNA, 19 nt, Homo sapiens
  misc_RNA (1)...(19): siRNA sense strand
ugaccuuccucaugcucuu

SEQ ID NO: 854171 - RNA, 19 nt, Homo sapiens
  misc_RNA (1)...(19): siRNA sense strand
cuacaugguggcuguguuc

SEQ ID NO: 854172 - RNA, 19 nt, Homo sapiens
  misc_RNA (1)...(19): siRNA sense strand
ucguggcccuccucacuga

SEQ ID NO: 854173 - RNA, 19 nt, Homo sapiens
  misc_RNA (1)...(19): siRNA sense strand
cuaauaccaacagcuauga

SEQ ID NO: 854174 - RNA, 19 nt, Homo sapiens
  misc_RNA (1)...(19): siRNA sense strand
ggcaugggcucuggguuac

SEQ ID NO: 854175 - RNA, 19 nt, Homo sapiens
  misc_RNA (1)...(19): siRNA sense strand
uggcugcucuaccuguuuc

SEQ ID NO: 854176 - RNA, 19 nt, Homo sapiens
  misc_RNA (1)...(19): siRNA sense strand
ggaccggguaucuucuaau

SEQ ID NO: 854177 - RNA, 19 nt, Homo sapiens
  misc_RNA (1)...(19): siRNA sense strand
ggaauggugcaccugacau

SEQ ID NO: 854178 - RNA, 19 nt, Homo sapiens
  misc_RNA (1)...(19): siRNA sense strand
uggugcaccugacaucuuc

SEQ ID NO: 854179 - RNA, 19 nt, Homo sapiens
  misc_RNA (1)...(19): siRNA sense strand
ucuaauaccaacagcuaug

SEQ ID NO: 854180 - RNA, 19 nt, Homo sapiens
  misc_RNA (1)...(19): siRNA sense strand
guuccugaccuuccucaug

SEQ ID NO: 854181 - RNA, 19 nt, Homo sapiens
  misc_RNA (1)...(19): siRNA sense strand
gggaauggugcaccugaca

SEQ ID NO: 854182 - RNA, 19 nt, Homo sapiens
  misc_RNA (1)...(19): siRNA sense strand
cgaagccacacagaaguga

SEQ ID NO: 854183 - RNA, 19 nt, Homo sapiens
  misc_RNA (1)...(19): siRNA sense strand
gauuacaugaaguggagaa

SEQ ID NO: 854184 - RNA, 19 nt, Homo sapiens
  misc_RNA (1)...(19): siRNA sense strand
gcuaugacuacggugauga

SEQ ID NO: 854185 - RNA, 19 nt, Homo sapiens
  misc_RNA (1)...(19): siRNA sense strand
cggaggcauuaccauccua

SEQ ID NO: 854186 - RNA, 19 nt, Homo sapiens
  misc_RNA (1)...(19): siRNA sense strand
gaaugaagcugagagauuu

SEQ ID NO: 854187 - RNA, 19 nt, Homo sapiens
  misc_RNA (1)...(19): siRNA sense strand
ccaaacaucuguaugaaga

SEQ ID NO: 854188 - RNA, 19 nt, Homo sapiens
  misc_RNA (1)...(19): siRNA sense strand
gauguuggauggucacuug

SEQ ID NO: 854189 - RNA, 19 nt, Homo sapiens
  misc_RNA (1)...(19): siRNA sense strand
gcacagcuguuuaugaaaa

SEQ ID NO: 854190 - RNA, 19 nt, Homo sapiens
  misc_RNA (1)...(19): siRNA sense strand
aaauacccaugcacacuua

SEQ ID NO: 854191 - RNA, 19 nt, Homo sapiens
  misc_RNA (1)...(19): siRNA sense strand
gcugagaacaugaacaauu

SEQ ID NO: 854192 - RNA, 19 nt, Homo sapiens
  misc_RNA (1)...(19): siRNA sense strand
cugagaacaugaacaauug

SEQ ID NO: 854193 - RNA, 19 nt, Homo sapiens
  misc_RNA (1)...(19): siRNA sense strand
ugaaugaagcugagagauu

SEQ ID NO: 854194 - RNA, 19 nt, Homo sapiens
  misc_RNA (1)...(19): siRNA sense strand
gguuaaauguuccaagaag

SEQ ID NO: 854195 - RNA, 19 nt, Homo sapiens
  misc_RNA (1)...(19): siRNA sense strand
guaaucaacccaaacaucu

SEQ ID NO: 854196 - RNA, 19 nt, Homo sapiens
  misc_RNA (1)...(19): siRNA sense strand
gguaucaucccauggaguu

SEQ ID NO: 854197 - RNA, 19 nt, Homo sapiens
  misc_RNA (1)...(19): siRNA sense strand
caaauacccaugcacacuu

SEQ ID NO: 854198 - RNA, 19 nt, Homo sapiens
  misc_RNA (1)...(19): siRNA sense strand
ucacucugguuaaauguuc

SEQ ID NO: 854199 - RNA, 19 nt, Homo sapiens
  misc_RNA (1)...(19): siRNA sense strand
guuggauggucacuuggua

SEQ ID NO: 854200 - RNA, 19 nt, Homo sapiens
  misc_RNA (1)...(19): siRNA sense strand
cagcugagaacaugaacaa

SEQ ID NO: 854201 - RNA, 19 nt, Homo sapiens
  misc_RNA (1)...(19): siRNA sense strand
cugguuaaauguuccaaga

SEQ ID NO: 854202 - RNA, 19 nt, Homo sapiens
  misc_RNA (1)...(19): siRNA sense strand
aaaccguaaucaacccaaa

SEQ ID NO: 854203 - RNA, 19 nt, Homo sapiens
  misc_RNA (1)...(19): siRNA sense strand
gauggucacuugguaucau

SEQ ID NO: 854204 - RNA, 19 nt, Homo sapiens
  misc_RNA (1)...(19): siRNA sense strand
ucacaugauggaauacuau

SEQ ID NO: 854205 - RNA, 19 nt, Homo sapiens
  misc_RNA (1)...(19): siRNA sense strand
cuaugcagcugagaacaug

SEQ ID NO: 854206 - RNA, 19 nt, Homo sapiens
  misc_RNA (1)...(19): siRNA sense strand
gagaacaugaacaauugga

SEQ ID NO: 854207 - RNA, 19 nt, Homo sapiens
  misc_RNA (1)...(19): siRNA sense strand
ccuuaucguucuagaguca

SEQ ID NO: 854208 - RNA, 19 nt, Homo sapiens
  misc_RNA (1)...(19): siRNA sense strand
ugaagcgucaaccaaguaa

SEQ ID NO: 854209 - RNA, 19 nt, Homo sapiens
  misc_RNA (1)...(19): siRNA sense strand
uuaaauguuccaagaagga

SEQ ID NO: 854210 - RNA, 19 nt, Homo sapiens
  misc_RNA (1)...(19): siRNA sense strand
aacccaaacaucuguauga

SEQ ID NO: 854211 - RNA, 19 nt, Homo sapiens
  misc_RNA (1)...(19): siRNA sense strand
gaagcugagagauuugaag

SEQ ID NO: 854212 - RNA, 19 nt, Homo sapiens
  misc_RNA (1)...(19): siRNA sense strand
acccaaacaucuguaugaa

SEQ ID NO: 854213 - RNA, 19 nt, Homo sapiens
  misc_RNA (1)...(19): siRNA sense strand
gagcucacucugguuaaau

SEQ ID NO: 854214 - RNA, 19 nt, Homo sapiens
  misc_RNA (1)...(19): siRNA sense strand
cguaaucaacccaaacauc

SEQ ID NO: 854215 - RNA, 19 nt, Homo sapiens
  misc_RNA (1)...(19): siRNA sense strand
ucccauggaguucaggaua

SEQ ID NO: 854216 - RNA, 19 nt, Homo sapiens
  misc_RNA (1)...(19): siRNA sense strand
caaacaucuguaugaagaa

SEQ ID NO: 854217 - RNA, 19 nt, Homo sapiens
  misc_RNA (1)...(19): siRNA sense strand
caacccaaacaucuguaug

SEQ ID NO: 854218 - RNA, 19 nt, Homo sapiens
  misc_RNA (1)...(19): siRNA sense strand
gaacauagcguuaaagaca

SEQ ID NO: 854219 - RNA, 19 nt, Homo sapiens
  misc_RNA (1)...(19): siRNA sense strand
gagagaaagucuauaaaug

SEQ ID NO: 854220 - RNA, 19 nt, Homo sapiens
  misc_RNA (1)...(19): siRNA sense strand
ggaaagaaauccuguacau

SEQ ID NO: 854221 - RNA, 19 nt, Homo sapiens
  misc_RNA (1)...(19): siRNA sense strand
ggaagaacauagcguuaaa

SEQ ID NO: 854222 - RNA, 19 nt, Homo sapiens
  misc_RNA (1)...(19): siRNA sense strand
ggagaaaccuguaaaugca

SEQ ID NO: 854223 - RNA, 19 nt, Homo sapiens
  misc_RNA (1)...(19): siRNA sense strand
gaaagacucgaaauuguaa

SEQ ID NO: 854224 - RNA, 19 nt, Homo sapiens
  misc_RNA (1)...(19): siRNA sense strand
gaacgcagauuggacagaa

SEQ ID NO: 854225 - RNA, 19 nt, Homo sapiens
  misc_RNA (1)...(19): siRNA sense strand
ggagaaacccuauaagugu

SEQ ID NO: 854226 - RNA, 19 nt, Homo sapiens
  misc_RNA (1)...(19): siRNA sense strand
gaugucaaaucacaaacua

SEQ ID NO: 854227 - RNA, 19 nt, Homo sapiens
  misc_RNA (1)...(19): siRNA sense strand
ggacagaagcccaguaaau

SEQ ID NO: 854228 - RNA, 19 nt, Homo sapiens
  misc_RNA (1)...(19): siRNA sense strand
gagaaagucuauaaaugug

SEQ ID NO: 854229 - RNA, 19 nt, Homo sapiens
  misc_RNA (1)...(19): siRNA sense strand
ccacagaugucaaaucaca

SEQ ID NO: 854230 - RNA, 19 nt, Homo sapiens
  misc_RNA (1)...(19): siRNA sense strand
cagaaagacucgaaauugu

SEQ ID NO: 854231 - RNA, 19 nt, Homo sapiens
  misc_RNA (1)...(19): siRNA sense strand
gggaaaggcuucaguuguc

SEQ ID NO: 854232 - RNA, 19 nt, Homo sapiens
  misc_RNA (1)...(19): siRNA sense strand
ggaaaacucuucacccauu

SEQ ID NO: 854233 - RNA, 19 nt, Homo sapiens
  misc_RNA (1)...(19): siRNA sense strand
gagagaaacccuacgaaug

SEQ ID NO: 854234 - RNA, 19 nt, Homo sapiens
  misc_RNA (1)...(19): siRNA sense strand
gagagacauuugagcagaa

SEQ ID NO: 854235 - RNA, 19 nt, Homo sapiens
  misc_RNA (1)...(19): siRNA sense strand
guccucaucuuuacacaaa

SEQ ID NO: 854236 - RNA, 19 nt, Homo sapiens
  misc_RNA (1)...(19): siRNA sense strand
gggagaaacccuauaagug

SEQ ID NO: 854237 - RNA, 19 nt, Homo sapiens
  misc_RNA (1)...(19): siRNA sense strand
ucagaaagacucgaaauug

SEQ ID NO: 854238 - RNA, 19 nt, Homo sapiens
  misc_RNA (1)...(19): siRNA sense strand
gacagaagcccaguaaaug

SEQ ID NO: 854239 - RNA, 19 nt, Homo sapiens
  misc_RNA (1)...(19): siRNA sense strand
caacgacacgugagaauuc

SEQ ID NO: 854240 - RNA, 19 nt, Homo sapiens
  misc_RNA (1)...(19): siRNA sense strand
gaacauguaaggacucaca

SEQ ID NO: 854241 - RNA, 19 nt, Homo sapiens
  misc_RNA (1)...(19): siRNA sense strand
cgcaagaauuguuguacua

SEQ ID NO: 854242 - RNA, 19 nt, Homo sapiens
  misc_RNA (1)...(19): siRNA sense strand
gcaccuggccucaguagau

SEQ ID NO: 854243 - RNA, 19 nt, Homo sapiens
  misc_RNA (1)...(19): siRNA sense strand
aagaaauccuguacaucua

SEQ ID NO: 854244 - RNA, 19 nt, Homo sapiens
  misc_RNA (1)...(19): siRNA sense strand
ggaaagccuucagguguca

SEQ ID NO: 854245 - RNA, 19 nt, Homo sapiens
  misc_RNA (1)...(19): siRNA sense strand
ggagagaaacccuacgaau

SEQ ID NO: 854246 - RNA, 19 nt, Homo sapiens
  misc_RNA (1)...(19): siRNA sense strand
gaauuguuguacuagugua

SEQ ID NO: 854247 - RNA, 19 nt, Homo sapiens
  misc_RNA (1)...(19): siRNA sense strand
agaaagacucgaaauugua

SEQ ID NO: 854248 - RNA, 19 nt, Homo sapiens
  misc_RNA (1)...(19): siRNA sense strand
ggacacaguggucuuugaa

SEQ ID NO: 854249 - RNA, 19 nt, Homo sapiens
  misc_RNA (1)...(19): siRNA sense strand
gguaauaaacguggaagaa

SEQ ID NO: 854250 - RNA, 19 nt, Homo sapiens
  misc_RNA (1)...(19): siRNA sense strand
agagaaacccuacgaaugu

SEQ ID NO: 854251 - RNA, 19 nt, Homo sapiens
  misc_RNA (1)...(19): siRNA sense strand
gggaagaacauagcguuaa

SEQ ID NO: 854252 - RNA, 19 nt, Homo sapiens
  misc_RNA (1)...(19): siRNA sense strand
aaagaaauccuguacaucu

SEQ ID NO: 854253 - RNA, 19 nt, Homo sapiens
  misc_RNA (1)...(19): siRNA sense strand
gagaaacccuacgaaugug

SEQ ID NO: 854254 - RNA, 19 nt, Homo sapiens
  misc_RNA (1)...(19): siRNA sense strand
gaaauccuguacaucuaag

SEQ ID NO: 854255 - RNA, 19 nt, Homo sapiens
  misc_RNA (1)...(19): siRNA sense strand
caccuggccucaguagaua

SEQ ID NO: 854256 - RNA, 19 nt, Homo sapiens
  misc_RNA (1)...(19): siRNA sense strand
ggagggagaccguaugagu

SEQ ID NO: 854257 - RNA, 19 nt, Homo sapiens
  misc_RNA (1)...(19): siRNA sense strand
ggagggagaccguaugagu

SEQ ID NO: 854258 - RNA, 19 nt, Homo sapiens
  misc_RNA (1)...(19): siRNA sense strand
gaaacccuaugccugucaa

SEQ ID NO: 854259 - RNA, 19 nt, Homo sapiens
  misc_RNA (1)...(19): siRNA sense strand
gaaagaaauccuguacauc

SEQ ID NO: 854260 - RNA, 19 nt, Homo sapiens
  misc_RNA (1)...(19): siRNA sense strand
gcacaacaccaaggagaga

SEQ ID NO: 854261 - RNA, 19 nt, Homo sapiens
  misc_RNA (1)...(19): siRNA sense strand
gggagaaaccuguaaaugc

SEQ ID NO: 854262 - RNA, 19 nt, Homo sapiens
  misc_RNA (1)...(19): siRNA sense strand
aauuaucccucaaacagaa

SEQ ID NO: 854263 - RNA, 19 nt, Homo sapiens
  misc_RNA (1)...(19): siRNA sense strand
ucaagcaccuggccucagu

SEQ ID NO: 854264 - RNA, 19 nt, Homo sapiens
  misc_RNA (1)...(19): siRNA sense strand
caagaauuguuguacuagu

SEQ ID NO: 854265 - RNA, 19 nt, Homo sapiens
  misc_RNA (1)...(19): siRNA sense strand
gaaaaguucacaagaaaga

SEQ ID NO: 854266 - RNA, 19 nt, Homo sapiens
  misc_RNA (1)...(19): siRNA sense strand
gcgcacaugugaugaugca

SEQ ID NO: 854267 - RNA, 19 nt, Homo sapiens
  misc_RNA (1)...(19): siRNA sense strand
acacaaacaugagagaaag

SEQ ID NO: 854268 - RNA, 19 nt, Homo sapiens
  misc_RNA (1)...(19): siRNA sense strand
gcccucauccuuacacaaa

SEQ ID NO: 854269 - RNA, 19 nt, Homo sapiens
  misc_RNA (1)...(19): siRNA sense strand
cuccacagaugucaaauca

SEQ ID NO: 854270 - RNA, 19 nt, Homo sapiens
  misc_RNA (1)...(19): siRNA sense strand
gagugggccuugcugaauc

SEQ ID NO: 854271 - RNA, 19 nt, Homo sapiens
  misc_RNA (1)...(19): siRNA sense strand
gacucacacuggagagaaa

SEQ ID NO: 854272 - RNA, 19 nt, Homo sapiens
  misc_RNA (1)...(19): siRNA sense strand
ggagugggccuugcugaau

SEQ ID NO: 854273 - RNA, 19 nt, Homo sapiens
  misc_RNA (1)...(19): siRNA sense strand
ucaaaucacaaacuagaga

SEQ ID NO: 854274 - RNA, 19 nt, Homo sapiens
  misc_RNA (1)...(19): siRNA sense strand
gcgcaagaauuguuguacu

SEQ ID NO: 854275 - RNA, 19 nt, Homo sapiens
  misc_RNA (1)...(19): siRNA sense strand
agaaauccuguacaucuaa

SEQ ID NO: 854276 - RNA, 19 nt, Homo sapiens
  misc_RNA (1)...(19): siRNA sense strand
gaagucacacaggaaagaa

SEQ ID NO: 854277 - RNA, 19 nt, Homo sapiens
  misc_RNA (1)...(19): siRNA sense strand
guacgaaugcagucagugu

SEQ ID NO: 854278 - RNA, 19 nt, Homo sapiens
  misc_RNA (1)...(19): siRNA sense strand
aagaauuguuguacuagug

SEQ ID NO: 854279 - RNA, 19 nt, Homo sapiens
  misc_RNA (1)...(19): siRNA sense strand
caguaaagguaauaaacgu

SEQ ID NO: 854280 - RNA, 19 nt, Homo sapiens
  misc_RNA (1)...(19): siRNA sense strand
ggcaacauccuuucaacga

SEQ ID NO: 854281 - RNA, 19 nt, Homo sapiens
  misc_RNA (1)...(19): siRNA sense strand
uauaugggccucccuuuua

SEQ ID NO: 854282 - RNA, 19 nt, Homo sapiens
  misc_RNA (1)...(19): siRNA sense strand
ugagaagucacacaggaaa

SEQ ID NO: 854283 - RNA, 19 nt, Homo sapiens
  misc_RNA (1)...(19): siRNA sense strand
ggacucacacuggagagaa

SEQ ID NO: 854284 - RNA, 19 nt, Homo sapiens
  misc_RNA (1)...(19): siRNA sense strand
aagacgugguuguggauuu

SEQ ID NO: 854285 - RNA, 19 nt, Homo sapiens
  misc_RNA (1)...(19): siRNA sense strand
cuacgaaugugggcagugu

SEQ ID NO: 854286 - RNA, 19 nt, Homo sapiens
  misc_RNA (1)...(19): siRNA sense strand
ugucaaaucacaaacuaga

SEQ ID NO: 854287 - RNA, 19 nt, Homo sapiens
  misc_RNA (1)...(19): siRNA sense strand
uaaagccagugggucuauu

SEQ ID NO: 854288 - RNA, 19 nt, Homo sapiens
  misc_RNA (1)...(19): siRNA sense strand
gaaauuguaaucgucaucu

SEQ ID NO: 854289 - RNA, 19 nt, Homo sapiens
  misc_RNA (1)...(19): siRNA sense strand
caucuuuacacaaacauga

SEQ ID NO: 854290 - RNA, 19 nt, Homo sapiens
  misc_RNA (1)...(19): siRNA sense strand
gcaagaauuguuguacuag

SEQ ID NO: 854291 - RNA, 19 nt, Homo sapiens
  misc_RNA (1)...(19): siRNA sense strand
agagacauuugagcagaaa

SEQ ID NO: 854292 - RNA, 19 nt, Homo sapiens
  misc_RNA (1)...(19): siRNA sense strand
gaaugcagucaguguggaa

SEQ ID NO: 854293 - RNA, 19 nt, Homo sapiens
  misc_RNA (1)...(19): siRNA sense strand
cgucaucugcgcaagaauu

SEQ ID NO: 854294 - RNA, 19 nt, Homo sapiens
  misc_RNA (1)...(19): siRNA sense strand
gcaguaaagguaauaaacg

SEQ ID NO: 854295 - RNA, 19 nt, Homo sapiens
  misc_RNA (1)...(19): siRNA sense strand
acagaugucaaaucacaaa

SEQ ID NO: 854296 - RNA, 19 nt, Homo sapiens
  misc_RNA (1)...(19): siRNA sense strand
uguaaaagcaguaaaggua

SEQ ID NO: 854297 - RNA, 19 nt, Homo sapiens
  misc_RNA (1)...(19): siRNA sense strand
ccucaucuuuacacaaaca

SEQ ID NO: 854298 - RNA, 19 nt, Homo sapiens
  misc_RNA (1)...(19): siRNA sense strand
caucugcgcaagaauuguu

SEQ ID NO: 854299 - RNA, 19 nt, Homo sapiens
  misc_RNA (1)...(19): siRNA sense strand
aagaacauagcguuaaaga

SEQ ID NO: 854300 - RNA, 19 nt, Homo sapiens
  misc_RNA (1)...(19): siRNA sense strand
caaacuagagagaaagucu

SEQ ID NO: 854301 - RNA, 19 nt, Homo sapiens
  misc_RNA (1)...(19): siRNA sense strand
gaagaacauagcguuaaag

SEQ ID NO: 854302 - RNA, 19 nt, Homo sapiens
  misc_RNA (1)...(19): siRNA sense strand
gccuucaggugucagaaau

SEQ ID NO: 854303 - RNA, 19 nt, Homo sapiens
  misc_RNA (1)...(19): siRNA sense strand
ugaauccugcucagagaaa

SEQ ID NO: 854304 - RNA, 19 nt, Homo sapiens
  misc_RNA (1)...(19): siRNA sense strand
guaagacgguacgaaugca

SEQ ID NO: 854305 - RNA, 19 nt, Homo sapiens
  misc_RNA (1)...(19): siRNA sense strand
guaauaaacguggaagaac

SEQ ID NO: 854306 - RNA, 19 nt, Homo sapiens
  misc_RNA (1)...(19): siRNA sense strand
aauguaagaacgcagauug

SEQ ID NO: 854307 - RNA, 19 nt, Homo sapiens
  misc_RNA (1)...(19): siRNA sense strand
ucaguugucccaaauccuu

SEQ ID NO: 854308 - RNA, 19 nt, Homo sapiens
  misc_RNA (1)...(19): siRNA sense strand
gaaaacucuucacccauuc

SEQ ID NO: 854309 - RNA, 19 nt, Homo sapiens
  misc_RNA (1)...(19): siRNA sense strand
ccauuccucaucccugaua

SEQ ID NO: 854310 - RNA, 19 nt, Homo sapiens
  misc_RNA (1)...(19): siRNA sense strand
agacgugguuguggauuuc

SEQ ID NO: 854311 - RNA, 19 nt, Homo sapiens
  misc_RNA (1)...(19): siRNA sense strand
gaagacgugguuguggauu

SEQ ID NO: 854312 - RNA, 19 nt, Homo sapiens
  misc_RNA (1)...(19): siRNA sense strand
ccagugggucuauuucuca

SEQ ID NO: 854313 - RNA, 19 nt, Homo sapiens
  misc_RNA (1)...(19): siRNA sense strand
uacacaaacaugagagaaa

SEQ ID NO: 854314 - RNA, 19 nt, Homo sapiens
  misc_RNA (1)...(19): siRNA sense strand
ccucauccuuacacaaaca

SEQ ID NO: 854315 - RNA, 19 nt, Homo sapiens
  misc_RNA (1)...(19): siRNA sense strand
aaagccagugggucuauuu

SEQ ID NO: 854316 - RNA, 19 nt, Homo sapiens
  misc_RNA (1)...(19): siRNA sense strand
caaauccuuucgcgcacau

SEQ ID NO: 854317 - RNA, 19 nt, Homo sapiens
  misc_RNA (1)...(19): siRNA sense strand
gccagugggucuauuucuc

SEQ ID NO: 854318 - RNA, 19 nt, Homo sapiens
  misc_RNA (1)...(19): siRNA sense strand
gcauuuagguguggucugu

SEQ ID NO: 854319 - RNA, 19 nt, Homo sapiens
  misc_RNA (1)...(19): siRNA sense strand
gcaggcaguuggcaugugu

SEQ ID NO: 854320 - RNA, 19 nt, Homo sapiens
  misc_RNA (1)...(19): siRNA sense strand
gauaugggagugagaaugu

SEQ ID NO: 854321 - RNA, 19 nt, Homo sapiens
  misc_RNA (1)...(19): siRNA sense strand
guacuggugugucuuugca

SEQ ID NO: 854322 - RNA, 19 nt, Homo sapiens
  misc_RNA (1)...(19): siRNA sense strand
aagccuaucugcagagguu

SEQ ID NO: 854323 - RNA, 19 nt, Homo sapiens
  misc_RNA (1)...(19): siRNA sense strand
gcccuugucuaguuuaugg

SEQ ID NO: 854324 - RNA, 19 nt, Homo sapiens
  misc_RNA (1)...(19): siRNA sense strand
ggaguggcaggguuggaua

SEQ ID NO: 854325 - RNA, 19 nt, Homo sapiens
  misc_RNA (1)...(19): siRNA sense strand
auaaugagcaguucuguuc

SEQ ID NO: 854326 - RNA, 19 nt, Homo sapiens
  misc_RNA (1)...(19): siRNA sense strand
uggugugucuuugcauuua

SEQ ID NO: 854327 - RNA, 19 nt, Homo sapiens
  misc_RNA (1)...(19): siRNA sense strand
aacgcugacugcccucuua

SEQ ID NO: 854328 - RNA, 19 nt, Homo sapiens
  misc_RNA (1)...(19): siRNA sense strand
gaagccauaaugagcaguu

SEQ ID NO: 854329 - RNA, 19 nt, Homo sapiens
  misc_RNA (1)...(19): siRNA sense strand
gagucuuccuucaguuuca

SEQ ID NO: 854330 - RNA, 19 nt, Homo sapiens
  misc_RNA (1)...(19): siRNA sense strand
aaugagcaguucuguucuu

SEQ ID NO: 854331 - RNA, 19 nt, Homo sapiens
  misc_RNA (1)...(19): siRNA sense strand
ccuccaggguugcucuuug

SEQ ID NO: 854332 - RNA, 19 nt, Homo sapiens
  misc_RNA (1)...(19): siRNA sense strand
uaaaaguacuggugugucu

SEQ ID NO: 854333 - RNA, 19 nt, Homo sapiens
  misc_RNA (1)...(19): siRNA sense strand
ggauaugggagugagaaug

SEQ ID NO: 854334 - RNA, 19 nt, Homo sapiens
  misc_RNA (1)...(19): siRNA sense strand
cugcagagguuggccugaa

SEQ ID NO: 854335 - RNA, 19 nt, Homo sapiens
  misc_RNA (1)...(19): siRNA sense strand
gaacgcugacugcccucuu

SEQ ID NO: 854336 - RNA, 19 nt, Homo sapiens
  misc_RNA (1)...(19): siRNA sense strand
ggagucuuccuucaguuuc

SEQ ID NO: 854337 - RNA, 19 nt, Homo sapiens
  misc_RNA (1)...(19): siRNA sense strand
gccuuucugugucuugguu

SEQ ID NO: 854338 - RNA, 19 nt, Homo sapiens
  misc_RNA (1)...(19): siRNA sense strand
gcugacugcccucuuaaag

SEQ ID NO: 854339 - RNA, 19 nt, Homo sapiens
  misc_RNA (1)...(19): siRNA sense strand
cauaaugagcaguucuguu

SEQ ID NO: 854340 - RNA, 19 nt, Homo sapiens
  misc_RNA (1)...(19): siRNA sense strand
ggugugucuuugcauuuag

SEQ ID NO: 854341 - RNA, 19 nt, Homo sapiens
  misc_RNA (1)...(19): siRNA sense strand
ggucugugagucugggaaa

SEQ ID NO: 854342 - RNA, 19 nt, Homo sapiens
  misc_RNA (1)...(19): siRNA sense strand
uuuagcccuugucuaguuu

SEQ ID NO: 854343 - RNA, 19 nt, Homo sapiens
  misc_RNA (1)...(19): siRNA sense strand
acuggugugucuuugcauu

SEQ ID NO: 854344 - RNA, 19 nt, Homo sapiens
  misc_RNA (1)...(19): siRNA sense strand
cugauaagcucaccaaauu

SEQ ID NO: 854345 - RNA, 19 nt, Homo sapiens
  misc_RNA (1)...(19): siRNA sense strand
gggaacagauucuccauca

SEQ ID NO: 854346 - RNA, 19 nt, Homo sapiens
  misc_RNA (1)...(19): siRNA sense strand
gaaagggcaucucaugucu

SEQ ID NO: 854347 - RNA, 19 nt, Homo sapiens
  misc_RNA (1)...(19): siRNA sense strand
gauaagcucaccaaauuuc

SEQ ID NO: 854348 - RNA, 19 nt, Homo sapiens
  misc_RNA (1)...(19): siRNA sense strand
ucaccaaauuucaggagua

SEQ ID NO: 854349 - RNA, 19 nt, Homo sapiens
  misc_RNA (1)...(19): siRNA sense strand
caagaaagggcaucucaug

SEQ ID NO: 854350 - RNA, 19 nt, Homo sapiens
  misc_RNA (1)...(19): siRNA sense strand
caguagagcuuauucugau

SEQ ID NO: 854351 - RNA, 19 nt, Homo sapiens
  misc_RNA (1)...(19): siRNA sense strand
uucaauaacuccacacuug

SEQ ID NO: 854352 - RNA, 19 nt, Homo sapiens
  misc_RNA (1)...(19): siRNA sense strand
gggcaucucaugucuaugu

SEQ ID NO: 854353 - RNA, 19 nt, Homo sapiens
  misc_RNA (1)...(19): siRNA sense strand
cuacaaauaucagggaaca

SEQ ID NO: 854354 - RNA, 19 nt, Homo sapiens
  misc_RNA (1)...(19): siRNA sense strand
gaguagccuccuuucaaua

SEQ ID NO: 854355 - RNA, 19 nt, Homo sapiens
  misc_RNA (1)...(19): siRNA sense strand
gaaaaugguuguucaucuc

SEQ ID NO: 854356 - RNA, 19 nt, Homo sapiens
  misc_RNA (1)...(19): siRNA sense strand
aagggcaucucaugucuau

SEQ ID NO: 854357 - RNA, 19 nt, Homo sapiens
  misc_RNA (1)...(19): siRNA sense strand
aauaaggcauugcugugaa

SEQ ID NO: 854358 - RNA, 19 nt, Homo sapiens
  misc_RNA (1)...(19): siRNA sense strand
ccaguagagcuuauucuga

SEQ ID NO: 854359 - RNA, 19 nt, Homo sapiens
  misc_RNA (1)...(19): siRNA sense strand
ugaacuuacuggugacuca

SEQ ID NO: 854360 - RNA, 19 nt, Homo sapiens
  misc_RNA (1)...(19): siRNA sense strand
gcauguggcuuagugaacu

SEQ ID NO: 854361 - RNA, 19 nt, Homo sapiens
  misc_RNA (1)...(19): siRNA sense strand
guccauauuuagugccaaa

SEQ ID NO: 854362 - RNA, 19 nt, Homo sapiens
  misc_RNA (1)...(19): siRNA sense strand
acaaauaucagggaacaga

SEQ ID NO: 854363 - RNA, 19 nt, Homo sapiens
  misc_RNA (1)...(19): siRNA sense strand
gaucuaguauuugcuuggu

SEQ ID NO: 854364 - RNA, 19 nt, Homo sapiens
  misc_RNA (1)...(19): siRNA sense strand
ucucaugucuaugugacua

SEQ ID NO: 854365 - RNA, 19 nt, Homo sapiens
  misc_RNA (1)...(19): siRNA sense strand
aguagccuccuuucaauaa

SEQ ID NO: 854366 - RNA, 19 nt, Homo sapiens
  misc_RNA (1)...(19): siRNA sense strand
guucauguuugggacuauu

SEQ ID NO: 854367 - RNA, 19 nt, Homo sapiens
  misc_RNA (1)...(19): siRNA sense strand
aguagagcuuauucugaua

SEQ ID NO: 854368 - RNA, 19 nt, Homo sapiens
  misc_RNA (1)...(19): siRNA sense strand
caccaaauuucaggaguag

SEQ ID NO: 854369 - RNA, 19 nt, Homo sapiens
  misc_RNA (1)...(19): siRNA sense strand
gcucauucuuuaaguugca

SEQ ID NO: 854370 - RNA, 19 nt, Homo sapiens
  misc_RNA (1)...(19): siRNA sense strand
gcaagaaagggcaucucau

SEQ ID NO: 854371 - RNA, 19 nt, Homo sapiens
  misc_RNA (1)...(19): siRNA sense strand
cacaaagguguaugacaaa

SEQ ID NO: 854372 - RNA, 19 nt, Homo sapiens
  misc_RNA (1)...(19): siRNA sense strand
ugauaagcucaccaaauuu

SEQ ID NO: 854373 - RNA, 19 nt, Homo sapiens
  misc_RNA (1)...(19): siRNA sense strand
ccucuacccuaacacaaag

SEQ ID NO: 854374 - RNA, 19 nt, Homo sapiens
  misc_RNA (1)...(19): siRNA sense strand
aaauaucagggaacagauu

SEQ ID NO: 854375 - RNA, 19 nt, Homo sapiens
  misc_RNA (1)...(19): siRNA sense strand
cuaugugacuacaaauauc

SEQ ID NO: 854376 - RNA, 19 nt, Homo sapiens
  misc_RNA (1)...(19): siRNA sense strand
agaaagggcaucucauguc

SEQ ID NO: 854377 - RNA, 19 nt, Homo sapiens
  misc_RNA (1)...(19): siRNA sense strand
gcuuggugccucagagaaa

SEQ ID NO: 854378 - RNA, 19 nt, Homo sapiens
  misc_RNA (1)...(19): siRNA sense strand
aaagguguaugacaaaaug

SEQ ID NO: 854379 - RNA, 19 nt, Homo sapiens
  misc_RNA (1)...(19): siRNA sense strand
uagcucauucuuuaaguug

SEQ ID NO: 854380 - RNA, 19 nt, Homo sapiens
  misc_RNA (1)...(19): siRNA sense strand
caaccucuacccuaacaca

SEQ ID NO: 854381 - RNA, 19 nt, Homo sapiens
  misc_RNA (1)...(19): siRNA sense strand
ucaauaacuccacacuugu

SEQ ID NO: 854382 - RNA, 19 nt, Homo sapiens
  misc_RNA (1)...(19): siRNA sense strand
gucuaugugacuacaaaua

SEQ ID NO: 854383 - RNA, 19 nt, Homo sapiens
  misc_RNA (1)...(19): siRNA sense strand
auaaggcauugcugugaau

SEQ ID NO: 854384 - RNA, 19 nt, Homo sapiens
  misc_RNA (1)...(19): siRNA sense strand
ucugauaagcucaccaaau

SEQ ID NO: 854385 - RNA, 19 nt, Homo sapiens
  misc_RNA (1)...(19): siRNA sense strand
cagagaaaaugguuguuca

SEQ ID NO: 854386 - RNA, 19 nt, Homo sapiens
  misc_RNA (1)...(19): siRNA sense strand
acucagucauagcaagaaa

SEQ ID NO: 854387 - RNA, 19 nt, Homo sapiens
  misc_RNA (1)...(19): siRNA sense strand
cccaaccucuacccuaaca

SEQ ID NO: 854388 - RNA, 19 nt, Homo sapiens
  misc_RNA (1)...(19): siRNA sense strand
gccaguagagcuuauucug

SEQ ID NO: 854389 - RNA, 19 nt, Homo sapiens
  misc_RNA (1)...(19): siRNA sense strand
ggaacagauucuccaucac

SEQ ID NO: 854390 - RNA, 19 nt, Homo sapiens
  misc_RNA (1)...(19): siRNA sense strand
caaauaucagggaacagau

SEQ ID NO: 854391 - RNA, 19 nt, Homo sapiens
  misc_RNA (1)...(19): siRNA sense strand
aagaaagggcaucucaugu

SEQ ID NO: 854392 - RNA, 19 nt, Homo sapiens
  misc_RNA (1)...(19): siRNA sense strand
cauguggcuuagugaacuu

SEQ ID NO: 854393 - RNA, 19 nt, Homo sapiens
  misc_RNA (1)...(19): siRNA sense strand
caugaucuaguauuugcuu

SEQ ID NO: 854394 - RNA, 19 nt, Homo sapiens
  misc_RNA (1)...(19): siRNA sense strand
uaacauggauggucugucu

SEQ ID NO: 854395 - RNA, 19 nt, Homo sapiens
  misc_RNA (1)...(19): siRNA sense strand
ggaaguggauauucuggau

SEQ ID NO: 854396 - RNA, 19 nt, Homo sapiens
  misc_RNA (1)...(19): siRNA sense strand
agaaugagacuccaucuuu

SEQ ID NO: 854397 - RNA, 19 nt, Homo sapiens
  misc_RNA (1)...(19): siRNA sense strand
caagcaguuucucuaaauu

SEQ ID NO: 854398 - RNA, 19 nt, Homo sapiens
  misc_RNA (1)...(19): siRNA sense strand
ggaauuugaggcuacagua

SEQ ID NO: 854399 - RNA, 19 nt, Homo sapiens
  misc_RNA (1)...(19): siRNA sense strand
gaaugagacuccaucuuuu

SEQ ID NO: 854400 - RNA, 19 nt, Homo sapiens
  misc_RNA (1)...(19): siRNA sense strand
gaauuugaggcuacaguaa

SEQ ID NO: 854401 - RNA, 19 nt, Homo sapiens
  misc_RNA (1)...(19): siRNA sense strand
acaagcaguuucucuaaau

SEQ ID NO: 854402 - RNA, 19 nt, Homo sapiens
  misc_RNA (1)...(19): siRNA sense strand
gaaaugaccccaucaaauc

SEQ ID NO: 854403 - RNA, 19 nt, Homo sapiens
  misc_RNA (1)...(19): siRNA sense strand
caucaaauccaaccagcua

SEQ ID NO: 854404 - RNA, 19 nt, Homo sapiens
  misc_RNA (1)...(19): siRNA sense strand
gggcaucucuucucucacu

SEQ ID NO: 854405 - RNA, 19 nt, Homo sapiens
  misc_RNA (1)...(19): siRNA sense strand
gauggucugucuguccuuu

SEQ ID NO: 854406 - RNA, 19 nt, Homo sapiens
  misc_RNA (1)...(19): siRNA sense strand
gcuaugccaggcucuauuu

SEQ ID NO: 854407 - RNA, 19 nt, Homo sapiens
  misc_RNA (1)...(19): siRNA sense strand
gagacuccaucuuuuaaaa

SEQ ID NO: 854408 - RNA, 19 nt, Homo sapiens
  misc_RNA (1)...(19): siRNA sense strand
gaaguggauauucuggauu

SEQ ID NO: 854409 - RNA, 19 nt, Homo sapiens
  misc_RNA (1)...(19): siRNA sense strand
aacaagcaguuucucuaaa

SEQ ID NO: 854410 - RNA, 19 nt, Homo sapiens
  misc_RNA (1)...(19): siRNA sense strand
gguuuccuuuggcuucaua

SEQ ID NO: 854411 - RNA, 19 nt, Homo sapiens
  misc_RNA (1)...(19): siRNA sense strand
gauucugcuugcccuauau

SEQ ID NO: 854412 - RNA, 19 nt, Homo sapiens
  misc_RNA (1)...(19): siRNA sense strand
agauucugcuugcccuaua

SEQ ID NO: 854413 - RNA, 19 nt, Homo sapiens
  misc_RNA (1)...(19): siRNA sense strand
gguuggaaguggauauucu

SEQ ID NO: 854414 - RNA, 19 nt, Homo sapiens
  misc_RNA (1)...(19): siRNA sense strand
ggcccuuacuucuaggaaa

SEQ ID NO: 854415 - RNA, 19 nt, Homo sapiens
  misc_RNA (1)...(19): siRNA sense strand
guucaguaccugcucaaga

SEQ ID NO: 854416 - RNA, 19 nt, Homo sapiens
  misc_RNA (1)...(19): siRNA sense strand
aaguggauauucuggauuc

SEQ ID NO: 854417 - RNA, 19 nt, Homo sapiens
  misc_RNA (1)...(19): siRNA sense strand
uucaguaccugcucaagau

SEQ ID NO: 854418 - RNA, 19 nt, Homo sapiens
  misc_RNA (1)...(19): siRNA sense strand
uggauauucuggauucauc

SEQ ID NO: 854419 - RNA, 19 nt, Homo sapiens
  misc_RNA (1)...(19): siRNA sense strand
ccacuugcccagagcuaga

SEQ ID NO: 854420 - RNA, 19 nt, Homo sapiens
  misc_RNA (1)...(19): siRNA sense strand
uccaggcccuuacuucuag

SEQ ID NO: 854421 - RNA, 19 nt, Homo sapiens
  misc_RNA (1)...(19): siRNA sense strand
ucaaauccaaccagcuaug

SEQ ID NO: 854422 - RNA, 19 nt, Homo sapiens
  misc_RNA (1)...(19): siRNA sense strand
gcccuuacuucuaggaaaa

SEQ ID NO: 854423 - RNA, 19 nt, Homo sapiens
  misc_RNA (1)...(19): siRNA sense strand
aauuugaggcuacaguaaa

SEQ ID NO: 854424 - RNA, 19 nt, Homo sapiens
  misc_RNA (1)...(19): siRNA sense strand
cuauuuccauccuauuucu

SEQ ID NO: 854425 - RNA, 19 nt, Homo sapiens
  misc_RNA (1)...(19): siRNA sense strand
ugaaaugaccccaucaaau

SEQ ID NO: 854426 - RNA, 19 nt, Homo sapiens
  misc_RNA (1)...(19): siRNA sense strand
cagaaugagacuccaucuu

SEQ ID NO: 854427 - RNA, 19 nt, Homo sapiens
  misc_RNA (1)...(19): siRNA sense strand
cugcuugcccuauauaaca

SEQ ID NO: 854428 - RNA, 19 nt, Homo sapiens
  misc_RNA (1)...(19): siRNA sense strand
ccaggaauuugaggcuaca

SEQ ID NO: 854429 - RNA, 19 nt, Homo sapiens
  misc_RNA (1)...(19): siRNA sense strand
gaaguuaucaagcuccuua

SEQ ID NO: 854430 - RNA, 19 nt, Homo sapiens
  misc_RNA (1)...(19): siRNA sense strand
gauggagccuggacugaaa

SEQ ID NO: 854431 - RNA, 19 nt, Homo sapiens
  misc_RNA (1)...(19): siRNA sense strand
gaggcuggcugccguauga

SEQ ID NO: 854432 - RNA, 19 nt, Homo sapiens
  misc_RNA (1)...(19): siRNA sense strand
ucagaacucucccugcuuu

SEQ ID NO: 854433 - RNA, 19 nt, Homo sapiens
  misc_RNA (1)...(19): siRNA sense strand
gaugugcucuggcauguca

SEQ ID NO: 854434 - RNA, 19 nt, Homo sapiens
  misc_RNA (1)...(19): siRNA sense strand
gggaagaaauuuuguagaa

SEQ ID NO: 854435 - RNA, 19 nt, Homo sapiens
  misc_RNA (1)...(19): siRNA sense strand
ggacugaaagggugaaugg

SEQ ID NO: 854436 - RNA, 19 nt, Homo sapiens
  misc_RNA (1)...(19): siRNA sense strand
uggcuaagaaugcacguua

SEQ ID NO: 854437 - RNA, 19 nt, Homo sapiens
  misc_RNA (1)...(19): siRNA sense strand
cauagaaggcgcaguaaag

SEQ ID NO: 854438 - RNA, 19 nt, Homo sapiens
  misc_RNA (1)...(19): siRNA sense strand
caaacgagaacagaaguga

SEQ ID NO: 854439 - RNA, 19 nt, Homo sapiens
  misc_RNA (1)...(19): siRNA sense strand
cacguuaucugcagugauc

SEQ ID NO: 854440 - RNA, 19 nt, Homo sapiens
  misc_RNA (1)...(19): siRNA sense strand
ccugugaauucuuggcuaa

SEQ ID NO: 854441 - RNA, 19 nt, Homo sapiens
  misc_RNA (1)...(19): siRNA sense strand
gagcuugguuuucccuuuu

SEQ ID NO: 854442 - RNA, 19 nt, Homo sapiens
  misc_RNA (1)...(19): siRNA sense strand
gagacucccugugaauucu

SEQ ID NO: 854443 - RNA, 19 nt, Homo sapiens
  misc_RNA (1)...(19): siRNA sense strand
ugaguggcccuaccuguga

SEQ ID NO: 854444 - RNA, 19 nt, Homo sapiens
  misc_RNA (1)...(19): siRNA sense strand
ucaaagggcagagaagaau

SEQ ID NO: 854445 - RNA, 19 nt, Homo sapiens
  misc_RNA (1)...(19): siRNA sense strand
aaacacaaacgagaacaga

SEQ ID NO: 854446 - RNA, 19 nt, Homo sapiens
  misc_RNA (1)...(19): siRNA sense strand
ggcuaagaaugcacguuau

SEQ ID NO: 854447 - RNA, 19 nt, Homo sapiens
  misc_RNA (1)...(19): siRNA sense strand
gggagaggcuggaguuccu

SEQ ID NO: 854448 - RNA, 19 nt, Homo sapiens
  misc_RNA (1)...(19): siRNA sense strand
uaucugcagugaucuaaaa

SEQ ID NO: 854449 - RNA, 19 nt, Homo sapiens
  misc_RNA (1)...(19): siRNA sense strand
gcuaagaaugcacguuauc

SEQ ID NO: 854450 - RNA, 19 nt, Homo sapiens
  misc_RNA (1)...(19): siRNA sense strand
ccauagaaggcgcaguaaa

SEQ ID NO: 854451 - RNA, 19 nt, Homo sapiens
  misc_RNA (1)...(19): siRNA sense strand
uaagaaugcacguuaucug

SEQ ID NO: 854452 - RNA, 19 nt, Homo sapiens
  misc_RNA (1)...(19): siRNA sense strand
ugccauagaaggcgcagua

SEQ ID NO: 854453 - RNA, 19 nt, Homo sapiens
  misc_RNA (1)...(19): siRNA sense strand
caaagggcagagaagaaug

SEQ ID NO: 854454 - RNA, 19 nt, Homo sapiens
  misc_RNA (1)...(19): siRNA sense strand
ggaagaaauuuuguagaag

SEQ ID NO: 854455 - RNA, 19 nt, Homo sapiens
  misc_RNA (1)...(19): siRNA sense strand
acacaaacgagaacagaag

SEQ ID NO: 854456 - RNA, 19 nt, Homo sapiens
  misc_RNA (1)...(19): siRNA sense strand
gcuggcugccguaugauug

SEQ ID NO: 854457 - RNA, 19 nt, Homo sapiens
  misc_RNA (1)...(19): siRNA sense strand
cagcauagagcuugguuuu

SEQ ID NO: 854458 - RNA, 19 nt, Homo sapiens
  misc_RNA (1)...(19): siRNA sense strand
gaaaggggaccagaugaug

SEQ ID NO: 854459 - RNA, 19 nt, Homo sapiens
  misc_RNA (1)...(19): siRNA sense strand
gaagugaguggcccuaccu

SEQ ID NO: 854460 - RNA, 19 nt, Homo sapiens
  misc_RNA (1)...(19): siRNA sense strand
ccucaaagggcagagaaga

SEQ ID NO: 854461 - RNA, 19 nt, Homo sapiens
  misc_RNA (1)...(19): siRNA sense strand
gcauagagcuugguuuucc

SEQ ID NO: 854462 - RNA, 19 nt, Homo sapiens
  misc_RNA (1)...(19): siRNA sense strand
gaacucucccugcuuugcu

SEQ ID NO: 854463 - RNA, 19 nt, Homo sapiens
  misc_RNA (1)...(19): siRNA sense strand
gacucccugugaauucuug

SEQ ID NO: 854464 - RNA, 19 nt, Homo sapiens
  misc_RNA (1)...(19): siRNA sense strand
gaaagagacuauucaccaa

SEQ ID NO: 854465 - RNA, 19 nt, Homo sapiens
  misc_RNA (1)...(19): siRNA sense strand
gcacugaccaucacaucaa

SEQ ID NO: 854466 - RNA, 19 nt, Homo sapiens
  misc_RNA (1)...(19): siRNA sense strand
ggaacaagaucggcaaguc

SEQ ID NO: 854467 - RNA, 19 nt, Homo sapiens
  misc_RNA (1)...(19): siRNA sense strand
cauaagcuuucauacaaga

SEQ ID NO: 854468 - RNA, 19 nt, Homo sapiens
  misc_RNA (1)...(19): siRNA sense strand
agcauaagcuuucauacaa

SEQ ID NO: 854469 - RNA, 19 nt, Homo sapiens
  misc_RNA (1)...(19): siRNA sense strand
ggaaugcacugaccaucac

SEQ ID NO: 854470 - RNA, 19 nt, Homo sapiens
  misc_RNA (1)...(19): siRNA sense strand
gcauaagcuuucauacaag

SEQ ID NO: 854471 - RNA, 19 nt, Homo sapiens
  misc_RNA (1)...(19): siRNA sense strand
ccaagaugcugcugcugau

SEQ ID NO: 854472 - RNA, 19 nt, Homo sapiens
  misc_RNA (1)...(19): siRNA sense strand
cagcauaagcuuucauaca

SEQ ID NO: 854473 - RNA, 19 nt, Homo sapiens
  misc_RNA (1)...(19): siRNA sense strand
caggaacaauggcaucauc

SEQ ID NO: 854474 - RNA, 19 nt, Homo sapiens
  misc_RNA (1)...(19): siRNA sense strand
cgacuccugugcccaagau

SEQ ID NO: 854475 - RNA, 19 nt, Homo sapiens
  misc_RNA (1)...(19): siRNA sense strand
gugaauuacaccuguuaaa

SEQ ID NO: 854476 - RNA, 19 nt, Homo sapiens
  misc_RNA (1)...(19): siRNA sense strand
gguuacagcauaagcuuuc

SEQ ID NO: 854477 - RNA, 19 nt, Homo sapiens
  misc_RNA (1)...(19): siRNA sense strand
uacagcauaagcuuucaua

SEQ ID NO: 854478 - RNA, 19 nt, Homo sapiens
  misc_RNA (1)...(19): siRNA sense strand
uagugaauuacaccuguua

SEQ ID NO: 854479 - RNA, 19 nt, Homo sapiens
  misc_RNA (1)...(19): siRNA sense strand
gcugauggccgguauugac

SEQ ID NO: 854480 - RNA, 19 nt, Homo sapiens
  misc_RNA (1)...(19): siRNA sense strand
ggaacaauggcaucaucuc

SEQ ID NO: 854481 - RNA, 19 nt, Homo sapiens
  misc_RNA (1)...(19): siRNA sense strand
gauggccgguauugacaac

SEQ ID NO: 854482 - RNA, 19 nt, Homo sapiens
  misc_RNA (1)...(19): siRNA sense strand
gagggaggagacaaacuua

SEQ ID NO: 854483 - RNA, 19 nt, Homo sapiens
  misc_RNA (1)...(19): siRNA sense strand
cgagggaggagacaaacuu

SEQ ID NO: 854484 - RNA, 19 nt, Homo sapiens
  misc_RNA (1)...(19): siRNA sense strand
ggaggagacaaacuuaacu

SEQ ID NO: 854485 - RNA, 19 nt, Homo sapiens
  misc_RNA (1)...(19): siRNA sense strand
gggaggagacaaacuuaac

SEQ ID NO: 854486 - RNA, 19 nt, Homo sapiens
  misc_RNA (1)...(19): siRNA sense strand
gaggagacaaacuuaacuc

SEQ ID NO: 854487 - RNA, 19 nt, Homo sapiens
  misc_RNA (1)...(19): siRNA sense strand
gcacgcacagggagaacuc

SEQ ID NO: 854488 - RNA, 19 nt, Homo sapiens
  misc_RNA (1)...(19): siRNA sense strand
gagaauaagugcaguauga

SEQ ID NO: 854489 - RNA, 19 nt, Homo sapiens
  misc_RNA (1)...(19): siRNA sense strand
gaacugcugccaacaauua

SEQ ID NO: 854490 - RNA, 19 nt, Homo sapiens
  misc_RNA (1)...(19): siRNA sense strand
gcacuaugcuggauacaaa

SEQ ID NO: 854491 - RNA, 19 nt, Homo sapiens
  misc_RNA (1)...(19): siRNA sense strand
gaaguaaguuuguuguaga

SEQ ID NO: 854492 - RNA, 19 nt, Homo sapiens
  misc_RNA (1)...(19): siRNA sense strand
gcauaugaguuguaucuuu

SEQ ID NO: 854493 - RNA, 19 nt, Homo sapiens
  misc_RNA (1)...(19): siRNA sense strand
guaaacaacuauuggauuc

SEQ ID NO: 854494 - RNA, 19 nt, Homo sapiens
  misc_RNA (1)...(19): siRNA sense strand
ggaaagugguguuaaauac

SEQ ID NO: 854495 - RNA, 19 nt, Homo sapiens
  misc_RNA (1)...(19): siRNA sense strand
caaggaaagugguguuaaa

SEQ ID NO: 854496 - RNA, 19 nt, Homo sapiens
  misc_RNA (1)...(19): siRNA sense strand
ggacagauauaccaagcuu

SEQ ID NO: 854497 - RNA, 19 nt, Homo sapiens
  misc_RNA (1)...(19): siRNA sense strand
gccauuagaucguuucauu

SEQ ID NO: 854498 - RNA, 19 nt, Homo sapiens
  misc_RNA (1)...(19): siRNA sense strand
cuauaagggucaagaauuu

SEQ ID NO: 854499 - RNA, 19 nt, Homo sapiens
  misc_RNA (1)...(19): siRNA sense strand
caaauggccuauacuacaa

SEQ ID NO: 854500 - RNA, 19 nt, Homo sapiens
  misc_RNA (1)...(19): siRNA sense strand
ucuaaaugcucgacacaua

SEQ ID NO: 854501 - RNA, 19 nt, Homo sapiens
  misc_RNA (1)...(19): siRNA sense strand
ggaaguaaguuuguuguag

SEQ ID NO: 854502 - RNA, 19 nt, Homo sapiens
  misc_RNA (1)...(19): siRNA sense strand
gguacgaggugacaguuaa

SEQ ID NO: 854503 - RNA, 19 nt, Homo sapiens
  misc_RNA (1)...(19): siRNA sense strand
ugucucaucuuguuguuua

SEQ ID NO: 854504 - RNA, 19 nt, Homo sapiens
  misc_RNA (1)...(19): siRNA sense strand
guaaguuuguuguagauug

SEQ ID NO: 854505 - RNA, 19 nt, Homo sapiens
  misc_RNA (1)...(19): siRNA sense strand
gaagaaauaaccaguaucu

SEQ ID NO: 854506 - RNA, 19 nt, Homo sapiens
  misc_RNA (1)...(19): siRNA sense strand
gcucagcagucaaagaaga

SEQ ID NO: 854507 - RNA, 19 nt, Homo sapiens
  misc_RNA (1)...(19): siRNA sense strand
gaagauucacuaaccauug

SEQ ID NO: 854508 - RNA, 19 nt, Homo sapiens
  misc_RNA (1)...(19): siRNA sense strand
guaccacuuugacuucuuu

SEQ ID NO: 854509 - RNA, 19 nt, Homo sapiens
  misc_RNA (1)...(19): siRNA sense strand
cauuaagacuucaagacua

SEQ ID NO: 854510 - RNA, 19 nt, Homo sapiens
  misc_RNA (1)...(19): siRNA sense strand
ggauacaaauaguuggauu

SEQ ID NO: 854511 - RNA, 19 nt, Homo sapiens
  misc_RNA (1)...(19): siRNA sense strand
ugagcuacauguuugagua

SEQ ID NO: 854512 - RNA, 19 nt, Homo sapiens
  misc_RNA (1)...(19): siRNA sense strand
acaaauacuuggacagguu

SEQ ID NO: 854513 - RNA, 19 nt, Homo sapiens
  misc_RNA (1)...(19): siRNA sense strand
ccauauugcucaaccagaa

SEQ ID NO: 854514 - RNA, 19 nt, Homo sapiens
  misc_RNA (1)...(19): siRNA sense strand
uaucugacauuaagacuuc

SEQ ID NO: 854515 - RNA, 19 nt, Homo sapiens
  misc_RNA (1)...(19): siRNA sense strand
gcucgacacauaaauuuaa

SEQ ID NO: 854516 - RNA, 19 nt, Homo sapiens
  misc_RNA (1)...(19): siRNA sense strand
uaagcaaguucguucuauu

SEQ ID NO: 854517 - RNA, 19 nt, Homo sapiens
  misc_RNA (1)...(19): siRNA sense strand
caauacccauguggcauua

SEQ ID NO: 854518 - RNA, 19 nt, Homo sapiens
  misc_RNA (1)...(19): siRNA sense strand
agaccaaguuuguacauga

SEQ ID NO: 854519 - RNA, 19 nt, Homo sapiens
  misc_RNA (1)...(19): siRNA sense strand
gaccaaguuuguacaugaa

SEQ ID NO: 854520 - RNA, 19 nt, Homo sapiens
  misc_RNA (1)...(19): siRNA sense strand
aaucuacacucaugucuau

SEQ ID NO: 854521 - RNA, 19 nt, Homo sapiens
  misc_RNA (1)...(19): siRNA sense strand
gaccaccucuccauugugu

SEQ ID NO: 854522 - RNA, 19 nt, Homo sapiens
  misc_RNA (1)...(19): siRNA sense strand
augaagaacugguggcuuu

SEQ ID NO: 854523 - RNA, 19 nt, Homo sapiens
  misc_RNA (1)...(19): siRNA sense strand
gcauaaacagcacuucuau

SEQ ID NO: 854524 - RNA, 19 nt, Homo sapiens
  misc_RNA (1)...(19): siRNA sense strand
gagcauucuuugaucuuau

SEQ ID NO: 854525 - RNA, 19 nt, Homo sapiens
  misc_RNA (1)...(19): siRNA sense strand
cgagcauucuuugaucuua

SEQ ID NO: 854526 - RNA, 19 nt, Homo sapiens
  misc_RNA (1)...(19): siRNA sense strand
caaguucguucaggauuga

SEQ ID NO: 854527 - RNA, 19 nt, Homo sapiens
  misc_RNA (1)...(19): siRNA sense strand
gaaacuccauauugcucaa

SEQ ID NO: 854528 - RNA, 19 nt, Homo sapiens
  misc_RNA (1)...(19): siRNA sense strand
gaaagugguguuaaauaca

SEQ ID NO: 854529 - RNA, 19 nt, Homo sapiens
  misc_RNA (1)...(19): siRNA sense strand
aguaugagcuacauguuug

SEQ ID NO: 854530 - RNA, 19 nt, Homo sapiens
  misc_RNA (1)...(19): siRNA sense strand
gcugugggaugucuucuuc

SEQ ID NO: 854531 - RNA, 19 nt, Homo sapiens
  misc_RNA (1)...(19): siRNA sense strand
gcaguugacuacaguucga

SEQ ID NO: 854532 - RNA, 19 nt, Homo sapiens
  misc_RNA (1)...(19): siRNA sense strand
ccaaguucguucaggauug

SEQ ID NO: 854533 - RNA, 19 nt, Homo sapiens
  misc_RNA (1)...(19): siRNA sense strand
gggauccuaugcugaagaa

SEQ ID NO: 854534 - RNA, 19 nt, Homo sapiens
  misc_RNA (1)...(19): siRNA sense strand
uuggacagguuguugcuua

SEQ ID NO: 854535 - RNA, 19 nt, Homo sapiens
  misc_RNA (1)...(19): siRNA sense strand
uguaaacaauugcaguuga

SEQ ID NO: 854536 - RNA, 19 nt, Homo sapiens
  misc_RNA (1)...(19): siRNA sense strand
uggauugucuucaaggaaa

SEQ ID NO: 854537 - RNA, 19 nt, Homo sapiens
  misc_RNA (1)...(19): siRNA sense strand
gcuggaggauuccgggauu

SEQ ID NO: 854538 - RNA, 19 nt, Homo sapiens
  misc_RNA (1)...(19): siRNA sense strand
acacucaugucuauuguca

SEQ ID NO: 854539 - RNA, 19 nt, Homo sapiens
  misc_RNA (1)...(19): siRNA sense strand
gaaaauagaacuuccaaag

SEQ ID NO: 854540 - RNA, 19 nt, Homo sapiens
  misc_RNA (1)...(19): siRNA sense strand
uguuguagauugugaauuc

SEQ ID NO: 854541 - RNA, 19 nt, Homo sapiens
  misc_RNA (1)...(19): siRNA sense strand
gaucguuucauuacagauu

SEQ ID NO: 854542 - RNA, 19 nt, Homo sapiens
  misc_RNA (1)...(19): siRNA sense strand
gguaaugcuggaaguuaua

SEQ ID NO: 854543 - RNA, 19 nt, Homo sapiens
  misc_RNA (1)...(19): siRNA sense strand
uaaaugcucgacacauaaa

SEQ ID NO: 854544 - RNA, 19 nt, Homo sapiens
  misc_RNA (1)...(19): siRNA sense strand
aaauacaaauggccuauac

SEQ ID NO: 854545 - RNA, 19 nt, Homo sapiens
  misc_RNA (1)...(19): siRNA sense strand
gaacugguggcuuuguaug

SEQ ID NO: 854546 - RNA, 19 nt, Homo sapiens
  misc_RNA (1)...(19): siRNA sense strand
ccauguggcauuauuuaaa

SEQ ID NO: 854547 - RNA, 19 nt, Homo sapiens
  misc_RNA (1)...(19): siRNA sense strand
caacagaccaccucuccau

SEQ ID NO: 854548 - RNA, 19 nt, Homo sapiens
  misc_RNA (1)...(19): siRNA sense strand
cuaaaugcucgacacauaa

SEQ ID NO: 854549 - RNA, 19 nt, Homo sapiens
  misc_RNA (1)...(19): siRNA sense strand
ugaguuguaucuuuaugga

SEQ ID NO: 854550 - RNA, 19 nt, Homo sapiens
  misc_RNA (1)...(19): siRNA sense strand
auaaacagcacuucuaugu

SEQ ID NO: 854551 - RNA, 19 nt, Homo sapiens
  misc_RNA (1)...(19): siRNA sense strand
gaucuuauuggugcugaua

SEQ ID NO: 854552 - RNA, 19 nt, Homo sapiens
  misc_RNA (1)...(19): siRNA sense strand
ggucaagaauuugcuccaa

SEQ ID NO: 854553 - RNA, 19 nt, Homo sapiens
  misc_RNA (1)...(19): siRNA sense strand
ccauuagaucguuucauua

SEQ ID NO: 854554 - RNA, 19 nt, Homo sapiens
  misc_RNA (1)...(19): siRNA sense strand
acaaauggccuauacuaca

SEQ ID NO: 854555 - RNA, 19 nt, Homo sapiens
  misc_RNA (1)...(19): siRNA sense strand
gaagcagaccaaguuugua

SEQ ID NO: 854556 - RNA, 19 nt, Homo sapiens
  misc_RNA (1)...(19): siRNA sense strand
auacaaauggccuauacua

SEQ ID NO: 854557 - RNA, 19 nt, Homo sapiens
  misc_RNA (1)...(19): siRNA sense strand
cuauguggguucuaguaaa

SEQ ID NO: 854558 - RNA, 19 nt, Homo sapiens
  misc_RNA (1)...(19): siRNA sense strand
aagaacugguggcuuugua

SEQ ID NO: 854559 - RNA, 19 nt, Homo sapiens
  misc_RNA (1)...(19): siRNA sense strand
ucucugaaacuccauauug

SEQ ID NO: 854560 - RNA, 19 nt, Homo sapiens
  misc_RNA (1)...(19): siRNA sense strand
gcagucaaagaagaaauaa

SEQ ID NO: 854561 - RNA, 19 nt, Homo sapiens
  misc_RNA (1)...(19): siRNA sense strand
acucaugucuauugucaga

SEQ ID NO: 854562 - RNA, 19 nt, Homo sapiens
  misc_RNA (1)...(19): siRNA sense strand
ggaaaauccagcuauaauu

SEQ ID NO: 854563 - RNA, 19 nt, Homo sapiens
  misc_RNA (1)...(19): siRNA sense strand
gacuacaguucgagcauuc

SEQ ID NO: 854564 - RNA, 19 nt, Homo sapiens
  misc_RNA (1)...(19): siRNA sense strand
guaaacaauugcaguugac

SEQ ID NO: 854565 - RNA, 19 nt, Homo sapiens
  misc_RNA (1)...(19): siRNA sense strand
auacgacuguaaacaacua

SEQ ID NO: 854566 - RNA, 19 nt, Homo sapiens
  misc_RNA (1)...(19): siRNA sense strand
ccaaguuuguacaugaaug

SEQ ID NO: 854567 - RNA, 19 nt, Homo sapiens
  misc_RNA (1)...(19): siRNA sense strand
gaaaagauacauacagcuu

SEQ ID NO: 854568 - RNA, 19 nt, Homo sapiens
  misc_RNA (1)...(19): siRNA sense strand
caaauggaccuauguagcu

SEQ ID NO: 854569 - RNA, 19 nt, Homo sapiens
  misc_RNA (1)...(19): siRNA sense strand
uaucaccacuuuauaagac

SEQ ID NO: 854570 - RNA, 19 nt, Homo sapiens
  misc_RNA (1)...(19): siRNA sense strand
cagaccaccucuccauugu

SEQ ID NO: 854571 - RNA, 19 nt, Homo sapiens
  misc_RNA (1)...(19): siRNA sense strand
gaaaagcagaggacauuga

SEQ ID NO: 854572 - RNA, 19 nt, Homo sapiens
  misc_RNA (1)...(19): siRNA sense strand
ucauguugcuccugugaug

SEQ ID NO: 854573 - RNA, 19 nt, Homo sapiens
  misc_RNA (1)...(19): siRNA sense strand
agcaugaucugauaaaucu

SEQ ID NO: 854574 - RNA, 19 nt, Homo sapiens
  misc_RNA (1)...(19): siRNA sense strand
caaagaaacuggcaaaacg

SEQ ID NO: 854575 - RNA, 19 nt, Homo sapiens
  misc_RNA (1)...(19): siRNA sense strand
guaaugcuggaaguuauaa

SEQ ID NO: 854576 - RNA, 19 nt, Homo sapiens
  misc_RNA (1)...(19): siRNA sense strand
guacacgucaucagacugu

SEQ ID NO: 854577 - RNA, 19 nt, Homo sapiens
  misc_RNA (1)...(19): siRNA sense strand
aggaaagugguguuaaaua

SEQ ID NO: 854578 - RNA, 19 nt, Homo sapiens
  misc_RNA (1)...(19): siRNA sense strand
gugcugauacuaaacaaau

SEQ ID NO: 854579 - RNA, 19 nt, Homo sapiens
  misc_RNA (1)...(19): siRNA sense strand
uauuggugcugauacuaaa

SEQ ID NO: 854580 - RNA, 19 nt, Homo sapiens
  misc_RNA (1)...(19): siRNA sense strand
guucgagcauucuuugauc

SEQ ID NO: 854581 - RNA, 19 nt, Homo sapiens
  misc_RNA (1)...(19): siRNA sense strand
ugacuacaguucgagcauu

SEQ ID NO: 854582 - RNA, 19 nt, Homo sapiens
  misc_RNA (1)...(19): siRNA sense strand
gaggagaauaagugcagua

SEQ ID NO: 854583 - RNA, 19 nt, Homo sapiens
  misc_RNA (1)...(19): siRNA sense strand
ucuauaagggucaagaauu

SEQ ID NO: 854584 - RNA, 19 nt, Homo sapiens
  misc_RNA (1)...(19): siRNA sense strand
gauccuaugcugaagaaca

SEQ ID NO: 854585 - RNA, 19 nt, Homo sapiens
  misc_RNA (1)...(19): siRNA sense strand
uaaccaguaucuauagacu

SEQ ID NO: 854586 - RNA, 19 nt, Homo sapiens
  misc_RNA (1)...(19): siRNA sense strand
ugaggaaaauccagcuaua

SEQ ID NO: 854587 - RNA, 19 nt, Homo sapiens
  misc_RNA (1)...(19): siRNA sense strand
ucuggaaccuggcguuuua

SEQ ID NO: 854588 - RNA, 19 nt, Homo sapiens
  misc_RNA (1)...(19): siRNA sense strand
ggaaagugcucugcaggaa

SEQ ID NO: 854589 - RNA, 19 nt, Homo sapiens
  misc_RNA (1)...(19): siRNA sense strand
agaaacaccuugauggaaa

SEQ ID NO: 854590 - RNA, 19 nt, Homo sapiens
  misc_RNA (1)...(19): siRNA sense strand
gaaacaccuugauggaaag

SEQ ID NO: 854591 - RNA, 19 nt, Homo sapiens
  misc_RNA (1)...(19): siRNA sense strand
gaugccagacacugaauaa

SEQ ID NO: 854592 - RNA, 19 nt, Homo sapiens
  misc_RNA (1)...(19): siRNA sense strand
ccagaaacaccuugaugga

SEQ ID NO: 854593 - RNA, 19 nt, Homo sapiens
  misc_RNA (1)...(19): siRNA sense strand
cagaaacaccuugauggaa

SEQ ID NO: 854594 - RNA, 19 nt, Homo sapiens
  misc_RNA (1)...(19): siRNA sense strand
gccagacacugaauaaacg

SEQ ID NO: 854595 - RNA, 19 nt, Homo sapiens
  misc_RNA (1)...(19): siRNA sense strand
ggaugccagacacugaaua

SEQ ID NO: 854596 - RNA, 19 nt, Homo sapiens
  misc_RNA (1)...(19): siRNA sense strand
cugaauaaacgcaggaaga

SEQ ID NO: 854597 - RNA, 19 nt, Homo sapiens
  misc_RNA (1)...(19): siRNA sense strand
guccagaaacaccuugaug

SEQ ID NO: 854598 - RNA, 19 nt, Homo sapiens
  misc_RNA (1)...(19): siRNA sense strand
caugugugccugugugugu

SEQ ID NO: 854599 - RNA, 19 nt, Homo sapiens
  misc_RNA (1)...(19): siRNA sense strand
ccaaggagguugugaagug

SEQ ID NO: 854600 - RNA, 19 nt, Homo sapiens
  misc_RNA (1)...(19): siRNA sense strand
gggaaaagcagccugauua

SEQ ID NO: 854601 - RNA, 19 nt, Homo sapiens
  misc_RNA (1)...(19): siRNA sense strand
uggauuaccuucggaauga

SEQ ID NO: 854602 - RNA, 19 nt, Homo sapiens
  misc_RNA (1)...(19): siRNA sense strand
gcaccauccugcauaacug

SEQ ID NO: 854603 - RNA, 19 nt, Homo sapiens
  misc_RNA (1)...(19): siRNA sense strand
gggcagaaggcaacaagaa

SEQ ID NO: 854604 - RNA, 19 nt, Homo sapiens
  misc_RNA (1)...(19): siRNA sense strand
guugugaaguggcuggauu

SEQ ID NO: 854605 - RNA, 19 nt, Homo sapiens
  misc_RNA (1)...(19): siRNA sense strand
aaaagcagccugauuaaaa

SEQ ID NO: 854606 - RNA, 19 nt, Homo sapiens
  misc_RNA (1)...(19): siRNA sense strand
ugaaguggcuggauuaccu

SEQ ID NO: 854607 - RNA, 19 nt, Homo sapiens
  misc_RNA (1)...(19): siRNA sense strand
ggaaaagcagccugauuaa

SEQ ID NO: 854608 - RNA, 19 nt, Homo sapiens
  misc_RNA (1)...(19): siRNA sense strand
gaaaagcagccugauuaaa

SEQ ID NO: 854609 - RNA, 19 nt, Homo sapiens
  misc_RNA (1)...(19): siRNA sense strand
uuguaggccuucccaauau

SEQ ID NO: 854610 - RNA, 19 nt, Homo sapiens
  misc_RNA (1)...(19): siRNA sense strand
gaacuauugcugccuuggu

SEQ ID NO: 854611 - RNA, 19 nt, Homo sapiens
  misc_RNA (1)...(19): siRNA sense strand
auaacugcauccacaucua

SEQ ID NO: 854612 - RNA, 19 nt, Homo sapiens
  misc_RNA (1)...(19): siRNA sense strand
uguaggccuucccaauauu

SEQ ID NO: 854613 - RNA, 19 nt, Homo sapiens
  misc_RNA (1)...(19): siRNA sense strand
gaagcugguccuggucuug

SEQ ID NO: 854614 - RNA, 19 nt, Homo sapiens
  misc_RNA (1)...(19): siRNA sense strand
uaacugcauccacaucuag

SEQ ID NO: 854615 - RNA, 19 nt, Homo sapiens
  misc_RNA (1)...(19): siRNA sense strand
gaaguggcuggauuaccuu

SEQ ID NO: 854616 - RNA, 19 nt, Homo sapiens
  misc_RNA (1)...(19): siRNA sense strand
guaggccuucccaauauug

SEQ ID NO: 854617 - RNA, 19 nt, Homo sapiens
  misc_RNA (1)...(19): siRNA sense strand
gcauaacugcauccacauc

SEQ ID NO: 854618 - RNA, 19 nt, Homo sapiens
  misc_RNA (1)...(19): siRNA sense strand
cagcaucaggucagcuuug

SEQ ID NO: 854619 - RNA, 19 nt, Homo sapiens
  misc_RNA (1)...(19): siRNA sense strand
ugggcaccauccugcauaa

SEQ ID NO: 854620 - RNA, 19 nt, Homo sapiens
  misc_RNA (1)...(19): siRNA sense strand
gugggcaccauccugcaua

SEQ ID NO: 854621 - RNA, 19 nt, Homo sapiens
  misc_RNA (1)...(19): siRNA sense strand
ggcagaaggcaacaagaag

SEQ ID NO: 854622 - RNA, 19 nt, Homo sapiens
  misc_RNA (1)...(19): siRNA sense strand
gaagaagauuggagaaauu

SEQ ID NO: 854623 - RNA, 19 nt, Homo sapiens
  misc_RNA (1)...(19): siRNA sense strand
caacugugcugaugacauu

SEQ ID NO: 854624 - RNA, 19 nt, Homo sapiens
  misc_RNA (1)...(19): siRNA sense strand
ccaaacauguuauccagua

SEQ ID NO: 854625 - RNA, 19 nt, Homo sapiens
  misc_RNA (1)...(19): siRNA sense strand
gaacaggucagacauuuga

SEQ ID NO: 854626 - RNA, 19 nt, Homo sapiens
  misc_RNA (1)...(19): siRNA sense strand
gaaauaagcaugaaggaau

SEQ ID NO: 854627 - RNA, 19 nt, Homo sapiens
  misc_RNA (1)...(19): siRNA sense strand
gaaguaaacggaagauauu

SEQ ID NO: 854628 - RNA, 19 nt, Homo sapiens
  misc_RNA (1)...(19): siRNA sense strand
ggaagaagauuggagaaau

SEQ ID NO: 854629 - RNA, 19 nt, Homo sapiens
  misc_RNA (1)...(19): siRNA sense strand
caggagaucuauagcauaa

SEQ ID NO: 854630 - RNA, 19 nt, Homo sapiens
  misc_RNA (1)...(19): siRNA sense strand
gaaacaaacuccaauucag

SEQ ID NO: 854631 - RNA, 19 nt, Homo sapiens
  misc_RNA (1)...(19): siRNA sense strand
ggaccauucugugauauaa

SEQ ID NO: 854632 - RNA, 19 nt, Homo sapiens
  misc_RNA (1)...(19): siRNA sense strand
ggagaucuauagcauaaau

SEQ ID NO: 854633 - RNA, 19 nt, Homo sapiens
  misc_RNA (1)...(19): siRNA sense strand
ugaauucagucacuucuaa

SEQ ID NO: 854634 - RNA, 19 nt, Homo sapiens
  misc_RNA (1)...(19): siRNA sense strand
aaguagagaugcugaauaa

SEQ ID NO: 854635 - RNA, 19 nt, Homo sapiens
  misc_RNA (1)...(19): siRNA sense strand
caagugugcuccuguagaa

SEQ ID NO: 854636 - RNA, 19 nt, Homo sapiens
  misc_RNA (1)...(19): siRNA sense strand
aggaauagcugauaaacuu

SEQ ID NO: 854637 - RNA, 19 nt, Homo sapiens
  misc_RNA (1)...(19): siRNA sense strand
caacuccaauuacaucaaa

SEQ ID NO: 854638 - RNA, 19 nt, Homo sapiens
  misc_RNA (1)...(19): siRNA sense strand
ccaauuacaucaaauccaa

SEQ ID NO: 854639 - RNA, 19 nt, Homo sapiens
  misc_RNA (1)...(19): siRNA sense strand
cgacugaaauaaccaaaug

SEQ ID NO: 854640 - RNA, 19 nt, Homo sapiens
  misc_RNA (1)...(19): siRNA sense strand
gcccugacuuggaauauaa

SEQ ID NO: 854641 - RNA, 19 nt, Homo sapiens
  misc_RNA (1)...(19): siRNA sense strand
ccucuaagguugcaaauuc

SEQ ID NO: 854642 - RNA, 19 nt, Homo sapiens
  misc_RNA (1)...(19): siRNA sense strand
ggaaaguccuaauuugaca

SEQ ID NO: 854643 - RNA, 19 nt, Homo sapiens
  misc_RNA (1)...(19): siRNA sense strand
aaacagcaauugggaguaa

SEQ ID NO: 854644 - RNA, 19 nt, Homo sapiens
  misc_RNA (1)...(19): siRNA sense strand
gaauugaaccaacgcauug

SEQ ID NO: 854645 - RNA, 19 nt, Homo sapiens
  misc_RNA (1)...(19): siRNA sense strand
gcauugcccugacuuggaa

SEQ ID NO: 854646 - RNA, 19 nt, Homo sapiens
  misc_RNA (1)...(19): siRNA sense strand
aaucagaguuucaguccua

SEQ ID NO: 854647 - RNA, 19 nt, Homo sapiens
  misc_RNA (1)...(19): siRNA sense strand
gagcaucagacaaauguaa

SEQ ID NO: 854648 - RNA, 19 nt, Homo sapiens
  misc_RNA (1)...(19): siRNA sense strand
gaagacagagugcagaaau

SEQ ID NO: 854649 - RNA, 19 nt, Homo sapiens
  misc_RNA (1)...(19): siRNA sense strand
ucagacaaauguaacaaga

SEQ ID NO: 854650 - RNA, 19 nt, Homo sapiens
  misc_RNA (1)...(19): siRNA sense strand
caaugaugauguuauguug

SEQ ID NO: 854651 - RNA, 19 nt, Homo sapiens
  misc_RNA (1)...(19): siRNA sense strand
caagaaaacugaccagaug

SEQ ID NO: 854652 - RNA, 19 nt, Homo sapiens
  misc_RNA (1)...(19): siRNA sense strand
gauguuauguugauuucug

SEQ ID NO: 854653 - RNA, 19 nt, Homo sapiens
  misc_RNA (1)...(19): siRNA sense strand
aaauguagcccuucugaaa

SEQ ID NO: 854654 - RNA, 19 nt, Homo sapiens
  misc_RNA (1)...(19): siRNA sense strand
ccagaagccugagcucaaa

SEQ ID NO: 854655 - RNA, 19 nt, Homo sapiens
  misc_RNA (1)...(19): siRNA sense strand
gaaaguaacaaugaugaug

SEQ ID NO: 854656 - RNA, 19 nt, Homo sapiens
  misc_RNA (1)...(19): siRNA sense strand
caacugcaauacagaaagu

SEQ ID NO: 854657 - RNA, 19 nt, Homo sapiens
  misc_RNA (1)...(19): siRNA sense strand
gcaauugggaguaauguuc

SEQ ID NO: 854658 - RNA, 19 nt, Homo sapiens
  misc_RNA (1)...(19): siRNA sense strand
guacagaagaaacuugauu

SEQ ID NO: 854659 - RNA, 19 nt, Homo sapiens
  misc_RNA (1)...(19): siRNA sense strand
caaacauguuauccaguaa

SEQ ID NO: 854660 - RNA, 19 nt, Homo sapiens
  misc_RNA (1)...(19): siRNA sense strand
ucacugaacacuucugaaa

SEQ ID NO: 854661 - RNA, 19 nt, Homo sapiens
  misc_RNA (1)...(19): siRNA sense strand
gcaaguccagauagaagua

SEQ ID NO: 854662 - RNA, 19 nt, Homo sapiens
  misc_RNA (1)...(19): siRNA sense strand
ugaauuaugagccuucuaa

SEQ ID NO: 854663 - RNA, 19 nt, Homo sapiens
  misc_RNA (1)...(19): siRNA sense strand
guagagaugcugaauaagu

SEQ ID NO: 854664 - RNA, 19 nt, Homo sapiens
  misc_RNA (1)...(19): siRNA sense strand
gcuucaaacucaaaggaaa

SEQ ID NO: 854665 - RNA, 19 nt, Homo sapiens
  misc_RNA (1)...(19): siRNA sense strand
uaauggagccucuaagguu

SEQ ID NO: 854666 - RNA, 19 nt, Homo sapiens
  misc_RNA (1)...(19): siRNA sense strand
agacaaauguaacaagauc

SEQ ID NO: 854667 - RNA, 19 nt, Homo sapiens
  misc_RNA (1)...(19): siRNA sense strand
aagacagagugcagaaaua

SEQ ID NO: 854668 - RNA, 19 nt, Homo sapiens
  misc_RNA (1)...(19): siRNA sense strand
gucaugagaacucuaauaa

SEQ ID NO: 854669 - RNA, 19 nt, Homo sapiens
  misc_RNA (1)...(19): siRNA sense strand
aaacaaacuccaauucaga

SEQ ID NO: 854670 - RNA, 19 nt, Homo sapiens
  misc_RNA (1)...(19): siRNA sense strand
cagcaccacuaccugaauu

SEQ ID NO: 854671 - RNA, 19 nt, Homo sapiens
  misc_RNA (1)...(19): siRNA sense strand
cugaauaagucaaggaaug

SEQ ID NO: 854672 - RNA, 19 nt, Homo sapiens
  misc_RNA (1)...(19): siRNA sense strand
caaguagagaugcugaaua

SEQ ID NO: 854673 - RNA, 19 nt, Homo sapiens
  misc_RNA (1)...(19): siRNA sense strand
uguaguagaaccaguauuu

SEQ ID NO: 854674 - RNA, 19 nt, Homo sapiens
  misc_RNA (1)...(19): siRNA sense strand
uggaacaggucagacauuu

SEQ ID NO: 854675 - RNA, 19 nt, Homo sapiens
  misc_RNA (1)...(19): siRNA sense strand
cuucagagcaaauuaauga

SEQ ID NO: 854676 - RNA, 19 nt, Homo sapiens
  misc_RNA (1)...(19): siRNA sense strand
uaacuaggacgacugaaau

SEQ ID NO: 854677 - RNA, 19 nt, Homo sapiens
  misc_RNA (1)...(19): siRNA sense strand
gcaggagaucuauagcaua

SEQ ID NO: 854678 - RNA, 19 nt, Homo sapiens
  misc_RNA (1)...(19): siRNA sense strand
guagaaccaguauuucaaa

SEQ ID NO: 854679 - RNA, 19 nt, Homo sapiens
  misc_RNA (1)...(19): siRNA sense strand
gcaaagugacaacauuuua

SEQ ID NO: 854680 - RNA, 19 nt, Homo sapiens
  misc_RNA (1)...(19): siRNA sense strand
ccaaguagaacaacagaau

SEQ ID NO: 854681 - RNA, 19 nt, Homo sapiens
  misc_RNA (1)...(19): siRNA sense strand
uaacaacagccauuaucaa

SEQ ID NO: 854682 - RNA, 19 nt, Homo sapiens
  misc_RNA (1)...(19): siRNA sense strand
agucuucugugaauuauga

SEQ ID NO: 854683 - RNA, 19 nt, Homo sapiens
  misc_RNA (1)...(19): siRNA sense strand
ggaauagcugauaaacuuu

SEQ ID NO: 854684 - RNA, 19 nt, Homo sapiens
  misc_RNA (1)...(19): siRNA sense strand
cagcagagucuucacagaa

SEQ ID NO: 854685 - RNA, 19 nt, Homo sapiens
  misc_RNA (1)...(19): siRNA sense strand
guggaaaguccuaauuuga

SEQ ID NO: 854686 - RNA, 19 nt, Homo sapiens
  misc_RNA (1)...(19): siRNA sense strand
uagagaugcugaauaaguc

SEQ ID NO: 854687 - RNA, 19 nt, Homo sapiens
  misc_RNA (1)...(19): siRNA sense strand
agacagagugcagaaauaa

SEQ ID NO: 854688 - RNA, 19 nt, Homo sapiens
  misc_RNA (1)...(19): siRNA sense strand
agaaguaaacggaagauau

SEQ ID NO: 854689 - RNA, 19 nt, Homo sapiens
  misc_RNA (1)...(19): siRNA sense strand
ccaaauguagcccuucuga

SEQ ID NO: 854690 - RNA, 19 nt, Homo sapiens
  misc_RNA (1)...(19): siRNA sense strand
caaaaucaaucccaagugu

SEQ ID NO: 854691 - RNA, 19 nt, Homo sapiens
  misc_RNA (1)...(19): siRNA sense strand
uguggaaaguccuaauuug

SEQ ID NO: 854692 - RNA, 19 nt, Homo sapiens
  misc_RNA (1)...(19): siRNA sense strand
caacauggcagucaucacu

SEQ ID NO: 854693 - RNA, 19 nt, Homo sapiens
  misc_RNA (1)...(19): siRNA sense strand
uaccgugggugacaagaaa

SEQ ID NO: 854694 - RNA, 19 nt, Homo sapiens
  misc_RNA (1)...(19): siRNA sense strand
cauccucauuggacucuaa

SEQ ID NO: 854695 - RNA, 19 nt, Homo sapiens
  misc_RNA (1)...(19): siRNA sense strand
gaaguuauggcuguacaga

SEQ ID NO: 854696 - RNA, 19 nt, Homo sapiens
  misc_RNA (1)...(19): siRNA sense strand
caacagccauuaucaaaag

SEQ ID NO: 854697 - RNA, 19 nt, Homo sapiens
  misc_RNA (1)...(19): siRNA sense strand
uaacaacugugcugaugac

SEQ ID NO: 854698 - RNA, 19 nt, Homo sapiens
  misc_RNA (1)...(19): siRNA sense strand
aguaaaguauucucucaga

SEQ ID NO: 854699 - RNA, 19 nt, Homo sapiens
  misc_RNA (1)...(19): siRNA sense strand
ugaaaagucuucugugaau

SEQ ID NO: 854700 - RNA, 19 nt, Homo sapiens
  misc_RNA (1)...(19): siRNA sense strand
gaaaacgaggaaaauguua

SEQ ID NO: 854701 - RNA, 19 nt, Homo sapiens
  misc_RNA (1)...(19): siRNA sense strand
gaacacuucugaaaacgau

SEQ ID NO: 854702 - RNA, 19 nt, Homo sapiens
  misc_RNA (1)...(19): siRNA sense strand
caauacagaaaguccagua

SEQ ID NO: 854703 - RNA, 19 nt, Homo sapiens
  misc_RNA (1)...(19): siRNA sense strand
caucaaauccaacagauac

SEQ ID NO: 854704 - RNA, 19 nt, Homo sapiens
  misc_RNA (1)...(19): siRNA sense strand
gugcagaaauaagcaugaa

SEQ ID NO: 854705 - RNA, 19 nt, Homo sapiens
  misc_RNA (1)...(19): siRNA sense strand
guucagaagacucagguuu

SEQ ID NO: 854706 - RNA, 19 nt, Homo sapiens
  misc_RNA (1)...(19): siRNA sense strand
ccucauuggacucuaauaa

SEQ ID NO: 854707 - RNA, 19 nt, Homo sapiens
  misc_RNA (1)...(19): siRNA sense strand
cccauggccuguacuuuau

SEQ ID NO: 854708 - RNA, 19 nt, Homo sapiens
  misc_RNA (1)...(19): siRNA sense strand
ggaaaggcaaacagcauuc

SEQ ID NO: 854709 - RNA, 19 nt, Homo sapiens
  misc_RNA (1)...(19): siRNA sense strand
uuucaguccuagugucaua

SEQ ID NO: 854710 - RNA, 19 nt, Homo sapiens
  misc_RNA (1)...(19): siRNA sense strand
gauagaaguaaacggaaga

SEQ ID NO: 854711 - RNA, 19 nt, Homo sapiens
  misc_RNA (1)...(19): siRNA sense strand
agaaacaaacuccaauuca

SEQ ID NO: 854712 - RNA, 19 nt, Homo sapiens
  misc_RNA (1)...(19): siRNA sense strand
agccugagcucaaagugaa

SEQ ID NO: 854713 - RNA, 19 nt, Homo sapiens
  misc_RNA (1)...(19): siRNA sense strand
ucccaaugcugaaguuaug

SEQ ID NO: 854714 - RNA, 19 nt, Homo sapiens
  misc_RNA (1)...(19): siRNA sense strand
ucacuugacacuaauaaca

SEQ ID NO: 854715 - RNA, 19 nt, Homo sapiens
  misc_RNA (1)...(19): siRNA sense strand
gaguguaguagaaccagua

SEQ ID NO: 854716 - RNA, 19 nt, Homo sapiens
  misc_RNA (1)...(19): siRNA sense strand
ucuaacaacugugcugaug

SEQ ID NO: 854717 - RNA, 19 nt, Homo sapiens
  misc_RNA (1)...(19): siRNA sense strand
acugaugaguguaguagaa

SEQ ID NO: 854718 - RNA, 19 nt, Homo sapiens
  misc_RNA (1)...(19): siRNA sense strand
ugacaacuccaauuacauc

SEQ ID NO: 854719 - RNA, 19 nt, Homo sapiens
  misc_RNA (1)...(19): siRNA sense strand
gcaaguagagaugcugaau

SEQ ID NO: 854720 - RNA, 19 nt, Homo sapiens
  misc_RNA (1)...(19): siRNA sense strand
ggaacaggucagacauuug

SEQ ID NO: 854721 - RNA, 19 nt, Homo sapiens
  misc_RNA (1)...(19): siRNA sense strand
aacaacagccauuaucaaa

SEQ ID NO: 854722 - RNA, 19 nt, Homo sapiens
  misc_RNA (1)...(19): siRNA sense strand
gaagcuaacugaaauagaa

SEQ ID NO: 854723 - RNA, 19 nt, Homo sapiens
  misc_RNA (1)...(19): siRNA sense strand
ucaaauagaugcugaagga

SEQ ID NO: 854724 - RNA, 19 nt, Homo sapiens
  misc_RNA (1)...(19): siRNA sense strand
gaagaaaccauaaacagaa

SEQ ID NO: 854725 - RNA, 19 nt, Homo sapiens
  misc_RNA (1)...(19): siRNA sense strand
ggaagaagaagaaaccaua

SEQ ID NO: 854726 - RNA, 19 nt, Homo sapiens
  misc_RNA (1)...(19): siRNA sense strand
ggaaauggauuguuguucu

SEQ ID NO: 854727 - RNA, 19 nt, Homo sapiens
  misc_RNA (1)...(19): siRNA sense strand
gaaaauguacucacuguua

SEQ ID NO: 854728 - RNA, 19 nt, Homo sapiens
  misc_RNA (1)...(19): siRNA sense strand
ggacuaugaagaugaguua

SEQ ID NO: 854729 - RNA, 19 nt, Homo sapiens
  misc_RNA (1)...(19): siRNA sense strand
gaaucugacuggaucuauu

SEQ ID NO: 854730 - RNA, 19 nt, Homo sapiens
  misc_RNA (1)...(19): siRNA sense strand
gaagaagaagaaaccauaa

SEQ ID NO: 854731 - RNA, 19 nt, Homo sapiens
  misc_RNA (1)...(19): siRNA sense strand
ggagaaugcuuuucagauu

SEQ ID NO: 854732 - RNA, 19 nt, Homo sapiens
  misc_RNA (1)...(19): siRNA sense strand
ccaaaucaagucaaaguuu

SEQ ID NO: 854733 - RNA, 19 nt, Homo sapiens
  misc_RNA (1)...(19): siRNA sense strand
gaagaaacagaaaggaguu

SEQ ID NO: 854734 - RNA, 19 nt, Homo sapiens
  misc_RNA (1)...(19): siRNA sense strand
gaagaagaaaccauaaaca

SEQ ID NO: 854735 - RNA, 19 nt, Homo sapiens
  misc_RNA (1)...(19): siRNA sense strand
caagagacuuucaaaauug

SEQ ID NO: 854736 - RNA, 19 nt, Homo sapiens
  misc_RNA (1)...(19): siRNA sense strand
gaaaagcucaccuggauuu

SEQ ID NO: 854737 - RNA, 19 nt, Homo sapiens
  misc_RNA (1)...(19): siRNA sense strand
gaaauggauuguuguucuc

SEQ ID NO: 854738 - RNA, 19 nt, Homo sapiens
  misc_RNA (1)...(19): siRNA sense strand
gaagaugaguuagauuugc

SEQ ID NO: 854739 - RNA, 19 nt, Homo sapiens
  misc_RNA (1)...(19): siRNA sense strand
caacagggagaaccauaaa

SEQ ID NO: 854740 - RNA, 19 nt, Homo sapiens
  misc_RNA (1)...(19): siRNA sense strand
gguagaauaauacauguug

SEQ ID NO: 854741 - RNA, 19 nt, Homo sapiens
  misc_RNA (1)...(19): siRNA sense strand
gguagcuguuacucaaaua

SEQ ID NO: 854742 - RNA, 19 nt, Homo sapiens
  misc_RNA (1)...(19): siRNA sense strand
gucuucagcugcuauguuu

SEQ ID NO: 854743 - RNA, 19 nt, Homo sapiens
  misc_RNA (1)...(19): siRNA sense strand
gauuuccacuguaaugaau

SEQ ID NO: 854744 - RNA, 19 nt, Homo sapiens
  misc_RNA (1)...(19): siRNA sense strand
ugacagagacuuggugcua

SEQ ID NO: 854745 - RNA, 19 nt, Homo sapiens
  misc_RNA (1)...(19): siRNA sense strand
gaacaagagacuuucaaaa

SEQ ID NO: 854746 - RNA, 19 nt, Homo sapiens
  misc_RNA (1)...(19): siRNA sense strand
agaagaaaccauaaacaga

SEQ ID NO: 854747 - RNA, 19 nt, Homo sapiens
  misc_RNA (1)...(19): siRNA sense strand
ccacuguaaugaauaugga

SEQ ID NO: 854748 - RNA, 19 nt, Homo sapiens
  misc_RNA (1)...(19): siRNA sense strand
gagaaugcuuuucagauug

SEQ ID NO: 854749 - RNA, 19 nt, Homo sapiens
  misc_RNA (1)...(19): siRNA sense strand
ugugguagcuguuacucaa

SEQ ID NO: 854750 - RNA, 19 nt, Homo sapiens
  misc_RNA (1)...(19): siRNA sense strand
ugaguuagauuugcuuucu

SEQ ID NO: 854751 - RNA, 19 nt, Homo sapiens
  misc_RNA (1)...(19): siRNA sense strand
aaauagaugcugaaggaaa

SEQ ID NO: 854752 - RNA, 19 nt, Homo sapiens
  misc_RNA (1)...(19): siRNA sense strand
ccaacagggagaaccauaa

SEQ ID NO: 854753 - RNA, 19 nt, Homo sapiens
  misc_RNA (1)...(19): siRNA sense strand
cgucacaccuaauaagaag

SEQ ID NO: 854754 - RNA, 19 nt, Homo sapiens
  misc_RNA (1)...(19): siRNA sense strand
ggauuuccacuguaaugaa

SEQ ID NO: 854755 - RNA, 19 nt, Homo sapiens
  misc_RNA (1)...(19): siRNA sense strand
ucaaaauuguggacuauga

SEQ ID NO: 854756 - RNA, 19 nt, Homo sapiens
  misc_RNA (1)...(19): siRNA sense strand
ugucaucccuggagaaugc

SEQ ID NO: 854757 - RNA, 19 nt, Homo sapiens
  misc_RNA (1)...(19): siRNA sense strand
cuaugaagaugaguuagau

SEQ ID NO: 854758 - RNA, 19 nt, Homo sapiens
  misc_RNA (1)...(19): siRNA sense strand
ugacauauagccaugaagu

SEQ ID NO: 854759 - RNA, 19 nt, Homo sapiens
  misc_RNA (1)...(19): siRNA sense strand
agacuuggugcuacacaua

SEQ ID NO: 854760 - RNA, 19 nt, Homo sapiens
  misc_RNA (1)...(19): siRNA sense strand
aaucugacuggaucuauuu

SEQ ID NO: 854761 - RNA, 19 nt, Homo sapiens
  misc_RNA (1)...(19): siRNA sense strand
ucacaccuaauaagaagaa

SEQ ID NO: 854762 - RNA, 19 nt, Homo sapiens
  misc_RNA (1)...(19): siRNA sense strand
ugaagaugaguuagauuug

SEQ ID NO: 854763 - RNA, 19 nt, Homo sapiens
  misc_RNA (1)...(19): siRNA sense strand
agauuugcuuucuguggua

SEQ ID NO: 854764 - RNA, 19 nt, Homo sapiens
  misc_RNA (1)...(19): siRNA sense strand
aaaaugggauccaggaaau

SEQ ID NO: 854765 - RNA, 19 nt, Homo sapiens
  misc_RNA (1)...(19): siRNA sense strand
cagcugcuauguuuaccau

SEQ ID NO: 854766 - RNA, 19 nt, Homo sapiens
  misc_RNA (1)...(19): siRNA sense strand
cauauagccaugaagucua

SEQ ID NO: 854767 - RNA, 19 nt, Homo sapiens
  misc_RNA (1)...(19): siRNA sense strand
uaaaagcauuccacuagug

SEQ ID NO: 854768 - RNA, 19 nt, Homo sapiens
  misc_RNA (1)...(19): siRNA sense strand
gccaacagggagaaccaua

SEQ ID NO: 854769 - RNA, 19 nt, Homo sapiens
  misc_RNA (1)...(19): siRNA sense strand
gagacuuggugcuacacau

SEQ ID NO: 854770 - RNA, 19 nt, Homo sapiens
  misc_RNA (1)...(19): siRNA sense strand
uacaucgucacaccuaaua

SEQ ID NO: 854771 - RNA, 19 nt, Homo sapiens
  misc_RNA (1)...(19): siRNA sense strand
agaacaagagacuuucaaa

SEQ ID NO: 854772 - RNA, 19 nt, Homo sapiens
  misc_RNA (1)...(19): siRNA sense strand
ggaugaugacccagaacaa

SEQ ID NO: 854773 - RNA, 19 nt, Homo sapiens
  misc_RNA (1)...(19): siRNA sense strand
uuaaccuucuggaugauga

SEQ ID NO: 854774 - RNA, 19 nt, Homo sapiens
  misc_RNA (1)...(19): siRNA sense strand
gaaacccaacagagucuuc

SEQ ID NO: 854775 - RNA, 19 nt, Homo sapiens
  misc_RNA (1)...(19): siRNA sense strand
aagaaaccauaaacagaag

SEQ ID NO: 854776 - RNA, 19 nt, Homo sapiens
  misc_RNA (1)...(19): siRNA sense strand
guuuuaaccuucuggauga

SEQ ID NO: 854777 - RNA, 19 nt, Homo sapiens
  misc_RNA (1)...(19): siRNA sense strand
acagagacuuggugcuaca

SEQ ID NO: 854778 - RNA, 19 nt, Homo sapiens
  misc_RNA (1)...(19): siRNA sense strand
gaugaugacccagaacaag

SEQ ID NO: 854779 - RNA, 19 nt, Homo sapiens
  misc_RNA (1)...(19): siRNA sense strand
gaugaguuagauuugcuuu

SEQ ID NO: 854780 - RNA, 19 nt, Homo sapiens
  misc_RNA (1)...(19): siRNA sense strand
ccuaauaagaagaaacaga

SEQ ID NO: 854781 - RNA, 19 nt, Homo sapiens
  misc_RNA (1)...(19): siRNA sense strand
aauagaugcugaaggaaaa

SEQ ID NO: 854782 - RNA, 19 nt, Homo sapiens
  misc_RNA (1)...(19): siRNA sense strand
ugugacauauagccaugaa

SEQ ID NO: 854783 - RNA, 19 nt, Homo sapiens
  misc_RNA (1)...(19): siRNA sense strand
gaguuagauuugcuuucug

SEQ ID NO: 854784 - RNA, 19 nt, Homo sapiens
  misc_RNA (1)...(19): siRNA sense strand
caccuaauaagaagaaaca

SEQ ID NO: 854785 - RNA, 19 nt, Homo sapiens
  misc_RNA (1)...(19): siRNA sense strand
uaagaagaaacagaaagga

SEQ ID NO: 854786 - RNA, 19 nt, Homo sapiens
  misc_RNA (1)...(19): siRNA sense strand
cagaacaagagacuuucaa

SEQ ID NO: 854787 - RNA, 19 nt, Homo sapiens
  misc_RNA (1)...(19): siRNA sense strand
guccaaaucaagucaaagu

SEQ ID NO: 854788 - RNA, 19 nt, Homo sapiens
  misc_RNA (1)...(19): siRNA sense strand
caggaaauggauuguuguu

SEQ ID NO: 854789 - RNA, 19 nt, Homo sapiens
  misc_RNA (1)...(19): siRNA sense strand
aagaagaaaccauaaacag

SEQ ID NO: 854790 - RNA, 19 nt, Homo sapiens
  misc_RNA (1)...(19): siRNA sense strand
ucugguagaauaauacaug

SEQ ID NO: 854791 - RNA, 19 nt, Homo sapiens
  misc_RNA (1)...(19): siRNA sense strand
cuacuuugacagagacuug

SEQ ID NO: 854792 - RNA, 19 nt, Homo sapiens
  misc_RNA (1)...(19): siRNA sense strand
aggaaaagcucaccuggau

SEQ ID NO: 854793 - RNA, 19 nt, Homo sapiens
  misc_RNA (1)...(19): siRNA sense strand
gcuguuacucaaauagaug

SEQ ID NO: 854794 - RNA, 19 nt, Homo sapiens
  misc_RNA (1)...(19): siRNA sense strand
ugguagcuguuacucaaau

SEQ ID NO: 854795 - RNA, 19 nt, Homo sapiens
  misc_RNA (1)...(19): siRNA sense strand
ccauauuugugcccuaaaa

SEQ ID NO: 854796 - RNA, 19 nt, Homo sapiens
  misc_RNA (1)...(19): siRNA sense strand
acccagaacaagagacuuu

SEQ ID NO: 854797 - RNA, 19 nt, Homo sapiens
  misc_RNA (1)...(19): siRNA sense strand
agaagaagaaaccauaaac

SEQ ID NO: 854798 - RNA, 19 nt, Homo sapiens
  misc_RNA (1)...(19): siRNA sense strand
aguuagauuugcuuucugu

SEQ ID NO: 854799 - RNA, 19 nt, Homo sapiens
  misc_RNA (1)...(19): siRNA sense strand
caaauagaugcugaaggaa

SEQ ID NO: 854800 - RNA, 19 nt, Homo sapiens
  misc_RNA (1)...(19): siRNA sense strand
guggagucaugggauguga

SEQ ID NO: 854801 - RNA, 19 nt, Homo sapiens
  misc_RNA (1)...(19): siRNA sense strand
caucgucacaccuaauaag

SEQ ID NO: 854802 - RNA, 19 nt, Homo sapiens
  misc_RNA (1)...(19): siRNA sense strand
ccagaacaagagacuuuca

SEQ ID NO: 854803 - RNA, 19 nt, Homo sapiens
  misc_RNA (1)...(19): siRNA sense strand
gcacucuguccauuucaua

SEQ ID NO: 854804 - RNA, 19 nt, Homo sapiens
  misc_RNA (1)...(19): siRNA sense strand
ucugggagguggugugcuu

SEQ ID NO: 854805 - RNA, 19 nt, Homo sapiens
  misc_RNA (1)...(19): siRNA sense strand
ccucacuucccucagauuu

SEQ ID NO: 854806 - RNA, 19 nt, Homo sapiens
  misc_RNA (1)...(19): siRNA sense strand
ucacuucccucagauuuug

SEQ ID NO: 854807 - RNA, 19 nt, Homo sapiens
  misc_RNA (1)...(19): siRNA sense strand
uuuccucacuucccucaga

SEQ ID NO: 854808 - RNA, 19 nt, Homo sapiens
  misc_RNA (1)...(19): siRNA sense strand
cugcagugaauccauguuu

SEQ ID NO: 854809 - RNA, 19 nt, Homo sapiens
  misc_RNA (1)...(19): siRNA sense strand
cgaaagaaaccucgaaaua

SEQ ID NO: 854810 - RNA, 19 nt, Homo sapiens
  misc_RNA (1)...(19): siRNA sense strand
gaggagaguugcccauuaa

SEQ ID NO: 854811 - RNA, 19 nt, Homo sapiens
  misc_RNA (1)...(19): siRNA sense strand
caaguuaaauaccgaguaa

SEQ ID NO: 854812 - RNA, 19 nt, Homo sapiens
  misc_RNA (1)...(19): siRNA sense strand
ccacaaagaccaagauauu

SEQ ID NO: 854813 - RNA, 19 nt, Homo sapiens
  misc_RNA (1)...(19): siRNA sense strand
gaacgaggcuauaguacca

SEQ ID NO: 854814 - RNA, 19 nt, Homo sapiens
  misc_RNA (1)...(19): siRNA sense strand
caagaagcuuugaaacauu

SEQ ID NO: 854815 - RNA, 19 nt, Homo sapiens
  misc_RNA (1)...(19): siRNA sense strand
cagcagaguucagaaagua

SEQ ID NO: 854816 - RNA, 19 nt, Homo sapiens
  misc_RNA (1)...(19): siRNA sense strand
gaaagaaaccucgaaauac

SEQ ID NO: 854817 - RNA, 19 nt, Homo sapiens
  misc_RNA (1)...(19): siRNA sense strand
ccgaguaaaucaacaaauu

SEQ ID NO: 854818 - RNA, 19 nt, Homo sapiens
  misc_RNA (1)...(19): siRNA sense strand
gaucaguguuuccagauga

SEQ ID NO: 854819 - RNA, 19 nt, Homo sapiens
  misc_RNA (1)...(19): siRNA sense strand
gaauagaggaugaagagaa

SEQ ID NO: 854820 - RNA, 19 nt, Homo sapiens
  misc_RNA (1)...(19): siRNA sense strand
ggacagaaacucaggguau

SEQ ID NO: 854821 - RNA, 19 nt, Homo sapiens
  misc_RNA (1)...(19): siRNA sense strand
gaacuaaaggaacagcuaa

SEQ ID NO: 854822 - RNA, 19 nt, Homo sapiens
  misc_RNA (1)...(19): siRNA sense strand
uaaaggaacagcuaagaaa

SEQ ID NO: 854823 - RNA, 19 nt, Homo sapiens
  misc_RNA (1)...(19): siRNA sense strand
guucggaaaucccagcaua

SEQ ID NO: 854824 - RNA, 19 nt, Homo sapiens
  misc_RNA (1)...(19): siRNA sense strand
gaaagggaaagaagauuug

SEQ ID NO: 854825 - RNA, 19 nt, Homo sapiens
  misc_RNA (1)...(19): siRNA sense strand
gaaucuucaucucuuguaa

SEQ ID NO: 854826 - RNA, 19 nt, Homo sapiens
  misc_RNA (1)...(19): siRNA sense strand
gaggaacgaggcuauagua

SEQ ID NO: 854827 - RNA, 19 nt, Homo sapiens
  misc_RNA (1)...(19): siRNA sense strand
gaagaagggaguauugugu

SEQ ID NO: 854828 - RNA, 19 nt, Homo sapiens
  misc_RNA (1)...(19): siRNA sense strand
gacagaaacucaggguauu

SEQ ID NO: 854829 - RNA, 19 nt, Homo sapiens
  misc_RNA (1)...(19): siRNA sense strand
cuucaucucuuguaacuga

SEQ ID NO: 854830 - RNA, 19 nt, Homo sapiens
  misc_RNA (1)...(19): siRNA sense strand
agaggagaguugcccauua

SEQ ID NO: 854831 - RNA, 19 nt, Homo sapiens
  misc_RNA (1)...(19): siRNA sense strand
cagaagcccaggauuauuu

SEQ ID NO: 854832 - RNA, 19 nt, Homo sapiens
  misc_RNA (1)...(19): siRNA sense strand
gauaagaacaaaccuuuca

SEQ ID NO: 854833 - RNA, 19 nt, Homo sapiens
  misc_RNA (1)...(19): siRNA sense strand
ggaaguauggcccgaaaga

SEQ ID NO: 854834 - RNA, 19 nt, Homo sapiens
  misc_RNA (1)...(19): siRNA sense strand
uauuggaaguucuagguua

SEQ ID NO: 854835 - RNA, 19 nt, Homo sapiens
  misc_RNA (1)...(19): siRNA sense strand
acaagaagcuuugaaacau

SEQ ID NO: 854836 - RNA, 19 nt, Homo sapiens
  misc_RNA (1)...(19): siRNA sense strand
ggaaagaagauuuguuugg

SEQ ID NO: 854837 - RNA, 19 nt, Homo sapiens
  misc_RNA (1)...(19): siRNA sense strand
ugggauaaauacaggaaua

SEQ ID NO: 854838 - RNA, 19 nt, Homo sapiens
  misc_RNA (1)...(19): siRNA sense strand
ggaaaucccagcauauaca

SEQ ID NO: 854839 - RNA, 19 nt, Homo sapiens
  misc_RNA (1)...(19): siRNA sense strand
gaagagcaaggacguguug

SEQ ID NO: 854840 - RNA, 19 nt, Homo sapiens
  misc_RNA (1)...(19): siRNA sense strand
gaauguugcuauuggaagu

SEQ ID NO: 854841 - RNA, 19 nt, Homo sapiens
  misc_RNA (1)...(19): siRNA sense strand
ugaggaaucuucaucucuu

SEQ ID NO: 854842 - RNA, 19 nt, Homo sapiens
  misc_RNA (1)...(19): siRNA sense strand
acaggaauccagaguguua

SEQ ID NO: 854843 - RNA, 19 nt, Homo sapiens
  misc_RNA (1)...(19): siRNA sense strand
ugacaggaauccagagugu

SEQ ID NO: 854844 - RNA, 19 nt, Homo sapiens
  misc_RNA (1)...(19): siRNA sense strand
aagaagaacuaaaggaaca

SEQ ID NO: 854845 - RNA, 19 nt, Homo sapiens
  misc_RNA (1)...(19): siRNA sense strand
gaacaaaagcaguuacauu

SEQ ID NO: 854846 - RNA, 19 nt, Homo sapiens
  misc_RNA (1)...(19): siRNA sense strand
gaagauaagaacaaaccuu

SEQ ID NO: 854847 - RNA, 19 nt, Homo sapiens
  misc_RNA (1)...(19): siRNA sense strand
caacacacuuaacuuccaa

SEQ ID NO: 854848 - RNA, 19 nt, Homo sapiens
  misc_RNA (1)...(19): siRNA sense strand
gcaacacacuuaacuucca

SEQ ID NO: 854849 - RNA, 19 nt, Homo sapiens
  misc_RNA (1)...(19): siRNA sense strand
cagcauauacaucagcaua

SEQ ID NO: 854850 - RNA, 19 nt, Homo sapiens
  misc_RNA (1)...(19): siRNA sense strand
gggauggaauagaggauga

SEQ ID NO: 854851 - RNA, 19 nt, Homo sapiens
  misc_RNA (1)...(19): siRNA sense strand
caaggugauuugcuggaaa

SEQ ID NO: 854852 - RNA, 19 nt, Homo sapiens
  misc_RNA (1)...(19): siRNA sense strand
ugaagaagaacuaaaggaa

SEQ ID NO: 854853 - RNA, 19 nt, Homo sapiens
  misc_RNA (1)...(19): siRNA sense strand
accaagauauucugccaua

SEQ ID NO: 854854 - RNA, 19 nt, Homo sapiens
  misc_RNA (1)...(19): siRNA sense strand
ucuuguaacugaugagaaa

SEQ ID NO: 854855 - RNA, 19 nt, Homo sapiens
  misc_RNA (1)...(19): siRNA sense strand
gaggaaucuucaucucuug

SEQ ID NO: 854856 - RNA, 19 nt, Homo sapiens
  misc_RNA (1)...(19): siRNA sense strand
gaaccugacuaugaggaau

SEQ ID NO: 854857 - RNA, 19 nt, Homo sapiens
  misc_RNA (1)...(19): siRNA sense strand
gcugaaagcccagaguauu

SEQ ID NO: 854858 - RNA, 19 nt, Homo sapiens
  misc_RNA (1)...(19): siRNA sense strand
ggaaucuucaucucuugua

SEQ ID NO: 854859 - RNA, 19 nt, Homo sapiens
  misc_RNA (1)...(19): siRNA sense strand
gauggaagaggaagaacaa

SEQ ID NO: 854860 - RNA, 19 nt, Homo sapiens
  misc_RNA (1)...(19): siRNA sense strand
gcagaguucagaaaguaaa

SEQ ID NO: 854861 - RNA, 19 nt, Homo sapiens
  misc_RNA (1)...(19): siRNA sense strand
aauagaggaugaagagaau

SEQ ID NO: 854862 - RNA, 19 nt, Homo sapiens
  misc_RNA (1)...(19): siRNA sense strand
gaagagaaucagaacgaau

SEQ ID NO: 854863 - RNA, 19 nt, Homo sapiens
  misc_RNA (1)...(19): siRNA sense strand
aaagaaaccucgaaauacc

SEQ ID NO: 854864 - RNA, 19 nt, Homo sapiens
  misc_RNA (1)...(19): siRNA sense strand
uacccaggcuguugaaaug

SEQ ID NO: 854865 - RNA, 19 nt, Homo sapiens
  misc_RNA (1)...(19): siRNA sense strand
ugaggaaccugacuaugag

SEQ ID NO: 854866 - RNA, 19 nt, Homo sapiens
  misc_RNA (1)...(19): siRNA sense strand
aucaggaacuugacuauga

SEQ ID NO: 854867 - RNA, 19 nt, Homo sapiens
  misc_RNA (1)...(19): siRNA sense strand
guaccuuaccagaauuaua

SEQ ID NO: 854868 - RNA, 19 nt, Homo sapiens
  misc_RNA (1)...(19): siRNA sense strand
agaaagggaaagaagauuu

SEQ ID NO: 854869 - RNA, 19 nt, Homo sapiens
  misc_RNA (1)...(19): siRNA sense strand
ccacuguguucucccuaaa

SEQ ID NO: 854870 - RNA, 19 nt, Homo sapiens
  misc_RNA (1)...(19): siRNA sense strand
acaaaucaggcucuucuaa

SEQ ID NO: 854871 - RNA, 19 nt, Homo sapiens
  misc_RNA (1)...(19): siRNA sense strand
ccauagccaugcagucuuc

SEQ ID NO: 854872 - RNA, 19 nt, Homo sapiens
  misc_RNA (1)...(19): siRNA sense strand
gaagggaguauuguguuga

SEQ ID NO: 854873 - RNA, 19 nt, Homo sapiens
  misc_RNA (1)...(19): siRNA sense strand
agaagggaguauuguguug

SEQ ID NO: 854874 - RNA, 19 nt, Homo sapiens
  misc_RNA (1)...(19): siRNA sense strand
ggaacuugacuaugaggaa

SEQ ID NO: 854875 - RNA, 19 nt, Homo sapiens
  misc_RNA (1)...(19): siRNA sense strand
ggaucaguguuuccagaug

SEQ ID NO: 854876 - RNA, 19 nt, Homo sapiens
  misc_RNA (1)...(19): siRNA sense strand
ugaagagaaucagaacgaa

SEQ ID NO: 854877 - RNA, 19 nt, Homo sapiens
  misc_RNA (1)...(19): siRNA sense strand
gaaguauggcccgaaagaa

SEQ ID NO: 854878 - RNA, 19 nt, Homo sapiens
  misc_RNA (1)...(19): siRNA sense strand
aagagaaucagaacgaauu

SEQ ID NO: 854879 - RNA, 19 nt, Homo sapiens
  misc_RNA (1)...(19): siRNA sense strand
ccaagauauucugccauaa

SEQ ID NO: 854880 - RNA, 19 nt, Homo sapiens
  misc_RNA (1)...(19): siRNA sense strand
ugccagaagcccaggauua

SEQ ID NO: 854881 - RNA, 19 nt, Homo sapiens
  misc_RNA (1)...(19): siRNA sense strand
gggauaaauacaggaauaa

SEQ ID NO: 854882 - RNA, 19 nt, Homo sapiens
  misc_RNA (1)...(19): siRNA sense strand
cagcaacacacuuaacuuc

SEQ ID NO: 854883 - RNA, 19 nt, Homo sapiens
  misc_RNA (1)...(19): siRNA sense strand
ccaaggugauuugcuggaa

SEQ ID NO: 854884 - RNA, 19 nt, Homo sapiens
  misc_RNA (1)...(19): siRNA sense strand
gagaguugcccauuaaggu

SEQ ID NO: 854885 - RNA, 19 nt, Homo sapiens
  misc_RNA (1)...(19): siRNA sense strand
aaagcuuucuuaccagaga

SEQ ID NO: 854886 - RNA, 19 nt, Homo sapiens
  misc_RNA (1)...(19): siRNA sense strand
gccagaagcccaggauuau

SEQ ID NO: 854887 - RNA, 19 nt, Homo sapiens
  misc_RNA (1)...(19): siRNA sense strand
uaagguccaucaaggucuu

SEQ ID NO: 854888 - RNA, 19 nt, Homo sapiens
  misc_RNA (1)...(19): siRNA sense strand
ccacaaaucaggcucuucu

SEQ ID NO: 854889 - RNA, 19 nt, Homo sapiens
  misc_RNA (1)...(19): siRNA sense strand
ucggaaaucccagcauaua

SEQ ID NO: 854890 - RNA, 19 nt, Homo sapiens
  misc_RNA (1)...(19): siRNA sense strand
agggaaagaagauuuguuu

SEQ ID NO: 854891 - RNA, 19 nt, Homo sapiens
  misc_RNA (1)...(19): siRNA sense strand
gagaaagggaaagaagauu

SEQ ID NO: 854892 - RNA, 19 nt, Homo sapiens
  misc_RNA (1)...(19): siRNA sense strand
gcacgucaccggcuagcau

SEQ ID NO: 854893 - RNA, 19 nt, Homo sapiens
  misc_RNA (1)...(19): siRNA sense strand
ccuaaagaccagaguauuc

SEQ ID NO: 854894 - RNA, 19 nt, Homo sapiens
  misc_RNA (1)...(19): siRNA sense strand
acagaaacucaggguauua

SEQ ID NO: 854895 - RNA, 19 nt, Homo sapiens
  misc_RNA (1)...(19): siRNA sense strand
gaaaucccagcauauacau

SEQ ID NO: 854896 - RNA, 19 nt, Homo sapiens
  misc_RNA (1)...(19): siRNA sense strand
gaugagaaagggaaagaag

SEQ ID NO: 854897 - RNA, 19 nt, Homo sapiens
  misc_RNA (1)...(19): siRNA sense strand
cuaaaggaacagcuaagaa

SEQ ID NO: 854898 - RNA, 19 nt, Homo sapiens
  misc_RNA (1)...(19): siRNA sense strand
ugaaagcccagaguauuga

SEQ ID NO: 854899 - RNA, 19 nt, Homo sapiens
  misc_RNA (1)...(19): siRNA sense strand
gcuguaccuuaccagaauu

SEQ ID NO: 854900 - RNA, 19 nt, Homo sapiens
  misc_RNA (1)...(19): siRNA sense strand
gaaacucaggguauuaugc

SEQ ID NO: 854901 - RNA, 19 nt, Homo sapiens
  misc_RNA (1)...(19): siRNA sense strand
ccagauacccaggcuguug

SEQ ID NO: 854902 - RNA, 19 nt, Homo sapiens
  misc_RNA (1)...(19): siRNA sense strand
gccaugcagucuucagcaa

SEQ ID NO: 854903 - RNA, 19 nt, Homo sapiens
  misc_RNA (1)...(19): siRNA sense strand
cuagaagaagggaguauug

SEQ ID NO: 854904 - RNA, 19 nt, Homo sapiens
  misc_RNA (1)...(19): siRNA sense strand
gaguauugagcuagaagaa

SEQ ID NO: 854905 - RNA, 19 nt, Homo sapiens
  misc_RNA (1)...(19): siRNA sense strand
uugagggccuucaggauau

SEQ ID NO: 854906 - RNA, 19 nt, Homo sapiens
  misc_RNA (1)...(19): siRNA sense strand
aaguauggcccgaaagaaa

SEQ ID NO: 854907 - RNA, 19 nt, Homo sapiens
  misc_RNA (1)...(19): siRNA sense strand
caaaucaggcucuucuaac

SEQ ID NO: 854908 - RNA, 19 nt, Homo sapiens
  misc_RNA (1)...(19): siRNA sense strand
ccagcauguucuccacaaa

SEQ ID NO: 854909 - RNA, 19 nt, Homo sapiens
  misc_RNA (1)...(19): siRNA sense strand
gaaauaccauguugaguag

SEQ ID NO: 854910 - RNA, 19 nt, Homo sapiens
  misc_RNA (1)...(19): siRNA sense strand
ggagagugcucagagauaa

SEQ ID NO: 854911 - RNA, 19 nt, Homo sapiens
  misc_RNA (1)...(19): siRNA sense strand
agaaauaccauguugagua

SEQ ID NO: 854912 - RNA, 19 nt, Homo sapiens
  misc_RNA (1)...(19): siRNA sense strand
cguagaaagucaaggaauu

SEQ ID NO: 854913 - RNA, 19 nt, Homo sapiens
  misc_RNA (1)...(19): siRNA sense strand
cgaaagaucugcauuuuag

SEQ ID NO: 854914 - RNA, 19 nt, Homo sapiens
  misc_RNA (1)...(19): siRNA sense strand
agacugaacuacagaagug

SEQ ID NO: 854915 - RNA, 19 nt, Homo sapiens
  misc_RNA (1)...(19): siRNA sense strand
guagaaagucaaggaauuu

SEQ ID NO: 854916 - RNA, 19 nt, Homo sapiens
  misc_RNA (1)...(19): siRNA sense strand
gauggagagugcucagaga

SEQ ID NO: 854917 - RNA, 19 nt, Homo sapiens
  misc_RNA (1)...(19): siRNA sense strand
gguagagaauaaugagaga

SEQ ID NO: 854918 - RNA, 19 nt, Homo sapiens
  misc_RNA (1)...(19): siRNA sense strand
gagaauaaugagagacuga

SEQ ID NO: 854919 - RNA, 19 nt, Homo sapiens
  misc_RNA (1)...(19): siRNA sense strand
uaugagcucuucccuucaa

SEQ ID NO: 854920 - RNA, 19 nt, Homo sapiens
  misc_RNA (1)...(19): siRNA sense strand
uugaguaguugcauaagaa

SEQ ID NO: 854921 - RNA, 19 nt, Homo sapiens
  misc_RNA (1)...(19): siRNA sense strand
cauguugaguaguugcaua

SEQ ID NO: 854922 - RNA, 19 nt, Homo sapiens
  misc_RNA (1)...(19): siRNA sense strand
guugaguaguugcauaaga

SEQ ID NO: 854923 - RNA, 19 nt, Homo sapiens
  misc_RNA (1)...(19): siRNA sense strand
ggccuuacguagaaaguca

SEQ ID NO: 854924 - RNA, 19 nt, Homo sapiens
  misc_RNA (1)...(19): siRNA sense strand
agagccagcuugaggcauu

SEQ ID NO: 854925 - RNA, 19 nt, Homo sapiens
  misc_RNA (1)...(19): siRNA sense strand
uuuauucucugagcaauug

SEQ ID NO: 854926 - RNA, 19 nt, Homo sapiens
  misc_RNA (1)...(19): siRNA sense strand
aauaccauguugaguaguu

SEQ ID NO: 854927 - RNA, 19 nt, Homo sapiens
  misc_RNA (1)...(19): siRNA sense strand
cauaagaaaccaguuagga

SEQ ID NO: 854928 - RNA, 19 nt, Homo sapiens
  misc_RNA (1)...(19): siRNA sense strand
ugcagggccuuacguagaa

SEQ ID NO: 854929 - RNA, 19 nt, Homo sapiens
  misc_RNA (1)...(19): siRNA sense strand
gcagggccuuacguagaaa

SEQ ID NO: 854930 - RNA, 19 nt, Homo sapiens
  misc_RNA (1)...(19): siRNA sense strand
cgguguguauuuacugaaa

SEQ ID NO: 854931 - RNA, 19 nt, Homo sapiens
  misc_RNA (1)...(19): siRNA sense strand
ggaaggaagacagcuguag

SEQ ID NO: 854932 - RNA, 19 nt, Homo sapiens
  misc_RNA (1)...(19): siRNA sense strand
auaaugagagacugaacua

SEQ ID NO: 854933 - RNA, 19 nt, Homo sapiens
  misc_RNA (1)...(19): siRNA sense strand
uugcauaagaaaccaguua

SEQ ID NO: 854934 - RNA, 19 nt, Homo sapiens
  misc_RNA (1)...(19): siRNA sense strand
ggagguagagaauaaugag

SEQ ID NO: 854935 - RNA, 19 nt, Homo sapiens
  misc_RNA (1)...(19): siRNA sense strand
uggagagugcucagagaua

SEQ ID NO: 854936 - RNA, 19 nt, Homo sapiens
  misc_RNA (1)...(19): siRNA sense strand
cauagcccgguguguauuu

SEQ ID NO: 854937 - RNA, 19 nt, Homo sapiens
  misc_RNA (1)...(19): siRNA sense strand
ugaaaaucaucccgaaaga

SEQ ID NO: 854938 - RNA, 19 nt, Homo sapiens
  misc_RNA (1)...(19): siRNA sense strand
gagagacugaacuacagaa

SEQ ID NO: 854939 - RNA, 19 nt, Homo sapiens
  misc_RNA (1)...(19): siRNA sense strand
uuacguagaaagucaagga

SEQ ID NO: 854940 - RNA, 19 nt, Homo sapiens
  misc_RNA (1)...(19): siRNA sense strand
gagacugaacuacagaagu

SEQ ID NO: 854941 - RNA, 19 nt, Homo sapiens
  misc_RNA (1)...(19): siRNA sense strand
gggaaggaagacagcugua

SEQ ID NO: 854942 - RNA, 19 nt, Homo sapiens
  misc_RNA (1)...(19): siRNA sense strand
auagcccgguguguauuua

SEQ ID NO: 854943 - RNA, 19 nt, Homo sapiens
  misc_RNA (1)...(19): siRNA sense strand
cugcagggccuuacguaga

SEQ ID NO: 854944 - RNA, 19 nt, Homo sapiens
  misc_RNA (1)...(19): siRNA sense strand
aaugagagacugaacuaca

SEQ ID NO: 854945 - RNA, 19 nt, Homo sapiens
  misc_RNA (1)...(19): siRNA sense strand
ccuccaauaugagcucuuc

SEQ ID NO: 854946 - RNA, 19 nt, Homo sapiens
  misc_RNA (1)...(19): siRNA sense strand
gagguagagaauaaugaga

SEQ ID NO: 854947 - RNA, 19 nt, Homo sapiens
  misc_RNA (1)...(19): siRNA sense strand
gagccagcuugaggcauuc

SEQ ID NO: 854948 - RNA, 19 nt, Homo sapiens
  misc_RNA (1)...(19): siRNA sense strand
gagagugcucagagauaau

SEQ ID NO: 854949 - RNA, 19 nt, Homo sapiens
  misc_RNA (1)...(19): siRNA sense strand
ugaguaguugcauaagaaa

SEQ ID NO: 854950 - RNA, 19 nt, Homo sapiens
  misc_RNA (1)...(19): siRNA sense strand
uuagaaauaccauguugag

SEQ ID NO: 854951 - RNA, 19 nt, Homo sapiens
  misc_RNA (1)...(19): siRNA sense strand
gguguguauuuacugaaag

SEQ ID NO: 854952 - RNA, 19 nt, Homo sapiens
  misc_RNA (1)...(19): siRNA sense strand
ggcagagccugaagacuug

SEQ ID NO: 854953 - RNA, 19 nt, Homo sapiens
  misc_RNA (1)...(19): siRNA sense strand
gggaugggauuauguguac

SEQ ID NO: 854954 - RNA, 19 nt, Homo sapiens
  misc_RNA (1)...(19): siRNA sense strand
gcagagagggcaugaagag

SEQ ID NO: 854955 - RNA, 19 nt, Homo sapiens
  misc_RNA (1)...(19): siRNA sense strand
gcacauuccuacccuucuc

SEQ ID NO: 854956 - RNA, 19 nt, Homo sapiens
  misc_RNA (1)...(19): siRNA sense strand
gaacuaagagugggaugag

SEQ ID NO: 854957 - RNA, 19 nt, Homo sapiens
  misc_RNA (1)...(19): siRNA sense strand
cuggaaagcagaacuaaga

SEQ ID NO: 854958 - RNA, 19 nt, Homo sapiens
  misc_RNA (1)...(19): siRNA sense strand
ucccucagcuggaguaaca

SEQ ID NO: 854959 - RNA, 19 nt, Homo sapiens
  misc_RNA (1)...(19): siRNA sense strand
gauccaacagaaacagauu

SEQ ID NO: 854960 - RNA, 19 nt, Homo sapiens
  misc_RNA (1)...(19): siRNA sense strand
ggaaagcagaacuaagagu

SEQ ID NO: 854961 - RNA, 19 nt, Homo sapiens
  misc_RNA (1)...(19): siRNA sense strand
gggcaggcagugacuauca

SEQ ID NO: 854962 - RNA, 19 nt, Homo sapiens
  misc_RNA (1)...(19): siRNA sense strand
cgggaaggacucaaaguga

SEQ ID NO: 854963 - RNA, 19 nt, Homo sapiens
  misc_RNA (1)...(19): siRNA sense strand
ccuuucagauccaacagaa

SEQ ID NO: 854964 - RNA, 19 nt, Homo sapiens
  misc_RNA (1)...(19): siRNA sense strand
ccugaagacuuggguggaa

SEQ ID NO: 854965 - RNA, 19 nt, Homo sapiens
  misc_RNA (1)...(19): siRNA sense strand
ggguggaguugcugaccuu

SEQ ID NO: 854966 - RNA, 19 nt, Homo sapiens
  misc_RNA (1)...(19): siRNA sense strand
gcgggaaggacucaaagug

SEQ ID NO: 854967 - RNA, 19 nt, Homo sapiens
  misc_RNA (1)...(19): siRNA sense strand
gagaggggcugcgagaaga

SEQ ID NO: 854968 - RNA, 19 nt, Homo sapiens
  misc_RNA (1)...(19): siRNA sense strand
gggaacugccaaagccaaa

SEQ ID NO: 854969 - RNA, 19 nt, Homo sapiens
  misc_RNA (1)...(19): siRNA sense strand
acccuucucuuggucauuu

SEQ ID NO: 854970 - RNA, 19 nt, Homo sapiens
  misc_RNA (1)...(19): siRNA sense strand
uggaguugcugaccuuagu

SEQ ID NO: 854971 - RNA, 19 nt, Homo sapiens
  misc_RNA (1)...(19): siRNA sense strand
cagcuggaguaacaagagu

SEQ ID NO: 854972 - RNA, 19 nt, Homo sapiens
  misc_RNA (1)...(19): siRNA sense strand
cgggaugggauuaugugua

SEQ ID NO: 854973 - RNA, 19 nt, Homo sapiens
  misc_RNA (1)...(19): siRNA sense strand
gaugggauuauguguacug

SEQ ID NO: 854974 - RNA, 19 nt, Homo sapiens
  misc_RNA (1)...(19): siRNA sense strand
ugaaacagcugaucugaaa

SEQ ID NO: 854975 - RNA, 19 nt, Homo sapiens
  misc_RNA (1)...(19): siRNA sense strand
gaagaaaugugcacgugaa

SEQ ID NO: 854976 - RNA, 19 nt, Homo sapiens
  misc_RNA (1)...(19): siRNA sense strand
gaauuugcaugcuguagua

SEQ ID NO: 854977 - RNA, 19 nt, Homo sapiens
  misc_RNA (1)...(19): siRNA sense strand
gagcaaagcuaagaaugaa

SEQ ID NO: 854978 - RNA, 19 nt, Homo sapiens
  misc_RNA (1)...(19): siRNA sense strand
gagagaacauucagaccaa

SEQ ID NO: 854979 - RNA, 19 nt, Homo sapiens
  misc_RNA (1)...(19): siRNA sense strand
uaacaggauucaagaacuu

SEQ ID NO: 854980 - RNA, 19 nt, Homo sapiens
  misc_RNA (1)...(19): siRNA sense strand
gaaaugugcacgugaaaca

SEQ ID NO: 854981 - RNA, 19 nt, Homo sapiens
  misc_RNA (1)...(19): siRNA sense strand
gaaagaauucaacaacuuc

SEQ ID NO: 854982 - RNA, 19 nt, Homo sapiens
  misc_RNA (1)...(19): siRNA sense strand
cagcugaucugaaauuucu

SEQ ID NO: 854983 - RNA, 19 nt, Homo sapiens
  misc_RNA (1)...(19): siRNA sense strand
agaaagagagcaaagcuaa

SEQ ID NO: 854984 - RNA, 19 nt, Homo sapiens
  misc_RNA (1)...(19): siRNA sense strand
ucaagaacuucaacaggaa

SEQ ID NO: 854985 - RNA, 19 nt, Homo sapiens
  misc_RNA (1)...(19): siRNA sense strand
gcucauaaacucaaacugu

SEQ ID NO: 854986 - RNA, 19 nt, Homo sapiens
  misc_RNA (1)...(19): siRNA sense strand
ugagauagguaugcuguga

SEQ ID NO: 854987 - RNA, 19 nt, Homo sapiens
  misc_RNA (1)...(19): siRNA sense strand
ccagaugacccuuacauug

SEQ ID NO: 854988 - RNA, 19 nt, Homo sapiens
  misc_RNA (1)...(19): siRNA sense strand
caagaaaaguuagcaauga

SEQ ID NO: 854989 - RNA, 19 nt, Homo sapiens
  misc_RNA (1)...(19): siRNA sense strand
aaacagcugaucugaaauu

SEQ ID NO: 854990 - RNA, 19 nt, Homo sapiens
  misc_RNA (1)...(19): siRNA sense strand
cauaguagggauugagaua

SEQ ID NO: 854991 - RNA, 19 nt, Homo sapiens
  misc_RNA (1)...(19): siRNA sense strand
gaaaaugcaagauugagua

SEQ ID NO: 854992 - RNA, 19 nt, Homo sapiens
  misc_RNA (1)...(19): siRNA sense strand
ucaaacuguuggagaaaga

SEQ ID NO: 854993 - RNA, 19 nt, Homo sapiens
  misc_RNA (1)...(19): siRNA sense strand
gagaaagagagcaaagcua

SEQ ID NO: 854994 - RNA, 19 nt, Homo sapiens
  misc_RNA (1)...(19): siRNA sense strand
ggaacccuauaaacuugaa

SEQ ID NO: 854995 - RNA, 19 nt, Homo sapiens
  misc_RNA (1)...(19): siRNA sense strand
gcaaagcuaagaaugaaag

SEQ ID NO: 854996 - RNA, 19 nt, Homo sapiens
  misc_RNA (1)...(19): siRNA sense strand
uaaugaaacugagagaaca

SEQ ID NO: 854997 - RNA, 19 nt, Homo sapiens
  misc_RNA (1)...(19): siRNA sense strand
gaaacugagagaacauuca

SEQ ID NO: 854998 - RNA, 19 nt, Homo sapiens
  misc_RNA (1)...(19): siRNA sense strand
gcaagauugaguagagaaa

SEQ ID NO: 854999 - RNA, 19 nt, Homo sapiens
  misc_RNA (1)...(19): siRNA sense strand
gaauucaacaacuucaaga

SEQ ID NO: 855000 - RNA, 19 nt, Homo sapiens
  misc_RNA (1)...(19): siRNA sense strand
aaagagagcaaagcuaaga

SEQ ID NO: 855001 - RNA, 19 nt, Homo sapiens
  misc_RNA (1)...(19): siRNA sense strand
cucauaaacucaaacuguu

SEQ ID NO: 855002 - RNA, 19 nt, Homo sapiens
  misc_RNA (1)...(19): siRNA sense strand
gccagcguaugcaaauuga

SEQ ID NO: 855003 - RNA, 19 nt, Homo sapiens
  misc_RNA (1)...(19): siRNA sense strand
uugcagaccuccuucaagu

SEQ ID NO: 855004 - RNA, 19 nt, Homo sapiens
  misc_RNA (1)...(19): siRNA sense strand
gauaacaggauucaagaac

SEQ ID NO: 855005 - RNA, 19 nt, Homo sapiens
  misc_RNA (1)...(19): siRNA sense strand
gcugauaacaggauucaag

SEQ ID NO: 855006 - RNA, 19 nt, Homo sapiens
  misc_RNA (1)...(19): siRNA sense strand
gaaagugccaauuuugauu

SEQ ID NO: 855007 - RNA, 19 nt, Homo sapiens
  misc_RNA (1)...(19): siRNA sense strand
gagagcaaagcuaagaaug

SEQ ID NO: 855008 - RNA, 19 nt, Homo sapiens
  misc_RNA (1)...(19): siRNA sense strand
gaccaacacguuaaagagu

SEQ ID NO: 855009 - RNA, 19 nt, Homo sapiens
  misc_RNA (1)...(19): siRNA sense strand
uagcaagcagguaggauuu

SEQ ID NO: 855010 - RNA, 19 nt, Homo sapiens
  misc_RNA (1)...(19): siRNA sense strand
agagcaaagcuaagaauga

SEQ ID NO: 855011 - RNA, 19 nt, Homo sapiens
  misc_RNA (1)...(19): siRNA sense strand
gaaagagagcaaagcuaag

SEQ ID NO: 855012 - RNA, 19 nt, Homo sapiens
  misc_RNA (1)...(19): siRNA sense strand
ggaaguccaccagcuacaa

SEQ ID NO: 855013 - RNA, 19 nt, Homo sapiens
  misc_RNA (1)...(19): siRNA sense strand
uuggaacccuauaaacuug

SEQ ID NO: 855014 - RNA, 19 nt, Homo sapiens
  misc_RNA (1)...(19): siRNA sense strand
ggagaaagagagcaaagcu

SEQ ID NO: 855015 - RNA, 19 nt, Homo sapiens
  misc_RNA (1)...(19): siRNA sense strand
gcuguagagagaaaguaua

SEQ ID NO: 855016 - RNA, 19 nt, Homo sapiens
  misc_RNA (1)...(19): siRNA sense strand
acaguggaguguuuaccuu

SEQ ID NO: 855017 - RNA, 19 nt, Homo sapiens
  misc_RNA (1)...(19): siRNA sense strand
aaaguuagcaaugauggaa

SEQ ID NO: 855018 - RNA, 19 nt, Homo sapiens
  misc_RNA (1)...(19): siRNA sense strand
cagaugacccuuacauugc

SEQ ID NO: 855019 - RNA, 19 nt, Homo sapiens
  misc_RNA (1)...(19): siRNA sense strand
ucaaccagaugacccuuac

SEQ ID NO: 855020 - RNA, 19 nt, Homo sapiens
  misc_RNA (1)...(19): siRNA sense strand
aaugcaagauugaguagag

SEQ ID NO: 855021 - RNA, 19 nt, Homo sapiens
  misc_RNA (1)...(19): siRNA sense strand
guagggauugagauaggua

SEQ ID NO: 855022 - RNA, 19 nt, Homo sapiens
  misc_RNA (1)...(19): siRNA sense strand
gaaguccaccagcuacaag

SEQ ID NO: 855023 - RNA, 19 nt, Homo sapiens
  misc_RNA (1)...(19): siRNA sense strand
cagcguaugcaaauugaug

SEQ ID NO: 855024 - RNA, 19 nt, Homo sapiens
  misc_RNA (1)...(19): siRNA sense strand
cagaccaacacguuaaaga

SEQ ID NO: 855025 - RNA, 19 nt, Homo sapiens
  misc_RNA (1)...(19): siRNA sense strand
gcugaucugaaauuucuga

SEQ ID NO: 855026 - RNA, 19 nt, Homo sapiens
  misc_RNA (1)...(19): siRNA sense strand
accaacacguuaaagaguu

SEQ ID NO: 855027 - RNA, 19 nt, Homo sapiens
  misc_RNA (1)...(19): siRNA sense strand
ugagagccuucggcaauca

SEQ ID NO: 855028 - RNA, 19 nt, Homo sapiens
  misc_RNA (1)...(19): siRNA sense strand
gcgccagcguaugcaaauu

SEQ ID NO: 855029 - RNA, 19 nt, Homo sapiens
  misc_RNA (1)...(19): siRNA sense strand
gugaaacagcugaucugaa

SEQ ID NO: 855030 - RNA, 19 nt, Homo sapiens
  misc_RNA (1)...(19): siRNA sense strand
ccuauaaacuugaaaaugc

SEQ ID NO: 855031 - RNA, 19 nt, Homo sapiens
  misc_RNA (1)...(19): siRNA sense strand
ucauaaacucaaacuguug

SEQ ID NO: 855032 - RNA, 19 nt, Homo sapiens
  misc_RNA (1)...(19): siRNA sense strand
acaggaaguccaccagcua

SEQ ID NO: 855033 - RNA, 19 nt, Homo sapiens
  misc_RNA (1)...(19): siRNA sense strand
gagaacauucagaccaaca

SEQ ID NO: 855034 - RNA, 19 nt, Homo sapiens
  misc_RNA (1)...(19): siRNA sense strand
gaauaaccaauaugcucau

SEQ ID NO: 855035 - RNA, 19 nt, Homo sapiens
  misc_RNA (1)...(19): siRNA sense strand
gaaacagcugaucugaaau

SEQ ID NO: 855036 - RNA, 19 nt, Homo sapiens
  misc_RNA (1)...(19): siRNA sense strand
ggauugagauagguaugcu

SEQ ID NO: 855037 - RNA, 19 nt, Homo sapiens
  misc_RNA (1)...(19): siRNA sense strand
guuccucccucugaaguca

SEQ ID NO: 855038 - RNA, 19 nt, Homo sapiens
  misc_RNA (1)...(19): siRNA sense strand
aacagcugaucugaaauuu

SEQ ID NO: 855039 - RNA, 19 nt, Homo sapiens
  misc_RNA (1)...(19): siRNA sense strand
uaguagggauugagauagg

SEQ ID NO: 855040 - RNA, 19 nt, Homo sapiens
  misc_RNA (1)...(19): siRNA sense strand
agaugacccuuacauugca

SEQ ID NO: 855041 - RNA, 19 nt, Homo sapiens
  misc_RNA (1)...(19): siRNA sense strand
aacucaaacuguuggagaa

SEQ ID NO: 855042 - RNA, 19 nt, Homo sapiens
  misc_RNA (1)...(19): siRNA sense strand
acugagagccuucggcaau

SEQ ID NO: 855043 - RNA, 19 nt, Homo sapiens
  misc_RNA (1)...(19): siRNA sense strand
uuuggaacccuauaaacuu

SEQ ID NO: 855044 - RNA, 19 nt, Homo sapiens
  misc_RNA (1)...(19): siRNA sense strand
uuacauugcagaccuccuu

SEQ ID NO: 855045 - RNA, 19 nt, Homo sapiens
  misc_RNA (1)...(19): siRNA sense strand
ggcaagaaaagaaguauug

SEQ ID NO: 855046 - RNA, 19 nt, Homo sapiens
  misc_RNA (1)...(19): siRNA sense strand
uaccuagaguuaaugaaac

SEQ ID NO: 855047 - RNA, 19 nt, Homo sapiens
  misc_RNA (1)...(19): siRNA sense strand
caguggaguguuuaccuuu

SEQ ID NO: 855048 - RNA, 19 nt, Homo sapiens
  misc_RNA (1)...(19): siRNA sense strand
auaacaggauucaagaacu

SEQ ID NO: 855049 - RNA, 19 nt, Homo sapiens
  misc_RNA (1)...(19): siRNA sense strand
caaagcuaagaaugaaaga

SEQ ID NO: 855050 - RNA, 19 nt, Homo sapiens
  misc_RNA (1)...(19): siRNA sense strand
cauucagaccaacacguua

SEQ ID NO: 855051 - RNA, 19 nt, Homo sapiens
  misc_RNA (1)...(19): siRNA sense strand
uuaaugaaacugagagaac

SEQ ID NO: 855052 - RNA, 19 nt, Homo sapiens
  misc_RNA (1)...(19): siRNA sense strand
guggaguguuuaccuuugg

SEQ ID NO: 855053 - RNA, 19 nt, Homo sapiens
  misc_RNA (1)...(19): siRNA sense strand
aguggaguguuuaccuuug

SEQ ID NO: 855054 - RNA, 19 nt, Homo sapiens
  misc_RNA (1)...(19): siRNA sense strand
ccagcuacaagaaaaguua

SEQ ID NO: 855055 - RNA, 19 nt, Homo sapiens
  misc_RNA (1)...(19): siRNA sense strand
uccuucaaguggcugauaa

SEQ ID NO: 855056 - RNA, 19 nt, Homo sapiens
  misc_RNA (1)...(19): siRNA sense strand
uucagcgacuuaguucaua

SEQ ID NO: 855057 - RNA, 19 nt, Homo sapiens
  misc_RNA (1)...(19): siRNA sense strand
gggaugagcugaaugucaa

SEQ ID NO: 855058 - RNA, 19 nt, Homo sapiens
  misc_RNA (1)...(19): siRNA sense strand
gagcaugaauagcaagaga

SEQ ID NO: 855059 - RNA, 19 nt, Homo sapiens
  misc_RNA (1)...(19): siRNA sense strand
gagagaugccgucccauga

SEQ ID NO: 855060 - RNA, 19 nt, Homo sapiens
  misc_RNA (1)...(19): siRNA sense strand
gcccgaacauacacacuga

SEQ ID NO: 855061 - RNA, 19 nt, Homo sapiens
  misc_RNA (1)...(19): siRNA sense strand
gagaugccgucccaugaca

SEQ ID NO: 855062 - RNA, 19 nt, Homo sapiens
  misc_RNA (1)...(19): siRNA sense strand
ugaacgggcuucucuaugc

SEQ ID NO: 855063 - RNA, 19 nt, Homo sapiens
  misc_RNA (1)...(19): siRNA sense strand
gugcguugcugccacaaau

SEQ ID NO: 855064 - RNA, 19 nt, Homo sapiens
  misc_RNA (1)...(19): siRNA sense strand
ugaaugugguggaaguguu

SEQ ID NO: 855065 - RNA, 19 nt, Homo sapiens
  misc_RNA (1)...(19): siRNA sense strand
ccaguuccuuucagacaga

SEQ ID NO: 855066 - RNA, 19 nt, Homo sapiens
  misc_RNA (1)...(19): siRNA sense strand
ugccugagcugcuguccaa

SEQ ID NO: 855067 - RNA, 19 nt, Homo sapiens
  misc_RNA (1)...(19): siRNA sense strand
gagcugcuguccaauaucc

SEQ ID NO: 855068 - RNA, 19 nt, Homo sapiens
  misc_RNA (1)...(19): siRNA sense strand
gaauagcaagagaagguau

SEQ ID NO: 855069 - RNA, 19 nt, Homo sapiens
  misc_RNA (1)...(19): siRNA sense strand
gaugugugcugugcuguac

SEQ ID NO: 855070 - RNA, 19 nt, Homo sapiens
  misc_RNA (1)...(19): siRNA sense strand
gcacuguggaggccuacaa

SEQ ID NO: 855071 - RNA, 19 nt, Homo sapiens
  misc_RNA (1)...(19): siRNA sense strand
gaaugugguggaaguguuc

SEQ ID NO: 855072 - RNA, 19 nt, Homo sapiens
  misc_RNA (1)...(19): siRNA sense strand
cugagcugcuguccaauau

SEQ ID NO: 855073 - RNA, 19 nt, Homo sapiens
  misc_RNA (1)...(19): siRNA sense strand
gcauuggccugggucagau

SEQ ID NO: 855074 - RNA, 19 nt, Homo sapiens
  misc_RNA (1)...(19): siRNA sense strand
cugaggagcaggucuuuga

SEQ ID NO: 855075 - RNA, 19 nt, Homo sapiens
  misc_RNA (1)...(19): siRNA sense strand
ccugagcugcuguccaaua

SEQ ID NO: 855076 - RNA, 19 nt, Homo sapiens
  misc_RNA (1)...(19): siRNA sense strand
gccaauugcugggagagau

SEQ ID NO: 855077 - RNA, 19 nt, Homo sapiens
  misc_RNA (1)...(19): siRNA sense strand
ugagcugaaugucaaaucu

SEQ ID NO: 855078 - RNA, 19 nt, Homo sapiens
  misc_RNA (1)...(19): siRNA sense strand
guagugaacgggcuucucu

SEQ ID NO: 855079 - RNA, 19 nt, Homo sapiens
  misc_RNA (1)...(19): siRNA sense strand
ggucuuugaagcugcauug

SEQ ID NO: 855080 - RNA, 19 nt, Homo sapiens
  misc_RNA (1)...(19): siRNA sense strand
gcaugaauagcaagagaag

SEQ ID NO: 855081 - RNA, 19 nt, Homo sapiens
  misc_RNA (1)...(19): siRNA sense strand
ggagguguccaugucagaa

SEQ ID NO: 855082 - RNA, 19 nt, Homo sapiens
  misc_RNA (1)...(19): siRNA sense strand
ucuaugccaucggaggaua

SEQ ID NO: 855083 - RNA, 19 nt, Homo sapiens
  misc_RNA (1)...(19): siRNA sense strand
caacucagcaggugauucc

SEQ ID NO: 855084 - RNA, 19 nt, Homo sapiens
  misc_RNA (1)...(19): siRNA sense strand
guuccuuucagacagaaua

SEQ ID NO: 855085 - RNA, 19 nt, Homo sapiens
  misc_RNA (1)...(19): siRNA sense strand
acagaauacagcaggauga

SEQ ID NO: 855086 - RNA, 19 nt, Homo sapiens
  misc_RNA (1)...(19): siRNA sense strand
ccuacaacccggagacaga

SEQ ID NO: 855087 - RNA, 19 nt, Homo sapiens
  misc_RNA (1)...(19): siRNA sense strand
gagcugaaugucaaaucug

SEQ ID NO: 855088 - RNA, 19 nt, Homo sapiens
  misc_RNA (1)...(19): siRNA sense strand
ugaauagcaagagaaggua

SEQ ID NO: 855089 - RNA, 19 nt, Homo sapiens
  misc_RNA (1)...(19): siRNA sense strand
ccaccugccagcuuucaga

SEQ ID NO: 855090 - RNA, 19 nt, Homo sapiens
  misc_RNA (1)...(19): siRNA sense strand
aaaggacuaccaccucaug

SEQ ID NO: 855091 - RNA, 19 nt, Homo sapiens
  misc_RNA (1)...(19): siRNA sense strand
guccaugucagaagaguuc

SEQ ID NO: 855092 - RNA, 19 nt, Homo sapiens
  misc_RNA (1)...(19): siRNA sense strand
ccacgcugcugcacaucca

SEQ ID NO: 855093 - RNA, 19 nt, Homo sapiens
  misc_RNA (1)...(19): siRNA sense strand
agcugaaugucaaaucuga

SEQ ID NO: 855094 - RNA, 19 nt, Homo sapiens
  misc_RNA (1)...(19): siRNA sense strand
gaggagcaggucuuugaag

SEQ ID NO: 855095 - RNA, 19 nt, Homo sapiens
  misc_RNA (1)...(19): siRNA sense strand
gugaacgggcuucucuaug

SEQ ID NO: 855096 - RNA, 19 nt, Homo sapiens
  misc_RNA (1)...(19): siRNA sense strand
gaacuccgguauucauuga

SEQ ID NO: 855097 - RNA, 19 nt, Homo sapiens
  misc_RNA (1)...(19): siRNA sense strand
gcacagauguccacuuugg

SEQ ID NO: 855098 - RNA, 19 nt, Homo sapiens
  misc_RNA (1)...(19): siRNA sense strand
uagcacagauguccacuuu

SEQ ID NO: 855099 - RNA, 19 nt, Homo sapiens
  misc_RNA (1)...(19): siRNA sense strand
gagcugaacuccgguauuc

SEQ ID NO: 855100 - RNA, 19 nt, Homo sapiens
  misc_RNA (1)...(19): siRNA sense strand
ggaguaagcugaguacaag

SEQ ID NO: 855101 - RNA, 19 nt, Homo sapiens
  misc_RNA (1)...(19): siRNA sense strand
gaaacugggugcggacaaa

SEQ ID NO: 855102 - RNA, 19 nt, Homo sapiens
  misc_RNA (1)...(19): siRNA sense strand
gguauucauugauagagaa

SEQ ID NO: 855103 - RNA, 19 nt, Homo sapiens
  misc_RNA (1)...(19): siRNA sense strand
ggagugggauagcacagau

SEQ ID NO: 855104 - RNA, 19 nt, Homo sapiens
  misc_RNA (1)...(19): siRNA sense strand
auggacaacuuacccaaua

SEQ ID NO: 855105 - RNA, 19 nt, Homo sapiens
  misc_RNA (1)...(19): siRNA sense strand
cacaguagaugaggugcua

SEQ ID NO: 855106 - RNA, 19 nt, Homo sapiens
  misc_RNA (1)...(19): siRNA sense strand
gcagucaucauauggacaa

SEQ ID NO: 855107 - RNA, 19 nt, Homo sapiens
  misc_RNA (1)...(19): siRNA sense strand
ccugagucuucaccauuua

SEQ ID NO: 855108 - RNA, 19 nt, Homo sapiens
  misc_RNA (1)...(19): siRNA sense strand
gaguacaagucccauagca

SEQ ID NO: 855109 - RNA, 19 nt, Homo sapiens
  misc_RNA (1)...(19): siRNA sense strand
uggacaacuuacccaauaa

SEQ ID NO: 855110 - RNA, 19 nt, Homo sapiens
  misc_RNA (1)...(19): siRNA sense strand
acuccgguauucauugaua

SEQ ID NO: 855111 - RNA, 19 nt, Homo sapiens
  misc_RNA (1)...(19): siRNA sense strand
gucaucauauggacaacuu

SEQ ID NO: 855112 - RNA, 19 nt, Homo sapiens
  misc_RNA (1)...(19): siRNA sense strand
guaguccuaaugcaagaua

SEQ ID NO: 855113 - RNA, 19 nt, Homo sapiens
  misc_RNA (1)...(19): siRNA sense strand
ucccauagcagcagaguug

SEQ ID NO: 855114 - RNA, 19 nt, Homo sapiens
  misc_RNA (1)...(19): siRNA sense strand
ggauggaugcgucuaugug

SEQ ID NO: 855115 - RNA, 19 nt, Homo sapiens
  misc_RNA (1)...(19): siRNA sense strand
gauccugagucuucaccau

SEQ ID NO: 855116 - RNA, 19 nt, Homo sapiens
  misc_RNA (1)...(19): siRNA sense strand
agagcaguguggaugguaa

SEQ ID NO: 855117 - RNA, 19 nt, Homo sapiens
  misc_RNA (1)...(19): siRNA sense strand
caggauggaugcgucuaug

SEQ ID NO: 855118 - RNA, 19 nt, Homo sapiens
  misc_RNA (1)...(19): siRNA sense strand
gauggaugcgucuaugugu

SEQ ID NO: 855119 - RNA, 19 nt, Homo sapiens
  misc_RNA (1)...(19): siRNA sense strand
uccugagucuucaccauuu

SEQ ID NO: 855120 - RNA, 19 nt, Homo sapiens
  misc_RNA (1)...(19): siRNA sense strand
caugguacacaguagauga

SEQ ID NO: 855121 - RNA, 19 nt, Homo sapiens
  misc_RNA (1)...(19): siRNA sense strand
uggaugcgucuauguguaa

SEQ ID NO: 855122 - RNA, 19 nt, Homo sapiens
  misc_RNA (1)...(19): siRNA sense strand
ggacaacuuacccaauaac

SEQ ID NO: 855123 - RNA, 19 nt, Homo sapiens
  misc_RNA (1)...(19): siRNA sense strand
gcaguggaguaagcugagu

SEQ ID NO: 855124 - RNA, 19 nt, Homo sapiens
  misc_RNA (1)...(19): siRNA sense strand
uggaguaagcugaguacaa

SEQ ID NO: 855125 - RNA, 19 nt, Homo sapiens
  misc_RNA (1)...(19): siRNA sense strand
guguaguccuaaugcaaga

SEQ ID NO: 855126 - RNA, 19 nt, Homo sapiens
  misc_RNA (1)...(19): siRNA sense strand
gcugaguacaagucccaua

SEQ ID NO: 855127 - RNA, 19 nt, Homo sapiens
  misc_RNA (1)...(19): siRNA sense strand
aggcugcagucaucauaug

SEQ ID NO: 855128 - RNA, 19 nt, Homo sapiens
  misc_RNA (1)...(19): siRNA sense strand
gggcaugguacacaguaga

SEQ ID NO: 855129 - RNA, 19 nt, Homo sapiens
  misc_RNA (1)...(19): siRNA sense strand
cgguauucauugauagaga

SEQ ID NO: 855130 - RNA, 19 nt, Homo sapiens
  misc_RNA (1)...(19): siRNA sense strand
ggacaggcugcagucauca

SEQ ID NO: 855131 - RNA, 19 nt, Homo sapiens
  misc_RNA (1)...(19): siRNA sense strand
cggacaaaguagccaaugg

SEQ ID NO: 855132 - RNA, 19 nt, Homo sapiens
  misc_RNA (1)...(19): siRNA sense strand
acaggcugcagucaucaua

SEQ ID NO: 855133 - RNA, 19 nt, Homo sapiens
  misc_RNA (1)...(19): siRNA sense strand
ggaugcgucuauguguaau

SEQ ID NO: 855134 - RNA, 19 nt, Homo sapiens
  misc_RNA (1)...(19): siRNA sense strand
aggacaggcugcagucauc

SEQ ID NO: 855135 - RNA, 19 nt, Homo sapiens
  misc_RNA (1)...(19): siRNA sense strand
gacaacuuacccaauaaca

SEQ ID NO: 855136 - RNA, 19 nt, Homo sapiens
  misc_RNA (1)...(19): siRNA sense strand
auggaugcgucuaugugua

SEQ ID NO: 855137 - RNA, 19 nt, Homo sapiens
  misc_RNA (1)...(19): siRNA sense strand
ggucuugggacguguaguc

SEQ ID NO: 855138 - RNA, 19 nt, Homo sapiens
  misc_RNA (1)...(19): siRNA sense strand
augcgucuauguguaauga

SEQ ID NO: 855139 - RNA, 19 nt, Homo sapiens
  misc_RNA (1)...(19): siRNA sense strand
uagcagcagaguugcaaga

SEQ ID NO: 855140 - RNA, 19 nt, Homo sapiens
  misc_RNA (1)...(19): siRNA sense strand
uaacugcccugcucagcuu

SEQ ID NO: 855141 - RNA, 19 nt, Homo sapiens
  misc_RNA (1)...(19): siRNA sense strand
ucucacagcuuggaaaugg

SEQ ID NO: 855142 - RNA, 19 nt, Homo sapiens
  misc_RNA (1)...(19): siRNA sense strand
gcaagagggcaaggaagaa

SEQ ID NO: 855143 - RNA, 19 nt, Homo sapiens
  misc_RNA (1)...(19): siRNA sense strand
gcaaggaagaauggagaaa

SEQ ID NO: 855144 - RNA, 19 nt, Homo sapiens
  misc_RNA (1)...(19): siRNA sense strand
aaggaagaauggagaaaca

SEQ ID NO: 855145 - RNA, 19 nt, Homo sapiens
  misc_RNA (1)...(19): siRNA sense strand
gcucaguguugacucucuu

SEQ ID NO: 855146 - RNA, 19 nt, Homo sapiens
  misc_RNA (1)...(19): siRNA sense strand
gugcacaucauaccacuuc

SEQ ID NO: 855147 - RNA, 19 nt, Homo sapiens
  misc_RNA (1)...(19): siRNA sense strand
caaggcagggugagagaug

SEQ ID NO: 855148 - RNA, 19 nt, Homo sapiens
  misc_RNA (1)...(19): siRNA sense strand
caagagggcaaggaagaau

SEQ ID NO: 855149 - RNA, 19 nt, Homo sapiens
  misc_RNA (1)...(19): siRNA sense strand
caaggaggucucacagcuu

SEQ ID NO: 855150 - RNA, 19 nt, Homo sapiens
  misc_RNA (1)...(19): siRNA sense strand
aaagcaagagggcaaggaa

SEQ ID NO: 855151 - RNA, 19 nt, Homo sapiens
  misc_RNA (1)...(19): siRNA sense strand
ggucucacagcuuggaaau

SEQ ID NO: 855152 - RNA, 19 nt, Homo sapiens
  misc_RNA (1)...(19): siRNA sense strand
uggagaaacagcucagugu

SEQ ID NO: 855153 - RNA, 19 nt, Homo sapiens
  misc_RNA (1)...(19): siRNA sense strand
caaagcaagagggcaagga

SEQ ID NO: 855154 - RNA, 19 nt, Homo sapiens
  misc_RNA (1)...(19): siRNA sense strand
ggaggucucacagcuugga

SEQ ID NO: 855155 - RNA, 19 nt, Homo sapiens
  misc_RNA (1)...(19): siRNA sense strand
caaauugucuccuccauca

SEQ ID NO: 855156 - RNA, 19 nt, Homo sapiens
  misc_RNA (1)...(19): siRNA sense strand
gcucugacgucaccucauu

SEQ ID NO: 855157 - RNA, 19 nt, Homo sapiens
  misc_RNA (1)...(19): siRNA sense strand
caaggaagaugcugccaau

SEQ ID NO: 855158 - RNA, 19 nt, Homo sapiens
  misc_RNA (1)...(19): siRNA sense strand
gcacauaccgccagaucuu

SEQ ID NO: 855159 - RNA, 19 nt, Homo sapiens
  misc_RNA (1)...(19): siRNA sense strand
ggaagaugcugccaauaac

SEQ ID NO: 855160 - RNA, 19 nt, Homo sapiens
  misc_RNA (1)...(19): siRNA sense strand
ugacagaguuccagaccaa

SEQ ID NO: 855161 - RNA, 19 nt, Homo sapiens
  misc_RNA (1)...(19): siRNA sense strand
uggaguggcuuucuguuaa

SEQ ID NO: 855162 - RNA, 19 nt, Homo sapiens
  misc_RNA (1)...(19): siRNA sense strand
ggacaacaaagcaaucuau

SEQ ID NO: 855163 - RNA, 19 nt, Homo sapiens
  misc_RNA (1)...(19): siRNA sense strand
caaccucaaucgccucauu

SEQ ID NO: 855164 - RNA, 19 nt, Homo sapiens
  misc_RNA (1)...(19): siRNA sense strand
ccagucaucucugcagaaa

SEQ ID NO: 855165 - RNA, 19 nt, Homo sapiens
  misc_RNA (1)...(19): siRNA sense strand
gauuaccaaugccugcuuu

SEQ ID NO: 855166 - RNA, 19 nt, Homo sapiens
  misc_RNA (1)...(19): siRNA sense strand
uggcagagauuaccaaugc

SEQ ID NO: 855167 - RNA, 19 nt, Homo sapiens
  misc_RNA (1)...(19): siRNA sense strand
aggaagaugcugccaauaa

SEQ ID NO: 855168 - RNA, 19 nt, Homo sapiens
  misc_RNA (1)...(19): siRNA sense strand
caacaaagcaaucuaugac

SEQ ID NO: 855169 - RNA, 19 nt, Homo sapiens
  misc_RNA (1)...(19): siRNA sense strand
acaaagcaaucuaugacau

SEQ ID NO: 855170 - RNA, 19 nt, Homo sapiens
  misc_RNA (1)...(19): siRNA sense strand
gcucaucacaggcaaggaa

SEQ ID NO: 855171 - RNA, 19 nt, Homo sapiens
  misc_RNA (1)...(19): siRNA sense strand
uguuaacuauggcaagaaa

SEQ ID NO: 855172 - RNA, 19 nt, Homo sapiens
  misc_RNA (1)...(19): siRNA sense strand
acaacaaagcaaucuauga

SEQ ID NO: 855173 - RNA, 19 nt, Homo sapiens
  misc_RNA (1)...(19): siRNA sense strand
ccaggcagcauggcacaua

SEQ ID NO: 855174 - RNA, 19 nt, Homo sapiens
  misc_RNA (1)...(19): siRNA sense strand
ggaguucaucgaccugcua

SEQ ID NO: 855175 - RNA, 19 nt, Homo sapiens
  misc_RNA (1)...(19): siRNA sense strand
ggaguggcuuucuguuaac

SEQ ID NO: 855176 - RNA, 19 nt, Homo sapiens
  misc_RNA (1)...(19): siRNA sense strand
caaagcaaucuaugacauc

SEQ ID NO: 855177 - RNA, 19 nt, Homo sapiens
  misc_RNA (1)...(19): siRNA sense strand
gaagaugcugccaauaacu

SEQ ID NO: 855178 - RNA, 19 nt, Homo sapiens
  misc_RNA (1)...(19): siRNA sense strand
guggcuuucuguuaacuau

SEQ ID NO: 855179 - RNA, 19 nt, Homo sapiens
  misc_RNA (1)...(19): siRNA sense strand
caaccuacaccaaccucaa

SEQ ID NO: 855180 - RNA, 19 nt, Homo sapiens
  misc_RNA (1)...(19): siRNA sense strand
gacaacaaagcaaucuaug

SEQ ID NO: 855181 - RNA, 19 nt, Homo sapiens
  misc_RNA (1)...(19): siRNA sense strand
aagaugcugccaauaacua

SEQ ID NO: 855182 - RNA, 19 nt, Homo sapiens
  misc_RNA (1)...(19): siRNA sense strand
acauugagcgcccaaccua

SEQ ID NO: 855183 - RNA, 19 nt, Homo sapiens
  misc_RNA (1)...(19): siRNA sense strand
ucuguuaacuauggcaaga

SEQ ID NO: 855184 - RNA, 19 nt, Homo sapiens
  misc_RNA (1)...(19): siRNA sense strand
aaagcaaucuaugacaucu

SEQ ID NO: 855185 - RNA, 19 nt, Homo sapiens
  misc_RNA (1)...(19): siRNA sense strand
ggcuuucuguuaacuaugg

SEQ ID NO: 855186 - RNA, 19 nt, Homo sapiens
  misc_RNA (1)...(19): siRNA sense strand
gcuuugagccugccaacca

SEQ ID NO: 855187 - RNA, 19 nt, Homo sapiens
  misc_RNA (1)...(19): siRNA sense strand
ucaccucauuccugaugga

SEQ ID NO: 855188 - RNA, 19 nt, Homo sapiens
  misc_RNA (1)...(19): siRNA sense strand
gcagacagagagacaagac

SEQ ID NO: 855189 - RNA, 19 nt, Homo sapiens
  misc_RNA (1)...(19): siRNA sense strand
aaccucaaucgccucauua

SEQ ID NO: 855190 - RNA, 19 nt, Homo sapiens
  misc_RNA (1)...(19): siRNA sense strand
gccaaauugucuccuccau

SEQ ID NO: 855191 - RNA, 19 nt, Homo sapiens
  misc_RNA (1)...(19): siRNA sense strand
gacaccagcuggagaagga

SEQ ID NO: 855192 - RNA, 19 nt, Homo sapiens
  misc_RNA (1)...(19): siRNA sense strand
gaacaauccgcggaaauuc

SEQ ID NO: 855193 - RNA, 19 nt, Homo sapiens
  misc_RNA (1)...(19): siRNA sense strand
gaagaucgcgcugcacaau

SEQ ID NO: 855194 - RNA, 19 nt, Homo sapiens
  misc_RNA (1)...(19): siRNA sense strand
ucgaggaggucaugaagga

SEQ ID NO: 855195 - RNA, 19 nt, Homo sapiens
  misc_RNA (1)...(19): siRNA sense strand
cgaacaauccgcggaaauu

SEQ ID NO: 855196 - RNA, 19 nt, Homo sapiens
  misc_RNA (1)...(19): siRNA sense strand
gaaauucagcgagaagauc

SEQ ID NO: 855197 - RNA, 19 nt, Homo sapiens
  misc_RNA (1)...(19): siRNA sense strand
uggaagagaccacaucaga

SEQ ID NO: 855198 - RNA, 19 nt, Homo sapiens
  misc_RNA (1)...(19): siRNA sense strand
ggaaauucagcgagaagau

SEQ ID NO: 855199 - RNA, 19 nt, Homo sapiens
  misc_RNA (1)...(19): siRNA sense strand
agaucgcgcugcacaauca

SEQ ID NO: 855200 - RNA, 19 nt, Homo sapiens
  misc_RNA (1)...(19): siRNA sense strand
gcuccacacucaacuacuc

SEQ ID NO: 855201 - RNA, 19 nt, Homo sapiens
  misc_RNA (1)...(19): siRNA sense strand
gaaaucccaguaccugcaa

SEQ ID NO: 855202 - RNA, 19 nt, Homo sapiens
  misc_RNA (1)...(19): siRNA sense strand
gaauggaagagaccacauc

SEQ ID NO: 855203 - RNA, 19 nt, Homo sapiens
  misc_RNA (1)...(19): siRNA sense strand
cuggagcaguucaacauga

SEQ ID NO: 855204 - RNA, 19 nt, Homo sapiens
  misc_RNA (1)...(19): siRNA sense strand
ccacgcagccagaauccuu

SEQ ID NO: 855205 - RNA, 19 nt, Homo sapiens
  misc_RNA (1)...(19): siRNA sense strand
gcaugggacaccaagaaga

SEQ ID NO: 855206 - RNA, 19 nt, Homo sapiens
  misc_RNA (1)...(19): siRNA sense strand
guuaacagucccaggaaug

SEQ ID NO: 855207 - RNA, 19 nt, Homo sapiens
  misc_RNA (1)...(19): siRNA sense strand
cccaggacgugcaccagaa

SEQ ID NO: 855208 - RNA, 19 nt, Homo sapiens
  misc_RNA (1)...(19): siRNA sense strand
cagccucucuaaagaacug

SEQ ID NO: 855209 - RNA, 19 nt, Homo sapiens
  misc_RNA (1)...(19): siRNA sense strand
aagcaugggacaccaagaa

SEQ ID NO: 855210 - RNA, 19 nt, Homo sapiens
  misc_RNA (1)...(19): siRNA sense strand
ggcuccagcuccagaaauc

SEQ ID NO: 855211 - RNA, 19 nt, Homo sapiens
  misc_RNA (1)...(19): siRNA sense strand
cagccagaauccuuuagca

SEQ ID NO: 855212 - RNA, 19 nt, Homo sapiens
  misc_RNA (1)...(19): siRNA sense strand
gcggacaccagcuggagaa

SEQ ID NO: 855213 - RNA, 19 nt, Homo sapiens
  misc_RNA (1)...(19): siRNA sense strand
ccacaucagaggcagacaa

SEQ ID NO: 855214 - RNA, 19 nt, Homo sapiens
  misc_RNA (1)...(19): siRNA sense strand
ccucgccagucuccaauca

SEQ ID NO: 855215 - RNA, 19 nt, Homo sapiens
  misc_RNA (1)...(19): siRNA sense strand
cacaucagaggcagacaaa

SEQ ID NO: 855216 - RNA, 19 nt, Homo sapiens
  misc_RNA (1)...(19): siRNA sense strand
ccaacaucauccucacagu

SEQ ID NO: 855217 - RNA, 19 nt, Homo sapiens
  misc_RNA (1)...(19): siRNA sense strand
uggagcaguucaacaugau

SEQ ID NO: 855218 - RNA, 19 nt, Homo sapiens
  misc_RNA (1)...(19): siRNA sense strand
ccaggacgugcaccagaaa

SEQ ID NO: 855219 - RNA, 19 nt, Homo sapiens
  misc_RNA (1)...(19): siRNA sense strand
ccaccucgccagucuccaa

SEQ ID NO: 855220 - RNA, 19 nt, Homo sapiens
  misc_RNA (1)...(19): siRNA sense strand
gcuggagaaggaccaauuc

SEQ ID NO: 855221 - RNA, 19 nt, Homo sapiens
  misc_RNA (1)...(19): siRNA sense strand
acccaucacucaggcugua

SEQ ID NO: 855222 - RNA, 19 nt, Homo sapiens
  misc_RNA (1)...(19): siRNA sense strand
gacaccagcuggagaagga

SEQ ID NO: 855223 - RNA, 19 nt, Homo sapiens
  misc_RNA (1)...(19): siRNA sense strand
gaacaauccgcggaaauuc

SEQ ID NO: 855224 - RNA, 19 nt, Homo sapiens
  misc_RNA (1)...(19): siRNA sense strand
gaagaucgcgcugcacaau

SEQ ID NO: 855225 - RNA, 19 nt, Homo sapiens
  misc_RNA (1)...(19): siRNA sense strand
ucgaggaggucaugaagga

SEQ ID NO: 855226 - RNA, 19 nt, Homo sapiens
  misc_RNA (1)...(19): siRNA sense strand
cgaacaauccgcggaaauu

SEQ ID NO: 855227 - RNA, 19 nt, Homo sapiens
  misc_RNA (1)...(19): siRNA sense strand
gaaauucagcgagaagauc

SEQ ID NO: 855228 - RNA, 19 nt, Homo sapiens
  misc_RNA (1)...(19): siRNA sense strand
uggaagagaccacaucaga

SEQ ID NO: 855229 - RNA, 19 nt, Homo sapiens
  misc_RNA (1)...(19): siRNA sense strand
ggaaauucagcgagaagau

SEQ ID NO: 855230 - RNA, 19 nt, Homo sapiens
  misc_RNA (1)...(19): siRNA sense strand
agaucgcgcugcacaauca

SEQ ID NO: 855231 - RNA, 19 nt, Homo sapiens
  misc_RNA (1)...(19): siRNA sense strand
gcuccacacucaacuacuc

SEQ ID NO: 855232 - RNA, 19 nt, Homo sapiens
  misc_RNA (1)...(19): siRNA sense strand
gaaaucccaguaccugcaa

SEQ ID NO: 855233 - RNA, 19 nt, Homo sapiens
  misc_RNA (1)...(19): siRNA sense strand
gaauggaagagaccacauc

SEQ ID NO: 855234 - RNA, 19 nt, Homo sapiens
  misc_RNA (1)...(19): siRNA sense strand
cuggagcaguucaacauga

SEQ ID NO: 855235 - RNA, 19 nt, Homo sapiens
  misc_RNA (1)...(19): siRNA sense strand
ccacgcagccagaauccuu

SEQ ID NO: 855236 - RNA, 19 nt, Homo sapiens
  misc_RNA (1)...(19): siRNA sense strand
gcaugggacaccaagaaga

SEQ ID NO: 855237 - RNA, 19 nt, Homo sapiens
  misc_RNA (1)...(19): siRNA sense strand
guuaacagucccaggaaug

SEQ ID NO: 855238 - RNA, 19 nt, Homo sapiens
  misc_RNA (1)...(19): siRNA sense strand
cccaggacgugcaccagaa

SEQ ID NO: 855239 - RNA, 19 nt, Homo sapiens
  misc_RNA (1)...(19): siRNA sense strand
cagccucucuaaagaacug

SEQ ID NO: 855240 - RNA, 19 nt, Homo sapiens
  misc_RNA (1)...(19): siRNA sense strand
aagcaugggacaccaagaa

SEQ ID NO: 855241 - RNA, 19 nt, Homo sapiens
  misc_RNA (1)...(19): siRNA sense strand
ggcuccagcuccagaaauc

SEQ ID NO: 855242 - RNA, 19 nt, Homo sapiens
  misc_RNA (1)...(19): siRNA sense strand
cagccagaauccuuuagca

SEQ ID NO: 855243 - RNA, 19 nt, Homo sapiens
  misc_RNA (1)...(19): siRNA sense strand
gcggacaccagcuggagaa

SEQ ID NO: 855244 - RNA, 19 nt, Homo sapiens
  misc_RNA (1)...(19): siRNA sense strand
ccacaucagaggcagacaa

SEQ ID NO: 855245 - RNA, 19 nt, Homo sapiens
  misc_RNA (1)...(19): siRNA sense strand
ccucgccagucuccaauca

SEQ ID NO: 855246 - RNA, 19 nt, Homo sapiens
  misc_RNA (1)...(19): siRNA sense strand
cacaucagaggcagacaaa

SEQ ID NO: 855247 - RNA, 19 nt, Homo sapiens
  misc_RNA (1)...(19): siRNA sense strand
ccaacaucauccucacagu

SEQ ID NO: 855248 - RNA, 19 nt, Homo sapiens
  misc_RNA (1)...(19): siRNA sense strand
uggagcaguucaacaugau

SEQ ID NO: 855249 - RNA, 19 nt, Homo sapiens
  misc_RNA (1)...(19): siRNA sense strand
ccaggacgugcaccagaaa

SEQ ID NO: 855250 - RNA, 19 nt, Homo sapiens
  misc_RNA (1)...(19): siRNA sense strand
ccaccucgccagucuccaa

SEQ ID NO: 855251 - RNA, 19 nt, Homo sapiens
  misc_RNA (1)...(19): siRNA sense strand
gcuggagaaggaccaauuc

SEQ ID NO: 855252 - RNA, 19 nt, Homo sapiens
  misc_RNA (1)...(19): siRNA sense strand
acccaucacucaggcugua

SEQ ID NO: 855253 - RNA, 19 nt, Homo sapiens
  misc_RNA (1)...(19): siRNA sense strand
gcaaacaacuggcgauuuc

SEQ ID NO: 855254 - RNA, 19 nt, Homo sapiens
  misc_RNA (1)...(19): siRNA sense strand
caaaauggcuccagagaua

SEQ ID NO: 855255 - RNA, 19 nt, Homo sapiens
  misc_RNA (1)...(19): siRNA sense strand
guaugcaacuugagagaaa

SEQ ID NO: 855256 - RNA, 19 nt, Homo sapiens
  misc_RNA (1)...(19): siRNA sense strand
ccacuugccugcugaguag

SEQ ID NO: 855257 - RNA, 19 nt, Homo sapiens
  misc_RNA (1)...(19): siRNA sense strand
gcaggacccggauuucuuu

SEQ ID NO: 855258 - RNA, 19 nt, Homo sapiens
  misc_RNA (1)...(19): siRNA sense strand
ccaguguguuccagccuua

SEQ ID NO: 855259 - RNA, 19 nt, Homo sapiens
  misc_RNA (1)...(19): siRNA sense strand
agagauaccugcauuuuga

SEQ ID NO: 855260 - RNA, 19 nt, Homo sapiens
  misc_RNA (1)...(19): siRNA sense strand
gaaguuggcacugggaaug

SEQ ID NO: 855261 - RNA, 19 nt, Homo sapiens
  misc_RNA (1)...(19): siRNA sense strand
gccaguguaugcaacuuga

SEQ ID NO: 855262 - RNA, 19 nt, Homo sapiens
  misc_RNA (1)...(19): siRNA sense strand
gcaauggcaggacagcaaa

SEQ ID NO: 855263 - RNA, 19 nt, Homo sapiens
  misc_RNA (1)...(19): siRNA sense strand
ccacaacccaugcucauag

SEQ ID NO: 855264 - RNA, 19 nt, Homo sapiens
  misc_RNA (1)...(19): siRNA sense strand
gccuuuaccuggccagugu

SEQ ID NO: 855265 - RNA, 19 nt, Homo sapiens
  misc_RNA (1)...(19): siRNA sense strand
cuccagagauaccugcauu

SEQ ID NO: 855266 - RNA, 19 nt, Homo sapiens
  misc_RNA (1)...(19): siRNA sense strand
ggcaauggcaggacagcaa

SEQ ID NO: 855267 - RNA, 19 nt, Homo sapiens
  misc_RNA (1)...(19): siRNA sense strand
gaguagaagcugccuuuac

SEQ ID NO: 855268 - RNA, 19 nt, Homo sapiens
  misc_RNA (1)...(19): siRNA sense strand
ggcaggacccggauuucuu

SEQ ID NO: 855269 - RNA, 19 nt, Homo sapiens
  misc_RNA (1)...(19): siRNA sense strand
cacagggcuuguccaguga

SEQ ID NO: 855270 - RNA, 19 nt, Homo sapiens
  misc_RNA (1)...(19): siRNA sense strand
gcacugggaaugguaugga

SEQ ID NO: 855271 - RNA, 19 nt, Homo sapiens
  misc_RNA (1)...(19): siRNA sense strand
gccacuugccugcugagua

SEQ ID NO: 855272 - RNA, 19 nt, Homo sapiens
  misc_RNA (1)...(19): siRNA sense strand
ggaaguuggcacugggaau

SEQ ID NO: 855273 - RNA, 19 nt, Homo sapiens
  misc_RNA (1)...(19): siRNA sense strand
cagugaugcuccugguguu

SEQ ID NO: 855274 - RNA, 19 nt, Homo sapiens
  misc_RNA (1)...(19): siRNA sense strand
cugaguagaagcugccuuu

SEQ ID NO: 855275 - RNA, 19 nt, Homo sapiens
  misc_RNA (1)...(19): siRNA sense strand
gcaggacagcaaacaacug

SEQ ID NO: 855276 - RNA, 19 nt, Homo sapiens
  misc_RNA (1)...(19): siRNA sense strand
uuacccaggugcacagagu

SEQ ID NO: 855277 - RNA, 19 nt, Homo sapiens
  misc_RNA (1)...(19): siRNA sense strand
cacaacccaugcucauagu

SEQ ID NO: 855278 - RNA, 19 nt, Homo sapiens
  misc_RNA (1)...(19): siRNA sense strand
caacccaugcucauagucu

SEQ ID NO: 855279 - RNA, 19 nt, Homo sapiens
  misc_RNA (1)...(19): siRNA sense strand
cagcaaacaacuggcgauu

SEQ ID NO: 855280 - RNA, 19 nt, Homo sapiens
  misc_RNA (1)...(19): siRNA sense strand
aguagaagcugccuuuacc

SEQ ID NO: 855281 - RNA, 19 nt, Homo sapiens
  misc_RNA (1)...(19): siRNA sense strand
ugaguagaagcugccuuua

SEQ ID NO: 855282 - RNA, 19 nt, Homo sapiens
  misc_RNA (1)...(19): siRNA sense strand
aaagggaggugcagacagu

SEQ ID NO: 855283 - RNA, 19 nt, Homo sapiens
  misc_RNA (1)...(19): siRNA sense strand
ccucgcggcuacaggguuu

SEQ ID NO: 855284 - RNA, 19 nt, Homo sapiens
  misc_RNA (1)...(19): siRNA sense strand
ggaguuccggccuggauga

SEQ ID NO: 855285 - RNA, 19 nt, Homo sapiens
  misc_RNA (1)...(19): siRNA sense strand
acacugggacgcagccaaa

SEQ ID NO: 855286 - RNA, 19 nt, Homo sapiens
  misc_RNA (1)...(19): siRNA sense strand
ccugcuuccuggcaagaaa

SEQ ID NO: 855287 - RNA, 19 nt, Homo sapiens
  misc_RNA (1)...(19): siRNA sense strand
caagaaaaccaccccuaga

SEQ ID NO: 855288 - RNA, 19 nt, Homo sapiens
  misc_RNA (1)...(19): siRNA sense strand
ccuguucauucacuucaua

SEQ ID NO: 855289 - RNA, 19 nt, Homo sapiens
  misc_RNA (1)...(19): siRNA sense strand
ggagaaggauuuucaucug

SEQ ID NO: 855290 - RNA, 19 nt, Homo sapiens
  misc_RNA (1)...(19): siRNA sense strand
ggugggaacucagccuguu

SEQ ID NO: 855291 - RNA, 19 nt, Homo sapiens
  misc_RNA (1)...(19): siRNA sense strand
uucauucacuucauacuga

SEQ ID NO: 855292 - RNA, 19 nt, Homo sapiens
  misc_RNA (1)...(19): siRNA sense strand
gcuuaauccugcuagaaca

SEQ ID NO: 855293 - RNA, 19 nt, Homo sapiens
  misc_RNA (1)...(19): siRNA sense strand
acgcagagcaucccuugaa

SEQ ID NO: 855294 - RNA, 19 nt, Homo sapiens
  misc_RNA (1)...(19): siRNA sense strand
ucacuucaccaugagcaua

SEQ ID NO: 855295 - RNA, 19 nt, Homo sapiens
  misc_RNA (1)...(19): siRNA sense strand
cgugggccuuggagaauga

SEQ ID NO: 855296 - RNA, 19 nt, Homo sapiens
  misc_RNA (1)...(19): siRNA sense strand
ucaccaugagcauaaguuu

SEQ ID NO: 855297 - RNA, 19 nt, Homo sapiens
  misc_RNA (1)...(19): siRNA sense strand
ccucagcccugggaucagu

SEQ ID NO: 855298 - RNA, 19 nt, Homo sapiens
  misc_RNA (1)...(19): siRNA sense strand
cuacagggagcccacuuuc

SEQ ID NO: 855299 - RNA, 19 nt, Homo sapiens
  misc_RNA (1)...(19): siRNA sense strand
uuaauccugcuagaacaua

SEQ ID NO: 855300 - RNA, 19 nt, Homo sapiens
  misc_RNA (1)...(19): siRNA sense strand
gggaacagcaaaacccuuu

SEQ ID NO: 855301 - RNA, 19 nt, Homo sapiens
  misc_RNA (1)...(19): siRNA sense strand
gugcuggccucuucacuga

SEQ ID NO: 855302 - RNA, 19 nt, Homo sapiens
  misc_RNA (1)...(19): siRNA sense strand
ucacugaccuucgcucugu

SEQ ID NO: 855303 - RNA, 19 nt, Homo sapiens
  misc_RNA (1)...(19): siRNA sense strand
cgauggcucucucugaaau

SEQ ID NO: 855304 - RNA, 19 nt, Homo sapiens
  misc_RNA (1)...(19): siRNA sense strand
ucucugaaaugcagcacaa

SEQ ID NO: 855305 - RNA, 19 nt, Homo sapiens
  misc_RNA (1)...(19): siRNA sense strand
cccgauggcucucucugaa

SEQ ID NO: 855306 - RNA, 19 nt, Homo sapiens
  misc_RNA (1)...(19): siRNA sense strand
uuggugcucucccuuguuu

SEQ ID NO: 855307 - RNA, 19 nt, Homo sapiens
  misc_RNA (1)...(19): siRNA sense strand
cacacccgcugacccaaga

SEQ ID NO: 855308 - RNA, 19 nt, Homo sapiens
  misc_RNA (1)...(19): siRNA sense strand
gguugcguuuauuggcuua

SEQ ID NO: 855309 - RNA, 19 nt, Homo sapiens
  misc_RNA (1)...(19): siRNA sense strand
gguuggugcucucccuugu

SEQ ID NO: 855310 - RNA, 19 nt, Homo sapiens
  misc_RNA (1)...(19): siRNA sense strand
gccacacacucgccucucu

SEQ ID NO: 855311 - RNA, 19 nt, Homo sapiens
  misc_RNA (1)...(19): siRNA sense strand
cgcucugucugcucucuuu

SEQ ID NO: 855312 - RNA, 19 nt, Homo sapiens
  misc_RNA (1)...(19): siRNA sense strand
uaagaaggcucaacuagaa

SEQ ID NO: 855313 - RNA, 19 nt, Homo sapiens
  misc_RNA (1)...(19): siRNA sense strand
gauugaggcuuccauguua

SEQ ID NO: 855314 - RNA, 19 nt, Homo sapiens
  misc_RNA (1)...(19): siRNA sense strand
gaacagagagaacagauug

SEQ ID NO: 855315 - RNA, 19 nt, Homo sapiens
  misc_RNA (1)...(19): siRNA sense strand
gaaaugguugaaagacuua

SEQ ID NO: 855316 - RNA, 19 nt, Homo sapiens
  misc_RNA (1)...(19): siRNA sense strand
cauguuagagccugaauua

SEQ ID NO: 855317 - RNA, 19 nt, Homo sapiens
  misc_RNA (1)...(19): siRNA sense strand
guuagagccugaauuauca

SEQ ID NO: 855318 - RNA, 19 nt, Homo sapiens
  misc_RNA (1)...(19): siRNA sense strand
gagacuggaugaggaaauu

SEQ ID NO: 855319 - RNA, 19 nt, Homo sapiens
  misc_RNA (1)...(19): siRNA sense strand
ugaaaugguugaaagacuu

SEQ ID NO: 855320 - RNA, 19 nt, Homo sapiens
  misc_RNA (1)...(19): siRNA sense strand
ggagaaggaacaauguaaa

SEQ ID NO: 855321 - RNA, 19 nt, Homo sapiens
  misc_RNA (1)...(19): siRNA sense strand
gaaauaggguucgaucacu

SEQ ID NO: 855322 - RNA, 19 nt, Homo sapiens
  misc_RNA (1)...(19): siRNA sense strand
gagaauaagcaacuuggaa

SEQ ID NO: 855323 - RNA, 19 nt, Homo sapiens
  misc_RNA (1)...(19): siRNA sense strand
gaacaaguagcaaagaagu

SEQ ID NO: 855324 - RNA, 19 nt, Homo sapiens
  misc_RNA (1)...(19): siRNA sense strand
acaaguagcaaagaaguua

SEQ ID NO: 855325 - RNA, 19 nt, Homo sapiens
  misc_RNA (1)...(19): siRNA sense strand
gagaaggaacaauguaaau

SEQ ID NO: 855326 - RNA, 19 nt, Homo sapiens
  misc_RNA (1)...(19): siRNA sense strand
ugaggaaauucuggcuuua

SEQ ID NO: 855327 - RNA, 19 nt, Homo sapiens
  misc_RNA (1)...(19): siRNA sense strand
gaaggagaaggaacaaugu

SEQ ID NO: 855328 - RNA, 19 nt, Homo sapiens
  misc_RNA (1)...(19): siRNA sense strand
uucaaaggcucacugauga

SEQ ID NO: 855329 - RNA, 19 nt, Homo sapiens
  misc_RNA (1)...(19): siRNA sense strand
gaggaaauucuggcuuuaa

SEQ ID NO: 855330 - RNA, 19 nt, Homo sapiens
  misc_RNA (1)...(19): siRNA sense strand
agaauaagcaacuuggaaa

SEQ ID NO: 855331 - RNA, 19 nt, Homo sapiens
  misc_RNA (1)...(19): siRNA sense strand
ggaaaccacuccccuggaa

SEQ ID NO: 855332 - RNA, 19 nt, Homo sapiens
  misc_RNA (1)...(19): siRNA sense strand
cugaugagcuacaagugaa

SEQ ID NO: 855333 - RNA, 19 nt, Homo sapiens
  misc_RNA (1)...(19): siRNA sense strand
ggaaauucuggcuuuaaga

SEQ ID NO: 855334 - RNA, 19 nt, Homo sapiens
  misc_RNA (1)...(19): siRNA sense strand
ugaaggagaaggaacaaug

SEQ ID NO: 855335 - RNA, 19 nt, Homo sapiens
  misc_RNA (1)...(19): siRNA sense strand
aaaggugcuuggugaaaug

SEQ ID NO: 855336 - RNA, 19 nt, Homo sapiens
  misc_RNA (1)...(19): siRNA sense strand
gaaggaaaauuugguaaag

SEQ ID NO: 855337 - RNA, 19 nt, Homo sapiens
  misc_RNA (1)...(19): siRNA sense strand
aaauaggguucgaucacuu

SEQ ID NO: 855338 - RNA, 19 nt, Homo sapiens
  misc_RNA (1)...(19): siRNA sense strand
gaaggcucaacuagaaauu

SEQ ID NO: 855339 - RNA, 19 nt, Homo sapiens
  misc_RNA (1)...(19): siRNA sense strand
uuaagaaggcucaacuaga

SEQ ID NO: 855340 - RNA, 19 nt, Homo sapiens
  misc_RNA (1)...(19): siRNA sense strand
ugguaaagcugaaagaaaa

SEQ ID NO: 855341 - RNA, 19 nt, Homo sapiens
  misc_RNA (1)...(19): siRNA sense strand
augaggaaauucuggcuuu

SEQ ID NO: 855342 - RNA, 19 nt, Homo sapiens
  misc_RNA (1)...(19): siRNA sense strand
cagcugaccuacagaaagc

SEQ ID NO: 855343 - RNA, 19 nt, Homo sapiens
  misc_RNA (1)...(19): siRNA sense strand
ggaacaaguagcaaagaag

SEQ ID NO: 855344 - RNA, 19 nt, Homo sapiens
  misc_RNA (1)...(19): siRNA sense strand
gugaaaugguugaaagacu

SEQ ID NO: 855345 - RNA, 19 nt, Homo sapiens
  misc_RNA (1)...(19): siRNA sense strand
ucaagagaauaagcaacuu

SEQ ID NO: 855346 - RNA, 19 nt, Homo sapiens
  misc_RNA (1)...(19): siRNA sense strand
gcagcugaccuacagaaag

SEQ ID NO: 855347 - RNA, 19 nt, Homo sapiens
  misc_RNA (1)...(19): siRNA sense strand
uaaaggagaggugugugaa

SEQ ID NO: 855348 - RNA, 19 nt, Homo sapiens
  misc_RNA (1)...(19): siRNA sense strand
ggugcuuggugaaaugguu

SEQ ID NO: 855349 - RNA, 19 nt, Homo sapiens
  misc_RNA (1)...(19): siRNA sense strand
ugaugcagcugaccuacag

SEQ ID NO: 855350 - RNA, 19 nt, Homo sapiens
  misc_RNA (1)...(19): siRNA sense strand
aaggagaggugugugaauc

SEQ ID NO: 855351 - RNA, 19 nt, Homo sapiens
  misc_RNA (1)...(19): siRNA sense strand
gaauaagcaacuuggaaac

SEQ ID NO: 855352 - RNA, 19 nt, Homo sapiens
  misc_RNA (1)...(19): siRNA sense strand
uguuagagccugaauuauc

SEQ ID NO: 855353 - RNA, 19 nt, Homo sapiens
  misc_RNA (1)...(19): siRNA sense strand
gguggcucaugaagagauu

SEQ ID NO: 855354 - RNA, 19 nt, Homo sapiens
  misc_RNA (1)...(19): siRNA sense strand
uuaaaggagagguguguga

SEQ ID NO: 855355 - RNA, 19 nt, Homo sapiens
  misc_RNA (1)...(19): siRNA sense strand
aggaaauucuggcuuuaag

SEQ ID NO: 855356 - RNA, 19 nt, Homo sapiens
  misc_RNA (1)...(19): siRNA sense strand
agauugaggcuuccauguu

SEQ ID NO: 855357 - RNA, 19 nt, Homo sapiens
  misc_RNA (1)...(19): siRNA sense strand
ucgaucacuugacucagaa

SEQ ID NO: 855358 - RNA, 19 nt, Homo sapiens
  misc_RNA (1)...(19): siRNA sense strand
aggagaaggaacaauguaa

SEQ ID NO: 855359 - RNA, 19 nt, Homo sapiens
  misc_RNA (1)...(19): siRNA sense strand
auucaaaggcucacugaug

SEQ ID NO: 855360 - RNA, 19 nt, Homo sapiens
  misc_RNA (1)...(19): siRNA sense strand
agaggugugugaaucucaa

SEQ ID NO: 855361 - RNA, 19 nt, Homo sapiens
  misc_RNA (1)...(19): siRNA sense strand
uucgaucacuugacucaga

SEQ ID NO: 855362 - RNA, 19 nt, Homo sapiens
  misc_RNA (1)...(19): siRNA sense strand
ucagagacuggaugaggaa

SEQ ID NO: 855363 - RNA, 19 nt, Homo sapiens
  misc_RNA (1)...(19): siRNA sense strand
gguugaaagacuuaaagga

SEQ ID NO: 855364 - RNA, 19 nt, Homo sapiens
  misc_RNA (1)...(19): siRNA sense strand
ucacugaugagcuacaagu

SEQ ID NO: 855365 - RNA, 19 nt, Homo sapiens
  misc_RNA (1)...(19): siRNA sense strand
ugaacagagagaacagauu

SEQ ID NO: 855366 - RNA, 19 nt, Homo sapiens
  misc_RNA (1)...(19): siRNA sense strand
aaggagaaggaacaaugua

SEQ ID NO: 855367 - RNA, 19 nt, Homo sapiens
  misc_RNA (1)...(19): siRNA sense strand
aaaugaugcagcugaccua

SEQ ID NO: 855368 - RNA, 19 nt, Homo sapiens
  misc_RNA (1)...(19): siRNA sense strand
auaagcaacuuggaaacca

SEQ ID NO: 855369 - RNA, 19 nt, Homo sapiens
  misc_RNA (1)...(19): siRNA sense strand
gaacacagauggagacaga

SEQ ID NO: 855370 - RNA, 19 nt, Homo sapiens
  misc_RNA (1)...(19): siRNA sense strand
ggucauggauggaaauaac

SEQ ID NO: 855371 - RNA, 19 nt, Homo sapiens
  misc_RNA (1)...(19): siRNA sense strand
acucugaacuucucuacaa

SEQ ID NO: 855372 - RNA, 19 nt, Homo sapiens
  misc_RNA (1)...(19): siRNA sense strand
uaggagagcugaaaaguug

SEQ ID NO: 855373 - RNA, 19 nt, Homo sapiens
  misc_RNA (1)...(19): siRNA sense strand
caagucauguggaaauguc

SEQ ID NO: 855374 - RNA, 19 nt, Homo sapiens
  misc_RNA (1)...(19): siRNA sense strand
guggaaaugucuuuuauug

SEQ ID NO: 855375 - RNA, 19 nt, Homo sapiens
  misc_RNA (1)...(19): siRNA sense strand
gcaaauuggaggccuguca

SEQ ID NO: 855376 - RNA, 19 nt, Homo sapiens
  misc_RNA (1)...(19): siRNA sense strand
uaacugcugguuucacaaa

SEQ ID NO: 855377 - RNA, 19 nt, Homo sapiens
  misc_RNA (1)...(19): siRNA sense strand
ggaaaggagaacacagaug

SEQ ID NO: 855378 - RNA, 19 nt, Homo sapiens
  misc_RNA (1)...(19): siRNA sense strand
ccugaggccucccaaguca

SEQ ID NO: 855379 - RNA, 19 nt, Homo sapiens
  misc_RNA (1)...(19): siRNA sense strand
ucaaaugcagagcaaauug

SEQ ID NO: 855380 - RNA, 19 nt, Homo sapiens
  misc_RNA (1)...(19): siRNA sense strand
caggaaaggagaacacaga

SEQ ID NO: 855381 - RNA, 19 nt, Homo sapiens
  misc_RNA (1)...(19): siRNA sense strand
aauaacugcugguuucaca

SEQ ID NO: 855382 - RNA, 19 nt, Homo sapiens
  misc_RNA (1)...(19): siRNA sense strand
ccaccaccauguaagaagu

SEQ ID NO: 855383 - RNA, 19 nt, Homo sapiens
  misc_RNA (1)...(19): siRNA sense strand
cugcugguuucacaaauga

SEQ ID NO: 855384 - RNA, 19 nt, Homo sapiens
  misc_RNA (1)...(19): siRNA sense strand
acagagaggcaucaggaaa

SEQ ID NO: 855385 - RNA, 19 nt, Homo sapiens
  misc_RNA (1)...(19): siRNA sense strand
uaucaaaugcagagcaaau

SEQ ID NO: 855386 - RNA, 19 nt, Homo sapiens
  misc_RNA (1)...(19): siRNA sense strand
gagaugggaggcauaagca

SEQ ID NO: 855387 - RNA, 19 nt, Homo sapiens
  misc_RNA (1)...(19): siRNA sense strand
gcauaagcaccaccuacug

SEQ ID NO: 855388 - RNA, 19 nt, Homo sapiens
  misc_RNA (1)...(19): siRNA sense strand
caaaugcagagcaaauugg

SEQ ID NO: 855389 - RNA, 19 nt, Homo sapiens
  misc_RNA (1)...(19): siRNA sense strand
ccucccaagucauguggaa

SEQ ID NO: 855390 - RNA, 19 nt, Homo sapiens
  misc_RNA (1)...(19): siRNA sense strand
acagagaugggaggcauaa

SEQ ID NO: 855391 - RNA, 19 nt, Homo sapiens
  misc_RNA (1)...(19): siRNA sense strand
acuaucaaaugcagagcaa

SEQ ID NO: 855392 - RNA, 19 nt, Homo sapiens
  misc_RNA (1)...(19): siRNA sense strand
acacagauggagacagaga

SEQ ID NO: 855393 - RNA, 19 nt, Homo sapiens
  misc_RNA (1)...(19): siRNA sense strand
cagagaggcaucaggaaag

SEQ ID NO: 855394 - RNA, 19 nt, Homo sapiens
  misc_RNA (1)...(19): siRNA sense strand
auugggugcugguucuuaa

SEQ ID NO: 855395 - RNA, 19 nt, Homo sapiens
  misc_RNA (1)...(19): siRNA sense strand
ggugcugguucuuaacucu

SEQ ID NO: 855396 - RNA, 19 nt, Homo sapiens
  misc_RNA (1)...(19): siRNA sense strand
gacagagaugggaggcaua

SEQ ID NO: 855397 - RNA, 19 nt, Homo sapiens
  misc_RNA (1)...(19): siRNA sense strand
cccagaggguggaaugaag

SEQ ID NO: 855398 - RNA, 19 nt, Homo sapiens
  misc_RNA (1)...(19): siRNA sense strand
uggaaauaacugcugguuu

SEQ ID NO: 855399 - RNA, 19 nt, Homo sapiens
  misc_RNA (1)...(19): siRNA sense strand
uguaagaagugccuuucac

SEQ ID NO: 855400 - RNA, 19 nt, Homo sapiens
  misc_RNA (1)...(19): siRNA sense strand
ccauguaagaagugccuuu

SEQ ID NO: 855401 - RNA, 19 nt, Homo sapiens
  misc_RNA (1)...(19): siRNA sense strand
guaagcagccucuuccuuu

SEQ ID NO: 855402 - RNA, 19 nt, Homo sapiens
  misc_RNA (1)...(19): siRNA sense strand
ccuaaaagcugaacuuaaa

SEQ ID NO: 855403 - RNA, 19 nt, Homo sapiens
  misc_RNA (1)...(19): siRNA sense strand
cagcugcaguccagaaaug

SEQ ID NO: 855404 - RNA, 19 nt, Homo sapiens
  misc_RNA (1)...(19): siRNA sense strand
gaggaagucagccaaguug

SEQ ID NO: 855405 - RNA, 19 nt, Homo sapiens
  misc_RNA (1)...(19): siRNA sense strand
cuccuuugcuugcuuuaua

SEQ ID NO: 855406 - RNA, 19 nt, Homo sapiens
  misc_RNA (1)...(19): siRNA sense strand
cugcaaugauuucuccuuu

SEQ ID NO: 855407 - RNA, 19 nt, Homo sapiens
  misc_RNA (1)...(19): siRNA sense strand
auuaggcaaucaacaauga

SEQ ID NO: 855408 - RNA, 19 nt, Homo sapiens
  misc_RNA (1)...(19): siRNA sense strand
aaugauuucuccuuugcuu

SEQ ID NO: 855409 - RNA, 19 nt, Homo sapiens
  misc_RNA (1)...(19): siRNA sense strand
gguaagcagccucuuccuu

SEQ ID NO: 855410 - RNA, 19 nt, Homo sapiens
  misc_RNA (1)...(19): siRNA sense strand
ggaccacucacaacauuuu

SEQ ID NO: 855411 - RNA, 19 nt, Homo sapiens
  misc_RNA (1)...(19): siRNA sense strand
uaagcagccucuuccuuuu

SEQ ID NO: 855412 - RNA, 19 nt, Homo sapiens
  misc_RNA (1)...(19): siRNA sense strand
ugaggaagucagccaaguu

SEQ ID NO: 855413 - RNA, 19 nt, Homo sapiens
  misc_RNA (1)...(19): siRNA sense strand
cacaacauuuucucacuuu

SEQ ID NO: 855414 - RNA, 19 nt, Homo sapiens
  misc_RNA (1)...(19): siRNA sense strand
aaucaacaaugaggaaguc

SEQ ID NO: 855415 - RNA, 19 nt, Homo sapiens
  misc_RNA (1)...(19): siRNA sense strand
ggcaaucaacaaugaggaa

SEQ ID NO: 855416 - RNA, 19 nt, Homo sapiens
  misc_RNA (1)...(19): siRNA sense strand
ugcaaugauuucuccuuug

SEQ ID NO: 855417 - RNA, 19 nt, Homo sapiens
  misc_RNA (1)...(19): siRNA sense strand
ucacaacauuuucucacuu

SEQ ID NO: 855418 - RNA, 19 nt, Homo sapiens
  misc_RNA (1)...(19): siRNA sense strand
gcacagcccucuccuagga

SEQ ID NO: 855419 - RNA, 19 nt, Homo sapiens
  misc_RNA (1)...(19): siRNA sense strand
ggaagcuucuccuguguuu

SEQ ID NO: 855420 - RNA, 19 nt, Homo sapiens
  misc_RNA (1)...(19): siRNA sense strand
ggucagacagagcaaauua

SEQ ID NO: 855421 - RNA, 19 nt, Homo sapiens
  misc_RNA (1)...(19): siRNA sense strand
ggacagagacccacuccaa

SEQ ID NO: 855422 - RNA, 19 nt, Homo sapiens
  misc_RNA (1)...(19): siRNA sense strand
ugugagaccuauccaagua

SEQ ID NO: 855423 - RNA, 19 nt, Homo sapiens
  misc_RNA (1)...(19): siRNA sense strand
guccuuaucuuucuaaauc

SEQ ID NO: 855424 - RNA, 19 nt, Homo sapiens
  misc_RNA (1)...(19): siRNA sense strand
gcagggugcuguugcaaag

SEQ ID NO: 855425 - RNA, 19 nt, Homo sapiens
  misc_RNA (1)...(19): siRNA sense strand
ucucuaggaccuuuaauuu

SEQ ID NO: 855426 - RNA, 19 nt, Homo sapiens
  misc_RNA (1)...(19): siRNA sense strand
guaaaacucucuuguccuu

SEQ ID NO: 855427 - RNA, 19 nt, Homo sapiens
  misc_RNA (1)...(19): siRNA sense strand
ccuagugcauguuaugaga

SEQ ID NO: 855428 - RNA, 19 nt, Homo sapiens
  misc_RNA (1)...(19): siRNA sense strand
ggguguaccuagugcaugu

SEQ ID NO: 855429 - RNA, 19 nt, Homo sapiens
  misc_RNA (1)...(19): siRNA sense strand
aggaauaucucugcaugug

SEQ ID NO: 855430 - RNA, 19 nt, Homo sapiens
  misc_RNA (1)...(19): siRNA sense strand
guguuucucugucaaguag

SEQ ID NO: 855431 - RNA, 19 nt, Homo sapiens
  misc_RNA (1)...(19): siRNA sense strand
guaccuagugcauguuaug

SEQ ID NO: 855432 - RNA, 19 nt, Homo sapiens
  misc_RNA (1)...(19): siRNA sense strand
aaguagaacuagagaccaa

SEQ ID NO: 855433 - RNA, 19 nt, Homo sapiens
  misc_RNA (1)...(19): siRNA sense strand
ggaguggguguaccuagug

SEQ ID NO: 855434 - RNA, 19 nt, Homo sapiens
  misc_RNA (1)...(19): siRNA sense strand
ucuaggaccuuuaauuuuc

SEQ ID NO: 855435 - RNA, 19 nt, Homo sapiens
  misc_RNA (1)...(19): siRNA sense strand
ucagacagagcaaauuauc

SEQ ID NO: 855436 - RNA, 19 nt, Homo sapiens
  misc_RNA (1)...(19): siRNA sense strand
caaucucuaggaccuuuaa

SEQ ID NO: 855437 - RNA, 19 nt, Homo sapiens
  misc_RNA (1)...(19): siRNA sense strand
cugcaugugcccaggauaa

SEQ ID NO: 855438 - RNA, 19 nt, Homo sapiens
  misc_RNA (1)...(19): siRNA sense strand
aaaacucucuuguccuuau

SEQ ID NO: 855439 - RNA, 19 nt, Homo sapiens
  misc_RNA (1)...(19): siRNA sense strand
ugcccaggauaaugcauuu

SEQ ID NO: 855440 - RNA, 19 nt, Homo sapiens
  misc_RNA (1)...(19): siRNA sense strand
uccaaucucuaggaccuuu

SEQ ID NO: 855441 - RNA, 19 nt, Homo sapiens
  misc_RNA (1)...(19): siRNA sense strand
caagcacagcccucuccua

SEQ ID NO: 855442 - RNA, 19 nt, Homo sapiens
  misc_RNA (1)...(19): siRNA sense strand
cggaguggguguaccuagu

SEQ ID NO: 855443 - RNA, 19 nt, Homo sapiens
  misc_RNA (1)...(19): siRNA sense strand
gcaugugcccaggauaaug

SEQ ID NO: 855444 - RNA, 19 nt, Homo sapiens
  misc_RNA (1)...(19): siRNA sense strand
agggauccauggugugaga

SEQ ID NO: 855445 - RNA, 19 nt, Homo sapiens
  misc_RNA (1)...(19): siRNA sense strand
guguaccuagugcauguua

SEQ ID NO: 855446 - RNA, 19 nt, Homo sapiens
  misc_RNA (1)...(19): siRNA sense strand
ucucuuguccuuaucuuuc

SEQ ID NO: 855447 - RNA, 19 nt, Homo sapiens
  misc_RNA (1)...(19): siRNA sense strand
gaaagaagaucuaugaaug

SEQ ID NO: 855448 - RNA, 19 nt, Homo sapiens
  misc_RNA (1)...(19): siRNA sense strand
gagaaacccuauaaaugua

SEQ ID NO: 855449 - RNA, 19 nt, Homo sapiens
  misc_RNA (1)...(19): siRNA sense strand
gagaaacccuauaagugua

SEQ ID NO: 855450 - RNA, 19 nt, Homo sapiens
  misc_RNA (1)...(19): siRNA sense strand
gcaaagccuuccauaagaa

SEQ ID NO: 855451 - RNA, 19 nt, Homo sapiens
  misc_RNA (1)...(19): siRNA sense strand
gagaaacccuaucagugua

SEQ ID NO: 855452 - RNA, 19 nt, Homo sapiens
  misc_RNA (1)...(19): siRNA sense strand
gagaaacccuaucagugua

SEQ ID NO: 855453 - RNA, 19 nt, Homo sapiens
  misc_RNA (1)...(19): siRNA sense strand
gagagaaacccuauaaaug

SEQ ID NO: 855454 - RNA, 19 nt, Homo sapiens
  misc_RNA (1)...(19): siRNA sense strand
ggagaaacccuauaagugu

SEQ ID NO: 855455 - RNA, 19 nt, Homo sapiens
  misc_RNA (1)...(19): siRNA sense strand
ggaaaagccuucauuaaga

SEQ ID NO: 855456 - RNA, 19 nt, Homo sapiens
  misc_RNA (1)...(19): siRNA sense strand
gagagaaacccuacaaaug

SEQ ID NO: 855457 - RNA, 19 nt, Homo sapiens
  misc_RNA (1)...(19): siRNA sense strand
ccagagugcuuaccuuauu

SEQ ID NO: 855458 - RNA, 19 nt, Homo sapiens
  misc_RNA (1)...(19): siRNA sense strand
gaacaucagagacuucauu

SEQ ID NO: 855459 - RNA, 19 nt, Homo sapiens
  misc_RNA (1)...(19): siRNA sense strand
ggagagaaacccuauaaau

SEQ ID NO: 855460 - RNA, 19 nt, Homo sapiens
  misc_RNA (1)...(19): siRNA sense strand
ggaaaagccuucagucaaa

SEQ ID NO: 855461 - RNA, 19 nt, Homo sapiens
  misc_RNA (1)...(19): siRNA sense strand
ggcaaagccuuccauaaga

SEQ ID NO: 855462 - RNA, 19 nt, Homo sapiens
  misc_RNA (1)...(19): siRNA sense strand
gaacgauccucccuuacug

SEQ ID NO: 855463 - RNA, 19 nt, Homo sapiens
  misc_RNA (1)...(19): siRNA sense strand
gaauucaucucuaacucaa

SEQ ID NO: 855464 - RNA, 19 nt, Homo sapiens
  misc_RNA (1)...(19): siRNA sense strand
agagaaaccuuaugagugu

SEQ ID NO: 855465 - RNA, 19 nt, Homo sapiens
  misc_RNA (1)...(19): siRNA sense strand
ggaaagaagaucuaugaau

SEQ ID NO: 855466 - RNA, 19 nt, Homo sapiens
  misc_RNA (1)...(19): siRNA sense strand
agucagagcaugaaucuua

SEQ ID NO: 855467 - RNA, 19 nt, Homo sapiens
  misc_RNA (1)...(19): siRNA sense strand
agucaaagcaugcaucuua

SEQ ID NO: 855468 - RNA, 19 nt, Homo sapiens
  misc_RNA (1)...(19): siRNA sense strand
gaagaucuaugaauguaac

SEQ ID NO: 855469 - RNA, 19 nt, Homo sapiens
  misc_RNA (1)...(19): siRNA sense strand
gaaaagccuucauuaagaa

SEQ ID NO: 855470 - RNA, 19 nt, Homo sapiens
  misc_RNA (1)...(19): siRNA sense strand
gggaaauccuuuagccaaa

SEQ ID NO: 855471 - RNA, 19 nt, Homo sapiens
  misc_RNA (1)...(19): siRNA sense strand
gcucaucccuucuuaagca

SEQ ID NO: 855472 - RNA, 19 nt, Homo sapiens
  misc_RNA (1)...(19): siRNA sense strand
ggagagaaacccuacaaau

SEQ ID NO: 855473 - RNA, 19 nt, Homo sapiens
  misc_RNA (1)...(19): siRNA sense strand
gugcuuaccuuauugaaca

SEQ ID NO: 855474 - RNA, 19 nt, Homo sapiens
  misc_RNA (1)...(19): siRNA sense strand
aagcaugcaucuuauugua

SEQ ID NO: 855475 - RNA, 19 nt, Homo sapiens
  misc_RNA (1)...(19): siRNA sense strand
ugagaaacccuaugaaugu

SEQ ID NO: 855476 - RNA, 19 nt, Homo sapiens
  misc_RNA (1)...(19): siRNA sense strand
gagaagccauacuggagaa

SEQ ID NO: 855477 - RNA, 19 nt, Homo sapiens
  misc_RNA (1)...(19): siRNA sense strand
cgacaucaaagaacucaua

SEQ ID NO: 855478 - RNA, 19 nt, Homo sapiens
  misc_RNA (1)...(19): siRNA sense strand
agagaaacccuauaaaugu

SEQ ID NO: 855479 - RNA, 19 nt, Homo sapiens
  misc_RNA (1)...(19): siRNA sense strand
gcucaacucuuacccuaca

SEQ ID NO: 855480 - RNA, 19 nt, Homo sapiens
  misc_RNA (1)...(19): siRNA sense strand
gggagaaacccuauaagug

SEQ ID NO: 855481 - RNA, 19 nt, Homo sapiens
  misc_RNA (1)...(19): siRNA sense strand
ggagagaaaccuuaugagu

SEQ ID NO: 855482 - RNA, 19 nt, Homo sapiens
  misc_RNA (1)...(19): siRNA sense strand
ggagagaaaccuuaugagu

SEQ ID NO: 855483 - RNA, 19 nt, Homo sapiens
  misc_RNA (1)...(19): siRNA sense strand
gcaugcaucuuauuguaca

SEQ ID NO: 855484 - RNA, 19 nt, Homo sapiens
  misc_RNA (1)...(19): siRNA sense strand
agagaaacccuacaaaugu

SEQ ID NO: 855485 - RNA, 19 nt, Homo sapiens
  misc_RNA (1)...(19): siRNA sense strand
guacaucagagaagccaua

SEQ ID NO: 855486 - RNA, 19 nt, Homo sapiens
  misc_RNA (1)...(19): siRNA sense strand
caaagcaugcaucuuauug

SEQ ID NO: 855487 - RNA, 19 nt, Homo sapiens
  misc_RNA (1)...(19): siRNA sense strand
uaggaaagaagaucuauga

SEQ ID NO: 855488 - RNA, 19 nt, Homo sapiens
  misc_RNA (1)...(19): siRNA sense strand
gagacuucauucuggagua

SEQ ID NO: 855489 - RNA, 19 nt, Homo sapiens
  misc_RNA (1)...(19): siRNA sense strand
ggagagaaacccuaucagu

SEQ ID NO: 855490 - RNA, 19 nt, Homo sapiens
  misc_RNA (1)...(19): siRNA sense strand
ggagagaaacccuaucagu

SEQ ID NO: 855491 - RNA, 19 nt, Homo sapiens
  misc_RNA (1)...(19): siRNA sense strand
gagaaacccuaugaaugug

SEQ ID NO: 855492 - RNA, 19 nt, Homo sapiens
  misc_RNA (1)...(19): siRNA sense strand
gaaacccuaucaguguaaa

SEQ ID NO: 855493 - RNA, 19 nt, Homo sapiens
  misc_RNA (1)...(19): siRNA sense strand
gaagaugccacacaaaauu

SEQ ID NO: 855494 - RNA, 19 nt, Homo sapiens
  misc_RNA (1)...(19): siRNA sense strand
gaaucuuacuguccaucaa

SEQ ID NO: 855495 - RNA, 19 nt, Homo sapiens
  misc_RNA (1)...(19): siRNA sense strand
gaauguaacgaguguggaa

SEQ ID NO: 855496 - RNA, 19 nt, Homo sapiens
  misc_RNA (1)...(19): siRNA sense strand
cagagcucaucccuucuua

SEQ ID NO: 855497 - RNA, 19 nt, Homo sapiens
  misc_RNA (1)...(19): siRNA sense strand
gaaacccuaugaaugugau

SEQ ID NO: 855498 - RNA, 19 nt, Homo sapiens
  misc_RNA (1)...(19): siRNA sense strand
caacaucggagaauucaca

SEQ ID NO: 855499 - RNA, 19 nt, Homo sapiens
  misc_RNA (1)...(19): siRNA sense strand
uaacuguaauucacaugga

SEQ ID NO: 855500 - RNA, 19 nt, Homo sapiens
  misc_RNA (1)...(19): siRNA sense strand
gauccucccuuacuguaca

SEQ ID NO: 855501 - RNA, 19 nt, Homo sapiens
  misc_RNA (1)...(19): siRNA sense strand
gugagaaacccuaugaaug

SEQ ID NO: 855502 - RNA, 19 nt, Homo sapiens
  misc_RNA (1)...(19): siRNA sense strand
caucaaagaauucauacug

SEQ ID NO: 855503 - RNA, 19 nt, Homo sapiens
  misc_RNA (1)...(19): siRNA sense strand
caucaaagaauucauacug

SEQ ID NO: 855504 - RNA, 19 nt, Homo sapiens
  misc_RNA (1)...(19): siRNA sense strand
caaaugcgggaaauccuuu

SEQ ID NO: 855505 - RNA, 19 nt, Homo sapiens
  misc_RNA (1)...(19): siRNA sense strand
gagaaaccuuaugagugua

SEQ ID NO: 855506 - RNA, 19 nt, Homo sapiens
  misc_RNA (1)...(19): siRNA sense strand
agagaaacccuaucagugu

SEQ ID NO: 855507 - RNA, 19 nt, Homo sapiens
  misc_RNA (1)...(19): siRNA sense strand
agagaaacccuaucagugu

SEQ ID NO: 855508 - RNA, 19 nt, Homo sapiens
  misc_RNA (1)...(19): siRNA sense strand
gauucauacuggagagaaa

SEQ ID NO: 855509 - RNA, 19 nt, Homo sapiens
  misc_RNA (1)...(19): siRNA sense strand
auugaacgauccucccuua

SEQ ID NO: 855510 - RNA, 19 nt, Homo sapiens
  misc_RNA (1)...(19): siRNA sense strand
acuggacgaucaucccuua

SEQ ID NO: 855511 - RNA, 19 nt, Homo sapiens
  misc_RNA (1)...(19): siRNA sense strand
uggagaagaugccacacaa

SEQ ID NO: 855512 - RNA, 19 nt, Homo sapiens
  misc_RNA (1)...(19): siRNA sense strand
uaauucacauggagaagau

SEQ ID NO: 855513 - RNA, 19 nt, Homo sapiens
  misc_RNA (1)...(19): siRNA sense strand
gaacucacaccggagagaa

SEQ ID NO: 855514 - RNA, 19 nt, Homo sapiens
  misc_RNA (1)...(19): siRNA sense strand
cgaaaucacacuggagaaa

SEQ ID NO: 855515 - RNA, 19 nt, Homo sapiens
  misc_RNA (1)...(19): siRNA sense strand
ggugagaaacccuaugaau

SEQ ID NO: 855516 - RNA, 19 nt, Homo sapiens
  misc_RNA (1)...(19): siRNA sense strand
cagagugcuuaccuuauug

SEQ ID NO: 855517 - RNA, 19 nt, Homo sapiens
  misc_RNA (1)...(19): siRNA sense strand
gagcucaucccuucuuaag

SEQ ID NO: 855518 - RNA, 19 nt, Homo sapiens
  misc_RNA (1)...(19): siRNA sense strand
ggagaagaugccacacaaa

SEQ ID NO: 855519 - RNA, 19 nt, Homo sapiens
  misc_RNA (1)...(19): siRNA sense strand
gugcaucagagaacucaua

SEQ ID NO: 855520 - RNA, 19 nt, Homo sapiens
  misc_RNA (1)...(19): siRNA sense strand
caguaagaauucaucucua

SEQ ID NO: 855521 - RNA, 19 nt, Homo sapiens
  misc_RNA (1)...(19): siRNA sense strand
gucaaagcaugcaucuuau

SEQ ID NO: 855522 - RNA, 19 nt, Homo sapiens
  misc_RNA (1)...(19): siRNA sense strand
gagaacucauacaggagaa

SEQ ID NO: 855523 - RNA, 19 nt, Homo sapiens
  misc_RNA (1)...(19): siRNA sense strand
gaauguuuguaggaaagaa

SEQ ID NO: 855524 - RNA, 19 nt, Homo sapiens
  misc_RNA (1)...(19): siRNA sense strand
cccuauaaguguaauguau

SEQ ID NO: 855525 - RNA, 19 nt, Homo sapiens
  misc_RNA (1)...(19): siRNA sense strand
gaaacccuaucaguguaau

SEQ ID NO: 855526 - RNA, 19 nt, Homo sapiens
  misc_RNA (1)...(19): siRNA sense strand
gaacucauacaggagagaa

SEQ ID NO: 855527 - RNA, 19 nt, Homo sapiens
  misc_RNA (1)...(19): siRNA sense strand
cuaugaaugugaucagugu

SEQ ID NO: 855528 - RNA, 19 nt, Homo sapiens
  misc_RNA (1)...(19): siRNA sense strand
agacuucauucuggaguaa

SEQ ID NO: 855529 - RNA, 19 nt, Homo sapiens
  misc_RNA (1)...(19): siRNA sense strand
gagaagaugccacacaaaa

SEQ ID NO: 855530 - RNA, 19 nt, Homo sapiens
  misc_RNA (1)...(19): siRNA sense strand
uggcaaagccuuccauaag

SEQ ID NO: 855531 - RNA, 19 nt, Homo sapiens
  misc_RNA (1)...(19): siRNA sense strand
cauucacacuggagagaaa

SEQ ID NO: 855532 - RNA, 19 nt, Homo sapiens
  misc_RNA (1)...(19): siRNA sense strand
cacacaaaauucugaguua

SEQ ID NO: 855533 - RNA, 19 nt, Homo sapiens
  misc_RNA (1)...(19): siRNA sense strand
uaaugaaugugguaaagcu

SEQ ID NO: 855534 - RNA, 19 nt, Homo sapiens
  misc_RNA (1)...(19): siRNA sense strand
caucucuuauucagcauga

SEQ ID NO: 855535 - RNA, 19 nt, Homo sapiens
  misc_RNA (1)...(19): siRNA sense strand
acauuucacuggacgauca

SEQ ID NO: 855536 - RNA, 19 nt, Homo sapiens
  misc_RNA (1)...(19): siRNA sense strand
agccaaaguacauaucuua

SEQ ID NO: 855537 - RNA, 19 nt, Homo sapiens
  misc_RNA (1)...(19): siRNA sense strand
caucagagaagccauacug

SEQ ID NO: 855538 - RNA, 19 nt, Homo sapiens
  misc_RNA (1)...(19): siRNA sense strand
gugggaaacacuucauuga

SEQ ID NO: 855539 - RNA, 19 nt, Homo sapiens
  misc_RNA (1)...(19): siRNA sense strand
uauagaacaucagagacuu

SEQ ID NO: 855540 - RNA, 19 nt, Homo sapiens
  misc_RNA (1)...(19): siRNA sense strand
guaauucacauggagaaga

SEQ ID NO: 855541 - RNA, 19 nt, Homo sapiens
  misc_RNA (1)...(19): siRNA sense strand
acacuggagagaaaccuua

SEQ ID NO: 855542 - RNA, 19 nt, Homo sapiens
  misc_RNA (1)...(19): siRNA sense strand
acacuggagagaaaccuua

SEQ ID NO: 855543 - RNA, 19 nt, Homo sapiens
  misc_RNA (1)...(19): siRNA sense strand
aagcaugaauuugacaguu

SEQ ID NO: 855544 - RNA, 19 nt, Homo sapiens
  misc_RNA (1)...(19): siRNA sense strand
gaauguaaugaauguggaa

SEQ ID NO: 855545 - RNA, 19 nt, Homo sapiens
  misc_RNA (1)...(19): siRNA sense strand
gaauucauacuggugagaa

SEQ ID NO: 855546 - RNA, 19 nt, Homo sapiens
  misc_RNA (1)...(19): siRNA sense strand
ucaaagcaugcaucuuauu

SEQ ID NO: 855547 - RNA, 19 nt, Homo sapiens
  misc_RNA (1)...(19): siRNA sense strand
ccaaguagcuggaauuaca

SEQ ID NO: 855548 - RNA, 19 nt, Homo sapiens
  misc_RNA (1)...(19): siRNA sense strand
caagaccucaucucuauua

SEQ ID NO: 855549 - RNA, 19 nt, Homo sapiens
  misc_RNA (1)...(19): siRNA sense strand
gaccucaucucuauuaaca

SEQ ID NO: 855550 - RNA, 19 nt, Homo sapiens
  misc_RNA (1)...(19): siRNA sense strand
ucagugcaguggagacuua

SEQ ID NO: 855551 - RNA, 19 nt, Homo sapiens
  misc_RNA (1)...(19): siRNA sense strand
ccucaucucuauuaacaaa

SEQ ID NO: 855552 - RNA, 19 nt, Homo sapiens
  misc_RNA (1)...(19): siRNA sense strand
gagccuaggaguuugauau

SEQ ID NO: 855553 - RNA, 19 nt, Homo sapiens
  misc_RNA (1)...(19): siRNA sense strand
uaucaagaccucaucucua

SEQ ID NO: 855554 - RNA, 19 nt, Homo sapiens
  misc_RNA (1)...(19): siRNA sense strand
aucaagaccucaucucuau

SEQ ID NO: 855555 - RNA, 19 nt, Homo sapiens
  misc_RNA (1)...(19): siRNA sense strand
ggccaaggcaggaggauug

SEQ ID NO: 855556 - RNA, 19 nt, Homo sapiens
  misc_RNA (1)...(19): siRNA sense strand
gaucgggaacagcaaagaa

SEQ ID NO: 855557 - RNA, 19 nt, Homo sapiens
  misc_RNA (1)...(19): siRNA sense strand
caguggagcgcaccuguaa

SEQ ID NO: 855558 - RNA, 19 nt, Homo sapiens
  misc_RNA (1)...(19): siRNA sense strand
gauaucagccugggcaaca

SEQ ID NO: 855559 - RNA, 19 nt, Homo sapiens
  misc_RNA (1)...(19): siRNA sense strand
caacauaucaagaccucau

SEQ ID NO: 855560 - RNA, 19 nt, Homo sapiens
  misc_RNA (1)...(19): siRNA sense strand
gcaccuguaaucccagcua

SEQ ID NO: 855561 - RNA, 19 nt, Homo sapiens
  misc_RNA (1)...(19): siRNA sense strand
ugccucagccucccaagua

SEQ ID NO: 855562 - RNA, 19 nt, Homo sapiens
  misc_RNA (1)...(19): siRNA sense strand
uaucagccugggcaacaua

SEQ ID NO: 855563 - RNA, 19 nt, Homo sapiens
  misc_RNA (1)...(19): siRNA sense strand
aaagugagaaggcaucagu

SEQ ID NO: 855564 - RNA, 19 nt, Homo sapiens
  misc_RNA (1)...(19): siRNA sense strand
ccuaggaguuugauaucag

SEQ ID NO: 855565 - RNA, 19 nt, Homo sapiens
  misc_RNA (1)...(19): siRNA sense strand
gccuaggaguuugauauca

SEQ ID NO: 855566 - RNA, 19 nt, Homo sapiens
  misc_RNA (1)...(19): siRNA sense strand
caaggcaggaggauugcuu

SEQ ID NO: 855567 - RNA, 19 nt, Homo sapiens
  misc_RNA (1)...(19): siRNA sense strand
guggagcgcaccuguaauc

SEQ ID NO: 855568 - RNA, 19 nt, Homo sapiens
  misc_RNA (1)...(19): siRNA sense strand
aagaccucaucucuauuaa

SEQ ID NO: 855569 - RNA, 19 nt, Homo sapiens
  misc_RNA (1)...(19): siRNA sense strand
ucccaaguagcuggaauua

SEQ ID NO: 855570 - RNA, 19 nt, Homo sapiens
  misc_RNA (1)...(19): siRNA sense strand
gggaacagcaagcagaaaa

SEQ ID NO: 855571 - RNA, 19 nt, Homo sapiens
  misc_RNA (1)...(19): siRNA sense strand
gaagagaaauccuauaugu

SEQ ID NO: 855572 - RNA, 19 nt, Homo sapiens
  misc_RNA (1)...(19): siRNA sense strand
ggagagaaaucuuacauau

SEQ ID NO: 855573 - RNA, 19 nt, Homo sapiens
  misc_RNA (1)...(19): siRNA sense strand
gagaagacauggaauaaau

SEQ ID NO: 855574 - RNA, 19 nt, Homo sapiens
  misc_RNA (1)...(19): siRNA sense strand
gaagagaagacauggaaua

SEQ ID NO: 855575 - RNA, 19 nt, Homo sapiens
  misc_RNA (1)...(19): siRNA sense strand
ggaagucucagcucauuua

SEQ ID NO: 855576 - RNA, 19 nt, Homo sapiens
  misc_RNA (1)...(19): siRNA sense strand
acaaagcgcacucuuauua

SEQ ID NO: 855577 - RNA, 19 nt, Homo sapiens
  misc_RNA (1)...(19): siRNA sense strand
ggaaaaggcuucaccauga

SEQ ID NO: 855578 - RNA, 19 nt, Homo sapiens
  misc_RNA (1)...(19): siRNA sense strand
gguaaaggcuucaccacaa

SEQ ID NO: 855579 - RNA, 19 nt, Homo sapiens
  misc_RNA (1)...(19): siRNA sense strand
uaucaaaccuugucaaaca

SEQ ID NO: 855580 - RNA, 19 nt, Homo sapiens
  misc_RNA (1)...(19): siRNA sense strand
aaauaacccuguugaguuu

SEQ ID NO: 855581 - RNA, 19 nt, Homo sapiens
  misc_RNA (1)...(19): siRNA sense strand
gaagcgcuaucuuguugua

SEQ ID NO: 855582 - RNA, 19 nt, Homo sapiens
  misc_RNA (1)...(19): siRNA sense strand
acacaaauauggccucauu

SEQ ID NO: 855583 - RNA, 19 nt, Homo sapiens
  misc_RNA (1)...(19): siRNA sense strand
agucacagcuccuuccuua

SEQ ID NO: 855584 - RNA, 19 nt, Homo sapiens
  misc_RNA (1)...(19): siRNA sense strand
gcaaugcaauggacagaau

SEQ ID NO: 855585 - RNA, 19 nt, Homo sapiens
  misc_RNA (1)...(19): siRNA sense strand
guacaucagcgaacucaua

SEQ ID NO: 855586 - RNA, 19 nt, Homo sapiens
  misc_RNA (1)...(19): siRNA sense strand
aaagcgcacucuuauuaua

SEQ ID NO: 855587 - RNA, 19 nt, Homo sapiens
  misc_RNA (1)...(19): siRNA sense strand
guaaaggcuucaccacaaa

SEQ ID NO: 855588 - RNA, 19 nt, Homo sapiens
  misc_RNA (1)...(19): siRNA sense strand
guacaucagcgaacucaua

SEQ ID NO: 855589 - RNA, 19 nt, Homo sapiens
  misc_RNA (1)...(19): siRNA sense strand
ggagaacuauaaccaccua

SEQ ID NO: 855590 - RNA, 19 nt, Homo sapiens
  misc_RNA (1)...(19): siRNA sense strand
ucacagcuccuuccuuaua

SEQ ID NO: 855591 - RNA, 19 nt, Homo sapiens
  misc_RNA (1)...(19): siRNA sense strand
ggaaaaggcuucacuguca

SEQ ID NO: 855592 - RNA, 19 nt, Homo sapiens
  misc_RNA (1)...(19): siRNA sense strand
ggagagaaacccuauaugu

SEQ ID NO: 855593 - RNA, 19 nt, Homo sapiens
  misc_RNA (1)...(19): siRNA sense strand
uaaauaacccuguugaguu

SEQ ID NO: 855594 - RNA, 19 nt, Homo sapiens
  misc_RNA (1)...(19): siRNA sense strand
ggagaaacccuauauaugc

SEQ ID NO: 855595 - RNA, 19 nt, Homo sapiens
  misc_RNA (1)...(19): siRNA sense strand
ggacagaauacacuuagaa

SEQ ID NO: 855596 - RNA, 19 nt, Homo sapiens
  misc_RNA (1)...(19): siRNA sense strand
gaaagccuucucccacuua

SEQ ID NO: 855597 - RNA, 19 nt, Homo sapiens
  misc_RNA (1)...(19): siRNA sense strand
gaagaguagucucauuaca

SEQ ID NO: 855598 - RNA, 19 nt, Homo sapiens
  misc_RNA (1)...(19): siRNA sense strand
gagaaauuauccagaagug

SEQ ID NO: 855599 - RNA, 19 nt, Homo sapiens
  misc_RNA (1)...(19): siRNA sense strand
caaagucaguacucaaugu

SEQ ID NO: 855600 - RNA, 19 nt, Homo sapiens
  misc_RNA (1)...(19): siRNA sense strand
ccacaaagcgcacucuuau

SEQ ID NO: 855601 - RNA, 19 nt, Homo sapiens
  misc_RNA (1)...(19): siRNA sense strand
agagaaaucuuacauaugc

SEQ ID NO: 855602 - RNA, 19 nt, Homo sapiens
  misc_RNA (1)...(19): siRNA sense strand
ggauguggcuguggaauuc

SEQ ID NO: 855603 - RNA, 19 nt, Homo sapiens
  misc_RNA (1)...(19): siRNA sense strand
caagagaaauggguagaau

SEQ ID NO: 855604 - RNA, 19 nt, Homo sapiens
  misc_RNA (1)...(19): siRNA sense strand
ggagagaaaccuuaugugu

SEQ ID NO: 855605 - RNA, 19 nt, Homo sapiens
  misc_RNA (1)...(19): siRNA sense strand
gugaagaguagucucauua

SEQ ID NO: 855606 - RNA, 19 nt, Homo sapiens
  misc_RNA (1)...(19): siRNA sense strand
gaauaaauaacccuguuga

SEQ ID NO: 855607 - RNA, 19 nt, Homo sapiens
  misc_RNA (1)...(19): siRNA sense strand
gagaaacccuauauaugca

SEQ ID NO: 855608 - RNA, 19 nt, Homo sapiens
  misc_RNA (1)...(19): siRNA sense strand
gacaacagaugcuaaaauu

SEQ ID NO: 855609 - RNA, 19 nt, Homo sapiens
  misc_RNA (1)...(19): siRNA sense strand
gagagaaacccuauaugug

SEQ ID NO: 855610 - RNA, 19 nt, Homo sapiens
  misc_RNA (1)...(19): siRNA sense strand
gcucaucagcgaacucaua

SEQ ID NO: 855611 - RNA, 19 nt, Homo sapiens
  misc_RNA (1)...(19): siRNA sense strand
gaaaagccuucaccacaaa

SEQ ID NO: 855612 - RNA, 19 nt, Homo sapiens
  misc_RNA (1)...(19): siRNA sense strand
caacaaacccauacagaag

SEQ ID NO: 855613 - RNA, 19 nt, Homo sapiens
  misc_RNA (1)...(19): siRNA sense strand
guacaucaaagaacgcaua

SEQ ID NO: 855614 - RNA, 19 nt, Homo sapiens
  misc_RNA (1)...(19): siRNA sense strand
gcacucuuauuauacauca

SEQ ID NO: 855615 - RNA, 19 nt, Homo sapiens
  misc_RNA (1)...(19): siRNA sense strand
gggagaaacccuauauaug

SEQ ID NO: 855616 - RNA, 19 nt, Homo sapiens
  misc_RNA (1)...(19): siRNA sense strand
gguagaaucagucaaguug

SEQ ID NO: 855617 - RNA, 19 nt, Homo sapiens
  misc_RNA (1)...(19): siRNA sense strand
aaacacuucuacaugguaa

SEQ ID NO: 855618 - RNA, 19 nt, Homo sapiens
  misc_RNA (1)...(19): siRNA sense strand
caaaccuugucaaacauaa

SEQ ID NO: 855619 - RNA, 19 nt, Homo sapiens
  misc_RNA (1)...(19): siRNA sense strand
ggagagaggccguauggau

SEQ ID NO: 855620 - RNA, 19 nt, Homo sapiens
  misc_RNA (1)...(19): siRNA sense strand
ggagagaaaccuuaugagu

SEQ ID NO: 855621 - RNA, 19 nt, Homo sapiens
  misc_RNA (1)...(19): siRNA sense strand
cagauguacucuccaaguu

SEQ ID NO: 855622 - RNA, 19 nt, Homo sapiens
  misc_RNA (1)...(19): siRNA sense strand
ggaaaagccuucaccacaa

SEQ ID NO: 855623 - RNA, 19 nt, Homo sapiens
  misc_RNA (1)...(19): siRNA sense strand
acaaugaagcgcuaucuaa

SEQ ID NO: 855624 - RNA, 19 nt, Homo sapiens
  misc_RNA (1)...(19): siRNA sense strand
ggacaagaaccauggacaa

SEQ ID NO: 855625 - RNA, 19 nt, Homo sapiens
  misc_RNA (1)...(19): siRNA sense strand
caagacacauuuuccuaua

SEQ ID NO: 855626 - RNA, 19 nt, Homo sapiens
  misc_RNA (1)...(19): siRNA sense strand
gcuccuuccuuauaaguga

SEQ ID NO: 855627 - RNA, 19 nt, Homo sapiens
  misc_RNA (1)...(19): siRNA sense strand
cagaagagaaauccuauau

SEQ ID NO: 855628 - RNA, 19 nt, Homo sapiens
  misc_RNA (1)...(19): siRNA sense strand
agaaaaggcucuacuguga

SEQ ID NO: 855629 - RNA, 19 nt, Homo sapiens
  misc_RNA (1)...(19): siRNA sense strand
gaucaagacccaggaauca

SEQ ID NO: 855630 - RNA, 19 nt, Homo sapiens
  misc_RNA (1)...(19): siRNA sense strand
ugugagaaauuauccagaa

SEQ ID NO: 855631 - RNA, 19 nt, Homo sapiens
  misc_RNA (1)...(19): siRNA sense strand
gagagaaaucuuacauaug

SEQ ID NO: 855632 - RNA, 19 nt, Homo sapiens
  misc_RNA (1)...(19): siRNA sense strand
gcacucucguuauacauca

SEQ ID NO: 855633 - RNA, 19 nt, Homo sapiens
  misc_RNA (1)...(19): siRNA sense strand
augaagcgcuaucuaauug

SEQ ID NO: 855634 - RNA, 19 nt, Homo sapiens
  misc_RNA (1)...(19): siRNA sense strand
gaacucauacuggagagaa

SEQ ID NO: 855635 - RNA, 19 nt, Homo sapiens
  misc_RNA (1)...(19): siRNA sense strand
cagaagagaagacauggaa

SEQ ID NO: 855636 - RNA, 19 nt, Homo sapiens
  misc_RNA (1)...(19): siRNA sense strand
caaacuagcaaaccagaug

SEQ ID NO: 855637 - RNA, 19 nt, Homo sapiens
  misc_RNA (1)...(19): siRNA sense strand
cuaagcaucugaaaacuaa

SEQ ID NO: 855638 - RNA, 19 nt, Homo sapiens
  misc_RNA (1)...(19): siRNA sense strand
gaacguacgcauacuaaaa

SEQ ID NO: 855639 - RNA, 19 nt, Homo sapiens
  misc_RNA (1)...(19): siRNA sense strand
gacagaauacacuuagaaa

SEQ ID NO: 855640 - RNA, 19 nt, Homo sapiens
  misc_RNA (1)...(19): siRNA sense strand
cacagcuccuuccuuauaa

SEQ ID NO: 855641 - RNA, 19 nt, Homo sapiens
  misc_RNA (1)...(19): siRNA sense strand
gggaugugaugguggagaa

SEQ ID NO: 855642 - RNA, 19 nt, Homo sapiens
  misc_RNA (1)...(19): siRNA sense strand
ucaacaaacccauacagaa

SEQ ID NO: 855643 - RNA, 19 nt, Homo sapiens
  misc_RNA (1)...(19): siRNA sense strand
caagaaccauggacaacag

SEQ ID NO: 855644 - RNA, 19 nt, Homo sapiens
  misc_RNA (1)...(19): siRNA sense strand
ggaauaaauaacccuguug

SEQ ID NO: 855645 - RNA, 19 nt, Homo sapiens
  misc_RNA (1)...(19): siRNA sense strand
ccaggaaucgggaaaguug

SEQ ID NO: 855646 - RNA, 19 nt, Homo sapiens
  misc_RNA (1)...(19): siRNA sense strand
agaaauggguagaaucagu

SEQ ID NO: 855647 - RNA, 19 nt, Homo sapiens
  misc_RNA (1)...(19): siRNA sense strand
guaaagccuucagccagaa

SEQ ID NO: 855648 - RNA, 19 nt, Homo sapiens
  misc_RNA (1)...(19): siRNA sense strand
acauuugacuuguacagaa

SEQ ID NO: 855649 - RNA, 19 nt, Homo sapiens
  misc_RNA (1)...(19): siRNA sense strand
ugaagagcgugcagcaaug

SEQ ID NO: 855650 - RNA, 19 nt, Homo sapiens
  misc_RNA (1)...(19): siRNA sense strand
cauuugacuuguacagaaa

SEQ ID NO: 855651 - RNA, 19 nt, Homo sapiens
  misc_RNA (1)...(19): siRNA sense strand
guugaaaacuccuguaaug

SEQ ID NO: 855652 - RNA, 19 nt, Homo sapiens
  misc_RNA (1)...(19): siRNA sense strand
auacaggagagaaaucuua

SEQ ID NO: 855653 - RNA, 19 nt, Homo sapiens
  misc_RNA (1)...(19): siRNA sense strand
uaggaagucucagcucauu

SEQ ID NO: 855654 - RNA, 19 nt, Homo sapiens
  misc_RNA (1)...(19): siRNA sense strand
caugagaacauuuguauac

SEQ ID NO: 855655 - RNA, 19 nt, Homo sapiens
  misc_RNA (1)...(19): siRNA sense strand
caggagagaaaccuuauga

SEQ ID NO: 855656 - RNA, 19 nt, Homo sapiens
  misc_RNA (1)...(19): siRNA sense strand
acacaggagagaaaccuua

SEQ ID NO: 855657 - RNA, 19 nt, Homo sapiens
  misc_RNA (1)...(19): siRNA sense strand
auacaucagcgaacucaua

SEQ ID NO: 855658 - RNA, 19 nt, Homo sapiens
  misc_RNA (1)...(19): siRNA sense strand
auacaucagcgaacucaua

SEQ ID NO: 855659 - RNA, 19 nt, Homo sapiens
  misc_RNA (1)...(19): siRNA sense strand
caaugaagcgcuaucuaau

SEQ ID NO: 855660 - RNA, 19 nt, Homo sapiens
  misc_RNA (1)...(19): siRNA sense strand
agaguagucucauuacaca

SEQ ID NO: 855661 - RNA, 19 nt, Homo sapiens
  misc_RNA (1)...(19): siRNA sense strand
cauacuaaauuccaagucu

SEQ ID NO: 855662 - RNA, 19 nt, Homo sapiens
  misc_RNA (1)...(19): siRNA sense strand
ccguauggaugcagugauu

SEQ ID NO: 855663 - RNA, 19 nt, Homo sapiens
  misc_RNA (1)...(19): siRNA sense strand
caaagcgcacucuuauuau

SEQ ID NO: 855664 - RNA, 19 nt, Homo sapiens
  misc_RNA (1)...(19): siRNA sense strand
ggacacugcucagaagaac

SEQ ID NO: 855665 - RNA, 19 nt, Homo sapiens
  misc_RNA (1)...(19): siRNA sense strand
ggaaguggucaaugugaga

SEQ ID NO: 855666 - RNA, 19 nt, Homo sapiens
  misc_RNA (1)...(19): siRNA sense strand
gaacucauaguggagagaa

SEQ ID NO: 855667 - RNA, 19 nt, Homo sapiens
  misc_RNA (1)...(19): siRNA sense strand
caaguuggcacauggacaa

SEQ ID NO: 855668 - RNA, 19 nt, Homo sapiens
  misc_RNA (1)...(19): siRNA sense strand
augaagcgcuaucuuguug

SEQ ID NO: 855669 - RNA, 19 nt, Homo sapiens
  misc_RNA (1)...(19): siRNA sense strand
uggaauaaauaacccuguu

SEQ ID NO: 855670 - RNA, 19 nt, Homo sapiens
  misc_RNA (1)...(19): siRNA sense strand
guuggcacauggacaagaa

SEQ ID NO: 855671 - RNA, 19 nt, Homo sapiens
  misc_RNA (1)...(19): siRNA sense strand
caccuucucucucuucuca

SEQ ID NO: 855672 - RNA, 19 nt, Homo sapiens
  misc_RNA (1)...(19): siRNA sense strand
ucagaaagucucagucuca

SEQ ID NO: 855673 - RNA, 19 nt, Homo sapiens
  misc_RNA (1)...(19): siRNA sense strand
cagaaagucucagucucaa

SEQ ID NO: 855674 - RNA, 19 nt, Homo sapiens
  misc_RNA (1)...(19): siRNA sense strand
gguuagugcucacgugucu

SEQ ID NO: 855675 - RNA, 19 nt, Homo sapiens
  misc_RNA (1)...(19): siRNA sense strand
agucccggcuccuggguua

SEQ ID NO: 855676 - RNA, 19 nt, Homo sapiens
  misc_RNA (1)...(19): siRNA sense strand
ccuggagucuacacuggaa

SEQ ID NO: 855677 - RNA, 19 nt, Homo sapiens
  misc_RNA (1)...(19): siRNA sense strand
gcauuccuagcucagagua

SEQ ID NO: 855678 - RNA, 19 nt, Homo sapiens
  misc_RNA (1)...(19): siRNA sense strand
cuggaggaauggccuuaga

SEQ ID NO: 855679 - RNA, 19 nt, Homo sapiens
  misc_RNA (1)...(19): siRNA sense strand
caccaaccacgcucaggaa

SEQ ID NO: 855680 - RNA, 19 nt, Homo sapiens
  misc_RNA (1)...(19): siRNA sense strand
ugaagaagcuuugcaguga

SEQ ID NO: 855681 - RNA, 19 nt, Homo sapiens
  misc_RNA (1)...(19): siRNA sense strand
ggaagucuacucuccuuua

SEQ ID NO: 855682 - RNA, 19 nt, Homo sapiens
  misc_RNA (1)...(19): siRNA sense strand
gaaaugaucgaguuggaaa

SEQ ID NO: 855683 - RNA, 19 nt, Homo sapiens
  misc_RNA (1)...(19): siRNA sense strand
gaagucuacucuccuuuau

SEQ ID NO: 855684 - RNA, 19 nt, Homo sapiens
  misc_RNA (1)...(19): siRNA sense strand
agucuacucuccuuuauaa

SEQ ID NO: 855685 - RNA, 19 nt, Homo sapiens
  misc_RNA (1)...(19): siRNA sense strand
aauuaaagcuugcuaagga

SEQ ID NO: 855686 - RNA, 19 nt, Homo sapiens
  misc_RNA (1)...(19): siRNA sense strand
caaacaagcccaaguucuu

SEQ ID NO: 855687 - RNA, 19 nt, Homo sapiens
  misc_RNA (1)...(19): siRNA sense strand
uacaauagguuucaaugug

SEQ ID NO: 855688 - RNA, 19 nt, Homo sapiens
  misc_RNA (1)...(19): siRNA sense strand
ccgaugggcugguguaugu

SEQ ID NO: 855689 - RNA, 19 nt, Homo sapiens
  misc_RNA (1)...(19): siRNA sense strand
aaaugugccuguuguucua

SEQ ID NO: 855690 - RNA, 19 nt, Homo sapiens
  misc_RNA (1)...(19): siRNA sense strand
gugaagagccacaugaaau

SEQ ID NO: 855691 - RNA, 19 nt, Homo sapiens
  misc_RNA (1)...(19): siRNA sense strand
cuaaggauauuaccaccau

SEQ ID NO: 855692 - RNA, 19 nt, Homo sapiens
  misc_RNA (1)...(19): siRNA sense strand
gaagagccacaugaaauca

SEQ ID NO: 855693 - RNA, 19 nt, Homo sapiens
  misc_RNA (1)...(19): siRNA sense strand
uaacuggauuugugaagag

SEQ ID NO: 855694 - RNA, 19 nt, Homo sapiens
  misc_RNA (1)...(19): siRNA sense strand
ggaaaugaucgaguuggaa

SEQ ID NO: 855695 - RNA, 19 nt, Homo sapiens
  misc_RNA (1)...(19): siRNA sense strand
ucaggaaauuaacuggauu

SEQ ID NO: 855696 - RNA, 19 nt, Homo sapiens
  misc_RNA (1)...(19): siRNA sense strand
ucaccagaauguucaaagu

SEQ ID NO: 855697 - RNA, 19 nt, Homo sapiens
  misc_RNA (1)...(19): siRNA sense strand
ucuauuagccaacaaacaa

SEQ ID NO: 855698 - RNA, 19 nt, Homo sapiens
  misc_RNA (1)...(19): siRNA sense strand
accagaauguucaaaguga

SEQ ID NO: 855699 - RNA, 19 nt, Homo sapiens
  misc_RNA (1)...(19): siRNA sense strand
gagacaguuugagcacauu

SEQ ID NO: 855700 - RNA, 19 nt, Homo sapiens
  misc_RNA (1)...(19): siRNA sense strand
gauguuggaggacaggaaa

SEQ ID NO: 855701 - RNA, 19 nt, Homo sapiens
  misc_RNA (1)...(19): siRNA sense strand
ugaucgaguuggaaaggaa

SEQ ID NO: 855702 - RNA, 19 nt, Homo sapiens
  misc_RNA (1)...(19): siRNA sense strand
gaaaucaagaggagacacu

SEQ ID NO: 855703 - RNA, 19 nt, Homo sapiens
  misc_RNA (1)...(19): siRNA sense strand
acaaacagcgacuggaaga

SEQ ID NO: 855704 - RNA, 19 nt, Homo sapiens
  misc_RNA (1)...(19): siRNA sense strand
agacaaacagcgacuggaa

SEQ ID NO: 855705 - RNA, 19 nt, Homo sapiens
  misc_RNA (1)...(19): siRNA sense strand
gcugaggacaucaccagaa

SEQ ID NO: 855706 - RNA, 19 nt, Homo sapiens
  misc_RNA (1)...(19): siRNA sense strand
gagacacuuuggcguucuu

SEQ ID NO: 855707 - RNA, 19 nt, Homo sapiens
  misc_RNA (1)...(19): siRNA sense strand
ugaagagccacaugaaauc

SEQ ID NO: 855708 - RNA, 19 nt, Homo sapiens
  misc_RNA (1)...(19): siRNA sense strand
uggaaaugaucgaguugga

SEQ ID NO: 855709 - RNA, 19 nt, Homo sapiens
  misc_RNA (1)...(19): siRNA sense strand
uuaacuggauuugugaaga

SEQ ID NO: 855710 - RNA, 19 nt, Homo sapiens
  misc_RNA (1)...(19): siRNA sense strand
cugaggacaucaccagaau

SEQ ID NO: 855711 - RNA, 19 nt, Homo sapiens
  misc_RNA (1)...(19): siRNA sense strand
ggacaguacagacaaacag

SEQ ID NO: 855712 - RNA, 19 nt, Homo sapiens
  misc_RNA (1)...(19): siRNA sense strand
aaagcuugcuaaggauauu

SEQ ID NO: 855713 - RNA, 19 nt, Homo sapiens
  misc_RNA (1)...(19): siRNA sense strand
uuaaagcuugcuaaggaua

SEQ ID NO: 855714 - RNA, 19 nt, Homo sapiens
  misc_RNA (1)...(19): siRNA sense strand
aaacaagcccaaguucuuc

SEQ ID NO: 855715 - RNA, 19 nt, Homo sapiens
  misc_RNA (1)...(19): siRNA sense strand
gaugggcugguguauguug

SEQ ID NO: 855716 - RNA, 19 nt, Homo sapiens
  misc_RNA (1)...(19): siRNA sense strand
agagacaguuugagcacau

SEQ ID NO: 855717 - RNA, 19 nt, Homo sapiens
  misc_RNA (1)...(19): siRNA sense strand
uaaagcuugcuaaggauau

SEQ ID NO: 855718 - RNA, 19 nt, Homo sapiens
  misc_RNA (1)...(19): siRNA sense strand
uuaccaccaucccuacaau

SEQ ID NO: 855719 - RNA, 19 nt, Homo sapiens
  misc_RNA (1)...(19): siRNA sense strand
ugugccuguuguucuauua

SEQ ID NO: 855720 - RNA, 19 nt, Homo sapiens
  misc_RNA (1)...(19): siRNA sense strand
cuacaauagguuucaaugu

SEQ ID NO: 855721 - RNA, 19 nt, Homo sapiens
  misc_RNA (1)...(19): siRNA sense strand
ggagacacuuuggcguucu

SEQ ID NO: 855722 - RNA, 19 nt, Homo sapiens
  misc_RNA (1)...(19): siRNA sense strand
ccaaacaagcccaaguucu

SEQ ID NO: 855723 - RNA, 19 nt, Homo sapiens
  misc_RNA (1)...(19): siRNA sense strand
caagcccaaguucuucuuu

SEQ ID NO: 855724 - RNA, 19 nt, Homo sapiens
  misc_RNA (1)...(19): siRNA sense strand
ugggaagucuacucuccuu

SEQ ID NO: 855725 - RNA, 19 nt, Homo sapiens
  misc_RNA (1)...(19): siRNA sense strand
aaacagcgacuggaagagu

SEQ ID NO: 855726 - RNA, 19 nt, Homo sapiens
  misc_RNA (1)...(19): siRNA sense strand
uguggacaguacagacaaa

SEQ ID NO: 855727 - RNA, 19 nt, Homo sapiens
  misc_RNA (1)...(19): siRNA sense strand
aaucaagaggagacacuuu

SEQ ID NO: 855728 - RNA, 19 nt, Homo sapiens
  misc_RNA (1)...(19): siRNA sense strand
aaccaaacaagcccaaguu

SEQ ID NO: 855729 - RNA, 19 nt, Homo sapiens
  misc_RNA (1)...(19): siRNA sense strand
caccagaauguucaaagug

SEQ ID NO: 855730 - RNA, 19 nt, Homo sapiens
  misc_RNA (1)...(19): siRNA sense strand
ggauguuggaggacaggaa

SEQ ID NO: 855731 - RNA, 19 nt, Homo sapiens
  misc_RNA (1)...(19): siRNA sense strand
gcccagggguucaggaaau

SEQ ID NO: 855732 - RNA, 19 nt, Homo sapiens
  misc_RNA (1)...(19): siRNA sense strand
gaauucaucuucugcuaua

SEQ ID NO: 855733 - RNA, 19 nt, Homo sapiens
  misc_RNA (1)...(19): siRNA sense strand
cuugaagccuccauuauua

SEQ ID NO: 855734 - RNA, 19 nt, Homo sapiens
  misc_RNA (1)...(19): siRNA sense strand
ggagugcuguggcucauuu

SEQ ID NO: 855735 - RNA, 19 nt, Homo sapiens
  misc_RNA (1)...(19): siRNA sense strand
gagcaaaggcuaccacaga

SEQ ID NO: 855736 - RNA, 19 nt, Homo sapiens
  misc_RNA (1)...(19): siRNA sense strand
ucacaugggcuaauuagaa

SEQ ID NO: 855737 - RNA, 19 nt, Homo sapiens
  misc_RNA (1)...(19): siRNA sense strand
gaacucauugugaauaaga

SEQ ID NO: 855738 - RNA, 19 nt, Homo sapiens
  misc_RNA (1)...(19): siRNA sense strand
gcucuugaagccuccauua

SEQ ID NO: 855739 - RNA, 19 nt, Homo sapiens
  misc_RNA (1)...(19): siRNA sense strand
cacaugggcuaauuagaau

SEQ ID NO: 855740 - RNA, 19 nt, Homo sapiens
  misc_RNA (1)...(19): siRNA sense strand
ugugagagaacaaagauuu

SEQ ID NO: 855741 - RNA, 19 nt, Homo sapiens
  misc_RNA (1)...(19): siRNA sense strand
ccaaauaugcaaauggaau

SEQ ID NO: 855742 - RNA, 19 nt, Homo sapiens
  misc_RNA (1)...(19): siRNA sense strand
ugcuguggcucauuucuuu

SEQ ID NO: 855743 - RNA, 19 nt, Homo sapiens
  misc_RNA (1)...(19): siRNA sense strand
gugaaugucaucucaacaa

SEQ ID NO: 855744 - RNA, 19 nt, Homo sapiens
  misc_RNA (1)...(19): siRNA sense strand
ucuugaagccuccauuauu

SEQ ID NO: 855745 - RNA, 19 nt, Homo sapiens
  misc_RNA (1)...(19): siRNA sense strand
cagccagagugucaauuuc

SEQ ID NO: 855746 - RNA, 19 nt, Homo sapiens
  misc_RNA (1)...(19): siRNA sense strand
ucagccagagugucaauuu

SEQ ID NO: 855747 - RNA, 19 nt, Homo sapiens
  misc_RNA (1)...(19): siRNA sense strand
cagaacugcuaccuucaca

SEQ ID NO: 855748 - RNA, 19 nt, Homo sapiens
  misc_RNA (1)...(19): siRNA sense strand
gaauggaguccugcagugu

SEQ ID NO: 855749 - RNA, 19 nt, Homo sapiens
  misc_RNA (1)...(19): siRNA sense strand
guucaggucacccaauuuc

SEQ ID NO: 855750 - RNA, 19 nt, Homo sapiens
  misc_RNA (1)...(19): siRNA sense strand
cgguucaggucacccaauu

SEQ ID NO: 855751 - RNA, 19 nt, Homo sapiens
  misc_RNA (1)...(19): siRNA sense strand
gagaaaagagauuugagaa

SEQ ID NO: 855752 - RNA, 19 nt, Homo sapiens
  misc_RNA (1)...(19): siRNA sense strand
ggagaaaagagauuugaga

SEQ ID NO: 855753 - RNA, 19 nt, Homo sapiens
  misc_RNA (1)...(19): siRNA sense strand
ggucacaugggcuaauuag

SEQ ID NO: 855754 - RNA, 19 nt, Homo sapiens
  misc_RNA (1)...(19): siRNA sense strand
agacagcuacaccugguuu

SEQ ID NO: 855755 - RNA, 19 nt, Homo sapiens
  misc_RNA (1)...(19): siRNA sense strand
cacccaauuucgaauguca

SEQ ID NO: 855756 - RNA, 19 nt, Homo sapiens
  misc_RNA (1)...(19): siRNA sense strand
uugaauucaucuucugcua

SEQ ID NO: 855757 - RNA, 19 nt, Homo sapiens
  misc_RNA (1)...(19): siRNA sense strand
uaggcccagucgaagaaua

SEQ ID NO: 855758 - RNA, 19 nt, Homo sapiens
  misc_RNA (1)...(19): siRNA sense strand
caguguaccugugaagaca

SEQ ID NO: 855759 - RNA, 19 nt, Homo sapiens
  misc_RNA (1)...(19): siRNA sense strand
ugaauucaucuucugcuau

SEQ ID NO: 855760 - RNA, 19 nt, Homo sapiens
  misc_RNA (1)...(19): siRNA sense strand
ugaagccuccauuauuaug

SEQ ID NO: 855761 - RNA, 19 nt, Homo sapiens
  misc_RNA (1)...(19): siRNA sense strand
uuucgaaugucacucuugu

SEQ ID NO: 855762 - RNA, 19 nt, Homo sapiens
  misc_RNA (1)...(19): siRNA sense strand
ugaaugucaucucaacaac

SEQ ID NO: 855763 - RNA, 19 nt, Homo sapiens
  misc_RNA (1)...(19): siRNA sense strand
gcacucccaagcugugaau

SEQ ID NO: 855764 - RNA, 19 nt, Homo sapiens
  misc_RNA (1)...(19): siRNA sense strand
ucauuucuuucuucaccuu

SEQ ID NO: 855765 - RNA, 19 nt, Homo sapiens
  misc_RNA (1)...(19): siRNA sense strand
gcaguguaccugugaagac

SEQ ID NO: 855766 - RNA, 19 nt, Homo sapiens
  misc_RNA (1)...(19): siRNA sense strand
ggucacccaauuucgaaug

SEQ ID NO: 855767 - RNA, 19 nt, Homo sapiens
  misc_RNA (1)...(19): siRNA sense strand
ugaaagguuuacaaaugac

SEQ ID NO: 855768 - RNA, 19 nt, Homo sapiens
  misc_RNA (1)...(19): siRNA sense strand
gaaagaauucaagguuuug

SEQ ID NO: 855769 - RNA, 19 nt, Homo sapiens
  misc_RNA (1)...(19): siRNA sense strand
aauggaguccugcagugua

SEQ ID NO: 855770 - RNA, 19 nt, Homo sapiens
  misc_RNA (1)...(19): siRNA sense strand
caauuucgaaugucacucu

SEQ ID NO: 855771 - RNA, 19 nt, Homo sapiens
  misc_RNA (1)...(19): siRNA sense strand
auagagauuccaaggagaa

SEQ ID NO: 855772 - RNA, 19 nt, Homo sapiens
  misc_RNA (1)...(19): siRNA sense strand
caggucacccaauuucgaa

SEQ ID NO: 855773 - RNA, 19 nt, Homo sapiens
  misc_RNA (1)...(19): siRNA sense strand
caacaaccucagccagagu

SEQ ID NO: 855774 - RNA, 19 nt, Homo sapiens
  misc_RNA (1)...(19): siRNA sense strand
uggcucauuucuuucuuca

SEQ ID NO: 855775 - RNA, 19 nt, Homo sapiens
  misc_RNA (1)...(19): siRNA sense strand
ucaggucacccaauuucga

SEQ ID NO: 855776 - RNA, 19 nt, Homo sapiens
  misc_RNA (1)...(19): siRNA sense strand
uggggcacuuucaaaauua

SEQ ID NO: 855777 - RNA, 19 nt, Homo sapiens
  misc_RNA (1)...(19): siRNA sense strand
gcaaaggcuaccacagacu

SEQ ID NO: 855778 - RNA, 19 nt, Homo sapiens
  misc_RNA (1)...(19): siRNA sense strand
gaacagggaagucauaucu

SEQ ID NO: 855779 - RNA, 19 nt, Homo sapiens
  misc_RNA (1)...(19): siRNA sense strand
gcugagggccguccugaaa

SEQ ID NO: 855780 - RNA, 19 nt, Homo sapiens
  misc_RNA (1)...(19): siRNA sense strand
gggaagucauaucugcuaa

SEQ ID NO: 855781 - RNA, 19 nt, Homo sapiens
  misc_RNA (1)...(19): siRNA sense strand
ggccagagcaucuucuuca

SEQ ID NO: 855782 - RNA, 19 nt, Homo sapiens
  misc_RNA (1)...(19): siRNA sense strand
gaaaggccagagcaucuuc

SEQ ID NO: 855783 - RNA, 19 nt, Homo sapiens
  misc_RNA (1)...(19): siRNA sense strand
ggccgagccuagcacagaa

SEQ ID NO: 855784 - RNA, 19 nt, Homo sapiens
  misc_RNA (1)...(19): siRNA sense strand
caggaacagggaagucaua

SEQ ID NO: 855785 - RNA, 19 nt, Homo sapiens
  misc_RNA (1)...(19): siRNA sense strand
gcacauugcgccucaagcu

SEQ ID NO: 855786 - RNA, 19 nt, Homo sapiens
  misc_RNA (1)...(19): siRNA sense strand
ggaacagggaagucauauc

SEQ ID NO: 855787 - RNA, 19 nt, Homo sapiens
  misc_RNA (1)...(19): siRNA sense strand
gccacagcuuucugaggaa

SEQ ID NO: 855788 - RNA, 19 nt, Homo sapiens
  misc_RNA (1)...(19): siRNA sense strand
ugagggccguccugaaagg

SEQ ID NO: 855789 - RNA, 19 nt, Homo sapiens
  misc_RNA (1)...(19): siRNA sense strand
ggccgucucugguguagga

SEQ ID NO: 855790 - RNA, 19 nt, Homo sapiens
  misc_RNA (1)...(19): siRNA sense strand
gcaacgugcuggagaccau

SEQ ID NO: 855791 - RNA, 19 nt, Homo sapiens
  misc_RNA (1)...(19): siRNA sense strand
cgggugagguccaucagaa

SEQ ID NO: 855792 - RNA, 19 nt, Homo sapiens
  misc_RNA (1)...(19): siRNA sense strand
ccagugggcccauaggaau

SEQ ID NO: 855793 - RNA, 19 nt, Homo sapiens
  misc_RNA (1)...(19): siRNA sense strand
ggugagguccaucagaaug

SEQ ID NO: 855794 - RNA, 19 nt, Homo sapiens
  misc_RNA (1)...(19): siRNA sense strand
ggaggccgucucuggugua

SEQ ID NO: 855795 - RNA, 19 nt, Homo sapiens
  misc_RNA (1)...(19): siRNA sense strand
agaggaggaucuucagcau

SEQ ID NO: 855796 - RNA, 19 nt, Homo sapiens
  misc_RNA (1)...(19): siRNA sense strand
cgucucugguguaggaguu

SEQ ID NO: 855797 - RNA, 19 nt, Homo sapiens
  misc_RNA (1)...(19): siRNA sense strand
uguuuguccuuuguccuua

SEQ ID NO: 855798 - RNA, 19 nt, Homo sapiens
  misc_RNA (1)...(19): siRNA sense strand
ggcaugggcuguggcuucu

SEQ ID NO: 855799 - RNA, 19 nt, Homo sapiens
  misc_RNA (1)...(19): siRNA sense strand
ggcucaaucucuaguauua

SEQ ID NO: 855800 - RNA, 19 nt, Homo sapiens
  misc_RNA (1)...(19): siRNA sense strand
gagaugguguucuguaaau

SEQ ID NO: 855801 - RNA, 19 nt, Homo sapiens
  misc_RNA (1)...(19): siRNA sense strand
caugccaacuggaauaaua

SEQ ID NO: 855802 - RNA, 19 nt, Homo sapiens
  misc_RNA (1)...(19): siRNA sense strand
ggacggaaaucagauaucu

SEQ ID NO: 855803 - RNA, 19 nt, Homo sapiens
  misc_RNA (1)...(19): siRNA sense strand
ggaauaauaaagcugauug

SEQ ID NO: 855804 - RNA, 19 nt, Homo sapiens
  misc_RNA (1)...(19): siRNA sense strand
acaaauacuucaagguguu

SEQ ID NO: 855805 - RNA, 19 nt, Homo sapiens
  misc_RNA (1)...(19): siRNA sense strand
gcucaugccaacuggaaua

SEQ ID NO: 855806 - RNA, 19 nt, Homo sapiens
  misc_RNA (1)...(19): siRNA sense strand
caaugagucuggcuaugga

SEQ ID NO: 855807 - RNA, 19 nt, Homo sapiens
  misc_RNA (1)...(19): siRNA sense strand
uaaauggcacccacaguga

SEQ ID NO: 855808 - RNA, 19 nt, Homo sapiens
  misc_RNA (1)...(19): siRNA sense strand
gcugaugccuccuuuacca

SEQ ID NO: 855809 - RNA, 19 nt, Homo sapiens
  misc_RNA (1)...(19): siRNA sense strand
guacaucgcgauaucaaag

SEQ ID NO: 855810 - RNA, 19 nt, Homo sapiens
  misc_RNA (1)...(19): siRNA sense strand
ccugguggcucaaucucua

SEQ ID NO: 855811 - RNA, 19 nt, Homo sapiens
  misc_RNA (1)...(19): siRNA sense strand
caacuggaauaauaaagcu

SEQ ID NO: 855812 - RNA, 19 nt, Homo sapiens
  misc_RNA (1)...(19): siRNA sense strand
gaugguguucuguaaauau

SEQ ID NO: 855813 - RNA, 19 nt, Homo sapiens
  misc_RNA (1)...(19): siRNA sense strand
cugagaugguguucuguaa

SEQ ID NO: 855814 - RNA, 19 nt, Homo sapiens
  misc_RNA (1)...(19): siRNA sense strand
acagugacaugcuuaaguc

SEQ ID NO: 855815 - RNA, 19 nt, Homo sapiens
  misc_RNA (1)...(19): siRNA sense strand
gaaacaaauacuucaaggu

SEQ ID NO: 855816 - RNA, 19 nt, Homo sapiens
  misc_RNA (1)...(19): siRNA sense strand
gcuauggacggaaaucaga

SEQ ID NO: 855817 - RNA, 19 nt, Homo sapiens
  misc_RNA (1)...(19): siRNA sense strand
agaugguguucuguaaaua

SEQ ID NO: 855818 - RNA, 19 nt, Homo sapiens
  misc_RNA (1)...(19): siRNA sense strand
uaccagaccacuucucaga

SEQ ID NO: 855819 - RNA, 19 nt, Homo sapiens
  misc_RNA (1)...(19): siRNA sense strand
ccaugagaacuguguggua

SEQ ID NO: 855820 - RNA, 19 nt, Homo sapiens
  misc_RNA (1)...(19): siRNA sense strand
guuguacuguguuugagau

SEQ ID NO: 855821 - RNA, 19 nt, Homo sapiens
  misc_RNA (1)...(19): siRNA sense strand
guggcucaaucucuaguau

SEQ ID NO: 855822 - RNA, 19 nt, Homo sapiens
  misc_RNA (1)...(19): siRNA sense strand
ugagaugguguucuguaaa

SEQ ID NO: 855823 - RNA, 19 nt, Homo sapiens
  misc_RNA (1)...(19): siRNA sense strand
ugagaacugugugguacau

SEQ ID NO: 855824 - RNA, 19 nt, Homo sapiens
  misc_RNA (1)...(19): siRNA sense strand
gggcugaugccuccuuuac

SEQ ID NO: 855825 - RNA, 19 nt, Homo sapiens
  misc_RNA (1)...(19): siRNA sense strand
cgcgauaucaaaggaaaua

SEQ ID NO: 855826 - RNA, 19 nt, Homo sapiens
  misc_RNA (1)...(19): siRNA sense strand
gugacaugcuuaaguccau

SEQ ID NO: 855827 - RNA, 19 nt, Homo sapiens
  misc_RNA (1)...(19): siRNA sense strand
caaauacuucaagguguug

SEQ ID NO: 855828 - RNA, 19 nt, Homo sapiens
  misc_RNA (1)...(19): siRNA sense strand
cauugguuguacuguguuu

SEQ ID NO: 855829 - RNA, 19 nt, Homo sapiens
  misc_RNA (1)...(19): siRNA sense strand
uauggacggaaaucagaua

SEQ ID NO: 855830 - RNA, 19 nt, Homo sapiens
  misc_RNA (1)...(19): siRNA sense strand
ugugguacaucgcgauauc

SEQ ID NO: 855831 - RNA, 19 nt, Homo sapiens
  misc_RNA (1)...(19): siRNA sense strand
ccugagaugguguucugua

SEQ ID NO: 855832 - RNA, 19 nt, Homo sapiens
  misc_RNA (1)...(19): siRNA sense strand
caucaaugagucuggcuau

SEQ ID NO: 855833 - RNA, 19 nt, Homo sapiens
  misc_RNA (1)...(19): siRNA sense strand
ucaaugagucuggcuaugg

SEQ ID NO: 855834 - RNA, 19 nt, Homo sapiens
  misc_RNA (1)...(19): siRNA sense strand
gauaucuggagcauugguu

SEQ ID NO: 855835 - RNA, 19 nt, Homo sapiens
  misc_RNA (1)...(19): siRNA sense strand
ugccugagaugguguucug

SEQ ID NO: 855836 - RNA, 19 nt, Homo sapiens
  misc_RNA (1)...(19): siRNA sense strand
gguacaucgcgauaucaaa

SEQ ID NO: 855837 - RNA, 19 nt, Homo sapiens
  misc_RNA (1)...(19): siRNA sense strand
aaaugcagcagacuuugug

SEQ ID NO: 855838 - RNA, 19 nt, Homo sapiens
  misc_RNA (1)...(19): siRNA sense strand
ggucccagaagucaucaau

SEQ ID NO: 855839 - RNA, 19 nt, Homo sapiens
  misc_RNA (1)...(19): siRNA sense strand
agaaaaugcagcagacuuu

SEQ ID NO: 855840 - RNA, 19 nt, Homo sapiens
  misc_RNA (1)...(19): siRNA sense strand
gcaagaaacuggccucaac

SEQ ID NO: 855841 - RNA, 19 nt, Homo sapiens
  misc_RNA (1)...(19): siRNA sense strand
cuuccacccuagagaauua

SEQ ID NO: 855842 - RNA, 19 nt, Homo sapiens
  misc_RNA (1)...(19): siRNA sense strand
acaagcaucaugucgguua

SEQ ID NO: 855843 - RNA, 19 nt, Homo sapiens
  misc_RNA (1)...(19): siRNA sense strand
cuagagaauuaaucacaga

SEQ ID NO: 855844 - RNA, 19 nt, Homo sapiens
  misc_RNA (1)...(19): siRNA sense strand
caucaugucgguuacaaga

SEQ ID NO: 855845 - RNA, 19 nt, Homo sapiens
  misc_RNA (1)...(19): siRNA sense strand
ggccaagguucucccacaa

SEQ ID NO: 855846 - RNA, 19 nt, Homo sapiens
  misc_RNA (1)...(19): siRNA sense strand
guggugcucugccuuguuc

SEQ ID NO: 855847 - RNA, 19 nt, Homo sapiens
  misc_RNA (1)...(19): siRNA sense strand
gagaucagagcuugcacaa

SEQ ID NO: 855848 - RNA, 19 nt, Homo sapiens
  misc_RNA (1)...(19): siRNA sense strand
ccaagguucucccacaaaa

SEQ ID NO: 855849 - RNA, 19 nt, Homo sapiens
  misc_RNA (1)...(19): siRNA sense strand
ccgcaugggccaaggaguu

SEQ ID NO: 855850 - RNA, 19 nt, Homo sapiens
  misc_RNA (1)...(19): siRNA sense strand
cacaagagaagcacacaca

SEQ ID NO: 855851 - RNA, 19 nt, Homo sapiens
  misc_RNA (1)...(19): siRNA sense strand
caacuuggcgagcuucaac

SEQ ID NO: 855852 - RNA, 19 nt, Homo sapiens
  misc_RNA (1)...(19): siRNA sense strand
gccaagguucucccacaaa

SEQ ID NO: 855853 - RNA, 19 nt, Homo sapiens
  misc_RNA (1)...(19): siRNA sense strand
gccaaggaguucagaucca

SEQ ID NO: 855854 - RNA, 19 nt, Homo sapiens
  misc_RNA (1)...(19): siRNA sense strand
agaaacuggccucaacuug

SEQ ID NO: 855855 - RNA, 19 nt, Homo sapiens
  misc_RNA (1)...(19): siRNA sense strand
agagcagcuuccaggagua

SEQ ID NO: 855856 - RNA, 19 nt, Homo sapiens
  misc_RNA (1)...(19): siRNA sense strand
gggccaaggaguucagauc

SEQ ID NO: 855857 - RNA, 19 nt, Homo sapiens
  misc_RNA (1)...(19): siRNA sense strand
ucaguucagccuccaaaca

SEQ ID NO: 855858 - RNA, 19 nt, Homo sapiens
  misc_RNA (1)...(19): siRNA sense strand
gaacagaaguggaaagauu

SEQ ID NO: 855859 - RNA, 19 nt, Homo sapiens
  misc_RNA (1)...(19): siRNA sense strand
gaaaguaagcuucaagaua

SEQ ID NO: 855860 - RNA, 19 nt, Homo sapiens
  misc_RNA (1)...(19): siRNA sense strand
ugaagaagcuggccaagaa

SEQ ID NO: 855861 - RNA, 19 nt, Homo sapiens
  misc_RNA (1)...(19): siRNA sense strand
ggacacauauugaaggaaa

SEQ ID NO: 855862 - RNA, 19 nt, Homo sapiens
  misc_RNA (1)...(19): siRNA sense strand
gaaccaagcaggucaggua

SEQ ID NO: 855863 - RNA, 19 nt, Homo sapiens
  misc_RNA (1)...(19): siRNA sense strand
ggaaaugaaucgugugaag

SEQ ID NO: 855864 - RNA, 19 nt, Homo sapiens
  misc_RNA (1)...(19): siRNA sense strand
caacagauccuaauuagca

SEQ ID NO: 855865 - RNA, 19 nt, Homo sapiens
  misc_RNA (1)...(19): siRNA sense strand
ccaagaacauacuggauga

SEQ ID NO: 855866 - RNA, 19 nt, Homo sapiens
  misc_RNA (1)...(19): siRNA sense strand
gaacauacuggaugagaga

SEQ ID NO: 855867 - RNA, 19 nt, Homo sapiens
  misc_RNA (1)...(19): siRNA sense strand
ggaaauacaaccagaguuc

SEQ ID NO: 855868 - RNA, 19 nt, Homo sapiens
  misc_RNA (1)...(19): siRNA sense strand
gcagcaacacgcaaugaua

SEQ ID NO: 855869 - RNA, 19 nt, Homo sapiens
  misc_RNA (1)...(19): siRNA sense strand
gcaggaagcauuauaagca

SEQ ID NO: 855870 - RNA, 19 nt, Homo sapiens
  misc_RNA (1)...(19): siRNA sense strand
ugaaggaaauguggauauu

SEQ ID NO: 855871 - RNA, 19 nt, Homo sapiens
  misc_RNA (1)...(19): siRNA sense strand
gagcacagcaccaauagug

SEQ ID NO: 855872 - RNA, 19 nt, Homo sapiens
  misc_RNA (1)...(19): siRNA sense strand
ccaagcaggucagguagaa

SEQ ID NO: 855873 - RNA, 19 nt, Homo sapiens
  misc_RNA (1)...(19): siRNA sense strand
gaagcuggccaagaacaua

SEQ ID NO: 855874 - RNA, 19 nt, Homo sapiens
  misc_RNA (1)...(19): siRNA sense strand
gaaaugaaucgugugaaga

SEQ ID NO: 855875 - RNA, 19 nt, Homo sapiens
  misc_RNA (1)...(19): siRNA sense strand
guauugcgauugcucuuug

SEQ ID NO: 855876 - RNA, 19 nt, Homo sapiens
  misc_RNA (1)...(19): siRNA sense strand
guacaggaagaacagaaua

SEQ ID NO: 855877 - RNA, 19 nt, Homo sapiens
  misc_RNA (1)...(19): siRNA sense strand
cuaauuagcaggaagcauu

SEQ ID NO: 855878 - RNA, 19 nt, Homo sapiens
  misc_RNA (1)...(19): siRNA sense strand
gaagcaacagauccuaauu

SEQ ID NO: 855879 - RNA, 19 nt, Homo sapiens
  misc_RNA (1)...(19): siRNA sense strand
gcaccaauagugugaauca

SEQ ID NO: 855880 - RNA, 19 nt, Homo sapiens
  misc_RNA (1)...(19): siRNA sense strand
aagcaacagauccuaauua

SEQ ID NO: 855881 - RNA, 19 nt, Homo sapiens
  misc_RNA (1)...(19): siRNA sense strand
gaagcauuauaagcagaua

SEQ ID NO: 855882 - RNA, 19 nt, Homo sapiens
  misc_RNA (1)...(19): siRNA sense strand
gaaggaaauguggauauug

SEQ ID NO: 855883 - RNA, 19 nt, Homo sapiens
  misc_RNA (1)...(19): siRNA sense strand
augaauggcuguccuucua

SEQ ID NO: 855884 - RNA, 19 nt, Homo sapiens
  misc_RNA (1)...(19): siRNA sense strand
caggucagguagaaauuga

SEQ ID NO: 855885 - RNA, 19 nt, Homo sapiens
  misc_RNA (1)...(19): siRNA sense strand
gcagagagcacagcaccaa

SEQ ID NO: 855886 - RNA, 19 nt, Homo sapiens
  misc_RNA (1)...(19): siRNA sense strand
ugagagaacagaaguggaa

SEQ ID NO: 855887 - RNA, 19 nt, Homo sapiens
  misc_RNA (1)...(19): siRNA sense strand
gagaacagaaguggaaaga

SEQ ID NO: 855888 - RNA, 19 nt, Homo sapiens
  misc_RNA (1)...(19): siRNA sense strand
gaaggacagggaaaugaau

SEQ ID NO: 855889 - RNA, 19 nt, Homo sapiens
  misc_RNA (1)...(19): siRNA sense strand
agagagcacagcaccaaua

SEQ ID NO: 855890 - RNA, 19 nt, Homo sapiens
  misc_RNA (1)...(19): siRNA sense strand
aaaugaaucgugugaagaa

SEQ ID NO: 855891 - RNA, 19 nt, Homo sapiens
  misc_RNA (1)...(19): siRNA sense strand
gcagcaccuucuucagaug

SEQ ID NO: 855892 - RNA, 19 nt, Homo sapiens
  misc_RNA (1)...(19): siRNA sense strand
gaacagaauaucccaaaau

SEQ ID NO: 855893 - RNA, 19 nt, Homo sapiens
  misc_RNA (1)...(19): siRNA sense strand
uagaugcucugcaccaagu

SEQ ID NO: 855894 - RNA, 19 nt, Homo sapiens
  misc_RNA (1)...(19): siRNA sense strand
aaggaaauguggauauugg

SEQ ID NO: 855895 - RNA, 19 nt, Homo sapiens
  misc_RNA (1)...(19): siRNA sense strand
caacacgcaaugauagaga

SEQ ID NO: 855896 - RNA, 19 nt, Homo sapiens
  misc_RNA (1)...(19): siRNA sense strand
guuccagacuauguuguuu

SEQ ID NO: 855897 - RNA, 19 nt, Homo sapiens
  misc_RNA (1)...(19): siRNA sense strand
gaacauuugauggcagaga

SEQ ID NO: 855898 - RNA, 19 nt, Homo sapiens
  misc_RNA (1)...(19): siRNA sense strand
ugacacaggaaccuucuga

SEQ ID NO: 855899 - RNA, 19 nt, Homo sapiens
  misc_RNA (1)...(19): siRNA sense strand
ugaaggacagggaaaugaa

SEQ ID NO: 855900 - RNA, 19 nt, Homo sapiens
  misc_RNA (1)...(19): siRNA sense strand
aaauacaaccagaguucua

SEQ ID NO: 855901 - RNA, 19 nt, Homo sapiens
  misc_RNA (1)...(19): siRNA sense strand
cagcaacacgcaaugauag

SEQ ID NO: 855902 - RNA, 19 nt, Homo sapiens
  misc_RNA (1)...(19): siRNA sense strand
gcaggucagguagaaauug

SEQ ID NO: 855903 - RNA, 19 nt, Homo sapiens
  misc_RNA (1)...(19): siRNA sense strand
agcaacagauccuaauuag

SEQ ID NO: 855904 - RNA, 19 nt, Homo sapiens
  misc_RNA (1)...(19): siRNA sense strand
gagagcacagcaccaauag

SEQ ID NO: 855905 - RNA, 19 nt, Homo sapiens
  misc_RNA (1)...(19): siRNA sense strand
gaugaaggacagggaaaug

SEQ ID NO: 855906 - RNA, 19 nt, Homo sapiens
  misc_RNA (1)...(19): siRNA sense strand
gaaauacaaccagaguucu

SEQ ID NO: 855907 - RNA, 19 nt, Homo sapiens
  misc_RNA (1)...(19): siRNA sense strand
cagcaccaauagugugaau

SEQ ID NO: 855908 - RNA, 19 nt, Homo sapiens
  misc_RNA (1)...(19): siRNA sense strand
gugaagcaacagauccuaa

SEQ ID NO: 855909 - RNA, 19 nt, Homo sapiens
  misc_RNA (1)...(19): siRNA sense strand
aagaacagaauaucccaaa

SEQ ID NO: 855910 - RNA, 19 nt, Homo sapiens
  misc_RNA (1)...(19): siRNA sense strand
aaauguggauauuggagau

SEQ ID NO: 855911 - RNA, 19 nt, Homo sapiens
  misc_RNA (1)...(19): siRNA sense strand
ggccuccaguuccagacua

SEQ ID NO: 855912 - RNA, 19 nt, Homo sapiens
  misc_RNA (1)...(19): siRNA sense strand
uuagcaggaagcauuauaa

SEQ ID NO: 855913 - RNA, 19 nt, Homo sapiens
  misc_RNA (1)...(19): siRNA sense strand
ggaagcauuauaagcagau

SEQ ID NO: 855914 - RNA, 19 nt, Homo sapiens
  misc_RNA (1)...(19): siRNA sense strand
cuucaucacccagcaaauu

SEQ ID NO: 855915 - RNA, 19 nt, Homo sapiens
  misc_RNA (1)...(19): siRNA sense strand
ugaagcaacagauccuaau

SEQ ID NO: 855916 - RNA, 19 nt, Homo sapiens
  misc_RNA (1)...(19): siRNA sense strand
cauacuggaugagagaaca

SEQ ID NO: 855917 - RNA, 19 nt, Homo sapiens
  misc_RNA (1)...(19): siRNA sense strand
caaauugcaauaucagacu

SEQ ID NO: 855918 - RNA, 19 nt, Homo sapiens
  misc_RNA (1)...(19): siRNA sense strand
agagcagcauguacaggaa

SEQ ID NO: 855919 - RNA, 19 nt, Homo sapiens
  misc_RNA (1)...(19): siRNA sense strand
guuugagagugaaguuuua

SEQ ID NO: 855920 - RNA, 19 nt, Homo sapiens
  misc_RNA (1)...(19): siRNA sense strand
gacacauauugaaggaaau

SEQ ID NO: 855921 - RNA, 19 nt, Homo sapiens
  misc_RNA (1)...(19): siRNA sense strand
gugaagaagcuggccaaga

SEQ ID NO: 855922 - RNA, 19 nt, Homo sapiens
  misc_RNA (1)...(19): siRNA sense strand
cugcagcaccuucuucaga

SEQ ID NO: 855923 - RNA, 19 nt, Homo sapiens
  misc_RNA (1)...(19): siRNA sense strand
gagagaacagaaguggaaa

SEQ ID NO: 855924 - RNA, 19 nt, Homo sapiens
  misc_RNA (1)...(19): siRNA sense strand
cagcaccuucuucagauga

SEQ ID NO: 855925 - RNA, 19 nt, Homo sapiens
  misc_RNA (1)...(19): siRNA sense strand
ugaaucgugugaagaagcu

SEQ ID NO: 855926 - RNA, 19 nt, Homo sapiens
  misc_RNA (1)...(19): siRNA sense strand
aagcaggucagguagaaau

SEQ ID NO: 855927 - RNA, 19 nt, Homo sapiens
  misc_RNA (1)...(19): siRNA sense strand
aaugagagcagcauguaca

SEQ ID NO: 855928 - RNA, 19 nt, Homo sapiens
  misc_RNA (1)...(19): siRNA sense strand
gaagaagcuggccaagaac

SEQ ID NO: 855929 - RNA, 19 nt, Homo sapiens
  misc_RNA (1)...(19): siRNA sense strand
ccaagugaagcaacagauc

SEQ ID NO: 855930 - RNA, 19 nt, Homo sapiens
  misc_RNA (1)...(19): siRNA sense strand
ugcagcaccuucuucagau

SEQ ID NO: 855931 - RNA, 19 nt, Homo sapiens
  misc_RNA (1)...(19): siRNA sense strand
gaauaucccaaaaucagaa

SEQ ID NO: 855932 - RNA, 19 nt, Homo sapiens
  misc_RNA (1)...(19): siRNA sense strand
gaguuugagagugaaguuu

SEQ ID NO: 855933 - RNA, 19 nt, Homo sapiens
  misc_RNA (1)...(19): siRNA sense strand
cagaugaaggacagggaaa

SEQ ID NO: 855934 - RNA, 19 nt, Homo sapiens
  misc_RNA (1)...(19): siRNA sense strand
aacacgcaaugauagagaa

SEQ ID NO: 855935 - RNA, 19 nt, Homo sapiens
  misc_RNA (1)...(19): siRNA sense strand
ugacauacauccugggaaa

SEQ ID NO: 855936 - RNA, 19 nt, Homo sapiens
  misc_RNA (1)...(19): siRNA sense strand
ugacaaagagccugacaua

SEQ ID NO: 855937 - RNA, 19 nt, Homo sapiens
  misc_RNA (1)...(19): siRNA sense strand
caaagagccugacauacau

SEQ ID NO: 855938 - RNA, 19 nt, Homo sapiens
  misc_RNA (1)...(19): siRNA sense strand
ugaagaacauggagaagga

SEQ ID NO: 855939 - RNA, 19 nt, Homo sapiens
  misc_RNA (1)...(19): siRNA sense strand
gaccuucacuuccaucaug

SEQ ID NO: 855940 - RNA, 19 nt, Homo sapiens
  misc_RNA (1)...(19): siRNA sense strand
ggacauacccugggaggaa

SEQ ID NO: 855941 - RNA, 19 nt, Homo sapiens
  misc_RNA (1)...(19): siRNA sense strand
ugacagagcuuaacuuccu

SEQ ID NO: 855942 - RNA, 19 nt, Homo sapiens
  misc_RNA (1)...(19): siRNA sense strand
acaaagagccugacauaca

SEQ ID NO: 855943 - RNA, 19 nt, Homo sapiens
  misc_RNA (1)...(19): siRNA sense strand
agaugaagcugcugacaga

SEQ ID NO: 855944 - RNA, 19 nt, Homo sapiens
  misc_RNA (1)...(19): siRNA sense strand
gucaagagauguacaagca

SEQ ID NO: 855945 - RNA, 19 nt, Homo sapiens
  misc_RNA (1)...(19): siRNA sense strand
ccagugcccugcuugagaa

SEQ ID NO: 855946 - RNA, 19 nt, Homo sapiens
  misc_RNA (1)...(19): siRNA sense strand
aggaagaggugacccacua

SEQ ID NO: 855947 - RNA, 19 nt, Homo sapiens
  misc_RNA (1)...(19): siRNA sense strand
ccaagcagcugcacaacag

SEQ ID NO: 855948 - RNA, 19 nt, Homo sapiens
  misc_RNA (1)...(19): siRNA sense strand
gggcugugcuggaggagaa

SEQ ID NO: 855949 - RNA, 19 nt, Homo sapiens
  misc_RNA (1)...(19): siRNA sense strand
ggaaguacuuaaggaaaca

SEQ ID NO: 855950 - RNA, 19 nt, Homo sapiens
  misc_RNA (1)...(19): siRNA sense strand
cgaauacagugaagaugug

SEQ ID NO: 855951 - RNA, 19 nt, Homo sapiens
  misc_RNA (1)...(19): siRNA sense strand
gcacuauaccguugaguuc

SEQ ID NO: 855952 - RNA, 19 nt, Homo sapiens
  misc_RNA (1)...(19): siRNA sense strand
cugaagcccuccagacauu

SEQ ID NO: 855953 - RNA, 19 nt, Homo sapiens
  misc_RNA (1)...(19): siRNA sense strand
gugaggauaugcagaccuu

SEQ ID NO: 855954 - RNA, 19 nt, Homo sapiens
  misc_RNA (1)...(19): siRNA sense strand
aaacagaccagccuugcuu

SEQ ID NO: 855955 - RNA, 19 nt, Homo sapiens
  misc_RNA (1)...(19): siRNA sense strand
gccaacgccugguauguca

SEQ ID NO: 855956 - RNA, 19 nt, Homo sapiens
  misc_RNA (1)...(19): siRNA sense strand
gcgaauacagugaagaugu

SEQ ID NO: 855957 - RNA, 19 nt, Homo sapiens
  misc_RNA (1)...(19): siRNA sense strand
guaccagcaugaagaacau

SEQ ID NO: 855958 - RNA, 19 nt, Homo sapiens
  misc_RNA (1)...(19): siRNA sense strand
gggaaaccaggacacagua

SEQ ID NO: 855959 - RNA, 19 nt, Homo sapiens
  misc_RNA (1)...(19): siRNA sense strand
ucaaggacaagcugacaaa

SEQ ID NO: 855960 - RNA, 19 nt, Homo sapiens
  misc_RNA (1)...(19): siRNA sense strand
gcccagaccacaaggaaga

SEQ ID NO: 855961 - RNA, 19 nt, Homo sapiens
  misc_RNA (1)...(19): siRNA sense strand
gaacauggagaaggaacug

SEQ ID NO: 855962 - RNA, 19 nt, Homo sapiens
  misc_RNA (1)...(19): siRNA sense strand
aggacaagcugacaaagag

SEQ ID NO: 855963 - RNA, 19 nt, Homo sapiens
  misc_RNA (1)...(19): siRNA sense strand
gguggugcgugccuacaau

SEQ ID NO: 855964 - RNA, 19 nt, Homo sapiens
  misc_RNA (1)...(19): siRNA sense strand
gcugacagagcuuaacuuc

SEQ ID NO: 855965 - RNA, 19 nt, Homo sapiens
  misc_RNA (1)...(19): siRNA sense strand
gaaaccaggacacaguaca

SEQ ID NO: 855966 - RNA, 19 nt, Homo sapiens
  misc_RNA (1)...(19): siRNA sense strand
gaggauaugcagaccuuca

SEQ ID NO: 855967 - RNA, 19 nt, Homo sapiens
  misc_RNA (1)...(19): siRNA sense strand
agaccagccuugcuuugug

SEQ ID NO: 855968 - RNA, 19 nt, Homo sapiens
  misc_RNA (1)...(19): siRNA sense strand
caggaaguacuuaaggaaa

SEQ ID NO: 855969 - RNA, 19 nt, Homo sapiens
  misc_RNA (1)...(19): siRNA sense strand
ccaggaaguacuuaaggaa

SEQ ID NO: 855970 - RNA, 19 nt, Homo sapiens
  misc_RNA (1)...(19): siRNA sense strand
gaagaacauggagaaggaa

SEQ ID NO: 855971 - RNA, 19 nt, Homo sapiens
  misc_RNA (1)...(19): siRNA sense strand
ccacuggugcugcccugua

SEQ ID NO: 855972 - RNA, 19 nt, Homo sapiens
  misc_RNA (1)...(19): siRNA sense strand
ggcagagggugaggauaug

SEQ ID NO: 855973 - RNA, 19 nt, Homo sapiens
  misc_RNA (1)...(19): siRNA sense strand
ccacagcgggcacaagauc

SEQ ID NO: 855974 - RNA, 19 nt, Homo sapiens
  misc_RNA (1)...(19): siRNA sense strand
cagcgcaccuuugccuaug

SEQ ID NO: 855975 - RNA, 19 nt, Homo sapiens
  misc_RNA (1)...(19): siRNA sense strand
ccaaggugauguggagcuu

SEQ ID NO: 855976 - RNA, 19 nt, Homo sapiens
  misc_RNA (1)...(19): siRNA sense strand
gcaccuuugccuaugauca

SEQ ID NO: 855977 - RNA, 19 nt, Homo sapiens
  misc_RNA (1)...(19): siRNA sense strand
gauaugcagaccuucacuu

SEQ ID NO: 855978 - RNA, 19 nt, Homo sapiens
  misc_RNA (1)...(19): siRNA sense strand
cccaggaaguacuuaagga

SEQ ID NO: 855979 - RNA, 19 nt, Homo sapiens
  misc_RNA (1)...(19): siRNA sense strand
gcgccaccuucugcaauga

SEQ ID NO: 855980 - RNA, 19 nt, Homo sapiens
  misc_RNA (1)...(19): siRNA sense strand
gcgcaccuuugccuaugau

SEQ ID NO: 855981 - RNA, 19 nt, Homo sapiens
  misc_RNA (1)...(19): siRNA sense strand
gacaugccaacgccuggua

SEQ ID NO: 855982 - RNA, 19 nt, Homo sapiens
  misc_RNA (1)...(19): siRNA sense strand
agucaggcuuugggacaua

SEQ ID NO: 855983 - RNA, 19 nt, Homo sapiens
  misc_RNA (1)...(19): siRNA sense strand
cccagaaggcccagcauga

SEQ ID NO: 855984 - RNA, 19 nt, Homo sapiens
  misc_RNA (1)...(19): siRNA sense strand
accaagggcugcacagagu

SEQ ID NO: 855985 - RNA, 19 nt, Homo sapiens
  misc_RNA (1)...(19): siRNA sense strand
ggauugcccgagccacuga

SEQ ID NO: 855986 - RNA, 19 nt, Homo sapiens
  misc_RNA (1)...(19): siRNA sense strand
gaucacaccagugcucagu

SEQ ID NO: 855987 - RNA, 19 nt, Homo sapiens
  misc_RNA (1)...(19): siRNA sense strand
cccggcaccuggaauacaa

SEQ ID NO: 855988 - RNA, 19 nt, Homo sapiens
  misc_RNA (1)...(19): siRNA sense strand
cccagugugucaagagaug

SEQ ID NO: 855989 - RNA, 19 nt, Homo sapiens
  misc_RNA (1)...(19): siRNA sense strand
gggccagcagggcuacaua

SEQ ID NO: 855990 - RNA, 19 nt, Homo sapiens
  misc_RNA (1)...(19): siRNA sense strand
ucaguaccagcaugaagaa

SEQ ID NO: 855991 - RNA, 19 nt, Homo sapiens
  misc_RNA (1)...(19): siRNA sense strand
ggcacuauaccguugaguu

SEQ ID NO: 855992 - RNA, 19 nt, Homo sapiens
  misc_RNA (1)...(19): siRNA sense strand
aaggacaagcugacaaaga

SEQ ID NO: 855993 - RNA, 19 nt, Homo sapiens
  misc_RNA (1)...(19): siRNA sense strand
cugcuuaagucaggcuuug

SEQ ID NO: 855994 - RNA, 19 nt, Homo sapiens
  misc_RNA (1)...(19): siRNA sense strand
cagcugcacaacaggauug

SEQ ID NO: 855995 - RNA, 19 nt, Homo sapiens
  misc_RNA (1)...(19): siRNA sense strand
ccagcagggcuacauagga

SEQ ID NO: 855996 - RNA, 19 nt, Homo sapiens
  misc_RNA (1)...(19): siRNA sense strand
gaagaggugacccacuacu

SEQ ID NO: 855997 - RNA, 19 nt, Homo sapiens
  misc_RNA (1)...(19): siRNA sense strand
gaaacagaccagccuugcu

SEQ ID NO: 855998 - RNA, 19 nt, Homo sapiens
  misc_RNA (1)...(19): siRNA sense strand
gugacccacuacugcaaga

SEQ ID NO: 855999 - RNA, 19 nt, Homo sapiens
  misc_RNA (1)...(19): siRNA sense strand
augcagaccuucacuucca

SEQ ID NO: 856000 - RNA, 19 nt, Homo sapiens
  misc_RNA (1)...(19): siRNA sense strand
ccagcgcaccuuugccuau

SEQ ID NO: 856001 - RNA, 19 nt, Homo sapiens
  misc_RNA (1)...(19): siRNA sense strand
ugacacccagcgcaccuuu

SEQ ID NO: 856002 - RNA, 19 nt, Homo sapiens
  misc_RNA (1)...(19): siRNA sense strand
gcagcugcacaacaggauu

SEQ ID NO: 856003 - RNA, 19 nt, Homo sapiens
  misc_RNA (1)...(19): siRNA sense strand
aggaaguacuuaaggaaac

SEQ ID NO: 856004 - RNA, 19 nt, Homo sapiens
  misc_RNA (1)...(19): siRNA sense strand
cuacggcgaauacagugaa

SEQ ID NO: 856005 - RNA, 19 nt, Homo sapiens
  misc_RNA (1)...(19): siRNA sense strand
gaagaaaguuguagaguua

SEQ ID NO: 856006 - RNA, 19 nt, Homo sapiens
  misc_RNA (1)...(19): siRNA sense strand
ccaaugaacugaagauuaa

SEQ ID NO: 856007 - RNA, 19 nt, Homo sapiens
  misc_RNA (1)...(19): siRNA sense strand
gauccaagaugcuuucuaa

SEQ ID NO: 856008 - RNA, 19 nt, Homo sapiens
  misc_RNA (1)...(19): siRNA sense strand
gaacacgugucgagacuug

SEQ ID NO: 856009 - RNA, 19 nt, Homo sapiens
  misc_RNA (1)...(19): siRNA sense strand
gaagugagccuccugaaga

SEQ ID NO: 856010 - RNA, 19 nt, Homo sapiens
  misc_RNA (1)...(19): siRNA sense strand
gaaaagcucuucugaguug

SEQ ID NO: 856011 - RNA, 19 nt, Homo sapiens
  misc_RNA (1)...(19): siRNA sense strand
ccaaauaucugagcuuguu

SEQ ID NO: 856012 - RNA, 19 nt, Homo sapiens
  misc_RNA (1)...(19): siRNA sense strand
ggagaagauucgagaaaug

SEQ ID NO: 856013 - RNA, 19 nt, Homo sapiens
  misc_RNA (1)...(19): siRNA sense strand
gcucaugucugucaaguca

SEQ ID NO: 856014 - RNA, 19 nt, Homo sapiens
  misc_RNA (1)...(19): siRNA sense strand
gaaagggccagaaacauga

SEQ ID NO: 856015 - RNA, 19 nt, Homo sapiens
  misc_RNA (1)...(19): siRNA sense strand
ccagauggcugccgaacuu

SEQ ID NO: 856016 - RNA, 19 nt, Homo sapiens
  misc_RNA (1)...(19): siRNA sense strand
caggaaacaugaggaauuu

SEQ ID NO: 856017 - RNA, 19 nt, Homo sapiens
  misc_RNA (1)...(19): siRNA sense strand
gagcaaagaauuacacaug

SEQ ID NO: 856018 - RNA, 19 nt, Homo sapiens
  misc_RNA (1)...(19): siRNA sense strand
cuaaagaagucuccuguca

SEQ ID NO: 856019 - RNA, 19 nt, Homo sapiens
  misc_RNA (1)...(19): siRNA sense strand
ccacagaacaugaggcuaa

SEQ ID NO: 856020 - RNA, 19 nt, Homo sapiens
  misc_RNA (1)...(19): siRNA sense strand
ggaacagacuaaagccauu

SEQ ID NO: 856021 - RNA, 19 nt, Homo sapiens
  misc_RNA (1)...(19): siRNA sense strand
gcaggaaacaugaggaauu

SEQ ID NO: 856022 - RNA, 19 nt, Homo sapiens
  misc_RNA (1)...(19): siRNA sense strand
gaaagcagagaauauguug

SEQ ID NO: 856023 - RNA, 19 nt, Homo sapiens
  misc_RNA (1)...(19): siRNA sense strand
ggaacuagaagaagaauca

SEQ ID NO: 856024 - RNA, 19 nt, Homo sapiens
  misc_RNA (1)...(19): siRNA sense strand
ggaaaacaaugccagaaaa

SEQ ID NO: 856025 - RNA, 19 nt, Homo sapiens
  misc_RNA (1)...(19): siRNA sense strand
ccagaaacaugauagaagu

SEQ ID NO: 856026 - RNA, 19 nt, Homo sapiens
  misc_RNA (1)...(19): siRNA sense strand
agaagaaaguuguagaguu

SEQ ID NO: 856027 - RNA, 19 nt, Homo sapiens
  misc_RNA (1)...(19): siRNA sense strand
cagcagcacuuuccacuuc

SEQ ID NO: 856028 - RNA, 19 nt, Homo sapiens
  misc_RNA (1)...(19): siRNA sense strand
agagaaagcuaaagacaca

SEQ ID NO: 856029 - RNA, 19 nt, Homo sapiens
  misc_RNA (1)...(19): siRNA sense strand
gccuugcucuuccugauua

SEQ ID NO: 856030 - RNA, 19 nt, Homo sapiens
  misc_RNA (1)...(19): siRNA sense strand
gcaaagaauuacacaugag

SEQ ID NO: 856031 - RNA, 19 nt, Homo sapiens
  misc_RNA (1)...(19): siRNA sense strand
gagaccaacuggagaagau

SEQ ID NO: 856032 - RNA, 19 nt, Homo sapiens
  misc_RNA (1)...(19): siRNA sense strand
caaggagaaccaggaauua

SEQ ID NO: 856033 - RNA, 19 nt, Homo sapiens
  misc_RNA (1)...(19): siRNA sense strand
aaagaagucuccugucaag

SEQ ID NO: 856034 - RNA, 19 nt, Homo sapiens
  misc_RNA (1)...(19): siRNA sense strand
uggagaggcugcagaaaga

SEQ ID NO: 856035 - RNA, 19 nt, Homo sapiens
  misc_RNA (1)...(19): siRNA sense strand
ggaaugacaaggcaucaga

SEQ ID NO: 856036 - RNA, 19 nt, Homo sapiens
  misc_RNA (1)...(19): siRNA sense strand
uggagaagaugaaggagaa

SEQ ID NO: 856037 - RNA, 19 nt, Homo sapiens
  misc_RNA (1)...(19): siRNA sense strand
gcacggccuuggugguuga

SEQ ID NO: 856038 - RNA, 19 nt, Homo sapiens
  misc_RNA (1)...(19): siRNA sense strand
cgaggaaacuuacgaucau

SEQ ID NO: 856039 - RNA, 19 nt, Homo sapiens
  misc_RNA (1)...(19): siRNA sense strand
aaagggaaguuaagaucuu

SEQ ID NO: 856040 - RNA, 19 nt, Homo sapiens
  misc_RNA (1)...(19): siRNA sense strand
gaaacuuacgaucaucuuu

SEQ ID NO: 856041 - RNA, 19 nt, Homo sapiens
  misc_RNA (1)...(19): siRNA sense strand
gcacccacaaggccauuua

SEQ ID NO: 856042 - RNA, 19 nt, Homo sapiens
  misc_RNA (1)...(19): siRNA sense strand
gaaggagaaagcugagaaa

SEQ ID NO: 856043 - RNA, 19 nt, Homo sapiens
  misc_RNA (1)...(19): siRNA sense strand
uuagagaccugcgcaaaga

SEQ ID NO: 856044 - RNA, 19 nt, Homo sapiens
  misc_RNA (1)...(19): siRNA sense strand
ucaggaacuugcagaagaa

SEQ ID NO: 856045 - RNA, 19 nt, Homo sapiens
  misc_RNA (1)...(19): siRNA sense strand
caucucuccuuaccucuuu

SEQ ID NO: 856046 - RNA, 19 nt, Homo sapiens
  misc_RNA (1)...(19): siRNA sense strand
aaacaaauccagagaccaa

SEQ ID NO: 856047 - RNA, 19 nt, Homo sapiens
  misc_RNA (1)...(19): siRNA sense strand
agccaguacuucucauuua

SEQ ID NO: 856048 - RNA, 19 nt, Homo sapiens
  misc_RNA (1)...(19): siRNA sense strand
uaaagccauugaagaucua

SEQ ID NO: 856049 - RNA, 19 nt, Homo sapiens
  misc_RNA (1)...(19): siRNA sense strand
ucaaggagaaccaggaauu

SEQ ID NO: 856050 - RNA, 19 nt, Homo sapiens
  misc_RNA (1)...(19): siRNA sense strand
gcagagaaagcuaaagaca

SEQ ID NO: 856051 - RNA, 19 nt, Homo sapiens
  misc_RNA (1)...(19): siRNA sense strand
cgagacaacuugaauuuug

SEQ ID NO: 856052 - RNA, 19 nt, Homo sapiens
  misc_RNA (1)...(19): siRNA sense strand
guacugaagagaaagagaa

SEQ ID NO: 856053 - RNA, 19 nt, Homo sapiens
  misc_RNA (1)...(19): siRNA sense strand
ucaugaggcuggcuucaga

SEQ ID NO: 856054 - RNA, 19 nt, Homo sapiens
  misc_RNA (1)...(19): siRNA sense strand
gaacugaaagcugaaaugg

SEQ ID NO: 856055 - RNA, 19 nt, Homo sapiens
  misc_RNA (1)...(19): siRNA sense strand
gggagcaguuaaaccacua

SEQ ID NO: 856056 - RNA, 19 nt, Homo sapiens
  misc_RNA (1)...(19): siRNA sense strand
ggaagaagcagaaaagaga

SEQ ID NO: 856057 - RNA, 19 nt, Homo sapiens
  misc_RNA (1)...(19): siRNA sense strand
cuaaagccauugaagaucu

SEQ ID NO: 856058 - RNA, 19 nt, Homo sapiens
  misc_RNA (1)...(19): siRNA sense strand
gggaaaggagucuggguuu

SEQ ID NO: 856059 - RNA, 19 nt, Homo sapiens
  misc_RNA (1)...(19): siRNA sense strand
ucaaagaauugcaggaaac

SEQ ID NO: 856060 - RNA, 19 nt, Homo sapiens
  misc_RNA (1)...(19): siRNA sense strand
gcagcacuuuccacuucua

SEQ ID NO: 856061 - RNA, 19 nt, Homo sapiens
  misc_RNA (1)...(19): siRNA sense strand
gaaccaggaauuaaagaag

SEQ ID NO: 856062 - RNA, 19 nt, Homo sapiens
  misc_RNA (1)...(19): siRNA sense strand
caucagcaucacuuuguua

SEQ ID NO: 856063 - RNA, 19 nt, Homo sapiens
  misc_RNA (1)...(19): siRNA sense strand
aaagauugguccauucaca

SEQ ID NO: 856064 - RNA, 19 nt, Homo sapiens
  misc_RNA (1)...(19): siRNA sense strand
gaacagacuaaagccauug

SEQ ID NO: 856065 - RNA, 19 nt, Homo sapiens
  misc_RNA (1)...(19): siRNA sense strand
ccagaaagcagagaauaug

SEQ ID NO: 856066 - RNA, 19 nt, Homo sapiens
  misc_RNA (1)...(19): siRNA sense strand
ggucugggaugccucaaag

SEQ ID NO: 856067 - RNA, 19 nt, Homo sapiens
  misc_RNA (1)...(19): siRNA sense strand
gaaagggaaguuaagaucu

SEQ ID NO: 856068 - RNA, 19 nt, Homo sapiens
  misc_RNA (1)...(19): siRNA sense strand
agaagucuccugucaagaa

SEQ ID NO: 856069 - RNA, 19 nt, Homo sapiens
  misc_RNA (1)...(19): siRNA sense strand
gcagagaaacgaucaugag

SEQ ID NO: 856070 - RNA, 19 nt, Homo sapiens
  misc_RNA (1)...(19): siRNA sense strand
ugaagagacuauaaauguc

SEQ ID NO: 856071 - RNA, 19 nt, Homo sapiens
  misc_RNA (1)...(19): siRNA sense strand
cuauaaauguccaugagau

SEQ ID NO: 856072 - RNA, 19 nt, Homo sapiens
  misc_RNA (1)...(19): siRNA sense strand
gguaaccagugaaaugaag

SEQ ID NO: 856073 - RNA, 19 nt, Homo sapiens
  misc_RNA (1)...(19): siRNA sense strand
aaagaaagggccagaaaca

SEQ ID NO: 856074 - RNA, 19 nt, Homo sapiens
  misc_RNA (1)...(19): siRNA sense strand
gacuaaagccauugaagau

SEQ ID NO: 856075 - RNA, 19 nt, Homo sapiens
  misc_RNA (1)...(19): siRNA sense strand
cgacaccaaugaacugaag

SEQ ID NO: 856076 - RNA, 19 nt, Homo sapiens
  misc_RNA (1)...(19): siRNA sense strand
caagaccuccgauccaaga

SEQ ID NO: 856077 - RNA, 19 nt, Homo sapiens
  misc_RNA (1)...(19): siRNA sense strand
ggagaaccaggaauuaaag

SEQ ID NO: 856078 - RNA, 19 nt, Homo sapiens
  misc_RNA (1)...(19): siRNA sense strand
uuaaaccacuaucggaaug

SEQ ID NO: 856079 - RNA, 19 nt, Homo sapiens
  misc_RNA (1)...(19): siRNA sense strand
gcccacaauuugcagagaa

SEQ ID NO: 856080 - RNA, 19 nt, Homo sapiens
  misc_RNA (1)...(19): siRNA sense strand
gagcagcugguucgucuug

SEQ ID NO: 856081 - RNA, 19 nt, Homo sapiens
  misc_RNA (1)...(19): siRNA sense strand
gccaguacuucucauuuag

SEQ ID NO: 856082 - RNA, 19 nt, Homo sapiens
  misc_RNA (1)...(19): siRNA sense strand
gaagucuccugucaagaac

SEQ ID NO: 856083 - RNA, 19 nt, Homo sapiens
  misc_RNA (1)...(19): siRNA sense strand
gaagaaucagcagcacuuu

SEQ ID NO: 856084 - RNA, 19 nt, Homo sapiens
  misc_RNA (1)...(19): siRNA sense strand
aaacaugauagaaguggua

SEQ ID NO: 856085 - RNA, 19 nt, Homo sapiens
  misc_RNA (1)...(19): siRNA sense strand
agaaagggccagaaacaug

SEQ ID NO: 856086 - RNA, 19 nt, Homo sapiens
  misc_RNA (1)...(19): siRNA sense strand
caaacuggccgacaccaau

SEQ ID NO: 856087 - RNA, 19 nt, Homo sapiens
  misc_RNA (1)...(19): siRNA sense strand
ucacaaagccaguacuucu

SEQ ID NO: 856088 - RNA, 19 nt, Homo sapiens
  misc_RNA (1)...(19): siRNA sense strand
gcagucacaaccucacaaa

SEQ ID NO: 856089 - RNA, 19 nt, Homo sapiens
  misc_RNA (1)...(19): siRNA sense strand
gaaaaugaauucgugaaag

SEQ ID NO: 856090 - RNA, 19 nt, Homo sapiens
  misc_RNA (1)...(19): siRNA sense strand
aaccaggaauuaaagaaga

SEQ ID NO: 856091 - RNA, 19 nt, Homo sapiens
  misc_RNA (1)...(19): siRNA sense strand
agacuaaagccauugaaga

SEQ ID NO: 856092 - RNA, 19 nt, Homo sapiens
  misc_RNA (1)...(19): siRNA sense strand
cuaaagacacagaaagaga

SEQ ID NO: 856093 - RNA, 19 nt, Homo sapiens
  misc_RNA (1)...(19): siRNA sense strand
uaaagaagucuccugucaa

SEQ ID NO: 856094 - RNA, 19 nt, Homo sapiens
  misc_RNA (1)...(19): siRNA sense strand
gacuauaaauguccaugag

SEQ ID NO: 856095 - RNA, 19 nt, Homo sapiens
  misc_RNA (1)...(19): siRNA sense strand
auuuacagcuucuucauug

SEQ ID NO: 856096 - RNA, 19 nt, Homo sapiens
  misc_RNA (1)...(19): siRNA sense strand
agcaaagaauuacacauga

SEQ ID NO: 856097 - RNA, 19 nt, Homo sapiens
  misc_RNA (1)...(19): siRNA sense strand
aaacaugaggaauuucuga

SEQ ID NO: 856098 - RNA, 19 nt, Homo sapiens
  misc_RNA (1)...(19): siRNA sense strand
acaaggccauuuacagcuu

SEQ ID NO: 856099 - RNA, 19 nt, Homo sapiens
  misc_RNA (1)...(19): siRNA sense strand
gcuaaggagaauaaagaaa

SEQ ID NO: 856100 - RNA, 19 nt, Homo sapiens
  misc_RNA (1)...(19): siRNA sense strand
ggacugcaccagccauauc

SEQ ID NO: 856101 - RNA, 19 nt, Homo sapiens
  misc_RNA (1)...(19): siRNA sense strand
aaaugaaguuggaccagau

SEQ ID NO: 856102 - RNA, 19 nt, Homo sapiens
  misc_RNA (1)...(19): siRNA sense strand
gaaaaucgcagcccuccuu

SEQ ID NO: 856103 - RNA, 19 nt, Homo sapiens
  misc_RNA (1)...(19): siRNA sense strand
cuugaaagauugguccauu

SEQ ID NO: 856104 - RNA, 19 nt, Homo sapiens
  misc_RNA (1)...(19): siRNA sense strand
caagagaggcacccacaag

SEQ ID NO: 856105 - RNA, 19 nt, Homo sapiens
  misc_RNA (1)...(19): siRNA sense strand
gaagaucccucgauuguaa

SEQ ID NO: 856106 - RNA, 19 nt, Homo sapiens
  misc_RNA (1)...(19): siRNA sense strand
ggaaagcgguggcccagua

SEQ ID NO: 856107 - RNA, 19 nt, Homo sapiens
  misc_RNA (1)...(19): siRNA sense strand
gaauauaacuuuccacagu

SEQ ID NO: 856108 - RNA, 19 nt, Homo sapiens
  misc_RNA (1)...(19): siRNA sense strand
gauguuauguugcagguua

SEQ ID NO: 856109 - RNA, 19 nt, Homo sapiens
  misc_RNA (1)...(19): siRNA sense strand
gaacaaauaagccuacaaa

SEQ ID NO: 856110 - RNA, 19 nt, Homo sapiens
  misc_RNA (1)...(19): siRNA sense strand
cuacagaucuuaaaggaaa

SEQ ID NO: 856111 - RNA, 19 nt, Homo sapiens
  misc_RNA (1)...(19): siRNA sense strand
gauaauagagucauccuuu

SEQ ID NO: 856112 - RNA, 19 nt, Homo sapiens
  misc_RNA (1)...(19): siRNA sense strand
aaacguuucucucuugaua

SEQ ID NO: 856113 - RNA, 19 nt, Homo sapiens
  misc_RNA (1)...(19): siRNA sense strand
gaaaugcucguguggauga

SEQ ID NO: 856114 - RNA, 19 nt, Homo sapiens
  misc_RNA (1)...(19): siRNA sense strand
gaagaucuguguuacuauc

SEQ ID NO: 856115 - RNA, 19 nt, Homo sapiens
  misc_RNA (1)...(19): siRNA sense strand
gagaguagggcaaaccuua

SEQ ID NO: 856116 - RNA, 19 nt, Homo sapiens
  misc_RNA (1)...(19): siRNA sense strand
uaaaauagcucagagagua

SEQ ID NO: 856117 - RNA, 19 nt, Homo sapiens
  misc_RNA (1)...(19): siRNA sense strand
ccaaggaguuucaacaaga

SEQ ID NO: 856118 - RNA, 19 nt, Homo sapiens
  misc_RNA (1)...(19): siRNA sense strand
aaggucaucuuucaacuua

SEQ ID NO: 856119 - RNA, 19 nt, Homo sapiens
  misc_RNA (1)...(19): siRNA sense strand
ggagucugcuuuauugcua

SEQ ID NO: 856120 - RNA, 19 nt, Homo sapiens
  misc_RNA (1)...(19): siRNA sense strand
cuaaagaccucuacaaacu

SEQ ID NO: 856121 - RNA, 19 nt, Homo sapiens
  misc_RNA (1)...(19): siRNA sense strand
guacagagucuccugauga

SEQ ID NO: 856122 - RNA, 19 nt, Homo sapiens
  misc_RNA (1)...(19): siRNA sense strand
gaaacucucuucaccugau

SEQ ID NO: 856123 - RNA, 19 nt, Homo sapiens
  misc_RNA (1)...(19): siRNA sense strand
ccacauggcacauaaaguu

SEQ ID NO: 856124 - RNA, 19 nt, Homo sapiens
  misc_RNA (1)...(19): siRNA sense strand
cauggagucugcuuuauug

SEQ ID NO: 856125 - RNA, 19 nt, Homo sapiens
  misc_RNA (1)...(19): siRNA sense strand
uaugaaggauguuauguug

SEQ ID NO: 856126 - RNA, 19 nt, Homo sapiens
  misc_RNA (1)...(19): siRNA sense strand
ugagaguucugcugaauug

SEQ ID NO: 856127 - RNA, 19 nt, Homo sapiens
  misc_RNA (1)...(19): siRNA sense strand
gaacgauauuggaacaaau

SEQ ID NO: 856128 - RNA, 19 nt, Homo sapiens
  misc_RNA (1)...(19): siRNA sense strand
gcaacugugugauaacaau

SEQ ID NO: 856129 - RNA, 19 nt, Homo sapiens
  misc_RNA (1)...(19): siRNA sense strand
gaucguggaugcuauuuac

SEQ ID NO: 856130 - RNA, 19 nt, Homo sapiens
  misc_RNA (1)...(19): siRNA sense strand
acucaggccuguuaaguaa

SEQ ID NO: 856131 - RNA, 19 nt, Homo sapiens
  misc_RNA (1)...(19): siRNA sense strand
gcaguuaugaguacauuga

SEQ ID NO: 856132 - RNA, 19 nt, Homo sapiens
  misc_RNA (1)...(19): siRNA sense strand
cugaagaucuguguuacua

SEQ ID NO: 856133 - RNA, 19 nt, Homo sapiens
  misc_RNA (1)...(19): siRNA sense strand
ccaugaagaucccucgauu

SEQ ID NO: 856134 - RNA, 19 nt, Homo sapiens
  misc_RNA (1)...(19): siRNA sense strand
gaauuguucuggacugcaa

SEQ ID NO: 856135 - RNA, 19 nt, Homo sapiens
  misc_RNA (1)...(19): siRNA sense strand
ggucaucuuucaacuuaug

SEQ ID NO: 856136 - RNA, 19 nt, Homo sapiens
  misc_RNA (1)...(19): siRNA sense strand
gcauccauacugauauuua

SEQ ID NO: 856137 - RNA, 19 nt, Homo sapiens
  misc_RNA (1)...(19): siRNA sense strand
gagcaguuaugaguacauu

SEQ ID NO: 856138 - RNA, 19 nt, Homo sapiens
  misc_RNA (1)...(19): siRNA sense strand
cagcauccauacugauauu

SEQ ID NO: 856139 - RNA, 19 nt, Homo sapiens
  misc_RNA (1)...(19): siRNA sense strand
uugaggacauggagaauuu

SEQ ID NO: 856140 - RNA, 19 nt, Homo sapiens
  misc_RNA (1)...(19): siRNA sense strand
gcaagacagugugaaaugg

SEQ ID NO: 856141 - RNA, 19 nt, Homo sapiens
  misc_RNA (1)...(19): siRNA sense strand
ggacauggagaauuuauac

SEQ ID NO: 856142 - RNA, 19 nt, Homo sapiens
  misc_RNA (1)...(19): siRNA sense strand
uaucauggagucugcuuua

SEQ ID NO: 856143 - RNA, 19 nt, Homo sapiens
  misc_RNA (1)...(19): siRNA sense strand
guguuaagauuuacaguca

SEQ ID NO: 856144 - RNA, 19 nt, Homo sapiens
  misc_RNA (1)...(19): siRNA sense strand
aaagaguagucuccagauu

SEQ ID NO: 856145 - RNA, 19 nt, Homo sapiens
  misc_RNA (1)...(19): siRNA sense strand
gagcugaaaccgauacuca

SEQ ID NO: 856146 - RNA, 19 nt, Homo sapiens
  misc_RNA (1)...(19): siRNA sense strand
ugaaggauguuauguugca

SEQ ID NO: 856147 - RNA, 19 nt, Homo sapiens
  misc_RNA (1)...(19): siRNA sense strand
ugaaaccgauacucaagga

SEQ ID NO: 856148 - RNA, 19 nt, Homo sapiens
  misc_RNA (1)...(19): siRNA sense strand
gaaauggaggacaccguaa

SEQ ID NO: 856149 - RNA, 19 nt, Homo sapiens
  misc_RNA (1)...(19): siRNA sense strand
ccuauuggaugcauacuca

SEQ ID NO: 856150 - RNA, 19 nt, Homo sapiens
  misc_RNA (1)...(19): siRNA sense strand
cuacaacagugagcugaaa

SEQ ID NO: 856151 - RNA, 19 nt, Homo sapiens
  misc_RNA (1)...(19): siRNA sense strand
acaauuguaugaaggaugu

SEQ ID NO: 856152 - RNA, 19 nt, Homo sapiens
  misc_RNA (1)...(19): siRNA sense strand
ggaauuucaugccgagaag

SEQ ID NO: 856153 - RNA, 19 nt, Homo sapiens
  misc_RNA (1)...(19): siRNA sense strand
uaaagaccucuacaaacua

SEQ ID NO: 856154 - RNA, 19 nt, Homo sapiens
  misc_RNA (1)...(19): siRNA sense strand
gaaggucaucuuucaacuu

SEQ ID NO: 856155 - RNA, 19 nt, Homo sapiens
  misc_RNA (1)...(19): siRNA sense strand
ucaacaagacgaaaguaaa

SEQ ID NO: 856156 - RNA, 19 nt, Homo sapiens
  misc_RNA (1)...(19): siRNA sense strand
uuacgagcuuggugucuaa

SEQ ID NO: 856157 - RNA, 19 nt, Homo sapiens
  misc_RNA (1)...(19): siRNA sense strand
cuaaaacucucagugaaua

SEQ ID NO: 856158 - RNA, 19 nt, Homo sapiens
  misc_RNA (1)...(19): siRNA sense strand
ucagaacgauauuggaaca

SEQ ID NO: 856159 - RNA, 19 nt, Homo sapiens
  misc_RNA (1)...(19): siRNA sense strand
cuacaaacuacagaucuua

SEQ ID NO: 856160 - RNA, 19 nt, Homo sapiens
  misc_RNA (1)...(19): siRNA sense strand
gaucuguguuacuaucaug

SEQ ID NO: 856161 - RNA, 19 nt, Homo sapiens
  misc_RNA (1)...(19): siRNA sense strand
agaacgauauuggaacaaa

SEQ ID NO: 856162 - RNA, 19 nt, Homo sapiens
  misc_RNA (1)...(19): siRNA sense strand
gaguucugcugaauuguuc

SEQ ID NO: 856163 - RNA, 19 nt, Homo sapiens
  misc_RNA (1)...(19): siRNA sense strand
ggcaccacauggcacauaa

SEQ ID NO: 856164 - RNA, 19 nt, Homo sapiens
  misc_RNA (1)...(19): siRNA sense strand
uacagagucuccugaugaa

SEQ ID NO: 856165 - RNA, 19 nt, Homo sapiens
  misc_RNA (1)...(19): siRNA sense strand
ucucuucaccugaugauaa

SEQ ID NO: 856166 - RNA, 19 nt, Homo sapiens
  misc_RNA (1)...(19): siRNA sense strand
gcaguuugaaucucaguug

SEQ ID NO: 856167 - RNA, 19 nt, Homo sapiens
  misc_RNA (1)...(19): siRNA sense strand
ucaaggacagggcuuugua

SEQ ID NO: 856168 - RNA, 19 nt, Homo sapiens
  misc_RNA (1)...(19): siRNA sense strand
uuaccaacuugaugccuuu

SEQ ID NO: 856169 - RNA, 19 nt, Homo sapiens
  misc_RNA (1)...(19): siRNA sense strand
guuaagauuuacagucaca

SEQ ID NO: 856170 - RNA, 19 nt, Homo sapiens
  misc_RNA (1)...(19): siRNA sense strand
cgagcuuggugucuaaaga

SEQ ID NO: 856171 - RNA, 19 nt, Homo sapiens
  misc_RNA (1)...(19): siRNA sense strand
auaauagagucauccuuug

SEQ ID NO: 856172 - RNA, 19 nt, Homo sapiens
  misc_RNA (1)...(19): siRNA sense strand
ugacgacucuuauguucca

SEQ ID NO: 856173 - RNA, 19 nt, Homo sapiens
  misc_RNA (1)...(19): siRNA sense strand
uguugcagguuaucacuuu

SEQ ID NO: 856174 - RNA, 19 nt, Homo sapiens
  misc_RNA (1)...(19): siRNA sense strand
guaugaaggauguuauguu

SEQ ID NO: 856175 - RNA, 19 nt, Homo sapiens
  misc_RNA (1)...(19): siRNA sense strand
gaaugugucaccuccucua

SEQ ID NO: 856176 - RNA, 19 nt, Homo sapiens
  misc_RNA (1)...(19): siRNA sense strand
ucaggccuguuaaguaaug

SEQ ID NO: 856177 - RNA, 19 nt, Homo sapiens
  misc_RNA (1)...(19): siRNA sense strand
gaaagcgguggcccaguau

SEQ ID NO: 856178 - RNA, 19 nt, Homo sapiens
  misc_RNA (1)...(19): siRNA sense strand
aaagaccucuacaaacuac

SEQ ID NO: 856179 - RNA, 19 nt, Homo sapiens
  misc_RNA (1)...(19): siRNA sense strand
cggagacccugaaguuauc

SEQ ID NO: 856180 - RNA, 19 nt, Homo sapiens
  misc_RNA (1)...(19): siRNA sense strand
gagucugcuuuauugcuaa

SEQ ID NO: 856181 - RNA, 19 nt, Homo sapiens
  misc_RNA (1)...(19): siRNA sense strand
uaaaguuaacagccuauug

SEQ ID NO: 856182 - RNA, 19 nt, Homo sapiens
  misc_RNA (1)...(19): siRNA sense strand
gguuaucacuuuguugaca

SEQ ID NO: 856183 - RNA, 19 nt, Homo sapiens
  misc_RNA (1)...(19): siRNA sense strand
cagguuaucacuuuguuga

SEQ ID NO: 856184 - RNA, 19 nt, Homo sapiens
  misc_RNA (1)...(19): siRNA sense strand
caacaagacgaaaguaaaa

SEQ ID NO: 856185 - RNA, 19 nt, Homo sapiens
  misc_RNA (1)...(19): siRNA sense strand
gcacggugucagaacgaua

SEQ ID NO: 856186 - RNA, 19 nt, Homo sapiens
  misc_RNA (1)...(19): siRNA sense strand
agucauagccuccaguuuc

SEQ ID NO: 856187 - RNA, 19 nt, Homo sapiens
  misc_RNA (1)...(19): siRNA sense strand
cacauggcacauaaaguua

SEQ ID NO: 856188 - RNA, 19 nt, Homo sapiens
  misc_RNA (1)...(19): siRNA sense strand
acagguggauauuacucua

SEQ ID NO: 856189 - RNA, 19 nt, Homo sapiens
  misc_RNA (1)...(19): siRNA sense strand
ucuuucaacuuauggacua

SEQ ID NO: 856190 - RNA, 19 nt, Homo sapiens
  misc_RNA (1)...(19): siRNA sense strand
gcucagagaguagggcaaa

SEQ ID NO: 856191 - RNA, 19 nt, Homo sapiens
  misc_RNA (1)...(19): siRNA sense strand
agaguagucuccagauucu

SEQ ID NO: 856192 - RNA, 19 nt, Homo sapiens
  misc_RNA (1)...(19): siRNA sense strand
ggacugcaacagguggaua

SEQ ID NO: 856193 - RNA, 19 nt, Homo sapiens
  misc_RNA (1)...(19): siRNA sense strand
uaagaucguggaugcuauu

SEQ ID NO: 856194 - RNA, 19 nt, Homo sapiens
  misc_RNA (1)...(19): siRNA sense strand
caguuugaaucucaguuga

SEQ ID NO: 856195 - RNA, 19 nt, Homo sapiens
  misc_RNA (1)...(19): siRNA sense strand
gagagaauaauggugauca

SEQ ID NO: 856196 - RNA, 19 nt, Homo sapiens
  misc_RNA (1)...(19): siRNA sense strand
acccugaaguuaucucuau

SEQ ID NO: 856197 - RNA, 19 nt, Homo sapiens
  misc_RNA (1)...(19): siRNA sense strand
gggaccaguuaucugaaga

SEQ ID NO: 856198 - RNA, 19 nt, Homo sapiens
  misc_RNA (1)...(19): siRNA sense strand
ccgagaaggucaccauggu

SEQ ID NO: 856199 - RNA, 19 nt, Homo sapiens
  misc_RNA (1)...(19): siRNA sense strand
caaggaguuucaacaagac

SEQ ID NO: 856200 - RNA, 19 nt, Homo sapiens
  misc_RNA (1)...(19): siRNA sense strand
ccggagacccugaaguuau

SEQ ID NO: 856201 - RNA, 19 nt, Homo sapiens
  misc_RNA (1)...(19): siRNA sense strand
ucauggagucugcuuuauu

SEQ ID NO: 856202 - RNA, 19 nt, Homo sapiens
  misc_RNA (1)...(19): siRNA sense strand
cuaagaucguggaugcuau

SEQ ID NO: 856203 - RNA, 19 nt, Homo sapiens
  misc_RNA (1)...(19): siRNA sense strand
cauccauacugauauuuac

SEQ ID NO: 856204 - RNA, 19 nt, Homo sapiens
  misc_RNA (1)...(19): siRNA sense strand
cuugcugacugacuuugua

SEQ ID NO: 856205 - RNA, 19 nt, Homo sapiens
  misc_RNA (1)...(19): siRNA sense strand
gacuuuacauggagagaua

SEQ ID NO: 856206 - RNA, 19 nt, Homo sapiens
  misc_RNA (1)...(19): siRNA sense strand
aaagucaggugaagaaaug

SEQ ID NO: 856207 - RNA, 19 nt, Homo sapiens
  misc_RNA (1)...(19): siRNA sense strand
ucacuugacuuuacaugga

SEQ ID NO: 856208 - RNA, 19 nt, Homo sapiens
  misc_RNA (1)...(19): siRNA sense strand
ccaaccaacuuugaacuug

SEQ ID NO: 856209 - RNA, 19 nt, Homo sapiens
  misc_RNA (1)...(19): siRNA sense strand
cagccgaugugccacuaua

SEQ ID NO: 856210 - RNA, 19 nt, Homo sapiens
  misc_RNA (1)...(19): siRNA sense strand
caaccaacuuugaacuugu

SEQ ID NO: 856211 - RNA, 19 nt, Homo sapiens
  misc_RNA (1)...(19): siRNA sense strand
gauacugcuccaggaauua

SEQ ID NO: 856212 - RNA, 19 nt, Homo sapiens
  misc_RNA (1)...(19): siRNA sense strand
gccaaagucaggugaagaa

SEQ ID NO: 856213 - RNA, 19 nt, Homo sapiens
  misc_RNA (1)...(19): siRNA sense strand
agauacugcuccaggaauu

SEQ ID NO: 856214 - RNA, 19 nt, Homo sapiens
  misc_RNA (1)...(19): siRNA sense strand
caaagucaggugaagaaau

SEQ ID NO: 856215 - RNA, 19 nt, Homo sapiens
  misc_RNA (1)...(19): siRNA sense strand
ccaggaauuacccaaauga

SEQ ID NO: 856216 - RNA, 19 nt, Homo sapiens
  misc_RNA (1)...(19): siRNA sense strand
gagccaaagucaggugaag

SEQ ID NO: 856217 - RNA, 19 nt, Homo sapiens
  misc_RNA (1)...(19): siRNA sense strand
gaagaaaugggguuauugu

SEQ ID NO: 856218 - RNA, 19 nt, Homo sapiens
  misc_RNA (1)...(19): siRNA sense strand
gcagacacaacucuaaggu

SEQ ID NO: 856219 - RNA, 19 nt, Homo sapiens
  misc_RNA (1)...(19): siRNA sense strand
gagauacugcuccaggaau

SEQ ID NO: 856220 - RNA, 19 nt, Homo sapiens
  misc_RNA (1)...(19): siRNA sense strand
aaccaacuuugaacuuguu

SEQ ID NO: 856221 - RNA, 19 nt, Homo sapiens
  misc_RNA (1)...(19): siRNA sense strand
uugccuggcugcccucauu

SEQ ID NO: 856222 - RNA, 19 nt, Homo sapiens
  misc_RNA (1)...(19): siRNA sense strand
gugaagaaaugggguuauu

SEQ ID NO: 856223 - RNA, 19 nt, Homo sapiens
  misc_RNA (1)...(19): siRNA sense strand
gcuccaggaauuacccaaa

SEQ ID NO: 856224 - RNA, 19 nt, Homo sapiens
  misc_RNA (1)...(19): siRNA sense strand
cugguucuguuugaaauug

SEQ ID NO: 856225 - RNA, 19 nt, Homo sapiens
  misc_RNA (1)...(19): siRNA sense strand
cuccaggaauuacccaaau

SEQ ID NO: 856226 - RNA, 19 nt, Homo sapiens
  misc_RNA (1)...(19): siRNA sense strand
ucacuagcccagccgaugu

SEQ ID NO: 856227 - RNA, 19 nt, Homo sapiens
  misc_RNA (1)...(19): siRNA sense strand
gcuuuggugcucuccauga

SEQ ID NO: 856228 - RNA, 19 nt, Homo sapiens
  misc_RNA (1)...(19): siRNA sense strand
uccaggaauuacccaaaug

SEQ ID NO: 856229 - RNA, 19 nt, Homo sapiens
  misc_RNA (1)...(19): siRNA sense strand
ggucagaauacaggccaaa

SEQ ID NO: 856230 - RNA, 19 nt, Homo sapiens
  misc_RNA (1)...(19): siRNA sense strand
ccaaagucaggugaagaaa

SEQ ID NO: 856231 - RNA, 19 nt, Homo sapiens
  misc_RNA (1)...(19): siRNA sense strand
gcaaggccucugcuuuggu

SEQ ID NO: 856232 - RNA, 19 nt, Homo sapiens
  misc_RNA (1)...(19): siRNA sense strand
caagacaacuggccugaga

SEQ ID NO: 856233 - RNA, 19 nt, Homo sapiens
  misc_RNA (1)...(19): siRNA sense strand
ggacaaacaaagugggaaa

SEQ ID NO: 856234 - RNA, 19 nt, Homo sapiens
  misc_RNA (1)...(19): siRNA sense strand
gaagggagagccugcaaag

SEQ ID NO: 856235 - RNA, 19 nt, Homo sapiens
  misc_RNA (1)...(19): siRNA sense strand
ggaagggagagccugcaaa

SEQ ID NO: 856236 - RNA, 19 nt, Homo sapiens
  misc_RNA (1)...(19): siRNA sense strand
gcagcgugguggucaacau

SEQ ID NO: 856237 - RNA, 19 nt, Homo sapiens
  misc_RNA (1)...(19): siRNA sense strand
caaacaaagugggaaaaug

SEQ ID NO: 856238 - RNA, 19 nt, Homo sapiens
  misc_RNA (1)...(19): siRNA sense strand
cagaugcugcggaccauug

SEQ ID NO: 856239 - RNA, 19 nt, Homo sapiens
  misc_RNA (1)...(19): siRNA sense strand
cccaagcccuggccauucu

SEQ ID NO: 856240 - RNA, 19 nt, Homo sapiens
  misc_RNA (1)...(19): siRNA sense strand
agacaacuggccugagaug

SEQ ID NO: 856241 - RNA, 19 nt, Homo sapiens
  misc_RNA (1)...(19): siRNA sense strand
ccacacacuuugggccuaa

SEQ ID NO: 856242 - RNA, 19 nt, Homo sapiens
  misc_RNA (1)...(19): siRNA sense strand
gcggggagcuggacaagaa

SEQ ID NO: 856243 - RNA, 19 nt, Homo sapiens
  misc_RNA (1)...(19): siRNA sense strand
gagcuggacgccaagaaga

SEQ ID NO: 856244 - RNA, 19 nt, Homo sapiens
  misc_RNA (1)...(19): siRNA sense strand
gccacccgcucuacaccua

SEQ ID NO: 856245 - RNA, 19 nt, Homo sapiens
  misc_RNA (1)...(19): siRNA sense strand
ggacagagacuagcuucag

SEQ ID NO: 856246 - RNA, 19 nt, Homo sapiens
  misc_RNA (1)...(19): siRNA sense strand
guucgugccuggccuggau

SEQ ID NO: 856247 - RNA, 19 nt, Homo sapiens
  misc_RNA (1)...(19): siRNA sense strand
ccuauugcuugggagguua

SEQ ID NO: 856248 - RNA, 19 nt, Homo sapiens
  misc_RNA (1)...(19): siRNA sense strand
ccacagccggacccuacua

SEQ ID NO: 856249 - RNA, 19 nt, Homo sapiens
  misc_RNA (1)...(19): siRNA sense strand
cagccggacccuacuauuc

SEQ ID NO: 856250 - RNA, 19 nt, Homo sapiens
  misc_RNA (1)...(19): siRNA sense strand
gccggugucucccuacaag

SEQ ID NO: 856251 - RNA, 19 nt, Homo sapiens
  misc_RNA (1)...(19): siRNA sense strand
ggcaagagccacuuaucca

SEQ ID NO: 856252 - RNA, 19 nt, Homo sapiens
  misc_RNA (1)...(19): siRNA sense strand
gacccuacuauucgccaua

SEQ ID NO: 856253 - RNA, 19 nt, Homo sapiens
  misc_RNA (1)...(19): siRNA sense strand
gcuucaugcugcagaacga

SEQ ID NO: 856254 - RNA, 19 nt, Homo sapiens
  misc_RNA (1)...(19): siRNA sense strand
gccgggagccgagaaacuu

SEQ ID NO: 856255 - RNA, 19 nt, Homo sapiens
  misc_RNA (1)...(19): siRNA sense strand
ccuccuuccugcagggauu

SEQ ID NO: 856256 - RNA, 19 nt, Homo sapiens
  misc_RNA (1)...(19): siRNA sense strand
gcggaauccacacacuuug

SEQ ID NO: 856257 - RNA, 19 nt, Homo sapiens
  misc_RNA (1)...(19): siRNA sense strand
cuacaccuacggcuucaug

SEQ ID NO: 856258 - RNA, 19 nt, Homo sapiens
  misc_RNA (1)...(19): siRNA sense strand
ggaaauugcagguggagaa

SEQ ID NO: 856259 - RNA, 19 nt, Homo sapiens
  misc_RNA (1)...(19): siRNA sense strand
ucacagcccugguuauaca

SEQ ID NO: 856260 - RNA, 19 nt, Homo sapiens
  misc_RNA (1)...(19): siRNA sense strand
ggaggcagccggugagaau

SEQ ID NO: 856261 - RNA, 19 nt, Homo sapiens
  misc_RNA (1)...(19): siRNA sense strand
gcuccugguugcagaugua

SEQ ID NO: 856262 - RNA, 19 nt, Homo sapiens
  misc_RNA (1)...(19): siRNA sense strand
gcagauguaccuguucuug

SEQ ID NO: 856263 - RNA, 19 nt, Homo sapiens
  misc_RNA (1)...(19): siRNA sense strand
uaccuguucuuggcuauuu

SEQ ID NO: 856264 - RNA, 19 nt, Homo sapiens
  misc_RNA (1)...(19): siRNA sense strand
gaucugaccguaauuuuga

SEQ ID NO: 856265 - RNA, 19 nt, Homo sapiens
  misc_RNA (1)...(19): siRNA sense strand
gguugcagauguaccuguu

SEQ ID NO: 856266 - RNA, 19 nt, Homo sapiens
  misc_RNA (1)...(19): siRNA sense strand
gaccgugaccuugaucuga

SEQ ID NO: 856267 - RNA, 19 nt, Homo sapiens
  misc_RNA (1)...(19): siRNA sense strand
gaccuugaucugaccguaa

SEQ ID NO: 856268 - RNA, 19 nt, Homo sapiens
  misc_RNA (1)...(19): siRNA sense strand
caguguauaauaaguggua

SEQ ID NO: 856269 - RNA, 19 nt, Homo sapiens
  misc_RNA (1)...(19): siRNA sense strand
gaaauugcagguggagaag

SEQ ID NO: 856270 - RNA, 19 nt, Homo sapiens
  misc_RNA (1)...(19): siRNA sense strand
uaagugguaagccgucaga

SEQ ID NO: 856271 - RNA, 19 nt, Homo sapiens
  misc_RNA (1)...(19): siRNA sense strand
ggaaauauuagcccaauua

SEQ ID NO: 856272 - RNA, 19 nt, Homo sapiens
  misc_RNA (1)...(19): siRNA sense strand
uaaggaacuucgagaauua

SEQ ID NO: 856273 - RNA, 19 nt, Homo sapiens
  misc_RNA (1)...(19): siRNA sense strand
caagagaacacacagauua

SEQ ID NO: 856274 - RNA, 19 nt, Homo sapiens
  misc_RNA (1)...(19): siRNA sense strand
gaacuuaucaugagcaaau

SEQ ID NO: 856275 - RNA, 19 nt, Homo sapiens
  misc_RNA (1)...(19): siRNA sense strand
gcaaauaucggaaacagau

SEQ ID NO: 856276 - RNA, 19 nt, Homo sapiens
  misc_RNA (1)...(19): siRNA sense strand
gaaauugagagucagauug

SEQ ID NO: 856277 - RNA, 19 nt, Homo sapiens
  misc_RNA (1)...(19): siRNA sense strand
aaacagagagcuauggauu

SEQ ID NO: 856278 - RNA, 19 nt, Homo sapiens
  misc_RNA (1)...(19): siRNA sense strand
gaacuucgagaauuauugu

SEQ ID NO: 856279 - RNA, 19 nt, Homo sapiens
  misc_RNA (1)...(19): siRNA sense strand
gaaagcaguucagguggau

SEQ ID NO: 856280 - RNA, 19 nt, Homo sapiens
  misc_RNA (1)...(19): siRNA sense strand
gguggaugaugaccaguuu

SEQ ID NO: 856281 - RNA, 19 nt, Homo sapiens
  misc_RNA (1)...(19): siRNA sense strand
auaaggaacuucgagaauu

SEQ ID NO: 856282 - RNA, 19 nt, Homo sapiens
  misc_RNA (1)...(19): siRNA sense strand
auacaaaccucacauucug

SEQ ID NO: 856283 - RNA, 19 nt, Homo sapiens
  misc_RNA (1)...(19): siRNA sense strand
ccugaaagcucaccagucu

SEQ ID NO: 856284 - RNA, 19 nt, Homo sapiens
  misc_RNA (1)...(19): siRNA sense strand
ggaccaguaucaagaggau

SEQ ID NO: 856285 - RNA, 19 nt, Homo sapiens
  misc_RNA (1)...(19): siRNA sense strand
gagcaaauaucggaaacag

SEQ ID NO: 856286 - RNA, 19 nt, Homo sapiens
  misc_RNA (1)...(19): siRNA sense strand
acagagagcuauggauuuc

SEQ ID NO: 856287 - RNA, 19 nt, Homo sapiens
  misc_RNA (1)...(19): siRNA sense strand
ucgagaagauccugacaga

SEQ ID NO: 856288 - RNA, 19 nt, Homo sapiens
  misc_RNA (1)...(19): siRNA sense strand
caaauacaaaccucacauu

SEQ ID NO: 856289 - RNA, 19 nt, Homo sapiens
  misc_RNA (1)...(19): siRNA sense strand
caggaugcuuuggaacuua

SEQ ID NO: 856290 - RNA, 19 nt, Homo sapiens
  misc_RNA (1)...(19): siRNA sense strand
cgagaauuauuguccauca

SEQ ID NO: 856291 - RNA, 19 nt, Homo sapiens
  misc_RNA (1)...(19): siRNA sense strand
gaaaugggagaagugauga

SEQ ID NO: 856292 - RNA, 19 nt, Homo sapiens
  misc_RNA (1)...(19): siRNA sense strand
ccgagucgcugguggauca

SEQ ID NO: 856293 - RNA, 19 nt, Homo sapiens
  misc_RNA (1)...(19): siRNA sense strand
cugcagaaauugagaguca

SEQ ID NO: 856294 - RNA, 19 nt, Homo sapiens
  misc_RNA (1)...(19): siRNA sense strand
acacacagauuagagacuu

SEQ ID NO: 856295 - RNA, 19 nt, Homo sapiens
  misc_RNA (1)...(19): siRNA sense strand
gaaauauuagcccaauuag

SEQ ID NO: 856296 - RNA, 19 nt, Homo sapiens
  misc_RNA (1)...(19): siRNA sense strand
caguucagguggaugauga

SEQ ID NO: 856297 - RNA, 19 nt, Homo sapiens
  misc_RNA (1)...(19): siRNA sense strand
gauguuacaguuaaugguu

SEQ ID NO: 856298 - RNA, 19 nt, Homo sapiens
  misc_RNA (1)...(19): siRNA sense strand
acaccaggaugcuuuggaa

SEQ ID NO: 856299 - RNA, 19 nt, Homo sapiens
  misc_RNA (1)...(19): siRNA sense strand
aauauuagcccaauuagag

SEQ ID NO: 856300 - RNA, 19 nt, Homo sapiens
  misc_RNA (1)...(19): siRNA sense strand
ugggagaagugaugaggaa

SEQ ID NO: 856301 - RNA, 19 nt, Homo sapiens
  misc_RNA (1)...(19): siRNA sense strand
ccaggaugcuuuggaacuu

SEQ ID NO: 856302 - RNA, 19 nt, Homo sapiens
  misc_RNA (1)...(19): siRNA sense strand
caucaagccagaaaggaaa

SEQ ID NO: 856303 - RNA, 19 nt, Homo sapiens
  misc_RNA (1)...(19): siRNA sense strand
ugaaaugggagaagugaug

SEQ ID NO: 856304 - RNA, 19 nt, Homo sapiens
  misc_RNA (1)...(19): siRNA sense strand
aaauugagagucagauuga

SEQ ID NO: 856305 - RNA, 19 nt, Homo sapiens
  misc_RNA (1)...(19): siRNA sense strand
ggaacuucgagaauuauug

SEQ ID NO: 856306 - RNA, 19 nt, Homo sapiens
  misc_RNA (1)...(19): siRNA sense strand
ugaaagcucaccagucuca

SEQ ID NO: 856307 - RNA, 19 nt, Homo sapiens
  misc_RNA (1)...(19): siRNA sense strand
gcagaaauugagagucaga

SEQ ID NO: 856308 - RNA, 19 nt, Homo sapiens
  misc_RNA (1)...(19): siRNA sense strand
caggaaauauuagcccaau

SEQ ID NO: 856309 - RNA, 19 nt, Homo sapiens
  misc_RNA (1)...(19): siRNA sense strand
ccaagagaacacacagauu

SEQ ID NO: 856310 - RNA, 19 nt, Homo sapiens
  misc_RNA (1)...(19): siRNA sense strand
gagaagugaugaggaaagc

SEQ ID NO: 856311 - RNA, 19 nt, Homo sapiens
  misc_RNA (1)...(19): siRNA sense strand
uacaguuaaugguugcuaa

SEQ ID NO: 856312 - RNA, 19 nt, Homo sapiens
  misc_RNA (1)...(19): siRNA sense strand
gaugaccaguuuuguaaga

SEQ ID NO: 856313 - RNA, 19 nt, Homo sapiens
  misc_RNA (1)...(19): siRNA sense strand
gagaacacacagauuagag

SEQ ID NO: 856314 - RNA, 19 nt, Homo sapiens
  misc_RNA (1)...(19): siRNA sense strand
ggagaagugaugaggaaag

SEQ ID NO: 856315 - RNA, 19 nt, Homo sapiens
  misc_RNA (1)...(19): siRNA sense strand
cauccgauaugaaggacau

SEQ ID NO: 856316 - RNA, 19 nt, Homo sapiens
  misc_RNA (1)...(19): siRNA sense strand
aaauaaggaacuucgagaa

SEQ ID NO: 856317 - RNA, 19 nt, Homo sapiens
  misc_RNA (1)...(19): siRNA sense strand
ggaacaccaggaugcuuug

SEQ ID NO: 856318 - RNA, 19 nt, Homo sapiens
  misc_RNA (1)...(19): siRNA sense strand
gaaaggaaaacucaaugga

SEQ ID NO: 856319 - RNA, 19 nt, Homo sapiens
  misc_RNA (1)...(19): siRNA sense strand
aaauacaaaccucacauuc

SEQ ID NO: 856320 - RNA, 19 nt, Homo sapiens
  misc_RNA (1)...(19): siRNA sense strand
gcuuuggaacuuaucauga

SEQ ID NO: 856321 - RNA, 19 nt, Homo sapiens
  misc_RNA (1)...(19): siRNA sense strand
gagaauuauuguccaucag

SEQ ID NO: 856322 - RNA, 19 nt, Homo sapiens
  misc_RNA (1)...(19): siRNA sense strand
gucucacucugcagaaauu

SEQ ID NO: 856323 - RNA, 19 nt, Homo sapiens
  misc_RNA (1)...(19): siRNA sense strand
gaugaugaccaguuuugua

SEQ ID NO: 856324 - RNA, 19 nt, Homo sapiens
  misc_RNA (1)...(19): siRNA sense strand
ccaauuagagcuugaaaau

SEQ ID NO: 856325 - RNA, 19 nt, Homo sapiens
  misc_RNA (1)...(19): siRNA sense strand
gcugcaccaucgagaagau

SEQ ID NO: 856326 - RNA, 19 nt, Homo sapiens
  misc_RNA (1)...(19): siRNA sense strand
gagcugcaccaucgagaag

SEQ ID NO: 856327 - RNA, 19 nt, Homo sapiens
  misc_RNA (1)...(19): siRNA sense strand
uucccaagccaucaaauaa

SEQ ID NO: 856328 - RNA, 19 nt, Homo sapiens
  misc_RNA (1)...(19): siRNA sense strand
aauaaggaacuucgagaau

SEQ ID NO: 856329 - RNA, 19 nt, Homo sapiens
  misc_RNA (1)...(19): siRNA sense strand
gaaaacagagagcuaugga

SEQ ID NO: 856330 - RNA, 19 nt, Homo sapiens
  misc_RNA (1)...(19): siRNA sense strand
ucaucaagccagaaaggaa

SEQ ID NO: 856331 - RNA, 19 nt, Homo sapiens
  misc_RNA (1)...(19): siRNA sense strand
agaaauugagagucagauu

SEQ ID NO: 856332 - RNA, 19 nt, Homo sapiens
  misc_RNA (1)...(19): siRNA sense strand
ccaaauacaaaccucacau

SEQ ID NO: 856333 - RNA, 19 nt, Homo sapiens
  misc_RNA (1)...(19): siRNA sense strand
caugagcaaauaucggaaa

SEQ ID NO: 856334 - RNA, 19 nt, Homo sapiens
  misc_RNA (1)...(19): siRNA sense strand
acauucugcugucccaaga

SEQ ID NO: 856335 - RNA, 19 nt, Homo sapiens
  misc_RNA (1)...(19): siRNA sense strand
cuucccaagccaucaaaua

SEQ ID NO: 856336 - RNA, 19 nt, Homo sapiens
  misc_RNA (1)...(19): siRNA sense strand
gauuagagacuugcaacag

SEQ ID NO: 856337 - RNA, 19 nt, Homo sapiens
  misc_RNA (1)...(19): siRNA sense strand
agaacacacagauuagaga

SEQ ID NO: 856338 - RNA, 19 nt, Homo sapiens
  misc_RNA (1)...(19): siRNA sense strand
aggaacaccaggaugcuuu

SEQ ID NO: 856339 - RNA, 19 nt, Homo sapiens
  misc_RNA (1)...(19): siRNA sense strand
aacagagagcuauggauuu

SEQ ID NO: 856340 - RNA, 19 nt, Homo sapiens
  misc_RNA (1)...(19): siRNA sense strand
cagucucacucugcagaaa

SEQ ID NO: 856341 - RNA, 19 nt, Homo sapiens
  misc_RNA (1)...(19): siRNA sense strand
caaauaucggaaacagaug

SEQ ID NO: 856342 - RNA, 19 nt, Homo sapiens
  misc_RNA (1)...(19): siRNA sense strand
aauacaaaccucacauucu

SEQ ID NO: 856343 - RNA, 19 nt, Homo sapiens
  misc_RNA (1)...(19): siRNA sense strand
aagcaguucagguggauga

SEQ ID NO: 856344 - RNA, 19 nt, Homo sapiens
  misc_RNA (1)...(19): siRNA sense strand
ggaaauagaauguagcaua

SEQ ID NO: 856345 - RNA, 19 nt, Homo sapiens
  misc_RNA (1)...(19): siRNA sense strand
gagcaucuuucacacauua

SEQ ID NO: 856346 - RNA, 19 nt, Homo sapiens
  misc_RNA (1)...(19): siRNA sense strand
gaauuaaucugcuagugaa

SEQ ID NO: 856347 - RNA, 19 nt, Homo sapiens
  misc_RNA (1)...(19): siRNA sense strand
gaaauagaauguagcauag

SEQ ID NO: 856348 - RNA, 19 nt, Homo sapiens
  misc_RNA (1)...(19): siRNA sense strand
ggaagcgucuccucauuga

SEQ ID NO: 856349 - RNA, 19 nt, Homo sapiens
  misc_RNA (1)...(19): siRNA sense strand
gggcaaaacuuuacuagua

SEQ ID NO: 856350 - RNA, 19 nt, Homo sapiens
  misc_RNA (1)...(19): siRNA sense strand
ccaagaauaugaugcuuug

SEQ ID NO: 856351 - RNA, 19 nt, Homo sapiens
  misc_RNA (1)...(19): siRNA sense strand
gaagauaagcuggaauuga

SEQ ID NO: 856352 - RNA, 19 nt, Homo sapiens
  misc_RNA (1)...(19): siRNA sense strand
ggaggugaucggagaauua

SEQ ID NO: 856353 - RNA, 19 nt, Homo sapiens
  misc_RNA (1)...(19): siRNA sense strand
agacaggcaugagacauua

SEQ ID NO: 856354 - RNA, 19 nt, Homo sapiens
  misc_RNA (1)...(19): siRNA sense strand
uagcauagcuggagcacau

SEQ ID NO: 856355 - RNA, 19 nt, Homo sapiens
  misc_RNA (1)...(19): siRNA sense strand
aaucagauccuaagccaua

SEQ ID NO: 856356 - RNA, 19 nt, Homo sapiens
  misc_RNA (1)...(19): siRNA sense strand
gaauugagacggaaacagu

SEQ ID NO: 856357 - RNA, 19 nt, Homo sapiens
  misc_RNA (1)...(19): siRNA sense strand
aagauaagcuggaauugag

SEQ ID NO: 856358 - RNA, 19 nt, Homo sapiens
  misc_RNA (1)...(19): siRNA sense strand
agaagaagcucaggaagca

SEQ ID NO: 856359 - RNA, 19 nt, Homo sapiens
  misc_RNA (1)...(19): siRNA sense strand
ggagggauauagccaguac

SEQ ID NO: 856360 - RNA, 19 nt, Homo sapiens
  misc_RNA (1)...(19): siRNA sense strand
gaggugaucggagaauuaa

SEQ ID NO: 856361 - RNA, 19 nt, Homo sapiens
  misc_RNA (1)...(19): siRNA sense strand
acaaggaaauagaauguag

SEQ ID NO: 856362 - RNA, 19 nt, Homo sapiens
  misc_RNA (1)...(19): siRNA sense strand
gagaauuaaucugcuagug

SEQ ID NO: 856363 - RNA, 19 nt, Homo sapiens
  misc_RNA (1)...(19): siRNA sense strand
gaaaagaauuagagcaucu

SEQ ID NO: 856364 - RNA, 19 nt, Homo sapiens
  misc_RNA (1)...(19): siRNA sense strand
aagcaagcauggaaucaga

SEQ ID NO: 856365 - RNA, 19 nt, Homo sapiens
  misc_RNA (1)...(19): siRNA sense strand
gguagaagaagcucaggaa

SEQ ID NO: 856366 - RNA, 19 nt, Homo sapiens
  misc_RNA (1)...(19): siRNA sense strand
gcaaauucuucaagcaaaa

SEQ ID NO: 856367 - RNA, 19 nt, Homo sapiens
  misc_RNA (1)...(19): siRNA sense strand
gcaugagacauuaaaggaa

SEQ ID NO: 856368 - RNA, 19 nt, Homo sapiens
  misc_RNA (1)...(19): siRNA sense strand
gaacuucagcaaacauugg

SEQ ID NO: 856369 - RNA, 19 nt, Homo sapiens
  misc_RNA (1)...(19): siRNA sense strand
agaauuaaucugcuaguga

SEQ ID NO: 856370 - RNA, 19 nt, Homo sapiens
  misc_RNA (1)...(19): siRNA sense strand
agaauuagagcaucuuuca

SEQ ID NO: 856371 - RNA, 19 nt, Homo sapiens
  misc_RNA (1)...(19): siRNA sense strand
gacugacgacgaaguuaua

SEQ ID NO: 856372 - RNA, 19 nt, Homo sapiens
  misc_RNA (1)...(19): siRNA sense strand
uagagcaucuuucacacau

SEQ ID NO: 856373 - RNA, 19 nt, Homo sapiens
  misc_RNA (1)...(19): siRNA sense strand
gccaagaauaugaugcuuu

SEQ ID NO: 856374 - RNA, 19 nt, Homo sapiens
  misc_RNA (1)...(19): siRNA sense strand
agaaaguguugaagauaag

SEQ ID NO: 856375 - RNA, 19 nt, Homo sapiens
  misc_RNA (1)...(19): siRNA sense strand
ggcaugagacauuaaagga

SEQ ID NO: 856376 - RNA, 19 nt, Homo sapiens
  misc_RNA (1)...(19): siRNA sense strand
ggugaucggagaauuaauc

SEQ ID NO: 856377 - RNA, 19 nt, Homo sapiens
  misc_RNA (1)...(19): siRNA sense strand
gcauggaaucagauccuaa

SEQ ID NO: 856378 - RNA, 19 nt, Homo sapiens
  misc_RNA (1)...(19): siRNA sense strand
gcacgcugucucaauguga

SEQ ID NO: 856379 - RNA, 19 nt, Homo sapiens
  misc_RNA (1)...(19): siRNA sense strand
aaagcaaauucuucaagca

SEQ ID NO: 856380 - RNA, 19 nt, Homo sapiens
  misc_RNA (1)...(19): siRNA sense strand
ggcaaaacuuuacuaguau

SEQ ID NO: 856381 - RNA, 19 nt, Homo sapiens
  misc_RNA (1)...(19): siRNA sense strand
ucaggaagcaagcauggaa

SEQ ID NO: 856382 - RNA, 19 nt, Homo sapiens
  misc_RNA (1)...(19): siRNA sense strand
cagacaggcaugagacauu

SEQ ID NO: 856383 - RNA, 19 nt, Homo sapiens
  misc_RNA (1)...(19): siRNA sense strand
uauagccaguaccaacgua

SEQ ID NO: 856384 - RNA, 19 nt, Homo sapiens
  misc_RNA (1)...(19): siRNA sense strand
ggaagcaagcauggaauca

SEQ ID NO: 856385 - RNA, 19 nt, Homo sapiens
  misc_RNA (1)...(19): siRNA sense strand
agcaaauucuucaagcaaa

SEQ ID NO: 856386 - RNA, 19 nt, Homo sapiens
  misc_RNA (1)...(19): siRNA sense strand
ucggagaauuaaucugcua

SEQ ID NO: 856387 - RNA, 19 nt, Homo sapiens
  misc_RNA (1)...(19): siRNA sense strand
ugacugacgacgaaguuau

SEQ ID NO: 856388 - RNA, 19 nt, Homo sapiens
  misc_RNA (1)...(19): siRNA sense strand
gacauuaaaggaacuagag

SEQ ID NO: 856389 - RNA, 19 nt, Homo sapiens
  misc_RNA (1)...(19): siRNA sense strand
gcauagcuggagcacauga

SEQ ID NO: 856390 - RNA, 19 nt, Homo sapiens
  misc_RNA (1)...(19): siRNA sense strand
gcaucuuucacacauuaaa

SEQ ID NO: 856391 - RNA, 19 nt, Homo sapiens
  misc_RNA (1)...(19): siRNA sense strand
acggaagcgucuccucauu

SEQ ID NO: 856392 - RNA, 19 nt, Homo sapiens
  misc_RNA (1)...(19): siRNA sense strand
cggaagcgucuccucauug

SEQ ID NO: 856393 - RNA, 19 nt, Homo sapiens
  misc_RNA (1)...(19): siRNA sense strand
gcaagcauggaaucagauc

SEQ ID NO: 856394 - RNA, 19 nt, Homo sapiens
  misc_RNA (1)...(19): siRNA sense strand
aagcaaauucuucaagcaa

SEQ ID NO: 856395 - RNA, 19 nt, Homo sapiens
  misc_RNA (1)...(19): siRNA sense strand
aauuagagcaucuuucaca

SEQ ID NO: 856396 - RNA, 19 nt, Homo sapiens
  misc_RNA (1)...(19): siRNA sense strand
ccucauugauggagauggu

SEQ ID NO: 856397 - RNA, 19 nt, Homo sapiens
  misc_RNA (1)...(19): siRNA sense strand
cacauuaaagaaaguguug

SEQ ID NO: 856398 - RNA, 19 nt, Homo sapiens
  misc_RNA (1)...(19): siRNA sense strand
gaagcaagcauggaaucag

SEQ ID NO: 856399 - RNA, 19 nt, Homo sapiens
  misc_RNA (1)...(19): siRNA sense strand
caguuucauguucuucuua

SEQ ID NO: 856400 - RNA, 19 nt, Homo sapiens
  misc_RNA (1)...(19): siRNA sense strand
aagcgucuccucauugaug

SEQ ID NO: 856401 - RNA, 19 nt, Homo sapiens
  misc_RNA (1)...(19): siRNA sense strand
uugaagauaagcuggaauu

SEQ ID NO: 856402 - RNA, 19 nt, Homo sapiens
  misc_RNA (1)...(19): siRNA sense strand
acaguuucauguucuucuu

SEQ ID NO: 856403 - RNA, 19 nt, Homo sapiens
  misc_RNA (1)...(19): siRNA sense strand
aauagaauguagcauagcu

SEQ ID NO: 856404 - RNA, 19 nt, Homo sapiens
  misc_RNA (1)...(19): siRNA sense strand
cacgcugucucaaugugaa

SEQ ID NO: 856405 - RNA, 19 nt, Homo sapiens
  misc_RNA (1)...(19): siRNA sense strand
gagcacgcugucucaaugu

SEQ ID NO: 856406 - RNA, 19 nt, Homo sapiens
  misc_RNA (1)...(19): siRNA sense strand
uuaaucugcuagugaagag

SEQ ID NO: 856407 - RNA, 19 nt, Homo sapiens
  misc_RNA (1)...(19): siRNA sense strand
gacaggcaugagacauuaa

SEQ ID NO: 856408 - RNA, 19 nt, Homo sapiens
  misc_RNA (1)...(19): siRNA sense strand
gaagaagcucaggaagcaa

SEQ ID NO: 856409 - RNA, 19 nt, Homo sapiens
  misc_RNA (1)...(19): siRNA sense strand
agccgugacugacgacgaa

SEQ ID NO: 856410 - RNA, 19 nt, Homo sapiens
  misc_RNA (1)...(19): siRNA sense strand
ggagaauuaaucugcuagu

SEQ ID NO: 856411 - RNA, 19 nt, Homo sapiens
  misc_RNA (1)...(19): siRNA sense strand
uggaggugaucggagaauu

SEQ ID NO: 856412 - RNA, 19 nt, Homo sapiens
  misc_RNA (1)...(19): siRNA sense strand
gcugucucaaugugaauuu

SEQ ID NO: 856413 - RNA, 19 nt, Homo sapiens
  misc_RNA (1)...(19): siRNA sense strand
ggaggaagguuuaaacaaa

SEQ ID NO: 856414 - RNA, 19 nt, Homo sapiens
  misc_RNA (1)...(19): siRNA sense strand
guaaagaacucgaguacca

SEQ ID NO: 856415 - RNA, 19 nt, Homo sapiens
  misc_RNA (1)...(19): siRNA sense strand
ccuagaauuugcucaguua

SEQ ID NO: 856416 - RNA, 19 nt, Homo sapiens
  misc_RNA (1)...(19): siRNA sense strand
gaacacacaauccuagaau

SEQ ID NO: 856417 - RNA, 19 nt, Homo sapiens
  misc_RNA (1)...(19): siRNA sense strand
caaagcaauucacuacuuc

SEQ ID NO: 856418 - RNA, 19 nt, Homo sapiens
  misc_RNA (1)...(19): siRNA sense strand
acaaagcaauucacuacuu

SEQ ID NO: 856419 - RNA, 19 nt, Homo sapiens
  misc_RNA (1)...(19): siRNA sense strand
gggagccacucacgguaua

SEQ ID NO: 856420 - RNA, 19 nt, Homo sapiens
  misc_RNA (1)...(19): siRNA sense strand
ccacgugaauccaauagga

SEQ ID NO: 856421 - RNA, 19 nt, Homo sapiens
  misc_RNA (1)...(19): siRNA sense strand
gaggaagguuuaaacaaag

SEQ ID NO: 856422 - RNA, 19 nt, Homo sapiens
  misc_RNA (1)...(19): siRNA sense strand
guauggagauccugaaguc

SEQ ID NO: 856423 - RNA, 19 nt, Homo sapiens
  misc_RNA (1)...(19): siRNA sense strand
gcagagaccaugugcuaug

SEQ ID NO: 856424 - RNA, 19 nt, Homo sapiens
  misc_RNA (1)...(19): siRNA sense strand
cgucagcgaucuagugaau

SEQ ID NO: 856425 - RNA, 19 nt, Homo sapiens
  misc_RNA (1)...(19): siRNA sense strand
accaaagccugccagaaua

SEQ ID NO: 856426 - RNA, 19 nt, Homo sapiens
  misc_RNA (1)...(19): siRNA sense strand
acacacaauccuagaauuu

SEQ ID NO: 856427 - RNA, 19 nt, Homo sapiens
  misc_RNA (1)...(19): siRNA sense strand
gaaguccacccucaaagug

SEQ ID NO: 856428 - RNA, 19 nt, Homo sapiens
  misc_RNA (1)...(19): siRNA sense strand
aaacaaagcaauucacuac

SEQ ID NO: 856429 - RNA, 19 nt, Homo sapiens
  misc_RNA (1)...(19): siRNA sense strand
gaugaaggcaaacguguug

SEQ ID NO: 856430 - RNA, 19 nt, Homo sapiens
  misc_RNA (1)...(19): siRNA sense strand
caugaacgaugggcgagua

SEQ ID NO: 856431 - RNA, 19 nt, Homo sapiens
  misc_RNA (1)...(19): siRNA sense strand
agacaagggcguuccagua

SEQ ID NO: 856432 - RNA, 19 nt, Homo sapiens
  misc_RNA (1)...(19): siRNA sense strand
ccaaagccugccagaauaa

SEQ ID NO: 856433 - RNA, 19 nt, Homo sapiens
  misc_RNA (1)...(19): siRNA sense strand
ucgaguaccaggcaaauaa

SEQ ID NO: 856434 - RNA, 19 nt, Homo sapiens
  misc_RNA (1)...(19): siRNA sense strand
guugguagcggaagugaaa

SEQ ID NO: 856435 - RNA, 19 nt, Homo sapiens
  misc_RNA (1)...(19): siRNA sense strand
gaacccagaagaacacaca

SEQ ID NO: 856436 - RNA, 19 nt, Homo sapiens
  misc_RNA (1)...(19): siRNA sense strand
gcaggaaggcguggaagug

SEQ ID NO: 856437 - RNA, 19 nt, Homo sapiens
  misc_RNA (1)...(19): siRNA sense strand
guauaauccuaucaagaca

SEQ ID NO: 856438 - RNA, 19 nt, Homo sapiens
  misc_RNA (1)...(19): siRNA sense strand
ucagcgaucuagugaaugg

SEQ ID NO: 856439 - RNA, 19 nt, Homo sapiens
  misc_RNA (1)...(19): siRNA sense strand
gcgaguggccagaaucuuc

SEQ ID NO: 856440 - RNA, 19 nt, Homo sapiens
  misc_RNA (1)...(19): siRNA sense strand
aaccaaagccugccagaau

SEQ ID NO: 856441 - RNA, 19 nt, Homo sapiens
  misc_RNA (1)...(19): siRNA sense strand
gaaaagaaaaccagacauc

SEQ ID NO: 856442 - RNA, 19 nt, Homo sapiens
  misc_RNA (1)...(19): siRNA sense strand
guacgucagcgaucuagug

SEQ ID NO: 856443 - RNA, 19 nt, Homo sapiens
  misc_RNA (1)...(19): siRNA sense strand
cugcuacgaugaaggcaaa

SEQ ID NO: 856444 - RNA, 19 nt, Homo sapiens
  misc_RNA (1)...(19): siRNA sense strand
gaagcaggaaggcguggaa

SEQ ID NO: 856445 - RNA, 19 nt, Homo sapiens
  misc_RNA (1)...(19): siRNA sense strand
ccacaucggagguguaugg

SEQ ID NO: 856446 - RNA, 19 nt, Homo sapiens
  misc_RNA (1)...(19): siRNA sense strand
gacaagggcguuccaguac

SEQ ID NO: 856447 - RNA, 19 nt, Homo sapiens
  misc_RNA (1)...(19): siRNA sense strand
gaacgaugggcgaguaguc

SEQ ID NO: 856448 - RNA, 19 nt, Homo sapiens
  misc_RNA (1)...(19): siRNA sense strand
cauuaaagaccaauacgau

SEQ ID NO: 856449 - RNA, 19 nt, Homo sapiens
  misc_RNA (1)...(19): siRNA sense strand
ccucguggcucucaugaac

SEQ ID NO: 856450 - RNA, 19 nt, Homo sapiens
  misc_RNA (1)...(19): siRNA sense strand
gaagugcgaguggccagaa

SEQ ID NO: 856451 - RNA, 19 nt, Homo sapiens
  misc_RNA (1)...(19): siRNA sense strand
ucacuacuuccguaaagaa

SEQ ID NO: 856452 - RNA, 19 nt, Homo sapiens
  misc_RNA (1)...(19): siRNA sense strand
agaagaacacacaauccua

SEQ ID NO: 856453 - RNA, 19 nt, Homo sapiens
  misc_RNA (1)...(19): siRNA sense strand
caagggcguuccaguacgu

SEQ ID NO: 856454 - RNA, 19 nt, Homo sapiens
  misc_RNA (1)...(19): siRNA sense strand
ucaagacauuaaagaccaa

SEQ ID NO: 856455 - RNA, 19 nt, Homo sapiens
  misc_RNA (1)...(19): siRNA sense strand
gauugggacauuaaacaug

SEQ ID NO: 856456 - RNA, 19 nt, Homo sapiens
  misc_RNA (1)...(19): siRNA sense strand
uugcagagaccaugugcua

SEQ ID NO: 856457 - RNA, 19 nt, Homo sapiens
  misc_RNA (1)...(19): siRNA sense strand
ccagaaucuucaacaccuu

SEQ ID NO: 856458 - RNA, 19 nt, Homo sapiens
  misc_RNA (1)...(19): siRNA sense strand
gcgaguagucagcaacuuc

SEQ ID NO: 856459 - RNA, 19 nt, Homo sapiens
  misc_RNA (1)...(19): siRNA sense strand
ccaggaugacccacagaaa

SEQ ID NO: 856460 - RNA, 19 nt, Homo sapiens
  misc_RNA (1)...(19): siRNA sense strand
caaagccugccagaauaaa

SEQ ID NO: 856461 - RNA, 19 nt, Homo sapiens
  misc_RNA (1)...(19): siRNA sense strand
cagaaucuucaacaccuuu

SEQ ID NO: 856462 - RNA, 19 nt, Homo sapiens
  misc_RNA (1)...(19): siRNA sense strand
acacaauccuagaauuugc

SEQ ID NO: 856463 - RNA, 19 nt, Homo sapiens
  misc_RNA (1)...(19): siRNA sense strand
aacacacaauccuagaauu

SEQ ID NO: 856464 - RNA, 19 nt, Homo sapiens
  misc_RNA (1)...(19): siRNA sense strand
ggagguguauggagauccu

SEQ ID NO: 856465 - RNA, 19 nt, Homo sapiens
  misc_RNA (1)...(19): siRNA sense strand
ugaaguccacccucaaagu

SEQ ID NO: 856466 - RNA, 19 nt, Homo sapiens
  misc_RNA (1)...(19): siRNA sense strand
ccuaucaagacauuaaaga

SEQ ID NO: 856467 - RNA, 19 nt, Homo sapiens
  misc_RNA (1)...(19): siRNA sense strand
cacacaauccuagaauuug

SEQ ID NO: 856468 - RNA, 19 nt, Homo sapiens
  misc_RNA (1)...(19): siRNA sense strand
ccugaaguccacccucaaa

SEQ ID NO: 856469 - RNA, 19 nt, Homo sapiens
  misc_RNA (1)...(19): siRNA sense strand
cuacuuccguaaagaacuc

SEQ ID NO: 856470 - RNA, 19 nt, Homo sapiens
  misc_RNA (1)...(19): siRNA sense strand
gaagguuuaaacaaagcaa

SEQ ID NO: 856471 - RNA, 19 nt, Homo sapiens
  misc_RNA (1)...(19): siRNA sense strand
cgaguagucagcaacuuca

SEQ ID NO: 856472 - RNA, 19 nt, Homo sapiens
  misc_RNA (1)...(19): siRNA sense strand
caauucacuacuuccguaa

SEQ ID NO: 856473 - RNA, 19 nt, Homo sapiens
  misc_RNA (1)...(19): siRNA sense strand
gugcuaugccuacaugaag

SEQ ID NO: 856474 - RNA, 19 nt, Homo sapiens
  misc_RNA (1)...(19): siRNA sense strand
cgaugaaggcaaacguguu

SEQ ID NO: 856475 - RNA, 19 nt, Homo sapiens
  misc_RNA (1)...(19): siRNA sense strand
cgaguggccagaaucuuca

SEQ ID NO: 856476 - RNA, 19 nt, Homo sapiens
  misc_RNA (1)...(19): siRNA sense strand
gggccacgugaauccaaua

SEQ ID NO: 856477 - RNA, 19 nt, Homo sapiens
  misc_RNA (1)...(19): siRNA sense strand
uggaggaagguuuaaacaa

SEQ ID NO: 856478 - RNA, 19 nt, Homo sapiens
  misc_RNA (1)...(19): siRNA sense strand
aagaaaaccagacaucaaa

SEQ ID NO: 856479 - RNA, 19 nt, Homo sapiens
  misc_RNA (1)...(19): siRNA sense strand
guaagaagccacucacuuu

SEQ ID NO: 856480 - RNA, 19 nt, Homo sapiens
  misc_RNA (1)...(19): siRNA sense strand
ggaaggaaaugcaccuaug

SEQ ID NO: 856481 - RNA, 19 nt, Homo sapiens
  misc_RNA (1)...(19): siRNA sense strand
gacgacagauucauuguga

SEQ ID NO: 856482 - RNA, 19 nt, Homo sapiens
  misc_RNA (1)...(19): siRNA sense strand
gcaagcggguggugugcua

SEQ ID NO: 856483 - RNA, 19 nt, Homo sapiens
  misc_RNA (1)...(19): siRNA sense strand
agaagaagauccugguguu

SEQ ID NO: 856484 - RNA, 19 nt, Homo sapiens
  misc_RNA (1)...(19): siRNA sense strand
uaagcugugugguguguuu

SEQ ID NO: 856485 - RNA, 19 nt, Homo sapiens
  misc_RNA (1)...(19): siRNA sense strand
agagaagccuguccuggaa

SEQ ID NO: 856486 - RNA, 19 nt, Homo sapiens
  misc_RNA (1)...(19): siRNA sense strand
gaucaagugccgauucuuc

SEQ ID NO: 856487 - RNA, 19 nt, Homo sapiens
  misc_RNA (1)...(19): siRNA sense strand
ugggugagcuggugaaaca

SEQ ID NO: 856488 - RNA, 19 nt, Homo sapiens
  misc_RNA (1)...(19): siRNA sense strand
caagagggucuaacacaga

SEQ ID NO: 856489 - RNA, 19 nt, Homo sapiens
  misc_RNA (1)...(19): siRNA sense strand
gaacuggagaagaagaaga

SEQ ID NO: 856490 - RNA, 19 nt, Homo sapiens
  misc_RNA (1)...(19): siRNA sense strand
gaagcuggccuacgagucu

SEQ ID NO: 856491 - RNA, 19 nt, Homo sapiens
  misc_RNA (1)...(19): siRNA sense strand
ggugugcuaugacgacaga

SEQ ID NO: 856492 - RNA, 19 nt, Homo sapiens
  misc_RNA (1)...(19): siRNA sense strand
caguccagcucucugcuaa

SEQ ID NO: 856493 - RNA, 19 nt, Homo sapiens
  misc_RNA (1)...(19): siRNA sense strand
uaagaagccacucacuuug

SEQ ID NO: 856494 - RNA, 19 nt, Homo sapiens
  misc_RNA (1)...(19): siRNA sense strand
gaaggaaaugcaccuaugg

SEQ ID NO: 856495 - RNA, 19 nt, Homo sapiens
  misc_RNA (1)...(19): siRNA sense strand
gagcaggccagcguguaua

SEQ ID NO: 856496 - RNA, 19 nt, Homo sapiens
  misc_RNA (1)...(19): siRNA sense strand
ccaugagucugugggaauu

SEQ ID NO: 856497 - RNA, 19 nt, Homo sapiens
  misc_RNA (1)...(19): siRNA sense strand
gggcuacagucccuaugga

SEQ ID NO: 856498 - RNA, 19 nt, Homo sapiens
  misc_RNA (1)...(19): siRNA sense strand
gcaccuaugggaucaagug

SEQ ID NO: 856499 - RNA, 19 nt, Homo sapiens
  misc_RNA (1)...(19): siRNA sense strand
cagacagccuggccaagga

SEQ ID NO: 856500 - RNA, 19 nt, Homo sapiens
  misc_RNA (1)...(19): siRNA sense strand
ugcgggaacuggagaagaa

SEQ ID NO: 856501 - RNA, 19 nt, Homo sapiens
  misc_RNA (1)...(19): siRNA sense strand
ggagcaggccagcguguau

SEQ ID NO: 856502 - RNA, 19 nt, Homo sapiens
  misc_RNA (1)...(19): siRNA sense strand
agaagccacucacuuugga

SEQ ID NO: 856503 - RNA, 19 nt, Homo sapiens
  misc_RNA (1)...(19): siRNA sense strand
gcccucagcucccucuagu

SEQ ID NO: 856504 - RNA, 19 nt, Homo sapiens
  misc_RNA (1)...(19): siRNA sense strand
caugggugcuggccacuuc

SEQ ID NO: 856505 - RNA, 19 nt, Homo sapiens
  misc_RNA (1)...(19): siRNA sense strand
gggaucaagugccgauucu

SEQ ID NO: 856506 - RNA, 19 nt, Homo sapiens
  misc_RNA (1)...(19): siRNA sense strand
gaagaagauccugguguuc

SEQ ID NO: 856507 - RNA, 19 nt, Homo sapiens
  misc_RNA (1)...(19): siRNA sense strand
ggagcaacguggccaugag

SEQ ID NO: 856508 - RNA, 19 nt, Homo sapiens
  misc_RNA (1)...(19): siRNA sense strand
gacaacuuccugcguaaga

SEQ ID NO: 856509 - RNA, 19 nt, Homo sapiens
  misc_RNA (1)...(19): siRNA sense strand
gaagcagccgugucccuau

SEQ ID NO: 856510 - RNA, 19 nt, Homo sapiens
  misc_RNA (1)...(19): siRNA sense strand
cgagaguacuggucugaac

SEQ ID NO: 856511 - RNA, 19 nt, Homo sapiens
  misc_RNA (1)...(19): siRNA sense strand
gaugagcuccgugccaaug

SEQ ID NO: 856512 - RNA, 19 nt, Homo sapiens
  misc_RNA (1)...(19): siRNA sense strand
ugccaaugcucuccucuca

SEQ ID NO: 856513 - RNA, 19 nt, Homo sapiens
  misc_RNA (1)...(19): siRNA sense strand
guccagcucucugcuaaca

SEQ ID NO: 856514 - RNA, 19 nt, Homo sapiens
  misc_RNA (1)...(19): siRNA sense strand
agccagaugucggaacuuu

SEQ ID NO: 856515 - RNA, 19 nt, Homo sapiens
  misc_RNA (1)...(19): siRNA sense strand
gccaagagggucuaacaca

SEQ ID NO: 856516 - RNA, 19 nt, Homo sapiens
  misc_RNA (1)...(19): siRNA sense strand
cacagacgcuggacucacu

SEQ ID NO: 856517 - RNA, 19 nt, Homo sapiens
  misc_RNA (1)...(19): siRNA sense strand
gaagccagccccaccauga

SEQ ID NO: 856518 - RNA, 19 nt, Homo sapiens
  misc_RNA (1)...(19): siRNA sense strand
uggacaacuuccugcguaa

SEQ ID NO: 856519 - RNA, 19 nt, Homo sapiens
  misc_RNA (1)...(19): siRNA sense strand
cguaagaagccacucacuu

SEQ ID NO: 856520 - RNA, 19 nt, Homo sapiens
  misc_RNA (1)...(19): siRNA sense strand
cauguacuccuucgucaau

SEQ ID NO: 856521 - RNA, 19 nt, Homo sapiens
  misc_RNA (1)...(19): siRNA sense strand
aggccagcguguauacuaa

SEQ ID NO: 856522 - RNA, 19 nt, Homo sapiens
  misc_RNA (1)...(19): siRNA sense strand
uccggaagcugggcuauuc

SEQ ID NO: 856523 - RNA, 19 nt, Homo sapiens
  misc_RNA (1)...(19): siRNA sense strand
uguacuccuucgucaauga

SEQ ID NO: 856524 - RNA, 19 nt, Homo sapiens
  misc_RNA (1)...(19): siRNA sense strand
ggaacaaggaggucuucuc

SEQ ID NO: 856525 - RNA, 19 nt, Homo sapiens
  misc_RNA (1)...(19): siRNA sense strand
caggccagcguguauacua

SEQ ID NO: 856526 - RNA, 19 nt, Homo sapiens
  misc_RNA (1)...(19): siRNA sense strand
gcagccgugucccuaugga

SEQ ID NO: 856527 - RNA, 19 nt, Homo sapiens
  misc_RNA (1)...(19): siRNA sense strand
aagcagccgugucccuaug

SEQ ID NO: 856528 - RNA, 19 nt, Homo sapiens
  misc_RNA (1)...(19): siRNA sense strand
acaacuuccugcguaagaa

SEQ ID NO: 856529 - RNA, 19 nt, Homo sapiens
  misc_RNA (1)...(19): siRNA sense strand
cccuggaacugcagaugaa

SEQ ID NO: 856530 - RNA, 19 nt, Homo sapiens
  misc_RNA (1)...(19): siRNA sense strand
gggaacuggagaagaagaa

SEQ ID NO: 856531 - RNA, 19 nt, Homo sapiens
  misc_RNA (1)...(19): siRNA sense strand
ccagaugucggaacuuugg

SEQ ID NO: 856532 - RNA, 19 nt, Homo sapiens
  misc_RNA (1)...(19): siRNA sense strand
gggcaguggcagcagcuuu

SEQ ID NO: 856533 - RNA, 19 nt, Homo sapiens
  misc_RNA (1)...(19): siRNA sense strand
cacauaccgugaccuccaa

SEQ ID NO: 856534 - RNA, 19 nt, Homo sapiens
  misc_RNA (1)...(19): siRNA sense strand
gcccuggaacugcagauga

SEQ ID NO: 856535 - RNA, 19 nt, Homo sapiens
  misc_RNA (1)...(19): siRNA sense strand
ggcaguggcagcagcuuug

SEQ ID NO: 856536 - RNA, 19 nt, Homo sapiens
  misc_RNA (1)...(19): siRNA sense strand
aagaagauccugguguuca

SEQ ID NO: 856537 - RNA, 19 nt, Homo sapiens
  misc_RNA (1)...(19): siRNA sense strand
uugugaagcuggccuacga

SEQ ID NO: 856538 - RNA, 19 nt, Homo sapiens
  misc_RNA (1)...(19): siRNA sense strand
ccguacgucucccaggauu

SEQ ID NO: 856539 - RNA, 19 nt, Homo sapiens
  misc_RNA (1)...(19): siRNA sense strand
gggagcaacguggccauga

SEQ ID NO: 856540 - RNA, 19 nt, Homo sapiens
  misc_RNA (1)...(19): siRNA sense strand
aaaugcaccuaugggauca

SEQ ID NO: 856541 - RNA, 19 nt, Homo sapiens
  misc_RNA (1)...(19): siRNA sense strand
gaagauccugguguucaca

SEQ ID NO: 856542 - RNA, 19 nt, Homo sapiens
  misc_RNA (1)...(19): siRNA sense strand
aagcugggcuauucaucca

SEQ ID NO: 856543 - RNA, 19 nt, Homo sapiens
  misc_RNA (1)...(19): siRNA sense strand
cuacagucccuauggaucu

SEQ ID NO: 856544 - RNA, 19 nt, Homo sapiens
  misc_RNA (1)...(19): siRNA sense strand
ggaagcugggcuauucauc

SEQ ID NO: 856545 - RNA, 19 nt, Homo sapiens
  misc_RNA (1)...(19): siRNA sense strand
caucacagaccagcacauc

SEQ ID NO: 856546 - RNA, 19 nt, Homo sapiens
  misc_RNA (1)...(19): siRNA sense strand
cagugucccugccgacuac

SEQ ID NO: 856547 - RNA, 19 nt, Homo sapiens
  misc_RNA (1)...(19): siRNA sense strand
gugcuaugacgacagauuc

SEQ ID NO: 856548 - RNA, 19 nt, Homo sapiens
  misc_RNA (1)...(19): siRNA sense strand
gaaguugaguggccaaaca

SEQ ID NO: 856549 - RNA, 19 nt, Homo sapiens
  misc_RNA (1)...(19): siRNA sense strand
ggccugggcugcagaagaa

SEQ ID NO: 856550 - RNA, 19 nt, Homo sapiens
  misc_RNA (1)...(19): siRNA sense strand
gcagaagaauagugagugu

SEQ ID NO: 856551 - RNA, 19 nt, Homo sapiens
  misc_RNA (1)...(19): siRNA sense strand
ggagagcccugcuugaaac

SEQ ID NO: 856552 - RNA, 19 nt, Homo sapiens
  misc_RNA (1)...(19): siRNA sense strand
gcagaucggcccauauuca

SEQ ID NO: 856553 - RNA, 19 nt, Homo sapiens
  misc_RNA (1)...(19): siRNA sense strand
ggacgcugcugaagaacau

SEQ ID NO: 856554 - RNA, 19 nt, Homo sapiens
  misc_RNA (1)...(19): siRNA sense strand
ccaagagccucaagggaau

SEQ ID NO: 856555 - RNA, 19 nt, Homo sapiens
  misc_RNA (1)...(19): siRNA sense strand
cugaagaacauccuacuaa

SEQ ID NO: 856556 - RNA, 19 nt, Homo sapiens
  misc_RNA (1)...(19): siRNA sense strand
gaagaacauccuacuaacu

SEQ ID NO: 856557 - RNA, 19 nt, Homo sapiens
  misc_RNA (1)...(19): siRNA sense strand
gcacuuggaggaacagaca

SEQ ID NO: 856558 - RNA, 19 nt, Homo sapiens
  misc_RNA (1)...(19): siRNA sense strand
ugaagaacauccuacuaac

SEQ ID NO: 856559 - RNA, 19 nt, Homo sapiens
  misc_RNA (1)...(19): siRNA sense strand
ggaaugcugaugccucuuc

SEQ ID NO: 856560 - RNA, 19 nt, Homo sapiens
  misc_RNA (1)...(19): siRNA sense strand
ggaaacagaggcugagacu

SEQ ID NO: 856561 - RNA, 19 nt, Homo sapiens
  misc_RNA (1)...(19): siRNA sense strand
gcugaagaacauccuacua

SEQ ID NO: 856562 - RNA, 19 nt, Homo sapiens
  misc_RNA (1)...(19): siRNA sense strand
ccucuucccucaccagauc

SEQ ID NO: 856563 - RNA, 19 nt, Homo sapiens
  misc_RNA (1)...(19): siRNA sense strand
uggcagaucggcccauauu

SEQ ID NO: 856564 - RNA, 19 nt, Homo sapiens
  misc_RNA (1)...(19): siRNA sense strand
guccaacccuccagacaag

SEQ ID NO: 856565 - RNA, 19 nt, Homo sapiens
  misc_RNA (1)...(19): siRNA sense strand
guuggcagaucggcccaua

SEQ ID NO: 856566 - RNA, 19 nt, Homo sapiens
  misc_RNA (1)...(19): siRNA sense strand
gguccaacccuccagacaa

SEQ ID NO: 856567 - RNA, 19 nt, Homo sapiens
  misc_RNA (1)...(19): siRNA sense strand
aagaacauccuacuaacug

SEQ ID NO: 856568 - RNA, 19 nt, Homo sapiens
  misc_RNA (1)...(19): siRNA sense strand
cagagggcguucccaugga

SEQ ID NO: 856569 - RNA, 19 nt, Homo sapiens
  misc_RNA (1)...(19): siRNA sense strand
cggagagcccugcuugaaa

SEQ ID NO: 856570 - RNA, 19 nt, Homo sapiens
  misc_RNA (1)...(19): siRNA sense strand
ggcugucucucucccaaga

SEQ ID NO: 856571 - RNA, 19 nt, Homo sapiens
  misc_RNA (1)...(19): siRNA sense strand
cucggacgcugcugaagaa

SEQ ID NO: 856572 - RNA, 19 nt, Homo sapiens
  misc_RNA (1)...(19): siRNA sense strand
agaagaauagugagugugu

SEQ ID NO: 856573 - RNA, 19 nt, Homo sapiens
  misc_RNA (1)...(19): siRNA sense strand
ggccaaacaaggacgauag

SEQ ID NO: 856574 - RNA, 19 nt, Homo sapiens
  misc_RNA (1)...(19): siRNA sense strand
acacccagccguucucuca

SEQ ID NO: 856575 - RNA, 19 nt, Homo sapiens
  misc_RNA (1)...(19): siRNA sense strand
ccggagagcccugcuugaa

SEQ ID NO: 856576 - RNA, 19 nt, Homo sapiens
  misc_RNA (1)...(19): siRNA sense strand
cauggagccaggucuguug

SEQ ID NO: 856577 - RNA, 19 nt, Homo sapiens
  misc_RNA (1)...(19): siRNA sense strand
cugcgacgcgugcuggaua

SEQ ID NO: 856578 - RNA, 19 nt, Homo sapiens
  misc_RNA (1)...(19): siRNA sense strand
ccuggcuccuccaaacauu

SEQ ID NO: 856579 - RNA, 19 nt, Homo sapiens
  misc_RNA (1)...(19): siRNA sense strand
ccucggacgcugcugaaga

SEQ ID NO: 856580 - RNA, 19 nt, Homo sapiens
  misc_RNA (1)...(19): siRNA sense strand
uggagaagcugcaggaaag

SEQ ID NO: 856581 - RNA, 19 nt, Homo sapiens
  misc_RNA (1)...(19): siRNA sense strand
gagaagcugcaggaaagua

SEQ ID NO: 856582 - RNA, 19 nt, Homo sapiens
  misc_RNA (1)...(19): siRNA sense strand
aggaggagaugaaggugaa

SEQ ID NO: 856583 - RNA, 19 nt, Homo sapiens
  misc_RNA (1)...(19): siRNA sense strand
ggaggggcauggcaaauuc

SEQ ID NO: 856584 - RNA, 19 nt, Homo sapiens
  misc_RNA (1)...(19): siRNA sense strand
ggaauugccucggguggau

SEQ ID NO: 856585 - RNA, 19 nt, Homo sapiens
  misc_RNA (1)...(19): siRNA sense strand
ggaguucauuuggugcuaa

SEQ ID NO: 856586 - RNA, 19 nt, Homo sapiens
  misc_RNA (1)...(19): siRNA sense strand
gcacagguaggaguucauu

SEQ ID NO: 856587 - RNA, 19 nt, Homo sapiens
  misc_RNA (1)...(19): siRNA sense strand
gagcacagguaggaguuca

SEQ ID NO: 856588 - RNA, 19 nt, Homo sapiens
  misc_RNA (1)...(19): siRNA sense strand
gguagaggaagcaggagua

SEQ ID NO: 856589 - RNA, 19 nt, Homo sapiens
  misc_RNA (1)...(19): siRNA sense strand
ggaagcaggaguagacaca

SEQ ID NO: 856590 - RNA, 19 nt, Homo sapiens
  misc_RNA (1)...(19): siRNA sense strand
gcaggaguagacacaauga

SEQ ID NO: 856591 - RNA, 19 nt, Homo sapiens
  misc_RNA (1)...(19): siRNA sense strand
guguguauuuguucaucua

SEQ ID NO: 856592 - RNA, 19 nt, Homo sapiens
  misc_RNA (1)...(19): siRNA sense strand
ugagagcacauuagaaaca

SEQ ID NO: 856593 - RNA, 19 nt, Homo sapiens
  misc_RNA (1)...(19): siRNA sense strand
gggauucauucauucuaca

SEQ ID NO: 856594 - RNA, 19 nt, Homo sapiens
  misc_RNA (1)...(19): siRNA sense strand
acagguaggaguucauuug

SEQ ID NO: 856595 - RNA, 19 nt, Homo sapiens
  misc_RNA (1)...(19): siRNA sense strand
aaacaggcacaaucacaga

SEQ ID NO: 856596 - RNA, 19 nt, Homo sapiens
  misc_RNA (1)...(19): siRNA sense strand
gagagcacauuagaaacag

SEQ ID NO: 856597 - RNA, 19 nt, Homo sapiens
  misc_RNA (1)...(19): siRNA sense strand
uuagaaacaggcacaauca

SEQ ID NO: 856598 - RNA, 19 nt, Homo sapiens
  misc_RNA (1)...(19): siRNA sense strand
aagcaggaguagacacaau

SEQ ID NO: 856599 - RNA, 19 nt, Homo sapiens
  misc_RNA (1)...(19): siRNA sense strand
ucauuuggugcuaauagua

SEQ ID NO: 856600 - RNA, 19 nt, Homo sapiens
  misc_RNA (1)...(19): siRNA sense strand
guguguguguguauuuguu

SEQ ID NO: 856601 - RNA, 19 nt, Homo sapiens
  misc_RNA (1)...(19): siRNA sense strand
gaguucauuuggugcuaau

SEQ ID NO: 856602 - RNA, 19 nt, Homo sapiens
  misc_RNA (1)...(19): siRNA sense strand
ggccuagacuggguaugug

SEQ ID NO: 856603 - RNA, 19 nt, Homo sapiens
  misc_RNA (1)...(19): siRNA sense strand
agaaacaggcacaaucaca

SEQ ID NO: 856604 - RNA, 19 nt, Homo sapiens
  misc_RNA (1)...(19): siRNA sense strand
gaagcaggaguagacacaa

SEQ ID NO: 856605 - RNA, 19 nt, Homo sapiens
  misc_RNA (1)...(19): siRNA sense strand
guucauuuggugcuaauag

SEQ ID NO: 856606 - RNA, 19 nt, Homo sapiens
  misc_RNA (1)...(19): siRNA sense strand
ggaaauugguuaacaagaa

SEQ ID NO: 856607 - RNA, 19 nt, Homo sapiens
  misc_RNA (1)...(19): siRNA sense strand
gaagucauuugcaaaggua

SEQ ID NO: 856608 - RNA, 19 nt, Homo sapiens
  misc_RNA (1)...(19): siRNA sense strand
ucacugggcuugaagguuu

SEQ ID NO: 856609 - RNA, 19 nt, Homo sapiens
  misc_RNA (1)...(19): siRNA sense strand
aaagaagacuggugaggua

SEQ ID NO: 856610 - RNA, 19 nt, Homo sapiens
  misc_RNA (1)...(19): siRNA sense strand
gguuugaucugguggguua

SEQ ID NO: 856611 - RNA, 19 nt, Homo sapiens
  misc_RNA (1)...(19): siRNA sense strand
gcaaagguaccucagaauu

SEQ ID NO: 856612 - RNA, 19 nt, Homo sapiens
  misc_RNA (1)...(19): siRNA sense strand
caaagguaccucagaauuu

SEQ ID NO: 856613 - RNA, 19 nt, Homo sapiens
  misc_RNA (1)...(19): siRNA sense strand
gaaauugguuaacaagaag

SEQ ID NO: 856614 - RNA, 19 nt, Homo sapiens
  misc_RNA (1)...(19): siRNA sense strand
cagcucaccugcucaauga

SEQ ID NO: 856615 - RNA, 19 nt, Homo sapiens
  misc_RNA (1)...(19): siRNA sense strand
caaagaaggacacaauuau

SEQ ID NO: 856616 - RNA, 19 nt, Homo sapiens
  misc_RNA (1)...(19): siRNA sense strand
gggacaaugauguuaauua

SEQ ID NO: 856617 - RNA, 19 nt, Homo sapiens
  misc_RNA (1)...(19): siRNA sense strand
gcacugaucaugacagaug

SEQ ID NO: 856618 - RNA, 19 nt, Homo sapiens
  misc_RNA (1)...(19): siRNA sense strand
gauuauggcuuugucaaga

SEQ ID NO: 856619 - RNA, 19 nt, Homo sapiens
  misc_RNA (1)...(19): siRNA sense strand
caucuggccuuucagguuu

SEQ ID NO: 856620 - RNA, 19 nt, Homo sapiens
  misc_RNA (1)...(19): siRNA sense strand
ugggaccgaugaucuauua

SEQ ID NO: 856621 - RNA, 19 nt, Homo sapiens
  misc_RNA (1)...(19): siRNA sense strand
acaaagaaggacacaauua

SEQ ID NO: 856622 - RNA, 19 nt, Homo sapiens
  misc_RNA (1)...(19): siRNA sense strand
gcuauuugguccuaagaaa

SEQ ID NO: 856623 - RNA, 19 nt, Homo sapiens
  misc_RNA (1)...(19): siRNA sense strand
ggacagauuguucuuguug

SEQ ID NO: 856624 - RNA, 19 nt, Homo sapiens
  misc_RNA (1)...(19): siRNA sense strand
gcauuucuuucuccaauau

SEQ ID NO: 856625 - RNA, 19 nt, Homo sapiens
  misc_RNA (1)...(19): siRNA sense strand
aaagguaccucagaauuug

SEQ ID NO: 856626 - RNA, 19 nt, Homo sapiens
  misc_RNA (1)...(19): siRNA sense strand
gccaucacauugaccguua

SEQ ID NO: 856627 - RNA, 19 nt, Homo sapiens
  misc_RNA (1)...(19): siRNA sense strand
gaaggacacaauuaugaaa

SEQ ID NO: 856628 - RNA, 19 nt, Homo sapiens
  misc_RNA (1)...(19): siRNA sense strand
acacuuggacaccuuauua

SEQ ID NO: 856629 - RNA, 19 nt, Homo sapiens
  misc_RNA (1)...(19): siRNA sense strand
gugcacagcuuuuaaguuu

SEQ ID NO: 856630 - RNA, 19 nt, Homo sapiens
  misc_RNA (1)...(19): siRNA sense strand
uuaauuaucgggcugaaua

SEQ ID NO: 856631 - RNA, 19 nt, Homo sapiens
  misc_RNA (1)...(19): siRNA sense strand
cagauggugugaauacauu

SEQ ID NO: 856632 - RNA, 19 nt, Homo sapiens
  misc_RNA (1)...(19): siRNA sense strand
guuaucagauguccaacaa

SEQ ID NO: 856633 - RNA, 19 nt, Homo sapiens
  misc_RNA (1)...(19): siRNA sense strand
cgggcaagcugguggauuu

SEQ ID NO: 856634 - RNA, 19 nt, Homo sapiens
  misc_RNA (1)...(19): siRNA sense strand
caaaguggcaccaaccaaa

SEQ ID NO: 856635 - RNA, 19 nt, Homo sapiens
  misc_RNA (1)...(19): siRNA sense strand
gugcagauuucauaacaau

SEQ ID NO: 856636 - RNA, 19 nt, Homo sapiens
  misc_RNA (1)...(19): siRNA sense strand
caagauacccaauugugaa

SEQ ID NO: 856637 - RNA, 19 nt, Homo sapiens
  misc_RNA (1)...(19): siRNA sense strand
aacaagaaguggaugcuaa

SEQ ID NO: 856638 - RNA, 19 nt, Homo sapiens
  misc_RNA (1)...(19): siRNA sense strand
aagaugaccucgacaggaa

SEQ ID NO: 856639 - RNA, 19 nt, Homo sapiens
  misc_RNA (1)...(19): siRNA sense strand
gauuaggacuacggcauaa

SEQ ID NO: 856640 - RNA, 19 nt, Homo sapiens
  misc_RNA (1)...(19): siRNA sense strand
ggaagucauuugcaaaggu

SEQ ID NO: 856641 - RNA, 19 nt, Homo sapiens
  misc_RNA (1)...(19): siRNA sense strand
ggauuaggacuacggcaua

SEQ ID NO: 856642 - RNA, 19 nt, Homo sapiens
  misc_RNA (1)...(19): siRNA sense strand
caugacagauggugugaau

SEQ ID NO: 856643 - RNA, 19 nt, Homo sapiens
  misc_RNA (1)...(19): siRNA sense strand
uaaacccaaucuggaguua

SEQ ID NO: 856644 - RNA, 19 nt, Homo sapiens
  misc_RNA (1)...(19): siRNA sense strand
acaggaaacugcaggcuau

SEQ ID NO: 856645 - RNA, 19 nt, Homo sapiens
  misc_RNA (1)...(19): siRNA sense strand
gauggugacugcaguaaac

SEQ ID NO: 856646 - RNA, 19 nt, Homo sapiens
  misc_RNA (1)...(19): siRNA sense strand
acaaagugauacugacauu

SEQ ID NO: 856647 - RNA, 19 nt, Homo sapiens
  misc_RNA (1)...(19): siRNA sense strand
uaucagauguccaacaaag

SEQ ID NO: 856648 - RNA, 19 nt, Homo sapiens
  misc_RNA (1)...(19): siRNA sense strand
gaccgaugaucuauuacuu

SEQ ID NO: 856649 - RNA, 19 nt, Homo sapiens
  misc_RNA (1)...(19): siRNA sense strand
ggaguuaucagauguccaa

SEQ ID NO: 856650 - RNA, 19 nt, Homo sapiens
  misc_RNA (1)...(19): siRNA sense strand
aaaguuggguuucuauaca

SEQ ID NO: 856651 - RNA, 19 nt, Homo sapiens
  misc_RNA (1)...(19): siRNA sense strand
ggagagugaugcuucuaag

SEQ ID NO: 856652 - RNA, 19 nt, Homo sapiens
  misc_RNA (1)...(19): siRNA sense strand
gaauacucccaaauacuuu

SEQ ID NO: 856653 - RNA, 19 nt, Homo sapiens
  misc_RNA (1)...(19): siRNA sense strand
guucuacgcauaugguaua

SEQ ID NO: 856654 - RNA, 19 nt, Homo sapiens
  misc_RNA (1)...(19): siRNA sense strand
aaaaguagcucuaaucaag

SEQ ID NO: 856655 - RNA, 19 nt, Homo sapiens
  misc_RNA (1)...(19): siRNA sense strand
aaacaguucuaaagugcuu

SEQ ID NO: 856656 - RNA, 19 nt, Homo sapiens
  misc_RNA (1)...(19): siRNA sense strand
ggccagauccuaacccauu

SEQ ID NO: 856657 - RNA, 19 nt, Homo sapiens
  misc_RNA (1)...(19): siRNA sense strand
cuacgcauaugguauacuu

SEQ ID NO: 856658 - RNA, 19 nt, Homo sapiens
  misc_RNA (1)...(19): siRNA sense strand
cauaugguauacuucacua

SEQ ID NO: 856659 - RNA, 19 nt, Homo sapiens
  misc_RNA (1)...(19): siRNA sense strand
ugaauacucccaaauacuu

SEQ ID NO: 856660 - RNA, 19 nt, Homo sapiens
  misc_RNA (1)...(19): siRNA sense strand
gaccauugccaugauauuu

SEQ ID NO: 856661 - RNA, 19 nt, Homo sapiens
  misc_RNA (1)...(19): siRNA sense strand
gcaguaaaccugaagaaaa

SEQ ID NO: 856662 - RNA, 19 nt, Homo sapiens
  misc_RNA (1)...(19): siRNA sense strand
cagguuggguuaugcaaga

SEQ ID NO: 856663 - RNA, 19 nt, Homo sapiens
  misc_RNA (1)...(19): siRNA sense strand
cgacagcacugaucaugac

SEQ ID NO: 856664 - RNA, 19 nt, Homo sapiens
  misc_RNA (1)...(19): siRNA sense strand
gcaccagccaucacauuga

SEQ ID NO: 856665 - RNA, 19 nt, Homo sapiens
  misc_RNA (1)...(19): siRNA sense strand
aacaaugacuuaaccaugu

SEQ ID NO: 856666 - RNA, 19 nt, Homo sapiens
  misc_RNA (1)...(19): siRNA sense strand
ccgaugaucuauuacuuuc

SEQ ID NO: 856667 - RNA, 19 nt, Homo sapiens
  misc_RNA (1)...(19): siRNA sense strand
aagaaggacacaauuauga

SEQ ID NO: 856668 - RNA, 19 nt, Homo sapiens
  misc_RNA (1)...(19): siRNA sense strand
caaagugauacugacauua

SEQ ID NO: 856669 - RNA, 19 nt, Homo sapiens
  misc_RNA (1)...(19): siRNA sense strand
cuacaaagaaggacacaau

SEQ ID NO: 856670 - RNA, 19 nt, Homo sapiens
  misc_RNA (1)...(19): siRNA sense strand
gauacccaauugugaaauc

SEQ ID NO: 856671 - RNA, 19 nt, Homo sapiens
  misc_RNA (1)...(19): siRNA sense strand
uagcauuucuuucuccaau

SEQ ID NO: 856672 - RNA, 19 nt, Homo sapiens
  misc_RNA (1)...(19): siRNA sense strand
gccagauccuaacccauuu

SEQ ID NO: 856673 - RNA, 19 nt, Homo sapiens
  misc_RNA (1)...(19): siRNA sense strand
caauuacuccuuucuggaa

SEQ ID NO: 856674 - RNA, 19 nt, Homo sapiens
  misc_RNA (1)...(19): siRNA sense strand
uaggacagauuguucuugu

SEQ ID NO: 856675 - RNA, 19 nt, Homo sapiens
  misc_RNA (1)...(19): siRNA sense strand
ggguuucuauacagacuuu

SEQ ID NO: 856676 - RNA, 19 nt, Homo sapiens
  misc_RNA (1)...(19): siRNA sense strand
caacaaagugauacugaca

SEQ ID NO: 856677 - RNA, 19 nt, Homo sapiens
  misc_RNA (1)...(19): siRNA sense strand
uaugaauacucccaaauac

SEQ ID NO: 856678 - RNA, 19 nt, Homo sapiens
  misc_RNA (1)...(19): siRNA sense strand
gcuugaagguuuuaguaua

SEQ ID NO: 856679 - RNA, 19 nt, Homo sapiens
  misc_RNA (1)...(19): siRNA sense strand
ucaagauacccaauuguga

SEQ ID NO: 856680 - RNA, 19 nt, Homo sapiens
  misc_RNA (1)...(19): siRNA sense strand
guuuggauaugacaaugaa

SEQ ID NO: 856681 - RNA, 19 nt, Homo sapiens
  misc_RNA (1)...(19): siRNA sense strand
agaaagaucagaugugcuu

SEQ ID NO: 856682 - RNA, 19 nt, Homo sapiens
  misc_RNA (1)...(19): siRNA sense strand
gcacagcuuuuaaguuugu

SEQ ID NO: 856683 - RNA, 19 nt, Homo sapiens
  misc_RNA (1)...(19): siRNA sense strand
cagcacugaucaugacaga

SEQ ID NO: 856684 - RNA, 19 nt, Homo sapiens
  misc_RNA (1)...(19): siRNA sense strand
uugcaaagguaccucagaa

SEQ ID NO: 856685 - RNA, 19 nt, Homo sapiens
  misc_RNA (1)...(19): siRNA sense strand
acauugaccguuaacauuu

SEQ ID NO: 856686 - RNA, 19 nt, Homo sapiens
  misc_RNA (1)...(19): siRNA sense strand
ucuccaauauuccuaacaa

SEQ ID NO: 856687 - RNA, 19 nt, Homo sapiens
  misc_RNA (1)...(19): siRNA sense strand
cacauugaccguuaacauu

SEQ ID NO: 856688 - RNA, 19 nt, Homo sapiens
  misc_RNA (1)...(19): siRNA sense strand
ccauugccaugauauuuua

SEQ ID NO: 856689 - RNA, 19 nt, Homo sapiens
  misc_RNA (1)...(19): siRNA sense strand
uagccacacuugaucguau

SEQ ID NO: 856690 - RNA, 19 nt, Homo sapiens
  misc_RNA (1)...(19): siRNA sense strand
gucaggaagucauuugcaa

SEQ ID NO: 856691 - RNA, 19 nt, Homo sapiens
  misc_RNA (1)...(19): siRNA sense strand
ucauaugaauacucccaaa

SEQ ID NO: 856692 - RNA, 19 nt, Homo sapiens
  misc_RNA (1)...(19): siRNA sense strand
aaagaaggacacaauuaug

SEQ ID NO: 856693 - RNA, 19 nt, Homo sapiens
  misc_RNA (1)...(19): siRNA sense strand
ugacagauggugugaauac

SEQ ID NO: 856694 - RNA, 19 nt, Homo sapiens
  misc_RNA (1)...(19): siRNA sense strand
gcucaccugcucaaugaaa

SEQ ID NO: 856695 - RNA, 19 nt, Homo sapiens
  misc_RNA (1)...(19): siRNA sense strand
caaacacuuggacaccuua

SEQ ID NO: 856696 - RNA, 19 nt, Homo sapiens
  misc_RNA (1)...(19): siRNA sense strand
acagauuguucuuguuguu

SEQ ID NO: 856697 - RNA, 19 nt, Homo sapiens
  misc_RNA (1)...(19): siRNA sense strand
gaucuauuacuuuccuuug

SEQ ID NO: 856698 - RNA, 19 nt, Homo sapiens
  misc_RNA (1)...(19): siRNA sense strand
gcaaaguggcaccaaccaa

SEQ ID NO: 856699 - RNA, 19 nt, Homo sapiens
  misc_RNA (1)...(19): siRNA sense strand
aauuuaggaucccugauga

SEQ ID NO: 856700 - RNA, 19 nt, Homo sapiens
  misc_RNA (1)...(19): siRNA sense strand
gauguccaacaaagugaua

SEQ ID NO: 856701 - RNA, 19 nt, Homo sapiens
  misc_RNA (1)...(19): siRNA sense strand
uuauggcuuugucaagaua

SEQ ID NO: 856702 - RNA, 19 nt, Homo sapiens
  misc_RNA (1)...(19): siRNA sense strand
gaugaucuauuacuuuccu

SEQ ID NO: 856703 - RNA, 19 nt, Homo sapiens
  misc_RNA (1)...(19): siRNA sense strand
ugacugcaguaaaccugaa

SEQ ID NO: 856704 - RNA, 19 nt, Homo sapiens
  misc_RNA (1)...(19): siRNA sense strand
gaucagcucaccugcucaa

SEQ ID NO: 856705 - RNA, 19 nt, Homo sapiens
  misc_RNA (1)...(19): siRNA sense strand
gaaaucugagcaucaccuu

SEQ ID NO: 856706 - RNA, 19 nt, Homo sapiens
  misc_RNA (1)...(19): siRNA sense strand
cagaacagccugcgcuuug

SEQ ID NO: 856707 - RNA, 19 nt, Homo sapiens
  misc_RNA (1)...(19): siRNA sense strand
gaaguuccagcuccgaguu

SEQ ID NO: 856708 - RNA, 19 nt, Homo sapiens
  misc_RNA (1)...(19): siRNA sense strand
ggcgguggcugacaagauc

SEQ ID NO: 856709 - RNA, 19 nt, Homo sapiens
  misc_RNA (1)...(19): siRNA sense strand
gguuugcccugaggacauu

SEQ ID NO: 856710 - RNA, 19 nt, Homo sapiens
  misc_RNA (1)...(19): siRNA sense strand
gagcuguacuaccauacca

SEQ ID NO: 856711 - RNA, 19 nt, Homo sapiens
  misc_RNA (1)...(19): siRNA sense strand
ucagggcuguggccgaguu

SEQ ID NO: 856712 - RNA, 19 nt, Homo sapiens
  misc_RNA (1)...(19): siRNA sense strand
ggucaacaacucuguguac

SEQ ID NO: 856713 - RNA, 19 nt, Homo sapiens
  misc_RNA (1)...(19): siRNA sense strand
caucugccauggccucagu

SEQ ID NO: 856714 - RNA, 19 nt, Homo sapiens
  misc_RNA (1)...(19): siRNA sense strand
acaacucuguguacaccaa

SEQ ID NO: 856715 - RNA, 19 nt, Homo sapiens
  misc_RNA (1)...(19): siRNA sense strand
ccuuugacguggagcagaa

SEQ ID NO: 856716 - RNA, 19 nt, Homo sapiens
  misc_RNA (1)...(19): siRNA sense strand
cuaccagggagccaaguuu

SEQ ID NO: 856717 - RNA, 19 nt, Homo sapiens
  misc_RNA (1)...(19): siRNA sense strand
cgaguauccugauguucca

SEQ ID NO: 856718 - RNA, 19 nt, Homo sapiens
  misc_RNA (1)...(19): siRNA sense strand
gucaacaacucuguguaca

SEQ ID NO: 856719 - RNA, 19 nt, Homo sapiens
  misc_RNA (1)...(19): siRNA sense strand
ccagaacagccugcgcuuu

SEQ ID NO: 856720 - RNA, 19 nt, Homo sapiens
  misc_RNA (1)...(19): siRNA sense strand
caaugggagccgugaggaa

SEQ ID NO: 856721 - RNA, 19 nt, Homo sapiens
  misc_RNA (1)...(19): siRNA sense strand
ccuucgagcuguacuacca

SEQ ID NO: 856722 - RNA, 19 nt, Homo sapiens
  misc_RNA (1)...(19): siRNA sense strand
uccaggagguccacgucaa

SEQ ID NO: 856723 - RNA, 19 nt, Homo sapiens
  misc_RNA (1)...(19): siRNA sense strand
ucccgaguauccugauguu

SEQ ID NO: 856724 - RNA, 19 nt, Homo sapiens
  misc_RNA (1)...(19): siRNA sense strand
ggaauucacugccucacua

SEQ ID NO: 856725 - RNA, 19 nt, Homo sapiens
  misc_RNA (1)...(19): siRNA sense strand
cagcuacucuggagguuua

SEQ ID NO: 856726 - RNA, 19 nt, Homo sapiens
  misc_RNA (1)...(19): siRNA sense strand
gcagaugagugugcuuuau

SEQ ID NO: 856727 - RNA, 19 nt, Homo sapiens
  misc_RNA (1)...(19): siRNA sense strand
ugaaacagaucuugaaagg

SEQ ID NO: 856728 - RNA, 19 nt, Homo sapiens
  misc_RNA (1)...(19): siRNA sense strand
aaacagcacuuugcagaug

SEQ ID NO: 856729 - RNA, 19 nt, Homo sapiens
  misc_RNA (1)...(19): siRNA sense strand
ccucacuacugcugauaua

SEQ ID NO: 856730 - RNA, 19 nt, Homo sapiens
  misc_RNA (1)...(19): siRNA sense strand
gggaaccauuacucauaua

SEQ ID NO: 856731 - RNA, 19 nt, Homo sapiens
  misc_RNA (1)...(19): siRNA sense strand
agaugagugugcuuuauuu

SEQ ID NO: 856732 - RNA, 19 nt, Homo sapiens
  misc_RNA (1)...(19): siRNA sense strand
gcugauauacacaaugcua

SEQ ID NO: 856733 - RNA, 19 nt, Homo sapiens
  misc_RNA (1)...(19): siRNA sense strand
gauauacacaaugcuauga

SEQ ID NO: 856734 - RNA, 19 nt, Homo sapiens
  misc_RNA (1)...(19): siRNA sense strand
ggaaccauuacucauauau

SEQ ID NO: 856735 - RNA, 19 nt, Homo sapiens
  misc_RNA (1)...(19): siRNA sense strand
cuuaaugugugcaccugua

SEQ ID NO: 856736 - RNA, 19 nt, Homo sapiens
  misc_RNA (1)...(19): siRNA sense strand
cagaugagugugcuuuauu

SEQ ID NO: 856737 - RNA, 19 nt, Homo sapiens
  misc_RNA (1)...(19): siRNA sense strand
ugauaccucucaccucuuc

SEQ ID NO: 856738 - RNA, 19 nt, Homo sapiens
  misc_RNA (1)...(19): siRNA sense strand
ugagugugcuuuauuuuga

SEQ ID NO: 856739 - RNA, 19 nt, Homo sapiens
  misc_RNA (1)...(19): siRNA sense strand
gcaccuguagucucagcua

SEQ ID NO: 856740 - RNA, 19 nt, Homo sapiens
  misc_RNA (1)...(19): siRNA sense strand
cuaauuaugauaccucuca

SEQ ID NO: 856741 - RNA, 19 nt, Homo sapiens
  misc_RNA (1)...(19): siRNA sense strand
ggauaaacagcacuuugca

SEQ ID NO: 856742 - RNA, 19 nt, Homo sapiens
  misc_RNA (1)...(19): siRNA sense strand
gugugcaccuguagucuca

SEQ ID NO: 856743 - RNA, 19 nt, Homo sapiens
  misc_RNA (1)...(19): siRNA sense strand
gggauaaacagcacuuugc

SEQ ID NO: 856744 - RNA, 19 nt, Homo sapiens
  misc_RNA (1)...(19): siRNA sense strand
ggggaaccauuacucauau

SEQ ID NO: 856745 - RNA, 19 nt, Homo sapiens
  misc_RNA (1)...(19): siRNA sense strand
gcccucagacacuucauga

SEQ ID NO: 856746 - RNA, 19 nt, Homo sapiens
  misc_RNA (1)...(19): siRNA sense strand
ucacuacugcugauauaca

SEQ ID NO: 856747 - RNA, 19 nt, Homo sapiens
  misc_RNA (1)...(19): siRNA sense strand
aacagcacuuugcagauga

SEQ ID NO: 856748 - RNA, 19 nt, Homo sapiens
  misc_RNA (1)...(19): siRNA sense strand
uaaacagcacuuugcagau

SEQ ID NO: 856749 - RNA, 19 nt, Homo sapiens
  misc_RNA (1)...(19): siRNA sense strand
ugauauacacaaugcuaug

SEQ ID NO: 856750 - RNA, 19 nt, Homo sapiens
  misc_RNA (1)...(19): siRNA sense strand
cugcugauauacacaaugc

SEQ ID NO: 856751 - RNA, 19 nt, Homo sapiens
  misc_RNA (1)...(19): siRNA sense strand
gaaaagacccuguaauuug

SEQ ID NO: 856752 - RNA, 19 nt, Homo sapiens
  misc_RNA (1)...(19): siRNA sense strand
gcaaggaggcccaagcauu

SEQ ID NO: 856753 - RNA, 19 nt, Homo sapiens
  misc_RNA (1)...(19): siRNA sense strand
ggaaggaaauggaagaaaa

SEQ ID NO: 856754 - RNA, 19 nt, Homo sapiens
  misc_RNA (1)...(19): siRNA sense strand
aaacaaggccuaugugaau

SEQ ID NO: 856755 - RNA, 19 nt, Homo sapiens
  misc_RNA (1)...(19): siRNA sense strand
ccacuuaaguucuccuuca

SEQ ID NO: 856756 - RNA, 19 nt, Homo sapiens
  misc_RNA (1)...(19): siRNA sense strand
gaauuacaaugccaagaag

SEQ ID NO: 856757 - RNA, 19 nt, Homo sapiens
  misc_RNA (1)...(19): siRNA sense strand
gguucuaaguacuccauua

SEQ ID NO: 856758 - RNA, 19 nt, Homo sapiens
  misc_RNA (1)...(19): siRNA sense strand
gggccuugcucaugugaaa

SEQ ID NO: 856759 - RNA, 19 nt, Homo sapiens
  misc_RNA (1)...(19): siRNA sense strand
caaccaguaucccuaggaa

SEQ ID NO: 856760 - RNA, 19 nt, Homo sapiens
  misc_RNA (1)...(19): siRNA sense strand
ccaaugacuuuacgagaca

SEQ ID NO: 856761 - RNA, 19 nt, Homo sapiens
  misc_RNA (1)...(19): siRNA sense strand
caaggaggcccaagcauuc

SEQ ID NO: 856762 - RNA, 19 nt, Homo sapiens
  misc_RNA (1)...(19): siRNA sense strand
caagaagacaugguuugua

SEQ ID NO: 856763 - RNA, 19 nt, Homo sapiens
  misc_RNA (1)...(19): siRNA sense strand
ugaauuacaaugccaagaa

SEQ ID NO: 856764 - RNA, 19 nt, Homo sapiens
  misc_RNA (1)...(19): siRNA sense strand
aagaagacaugguuuguac

SEQ ID NO: 856765 - RNA, 19 nt, Homo sapiens
  misc_RNA (1)...(19): siRNA sense strand
guucuaaguacuccauuaa

SEQ ID NO: 856766 - RNA, 19 nt, Homo sapiens
  misc_RNA (1)...(19): siRNA sense strand
gugaauaccaaugacuuua

SEQ ID NO: 856767 - RNA, 19 nt, Homo sapiens
  misc_RNA (1)...(19): siRNA sense strand
gguacuacauuugaugaau

SEQ ID NO: 856768 - RNA, 19 nt, Homo sapiens
  misc_RNA (1)...(19): siRNA sense strand
cccaagcauucuucucuuu

SEQ ID NO: 856769 - RNA, 19 nt, Homo sapiens
  misc_RNA (1)...(19): siRNA sense strand
auacauaccacuuaaguuc

SEQ ID NO: 856770 - RNA, 19 nt, Homo sapiens
  misc_RNA (1)...(19): siRNA sense strand
aaacgaaugcccaggaguu

SEQ ID NO: 856771 - RNA, 19 nt, Homo sapiens
  misc_RNA (1)...(19): siRNA sense strand
ccuguaauuuggaugacua

SEQ ID NO: 856772 - RNA, 19 nt, Homo sapiens
  misc_RNA (1)...(19): siRNA sense strand
aacaaggccuaugugaaua

SEQ ID NO: 856773 - RNA, 19 nt, Homo sapiens
  misc_RNA (1)...(19): siRNA sense strand
gaaaacaaggccuauguga

SEQ ID NO: 856774 - RNA, 19 nt, Homo sapiens
  misc_RNA (1)...(19): siRNA sense strand
guaauuuggaugacuaugu

SEQ ID NO: 856775 - RNA, 19 nt, Homo sapiens
  misc_RNA (1)...(19): siRNA sense strand
gaaauacauaccacuuaag

SEQ ID NO: 856776 - RNA, 19 nt, Homo sapiens
  misc_RNA (1)...(19): siRNA sense strand
ugacuuuacgagacaauaa

SEQ ID NO: 856777 - RNA, 19 nt, Homo sapiens
  misc_RNA (1)...(19): siRNA sense strand
cugaaauacauaccacuua

SEQ ID NO: 856778 - RNA, 19 nt, Homo sapiens
  misc_RNA (1)...(19): siRNA sense strand
gaauaccaaugacuuuacg

SEQ ID NO: 856779 - RNA, 19 nt, Homo sapiens
  misc_RNA (1)...(19): siRNA sense strand
gcauucuucucuuugcaau

SEQ ID NO: 856780 - RNA, 19 nt, Homo sapiens
  misc_RNA (1)...(19): siRNA sense strand
gcugaucggcaauguguga

SEQ ID NO: 856781 - RNA, 19 nt, Homo sapiens
  misc_RNA (1)...(19): siRNA sense strand
gcccaagcauucuucucuu

SEQ ID NO: 856782 - RNA, 19 nt, Homo sapiens
  misc_RNA (1)...(19): siRNA sense strand
gaucggcaaugugugaaag

SEQ ID NO: 856783 - RNA, 19 nt, Homo sapiens
  misc_RNA (1)...(19): siRNA sense strand
ggacagcugaaauacauac

SEQ ID NO: 856784 - RNA, 19 nt, Homo sapiens
  misc_RNA (1)...(19): siRNA sense strand
acacugggcagcucuccua

SEQ ID NO: 856785 - RNA, 19 nt, Homo sapiens
  misc_RNA (1)...(19): siRNA sense strand
gccaagaagacaugguuug

SEQ ID NO: 856786 - RNA, 19 nt, Homo sapiens
  misc_RNA (1)...(19): siRNA sense strand
gcugaaauacauaccacuu

SEQ ID NO: 856787 - RNA, 19 nt, Homo sapiens
  misc_RNA (1)...(19): siRNA sense strand
cugggcagcucuccuacaa

SEQ ID NO: 856788 - RNA, 19 nt, Homo sapiens
  misc_RNA (1)...(19): siRNA sense strand
aagaaaagacccuguaauu

SEQ ID NO: 856789 - RNA, 19 nt, Homo sapiens
  misc_RNA (1)...(19): siRNA sense strand
ggggacagcugaaauacau

SEQ ID NO: 856790 - RNA, 19 nt, Homo sapiens
  misc_RNA (1)...(19): siRNA sense strand
ggaagaaaagacccuguaa

SEQ ID NO: 856791 - RNA, 19 nt, Homo sapiens
  misc_RNA (1)...(19): siRNA sense strand
ccaagaagacaugguuugu

SEQ ID NO: 856792 - RNA, 19 nt, Homo sapiens
  misc_RNA (1)...(19): siRNA sense strand
caagcauucuucucuuugc

SEQ ID NO: 856793 - RNA, 19 nt, Homo sapiens
  misc_RNA (1)...(19): siRNA sense strand
ccaagcauucuucucuuug

SEQ ID NO: 856794 - RNA, 19 nt, Homo sapiens
  misc_RNA (1)...(19): siRNA sense strand
guuuguaccagguuugaaa

SEQ ID NO: 856795 - RNA, 19 nt, Homo sapiens
  misc_RNA (1)...(19): siRNA sense strand
cgaaugcccaggaguucaa

SEQ ID NO: 856796 - RNA, 19 nt, Homo sapiens
  misc_RNA (1)...(19): siRNA sense strand
aaaagacccuguaauuugg

SEQ ID NO: 856797 - RNA, 19 nt, Homo sapiens
  misc_RNA (1)...(19): siRNA sense strand
agaaaagacccuguaauuu

SEQ ID NO: 856798 - RNA, 19 nt, Homo sapiens
  misc_RNA (1)...(19): siRNA sense strand
ccuaugugaauaccaauga

SEQ ID NO: 856799 - RNA, 19 nt, Homo sapiens
  misc_RNA (1)...(19): siRNA sense strand
uuacaggguucuaaguacu

SEQ ID NO: 856800 - RNA, 19 nt, Homo sapiens
  misc_RNA (1)...(19): siRNA sense strand
gaagaaaagacccuguaau

SEQ ID NO: 856801 - RNA, 19 nt, Homo sapiens
  misc_RNA (1)...(19): siRNA sense strand
caguaucccuaggaaggaa

SEQ ID NO: 856802 - RNA, 19 nt, Homo sapiens
  misc_RNA (1)...(19): siRNA sense strand
gacccuguaauuuggauga

SEQ ID NO: 856803 - RNA, 19 nt, Homo sapiens
  misc_RNA (1)...(19): siRNA sense strand
ugugaauaccaaugacuuu

SEQ ID NO: 856804 - RNA, 19 nt, Homo sapiens
  misc_RNA (1)...(19): siRNA sense strand
cuaggaaggaaauggaaga

SEQ ID NO: 856805 - RNA, 19 nt, Homo sapiens
  misc_RNA (1)...(19): siRNA sense strand
aggccuaugugaauaccaa

SEQ ID NO: 856806 - RNA, 19 nt, Homo sapiens
  misc_RNA (1)...(19): siRNA sense strand
ggccgguacuacauuugau

SEQ ID NO: 856807 - RNA, 19 nt, Homo sapiens
  misc_RNA (1)...(19): siRNA sense strand
ggcccaagcauucuucucu

SEQ ID NO: 856808 - RNA, 19 nt, Homo sapiens
  misc_RNA (1)...(19): siRNA sense strand
ucacaugggccuugcucau

SEQ ID NO: 856809 - RNA, 19 nt, Homo sapiens
  misc_RNA (1)...(19): siRNA sense strand
caagauaccucuaagauga

SEQ ID NO: 856810 - RNA, 19 nt, Homo sapiens
  misc_RNA (1)...(19): siRNA sense strand
caaagaagaugccuauauu

SEQ ID NO: 856811 - RNA, 19 nt, Homo sapiens
  misc_RNA (1)...(19): siRNA sense strand
guacucauguagcaaauuu

SEQ ID NO: 856812 - RNA, 19 nt, Homo sapiens
  misc_RNA (1)...(19): siRNA sense strand
ccagacaguuuaugaagaa

SEQ ID NO: 856813 - RNA, 19 nt, Homo sapiens
  misc_RNA (1)...(19): siRNA sense strand
gauccaagccucauuauag

SEQ ID NO: 856814 - RNA, 19 nt, Homo sapiens
  misc_RNA (1)...(19): siRNA sense strand
caagaaauuuggccugguu

SEQ ID NO: 856815 - RNA, 19 nt, Homo sapiens
  misc_RNA (1)...(19): siRNA sense strand
guucgaaguuuacaagaaa

SEQ ID NO: 856816 - RNA, 19 nt, Homo sapiens
  misc_RNA (1)...(19): siRNA sense strand
uggaacagauucuuucaaa

SEQ ID NO: 856817 - RNA, 19 nt, Homo sapiens
  misc_RNA (1)...(19): siRNA sense strand
gaaauccgauacuuagaag

SEQ ID NO: 856818 - RNA, 19 nt, Homo sapiens
  misc_RNA (1)...(19): siRNA sense strand
caagcuaacuaaccuuaau

SEQ ID NO: 856819 - RNA, 19 nt, Homo sapiens
  misc_RNA (1)...(19): siRNA sense strand
ccaaagaagaugccuauau

SEQ ID NO: 856820 - RNA, 19 nt, Homo sapiens
  misc_RNA (1)...(19): siRNA sense strand
cuacggguguguugaguaa

SEQ ID NO: 856821 - RNA, 19 nt, Homo sapiens
  misc_RNA (1)...(19): siRNA sense strand
gacaucagaaggacucuua

SEQ ID NO: 856822 - RNA, 19 nt, Homo sapiens
  misc_RNA (1)...(19): siRNA sense strand
cagaaacagucuucggaaa

SEQ ID NO: 856823 - RNA, 19 nt, Homo sapiens
  misc_RNA (1)...(19): siRNA sense strand
aacaggaguucgaaguuua

SEQ ID NO: 856824 - RNA, 19 nt, Homo sapiens
  misc_RNA (1)...(19): siRNA sense strand
aacaaggacucuucaggua

SEQ ID NO: 856825 - RNA, 19 nt, Homo sapiens
  misc_RNA (1)...(19): siRNA sense strand
gacaguuuaugaagaagaa

SEQ ID NO: 856826 - RNA, 19 nt, Homo sapiens
  misc_RNA (1)...(19): siRNA sense strand
gacaagcuaacuaaccuua

SEQ ID NO: 856827 - RNA, 19 nt, Homo sapiens
  misc_RNA (1)...(19): siRNA sense strand
gcaagauaccucuaagaug

SEQ ID NO: 856828 - RNA, 19 nt, Homo sapiens
  misc_RNA (1)...(19): siRNA sense strand
cagaaggacucuuauugca

SEQ ID NO: 856829 - RNA, 19 nt, Homo sapiens
  misc_RNA (1)...(19): siRNA sense strand
guaaagaacaaagcagaaa

SEQ ID NO: 856830 - RNA, 19 nt, Homo sapiens
  misc_RNA (1)...(19): siRNA sense strand
caacaaaagugguuauaca

SEQ ID NO: 856831 - RNA, 19 nt, Homo sapiens
  misc_RNA (1)...(19): siRNA sense strand
ucacaugcuugaauacugu

SEQ ID NO: 856832 - RNA, 19 nt, Homo sapiens
  misc_RNA (1)...(19): siRNA sense strand
ggagggagcuggaaaagca

SEQ ID NO: 856833 - RNA, 19 nt, Homo sapiens
  misc_RNA (1)...(19): siRNA sense strand
gcgcuucaaucaaacacuu

SEQ ID NO: 856834 - RNA, 19 nt, Homo sapiens
  misc_RNA (1)...(19): siRNA sense strand
gugcagacaagcuaacuaa

SEQ ID NO: 856835 - RNA, 19 nt, Homo sapiens
  misc_RNA (1)...(19): siRNA sense strand
ggccuaagcccaugccauu

SEQ ID NO: 856836 - RNA, 19 nt, Homo sapiens
  misc_RNA (1)...(19): siRNA sense strand
gcaauauuauacccagaca

SEQ ID NO: 856837 - RNA, 19 nt, Homo sapiens
  misc_RNA (1)...(19): siRNA sense strand
ugaauguacucauguagca

SEQ ID NO: 856838 - RNA, 19 nt, Homo sapiens
  misc_RNA (1)...(19): siRNA sense strand
uauagugguucaagccaaa

SEQ ID NO: 856839 - RNA, 19 nt, Homo sapiens
  misc_RNA (1)...(19): siRNA sense strand
ugaaauccgauacuuagaa

SEQ ID NO: 856840 - RNA, 19 nt, Homo sapiens
  misc_RNA (1)...(19): siRNA sense strand
uauuauacccagacaguuu

SEQ ID NO: 856841 - RNA, 19 nt, Homo sapiens
  misc_RNA (1)...(19): siRNA sense strand
caaacacuuucaaccaaca

SEQ ID NO: 856842 - RNA, 19 nt, Homo sapiens
  misc_RNA (1)...(19): siRNA sense strand
ccugcugacugccauaauu

SEQ ID NO: 856843 - RNA, 19 nt, Homo sapiens
  misc_RNA (1)...(19): siRNA sense strand
caaaaugggacaagaguuu

SEQ ID NO: 856844 - RNA, 19 nt, Homo sapiens
  misc_RNA (1)...(19): siRNA sense strand
guugauccaagccucauua

SEQ ID NO: 856845 - RNA, 19 nt, Homo sapiens
  misc_RNA (1)...(19): siRNA sense strand
ggaacagauucuuucaaaa

SEQ ID NO: 856846 - RNA, 19 nt, Homo sapiens
  misc_RNA (1)...(19): siRNA sense strand
caaagcagaaacagucuuc

SEQ ID NO: 856847 - RNA, 19 nt, Homo sapiens
  misc_RNA (1)...(19): siRNA sense strand
caaaagugguuauacaagu

SEQ ID NO: 856848 - RNA, 19 nt, Homo sapiens
  misc_RNA (1)...(19): siRNA sense strand
caucagaaggacucuuauu

SEQ ID NO: 856849 - RNA, 19 nt, Homo sapiens
  misc_RNA (1)...(19): siRNA sense strand
ggaguucgaaguuuacaag

SEQ ID NO: 856850 - RNA, 19 nt, Homo sapiens
  misc_RNA (1)...(19): siRNA sense strand
gaaauuuggccugguugug

SEQ ID NO: 856851 - RNA, 19 nt, Homo sapiens
  misc_RNA (1)...(19): siRNA sense strand
acaaggacucuucagguaa

SEQ ID NO: 856852 - RNA, 19 nt, Homo sapiens
  misc_RNA (1)...(19): siRNA sense strand
guguugaguaaaccaauua

SEQ ID NO: 856853 - RNA, 19 nt, Homo sapiens
  misc_RNA (1)...(19): siRNA sense strand
guugugaaauccgauacuu

SEQ ID NO: 856854 - RNA, 19 nt, Homo sapiens
  misc_RNA (1)...(19): siRNA sense strand
cagacaagcuaacuaaccu

SEQ ID NO: 856855 - RNA, 19 nt, Homo sapiens
  misc_RNA (1)...(19): siRNA sense strand
ccuaagcccaugccauuga

SEQ ID NO: 856856 - RNA, 19 nt, Homo sapiens
  misc_RNA (1)...(19): siRNA sense strand
cccagacaguuuaugaaga

SEQ ID NO: 856857 - RNA, 19 nt, Homo sapiens
  misc_RNA (1)...(19): siRNA sense strand
ucauguagcaaauuucuca

SEQ ID NO: 856858 - RNA, 19 nt, Homo sapiens
  misc_RNA (1)...(19): siRNA sense strand
aaauuuggccugguuguga

SEQ ID NO: 856859 - RNA, 19 nt, Homo sapiens
  misc_RNA (1)...(19): siRNA sense strand
gucgcaacccucagucaua

SEQ ID NO: 856860 - RNA, 19 nt, Homo sapiens
  misc_RNA (1)...(19): siRNA sense strand
aaagaagaugccuauauuc

SEQ ID NO: 856861 - RNA, 19 nt, Homo sapiens
  misc_RNA (1)...(19): siRNA sense strand
aaagaacaaagcagaaaca

SEQ ID NO: 856862 - RNA, 19 nt, Homo sapiens
  misc_RNA (1)...(19): siRNA sense strand
ugugaaauccgauacuuag

SEQ ID NO: 856863 - RNA, 19 nt, Homo sapiens
  misc_RNA (1)...(19): siRNA sense strand
uguguugaguaaaccaauu

SEQ ID NO: 856864 - RNA, 19 nt, Homo sapiens
  misc_RNA (1)...(19): siRNA sense strand
gcugacugccauaauucua

SEQ ID NO: 856865 - RNA, 19 nt, Homo sapiens
  misc_RNA (1)...(19): siRNA sense strand
gauauaucaaaccaaguug

SEQ ID NO: 856866 - RNA, 19 nt, Homo sapiens
  misc_RNA (1)...(19): siRNA sense strand
gcagacaagcuaacuaacc

SEQ ID NO: 856867 - RNA, 19 nt, Homo sapiens
  misc_RNA (1)...(19): siRNA sense strand
aucaaacacuuucaaccaa

SEQ ID NO: 856868 - RNA, 19 nt, Homo sapiens
  misc_RNA (1)...(19): siRNA sense strand
aaucaaacacuuucaacca

SEQ ID NO: 856869 - RNA, 19 nt, Homo sapiens
  misc_RNA (1)...(19): siRNA sense strand
uaucaaaccaaguuguauc

SEQ ID NO: 856870 - RNA, 19 nt, Homo sapiens
  misc_RNA (1)...(19): siRNA sense strand
gguucaagccaaagaagau

SEQ ID NO: 856871 - RNA, 19 nt, Homo sapiens
  misc_RNA (1)...(19): siRNA sense strand
agaaacagucuucggaaag

SEQ ID NO: 856872 - RNA, 19 nt, Homo sapiens
  misc_RNA (1)...(19): siRNA sense strand
agaaggacucuuauugcaa

SEQ ID NO: 856873 - RNA, 19 nt, Homo sapiens
  misc_RNA (1)...(19): siRNA sense strand
ucagaaggacucuuauugc

SEQ ID NO: 856874 - RNA, 19 nt, Homo sapiens
  misc_RNA (1)...(19): siRNA sense strand
cuaagcccaugccauugau

SEQ ID NO: 856875 - RNA, 19 nt, Homo sapiens
  misc_RNA (1)...(19): siRNA sense strand
ugauccaagccucauuaua

SEQ ID NO: 856876 - RNA, 19 nt, Homo sapiens
  misc_RNA (1)...(19): siRNA sense strand
ucagucauaccaccuacuu

SEQ ID NO: 856877 - RNA, 19 nt, Homo sapiens
  misc_RNA (1)...(19): siRNA sense strand
auuauacccagacaguuua

SEQ ID NO: 856878 - RNA, 19 nt, Homo sapiens
  misc_RNA (1)...(19): siRNA sense strand
guauccaacuggccuaagc

SEQ ID NO: 856879 - RNA, 19 nt, Homo sapiens
  misc_RNA (1)...(19): siRNA sense strand
aauuuggccugguugugaa

SEQ ID NO: 856880 - RNA, 19 nt, Homo sapiens
  misc_RNA (1)...(19): siRNA sense strand
aguucgaaguuuacaagaa

SEQ ID NO: 856881 - RNA, 19 nt, Homo sapiens
  misc_RNA (1)...(19): siRNA sense strand
aauauuauacccagacagu

SEQ ID NO: 856882 - RNA, 19 nt, Homo sapiens
  misc_RNA (1)...(19): siRNA sense strand
ucgcaacccucagucauac

SEQ ID NO: 856883 - RNA, 19 nt, Homo sapiens
  misc_RNA (1)...(19): siRNA sense strand
auacccagacaguuuauga

SEQ ID NO: 856884 - RNA, 19 nt, Homo sapiens
  misc_RNA (1)...(19): siRNA sense strand
ggggucauauuagugcuua

SEQ ID NO: 856885 - RNA, 19 nt, Homo sapiens
  misc_RNA (1)...(19): siRNA sense strand
aaauuucucagucccaguu

SEQ ID NO: 856886 - RNA, 19 nt, Homo sapiens
  misc_RNA (1)...(19): siRNA sense strand
ugcaagauaccucuaagau

SEQ ID NO: 856887 - RNA, 19 nt, Homo sapiens
  misc_RNA (1)...(19): siRNA sense strand
gcuugaauacuguggaaca

SEQ ID NO: 856888 - RNA, 19 nt, Homo sapiens
  misc_RNA (1)...(19): siRNA sense strand
uaaagaacaaagcagaaac

SEQ ID NO: 856889 - RNA, 19 nt, Homo sapiens
  misc_RNA (1)...(19): siRNA sense strand
ucaccuggauguauauaua

SEQ ID NO: 856890 - RNA, 19 nt, Homo sapiens
  misc_RNA (1)...(19): siRNA sense strand
gaaaggaaaccgucgaaga

SEQ ID NO: 856891 - RNA, 19 nt, Homo sapiens
  misc_RNA (1)...(19): siRNA sense strand
gaagaucgucccauuagaa

SEQ ID NO: 856892 - RNA, 19 nt, Homo sapiens
  misc_RNA (1)...(19): siRNA sense strand
cuugaaagcucccaggaua

SEQ ID NO: 856893 - RNA, 19 nt, Homo sapiens
  misc_RNA (1)...(19): siRNA sense strand
gaaaugacgacaaugauca

SEQ ID NO: 856894 - RNA, 19 nt, Homo sapiens
  misc_RNA (1)...(19): siRNA sense strand
gcagaguggucuugcaguu

SEQ ID NO: 856895 - RNA, 19 nt, Homo sapiens
  misc_RNA (1)...(19): siRNA sense strand
ugaccgaccugcucaguga

SEQ ID NO: 856896 - RNA, 19 nt, Homo sapiens
  misc_RNA (1)...(19): siRNA sense strand
ccagaucucacaauguuua

SEQ ID NO: 856897 - RNA, 19 nt, Homo sapiens
  misc_RNA (1)...(19): siRNA sense strand
gggccucccuccuagauuu

SEQ ID NO: 856898 - RNA, 19 nt, Homo sapiens
  misc_RNA (1)...(19): siRNA sense strand
acaccaauguuguuugaaa

SEQ ID NO: 856899 - RNA, 19 nt, Homo sapiens
  misc_RNA (1)...(19): siRNA sense strand
gagcccaacuugagucuuc

SEQ ID NO: 856900 - RNA, 19 nt, Homo sapiens
  misc_RNA (1)...(19): siRNA sense strand
gagaaggugugugaagcua

SEQ ID NO: 856901 - RNA, 19 nt, Homo sapiens
  misc_RNA (1)...(19): siRNA sense strand
cuacaccaauguuguuuga

SEQ ID NO: 856902 - RNA, 19 nt, Homo sapiens
  misc_RNA (1)...(19): siRNA sense strand
acacuugccucccucacua

SEQ ID NO: 856903 - RNA, 19 nt, Homo sapiens
  misc_RNA (1)...(19): siRNA sense strand
ccagggaaaugacgacaau

SEQ ID NO: 856904 - RNA, 19 nt, Homo sapiens
  misc_RNA (1)...(19): siRNA sense strand
cgucgaagaucgucccauu

SEQ ID NO: 856905 - RNA, 19 nt, Homo sapiens
  misc_RNA (1)...(19): siRNA sense strand
cagauuccuuggugucuuu

SEQ ID NO: 856906 - RNA, 19 nt, Homo sapiens
  misc_RNA (1)...(19): siRNA sense strand
caacuggacucuggagcuu

SEQ ID NO: 856907 - RNA, 19 nt, Homo sapiens
  misc_RNA (1)...(19): siRNA sense strand
cgacaaugaucagaagguu

SEQ ID NO: 856908 - RNA, 19 nt, Homo sapiens
  misc_RNA (1)...(19): siRNA sense strand
ggaaaugacgacaaugauc

SEQ ID NO: 856909 - RNA, 19 nt, Homo sapiens
  misc_RNA (1)...(19): siRNA sense strand
gccacugccucuugccaua

SEQ ID NO: 856910 - RNA, 19 nt, Homo sapiens
  misc_RNA (1)...(19): siRNA sense strand
uauagaagacccacacuug

SEQ ID NO: 856911 - RNA, 19 nt, Homo sapiens
  misc_RNA (1)...(19): siRNA sense strand
gaaggugugugaagcuaac

SEQ ID NO: 856912 - RNA, 19 nt, Homo sapiens
  misc_RNA (1)...(19): siRNA sense strand
cagagucuauguccaguuc

SEQ ID NO: 856913 - RNA, 19 nt, Homo sapiens
  misc_RNA (1)...(19): siRNA sense strand
agaguggucuugcaguuug

SEQ ID NO: 856914 - RNA, 19 nt, Homo sapiens
  misc_RNA (1)...(19): siRNA sense strand
aagaugugcuggaugcaaa

SEQ ID NO: 856915 - RNA, 19 nt, Homo sapiens
  misc_RNA (1)...(19): siRNA sense strand
guggugaccuguaggaauc

SEQ ID NO: 856916 - RNA, 19 nt, Homo sapiens
  misc_RNA (1)...(19): siRNA sense strand
ggauguauauauagaagac

SEQ ID NO: 856917 - RNA, 19 nt, Homo sapiens
  misc_RNA (1)...(19): siRNA sense strand
ugagacugcugaaugugaa

SEQ ID NO: 856918 - RNA, 19 nt, Homo sapiens
  misc_RNA (1)...(19): siRNA sense strand
cgaagaucgucccauuaga

SEQ ID NO: 856919 - RNA, 19 nt, Homo sapiens
  misc_RNA (1)...(19): siRNA sense strand
aaaggaaaccgucgaagau

SEQ ID NO: 856920 - RNA, 19 nt, Homo sapiens
  misc_RNA (1)...(19): siRNA sense strand
uuccagaucucacaauguu

SEQ ID NO: 856921 - RNA, 19 nt, Homo sapiens
  misc_RNA (1)...(19): siRNA sense strand
ugacgacaaugaucagaag

SEQ ID NO: 856922 - RNA, 19 nt, Homo sapiens
  misc_RNA (1)...(19): siRNA sense strand
gcagcaggccagagucuau

SEQ ID NO: 856923 - RNA, 19 nt, Homo sapiens
  misc_RNA (1)...(19): siRNA sense strand
ccuccuagauuucguccaa

SEQ ID NO: 856924 - RNA, 19 nt, Homo sapiens
  misc_RNA (1)...(19): siRNA sense strand
gcccucaguuucuaugugu

SEQ ID NO: 856925 - RNA, 19 nt, Homo sapiens
  misc_RNA (1)...(19): siRNA sense strand
cgauuguccugccuuucua

SEQ ID NO: 856926 - RNA, 19 nt, Homo sapiens
  misc_RNA (1)...(19): siRNA sense strand
gaagcuaacagucgcucuu

SEQ ID NO: 856927 - RNA, 19 nt, Homo sapiens
  misc_RNA (1)...(19): siRNA sense strand
cccagacccugccuucauu

SEQ ID NO: 856928 - RNA, 19 nt, Homo sapiens
  misc_RNA (1)...(19): siRNA sense strand
guccuauugugcuuucuuu

SEQ ID NO: 856929 - RNA, 19 nt, Homo sapiens
  misc_RNA (1)...(19): siRNA sense strand
gccaugagaagguguguga

SEQ ID NO: 856930 - RNA, 19 nt, Homo sapiens
  misc_RNA (1)...(19): siRNA sense strand
ucaguccgcugguuugagu

SEQ ID NO: 856931 - RNA, 19 nt, Homo sapiens
  misc_RNA (1)...(19): siRNA sense strand
cuaccuggcugaacuucug

SEQ ID NO: 856932 - RNA, 19 nt, Homo sapiens
  misc_RNA (1)...(19): siRNA sense strand
gagucuauguccaguucuu

SEQ ID NO: 856933 - RNA, 19 nt, Homo sapiens
  misc_RNA (1)...(19): siRNA sense strand
ccucaacaccucagacaga

SEQ ID NO: 856934 - RNA, 19 nt, Homo sapiens
  misc_RNA (1)...(19): siRNA sense strand
gcuauaagccaggccauca

SEQ ID NO: 856935 - RNA, 19 nt, Homo sapiens
  misc_RNA (1)...(19): siRNA sense strand
cccaggauauccaagaugu

SEQ ID NO: 856936 - RNA, 19 nt, Homo sapiens
  misc_RNA (1)...(19): siRNA sense strand
acaaugaucagaagguuca

SEQ ID NO: 856937 - RNA, 19 nt, Homo sapiens
  misc_RNA (1)...(19): siRNA sense strand
gcucuucaguccgcugguu

SEQ ID NO: 856938 - RNA, 19 nt, Homo sapiens
  misc_RNA (1)...(19): siRNA sense strand
gggaaaugacgacaaugau

SEQ ID NO: 856939 - RNA, 19 nt, Homo sapiens
  misc_RNA (1)...(19): siRNA sense strand
agagugggccucccuccua

SEQ ID NO: 856940 - RNA, 19 nt, Homo sapiens
  misc_RNA (1)...(19): siRNA sense strand
acaagucauugccugaauc

SEQ ID NO: 856941 - RNA, 19 nt, Homo sapiens
  misc_RNA (1)...(19): siRNA sense strand
ucuugagacugcugaaugu

SEQ ID NO: 856942 - RNA, 19 nt, Homo sapiens
  misc_RNA (1)...(19): siRNA sense strand
ucgaagaucgucccauuag

SEQ ID NO: 856943 - RNA, 19 nt, Homo sapiens
  misc_RNA (1)...(19): siRNA sense strand
aaacaagucauugccugaa

SEQ ID NO: 856944 - RNA, 19 nt, Homo sapiens
  misc_RNA (1)...(19): siRNA sense strand
gucgaagaucgucccauua

SEQ ID NO: 856945 - RNA, 19 nt, Homo sapiens
  misc_RNA (1)...(19): siRNA sense strand
ccauguggcagcagcacua

SEQ ID NO: 856946 - RNA, 19 nt, Homo sapiens
  misc_RNA (1)...(19): siRNA sense strand
cauaucgucucugucuuca

SEQ ID NO: 856947 - RNA, 19 nt, Homo sapiens
  misc_RNA (1)...(19): siRNA sense strand
ugaaagcucccaggauauc

SEQ ID NO: 856948 - RNA, 19 nt, Homo sapiens
  misc_RNA (1)...(19): siRNA sense strand
ccauaucgucucugucuuc

SEQ ID NO: 856949 - RNA, 19 nt, Homo sapiens
  misc_RNA (1)...(19): siRNA sense strand
acuggacucuggagcuuga

SEQ ID NO: 856950 - RNA, 19 nt, Homo sapiens
  misc_RNA (1)...(19): siRNA sense strand
cagaguggucuugcaguuu

SEQ ID NO: 856951 - RNA, 19 nt, Homo sapiens
  misc_RNA (1)...(19): siRNA sense strand
gcccuacgcagacagcuau

SEQ ID NO: 856952 - RNA, 19 nt, Homo sapiens
  misc_RNA (1)...(19): siRNA sense strand
guuuccagaucucacaaug

SEQ ID NO: 856953 - RNA, 19 nt, Homo sapiens
  misc_RNA (1)...(19): siRNA sense strand
gcccagacccugccuucau

SEQ ID NO: 856954 - RNA, 19 nt, Homo sapiens
  misc_RNA (1)...(19): siRNA sense strand
gaccugcucagugacaauu

SEQ ID NO: 856955 - RNA, 19 nt, Homo sapiens
  misc_RNA (1)...(19): siRNA sense strand
caagaugugcuggaugcaa

SEQ ID NO: 856956 - RNA, 19 nt, Homo sapiens
  misc_RNA (1)...(19): siRNA sense strand
uggcgucucucuggaugaa

SEQ ID NO: 856957 - RNA, 19 nt, Homo sapiens
  misc_RNA (1)...(19): siRNA sense strand
acagguguaccgacucgua

SEQ ID NO: 856958 - RNA, 19 nt, Homo sapiens
  misc_RNA (1)...(19): siRNA sense strand
agggaaaugacgacaauga

SEQ ID NO: 856959 - RNA, 19 nt, Homo sapiens
  misc_RNA (1)...(19): siRNA sense strand
ggaaaccgucgaagaucgu

SEQ ID NO: 856960 - RNA, 19 nt, Homo sapiens
  misc_RNA (1)...(19): siRNA sense strand
gcucccaggauauccaaga

SEQ ID NO: 856961 - RNA, 19 nt, Homo sapiens
  misc_RNA (1)...(19): siRNA sense strand
gaagccguggugaccugua

SEQ ID NO: 856962 - RNA, 19 nt, Homo sapiens
  misc_RNA (1)...(19): siRNA sense strand
ccacaucuaccuggcugaa

SEQ ID NO: 856963 - RNA, 19 nt, Homo sapiens
  misc_RNA (1)...(19): siRNA sense strand
gcuaacagucgcucuugag

SEQ ID NO: 856964 - RNA, 19 nt, Homo sapiens
  misc_RNA (1)...(19): siRNA sense strand
aacaagucauugccugaau

SEQ ID NO: 856965 - RNA, 19 nt, Homo sapiens
  misc_RNA (1)...(19): siRNA sense strand
cuauugugcuuucuuuuga

SEQ ID NO: 856966 - RNA, 19 nt, Homo sapiens
  misc_RNA (1)...(19): siRNA sense strand
ggaugcaaacaagucauug

SEQ ID NO: 856967 - RNA, 19 nt, Homo sapiens
  misc_RNA (1)...(19): siRNA sense strand
ucuggacacuuuguacuag

SEQ ID NO: 856968 - RNA, 19 nt, Homo sapiens
  misc_RNA (1)...(19): siRNA sense strand
cuaacagucgcucuugaga

SEQ ID NO: 856969 - RNA, 19 nt, Homo sapiens
  misc_RNA (1)...(19): siRNA sense strand
gaaagacaguuaacagaua

SEQ ID NO: 856970 - RNA, 19 nt, Homo sapiens
  misc_RNA (1)...(19): siRNA sense strand
gcacugcagucgaaauaua

SEQ ID NO: 856971 - RNA, 19 nt, Homo sapiens
  misc_RNA (1)...(19): siRNA sense strand
gaauuugacuucagacauu

SEQ ID NO: 856972 - RNA, 19 nt, Homo sapiens
  misc_RNA (1)...(19): siRNA sense strand
gugcagaaaucacaaagua

SEQ ID NO: 856973 - RNA, 19 nt, Homo sapiens
  misc_RNA (1)...(19): siRNA sense strand
ggaauuagauacacuucaa

SEQ ID NO: 856974 - RNA, 19 nt, Homo sapiens
  misc_RNA (1)...(19): siRNA sense strand
gaaauuacaucaggagaga

SEQ ID NO: 856975 - RNA, 19 nt, Homo sapiens
  misc_RNA (1)...(19): siRNA sense strand
ggaaauagccagcauggaa

SEQ ID NO: 856976 - RNA, 19 nt, Homo sapiens
  misc_RNA (1)...(19): siRNA sense strand
ccaagcagauugcagagua

SEQ ID NO: 856977 - RNA, 19 nt, Homo sapiens
  misc_RNA (1)...(19): siRNA sense strand
ugacauggauuuagaggaa

SEQ ID NO: 856978 - RNA, 19 nt, Homo sapiens
  misc_RNA (1)...(19): siRNA sense strand
gaaacgaaaggcacagaua

SEQ ID NO: 856979 - RNA, 19 nt, Homo sapiens
  misc_RNA (1)...(19): siRNA sense strand
aaaguaagaugacugaaga

SEQ ID NO: 856980 - RNA, 19 nt, Homo sapiens
  misc_RNA (1)...(19): siRNA sense strand
gaaaugaaccagaaauaca

SEQ ID NO: 856981 - RNA, 19 nt, Homo sapiens
  misc_RNA (1)...(19): siRNA sense strand
gaaauuagacaacuugaca

SEQ ID NO: 856982 - RNA, 19 nt, Homo sapiens
  misc_RNA (1)...(19): siRNA sense strand
gaagaaauuagacaacuug

SEQ ID NO: 856983 - RNA, 19 nt, Homo sapiens
  misc_RNA (1)...(19): siRNA sense strand
uaaagaugaugcaggauga

SEQ ID NO: 856984 - RNA, 19 nt, Homo sapiens
  misc_RNA (1)...(19): siRNA sense strand
ucaaguaccuagagaugaa

SEQ ID NO: 856985 - RNA, 19 nt, Homo sapiens
  misc_RNA (1)...(19): siRNA sense strand
gaaauagccagcauggaaa

SEQ ID NO: 856986 - RNA, 19 nt, Homo sapiens
  misc_RNA (1)...(19): siRNA sense strand
gaaagacaagcgaaagaaa

SEQ ID NO: 856987 - RNA, 19 nt, Homo sapiens
  misc_RNA (1)...(19): siRNA sense strand
ggaagagagagagaaauua

SEQ ID NO: 856988 - RNA, 19 nt, Homo sapiens
  misc_RNA (1)...(19): siRNA sense strand
aaucagaagugucgaagaa

SEQ ID NO: 856989 - RNA, 19 nt, Homo sapiens
  misc_RNA (1)...(19): siRNA sense strand
gaacauauggacacuuuua

SEQ ID NO: 856990 - RNA, 19 nt, Homo sapiens
  misc_RNA (1)...(19): siRNA sense strand
gaaaguggcaacaccuuga

SEQ ID NO: 856991 - RNA, 19 nt, Homo sapiens
  misc_RNA (1)...(19): siRNA sense strand
gagcacugcagucgaaaua

SEQ ID NO: 856992 - RNA, 19 nt, Homo sapiens
  misc_RNA (1)...(19): siRNA sense strand
gaagaaguaaugaaugguu

SEQ ID NO: 856993 - RNA, 19 nt, Homo sapiens
  misc_RNA (1)...(19): siRNA sense strand
caaaguacagcucagaauu

SEQ ID NO: 856994 - RNA, 19 nt, Homo sapiens
  misc_RNA (1)...(19): siRNA sense strand
aaauggagcuucuagaaag

SEQ ID NO: 856995 - RNA, 19 nt, Homo sapiens
  misc_RNA (1)...(19): siRNA sense strand
ggaaagacaguuaacagau

SEQ ID NO: 856996 - RNA, 19 nt, Homo sapiens
  misc_RNA (1)...(19): siRNA sense strand
cuacugaagugcagaaauc

SEQ ID NO: 856997 - RNA, 19 nt, Homo sapiens
  misc_RNA (1)...(19): siRNA sense strand
uaagaugacugaagaacag

SEQ ID NO: 856998 - RNA, 19 nt, Homo sapiens
  misc_RNA (1)...(19): siRNA sense strand
gaaaguaagaugacugaag

SEQ ID NO: 856999 - RNA, 19 nt, Homo sapiens
  misc_RNA (1)...(19): siRNA sense strand
caacagaugacauuaucaa

SEQ ID NO: 857000 - RNA, 19 nt, Homo sapiens
  misc_RNA (1)...(19): siRNA sense strand
gagagagagaaauuacuua

SEQ ID NO: 857001 - RNA, 19 nt, Homo sapiens
  misc_RNA (1)...(19): siRNA sense strand
gaagagagagagaaauuac

SEQ ID NO: 857002 - RNA, 19 nt, Homo sapiens
  misc_RNA (1)...(19): siRNA sense strand
gagccuggaagcagaaaua

SEQ ID NO: 857003 - RNA, 19 nt, Homo sapiens
  misc_RNA (1)...(19): siRNA sense strand
uuaagcaaaugacaacuga

SEQ ID NO: 857004 - RNA, 19 nt, Homo sapiens
  misc_RNA (1)...(19): siRNA sense strand
gcagaaaucacaaaguaca

SEQ ID NO: 857005 - RNA, 19 nt, Homo sapiens
  misc_RNA (1)...(19): siRNA sense strand
agaagaaauugaacaggaa

SEQ ID NO: 857006 - RNA, 19 nt, Homo sapiens
  misc_RNA (1)...(19): siRNA sense strand
gugauuaccagccaauuaa

SEQ ID NO: 857007 - RNA, 19 nt, Homo sapiens
  misc_RNA (1)...(19): siRNA sense strand
gaagaaauugaacaggaaa

SEQ ID NO: 857008 - RNA, 19 nt, Homo sapiens
  misc_RNA (1)...(19): siRNA sense strand
ucagaagugucgaagaaga

SEQ ID NO: 857009 - RNA, 19 nt, Homo sapiens
  misc_RNA (1)...(19): siRNA sense strand
gagagaaauuacuuaagca

SEQ ID NO: 857010 - RNA, 19 nt, Homo sapiens
  misc_RNA (1)...(19): siRNA sense strand
cagcauggaaagacaguua

SEQ ID NO: 857011 - RNA, 19 nt, Homo sapiens
  misc_RNA (1)...(19): siRNA sense strand
gaaaauggagcuucuagaa

SEQ ID NO: 857012 - RNA, 19 nt, Homo sapiens
  misc_RNA (1)...(19): siRNA sense strand
aaaguacagcucagaauuu

SEQ ID NO: 857013 - RNA, 19 nt, Homo sapiens
  misc_RNA (1)...(19): siRNA sense strand
aggaacauauggacacuuu

SEQ ID NO: 857014 - RNA, 19 nt, Homo sapiens
  misc_RNA (1)...(19): siRNA sense strand
uagauacacuucaacaaca

SEQ ID NO: 857015 - RNA, 19 nt, Homo sapiens
  misc_RNA (1)...(19): siRNA sense strand
gugaaaugaaccagaaaua

SEQ ID NO: 857016 - RNA, 19 nt, Homo sapiens
  misc_RNA (1)...(19): siRNA sense strand
caagucaaguaccuagaga

SEQ ID NO: 857017 - RNA, 19 nt, Homo sapiens
  misc_RNA (1)...(19): siRNA sense strand
uuagacaacuugacaugga

SEQ ID NO: 857018 - RNA, 19 nt, Homo sapiens
  misc_RNA (1)...(19): siRNA sense strand
auaaugauuugccagcuuu

SEQ ID NO: 857019 - RNA, 19 nt, Homo sapiens
  misc_RNA (1)...(19): siRNA sense strand
ggaaacaaagaaucaggaa

SEQ ID NO: 857020 - RNA, 19 nt, Homo sapiens
  misc_RNA (1)...(19): siRNA sense strand
gaugcaggaugaccucaau

SEQ ID NO: 857021 - RNA, 19 nt, Homo sapiens
  misc_RNA (1)...(19): siRNA sense strand
caggagagaaugauauuau

SEQ ID NO: 857022 - RNA, 19 nt, Homo sapiens
  misc_RNA (1)...(19): siRNA sense strand
gaaacaggaggcgguauug

SEQ ID NO: 857023 - RNA, 19 nt, Homo sapiens
  misc_RNA (1)...(19): siRNA sense strand
uaucaccaaucaagagcua

SEQ ID NO: 857024 - RNA, 19 nt, Homo sapiens
  misc_RNA (1)...(19): siRNA sense strand
acagauagaagccaacauu

SEQ ID NO: 857025 - RNA, 19 nt, Homo sapiens
  misc_RNA (1)...(19): siRNA sense strand
gaagugcagaaaucacaaa

SEQ ID NO: 857026 - RNA, 19 nt, Homo sapiens
  misc_RNA (1)...(19): siRNA sense strand
ccacaaaugagaaacuguu

SEQ ID NO: 857027 - RNA, 19 nt, Homo sapiens
  misc_RNA (1)...(19): siRNA sense strand
gaucgagaaacacaaaguu

SEQ ID NO: 857028 - RNA, 19 nt, Homo sapiens
  misc_RNA (1)...(19): siRNA sense strand
agagagaaauuacuuaagc

SEQ ID NO: 857029 - RNA, 19 nt, Homo sapiens
  misc_RNA (1)...(19): siRNA sense strand
caaaugagaaacuguuaca

SEQ ID NO: 857030 - RNA, 19 nt, Homo sapiens
  misc_RNA (1)...(19): siRNA sense strand
ggagucccaucgagaucaa

SEQ ID NO: 857031 - RNA, 19 nt, Homo sapiens
  misc_RNA (1)...(19): siRNA sense strand
ggauuuagaggaacaccaa

SEQ ID NO: 857032 - RNA, 19 nt, Homo sapiens
  misc_RNA (1)...(19): siRNA sense strand
agaaauacaaggagcuaaa

SEQ ID NO: 857033 - RNA, 19 nt, Homo sapiens
  misc_RNA (1)...(19): siRNA sense strand
aaggugaaaugaaccagaa

SEQ ID NO: 857034 - RNA, 19 nt, Homo sapiens
  misc_RNA (1)...(19): siRNA sense strand
acaauuggauucacagaac

SEQ ID NO: 857035 - RNA, 19 nt, Homo sapiens
  misc_RNA (1)...(19): siRNA sense strand
gaauucauagcaaccaaga

SEQ ID NO: 857036 - RNA, 19 nt, Homo sapiens
  misc_RNA (1)...(19): siRNA sense strand
gcaaaugacaacugaucug

SEQ ID NO: 857037 - RNA, 19 nt, Homo sapiens
  misc_RNA (1)...(19): siRNA sense strand
gcucagaauuugacuucag

SEQ ID NO: 857038 - RNA, 19 nt, Homo sapiens
  misc_RNA (1)...(19): siRNA sense strand
aaguacagcucagaauuug

SEQ ID NO: 857039 - RNA, 19 nt, Homo sapiens
  misc_RNA (1)...(19): siRNA sense strand
gaaaagggaggaacauaug

SEQ ID NO: 857040 - RNA, 19 nt, Homo sapiens
  misc_RNA (1)...(19): siRNA sense strand
aaagacaguuaacagauac

SEQ ID NO: 857041 - RNA, 19 nt, Homo sapiens
  misc_RNA (1)...(19): siRNA sense strand
uauaaugauuugccagcuu

SEQ ID NO: 857042 - RNA, 19 nt, Homo sapiens
  misc_RNA (1)...(19): siRNA sense strand
uauccucuaucaccaauca

SEQ ID NO: 857043 - RNA, 19 nt, Homo sapiens
  misc_RNA (1)...(19): siRNA sense strand
aaacaaagaaucaggaacu

SEQ ID NO: 857044 - RNA, 19 nt, Homo sapiens
  misc_RNA (1)...(19): siRNA sense strand
gaaauacaaggagcuaaag

SEQ ID NO: 857045 - RNA, 19 nt, Homo sapiens
  misc_RNA (1)...(19): siRNA sense strand
uggaagagagagagaaauu

SEQ ID NO: 857046 - RNA, 19 nt, Homo sapiens
  misc_RNA (1)...(19): siRNA sense strand
ggcaacaccuugagcaaaa

SEQ ID NO: 857047 - RNA, 19 nt, Homo sapiens
  misc_RNA (1)...(19): siRNA sense strand
aaucaagagcuaaagauga

SEQ ID NO: 857048 - RNA, 19 nt, Homo sapiens
  misc_RNA (1)...(19): siRNA sense strand
acaagcaacagaugacauu

SEQ ID NO: 857049 - RNA, 19 nt, Homo sapiens
  misc_RNA (1)...(19): siRNA sense strand
ugaaagacaagcgaaagaa

SEQ ID NO: 857050 - RNA, 19 nt, Homo sapiens
  misc_RNA (1)...(19): siRNA sense strand
aggaugaccucaauuuuaa

SEQ ID NO: 857051 - RNA, 19 nt, Homo sapiens
  misc_RNA (1)...(19): siRNA sense strand
auacaaggagcuaaagaaa

SEQ ID NO: 857052 - RNA, 19 nt, Homo sapiens
  misc_RNA (1)...(19): siRNA sense strand
cacaaaugagaaacuguua

SEQ ID NO: 857053 - RNA, 19 nt, Homo sapiens
  misc_RNA (1)...(19): siRNA sense strand
ccaagagucaagagaguga

SEQ ID NO: 857054 - RNA, 19 nt, Homo sapiens
  misc_RNA (1)...(19): siRNA sense strand
gagcuucuagaaaguaaga

SEQ ID NO: 857055 - RNA, 19 nt, Homo sapiens
  misc_RNA (1)...(19): siRNA sense strand
caggaugaccucaauuuua

SEQ ID NO: 857056 - RNA, 19 nt, Homo sapiens
  misc_RNA (1)...(19): siRNA sense strand
ucaaaugauugcagaagac

SEQ ID NO: 857057 - RNA, 19 nt, Homo sapiens
  misc_RNA (1)...(19): siRNA sense strand
ugaaacaggaggcgguauu

SEQ ID NO: 857058 - RNA, 19 nt, Homo sapiens
  misc_RNA (1)...(19): siRNA sense strand
gaaaaccacaaaugagaaa

SEQ ID NO: 857059 - RNA, 19 nt, Homo sapiens
  misc_RNA (1)...(19): siRNA sense strand
gcuuacaaauuuggagaga

SEQ ID NO: 857060 - RNA, 19 nt, Homo sapiens
  misc_RNA (1)...(19): siRNA sense strand
guaagaugacugaagaaca

SEQ ID NO: 857061 - RNA, 19 nt, Homo sapiens
  misc_RNA (1)...(19): siRNA sense strand
uagaaaguaagaugacuga

SEQ ID NO: 857062 - RNA, 19 nt, Homo sapiens
  misc_RNA (1)...(19): siRNA sense strand
caauuggauucacagaaca

SEQ ID NO: 857063 - RNA, 19 nt, Homo sapiens
  misc_RNA (1)...(19): siRNA sense strand
gauuaccagccaauuaaga

SEQ ID NO: 857064 - RNA, 19 nt, Homo sapiens
  misc_RNA (1)...(19): siRNA sense strand
gagaaaguggcaacaccuu

SEQ ID NO: 857065 - RNA, 19 nt, Homo sapiens
  misc_RNA (1)...(19): siRNA sense strand
caagcaacagaugacauua

SEQ ID NO: 857066 - RNA, 19 nt, Homo sapiens
  misc_RNA (1)...(19): siRNA sense strand
acaaggagcuaaagaaaag

SEQ ID NO: 857067 - RNA, 19 nt, Homo sapiens
  misc_RNA (1)...(19): siRNA sense strand
caacuugacauggauuuag

SEQ ID NO: 857068 - RNA, 19 nt, Homo sapiens
  misc_RNA (1)...(19): siRNA sense strand
aagcauaggaucuccaaug

SEQ ID NO: 857069 - RNA, 19 nt, Homo sapiens
  misc_RNA (1)...(19): siRNA sense strand
ggaaguuucuuugcaguug

SEQ ID NO: 857070 - RNA, 19 nt, Homo sapiens
  misc_RNA (1)...(19): siRNA sense strand
gaaguuucuuugcaguugu

SEQ ID NO: 857071 - RNA, 19 nt, Homo sapiens
  misc_RNA (1)...(19): siRNA sense strand
ccgcucuucucgucguuua

SEQ ID NO: 857072 - RNA, 19 nt, Homo sapiens
  misc_RNA (1)...(19): siRNA sense strand
ccucagauaucgggacaca

SEQ ID NO: 857073 - RNA, 19 nt, Homo sapiens
  misc_RNA (1)...(19): siRNA sense strand
uaucgggacacaacgguaa

SEQ ID NO: 857074 - RNA, 19 nt, Homo sapiens
  misc_RNA (1)...(19): siRNA sense strand
guuuaacggccucagauau

SEQ ID NO: 857075 - RNA, 19 nt, Homo sapiens
  misc_RNA (1)...(19): siRNA sense strand
ucagauaucgggacacaac

SEQ ID NO: 857076 - RNA, 19 nt, Homo sapiens
  misc_RNA (1)...(19): siRNA sense strand
ucuuugcaguugugacuug

SEQ ID NO: 857077 - RNA, 19 nt, Homo sapiens
  misc_RNA (1)...(19): siRNA sense strand
gagguaggaaggcgugcuu

SEQ ID NO: 857078 - RNA, 19 nt, Homo sapiens
  misc_RNA (1)...(19): siRNA sense strand
ucagggugcugcgggugaa

SEQ ID NO: 857079 - RNA, 19 nt, Homo sapiens
  misc_RNA (1)...(19): siRNA sense strand
ggaugaaccugcagucuga

SEQ ID NO: 857080 - RNA, 19 nt, Homo sapiens
  misc_RNA (1)...(19): siRNA sense strand
gaacagccaccaagaccau

SEQ ID NO: 857081 - RNA, 19 nt, Homo sapiens
  misc_RNA (1)...(19): siRNA sense strand
cagcucaguuccacacaga

SEQ ID NO: 857082 - RNA, 19 nt, Homo sapiens
  misc_RNA (1)...(19): siRNA sense strand
aaacccaguuccuccagaa

SEQ ID NO: 857083 - RNA, 19 nt, Homo sapiens
  misc_RNA (1)...(19): siRNA sense strand
gaacaugcagacagcuuca

SEQ ID NO: 857084 - RNA, 19 nt, Homo sapiens
  misc_RNA (1)...(19): siRNA sense strand
gagcacguguccuuaccau

SEQ ID NO: 857085 - RNA, 19 nt, Homo sapiens
  misc_RNA (1)...(19): siRNA sense strand
uggacuggaugcaggagua

SEQ ID NO: 857086 - RNA, 19 nt, Homo sapiens
  misc_RNA (1)...(19): siRNA sense strand
ccacacagaccagugauuc

SEQ ID NO: 857087 - RNA, 19 nt, Homo sapiens
  misc_RNA (1)...(19): siRNA sense strand
cugcugagacugcgcauga

SEQ ID NO: 857088 - RNA, 19 nt, Homo sapiens
  misc_RNA (1)...(19): siRNA sense strand
ggaccagcagauccacuug

SEQ ID NO: 857089 - RNA, 19 nt, Homo sapiens
  misc_RNA (1)...(19): siRNA sense strand
ccucagggaccagcaaaug

SEQ ID NO: 857090 - RNA, 19 nt, Homo sapiens
  misc_RNA (1)...(19): siRNA sense strand
guuccacacagaccaguga

SEQ ID NO: 857091 - RNA, 19 nt, Homo sapiens
  misc_RNA (1)...(19): siRNA sense strand
gcacaaagcugucuggauu

SEQ ID NO: 857092 - RNA, 19 nt, Homo sapiens
  misc_RNA (1)...(19): siRNA sense strand
caaaugcgauguugaugaa

SEQ ID NO: 857093 - RNA, 19 nt, Homo sapiens
  misc_RNA (1)...(19): siRNA sense strand
gcgaauaccuagggaagua

SEQ ID NO: 857094 - RNA, 19 nt, Homo sapiens
  misc_RNA (1)...(19): siRNA sense strand
gaauacgacugucaucuuc

SEQ ID NO: 857095 - RNA, 19 nt, Homo sapiens
  misc_RNA (1)...(19): siRNA sense strand
ccaaggagcuggacagagu

SEQ ID NO: 857096 - RNA, 19 nt, Homo sapiens
  misc_RNA (1)...(19): siRNA sense strand
acagagagcuggaguaaag

SEQ ID NO: 857097 - RNA, 19 nt, Homo sapiens
  misc_RNA (1)...(19): siRNA sense strand
uaacagcugugucaaggaa

SEQ ID NO: 857098 - RNA, 19 nt, Homo sapiens
  misc_RNA (1)...(19): siRNA sense strand
gagugcagcuggcucgaua

SEQ ID NO: 857099 - RNA, 19 nt, Homo sapiens
  misc_RNA (1)...(19): siRNA sense strand
gaacuccaguagagccuaa

SEQ ID NO: 857100 - RNA, 19 nt, Homo sapiens
  misc_RNA (1)...(19): siRNA sense strand
caacagagguacacauggu

SEQ ID NO: 857101 - RNA, 19 nt, Homo sapiens
  misc_RNA (1)...(19): siRNA sense strand
ugaagguugugcuguguua

SEQ ID NO: 857102 - RNA, 19 nt, Homo sapiens
  misc_RNA (1)...(19): siRNA sense strand
uaaagaagucaguggguua

SEQ ID NO: 857103 - RNA, 19 nt, Homo sapiens
  misc_RNA (1)...(19): siRNA sense strand
gcaaaugcgauguugauga

SEQ ID NO: 857104 - RNA, 19 nt, Homo sapiens
  misc_RNA (1)...(19): siRNA sense strand
gggcuuuauuugugaauuu

SEQ ID NO: 857105 - RNA, 19 nt, Homo sapiens
  misc_RNA (1)...(19): siRNA sense strand
cagaagugcuggauacugu

SEQ ID NO: 857106 - RNA, 19 nt, Homo sapiens
  misc_RNA (1)...(19): siRNA sense strand
gcucgauagucguaaauga

SEQ ID NO: 857107 - RNA, 19 nt, Homo sapiens
  misc_RNA (1)...(19): siRNA sense strand
ggucuucuacuucuucaua

SEQ ID NO: 857108 - RNA, 19 nt, Homo sapiens
  misc_RNA (1)...(19): siRNA sense strand
acaaagcugucuggauuaa

SEQ ID NO: 857109 - RNA, 19 nt, Homo sapiens
  misc_RNA (1)...(19): siRNA sense strand
guacuuaccaugaugugaa

SEQ ID NO: 857110 - RNA, 19 nt, Homo sapiens
  misc_RNA (1)...(19): siRNA sense strand
ggacagagugaaggaaauu

SEQ ID NO: 857111 - RNA, 19 nt, Homo sapiens
  misc_RNA (1)...(19): siRNA sense strand
gacuuugaauccaguauga

SEQ ID NO: 857112 - RNA, 19 nt, Homo sapiens
  misc_RNA (1)...(19): siRNA sense strand
agacugggcuccuccuaga

SEQ ID NO: 857113 - RNA, 19 nt, Homo sapiens
  misc_RNA (1)...(19): siRNA sense strand
gcagaacuauuagccaaag

SEQ ID NO: 857114 - RNA, 19 nt, Homo sapiens
  misc_RNA (1)...(19): siRNA sense strand
cgucagcaauuucuccaaa

SEQ ID NO: 857115 - RNA, 19 nt, Homo sapiens
  misc_RNA (1)...(19): siRNA sense strand
ccagacuccugaacacuga

SEQ ID NO: 857116 - RNA, 19 nt, Homo sapiens
  misc_RNA (1)...(19): siRNA sense strand
caacauaaagcaagagucu

SEQ ID NO: 857117 - RNA, 19 nt, Homo sapiens
  misc_RNA (1)...(19): siRNA sense strand
ccauccuccuugccaauua

SEQ ID NO: 857118 - RNA, 19 nt, Homo sapiens
  misc_RNA (1)...(19): siRNA sense strand
cgaucacucuggcauuauu

SEQ ID NO: 857119 - RNA, 19 nt, Homo sapiens
  misc_RNA (1)...(19): siRNA sense strand
cagccugacucugaaauga

SEQ ID NO: 857120 - RNA, 19 nt, Homo sapiens
  misc_RNA (1)...(19): siRNA sense strand
guucaagucaguagaagaa

SEQ ID NO: 857121 - RNA, 19 nt, Homo sapiens
  misc_RNA (1)...(19): siRNA sense strand
caguagagccuaaguuugu

SEQ ID NO: 857122 - RNA, 19 nt, Homo sapiens
  misc_RNA (1)...(19): siRNA sense strand
ugacugaaacacguacuua

SEQ ID NO: 857123 - RNA, 19 nt, Homo sapiens
  misc_RNA (1)...(19): siRNA sense strand
gugcaucccugcccgaauc

SEQ ID NO: 857124 - RNA, 19 nt, Homo sapiens
  misc_RNA (1)...(19): siRNA sense strand
gaaguacuacgucagcaau

SEQ ID NO: 857125 - RNA, 19 nt, Homo sapiens
  misc_RNA (1)...(19): siRNA sense strand
gagcuggaguaaagaaguc

SEQ ID NO: 857126 - RNA, 19 nt, Homo sapiens
  misc_RNA (1)...(19): siRNA sense strand
cgacugucaucuucccauu

SEQ ID NO: 857127 - RNA, 19 nt, Homo sapiens
  misc_RNA (1)...(19): siRNA sense strand
aaacacguacuuaccauga

SEQ ID NO: 857128 - RNA, 19 nt, Homo sapiens
  misc_RNA (1)...(19): siRNA sense strand
agacagagagcuggaguaa

SEQ ID NO: 857129 - RNA, 19 nt, Homo sapiens
  misc_RNA (1)...(19): siRNA sense strand
cgauguugaugaauuuguu

SEQ ID NO: 857130 - RNA, 19 nt, Homo sapiens
  misc_RNA (1)...(19): siRNA sense strand
aguagcagcuucucucugu

SEQ ID NO: 857131 - RNA, 19 nt, Homo sapiens
  misc_RNA (1)...(19): siRNA sense strand
gggcuugcuuucacaaaca

SEQ ID NO: 857132 - RNA, 19 nt, Homo sapiens
  misc_RNA (1)...(19): siRNA sense strand
gucaguagaagaaccauuu

SEQ ID NO: 857133 - RNA, 19 nt, Homo sapiens
  misc_RNA (1)...(19): siRNA sense strand
gaaccauuucuucgaauuc

SEQ ID NO: 857134 - RNA, 19 nt, Homo sapiens
  misc_RNA (1)...(19): siRNA sense strand
gagucugggucuucuacuu

SEQ ID NO: 857135 - RNA, 19 nt, Homo sapiens
  misc_RNA (1)...(19): siRNA sense strand
aaugcgauguugaugaauu

SEQ ID NO: 857136 - RNA, 19 nt, Homo sapiens
  misc_RNA (1)...(19): siRNA sense strand
cccacaagcccuaggauuu

SEQ ID NO: 857137 - RNA, 19 nt, Homo sapiens
  misc_RNA (1)...(19): siRNA sense strand
gcccgaauccugaugaugu

SEQ ID NO: 857138 - RNA, 19 nt, Homo sapiens
  misc_RNA (1)...(19): siRNA sense strand
agucguaaaugaagagugu

SEQ ID NO: 857139 - RNA, 19 nt, Homo sapiens
  misc_RNA (1)...(19): siRNA sense strand
gacagcaacauguagaaga

SEQ ID NO: 857140 - RNA, 19 nt, Homo sapiens
  misc_RNA (1)...(19): siRNA sense strand
acacguacuuaccaugaug

SEQ ID NO: 857141 - RNA, 19 nt, Homo sapiens
  misc_RNA (1)...(19): siRNA sense strand
acagcaacauguagaagau

SEQ ID NO: 857142 - RNA, 19 nt, Homo sapiens
  misc_RNA (1)...(19): siRNA sense strand
gaagacugggcuccuccua

SEQ ID NO: 857143 - RNA, 19 nt, Homo sapiens
  misc_RNA (1)...(19): siRNA sense strand
ugaaacacguacuuaccau

SEQ ID NO: 857144 - RNA, 19 nt, Homo sapiens
  misc_RNA (1)...(19): siRNA sense strand
ucagcaauuucuccaaaca

SEQ ID NO: 857145 - RNA, 19 nt, Homo sapiens
  misc_RNA (1)...(19): siRNA sense strand
aguacuacgucagcaauuu

SEQ ID NO: 857146 - RNA, 19 nt, Homo sapiens
  misc_RNA (1)...(19): siRNA sense strand
agcgaucacucuggcauua

SEQ ID NO: 857147 - RNA, 19 nt, Homo sapiens
  misc_RNA (1)...(19): siRNA sense strand
ugucaguaguuaauucuca

SEQ ID NO: 857148 - RNA, 19 nt, Homo sapiens
  misc_RNA (1)...(19): siRNA sense strand
cacaaagcugucuggauua

SEQ ID NO: 857149 - RNA, 19 nt, Homo sapiens
  misc_RNA (1)...(19): siRNA sense strand
gaaggugcuguucaaguca

SEQ ID NO: 857150 - RNA, 19 nt, Homo sapiens
  misc_RNA (1)...(19): siRNA sense strand
ugaauccaguaugaaugua

SEQ ID NO: 857151 - RNA, 19 nt, Homo sapiens
  misc_RNA (1)...(19): siRNA sense strand
uuacaggucagcccaguga

SEQ ID NO: 857152 - RNA, 19 nt, Homo sapiens
  misc_RNA (1)...(19): siRNA sense strand
uggagaaaaugaaguguaa

SEQ ID NO: 857153 - RNA, 19 nt, Homo sapiens
  misc_RNA (1)...(19): siRNA sense strand
ugugcugccuguugaugua

SEQ ID NO: 857154 - RNA, 19 nt, Homo sapiens
  misc_RNA (1)...(19): siRNA sense strand
uauuugugcugccuguuga

SEQ ID NO: 857155 - RNA, 19 nt, Homo sapiens
  misc_RNA (1)...(19): siRNA sense strand
gugcagggcuugcuuucac

SEQ ID NO: 857156 - RNA, 19 nt, Homo sapiens
  misc_RNA (1)...(19): siRNA sense strand
guacuacgucagcaauuuc

SEQ ID NO: 857157 - RNA, 19 nt, Homo sapiens
  misc_RNA (1)...(19): siRNA sense strand
ugacugcugccacucauau

SEQ ID NO: 857158 - RNA, 19 nt, Homo sapiens
  misc_RNA (1)...(19): siRNA sense strand
gaagugcuggauacuguca

SEQ ID NO: 857159 - RNA, 19 nt, Homo sapiens
  misc_RNA (1)...(19): siRNA sense strand
guaacauucugagucaaca

SEQ ID NO: 857160 - RNA, 19 nt, Homo sapiens
  misc_RNA (1)...(19): siRNA sense strand
aguguaacauucugaguca

SEQ ID NO: 857161 - RNA, 19 nt, Homo sapiens
  misc_RNA (1)...(19): siRNA sense strand
uuagacaucaggcucauga

SEQ ID NO: 857162 - RNA, 19 nt, Homo sapiens
  misc_RNA (1)...(19): siRNA sense strand
auaccaacauaaagcaaga

SEQ ID NO: 857163 - RNA, 19 nt, Homo sapiens
  misc_RNA (1)...(19): siRNA sense strand
cgauagucguaaaugaaga

SEQ ID NO: 857164 - RNA, 19 nt, Homo sapiens
  misc_RNA (1)...(19): siRNA sense strand
agaauacgacugucaucuu

SEQ ID NO: 857165 - RNA, 19 nt, Homo sapiens
  misc_RNA (1)...(19): siRNA sense strand
ccgcaggacuugcaaucuc

SEQ ID NO: 857166 - RNA, 19 nt, Homo sapiens
  misc_RNA (1)...(19): siRNA sense strand
acugucaucuucccauuuc

SEQ ID NO: 857167 - RNA, 19 nt, Homo sapiens
  misc_RNA (1)...(19): siRNA sense strand
augcgauguugaugaauuu

SEQ ID NO: 857168 - RNA, 19 nt, Homo sapiens
  misc_RNA (1)...(19): siRNA sense strand
gaaaugacuuuugauacca

SEQ ID NO: 857169 - RNA, 19 nt, Homo sapiens
  misc_RNA (1)...(19): siRNA sense strand
guauuugugcugccuguug

SEQ ID NO: 857170 - RNA, 19 nt, Homo sapiens
  misc_RNA (1)...(19): siRNA sense strand
ugaagaguguguccgaaaa

SEQ ID NO: 857171 - RNA, 19 nt, Homo sapiens
  misc_RNA (1)...(19): siRNA sense strand
gcaacagccgcaggacuug

SEQ ID NO: 857172 - RNA, 19 nt, Homo sapiens
  misc_RNA (1)...(19): siRNA sense strand
ccaaagccuguaugcgaaa

SEQ ID NO: 857173 - RNA, 19 nt, Homo sapiens
  misc_RNA (1)...(19): siRNA sense strand
ugaagcggcuccgguacug

SEQ ID NO: 857174 - RNA, 19 nt, Homo sapiens
  misc_RNA (1)...(19): siRNA sense strand
ccaguagagccuaaguuug

SEQ ID NO: 857175 - RNA, 19 nt, Homo sapiens
  misc_RNA (1)...(19): siRNA sense strand
uccaguagagccuaaguuu

SEQ ID NO: 857176 - RNA, 19 nt, Homo sapiens
  misc_RNA (1)...(19): siRNA sense strand
gcuguucaagucaguagaa

SEQ ID NO: 857177 - RNA, 19 nt, Homo sapiens
  misc_RNA (1)...(19): siRNA sense strand
ucagacagcaacauguaga

SEQ ID NO: 857178 - RNA, 19 nt, Homo sapiens
  misc_RNA (1)...(19): siRNA sense strand
uacaguggcuaugaagguu

SEQ ID NO: 857179 - RNA, 19 nt, Homo sapiens
  misc_RNA (1)...(19): siRNA sense strand
uaucagcaauggagaaaau

SEQ ID NO: 857180 - RNA, 19 nt, Homo sapiens
  misc_RNA (1)...(19): siRNA sense strand
gaucacucuggcauuauug

SEQ ID NO: 857181 - RNA, 19 nt, Homo sapiens
  misc_RNA (1)...(19): siRNA sense strand
uuucagacagcaacaugua

SEQ ID NO: 857182 - RNA, 19 nt, Homo sapiens
  misc_RNA (1)...(19): siRNA sense strand
uagggaaguauuucuguga

SEQ ID NO: 857183 - RNA, 19 nt, Homo sapiens
  misc_RNA (1)...(19): siRNA sense strand
ucacuuaugagccagacuu

SEQ ID NO: 857184 - RNA, 19 nt, Homo sapiens
  misc_RNA (1)...(19): siRNA sense strand
uccugcagcuccucuaaga

SEQ ID NO: 857185 - RNA, 19 nt, Homo sapiens
  misc_RNA (1)...(19): siRNA sense strand
uacuuaccaugaugugaaa

SEQ ID NO: 857186 - RNA, 19 nt, Homo sapiens
  misc_RNA (1)...(19): siRNA sense strand
ccccauggcucgagugaaa

SEQ ID NO: 857187 - RNA, 19 nt, Homo sapiens
  misc_RNA (1)...(19): siRNA sense strand
gggugucucugcccacaag

SEQ ID NO: 857188 - RNA, 19 nt, Homo sapiens
  misc_RNA (1)...(19): siRNA sense strand
gaaguguaacauucugagu

SEQ ID NO: 857189 - RNA, 19 nt, Homo sapiens
  misc_RNA (1)...(19): siRNA sense strand
gaauccaguaugaauguag

SEQ ID NO: 857190 - RNA, 19 nt, Homo sapiens
  misc_RNA (1)...(19): siRNA sense strand
cagaacuauuagccaaaga

SEQ ID NO: 857191 - RNA, 19 nt, Homo sapiens
  misc_RNA (1)...(19): siRNA sense strand
gaacaaacgucuaaagaaa

SEQ ID NO: 857192 - RNA, 19 nt, Homo sapiens
  misc_RNA (1)...(19): siRNA sense strand
gaagaugacugaugaauau

SEQ ID NO: 857193 - RNA, 19 nt, Homo sapiens
  misc_RNA (1)...(19): siRNA sense strand
gaacgagacagucaaauua

SEQ ID NO: 857194 - RNA, 19 nt, Homo sapiens
  misc_RNA (1)...(19): siRNA sense strand
gaugaaagcucaagaagug

SEQ ID NO: 857195 - RNA, 19 nt, Homo sapiens
  misc_RNA (1)...(19): siRNA sense strand
gcaauuggcucuucgaaau

SEQ ID NO: 857196 - RNA, 19 nt, Homo sapiens
  misc_RNA (1)...(19): siRNA sense strand
ucaaauggcucaagaaaga

SEQ ID NO: 857197 - RNA, 19 nt, Homo sapiens
  misc_RNA (1)...(19): siRNA sense strand
ugaagaagaugauccaauu

SEQ ID NO: 857198 - RNA, 19 nt, Homo sapiens
  misc_RNA (1)...(19): siRNA sense strand
aagaagaacuggcagauaa

SEQ ID NO: 857199 - RNA, 19 nt, Homo sapiens
  misc_RNA (1)...(19): siRNA sense strand
gaagaaaguuaaugagcaa

SEQ ID NO: 857200 - RNA, 19 nt, Homo sapiens
  misc_RNA (1)...(19): siRNA sense strand
acuaugagcuuauccaaua

SEQ ID NO: 857201 - RNA, 19 nt, Homo sapiens
  misc_RNA (1)...(19): siRNA sense strand
gggaguauaugguuuagaa

SEQ ID NO: 857202 - RNA, 19 nt, Homo sapiens
  misc_RNA (1)...(19): siRNA sense strand
gaaagagauugaaugucua

SEQ ID NO: 857203 - RNA, 19 nt, Homo sapiens
  misc_RNA (1)...(19): siRNA sense strand
gaaaguuaaugagcaauug

SEQ ID NO: 857204 - RNA, 19 nt, Homo sapiens
  misc_RNA (1)...(19): siRNA sense strand
aauaagagaucgagagauu

SEQ ID NO: 857205 - RNA, 19 nt, Homo sapiens
  misc_RNA (1)...(19): siRNA sense strand
gaaauuugccaacuugaaa

SEQ ID NO: 857206 - RNA, 19 nt, Homo sapiens
  misc_RNA (1)...(19): siRNA sense strand
guagaagaauggaagcuaa

SEQ ID NO: 857207 - RNA, 19 nt, Homo sapiens
  misc_RNA (1)...(19): siRNA sense strand
ugaaagagauugaaugucu

SEQ ID NO: 857208 - RNA, 19 nt, Homo sapiens
  misc_RNA (1)...(19): siRNA sense strand
gaagaagaugauccaauua

SEQ ID NO: 857209 - RNA, 19 nt, Homo sapiens
  misc_RNA (1)...(19): siRNA sense strand
gggagaaacuuaagaaugc

SEQ ID NO: 857210 - RNA, 19 nt, Homo sapiens
  misc_RNA (1)...(19): siRNA sense strand
aaaaugagcuccaaagaaa

SEQ ID NO: 857211 - RNA, 19 nt, Homo sapiens
  misc_RNA (1)...(19): siRNA sense strand
gagcuuauccaauaucuug

SEQ ID NO: 857212 - RNA, 19 nt, Homo sapiens
  misc_RNA (1)...(19): siRNA sense strand
gaagaacgacuugaucuga

SEQ ID NO: 857213 - RNA, 19 nt, Homo sapiens
  misc_RNA (1)...(19): siRNA sense strand
ucaacagacucauaugaaa

SEQ ID NO: 857214 - RNA, 19 nt, Homo sapiens
  misc_RNA (1)...(19): siRNA sense strand
ggaacgagacagucaaauu

SEQ ID NO: 857215 - RNA, 19 nt, Homo sapiens
  misc_RNA (1)...(19): siRNA sense strand
gaagaauggaagcuaauuu

SEQ ID NO: 857216 - RNA, 19 nt, Homo sapiens
  misc_RNA (1)...(19): siRNA sense strand
uaacagaagcuaaugagaa

SEQ ID NO: 857217 - RNA, 19 nt, Homo sapiens
  misc_RNA (1)...(19): siRNA sense strand
gaagaugaaagcucaagaa

SEQ ID NO: 857218 - RNA, 19 nt, Homo sapiens
  misc_RNA (1)...(19): siRNA sense strand
gagaaagagaagaaaguua

SEQ ID NO: 857219 - RNA, 19 nt, Homo sapiens
  misc_RNA (1)...(19): siRNA sense strand
ggagcuggcuuuggaagaa

SEQ ID NO: 857220 - RNA, 19 nt, Homo sapiens
  misc_RNA (1)...(19): siRNA sense strand
gagaacaaacgucuaaaga

SEQ ID NO: 857221 - RNA, 19 nt, Homo sapiens
  misc_RNA (1)...(19): siRNA sense strand
ugaaagcuauugugcauca

SEQ ID NO: 857222 - RNA, 19 nt, Homo sapiens
  misc_RNA (1)...(19): siRNA sense strand
uggagaagaugacugauga

SEQ ID NO: 857223 - RNA, 19 nt, Homo sapiens
  misc_RNA (1)...(19): siRNA sense strand
gauugaaugucuagaggaa

SEQ ID NO: 857224 - RNA, 19 nt, Homo sapiens
  misc_RNA (1)...(19): siRNA sense strand
ggagauggcucagcagucu

SEQ ID NO: 857225 - RNA, 19 nt, Homo sapiens
  misc_RNA (1)...(19): siRNA sense strand
ccgaacaaguagaacaaua

SEQ ID NO: 857226 - RNA, 19 nt, Homo sapiens
  misc_RNA (1)...(19): siRNA sense strand
aacagaagcuaaugagaaa

SEQ ID NO: 857227 - RNA, 19 nt, Homo sapiens
  misc_RNA (1)...(19): siRNA sense strand
ggaaguaaaugagcuaaaa

SEQ ID NO: 857228 - RNA, 19 nt, Homo sapiens
  misc_RNA (1)...(19): siRNA sense strand
agaagagucuguacaggaa

SEQ ID NO: 857229 - RNA, 19 nt, Homo sapiens
  misc_RNA (1)...(19): siRNA sense strand
uaaagaggcugagagaaca

SEQ ID NO: 857230 - RNA, 19 nt, Homo sapiens
  misc_RNA (1)...(19): siRNA sense strand
agaacuggcagauaauuua

SEQ ID NO: 857231 - RNA, 19 nt, Homo sapiens
  misc_RNA (1)...(19): siRNA sense strand
ucagugauuuccuugauga

SEQ ID NO: 857232 - RNA, 19 nt, Homo sapiens
  misc_RNA (1)...(19): siRNA sense strand
gaagaacuggcagauaauu

SEQ ID NO: 857233 - RNA, 19 nt, Homo sapiens
  misc_RNA (1)...(19): siRNA sense strand
caaauagauucacagaaag

SEQ ID NO: 857234 - RNA, 19 nt, Homo sapiens
  misc_RNA (1)...(19): siRNA sense strand
uaagagaucgagagauuga

SEQ ID NO: 857235 - RNA, 19 nt, Homo sapiens
  misc_RNA (1)...(19): siRNA sense strand
agaagaugcugucguugaa

SEQ ID NO: 857236 - RNA, 19 nt, Homo sapiens
  misc_RNA (1)...(19): siRNA sense strand
gaagaugauccaauuaugg

SEQ ID NO: 857237 - RNA, 19 nt, Homo sapiens
  misc_RNA (1)...(19): siRNA sense strand
gaugcucaccgaacaagua

SEQ ID NO: 857238 - RNA, 19 nt, Homo sapiens
  misc_RNA (1)...(19): siRNA sense strand
ggagaaagagaagaaaguu

SEQ ID NO: 857239 - RNA, 19 nt, Homo sapiens
  misc_RNA (1)...(19): siRNA sense strand
caagaagaacuggcagaua

SEQ ID NO: 857240 - RNA, 19 nt, Homo sapiens
  misc_RNA (1)...(19): siRNA sense strand
aaugaaauuugccaacuug

SEQ ID NO: 857241 - RNA, 19 nt, Homo sapiens
  misc_RNA (1)...(19): siRNA sense strand
caucagacagauaauguaa

SEQ ID NO: 857242 - RNA, 19 nt, Homo sapiens
  misc_RNA (1)...(19): siRNA sense strand
gaaaugaggaggcagaaaa

SEQ ID NO: 857243 - RNA, 19 nt, Homo sapiens
  misc_RNA (1)...(19): siRNA sense strand
cagaauuacucagucacua

SEQ ID NO: 857244 - RNA, 19 nt, Homo sapiens
  misc_RNA (1)...(19): siRNA sense strand
uaugguagcugucaaugca

SEQ ID NO: 857245 - RNA, 19 nt, Homo sapiens
  misc_RNA (1)...(19): siRNA sense strand
gaaguucagaaucaagaaa

SEQ ID NO: 857246 - RNA, 19 nt, Homo sapiens
  misc_RNA (1)...(19): siRNA sense strand
caacuuugucaggauauua

SEQ ID NO: 857247 - RNA, 19 nt, Homo sapiens
  misc_RNA (1)...(19): siRNA sense strand
agaagaugauccaauuaug

SEQ ID NO: 857248 - RNA, 19 nt, Homo sapiens
  misc_RNA (1)...(19): siRNA sense strand
agaagaugacugaugaaua

SEQ ID NO: 857249 - RNA, 19 nt, Homo sapiens
  misc_RNA (1)...(19): siRNA sense strand
agaacgacuugaucugaaa

SEQ ID NO: 857250 - RNA, 19 nt, Homo sapiens
  misc_RNA (1)...(19): siRNA sense strand
guaaugaaauuugccaacu

SEQ ID NO: 857251 - RNA, 19 nt, Homo sapiens
  misc_RNA (1)...(19): siRNA sense strand
cgaacaaguagaacaauau

SEQ ID NO: 857252 - RNA, 19 nt, Homo sapiens
  misc_RNA (1)...(19): siRNA sense strand
uaagaaugcucagcuugau

SEQ ID NO: 857253 - RNA, 19 nt, Homo sapiens
  misc_RNA (1)...(19): siRNA sense strand
caccuaauauaaacuggaa

SEQ ID NO: 857254 - RNA, 19 nt, Homo sapiens
  misc_RNA (1)...(19): siRNA sense strand
agagagaacaaacgucuaa

SEQ ID NO: 857255 - RNA, 19 nt, Homo sapiens
  misc_RNA (1)...(19): siRNA sense strand
aaugaaagcuauugugcau

SEQ ID NO: 857256 - RNA, 19 nt, Homo sapiens
  misc_RNA (1)...(19): siRNA sense strand
uuuagaagaugcugucguu

SEQ ID NO: 857257 - RNA, 19 nt, Homo sapiens
  misc_RNA (1)...(19): siRNA sense strand
guauaugguuuagaagaug

SEQ ID NO: 857258 - RNA, 19 nt, Homo sapiens
  misc_RNA (1)...(19): siRNA sense strand
gaaaauucagucaacguua

SEQ ID NO: 857259 - RNA, 19 nt, Homo sapiens
  misc_RNA (1)...(19): siRNA sense strand
gaaaaugugauacaccuuu

SEQ ID NO: 857260 - RNA, 19 nt, Homo sapiens
  misc_RNA (1)...(19): siRNA sense strand
aaaaggaguuggagaaaga

SEQ ID NO: 857261 - RNA, 19 nt, Homo sapiens
  misc_RNA (1)...(19): siRNA sense strand
gaguauaugguuuagaaga

SEQ ID NO: 857262 - RNA, 19 nt, Homo sapiens
  misc_RNA (1)...(19): siRNA sense strand
ggauaaagaauuaguugag

SEQ ID NO: 857263 - RNA, 19 nt, Homo sapiens
  misc_RNA (1)...(19): siRNA sense strand
ugacuaccagaaacaaaua

SEQ ID NO: 857264 - RNA, 19 nt, Homo sapiens
  misc_RNA (1)...(19): siRNA sense strand
gagaagaacaagcaaaauu

SEQ ID NO: 857265 - RNA, 19 nt, Homo sapiens
  misc_RNA (1)...(19): siRNA sense strand
gaaauucagacuuuaacag

SEQ ID NO: 857266 - RNA, 19 nt, Homo sapiens
  misc_RNA (1)...(19): siRNA sense strand
agaacaaacgucuaaagaa

SEQ ID NO: 857267 - RNA, 19 nt, Homo sapiens
  misc_RNA (1)...(19): siRNA sense strand
gcaucagacagauaaugua

SEQ ID NO: 857268 - RNA, 19 nt, Homo sapiens
  misc_RNA (1)...(19): siRNA sense strand
aagaacgacuugaucugaa

SEQ ID NO: 857269 - RNA, 19 nt, Homo sapiens
  misc_RNA (1)...(19): siRNA sense strand
uagaagaugcugucguuga

SEQ ID NO: 857270 - RNA, 19 nt, Homo sapiens
  misc_RNA (1)...(19): siRNA sense strand
uacaggaaauggagaagau

SEQ ID NO: 857271 - RNA, 19 nt, Homo sapiens
  misc_RNA (1)...(19): siRNA sense strand
cuucaacccuuucucaaca

SEQ ID NO: 857272 - RNA, 19 nt, Homo sapiens
  misc_RNA (1)...(19): siRNA sense strand
uuaagaugcucaccgaaca

SEQ ID NO: 857273 - RNA, 19 nt, Homo sapiens
  misc_RNA (1)...(19): siRNA sense strand
cgagacagucaaauuaaga

SEQ ID NO: 857274 - RNA, 19 nt, Homo sapiens
  misc_RNA (1)...(19): siRNA sense strand
gagaagaugacugaugaau

SEQ ID NO: 857275 - RNA, 19 nt, Homo sapiens
  misc_RNA (1)...(19): siRNA sense strand
cgucaaauggcucaagaaa

SEQ ID NO: 857276 - RNA, 19 nt, Homo sapiens
  misc_RNA (1)...(19): siRNA sense strand
ggaagaacgacuugaucug

SEQ ID NO: 857277 - RNA, 19 nt, Homo sapiens
  misc_RNA (1)...(19): siRNA sense strand
gaugcugucguugaaauaa

SEQ ID NO: 857278 - RNA, 19 nt, Homo sapiens
  misc_RNA (1)...(19): siRNA sense strand
gaagaugcugucguugaaa

SEQ ID NO: 857279 - RNA, 19 nt, Homo sapiens
  misc_RNA (1)...(19): siRNA sense strand
cugaagagguuaaaagauu

SEQ ID NO: 857280 - RNA, 19 nt, Homo sapiens
  misc_RNA (1)...(19): siRNA sense strand
gcucaccgaacaaguagaa

SEQ ID NO: 857281 - RNA, 19 nt, Homo sapiens
  misc_RNA (1)...(19): siRNA sense strand
aaugaaaguugacccagau

SEQ ID NO: 857282 - RNA, 19 nt, Homo sapiens
  misc_RNA (1)...(19): siRNA sense strand
guaauguuauggcucuaca

SEQ ID NO: 857283 - RNA, 19 nt, Homo sapiens
  misc_RNA (1)...(19): siRNA sense strand
ugcaggagcuuacagaucu

SEQ ID NO: 857284 - RNA, 19 nt, Homo sapiens
  misc_RNA (1)...(19): siRNA sense strand
aaauggagaagaugacuga

SEQ ID NO: 857285 - RNA, 19 nt, Homo sapiens
  misc_RNA (1)...(19): siRNA sense strand
gaaacaaaggugcuucaac

SEQ ID NO: 857286 - RNA, 19 nt, Homo sapiens
  misc_RNA (1)...(19): siRNA sense strand
agaauuacucagucacuaa

SEQ ID NO: 857287 - RNA, 19 nt, Homo sapiens
  misc_RNA (1)...(19): siRNA sense strand
gaaaagcaagaaaauguga

SEQ ID NO: 857288 - RNA, 19 nt, Homo sapiens
  misc_RNA (1)...(19): siRNA sense strand
gaucgagagauugaaauau

SEQ ID NO: 857289 - RNA, 19 nt, Homo sapiens
  misc_RNA (1)...(19): siRNA sense strand
gggaaaaggauaaagaauu

SEQ ID NO: 857290 - RNA, 19 nt, Homo sapiens
  misc_RNA (1)...(19): siRNA sense strand
ucagucaacguuagacauu

SEQ ID NO: 857291 - RNA, 19 nt, Homo sapiens
  misc_RNA (1)...(19): siRNA sense strand
gaauaacccugccaucaaa

SEQ ID NO: 857292 - RNA, 19 nt, Homo sapiens
  misc_RNA (1)...(19): siRNA sense strand
caagaaaccugccggcuuu

SEQ ID NO: 857293 - RNA, 19 nt, Homo sapiens
  misc_RNA (1)...(19): siRNA sense strand
ggacaggccuucuccaaga

SEQ ID NO: 857294 - RNA, 19 nt, Homo sapiens
  misc_RNA (1)...(19): siRNA sense strand
gaaacugauuugugaugua

SEQ ID NO: 857295 - RNA, 19 nt, Homo sapiens
  misc_RNA (1)...(19): siRNA sense strand
gcaggaagacucuaauuug

SEQ ID NO: 857296 - RNA, 19 nt, Homo sapiens
  misc_RNA (1)...(19): siRNA sense strand
gaaaaguggugaacuauau

SEQ ID NO: 857297 - RNA, 19 nt, Homo sapiens
  misc_RNA (1)...(19): siRNA sense strand
caaaagcccuggagaagua

SEQ ID NO: 857298 - RNA, 19 nt, Homo sapiens
  misc_RNA (1)...(19): siRNA sense strand
gaagcuagacugaagauau

SEQ ID NO: 857299 - RNA, 19 nt, Homo sapiens
  misc_RNA (1)...(19): siRNA sense strand
ggaggaagcuagacugaag

SEQ ID NO: 857300 - RNA, 19 nt, Homo sapiens
  misc_RNA (1)...(19): siRNA sense strand
gcaggacccguuuauauuu

SEQ ID NO: 857301 - RNA, 19 nt, Homo sapiens
  misc_RNA (1)...(19): siRNA sense strand
agaccucggugaucuaaua

SEQ ID NO: 857302 - RNA, 19 nt, Homo sapiens
  misc_RNA (1)...(19): siRNA sense strand
uaaagaggcuggagagagu

SEQ ID NO: 857303 - RNA, 19 nt, Homo sapiens
  misc_RNA (1)...(19): siRNA sense strand
uaacagagcccagguccua

SEQ ID NO: 857304 - RNA, 19 nt, Homo sapiens
  misc_RNA (1)...(19): siRNA sense strand
cacaggauuugauagguua

SEQ ID NO: 857305 - RNA, 19 nt, Homo sapiens
  misc_RNA (1)...(19): siRNA sense strand
cugauuugcuccaguauaa

SEQ ID NO: 857306 - RNA, 19 nt, Homo sapiens
  misc_RNA (1)...(19): siRNA sense strand
caaguuggguuacuguuuc

SEQ ID NO: 857307 - RNA, 19 nt, Homo sapiens
  misc_RNA (1)...(19): siRNA sense strand
cgagaaagcagcccaaguu

SEQ ID NO: 857308 - RNA, 19 nt, Homo sapiens
  misc_RNA (1)...(19): siRNA sense strand
aaacuucucaugcaacaua

SEQ ID NO: 857309 - RNA, 19 nt, Homo sapiens
  misc_RNA (1)...(19): siRNA sense strand
ggaggaagguggaggugau

SEQ ID NO: 857310 - RNA, 19 nt, Homo sapiens
  misc_RNA (1)...(19): siRNA sense strand
caggaagacucuaauuugu

SEQ ID NO: 857311 - RNA, 19 nt, Homo sapiens
  misc_RNA (1)...(19): siRNA sense strand
ccacaggauuugauagguu

SEQ ID NO: 857312 - RNA, 19 nt, Homo sapiens
  misc_RNA (1)...(19): siRNA sense strand
aagcuagacugaagauauu

SEQ ID NO: 857313 - RNA, 19 nt, Homo sapiens
  misc_RNA (1)...(19): siRNA sense strand
caucauuggucauuucaga

SEQ ID NO: 857314 - RNA, 19 nt, Homo sapiens
  misc_RNA (1)...(19): siRNA sense strand
uugguuaucuggagguuua

SEQ ID NO: 857315 - RNA, 19 nt, Homo sapiens
  misc_RNA (1)...(19): siRNA sense strand
gcacgacgaggcaacguaa

SEQ ID NO: 857316 - RNA, 19 nt, Homo sapiens
  misc_RNA (1)...(19): siRNA sense strand
agagagucaucauugguua

SEQ ID NO: 857317 - RNA, 19 nt, Homo sapiens
  misc_RNA (1)...(19): siRNA sense strand
ccagagcaccgccuucuuu

SEQ ID NO: 857318 - RNA, 19 nt, Homo sapiens
  misc_RNA (1)...(19): siRNA sense strand
gaagccacaggauuugaua

SEQ ID NO: 857319 - RNA, 19 nt, Homo sapiens
  misc_RNA (1)...(19): siRNA sense strand
aauagaagccacaggauuu

SEQ ID NO: 857320 - RNA, 19 nt, Homo sapiens
  misc_RNA (1)...(19): siRNA sense strand
ggaccgccguucucaagga

SEQ ID NO: 857321 - RNA, 19 nt, Homo sapiens
  misc_RNA (1)...(19): siRNA sense strand
gauacuagggcuucucaaa

SEQ ID NO: 857322 - RNA, 19 nt, Homo sapiens
  misc_RNA (1)...(19): siRNA sense strand
guggugaacuauaucagaa

SEQ ID NO: 857323 - RNA, 19 nt, Homo sapiens
  misc_RNA (1)...(19): siRNA sense strand
ucuugaaacugauuuguga

SEQ ID NO: 857324 - RNA, 19 nt, Homo sapiens
  misc_RNA (1)...(19): siRNA sense strand
ggaaaguugagacugcuaa

SEQ ID NO: 857325 - RNA, 19 nt, Homo sapiens
  misc_RNA (1)...(19): siRNA sense strand
ggcaggacccguuuauauu

SEQ ID NO: 857326 - RNA, 19 nt, Homo sapiens
  misc_RNA (1)...(19): siRNA sense strand
ucucaaacccgacuuguau

SEQ ID NO: 857327 - RNA, 19 nt, Homo sapiens
  misc_RNA (1)...(19): siRNA sense strand
ugaaggcccucuugaaacu

SEQ ID NO: 857328 - RNA, 19 nt, Homo sapiens
  misc_RNA (1)...(19): siRNA sense strand
gagagagucaucauugguu

SEQ ID NO: 857329 - RNA, 19 nt, Homo sapiens
  misc_RNA (1)...(19): siRNA sense strand
gagaaagcagcccaaguug

SEQ ID NO: 857330 - RNA, 19 nt, Homo sapiens
  misc_RNA (1)...(19): siRNA sense strand
ucaaacccgacuuguauaa

SEQ ID NO: 857331 - RNA, 19 nt, Homo sapiens
  misc_RNA (1)...(19): siRNA sense strand
uuaaagaccucggugaucu

SEQ ID NO: 857332 - RNA, 19 nt, Homo sapiens
  misc_RNA (1)...(19): siRNA sense strand
aaacugauuugugauguag

SEQ ID NO: 857333 - RNA, 19 nt, Homo sapiens
  misc_RNA (1)...(19): siRNA sense strand
uaauagaagccacaggauu

SEQ ID NO: 857334 - RNA, 19 nt, Homo sapiens
  misc_RNA (1)...(19): siRNA sense strand
agacgggccugcaucacuu

SEQ ID NO: 857335 - RNA, 19 nt, Homo sapiens
  misc_RNA (1)...(19): siRNA sense strand
ggccacagacugccugauu

SEQ ID NO: 857336 - RNA, 19 nt, Homo sapiens
  misc_RNA (1)...(19): siRNA sense strand
agaguuuccugcagacuug

SEQ ID NO: 857337 - RNA, 19 nt, Homo sapiens
  misc_RNA (1)...(19): siRNA sense strand
agaauaacccugccaucaa

SEQ ID NO: 857338 - RNA, 19 nt, Homo sapiens
  misc_RNA (1)...(19): siRNA sense strand
uggcaggacccguuuauau

SEQ ID NO: 857339 - RNA, 19 nt, Homo sapiens
  misc_RNA (1)...(19): siRNA sense strand
ucaccucacugcuucaagu

SEQ ID NO: 857340 - RNA, 19 nt, Homo sapiens
  misc_RNA (1)...(19): siRNA sense strand
gcgguucuguggcaggauu

SEQ ID NO: 857341 - RNA, 19 nt, Homo sapiens
  misc_RNA (1)...(19): siRNA sense strand
acagaaaaguggugaacua

SEQ ID NO: 857342 - RNA, 19 nt, Homo sapiens
  misc_RNA (1)...(19): siRNA sense strand
gaggaggaagcuagacuga

SEQ ID NO: 857343 - RNA, 19 nt, Homo sapiens
  misc_RNA (1)...(19): siRNA sense strand
gagcccagguccuauacca

SEQ ID NO: 857344 - RNA, 19 nt, Homo sapiens
  misc_RNA (1)...(19): siRNA sense strand
cugcugauuugcuccagua

SEQ ID NO: 857345 - RNA, 19 nt, Homo sapiens
  misc_RNA (1)...(19): siRNA sense strand
uaacuguccggcacuuaaa

SEQ ID NO: 857346 - RNA, 19 nt, Homo sapiens
  misc_RNA (1)...(19): siRNA sense strand
gccacagacugccugauuc

SEQ ID NO: 857347 - RNA, 19 nt, Homo sapiens
  misc_RNA (1)...(19): siRNA sense strand
ccgcaucauuggucauuuc

SEQ ID NO: 857348 - RNA, 19 nt, Homo sapiens
  misc_RNA (1)...(19): siRNA sense strand
gaaggcgcacccuacaaug

SEQ ID NO: 857349 - RNA, 19 nt, Homo sapiens
  misc_RNA (1)...(19): siRNA sense strand
ugaaacugauuugugaugu

SEQ ID NO: 857350 - RNA, 19 nt, Homo sapiens
  misc_RNA (1)...(19): siRNA sense strand
ugauggaccugaggaggaa

SEQ ID NO: 857351 - RNA, 19 nt, Homo sapiens
  misc_RNA (1)...(19): siRNA sense strand
gacaggccuucuccaagau

SEQ ID NO: 857352 - RNA, 19 nt, Homo sapiens
  misc_RNA (1)...(19): siRNA sense strand
agacugaagauauuggaaa

SEQ ID NO: 857353 - RNA, 19 nt, Homo sapiens
  misc_RNA (1)...(19): siRNA sense strand
ggagagagucaucauuggu

SEQ ID NO: 857354 - RNA, 19 nt, Homo sapiens
  misc_RNA (1)...(19): siRNA sense strand
gcugauuugcuccaguaua

SEQ ID NO: 857355 - RNA, 19 nt, Homo sapiens
  misc_RNA (1)...(19): siRNA sense strand
aaacccgacuuguauaagg

SEQ ID NO: 857356 - RNA, 19 nt, Homo sapiens
  misc_RNA (1)...(19): siRNA sense strand
uaaagaccucggugaucua

SEQ ID NO: 857357 - RNA, 19 nt, Homo sapiens
  misc_RNA (1)...(19): siRNA sense strand
gguccuauaccaugccauu

SEQ ID NO: 857358 - RNA, 19 nt, Homo sapiens
  misc_RNA (1)...(19): siRNA sense strand
ugaaggcgcacccuacaau

SEQ ID NO: 857359 - RNA, 19 nt, Homo sapiens
  misc_RNA (1)...(19): siRNA sense strand
cuaacuguccggcacuuaa

SEQ ID NO: 857360 - RNA, 19 nt, Homo sapiens
  misc_RNA (1)...(19): siRNA sense strand
gcacuggaaaggagaugga

SEQ ID NO: 857361 - RNA, 19 nt, Homo sapiens
  misc_RNA (1)...(19): siRNA sense strand
guuggguuacuguuucuua

SEQ ID NO: 857362 - RNA, 19 nt, Homo sapiens
  misc_RNA (1)...(19): siRNA sense strand
acugaaggcccucuugaaa

SEQ ID NO: 857363 - RNA, 19 nt, Homo sapiens
  misc_RNA (1)...(19): siRNA sense strand
agaaaacccugcacuggaa

SEQ ID NO: 857364 - RNA, 19 nt, Homo sapiens
  misc_RNA (1)...(19): siRNA sense strand
acagagcccagguccuaua

SEQ ID NO: 857365 - RNA, 19 nt, Homo sapiens
  misc_RNA (1)...(19): siRNA sense strand
gaacaaaauccugggugua

SEQ ID NO: 857366 - RNA, 19 nt, Homo sapiens
  misc_RNA (1)...(19): siRNA sense strand
cgcaggaagacucuaauuu

SEQ ID NO: 857367 - RNA, 19 nt, Homo sapiens
  misc_RNA (1)...(19): siRNA sense strand
ugugucugcuggauuuauu

SEQ ID NO: 857368 - RNA, 19 nt, Homo sapiens
  misc_RNA (1)...(19): siRNA sense strand
ccagagcaccaccucauuc

SEQ ID NO: 857369 - RNA, 19 nt, Homo sapiens
  misc_RNA (1)...(19): siRNA sense strand
aagaauaacccugccauca

SEQ ID NO: 857370 - RNA, 19 nt, Homo sapiens
  misc_RNA (1)...(19): siRNA sense strand
gacugaagauauuggaaac

SEQ ID NO: 857371 - RNA, 19 nt, Homo sapiens
  misc_RNA (1)...(19): siRNA sense strand
caucgcaggaagacucuaa

SEQ ID NO: 857372 - RNA, 19 nt, Homo sapiens
  misc_RNA (1)...(19): siRNA sense strand
ggauuugauagguuauuug

SEQ ID NO: 857373 - RNA, 19 nt, Homo sapiens
  misc_RNA (1)...(19): siRNA sense strand
guacuucccgcaucauugg

SEQ ID NO: 857374 - RNA, 19 nt, Homo sapiens
  misc_RNA (1)...(19): siRNA sense strand
caggccuucuccaagauuu

SEQ ID NO: 857375 - RNA, 19 nt, Homo sapiens
  misc_RNA (1)...(19): siRNA sense strand
gcaggaccuacgcaagaaa

SEQ ID NO: 857376 - RNA, 19 nt, Homo sapiens
  misc_RNA (1)...(19): siRNA sense strand
agggagacuuucggugaua

SEQ ID NO: 857377 - RNA, 19 nt, Homo sapiens
  misc_RNA (1)...(19): siRNA sense strand
ggugaacuauaucagaaaa

SEQ ID NO: 857378 - RNA, 19 nt, Homo sapiens
  misc_RNA (1)...(19): siRNA sense strand
acaccugagucuguuaaga

SEQ ID NO: 857379 - RNA, 19 nt, Homo sapiens
  misc_RNA (1)...(19): siRNA sense strand
gauuugcuccaguauaaca

SEQ ID NO: 857380 - RNA, 19 nt, Homo sapiens
  misc_RNA (1)...(19): siRNA sense strand
aauccuggguguacacugu

SEQ ID NO: 857381 - RNA, 19 nt, Homo sapiens
  misc_RNA (1)...(19): siRNA sense strand
aaguugagacugcuaagaa

SEQ ID NO: 857382 - RNA, 19 nt, Homo sapiens
  misc_RNA (1)...(19): siRNA sense strand
acccuacaauggaacuuaa

SEQ ID NO: 857383 - RNA, 19 nt, Homo sapiens
  misc_RNA (1)...(19): siRNA sense strand
aaagaccucggugaucuaa

SEQ ID NO: 857384 - RNA, 19 nt, Homo sapiens
  misc_RNA (1)...(19): siRNA sense strand
guugagacugcuaagaauu

SEQ ID NO: 857385 - RNA, 19 nt, Homo sapiens
  misc_RNA (1)...(19): siRNA sense strand
uuggguuacuguuucuuaa

SEQ ID NO: 857386 - RNA, 19 nt, Homo sapiens
  misc_RNA (1)...(19): siRNA sense strand
gacuuguggucuuacugaa

SEQ ID NO: 857387 - RNA, 19 nt, Homo sapiens
  misc_RNA (1)...(19): siRNA sense strand
cauacuuggcccagaguuu

SEQ ID NO: 857388 - RNA, 19 nt, Homo sapiens
  misc_RNA (1)...(19): siRNA sense strand
ggaagcuagacugaagaua

SEQ ID NO: 857389 - RNA, 19 nt, Homo sapiens
  misc_RNA (1)...(19): siRNA sense strand
gcucgacccaccacccauu

SEQ ID NO: 857390 - RNA, 19 nt, Homo sapiens
  misc_RNA (1)...(19): siRNA sense strand
uccugugucugcuggauuu

SEQ ID NO: 857391 - RNA, 19 nt, Homo sapiens
  misc_RNA (1)...(19): siRNA sense strand
ucacugggcugcaucacua

SEQ ID NO: 857392 - RNA, 19 nt, Homo sapiens
  misc_RNA (1)...(19): siRNA sense strand
ucacuacaaucccagcaua

SEQ ID NO: 857393 - RNA, 19 nt, Homo sapiens
  misc_RNA (1)...(19): siRNA sense strand
gcgcgucacuggaggaaga

SEQ ID NO: 857394 - RNA, 19 nt, Homo sapiens
  misc_RNA (1)...(19): siRNA sense strand
ucaccgggcugcaggacua

SEQ ID NO: 857395 - RNA, 19 nt, Homo sapiens
  misc_RNA (1)...(19): siRNA sense strand
ucagggagagugcgcauua

SEQ ID NO: 857396 - RNA, 19 nt, Homo sapiens
  misc_RNA (1)...(19): siRNA sense strand
gcuaaucaguggagaaagg

SEQ ID NO: 857397 - RNA, 19 nt, Homo sapiens
  misc_RNA (1)...(19): siRNA sense strand
ggugggaguugcagucuca

SEQ ID NO: 857398 - RNA, 19 nt, Homo sapiens
  misc_RNA (1)...(19): siRNA sense strand
gggaguugcagucucauaa

SEQ ID NO: 857399 - RNA, 19 nt, Homo sapiens
  misc_RNA (1)...(19): siRNA sense strand
cugcagcgcuacaauccua

SEQ ID NO: 857400 - RNA, 19 nt, Homo sapiens
  misc_RNA (1)...(19): siRNA sense strand
ggaguugcagucucauaaa

SEQ ID NO: 857401 - RNA, 19 nt, Homo sapiens
  misc_RNA (1)...(19): siRNA sense strand
ggagagugcgcuaaucagu

SEQ ID NO: 857402 - RNA, 19 nt, Homo sapiens
  misc_RNA (1)...(19): siRNA sense strand
gcgcuaaucaguggagaaa

SEQ ID NO: 857403 - RNA, 19 nt, Homo sapiens
  misc_RNA (1)...(19): siRNA sense strand
gcacaccucgcuggucuug

SEQ ID NO: 857404 - RNA, 19 nt, Homo sapiens
  misc_RNA (1)...(19): siRNA sense strand
gcgcauuacuggaggaaaa

SEQ ID NO: 857405 - RNA, 19 nt, Homo sapiens
  misc_RNA (1)...(19): siRNA sense strand
gaguugcagucucauaaac

SEQ ID NO: 857406 - RNA, 19 nt, Homo sapiens
  misc_RNA (1)...(19): siRNA sense strand
gaugcagucucauaaacac

SEQ ID NO: 857407 - RNA, 19 nt, Homo sapiens
  misc_RNA (1)...(19): siRNA sense strand
uaaacacucccagcccuuu

SEQ ID NO: 857408 - RNA, 19 nt, Homo sapiens
  misc_RNA (1)...(19): siRNA sense strand
uaaacacucccagcccuuu

SEQ ID NO: 857409 - RNA, 19 nt, Homo sapiens
  misc_RNA (1)...(19): siRNA sense strand
cagcauacaucgggaucag

SEQ ID NO: 857410 - RNA, 19 nt, Homo sapiens
  misc_RNA (1)...(19): siRNA sense strand
acaccucgcuggucuugcu

SEQ ID NO: 857411 - RNA, 19 nt, Homo sapiens
  misc_RNA (1)...(19): siRNA sense strand
gggagagugcgcauuacug

SEQ ID NO: 857412 - RNA, 19 nt, Homo sapiens
  misc_RNA (1)...(19): siRNA sense strand
uaucacagcuuauguaugu

SEQ ID NO: 857413 - RNA, 19 nt, Homo sapiens
  misc_RNA (1)...(19): siRNA sense strand
gccaauagcugggcaguuu

SEQ ID NO: 857414 - RNA, 19 nt, Homo sapiens
  misc_RNA (1)...(19): siRNA sense strand
gcccaaaguuuauauauca

SEQ ID NO: 857415 - RNA, 19 nt, Homo sapiens
  misc_RNA (1)...(19): siRNA sense strand
gugcaaaccuccacuuguu

SEQ ID NO: 857416 - RNA, 19 nt, Homo sapiens
  misc_RNA (1)...(19): siRNA sense strand
gaagguaacacugauggua

SEQ ID NO: 857417 - RNA, 19 nt, Homo sapiens
  misc_RNA (1)...(19): siRNA sense strand
gugcuuuggucgaagaaua

SEQ ID NO: 857418 - RNA, 19 nt, Homo sapiens
  misc_RNA (1)...(19): siRNA sense strand
gcaggaaucagcaaguuug

SEQ ID NO: 857419 - RNA, 19 nt, Homo sapiens
  misc_RNA (1)...(19): siRNA sense strand
gagccacuauugccuguga

SEQ ID NO: 857420 - RNA, 19 nt, Homo sapiens
  misc_RNA (1)...(19): siRNA sense strand
ggcaguuuaucacagcuua

SEQ ID NO: 857421 - RNA, 19 nt, Homo sapiens
  misc_RNA (1)...(19): siRNA sense strand
ccaagaagguaacacugau

SEQ ID NO: 857422 - RNA, 19 nt, Homo sapiens
  misc_RNA (1)...(19): siRNA sense strand
gcaaaccuccacuuguuau

SEQ ID NO: 857423 - RNA, 19 nt, Homo sapiens
  misc_RNA (1)...(19): siRNA sense strand
gaauagaccaaggcggaua

SEQ ID NO: 857424 - RNA, 19 nt, Homo sapiens
  misc_RNA (1)...(19): siRNA sense strand
aaccuccacuuguuauaua

SEQ ID NO: 857425 - RNA, 19 nt, Homo sapiens
  misc_RNA (1)...(19): siRNA sense strand
guaaucaccaagaagguaa

SEQ ID NO: 857426 - RNA, 19 nt, Homo sapiens
  misc_RNA (1)...(19): siRNA sense strand
gaugugcuuuggucgaaga

SEQ ID NO: 857427 - RNA, 19 nt, Homo sapiens
  misc_RNA (1)...(19): siRNA sense strand
uaacacugaugguaaucug

SEQ ID NO: 857428 - RNA, 19 nt, Homo sapiens
  misc_RNA (1)...(19): siRNA sense strand
gguaaucaccaagaaggua

SEQ ID NO: 857429 - RNA, 19 nt, Homo sapiens
  misc_RNA (1)...(19): siRNA sense strand
gggucaggcuuauguguca

SEQ ID NO: 857430 - RNA, 19 nt, Homo sapiens
  misc_RNA (1)...(19): siRNA sense strand
aagccuauguguauguauu

SEQ ID NO: 857431 - RNA, 19 nt, Homo sapiens
  misc_RNA (1)...(19): siRNA sense strand
ucaagccuauguguaugua

SEQ ID NO: 857432 - RNA, 19 nt, Homo sapiens
  misc_RNA (1)...(19): siRNA sense strand
ccaaaccuguguaucaaac

SEQ ID NO: 857433 - RNA, 19 nt, Homo sapiens
  misc_RNA (1)...(19): siRNA sense strand
guacacggaugugcuuugg

SEQ ID NO: 857434 - RNA, 19 nt, Homo sapiens
  misc_RNA (1)...(19): siRNA sense strand
gugccaaaccuguguauca

SEQ ID NO: 857435 - RNA, 19 nt, Homo sapiens
  misc_RNA (1)...(19): siRNA sense strand
gguauaauugcccugcuaa

SEQ ID NO: 857436 - RNA, 19 nt, Homo sapiens
  misc_RNA (1)...(19): siRNA sense strand
gguaaucugugccaauagc

SEQ ID NO: 857437 - RNA, 19 nt, Homo sapiens
  misc_RNA (1)...(19): siRNA sense strand
ccaauagcugggcaguuua

SEQ ID NO: 857438 - RNA, 19 nt, Homo sapiens
  misc_RNA (1)...(19): siRNA sense strand
caaaccuccacuuguuaua

SEQ ID NO: 857439 - RNA, 19 nt, Homo sapiens
  misc_RNA (1)...(19): siRNA sense strand
augguaaucugugccaaua

SEQ ID NO: 857440 - RNA, 19 nt, Homo sapiens
  misc_RNA (1)...(19): siRNA sense strand
guuuaucacagcuuaugua

SEQ ID NO: 857441 - RNA, 19 nt, Homo sapiens
  misc_RNA (1)...(19): siRNA sense strand
uauaauugcccugcuaaug

SEQ ID NO: 857442 - RNA, 19 nt, Homo sapiens
  misc_RNA (1)...(19): siRNA sense strand
gcuuauguaugugucaaau

SEQ ID NO: 857443 - RNA, 19 nt, Homo sapiens
  misc_RNA (1)...(19): siRNA sense strand
gggcuuggcuuggcucaac

SEQ ID NO: 857444 - RNA, 19 nt, Homo sapiens
  misc_RNA (1)...(19): siRNA sense strand
ugccaaaccuguguaucaa

SEQ ID NO: 857445 - RNA, 19 nt, Homo sapiens
  misc_RNA (1)...(19): siRNA sense strand
caauagcugggcaguuuau

SEQ ID NO: 857446 - RNA, 19 nt, Homo sapiens
  misc_RNA (1)...(19): siRNA sense strand
ccugugaaagguauaauug

SEQ ID NO: 857447 - RNA, 19 nt, Homo sapiens
  misc_RNA (1)...(19): siRNA sense strand
gugucaagccuauguguau

SEQ ID NO: 857448 - RNA, 19 nt, Homo sapiens
  misc_RNA (1)...(19): siRNA sense strand
ccuaggggauggaauguaa

SEQ ID NO: 857449 - RNA, 19 nt, Homo sapiens
  misc_RNA (1)...(19): siRNA sense strand
cggaugugcuuuggucgaa

SEQ ID NO: 857450 - RNA, 19 nt, Homo sapiens
  misc_RNA (1)...(19): siRNA sense strand
aagguaacacugaugguaa

SEQ ID NO: 857451 - RNA, 19 nt, Homo sapiens
  misc_RNA (1)...(19): siRNA sense strand
caagaagguaacacugaug

SEQ ID NO: 857452 - RNA, 19 nt, Homo sapiens
  misc_RNA (1)...(19): siRNA sense strand
gaugguaaucugugccaau

SEQ ID NO: 857453 - RNA, 19 nt, Homo sapiens
  misc_RNA (1)...(19): siRNA sense strand
ugcaaaccuccacuuguua

SEQ ID NO: 857454 - RNA, 19 nt, Homo sapiens
  misc_RNA (1)...(19): siRNA sense strand
guaugugucaaaucuguau

SEQ ID NO: 857455 - RNA, 19 nt, Homo sapiens
  misc_RNA (1)...(19): siRNA sense strand
uaauugcccugcuaaugcu

SEQ ID NO: 857456 - RNA, 19 nt, Homo sapiens
  misc_RNA (1)...(19): siRNA sense strand
cugcaggaaucagcaaguu

SEQ ID NO: 857457 - RNA, 19 nt, Homo sapiens
  misc_RNA (1)...(19): siRNA sense strand
aaaccuccacuuguuauau

SEQ ID NO: 857458 - RNA, 19 nt, Homo sapiens
  misc_RNA (1)...(19): siRNA sense strand
gccaaaccuguguaucaaa

SEQ ID NO: 857459 - RNA, 19 nt, Homo sapiens
  misc_RNA (1)...(19): siRNA sense strand
cagcuuauguaugugucaa

SEQ ID NO: 857460 - RNA, 19 nt, Homo sapiens
  misc_RNA (1)...(19): siRNA sense strand
uuauauaucaggccugugu

SEQ ID NO: 857461 - RNA, 19 nt, Homo sapiens
  misc_RNA (1)...(19): siRNA sense strand
ggugcaaaccuccacuugu

SEQ ID NO: 857462 - RNA, 19 nt, Homo sapiens
  misc_RNA (1)...(19): siRNA sense strand
agguauaauugcccugcua

SEQ ID NO: 857463 - RNA, 19 nt, Homo sapiens
  misc_RNA (1)...(19): siRNA sense strand
ugucaagccuauguguaug

SEQ ID NO: 857464 - RNA, 19 nt, Homo sapiens
  misc_RNA (1)...(19): siRNA sense strand
ugcccaaaguuuauauauc

SEQ ID NO: 857465 - RNA, 19 nt, Homo sapiens
  misc_RNA (1)...(19): siRNA sense strand
gguacacggaugugcuuug

SEQ ID NO: 857466 - RNA, 19 nt, Homo sapiens
  misc_RNA (1)...(19): siRNA sense strand
agguaacacugaugguaau

SEQ ID NO: 857467 - RNA, 19 nt, Homo sapiens
  misc_RNA (1)...(19): siRNA sense strand
gcaugcccaaaguuuauau

SEQ ID NO: 857468 - RNA, 19 nt, Homo sapiens
  misc_RNA (1)...(19): siRNA sense strand
ggagaacgaugaggaugga

SEQ ID NO: 857469 - RNA, 19 nt, Homo sapiens
  misc_RNA (1)...(19): siRNA sense strand
gcacccagcgcuccuacaa

SEQ ID NO: 857470 - RNA, 19 nt, Homo sapiens
  misc_RNA (1)...(19): siRNA sense strand
guuggugccuggagucuau

SEQ ID NO: 857471 - RNA, 19 nt, Homo sapiens
  misc_RNA (1)...(19): siRNA sense strand
ggagucggcaccagggauu

SEQ ID NO: 857472 - RNA, 19 nt, Homo sapiens
  misc_RNA (1)...(19): siRNA sense strand
gaguggugcuggccuccuu

SEQ ID NO: 857473 - RNA, 19 nt, Homo sapiens
  misc_RNA (1)...(19): siRNA sense strand
ggacccaacacccuuugau

SEQ ID NO: 857474 - RNA, 19 nt, Homo sapiens
  misc_RNA (1)...(19): siRNA sense strand
acccagcgcuccuacaaca

SEQ ID NO: 857475 - RNA, 19 nt, Homo sapiens
  misc_RNA (1)...(19): siRNA sense strand
cacgugaucuucaucuacu

SEQ ID NO: 857476 - RNA, 19 nt, Homo sapiens
  misc_RNA (1)...(19): siRNA sense strand
ucuucuaccugcccuacuu

SEQ ID NO: 857477 - RNA, 19 nt, Homo sapiens
  misc_RNA (1)...(19): siRNA sense strand
gacccaacacccuuugauc

SEQ ID NO: 857478 - RNA, 19 nt, Homo sapiens
  misc_RNA (1)...(19): siRNA sense strand
acccuuugauccagaagaa

SEQ ID NO: 857479 - RNA, 19 nt, Homo sapiens
  misc_RNA (1)...(19): siRNA sense strand
gaaccuggagaacgaugag

SEQ ID NO: 857480 - RNA, 19 nt, Homo sapiens
  misc_RNA (1)...(19): siRNA sense strand
uggcgaagcugcuauacuu

SEQ ID NO: 857481 - RNA, 19 nt, Homo sapiens
  misc_RNA (1)...(19): siRNA sense strand
ccgcuugccaaccguauua

SEQ ID NO: 857482 - RNA, 19 nt, Homo sapiens
  misc_RNA (1)...(19): siRNA sense strand
uggaggaacugcgcacaga

SEQ ID NO: 857483 - RNA, 19 nt, Homo sapiens
  misc_RNA (1)...(19): siRNA sense strand
guggagaugcggaccaaga

SEQ ID NO: 857484 - RNA, 19 nt, Homo sapiens
  misc_RNA (1)...(19): siRNA sense strand
gccuagugcuggaguacug

SEQ ID NO: 857485 - RNA, 19 nt, Homo sapiens
  misc_RNA (1)...(19): siRNA sense strand
ggagaugcggaccaagaug

SEQ ID NO: 857486 - RNA, 19 nt, Homo sapiens
  misc_RNA (1)...(19): siRNA sense strand
ggguggagaugcggaccaa

SEQ ID NO: 857487 - RNA, 19 nt, Homo sapiens
  misc_RNA (1)...(19): siRNA sense strand
ugccugcguccaagaaaua

SEQ ID NO: 857488 - RNA, 19 nt, Homo sapiens
  misc_RNA (1)...(19): siRNA sense strand
gugccugcguccaagaaau

SEQ ID NO: 857489 - RNA, 19 nt, Homo sapiens
  misc_RNA (1)...(19): siRNA sense strand
ucaucaagccgcugaacga

SEQ ID NO: 857490 - RNA, 19 nt, Homo sapiens
  misc_RNA (1)...(19): siRNA sense strand
gcacagauuuaacauauga

SEQ ID NO: 857491 - RNA, 19 nt, Homo sapiens
  misc_RNA (1)...(19): siRNA sense strand
ugaaagaacuggagcagaa

SEQ ID NO: 857492 - RNA, 19 nt, Homo sapiens
  misc_RNA (1)...(19): siRNA sense strand
gaacgaaaaugcugaguug

SEQ ID NO: 857493 - RNA, 19 nt, Homo sapiens
  misc_RNA (1)...(19): siRNA sense strand
ccacaaaccuggagaacca

SEQ ID NO: 857494 - RNA, 19 nt, Homo sapiens
  misc_RNA (1)...(19): siRNA sense strand
caccacauuucucgaguua

SEQ ID NO: 857495 - RNA, 19 nt, Homo sapiens
  misc_RNA (1)...(19): siRNA sense strand
gaagaggucuacagauucg

SEQ ID NO: 857496 - RNA, 19 nt, Homo sapiens
  misc_RNA (1)...(19): siRNA sense strand
gcuggaagcccaacugaaa

SEQ ID NO: 857497 - RNA, 19 nt, Homo sapiens
  misc_RNA (1)...(19): siRNA sense strand
uugaagaggucuacagauu

SEQ ID NO: 857498 - RNA, 19 nt, Homo sapiens
  misc_RNA (1)...(19): siRNA sense strand
gaggcaagguggugaggaa

SEQ ID NO: 857499 - RNA, 19 nt, Homo sapiens
  misc_RNA (1)...(19): siRNA sense strand
cugcacagauuuaacauau

SEQ ID NO: 857500 - RNA, 19 nt, Homo sapiens
  misc_RNA (1)...(19): siRNA sense strand
gcacugcacagauuuaaca

SEQ ID NO: 857501 - RNA, 19 nt, Homo sapiens
  misc_RNA (1)...(19): siRNA sense strand
caacugaaagugaaagaga

SEQ ID NO: 857502 - RNA, 19 nt, Homo sapiens
  misc_RNA (1)...(19): siRNA sense strand
gaaagaacuggagcagaaa

SEQ ID NO: 857503 - RNA, 19 nt, Homo sapiens
  misc_RNA (1)...(19): siRNA sense strand
ucaaggagcgagagaagaa

SEQ ID NO: 857504 - RNA, 19 nt, Homo sapiens
  misc_RNA (1)...(19): siRNA sense strand
gggaaccaguggaugcuau

SEQ ID NO: 857505 - RNA, 19 nt, Homo sapiens
  misc_RNA (1)...(19): siRNA sense strand
cgaugaagguccucuggau

SEQ ID NO: 857506 - RNA, 19 nt, Homo sapiens
  misc_RNA (1)...(19): siRNA sense strand
gaaagugaaagagaacgaa

SEQ ID NO: 857507 - RNA, 19 nt, Homo sapiens
  misc_RNA (1)...(19): siRNA sense strand
uaacauaugagcugacagu

SEQ ID NO: 857508 - RNA, 19 nt, Homo sapiens
  misc_RNA (1)...(19): siRNA sense strand
gggcugcacuccgagauca

SEQ ID NO: 857509 - RNA, 19 nt, Homo sapiens
  misc_RNA (1)...(19): siRNA sense strand
gcaagguggugaggaagca

SEQ ID NO: 857510 - RNA, 19 nt, Homo sapiens
  misc_RNA (1)...(19): siRNA sense strand
gaagcccaacugaaaguga

SEQ ID NO: 857511 - RNA, 19 nt, Homo sapiens
  misc_RNA (1)...(19): siRNA sense strand
caggagacgggacuucuaa

SEQ ID NO: 857512 - RNA, 19 nt, Homo sapiens
  misc_RNA (1)...(19): siRNA sense strand
cgaaaaugcugaguuguug

SEQ ID NO: 857513 - RNA, 19 nt, Homo sapiens
  misc_RNA (1)...(19): siRNA sense strand
ucacagugcuggagaacac

SEQ ID NO: 857514 - RNA, 19 nt, Homo sapiens
  misc_RNA (1)...(19): siRNA sense strand
ccacauuucucgaguuacg

SEQ ID NO: 857515 - RNA, 19 nt, Homo sapiens
  misc_RNA (1)...(19): siRNA sense strand
augcugaguuguugaaaga

SEQ ID NO: 857516 - RNA, 19 nt, Homo sapiens
  misc_RNA (1)...(19): siRNA sense strand
gagcuggaagcccaacuga

SEQ ID NO: 857517 - RNA, 19 nt, Homo sapiens
  misc_RNA (1)...(19): siRNA sense strand
aaagacaagcuacccgaaa

SEQ ID NO: 857518 - RNA, 19 nt, Homo sapiens
  misc_RNA (1)...(19): siRNA sense strand
gcacagcgcacagaagaac

SEQ ID NO: 857519 - RNA, 19 nt, Homo sapiens
  misc_RNA (1)...(19): siRNA sense strand
ucaccacauuucucgaguu

SEQ ID NO: 857520 - RNA, 19 nt, Homo sapiens
  misc_RNA (1)...(19): siRNA sense strand
ugaagaggucuacagauuc

SEQ ID NO: 857521 - RNA, 19 nt, Homo sapiens
  misc_RNA (1)...(19): siRNA sense strand
aagcccaacugaaagugaa

SEQ ID NO: 857522 - RNA, 19 nt, Homo sapiens
  misc_RNA (1)...(19): siRNA sense strand
gccaagaagaagcucauga

SEQ ID NO: 857523 - RNA, 19 nt, Homo sapiens
  misc_RNA (1)...(19): siRNA sense strand
ccaagaagaagcucaugag

SEQ ID NO: 857524 - RNA, 19 nt, Homo sapiens
  misc_RNA (1)...(19): siRNA sense strand
gcagugaauuaaagaaaag

SEQ ID NO: 857525 - RNA, 19 nt, Homo sapiens
  misc_RNA (1)...(19): siRNA sense strand
aagcugacccugcugucua

SEQ ID NO: 857526 - RNA, 19 nt, Homo sapiens
  misc_RNA (1)...(19): siRNA sense strand
gcugaguuguugaaagaac

SEQ ID NO: 857527 - RNA, 19 nt, Homo sapiens
  misc_RNA (1)...(19): siRNA sense strand
cagcacugcacagauuuaa

SEQ ID NO: 857528 - RNA, 19 nt, Homo sapiens
  misc_RNA (1)...(19): siRNA sense strand
aagacaagcuacccgaaac

SEQ ID NO: 857529 - RNA, 19 nt, Homo sapiens
  misc_RNA (1)...(19): siRNA sense strand
aaagugaaagagaacgaaa

SEQ ID NO: 857530 - RNA, 19 nt, Homo sapiens
  misc_RNA (1)...(19): siRNA sense strand
ggagacgggacuucuaaaa

SEQ ID NO: 857531 - RNA, 19 nt, Homo sapiens
  misc_RNA (1)...(19): siRNA sense strand
gaagguccucuggauguca

SEQ ID NO: 857532 - RNA, 19 nt, Homo sapiens
  misc_RNA (1)...(19): siRNA sense strand
aacugaaagugaaagagaa

SEQ ID NO: 857533 - RNA, 19 nt, Homo sapiens
  misc_RNA (1)...(19): siRNA sense strand
ggaaccaguggaugcuaug

SEQ ID NO: 857534 - RNA, 19 nt, Homo sapiens
  misc_RNA (1)...(19): siRNA sense strand
uggagaacaccaucaagga

SEQ ID NO: 857535 - RNA, 19 nt, Homo sapiens
  misc_RNA (1)...(19): siRNA sense strand
cugcacagcgcacagaaga

SEQ ID NO: 857536 - RNA, 19 nt, Homo sapiens
  misc_RNA (1)...(19): siRNA sense strand
caucaaggagcgagagaag

SEQ ID NO: 857537 - RNA, 19 nt, Homo sapiens
  misc_RNA (1)...(19): siRNA sense strand
ugaucacagugcuggagaa

SEQ ID NO: 857538 - RNA, 19 nt, Homo sapiens
  misc_RNA (1)...(19): siRNA sense strand
gcacucagggacggacaga

SEQ ID NO: 857539 - RNA, 19 nt, Homo sapiens
  misc_RNA (1)...(19): siRNA sense strand
gggcagagagcaggaaacu

SEQ ID NO: 857540 - RNA, 19 nt, Homo sapiens
  misc_RNA (1)...(19): siRNA sense strand
gaagagacuuuacaucaug

SEQ ID NO: 857541 - RNA, 19 nt, Homo sapiens
  misc_RNA (1)...(19): siRNA sense strand
gaacuacuauaagaggaua

SEQ ID NO: 857542 - RNA, 19 nt, Homo sapiens
  misc_RNA (1)...(19): siRNA sense strand
uaggaugucuggcaccuua

SEQ ID NO: 857543 - RNA, 19 nt, Homo sapiens
  misc_RNA (1)...(19): siRNA sense strand
aaacuugccuauuucaaug

SEQ ID NO: 857544 - RNA, 19 nt, Homo sapiens
  misc_RNA (1)...(19): siRNA sense strand
agacaaagaagaacuacua

SEQ ID NO: 857545 - RNA, 19 nt, Homo sapiens
  misc_RNA (1)...(19): siRNA sense strand
gaaguuuggcuuugagauu

SEQ ID NO: 857546 - RNA, 19 nt, Homo sapiens
  misc_RNA (1)...(19): siRNA sense strand
cagaagagacuuuacauca

SEQ ID NO: 857547 - RNA, 19 nt, Homo sapiens
  misc_RNA (1)...(19): siRNA sense strand
caauugacuucuacaggaa

SEQ ID NO: 857548 - RNA, 19 nt, Homo sapiens
  misc_RNA (1)...(19): siRNA sense strand
aaguuuggcuuugagauua

SEQ ID NO: 857549 - RNA, 19 nt, Homo sapiens
  misc_RNA (1)...(19): siRNA sense strand
ugacaccacacaauauuaa

SEQ ID NO: 857550 - RNA, 19 nt, Homo sapiens
  misc_RNA (1)...(19): siRNA sense strand
gcuguaggguggaucauuc

SEQ ID NO: 857551 - RNA, 19 nt, Homo sapiens
  misc_RNA (1)...(19): siRNA sense strand
ggaucgagcugggagaugu

SEQ ID NO: 857552 - RNA, 19 nt, Homo sapiens
  misc_RNA (1)...(19): siRNA sense strand
cagcuacaaugacaaguuc

SEQ ID NO: 857553 - RNA, 19 nt, Homo sapiens
  misc_RNA (1)...(19): siRNA sense strand
caggucaucuuuccaguca

SEQ ID NO: 857554 - RNA, 19 nt, Homo sapiens
  misc_RNA (1)...(19): siRNA sense strand
agaagagacuuuacaucau

SEQ ID NO: 857555 - RNA, 19 nt, Homo sapiens
  misc_RNA (1)...(19): siRNA sense strand
gcaaaagacagacaacuga

SEQ ID NO: 857556 - RNA, 19 nt, Homo sapiens
  misc_RNA (1)...(19): siRNA sense strand
acaggaaguuuggcuuuga

SEQ ID NO: 857557 - RNA, 19 nt, Homo sapiens
  misc_RNA (1)...(19): siRNA sense strand
gagauuauugagacaaaga

SEQ ID NO: 857558 - RNA, 19 nt, Homo sapiens
  misc_RNA (1)...(19): siRNA sense strand
gcuggagguuggcgagcua

SEQ ID NO: 857559 - RNA, 19 nt, Homo sapiens
  misc_RNA (1)...(19): siRNA sense strand
ugacaacauuuaucugcau

SEQ ID NO: 857560 - RNA, 19 nt, Homo sapiens
  misc_RNA (1)...(19): siRNA sense strand
gugacaccacacaauauua

SEQ ID NO: 857561 - RNA, 19 nt, Homo sapiens
  misc_RNA (1)...(19): siRNA sense strand
gaggauagagcccgcagau

SEQ ID NO: 857562 - RNA, 19 nt, Homo sapiens
  misc_RNA (1)...(19): siRNA sense strand
agaaucagaagagacuuua

SEQ ID NO: 857563 - RNA, 19 nt, Homo sapiens
  misc_RNA (1)...(19): siRNA sense strand
gcccgcagaugcucaugug

SEQ ID NO: 857564 - RNA, 19 nt, Homo sapiens
  misc_RNA (1)...(19): siRNA sense strand
cuacaggaaguuuggcuuu

SEQ ID NO: 857565 - RNA, 19 nt, Homo sapiens
  misc_RNA (1)...(19): siRNA sense strand
cagaaucagaagagacuuu

SEQ ID NO: 857566 - RNA, 19 nt, Homo sapiens
  misc_RNA (1)...(19): siRNA sense strand
ugaaucaggucaucuuucc

SEQ ID NO: 857567 - RNA, 19 nt, Homo sapiens
  misc_RNA (1)...(19): siRNA sense strand
acaaugacaaguucuacaa

SEQ ID NO: 857568 - RNA, 19 nt, Homo sapiens
  misc_RNA (1)...(19): siRNA sense strand
gacaaagaagaacuacuau

SEQ ID NO: 857569 - RNA, 19 nt, Homo sapiens
  misc_RNA (1)...(19): siRNA sense strand
gcuacaaugacaaguucua

SEQ ID NO: 857570 - RNA, 19 nt, Homo sapiens
  misc_RNA (1)...(19): siRNA sense strand
ggaauaggaacuaaaaugu

SEQ ID NO: 857571 - RNA, 19 nt, Homo sapiens
  misc_RNA (1)...(19): siRNA sense strand
gcuaggaauaggaacuaaa

SEQ ID NO: 857572 - RNA, 19 nt, Homo sapiens
  misc_RNA (1)...(19): siRNA sense strand
aagagacuuuacaucauga

SEQ ID NO: 857573 - RNA, 19 nt, Homo sapiens
  misc_RNA (1)...(19): siRNA sense strand
uuaccgaaggcuaggaaua

SEQ ID NO: 857574 - RNA, 19 nt, Homo sapiens
  misc_RNA (1)...(19): siRNA sense strand
gacuuuacaucaugacacu

SEQ ID NO: 857575 - RNA, 19 nt, Homo sapiens
  misc_RNA (1)...(19): siRNA sense strand
cgaaggcuaggaauaggaa

SEQ ID NO: 857576 - RNA, 19 nt, Homo sapiens
  misc_RNA (1)...(19): siRNA sense strand
guaggugcaguaugcugua

SEQ ID NO: 857577 - RNA, 19 nt, Homo sapiens
  misc_RNA (1)...(19): siRNA sense strand
ggguggaucauucacagaa

SEQ ID NO: 857578 - RNA, 19 nt, Homo sapiens
  misc_RNA (1)...(19): siRNA sense strand
uacaggaaguuuggcuuug

SEQ ID NO: 857579 - RNA, 19 nt, Homo sapiens
  misc_RNA (1)...(19): siRNA sense strand
gacaccacacaauauuaaa

SEQ ID NO: 857580 - RNA, 19 nt, Homo sapiens
  misc_RNA (1)...(19): siRNA sense strand
ggcuaggaauaggaacuaa

SEQ ID NO: 857581 - RNA, 19 nt, Homo sapiens
  misc_RNA (1)...(19): siRNA sense strand
ccacacaauauuaaacagu

SEQ ID NO: 857582 - RNA, 19 nt, Homo sapiens
  misc_RNA (1)...(19): siRNA sense strand
ucagcuacaaugacaaguu

SEQ ID NO: 857583 - RNA, 19 nt, Homo sapiens
  misc_RNA (1)...(19): siRNA sense strand
ggaaguuuggcuuugagau

SEQ ID NO: 857584 - RNA, 19 nt, Homo sapiens
  misc_RNA (1)...(19): siRNA sense strand
ugacaaguucuacaaggau

SEQ ID NO: 857585 - RNA, 19 nt, Homo sapiens
  misc_RNA (1)...(19): siRNA sense strand
gagguuggcgagcuagcaa

SEQ ID NO: 857586 - RNA, 19 nt, Homo sapiens
  misc_RNA (1)...(19): siRNA sense strand
caccacacaauauuaaaca

SEQ ID NO: 857587 - RNA, 19 nt, Homo sapiens
  misc_RNA (1)...(19): siRNA sense strand
guccagaucagcaaugagu

SEQ ID NO: 857588 - RNA, 19 nt, Homo sapiens
  misc_RNA (1)...(19): siRNA sense strand
gucuuaaacaucugugaaa

SEQ ID NO: 857589 - RNA, 19 nt, Homo sapiens
  misc_RNA (1)...(19): siRNA sense strand
aaucagaagagacuuuaca

SEQ ID NO: 857590 - RNA, 19 nt, Homo sapiens
  misc_RNA (1)...(19): siRNA sense strand
augacaaguucuacaagga

SEQ ID NO: 857591 - RNA, 19 nt, Homo sapiens
  misc_RNA (1)...(19): siRNA sense strand
gauagagcccgcagaugcu

SEQ ID NO: 857592 - RNA, 19 nt, Homo sapiens
  misc_RNA (1)...(19): siRNA sense strand
ucagaagagacuuuacauc

SEQ ID NO: 857593 - RNA, 19 nt, Homo sapiens
  misc_RNA (1)...(19): siRNA sense strand
caggaaguuuggcuuugag

SEQ ID NO: 857594 - RNA, 19 nt, Homo sapiens
  misc_RNA (1)...(19): siRNA sense strand
gcaaugaccuugaccugua

SEQ ID NO: 857595 - RNA, 19 nt, Homo sapiens
  misc_RNA (1)...(19): siRNA sense strand
gaucagggcuguuccaauu

SEQ ID NO: 857596 - RNA, 19 nt, Homo sapiens
  misc_RNA (1)...(19): siRNA sense strand
gaaauacccugcucuccua

SEQ ID NO: 857597 - RNA, 19 nt, Homo sapiens
  misc_RNA (1)...(19): siRNA sense strand
gcauugcgguucugaauuu

SEQ ID NO: 857598 - RNA, 19 nt, Homo sapiens
  misc_RNA (1)...(19): siRNA sense strand
caaaugaaaugcaaugaga

SEQ ID NO: 857599 - RNA, 19 nt, Homo sapiens
  misc_RNA (1)...(19): siRNA sense strand
cggauaaagucaucaauaa

SEQ ID NO: 857600 - RNA, 19 nt, Homo sapiens
  misc_RNA (1)...(19): siRNA sense strand
gcaaagacgugucgugaag

SEQ ID NO: 857601 - RNA, 19 nt, Homo sapiens
  misc_RNA (1)...(19): siRNA sense strand
gaauauagacaucuucuuc

SEQ ID NO: 857602 - RNA, 19 nt, Homo sapiens
  misc_RNA (1)...(19): siRNA sense strand
gaaaagagcagaccuaugu

SEQ ID NO: 857603 - RNA, 19 nt, Homo sapiens
  misc_RNA (1)...(19): siRNA sense strand
agacaaaccucaagcaaag

SEQ ID NO: 857604 - RNA, 19 nt, Homo sapiens
  misc_RNA (1)...(19): siRNA sense strand
cgaaagccaugcugaacaa

SEQ ID NO: 857605 - RNA, 19 nt, Homo sapiens
  misc_RNA (1)...(19): siRNA sense strand
caacaaccaccucaacaaa

SEQ ID NO: 857606 - RNA, 19 nt, Homo sapiens
  misc_RNA (1)...(19): siRNA sense strand
gaaugggaccuuugaagaa

SEQ ID NO: 857607 - RNA, 19 nt, Homo sapiens
  misc_RNA (1)...(19): siRNA sense strand
acaaccaccucaacaaauu

SEQ ID NO: 857608 - RNA, 19 nt, Homo sapiens
  misc_RNA (1)...(19): siRNA sense strand
ggaaugggaccuuugaaga

SEQ ID NO: 857609 - RNA, 19 nt, Homo sapiens
  misc_RNA (1)...(19): siRNA sense strand
guacaaaucggauaaaguc

SEQ ID NO: 857610 - RNA, 19 nt, Homo sapiens
  misc_RNA (1)...(19): siRNA sense strand
caguacaucuucuccgaua

SEQ ID NO: 857611 - RNA, 19 nt, Homo sapiens
  misc_RNA (1)...(19): siRNA sense strand
gcagacauacuccuccuuu

SEQ ID NO: 857612 - RNA, 19 nt, Homo sapiens
  misc_RNA (1)...(19): siRNA sense strand
gaaggauggucucacaaag

SEQ ID NO: 857613 - RNA, 19 nt, Homo sapiens
  misc_RNA (1)...(19): siRNA sense strand
guacaaacgcagcaagauu

SEQ ID NO: 857614 - RNA, 19 nt, Homo sapiens
  misc_RNA (1)...(19): siRNA sense strand
gagacaaaccucaagcaaa

SEQ ID NO: 857615 - RNA, 19 nt, Homo sapiens
  misc_RNA (1)...(19): siRNA sense strand
acaauaccaucguguguga

SEQ ID NO: 857616 - RNA, 19 nt, Homo sapiens
  misc_RNA (1)...(19): siRNA sense strand
uaagaaacgaggagauaaa

SEQ ID NO: 857617 - RNA, 19 nt, Homo sapiens
  misc_RNA (1)...(19): siRNA sense strand
caacaucgcagaggacuug

SEQ ID NO: 857618 - RNA, 19 nt, Homo sapiens
  misc_RNA (1)...(19): siRNA sense strand
gcaugaauauagacaucuu

SEQ ID NO: 857619 - RNA, 19 nt, Homo sapiens
  misc_RNA (1)...(19): siRNA sense strand
ggagguacaaaucggauaa

SEQ ID NO: 857620 - RNA, 19 nt, Homo sapiens
  misc_RNA (1)...(19): siRNA sense strand
ccaagaaaaugguauagaa

SEQ ID NO: 857621 - RNA, 19 nt, Homo sapiens
  misc_RNA (1)...(19): siRNA sense strand
gagagugccucaucuacag

SEQ ID NO: 857622 - RNA, 19 nt, Homo sapiens
  misc_RNA (1)...(19): siRNA sense strand
caaaucggauaaagucauc

SEQ ID NO: 857623 - RNA, 19 nt, Homo sapiens
  misc_RNA (1)...(19): siRNA sense strand
ggacuggcuuuggcuguga

SEQ ID NO: 857624 - RNA, 19 nt, Homo sapiens
  misc_RNA (1)...(19): siRNA sense strand
ggucacagcaucuggaaug

SEQ ID NO: 857625 - RNA, 19 nt, Homo sapiens
  misc_RNA (1)...(19): siRNA sense strand
gacaucuucuucugcauug

SEQ ID NO: 857626 - RNA, 19 nt, Homo sapiens
  misc_RNA (1)...(19): siRNA sense strand
gaguaguggucucuaacuu

SEQ ID NO: 857627 - RNA, 19 nt, Homo sapiens
  misc_RNA (1)...(19): siRNA sense strand
gaggugagcaugauaccaa

SEQ ID NO: 857628 - RNA, 19 nt, Homo sapiens
  misc_RNA (1)...(19): siRNA sense strand
agagaccgauuuauccauu

SEQ ID NO: 857629 - RNA, 19 nt, Homo sapiens
  misc_RNA (1)...(19): siRNA sense strand
gcgcaugaauauagacauc

SEQ ID NO: 857630 - RNA, 19 nt, Homo sapiens
  misc_RNA (1)...(19): siRNA sense strand
gugggagacuucauccaaa

SEQ ID NO: 857631 - RNA, 19 nt, Homo sapiens
  misc_RNA (1)...(19): siRNA sense strand
ucucuaacuugcucuuuga

SEQ ID NO: 857632 - RNA, 19 nt, Homo sapiens
  misc_RNA (1)...(19): siRNA sense strand
cagcuuggauggagagaca

SEQ ID NO: 857633 - RNA, 19 nt, Homo sapiens
  misc_RNA (1)...(19): siRNA sense strand
gaagagaccgauuuaucca

SEQ ID NO: 857634 - RNA, 19 nt, Homo sapiens
  misc_RNA (1)...(19): siRNA sense strand
agaccuaugugcagaagug

SEQ ID NO: 857635 - RNA, 19 nt, Homo sapiens
  misc_RNA (1)...(19): siRNA sense strand
gaaacgaggagauaaaaga

SEQ ID NO: 857636 - RNA, 19 nt, Homo sapiens
  misc_RNA (1)...(19): siRNA sense strand
ccuaagaaacgaggagaua

SEQ ID NO: 857637 - RNA, 19 nt, Homo sapiens
  misc_RNA (1)...(19): siRNA sense strand
gaccuugaccuguaugaug

SEQ ID NO: 857638 - RNA, 19 nt, Homo sapiens
  misc_RNA (1)...(19): siRNA sense strand
caaugaccuugaccuguau

SEQ ID NO: 857639 - RNA, 19 nt, Homo sapiens
  misc_RNA (1)...(19): siRNA sense strand
ugaaggauggucucacaaa

SEQ ID NO: 857640 - RNA, 19 nt, Homo sapiens
  misc_RNA (1)...(19): siRNA sense strand
ugaugaagagaccgauuua

SEQ ID NO: 857641 - RNA, 19 nt, Homo sapiens
  misc_RNA (1)...(19): siRNA sense strand
caaccaccucaacaaauuu

SEQ ID NO: 857642 - RNA, 19 nt, Homo sapiens
  misc_RNA (1)...(19): siRNA sense strand
ucggauaaagucaucaaua

SEQ ID NO: 857643 - RNA, 19 nt, Homo sapiens
  misc_RNA (1)...(19): siRNA sense strand
acaaguugcuuccuguauc

SEQ ID NO: 857644 - RNA, 19 nt, Homo sapiens
  misc_RNA (1)...(19): siRNA sense strand
cagcgaguauucucaccaa

SEQ ID NO: 857645 - RNA, 19 nt, Homo sapiens
  misc_RNA (1)...(19): siRNA sense strand
cuucgaggcugcaccauca

SEQ ID NO: 857646 - RNA, 19 nt, Homo sapiens
  misc_RNA (1)...(19): siRNA sense strand
ccaacaaccaccucaacaa

SEQ ID NO: 857647 - RNA, 19 nt, Homo sapiens
  misc_RNA (1)...(19): siRNA sense strand
cuccaucccucuuucuaaa

SEQ ID NO: 857648 - RNA, 19 nt, Homo sapiens
  misc_RNA (1)...(19): siRNA sense strand
caucuggaaugggaccuuu

SEQ ID NO: 857649 - RNA, 19 nt, Homo sapiens
  misc_RNA (1)...(19): siRNA sense strand
uacaaacgcagcaagauug

SEQ ID NO: 857650 - RNA, 19 nt, Homo sapiens
  misc_RNA (1)...(19): siRNA sense strand
gaaaagaaaagaagacaag

SEQ ID NO: 857651 - RNA, 19 nt, Homo sapiens
  misc_RNA (1)...(19): siRNA sense strand
uagaggcuguguggcauuu

SEQ ID NO: 857652 - RNA, 19 nt, Homo sapiens
  misc_RNA (1)...(19): siRNA sense strand
gaagacaagaagcgaguag

SEQ ID NO: 857653 - RNA, 19 nt, Homo sapiens
  misc_RNA (1)...(19): siRNA sense strand
caucaucgugggaaucaaa

SEQ ID NO: 857654 - RNA, 19 nt, Homo sapiens
  misc_RNA (1)...(19): siRNA sense strand
ccuguggucuuccuuguca

SEQ ID NO: 857655 - RNA, 19 nt, Homo sapiens
  misc_RNA (1)...(19): siRNA sense strand
gcuccaucccucuuucuaa

SEQ ID NO: 857656 - RNA, 19 nt, Homo sapiens
  misc_RNA (1)...(19): siRNA sense strand
gaagcucgggcaaguguuc

SEQ ID NO: 857657 - RNA, 19 nt, Homo sapiens
  misc_RNA (1)...(19): siRNA sense strand
ccagagcuuuuccacaaua

SEQ ID NO: 857658 - RNA, 19 nt, Homo sapiens
  misc_RNA (1)...(19): siRNA sense strand
gauaugccaucuggaaacu

SEQ ID NO: 857659 - RNA, 19 nt, Homo sapiens
  misc_RNA (1)...(19): siRNA sense strand
uaacuugcucuuugaagga

SEQ ID NO: 857660 - RNA, 19 nt, Homo sapiens
  misc_RNA (1)...(19): siRNA sense strand
gcgaguauucucaccaaga

SEQ ID NO: 857661 - RNA, 19 nt, Homo sapiens
  misc_RNA (1)...(19): siRNA sense strand
gaaaagguggaaaagaaaa

SEQ ID NO: 857662 - RNA, 19 nt, Homo sapiens
  misc_RNA (1)...(19): siRNA sense strand
gggcauugcgguucugaau

SEQ ID NO: 857663 - RNA, 19 nt, Homo sapiens
  misc_RNA (1)...(19): siRNA sense strand
cuaagaaacgaggagauaa

SEQ ID NO: 857664 - RNA, 19 nt, Homo sapiens
  misc_RNA (1)...(19): siRNA sense strand
gagaccgauuuauccauuc

SEQ ID NO: 857665 - RNA, 19 nt, Homo sapiens
  misc_RNA (1)...(19): siRNA sense strand
aggaaaagguggaaaagaa

SEQ ID NO: 857666 - RNA, 19 nt, Homo sapiens
  misc_RNA (1)...(19): siRNA sense strand
ggaaacugccagcuuggau

SEQ ID NO: 857667 - RNA, 19 nt, Homo sapiens
  misc_RNA (1)...(19): siRNA sense strand
ggaaaagguggaaaagaaa

SEQ ID NO: 857668 - RNA, 19 nt, Homo sapiens
  misc_RNA (1)...(19): siRNA sense strand
gauaaagucaucaauaacc

SEQ ID NO: 857669 - RNA, 19 nt, Homo sapiens
  misc_RNA (1)...(19): siRNA sense strand
gagcagcuacaccgguuug

SEQ ID NO: 857670 - RNA, 19 nt, Homo sapiens
  misc_RNA (1)...(19): siRNA sense strand
ggucuuccuugucacagau

SEQ ID NO: 857671 - RNA, 19 nt, Homo sapiens
  misc_RNA (1)...(19): siRNA sense strand
caucaugggcagcgaguau

SEQ ID NO: 857672 - RNA, 19 nt, Homo sapiens
  misc_RNA (1)...(19): siRNA sense strand
ugacagagaacaagauggu

SEQ ID NO: 857673 - RNA, 19 nt, Homo sapiens
  misc_RNA (1)...(19): siRNA sense strand
gcagaccuaugugcagaag

SEQ ID NO: 857674 - RNA, 19 nt, Homo sapiens
  misc_RNA (1)...(19): siRNA sense strand
ggauaaagucaucaauaac

SEQ ID NO: 857675 - RNA, 19 nt, Homo sapiens
  misc_RNA (1)...(19): siRNA sense strand
gcuguuccaauuacuugua

SEQ ID NO: 857676 - RNA, 19 nt, Homo sapiens
  misc_RNA (1)...(19): siRNA sense strand
acccugcucuccuaagaaa

SEQ ID NO: 857677 - RNA, 19 nt, Homo sapiens
  misc_RNA (1)...(19): siRNA sense strand
aagaugguguuccgacguu

SEQ ID NO: 857678 - RNA, 19 nt, Homo sapiens
  misc_RNA (1)...(19): siRNA sense strand
gggauaugccaucuggaaa

SEQ ID NO: 857679 - RNA, 19 nt, Homo sapiens
  misc_RNA (1)...(19): siRNA sense strand
gguuugccaaucucuauuu

SEQ ID NO: 857680 - RNA, 19 nt, Homo sapiens
  misc_RNA (1)...(19): siRNA sense strand
ccacaaguugcuuccugua

SEQ ID NO: 857681 - RNA, 19 nt, Homo sapiens
  misc_RNA (1)...(19): siRNA sense strand
guacaucuucuccgauaag

SEQ ID NO: 857682 - RNA, 19 nt, Homo sapiens
  misc_RNA (1)...(19): siRNA sense strand
ugaccuguaugaugaagag

SEQ ID NO: 857683 - RNA, 19 nt, Homo sapiens
  misc_RNA (1)...(19): siRNA sense strand
cuuuguaugucuccauuga

SEQ ID NO: 857684 - RNA, 19 nt, Homo sapiens
  misc_RNA (1)...(19): siRNA sense strand
aaaucaagaccagcaagua

SEQ ID NO: 857685 - RNA, 19 nt, Homo sapiens
  misc_RNA (1)...(19): siRNA sense strand
gagcaugauaccaaucugu

SEQ ID NO: 857686 - RNA, 19 nt, Homo sapiens
  misc_RNA (1)...(19): siRNA sense strand
ugggagacuucauccaaau

SEQ ID NO: 857687 - RNA, 19 nt, Homo sapiens
  misc_RNA (1)...(19): siRNA sense strand
agaacacccucccuucgau

SEQ ID NO: 857688 - RNA, 19 nt, Homo sapiens
  misc_RNA (1)...(19): siRNA sense strand
ucagggcuguuccaauuac

SEQ ID NO: 857689 - RNA, 19 nt, Homo sapiens
  misc_RNA (1)...(19): siRNA sense strand
gggcuguuccaauuacuug

SEQ ID NO: 857690 - RNA, 19 nt, Homo sapiens
  misc_RNA (1)...(19): siRNA sense strand
gugagaaacccaacaacca

SEQ ID NO: 857691 - RNA, 19 nt, Homo sapiens
  misc_RNA (1)...(19): siRNA sense strand
accuugaccuguaugauga

SEQ ID NO: 857692 - RNA, 19 nt, Homo sapiens
  misc_RNA (1)...(19): siRNA sense strand
uacauguuccucacaauga

SEQ ID NO: 857693 - RNA, 19 nt, Homo sapiens
  misc_RNA (1)...(19): siRNA sense strand
agacaucuucuucugcauu

SEQ ID NO: 857694 - RNA, 19 nt, Homo sapiens
  misc_RNA (1)...(19): siRNA sense strand
uaacaugccuggacauuuc

SEQ ID NO: 857695 - RNA, 19 nt, Homo sapiens
  misc_RNA (1)...(19): siRNA sense strand
guacgacgcuaccagcuuu

SEQ ID NO: 857696 - RNA, 19 nt, Homo sapiens
  misc_RNA (1)...(19): siRNA sense strand
ucagaaggauuuacuguga

SEQ ID NO: 857697 - RNA, 19 nt, Homo sapiens
  misc_RNA (1)...(19): siRNA sense strand
gauggaagcuguuuuauug

SEQ ID NO: 857698 - RNA, 19 nt, Homo sapiens
  misc_RNA (1)...(19): siRNA sense strand
ugucagagauggauucauu

SEQ ID NO: 857699 - RNA, 19 nt, Homo sapiens
  misc_RNA (1)...(19): siRNA sense strand
cagcugguguuccucuuua

SEQ ID NO: 857700 - RNA, 19 nt, Homo sapiens
  misc_RNA (1)...(19): siRNA sense strand
gaaaaugcaucuucuaagu

SEQ ID NO: 857701 - RNA, 19 nt, Homo sapiens
  misc_RNA (1)...(19): siRNA sense strand
agagauggauucauugcua

SEQ ID NO: 857702 - RNA, 19 nt, Homo sapiens
  misc_RNA (1)...(19): siRNA sense strand
ggaaggacauguguuugau

SEQ ID NO: 857703 - RNA, 19 nt, Homo sapiens
  misc_RNA (1)...(19): siRNA sense strand
gaagauauggucagcugaa

SEQ ID NO: 857704 - RNA, 19 nt, Homo sapiens
  misc_RNA (1)...(19): siRNA sense strand
cuucaaaggucacaaagga

SEQ ID NO: 857705 - RNA, 19 nt, Homo sapiens
  misc_RNA (1)...(19): siRNA sense strand
gggaaaccaucuuuguaug

SEQ ID NO: 857706 - RNA, 19 nt, Homo sapiens
  misc_RNA (1)...(19): siRNA sense strand
ccaguucuaucccugcuaa

SEQ ID NO: 857707 - RNA, 19 nt, Homo sapiens
  misc_RNA (1)...(19): siRNA sense strand
auaagaaacuucagugcuu

SEQ ID NO: 857708 - RNA, 19 nt, Homo sapiens
  misc_RNA (1)...(19): siRNA sense strand
agaagcagaucuacacaug

SEQ ID NO: 857709 - RNA, 19 nt, Homo sapiens
  misc_RNA (1)...(19): siRNA sense strand
gauugugguucuucuauca

SEQ ID NO: 857710 - RNA, 19 nt, Homo sapiens
  misc_RNA (1)...(19): siRNA sense strand
gacucaagauggaaacauu

SEQ ID NO: 857711 - RNA, 19 nt, Homo sapiens
  misc_RNA (1)...(19): siRNA sense strand
ucaaggaauuggccuagau

SEQ ID NO: 857712 - RNA, 19 nt, Homo sapiens
  misc_RNA (1)...(19): siRNA sense strand
gcuuucaacugcuguacuu

SEQ ID NO: 857713 - RNA, 19 nt, Homo sapiens
  misc_RNA (1)...(19): siRNA sense strand
cagcaagacuuagacuaug

SEQ ID NO: 857714 - RNA, 19 nt, Homo sapiens
  misc_RNA (1)...(19): siRNA sense strand
gaugggacagcacgacuuu

SEQ ID NO: 857715 - RNA, 19 nt, Homo sapiens
  misc_RNA (1)...(19): siRNA sense strand
cagaaggauuuacugugaa

SEQ ID NO: 857716 - RNA, 19 nt, Homo sapiens
  misc_RNA (1)...(19): siRNA sense strand
cagcacgacuuugggauug

SEQ ID NO: 857717 - RNA, 19 nt, Homo sapiens
  misc_RNA (1)...(19): siRNA sense strand
guacaagucauccacagau

SEQ ID NO: 857718 - RNA, 19 nt, Homo sapiens
  misc_RNA (1)...(19): siRNA sense strand
ccagcaagacuuagacuau

SEQ ID NO: 857719 - RNA, 19 nt, Homo sapiens
  misc_RNA (1)...(19): siRNA sense strand
ggauuuacugugaaugaaa

SEQ ID NO: 857720 - RNA, 19 nt, Homo sapiens
  misc_RNA (1)...(19): siRNA sense strand
cagggaaaccaucuuugua

SEQ ID NO: 857721 - RNA, 19 nt, Homo sapiens
  misc_RNA (1)...(19): siRNA sense strand
gcuauuggcugggacucaa

SEQ ID NO: 857722 - RNA, 19 nt, Homo sapiens
  misc_RNA (1)...(19): siRNA sense strand
gauauggucagcugaagau

SEQ ID NO: 857723 - RNA, 19 nt, Homo sapiens
  misc_RNA (1)...(19): siRNA sense strand
gaauggaugcccagcugaa

SEQ ID NO: 857724 - RNA, 19 nt, Homo sapiens
  misc_RNA (1)...(19): siRNA sense strand
gcucagacgcuuucaacug

SEQ ID NO: 857725 - RNA, 19 nt, Homo sapiens
  misc_RNA (1)...(19): siRNA sense strand
ccagcuuucugaccucuga

SEQ ID NO: 857726 - RNA, 19 nt, Homo sapiens
  misc_RNA (1)...(19): siRNA sense strand
ggauacagccaucguugau

SEQ ID NO: 857727 - RNA, 19 nt, Homo sapiens
  misc_RNA (1)...(19): siRNA sense strand
gcaggcagcugguguuccu

SEQ ID NO: 857728 - RNA, 19 nt, Homo sapiens
  misc_RNA (1)...(19): siRNA sense strand
guacugacgggaccaugaa

SEQ ID NO: 857729 - RNA, 19 nt, Homo sapiens
  misc_RNA (1)...(19): siRNA sense strand
cuuggugugucuucuagua

SEQ ID NO: 857730 - RNA, 19 nt, Homo sapiens
  misc_RNA (1)...(19): siRNA sense strand
uguuugaugugaauuguug

SEQ ID NO: 857731 - RNA, 19 nt, Homo sapiens
  misc_RNA (1)...(19): siRNA sense strand
agaaggauuuacugugaau

SEQ ID NO: 857732 - RNA, 19 nt, Homo sapiens
  misc_RNA (1)...(19): siRNA sense strand
gaaggacauguguuugaug

SEQ ID NO: 857733 - RNA, 19 nt, Homo sapiens
  misc_RNA (1)...(19): siRNA sense strand
cugagcagaugcccaguga

SEQ ID NO: 857734 - RNA, 19 nt, Homo sapiens
  misc_RNA (1)...(19): siRNA sense strand
ugacaacuccauaaaccuu

SEQ ID NO: 857735 - RNA, 19 nt, Homo sapiens
  misc_RNA (1)...(19): siRNA sense strand
gcugacaacuccauaaacc

SEQ ID NO: 857736 - RNA, 19 nt, Homo sapiens
  misc_RNA (1)...(19): siRNA sense strand
gcagauugugguucuucua

SEQ ID NO: 857737 - RNA, 19 nt, Homo sapiens
  misc_RNA (1)...(19): siRNA sense strand
gcacgacuuugggauugug

SEQ ID NO: 857738 - RNA, 19 nt, Homo sapiens
  misc_RNA (1)...(19): siRNA sense strand
gggaguccuugcagauugu

SEQ ID NO: 857739 - RNA, 19 nt, Homo sapiens
  misc_RNA (1)...(19): siRNA sense strand
gagcagaugcccagugaac

SEQ ID NO: 857740 - RNA, 19 nt, Homo sapiens
  misc_RNA (1)...(19): siRNA sense strand
gcagcugguguuccucuuu

SEQ ID NO: 857741 - RNA, 19 nt, Homo sapiens
  misc_RNA (1)...(19): siRNA sense strand
caagauggaaacauuuauc

SEQ ID NO: 857742 - RNA, 19 nt, Homo sapiens
  misc_RNA (1)...(19): siRNA sense strand
ccagggaaaccaucuuugu

SEQ ID NO: 857743 - RNA, 19 nt, Homo sapiens
  misc_RNA (1)...(19): siRNA sense strand
ugggaguccuugcagauug

SEQ ID NO: 857744 - RNA, 19 nt, Homo sapiens
  misc_RNA (1)...(19): siRNA sense strand
uggaaggacauguguuuga

SEQ ID NO: 857745 - RNA, 19 nt, Homo sapiens
  misc_RNA (1)...(19): siRNA sense strand
caugggagaagcagaucua

SEQ ID NO: 857746 - RNA, 19 nt, Homo sapiens
  misc_RNA (1)...(19): siRNA sense strand
ccacaugggagaagcagau

SEQ ID NO: 857747 - RNA, 19 nt, Homo sapiens
  misc_RNA (1)...(19): siRNA sense strand
caagggcuccgguacaagu

SEQ ID NO: 857748 - RNA, 19 nt, Homo sapiens
  misc_RNA (1)...(19): siRNA sense strand
aaacauuuaucagcuggau

SEQ ID NO: 857749 - RNA, 19 nt, Homo sapiens
  misc_RNA (1)...(19): siRNA sense strand
ugugaauuguugcagguuu

SEQ ID NO: 857750 - RNA, 19 nt, Homo sapiens
  misc_RNA (1)...(19): siRNA sense strand
cagaauucauacaaagagu

SEQ ID NO: 857751 - RNA, 19 nt, Homo sapiens
  misc_RNA (1)...(19): siRNA sense strand
gacgcuaccagcuuucuga

SEQ ID NO: 857752 - RNA, 19 nt, Homo sapiens
  misc_RNA (1)...(19): siRNA sense strand
gaacagaggccaaaaugcu

SEQ ID NO: 857753 - RNA, 19 nt, Homo sapiens
  misc_RNA (1)...(19): siRNA sense strand
uauuucauguccaaaggaa

SEQ ID NO: 857754 - RNA, 19 nt, Homo sapiens
  misc_RNA (1)...(19): siRNA sense strand
ggugucugcuucucgagau

SEQ ID NO: 857755 - RNA, 19 nt, Homo sapiens
  misc_RNA (1)...(19): siRNA sense strand
uguacaagguagccacaug

SEQ ID NO: 857756 - RNA, 19 nt, Homo sapiens
  misc_RNA (1)...(19): siRNA sense strand
agacuuagacuaugucacu

SEQ ID NO: 857757 - RNA, 19 nt, Homo sapiens
  misc_RNA (1)...(19): siRNA sense strand
caaggaauuggccuagaug

SEQ ID NO: 857758 - RNA, 19 nt, Homo sapiens
  misc_RNA (1)...(19): siRNA sense strand
ggugauggaagcuguuuua

SEQ ID NO: 857759 - RNA, 19 nt, Homo sapiens
  misc_RNA (1)...(19): siRNA sense strand
cucaagauggaaacauuua

SEQ ID NO: 857760 - RNA, 19 nt, Homo sapiens
  misc_RNA (1)...(19): siRNA sense strand
cauauuucauguccaaagg

SEQ ID NO: 857761 - RNA, 19 nt, Homo sapiens
  misc_RNA (1)...(19): siRNA sense strand
ggucuuggugugucuucua

SEQ ID NO: 857762 - RNA, 19 nt, Homo sapiens
  misc_RNA (1)...(19): siRNA sense strand
uccaagggcuccgguacaa

SEQ ID NO: 857763 - RNA, 19 nt, Homo sapiens
  misc_RNA (1)...(19): siRNA sense strand
cagauugugguucuucuau

SEQ ID NO: 857764 - RNA, 19 nt, Homo sapiens
  misc_RNA (1)...(19): siRNA sense strand
gggagaagcagaucuacac

SEQ ID NO: 857765 - RNA, 19 nt, Homo sapiens
  misc_RNA (1)...(19): siRNA sense strand
ggugggugcugcugacaac

SEQ ID NO: 857766 - RNA, 19 nt, Homo sapiens
  misc_RNA (1)...(19): siRNA sense strand
gagaagcagaucuacacau

SEQ ID NO: 857767 - RNA, 19 nt, Homo sapiens
  misc_RNA (1)...(19): siRNA sense strand
agggaaaccaucuuuguau

SEQ ID NO: 857768 - RNA, 19 nt, Homo sapiens
  misc_RNA (1)...(19): siRNA sense strand
ccgggaagauaagaaacuu

SEQ ID NO: 857769 - RNA, 19 nt, Homo sapiens
  misc_RNA (1)...(19): siRNA sense strand
uauaacaugccuggacauu

SEQ ID NO: 857770 - RNA, 19 nt, Homo sapiens
  misc_RNA (1)...(19): siRNA sense strand
ggagaagcagaucuacaca

SEQ ID NO: 857771 - RNA, 19 nt, Homo sapiens
  misc_RNA (1)...(19): siRNA sense strand
aaggauuuacugugaauga

SEQ ID NO: 857772 - RNA, 19 nt, Homo sapiens
  misc_RNA (1)...(19): siRNA sense strand
cgcaagcccucaggaagga

SEQ ID NO: 857773 - RNA, 19 nt, Homo sapiens
  misc_RNA (1)...(19): siRNA sense strand
gguacaagucauccacaga

SEQ ID NO: 857774 - RNA, 19 nt, Homo sapiens
  misc_RNA (1)...(19): siRNA sense strand
gcugguguuccucuuuauu

SEQ ID NO: 857775 - RNA, 19 nt, Homo sapiens
  misc_RNA (1)...(19): siRNA sense strand
ucucuggcuucuugcuauu

SEQ ID NO: 857776 - RNA, 19 nt, Homo sapiens
  misc_RNA (1)...(19): siRNA sense strand
uauuguccagcaagacuua

SEQ ID NO: 857777 - RNA, 19 nt, Homo sapiens
  misc_RNA (1)...(19): siRNA sense strand
cagaucaggagcaccaguu

SEQ ID NO: 857778 - RNA, 19 nt, Homo sapiens
  misc_RNA (1)...(19): siRNA sense strand
ggcugggacucaagaugga

SEQ ID NO: 857779 - RNA, 19 nt, Homo sapiens
  misc_RNA (1)...(19): siRNA sense strand
augcccagcugaagauaug

SEQ ID NO: 857780 - RNA, 19 nt, Homo sapiens
  misc_RNA (1)...(19): siRNA sense strand
gcaagacuuagacuauguc

SEQ ID NO: 857781 - RNA, 19 nt, Homo sapiens
  misc_RNA (1)...(19): siRNA sense strand
agcaagacuuagacuaugu

SEQ ID NO: 857782 - RNA, 19 nt, Homo sapiens
  misc_RNA (1)...(19): siRNA sense strand
ccagaauucauacaaagag

SEQ ID NO: 857783 - RNA, 19 nt, Homo sapiens
  misc_RNA (1)...(19): siRNA sense strand
gcugcugacaacuccauaa

SEQ ID NO: 857784 - RNA, 19 nt, Homo sapiens
  misc_RNA (1)...(19): siRNA sense strand
caaaggaaaaugcaucuuc

SEQ ID NO: 857785 - RNA, 19 nt, Homo sapiens
  misc_RNA (1)...(19): siRNA sense strand
guucuaucccugcuaagug

SEQ ID NO: 857786 - RNA, 19 nt, Homo sapiens
  misc_RNA (1)...(19): siRNA sense strand
cagcagaggaggucuuggu

SEQ ID NO: 857787 - RNA, 19 nt, Homo sapiens
  misc_RNA (1)...(19): siRNA sense strand
gagaguauuggaaggacau

SEQ ID NO: 857788 - RNA, 19 nt, Homo sapiens
  misc_RNA (1)...(19): siRNA sense strand
uacaagucauccacagauc

SEQ ID NO: 857789 - RNA, 19 nt, Homo sapiens
  misc_RNA (1)...(19): siRNA sense strand
ggacucaagauggaaacau

SEQ ID NO: 857790 - RNA, 19 nt, Homo sapiens
  misc_RNA (1)...(19): siRNA sense strand
gugaauuguugcagguuuu

SEQ ID NO: 857791 - RNA, 19 nt, Homo sapiens
  misc_RNA (1)...(19): siRNA sense strand
ccugcuaagugucagagau

SEQ ID NO: 857792 - RNA, 19 nt, Homo sapiens
  misc_RNA (1)...(19): siRNA sense strand
gucaaggaauuggccuaga

SEQ ID NO: 857793 - RNA, 19 nt, Homo sapiens
  misc_RNA (1)...(19): siRNA sense strand
caaaucaucuggcaaguuu

SEQ ID NO: 857794 - RNA, 19 nt, Homo sapiens
  misc_RNA (1)...(19): siRNA sense strand
gcagaagguuguggaguua

SEQ ID NO: 857795 - RNA, 19 nt, Homo sapiens
  misc_RNA (1)...(19): siRNA sense strand
caacauagcagaagucaga

SEQ ID NO: 857796 - RNA, 19 nt, Homo sapiens
  misc_RNA (1)...(19): siRNA sense strand
gaaauuagcacuccuaguc

SEQ ID NO: 857797 - RNA, 19 nt, Homo sapiens
  misc_RNA (1)...(19): siRNA sense strand
uaacaagcaucaaagagaa

SEQ ID NO: 857798 - RNA, 19 nt, Homo sapiens
  misc_RNA (1)...(19): siRNA sense strand
ucacagugcugcagacaaa

SEQ ID NO: 857799 - RNA, 19 nt, Homo sapiens
  misc_RNA (1)...(19): siRNA sense strand
gagaauaacaagcaucaaa

SEQ ID NO: 857800 - RNA, 19 nt, Homo sapiens
  misc_RNA (1)...(19): siRNA sense strand
ggaguugugccucuuauaa

SEQ ID NO: 857801 - RNA, 19 nt, Homo sapiens
  misc_RNA (1)...(19): siRNA sense strand
ccaaaucagucuucaagug

SEQ ID NO: 857802 - RNA, 19 nt, Homo sapiens
  misc_RNA (1)...(19): siRNA sense strand
cuaaugcagugcugaauga

SEQ ID NO: 857803 - RNA, 19 nt, Homo sapiens
  misc_RNA (1)...(19): siRNA sense strand
ggaguuauauaaacaguac

SEQ ID NO: 857804 - RNA, 19 nt, Homo sapiens
  misc_RNA (1)...(19): siRNA sense strand
ggacuugaguacuggaaug

SEQ ID NO: 857805 - RNA, 19 nt, Homo sapiens
  misc_RNA (1)...(19): siRNA sense strand
guugaaauauguagagaug

SEQ ID NO: 857806 - RNA, 19 nt, Homo sapiens
  misc_RNA (1)...(19): siRNA sense strand
gaacuauaaugacuuacag

SEQ ID NO: 857807 - RNA, 19 nt, Homo sapiens
  misc_RNA (1)...(19): siRNA sense strand
gaauaacaagcaucaaaga

SEQ ID NO: 857808 - RNA, 19 nt, Homo sapiens
  misc_RNA (1)...(19): siRNA sense strand
ccagagauauagucuuuag

SEQ ID NO: 857809 - RNA, 19 nt, Homo sapiens
  misc_RNA (1)...(19): siRNA sense strand
gcaaguuuaucucuucagu

SEQ ID NO: 857810 - RNA, 19 nt, Homo sapiens
  misc_RNA (1)...(19): siRNA sense strand
caagagagagccaacauag

SEQ ID NO: 857811 - RNA, 19 nt, Homo sapiens
  misc_RNA (1)...(19): siRNA sense strand
gaugucaacugaaauuacu

SEQ ID NO: 857812 - RNA, 19 nt, Homo sapiens
  misc_RNA (1)...(19): siRNA sense strand
agaagguuguggaguuaua

SEQ ID NO: 857813 - RNA, 19 nt, Homo sapiens
  misc_RNA (1)...(19): siRNA sense strand
gcagagagaccuacuuggu

SEQ ID NO: 857814 - RNA, 19 nt, Homo sapiens
  misc_RNA (1)...(19): siRNA sense strand
agccagagauauagucuuu

SEQ ID NO: 857815 - RNA, 19 nt, Homo sapiens
  misc_RNA (1)...(19): siRNA sense strand
ggaugaaacacaagucaga

SEQ ID NO: 857816 - RNA, 19 nt, Homo sapiens
  misc_RNA (1)...(19): siRNA sense strand
ugacaaguguagaccaaau

SEQ ID NO: 857817 - RNA, 19 nt, Homo sapiens
  misc_RNA (1)...(19): siRNA sense strand
ggagacaaauucuguugcu

SEQ ID NO: 857818 - RNA, 19 nt, Homo sapiens
  misc_RNA (1)...(19): siRNA sense strand
caaaucagucuucaagugu

SEQ ID NO: 857819 - RNA, 19 nt, Homo sapiens
  misc_RNA (1)...(19): siRNA sense strand
uuaauucagugacaacaga

SEQ ID NO: 857820 - RNA, 19 nt, Homo sapiens
  misc_RNA (1)...(19): siRNA sense strand
gagacaaauucuguugcua

SEQ ID NO: 857821 - RNA, 19 nt, Homo sapiens
  misc_RNA (1)...(19): siRNA sense strand
gcaaaugcagaauccuauu

SEQ ID NO: 857822 - RNA, 19 nt, Homo sapiens
  misc_RNA (1)...(19): siRNA sense strand
gcaaaucaucuggcaaguu

SEQ ID NO: 857823 - RNA, 19 nt, Homo sapiens
  misc_RNA (1)...(19): siRNA sense strand
gcaagaacuauaaugacuu

SEQ ID NO: 857824 - RNA, 19 nt, Homo sapiens
  misc_RNA (1)...(19): siRNA sense strand
ggugauggccauuaauuca

SEQ ID NO: 857825 - RNA, 19 nt, Homo sapiens
  misc_RNA (1)...(19): siRNA sense strand
cuccauauuucucaguaua

SEQ ID NO: 857826 - RNA, 19 nt, Homo sapiens
  misc_RNA (1)...(19): siRNA sense strand
gaccaaaucagucuucaag

SEQ ID NO: 857827 - RNA, 19 nt, Homo sapiens
  misc_RNA (1)...(19): siRNA sense strand
cagcgguacucauccuauu

SEQ ID NO: 857828 - RNA, 19 nt, Homo sapiens
  misc_RNA (1)...(19): siRNA sense strand
augcagugcugaaugagua

SEQ ID NO: 857829 - RNA, 19 nt, Homo sapiens
  misc_RNA (1)...(19): siRNA sense strand
gaggagacaaauucuguug

SEQ ID NO: 857830 - RNA, 19 nt, Homo sapiens
  misc_RNA (1)...(19): siRNA sense strand
ucaagugucuagagagaag

SEQ ID NO: 857831 - RNA, 19 nt, Homo sapiens
  misc_RNA (1)...(19): siRNA sense strand
caugacaaguguagaccaa

SEQ ID NO: 857832 - RNA, 19 nt, Homo sapiens
  misc_RNA (1)...(19): siRNA sense strand
ucaagagagagccaacaua

SEQ ID NO: 857833 - RNA, 19 nt, Homo sapiens
  misc_RNA (1)...(19): siRNA sense strand
gcccuuugcugaagucauc

SEQ ID NO: 857834 - RNA, 19 nt, Homo sapiens
  misc_RNA (1)...(19): siRNA sense strand
gagccaacauagcagaagu

SEQ ID NO: 857835 - RNA, 19 nt, Homo sapiens
  misc_RNA (1)...(19): siRNA sense strand
uugcuacccuuuccuauuc

SEQ ID NO: 857836 - RNA, 19 nt, Homo sapiens
  misc_RNA (1)...(19): siRNA sense strand
gguuccaucuucuugcaaa

SEQ ID NO: 857837 - RNA, 19 nt, Homo sapiens
  misc_RNA (1)...(19): siRNA sense strand
cagcagagagaccuacuug

SEQ ID NO: 857838 - RNA, 19 nt, Homo sapiens
  misc_RNA (1)...(19): siRNA sense strand
gaagaggagacaaauucug

SEQ ID NO: 857839 - RNA, 19 nt, Homo sapiens
  misc_RNA (1)...(19): siRNA sense strand
aaacacaagucagaagucu

SEQ ID NO: 857840 - RNA, 19 nt, Homo sapiens
  misc_RNA (1)...(19): siRNA sense strand
cuucaagugucuagagaga

SEQ ID NO: 857841 - RNA, 19 nt, Homo sapiens
  misc_RNA (1)...(19): siRNA sense strand
ccaauccuguguuugaaag

SEQ ID NO: 857842 - RNA, 19 nt, Homo sapiens
  misc_RNA (1)...(19): siRNA sense strand
gaaacacaagucagaaguc

SEQ ID NO: 857843 - RNA, 19 nt, Homo sapiens
  misc_RNA (1)...(19): siRNA sense strand
cagagagaccuacuugguu

SEQ ID NO: 857844 - RNA, 19 nt, Homo sapiens
  misc_RNA (1)...(19): siRNA sense strand
ugagagcaguuuugaauau

SEQ ID NO: 857845 - RNA, 19 nt, Homo sapiens
  misc_RNA (1)...(19): siRNA sense strand
guauagcaauguaaaucca

SEQ ID NO: 857846 - RNA, 19 nt, Homo sapiens
  misc_RNA (1)...(19): siRNA sense strand
gcacuccuagucuccauau

SEQ ID NO: 857847 - RNA, 19 nt, Homo sapiens
  misc_RNA (1)...(19): siRNA sense strand
uacgugagcugcaaaucau

SEQ ID NO: 857848 - RNA, 19 nt, Homo sapiens
  misc_RNA (1)...(19): siRNA sense strand
augaguaccuggagcagaa

SEQ ID NO: 857849 - RNA, 19 nt, Homo sapiens
  misc_RNA (1)...(19): siRNA sense strand
caggugauggccauuaauu

SEQ ID NO: 857850 - RNA, 19 nt, Homo sapiens
  misc_RNA (1)...(19): siRNA sense strand
agagagagccaacauagca

SEQ ID NO: 857851 - RNA, 19 nt, Homo sapiens
  misc_RNA (1)...(19): siRNA sense strand
ucagugcauucaagagaga

SEQ ID NO: 857852 - RNA, 19 nt, Homo sapiens
  misc_RNA (1)...(19): siRNA sense strand
gaugaaacacaagucagaa

SEQ ID NO: 857853 - RNA, 19 nt, Homo sapiens
  misc_RNA (1)...(19): siRNA sense strand
guagagaugccagcagaga

SEQ ID NO: 857854 - RNA, 19 nt, Homo sapiens
  misc_RNA (1)...(19): siRNA sense strand
ggccauuaauucagugaca

SEQ ID NO: 857855 - RNA, 19 nt, Homo sapiens
  misc_RNA (1)...(19): siRNA sense strand
agcagaagguuguggaguu

SEQ ID NO: 857856 - RNA, 19 nt, Homo sapiens
  misc_RNA (1)...(19): siRNA sense strand
auaacaagcaucaaagaga

SEQ ID NO: 857857 - RNA, 19 nt, Homo sapiens
  misc_RNA (1)...(19): siRNA sense strand
uugcugaagucaucugaga

SEQ ID NO: 857858 - RNA, 19 nt, Homo sapiens
  misc_RNA (1)...(19): siRNA sense strand
gaguugugccucuuauaau

SEQ ID NO: 857859 - RNA, 19 nt, Homo sapiens
  misc_RNA (1)...(19): siRNA sense strand
aggaagaggagacaaauuc

SEQ ID NO: 857860 - RNA, 19 nt, Homo sapiens
  misc_RNA (1)...(19): siRNA sense strand
ggaagaggagacaaauucu

SEQ ID NO: 857861 - RNA, 19 nt, Homo sapiens
  misc_RNA (1)...(19): siRNA sense strand
gaagguuguggaguuauau

SEQ ID NO: 857862 - RNA, 19 nt, Homo sapiens
  misc_RNA (1)...(19): siRNA sense strand
uggcugcaguugaaauaug

SEQ ID NO: 857863 - RNA, 19 nt, Homo sapiens
  misc_RNA (1)...(19): siRNA sense strand
gaagucagagagucacagu

SEQ ID NO: 857864 - RNA, 19 nt, Homo sapiens
  misc_RNA (1)...(19): siRNA sense strand
guuuaucucuucagugcau

SEQ ID NO: 857865 - RNA, 19 nt, Homo sapiens
  misc_RNA (1)...(19): siRNA sense strand
guuguggaguuauauaaac

SEQ ID NO: 857866 - RNA, 19 nt, Homo sapiens
  misc_RNA (1)...(19): siRNA sense strand
gguuguggaguuauauaaa

SEQ ID NO: 857867 - RNA, 19 nt, Homo sapiens
  misc_RNA (1)...(19): siRNA sense strand
cuacgugagcugcaaauca

SEQ ID NO: 857868 - RNA, 19 nt, Homo sapiens
  misc_RNA (1)...(19): siRNA sense strand
acuccuagucuccauauuu

SEQ ID NO: 857869 - RNA, 19 nt, Homo sapiens
  misc_RNA (1)...(19): siRNA sense strand
gcaguugaaauauguagag

SEQ ID NO: 857870 - RNA, 19 nt, Homo sapiens
  misc_RNA (1)...(19): siRNA sense strand
ggcugcaguugaaauaugu

SEQ ID NO: 857871 - RNA, 19 nt, Homo sapiens
  misc_RNA (1)...(19): siRNA sense strand
ugcaagaacuauaaugacu

SEQ ID NO: 857872 - RNA, 19 nt, Homo sapiens
  misc_RNA (1)...(19): siRNA sense strand
cuccuagucuccauauuuc

SEQ ID NO: 857873 - RNA, 19 nt, Homo sapiens
  misc_RNA (1)...(19): siRNA sense strand
aguugugccucuuauaaug

SEQ ID NO: 857874 - RNA, 19 nt, Homo sapiens
  misc_RNA (1)...(19): siRNA sense strand
aggauuccauuucuacuca

SEQ ID NO: 857875 - RNA, 19 nt, Homo sapiens
  misc_RNA (1)...(19): siRNA sense strand
gccauuaauucagugacaa

SEQ ID NO: 857876 - RNA, 19 nt, Homo sapiens
  misc_RNA (1)...(19): siRNA sense strand
cuacuugguuccaucuucu

SEQ ID NO: 857877 - RNA, 19 nt, Homo sapiens
  misc_RNA (1)...(19): siRNA sense strand
guugcuacccuuuccuauu

SEQ ID NO: 857878 - RNA, 19 nt, Homo sapiens
  misc_RNA (1)...(19): siRNA sense strand
ugauggccauuaauucagu

SEQ ID NO: 857879 - RNA, 19 nt, Homo sapiens
  misc_RNA (1)...(19): siRNA sense strand
guugugccucuuauaauga

SEQ ID NO: 857880 - RNA, 19 nt, Homo sapiens
  misc_RNA (1)...(19): siRNA sense strand
ccagugacuuuccccaaaa

SEQ ID NO: 857881 - RNA, 19 nt, Homo sapiens
  misc_RNA (1)...(19): siRNA sense strand
aagaggagacaaauucugu

SEQ ID NO: 857882 - RNA, 19 nt, Homo sapiens
  misc_RNA (1)...(19): siRNA sense strand
gcagguggcuggggaaaag

SEQ ID NO: 857883 - RNA, 19 nt, Homo sapiens
  misc_RNA (1)...(19): siRNA sense strand
acacaagucagaagucucu

SEQ ID NO: 857884 - RNA, 19 nt, Homo sapiens
  misc_RNA (1)...(19): siRNA sense strand
ugaaacacaagucagaagu

SEQ ID NO: 857885 - RNA, 19 nt, Homo sapiens
  misc_RNA (1)...(19): siRNA sense strand
aaucaucuggcaaguuuau

SEQ ID NO: 857886 - RNA, 19 nt, Homo sapiens
  misc_RNA (1)...(19): siRNA sense strand
ccuacuugguuccaucuuc

SEQ ID NO: 857887 - RNA, 19 nt, Homo sapiens
  misc_RNA (1)...(19): siRNA sense strand
ucucuucagugcauucaag

SEQ ID NO: 857888 - RNA, 19 nt, Homo sapiens
  misc_RNA (1)...(19): siRNA sense strand
agaauaacaagcaucaaag

SEQ ID NO: 857889 - RNA, 19 nt, Homo sapiens
  misc_RNA (1)...(19): siRNA sense strand
agagaugccagcagagaga

SEQ ID NO: 857890 - RNA, 19 nt, Homo sapiens
  misc_RNA (1)...(19): siRNA sense strand
caguugaaauauguagaga

SEQ ID NO: 857891 - RNA, 19 nt, Homo sapiens
  misc_RNA (1)...(19): siRNA sense strand
gagagccaacauagcagaa

SEQ ID NO: 857892 - RNA, 19 nt, Homo sapiens
  misc_RNA (1)...(19): siRNA sense strand
aaaggaagaggagacaaau

SEQ ID NO: 857893 - RNA, 19 nt, Homo sapiens
  misc_RNA (1)...(19): siRNA sense strand
ggaaacgucuggacaagaa

SEQ ID NO: 857894 - RNA, 19 nt, Homo sapiens
  misc_RNA (1)...(19): siRNA sense strand
gaaauugucccacauuaaa

SEQ ID NO: 857895 - RNA, 19 nt, Homo sapiens
  misc_RNA (1)...(19): siRNA sense strand
ugaaggagaugcaguauca

SEQ ID NO: 857896 - RNA, 19 nt, Homo sapiens
  misc_RNA (1)...(19): siRNA sense strand
gcaagaagaugaggacaug

SEQ ID NO: 857897 - RNA, 19 nt, Homo sapiens
  misc_RNA (1)...(19): siRNA sense strand
cagacuaccuccugcaaua

SEQ ID NO: 857898 - RNA, 19 nt, Homo sapiens
  misc_RNA (1)...(19): siRNA sense strand
cagaaauugucccacauua

SEQ ID NO: 857899 - RNA, 19 nt, Homo sapiens
  misc_RNA (1)...(19): siRNA sense strand
gcgaggaacuccagaauac

SEQ ID NO: 857900 - RNA, 19 nt, Homo sapiens
  misc_RNA (1)...(19): siRNA sense strand
ggaagcaguacccaaguua

SEQ ID NO: 857901 - RNA, 19 nt, Homo sapiens
  misc_RNA (1)...(19): siRNA sense strand
gacacaaccugacugaaga

SEQ ID NO: 857902 - RNA, 19 nt, Homo sapiens
  misc_RNA (1)...(19): siRNA sense strand
gggcagccauggauucuau

SEQ ID NO: 857903 - RNA, 19 nt, Homo sapiens
  misc_RNA (1)...(19): siRNA sense strand
ggacauggaccccagauua

SEQ ID NO: 857904 - RNA, 19 nt, Homo sapiens
  misc_RNA (1)...(19): siRNA sense strand
ggacacaaccugacugaag

SEQ ID NO: 857905 - RNA, 19 nt, Homo sapiens
  misc_RNA (1)...(19): siRNA sense strand
ugagacagauuaugcugaa

SEQ ID NO: 857906 - RNA, 19 nt, Homo sapiens
  misc_RNA (1)...(19): siRNA sense strand
gggagcgccucauuauuug

SEQ ID NO: 857907 - RNA, 19 nt, Homo sapiens
  misc_RNA (1)...(19): siRNA sense strand
acaagauaauccaggaaua

SEQ ID NO: 857908 - RNA, 19 nt, Homo sapiens
  misc_RNA (1)...(19): siRNA sense strand
gaacacaggaggcuauucu

SEQ ID NO: 857909 - RNA, 19 nt, Homo sapiens
  misc_RNA (1)...(19): siRNA sense strand
cccaaguccugaagauaua

SEQ ID NO: 857910 - RNA, 19 nt, Homo sapiens
  misc_RNA (1)...(19): siRNA sense strand
guacccaaguuacagagaa

SEQ ID NO: 857911 - RNA, 19 nt, Homo sapiens
  misc_RNA (1)...(19): siRNA sense strand
gagcagagauuaaaagagu

SEQ ID NO: 857912 - RNA, 19 nt, Homo sapiens
  misc_RNA (1)...(19): siRNA sense strand
uacaaggccugaccaauca

SEQ ID NO: 857913 - RNA, 19 nt, Homo sapiens
  misc_RNA (1)...(19): siRNA sense strand
ccagacauccugagaguug

SEQ ID NO: 857914 - RNA, 19 nt, Homo sapiens
  misc_RNA (1)...(19): siRNA sense strand
agacagauuaugcugaaua

SEQ ID NO: 857915 - RNA, 19 nt, Homo sapiens
  misc_RNA (1)...(19): siRNA sense strand
caagauaauccaggaauau

SEQ ID NO: 857916 - RNA, 19 nt, Homo sapiens
  misc_RNA (1)...(19): siRNA sense strand
gagcugggagcagagauua

SEQ ID NO: 857917 - RNA, 19 nt, Homo sapiens
  misc_RNA (1)...(19): siRNA sense strand
gggagaagauugggagcaa

SEQ ID NO: 857918 - RNA, 19 nt, Homo sapiens
  misc_RNA (1)...(19): siRNA sense strand
gcagaacacaggaggcuau

SEQ ID NO: 857919 - RNA, 19 nt, Homo sapiens
  misc_RNA (1)...(19): siRNA sense strand
ccuaugagcaggacuuuga

SEQ ID NO: 857920 - RNA, 19 nt, Homo sapiens
  misc_RNA (1)...(19): siRNA sense strand
gaggaacuccagaauacaa

SEQ ID NO: 857921 - RNA, 19 nt, Homo sapiens
  misc_RNA (1)...(19): siRNA sense strand
aauacaagguccuggaaga

SEQ ID NO: 857922 - RNA, 19 nt, Homo sapiens
  misc_RNA (1)...(19): siRNA sense strand
agggagcgccucauuauuu

SEQ ID NO: 857923 - RNA, 19 nt, Homo sapiens
  misc_RNA (1)...(19): siRNA sense strand
cugaagauauaccagacua

SEQ ID NO: 857924 - RNA, 19 nt, Homo sapiens
  misc_RNA (1)...(19): siRNA sense strand
cuacaaggccugaccaauc

SEQ ID NO: 857925 - RNA, 19 nt, Homo sapiens
  misc_RNA (1)...(19): siRNA sense strand
gagaagauugggagcaaga

SEQ ID NO: 857926 - RNA, 19 nt, Homo sapiens
  misc_RNA (1)...(19): siRNA sense strand
ucagggagcgccucauuau

SEQ ID NO: 857927 - RNA, 19 nt, Homo sapiens
  misc_RNA (1)...(19): siRNA sense strand
ugaguaccuucaccagaaa

SEQ ID NO: 857928 - RNA, 19 nt, Homo sapiens
  misc_RNA (1)...(19): siRNA sense strand
agaaauugucccacauuaa

SEQ ID NO: 857929 - RNA, 19 nt, Homo sapiens
  misc_RNA (1)...(19): siRNA sense strand
gguccugccucuucuccuu

SEQ ID NO: 857930 - RNA, 19 nt, Homo sapiens
  misc_RNA (1)...(19): siRNA sense strand
gguccuggaagacaagaua

SEQ ID NO: 857931 - RNA, 19 nt, Homo sapiens
  misc_RNA (1)...(19): siRNA sense strand
ggacugcaagccaaagguu

SEQ ID NO: 857932 - RNA, 19 nt, Homo sapiens
  misc_RNA (1)...(19): siRNA sense strand
gacagauuaugcugaauac

SEQ ID NO: 857933 - RNA, 19 nt, Homo sapiens
  misc_RNA (1)...(19): siRNA sense strand
ggacuuugagacagauuau

SEQ ID NO: 857934 - RNA, 19 nt, Homo sapiens
  misc_RNA (1)...(19): siRNA sense strand
ccagaaauugucccacauu

SEQ ID NO: 857935 - RNA, 19 nt, Homo sapiens
  misc_RNA (1)...(19): siRNA sense strand
gcugggagcagagauuaaa

SEQ ID NO: 857936 - RNA, 19 nt, Homo sapiens
  misc_RNA (1)...(19): siRNA sense strand
cagauccacuggcaagcaa

SEQ ID NO: 857937 - RNA, 19 nt, Homo sapiens
  misc_RNA (1)...(19): siRNA sense strand
ggcgaggaacuccagaaua

SEQ ID NO: 857938 - RNA, 19 nt, Homo sapiens
  misc_RNA (1)...(19): siRNA sense strand
gaagaaaagagguucagaa

SEQ ID NO: 857939 - RNA, 19 nt, Homo sapiens
  misc_RNA (1)...(19): siRNA sense strand
ccugagaguuggcagaaca

SEQ ID NO: 857940 - RNA, 19 nt, Homo sapiens
  misc_RNA (1)...(19): siRNA sense strand
gcaguacccaaguuacaga

SEQ ID NO: 857941 - RNA, 19 nt, Homo sapiens
  misc_RNA (1)...(19): siRNA sense strand
gacaagauaauccaggaau

SEQ ID NO: 857942 - RNA, 19 nt, Homo sapiens
  misc_RNA (1)...(19): siRNA sense strand
gaacagcaacaugccuaug

SEQ ID NO: 857943 - RNA, 19 nt, Homo sapiens
  misc_RNA (1)...(19): siRNA sense strand
guuccucaguucaagaaga

SEQ ID NO: 857944 - RNA, 19 nt, Homo sapiens
  misc_RNA (1)...(19): siRNA sense strand
acaagguccuggaagacaa

SEQ ID NO: 857945 - RNA, 19 nt, Homo sapiens
  misc_RNA (1)...(19): siRNA sense strand
gacugaagaugccagacau

SEQ ID NO: 857946 - RNA, 19 nt, Homo sapiens
  misc_RNA (1)...(19): siRNA sense strand
ccacagugcagaacagcaa

SEQ ID NO: 857947 - RNA, 19 nt, Homo sapiens
  misc_RNA (1)...(19): siRNA sense strand
acaggaggcuauucugaag

SEQ ID NO: 857948 - RNA, 19 nt, Homo sapiens
  misc_RNA (1)...(19): siRNA sense strand
ccaccgaggguaucugaga

SEQ ID NO: 857949 - RNA, 19 nt, Homo sapiens
  misc_RNA (1)...(19): siRNA sense strand
acacaggaggcuauucuga

SEQ ID NO: 857950 - RNA, 19 nt, Homo sapiens
  misc_RNA (1)...(19): siRNA sense strand
ggacagucacucccaggau

SEQ ID NO: 857951 - RNA, 19 nt, Homo sapiens
  misc_RNA (1)...(19): siRNA sense strand
gaaacgucuggacaagaaa

SEQ ID NO: 857952 - RNA, 19 nt, Homo sapiens
  misc_RNA (1)...(19): siRNA sense strand
cacaggaggcuauucugaa

SEQ ID NO: 857953 - RNA, 19 nt, Homo sapiens
  misc_RNA (1)...(19): siRNA sense strand
ugcccggacuagccucuua

SEQ ID NO: 857954 - RNA, 19 nt, Homo sapiens
  misc_RNA (1)...(19): siRNA sense strand
ccucuucuccuucauagug

SEQ ID NO: 857955 - RNA, 19 nt, Homo sapiens
  misc_RNA (1)...(19): siRNA sense strand
gcaagccaaagguucauag

SEQ ID NO: 857956 - RNA, 19 nt, Homo sapiens
  misc_RNA (1)...(19): siRNA sense strand
gcaggacuuugagacagau

SEQ ID NO: 857957 - RNA, 19 nt, Homo sapiens
  misc_RNA (1)...(19): siRNA sense strand
gccuguagccacuguagaa

SEQ ID NO: 857958 - RNA, 19 nt, Homo sapiens
  misc_RNA (1)...(19): siRNA sense strand
gaaacguucagugccugua

SEQ ID NO: 857959 - RNA, 19 nt, Homo sapiens
  misc_RNA (1)...(19): siRNA sense strand
uacaagagggagaagauug

SEQ ID NO: 857960 - RNA, 19 nt, Homo sapiens
  misc_RNA (1)...(19): siRNA sense strand
aggaagcaguacccaaguu

SEQ ID NO: 857961 - RNA, 19 nt, Homo sapiens
  misc_RNA (1)...(19): siRNA sense strand
gaagauugggagcaagaag

SEQ ID NO: 857962 - RNA, 19 nt, Homo sapiens
  misc_RNA (1)...(19): siRNA sense strand
gagaagccagacccauguu

SEQ ID NO: 857963 - RNA, 19 nt, Homo sapiens
  misc_RNA (1)...(19): siRNA sense strand
ggucucauccuggaguuug

SEQ ID NO: 857964 - RNA, 19 nt, Homo sapiens
  misc_RNA (1)...(19): siRNA sense strand
acacaguuccucaguucaa

SEQ ID NO: 857965 - RNA, 19 nt, Homo sapiens
  misc_RNA (1)...(19): siRNA sense strand
ugccagacauccugagagu

SEQ ID NO: 857966 - RNA, 19 nt, Homo sapiens
  misc_RNA (1)...(19): siRNA sense strand
ccaaguuacagagaagaaa

SEQ ID NO: 857967 - RNA, 19 nt, Homo sapiens
  misc_RNA (1)...(19): siRNA sense strand
ccagacccauguuccaaac

SEQ ID NO: 857968 - RNA, 19 nt, Homo sapiens
  misc_RNA (1)...(19): siRNA sense strand
ugagaagccagacccaugu

SEQ ID NO: 857969 - RNA, 19 nt, Homo sapiens
  misc_RNA (1)...(19): siRNA sense strand
gcaagcaaccaaggacagu

SEQ ID NO: 857970 - RNA, 19 nt, Homo sapiens
  misc_RNA (1)...(19): siRNA sense strand
aggaggcuauucugaagga

SEQ ID NO: 857971 - RNA, 19 nt, Homo sapiens
  misc_RNA (1)...(19): siRNA sense strand
uguagccacuguagaacug

SEQ ID NO: 857972 - RNA, 19 nt, Homo sapiens
  misc_RNA (1)...(19): siRNA sense strand
gaagcaguacccaaguuac

SEQ ID NO: 857973 - RNA, 19 nt, Homo sapiens
  misc_RNA (1)...(19): siRNA sense strand
ccaaggccaccgaggguau

SEQ ID NO: 857974 - RNA, 19 nt, Homo sapiens
  misc_RNA (1)...(19): siRNA sense strand
ggauuuacaagagggagaa

SEQ ID NO: 857975 - RNA, 19 nt, Homo sapiens
  misc_RNA (1)...(19): siRNA sense strand
gccagacccauguuccaaa

SEQ ID NO: 857976 - RNA, 19 nt, Homo sapiens
  misc_RNA (1)...(19): siRNA sense strand
gaacuccagaauacaaggu

SEQ ID NO: 857977 - RNA, 19 nt, Homo sapiens
  misc_RNA (1)...(19): siRNA sense strand
ugacugaagaugccagaca

SEQ ID NO: 857978 - RNA, 19 nt, Homo sapiens
  misc_RNA (1)...(19): siRNA sense strand
cauccugcaugcccguguu

SEQ ID NO: 857979 - RNA, 19 nt, Homo sapiens
  misc_RNA (1)...(19): siRNA sense strand
aacagcaacaugccuauga

SEQ ID NO: 857980 - RNA, 19 nt, Homo sapiens
  misc_RNA (1)...(19): siRNA sense strand
gcacagugggaagugagaa

SEQ ID NO: 857981 - RNA, 19 nt, Homo sapiens
  misc_RNA (1)...(19): siRNA sense strand
caagccaaagguucauaga

SEQ ID NO: 857982 - RNA, 19 nt, Homo sapiens
  misc_RNA (1)...(19): siRNA sense strand
ggccaccgaggguaucuga

SEQ ID NO: 857983 - RNA, 19 nt, Homo sapiens
  misc_RNA (1)...(19): siRNA sense strand
cuguagaacuggaagaaaa

SEQ ID NO: 857984 - RNA, 19 nt, Homo sapiens
  misc_RNA (1)...(19): siRNA sense strand
guaccuucaccagaaauug

SEQ ID NO: 857985 - RNA, 19 nt, Homo sapiens
  misc_RNA (1)...(19): siRNA sense strand
cagggagcgccucauuauu

SEQ ID NO: 857986 - RNA, 19 nt, Homo sapiens
  misc_RNA (1)...(19): siRNA sense strand
gcaguaucacagccacaga

SEQ ID NO: 857987 - RNA, 19 nt, Homo sapiens
  misc_RNA (1)...(19): siRNA sense strand
ccacauuaaaggucucauc

SEQ ID NO: 857988 - RNA, 19 nt, Homo sapiens
  misc_RNA (1)...(19): siRNA sense strand
agaauacaagguccuggaa

SEQ ID NO: 857989 - RNA, 19 nt, Homo sapiens
  misc_RNA (1)...(19): siRNA sense strand
gagacagauuaugcugaau

SEQ ID NO: 857990 - RNA, 19 nt, Homo sapiens
  misc_RNA (1)...(19): siRNA sense strand
aagaagaugaggacaugga

SEQ ID NO: 857991 - RNA, 19 nt, Homo sapiens
  misc_RNA (1)...(19): siRNA sense strand
ggacaagcauuauuagaaa

SEQ ID NO: 857992 - RNA, 19 nt, Homo sapiens
  misc_RNA (1)...(19): siRNA sense strand
gcuaauguguggagucuua

SEQ ID NO: 857993 - RNA, 19 nt, Homo sapiens
  misc_RNA (1)...(19): siRNA sense strand
gaagcaagauuccauacaa

SEQ ID NO: 857994 - RNA, 19 nt, Homo sapiens
  misc_RNA (1)...(19): siRNA sense strand
gcggaaagguuuaaaauua

SEQ ID NO: 857995 - RNA, 19 nt, Homo sapiens
  misc_RNA (1)...(19): siRNA sense strand
cagagaauauccaguuaua

SEQ ID NO: 857996 - RNA, 19 nt, Homo sapiens
  misc_RNA (1)...(19): siRNA sense strand
gaacaccuaugucagagaa

SEQ ID NO: 857997 - RNA, 19 nt, Homo sapiens
  misc_RNA (1)...(19): siRNA sense strand
gaaauggagggaucaaaua

SEQ ID NO: 857998 - RNA, 19 nt, Homo sapiens
  misc_RNA (1)...(19): siRNA sense strand
caagauaccugggucauga

SEQ ID NO: 857999 - RNA, 19 nt, Homo sapiens
  misc_RNA (1)...(19): siRNA sense strand
gcacugaaaugcuaaugug

SEQ ID NO: 858000 - RNA, 19 nt, Homo sapiens
  misc_RNA (1)...(19): siRNA sense strand
cagcuuaacugccaagauu

SEQ ID NO: 858001 - RNA, 19 nt, Homo sapiens
  misc_RNA (1)...(19): siRNA sense strand
ggaauauggugucguguau

SEQ ID NO: 858002 - RNA, 19 nt, Homo sapiens
  misc_RNA (1)...(19): siRNA sense strand
gaucaaagaccgaaagaga

SEQ ID NO: 858003 - RNA, 19 nt, Homo sapiens
  misc_RNA (1)...(19): siRNA sense strand
ugaaagaauugaacaccua

SEQ ID NO: 858004 - RNA, 19 nt, Homo sapiens
  misc_RNA (1)...(19): siRNA sense strand
aaggaaaucugaucaaaga

SEQ ID NO: 858005 - RNA, 19 nt, Homo sapiens
  misc_RNA (1)...(19): siRNA sense strand
gagaagaggcaaugauauu

SEQ ID NO: 858006 - RNA, 19 nt, Homo sapiens
  misc_RNA (1)...(19): siRNA sense strand
uagaagagguuauugacaa

SEQ ID NO: 858007 - RNA, 19 nt, Homo sapiens
  misc_RNA (1)...(19): siRNA sense strand
ugagauggcuggcauggaa

SEQ ID NO: 858008 - RNA, 19 nt, Homo sapiens
  misc_RNA (1)...(19): siRNA sense strand
gaacagggugagaaacuuu

SEQ ID NO: 858009 - RNA, 19 nt, Homo sapiens
  misc_RNA (1)...(19): siRNA sense strand
gaagcgaauuugugucaug

SEQ ID NO: 858010 - RNA, 19 nt, Homo sapiens
  misc_RNA (1)...(19): siRNA sense strand
caaaggguguaagauuaua

SEQ ID NO: 858011 - RNA, 19 nt, Homo sapiens
  misc_RNA (1)...(19): siRNA sense strand
gaaggcagcuauggcuuug

SEQ ID NO: 858012 - RNA, 19 nt, Homo sapiens
  misc_RNA (1)...(19): siRNA sense strand
cuacaaaucuguggucaug

SEQ ID NO: 858013 - RNA, 19 nt, Homo sapiens
  misc_RNA (1)...(19): siRNA sense strand
gaagaggcaaugauauuug

SEQ ID NO: 858014 - RNA, 19 nt, Homo sapiens
  misc_RNA (1)...(19): siRNA sense strand
ccuaaaugcuuucuuggaa

SEQ ID NO: 858015 - RNA, 19 nt, Homo sapiens
  misc_RNA (1)...(19): siRNA sense strand
uucaaaggguguaagauua

SEQ ID NO: 858016 - RNA, 19 nt, Homo sapiens
  misc_RNA (1)...(19): siRNA sense strand
gaaucaaugucagcaaaga

SEQ ID NO: 858017 - RNA, 19 nt, Homo sapiens
  misc_RNA (1)...(19): siRNA sense strand
ggaaauggagggaucaaau

SEQ ID NO: 858018 - RNA, 19 nt, Homo sapiens
  misc_RNA (1)...(19): siRNA sense strand
gguguaagauuauauuguc

SEQ ID NO: 858019 - RNA, 19 nt, Homo sapiens
  misc_RNA (1)...(19): siRNA sense strand
gaauugaacaccuauguca

SEQ ID NO: 858020 - RNA, 19 nt, Homo sapiens
  misc_RNA (1)...(19): siRNA sense strand
ggagggaucaaauaugaaa

SEQ ID NO: 858021 - RNA, 19 nt, Homo sapiens
  misc_RNA (1)...(19): siRNA sense strand
ugacuacguucccuaaaug

SEQ ID NO: 858022 - RNA, 19 nt, Homo sapiens
  misc_RNA (1)...(19): siRNA sense strand
aaagguuucuucagcuuaa

SEQ ID NO: 858023 - RNA, 19 nt, Homo sapiens
  misc_RNA (1)...(19): siRNA sense strand
caaggugaauggaaucaau

SEQ ID NO: 858024 - RNA, 19 nt, Homo sapiens
  misc_RNA (1)...(19): siRNA sense strand
ggauuuggcccuucuguug

SEQ ID NO: 858025 - RNA, 19 nt, Homo sapiens
  misc_RNA (1)...(19): siRNA sense strand
cagagaagaggcaaugaua

SEQ ID NO: 858026 - RNA, 19 nt, Homo sapiens
  misc_RNA (1)...(19): siRNA sense strand
gggacaagcauuauuagaa

SEQ ID NO: 858027 - RNA, 19 nt, Homo sapiens
  misc_RNA (1)...(19): siRNA sense strand
ugucauggcuguuggaaau

SEQ ID NO: 858028 - RNA, 19 nt, Homo sapiens
  misc_RNA (1)...(19): siRNA sense strand
cugauagacugguuaauug

SEQ ID NO: 858029 - RNA, 19 nt, Homo sapiens
  misc_RNA (1)...(19): siRNA sense strand
cagccuaaauucucuaaau

SEQ ID NO: 858030 - RNA, 19 nt, Homo sapiens
  misc_RNA (1)...(19): siRNA sense strand
uaugaaacaucgacuuaug

SEQ ID NO: 858031 - RNA, 19 nt, Homo sapiens
  misc_RNA (1)...(19): siRNA sense strand
agagaagcaugaaugguuu

SEQ ID NO: 858032 - RNA, 19 nt, Homo sapiens
  misc_RNA (1)...(19): siRNA sense strand
gagaacggcggaaagguuu

SEQ ID NO: 858033 - RNA, 19 nt, Homo sapiens
  misc_RNA (1)...(19): siRNA sense strand
guggacacauuguuguuaa

SEQ ID NO: 858034 - RNA, 19 nt, Homo sapiens
  misc_RNA (1)...(19): siRNA sense strand
acaaggaaaucugaucaaa

SEQ ID NO: 858035 - RNA, 19 nt, Homo sapiens
  misc_RNA (1)...(19): siRNA sense strand
guuaauggauggaagauac

SEQ ID NO: 858036 - RNA, 19 nt, Homo sapiens
  misc_RNA (1)...(19): siRNA sense strand
ucaaagaccgaaagagaaa

SEQ ID NO: 858037 - RNA, 19 nt, Homo sapiens
  misc_RNA (1)...(19): siRNA sense strand
aaacacagacgguugaaga

SEQ ID NO: 858038 - RNA, 19 nt, Homo sapiens
  misc_RNA (1)...(19): siRNA sense strand
aauauggugucguguauga

SEQ ID NO: 858039 - RNA, 19 nt, Homo sapiens
  misc_RNA (1)...(19): siRNA sense strand
ccauagcaguggacacauu

SEQ ID NO: 858040 - RNA, 19 nt, Homo sapiens
  misc_RNA (1)...(19): siRNA sense strand
gucagagaauauccaguua

SEQ ID NO: 858041 - RNA, 19 nt, Homo sapiens
  misc_RNA (1)...(19): siRNA sense strand
acaccuaugucagagaaua

SEQ ID NO: 858042 - RNA, 19 nt, Homo sapiens
  misc_RNA (1)...(19): siRNA sense strand
ugauugagcccaaagguuu

SEQ ID NO: 858043 - RNA, 19 nt, Homo sapiens
  misc_RNA (1)...(19): siRNA sense strand
aaagcgaauucaaagauga

SEQ ID NO: 858044 - RNA, 19 nt, Homo sapiens
  misc_RNA (1)...(19): siRNA sense strand
caccugcacugaaaugcua

SEQ ID NO: 858045 - RNA, 19 nt, Homo sapiens
  misc_RNA (1)...(19): siRNA sense strand
ccaaagguuucuucagcuu

SEQ ID NO: 858046 - RNA, 19 nt, Homo sapiens
  misc_RNA (1)...(19): siRNA sense strand
gaagaaggagcaugugagu

SEQ ID NO: 858047 - RNA, 19 nt, Homo sapiens
  misc_RNA (1)...(19): siRNA sense strand
acacggaggugauggaagu

SEQ ID NO: 858048 - RNA, 19 nt, Homo sapiens
  misc_RNA (1)...(19): siRNA sense strand
gaaagaauugaacaccuau

SEQ ID NO: 858049 - RNA, 19 nt, Homo sapiens
  misc_RNA (1)...(19): siRNA sense strand
agaagagguuauugacaaa

SEQ ID NO: 858050 - RNA, 19 nt, Homo sapiens
  misc_RNA (1)...(19): siRNA sense strand
guggauugcuuccugaaau

SEQ ID NO: 858051 - RNA, 19 nt, Homo sapiens
  misc_RNA (1)...(19): siRNA sense strand
gaaauuggagagauucaca

SEQ ID NO: 858052 - RNA, 19 nt, Homo sapiens
  misc_RNA (1)...(19): siRNA sense strand
gaacggcggaaagguuuaa

SEQ ID NO: 858053 - RNA, 19 nt, Homo sapiens
  misc_RNA (1)...(19): siRNA sense strand
ugaaugguuugaagcuauu

SEQ ID NO: 858054 - RNA, 19 nt, Homo sapiens
  misc_RNA (1)...(19): siRNA sense strand
caaagguuucuucagcuua

SEQ ID NO: 858055 - RNA, 19 nt, Homo sapiens
  misc_RNA (1)...(19): siRNA sense strand
ugauggaaguggagaaugu

SEQ ID NO: 858056 - RNA, 19 nt, Homo sapiens
  misc_RNA (1)...(19): siRNA sense strand
guuggaaauuggagagauu

SEQ ID NO: 858057 - RNA, 19 nt, Homo sapiens
  misc_RNA (1)...(19): siRNA sense strand
gaaagagaacggcggaaag

SEQ ID NO: 858058 - RNA, 19 nt, Homo sapiens
  misc_RNA (1)...(19): siRNA sense strand
cuaugaugauggaacauuu

SEQ ID NO: 858059 - RNA, 19 nt, Homo sapiens
  misc_RNA (1)...(19): siRNA sense strand
gcacagcuggcaucaagug

SEQ ID NO: 858060 - RNA, 19 nt, Homo sapiens
  misc_RNA (1)...(19): siRNA sense strand
uggaaucaaugucagcaaa

SEQ ID NO: 858061 - RNA, 19 nt, Homo sapiens
  misc_RNA (1)...(19): siRNA sense strand
gaacagcaaggcaucuaca

SEQ ID NO: 858062 - RNA, 19 nt, Homo sapiens
  misc_RNA (1)...(19): siRNA sense strand
gguucaagcuucagaaagg

SEQ ID NO: 858063 - RNA, 19 nt, Homo sapiens
  misc_RNA (1)...(19): siRNA sense strand
gaaacaucgacuuaugaaa

SEQ ID NO: 858064 - RNA, 19 nt, Homo sapiens
  misc_RNA (1)...(19): siRNA sense strand
gauggaagauacauaacac

SEQ ID NO: 858065 - RNA, 19 nt, Homo sapiens
  misc_RNA (1)...(19): siRNA sense strand
gacagugcauuaucaaggu

SEQ ID NO: 858066 - RNA, 19 nt, Homo sapiens
  misc_RNA (1)...(19): siRNA sense strand
acugacaccugcacugaaa

SEQ ID NO: 858067 - RNA, 19 nt, Homo sapiens
  misc_RNA (1)...(19): siRNA sense strand
ucagugcccuuugcaguga

SEQ ID NO: 858068 - RNA, 19 nt, Homo sapiens
  misc_RNA (1)...(19): siRNA sense strand
uaaauucagugcccuuugc

SEQ ID NO: 858069 - RNA, 19 nt, Homo sapiens
  misc_RNA (1)...(19): siRNA sense strand
caagugcaaugugguggaa

SEQ ID NO: 858070 - RNA, 19 nt, Homo sapiens
  misc_RNA (1)...(19): siRNA sense strand
auggagggaucaaauauga

SEQ ID NO: 858071 - RNA, 19 nt, Homo sapiens
  misc_RNA (1)...(19): siRNA sense strand
gaugauggcaccgcugauu

SEQ ID NO: 858072 - RNA, 19 nt, Homo sapiens
  misc_RNA (1)...(19): siRNA sense strand
gcugccuccuccucucuua

SEQ ID NO: 858073 - RNA, 19 nt, Homo sapiens
  misc_RNA (1)...(19): siRNA sense strand
guaccagccuaaauucucu

SEQ ID NO: 858074 - RNA, 19 nt, Homo sapiens
  misc_RNA (1)...(19): siRNA sense strand
caacgaagcaagauuccau

SEQ ID NO: 858075 - RNA, 19 nt, Homo sapiens
  misc_RNA (1)...(19): siRNA sense strand
uuccugaaaucguguuuaa

SEQ ID NO: 858076 - RNA, 19 nt, Homo sapiens
  misc_RNA (1)...(19): siRNA sense strand
ggucauggccaacaaacug

SEQ ID NO: 858077 - RNA, 19 nt, Homo sapiens
  misc_RNA (1)...(19): siRNA sense strand
aagagaagcaugaaugguu

SEQ ID NO: 858078 - RNA, 19 nt, Homo sapiens
  misc_RNA (1)...(19): siRNA sense strand
agauucagcugauggacuu

SEQ ID NO: 858079 - RNA, 19 nt, Homo sapiens
  misc_RNA (1)...(19): siRNA sense strand
uauuaauggugaccuaguu

SEQ ID NO: 858080 - RNA, 19 nt, Homo sapiens
  misc_RNA (1)...(19): siRNA sense strand
aaacaucgacuuaugaaac

SEQ ID NO: 858081 - RNA, 19 nt, Homo sapiens
  misc_RNA (1)...(19): siRNA sense strand
caaacugauagacugguua

SEQ ID NO: 858082 - RNA, 19 nt, Homo sapiens
  misc_RNA (1)...(19): siRNA sense strand
uuaaggaccuacaaaucug

SEQ ID NO: 858083 - RNA, 19 nt, Homo sapiens
  misc_RNA (1)...(19): siRNA sense strand
ucaaaggguguaagauuau

SEQ ID NO: 858084 - RNA, 19 nt, Homo sapiens
  misc_RNA (1)...(19): siRNA sense strand
ugcaggacgugauuucaaa

SEQ ID NO: 858085 - RNA, 19 nt, Homo sapiens
  misc_RNA (1)...(19): siRNA sense strand
agagaaaacugacuacguu

SEQ ID NO: 858086 - RNA, 19 nt, Homo sapiens
  misc_RNA (1)...(19): siRNA sense strand
gccaagagagacagugaaa

SEQ ID NO: 858087 - RNA, 19 nt, Homo sapiens
  misc_RNA (1)...(19): siRNA sense strand
ugaaacaucgacuuaugaa

SEQ ID NO: 858088 - RNA, 19 nt, Homo sapiens
  misc_RNA (1)...(19): siRNA sense strand
gagauugccgcaccagaga

SEQ ID NO: 858089 - RNA, 19 nt, Homo sapiens
  misc_RNA (1)...(19): siRNA sense strand
aaacugauagacugguuaa

SEQ ID NO: 858090 - RNA, 19 nt, Homo sapiens
  misc_RNA (1)...(19): siRNA sense strand
ggaagacagcacugcauuc

SEQ ID NO: 858091 - RNA, 19 nt, Homo sapiens
  misc_RNA (1)...(19): siRNA sense strand
gaacaggaauggaaauuua

SEQ ID NO: 858092 - RNA, 19 nt, Homo sapiens
  misc_RNA (1)...(19): siRNA sense strand
gaaagaacaugcugaauug

SEQ ID NO: 858093 - RNA, 19 nt, Homo sapiens
  misc_RNA (1)...(19): siRNA sense strand
gagaagagcucugcuauga

SEQ ID NO: 858094 - RNA, 19 nt, Homo sapiens
  misc_RNA (1)...(19): siRNA sense strand
gaacaaggauucccgagaa

SEQ ID NO: 858095 - RNA, 19 nt, Homo sapiens
  misc_RNA (1)...(19): siRNA sense strand
gaaguuacgugaaaucauu

SEQ ID NO: 858096 - RNA, 19 nt, Homo sapiens
  misc_RNA (1)...(19): siRNA sense strand
gaacgcaccuuauaguaaa

SEQ ID NO: 858097 - RNA, 19 nt, Homo sapiens
  misc_RNA (1)...(19): siRNA sense strand
gcaauggucuuucuggaua

SEQ ID NO: 858098 - RNA, 19 nt, Homo sapiens
  misc_RNA (1)...(19): siRNA sense strand
ggaaugaacuucugaaaca

SEQ ID NO: 858099 - RNA, 19 nt, Homo sapiens
  misc_RNA (1)...(19): siRNA sense strand
guacagaugucaaaugauu

SEQ ID NO: 858100 - RNA, 19 nt, Homo sapiens
  misc_RNA (1)...(19): siRNA sense strand
gaacugaacgcaccuuaua

SEQ ID NO: 858101 - RNA, 19 nt, Homo sapiens
  misc_RNA (1)...(19): siRNA sense strand
gaacuuaaauacugaggaa

SEQ ID NO: 858102 - RNA, 19 nt, Homo sapiens
  misc_RNA (1)...(19): siRNA sense strand
gaaguacugucuccaaauu

SEQ ID NO: 858103 - RNA, 19 nt, Homo sapiens
  misc_RNA (1)...(19): siRNA sense strand
gaacacagguuucuuggau

SEQ ID NO: 858104 - RNA, 19 nt, Homo sapiens
  misc_RNA (1)...(19): siRNA sense strand
ccacagagcuugccaguuc

SEQ ID NO: 858105 - RNA, 19 nt, Homo sapiens
  misc_RNA (1)...(19): siRNA sense strand
caaccuggaugaccucuua

SEQ ID NO: 858106 - RNA, 19 nt, Homo sapiens
  misc_RNA (1)...(19): siRNA sense strand
gcaacaacaucuccacuuu

SEQ ID NO: 858107 - RNA, 19 nt, Homo sapiens
  misc_RNA (1)...(19): siRNA sense strand
gaacuagaccuuccaauug

SEQ ID NO: 858108 - RNA, 19 nt, Homo sapiens
  misc_RNA (1)...(19): siRNA sense strand
gaaacaacgucugauaauu

SEQ ID NO: 858109 - RNA, 19 nt, Homo sapiens
  misc_RNA (1)...(19): siRNA sense strand
uuacagagccucacaguua

SEQ ID NO: 858110 - RNA, 19 nt, Homo sapiens
  misc_RNA (1)...(19): siRNA sense strand
aaacacagaugaugacauu

SEQ ID NO: 858111 - RNA, 19 nt, Homo sapiens
  misc_RNA (1)...(19): siRNA sense strand
gaucaggucuuauaucugu

SEQ ID NO: 858112 - RNA, 19 nt, Homo sapiens
  misc_RNA (1)...(19): siRNA sense strand
gaagaugacuguacaaagg

SEQ ID NO: 858113 - RNA, 19 nt, Homo sapiens
  misc_RNA (1)...(19): siRNA sense strand
ugaaggaacuggauguuaa

SEQ ID NO: 858114 - RNA, 19 nt, Homo sapiens
  misc_RNA (1)...(19): siRNA sense strand
ggagguagauagacaaaga

SEQ ID NO: 858115 - RNA, 19 nt, Homo sapiens
  misc_RNA (1)...(19): siRNA sense strand
gaagauuacuugccuguuc

SEQ ID NO: 858116 - RNA, 19 nt, Homo sapiens
  misc_RNA (1)...(19): siRNA sense strand
gaucccagcucucguauug

SEQ ID NO: 858117 - RNA, 19 nt, Homo sapiens
  misc_RNA (1)...(19): siRNA sense strand
gcaguuaccagauacuuua

SEQ ID NO: 858118 - RNA, 19 nt, Homo sapiens
  misc_RNA (1)...(19): siRNA sense strand
gugaauggcagaacaauua

SEQ ID NO: 858119 - RNA, 19 nt, Homo sapiens
  misc_RNA (1)...(19): siRNA sense strand
ugaagaaggugauggauug

SEQ ID NO: 858120 - RNA, 19 nt, Homo sapiens
  misc_RNA (1)...(19): siRNA sense strand
ggaaugaaauggaagaagu

SEQ ID NO: 858121 - RNA, 19 nt, Homo sapiens
  misc_RNA (1)...(19): siRNA sense strand
ggucacagauggagcaauu

SEQ ID NO: 858122 - RNA, 19 nt, Homo sapiens
  misc_RNA (1)...(19): siRNA sense strand
caacagacguaugcaaauu

SEQ ID NO: 858123 - RNA, 19 nt, Homo sapiens
  misc_RNA (1)...(19): siRNA sense strand
aaagcaagcucacaagaaa

SEQ ID NO: 858124 - RNA, 19 nt, Homo sapiens
  misc_RNA (1)...(19): siRNA sense strand
ccaaucaugugucaaguuu

SEQ ID NO: 858125 - RNA, 19 nt, Homo sapiens
  misc_RNA (1)...(19): siRNA sense strand
ggagaggaaugaaauggaa

SEQ ID NO: 858126 - RNA, 19 nt, Homo sapiens
  misc_RNA (1)...(19): siRNA sense strand
ccaggucaaucaacaguua

SEQ ID NO: 858127 - RNA, 19 nt, Homo sapiens
  misc_RNA (1)...(19): siRNA sense strand
gcaguuaccuugcagagau

SEQ ID NO: 858128 - RNA, 19 nt, Homo sapiens
  misc_RNA (1)...(19): siRNA sense strand
ccagcuauguacagaauua

SEQ ID NO: 858129 - RNA, 19 nt, Homo sapiens
  misc_RNA (1)...(19): siRNA sense strand
gguaggcccuccuucauuu

SEQ ID NO: 858130 - RNA, 19 nt, Homo sapiens
  misc_RNA (1)...(19): siRNA sense strand
gaagacuccugcuguguga

SEQ ID NO: 858131 - RNA, 19 nt, Homo sapiens
  misc_RNA (1)...(19): siRNA sense strand
gcaauuacagauccuauaa

SEQ ID NO: 858132 - RNA, 19 nt, Homo sapiens
  misc_RNA (1)...(19): siRNA sense strand
ggaccuagauaugcuguuu

SEQ ID NO: 858133 - RNA, 19 nt, Homo sapiens
  misc_RNA (1)...(19): siRNA sense strand
caagguauaucaaccauuc

SEQ ID NO: 858134 - RNA, 19 nt, Homo sapiens
  misc_RNA (1)...(19): siRNA sense strand
ggagaggccuacaaaugaa

SEQ ID NO: 858135 - RNA, 19 nt, Homo sapiens
  misc_RNA (1)...(19): siRNA sense strand
ccaaagcauuucaucagua

SEQ ID NO: 858136 - RNA, 19 nt, Homo sapiens
  misc_RNA (1)...(19): siRNA sense strand
aauaaacucuuguggcaua

SEQ ID NO: 858137 - RNA, 19 nt, Homo sapiens
  misc_RNA (1)...(19): siRNA sense strand
caagaaagcugggcgugaa

SEQ ID NO: 858138 - RNA, 19 nt, Homo sapiens
  misc_RNA (1)...(19): siRNA sense strand
gaagagcucugcuaugacu

SEQ ID NO: 858139 - RNA, 19 nt, Homo sapiens
  misc_RNA (1)...(19): siRNA sense strand
gcuaagagcuguccauggu

SEQ ID NO: 858140 - RNA, 19 nt, Homo sapiens
  misc_RNA (1)...(19): siRNA sense strand
gacaagcucuccauggaaa

SEQ ID NO: 858141 - RNA, 19 nt, Homo sapiens
  misc_RNA (1)...(19): siRNA sense strand
caacaucuguaccgucuga

SEQ ID NO: 858142 - RNA, 19 nt, Homo sapiens
  misc_RNA (1)...(19): siRNA sense strand
gcaccaacauuuaucacuu

SEQ ID NO: 858143 - RNA, 19 nt, Homo sapiens
  misc_RNA (1)...(19): siRNA sense strand
gagaacaaacugcccaaua

SEQ ID NO: 858144 - RNA, 19 nt, Homo sapiens
  misc_RNA (1)...(19): siRNA sense strand
gcagacaguucccaaagga

SEQ ID NO: 858145 - RNA, 19 nt, Homo sapiens
  misc_RNA (1)...(19): siRNA sense strand
gagauacuccugacaguuu

SEQ ID NO: 858146 - RNA, 19 nt, Homo sapiens
  misc_RNA (1)...(19): siRNA sense strand
gaaacaagcuauguacucu

SEQ ID NO: 858147 - RNA, 19 nt, Homo sapiens
  misc_RNA (1)...(19): siRNA sense strand
ccaguucucuacaccaaua

SEQ ID NO: 858148 - RNA, 19 nt, Homo sapiens
  misc_RNA (1)...(19): siRNA sense strand
gaaaagauguugaagacuu

SEQ ID NO: 858149 - RNA, 19 nt, Homo sapiens
  misc_RNA (1)...(19): siRNA sense strand
gaagcggacugggaacuuu

SEQ ID NO: 858150 - RNA, 19 nt, Homo sapiens
  misc_RNA (1)...(19): siRNA sense strand
guaguaagguagaaggaaa

SEQ ID NO: 858151 - RNA, 19 nt, Homo sapiens
  misc_RNA (1)...(19): siRNA sense strand
guaugcaaauucagaagua

SEQ ID NO: 858152 - RNA, 19 nt, Homo sapiens
  misc_RNA (1)...(19): siRNA sense strand
guacagaauuagagaacaa

SEQ ID NO: 858153 - RNA, 19 nt, Homo sapiens
  misc_RNA (1)...(19): siRNA sense strand
ggccaagauucuacuauaa

SEQ ID NO: 858154 - RNA, 19 nt, Homo sapiens
  misc_RNA (1)...(19): siRNA sense strand
gaacuugacaugggagaua

SEQ ID NO: 858155 - RNA, 19 nt, Homo sapiens
  misc_RNA (1)...(19): siRNA sense strand
uaaagugguucuuagcaaa

SEQ ID NO: 858156 - RNA, 19 nt, Homo sapiens
  misc_RNA (1)...(19): siRNA sense strand
gaaaagagaugaugaugca

SEQ ID NO: 858157 - RNA, 19 nt, Homo sapiens
  misc_RNA (1)...(19): siRNA sense strand
ggccuaauccuccaaauuu

SEQ ID NO: 858158 - RNA, 19 nt, Homo sapiens
  misc_RNA (1)...(19): siRNA sense strand
gauaaacauucaccacaga

SEQ ID NO: 858159 - RNA, 19 nt, Homo sapiens
  misc_RNA (1)...(19): siRNA sense strand
agacuuagaugaugaagau

SEQ ID NO: 858160 - RNA, 19 nt, Homo sapiens
  misc_RNA (1)...(19): siRNA sense strand
ccucauggauuuagauuug

SEQ ID NO: 858161 - RNA, 19 nt, Homo sapiens
  misc_RNA (1)...(19): siRNA sense strand
uaacaacucuuggacauca

SEQ ID NO: 858162 - RNA, 19 nt, Homo sapiens
  misc_RNA (1)...(19): siRNA sense strand
aaggagaacuuauggauug

SEQ ID NO: 858163 - RNA, 19 nt, Homo sapiens
  misc_RNA (1)...(19): siRNA sense strand
gggaagcuguggaugauga

SEQ ID NO: 858164 - RNA, 19 nt, Homo sapiens
  misc_RNA (1)...(19): siRNA sense strand
gaagugaaaccaagaaaca

SEQ ID NO: 858165 - RNA, 19 nt, Homo sapiens
  misc_RNA (1)...(19): siRNA sense strand
uaaggaacguuuacgagaa

SEQ ID NO: 858166 - RNA, 19 nt, Homo sapiens
  misc_RNA (1)...(19): siRNA sense strand
ggauuuagauuuggauuuc

SEQ ID NO: 858167 - RNA, 19 nt, Homo sapiens
  misc_RNA (1)...(19): siRNA sense strand
ccaagaccaucuacacaaa

SEQ ID NO: 858168 - RNA, 19 nt, Homo sapiens
  misc_RNA (1)...(19): siRNA sense strand
caacaucucaggacccaua

SEQ ID NO: 858169 - RNA, 19 nt, Homo sapiens
  misc_RNA (1)...(19): siRNA sense strand
gcacagucauuccauaaag

SEQ ID NO: 858170 - RNA, 19 nt, Homo sapiens
  misc_RNA (1)...(19): siRNA sense strand
gcaaagagaaucagaacau

SEQ ID NO: 858171 - RNA, 19 nt, Homo sapiens
  misc_RNA (1)...(19): siRNA sense strand
gcuggugccuuaauaaaug

SEQ ID NO: 858172 - RNA, 19 nt, Homo sapiens
  misc_RNA (1)...(19): siRNA sense strand
ggaaugacaucaaaacuga

SEQ ID NO: 858173 - RNA, 19 nt, Homo sapiens
  misc_RNA (1)...(19): siRNA sense strand
gcagggacauggaaaucuu

SEQ ID NO: 858174 - RNA, 19 nt, Homo sapiens
  misc_RNA (1)...(19): siRNA sense strand
cgacuuaccuugugauuuu

SEQ ID NO: 858175 - RNA, 19 nt, Homo sapiens
  misc_RNA (1)...(19): siRNA sense strand
cagaacaacucaagcaugu

SEQ ID NO: 858176 - RNA, 19 nt, Homo sapiens
  misc_RNA (1)...(19): siRNA sense strand
ucaaagacuuagaugauga

SEQ ID NO: 858177 - RNA, 19 nt, Homo sapiens
  misc_RNA (1)...(19): siRNA sense strand
ccaagcagauacagagaaa

SEQ ID NO: 858178 - RNA, 19 nt, Homo sapiens
  misc_RNA (1)...(19): siRNA sense strand
ucaaggcgauugucuguug

SEQ ID NO: 858179 - RNA, 19 nt, Homo sapiens
  misc_RNA (1)...(19): siRNA sense strand
cagaugauguguuuguaaa

SEQ ID NO: 858180 - RNA, 19 nt, Homo sapiens
  misc_RNA (1)...(19): siRNA sense strand
gauugucuguugacccuua

SEQ ID NO: 858181 - RNA, 19 nt, Homo sapiens
  misc_RNA (1)...(19): siRNA sense strand
gaaauccucucauggaacu

SEQ ID NO: 858182 - RNA, 19 nt, Homo sapiens
  misc_RNA (1)...(19): siRNA sense strand
gaggagaggccuacaaaug

SEQ ID NO: 858183 - RNA, 19 nt, Homo sapiens
  misc_RNA (1)...(19): siRNA sense strand
ugcaaacccucccagauua

SEQ ID NO: 858184 - RNA, 19 nt, Homo sapiens
  misc_RNA (1)...(19): siRNA sense strand
gauaaugccaugaauucua

SEQ ID NO: 858185 - RNA, 19 nt, Homo sapiens
  misc_RNA (1)...(19): siRNA sense strand
caaaugauccauauaguca

SEQ ID NO: 858186 - RNA, 19 nt, Homo sapiens
  misc_RNA (1)...(19): siRNA sense strand
ggauauguguguaguuugu

SEQ ID NO: 858187 - RNA, 19 nt, Homo sapiens
  misc_RNA (1)...(19): siRNA sense strand
cggcagaaguuacgugaaa

SEQ ID NO: 858188 - RNA, 19 nt, Homo sapiens
  misc_RNA (1)...(19): siRNA sense strand
aaggauaccugacucauau

SEQ ID NO: 858189 - RNA, 19 nt, Homo sapiens
  misc_RNA (1)...(19): siRNA sense strand
gaugaaaacugaauggaaa

SEQ ID NO: 858190 - RNA, 19 nt, Homo sapiens
  misc_RNA (1)...(19): siRNA sense strand
gaagaugaccagcacaaga

SEQ ID NO: 858191 - RNA, 19 nt, Homo sapiens
  misc_RNA (1)...(19): siRNA sense strand
gaacaggaauggaaauuua

SEQ ID NO: 858192 - RNA, 19 nt, Homo sapiens
  misc_RNA (1)...(19): siRNA sense strand
gaaagaacaugcugaauug

SEQ ID NO: 858193 - RNA, 19 nt, Homo sapiens
  misc_RNA (1)...(19): siRNA sense strand
aaucggagcuguuguauua

SEQ ID NO: 858194 - RNA, 19 nt, Homo sapiens
  misc_RNA (1)...(19): siRNA sense strand
gagaagagcucugcuauga

SEQ ID NO: 858195 - RNA, 19 nt, Homo sapiens
  misc_RNA (1)...(19): siRNA sense strand
gaacaaggauucccgagaa

SEQ ID NO: 858196 - RNA, 19 nt, Homo sapiens
  misc_RNA (1)...(19): siRNA sense strand
gaaguuacgugaaaucauu

SEQ ID NO: 858197 - RNA, 19 nt, Homo sapiens
  misc_RNA (1)...(19): siRNA sense strand
gaacgcaccuuauaguaaa

SEQ ID NO: 858198 - RNA, 19 nt, Homo sapiens
  misc_RNA (1)...(19): siRNA sense strand
gcaauggucuuucuggaua

SEQ ID NO: 858199 - RNA, 19 nt, Homo sapiens
  misc_RNA (1)...(19): siRNA sense strand
ggaaugaacuucugaaaca

SEQ ID NO: 858200 - RNA, 19 nt, Homo sapiens
  misc_RNA (1)...(19): siRNA sense strand
guacagaugucaaaugauu

SEQ ID NO: 858201 - RNA, 19 nt, Homo sapiens
  misc_RNA (1)...(19): siRNA sense strand
gaacugaacgcaccuuaua

SEQ ID NO: 858202 - RNA, 19 nt, Homo sapiens
  misc_RNA (1)...(19): siRNA sense strand
gaacuuaaauacugaggaa

SEQ ID NO: 858203 - RNA, 19 nt, Homo sapiens
  misc_RNA (1)...(19): siRNA sense strand
gaaguacugucuccaaauu

SEQ ID NO: 858204 - RNA, 19 nt, Homo sapiens
  misc_RNA (1)...(19): siRNA sense strand
gaacacagguuucuuggau

SEQ ID NO: 858205 - RNA, 19 nt, Homo sapiens
  misc_RNA (1)...(19): siRNA sense strand
ccacagagcuugccaguuc

SEQ ID NO: 858206 - RNA, 19 nt, Homo sapiens
  misc_RNA (1)...(19): siRNA sense strand
caaccuggaugaccucuua

SEQ ID NO: 858207 - RNA, 19 nt, Homo sapiens
  misc_RNA (1)...(19): siRNA sense strand
gcaacaacaucuccacuuu

SEQ ID NO: 858208 - RNA, 19 nt, Homo sapiens
  misc_RNA (1)...(19): siRNA sense strand
gaacuagaccuuccaauug

SEQ ID NO: 858209 - RNA, 19 nt, Homo sapiens
  misc_RNA (1)...(19): siRNA sense strand
gaaacaacgucugauaauu

SEQ ID NO: 858210 - RNA, 19 nt, Homo sapiens
  misc_RNA (1)...(19): siRNA sense strand
uuacagagccucacaguua

SEQ ID NO: 858211 - RNA, 19 nt, Homo sapiens
  misc_RNA (1)...(19): siRNA sense strand
aaacacagaugaugacauu

SEQ ID NO: 858212 - RNA, 19 nt, Homo sapiens
  misc_RNA (1)...(19): siRNA sense strand
gaucaggucuuauaucugu

SEQ ID NO: 858213 - RNA, 19 nt, Homo sapiens
  misc_RNA (1)...(19): siRNA sense strand
gaagaugacuguacaaagg

SEQ ID NO: 858214 - RNA, 19 nt, Homo sapiens
  misc_RNA (1)...(19): siRNA sense strand
ugaaggaacuggauguuaa

SEQ ID NO: 858215 - RNA, 19 nt, Homo sapiens
  misc_RNA (1)...(19): siRNA sense strand
ggagguagauagacaaaga

SEQ ID NO: 858216 - RNA, 19 nt, Homo sapiens
  misc_RNA (1)...(19): siRNA sense strand
gaagauuacuugccuguuc

SEQ ID NO: 858217 - RNA, 19 nt, Homo sapiens
  misc_RNA (1)...(19): siRNA sense strand
gaucccagcucucguauug

SEQ ID NO: 858218 - RNA, 19 nt, Homo sapiens
  misc_RNA (1)...(19): siRNA sense strand
gcaguuaccagauacuuua

SEQ ID NO: 858219 - RNA, 19 nt, Homo sapiens
  misc_RNA (1)...(19): siRNA sense strand
gugaauggcagaacaauua

SEQ ID NO: 858220 - RNA, 19 nt, Homo sapiens
  misc_RNA (1)...(19): siRNA sense strand
ugaagaaggugauggauug

SEQ ID NO: 858221 - RNA, 19 nt, Homo sapiens
  misc_RNA (1)...(19): siRNA sense strand
ggaaugaaauggaagaagu

SEQ ID NO: 858222 - RNA, 19 nt, Homo sapiens
  misc_RNA (1)...(19): siRNA sense strand
ggucacagauggagcaauu

SEQ ID NO: 858223 - RNA, 19 nt, Homo sapiens
  misc_RNA (1)...(19): siRNA sense strand
caacagacguaugcaaauu

SEQ ID NO: 858224 - RNA, 19 nt, Homo sapiens
  misc_RNA (1)...(19): siRNA sense strand
aaagcaagcucacaagaaa

SEQ ID NO: 858225 - RNA, 19 nt, Homo sapiens
  misc_RNA (1)...(19): siRNA sense strand
ccaaucaugugucaaguuu

SEQ ID NO: 858226 - RNA, 19 nt, Homo sapiens
  misc_RNA (1)...(19): siRNA sense strand
ggagaggaaugaaauggaa

SEQ ID NO: 858227 - RNA, 19 nt, Homo sapiens
  misc_RNA (1)...(19): siRNA sense strand
ccaggucaaucaacaguua

SEQ ID NO: 858228 - RNA, 19 nt, Homo sapiens
  misc_RNA (1)...(19): siRNA sense strand
gcaguuaccuugcagagau

SEQ ID NO: 858229 - RNA, 19 nt, Homo sapiens
  misc_RNA (1)...(19): siRNA sense strand
ccagcuauguacagaauua

SEQ ID NO: 858230 - RNA, 19 nt, Homo sapiens
  misc_RNA (1)...(19): siRNA sense strand
gguaggcccuccuucauuu

SEQ ID NO: 858231 - RNA, 19 nt, Homo sapiens
  misc_RNA (1)...(19): siRNA sense strand
gaagacuccugcuguguga

SEQ ID NO: 858232 - RNA, 19 nt, Homo sapiens
  misc_RNA (1)...(19): siRNA sense strand
gcaauuacagauccuauaa

SEQ ID NO: 858233 - RNA, 19 nt, Homo sapiens
  misc_RNA (1)...(19): siRNA sense strand
ggaccuagauaugcuguuu

SEQ ID NO: 858234 - RNA, 19 nt, Homo sapiens
  misc_RNA (1)...(19): siRNA sense strand
caagguauaucaaccauuc

SEQ ID NO: 858235 - RNA, 19 nt, Homo sapiens
  misc_RNA (1)...(19): siRNA sense strand
ggagaggccuacaaaugaa

SEQ ID NO: 858236 - RNA, 19 nt, Homo sapiens
  misc_RNA (1)...(19): siRNA sense strand
ccaaagcauuucaucagua

SEQ ID NO: 858237 - RNA, 19 nt, Homo sapiens
  misc_RNA (1)...(19): siRNA sense strand
aauaaacucuuguggcaua

SEQ ID NO: 858238 - RNA, 19 nt, Homo sapiens
  misc_RNA (1)...(19): siRNA sense strand
caagaaagcugggcgugaa

SEQ ID NO: 858239 - RNA, 19 nt, Homo sapiens
  misc_RNA (1)...(19): siRNA sense strand
gaagagcucugcuaugacu

SEQ ID NO: 858240 - RNA, 19 nt, Homo sapiens
  misc_RNA (1)...(19): siRNA sense strand
gcuaagagcuguccauggu

SEQ ID NO: 858241 - RNA, 19 nt, Homo sapiens
  misc_RNA (1)...(19): siRNA sense strand
gacaagcucuccauggaaa

SEQ ID NO: 858242 - RNA, 19 nt, Homo sapiens
  misc_RNA (1)...(19): siRNA sense strand
caacaucuguaccgucuga

SEQ ID NO: 858243 - RNA, 19 nt, Homo sapiens
  misc_RNA (1)...(19): siRNA sense strand
gcaccaacauuuaucacuu

SEQ ID NO: 858244 - RNA, 19 nt, Homo sapiens
  misc_RNA (1)...(19): siRNA sense strand
gagaacaaacugcccaaua

SEQ ID NO: 858245 - RNA, 19 nt, Homo sapiens
  misc_RNA (1)...(19): siRNA sense strand
gcagacaguucccaaagga

SEQ ID NO: 858246 - RNA, 19 nt, Homo sapiens
  misc_RNA (1)...(19): siRNA sense strand
gagauacuccugacaguuu

SEQ ID NO: 858247 - RNA, 19 nt, Homo sapiens
  misc_RNA (1)...(19): siRNA sense strand
gaaacaagcuauguacucu

SEQ ID NO: 858248 - RNA, 19 nt, Homo sapiens
  misc_RNA (1)...(19): siRNA sense strand
ccaguucucuacaccaaua

SEQ ID NO: 858249 - RNA, 19 nt, Homo sapiens
  misc_RNA (1)...(19): siRNA sense strand
gaaaagauguugaagacuu

SEQ ID NO: 858250 - RNA, 19 nt, Homo sapiens
  misc_RNA (1)...(19): siRNA sense strand
gaagcggacugggaacuuu

SEQ ID NO: 858251 - RNA, 19 nt, Homo sapiens
  misc_RNA (1)...(19): siRNA sense strand
guaguaagguagaaggaaa

SEQ ID NO: 858252 - RNA, 19 nt, Homo sapiens
  misc_RNA (1)...(19): siRNA sense strand
guaugcaaauucagaagua

SEQ ID NO: 858253 - RNA, 19 nt, Homo sapiens
  misc_RNA (1)...(19): siRNA sense strand
guacagaauuagagaacaa

SEQ ID NO: 858254 - RNA, 19 nt, Homo sapiens
  misc_RNA (1)...(19): siRNA sense strand
ggccaagauucuacuauaa

SEQ ID NO: 858255 - RNA, 19 nt, Homo sapiens
  misc_RNA (1)...(19): siRNA sense strand
gaacuugacaugggagaua

SEQ ID NO: 858256 - RNA, 19 nt, Homo sapiens
  misc_RNA (1)...(19): siRNA sense strand
uaaagugguucuuagcaaa

SEQ ID NO: 858257 - RNA, 19 nt, Homo sapiens
  misc_RNA (1)...(19): siRNA sense strand
gaaaagagaugaugaugca

SEQ ID NO: 858258 - RNA, 19 nt, Homo sapiens
  misc_RNA (1)...(19): siRNA sense strand
ggccuaauccuccaaauuu

SEQ ID NO: 858259 - RNA, 19 nt, Homo sapiens
  misc_RNA (1)...(19): siRNA sense strand
gauaaacauucaccacaga

SEQ ID NO: 858260 - RNA, 19 nt, Homo sapiens
  misc_RNA (1)...(19): siRNA sense strand
agacuuagaugaugaagau

SEQ ID NO: 858261 - RNA, 19 nt, Homo sapiens
  misc_RNA (1)...(19): siRNA sense strand
ccucauggauuuagauuug

SEQ ID NO: 858262 - RNA, 19 nt, Homo sapiens
  misc_RNA (1)...(19): siRNA sense strand
uaacaacucuuggacauca

SEQ ID NO: 858263 - RNA, 19 nt, Homo sapiens
  misc_RNA (1)...(19): siRNA sense strand
aaggagaacuuauggauug

SEQ ID NO: 858264 - RNA, 19 nt, Homo sapiens
  misc_RNA (1)...(19): siRNA sense strand
gggaagcuguggaugauga

SEQ ID NO: 858265 - RNA, 19 nt, Homo sapiens
  misc_RNA (1)...(19): siRNA sense strand
gaagugaaaccaagaaaca

SEQ ID NO: 858266 - RNA, 19 nt, Homo sapiens
  misc_RNA (1)...(19): siRNA sense strand
uaaggaacguuuacgagaa

SEQ ID NO: 858267 - RNA, 19 nt, Homo sapiens
  misc_RNA (1)...(19): siRNA sense strand
ggauuuagauuuggauuuc

SEQ ID NO: 858268 - RNA, 19 nt, Homo sapiens
  misc_RNA (1)...(19): siRNA sense strand
ccaagaccaucuacacaaa

SEQ ID NO: 858269 - RNA, 19 nt, Homo sapiens
  misc_RNA (1)...(19): siRNA sense strand
caacaucucaggacccaua

SEQ ID NO: 858270 - RNA, 19 nt, Homo sapiens
  misc_RNA (1)...(19): siRNA sense strand
gcacagucauuccauaaag

SEQ ID NO: 858271 - RNA, 19 nt, Homo sapiens
  misc_RNA (1)...(19): siRNA sense strand
caaauaaggaugaugaaga

SEQ ID NO: 858272 - RNA, 19 nt, Homo sapiens
  misc_RNA (1)...(19): siRNA sense strand
gcuggugccuuaauaaaug

SEQ ID NO: 858273 - RNA, 19 nt, Homo sapiens
  misc_RNA (1)...(19): siRNA sense strand
ggaaugacaucaaaacuga

SEQ ID NO: 858274 - RNA, 19 nt, Homo sapiens
  misc_RNA (1)...(19): siRNA sense strand
gcagggacauggaaaucuu

SEQ ID NO: 858275 - RNA, 19 nt, Homo sapiens
  misc_RNA (1)...(19): siRNA sense strand
cgacuuaccuugugauuuu

SEQ ID NO: 858276 - RNA, 19 nt, Homo sapiens
  misc_RNA (1)...(19): siRNA sense strand
cagaacaacucaagcaugu

SEQ ID NO: 858277 - RNA, 19 nt, Homo sapiens
  misc_RNA (1)...(19): siRNA sense strand
ucaaagacuuagaugauga

SEQ ID NO: 858278 - RNA, 19 nt, Homo sapiens
  misc_RNA (1)...(19): siRNA sense strand
ccaagcagauacagagaaa

SEQ ID NO: 858279 - RNA, 19 nt, Homo sapiens
  misc_RNA (1)...(19): siRNA sense strand
ucaaggcgauugucuguug

SEQ ID NO: 858280 - RNA, 19 nt, Homo sapiens
  misc_RNA (1)...(19): siRNA sense strand
cagaugauguguuuguaaa

SEQ ID NO: 858281 - RNA, 19 nt, Homo sapiens
  misc_RNA (1)...(19): siRNA sense strand
gcaaagagaaucagaacau

SEQ ID NO: 858282 - RNA, 19 nt, Homo sapiens
  misc_RNA (1)...(19): siRNA sense strand
gauugucuguugacccuua

SEQ ID NO: 858283 - RNA, 19 nt, Homo sapiens
  misc_RNA (1)...(19): siRNA sense strand
gaaauccucucauggaacu

SEQ ID NO: 858284 - RNA, 19 nt, Homo sapiens
  misc_RNA (1)...(19): siRNA sense strand
gaggagaggccuacaaaug

SEQ ID NO: 858285 - RNA, 19 nt, Homo sapiens
  misc_RNA (1)...(19): siRNA sense strand
ugcaaacccucccagauua

SEQ ID NO: 858286 - RNA, 19 nt, Homo sapiens
  misc_RNA (1)...(19): siRNA sense strand
gauaaugccaugaauucua

SEQ ID NO: 858287 - RNA, 19 nt, Homo sapiens
  misc_RNA (1)...(19): siRNA sense strand
caaaugauccauauaguca

SEQ ID NO: 858288 - RNA, 19 nt, Homo sapiens
  misc_RNA (1)...(19): siRNA sense strand
ggauauguguguaguuugu

SEQ ID NO: 858289 - RNA, 19 nt, Homo sapiens
  misc_RNA (1)...(19): siRNA sense strand
cggcagaaguuacgugaaa

SEQ ID NO: 858290 - RNA, 19 nt, Homo sapiens
  misc_RNA (1)...(19): siRNA sense strand
aaggauaccugacucauau

SEQ ID NO: 858291 - RNA, 19 nt, Homo sapiens
  misc_RNA (1)...(19): siRNA sense strand
gaacaaugguccaggauaa

SEQ ID NO: 858292 - RNA, 19 nt, Homo sapiens
  misc_RNA (1)...(19): siRNA sense strand
gcucagauccacauaauaa

SEQ ID NO: 858293 - RNA, 19 nt, Homo sapiens
  misc_RNA (1)...(19): siRNA sense strand
caaggaaccuggcgucuau

SEQ ID NO: 858294 - RNA, 19 nt, Homo sapiens
  misc_RNA (1)...(19): siRNA sense strand
gcaccgaggagucuacuua

SEQ ID NO: 858295 - RNA, 19 nt, Homo sapiens
  misc_RNA (1)...(19): siRNA sense strand
gaugggacauacuacauuu

SEQ ID NO: 858296 - RNA, 19 nt, Homo sapiens
  misc_RNA (1)...(19): siRNA sense strand
agugaaggcuuuaaccaua

SEQ ID NO: 858297 - RNA, 19 nt, Homo sapiens
  misc_RNA (1)...(19): siRNA sense strand
ggacauacuacauuuccua

SEQ ID NO: 858298 - RNA, 19 nt, Homo sapiens
  misc_RNA (1)...(19): siRNA sense strand
gugcagggcucgccauuca

SEQ ID NO: 858299 - RNA, 19 nt, Homo sapiens
  misc_RNA (1)...(19): siRNA sense strand
gaaagacagcccagucaga

SEQ ID NO: 858300 - RNA, 19 nt, Homo sapiens
  misc_RNA (1)...(19): siRNA sense strand
gcucauaggcggcagaaga

SEQ ID NO: 858301 - RNA, 19 nt, Homo sapiens
  misc_RNA (1)...(19): siRNA sense strand
agaaacagacggccucuuu

SEQ ID NO: 858302 - RNA, 19 nt, Homo sapiens
  misc_RNA (1)...(19): siRNA sense strand
ccaagaggguggugguaga

SEQ ID NO: 858303 - RNA, 19 nt, Homo sapiens
  misc_RNA (1)...(19): siRNA sense strand
uaacaaggaugggacauac

SEQ ID NO: 858304 - RNA, 19 nt, Homo sapiens
  misc_RNA (1)...(19): siRNA sense strand
ugaagcagcuggaagacau

SEQ ID NO: 858305 - RNA, 19 nt, Homo sapiens
  misc_RNA (1)...(19): siRNA sense strand
gaaccuggcgucuauacug

SEQ ID NO: 858306 - RNA, 19 nt, Homo sapiens
  misc_RNA (1)...(19): siRNA sense strand
gcaaugucauccacaagca

SEQ ID NO: 858307 - RNA, 19 nt, Homo sapiens
  misc_RNA (1)...(19): siRNA sense strand
gaacucaagccacgaaguc

SEQ ID NO: 858308 - RNA, 19 nt, Homo sapiens
  misc_RNA (1)...(19): siRNA sense strand
gcagaaggcccagcuggaa

SEQ ID NO: 858309 - RNA, 19 nt, Homo sapiens
  misc_RNA (1)...(19): siRNA sense strand
ggacugcacuugggaacuc

SEQ ID NO: 858310 - RNA, 19 nt, Homo sapiens
  misc_RNA (1)...(19): siRNA sense strand
gcucuugccuuguuugcau

SEQ ID NO: 858311 - RNA, 19 nt, Homo sapiens
  misc_RNA (1)...(19): siRNA sense strand
gaccagcggcucagacuug

SEQ ID NO: 858312 - RNA, 19 nt, Homo sapiens
  misc_RNA (1)...(19): siRNA sense strand
ggaugggacauacuacauu

SEQ ID NO: 858313 - RNA, 19 nt, Homo sapiens
  misc_RNA (1)...(19): siRNA sense strand
gcagaucggcauccuuugu

SEQ ID NO: 858314 - RNA, 19 nt, Homo sapiens
  misc_RNA (1)...(19): siRNA sense strand
guaagcaaacucacuagug

SEQ ID NO: 858315 - RNA, 19 nt, Homo sapiens
  misc_RNA (1)...(19): siRNA sense strand
gccguugucccuaaagaua

SEQ ID NO: 858316 - RNA, 19 nt, Homo sapiens
  misc_RNA (1)...(19): siRNA sense strand
guagagaagaggugucaga

SEQ ID NO: 858317 - RNA, 19 nt, Homo sapiens
  misc_RNA (1)...(19): siRNA sense strand
cagaggaacugaggcuguu

SEQ ID NO: 858318 - RNA, 19 nt, Homo sapiens
  misc_RNA (1)...(19): siRNA sense strand
gcuggagcccuucucagua

SEQ ID NO: 858319 - RNA, 19 nt, Homo sapiens
  misc_RNA (1)...(19): siRNA sense strand
ccagugccguggcuaugaa

SEQ ID NO: 858320 - RNA, 19 nt, Homo sapiens
  misc_RNA (1)...(19): siRNA sense strand
guccuggaguaaaugauaa

SEQ ID NO: 858321 - RNA, 19 nt, Homo sapiens
  misc_RNA (1)...(19): siRNA sense strand
uagcacccguccuggagua

SEQ ID NO: 858322 - RNA, 19 nt, Homo sapiens
  misc_RNA (1)...(19): siRNA sense strand
ggaguucaccgagcacuug

SEQ ID NO: 858323 - RNA, 19 nt, Homo sapiens
  misc_RNA (1)...(19): siRNA sense strand
gaagcagcuggaagacaua

SEQ ID NO: 858324 - RNA, 19 nt, Homo sapiens
  misc_RNA (1)...(19): siRNA sense strand
ccagcaaugucauccacaa

SEQ ID NO: 858325 - RNA, 19 nt, Homo sapiens
  misc_RNA (1)...(19): siRNA sense strand
gcccauggguggagugaag

SEQ ID NO: 858326 - RNA, 19 nt, Homo sapiens
  misc_RNA (1)...(19): siRNA sense strand
gugaaggcuuuaaccauag

SEQ ID NO: 858327 - RNA, 19 nt, Homo sapiens
  misc_RNA (1)...(19): siRNA sense strand
ggccgugaaugaugugaug

SEQ ID NO: 858328 - RNA, 19 nt, Homo sapiens
  misc_RNA (1)...(19): siRNA sense strand
aaacagacggccucuuuca

SEQ ID NO: 858329 - RNA, 19 nt, Homo sapiens
  misc_RNA (1)...(19): siRNA sense strand
ugccguggcuaugaaauuu

SEQ ID NO: 858330 - RNA, 19 nt, Homo sapiens
  misc_RNA (1)...(19): siRNA sense strand
acaaggaugggacauacua

SEQ ID NO: 858331 - RNA, 19 nt, Homo sapiens
  misc_RNA (1)...(19): siRNA sense strand
aaagacagcccagucagaa

SEQ ID NO: 858332 - RNA, 19 nt, Homo sapiens
  misc_RNA (1)...(19): siRNA sense strand
cggcauccuuuguccugua

SEQ ID NO: 858333 - RNA, 19 nt, Homo sapiens
  misc_RNA (1)...(19): siRNA sense strand
uggcucagauccacauaau

SEQ ID NO: 858334 - RNA, 19 nt, Homo sapiens
  misc_RNA (1)...(19): siRNA sense strand
ucgcagaucggcauccuuu

SEQ ID NO: 858335 - RNA, 19 nt, Homo sapiens
  misc_RNA (1)...(19): siRNA sense strand
ugugggagcuccucaaagg

SEQ ID NO: 858336 - RNA, 19 nt, Homo sapiens
  misc_RNA (1)...(19): siRNA sense strand
ugaaggcuuuaaccauaga

SEQ ID NO: 858337 - RNA, 19 nt, Homo sapiens
  misc_RNA (1)...(19): siRNA sense strand
uaaggaugccgcaggagaa

SEQ ID NO: 858338 - RNA, 19 nt, Homo sapiens
  misc_RNA (1)...(19): siRNA sense strand
agccaaauguguccuacaa

SEQ ID NO: 858339 - RNA, 19 nt, Homo sapiens
  misc_RNA (1)...(19): siRNA sense strand
guacgauuaauaccaaaga

SEQ ID NO: 858340 - RNA, 19 nt, Homo sapiens
  misc_RNA (1)...(19): siRNA sense strand
ucucggagggcuacauuaa

SEQ ID NO: 858341 - RNA, 19 nt, Homo sapiens
  misc_RNA (1)...(19): siRNA sense strand
gcaacgacagggaaguaga

SEQ ID NO: 858342 - RNA, 19 nt, Homo sapiens
  misc_RNA (1)...(19): siRNA sense strand
ccaaggaaccuggcgucua

SEQ ID NO: 858343 - RNA, 19 nt, Homo sapiens
  misc_RNA (1)...(19): siRNA sense strand
gagauccucaucaccaaga

SEQ ID NO: 858344 - RNA, 19 nt, Homo sapiens
  misc_RNA (1)...(19): siRNA sense strand
aaacagugcccuccagaag

SEQ ID NO: 858345 - RNA, 19 nt, Homo sapiens
  misc_RNA (1)...(19): siRNA sense strand
ggacuggaguggaguucac

SEQ ID NO: 858346 - RNA, 19 nt, Homo sapiens
  misc_RNA (1)...(19): siRNA sense strand
aacugaggcuguucuguga

SEQ ID NO: 858347 - RNA, 19 nt, Homo sapiens
  misc_RNA (1)...(19): siRNA sense strand
gaggagacaacguucaagu

SEQ ID NO: 858348 - RNA, 19 nt, Homo sapiens
  misc_RNA (1)...(19): siRNA sense strand
gggaggagacaacguucaa

SEQ ID NO: 858349 - RNA, 19 nt, Homo sapiens
  misc_RNA (1)...(19): siRNA sense strand
agagguugauccagccaaa

SEQ ID NO: 858350 - RNA, 19 nt, Homo sapiens
  misc_RNA (1)...(19): siRNA sense strand
gaacaccccugugacuuca

SEQ ID NO: 858351 - RNA, 19 nt, Homo sapiens
  misc_RNA (1)...(19): siRNA sense strand
cgacagggaaguagagaag

SEQ ID NO: 858352 - RNA, 19 nt, Homo sapiens
  misc_RNA (1)...(19): siRNA sense strand
gguccaggauaacaaggau

SEQ ID NO: 858353 - RNA, 19 nt, Homo sapiens
  misc_RNA (1)...(19): siRNA sense strand
ggagugaaggcuuuaacca

SEQ ID NO: 858354 - RNA, 19 nt, Homo sapiens
  misc_RNA (1)...(19): siRNA sense strand
ugggagcuccucaaaggua

SEQ ID NO: 858355 - RNA, 19 nt, Homo sapiens
  misc_RNA (1)...(19): siRNA sense strand
gugcaacgacagggaagua

SEQ ID NO: 858356 - RNA, 19 nt, Homo sapiens
  misc_RNA (1)...(19): siRNA sense strand
agaacaaugguccaggaua

SEQ ID NO: 858357 - RNA, 19 nt, Homo sapiens
  misc_RNA (1)...(19): siRNA sense strand
gauuaauaccaaagagguu

SEQ ID NO: 858358 - RNA, 19 nt, Homo sapiens
  misc_RNA (1)...(19): siRNA sense strand
cguccuggaguaaaugaua

SEQ ID NO: 858359 - RNA, 19 nt, Homo sapiens
  misc_RNA (1)...(19): siRNA sense strand
ggaacucaggcaagacuca

SEQ ID NO: 858360 - RNA, 19 nt, Homo sapiens
  misc_RNA (1)...(19): siRNA sense strand
cauccuuuguccuguaugu

SEQ ID NO: 858361 - RNA, 19 nt, Homo sapiens
  misc_RNA (1)...(19): siRNA sense strand
gagugaaggcuuuaaccau

SEQ ID NO: 858362 - RNA, 19 nt, Homo sapiens
  misc_RNA (1)...(19): siRNA sense strand
cuggagcccuucucaguag

SEQ ID NO: 858363 - RNA, 19 nt, Homo sapiens
  misc_RNA (1)...(19): siRNA sense strand
aggcccagcuggaacaguu

SEQ ID NO: 858364 - RNA, 19 nt, Homo sapiens
  misc_RNA (1)...(19): siRNA sense strand
uaaacagugcccuccagaa

SEQ ID NO: 858365 - RNA, 19 nt, Homo sapiens
  misc_RNA (1)...(19): siRNA sense strand
uagaccaccuggccgugaa

SEQ ID NO: 858366 - RNA, 19 nt, Homo sapiens
  misc_RNA (1)...(19): siRNA sense strand
cauacuacauuuccuacac

SEQ ID NO: 858367 - RNA, 19 nt, Homo sapiens
  misc_RNA (1)...(19): siRNA sense strand
ggaugccgcaggagaaauc

SEQ ID NO: 858368 - RNA, 19 nt, Homo sapiens
  misc_RNA (1)...(19): siRNA sense strand
ccguggcuaugaaauuuau

SEQ ID NO: 858369 - RNA, 19 nt, Homo sapiens
  misc_RNA (1)...(19): siRNA sense strand
ucggagggcuacauuaagg

SEQ ID NO: 858370 - RNA, 19 nt, Homo sapiens
  misc_RNA (1)...(19): siRNA sense strand
gcuguucugugaguucugu

SEQ ID NO: 858371 - RNA, 19 nt, Homo sapiens
  misc_RNA (1)...(19): siRNA sense strand
gccaaccucugccacuucu

SEQ ID NO: 858372 - RNA, 19 nt, Homo sapiens
  misc_RNA (1)...(19): siRNA sense strand
ccgaggagucuacuuagga

SEQ ID NO: 858373 - RNA, 19 nt, Homo sapiens
  misc_RNA (1)...(19): siRNA sense strand
gucaugcuguggaaaauuu

SEQ ID NO: 858374 - RNA, 19 nt, Homo sapiens
  misc_RNA (1)...(19): siRNA sense strand
caucaaagaacagcaugug

SEQ ID NO: 858375 - RNA, 19 nt, Homo sapiens
  misc_RNA (1)...(19): siRNA sense strand
cuuucacccugcuuuguaa

SEQ ID NO: 858376 - RNA, 19 nt, Homo sapiens
  misc_RNA (1)...(19): siRNA sense strand
ggcauccuuuguccuguau

SEQ ID NO: 858377 - RNA, 19 nt, Homo sapiens
  misc_RNA (1)...(19): siRNA sense strand
uggguggagugaaggcuuu

SEQ ID NO: 858378 - RNA, 19 nt, Homo sapiens
  misc_RNA (1)...(19): siRNA sense strand
caagaggguggugguagaa

SEQ ID NO: 858379 - RNA, 19 nt, Homo sapiens
  misc_RNA (1)...(19): siRNA sense strand
ggaccuaaaagacuugaaa

SEQ ID NO: 858380 - RNA, 19 nt, Homo sapiens
  misc_RNA (1)...(19): siRNA sense strand
ggaguaaaugauaagauac

SEQ ID NO: 858381 - RNA, 19 nt, Homo sapiens
  misc_RNA (1)...(19): siRNA sense strand
gcucagacuuggagauccu

SEQ ID NO: 858382 - RNA, 19 nt, Homo sapiens
  misc_RNA (1)...(19): siRNA sense strand
cagauccacauaauaaaca

SEQ ID NO: 858383 - RNA, 19 nt, Homo sapiens
  misc_RNA (1)...(19): siRNA sense strand
acagggaaguagagaagag

SEQ ID NO: 858384 - RNA, 19 nt, Homo sapiens
  misc_RNA (1)...(19): siRNA sense strand
gcagcuggagcccuucuca

SEQ ID NO: 858385 - RNA, 19 nt, Homo sapiens
  misc_RNA (1)...(19): siRNA sense strand
ggcuaugaaauuuauggua

SEQ ID NO: 858386 - RNA, 19 nt, Homo sapiens
  misc_RNA (1)...(19): siRNA sense strand
caacgacagggaaguagag

SEQ ID NO: 858387 - RNA, 19 nt, Homo sapiens
  misc_RNA (1)...(19): siRNA sense strand
ucacccugcuuuguaagga

SEQ ID NO: 858388 - RNA, 19 nt, Homo sapiens
  misc_RNA (1)...(19): siRNA sense strand
gccguggcuaugaaauuua

SEQ ID NO: 858389 - RNA, 19 nt, Homo sapiens
  misc_RNA (1)...(19): siRNA sense strand
cacccguccuggaguaaau

SEQ ID NO: 858390 - RNA, 19 nt, Homo sapiens
  misc_RNA (1)...(19): siRNA sense strand
uggagauccucaucaccaa

SEQ ID NO: 858391 - RNA, 19 nt, Homo sapiens
  misc_RNA (1)...(19): siRNA sense strand
ggaaagaauuguauacuga

SEQ ID NO: 858392 - RNA, 19 nt, Homo sapiens
  misc_RNA (1)...(19): siRNA sense strand
ggaagaagcugaagacagu

SEQ ID NO: 858393 - RNA, 19 nt, Homo sapiens
  misc_RNA (1)...(19): siRNA sense strand
ggacagagccauauacuga

SEQ ID NO: 858394 - RNA, 19 nt, Homo sapiens
  misc_RNA (1)...(19): siRNA sense strand
ggaaggacauguaugagaa

SEQ ID NO: 858395 - RNA, 19 nt, Homo sapiens
  misc_RNA (1)...(19): siRNA sense strand
gaagacaguucugaaguau

SEQ ID NO: 858396 - RNA, 19 nt, Homo sapiens
  misc_RNA (1)...(19): siRNA sense strand
ggacacaacaggauauuga

SEQ ID NO: 858397 - RNA, 19 nt, Homo sapiens
  misc_RNA (1)...(19): siRNA sense strand
ugaagacaguucugaagua

SEQ ID NO: 858398 - RNA, 19 nt, Homo sapiens
  misc_RNA (1)...(19): siRNA sense strand
ggacaggucugggagcaaa

SEQ ID NO: 858399 - RNA, 19 nt, Homo sapiens
  misc_RNA (1)...(19): siRNA sense strand
ggacauguaugagaagaug

SEQ ID NO: 858400 - RNA, 19 nt, Homo sapiens
  misc_RNA (1)...(19): siRNA sense strand
gaaggagccugucccucaa

SEQ ID NO: 858401 - RNA, 19 nt, Homo sapiens
  misc_RNA (1)...(19): siRNA sense strand
ggacacaaccuagcacuga

SEQ ID NO: 858402 - RNA, 19 nt, Homo sapiens
  misc_RNA (1)...(19): siRNA sense strand
agacaguucugaaguauuc

SEQ ID NO: 858403 - RNA, 19 nt, Homo sapiens
  misc_RNA (1)...(19): siRNA sense strand
ugacucaccuguacucuca

SEQ ID NO: 858404 - RNA, 19 nt, Homo sapiens
  misc_RNA (1)...(19): siRNA sense strand
uggagcagcugaugaaaga

SEQ ID NO: 858405 - RNA, 19 nt, Homo sapiens
  misc_RNA (1)...(19): siRNA sense strand
gcugauggcuccuggaaag

SEQ ID NO: 858406 - RNA, 19 nt, Homo sapiens
  misc_RNA (1)...(19): siRNA sense strand
guacguggcaugccuagaa

SEQ ID NO: 858407 - RNA, 19 nt, Homo sapiens
  misc_RNA (1)...(19): siRNA sense strand
gccaaggucuggaugauag

SEQ ID NO: 858408 - RNA, 19 nt, Homo sapiens
  misc_RNA (1)...(19): siRNA sense strand
ggacagacggacagacuga

SEQ ID NO: 858409 - RNA, 19 nt, Homo sapiens
  misc_RNA (1)...(19): siRNA sense strand
cagauggccuuuggacuga

SEQ ID NO: 858410 - RNA, 19 nt, Homo sapiens
  misc_RNA (1)...(19): siRNA sense strand
gaggauggucggauucuga

SEQ ID NO: 858411 - RNA, 19 nt, Homo sapiens
  misc_RNA (1)...(19): siRNA sense strand
gcagaugggaccuguaaca

SEQ ID NO: 858412 - RNA, 19 nt, Homo sapiens
  misc_RNA (1)...(19): siRNA sense strand
ggagcaaacccuggaagaa

SEQ ID NO: 858413 - RNA, 19 nt, Homo sapiens
  misc_RNA (1)...(19): siRNA sense strand
gagcaaacccuggaagaag

SEQ ID NO: 858414 - RNA, 19 nt, Homo sapiens
  misc_RNA (1)...(19): siRNA sense strand
cagcaggaccuaucuggaa

SEQ ID NO: 858415 - RNA, 19 nt, Homo sapiens
  misc_RNA (1)...(19): siRNA sense strand
uggaaagaauuguauacug

SEQ ID NO: 858416 - RNA, 19 nt, Homo sapiens
  misc_RNA (1)...(19): siRNA sense strand
aaauacaacaggauacuga

SEQ ID NO: 858417 - RNA, 19 nt, Homo sapiens
  misc_RNA (1)...(19): siRNA sense strand
cacuggugguuuccaaaua

SEQ ID NO: 858418 - RNA, 19 nt, Homo sapiens
  misc_RNA (1)...(19): siRNA sense strand
gcacuggugguuuccaaau

SEQ ID NO: 858419 - RNA, 19 nt, Homo sapiens
  misc_RNA (1)...(19): siRNA sense strand
ggaagaggagcuagugaag

SEQ ID NO: 858420 - RNA, 19 nt, Homo sapiens
  misc_RNA (1)...(19): siRNA sense strand
gucaaguccugggcugaua

SEQ ID NO: 858421 - RNA, 19 nt, Homo sapiens
  misc_RNA (1)...(19): siRNA sense strand
ggaucgagggcaucaagaa

SEQ ID NO: 858422 - RNA, 19 nt, Homo sapiens
  misc_RNA (1)...(19): siRNA sense strand
accaugagcuccaccucua

SEQ ID NO: 858423 - RNA, 19 nt, Homo sapiens
  misc_RNA (1)...(19): siRNA sense strand
gauggcuccuggaaagaau

SEQ ID NO: 858424 - RNA, 19 nt, Homo sapiens
  misc_RNA (1)...(19): siRNA sense strand
gaaguauucacccuuugug

SEQ ID NO: 858425 - RNA, 19 nt, Homo sapiens
  misc_RNA (1)...(19): siRNA sense strand
gugaagcucuggagaucuc

SEQ ID NO: 858426 - RNA, 19 nt, Homo sapiens
  misc_RNA (1)...(19): siRNA sense strand
guuccagccuccagacuca

SEQ ID NO: 858427 - RNA, 19 nt, Homo sapiens
  misc_RNA (1)...(19): siRNA sense strand
acagagccauauacugaug

SEQ ID NO: 858428 - RNA, 19 nt, Homo sapiens
  misc_RNA (1)...(19): siRNA sense strand
ggucggauucugaaacguu

SEQ ID NO: 858429 - RNA, 19 nt, Homo sapiens
  misc_RNA (1)...(19): siRNA sense strand
guaacaccaacuucaagaa

SEQ ID NO: 858430 - RNA, 19 nt, Homo sapiens
  misc_RNA (1)...(19): siRNA sense strand
ccuccagacucacccagaa

SEQ ID NO: 858431 - RNA, 19 nt, Homo sapiens
  misc_RNA (1)...(19): siRNA sense strand
uuucgugccugccuacuau

SEQ ID NO: 858432 - RNA, 19 nt, Homo sapiens
  misc_RNA (1)...(19): siRNA sense strand
acucucaccugaaguguag

SEQ ID NO: 858433 - RNA, 19 nt, Homo sapiens
  misc_RNA (1)...(19): siRNA sense strand
gucggauucugaaacguuu

SEQ ID NO: 858434 - RNA, 19 nt, Homo sapiens
  misc_RNA (1)...(19): siRNA sense strand
ggaccuguaacaccaacuu

SEQ ID NO: 858435 - RNA, 19 nt, Homo sapiens
  misc_RNA (1)...(19): siRNA sense strand
ggccaaggucuggaugaua

SEQ ID NO: 858436 - RNA, 19 nt, Homo sapiens
  misc_RNA (1)...(19): siRNA sense strand
gaaacgcaugggucacaga

SEQ ID NO: 858437 - RNA, 19 nt, Homo sapiens
  misc_RNA (1)...(19): siRNA sense strand
gcagcucccuccucuucgu

SEQ ID NO: 858438 - RNA, 19 nt, Homo sapiens
  misc_RNA (1)...(19): siRNA sense strand
aggagaggauggucggauu

SEQ ID NO: 858439 - RNA, 19 nt, Homo sapiens
  misc_RNA (1)...(19): siRNA sense strand
cagcuggccuuggaguaga

SEQ ID NO: 858440 - RNA, 19 nt, Homo sapiens
  misc_RNA (1)...(19): siRNA sense strand
gacacaacaggauauugaa

SEQ ID NO: 858441 - RNA, 19 nt, Homo sapiens
  misc_RNA (1)...(19): siRNA sense strand
gaccacgucauccugcaaa

SEQ ID NO: 858442 - RNA, 19 nt, Homo sapiens
  misc_RNA (1)...(19): siRNA sense strand
uacaugcaguggagggaaa

SEQ ID NO: 858443 - RNA, 19 nt, Homo sapiens
  misc_RNA (1)...(19): siRNA sense strand
cggaaggacauguaugaga

SEQ ID NO: 858444 - RNA, 19 nt, Homo sapiens
  misc_RNA (1)...(19): siRNA sense strand
gggagcaaacccuggaaga

SEQ ID NO: 858445 - RNA, 19 nt, Homo sapiens
  misc_RNA (1)...(19): siRNA sense strand
cauuauggacugcaagaug

SEQ ID NO: 858446 - RNA, 19 nt, Homo sapiens
  misc_RNA (1)...(19): siRNA sense strand
ggagaggauggucggauuc

SEQ ID NO: 858447 - RNA, 19 nt, Homo sapiens
  misc_RNA (1)...(19): siRNA sense strand
gcagcuggccuuggaguag

SEQ ID NO: 858448 - RNA, 19 nt, Homo sapiens
  misc_RNA (1)...(19): siRNA sense strand
gaucgagggcaucaagaag

SEQ ID NO: 858449 - RNA, 19 nt, Homo sapiens
  misc_RNA (1)...(19): siRNA sense strand
gaaggacauguaugagaag

SEQ ID NO: 858450 - RNA, 19 nt, Homo sapiens
  misc_RNA (1)...(19): siRNA sense strand
cgggacagauggccuuugg

SEQ ID NO: 858451 - RNA, 19 nt, Homo sapiens
  misc_RNA (1)...(19): siRNA sense strand
ccuguacucucaccugaag

SEQ ID NO: 858452 - RNA, 19 nt, Homo sapiens
  misc_RNA (1)...(19): siRNA sense strand
acaacaggauauugaaggu

SEQ ID NO: 858453 - RNA, 19 nt, Homo sapiens
  misc_RNA (1)...(19): siRNA sense strand
gcuccuggaaagaauugua

SEQ ID NO: 858454 - RNA, 19 nt, Homo sapiens
  misc_RNA (1)...(19): siRNA sense strand
aggcagaugggaccuguaa

SEQ ID NO: 858455 - RNA, 19 nt, Homo sapiens
  misc_RNA (1)...(19): siRNA sense strand
ucacagacucagccagaga

SEQ ID NO: 858456 - RNA, 19 nt, Homo sapiens
  misc_RNA (1)...(19): siRNA sense strand
ucaaguccugggcugauaa

SEQ ID NO: 858457 - RNA, 19 nt, Homo sapiens
  misc_RNA (1)...(19): siRNA sense strand
cuggagaauugcugacuca

SEQ ID NO: 858458 - RNA, 19 nt, Homo sapiens
  misc_RNA (1)...(19): siRNA sense strand
gcugaagacaguucugaag

SEQ ID NO: 858459 - RNA, 19 nt, Homo sapiens
  misc_RNA (1)...(19): siRNA sense strand
ccuccuggcugacuuugag

SEQ ID NO: 858460 - RNA, 19 nt, Homo sapiens
  misc_RNA (1)...(19): siRNA sense strand
ccaggacacaacaggauau

SEQ ID NO: 858461 - RNA, 19 nt, Homo sapiens
  misc_RNA (1)...(19): siRNA sense strand
cacuggagcaggugacaaa

SEQ ID NO: 858462 - RNA, 19 nt, Homo sapiens
  misc_RNA (1)...(19): siRNA sense strand
uggaagaggagcuagugaa

SEQ ID NO: 858463 - RNA, 19 nt, Homo sapiens
  misc_RNA (1)...(19): siRNA sense strand
gcaggaccuaucuggaaga

SEQ ID NO: 858464 - RNA, 19 nt, Homo sapiens
  misc_RNA (1)...(19): siRNA sense strand
gauggccuuuggacugauc

SEQ ID NO: 858465 - RNA, 19 nt, Homo sapiens
  misc_RNA (1)...(19): siRNA sense strand
agacagcaccugggacaga

SEQ ID NO: 858466 - RNA, 19 nt, Homo sapiens
  misc_RNA (1)...(19): siRNA sense strand
cgacgagucugaggaugac

SEQ ID NO: 858467 - RNA, 19 nt, Homo sapiens
  misc_RNA (1)...(19): siRNA sense strand
caggauggccagaccuuca

SEQ ID NO: 858468 - RNA, 19 nt, Homo sapiens
  misc_RNA (1)...(19): siRNA sense strand
acugauggcucccagaaaa

SEQ ID NO: 858469 - RNA, 19 nt, Homo sapiens
  misc_RNA (1)...(19): siRNA sense strand
cccggaaggacauguauga

SEQ ID NO: 858470 - RNA, 19 nt, Homo sapiens
  misc_RNA (1)...(19): siRNA sense strand
gaagaccuccuggcugacu

SEQ ID NO: 858471 - RNA, 19 nt, Homo sapiens
  misc_RNA (1)...(19): siRNA sense strand
gaagaagcugaagacaguu

SEQ ID NO: 858472 - RNA, 19 nt, Homo sapiens
  misc_RNA (1)...(19): siRNA sense strand
ugggacagacugccucuug

SEQ ID NO: 858473 - RNA, 19 nt, Homo sapiens
  misc_RNA (1)...(19): siRNA sense strand
gccuggagcagcugaugaa

SEQ ID NO: 858474 - RNA, 19 nt, Homo sapiens
  misc_RNA (1)...(19): siRNA sense strand
uggcaugccuagaagaacu

SEQ ID NO: 858475 - RNA, 19 nt, Homo sapiens
  misc_RNA (1)...(19): siRNA sense strand
gccagaccuucaaccagau

SEQ ID NO: 858476 - RNA, 19 nt, Homo sapiens
  misc_RNA (1)...(19): siRNA sense strand
gacagagccauauacugau

SEQ ID NO: 858477 - RNA, 19 nt, Homo sapiens
  misc_RNA (1)...(19): siRNA sense strand
agaguccgcaggcagaauu

SEQ ID NO: 858478 - RNA, 19 nt, Homo sapiens
  misc_RNA (1)...(19): siRNA sense strand
gugcugauggcuccuggaa

SEQ ID NO: 858479 - RNA, 19 nt, Homo sapiens
  misc_RNA (1)...(19): siRNA sense strand
aagacccgcugcgaccuuu

SEQ ID NO: 858480 - RNA, 19 nt, Homo sapiens
  misc_RNA (1)...(19): siRNA sense strand
caaauacaacaggauacug

SEQ ID NO: 858481 - RNA, 19 nt, Homo sapiens
  misc_RNA (1)...(19): siRNA sense strand
gccuggcacuggugguuuc

SEQ ID NO: 858482 - RNA, 19 nt, Homo sapiens
  misc_RNA (1)...(19): siRNA sense strand
guacaucgacucagaaaua

SEQ ID NO: 858483 - RNA, 19 nt, Homo sapiens
  misc_RNA (1)...(19): siRNA sense strand
gcaagguguuucccauuaa

SEQ ID NO: 858484 - RNA, 19 nt, Homo sapiens
  misc_RNA (1)...(19): siRNA sense strand
gaagacacacacauaauga

SEQ ID NO: 858485 - RNA, 19 nt, Homo sapiens
  misc_RNA (1)...(19): siRNA sense strand
ggaagaugaugcuuuguca

SEQ ID NO: 858486 - RNA, 19 nt, Homo sapiens
  misc_RNA (1)...(19): siRNA sense strand
ggaagaggcugcgggaaga

SEQ ID NO: 858487 - RNA, 19 nt, Homo sapiens
  misc_RNA (1)...(19): siRNA sense strand
gaacccagcuuagacuaga

SEQ ID NO: 858488 - RNA, 19 nt, Homo sapiens
  misc_RNA (1)...(19): siRNA sense strand
caacauuacuggcauugug

SEQ ID NO: 858489 - RNA, 19 nt, Homo sapiens
  misc_RNA (1)...(19): siRNA sense strand
gaggagagaacccagcuua

SEQ ID NO: 858490 - RNA, 19 nt, Homo sapiens
  misc_RNA (1)...(19): siRNA sense strand
caaggccuaugucuucuuu

SEQ ID NO: 858491 - RNA, 19 nt, Homo sapiens
  misc_RNA (1)...(19): siRNA sense strand
caagguguuucccauuaaa

SEQ ID NO: 858492 - RNA, 19 nt, Homo sapiens
  misc_RNA (1)...(19): siRNA sense strand
ugcaagguguuucccauua

SEQ ID NO: 858493 - RNA, 19 nt, Homo sapiens
  misc_RNA (1)...(19): siRNA sense strand
ggagagaacccagcuuaga

SEQ ID NO: 858494 - RNA, 19 nt, Homo sapiens
  misc_RNA (1)...(19): siRNA sense strand
gaaaggcugcggacguuug

SEQ ID NO: 858495 - RNA, 19 nt, Homo sapiens
  misc_RNA (1)...(19): siRNA sense strand
ggaggacagugacauuagu

SEQ ID NO: 858496 - RNA, 19 nt, Homo sapiens
  misc_RNA (1)...(19): siRNA sense strand
ugacauuaguuccuucuuc

SEQ ID NO: 858497 - RNA, 19 nt, Homo sapiens
  misc_RNA (1)...(19): siRNA sense strand
gaacuucagaccagauugu

SEQ ID NO: 858498 - RNA, 19 nt, Homo sapiens
  misc_RNA (1)...(19): siRNA sense strand
gccuaugucuucuuugaga

SEQ ID NO: 858499 - RNA, 19 nt, Homo sapiens
  misc_RNA (1)...(19): siRNA sense strand
gacauuaguuccuucuucu

SEQ ID NO: 858500 - RNA, 19 nt, Homo sapiens
  misc_RNA (1)...(19): siRNA sense strand
cuagaagacacacacauaa

SEQ ID NO: 858501 - RNA, 19 nt, Homo sapiens
  misc_RNA (1)...(19): siRNA sense strand
ucuagaagacacacacaua

SEQ ID NO: 858502 - RNA, 19 nt, Homo sapiens
  misc_RNA (1)...(19): siRNA sense strand
cggaaaggcugcggacguu

SEQ ID NO: 858503 - RNA, 19 nt, Homo sapiens
  misc_RNA (1)...(19): siRNA sense strand
gcucuacacccuucugguu

SEQ ID NO: 858504 - RNA, 19 nt, Homo sapiens
  misc_RNA (1)...(19): siRNA sense strand
aaagccaggugccucauuc

SEQ ID NO: 858505 - RNA, 19 nt, Homo sapiens
  misc_RNA (1)...(19): siRNA sense strand
caggaggacagugacauua

SEQ ID NO: 858506 - RNA, 19 nt, Homo sapiens
  misc_RNA (1)...(19): siRNA sense strand
cagcaacauuacuggcauu

SEQ ID NO: 858507 - RNA, 19 nt, Homo sapiens
  misc_RNA (1)...(19): siRNA sense strand
agaagacacacacauaaug

SEQ ID NO: 858508 - RNA, 19 nt, Homo sapiens
  misc_RNA (1)...(19): siRNA sense strand
gagaacccagcuuagacua

SEQ ID NO: 858509 - RNA, 19 nt, Homo sapiens
  misc_RNA (1)...(19): siRNA sense strand
aggccuaugucuucuuuga

SEQ ID NO: 858510 - RNA, 19 nt, Homo sapiens
  misc_RNA (1)...(19): siRNA sense strand
ccggguacaucgacucaga

SEQ ID NO: 858511 - RNA, 19 nt, Homo sapiens
  misc_RNA (1)...(19): siRNA sense strand
ccaucgcacagcaacauua

SEQ ID NO: 858512 - RNA, 19 nt, Homo sapiens
  misc_RNA (1)...(19): siRNA sense strand
ccagauuguuccagaguac

SEQ ID NO: 858513 - RNA, 19 nt, Homo sapiens
  misc_RNA (1)...(19): siRNA sense strand
gggaaaccaaggccuaugu

SEQ ID NO: 858514 - RNA, 19 nt, Homo sapiens
  misc_RNA (1)...(19): siRNA sense strand
gaggacagugacauuaguu

SEQ ID NO: 858515 - RNA, 19 nt, Homo sapiens
  misc_RNA (1)...(19): siRNA sense strand
caucgacucagaaauagga

SEQ ID NO: 858516 - RNA, 19 nt, Homo sapiens
  misc_RNA (1)...(19): siRNA sense strand
gagagaacccagcuuagac

SEQ ID NO: 858517 - RNA, 19 nt, Homo sapiens
  misc_RNA (1)...(19): siRNA sense strand
aaccaaggccuaugucuuc

SEQ ID NO: 858518 - RNA, 19 nt, Homo sapiens
  misc_RNA (1)...(19): siRNA sense strand
uagaagacacacacauaau

SEQ ID NO: 858519 - RNA, 19 nt, Homo sapiens
  misc_RNA (1)...(19): siRNA sense strand
gaccugaagcuuaggaagu

SEQ ID NO: 858520 - RNA, 19 nt, Homo sapiens
  misc_RNA (1)...(19): siRNA sense strand
uuacuggcauuguggaagu

SEQ ID NO: 858521 - RNA, 19 nt, Homo sapiens
  misc_RNA (1)...(19): siRNA sense strand
uuaguuccuucuucugcua

SEQ ID NO: 858522 - RNA, 19 nt, Homo sapiens
  misc_RNA (1)...(19): siRNA sense strand
ccaggaggacagugacauu

SEQ ID NO: 858523 - RNA, 19 nt, Homo sapiens
  misc_RNA (1)...(19): siRNA sense strand
aagaugaugcuuugucaga

SEQ ID NO: 858524 - RNA, 19 nt, Homo sapiens
  misc_RNA (1)...(19): siRNA sense strand
gaaaccaaggccuaugucu

SEQ ID NO: 858525 - RNA, 19 nt, Homo sapiens
  misc_RNA (1)...(19): siRNA sense strand
acagugacauuaguuccuu

SEQ ID NO: 858526 - RNA, 19 nt, Homo sapiens
  misc_RNA (1)...(19): siRNA sense strand
gaagugauccuuggggaaa

SEQ ID NO: 858527 - RNA, 19 nt, Homo sapiens
  misc_RNA (1)...(19): siRNA sense strand
caaagccaggugccucauu

SEQ ID NO: 858528 - RNA, 19 nt, Homo sapiens
  misc_RNA (1)...(19): siRNA sense strand
ggaaaggcugcggacguuu

SEQ ID NO: 858529 - RNA, 19 nt, Homo sapiens
  misc_RNA (1)...(19): siRNA sense strand
aaaccaaggccuaugucuu

SEQ ID NO: 858530 - RNA, 19 nt, Homo sapiens
  misc_RNA (1)...(19): siRNA sense strand
gggaagaugaugcuuuguc

SEQ ID NO: 858531 - RNA, 19 nt, Homo sapiens
  misc_RNA (1)...(19): siRNA sense strand
gacgauaccccuuccauga

SEQ ID NO: 858532 - RNA, 19 nt, Homo sapiens
  misc_RNA (1)...(19): siRNA sense strand
uaaacacuaccaggacaaa

SEQ ID NO: 858533 - RNA, 19 nt, Homo sapiens
  misc_RNA (1)...(19): siRNA sense strand
cguggacaguucugcauuc

SEQ ID NO: 858534 - RNA, 19 nt, Homo sapiens
  misc_RNA (1)...(19): siRNA sense strand
cugcauuccugagcacauu

SEQ ID NO: 858535 - RNA, 19 nt, Homo sapiens
  misc_RNA (1)...(19): siRNA sense strand
ggaaaccaaggccuauguc

SEQ ID NO: 858536 - RNA, 19 nt, Homo sapiens
  misc_RNA (1)...(19): siRNA sense strand
acucagaaauaggaacuuc

SEQ ID NO: 858537 - RNA, 19 nt, Homo sapiens
  misc_RNA (1)...(19): siRNA sense strand
uacaucgacucagaaauag

SEQ ID NO: 858538 - RNA, 19 nt, Homo sapiens
  misc_RNA (1)...(19): siRNA sense strand
ggguacaucgacucagaaa

SEQ ID NO: 858539 - RNA, 19 nt, Homo sapiens
  misc_RNA (1)...(19): siRNA sense strand
gaccagauuguuccagagu

SEQ ID NO: 858540 - RNA, 19 nt, Homo sapiens
  misc_RNA (1)...(19): siRNA sense strand
accugaagcuuaggaaguu

SEQ ID NO: 858541 - RNA, 19 nt, Homo sapiens
  misc_RNA (1)...(19): siRNA sense strand
ccagugcccuuuucuccaa

SEQ ID NO: 858542 - RNA, 19 nt, Homo sapiens
  misc_RNA (1)...(19): siRNA sense strand
uagccgagcgcgagcaugu

SEQ ID NO: 858543 - RNA, 19 nt, Homo sapiens
  misc_RNA (1)...(19): siRNA sense strand
gagccaaguucgacccuua

SEQ ID NO: 858544 - RNA, 19 nt, Homo sapiens
  misc_RNA (1)...(19): siRNA sense strand
ggacaugggucagagugaa

SEQ ID NO: 858545 - RNA, 19 nt, Homo sapiens
  misc_RNA (1)...(19): siRNA sense strand
ggcagacacugagaacuua

SEQ ID NO: 858546 - RNA, 19 nt, Homo sapiens
  misc_RNA (1)...(19): siRNA sense strand
agaagacccuccuggaaga

SEQ ID NO: 858547 - RNA, 19 nt, Homo sapiens
  misc_RNA (1)...(19): siRNA sense strand
ggaagagaaggucaaguug

SEQ ID NO: 858548 - RNA, 19 nt, Homo sapiens
  misc_RNA (1)...(19): siRNA sense strand
uccagaagguguucacaaa

SEQ ID NO: 858549 - RNA, 19 nt, Homo sapiens
  misc_RNA (1)...(19): siRNA sense strand
aagagaaggucaaguugga

SEQ ID NO: 858550 - RNA, 19 nt, Homo sapiens
  misc_RNA (1)...(19): siRNA sense strand
caaguucgacccuuaugaa

SEQ ID NO: 858551 - RNA, 19 nt, Homo sapiens
  misc_RNA (1)...(19): siRNA sense strand
gcagaggagccagaaauug

SEQ ID NO: 858552 - RNA, 19 nt, Homo sapiens
  misc_RNA (1)...(19): siRNA sense strand
gaagaggacaugggucaga

SEQ ID NO: 858553 - RNA, 19 nt, Homo sapiens
  misc_RNA (1)...(19): siRNA sense strand
cgauaacccucaccugaag

SEQ ID NO: 858554 - RNA, 19 nt, Homo sapiens
  misc_RNA (1)...(19): siRNA sense strand
gcacaguggcccuaguuag

SEQ ID NO: 858555 - RNA, 19 nt, Homo sapiens
  misc_RNA (1)...(19): siRNA sense strand
uggaagagaaggucaaguu

SEQ ID NO: 858556 - RNA, 19 nt, Homo sapiens
  misc_RNA (1)...(19): siRNA sense strand
ggaaggagccaggcacagu

SEQ ID NO: 858557 - RNA, 19 nt, Homo sapiens
  misc_RNA (1)...(19): siRNA sense strand
gcacagccacgaaacaaaa

SEQ ID NO: 858558 - RNA, 19 nt, Homo sapiens
  misc_RNA (1)...(19): siRNA sense strand
cagaagguguucacaaagc

SEQ ID NO: 858559 - RNA, 19 nt, Homo sapiens
  misc_RNA (1)...(19): siRNA sense strand
aaagaacaguggccagaac

SEQ ID NO: 858560 - RNA, 19 nt, Homo sapiens
  misc_RNA (1)...(19): siRNA sense strand
cagaggagccagaaauugg

SEQ ID NO: 858561 - RNA, 19 nt, Homo sapiens
  misc_RNA (1)...(19): siRNA sense strand
ggcagaggagccagaaauu

SEQ ID NO: 858562 - RNA, 19 nt, Homo sapiens
  misc_RNA (1)...(19): siRNA sense strand
gagcuuuggcagacacuga

SEQ ID NO: 858563 - RNA, 19 nt, Homo sapiens
  misc_RNA (1)...(19): siRNA sense strand
gaaccuggaagaggacaug

SEQ ID NO: 858564 - RNA, 19 nt, Homo sapiens
  misc_RNA (1)...(19): siRNA sense strand
agagaagacccuccuggaa

SEQ ID NO: 858565 - RNA, 19 nt, Homo sapiens
  misc_RNA (1)...(19): siRNA sense strand
gcuuuggcguugucucuca

SEQ ID NO: 858566 - RNA, 19 nt, Homo sapiens
  misc_RNA (1)...(19): siRNA sense strand
gaaggucaaguuggaggaa

SEQ ID NO: 858567 - RNA, 19 nt, Homo sapiens
  misc_RNA (1)...(19): siRNA sense strand
ccaaguucgacccuuauga

SEQ ID NO: 858568 - RNA, 19 nt, Homo sapiens
  misc_RNA (1)...(19): siRNA sense strand
ggcccuaguuagcaaagug

SEQ ID NO: 858569 - RNA, 19 nt, Homo sapiens
  misc_RNA (1)...(19): siRNA sense strand
ugaaggagacuguggaaaa

SEQ ID NO: 858570 - RNA, 19 nt, Homo sapiens
  misc_RNA (1)...(19): siRNA sense strand
uggcagacacugagaacuu

SEQ ID NO: 858571 - RNA, 19 nt, Homo sapiens
  misc_RNA (1)...(19): siRNA sense strand
gcauucaagccuucugcaa

SEQ ID NO: 858572 - RNA, 19 nt, Homo sapiens
  misc_RNA (1)...(19): siRNA sense strand
cggcagaggagccagaaau

SEQ ID NO: 858573 - RNA, 19 nt, Homo sapiens
  misc_RNA (1)...(19): siRNA sense strand
gguggaggaggcaaaauua

SEQ ID NO: 858574 - RNA, 19 nt, Homo sapiens
  misc_RNA (1)...(19): siRNA sense strand
cagauccuccugcuacaga

SEQ ID NO: 858575 - RNA, 19 nt, Homo sapiens
  misc_RNA (1)...(19): siRNA sense strand
agaagguguucacaaagca

SEQ ID NO: 858576 - RNA, 19 nt, Homo sapiens
  misc_RNA (1)...(19): siRNA sense strand
gugcacagccacgaaacaa

SEQ ID NO: 858577 - RNA, 19 nt, Homo sapiens
  misc_RNA (1)...(19): siRNA sense strand
cugcaugggcgcacucuga

SEQ ID NO: 858578 - RNA, 19 nt, Homo sapiens
  misc_RNA (1)...(19): siRNA sense strand
ggcacaguggcccuaguua

SEQ ID NO: 858579 - RNA, 19 nt, Homo sapiens
  misc_RNA (1)...(19): siRNA sense strand
gcugaaggagacuguggaa

SEQ ID NO: 858580 - RNA, 19 nt, Homo sapiens
  misc_RNA (1)...(19): siRNA sense strand
uggaggaacagcugaagga

SEQ ID NO: 858581 - RNA, 19 nt, Homo sapiens
  misc_RNA (1)...(19): siRNA sense strand
gauaacccucaccugaaga

SEQ ID NO: 858582 - RNA, 19 nt, Homo sapiens
  misc_RNA (1)...(19): siRNA sense strand
gaaauuaaagacgauaacc

SEQ ID NO: 858583 - RNA, 19 nt, Homo sapiens
  misc_RNA (1)...(19): siRNA sense strand
acgauaacccucaccugaa

SEQ ID NO: 858584 - RNA, 19 nt, Homo sapiens
  misc_RNA (1)...(19): siRNA sense strand
agacccuccuggaagagaa

SEQ ID NO: 858585 - RNA, 19 nt, Homo sapiens
  misc_RNA (1)...(19): siRNA sense strand
caguggcccuaguuagcaa

SEQ ID NO: 858586 - RNA, 19 nt, Homo sapiens
  misc_RNA (1)...(19): siRNA sense strand
gggcuggucaugacugaag

SEQ ID NO: 858587 - RNA, 19 nt, Homo sapiens
  misc_RNA (1)...(19): siRNA sense strand
aaacgagcuuuggcagaca

SEQ ID NO: 858588 - RNA, 19 nt, Homo sapiens
  misc_RNA (1)...(19): siRNA sense strand
uggcaaagcuuucugagau

SEQ ID NO: 858589 - RNA, 19 nt, Homo sapiens
  misc_RNA (1)...(19): siRNA sense strand
gagagcauguucaaacugu

SEQ ID NO: 858590 - RNA, 19 nt, Homo sapiens
  misc_RNA (1)...(19): siRNA sense strand
gugaggagcuggcgugcaa

SEQ ID NO: 858591 - RNA, 19 nt, Homo sapiens
  misc_RNA (1)...(19): siRNA sense strand
guugaaagcugagcaagau

SEQ ID NO: 858592 - RNA, 19 nt, Homo sapiens
  misc_RNA (1)...(19): siRNA sense strand
ugaagagcaugaucaagga

SEQ ID NO: 858593 - RNA, 19 nt, Homo sapiens
  misc_RNA (1)...(19): siRNA sense strand
ggagguggaugaggacuuc

SEQ ID NO: 858594 - RNA, 19 nt, Homo sapiens
  misc_RNA (1)...(19): siRNA sense strand
ucaaggaccuggagagcau

SEQ ID NO: 858595 - RNA, 19 nt, Homo sapiens
  misc_RNA (1)...(19): siRNA sense strand
gaaacucaaggccaacuuc

SEQ ID NO: 858596 - RNA, 19 nt, Homo sapiens
  misc_RNA (1)...(19): siRNA sense strand
ugucaaaggugccaagaac

SEQ ID NO: 858597 - RNA, 19 nt, Homo sapiens
  misc_RNA (1)...(19): siRNA sense strand
gagcauguucaaacuguau

SEQ ID NO: 858598 - RNA, 19 nt, Homo sapiens
  misc_RNA (1)...(19): siRNA sense strand
ugaaagcugagcaagauga

SEQ ID NO: 858599 - RNA, 19 nt, Homo sapiens
  misc_RNA (1)...(19): siRNA sense strand
ucaaaggugccaagaacuu

SEQ ID NO: 858600 - RNA, 19 nt, Homo sapiens
  misc_RNA (1)...(19): siRNA sense strand
ggaggacagugggcugaug

SEQ ID NO: 858601 - RNA, 19 nt, Homo sapiens
  misc_RNA (1)...(19): siRNA sense strand
ugaagcugaugauggagaa

SEQ ID NO: 858602 - RNA, 19 nt, Homo sapiens
  misc_RNA (1)...(19): siRNA sense strand
aggccaacuucaauacaua

SEQ ID NO: 858603 - RNA, 19 nt, Homo sapiens
  misc_RNA (1)...(19): siRNA sense strand
ggcaaagcuuucugagauc

SEQ ID NO: 858604 - RNA, 19 nt, Homo sapiens
  misc_RNA (1)...(19): siRNA sense strand
gggaguuccugcucauuuu

SEQ ID NO: 858605 - RNA, 19 nt, Homo sapiens
  misc_RNA (1)...(19): siRNA sense strand
uaaguuugaagcagaguug

SEQ ID NO: 858606 - RNA, 19 nt, Homo sapiens
  misc_RNA (1)...(19): siRNA sense strand
caaaggugccaagaacuuc

SEQ ID NO: 858607 - RNA, 19 nt, Homo sapiens
  misc_RNA (1)...(19): siRNA sense strand
cgggaguuccugcucauuu

SEQ ID NO: 858608 - RNA, 19 nt, Homo sapiens
  misc_RNA (1)...(19): siRNA sense strand
ggagagcauguucaaacug

SEQ ID NO: 858609 - RNA, 19 nt, Homo sapiens
  misc_RNA (1)...(19): siRNA sense strand
ggaccuggagagcauguuc

SEQ ID NO: 858610 - RNA, 19 nt, Homo sapiens
  misc_RNA (1)...(19): siRNA sense strand
ugauggcgcuggcaaagcu

SEQ ID NO: 858611 - RNA, 19 nt, Homo sapiens
  misc_RNA (1)...(19): siRNA sense strand
caucggccaguaaguuuga

SEQ ID NO: 858612 - RNA, 19 nt, Homo sapiens
  misc_RNA (1)...(19): siRNA sense strand
gucaucggccaguaaguuu

SEQ ID NO: 858613 - RNA, 19 nt, Homo sapiens
  misc_RNA (1)...(19): siRNA sense strand
guuugaagcagaguugaaa

SEQ ID NO: 858614 - RNA, 19 nt, Homo sapiens
  misc_RNA (1)...(19): siRNA sense strand
gcauguucaaacuguauga

SEQ ID NO: 858615 - RNA, 19 nt, Homo sapiens
  misc_RNA (1)...(19): siRNA sense strand
acucaaggccaacuucaau

SEQ ID NO: 858616 - RNA, 19 nt, Homo sapiens
  misc_RNA (1)...(19): siRNA sense strand
agagcauguucaaacugua

SEQ ID NO: 858617 - RNA, 19 nt, Homo sapiens
  misc_RNA (1)...(19): siRNA sense strand
ccuggagggugucaaaggu

SEQ ID NO: 858618 - RNA, 19 nt, Homo sapiens
  misc_RNA (1)...(19): siRNA sense strand
gaaagcugagcaagaugag

SEQ ID NO: 858619 - RNA, 19 nt, Homo sapiens
  misc_RNA (1)...(19): siRNA sense strand
ugucaucggccaguaaguu

SEQ ID NO: 858620 - RNA, 19 nt, Homo sapiens
  misc_RNA (1)...(19): siRNA sense strand
uggagagcauguucaaacu

SEQ ID NO: 858621 - RNA, 19 nt, Homo sapiens
  misc_RNA (1)...(19): siRNA sense strand
ggccugaagagcaugauca

SEQ ID NO: 858622 - RNA, 19 nt, Homo sapiens
  misc_RNA (1)...(19): siRNA sense strand
aaggccaacuucaauacau

SEQ ID NO: 858623 - RNA, 19 nt, Homo sapiens
  misc_RNA (1)...(19): siRNA sense strand
caaggccaacuucaauaca

SEQ ID NO: 858624 - RNA, 19 nt, Homo sapiens
  misc_RNA (1)...(19): siRNA sense strand
ugaucaaggagguggauga

SEQ ID NO: 858625 - RNA, 19 nt, Homo sapiens
  misc_RNA (1)...(19): siRNA sense strand
ucaaggccaacuucaauac

SEQ ID NO: 858626 - RNA, 19 nt, Homo sapiens
  misc_RNA (1)...(19): siRNA sense strand
gaaguacgcucuauggaua

SEQ ID NO: 858627 - RNA, 19 nt, Homo sapiens
  misc_RNA (1)...(19): siRNA sense strand
gccauuagcuugauuguua

SEQ ID NO: 858628 - RNA, 19 nt, Homo sapiens
  misc_RNA (1)...(19): siRNA sense strand
gaaauccucuucaguguau

SEQ ID NO: 858629 - RNA, 19 nt, Homo sapiens
  misc_RNA (1)...(19): siRNA sense strand
ccagaaaccuuauuaucua

SEQ ID NO: 858630 - RNA, 19 nt, Homo sapiens
  misc_RNA (1)...(19): siRNA sense strand
gaggguaauucucuuauuu

SEQ ID NO: 858631 - RNA, 19 nt, Homo sapiens
  misc_RNA (1)...(19): siRNA sense strand
caacauuucuuccuucuuc

SEQ ID NO: 858632 - RNA, 19 nt, Homo sapiens
  misc_RNA (1)...(19): siRNA sense strand
gaaaugcaacggugucuuu

SEQ ID NO: 858633 - RNA, 19 nt, Homo sapiens
  misc_RNA (1)...(19): siRNA sense strand
caaagucauuggacaguuu

SEQ ID NO: 858634 - RNA, 19 nt, Homo sapiens
  misc_RNA (1)...(19): siRNA sense strand
gaaauaauguuggaagaag

SEQ ID NO: 858635 - RNA, 19 nt, Homo sapiens
  misc_RNA (1)...(19): siRNA sense strand
ggucagaugucuucagaga

SEQ ID NO: 858636 - RNA, 19 nt, Homo sapiens
  misc_RNA (1)...(19): siRNA sense strand
gagcggugcuucucuguga

SEQ ID NO: 858637 - RNA, 19 nt, Homo sapiens
  misc_RNA (1)...(19): siRNA sense strand
gagaaauaauguuggaaga

SEQ ID NO: 858638 - RNA, 19 nt, Homo sapiens
  misc_RNA (1)...(19): siRNA sense strand
aaacuuaucagcugucuaa

SEQ ID NO: 858639 - RNA, 19 nt, Homo sapiens
  misc_RNA (1)...(19): siRNA sense strand
ggaagaacacuuauuaaag

SEQ ID NO: 858640 - RNA, 19 nt, Homo sapiens
  misc_RNA (1)...(19): siRNA sense strand
gacaggaacuggccaagau

SEQ ID NO: 858641 - RNA, 19 nt, Homo sapiens
  misc_RNA (1)...(19): siRNA sense strand
ucacaucauuuaccagaaa

SEQ ID NO: 858642 - RNA, 19 nt, Homo sapiens
  misc_RNA (1)...(19): siRNA sense strand
aaagggauauguuucuuga

SEQ ID NO: 858643 - RNA, 19 nt, Homo sapiens
  misc_RNA (1)...(19): siRNA sense strand
gauacaacauuucuuccuu

SEQ ID NO: 858644 - RNA, 19 nt, Homo sapiens
  misc_RNA (1)...(19): siRNA sense strand
caacugauucugaaacaaa

SEQ ID NO: 858645 - RNA, 19 nt, Homo sapiens
  misc_RNA (1)...(19): siRNA sense strand
ucaauaacaucaggugaaa

SEQ ID NO: 858646 - RNA, 19 nt, Homo sapiens
  misc_RNA (1)...(19): siRNA sense strand
ggacagcgcucagaagacu

SEQ ID NO: 858647 - RNA, 19 nt, Homo sapiens
  misc_RNA (1)...(19): siRNA sense strand
uuacaaaccgucugcauaa

SEQ ID NO: 858648 - RNA, 19 nt, Homo sapiens
  misc_RNA (1)...(19): siRNA sense strand
caaauucgauuagagaaca

SEQ ID NO: 858649 - RNA, 19 nt, Homo sapiens
  misc_RNA (1)...(19): siRNA sense strand
aaaugcaucugaaaccuuu

SEQ ID NO: 858650 - RNA, 19 nt, Homo sapiens
  misc_RNA (1)...(19): siRNA sense strand
ggaucuaacucacauacau

SEQ ID NO: 858651 - RNA, 19 nt, Homo sapiens
  misc_RNA (1)...(19): siRNA sense strand
ucagugcuccguuaaauaa

SEQ ID NO: 858652 - RNA, 19 nt, Homo sapiens
  misc_RNA (1)...(19): siRNA sense strand
ggauauguuucuugacaga

SEQ ID NO: 858653 - RNA, 19 nt, Homo sapiens
  misc_RNA (1)...(19): siRNA sense strand
gcaguuaccaugacgagaa

SEQ ID NO: 858654 - RNA, 19 nt, Homo sapiens
  misc_RNA (1)...(19): siRNA sense strand
ccuggaagaacacuuauua

SEQ ID NO: 858655 - RNA, 19 nt, Homo sapiens
  misc_RNA (1)...(19): siRNA sense strand
ccaaacauccagcaaauuc

SEQ ID NO: 858656 - RNA, 19 nt, Homo sapiens
  misc_RNA (1)...(19): siRNA sense strand
guacaguucagcagacuuu

SEQ ID NO: 858657 - RNA, 19 nt, Homo sapiens
  misc_RNA (1)...(19): siRNA sense strand
cucaagaucuuccuuaugu

SEQ ID NO: 858658 - RNA, 19 nt, Homo sapiens
  misc_RNA (1)...(19): siRNA sense strand
gcaacggugucuuucugaa

SEQ ID NO: 858659 - RNA, 19 nt, Homo sapiens
  misc_RNA (1)...(19): siRNA sense strand
ggacucacagguugcuaua

SEQ ID NO: 858660 - RNA, 19 nt, Homo sapiens
  misc_RNA (1)...(19): siRNA sense strand
gauaaagaggcaacugauu

SEQ ID NO: 858661 - RNA, 19 nt, Homo sapiens
  misc_RNA (1)...(19): siRNA sense strand
gaucuacucugucauucca

SEQ ID NO: 858662 - RNA, 19 nt, Homo sapiens
  misc_RNA (1)...(19): siRNA sense strand
ggugcuguuucuucucuua

SEQ ID NO: 858663 - RNA, 19 nt, Homo sapiens
  misc_RNA (1)...(19): siRNA sense strand
cuugacagaccaacuauua

SEQ ID NO: 858664 - RNA, 19 nt, Homo sapiens
  misc_RNA (1)...(19): siRNA sense strand
gaucugauagcauuuaauc

SEQ ID NO: 858665 - RNA, 19 nt, Homo sapiens
  misc_RNA (1)...(19): siRNA sense strand
caaaccgucugcauaaugg

SEQ ID NO: 858666 - RNA, 19 nt, Homo sapiens
  misc_RNA (1)...(19): siRNA sense strand
cuaaggagguggaaauuuu

SEQ ID NO: 858667 - RNA, 19 nt, Homo sapiens
  misc_RNA (1)...(19): siRNA sense strand
ucauuuaccagaaaccuua

SEQ ID NO: 858668 - RNA, 19 nt, Homo sapiens
  misc_RNA (1)...(19): siRNA sense strand
ggaaucaaguuguccuaac

SEQ ID NO: 858669 - RNA, 19 nt, Homo sapiens
  misc_RNA (1)...(19): siRNA sense strand
gugcuucucugugauggua

SEQ ID NO: 858670 - RNA, 19 nt, Homo sapiens
  misc_RNA (1)...(19): siRNA sense strand
guuaauaccaguagucaga

SEQ ID NO: 858671 - RNA, 19 nt, Homo sapiens
  misc_RNA (1)...(19): siRNA sense strand
ucaaucaacauaagucuga

SEQ ID NO: 858672 - RNA, 19 nt, Homo sapiens
  misc_RNA (1)...(19): siRNA sense strand
cagacuaccuacucuacuu

SEQ ID NO: 858673 - RNA, 19 nt, Homo sapiens
  misc_RNA (1)...(19): siRNA sense strand
guggagaggucaaguuugg

SEQ ID NO: 858674 - RNA, 19 nt, Homo sapiens
  misc_RNA (1)...(19): siRNA sense strand
caggucagaugucuucaga

SEQ ID NO: 858675 - RNA, 19 nt, Homo sapiens
  misc_RNA (1)...(19): siRNA sense strand
gaaugugucuguggguugu

SEQ ID NO: 858676 - RNA, 19 nt, Homo sapiens
  misc_RNA (1)...(19): siRNA sense strand
gaucuaacucacauacauu

SEQ ID NO: 858677 - RNA, 19 nt, Homo sapiens
  misc_RNA (1)...(19): siRNA sense strand
cagccugcauucuuauauu

SEQ ID NO: 858678 - RNA, 19 nt, Homo sapiens
  misc_RNA (1)...(19): siRNA sense strand
gguaaacuaaggcucagua

SEQ ID NO: 858679 - RNA, 19 nt, Homo sapiens
  misc_RNA (1)...(19): siRNA sense strand
ggguaauucucuuauuugu

SEQ ID NO: 858680 - RNA, 19 nt, Homo sapiens
  misc_RNA (1)...(19): siRNA sense strand
gcaucugaaaccuuuaaua

SEQ ID NO: 858681 - RNA, 19 nt, Homo sapiens
  misc_RNA (1)...(19): siRNA sense strand
gagauuagaggaucacuac

SEQ ID NO: 858682 - RNA, 19 nt, Homo sapiens
  misc_RNA (1)...(19): siRNA sense strand
ccguaugcuuuaccaguua

SEQ ID NO: 858683 - RNA, 19 nt, Homo sapiens
  misc_RNA (1)...(19): siRNA sense strand
ccuuuaauaucccaccuaa

SEQ ID NO: 858684 - RNA, 19 nt, Homo sapiens
  misc_RNA (1)...(19): siRNA sense strand
ucucugugaugguaaacua

SEQ ID NO: 858685 - RNA, 19 nt, Homo sapiens
  misc_RNA (1)...(19): siRNA sense strand
gcaacugauucugaaacaa

SEQ ID NO: 858686 - RNA, 19 nt, Homo sapiens
  misc_RNA (1)...(19): siRNA sense strand
agaggcaacugauucugaa

SEQ ID NO: 858687 - RNA, 19 nt, Homo sapiens
  misc_RNA (1)...(19): siRNA sense strand
cuucaaagucugaucagua

SEQ ID NO: 858688 - RNA, 19 nt, Homo sapiens
  misc_RNA (1)...(19): siRNA sense strand
cagcaaauucgauuagaga

SEQ ID NO: 858689 - RNA, 19 nt, Homo sapiens
  misc_RNA (1)...(19): siRNA sense strand
ugaggguaauucucuuauu

SEQ ID NO: 858690 - RNA, 19 nt, Homo sapiens
  misc_RNA (1)...(19): siRNA sense strand
ucccuaauguucacucuga

SEQ ID NO: 858691 - RNA, 19 nt, Homo sapiens
  misc_RNA (1)...(19): siRNA sense strand
caagaucuuccuuauguuc

SEQ ID NO: 858692 - RNA, 19 nt, Homo sapiens
  misc_RNA (1)...(19): siRNA sense strand
gaauggaaggccuggaaga

SEQ ID NO: 858693 - RNA, 19 nt, Homo sapiens
  misc_RNA (1)...(19): siRNA sense strand
ucugguuccugaucugaua

SEQ ID NO: 858694 - RNA, 19 nt, Homo sapiens
  misc_RNA (1)...(19): siRNA sense strand
ucugaaaccuuuaauaucc

SEQ ID NO: 858695 - RNA, 19 nt, Homo sapiens
  misc_RNA (1)...(19): siRNA sense strand
uggcuuaaaugcaucugaa

SEQ ID NO: 858696 - RNA, 19 nt, Homo sapiens
  misc_RNA (1)...(19): siRNA sense strand
cagaaaccuuauuaucuag

SEQ ID NO: 858697 - RNA, 19 nt, Homo sapiens
  misc_RNA (1)...(19): siRNA sense strand
uucaaagucugaucaguau

SEQ ID NO: 858698 - RNA, 19 nt, Homo sapiens
  misc_RNA (1)...(19): siRNA sense strand
ccuccugccugguguuuga

SEQ ID NO: 858699 - RNA, 19 nt, Homo sapiens
  misc_RNA (1)...(19): siRNA sense strand
ugagggcuuuaucccguua

SEQ ID NO: 858700 - RNA, 19 nt, Homo sapiens
  misc_RNA (1)...(19): siRNA sense strand
uagcuugauuguuagagaa

SEQ ID NO: 858701 - RNA, 19 nt, Homo sapiens
  misc_RNA (1)...(19): siRNA sense strand
ggauaaagaggcaacugau

SEQ ID NO: 858702 - RNA, 19 nt, Homo sapiens
  misc_RNA (1)...(19): siRNA sense strand
uggaaggccuggaagaaca

SEQ ID NO: 858703 - RNA, 19 nt, Homo sapiens
  misc_RNA (1)...(19): siRNA sense strand
uaacugauuugcggcuuca

SEQ ID NO: 858704 - RNA, 19 nt, Homo sapiens
  misc_RNA (1)...(19): siRNA sense strand
gacagaccaacuauuacua

SEQ ID NO: 858705 - RNA, 19 nt, Homo sapiens
  misc_RNA (1)...(19): siRNA sense strand
ugauacaccuguucuacuc

SEQ ID NO: 858706 - RNA, 19 nt, Homo sapiens
  misc_RNA (1)...(19): siRNA sense strand
ggcaacugauucugaaaca

SEQ ID NO: 858707 - RNA, 19 nt, Homo sapiens
  misc_RNA (1)...(19): siRNA sense strand
gcucaggaugucuccauuu

SEQ ID NO: 858708 - RNA, 19 nt, Homo sapiens
  misc_RNA (1)...(19): siRNA sense strand
gauuagagaacacugaaag

SEQ ID NO: 858709 - RNA, 19 nt, Homo sapiens
  misc_RNA (1)...(19): siRNA sense strand
ucccaaacauccagcaaau

SEQ ID NO: 858710 - RNA, 19 nt, Homo sapiens
  misc_RNA (1)...(19): siRNA sense strand
caucuucagucccaaacau

SEQ ID NO: 858711 - RNA, 19 nt, Homo sapiens
  misc_RNA (1)...(19): siRNA sense strand
caguuaccaugacgagaaa

SEQ ID NO: 858712 - RNA, 19 nt, Homo sapiens
  misc_RNA (1)...(19): siRNA sense strand
gugcuauucugacuguguu

SEQ ID NO: 858713 - RNA, 19 nt, Homo sapiens
  misc_RNA (1)...(19): siRNA sense strand
ccuauggagucaagcaaau

SEQ ID NO: 858714 - RNA, 19 nt, Homo sapiens
  misc_RNA (1)...(19): siRNA sense strand
aaacuaaggcucaguacag

SEQ ID NO: 858715 - RNA, 19 nt, Homo sapiens
  misc_RNA (1)...(19): siRNA sense strand
gugaaagccagacuaccua

SEQ ID NO: 858716 - RNA, 19 nt, Homo sapiens
  misc_RNA (1)...(19): siRNA sense strand
ucugaucaguaugccauua

SEQ ID NO: 858717 - RNA, 19 nt, Homo sapiens
  misc_RNA (1)...(19): siRNA sense strand
acagaccaacuauuacuaa

SEQ ID NO: 858718 - RNA, 19 nt, Homo sapiens
  misc_RNA (1)...(19): siRNA sense strand
gcuuccaacacuuguaaua

SEQ ID NO: 858719 - RNA, 19 nt, Homo sapiens
  misc_RNA (1)...(19): siRNA sense strand
uuccugaucugauagcauu

SEQ ID NO: 858720 - RNA, 19 nt, Homo sapiens
  misc_RNA (1)...(19): siRNA sense strand
uuuaauaucccaccuaaca

SEQ ID NO: 858721 - RNA, 19 nt, Homo sapiens
  misc_RNA (1)...(19): siRNA sense strand
aauguucacucugaugauu

SEQ ID NO: 858722 - RNA, 19 nt, Homo sapiens
  misc_RNA (1)...(19): siRNA sense strand
auaaagaggcaacugauuc

SEQ ID NO: 858723 - RNA, 19 nt, Homo sapiens
  misc_RNA (1)...(19): siRNA sense strand
ucaagaucuuccuuauguu

SEQ ID NO: 858724 - RNA, 19 nt, Homo sapiens
  misc_RNA (1)...(19): siRNA sense strand
uauccacucucucaagauc

SEQ ID NO: 858725 - RNA, 19 nt, Homo sapiens
  misc_RNA (1)...(19): siRNA sense strand
uguauccacucucucaaga

SEQ ID NO: 858726 - RNA, 19 nt, Homo sapiens
  misc_RNA (1)...(19): siRNA sense strand
ugacaaagcugaggcauug

SEQ ID NO: 858727 - RNA, 19 nt, Homo sapiens
  misc_RNA (1)...(19): siRNA sense strand
gaggaugugucagaacuaa

SEQ ID NO: 858728 - RNA, 19 nt, Homo sapiens
  misc_RNA (1)...(19): siRNA sense strand
caagacagacagaauguuu

SEQ ID NO: 858729 - RNA, 19 nt, Homo sapiens
  misc_RNA (1)...(19): siRNA sense strand
caaagaggaugugucagaa

SEQ ID NO: 858730 - RNA, 19 nt, Homo sapiens
  misc_RNA (1)...(19): siRNA sense strand
gcggaaagaugcacuaguc

SEQ ID NO: 858731 - RNA, 19 nt, Homo sapiens
  misc_RNA (1)...(19): siRNA sense strand
cagagcaaguuaucaaaga

SEQ ID NO: 858732 - RNA, 19 nt, Homo sapiens
  misc_RNA (1)...(19): siRNA sense strand
guacuuugguggacgaguu

SEQ ID NO: 858733 - RNA, 19 nt, Homo sapiens
  misc_RNA (1)...(19): siRNA sense strand
ugucagaacuaaggaauga

SEQ ID NO: 858734 - RNA, 19 nt, Homo sapiens
  misc_RNA (1)...(19): siRNA sense strand
gaaauucgaaccgguguug

SEQ ID NO: 858735 - RNA, 19 nt, Homo sapiens
  misc_RNA (1)...(19): siRNA sense strand
ucaaagaggaugugucaga

SEQ ID NO: 858736 - RNA, 19 nt, Homo sapiens
  misc_RNA (1)...(19): siRNA sense strand
gcaaagggcagaggcaguu

SEQ ID NO: 858737 - RNA, 19 nt, Homo sapiens
  misc_RNA (1)...(19): siRNA sense strand
gcaccgaucaggaagaaau

SEQ ID NO: 858738 - RNA, 19 nt, Homo sapiens
  misc_RNA (1)...(19): siRNA sense strand
cagaagcacuugacaaagc

SEQ ID NO: 858739 - RNA, 19 nt, Homo sapiens
  misc_RNA (1)...(19): siRNA sense strand
gaaaccagagcaaguuauc

SEQ ID NO: 858740 - RNA, 19 nt, Homo sapiens
  misc_RNA (1)...(19): siRNA sense strand
gaauuacagcggaaagaug

SEQ ID NO: 858741 - RNA, 19 nt, Homo sapiens
  misc_RNA (1)...(19): siRNA sense strand
cagaaaccagagcaaguua

SEQ ID NO: 858742 - RNA, 19 nt, Homo sapiens
  misc_RNA (1)...(19): siRNA sense strand
gaacuaaggaaugaauuac

SEQ ID NO: 858743 - RNA, 19 nt, Homo sapiens
  misc_RNA (1)...(19): siRNA sense strand
uaucaaagaggauguguca

SEQ ID NO: 858744 - RNA, 19 nt, Homo sapiens
  misc_RNA (1)...(19): siRNA sense strand
ccagaaaccagagcaaguu

SEQ ID NO: 858745 - RNA, 19 nt, Homo sapiens
  misc_RNA (1)...(19): siRNA sense strand
gaucaggaagaaauucgaa

SEQ ID NO: 858746 - RNA, 19 nt, Homo sapiens
  misc_RNA (1)...(19): siRNA sense strand
uugcaucucuggugaguca

SEQ ID NO: 858747 - RNA, 19 nt, Homo sapiens
  misc_RNA (1)...(19): siRNA sense strand
aagaugcacuaguccagaa

SEQ ID NO: 858748 - RNA, 19 nt, Homo sapiens
  misc_RNA (1)...(19): siRNA sense strand
ccuagaccuuccagcagua

SEQ ID NO: 858749 - RNA, 19 nt, Homo sapiens
  misc_RNA (1)...(19): siRNA sense strand
caauggcaccgaucaggaa

SEQ ID NO: 858750 - RNA, 19 nt, Homo sapiens
  misc_RNA (1)...(19): siRNA sense strand
uccagaagcacuugacaaa

SEQ ID NO: 858751 - RNA, 19 nt, Homo sapiens
  misc_RNA (1)...(19): siRNA sense strand
gaagccaacgugagcaaag

SEQ ID NO: 858752 - RNA, 19 nt, Homo sapiens
  misc_RNA (1)...(19): siRNA sense strand
gcaagacagacagaauguu

SEQ ID NO: 858753 - RNA, 19 nt, Homo sapiens
  misc_RNA (1)...(19): siRNA sense strand
uggcaccgaucaggaagaa

SEQ ID NO: 858754 - RNA, 19 nt, Homo sapiens
  misc_RNA (1)...(19): siRNA sense strand
aagaggaugugucagaacu

SEQ ID NO: 858755 - RNA, 19 nt, Homo sapiens
  misc_RNA (1)...(19): siRNA sense strand
gaaugaauuacagcggaaa

SEQ ID NO: 858756 - RNA, 19 nt, Homo sapiens
  misc_RNA (1)...(19): siRNA sense strand
ggauauugcaagacagaca

SEQ ID NO: 858757 - RNA, 19 nt, Homo sapiens
  misc_RNA (1)...(19): siRNA sense strand
ucagaacuaaggaaugaau

SEQ ID NO: 858758 - RNA, 19 nt, Homo sapiens
  misc_RNA (1)...(19): siRNA sense strand
ggaugugucagaacuaagg

SEQ ID NO: 858759 - RNA, 19 nt, Homo sapiens
  misc_RNA (1)...(19): siRNA sense strand
acuaaggaaugaauuacag

SEQ ID NO: 858760 - RNA, 19 nt, Homo sapiens
  misc_RNA (1)...(19): siRNA sense strand
uuucgaggcuugcuuugca

SEQ ID NO: 858761 - RNA, 19 nt, Homo sapiens
  misc_RNA (1)...(19): siRNA sense strand
gaguuggagucaucuuucg

SEQ ID NO: 858762 - RNA, 19 nt, Homo sapiens
  misc_RNA (1)...(19): siRNA sense strand
gaccuuccagcaguacuuu

SEQ ID NO: 858763 - RNA, 19 nt, Homo sapiens
  misc_RNA (1)...(19): siRNA sense strand
cgaguuggagucaucuuuc

SEQ ID NO: 858764 - RNA, 19 nt, Homo sapiens
  misc_RNA (1)...(19): siRNA sense strand
gaucaguguauccagaagu

SEQ ID NO: 858765 - RNA, 19 nt, Homo sapiens
  misc_RNA (1)...(19): siRNA sense strand
ccagagcaaguuaucaaag

SEQ ID NO: 858766 - RNA, 19 nt, Homo sapiens
  misc_RNA (1)...(19): siRNA sense strand
aaccagagcaaguuaucaa

SEQ ID NO: 858767 - RNA, 19 nt, Homo sapiens
  misc_RNA (1)...(19): siRNA sense strand
agagcaaguuaucaaagag

SEQ ID NO: 858768 - RNA, 19 nt, Homo sapiens
  misc_RNA (1)...(19): siRNA sense strand
uggacgaguuggagucauc

SEQ ID NO: 858769 - RNA, 19 nt, Homo sapiens
  misc_RNA (1)...(19): siRNA sense strand
guuucuggauauugcaaga

SEQ ID NO: 858770 - RNA, 19 nt, Homo sapiens
  misc_RNA (1)...(19): siRNA sense strand
ugaauuacagcggaaagau

SEQ ID NO: 858771 - RNA, 19 nt, Homo sapiens
  misc_RNA (1)...(19): siRNA sense strand
cagaacuaaggaaugaauu

SEQ ID NO: 858772 - RNA, 19 nt, Homo sapiens
  misc_RNA (1)...(19): siRNA sense strand
ggacaaaucuuucucuaaa

SEQ ID NO: 858773 - RNA, 19 nt, Homo sapiens
  misc_RNA (1)...(19): siRNA sense strand
guacuaugcuccucacuua

SEQ ID NO: 858774 - RNA, 19 nt, Homo sapiens
  misc_RNA (1)...(19): siRNA sense strand
gaagagggauaauaugguu

SEQ ID NO: 858775 - RNA, 19 nt, Homo sapiens
  misc_RNA (1)...(19): siRNA sense strand
gaugaacucuccuguagaa

SEQ ID NO: 858776 - RNA, 19 nt, Homo sapiens
  misc_RNA (1)...(19): siRNA sense strand
gcacagagacagccaauga

SEQ ID NO: 858777 - RNA, 19 nt, Homo sapiens
  misc_RNA (1)...(19): siRNA sense strand
gaugaagccucuuacgaaa

SEQ ID NO: 858778 - RNA, 19 nt, Homo sapiens
  misc_RNA (1)...(19): siRNA sense strand
caacagcacuuguacauac

SEQ ID NO: 858779 - RNA, 19 nt, Homo sapiens
  misc_RNA (1)...(19): siRNA sense strand
cacagaaccuugcaucuaa

SEQ ID NO: 858780 - RNA, 19 nt, Homo sapiens
  misc_RNA (1)...(19): siRNA sense strand
gaacaacauucgauuaacu

SEQ ID NO: 858781 - RNA, 19 nt, Homo sapiens
  misc_RNA (1)...(19): siRNA sense strand
gaauacgccucgauaaaca

SEQ ID NO: 858782 - RNA, 19 nt, Homo sapiens
  misc_RNA (1)...(19): siRNA sense strand
cgauauagauacugcuuaa

SEQ ID NO: 858783 - RNA, 19 nt, Homo sapiens
  misc_RNA (1)...(19): siRNA sense strand
gcacgaauacgccucgaua

SEQ ID NO: 858784 - RNA, 19 nt, Homo sapiens
  misc_RNA (1)...(19): siRNA sense strand
aaagagagcuauugcacuu

SEQ ID NO: 858785 - RNA, 19 nt, Homo sapiens
  misc_RNA (1)...(19): siRNA sense strand
gcacaaaugauccuuaugu

SEQ ID NO: 858786 - RNA, 19 nt, Homo sapiens
  misc_RNA (1)...(19): siRNA sense strand
caaagcagcucauucacau

SEQ ID NO: 858787 - RNA, 19 nt, Homo sapiens
  misc_RNA (1)...(19): siRNA sense strand
gaagaugaaguauuuguga

SEQ ID NO: 858788 - RNA, 19 nt, Homo sapiens
  misc_RNA (1)...(19): siRNA sense strand
caacauagcagacaacaca

SEQ ID NO: 858789 - RNA, 19 nt, Homo sapiens
  misc_RNA (1)...(19): siRNA sense strand
gcacugagucaucaaguaa

SEQ ID NO: 858790 - RNA, 19 nt, Homo sapiens
  misc_RNA (1)...(19): siRNA sense strand
gcacuuaacacuggaaauu

SEQ ID NO: 858791 - RNA, 19 nt, Homo sapiens
  misc_RNA (1)...(19): siRNA sense strand
cagaacaacugaugggauu

SEQ ID NO: 858792 - RNA, 19 nt, Homo sapiens
  misc_RNA (1)...(19): siRNA sense strand
gaauauacaggguuuagaa

SEQ ID NO: 858793 - RNA, 19 nt, Homo sapiens
  misc_RNA (1)...(19): siRNA sense strand
caacagcaagcaaauagua

SEQ ID NO: 858794 - RNA, 19 nt, Homo sapiens
  misc_RNA (1)...(19): siRNA sense strand
gaucaugucugagguuaug

SEQ ID NO: 858795 - RNA, 19 nt, Homo sapiens
  misc_RNA (1)...(19): siRNA sense strand
gagaucaugucugagguua

SEQ ID NO: 858796 - RNA, 19 nt, Homo sapiens
  misc_RNA (1)...(19): siRNA sense strand
gaucuaagucgagcuguua

SEQ ID NO: 858797 - RNA, 19 nt, Homo sapiens
  misc_RNA (1)...(19): siRNA sense strand
aaagaacacuacaggguuu

SEQ ID NO: 858798 - RNA, 19 nt, Homo sapiens
  misc_RNA (1)...(19): siRNA sense strand
gaaaagagguauaauuugg

SEQ ID NO: 858799 - RNA, 19 nt, Homo sapiens
  misc_RNA (1)...(19): siRNA sense strand
ucaaguaacugcugccaau

SEQ ID NO: 858800 - RNA, 19 nt, Homo sapiens
  misc_RNA (1)...(19): siRNA sense strand
gggaacaacauucgauuaa

SEQ ID NO: 858801 - RNA, 19 nt, Homo sapiens
  misc_RNA (1)...(19): siRNA sense strand
gaccgaaacggaaauauga

SEQ ID NO: 858802 - RNA, 19 nt, Homo sapiens
  misc_RNA (1)...(19): siRNA sense strand
gccaauaccucagaaacaa

SEQ ID NO: 858803 - RNA, 19 nt, Homo sapiens
  misc_RNA (1)...(19): siRNA sense strand
acaaauaccucggacaaau

SEQ ID NO: 858804 - RNA, 19 nt, Homo sapiens
  misc_RNA (1)...(19): siRNA sense strand
caauggaugugaaggaguu

SEQ ID NO: 858805 - RNA, 19 nt, Homo sapiens
  misc_RNA (1)...(19): siRNA sense strand
gcgagaagagggauaauau

SEQ ID NO: 858806 - RNA, 19 nt, Homo sapiens
  misc_RNA (1)...(19): siRNA sense strand
guuacagccuucaaauauu

SEQ ID NO: 858807 - RNA, 19 nt, Homo sapiens
  misc_RNA (1)...(19): siRNA sense strand
ucagcacacuuugcauuua

SEQ ID NO: 858808 - RNA, 19 nt, Homo sapiens
  misc_RNA (1)...(19): siRNA sense strand
ggaagacaaugauccugau

SEQ ID NO: 858809 - RNA, 19 nt, Homo sapiens
  misc_RNA (1)...(19): siRNA sense strand
cagcacaaaugauccuuau

SEQ ID NO: 858810 - RNA, 19 nt, Homo sapiens
  misc_RNA (1)...(19): siRNA sense strand
acauauaccuaggacuuua

SEQ ID NO: 858811 - RNA, 19 nt, Homo sapiens
  misc_RNA (1)...(19): siRNA sense strand
gaaagcaggcugucaguac

SEQ ID NO: 858812 - RNA, 19 nt, Homo sapiens
  misc_RNA (1)...(19): siRNA sense strand
agagagcuauugcacuuaa

SEQ ID NO: 858813 - RNA, 19 nt, Homo sapiens
  misc_RNA (1)...(19): siRNA sense strand
gaagaggagucggaacauc

SEQ ID NO: 858814 - RNA, 19 nt, Homo sapiens
  misc_RNA (1)...(19): siRNA sense strand
gcaggaagccaaacuacug

SEQ ID NO: 858815 - RNA, 19 nt, Homo sapiens
  misc_RNA (1)...(19): siRNA sense strand
uauacaggguuuagaaaga

SEQ ID NO: 858816 - RNA, 19 nt, Homo sapiens
  misc_RNA (1)...(19): siRNA sense strand
ccacaacauucuccaguca

SEQ ID NO: 858817 - RNA, 19 nt, Homo sapiens
  misc_RNA (1)...(19): siRNA sense strand
cugaacagccugauuauga

SEQ ID NO: 858818 - RNA, 19 nt, Homo sapiens
  misc_RNA (1)...(19): siRNA sense strand
ccaauaaaugcacgacaua

SEQ ID NO: 858819 - RNA, 19 nt, Homo sapiens
  misc_RNA (1)...(19): siRNA sense strand
gaacaauaccagcaacauc

SEQ ID NO: 858820 - RNA, 19 nt, Homo sapiens
  misc_RNA (1)...(19): siRNA sense strand
cuaaagaccucagucagau

SEQ ID NO: 858821 - RNA, 19 nt, Homo sapiens
  misc_RNA (1)...(19): siRNA sense strand
gaagccaaacuacugcuaa

SEQ ID NO: 858822 - RNA, 19 nt, Homo sapiens
  misc_RNA (1)...(19): siRNA sense strand
gaacagccugauuaugauu

SEQ ID NO: 858823 - RNA, 19 nt, Homo sapiens
  misc_RNA (1)...(19): siRNA sense strand
ccaaugaaaccuacuuaug

SEQ ID NO: 858824 - RNA, 19 nt, Homo sapiens
  misc_RNA (1)...(19): siRNA sense strand
gagaagagggauaauaugg

SEQ ID NO: 858825 - RNA, 19 nt, Homo sapiens
  misc_RNA (1)...(19): siRNA sense strand
cgacauauaccuaggacuu

SEQ ID NO: 858826 - RNA, 19 nt, Homo sapiens
  misc_RNA (1)...(19): siRNA sense strand
caacugaugggauucaaga

SEQ ID NO: 858827 - RNA, 19 nt, Homo sapiens
  misc_RNA (1)...(19): siRNA sense strand
ucacagaaccuugcaucua

SEQ ID NO: 858828 - RNA, 19 nt, Homo sapiens
  misc_RNA (1)...(19): siRNA sense strand
ucaaucaguuugccaauac

SEQ ID NO: 858829 - RNA, 19 nt, Homo sapiens
  misc_RNA (1)...(19): siRNA sense strand
cgagggccaucucuuauuc

SEQ ID NO: 858830 - RNA, 19 nt, Homo sapiens
  misc_RNA (1)...(19): siRNA sense strand
ggacaucugcccauugcaa

SEQ ID NO: 858831 - RNA, 19 nt, Homo sapiens
  misc_RNA (1)...(19): siRNA sense strand
aaacaaauaccucggacaa

SEQ ID NO: 858832 - RNA, 19 nt, Homo sapiens
  misc_RNA (1)...(19): siRNA sense strand
ucgauuaacuguaccuuca

SEQ ID NO: 858833 - RNA, 19 nt, Homo sapiens
  misc_RNA (1)...(19): siRNA sense strand
ucauguagauggcggcauu

SEQ ID NO: 858834 - RNA, 19 nt, Homo sapiens
  misc_RNA (1)...(19): siRNA sense strand
cgacuacaauggagagauc

SEQ ID NO: 858835 - RNA, 19 nt, Homo sapiens
  misc_RNA (1)...(19): siRNA sense strand
guacauacaaguccaucaa

SEQ ID NO: 858836 - RNA, 19 nt, Homo sapiens
  misc_RNA (1)...(19): siRNA sense strand
gucaaucaguuugccaaua

SEQ ID NO: 858837 - RNA, 19 nt, Homo sapiens
  misc_RNA (1)...(19): siRNA sense strand
guaccucuacgcaaaguaa

SEQ ID NO: 858838 - RNA, 19 nt, Homo sapiens
  misc_RNA (1)...(19): siRNA sense strand
cgagaugguuccagcacaa

SEQ ID NO: 858839 - RNA, 19 nt, Homo sapiens
  misc_RNA (1)...(19): siRNA sense strand
ggaaaaucaugaaucagaa

SEQ ID NO: 858840 - RNA, 19 nt, Homo sapiens
  misc_RNA (1)...(19): siRNA sense strand
gcagguguauggcgagaag

SEQ ID NO: 858841 - RNA, 19 nt, Homo sapiens
  misc_RNA (1)...(19): siRNA sense strand
gaaggaugauguggugcuu

SEQ ID NO: 858842 - RNA, 19 nt, Homo sapiens
  misc_RNA (1)...(19): siRNA sense strand
cugaugggauucaagauga

SEQ ID NO: 858843 - RNA, 19 nt, Homo sapiens
  misc_RNA (1)...(19): siRNA sense strand
gguauaauuugggcgacua

SEQ ID NO: 858844 - RNA, 19 nt, Homo sapiens
  misc_RNA (1)...(19): siRNA sense strand
gaugauugaccgccuagaa

SEQ ID NO: 858845 - RNA, 19 nt, Homo sapiens
  misc_RNA (1)...(19): siRNA sense strand
gaacaacugaugggauuca

SEQ ID NO: 858846 - RNA, 19 nt, Homo sapiens
  misc_RNA (1)...(19): siRNA sense strand
gaacucuccuguagaaaau

SEQ ID NO: 858847 - RNA, 19 nt, Homo sapiens
  misc_RNA (1)...(19): siRNA sense strand
ggacaccaucccuacauga

SEQ ID NO: 858848 - RNA, 19 nt, Homo sapiens
  misc_RNA (1)...(19): siRNA sense strand
ggaaagcaggcugucagua

SEQ ID NO: 858849 - RNA, 19 nt, Homo sapiens
  misc_RNA (1)...(19): siRNA sense strand
gaucuuauccgaccgaaac

SEQ ID NO: 858850 - RNA, 19 nt, Homo sapiens
  misc_RNA (1)...(19): siRNA sense strand
ugaugaagccucuuacgaa

SEQ ID NO: 858851 - RNA, 19 nt, Homo sapiens
  misc_RNA (1)...(19): siRNA sense strand
ugaacagccugauuaugau

SEQ ID NO: 858852 - RNA, 19 nt, Homo sapiens
  misc_RNA (1)...(19): siRNA sense strand
uaagugcuguuccaucauc

SEQ ID NO: 858853 - RNA, 19 nt, Homo sapiens
  misc_RNA (1)...(19): siRNA sense strand
caacauucgauuaacugua

SEQ ID NO: 858854 - RNA, 19 nt, Homo sapiens
  misc_RNA (1)...(19): siRNA sense strand
ggaacaacauucgauuaac

SEQ ID NO: 858855 - RNA, 19 nt, Homo sapiens
  misc_RNA (1)...(19): siRNA sense strand
ccagaggcagaaaguaaua

SEQ ID NO: 858856 - RNA, 19 nt, Homo sapiens
  misc_RNA (1)...(19): siRNA sense strand
gcagaaaguaauauugcuu

SEQ ID NO: 858857 - RNA, 19 nt, Homo sapiens
  misc_RNA (1)...(19): siRNA sense strand
ugauuuggauucugaagau

SEQ ID NO: 858858 - RNA, 19 nt, Homo sapiens
  misc_RNA (1)...(19): siRNA sense strand
auggagagaucaugucuga

SEQ ID NO: 858859 - RNA, 19 nt, Homo sapiens
  misc_RNA (1)...(19): siRNA sense strand
gggaugugcgauauagaua

SEQ ID NO: 858860 - RNA, 19 nt, Homo sapiens
  misc_RNA (1)...(19): siRNA sense strand
caaugaaaccuacuuaugc

SEQ ID NO: 858861 - RNA, 19 nt, Homo sapiens
  misc_RNA (1)...(19): siRNA sense strand
gcagaugcccaccggaaug

SEQ ID NO: 858862 - RNA, 19 nt, Homo sapiens
  misc_RNA (1)...(19): siRNA sense strand
ugcaguaccucuacgcaaa

SEQ ID NO: 858863 - RNA, 19 nt, Homo sapiens
  misc_RNA (1)...(19): siRNA sense strand
ugcccgaccugcacgaaua

SEQ ID NO: 858864 - RNA, 19 nt, Homo sapiens
  misc_RNA (1)...(19): siRNA sense strand
ugucgagggccaucucuua

SEQ ID NO: 858865 - RNA, 19 nt, Homo sapiens
  misc_RNA (1)...(19): siRNA sense strand
auacaggguuuagaaagaa

SEQ ID NO: 858866 - RNA, 19 nt, Homo sapiens
  misc_RNA (1)...(19): siRNA sense strand
aacagcagcuugcacaaau

SEQ ID NO: 858867 - RNA, 19 nt, Homo sapiens
  misc_RNA (1)...(19): siRNA sense strand
ccagcaacaucaacagcaa

SEQ ID NO: 858868 - RNA, 19 nt, Homo sapiens
  misc_RNA (1)...(19): siRNA sense strand
uaaagaccucagucagaua

SEQ ID NO: 858869 - RNA, 19 nt, Homo sapiens
  misc_RNA (1)...(19): siRNA sense strand
gcaagcaaauaguaauucc

SEQ ID NO: 858870 - RNA, 19 nt, Homo sapiens
  misc_RNA (1)...(19): siRNA sense strand
uuuaagugcuguuccauca

SEQ ID NO: 858871 - RNA, 19 nt, Homo sapiens
  misc_RNA (1)...(19): siRNA sense strand
caacggcagguucagcuuu

SEQ ID NO: 858872 - RNA, 19 nt, Homo sapiens
  misc_RNA (1)...(19): siRNA sense strand
gaacugcucuguugcaaga

SEQ ID NO: 858873 - RNA, 19 nt, Homo sapiens
  misc_RNA (1)...(19): siRNA sense strand
gguaaggccuucagucaua

SEQ ID NO: 858874 - RNA, 19 nt, Homo sapiens
  misc_RNA (1)...(19): siRNA sense strand
gagaaacccuaucagugua

SEQ ID NO: 858875 - RNA, 19 nt, Homo sapiens
  misc_RNA (1)...(19): siRNA sense strand
ggcaagaacugcucuguug

SEQ ID NO: 858876 - RNA, 19 nt, Homo sapiens
  misc_RNA (1)...(19): siRNA sense strand
cagagaagaugcaguggua

SEQ ID NO: 858877 - RNA, 19 nt, Homo sapiens
  misc_RNA (1)...(19): siRNA sense strand
gcucagaccuuaucaagca

SEQ ID NO: 858878 - RNA, 19 nt, Homo sapiens
  misc_RNA (1)...(19): siRNA sense strand
gaaacucccaugucuuaua

SEQ ID NO: 858879 - RNA, 19 nt, Homo sapiens
  misc_RNA (1)...(19): siRNA sense strand
agucauagcucagaccuua

SEQ ID NO: 858880 - RNA, 19 nt, Homo sapiens
  misc_RNA (1)...(19): siRNA sense strand
gagaagccauguagggaaa

SEQ ID NO: 858881 - RNA, 19 nt, Homo sapiens
  misc_RNA (1)...(19): siRNA sense strand
aaacucccaugucuuauaa

SEQ ID NO: 858882 - RNA, 19 nt, Homo sapiens
  misc_RNA (1)...(19): siRNA sense strand
gagaagacauugcccagau

SEQ ID NO: 858883 - RNA, 19 nt, Homo sapiens
  misc_RNA (1)...(19): siRNA sense strand
gcuagagaauuaagugaaa

SEQ ID NO: 858884 - RNA, 19 nt, Homo sapiens
  misc_RNA (1)...(19): siRNA sense strand
ggagaggccuggaaaagua

SEQ ID NO: 858885 - RNA, 19 nt, Homo sapiens
  misc_RNA (1)...(19): siRNA sense strand
ucauaaagguggaggaaga

SEQ ID NO: 858886 - RNA, 19 nt, Homo sapiens
  misc_RNA (1)...(19): siRNA sense strand
gaauacaggccucauugaa

SEQ ID NO: 858887 - RNA, 19 nt, Homo sapiens
  misc_RNA (1)...(19): siRNA sense strand
ggacacagcaggauucauc

SEQ ID NO: 858888 - RNA, 19 nt, Homo sapiens
  misc_RNA (1)...(19): siRNA sense strand
gcucugcccuugucauuca

SEQ ID NO: 858889 - RNA, 19 nt, Homo sapiens
  misc_RNA (1)...(19): siRNA sense strand
ugagaaacccuacgaaugu

SEQ ID NO: 858890 - RNA, 19 nt, Homo sapiens
  misc_RNA (1)...(19): siRNA sense strand
ggagaagcccuaugagugu

SEQ ID NO: 858891 - RNA, 19 nt, Homo sapiens
  misc_RNA (1)...(19): siRNA sense strand
ggaggaugcugcagagaag

SEQ ID NO: 858892 - RNA, 19 nt, Homo sapiens
  misc_RNA (1)...(19): siRNA sense strand
cuacgaaugugaagagugu

SEQ ID NO: 858893 - RNA, 19 nt, Homo sapiens
  misc_RNA (1)...(19): siRNA sense strand
gaucccagccuuuacaaga

SEQ ID NO: 858894 - RNA, 19 nt, Homo sapiens
  misc_RNA (1)...(19): siRNA sense strand
ucccaugucuuauaaaugu

SEQ ID NO: 858895 - RNA, 19 nt, Homo sapiens
  misc_RNA (1)...(19): siRNA sense strand
aaagaaguuucacucagaa

SEQ ID NO: 858896 - RNA, 19 nt, Homo sapiens
  misc_RNA (1)...(19): siRNA sense strand
caagauggcacuauugaca

SEQ ID NO: 858897 - RNA, 19 nt, Homo sapiens
  misc_RNA (1)...(19): siRNA sense strand
ugagaaacccuaucagugu

SEQ ID NO: 858898 - RNA, 19 nt, Homo sapiens
  misc_RNA (1)...(19): siRNA sense strand
uugaaacucccaugucuua

SEQ ID NO: 858899 - RNA, 19 nt, Homo sapiens
  misc_RNA (1)...(19): siRNA sense strand
aaaggagcaugggaagaua

SEQ ID NO: 858900 - RNA, 19 nt, Homo sapiens
  misc_RNA (1)...(19): siRNA sense strand
gagaaacccuacgaaugug

SEQ ID NO: 858901 - RNA, 19 nt, Homo sapiens
  misc_RNA (1)...(19): siRNA sense strand
cgagagcucugccgacagu

SEQ ID NO: 858902 - RNA, 19 nt, Homo sapiens
  misc_RNA (1)...(19): siRNA sense strand
gucacaaaguagccaauuu

SEQ ID NO: 858903 - RNA, 19 nt, Homo sapiens
  misc_RNA (1)...(19): siRNA sense strand
gagggcaggcuacaaagaa

SEQ ID NO: 858904 - RNA, 19 nt, Homo sapiens
  misc_RNA (1)...(19): siRNA sense strand
gauggagcuucuggucaua

SEQ ID NO: 858905 - RNA, 19 nt, Homo sapiens
  misc_RNA (1)...(19): siRNA sense strand
auacaggccucauugaaca

SEQ ID NO: 858906 - RNA, 19 nt, Homo sapiens
  misc_RNA (1)...(19): siRNA sense strand
guugcaagauggcacuauu

SEQ ID NO: 858907 - RNA, 19 nt, Homo sapiens
  misc_RNA (1)...(19): siRNA sense strand
ucacaaaguagccaauuuc

SEQ ID NO: 858908 - RNA, 19 nt, Homo sapiens
  misc_RNA (1)...(19): siRNA sense strand
aauccacacuggugagaaa

SEQ ID NO: 858909 - RNA, 19 nt, Homo sapiens
  misc_RNA (1)...(19): siRNA sense strand
cagaauacaggccucauug

SEQ ID NO: 858910 - RNA, 19 nt, Homo sapiens
  misc_RNA (1)...(19): siRNA sense strand
gaagccauaugagugugaa

SEQ ID NO: 858911 - RNA, 19 nt, Homo sapiens
  misc_RNA (1)...(19): siRNA sense strand
gugagaaacccuacgaaug

SEQ ID NO: 858912 - RNA, 19 nt, Homo sapiens
  misc_RNA (1)...(19): siRNA sense strand
aauccacacuggugagaaa

SEQ ID NO: 858913 - RNA, 19 nt, Homo sapiens
  misc_RNA (1)...(19): siRNA sense strand
gugguagcuucuaggcuua

SEQ ID NO: 858914 - RNA, 19 nt, Homo sapiens
  misc_RNA (1)...(19): siRNA sense strand
gagcucugcccuugucauu

SEQ ID NO: 858915 - RNA, 19 nt, Homo sapiens
  misc_RNA (1)...(19): siRNA sense strand
gaagacauugcccagauuc

SEQ ID NO: 858916 - RNA, 19 nt, Homo sapiens
  misc_RNA (1)...(19): siRNA sense strand
agaagacauugcccagauu

SEQ ID NO: 858917 - RNA, 19 nt, Homo sapiens
  misc_RNA (1)...(19): siRNA sense strand
gaauggacacagcaggauu

SEQ ID NO: 858918 - RNA, 19 nt, Homo sapiens
  misc_RNA (1)...(19): siRNA sense strand
caucagagaagccauguag

SEQ ID NO: 858919 - RNA, 19 nt, Homo sapiens
  misc_RNA (1)...(19): siRNA sense strand
gaaguuucacucagaauac

SEQ ID NO: 858920 - RNA, 19 nt, Homo sapiens
  misc_RNA (1)...(19): siRNA sense strand
ccaugaauguggaaagagu

SEQ ID NO: 858921 - RNA, 19 nt, Homo sapiens
  misc_RNA (1)...(19): siRNA sense strand
uguaaugagugugaaagaa

SEQ ID NO: 858922 - RNA, 19 nt, Homo sapiens
  misc_RNA (1)...(19): siRNA sense strand
ucccagccuuuacaagaua

SEQ ID NO: 858923 - RNA, 19 nt, Homo sapiens
  misc_RNA (1)...(19): siRNA sense strand
cgaauuucauaccuuguuc

SEQ ID NO: 858924 - RNA, 19 nt, Homo sapiens
  misc_RNA (1)...(19): siRNA sense strand
gaaacccuaucaguguaau

SEQ ID NO: 858925 - RNA, 19 nt, Homo sapiens
  misc_RNA (1)...(19): siRNA sense strand
agaaguuucacucagaaua

SEQ ID NO: 858926 - RNA, 19 nt, Homo sapiens
  misc_RNA (1)...(19): siRNA sense strand
caggagggcaggcuacaaa

SEQ ID NO: 858927 - RNA, 19 nt, Homo sapiens
  misc_RNA (1)...(19): siRNA sense strand
guaaugagugugaaagaag

SEQ ID NO: 858928 - RNA, 19 nt, Homo sapiens
  misc_RNA (1)...(19): siRNA sense strand
gcugaggagcuuccagaaa

SEQ ID NO: 858929 - RNA, 19 nt, Homo sapiens
  misc_RNA (1)...(19): siRNA sense strand
gaaaaggcuucacccgaau

SEQ ID NO: 858930 - RNA, 19 nt, Homo sapiens
  misc_RNA (1)...(19): siRNA sense strand
uaaugagugugaaagaagu

SEQ ID NO: 858931 - RNA, 19 nt, Homo sapiens
  misc_RNA (1)...(19): siRNA sense strand
caucagaggauccauacug

SEQ ID NO: 858932 - RNA, 19 nt, Homo sapiens
  misc_RNA (1)...(19): siRNA sense strand
gcagccuccuugaacauca

SEQ ID NO: 858933 - RNA, 19 nt, Homo sapiens
  misc_RNA (1)...(19): siRNA sense strand
gaccuuaucaagcaucaga

SEQ ID NO: 858934 - RNA, 19 nt, Homo sapiens
  misc_RNA (1)...(19): siRNA sense strand
ggaagaagaagccgguuuu

SEQ ID NO: 858935 - RNA, 19 nt, Homo sapiens
  misc_RNA (1)...(19): siRNA sense strand
gacauugcccagauuccua

SEQ ID NO: 858936 - RNA, 19 nt, Homo sapiens
  misc_RNA (1)...(19): siRNA sense strand
agacaucagaggauccaua

SEQ ID NO: 858937 - RNA, 19 nt, Homo sapiens
  misc_RNA (1)...(19): siRNA sense strand
gaaacccuacgaaugugaa

SEQ ID NO: 858938 - RNA, 19 nt, Homo sapiens
  misc_RNA (1)...(19): siRNA sense strand
ggagggcaggcuacaaaga

SEQ ID NO: 858939 - RNA, 19 nt, Homo sapiens
  misc_RNA (1)...(19): siRNA sense strand
gagcugcagccuccuugaa

SEQ ID NO: 858940 - RNA, 19 nt, Homo sapiens
  misc_RNA (1)...(19): siRNA sense strand
aaagguggaggaagaagaa

SEQ ID NO: 858941 - RNA, 19 nt, Homo sapiens
  misc_RNA (1)...(19): siRNA sense strand
cauaugagugugaagaaug

SEQ ID NO: 858942 - RNA, 19 nt, Homo sapiens
  misc_RNA (1)...(19): siRNA sense strand
cugaggagcuuccagaaaa

SEQ ID NO: 858943 - RNA, 19 nt, Homo sapiens
  misc_RNA (1)...(19): siRNA sense strand
ggugagaaacccuaucagu

SEQ ID NO: 858944 - RNA, 19 nt, Homo sapiens
  misc_RNA (1)...(19): siRNA sense strand
gaaagccaguuggaaaaug

SEQ ID NO: 858945 - RNA, 19 nt, Homo sapiens
  misc_RNA (1)...(19): siRNA sense strand
guaaggccuucagucauag

SEQ ID NO: 858946 - RNA, 19 nt, Homo sapiens
  misc_RNA (1)...(19): siRNA sense strand
ccauaugagugugaagaau

SEQ ID NO: 858947 - RNA, 19 nt, Homo sapiens
  misc_RNA (1)...(19): siRNA sense strand
ggugagaagccauaugagu

SEQ ID NO: 858948 - RNA, 19 nt, Homo sapiens
  misc_RNA (1)...(19): siRNA sense strand
ggugagaaacccuacgaau

SEQ ID NO: 858949 - RNA, 19 nt, Homo sapiens
  misc_RNA (1)...(19): siRNA sense strand
ugagaagccauaugagugu

SEQ ID NO: 858950 - RNA, 19 nt, Homo sapiens
  misc_RNA (1)...(19): siRNA sense strand
gggcaagaacugcucuguu

SEQ ID NO: 858951 - RNA, 19 nt, Homo sapiens
  misc_RNA (1)...(19): siRNA sense strand
gcugcagccuccuugaaca

SEQ ID NO: 858952 - RNA, 19 nt, Homo sapiens
  misc_RNA (1)...(19): siRNA sense strand
ggucauaaagguggaggaa

SEQ ID NO: 858953 - RNA, 19 nt, Homo sapiens
  misc_RNA (1)...(19): siRNA sense strand
agauggagcuucuggucau

SEQ ID NO: 858954 - RNA, 19 nt, Homo sapiens
  misc_RNA (1)...(19): siRNA sense strand
gauggaaagccaguuggaa

SEQ ID NO: 858955 - RNA, 19 nt, Homo sapiens
  misc_RNA (1)...(19): siRNA sense strand
ccguaucagugcaguaugu

SEQ ID NO: 858956 - RNA, 19 nt, Homo sapiens
  misc_RNA (1)...(19): siRNA sense strand
ugcagaagcuggugaacag

SEQ ID NO: 858957 - RNA, 19 nt, Homo sapiens
  misc_RNA (1)...(19): siRNA sense strand
gaagaugcagugguagcuu

SEQ ID NO: 858958 - RNA, 19 nt, Homo sapiens
  misc_RNA (1)...(19): siRNA sense strand
gauaucgugccaccugaga

SEQ ID NO: 858959 - RNA, 19 nt, Homo sapiens
  misc_RNA (1)...(19): siRNA sense strand
uaaagguggaggaagaaga

SEQ ID NO: 858960 - RNA, 19 nt, Homo sapiens
  misc_RNA (1)...(19): siRNA sense strand
gugguaaggccuucaguca

SEQ ID NO: 858961 - RNA, 19 nt, Homo sapiens
  misc_RNA (1)...(19): siRNA sense strand
caagaacugcucuguugca

SEQ ID NO: 858962 - RNA, 19 nt, Homo sapiens
  misc_RNA (1)...(19): siRNA sense strand
uaaugaaggcucugcucaa

SEQ ID NO: 858963 - RNA, 19 nt, Homo sapiens
  misc_RNA (1)...(19): siRNA sense strand
ucagaauacaggccucauu

SEQ ID NO: 858964 - RNA, 19 nt, Homo sapiens
  misc_RNA (1)...(19): siRNA sense strand
ggaggugguggugcuauug

SEQ ID NO: 858965 - RNA, 19 nt, Homo sapiens
  misc_RNA (1)...(19): siRNA sense strand
ugugaugacugugggaaga

SEQ ID NO: 858966 - RNA, 19 nt, Homo sapiens
  misc_RNA (1)...(19): siRNA sense strand
ggucacaaaguagccaauu

SEQ ID NO: 858967 - RNA, 19 nt, Homo sapiens
  misc_RNA (1)...(19): siRNA sense strand
cuacagaagaccagaugga

SEQ ID NO: 858968 - RNA, 19 nt, Homo sapiens
  misc_RNA (1)...(19): siRNA sense strand
uggagcuucuggucauaaa

SEQ ID NO: 858969 - RNA, 19 nt, Homo sapiens
  misc_RNA (1)...(19): siRNA sense strand
gaagccgguuuucccagua

SEQ ID NO: 858970 - RNA, 19 nt, Homo sapiens
  misc_RNA (1)...(19): siRNA sense strand
aaugaaggcucugcucaag

SEQ ID NO: 858971 - RNA, 19 nt, Homo sapiens
  misc_RNA (1)...(19): siRNA sense strand
ugaaagcacagcccuggau

SEQ ID NO: 858972 - RNA, 19 nt, Homo sapiens
  misc_RNA (1)...(19): siRNA sense strand
caccagaucugcaaauuua

SEQ ID NO: 858973 - RNA, 19 nt, Homo sapiens
  misc_RNA (1)...(19): siRNA sense strand
gcaagaggcucaucaacug

SEQ ID NO: 858974 - RNA, 19 nt, Homo sapiens
  misc_RNA (1)...(19): siRNA sense strand
gacagugcguuucaaauug

SEQ ID NO: 858975 - RNA, 19 nt, Homo sapiens
  misc_RNA (1)...(19): siRNA sense strand
gcaaauggcaaauacuaau

SEQ ID NO: 858976 - RNA, 19 nt, Homo sapiens
  misc_RNA (1)...(19): siRNA sense strand
gcacuucacuagagagaac

SEQ ID NO: 858977 - RNA, 19 nt, Homo sapiens
  misc_RNA (1)...(19): siRNA sense strand
ccagagccgucguugcaaa

SEQ ID NO: 858978 - RNA, 19 nt, Homo sapiens
  misc_RNA (1)...(19): siRNA sense strand
gacaccagaucugcaaauu

SEQ ID NO: 858979 - RNA, 19 nt, Homo sapiens
  misc_RNA (1)...(19): siRNA sense strand
agacagugcguuucaaauu

SEQ ID NO: 858980 - RNA, 19 nt, Homo sapiens
  misc_RNA (1)...(19): siRNA sense strand
gaacacugcagaccuuugg

SEQ ID NO: 858981 - RNA, 19 nt, Homo sapiens
  misc_RNA (1)...(19): siRNA sense strand
gagccaacccagccaagaa

SEQ ID NO: 858982 - RNA, 19 nt, Homo sapiens
  misc_RNA (1)...(19): siRNA sense strand
gcaugaacaagcucaaaug

SEQ ID NO: 858983 - RNA, 19 nt, Homo sapiens
  misc_RNA (1)...(19): siRNA sense strand
ucccagcgcugaagcauuc

SEQ ID NO: 858984 - RNA, 19 nt, Homo sapiens
  misc_RNA (1)...(19): siRNA sense strand
gggaaugcaugaacaagcu

SEQ ID NO: 858985 - RNA, 19 nt, Homo sapiens
  misc_RNA (1)...(19): siRNA sense strand
cuaauuuccucuccaccuu

SEQ ID NO: 858986 - RNA, 19 nt, Homo sapiens
  misc_RNA (1)...(19): siRNA sense strand
uagaaaaugugaagagcua

SEQ ID NO: 858987 - RNA, 19 nt, Homo sapiens
  misc_RNA (1)...(19): siRNA sense strand
ccugaacacugcagaccuu

SEQ ID NO: 858988 - RNA, 19 nt, Homo sapiens
  misc_RNA (1)...(19): siRNA sense strand
ucacagacagugcguuuca

SEQ ID NO: 858989 - RNA, 19 nt, Homo sapiens
  misc_RNA (1)...(19): siRNA sense strand
ggacaccagaucugcaaau

SEQ ID NO: 858990 - RNA, 19 nt, Homo sapiens
  misc_RNA (1)...(19): siRNA sense strand
uaauuuccucuccaccuua

SEQ ID NO: 858991 - RNA, 19 nt, Homo sapiens
  misc_RNA (1)...(19): siRNA sense strand
gcugaagcagagauaauga

SEQ ID NO: 858992 - RNA, 19 nt, Homo sapiens
  misc_RNA (1)...(19): siRNA sense strand
gcugaagcauuccgauggu

SEQ ID NO: 858993 - RNA, 19 nt, Homo sapiens
  misc_RNA (1)...(19): siRNA sense strand
ccagaucugcaaauuuaga

SEQ ID NO: 858994 - RNA, 19 nt, Homo sapiens
  misc_RNA (1)...(19): siRNA sense strand
gaagcagagauaaugaauc

SEQ ID NO: 858995 - RNA, 19 nt, Homo sapiens
  misc_RNA (1)...(19): siRNA sense strand
gcauuccgaugguucuuuu

SEQ ID NO: 858996 - RNA, 19 nt, Homo sapiens
  misc_RNA (1)...(19): siRNA sense strand
cgucacagacagugcguuu

SEQ ID NO: 858997 - RNA, 19 nt, Homo sapiens
  misc_RNA (1)...(19): siRNA sense strand
gagccgucguugcaaaugg

SEQ ID NO: 858998 - RNA, 19 nt, Homo sapiens
  misc_RNA (1)...(19): siRNA sense strand
aaaccuggcacuucacuag

SEQ ID NO: 858999 - RNA, 19 nt, Homo sapiens
  misc_RNA (1)...(19): siRNA sense strand
acaccagaucugcaaauuu

SEQ ID NO: 859000 - RNA, 19 nt, Homo sapiens
  misc_RNA (1)...(19): siRNA sense strand
cagccaagaagaagaggaa

SEQ ID NO: 859001 - RNA, 19 nt, Homo sapiens
  misc_RNA (1)...(19): siRNA sense strand
gaaaaugugaagagcuaaa

SEQ ID NO: 859002 - RNA, 19 nt, Homo sapiens
  misc_RNA (1)...(19): siRNA sense strand
acagacagugcguuucaaa

SEQ ID NO: 859003 - RNA, 19 nt, Homo sapiens
  misc_RNA (1)...(19): siRNA sense strand
ugaagcagagauaaugaau

SEQ ID NO: 859004 - RNA, 19 nt, Homo sapiens
  misc_RNA (1)...(19): siRNA sense strand
ggagccaacccagccaaga

SEQ ID NO: 859005 - RNA, 19 nt, Homo sapiens
  misc_RNA (1)...(19): siRNA sense strand
aaugugaagagcuaaagaa

SEQ ID NO: 859006 - RNA, 19 nt, Homo sapiens
  misc_RNA (1)...(19): siRNA sense strand
caagaggcucaucaacugu

SEQ ID NO: 859007 - RNA, 19 nt, Homo sapiens
  misc_RNA (1)...(19): siRNA sense strand
cagaucugcaaauuuagaa

SEQ ID NO: 859008 - RNA, 19 nt, Homo sapiens
  misc_RNA (1)...(19): siRNA sense strand
gaagcauuccgaugguucu

SEQ ID NO: 859009 - RNA, 19 nt, Homo sapiens
  misc_RNA (1)...(19): siRNA sense strand
acagugcguuucaaauugc

SEQ ID NO: 859010 - RNA, 19 nt, Homo sapiens
  misc_RNA (1)...(19): siRNA sense strand
ccaacccagccaagaagaa

SEQ ID NO: 859011 - RNA, 19 nt, Homo sapiens
  misc_RNA (1)...(19): siRNA sense strand
ugcaaauggcaaauacuaa

SEQ ID NO: 859012 - RNA, 19 nt, Homo sapiens
  misc_RNA (1)...(19): siRNA sense strand
uccaagagcuccaguaaua

SEQ ID NO: 859013 - RNA, 19 nt, Homo sapiens
  misc_RNA (1)...(19): siRNA sense strand
gaggaugaaucacuaagua

SEQ ID NO: 859014 - RNA, 19 nt, Homo sapiens
  misc_RNA (1)...(19): siRNA sense strand
gaacugguaccuuggcuua

SEQ ID NO: 859015 - RNA, 19 nt, Homo sapiens
  misc_RNA (1)...(19): siRNA sense strand
ggaagaagaucgcauuguc

SEQ ID NO: 859016 - RNA, 19 nt, Homo sapiens
  misc_RNA (1)...(19): siRNA sense strand
cagcaugaauuaagacuuu

SEQ ID NO: 859017 - RNA, 19 nt, Homo sapiens
  misc_RNA (1)...(19): siRNA sense strand
gaagaccuccagagcauua

SEQ ID NO: 859018 - RNA, 19 nt, Homo sapiens
  misc_RNA (1)...(19): siRNA sense strand
ucucaaagaucucaucauu

SEQ ID NO: 859019 - RNA, 19 nt, Homo sapiens
  misc_RNA (1)...(19): siRNA sense strand
gagcuccaguaauaauuua

SEQ ID NO: 859020 - RNA, 19 nt, Homo sapiens
  misc_RNA (1)...(19): siRNA sense strand
uacaggagcuuauuaauca

SEQ ID NO: 859021 - RNA, 19 nt, Homo sapiens
  misc_RNA (1)...(19): siRNA sense strand
gacaaacagucaucacaaa

SEQ ID NO: 859022 - RNA, 19 nt, Homo sapiens
  misc_RNA (1)...(19): siRNA sense strand
gcuaaugacuuggaacaaa

SEQ ID NO: 859023 - RNA, 19 nt, Homo sapiens
  misc_RNA (1)...(19): siRNA sense strand
ugacuuggaugccauugua

SEQ ID NO: 859024 - RNA, 19 nt, Homo sapiens
  misc_RNA (1)...(19): siRNA sense strand
ggaagaacacgaggaauuu

SEQ ID NO: 859025 - RNA, 19 nt, Homo sapiens
  misc_RNA (1)...(19): siRNA sense strand
gcauaaaugugcuauugau

SEQ ID NO: 859026 - RNA, 19 nt, Homo sapiens
  misc_RNA (1)...(19): siRNA sense strand
gaaacuaaucaacagcuua

SEQ ID NO: 859027 - RNA, 19 nt, Homo sapiens
  misc_RNA (1)...(19): siRNA sense strand
gaacaaugcugugagaaac

SEQ ID NO: 859028 - RNA, 19 nt, Homo sapiens
  misc_RNA (1)...(19): siRNA sense strand
acaacgagcuaaugacuug

SEQ ID NO: 859029 - RNA, 19 nt, Homo sapiens
  misc_RNA (1)...(19): siRNA sense strand
ucuguaggcugauuaauga

SEQ ID NO: 859030 - RNA, 19 nt, Homo sapiens
  misc_RNA (1)...(19): siRNA sense strand
gaugagcccagcaaauaua

SEQ ID NO: 859031 - RNA, 19 nt, Homo sapiens
  misc_RNA (1)...(19): siRNA sense strand
gcaaauauaaucagcaaca

SEQ ID NO: 859032 - RNA, 19 nt, Homo sapiens
  misc_RNA (1)...(19): siRNA sense strand
gaaaugaacaaugcuguga

SEQ ID NO: 859033 - RNA, 19 nt, Homo sapiens
  misc_RNA (1)...(19): siRNA sense strand
uaagauugaugcacuuuca

SEQ ID NO: 859034 - RNA, 19 nt, Homo sapiens
  misc_RNA (1)...(19): siRNA sense strand
gcaucuuguuccuguaaua

SEQ ID NO: 859035 - RNA, 19 nt, Homo sapiens
  misc_RNA (1)...(19): siRNA sense strand
caaaggaugagacagaauu

SEQ ID NO: 859036 - RNA, 19 nt, Homo sapiens
  misc_RNA (1)...(19): siRNA sense strand
uaccuuggcuuaauuugaa

SEQ ID NO: 859037 - RNA, 19 nt, Homo sapiens
  misc_RNA (1)...(19): siRNA sense strand
gaaagucagucagaagaag

SEQ ID NO: 859038 - RNA, 19 nt, Homo sapiens
  misc_RNA (1)...(19): siRNA sense strand
ugaagugccagcauuauaa

SEQ ID NO: 859039 - RNA, 19 nt, Homo sapiens
  misc_RNA (1)...(19): siRNA sense strand
gcaaauggaagucuguaga

SEQ ID NO: 859040 - RNA, 19 nt, Homo sapiens
  misc_RNA (1)...(19): siRNA sense strand
ccgaaugaaugaaguuuau

SEQ ID NO: 859041 - RNA, 19 nt, Homo sapiens
  misc_RNA (1)...(19): siRNA sense strand
cagcaaauauaaucagcaa

SEQ ID NO: 859042 - RNA, 19 nt, Homo sapiens
  misc_RNA (1)...(19): siRNA sense strand
acacagagaagaaagauga

SEQ ID NO: 859043 - RNA, 19 nt, Homo sapiens
  misc_RNA (1)...(19): siRNA sense strand
aagaugagcccagcaaaua

SEQ ID NO: 859044 - RNA, 19 nt, Homo sapiens
  misc_RNA (1)...(19): siRNA sense strand
gaacaaauuauggaaagug

SEQ ID NO: 859045 - RNA, 19 nt, Homo sapiens
  misc_RNA (1)...(19): siRNA sense strand
uaagaaggcugaggacaca

SEQ ID NO: 859046 - RNA, 19 nt, Homo sapiens
  misc_RNA (1)...(19): siRNA sense strand
cagacagacucaugacuga

SEQ ID NO: 859047 - RNA, 19 nt, Homo sapiens
  misc_RNA (1)...(19): siRNA sense strand
aaacagucaucacaaagga

SEQ ID NO: 859048 - RNA, 19 nt, Homo sapiens
  misc_RNA (1)...(19): siRNA sense strand
ugagaaaccuccaagaacu

SEQ ID NO: 859049 - RNA, 19 nt, Homo sapiens
  misc_RNA (1)...(19): siRNA sense strand
gaucaacugacauccuuaa

SEQ ID NO: 859050 - RNA, 19 nt, Homo sapiens
  misc_RNA (1)...(19): siRNA sense strand
ggaggaagaagaucgcauu

SEQ ID NO: 859051 - RNA, 19 nt, Homo sapiens
  misc_RNA (1)...(19): siRNA sense strand
gaacggagcaagaagaaac

SEQ ID NO: 859052 - RNA, 19 nt, Homo sapiens
  misc_RNA (1)...(19): siRNA sense strand
caaauuauggaaaguguga

SEQ ID NO: 859053 - RNA, 19 nt, Homo sapiens
  misc_RNA (1)...(19): siRNA sense strand
gaacaacgagcuaaugacu

SEQ ID NO: 859054 - RNA, 19 nt, Homo sapiens
  misc_RNA (1)...(19): siRNA sense strand
cagaucaacugacauccuu

SEQ ID NO: 859055 - RNA, 19 nt, Homo sapiens
  misc_RNA (1)...(19): siRNA sense strand
agaaucaacucaaggaauc

SEQ ID NO: 859056 - RNA, 19 nt, Homo sapiens
  misc_RNA (1)...(19): siRNA sense strand
gaaaacgacuacagaaauc

SEQ ID NO: 859057 - RNA, 19 nt, Homo sapiens
  misc_RNA (1)...(19): siRNA sense strand
caaaggcaauauaaagaag

SEQ ID NO: 859058 - RNA, 19 nt, Homo sapiens
  misc_RNA (1)...(19): siRNA sense strand
gaagaagaucgcauuguca

SEQ ID NO: 859059 - RNA, 19 nt, Homo sapiens
  misc_RNA (1)...(19): siRNA sense strand
ggaagucuguagauuaaaa

SEQ ID NO: 859060 - RNA, 19 nt, Homo sapiens
  misc_RNA (1)...(19): siRNA sense strand
ucacaaaggaugagacaga

SEQ ID NO: 859061 - RNA, 19 nt, Homo sapiens
  misc_RNA (1)...(19): siRNA sense strand
ugaaauuguugguggaaga

SEQ ID NO: 859062 - RNA, 19 nt, Homo sapiens
  misc_RNA (1)...(19): siRNA sense strand
caaaagaacagaucucaaa

SEQ ID NO: 859063 - RNA, 19 nt, Homo sapiens
  misc_RNA (1)...(19): siRNA sense strand
gagcauuaucuacaaauug

SEQ ID NO: 859064 - RNA, 19 nt, Homo sapiens
  misc_RNA (1)...(19): siRNA sense strand
gauaguucauccucauugu

SEQ ID NO: 859065 - RNA, 19 nt, Homo sapiens
  misc_RNA (1)...(19): siRNA sense strand
gcaauaugccacacuuuca

SEQ ID NO: 859066 - RNA, 19 nt, Homo sapiens
  misc_RNA (1)...(19): siRNA sense strand
ccucauaccgucuuggaua

SEQ ID NO: 859067 - RNA, 19 nt, Homo sapiens
  misc_RNA (1)...(19): siRNA sense strand
gagcaagaagaaacuauug

SEQ ID NO: 859068 - RNA, 19 nt, Homo sapiens
  misc_RNA (1)...(19): siRNA sense strand
cuaaugacuuggaacaaau

SEQ ID NO: 859069 - RNA, 19 nt, Homo sapiens
  misc_RNA (1)...(19): siRNA sense strand
gaugagacagaauuugaaa

SEQ ID NO: 859070 - RNA, 19 nt, Homo sapiens
  misc_RNA (1)...(19): siRNA sense strand
ccagagcauuaucuacaaa

SEQ ID NO: 859071 - RNA, 19 nt, Homo sapiens
  misc_RNA (1)...(19): siRNA sense strand
gagcaucuuguuccuguaa

SEQ ID NO: 859072 - RNA, 19 nt, Homo sapiens
  misc_RNA (1)...(19): siRNA sense strand
gaaagaugagcccagcaaa

SEQ ID NO: 859073 - RNA, 19 nt, Homo sapiens
  misc_RNA (1)...(19): siRNA sense strand
gaugaugcauggcuuaaaa

SEQ ID NO: 859074 - RNA, 19 nt, Homo sapiens
  misc_RNA (1)...(19): siRNA sense strand
gaacuucagcuagagcaaa

SEQ ID NO: 859075 - RNA, 19 nt, Homo sapiens
  misc_RNA (1)...(19): siRNA sense strand
ggagcaagaagaaacuauu

SEQ ID NO: 859076 - RNA, 19 nt, Homo sapiens
  misc_RNA (1)...(19): siRNA sense strand
ggaagaaguugaaaauaag

SEQ ID NO: 859077 - RNA, 19 nt, Homo sapiens
  misc_RNA (1)...(19): siRNA sense strand
aauggaagucuguagauua

SEQ ID NO: 859078 - RNA, 19 nt, Homo sapiens
  misc_RNA (1)...(19): siRNA sense strand
gcagaaugggaaagcauaa

SEQ ID NO: 859079 - RNA, 19 nt, Homo sapiens
  misc_RNA (1)...(19): siRNA sense strand
cauuguaccugcaguaaag

SEQ ID NO: 859080 - RNA, 19 nt, Homo sapiens
  misc_RNA (1)...(19): siRNA sense strand
gugaagugccagcauuaua

SEQ ID NO: 859081 - RNA, 19 nt, Homo sapiens
  misc_RNA (1)...(19): siRNA sense strand
uacaggagcuuauagaaac

SEQ ID NO: 859082 - RNA, 19 nt, Homo sapiens
  misc_RNA (1)...(19): siRNA sense strand
auggaagucuguagauuaa

SEQ ID NO: 859083 - RNA, 19 nt, Homo sapiens
  misc_RNA (1)...(19): siRNA sense strand
agaaauugaugacuuggau

SEQ ID NO: 859084 - RNA, 19 nt, Homo sapiens
  misc_RNA (1)...(19): siRNA sense strand
caagagcuccaguaauaau

SEQ ID NO: 859085 - RNA, 19 nt, Homo sapiens
  misc_RNA (1)...(19): siRNA sense strand
caaauuacaggagcuuauu

SEQ ID NO: 859086 - RNA, 19 nt, Homo sapiens
  misc_RNA (1)...(19): siRNA sense strand
acaguugcuuugucuaauu

SEQ ID NO: 859087 - RNA, 19 nt, Homo sapiens
  misc_RNA (1)...(19): siRNA sense strand
gauacaggagcuuauagaa

SEQ ID NO: 859088 - RNA, 19 nt, Homo sapiens
  misc_RNA (1)...(19): siRNA sense strand
guaggcugauuaaugaaga

SEQ ID NO: 859089 - RNA, 19 nt, Homo sapiens
  misc_RNA (1)...(19): siRNA sense strand
uagauacuaugcuggaaga

SEQ ID NO: 859090 - RNA, 19 nt, Homo sapiens
  misc_RNA (1)...(19): siRNA sense strand
gaagcaggaugaaaaugaa

SEQ ID NO: 859091 - RNA, 19 nt, Homo sapiens
  misc_RNA (1)...(19): siRNA sense strand
acacaaaggcaauauaaag

SEQ ID NO: 859092 - RNA, 19 nt, Homo sapiens
  misc_RNA (1)...(19): siRNA sense strand
gaagaagcagaaugggaaa

SEQ ID NO: 859093 - RNA, 19 nt, Homo sapiens
  misc_RNA (1)...(19): siRNA sense strand
caggugaagugccagcauu

SEQ ID NO: 859094 - RNA, 19 nt, Homo sapiens
  misc_RNA (1)...(19): siRNA sense strand
ggugugccuucuuuaaaug

SEQ ID NO: 859095 - RNA, 19 nt, Homo sapiens
  misc_RNA (1)...(19): siRNA sense strand
auaaacagcaggugaagaa

SEQ ID NO: 859096 - RNA, 19 nt, Homo sapiens
  misc_RNA (1)...(19): siRNA sense strand
gaaugggaaagcauaaaug

SEQ ID NO: 859097 - RNA, 19 nt, Homo sapiens
  misc_RNA (1)...(19): siRNA sense strand
gugccagcauuauaagaaa

SEQ ID NO: 859098 - RNA, 19 nt, Homo sapiens
  misc_RNA (1)...(19): siRNA sense strand
aaauggaagucuguagauu

SEQ ID NO: 859099 - RNA, 19 nt, Homo sapiens
  misc_RNA (1)...(19): siRNA sense strand
cuuagaaauugaugacuug

SEQ ID NO: 859100 - RNA, 19 nt, Homo sapiens
  misc_RNA (1)...(19): siRNA sense strand
gacagacucaugacugaaa

SEQ ID NO: 859101 - RNA, 19 nt, Homo sapiens
  misc_RNA (1)...(19): siRNA sense strand
uguucaagauuguggauuu

SEQ ID NO: 859102 - RNA, 19 nt, Homo sapiens
  misc_RNA (1)...(19): siRNA sense strand
ucaauuauccacaauccaa

SEQ ID NO: 859103 - RNA, 19 nt, Homo sapiens
  misc_RNA (1)...(19): siRNA sense strand
cacaaaggaugagacagaa

SEQ ID NO: 859104 - RNA, 19 nt, Homo sapiens
  misc_RNA (1)...(19): siRNA sense strand
ugaacaaugcugugagaaa

SEQ ID NO: 859105 - RNA, 19 nt, Homo sapiens
  misc_RNA (1)...(19): siRNA sense strand
ggaacaaauuauggaaagu

SEQ ID NO: 859106 - RNA, 19 nt, Homo sapiens
  misc_RNA (1)...(19): siRNA sense strand
gagcuuauagaaacuaauc

SEQ ID NO: 859107 - RNA, 19 nt, Homo sapiens
  misc_RNA (1)...(19): siRNA sense strand
gcauuucaggcauuuacua

SEQ ID NO: 859108 - RNA, 19 nt, Homo sapiens
  misc_RNA (1)...(19): siRNA sense strand
cacaaaggcaauauaaaga

SEQ ID NO: 859109 - RNA, 19 nt, Homo sapiens
  misc_RNA (1)...(19): siRNA sense strand
gcaaaagaguuccucauac

SEQ ID NO: 859110 - RNA, 19 nt, Homo sapiens
  misc_RNA (1)...(19): siRNA sense strand
ggauuccagucaaccauca

SEQ ID NO: 859111 - RNA, 19 nt, Homo sapiens
  misc_RNA (1)...(19): siRNA sense strand
ugaauuggaggaugaauca

SEQ ID NO: 859112 - RNA, 19 nt, Homo sapiens
  misc_RNA (1)...(19): siRNA sense strand
gaacuuggcuggcauaaac

SEQ ID NO: 859113 - RNA, 19 nt, Homo sapiens
  misc_RNA (1)...(19): siRNA sense strand
gaaauuugccaacuccuua

SEQ ID NO: 859114 - RNA, 19 nt, Homo sapiens
  misc_RNA (1)...(19): siRNA sense strand
ggagaagccugucaaguuc

SEQ ID NO: 859115 - RNA, 19 nt, Homo sapiens
  misc_RNA (1)...(19): siRNA sense strand
ggacacgacuugagcagaa

SEQ ID NO: 859116 - RNA, 19 nt, Homo sapiens
  misc_RNA (1)...(19): siRNA sense strand
ggaagaagcugggcgagau

SEQ ID NO: 859117 - RNA, 19 nt, Homo sapiens
  misc_RNA (1)...(19): siRNA sense strand
gaggagaccuggccacugu

SEQ ID NO: 859118 - RNA, 19 nt, Homo sapiens
  misc_RNA (1)...(19): siRNA sense strand
caucagcaaucagaaauuu

SEQ ID NO: 859119 - RNA, 19 nt, Homo sapiens
  misc_RNA (1)...(19): siRNA sense strand
ggacaaggcgcugcaguuu

SEQ ID NO: 859120 - RNA, 19 nt, Homo sapiens
  misc_RNA (1)...(19): siRNA sense strand
gaaacagcaccgugacuuu

SEQ ID NO: 859121 - RNA, 19 nt, Homo sapiens
  misc_RNA (1)...(19): siRNA sense strand
gggaagccgugcagaagaa

SEQ ID NO: 859122 - RNA, 19 nt, Homo sapiens
  misc_RNA (1)...(19): siRNA sense strand
ucaagaagcugcaguccau

SEQ ID NO: 859123 - RNA, 19 nt, Homo sapiens
  misc_RNA (1)...(19): siRNA sense strand
ucaccuacguggucucuuu

SEQ ID NO: 859124 - RNA, 19 nt, Homo sapiens
  misc_RNA (1)...(19): siRNA sense strand
gccgaaggcuacuacgaua

SEQ ID NO: 859125 - RNA, 19 nt, Homo sapiens
  misc_RNA (1)...(19): siRNA sense strand
gaucucugcugcucaacaa

SEQ ID NO: 859126 - RNA, 19 nt, Homo sapiens
  misc_RNA (1)...(19): siRNA sense strand
gagguaaacauccagaauu

SEQ ID NO: 859127 - RNA, 19 nt, Homo sapiens
  misc_RNA (1)...(19): siRNA sense strand
gcccugcaguggcgucuua

SEQ ID NO: 859128 - RNA, 19 nt, Homo sapiens
  misc_RNA (1)...(19): siRNA sense strand
guaaacauccagaauuuca

SEQ ID NO: 859129 - RNA, 19 nt, Homo sapiens
  misc_RNA (1)...(19): siRNA sense strand
uggaacagcugcaggagaa

SEQ ID NO: 859130 - RNA, 19 nt, Homo sapiens
  misc_RNA (1)...(19): siRNA sense strand
uugcugagcuggacaagaa

SEQ ID NO: 859131 - RNA, 19 nt, Homo sapiens
  misc_RNA (1)...(19): siRNA sense strand
uacaugaccucgacgcuuu

SEQ ID NO: 859132 - RNA, 19 nt, Homo sapiens
  misc_RNA (1)...(19): siRNA sense strand
gaacagcgcaaagaggaaa

SEQ ID NO: 859133 - RNA, 19 nt, Homo sapiens
  misc_RNA (1)...(19): siRNA sense strand
ccagcgagguggcuaguga

SEQ ID NO: 859134 - RNA, 19 nt, Homo sapiens
  misc_RNA (1)...(19): siRNA sense strand
cagacgaccuguugcagaa

SEQ ID NO: 859135 - RNA, 19 nt, Homo sapiens
  misc_RNA (1)...(19): siRNA sense strand
ggagaaggcugagcaugag

SEQ ID NO: 859136 - RNA, 19 nt, Homo sapiens
  misc_RNA (1)...(19): siRNA sense strand
agguaaacauccagaauuu

SEQ ID NO: 859137 - RNA, 19 nt, Homo sapiens
  misc_RNA (1)...(19): siRNA sense strand
ggccugaucucguggacuu

SEQ ID NO: 859138 - RNA, 19 nt, Homo sapiens
  misc_RNA (1)...(19): siRNA sense strand
aaagugccauggcugauga

SEQ ID NO: 859139 - RNA, 19 nt, Homo sapiens
  misc_RNA (1)...(19): siRNA sense strand
ggaggcagacgaccuguug

SEQ ID NO: 859140 - RNA, 19 nt, Homo sapiens
  misc_RNA (1)...(19): siRNA sense strand
agaaguccaucaucaccua

SEQ ID NO: 859141 - RNA, 19 nt, Homo sapiens
  misc_RNA (1)...(19): siRNA sense strand
gaaccaagaaaaccaguua

SEQ ID NO: 859142 - RNA, 19 nt, Homo sapiens
  misc_RNA (1)...(19): siRNA sense strand
agggagagcuggcugaaug

SEQ ID NO: 859143 - RNA, 19 nt, Homo sapiens
  misc_RNA (1)...(19): siRNA sense strand
uggaggugcucaugaacua

SEQ ID NO: 859144 - RNA, 19 nt, Homo sapiens
  misc_RNA (1)...(19): siRNA sense strand
gaucgaguguggccauaca

SEQ ID NO: 859145 - RNA, 19 nt, Homo sapiens
  misc_RNA (1)...(19): siRNA sense strand
gcccagcaauggaugcaaa

SEQ ID NO: 859146 - RNA, 19 nt, Homo sapiens
  misc_RNA (1)...(19): siRNA sense strand
cugcagcgcuuccuacaug

SEQ ID NO: 859147 - RNA, 19 nt, Homo sapiens
  misc_RNA (1)...(19): siRNA sense strand
uggagaagccugucaaguu

SEQ ID NO: 859148 - RNA, 19 nt, Homo sapiens
  misc_RNA (1)...(19): siRNA sense strand
ugagagccuuugagcauga

SEQ ID NO: 859149 - RNA, 19 nt, Homo sapiens
  misc_RNA (1)...(19): siRNA sense strand
aaagcuacaugaccaacuu

SEQ ID NO: 859150 - RNA, 19 nt, Homo sapiens
  misc_RNA (1)...(19): siRNA sense strand
acaaggcgcugcaguuucu

SEQ ID NO: 859151 - RNA, 19 nt, Homo sapiens
  misc_RNA (1)...(19): siRNA sense strand
gcaagagucagucgaucaa

SEQ ID NO: 859152 - RNA, 19 nt, Homo sapiens
  misc_RNA (1)...(19): siRNA sense strand
agagcuggcugaaugagaa

SEQ ID NO: 859153 - RNA, 19 nt, Homo sapiens
  misc_RNA (1)...(19): siRNA sense strand
gcacuggauugccgagaag

SEQ ID NO: 859154 - RNA, 19 nt, Homo sapiens
  misc_RNA (1)...(19): siRNA sense strand
ucagcaaacucaccaaguc

SEQ ID NO: 859155 - RNA, 19 nt, Homo sapiens
  misc_RNA (1)...(19): siRNA sense strand
gcacgagggcuuccuacug

SEQ ID NO: 859156 - RNA, 19 nt, Homo sapiens
  misc_RNA (1)...(19): siRNA sense strand
cucgggagcuucauaaguu

SEQ ID NO: 859157 - RNA, 19 nt, Homo sapiens
  misc_RNA (1)...(19): siRNA sense strand
ggaggcagccaugaagaaa

SEQ ID NO: 859158 - RNA, 19 nt, Homo sapiens
  misc_RNA (1)...(19): siRNA sense strand
caguggaggugcucaugaa

SEQ ID NO: 859159 - RNA, 19 nt, Homo sapiens
  misc_RNA (1)...(19): siRNA sense strand
gcacaucuaccagcucuuc

SEQ ID NO: 859160 - RNA, 19 nt, Homo sapiens
  misc_RNA (1)...(19): siRNA sense strand
ggucgugggugagccugua

SEQ ID NO: 859161 - RNA, 19 nt, Homo sapiens
  misc_RNA (1)...(19): siRNA sense strand
cugcaaccgucgccucuuu

SEQ ID NO: 859162 - RNA, 19 nt, Homo sapiens
  misc_RNA (1)...(19): siRNA sense strand
cagcuuauccggcgacaug

SEQ ID NO: 859163 - RNA, 19 nt, Homo sapiens
  misc_RNA (1)...(19): siRNA sense strand
ccagggacgugucaucagu

SEQ ID NO: 859164 - RNA, 19 nt, Homo sapiens
  misc_RNA (1)...(19): siRNA sense strand
ugacccggcugcuggagaa

SEQ ID NO: 859165 - RNA, 19 nt, Homo sapiens
  misc_RNA (1)...(19): siRNA sense strand
caugaggccuuccgcaaag

SEQ ID NO: 859166 - RNA, 19 nt, Homo sapiens
  misc_RNA (1)...(19): siRNA sense strand
ucacgcggcuccuggaagu

SEQ ID NO: 859167 - RNA, 19 nt, Homo sapiens
  misc_RNA (1)...(19): siRNA sense strand
ggccagacacuacccacua

SEQ ID NO: 859168 - RNA, 19 nt, Homo sapiens
  misc_RNA (1)...(19): siRNA sense strand
guggagaacuacgaggaaa

SEQ ID NO: 859169 - RNA, 19 nt, Homo sapiens
  misc_RNA (1)...(19): siRNA sense strand
ggacaagggcaaggacgaa

SEQ ID NO: 859170 - RNA, 19 nt, Homo sapiens
  misc_RNA (1)...(19): siRNA sense strand
cacuauuucuccaagauga

SEQ ID NO: 859171 - RNA, 19 nt, Homo sapiens
  misc_RNA (1)...(19): siRNA sense strand
gaugagguggagcagcuua

SEQ ID NO: 859172 - RNA, 19 nt, Homo sapiens
  misc_RNA (1)...(19): siRNA sense strand
ugccauggcugaugagauc

SEQ ID NO: 859173 - RNA, 19 nt, Homo sapiens
  misc_RNA (1)...(19): siRNA sense strand
ggacaacuuuggguaugag

SEQ ID NO: 859174 - RNA, 19 nt, Homo sapiens
  misc_RNA (1)...(19): siRNA sense strand
ccaaguccaaugccaacua

SEQ ID NO: 859175 - RNA, 19 nt, Homo sapiens
  misc_RNA (1)...(19): siRNA sense strand
ggaacugggcuucuacaag

SEQ ID NO: 859176 - RNA, 19 nt, Homo sapiens
  misc_RNA (1)...(19): siRNA sense strand
gagcuucagggacagauug

SEQ ID NO: 859177 - RNA, 19 nt, Homo sapiens
  misc_RNA (1)...(19): siRNA sense strand
gaugguggaugagcugauc

SEQ ID NO: 859178 - RNA, 19 nt, Homo sapiens
  misc_RNA (1)...(19): siRNA sense strand
gccaggacuuugagcaugu

SEQ ID NO: 859179 - RNA, 19 nt, Homo sapiens
  misc_RNA (1)...(19): siRNA sense strand
aggaguggcuggagaagau

SEQ ID NO: 859180 - RNA, 19 nt, Homo sapiens
  misc_RNA (1)...(19): siRNA sense strand
caucugggauauugacaag

SEQ ID NO: 859181 - RNA, 19 nt, Homo sapiens
  misc_RNA (1)...(19): siRNA sense strand
gcaaacugcgugccugcaa

SEQ ID NO: 859182 - RNA, 19 nt, Homo sapiens
  misc_RNA (1)...(19): siRNA sense strand
gcugcuggauccugaagau

SEQ ID NO: 859183 - RNA, 19 nt, Homo sapiens
  misc_RNA (1)...(19): siRNA sense strand
gggugagccuguacugugu

SEQ ID NO: 859184 - RNA, 19 nt, Homo sapiens
  misc_RNA (1)...(19): siRNA sense strand
uucauaaguucuucaguga

SEQ ID NO: 859185 - RNA, 19 nt, Homo sapiens
  misc_RNA (1)...(19): siRNA sense strand
ucgagagccuggaccaaga

SEQ ID NO: 859186 - RNA, 19 nt, Homo sapiens
  misc_RNA (1)...(19): siRNA sense strand
agaugaagacagcugguua

SEQ ID NO: 859187 - RNA, 19 nt, Homo sapiens
  misc_RNA (1)...(19): siRNA sense strand
gagcuugagcacuggauug

SEQ ID NO: 859188 - RNA, 19 nt, Homo sapiens
  misc_RNA (1)...(19): siRNA sense strand
ggaagcagagcaguuguuc

SEQ ID NO: 859189 - RNA, 19 nt, Homo sapiens
  misc_RNA (1)...(19): siRNA sense strand
caggacaacuuuggguaug

SEQ ID NO: 859190 - RNA, 19 nt, Homo sapiens
  misc_RNA (1)...(19): siRNA sense strand
uggagaaggcugagcauga

SEQ ID NO: 859191 - RNA, 19 nt, Homo sapiens
  misc_RNA (1)...(19): siRNA sense strand
caaguccaaugccaacuac

SEQ ID NO: 859192 - RNA, 19 nt, Homo sapiens
  misc_RNA (1)...(19): siRNA sense strand
agacugaggacaacagaga

SEQ ID NO: 859193 - RNA, 19 nt, Homo sapiens
  misc_RNA (1)...(19): siRNA sense strand
ggcgaucucugcugcucaa

SEQ ID NO: 859194 - RNA, 19 nt, Homo sapiens
  misc_RNA (1)...(19): siRNA sense strand
agggacagauugaggagaa

SEQ ID NO: 859195 - RNA, 19 nt, Homo sapiens
  misc_RNA (1)...(19): siRNA sense strand
gagccuggaccaagagaug

SEQ ID NO: 859196 - RNA, 19 nt, Homo sapiens
  misc_RNA (1)...(19): siRNA sense strand
gcuggauccugaagaugug

SEQ ID NO: 859197 - RNA, 19 nt, Homo sapiens
  misc_RNA (1)...(19): siRNA sense strand
ucgcugaggugaccgaagu

SEQ ID NO: 859198 - RNA, 19 nt, Homo sapiens
  misc_RNA (1)...(19): siRNA sense strand
gguggaagcagagcaguug

SEQ ID NO: 859199 - RNA, 19 nt, Homo sapiens
  misc_RNA (1)...(19): siRNA sense strand
ccuacgggcugagcugauu

SEQ ID NO: 859200 - RNA, 19 nt, Homo sapiens
  misc_RNA (1)...(19): siRNA sense strand
uguggcaucugggauauug

SEQ ID NO: 859201 - RNA, 19 nt, Homo sapiens
  misc_RNA (1)...(19): siRNA sense strand
aaauugagacugaggacaa

SEQ ID NO: 859202 - RNA, 19 nt, Homo sapiens
  misc_RNA (1)...(19): siRNA sense strand
uggcugacauuguggaaca

SEQ ID NO: 859203 - RNA, 19 nt, Homo sapiens
  misc_RNA (1)...(19): siRNA sense strand
cacccuggcugacauugug

SEQ ID NO: 859204 - RNA, 19 nt, Homo sapiens
  misc_RNA (1)...(19): siRNA sense strand
gacaaccacaagcugcaua

SEQ ID NO: 859205 - RNA, 19 nt, Homo sapiens
  misc_RNA (1)...(19): siRNA sense strand
gcaaacucaccaaguccaa

SEQ ID NO: 859206 - RNA, 19 nt, Homo sapiens
  misc_RNA (1)...(19): siRNA sense strand
ggaaggacggacugaacga

SEQ ID NO: 859207 - RNA, 19 nt, Homo sapiens
  misc_RNA (1)...(19): siRNA sense strand
ucaacagucagcucaagaa

SEQ ID NO: 859208 - RNA, 19 nt, Homo sapiens
  misc_RNA (1)...(19): siRNA sense strand
caacuacaaccugcagaga

SEQ ID NO: 859209 - RNA, 19 nt, Homo sapiens
  misc_RNA (1)...(19): siRNA sense strand
aggcagccaugaagaaaca

SEQ ID NO: 859210 - RNA, 19 nt, Homo sapiens
  misc_RNA (1)...(19): siRNA sense strand
gaacagcugcaggagaaag

SEQ ID NO: 859211 - RNA, 19 nt, Homo sapiens
  misc_RNA (1)...(19): siRNA sense strand
cccugcagcugcucaagaa

SEQ ID NO: 859212 - RNA, 19 nt, Homo sapiens
  misc_RNA (1)...(19): siRNA sense strand
gaacaaagagaaugaagua

SEQ ID NO: 859213 - RNA, 19 nt, Homo sapiens
  misc_RNA (1)...(19): siRNA sense strand
gggauaagauggaagauaa

SEQ ID NO: 859214 - RNA, 19 nt, Homo sapiens
  misc_RNA (1)...(19): siRNA sense strand
ggaggacaguaaacaauua

SEQ ID NO: 859215 - RNA, 19 nt, Homo sapiens
  misc_RNA (1)...(19): siRNA sense strand
gaacagaaauugaaacaac

SEQ ID NO: 859216 - RNA, 19 nt, Homo sapiens
  misc_RNA (1)...(19): siRNA sense strand
caaagagaaugaaguauug

SEQ ID NO: 859217 - RNA, 19 nt, Homo sapiens
  misc_RNA (1)...(19): siRNA sense strand
gcccagagauuauuugaaa

SEQ ID NO: 859218 - RNA, 19 nt, Homo sapiens
  misc_RNA (1)...(19): siRNA sense strand
gaacacuacuagaaagaaa

SEQ ID NO: 859219 - RNA, 19 nt, Homo sapiens
  misc_RNA (1)...(19): siRNA sense strand
ggacccagauguuuaaaga

SEQ ID NO: 859220 - RNA, 19 nt, Homo sapiens
  misc_RNA (1)...(19): siRNA sense strand
gaaauaagacaugacagua

SEQ ID NO: 859221 - RNA, 19 nt, Homo sapiens
  misc_RNA (1)...(19): siRNA sense strand
gaagaaaccgaguauguga

SEQ ID NO: 859222 - RNA, 19 nt, Homo sapiens
  misc_RNA (1)...(19): siRNA sense strand
caacucaaauccagugcua

SEQ ID NO: 859223 - RNA, 19 nt, Homo sapiens
  misc_RNA (1)...(19): siRNA sense strand
cuacagcucuuagaaauga

SEQ ID NO: 859224 - RNA, 19 nt, Homo sapiens
  misc_RNA (1)...(19): siRNA sense strand
guacaaaucacaaacuaga

SEQ ID NO: 859225 - RNA, 19 nt, Homo sapiens
  misc_RNA (1)...(19): siRNA sense strand
ggagaaccuuguacagaga

SEQ ID NO: 859226 - RNA, 19 nt, Homo sapiens
  misc_RNA (1)...(19): siRNA sense strand
caaauccagugcuacauau

SEQ ID NO: 859227 - RNA, 19 nt, Homo sapiens
  misc_RNA (1)...(19): siRNA sense strand
gaacuacucugcaaaagau

SEQ ID NO: 859228 - RNA, 19 nt, Homo sapiens
  misc_RNA (1)...(19): siRNA sense strand
aaacguggcccagagauua

SEQ ID NO: 859229 - RNA, 19 nt, Homo sapiens
  misc_RNA (1)...(19): siRNA sense strand
gaagauaauucugccuugu

SEQ ID NO: 859230 - RNA, 19 nt, Homo sapiens
  misc_RNA (1)...(19): siRNA sense strand
ugaaauggauccuucuugu

SEQ ID NO: 859231 - RNA, 19 nt, Homo sapiens
  misc_RNA (1)...(19): siRNA sense strand
caacagggcucugauucug

SEQ ID NO: 859232 - RNA, 19 nt, Homo sapiens
  misc_RNA (1)...(19): siRNA sense strand
gaucaggacccagauguuu

SEQ ID NO: 859233 - RNA, 19 nt, Homo sapiens
  misc_RNA (1)...(19): siRNA sense strand
aaagagaacacuacuagaa

SEQ ID NO: 859234 - RNA, 19 nt, Homo sapiens
  misc_RNA (1)...(19): siRNA sense strand
gaaaugaacaaagagaaug

SEQ ID NO: 859235 - RNA, 19 nt, Homo sapiens
  misc_RNA (1)...(19): siRNA sense strand
gaaauggauccuucuuguu

SEQ ID NO: 859236 - RNA, 19 nt, Homo sapiens
  misc_RNA (1)...(19): siRNA sense strand
caguacaaaucacaaacua

SEQ ID NO: 859237 - RNA, 19 nt, Homo sapiens
  misc_RNA (1)...(19): siRNA sense strand
aaacaauuacuccagguua

SEQ ID NO: 859238 - RNA, 19 nt, Homo sapiens
  misc_RNA (1)...(19): siRNA sense strand
ucaaauccagugcuacaua

SEQ ID NO: 859239 - RNA, 19 nt, Homo sapiens
  misc_RNA (1)...(19): siRNA sense strand
gaacaagacaaaagaauug

SEQ ID NO: 859240 - RNA, 19 nt, Homo sapiens
  misc_RNA (1)...(19): siRNA sense strand
gaaaagagaacacuacuag

SEQ ID NO: 859241 - RNA, 19 nt, Homo sapiens
  misc_RNA (1)...(19): siRNA sense strand
gaaacguggcccagagauu

SEQ ID NO: 859242 - RNA, 19 nt, Homo sapiens
  misc_RNA (1)...(19): siRNA sense strand
aaauggauccuucuuguug

SEQ ID NO: 859243 - RNA, 19 nt, Homo sapiens
  misc_RNA (1)...(19): siRNA sense strand
gacagugaccacagaaauu

SEQ ID NO: 859244 - RNA, 19 nt, Homo sapiens
  misc_RNA (1)...(19): siRNA sense strand
gcaaagcacuguggaaacc

SEQ ID NO: 859245 - RNA, 19 nt, Homo sapiens
  misc_RNA (1)...(19): siRNA sense strand
gagaaaagguuaacauacu

SEQ ID NO: 859246 - RNA, 19 nt, Homo sapiens
  misc_RNA (1)...(19): siRNA sense strand
ccagauguuuaaagaugaa

SEQ ID NO: 859247 - RNA, 19 nt, Homo sapiens
  misc_RNA (1)...(19): siRNA sense strand
aacaauuacuccagguuaa

SEQ ID NO: 859248 - RNA, 19 nt, Homo sapiens
  misc_RNA (1)...(19): siRNA sense strand
gggcucugauucugaaaug

SEQ ID NO: 859249 - RNA, 19 nt, Homo sapiens
  misc_RNA (1)...(19): siRNA sense strand
aauaagacaugacaguaca

SEQ ID NO: 859250 - RNA, 19 nt, Homo sapiens
  misc_RNA (1)...(19): siRNA sense strand
gagaacacuacuagaaaga

SEQ ID NO: 859251 - RNA, 19 nt, Homo sapiens
  misc_RNA (1)...(19): siRNA sense strand
gacaugacaguacaaauca

SEQ ID NO: 859252 - RNA, 19 nt, Homo sapiens
  misc_RNA (1)...(19): siRNA sense strand
gaugaaauaagacaugaca

SEQ ID NO: 859253 - RNA, 19 nt, Homo sapiens
  misc_RNA (1)...(19): siRNA sense strand
uugauuagguuacggaaau

SEQ ID NO: 859254 - RNA, 19 nt, Homo sapiens
  misc_RNA (1)...(19): siRNA sense strand
agagggagauuuccauucu

SEQ ID NO: 859255 - RNA, 19 nt, Homo sapiens
  misc_RNA (1)...(19): siRNA sense strand
cugaagaagugagaaagaa

SEQ ID NO: 859256 - RNA, 19 nt, Homo sapiens
  misc_RNA (1)...(19): siRNA sense strand
agauaauucugccuuguau

SEQ ID NO: 859257 - RNA, 19 nt, Homo sapiens
  misc_RNA (1)...(19): siRNA sense strand
gaagcaggaggacaguaaa

SEQ ID NO: 859258 - RNA, 19 nt, Homo sapiens
  misc_RNA (1)...(19): siRNA sense strand
gcaggaggacaguaaacaa

SEQ ID NO: 859259 - RNA, 19 nt, Homo sapiens
  misc_RNA (1)...(19): siRNA sense strand
ccgcucacauuauugaaga

SEQ ID NO: 859260 - RNA, 19 nt, Homo sapiens
  misc_RNA (1)...(19): siRNA sense strand
caagggauaagauggaaga

SEQ ID NO: 859261 - RNA, 19 nt, Homo sapiens
  misc_RNA (1)...(19): siRNA sense strand
gaccuacagcucuuagaaa

SEQ ID NO: 859262 - RNA, 19 nt, Homo sapiens
  misc_RNA (1)...(19): siRNA sense strand
gcugcaagccuccagagaa

SEQ ID NO: 859263 - RNA, 19 nt, Homo sapiens
  misc_RNA (1)...(19): siRNA sense strand
ggagauggaaggauuaaaa

SEQ ID NO: 859264 - RNA, 19 nt, Homo sapiens
  misc_RNA (1)...(19): siRNA sense strand
ucucucaucugcaguuugu

SEQ ID NO: 859265 - RNA, 19 nt, Homo sapiens
  misc_RNA (1)...(19): siRNA sense strand
gauucgaacuacucugcaa

SEQ ID NO: 859266 - RNA, 19 nt, Homo sapiens
  misc_RNA (1)...(19): siRNA sense strand
gaucucucaucugcaguuu

SEQ ID NO: 859267 - RNA, 19 nt, Homo sapiens
  misc_RNA (1)...(19): siRNA sense strand
ucaggacccagauguuuaa

SEQ ID NO: 859268 - RNA, 19 nt, Homo sapiens
  misc_RNA (1)...(19): siRNA sense strand
agagaacacuacuagaaag

SEQ ID NO: 859269 - RNA, 19 nt, Homo sapiens
  misc_RNA (1)...(19): siRNA sense strand
aagagaacacuacuagaaa

SEQ ID NO: 859270 - RNA, 19 nt, Homo sapiens
  misc_RNA (1)...(19): siRNA sense strand
acagggcucugauucugaa

SEQ ID NO: 859271 - RNA, 19 nt, Homo sapiens
  misc_RNA (1)...(19): siRNA sense strand
acccagauguuuaaagaug

SEQ ID NO: 859272 - RNA, 19 nt, Homo sapiens
  misc_RNA (1)...(19): siRNA sense strand
uacguccgcucacauuauu

SEQ ID NO: 859273 - RNA, 19 nt, Homo sapiens
  misc_RNA (1)...(19): siRNA sense strand
agacaugacaguacaaauc

SEQ ID NO: 859274 - RNA, 19 nt, Homo sapiens
  misc_RNA (1)...(19): siRNA sense strand
ugaaauaagacaugacagu

SEQ ID NO: 859275 - RNA, 19 nt, Homo sapiens
  misc_RNA (1)...(19): siRNA sense strand
ccagguagcacuuucaucu

SEQ ID NO: 859276 - RNA, 19 nt, Homo sapiens
  misc_RNA (1)...(19): siRNA sense strand
gcagugucauccaggagau

SEQ ID NO: 859277 - RNA, 19 nt, Homo sapiens
  misc_RNA (1)...(19): siRNA sense strand
agaagcaggaggacaguaa

SEQ ID NO: 859278 - RNA, 19 nt, Homo sapiens
  misc_RNA (1)...(19): siRNA sense strand
gagaaacguggcccagaga

SEQ ID NO: 859279 - RNA, 19 nt, Homo sapiens
  misc_RNA (1)...(19): siRNA sense strand
agguagcacuuucaucuga

SEQ ID NO: 859280 - RNA, 19 nt, Homo sapiens
  misc_RNA (1)...(19): siRNA sense strand
auaauucugccuuguauga

SEQ ID NO: 859281 - RNA, 19 nt, Homo sapiens
  misc_RNA (1)...(19): siRNA sense strand
ccaggagauggaaggauua

SEQ ID NO: 859282 - RNA, 19 nt, Homo sapiens
  misc_RNA (1)...(19): siRNA sense strand
ccaaacgcaaucugaagaa

SEQ ID NO: 859283 - RNA, 19 nt, Homo sapiens
  misc_RNA (1)...(19): siRNA sense strand
gcucuuagaaaugaacaaa

SEQ ID NO: 859284 - RNA, 19 nt, Homo sapiens
  misc_RNA (1)...(19): siRNA sense strand
agaaaccgaguaugugaaa

SEQ ID NO: 859285 - RNA, 19 nt, Homo sapiens
  misc_RNA (1)...(19): siRNA sense strand
gaaaaucugaaucaaguug

SEQ ID NO: 859286 - RNA, 19 nt, Homo sapiens
  misc_RNA (1)...(19): siRNA sense strand
cuaaggcugucucuacaag

SEQ ID NO: 859287 - RNA, 19 nt, Homo sapiens
  misc_RNA (1)...(19): siRNA sense strand
caucugcaguuugugauuc

SEQ ID NO: 859288 - RNA, 19 nt, Homo sapiens
  misc_RNA (1)...(19): siRNA sense strand
ugaaucaaguugcugaaaa

SEQ ID NO: 859289 - RNA, 19 nt, Homo sapiens
  misc_RNA (1)...(19): siRNA sense strand
ugacaguacaaaucacaaa

SEQ ID NO: 859290 - RNA, 19 nt, Homo sapiens
  misc_RNA (1)...(19): siRNA sense strand
cagguuaacaagcuugaaa

SEQ ID NO: 859291 - RNA, 19 nt, Homo sapiens
  misc_RNA (1)...(19): siRNA sense strand
ugacagugaccacagaaau

SEQ ID NO: 859292 - RNA, 19 nt, Homo sapiens
  misc_RNA (1)...(19): siRNA sense strand
gcaaucugaagaagugaga

SEQ ID NO: 859293 - RNA, 19 nt, Homo sapiens
  misc_RNA (1)...(19): siRNA sense strand
aagauaauucugccuugua

SEQ ID NO: 859294 - RNA, 19 nt, Homo sapiens
  misc_RNA (1)...(19): siRNA sense strand
guuuggauuugcuuaugaa

SEQ ID NO: 859295 - RNA, 19 nt, Homo sapiens
  misc_RNA (1)...(19): siRNA sense strand
gcaguuuggauuugcuuau

SEQ ID NO: 859296 - RNA, 19 nt, Homo sapiens
  misc_RNA (1)...(19): siRNA sense strand
acaaaucacaaacuagaug

SEQ ID NO: 859297 - RNA, 19 nt, Homo sapiens
  misc_RNA (1)...(19): siRNA sense strand
aaacccagguagcacuuuc

SEQ ID NO: 859298 - RNA, 19 nt, Homo sapiens
  misc_RNA (1)...(19): siRNA sense strand
ugaagaaaccgaguaugug

SEQ ID NO: 859299 - RNA, 19 nt, Homo sapiens
  misc_RNA (1)...(19): siRNA sense strand
caaacgcaaucugaagaag

SEQ ID NO: 859300 - RNA, 19 nt, Homo sapiens
  misc_RNA (1)...(19): siRNA sense strand
gauaaaaggaaaagaccua

SEQ ID NO: 859301 - RNA, 19 nt, Homo sapiens
  misc_RNA (1)...(19): siRNA sense strand
gauccuucuuguugcaguu

SEQ ID NO: 859302 - RNA, 19 nt, Homo sapiens
  misc_RNA (1)...(19): siRNA sense strand
gcucugauucugaaaugga

SEQ ID NO: 859303 - RNA, 19 nt, Homo sapiens
  misc_RNA (1)...(19): siRNA sense strand
uaucuaaggcugucucuac

SEQ ID NO: 859304 - RNA, 19 nt, Homo sapiens
  misc_RNA (1)...(19): siRNA sense strand
gaaaacugucuuuggaaaa

SEQ ID NO: 859305 - RNA, 19 nt, Homo sapiens
  misc_RNA (1)...(19): siRNA sense strand
uaagacaugacaguacaaa

SEQ ID NO: 859306 - RNA, 19 nt, Homo sapiens
  misc_RNA (1)...(19): siRNA sense strand
agaaaacugucuuuggaaa

SEQ ID NO: 859307 - RNA, 19 nt, Homo sapiens
  misc_RNA (1)...(19): siRNA sense strand
agaauuggagaaccuugua

SEQ ID NO: 859308 - RNA, 19 nt, Homo sapiens
  misc_RNA (1)...(19): siRNA sense strand
cagcagcucugagaaacgu

SEQ ID NO: 859309 - RNA, 19 nt, Homo sapiens
  misc_RNA (1)...(19): siRNA sense strand
cccagauguuuaaagauga

SEQ ID NO: 859310 - RNA, 19 nt, Homo sapiens
  misc_RNA (1)...(19): siRNA sense strand
caagcuacugcaacucaaa

SEQ ID NO: 859311 - RNA, 19 nt, Homo sapiens
  misc_RNA (1)...(19): siRNA sense strand
cugcaagccuccagagaag

SEQ ID NO: 859312 - RNA, 19 nt, Homo sapiens
  misc_RNA (1)...(19): siRNA sense strand
uaagagacgugguggauuu

SEQ ID NO: 859313 - RNA, 19 nt, Homo sapiens
  misc_RNA (1)...(19): siRNA sense strand
ccaagaagaugacagagaa

SEQ ID NO: 859314 - RNA, 19 nt, Homo sapiens
  misc_RNA (1)...(19): siRNA sense strand
gaacaaacugaaacacuaa

SEQ ID NO: 859315 - RNA, 19 nt, Homo sapiens
  misc_RNA (1)...(19): siRNA sense strand
gauguggcuugaagaauuu

SEQ ID NO: 859316 - RNA, 19 nt, Homo sapiens
  misc_RNA (1)...(19): siRNA sense strand
agaacaaacugaaacacua

SEQ ID NO: 859317 - RNA, 19 nt, Homo sapiens
  misc_RNA (1)...(19): siRNA sense strand
gaaagucaaugucacaaaa

SEQ ID NO: 859318 - RNA, 19 nt, Homo sapiens
  misc_RNA (1)...(19): siRNA sense strand
gaacaaaugcuggauccaa

SEQ ID NO: 859319 - RNA, 19 nt, Homo sapiens
  misc_RNA (1)...(19): siRNA sense strand
gaagaaagucaaugucaca

SEQ ID NO: 859320 - RNA, 19 nt, Homo sapiens
  misc_RNA (1)...(19): siRNA sense strand
agauguggcuugaagaauu

SEQ ID NO: 859321 - RNA, 19 nt, Homo sapiens
  misc_RNA (1)...(19): siRNA sense strand
gagaagaacagggauguga

SEQ ID NO: 859322 - RNA, 19 nt, Homo sapiens
  misc_RNA (1)...(19): siRNA sense strand
cauucuagcuggcagauga

SEQ ID NO: 859323 - RNA, 19 nt, Homo sapiens
  misc_RNA (1)...(19): siRNA sense strand
agaaguuccuccucuuuga

SEQ ID NO: 859324 - RNA, 19 nt, Homo sapiens
  misc_RNA (1)...(19): siRNA sense strand
cagaggaucuuggcaguuc

SEQ ID NO: 859325 - RNA, 19 nt, Homo sapiens
  misc_RNA (1)...(19): siRNA sense strand
cgugguggauuuccuuaaa

SEQ ID NO: 859326 - RNA, 19 nt, Homo sapiens
  misc_RNA (1)...(19): siRNA sense strand
ggaagaacaaacugaaaca

SEQ ID NO: 859327 - RNA, 19 nt, Homo sapiens
  misc_RNA (1)...(19): siRNA sense strand
gacagaaguuccuccucuu

SEQ ID NO: 859328 - RNA, 19 nt, Homo sapiens
  misc_RNA (1)...(19): siRNA sense strand
ggcaacugcuugacauuca

SEQ ID NO: 859329 - RNA, 19 nt, Homo sapiens
  misc_RNA (1)...(19): siRNA sense strand
gggaagaaagucaauguca

SEQ ID NO: 859330 - RNA, 19 nt, Homo sapiens
  misc_RNA (1)...(19): siRNA sense strand
gagaauuuaauacccauug

SEQ ID NO: 859331 - RNA, 19 nt, Homo sapiens
  misc_RNA (1)...(19): siRNA sense strand
acagggaugugaccauguu

SEQ ID NO: 859332 - RNA, 19 nt, Homo sapiens
  misc_RNA (1)...(19): siRNA sense strand
gagccaagaagaugacaga

SEQ ID NO: 859333 - RNA, 19 nt, Homo sapiens
  misc_RNA (1)...(19): siRNA sense strand
uaagauguggcuugaagaa

SEQ ID NO: 859334 - RNA, 19 nt, Homo sapiens
  misc_RNA (1)...(19): siRNA sense strand
aaacugaaacacuaagaga

SEQ ID NO: 859335 - RNA, 19 nt, Homo sapiens
  misc_RNA (1)...(19): siRNA sense strand
uguaagauguggcuugaag

SEQ ID NO: 859336 - RNA, 19 nt, Homo sapiens
  misc_RNA (1)...(19): siRNA sense strand
caggaugggucgacacaca

SEQ ID NO: 859337 - RNA, 19 nt, Homo sapiens
  misc_RNA (1)...(19): siRNA sense strand
caggaugucuugugagcau

SEQ ID NO: 859338 - RNA, 19 nt, Homo sapiens
  misc_RNA (1)...(19): siRNA sense strand
cacacugucuuugcuauga

SEQ ID NO: 859339 - RNA, 19 nt, Homo sapiens
  misc_RNA (1)...(19): siRNA sense strand
acagagaagugggagaaga

SEQ ID NO: 859340 - RNA, 19 nt, Homo sapiens
  misc_RNA (1)...(19): siRNA sense strand
gaucuuggcaguuccucuu

SEQ ID NO: 859341 - RNA, 19 nt, Homo sapiens
  misc_RNA (1)...(19): siRNA sense strand
ggcaguuccucuucaaugg

SEQ ID NO: 859342 - RNA, 19 nt, Homo sapiens
  misc_RNA (1)...(19): siRNA sense strand
cagagaagugggagaagaa

SEQ ID NO: 859343 - RNA, 19 nt, Homo sapiens
  misc_RNA (1)...(19): siRNA sense strand
ugacagagaagugggagaa

SEQ ID NO: 859344 - RNA, 19 nt, Homo sapiens
  misc_RNA (1)...(19): siRNA sense strand
gauguacugggaacaaaug

SEQ ID NO: 859345 - RNA, 19 nt, Homo sapiens
  misc_RNA (1)...(19): siRNA sense strand
cagaaguuccuccucuuug

SEQ ID NO: 859346 - RNA, 19 nt, Homo sapiens
  misc_RNA (1)...(19): siRNA sense strand
ggagccuucucaucaucuu

SEQ ID NO: 859347 - RNA, 19 nt, Homo sapiens
  misc_RNA (1)...(19): siRNA sense strand
uucaaggccugguggauga

SEQ ID NO: 859348 - RNA, 19 nt, Homo sapiens
  misc_RNA (1)...(19): siRNA sense strand
gccaagaagaugacagaga

SEQ ID NO: 859349 - RNA, 19 nt, Homo sapiens
  misc_RNA (1)...(19): siRNA sense strand
ggacacggcagaggaucuu

SEQ ID NO: 859350 - RNA, 19 nt, Homo sapiens
  misc_RNA (1)...(19): siRNA sense strand
uuaaagggcaacugcuuga

SEQ ID NO: 859351 - RNA, 19 nt, Homo sapiens
  misc_RNA (1)...(19): siRNA sense strand
acagaaguuccuccucuuu

SEQ ID NO: 859352 - RNA, 19 nt, Homo sapiens
  misc_RNA (1)...(19): siRNA sense strand
gggaagaacaaacugaaac

SEQ ID NO: 859353 - RNA, 19 nt, Homo sapiens
  misc_RNA (1)...(19): siRNA sense strand
caaaugcuggauccaacaa

SEQ ID NO: 859354 - RNA, 19 nt, Homo sapiens
  misc_RNA (1)...(19): siRNA sense strand
aggccaggaugucuuguga

SEQ ID NO: 859355 - RNA, 19 nt, Homo sapiens
  misc_RNA (1)...(19): siRNA sense strand
ggccuuuucuucacuauga

SEQ ID NO: 859356 - RNA, 19 nt, Homo sapiens
  misc_RNA (1)...(19): siRNA sense strand
gcaguuccucuucaaugga

SEQ ID NO: 859357 - RNA, 19 nt, Homo sapiens
  misc_RNA (1)...(19): siRNA sense strand
agaaagucaaugucacaaa

SEQ ID NO: 859358 - RNA, 19 nt, Homo sapiens
  misc_RNA (1)...(19): siRNA sense strand
caucuuccucugcuucauu

SEQ ID NO: 859359 - RNA, 19 nt, Homo sapiens
  misc_RNA (1)...(19): siRNA sense strand
gaauuuaauacccauugag

SEQ ID NO: 859360 - RNA, 19 nt, Homo sapiens
  misc_RNA (1)...(19): siRNA sense strand
cacacacugucuuugcuau

SEQ ID NO: 859361 - RNA, 19 nt, Homo sapiens
  misc_RNA (1)...(19): siRNA sense strand
gcagaggaucuuggcaguu

SEQ ID NO: 859362 - RNA, 19 nt, Homo sapiens
  misc_RNA (1)...(19): siRNA sense strand
gggcaacugcuugacauuc

SEQ ID NO: 859363 - RNA, 19 nt, Homo sapiens
  misc_RNA (1)...(19): siRNA sense strand
guaagauguggcuugaaga

SEQ ID NO: 859364 - RNA, 19 nt, Homo sapiens
  misc_RNA (1)...(19): siRNA sense strand
ggaugucuugugagcauga

SEQ ID NO: 859365 - RNA, 19 nt, Homo sapiens
  misc_RNA (1)...(19): siRNA sense strand
gacgugguggauuuccuua

SEQ ID NO: 859366 - RNA, 19 nt, Homo sapiens
  misc_RNA (1)...(19): siRNA sense strand
gggagaagaacagggaugu

SEQ ID NO: 859367 - RNA, 19 nt, Homo sapiens
  misc_RNA (1)...(19): siRNA sense strand
gugguggauuuccuuaaag

SEQ ID NO: 859368 - RNA, 19 nt, Homo sapiens
  misc_RNA (1)...(19): siRNA sense strand
gacuucaucaucacuccua

SEQ ID NO: 859369 - RNA, 19 nt, Homo sapiens
  misc_RNA (1)...(19): siRNA sense strand
gggaugugaccauguucuu

SEQ ID NO: 859370 - RNA, 19 nt, Homo sapiens
  misc_RNA (1)...(19): siRNA sense strand
caaguggagaauuuaauac

SEQ ID NO: 859371 - RNA, 19 nt, Homo sapiens
  misc_RNA (1)...(19): siRNA sense strand
caaacugaaacacuaagag

SEQ ID NO: 859372 - RNA, 19 nt, Homo sapiens
  misc_RNA (1)...(19): siRNA sense strand
caacaaaaccacccucucu

SEQ ID NO: 859373 - RNA, 19 nt, Homo sapiens
  misc_RNA (1)...(19): siRNA sense strand
acacacacugucuuugcua

SEQ ID NO: 859374 - RNA, 19 nt, Homo sapiens
  misc_RNA (1)...(19): siRNA sense strand
ggagaauuuaauacccauu

SEQ ID NO: 859375 - RNA, 19 nt, Homo sapiens
  misc_RNA (1)...(19): siRNA sense strand
ggaugugaccauguucuuc

SEQ ID NO: 859376 - RNA, 19 nt, Homo sapiens
  misc_RNA (1)...(19): siRNA sense strand
gagaagugggagaagaaca

SEQ ID NO: 859377 - RNA, 19 nt, Homo sapiens
  misc_RNA (1)...(19): siRNA sense strand
gaugucuugugagcaugaa

SEQ ID NO: 859378 - RNA, 19 nt, Homo sapiens
  misc_RNA (1)...(19): siRNA sense strand
ccuggagccuucucaucau

SEQ ID NO: 859379 - RNA, 19 nt, Homo sapiens
  misc_RNA (1)...(19): siRNA sense strand
ugacauggcuuccagauau

SEQ ID NO: 859380 - RNA, 19 nt, Homo sapiens
  misc_RNA (1)...(19): siRNA sense strand
agacaaagguggauacaug

SEQ ID NO: 859381 - RNA, 19 nt, Homo sapiens
  misc_RNA (1)...(19): siRNA sense strand
gaggauauuuggaugcauu

SEQ ID NO: 859382 - RNA, 19 nt, Homo sapiens
  misc_RNA (1)...(19): siRNA sense strand
ggagggagaugagcugcua

SEQ ID NO: 859383 - RNA, 19 nt, Homo sapiens
  misc_RNA (1)...(19): siRNA sense strand
gugaagaaaugaaagacaa

SEQ ID NO: 859384 - RNA, 19 nt, Homo sapiens
  misc_RNA (1)...(19): siRNA sense strand
caacguacccuucauugau

SEQ ID NO: 859385 - RNA, 19 nt, Homo sapiens
  misc_RNA (1)...(19): siRNA sense strand
ccacgaacuuucuucaugu

SEQ ID NO: 859386 - RNA, 19 nt, Homo sapiens
  misc_RNA (1)...(19): siRNA sense strand
gcaaacaugagucuggauu

SEQ ID NO: 859387 - RNA, 19 nt, Homo sapiens
  misc_RNA (1)...(19): siRNA sense strand
ggauacaugagcaagauuu

SEQ ID NO: 859388 - RNA, 19 nt, Homo sapiens
  misc_RNA (1)...(19): siRNA sense strand
gacagggucucugcaaaug

SEQ ID NO: 859389 - RNA, 19 nt, Homo sapiens
  misc_RNA (1)...(19): siRNA sense strand
gagaagggcaucugcaaca

SEQ ID NO: 859390 - RNA, 19 nt, Homo sapiens
  misc_RNA (1)...(19): siRNA sense strand
cauccauccuucaacuuaa

SEQ ID NO: 859391 - RNA, 19 nt, Homo sapiens
  misc_RNA (1)...(19): siRNA sense strand
ccauccauccuucaacuua

SEQ ID NO: 859392 - RNA, 19 nt, Homo sapiens
  misc_RNA (1)...(19): siRNA sense strand
gcucaucuccggcaaaaua

SEQ ID NO: 859393 - RNA, 19 nt, Homo sapiens
  misc_RNA (1)...(19): siRNA sense strand
aaaauaggcaucucucuua

SEQ ID NO: 859394 - RNA, 19 nt, Homo sapiens
  misc_RNA (1)...(19): siRNA sense strand
agauaugccuucgaggaua

SEQ ID NO: 859395 - RNA, 19 nt, Homo sapiens
  misc_RNA (1)...(19): siRNA sense strand
gaaagacaaagguggauac

SEQ ID NO: 859396 - RNA, 19 nt, Homo sapiens
  misc_RNA (1)...(19): siRNA sense strand
gacaaagguggauacauga

SEQ ID NO: 859397 - RNA, 19 nt, Homo sapiens
  misc_RNA (1)...(19): siRNA sense strand
gguccagccugaacuucuu

SEQ ID NO: 859398 - RNA, 19 nt, Homo sapiens
  misc_RNA (1)...(19): siRNA sense strand
agucguggaugccuuggua

SEQ ID NO: 859399 - RNA, 19 nt, Homo sapiens
  misc_RNA (1)...(19): siRNA sense strand
gaacauuggcaucuuccau

SEQ ID NO: 859400 - RNA, 19 nt, Homo sapiens
  misc_RNA (1)...(19): siRNA sense strand
gacauggcuuccagauaug

SEQ ID NO: 859401 - RNA, 19 nt, Homo sapiens
  misc_RNA (1)...(19): siRNA sense strand
gagauaugccuucgaggau

SEQ ID NO: 859402 - RNA, 19 nt, Homo sapiens
  misc_RNA (1)...(19): siRNA sense strand
acaugagucuggauucuuc

SEQ ID NO: 859403 - RNA, 19 nt, Homo sapiens
  misc_RNA (1)...(19): siRNA sense strand
cgacagggucucugcaaau

SEQ ID NO: 859404 - RNA, 19 nt, Homo sapiens
  misc_RNA (1)...(19): siRNA sense strand
aaacaugagucuggauucu

SEQ ID NO: 859405 - RNA, 19 nt, Homo sapiens
  misc_RNA (1)...(19): siRNA sense strand
ugacaacguacccuucauu

SEQ ID NO: 859406 - RNA, 19 nt, Homo sapiens
  misc_RNA (1)...(19): siRNA sense strand
guggaugccuugguauguu

SEQ ID NO: 859407 - RNA, 19 nt, Homo sapiens
  misc_RNA (1)...(19): siRNA sense strand
gacaacguacccuucauug

SEQ ID NO: 859408 - RNA, 19 nt, Homo sapiens
  misc_RNA (1)...(19): siRNA sense strand
ggccaggagucggaacauu

SEQ ID NO: 859409 - RNA, 19 nt, Homo sapiens
  misc_RNA (1)...(19): siRNA sense strand
guggauacaugagcaagau

SEQ ID NO: 859410 - RNA, 19 nt, Homo sapiens
  misc_RNA (1)...(19): siRNA sense strand
gggaaccucuaccuucucu

SEQ ID NO: 859411 - RNA, 19 nt, Homo sapiens
  misc_RNA (1)...(19): siRNA sense strand
cagggaaccucuaccuucu

SEQ ID NO: 859412 - RNA, 19 nt, Homo sapiens
  misc_RNA (1)...(19): siRNA sense strand
caucugcccuaaagucaag

SEQ ID NO: 859413 - RNA, 19 nt, Homo sapiens
  misc_RNA (1)...(19): siRNA sense strand
aggagugagugacaacgua

SEQ ID NO: 859414 - RNA, 19 nt, Homo sapiens
  misc_RNA (1)...(19): siRNA sense strand
gaagaaaugaaagacaaag

SEQ ID NO: 859415 - RNA, 19 nt, Homo sapiens
  misc_RNA (1)...(19): siRNA sense strand
uacgacaucugcccuaaag

SEQ ID NO: 859416 - RNA, 19 nt, Homo sapiens
  misc_RNA (1)...(19): siRNA sense strand
ucagaggcgugcgauaugu

SEQ ID NO: 859417 - RNA, 19 nt, Homo sapiens
  misc_RNA (1)...(19): siRNA sense strand
gccaggagucggaacauug

SEQ ID NO: 859418 - RNA, 19 nt, Homo sapiens
  misc_RNA (1)...(19): siRNA sense strand
uccacgaacuuucuucaug

SEQ ID NO: 859419 - RNA, 19 nt, Homo sapiens
  misc_RNA (1)...(19): siRNA sense strand
cgacaucugcccuaaaguc

SEQ ID NO: 859420 - RNA, 19 nt, Homo sapiens
  misc_RNA (1)...(19): siRNA sense strand
ggacaucaccaagcucagu

SEQ ID NO: 859421 - RNA, 19 nt, Homo sapiens
  misc_RNA (1)...(19): siRNA sense strand
caaggugcugggagagaua

SEQ ID NO: 859422 - RNA, 19 nt, Homo sapiens
  misc_RNA (1)...(19): siRNA sense strand
gauacaugagcaagauuug

SEQ ID NO: 859423 - RNA, 19 nt, Homo sapiens
  misc_RNA (1)...(19): siRNA sense strand
guacgacaucugcccuaaa

SEQ ID NO: 859424 - RNA, 19 nt, Homo sapiens
  misc_RNA (1)...(19): siRNA sense strand
ccgacgauguccugugguu

SEQ ID NO: 859425 - RNA, 19 nt, Homo sapiens
  misc_RNA (1)...(19): siRNA sense strand
ugaaagacaaagguggaua

SEQ ID NO: 859426 - RNA, 19 nt, Homo sapiens
  misc_RNA (1)...(19): siRNA sense strand
ccgacagggucucugcaaa

SEQ ID NO: 859427 - RNA, 19 nt, Homo sapiens
  misc_RNA (1)...(19): siRNA sense strand
aaauaggcaucucucuuac

SEQ ID NO: 859428 - RNA, 19 nt, Homo sapiens
  misc_RNA (1)...(19): siRNA sense strand
cuucuugggcaauaaagua

SEQ ID NO: 859429 - RNA, 19 nt, Homo sapiens
  misc_RNA (1)...(19): siRNA sense strand
gaacuucuucuugggcaau

SEQ ID NO: 859430 - RNA, 19 nt, Homo sapiens
  misc_RNA (1)...(19): siRNA sense strand
ucaaggugcugggagagau

SEQ ID NO: 859431 - RNA, 19 nt, Homo sapiens
  misc_RNA (1)...(19): siRNA sense strand
cagguccucucagaucuug

SEQ ID NO: 859432 - RNA, 19 nt, Homo sapiens
  misc_RNA (1)...(19): siRNA sense strand
caacaggccuccccaugca

SEQ ID NO: 859433 - RNA, 19 nt, Homo sapiens
  misc_RNA (1)...(19): siRNA sense strand
cagauaugcccgacgaugu

SEQ ID NO: 859434 - RNA, 19 nt, Homo sapiens
  misc_RNA (1)...(19): siRNA sense strand
uauguaaugcugcccugua

SEQ ID NO: 859435 - RNA, 19 nt, Homo sapiens
  misc_RNA (1)...(19): siRNA sense strand
ugagugaagaaaugaaaga

SEQ ID NO: 859436 - RNA, 19 nt, Homo sapiens
  misc_RNA (1)...(19): siRNA sense strand
gacaucugcccuaaaguca

SEQ ID NO: 859437 - RNA, 19 nt, Homo sapiens
  misc_RNA (1)...(19): siRNA sense strand
aacguacccuucauugaug

SEQ ID NO: 859438 - RNA, 19 nt, Homo sapiens
  misc_RNA (1)...(19): siRNA sense strand
gcacagggaaccucuaccu

SEQ ID NO: 859439 - RNA, 19 nt, Homo sapiens
  misc_RNA (1)...(19): siRNA sense strand
aaagucaaguccacgaacu

SEQ ID NO: 859440 - RNA, 19 nt, Homo sapiens
  misc_RNA (1)...(19): siRNA sense strand
gugacauggcuuccagaua

SEQ ID NO: 859441 - RNA, 19 nt, Homo sapiens
  misc_RNA (1)...(19): siRNA sense strand
caaacaugagucuggauuc

SEQ ID NO: 859442 - RNA, 19 nt, Homo sapiens
  misc_RNA (1)...(19): siRNA sense strand
gguauguuccugcuucauc

SEQ ID NO: 859443 - RNA, 19 nt, Homo sapiens
  misc_RNA (1)...(19): siRNA sense strand
ucuccaccuuucccaguuu

SEQ ID NO: 859444 - RNA, 19 nt, Homo sapiens
  misc_RNA (1)...(19): siRNA sense strand
gauggaggagugagugaca

SEQ ID NO: 859445 - RNA, 19 nt, Homo sapiens
  misc_RNA (1)...(19): siRNA sense strand
cagccugaacuucuucuug

SEQ ID NO: 859446 - RNA, 19 nt, Homo sapiens
  misc_RNA (1)...(19): siRNA sense strand
gcagguccucucagaucuu

SEQ ID NO: 859447 - RNA, 19 nt, Homo sapiens
  misc_RNA (1)...(19): siRNA sense strand
caaaauaggcaucucucuu

SEQ ID NO: 859448 - RNA, 19 nt, Homo sapiens
  misc_RNA (1)...(19): siRNA sense strand
ggaaaacguucuggugucu

SEQ ID NO: 859449 - RNA, 19 nt, Homo sapiens
  misc_RNA (1)...(19): siRNA sense strand
uugcuacccauuaggauaa

SEQ ID NO: 859450 - RNA, 19 nt, Homo sapiens
  misc_RNA (1)...(19): siRNA sense strand
cacgaacuuucuucaugug

SEQ ID NO: 859451 - RNA, 19 nt, Homo sapiens
  misc_RNA (1)...(19): siRNA sense strand
acaacguacccuucauuga

SEQ ID NO: 859452 - RNA, 19 nt, Homo sapiens
  misc_RNA (1)...(19): siRNA sense strand
auaggcaucucucuuacca

SEQ ID NO: 859453 - RNA, 19 nt, Homo sapiens
  misc_RNA (1)...(19): siRNA sense strand
uggaugccuugguauguuc

SEQ ID NO: 859454 - RNA, 19 nt, Homo sapiens
  misc_RNA (1)...(19): siRNA sense strand
agaaaugaaagacaaaggu

SEQ ID NO: 859455 - RNA, 19 nt, Homo sapiens
  misc_RNA (1)...(19): siRNA sense strand
ucggaacauuggcaucuuc

SEQ ID NO: 859456 - RNA, 19 nt, Homo sapiens
  misc_RNA (1)...(19): siRNA sense strand
aaaacguucuggugucuga

SEQ ID NO: 859457 - RNA, 19 nt, Homo sapiens
  misc_RNA (1)...(19): siRNA sense strand
agccaggccugaagucauc

SEQ ID NO: 859458 - RNA, 19 nt, Homo sapiens
  misc_RNA (1)...(19): siRNA sense strand
guucuggugucugacuuuc

SEQ ID NO: 859459 - RNA, 19 nt, Homo sapiens
  misc_RNA (1)...(19): siRNA sense strand
cuucagaggcgugcgauau

SEQ ID NO: 859460 - RNA, 19 nt, Homo sapiens
  misc_RNA (1)...(19): siRNA sense strand
ccuguggaaucugccauug

SEQ ID NO: 859461 - RNA, 19 nt, Homo sapiens
  misc_RNA (1)...(19): siRNA sense strand
gcagaaggaccaacaauua

SEQ ID NO: 859462 - RNA, 19 nt, Homo sapiens
  misc_RNA (1)...(19): siRNA sense strand
aaacugagauccuuagaaa

SEQ ID NO: 859463 - RNA, 19 nt, Homo sapiens
  misc_RNA (1)...(19): siRNA sense strand
aaagggagcugguccuaaa

SEQ ID NO: 859464 - RNA, 19 nt, Homo sapiens
  misc_RNA (1)...(19): siRNA sense strand
ggaggaaccuggagcuaga

SEQ ID NO: 859465 - RNA, 19 nt, Homo sapiens
  misc_RNA (1)...(19): siRNA sense strand
gcaaaccaauuacggaguu

SEQ ID NO: 859466 - RNA, 19 nt, Homo sapiens
  misc_RNA (1)...(19): siRNA sense strand
ucauccagcuuucugauua

SEQ ID NO: 859467 - RNA, 19 nt, Homo sapiens
  misc_RNA (1)...(19): siRNA sense strand
caccagcucugaagucuuu

SEQ ID NO: 859468 - RNA, 19 nt, Homo sapiens
  misc_RNA (1)...(19): siRNA sense strand
ggaagggacagcuuaauga

SEQ ID NO: 859469 - RNA, 19 nt, Homo sapiens
  misc_RNA (1)...(19): siRNA sense strand
ccagucagcaaaccaauua

SEQ ID NO: 859470 - RNA, 19 nt, Homo sapiens
  misc_RNA (1)...(19): siRNA sense strand
gaacaggagaaacucuuaa

SEQ ID NO: 859471 - RNA, 19 nt, Homo sapiens
  misc_RNA (1)...(19): siRNA sense strand
aggagaaacucuuaacaaa

SEQ ID NO: 859472 - RNA, 19 nt, Homo sapiens
  misc_RNA (1)...(19): siRNA sense strand
gaguugcaguucuggauaa

SEQ ID NO: 859473 - RNA, 19 nt, Homo sapiens
  misc_RNA (1)...(19): siRNA sense strand
agaaagugcuggaggagaa

SEQ ID NO: 859474 - RNA, 19 nt, Homo sapiens
  misc_RNA (1)...(19): siRNA sense strand
gaccaacaauuaagaacga

SEQ ID NO: 859475 - RNA, 19 nt, Homo sapiens
  misc_RNA (1)...(19): siRNA sense strand
ggagauggaagaccagaaa

SEQ ID NO: 859476 - RNA, 19 nt, Homo sapiens
  misc_RNA (1)...(19): siRNA sense strand
gcuaugaggccaaguguga

SEQ ID NO: 859477 - RNA, 19 nt, Homo sapiens
  misc_RNA (1)...(19): siRNA sense strand
gaagggacagcuuaaugaa

SEQ ID NO: 859478 - RNA, 19 nt, Homo sapiens
  misc_RNA (1)...(19): siRNA sense strand
caaccucagugacgaguau

SEQ ID NO: 859479 - RNA, 19 nt, Homo sapiens
  misc_RNA (1)...(19): siRNA sense strand
gaaggaccaacaauuaaga

SEQ ID NO: 859480 - RNA, 19 nt, Homo sapiens
  misc_RNA (1)...(19): siRNA sense strand
guacagggaaggagaaaga

SEQ ID NO: 859481 - RNA, 19 nt, Homo sapiens
  misc_RNA (1)...(19): siRNA sense strand
ggaccuacaagaucaacua

SEQ ID NO: 859482 - RNA, 19 nt, Homo sapiens
  misc_RNA (1)...(19): siRNA sense strand
gaccuacuguccacucuga

SEQ ID NO: 859483 - RNA, 19 nt, Homo sapiens
  misc_RNA (1)...(19): siRNA sense strand
cagaaggaccaacaauuaa

SEQ ID NO: 859484 - RNA, 19 nt, Homo sapiens
  misc_RNA (1)...(19): siRNA sense strand
gagcagaagugugaagagu

SEQ ID NO: 859485 - RNA, 19 nt, Homo sapiens
  misc_RNA (1)...(19): siRNA sense strand
gaaacugagauccuuagaa

SEQ ID NO: 859486 - RNA, 19 nt, Homo sapiens
  misc_RNA (1)...(19): siRNA sense strand
gcagggacuuacagaugaa

SEQ ID NO: 859487 - RNA, 19 nt, Homo sapiens
  misc_RNA (1)...(19): siRNA sense strand
gaaagacugggaucucaga

SEQ ID NO: 859488 - RNA, 19 nt, Homo sapiens
  misc_RNA (1)...(19): siRNA sense strand
caaagaggcccuacaaagg

SEQ ID NO: 859489 - RNA, 19 nt, Homo sapiens
  misc_RNA (1)...(19): siRNA sense strand
caauaaagacaaccugaug

SEQ ID NO: 859490 - RNA, 19 nt, Homo sapiens
  misc_RNA (1)...(19): siRNA sense strand
gaacgaugccagucagcaa

SEQ ID NO: 859491 - RNA, 19 nt, Homo sapiens
  misc_RNA (1)...(19): siRNA sense strand
caaaguccuucccuaacga

SEQ ID NO: 859492 - RNA, 19 nt, Homo sapiens
  misc_RNA (1)...(19): siRNA sense strand
ggagaaacucuuaacaaag

SEQ ID NO: 859493 - RNA, 19 nt, Homo sapiens
  misc_RNA (1)...(19): siRNA sense strand
agggacagcuuaaugaaga

SEQ ID NO: 859494 - RNA, 19 nt, Homo sapiens
  misc_RNA (1)...(19): siRNA sense strand
ucaagaagccacccaaaca

SEQ ID NO: 859495 - RNA, 19 nt, Homo sapiens
  misc_RNA (1)...(19): siRNA sense strand
gagaccagcugcaaaagaa

SEQ ID NO: 859496 - RNA, 19 nt, Homo sapiens
  misc_RNA (1)...(19): siRNA sense strand
ggaguugcaguucuggaua

SEQ ID NO: 859497 - RNA, 19 nt, Homo sapiens
  misc_RNA (1)...(19): siRNA sense strand
caguguuccuggccaauaa

SEQ ID NO: 859498 - RNA, 19 nt, Homo sapiens
  misc_RNA (1)...(19): siRNA sense strand
ucaaagaggcccuacaaag

SEQ ID NO: 859499 - RNA, 19 nt, Homo sapiens
  misc_RNA (1)...(19): siRNA sense strand
uggcagagcagaaguguga

SEQ ID NO: 859500 - RNA, 19 nt, Homo sapiens
  misc_RNA (1)...(19): siRNA sense strand
ggcaagagauccgugaaag

SEQ ID NO: 859501 - RNA, 19 nt, Homo sapiens
  misc_RNA (1)...(19): siRNA sense strand
gcaguguuccuggccaaua

SEQ ID NO: 859502 - RNA, 19 nt, Homo sapiens
  misc_RNA (1)...(19): siRNA sense strand
caggagaaacucuuaacaa

SEQ ID NO: 859503 - RNA, 19 nt, Homo sapiens
  misc_RNA (1)...(19): siRNA sense strand
ccuuacagcuucaagaaca

SEQ ID NO: 859504 - RNA, 19 nt, Homo sapiens
  misc_RNA (1)...(19): siRNA sense strand
gcagaaggccaaggaguca

SEQ ID NO: 859505 - RNA, 19 nt, Homo sapiens
  misc_RNA (1)...(19): siRNA sense strand
ccaaaguccuucccuaacg

SEQ ID NO: 859506 - RNA, 19 nt, Homo sapiens
  misc_RNA (1)...(19): siRNA sense strand
ggcagaaggaccaacaauu

SEQ ID NO: 859507 - RNA, 19 nt, Homo sapiens
  misc_RNA (1)...(19): siRNA sense strand
gaaaaggagugcagagaac

SEQ ID NO: 859508 - RNA, 19 nt, Homo sapiens
  misc_RNA (1)...(19): siRNA sense strand
ccacaggacacucccauca

SEQ ID NO: 859509 - RNA, 19 nt, Homo sapiens
  misc_RNA (1)...(19): siRNA sense strand
gcagagcagcaacuacaga

SEQ ID NO: 859510 - RNA, 19 nt, Homo sapiens
  misc_RNA (1)...(19): siRNA sense strand
acaccuguacccagaaaua

SEQ ID NO: 859511 - RNA, 19 nt, Homo sapiens
  misc_RNA (1)...(19): siRNA sense strand
aaggaaaucauccagcuuu

SEQ ID NO: 859512 - RNA, 19 nt, Homo sapiens
  misc_RNA (1)...(19): siRNA sense strand
guccaaaguccuucccuaa

SEQ ID NO: 859513 - RNA, 19 nt, Homo sapiens
  misc_RNA (1)...(19): siRNA sense strand
ccuacaagaucaacuaaaa

SEQ ID NO: 859514 - RNA, 19 nt, Homo sapiens
  misc_RNA (1)...(19): siRNA sense strand
gaccugugcagcuuggaua

SEQ ID NO: 859515 - RNA, 19 nt, Homo sapiens
  misc_RNA (1)...(19): siRNA sense strand
gcagauagcagggacuuac

SEQ ID NO: 859516 - RNA, 19 nt, Homo sapiens
  misc_RNA (1)...(19): siRNA sense strand
gaaugcagagcagcaacua

SEQ ID NO: 859517 - RNA, 19 nt, Homo sapiens
  misc_RNA (1)...(19): siRNA sense strand
aaacagcuaugagcagaag

SEQ ID NO: 859518 - RNA, 19 nt, Homo sapiens
  misc_RNA (1)...(19): siRNA sense strand
aaauggugauucuccaaga

SEQ ID NO: 859519 - RNA, 19 nt, Homo sapiens
  misc_RNA (1)...(19): siRNA sense strand
aaagacaaccugaugaucu

SEQ ID NO: 859520 - RNA, 19 nt, Homo sapiens
  misc_RNA (1)...(19): siRNA sense strand
gcagcacugucgagaagag

SEQ ID NO: 859521 - RNA, 19 nt, Homo sapiens
  misc_RNA (1)...(19): siRNA sense strand
uagcagggacuuacagaug

SEQ ID NO: 859522 - RNA, 19 nt, Homo sapiens
  misc_RNA (1)...(19): siRNA sense strand
caaagggagcugguccuaa

SEQ ID NO: 859523 - RNA, 19 nt, Homo sapiens
  misc_RNA (1)...(19): siRNA sense strand
uacagcaguugcaggguuu

SEQ ID NO: 859524 - RNA, 19 nt, Homo sapiens
  misc_RNA (1)...(19): siRNA sense strand
gucccaaugugaccacuug

SEQ ID NO: 859525 - RNA, 19 nt, Homo sapiens
  misc_RNA (1)...(19): siRNA sense strand
gaaagugcuggaggagaaa

SEQ ID NO: 859526 - RNA, 19 nt, Homo sapiens
  misc_RNA (1)...(19): siRNA sense strand
gcuuucugauuaccucaaa

SEQ ID NO: 859527 - RNA, 19 nt, Homo sapiens
  misc_RNA (1)...(19): siRNA sense strand
agaacaggagaaacucuua

SEQ ID NO: 859528 - RNA, 19 nt, Homo sapiens
  misc_RNA (1)...(19): siRNA sense strand
ggucagaggcagagaaacu

SEQ ID NO: 859529 - RNA, 19 nt, Homo sapiens
  misc_RNA (1)...(19): siRNA sense strand
cccaggaccuacaagauca

SEQ ID NO: 859530 - RNA, 19 nt, Homo sapiens
  misc_RNA (1)...(19): siRNA sense strand
ccaaggagucacugcagaa

SEQ ID NO: 859531 - RNA, 19 nt, Homo sapiens
  misc_RNA (1)...(19): siRNA sense strand
uuacggaguugcaguucug

SEQ ID NO: 859532 - RNA, 19 nt, Homo sapiens
  misc_RNA (1)...(19): siRNA sense strand
gaccuacaagaucaacuaa

SEQ ID NO: 859533 - RNA, 19 nt, Homo sapiens
  misc_RNA (1)...(19): siRNA sense strand
agcagggacuuacagauga

SEQ ID NO: 859534 - RNA, 19 nt, Homo sapiens
  misc_RNA (1)...(19): siRNA sense strand
gauagcagggacuuacaga

SEQ ID NO: 859535 - RNA, 19 nt, Homo sapiens
  misc_RNA (1)...(19): siRNA sense strand
acaggacacucccaucaag

SEQ ID NO: 859536 - RNA, 19 nt, Homo sapiens
  misc_RNA (1)...(19): siRNA sense strand
aagacaaccugaugaucug

SEQ ID NO: 859537 - RNA, 19 nt, Homo sapiens
  misc_RNA (1)...(19): siRNA sense strand
ggaaacugagauccuuaga

SEQ ID NO: 859538 - RNA, 19 nt, Homo sapiens
  misc_RNA (1)...(19): siRNA sense strand
ggaaaaggagugcagagaa

SEQ ID NO: 859539 - RNA, 19 nt, Homo sapiens
  misc_RNA (1)...(19): siRNA sense strand
gcuucaaaaucaauccuua

SEQ ID NO: 859540 - RNA, 19 nt, Homo sapiens
  misc_RNA (1)...(19): siRNA sense strand
aggagucacugcagaaagu

SEQ ID NO: 859541 - RNA, 19 nt, Homo sapiens
  misc_RNA (1)...(19): siRNA sense strand
caaggagucacugcagaaa

SEQ ID NO: 859542 - RNA, 19 nt, Homo sapiens
  misc_RNA (1)...(19): siRNA sense strand
caaaccaauuacggaguug

SEQ ID NO: 859543 - RNA, 19 nt, Homo sapiens
  misc_RNA (1)...(19): siRNA sense strand
aauaaagacaaccugauga

SEQ ID NO: 859544 - RNA, 19 nt, Homo sapiens
  misc_RNA (1)...(19): siRNA sense strand
gaccagaguacagcaguug

SEQ ID NO: 859545 - RNA, 19 nt, Homo sapiens
  misc_RNA (1)...(19): siRNA sense strand
ccacgugcuucaguccaaa

SEQ ID NO: 859546 - RNA, 19 nt, Homo sapiens
  misc_RNA (1)...(19): siRNA sense strand
uugcaguucuggauaagga

SEQ ID NO: 859547 - RNA, 19 nt, Homo sapiens
  misc_RNA (1)...(19): siRNA sense strand
caauuacggaguugcaguu

SEQ ID NO: 859548 - RNA, 19 nt, Homo sapiens
  misc_RNA (1)...(19): siRNA sense strand
cugcagcacugucgagaag

SEQ ID NO: 859549 - RNA, 19 nt, Homo sapiens
  misc_RNA (1)...(19): siRNA sense strand
caagauugaaugccugcaa

SEQ ID NO: 859550 - RNA, 19 nt, Homo sapiens
  misc_RNA (1)...(19): siRNA sense strand
gcaguucuggauaaggaaa

SEQ ID NO: 859551 - RNA, 19 nt, Homo sapiens
  misc_RNA (1)...(19): siRNA sense strand
acagcuuaaugaagacaaa

SEQ ID NO: 859552 - RNA, 19 nt, Homo sapiens
  misc_RNA (1)...(19): siRNA sense strand
agaauuagacaaccucagu

SEQ ID NO: 859553 - RNA, 19 nt, Homo sapiens
  misc_RNA (1)...(19): siRNA sense strand
ugaccagaguacagcaguu

SEQ ID NO: 859554 - RNA, 19 nt, Homo sapiens
  misc_RNA (1)...(19): siRNA sense strand
uaaugaagacaaacugaag

SEQ ID NO: 859555 - RNA, 19 nt, Homo sapiens
  misc_RNA (1)...(19): siRNA sense strand
caucaagaagccacccaaa

SEQ ID NO: 859556 - RNA, 19 nt, Homo sapiens
  misc_RNA (1)...(19): siRNA sense strand
gagcagauagcagggacuu

SEQ ID NO: 859557 - RNA, 19 nt, Homo sapiens
  misc_RNA (1)...(19): siRNA sense strand
aaaucaauccuuacagcuu

SEQ ID NO: 859558 - RNA, 19 nt, Homo sapiens
  misc_RNA (1)...(19): siRNA sense strand
ccaauaaagacaaccugau

SEQ ID NO: 859559 - RNA, 19 nt, Homo sapiens
  misc_RNA (1)...(19): siRNA sense strand
gcaguugcaggguuugcuu

SEQ ID NO: 859560 - RNA, 19 nt, Homo sapiens
  misc_RNA (1)...(19): siRNA sense strand
ggacacucccaucaagaag

SEQ ID NO: 859561 - RNA, 19 nt, Homo sapiens
  misc_RNA (1)...(19): siRNA sense strand
gagagaagcccuauaaaug

SEQ ID NO: 859562 - RNA, 19 nt, Homo sapiens
  misc_RNA (1)...(19): siRNA sense strand
ggagggaacucuauagaca

SEQ ID NO: 859563 - RNA, 19 nt, Homo sapiens
  misc_RNA (1)...(19): siRNA sense strand
ggaaagaagacgauauaaa

SEQ ID NO: 859564 - RNA, 19 nt, Homo sapiens
  misc_RNA (1)...(19): siRNA sense strand
gaauucauaccgcaaauaa

SEQ ID NO: 859565 - RNA, 19 nt, Homo sapiens
  misc_RNA (1)...(19): siRNA sense strand
gaaggaagauaugcccaaa

SEQ ID NO: 859566 - RNA, 19 nt, Homo sapiens
  misc_RNA (1)...(19): siRNA sense strand
agucauagcucagaccuua

SEQ ID NO: 859567 - RNA, 19 nt, Homo sapiens
  misc_RNA (1)...(19): siRNA sense strand
cauccuaaguccaaagaua

SEQ ID NO: 859568 - RNA, 19 nt, Homo sapiens
  misc_RNA (1)...(19): siRNA sense strand
gcucagaccuuaguaaaca

SEQ ID NO: 859569 - RNA, 19 nt, Homo sapiens
  misc_RNA (1)...(19): siRNA sense strand
ggacuaagaaugaagaguu

SEQ ID NO: 859570 - RNA, 19 nt, Homo sapiens
  misc_RNA (1)...(19): siRNA sense strand
ggagagaagcccuauaaau

SEQ ID NO: 859571 - RNA, 19 nt, Homo sapiens
  misc_RNA (1)...(19): siRNA sense strand
acaaaggaauggugauaaa

SEQ ID NO: 859572 - RNA, 19 nt, Homo sapiens
  misc_RNA (1)...(19): siRNA sense strand
gagaagcccuauaaaugug

SEQ ID NO: 859573 - RNA, 19 nt, Homo sapiens
  misc_RNA (1)...(19): siRNA sense strand
gaagauaugcccaaagaca

SEQ ID NO: 859574 - RNA, 19 nt, Homo sapiens
  misc_RNA (1)...(19): siRNA sense strand
aaacuaggacuaagaauga

SEQ ID NO: 859575 - RNA, 19 nt, Homo sapiens
  misc_RNA (1)...(19): siRNA sense strand
ggagagagagcuugaugaa

SEQ ID NO: 859576 - RNA, 19 nt, Homo sapiens
  misc_RNA (1)...(19): siRNA sense strand
ucaggaagcucugcuauca

SEQ ID NO: 859577 - RNA, 19 nt, Homo sapiens
  misc_RNA (1)...(19): siRNA sense strand
guucagcucuuauuagaca

SEQ ID NO: 859578 - RNA, 19 nt, Homo sapiens
  misc_RNA (1)...(19): siRNA sense strand
gcaggaagcugggaaacca

SEQ ID NO: 859579 - RNA, 19 nt, Homo sapiens
  misc_RNA (1)...(19): siRNA sense strand
cauuggacaucauagagua

SEQ ID NO: 859580 - RNA, 19 nt, Homo sapiens
  misc_RNA (1)...(19): siRNA sense strand
gacuaagaaugaagaguug

SEQ ID NO: 859581 - RNA, 19 nt, Homo sapiens
  misc_RNA (1)...(19): siRNA sense strand
aggaagauaugcccaaaga

SEQ ID NO: 859582 - RNA, 19 nt, Homo sapiens
  misc_RNA (1)...(19): siRNA sense strand
ccacaaaggaauggugaua

SEQ ID NO: 859583 - RNA, 19 nt, Homo sapiens
  misc_RNA (1)...(19): siRNA sense strand
cuauaaaugugaugagugu

SEQ ID NO: 859584 - RNA, 19 nt, Homo sapiens
  misc_RNA (1)...(19): siRNA sense strand
uggaggaucuggagagaga

SEQ ID NO: 859585 - RNA, 19 nt, Homo sapiens
  misc_RNA (1)...(19): siRNA sense strand
gaaagacgggacauacuca

SEQ ID NO: 859586 - RNA, 19 nt, Homo sapiens
  misc_RNA (1)...(19): siRNA sense strand
gggaaggccauaugaauca

SEQ ID NO: 859587 - RNA, 19 nt, Homo sapiens
  misc_RNA (1)...(19): siRNA sense strand
gaagacgauauaaauguga

SEQ ID NO: 859588 - RNA, 19 nt, Homo sapiens
  misc_RNA (1)...(19): siRNA sense strand
caaagauacuccucagcau

SEQ ID NO: 859589 - RNA, 19 nt, Homo sapiens
  misc_RNA (1)...(19): siRNA sense strand
cgggagagaagcccuauaa

SEQ ID NO: 859590 - RNA, 19 nt, Homo sapiens
  misc_RNA (1)...(19): siRNA sense strand
agaagacgauauaaaugug

SEQ ID NO: 859591 - RNA, 19 nt, Homo sapiens
  misc_RNA (1)...(19): siRNA sense strand
aaguucagcucuuauuaga

SEQ ID NO: 859592 - RNA, 19 nt, Homo sapiens
  misc_RNA (1)...(19): siRNA sense strand
gcgcucacaucucauugga

SEQ ID NO: 859593 - RNA, 19 nt, Homo sapiens
  misc_RNA (1)...(19): siRNA sense strand
agagaagcccuauaaaugu

SEQ ID NO: 859594 - RNA, 19 nt, Homo sapiens
  misc_RNA (1)...(19): siRNA sense strand
gaacucacacgggagagaa

SEQ ID NO: 859595 - RNA, 19 nt, Homo sapiens
  misc_RNA (1)...(19): siRNA sense strand
gcgcacaggucuuauucag

SEQ ID NO: 859596 - RNA, 19 nt, Homo sapiens
  misc_RNA (1)...(19): siRNA sense strand
uaaagaaugugggaaagac

SEQ ID NO: 859597 - RNA, 19 nt, Homo sapiens
  misc_RNA (1)...(19): siRNA sense strand
gcucuuauuagacaucaaa

SEQ ID NO: 859598 - RNA, 19 nt, Homo sapiens
  misc_RNA (1)...(19): siRNA sense strand
auucagcgcucacaucuca

SEQ ID NO: 859599 - RNA, 19 nt, Homo sapiens
  misc_RNA (1)...(19): siRNA sense strand
guaaagaaugugggaaaga

SEQ ID NO: 859600 - RNA, 19 nt, Homo sapiens
  misc_RNA (1)...(19): siRNA sense strand
cuaugaaugugaugagugu

SEQ ID NO: 859601 - RNA, 19 nt, Homo sapiens
  misc_RNA (1)...(19): siRNA sense strand
gaagcugggaaaccacaaa

SEQ ID NO: 859602 - RNA, 19 nt, Homo sapiens
  misc_RNA (1)...(19): siRNA sense strand
uaaaugacagacugaacaa

SEQ ID NO: 859603 - RNA, 19 nt, Homo sapiens
  misc_RNA (1)...(19): siRNA sense strand
gagauaaaugacagacuga

SEQ ID NO: 859604 - RNA, 19 nt, Homo sapiens
  misc_RNA (1)...(19): siRNA sense strand
ggacuucugauaauuaagg

SEQ ID NO: 859605 - RNA, 19 nt, Homo sapiens
  misc_RNA (1)...(19): siRNA sense strand
augaagaguuguuccagaa

SEQ ID NO: 859606 - RNA, 19 nt, Homo sapiens
  misc_RNA (1)...(19): siRNA sense strand
gcaggucccaggcaauuca

SEQ ID NO: 859607 - RNA, 19 nt, Homo sapiens
  misc_RNA (1)...(19): siRNA sense strand
gaguaaaacccuauaaaug

SEQ ID NO: 859608 - RNA, 19 nt, Homo sapiens
  misc_RNA (1)...(19): siRNA sense strand
agggaaagaagacgauaua

SEQ ID NO: 859609 - RNA, 19 nt, Homo sapiens
  misc_RNA (1)...(19): siRNA sense strand
uuaaggcagaggaccauua

SEQ ID NO: 859610 - RNA, 19 nt, Homo sapiens
  misc_RNA (1)...(19): siRNA sense strand
caacagagggaaagaagac

SEQ ID NO: 859611 - RNA, 19 nt, Homo sapiens
  misc_RNA (1)...(19): siRNA sense strand
gggacauacucauggacaa

SEQ ID NO: 859612 - RNA, 19 nt, Homo sapiens
  misc_RNA (1)...(19): siRNA sense strand
gggaaagaagacgauauaa

SEQ ID NO: 859613 - RNA, 19 nt, Homo sapiens
  misc_RNA (1)...(19): siRNA sense strand
gacagacugaacaaagaua

SEQ ID NO: 859614 - RNA, 19 nt, Homo sapiens
  misc_RNA (1)...(19): siRNA sense strand
cccaggcaauucagaaaga

SEQ ID NO: 859615 - RNA, 19 nt, Homo sapiens
  misc_RNA (1)...(19): siRNA sense strand
ggaguaaaacccuauaaau

SEQ ID NO: 859616 - RNA, 19 nt, Homo sapiens
  misc_RNA (1)...(19): siRNA sense strand
aaacacaggagaacucaca

SEQ ID NO: 859617 - RNA, 19 nt, Homo sapiens
  misc_RNA (1)...(19): siRNA sense strand
uagcucagaccuuaguaaa

SEQ ID NO: 859618 - RNA, 19 nt, Homo sapiens
  misc_RNA (1)...(19): siRNA sense strand
cagaaugccacaccaagga

SEQ ID NO: 859619 - RNA, 19 nt, Homo sapiens
  misc_RNA (1)...(19): siRNA sense strand
gcaacagagggaaagaaga

SEQ ID NO: 859620 - RNA, 19 nt, Homo sapiens
  misc_RNA (1)...(19): siRNA sense strand
ggaauuccuuggggagaua

SEQ ID NO: 859621 - RNA, 19 nt, Homo sapiens
  misc_RNA (1)...(19): siRNA sense strand
gacgggacauacucaugga

SEQ ID NO: 859622 - RNA, 19 nt, Homo sapiens
  misc_RNA (1)...(19): siRNA sense strand
ccgcaaauaaacucuacua

SEQ ID NO: 859623 - RNA, 19 nt, Homo sapiens
  misc_RNA (1)...(19): siRNA sense strand
ccgaguaaguucagcucuu

SEQ ID NO: 859624 - RNA, 19 nt, Homo sapiens
  misc_RNA (1)...(19): siRNA sense strand
gagaauccacacaggugaa

SEQ ID NO: 859625 - RNA, 19 nt, Homo sapiens
  misc_RNA (1)...(19): siRNA sense strand
gcugggaaaccacaaagga

SEQ ID NO: 859626 - RNA, 19 nt, Homo sapiens
  misc_RNA (1)...(19): siRNA sense strand
ugacgguacuggaggaucu

SEQ ID NO: 859627 - RNA, 19 nt, Homo sapiens
  misc_RNA (1)...(19): siRNA sense strand
caucucauuggacaucaua

SEQ ID NO: 859628 - RNA, 19 nt, Homo sapiens
  misc_RNA (1)...(19): siRNA sense strand
gaauggcaacagagggaaa

SEQ ID NO: 859629 - RNA, 19 nt, Homo sapiens
  misc_RNA (1)...(19): siRNA sense strand
ucacaggagggaacucuau

SEQ ID NO: 859630 - RNA, 19 nt, Homo sapiens
  misc_RNA (1)...(19): siRNA sense strand
gcccaaagacaaggaauuc

SEQ ID NO: 859631 - RNA, 19 nt, Homo sapiens
  misc_RNA (1)...(19): siRNA sense strand
ccugagcauucuuccuaaa

SEQ ID NO: 859632 - RNA, 19 nt, Homo sapiens
  misc_RNA (1)...(19): siRNA sense strand
aaagaauucauaccgcaaa

SEQ ID NO: 859633 - RNA, 19 nt, Homo sapiens
  misc_RNA (1)...(19): siRNA sense strand
gaagcucugcuaucaggau

SEQ ID NO: 859634 - RNA, 19 nt, Homo sapiens
  misc_RNA (1)...(19): siRNA sense strand
gggagagaagcccuauaaa

SEQ ID NO: 859635 - RNA, 19 nt, Homo sapiens
  misc_RNA (1)...(19): siRNA sense strand
gagggaacucuauagacaa

SEQ ID NO: 859636 - RNA, 19 nt, Homo sapiens
  misc_RNA (1)...(19): siRNA sense strand
ccuaaguccaaagauauua

SEQ ID NO: 859637 - RNA, 19 nt, Homo sapiens
  misc_RNA (1)...(19): siRNA sense strand
gggaaaccacaaaggaaug

SEQ ID NO: 859638 - RNA, 19 nt, Homo sapiens
  misc_RNA (1)...(19): siRNA sense strand
cacaaaggaauggugauaa

SEQ ID NO: 859639 - RNA, 19 nt, Homo sapiens
  misc_RNA (1)...(19): siRNA sense strand
ccaaggagcagauuuuaga

SEQ ID NO: 859640 - RNA, 19 nt, Homo sapiens
  misc_RNA (1)...(19): siRNA sense strand
gagggaaagaagacgauau

SEQ ID NO: 859641 - RNA, 19 nt, Homo sapiens
  misc_RNA (1)...(19): siRNA sense strand
gaagcccuauaaaugugau

SEQ ID NO: 859642 - RNA, 19 nt, Homo sapiens
  misc_RNA (1)...(19): siRNA sense strand
ggaacucuauagacaacac

SEQ ID NO: 859643 - RNA, 19 nt, Homo sapiens
  misc_RNA (1)...(19): siRNA sense strand
ggagcaggaagcugggaaa

SEQ ID NO: 859644 - RNA, 19 nt, Homo sapiens
  misc_RNA (1)...(19): siRNA sense strand
ggucuuauucagcaucaga

SEQ ID NO: 859645 - RNA, 19 nt, Homo sapiens
  misc_RNA (1)...(19): siRNA sense strand
guaaacacaggagaacuca

SEQ ID NO: 859646 - RNA, 19 nt, Homo sapiens
  misc_RNA (1)...(19): siRNA sense strand
cacaggagggaacucuaua

SEQ ID NO: 859647 - RNA, 19 nt, Homo sapiens
  misc_RNA (1)...(19): siRNA sense strand
augacagacugaacaaaga

SEQ ID NO: 859648 - RNA, 19 nt, Homo sapiens
  misc_RNA (1)...(19): siRNA sense strand
gauaaaacuaggacuaaga

SEQ ID NO: 859649 - RNA, 19 nt, Homo sapiens
  misc_RNA (1)...(19): siRNA sense strand
ggacauacucauggacaag

SEQ ID NO: 859650 - RNA, 19 nt, Homo sapiens
  misc_RNA (1)...(19): siRNA sense strand
caggagggaacucuauaga

SEQ ID NO: 859651 - RNA, 19 nt, Homo sapiens
  misc_RNA (1)...(19): siRNA sense strand
gagagagcuugaugaaccu

SEQ ID NO: 859652 - RNA, 19 nt, Homo sapiens
  misc_RNA (1)...(19): siRNA sense strand
gggcgcacaggucuuauuc

SEQ ID NO: 859653 - RNA, 19 nt, Homo sapiens
  misc_RNA (1)...(19): siRNA sense strand
gacgauauaaaugugauga

SEQ ID NO: 859654 - RNA, 19 nt, Homo sapiens
  misc_RNA (1)...(19): siRNA sense strand
gauaaaugacagacugaac

SEQ ID NO: 859655 - RNA, 19 nt, Homo sapiens
  misc_RNA (1)...(19): siRNA sense strand
ucagaaagacgggacauac

SEQ ID NO: 859656 - RNA, 19 nt, Homo sapiens
  misc_RNA (1)...(19): siRNA sense strand
ccuggaaccugaggaccaa

SEQ ID NO: 859657 - RNA, 19 nt, Homo sapiens
  misc_RNA (1)...(19): siRNA sense strand
aagaguuguuccagaagga

SEQ ID NO: 859658 - RNA, 19 nt, Homo sapiens
  misc_RNA (1)...(19): siRNA sense strand
cuaagaaugaagaguuguu

SEQ ID NO: 859659 - RNA, 19 nt, Homo sapiens
  misc_RNA (1)...(19): siRNA sense strand
ggaaaccacaaaggaaugg

SEQ ID NO: 859660 - RNA, 19 nt, Homo sapiens
  misc_RNA (1)...(19): siRNA sense strand
agaauucauaccgcaaaua

SEQ ID NO: 859661 - RNA, 19 nt, Homo sapiens
  misc_RNA (1)...(19): siRNA sense strand
caagaucuaugauguacaa

SEQ ID NO: 859662 - RNA, 19 nt, Homo sapiens
  misc_RNA (1)...(19): siRNA sense strand
gcaaacagauaaaguccau

SEQ ID NO: 859663 - RNA, 19 nt, Homo sapiens
  misc_RNA (1)...(19): siRNA sense strand
gaaaauggcaaacagauaa

SEQ ID NO: 859664 - RNA, 19 nt, Homo sapiens
  misc_RNA (1)...(19): siRNA sense strand
cagauaaaguccauagaug

SEQ ID NO: 859665 - RNA, 19 nt, Homo sapiens
  misc_RNA (1)...(19): siRNA sense strand
gaacucaugucgggaaagu

SEQ ID NO: 859666 - RNA, 19 nt, Homo sapiens
  misc_RNA (1)...(19): siRNA sense strand
gguauucucuucaaacaag

SEQ ID NO: 859667 - RNA, 19 nt, Homo sapiens
  misc_RNA (1)...(19): siRNA sense strand
ccaggaaauucacaucuau

SEQ ID NO: 859668 - RNA, 19 nt, Homo sapiens
  misc_RNA (1)...(19): siRNA sense strand
guucacaccuucuuugauc

SEQ ID NO: 859669 - RNA, 19 nt, Homo sapiens
  misc_RNA (1)...(19): siRNA sense strand
gagaugaccaggaaauuca

SEQ ID NO: 859670 - RNA, 19 nt, Homo sapiens
  misc_RNA (1)...(19): siRNA sense strand
guacgguauucucuucaaa

SEQ ID NO: 859671 - RNA, 19 nt, Homo sapiens
  misc_RNA (1)...(19): siRNA sense strand
gcugaacguugcauucugu

SEQ ID NO: 859672 - RNA, 19 nt, Homo sapiens
  misc_RNA (1)...(19): siRNA sense strand
ugaugacacucacuuuguu

SEQ ID NO: 859673 - RNA, 19 nt, Homo sapiens
  misc_RNA (1)...(19): siRNA sense strand
ccaguacgguauucucuuc

SEQ ID NO: 859674 - RNA, 19 nt, Homo sapiens
  misc_RNA (1)...(19): siRNA sense strand
gaucaggucuggggaguaa

SEQ ID NO: 859675 - RNA, 19 nt, Homo sapiens
  misc_RNA (1)...(19): siRNA sense strand
ggagaugaccaggaaauuc

SEQ ID NO: 859676 - RNA, 19 nt, Homo sapiens
  misc_RNA (1)...(19): siRNA sense strand
uguacaacaugccaauuug

SEQ ID NO: 859677 - RNA, 19 nt, Homo sapiens
  misc_RNA (1)...(19): siRNA sense strand
ggaguaaaauacaauggaa

SEQ ID NO: 859678 - RNA, 19 nt, Homo sapiens
  misc_RNA (1)...(19): siRNA sense strand
gauaaaguccauagaugca

SEQ ID NO: 859679 - RNA, 19 nt, Homo sapiens
  misc_RNA (1)...(19): siRNA sense strand
caauggaaaugguucaaaa

SEQ ID NO: 859680 - RNA, 19 nt, Homo sapiens
  misc_RNA (1)...(19): siRNA sense strand
gaugacacucacuuuguuu

SEQ ID NO: 859681 - RNA, 19 nt, Homo sapiens
  misc_RNA (1)...(19): siRNA sense strand
gaugccauuuggucaguug

SEQ ID NO: 859682 - RNA, 19 nt, Homo sapiens
  misc_RNA (1)...(19): siRNA sense strand
ggucacaggcucccuagau

SEQ ID NO: 859683 - RNA, 19 nt, Homo sapiens
  misc_RNA (1)...(19): siRNA sense strand
ggaaaauggcaaacagaua

SEQ ID NO: 859684 - RNA, 19 nt, Homo sapiens
  misc_RNA (1)...(19): siRNA sense strand
aaacagauaaaguccauag

SEQ ID NO: 859685 - RNA, 19 nt, Homo sapiens
  misc_RNA (1)...(19): siRNA sense strand
guggaugccuggacuuugg

SEQ ID NO: 859686 - RNA, 19 nt, Homo sapiens
  misc_RNA (1)...(19): siRNA sense strand
gucacaggcucccuagaug

SEQ ID NO: 859687 - RNA, 19 nt, Homo sapiens
  misc_RNA (1)...(19): siRNA sense strand
ggaaauucacaucuaugau

SEQ ID NO: 859688 - RNA, 19 nt, Homo sapiens
  misc_RNA (1)...(19): siRNA sense strand
ucacaggcucccuagauga

SEQ ID NO: 859689 - RNA, 19 nt, Homo sapiens
  misc_RNA (1)...(19): siRNA sense strand
accaggaaauucacaucua

SEQ ID NO: 859690 - RNA, 19 nt, Homo sapiens
  misc_RNA (1)...(19): siRNA sense strand
caagagcaagcccaugaug

SEQ ID NO: 859691 - RNA, 19 nt, Homo sapiens
  misc_RNA (1)...(19): siRNA sense strand
gagcaagcccaugaugaug

SEQ ID NO: 859692 - RNA, 19 nt, Homo sapiens
  misc_RNA (1)...(19): siRNA sense strand
ggacgaacaagaaggaaaa

SEQ ID NO: 859693 - RNA, 19 nt, Homo sapiens
  misc_RNA (1)...(19): siRNA sense strand
uguuggagaugaccaggaa

SEQ ID NO: 859694 - RNA, 19 nt, Homo sapiens
  misc_RNA (1)...(19): siRNA sense strand
ccuagccaguggagccaua

SEQ ID NO: 859695 - RNA, 19 nt, Homo sapiens
  misc_RNA (1)...(19): siRNA sense strand
acagauaaaguccauagau

SEQ ID NO: 859696 - RNA, 19 nt, Homo sapiens
  misc_RNA (1)...(19): siRNA sense strand
aacaagagcaagcccauga

SEQ ID NO: 859697 - RNA, 19 nt, Homo sapiens
  misc_RNA (1)...(19): siRNA sense strand
gaccaaccaguacgguauu

SEQ ID NO: 859698 - RNA, 19 nt, Homo sapiens
  misc_RNA (1)...(19): siRNA sense strand
gaggaaaauucauucuuag

SEQ ID NO: 859699 - RNA, 19 nt, Homo sapiens
  misc_RNA (1)...(19): siRNA sense strand
ugucacugcuucagaugau

SEQ ID NO: 859700 - RNA, 19 nt, Homo sapiens
  misc_RNA (1)...(19): siRNA sense strand
auauaguccugaugggaaa

SEQ ID NO: 859701 - RNA, 19 nt, Homo sapiens
  misc_RNA (1)...(19): siRNA sense strand
guaaaaguuugggauguug

SEQ ID NO: 859702 - RNA, 19 nt, Homo sapiens
  misc_RNA (1)...(19): siRNA sense strand
gaaggaaaacucugagaca

SEQ ID NO: 859703 - RNA, 19 nt, Homo sapiens
  misc_RNA (1)...(19): siRNA sense strand
aggaaauucacaucuauga

SEQ ID NO: 859704 - RNA, 19 nt, Homo sapiens
  misc_RNA (1)...(19): siRNA sense strand
gggacgaacaagaaggaaa

SEQ ID NO: 859705 - RNA, 19 nt, Homo sapiens
  misc_RNA (1)...(19): siRNA sense strand
gauguuggaacgaggacuu

SEQ ID NO: 859706 - RNA, 19 nt, Homo sapiens
  misc_RNA (1)...(19): siRNA sense strand
gaugcucauauucgucuuu

SEQ ID NO: 859707 - RNA, 19 nt, Homo sapiens
  misc_RNA (1)...(19): siRNA sense strand
agagcaagcccaugaugau

SEQ ID NO: 859708 - RNA, 19 nt, Homo sapiens
  misc_RNA (1)...(19): siRNA sense strand
acucaugucgggaaaguga

SEQ ID NO: 859709 - RNA, 19 nt, Homo sapiens
  misc_RNA (1)...(19): siRNA sense strand
ccaugaugaugccauuugg

SEQ ID NO: 859710 - RNA, 19 nt, Homo sapiens
  misc_RNA (1)...(19): siRNA sense strand
uggugaaggucuggaaaug

SEQ ID NO: 859711 - RNA, 19 nt, Homo sapiens
  misc_RNA (1)...(19): siRNA sense strand
gaacaagaaggaaaacucu

SEQ ID NO: 859712 - RNA, 19 nt, Homo sapiens
  misc_RNA (1)...(19): siRNA sense strand
gucgggaaagugaacauuu

SEQ ID NO: 859713 - RNA, 19 nt, Homo sapiens
  misc_RNA (1)...(19): siRNA sense strand
guugcauucuguccugaug

SEQ ID NO: 859714 - RNA, 19 nt, Homo sapiens
  misc_RNA (1)...(19): siRNA sense strand
gcuacaucaagaucuauga

SEQ ID NO: 859715 - RNA, 19 nt, Homo sapiens
  misc_RNA (1)...(19): siRNA sense strand
ugccuggacuuuggccuuu

SEQ ID NO: 859716 - RNA, 19 nt, Homo sapiens
  misc_RNA (1)...(19): siRNA sense strand
gaccaggaaauucacaucu

SEQ ID NO: 859717 - RNA, 19 nt, Homo sapiens
  misc_RNA (1)...(19): siRNA sense strand
aauugugucuguuggagau

SEQ ID NO: 859718 - RNA, 19 nt, Homo sapiens
  misc_RNA (1)...(19): siRNA sense strand
aagagcaagcccaugauga

SEQ ID NO: 859719 - RNA, 19 nt, Homo sapiens
  misc_RNA (1)...(19): siRNA sense strand
ucgggaaagugaacauuuu

SEQ ID NO: 859720 - RNA, 19 nt, Homo sapiens
  misc_RNA (1)...(19): siRNA sense strand
gucuggaaauggcgugaug

SEQ ID NO: 859721 - RNA, 19 nt, Homo sapiens
  misc_RNA (1)...(19): siRNA sense strand
ccugaugacacucacuuug

SEQ ID NO: 859722 - RNA, 19 nt, Homo sapiens
  misc_RNA (1)...(19): siRNA sense strand
ccuugucacugcuucagau

SEQ ID NO: 859723 - RNA, 19 nt, Homo sapiens
  misc_RNA (1)...(19): siRNA sense strand
acgguauucucuucaaaca

SEQ ID NO: 859724 - RNA, 19 nt, Homo sapiens
  misc_RNA (1)...(19): siRNA sense strand
cugcagggcuccauaauga

SEQ ID NO: 859725 - RNA, 19 nt, Homo sapiens
  misc_RNA (1)...(19): siRNA sense strand
gaaggacguuuguguugga

SEQ ID NO: 859726 - RNA, 19 nt, Homo sapiens
  misc_RNA (1)...(19): siRNA sense strand
gaagaaguacaacacauau

SEQ ID NO: 859727 - RNA, 19 nt, Homo sapiens
  misc_RNA (1)...(19): siRNA sense strand
ugaagaaguacaacacaua

SEQ ID NO: 859728 - RNA, 19 nt, Homo sapiens
  misc_RNA (1)...(19): siRNA sense strand
guacaacacauaugccuau

SEQ ID NO: 859729 - RNA, 19 nt, Homo sapiens
  misc_RNA (1)...(19): siRNA sense strand
caucaaauccugcagacaa

SEQ ID NO: 859730 - RNA, 19 nt, Homo sapiens
  misc_RNA (1)...(19): siRNA sense strand
gaccaucugugaguucuga

SEQ ID NO: 859731 - RNA, 19 nt, Homo sapiens
  misc_RNA (1)...(19): siRNA sense strand
gcauugcugucccaaggaa

SEQ ID NO: 859732 - RNA, 19 nt, Homo sapiens
  misc_RNA (1)...(19): siRNA sense strand
guggagauguacacagaug

SEQ ID NO: 859733 - RNA, 19 nt, Homo sapiens
  misc_RNA (1)...(19): siRNA sense strand
gaugggcaguggaaugaca

SEQ ID NO: 859734 - RNA, 19 nt, Homo sapiens
  misc_RNA (1)...(19): siRNA sense strand
gugaaggacguuuguguug

SEQ ID NO: 859735 - RNA, 19 nt, Homo sapiens
  misc_RNA (1)...(19): siRNA sense strand
gcuuccagcucaucuagau

SEQ ID NO: 859736 - RNA, 19 nt, Homo sapiens
  misc_RNA (1)...(19): siRNA sense strand
gugaagaaguacaacacau

SEQ ID NO: 859737 - RNA, 19 nt, Homo sapiens
  misc_RNA (1)...(19): siRNA sense strand
cgacugaccaucugugagu

SEQ ID NO: 859738 - RNA, 19 nt, Homo sapiens
  misc_RNA (1)...(19): siRNA sense strand
gccauguccuccuggaaau

SEQ ID NO: 859739 - RNA, 19 nt, Homo sapiens
  misc_RNA (1)...(19): siRNA sense strand
cagaugggcaguggaauga

SEQ ID NO: 859740 - RNA, 19 nt, Homo sapiens
  misc_RNA (1)...(19): siRNA sense strand
gcagggcuccauaaugaca

SEQ ID NO: 859741 - RNA, 19 nt, Homo sapiens
  misc_RNA (1)...(19): siRNA sense strand
cccaaggaauccagaggaa

SEQ ID NO: 859742 - RNA, 19 nt, Homo sapiens
  misc_RNA (1)...(19): siRNA sense strand
ccacgacuuuagacaucaa

SEQ ID NO: 859743 - RNA, 19 nt, Homo sapiens
  misc_RNA (1)...(19): siRNA sense strand
acacagaugggcaguggaa

SEQ ID NO: 859744 - RNA, 19 nt, Homo sapiens
  misc_RNA (1)...(19): siRNA sense strand
caaggaauccagaggaaaa

SEQ ID NO: 859745 - RNA, 19 nt, Homo sapiens
  misc_RNA (1)...(19): siRNA sense strand
gcgaagugaaggacguuug

SEQ ID NO: 859746 - RNA, 19 nt, Homo sapiens
  misc_RNA (1)...(19): siRNA sense strand
ugguaucccuggagagugu

SEQ ID NO: 859747 - RNA, 19 nt, Homo sapiens
  misc_RNA (1)...(19): siRNA sense strand
cgaagugaaggacguuugu

SEQ ID NO: 859748 - RNA, 19 nt, Homo sapiens
  misc_RNA (1)...(19): siRNA sense strand
agcaguguguggagaugua

SEQ ID NO: 859749 - RNA, 19 nt, Homo sapiens
  misc_RNA (1)...(19): siRNA sense strand
ccaaggaauccagaggaaa

SEQ ID NO: 859750 - RNA, 19 nt, Homo sapiens
  misc_RNA (1)...(19): siRNA sense strand
aagccacacuccacgacuu

SEQ ID NO: 859751 - RNA, 19 nt, Homo sapiens
  misc_RNA (1)...(19): siRNA sense strand
gaagugaaggacguuugug

SEQ ID NO: 859752 - RNA, 19 nt, Homo sapiens
  misc_RNA (1)...(19): siRNA sense strand
ggugcugugugcgaaguga

SEQ ID NO: 859753 - RNA, 19 nt, Homo sapiens
  misc_RNA (1)...(19): siRNA sense strand
uaaugacaguaggagagaa

SEQ ID NO: 859754 - RNA, 19 nt, Homo sapiens
  misc_RNA (1)...(19): siRNA sense strand
ugccuguacucccgacuga

SEQ ID NO: 859755 - RNA, 19 nt, Homo sapiens
  misc_RNA (1)...(19): siRNA sense strand
ggcaguggaaugacaggaa

SEQ ID NO: 859756 - RNA, 19 nt, Homo sapiens
  misc_RNA (1)...(19): siRNA sense strand
cgacuuuagacaucaaauc

SEQ ID NO: 859757 - RNA, 19 nt, Homo sapiens
  misc_RNA (1)...(19): siRNA sense strand
gagacuuccgcuacucaga

SEQ ID NO: 859758 - RNA, 19 nt, Homo sapiens
  misc_RNA (1)...(19): siRNA sense strand
agaaguacaacacauaugc

SEQ ID NO: 859759 - RNA, 19 nt, Homo sapiens
  misc_RNA (1)...(19): siRNA sense strand
cauguccuccuggaaauga

SEQ ID NO: 859760 - RNA, 19 nt, Homo sapiens
  misc_RNA (1)...(19): siRNA sense strand
acagaugggcaguggaaug

SEQ ID NO: 859761 - RNA, 19 nt, Homo sapiens
  misc_RNA (1)...(19): siRNA sense strand
ggaauccagaggaaaauga

SEQ ID NO: 859762 - RNA, 19 nt, Homo sapiens
  misc_RNA (1)...(19): siRNA sense strand
ggcaguccaucacuuuuga

SEQ ID NO: 859763 - RNA, 19 nt, Homo sapiens
  misc_RNA (1)...(19): siRNA sense strand
ccaaagacguguccgagua

SEQ ID NO: 859764 - RNA, 19 nt, Homo sapiens
  misc_RNA (1)...(19): siRNA sense strand
caccggagcuggagaacaa

SEQ ID NO: 859765 - RNA, 19 nt, Homo sapiens
  misc_RNA (1)...(19): siRNA sense strand
ggcaggcguucaagaauga

SEQ ID NO: 859766 - RNA, 19 nt, Homo sapiens
  misc_RNA (1)...(19): siRNA sense strand
gagaacaacaagaccauga

SEQ ID NO: 859767 - RNA, 19 nt, Homo sapiens
  misc_RNA (1)...(19): siRNA sense strand
ggcaagugguggcgaccua

SEQ ID NO: 859768 - RNA, 19 nt, Homo sapiens
  misc_RNA (1)...(19): siRNA sense strand
gguggcaggcguucaagaa

SEQ ID NO: 859769 - RNA, 19 nt, Homo sapiens
  misc_RNA (1)...(19): siRNA sense strand
gaacaacaagaccaugaac

SEQ ID NO: 859770 - RNA, 19 nt, Homo sapiens
  misc_RNA (1)...(19): siRNA sense strand
uggcaggcguucaagaaug

SEQ ID NO: 859771 - RNA, 19 nt, Homo sapiens
  misc_RNA (1)...(19): siRNA sense strand
agaaugaugccacggaaau

SEQ ID NO: 859772 - RNA, 19 nt, Homo sapiens
  misc_RNA (1)...(19): siRNA sense strand
gaaugaugccacggaaauc

SEQ ID NO: 859773 - RNA, 19 nt, Homo sapiens
  misc_RNA (1)...(19): siRNA sense strand
gagcuggagaacaacaaga

SEQ ID NO: 859774 - RNA, 19 nt, Homo sapiens
  misc_RNA (1)...(19): siRNA sense strand
caaagacguguccgaguac

SEQ ID NO: 859775 - RNA, 19 nt, Homo sapiens
  misc_RNA (1)...(19): siRNA sense strand
agaacaacaagaccaugaa

SEQ ID NO: 859776 - RNA, 19 nt, Homo sapiens
  misc_RNA (1)...(19): siRNA sense strand
gcagaaggguuuacugaua

SEQ ID NO: 859777 - RNA, 19 nt, Homo sapiens
  misc_RNA (1)...(19): siRNA sense strand
guaaaccucuuucuucauu

SEQ ID NO: 859778 - RNA, 19 nt, Homo sapiens
  misc_RNA (1)...(19): siRNA sense strand
agaaggaucucuauaguug

SEQ ID NO: 859779 - RNA, 19 nt, Homo sapiens
  misc_RNA (1)...(19): siRNA sense strand
ggauuuggcuuguauggau

SEQ ID NO: 859780 - RNA, 19 nt, Homo sapiens
  misc_RNA (1)...(19): siRNA sense strand
uaauggcacuucaauagaa

SEQ ID NO: 859781 - RNA, 19 nt, Homo sapiens
  misc_RNA (1)...(19): siRNA sense strand
agacaacaauuaccuguga

SEQ ID NO: 859782 - RNA, 19 nt, Homo sapiens
  misc_RNA (1)...(19): siRNA sense strand
gauacacucugugcaguuu

SEQ ID NO: 859783 - RNA, 19 nt, Homo sapiens
  misc_RNA (1)...(19): siRNA sense strand
cagaaggguuuacugauau

SEQ ID NO: 859784 - RNA, 19 nt, Homo sapiens
  misc_RNA (1)...(19): siRNA sense strand
ugaagaaaguagugcauga

SEQ ID NO: 859785 - RNA, 19 nt, Homo sapiens
  misc_RNA (1)...(19): siRNA sense strand
gcugagauuucuauauuca

SEQ ID NO: 859786 - RNA, 19 nt, Homo sapiens
  misc_RNA (1)...(19): siRNA sense strand
cgaccaagaugcugucuca

SEQ ID NO: 859787 - RNA, 19 nt, Homo sapiens
  misc_RNA (1)...(19): siRNA sense strand
cugcugagauuucuauauu

SEQ ID NO: 859788 - RNA, 19 nt, Homo sapiens
  misc_RNA (1)...(19): siRNA sense strand
guuaugaccacucuuuaua

SEQ ID NO: 859789 - RNA, 19 nt, Homo sapiens
  misc_RNA (1)...(19): siRNA sense strand
ucaaauugguccagaaaca

SEQ ID NO: 859790 - RNA, 19 nt, Homo sapiens
  misc_RNA (1)...(19): siRNA sense strand
ggacaaauuccagaaauca

SEQ ID NO: 859791 - RNA, 19 nt, Homo sapiens
  misc_RNA (1)...(19): siRNA sense strand
gaaaguagugcaugagaca

SEQ ID NO: 859792 - RNA, 19 nt, Homo sapiens
  misc_RNA (1)...(19): siRNA sense strand
cacaauggaugcaauaagu

SEQ ID NO: 859793 - RNA, 19 nt, Homo sapiens
  misc_RNA (1)...(19): siRNA sense strand
gagagagacacacucagua

SEQ ID NO: 859794 - RNA, 19 nt, Homo sapiens
  misc_RNA (1)...(19): siRNA sense strand
ugauauagauacacucugu

SEQ ID NO: 859795 - RNA, 19 nt, Homo sapiens
  misc_RNA (1)...(19): siRNA sense strand
gauaccggcuuuaguugug

SEQ ID NO: 859796 - RNA, 19 nt, Homo sapiens
  misc_RNA (1)...(19): siRNA sense strand
gggaaccucucuacaacug

SEQ ID NO: 859797 - RNA, 19 nt, Homo sapiens
  misc_RNA (1)...(19): siRNA sense strand
gugaauauacagaucauug

SEQ ID NO: 859798 - RNA, 19 nt, Homo sapiens
  misc_RNA (1)...(19): siRNA sense strand
uacucaggcucgauuauuu

SEQ ID NO: 859799 - RNA, 19 nt, Homo sapiens
  misc_RNA (1)...(19): siRNA sense strand
gagagacacacucaguauu

SEQ ID NO: 859800 - RNA, 19 nt, Homo sapiens
  misc_RNA (1)...(19): siRNA sense strand
gcgcuucgccuuccucuuc

SEQ ID NO: 859801 - RNA, 19 nt, Homo sapiens
  misc_RNA (1)...(19): siRNA sense strand
aauaauggcacuucaauag

SEQ ID NO: 859802 - RNA, 19 nt, Homo sapiens
  misc_RNA (1)...(19): siRNA sense strand
gcaauaauaauggcacuuc

SEQ ID NO: 859803 - RNA, 19 nt, Homo sapiens
  misc_RNA (1)...(19): siRNA sense strand
caauagauuccagcaagua

SEQ ID NO: 859804 - RNA, 19 nt, Homo sapiens
  misc_RNA (1)...(19): siRNA sense strand
uuaauccgguucccacuga

SEQ ID NO: 859805 - RNA, 19 nt, Homo sapiens
  misc_RNA (1)...(19): siRNA sense strand
ucaaggaacccauagagau

SEQ ID NO: 859806 - RNA, 19 nt, Homo sapiens
  misc_RNA (1)...(19): siRNA sense strand
gaauuucucaccaaacauc

SEQ ID NO: 859807 - RNA, 19 nt, Homo sapiens
  misc_RNA (1)...(19): siRNA sense strand
caauaauaauggcacuuca

SEQ ID NO: 859808 - RNA, 19 nt, Homo sapiens
  misc_RNA (1)...(19): siRNA sense strand
gcgggaaccucucuacaac

SEQ ID NO: 859809 - RNA, 19 nt, Homo sapiens
  misc_RNA (1)...(19): siRNA sense strand
aaacaguuaugaccacucu

SEQ ID NO: 859810 - RNA, 19 nt, Homo sapiens
  misc_RNA (1)...(19): siRNA sense strand
uagagauccugcccaaugu

SEQ ID NO: 859811 - RNA, 19 nt, Homo sapiens
  misc_RNA (1)...(19): siRNA sense strand
caaggaacccauagagauc

SEQ ID NO: 859812 - RNA, 19 nt, Homo sapiens
  misc_RNA (1)...(19): siRNA sense strand
ugggacagcuaacacauuc

SEQ ID NO: 859813 - RNA, 19 nt, Homo sapiens
  misc_RNA (1)...(19): siRNA sense strand
ucaagugaauauacagauc

SEQ ID NO: 859814 - RNA, 19 nt, Homo sapiens
  misc_RNA (1)...(19): siRNA sense strand
gugcagaaggguuuacuga

SEQ ID NO: 859815 - RNA, 19 nt, Homo sapiens
  misc_RNA (1)...(19): siRNA sense strand
caggcucgauuauuugaug

SEQ ID NO: 859816 - RNA, 19 nt, Homo sapiens
  misc_RNA (1)...(19): siRNA sense strand
gcugcaagcaagacuguuu

SEQ ID NO: 859817 - RNA, 19 nt, Homo sapiens
  misc_RNA (1)...(19): siRNA sense strand
acagaaugauaccggcuuu

SEQ ID NO: 859818 - RNA, 19 nt, Homo sapiens
  misc_RNA (1)...(19): siRNA sense strand
ugguaaaccucuuucuuca

SEQ ID NO: 859819 - RNA, 19 nt, Homo sapiens
  misc_RNA (1)...(19): siRNA sense strand
gcacaauggaugcaauaag

SEQ ID NO: 859820 - RNA, 19 nt, Homo sapiens
  misc_RNA (1)...(19): siRNA sense strand
gugguaaaccucuuucuuc

SEQ ID NO: 859821 - RNA, 19 nt, Homo sapiens
  misc_RNA (1)...(19): siRNA sense strand
aaugauaccggcuuuaguu

SEQ ID NO: 859822 - RNA, 19 nt, Homo sapiens
  misc_RNA (1)...(19): siRNA sense strand
ggaucucuauaguuggauu

SEQ ID NO: 859823 - RNA, 19 nt, Homo sapiens
  misc_RNA (1)...(19): siRNA sense strand
agaaggguuuacugauauu

SEQ ID NO: 859824 - RNA, 19 nt, Homo sapiens
  misc_RNA (1)...(19): siRNA sense strand
caaaaggauugaagaaagu

SEQ ID NO: 859825 - RNA, 19 nt, Homo sapiens
  misc_RNA (1)...(19): siRNA sense strand
cagauucacaguuaauaga

SEQ ID NO: 859826 - RNA, 19 nt, Homo sapiens
  misc_RNA (1)...(19): siRNA sense strand
gggcagaagcagaauguca

SEQ ID NO: 859827 - RNA, 19 nt, Homo sapiens
  misc_RNA (1)...(19): siRNA sense strand
guucaaauugguccagaaa

SEQ ID NO: 859828 - RNA, 19 nt, Homo sapiens
  misc_RNA (1)...(19): siRNA sense strand
caagugaauauacagauca

SEQ ID NO: 859829 - RNA, 19 nt, Homo sapiens
  misc_RNA (1)...(19): siRNA sense strand
ucauggcccuacagauuau

SEQ ID NO: 859830 - RNA, 19 nt, Homo sapiens
  misc_RNA (1)...(19): siRNA sense strand
acaguuaugaccacucuuu

SEQ ID NO: 859831 - RNA, 19 nt, Homo sapiens
  misc_RNA (1)...(19): siRNA sense strand
uggcuuguauggaucuauu

SEQ ID NO: 859832 - RNA, 19 nt, Homo sapiens
  misc_RNA (1)...(19): siRNA sense strand
ucaauagauuccagcaagu

SEQ ID NO: 859833 - RNA, 19 nt, Homo sapiens
  misc_RNA (1)...(19): siRNA sense strand
gcagaagcagaaugucaga

SEQ ID NO: 859834 - RNA, 19 nt, Homo sapiens
  misc_RNA (1)...(19): siRNA sense strand
gcacaaaaggauugaagaa

SEQ ID NO: 859835 - RNA, 19 nt, Homo sapiens
  misc_RNA (1)...(19): siRNA sense strand
acaauuaccugugacuuuu

SEQ ID NO: 859836 - RNA, 19 nt, Homo sapiens
  misc_RNA (1)...(19): siRNA sense strand
aauaagugcagaaggguuu

SEQ ID NO: 859837 - RNA, 19 nt, Homo sapiens
  misc_RNA (1)...(19): siRNA sense strand
auagagauccugcccaaug

SEQ ID NO: 859838 - RNA, 19 nt, Homo sapiens
  misc_RNA (1)...(19): siRNA sense strand
aaggaucucuauaguugga

SEQ ID NO: 859839 - RNA, 19 nt, Homo sapiens
  misc_RNA (1)...(19): siRNA sense strand
agagacacacucaguauuc

SEQ ID NO: 859840 - RNA, 19 nt, Homo sapiens
  misc_RNA (1)...(19): siRNA sense strand
gaagaaaguagugcaugag

SEQ ID NO: 859841 - RNA, 19 nt, Homo sapiens
  misc_RNA (1)...(19): siRNA sense strand
gaaugauaccggcuuuagu

SEQ ID NO: 859842 - RNA, 19 nt, Homo sapiens
  misc_RNA (1)...(19): siRNA sense strand
aacaauuaccugugacuuu

SEQ ID NO: 859843 - RNA, 19 nt, Homo sapiens
  misc_RNA (1)...(19): siRNA sense strand
gauucacaguuaauagaag

SEQ ID NO: 859844 - RNA, 19 nt, Homo sapiens
  misc_RNA (1)...(19): siRNA sense strand
auucauggcccuacagauu

SEQ ID NO: 859845 - RNA, 19 nt, Homo sapiens
  misc_RNA (1)...(19): siRNA sense strand
aaccucagcuugcuagucu

SEQ ID NO: 859846 - RNA, 19 nt, Homo sapiens
  misc_RNA (1)...(19): siRNA sense strand
gucagaucgugaaguggua

SEQ ID NO: 859847 - RNA, 19 nt, Homo sapiens
  misc_RNA (1)...(19): siRNA sense strand
agagagacacacucaguau

SEQ ID NO: 859848 - RNA, 19 nt, Homo sapiens
  misc_RNA (1)...(19): siRNA sense strand
ucagggucauguucaagga

SEQ ID NO: 859849 - RNA, 19 nt, Homo sapiens
  misc_RNA (1)...(19): siRNA sense strand
cccuacagauuaucaagug

SEQ ID NO: 859850 - RNA, 19 nt, Homo sapiens
  misc_RNA (1)...(19): siRNA sense strand
gaaagccgcugggguuaca

SEQ ID NO: 859851 - RNA, 19 nt, Homo sapiens
  misc_RNA (1)...(19): siRNA sense strand
ugaagugguaaaccucuuu

SEQ ID NO: 859852 - RNA, 19 nt, Homo sapiens
  misc_RNA (1)...(19): siRNA sense strand
aaagcacaauggaugcaau

SEQ ID NO: 859853 - RNA, 19 nt, Homo sapiens
  misc_RNA (1)...(19): siRNA sense strand
acaaaaggauugaagaaag

SEQ ID NO: 859854 - RNA, 19 nt, Homo sapiens
  misc_RNA (1)...(19): siRNA sense strand
ccaaggcgucgcugaagga

SEQ ID NO: 859855 - RNA, 19 nt, Homo sapiens
  misc_RNA (1)...(19): siRNA sense strand
caguuaugaccacucuuua

SEQ ID NO: 859856 - RNA, 19 nt, Homo sapiens
  misc_RNA (1)...(19): siRNA sense strand
cuacagauuaucaagugaa

SEQ ID NO: 859857 - RNA, 19 nt, Homo sapiens
  misc_RNA (1)...(19): siRNA sense strand
uucauggcccuacagauua

SEQ ID NO: 859858 - RNA, 19 nt, Homo sapiens
  misc_RNA (1)...(19): siRNA sense strand
uaugaccacucuuuauacu

SEQ ID NO: 859859 - RNA, 19 nt, Homo sapiens
  misc_RNA (1)...(19): siRNA sense strand
gaagugguaaaccucuuuc

SEQ ID NO: 859860 - RNA, 19 nt, Homo sapiens
  misc_RNA (1)...(19): siRNA sense strand
gagacacacucaguauucg

SEQ ID NO: 859861 - RNA, 19 nt, Homo sapiens
  misc_RNA (1)...(19): siRNA sense strand
ucagcuugcuagucuuugu

SEQ ID NO: 859862 - RNA, 19 nt, Homo sapiens
  misc_RNA (1)...(19): siRNA sense strand
gcgcugcugagauuucuau

SEQ ID NO: 859863 - RNA, 19 nt, Homo sapiens
  misc_RNA (1)...(19): siRNA sense strand
uuguauggaucuauucaug

SEQ ID NO: 859864 - RNA, 19 nt, Homo sapiens
  misc_RNA (1)...(19): siRNA sense strand
ccugcucaaucuggaauuu

SEQ ID NO: 859865 - RNA, 19 nt, Homo sapiens
  misc_RNA (1)...(19): siRNA sense strand
agaagcagaaugucagaga

SEQ ID NO: 859866 - RNA, 19 nt, Homo sapiens
  misc_RNA (1)...(19): siRNA sense strand
acacucaguauucgagaaa

SEQ ID NO: 859867 - RNA, 19 nt, Homo sapiens
  misc_RNA (1)...(19): siRNA sense strand
aagcacaauggaugcaaua

SEQ ID NO: 859868 - RNA, 19 nt, Homo sapiens
  misc_RNA (1)...(19): siRNA sense strand
gaugaaccucagcuugcua

SEQ ID NO: 859869 - RNA, 19 nt, Homo sapiens
  misc_RNA (1)...(19): siRNA sense strand
caauagaagauggacaaau

SEQ ID NO: 859870 - RNA, 19 nt, Homo sapiens
  misc_RNA (1)...(19): siRNA sense strand
ggacagcuaacacauucag

SEQ ID NO: 859871 - RNA, 19 nt, Homo sapiens
  misc_RNA (1)...(19): siRNA sense strand
aagcaaacccugggacaga

SEQ ID NO: 859872 - RNA, 19 nt, Homo sapiens
  misc_RNA (1)...(19): siRNA sense strand
gccuuuauguuacuuacuc

SEQ ID NO: 859873 - RNA, 19 nt, Homo sapiens
  misc_RNA (1)...(19): siRNA sense strand
gaaggguuuacugauauug

SEQ ID NO: 859874 - RNA, 19 nt, Homo sapiens
  misc_RNA (1)...(19): siRNA sense strand
gagauccugcccaaugugu

SEQ ID NO: 859875 - RNA, 19 nt, Homo sapiens
  misc_RNA (1)...(19): siRNA sense strand
acucaaagguccagauucc

SEQ ID NO: 859876 - RNA, 19 nt, Homo sapiens
  misc_RNA (1)...(19): siRNA sense strand
gagcagggcuuguuugaug

SEQ ID NO: 859877 - RNA, 19 nt, Homo sapiens
  misc_RNA (1)...(19): siRNA sense strand
gaaacacucugacagcaaa

SEQ ID NO: 859878 - RNA, 19 nt, Homo sapiens
  misc_RNA (1)...(19): siRNA sense strand
caaagaagaugauggacaa

SEQ ID NO: 859879 - RNA, 19 nt, Homo sapiens
  misc_RNA (1)...(19): siRNA sense strand
gaagaugauggacaagaaa

SEQ ID NO: 859880 - RNA, 19 nt, Homo sapiens
  misc_RNA (1)...(19): siRNA sense strand
agaagaugauggacaagaa

SEQ ID NO: 859881 - RNA, 19 nt, Homo sapiens
  misc_RNA (1)...(19): siRNA sense strand
caacgagcagggcuuguuu

SEQ ID NO: 859882 - RNA, 19 nt, Homo sapiens
  misc_RNA (1)...(19): siRNA sense strand
cagggcagccuaugacauu

SEQ ID NO: 859883 - RNA, 19 nt, Homo sapiens
  misc_RNA (1)...(19): siRNA sense strand
cagcaaagaagaugaugga

SEQ ID NO: 859884 - RNA, 19 nt, Homo sapiens
  misc_RNA (1)...(19): siRNA sense strand
gcacagcucaaccucaucu

SEQ ID NO: 859885 - RNA, 19 nt, Homo sapiens
  misc_RNA (1)...(19): siRNA sense strand
gcagcugacagauaccaaa

SEQ ID NO: 859886 - RNA, 19 nt, Homo sapiens
  misc_RNA (1)...(19): siRNA sense strand
gaugauggacaagaaauag

SEQ ID NO: 859887 - RNA, 19 nt, Homo sapiens
  misc_RNA (1)...(19): siRNA sense strand
gcugacagauaccaaacag

SEQ ID NO: 859888 - RNA, 19 nt, Homo sapiens
  misc_RNA (1)...(19): siRNA sense strand
cgucgcagauggccaacga

SEQ ID NO: 859889 - RNA, 19 nt, Homo sapiens
  misc_RNA (1)...(19): siRNA sense strand
uggcacagcucaaccucau

SEQ ID NO: 859890 - RNA, 19 nt, Homo sapiens
  misc_RNA (1)...(19): siRNA sense strand
ccaacgagcagggcuuguu

SEQ ID NO: 859891 - RNA, 19 nt, Homo sapiens
  misc_RNA (1)...(19): siRNA sense strand
ugaaacacucugacagcaa

SEQ ID NO: 859892 - RNA, 19 nt, Homo sapiens
  misc_RNA (1)...(19): siRNA sense strand
agaugauggacaagaaaua

SEQ ID NO: 859893 - RNA, 19 nt, Homo sapiens
  misc_RNA (1)...(19): siRNA sense strand
ugacagcaaagaagaugau

SEQ ID NO: 859894 - RNA, 19 nt, Homo sapiens
  misc_RNA (1)...(19): siRNA sense strand
gcuuucgugugcuggagaa

SEQ ID NO: 859895 - RNA, 19 nt, Homo sapiens
  misc_RNA (1)...(19): siRNA sense strand
uggagaaagaucaaacaga

SEQ ID NO: 859896 - RNA, 19 nt, Homo sapiens
  misc_RNA (1)...(19): siRNA sense strand
gcugugaggaggagaaugc

SEQ ID NO: 859897 - RNA, 19 nt, Homo sapiens
  misc_RNA (1)...(19): siRNA sense strand
ggaagggacccacgaguuu

SEQ ID NO: 859898 - RNA, 19 nt, Homo sapiens
  misc_RNA (1)...(19): siRNA sense strand
ccaaguaccuggacaacau

SEQ ID NO: 859899 - RNA, 19 nt, Homo sapiens
  misc_RNA (1)...(19): siRNA sense strand
gaaaccaggugagaaagga

SEQ ID NO: 859900 - RNA, 19 nt, Homo sapiens
  misc_RNA (1)...(19): siRNA sense strand
gaggagaaguaccggaaga

SEQ ID NO: 859901 - RNA, 19 nt, Homo sapiens
  misc_RNA (1)...(19): siRNA sense strand
gaucuacacguucaacaaa

SEQ ID NO: 859902 - RNA, 19 nt, Homo sapiens
  misc_RNA (1)...(19): siRNA sense strand
ucaugaagaucuacacguu

SEQ ID NO: 859903 - RNA, 19 nt, Homo sapiens
  misc_RNA (1)...(19): siRNA sense strand
gagaaguaccggaagauca

SEQ ID NO: 859904 - RNA, 19 nt, Homo sapiens
  misc_RNA (1)...(19): siRNA sense strand
agaucaagcugcagaacaa

SEQ ID NO: 859905 - RNA, 19 nt, Homo sapiens
  misc_RNA (1)...(19): siRNA sense strand
ggacaccauugccaaguac

SEQ ID NO: 859906 - RNA, 19 nt, Homo sapiens
  misc_RNA (1)...(19): siRNA sense strand
acgagaaccuggccuugaa

SEQ ID NO: 859907 - RNA, 19 nt, Homo sapiens
  misc_RNA (1)...(19): siRNA sense strand
ggucagaagcucaaagagu

SEQ ID NO: 859908 - RNA, 19 nt, Homo sapiens
  misc_RNA (1)...(19): siRNA sense strand
gccagggacccaccaauga

SEQ ID NO: 859909 - RNA, 19 nt, Homo sapiens
  misc_RNA (1)...(19): siRNA sense strand
uggacaccauugccaagua

SEQ ID NO: 859910 - RNA, 19 nt, Homo sapiens
  misc_RNA (1)...(19): siRNA sense strand
guucaaggccgacaucaag

SEQ ID NO: 859911 - RNA, 19 nt, Homo sapiens
  misc_RNA (1)...(19): siRNA sense strand
ucaaggaggccauucucuu

SEQ ID NO: 859912 - RNA, 19 nt, Homo sapiens
  misc_RNA (1)...(19): siRNA sense strand
gccauucucuugcacuucu

SEQ ID NO: 859913 - RNA, 19 nt, Homo sapiens
  misc_RNA (1)...(19): siRNA sense strand
ucuacacguucaacaaaga

SEQ ID NO: 859914 - RNA, 19 nt, Homo sapiens
  misc_RNA (1)...(19): siRNA sense strand
gaaacccgagcuccuguca

SEQ ID NO: 859915 - RNA, 19 nt, Homo sapiens
  misc_RNA (1)...(19): siRNA sense strand
gacgagaaccuggccuuga

SEQ ID NO: 859916 - RNA, 19 nt, Homo sapiens
  misc_RNA (1)...(19): siRNA sense strand
gcgacuggcugccuuuuga

SEQ ID NO: 859917 - RNA, 19 nt, Homo sapiens
  misc_RNA (1)...(19): siRNA sense strand
ccaaggccaugcgggagaa

SEQ ID NO: 859918 - RNA, 19 nt, Homo sapiens
  misc_RNA (1)...(19): siRNA sense strand
ccacaucgcaggacaccau

SEQ ID NO: 859919 - RNA, 19 nt, Homo sapiens
  misc_RNA (1)...(19): siRNA sense strand
ccucugcccuccugaccuu

SEQ ID NO: 859920 - RNA, 19 nt, Homo sapiens
  misc_RNA (1)...(19): siRNA sense strand
agaaguaccggaagaucaa

SEQ ID NO: 859921 - RNA, 19 nt, Homo sapiens
  misc_RNA (1)...(19): siRNA sense strand
ggugagaaaggaacuucaa

SEQ ID NO: 859922 - RNA, 19 nt, Homo sapiens
  misc_RNA (1)...(19): siRNA sense strand
ggaagaucaagcugcagaa

SEQ ID NO: 859923 - RNA, 19 nt, Homo sapiens
  misc_RNA (1)...(19): siRNA sense strand
ggagaaguaccggaagauc

SEQ ID NO: 859924 - RNA, 19 nt, Homo sapiens
  misc_RNA (1)...(19): siRNA sense strand
gcgcauuaacugccuggaa

SEQ ID NO: 859925 - RNA, 19 nt, Homo sapiens
  misc_RNA (1)...(19): siRNA sense strand
acaaagagaagcccaacca

SEQ ID NO: 859926 - RNA, 19 nt, Homo sapiens
  misc_RNA (1)...(19): siRNA sense strand
caucgagaagcucuuguga

SEQ ID NO: 859927 - RNA, 19 nt, Homo sapiens
  misc_RNA (1)...(19): siRNA sense strand
ucaaggccgacaucaaguu

SEQ ID NO: 859928 - RNA, 19 nt, Homo sapiens
  misc_RNA (1)...(19): siRNA sense strand
ccauuggguuccagaaggu

SEQ ID NO: 859929 - RNA, 19 nt, Homo sapiens
  misc_RNA (1)...(19): siRNA sense strand
ggacuucuucaaccucaca

SEQ ID NO: 859930 - RNA, 19 nt, Homo sapiens
  misc_RNA (1)...(19): siRNA sense strand
ggaguucaaggccgacauc

SEQ ID NO: 859931 - RNA, 19 nt, Homo sapiens
  misc_RNA (1)...(19): siRNA sense strand
caaggccgacaucaaguuc

SEQ ID NO: 859932 - RNA, 19 nt, Homo sapiens
  misc_RNA (1)...(19): siRNA sense strand
uggaagggacccacgaguu

SEQ ID NO: 859933 - RNA, 19 nt, Homo sapiens
  misc_RNA (1)...(19): siRNA sense strand
ccuccaucaugaagaucua

SEQ ID NO: 859934 - RNA, 19 nt, Homo sapiens
  misc_RNA (1)...(19): siRNA sense strand
ucacagcagaggagaucaa

SEQ ID NO: 859935 - RNA, 19 nt, Homo sapiens
  misc_RNA (1)...(19): siRNA sense strand
gaagggacccacgaguuuu

SEQ ID NO: 859936 - RNA, 19 nt, Homo sapiens
  misc_RNA (1)...(19): siRNA sense strand
gcaggacaccauccgaaac

SEQ ID NO: 859937 - RNA, 19 nt, Homo sapiens
  misc_RNA (1)...(19): siRNA sense strand
gaagaucuacacguucaac

SEQ ID NO: 859938 - RNA, 19 nt, Homo sapiens
  misc_RNA (1)...(19): siRNA sense strand
ccgccuccaucaugaagau

SEQ ID NO: 859939 - RNA, 19 nt, Homo sapiens
  misc_RNA (1)...(19): siRNA sense strand
uccgaaaccaggugagaaa

SEQ ID NO: 859940 - RNA, 19 nt, Homo sapiens
  misc_RNA (1)...(19): siRNA sense strand
gaagaucaagcugcagaac

SEQ ID NO: 859941 - RNA, 19 nt, Homo sapiens
  misc_RNA (1)...(19): siRNA sense strand
gagcaaaugucaaauauga

SEQ ID NO: 859942 - RNA, 19 nt, Homo sapiens
  misc_RNA (1)...(19): siRNA sense strand
gaaaugaaaucacuagcaa

SEQ ID NO: 859943 - RNA, 19 nt, Homo sapiens
  misc_RNA (1)...(19): siRNA sense strand
ggagucagauggcaaauga

SEQ ID NO: 859944 - RNA, 19 nt, Homo sapiens
  misc_RNA (1)...(19): siRNA sense strand
ucaaugaucuggcuaaaga

SEQ ID NO: 859945 - RNA, 19 nt, Homo sapiens
  misc_RNA (1)...(19): siRNA sense strand
gcagaaaggucuuacaagu

SEQ ID NO: 859946 - RNA, 19 nt, Homo sapiens
  misc_RNA (1)...(19): siRNA sense strand
ggagagaguuuggcaauga

SEQ ID NO: 859947 - RNA, 19 nt, Homo sapiens
  misc_RNA (1)...(19): siRNA sense strand
cauaugaguucuacaauga

SEQ ID NO: 859948 - RNA, 19 nt, Homo sapiens
  misc_RNA (1)...(19): siRNA sense strand
gaacaggcaucaagacagu

SEQ ID NO: 859949 - RNA, 19 nt, Homo sapiens
  misc_RNA (1)...(19): siRNA sense strand
gauguagccuuuacugauu

SEQ ID NO: 859950 - RNA, 19 nt, Homo sapiens
  misc_RNA (1)...(19): siRNA sense strand
gaacaagacguuuccagaa

SEQ ID NO: 859951 - RNA, 19 nt, Homo sapiens
  misc_RNA (1)...(19): siRNA sense strand
gcagauuugucuucuacua

SEQ ID NO: 859952 - RNA, 19 nt, Homo sapiens
  misc_RNA (1)...(19): siRNA sense strand
ugaaaucacuagcaagaaa

SEQ ID NO: 859953 - RNA, 19 nt, Homo sapiens
  misc_RNA (1)...(19): siRNA sense strand
ggagagggccguacaagaa

SEQ ID NO: 859954 - RNA, 19 nt, Homo sapiens
  misc_RNA (1)...(19): siRNA sense strand
gaagcugauuuagacauua

SEQ ID NO: 859955 - RNA, 19 nt, Homo sapiens
  misc_RNA (1)...(19): siRNA sense strand
ggaagcugauuuagacauu

SEQ ID NO: 859956 - RNA, 19 nt, Homo sapiens
  misc_RNA (1)...(19): siRNA sense strand
gcaagcauguuuggauaaa

SEQ ID NO: 859957 - RNA, 19 nt, Homo sapiens
  misc_RNA (1)...(19): siRNA sense strand
gcaagaaaggcaauggaua

SEQ ID NO: 859958 - RNA, 19 nt, Homo sapiens
  misc_RNA (1)...(19): siRNA sense strand
aaacagaagguucaagaua

SEQ ID NO: 859959 - RNA, 19 nt, Homo sapiens
  misc_RNA (1)...(19): siRNA sense strand
gcaauuggaugagacaaau

SEQ ID NO: 859960 - RNA, 19 nt, Homo sapiens
  misc_RNA (1)...(19): siRNA sense strand
guagagauguggcccaguu

SEQ ID NO: 859961 - RNA, 19 nt, Homo sapiens
  misc_RNA (1)...(19): siRNA sense strand
gaauaucauugcugagaug

SEQ ID NO: 859962 - RNA, 19 nt, Homo sapiens
  misc_RNA (1)...(19): siRNA sense strand
ggcagaggguaacagauua

SEQ ID NO: 859963 - RNA, 19 nt, Homo sapiens
  misc_RNA (1)...(19): siRNA sense strand
ucaagguucuuaaaucuga

SEQ ID NO: 859964 - RNA, 19 nt, Homo sapiens
  misc_RNA (1)...(19): siRNA sense strand
gaaauucagcuucuuaaag

SEQ ID NO: 859965 - RNA, 19 nt, Homo sapiens
  misc_RNA (1)...(19): siRNA sense strand
gauacuaauuuggagguua

SEQ ID NO: 859966 - RNA, 19 nt, Homo sapiens
  misc_RNA (1)...(19): siRNA sense strand
ucagauagcacuucaagaa

SEQ ID NO: 859967 - RNA, 19 nt, Homo sapiens
  misc_RNA (1)...(19): siRNA sense strand
aacaagagaucgugaagaa

SEQ ID NO: 859968 - RNA, 19 nt, Homo sapiens
  misc_RNA (1)...(19): siRNA sense strand
caaugaagccaaauacaaa

SEQ ID NO: 859969 - RNA, 19 nt, Homo sapiens
  misc_RNA (1)...(19): siRNA sense strand
cuagggaacucuguauuaa

SEQ ID NO: 859970 - RNA, 19 nt, Homo sapiens
  misc_RNA (1)...(19): siRNA sense strand
aaauaaagcccgucaauca

SEQ ID NO: 859971 - RNA, 19 nt, Homo sapiens
  misc_RNA (1)...(19): siRNA sense strand
gugaagaacuuaaaugcau

SEQ ID NO: 859972 - RNA, 19 nt, Homo sapiens
  misc_RNA (1)...(19): siRNA sense strand
gaucuuccuucuuuaugaa

SEQ ID NO: 859973 - RNA, 19 nt, Homo sapiens
  misc_RNA (1)...(19): siRNA sense strand
aggccuagaucgaucauua

SEQ ID NO: 859974 - RNA, 19 nt, Homo sapiens
  misc_RNA (1)...(19): siRNA sense strand
uaucuuggcucaugacaau

SEQ ID NO: 859975 - RNA, 19 nt, Homo sapiens
  misc_RNA (1)...(19): siRNA sense strand
uggcagaaauucaggguaa

SEQ ID NO: 859976 - RNA, 19 nt, Homo sapiens
  misc_RNA (1)...(19): siRNA sense strand
gcugaaaacugggaaaaua

SEQ ID NO: 859977 - RNA, 19 nt, Homo sapiens
  misc_RNA (1)...(19): siRNA sense strand
ggaacucuguauuaaacuu

SEQ ID NO: 859978 - RNA, 19 nt, Homo sapiens
  misc_RNA (1)...(19): siRNA sense strand
ggaagaaauuacccgacuu

SEQ ID NO: 859979 - RNA, 19 nt, Homo sapiens
  misc_RNA (1)...(19): siRNA sense strand
guucagaaauguugucaca

SEQ ID NO: 859980 - RNA, 19 nt, Homo sapiens
  misc_RNA (1)...(19): siRNA sense strand
gaacguauggagcaaaugu

SEQ ID NO: 859981 - RNA, 19 nt, Homo sapiens
  misc_RNA (1)...(19): siRNA sense strand
gagcuggaguguacaguuc

SEQ ID NO: 859982 - RNA, 19 nt, Homo sapiens
  misc_RNA (1)...(19): siRNA sense strand
gaaauucaggguaauguca

SEQ ID NO: 859983 - RNA, 19 nt, Homo sapiens
  misc_RNA (1)...(19): siRNA sense strand
ucagaaauguugucacaca

SEQ ID NO: 859984 - RNA, 19 nt, Homo sapiens
  misc_RNA (1)...(19): siRNA sense strand
guuaacaagcugaagaaua

SEQ ID NO: 859985 - RNA, 19 nt, Homo sapiens
  misc_RNA (1)...(19): siRNA sense strand
aaagauugcucaagagaca

SEQ ID NO: 859986 - RNA, 19 nt, Homo sapiens
  misc_RNA (1)...(19): siRNA sense strand
ggcuaaagauugcucaaga

SEQ ID NO: 859987 - RNA, 19 nt, Homo sapiens
  misc_RNA (1)...(19): siRNA sense strand
acaauuggaagcugauuua

SEQ ID NO: 859988 - RNA, 19 nt, Homo sapiens
  misc_RNA (1)...(19): siRNA sense strand
guacugaggcccuaauugu

SEQ ID NO: 859989 - RNA, 19 nt, Homo sapiens
  misc_RNA (1)...(19): siRNA sense strand
aaacugugauguagaacuu

SEQ ID NO: 859990 - RNA, 19 nt, Homo sapiens
  misc_RNA (1)...(19): siRNA sense strand
uagaggagcuggaguguac

SEQ ID NO: 859991 - RNA, 19 nt, Homo sapiens
  misc_RNA (1)...(19): siRNA sense strand
gagagaguuuggcaaugaa

SEQ ID NO: 859992 - RNA, 19 nt, Homo sapiens
  misc_RNA (1)...(19): siRNA sense strand
gagacaagaucuuccuucu

SEQ ID NO: 859993 - RNA, 19 nt, Homo sapiens
  misc_RNA (1)...(19): siRNA sense strand
gaaaugagggagaaugagu

SEQ ID NO: 859994 - RNA, 19 nt, Homo sapiens
  misc_RNA (1)...(19): siRNA sense strand
uagauucccucaacagaga

SEQ ID NO: 859995 - RNA, 19 nt, Homo sapiens
  misc_RNA (1)...(19): siRNA sense strand
agagauaucuuggcucaug

SEQ ID NO: 859996 - RNA, 19 nt, Homo sapiens
  misc_RNA (1)...(19): siRNA sense strand
gaacaggcacaggaagaaa

SEQ ID NO: 859997 - RNA, 19 nt, Homo sapiens
  misc_RNA (1)...(19): siRNA sense strand
gagauaucuuggcucauga

SEQ ID NO: 859998 - RNA, 19 nt, Homo sapiens
  misc_RNA (1)...(19): siRNA sense strand
gguaaugucaagguucuua

SEQ ID NO: 859999 - RNA, 19 nt, Homo sapiens
  misc_RNA (1)...(19): siRNA sense strand
cuagaucgaucauuagaag

SEQ ID NO: 860000 - RNA, 19 nt, Homo sapiens
  misc_RNA (1)...(19): siRNA sense strand
caaugacaaucuccaggaa

SEQ ID NO: 860001 - RNA, 19 nt, Homo sapiens
  misc_RNA (1)...(19): siRNA sense strand
cagaaugcgucggcaauug

SEQ ID NO: 860002 - RNA, 19 nt, Homo sapiens
  misc_RNA (1)...(19): siRNA sense strand
caacaacggcacaugcuau

SEQ ID NO: 860003 - RNA, 19 nt, Homo sapiens
  misc_RNA (1)...(19): siRNA sense strand
guucuacaaugaagccaaa

SEQ ID NO: 860004 - RNA, 19 nt, Homo sapiens
  misc_RNA (1)...(19): siRNA sense strand
ggaacagagcgcuuugaaa

SEQ ID NO: 860005 - RNA, 19 nt, Homo sapiens
  misc_RNA (1)...(19): siRNA sense strand
acacuuaaaugcagaaagg

SEQ ID NO: 860006 - RNA, 19 nt, Homo sapiens
  misc_RNA (1)...(19): siRNA sense strand
gcagaggguaacagauuaa

SEQ ID NO: 860007 - RNA, 19 nt, Homo sapiens
  misc_RNA (1)...(19): siRNA sense strand
gguucaagauacuaauuug

SEQ ID NO: 860008 - RNA, 19 nt, Homo sapiens
  misc_RNA (1)...(19): siRNA sense strand
gaacaguuugcuaaagcua

SEQ ID NO: 860009 - RNA, 19 nt, Homo sapiens
  misc_RNA (1)...(19): siRNA sense strand
cugcaagcauguuuggaua

SEQ ID NO: 860010 - RNA, 19 nt, Homo sapiens
  misc_RNA (1)...(19): siRNA sense strand
uggagcaaaugucaaauau

SEQ ID NO: 860011 - RNA, 19 nt, Homo sapiens
  misc_RNA (1)...(19): siRNA sense strand
guacaguucauaaucuuga

SEQ ID NO: 860012 - RNA, 19 nt, Homo sapiens
  misc_RNA (1)...(19): siRNA sense strand
caauggauaccgaaaguga

SEQ ID NO: 860013 - RNA, 19 nt, Homo sapiens
  misc_RNA (1)...(19): siRNA sense strand
ucauaugaguucuacaaug

SEQ ID NO: 860014 - RNA, 19 nt, Homo sapiens
  misc_RNA (1)...(19): siRNA sense strand
gaaucuccaugcagaaucu

SEQ ID NO: 860015 - RNA, 19 nt, Homo sapiens
  misc_RNA (1)...(19): siRNA sense strand
gcaaaugauggaacaacuu

SEQ ID NO: 860016 - RNA, 19 nt, Homo sapiens
  misc_RNA (1)...(19): siRNA sense strand
gaagacaacaacaagagau

SEQ ID NO: 860017 - RNA, 19 nt, Homo sapiens
  misc_RNA (1)...(19): siRNA sense strand
uaucauugcugagauggaa

SEQ ID NO: 860018 - RNA, 19 nt, Homo sapiens
  misc_RNA (1)...(19): siRNA sense strand
uaagaguccuaaaucaaca

SEQ ID NO: 860019 - RNA, 19 nt, Homo sapiens
  misc_RNA (1)...(19): siRNA sense strand
aaauagaaaugagggagaa

SEQ ID NO: 860020 - RNA, 19 nt, Homo sapiens
  misc_RNA (1)...(19): siRNA sense strand
ucugagaaccggcaaauga

SEQ ID NO: 860021 - RNA, 19 nt, Homo sapiens
  misc_RNA (1)...(19): siRNA sense strand
ugcuaaagcuaaacaagaa

SEQ ID NO: 860022 - RNA, 19 nt, Homo sapiens
  misc_RNA (1)...(19): siRNA sense strand
caagaaaggcaauggauac

SEQ ID NO: 860023 - RNA, 19 nt, Homo sapiens
  misc_RNA (1)...(19): siRNA sense strand
guauggagcaaaugucaaa

SEQ ID NO: 860024 - RNA, 19 nt, Homo sapiens
  misc_RNA (1)...(19): siRNA sense strand
cgacuucgacgagaaauga

SEQ ID NO: 860025 - RNA, 19 nt, Homo sapiens
  misc_RNA (1)...(19): siRNA sense strand
acaagacguuuccagaaug

SEQ ID NO: 860026 - RNA, 19 nt, Homo sapiens
  misc_RNA (1)...(19): siRNA sense strand
gaauauugcaucccuugga

SEQ ID NO: 860027 - RNA, 19 nt, Homo sapiens
  misc_RNA (1)...(19): siRNA sense strand
ggcaauggauaccgaaagu

SEQ ID NO: 860028 - RNA, 19 nt, Homo sapiens
  misc_RNA (1)...(19): siRNA sense strand
gcuaaagauugcucaagag

SEQ ID NO: 860029 - RNA, 19 nt, Homo sapiens
  misc_RNA (1)...(19): siRNA sense strand
aaagacaacuaggaacaga

SEQ ID NO: 860030 - RNA, 19 nt, Homo sapiens
  misc_RNA (1)...(19): siRNA sense strand
ugcagaaucuagaagcuuu

SEQ ID NO: 860031 - RNA, 19 nt, Homo sapiens
  misc_RNA (1)...(19): siRNA sense strand
gacagcugguugcuaaaga

SEQ ID NO: 860032 - RNA, 19 nt, Homo sapiens
  misc_RNA (1)...(19): siRNA sense strand
gaacucuguauuaaacuug

SEQ ID NO: 860033 - RNA, 19 nt, Homo sapiens
  misc_RNA (1)...(19): siRNA sense strand
ccaagacgcccaucaccaa

SEQ ID NO: 860034 - RNA, 19 nt, Homo sapiens
  misc_RNA (1)...(19): siRNA sense strand
uguccgcucuugcagauuu

SEQ ID NO: 860035 - RNA, 19 nt, Homo sapiens
  misc_RNA (1)...(19): siRNA sense strand
gcucaagagacagcauuua

SEQ ID NO: 860036 - RNA, 19 nt, Homo sapiens
  misc_RNA (1)...(19): siRNA sense strand
gaguggagacugaaagaga

SEQ ID NO: 860037 - RNA, 19 nt, Homo sapiens
  misc_RNA (1)...(19): siRNA sense strand
caaucgagacaaagaauau

SEQ ID NO: 860038 - RNA, 19 nt, Homo sapiens
  misc_RNA (1)...(19): siRNA sense strand
uaacaauacccucaaacug

SEQ ID NO: 860039 - RNA, 19 nt, Homo sapiens
  misc_RNA (1)...(19): siRNA sense strand
caaaugauggaacaacuuc

SEQ ID NO: 860040 - RNA, 19 nt, Homo sapiens
  misc_RNA (1)...(19): siRNA sense strand
acaaugaagccaaauacaa

SEQ ID NO: 860041 - RNA, 19 nt, Homo sapiens
  misc_RNA (1)...(19): siRNA sense strand
ggacugcgcuguuuacuuu

SEQ ID NO: 860042 - RNA, 19 nt, Homo sapiens
  misc_RNA (1)...(19): siRNA sense strand
gggaauaucuacuauguuu

SEQ ID NO: 860043 - RNA, 19 nt, Homo sapiens
  misc_RNA (1)...(19): siRNA sense strand
ggaguuaucucauugcuau

SEQ ID NO: 860044 - RNA, 19 nt, Homo sapiens
  misc_RNA (1)...(19): siRNA sense strand
ggagaaaccuggaguuauc

SEQ ID NO: 860045 - RNA, 19 nt, Homo sapiens
  misc_RNA (1)...(19): siRNA sense strand
ucacuaggcuuguuucuga

SEQ ID NO: 860046 - RNA, 19 nt, Homo sapiens
  misc_RNA (1)...(19): siRNA sense strand
acacagugauggugaaaua

SEQ ID NO: 860047 - RNA, 19 nt, Homo sapiens
  misc_RNA (1)...(19): siRNA sense strand
ggucuuaucuguguuaguu

SEQ ID NO: 860048 - RNA, 19 nt, Homo sapiens
  misc_RNA (1)...(19): siRNA sense strand
agaaaggucugcugaguga

SEQ ID NO: 860049 - RNA, 19 nt, Homo sapiens
  misc_RNA (1)...(19): siRNA sense strand
ugacauggcuacaguuguu

SEQ ID NO: 860050 - RNA, 19 nt, Homo sapiens
  misc_RNA (1)...(19): siRNA sense strand
gaaaauacaucccaacaca

SEQ ID NO: 860051 - RNA, 19 nt, Homo sapiens
  misc_RNA (1)...(19): siRNA sense strand
aaacuuuacuggaggaauu

SEQ ID NO: 860052 - RNA, 19 nt, Homo sapiens
  misc_RNA (1)...(19): siRNA sense strand
gaugauggauaugaagaaa

SEQ ID NO: 860053 - RNA, 19 nt, Homo sapiens
  misc_RNA (1)...(19): siRNA sense strand
ggauacagauuacgacucu

SEQ ID NO: 860054 - RNA, 19 nt, Homo sapiens
  misc_RNA (1)...(19): siRNA sense strand
gaaaauggcuuauguugac

SEQ ID NO: 860055 - RNA, 19 nt, Homo sapiens
  misc_RNA (1)...(19): siRNA sense strand
guacaacauuuggagauug

SEQ ID NO: 860056 - RNA, 19 nt, Homo sapiens
  misc_RNA (1)...(19): siRNA sense strand
agaaaucaaugaaggcuau

SEQ ID NO: 860057 - RNA, 19 nt, Homo sapiens
  misc_RNA (1)...(19): siRNA sense strand
caucuuagguguuugucuu

SEQ ID NO: 860058 - RNA, 19 nt, Homo sapiens
  misc_RNA (1)...(19): siRNA sense strand
ggaggaaaauccaaagaaa

SEQ ID NO: 860059 - RNA, 19 nt, Homo sapiens
  misc_RNA (1)...(19): siRNA sense strand
ccacugcucucucaaugau

SEQ ID NO: 860060 - RNA, 19 nt, Homo sapiens
  misc_RNA (1)...(19): siRNA sense strand
ggucuaaaguuccaucucu

SEQ ID NO: 860061 - RNA, 19 nt, Homo sapiens
  misc_RNA (1)...(19): siRNA sense strand
gcagcauucuuaggaguuu

SEQ ID NO: 860062 - RNA, 19 nt, Homo sapiens
  misc_RNA (1)...(19): siRNA sense strand
gaccacugcucucucaaug

SEQ ID NO: 860063 - RNA, 19 nt, Homo sapiens
  misc_RNA (1)...(19): siRNA sense strand
gauuacgacucuucuuuua

SEQ ID NO: 860064 - RNA, 19 nt, Homo sapiens
  misc_RNA (1)...(19): siRNA sense strand
uuaaaugccuggaaagaag

SEQ ID NO: 860065 - RNA, 19 nt, Homo sapiens
  misc_RNA (1)...(19): siRNA sense strand
gcaggacuaccaggaaaua

SEQ ID NO: 860066 - RNA, 19 nt, Homo sapiens
  misc_RNA (1)...(19): siRNA sense strand
gcaaugggaccacuaugug

SEQ ID NO: 860067 - RNA, 19 nt, Homo sapiens
  misc_RNA (1)...(19): siRNA sense strand
ugauggauaugaagaaauc

SEQ ID NO: 860068 - RNA, 19 nt, Homo sapiens
  misc_RNA (1)...(19): siRNA sense strand
ggacaauuccagagcuuug

SEQ ID NO: 860069 - RNA, 19 nt, Homo sapiens
  misc_RNA (1)...(19): siRNA sense strand
agggagagcuuucuuugga

SEQ ID NO: 860070 - RNA, 19 nt, Homo sapiens
  misc_RNA (1)...(19): siRNA sense strand
aaagaaaggucugcugagu

SEQ ID NO: 860071 - RNA, 19 nt, Homo sapiens
  misc_RNA (1)...(19): siRNA sense strand
gaacccaucaucccauuag

SEQ ID NO: 860072 - RNA, 19 nt, Homo sapiens
  misc_RNA (1)...(19): siRNA sense strand
cagauuacgacucuucuuu

SEQ ID NO: 860073 - RNA, 19 nt, Homo sapiens
  misc_RNA (1)...(19): siRNA sense strand
cauauuuccuagcaucuau

SEQ ID NO: 860074 - RNA, 19 nt, Homo sapiens
  misc_RNA (1)...(19): siRNA sense strand
acagauccaucaaggagaa

SEQ ID NO: 860075 - RNA, 19 nt, Homo sapiens
  misc_RNA (1)...(19): siRNA sense strand
caacagaagacccaaugau

SEQ ID NO: 860076 - RNA, 19 nt, Homo sapiens
  misc_RNA (1)...(19): siRNA sense strand
gggagagcuuucuuuggaa

SEQ ID NO: 860077 - RNA, 19 nt, Homo sapiens
  misc_RNA (1)...(19): siRNA sense strand
cauguggacugcgcuguuu

SEQ ID NO: 860078 - RNA, 19 nt, Homo sapiens
  misc_RNA (1)...(19): siRNA sense strand
gaagacccaaugaucaaug

SEQ ID NO: 860079 - RNA, 19 nt, Homo sapiens
  misc_RNA (1)...(19): siRNA sense strand
gucaugaucccaaacauug

SEQ ID NO: 860080 - RNA, 19 nt, Homo sapiens
  misc_RNA (1)...(19): siRNA sense strand
uaaaguuccaucucuagaa

SEQ ID NO: 860081 - RNA, 19 nt, Homo sapiens
  misc_RNA (1)...(19): siRNA sense strand
uuccagagcuuugcagaaa

SEQ ID NO: 860082 - RNA, 19 nt, Homo sapiens
  misc_RNA (1)...(19): siRNA sense strand
guguagcucuuaucacuag

SEQ ID NO: 860083 - RNA, 19 nt, Homo sapiens
  misc_RNA (1)...(19): siRNA sense strand
acagugauggugaaauaua

SEQ ID NO: 860084 - RNA, 19 nt, Homo sapiens
  misc_RNA (1)...(19): siRNA sense strand
ucugaucggucuaaaguuc

SEQ ID NO: 860085 - RNA, 19 nt, Homo sapiens
  misc_RNA (1)...(19): siRNA sense strand
cagaagacccaaugaucaa

SEQ ID NO: 860086 - RNA, 19 nt, Homo sapiens
  misc_RNA (1)...(19): siRNA sense strand
uuucaggucuuaucugugu

SEQ ID NO: 860087 - RNA, 19 nt, Homo sapiens
  misc_RNA (1)...(19): siRNA sense strand
aaugaaggcuaugggaauu

SEQ ID NO: 860088 - RNA, 19 nt, Homo sapiens
  misc_RNA (1)...(19): siRNA sense strand
ccaacacagugauggugaa

SEQ ID NO: 860089 - RNA, 19 nt, Homo sapiens
  misc_RNA (1)...(19): siRNA sense strand
caaugaaggcuaugggaau

SEQ ID NO: 860090 - RNA, 19 nt, Homo sapiens
  misc_RNA (1)...(19): siRNA sense strand
ggugaaauauacuucucau

SEQ ID NO: 860091 - RNA, 19 nt, Homo sapiens
  misc_RNA (1)...(19): siRNA sense strand
cuugcuggcuauaaacuuu

SEQ ID NO: 860092 - RNA, 19 nt, Homo sapiens
  misc_RNA (1)...(19): siRNA sense strand
uguccuugcuggcuauaaa

SEQ ID NO: 860093 - RNA, 19 nt, Homo sapiens
  misc_RNA (1)...(19): siRNA sense strand
guuaaaugccuggaaagaa

SEQ ID NO: 860094 - RNA, 19 nt, Homo sapiens
  misc_RNA (1)...(19): siRNA sense strand
acagaagacccaaugauca

SEQ ID NO: 860095 - RNA, 19 nt, Homo sapiens
  misc_RNA (1)...(19): siRNA sense strand
gcacaguacaacauuugga

SEQ ID NO: 860096 - RNA, 19 nt, Homo sapiens
  misc_RNA (1)...(19): siRNA sense strand
uaugguguaugcaauguca

SEQ ID NO: 860097 - RNA, 19 nt, Homo sapiens
  misc_RNA (1)...(19): siRNA sense strand
ugugguagcuauggucuug

SEQ ID NO: 860098 - RNA, 19 nt, Homo sapiens
  misc_RNA (1)...(19): siRNA sense strand
gucuaaaguuccaucucua

SEQ ID NO: 860099 - RNA, 19 nt, Homo sapiens
  misc_RNA (1)...(19): siRNA sense strand
acaaauuccauccagcuuu

SEQ ID NO: 860100 - RNA, 19 nt, Homo sapiens
  misc_RNA (1)...(19): siRNA sense strand
aaccuggaguuaucucauu

SEQ ID NO: 860101 - RNA, 19 nt, Homo sapiens
  misc_RNA (1)...(19): siRNA sense strand
gagaaaauggcuuauguug

SEQ ID NO: 860102 - RNA, 19 nt, Homo sapiens
  misc_RNA (1)...(19): siRNA sense strand
ggauguguagcucuuauca

SEQ ID NO: 860103 - RNA, 19 nt, Homo sapiens
  misc_RNA (1)...(19): siRNA sense strand
gccuggcgaugauggauau

SEQ ID NO: 860104 - RNA, 19 nt, Homo sapiens
  misc_RNA (1)...(19): siRNA sense strand
aagaacccaucaucccauu

SEQ ID NO: 860105 - RNA, 19 nt, Homo sapiens
  misc_RNA (1)...(19): siRNA sense strand
ugcagcaucuuagguguuu

SEQ ID NO: 860106 - RNA, 19 nt, Homo sapiens
  misc_RNA (1)...(19): siRNA sense strand
aaaggucugcugagugaaa

SEQ ID NO: 860107 - RNA, 19 nt, Homo sapiens
  misc_RNA (1)...(19): siRNA sense strand
ucaggucuuaucuguguua

SEQ ID NO: 860108 - RNA, 19 nt, Homo sapiens
  misc_RNA (1)...(19): siRNA sense strand
aagacccaaugaucaauga

SEQ ID NO: 860109 - RNA, 19 nt, Homo sapiens
  misc_RNA (1)...(19): siRNA sense strand
ggauaugaagaaaucaaug

SEQ ID NO: 860110 - RNA, 19 nt, Homo sapiens
  misc_RNA (1)...(19): siRNA sense strand
ucuaucacuugugcuuaua

SEQ ID NO: 860111 - RNA, 19 nt, Homo sapiens
  misc_RNA (1)...(19): siRNA sense strand
uuuguuaaaugccuggaaa

SEQ ID NO: 860112 - RNA, 19 nt, Homo sapiens
  misc_RNA (1)...(19): siRNA sense strand
uuagcacaguacaacauuu

SEQ ID NO: 860113 - RNA, 19 nt, Homo sapiens
  misc_RNA (1)...(19): siRNA sense strand
cagcauucuuaggaguuua

SEQ ID NO: 860114 - RNA, 19 nt, Homo sapiens
  misc_RNA (1)...(19): siRNA sense strand
ggacugaccacugcucucu

SEQ ID NO: 860115 - RNA, 19 nt, Homo sapiens
  misc_RNA (1)...(19): siRNA sense strand
uggcgaugauggauaugaa

SEQ ID NO: 860116 - RNA, 19 nt, Homo sapiens
  misc_RNA (1)...(19): siRNA sense strand
uagcacaguacaacauuug

SEQ ID NO: 860117 - RNA, 19 nt, Homo sapiens
  misc_RNA (1)...(19): siRNA sense strand
uauuaugccuuggacaaau

SEQ ID NO: 860118 - RNA, 19 nt, Homo sapiens
  misc_RNA (1)...(19): siRNA sense strand
ggguacaccaugacuguga

SEQ ID NO: 860119 - RNA, 19 nt, Homo sapiens
  misc_RNA (1)...(19): siRNA sense strand
cacuugugcuuauacauca

SEQ ID NO: 860120 - RNA, 19 nt, Homo sapiens
  misc_RNA (1)...(19): siRNA sense strand
caacacagugauggugaaa

SEQ ID NO: 860121 - RNA, 19 nt, Homo sapiens
  misc_RNA (1)...(19): siRNA sense strand
aaauguggauagugcuguu

SEQ ID NO: 860122 - RNA, 19 nt, Homo sapiens
  misc_RNA (1)...(19): siRNA sense strand
ucauggauguguagcucuu

SEQ ID NO: 860123 - RNA, 19 nt, Homo sapiens
  misc_RNA (1)...(19): siRNA sense strand
cugcacauauuuccuagca

SEQ ID NO: 860124 - RNA, 19 nt, Homo sapiens
  misc_RNA (1)...(19): siRNA sense strand
gaaaccuggaguuaucuca

SEQ ID NO: 860125 - RNA, 19 nt, Homo sapiens
  misc_RNA (1)...(19): siRNA sense strand
gcauguggacugcgcuguu

SEQ ID NO: 860126 - RNA, 19 nt, Homo sapiens
  misc_RNA (1)...(19): siRNA sense strand
gcgaugauggauaugaaga

SEQ ID NO: 860127 - RNA, 19 nt, Homo sapiens
  misc_RNA (1)...(19): siRNA sense strand
guguuugucuugucaugau

SEQ ID NO: 860128 - RNA, 19 nt, Homo sapiens
  misc_RNA (1)...(19): siRNA sense strand
aaauacaucccaacacagu

SEQ ID NO: 860129 - RNA, 19 nt, Homo sapiens
  misc_RNA (1)...(19): siRNA sense strand
uacccuaccuccaccaaca

SEQ ID NO: 860130 - RNA, 19 nt, Homo sapiens
  misc_RNA (1)...(19): siRNA sense strand
gccuuuggguacaccauga

SEQ ID NO: 860131 - RNA, 19 nt, Homo sapiens
  misc_RNA (1)...(19): siRNA sense strand
ggagagccacaacuacagu

SEQ ID NO: 860132 - RNA, 19 nt, Homo sapiens
  misc_RNA (1)...(19): siRNA sense strand
ucacuugugcuuauacauc

SEQ ID NO: 860133 - RNA, 19 nt, Homo sapiens
  misc_RNA (1)...(19): siRNA sense strand
caauaguuccucccagcaa

SEQ ID NO: 860134 - RNA, 19 nt, Homo sapiens
  misc_RNA (1)...(19): siRNA sense strand
guuaucucauugcuauaug

SEQ ID NO: 860135 - RNA, 19 nt, Homo sapiens
  misc_RNA (1)...(19): siRNA sense strand
gguuggacugggacaauuu

SEQ ID NO: 860136 - RNA, 19 nt, Homo sapiens
  misc_RNA (1)...(19): siRNA sense strand
cuguguuaguuguguguua

SEQ ID NO: 860137 - RNA, 19 nt, Homo sapiens
  misc_RNA (1)...(19): siRNA sense strand
guuagcacaguacaacauu

SEQ ID NO: 860138 - RNA, 19 nt, Homo sapiens
  misc_RNA (1)...(19): siRNA sense strand
ugucauuucuaucacuugu

SEQ ID NO: 860139 - RNA, 19 nt, Homo sapiens
  misc_RNA (1)...(19): siRNA sense strand
uuacgacucuucuuuuaug

SEQ ID NO: 860140 - RNA, 19 nt, Homo sapiens
  misc_RNA (1)...(19): siRNA sense strand
cagugauggugaaauauac

SEQ ID NO: 860141 - RNA, 19 nt, Homo sapiens
  misc_RNA (1)...(19): siRNA sense strand
gaacaaagauaagccguau

SEQ ID NO: 860142 - RNA, 19 nt, Homo sapiens
  misc_RNA (1)...(19): siRNA sense strand
gagaaagugccaauaaaua

SEQ ID NO: 860143 - RNA, 19 nt, Homo sapiens
  misc_RNA (1)...(19): siRNA sense strand
gaacagaagcugcacagau

SEQ ID NO: 860144 - RNA, 19 nt, Homo sapiens
  misc_RNA (1)...(19): siRNA sense strand
caagagccuucuaaagauu

SEQ ID NO: 860145 - RNA, 19 nt, Homo sapiens
  misc_RNA (1)...(19): siRNA sense strand
ccaagagccuucuaaagau

SEQ ID NO: 860146 - RNA, 19 nt, Homo sapiens
  misc_RNA (1)...(19): siRNA sense strand
gaugaugucuaccauguuc

SEQ ID NO: 860147 - RNA, 19 nt, Homo sapiens
  misc_RNA (1)...(19): siRNA sense strand
gugagaaagugccaauaaa

SEQ ID NO: 860148 - RNA, 19 nt, Homo sapiens
  misc_RNA (1)...(19): siRNA sense strand
ggacgcugcuuuccaugga

SEQ ID NO: 860149 - RNA, 19 nt, Homo sapiens
  misc_RNA (1)...(19): siRNA sense strand
gggaucagcggucuuauug

SEQ ID NO: 860150 - RNA, 19 nt, Homo sapiens
  misc_RNA (1)...(19): siRNA sense strand
cagaugaugucuaccaugu

SEQ ID NO: 860151 - RNA, 19 nt, Homo sapiens
  misc_RNA (1)...(19): siRNA sense strand
ggaagccagucaaauacga

SEQ ID NO: 860152 - RNA, 19 nt, Homo sapiens
  misc_RNA (1)...(19): siRNA sense strand
gaucagcggucuuauugac

SEQ ID NO: 860153 - RNA, 19 nt, Homo sapiens
  misc_RNA (1)...(19): siRNA sense strand
gggcucuucuggacccuua

SEQ ID NO: 860154 - RNA, 19 nt, Homo sapiens
  misc_RNA (1)...(19): siRNA sense strand
aacagaagcugcacagaug

SEQ ID NO: 860155 - RNA, 19 nt, Homo sapiens
  misc_RNA (1)...(19): siRNA sense strand
gaaagugccaauaaauaca

SEQ ID NO: 860156 - RNA, 19 nt, Homo sapiens
  misc_RNA (1)...(19): siRNA sense strand
agacaucaguguuaagauc

SEQ ID NO: 860157 - RNA, 19 nt, Homo sapiens
  misc_RNA (1)...(19): siRNA sense strand
uccaagagccuucuaaaga

SEQ ID NO: 860158 - RNA, 19 nt, Homo sapiens
  misc_RNA (1)...(19): siRNA sense strand
gcccgagacaucaguguua

SEQ ID NO: 860159 - RNA, 19 nt, Homo sapiens
  misc_RNA (1)...(19): siRNA sense strand
ggucuugagccuacuguuu

SEQ ID NO: 860160 - RNA, 19 nt, Homo sapiens
  misc_RNA (1)...(19): siRNA sense strand
cguccucgcuggagccuuu

SEQ ID NO: 860161 - RNA, 19 nt, Homo sapiens
  misc_RNA (1)...(19): siRNA sense strand
gucuugagccuacuguuua

SEQ ID NO: 860162 - RNA, 19 nt, Homo sapiens
  misc_RNA (1)...(19): siRNA sense strand
ccaacguucugucuucaau

SEQ ID NO: 860163 - RNA, 19 nt, Homo sapiens
  misc_RNA (1)...(19): siRNA sense strand
ugagaaagugccaauaaau

SEQ ID NO: 860164 - RNA, 19 nt, Homo sapiens
  misc_RNA (1)...(19): siRNA sense strand
guagcccgcugcaucaugu

SEQ ID NO: 860165 - RNA, 19 nt, Homo sapiens
  misc_RNA (1)...(19): siRNA sense strand
cuuaaucucugccuucauc

SEQ ID NO: 860166 - RNA, 19 nt, Homo sapiens
  misc_RNA (1)...(19): siRNA sense strand
acgggaagccagucaaaua

SEQ ID NO: 860167 - RNA, 19 nt, Homo sapiens
  misc_RNA (1)...(19): siRNA sense strand
uggaguauauugaccacaa

SEQ ID NO: 860168 - RNA, 19 nt, Homo sapiens
  misc_RNA (1)...(19): siRNA sense strand
caucaguguuaagaucuuu

SEQ ID NO: 860169 - RNA, 19 nt, Homo sapiens
  misc_RNA (1)...(19): siRNA sense strand
ugugagaaagugccaauaa

SEQ ID NO: 860170 - RNA, 19 nt, Homo sapiens
  misc_RNA (1)...(19): siRNA sense strand
ccagcaacaucaucucagu

SEQ ID NO: 860171 - RNA, 19 nt, Homo sapiens
  misc_RNA (1)...(19): siRNA sense strand
acaagaagaggaagaagug

SEQ ID NO: 860172 - RNA, 19 nt, Homo sapiens
  misc_RNA (1)...(19): siRNA sense strand
ccaaugacaccaccauaca

SEQ ID NO: 860173 - RNA, 19 nt, Homo sapiens
  misc_RNA (1)...(19): siRNA sense strand
gggguacccuggaauauga

SEQ ID NO: 860174 - RNA, 19 nt, Homo sapiens
  misc_RNA (1)...(19): siRNA sense strand
cgcaaugcauacaucauga

SEQ ID NO: 860175 - RNA, 19 nt, Homo sapiens
  misc_RNA (1)...(19): siRNA sense strand
aaaccgcaaugcauacauc

SEQ ID NO: 860176 - RNA, 19 nt, Homo sapiens
  misc_RNA (1)...(19): siRNA sense strand
cgggucaucuuggaguaua

SEQ ID NO: 860177 - RNA, 19 nt, Homo sapiens
  misc_RNA (1)...(19): siRNA sense strand
aauccaacguucugucuuc

SEQ ID NO: 860178 - RNA, 19 nt, Homo sapiens
  misc_RNA (1)...(19): siRNA sense strand
cuacucaugcgaaacauug

SEQ ID NO: 860179 - RNA, 19 nt, Homo sapiens
  misc_RNA (1)...(19): siRNA sense strand
ucuucaaucugcaaaucua

SEQ ID NO: 860180 - RNA, 19 nt, Homo sapiens
  misc_RNA (1)...(19): siRNA sense strand
agccguaucuccuguacuu

SEQ ID NO: 860181 - RNA, 19 nt, Homo sapiens
  misc_RNA (1)...(19): siRNA sense strand
ggaguauauugaccacaag

SEQ ID NO: 860182 - RNA, 19 nt, Homo sapiens
  misc_RNA (1)...(19): siRNA sense strand
agaaagugccaauaaauac

SEQ ID NO: 860183 - RNA, 19 nt, Homo sapiens
  misc_RNA (1)...(19): siRNA sense strand
gagccuacuguuuaucuug

SEQ ID NO: 860184 - RNA, 19 nt, Homo sapiens
  misc_RNA (1)...(19): siRNA sense strand
cgagacaucaguguuaaga

SEQ ID NO: 860185 - RNA, 19 nt, Homo sapiens
  misc_RNA (1)...(19): siRNA sense strand
gaauaugacggugaucaca

SEQ ID NO: 860186 - RNA, 19 nt, Homo sapiens
  misc_RNA (1)...(19): siRNA sense strand
cggcagcggauucguauug

SEQ ID NO: 860187 - RNA, 19 nt, Homo sapiens
  misc_RNA (1)...(19): siRNA sense strand
gauuguggccugguuguau

SEQ ID NO: 860188 - RNA, 19 nt, Homo sapiens
  misc_RNA (1)...(19): siRNA sense strand
ccaucuacgggaagaauuu

SEQ ID NO: 860189 - RNA, 19 nt, Homo sapiens
  misc_RNA (1)...(19): siRNA sense strand
gcucugggcauccaacauc

SEQ ID NO: 860190 - RNA, 19 nt, Homo sapiens
  misc_RNA (1)...(19): siRNA sense strand
uuaccacacugggucauug

SEQ ID NO: 860191 - RNA, 19 nt, Homo sapiens
  misc_RNA (1)...(19): siRNA sense strand
gcugagaacggccuacagu

SEQ ID NO: 860192 - RNA, 19 nt, Homo sapiens
  misc_RNA (1)...(19): siRNA sense strand
caaauacgaccccuccuuu

SEQ ID NO: 860193 - RNA, 19 nt, Homo sapiens
  misc_RNA (1)...(19): siRNA sense strand
cccgagacaucaguguuaa

SEQ ID NO: 860194 - RNA, 19 nt, Homo sapiens
  misc_RNA (1)...(19): siRNA sense strand
ccagggaucaccaaugaca

SEQ ID NO: 860195 - RNA, 19 nt, Homo sapiens
  misc_RNA (1)...(19): siRNA sense strand
cuacugggccuuccacaag

SEQ ID NO: 860196 - RNA, 19 nt, Homo sapiens
  misc_RNA (1)...(19): siRNA sense strand
gcucuucauucuagguuac

SEQ ID NO: 860197 - RNA, 19 nt, Homo sapiens
  misc_RNA (1)...(19): siRNA sense strand
gcaaugcauacaucaugau

SEQ ID NO: 860198 - RNA, 19 nt, Homo sapiens
  misc_RNA (1)...(19): siRNA sense strand
gaccugcugcuguucuuug

SEQ ID NO: 860199 - RNA, 19 nt, Homo sapiens
  misc_RNA (1)...(19): siRNA sense strand
caucaugugcuguuucaag

SEQ ID NO: 860200 - RNA, 19 nt, Homo sapiens
  misc_RNA (1)...(19): siRNA sense strand
ccuacuacauguccaagag

SEQ ID NO: 860201 - RNA, 19 nt, Homo sapiens
  misc_RNA (1)...(19): siRNA sense strand
gcucugggacgcugcuuuc

SEQ ID NO: 860202 - RNA, 19 nt, Homo sapiens
  misc_RNA (1)...(19): siRNA sense strand
ccagggcuacucauccaaa

SEQ ID NO: 860203 - RNA, 19 nt, Homo sapiens
  misc_RNA (1)...(19): siRNA sense strand
ccgcaaugcauacaucaug

SEQ ID NO: 860204 - RNA, 19 nt, Homo sapiens
  misc_RNA (1)...(19): siRNA sense strand
cccaggacaucccuaccuu

SEQ ID NO: 860205 - RNA, 19 nt, Homo sapiens
  misc_RNA (1)...(19): siRNA sense strand
gacaacaagaagaggaaga

SEQ ID NO: 860206 - RNA, 19 nt, Homo sapiens
  misc_RNA (1)...(19): siRNA sense strand
cuaaagauucugggcaaga

SEQ ID NO: 860207 - RNA, 19 nt, Homo sapiens
  misc_RNA (1)...(19): siRNA sense strand
ccacggcccaccuugugaa

SEQ ID NO: 860208 - RNA, 19 nt, Homo sapiens
  misc_RNA (1)...(19): siRNA sense strand
caagaagaggaagaaguga

SEQ ID NO: 860209 - RNA, 19 nt, Homo sapiens
  misc_RNA (1)...(19): siRNA sense strand
ggauuguggccugguugua

SEQ ID NO: 860210 - RNA, 19 nt, Homo sapiens
  misc_RNA (1)...(19): siRNA sense strand
cguaucuccuguacuucaa

SEQ ID NO: 860211 - RNA, 19 nt, Homo sapiens
  misc_RNA (1)...(19): siRNA sense strand
acaacaagaagaggaagaa

SEQ ID NO: 860212 - RNA, 19 nt, Homo sapiens
  misc_RNA (1)...(19): siRNA sense strand
cagaccugcugcuguucuu

SEQ ID NO: 860213 - RNA, 19 nt, Homo sapiens
  misc_RNA (1)...(19): siRNA sense strand
ccaauaaauacaucaugca

SEQ ID NO: 860214 - RNA, 19 nt, Homo sapiens
  misc_RNA (1)...(19): siRNA sense strand
ggaucagcggucuuauuga

SEQ ID NO: 860215 - RNA, 19 nt, Homo sapiens
  misc_RNA (1)...(19): siRNA sense strand
caccaaugacaccaccaua

SEQ ID NO: 860216 - RNA, 19 nt, Homo sapiens
  misc_RNA (1)...(19): siRNA sense strand
ccuggaauaugacggugau

SEQ ID NO: 860217 - RNA, 19 nt, Homo sapiens
  misc_RNA (1)...(19): siRNA sense strand
ccucaaugcccgagacauc

SEQ ID NO: 860218 - RNA, 19 nt, Homo sapiens
  misc_RNA (1)...(19): siRNA sense strand
cuacgggaagccagucaaa

SEQ ID NO: 860219 - RNA, 19 nt, Homo sapiens
  misc_RNA (1)...(19): siRNA sense strand
ugcaucaugugcuguuuca

SEQ ID NO: 860220 - RNA, 19 nt, Homo sapiens
  misc_RNA (1)...(19): siRNA sense strand
gcugcaucaugugcuguuu

SEQ ID NO: 860221 - RNA, 19 nt, Homo sapiens
  misc_RNA (1)...(19): siRNA sense strand
ggucaucuuggaguauauu

SEQ ID NO: 860222 - RNA, 19 nt, Homo sapiens
  misc_RNA (1)...(19): siRNA sense strand
ugucuucaaucugcaaauc

SEQ ID NO: 860223 - RNA, 19 nt, Homo sapiens
  misc_RNA (1)...(19): siRNA sense strand
ucuugagccuacuguuuau

SEQ ID NO: 860224 - RNA, 19 nt, Homo sapiens
  misc_RNA (1)...(19): siRNA sense strand
caucugcugcguccucuuc

SEQ ID NO: 860225 - RNA, 19 nt, Homo sapiens
  misc_RNA (1)...(19): siRNA sense strand
ugaugucuaccauguucua

SEQ ID NO: 860226 - RNA, 19 nt, Homo sapiens
  misc_RNA (1)...(19): siRNA sense strand
uuccugcucuucauucuag

SEQ ID NO: 860227 - RNA, 19 nt, Homo sapiens
  misc_RNA (1)...(19): siRNA sense strand
ggguggcucuggucuugag

SEQ ID NO: 860228 - RNA, 19 nt, Homo sapiens
  misc_RNA (1)...(19): siRNA sense strand
gagccuuugccuccuucua

SEQ ID NO: 860229 - RNA, 19 nt, Homo sapiens
  misc_RNA (1)...(19): siRNA sense strand
gaacaaagauaagccguau

SEQ ID NO: 860230 - RNA, 19 nt, Homo sapiens
  misc_RNA (1)...(19): siRNA sense strand
gagaaagugccaauaaaua

SEQ ID NO: 860231 - RNA, 19 nt, Homo sapiens
  misc_RNA (1)...(19): siRNA sense strand
gaacagaagcugcacagau

SEQ ID NO: 860232 - RNA, 19 nt, Homo sapiens
  misc_RNA (1)...(19): siRNA sense strand
caagagccuucuaaagauu

SEQ ID NO: 860233 - RNA, 19 nt, Homo sapiens
  misc_RNA (1)...(19): siRNA sense strand
ccaagagccuucuaaagau

SEQ ID NO: 860234 - RNA, 19 nt, Homo sapiens
  misc_RNA (1)...(19): siRNA sense strand
gaugaugucuaccauguuc

SEQ ID NO: 860235 - RNA, 19 nt, Homo sapiens
  misc_RNA (1)...(19): siRNA sense strand
gugagaaagugccaauaaa

SEQ ID NO: 860236 - RNA, 19 nt, Homo sapiens
  misc_RNA (1)...(19): siRNA sense strand
ggacgcugcuuuccaugga

SEQ ID NO: 860237 - RNA, 19 nt, Homo sapiens
  misc_RNA (1)...(19): siRNA sense strand
gggaucagcggucuuauug

SEQ ID NO: 860238 - RNA, 19 nt, Homo sapiens
  misc_RNA (1)...(19): siRNA sense strand
cagaugaugucuaccaugu

SEQ ID NO: 860239 - RNA, 19 nt, Homo sapiens
  misc_RNA (1)...(19): siRNA sense strand
ggaagccagucaaauacga

SEQ ID NO: 860240 - RNA, 19 nt, Homo sapiens
  misc_RNA (1)...(19): siRNA sense strand
gaucagcggucuuauugac

SEQ ID NO: 860241 - RNA, 19 nt, Homo sapiens
  misc_RNA (1)...(19): siRNA sense strand
gggcucuucuggacccuua

SEQ ID NO: 860242 - RNA, 19 nt, Homo sapiens
  misc_RNA (1)...(19): siRNA sense strand
aacagaagcugcacagaug

SEQ ID NO: 860243 - RNA, 19 nt, Homo sapiens
  misc_RNA (1)...(19): siRNA sense strand
gaaagugccaauaaauaca

SEQ ID NO: 860244 - RNA, 19 nt, Homo sapiens
  misc_RNA (1)...(19): siRNA sense strand
agacaucaguguuaagauc

SEQ ID NO: 860245 - RNA, 19 nt, Homo sapiens
  misc_RNA (1)...(19): siRNA sense strand
uccaagagccuucuaaaga

SEQ ID NO: 860246 - RNA, 19 nt, Homo sapiens
  misc_RNA (1)...(19): siRNA sense strand
gcccgagacaucaguguua

SEQ ID NO: 860247 - RNA, 19 nt, Homo sapiens
  misc_RNA (1)...(19): siRNA sense strand
ggucuugagccuacuguuu

SEQ ID NO: 860248 - RNA, 19 nt, Homo sapiens
  misc_RNA (1)...(19): siRNA sense strand
cguccucgcuggagccuuu

SEQ ID NO: 860249 - RNA, 19 nt, Homo sapiens
  misc_RNA (1)...(19): siRNA sense strand
gucuugagccuacuguuua

SEQ ID NO: 860250 - RNA, 19 nt, Homo sapiens
  misc_RNA (1)...(19): siRNA sense strand
ccaacguucugucuucaau

SEQ ID NO: 860251 - RNA, 19 nt, Homo sapiens
  misc_RNA (1)...(19): siRNA sense strand
ugagaaagugccaauaaau

SEQ ID NO: 860252 - RNA, 19 nt, Homo sapiens
  misc_RNA (1)...(19): siRNA sense strand
guagcccgcugcaucaugu

SEQ ID NO: 860253 - RNA, 19 nt, Homo sapiens
  misc_RNA (1)...(19): siRNA sense strand
cuuaaucucugccuucauc

SEQ ID NO: 860254 - RNA, 19 nt, Homo sapiens
  misc_RNA (1)...(19): siRNA sense strand
acgggaagccagucaaaua

SEQ ID NO: 860255 - RNA, 19 nt, Homo sapiens
  misc_RNA (1)...(19): siRNA sense strand
uggaguauauugaccacaa

SEQ ID NO: 860256 - RNA, 19 nt, Homo sapiens
  misc_RNA (1)...(19): siRNA sense strand
caucaguguuaagaucuuu

SEQ ID NO: 860257 - RNA, 19 nt, Homo sapiens
  misc_RNA (1)...(19): siRNA sense strand
ugugagaaagugccaauaa

SEQ ID NO: 860258 - RNA, 19 nt, Homo sapiens
  misc_RNA (1)...(19): siRNA sense strand
ccagcaacaucaucucagu

SEQ ID NO: 860259 - RNA, 19 nt, Homo sapiens
  misc_RNA (1)...(19): siRNA sense strand
acaagaagaggaagaagug

SEQ ID NO: 860260 - RNA, 19 nt, Homo sapiens
  misc_RNA (1)...(19): siRNA sense strand
ccaaugacaccaccauaca

SEQ ID NO: 860261 - RNA, 19 nt, Homo sapiens
  misc_RNA (1)...(19): siRNA sense strand
gggguacccuggaauauga

SEQ ID NO: 860262 - RNA, 19 nt, Homo sapiens
  misc_RNA (1)...(19): siRNA sense strand
cgcaaugcauacaucauga

SEQ ID NO: 860263 - RNA, 19 nt, Homo sapiens
  misc_RNA (1)...(19): siRNA sense strand
aaaccgcaaugcauacauc

SEQ ID NO: 860264 - RNA, 19 nt, Homo sapiens
  misc_RNA (1)...(19): siRNA sense strand
cgggucaucuuggaguaua

SEQ ID NO: 860265 - RNA, 19 nt, Homo sapiens
  misc_RNA (1)...(19): siRNA sense strand
aauccaacguucugucuuc

SEQ ID NO: 860266 - RNA, 19 nt, Homo sapiens
  misc_RNA (1)...(19): siRNA sense strand
cuacucaugcgaaacauug

SEQ ID NO: 860267 - RNA, 19 nt, Homo sapiens
  misc_RNA (1)...(19): siRNA sense strand
ucuucaaucugcaaaucua

SEQ ID NO: 860268 - RNA, 19 nt, Homo sapiens
  misc_RNA (1)...(19): siRNA sense strand
agccguaucuccuguacuu

SEQ ID NO: 860269 - RNA, 19 nt, Homo sapiens
  misc_RNA (1)...(19): siRNA sense strand
ggaguauauugaccacaag

SEQ ID NO: 860270 - RNA, 19 nt, Homo sapiens
  misc_RNA (1)...(19): siRNA sense strand
agaaagugccaauaaauac

SEQ ID NO: 860271 - RNA, 19 nt, Homo sapiens
  misc_RNA (1)...(19): siRNA sense strand
gagccuacuguuuaucuug

SEQ ID NO: 860272 - RNA, 19 nt, Homo sapiens
  misc_RNA (1)...(19): siRNA sense strand
cgagacaucaguguuaaga

SEQ ID NO: 860273 - RNA, 19 nt, Homo sapiens
  misc_RNA (1)...(19): siRNA sense strand
gaauaugacggugaucaca

SEQ ID NO: 860274 - RNA, 19 nt, Homo sapiens
  misc_RNA (1)...(19): siRNA sense strand
cggcagcggauucguauug

SEQ ID NO: 860275 - RNA, 19 nt, Homo sapiens
  misc_RNA (1)...(19): siRNA sense strand
gauuguggccugguuguau

SEQ ID NO: 860276 - RNA, 19 nt, Homo sapiens
  misc_RNA (1)...(19): siRNA sense strand
ccaucuacgggaagaauuu

SEQ ID NO: 860277 - RNA, 19 nt, Homo sapiens
  misc_RNA (1)...(19): siRNA sense strand
gcucugggcauccaacauc

SEQ ID NO: 860278 - RNA, 19 nt, Homo sapiens
  misc_RNA (1)...(19): siRNA sense strand
uuaccacacugggucauug

SEQ ID NO: 860279 - RNA, 19 nt, Homo sapiens
  misc_RNA (1)...(19): siRNA sense strand
gcugagaacggccuacagu

SEQ ID NO: 860280 - RNA, 19 nt, Homo sapiens
  misc_RNA (1)...(19): siRNA sense strand
caaauacgaccccuccuuu

SEQ ID NO: 860281 - RNA, 19 nt, Homo sapiens
  misc_RNA (1)...(19): siRNA sense strand
cccgagacaucaguguuaa

SEQ ID NO: 860282 - RNA, 19 nt, Homo sapiens
  misc_RNA (1)...(19): siRNA sense strand
ccagggaucaccaaugaca

SEQ ID NO: 860283 - RNA, 19 nt, Homo sapiens
  misc_RNA (1)...(19): siRNA sense strand
cuacugggccuuccacaag

SEQ ID NO: 860284 - RNA, 19 nt, Homo sapiens
  misc_RNA (1)...(19): siRNA sense strand
gcucuucauucuagguuac

SEQ ID NO: 860285 - RNA, 19 nt, Homo sapiens
  misc_RNA (1)...(19): siRNA sense strand
gcaaugcauacaucaugau

SEQ ID NO: 860286 - RNA, 19 nt, Homo sapiens
  misc_RNA (1)...(19): siRNA sense strand
gaccugcugcuguucuuug

SEQ ID NO: 860287 - RNA, 19 nt, Homo sapiens
  misc_RNA (1)...(19): siRNA sense strand
caucaugugcuguuucaag

SEQ ID NO: 860288 - RNA, 19 nt, Homo sapiens
  misc_RNA (1)...(19): siRNA sense strand
ccuacuacauguccaagag

SEQ ID NO: 860289 - RNA, 19 nt, Homo sapiens
  misc_RNA (1)...(19): siRNA sense strand
gcucugggacgcugcuuuc

SEQ ID NO: 860290 - RNA, 19 nt, Homo sapiens
  misc_RNA (1)...(19): siRNA sense strand
ccagggcuacucauccaaa

SEQ ID NO: 860291 - RNA, 19 nt, Homo sapiens
  misc_RNA (1)...(19): siRNA sense strand
ccgcaaugcauacaucaug

SEQ ID NO: 860292 - RNA, 19 nt, Homo sapiens
  misc_RNA (1)...(19): siRNA sense strand
cccaggacaucccuaccuu

SEQ ID NO: 860293 - RNA, 19 nt, Homo sapiens
  misc_RNA (1)...(19): siRNA sense strand
gacaacaagaagaggaaga

SEQ ID NO: 860294 - RNA, 19 nt, Homo sapiens
  misc_RNA (1)...(19): siRNA sense strand
cuaaagauucugggcaaga

SEQ ID NO: 860295 - RNA, 19 nt, Homo sapiens
  misc_RNA (1)...(19): siRNA sense strand
ccacggcccaccuugugaa

SEQ ID NO: 860296 - RNA, 19 nt, Homo sapiens
  misc_RNA (1)...(19): siRNA sense strand
caagaagaggaagaaguga

SEQ ID NO: 860297 - RNA, 19 nt, Homo sapiens
  misc_RNA (1)...(19): siRNA sense strand
ggauuguggccugguugua

SEQ ID NO: 860298 - RNA, 19 nt, Homo sapiens
  misc_RNA (1)...(19): siRNA sense strand
cguaucuccuguacuucaa

SEQ ID NO: 860299 - RNA, 19 nt, Homo sapiens
  misc_RNA (1)...(19): siRNA sense strand
acaacaagaagaggaagaa

SEQ ID NO: 860300 - RNA, 19 nt, Homo sapiens
  misc_RNA (1)...(19): siRNA sense strand
cagaccugcugcuguucuu

SEQ ID NO: 860301 - RNA, 19 nt, Homo sapiens
  misc_RNA (1)...(19): siRNA sense strand
ccaauaaauacaucaugca

SEQ ID NO: 860302 - RNA, 19 nt, Homo sapiens
  misc_RNA (1)...(19): siRNA sense strand
ggaucagcggucuuauuga

SEQ ID NO: 860303 - RNA, 19 nt, Homo sapiens
  misc_RNA (1)...(19): siRNA sense strand
caccaaugacaccaccaua

SEQ ID NO: 860304 - RNA, 19 nt, Homo sapiens
  misc_RNA (1)...(19): siRNA sense strand
ccuggaauaugacggugau

SEQ ID NO: 860305 - RNA, 19 nt, Homo sapiens
  misc_RNA (1)...(19): siRNA sense strand
ccucaaugcccgagacauc

SEQ ID NO: 860306 - RNA, 19 nt, Homo sapiens
  misc_RNA (1)...(19): siRNA sense strand
cuacgggaagccagucaaa

SEQ ID NO: 860307 - RNA, 19 nt, Homo sapiens
  misc_RNA (1)...(19): siRNA sense strand
ugcaucaugugcuguuuca

SEQ ID NO: 860308 - RNA, 19 nt, Homo sapiens
  misc_RNA (1)...(19): siRNA sense strand
gcugcaucaugugcuguuu

SEQ ID NO: 860309 - RNA, 19 nt, Homo sapiens
  misc_RNA (1)...(19): siRNA sense strand
ggucaucuuggaguauauu

SEQ ID NO: 860310 - RNA, 19 nt, Homo sapiens
  misc_RNA (1)...(19): siRNA sense strand
ugucuucaaucugcaaauc

SEQ ID NO: 860311 - RNA, 19 nt, Homo sapiens
  misc_RNA (1)...(19): siRNA sense strand
ucuugagccuacuguuuau

SEQ ID NO: 860312 - RNA, 19 nt, Homo sapiens
  misc_RNA (1)...(19): siRNA sense strand
caucugcugcguccucuuc

SEQ ID NO: 860313 - RNA, 19 nt, Homo sapiens
  misc_RNA (1)...(19): siRNA sense strand
ugaugucuaccauguucua

SEQ ID NO: 860314 - RNA, 19 nt, Homo sapiens
  misc_RNA (1)...(19): siRNA sense strand
uuccugcucuucauucuag

SEQ ID NO: 860315 - RNA, 19 nt, Homo sapiens
  misc_RNA (1)...(19): siRNA sense strand
ggguggcucuggucuugag

SEQ ID NO: 860316 - RNA, 19 nt, Homo sapiens
  misc_RNA (1)...(19): siRNA sense strand
gagccuuugccuccuucua

SEQ ID NO: 860317 - RNA, 19 nt, Homo sapiens
  misc_RNA (1)...(19): siRNA sense strand
gaacacuccuugcugauga

SEQ ID NO: 860318 - RNA, 19 nt, Homo sapiens
  misc_RNA (1)...(19): siRNA sense strand
gcacacaccuccacucuca

SEQ ID NO: 860319 - RNA, 19 nt, Homo sapiens
  misc_RNA (1)...(19): siRNA sense strand
uaacauuccuggugacuga

SEQ ID NO: 860320 - RNA, 19 nt, Homo sapiens
  misc_RNA (1)...(19): siRNA sense strand
gauccuaccugcuccgauu

SEQ ID NO: 860321 - RNA, 19 nt, Homo sapiens
  misc_RNA (1)...(19): siRNA sense strand
gaacuacuacuuuccauca

SEQ ID NO: 860322 - RNA, 19 nt, Homo sapiens
  misc_RNA (1)...(19): siRNA sense strand
ggcaacagcuuaaugagau

SEQ ID NO: 860323 - RNA, 19 nt, Homo sapiens
  misc_RNA (1)...(19): siRNA sense strand
caggauuucuacagucaua

SEQ ID NO: 860324 - RNA, 19 nt, Homo sapiens
  misc_RNA (1)...(19): siRNA sense strand
gaucaacgcugccaaaauc

SEQ ID NO: 860325 - RNA, 19 nt, Homo sapiens
  misc_RNA (1)...(19): siRNA sense strand
ccucaccucuggcuacuuu

SEQ ID NO: 860326 - RNA, 19 nt, Homo sapiens
  misc_RNA (1)...(19): siRNA sense strand
ucagauaucuuugucuuca

SEQ ID NO: 860327 - RNA, 19 nt, Homo sapiens
  misc_RNA (1)...(19): siRNA sense strand
ggacuuccucuuccacuuu

SEQ ID NO: 860328 - RNA, 19 nt, Homo sapiens
  misc_RNA (1)...(19): siRNA sense strand
gggcucaccuggaacugaa

SEQ ID NO: 860329 - RNA, 19 nt, Homo sapiens
  misc_RNA (1)...(19): siRNA sense strand
ggagaucaacgcugccaaa

SEQ ID NO: 860330 - RNA, 19 nt, Homo sapiens
  misc_RNA (1)...(19): siRNA sense strand
ggugaggaacuacuacuuu

SEQ ID NO: 860331 - RNA, 19 nt, Homo sapiens
  misc_RNA (1)...(19): siRNA sense strand
ggaugacccuccacagaca

SEQ ID NO: 860332 - RNA, 19 nt, Homo sapiens
  misc_RNA (1)...(19): siRNA sense strand
gagacgagccugagaugug

SEQ ID NO: 860333 - RNA, 19 nt, Homo sapiens
  misc_RNA (1)...(19): siRNA sense strand
gugaggaacuacuacuuuc

SEQ ID NO: 860334 - RNA, 19 nt, Homo sapiens
  misc_RNA (1)...(19): siRNA sense strand
gaucuugaccuuaggacuu

SEQ ID NO: 860335 - RNA, 19 nt, Homo sapiens
  misc_RNA (1)...(19): siRNA sense strand
cccgaaaccuccagggaaa

SEQ ID NO: 860336 - RNA, 19 nt, Homo sapiens
  misc_RNA (1)...(19): siRNA sense strand
ucucagauaucuuugucuu

SEQ ID NO: 860337 - RNA, 19 nt, Homo sapiens
  misc_RNA (1)...(19): siRNA sense strand
guucggcccugucuuuaca

SEQ ID NO: 860338 - RNA, 19 nt, Homo sapiens
  misc_RNA (1)...(19): siRNA sense strand
gcaaagucccgcucagucu

SEQ ID NO: 860339 - RNA, 19 nt, Homo sapiens
  misc_RNA (1)...(19): siRNA sense strand
ggaauuggcugggcuucac

SEQ ID NO: 860340 - RNA, 19 nt, Homo sapiens
  misc_RNA (1)...(19): siRNA sense strand
caccuccacucucagauau

SEQ ID NO: 860341 - RNA, 19 nt, Homo sapiens
  misc_RNA (1)...(19): siRNA sense strand
ugaggugucucgugccaau

SEQ ID NO: 860342 - RNA, 19 nt, Homo sapiens
  misc_RNA (1)...(19): siRNA sense strand
ggcaggagcuccagaaccu

SEQ ID NO: 860343 - RNA, 19 nt, Homo sapiens
  misc_RNA (1)...(19): siRNA sense strand
cccagagggugccgaacua

SEQ ID NO: 860344 - RNA, 19 nt, Homo sapiens
  misc_RNA (1)...(19): siRNA sense strand
gcaacagcuuaaugagauc

SEQ ID NO: 860345 - RNA, 19 nt, Homo sapiens
  misc_RNA (1)...(19): siRNA sense strand
ccucuuugccgccuacuuu

SEQ ID NO: 860346 - RNA, 19 nt, Homo sapiens
  misc_RNA (1)...(19): siRNA sense strand
ccagugacccugacagcuu

SEQ ID NO: 860347 - RNA, 19 nt, Homo sapiens
  misc_RNA (1)...(19): siRNA sense strand
gcacaaguggccgauccua

SEQ ID NO: 860348 - RNA, 19 nt, Homo sapiens
  misc_RNA (1)...(19): siRNA sense strand
caccaaagaccagcacauu

SEQ ID NO: 860349 - RNA, 19 nt, Homo sapiens
  misc_RNA (1)...(19): siRNA sense strand
cagcaugggugaggagauc

SEQ ID NO: 860350 - RNA, 19 nt, Homo sapiens
  misc_RNA (1)...(19): siRNA sense strand
ccaaagaccagcacauucg

SEQ ID NO: 860351 - RNA, 19 nt, Homo sapiens
  misc_RNA (1)...(19): siRNA sense strand
gcauuucucccacgucauc

SEQ ID NO: 860352 - RNA, 19 nt, Homo sapiens
  misc_RNA (1)...(19): siRNA sense strand
uucaugcccugcaggauuu

SEQ ID NO: 860353 - RNA, 19 nt, Homo sapiens
  misc_RNA (1)...(19): siRNA sense strand
acgagaagccaacccagua

SEQ ID NO: 860354 - RNA, 19 nt, Homo sapiens
  misc_RNA (1)...(19): siRNA sense strand
gacuuccucuuccacuuug

SEQ ID NO: 860355 - RNA, 19 nt, Homo sapiens
  misc_RNA (1)...(19): siRNA sense strand
gggauccucagccgcauuu

SEQ ID NO: 860356 - RNA, 19 nt, Homo sapiens
  misc_RNA (1)...(19): siRNA sense strand
caaggcaggagcuccagaa

SEQ ID NO: 860357 - RNA, 19 nt, Homo sapiens
  misc_RNA (1)...(19): siRNA sense strand
ggagacaucagcagcuucu

SEQ ID NO: 860358 - RNA, 19 nt, Homo sapiens
  misc_RNA (1)...(19): siRNA sense strand
ccuggugacugaagauaca

SEQ ID NO: 860359 - RNA, 19 nt, Homo sapiens
  misc_RNA (1)...(19): siRNA sense strand
acuauguccuggugccuuu

SEQ ID NO: 860360 - RNA, 19 nt, Homo sapiens
  misc_RNA (1)...(19): siRNA sense strand
acaccuccacucucagaua

SEQ ID NO: 860361 - RNA, 19 nt, Homo sapiens
  misc_RNA (1)...(19): siRNA sense strand
aauccaggcucgccaccuu

SEQ ID NO: 860362 - RNA, 19 nt, Homo sapiens
  misc_RNA (1)...(19): siRNA sense strand
gagcucggcgugagaucuu

SEQ ID NO: 860363 - RNA, 19 nt, Homo sapiens
  misc_RNA (1)...(19): siRNA sense strand
gaugggcugcuccagaaga

SEQ ID NO: 860364 - RNA, 19 nt, Homo sapiens
  misc_RNA (1)...(19): siRNA sense strand
gggcugcuccagaagauca

SEQ ID NO: 860365 - RNA, 19 nt, Homo sapiens
  misc_RNA (1)...(19): siRNA sense strand
cucaggaucuugaccuuag

SEQ ID NO: 860366 - RNA, 19 nt, Homo sapiens
  misc_RNA (1)...(19): siRNA sense strand
caaugcagcccaggacuuc

SEQ ID NO: 860367 - RNA, 19 nt, Homo sapiens
  misc_RNA (1)...(19): siRNA sense strand
ugacugaagauacaucaag

SEQ ID NO: 860368 - RNA, 19 nt, Homo sapiens
  misc_RNA (1)...(19): siRNA sense strand
aaaccuccagggaaaugua

SEQ ID NO: 860369 - RNA, 19 nt, Homo sapiens
  misc_RNA (1)...(19): siRNA sense strand
ggcccugucuuuacaacca

SEQ ID NO: 860370 - RNA, 19 nt, Homo sapiens
  misc_RNA (1)...(19): siRNA sense strand
caucacccaccaagaccua

SEQ ID NO: 860371 - RNA, 19 nt, Homo sapiens
  misc_RNA (1)...(19): siRNA sense strand
gcgguuccgagcagccuua

SEQ ID NO: 860372 - RNA, 19 nt, Homo sapiens
  misc_RNA (1)...(19): siRNA sense strand
cgaaaccuccagggaaaug

SEQ ID NO: 860373 - RNA, 19 nt, Homo sapiens
  misc_RNA (1)...(19): siRNA sense strand
uguagucccuguccuucug

SEQ ID NO: 860374 - RNA, 19 nt, Homo sapiens
  misc_RNA (1)...(19): siRNA sense strand
ccuggacccuccuguugug

SEQ ID NO: 860375 - RNA, 19 nt, Homo sapiens
  misc_RNA (1)...(19): siRNA sense strand
ggaggagaggugaucuuca

SEQ ID NO: 860376 - RNA, 19 nt, Homo sapiens
  misc_RNA (1)...(19): siRNA sense strand
cuucaugcccugcaggauu

SEQ ID NO: 860377 - RNA, 19 nt, Homo sapiens
  misc_RNA (1)...(19): siRNA sense strand
gcuucucccucaccuccaa

SEQ ID NO: 860378 - RNA, 19 nt, Homo sapiens
  misc_RNA (1)...(19): siRNA sense strand
ggucacacucgccgcuuug

SEQ ID NO: 860379 - RNA, 19 nt, Homo sapiens
  misc_RNA (1)...(19): siRNA sense strand
caaagaccagcacauucga

SEQ ID NO: 860380 - RNA, 19 nt, Homo sapiens
  misc_RNA (1)...(19): siRNA sense strand
ccaaugcagcccaggacuu

SEQ ID NO: 860381 - RNA, 19 nt, Homo sapiens
  misc_RNA (1)...(19): siRNA sense strand
uggcaacagcuuaaugaga

SEQ ID NO: 860382 - RNA, 19 nt, Homo sapiens
  misc_RNA (1)...(19): siRNA sense strand
ugcaggauuucuacaguca

SEQ ID NO: 860383 - RNA, 19 nt, Homo sapiens
  misc_RNA (1)...(19): siRNA sense strand
ggguucggcccugucuuua

SEQ ID NO: 860384 - RNA, 19 nt, Homo sapiens
  misc_RNA (1)...(19): siRNA sense strand
aucagcagcuucuggauca

SEQ ID NO: 860385 - RNA, 19 nt, Homo sapiens
  misc_RNA (1)...(19): siRNA sense strand
ucuggcaacagcuuaauga

SEQ ID NO: 860386 - RNA, 19 nt, Homo sapiens
  misc_RNA (1)...(19): siRNA sense strand
ccucaggaucuugaccuua

SEQ ID NO: 860387 - RNA, 19 nt, Homo sapiens
  misc_RNA (1)...(19): siRNA sense strand
guggugauggugacuguga

SEQ ID NO: 860388 - RNA, 19 nt, Homo sapiens
  misc_RNA (1)...(19): siRNA sense strand
ccuuaggacuuucgucaac

SEQ ID NO: 860389 - RNA, 19 nt, Homo sapiens
  misc_RNA (1)...(19): siRNA sense strand
ggacuuccugggucgaaca

SEQ ID NO: 860390 - RNA, 19 nt, Homo sapiens
  misc_RNA (1)...(19): siRNA sense strand
cgaacacuccuugcugaug

SEQ ID NO: 860391 - RNA, 19 nt, Homo sapiens
  misc_RNA (1)...(19): siRNA sense strand
uggcugcccuggugacucu

SEQ ID NO: 860392 - RNA, 19 nt, Homo sapiens
  misc_RNA (1)...(19): siRNA sense strand
acacaccuccacucucaga

SEQ ID NO: 860393 - RNA, 19 nt, Homo sapiens
  misc_RNA (1)...(19): siRNA sense strand
ccuugcugaugaccucuuu

SEQ ID NO: 860394 - RNA, 19 nt, Homo sapiens
  misc_RNA (1)...(19): siRNA sense strand
ggacagcaaugccugacaa

SEQ ID NO: 860395 - RNA, 19 nt, Homo sapiens
  misc_RNA (1)...(19): siRNA sense strand
gacaacacaugcauaccuu

SEQ ID NO: 860396 - RNA, 19 nt, Homo sapiens
  misc_RNA (1)...(19): siRNA sense strand
caggaggccuucaaccaaa

SEQ ID NO: 860397 - RNA, 19 nt, Homo sapiens
  misc_RNA (1)...(19): siRNA sense strand
gcaacaaggacaacugcaa

SEQ ID NO: 860398 - RNA, 19 nt, Homo sapiens
  misc_RNA (1)...(19): siRNA sense strand
uaagcugggucugacauau

SEQ ID NO: 860399 - RNA, 19 nt, Homo sapiens
  misc_RNA (1)...(19): siRNA sense strand
guaagcugggucugacaua

SEQ ID NO: 860400 - RNA, 19 nt, Homo sapiens
  misc_RNA (1)...(19): siRNA sense strand
ucaggaggccuucaaccaa

SEQ ID NO: 860401 - RNA, 19 nt, Homo sapiens
  misc_RNA (1)...(19): siRNA sense strand
aagcugggucugacauaua

SEQ ID NO: 860402 - RNA, 19 nt, Homo sapiens
  misc_RNA (1)...(19): siRNA sense strand
ucaaccaaaccaaccguaa

SEQ ID NO: 860403 - RNA, 19 nt, Homo sapiens
  misc_RNA (1)...(19): siRNA sense strand
agcugggucugacauauaa

SEQ ID NO: 860404 - RNA, 19 nt, Homo sapiens
  misc_RNA (1)...(19): siRNA sense strand
caaccaaaccaaccguaag

SEQ ID NO: 860405 - RNA, 19 nt, Homo sapiens
  misc_RNA (1)...(19): siRNA sense strand
agcaaugccugacaacaca

SEQ ID NO: 860406 - RNA, 19 nt, Homo sapiens
  misc_RNA (1)...(19): siRNA sense strand
ggccuugucuuccuuaccu

SEQ ID NO: 860407 - RNA, 19 nt, Homo sapiens
  misc_RNA (1)...(19): siRNA sense strand
ccaaauaccugcgcugcua

SEQ ID NO: 860408 - RNA, 19 nt, Homo sapiens
  misc_RNA (1)...(19): siRNA sense strand
guaaggagcagaugaguga

SEQ ID NO: 860409 - RNA, 19 nt, Homo sapiens
  misc_RNA (1)...(19): siRNA sense strand
gugagugacugccgaagua

SEQ ID NO: 860410 - RNA, 19 nt, Homo sapiens
  misc_RNA (1)...(19): siRNA sense strand
gcagaugagugauuguuca

SEQ ID NO: 860411 - RNA, 19 nt, Homo sapiens
  misc_RNA (1)...(19): siRNA sense strand
gaugagugauuguucaaau

SEQ ID NO: 860412 - RNA, 19 nt, Homo sapiens
  misc_RNA (1)...(19): siRNA sense strand
caauacugcuuccuggauu

SEQ ID NO: 860413 - RNA, 19 nt, Homo sapiens
  misc_RNA (1)...(19): siRNA sense strand
cugcaucacucuccacaaa

SEQ ID NO: 860414 - RNA, 19 nt, Homo sapiens
  misc_RNA (1)...(19): siRNA sense strand
cuacacgguccucuuaaua

SEQ ID NO: 860415 - RNA, 19 nt, Homo sapiens
  misc_RNA (1)...(19): siRNA sense strand
uaauagugcuggucaugau

SEQ ID NO: 860416 - RNA, 19 nt, Homo sapiens
  misc_RNA (1)...(19): siRNA sense strand
gaaguaaggagcagaugag

SEQ ID NO: 860417 - RNA, 19 nt, Homo sapiens
  misc_RNA (1)...(19): siRNA sense strand
ccucuacacgguccucuua

SEQ ID NO: 860418 - RNA, 19 nt, Homo sapiens
  misc_RNA (1)...(19): siRNA sense strand
gcuggacccugcuauacug

SEQ ID NO: 860419 - RNA, 19 nt, Homo sapiens
  misc_RNA (1)...(19): siRNA sense strand
uaaguuuguuccugucaau

SEQ ID NO: 860420 - RNA, 19 nt, Homo sapiens
  misc_RNA (1)...(19): siRNA sense strand
guaaguuuguuccugucaa

SEQ ID NO: 860421 - RNA, 19 nt, Homo sapiens
  misc_RNA (1)...(19): siRNA sense strand
ucaaauacccgaacuucuc

SEQ ID NO: 860422 - RNA, 19 nt, Homo sapiens
  misc_RNA (1)...(19): siRNA sense strand
ugagcuugguguuugguaa

SEQ ID NO: 860423 - RNA, 19 nt, Homo sapiens
  misc_RNA (1)...(19): siRNA sense strand
gagcagaugagugauuguu

SEQ ID NO: 860424 - RNA, 19 nt, Homo sapiens
  misc_RNA (1)...(19): siRNA sense strand
cagcgguucugacgucaug

SEQ ID NO: 860425 - RNA, 19 nt, Homo sapiens
  misc_RNA (1)...(19): siRNA sense strand
cgaaguaaggagcagauga

SEQ ID NO: 860426 - RNA, 19 nt, Homo sapiens
  misc_RNA (1)...(19): siRNA sense strand
gugucuggcuucuggauau

SEQ ID NO: 860427 - RNA, 19 nt, Homo sapiens
  misc_RNA (1)...(19): siRNA sense strand
ggaguuagggugccuucug

SEQ ID NO: 860428 - RNA, 19 nt, Homo sapiens
  misc_RNA (1)...(19): siRNA sense strand
acacgguccucuuaauagu

SEQ ID NO: 860429 - RNA, 19 nt, Homo sapiens
  misc_RNA (1)...(19): siRNA sense strand
augaugagcuugguguuug

SEQ ID NO: 860430 - RNA, 19 nt, Homo sapiens
  misc_RNA (1)...(19): siRNA sense strand
aauacugcuuccuggauuu

SEQ ID NO: 860431 - RNA, 19 nt, Homo sapiens
  misc_RNA (1)...(19): siRNA sense strand
caaugacccucaaaacaga

SEQ ID NO: 860432 - RNA, 19 nt, Homo sapiens
  misc_RNA (1)...(19): siRNA sense strand
cuugguguuugguaaguuu

SEQ ID NO: 860433 - RNA, 19 nt, Homo sapiens
  misc_RNA (1)...(19): siRNA sense strand
caugaugagcuugguguuu

SEQ ID NO: 860434 - RNA, 19 nt, Homo sapiens
  misc_RNA (1)...(19): siRNA sense strand
ucuacacgguccucuuaau

SEQ ID NO: 860435 - RNA, 19 nt, Homo sapiens
  misc_RNA (1)...(19): siRNA sense strand
aggagcagaugagugauug

SEQ ID NO: 860436 - RNA, 19 nt, Homo sapiens
  misc_RNA (1)...(19): siRNA sense strand
gcuucuggauauucucuca

SEQ ID NO: 860437 - RNA, 19 nt, Homo sapiens
  misc_RNA (1)...(19): siRNA sense strand
gcaaugacccucaaaacag

SEQ ID NO: 860438 - RNA, 19 nt, Homo sapiens
  misc_RNA (1)...(19): siRNA sense strand
gguguuugguaaguuuguu

SEQ ID NO: 860439 - RNA, 19 nt, Homo sapiens
  misc_RNA (1)...(19): siRNA sense strand
ucaauacugcuuccuggau

SEQ ID NO: 860440 - RNA, 19 nt, Homo sapiens
  misc_RNA (1)...(19): siRNA sense strand
ccacuuccauuccccaaau

SEQ ID NO: 860441 - RNA, 19 nt, Homo sapiens
  misc_RNA (1)...(19): siRNA sense strand
ggugucuggcuucuggaua

SEQ ID NO: 860442 - RNA, 19 nt, Homo sapiens
  misc_RNA (1)...(19): siRNA sense strand
ugagugauuguucaaauac

SEQ ID NO: 860443 - RNA, 19 nt, Homo sapiens
  misc_RNA (1)...(19): siRNA sense strand
gaaagaagcagaaucauca

SEQ ID NO: 860444 - RNA, 19 nt, Homo sapiens
  misc_RNA (1)...(19): siRNA sense strand
uaagucagcucuucacaga

SEQ ID NO: 860445 - RNA, 19 nt, Homo sapiens
  misc_RNA (1)...(19): siRNA sense strand
caauggaccuccucuguga

SEQ ID NO: 860446 - RNA, 19 nt, Homo sapiens
  misc_RNA (1)...(19): siRNA sense strand
gaacagagaaacccucgaa

SEQ ID NO: 860447 - RNA, 19 nt, Homo sapiens
  misc_RNA (1)...(19): siRNA sense strand
ggaagagacuggagaugag

SEQ ID NO: 860448 - RNA, 19 nt, Homo sapiens
  misc_RNA (1)...(19): siRNA sense strand
gggaagcuuucacaaggaa

SEQ ID NO: 860449 - RNA, 19 nt, Homo sapiens
  misc_RNA (1)...(19): siRNA sense strand
gggaagagacuggagauga

SEQ ID NO: 860450 - RNA, 19 nt, Homo sapiens
  misc_RNA (1)...(19): siRNA sense strand
cucaaaagcuggucucuua

SEQ ID NO: 860451 - RNA, 19 nt, Homo sapiens
  misc_RNA (1)...(19): siRNA sense strand
gcaguuggcuccggaaugc

SEQ ID NO: 860452 - RNA, 19 nt, Homo sapiens
  misc_RNA (1)...(19): siRNA sense strand
gaacggagggaggcaguug

SEQ ID NO: 860453 - RNA, 19 nt, Homo sapiens
  misc_RNA (1)...(19): siRNA sense strand
ggaccucugugccuucuac

SEQ ID NO: 860454 - RNA, 19 nt, Homo sapiens
  misc_RNA (1)...(19): siRNA sense strand
cgaaagaagcagaaucauc

SEQ ID NO: 860455 - RNA, 19 nt, Homo sapiens
  misc_RNA (1)...(19): siRNA sense strand
aagcuggucucuuaucaag

SEQ ID NO: 860456 - RNA, 19 nt, Homo sapiens
  misc_RNA (1)...(19): siRNA sense strand
gacccuaagucagcucuuc

SEQ ID NO: 860457 - RNA, 19 nt, Homo sapiens
  misc_RNA (1)...(19): siRNA sense strand
acacgaugccgaaacgaaa

SEQ ID NO: 860458 - RNA, 19 nt, Homo sapiens
  misc_RNA (1)...(19): siRNA sense strand
aaaucccgcugcagccauu

SEQ ID NO: 860459 - RNA, 19 nt, Homo sapiens
  misc_RNA (1)...(19): siRNA sense strand
gaaacgaaagaagcagaau

SEQ ID NO: 860460 - RNA, 19 nt, Homo sapiens
  misc_RNA (1)...(19): siRNA sense strand
cgaaacgaaagaagcagaa

SEQ ID NO: 860461 - RNA, 19 nt, Homo sapiens
  misc_RNA (1)...(19): siRNA sense strand
gacacgaugccgaaacgaa

SEQ ID NO: 860462 - RNA, 19 nt, Homo sapiens
  misc_RNA (1)...(19): siRNA sense strand
gaagcuuucacaaggaaca

SEQ ID NO: 860463 - RNA, 19 nt, Homo sapiens
  misc_RNA (1)...(19): siRNA sense strand
aaagggccacugucgauau

SEQ ID NO: 860464 - RNA, 19 nt, Homo sapiens
  misc_RNA (1)...(19): siRNA sense strand
aacgaaagaagcagaauca

SEQ ID NO: 860465 - RNA, 19 nt, Homo sapiens
  misc_RNA (1)...(19): siRNA sense strand
gaaaaccuggcgacccuaa

SEQ ID NO: 860466 - RNA, 19 nt, Homo sapiens
  misc_RNA (1)...(19): siRNA sense strand
gacuggagaugaggaggau

SEQ ID NO: 860467 - RNA, 19 nt, Homo sapiens
  misc_RNA (1)...(19): siRNA sense strand
gggagucaaugcagaaccu

SEQ ID NO: 860468 - RNA, 19 nt, Homo sapiens
  misc_RNA (1)...(19): siRNA sense strand
gucaauggaccuccucugu

SEQ ID NO: 860469 - RNA, 19 nt, Homo sapiens
  misc_RNA (1)...(19): siRNA sense strand
aaacgaaagaagcagaauc

SEQ ID NO: 860470 - RNA, 19 nt, Homo sapiens
  misc_RNA (1)...(19): siRNA sense strand
aagggccacugucgauaug

SEQ ID NO: 860471 - RNA, 19 nt, Homo sapiens
  misc_RNA (1)...(19): siRNA sense strand
ucaaugcagaaccuccuuu

SEQ ID NO: 860472 - RNA, 19 nt, Homo sapiens
  misc_RNA (1)...(19): siRNA sense strand
gcagacacgaugccgaaac

SEQ ID NO: 860473 - RNA, 19 nt, Homo sapiens
  misc_RNA (1)...(19): siRNA sense strand
gggccacugucgauaugag

SEQ ID NO: 860474 - RNA, 19 nt, Homo sapiens
  misc_RNA (1)...(19): siRNA sense strand
cagacacgaugccgaaacg

SEQ ID NO: 860475 - RNA, 19 nt, Homo sapiens
  misc_RNA (1)...(19): siRNA sense strand
gaagaagaauuucagaaug

SEQ ID NO: 860476 - RNA, 19 nt, Homo sapiens
  misc_RNA (1)...(19): siRNA sense strand
ggacugcgaucuacaauag

SEQ ID NO: 860477 - RNA, 19 nt, Homo sapiens
  misc_RNA (1)...(19): siRNA sense strand
ccacgcagguugaauauau

SEQ ID NO: 860478 - RNA, 19 nt, Homo sapiens
  misc_RNA (1)...(19): siRNA sense strand
ugacuugacuuucagagua

SEQ ID NO: 860479 - RNA, 19 nt, Homo sapiens
  misc_RNA (1)...(19): siRNA sense strand
cagcagagcuuacaucaag

SEQ ID NO: 860480 - RNA, 19 nt, Homo sapiens
  misc_RNA (1)...(19): siRNA sense strand
cauuaaggcuggugcauuu

SEQ ID NO: 860481 - RNA, 19 nt, Homo sapiens
  misc_RNA (1)...(19): siRNA sense strand
ggacuuggaacaauacuuu

SEQ ID NO: 860482 - RNA, 19 nt, Homo sapiens
  misc_RNA (1)...(19): siRNA sense strand
gaaagagugcuucauguug

SEQ ID NO: 860483 - RNA, 19 nt, Homo sapiens
  misc_RNA (1)...(19): siRNA sense strand
guggaaugcuacaaaguua

SEQ ID NO: 860484 - RNA, 19 nt, Homo sapiens
  misc_RNA (1)...(19): siRNA sense strand
cagaaugacuugacuuuca

SEQ ID NO: 860485 - RNA, 19 nt, Homo sapiens
  misc_RNA (1)...(19): siRNA sense strand
aaagacagaugcguucaua

SEQ ID NO: 860486 - RNA, 19 nt, Homo sapiens
  misc_RNA (1)...(19): siRNA sense strand
ucagagagaugauaaccaa

SEQ ID NO: 860487 - RNA, 19 nt, Homo sapiens
  misc_RNA (1)...(19): siRNA sense strand
gaaacacuuuggauggaaa

SEQ ID NO: 860488 - RNA, 19 nt, Homo sapiens
  misc_RNA (1)...(19): siRNA sense strand
ggccagauguguauuaugu

SEQ ID NO: 860489 - RNA, 19 nt, Homo sapiens
  misc_RNA (1)...(19): siRNA sense strand
cagaugcguucauauguaa

SEQ ID NO: 860490 - RNA, 19 nt, Homo sapiens
  misc_RNA (1)...(19): siRNA sense strand
gagagaugauaaccaacua

SEQ ID NO: 860491 - RNA, 19 nt, Homo sapiens
  misc_RNA (1)...(19): siRNA sense strand
ggaaagagugcuucauguu

SEQ ID NO: 860492 - RNA, 19 nt, Homo sapiens
  misc_RNA (1)...(19): siRNA sense strand
cuugaggaauccacaauua

SEQ ID NO: 860493 - RNA, 19 nt, Homo sapiens
  misc_RNA (1)...(19): siRNA sense strand
gcuaaagaauggccagaug

SEQ ID NO: 860494 - RNA, 19 nt, Homo sapiens
  misc_RNA (1)...(19): siRNA sense strand
agaugaaccuggaauuaaa

SEQ ID NO: 860495 - RNA, 19 nt, Homo sapiens
  misc_RNA (1)...(19): siRNA sense strand
caacaucccuuucaauucc

SEQ ID NO: 860496 - RNA, 19 nt, Homo sapiens
  misc_RNA (1)...(19): siRNA sense strand
agaaagcaauugauacuca

SEQ ID NO: 860497 - RNA, 19 nt, Homo sapiens
  misc_RNA (1)...(19): siRNA sense strand
acagaugcguucauaugua

SEQ ID NO: 860498 - RNA, 19 nt, Homo sapiens
  misc_RNA (1)...(19): siRNA sense strand
gaaaagacaucaaaagcau

SEQ ID NO: 860499 - RNA, 19 nt, Homo sapiens
  misc_RNA (1)...(19): siRNA sense strand
ccaggaaguugguugaaug

SEQ ID NO: 860500 - RNA, 19 nt, Homo sapiens
  misc_RNA (1)...(19): siRNA sense strand
cugcaggccuugaggauaa

SEQ ID NO: 860501 - RNA, 19 nt, Homo sapiens
  misc_RNA (1)...(19): siRNA sense strand
ggaagcugcuaaagaaugg

SEQ ID NO: 860502 - RNA, 19 nt, Homo sapiens
  misc_RNA (1)...(19): siRNA sense strand
gaaagcaauugauacucau

SEQ ID NO: 860503 - RNA, 19 nt, Homo sapiens
  misc_RNA (1)...(19): siRNA sense strand
gcggaaccauuguauuguu

SEQ ID NO: 860504 - RNA, 19 nt, Homo sapiens
  misc_RNA (1)...(19): siRNA sense strand
uuuggaagcugcuaaagaa

SEQ ID NO: 860505 - RNA, 19 nt, Homo sapiens
  misc_RNA (1)...(19): siRNA sense strand
ugacauagagaaagcaauu

SEQ ID NO: 860506 - RNA, 19 nt, Homo sapiens
  misc_RNA (1)...(19): siRNA sense strand
gcacucuucuggacuguag

SEQ ID NO: 860507 - RNA, 19 nt, Homo sapiens
  misc_RNA (1)...(19): siRNA sense strand
gaucaccacaggcgccuua

SEQ ID NO: 860508 - RNA, 19 nt, Homo sapiens
  misc_RNA (1)...(19): siRNA sense strand
ugucagcgacucacaguua

SEQ ID NO: 860509 - RNA, 19 nt, Homo sapiens
  misc_RNA (1)...(19): siRNA sense strand
aaaguuagccuuggaaaga

SEQ ID NO: 860510 - RNA, 19 nt, Homo sapiens
  misc_RNA (1)...(19): siRNA sense strand
ccacaaauucuuagacaga

SEQ ID NO: 860511 - RNA, 19 nt, Homo sapiens
  misc_RNA (1)...(19): siRNA sense strand
cagaugaaccuggaauuaa

SEQ ID NO: 860512 - RNA, 19 nt, Homo sapiens
  misc_RNA (1)...(19): siRNA sense strand
gagaugauaaccaacuaaa

SEQ ID NO: 860513 - RNA, 19 nt, Homo sapiens
  misc_RNA (1)...(19): siRNA sense strand
gugcuugaauccugaagaa

SEQ ID NO: 860514 - RNA, 19 nt, Homo sapiens
  misc_RNA (1)...(19): siRNA sense strand
ggaaagcagacuugaggaa

SEQ ID NO: 860515 - RNA, 19 nt, Homo sapiens
  misc_RNA (1)...(19): siRNA sense strand
gaagaaacucuggagcaaa

SEQ ID NO: 860516 - RNA, 19 nt, Homo sapiens
  misc_RNA (1)...(19): siRNA sense strand
gccauugccuucagaaagu

SEQ ID NO: 860517 - RNA, 19 nt, Homo sapiens
  misc_RNA (1)...(19): siRNA sense strand
cuacaaaguuagccuugga

SEQ ID NO: 860518 - RNA, 19 nt, Homo sapiens
  misc_RNA (1)...(19): siRNA sense strand
gcaacaucccuuucaauuc

SEQ ID NO: 860519 - RNA, 19 nt, Homo sapiens
  misc_RNA (1)...(19): siRNA sense strand
ccagauguguauuauguag

SEQ ID NO: 860520 - RNA, 19 nt, Homo sapiens
  misc_RNA (1)...(19): siRNA sense strand
caagacagcgucaacuuca

SEQ ID NO: 860521 - RNA, 19 nt, Homo sapiens
  misc_RNA (1)...(19): siRNA sense strand
gcaguuuccacuuauuauu

SEQ ID NO: 860522 - RNA, 19 nt, Homo sapiens
  misc_RNA (1)...(19): siRNA sense strand
aaaugaagauccaggaagu

SEQ ID NO: 860523 - RNA, 19 nt, Homo sapiens
  misc_RNA (1)...(19): siRNA sense strand
gaaagcagacuugaggaau

SEQ ID NO: 860524 - RNA, 19 nt, Homo sapiens
  misc_RNA (1)...(19): siRNA sense strand
gcaguggaacuauuggaaa

SEQ ID NO: 860525 - RNA, 19 nt, Homo sapiens
  misc_RNA (1)...(19): siRNA sense strand
agaagaaacucuggagcaa

SEQ ID NO: 860526 - RNA, 19 nt, Homo sapiens
  misc_RNA (1)...(19): siRNA sense strand
uacaagaaauggaaagagu

SEQ ID NO: 860527 - RNA, 19 nt, Homo sapiens
  misc_RNA (1)...(19): siRNA sense strand
acagaugaaccuggaauua

SEQ ID NO: 860528 - RNA, 19 nt, Homo sapiens
  misc_RNA (1)...(19): siRNA sense strand
caaggacagucacacagau

SEQ ID NO: 860529 - RNA, 19 nt, Homo sapiens
  misc_RNA (1)...(19): siRNA sense strand
aagaaacucuggagcaaag

SEQ ID NO: 860530 - RNA, 19 nt, Homo sapiens
  misc_RNA (1)...(19): siRNA sense strand
guguggacuuggaacaaua

SEQ ID NO: 860531 - RNA, 19 nt, Homo sapiens
  misc_RNA (1)...(19): siRNA sense strand
gaacaaaugcaaaagauag

SEQ ID NO: 860532 - RNA, 19 nt, Homo sapiens
  misc_RNA (1)...(19): siRNA sense strand
agacagaugcguucauaug

SEQ ID NO: 860533 - RNA, 19 nt, Homo sapiens
  misc_RNA (1)...(19): siRNA sense strand
gacuugacuuucagaguau

SEQ ID NO: 860534 - RNA, 19 nt, Homo sapiens
  misc_RNA (1)...(19): siRNA sense strand
cgaagccaguaaccacaaa

SEQ ID NO: 860535 - RNA, 19 nt, Homo sapiens
  misc_RNA (1)...(19): siRNA sense strand
gcaauugauacucauaauc

SEQ ID NO: 860536 - RNA, 19 nt, Homo sapiens
  misc_RNA (1)...(19): siRNA sense strand
gagagcaacaucccuuuca

SEQ ID NO: 860537 - RNA, 19 nt, Homo sapiens
  misc_RNA (1)...(19): siRNA sense strand
accauuguauuguugcuua

SEQ ID NO: 860538 - RNA, 19 nt, Homo sapiens
  misc_RNA (1)...(19): siRNA sense strand
ugaaacacuuuggauggaa

SEQ ID NO: 860539 - RNA, 19 nt, Homo sapiens
  misc_RNA (1)...(19): siRNA sense strand
ccacaauuagagaucuuua

SEQ ID NO: 860540 - RNA, 19 nt, Homo sapiens
  misc_RNA (1)...(19): siRNA sense strand
aaagcagacuugaggaauc

SEQ ID NO: 860541 - RNA, 19 nt, Homo sapiens
  misc_RNA (1)...(19): siRNA sense strand
aagcaguuuccacuuauua

SEQ ID NO: 860542 - RNA, 19 nt, Homo sapiens
  misc_RNA (1)...(19): siRNA sense strand
caguaaccacaaauucuua

SEQ ID NO: 860543 - RNA, 19 nt, Homo sapiens
  misc_RNA (1)...(19): siRNA sense strand
gagcaacaucccuuucaau

SEQ ID NO: 860544 - RNA, 19 nt, Homo sapiens
  misc_RNA (1)...(19): siRNA sense strand
acaggcgccuuacagauug

SEQ ID NO: 860545 - RNA, 19 nt, Homo sapiens
  misc_RNA (1)...(19): siRNA sense strand
cacaggcgccuuacagauu

SEQ ID NO: 860546 - RNA, 19 nt, Homo sapiens
  misc_RNA (1)...(19): siRNA sense strand
caccaccuguucugauuug

SEQ ID NO: 860547 - RNA, 19 nt, Homo sapiens
  misc_RNA (1)...(19): siRNA sense strand
ugaggaauccacaauuaga

SEQ ID NO: 860548 - RNA, 19 nt, Homo sapiens
  misc_RNA (1)...(19): siRNA sense strand
ccaguaaccacaaauucuu

SEQ ID NO: 860549 - RNA, 19 nt, Homo sapiens
  misc_RNA (1)...(19): siRNA sense strand
uggaaagagugcuucaugu

SEQ ID NO: 860550 - RNA, 19 nt, Homo sapiens
  misc_RNA (1)...(19): siRNA sense strand
aagaauggccagaugugua

SEQ ID NO: 860551 - RNA, 19 nt, Homo sapiens
  misc_RNA (1)...(19): siRNA sense strand
caaagagauuuuaccacua

SEQ ID NO: 860552 - RNA, 19 nt, Homo sapiens
  misc_RNA (1)...(19): siRNA sense strand
gacagaugcguucauaugu

SEQ ID NO: 860553 - RNA, 19 nt, Homo sapiens
  misc_RNA (1)...(19): siRNA sense strand
ccaguggaaugcuacaaag

SEQ ID NO: 860554 - RNA, 19 nt, Homo sapiens
  misc_RNA (1)...(19): siRNA sense strand
ggacagucacacagaugaa

SEQ ID NO: 860555 - RNA, 19 nt, Homo sapiens
  misc_RNA (1)...(19): siRNA sense strand
aaagcaguuuccacuuauu

SEQ ID NO: 860556 - RNA, 19 nt, Homo sapiens
  misc_RNA (1)...(19): siRNA sense strand
guacuugggacaaucugaa

SEQ ID NO: 860557 - RNA, 19 nt, Homo sapiens
  misc_RNA (1)...(19): siRNA sense strand
uaaggcuggugcauuuguu

SEQ ID NO: 860558 - RNA, 19 nt, Homo sapiens
  misc_RNA (1)...(19): siRNA sense strand
gacucacaguuacuaggua

SEQ ID NO: 860559 - RNA, 19 nt, Homo sapiens
  misc_RNA (1)...(19): siRNA sense strand
gaaaagugggagaaaauga

SEQ ID NO: 860560 - RNA, 19 nt, Homo sapiens
  misc_RNA (1)...(19): siRNA sense strand
ccaaggacagucacacaga

SEQ ID NO: 860561 - RNA, 19 nt, Homo sapiens
  misc_RNA (1)...(19): siRNA sense strand
cggaaccauuguauuguug

SEQ ID NO: 860562 - RNA, 19 nt, Homo sapiens
  misc_RNA (1)...(19): siRNA sense strand
caccuguucugauuugaau

SEQ ID NO: 860563 - RNA, 19 nt, Homo sapiens
  misc_RNA (1)...(19): siRNA sense strand
ucaaaagcauucuacaaga

SEQ ID NO: 860564 - RNA, 19 nt, Homo sapiens
  misc_RNA (1)...(19): siRNA sense strand
gaauugccauugccuucag

SEQ ID NO: 860565 - RNA, 19 nt, Homo sapiens
  misc_RNA (1)...(19): siRNA sense strand
caagaagaagaauuucaga

SEQ ID NO: 860566 - RNA, 19 nt, Homo sapiens
  misc_RNA (1)...(19): siRNA sense strand
uaaagaauggccagaugug

SEQ ID NO: 860567 - RNA, 19 nt, Homo sapiens
  misc_RNA (1)...(19): siRNA sense strand
gaaagacagaugcguucau

SEQ ID NO: 860568 - RNA, 19 nt, Homo sapiens
  misc_RNA (1)...(19): siRNA sense strand
uggcggaaccauuguauug

SEQ ID NO: 860569 - RNA, 19 nt, Homo sapiens
  misc_RNA (1)...(19): siRNA sense strand
cauguuggcggaaccauug

SEQ ID NO: 860570 - RNA, 19 nt, Homo sapiens
  misc_RNA (1)...(19): siRNA sense strand
gaagauccaggaaguuggu

SEQ ID NO: 860571 - RNA, 19 nt, Homo sapiens
  misc_RNA (1)...(19): siRNA sense strand
gcuauuaugaaacacuuug

SEQ ID NO: 860572 - RNA, 19 nt, Homo sapiens
  misc_RNA (1)...(19): siRNA sense strand
ucagaaugacauagagaaa

SEQ ID NO: 860573 - RNA, 19 nt, Homo sapiens
  misc_RNA (1)...(19): siRNA sense strand
gauccaggaaguugguuga

SEQ ID NO: 860574 - RNA, 19 nt, Homo sapiens
  misc_RNA (1)...(19): siRNA sense strand
aaagaaaagugggagaaaa

SEQ ID NO: 860575 - RNA, 19 nt, Homo sapiens
  misc_RNA (1)...(19): siRNA sense strand
gaacagaaccaaccugaua

SEQ ID NO: 860576 - RNA, 19 nt, Homo sapiens
  misc_RNA (1)...(19): siRNA sense strand
gaaccaaccugauauuucu

SEQ ID NO: 860577 - RNA, 19 nt, Homo sapiens
  misc_RNA (1)...(19): siRNA sense strand
gcaaguagcugccauugag

SEQ ID NO: 860578 - RNA, 19 nt, Homo sapiens
  misc_RNA (1)...(19): siRNA sense strand
ggaacaggcugaucauuuc

SEQ ID NO: 860579 - RNA, 19 nt, Homo sapiens
  misc_RNA (1)...(19): siRNA sense strand
gagcagagcgucaaugaaa

SEQ ID NO: 860580 - RNA, 19 nt, Homo sapiens
  misc_RNA (1)...(19): siRNA sense strand
gaaaggugguggacucuuc

SEQ ID NO: 860581 - RNA, 19 nt, Homo sapiens
  misc_RNA (1)...(19): siRNA sense strand
gaguggaguuguacaauga

SEQ ID NO: 860582 - RNA, 19 nt, Homo sapiens
  misc_RNA (1)...(19): siRNA sense strand
gaacugagccuggaugauc

SEQ ID NO: 860583 - RNA, 19 nt, Homo sapiens
  misc_RNA (1)...(19): siRNA sense strand
gggaacaggcugaucauuu

SEQ ID NO: 860584 - RNA, 19 nt, Homo sapiens
  misc_RNA (1)...(19): siRNA sense strand
ggaguggaguuguacaaug

SEQ ID NO: 860585 - RNA, 19 nt, Homo sapiens
  misc_RNA (1)...(19): siRNA sense strand
gcagaagaauaaccugaau

SEQ ID NO: 860586 - RNA, 19 nt, Homo sapiens
  misc_RNA (1)...(19): siRNA sense strand
ccaccaagauccugcagaa

SEQ ID NO: 860587 - RNA, 19 nt, Homo sapiens
  misc_RNA (1)...(19): siRNA sense strand
ggagagaagucauggaacu

SEQ ID NO: 860588 - RNA, 19 nt, Homo sapiens
  misc_RNA (1)...(19): siRNA sense strand
ccaagauccugcagaagaa

SEQ ID NO: 860589 - RNA, 19 nt, Homo sapiens
  misc_RNA (1)...(19): siRNA sense strand
ggaaggagggugauucaga

SEQ ID NO: 860590 - RNA, 19 nt, Homo sapiens
  misc_RNA (1)...(19): siRNA sense strand
gcacugacugcucugcuua

SEQ ID NO: 860591 - RNA, 19 nt, Homo sapiens
  misc_RNA (1)...(19): siRNA sense strand
gcagagugcuaaggaguga

SEQ ID NO: 860592 - RNA, 19 nt, Homo sapiens
  misc_RNA (1)...(19): siRNA sense strand
ugacugcucugcuuaagug

SEQ ID NO: 860593 - RNA, 19 nt, Homo sapiens
  misc_RNA (1)...(19): siRNA sense strand
gagaucggcugccugugaa

SEQ ID NO: 860594 - RNA, 19 nt, Homo sapiens
  misc_RNA (1)...(19): siRNA sense strand
caaaggagcagggaagaaa

SEQ ID NO: 860595 - RNA, 19 nt, Homo sapiens
  misc_RNA (1)...(19): siRNA sense strand
ggagggugauucagaguuc

SEQ ID NO: 860596 - RNA, 19 nt, Homo sapiens
  misc_RNA (1)...(19): siRNA sense strand
gcugagcgguuuccaagug

SEQ ID NO: 860597 - RNA, 19 nt, Homo sapiens
  misc_RNA (1)...(19): siRNA sense strand
gacaacaucaugggaguua

SEQ ID NO: 860598 - RNA, 19 nt, Homo sapiens
  misc_RNA (1)...(19): siRNA sense strand
gagaagucauggaacugaa

SEQ ID NO: 860599 - RNA, 19 nt, Homo sapiens
  misc_RNA (1)...(19): siRNA sense strand
ggcaguugcugaccaucua

SEQ ID NO: 860600 - RNA, 19 nt, Homo sapiens
  misc_RNA (1)...(19): siRNA sense strand
ggaaccgggugcugaagug

SEQ ID NO: 860601 - RNA, 19 nt, Homo sapiens
  misc_RNA (1)...(19): siRNA sense strand
ccaaggacucccaggauaa

SEQ ID NO: 860602 - RNA, 19 nt, Homo sapiens
  misc_RNA (1)...(19): siRNA sense strand
caccugccauggaugauuu

SEQ ID NO: 860603 - RNA, 19 nt, Homo sapiens
  misc_RNA (1)...(19): siRNA sense strand
uccaaggacucccaggaua

SEQ ID NO: 860604 - RNA, 19 nt, Homo sapiens
  misc_RNA (1)...(19): siRNA sense strand
gcccauagccucaggaaca

SEQ ID NO: 860605 - RNA, 19 nt, Homo sapiens
  misc_RNA (1)...(19): siRNA sense strand
ugaaguggauggagagaag

SEQ ID NO: 860606 - RNA, 19 nt, Homo sapiens
  misc_RNA (1)...(19): siRNA sense strand
ugaagaaggucagcaccaa

SEQ ID NO: 860607 - RNA, 19 nt, Homo sapiens
  misc_RNA (1)...(19): siRNA sense strand
ggaaggggaugaagagaug

SEQ ID NO: 860608 - RNA, 19 nt, Homo sapiens
  misc_RNA (1)...(19): siRNA sense strand
gaggaucaccgcauugugu

SEQ ID NO: 860609 - RNA, 19 nt, Homo sapiens
  misc_RNA (1)...(19): siRNA sense strand
ggaguuguacaaugagauu

SEQ ID NO: 860610 - RNA, 19 nt, Homo sapiens
  misc_RNA (1)...(19): siRNA sense strand
ggaacauuaugcagagcuu

SEQ ID NO: 860611 - RNA, 19 nt, Homo sapiens
  misc_RNA (1)...(19): siRNA sense strand
ccgauggaguggaguugua

SEQ ID NO: 860612 - RNA, 19 nt, Homo sapiens
  misc_RNA (1)...(19): siRNA sense strand
ugaguucuaugccaaagug

SEQ ID NO: 860613 - RNA, 19 nt, Homo sapiens
  misc_RNA (1)...(19): siRNA sense strand
gagguguggucauauuaca

SEQ ID NO: 860614 - RNA, 19 nt, Homo sapiens
  misc_RNA (1)...(19): siRNA sense strand
gggagguguggucauauua

SEQ ID NO: 860615 - RNA, 19 nt, Homo sapiens
  misc_RNA (1)...(19): siRNA sense strand
cuccagaacuccaccaaga

SEQ ID NO: 860616 - RNA, 19 nt, Homo sapiens
  misc_RNA (1)...(19): siRNA sense strand
guguucagcugcaagaaug

SEQ ID NO: 860617 - RNA, 19 nt, Homo sapiens
  misc_RNA (1)...(19): siRNA sense strand
gaagggagcaacggcaaga

SEQ ID NO: 860618 - RNA, 19 nt, Homo sapiens
  misc_RNA (1)...(19): siRNA sense strand
uauuuaagcugaagacaac

SEQ ID NO: 860619 - RNA, 19 nt, Homo sapiens
  misc_RNA (1)...(19): siRNA sense strand
gggcaaggccaccaagaug

SEQ ID NO: 860620 - RNA, 19 nt, Homo sapiens
  misc_RNA (1)...(19): siRNA sense strand
gagcaacggcaagaaagaa

SEQ ID NO: 860621 - RNA, 19 nt, Homo sapiens
  misc_RNA (1)...(19): siRNA sense strand
agaccuggcugugcacauu

SEQ ID NO: 860622 - RNA, 19 nt, Homo sapiens
  misc_RNA (1)...(19): siRNA sense strand
gaacaggcugaucauuuca

SEQ ID NO: 860623 - RNA, 19 nt, Homo sapiens
  misc_RNA (1)...(19): siRNA sense strand
aagaagugcugagcgguuu

SEQ ID NO: 860624 - RNA, 19 nt, Homo sapiens
  misc_RNA (1)...(19): siRNA sense strand
gaggauaucaagccagugu

SEQ ID NO: 860625 - RNA, 19 nt, Homo sapiens
  misc_RNA (1)...(19): siRNA sense strand
gaaggucagcaccaagaga

SEQ ID NO: 860626 - RNA, 19 nt, Homo sapiens
  misc_RNA (1)...(19): siRNA sense strand
gcaaaggagcagggaagaa

SEQ ID NO: 860627 - RNA, 19 nt, Homo sapiens
  misc_RNA (1)...(19): siRNA sense strand
gauguccacgugcuuauug

SEQ ID NO: 860628 - RNA, 19 nt, Homo sapiens
  misc_RNA (1)...(19): siRNA sense strand
gagacccuccuguucuuaa

SEQ ID NO: 860629 - RNA, 19 nt, Homo sapiens
  misc_RNA (1)...(19): siRNA sense strand
ggagcaacggcaagaaaga

SEQ ID NO: 860630 - RNA, 19 nt, Homo sapiens
  misc_RNA (1)...(19): siRNA sense strand
ccauggaugauuuggauuu

SEQ ID NO: 860631 - RNA, 19 nt, Homo sapiens
  misc_RNA (1)...(19): siRNA sense strand
gaacauuaugcagagcuuu

SEQ ID NO: 860632 - RNA, 19 nt, Homo sapiens
  misc_RNA (1)...(19): siRNA sense strand
ggacccaugugagcaaucu

SEQ ID NO: 860633 - RNA, 19 nt, Homo sapiens
  misc_RNA (1)...(19): siRNA sense strand
gcggagguuugaccacaug

SEQ ID NO: 860634 - RNA, 19 nt, Homo sapiens
  misc_RNA (1)...(19): siRNA sense strand
gugaauguccgagaacuga

SEQ ID NO: 860635 - RNA, 19 nt, Homo sapiens
  misc_RNA (1)...(19): siRNA sense strand
ggcaaggccaccaagauga

SEQ ID NO: 860636 - RNA, 19 nt, Homo sapiens
  misc_RNA (1)...(19): siRNA sense strand
cagaaccaaccugauauuu

SEQ ID NO: 860637 - RNA, 19 nt, Homo sapiens
  misc_RNA (1)...(19): siRNA sense strand
uaacaucgagggcguugau

SEQ ID NO: 860638 - RNA, 19 nt, Homo sapiens
  misc_RNA (1)...(19): siRNA sense strand
augcagagcuuuugaagaa

SEQ ID NO: 860639 - RNA, 19 nt, Homo sapiens
  misc_RNA (1)...(19): siRNA sense strand
agagaucggcugccuguga

SEQ ID NO: 860640 - RNA, 19 nt, Homo sapiens
  misc_RNA (1)...(19): siRNA sense strand
uugcugaccaucuauuuaa

SEQ ID NO: 860641 - RNA, 19 nt, Homo sapiens
  misc_RNA (1)...(19): siRNA sense strand
guugcugaccaucuauuua

SEQ ID NO: 860642 - RNA, 19 nt, Homo sapiens
  misc_RNA (1)...(19): siRNA sense strand
gaaaauggaaggaaaaggu

SEQ ID NO: 860643 - RNA, 19 nt, Homo sapiens
  misc_RNA (1)...(19): siRNA sense strand
ccaaagugaacuccaagga

SEQ ID NO: 860644 - RNA, 19 nt, Homo sapiens
  misc_RNA (1)...(19): siRNA sense strand
ucagaguucaugaauauca

SEQ ID NO: 860645 - RNA, 19 nt, Homo sapiens
  misc_RNA (1)...(19): siRNA sense strand
uuaagauucugggcacuga

SEQ ID NO: 860646 - RNA, 19 nt, Homo sapiens
  misc_RNA (1)...(19): siRNA sense strand
gagaacugagccuggauga

SEQ ID NO: 860647 - RNA, 19 nt, Homo sapiens
  misc_RNA (1)...(19): siRNA sense strand
uacaaucaaugacaucucu

SEQ ID NO: 860648 - RNA, 19 nt, Homo sapiens
  misc_RNA (1)...(19): siRNA sense strand
uauugaggaucaccgcauu

SEQ ID NO: 860649 - RNA, 19 nt, Homo sapiens
  misc_RNA (1)...(19): siRNA sense strand
gagcaaguagcugccauug

SEQ ID NO: 860650 - RNA, 19 nt, Homo sapiens
  misc_RNA (1)...(19): siRNA sense strand
guggcugucuguggacuuu

SEQ ID NO: 860651 - RNA, 19 nt, Homo sapiens
  misc_RNA (1)...(19): siRNA sense strand
ugccauggaugauuuggau

SEQ ID NO: 860652 - RNA, 19 nt, Homo sapiens
  misc_RNA (1)...(19): siRNA sense strand
caugggaguuagggagauu

SEQ ID NO: 860653 - RNA, 19 nt, Homo sapiens
  misc_RNA (1)...(19): siRNA sense strand
agaaccaaccugauauuuc

SEQ ID NO: 860654 - RNA, 19 nt, Homo sapiens
  misc_RNA (1)...(19): siRNA sense strand
ggcugucuguggacuuuga

SEQ ID NO: 860655 - RNA, 19 nt, Homo sapiens
  misc_RNA (1)...(19): siRNA sense strand
gcaaggccaccaagaugag

SEQ ID NO: 860656 - RNA, 19 nt, Homo sapiens
  misc_RNA (1)...(19): siRNA sense strand
gaucaccgcauuguguuca

SEQ ID NO: 860657 - RNA, 19 nt, Homo sapiens
  misc_RNA (1)...(19): siRNA sense strand
ccauucggguuguuaacau

SEQ ID NO: 860658 - RNA, 19 nt, Homo sapiens
  misc_RNA (1)...(19): siRNA sense strand
gaugaccgugguacaauca

SEQ ID NO: 860659 - RNA, 19 nt, Homo sapiens
  misc_RNA (1)...(19): siRNA sense strand
gugagaaaauggaaggaaa

SEQ ID NO: 860660 - RNA, 19 nt, Homo sapiens
  misc_RNA (1)...(19): siRNA sense strand
uuugauaacuggagagacu

SEQ ID NO: 860661 - RNA, 19 nt, Homo sapiens
  misc_RNA (1)...(19): siRNA sense strand
uaacugugggcgaugagaa

SEQ ID NO: 860662 - RNA, 19 nt, Homo sapiens
  misc_RNA (1)...(19): siRNA sense strand
agaagaauaaccugaaucu

SEQ ID NO: 860663 - RNA, 19 nt, Homo sapiens
  misc_RNA (1)...(19): siRNA sense strand
ccagaacuccaccaagauc

SEQ ID NO: 860664 - RNA, 19 nt, Homo sapiens
  misc_RNA (1)...(19): siRNA sense strand
caacggcaagaaagaagug

SEQ ID NO: 860665 - RNA, 19 nt, Homo sapiens
  misc_RNA (1)...(19): siRNA sense strand
gaucaugcugggcccauuc

SEQ ID NO: 860666 - RNA, 19 nt, Homo sapiens
  misc_RNA (1)...(19): siRNA sense strand
ccacgugcuuauugaggau

SEQ ID NO: 860667 - RNA, 19 nt, Homo sapiens
  misc_RNA (1)...(19): siRNA sense strand
cugcaagaaugccgaugga

SEQ ID NO: 860668 - RNA, 19 nt, Homo sapiens
  misc_RNA (1)...(19): siRNA sense strand
cccgcucuauuacuuguuu

SEQ ID NO: 860669 - RNA, 19 nt, Homo sapiens
  misc_RNA (1)...(19): siRNA sense strand
gaagaauaaccugaaucug

SEQ ID NO: 860670 - RNA, 19 nt, Homo sapiens
  misc_RNA (1)...(19): siRNA sense strand
accaagauccugcagaaga

SEQ ID NO: 860671 - RNA, 19 nt, Homo sapiens
  misc_RNA (1)...(19): siRNA sense strand
gaucauguggaagcaguga

SEQ ID NO: 860672 - RNA, 19 nt, Homo sapiens
  misc_RNA (1)...(19): siRNA sense strand
acagaaccaaccugauauu

SEQ ID NO: 860673 - RNA, 19 nt, Homo sapiens
  misc_RNA (1)...(19): siRNA sense strand
cauggaugauuuggauuuc

SEQ ID NO: 860674 - RNA, 19 nt, Homo sapiens
  misc_RNA (1)...(19): siRNA sense strand
gugguggacucuucuuacu

SEQ ID NO: 860675 - RNA, 19 nt, Homo sapiens
  misc_RNA (1)...(19): siRNA sense strand
cgcagaagaugaugcugua

SEQ ID NO: 860676 - RNA, 19 nt, Homo sapiens
  misc_RNA (1)...(19): siRNA sense strand
ggagaucaagcucuacuuc

SEQ ID NO: 860677 - RNA, 19 nt, Homo sapiens
  misc_RNA (1)...(19): siRNA sense strand
ugacgcugcugcugucugu

SEQ ID NO: 860678 - RNA, 19 nt, Homo sapiens
  misc_RNA (1)...(19): siRNA sense strand
gagaucaagcucuacuuca

SEQ ID NO: 860679 - RNA, 19 nt, Homo sapiens
  misc_RNA (1)...(19): siRNA sense strand
gaucaagcucuacuucauc

SEQ ID NO: 860680 - RNA, 19 nt, Homo sapiens
  misc_RNA (1)...(19): siRNA sense strand
agaucaagcucuacuucau

SEQ ID NO: 860681 - RNA, 19 nt, Homo sapiens
  misc_RNA (1)...(19): siRNA sense strand
caagcucuacuucaucuuc

SEQ ID NO: 860682 - RNA, 19 nt, Homo sapiens
  misc_RNA (1)...(19): siRNA sense strand
gugguuccuuuacaucuuc

SEQ ID NO: 860683 - RNA, 19 nt, Homo sapiens
  misc_RNA (1)...(19): siRNA sense strand
ggccucaccuucuucuacu

SEQ ID NO: 860684 - RNA, 19 nt, Homo sapiens
  misc_RNA (1)...(19): siRNA sense strand
ucaccuucuucuacugcua

SEQ ID NO: 860685 - RNA, 19 nt, Homo sapiens
  misc_RNA (1)...(19): siRNA sense strand
gaucggcgugugcaucauc

SEQ ID NO: 860686 - RNA, 19 nt, Homo sapiens
  misc_RNA (1)...(19): siRNA sense strand
ugugguuccuuuacaucuu

SEQ ID NO: 860687 - RNA, 19 nt, Homo sapiens
  misc_RNA (1)...(19): siRNA sense strand
gcaacaaccuuggcucuuu

SEQ ID NO: 860688 - RNA, 19 nt, Homo sapiens
  misc_RNA (1)...(19): siRNA sense strand
gaacuggacuccucaagcu

SEQ ID NO: 860689 - RNA, 19 nt, Homo sapiens
  misc_RNA (1)...(19): siRNA sense strand
gaaaucaccagaagaugaa

SEQ ID NO: 860690 - RNA, 19 nt, Homo sapiens
  misc_RNA (1)...(19): siRNA sense strand
ggaggcagcaaccaucuua

SEQ ID NO: 860691 - RNA, 19 nt, Homo sapiens
  misc_RNA (1)...(19): siRNA sense strand
gaaagacgaagcccaaauc

SEQ ID NO: 860692 - RNA, 19 nt, Homo sapiens
  misc_RNA (1)...(19): siRNA sense strand
gaccagagccggagaaagg

SEQ ID NO: 860693 - RNA, 19 nt, Homo sapiens
  misc_RNA (1)...(19): siRNA sense strand
ggaaagacgaagcccaaau

SEQ ID NO: 860694 - RNA, 19 nt, Homo sapiens
  misc_RNA (1)...(19): siRNA sense strand
agaaaucaccagaagauga

SEQ ID NO: 860695 - RNA, 19 nt, Homo sapiens
  misc_RNA (1)...(19): siRNA sense strand
gcuaugcucuaccugaaag

SEQ ID NO: 860696 - RNA, 19 nt, Homo sapiens
  misc_RNA (1)...(19): siRNA sense strand
ucagaaaucaccagaagau

SEQ ID NO: 860697 - RNA, 19 nt, Homo sapiens
  misc_RNA (1)...(19): siRNA sense strand
caacaaccuuggcucuuuu

SEQ ID NO: 860698 - RNA, 19 nt, Homo sapiens
  misc_RNA (1)...(19): siRNA sense strand
aagcuaugcucuaccugaa

SEQ ID NO: 860699 - RNA, 19 nt, Homo sapiens
  misc_RNA (1)...(19): siRNA sense strand
uggcgucccuucagaaauc

SEQ ID NO: 860700 - RNA, 19 nt, Homo sapiens
  misc_RNA (1)...(19): siRNA sense strand
uuacuggcgucccuucaga

SEQ ID NO: 860701 - RNA, 19 nt, Homo sapiens
  misc_RNA (1)...(19): siRNA sense strand
cagagacuguuggagagaa

SEQ ID NO: 860702 - RNA, 19 nt, Homo sapiens
  misc_RNA (1)...(19): siRNA sense strand
ccaaauccccaacuacuaa

SEQ ID NO: 860703 - RNA, 19 nt, Homo sapiens
  misc_RNA (1)...(19): siRNA sense strand
gcagagacuguuggagaga

SEQ ID NO: 860704 - RNA, 19 nt, Homo sapiens
  misc_RNA (1)...(19): siRNA sense strand
gagaaggcauuguauaugg

SEQ ID NO: 860705 - RNA, 19 nt, Homo sapiens
  misc_RNA (1)...(19): siRNA sense strand
ccgagaagaugcuccagua

SEQ ID NO: 860706 - RNA, 19 nt, Homo sapiens
  misc_RNA (1)...(19): siRNA sense strand
gaggagaaggcauuguaua

SEQ ID NO: 860707 - RNA, 19 nt, Homo sapiens
  misc_RNA (1)...(19): siRNA sense strand
ggagaaggcauuguauaug

SEQ ID NO: 860708 - RNA, 19 nt, Homo sapiens
  misc_RNA (1)...(19): siRNA sense strand
guaccgaggagaaggcauu

SEQ ID NO: 860709 - RNA, 19 nt, Homo sapiens
  misc_RNA (1)...(19): siRNA sense strand
guuggaggccuacgaguga

SEQ ID NO: 860710 - RNA, 19 nt, Homo sapiens
  misc_RNA (1)...(19): siRNA sense strand
ccgaggagaaggcauugua

SEQ ID NO: 860711 - RNA, 19 nt, Homo sapiens
  misc_RNA (1)...(19): siRNA sense strand
cauuguauaugggacacua

SEQ ID NO: 860712 - RNA, 19 nt, Homo sapiens
  misc_RNA (1)...(19): siRNA sense strand
aggagaaggcauuguauau

SEQ ID NO: 860713 - RNA, 19 nt, Homo sapiens
  misc_RNA (1)...(19): siRNA sense strand
cgaggagaaggcauuguau

SEQ ID NO: 860714 - RNA, 19 nt, Homo sapiens
  misc_RNA (1)...(19): siRNA sense strand
gaaauuauccaaagcauca

SEQ ID NO: 860715 - RNA, 19 nt, Homo sapiens
  misc_RNA (1)...(19): siRNA sense strand
gagaaggcauuguauaugg

SEQ ID NO: 860716 - RNA, 19 nt, Homo sapiens
  misc_RNA (1)...(19): siRNA sense strand
ccgagaagaugcuccagua

SEQ ID NO: 860717 - RNA, 19 nt, Homo sapiens
  misc_RNA (1)...(19): siRNA sense strand
agaaagcagugaagcaauu

SEQ ID NO: 860718 - RNA, 19 nt, Homo sapiens
  misc_RNA (1)...(19): siRNA sense strand
gaagcaauuccaugaguaa

SEQ ID NO: 860719 - RNA, 19 nt, Homo sapiens
  misc_RNA (1)...(19): siRNA sense strand
gcgguuaccucccacagaa

SEQ ID NO: 860720 - RNA, 19 nt, Homo sapiens
  misc_RNA (1)...(19): siRNA sense strand
gaagugggaugagaaugug

SEQ ID NO: 860721 - RNA, 19 nt, Homo sapiens
  misc_RNA (1)...(19): siRNA sense strand
gaggagaaggcauuguaua

SEQ ID NO: 860722 - RNA, 19 nt, Homo sapiens
  misc_RNA (1)...(19): siRNA sense strand
ugaagcaauuccaugagua

SEQ ID NO: 860723 - RNA, 19 nt, Homo sapiens
  misc_RNA (1)...(19): siRNA sense strand
ggagaaggcauuguauaug

SEQ ID NO: 860724 - RNA, 19 nt, Homo sapiens
  misc_RNA (1)...(19): siRNA sense strand
gugaagcaauuccaugagu

SEQ ID NO: 860725 - RNA, 19 nt, Homo sapiens
  misc_RNA (1)...(19): siRNA sense strand
cgagugaagugggaugaga

SEQ ID NO: 860726 - RNA, 19 nt, Homo sapiens
  misc_RNA (1)...(19): siRNA sense strand
gaagccagguuuugugaga

SEQ ID NO: 860727 - RNA, 19 nt, Homo sapiens
  misc_RNA (1)...(19): siRNA sense strand
guaccgaggagaaggcauu

SEQ ID NO: 860728 - RNA, 19 nt, Homo sapiens
  misc_RNA (1)...(19): siRNA sense strand
guuggaggccuacgaguga

SEQ ID NO: 860729 - RNA, 19 nt, Homo sapiens
  misc_RNA (1)...(19): siRNA sense strand
gaaagcagugaagcaauuc

SEQ ID NO: 860730 - RNA, 19 nt, Homo sapiens
  misc_RNA (1)...(19): siRNA sense strand
ugaagugggaugagaaugu

SEQ ID NO: 860731 - RNA, 19 nt, Homo sapiens
  misc_RNA (1)...(19): siRNA sense strand
ccgaggagaaggcauugua

SEQ ID NO: 860732 - RNA, 19 nt, Homo sapiens
  misc_RNA (1)...(19): siRNA sense strand
ccauguggagcauccguua

SEQ ID NO: 860733 - RNA, 19 nt, Homo sapiens
  misc_RNA (1)...(19): siRNA sense strand
cauuguauaugggacacua

SEQ ID NO: 860734 - RNA, 19 nt, Homo sapiens
  misc_RNA (1)...(19): siRNA sense strand
ucagaaagcagugaagcaa

SEQ ID NO: 860735 - RNA, 19 nt, Homo sapiens
  misc_RNA (1)...(19): siRNA sense strand
augagaaugugaccgguuu

SEQ ID NO: 860736 - RNA, 19 nt, Homo sapiens
  misc_RNA (1)...(19): siRNA sense strand
cuggucacauucuuccaua

SEQ ID NO: 860737 - RNA, 19 nt, Homo sapiens
  misc_RNA (1)...(19): siRNA sense strand
cagugaagcaauuccauga

SEQ ID NO: 860738 - RNA, 19 nt, Homo sapiens
  misc_RNA (1)...(19): siRNA sense strand
aggagaaggcauuguauau

SEQ ID NO: 860739 - RNA, 19 nt, Homo sapiens
  misc_RNA (1)...(19): siRNA sense strand
gagugaagugggaugagaa

SEQ ID NO: 860740 - RNA, 19 nt, Homo sapiens
  misc_RNA (1)...(19): siRNA sense strand
gaaugugaccgguuuugaa

SEQ ID NO: 860741 - RNA, 19 nt, Homo sapiens
  misc_RNA (1)...(19): siRNA sense strand
ccaaccuggucacauucuu

SEQ ID NO: 860742 - RNA, 19 nt, Homo sapiens
  misc_RNA (1)...(19): siRNA sense strand
caaccuggucacauucuuc

SEQ ID NO: 860743 - RNA, 19 nt, Homo sapiens
  misc_RNA (1)...(19): siRNA sense strand
cgaggagaaggcauuguau

SEQ ID NO: 860744 - RNA, 19 nt, Homo sapiens
  misc_RNA (1)...(19): siRNA sense strand
ccagagauuuuguggacuu

SEQ ID NO: 860745 - RNA, 19 nt, Homo sapiens
  misc_RNA (1)...(19): siRNA sense strand
gggaacccaccaagaccaa

SEQ ID NO: 860746 - RNA, 19 nt, Homo sapiens
  misc_RNA (1)...(19): siRNA sense strand
cagaaagcagugaagcaau

SEQ ID NO: 860747 - RNA, 19 nt, Homo sapiens
  misc_RNA (1)...(19): siRNA sense strand
agaacgugguggacuccuu

SEQ ID NO: 860748 - RNA, 19 nt, Homo sapiens
  misc_RNA (1)...(19): siRNA sense strand
gaccaaggcuccucacaga

SEQ ID NO: 860749 - RNA, 19 nt, Homo sapiens
  misc_RNA (1)...(19): siRNA sense strand
gaaaugcugugucccuucu

SEQ ID NO: 860750 - RNA, 19 nt, Homo sapiens
  misc_RNA (1)...(19): siRNA sense strand
caaucuaugugaugucuuc

SEQ ID NO: 860751 - RNA, 19 nt, Homo sapiens
  misc_RNA (1)...(19): siRNA sense strand
ugugaugucuuccaacguu

SEQ ID NO: 860752 - RNA, 19 nt, Homo sapiens
  misc_RNA (1)...(19): siRNA sense strand
gugaugucuuccaacguua

SEQ ID NO: 860753 - RNA, 19 nt, Homo sapiens
  misc_RNA (1)...(19): siRNA sense strand
ucacagaagggcccaggaa

SEQ ID NO: 860754 - RNA, 19 nt, Homo sapiens
  misc_RNA (1)...(19): siRNA sense strand
ccaaggcuccucacagaag

SEQ ID NO: 860755 - RNA, 19 nt, Homo sapiens
  misc_RNA (1)...(19): siRNA sense strand
cagagugcaaucuauguga

SEQ ID NO: 860756 - RNA, 19 nt, Homo sapiens
  misc_RNA (1)...(19): siRNA sense strand
ucuaugugaugucuuccaa

SEQ ID NO: 860757 - RNA, 19 nt, Homo sapiens
  misc_RNA (1)...(19): siRNA sense strand
cagaagggcccaggaaguc

SEQ ID NO: 860758 - RNA, 19 nt, Homo sapiens
  misc_RNA (1)...(19): siRNA sense strand
cgccucuccugccuuguuu

SEQ ID NO: 860759 - RNA, 19 nt, Homo sapiens
  misc_RNA (1)...(19): siRNA sense strand
agagugcaaucuaugugau

SEQ ID NO: 860760 - RNA, 19 nt, Homo sapiens
  misc_RNA (1)...(19): siRNA sense strand
cuuccagagugcaaucuau

SEQ ID NO: 860761 - RNA, 19 nt, Homo sapiens
  misc_RNA (1)...(19): siRNA sense strand
ggacauagguguuccuuca

SEQ ID NO: 860762 - RNA, 19 nt, Homo sapiens
  misc_RNA (1)...(19): siRNA sense strand
ggaguggaguucuaugaga

SEQ ID NO: 860763 - RNA, 19 nt, Homo sapiens
  misc_RNA (1)...(19): siRNA sense strand
gaagugguguaccuggaaa

SEQ ID NO: 860764 - RNA, 19 nt, Homo sapiens
  misc_RNA (1)...(19): siRNA sense strand
uccaauggcucuaccagua

SEQ ID NO: 860765 - RNA, 19 nt, Homo sapiens
  misc_RNA (1)...(19): siRNA sense strand
gagcuucccugaccuuguc

SEQ ID NO: 860766 - RNA, 19 nt, Homo sapiens
  misc_RNA (1)...(19): siRNA sense strand
ggucauacaugggcauaca

SEQ ID NO: 860767 - RNA, 19 nt, Homo sapiens
  misc_RNA (1)...(19): siRNA sense strand
ggaagugguguaccuggaa

SEQ ID NO: 860768 - RNA, 19 nt, Homo sapiens
  misc_RNA (1)...(19): siRNA sense strand
ccagacacuuguuccgaau

SEQ ID NO: 860769 - RNA, 19 nt, Homo sapiens
  misc_RNA (1)...(19): siRNA sense strand
agacacuuguuccgaauca

SEQ ID NO: 860770 - RNA, 19 nt, Homo sapiens
  misc_RNA (1)...(19): siRNA sense strand
guuccgaaucaaacauuua

SEQ ID NO: 860771 - RNA, 19 nt, Homo sapiens
  misc_RNA (1)...(19): siRNA sense strand
acacaggacaggccucuug

SEQ ID NO: 860772 - RNA, 19 nt, Homo sapiens
  misc_RNA (1)...(19): siRNA sense strand
ugggagaccuagugaucaa

SEQ ID NO: 860773 - RNA, 19 nt, Homo sapiens
  misc_RNA (1)...(19): siRNA sense strand
gugguggaguggaguucua

SEQ ID NO: 860774 - RNA, 19 nt, Homo sapiens
  misc_RNA (1)...(19): siRNA sense strand
cagcauuugugcagagaca

SEQ ID NO: 860775 - RNA, 19 nt, Homo sapiens
  misc_RNA (1)...(19): siRNA sense strand
gcaggccuguuuggaguuc

SEQ ID NO: 860776 - RNA, 19 nt, Homo sapiens
  misc_RNA (1)...(19): siRNA sense strand
gagugcaggcuucccaaga

SEQ ID NO: 860777 - RNA, 19 nt, Homo sapiens
  misc_RNA (1)...(19): siRNA sense strand
acacuuguuccgaaucaaa

SEQ ID NO: 860778 - RNA, 19 nt, Homo sapiens
  misc_RNA (1)...(19): siRNA sense strand
ggagaccuagugaucaaca

SEQ ID NO: 860779 - RNA, 19 nt, Homo sapiens
  misc_RNA (1)...(19): siRNA sense strand
ccagggaagugguguaccu

SEQ ID NO: 860780 - RNA, 19 nt, Homo sapiens
  misc_RNA (1)...(19): siRNA sense strand
guggaguggaguucuauga

SEQ ID NO: 860781 - RNA, 19 nt, Homo sapiens
  misc_RNA (1)...(19): siRNA sense strand
ccaggauucucucacucau

SEQ ID NO: 860782 - RNA, 19 nt, Homo sapiens
  misc_RNA (1)...(19): siRNA sense strand
cuacaggacauagguguuc

SEQ ID NO: 860783 - RNA, 19 nt, Homo sapiens
  misc_RNA (1)...(19): siRNA sense strand
caauggcucuaccaguacu

SEQ ID NO: 860784 - RNA, 19 nt, Homo sapiens
  misc_RNA (1)...(19): siRNA sense strand
ucaaacauuuacccuacac

SEQ ID NO: 860785 - RNA, 19 nt, Homo sapiens
  misc_RNA (1)...(19): siRNA sense strand
aaaguagccucuucugcaa

SEQ ID NO: 860786 - RNA, 19 nt, Homo sapiens
  misc_RNA (1)...(19): siRNA sense strand
gcacuucgccaccaaaggu

SEQ ID NO: 860787 - RNA, 19 nt, Homo sapiens
  misc_RNA (1)...(19): siRNA sense strand
gcuugcaggcuauggauuu

SEQ ID NO: 860788 - RNA, 19 nt, Homo sapiens
  misc_RNA (1)...(19): siRNA sense strand
cauaggcgcuguucucuua

SEQ ID NO: 860789 - RNA, 19 nt, Homo sapiens
  misc_RNA (1)...(19): siRNA sense strand
ggaacaagcugguguagau

SEQ ID NO: 860790 - RNA, 19 nt, Homo sapiens
  misc_RNA (1)...(19): siRNA sense strand
ugaaagcuuugaagaugua

SEQ ID NO: 860791 - RNA, 19 nt, Homo sapiens
  misc_RNA (1)...(19): siRNA sense strand
agaccucagucaccuauua

SEQ ID NO: 860792 - RNA, 19 nt, Homo sapiens
  misc_RNA (1)...(19): siRNA sense strand
guaggacacucuucugaug

SEQ ID NO: 860793 - RNA, 19 nt, Homo sapiens
  misc_RNA (1)...(19): siRNA sense strand
gcaaagcgcaacuccuuga

SEQ ID NO: 860794 - RNA, 19 nt, Homo sapiens
  misc_RNA (1)...(19): siRNA sense strand
gcgcuguucucuuagguuu

SEQ ID NO: 860795 - RNA, 19 nt, Homo sapiens
  misc_RNA (1)...(19): siRNA sense strand
cuaaagcaguacuacauug

SEQ ID NO: 860796 - RNA, 19 nt, Homo sapiens
  misc_RNA (1)...(19): siRNA sense strand
guacuacauuggugauauc

SEQ ID NO: 860797 - RNA, 19 nt, Homo sapiens
  misc_RNA (1)...(19): siRNA sense strand
agugaaagcuuugaagaug

SEQ ID NO: 860798 - RNA, 19 nt, Homo sapiens
  misc_RNA (1)...(19): siRNA sense strand
ugaaggaacuguggcuugu

SEQ ID NO: 860799 - RNA, 19 nt, Homo sapiens
  misc_RNA (1)...(19): siRNA sense strand
gcuaaagcaguacuacauu

SEQ ID NO: 860800 - RNA, 19 nt, Homo sapiens
  misc_RNA (1)...(19): siRNA sense strand
caagugaaagcuuugaaga

SEQ ID NO: 860801 - RNA, 19 nt, Homo sapiens
  misc_RNA (1)...(19): siRNA sense strand
gugaaagcuuugaagaugu

SEQ ID NO: 860802 - RNA, 19 nt, Homo sapiens
  misc_RNA (1)...(19): siRNA sense strand
ucucuuagguuuccuguac

SEQ ID NO: 860803 - RNA, 19 nt, Homo sapiens
  misc_RNA (1)...(19): siRNA sense strand
aaggaacuguggcuuguga

SEQ ID NO: 860804 - RNA, 19 nt, Homo sapiens
  misc_RNA (1)...(19): siRNA sense strand
cuacacaucggaaagcaaa

SEQ ID NO: 860805 - RNA, 19 nt, Homo sapiens
  misc_RNA (1)...(19): siRNA sense strand
cgagcacccuggaggagaa

SEQ ID NO: 860806 - RNA, 19 nt, Homo sapiens
  misc_RNA (1)...(19): siRNA sense strand
cuacauuggugauauccau

SEQ ID NO: 860807 - RNA, 19 nt, Homo sapiens
  misc_RNA (1)...(19): siRNA sense strand
agaugcaagugaaagcuuu

SEQ ID NO: 860808 - RNA, 19 nt, Homo sapiens
  misc_RNA (1)...(19): siRNA sense strand
gaacaagcugguguagaug

SEQ ID NO: 860809 - RNA, 19 nt, Homo sapiens
  misc_RNA (1)...(19): siRNA sense strand
gcaagugaaagcuuugaag

SEQ ID NO: 860810 - RNA, 19 nt, Homo sapiens
  misc_RNA (1)...(19): siRNA sense strand
gggcgagucuacgauguca

SEQ ID NO: 860811 - RNA, 19 nt, Homo sapiens
  misc_RNA (1)...(19): siRNA sense strand
uggcaaagcgcaacuccuu

SEQ ID NO: 860812 - RNA, 19 nt, Homo sapiens
  misc_RNA (1)...(19): siRNA sense strand
gaccuuaaaccugaaagug

SEQ ID NO: 860813 - RNA, 19 nt, Homo sapiens
  misc_RNA (1)...(19): siRNA sense strand
caucauaggcgcuguucuc

SEQ ID NO: 860814 - RNA, 19 nt, Homo sapiens
  misc_RNA (1)...(19): siRNA sense strand
gaagucgagaccucaguca

SEQ ID NO: 860815 - RNA, 19 nt, Homo sapiens
  misc_RNA (1)...(19): siRNA sense strand
ugguguagaugcaagugaa

SEQ ID NO: 860816 - RNA, 19 nt, Homo sapiens
  misc_RNA (1)...(19): siRNA sense strand
gcuggaacaagcuggugua

SEQ ID NO: 860817 - RNA, 19 nt, Homo sapiens
  misc_RNA (1)...(19): siRNA sense strand
caaagcgcaacuccuugaa

SEQ ID NO: 860818 - RNA, 19 nt, Homo sapiens
  misc_RNA (1)...(19): siRNA sense strand
aaaaguugcugggcauauu

SEQ ID NO: 860819 - RNA, 19 nt, Homo sapiens
  misc_RNA (1)...(19): siRNA sense strand
gaugccagagaaaugcuaa

SEQ ID NO: 860820 - RNA, 19 nt, Homo sapiens
  misc_RNA (1)...(19): siRNA sense strand
uaaagcaguacuacauugg

SEQ ID NO: 860821 - RNA, 19 nt, Homo sapiens
  misc_RNA (1)...(19): siRNA sense strand
ggaacuguggcuugugauc

SEQ ID NO: 860822 - RNA, 19 nt, Homo sapiens
  misc_RNA (1)...(19): siRNA sense strand
ccauccgagugaccuuaaa

SEQ ID NO: 860823 - RNA, 19 nt, Homo sapiens
  misc_RNA (1)...(19): siRNA sense strand
aguacuacauuggugauau

SEQ ID NO: 860824 - RNA, 19 nt, Homo sapiens
  misc_RNA (1)...(19): siRNA sense strand
aaaguugcugggcauauug

SEQ ID NO: 860825 - RNA, 19 nt, Homo sapiens
  misc_RNA (1)...(19): siRNA sense strand
cgagaccucagucaccuau

SEQ ID NO: 860826 - RNA, 19 nt, Homo sapiens
  misc_RNA (1)...(19): siRNA sense strand
gugauauccauccgaguga

SEQ ID NO: 860827 - RNA, 19 nt, Homo sapiens
  misc_RNA (1)...(19): siRNA sense strand
gguuggaggagguggcaaa

SEQ ID NO: 860828 - RNA, 19 nt, Homo sapiens
  misc_RNA (1)...(19): siRNA sense strand
gaaggaacuguggcuugug

SEQ ID NO: 860829 - RNA, 19 nt, Homo sapiens
  misc_RNA (1)...(19): siRNA sense strand
gagugaccuuaaaccugaa

SEQ ID NO: 860830 - RNA, 19 nt, Homo sapiens
  misc_RNA (1)...(19): siRNA sense strand
gcaguacuacauuggugau

SEQ ID NO: 860831 - RNA, 19 nt, Homo sapiens
  misc_RNA (1)...(19): siRNA sense strand
ggucagaacuggaugauau

SEQ ID NO: 860832 - RNA, 19 nt, Homo sapiens
  misc_RNA (1)...(19): siRNA sense strand
gagaguggaguguuuauua

SEQ ID NO: 860833 - RNA, 19 nt, Homo sapiens
  misc_RNA (1)...(19): siRNA sense strand
caacugaacuggauagagu

SEQ ID NO: 860834 - RNA, 19 nt, Homo sapiens
  misc_RNA (1)...(19): siRNA sense strand
ccacagaucaaacuaauuu

SEQ ID NO: 860835 - RNA, 19 nt, Homo sapiens
  misc_RNA (1)...(19): siRNA sense strand
gugaggaucuuacauaaau

SEQ ID NO: 860836 - RNA, 19 nt, Homo sapiens
  misc_RNA (1)...(19): siRNA sense strand
ccacggaaauuuauguuug

SEQ ID NO: 860837 - RNA, 19 nt, Homo sapiens
  misc_RNA (1)...(19): siRNA sense strand
ggaaguugcugacaguuca

SEQ ID NO: 860838 - RNA, 19 nt, Homo sapiens
  misc_RNA (1)...(19): siRNA sense strand
cuucaagacuauucuguua

SEQ ID NO: 860839 - RNA, 19 nt, Homo sapiens
  misc_RNA (1)...(19): siRNA sense strand
ucaagcagcuagaguagaa

SEQ ID NO: 860840 - RNA, 19 nt, Homo sapiens
  misc_RNA (1)...(19): siRNA sense strand
ggacacaacuggaaaugac

SEQ ID NO: 860841 - RNA, 19 nt, Homo sapiens
  misc_RNA (1)...(19): siRNA sense strand
gguugcaggugauauuaua

SEQ ID NO: 860842 - RNA, 19 nt, Homo sapiens
  misc_RNA (1)...(19): siRNA sense strand
guacaaacaaagggaauua

SEQ ID NO: 860843 - RNA, 19 nt, Homo sapiens
  misc_RNA (1)...(19): siRNA sense strand
caagggaaagccagaaaua

SEQ ID NO: 860844 - RNA, 19 nt, Homo sapiens
  misc_RNA (1)...(19): siRNA sense strand
guacacaguugaaaguugu

SEQ ID NO: 860845 - RNA, 19 nt, Homo sapiens
  misc_RNA (1)...(19): siRNA sense strand
ccagaaauacuauaaguga

SEQ ID NO: 860846 - RNA, 19 nt, Homo sapiens
  misc_RNA (1)...(19): siRNA sense strand
gagcuucuguacaaacaaa

SEQ ID NO: 860847 - RNA, 19 nt, Homo sapiens
  misc_RNA (1)...(19): siRNA sense strand
gaaaucugccugaaucuuc

SEQ ID NO: 860848 - RNA, 19 nt, Homo sapiens
  misc_RNA (1)...(19): siRNA sense strand
caacaucgcagccagaaau

SEQ ID NO: 860849 - RNA, 19 nt, Homo sapiens
  misc_RNA (1)...(19): siRNA sense strand
ucaaauagacacacuguug

SEQ ID NO: 860850 - RNA, 19 nt, Homo sapiens
  misc_RNA (1)...(19): siRNA sense strand
gaguagaaauucaagaaag

SEQ ID NO: 860851 - RNA, 19 nt, Homo sapiens
  misc_RNA (1)...(19): siRNA sense strand
ggacuaacagaagaaauuu

SEQ ID NO: 860852 - RNA, 19 nt, Homo sapiens
  misc_RNA (1)...(19): siRNA sense strand
gauauucgaacaucucaaa

SEQ ID NO: 860853 - RNA, 19 nt, Homo sapiens
  misc_RNA (1)...(19): siRNA sense strand
aaacugcgauacuauggaa

SEQ ID NO: 860854 - RNA, 19 nt, Homo sapiens
  misc_RNA (1)...(19): siRNA sense strand
gggaaagccagaaauacua

SEQ ID NO: 860855 - RNA, 19 nt, Homo sapiens
  misc_RNA (1)...(19): siRNA sense strand
guugaaaguugucagaaau

SEQ ID NO: 860856 - RNA, 19 nt, Homo sapiens
  misc_RNA (1)...(19): siRNA sense strand
ucauaucgcuggauucaca

SEQ ID NO: 860857 - RNA, 19 nt, Homo sapiens
  misc_RNA (1)...(19): siRNA sense strand
caaauagacacacuguuga

SEQ ID NO: 860858 - RNA, 19 nt, Homo sapiens
  misc_RNA (1)...(19): siRNA sense strand
ugaaaguugucagaaauga

SEQ ID NO: 860859 - RNA, 19 nt, Homo sapiens
  misc_RNA (1)...(19): siRNA sense strand
gaaaauauuuacccaaugg

SEQ ID NO: 860860 - RNA, 19 nt, Homo sapiens
  misc_RNA (1)...(19): siRNA sense strand
gaccuggacuaacagaaga

SEQ ID NO: 860861 - RNA, 19 nt, Homo sapiens
  misc_RNA (1)...(19): siRNA sense strand
uaaaguggaagucuauuug

SEQ ID NO: 860862 - RNA, 19 nt, Homo sapiens
  misc_RNA (1)...(19): siRNA sense strand
uaauagaucaccuacacua

SEQ ID NO: 860863 - RNA, 19 nt, Homo sapiens
  misc_RNA (1)...(19): siRNA sense strand
aaaugagaguggaguguuu

SEQ ID NO: 860864 - RNA, 19 nt, Homo sapiens
  misc_RNA (1)...(19): siRNA sense strand
ugacgguacuucagaacaa

SEQ ID NO: 860865 - RNA, 19 nt, Homo sapiens
  misc_RNA (1)...(19): siRNA sense strand
gaauuacagcugugcauau

SEQ ID NO: 860866 - RNA, 19 nt, Homo sapiens
  misc_RNA (1)...(19): siRNA sense strand
ggaaagccagaaauacuau

SEQ ID NO: 860867 - RNA, 19 nt, Homo sapiens
  misc_RNA (1)...(19): siRNA sense strand
gaaagccagaaauacuaua

SEQ ID NO: 860868 - RNA, 19 nt, Homo sapiens
  misc_RNA (1)...(19): siRNA sense strand
ggaagucuauuugcacaag

SEQ ID NO: 860869 - RNA, 19 nt, Homo sapiens
  misc_RNA (1)...(19): siRNA sense strand
aaagaguuauccauucaga

SEQ ID NO: 860870 - RNA, 19 nt, Homo sapiens
  misc_RNA (1)...(19): siRNA sense strand
gcauaucgucgguaucuug

SEQ ID NO: 860871 - RNA, 19 nt, Homo sapiens
  misc_RNA (1)...(19): siRNA sense strand
cagaagauauucgaacauc

SEQ ID NO: 860872 - RNA, 19 nt, Homo sapiens
  misc_RNA (1)...(19): siRNA sense strand
gaggccagccguauacgua

SEQ ID NO: 860873 - RNA, 19 nt, Homo sapiens
  misc_RNA (1)...(19): siRNA sense strand
cagaaaugacaaucaagua

SEQ ID NO: 860874 - RNA, 19 nt, Homo sapiens
  misc_RNA (1)...(19): siRNA sense strand
gaagucuauuugcacaaga

SEQ ID NO: 860875 - RNA, 19 nt, Homo sapiens
  misc_RNA (1)...(19): siRNA sense strand
gaaauauguaccaccagaa

SEQ ID NO: 860876 - RNA, 19 nt, Homo sapiens
  misc_RNA (1)...(19): siRNA sense strand
ugagauagcaaucgauguu

SEQ ID NO: 860877 - RNA, 19 nt, Homo sapiens
  misc_RNA (1)...(19): siRNA sense strand
ccccaaaacuugaugauuu

SEQ ID NO: 860878 - RNA, 19 nt, Homo sapiens
  misc_RNA (1)...(19): siRNA sense strand
accaggagcuucuguacaa

SEQ ID NO: 860879 - RNA, 19 nt, Homo sapiens
  misc_RNA (1)...(19): siRNA sense strand
ccacaggacacaacuggaa

SEQ ID NO: 860880 - RNA, 19 nt, Homo sapiens
  misc_RNA (1)...(19): siRNA sense strand
cacggaaauuuauguuuga

SEQ ID NO: 860881 - RNA, 19 nt, Homo sapiens
  misc_RNA (1)...(19): siRNA sense strand
cauagaggccagccguaua

SEQ ID NO: 860882 - RNA, 19 nt, Homo sapiens
  misc_RNA (1)...(19): siRNA sense strand
ggcacagugucagugauua

SEQ ID NO: 860883 - RNA, 19 nt, Homo sapiens
  misc_RNA (1)...(19): siRNA sense strand
ugucagugauuauguggaa

SEQ ID NO: 860884 - RNA, 19 nt, Homo sapiens
  misc_RNA (1)...(19): siRNA sense strand
gcacagugucagugauuau

SEQ ID NO: 860885 - RNA, 19 nt, Homo sapiens
  misc_RNA (1)...(19): siRNA sense strand
gaaagaaaaccgugaagau

SEQ ID NO: 860886 - RNA, 19 nt, Homo sapiens
  misc_RNA (1)...(19): siRNA sense strand
gaacuggauagagugcaua

SEQ ID NO: 860887 - RNA, 19 nt, Homo sapiens
  misc_RNA (1)...(19): siRNA sense strand
ucagaacaaccauuuauag

SEQ ID NO: 860888 - RNA, 19 nt, Homo sapiens
  misc_RNA (1)...(19): siRNA sense strand
ggaaaucugccugaaucuu

SEQ ID NO: 860889 - RNA, 19 nt, Homo sapiens
  misc_RNA (1)...(19): siRNA sense strand
uacuaggucugaaccauga

SEQ ID NO: 860890 - RNA, 19 nt, Homo sapiens
  misc_RNA (1)...(19): siRNA sense strand
auucucagccugcgaaaua

SEQ ID NO: 860891 - RNA, 19 nt, Homo sapiens
  misc_RNA (1)...(19): siRNA sense strand
gaauggagacugccaaagc

SEQ ID NO: 860892 - RNA, 19 nt, Homo sapiens
  misc_RNA (1)...(19): siRNA sense strand
ggagacugccaaagcuaaa

SEQ ID NO: 860893 - RNA, 19 nt, Homo sapiens
  misc_RNA (1)...(19): siRNA sense strand
uuggauaucuguaauuugg

SEQ ID NO: 860894 - RNA, 19 nt, Homo sapiens
  misc_RNA (1)...(19): siRNA sense strand
gagugcauaucgucgguau

SEQ ID NO: 860895 - RNA, 19 nt, Homo sapiens
  misc_RNA (1)...(19): siRNA sense strand
gcccgaagccuuggacauu

SEQ ID NO: 860896 - RNA, 19 nt, Homo sapiens
  misc_RNA (1)...(19): siRNA sense strand
cagcuagaguagaaauuca

SEQ ID NO: 860897 - RNA, 19 nt, Homo sapiens
  misc_RNA (1)...(19): siRNA sense strand
gcagcuagaguagaaauuc

SEQ ID NO: 860898 - RNA, 19 nt, Homo sapiens
  misc_RNA (1)...(19): siRNA sense strand
guuuauuacuggucauaga

SEQ ID NO: 860899 - RNA, 19 nt, Homo sapiens
  misc_RNA (1)...(19): siRNA sense strand
caauggaaaucugccugaa

SEQ ID NO: 860900 - RNA, 19 nt, Homo sapiens
  misc_RNA (1)...(19): siRNA sense strand
caacuggaaaugaccgauu

SEQ ID NO: 860901 - RNA, 19 nt, Homo sapiens
  misc_RNA (1)...(19): siRNA sense strand
cuguugaccuccaugaauu

SEQ ID NO: 860902 - RNA, 19 nt, Homo sapiens
  misc_RNA (1)...(19): siRNA sense strand
ucgaacaucucaaauagac

SEQ ID NO: 860903 - RNA, 19 nt, Homo sapiens
  misc_RNA (1)...(19): siRNA sense strand
agagucagcuguggagaga

SEQ ID NO: 860904 - RNA, 19 nt, Homo sapiens
  misc_RNA (1)...(19): siRNA sense strand
gcaagggaaagccagaaau

SEQ ID NO: 860905 - RNA, 19 nt, Homo sapiens
  misc_RNA (1)...(19): siRNA sense strand
ucacauugcugacgguacu

SEQ ID NO: 860906 - RNA, 19 nt, Homo sapiens
  misc_RNA (1)...(19): siRNA sense strand
ggucauaucgcuggauuca

SEQ ID NO: 860907 - RNA, 19 nt, Homo sapiens
  misc_RNA (1)...(19): siRNA sense strand
ugaaccauaucagaccuuu

SEQ ID NO: 860908 - RNA, 19 nt, Homo sapiens
  misc_RNA (1)...(19): siRNA sense strand
uuagugaccaguauaauuc

SEQ ID NO: 860909 - RNA, 19 nt, Homo sapiens
  misc_RNA (1)...(19): siRNA sense strand
guguuuauccugaaaguau

SEQ ID NO: 860910 - RNA, 19 nt, Homo sapiens
  misc_RNA (1)...(19): siRNA sense strand
gaggaucuuacauaaauca

SEQ ID NO: 860911 - RNA, 19 nt, Homo sapiens
  misc_RNA (1)...(19): siRNA sense strand
caaaugagaguggaguguu

SEQ ID NO: 860912 - RNA, 19 nt, Homo sapiens
  misc_RNA (1)...(19): siRNA sense strand
gaugaugagccugugaauu

SEQ ID NO: 860913 - RNA, 19 nt, Homo sapiens
  misc_RNA (1)...(19): siRNA sense strand
aaucaaaacugcgauacua

SEQ ID NO: 860914 - RNA, 19 nt, Homo sapiens
  misc_RNA (1)...(19): siRNA sense strand
aaguuuggcuuaauagauc

SEQ ID NO: 860915 - RNA, 19 nt, Homo sapiens
  misc_RNA (1)...(19): siRNA sense strand
ucucaguauuuccaaacua

SEQ ID NO: 860916 - RNA, 19 nt, Homo sapiens
  misc_RNA (1)...(19): siRNA sense strand
ccugugaauucucaguauu

SEQ ID NO: 860917 - RNA, 19 nt, Homo sapiens
  misc_RNA (1)...(19): siRNA sense strand
gauuuauaguccagagaau

SEQ ID NO: 860918 - RNA, 19 nt, Homo sapiens
  misc_RNA (1)...(19): siRNA sense strand
auucgaacaucucaaauag

SEQ ID NO: 860919 - RNA, 19 nt, Homo sapiens
  misc_RNA (1)...(19): siRNA sense strand
cuuaauagaucaccuacac

SEQ ID NO: 860920 - RNA, 19 nt, Homo sapiens
  misc_RNA (1)...(19): siRNA sense strand
guuauuggccuuuuaguuu

SEQ ID NO: 860921 - RNA, 19 nt, Homo sapiens
  misc_RNA (1)...(19): siRNA sense strand
ugaauuacagcugugcaua

SEQ ID NO: 860922 - RNA, 19 nt, Homo sapiens
  misc_RNA (1)...(19): siRNA sense strand
uggacuaacagaagaaauu

SEQ ID NO: 860923 - RNA, 19 nt, Homo sapiens
  misc_RNA (1)...(19): siRNA sense strand
cccgaagccuuggacauuu

SEQ ID NO: 860924 - RNA, 19 nt, Homo sapiens
  misc_RNA (1)...(19): siRNA sense strand
caaacaaagggaauuaaac

SEQ ID NO: 860925 - RNA, 19 nt, Homo sapiens
  misc_RNA (1)...(19): siRNA sense strand
agaacaaccauuuauagug

SEQ ID NO: 860926 - RNA, 19 nt, Homo sapiens
  misc_RNA (1)...(19): siRNA sense strand
aaaguuugcggguugguuu

SEQ ID NO: 860927 - RNA, 19 nt, Homo sapiens
  misc_RNA (1)...(19): siRNA sense strand
gcgguugcaggugauauua

SEQ ID NO: 860928 - RNA, 19 nt, Homo sapiens
  misc_RNA (1)...(19): siRNA sense strand
gcggguugguuuaguucuu

SEQ ID NO: 860929 - RNA, 19 nt, Homo sapiens
  misc_RNA (1)...(19): siRNA sense strand
augaugagccugugaauuc

SEQ ID NO: 860930 - RNA, 19 nt, Homo sapiens
  misc_RNA (1)...(19): siRNA sense strand
uugugaggaucuuacauaa

SEQ ID NO: 860931 - RNA, 19 nt, Homo sapiens
  misc_RNA (1)...(19): siRNA sense strand
gaagagagguccaaauaag

SEQ ID NO: 860932 - RNA, 19 nt, Homo sapiens
  misc_RNA (1)...(19): siRNA sense strand
ggacaucacuggagaggaa

SEQ ID NO: 860933 - RNA, 19 nt, Homo sapiens
  misc_RNA (1)...(19): siRNA sense strand
gagaagagagguccaaaua

SEQ ID NO: 860934 - RNA, 19 nt, Homo sapiens
  misc_RNA (1)...(19): siRNA sense strand
ggagacacauacccaagua

SEQ ID NO: 860935 - RNA, 19 nt, Homo sapiens
  misc_RNA (1)...(19): siRNA sense strand
gauaagauccuccagaaau

SEQ ID NO: 860936 - RNA, 19 nt, Homo sapiens
  misc_RNA (1)...(19): siRNA sense strand
cgacacgccugcuguuaaa

SEQ ID NO: 860937 - RNA, 19 nt, Homo sapiens
  misc_RNA (1)...(19): siRNA sense strand
caugagaucucccacaguu

SEQ ID NO: 860938 - RNA, 19 nt, Homo sapiens
  misc_RNA (1)...(19): siRNA sense strand
gcugagcccugccugauug

SEQ ID NO: 860939 - RNA, 19 nt, Homo sapiens
  misc_RNA (1)...(19): siRNA sense strand
ccgaggagcuggacaugaa

SEQ ID NO: 860940 - RNA, 19 nt, Homo sapiens
  misc_RNA (1)...(19): siRNA sense strand
caaauaaguucuucuucca

SEQ ID NO: 860941 - RNA, 19 nt, Homo sapiens
  misc_RNA (1)...(19): siRNA sense strand
gaagccugcugaagagcua

SEQ ID NO: 860942 - RNA, 19 nt, Homo sapiens
  misc_RNA (1)...(19): siRNA sense strand
gaauauuucccugagcuua

SEQ ID NO: 860943 - RNA, 19 nt, Homo sapiens
  misc_RNA (1)...(19): siRNA sense strand
gacgacaccuauaaugaga

SEQ ID NO: 860944 - RNA, 19 nt, Homo sapiens
  misc_RNA (1)...(19): siRNA sense strand
caaauuccgaagcaucuua

SEQ ID NO: 860945 - RNA, 19 nt, Homo sapiens
  misc_RNA (1)...(19): siRNA sense strand
ggacuucuacuuggaauau

SEQ ID NO: 860946 - RNA, 19 nt, Homo sapiens
  misc_RNA (1)...(19): siRNA sense strand
ggugaauucuggcucaaug

SEQ ID NO: 860947 - RNA, 19 nt, Homo sapiens
  misc_RNA (1)...(19): siRNA sense strand
ggccaaaucguccuuaaga

SEQ ID NO: 860948 - RNA, 19 nt, Homo sapiens
  misc_RNA (1)...(19): siRNA sense strand
ggacaugaaggccauugaa

SEQ ID NO: 860949 - RNA, 19 nt, Homo sapiens
  misc_RNA (1)...(19): siRNA sense strand
uuugaucgauggcugaaua

SEQ ID NO: 860950 - RNA, 19 nt, Homo sapiens
  misc_RNA (1)...(19): siRNA sense strand
guauucagcucuuauugag

SEQ ID NO: 860951 - RNA, 19 nt, Homo sapiens
  misc_RNA (1)...(19): siRNA sense strand
gcagacagcaggaaagaag

SEQ ID NO: 860952 - RNA, 19 nt, Homo sapiens
  misc_RNA (1)...(19): siRNA sense strand
ucucauaccuggcccacuu

SEQ ID NO: 860953 - RNA, 19 nt, Homo sapiens
  misc_RNA (1)...(19): siRNA sense strand
aaagagaguggauaucauu

SEQ ID NO: 860954 - RNA, 19 nt, Homo sapiens
  misc_RNA (1)...(19): siRNA sense strand
gccaaaucguccuuaagaa

SEQ ID NO: 860955 - RNA, 19 nt, Homo sapiens
  misc_RNA (1)...(19): siRNA sense strand
ccaccguccuuuccauuug

SEQ ID NO: 860956 - RNA, 19 nt, Homo sapiens
  misc_RNA (1)...(19): siRNA sense strand
uaagaacgaccaccaggaa

SEQ ID NO: 860957 - RNA, 19 nt, Homo sapiens
  misc_RNA (1)...(19): siRNA sense strand
gaucuccaccauccucuuu

SEQ ID NO: 860958 - RNA, 19 nt, Homo sapiens
  misc_RNA (1)...(19): siRNA sense strand
gaagagcuagcccaacugu

SEQ ID NO: 860959 - RNA, 19 nt, Homo sapiens
  misc_RNA (1)...(19): siRNA sense strand
ggacgacaccuauaaugag

SEQ ID NO: 860960 - RNA, 19 nt, Homo sapiens
  misc_RNA (1)...(19): siRNA sense strand
ucaacaagcuccgcgugaa

SEQ ID NO: 860961 - RNA, 19 nt, Homo sapiens
  misc_RNA (1)...(19): siRNA sense strand
gcuagcaccugggagaaga

SEQ ID NO: 860962 - RNA, 19 nt, Homo sapiens
  misc_RNA (1)...(19): siRNA sense strand
aggaucaguuugacaguuu

SEQ ID NO: 860963 - RNA, 19 nt, Homo sapiens
  misc_RNA (1)...(19): siRNA sense strand
caugaagccugcugaagag

SEQ ID NO: 860964 - RNA, 19 nt, Homo sapiens
  misc_RNA (1)...(19): siRNA sense strand
gggccaggcuguccuaaac

SEQ ID NO: 860965 - RNA, 19 nt, Homo sapiens
  misc_RNA (1)...(19): siRNA sense strand
ucaugaagccugcugaaga

SEQ ID NO: 860966 - RNA, 19 nt, Homo sapiens
  misc_RNA (1)...(19): siRNA sense strand
cuaugugcaugaauucaaa

SEQ ID NO: 860967 - RNA, 19 nt, Homo sapiens
  misc_RNA (1)...(19): siRNA sense strand
agaagagagguccaaauaa

SEQ ID NO: 860968 - RNA, 19 nt, Homo sapiens
  misc_RNA (1)...(19): siRNA sense strand
ucaacuauguccagcagau

SEQ ID NO: 860969 - RNA, 19 nt, Homo sapiens
  misc_RNA (1)...(19): siRNA sense strand
gagcagacagcaggaaaga

SEQ ID NO: 860970 - RNA, 19 nt, Homo sapiens
  misc_RNA (1)...(19): siRNA sense strand
gaagguaugacuugcucuu

SEQ ID NO: 860971 - RNA, 19 nt, Homo sapiens
  misc_RNA (1)...(19): siRNA sense strand
caaguauucagcucuuauu

SEQ ID NO: 860972 - RNA, 19 nt, Homo sapiens
  misc_RNA (1)...(19): siRNA sense strand
ccuuugagcugcugcacuu

SEQ ID NO: 860973 - RNA, 19 nt, Homo sapiens
  misc_RNA (1)...(19): siRNA sense strand
gaacccuugucugaccuuu

SEQ ID NO: 860974 - RNA, 19 nt, Homo sapiens
  misc_RNA (1)...(19): siRNA sense strand
gaauggagaacccuugucu

SEQ ID NO: 860975 - RNA, 19 nt, Homo sapiens
  misc_RNA (1)...(19): siRNA sense strand
acacgccugcuguuaaaua

SEQ ID NO: 860976 - RNA, 19 nt, Homo sapiens
  misc_RNA (1)...(19): siRNA sense strand
gcaacaggagagaagcuuu

SEQ ID NO: 860977 - RNA, 19 nt, Homo sapiens
  misc_RNA (1)...(19): siRNA sense strand
ggagaagagagguccaaau

SEQ ID NO: 860978 - RNA, 19 nt, Homo sapiens
  misc_RNA (1)...(19): siRNA sense strand
gaacgaccaccaggaagau

SEQ ID NO: 860979 - RNA, 19 nt, Homo sapiens
  misc_RNA (1)...(19): siRNA sense strand
ggucccagauggcuucaca

SEQ ID NO: 860980 - RNA, 19 nt, Homo sapiens
  misc_RNA (1)...(19): siRNA sense strand
agagagguccaaauaaguu

SEQ ID NO: 860981 - RNA, 19 nt, Homo sapiens
  misc_RNA (1)...(19): siRNA sense strand
gguuucggcugaaguugga

SEQ ID NO: 860982 - RNA, 19 nt, Homo sapiens
  misc_RNA (1)...(19): siRNA sense strand
ggaagcagaaguauacacu

SEQ ID NO: 860983 - RNA, 19 nt, Homo sapiens
  misc_RNA (1)...(19): siRNA sense strand
ucuggaaagugaaggaguu

SEQ ID NO: 860984 - RNA, 19 nt, Homo sapiens
  misc_RNA (1)...(19): siRNA sense strand
auaagauccuccagaaauc

SEQ ID NO: 860985 - RNA, 19 nt, Homo sapiens
  misc_RNA (1)...(19): siRNA sense strand
uacaaguauucagcucuua

SEQ ID NO: 860986 - RNA, 19 nt, Homo sapiens
  misc_RNA (1)...(19): siRNA sense strand
caggaucaguuugacaguu

SEQ ID NO: 860987 - RNA, 19 nt, Homo sapiens
  misc_RNA (1)...(19): siRNA sense strand
aggccuaugugcaugaauu

SEQ ID NO: 860988 - RNA, 19 nt, Homo sapiens
  misc_RNA (1)...(19): siRNA sense strand
ggauaucauuccagguuuu

SEQ ID NO: 860989 - RNA, 19 nt, Homo sapiens
  misc_RNA (1)...(19): siRNA sense strand
cggacgacaccuauaauga

SEQ ID NO: 860990 - RNA, 19 nt, Homo sapiens
  misc_RNA (1)...(19): siRNA sense strand
ccucccagcuccacagcaa

SEQ ID NO: 860991 - RNA, 19 nt, Homo sapiens
  misc_RNA (1)...(19): siRNA sense strand
cugaagagcuagcccaacu

SEQ ID NO: 860992 - RNA, 19 nt, Homo sapiens
  misc_RNA (1)...(19): siRNA sense strand
caaggccuaugugcaugaa

SEQ ID NO: 860993 - RNA, 19 nt, Homo sapiens
  misc_RNA (1)...(19): siRNA sense strand
uaucucaaaugcccggaau

SEQ ID NO: 860994 - RNA, 19 nt, Homo sapiens
  misc_RNA (1)...(19): siRNA sense strand
ccgaugacuuucuggacuu

SEQ ID NO: 860995 - RNA, 19 nt, Homo sapiens
  misc_RNA (1)...(19): siRNA sense strand
cgccugcuguuaaauacaa

SEQ ID NO: 860996 - RNA, 19 nt, Homo sapiens
  misc_RNA (1)...(19): siRNA sense strand
ccaaaucguccuuaagaac

SEQ ID NO: 860997 - RNA, 19 nt, Homo sapiens
  misc_RNA (1)...(19): siRNA sense strand
caucggagaucugguuucg

SEQ ID NO: 860998 - RNA, 19 nt, Homo sapiens
  misc_RNA (1)...(19): siRNA sense strand
aauauuucccugagcuuaa

SEQ ID NO: 860999 - RNA, 19 nt, Homo sapiens
  misc_RNA (1)...(19): siRNA sense strand
gaucucccacaguugguuu

SEQ ID NO: 861000 - RNA, 19 nt, Homo sapiens
  misc_RNA (1)...(19): siRNA sense strand
ugaauucuggcucaaugaa

SEQ ID NO: 861001 - RNA, 19 nt, Homo sapiens
  misc_RNA (1)...(19): siRNA sense strand
guuucugcuuugucucaua

SEQ ID NO: 861002 - RNA, 19 nt, Homo sapiens
  misc_RNA (1)...(19): siRNA sense strand
caacaagcuccgcgugaag

SEQ ID NO: 861003 - RNA, 19 nt, Homo sapiens
  misc_RNA (1)...(19): siRNA sense strand
uaaguucuucuuccagaug

SEQ ID NO: 861004 - RNA, 19 nt, Homo sapiens
  misc_RNA (1)...(19): siRNA sense strand
ggccaucggagaucugguu

SEQ ID NO: 861005 - RNA, 19 nt, Homo sapiens
  misc_RNA (1)...(19): siRNA sense strand
ucgacacgccugcuguuaa

SEQ ID NO: 861006 - RNA, 19 nt, Homo sapiens
  misc_RNA (1)...(19): siRNA sense strand
gaucugguuucggcugaag

SEQ ID NO: 861007 - RNA, 19 nt, Homo sapiens
  misc_RNA (1)...(19): siRNA sense strand
gaggaaaacccacucaaca

SEQ ID NO: 861008 - RNA, 19 nt, Homo sapiens
  misc_RNA (1)...(19): siRNA sense strand
gagagguccaaauaaguuc

SEQ ID NO: 861009 - RNA, 19 nt, Homo sapiens
  misc_RNA (1)...(19): siRNA sense strand
gccaccguccuuuccauuu

SEQ ID NO: 861010 - RNA, 19 nt, Homo sapiens
  misc_RNA (1)...(19): siRNA sense strand
gagcccugccugauugaug

SEQ ID NO: 861011 - RNA, 19 nt, Homo sapiens
  misc_RNA (1)...(19): siRNA sense strand
agaacgaccaccaggaaga

SEQ ID NO: 861012 - RNA, 19 nt, Homo sapiens
  misc_RNA (1)...(19): siRNA sense strand
agacagcaggaaagaagaa

SEQ ID NO: 861013 - RNA, 19 nt, Homo sapiens
  misc_RNA (1)...(19): siRNA sense strand
gacaugaaggccauugaag

SEQ ID NO: 861014 - RNA, 19 nt, Homo sapiens
  misc_RNA (1)...(19): siRNA sense strand
auggagaacccuugucuga

SEQ ID NO: 861015 - RNA, 19 nt, Homo sapiens
  misc_RNA (1)...(19): siRNA sense strand
ugauugaugcugccaagga

SEQ ID NO: 861016 - RNA, 19 nt, Homo sapiens
  misc_RNA (1)...(19): siRNA sense strand
cagcuccacagcaauguug

SEQ ID NO: 861017 - RNA, 19 nt, Homo sapiens
  misc_RNA (1)...(19): siRNA sense strand
gcuguaccacgcaaugaug

SEQ ID NO: 861018 - RNA, 19 nt, Homo sapiens
  misc_RNA (1)...(19): siRNA sense strand
ucucaaggccuaugugcau

SEQ ID NO: 861019 - RNA, 19 nt, Homo sapiens
  misc_RNA (1)...(19): siRNA sense strand
guccaaauaaguucuucuu

SEQ ID NO: 861020 - RNA, 19 nt, Homo sapiens
  misc_RNA (1)...(19): siRNA sense strand
caacaggagagaagcuuuu

SEQ ID NO: 861021 - RNA, 19 nt, Homo sapiens
  misc_RNA (1)...(19): siRNA sense strand
acccuugucugaccuuugu

SEQ ID NO: 861022 - RNA, 19 nt, Homo sapiens
  misc_RNA (1)...(19): siRNA sense strand
aguauucagcucuuauuga

SEQ ID NO: 861023 - RNA, 19 nt, Homo sapiens
  misc_RNA (1)...(19): siRNA sense strand
ucuacuuccuggauaagau

SEQ ID NO: 861024 - RNA, 19 nt, Homo sapiens
  misc_RNA (1)...(19): siRNA sense strand
gacuucuacuuggaauauu

SEQ ID NO: 861025 - RNA, 19 nt, Homo sapiens
  misc_RNA (1)...(19): siRNA sense strand
ggaaaacccacucaacaag

SEQ ID NO: 861026 - RNA, 19 nt, Homo sapiens
  misc_RNA (1)...(19): siRNA sense strand
gaauucuggcucaaugaag

SEQ ID NO: 861027 - RNA, 19 nt, Homo sapiens
  misc_RNA (1)...(19): siRNA sense strand
agguaugacuugcucuuca

SEQ ID NO: 861028 - RNA, 19 nt, Homo sapiens
  misc_RNA (1)...(19): siRNA sense strand
uggucuacuuccuggauaa

SEQ ID NO: 861029 - RNA, 19 nt, Homo sapiens
  misc_RNA (1)...(19): siRNA sense strand
aagcuccgcgugaagauug

SEQ ID NO: 861030 - RNA, 19 nt, Homo sapiens
  misc_RNA (1)...(19): siRNA sense strand
ucaaggccuaugugcauga

SEQ ID NO: 861031 - RNA, 19 nt, Homo sapiens
  misc_RNA (1)...(19): siRNA sense strand
gaaggaagauguaaacaaa

SEQ ID NO: 861032 - RNA, 19 nt, Homo sapiens
  misc_RNA (1)...(19): siRNA sense strand
caacuugcuucgauaauua

SEQ ID NO: 861033 - RNA, 19 nt, Homo sapiens
  misc_RNA (1)...(19): siRNA sense strand
gaacaguccucugaaguaa

SEQ ID NO: 861034 - RNA, 19 nt, Homo sapiens
  misc_RNA (1)...(19): siRNA sense strand
gaaaccaccuucaagugua

SEQ ID NO: 861035 - RNA, 19 nt, Homo sapiens
  misc_RNA (1)...(19): siRNA sense strand
caaaaucccucuuuacuua

SEQ ID NO: 861036 - RNA, 19 nt, Homo sapiens
  misc_RNA (1)...(19): siRNA sense strand
cagagaaucuaaagucaua

SEQ ID NO: 861037 - RNA, 19 nt, Homo sapiens
  misc_RNA (1)...(19): siRNA sense strand
gacaaaggcccauauuaua

SEQ ID NO: 861038 - RNA, 19 nt, Homo sapiens
  misc_RNA (1)...(19): siRNA sense strand
acacagagcucacagagaa

SEQ ID NO: 861039 - RNA, 19 nt, Homo sapiens
  misc_RNA (1)...(19): siRNA sense strand
ccaaagcacugucucauau

SEQ ID NO: 861040 - RNA, 19 nt, Homo sapiens
  misc_RNA (1)...(19): siRNA sense strand
ccaagucucuuaucguuaa

SEQ ID NO: 861041 - RNA, 19 nt, Homo sapiens
  misc_RNA (1)...(19): siRNA sense strand
gaaucaagcggaagaauaa

SEQ ID NO: 861042 - RNA, 19 nt, Homo sapiens
  misc_RNA (1)...(19): siRNA sense strand
gaguuuggcuacacgauua

SEQ ID NO: 861043 - RNA, 19 nt, Homo sapiens
  misc_RNA (1)...(19): siRNA sense strand
gccaugaacuucuuuacua

SEQ ID NO: 861044 - RNA, 19 nt, Homo sapiens
  misc_RNA (1)...(19): siRNA sense strand
ggaaggcauucacugauaa

SEQ ID NO: 861045 - RNA, 19 nt, Homo sapiens
  misc_RNA (1)...(19): siRNA sense strand
gaagagggcugcgaugaug

SEQ ID NO: 861046 - RNA, 19 nt, Homo sapiens
  misc_RNA (1)...(19): siRNA sense strand
ggagaggucuuugguacua

SEQ ID NO: 861047 - RNA, 19 nt, Homo sapiens
  misc_RNA (1)...(19): siRNA sense strand
ccaaauuccuucucauaaa

SEQ ID NO: 861048 - RNA, 19 nt, Homo sapiens
  misc_RNA (1)...(19): siRNA sense strand
gggaaggcauucacugaua

SEQ ID NO: 861049 - RNA, 19 nt, Homo sapiens
  misc_RNA (1)...(19): siRNA sense strand
gaauguaaauguagugugu

SEQ ID NO: 861050 - RNA, 19 nt, Homo sapiens
  misc_RNA (1)...(19): siRNA sense strand
gagaauagguauggucaaa

SEQ ID NO: 861051 - RNA, 19 nt, Homo sapiens
  misc_RNA (1)...(19): siRNA sense strand
gaaaccaucuguuguugug

SEQ ID NO: 861052 - RNA, 19 nt, Homo sapiens
  misc_RNA (1)...(19): siRNA sense strand
gauaggagauuaacauugg

SEQ ID NO: 861053 - RNA, 19 nt, Homo sapiens
  misc_RNA (1)...(19): siRNA sense strand
ggacaggccuuuggugcua

SEQ ID NO: 861054 - RNA, 19 nt, Homo sapiens
  misc_RNA (1)...(19): siRNA sense strand
gaagaugcacccucaauga

SEQ ID NO: 861055 - RNA, 19 nt, Homo sapiens
  misc_RNA (1)...(19): siRNA sense strand
ggauagaaauaguagugua

SEQ ID NO: 861056 - RNA, 19 nt, Homo sapiens
  misc_RNA (1)...(19): siRNA sense strand
guacaaaccguaagaaaug

SEQ ID NO: 861057 - RNA, 19 nt, Homo sapiens
  misc_RNA (1)...(19): siRNA sense strand
gcuaugagcucuguugcua

SEQ ID NO: 861058 - RNA, 19 nt, Homo sapiens
  misc_RNA (1)...(19): siRNA sense strand
gagcagcacgcaugaauuu

SEQ ID NO: 861059 - RNA, 19 nt, Homo sapiens
  misc_RNA (1)...(19): siRNA sense strand
ggcaggcgaugaccaaaua

SEQ ID NO: 861060 - RNA, 19 nt, Homo sapiens
  misc_RNA (1)...(19): siRNA sense strand
cuacgaagcaccucucuua

SEQ ID NO: 861061 - RNA, 19 nt, Homo sapiens
  misc_RNA (1)...(19): siRNA sense strand
gaaauaaugaaguggagua

SEQ ID NO: 861062 - RNA, 19 nt, Homo sapiens
  misc_RNA (1)...(19): siRNA sense strand
caacucagcuacuaaccaa

SEQ ID NO: 861063 - RNA, 19 nt, Homo sapiens
  misc_RNA (1)...(19): siRNA sense strand
aaaguuaccucucaaggaa

SEQ ID NO: 861064 - RNA, 19 nt, Homo sapiens
  misc_RNA (1)...(19): siRNA sense strand
gaacagccaguuugcuuaa

SEQ ID NO: 861065 - RNA, 19 nt, Homo sapiens
  misc_RNA (1)...(19): siRNA sense strand
aaacaaaguucaugcaaca

SEQ ID NO: 861066 - RNA, 19 nt, Homo sapiens
  misc_RNA (1)...(19): siRNA sense strand
gcaacaugauugugauuau

SEQ ID NO: 861067 - RNA, 19 nt, Homo sapiens
  misc_RNA (1)...(19): siRNA sense strand
caacaggaaguuucugaua

SEQ ID NO: 861068 - RNA, 19 nt, Homo sapiens
  misc_RNA (1)...(19): siRNA sense strand
ucacucagcuuauuucauc

SEQ ID NO: 861069 - RNA, 19 nt, Homo sapiens
  misc_RNA (1)...(19): siRNA sense strand
ccacaaagucacaugaaua

SEQ ID NO: 861070 - RNA, 19 nt, Homo sapiens
  misc_RNA (1)...(19): siRNA sense strand
gagaagcagguucauauaa

SEQ ID NO: 861071 - RNA, 19 nt, Homo sapiens
  misc_RNA (1)...(19): siRNA sense strand
ccacuuugcuaccgacuuu

SEQ ID NO: 861072 - RNA, 19 nt, Homo sapiens
  misc_RNA (1)...(19): siRNA sense strand
caacaacaaacaacaguaa

SEQ ID NO: 861073 - RNA, 19 nt, Homo sapiens
  misc_RNA (1)...(19): siRNA sense strand
gcucaaacgagguccauua

SEQ ID NO: 861074 - RNA, 19 nt, Homo sapiens
  misc_RNA (1)...(19): siRNA sense strand
gaaaagaagcccaaaguuu

SEQ ID NO: 861075 - RNA, 19 nt, Homo sapiens
  misc_RNA (1)...(19): siRNA sense strand
ccaaguccuuccugauaua

SEQ ID NO: 861076 - RNA, 19 nt, Homo sapiens
  misc_RNA (1)...(19): siRNA sense strand
acgauuagcuccaauuuau

SEQ ID NO: 861077 - RNA, 19 nt, Homo sapiens
  misc_RNA (1)...(19): siRNA sense strand
cccagaagauuuagaauug

SEQ ID NO: 861078 - RNA, 19 nt, Homo sapiens
  misc_RNA (1)...(19): siRNA sense strand
gagaauauaccaaguaaag

SEQ ID NO: 861079 - RNA, 19 nt, Homo sapiens
  misc_RNA (1)...(19): siRNA sense strand
gaaggacuauucucugaag

SEQ ID NO: 861080 - RNA, 19 nt, Homo sapiens
  misc_RNA (1)...(19): siRNA sense strand
ugcaaggccuuccagauua

SEQ ID NO: 861081 - RNA, 19 nt, Homo sapiens
  misc_RNA (1)...(19): siRNA sense strand
acagagauauccugaauca

SEQ ID NO: 861082 - RNA, 19 nt, Homo sapiens
  misc_RNA (1)...(19): siRNA sense strand
auaaugaaguggaguauug

SEQ ID NO: 861083 - RNA, 19 nt, Homo sapiens
  misc_RNA (1)...(19): siRNA sense strand
gcaguuccauuccacauuc

SEQ ID NO: 861084 - RNA, 19 nt, Homo sapiens
  misc_RNA (1)...(19): siRNA sense strand
gaauugauccagagacuug

SEQ ID NO: 861085 - RNA, 19 nt, Homo sapiens
  misc_RNA (1)...(19): siRNA sense strand
caaacgagguccauuaugc

SEQ ID NO: 861086 - RNA, 19 nt, Homo sapiens
  misc_RNA (1)...(19): siRNA sense strand
gugaaggacuauucucuga

SEQ ID NO: 861087 - RNA, 19 nt, Homo sapiens
  misc_RNA (1)...(19): siRNA sense strand
cagagguucuugcacauaa

SEQ ID NO: 861088 - RNA, 19 nt, Homo sapiens
  misc_RNA (1)...(19): siRNA sense strand
ccaugaacuucuuuacuaa

SEQ ID NO: 861089 - RNA, 19 nt, Homo sapiens
  misc_RNA (1)...(19): siRNA sense strand
caaagucacaugaauauuc

SEQ ID NO: 861090 - RNA, 19 nt, Homo sapiens
  misc_RNA (1)...(19): siRNA sense strand
gaacccacauacuguugaa

SEQ ID NO: 861091 - RNA, 19 nt, Homo sapiens
  misc_RNA (1)...(19): siRNA sense strand
caagaggccuucgaagcua

SEQ ID NO: 861092 - RNA, 19 nt, Homo sapiens
  misc_RNA (1)...(19): siRNA sense strand
caucagaucuguaagaaaa

SEQ ID NO: 861093 - RNA, 19 nt, Homo sapiens
  misc_RNA (1)...(19): siRNA sense strand
cagcuccacugaagaauga

SEQ ID NO: 861094 - RNA, 19 nt, Homo sapiens
  misc_RNA (1)...(19): siRNA sense strand
gauccaagcucucccuuac

SEQ ID NO: 861095 - RNA, 19 nt, Homo sapiens
  misc_RNA (1)...(19): siRNA sense strand
ucucauggguguccaauug

SEQ ID NO: 861096 - RNA, 19 nt, Homo sapiens
  misc_RNA (1)...(19): siRNA sense strand
ccugguaucucucaugaaa

SEQ ID NO: 861097 - RNA, 19 nt, Homo sapiens
  misc_RNA (1)...(19): siRNA sense strand
cuauauguauggcacaaua

SEQ ID NO: 861098 - RNA, 19 nt, Homo sapiens
  misc_RNA (1)...(19): siRNA sense strand
ugacacaacuugcuucgau

SEQ ID NO: 861099 - RNA, 19 nt, Homo sapiens
  misc_RNA (1)...(19): siRNA sense strand
ucaaauucauccaagauug

SEQ ID NO: 861100 - RNA, 19 nt, Homo sapiens
  misc_RNA (1)...(19): siRNA sense strand
gcagagaacagccaguuug

SEQ ID NO: 861101 - RNA, 19 nt, Homo sapiens
  misc_RNA (1)...(19): siRNA sense strand
ggaaaccacuggcucaaac

SEQ ID NO: 861102 - RNA, 19 nt, Homo sapiens
  misc_RNA (1)...(19): siRNA sense strand
caaauuccuucucauaaag

SEQ ID NO: 861103 - RNA, 19 nt, Homo sapiens
  misc_RNA (1)...(19): siRNA sense strand
gcuaaagaagcuaagaaua

SEQ ID NO: 861104 - RNA, 19 nt, Homo sapiens
  misc_RNA (1)...(19): siRNA sense strand
gcaauaaggauagaaauag

SEQ ID NO: 861105 - RNA, 19 nt, Homo sapiens
  misc_RNA (1)...(19): siRNA sense strand
uuacagagauauccugaau

SEQ ID NO: 861106 - RNA, 19 nt, Homo sapiens
  misc_RNA (1)...(19): siRNA sense strand
ggaaggaagauguaaacaa

SEQ ID NO: 861107 - RNA, 19 nt, Homo sapiens
  misc_RNA (1)...(19): siRNA sense strand
ggaagaagaugagcagcau

SEQ ID NO: 861108 - RNA, 19 nt, Homo sapiens
  misc_RNA (1)...(19): siRNA sense strand
agacaaaggcccauauuau

SEQ ID NO: 861109 - RNA, 19 nt, Homo sapiens
  misc_RNA (1)...(19): siRNA sense strand
caacagaaaccaccuucaa

SEQ ID NO: 861110 - RNA, 19 nt, Homo sapiens
  misc_RNA (1)...(19): siRNA sense strand
cauaucaacucagcuacua

SEQ ID NO: 861111 - RNA, 19 nt, Homo sapiens
  misc_RNA (1)...(19): siRNA sense strand
caacucacauaucaacuca

SEQ ID NO: 861112 - RNA, 19 nt, Homo sapiens
  misc_RNA (1)...(19): siRNA sense strand
guggagaaguggacacaaa

SEQ ID NO: 861113 - RNA, 19 nt, Homo sapiens
  misc_RNA (1)...(19): siRNA sense strand
gaauugaacccacauacug

SEQ ID NO: 861114 - RNA, 19 nt, Homo sapiens
  misc_RNA (1)...(19): siRNA sense strand
ucucaggaauguaaaugua

SEQ ID NO: 861115 - RNA, 19 nt, Homo sapiens
  misc_RNA (1)...(19): siRNA sense strand
auaccugacuugaaccuua

SEQ ID NO: 861116 - RNA, 19 nt, Homo sapiens
  misc_RNA (1)...(19): siRNA sense strand
cgaaucaagcggaagaaua

SEQ ID NO: 861117 - RNA, 19 nt, Homo sapiens
  misc_RNA (1)...(19): siRNA sense strand
gggcugcgaugaugacaga

SEQ ID NO: 861118 - RNA, 19 nt, Homo sapiens
  misc_RNA (1)...(19): siRNA sense strand
uuuaauggcuguaaguuug

SEQ ID NO: 861119 - RNA, 19 nt, Homo sapiens
  misc_RNA (1)...(19): siRNA sense strand
gaauuacagugguuucuac

SEQ ID NO: 861120 - RNA, 19 nt, Homo sapiens
  misc_RNA (1)...(19): siRNA sense strand
gaaaaguuguccuauaugu

SEQ ID NO: 861121 - RNA, 19 nt, Homo sapiens
  misc_RNA (1)...(19): siRNA sense strand
cgaagcaccucucuuagca

SEQ ID NO: 861122 - RNA, 19 nt, Homo sapiens
  misc_RNA (1)...(19): siRNA sense strand
gaagaagcagugaugaaga

SEQ ID NO: 861123 - RNA, 19 nt, Homo sapiens
  misc_RNA (1)...(19): siRNA sense strand
gggaaaaguuguccuauau

SEQ ID NO: 861124 - RNA, 19 nt, Homo sapiens
  misc_RNA (1)...(19): siRNA sense strand
gacacaacuugcuucgaua

SEQ ID NO: 861125 - RNA, 19 nt, Homo sapiens
  misc_RNA (1)...(19): siRNA sense strand
gcaucgagguggagaagug

SEQ ID NO: 861126 - RNA, 19 nt, Homo sapiens
  misc_RNA (1)...(19): siRNA sense strand
cuacugauaugaguuguga

SEQ ID NO: 861127 - RNA, 19 nt, Homo sapiens
  misc_RNA (1)...(19): siRNA sense strand
gcaaggccuuccagauuag

SEQ ID NO: 861128 - RNA, 19 nt, Homo sapiens
  misc_RNA (1)...(19): siRNA sense strand
gggaaaucauggagaauag

SEQ ID NO: 861129 - RNA, 19 nt, Homo sapiens
  misc_RNA (1)...(19): siRNA sense strand
ucagggaaaucauggagaa

SEQ ID NO: 861130 - RNA, 19 nt, Homo sapiens
  misc_RNA (1)...(19): siRNA sense strand
gcaaagcuauccucuacac

SEQ ID NO: 861131 - RNA, 19 nt, Homo sapiens
  misc_RNA (1)...(19): siRNA sense strand
gaacagggcugacaacauu

SEQ ID NO: 861132 - RNA, 19 nt, Homo sapiens
  misc_RNA (1)...(19): siRNA sense strand
gaucgaaucuccaguguug

SEQ ID NO: 861133 - RNA, 19 nt, Homo sapiens
  misc_RNA (1)...(19): siRNA sense strand
gauaauggaucggcuauau

SEQ ID NO: 861134 - RNA, 19 nt, Homo sapiens
  misc_RNA (1)...(19): siRNA sense strand
uuaccugucugcaguauua

SEQ ID NO: 861135 - RNA, 19 nt, Homo sapiens
  misc_RNA (1)...(19): siRNA sense strand
gggaaagaguggaacgaua

SEQ ID NO: 861136 - RNA, 19 nt, Homo sapiens
  misc_RNA (1)...(19): siRNA sense strand
uccgauagcucucugcuua

SEQ ID NO: 861137 - RNA, 19 nt, Homo sapiens
  misc_RNA (1)...(19): siRNA sense strand
ggaaagaguggaacgauau

SEQ ID NO: 861138 - RNA, 19 nt, Homo sapiens
  misc_RNA (1)...(19): siRNA sense strand
caucgucucuuacugguuu

SEQ ID NO: 861139 - RNA, 19 nt, Homo sapiens
  misc_RNA (1)...(19): siRNA sense strand
gaauauugcugggcugcua

SEQ ID NO: 861140 - RNA, 19 nt, Homo sapiens
  misc_RNA (1)...(19): siRNA sense strand
uaacggugcucuguuguuu

SEQ ID NO: 861141 - RNA, 19 nt, Homo sapiens
  misc_RNA (1)...(19): siRNA sense strand
uaauaacggugcucuguug

SEQ ID NO: 861142 - RNA, 19 nt, Homo sapiens
  misc_RNA (1)...(19): siRNA sense strand
ucaggaagcuggaauacug

SEQ ID NO: 861143 - RNA, 19 nt, Homo sapiens
  misc_RNA (1)...(19): siRNA sense strand
gauaaacggguggaaguua

SEQ ID NO: 861144 - RNA, 19 nt, Homo sapiens
  misc_RNA (1)...(19): siRNA sense strand
ggaacgauauucucgaaag

SEQ ID NO: 861145 - RNA, 19 nt, Homo sapiens
  misc_RNA (1)...(19): siRNA sense strand
uuaaccagcugccucauuu

SEQ ID NO: 861146 - RNA, 19 nt, Homo sapiens
  misc_RNA (1)...(19): siRNA sense strand
caaugaagaugcaaguuuc

SEQ ID NO: 861147 - RNA, 19 nt, Homo sapiens
  misc_RNA (1)...(19): siRNA sense strand
gcaaagcaauacugggaau

SEQ ID NO: 861148 - RNA, 19 nt, Homo sapiens
  misc_RNA (1)...(19): siRNA sense strand
ucauaaagcugagagcaaa

SEQ ID NO: 861149 - RNA, 19 nt, Homo sapiens
  misc_RNA (1)...(19): siRNA sense strand
cgaauaaucuuaacaaacc

SEQ ID NO: 861150 - RNA, 19 nt, Homo sapiens
  misc_RNA (1)...(19): siRNA sense strand
gaagaugagaucacagcua

SEQ ID NO: 861151 - RNA, 19 nt, Homo sapiens
  misc_RNA (1)...(19): siRNA sense strand
auauucagcuccagaagua

SEQ ID NO: 861152 - RNA, 19 nt, Homo sapiens
  misc_RNA (1)...(19): siRNA sense strand
uaaaggucgucuaaacuau

SEQ ID NO: 861153 - RNA, 19 nt, Homo sapiens
  misc_RNA (1)...(19): siRNA sense strand
ggguggaaguuaagccaua

SEQ ID NO: 861154 - RNA, 19 nt, Homo sapiens
  misc_RNA (1)...(19): siRNA sense strand
gaaguuaagccauaugucu

SEQ ID NO: 861155 - RNA, 19 nt, Homo sapiens
  misc_RNA (1)...(19): siRNA sense strand
ucaaugaagaugcaaguuu

SEQ ID NO: 861156 - RNA, 19 nt, Homo sapiens
  misc_RNA (1)...(19): siRNA sense strand
gaaagaguggaacgauauu

SEQ ID NO: 861157 - RNA, 19 nt, Homo sapiens
  misc_RNA (1)...(19): siRNA sense strand
gaauacugccugaaacaga

SEQ ID NO: 861158 - RNA, 19 nt, Homo sapiens
  misc_RNA (1)...(19): siRNA sense strand
auaaacggguggaaguuaa

SEQ ID NO: 861159 - RNA, 19 nt, Homo sapiens
  misc_RNA (1)...(19): siRNA sense strand
cggauugccuccagacauu

SEQ ID NO: 861160 - RNA, 19 nt, Homo sapiens
  misc_RNA (1)...(19): siRNA sense strand
uaacuggucagcagcgaua

SEQ ID NO: 861161 - RNA, 19 nt, Homo sapiens
  misc_RNA (1)...(19): siRNA sense strand
gaguugcguucucuaauca

SEQ ID NO: 861162 - RNA, 19 nt, Homo sapiens
  misc_RNA (1)...(19): siRNA sense strand
gaacgauauucucgaaagg

SEQ ID NO: 861163 - RNA, 19 nt, Homo sapiens
  misc_RNA (1)...(19): siRNA sense strand
cgauagcucucugcuuauu

SEQ ID NO: 861164 - RNA, 19 nt, Homo sapiens
  misc_RNA (1)...(19): siRNA sense strand
ccucuacaauaaucaauga

SEQ ID NO: 861165 - RNA, 19 nt, Homo sapiens
  misc_RNA (1)...(19): siRNA sense strand
cauuaaaggucgucuaaac

SEQ ID NO: 861166 - RNA, 19 nt, Homo sapiens
  misc_RNA (1)...(19): siRNA sense strand
ggauaagccaguccagauu

SEQ ID NO: 861167 - RNA, 19 nt, Homo sapiens
  misc_RNA (1)...(19): siRNA sense strand
cgucuaaacuauucauauc

SEQ ID NO: 861168 - RNA, 19 nt, Homo sapiens
  misc_RNA (1)...(19): siRNA sense strand
cccauaacauucaggauga

SEQ ID NO: 861169 - RNA, 19 nt, Homo sapiens
  misc_RNA (1)...(19): siRNA sense strand
gcugcagcauggagagaua

SEQ ID NO: 861170 - RNA, 19 nt, Homo sapiens
  misc_RNA (1)...(19): siRNA sense strand
gaugagaucacagcuaguu

SEQ ID NO: 861171 - RNA, 19 nt, Homo sapiens
  misc_RNA (1)...(19): siRNA sense strand
uuaaaggucgucuaaacua

SEQ ID NO: 861172 - RNA, 19 nt, Homo sapiens
  misc_RNA (1)...(19): siRNA sense strand
gcucugccuuugcaccuaa

SEQ ID NO: 861173 - RNA, 19 nt, Homo sapiens
  misc_RNA (1)...(19): siRNA sense strand
gcaauacugggaauaaauc

SEQ ID NO: 861174 - RNA, 19 nt, Homo sapiens
  misc_RNA (1)...(19): siRNA sense strand
gauggaagauagcuugaac

SEQ ID NO: 861175 - RNA, 19 nt, Homo sapiens
  misc_RNA (1)...(19): siRNA sense strand
gggaucagccucuucauag

SEQ ID NO: 861176 - RNA, 19 nt, Homo sapiens
  misc_RNA (1)...(19): siRNA sense strand
cagcuucucuccucagauc

SEQ ID NO: 861177 - RNA, 19 nt, Homo sapiens
  misc_RNA (1)...(19): siRNA sense strand
gcauggagagauagauaaa

SEQ ID NO: 861178 - RNA, 19 nt, Homo sapiens
  misc_RNA (1)...(19): siRNA sense strand
ugacagcgacuuugugaug

SEQ ID NO: 861179 - RNA, 19 nt, Homo sapiens
  misc_RNA (1)...(19): siRNA sense strand
gcugagagcaaauccuauu

SEQ ID NO: 861180 - RNA, 19 nt, Homo sapiens
  misc_RNA (1)...(19): siRNA sense strand
auagcucucugcuuauuaa

SEQ ID NO: 861181 - RNA, 19 nt, Homo sapiens
  misc_RNA (1)...(19): siRNA sense strand
gauagcucucugcuuauua

SEQ ID NO: 861182 - RNA, 19 nt, Homo sapiens
  misc_RNA (1)...(19): siRNA sense strand
gaauaaaucugcuuuucca

SEQ ID NO: 861183 - RNA, 19 nt, Homo sapiens
  misc_RNA (1)...(19): siRNA sense strand
ggcgaauaaucuuaacaaa

SEQ ID NO: 861184 - RNA, 19 nt, Homo sapiens
  misc_RNA (1)...(19): siRNA sense strand
ccacugggcuagguacuuc

SEQ ID NO: 861185 - RNA, 19 nt, Homo sapiens
  misc_RNA (1)...(19): siRNA sense strand
cagcauggagagauagaua

SEQ ID NO: 861186 - RNA, 19 nt, Homo sapiens
  misc_RNA (1)...(19): siRNA sense strand
ggaaaacucuaccuuugug

SEQ ID NO: 861187 - RNA, 19 nt, Homo sapiens
  misc_RNA (1)...(19): siRNA sense strand
ugaacuccaucucgccuuu

SEQ ID NO: 861188 - RNA, 19 nt, Homo sapiens
  misc_RNA (1)...(19): siRNA sense strand
ucuagcgcaucgucucuua

SEQ ID NO: 861189 - RNA, 19 nt, Homo sapiens
  misc_RNA (1)...(19): siRNA sense strand
ggauuggccucauaaagcu

SEQ ID NO: 861190 - RNA, 19 nt, Homo sapiens
  misc_RNA (1)...(19): siRNA sense strand
guggaacgauauucucgaa

SEQ ID NO: 861191 - RNA, 19 nt, Homo sapiens
  misc_RNA (1)...(19): siRNA sense strand
ggugcucuguuguuucaaa

SEQ ID NO: 861192 - RNA, 19 nt, Homo sapiens
  misc_RNA (1)...(19): siRNA sense strand
gcucucugcuuauuaaugc

SEQ ID NO: 861193 - RNA, 19 nt, Homo sapiens
  misc_RNA (1)...(19): siRNA sense strand
agccauaugucuuggauga

SEQ ID NO: 861194 - RNA, 19 nt, Homo sapiens
  misc_RNA (1)...(19): siRNA sense strand
gcuggaauacugccugaaa

SEQ ID NO: 861195 - RNA, 19 nt, Homo sapiens
  misc_RNA (1)...(19): siRNA sense strand
gugcuaauguuaccugucu

SEQ ID NO: 861196 - RNA, 19 nt, Homo sapiens
  misc_RNA (1)...(19): siRNA sense strand
ggaucagccucuucauagu

SEQ ID NO: 861197 - RNA, 19 nt, Homo sapiens
  misc_RNA (1)...(19): siRNA sense strand
caucucgccuuugaagaaa

SEQ ID NO: 861198 - RNA, 19 nt, Homo sapiens
  misc_RNA (1)...(19): siRNA sense strand
ggacaauucuucggaaaau

SEQ ID NO: 861199 - RNA, 19 nt, Homo sapiens
  misc_RNA (1)...(19): siRNA sense strand
gauaagccaguccagauuc

SEQ ID NO: 861200 - RNA, 19 nt, Homo sapiens
  misc_RNA (1)...(19): siRNA sense strand
gauggauucuuggaugaug

SEQ ID NO: 861201 - RNA, 19 nt, Homo sapiens
  misc_RNA (1)...(19): siRNA sense strand
aagcaauacugggaauaaa

SEQ ID NO: 861202 - RNA, 19 nt, Homo sapiens
  misc_RNA (1)...(19): siRNA sense strand
gaucagccucuucauagug

SEQ ID NO: 861203 - RNA, 19 nt, Homo sapiens
  misc_RNA (1)...(19): siRNA sense strand
aaagcaauacugggaauaa

SEQ ID NO: 861204 - RNA, 19 nt, Homo sapiens
  misc_RNA (1)...(19): siRNA sense strand
ccauaugucuuggaugauc

SEQ ID NO: 861205 - RNA, 19 nt, Homo sapiens
  misc_RNA (1)...(19): siRNA sense strand
cuccagacauugaugaaga

SEQ ID NO: 861206 - RNA, 19 nt, Homo sapiens
  misc_RNA (1)...(19): siRNA sense strand
gcuaauaacggugcucugu

SEQ ID NO: 861207 - RNA, 19 nt, Homo sapiens
  misc_RNA (1)...(19): siRNA sense strand
uaucaagucccacuaucaa

SEQ ID NO: 861208 - RNA, 19 nt, Homo sapiens
  misc_RNA (1)...(19): siRNA sense strand
acccaacccuugacaucua

SEQ ID NO: 861209 - RNA, 19 nt, Homo sapiens
  misc_RNA (1)...(19): siRNA sense strand
ucagcugugugaugaaugu

SEQ ID NO: 861210 - RNA, 19 nt, Homo sapiens
  misc_RNA (1)...(19): siRNA sense strand
gguggaaguuaagccauau

SEQ ID NO: 861211 - RNA, 19 nt, Homo sapiens
  misc_RNA (1)...(19): siRNA sense strand
aaaaggagcugggagaguu

SEQ ID NO: 861212 - RNA, 19 nt, Homo sapiens
  misc_RNA (1)...(19): siRNA sense strand
gcuaugcauuccugcuguu

SEQ ID NO: 861213 - RNA, 19 nt, Homo sapiens
  misc_RNA (1)...(19): siRNA sense strand
agacauugaugaagaugag

SEQ ID NO: 861214 - RNA, 19 nt, Homo sapiens
  misc_RNA (1)...(19): siRNA sense strand
caacccaacccuugacauc

SEQ ID NO: 861215 - RNA, 19 nt, Homo sapiens
  misc_RNA (1)...(19): siRNA sense strand
ccaucucgccuuugaagaa

SEQ ID NO: 861216 - RNA, 19 nt, Homo sapiens
  misc_RNA (1)...(19): siRNA sense strand
gcgccuuccuccucuacaa

SEQ ID NO: 861217 - RNA, 19 nt, Homo sapiens
  misc_RNA (1)...(19): siRNA sense strand
caaagcaauacugggaaua

SEQ ID NO: 861218 - RNA, 19 nt, Homo sapiens
  misc_RNA (1)...(19): siRNA sense strand
ugccucauuuggcgaauaa

SEQ ID NO: 861219 - RNA, 19 nt, Homo sapiens
  misc_RNA (1)...(19): siRNA sense strand
ugaccgcccucggcauauu

SEQ ID NO: 861220 - RNA, 19 nt, Homo sapiens
  misc_RNA (1)...(19): siRNA sense strand
uaagccauaugucuuggau

SEQ ID NO: 861221 - RNA, 19 nt, Homo sapiens
  misc_RNA (1)...(19): siRNA sense strand
uaucagugcccgcuuuguu

SEQ ID NO: 861222 - RNA, 19 nt, Homo sapiens
  misc_RNA (1)...(19): siRNA sense strand
gcgaauaaucuuaacaaac

SEQ ID NO: 861223 - RNA, 19 nt, Homo sapiens
  misc_RNA (1)...(19): siRNA sense strand
gauauucucgaaagguguu

SEQ ID NO: 861224 - RNA, 19 nt, Homo sapiens
  misc_RNA (1)...(19): siRNA sense strand
gugcuacgcugggauugau

SEQ ID NO: 861225 - RNA, 19 nt, Homo sapiens
  misc_RNA (1)...(19): siRNA sense strand
gcccucugauuguggauug

SEQ ID NO: 861226 - RNA, 19 nt, Homo sapiens
  misc_RNA (1)...(19): siRNA sense strand
gggcugaaugguggaauaa

SEQ ID NO: 861227 - RNA, 19 nt, Homo sapiens
  misc_RNA (1)...(19): siRNA sense strand
gagcuaaaauacccaaaag

SEQ ID NO: 861228 - RNA, 19 nt, Homo sapiens
  misc_RNA (1)...(19): siRNA sense strand
uaauggaucggcuauaugg

SEQ ID NO: 861229 - RNA, 19 nt, Homo sapiens
  misc_RNA (1)...(19): siRNA sense strand
aaacucuaccuuuguguau

SEQ ID NO: 861230 - RNA, 19 nt, Homo sapiens
  misc_RNA (1)...(19): siRNA sense strand
uuacggguuuggagugcua

SEQ ID NO: 861231 - RNA, 19 nt, Homo sapiens
  misc_RNA (1)...(19): siRNA sense strand
ugaaggagcugcaaaggaa

SEQ ID NO: 861232 - RNA, 19 nt, Homo sapiens
  misc_RNA (1)...(19): siRNA sense strand
caaagaagcucucgcacau

SEQ ID NO: 861233 - RNA, 19 nt, Homo sapiens
  misc_RNA (1)...(19): siRNA sense strand
ggauggaaguggugaagaa

SEQ ID NO: 861234 - RNA, 19 nt, Homo sapiens
  misc_RNA (1)...(19): siRNA sense strand
gaccgucucuggccaguuu

SEQ ID NO: 861235 - RNA, 19 nt, Homo sapiens
  misc_RNA (1)...(19): siRNA sense strand
gaacugaaguacgugauuc

SEQ ID NO: 861236 - RNA, 19 nt, Homo sapiens
  misc_RNA (1)...(19): siRNA sense strand
gcccugagcuccaugaaga

SEQ ID NO: 861237 - RNA, 19 nt, Homo sapiens
  misc_RNA (1)...(19): siRNA sense strand
auaagaaagugcugaguaa

SEQ ID NO: 861238 - RNA, 19 nt, Homo sapiens
  misc_RNA (1)...(19): siRNA sense strand
ggcaagagguccacucaug

SEQ ID NO: 861239 - RNA, 19 nt, Homo sapiens
  misc_RNA (1)...(19): siRNA sense strand
aggccaagcuucccaauuu

SEQ ID NO: 861240 - RNA, 19 nt, Homo sapiens
  misc_RNA (1)...(19): siRNA sense strand
aagaagcucucgcacauga

SEQ ID NO: 861241 - RNA, 19 nt, Homo sapiens
  misc_RNA (1)...(19): siRNA sense strand
ccaaggaacugaaguacgu

SEQ ID NO: 861242 - RNA, 19 nt, Homo sapiens
  misc_RNA (1)...(19): siRNA sense strand
cagcgaauccucaagcaua

SEQ ID NO: 861243 - RNA, 19 nt, Homo sapiens
  misc_RNA (1)...(19): siRNA sense strand
gcugggaaguugucuugaa

SEQ ID NO: 861244 - RNA, 19 nt, Homo sapiens
  misc_RNA (1)...(19): siRNA sense strand
ucucgaaacugcucucaga

SEQ ID NO: 861245 - RNA, 19 nt, Homo sapiens
  misc_RNA (1)...(19): siRNA sense strand
ucaagcugcugucagacua

SEQ ID NO: 861246 - RNA, 19 nt, Homo sapiens
  misc_RNA (1)...(19): siRNA sense strand
gaacagcaccaagcucuca

SEQ ID NO: 861247 - RNA, 19 nt, Homo sapiens
  misc_RNA (1)...(19): siRNA sense strand
uauaagaaagugcugagua

SEQ ID NO: 861248 - RNA, 19 nt, Homo sapiens
  misc_RNA (1)...(19): siRNA sense strand
ccaagccgcugggaaguug

SEQ ID NO: 861249 - RNA, 19 nt, Homo sapiens
  misc_RNA (1)...(19): siRNA sense strand
ucagagaacacaaacuuga

SEQ ID NO: 861250 - RNA, 19 nt, Homo sapiens
  misc_RNA (1)...(19): siRNA sense strand
ccaacuggguacauggaaa

SEQ ID NO: 861251 - RNA, 19 nt, Homo sapiens
  misc_RNA (1)...(19): siRNA sense strand
gcuugaugcuggaauacaa

SEQ ID NO: 861252 - RNA, 19 nt, Homo sapiens
  misc_RNA (1)...(19): siRNA sense strand
uggaaguggugaagaaguu

SEQ ID NO: 861253 - RNA, 19 nt, Homo sapiens
  misc_RNA (1)...(19): siRNA sense strand
ggccaagcuucccaauuug

SEQ ID NO: 861254 - RNA, 19 nt, Homo sapiens
  misc_RNA (1)...(19): siRNA sense strand
ggaacugaaguacgugauu

SEQ ID NO: 861255 - RNA, 19 nt, Homo sapiens
  misc_RNA (1)...(19): siRNA sense strand
guacauccuugccuugaac

SEQ ID NO: 861256 - RNA, 19 nt, Homo sapiens
  misc_RNA (1)...(19): siRNA sense strand
caacaacgacacccaacug

SEQ ID NO: 861257 - RNA, 19 nt, Homo sapiens
  misc_RNA (1)...(19): siRNA sense strand
guggagauccugugcuuga

SEQ ID NO: 861258 - RNA, 19 nt, Homo sapiens
  misc_RNA (1)...(19): siRNA sense strand
caucuacuccugcuaugaa

SEQ ID NO: 861259 - RNA, 19 nt, Homo sapiens
  misc_RNA (1)...(19): siRNA sense strand
ucaccaaggaacugaagua

SEQ ID NO: 861260 - RNA, 19 nt, Homo sapiens
  misc_RNA (1)...(19): siRNA sense strand
cugggaaguugucuugaaa

SEQ ID NO: 861261 - RNA, 19 nt, Homo sapiens
  misc_RNA (1)...(19): siRNA sense strand
cgacugaggcuguuuacuc

SEQ ID NO: 861262 - RNA, 19 nt, Homo sapiens
  misc_RNA (1)...(19): siRNA sense strand
ggaaaucgucucgaaacug

SEQ ID NO: 861263 - RNA, 19 nt, Homo sapiens
  misc_RNA (1)...(19): siRNA sense strand
caaacugccuucgcucaag

SEQ ID NO: 861264 - RNA, 19 nt, Homo sapiens
  misc_RNA (1)...(19): siRNA sense strand
agaucucugugaauucuuu

SEQ ID NO: 861265 - RNA, 19 nt, Homo sapiens
  misc_RNA (1)...(19): siRNA sense strand
ucucugcaguuuaaacaug

SEQ ID NO: 861266 - RNA, 19 nt, Homo sapiens
  misc_RNA (1)...(19): siRNA sense strand
cagcgcaauugaagacguu

SEQ ID NO: 861267 - RNA, 19 nt, Homo sapiens
  misc_RNA (1)...(19): siRNA sense strand
aauacaacaucaucgacaa

SEQ ID NO: 861268 - RNA, 19 nt, Homo sapiens
  misc_RNA (1)...(19): siRNA sense strand
gaaggagcugcaaaggaaa

SEQ ID NO: 861269 - RNA, 19 nt, Homo sapiens
  misc_RNA (1)...(19): siRNA sense strand
cagcugacaccuacgaaga

SEQ ID NO: 861270 - RNA, 19 nt, Homo sapiens
  misc_RNA (1)...(19): siRNA sense strand
uaacacugcccuccaaguc

SEQ ID NO: 861271 - RNA, 19 nt, Homo sapiens
  misc_RNA (1)...(19): siRNA sense strand
gaaguggacguccgcuaca

SEQ ID NO: 861272 - RNA, 19 nt, Homo sapiens
  misc_RNA (1)...(19): siRNA sense strand
ccgagcaccucaucaaacu

SEQ ID NO: 861273 - RNA, 19 nt, Homo sapiens
  misc_RNA (1)...(19): siRNA sense strand
ggagauccugugcuugaug

SEQ ID NO: 861274 - RNA, 19 nt, Homo sapiens
  misc_RNA (1)...(19): siRNA sense strand
ggcuaacacugcccuccaa

SEQ ID NO: 861275 - RNA, 19 nt, Homo sapiens
  misc_RNA (1)...(19): siRNA sense strand
agcgaauccucaagcauaa

SEQ ID NO: 861276 - RNA, 19 nt, Homo sapiens
  misc_RNA (1)...(19): siRNA sense strand
guccacagacgcugacuug

SEQ ID NO: 861277 - RNA, 19 nt, Homo sapiens
  misc_RNA (1)...(19): siRNA sense strand
gaguacauccuugccuuga

SEQ ID NO: 861278 - RNA, 19 nt, Homo sapiens
  misc_RNA (1)...(19): siRNA sense strand
gccaagcuucccaauuuga

SEQ ID NO: 861279 - RNA, 19 nt, Homo sapiens
  misc_RNA (1)...(19): siRNA sense strand
gcugacaccuacgaagauc

SEQ ID NO: 861280 - RNA, 19 nt, Homo sapiens
  misc_RNA (1)...(19): siRNA sense strand
acgcugacuuggcucguuu

SEQ ID NO: 861281 - RNA, 19 nt, Homo sapiens
  misc_RNA (1)...(19): siRNA sense strand
caacaucaucgacaacaac

SEQ ID NO: 861282 - RNA, 19 nt, Homo sapiens
  misc_RNA (1)...(19): siRNA sense strand
ugugcuugaugcuggaaua

SEQ ID NO: 861283 - RNA, 19 nt, Homo sapiens
  misc_RNA (1)...(19): siRNA sense strand
ccucaucgacugccucaug

SEQ ID NO: 861284 - RNA, 19 nt, Homo sapiens
  misc_RNA (1)...(19): siRNA sense strand
cgaccggaagcccacuuua

SEQ ID NO: 861285 - RNA, 19 nt, Homo sapiens
  misc_RNA (1)...(19): siRNA sense strand
cacuggaaaucgucucgaa

SEQ ID NO: 861286 - RNA, 19 nt, Homo sapiens
  misc_RNA (1)...(19): siRNA sense strand
ccaagcuucccaauuugaa

SEQ ID NO: 861287 - RNA, 19 nt, Homo sapiens
  misc_RNA (1)...(19): siRNA sense strand
gcgccgagcaccucaucaa

SEQ ID NO: 861288 - RNA, 19 nt, Homo sapiens
  misc_RNA (1)...(19): siRNA sense strand
caucaacagccgcgacaau

SEQ ID NO: 861289 - RNA, 19 nt, Homo sapiens
  misc_RNA (1)...(19): siRNA sense strand
gugguuccauucucugcaa

SEQ ID NO: 861290 - RNA, 19 nt, Homo sapiens
  misc_RNA (1)...(19): siRNA sense strand
uguacgagcagcuguguga

SEQ ID NO: 861291 - RNA, 19 nt, Homo sapiens
  misc_RNA (1)...(19): siRNA sense strand
augagaaguucaccaagga

SEQ ID NO: 861292 - RNA, 19 nt, Homo sapiens
  misc_RNA (1)...(19): siRNA sense strand
gucguggccuccagugaga

SEQ ID NO: 861293 - RNA, 19 nt, Homo sapiens
  misc_RNA (1)...(19): siRNA sense strand
acaacaucaucgacaacaa

SEQ ID NO: 861294 - RNA, 19 nt, Homo sapiens
  misc_RNA (1)...(19): siRNA sense strand
aagcauaacauggacuuug

SEQ ID NO: 861295 - RNA, 19 nt, Homo sapiens
  misc_RNA (1)...(19): siRNA sense strand
acacccaacugcagaucau

SEQ ID NO: 861296 - RNA, 19 nt, Homo sapiens
  misc_RNA (1)...(19): siRNA sense strand
guuuacagcucacgauucc

SEQ ID NO: 861297 - RNA, 19 nt, Homo sapiens
  misc_RNA (1)...(19): siRNA sense strand
gcucggcugcuacguggaa

SEQ ID NO: 861298 - RNA, 19 nt, Homo sapiens
  misc_RNA (1)...(19): siRNA sense strand
ucaacagccgcgacaauuc

SEQ ID NO: 861299 - RNA, 19 nt, Homo sapiens
  misc_RNA (1)...(19): siRNA sense strand
gggagaaugccccgaagua

SEQ ID NO: 861300 - RNA, 19 nt, Homo sapiens
  misc_RNA (1)...(19): siRNA sense strand
cggaacaccucaccaugcu

SEQ ID NO: 861301 - RNA, 19 nt, Homo sapiens
  misc_RNA (1)...(19): siRNA sense strand
cucaugggcuccuguuaca

SEQ ID NO: 861302 - RNA, 19 nt, Homo sapiens
  misc_RNA (1)...(19): siRNA sense strand
gaccggaagcccacuuuac

SEQ ID NO: 861303 - RNA, 19 nt, Homo sapiens
  misc_RNA (1)...(19): siRNA sense strand
ugaccacccaggagcauga

SEQ ID NO: 861304 - RNA, 19 nt, Homo sapiens
  misc_RNA (1)...(19): siRNA sense strand
gacgcugacuuggcucguu

SEQ ID NO: 861305 - RNA, 19 nt, Homo sapiens
  misc_RNA (1)...(19): siRNA sense strand
cacaugagaaguucaccaa

SEQ ID NO: 861306 - RNA, 19 nt, Homo sapiens
  misc_RNA (1)...(19): siRNA sense strand
gcaaagauggcugguucca

SEQ ID NO: 861307 - RNA, 19 nt, Homo sapiens
  misc_RNA (1)...(19): siRNA sense strand
ucaaacugccuucgcucaa

SEQ ID NO: 861308 - RNA, 19 nt, Homo sapiens
  misc_RNA (1)...(19): siRNA sense strand
ucggaaaccuggagaaccu

SEQ ID NO: 861309 - RNA, 19 nt, Homo sapiens
  misc_RNA (1)...(19): siRNA sense strand
gccaucuacuccugcuaug

SEQ ID NO: 861310 - RNA, 19 nt, Homo sapiens
  misc_RNA (1)...(19): siRNA sense strand
gcuggaauacaacaucauc

SEQ ID NO: 861311 - RNA, 19 nt, Homo sapiens
  misc_RNA (1)...(19): siRNA sense strand
ugguggagauccugugcuu

SEQ ID NO: 861312 - RNA, 19 nt, Homo sapiens
  misc_RNA (1)...(19): siRNA sense strand
caguuugcuucaacccauu

SEQ ID NO: 861313 - RNA, 19 nt, Homo sapiens
  misc_RNA (1)...(19): siRNA sense strand
caaccacccaccaccagau

SEQ ID NO: 861314 - RNA, 19 nt, Homo sapiens
  misc_RNA (1)...(19): siRNA sense strand
uccucaagcugcugucaga

SEQ ID NO: 861315 - RNA, 19 nt, Homo sapiens
  misc_RNA (1)...(19): siRNA sense strand
caacagccgcgacaauucc

SEQ ID NO: 861316 - RNA, 19 nt, Homo sapiens
  misc_RNA (1)...(19): siRNA sense strand
ccgcgacugaggcuguuua

SEQ ID NO: 861317 - RNA, 19 nt, Homo sapiens
  misc_RNA (1)...(19): siRNA sense strand
gguccaugguggucaucga

SEQ ID NO: 861318 - RNA, 19 nt, Homo sapiens
  misc_RNA (1)...(19): siRNA sense strand
cgaauccucaagcauaaca

SEQ ID NO: 861319 - RNA, 19 nt, Homo sapiens
  misc_RNA (1)...(19): siRNA sense strand
gcagcaccaugagcaucga

SEQ ID NO: 861320 - RNA, 19 nt, Homo sapiens
  misc_RNA (1)...(19): siRNA sense strand
agaaguucauucagagcau

SEQ ID NO: 861321 - RNA, 19 nt, Homo sapiens
  misc_RNA (1)...(19): siRNA sense strand
ggaaguggugaagaaguuc

SEQ ID NO: 861322 - RNA, 19 nt, Homo sapiens
  misc_RNA (1)...(19): siRNA sense strand
ccgcugggaaguugucuug

SEQ ID NO: 861323 - RNA, 19 nt, Homo sapiens
  misc_RNA (1)...(19): siRNA sense strand
ucaagcauaacauggacuu

SEQ ID NO: 861324 - RNA, 19 nt, Homo sapiens
  misc_RNA (1)...(19): siRNA sense strand
ugaaggagcugcaaaggaa

SEQ ID NO: 861325 - RNA, 19 nt, Homo sapiens
  misc_RNA (1)...(19): siRNA sense strand
caaagaagcucucgcacau

SEQ ID NO: 861326 - RNA, 19 nt, Homo sapiens
  misc_RNA (1)...(19): siRNA sense strand
ggauggaaguggugaagaa

SEQ ID NO: 861327 - RNA, 19 nt, Homo sapiens
  misc_RNA (1)...(19): siRNA sense strand
gaccgucucuggccaguuu

SEQ ID NO: 861328 - RNA, 19 nt, Homo sapiens
  misc_RNA (1)...(19): siRNA sense strand
gaacugaaguacgugauuc

SEQ ID NO: 861329 - RNA, 19 nt, Homo sapiens
  misc_RNA (1)...(19): siRNA sense strand
gcccugagcuccaugaaga

SEQ ID NO: 861330 - RNA, 19 nt, Homo sapiens
  misc_RNA (1)...(19): siRNA sense strand
auaagaaagugcugaguaa

SEQ ID NO: 861331 - RNA, 19 nt, Homo sapiens
  misc_RNA (1)...(19): siRNA sense strand
ggcaagagguccacucaug

SEQ ID NO: 861332 - RNA, 19 nt, Homo sapiens
  misc_RNA (1)...(19): siRNA sense strand
aggccaagcuucccaauuu

SEQ ID NO: 861333 - RNA, 19 nt, Homo sapiens
  misc_RNA (1)...(19): siRNA sense strand
aagaagcucucgcacauga

SEQ ID NO: 861334 - RNA, 19 nt, Homo sapiens
  misc_RNA (1)...(19): siRNA sense strand
ccaaggaacugaaguacgu

SEQ ID NO: 861335 - RNA, 19 nt, Homo sapiens
  misc_RNA (1)...(19): siRNA sense strand
cagcgaauccucaagcaua

SEQ ID NO: 861336 - RNA, 19 nt, Homo sapiens
  misc_RNA (1)...(19): siRNA sense strand
gcugggaaguugucuugaa

SEQ ID NO: 861337 - RNA, 19 nt, Homo sapiens
  misc_RNA (1)...(19): siRNA sense strand
ucucgaaacugcucucaga

SEQ ID NO: 861338 - RNA, 19 nt, Homo sapiens
  misc_RNA (1)...(19): siRNA sense strand
ucaagcugcugucagacua

SEQ ID NO: 861339 - RNA, 19 nt, Homo sapiens
  misc_RNA (1)...(19): siRNA sense strand
gaacagcaccaagcucuca

SEQ ID NO: 861340 - RNA, 19 nt, Homo sapiens
  misc_RNA (1)...(19): siRNA sense strand
uauaagaaagugcugagua

SEQ ID NO: 861341 - RNA, 19 nt, Homo sapiens
  misc_RNA (1)...(19): siRNA sense strand
ccaagccgcugggaaguug

SEQ ID NO: 861342 - RNA, 19 nt, Homo sapiens
  misc_RNA (1)...(19): siRNA sense strand
ucagagaacacaaacuuga

SEQ ID NO: 861343 - RNA, 19 nt, Homo sapiens
  misc_RNA (1)...(19): siRNA sense strand
ccaacuggguacauggaaa

SEQ ID NO: 861344 - RNA, 19 nt, Homo sapiens
  misc_RNA (1)...(19): siRNA sense strand
gcuugaugcuggaauacaa

SEQ ID NO: 861345 - RNA, 19 nt, Homo sapiens
  misc_RNA (1)...(19): siRNA sense strand
uggaaguggugaagaaguu

SEQ ID NO: 861346 - RNA, 19 nt, Homo sapiens
  misc_RNA (1)...(19): siRNA sense strand
ggccaagcuucccaauuug

SEQ ID NO: 861347 - RNA, 19 nt, Homo sapiens
  misc_RNA (1)...(19): siRNA sense strand
ggaacugaaguacgugauu

SEQ ID NO: 861348 - RNA, 19 nt, Homo sapiens
  misc_RNA (1)...(19): siRNA sense strand
guacauccuugccuugaac

SEQ ID NO: 861349 - RNA, 19 nt, Homo sapiens
  misc_RNA (1)...(19): siRNA sense strand
caacaacgacacccaacug

SEQ ID NO: 861350 - RNA, 19 nt, Homo sapiens
  misc_RNA (1)...(19): siRNA sense strand
guggagauccugugcuuga

SEQ ID NO: 861351 - RNA, 19 nt, Homo sapiens
  misc_RNA (1)...(19): siRNA sense strand
caucuacuccugcuaugaa

SEQ ID NO: 861352 - RNA, 19 nt, Homo sapiens
  misc_RNA (1)...(19): siRNA sense strand
ucaccaaggaacugaagua

SEQ ID NO: 861353 - RNA, 19 nt, Homo sapiens
  misc_RNA (1)...(19): siRNA sense strand
cugggaaguugucuugaaa

SEQ ID NO: 861354 - RNA, 19 nt, Homo sapiens
  misc_RNA (1)...(19): siRNA sense strand
cgacugaggcuguuuacuc

SEQ ID NO: 861355 - RNA, 19 nt, Homo sapiens
  misc_RNA (1)...(19): siRNA sense strand
ggaaaucgucucgaaacug

SEQ ID NO: 861356 - RNA, 19 nt, Homo sapiens
  misc_RNA (1)...(19): siRNA sense strand
caaacugccuucgcucaag

SEQ ID NO: 861357 - RNA, 19 nt, Homo sapiens
  misc_RNA (1)...(19): siRNA sense strand
agaucucugugaauucuuu

SEQ ID NO: 861358 - RNA, 19 nt, Homo sapiens
  misc_RNA (1)...(19): siRNA sense strand
ucucugcaguuuaaacaug

SEQ ID NO: 861359 - RNA, 19 nt, Homo sapiens
  misc_RNA (1)...(19): siRNA sense strand
cagcgcaauugaagacguu

SEQ ID NO: 861360 - RNA, 19 nt, Homo sapiens
  misc_RNA (1)...(19): siRNA sense strand
aauacaacaucaucgacaa

SEQ ID NO: 861361 - RNA, 19 nt, Homo sapiens
  misc_RNA (1)...(19): siRNA sense strand
gaaggagcugcaaaggaaa

SEQ ID NO: 861362 - RNA, 19 nt, Homo sapiens
  misc_RNA (1)...(19): siRNA sense strand
cagcugacaccuacgaaga

SEQ ID NO: 861363 - RNA, 19 nt, Homo sapiens
  misc_RNA (1)...(19): siRNA sense strand
uaacacugcccuccaaguc

SEQ ID NO: 861364 - RNA, 19 nt, Homo sapiens
  misc_RNA (1)...(19): siRNA sense strand
gaaguggacguccgcuaca

SEQ ID NO: 861365 - RNA, 19 nt, Homo sapiens
  misc_RNA (1)...(19): siRNA sense strand
ccgagcaccucaucaaacu

SEQ ID NO: 861366 - RNA, 19 nt, Homo sapiens
  misc_RNA (1)...(19): siRNA sense strand
ggagauccugugcuugaug

SEQ ID NO: 861367 - RNA, 19 nt, Homo sapiens
  misc_RNA (1)...(19): siRNA sense strand
ggcuaacacugcccuccaa

SEQ ID NO: 861368 - RNA, 19 nt, Homo sapiens
  misc_RNA (1)...(19): siRNA sense strand
agcgaauccucaagcauaa

SEQ ID NO: 861369 - RNA, 19 nt, Homo sapiens
  misc_RNA (1)...(19): siRNA sense strand
guccacagacgcugacuug

SEQ ID NO: 861370 - RNA, 19 nt, Homo sapiens
  misc_RNA (1)...(19): siRNA sense strand
gaguacauccuugccuuga

SEQ ID NO: 861371 - RNA, 19 nt, Homo sapiens
  misc_RNA (1)...(19): siRNA sense strand
gccaagcuucccaauuuga

SEQ ID NO: 861372 - RNA, 19 nt, Homo sapiens
  misc_RNA (1)...(19): siRNA sense strand
gcugacaccuacgaagauc

SEQ ID NO: 861373 - RNA, 19 nt, Homo sapiens
  misc_RNA (1)...(19): siRNA sense strand
acgcugacuuggcucguuu

SEQ ID NO: 861374 - RNA, 19 nt, Homo sapiens
  misc_RNA (1)...(19): siRNA sense strand
caacaucaucgacaacaac

SEQ ID NO: 861375 - RNA, 19 nt, Homo sapiens
  misc_RNA (1)...(19): siRNA sense strand
ugugcuugaugcuggaaua

SEQ ID NO: 861376 - RNA, 19 nt, Homo sapiens
  misc_RNA (1)...(19): siRNA sense strand
ccucaucgacugccucaug

SEQ ID NO: 861377 - RNA, 19 nt, Homo sapiens
  misc_RNA (1)...(19): siRNA sense strand
cgaccggaagcccacuuua

SEQ ID NO: 861378 - RNA, 19 nt, Homo sapiens
  misc_RNA (1)...(19): siRNA sense strand
cacuggaaaucgucucgaa

SEQ ID NO: 861379 - RNA, 19 nt, Homo sapiens
  misc_RNA (1)...(19): siRNA sense strand
ccaagcuucccaauuugaa

SEQ ID NO: 861380 - RNA, 19 nt, Homo sapiens
  misc_RNA (1)...(19): siRNA sense strand
gcgccgagcaccucaucaa

SEQ ID NO: 861381 - RNA, 19 nt, Homo sapiens
  misc_RNA (1)...(19): siRNA sense strand
caucaacagccgcgacaau

SEQ ID NO: 861382 - RNA, 19 nt, Homo sapiens
  misc_RNA (1)...(19): siRNA sense strand
gugguuccauucucugcaa

SEQ ID NO: 861383 - RNA, 19 nt, Homo sapiens
  misc_RNA (1)...(19): siRNA sense strand
uguacgagcagcuguguga

SEQ ID NO: 861384 - RNA, 19 nt, Homo sapiens
  misc_RNA (1)...(19): siRNA sense strand
augagaaguucaccaagga

SEQ ID NO: 861385 - RNA, 19 nt, Homo sapiens
  misc_RNA (1)...(19): siRNA sense strand
gucguggccuccagugaga

SEQ ID NO: 861386 - RNA, 19 nt, Homo sapiens
  misc_RNA (1)...(19): siRNA sense strand
acaacaucaucgacaacaa

SEQ ID NO: 861387 - RNA, 19 nt, Homo sapiens
  misc_RNA (1)...(19): siRNA sense strand
aagcauaacauggacuuug

SEQ ID NO: 861388 - RNA, 19 nt, Homo sapiens
  misc_RNA (1)...(19): siRNA sense strand
acacccaacugcagaucau

SEQ ID NO: 861389 - RNA, 19 nt, Homo sapiens
  misc_RNA (1)...(19): siRNA sense strand
guuuacagcucacgauucc

SEQ ID NO: 861390 - RNA, 19 nt, Homo sapiens
  misc_RNA (1)...(19): siRNA sense strand
gcucggcugcuacguggaa

SEQ ID NO: 861391 - RNA, 19 nt, Homo sapiens
  misc_RNA (1)...(19): siRNA sense strand
ucaacagccgcgacaauuc

SEQ ID NO: 861392 - RNA, 19 nt, Homo sapiens
  misc_RNA (1)...(19): siRNA sense strand
gggagaaugccccgaagua

SEQ ID NO: 861393 - RNA, 19 nt, Homo sapiens
  misc_RNA (1)...(19): siRNA sense strand
cggaacaccucaccaugcu

SEQ ID NO: 861394 - RNA, 19 nt, Homo sapiens
  misc_RNA (1)...(19): siRNA sense strand
cucaugggcuccuguuaca

SEQ ID NO: 861395 - RNA, 19 nt, Homo sapiens
  misc_RNA (1)...(19): siRNA sense strand
gaccggaagcccacuuuac

SEQ ID NO: 861396 - RNA, 19 nt, Homo sapiens
  misc_RNA (1)...(19): siRNA sense strand
ugaccacccaggagcauga

SEQ ID NO: 861397 - RNA, 19 nt, Homo sapiens
  misc_RNA (1)...(19): siRNA sense strand
gacgcugacuuggcucguu

SEQ ID NO: 861398 - RNA, 19 nt, Homo sapiens
  misc_RNA (1)...(19): siRNA sense strand
cacaugagaaguucaccaa

SEQ ID NO: 861399 - RNA, 19 nt, Homo sapiens
  misc_RNA (1)...(19): siRNA sense strand
gcaaagauggcugguucca

SEQ ID NO: 861400 - RNA, 19 nt, Homo sapiens
  misc_RNA (1)...(19): siRNA sense strand
ucaaacugccuucgcucaa

SEQ ID NO: 861401 - RNA, 19 nt, Homo sapiens
  misc_RNA (1)...(19): siRNA sense strand
ucggaaaccuggagaaccu

SEQ ID NO: 861402 - RNA, 19 nt, Homo sapiens
  misc_RNA (1)...(19): siRNA sense strand
gccaucuacuccugcuaug

SEQ ID NO: 861403 - RNA, 19 nt, Homo sapiens
  misc_RNA (1)...(19): siRNA sense strand
gcuggaauacaacaucauc

SEQ ID NO: 861404 - RNA, 19 nt, Homo sapiens
  misc_RNA (1)...(19): siRNA sense strand
ugguggagauccugugcuu

SEQ ID NO: 861405 - RNA, 19 nt, Homo sapiens
  misc_RNA (1)...(19): siRNA sense strand
caguuugcuucaacccauu

SEQ ID NO: 861406 - RNA, 19 nt, Homo sapiens
  misc_RNA (1)...(19): siRNA sense strand
caaccacccaccaccagau

SEQ ID NO: 861407 - RNA, 19 nt, Homo sapiens
  misc_RNA (1)...(19): siRNA sense strand
uccucaagcugcugucaga

SEQ ID NO: 861408 - RNA, 19 nt, Homo sapiens
  misc_RNA (1)...(19): siRNA sense strand
caacagccgcgacaauucc

SEQ ID NO: 861409 - RNA, 19 nt, Homo sapiens
  misc_RNA (1)...(19): siRNA sense strand
ccgcgacugaggcuguuua

SEQ ID NO: 861410 - RNA, 19 nt, Homo sapiens
  misc_RNA (1)...(19): siRNA sense strand
gguccaugguggucaucga

SEQ ID NO: 861411 - RNA, 19 nt, Homo sapiens
  misc_RNA (1)...(19): siRNA sense strand
cgaauccucaagcauaaca

SEQ ID NO: 861412 - RNA, 19 nt, Homo sapiens
  misc_RNA (1)...(19): siRNA sense strand
gcagcaccaugagcaucga

SEQ ID NO: 861413 - RNA, 19 nt, Homo sapiens
  misc_RNA (1)...(19): siRNA sense strand
agaaguucauucagagcau

SEQ ID NO: 861414 - RNA, 19 nt, Homo sapiens
  misc_RNA (1)...(19): siRNA sense strand
ggaaguggugaagaaguuc

SEQ ID NO: 861415 - RNA, 19 nt, Homo sapiens
  misc_RNA (1)...(19): siRNA sense strand
ccgcugggaaguugucuug

SEQ ID NO: 861416 - RNA, 19 nt, Homo sapiens
  misc_RNA (1)...(19): siRNA sense strand
ucaagcauaacauggacuu

SEQ ID NO: 861417 - RNA, 19 nt, Homo sapiens
  misc_RNA (1)...(19): siRNA sense strand
gaacaaacccuacucaauc

SEQ ID NO: 861418 - RNA, 19 nt, Homo sapiens
  misc_RNA (1)...(19): siRNA sense strand
ggacagcugugaauacauc

SEQ ID NO: 861419 - RNA, 19 nt, Homo sapiens
  misc_RNA (1)...(19): siRNA sense strand
gcacauuggugucuucauc

SEQ ID NO: 861420 - RNA, 19 nt, Homo sapiens
  misc_RNA (1)...(19): siRNA sense strand
ggauggagcugcugaaacu

SEQ ID NO: 861421 - RNA, 19 nt, Homo sapiens
  misc_RNA (1)...(19): siRNA sense strand
ucaacaacaucauccagua

SEQ ID NO: 861422 - RNA, 19 nt, Homo sapiens
  misc_RNA (1)...(19): siRNA sense strand
gaggaggacuuccaguuca

SEQ ID NO: 861423 - RNA, 19 nt, Homo sapiens
  misc_RNA (1)...(19): siRNA sense strand
gaagagcagcgacguccua

SEQ ID NO: 861424 - RNA, 19 nt, Homo sapiens
  misc_RNA (1)...(19): siRNA sense strand
acaagggccugacggauga

SEQ ID NO: 861425 - RNA, 19 nt, Homo sapiens
  misc_RNA (1)...(19): siRNA sense strand
ugaaacugcugcugacaug

SEQ ID NO: 861426 - RNA, 19 nt, Homo sapiens
  misc_RNA (1)...(19): siRNA sense strand
cuaacuacauccacgauau

SEQ ID NO: 861427 - RNA, 19 nt, Homo sapiens
  misc_RNA (1)...(19): siRNA sense strand
ccaagaagauccaguucca

SEQ ID NO: 861428 - RNA, 19 nt, Homo sapiens
  misc_RNA (1)...(19): siRNA sense strand
ggacaucccagucuucaca

SEQ ID NO: 861429 - RNA, 19 nt, Homo sapiens
  misc_RNA (1)...(19): siRNA sense strand
ccugagaaccuguuuguga

SEQ ID NO: 861430 - RNA, 19 nt, Homo sapiens
  misc_RNA (1)...(19): siRNA sense strand
agaagcagaucguccugaa

SEQ ID NO: 861431 - RNA, 19 nt, Homo sapiens
  misc_RNA (1)...(19): siRNA sense strand
cugagaaccuguuugugaa

SEQ ID NO: 861432 - RNA, 19 nt, Homo sapiens
  misc_RNA (1)...(19): siRNA sense strand
gcaaguaccaggccaacuc

SEQ ID NO: 861433 - RNA, 19 nt, Homo sapiens
  misc_RNA (1)...(19): siRNA sense strand
ugaacaaacccuacucaau

SEQ ID NO: 861434 - RNA, 19 nt, Homo sapiens
  misc_RNA (1)...(19): siRNA sense strand
caucauccaguaccaguuu

SEQ ID NO: 861435 - RNA, 19 nt, Homo sapiens
  misc_RNA (1)...(19): siRNA sense strand
gcuacaaggccguugagaa

SEQ ID NO: 861436 - RNA, 19 nt, Homo sapiens
  misc_RNA (1)...(19): siRNA sense strand
uugacaagcugaccgagaa

SEQ ID NO: 861437 - RNA, 19 nt, Homo sapiens
  misc_RNA (1)...(19): siRNA sense strand
cuacaaggccguugagaag

SEQ ID NO: 861438 - RNA, 19 nt, Homo sapiens
  misc_RNA (1)...(19): siRNA sense strand
gugcugcccuacaucuuug

SEQ ID NO: 861439 - RNA, 19 nt, Homo sapiens
  misc_RNA (1)...(19): siRNA sense strand
gaagaucugcaucgacaag

SEQ ID NO: 861440 - RNA, 19 nt, Homo sapiens
  misc_RNA (1)...(19): siRNA sense strand
ucaagagccuguccauggu

SEQ ID NO: 861441 - RNA, 19 nt, Homo sapiens
  misc_RNA (1)...(19): siRNA sense strand
gcagcgacguccuagacau

SEQ ID NO: 861442 - RNA, 19 nt, Homo sapiens
  misc_RNA (1)...(19): siRNA sense strand
gaaccuguuugugaacuac

SEQ ID NO: 861443 - RNA, 19 nt, Homo sapiens
  misc_RNA (1)...(19): siRNA sense strand
agaagaggaugaugagcau

SEQ ID NO: 861444 - RNA, 19 nt, Homo sapiens
  misc_RNA (1)...(19): siRNA sense strand
agaccuaccugccuaacuc

SEQ ID NO: 861445 - RNA, 19 nt, Homo sapiens
  misc_RNA (1)...(19): siRNA sense strand
ucaucuaucugaggaaugu

SEQ ID NO: 861446 - RNA, 19 nt, Homo sapiens
  misc_RNA (1)...(19): siRNA sense strand
ccaccaagaagauccaguu

SEQ ID NO: 861447 - RNA, 19 nt, Homo sapiens
  misc_RNA (1)...(19): siRNA sense strand
cugccuaacuccaccaaga

SEQ ID NO: 861448 - RNA, 19 nt, Homo sapiens
  misc_RNA (1)...(19): siRNA sense strand
guacgacaccgacgugaag

SEQ ID NO: 861449 - RNA, 19 nt, Homo sapiens
  misc_RNA (1)...(19): siRNA sense strand
gagccaggcacccucaaga

SEQ ID NO: 861450 - RNA, 19 nt, Homo sapiens
  misc_RNA (1)...(19): siRNA sense strand
gacgugaagcuguuugaga

SEQ ID NO: 861451 - RNA, 19 nt, Homo sapiens
  misc_RNA (1)...(19): siRNA sense strand
uaacuacauccacgauaug

SEQ ID NO: 861452 - RNA, 19 nt, Homo sapiens
  misc_RNA (1)...(19): siRNA sense strand
gaugcacauuggugucuuc

SEQ ID NO: 861453 - RNA, 19 nt, Homo sapiens
  misc_RNA (1)...(19): siRNA sense strand
gagcagcgacguccuagac

SEQ ID NO: 861454 - RNA, 19 nt, Homo sapiens
  misc_RNA (1)...(19): siRNA sense strand
acaccgacgugaagcuguu

SEQ ID NO: 861455 - RNA, 19 nt, Homo sapiens
  misc_RNA (1)...(19): siRNA sense strand
ugauccagcucaccaccaa

SEQ ID NO: 861456 - RNA, 19 nt, Homo sapiens
  misc_RNA (1)...(19): siRNA sense strand
gaggagggcagggagaaga

SEQ ID NO: 861457 - RNA, 19 nt, Homo sapiens
  misc_RNA (1)...(19): siRNA sense strand
agagucacccuccaacuug

SEQ ID NO: 861458 - RNA, 19 nt, Homo sapiens
  misc_RNA (1)...(19): siRNA sense strand
ccauggacaucccagucuu

SEQ ID NO: 861459 - RNA, 19 nt, Homo sapiens
  misc_RNA (1)...(19): siRNA sense strand
gggaagagucacccuccaa

SEQ ID NO: 861460 - RNA, 19 nt, Homo sapiens
  misc_RNA (1)...(19): siRNA sense strand
acgugaagcuguuugagau

SEQ ID NO: 861461 - RNA, 19 nt, Homo sapiens
  misc_RNA (1)...(19): siRNA sense strand
cuggaggucuucaacaaca

SEQ ID NO: 861462 - RNA, 19 nt, Homo sapiens
  misc_RNA (1)...(19): siRNA sense strand
gcucugcgacuucaacaag

SEQ ID NO: 861463 - RNA, 19 nt, Homo sapiens
  misc_RNA (1)...(19): siRNA sense strand
gugaggaggacuuccaguu

SEQ ID NO: 861464 - RNA, 19 nt, Homo sapiens
  misc_RNA (1)...(19): siRNA sense strand
gagaaccuguuugugaacu

SEQ ID NO: 861465 - RNA, 19 nt, Homo sapiens
  misc_RNA (1)...(19): siRNA sense strand
gugaagcuguuugagauac

SEQ ID NO: 861466 - RNA, 19 nt, Homo sapiens
  misc_RNA (1)...(19): siRNA sense strand
ucuggaagcucugcgacuu

SEQ ID NO: 861467 - RNA, 19 nt, Homo sapiens
  misc_RNA (1)...(19): siRNA sense strand
ugaggaggacuuccaguuc

SEQ ID NO: 861468 - RNA, 19 nt, Homo sapiens
  misc_RNA (1)...(19): siRNA sense strand
gguggcuacuccaggcauu

SEQ ID NO: 861469 - RNA, 19 nt, Homo sapiens
  misc_RNA (1)...(19): siRNA sense strand
gcccggacuucacgguuca

SEQ ID NO: 861470 - RNA, 19 nt, Homo sapiens
  misc_RNA (1)...(19): siRNA sense strand
cgagaagucccagguguca

SEQ ID NO: 861471 - RNA, 19 nt, Homo sapiens
  misc_RNA (1)...(19): siRNA sense strand
gcaacuccaaccuggucua

SEQ ID NO: 861472 - RNA, 19 nt, Homo sapiens
  misc_RNA (1)...(19): siRNA sense strand
caacaacaucauccaguac

SEQ ID NO: 861473 - RNA, 19 nt, Homo sapiens
  misc_RNA (1)...(19): siRNA sense strand
agaaccuguuugugaacua

SEQ ID NO: 861474 - RNA, 19 nt, Homo sapiens
  misc_RNA (1)...(19): siRNA sense strand
gcccugagaaccuguuugu

SEQ ID NO: 861475 - RNA, 19 nt, Homo sapiens
  misc_RNA (1)...(19): siRNA sense strand
cccauggguucaguucuuu

SEQ ID NO: 861476 - RNA, 19 nt, Homo sapiens
  misc_RNA (1)...(19): siRNA sense strand
gcagggagaagaggaugau

SEQ ID NO: 861477 - RNA, 19 nt, Homo sapiens
  misc_RNA (1)...(19): siRNA sense strand
acgccgaccugcucauugu

SEQ ID NO: 861478 - RNA, 19 nt, Homo sapiens
  misc_RNA (1)...(19): siRNA sense strand
agccaccgaugaugccuuu

SEQ ID NO: 861479 - RNA, 19 nt, Homo sapiens
  misc_RNA (1)...(19): siRNA sense strand
gaagagucacccuccaacu

SEQ ID NO: 861480 - RNA, 19 nt, Homo sapiens
  misc_RNA (1)...(19): siRNA sense strand
ggugcucauugucacuuug

SEQ ID NO: 861481 - RNA, 19 nt, Homo sapiens
  misc_RNA (1)...(19): siRNA sense strand
gggagaagaggaugaugag

SEQ ID NO: 861482 - RNA, 19 nt, Homo sapiens
  misc_RNA (1)...(19): siRNA sense strand
cgucaucuaucugaggaau

SEQ ID NO: 861483 - RNA, 19 nt, Homo sapiens
  misc_RNA (1)...(19): siRNA sense strand
cgacuucaacaagaaauuc

SEQ ID NO: 861484 - RNA, 19 nt, Homo sapiens
  misc_RNA (1)...(19): siRNA sense strand
gcccaggugcucauuguca

SEQ ID NO: 861485 - RNA, 19 nt, Homo sapiens
  misc_RNA (1)...(19): siRNA sense strand
caccugcucuucucugacu

SEQ ID NO: 861486 - RNA, 19 nt, Homo sapiens
  misc_RNA (1)...(19): siRNA sense strand
uugcugaccugcucuucug

SEQ ID NO: 861487 - RNA, 19 nt, Homo sapiens
  misc_RNA (1)...(19): siRNA sense strand
ugaagcuguuugagauaca

SEQ ID NO: 861488 - RNA, 19 nt, Homo sapiens
  misc_RNA (1)...(19): siRNA sense strand
agaagucccaggugucaga

SEQ ID NO: 861489 - RNA, 19 nt, Homo sapiens
  misc_RNA (1)...(19): siRNA sense strand
aagagucacccuccaacuu

SEQ ID NO: 861490 - RNA, 19 nt, Homo sapiens
  misc_RNA (1)...(19): siRNA sense strand
gcugaacaaacccuacuca

SEQ ID NO: 861491 - RNA, 19 nt, Homo sapiens
  misc_RNA (1)...(19): siRNA sense strand
ucugcgacuucaacaagaa

SEQ ID NO: 861492 - RNA, 19 nt, Homo sapiens
  misc_RNA (1)...(19): siRNA sense strand
cuggacagcugugaauaca

SEQ ID NO: 861493 - RNA, 19 nt, Homo sapiens
  misc_RNA (1)...(19): siRNA sense strand
ggugugggcuucgcucacu

SEQ ID NO: 861494 - RNA, 19 nt, Homo sapiens
  misc_RNA (1)...(19): siRNA sense strand
ugagauacagcggguguga

SEQ ID NO: 861495 - RNA, 19 nt, Homo sapiens
  misc_RNA (1)...(19): siRNA sense strand
uggagaagaucugcaucga

SEQ ID NO: 861496 - RNA, 19 nt, Homo sapiens
  misc_RNA (1)...(19): siRNA sense strand
acauuggugucuucaucuu

SEQ ID NO: 861497 - RNA, 19 nt, Homo sapiens
  misc_RNA (1)...(19): siRNA sense strand
accaggagcugcuaguucu

SEQ ID NO: 861498 - RNA, 19 nt, Homo sapiens
  misc_RNA (1)...(19): siRNA sense strand
uccuggaggucuucaacaa

SEQ ID NO: 861499 - RNA, 19 nt, Homo sapiens
  misc_RNA (1)...(19): siRNA sense strand
cgugaagcuguuugagaua

SEQ ID NO: 861500 - RNA, 19 nt, Homo sapiens
  misc_RNA (1)...(19): siRNA sense strand
gguacgacaccgacgugaa

SEQ ID NO: 861501 - RNA, 19 nt, Homo sapiens
  misc_RNA (1)...(19): siRNA sense strand
ccaugugguuccgcaccua

SEQ ID NO: 861502 - RNA, 19 nt, Homo sapiens
  misc_RNA (1)...(19): siRNA sense strand
cgugcugcccuacaucuuu

SEQ ID NO: 861503 - RNA, 19 nt, Homo sapiens
  misc_RNA (1)...(19): siRNA sense strand
ccuaacuacauccacgaua

SEQ ID NO: 861504 - RNA, 19 nt, Homo sapiens
  misc_RNA (1)...(19): siRNA sense strand
ugacggaugagucugagau

SEQ ID NO: 861505 - RNA, 19 nt, Homo sapiens
  misc_RNA (1)...(19): siRNA sense strand
acaaggccguugagaagcu

SEQ ID NO: 861506 - RNA, 19 nt, Homo sapiens
  misc_RNA (1)...(19): siRNA sense strand
gcgacuucaacaagaaauu

SEQ ID NO: 861507 - RNA, 19 nt, Homo sapiens
  misc_RNA (1)...(19): siRNA sense strand
cuacauccacgauaugaac

SEQ ID NO: 861508 - RNA, 19 nt, Homo sapiens
  misc_RNA (1)...(19): siRNA sense strand
ggucuucaacaacaucauc

SEQ ID NO: 861509 - RNA, 19 nt, Homo sapiens
  misc_RNA (1)...(19): siRNA sense strand
gggugggccugaugcacau

SEQ ID NO: 861510 - RNA, 19 nt, Homo sapiens
  misc_RNA (1)...(19): siRNA sense strand
acaaccaccugcucuucuc

SEQ ID NO: 861511 - RNA, 19 nt, Homo sapiens
  misc_RNA (1)...(19): siRNA sense strand
ucaccucccuccucaacac

SEQ ID NO: 861512 - RNA, 19 nt, Homo sapiens
  misc_RNA (1)...(19): siRNA sense strand
guagacagcuuucgaauga

SEQ ID NO: 861513 - RNA, 19 nt, Homo sapiens
  misc_RNA (1)...(19): siRNA sense strand
gacaauagccucagucauu

SEQ ID NO: 861514 - RNA, 19 nt, Homo sapiens
  misc_RNA (1)...(19): siRNA sense strand
caauaaggauccaaucuug

SEQ ID NO: 861515 - RNA, 19 nt, Homo sapiens
  misc_RNA (1)...(19): siRNA sense strand
caaccgauccaaacaguua

SEQ ID NO: 861516 - RNA, 19 nt, Homo sapiens
  misc_RNA (1)...(19): siRNA sense strand
acaauagccucagucauua

SEQ ID NO: 861517 - RNA, 19 nt, Homo sapiens
  misc_RNA (1)...(19): siRNA sense strand
cagaagccauuguaguuaa

SEQ ID NO: 861518 - RNA, 19 nt, Homo sapiens
  misc_RNA (1)...(19): siRNA sense strand
ggauugggaucuggacuaa

SEQ ID NO: 861519 - RNA, 19 nt, Homo sapiens
  misc_RNA (1)...(19): siRNA sense strand
acaagaaauugcugggaua

SEQ ID NO: 861520 - RNA, 19 nt, Homo sapiens
  misc_RNA (1)...(19): siRNA sense strand
ccaccuaucuuggcugaaa

SEQ ID NO: 861521 - RNA, 19 nt, Homo sapiens
  misc_RNA (1)...(19): siRNA sense strand
gcaagacaaaucauuaaga

SEQ ID NO: 861522 - RNA, 19 nt, Homo sapiens
  misc_RNA (1)...(19): siRNA sense strand
ggagagaucaaguacagaa

SEQ ID NO: 861523 - RNA, 19 nt, Homo sapiens
  misc_RNA (1)...(19): siRNA sense strand
gacaaaucauuaagaagga

SEQ ID NO: 861524 - RNA, 19 nt, Homo sapiens
  misc_RNA (1)...(19): siRNA sense strand
ucaagggccucaaccaguu

SEQ ID NO: 861525 - RNA, 19 nt, Homo sapiens
  misc_RNA (1)...(19): siRNA sense strand
gcauugacauucgccauug

SEQ ID NO: 861526 - RNA, 19 nt, Homo sapiens
  misc_RNA (1)...(19): siRNA sense strand
aaacaugauuccugucaau

SEQ ID NO: 861527 - RNA, 19 nt, Homo sapiens
  misc_RNA (1)...(19): siRNA sense strand
agacagcuuucgaaugauu

SEQ ID NO: 861528 - RNA, 19 nt, Homo sapiens
  misc_RNA (1)...(19): siRNA sense strand
agaaauugcugggauaugu

SEQ ID NO: 861529 - RNA, 19 nt, Homo sapiens
  misc_RNA (1)...(19): siRNA sense strand
cagugaugcugcugguuua

SEQ ID NO: 861530 - RNA, 19 nt, Homo sapiens
  misc_RNA (1)...(19): siRNA sense strand
aggauuaacugcaacuuug

SEQ ID NO: 861531 - RNA, 19 nt, Homo sapiens
  misc_RNA (1)...(19): siRNA sense strand
gcaagcaaaucggaacaca

SEQ ID NO: 861532 - RNA, 19 nt, Homo sapiens
  misc_RNA (1)...(19): siRNA sense strand
auucauggcuucaagagaa

SEQ ID NO: 861533 - RNA, 19 nt, Homo sapiens
  misc_RNA (1)...(19): siRNA sense strand
gguuucagauucagagaug

SEQ ID NO: 861534 - RNA, 19 nt, Homo sapiens
  misc_RNA (1)...(19): siRNA sense strand
aagcaaaucggaacacauu

SEQ ID NO: 861535 - RNA, 19 nt, Homo sapiens
  misc_RNA (1)...(19): siRNA sense strand
ggaauucugccaccuaucu

SEQ ID NO: 861536 - RNA, 19 nt, Homo sapiens
  misc_RNA (1)...(19): siRNA sense strand
ugaugcugcugguuuauga

SEQ ID NO: 861537 - RNA, 19 nt, Homo sapiens
  misc_RNA (1)...(19): siRNA sense strand
cugcaggucuuguagaaau

SEQ ID NO: 861538 - RNA, 19 nt, Homo sapiens
  misc_RNA (1)...(19): siRNA sense strand
uaacagaagccauuguagu

SEQ ID NO: 861539 - RNA, 19 nt, Homo sapiens
  misc_RNA (1)...(19): siRNA sense strand
aacaaaggauuaacugcaa

SEQ ID NO: 861540 - RNA, 19 nt, Homo sapiens
  misc_RNA (1)...(19): siRNA sense strand
uggaaggguuauuugguuu

SEQ ID NO: 861541 - RNA, 19 nt, Homo sapiens
  misc_RNA (1)...(19): siRNA sense strand
acagaagccauuguaguua

SEQ ID NO: 861542 - RNA, 19 nt, Homo sapiens
  misc_RNA (1)...(19): siRNA sense strand
ucaauaaggauccaaucuu

SEQ ID NO: 861543 - RNA, 19 nt, Homo sapiens
  misc_RNA (1)...(19): siRNA sense strand
caugauuccugucaauaag

SEQ ID NO: 861544 - RNA, 19 nt, Homo sapiens
  misc_RNA (1)...(19): siRNA sense strand
gaaauugcugggauaugug

SEQ ID NO: 861545 - RNA, 19 nt, Homo sapiens
  misc_RNA (1)...(19): siRNA sense strand
ccauuguaguuaacccuuu

SEQ ID NO: 861546 - RNA, 19 nt, Homo sapiens
  misc_RNA (1)...(19): siRNA sense strand
uguagaaauuugccugaug

SEQ ID NO: 861547 - RNA, 19 nt, Homo sapiens
  misc_RNA (1)...(19): siRNA sense strand
gcaggucuuguagaaauuu

SEQ ID NO: 861548 - RNA, 19 nt, Homo sapiens
  misc_RNA (1)...(19): siRNA sense strand
gggccucaacaaaggauua

SEQ ID NO: 861549 - RNA, 19 nt, Homo sapiens
  misc_RNA (1)...(19): siRNA sense strand
ggacuaacagaagccauug

SEQ ID NO: 861550 - RNA, 19 nt, Homo sapiens
  misc_RNA (1)...(19): siRNA sense strand
aacagaagccauuguaguu

SEQ ID NO: 861551 - RNA, 19 nt, Homo sapiens
  misc_RNA (1)...(19): siRNA sense strand
ggccugcuucccaagauua

SEQ ID NO: 861552 - RNA, 19 nt, Homo sapiens
  misc_RNA (1)...(19): siRNA sense strand
aagaagggauuuuagcuuu

SEQ ID NO: 861553 - RNA, 19 nt, Homo sapiens
  misc_RNA (1)...(19): siRNA sense strand
gaugugcaaccgauccaaa

SEQ ID NO: 861554 - RNA, 19 nt, Homo sapiens
  misc_RNA (1)...(19): siRNA sense strand
caauagccucagucauuaa

SEQ ID NO: 861555 - RNA, 19 nt, Homo sapiens
  misc_RNA (1)...(19): siRNA sense strand
uauaaaagcuugguagaca

SEQ ID NO: 861556 - RNA, 19 nt, Homo sapiens
  misc_RNA (1)...(19): siRNA sense strand
gcugcugguuuaugaauac

SEQ ID NO: 861557 - RNA, 19 nt, Homo sapiens
  misc_RNA (1)...(19): siRNA sense strand
acaugauuccugucaauaa

SEQ ID NO: 861558 - RNA, 19 nt, Homo sapiens
  misc_RNA (1)...(19): siRNA sense strand
gaucguggccggugguucu

SEQ ID NO: 861559 - RNA, 19 nt, Homo sapiens
  misc_RNA (1)...(19): siRNA sense strand
gguagacagcuuucgaaug

SEQ ID NO: 861560 - RNA, 19 nt, Homo sapiens
  misc_RNA (1)...(19): siRNA sense strand
caagaaauugcugggauau

SEQ ID NO: 861561 - RNA, 19 nt, Homo sapiens
  misc_RNA (1)...(19): siRNA sense strand
ggcaacagucuaucaggaa

SEQ ID NO: 861562 - RNA, 19 nt, Homo sapiens
  misc_RNA (1)...(19): siRNA sense strand
ccuuugagcaguacaagaa

SEQ ID NO: 861563 - RNA, 19 nt, Homo sapiens
  misc_RNA (1)...(19): siRNA sense strand
acuaacagaagccauugua

SEQ ID NO: 861564 - RNA, 19 nt, Homo sapiens
  misc_RNA (1)...(19): siRNA sense strand
gaagggauuuuagcuuugu

SEQ ID NO: 861565 - RNA, 19 nt, Homo sapiens
  misc_RNA (1)...(19): siRNA sense strand
aaacaauggcaacagucua

SEQ ID NO: 861566 - RNA, 19 nt, Homo sapiens
  misc_RNA (1)...(19): siRNA sense strand
auggaaggguuauuugguu

SEQ ID NO: 861567 - RNA, 19 nt, Homo sapiens
  misc_RNA (1)...(19): siRNA sense strand
gaagaagggauuuuagcuu

SEQ ID NO: 861568 - RNA, 19 nt, Homo sapiens
  misc_RNA (1)...(19): siRNA sense strand
cuggagagaucaaguacag

SEQ ID NO: 861569 - RNA, 19 nt, Homo sapiens
  misc_RNA (1)...(19): siRNA sense strand
auugggaucuggacuaaca

SEQ ID NO: 861570 - RNA, 19 nt, Homo sapiens
  misc_RNA (1)...(19): siRNA sense strand
gagaucaaguacagaaccu

SEQ ID NO: 861571 - RNA, 19 nt, Homo sapiens
  misc_RNA (1)...(19): siRNA sense strand
cacuguggguuaugcaaga

SEQ ID NO: 861572 - RNA, 19 nt, Homo sapiens
  misc_RNA (1)...(19): siRNA sense strand
ucauuaacaucccuuuuga

SEQ ID NO: 861573 - RNA, 19 nt, Homo sapiens
  misc_RNA (1)...(19): siRNA sense strand
caacagucuaucaggaaga

SEQ ID NO: 861574 - RNA, 19 nt, Homo sapiens
  misc_RNA (1)...(19): siRNA sense strand
gguuaugcaagacaaauca

SEQ ID NO: 861575 - RNA, 19 nt, Homo sapiens
  misc_RNA (1)...(19): siRNA sense strand
gaauucugccaccuaucuu

SEQ ID NO: 861576 - RNA, 19 nt, Homo sapiens
  misc_RNA (1)...(19): siRNA sense strand
caauggcaacagucuauca

SEQ ID NO: 861577 - RNA, 19 nt, Homo sapiens
  misc_RNA (1)...(19): siRNA sense strand
aaggauuaacugcaacuuu

SEQ ID NO: 861578 - RNA, 19 nt, Homo sapiens
  misc_RNA (1)...(19): siRNA sense strand
uagccucagucauuaacau

SEQ ID NO: 861579 - RNA, 19 nt, Homo sapiens
  misc_RNA (1)...(19): siRNA sense strand
ggacaauagccucagucau

SEQ ID NO: 861580 - RNA, 19 nt, Homo sapiens
  misc_RNA (1)...(19): siRNA sense strand
gcaaccgauccaaacaguu

SEQ ID NO: 861581 - RNA, 19 nt, Homo sapiens
  misc_RNA (1)...(19): siRNA sense strand
cagagcaaccauccacugu

SEQ ID NO: 861582 - RNA, 19 nt, Homo sapiens
  misc_RNA (1)...(19): siRNA sense strand
aacagucuaucaggaagaa

SEQ ID NO: 861583 - RNA, 19 nt, Homo sapiens
  misc_RNA (1)...(19): siRNA sense strand
aacaauggcaacagucuau

SEQ ID NO: 861584 - RNA, 19 nt, Homo sapiens
  misc_RNA (1)...(19): siRNA sense strand
gggacaauagccucaguca

SEQ ID NO: 861585 - RNA, 19 nt, Homo sapiens
  misc_RNA (1)...(19): siRNA sense strand
agggaauucugccaccuau

SEQ ID NO: 861586 - RNA, 19 nt, Homo sapiens
  misc_RNA (1)...(19): siRNA sense strand
ggagaaaauuugggauugg

SEQ ID NO: 861587 - RNA, 19 nt, Homo sapiens
  misc_RNA (1)...(19): siRNA sense strand
ucaccagcauugacauucg

SEQ ID NO: 861588 - RNA, 19 nt, Homo sapiens
  misc_RNA (1)...(19): siRNA sense strand
gacagcuuucgaaugauuu

SEQ ID NO: 861589 - RNA, 19 nt, Homo sapiens
  misc_RNA (1)...(19): siRNA sense strand
ggauuaacugcaacuuugg

SEQ ID NO: 861590 - RNA, 19 nt, Homo sapiens
  misc_RNA (1)...(19): siRNA sense strand
gaagaaagcuguggugauu

SEQ ID NO: 861591 - RNA, 19 nt, Homo sapiens
  misc_RNA (1)...(19): siRNA sense strand
gaggauacauuaaguccaa

SEQ ID NO: 861592 - RNA, 19 nt, Homo sapiens
  misc_RNA (1)...(19): siRNA sense strand
gaauuaagcagucuucaga

SEQ ID NO: 861593 - RNA, 19 nt, Homo sapiens
  misc_RNA (1)...(19): siRNA sense strand
gaaaacaccuggacuaauc

SEQ ID NO: 861594 - RNA, 19 nt, Homo sapiens
  misc_RNA (1)...(19): siRNA sense strand
gaaaagugaugguagauga

SEQ ID NO: 861595 - RNA, 19 nt, Homo sapiens
  misc_RNA (1)...(19): siRNA sense strand
gagccucuacuguuaauua

SEQ ID NO: 861596 - RNA, 19 nt, Homo sapiens
  misc_RNA (1)...(19): siRNA sense strand
gaaguaaagguuccugaaa

SEQ ID NO: 861597 - RNA, 19 nt, Homo sapiens
  misc_RNA (1)...(19): siRNA sense strand
aaacuaugcuugcugaaug

SEQ ID NO: 861598 - RNA, 19 nt, Homo sapiens
  misc_RNA (1)...(19): siRNA sense strand
ggaaacaacaauccagaaa

SEQ ID NO: 861599 - RNA, 19 nt, Homo sapiens
  misc_RNA (1)...(19): siRNA sense strand
gugcuccgcuugcuaaauu

SEQ ID NO: 861600 - RNA, 19 nt, Homo sapiens
  misc_RNA (1)...(19): siRNA sense strand
aaagaugccugaaguaaag

SEQ ID NO: 861601 - RNA, 19 nt, Homo sapiens
  misc_RNA (1)...(19): siRNA sense strand
ugacuuaaaugcuacugaa

SEQ ID NO: 861602 - RNA, 19 nt, Homo sapiens
  misc_RNA (1)...(19): siRNA sense strand
guagagaggccagcaagua

SEQ ID NO: 861603 - RNA, 19 nt, Homo sapiens
  misc_RNA (1)...(19): siRNA sense strand
aaauaaagaugccugaagu

SEQ ID NO: 861604 - RNA, 19 nt, Homo sapiens
  misc_RNA (1)...(19): siRNA sense strand
gaaugagauuucagaggaa

SEQ ID NO: 861605 - RNA, 19 nt, Homo sapiens
  misc_RNA (1)...(19): siRNA sense strand
aaacugacuucgauagaga

SEQ ID NO: 861606 - RNA, 19 nt, Homo sapiens
  misc_RNA (1)...(19): siRNA sense strand
gaaacugacuucgauagag

SEQ ID NO: 861607 - RNA, 19 nt, Homo sapiens
  misc_RNA (1)...(19): siRNA sense strand
uuaagaaacugacuucgau

SEQ ID NO: 861608 - RNA, 19 nt, Homo sapiens
  misc_RNA (1)...(19): siRNA sense strand
gaaauaaagaugccugaag

SEQ ID NO: 861609 - RNA, 19 nt, Homo sapiens
  misc_RNA (1)...(19): siRNA sense strand
gacuugcgcuuuauagaug

SEQ ID NO: 861610 - RNA, 19 nt, Homo sapiens
  misc_RNA (1)...(19): siRNA sense strand
uuacugaaauguccaaauc

SEQ ID NO: 861611 - RNA, 19 nt, Homo sapiens
  misc_RNA (1)...(19): siRNA sense strand
gaagauuccaucacaacaa

SEQ ID NO: 861612 - RNA, 19 nt, Homo sapiens
  misc_RNA (1)...(19): siRNA sense strand
uaaagaugccugaaguaaa

SEQ ID NO: 861613 - RNA, 19 nt, Homo sapiens
  misc_RNA (1)...(19): siRNA sense strand
cagaaaugcuuuugucuaa

SEQ ID NO: 861614 - RNA, 19 nt, Homo sapiens
  misc_RNA (1)...(19): siRNA sense strand
gauaucaguggcagguuua

SEQ ID NO: 861615 - RNA, 19 nt, Homo sapiens
  misc_RNA (1)...(19): siRNA sense strand
ugagauuacugcacuacaa

SEQ ID NO: 861616 - RNA, 19 nt, Homo sapiens
  misc_RNA (1)...(19): siRNA sense strand
ugaugugucugacuuaaau

SEQ ID NO: 861617 - RNA, 19 nt, Homo sapiens
  misc_RNA (1)...(19): siRNA sense strand
ugaaauguccaaaucacua

SEQ ID NO: 861618 - RNA, 19 nt, Homo sapiens
  misc_RNA (1)...(19): siRNA sense strand
ggacuguguagguuugaua

SEQ ID NO: 861619 - RNA, 19 nt, Homo sapiens
  misc_RNA (1)...(19): siRNA sense strand
guuaauuacugugguuuga

SEQ ID NO: 861620 - RNA, 19 nt, Homo sapiens
  misc_RNA (1)...(19): siRNA sense strand
uuacugcacuacaaacuau

SEQ ID NO: 861621 - RNA, 19 nt, Homo sapiens
  misc_RNA (1)...(19): siRNA sense strand
auacucaccuuauguaaca

SEQ ID NO: 861622 - RNA, 19 nt, Homo sapiens
  misc_RNA (1)...(19): siRNA sense strand
aagauuccaucacaacaaa

SEQ ID NO: 861623 - RNA, 19 nt, Homo sapiens
  misc_RNA (1)...(19): siRNA sense strand
guccaaaucacuacuugua

SEQ ID NO: 861624 - RNA, 19 nt, Homo sapiens
  misc_RNA (1)...(19): siRNA sense strand
ugauaucaguggcagguuu

SEQ ID NO: 861625 - RNA, 19 nt, Homo sapiens
  misc_RNA (1)...(19): siRNA sense strand
cugaagagguggacugugu

SEQ ID NO: 861626 - RNA, 19 nt, Homo sapiens
  misc_RNA (1)...(19): siRNA sense strand
gagauuacugcacuacaaa

SEQ ID NO: 861627 - RNA, 19 nt, Homo sapiens
  misc_RNA (1)...(19): siRNA sense strand
aaguaaagguuccugaaau

SEQ ID NO: 861628 - RNA, 19 nt, Homo sapiens
  misc_RNA (1)...(19): siRNA sense strand
gagguggacuguguagguu

SEQ ID NO: 861629 - RNA, 19 nt, Homo sapiens
  misc_RNA (1)...(19): siRNA sense strand
gaaaaucaguucugguaag

SEQ ID NO: 861630 - RNA, 19 nt, Homo sapiens
  misc_RNA (1)...(19): siRNA sense strand
ugacauggaccuucugaau

SEQ ID NO: 861631 - RNA, 19 nt, Homo sapiens
  misc_RNA (1)...(19): siRNA sense strand
ggcaacaggugacuuaaaa

SEQ ID NO: 861632 - RNA, 19 nt, Homo sapiens
  misc_RNA (1)...(19): siRNA sense strand
aaucaguucugguaaguca

SEQ ID NO: 861633 - RNA, 19 nt, Homo sapiens
  misc_RNA (1)...(19): siRNA sense strand
gcuaaauuauccugaagag

SEQ ID NO: 861634 - RNA, 19 nt, Homo sapiens
  misc_RNA (1)...(19): siRNA sense strand
ucacucuucuugaaacaga

SEQ ID NO: 861635 - RNA, 19 nt, Homo sapiens
  misc_RNA (1)...(19): siRNA sense strand
cugcagaguuacugaaaug

SEQ ID NO: 861636 - RNA, 19 nt, Homo sapiens
  misc_RNA (1)...(19): siRNA sense strand
gaaccuccuuugggcaaug

SEQ ID NO: 861637 - RNA, 19 nt, Homo sapiens
  misc_RNA (1)...(19): siRNA sense strand
guagugacauggaccuucu

SEQ ID NO: 861638 - RNA, 19 nt, Homo sapiens
  misc_RNA (1)...(19): siRNA sense strand
gagaaaagguuagacuguu

SEQ ID NO: 861639 - RNA, 19 nt, Homo sapiens
  misc_RNA (1)...(19): siRNA sense strand
gguggacuguguagguuug

SEQ ID NO: 861640 - RNA, 19 nt, Homo sapiens
  misc_RNA (1)...(19): siRNA sense strand
auguagagcucauagcaaa

SEQ ID NO: 861641 - RNA, 19 nt, Homo sapiens
  misc_RNA (1)...(19): siRNA sense strand
uaagaaacugacuucgaua

SEQ ID NO: 861642 - RNA, 19 nt, Homo sapiens
  misc_RNA (1)...(19): siRNA sense strand
guugaugugucugacuuaa

SEQ ID NO: 861643 - RNA, 19 nt, Homo sapiens
  misc_RNA (1)...(19): siRNA sense strand
gcuauucuuuuaccucaua

SEQ ID NO: 861644 - RNA, 19 nt, Homo sapiens
  misc_RNA (1)...(19): siRNA sense strand
auaaagaugccugaaguaa

SEQ ID NO: 861645 - RNA, 19 nt, Homo sapiens
  misc_RNA (1)...(19): siRNA sense strand
ugaagcaguugaugugucu

SEQ ID NO: 861646 - RNA, 19 nt, Homo sapiens
  misc_RNA (1)...(19): siRNA sense strand
uaaugaagcaguugaugug

SEQ ID NO: 861647 - RNA, 19 nt, Homo sapiens
  misc_RNA (1)...(19): siRNA sense strand
ggauacauuaaguccaaua

SEQ ID NO: 861648 - RNA, 19 nt, Homo sapiens
  misc_RNA (1)...(19): siRNA sense strand
auucgucacuuguauaaug

SEQ ID NO: 861649 - RNA, 19 nt, Homo sapiens
  misc_RNA (1)...(19): siRNA sense strand
uuuaugaccucaggaaaga

SEQ ID NO: 861650 - RNA, 19 nt, Homo sapiens
  misc_RNA (1)...(19): siRNA sense strand
ucagaagauuccaucacaa

SEQ ID NO: 861651 - RNA, 19 nt, Homo sapiens
  misc_RNA (1)...(19): siRNA sense strand
caauguggguuugcagaau

SEQ ID NO: 861652 - RNA, 19 nt, Homo sapiens
  misc_RNA (1)...(19): siRNA sense strand
ugacauuucugaggauaca

SEQ ID NO: 861653 - RNA, 19 nt, Homo sapiens
  misc_RNA (1)...(19): siRNA sense strand
uaaagguuccugaaaucaa

SEQ ID NO: 861654 - RNA, 19 nt, Homo sapiens
  misc_RNA (1)...(19): siRNA sense strand
gcuucuucgugaucaauuu

SEQ ID NO: 861655 - RNA, 19 nt, Homo sapiens
  misc_RNA (1)...(19): siRNA sense strand
aaagguuccugaaaucaag

SEQ ID NO: 861656 - RNA, 19 nt, Homo sapiens
  misc_RNA (1)...(19): siRNA sense strand
aguaaagguuccugaaauc

SEQ ID NO: 861657 - RNA, 19 nt, Homo sapiens
  misc_RNA (1)...(19): siRNA sense strand
guaacagaacuuauaaugg

SEQ ID NO: 861658 - RNA, 19 nt, Homo sapiens
  misc_RNA (1)...(19): siRNA sense strand
gaaacaacaauccagaaaa

SEQ ID NO: 861659 - RNA, 19 nt, Homo sapiens
  misc_RNA (1)...(19): siRNA sense strand
ccucuacuguuaauuacug

SEQ ID NO: 861660 - RNA, 19 nt, Homo sapiens
  misc_RNA (1)...(19): siRNA sense strand
gagaggccagcaaguauuc

SEQ ID NO: 861661 - RNA, 19 nt, Homo sapiens
  misc_RNA (1)...(19): siRNA sense strand
guaaagguuccugaaauca

SEQ ID NO: 861662 - RNA, 19 nt, Homo sapiens
  misc_RNA (1)...(19): siRNA sense strand
guugacauuucugaggaua

SEQ ID NO: 861663 - RNA, 19 nt, Homo sapiens
  misc_RNA (1)...(19): siRNA sense strand
gaaauguccaaaucacuac

SEQ ID NO: 861664 - RNA, 19 nt, Homo sapiens
  misc_RNA (1)...(19): siRNA sense strand
gacauggaccuucugaauc

SEQ ID NO: 861665 - RNA, 19 nt, Homo sapiens
  misc_RNA (1)...(19): siRNA sense strand
gaagagguggacuguguag

SEQ ID NO: 861666 - RNA, 19 nt, Homo sapiens
  misc_RNA (1)...(19): siRNA sense strand
uaaguccaauaacagaugu

SEQ ID NO: 861667 - RNA, 19 nt, Homo sapiens
  misc_RNA (1)...(19): siRNA sense strand
gugucugacuuaaaugcua

SEQ ID NO: 861668 - RNA, 19 nt, Homo sapiens
  misc_RNA (1)...(19): siRNA sense strand
caguugaugugucugacuu

SEQ ID NO: 861669 - RNA, 19 nt, Homo sapiens
  misc_RNA (1)...(19): siRNA sense strand
gaaguagagaggccagcaa

SEQ ID NO: 861670 - RNA, 19 nt, Homo sapiens
  misc_RNA (1)...(19): siRNA sense strand
aaacagaaaugcuuuuguc

SEQ ID NO: 861671 - RNA, 19 nt, Homo sapiens
  misc_RNA (1)...(19): siRNA sense strand
gaaaggaaaagugauggua

SEQ ID NO: 861672 - RNA, 19 nt, Homo sapiens
  misc_RNA (1)...(19): siRNA sense strand
uaagucagaaccuccuuug

SEQ ID NO: 861673 - RNA, 19 nt, Homo sapiens
  misc_RNA (1)...(19): siRNA sense strand
guacagcaucaucagauuc

SEQ ID NO: 861674 - RNA, 19 nt, Homo sapiens
  misc_RNA (1)...(19): siRNA sense strand
uagagaggccagcaaguau

SEQ ID NO: 861675 - RNA, 19 nt, Homo sapiens
  misc_RNA (1)...(19): siRNA sense strand
caauguagagcucauagca

SEQ ID NO: 861676 - RNA, 19 nt, Homo sapiens
  misc_RNA (1)...(19): siRNA sense strand
agaaaagguuagacuguuu

SEQ ID NO: 861677 - RNA, 19 nt, Homo sapiens
  misc_RNA (1)...(19): siRNA sense strand
caaacuaugcuugcugaau

SEQ ID NO: 861678 - RNA, 19 nt, Homo sapiens
  misc_RNA (1)...(19): siRNA sense strand
ugauucgucacuuguauaa

SEQ ID NO: 861679 - RNA, 19 nt, Homo sapiens
  misc_RNA (1)...(19): siRNA sense strand
guaagucagaaccuccuuu

SEQ ID NO: 861680 - RNA, 19 nt, Homo sapiens
  misc_RNA (1)...(19): siRNA sense strand
caggugcuccgcuugcuaa

SEQ ID NO: 861681 - RNA, 19 nt, Homo sapiens
  misc_RNA (1)...(19): siRNA sense strand
caccuggacuaaucuucuu

SEQ ID NO: 861682 - RNA, 19 nt, Homo sapiens
  misc_RNA (1)...(19): siRNA sense strand
aagguuagacuguuuggaa

SEQ ID NO: 861683 - RNA, 19 nt, Homo sapiens
  misc_RNA (1)...(19): siRNA sense strand
ugacuugcgcuuuauagau

SEQ ID NO: 861684 - RNA, 19 nt, Homo sapiens
  misc_RNA (1)...(19): siRNA sense strand
ugaaguaaagguuccugaa

SEQ ID NO: 861685 - RNA, 19 nt, Homo sapiens
  misc_RNA (1)...(19): siRNA sense strand
agaaagcuguggugauucg

SEQ ID NO: 861686 - RNA, 19 nt, Homo sapiens
  misc_RNA (1)...(19): siRNA sense strand
aauaaagaugccugaagua

SEQ ID NO: 861687 - RNA, 19 nt, Homo sapiens
  misc_RNA (1)...(19): siRNA sense strand
uaaugaaguuagugaagac

SEQ ID NO: 861688 - RNA, 19 nt, Homo sapiens
  misc_RNA (1)...(19): siRNA sense strand
gaugaaaacaccuggacua

SEQ ID NO: 861689 - RNA, 19 nt, Homo sapiens
  misc_RNA (1)...(19): siRNA sense strand
guaaauguuaauccugaga

SEQ ID NO: 861690 - RNA, 19 nt, Homo sapiens
  misc_RNA (1)...(19): siRNA sense strand
ggaaaggccuucagucaga

SEQ ID NO: 861691 - RNA, 19 nt, Homo sapiens
  misc_RNA (1)...(19): siRNA sense strand
ugagaaaccuuaugaaugu

SEQ ID NO: 861692 - RNA, 19 nt, Homo sapiens
  misc_RNA (1)...(19): siRNA sense strand
ggucagaucuaauuaaaca

SEQ ID NO: 861693 - RNA, 19 nt, Homo sapiens
  misc_RNA (1)...(19): siRNA sense strand
gagagaagccucacaaaug

SEQ ID NO: 861694 - RNA, 19 nt, Homo sapiens
  misc_RNA (1)...(19): siRNA sense strand
ugaaagaccugcugagaau

SEQ ID NO: 861695 - RNA, 19 nt, Homo sapiens
  misc_RNA (1)...(19): siRNA sense strand
ggagaggccuuaugacugu

SEQ ID NO: 861696 - RNA, 19 nt, Homo sapiens
  misc_RNA (1)...(19): siRNA sense strand
gcucagcucuuauuaaaca

SEQ ID NO: 861697 - RNA, 19 nt, Homo sapiens
  misc_RNA (1)...(19): siRNA sense strand
agagaaaccuuaugaaugu

SEQ ID NO: 861698 - RNA, 19 nt, Homo sapiens
  misc_RNA (1)...(19): siRNA sense strand
ggugaaaggucagaucuaa

SEQ ID NO: 861699 - RNA, 19 nt, Homo sapiens
  misc_RNA (1)...(19): siRNA sense strand
gaaaggucagaucuaauua

SEQ ID NO: 861700 - RNA, 19 nt, Homo sapiens
  misc_RNA (1)...(19): siRNA sense strand
gagagaaaccuuaugaaug

SEQ ID NO: 861701 - RNA, 19 nt, Homo sapiens
  misc_RNA (1)...(19): siRNA sense strand
ggagaauuauggaaauguu

SEQ ID NO: 861702 - RNA, 19 nt, Homo sapiens
  misc_RNA (1)...(19): siRNA sense strand
gaaauguugucucacuaga

SEQ ID NO: 861703 - RNA, 19 nt, Homo sapiens
  misc_RNA (1)...(19): siRNA sense strand
ggagacagacccuauaaau

SEQ ID NO: 861704 - RNA, 19 nt, Homo sapiens
  misc_RNA (1)...(19): siRNA sense strand
gcaggagaauuauggaaau

SEQ ID NO: 861705 - RNA, 19 nt, Homo sapiens
  misc_RNA (1)...(19): siRNA sense strand
gagagaagccauaugaaug

SEQ ID NO: 861706 - RNA, 19 nt, Homo sapiens
  misc_RNA (1)...(19): siRNA sense strand
ggagagaaaccuuaugaau

SEQ ID NO: 861707 - RNA, 19 nt, Homo sapiens
  misc_RNA (1)...(19): siRNA sense strand
ucacaaauguaaugagugu

SEQ ID NO: 861708 - RNA, 19 nt, Homo sapiens
  misc_RNA (1)...(19): siRNA sense strand
gagaagccauaccacugua

SEQ ID NO: 861709 - RNA, 19 nt, Homo sapiens
  misc_RNA (1)...(19): siRNA sense strand
agacagacccuauaaaugu

SEQ ID NO: 861710 - RNA, 19 nt, Homo sapiens
  misc_RNA (1)...(19): siRNA sense strand
agucagaucucagaccuua

SEQ ID NO: 861711 - RNA, 19 nt, Homo sapiens
  misc_RNA (1)...(19): siRNA sense strand
ugaaaggucagaucuaauu

SEQ ID NO: 861712 - RNA, 19 nt, Homo sapiens
  misc_RNA (1)...(19): siRNA sense strand
ggagagaagccauaugaau

SEQ ID NO: 861713 - RNA, 19 nt, Homo sapiens
  misc_RNA (1)...(19): siRNA sense strand
agucgcagcucacaccuua

SEQ ID NO: 861714 - RNA, 19 nt, Homo sapiens
  misc_RNA (1)...(19): siRNA sense strand
caucacacaucaaagaguu

SEQ ID NO: 861715 - RNA, 19 nt, Homo sapiens
  misc_RNA (1)...(19): siRNA sense strand
agagaagccucacaaaugu

SEQ ID NO: 861716 - RNA, 19 nt, Homo sapiens
  misc_RNA (1)...(19): siRNA sense strand
ggagauaggucagaaagac

SEQ ID NO: 861717 - RNA, 19 nt, Homo sapiens
  misc_RNA (1)...(19): siRNA sense strand
ggagagaagccucacaaau

SEQ ID NO: 861718 - RNA, 19 nt, Homo sapiens
  misc_RNA (1)...(19): siRNA sense strand
gacagacccuauaaauguu

SEQ ID NO: 861719 - RNA, 19 nt, Homo sapiens
  misc_RNA (1)...(19): siRNA sense strand
gaagccauaugaaugcaau

SEQ ID NO: 861720 - RNA, 19 nt, Homo sapiens
  misc_RNA (1)...(19): siRNA sense strand
gcucucaucucaucacaca

SEQ ID NO: 861721 - RNA, 19 nt, Homo sapiens
  misc_RNA (1)...(19): siRNA sense strand
gguaagcuauccucuccaa

SEQ ID NO: 861722 - RNA, 19 nt, Homo sapiens
  misc_RNA (1)...(19): siRNA sense strand
gagaaaccuuaugaaugua

SEQ ID NO: 861723 - RNA, 19 nt, Homo sapiens
  misc_RNA (1)...(19): siRNA sense strand
ggccgaggcuucagugaga

SEQ ID NO: 861724 - RNA, 19 nt, Homo sapiens
  misc_RNA (1)...(19): siRNA sense strand
gagaaaccuuaugaaugua

SEQ ID NO: 861725 - RNA, 19 nt, Homo sapiens
  misc_RNA (1)...(19): siRNA sense strand
gaaguucucaccugauuca

SEQ ID NO: 861726 - RNA, 19 nt, Homo sapiens
  misc_RNA (1)...(19): siRNA sense strand
ggcauccgcuaucauauau

SEQ ID NO: 861727 - RNA, 19 nt, Homo sapiens
  misc_RNA (1)...(19): siRNA sense strand
ggagugagaacgagguaaa

SEQ ID NO: 861728 - RNA, 19 nt, Homo sapiens
  misc_RNA (1)...(19): siRNA sense strand
ggagaagcccuacgagugu

SEQ ID NO: 861729 - RNA, 19 nt, Homo sapiens
  misc_RNA (1)...(19): siRNA sense strand
uugaagauauggccaugua

SEQ ID NO: 861730 - RNA, 19 nt, Homo sapiens
  misc_RNA (1)...(19): siRNA sense strand
uggcgaagcuuuggugaaa

SEQ ID NO: 861731 - RNA, 19 nt, Homo sapiens
  misc_RNA (1)...(19): siRNA sense strand
agagaagccuuaugagugu

SEQ ID NO: 861732 - RNA, 19 nt, Homo sapiens
  misc_RNA (1)...(19): siRNA sense strand
ggagaggcccuacaagugu

SEQ ID NO: 861733 - RNA, 19 nt, Homo sapiens
  misc_RNA (1)...(19): siRNA sense strand
gcaagagauuagugaagau

SEQ ID NO: 861734 - RNA, 19 nt, Homo sapiens
  misc_RNA (1)...(19): siRNA sense strand
cuacaagugugaugagugu

SEQ ID NO: 861735 - RNA, 19 nt, Homo sapiens
  misc_RNA (1)...(19): siRNA sense strand
gcuccaaccucaucacaca

SEQ ID NO: 861736 - RNA, 19 nt, Homo sapiens
  misc_RNA (1)...(19): siRNA sense strand
cgagguaaaucccaagcaa

SEQ ID NO: 861737 - RNA, 19 nt, Homo sapiens
  misc_RNA (1)...(19): siRNA sense strand
ggagagaagccuuaugagu

SEQ ID NO: 861738 - RNA, 19 nt, Homo sapiens
  misc_RNA (1)...(19): siRNA sense strand
gagacagacccuauaaaug

SEQ ID NO: 861739 - RNA, 19 nt, Homo sapiens
  misc_RNA (1)...(19): siRNA sense strand
aauguugucucacuagauu

SEQ ID NO: 861740 - RNA, 19 nt, Homo sapiens
  misc_RNA (1)...(19): siRNA sense strand
ugagaaacccuaugagugu

SEQ ID NO: 861741 - RNA, 19 nt, Homo sapiens
  misc_RNA (1)...(19): siRNA sense strand
agagauuagugaagaugua

SEQ ID NO: 861742 - RNA, 19 nt, Homo sapiens
  misc_RNA (1)...(19): siRNA sense strand
gugagaaaccuuaugaaug

SEQ ID NO: 861743 - RNA, 19 nt, Homo sapiens
  misc_RNA (1)...(19): siRNA sense strand
gauguacaauuugggacua

SEQ ID NO: 861744 - RNA, 19 nt, Homo sapiens
  misc_RNA (1)...(19): siRNA sense strand
gaauguaccgaaugugaga

SEQ ID NO: 861745 - RNA, 19 nt, Homo sapiens
  misc_RNA (1)...(19): siRNA sense strand
cagcaucaaagaacacaua

SEQ ID NO: 861746 - RNA, 19 nt, Homo sapiens
  misc_RNA (1)...(19): siRNA sense strand
ggaaaauccugaaagugaa

SEQ ID NO: 861747 - RNA, 19 nt, Homo sapiens
  misc_RNA (1)...(19): siRNA sense strand
ccacaaagaaguccacaca

SEQ ID NO: 861748 - RNA, 19 nt, Homo sapiens
  misc_RNA (1)...(19): siRNA sense strand
gaacucacacuggagagaa

SEQ ID NO: 861749 - RNA, 19 nt, Homo sapiens
  misc_RNA (1)...(19): siRNA sense strand
gacccacacuggagacaga

SEQ ID NO: 861750 - RNA, 19 nt, Homo sapiens
  misc_RNA (1)...(19): siRNA sense strand
gugaagauguacaauuugg

SEQ ID NO: 861751 - RNA, 19 nt, Homo sapiens
  misc_RNA (1)...(19): siRNA sense strand
ccugugacguuugaagaua

SEQ ID NO: 861752 - RNA, 19 nt, Homo sapiens
  misc_RNA (1)...(19): siRNA sense strand
ggugagaaaccuuaugaau

SEQ ID NO: 861753 - RNA, 19 nt, Homo sapiens
  misc_RNA (1)...(19): siRNA sense strand
gaaaggccuucagucagau

SEQ ID NO: 861754 - RNA, 19 nt, Homo sapiens
  misc_RNA (1)...(19): siRNA sense strand
guaaaucccaagcaagaga

SEQ ID NO: 861755 - RNA, 19 nt, Homo sapiens
  misc_RNA (1)...(19): siRNA sense strand
ccauaugaaugcaaugcuu

SEQ ID NO: 861756 - RNA, 19 nt, Homo sapiens
  misc_RNA (1)...(19): siRNA sense strand
gggagaggcccuacaagug

SEQ ID NO: 861757 - RNA, 19 nt, Homo sapiens
  misc_RNA (1)...(19): siRNA sense strand
cauccgcuaucauauaugu

SEQ ID NO: 861758 - RNA, 19 nt, Homo sapiens
  misc_RNA (1)...(19): siRNA sense strand
gaaagacaauggggagauu

SEQ ID NO: 861759 - RNA, 19 nt, Homo sapiens
  misc_RNA (1)...(19): siRNA sense strand
gagaagccucacaaaugua

SEQ ID NO: 861760 - RNA, 19 nt, Homo sapiens
  misc_RNA (1)...(19): siRNA sense strand
acaggcauccgcuaucaua

SEQ ID NO: 861761 - RNA, 19 nt, Homo sapiens
  misc_RNA (1)...(19): siRNA sense strand
ggaaauguugucucacuag

SEQ ID NO: 861762 - RNA, 19 nt, Homo sapiens
  misc_RNA (1)...(19): siRNA sense strand
gagaagccuuaugagugua

SEQ ID NO: 861763 - RNA, 19 nt, Homo sapiens
  misc_RNA (1)...(19): siRNA sense strand
gggauguuaugcaggagaa

SEQ ID NO: 861764 - RNA, 19 nt, Homo sapiens
  misc_RNA (1)...(19): siRNA sense strand
gagaguucauacggacuaa

SEQ ID NO: 861765 - RNA, 19 nt, Homo sapiens
  misc_RNA (1)...(19): siRNA sense strand
cagaagaguggguaagcua

SEQ ID NO: 861766 - RNA, 19 nt, Homo sapiens
  misc_RNA (1)...(19): siRNA sense strand
gaccuuuaccgggauguua

SEQ ID NO: 861767 - RNA, 19 nt, Homo sapiens
  misc_RNA (1)...(19): siRNA sense strand
gaucucagaccuuaaucga

SEQ ID NO: 861768 - RNA, 19 nt, Homo sapiens
  misc_RNA (1)...(19): siRNA sense strand
ccauaccacuguaacgaau

SEQ ID NO: 861769 - RNA, 19 nt, Homo sapiens
  misc_RNA (1)...(19): siRNA sense strand
acacaggcauccgcuauca

SEQ ID NO: 861770 - RNA, 19 nt, Homo sapiens
  misc_RNA (1)...(19): siRNA sense strand
ccucaucacacaucaaaga

SEQ ID NO: 861771 - RNA, 19 nt, Homo sapiens
  misc_RNA (1)...(19): siRNA sense strand
ccaagcaagagauuaguga

SEQ ID NO: 861772 - RNA, 19 nt, Homo sapiens
  misc_RNA (1)...(19): siRNA sense strand
guggaaaggccuucaguca

SEQ ID NO: 861773 - RNA, 19 nt, Homo sapiens
  misc_RNA (1)...(19): siRNA sense strand
uuauggaaauguugucuca

SEQ ID NO: 861774 - RNA, 19 nt, Homo sapiens
  misc_RNA (1)...(19): siRNA sense strand
agccggagcucucaucuca

SEQ ID NO: 861775 - RNA, 19 nt, Homo sapiens
  misc_RNA (1)...(19): siRNA sense strand
gcuaucauauauguucuca

SEQ ID NO: 861776 - RNA, 19 nt, Homo sapiens
  misc_RNA (1)...(19): siRNA sense strand
gagaauuauggaaauguug

SEQ ID NO: 861777 - RNA, 19 nt, Homo sapiens
  misc_RNA (1)...(19): siRNA sense strand
uggaaauguugucucacua

SEQ ID NO: 861778 - RNA, 19 nt, Homo sapiens
  misc_RNA (1)...(19): siRNA sense strand
ugccgucucucucaccuaa

SEQ ID NO: 861779 - RNA, 19 nt, Homo sapiens
  misc_RNA (1)...(19): siRNA sense strand
gaccuuaaucgacaucaga

SEQ ID NO: 861780 - RNA, 19 nt, Homo sapiens
  misc_RNA (1)...(19): siRNA sense strand
cauauauguucucauugug

SEQ ID NO: 861781 - RNA, 19 nt, Homo sapiens
  misc_RNA (1)...(19): siRNA sense strand
ccggagcucucaucucauc

SEQ ID NO: 861782 - RNA, 19 nt, Homo sapiens
  misc_RNA (1)...(19): siRNA sense strand
agaagccucacaaauguaa

SEQ ID NO: 861783 - RNA, 19 nt, Homo sapiens
  misc_RNA (1)...(19): siRNA sense strand
gcagaagaguggguaagcu

SEQ ID NO: 861784 - RNA, 19 nt, Homo sapiens
  misc_RNA (1)...(19): siRNA sense strand
agcaagagauuagugaaga

SEQ ID NO: 861785 - RNA, 19 nt, Homo sapiens
  misc_RNA (1)...(19): siRNA sense strand
caggagaauuauggaaaug

SEQ ID NO: 861786 - RNA, 19 nt, Homo sapiens
  misc_RNA (1)...(19): siRNA sense strand
ccacacaggcauccgcuau

SEQ ID NO: 861787 - RNA, 19 nt, Homo sapiens
  misc_RNA (1)...(19): siRNA sense strand
gaagaguggguaagcuauc

SEQ ID NO: 861788 - RNA, 19 nt, Homo sapiens
  misc_RNA (1)...(19): siRNA sense strand
augcaaugcuugugggaaa

SEQ ID NO: 861789 - RNA, 19 nt, Homo sapiens
  misc_RNA (1)...(19): siRNA sense strand
ccgaaugugagaagaguuu

SEQ ID NO: 861790 - RNA, 19 nt, Homo sapiens
  misc_RNA (1)...(19): siRNA sense strand
gacaacaucuggaucagua

SEQ ID NO: 861791 - RNA, 19 nt, Homo sapiens
  misc_RNA (1)...(19): siRNA sense strand
gcacagacccuacaggaaa

SEQ ID NO: 861792 - RNA, 19 nt, Homo sapiens
  misc_RNA (1)...(19): siRNA sense strand
gaggauggaugguaucaau

SEQ ID NO: 861793 - RNA, 19 nt, Homo sapiens
  misc_RNA (1)...(19): siRNA sense strand
gaaaaggacuggagcaaga

SEQ ID NO: 861794 - RNA, 19 nt, Homo sapiens
  misc_RNA (1)...(19): siRNA sense strand
gaagggagcuggguaugca

SEQ ID NO: 861795 - RNA, 19 nt, Homo sapiens
  misc_RNA (1)...(19): siRNA sense strand
gcgcagcacucucccaguu

SEQ ID NO: 861796 - RNA, 19 nt, Homo sapiens
  misc_RNA (1)...(19): siRNA sense strand
caggagagcucgccaagca

SEQ ID NO: 861797 - RNA, 19 nt, Homo sapiens
  misc_RNA (1)...(19): siRNA sense strand
gcgcacaccuucaccaaca

SEQ ID NO: 861798 - RNA, 19 nt, Homo sapiens
  misc_RNA (1)...(19): siRNA sense strand
gaagugaagccaacaucaa

SEQ ID NO: 861799 - RNA, 19 nt, Homo sapiens
  misc_RNA (1)...(19): siRNA sense strand
cgaagucucuggacaacau

SEQ ID NO: 861800 - RNA, 19 nt, Homo sapiens
  misc_RNA (1)...(19): siRNA sense strand
guauaucgguggcuucaag

SEQ ID NO: 861801 - RNA, 19 nt, Homo sapiens
  misc_RNA (1)...(19): siRNA sense strand
ugacagagaggccuuggaa

SEQ ID NO: 861802 - RNA, 19 nt, Homo sapiens
  misc_RNA (1)...(19): siRNA sense strand
uagccgaguucuacacuga

SEQ ID NO: 861803 - RNA, 19 nt, Homo sapiens
  misc_RNA (1)...(19): siRNA sense strand
agacagcaaugacuaugau

SEQ ID NO: 861804 - RNA, 19 nt, Homo sapiens
  misc_RNA (1)...(19): siRNA sense strand
aagaacugcuugacagaga

SEQ ID NO: 861805 - RNA, 19 nt, Homo sapiens
  misc_RNA (1)...(19): siRNA sense strand
ucagcaacauucuagugaa

SEQ ID NO: 861806 - RNA, 19 nt, Homo sapiens
  misc_RNA (1)...(19): siRNA sense strand
caacaucuggaucaguaaa

SEQ ID NO: 861807 - RNA, 19 nt, Homo sapiens
  misc_RNA (1)...(19): siRNA sense strand
gagaaaaggaugucauuau

SEQ ID NO: 861808 - RNA, 19 nt, Homo sapiens
  misc_RNA (1)...(19): siRNA sense strand
gcaugacacuccuggaaaa

SEQ ID NO: 861809 - RNA, 19 nt, Homo sapiens
  misc_RNA (1)...(19): siRNA sense strand
cagcgcagccuguaacuuc

SEQ ID NO: 861810 - RNA, 19 nt, Homo sapiens
  misc_RNA (1)...(19): siRNA sense strand
uaacuucagcaacauucua

SEQ ID NO: 861811 - RNA, 19 nt, Homo sapiens
  misc_RNA (1)...(19): siRNA sense strand
gcccagugcuagccgaguu

SEQ ID NO: 861812 - RNA, 19 nt, Homo sapiens
  misc_RNA (1)...(19): siRNA sense strand
gccgaguucuacacugaaa

SEQ ID NO: 861813 - RNA, 19 nt, Homo sapiens
  misc_RNA (1)...(19): siRNA sense strand
gccuguaacuucagcaaca

SEQ ID NO: 861814 - RNA, 19 nt, Homo sapiens
  misc_RNA (1)...(19): siRNA sense strand
acccuuggauuccggauaa

SEQ ID NO: 861815 - RNA, 19 nt, Homo sapiens
  misc_RNA (1)...(19): siRNA sense strand
ggccagacagcaaugacua

SEQ ID NO: 861816 - RNA, 19 nt, Homo sapiens
  misc_RNA (1)...(19): siRNA sense strand
gcucgaagucucuggacaa

SEQ ID NO: 861817 - RNA, 19 nt, Homo sapiens
  misc_RNA (1)...(19): siRNA sense strand
cgagagguggugugcauga

SEQ ID NO: 861818 - RNA, 19 nt, Homo sapiens
  misc_RNA (1)...(19): siRNA sense strand
agaaaaggaugucauuauc

SEQ ID NO: 861819 - RNA, 19 nt, Homo sapiens
  misc_RNA (1)...(19): siRNA sense strand
gugcaugacacuccuggaa

SEQ ID NO: 861820 - RNA, 19 nt, Homo sapiens
  misc_RNA (1)...(19): siRNA sense strand
uagugaggauggaugguau

SEQ ID NO: 861821 - RNA, 19 nt, Homo sapiens
  misc_RNA (1)...(19): siRNA sense strand
cagcaaugacuaugauauc

SEQ ID NO: 861822 - RNA, 19 nt, Homo sapiens
  misc_RNA (1)...(19): siRNA sense strand
ggagaaaaggaugucauua

SEQ ID NO: 861823 - RNA, 19 nt, Homo sapiens
  misc_RNA (1)...(19): siRNA sense strand
gagcuggguaugcaggauu

SEQ ID NO: 861824 - RNA, 19 nt, Homo sapiens
  misc_RNA (1)...(19): siRNA sense strand
uggaggaccuggcauuggu

SEQ ID NO: 861825 - RNA, 19 nt, Homo sapiens
  misc_RNA (1)...(19): siRNA sense strand
ucaccaacaucagcaccaa

SEQ ID NO: 861826 - RNA, 19 nt, Homo sapiens
  misc_RNA (1)...(19): siRNA sense strand
ucccauagccgcaaguuca

SEQ ID NO: 861827 - RNA, 19 nt, Homo sapiens
  misc_RNA (1)...(19): siRNA sense strand
gcuggagcaggucaaguuu

SEQ ID NO: 861828 - RNA, 19 nt, Homo sapiens
  misc_RNA (1)...(19): siRNA sense strand
cgaagugaagccaacauca

SEQ ID NO: 861829 - RNA, 19 nt, Homo sapiens
  misc_RNA (1)...(19): siRNA sense strand
gacagcaaugacuaugaua

SEQ ID NO: 861830 - RNA, 19 nt, Homo sapiens
  misc_RNA (1)...(19): siRNA sense strand
gagaggccuuggaaaaguu

SEQ ID NO: 861831 - RNA, 19 nt, Homo sapiens
  misc_RNA (1)...(19): siRNA sense strand
uggaguaccgagaguauau

SEQ ID NO: 861832 - RNA, 19 nt, Homo sapiens
  misc_RNA (1)...(19): siRNA sense strand
ggacaacaucuggaucagu

SEQ ID NO: 861833 - RNA, 19 nt, Homo sapiens
  misc_RNA (1)...(19): siRNA sense strand
gccaagggccagacagcaa

SEQ ID NO: 861834 - RNA, 19 nt, Homo sapiens
  misc_RNA (1)...(19): siRNA sense strand
ggacuuccgccgugagcau

SEQ ID NO: 861835 - RNA, 19 nt, Homo sapiens
  misc_RNA (1)...(19): siRNA sense strand
caacaucagcaccaagaac

SEQ ID NO: 861836 - RNA, 19 nt, Homo sapiens
  misc_RNA (1)...(19): siRNA sense strand
gguucaaggugggaaguca

SEQ ID NO: 861837 - RNA, 19 nt, Homo sapiens
  misc_RNA (1)...(19): siRNA sense strand
ggauggaugguaucaaugc

SEQ ID NO: 861838 - RNA, 19 nt, Homo sapiens
  misc_RNA (1)...(19): siRNA sense strand
cuagugaggauggauggua

SEQ ID NO: 861839 - RNA, 19 nt, Homo sapiens
  misc_RNA (1)...(19): siRNA sense strand
cagacagcaaugacuauga

SEQ ID NO: 861840 - RNA, 19 nt, Homo sapiens
  misc_RNA (1)...(19): siRNA sense strand
ggaaacccugaaaggagaa

SEQ ID NO: 861841 - RNA, 19 nt, Homo sapiens
  misc_RNA (1)...(19): siRNA sense strand
gaaaaggaugucauuaucu

SEQ ID NO: 861842 - RNA, 19 nt, Homo sapiens
  misc_RNA (1)...(19): siRNA sense strand
ucgcagcguugaggaccua

SEQ ID NO: 861843 - RNA, 19 nt, Homo sapiens
  misc_RNA (1)...(19): siRNA sense strand
ccaagggccagacagcaau

SEQ ID NO: 861844 - RNA, 19 nt, Homo sapiens
  misc_RNA (1)...(19): siRNA sense strand
gaguauaucgguggcuuca

SEQ ID NO: 861845 - RNA, 19 nt, Homo sapiens
  misc_RNA (1)...(19): siRNA sense strand
gacagagaggccuuggaaa

SEQ ID NO: 861846 - RNA, 19 nt, Homo sapiens
  misc_RNA (1)...(19): siRNA sense strand
gcugagagacgcggguuca

SEQ ID NO: 861847 - RNA, 19 nt, Homo sapiens
  misc_RNA (1)...(19): siRNA sense strand
ggagcuggguaugcaggau

SEQ ID NO: 861848 - RNA, 19 nt, Homo sapiens
  misc_RNA (1)...(19): siRNA sense strand
uugaggaccuagugaggau

SEQ ID NO: 861849 - RNA, 19 nt, Homo sapiens
  misc_RNA (1)...(19): siRNA sense strand
gcacaccuucaccaacauc

SEQ ID NO: 861850 - RNA, 19 nt, Homo sapiens
  misc_RNA (1)...(19): siRNA sense strand
ccacggaggaggagcugau

SEQ ID NO: 861851 - RNA, 19 nt, Homo sapiens
  misc_RNA (1)...(19): siRNA sense strand
cccugagccugcagaguga

SEQ ID NO: 861852 - RNA, 19 nt, Homo sapiens
  misc_RNA (1)...(19): siRNA sense strand
gcgaagugaagccaacauc

SEQ ID NO: 861853 - RNA, 19 nt, Homo sapiens
  misc_RNA (1)...(19): siRNA sense strand
acagagaggccuuggaaaa

SEQ ID NO: 861854 - RNA, 19 nt, Homo sapiens
  misc_RNA (1)...(19): siRNA sense strand
gcacaacgcugcucgagaa

SEQ ID NO: 861855 - RNA, 19 nt, Homo sapiens
  misc_RNA (1)...(19): siRNA sense strand
agaacuggauccuagaaua

SEQ ID NO: 861856 - RNA, 19 nt, Homo sapiens
  misc_RNA (1)...(19): siRNA sense strand
caacgcugcucgagaaaug

SEQ ID NO: 861857 - RNA, 19 nt, Homo sapiens
  misc_RNA (1)...(19): siRNA sense strand
cgaggaaacugaauacaca

SEQ ID NO: 861858 - RNA, 19 nt, Homo sapiens
  misc_RNA (1)...(19): siRNA sense strand
gaagaacuggauccuagaa

SEQ ID NO: 861859 - RNA, 19 nt, Homo sapiens
  misc_RNA (1)...(19): siRNA sense strand
ggacggagacagcgggauu

SEQ ID NO: 861860 - RNA, 19 nt, Homo sapiens
  misc_RNA (1)...(19): siRNA sense strand
gaacuggauccuagaauac

SEQ ID NO: 861861 - RNA, 19 nt, Homo sapiens
  misc_RNA (1)...(19): siRNA sense strand
gcugcggccugaaguugua

SEQ ID NO: 861862 - RNA, 19 nt, Homo sapiens
  misc_RNA (1)...(19): siRNA sense strand
ugaaugaggcggaggaaga

SEQ ID NO: 861863 - RNA, 19 nt, Homo sapiens
  misc_RNA (1)...(19): siRNA sense strand
gcagugaggccaaauuguc

SEQ ID NO: 861864 - RNA, 19 nt, Homo sapiens
  misc_RNA (1)...(19): siRNA sense strand
gaauacaggaggaguugga

SEQ ID NO: 861865 - RNA, 19 nt, Homo sapiens
  misc_RNA (1)...(19): siRNA sense strand
gcacaaggccaaggugaca

SEQ ID NO: 861866 - RNA, 19 nt, Homo sapiens
  misc_RNA (1)...(19): siRNA sense strand
ggcaggagaugcugaacca

SEQ ID NO: 861867 - RNA, 19 nt, Homo sapiens
  misc_RNA (1)...(19): siRNA sense strand
gcagaucagcgagcagauu

SEQ ID NO: 861868 - RNA, 19 nt, Homo sapiens
  misc_RNA (1)...(19): siRNA sense strand
ggaagaacuggauccuaga

SEQ ID NO: 861869 - RNA, 19 nt, Homo sapiens
  misc_RNA (1)...(19): siRNA sense strand
gaucaaccagguggaacua

SEQ ID NO: 861870 - RNA, 19 nt, Homo sapiens
  misc_RNA (1)...(19): siRNA sense strand
cgacaccgauacccugagu

SEQ ID NO: 861871 - RNA, 19 nt, Homo sapiens
  misc_RNA (1)...(19): siRNA sense strand
caagagaggaggaagaacu

SEQ ID NO: 861872 - RNA, 19 nt, Homo sapiens
  misc_RNA (1)...(19): siRNA sense strand
ggagaucaaccagguggaa

SEQ ID NO: 861873 - RNA, 19 nt, Homo sapiens
  misc_RNA (1)...(19): siRNA sense strand
cagcagcagugaggccaaa

SEQ ID NO: 861874 - RNA, 19 nt, Homo sapiens
  misc_RNA (1)...(19): siRNA sense strand
ggagcccagucgcagaaga

SEQ ID NO: 861875 - RNA, 19 nt, Homo sapiens
  misc_RNA (1)...(19): siRNA sense strand
gagcugcggccugaaguug

SEQ ID NO: 861876 - RNA, 19 nt, Homo sapiens
  misc_RNA (1)...(19): siRNA sense strand
gcagcagugaggccaaauu

SEQ ID NO: 861877 - RNA, 19 nt, Homo sapiens
  misc_RNA (1)...(19): siRNA sense strand
cagcagugaggccaaauug

SEQ ID NO: 861878 - RNA, 19 nt, Homo sapiens
  misc_RNA (1)...(19): siRNA sense strand
ucaaccagguggaacuaca

SEQ ID NO: 861879 - RNA, 19 nt, Homo sapiens
  misc_RNA (1)...(19): siRNA sense strand
gaggaugaagucccuagga

SEQ ID NO: 861880 - RNA, 19 nt, Homo sapiens
  misc_RNA (1)...(19): siRNA sense strand
uacacaggguucccacuug

SEQ ID NO: 861881 - RNA, 19 nt, Homo sapiens
  misc_RNA (1)...(19): siRNA sense strand
ugacucggcugugccaaca

SEQ ID NO: 861882 - RNA, 19 nt, Homo sapiens
  misc_RNA (1)...(19): siRNA sense strand
ggagcugcaucgagaaagc

SEQ ID NO: 861883 - RNA, 19 nt, Homo sapiens
  misc_RNA (1)...(19): siRNA sense strand
gagaugcugaaccaugcua

SEQ ID NO: 861884 - RNA, 19 nt, Homo sapiens
  misc_RNA (1)...(19): siRNA sense strand
guccaagcccugcagaaga

SEQ ID NO: 861885 - RNA, 19 nt, Homo sapiens
  misc_RNA (1)...(19): siRNA sense strand
uagaauacaggaggaguug

SEQ ID NO: 861886 - RNA, 19 nt, Homo sapiens
  misc_RNA (1)...(19): siRNA sense strand
cagaucagcgagcagauuc

SEQ ID NO: 861887 - RNA, 19 nt, Homo sapiens
  misc_RNA (1)...(19): siRNA sense strand
cucgagaaaugguguuugu

SEQ ID NO: 861888 - RNA, 19 nt, Homo sapiens
  misc_RNA (1)...(19): siRNA sense strand
gccugaaguuguagaggau

SEQ ID NO: 861889 - RNA, 19 nt, Homo sapiens
  misc_RNA (1)...(19): siRNA sense strand
gaaugaggcggaggaagag

SEQ ID NO: 861890 - RNA, 19 nt, Homo sapiens
  misc_RNA (1)...(19): siRNA sense strand
cugaaguuguagaggauga

SEQ ID NO: 861891 - RNA, 19 nt, Homo sapiens
  misc_RNA (1)...(19): siRNA sense strand
ggagcugcggccugaaguu

SEQ ID NO: 861892 - RNA, 19 nt, Homo sapiens
  misc_RNA (1)...(19): siRNA sense strand
ggaguuggagcaccugaac

SEQ ID NO: 861893 - RNA, 19 nt, Homo sapiens
  misc_RNA (1)...(19): siRNA sense strand
gguccaagcccugcagaag

SEQ ID NO: 861894 - RNA, 19 nt, Homo sapiens
  misc_RNA (1)...(19): siRNA sense strand
gcgaggaaacugaauacac

SEQ ID NO: 861895 - RNA, 19 nt, Homo sapiens
  misc_RNA (1)...(19): siRNA sense strand
gagcucaaggcccaguuca

SEQ ID NO: 861896 - RNA, 19 nt, Homo sapiens
  misc_RNA (1)...(19): siRNA sense strand
ggagugugcuggauauauu

SEQ ID NO: 861897 - RNA, 19 nt, Homo sapiens
  misc_RNA (1)...(19): siRNA sense strand
gaacugaugccuggaaauu

SEQ ID NO: 861898 - RNA, 19 nt, Homo sapiens
  misc_RNA (1)...(19): siRNA sense strand
ggagaugacuggagagaag

SEQ ID NO: 861899 - RNA, 19 nt, Homo sapiens
  misc_RNA (1)...(19): siRNA sense strand
gccagggaguuuacacuua

SEQ ID NO: 861900 - RNA, 19 nt, Homo sapiens
  misc_RNA (1)...(19): siRNA sense strand
ggaacacccucucccuuga

SEQ ID NO: 861901 - RNA, 19 nt, Homo sapiens
  misc_RNA (1)...(19): siRNA sense strand
gaagggaggccucacuuug

SEQ ID NO: 861902 - RNA, 19 nt, Homo sapiens
  misc_RNA (1)...(19): siRNA sense strand
gaagaaacggucauugaug

SEQ ID NO: 861903 - RNA, 19 nt, Homo sapiens
  misc_RNA (1)...(19): siRNA sense strand
caaacuggcuacccuuaug

SEQ ID NO: 861904 - RNA, 19 nt, Homo sapiens
  misc_RNA (1)...(19): siRNA sense strand
caaacugcaucuacgauau

SEQ ID NO: 861905 - RNA, 19 nt, Homo sapiens
  misc_RNA (1)...(19): siRNA sense strand
ccuggacgaugacggauua

SEQ ID NO: 861906 - RNA, 19 nt, Homo sapiens
  misc_RNA (1)...(19): siRNA sense strand
gcacuuuaugggaaauuua

SEQ ID NO: 861907 - RNA, 19 nt, Homo sapiens
  misc_RNA (1)...(19): siRNA sense strand
ucagaaaggguuuauguug

SEQ ID NO: 861908 - RNA, 19 nt, Homo sapiens
  misc_RNA (1)...(19): siRNA sense strand
aaagauaacauucgucaug

SEQ ID NO: 861909 - RNA, 19 nt, Homo sapiens
  misc_RNA (1)...(19): siRNA sense strand
aagaaacggucauugaugu

SEQ ID NO: 861910 - RNA, 19 nt, Homo sapiens
  misc_RNA (1)...(19): siRNA sense strand
guugcugaaucucuuauuu

SEQ ID NO: 861911 - RNA, 19 nt, Homo sapiens
  misc_RNA (1)...(19): siRNA sense strand
ccaggaauaugacacagau

SEQ ID NO: 861912 - RNA, 19 nt, Homo sapiens
  misc_RNA (1)...(19): siRNA sense strand
gagaggaccgcacuuuaug

SEQ ID NO: 861913 - RNA, 19 nt, Homo sapiens
  misc_RNA (1)...(19): siRNA sense strand
uaggagaaguaaaugaaga

SEQ ID NO: 861914 - RNA, 19 nt, Homo sapiens
  misc_RNA (1)...(19): siRNA sense strand
gaugagaggaccgcacuuu

SEQ ID NO: 861915 - RNA, 19 nt, Homo sapiens
  misc_RNA (1)...(19): siRNA sense strand
ccaaacugcaucuacgaua

SEQ ID NO: 861916 - RNA, 19 nt, Homo sapiens
  misc_RNA (1)...(19): siRNA sense strand
gaugauagaaggcaaacug

SEQ ID NO: 861917 - RNA, 19 nt, Homo sapiens
  misc_RNA (1)...(19): siRNA sense strand
caucuugcauuucuaccaa

SEQ ID NO: 861918 - RNA, 19 nt, Homo sapiens
  misc_RNA (1)...(19): siRNA sense strand
gaugggagacugaucuuca

SEQ ID NO: 861919 - RNA, 19 nt, Homo sapiens
  misc_RNA (1)...(19): siRNA sense strand
ggauagcgacgacgagaug

SEQ ID NO: 861920 - RNA, 19 nt, Homo sapiens
  misc_RNA (1)...(19): siRNA sense strand
gagugugcuggauauauua

SEQ ID NO: 861921 - RNA, 19 nt, Homo sapiens
  misc_RNA (1)...(19): siRNA sense strand
gcaaacuggcuacccuuau

SEQ ID NO: 861922 - RNA, 19 nt, Homo sapiens
  misc_RNA (1)...(19): siRNA sense strand
gaccgcacuuuaugggaaa

SEQ ID NO: 861923 - RNA, 19 nt, Homo sapiens
  misc_RNA (1)...(19): siRNA sense strand
ugagaggaccgcacuuuau

SEQ ID NO: 861924 - RNA, 19 nt, Homo sapiens
  misc_RNA (1)...(19): siRNA sense strand
gaacgguccagcccaggaa

SEQ ID NO: 861925 - RNA, 19 nt, Homo sapiens
  misc_RNA (1)...(19): siRNA sense strand
ccagggaguuuacacuuac

SEQ ID NO: 861926 - RNA, 19 nt, Homo sapiens
  misc_RNA (1)...(19): siRNA sense strand
ggguuuauguugcugaauc

SEQ ID NO: 861927 - RNA, 19 nt, Homo sapiens
  misc_RNA (1)...(19): siRNA sense strand
cauggagugugcuggauau

SEQ ID NO: 861928 - RNA, 19 nt, Homo sapiens
  misc_RNA (1)...(19): siRNA sense strand
gaguuuacacuuacgaaga

SEQ ID NO: 861929 - RNA, 19 nt, Homo sapiens
  misc_RNA (1)...(19): siRNA sense strand
gguaccagguggagcugaa

SEQ ID NO: 861930 - RNA, 19 nt, Homo sapiens
  misc_RNA (1)...(19): siRNA sense strand
ggcaaacuggcuacccuua

SEQ ID NO: 861931 - RNA, 19 nt, Homo sapiens
  misc_RNA (1)...(19): siRNA sense strand
guagcugugggaccuaaua

SEQ ID NO: 861932 - RNA, 19 nt, Homo sapiens
  misc_RNA (1)...(19): siRNA sense strand
ugaagaaacggucauugau

SEQ ID NO: 861933 - RNA, 19 nt, Homo sapiens
  misc_RNA (1)...(19): siRNA sense strand
aagggcaccuggacgauga

SEQ ID NO: 861934 - RNA, 19 nt, Homo sapiens
  misc_RNA (1)...(19): siRNA sense strand
acugaugccuggaaauuca

SEQ ID NO: 861935 - RNA, 19 nt, Homo sapiens
  misc_RNA (1)...(19): siRNA sense strand
gagcaguggaggccgauga

SEQ ID NO: 861936 - RNA, 19 nt, Homo sapiens
  misc_RNA (1)...(19): siRNA sense strand
gacuucaucuugcauuucu

SEQ ID NO: 861937 - RNA, 19 nt, Homo sapiens
  misc_RNA (1)...(19): siRNA sense strand
aaucagaaaggguuuaugu

SEQ ID NO: 861938 - RNA, 19 nt, Homo sapiens
  misc_RNA (1)...(19): siRNA sense strand
gaagaagggaggccucacu

SEQ ID NO: 861939 - RNA, 19 nt, Homo sapiens
  misc_RNA (1)...(19): siRNA sense strand
cugcaucuacgauauguuu

SEQ ID NO: 861940 - RNA, 19 nt, Homo sapiens
  misc_RNA (1)...(19): siRNA sense strand
auaaccacguauccaagua

SEQ ID NO: 861941 - RNA, 19 nt, Homo sapiens
  misc_RNA (1)...(19): siRNA sense strand
gaacacccucucccuugau

SEQ ID NO: 861942 - RNA, 19 nt, Homo sapiens
  misc_RNA (1)...(19): siRNA sense strand
guccagcccaggaauauga

SEQ ID NO: 861943 - RNA, 19 nt, Homo sapiens
  misc_RNA (1)...(19): siRNA sense strand
gaccuaauacuguuauguc

SEQ ID NO: 861944 - RNA, 19 nt, Homo sapiens
  misc_RNA (1)...(19): siRNA sense strand
agggaggccucacuuugaa

SEQ ID NO: 861945 - RNA, 19 nt, Homo sapiens
  misc_RNA (1)...(19): siRNA sense strand
ggacacaaggcaaaucacu

SEQ ID NO: 861946 - RNA, 19 nt, Homo sapiens
  misc_RNA (1)...(19): siRNA sense strand
uguaggagaaguaaaugaa

SEQ ID NO: 861947 - RNA, 19 nt, Homo sapiens
  misc_RNA (1)...(19): siRNA sense strand
ccacguauccaaguacugu

SEQ ID NO: 861948 - RNA, 19 nt, Homo sapiens
  misc_RNA (1)...(19): siRNA sense strand
agaaaggguuuauguugcu

SEQ ID NO: 861949 - RNA, 19 nt, Homo sapiens
  misc_RNA (1)...(19): siRNA sense strand
uccagauccuuaugaauca

SEQ ID NO: 861950 - RNA, 19 nt, Homo sapiens
  misc_RNA (1)...(19): siRNA sense strand
gauauauuacccagaugga

SEQ ID NO: 861951 - RNA, 19 nt, Homo sapiens
  misc_RNA (1)...(19): siRNA sense strand
ugugggaccuaauacuguu

SEQ ID NO: 861952 - RNA, 19 nt, Homo sapiens
  misc_RNA (1)...(19): siRNA sense strand
aagggaggccucacuuuga

SEQ ID NO: 861953 - RNA, 19 nt, Homo sapiens
  misc_RNA (1)...(19): siRNA sense strand
ggaccuaauacuguuaugu

SEQ ID NO: 861954 - RNA, 19 nt, Homo sapiens
  misc_RNA (1)...(19): siRNA sense strand
gauggaggaagccuuguag

SEQ ID NO: 861955 - RNA, 19 nt, Homo sapiens
  misc_RNA (1)...(19): siRNA sense strand
aaacugcaucuacgauaug

SEQ ID NO: 861956 - RNA, 19 nt, Homo sapiens
  misc_RNA (1)...(19): siRNA sense strand
ccuauaaccacguauccaa

SEQ ID NO: 861957 - RNA, 19 nt, Homo sapiens
  misc_RNA (1)...(19): siRNA sense strand
ucgacuucaucuugcauuu

SEQ ID NO: 861958 - RNA, 19 nt, Homo sapiens
  misc_RNA (1)...(19): siRNA sense strand
aaucacuccuucacuccaa

SEQ ID NO: 861959 - RNA, 19 nt, Homo sapiens
  misc_RNA (1)...(19): siRNA sense strand
gcaucuacgauauguuugu

SEQ ID NO: 861960 - RNA, 19 nt, Homo sapiens
  misc_RNA (1)...(19): siRNA sense strand
gaugacuggagagaagaua

SEQ ID NO: 861961 - RNA, 19 nt, Homo sapiens
  misc_RNA (1)...(19): siRNA sense strand
ccucucccuugaugaagaa

SEQ ID NO: 861962 - RNA, 19 nt, Homo sapiens
  misc_RNA (1)...(19): siRNA sense strand
uaccaaugcucuucuucca

SEQ ID NO: 861963 - RNA, 19 nt, Homo sapiens
  misc_RNA (1)...(19): siRNA sense strand
agaagggaggccucacuuu

SEQ ID NO: 861964 - RNA, 19 nt, Homo sapiens
  misc_RNA (1)...(19): siRNA sense strand
ucauggagugugcuggaua

SEQ ID NO: 861965 - RNA, 19 nt, Homo sapiens
  misc_RNA (1)...(19): siRNA sense strand
gggaagagugggccugaag

SEQ ID NO: 861966 - RNA, 19 nt, Homo sapiens
  misc_RNA (1)...(19): siRNA sense strand
gcugugggaccuaauacug

SEQ ID NO: 861967 - RNA, 19 nt, Homo sapiens
  misc_RNA (1)...(19): siRNA sense strand
gccuggaaauucaguguac

SEQ ID NO: 861968 - RNA, 19 nt, Homo sapiens
  misc_RNA (1)...(19): siRNA sense strand
ugggaaauuuauugaugga

SEQ ID NO: 861969 - RNA, 19 nt, Homo sapiens
  misc_RNA (1)...(19): siRNA sense strand
ggagaaguaaaugaagaug

SEQ ID NO: 861970 - RNA, 19 nt, Homo sapiens
  misc_RNA (1)...(19): siRNA sense strand
aggaagccuuguaggagaa

SEQ ID NO: 861971 - RNA, 19 nt, Homo sapiens
  misc_RNA (1)...(19): siRNA sense strand
agauaacauucgucaugga

SEQ ID NO: 861972 - RNA, 19 nt, Homo sapiens
  misc_RNA (1)...(19): siRNA sense strand
aguuuacacuuacgaagau

SEQ ID NO: 861973 - RNA, 19 nt, Homo sapiens
  misc_RNA (1)...(19): siRNA sense strand
caguggaggccgaugaaga

SEQ ID NO: 861974 - RNA, 19 nt, Homo sapiens
  misc_RNA (1)...(19): siRNA sense strand
caucuacgauauguuuguc

SEQ ID NO: 861975 - RNA, 19 nt, Homo sapiens
  misc_RNA (1)...(19): siRNA sense strand
uuacacaccaagagguuga

SEQ ID NO: 861976 - RNA, 19 nt, Homo sapiens
  misc_RNA (1)...(19): siRNA sense strand
ggagggguauuauguggau

SEQ ID NO: 861977 - RNA, 19 nt, Homo sapiens
  misc_RNA (1)...(19): siRNA sense strand
uuauguugcugaaucucuu

SEQ ID NO: 861978 - RNA, 19 nt, Homo sapiens
  misc_RNA (1)...(19): siRNA sense strand
gguuuauguugcugaaucu

SEQ ID NO: 861979 - RNA, 19 nt, Homo sapiens
  misc_RNA (1)...(19): siRNA sense strand
ggccagggaguuuacacuu

SEQ ID NO: 861980 - RNA, 19 nt, Homo sapiens
  misc_RNA (1)...(19): siRNA sense strand
gagaugacuggagagaaga

SEQ ID NO: 861981 - RNA, 19 nt, Homo sapiens
  misc_RNA (1)...(19): siRNA sense strand
ugagcccuauaaccacgua

SEQ ID NO: 861982 - RNA, 19 nt, Homo sapiens
  misc_RNA (1)...(19): siRNA sense strand
ugaugugccugagcccuau

SEQ ID NO: 861983 - RNA, 19 nt, Homo sapiens
  misc_RNA (1)...(19): siRNA sense strand
ucaaggggcaguauaaaga

SEQ ID NO: 861984 - RNA, 19 nt, Homo sapiens
  misc_RNA (1)...(19): siRNA sense strand
gggacugggcccuuaaugg

SEQ ID NO: 861985 - RNA, 19 nt, Homo sapiens
  misc_RNA (1)...(19): siRNA sense strand
cuacccuuauguccacuga

SEQ ID NO: 861986 - RNA, 19 nt, Homo sapiens
  misc_RNA (1)...(19): siRNA sense strand
augagaggaccgcacuuua

SEQ ID NO: 861987 - RNA, 19 nt, Homo sapiens
  misc_RNA (1)...(19): siRNA sense strand
guaggagaaguaaaugaag

SEQ ID NO: 861988 - RNA, 19 nt, Homo sapiens
  misc_RNA (1)...(19): siRNA sense strand
uggaggaagccuuguagga

SEQ ID NO: 861989 - RNA, 19 nt, Homo sapiens
  misc_RNA (1)...(19): siRNA sense strand
ccaaguacugugccuccuu

SEQ ID NO: 861990 - RNA, 19 nt, Homo sapiens
  misc_RNA (1)...(19): siRNA sense strand
cacggguucugcacaguca

SEQ ID NO: 861991 - RNA, 19 nt, Homo sapiens
  misc_RNA (1)...(19): siRNA sense strand
aggccucacuuugaacuga

SEQ ID NO: 861992 - RNA, 19 nt, Homo sapiens
  misc_RNA (1)...(19): siRNA sense strand
ccuuauguccacugaagaa

SEQ ID NO: 861993 - RNA, 19 nt, Homo sapiens
  misc_RNA (1)...(19): siRNA sense strand
aaacuggcuacccuuaugu

SEQ ID NO: 861994 - RNA, 19 nt, Homo sapiens
  misc_RNA (1)...(19): siRNA sense strand
gccuauguguacccugaug

SEQ ID NO: 861995 - RNA, 19 nt, Homo sapiens
  misc_RNA (1)...(19): siRNA sense strand
cagcaacgcuuucaagaca

SEQ ID NO: 861996 - RNA, 19 nt, Homo sapiens
  misc_RNA (1)...(19): siRNA sense strand
gcagguguauccaggaguu

SEQ ID NO: 861997 - RNA, 19 nt, Homo sapiens
  misc_RNA (1)...(19): siRNA sense strand
uacaggagguggugaacua

SEQ ID NO: 861998 - RNA, 19 nt, Homo sapiens
  misc_RNA (1)...(19): siRNA sense strand
gagcggacgugaaccaaag

SEQ ID NO: 861999 - RNA, 19 nt, Homo sapiens
  misc_RNA (1)...(19): siRNA sense strand
cggaaugucugcagagguu

SEQ ID NO: 862000 - RNA, 19 nt, Homo sapiens
  misc_RNA (1)...(19): siRNA sense strand
gaucgacucugcgguggaa

SEQ ID NO: 862001 - RNA, 19 nt, Homo sapiens
  misc_RNA (1)...(19): siRNA sense strand
gcaacgcuuucaagacaug

SEQ ID NO: 862002 - RNA, 19 nt, Homo sapiens
  misc_RNA (1)...(19): siRNA sense strand
ugcuaaagcugauguguga

SEQ ID NO: 862003 - RNA, 19 nt, Homo sapiens
  misc_RNA (1)...(19): siRNA sense strand
acaaauacguggaaaagaa

SEQ ID NO: 862004 - RNA, 19 nt, Homo sapiens
  misc_RNA (1)...(19): siRNA sense strand
gcuggagggugcagaagug

SEQ ID NO: 862005 - RNA, 19 nt, Homo sapiens
  misc_RNA (1)...(19): siRNA sense strand
gcuccuugaucgucuguga

SEQ ID NO: 862006 - RNA, 19 nt, Homo sapiens
  misc_RNA (1)...(19): siRNA sense strand
ccaagaagaaguuugagau

SEQ ID NO: 862007 - RNA, 19 nt, Homo sapiens
  misc_RNA (1)...(19): siRNA sense strand
gcgagagcccugacaguug

SEQ ID NO: 862008 - RNA, 19 nt, Homo sapiens
  misc_RNA (1)...(19): siRNA sense strand
ggacuucuccuacgaugag

SEQ ID NO: 862009 - RNA, 19 nt, Homo sapiens
  misc_RNA (1)...(19): siRNA sense strand
uggacucgcucuucuccua

SEQ ID NO: 862010 - RNA, 19 nt, Homo sapiens
  misc_RNA (1)...(19): siRNA sense strand
ggaaguucaaggagacaaa

SEQ ID NO: 862011 - RNA, 19 nt, Homo sapiens
  misc_RNA (1)...(19): siRNA sense strand
gugcugcucugcauugagu

SEQ ID NO: 862012 - RNA, 19 nt, Homo sapiens
  misc_RNA (1)...(19): siRNA sense strand
gcgcauggcggaggaaaug

SEQ ID NO: 862013 - RNA, 19 nt, Homo sapiens
  misc_RNA (1)...(19): siRNA sense strand
ggagacaaagaagcaguuu

SEQ ID NO: 862014 - RNA, 19 nt, Homo sapiens
  misc_RNA (1)...(19): siRNA sense strand
ucuaugaggcccaguguga

SEQ ID NO: 862015 - RNA, 19 nt, Homo sapiens
  misc_RNA (1)...(19): siRNA sense strand
caagaagaaguuugagauc

SEQ ID NO: 862016 - RNA, 19 nt, Homo sapiens
  misc_RNA (1)...(19): siRNA sense strand
agaagcaguuugacaaggu

SEQ ID NO: 862017 - RNA, 19 nt, Homo sapiens
  misc_RNA (1)...(19): siRNA sense strand
aagaggaugugcggaaguu

SEQ ID NO: 862018 - RNA, 19 nt, Homo sapiens
  misc_RNA (1)...(19): siRNA sense strand
ucaaggagacaaagaagca

SEQ ID NO: 862019 - RNA, 19 nt, Homo sapiens
  misc_RNA (1)...(19): siRNA sense strand
caaggacaaauacguggaa

SEQ ID NO: 862020 - RNA, 19 nt, Homo sapiens
  misc_RNA (1)...(19): siRNA sense strand
ggagcggacgugaaccaaa

SEQ ID NO: 862021 - RNA, 19 nt, Homo sapiens
  misc_RNA (1)...(19): siRNA sense strand
cacccuggaucguaaguuc

SEQ ID NO: 862022 - RNA, 19 nt, Homo sapiens
  misc_RNA (1)...(19): siRNA sense strand
gaggaugugcggaaguuca

SEQ ID NO: 862023 - RNA, 19 nt, Homo sapiens
  misc_RNA (1)...(19): siRNA sense strand
aaacggagcggacgugaac

SEQ ID NO: 862024 - RNA, 19 nt, Homo sapiens
  misc_RNA (1)...(19): siRNA sense strand
gcugaugugugagcuugga

SEQ ID NO: 862025 - RNA, 19 nt, Homo sapiens
  misc_RNA (1)...(19): siRNA sense strand
acuaugugcuccagaucaa

SEQ ID NO: 862026 - RNA, 19 nt, Homo sapiens
  misc_RNA (1)...(19): siRNA sense strand
ggugaacuaccacaugauc

SEQ ID NO: 862027 - RNA, 19 nt, Homo sapiens
  misc_RNA (1)...(19): siRNA sense strand
gacgugaaccaaagagaca

SEQ ID NO: 862028 - RNA, 19 nt, Homo sapiens
  misc_RNA (1)...(19): siRNA sense strand
caaggaggccuggaucaag

SEQ ID NO: 862029 - RNA, 19 nt, Homo sapiens
  misc_RNA (1)...(19): siRNA sense strand
gccaagaagaaguuugaga

SEQ ID NO: 862030 - RNA, 19 nt, Homo sapiens
  misc_RNA (1)...(19): siRNA sense strand
agaagaaguuugagauccu

SEQ ID NO: 862031 - RNA, 19 nt, Homo sapiens
  misc_RNA (1)...(19): siRNA sense strand
cugcagagguucgcugaca

SEQ ID NO: 862032 - RNA, 19 nt, Homo sapiens
  misc_RNA (1)...(19): siRNA sense strand
ugggcacccuggaucguaa

SEQ ID NO: 862033 - RNA, 19 nt, Homo sapiens
  misc_RNA (1)...(19): siRNA sense strand
gugggagccugagcugcua

SEQ ID NO: 862034 - RNA, 19 nt, Homo sapiens
  misc_RNA (1)...(19): siRNA sense strand
uugagauccuggacucuau

SEQ ID NO: 862035 - RNA, 19 nt, Homo sapiens
  misc_RNA (1)...(19): siRNA sense strand
ggacaaauacguggaaaag

SEQ ID NO: 862036 - RNA, 19 nt, Homo sapiens
  misc_RNA (1)...(19): siRNA sense strand
gacaaggaggccuggauca

SEQ ID NO: 862037 - RNA, 19 nt, Homo sapiens
  misc_RNA (1)...(19): siRNA sense strand
gaucuaugaggcccagugu

SEQ ID NO: 862038 - RNA, 19 nt, Homo sapiens
  misc_RNA (1)...(19): siRNA sense strand
gcgcugugaaucagaucua

SEQ ID NO: 862039 - RNA, 19 nt, Homo sapiens
  misc_RNA (1)...(19): siRNA sense strand
gccagcaacgcuuucaaga

SEQ ID NO: 862040 - RNA, 19 nt, Homo sapiens
  misc_RNA (1)...(19): siRNA sense strand
agcgugagauggagcgaaa

SEQ ID NO: 862041 - RNA, 19 nt, Homo sapiens
  misc_RNA (1)...(19): siRNA sense strand
gaagccgugugaggacauc

SEQ ID NO: 862042 - RNA, 19 nt, Homo sapiens
  misc_RNA (1)...(19): siRNA sense strand
gcucugugaagccguguga

SEQ ID NO: 862043 - RNA, 19 nt, Homo sapiens
  misc_RNA (1)...(19): siRNA sense strand
gaaguucaaggagacaaag

SEQ ID NO: 862044 - RNA, 19 nt, Homo sapiens
  misc_RNA (1)...(19): siRNA sense strand
ggacuaugugcuccagauc

SEQ ID NO: 862045 - RNA, 19 nt, Homo sapiens
  misc_RNA (1)...(19): siRNA sense strand
cugugaaucagaucuauga

SEQ ID NO: 862046 - RNA, 19 nt, Homo sapiens
  misc_RNA (1)...(19): siRNA sense strand
ugugugagcuuggaaacag

SEQ ID NO: 862047 - RNA, 19 nt, Homo sapiens
  misc_RNA (1)...(19): siRNA sense strand
ccaccuggcacuggacuau

SEQ ID NO: 862048 - RNA, 19 nt, Homo sapiens
  misc_RNA (1)...(19): siRNA sense strand
ccgagacucccucuucugu

SEQ ID NO: 862049 - RNA, 19 nt, Homo sapiens
  misc_RNA (1)...(19): siRNA sense strand
gacuaugugcuccagauca

SEQ ID NO: 862050 - RNA, 19 nt, Homo sapiens
  misc_RNA (1)...(19): siRNA sense strand
aaagaagcaguuugacaag

SEQ ID NO: 862051 - RNA, 19 nt, Homo sapiens
  misc_RNA (1)...(19): siRNA sense strand
ggaucaaggacaaauacgu

SEQ ID NO: 862052 - RNA, 19 nt, Homo sapiens
  misc_RNA (1)...(19): siRNA sense strand
gcgugcugcucugcauuga

SEQ ID NO: 862053 - RNA, 19 nt, Homo sapiens
  misc_RNA (1)...(19): siRNA sense strand
cggcgucaaucaucgauaa

SEQ ID NO: 862054 - RNA, 19 nt, Homo sapiens
  misc_RNA (1)...(19): siRNA sense strand
gaauguaggaccagcauca

SEQ ID NO: 862055 - RNA, 19 nt, Homo sapiens
  misc_RNA (1)...(19): siRNA sense strand
gggcugagcugugcacucu

SEQ ID NO: 862056 - RNA, 19 nt, Homo sapiens
  misc_RNA (1)...(19): siRNA sense strand
ggagggaagcacugucaug

SEQ ID NO: 862057 - RNA, 19 nt, Homo sapiens
  misc_RNA (1)...(19): siRNA sense strand
gaccauguaccgcguuaug

SEQ ID NO: 862058 - RNA, 19 nt, Homo sapiens
  misc_RNA (1)...(19): siRNA sense strand
gagggaagcacugucaugu

SEQ ID NO: 862059 - RNA, 19 nt, Homo sapiens
  misc_RNA (1)...(19): siRNA sense strand
gcugagcugugcacucucu

SEQ ID NO: 862060 - RNA, 19 nt, Homo sapiens
  misc_RNA (1)...(19): siRNA sense strand
cccaaccagugccagcaua

SEQ ID NO: 862061 - RNA, 19 nt, Homo sapiens
  misc_RNA (1)...(19): siRNA sense strand
gaccggaucgaaucucuca

SEQ ID NO: 862062 - RNA, 19 nt, Homo sapiens
  misc_RNA (1)...(19): siRNA sense strand
gagcugugcacucucuuag

SEQ ID NO: 862063 - RNA, 19 nt, Homo sapiens
  misc_RNA (1)...(19): siRNA sense strand
gaagagcugcagccagaac

SEQ ID NO: 862064 - RNA, 19 nt, Homo sapiens
  misc_RNA (1)...(19): siRNA sense strand
ugagcugugcacucucuua

SEQ ID NO: 862065 - RNA, 19 nt, Homo sapiens
  misc_RNA (1)...(19): siRNA sense strand
aggcgcaucugcagcacuu

SEQ ID NO: 862066 - RNA, 19 nt, Homo sapiens
  misc_RNA (1)...(19): siRNA sense strand
cagcagacccaugcagugu

SEQ ID NO: 862067 - RNA, 19 nt, Homo sapiens
  misc_RNA (1)...(19): siRNA sense strand
ccauguaccgcguuaugug

SEQ ID NO: 862068 - RNA, 19 nt, Homo sapiens
  misc_RNA (1)...(19): siRNA sense strand
ucgcaccauuguuuuaaua

SEQ ID NO: 862069 - RNA, 19 nt, Homo sapiens
  misc_RNA (1)...(19): siRNA sense strand
gguggaucccucagagaga

SEQ ID NO: 862070 - RNA, 19 nt, Homo sapiens
  misc_RNA (1)...(19): siRNA sense strand
aggaccauguaccgcguua

SEQ ID NO: 862071 - RNA, 19 nt, Homo sapiens
  misc_RNA (1)...(19): siRNA sense strand
gaagaugaauccuugcuaa

SEQ ID NO: 862072 - RNA, 19 nt, Homo sapiens
  misc_RNA (1)...(19): siRNA sense strand
gcucagaaccgcaaacuua

SEQ ID NO: 862073 - RNA, 19 nt, Homo sapiens
  misc_RNA (1)...(19): siRNA sense strand
gaaauuugaucuucacuca

SEQ ID NO: 862074 - RNA, 19 nt, Homo sapiens
  misc_RNA (1)...(19): siRNA sense strand
cagaaugucucgaagauuu

SEQ ID NO: 862075 - RNA, 19 nt, Homo sapiens
  misc_RNA (1)...(19): siRNA sense strand
cagaacagauuguggauuu

SEQ ID NO: 862076 - RNA, 19 nt, Homo sapiens
  misc_RNA (1)...(19): siRNA sense strand
gaagauauaugggaggaaa

SEQ ID NO: 862077 - RNA, 19 nt, Homo sapiens
  misc_RNA (1)...(19): siRNA sense strand
gaccagauguuacaaauuc

SEQ ID NO: 862078 - RNA, 19 nt, Homo sapiens
  misc_RNA (1)...(19): siRNA sense strand
ggaaaugaaugagaagaaa

SEQ ID NO: 862079 - RNA, 19 nt, Homo sapiens
  misc_RNA (1)...(19): siRNA sense strand
gaugaauccuugcuaauga

SEQ ID NO: 862080 - RNA, 19 nt, Homo sapiens
  misc_RNA (1)...(19): siRNA sense strand
gagcagagaccagauguua

SEQ ID NO: 862081 - RNA, 19 nt, Homo sapiens
  misc_RNA (1)...(19): siRNA sense strand
uuauauagcuuccuccuaa

SEQ ID NO: 862082 - RNA, 19 nt, Homo sapiens
  misc_RNA (1)...(19): siRNA sense strand
ggcaagaugugcugaauug

SEQ ID NO: 862083 - RNA, 19 nt, Homo sapiens
  misc_RNA (1)...(19): siRNA sense strand
ggaaagaauacaacaguuu

SEQ ID NO: 862084 - RNA, 19 nt, Homo sapiens
  misc_RNA (1)...(19): siRNA sense strand
ccaaauauaucuugugagu

SEQ ID NO: 862085 - RNA, 19 nt, Homo sapiens
  misc_RNA (1)...(19): siRNA sense strand
ccauucagcuuguucagua

SEQ ID NO: 862086 - RNA, 19 nt, Homo sapiens
  misc_RNA (1)...(19): siRNA sense strand
gagcagcuucuaucaaaua

SEQ ID NO: 862087 - RNA, 19 nt, Homo sapiens
  misc_RNA (1)...(19): siRNA sense strand
gagaagauguaacacugaa

SEQ ID NO: 862088 - RNA, 19 nt, Homo sapiens
  misc_RNA (1)...(19): siRNA sense strand
gaauacaacaguuugauga

SEQ ID NO: 862089 - RNA, 19 nt, Homo sapiens
  misc_RNA (1)...(19): siRNA sense strand
gaaagaauacaacaguuug

SEQ ID NO: 862090 - RNA, 19 nt, Homo sapiens
  misc_RNA (1)...(19): siRNA sense strand
gaagaagcaugauuuugua

SEQ ID NO: 862091 - RNA, 19 nt, Homo sapiens
  misc_RNA (1)...(19): siRNA sense strand
gacaucaacuuuacucuca

SEQ ID NO: 862092 - RNA, 19 nt, Homo sapiens
  misc_RNA (1)...(19): siRNA sense strand
agaagaagaucgacauuca

SEQ ID NO: 862093 - RNA, 19 nt, Homo sapiens
  misc_RNA (1)...(19): siRNA sense strand
gaaaguacagacaagguaa

SEQ ID NO: 862094 - RNA, 19 nt, Homo sapiens
  misc_RNA (1)...(19): siRNA sense strand
caacaaaugacguccaauu

SEQ ID NO: 862095 - RNA, 19 nt, Homo sapiens
  misc_RNA (1)...(19): siRNA sense strand
gaaauauugccuuguuuga

SEQ ID NO: 862096 - RNA, 19 nt, Homo sapiens
  misc_RNA (1)...(19): siRNA sense strand
ugaaggaguuaauggauga

SEQ ID NO: 862097 - RNA, 19 nt, Homo sapiens
  misc_RNA (1)...(19): siRNA sense strand
caacuggucagcuaacuuu

SEQ ID NO: 862098 - RNA, 19 nt, Homo sapiens
  misc_RNA (1)...(19): siRNA sense strand
caacuuuacucucaauaca

SEQ ID NO: 862099 - RNA, 19 nt, Homo sapiens
  misc_RNA (1)...(19): siRNA sense strand
gagaccagauguuacaaau

SEQ ID NO: 862100 - RNA, 19 nt, Homo sapiens
  misc_RNA (1)...(19): siRNA sense strand
guacagacaagguaacuga

SEQ ID NO: 862101 - RNA, 19 nt, Homo sapiens
  misc_RNA (1)...(19): siRNA sense strand
gaggaagacggcaugguua

SEQ ID NO: 862102 - RNA, 19 nt, Homo sapiens
  misc_RNA (1)...(19): siRNA sense strand
gaaacugucuaccucucaa

SEQ ID NO: 862103 - RNA, 19 nt, Homo sapiens
  misc_RNA (1)...(19): siRNA sense strand
uaacuuugaugucccaaug

SEQ ID NO: 862104 - RNA, 19 nt, Homo sapiens
  misc_RNA (1)...(19): siRNA sense strand
ggaaauauugccuuguuug

SEQ ID NO: 862105 - RNA, 19 nt, Homo sapiens
  misc_RNA (1)...(19): siRNA sense strand
gcagaggacuggccaacca

SEQ ID NO: 862106 - RNA, 19 nt, Homo sapiens
  misc_RNA (1)...(19): siRNA sense strand
gauuguggauuucuuaaag

SEQ ID NO: 862107 - RNA, 19 nt, Homo sapiens
  misc_RNA (1)...(19): siRNA sense strand
guggaaauauugccuuguu

SEQ ID NO: 862108 - RNA, 19 nt, Homo sapiens
  misc_RNA (1)...(19): siRNA sense strand
ggaggaagacggcaugguu

SEQ ID NO: 862109 - RNA, 19 nt, Homo sapiens
  misc_RNA (1)...(19): siRNA sense strand
gaacuucugcuaucaugga

SEQ ID NO: 862110 - RNA, 19 nt, Homo sapiens
  misc_RNA (1)...(19): siRNA sense strand
ccagaggcuuguggaaaua

SEQ ID NO: 862111 - RNA, 19 nt, Homo sapiens
  misc_RNA (1)...(19): siRNA sense strand
gaagcauguuguaaggaaa

SEQ ID NO: 862112 - RNA, 19 nt, Homo sapiens
  misc_RNA (1)...(19): siRNA sense strand
ugaagcauguuguaaggaa

SEQ ID NO: 862113 - RNA, 19 nt, Homo sapiens
  misc_RNA (1)...(19): siRNA sense strand
ucucgaagauuuagucuca

SEQ ID NO: 862114 - RNA, 19 nt, Homo sapiens
  misc_RNA (1)...(19): siRNA sense strand
ccacccaacuggucagcua

SEQ ID NO: 862115 - RNA, 19 nt, Homo sapiens
  misc_RNA (1)...(19): siRNA sense strand
agaagaagauggagcaaag

SEQ ID NO: 862116 - RNA, 19 nt, Homo sapiens
  misc_RNA (1)...(19): siRNA sense strand
uaucagacaucaacuuuac

SEQ ID NO: 862117 - RNA, 19 nt, Homo sapiens
  misc_RNA (1)...(19): siRNA sense strand
auacacaaguggaaauuug

SEQ ID NO: 862118 - RNA, 19 nt, Homo sapiens
  misc_RNA (1)...(19): siRNA sense strand
agacacacuucuagaaaga

SEQ ID NO: 862119 - RNA, 19 nt, Homo sapiens
  misc_RNA (1)...(19): siRNA sense strand
gcagagaccagauguuaca

SEQ ID NO: 862120 - RNA, 19 nt, Homo sapiens
  misc_RNA (1)...(19): siRNA sense strand
gugcugaauugguuaaaug

SEQ ID NO: 862121 - RNA, 19 nt, Homo sapiens
  misc_RNA (1)...(19): siRNA sense strand
cacgguagaucuagccuuu

SEQ ID NO: 862122 - RNA, 19 nt, Homo sapiens
  misc_RNA (1)...(19): siRNA sense strand
gaucuagccuuuucugauu

SEQ ID NO: 862123 - RNA, 19 nt, Homo sapiens
  misc_RNA (1)...(19): siRNA sense strand
gaugagaaguuugcagauc

SEQ ID NO: 862124 - RNA, 19 nt, Homo sapiens
  misc_RNA (1)...(19): siRNA sense strand
gaaguuugcagaucaagau

SEQ ID NO: 862125 - RNA, 19 nt, Homo sapiens
  misc_RNA (1)...(19): siRNA sense strand
gaagaaccaccucaagaca

SEQ ID NO: 862126 - RNA, 19 nt, Homo sapiens
  misc_RNA (1)...(19): siRNA sense strand
uaacgaggauagcuaacug

SEQ ID NO: 862127 - RNA, 19 nt, Homo sapiens
  misc_RNA (1)...(19): siRNA sense strand
ucagugcaauccagauauu

SEQ ID NO: 862128 - RNA, 19 nt, Homo sapiens
  misc_RNA (1)...(19): siRNA sense strand
ucacucaucaucccacaua

SEQ ID NO: 862129 - RNA, 19 nt, Homo sapiens
  misc_RNA (1)...(19): siRNA sense strand
ugcagcagcuuaucaaaga

SEQ ID NO: 862130 - RNA, 19 nt, Homo sapiens
  misc_RNA (1)...(19): siRNA sense strand
uaucagaugcaacaaauga

SEQ ID NO: 862131 - RNA, 19 nt, Homo sapiens
  misc_RNA (1)...(19): siRNA sense strand
gaagaagaucgacauucaa

SEQ ID NO: 862132 - RNA, 19 nt, Homo sapiens
  misc_RNA (1)...(19): siRNA sense strand
gaaacuaacaagaggaaca

SEQ ID NO: 862133 - RNA, 19 nt, Homo sapiens
  misc_RNA (1)...(19): siRNA sense strand
caaguggaaauuuguauug

SEQ ID NO: 862134 - RNA, 19 nt, Homo sapiens
  misc_RNA (1)...(19): siRNA sense strand
gaaaagaucagauacaagu

SEQ ID NO: 862135 - RNA, 19 nt, Homo sapiens
  misc_RNA (1)...(19): siRNA sense strand
agaaagagaagauguaaca

SEQ ID NO: 862136 - RNA, 19 nt, Homo sapiens
  misc_RNA (1)...(19): siRNA sense strand
gaucgaguaucagacauca

SEQ ID NO: 862137 - RNA, 19 nt, Homo sapiens
  misc_RNA (1)...(19): siRNA sense strand
gcaagaagaagaucgacau

SEQ ID NO: 862138 - RNA, 19 nt, Homo sapiens
  misc_RNA (1)...(19): siRNA sense strand
gaggaacacgguagaucua

SEQ ID NO: 862139 - RNA, 19 nt, Homo sapiens
  misc_RNA (1)...(19): siRNA sense strand
gagaaacuaacaagaggaa

SEQ ID NO: 862140 - RNA, 19 nt, Homo sapiens
  misc_RNA (1)...(19): siRNA sense strand
gaagauuuagucucauuca

SEQ ID NO: 862141 - RNA, 19 nt, Homo sapiens
  misc_RNA (1)...(19): siRNA sense strand
aagaugugcugaauugguu

SEQ ID NO: 862142 - RNA, 19 nt, Homo sapiens
  misc_RNA (1)...(19): siRNA sense strand
guuaauggaugaggaagau

SEQ ID NO: 862143 - RNA, 19 nt, Homo sapiens
  misc_RNA (1)...(19): siRNA sense strand
cuucugcuaucauggauuu

SEQ ID NO: 862144 - RNA, 19 nt, Homo sapiens
  misc_RNA (1)...(19): siRNA sense strand
ucgaagauuuagucucauu

SEQ ID NO: 862145 - RNA, 19 nt, Homo sapiens
  misc_RNA (1)...(19): siRNA sense strand
gcaaggugcuaaguauucu

SEQ ID NO: 862146 - RNA, 19 nt, Homo sapiens
  misc_RNA (1)...(19): siRNA sense strand
agaaccaccucaagacaug

SEQ ID NO: 862147 - RNA, 19 nt, Homo sapiens
  misc_RNA (1)...(19): siRNA sense strand
caaagaucuucccgacgaa

SEQ ID NO: 862148 - RNA, 19 nt, Homo sapiens
  misc_RNA (1)...(19): siRNA sense strand
ccugggaaaugaaugagaa

SEQ ID NO: 862149 - RNA, 19 nt, Homo sapiens
  misc_RNA (1)...(19): siRNA sense strand
uagaagaaccaccucaaga

SEQ ID NO: 862150 - RNA, 19 nt, Homo sapiens
  misc_RNA (1)...(19): siRNA sense strand
aauauugccuuguuugaag

SEQ ID NO: 862151 - RNA, 19 nt, Homo sapiens
  misc_RNA (1)...(19): siRNA sense strand
gggaaaugaaugagaagaa

SEQ ID NO: 862152 - RNA, 19 nt, Homo sapiens
  misc_RNA (1)...(19): siRNA sense strand
gaaauuuguauugcacuga

SEQ ID NO: 862153 - RNA, 19 nt, Homo sapiens
  misc_RNA (1)...(19): siRNA sense strand
ucagaaccgcaaacuuaua

SEQ ID NO: 862154 - RNA, 19 nt, Homo sapiens
  misc_RNA (1)...(19): siRNA sense strand
gcauuagugcagcagcuua

SEQ ID NO: 862155 - RNA, 19 nt, Homo sapiens
  misc_RNA (1)...(19): siRNA sense strand
agacuccacuggugauaau

SEQ ID NO: 862156 - RNA, 19 nt, Homo sapiens
  misc_RNA (1)...(19): siRNA sense strand
aagaagaucgacauucaaa

SEQ ID NO: 862157 - RNA, 19 nt, Homo sapiens
  misc_RNA (1)...(19): siRNA sense strand
uuucagaguucacgucuuc

SEQ ID NO: 862158 - RNA, 19 nt, Homo sapiens
  misc_RNA (1)...(19): siRNA sense strand
guacagacagugaggaaag

SEQ ID NO: 862159 - RNA, 19 nt, Homo sapiens
  misc_RNA (1)...(19): siRNA sense strand
gcucugaugaggaagauau

SEQ ID NO: 862160 - RNA, 19 nt, Homo sapiens
  misc_RNA (1)...(19): siRNA sense strand
ggaguuaauggaugaggaa

SEQ ID NO: 862161 - RNA, 19 nt, Homo sapiens
  misc_RNA (1)...(19): siRNA sense strand
guaucagacaucaacuuua

SEQ ID NO: 862162 - RNA, 19 nt, Homo sapiens
  misc_RNA (1)...(19): siRNA sense strand
gaacagauuguggauuucu

SEQ ID NO: 862163 - RNA, 19 nt, Homo sapiens
  misc_RNA (1)...(19): siRNA sense strand
agaggaggaugcagaaagu

SEQ ID NO: 862164 - RNA, 19 nt, Homo sapiens
  misc_RNA (1)...(19): siRNA sense strand
gagacgggcugggcuucuu

SEQ ID NO: 862165 - RNA, 19 nt, Homo sapiens
  misc_RNA (1)...(19): siRNA sense strand
uggaaauauugccuuguuu

SEQ ID NO: 862166 - RNA, 19 nt, Homo sapiens
  misc_RNA (1)...(19): siRNA sense strand
caucaacuuuacucucaau

SEQ ID NO: 862167 - RNA, 19 nt, Homo sapiens
  misc_RNA (1)...(19): siRNA sense strand
guucauccaucgcaagaag

SEQ ID NO: 862168 - RNA, 19 nt, Homo sapiens
  misc_RNA (1)...(19): siRNA sense strand
cgucuucccugagcacaaa

SEQ ID NO: 862169 - RNA, 19 nt, Homo sapiens
  misc_RNA (1)...(19): siRNA sense strand
agaaaguacagacaaggua

SEQ ID NO: 862170 - RNA, 19 nt, Homo sapiens
  misc_RNA (1)...(19): siRNA sense strand
gagaggaggaugcagaaag

SEQ ID NO: 862171 - RNA, 19 nt, Homo sapiens
  misc_RNA (1)...(19): siRNA sense strand
gauauuagcuggcuguaga

SEQ ID NO: 862172 - RNA, 19 nt, Homo sapiens
  misc_RNA (1)...(19): siRNA sense strand
gaacugaaacggaaaguga

SEQ ID NO: 862173 - RNA, 19 nt, Homo sapiens
  misc_RNA (1)...(19): siRNA sense strand
guaguugacucacgguuaa

SEQ ID NO: 862174 - RNA, 19 nt, Homo sapiens
  misc_RNA (1)...(19): siRNA sense strand
gcuccaaacuuccuccuuu

SEQ ID NO: 862175 - RNA, 19 nt, Homo sapiens
  misc_RNA (1)...(19): siRNA sense strand
uuagcuggcuguagaauga

SEQ ID NO: 862176 - RNA, 19 nt, Homo sapiens
  misc_RNA (1)...(19): siRNA sense strand
cucaaucgcuaccuagaua

SEQ ID NO: 862177 - RNA, 19 nt, Homo sapiens
  misc_RNA (1)...(19): siRNA sense strand
cuaccuagauauuaaggaa

SEQ ID NO: 862178 - RNA, 19 nt, Homo sapiens
  misc_RNA (1)...(19): siRNA sense strand
ggucacaccugcccucgau

SEQ ID NO: 862179 - RNA, 19 nt, Homo sapiens
  misc_RNA (1)...(19): siRNA sense strand
caccugcccucgauuucua

SEQ ID NO: 862180 - RNA, 19 nt, Homo sapiens
  misc_RNA (1)...(19): siRNA sense strand
ggucauauugguuguaguu

SEQ ID NO: 862181 - RNA, 19 nt, Homo sapiens
  misc_RNA (1)...(19): siRNA sense strand
gauaguuacccuggucaua

SEQ ID NO: 862182 - RNA, 19 nt, Homo sapiens
  misc_RNA (1)...(19): siRNA sense strand
gauauuccaucuuucucau

SEQ ID NO: 862183 - RNA, 19 nt, Homo sapiens
  misc_RNA (1)...(19): siRNA sense strand
ucauauugguuguaguuga

SEQ ID NO: 862184 - RNA, 19 nt, Homo sapiens
  misc_RNA (1)...(19): siRNA sense strand
gcaagcuucugcuggucaa

SEQ ID NO: 862185 - RNA, 19 nt, Homo sapiens
  misc_RNA (1)...(19): siRNA sense strand
gcauaucaagggucagauu

SEQ ID NO: 862186 - RNA, 19 nt, Homo sapiens
  misc_RNA (1)...(19): siRNA sense strand
uaguuacccuggucauauu

SEQ ID NO: 862187 - RNA, 19 nt, Homo sapiens
  misc_RNA (1)...(19): siRNA sense strand
caguuauacuuccauaguu

SEQ ID NO: 862188 - RNA, 19 nt, Homo sapiens
  misc_RNA (1)...(19): siRNA sense strand
cauaucaagggucagauuu

SEQ ID NO: 862189 - RNA, 19 nt, Homo sapiens
  misc_RNA (1)...(19): siRNA sense strand
ucacaccugcccucgauuu

SEQ ID NO: 862190 - RNA, 19 nt, Homo sapiens
  misc_RNA (1)...(19): siRNA sense strand
ugggugaccugcagacuca

SEQ ID NO: 862191 - RNA, 19 nt, Homo sapiens
  misc_RNA (1)...(19): siRNA sense strand
ggauauuccaucuuucuca

SEQ ID NO: 862192 - RNA, 19 nt, Homo sapiens
  misc_RNA (1)...(19): siRNA sense strand
uuaaggaaauacugcaaag

SEQ ID NO: 862193 - RNA, 19 nt, Homo sapiens
  misc_RNA (1)...(19): siRNA sense strand
ccuucgagauccagauauu

SEQ ID NO: 862194 - RNA, 19 nt, Homo sapiens
  misc_RNA (1)...(19): siRNA sense strand
ccaguuauacuuccauagu

SEQ ID NO: 862195 - RNA, 19 nt, Homo sapiens
  misc_RNA (1)...(19): siRNA sense strand
ucucaggauucuacccaaa

SEQ ID NO: 862196 - RNA, 19 nt, Homo sapiens
  misc_RNA (1)...(19): siRNA sense strand
gaggggacguccugccuaa

SEQ ID NO: 862197 - RNA, 19 nt, Homo sapiens
  misc_RNA (1)...(19): siRNA sense strand
cagcuugugugccaugucu

SEQ ID NO: 862198 - RNA, 19 nt, Homo sapiens
  misc_RNA (1)...(19): siRNA sense strand
ggugaaacacagcagucua

SEQ ID NO: 862199 - RNA, 19 nt, Homo sapiens
  misc_RNA (1)...(19): siRNA sense strand
gccuaaugcugacgagaca

SEQ ID NO: 862200 - RNA, 19 nt, Homo sapiens
  misc_RNA (1)...(19): siRNA sense strand
uguaguugacucacgguua

SEQ ID NO: 862201 - RNA, 19 nt, Homo sapiens
  misc_RNA (1)...(19): siRNA sense strand
gugaaacacagcagucuag

SEQ ID NO: 862202 - RNA, 19 nt, Homo sapiens
  misc_RNA (1)...(19): siRNA sense strand
caaucgcuaccuagauauu

SEQ ID NO: 862203 - RNA, 19 nt, Homo sapiens
  misc_RNA (1)...(19): siRNA sense strand
cauauugguuguaguugac

SEQ ID NO: 862204 - RNA, 19 nt, Homo sapiens
  misc_RNA (1)...(19): siRNA sense strand
aaucgcuaccuagauauua

SEQ ID NO: 862205 - RNA, 19 nt, Homo sapiens
  misc_RNA (1)...(19): siRNA sense strand
ggcaccauccgcuuucuga

SEQ ID NO: 862206 - RNA, 19 nt, Homo sapiens
  misc_RNA (1)...(19): siRNA sense strand
gcucaaucgcuaccuagau

SEQ ID NO: 862207 - RNA, 19 nt, Homo sapiens
  misc_RNA (1)...(19): siRNA sense strand
gaucuguuugacugugaua

SEQ ID NO: 862208 - RNA, 19 nt, Homo sapiens
  misc_RNA (1)...(19): siRNA sense strand
ucuguaaagugcucaaucg

SEQ ID NO: 862209 - RNA, 19 nt, Homo sapiens
  misc_RNA (1)...(19): siRNA sense strand
gcaccauccgcuuucugaa

SEQ ID NO: 862210 - RNA, 19 nt, Homo sapiens
  misc_RNA (1)...(19): siRNA sense strand
aaccacagcugggcacaca

SEQ ID NO: 862211 - RNA, 19 nt, Homo sapiens
  misc_RNA (1)...(19): siRNA sense strand
gggacguccugccuaaugc

SEQ ID NO: 862212 - RNA, 19 nt, Homo sapiens
  misc_RNA (1)...(19): siRNA sense strand
cuucgagauccagauauua

SEQ ID NO: 862213 - RNA, 19 nt, Homo sapiens
  misc_RNA (1)...(19): siRNA sense strand
auaguuacccuggucauau

SEQ ID NO: 862214 - RNA, 19 nt, Homo sapiens
  misc_RNA (1)...(19): siRNA sense strand
gaaugaaugccccacaaau

SEQ ID NO: 862215 - RNA, 19 nt, Homo sapiens
  misc_RNA (1)...(19): siRNA sense strand
ccagauagugcaagcuucu

SEQ ID NO: 862216 - RNA, 19 nt, Homo sapiens
  misc_RNA (1)...(19): siRNA sense strand
uguuugacugugauaguua

SEQ ID NO: 862217 - RNA, 19 nt, Homo sapiens
  misc_RNA (1)...(19): siRNA sense strand
gaacauagcaagccauuga

SEQ ID NO: 862218 - RNA, 19 nt, Homo sapiens
  misc_RNA (1)...(19): siRNA sense strand
cuacagagcuaacuacaaa

SEQ ID NO: 862219 - RNA, 19 nt, Homo sapiens
  misc_RNA (1)...(19): siRNA sense strand
gaacaacagucacaacauc

SEQ ID NO: 862220 - RNA, 19 nt, Homo sapiens
  misc_RNA (1)...(19): siRNA sense strand
gcauggagguggucuauga

SEQ ID NO: 862221 - RNA, 19 nt, Homo sapiens
  misc_RNA (1)...(19): siRNA sense strand
gaagcugagucaagaaauu

SEQ ID NO: 862222 - RNA, 19 nt, Homo sapiens
  misc_RNA (1)...(19): siRNA sense strand
gcccagagaucacagcaua

SEQ ID NO: 862223 - RNA, 19 nt, Homo sapiens
  misc_RNA (1)...(19): siRNA sense strand
ggacuaaacaggucacuug

SEQ ID NO: 862224 - RNA, 19 nt, Homo sapiens
  misc_RNA (1)...(19): siRNA sense strand
aaacgaagcugagucaaga

SEQ ID NO: 862225 - RNA, 19 nt, Homo sapiens
  misc_RNA (1)...(19): siRNA sense strand
agaagaggcugucaccuuu

SEQ ID NO: 862226 - RNA, 19 nt, Homo sapiens
  misc_RNA (1)...(19): siRNA sense strand
ucaagucucucaucaauag

SEQ ID NO: 862227 - RNA, 19 nt, Homo sapiens
  misc_RNA (1)...(19): siRNA sense strand
ggagauaacugucgcuacu

SEQ ID NO: 862228 - RNA, 19 nt, Homo sapiens
  misc_RNA (1)...(19): siRNA sense strand
ggagaccgcugcagaugug

SEQ ID NO: 862229 - RNA, 19 nt, Homo sapiens
  misc_RNA (1)...(19): siRNA sense strand
cuaaacaggucacuuguag

SEQ ID NO: 862230 - RNA, 19 nt, Homo sapiens
  misc_RNA (1)...(19): siRNA sense strand
gaagagaagcagaaacuca

SEQ ID NO: 862231 - RNA, 19 nt, Homo sapiens
  misc_RNA (1)...(19): siRNA sense strand
gacauggaguucucauuug

SEQ ID NO: 862232 - RNA, 19 nt, Homo sapiens
  misc_RNA (1)...(19): siRNA sense strand
gaaagaagagaagcagaaa

SEQ ID NO: 862233 - RNA, 19 nt, Homo sapiens
  misc_RNA (1)...(19): siRNA sense strand
agauguugcuuaugcuuua

SEQ ID NO: 862234 - RNA, 19 nt, Homo sapiens
  misc_RNA (1)...(19): siRNA sense strand
ccucaagucucucaucaau

SEQ ID NO: 862235 - RNA, 19 nt, Homo sapiens
  misc_RNA (1)...(19): siRNA sense strand
gauggaugcugcccagaga

SEQ ID NO: 862236 - RNA, 19 nt, Homo sapiens
  misc_RNA (1)...(19): siRNA sense strand
acaggucacuuguagauau

SEQ ID NO: 862237 - RNA, 19 nt, Homo sapiens
  misc_RNA (1)...(19): siRNA sense strand
ccagagaucacagcauaua

SEQ ID NO: 862238 - RNA, 19 nt, Homo sapiens
  misc_RNA (1)...(19): siRNA sense strand
ggugagauguugcuuaugc

SEQ ID NO: 862239 - RNA, 19 nt, Homo sapiens
  misc_RNA (1)...(19): siRNA sense strand
agacauggaguucucauuu

SEQ ID NO: 862240 - RNA, 19 nt, Homo sapiens
  misc_RNA (1)...(19): siRNA sense strand
ggaauucuuugaggaagga

SEQ ID NO: 862241 - RNA, 19 nt, Homo sapiens
  misc_RNA (1)...(19): siRNA sense strand
ggagguggucuaugagaaa

SEQ ID NO: 862242 - RNA, 19 nt, Homo sapiens
  misc_RNA (1)...(19): siRNA sense strand
cauugaagcccaugagaaa

SEQ ID NO: 862243 - RNA, 19 nt, Homo sapiens
  misc_RNA (1)...(19): siRNA sense strand
gagaggagccacagagaca

SEQ ID NO: 862244 - RNA, 19 nt, Homo sapiens
  misc_RNA (1)...(19): siRNA sense strand
gguguagugugcaaguauu

SEQ ID NO: 862245 - RNA, 19 nt, Homo sapiens
  misc_RNA (1)...(19): siRNA sense strand
ggcgacagcuggacuaaac

SEQ ID NO: 862246 - RNA, 19 nt, Homo sapiens
  misc_RNA (1)...(19): siRNA sense strand
gcauugaagcccaugagaa

SEQ ID NO: 862247 - RNA, 19 nt, Homo sapiens
  misc_RNA (1)...(19): siRNA sense strand
ccacuucugggaauucuuu

SEQ ID NO: 862248 - RNA, 19 nt, Homo sapiens
  misc_RNA (1)...(19): siRNA sense strand
gugggaacaucaagcagaa

SEQ ID NO: 862249 - RNA, 19 nt, Homo sapiens
  misc_RNA (1)...(19): siRNA sense strand
ggaaccacuucugggaauu

SEQ ID NO: 862250 - RNA, 19 nt, Homo sapiens
  misc_RNA (1)...(19): siRNA sense strand
aaacaggucacuuguagau

SEQ ID NO: 862251 - RNA, 19 nt, Homo sapiens
  misc_RNA (1)...(19): siRNA sense strand
uaaggaaggagauaacugu

SEQ ID NO: 862252 - RNA, 19 nt, Homo sapiens
  misc_RNA (1)...(19): siRNA sense strand
gagauguugcuuaugcuuu

SEQ ID NO: 862253 - RNA, 19 nt, Homo sapiens
  misc_RNA (1)...(19): siRNA sense strand
agagcuaacuacaaaguca

SEQ ID NO: 862254 - RNA, 19 nt, Homo sapiens
  misc_RNA (1)...(19): siRNA sense strand
ugggugagauguugcuuau

SEQ ID NO: 862255 - RNA, 19 nt, Homo sapiens
  misc_RNA (1)...(19): siRNA sense strand
gaaauacaaggaggcaaug

SEQ ID NO: 862256 - RNA, 19 nt, Homo sapiens
  misc_RNA (1)...(19): siRNA sense strand
guaugggauuuguaaggaa

SEQ ID NO: 862257 - RNA, 19 nt, Homo sapiens
  misc_RNA (1)...(19): siRNA sense strand
aagaggcugucaccuuuga

SEQ ID NO: 862258 - RNA, 19 nt, Homo sapiens
  misc_RNA (1)...(19): siRNA sense strand
gaagaggcugucaccuuug

SEQ ID NO: 862259 - RNA, 19 nt, Homo sapiens
  misc_RNA (1)...(19): siRNA sense strand
caggucacuuguagauauu

SEQ ID NO: 862260 - RNA, 19 nt, Homo sapiens
  misc_RNA (1)...(19): siRNA sense strand
agaaagaagagaagcagaa

SEQ ID NO: 862261 - RNA, 19 nt, Homo sapiens
  misc_RNA (1)...(19): siRNA sense strand
gagaucacagcauauacaa

SEQ ID NO: 862262 - RNA, 19 nt, Homo sapiens
  misc_RNA (1)...(19): siRNA sense strand
ucagaggacugggcgaaug

SEQ ID NO: 862263 - RNA, 19 nt, Homo sapiens
  misc_RNA (1)...(19): siRNA sense strand
cgagggugcuguguuuaug

SEQ ID NO: 862264 - RNA, 19 nt, Homo sapiens
  misc_RNA (1)...(19): siRNA sense strand
uauacaagcgugcauugaa

SEQ ID NO: 862265 - RNA, 19 nt, Homo sapiens
  misc_RNA (1)...(19): siRNA sense strand
gcucagugaccaaggaaga

SEQ ID NO: 862266 - RNA, 19 nt, Homo sapiens
  misc_RNA (1)...(19): siRNA sense strand
caacaaaggaaccacuucu

SEQ ID NO: 862267 - RNA, 19 nt, Homo sapiens
  misc_RNA (1)...(19): siRNA sense strand
ggaacaacagucacaacau

SEQ ID NO: 862268 - RNA, 19 nt, Homo sapiens
  misc_RNA (1)...(19): siRNA sense strand
caaacgaagcugagucaag

SEQ ID NO: 862269 - RNA, 19 nt, Homo sapiens
  misc_RNA (1)...(19): siRNA sense strand
gcagaaacccaggccaaca

SEQ ID NO: 862270 - RNA, 19 nt, Homo sapiens
  misc_RNA (1)...(19): siRNA sense strand
ucaagugcauucgcaagug

SEQ ID NO: 862271 - RNA, 19 nt, Homo sapiens
  misc_RNA (1)...(19): siRNA sense strand
gaaacaggaagaagcaacu

SEQ ID NO: 862272 - RNA, 19 nt, Homo sapiens
  misc_RNA (1)...(19): siRNA sense strand
aagaagaggcugucaccuu

SEQ ID NO: 862273 - RNA, 19 nt, Homo sapiens
  misc_RNA (1)...(19): siRNA sense strand
cagaaacccaggccaacaa

SEQ ID NO: 862274 - RNA, 19 nt, Homo sapiens
  misc_RNA (1)...(19): siRNA sense strand
gagaagcagaaacucauuc

SEQ ID NO: 862275 - RNA, 19 nt, Homo sapiens
  misc_RNA (1)...(19): siRNA sense strand
gcgagggugcuguguuuau

SEQ ID NO: 862276 - RNA, 19 nt, Homo sapiens
  misc_RNA (1)...(19): siRNA sense strand
gaaccacuucugggaauuc

SEQ ID NO: 862277 - RNA, 19 nt, Homo sapiens
  misc_RNA (1)...(19): siRNA sense strand
auacaagcgugcauugaag

SEQ ID NO: 862278 - RNA, 19 nt, Homo sapiens
  misc_RNA (1)...(19): siRNA sense strand
gcauauacaagcgugcauu

SEQ ID NO: 862279 - RNA, 19 nt, Homo sapiens
  misc_RNA (1)...(19): siRNA sense strand
gaaagacauggaguucuca

SEQ ID NO: 862280 - RNA, 19 nt, Homo sapiens
  misc_RNA (1)...(19): siRNA sense strand
acaucuaacuuugucauuc

SEQ ID NO: 862281 - RNA, 19 nt, Homo sapiens
  misc_RNA (1)...(19): siRNA sense strand
gacaaggugugugggaucu

SEQ ID NO: 862282 - RNA, 19 nt, Homo sapiens
  misc_RNA (1)...(19): siRNA sense strand
ugagcugggugagauguug

SEQ ID NO: 862283 - RNA, 19 nt, Homo sapiens
  misc_RNA (1)...(19): siRNA sense strand
gagguggucuaugagaaag

SEQ ID NO: 862284 - RNA, 19 nt, Homo sapiens
  misc_RNA (1)...(19): siRNA sense strand
guaaggaaggagauaacug

SEQ ID NO: 862285 - RNA, 19 nt, Homo sapiens
  misc_RNA (1)...(19): siRNA sense strand
caagugggaacaucaagca

SEQ ID NO: 862286 - RNA, 19 nt, Homo sapiens
  misc_RNA (1)...(19): siRNA sense strand
uggagguggucuaugagaa

SEQ ID NO: 862287 - RNA, 19 nt, Homo sapiens
  misc_RNA (1)...(19): siRNA sense strand
cauauacaagcgugcauug

SEQ ID NO: 862288 - RNA, 19 nt, Homo sapiens
  misc_RNA (1)...(19): siRNA sense strand
ugagaaagacauggaguuc

SEQ ID NO: 862289 - RNA, 19 nt, Homo sapiens
  misc_RNA (1)...(19): siRNA sense strand
gaccgucugugugguguag

SEQ ID NO: 862290 - RNA, 19 nt, Homo sapiens
  misc_RNA (1)...(19): siRNA sense strand
gcuacagagcuaacuacaa

SEQ ID NO: 862291 - RNA, 19 nt, Homo sapiens
  misc_RNA (1)...(19): siRNA sense strand
gacagcaagugggaacauc

SEQ ID NO: 862292 - RNA, 19 nt, Homo sapiens
  misc_RNA (1)...(19): siRNA sense strand
acaaggaggcaaugagcaa

SEQ ID NO: 862293 - RNA, 19 nt, Homo sapiens
  misc_RNA (1)...(19): siRNA sense strand
aguaugggauuuguaagga

SEQ ID NO: 862294 - RNA, 19 nt, Homo sapiens
  misc_RNA (1)...(19): siRNA sense strand
caucuaacuuugucauucc

SEQ ID NO: 862295 - RNA, 19 nt, Homo sapiens
  misc_RNA (1)...(19): siRNA sense strand
gugaacauagcaagccauu

SEQ ID NO: 862296 - RNA, 19 nt, Homo sapiens
  misc_RNA (1)...(19): siRNA sense strand
ggaggagaaagaagagaag

SEQ ID NO: 862297 - RNA, 19 nt, Homo sapiens
  misc_RNA (1)...(19): siRNA sense strand
gugguguagugugcaagua

SEQ ID NO: 862298 - RNA, 19 nt, Homo sapiens
  misc_RNA (1)...(19): siRNA sense strand
aagaagagaagcagaaacu

SEQ ID NO: 862299 - RNA, 19 nt, Homo sapiens
  misc_RNA (1)...(19): siRNA sense strand
ugaccaaggaagaaucaga

SEQ ID NO: 862300 - RNA, 19 nt, Homo sapiens
  misc_RNA (1)...(19): siRNA sense strand
aggaaccacuucugggaau

SEQ ID NO: 862301 - RNA, 19 nt, Homo sapiens
  misc_RNA (1)...(19): siRNA sense strand
ggguggaggagaaagaaga

SEQ ID NO: 862302 - RNA, 19 nt, Homo sapiens
  misc_RNA (1)...(19): siRNA sense strand
agagaucacagcauauaca

SEQ ID NO: 862303 - RNA, 19 nt, Homo sapiens
  misc_RNA (1)...(19): siRNA sense strand
ccuuugagcugggugagau

SEQ ID NO: 862304 - RNA, 19 nt, Homo sapiens
  misc_RNA (1)...(19): siRNA sense strand
cagagaggagccacagaga

SEQ ID NO: 862305 - RNA, 19 nt, Homo sapiens
  misc_RNA (1)...(19): siRNA sense strand
guacuggguggaggagaaa

SEQ ID NO: 862306 - RNA, 19 nt, Homo sapiens
  misc_RNA (1)...(19): siRNA sense strand
gcuucgggauccucuccaa

SEQ ID NO: 862307 - RNA, 19 nt, Homo sapiens
  misc_RNA (1)...(19): siRNA sense strand
gauguugcuuaugcuuuag

SEQ ID NO: 862308 - RNA, 19 nt, Homo sapiens
  misc_RNA (1)...(19): siRNA sense strand
acuaaacaggucacuugua

SEQ ID NO: 862309 - RNA, 19 nt, Homo sapiens
  misc_RNA (1)...(19): siRNA sense strand
aguacuggguggaggagaa

SEQ ID NO: 862310 - RNA, 19 nt, Homo sapiens
  misc_RNA (1)...(19): siRNA sense strand
cggaacaacagucacaaca

SEQ ID NO: 862311 - RNA, 19 nt, Homo sapiens
  misc_RNA (1)...(19): siRNA sense strand
agaaacccaggccaacaaa

SEQ ID NO: 862312 - RNA, 19 nt, Homo sapiens
  misc_RNA (1)...(19): siRNA sense strand
gcgacaguggcgcguauga

SEQ ID NO: 862313 - RNA, 19 nt, Homo sapiens
  misc_RNA (1)...(19): siRNA sense strand
acauggaguucucauuugc

SEQ ID NO: 862314 - RNA, 19 nt, Homo sapiens
  misc_RNA (1)...(19): siRNA sense strand
uugaagcccaugagaaaga

SEQ ID NO: 862315 - RNA, 19 nt, Homo sapiens
  misc_RNA (1)...(19): siRNA sense strand
gggagaacuguguguaucu

SEQ ID NO: 862316 - RNA, 19 nt, Homo sapiens
  misc_RNA (1)...(19): siRNA sense strand
ggucacuuguagauauuuu

SEQ ID NO: 862317 - RNA, 19 nt, Homo sapiens
  misc_RNA (1)...(19): siRNA sense strand
gaacauguacuacuucuca

SEQ ID NO: 862318 - RNA, 19 nt, Homo sapiens
  misc_RNA (1)...(19): siRNA sense strand
gaagauaccgaguacuuug

SEQ ID NO: 862319 - RNA, 19 nt, Homo sapiens
  misc_RNA (1)...(19): siRNA sense strand
gaagagcaccucaacuguu

SEQ ID NO: 862320 - RNA, 19 nt, Homo sapiens
  misc_RNA (1)...(19): siRNA sense strand
gagcucagcagacaaugua

SEQ ID NO: 862321 - RNA, 19 nt, Homo sapiens
  misc_RNA (1)...(19): siRNA sense strand
ugacaggaguggugaguga

SEQ ID NO: 862322 - RNA, 19 nt, Homo sapiens
  misc_RNA (1)...(19): siRNA sense strand
guacuuugaugccauggaa

SEQ ID NO: 862323 - RNA, 19 nt, Homo sapiens
  misc_RNA (1)...(19): siRNA sense strand
gcccaaggguucauccaaa

SEQ ID NO: 862324 - RNA, 19 nt, Homo sapiens
  misc_RNA (1)...(19): siRNA sense strand
aagcaagacuggcauaugu

SEQ ID NO: 862325 - RNA, 19 nt, Homo sapiens
  misc_RNA (1)...(19): siRNA sense strand
gaaaauacaucuccaucau

SEQ ID NO: 862326 - RNA, 19 nt, Homo sapiens
  misc_RNA (1)...(19): siRNA sense strand
ggaggacucuugugguauc

SEQ ID NO: 862327 - RNA, 19 nt, Homo sapiens
  misc_RNA (1)...(19): siRNA sense strand
ggacucuugugguaucuug

SEQ ID NO: 862328 - RNA, 19 nt, Homo sapiens
  misc_RNA (1)...(19): siRNA sense strand
ggagauggccuguguguac

SEQ ID NO: 862329 - RNA, 19 nt, Homo sapiens
  misc_RNA (1)...(19): siRNA sense strand
ggaagcagaagacagugua

SEQ ID NO: 862330 - RNA, 19 nt, Homo sapiens
  misc_RNA (1)...(19): siRNA sense strand
gcuccaaggucaugcauag

SEQ ID NO: 862331 - RNA, 19 nt, Homo sapiens
  misc_RNA (1)...(19): siRNA sense strand
ugacagaggaccuggagua

SEQ ID NO: 862332 - RNA, 19 nt, Homo sapiens
  misc_RNA (1)...(19): siRNA sense strand
gcacuuggaggaaaccauu

SEQ ID NO: 862333 - RNA, 19 nt, Homo sapiens
  misc_RNA (1)...(19): siRNA sense strand
gcuaggugccauccacuua

SEQ ID NO: 862334 - RNA, 19 nt, Homo sapiens
  misc_RNA (1)...(19): siRNA sense strand
cggagaacauguacuacuu

SEQ ID NO: 862335 - RNA, 19 nt, Homo sapiens
  misc_RNA (1)...(19): siRNA sense strand
ggacagugaggaagaugaa

SEQ ID NO: 862336 - RNA, 19 nt, Homo sapiens
  misc_RNA (1)...(19): siRNA sense strand
gaaucuuucccugaaguua

SEQ ID NO: 862337 - RNA, 19 nt, Homo sapiens
  misc_RNA (1)...(19): siRNA sense strand
gaagguagcaccgggacaa

SEQ ID NO: 862338 - RNA, 19 nt, Homo sapiens
  misc_RNA (1)...(19): siRNA sense strand
ccucuugacucccaaagga

SEQ ID NO: 862339 - RNA, 19 nt, Homo sapiens
  misc_RNA (1)...(19): siRNA sense strand
cuacagaaaucagggugaa

SEQ ID NO: 862340 - RNA, 19 nt, Homo sapiens
  misc_RNA (1)...(19): siRNA sense strand
gaagcaagacuggcauaug

SEQ ID NO: 862341 - RNA, 19 nt, Homo sapiens
  misc_RNA (1)...(19): siRNA sense strand
ggaagagcaccucaacugu

SEQ ID NO: 862342 - RNA, 19 nt, Homo sapiens
  misc_RNA (1)...(19): siRNA sense strand
cagaggaccuggaguacca

SEQ ID NO: 862343 - RNA, 19 nt, Homo sapiens
  misc_RNA (1)...(19): siRNA sense strand
acggaggacucuuguggua

SEQ ID NO: 862344 - RNA, 19 nt, Homo sapiens
  misc_RNA (1)...(19): siRNA sense strand
ggagaacgcggagaacaug

SEQ ID NO: 862345 - RNA, 19 nt, Homo sapiens
  misc_RNA (1)...(19): siRNA sense strand
ccaagcugcuguggaagaa

SEQ ID NO: 862346 - RNA, 19 nt, Homo sapiens
  misc_RNA (1)...(19): siRNA sense strand
aagagcaccucaacuguuc

SEQ ID NO: 862347 - RNA, 19 nt, Homo sapiens
  misc_RNA (1)...(19): siRNA sense strand
gagauacacagucggaaau

SEQ ID NO: 862348 - RNA, 19 nt, Homo sapiens
  misc_RNA (1)...(19): siRNA sense strand
gagaagcaagacuggcaua

SEQ ID NO: 862349 - RNA, 19 nt, Homo sapiens
  misc_RNA (1)...(19): siRNA sense strand
gagucaagcucagguguag

SEQ ID NO: 862350 - RNA, 19 nt, Homo sapiens
  misc_RNA (1)...(19): siRNA sense strand
gcagggacuucuuggaacu

SEQ ID NO: 862351 - RNA, 19 nt, Homo sapiens
  misc_RNA (1)...(19): siRNA sense strand
aagcccaacuacagccuua

SEQ ID NO: 862352 - RNA, 19 nt, Homo sapiens
  misc_RNA (1)...(19): siRNA sense strand
gagaggacagugaggaaga

SEQ ID NO: 862353 - RNA, 19 nt, Homo sapiens
  misc_RNA (1)...(19): siRNA sense strand
ccaaaggagaggacaguga

SEQ ID NO: 862354 - RNA, 19 nt, Homo sapiens
  misc_RNA (1)...(19): siRNA sense strand
gagauggccuguguguaca

SEQ ID NO: 862355 - RNA, 19 nt, Homo sapiens
  misc_RNA (1)...(19): siRNA sense strand
ucgagauugugaaccauaa

SEQ ID NO: 862356 - RNA, 19 nt, Homo sapiens
  misc_RNA (1)...(19): siRNA sense strand
gagcgcgaccuuucucaga

SEQ ID NO: 862357 - RNA, 19 nt, Homo sapiens
  misc_RNA (1)...(19): siRNA sense strand
ggagaacauguacuacuuc

SEQ ID NO: 862358 - RNA, 19 nt, Homo sapiens
  misc_RNA (1)...(19): siRNA sense strand
cuacagcuacuucuccaaa

SEQ ID NO: 862359 - RNA, 19 nt, Homo sapiens
  misc_RNA (1)...(19): siRNA sense strand
gcagacaauguacuagaug

SEQ ID NO: 862360 - RNA, 19 nt, Homo sapiens
  misc_RNA (1)...(19): siRNA sense strand
gaccucagcacgugcaaug

SEQ ID NO: 862361 - RNA, 19 nt, Homo sapiens
  misc_RNA (1)...(19): siRNA sense strand
ccaacaagcccaacuacag

SEQ ID NO: 862362 - RNA, 19 nt, Homo sapiens
  misc_RNA (1)...(19): siRNA sense strand
gguagcaccgggacaaguu

SEQ ID NO: 862363 - RNA, 19 nt, Homo sapiens
  misc_RNA (1)...(19): siRNA sense strand
gaacuagcagagauacaca

SEQ ID NO: 862364 - RNA, 19 nt, Homo sapiens
  misc_RNA (1)...(19): siRNA sense strand
gagcuggacggccucaaga

SEQ ID NO: 862365 - RNA, 19 nt, Homo sapiens
  misc_RNA (1)...(19): siRNA sense strand
ucaaguggaccaacuaucu

SEQ ID NO: 862366 - RNA, 19 nt, Homo sapiens
  misc_RNA (1)...(19): siRNA sense strand
acagcuacuucuccaaaga

SEQ ID NO: 862367 - RNA, 19 nt, Homo sapiens
  misc_RNA (1)...(19): siRNA sense strand
gagauugugaaccauaaga

SEQ ID NO: 862368 - RNA, 19 nt, Homo sapiens
  misc_RNA (1)...(19): siRNA sense strand
gcaccucaacuguucacaa

SEQ ID NO: 862369 - RNA, 19 nt, Homo sapiens
  misc_RNA (1)...(19): siRNA sense strand
gaucaccgaggccaaggaa

SEQ ID NO: 862370 - RNA, 19 nt, Homo sapiens
  misc_RNA (1)...(19): siRNA sense strand
gacuggagcucagcagaca

SEQ ID NO: 862371 - RNA, 19 nt, Homo sapiens
  misc_RNA (1)...(19): siRNA sense strand
cuuaaccucuggagcauca

SEQ ID NO: 862372 - RNA, 19 nt, Homo sapiens
  misc_RNA (1)...(19): siRNA sense strand
gguuugcucucuuacuaca

SEQ ID NO: 862373 - RNA, 19 nt, Homo sapiens
  misc_RNA (1)...(19): siRNA sense strand
ggacaucgagauugugaac

SEQ ID NO: 862374 - RNA, 19 nt, Homo sapiens
  misc_RNA (1)...(19): siRNA sense strand
ggagcaucaugaagaacug

SEQ ID NO: 862375 - RNA, 19 nt, Homo sapiens
  misc_RNA (1)...(19): siRNA sense strand
ucaccgaggccaaggaaga

SEQ ID NO: 862376 - RNA, 19 nt, Homo sapiens
  misc_RNA (1)...(19): siRNA sense strand
gauaccgaguacuuugaug

SEQ ID NO: 862377 - RNA, 19 nt, Homo sapiens
  misc_RNA (1)...(19): siRNA sense strand
ugaagauaccgaguacuuu

SEQ ID NO: 862378 - RNA, 19 nt, Homo sapiens
  misc_RNA (1)...(19): siRNA sense strand
gauacacagucggaaaugg

SEQ ID NO: 862379 - RNA, 19 nt, Homo sapiens
  misc_RNA (1)...(19): siRNA sense strand
cagcagacaauguacuaga

SEQ ID NO: 862380 - RNA, 19 nt, Homo sapiens
  misc_RNA (1)...(19): siRNA sense strand
ucuggagcaucaugaagaa

SEQ ID NO: 862381 - RNA, 19 nt, Homo sapiens
  misc_RNA (1)...(19): siRNA sense strand
gcaccacacccugaagaau

SEQ ID NO: 862382 - RNA, 19 nt, Homo sapiens
  misc_RNA (1)...(19): siRNA sense strand
aagaugaagauaccgagua

SEQ ID NO: 862383 - RNA, 19 nt, Homo sapiens
  misc_RNA (1)...(19): siRNA sense strand
caucacauccaaugcuaug

SEQ ID NO: 862384 - RNA, 19 nt, Homo sapiens
  misc_RNA (1)...(19): siRNA sense strand
ccaaggaagacagcagaaa

SEQ ID NO: 862385 - RNA, 19 nt, Homo sapiens
  misc_RNA (1)...(19): siRNA sense strand
ugaaccauaagaccaauga

SEQ ID NO: 862386 - RNA, 19 nt, Homo sapiens
  misc_RNA (1)...(19): siRNA sense strand
uaggugccauccacuuaga

SEQ ID NO: 862387 - RNA, 19 nt, Homo sapiens
  misc_RNA (1)...(19): siRNA sense strand
agcugaagguggugaauga

SEQ ID NO: 862388 - RNA, 19 nt, Homo sapiens
  misc_RNA (1)...(19): siRNA sense strand
gcucgugggaugaacaaau

SEQ ID NO: 862389 - RNA, 19 nt, Homo sapiens
  misc_RNA (1)...(19): siRNA sense strand
caccucaacuguucacaac

SEQ ID NO: 862390 - RNA, 19 nt, Homo sapiens
  misc_RNA (1)...(19): siRNA sense strand
caagaggcgaguccgcauu

SEQ ID NO: 862391 - RNA, 19 nt, Homo sapiens
  misc_RNA (1)...(19): siRNA sense strand
augguuugcucucuuacua

SEQ ID NO: 862392 - RNA, 19 nt, Homo sapiens
  misc_RNA (1)...(19): siRNA sense strand
ugaggaagaugaagauacc

SEQ ID NO: 862393 - RNA, 19 nt, Homo sapiens
  misc_RNA (1)...(19): siRNA sense strand
gcagcucggaggaagagaa

SEQ ID NO: 862394 - RNA, 19 nt, Homo sapiens
  misc_RNA (1)...(19): siRNA sense strand
gcucggaggaagagaagga

SEQ ID NO: 862395 - RNA, 19 nt, Homo sapiens
  misc_RNA (1)...(19): siRNA sense strand
agagauacacagucggaaa

SEQ ID NO: 862396 - RNA, 19 nt, Homo sapiens
  misc_RNA (1)...(19): siRNA sense strand
gaacgcggagaacauguac

SEQ ID NO: 862397 - RNA, 19 nt, Homo sapiens
  misc_RNA (1)...(19): siRNA sense strand
ugaaguuccugcccuacag

SEQ ID NO: 862398 - RNA, 19 nt, Homo sapiens
  misc_RNA (1)...(19): siRNA sense strand
ggacuucuuggaacuagca

SEQ ID NO: 862399 - RNA, 19 nt, Homo sapiens
  misc_RNA (1)...(19): siRNA sense strand
gccaagcugcuguggaaga

SEQ ID NO: 862400 - RNA, 19 nt, Homo sapiens
  misc_RNA (1)...(19): siRNA sense strand
agaugaagauaccgaguac

SEQ ID NO: 862401 - RNA, 19 nt, Homo sapiens
  misc_RNA (1)...(19): siRNA sense strand
ccuccaagagcuucauuga

SEQ ID NO: 862402 - RNA, 19 nt, Homo sapiens
  misc_RNA (1)...(19): siRNA sense strand
caccacacccugaagaauc

SEQ ID NO: 862403 - RNA, 19 nt, Homo sapiens
  misc_RNA (1)...(19): siRNA sense strand
acgcggagaacauguacua

SEQ ID NO: 862404 - RNA, 19 nt, Homo sapiens
  misc_RNA (1)...(19): siRNA sense strand
caaggaagacagcagaaaa

SEQ ID NO: 862405 - RNA, 19 nt, Homo sapiens
  misc_RNA (1)...(19): siRNA sense strand
uugagcagcuggcgaagca

SEQ ID NO: 862406 - RNA, 19 nt, Homo sapiens
  misc_RNA (1)...(19): siRNA sense strand
agcgggcacugcaguauga

SEQ ID NO: 862407 - RNA, 19 nt, Homo sapiens
  misc_RNA (1)...(19): siRNA sense strand
cauccaaugcuaugaucaa

SEQ ID NO: 862408 - RNA, 19 nt, Homo sapiens
  misc_RNA (1)...(19): siRNA sense strand
ggaacuagcagagauacac

SEQ ID NO: 862409 - RNA, 19 nt, Homo sapiens
  misc_RNA (1)...(19): siRNA sense strand
aggaagagcaccucaacug

SEQ ID NO: 862410 - RNA, 19 nt, Homo sapiens
  misc_RNA (1)...(19): siRNA sense strand
ggaaaauacaucuccauca

SEQ ID NO: 862411 - RNA, 19 nt, Homo sapiens
  misc_RNA (1)...(19): siRNA sense strand
cagcugcgcacuacguguu

SEQ ID NO: 862412 - RNA, 19 nt, Homo sapiens
  misc_RNA (1)...(19): siRNA sense strand
ucacauccaaugcuaugau

SEQ ID NO: 862413 - RNA, 19 nt, Homo sapiens
  misc_RNA (1)...(19): siRNA sense strand
agaacgcggagaacaugua

SEQ ID NO: 862414 - RNA, 19 nt, Homo sapiens
  misc_RNA (1)...(19): siRNA sense strand
cucgugggaugaacaaaug

SEQ ID NO: 862415 - RNA, 19 nt, Homo sapiens
  misc_RNA (1)...(19): siRNA sense strand
ggagcucagcagacaaugu

SEQ ID NO: 862416 - RNA, 19 nt, Homo sapiens
  misc_RNA (1)...(19): siRNA sense strand
acagaaaucagggugaaau

SEQ ID NO: 862417 - RNA, 19 nt, Homo sapiens
  misc_RNA (1)...(19): siRNA sense strand
gcaaagggauagccauaug

SEQ ID NO: 862418 - RNA, 19 nt, Homo sapiens
  misc_RNA (1)...(19): siRNA sense strand
gcagagccauguauuggaa

SEQ ID NO: 862419 - RNA, 19 nt, Homo sapiens
  misc_RNA (1)...(19): siRNA sense strand
gaagaggcauguggaauuc

SEQ ID NO: 862420 - RNA, 19 nt, Homo sapiens
  misc_RNA (1)...(19): siRNA sense strand
cagacacacuacuuuauuu

SEQ ID NO: 862421 - RNA, 19 nt, Homo sapiens
  misc_RNA (1)...(19): siRNA sense strand
ggauguagaugcugauuuu

SEQ ID NO: 862422 - RNA, 19 nt, Homo sapiens
  misc_RNA (1)...(19): siRNA sense strand
guagaaacgucagaguuau

SEQ ID NO: 862423 - RNA, 19 nt, Homo sapiens
  misc_RNA (1)...(19): siRNA sense strand
uuuauuagcugcaggcaaa

SEQ ID NO: 862424 - RNA, 19 nt, Homo sapiens
  misc_RNA (1)...(19): siRNA sense strand
gaaaaggccagacuucuaa

SEQ ID NO: 862425 - RNA, 19 nt, Homo sapiens
  misc_RNA (1)...(19): siRNA sense strand
gagaaaugccugccugaga

SEQ ID NO: 862426 - RNA, 19 nt, Homo sapiens
  misc_RNA (1)...(19): siRNA sense strand
ugacagggauccagacaca

SEQ ID NO: 862427 - RNA, 19 nt, Homo sapiens
  misc_RNA (1)...(19): siRNA sense strand
ggagcucucugaggauauu

SEQ ID NO: 862428 - RNA, 19 nt, Homo sapiens
  misc_RNA (1)...(19): siRNA sense strand
uguagaaacgucagaguua

SEQ ID NO: 862429 - RNA, 19 nt, Homo sapiens
  misc_RNA (1)...(19): siRNA sense strand
ggcugagaaugaaagauua

SEQ ID NO: 862430 - RNA, 19 nt, Homo sapiens
  misc_RNA (1)...(19): siRNA sense strand
caaccuggcucaucaacag

SEQ ID NO: 862431 - RNA, 19 nt, Homo sapiens
  misc_RNA (1)...(19): siRNA sense strand
ugaaacagcuccuccucau

SEQ ID NO: 862432 - RNA, 19 nt, Homo sapiens
  misc_RNA (1)...(19): siRNA sense strand
agaaaugccugccugagau

SEQ ID NO: 862433 - RNA, 19 nt, Homo sapiens
  misc_RNA (1)...(19): siRNA sense strand
cagacgagcagaccguuua

SEQ ID NO: 862434 - RNA, 19 nt, Homo sapiens
  misc_RNA (1)...(19): siRNA sense strand
gcaaauacgaagaggcuau

SEQ ID NO: 862435 - RNA, 19 nt, Homo sapiens
  misc_RNA (1)...(19): siRNA sense strand
cugaaaggacuuaugaaua

SEQ ID NO: 862436 - RNA, 19 nt, Homo sapiens
  misc_RNA (1)...(19): siRNA sense strand
ggcagaaguucgcagcaaa

SEQ ID NO: 862437 - RNA, 19 nt, Homo sapiens
  misc_RNA (1)...(19): siRNA sense strand
gagaaugaaagauuaagga

SEQ ID NO: 862438 - RNA, 19 nt, Homo sapiens
  misc_RNA (1)...(19): siRNA sense strand
gauccagacacacuacuuu

SEQ ID NO: 862439 - RNA, 19 nt, Homo sapiens
  misc_RNA (1)...(19): siRNA sense strand
ugaagaggcauguggaauu

SEQ ID NO: 862440 - RNA, 19 nt, Homo sapiens
  misc_RNA (1)...(19): siRNA sense strand
gaaaugccugccugagauu

SEQ ID NO: 862441 - RNA, 19 nt, Homo sapiens
  misc_RNA (1)...(19): siRNA sense strand
acgagcagaccguuuauua

SEQ ID NO: 862442 - RNA, 19 nt, Homo sapiens
  misc_RNA (1)...(19): siRNA sense strand
aaaaggagcuggauguaga

SEQ ID NO: 862443 - RNA, 19 nt, Homo sapiens
  misc_RNA (1)...(19): siRNA sense strand
ccagacacacuacuuuauu

SEQ ID NO: 862444 - RNA, 19 nt, Homo sapiens
  misc_RNA (1)...(19): siRNA sense strand
gaaguucgcagcaaauacu

SEQ ID NO: 862445 - RNA, 19 nt, Homo sapiens
  misc_RNA (1)...(19): siRNA sense strand
gcucaucuuucacuggaau

SEQ ID NO: 862446 - RNA, 19 nt, Homo sapiens
  misc_RNA (1)...(19): siRNA sense strand
cuccagaacuuccucuuau

SEQ ID NO: 862447 - RNA, 19 nt, Homo sapiens
  misc_RNA (1)...(19): siRNA sense strand
caaagggauagccauauga

SEQ ID NO: 862448 - RNA, 19 nt, Homo sapiens
  misc_RNA (1)...(19): siRNA sense strand
gcagaacacagacaaggau

SEQ ID NO: 862449 - RNA, 19 nt, Homo sapiens
  misc_RNA (1)...(19): siRNA sense strand
gauauucugaaaggacuua

SEQ ID NO: 862450 - RNA, 19 nt, Homo sapiens
  misc_RNA (1)...(19): siRNA sense strand
gaggcuauuucuugucaca

SEQ ID NO: 862451 - RNA, 19 nt, Homo sapiens
  misc_RNA (1)...(19): siRNA sense strand
gagcagaccguuuauuagc

SEQ ID NO: 862452 - RNA, 19 nt, Homo sapiens
  misc_RNA (1)...(19): siRNA sense strand
gcagaaguucgcagcaaau

SEQ ID NO: 862453 - RNA, 19 nt, Homo sapiens
  misc_RNA (1)...(19): siRNA sense strand
gcugagaaugaaagauuaa

SEQ ID NO: 862454 - RNA, 19 nt, Homo sapiens
  misc_RNA (1)...(19): siRNA sense strand
gcaaagccccaaaagauga

SEQ ID NO: 862455 - RNA, 19 nt, Homo sapiens
  misc_RNA (1)...(19): siRNA sense strand
gaacacagacaaggaugca

SEQ ID NO: 862456 - RNA, 19 nt, Homo sapiens
  misc_RNA (1)...(19): siRNA sense strand
cagaaguucgcagcaaaua

SEQ ID NO: 862457 - RNA, 19 nt, Homo sapiens
  misc_RNA (1)...(19): siRNA sense strand
gggauagccauaugaaaca

SEQ ID NO: 862458 - RNA, 19 nt, Homo sapiens
  misc_RNA (1)...(19): siRNA sense strand
gauugaaagcccagcagaa

SEQ ID NO: 862459 - RNA, 19 nt, Homo sapiens
  misc_RNA (1)...(19): siRNA sense strand
ggcccagcgugaagaaaga

SEQ ID NO: 862460 - RNA, 19 nt, Homo sapiens
  misc_RNA (1)...(19): siRNA sense strand
uggcugagaaugaaagauu

SEQ ID NO: 862461 - RNA, 19 nt, Homo sapiens
  misc_RNA (1)...(19): siRNA sense strand
gcagacgagcagaccguuu

SEQ ID NO: 862462 - RNA, 19 nt, Homo sapiens
  misc_RNA (1)...(19): siRNA sense strand
ggagcuggauguagaugcu

SEQ ID NO: 862463 - RNA, 19 nt, Homo sapiens
  misc_RNA (1)...(19): siRNA sense strand
aaagggauagccauaugaa

SEQ ID NO: 862464 - RNA, 19 nt, Homo sapiens
  misc_RNA (1)...(19): siRNA sense strand
uagaggagcaggcaaccaa

SEQ ID NO: 862465 - RNA, 19 nt, Homo sapiens
  misc_RNA (1)...(19): siRNA sense strand
cccaaaagaugauaaaaca

SEQ ID NO: 862466 - RNA, 19 nt, Homo sapiens
  misc_RNA (1)...(19): siRNA sense strand
gaaaagggcccagcgugaa

SEQ ID NO: 862467 - RNA, 19 nt, Homo sapiens
  misc_RNA (1)...(19): siRNA sense strand
gaaacagcuccuccucauc

SEQ ID NO: 862468 - RNA, 19 nt, Homo sapiens
  misc_RNA (1)...(19): siRNA sense strand
cuucagacaucucacaaac

SEQ ID NO: 862469 - RNA, 19 nt, Homo sapiens
  misc_RNA (1)...(19): siRNA sense strand
gcagcugcccaucuucaga

SEQ ID NO: 862470 - RNA, 19 nt, Homo sapiens
  misc_RNA (1)...(19): siRNA sense strand
cugaggauauucugaaagg

SEQ ID NO: 862471 - RNA, 19 nt, Homo sapiens
  misc_RNA (1)...(19): siRNA sense strand
gcgugaagaaagauugaaa

SEQ ID NO: 862472 - RNA, 19 nt, Homo sapiens
  misc_RNA (1)...(19): siRNA sense strand
ucuccagaacuuccucuua

SEQ ID NO: 862473 - RNA, 19 nt, Homo sapiens
  misc_RNA (1)...(19): siRNA sense strand
gaagcaaagccccaaaaga

SEQ ID NO: 862474 - RNA, 19 nt, Homo sapiens
  misc_RNA (1)...(19): siRNA sense strand
ccagcagagccauguauug

SEQ ID NO: 862475 - RNA, 19 nt, Homo sapiens
  misc_RNA (1)...(19): siRNA sense strand
cagcagagccauguauugg

SEQ ID NO: 862476 - RNA, 19 nt, Homo sapiens
  misc_RNA (1)...(19): siRNA sense strand
uguagaugcugauuuugua

SEQ ID NO: 862477 - RNA, 19 nt, Homo sapiens
  misc_RNA (1)...(19): siRNA sense strand
gcauguggaauuccuugug

SEQ ID NO: 862478 - RNA, 19 nt, Homo sapiens
  misc_RNA (1)...(19): siRNA sense strand
ucugaaaggacuuaugaau

SEQ ID NO: 862479 - RNA, 19 nt, Homo sapiens
  misc_RNA (1)...(19): siRNA sense strand
cgagcagaccguuuauuag

SEQ ID NO: 862480 - RNA, 19 nt, Homo sapiens
  misc_RNA (1)...(19): siRNA sense strand
uggcagaaguucgcagcaa

SEQ ID NO: 862481 - RNA, 19 nt, Homo sapiens
  misc_RNA (1)...(19): siRNA sense strand
ccuuguggcugagaaugaa

SEQ ID NO: 862482 - RNA, 19 nt, Homo sapiens
  misc_RNA (1)...(19): siRNA sense strand
gccauguauuggaagcaaa

SEQ ID NO: 862483 - RNA, 19 nt, Homo sapiens
  misc_RNA (1)...(19): siRNA sense strand
cgucagaguuauggagcuu

SEQ ID NO: 862484 - RNA, 19 nt, Homo sapiens
  misc_RNA (1)...(19): siRNA sense strand
ccagaacuuccucuuaugg

SEQ ID NO: 862485 - RNA, 19 nt, Homo sapiens
  misc_RNA (1)...(19): siRNA sense strand
caaucuuccucccuuggau

SEQ ID NO: 862486 - RNA, 19 nt, Homo sapiens
  misc_RNA (1)...(19): siRNA sense strand
gagcaggcaaccaaaauug

SEQ ID NO: 862487 - RNA, 19 nt, Homo sapiens
  misc_RNA (1)...(19): siRNA sense strand
uugcaaagggauagccaua

SEQ ID NO: 862488 - RNA, 19 nt, Homo sapiens
  misc_RNA (1)...(19): siRNA sense strand
uccagaacuuccucuuaug

SEQ ID NO: 862489 - RNA, 19 nt, Homo sapiens
  misc_RNA (1)...(19): siRNA sense strand
ugggaaagccaaggacauu

SEQ ID NO: 862490 - RNA, 19 nt, Homo sapiens
  misc_RNA (1)...(19): siRNA sense strand
ugaaaaggccagacuucua

SEQ ID NO: 862491 - RNA, 19 nt, Homo sapiens
  misc_RNA (1)...(19): siRNA sense strand
aaacaacuaaaggcugaaa

SEQ ID NO: 862492 - RNA, 19 nt, Homo sapiens
  misc_RNA (1)...(19): siRNA sense strand
gagcuugccaccacaugca

SEQ ID NO: 862493 - RNA, 19 nt, Homo sapiens
  misc_RNA (1)...(19): siRNA sense strand
ggauagccauaugaaacag

SEQ ID NO: 862494 - RNA, 19 nt, Homo sapiens
  misc_RNA (1)...(19): siRNA sense strand
uagaaacgucagaguuaug

SEQ ID NO: 862495 - RNA, 19 nt, Homo sapiens
  misc_RNA (1)...(19): siRNA sense strand
ggauccagacacacuacuu

SEQ ID NO: 862496 - RNA, 19 nt, Homo sapiens
  misc_RNA (1)...(19): siRNA sense strand
ucucugaggauauucugaa

SEQ ID NO: 862497 - RNA, 19 nt, Homo sapiens
  misc_RNA (1)...(19): siRNA sense strand
auggagcucucugaggaua

SEQ ID NO: 862498 - RNA, 19 nt, Homo sapiens
  misc_RNA (1)...(19): siRNA sense strand
gcuacagccuccucaaccu

SEQ ID NO: 862499 - RNA, 19 nt, Homo sapiens
  misc_RNA (1)...(19): siRNA sense strand
gccagcagagccauguauu

SEQ ID NO: 862500 - RNA, 19 nt, Homo sapiens
  misc_RNA (1)...(19): siRNA sense strand
ugcagcauaucuuucugaa

SEQ ID NO: 862501 - RNA, 19 nt, Homo sapiens
  misc_RNA (1)...(19): siRNA sense strand
cagaacuuccucuuaugga

SEQ ID NO: 862502 - RNA, 19 nt, Homo sapiens
  misc_RNA (1)...(19): siRNA sense strand
gaaaaggagcuggauguag

SEQ ID NO: 862503 - RNA, 19 nt, Homo sapiens
  misc_RNA (1)...(19): siRNA sense strand
gccaugaagcugacacagu

SEQ ID NO: 862504 - RNA, 19 nt, Homo sapiens
  misc_RNA (1)...(19): siRNA sense strand
aagcaaagccccaaaagau

SEQ ID NO: 862505 - RNA, 19 nt, Homo sapiens
  misc_RNA (1)...(19): siRNA sense strand
gacacacuacuuuauuuac

SEQ ID NO: 862506 - RNA, 19 nt, Homo sapiens
  misc_RNA (1)...(19): siRNA sense strand
auucugaaaggacuuauga

SEQ ID NO: 862507 - RNA, 19 nt, Homo sapiens
  misc_RNA (1)...(19): siRNA sense strand
gaaagccaaggacauucca

SEQ ID NO: 862508 - RNA, 19 nt, Homo sapiens
  misc_RNA (1)...(19): siRNA sense strand
cuaaaagguccaauagaaa

SEQ ID NO: 862509 - RNA, 19 nt, Homo sapiens
  misc_RNA (1)...(19): siRNA sense strand
ggagaaagcuguagucuug

SEQ ID NO: 862510 - RNA, 19 nt, Homo sapiens
  misc_RNA (1)...(19): siRNA sense strand
caaauuaccgcacagauua

SEQ ID NO: 862511 - RNA, 19 nt, Homo sapiens
  misc_RNA (1)...(19): siRNA sense strand
gaagagaccgaauuaauga

SEQ ID NO: 862512 - RNA, 19 nt, Homo sapiens
  misc_RNA (1)...(19): siRNA sense strand
caaggauaccuacaaauua

SEQ ID NO: 862513 - RNA, 19 nt, Homo sapiens
  misc_RNA (1)...(19): siRNA sense strand
gaagauaauugcuuuacag

SEQ ID NO: 862514 - RNA, 19 nt, Homo sapiens
  misc_RNA (1)...(19): siRNA sense strand
ccgcacagauuaauagaaa

SEQ ID NO: 862515 - RNA, 19 nt, Homo sapiens
  misc_RNA (1)...(19): siRNA sense strand
gcaacagcaucagaagaua

SEQ ID NO: 862516 - RNA, 19 nt, Homo sapiens
  misc_RNA (1)...(19): siRNA sense strand
ccaaggauaccuacaaauu

SEQ ID NO: 862517 - RNA, 19 nt, Homo sapiens
  misc_RNA (1)...(19): siRNA sense strand
ggaauuaacuuugaaacac

SEQ ID NO: 862518 - RNA, 19 nt, Homo sapiens
  misc_RNA (1)...(19): siRNA sense strand
gcuguagucuuggaauuaa

SEQ ID NO: 862519 - RNA, 19 nt, Homo sapiens
  misc_RNA (1)...(19): siRNA sense strand
ggacuauuccucuuuguau

SEQ ID NO: 862520 - RNA, 19 nt, Homo sapiens
  misc_RNA (1)...(19): siRNA sense strand
gacuauuccucuuuguaua

SEQ ID NO: 862521 - RNA, 19 nt, Homo sapiens
  misc_RNA (1)...(19): siRNA sense strand
uugcucagcugaaagauuu

SEQ ID NO: 862522 - RNA, 19 nt, Homo sapiens
  misc_RNA (1)...(19): siRNA sense strand
ggacuggacuauuccucuu

SEQ ID NO: 862523 - RNA, 19 nt, Homo sapiens
  misc_RNA (1)...(19): siRNA sense strand
caacagcaucagaagauaa

SEQ ID NO: 862524 - RNA, 19 nt, Homo sapiens
  misc_RNA (1)...(19): siRNA sense strand
caccaaggauaccuacaaa

SEQ ID NO: 862525 - RNA, 19 nt, Homo sapiens
  misc_RNA (1)...(19): siRNA sense strand
gaacaucugaaauugacaa

SEQ ID NO: 862526 - RNA, 19 nt, Homo sapiens
  misc_RNA (1)...(19): siRNA sense strand
caauaccucucccgguuug

SEQ ID NO: 862527 - RNA, 19 nt, Homo sapiens
  misc_RNA (1)...(19): siRNA sense strand
gaaaagaagagaccgaauu

SEQ ID NO: 862528 - RNA, 19 nt, Homo sapiens
  misc_RNA (1)...(19): siRNA sense strand
guauauguguaaacccaaa

SEQ ID NO: 862529 - RNA, 19 nt, Homo sapiens
  misc_RNA (1)...(19): siRNA sense strand
caucugaaauugacaacuc

SEQ ID NO: 862530 - RNA, 19 nt, Homo sapiens
  misc_RNA (1)...(19): siRNA sense strand
ucaaacaugcgccaaagaa

SEQ ID NO: 862531 - RNA, 19 nt, Homo sapiens
  misc_RNA (1)...(19): siRNA sense strand
agaagagaccgaauuaaug

SEQ ID NO: 862532 - RNA, 19 nt, Homo sapiens
  misc_RNA (1)...(19): siRNA sense strand
agagcggccuggagaagua

SEQ ID NO: 862533 - RNA, 19 nt, Homo sapiens
  misc_RNA (1)...(19): siRNA sense strand
gcaauaccucucccgguuu

SEQ ID NO: 862534 - RNA, 19 nt, Homo sapiens
  misc_RNA (1)...(19): siRNA sense strand
gagaccgaauuaaugaaug

SEQ ID NO: 862535 - RNA, 19 nt, Homo sapiens
  misc_RNA (1)...(19): siRNA sense strand
aagaagagaccgaauuaau

SEQ ID NO: 862536 - RNA, 19 nt, Homo sapiens
  misc_RNA (1)...(19): siRNA sense strand
acaaauuaccgcacagauu

SEQ ID NO: 862537 - RNA, 19 nt, Homo sapiens
  misc_RNA (1)...(19): siRNA sense strand
gcauugcucagcugaaaga

SEQ ID NO: 862538 - RNA, 19 nt, Homo sapiens
  misc_RNA (1)...(19): siRNA sense strand
aaggauaccuacaaauuac

SEQ ID NO: 862539 - RNA, 19 nt, Homo sapiens
  misc_RNA (1)...(19): siRNA sense strand
ugacaacucugggacaucu

SEQ ID NO: 862540 - RNA, 19 nt, Homo sapiens
  misc_RNA (1)...(19): siRNA sense strand
aaaagaagagaccgaauua

SEQ ID NO: 862541 - RNA, 19 nt, Homo sapiens
  misc_RNA (1)...(19): siRNA sense strand
gaauuccucauuugcaaga

SEQ ID NO: 862542 - RNA, 19 nt, Homo sapiens
  misc_RNA (1)...(19): siRNA sense strand
ucucugaaaucgcccauuc

SEQ ID NO: 862543 - RNA, 19 nt, Homo sapiens
  misc_RNA (1)...(19): siRNA sense strand
gagcaacagcaucagaaga

SEQ ID NO: 862544 - RNA, 19 nt, Homo sapiens
  misc_RNA (1)...(19): siRNA sense strand
agaaagcuguagucuugga

SEQ ID NO: 862545 - RNA, 19 nt, Homo sapiens
  misc_RNA (1)...(19): siRNA sense strand
caucagaagauaauugcuu

SEQ ID NO: 862546 - RNA, 19 nt, Homo sapiens
  misc_RNA (1)...(19): siRNA sense strand
uaaccgagcaacagcauca

SEQ ID NO: 862547 - RNA, 19 nt, Homo sapiens
  misc_RNA (1)...(19): siRNA sense strand
cgagacgacaccaaggaua

SEQ ID NO: 862548 - RNA, 19 nt, Homo sapiens
  misc_RNA (1)...(19): siRNA sense strand
gccugaacaucugaaauug

SEQ ID NO: 862549 - RNA, 19 nt, Homo sapiens
  misc_RNA (1)...(19): siRNA sense strand
cagcaucagaagauaauug

SEQ ID NO: 862550 - RNA, 19 nt, Homo sapiens
  misc_RNA (1)...(19): siRNA sense strand
gaaagcuguagucuuggaa

SEQ ID NO: 862551 - RNA, 19 nt, Homo sapiens
  misc_RNA (1)...(19): siRNA sense strand
aaacaugcgccaaagaagu

SEQ ID NO: 862552 - RNA, 19 nt, Homo sapiens
  misc_RNA (1)...(19): siRNA sense strand
aagcuguagucuuggaauu

SEQ ID NO: 862553 - RNA, 19 nt, Homo sapiens
  misc_RNA (1)...(19): siRNA sense strand
ugccugaacaucugaaauu

SEQ ID NO: 862554 - RNA, 19 nt, Homo sapiens
  misc_RNA (1)...(19): siRNA sense strand
aaagaagagaccgaauuaa

SEQ ID NO: 862555 - RNA, 19 nt, Homo sapiens
  misc_RNA (1)...(19): siRNA sense strand
aagauuuacugccugaaca

SEQ ID NO: 862556 - RNA, 19 nt, Homo sapiens
  misc_RNA (1)...(19): siRNA sense strand
acaggucccucugagcaaa

SEQ ID NO: 862557 - RNA, 19 nt, Homo sapiens
  misc_RNA (1)...(19): siRNA sense strand
gucuuggaauuaacuuuga

SEQ ID NO: 862558 - RNA, 19 nt, Homo sapiens
  misc_RNA (1)...(19): siRNA sense strand
gagacgacaccaaggauac

SEQ ID NO: 862559 - RNA, 19 nt, Homo sapiens
  misc_RNA (1)...(19): siRNA sense strand
cugaacaucugaaauugac

SEQ ID NO: 862560 - RNA, 19 nt, Homo sapiens
  misc_RNA (1)...(19): siRNA sense strand
ggaccgcgagaaaggcaaa

SEQ ID NO: 862561 - RNA, 19 nt, Homo sapiens
  misc_RNA (1)...(19): siRNA sense strand
acaccaaggauaccuacaa

SEQ ID NO: 862562 - RNA, 19 nt, Homo sapiens
  misc_RNA (1)...(19): siRNA sense strand
aaauuaccgcacagauuaa

SEQ ID NO: 862563 - RNA, 19 nt, Homo sapiens
  misc_RNA (1)...(19): siRNA sense strand
uaauugcuuuacagaaugg

SEQ ID NO: 862564 - RNA, 19 nt, Homo sapiens
  misc_RNA (1)...(19): siRNA sense strand
ucugggacaucuggagaaa

SEQ ID NO: 862565 - RNA, 19 nt, Homo sapiens
  misc_RNA (1)...(19): siRNA sense strand
augcauugcucagcugaaa

SEQ ID NO: 862566 - RNA, 19 nt, Homo sapiens
  misc_RNA (1)...(19): siRNA sense strand
ggggagcgaucucugaaau

SEQ ID NO: 862567 - RNA, 19 nt, Homo sapiens
  misc_RNA (1)...(19): siRNA sense strand
caaacaugcgccaaagaag

SEQ ID NO: 862568 - RNA, 19 nt, Homo sapiens
  misc_RNA (1)...(19): siRNA sense strand
ccacucgggauuucaaaca

SEQ ID NO: 862569 - RNA, 19 nt, Homo sapiens
  misc_RNA (1)...(19): siRNA sense strand
uuacuggaacauagagauu

SEQ ID NO: 862570 - RNA, 19 nt, Homo sapiens
  misc_RNA (1)...(19): siRNA sense strand
ccugaacaucugaaauuga

SEQ ID NO: 862571 - RNA, 19 nt, Homo sapiens
  misc_RNA (1)...(19): siRNA sense strand
gacuggacuauuccucuuu

SEQ ID NO: 862572 - RNA, 19 nt, Homo sapiens
  misc_RNA (1)...(19): siRNA sense strand
ugggacaucuggagaaagc

SEQ ID NO: 862573 - RNA, 19 nt, Homo sapiens
  misc_RNA (1)...(19): siRNA sense strand
cuauuccucuuuguauaug

SEQ ID NO: 862574 - RNA, 19 nt, Homo sapiens
  misc_RNA (1)...(19): siRNA sense strand
ccucuuuguauauguguaa

SEQ ID NO: 862575 - RNA, 19 nt, Homo sapiens
  misc_RNA (1)...(19): siRNA sense strand
caagagcggccuggagaag

SEQ ID NO: 862576 - RNA, 19 nt, Homo sapiens
  misc_RNA (1)...(19): siRNA sense strand
acuggacuauuccucuuug

SEQ ID NO: 862577 - RNA, 19 nt, Homo sapiens
  misc_RNA (1)...(19): siRNA sense strand
gccuggagaaguaucugua

SEQ ID NO: 862578 - RNA, 19 nt, Homo sapiens
  misc_RNA (1)...(19): siRNA sense strand
cagaagauaauugcuuuac

SEQ ID NO: 862579 - RNA, 19 nt, Homo sapiens
  misc_RNA (1)...(19): siRNA sense strand
uuaccgcacagauuaauag

SEQ ID NO: 862580 - RNA, 19 nt, Homo sapiens
  misc_RNA (1)...(19): siRNA sense strand
agaccgaauuaaugaaugc

SEQ ID NO: 862581 - RNA, 19 nt, Homo sapiens
  misc_RNA (1)...(19): siRNA sense strand
gaaagaagaugaagaagau

SEQ ID NO: 862582 - RNA, 19 nt, Homo sapiens
  misc_RNA (1)...(19): siRNA sense strand
gaagaagacuacaaugaaa

SEQ ID NO: 862583 - RNA, 19 nt, Homo sapiens
  misc_RNA (1)...(19): siRNA sense strand
gcaagaagcaguuguugaa

SEQ ID NO: 862584 - RNA, 19 nt, Homo sapiens
  misc_RNA (1)...(19): siRNA sense strand
caaagaagaugauggaaaa

SEQ ID NO: 862585 - RNA, 19 nt, Homo sapiens
  misc_RNA (1)...(19): siRNA sense strand
agaagaagaucagaaagaa

SEQ ID NO: 862586 - RNA, 19 nt, Homo sapiens
  misc_RNA (1)...(19): siRNA sense strand
aaagugauaugauggaaga

SEQ ID NO: 862587 - RNA, 19 nt, Homo sapiens
  misc_RNA (1)...(19): siRNA sense strand
gagagaagauggaaaagaa

SEQ ID NO: 862588 - RNA, 19 nt, Homo sapiens
  misc_RNA (1)...(19): siRNA sense strand
aagaugagaucaaagaaga

SEQ ID NO: 862589 - RNA, 19 nt, Homo sapiens
  misc_RNA (1)...(19): siRNA sense strand
ggaagaagcuggaaaagag

SEQ ID NO: 862590 - RNA, 19 nt, Homo sapiens
  misc_RNA (1)...(19): siRNA sense strand
ugaagaagacuacaaugaa

SEQ ID NO: 862591 - RNA, 19 nt, Homo sapiens
  misc_RNA (1)...(19): siRNA sense strand
agaagcaguuguugaagaa

SEQ ID NO: 862592 - RNA, 19 nt, Homo sapiens
  misc_RNA (1)...(19): siRNA sense strand
gaaaagaagacaaagauga

SEQ ID NO: 862593 - RNA, 19 nt, Homo sapiens
  misc_RNA (1)...(19): siRNA sense strand
ucagaaagaagaugaagaa

SEQ ID NO: 862594 - RNA, 19 nt, Homo sapiens
  misc_RNA (1)...(19): siRNA sense strand
ugaagaagaagaucagaaa

SEQ ID NO: 862595 - RNA, 19 nt, Homo sapiens
  misc_RNA (1)...(19): siRNA sense strand
gaaaagagaagggagauaa

SEQ ID NO: 862596 - RNA, 19 nt, Homo sapiens
  misc_RNA (1)...(19): siRNA sense strand
ggaagaagauggaaaagag

SEQ ID NO: 862597 - RNA, 19 nt, Homo sapiens
  misc_RNA (1)...(19): siRNA sense strand
agaggaagaugagaucaaa

SEQ ID NO: 862598 - RNA, 19 nt, Homo sapiens
  misc_RNA (1)...(19): siRNA sense strand
gaaaggagaagaugcaaaa

SEQ ID NO: 862599 - RNA, 19 nt, Homo sapiens
  misc_RNA (1)...(19): siRNA sense strand
gaaaugagaaaggagaaga

SEQ ID NO: 862600 - RNA, 19 nt, Homo sapiens
  misc_RNA (1)...(19): siRNA sense strand
caaggaaaaugaagacaaa

SEQ ID NO: 862601 - RNA, 19 nt, Homo sapiens
  misc_RNA (1)...(19): siRNA sense strand
ucaaagaagaugauggaaa

SEQ ID NO: 862602 - RNA, 19 nt, Homo sapiens
  misc_RNA (1)...(19): siRNA sense strand
aagaagcaguuguugaaga

SEQ ID NO: 862603 - RNA, 19 nt, Homo sapiens
  misc_RNA (1)...(19): siRNA sense strand
gaagaagacagaaaagaaa

SEQ ID NO: 862604 - RNA, 19 nt, Homo sapiens
  misc_RNA (1)...(19): siRNA sense strand
gaaauggagaagauggaaa

SEQ ID NO: 862605 - RNA, 19 nt, Homo sapiens
  misc_RNA (1)...(19): siRNA sense strand
ugaagaagaucaaaacgaa

SEQ ID NO: 862606 - RNA, 19 nt, Homo sapiens
  misc_RNA (1)...(19): siRNA sense strand
aagaaaggcugcaggucaa

SEQ ID NO: 862607 - RNA, 19 nt, Homo sapiens
  misc_RNA (1)...(19): siRNA sense strand
uauugaagaugccacagaa

SEQ ID NO: 862608 - RNA, 19 nt, Homo sapiens
  misc_RNA (1)...(19): siRNA sense strand
gaagaugagaucaaagaag

SEQ ID NO: 862609 - RNA, 19 nt, Homo sapiens
  misc_RNA (1)...(19): siRNA sense strand
gaagaugaagguggaaaug

SEQ ID NO: 862610 - RNA, 19 nt, Homo sapiens
  misc_RNA (1)...(19): siRNA sense strand
gaaugaagauggaaaagag

SEQ ID NO: 862611 - RNA, 19 nt, Homo sapiens
  misc_RNA (1)...(19): siRNA sense strand
ggaaagauguaaaagucaa

SEQ ID NO: 862612 - RNA, 19 nt, Homo sapiens
  misc_RNA (1)...(19): siRNA sense strand
aagaagaucagaaagaaga

SEQ ID NO: 862613 - RNA, 19 nt, Homo sapiens
  misc_RNA (1)...(19): siRNA sense strand
ggaagaugagaucaaagaa

SEQ ID NO: 862614 - RNA, 19 nt, Homo sapiens
  misc_RNA (1)...(19): siRNA sense strand
ggaagaagacagaaaagaa

SEQ ID NO: 862615 - RNA, 19 nt, Homo sapiens
  misc_RNA (1)...(19): siRNA sense strand
gaagaugaagaagaucaaa

SEQ ID NO: 862616 - RNA, 19 nt, Homo sapiens
  misc_RNA (1)...(19): siRNA sense strand
agaaagaagaugaagaaga

SEQ ID NO: 862617 - RNA, 19 nt, Homo sapiens
  misc_RNA (1)...(19): siRNA sense strand
aaagaggagccacagagua

SEQ ID NO: 862618 - RNA, 19 nt, Homo sapiens
  misc_RNA (1)...(19): siRNA sense strand
cagguugucugcuaugcuu

SEQ ID NO: 862619 - RNA, 19 nt, Homo sapiens
  misc_RNA (1)...(19): siRNA sense strand
gccacagaguauuguuuaa

SEQ ID NO: 862620 - RNA, 19 nt, Homo sapiens
  misc_RNA (1)...(19): siRNA sense strand
gaggagccacagaguauug

SEQ ID NO: 862621 - RNA, 19 nt, Homo sapiens
  misc_RNA (1)...(19): siRNA sense strand
gcuaugcuugugccaguua

SEQ ID NO: 862622 - RNA, 19 nt, Homo sapiens
  misc_RNA (1)...(19): siRNA sense strand
ggaaauggagaagauggaa

SEQ ID NO: 862623 - RNA, 19 nt, Homo sapiens
  misc_RNA (1)...(19): siRNA sense strand
agagaaaggagaagaugaa

SEQ ID NO: 862624 - RNA, 19 nt, Homo sapiens
  misc_RNA (1)...(19): siRNA sense strand
gagaaaggagaagaugaaa

SEQ ID NO: 862625 - RNA, 19 nt, Homo sapiens
  misc_RNA (1)...(19): siRNA sense strand
caagcaagaagcaguuguu

SEQ ID NO: 862626 - RNA, 19 nt, Homo sapiens
  misc_RNA (1)...(19): siRNA sense strand
gagccacagaguauuguuu

SEQ ID NO: 862627 - RNA, 19 nt, Homo sapiens
  misc_RNA (1)...(19): siRNA sense strand
aaauggaaaugagaaagga

SEQ ID NO: 862628 - RNA, 19 nt, Homo sapiens
  misc_RNA (1)...(19): siRNA sense strand
aagaagaagaucagaaaga

SEQ ID NO: 862629 - RNA, 19 nt, Homo sapiens
  misc_RNA (1)...(19): siRNA sense strand
gaagaagaagaucagaaag

SEQ ID NO: 862630 - RNA, 19 nt, Homo sapiens
  misc_RNA (1)...(19): siRNA sense strand
ggggaaagauguaaaaguc

SEQ ID NO: 862631 - RNA, 19 nt, Homo sapiens
  misc_RNA (1)...(19): siRNA sense strand
gaagaagaucagaaagaag

SEQ ID NO: 862632 - RNA, 19 nt, Homo sapiens
  misc_RNA (1)...(19): siRNA sense strand
aagaggagccacagaguau

SEQ ID NO: 862633 - RNA, 19 nt, Homo sapiens
  misc_RNA (1)...(19): siRNA sense strand
gaaaggggaagcuggaaaa

SEQ ID NO: 862634 - RNA, 19 nt, Homo sapiens
  misc_RNA (1)...(19): siRNA sense strand
aagcaguuguugaagaaga

SEQ ID NO: 862635 - RNA, 19 nt, Homo sapiens
  misc_RNA (1)...(19): siRNA sense strand
gaugagaucaaagaagaug

SEQ ID NO: 862636 - RNA, 19 nt, Homo sapiens
  misc_RNA (1)...(19): siRNA sense strand
gcaggucaaggugauauga

SEQ ID NO: 862637 - RNA, 19 nt, Homo sapiens
  misc_RNA (1)...(19): siRNA sense strand
aaaaggaaauggagaagau

SEQ ID NO: 862638 - RNA, 19 nt, Homo sapiens
  misc_RNA (1)...(19): siRNA sense strand
gaaaagggaggagaaaaga

SEQ ID NO: 862639 - RNA, 19 nt, Homo sapiens
  misc_RNA (1)...(19): siRNA sense strand
gaaaagaggaagaugagau

SEQ ID NO: 862640 - RNA, 19 nt, Homo sapiens
  misc_RNA (1)...(19): siRNA sense strand
uugaagaagacuacaauga

SEQ ID NO: 862641 - RNA, 19 nt, Homo sapiens
  misc_RNA (1)...(19): siRNA sense strand
gaagaucagaaagaagaug

SEQ ID NO: 862642 - RNA, 19 nt, Homo sapiens
  misc_RNA (1)...(19): siRNA sense strand
aacaucaaguucaaggaaa

SEQ ID NO: 862643 - RNA, 19 nt, Homo sapiens
  misc_RNA (1)...(19): siRNA sense strand
gcaguggcagcagaaguaa

SEQ ID NO: 862644 - RNA, 19 nt, Homo sapiens
  misc_RNA (1)...(19): siRNA sense strand
gaaaagagaaaggagaaga

SEQ ID NO: 862645 - RNA, 19 nt, Homo sapiens
  misc_RNA (1)...(19): siRNA sense strand
agaugaagguggaaaugag

SEQ ID NO: 862646 - RNA, 19 nt, Homo sapiens
  misc_RNA (1)...(19): siRNA sense strand
gaaaacauagauacaagug

SEQ ID NO: 862647 - RNA, 19 nt, Homo sapiens
  misc_RNA (1)...(19): siRNA sense strand
aagaagaggaagaaggaaa

SEQ ID NO: 862648 - RNA, 19 nt, Homo sapiens
  misc_RNA (1)...(19): siRNA sense strand
gaagaucugccagguuguc

SEQ ID NO: 862649 - RNA, 19 nt, Homo sapiens
  misc_RNA (1)...(19): siRNA sense strand
ugagaaaggagaagaugca

SEQ ID NO: 862650 - RNA, 19 nt, Homo sapiens
  misc_RNA (1)...(19): siRNA sense strand
agccacagaguauuguuua

SEQ ID NO: 862651 - RNA, 19 nt, Homo sapiens
  misc_RNA (1)...(19): siRNA sense strand
aggaagaugagaucaaaga

SEQ ID NO: 862652 - RNA, 19 nt, Homo sapiens
  misc_RNA (1)...(19): siRNA sense strand
ggcaggagccaaagagaag

SEQ ID NO: 862653 - RNA, 19 nt, Homo sapiens
  misc_RNA (1)...(19): siRNA sense strand
gagaagaugcaaaagagaa

SEQ ID NO: 862654 - RNA, 19 nt, Homo sapiens
  misc_RNA (1)...(19): siRNA sense strand
aaagaaacaggagauggaa

SEQ ID NO: 862655 - RNA, 19 nt, Homo sapiens
  misc_RNA (1)...(19): siRNA sense strand
aaagagaaaggagaagaug

SEQ ID NO: 862656 - RNA, 19 nt, Homo sapiens
  misc_RNA (1)...(19): siRNA sense strand
ggaagaaggaaaagaggaa

SEQ ID NO: 862657 - RNA, 19 nt, Homo sapiens
  misc_RNA (1)...(19): siRNA sense strand
gcugaaaccaagcaagaag

SEQ ID NO: 862658 - RNA, 19 nt, Homo sapiens
  misc_RNA (1)...(19): siRNA sense strand
aaagagagagaagauggaa

SEQ ID NO: 862659 - RNA, 19 nt, Homo sapiens
  misc_RNA (1)...(19): siRNA sense strand
uacaagugcccaagcaguu

SEQ ID NO: 862660 - RNA, 19 nt, Homo sapiens
  misc_RNA (1)...(19): siRNA sense strand
gugauaugauggaagaaaa

SEQ ID NO: 862661 - RNA, 19 nt, Homo sapiens
  misc_RNA (1)...(19): siRNA sense strand
agauacaagugcccaagca

SEQ ID NO: 862662 - RNA, 19 nt, Homo sapiens
  misc_RNA (1)...(19): siRNA sense strand
gaucagaaagaagaugaag

SEQ ID NO: 862663 - RNA, 19 nt, Homo sapiens
  misc_RNA (1)...(19): siRNA sense strand
aaaagagaaugaagaugga

SEQ ID NO: 862664 - RNA, 19 nt, Homo sapiens
  misc_RNA (1)...(19): siRNA sense strand
gaggugaagccuaaaagaa

SEQ ID NO: 862665 - RNA, 19 nt, Homo sapiens
  misc_RNA (1)...(19): siRNA sense strand
gagaaaggagaagaugcaa

SEQ ID NO: 862666 - RNA, 19 nt, Homo sapiens
  misc_RNA (1)...(19): siRNA sense strand
aggggaagcuggaaaagaa

SEQ ID NO: 862667 - RNA, 19 nt, Homo sapiens
  misc_RNA (1)...(19): siRNA sense strand
ucugccagguugucugcua

SEQ ID NO: 862668 - RNA, 19 nt, Homo sapiens
  misc_RNA (1)...(19): siRNA sense strand
gaagauggaaaagaggaua

SEQ ID NO: 862669 - RNA, 19 nt, Homo sapiens
  misc_RNA (1)...(19): siRNA sense strand
ccuaaaagaacaucaaguu

SEQ ID NO: 862670 - RNA, 19 nt, Homo sapiens
  misc_RNA (1)...(19): siRNA sense strand
ggaagaaaacauagauaca

SEQ ID NO: 862671 - RNA, 19 nt, Homo sapiens
  misc_RNA (1)...(19): siRNA sense strand
aagaugaagguggaaauga

SEQ ID NO: 862672 - RNA, 19 nt, Homo sapiens
  misc_RNA (1)...(19): siRNA sense strand
gaaaaggaaauggagaaga

SEQ ID NO: 862673 - RNA, 19 nt, Homo sapiens
  misc_RNA (1)...(19): siRNA sense strand
agcaguggcagcagaagua

SEQ ID NO: 862674 - RNA, 19 nt, Homo sapiens
  misc_RNA (1)...(19): siRNA sense strand
aagaagaugaagaagauca

SEQ ID NO: 862675 - RNA, 19 nt, Homo sapiens
  misc_RNA (1)...(19): siRNA sense strand
aagaucagaaagaagauga

SEQ ID NO: 862676 - RNA, 19 nt, Homo sapiens
  misc_RNA (1)...(19): siRNA sense strand
gcaggagccaaagagaaga

SEQ ID NO: 862677 - RNA, 19 nt, Homo sapiens
  misc_RNA (1)...(19): siRNA sense strand
aaaagaagaggaagaagga

SEQ ID NO: 862678 - RNA, 19 nt, Homo sapiens
  misc_RNA (1)...(19): siRNA sense strand
aagagaaaggagaagauga

SEQ ID NO: 862679 - RNA, 19 nt, Homo sapiens
  misc_RNA (1)...(19): siRNA sense strand
agagaaagaagauggaaaa

SEQ ID NO: 862680 - RNA, 19 nt, Homo sapiens
  misc_RNA (1)...(19): siRNA sense strand
aaagagaaagaagauggaa

SEQ ID NO: 862681 - RNA, 19 nt, Homo sapiens
  misc_RNA (1)...(19): siRNA sense strand
ccaaagauauccugauuaa

SEQ ID NO: 862682 - RNA, 19 nt, Homo sapiens
  misc_RNA (1)...(19): siRNA sense strand
gaccaaagauauccugauu

SEQ ID NO: 862683 - RNA, 19 nt, Homo sapiens
  misc_RNA (1)...(19): siRNA sense strand
gaaauucagugauacagau

SEQ ID NO: 862684 - RNA, 19 nt, Homo sapiens
  misc_RNA (1)...(19): siRNA sense strand
ccagagauuuaucaacuuu

SEQ ID NO: 862685 - RNA, 19 nt, Homo sapiens
  misc_RNA (1)...(19): siRNA sense strand
gaauggagaaaucaacuuu

SEQ ID NO: 862686 - RNA, 19 nt, Homo sapiens
  misc_RNA (1)...(19): siRNA sense strand
auacagaucucuuagacuu

SEQ ID NO: 862687 - RNA, 19 nt, Homo sapiens
  misc_RNA (1)...(19): siRNA sense strand
gcagugggcaguaccuaua

SEQ ID NO: 862688 - RNA, 19 nt, Homo sapiens
  misc_RNA (1)...(19): siRNA sense strand
gaacagggagugaagaaca

SEQ ID NO: 862689 - RNA, 19 nt, Homo sapiens
  misc_RNA (1)...(19): siRNA sense strand
gcaauguguugaucagaau

SEQ ID NO: 862690 - RNA, 19 nt, Homo sapiens
  misc_RNA (1)...(19): siRNA sense strand
uggaugggauucuggauaa

SEQ ID NO: 862691 - RNA, 19 nt, Homo sapiens
  misc_RNA (1)...(19): siRNA sense strand
gcaaccaucacgccaauga

SEQ ID NO: 862692 - RNA, 19 nt, Homo sapiens
  misc_RNA (1)...(19): siRNA sense strand
ccagggaguuuacugauag

SEQ ID NO: 862693 - RNA, 19 nt, Homo sapiens
  misc_RNA (1)...(19): siRNA sense strand
ggcaauguguugaucagaa

SEQ ID NO: 862694 - RNA, 19 nt, Homo sapiens
  misc_RNA (1)...(19): siRNA sense strand
ugauagugcugaagcuaaa

SEQ ID NO: 862695 - RNA, 19 nt, Homo sapiens
  misc_RNA (1)...(19): siRNA sense strand
uuuaaaggauggaaacuug

SEQ ID NO: 862696 - RNA, 19 nt, Homo sapiens
  misc_RNA (1)...(19): siRNA sense strand
gaaagaacagggagugaag

SEQ ID NO: 862697 - RNA, 19 nt, Homo sapiens
  misc_RNA (1)...(19): siRNA sense strand
ccaaagccaucaugacucu

SEQ ID NO: 862698 - RNA, 19 nt, Homo sapiens
  misc_RNA (1)...(19): siRNA sense strand
ccaacaugcagcagaaaua

SEQ ID NO: 862699 - RNA, 19 nt, Homo sapiens
  misc_RNA (1)...(19): siRNA sense strand
guauguggauuaucuugug

SEQ ID NO: 862700 - RNA, 19 nt, Homo sapiens
  misc_RNA (1)...(19): siRNA sense strand
ggaaggacaagcuggauca

SEQ ID NO: 862701 - RNA, 19 nt, Homo sapiens
  misc_RNA (1)...(19): siRNA sense strand
ucacauuccugccuugaca

SEQ ID NO: 862702 - RNA, 19 nt, Homo sapiens
  misc_RNA (1)...(19): siRNA sense strand
gagccuggauuuccuuucu

SEQ ID NO: 862703 - RNA, 19 nt, Homo sapiens
  misc_RNA (1)...(19): siRNA sense strand
gcagaggagugggugacaa

SEQ ID NO: 862704 - RNA, 19 nt, Homo sapiens
  misc_RNA (1)...(19): siRNA sense strand
cacaggaacuggcccaaca

SEQ ID NO: 862705 - RNA, 19 nt, Homo sapiens
  misc_RNA (1)...(19): siRNA sense strand
gucaguauguggauuaucu

SEQ ID NO: 862706 - RNA, 19 nt, Homo sapiens
  misc_RNA (1)...(19): siRNA sense strand
gccuggauuuccuuucuuu

SEQ ID NO: 862707 - RNA, 19 nt, Homo sapiens
  misc_RNA (1)...(19): siRNA sense strand
gccaaugacugagaaugga

SEQ ID NO: 862708 - RNA, 19 nt, Homo sapiens
  misc_RNA (1)...(19): siRNA sense strand
ggaacuggcccaacaugca

SEQ ID NO: 862709 - RNA, 19 nt, Homo sapiens
  misc_RNA (1)...(19): siRNA sense strand
uccagggaguuuacugaua

SEQ ID NO: 862710 - RNA, 19 nt, Homo sapiens
  misc_RNA (1)...(19): siRNA sense strand
gaccaaagccaucaugacu

SEQ ID NO: 862711 - RNA, 19 nt, Homo sapiens
  misc_RNA (1)...(19): siRNA sense strand
agacaaaccagauguugga

SEQ ID NO: 862712 - RNA, 19 nt, Homo sapiens
  misc_RNA (1)...(19): siRNA sense strand
uggcaucgcugucauugca

SEQ ID NO: 862713 - RNA, 19 nt, Homo sapiens
  misc_RNA (1)...(19): siRNA sense strand
gcagaaauaggagcugaug

SEQ ID NO: 862714 - RNA, 19 nt, Homo sapiens
  misc_RNA (1)...(19): siRNA sense strand
ucacgccaaugacugagaa

SEQ ID NO: 862715 - RNA, 19 nt, Homo sapiens
  misc_RNA (1)...(19): siRNA sense strand
caucaugacucuggucucu

SEQ ID NO: 862716 - RNA, 19 nt, Homo sapiens
  misc_RNA (1)...(19): siRNA sense strand
ggcccaacaugcagcagaa

SEQ ID NO: 862717 - RNA, 19 nt, Homo sapiens
  misc_RNA (1)...(19): siRNA sense strand
caacaugcagcagaaauag

SEQ ID NO: 862718 - RNA, 19 nt, Homo sapiens
  misc_RNA (1)...(19): siRNA sense strand
caacaguuugcuuuccuuu

SEQ ID NO: 862719 - RNA, 19 nt, Homo sapiens
  misc_RNA (1)...(19): siRNA sense strand
gaaucgccagcaacaguuu

SEQ ID NO: 862720 - RNA, 19 nt, Homo sapiens
  misc_RNA (1)...(19): siRNA sense strand
ugauacagaucucuuagac

SEQ ID NO: 862721 - RNA, 19 nt, Homo sapiens
  misc_RNA (1)...(19): siRNA sense strand
uaggagcacugagcuugaa

SEQ ID NO: 862722 - RNA, 19 nt, Homo sapiens
  misc_RNA (1)...(19): siRNA sense strand
gaagagccuggauuuccuu

SEQ ID NO: 862723 - RNA, 19 nt, Homo sapiens
  misc_RNA (1)...(19): siRNA sense strand
aaacugaagagccuggauu

SEQ ID NO: 862724 - RNA, 19 nt, Homo sapiens
  misc_RNA (1)...(19): siRNA sense strand
cuuuagcccugaacuauca

SEQ ID NO: 862725 - RNA, 19 nt, Homo sapiens
  misc_RNA (1)...(19): siRNA sense strand
gaauggcacaacaggagaa

SEQ ID NO: 862726 - RNA, 19 nt, Homo sapiens
  misc_RNA (1)...(19): siRNA sense strand
gacugagaauggagaaauc

SEQ ID NO: 862727 - RNA, 19 nt, Homo sapiens
  misc_RNA (1)...(19): siRNA sense strand
ugaaagaacagggagugaa

SEQ ID NO: 862728 - RNA, 19 nt, Homo sapiens
  misc_RNA (1)...(19): siRNA sense strand
guugagugcucuggugaug

SEQ ID NO: 862729 - RNA, 19 nt, Homo sapiens
  misc_RNA (1)...(19): siRNA sense strand
cagaggagugggugacaaa

SEQ ID NO: 862730 - RNA, 19 nt, Homo sapiens
  misc_RNA (1)...(19): siRNA sense strand
cagaaucgccagcaacagu

SEQ ID NO: 862731 - RNA, 19 nt, Homo sapiens
  misc_RNA (1)...(19): siRNA sense strand
guaggagcacugagcuuga

SEQ ID NO: 862732 - RNA, 19 nt, Homo sapiens
  misc_RNA (1)...(19): siRNA sense strand
ggauuuccuuucuuucacu

SEQ ID NO: 862733 - RNA, 19 nt, Homo sapiens
  misc_RNA (1)...(19): siRNA sense strand
aaagacaaaccagauguug

SEQ ID NO: 862734 - RNA, 19 nt, Homo sapiens
  misc_RNA (1)...(19): siRNA sense strand
gggcaguaccuauaacuac

SEQ ID NO: 862735 - RNA, 19 nt, Homo sapiens
  misc_RNA (1)...(19): siRNA sense strand
gaugggauucuggauaaga

SEQ ID NO: 862736 - RNA, 19 nt, Homo sapiens
  misc_RNA (1)...(19): siRNA sense strand
gauucgugcugaggaguug

SEQ ID NO: 862737 - RNA, 19 nt, Homo sapiens
  misc_RNA (1)...(19): siRNA sense strand
gaaggagucacaggaacug

SEQ ID NO: 862738 - RNA, 19 nt, Homo sapiens
  misc_RNA (1)...(19): siRNA sense strand
uaaaggauggaaacuugga

SEQ ID NO: 862739 - RNA, 19 nt, Homo sapiens
  misc_RNA (1)...(19): siRNA sense strand
gugcugaagcuaaacugaa

SEQ ID NO: 862740 - RNA, 19 nt, Homo sapiens
  misc_RNA (1)...(19): siRNA sense strand
uauguggauuaucuuguga

SEQ ID NO: 862741 - RNA, 19 nt, Homo sapiens
  misc_RNA (1)...(19): siRNA sense strand
cagugauacagaucucuua

SEQ ID NO: 862742 - RNA, 19 nt, Homo sapiens
  misc_RNA (1)...(19): siRNA sense strand
ggaccaaagauauccugau

SEQ ID NO: 862743 - RNA, 19 nt, Homo sapiens
  misc_RNA (1)...(19): siRNA sense strand
gagaauggagaaaucaacu

SEQ ID NO: 862744 - RNA, 19 nt, Homo sapiens
  misc_RNA (1)...(19): siRNA sense strand
ugacugagaauggagaaau

SEQ ID NO: 862745 - RNA, 19 nt, Homo sapiens
  misc_RNA (1)...(19): siRNA sense strand
gagcacugagcuugaagga

SEQ ID NO: 862746 - RNA, 19 nt, Homo sapiens
  misc_RNA (1)...(19): siRNA sense strand
ugaagagccuggauuuccu

SEQ ID NO: 862747 - RNA, 19 nt, Homo sapiens
  misc_RNA (1)...(19): siRNA sense strand
guuggaggcuuuugaacaa

SEQ ID NO: 862748 - RNA, 19 nt, Homo sapiens
  misc_RNA (1)...(19): siRNA sense strand
uguggauuaucuugugaaa

SEQ ID NO: 862749 - RNA, 19 nt, Homo sapiens
  misc_RNA (1)...(19): siRNA sense strand
ggaguuguuggaugggauu

SEQ ID NO: 862750 - RNA, 19 nt, Homo sapiens
  misc_RNA (1)...(19): siRNA sense strand
ccccugcccugccauuuua

SEQ ID NO: 862751 - RNA, 19 nt, Homo sapiens
  misc_RNA (1)...(19): siRNA sense strand
ucacagaccaaagccauca

SEQ ID NO: 862752 - RNA, 19 nt, Homo sapiens
  misc_RNA (1)...(19): siRNA sense strand
gugcugaggaguuguugga

SEQ ID NO: 862753 - RNA, 19 nt, Homo sapiens
  misc_RNA (1)...(19): siRNA sense strand
ccaucacgccaaugacuga

SEQ ID NO: 862754 - RNA, 19 nt, Homo sapiens
  misc_RNA (1)...(19): siRNA sense strand
aagaacagggagugaagaa

SEQ ID NO: 862755 - RNA, 19 nt, Homo sapiens
  misc_RNA (1)...(19): siRNA sense strand
gagcagugggcaguaccua

SEQ ID NO: 862756 - RNA, 19 nt, Homo sapiens
  misc_RNA (1)...(19): siRNA sense strand
gaaacuucagggucuugug

SEQ ID NO: 862757 - RNA, 19 nt, Homo sapiens
  misc_RNA (1)...(19): siRNA sense strand
uucaguaauuggucaguau

SEQ ID NO: 862758 - RNA, 19 nt, Homo sapiens
  misc_RNA (1)...(19): siRNA sense strand
cugcaaccaucacgccaau

SEQ ID NO: 862759 - RNA, 19 nt, Homo sapiens
  misc_RNA (1)...(19): siRNA sense strand
uuucaguaauuggucagua

SEQ ID NO: 862760 - RNA, 19 nt, Homo sapiens
  misc_RNA (1)...(19): siRNA sense strand
gaacaaaaggacuucucuu

SEQ ID NO: 862761 - RNA, 19 nt, Homo sapiens
  misc_RNA (1)...(19): siRNA sense strand
acaugcagcagaaauagga

SEQ ID NO: 862762 - RNA, 19 nt, Homo sapiens
  misc_RNA (1)...(19): siRNA sense strand
auccagagauuuaucaacu

SEQ ID NO: 862763 - RNA, 19 nt, Homo sapiens
  misc_RNA (1)...(19): siRNA sense strand
cagugggcaguaccuauaa

SEQ ID NO: 862764 - RNA, 19 nt, Homo sapiens
  misc_RNA (1)...(19): siRNA sense strand
gugauacagaucucuuaga

SEQ ID NO: 862765 - RNA, 19 nt, Homo sapiens
  misc_RNA (1)...(19): siRNA sense strand
uccagagauuuaucaacuu

SEQ ID NO: 862766 - RNA, 19 nt, Homo sapiens
  misc_RNA (1)...(19): siRNA sense strand
uaacauccaugauuuggua

SEQ ID NO: 862767 - RNA, 19 nt, Homo sapiens
  misc_RNA (1)...(19): siRNA sense strand
gagccgagcugaucgagaa

SEQ ID NO: 862768 - RNA, 19 nt, Homo sapiens
  misc_RNA (1)...(19): siRNA sense strand
gcgaagggauggacauaaa

SEQ ID NO: 862769 - RNA, 19 nt, Homo sapiens
  misc_RNA (1)...(19): siRNA sense strand
caaauuaggagcucucuuu

SEQ ID NO: 862770 - RNA, 19 nt, Homo sapiens
  misc_RNA (1)...(19): siRNA sense strand
gaaauuguccauauucaga

SEQ ID NO: 862771 - RNA, 19 nt, Homo sapiens
  misc_RNA (1)...(19): siRNA sense strand
gcacucugcucaugaacaa

SEQ ID NO: 862772 - RNA, 19 nt, Homo sapiens
  misc_RNA (1)...(19): siRNA sense strand
cauucgaucuagcaaauua

SEQ ID NO: 862773 - RNA, 19 nt, Homo sapiens
  misc_RNA (1)...(19): siRNA sense strand
caaagcaguucuagaggaa

SEQ ID NO: 862774 - RNA, 19 nt, Homo sapiens
  misc_RNA (1)...(19): siRNA sense strand
gaaauggagccagaagaua

SEQ ID NO: 862775 - RNA, 19 nt, Homo sapiens
  misc_RNA (1)...(19): siRNA sense strand
ggauggacauaaacgaauu

SEQ ID NO: 862776 - RNA, 19 nt, Homo sapiens
  misc_RNA (1)...(19): siRNA sense strand
ggagaugauuggugaggaa

SEQ ID NO: 862777 - RNA, 19 nt, Homo sapiens
  misc_RNA (1)...(19): siRNA sense strand
gaaugcagaugccuguuuc

SEQ ID NO: 862778 - RNA, 19 nt, Homo sapiens
  misc_RNA (1)...(19): siRNA sense strand
aaauggagccagaagauaa

SEQ ID NO: 862779 - RNA, 19 nt, Homo sapiens
  misc_RNA (1)...(19): siRNA sense strand
cagaagauaagggacauua

SEQ ID NO: 862780 - RNA, 19 nt, Homo sapiens
  misc_RNA (1)...(19): siRNA sense strand
gaucgagaauguccuagag

SEQ ID NO: 862781 - RNA, 19 nt, Homo sapiens
  misc_RNA (1)...(19): siRNA sense strand
gagcauuucucagccaugu

SEQ ID NO: 862782 - RNA, 19 nt, Homo sapiens
  misc_RNA (1)...(19): siRNA sense strand
gauguucgaugcccgcaau

SEQ ID NO: 862783 - RNA, 19 nt, Homo sapiens
  misc_RNA (1)...(19): siRNA sense strand
caagauguccaccaaggaa

SEQ ID NO: 862784 - RNA, 19 nt, Homo sapiens
  misc_RNA (1)...(19): siRNA sense strand
gcgugaaauuguccauauu

SEQ ID NO: 862785 - RNA, 19 nt, Homo sapiens
  misc_RNA (1)...(19): siRNA sense strand
caacaacacggccauccaa

SEQ ID NO: 862786 - RNA, 19 nt, Homo sapiens
  misc_RNA (1)...(19): siRNA sense strand
uaccaacaauuucaagaug

SEQ ID NO: 862787 - RNA, 19 nt, Homo sapiens
  misc_RNA (1)...(19): siRNA sense strand
acaacgcgguucugucuau

SEQ ID NO: 862788 - RNA, 19 nt, Homo sapiens
  misc_RNA (1)...(19): siRNA sense strand
gaugggcacucugcucaug

SEQ ID NO: 862789 - RNA, 19 nt, Homo sapiens
  misc_RNA (1)...(19): siRNA sense strand
cuaguguccuugaccauga

SEQ ID NO: 862790 - RNA, 19 nt, Homo sapiens
  misc_RNA (1)...(19): siRNA sense strand
auuaggagcucucuuucaa

SEQ ID NO: 862791 - RNA, 19 nt, Homo sapiens
  misc_RNA (1)...(19): siRNA sense strand
gccaaguucugggagauga

SEQ ID NO: 862792 - RNA, 19 nt, Homo sapiens
  misc_RNA (1)...(19): siRNA sense strand
gaucucaaccaccuagugu

SEQ ID NO: 862793 - RNA, 19 nt, Homo sapiens
  misc_RNA (1)...(19): siRNA sense strand
uggaguggauucccaacaa

SEQ ID NO: 862794 - RNA, 19 nt, Homo sapiens
  misc_RNA (1)...(19): siRNA sense strand
gcaagauguccaccaagga

SEQ ID NO: 862795 - RNA, 19 nt, Homo sapiens
  misc_RNA (1)...(19): siRNA sense strand
caacacggccauccaagag

SEQ ID NO: 862796 - RNA, 19 nt, Homo sapiens
  misc_RNA (1)...(19): siRNA sense strand
guaccaacaauuucaagau

SEQ ID NO: 862797 - RNA, 19 nt, Homo sapiens
  misc_RNA (1)...(19): siRNA sense strand
gcauuucucagccauguuc

SEQ ID NO: 862798 - RNA, 19 nt, Homo sapiens
  misc_RNA (1)...(19): siRNA sense strand
gagcucacccagcagaugu

SEQ ID NO: 862799 - RNA, 19 nt, Homo sapiens
  misc_RNA (1)...(19): siRNA sense strand
gagccaaguucugggagau

SEQ ID NO: 862800 - RNA, 19 nt, Homo sapiens
  misc_RNA (1)...(19): siRNA sense strand
aagcaguucuagaggaaga

SEQ ID NO: 862801 - RNA, 19 nt, Homo sapiens
  misc_RNA (1)...(19): siRNA sense strand
gauggacauaaacgaauuu

SEQ ID NO: 862802 - RNA, 19 nt, Homo sapiens
  misc_RNA (1)...(19): siRNA sense strand
ggaacacgggaucgacuug

SEQ ID NO: 862803 - RNA, 19 nt, Homo sapiens
  misc_RNA (1)...(19): siRNA sense strand
ggaguggauucccaacaac

SEQ ID NO: 862804 - RNA, 19 nt, Homo sapiens
  misc_RNA (1)...(19): siRNA sense strand
ggaaguggaccagcaacug

SEQ ID NO: 862805 - RNA, 19 nt, Homo sapiens
  misc_RNA (1)...(19): siRNA sense strand
ucaaccaccuaguguccuu

SEQ ID NO: 862806 - RNA, 19 nt, Homo sapiens
  misc_RNA (1)...(19): siRNA sense strand
ucacggaggaggcagaaau

SEQ ID NO: 862807 - RNA, 19 nt, Homo sapiens
  misc_RNA (1)...(19): siRNA sense strand
aauagggucucugagcauu

SEQ ID NO: 862808 - RNA, 19 nt, Homo sapiens
  misc_RNA (1)...(19): siRNA sense strand
ggcaacaacugggccaaag

SEQ ID NO: 862809 - RNA, 19 nt, Homo sapiens
  misc_RNA (1)...(19): siRNA sense strand
agaaauggagccagaagau

SEQ ID NO: 862810 - RNA, 19 nt, Homo sapiens
  misc_RNA (1)...(19): siRNA sense strand
ugacgacacccaccuaugg

SEQ ID NO: 862811 - RNA, 19 nt, Homo sapiens
  misc_RNA (1)...(19): siRNA sense strand
uccaccagcugauugagaa

SEQ ID NO: 862812 - RNA, 19 nt, Homo sapiens
  misc_RNA (1)...(19): siRNA sense strand
cuacaacgcgguucugucu

SEQ ID NO: 862813 - RNA, 19 nt, Homo sapiens
  misc_RNA (1)...(19): siRNA sense strand
gcagaaauggagccagaag

SEQ ID NO: 862814 - RNA, 19 nt, Homo sapiens
  misc_RNA (1)...(19): siRNA sense strand
ucaagaugccaaagcaguu

SEQ ID NO: 862815 - RNA, 19 nt, Homo sapiens
  misc_RNA (1)...(19): siRNA sense strand
ccagaucggagccaaguuc

SEQ ID NO: 862816 - RNA, 19 nt, Homo sapiens
  misc_RNA (1)...(19): siRNA sense strand
agaaugcagaugccuguuu

SEQ ID NO: 862817 - RNA, 19 nt, Homo sapiens
  misc_RNA (1)...(19): siRNA sense strand
cggaccggaucaugaauuc

SEQ ID NO: 862818 - RNA, 19 nt, Homo sapiens
  misc_RNA (1)...(19): siRNA sense strand
acacggccauccaagagau

SEQ ID NO: 862819 - RNA, 19 nt, Homo sapiens
  misc_RNA (1)...(19): siRNA sense strand
caaggaaguggaccagcaa

SEQ ID NO: 862820 - RNA, 19 nt, Homo sapiens
  misc_RNA (1)...(19): siRNA sense strand
ggagagaaucagcguguac

SEQ ID NO: 862821 - RNA, 19 nt, Homo sapiens
  misc_RNA (1)...(19): siRNA sense strand
gcugaucgagaauguccua

SEQ ID NO: 862822 - RNA, 19 nt, Homo sapiens
  misc_RNA (1)...(19): siRNA sense strand
gggauggacauaaacgaau

SEQ ID NO: 862823 - RNA, 19 nt, Homo sapiens
  misc_RNA (1)...(19): siRNA sense strand
cagcgaagggauggacaua

SEQ ID NO: 862824 - RNA, 19 nt, Homo sapiens
  misc_RNA (1)...(19): siRNA sense strand
uagggucucugagcauuuc

SEQ ID NO: 862825 - RNA, 19 nt, Homo sapiens
  misc_RNA (1)...(19): siRNA sense strand
agcauucgaucuagcaaau

SEQ ID NO: 862826 - RNA, 19 nt, Homo sapiens
  misc_RNA (1)...(19): siRNA sense strand
agaagauaagggacauuaa

SEQ ID NO: 862827 - RNA, 19 nt, Homo sapiens
  misc_RNA (1)...(19): siRNA sense strand
gagaaucagcguguacuac

SEQ ID NO: 862828 - RNA, 19 nt, Homo sapiens
  misc_RNA (1)...(19): siRNA sense strand
cgccugcacuucuuuaugc

SEQ ID NO: 862829 - RNA, 19 nt, Homo sapiens
  misc_RNA (1)...(19): siRNA sense strand
ccgagcugaucgagaaugu

SEQ ID NO: 862830 - RNA, 19 nt, Homo sapiens
  misc_RNA (1)...(19): siRNA sense strand
gaagggauggacauaaacg

SEQ ID NO: 862831 - RNA, 19 nt, Homo sapiens
  misc_RNA (1)...(19): siRNA sense strand
gcucaugaacaagauuaga

SEQ ID NO: 862832 - RNA, 19 nt, Homo sapiens
  misc_RNA (1)...(19): siRNA sense strand
cagaaauggagccagaaga

SEQ ID NO: 862833 - RNA, 19 nt, Homo sapiens
  misc_RNA (1)...(19): siRNA sense strand
cgugaaauuguccauauuc

SEQ ID NO: 862834 - RNA, 19 nt, Homo sapiens
  misc_RNA (1)...(19): siRNA sense strand
gcaacaacacggccaucca

SEQ ID NO: 862835 - RNA, 19 nt, Homo sapiens
  misc_RNA (1)...(19): siRNA sense strand
caaguucugggagaugauu

SEQ ID NO: 862836 - RNA, 19 nt, Homo sapiens
  misc_RNA (1)...(19): siRNA sense strand
ucaugaacaagauuagaga

SEQ ID NO: 862837 - RNA, 19 nt, Homo sapiens
  misc_RNA (1)...(19): siRNA sense strand
caagaugccaaagcaguuc

SEQ ID NO: 862838 - RNA, 19 nt, Homo sapiens
  misc_RNA (1)...(19): siRNA sense strand
uauccgaguaccaacaauu

SEQ ID NO: 862839 - RNA, 19 nt, Homo sapiens
  misc_RNA (1)...(19): siRNA sense strand
caacgcgguucugucuauc

SEQ ID NO: 862840 - RNA, 19 nt, Homo sapiens
  misc_RNA (1)...(19): siRNA sense strand
gcaagcuggcggugaacau

SEQ ID NO: 862841 - RNA, 19 nt, Homo sapiens
  misc_RNA (1)...(19): siRNA sense strand
ccgaguaccaacaauuuca

SEQ ID NO: 862842 - RNA, 19 nt, Homo sapiens
  misc_RNA (1)...(19): siRNA sense strand
ugggcacucugcucaugaa

SEQ ID NO: 862843 - RNA, 19 nt, Homo sapiens
  misc_RNA (1)...(19): siRNA sense strand
gccagaagauaagggacau

SEQ ID NO: 862844 - RNA, 19 nt, Homo sapiens
  misc_RNA (1)...(19): siRNA sense strand
ugccaaagcaguucuagag

SEQ ID NO: 862845 - RNA, 19 nt, Homo sapiens
  misc_RNA (1)...(19): siRNA sense strand
acaacacggccauccaaga

SEQ ID NO: 862846 - RNA, 19 nt, Homo sapiens
  misc_RNA (1)...(19): siRNA sense strand
uggagagaaucagcgugua

SEQ ID NO: 862847 - RNA, 19 nt, Homo sapiens
  misc_RNA (1)...(19): siRNA sense strand
ggaucucaaccaccuagug

SEQ ID NO: 862848 - RNA, 19 nt, Homo sapiens
  misc_RNA (1)...(19): siRNA sense strand
ucuuucaacccgacaguuu

SEQ ID NO: 862849 - RNA, 19 nt, Homo sapiens
  misc_RNA (1)...(19): siRNA sense strand
gaugauuggugaggaacac

SEQ ID NO: 862850 - RNA, 19 nt, Homo sapiens
  misc_RNA (1)...(19): siRNA sense strand
ccaccuucauuggcaacaa

SEQ ID NO: 862851 - RNA, 19 nt, Homo sapiens
  misc_RNA (1)...(19): siRNA sense strand
gaagacaucuacagguuuc

SEQ ID NO: 862852 - RNA, 19 nt, Homo sapiens
  misc_RNA (1)...(19): siRNA sense strand
gcaaagucagccucaauua

SEQ ID NO: 862853 - RNA, 19 nt, Homo sapiens
  misc_RNA (1)...(19): siRNA sense strand
ggacacgggaacaucauua

SEQ ID NO: 862854 - RNA, 19 nt, Homo sapiens
  misc_RNA (1)...(19): siRNA sense strand
caaguccucuaccgaauga

SEQ ID NO: 862855 - RNA, 19 nt, Homo sapiens
  misc_RNA (1)...(19): siRNA sense strand
aaagucagccucaauuauu

SEQ ID NO: 862856 - RNA, 19 nt, Homo sapiens
  misc_RNA (1)...(19): siRNA sense strand
gaaacuaugacucuuggaa

SEQ ID NO: 862857 - RNA, 19 nt, Homo sapiens
  misc_RNA (1)...(19): siRNA sense strand
ucacuuuccucgagacauu

SEQ ID NO: 862858 - RNA, 19 nt, Homo sapiens
  misc_RNA (1)...(19): siRNA sense strand
ggacacagcaaugagauga

SEQ ID NO: 862859 - RNA, 19 nt, Homo sapiens
  misc_RNA (1)...(19): siRNA sense strand
caacaugcagcuacaauuc

SEQ ID NO: 862860 - RNA, 19 nt, Homo sapiens
  misc_RNA (1)...(19): siRNA sense strand
ggacccaacagcuggauuu

SEQ ID NO: 862861 - RNA, 19 nt, Homo sapiens
  misc_RNA (1)...(19): siRNA sense strand
ccaaagcauggacgauuua

SEQ ID NO: 862862 - RNA, 19 nt, Homo sapiens
  misc_RNA (1)...(19): siRNA sense strand
ggaagacaucuacagguuu

SEQ ID NO: 862863 - RNA, 19 nt, Homo sapiens
  misc_RNA (1)...(19): siRNA sense strand
caaagucagccucaauuau

SEQ ID NO: 862864 - RNA, 19 nt, Homo sapiens
  misc_RNA (1)...(19): siRNA sense strand
agagggagcucaaccaagu

SEQ ID NO: 862865 - RNA, 19 nt, Homo sapiens
  misc_RNA (1)...(19): siRNA sense strand
gcaggcaccuucuggacau

SEQ ID NO: 862866 - RNA, 19 nt, Homo sapiens
  misc_RNA (1)...(19): siRNA sense strand
gcaacaugcagcuacaauu

SEQ ID NO: 862867 - RNA, 19 nt, Homo sapiens
  misc_RNA (1)...(19): siRNA sense strand
gcagaaggcagccacuaug

SEQ ID NO: 862868 - RNA, 19 nt, Homo sapiens
  misc_RNA (1)...(19): siRNA sense strand
ggaaacaggagucacaaag

SEQ ID NO: 862869 - RNA, 19 nt, Homo sapiens
  misc_RNA (1)...(19): siRNA sense strand
ccagagaauccacaugaaa

SEQ ID NO: 862870 - RNA, 19 nt, Homo sapiens
  misc_RNA (1)...(19): siRNA sense strand
ggaacaucauuacaagaca

SEQ ID NO: 862871 - RNA, 19 nt, Homo sapiens
  misc_RNA (1)...(19): siRNA sense strand
gcccagagaauccacauga

SEQ ID NO: 862872 - RNA, 19 nt, Homo sapiens
  misc_RNA (1)...(19): siRNA sense strand
aggaagacaucuacagguu

SEQ ID NO: 862873 - RNA, 19 nt, Homo sapiens
  misc_RNA (1)...(19): siRNA sense strand
gcccagaagcuucguuuga

SEQ ID NO: 862874 - RNA, 19 nt, Homo sapiens
  misc_RNA (1)...(19): siRNA sense strand
gagcaaagucagccucaau

SEQ ID NO: 862875 - RNA, 19 nt, Homo sapiens
  misc_RNA (1)...(19): siRNA sense strand
gaugagcaguccaaagcau

SEQ ID NO: 862876 - RNA, 19 nt, Homo sapiens
  misc_RNA (1)...(19): siRNA sense strand
cccagaagcuucguuugaa

SEQ ID NO: 862877 - RNA, 19 nt, Homo sapiens
  misc_RNA (1)...(19): siRNA sense strand
aagucagccucaauuauuu

SEQ ID NO: 862878 - RNA, 19 nt, Homo sapiens
  misc_RNA (1)...(19): siRNA sense strand
gcacaauccaaucaacaug

SEQ ID NO: 862879 - RNA, 19 nt, Homo sapiens
  misc_RNA (1)...(19): siRNA sense strand
aaacaggagucacaaagcu

SEQ ID NO: 862880 - RNA, 19 nt, Homo sapiens
  misc_RNA (1)...(19): siRNA sense strand
gcagacacacaauccagaa

SEQ ID NO: 862881 - RNA, 19 nt, Homo sapiens
  misc_RNA (1)...(19): siRNA sense strand
cugcagagcuggccuuguc

SEQ ID NO: 862882 - RNA, 19 nt, Homo sapiens
  misc_RNA (1)...(19): siRNA sense strand
ggauuuccauugcaaacuc

SEQ ID NO: 862883 - RNA, 19 nt, Homo sapiens
  misc_RNA (1)...(19): siRNA sense strand
cagagaauccacaugaaau

SEQ ID NO: 862884 - RNA, 19 nt, Homo sapiens
  misc_RNA (1)...(19): siRNA sense strand
aaacuaugacucuuggaaa

SEQ ID NO: 862885 - RNA, 19 nt, Homo sapiens
  misc_RNA (1)...(19): siRNA sense strand
ccaggugauuccucaacuu

SEQ ID NO: 862886 - RNA, 19 nt, Homo sapiens
  misc_RNA (1)...(19): siRNA sense strand
caagagggagcucaaccaa

SEQ ID NO: 862887 - RNA, 19 nt, Homo sapiens
  misc_RNA (1)...(19): siRNA sense strand
gcagcuacaauuccagaga

SEQ ID NO: 862888 - RNA, 19 nt, Homo sapiens
  misc_RNA (1)...(19): siRNA sense strand
ucuacagguuucucaaaga

SEQ ID NO: 862889 - RNA, 19 nt, Homo sapiens
  misc_RNA (1)...(19): siRNA sense strand
gaaacaggagucacaaagc

SEQ ID NO: 862890 - RNA, 19 nt, Homo sapiens
  misc_RNA (1)...(19): siRNA sense strand
gacacacaauccagaaguc

SEQ ID NO: 862891 - RNA, 19 nt, Homo sapiens
  misc_RNA (1)...(19): siRNA sense strand
acagguuucucaaagacaa

SEQ ID NO: 862892 - RNA, 19 nt, Homo sapiens
  misc_RNA (1)...(19): siRNA sense strand
caucuacagguuucucaaa

SEQ ID NO: 862893 - RNA, 19 nt, Homo sapiens
  misc_RNA (1)...(19): siRNA sense strand
ccacaugaaaucgugcuuu

SEQ ID NO: 862894 - RNA, 19 nt, Homo sapiens
  misc_RNA (1)...(19): siRNA sense strand
cgagacuuguacaggauga

SEQ ID NO: 862895 - RNA, 19 nt, Homo sapiens
  misc_RNA (1)...(19): siRNA sense strand
gaugugaaccgagacuugu

SEQ ID NO: 862896 - RNA, 19 nt, Homo sapiens
  misc_RNA (1)...(19): siRNA sense strand
gcuggaaacuaugacucuu

SEQ ID NO: 862897 - RNA, 19 nt, Homo sapiens
  misc_RNA (1)...(19): siRNA sense strand
gccaacaacgggaggaaga

SEQ ID NO: 862898 - RNA, 19 nt, Homo sapiens
  misc_RNA (1)...(19): siRNA sense strand
ggagcgguccauacugaga

SEQ ID NO: 862899 - RNA, 19 nt, Homo sapiens
  misc_RNA (1)...(19): siRNA sense strand
gggaacaucauuacaagac

SEQ ID NO: 862900 - RNA, 19 nt, Homo sapiens
  misc_RNA (1)...(19): siRNA sense strand
ccgaagccauccagauugg

SEQ ID NO: 862901 - RNA, 19 nt, Homo sapiens
  misc_RNA (1)...(19): siRNA sense strand
cacaauccaaucaacauga

SEQ ID NO: 862902 - RNA, 19 nt, Homo sapiens
  misc_RNA (1)...(19): siRNA sense strand
cgauuuaccgcccagaaga

SEQ ID NO: 862903 - RNA, 19 nt, Homo sapiens
  misc_RNA (1)...(19): siRNA sense strand
ccagcaacaugcagcuaca

SEQ ID NO: 862904 - RNA, 19 nt, Homo sapiens
  misc_RNA (1)...(19): siRNA sense strand
cuacagguuucucaaagac

SEQ ID NO: 862905 - RNA, 19 nt, Homo sapiens
  misc_RNA (1)...(19): siRNA sense strand
cccagagaauccacaugaa

SEQ ID NO: 862906 - RNA, 19 nt, Homo sapiens
  misc_RNA (1)...(19): siRNA sense strand
agucagccucaauuauuua

SEQ ID NO: 862907 - RNA, 19 nt, Homo sapiens
  misc_RNA (1)...(19): siRNA sense strand
cagaaggcagccacuaugu

SEQ ID NO: 862908 - RNA, 19 nt, Homo sapiens
  misc_RNA (1)...(19): siRNA sense strand
caggugauuccucaacuug

SEQ ID NO: 862909 - RNA, 19 nt, Homo sapiens
  misc_RNA (1)...(19): siRNA sense strand
cagccucaauuauuuacca

SEQ ID NO: 862910 - RNA, 19 nt, Homo sapiens
  misc_RNA (1)...(19): siRNA sense strand
uugaaagucucccucacau

SEQ ID NO: 862911 - RNA, 19 nt, Homo sapiens
  misc_RNA (1)...(19): siRNA sense strand
guugaaagucucccucaca

SEQ ID NO: 862912 - RNA, 19 nt, Homo sapiens
  misc_RNA (1)...(19): siRNA sense strand
ccaaguccucuaccgaaug

SEQ ID NO: 862913 - RNA, 19 nt, Homo sapiens
  misc_RNA (1)...(19): siRNA sense strand
uugcccagcuggugaagga

SEQ ID NO: 862914 - RNA, 19 nt, Homo sapiens
  misc_RNA (1)...(19): siRNA sense strand
cacgggaacaucauuacaa

SEQ ID NO: 862915 - RNA, 19 nt, Homo sapiens
  misc_RNA (1)...(19): siRNA sense strand
caucggcaacagcaacaaa

SEQ ID NO: 862916 - RNA, 19 nt, Homo sapiens
  misc_RNA (1)...(19): siRNA sense strand
uggaagaagagcaaaguca

SEQ ID NO: 862917 - RNA, 19 nt, Homo sapiens
  misc_RNA (1)...(19): siRNA sense strand
gcaacaaaaugucuaucag

SEQ ID NO: 862918 - RNA, 19 nt, Homo sapiens
  misc_RNA (1)...(19): siRNA sense strand
ggugaaggaaugccaagca

SEQ ID NO: 862919 - RNA, 19 nt, Homo sapiens
  misc_RNA (1)...(19): siRNA sense strand
ccacgccaccucccuucaa

SEQ ID NO: 862920 - RNA, 19 nt, Homo sapiens
  misc_RNA (1)...(19): siRNA sense strand
gaaugccaagcacccaaga

SEQ ID NO: 862921 - RNA, 19 nt, Homo sapiens
  misc_RNA (1)...(19): siRNA sense strand
gaaugaggacagcaaaaga

SEQ ID NO: 862922 - RNA, 19 nt, Homo sapiens
  misc_RNA (1)...(19): siRNA sense strand
cuccgaagccauccagauu

SEQ ID NO: 862923 - RNA, 19 nt, Homo sapiens
  misc_RNA (1)...(19): siRNA sense strand
cagcacaauccaaucaaca

SEQ ID NO: 862924 - RNA, 19 nt, Homo sapiens
  misc_RNA (1)...(19): siRNA sense strand
ccagcacaauccaaucaac

SEQ ID NO: 862925 - RNA, 19 nt, Homo sapiens
  misc_RNA (1)...(19): siRNA sense strand
gauuuaccgcccagaagau

SEQ ID NO: 862926 - RNA, 19 nt, Homo sapiens
  misc_RNA (1)...(19): siRNA sense strand
gcucaaccaaguccucuac

SEQ ID NO: 862927 - RNA, 19 nt, Homo sapiens
  misc_RNA (1)...(19): siRNA sense strand
acgggaacaucauuacaag

SEQ ID NO: 862928 - RNA, 19 nt, Homo sapiens
  misc_RNA (1)...(19): siRNA sense strand
gaaacugccucaucuacga

SEQ ID NO: 862929 - RNA, 19 nt, Homo sapiens
  misc_RNA (1)...(19): siRNA sense strand
caaguuggauggcuuuguu

SEQ ID NO: 862930 - RNA, 19 nt, Homo sapiens
  misc_RNA (1)...(19): siRNA sense strand
gcaacgggcugggcaucua

SEQ ID NO: 862931 - RNA, 19 nt, Homo sapiens
  misc_RNA (1)...(19): siRNA sense strand
uggcagaacugaacacguu

SEQ ID NO: 862932 - RNA, 19 nt, Homo sapiens
  misc_RNA (1)...(19): siRNA sense strand
gaggaucgccuuccaguuc

SEQ ID NO: 862933 - RNA, 19 nt, Homo sapiens
  misc_RNA (1)...(19): siRNA sense strand
gccggcaguuucuaaagua

SEQ ID NO: 862934 - RNA, 19 nt, Homo sapiens
  misc_RNA (1)...(19): siRNA sense strand
ggacaaguuggauggcuuu

SEQ ID NO: 862935 - RNA, 19 nt, Homo sapiens
  misc_RNA (1)...(19): siRNA sense strand
gguauuguggccaguauuu

SEQ ID NO: 862936 - RNA, 19 nt, Homo sapiens
  misc_RNA (1)...(19): siRNA sense strand
cgagcuguuucucaucuuu

SEQ ID NO: 862937 - RNA, 19 nt, Homo sapiens
  misc_RNA (1)...(19): siRNA sense strand
gagguauuguggccaguau

SEQ ID NO: 862938 - RNA, 19 nt, Homo sapiens
  misc_RNA (1)...(19): siRNA sense strand
gaucuacgacuucauggau

SEQ ID NO: 862939 - RNA, 19 nt, Homo sapiens
  misc_RNA (1)...(19): siRNA sense strand
gagcuguuucucaucuuua

SEQ ID NO: 862940 - RNA, 19 nt, Homo sapiens
  misc_RNA (1)...(19): siRNA sense strand
ccagaccucauccagcuua

SEQ ID NO: 862941 - RNA, 19 nt, Homo sapiens
  misc_RNA (1)...(19): siRNA sense strand
ggcaguuucuaaaguaugu

SEQ ID NO: 862942 - RNA, 19 nt, Homo sapiens
  misc_RNA (1)...(19): siRNA sense strand
ggcugucccugaagacgua

SEQ ID NO: 862943 - RNA, 19 nt, Homo sapiens
  misc_RNA (1)...(19): siRNA sense strand
gcaccgaguccgaggucua

SEQ ID NO: 862944 - RNA, 19 nt, Homo sapiens
  misc_RNA (1)...(19): siRNA sense strand
gaacauuccgaccuacaag

SEQ ID NO: 862945 - RNA, 19 nt, Homo sapiens
  misc_RNA (1)...(19): siRNA sense strand
gacaucacauugagguaca

SEQ ID NO: 862946 - RNA, 19 nt, Homo sapiens
  misc_RNA (1)...(19): siRNA sense strand
gaguggcugucccugaaga

SEQ ID NO: 862947 - RNA, 19 nt, Homo sapiens
  misc_RNA (1)...(19): siRNA sense strand
uggcagaaguggcagaaca

SEQ ID NO: 862948 - RNA, 19 nt, Homo sapiens
  misc_RNA (1)...(19): siRNA sense strand
ccuguacgcuuggcuaugu

SEQ ID NO: 862949 - RNA, 19 nt, Homo sapiens
  misc_RNA (1)...(19): siRNA sense strand
agaaguggcagaacaagga

SEQ ID NO: 862950 - RNA, 19 nt, Homo sapiens
  misc_RNA (1)...(19): siRNA sense strand
gcaccaacaccuucuucug

SEQ ID NO: 862951 - RNA, 19 nt, Homo sapiens
  misc_RNA (1)...(19): siRNA sense strand
caaugagacugaccccuuu

SEQ ID NO: 862952 - RNA, 19 nt, Homo sapiens
  misc_RNA (1)...(19): siRNA sense strand
cagggccucuggaacauuc

SEQ ID NO: 862953 - RNA, 19 nt, Homo sapiens
  misc_RNA (1)...(19): siRNA sense strand
ugagaucuacgacuucaug

SEQ ID NO: 862954 - RNA, 19 nt, Homo sapiens
  misc_RNA (1)...(19): siRNA sense strand
caucuacgacccagacaau

SEQ ID NO: 862955 - RNA, 19 nt, Homo sapiens
  misc_RNA (1)...(19): siRNA sense strand
cacaacaucugggacaagu

SEQ ID NO: 862956 - RNA, 19 nt, Homo sapiens
  misc_RNA (1)...(19): siRNA sense strand
gagacccgguggcagaagu

SEQ ID NO: 862957 - RNA, 19 nt, Homo sapiens
  misc_RNA (1)...(19): siRNA sense strand
ucacauugagguacaagga

SEQ ID NO: 862958 - RNA, 19 nt, Homo sapiens
  misc_RNA (1)...(19): siRNA sense strand
uugaguggcugucccugaa

SEQ ID NO: 862959 - RNA, 19 nt, Homo sapiens
  misc_RNA (1)...(19): siRNA sense strand
ucuacgagcuguuucucau

SEQ ID NO: 862960 - RNA, 19 nt, Homo sapiens
  misc_RNA (1)...(19): siRNA sense strand
gagcaccaacuccaaacug

SEQ ID NO: 862961 - RNA, 19 nt, Homo sapiens
  misc_RNA (1)...(19): siRNA sense strand
ugaaguuugugcuguggau

SEQ ID NO: 862962 - RNA, 19 nt, Homo sapiens
  misc_RNA (1)...(19): siRNA sense strand
cguucuaccugaaguuugu

SEQ ID NO: 862963 - RNA, 19 nt, Homo sapiens
  misc_RNA (1)...(19): siRNA sense strand
ucucaucuuuauacucuuc

SEQ ID NO: 862964 - RNA, 19 nt, Homo sapiens
  misc_RNA (1)...(19): siRNA sense strand
cuggcgagcccacaccuua

SEQ ID NO: 862965 - RNA, 19 nt, Homo sapiens
  misc_RNA (1)...(19): siRNA sense strand
gggaaacugccucaucuac

SEQ ID NO: 862966 - RNA, 19 nt, Homo sapiens
  misc_RNA (1)...(19): siRNA sense strand
ucagcgugauguucgaguu

SEQ ID NO: 862967 - RNA, 19 nt, Homo sapiens
  misc_RNA (1)...(19): siRNA sense strand
caacaccaagagagguauu

SEQ ID NO: 862968 - RNA, 19 nt, Homo sapiens
  misc_RNA (1)...(19): siRNA sense strand
cgugagaucuacgacuuca

SEQ ID NO: 862969 - RNA, 19 nt, Homo sapiens
  misc_RNA (1)...(19): siRNA sense strand
ucuacgacccagacaauga

SEQ ID NO: 862970 - RNA, 19 nt, Homo sapiens
  misc_RNA (1)...(19): siRNA sense strand
gcuaaagacgggccauuuu

SEQ ID NO: 862971 - RNA, 19 nt, Homo sapiens
  misc_RNA (1)...(19): siRNA sense strand
ggagucccacugccagaga

SEQ ID NO: 862972 - RNA, 19 nt, Homo sapiens
  misc_RNA (1)...(19): siRNA sense strand
ugcgugagaucuacgacuu

SEQ ID NO: 862973 - RNA, 19 nt, Homo sapiens
  misc_RNA (1)...(19): siRNA sense strand
uguucgaguuccuggagua

SEQ ID NO: 862974 - RNA, 19 nt, Homo sapiens
  misc_RNA (1)...(19): siRNA sense strand
agcaccaacuccaaacuga

SEQ ID NO: 862975 - RNA, 19 nt, Homo sapiens
  misc_RNA (1)...(19): siRNA sense strand
gaaguggcagaacaaggau

SEQ ID NO: 862976 - RNA, 19 nt, Homo sapiens
  misc_RNA (1)...(19): siRNA sense strand
uacaacaccaagagaggua

SEQ ID NO: 862977 - RNA, 19 nt, Homo sapiens
  misc_RNA (1)...(19): siRNA sense strand
ugacgcugcuggaggaaac

SEQ ID NO: 862978 - RNA, 19 nt, Homo sapiens
  misc_RNA (1)...(19): siRNA sense strand
gaccucauccagcuuacug

SEQ ID NO: 862979 - RNA, 19 nt, Homo sapiens
  misc_RNA (1)...(19): siRNA sense strand
ggcagaaguggcagaacaa

SEQ ID NO: 862980 - RNA, 19 nt, Homo sapiens
  misc_RNA (1)...(19): siRNA sense strand
uacaagggcaagaugaaga

SEQ ID NO: 862981 - RNA, 19 nt, Homo sapiens
  misc_RNA (1)...(19): siRNA sense strand
uggcagggccucuggaaca

SEQ ID NO: 862982 - RNA, 19 nt, Homo sapiens
  misc_RNA (1)...(19): siRNA sense strand
gcgugaguguggucuacga

SEQ ID NO: 862983 - RNA, 19 nt, Homo sapiens
  misc_RNA (1)...(19): siRNA sense strand
uaaccgugcucuucauccu

SEQ ID NO: 862984 - RNA, 19 nt, Homo sapiens
  misc_RNA (1)...(19): siRNA sense strand
ugguggaugugcaugauca

SEQ ID NO: 862985 - RNA, 19 nt, Homo sapiens
  misc_RNA (1)...(19): siRNA sense strand
gcagggccucuggaacauu

SEQ ID NO: 862986 - RNA, 19 nt, Homo sapiens
  misc_RNA (1)...(19): siRNA sense strand
caccuuaaccgugcucuuc

SEQ ID NO: 862987 - RNA, 19 nt, Homo sapiens
  misc_RNA (1)...(19): siRNA sense strand
ggccaugcgugagaucuac

SEQ ID NO: 862988 - RNA, 19 nt, Homo sapiens
  misc_RNA (1)...(19): siRNA sense strand
gaccuacaagggcaagaug

SEQ ID NO: 862989 - RNA, 19 nt, Homo sapiens
  misc_RNA (1)...(19): siRNA sense strand
uacgagcuguuucucaucu

SEQ ID NO: 862990 - RNA, 19 nt, Homo sapiens
  misc_RNA (1)...(19): siRNA sense strand
ccuacaagggcaagaugaa

SEQ ID NO: 862991 - RNA, 19 nt, Homo sapiens
  misc_RNA (1)...(19): siRNA sense strand
ggcagggccucuggaacau

SEQ ID NO: 862992 - RNA, 19 nt, Homo sapiens
  misc_RNA (1)...(19): siRNA sense strand
ggcaucuacugcggcauga

SEQ ID NO: 862993 - RNA, 19 nt, Homo sapiens
  misc_RNA (1)...(19): siRNA sense strand
gcuguuucucaucuuuaua

SEQ ID NO: 862994 - RNA, 19 nt, Homo sapiens
  misc_RNA (1)...(19): siRNA sense strand
gcagagaccuuuccagaug

SEQ ID NO: 862995 - RNA, 19 nt, Homo sapiens
  misc_RNA (1)...(19): siRNA sense strand
gaaaacaccuacaugaaua

SEQ ID NO: 862996 - RNA, 19 nt, Homo sapiens
  misc_RNA (1)...(19): siRNA sense strand
caacauuugucguguauga

SEQ ID NO: 862997 - RNA, 19 nt, Homo sapiens
  misc_RNA (1)...(19): siRNA sense strand
gccaugaggucugcaauua

SEQ ID NO: 862998 - RNA, 19 nt, Homo sapiens
  misc_RNA (1)...(19): siRNA sense strand
ugaauccgcugaucuacua

SEQ ID NO: 862999 - RNA, 19 nt, Homo sapiens
  misc_RNA (1)...(19): siRNA sense strand
uaggguaucugcuauguuu

SEQ ID NO: 863000 - RNA, 19 nt, Homo sapiens
  misc_RNA (1)...(19): siRNA sense strand
gcauugacaugggcuuuaa

SEQ ID NO: 863001 - RNA, 19 nt, Homo sapiens
  misc_RNA (1)...(19): siRNA sense strand
cuaccaggcuuaugugauu

SEQ ID NO: 863002 - RNA, 19 nt, Homo sapiens
  misc_RNA (1)...(19): siRNA sense strand
gaucacccuuucugcuaua

SEQ ID NO: 863003 - RNA, 19 nt, Homo sapiens
  misc_RNA (1)...(19): siRNA sense strand
gagcuaagguucugauugc

SEQ ID NO: 863004 - RNA, 19 nt, Homo sapiens
  misc_RNA (1)...(19): siRNA sense strand
aggauaagcuaaacccaua

SEQ ID NO: 863005 - RNA, 19 nt, Homo sapiens
  misc_RNA (1)...(19): siRNA sense strand
ggacauccaacacaacauu

SEQ ID NO: 863006 - RNA, 19 nt, Homo sapiens
  misc_RNA (1)...(19): siRNA sense strand
aaacuugccucuucagauc

SEQ ID NO: 863007 - RNA, 19 nt, Homo sapiens
  misc_RNA (1)...(19): siRNA sense strand
gguaauacuguacucauuu

SEQ ID NO: 863008 - RNA, 19 nt, Homo sapiens
  misc_RNA (1)...(19): siRNA sense strand
gauaagcuaaacccauaua

SEQ ID NO: 863009 - RNA, 19 nt, Homo sapiens
  misc_RNA (1)...(19): siRNA sense strand
acacgugccuucaccacua

SEQ ID NO: 863010 - RNA, 19 nt, Homo sapiens
  misc_RNA (1)...(19): siRNA sense strand
gauagguuccuuauuauag

SEQ ID NO: 863011 - RNA, 19 nt, Homo sapiens
  misc_RNA (1)...(19): siRNA sense strand
caaacugggucucaugagu

SEQ ID NO: 863012 - RNA, 19 nt, Homo sapiens
  misc_RNA (1)...(19): siRNA sense strand
ucucuuugcugucuucauu

SEQ ID NO: 863013 - RNA, 19 nt, Homo sapiens
  misc_RNA (1)...(19): siRNA sense strand
ggauuaagaaauuccauga

SEQ ID NO: 863014 - RNA, 19 nt, Homo sapiens
  misc_RNA (1)...(19): siRNA sense strand
gaccucaguccauugcuua

SEQ ID NO: 863015 - RNA, 19 nt, Homo sapiens
  misc_RNA (1)...(19): siRNA sense strand
caacaccagcagcauuuaa

SEQ ID NO: 863016 - RNA, 19 nt, Homo sapiens
  misc_RNA (1)...(19): siRNA sense strand
acuggaggauuaagaaauu

SEQ ID NO: 863017 - RNA, 19 nt, Homo sapiens
  misc_RNA (1)...(19): siRNA sense strand
gcagcucccuggucacaca

SEQ ID NO: 863018 - RNA, 19 nt, Homo sapiens
  misc_RNA (1)...(19): siRNA sense strand
gcauagauagguuccuuau

SEQ ID NO: 863019 - RNA, 19 nt, Homo sapiens
  misc_RNA (1)...(19): siRNA sense strand
ucaguccauugcuuagaua

SEQ ID NO: 863020 - RNA, 19 nt, Homo sapiens
  misc_RNA (1)...(19): siRNA sense strand
cagagaccuuuccagauga

SEQ ID NO: 863021 - RNA, 19 nt, Homo sapiens
  misc_RNA (1)...(19): siRNA sense strand
gcucaucauuagcauagau

SEQ ID NO: 863022 - RNA, 19 nt, Homo sapiens
  misc_RNA (1)...(19): siRNA sense strand
guccauugcuuagauauag

SEQ ID NO: 863023 - RNA, 19 nt, Homo sapiens
  misc_RNA (1)...(19): siRNA sense strand
cuaaacccauauagagcua

SEQ ID NO: 863024 - RNA, 19 nt, Homo sapiens
  misc_RNA (1)...(19): siRNA sense strand
ccacaacaccagcagcauu

SEQ ID NO: 863025 - RNA, 19 nt, Homo sapiens
  misc_RNA (1)...(19): siRNA sense strand
cuugggaacuugguuguuu

SEQ ID NO: 863026 - RNA, 19 nt, Homo sapiens
  misc_RNA (1)...(19): siRNA sense strand
gcccugguaacuauucuua

SEQ ID NO: 863027 - RNA, 19 nt, Homo sapiens
  misc_RNA (1)...(19): siRNA sense strand
caugaggucugcaauuaac

SEQ ID NO: 863028 - RNA, 19 nt, Homo sapiens
  misc_RNA (1)...(19): siRNA sense strand
acaccuacaugaauauuac

SEQ ID NO: 863029 - RNA, 19 nt, Homo sapiens
  misc_RNA (1)...(19): siRNA sense strand
ucacacaaagcgacggaua

SEQ ID NO: 863030 - RNA, 19 nt, Homo sapiens
  misc_RNA (1)...(19): siRNA sense strand
gccuaaguccuucaaguuu

SEQ ID NO: 863031 - RNA, 19 nt, Homo sapiens
  misc_RNA (1)...(19): siRNA sense strand
uagcauagauagguuccuu

SEQ ID NO: 863032 - RNA, 19 nt, Homo sapiens
  misc_RNA (1)...(19): siRNA sense strand
cacaacaccagcagcauuu

SEQ ID NO: 863033 - RNA, 19 nt, Homo sapiens
  misc_RNA (1)...(19): siRNA sense strand
gccuggacaugaugccuaa

SEQ ID NO: 863034 - RNA, 19 nt, Homo sapiens
  misc_RNA (1)...(19): siRNA sense strand
gauauucauucuguuugug

SEQ ID NO: 863035 - RNA, 19 nt, Homo sapiens
  misc_RNA (1)...(19): siRNA sense strand
uaagcuaaacccauauaga

SEQ ID NO: 863036 - RNA, 19 nt, Homo sapiens
  misc_RNA (1)...(19): siRNA sense strand
gccauccugcucaucauua

SEQ ID NO: 863037 - RNA, 19 nt, Homo sapiens
  misc_RNA (1)...(19): siRNA sense strand
ggucuucucggcaguguug

SEQ ID NO: 863038 - RNA, 19 nt, Homo sapiens
  misc_RNA (1)...(19): siRNA sense strand
auacuguacucauuuaugg

SEQ ID NO: 863039 - RNA, 19 nt, Homo sapiens
  misc_RNA (1)...(19): siRNA sense strand
agccuaaacuugccucuuc

SEQ ID NO: 863040 - RNA, 19 nt, Homo sapiens
  misc_RNA (1)...(19): siRNA sense strand
cauugaauccgcugaucua

SEQ ID NO: 863041 - RNA, 19 nt, Homo sapiens
  misc_RNA (1)...(19): siRNA sense strand
uuguuugccucaugguuua

SEQ ID NO: 863042 - RNA, 19 nt, Homo sapiens
  misc_RNA (1)...(19): siRNA sense strand
ccaugaggucugcaauuaa

SEQ ID NO: 863043 - RNA, 19 nt, Homo sapiens
  misc_RNA (1)...(19): siRNA sense strand
ugguaauacuguacucauu

SEQ ID NO: 863044 - RNA, 19 nt, Homo sapiens
  misc_RNA (1)...(19): siRNA sense strand
uuugggaaauucuucugua

SEQ ID NO: 863045 - RNA, 19 nt, Homo sapiens
  misc_RNA (1)...(19): siRNA sense strand
cuuacuacccgauggauuu

SEQ ID NO: 863046 - RNA, 19 nt, Homo sapiens
  misc_RNA (1)...(19): siRNA sense strand
cacccuuucugcuauaaug

SEQ ID NO: 863047 - RNA, 19 nt, Homo sapiens
  misc_RNA (1)...(19): siRNA sense strand
ccuuugcccugguaacuau

SEQ ID NO: 863048 - RNA, 19 nt, Homo sapiens
  misc_RNA (1)...(19): siRNA sense strand
ccuuucugcuauaaugaua

SEQ ID NO: 863049 - RNA, 19 nt, Homo sapiens
  misc_RNA (1)...(19): siRNA sense strand
guuguuugccucaugguuu

SEQ ID NO: 863050 - RNA, 19 nt, Homo sapiens
  misc_RNA (1)...(19): siRNA sense strand
ccuugaggauccauagcua

SEQ ID NO: 863051 - RNA, 19 nt, Homo sapiens
  misc_RNA (1)...(19): siRNA sense strand
uaaacuugccucuucagau

SEQ ID NO: 863052 - RNA, 19 nt, Homo sapiens
  misc_RNA (1)...(19): siRNA sense strand
caacauucaguaagcacuu

SEQ ID NO: 863053 - RNA, 19 nt, Homo sapiens
  misc_RNA (1)...(19): siRNA sense strand
caacacccuucggcacaau

SEQ ID NO: 863054 - RNA, 19 nt, Homo sapiens
  misc_RNA (1)...(19): siRNA sense strand
ugaccucaguccauugcuu

SEQ ID NO: 863055 - RNA, 19 nt, Homo sapiens
  misc_RNA (1)...(19): siRNA sense strand
gugcugaacaugcccuuug

SEQ ID NO: 863056 - RNA, 19 nt, Homo sapiens
  misc_RNA (1)...(19): siRNA sense strand
ucauucuguuugugucuuu

SEQ ID NO: 863057 - RNA, 19 nt, Homo sapiens
  misc_RNA (1)...(19): siRNA sense strand
gaucuacuacuggaggauu

SEQ ID NO: 863058 - RNA, 19 nt, Homo sapiens
  misc_RNA (1)...(19): siRNA sense strand
gacauccaacacaacauuu

SEQ ID NO: 863059 - RNA, 19 nt, Homo sapiens
  misc_RNA (1)...(19): siRNA sense strand
ccauggcucccacugguuu

SEQ ID NO: 863060 - RNA, 19 nt, Homo sapiens
  misc_RNA (1)...(19): siRNA sense strand
aagcuaaacccauauagag

SEQ ID NO: 863061 - RNA, 19 nt, Homo sapiens
  misc_RNA (1)...(19): siRNA sense strand
guagccauccugcucauca

SEQ ID NO: 863062 - RNA, 19 nt, Homo sapiens
  misc_RNA (1)...(19): siRNA sense strand
gagcauugacaugggcuuu

SEQ ID NO: 863063 - RNA, 19 nt, Homo sapiens
  misc_RNA (1)...(19): siRNA sense strand
gcaacuuccuuuuguguag

SEQ ID NO: 863064 - RNA, 19 nt, Homo sapiens
  misc_RNA (1)...(19): siRNA sense strand
ccagaggcaggauaagcua

SEQ ID NO: 863065 - RNA, 19 nt, Homo sapiens
  misc_RNA (1)...(19): siRNA sense strand
ucauuagcauagauagguu

SEQ ID NO: 863066 - RNA, 19 nt, Homo sapiens
  misc_RNA (1)...(19): siRNA sense strand
aaauucuucuguaggguau

SEQ ID NO: 863067 - RNA, 19 nt, Homo sapiens
  misc_RNA (1)...(19): siRNA sense strand
uuguguagcuuuuccuuua

SEQ ID NO: 863068 - RNA, 19 nt, Homo sapiens
  misc_RNA (1)...(19): siRNA sense strand
uacacucccuccaccauuc

SEQ ID NO: 863069 - RNA, 19 nt, Homo sapiens
  misc_RNA (1)...(19): siRNA sense strand
ccuaaguccuucaaguuuu

SEQ ID NO: 863070 - RNA, 19 nt, Homo sapiens
  misc_RNA (1)...(19): siRNA sense strand
gauucucuuugcugucuuc

SEQ ID NO: 863071 - RNA, 19 nt, Homo sapiens
  misc_RNA (1)...(19): siRNA sense strand
ccagaugagcauugacaug

SEQ ID NO: 863072 - RNA, 19 nt, Homo sapiens
  misc_RNA (1)...(19): siRNA sense strand
ucaacacccuucggcacaa

SEQ ID NO: 863073 - RNA, 19 nt, Homo sapiens
  misc_RNA (1)...(19): siRNA sense strand
gccuaaacuugccucuuca

SEQ ID NO: 863074 - RNA, 19 nt, Homo sapiens
  misc_RNA (1)...(19): siRNA sense strand
ccacugguuugaguuccuu

SEQ ID NO: 863075 - RNA, 19 nt, Homo sapiens
  misc_RNA (1)...(19): siRNA sense strand
ugaguuccuugaccgugaa

SEQ ID NO: 863076 - RNA, 19 nt, Homo sapiens
  misc_RNA (1)...(19): siRNA sense strand
agaucacccuuucugcuau

SEQ ID NO: 863077 - RNA, 19 nt, Homo sapiens
  misc_RNA (1)...(19): siRNA sense strand
acauuugucguguaugaaa

SEQ ID NO: 863078 - RNA, 19 nt, Homo sapiens
  misc_RNA (1)...(19): siRNA sense strand
cagcaaacugggucucaug

SEQ ID NO: 863079 - RNA, 19 nt, Homo sapiens
  misc_RNA (1)...(19): siRNA sense strand
ugaaaacaccuacaugaau

SEQ ID NO: 863080 - RNA, 19 nt, Homo sapiens
  misc_RNA (1)...(19): siRNA sense strand
gaguagccauccugcucau

SEQ ID NO: 863081 - RNA, 19 nt, Homo sapiens
  misc_RNA (1)...(19): siRNA sense strand
ggucugcaauuaacauccu

SEQ ID NO: 863082 - RNA, 19 nt, Homo sapiens
  misc_RNA (1)...(19): siRNA sense strand
gaugcuugccuggacauga

SEQ ID NO: 863083 - RNA, 19 nt, Homo sapiens
  misc_RNA (1)...(19): siRNA sense strand
gcauugaauccgcugaucu

SEQ ID NO: 863084 - RNA, 19 nt, Homo sapiens
  misc_RNA (1)...(19): siRNA sense strand
ucucucauuucuuucuuca

SEQ ID NO: 863085 - RNA, 19 nt, Homo sapiens
  misc_RNA (1)...(19): siRNA sense strand
uaccaggcuuaugugauuu

SEQ ID NO: 863086 - RNA, 19 nt, Homo sapiens
  misc_RNA (1)...(19): siRNA sense strand
ggauaagcuaaacccauau

SEQ ID NO: 863087 - RNA, 19 nt, Homo sapiens
  misc_RNA (1)...(19): siRNA sense strand
uguaggguaucugcuaugu

SEQ ID NO: 863088 - RNA, 19 nt, Homo sapiens
  misc_RNA (1)...(19): siRNA sense strand
ucuguaggguaucugcuau

SEQ ID NO: 863089 - RNA, 19 nt, Homo sapiens
  misc_RNA (1)...(19): siRNA sense strand
uaagaaauuccaugaugcu

SEQ ID NO: 863090 - RNA, 19 nt, Homo sapiens
  misc_RNA (1)...(19): siRNA sense strand
auccauagcuacccugaag

SEQ ID NO: 863091 - RNA, 19 nt, Homo sapiens
  misc_RNA (1)...(19): siRNA sense strand
ccauccugcucaucauuag

SEQ ID NO: 863092 - RNA, 19 nt, Homo sapiens
  misc_RNA (1)...(19): siRNA sense strand
cugguuauuugugauagaa

SEQ ID NO: 863093 - RNA, 19 nt, Homo sapiens
  misc_RNA (1)...(19): siRNA sense strand
ugccuaaguccuucaaguu

SEQ ID NO: 863094 - RNA, 19 nt, Homo sapiens
  misc_RNA (1)...(19): siRNA sense strand
gacgagagcuuccgcauuu

SEQ ID NO: 863095 - RNA, 19 nt, Homo sapiens
  misc_RNA (1)...(19): siRNA sense strand
gaaagcagcccaggaacaa

SEQ ID NO: 863096 - RNA, 19 nt, Homo sapiens
  misc_RNA (1)...(19): siRNA sense strand
uaacgccacuuucagaaga

SEQ ID NO: 863097 - RNA, 19 nt, Homo sapiens
  misc_RNA (1)...(19): siRNA sense strand
gcccagagaucauggagau

SEQ ID NO: 863098 - RNA, 19 nt, Homo sapiens
  misc_RNA (1)...(19): siRNA sense strand
cccgaaagaucaagaaguu

SEQ ID NO: 863099 - RNA, 19 nt, Homo sapiens
  misc_RNA (1)...(19): siRNA sense strand
guaaaucugcugaccaaga

SEQ ID NO: 863100 - RNA, 19 nt, Homo sapiens
  misc_RNA (1)...(19): siRNA sense strand
gcucaggcgccaacaagua

SEQ ID NO: 863101 - RNA, 19 nt, Homo sapiens
  misc_RNA (1)...(19): siRNA sense strand
gcaagauccugggaaucaa

SEQ ID NO: 863102 - RNA, 19 nt, Homo sapiens
  misc_RNA (1)...(19): siRNA sense strand
ggagacugccuucuacuuc

SEQ ID NO: 863103 - RNA, 19 nt, Homo sapiens
  misc_RNA (1)...(19): siRNA sense strand
gagcucaccaccagccuaa

SEQ ID NO: 863104 - RNA, 19 nt, Homo sapiens
  misc_RNA (1)...(19): siRNA sense strand
ggacgagagcuuccgcauu

SEQ ID NO: 863105 - RNA, 19 nt, Homo sapiens
  misc_RNA (1)...(19): siRNA sense strand
cagcacgggccuuacauaa

SEQ ID NO: 863106 - RNA, 19 nt, Homo sapiens
  misc_RNA (1)...(19): siRNA sense strand
ccuacaagauggcggagaa

SEQ ID NO: 863107 - RNA, 19 nt, Homo sapiens
  misc_RNA (1)...(19): siRNA sense strand
ugaccaagauccugaacca

SEQ ID NO: 863108 - RNA, 19 nt, Homo sapiens
  misc_RNA (1)...(19): siRNA sense strand
ggagaaggccguggacauc

SEQ ID NO: 863109 - RNA, 19 nt, Homo sapiens
  misc_RNA (1)...(19): siRNA sense strand
ggcaagauccugggaauca

SEQ ID NO: 863110 - RNA, 19 nt, Homo sapiens
  misc_RNA (1)...(19): siRNA sense strand
gggaugacccugcccuuca

SEQ ID NO: 863111 - RNA, 19 nt, Homo sapiens
  misc_RNA (1)...(19): siRNA sense strand
ccacugcuaacgccacuuu

SEQ ID NO: 863112 - RNA, 19 nt, Homo sapiens
  misc_RNA (1)...(19): siRNA sense strand
caagauccugggaaucaaa

SEQ ID NO: 863113 - RNA, 19 nt, Homo sapiens
  misc_RNA (1)...(19): siRNA sense strand
ggugaacccuuugcagaag

SEQ ID NO: 863114 - RNA, 19 nt, Homo sapiens
  misc_RNA (1)...(19): siRNA sense strand
cauggagacugccuucuac

SEQ ID NO: 863115 - RNA, 19 nt, Homo sapiens
  misc_RNA (1)...(19): siRNA sense strand
cgaggagacagaugacuga

SEQ ID NO: 863116 - RNA, 19 nt, Homo sapiens
  misc_RNA (1)...(19): siRNA sense strand
gcgaggaggacgaggagaa

SEQ ID NO: 863117 - RNA, 19 nt, Homo sapiens
  misc_RNA (1)...(19): siRNA sense strand
gcuaacgccacuuucagaa

SEQ ID NO: 863118 - RNA, 19 nt, Homo sapiens
  misc_RNA (1)...(19): siRNA sense strand
gaggagaggcagcagauac

SEQ ID NO: 863119 - RNA, 19 nt, Homo sapiens
  misc_RNA (1)...(19): siRNA sense strand
cugcagaccagcaucaauu

SEQ ID NO: 863120 - RNA, 19 nt, Homo sapiens
  misc_RNA (1)...(19): siRNA sense strand
uucagaagaugcagaaauc

SEQ ID NO: 863121 - RNA, 19 nt, Homo sapiens
  misc_RNA (1)...(19): siRNA sense strand
ucauggagacugccuucua

SEQ ID NO: 863122 - RNA, 19 nt, Homo sapiens
  misc_RNA (1)...(19): siRNA sense strand
gcucaccaccagccuaaug

SEQ ID NO: 863123 - RNA, 19 nt, Homo sapiens
  misc_RNA (1)...(19): siRNA sense strand
gugaacccuuugcagaaga

SEQ ID NO: 863124 - RNA, 19 nt, Homo sapiens
  misc_RNA (1)...(19): siRNA sense strand
aggaagagaaggcagauga

SEQ ID NO: 863125 - RNA, 19 nt, Homo sapiens
  misc_RNA (1)...(19): siRNA sense strand
cagccuuacucugaugaaa

SEQ ID NO: 863126 - RNA, 19 nt, Homo sapiens
  misc_RNA (1)...(19): siRNA sense strand
ucugaaagcagcccaggaa

SEQ ID NO: 863127 - RNA, 19 nt, Homo sapiens
  misc_RNA (1)...(19): siRNA sense strand
acacgccagucgucagcua

SEQ ID NO: 863128 - RNA, 19 nt, Homo sapiens
  misc_RNA (1)...(19): siRNA sense strand
ggaugacccugcccuucag

SEQ ID NO: 863129 - RNA, 19 nt, Homo sapiens
  misc_RNA (1)...(19): siRNA sense strand
ccagcacgggccuuacaua

SEQ ID NO: 863130 - RNA, 19 nt, Homo sapiens
  misc_RNA (1)...(19): siRNA sense strand
acgagcaccugguaaaucu

SEQ ID NO: 863131 - RNA, 19 nt, Homo sapiens
  misc_RNA (1)...(19): siRNA sense strand
guacgagcaccugguaaau

SEQ ID NO: 863132 - RNA, 19 nt, Homo sapiens
  misc_RNA (1)...(19): siRNA sense strand
agaagaugcagaaaucaug

SEQ ID NO: 863133 - RNA, 19 nt, Homo sapiens
  misc_RNA (1)...(19): siRNA sense strand
acacgggcuuucccucaga

SEQ ID NO: 863134 - RNA, 19 nt, Homo sapiens
  misc_RNA (1)...(19): siRNA sense strand
gcuucuaccaguuuaguga

SEQ ID NO: 863135 - RNA, 19 nt, Homo sapiens
  misc_RNA (1)...(19): siRNA sense strand
gcaacgaggccaacuaccu

SEQ ID NO: 863136 - RNA, 19 nt, Homo sapiens
  misc_RNA (1)...(19): siRNA sense strand
gcagcccaccuacaagaug

SEQ ID NO: 863137 - RNA, 19 nt, Homo sapiens
  misc_RNA (1)...(19): siRNA sense strand
aggaggagguggaggagau

SEQ ID NO: 863138 - RNA, 19 nt, Homo sapiens
  misc_RNA (1)...(19): siRNA sense strand
gugaacgcccgaaagauca

SEQ ID NO: 863139 - RNA, 19 nt, Homo sapiens
  misc_RNA (1)...(19): siRNA sense strand
agacaccagugcccaacau

SEQ ID NO: 863140 - RNA, 19 nt, Homo sapiens
  misc_RNA (1)...(19): siRNA sense strand
ugaaagcagcccaggaaca

SEQ ID NO: 863141 - RNA, 19 nt, Homo sapiens
  misc_RNA (1)...(19): siRNA sense strand
gggcuuucccucagaguuc

SEQ ID NO: 863142 - RNA, 19 nt, Homo sapiens
  misc_RNA (1)...(19): siRNA sense strand
ggaagguggcgaggucaug

SEQ ID NO: 863143 - RNA, 19 nt, Homo sapiens
  misc_RNA (1)...(19): siRNA sense strand
ggaguacccaucugugaac

SEQ ID NO: 863144 - RNA, 19 nt, Homo sapiens
  misc_RNA (1)...(19): siRNA sense strand
caacugggugcaucacaca

SEQ ID NO: 863145 - RNA, 19 nt, Homo sapiens
  misc_RNA (1)...(19): siRNA sense strand
cgugaacgcccgaaagauc

SEQ ID NO: 863146 - RNA, 19 nt, Homo sapiens
  misc_RNA (1)...(19): siRNA sense strand
gaucgugaacgcccgaaag

SEQ ID NO: 863147 - RNA, 19 nt, Homo sapiens
  misc_RNA (1)...(19): siRNA sense strand
gcgccaacaaguaccugua

SEQ ID NO: 863148 - RNA, 19 nt, Homo sapiens
  misc_RNA (1)...(19): siRNA sense strand
gggcaacgaggccaacuac

SEQ ID NO: 863149 - RNA, 19 nt, Homo sapiens
  misc_RNA (1)...(19): siRNA sense strand
ggaagagaaggcagaugag

SEQ ID NO: 863150 - RNA, 19 nt, Homo sapiens
  misc_RNA (1)...(19): siRNA sense strand
uguacgagcaccugguaaa

SEQ ID NO: 863151 - RNA, 19 nt, Homo sapiens
  misc_RNA (1)...(19): siRNA sense strand
cagaagaugcagaaaucau

SEQ ID NO: 863152 - RNA, 19 nt, Homo sapiens
  misc_RNA (1)...(19): siRNA sense strand
caagauggcggagaaacag

SEQ ID NO: 863153 - RNA, 19 nt, Homo sapiens
  misc_RNA (1)...(19): siRNA sense strand
agaugcagcccaccuacaa

SEQ ID NO: 863154 - RNA, 19 nt, Homo sapiens
  misc_RNA (1)...(19): siRNA sense strand
gcauuuuccuggccaugaa

SEQ ID NO: 863155 - RNA, 19 nt, Homo sapiens
  misc_RNA (1)...(19): siRNA sense strand
ggagguggagcaggagguu

SEQ ID NO: 863156 - RNA, 19 nt, Homo sapiens
  misc_RNA (1)...(19): siRNA sense strand
gagaugcagcccaccuaca

SEQ ID NO: 863157 - RNA, 19 nt, Homo sapiens
  misc_RNA (1)...(19): siRNA sense strand
agacugccuucuacuucga

SEQ ID NO: 863158 - RNA, 19 nt, Homo sapiens
  misc_RNA (1)...(19): siRNA sense strand
gggcuucccacacuacagu

SEQ ID NO: 863159 - RNA, 19 nt, Homo sapiens
  misc_RNA (1)...(19): siRNA sense strand
guacucaguggccguugug

SEQ ID NO: 863160 - RNA, 19 nt, Homo sapiens
  misc_RNA (1)...(19): siRNA sense strand
gaaagaagcugggaccaaa

SEQ ID NO: 863161 - RNA, 19 nt, Homo sapiens
  misc_RNA (1)...(19): siRNA sense strand
gggaacagcuggaggaaau

SEQ ID NO: 863162 - RNA, 19 nt, Homo sapiens
  misc_RNA (1)...(19): siRNA sense strand
gaccagaucgcacuuguga

SEQ ID NO: 863163 - RNA, 19 nt, Homo sapiens
  misc_RNA (1)...(19): siRNA sense strand
cagaggcaguuaagaaaug

SEQ ID NO: 863164 - RNA, 19 nt, Homo sapiens
  misc_RNA (1)...(19): siRNA sense strand
augaagaggugcagcagua

SEQ ID NO: 863165 - RNA, 19 nt, Homo sapiens
  misc_RNA (1)...(19): siRNA sense strand
caacagaagaacaaagaga

SEQ ID NO: 863166 - RNA, 19 nt, Homo sapiens
  misc_RNA (1)...(19): siRNA sense strand
cagcuaaggcucagucuug

SEQ ID NO: 863167 - RNA, 19 nt, Homo sapiens
  misc_RNA (1)...(19): siRNA sense strand
ggaaagaagcugggaccaa

SEQ ID NO: 863168 - RNA, 19 nt, Homo sapiens
  misc_RNA (1)...(19): siRNA sense strand
gaaaugaaggaggcucuga

SEQ ID NO: 863169 - RNA, 19 nt, Homo sapiens
  misc_RNA (1)...(19): siRNA sense strand
gcugagauccaggaaauga

SEQ ID NO: 863170 - RNA, 19 nt, Homo sapiens
  misc_RNA (1)...(19): siRNA sense strand
gaacgccagaggcaguuaa

SEQ ID NO: 863171 - RNA, 19 nt, Homo sapiens
  misc_RNA (1)...(19): siRNA sense strand
gaagaacaaagagauggaa

SEQ ID NO: 863172 - RNA, 19 nt, Homo sapiens
  misc_RNA (1)...(19): siRNA sense strand
uuauaaggcuaugcuacua

SEQ ID NO: 863173 - RNA, 19 nt, Homo sapiens
  misc_RNA (1)...(19): siRNA sense strand
gccagaggcaguuaagaaa

SEQ ID NO: 863174 - RNA, 19 nt, Homo sapiens
  misc_RNA (1)...(19): siRNA sense strand
gaacaaagagauggaacag

SEQ ID NO: 863175 - RNA, 19 nt, Homo sapiens
  misc_RNA (1)...(19): siRNA sense strand
aggcugagauccaggaaau

SEQ ID NO: 863176 - RNA, 19 nt, Homo sapiens
  misc_RNA (1)...(19): siRNA sense strand
aaagagauggaacagcuaa

SEQ ID NO: 863177 - RNA, 19 nt, Homo sapiens
  misc_RNA (1)...(19): siRNA sense strand
caaagagauggaacagcua

SEQ ID NO: 863178 - RNA, 19 nt, Homo sapiens
  misc_RNA (1)...(19): siRNA sense strand
gcuaugcuacuacccaaga

SEQ ID NO: 863179 - RNA, 19 nt, Homo sapiens
  misc_RNA (1)...(19): siRNA sense strand
gaagaggugcagcaguaca

SEQ ID NO: 863180 - RNA, 19 nt, Homo sapiens
  misc_RNA (1)...(19): siRNA sense strand
gggugcaacuccagcaaca

SEQ ID NO: 863181 - RNA, 19 nt, Homo sapiens
  misc_RNA (1)...(19): siRNA sense strand
gaacccaggcugagaucca

SEQ ID NO: 863182 - RNA, 19 nt, Homo sapiens
  misc_RNA (1)...(19): siRNA sense strand
gaacagcuggaggaaaugg

SEQ ID NO: 863183 - RNA, 19 nt, Homo sapiens
  misc_RNA (1)...(19): siRNA sense strand
gugcaacuccagcaacaga

SEQ ID NO: 863184 - RNA, 19 nt, Homo sapiens
  misc_RNA (1)...(19): siRNA sense strand
cgccagaggcaguuaagaa

SEQ ID NO: 863185 - RNA, 19 nt, Homo sapiens
  misc_RNA (1)...(19): siRNA sense strand
ccagaggcaguuaagaaau

SEQ ID NO: 863186 - RNA, 19 nt, Homo sapiens
  misc_RNA (1)...(19): siRNA sense strand
cagguggaauggagacaca

SEQ ID NO: 863187 - RNA, 19 nt, Homo sapiens
  misc_RNA (1)...(19): siRNA sense strand
ggaccuggaggaggaguau

SEQ ID NO: 863188 - RNA, 19 nt, Homo sapiens
  misc_RNA (1)...(19): siRNA sense strand
caacuccagcaacagaaga

SEQ ID NO: 863189 - RNA, 19 nt, Homo sapiens
  misc_RNA (1)...(19): siRNA sense strand
gcaacuccagcaacagaag

SEQ ID NO: 863190 - RNA, 19 nt, Homo sapiens
  misc_RNA (1)...(19): siRNA sense strand
ggaccagaucgcacuugug

SEQ ID NO: 863191 - RNA, 19 nt, Homo sapiens
  misc_RNA (1)...(19): siRNA sense strand
acagaagaacaaagagaug

SEQ ID NO: 863192 - RNA, 19 nt, Homo sapiens
  misc_RNA (1)...(19): siRNA sense strand
gaaauggaauccugaagua

SEQ ID NO: 863193 - RNA, 19 nt, Homo sapiens
  misc_RNA (1)...(19): siRNA sense strand
ggacagagcuuccuaugug

SEQ ID NO: 863194 - RNA, 19 nt, Homo sapiens
  misc_RNA (1)...(19): siRNA sense strand
gaaguagacugcacagaaa

SEQ ID NO: 863195 - RNA, 19 nt, Homo sapiens
  misc_RNA (1)...(19): siRNA sense strand
aaagaaagcuacaaaguug

SEQ ID NO: 863196 - RNA, 19 nt, Homo sapiens
  misc_RNA (1)...(19): siRNA sense strand
gaaggaacacuuugugauu

SEQ ID NO: 863197 - RNA, 19 nt, Homo sapiens
  misc_RNA (1)...(19): siRNA sense strand
acaaugaaguaguggaaua

SEQ ID NO: 863198 - RNA, 19 nt, Homo sapiens
  misc_RNA (1)...(19): siRNA sense strand
gaagggaaauuugaauauc

SEQ ID NO: 863199 - RNA, 19 nt, Homo sapiens
  misc_RNA (1)...(19): siRNA sense strand
ggacaacuuuacccacuug

SEQ ID NO: 863200 - RNA, 19 nt, Homo sapiens
  misc_RNA (1)...(19): siRNA sense strand
ggugauacuguacaaauua

SEQ ID NO: 863201 - RNA, 19 nt, Homo sapiens
  misc_RNA (1)...(19): siRNA sense strand
cagacucaguucaauguua

SEQ ID NO: 863202 - RNA, 19 nt, Homo sapiens
  misc_RNA (1)...(19): siRNA sense strand
caaccacagugaauuauca

SEQ ID NO: 863203 - RNA, 19 nt, Homo sapiens
  misc_RNA (1)...(19): siRNA sense strand
gaaauaaacaguggucaga

SEQ ID NO: 863204 - RNA, 19 nt, Homo sapiens
  misc_RNA (1)...(19): siRNA sense strand
ugacaaccacagugaauua

SEQ ID NO: 863205 - RNA, 19 nt, Homo sapiens
  misc_RNA (1)...(19): siRNA sense strand
gaggugaauugcagaaaug

SEQ ID NO: 863206 - RNA, 19 nt, Homo sapiens
  misc_RNA (1)...(19): siRNA sense strand
gauaucaucaccaccauuu

SEQ ID NO: 863207 - RNA, 19 nt, Homo sapiens
  misc_RNA (1)...(19): siRNA sense strand
uagaauacguuacagaugu

SEQ ID NO: 863208 - RNA, 19 nt, Homo sapiens
  misc_RNA (1)...(19): siRNA sense strand
caagcuaucugggaaagaa

SEQ ID NO: 863209 - RNA, 19 nt, Homo sapiens
  misc_RNA (1)...(19): siRNA sense strand
ggaaggugauacuguacaa

SEQ ID NO: 863210 - RNA, 19 nt, Homo sapiens
  misc_RNA (1)...(19): siRNA sense strand
ggaagggaaauuugaauau

SEQ ID NO: 863211 - RNA, 19 nt, Homo sapiens
  misc_RNA (1)...(19): siRNA sense strand
caguguaaauucccacaua

SEQ ID NO: 863212 - RNA, 19 nt, Homo sapiens
  misc_RNA (1)...(19): siRNA sense strand
gaaguuaaggagauaagaa

SEQ ID NO: 863213 - RNA, 19 nt, Homo sapiens
  misc_RNA (1)...(19): siRNA sense strand
ccagggcucuguaacugua

SEQ ID NO: 863214 - RNA, 19 nt, Homo sapiens
  misc_RNA (1)...(19): siRNA sense strand
acuguaacaugcagaaaua

SEQ ID NO: 863215 - RNA, 19 nt, Homo sapiens
  misc_RNA (1)...(19): siRNA sense strand
uaaaggagaaugucauguu

SEQ ID NO: 863216 - RNA, 19 nt, Homo sapiens
  misc_RNA (1)...(19): siRNA sense strand
ccacauaaagcgaugauau

SEQ ID NO: 863217 - RNA, 19 nt, Homo sapiens
  misc_RNA (1)...(19): siRNA sense strand
ucaccuaacuuuccaacau

SEQ ID NO: 863218 - RNA, 19 nt, Homo sapiens
  misc_RNA (1)...(19): siRNA sense strand
ccaccaagaugccuagauc

SEQ ID NO: 863219 - RNA, 19 nt, Homo sapiens
  misc_RNA (1)...(19): siRNA sense strand
ggaaauaacaugauuaccu

SEQ ID NO: 863220 - RNA, 19 nt, Homo sapiens
  misc_RNA (1)...(19): siRNA sense strand
gauggagaauggacaacuu

SEQ ID NO: 863221 - RNA, 19 nt, Homo sapiens
  misc_RNA (1)...(19): siRNA sense strand
caggggaaguuuucuauua

SEQ ID NO: 863222 - RNA, 19 nt, Homo sapiens
  misc_RNA (1)...(19): siRNA sense strand
aaaaguagcuguucucugu

SEQ ID NO: 863223 - RNA, 19 nt, Homo sapiens
  misc_RNA (1)...(19): siRNA sense strand
gaaugucauguuccaauuu

SEQ ID NO: 863224 - RNA, 19 nt, Homo sapiens
  misc_RNA (1)...(19): siRNA sense strand
ugaaguagacugcacagaa

SEQ ID NO: 863225 - RNA, 19 nt, Homo sapiens
  misc_RNA (1)...(19): siRNA sense strand
ggaaauggaauccugaagu

SEQ ID NO: 863226 - RNA, 19 nt, Homo sapiens
  misc_RNA (1)...(19): siRNA sense strand
aaacauuacucaagcuauc

SEQ ID NO: 863227 - RNA, 19 nt, Homo sapiens
  misc_RNA (1)...(19): siRNA sense strand
gcaacacaccaacuuaaga

SEQ ID NO: 863228 - RNA, 19 nt, Homo sapiens
  misc_RNA (1)...(19): siRNA sense strand
ggacaaguacgaucaugug

SEQ ID NO: 863229 - RNA, 19 nt, Homo sapiens
  misc_RNA (1)...(19): siRNA sense strand
aaggaacacuuugugauuu

SEQ ID NO: 863230 - RNA, 19 nt, Homo sapiens
  misc_RNA (1)...(19): siRNA sense strand
gcuguugaauuccagugua

SEQ ID NO: 863231 - RNA, 19 nt, Homo sapiens
  misc_RNA (1)...(19): siRNA sense strand
cagcuucacuaaaggagaa

SEQ ID NO: 863232 - RNA, 19 nt, Homo sapiens
  misc_RNA (1)...(19): siRNA sense strand
gagaaggaacacuuuguga

SEQ ID NO: 863233 - RNA, 19 nt, Homo sapiens
  misc_RNA (1)...(19): siRNA sense strand
ggagacguguugaaauucu

SEQ ID NO: 863234 - RNA, 19 nt, Homo sapiens
  misc_RNA (1)...(19): siRNA sense strand
ggucagaaccaccaagaug

SEQ ID NO: 863235 - RNA, 19 nt, Homo sapiens
  misc_RNA (1)...(19): siRNA sense strand
ucuggaaggugauacugua

SEQ ID NO: 863236 - RNA, 19 nt, Homo sapiens
  misc_RNA (1)...(19): siRNA sense strand
gaaguaguggaauaugauu

SEQ ID NO: 863237 - RNA, 19 nt, Homo sapiens
  misc_RNA (1)...(19): siRNA sense strand
caccauggauuucuguaug

SEQ ID NO: 863238 - RNA, 19 nt, Homo sapiens
  misc_RNA (1)...(19): siRNA sense strand
aaaggagaaugucauguuc

SEQ ID NO: 863239 - RNA, 19 nt, Homo sapiens
  misc_RNA (1)...(19): siRNA sense strand
gagaaugucauguuccaau

SEQ ID NO: 863240 - RNA, 19 nt, Homo sapiens
  misc_RNA (1)...(19): siRNA sense strand
caaaauagcaggaguuaau

SEQ ID NO: 863241 - RNA, 19 nt, Homo sapiens
  misc_RNA (1)...(19): siRNA sense strand
caaaggacaaguacgauca

SEQ ID NO: 863242 - RNA, 19 nt, Homo sapiens
  misc_RNA (1)...(19): siRNA sense strand
uuggagacguguugaaauu

SEQ ID NO: 863243 - RNA, 19 nt, Homo sapiens
  misc_RNA (1)...(19): siRNA sense strand
aaacauuucguguguagaa

SEQ ID NO: 863244 - RNA, 19 nt, Homo sapiens
  misc_RNA (1)...(19): siRNA sense strand
cgaggugaauugcagaaau

SEQ ID NO: 863245 - RNA, 19 nt, Homo sapiens
  misc_RNA (1)...(19): siRNA sense strand
agaggaauauggacacaau

SEQ ID NO: 863246 - RNA, 19 nt, Homo sapiens
  misc_RNA (1)...(19): siRNA sense strand
cgaagugucucagaaugug

SEQ ID NO: 863247 - RNA, 19 nt, Homo sapiens
  misc_RNA (1)...(19): siRNA sense strand
ggaauauggacacaaugaa

SEQ ID NO: 863248 - RNA, 19 nt, Homo sapiens
  misc_RNA (1)...(19): siRNA sense strand
agaaugucauguuccaauu

SEQ ID NO: 863249 - RNA, 19 nt, Homo sapiens
  misc_RNA (1)...(19): siRNA sense strand
gaauguguuccuuuccuuu

SEQ ID NO: 863250 - RNA, 19 nt, Homo sapiens
  misc_RNA (1)...(19): siRNA sense strand
gaauauggacacaaugaag

SEQ ID NO: 863251 - RNA, 19 nt, Homo sapiens
  misc_RNA (1)...(19): siRNA sense strand
ggagaaggaacacuuugug

SEQ ID NO: 863252 - RNA, 19 nt, Homo sapiens
  misc_RNA (1)...(19): siRNA sense strand
gaucagacucaguucaaug

SEQ ID NO: 863253 - RNA, 19 nt, Homo sapiens
  misc_RNA (1)...(19): siRNA sense strand
gauggacgauggcaaucau

SEQ ID NO: 863254 - RNA, 19 nt, Homo sapiens
  misc_RNA (1)...(19): siRNA sense strand
gcacucagucuguauaaac

SEQ ID NO: 863255 - RNA, 19 nt, Homo sapiens
  misc_RNA (1)...(19): siRNA sense strand
gaacucgaguacgguuaug

SEQ ID NO: 863256 - RNA, 19 nt, Homo sapiens
  misc_RNA (1)...(19): siRNA sense strand
caacuuuacccacuugugu

SEQ ID NO: 863257 - RNA, 19 nt, Homo sapiens
  misc_RNA (1)...(19): siRNA sense strand
guucaauguuaccaauuug

SEQ ID NO: 863258 - RNA, 19 nt, Homo sapiens
  misc_RNA (1)...(19): siRNA sense strand
aaguagcuguucucuguaa

SEQ ID NO: 863259 - RNA, 19 nt, Homo sapiens
  misc_RNA (1)...(19): siRNA sense strand
uaauaaacgggccuaagaa

SEQ ID NO: 863260 - RNA, 19 nt, Homo sapiens
  misc_RNA (1)...(19): siRNA sense strand
gcagaaaugaauaugcaau

SEQ ID NO: 863261 - RNA, 19 nt, Homo sapiens
  misc_RNA (1)...(19): siRNA sense strand
agaauacguuacagauguu

SEQ ID NO: 863262 - RNA, 19 nt, Homo sapiens
  misc_RNA (1)...(19): siRNA sense strand
aguguaaauucccacauaa

SEQ ID NO: 863263 - RNA, 19 nt, Homo sapiens
  misc_RNA (1)...(19): siRNA sense strand
caaaguuggagacguguug

SEQ ID NO: 863264 - RNA, 19 nt, Homo sapiens
  misc_RNA (1)...(19): siRNA sense strand
cuuauucaguguaauccua

SEQ ID NO: 863265 - RNA, 19 nt, Homo sapiens
  misc_RNA (1)...(19): siRNA sense strand
guauaaacgggaaauggaa

SEQ ID NO: 863266 - RNA, 19 nt, Homo sapiens
  misc_RNA (1)...(19): siRNA sense strand
caccuaacuuuccaacaug

SEQ ID NO: 863267 - RNA, 19 nt, Homo sapiens
  misc_RNA (1)...(19): siRNA sense strand
ucaguucaauguuaccaau

SEQ ID NO: 863268 - RNA, 19 nt, Homo sapiens
  misc_RNA (1)...(19): siRNA sense strand
ggaucagacucaguucaau

SEQ ID NO: 863269 - RNA, 19 nt, Homo sapiens
  misc_RNA (1)...(19): siRNA sense strand
ccuccagggucaacaguga

SEQ ID NO: 863270 - RNA, 19 nt, Homo sapiens
  misc_RNA (1)...(19): siRNA sense strand
gacagagcuuccuaugugu

SEQ ID NO: 863271 - RNA, 19 nt, Homo sapiens
  misc_RNA (1)...(19): siRNA sense strand
auaauaaacgggccuaaga

SEQ ID NO: 863272 - RNA, 19 nt, Homo sapiens
  misc_RNA (1)...(19): siRNA sense strand
ucauggguauccacuguug

SEQ ID NO: 863273 - RNA, 19 nt, Homo sapiens
  misc_RNA (1)...(19): siRNA sense strand
uaccuaaugcucagaauau

SEQ ID NO: 863274 - RNA, 19 nt, Homo sapiens
  misc_RNA (1)...(19): siRNA sense strand
cauaacaugcacagaagaa

SEQ ID NO: 863275 - RNA, 19 nt, Homo sapiens
  misc_RNA (1)...(19): siRNA sense strand
caacacaccaacuuaagag

SEQ ID NO: 863276 - RNA, 19 nt, Homo sapiens
  misc_RNA (1)...(19): siRNA sense strand
gaaaauacaauguguggau

SEQ ID NO: 863277 - RNA, 19 nt, Homo sapiens
  misc_RNA (1)...(19): siRNA sense strand
gauacagccuucaaaacaa

SEQ ID NO: 863278 - RNA, 19 nt, Homo sapiens
  misc_RNA (1)...(19): siRNA sense strand
aaacgggccuaagaaaaua

SEQ ID NO: 863279 - RNA, 19 nt, Homo sapiens
  misc_RNA (1)...(19): siRNA sense strand
gagaaacgauggaaaacuc

SEQ ID NO: 863280 - RNA, 19 nt, Homo sapiens
  misc_RNA (1)...(19): siRNA sense strand
uaccaccucauucccauua

SEQ ID NO: 863281 - RNA, 19 nt, Homo sapiens
  misc_RNA (1)...(19): siRNA sense strand
uagcuguucucuguaaaga

SEQ ID NO: 863282 - RNA, 19 nt, Homo sapiens
  misc_RNA (1)...(19): siRNA sense strand
ccauaugcagcuucacuaa

SEQ ID NO: 863283 - RNA, 19 nt, Homo sapiens
  misc_RNA (1)...(19): siRNA sense strand
aauaaacgggccuaagaaa

SEQ ID NO: 863284 - RNA, 19 nt, Homo sapiens
  misc_RNA (1)...(19): siRNA sense strand
auaugcagcuucacuaaag

SEQ ID NO: 863285 - RNA, 19 nt, Homo sapiens
  misc_RNA (1)...(19): siRNA sense strand
gugaauugcagaaaugaau

SEQ ID NO: 863286 - RNA, 19 nt, Homo sapiens
  misc_RNA (1)...(19): siRNA sense strand
ucucauggguauccacugu

SEQ ID NO: 863287 - RNA, 19 nt, Homo sapiens
  misc_RNA (1)...(19): siRNA sense strand
ggagauaccaccucauucc

SEQ ID NO: 863288 - RNA, 19 nt, Homo sapiens
  misc_RNA (1)...(19): siRNA sense strand
aaagauggacgauggcaau

SEQ ID NO: 863289 - RNA, 19 nt, Homo sapiens
  misc_RNA (1)...(19): siRNA sense strand
cuuaagaggugcaaaauag

SEQ ID NO: 863290 - RNA, 19 nt, Homo sapiens
  misc_RNA (1)...(19): siRNA sense strand
ucaccaccauuucgagcaa

SEQ ID NO: 863291 - RNA, 19 nt, Homo sapiens
  misc_RNA (1)...(19): siRNA sense strand
ucauucccauuaucaguau

SEQ ID NO: 863292 - RNA, 19 nt, Homo sapiens
  misc_RNA (1)...(19): siRNA sense strand
uaacaugggucuaguauua

SEQ ID NO: 863293 - RNA, 19 nt, Homo sapiens
  misc_RNA (1)...(19): siRNA sense strand
caaccaaacucacaaauau

SEQ ID NO: 863294 - RNA, 19 nt, Homo sapiens
  misc_RNA (1)...(19): siRNA sense strand
gcaguacccucuuauauau

SEQ ID NO: 863295 - RNA, 19 nt, Homo sapiens
  misc_RNA (1)...(19): siRNA sense strand
gaacuuccuuaucgguaua

SEQ ID NO: 863296 - RNA, 19 nt, Homo sapiens
  misc_RNA (1)...(19): siRNA sense strand
aaucuuagcugucuucuau

SEQ ID NO: 863297 - RNA, 19 nt, Homo sapiens
  misc_RNA (1)...(19): siRNA sense strand
gcaacgaacucuucuacau

SEQ ID NO: 863298 - RNA, 19 nt, Homo sapiens
  misc_RNA (1)...(19): siRNA sense strand
ucacaaauaugcuccauuc

SEQ ID NO: 863299 - RNA, 19 nt, Homo sapiens
  misc_RNA (1)...(19): siRNA sense strand
caaauaugcuccauucauc

SEQ ID NO: 863300 - RNA, 19 nt, Homo sapiens
  misc_RNA (1)...(19): siRNA sense strand
ggcaguacccucuuauaua

SEQ ID NO: 863301 - RNA, 19 nt, Homo sapiens
  misc_RNA (1)...(19): siRNA sense strand
caucaucgggcuucauuua

SEQ ID NO: 863302 - RNA, 19 nt, Homo sapiens
  misc_RNA (1)...(19): siRNA sense strand
cuagauacauuaccuuuag

SEQ ID NO: 863303 - RNA, 19 nt, Homo sapiens
  misc_RNA (1)...(19): siRNA sense strand
gggaugguauuuguacuaa

SEQ ID NO: 863304 - RNA, 19 nt, Homo sapiens
  misc_RNA (1)...(19): siRNA sense strand
ggauuccuauauaccauuu

SEQ ID NO: 863305 - RNA, 19 nt, Homo sapiens
  misc_RNA (1)...(19): siRNA sense strand
guggaucucauguuacuua

SEQ ID NO: 863306 - RNA, 19 nt, Homo sapiens
  misc_RNA (1)...(19): siRNA sense strand
ggaccugauugacaacuuc

SEQ ID NO: 863307 - RNA, 19 nt, Homo sapiens
  misc_RNA (1)...(19): siRNA sense strand
gacagcacauggaaguuga

SEQ ID NO: 863308 - RNA, 19 nt, Homo sapiens
  misc_RNA (1)...(19): siRNA sense strand
ucaaccaaacucacaaaua

SEQ ID NO: 863309 - RNA, 19 nt, Homo sapiens
  misc_RNA (1)...(19): siRNA sense strand
guacuaauaaucagagaug

SEQ ID NO: 863310 - RNA, 19 nt, Homo sapiens
  misc_RNA (1)...(19): siRNA sense strand
uauuauugcuggauuccua

SEQ ID NO: 863311 - RNA, 19 nt, Homo sapiens
  misc_RNA (1)...(19): siRNA sense strand
ucauagggaugguauuugu

SEQ ID NO: 863312 - RNA, 19 nt, Homo sapiens
  misc_RNA (1)...(19): siRNA sense strand
gaauuuacaugggaaugca

SEQ ID NO: 863313 - RNA, 19 nt, Homo sapiens
  misc_RNA (1)...(19): siRNA sense strand
ccuauggaaugguugguuu

SEQ ID NO: 863314 - RNA, 19 nt, Homo sapiens
  misc_RNA (1)...(19): siRNA sense strand
agacacagccgagauacua

SEQ ID NO: 863315 - RNA, 19 nt, Homo sapiens
  misc_RNA (1)...(19): siRNA sense strand
ggauauuauugcuggauuc

SEQ ID NO: 863316 - RNA, 19 nt, Homo sapiens
  misc_RNA (1)...(19): siRNA sense strand
caagacagcacauggaagu

SEQ ID NO: 863317 - RNA, 19 nt, Homo sapiens
  misc_RNA (1)...(19): siRNA sense strand
gcaacuggccgcucuacug

SEQ ID NO: 863318 - RNA, 19 nt, Homo sapiens
  misc_RNA (1)...(19): siRNA sense strand
ucucuaguuugccuaagua

SEQ ID NO: 863319 - RNA, 19 nt, Homo sapiens
  misc_RNA (1)...(19): siRNA sense strand
aauauaccgugugaugaua

SEQ ID NO: 863320 - RNA, 19 nt, Homo sapiens
  misc_RNA (1)...(19): siRNA sense strand
caauauaccgugugaugau

SEQ ID NO: 863321 - RNA, 19 nt, Homo sapiens
  misc_RNA (1)...(19): siRNA sense strand
caacgaacucuucuacauc

SEQ ID NO: 863322 - RNA, 19 nt, Homo sapiens
  misc_RNA (1)...(19): siRNA sense strand
uauauuaccuauggaaugg

SEQ ID NO: 863323 - RNA, 19 nt, Homo sapiens
  misc_RNA (1)...(19): siRNA sense strand
ugaacuuccuuaucgguau

SEQ ID NO: 863324 - RNA, 19 nt, Homo sapiens
  misc_RNA (1)...(19): siRNA sense strand
ggaaguggugcuggaauug

SEQ ID NO: 863325 - RNA, 19 nt, Homo sapiens
  misc_RNA (1)...(19): siRNA sense strand
cgcagaaaguggcccguuu

SEQ ID NO: 863326 - RNA, 19 nt, Homo sapiens
  misc_RNA (1)...(19): siRNA sense strand
guauauuaccuauggaaug

SEQ ID NO: 863327 - RNA, 19 nt, Homo sapiens
  misc_RNA (1)...(19): siRNA sense strand
cuaguuugccuaaguagaa

SEQ ID NO: 863328 - RNA, 19 nt, Homo sapiens
  misc_RNA (1)...(19): siRNA sense strand
ucugggugcuggucaugua

SEQ ID NO: 863329 - RNA, 19 nt, Homo sapiens
  misc_RNA (1)...(19): siRNA sense strand
ccucuuauauauggacuga

SEQ ID NO: 863330 - RNA, 19 nt, Homo sapiens
  misc_RNA (1)...(19): siRNA sense strand
gcacucuauucuggauauu

SEQ ID NO: 863331 - RNA, 19 nt, Homo sapiens
  misc_RNA (1)...(19): siRNA sense strand
aggaaguggugcuggaauu

SEQ ID NO: 863332 - RNA, 19 nt, Homo sapiens
  misc_RNA (1)...(19): siRNA sense strand
ccucauagggaugguauuu

SEQ ID NO: 863333 - RNA, 19 nt, Homo sapiens
  misc_RNA (1)...(19): siRNA sense strand
ggaauugcauguggaucuc

SEQ ID NO: 863334 - RNA, 19 nt, Homo sapiens
  misc_RNA (1)...(19): siRNA sense strand
ccauuacugugacucuguu

SEQ ID NO: 863335 - RNA, 19 nt, Homo sapiens
  misc_RNA (1)...(19): siRNA sense strand
cugcugguguucucuaguu

SEQ ID NO: 863336 - RNA, 19 nt, Homo sapiens
  misc_RNA (1)...(19): siRNA sense strand
uauaccgugugaugauauu

SEQ ID NO: 863337 - RNA, 19 nt, Homo sapiens
  misc_RNA (1)...(19): siRNA sense strand
acaaauaugcuccauucau

SEQ ID NO: 863338 - RNA, 19 nt, Homo sapiens
  misc_RNA (1)...(19): siRNA sense strand
gcugucuucuauccauuug

SEQ ID NO: 863339 - RNA, 19 nt, Homo sapiens
  misc_RNA (1)...(19): siRNA sense strand
ggaucucauguuacuuaua

SEQ ID NO: 863340 - RNA, 19 nt, Homo sapiens
  misc_RNA (1)...(19): siRNA sense strand
uauaacaugggucuaguau

SEQ ID NO: 863341 - RNA, 19 nt, Homo sapiens
  misc_RNA (1)...(19): siRNA sense strand
uggcaguacccucuuauau

SEQ ID NO: 863342 - RNA, 19 nt, Homo sapiens
  misc_RNA (1)...(19): siRNA sense strand
ggagggaggaugagaaagc

SEQ ID NO: 863343 - RNA, 19 nt, Homo sapiens
  misc_RNA (1)...(19): siRNA sense strand
acaugggaaugcacucuau

SEQ ID NO: 863344 - RNA, 19 nt, Homo sapiens
  misc_RNA (1)...(19): siRNA sense strand
cuuauucccugcugguguu

SEQ ID NO: 863345 - RNA, 19 nt, Homo sapiens
  misc_RNA (1)...(19): siRNA sense strand
auugcuggauuccuauaua

SEQ ID NO: 863346 - RNA, 19 nt, Homo sapiens
  misc_RNA (1)...(19): siRNA sense strand
ggaugguauuuguacuaau

SEQ ID NO: 863347 - RNA, 19 nt, Homo sapiens
  misc_RNA (1)...(19): siRNA sense strand
ugucuucuauccauuugug

SEQ ID NO: 863348 - RNA, 19 nt, Homo sapiens
  misc_RNA (1)...(19): siRNA sense strand
aguuggaggucuucuacaa

SEQ ID NO: 863349 - RNA, 19 nt, Homo sapiens
  misc_RNA (1)...(19): siRNA sense strand
ucaauauaccgugugauga

SEQ ID NO: 863350 - RNA, 19 nt, Homo sapiens
  misc_RNA (1)...(19): siRNA sense strand
cauauugcggauccucaua

SEQ ID NO: 863351 - RNA, 19 nt, Homo sapiens
  misc_RNA (1)...(19): siRNA sense strand
gggcaacgaacucuucuac

SEQ ID NO: 863352 - RNA, 19 nt, Homo sapiens
  misc_RNA (1)...(19): siRNA sense strand
caaguuggaggucuucuac

SEQ ID NO: 863353 - RNA, 19 nt, Homo sapiens
  misc_RNA (1)...(19): siRNA sense strand
uauuaccuauggaaugguu

SEQ ID NO: 863354 - RNA, 19 nt, Homo sapiens
  misc_RNA (1)...(19): siRNA sense strand
uggauauuauugcuggauu

SEQ ID NO: 863355 - RNA, 19 nt, Homo sapiens
  misc_RNA (1)...(19): siRNA sense strand
cuaugguccuccucaccua

SEQ ID NO: 863356 - RNA, 19 nt, Homo sapiens
  misc_RNA (1)...(19): siRNA sense strand
agacagcacauggaaguug

SEQ ID NO: 863357 - RNA, 19 nt, Homo sapiens
  misc_RNA (1)...(19): siRNA sense strand
uaugcuccauucaucauca

SEQ ID NO: 863358 - RNA, 19 nt, Homo sapiens
  misc_RNA (1)...(19): siRNA sense strand
cauagggaugguauuugua

SEQ ID NO: 863359 - RNA, 19 nt, Homo sapiens
  misc_RNA (1)...(19): siRNA sense strand
gaggagacacagccgagau

SEQ ID NO: 863360 - RNA, 19 nt, Homo sapiens
  misc_RNA (1)...(19): siRNA sense strand
gaucuuuucuuucacucuu

SEQ ID NO: 863361 - RNA, 19 nt, Homo sapiens
  misc_RNA (1)...(19): siRNA sense strand
ucuacugccuguucugcuu

SEQ ID NO: 863362 - RNA, 19 nt, Homo sapiens
  misc_RNA (1)...(19): siRNA sense strand
uagcugucuucuauccauu

SEQ ID NO: 863363 - RNA, 19 nt, Homo sapiens
  misc_RNA (1)...(19): siRNA sense strand
ucaaguuggaggucuucua

SEQ ID NO: 863364 - RNA, 19 nt, Homo sapiens
  misc_RNA (1)...(19): siRNA sense strand
cugugacucuguuuggaaa

SEQ ID NO: 863365 - RNA, 19 nt, Homo sapiens
  misc_RNA (1)...(19): siRNA sense strand
gcaggacccgcagaaagug

SEQ ID NO: 863366 - RNA, 19 nt, Homo sapiens
  misc_RNA (1)...(19): siRNA sense strand
ggaggucuucuacaacucu

SEQ ID NO: 863367 - RNA, 19 nt, Homo sapiens
  misc_RNA (1)...(19): siRNA sense strand
aggagacacagccgagaua

SEQ ID NO: 863368 - RNA, 19 nt, Homo sapiens
  misc_RNA (1)...(19): siRNA sense strand
ccggagggaggaugagaaa

SEQ ID NO: 863369 - RNA, 19 nt, Homo sapiens
  misc_RNA (1)...(19): siRNA sense strand
gcaccgccauccccauuuc

SEQ ID NO: 863370 - RNA, 19 nt, Homo sapiens
  misc_RNA (1)...(19): siRNA sense strand
aaauaugcuccauucauca

SEQ ID NO: 863371 - RNA, 19 nt, Homo sapiens
  misc_RNA (1)...(19): siRNA sense strand
ugcacucuauucuggauau

SEQ ID NO: 863372 - RNA, 19 nt, Homo sapiens
  misc_RNA (1)...(19): siRNA sense strand
auccuucucuagauacauu

SEQ ID NO: 863373 - RNA, 19 nt, Homo sapiens
  misc_RNA (1)...(19): siRNA sense strand
gggcuucauuuagcuuugg

SEQ ID NO: 863374 - RNA, 19 nt, Homo sapiens
  misc_RNA (1)...(19): siRNA sense strand
uuagcugucuucuauccau

SEQ ID NO: 863375 - RNA, 19 nt, Homo sapiens
  misc_RNA (1)...(19): siRNA sense strand
gcugggcaacgaacucuuc

SEQ ID NO: 863376 - RNA, 19 nt, Homo sapiens
  misc_RNA (1)...(19): siRNA sense strand
gaagcucgaugccaacaag

SEQ ID NO: 863377 - RNA, 19 nt, Homo sapiens
  misc_RNA (1)...(19): siRNA sense strand
caaacucagcgccaagaua

SEQ ID NO: 863378 - RNA, 19 nt, Homo sapiens
  misc_RNA (1)...(19): siRNA sense strand
uggaguaccugaagucucu

SEQ ID NO: 863379 - RNA, 19 nt, Homo sapiens
  misc_RNA (1)...(19): siRNA sense strand
ggaggcaccuggaguaccu

SEQ ID NO: 863380 - RNA, 19 nt, Homo sapiens
  misc_RNA (1)...(19): siRNA sense strand
ucgccuacgucguguacua

SEQ ID NO: 863381 - RNA, 19 nt, Homo sapiens
  misc_RNA (1)...(19): siRNA sense strand
ccgggagucuugucucuuc

SEQ ID NO: 863382 - RNA, 19 nt, Homo sapiens
  misc_RNA (1)...(19): siRNA sense strand
ccaacaccgugcuccugaa

SEQ ID NO: 863383 - RNA, 19 nt, Homo sapiens
  misc_RNA (1)...(19): siRNA sense strand
aaacucagcgccaagauac

SEQ ID NO: 863384 - RNA, 19 nt, Homo sapiens
  misc_RNA (1)...(19): siRNA sense strand
gcaccuggaguaccugaag

SEQ ID NO: 863385 - RNA, 19 nt, Homo sapiens
  misc_RNA (1)...(19): siRNA sense strand
agauacgccugucccacaa

SEQ ID NO: 863386 - RNA, 19 nt, Homo sapiens
  misc_RNA (1)...(19): siRNA sense strand
ugcuggaccugucuuacaa

SEQ ID NO: 863387 - RNA, 19 nt, Homo sapiens
  misc_RNA (1)...(19): siRNA sense strand
gcaaacucagcgccaagau

SEQ ID NO: 863388 - RNA, 19 nt, Homo sapiens
  misc_RNA (1)...(19): siRNA sense strand
gcucgaugccaacaagauc

SEQ ID NO: 863389 - RNA, 19 nt, Homo sapiens
  misc_RNA (1)...(19): siRNA sense strand
gagcuggaucugucucaca

SEQ ID NO: 863390 - RNA, 19 nt, Homo sapiens
  misc_RNA (1)...(19): siRNA sense strand
gcacugaacguacuucuua

SEQ ID NO: 863391 - RNA, 19 nt, Homo sapiens
  misc_RNA (1)...(19): siRNA sense strand
gaaaugggcuucaguaagg

SEQ ID NO: 863392 - RNA, 19 nt, Homo sapiens
  misc_RNA (1)...(19): siRNA sense strand
ugacagcaguuguuaaauu

SEQ ID NO: 863393 - RNA, 19 nt, Homo sapiens
  misc_RNA (1)...(19): siRNA sense strand
aaauagagguucugaaaga

SEQ ID NO: 863394 - RNA, 19 nt, Homo sapiens
  misc_RNA (1)...(19): siRNA sense strand
gcaccaagcacauuauuug

SEQ ID NO: 863395 - RNA, 19 nt, Homo sapiens
  misc_RNA (1)...(19): siRNA sense strand
aaacaucuauuccugacua

SEQ ID NO: 863396 - RNA, 19 nt, Homo sapiens
  misc_RNA (1)...(19): siRNA sense strand
gaagcaauauuggaacuga

SEQ ID NO: 863397 - RNA, 19 nt, Homo sapiens
  misc_RNA (1)...(19): siRNA sense strand
ccaagcacauuauuugauu

SEQ ID NO: 863398 - RNA, 19 nt, Homo sapiens
  misc_RNA (1)...(19): siRNA sense strand
gcaaggaaaccaagacauu

SEQ ID NO: 863399 - RNA, 19 nt, Homo sapiens
  misc_RNA (1)...(19): siRNA sense strand
gcacagcaguagaauuuag

SEQ ID NO: 863400 - RNA, 19 nt, Homo sapiens
  misc_RNA (1)...(19): siRNA sense strand
gaagaucugggccaauuaa

SEQ ID NO: 863401 - RNA, 19 nt, Homo sapiens
  misc_RNA (1)...(19): siRNA sense strand
auagagaacugguugauga

SEQ ID NO: 863402 - RNA, 19 nt, Homo sapiens
  misc_RNA (1)...(19): siRNA sense strand
gacaggaaaucacaaacaa

SEQ ID NO: 863403 - RNA, 19 nt, Homo sapiens
  misc_RNA (1)...(19): siRNA sense strand
gaaaugggaguuacagaga

SEQ ID NO: 863404 - RNA, 19 nt, Homo sapiens
  misc_RNA (1)...(19): siRNA sense strand
gaaggcaccuacgaucaaa

SEQ ID NO: 863405 - RNA, 19 nt, Homo sapiens
  misc_RNA (1)...(19): siRNA sense strand
gaaaggaagacgaauagga

SEQ ID NO: 863406 - RNA, 19 nt, Homo sapiens
  misc_RNA (1)...(19): siRNA sense strand
caggaaaucacaaacaaua

SEQ ID NO: 863407 - RNA, 19 nt, Homo sapiens
  misc_RNA (1)...(19): siRNA sense strand
gaaaugccacugaaaggaa

SEQ ID NO: 863408 - RNA, 19 nt, Homo sapiens
  misc_RNA (1)...(19): siRNA sense strand
gaggcaagcucuuauggau

SEQ ID NO: 863409 - RNA, 19 nt, Homo sapiens
  misc_RNA (1)...(19): siRNA sense strand
gacagcaguuguuaaauuc

SEQ ID NO: 863410 - RNA, 19 nt, Homo sapiens
  misc_RNA (1)...(19): siRNA sense strand
guggaaaccuggagaugaa

SEQ ID NO: 863411 - RNA, 19 nt, Homo sapiens
  misc_RNA (1)...(19): siRNA sense strand
caaagagacucccaaaauu

SEQ ID NO: 863412 - RNA, 19 nt, Homo sapiens
  misc_RNA (1)...(19): siRNA sense strand
gagaacugguugaugagaa

SEQ ID NO: 863413 - RNA, 19 nt, Homo sapiens
  misc_RNA (1)...(19): siRNA sense strand
gaagaggaccugggaaaug

SEQ ID NO: 863414 - RNA, 19 nt, Homo sapiens
  misc_RNA (1)...(19): siRNA sense strand
gcaaaggacggcugcuauu

SEQ ID NO: 863415 - RNA, 19 nt, Homo sapiens
  misc_RNA (1)...(19): siRNA sense strand
gcuguacccugugaugaua

SEQ ID NO: 863416 - RNA, 19 nt, Homo sapiens
  misc_RNA (1)...(19): siRNA sense strand
gaagacagaaucaaaugug

SEQ ID NO: 863417 - RNA, 19 nt, Homo sapiens
  misc_RNA (1)...(19): siRNA sense strand
ggcaguggauuaccuagaa

SEQ ID NO: 863418 - RNA, 19 nt, Homo sapiens
  misc_RNA (1)...(19): siRNA sense strand
ggauaauggcaacaacuua

SEQ ID NO: 863419 - RNA, 19 nt, Homo sapiens
  misc_RNA (1)...(19): siRNA sense strand
gaaguggaacaccuuauug

SEQ ID NO: 863420 - RNA, 19 nt, Homo sapiens
  misc_RNA (1)...(19): siRNA sense strand
gaaggugucuauagagaac

SEQ ID NO: 863421 - RNA, 19 nt, Homo sapiens
  misc_RNA (1)...(19): siRNA sense strand
uggaacaccuuauugagaa

SEQ ID NO: 863422 - RNA, 19 nt, Homo sapiens
  misc_RNA (1)...(19): siRNA sense strand
ugacagaacuaaagauacu

SEQ ID NO: 863423 - RNA, 19 nt, Homo sapiens
  misc_RNA (1)...(19): siRNA sense strand
ggaguuacagagaagcuua

SEQ ID NO: 863424 - RNA, 19 nt, Homo sapiens
  misc_RNA (1)...(19): siRNA sense strand
ccaaguggauagcagagaa

SEQ ID NO: 863425 - RNA, 19 nt, Homo sapiens
  misc_RNA (1)...(19): siRNA sense strand
ggaacaccuuauugagaaa

SEQ ID NO: 863426 - RNA, 19 nt, Homo sapiens
  misc_RNA (1)...(19): siRNA sense strand
gaacuuugaauguggaaga

SEQ ID NO: 863427 - RNA, 19 nt, Homo sapiens
  misc_RNA (1)...(19): siRNA sense strand
ggacagaaguguguaucuc

SEQ ID NO: 863428 - RNA, 19 nt, Homo sapiens
  misc_RNA (1)...(19): siRNA sense strand
gaaguagaaaugccacuga

SEQ ID NO: 863429 - RNA, 19 nt, Homo sapiens
  misc_RNA (1)...(19): siRNA sense strand
caucuauuccugacuauuu

SEQ ID NO: 863430 - RNA, 19 nt, Homo sapiens
  misc_RNA (1)...(19): siRNA sense strand
caaaugugauagaccguau

SEQ ID NO: 863431 - RNA, 19 nt, Homo sapiens
  misc_RNA (1)...(19): siRNA sense strand
gcaguggauuaccuagaaa

SEQ ID NO: 863432 - RNA, 19 nt, Homo sapiens
  misc_RNA (1)...(19): siRNA sense strand
guuaagcucucaggcauug

SEQ ID NO: 863433 - RNA, 19 nt, Homo sapiens
  misc_RNA (1)...(19): siRNA sense strand
caaggaaaccaagacauuu

SEQ ID NO: 863434 - RNA, 19 nt, Homo sapiens
  misc_RNA (1)...(19): siRNA sense strand
gaaguaauaguuucauugg

SEQ ID NO: 863435 - RNA, 19 nt, Homo sapiens
  misc_RNA (1)...(19): siRNA sense strand
gaaagccaaacaucuauuc

SEQ ID NO: 863436 - RNA, 19 nt, Homo sapiens
  misc_RNA (1)...(19): siRNA sense strand
agagaaagccaaacaucua

SEQ ID NO: 863437 - RNA, 19 nt, Homo sapiens
  misc_RNA (1)...(19): siRNA sense strand
ggaaaugggcuucaguaag

SEQ ID NO: 863438 - RNA, 19 nt, Homo sapiens
  misc_RNA (1)...(19): siRNA sense strand
cagagaacuugaucgaaga

SEQ ID NO: 863439 - RNA, 19 nt, Homo sapiens
  misc_RNA (1)...(19): siRNA sense strand
gagaaagccaaacaucuau

SEQ ID NO: 863440 - RNA, 19 nt, Homo sapiens
  misc_RNA (1)...(19): siRNA sense strand
uggauuaccuagaaauaga

SEQ ID NO: 863441 - RNA, 19 nt, Homo sapiens
  misc_RNA (1)...(19): siRNA sense strand
gcuagaaguaaucucaaua

SEQ ID NO: 863442 - RNA, 19 nt, Homo sapiens
  misc_RNA (1)...(19): siRNA sense strand
acaugaaggugucuauaga

SEQ ID NO: 863443 - RNA, 19 nt, Homo sapiens
  misc_RNA (1)...(19): siRNA sense strand
gauaugacagaacuaaaga

SEQ ID NO: 863444 - RNA, 19 nt, Homo sapiens
  misc_RNA (1)...(19): siRNA sense strand
guacuucuuacaagcaaua

SEQ ID NO: 863445 - RNA, 19 nt, Homo sapiens
  misc_RNA (1)...(19): siRNA sense strand
gguaugacagcaguuguua

SEQ ID NO: 863446 - RNA, 19 nt, Homo sapiens
  misc_RNA (1)...(19): siRNA sense strand
ggacaauacagaucaucaa

SEQ ID NO: 863447 - RNA, 19 nt, Homo sapiens
  misc_RNA (1)...(19): siRNA sense strand
ugucaaaccuacaaaugau

SEQ ID NO: 863448 - RNA, 19 nt, Homo sapiens
  misc_RNA (1)...(19): siRNA sense strand
ggaagaaggcaccuacgau

SEQ ID NO: 863449 - RNA, 19 nt, Homo sapiens
  misc_RNA (1)...(19): siRNA sense strand
gaaauagagguucugaaag

SEQ ID NO: 863450 - RNA, 19 nt, Homo sapiens
  misc_RNA (1)...(19): siRNA sense strand
gaaggcaguggauuaccua

SEQ ID NO: 863451 - RNA, 19 nt, Homo sapiens
  misc_RNA (1)...(19): siRNA sense strand
gacaauacagaucaucaaa

SEQ ID NO: 863452 - RNA, 19 nt, Homo sapiens
  misc_RNA (1)...(19): siRNA sense strand
gaauguggaagaaccuaaa

SEQ ID NO: 863453 - RNA, 19 nt, Homo sapiens
  misc_RNA (1)...(19): siRNA sense strand
gaacacaccaccuggaacu

SEQ ID NO: 863454 - RNA, 19 nt, Homo sapiens
  misc_RNA (1)...(19): siRNA sense strand
agaaagcucugaagcacau

SEQ ID NO: 863455 - RNA, 19 nt, Homo sapiens
  misc_RNA (1)...(19): siRNA sense strand
gauaauggcaacaacuuag

SEQ ID NO: 863456 - RNA, 19 nt, Homo sapiens
  misc_RNA (1)...(19): siRNA sense strand
cagaauccaguucgaagua

SEQ ID NO: 863457 - RNA, 19 nt, Homo sapiens
  misc_RNA (1)...(19): siRNA sense strand
agaacugguugaugagaaa

SEQ ID NO: 863458 - RNA, 19 nt, Homo sapiens
  misc_RNA (1)...(19): siRNA sense strand
uaugacagcaguuguuaaa

SEQ ID NO: 863459 - RNA, 19 nt, Homo sapiens
  misc_RNA (1)...(19): siRNA sense strand
acgaagaucugggccaauu

SEQ ID NO: 863460 - RNA, 19 nt, Homo sapiens
  misc_RNA (1)...(19): siRNA sense strand
gaauccaguucgaaguaau

SEQ ID NO: 863461 - RNA, 19 nt, Homo sapiens
  misc_RNA (1)...(19): siRNA sense strand
aguaugggcugaagacaga

SEQ ID NO: 863462 - RNA, 19 nt, Homo sapiens
  misc_RNA (1)...(19): siRNA sense strand
gagacauccuccucgaaau

SEQ ID NO: 863463 - RNA, 19 nt, Homo sapiens
  misc_RNA (1)...(19): siRNA sense strand
uaaccgaaauagggaaguu

SEQ ID NO: 863464 - RNA, 19 nt, Homo sapiens
  misc_RNA (1)...(19): siRNA sense strand
cgaaguaauaguuucauug

SEQ ID NO: 863465 - RNA, 19 nt, Homo sapiens
  misc_RNA (1)...(19): siRNA sense strand
uugcacagcaguagaauuu

SEQ ID NO: 863466 - RNA, 19 nt, Homo sapiens
  misc_RNA (1)...(19): siRNA sense strand
gcaaggccaucagcaccaa

SEQ ID NO: 863467 - RNA, 19 nt, Homo sapiens
  misc_RNA (1)...(19): siRNA sense strand
gaagcuuucagugguauaa

SEQ ID NO: 863468 - RNA, 19 nt, Homo sapiens
  misc_RNA (1)...(19): siRNA sense strand
gaaguugaagcccuccauu

SEQ ID NO: 863469 - RNA, 19 nt, Homo sapiens
  misc_RNA (1)...(19): siRNA sense strand
aaucaucuauuccuaugga

SEQ ID NO: 863470 - RNA, 19 nt, Homo sapiens
  misc_RNA (1)...(19): siRNA sense strand
guagaaaugccacugaaag

SEQ ID NO: 863471 - RNA, 19 nt, Homo sapiens
  misc_RNA (1)...(19): siRNA sense strand
caaaggacggcugcuauug

SEQ ID NO: 863472 - RNA, 19 nt, Homo sapiens
  misc_RNA (1)...(19): siRNA sense strand
ucaagcccauucaaacaga

SEQ ID NO: 863473 - RNA, 19 nt, Homo sapiens
  misc_RNA (1)...(19): siRNA sense strand
caucuauuccuauggagua

SEQ ID NO: 863474 - RNA, 19 nt, Homo sapiens
  misc_RNA (1)...(19): siRNA sense strand
guguguaucucauguccaa

SEQ ID NO: 863475 - RNA, 19 nt, Homo sapiens
  misc_RNA (1)...(19): siRNA sense strand
gggaagacaacaaguuuua

SEQ ID NO: 863476 - RNA, 19 nt, Homo sapiens
  misc_RNA (1)...(19): siRNA sense strand
ugagacauccuccucgaaa

SEQ ID NO: 863477 - RNA, 19 nt, Homo sapiens
  misc_RNA (1)...(19): siRNA sense strand
gaaagaaaagucaaccaaa

SEQ ID NO: 863478 - RNA, 19 nt, Homo sapiens
  misc_RNA (1)...(19): siRNA sense strand
gcaaagagcaaggaaacca

SEQ ID NO: 863479 - RNA, 19 nt, Homo sapiens
  misc_RNA (1)...(19): siRNA sense strand
cagagaagcuuaucaaaac

SEQ ID NO: 863480 - RNA, 19 nt, Homo sapiens
  misc_RNA (1)...(19): siRNA sense strand
ccaguucgaaguaauaguu

SEQ ID NO: 863481 - RNA, 19 nt, Homo sapiens
  misc_RNA (1)...(19): siRNA sense strand
ugaaguggaacaccuuauu

SEQ ID NO: 863482 - RNA, 19 nt, Homo sapiens
  misc_RNA (1)...(19): siRNA sense strand
ugaagcacauaacggaaau

SEQ ID NO: 863483 - RNA, 19 nt, Homo sapiens
  misc_RNA (1)...(19): siRNA sense strand
caaguuacaaugccuguca

SEQ ID NO: 863484 - RNA, 19 nt, Homo sapiens
  misc_RNA (1)...(19): siRNA sense strand
ccacugaaaggaagacgaa

SEQ ID NO: 863485 - RNA, 19 nt, Homo sapiens
  misc_RNA (1)...(19): siRNA sense strand
aagacagaaucaaauguga

SEQ ID NO: 863486 - RNA, 19 nt, Homo sapiens
  misc_RNA (1)...(19): siRNA sense strand
uuuagaaggcaguggauua

SEQ ID NO: 863487 - RNA, 19 nt, Homo sapiens
  misc_RNA (1)...(19): siRNA sense strand
gcaucgaggcaagcucuua

SEQ ID NO: 863488 - RNA, 19 nt, Homo sapiens
  misc_RNA (1)...(19): siRNA sense strand
aaaugggaguuacagagaa

SEQ ID NO: 863489 - RNA, 19 nt, Homo sapiens
  misc_RNA (1)...(19): siRNA sense strand
aaauggagaaguagaaaug

SEQ ID NO: 863490 - RNA, 19 nt, Homo sapiens
  misc_RNA (1)...(19): siRNA sense strand
gaaguagguuuacgaguga

SEQ ID NO: 863491 - RNA, 19 nt, Homo sapiens
  misc_RNA (1)...(19): siRNA sense strand
gauccgagaugcaauucaa

SEQ ID NO: 863492 - RNA, 19 nt, Homo sapiens
  misc_RNA (1)...(19): siRNA sense strand
caaagcacuugaacgauga

SEQ ID NO: 863493 - RNA, 19 nt, Homo sapiens
  misc_RNA (1)...(19): siRNA sense strand
caacaugcaccuagacauu

SEQ ID NO: 863494 - RNA, 19 nt, Homo sapiens
  misc_RNA (1)...(19): siRNA sense strand
gaagagacccugauguucu

SEQ ID NO: 863495 - RNA, 19 nt, Homo sapiens
  misc_RNA (1)...(19): siRNA sense strand
aaacaaaacucugccaaua

SEQ ID NO: 863496 - RNA, 19 nt, Homo sapiens
  misc_RNA (1)...(19): siRNA sense strand
gaaugucccucuucuaugc

SEQ ID NO: 863497 - RNA, 19 nt, Homo sapiens
  misc_RNA (1)...(19): siRNA sense strand
cauccaagaucgauaugaa

SEQ ID NO: 863498 - RNA, 19 nt, Homo sapiens
  misc_RNA (1)...(19): siRNA sense strand
gcacuugaacgaugaauca

SEQ ID NO: 863499 - RNA, 19 nt, Homo sapiens
  misc_RNA (1)...(19): siRNA sense strand
acaagugucuguaaaguca

SEQ ID NO: 863500 - RNA, 19 nt, Homo sapiens
  misc_RNA (1)...(19): siRNA sense strand
gaaucaacuuccaaacaga

SEQ ID NO: 863501 - RNA, 19 nt, Homo sapiens
  misc_RNA (1)...(19): siRNA sense strand
gagaaugaagucaauaaug

SEQ ID NO: 863502 - RNA, 19 nt, Homo sapiens
  misc_RNA (1)...(19): siRNA sense strand
gaguacagaaguagguuua

SEQ ID NO: 863503 - RNA, 19 nt, Homo sapiens
  misc_RNA (1)...(19): siRNA sense strand
aaaggaguuugccgaaauu

SEQ ID NO: 863504 - RNA, 19 nt, Homo sapiens
  misc_RNA (1)...(19): siRNA sense strand
ccaaacagauucgagcaau

SEQ ID NO: 863505 - RNA, 19 nt, Homo sapiens
  misc_RNA (1)...(19): siRNA sense strand
cuacaaagcacuugaacga

SEQ ID NO: 863506 - RNA, 19 nt, Homo sapiens
  misc_RNA (1)...(19): siRNA sense strand
ggaguuugccgaaauuuua

SEQ ID NO: 863507 - RNA, 19 nt, Homo sapiens
  misc_RNA (1)...(19): siRNA sense strand
gcaccuagacauugagaau

SEQ ID NO: 863508 - RNA, 19 nt, Homo sapiens
  misc_RNA (1)...(19): siRNA sense strand
ugaaaacuauccacacuuu

SEQ ID NO: 863509 - RNA, 19 nt, Homo sapiens
  misc_RNA (1)...(19): siRNA sense strand
ugaaucaacuuccaaacag

SEQ ID NO: 863510 - RNA, 19 nt, Homo sapiens
  misc_RNA (1)...(19): siRNA sense strand
gcccucagguucacuacaa

SEQ ID NO: 863511 - RNA, 19 nt, Homo sapiens
  misc_RNA (1)...(19): siRNA sense strand
gugaagagacccugauguu

SEQ ID NO: 863512 - RNA, 19 nt, Homo sapiens
  misc_RNA (1)...(19): siRNA sense strand
caauagagaacaccacaga

SEQ ID NO: 863513 - RNA, 19 nt, Homo sapiens
  misc_RNA (1)...(19): siRNA sense strand
ugaagucaauaaugagaug

SEQ ID NO: 863514 - RNA, 19 nt, Homo sapiens
  misc_RNA (1)...(19): siRNA sense strand
caaacagauucgagcaaug

SEQ ID NO: 863515 - RNA, 19 nt, Homo sapiens
  misc_RNA (1)...(19): siRNA sense strand
caaugcacuuugucucuga

SEQ ID NO: 863516 - RNA, 19 nt, Homo sapiens
  misc_RNA (1)...(19): siRNA sense strand
ucaacaacaugcaccuaga

SEQ ID NO: 863517 - RNA, 19 nt, Homo sapiens
  misc_RNA (1)...(19): siRNA sense strand
gacauucagcuucaagaaa

SEQ ID NO: 863518 - RNA, 19 nt, Homo sapiens
  misc_RNA (1)...(19): siRNA sense strand
cuucagaguuuauuggaau

SEQ ID NO: 863519 - RNA, 19 nt, Homo sapiens
  misc_RNA (1)...(19): siRNA sense strand
ucgaugagcugaagaugag

SEQ ID NO: 863520 - RNA, 19 nt, Homo sapiens
  misc_RNA (1)...(19): siRNA sense strand
ccagggaaauugaaaacua

SEQ ID NO: 863521 - RNA, 19 nt, Homo sapiens
  misc_RNA (1)...(19): siRNA sense strand
ggugugcccucuuguugug

SEQ ID NO: 863522 - RNA, 19 nt, Homo sapiens
  misc_RNA (1)...(19): siRNA sense strand
auaaugagauggccaaucg

SEQ ID NO: 863523 - RNA, 19 nt, Homo sapiens
  misc_RNA (1)...(19): siRNA sense strand
guaaagucaugcuggaaac

SEQ ID NO: 863524 - RNA, 19 nt, Homo sapiens
  misc_RNA (1)...(19): siRNA sense strand
gcaaccgcaucaacaacau

SEQ ID NO: 863525 - RNA, 19 nt, Homo sapiens
  misc_RNA (1)...(19): siRNA sense strand
ugagauggccaaucgaaug

SEQ ID NO: 863526 - RNA, 19 nt, Homo sapiens
  misc_RNA (1)...(19): siRNA sense strand
ggaacccggcuauucagaa

SEQ ID NO: 863527 - RNA, 19 nt, Homo sapiens
  misc_RNA (1)...(19): siRNA sense strand
ggagucaucauccucuaug

SEQ ID NO: 863528 - RNA, 19 nt, Homo sapiens
  misc_RNA (1)...(19): siRNA sense strand
ugaggaacccggcuauuca

SEQ ID NO: 863529 - RNA, 19 nt, Homo sapiens
  misc_RNA (1)...(19): siRNA sense strand
acaaaacucugccaauaga

SEQ ID NO: 863530 - RNA, 19 nt, Homo sapiens
  misc_RNA (1)...(19): siRNA sense strand
gaucagcgccguccuucag

SEQ ID NO: 863531 - RNA, 19 nt, Homo sapiens
  misc_RNA (1)...(19): siRNA sense strand
cuaaaugcccucagguuca

SEQ ID NO: 863532 - RNA, 19 nt, Homo sapiens
  misc_RNA (1)...(19): siRNA sense strand
ucgaaugucccucuucuau

SEQ ID NO: 863533 - RNA, 19 nt, Homo sapiens
  misc_RNA (1)...(19): siRNA sense strand
gagauggccaaucgaaugu

SEQ ID NO: 863534 - RNA, 19 nt, Homo sapiens
  misc_RNA (1)...(19): siRNA sense strand
acaugcaccuagacauuga

SEQ ID NO: 863535 - RNA, 19 nt, Homo sapiens
  misc_RNA (1)...(19): siRNA sense strand
ccagagauccgagaugcaa

SEQ ID NO: 863536 - RNA, 19 nt, Homo sapiens
  misc_RNA (1)...(19): siRNA sense strand
ggagcuuucugcaagacau

SEQ ID NO: 863537 - RNA, 19 nt, Homo sapiens
  misc_RNA (1)...(19): siRNA sense strand
ggaguacagaaguagguuu

SEQ ID NO: 863538 - RNA, 19 nt, Homo sapiens
  misc_RNA (1)...(19): siRNA sense strand
gcaaugccacaaugcacuu

SEQ ID NO: 863539 - RNA, 19 nt, Homo sapiens
  misc_RNA (1)...(19): siRNA sense strand
gcagaagccacgccaaugc

SEQ ID NO: 863540 - RNA, 19 nt, Homo sapiens
  misc_RNA (1)...(19): siRNA sense strand
gaaugaagucaauaaugag

SEQ ID NO: 863541 - RNA, 19 nt, Homo sapiens
  misc_RNA (1)...(19): siRNA sense strand
acccugauguucugcauga

SEQ ID NO: 863542 - RNA, 19 nt, Homo sapiens
  misc_RNA (1)...(19): siRNA sense strand
gcggugugcccucuuguug

SEQ ID NO: 863543 - RNA, 19 nt, Homo sapiens
  misc_RNA (1)...(19): siRNA sense strand
gaaaggcugcauaaaaguu

SEQ ID NO: 863544 - RNA, 19 nt, Homo sapiens
  misc_RNA (1)...(19): siRNA sense strand
agacauccaagaucgauau

SEQ ID NO: 863545 - RNA, 19 nt, Homo sapiens
  misc_RNA (1)...(19): siRNA sense strand
ccaaucgaaugucccucuu

SEQ ID NO: 863546 - RNA, 19 nt, Homo sapiens
  misc_RNA (1)...(19): siRNA sense strand
ugacauucagcuucaagaa

SEQ ID NO: 863547 - RNA, 19 nt, Homo sapiens
  misc_RNA (1)...(19): siRNA sense strand
guacagaaguagguuuacg

SEQ ID NO: 863548 - RNA, 19 nt, Homo sapiens
  misc_RNA (1)...(19): siRNA sense strand
ucagcacaaugacaagugu

SEQ ID NO: 863549 - RNA, 19 nt, Homo sapiens
  misc_RNA (1)...(19): siRNA sense strand
acauucagcuucaagaaaa

SEQ ID NO: 863550 - RNA, 19 nt, Homo sapiens
  misc_RNA (1)...(19): siRNA sense strand
aagagacccugauguucug

SEQ ID NO: 863551 - RNA, 19 nt, Homo sapiens
  misc_RNA (1)...(19): siRNA sense strand
gcaagacauccaagaucga

SEQ ID NO: 863552 - RNA, 19 nt, Homo sapiens
  misc_RNA (1)...(19): siRNA sense strand
cgaaugucccucuucuaug

SEQ ID NO: 863553 - RNA, 19 nt, Homo sapiens
  misc_RNA (1)...(19): siRNA sense strand
uguaaagucaugcuggaaa

SEQ ID NO: 863554 - RNA, 19 nt, Homo sapiens
  misc_RNA (1)...(19): siRNA sense strand
ccuuagcaaugccacaaug

SEQ ID NO: 863555 - RNA, 19 nt, Homo sapiens
  misc_RNA (1)...(19): siRNA sense strand
cgaugaaucaacuuccaaa

SEQ ID NO: 863556 - RNA, 19 nt, Homo sapiens
  misc_RNA (1)...(19): siRNA sense strand
guugugaggcuaaagagau

SEQ ID NO: 863557 - RNA, 19 nt, Homo sapiens
  misc_RNA (1)...(19): siRNA sense strand
ucacuacaaagcacuugaa

SEQ ID NO: 863558 - RNA, 19 nt, Homo sapiens
  misc_RNA (1)...(19): siRNA sense strand
agagagaaaucuggaacca

SEQ ID NO: 863559 - RNA, 19 nt, Homo sapiens
  misc_RNA (1)...(19): siRNA sense strand
agaaggagagagagaaauc

SEQ ID NO: 863560 - RNA, 19 nt, Homo sapiens
  misc_RNA (1)...(19): siRNA sense strand
ugaagagacccugauguuc

SEQ ID NO: 863561 - RNA, 19 nt, Homo sapiens
  misc_RNA (1)...(19): siRNA sense strand
cuacagaaggagagagaga

SEQ ID NO: 863562 - RNA, 19 nt, Homo sapiens
  misc_RNA (1)...(19): siRNA sense strand
aaucgaaugucccucuucu

SEQ ID NO: 863563 - RNA, 19 nt, Homo sapiens
  misc_RNA (1)...(19): siRNA sense strand
gagagagagaaaucuggaa

SEQ ID NO: 863564 - RNA, 19 nt, Homo sapiens
  misc_RNA (1)...(19): siRNA sense strand
gaaggagagagagaaaucu

SEQ ID NO: 863565 - RNA, 19 nt, Homo sapiens
  misc_RNA (1)...(19): siRNA sense strand
cagacugccucagcacaau

SEQ ID NO: 863566 - RNA, 19 nt, Homo sapiens
  misc_RNA (1)...(19): siRNA sense strand
acagaaggagagagagaaa

SEQ ID NO: 863567 - RNA, 19 nt, Homo sapiens
  misc_RNA (1)...(19): siRNA sense strand
caagacauccaagaucgau

SEQ ID NO: 863568 - RNA, 19 nt, Homo sapiens
  misc_RNA (1)...(19): siRNA sense strand
uugugaggcuaaagagauu

SEQ ID NO: 863569 - RNA, 19 nt, Homo sapiens
  misc_RNA (1)...(19): siRNA sense strand
guccuuaccagggaaauug

SEQ ID NO: 863570 - RNA, 19 nt, Homo sapiens
  misc_RNA (1)...(19): siRNA sense strand
agagauccgagaugcaauu

SEQ ID NO: 863571 - RNA, 19 nt, Homo sapiens
  misc_RNA (1)...(19): siRNA sense strand
gaugaggaacccggcuauu

SEQ ID NO: 863572 - RNA, 19 nt, Homo sapiens
  misc_RNA (1)...(19): siRNA sense strand
caacccaacaccuggaaag

SEQ ID NO: 863573 - RNA, 19 nt, Homo sapiens
  misc_RNA (1)...(19): siRNA sense strand
gugggagcuuucugcaaga

SEQ ID NO: 863574 - RNA, 19 nt, Homo sapiens
  misc_RNA (1)...(19): siRNA sense strand
uaaaugcccucagguucac

SEQ ID NO: 863575 - RNA, 19 nt, Homo sapiens
  misc_RNA (1)...(19): siRNA sense strand
uuauuggaaucucugacuu

SEQ ID NO: 863576 - RNA, 19 nt, Homo sapiens
  misc_RNA (1)...(19): siRNA sense strand
cauccucuaugaccauguc

SEQ ID NO: 863577 - RNA, 19 nt, Homo sapiens
  misc_RNA (1)...(19): siRNA sense strand
gagugaagagacccugaug

SEQ ID NO: 863578 - RNA, 19 nt, Homo sapiens
  misc_RNA (1)...(19): siRNA sense strand
cagggaaauugaaaacuau

SEQ ID NO: 863579 - RNA, 19 nt, Homo sapiens
  misc_RNA (1)...(19): siRNA sense strand
ccagaucagcgccguccuu

SEQ ID NO: 863580 - RNA, 19 nt, Homo sapiens
  misc_RNA (1)...(19): siRNA sense strand
aaugagauggccaaucgaa

SEQ ID NO: 863581 - RNA, 19 nt, Homo sapiens
  misc_RNA (1)...(19): siRNA sense strand
aaacagauucgagcaaugc

SEQ ID NO: 863582 - RNA, 19 nt, Homo sapiens
  misc_RNA (1)...(19): siRNA sense strand
gagcagcacugaaagaauu

SEQ ID NO: 863583 - RNA, 19 nt, Homo sapiens
  misc_RNA (1)...(19): siRNA sense strand
ccaccuaacugcugaugua

SEQ ID NO: 863584 - RNA, 19 nt, Homo sapiens
  misc_RNA (1)...(19): siRNA sense strand
gcaaggaaacuaccugaaa

SEQ ID NO: 863585 - RNA, 19 nt, Homo sapiens
  misc_RNA (1)...(19): siRNA sense strand
auaaggagcugaaccguuu

SEQ ID NO: 863586 - RNA, 19 nt, Homo sapiens
  misc_RNA (1)...(19): siRNA sense strand
gaacgucucauagauuuaa

SEQ ID NO: 863587 - RNA, 19 nt, Homo sapiens
  misc_RNA (1)...(19): siRNA sense strand
gcagacagauguacagaag

SEQ ID NO: 863588 - RNA, 19 nt, Homo sapiens
  misc_RNA (1)...(19): siRNA sense strand
ucaauuagguccugaaugg

SEQ ID NO: 863589 - RNA, 19 nt, Homo sapiens
  misc_RNA (1)...(19): siRNA sense strand
gaagaaaucaaaccucaug

SEQ ID NO: 863590 - RNA, 19 nt, Homo sapiens
  misc_RNA (1)...(19): siRNA sense strand
gaauguacagucuauguuu

SEQ ID NO: 863591 - RNA, 19 nt, Homo sapiens
  misc_RNA (1)...(19): siRNA sense strand
gcaauaucguucagcaaga

SEQ ID NO: 863592 - RNA, 19 nt, Homo sapiens
  misc_RNA (1)...(19): siRNA sense strand
caucuggucuuaccuauag

SEQ ID NO: 863593 - RNA, 19 nt, Homo sapiens
  misc_RNA (1)...(19): siRNA sense strand
gaagugagagcaacagguu

SEQ ID NO: 863594 - RNA, 19 nt, Homo sapiens
  misc_RNA (1)...(19): siRNA sense strand
cuauagcacuuaacaaaga

SEQ ID NO: 863595 - RNA, 19 nt, Homo sapiens
  misc_RNA (1)...(19): siRNA sense strand
ugaagaauguacagucuau

SEQ ID NO: 863596 - RNA, 19 nt, Homo sapiens
  misc_RNA (1)...(19): siRNA sense strand
ggucuuaccuauagcacuu

SEQ ID NO: 863597 - RNA, 19 nt, Homo sapiens
  misc_RNA (1)...(19): siRNA sense strand
gcacauggccacaaauuac

SEQ ID NO: 863598 - RNA, 19 nt, Homo sapiens
  misc_RNA (1)...(19): siRNA sense strand
gcacaguuggguccuauuu

SEQ ID NO: 863599 - RNA, 19 nt, Homo sapiens
  misc_RNA (1)...(19): siRNA sense strand
gcaguuaugcccagaaugu

SEQ ID NO: 863600 - RNA, 19 nt, Homo sapiens
  misc_RNA (1)...(19): siRNA sense strand
acacagacauucuauaagg

SEQ ID NO: 863601 - RNA, 19 nt, Homo sapiens
  misc_RNA (1)...(19): siRNA sense strand
caggaagcacuaaguaaua

SEQ ID NO: 863602 - RNA, 19 nt, Homo sapiens
  misc_RNA (1)...(19): siRNA sense strand
gauccuaucccuaaaguca

SEQ ID NO: 863603 - RNA, 19 nt, Homo sapiens
  misc_RNA (1)...(19): siRNA sense strand
guuuaacgaugcuguuuga

SEQ ID NO: 863604 - RNA, 19 nt, Homo sapiens
  misc_RNA (1)...(19): siRNA sense strand
gagcacauggccacaaauu

SEQ ID NO: 863605 - RNA, 19 nt, Homo sapiens
  misc_RNA (1)...(19): siRNA sense strand
ccuagcagcccaugguuua

SEQ ID NO: 863606 - RNA, 19 nt, Homo sapiens
  misc_RNA (1)...(19): siRNA sense strand
agacagauguacagaagau

SEQ ID NO: 863607 - RNA, 19 nt, Homo sapiens
  misc_RNA (1)...(19): siRNA sense strand
caauaucguucagcaagaa

SEQ ID NO: 863608 - RNA, 19 nt, Homo sapiens
  misc_RNA (1)...(19): siRNA sense strand
aaauugauccuaucccuaa

SEQ ID NO: 863609 - RNA, 19 nt, Homo sapiens
  misc_RNA (1)...(19): siRNA sense strand
cgacaguggugguaaugga

SEQ ID NO: 863610 - RNA, 19 nt, Homo sapiens
  misc_RNA (1)...(19): siRNA sense strand
uugaacgucucauagauuu

SEQ ID NO: 863611 - RNA, 19 nt, Homo sapiens
  misc_RNA (1)...(19): siRNA sense strand
cuaaagucauuaacacaga

SEQ ID NO: 863612 - RNA, 19 nt, Homo sapiens
  misc_RNA (1)...(19): siRNA sense strand
caaggaaacuaccugaaaa

SEQ ID NO: 863613 - RNA, 19 nt, Homo sapiens
  misc_RNA (1)...(19): siRNA sense strand
gacauucccuagccacuca

SEQ ID NO: 863614 - RNA, 19 nt, Homo sapiens
  misc_RNA (1)...(19): siRNA sense strand
ggccacaaauuacaagcuu

SEQ ID NO: 863615 - RNA, 19 nt, Homo sapiens
  misc_RNA (1)...(19): siRNA sense strand
gaaggaaugguagcgauug

SEQ ID NO: 863616 - RNA, 19 nt, Homo sapiens
  misc_RNA (1)...(19): siRNA sense strand
gccagaaccuuuuguugua

SEQ ID NO: 863617 - RNA, 19 nt, Homo sapiens
  misc_RNA (1)...(19): siRNA sense strand
ccuaacugcugauguacaa

SEQ ID NO: 863618 - RNA, 19 nt, Homo sapiens
  misc_RNA (1)...(19): siRNA sense strand
cuacaggaagcacuaagua

SEQ ID NO: 863619 - RNA, 19 nt, Homo sapiens
  misc_RNA (1)...(19): siRNA sense strand
gagcaacagguuuccacua

SEQ ID NO: 863620 - RNA, 19 nt, Homo sapiens
  misc_RNA (1)...(19): siRNA sense strand
ugaagaaauugauccuauc

SEQ ID NO: 863621 - RNA, 19 nt, Homo sapiens
  misc_RNA (1)...(19): siRNA sense strand
gaccagaacaucacaccuu

SEQ ID NO: 863622 - RNA, 19 nt, Homo sapiens
  misc_RNA (1)...(19): siRNA sense strand
acaguuggguccuauuuca

SEQ ID NO: 863623 - RNA, 19 nt, Homo sapiens
  misc_RNA (1)...(19): siRNA sense strand
ggaaggaaugguagcgauu

SEQ ID NO: 863624 - RNA, 19 nt, Homo sapiens
  misc_RNA (1)...(19): siRNA sense strand
uaacaaagaaggugaugag

SEQ ID NO: 863625 - RNA, 19 nt, Homo sapiens
  misc_RNA (1)...(19): siRNA sense strand
ccacaaauuacaagcuuga

SEQ ID NO: 863626 - RNA, 19 nt, Homo sapiens
  misc_RNA (1)...(19): siRNA sense strand
ggaaugguagcgauuguuc

SEQ ID NO: 863627 - RNA, 19 nt, Homo sapiens
  misc_RNA (1)...(19): siRNA sense strand
gacccgaccugugucuauu

SEQ ID NO: 863628 - RNA, 19 nt, Homo sapiens
  misc_RNA (1)...(19): siRNA sense strand
gauguaucccuuuccauga

SEQ ID NO: 863629 - RNA, 19 nt, Homo sapiens
  misc_RNA (1)...(19): siRNA sense strand
gagggucacugcgacauuc

SEQ ID NO: 863630 - RNA, 19 nt, Homo sapiens
  misc_RNA (1)...(19): siRNA sense strand
caugaugucucucuuugag

SEQ ID NO: 863631 - RNA, 19 nt, Homo sapiens
  misc_RNA (1)...(19): siRNA sense strand
gcgcaguuaugcccagaau

SEQ ID NO: 863632 - RNA, 19 nt, Homo sapiens
  misc_RNA (1)...(19): siRNA sense strand
gguccugaauggcauggaa

SEQ ID NO: 863633 - RNA, 19 nt, Homo sapiens
  misc_RNA (1)...(19): siRNA sense strand
ucucaaguguggccaccua

SEQ ID NO: 863634 - RNA, 19 nt, Homo sapiens
  misc_RNA (1)...(19): siRNA sense strand
ugaugacaaugaagaugaa

SEQ ID NO: 863635 - RNA, 19 nt, Homo sapiens
  misc_RNA (1)...(19): siRNA sense strand
uuacagcacuugugguuuu

SEQ ID NO: 863636 - RNA, 19 nt, Homo sapiens
  misc_RNA (1)...(19): siRNA sense strand
acugauagguuuggcauau

SEQ ID NO: 863637 - RNA, 19 nt, Homo sapiens
  misc_RNA (1)...(19): siRNA sense strand
uacagucuauguuuggaaa

SEQ ID NO: 863638 - RNA, 19 nt, Homo sapiens
  misc_RNA (1)...(19): siRNA sense strand
aggaagcacuaaguaauau

SEQ ID NO: 863639 - RNA, 19 nt, Homo sapiens
  misc_RNA (1)...(19): siRNA sense strand
ucacugaugacaaugaaga

SEQ ID NO: 863640 - RNA, 19 nt, Homo sapiens
  misc_RNA (1)...(19): siRNA sense strand
gacaucuggucuuaccuau

SEQ ID NO: 863641 - RNA, 19 nt, Homo sapiens
  misc_RNA (1)...(19): siRNA sense strand
gagauuauaauacccuaca

SEQ ID NO: 863642 - RNA, 19 nt, Homo sapiens
  misc_RNA (1)...(19): siRNA sense strand
gcaccuagcagcccauggu

SEQ ID NO: 863643 - RNA, 19 nt, Homo sapiens
  misc_RNA (1)...(19): siRNA sense strand
gguccuauuucagaugcua

SEQ ID NO: 863644 - RNA, 19 nt, Homo sapiens
  misc_RNA (1)...(19): siRNA sense strand
gaagcacuaaguaauaugg

SEQ ID NO: 863645 - RNA, 19 nt, Homo sapiens
  misc_RNA (1)...(19): siRNA sense strand
guaccggcaccucugagua

SEQ ID NO: 863646 - RNA, 19 nt, Homo sapiens
  misc_RNA (1)...(19): siRNA sense strand
acagauguacagaagauuu

SEQ ID NO: 863647 - RNA, 19 nt, Homo sapiens
  misc_RNA (1)...(19): siRNA sense strand
cugauagguuuggcauaua

SEQ ID NO: 863648 - RNA, 19 nt, Homo sapiens
  misc_RNA (1)...(19): siRNA sense strand
gggagcagcacugaaagaa

SEQ ID NO: 863649 - RNA, 19 nt, Homo sapiens
  misc_RNA (1)...(19): siRNA sense strand
accagaacaucacaccuuu

SEQ ID NO: 863650 - RNA, 19 nt, Homo sapiens
  misc_RNA (1)...(19): siRNA sense strand
ccucugaguaugccgcuua

SEQ ID NO: 863651 - RNA, 19 nt, Homo sapiens
  misc_RNA (1)...(19): siRNA sense strand
aauguacagucuauguuug

SEQ ID NO: 863652 - RNA, 19 nt, Homo sapiens
  misc_RNA (1)...(19): siRNA sense strand
cacagacauucuauaagga

SEQ ID NO: 863653 - RNA, 19 nt, Homo sapiens
  misc_RNA (1)...(19): siRNA sense strand
acaggaagcacuaaguaau

SEQ ID NO: 863654 - RNA, 19 nt, Homo sapiens
  misc_RNA (1)...(19): siRNA sense strand
cugaguaugccgcuuauga

SEQ ID NO: 863655 - RNA, 19 nt, Homo sapiens
  misc_RNA (1)...(19): siRNA sense strand
gcaagaagaaaucaaaccu

SEQ ID NO: 863656 - RNA, 19 nt, Homo sapiens
  misc_RNA (1)...(19): siRNA sense strand
acagcaagaagaaaucaaa

SEQ ID NO: 863657 - RNA, 19 nt, Homo sapiens
  misc_RNA (1)...(19): siRNA sense strand
gaugaagaaauugauccua

SEQ ID NO: 863658 - RNA, 19 nt, Homo sapiens
  misc_RNA (1)...(19): siRNA sense strand
ugauagguuuggcauauac

SEQ ID NO: 863659 - RNA, 19 nt, Homo sapiens
  misc_RNA (1)...(19): siRNA sense strand
uuucaucacuuugggaguu

SEQ ID NO: 863660 - RNA, 19 nt, Homo sapiens
  misc_RNA (1)...(19): siRNA sense strand
uacaggaagcacuaaguaa

SEQ ID NO: 863661 - RNA, 19 nt, Homo sapiens
  misc_RNA (1)...(19): siRNA sense strand
ggagcagcacugaaagaau

SEQ ID NO: 863662 - RNA, 19 nt, Homo sapiens
  misc_RNA (1)...(19): siRNA sense strand
cucaugaugucucucuuug

SEQ ID NO: 863663 - RNA, 19 nt, Homo sapiens
  misc_RNA (1)...(19): siRNA sense strand
gaagaaauugauccuaucc

SEQ ID NO: 863664 - RNA, 19 nt, Homo sapiens
  misc_RNA (1)...(19): siRNA sense strand
caaaaucaacgaagugaga

SEQ ID NO: 863665 - RNA, 19 nt, Homo sapiens
  misc_RNA (1)...(19): siRNA sense strand
ggaagcacuaaguaauaug

SEQ ID NO: 863666 - RNA, 19 nt, Homo sapiens
  misc_RNA (1)...(19): siRNA sense strand
ucugggagcagcacugaaa

SEQ ID NO: 863667 - RNA, 19 nt, Homo sapiens
  misc_RNA (1)...(19): siRNA sense strand
uggcgaggaugacaauaag

SEQ ID NO: 863668 - RNA, 19 nt, Homo sapiens
  misc_RNA (1)...(19): siRNA sense strand
cauuaacacagauuuggaa

SEQ ID NO: 863669 - RNA, 19 nt, Homo sapiens
  misc_RNA (1)...(19): siRNA sense strand
ccuugaacgucucauagau

SEQ ID NO: 863670 - RNA, 19 nt, Homo sapiens
  misc_RNA (1)...(19): siRNA sense strand
caacgaagugagagcaaca

SEQ ID NO: 863671 - RNA, 19 nt, Homo sapiens
  misc_RNA (1)...(19): siRNA sense strand
uuaguugguguuugcaaua

SEQ ID NO: 863672 - RNA, 19 nt, Homo sapiens
  misc_RNA (1)...(19): siRNA sense strand
agaaugggguggugcaauu

SEQ ID NO: 863673 - RNA, 19 nt, Homo sapiens
  misc_RNA (1)...(19): siRNA sense strand
uggcugacaugcuggaaag

SEQ ID NO: 863674 - RNA, 19 nt, Homo sapiens
  misc_RNA (1)...(19): siRNA sense strand
cacgagagauuauaauacc

SEQ ID NO: 863675 - RNA, 19 nt, Homo sapiens
  misc_RNA (1)...(19): siRNA sense strand
uugagcacauggccacaaa

SEQ ID NO: 863676 - RNA, 19 nt, Homo sapiens
  misc_RNA (1)...(19): siRNA sense strand
gcuuaugaccagaacauca

SEQ ID NO: 863677 - RNA, 19 nt, Homo sapiens
  misc_RNA (1)...(19): siRNA sense strand
ugagacagcccacccugau

SEQ ID NO: 863678 - RNA, 19 nt, Homo sapiens
  misc_RNA (1)...(19): siRNA sense strand
ucacgagagauuauaauac

SEQ ID NO: 863679 - RNA, 19 nt, Homo sapiens
  misc_RNA (1)...(19): siRNA sense strand
gcugaaccguuugcgaaag

SEQ ID NO: 863680 - RNA, 19 nt, Homo sapiens
  misc_RNA (1)...(19): siRNA sense strand
gugacugucuggaucaaac

SEQ ID NO: 863681 - RNA, 19 nt, Homo sapiens
  misc_RNA (1)...(19): siRNA sense strand
ccucaugaugucucucuuu

SEQ ID NO: 863682 - RNA, 19 nt, Homo sapiens
  misc_RNA (1)...(19): siRNA sense strand
ggaaccgggugccauguuu

SEQ ID NO: 863683 - RNA, 19 nt, Homo sapiens
  misc_RNA (1)...(19): siRNA sense strand
caagaggcauuugacgaua

SEQ ID NO: 863684 - RNA, 19 nt, Homo sapiens
  misc_RNA (1)...(19): siRNA sense strand
cauagucauugguaucaua

SEQ ID NO: 863685 - RNA, 19 nt, Homo sapiens
  misc_RNA (1)...(19): siRNA sense strand
cgauaaugauggauauuga

SEQ ID NO: 863686 - RNA, 19 nt, Homo sapiens
  misc_RNA (1)...(19): siRNA sense strand
ggaaacauggacaaauuug

SEQ ID NO: 863687 - RNA, 19 nt, Homo sapiens
  misc_RNA (1)...(19): siRNA sense strand
uuggaaacauggacaaauu

SEQ ID NO: 863688 - RNA, 19 nt, Homo sapiens
  misc_RNA (1)...(19): siRNA sense strand
ugacgauaaugauggauau

SEQ ID NO: 863689 - RNA, 19 nt, Homo sapiens
  misc_RNA (1)...(19): siRNA sense strand
caacggcucccucagcuau

SEQ ID NO: 863690 - RNA, 19 nt, Homo sapiens
  misc_RNA (1)...(19): siRNA sense strand
gaagcugccugagaugaca

SEQ ID NO: 863691 - RNA, 19 nt, Homo sapiens
  misc_RNA (1)...(19): siRNA sense strand
caaaauccauggacaagga

SEQ ID NO: 863692 - RNA, 19 nt, Homo sapiens
  misc_RNA (1)...(19): siRNA sense strand
ggacaaggaaagaagaauc

SEQ ID NO: 863693 - RNA, 19 nt, Homo sapiens
  misc_RNA (1)...(19): siRNA sense strand
gcaaugccauggugaugac

SEQ ID NO: 863694 - RNA, 19 nt, Homo sapiens
  misc_RNA (1)...(19): siRNA sense strand
ggauauugauggcaagcau

SEQ ID NO: 863695 - RNA, 19 nt, Homo sapiens
  misc_RNA (1)...(19): siRNA sense strand
aagaggcauuugacgauaa

SEQ ID NO: 863696 - RNA, 19 nt, Homo sapiens
  misc_RNA (1)...(19): siRNA sense strand
ccauggugaugacccagua

SEQ ID NO: 863697 - RNA, 19 nt, Homo sapiens
  misc_RNA (1)...(19): siRNA sense strand
gucaaacguucgaguacuu

SEQ ID NO: 863698 - RNA, 19 nt, Homo sapiens
  misc_RNA (1)...(19): siRNA sense strand
ggauggguccaggauguua

SEQ ID NO: 863699 - RNA, 19 nt, Homo sapiens
  misc_RNA (1)...(19): siRNA sense strand
guaaacagggugccuugug

SEQ ID NO: 863700 - RNA, 19 nt, Homo sapiens
  misc_RNA (1)...(19): siRNA sense strand
gaugucauuuccuugaagu

SEQ ID NO: 863701 - RNA, 19 nt, Homo sapiens
  misc_RNA (1)...(19): siRNA sense strand
gaguauuuguagacaccua

SEQ ID NO: 863702 - RNA, 19 nt, Homo sapiens
  misc_RNA (1)...(19): siRNA sense strand
gugauucgcuacgucaaga

SEQ ID NO: 863703 - RNA, 19 nt, Homo sapiens
  misc_RNA (1)...(19): siRNA sense strand
ucucagccauggugaacaa

SEQ ID NO: 863704 - RNA, 19 nt, Homo sapiens
  misc_RNA (1)...(19): siRNA sense strand
gcaaucugguacacaaagg

SEQ ID NO: 863705 - RNA, 19 nt, Homo sapiens
  misc_RNA (1)...(19): siRNA sense strand
auaugaagcugccugagau

SEQ ID NO: 863706 - RNA, 19 nt, Homo sapiens
  misc_RNA (1)...(19): siRNA sense strand
ggauguuacuccuucuucu

SEQ ID NO: 863707 - RNA, 19 nt, Homo sapiens
  misc_RNA (1)...(19): siRNA sense strand
cgggauggguccaggaugu

SEQ ID NO: 863708 - RNA, 19 nt, Homo sapiens
  misc_RNA (1)...(19): siRNA sense strand
ccccagauaugcaaaguaa

SEQ ID NO: 863709 - RNA, 19 nt, Homo sapiens
  misc_RNA (1)...(19): siRNA sense strand
gccgaaagcgcuucuacug

SEQ ID NO: 863710 - RNA, 19 nt, Homo sapiens
  misc_RNA (1)...(19): siRNA sense strand
gauguuacuccuucuucuu

SEQ ID NO: 863711 - RNA, 19 nt, Homo sapiens
  misc_RNA (1)...(19): siRNA sense strand
ggugccauguuuccugaga

SEQ ID NO: 863712 - RNA, 19 nt, Homo sapiens
  misc_RNA (1)...(19): siRNA sense strand
ccagauaugcaaaguaaac

SEQ ID NO: 863713 - RNA, 19 nt, Homo sapiens
  misc_RNA (1)...(19): siRNA sense strand
ccgaaagcgcuucuacuga

SEQ ID NO: 863714 - RNA, 19 nt, Homo sapiens
  misc_RNA (1)...(19): siRNA sense strand
gacaaggaaagaagaaucu

SEQ ID NO: 863715 - RNA, 19 nt, Homo sapiens
  misc_RNA (1)...(19): siRNA sense strand
ggucaaacguucgaguacu

SEQ ID NO: 863716 - RNA, 19 nt, Homo sapiens
  misc_RNA (1)...(19): siRNA sense strand
gcagcaagagcggguauuc

SEQ ID NO: 863717 - RNA, 19 nt, Homo sapiens
  misc_RNA (1)...(19): siRNA sense strand
ggaaucugaugggcaaugc

SEQ ID NO: 863718 - RNA, 19 nt, Homo sapiens
  misc_RNA (1)...(19): siRNA sense strand
uggaaacauggacaaauuu

SEQ ID NO: 863719 - RNA, 19 nt, Homo sapiens
  misc_RNA (1)...(19): siRNA sense strand
ucauuuccuugaaguuguu

SEQ ID NO: 863720 - RNA, 19 nt, Homo sapiens
  misc_RNA (1)...(19): siRNA sense strand
gaaccgggugccauguuuc

SEQ ID NO: 863721 - RNA, 19 nt, Homo sapiens
  misc_RNA (1)...(19): siRNA sense strand
uggagggacugcauugaag

SEQ ID NO: 863722 - RNA, 19 nt, Homo sapiens
  misc_RNA (1)...(19): siRNA sense strand
guggagggacugcauugaa

SEQ ID NO: 863723 - RNA, 19 nt, Homo sapiens
  misc_RNA (1)...(19): siRNA sense strand
gggcugggaguauuuguag

SEQ ID NO: 863724 - RNA, 19 nt, Homo sapiens
  misc_RNA (1)...(19): siRNA sense strand
ucucucagauaaucaugau

SEQ ID NO: 863725 - RNA, 19 nt, Homo sapiens
  misc_RNA (1)...(19): siRNA sense strand
aauaugaagcugccugaga

SEQ ID NO: 863726 - RNA, 19 nt, Homo sapiens
  misc_RNA (1)...(19): siRNA sense strand
gcacaggcaguuccucacu

SEQ ID NO: 863727 - RNA, 19 nt, Homo sapiens
  misc_RNA (1)...(19): siRNA sense strand
ggagagaaccccagaagag

SEQ ID NO: 863728 - RNA, 19 nt, Homo sapiens
  misc_RNA (1)...(19): siRNA sense strand
gucauuuccuugaaguugu

SEQ ID NO: 863729 - RNA, 19 nt, Homo sapiens
  misc_RNA (1)...(19): siRNA sense strand
ucucagauaaucaugaugu

SEQ ID NO: 863730 - RNA, 19 nt, Homo sapiens
  misc_RNA (1)...(19): siRNA sense strand
agaggcauuugacgauaau

SEQ ID NO: 863731 - RNA, 19 nt, Homo sapiens
  misc_RNA (1)...(19): siRNA sense strand
gaguggagggacugcauug

SEQ ID NO: 863732 - RNA, 19 nt, Homo sapiens
  misc_RNA (1)...(19): siRNA sense strand
ccugagagacugggaguug

SEQ ID NO: 863733 - RNA, 19 nt, Homo sapiens
  misc_RNA (1)...(19): siRNA sense strand
uguauuugccauagucauu

SEQ ID NO: 863734 - RNA, 19 nt, Homo sapiens
  misc_RNA (1)...(19): siRNA sense strand
gggauggcuuggcaaucug

SEQ ID NO: 863735 - RNA, 19 nt, Homo sapiens
  misc_RNA (1)...(19): siRNA sense strand
caacaaauggcaggaacag

SEQ ID NO: 863736 - RNA, 19 nt, Homo sapiens
  misc_RNA (1)...(19): siRNA sense strand
guauuugccauagucauug

SEQ ID NO: 863737 - RNA, 19 nt, Homo sapiens
  misc_RNA (1)...(19): siRNA sense strand
ggagggacugcauugaagu

SEQ ID NO: 863738 - RNA, 19 nt, Homo sapiens
  misc_RNA (1)...(19): siRNA sense strand
ggugaugacccaguauauc

SEQ ID NO: 863739 - RNA, 19 nt, Homo sapiens
  misc_RNA (1)...(19): siRNA sense strand
ugccauguuuccugagaga

SEQ ID NO: 863740 - RNA, 19 nt, Homo sapiens
  misc_RNA (1)...(19): siRNA sense strand
gagggacugcauugaagug

SEQ ID NO: 863741 - RNA, 19 nt, Homo sapiens
  misc_RNA (1)...(19): siRNA sense strand
uccgcaaucuucauuacga

SEQ ID NO: 863742 - RNA, 19 nt, Homo sapiens
  misc_RNA (1)...(19): siRNA sense strand
uuggcaaucugguacacaa

SEQ ID NO: 863743 - RNA, 19 nt, Homo sapiens
  misc_RNA (1)...(19): siRNA sense strand
gcaggaacagagccgaaag

SEQ ID NO: 863744 - RNA, 19 nt, Homo sapiens
  misc_RNA (1)...(19): siRNA sense strand
gccauagucauugguauca

SEQ ID NO: 863745 - RNA, 19 nt, Homo sapiens
  misc_RNA (1)...(19): siRNA sense strand
ugcccucaguggacaauau

SEQ ID NO: 863746 - RNA, 19 nt, Homo sapiens
  misc_RNA (1)...(19): siRNA sense strand
caaacguucgaguacuuga

SEQ ID NO: 863747 - RNA, 19 nt, Homo sapiens
  misc_RNA (1)...(19): siRNA sense strand
gaaacuccaugccaagaaa

SEQ ID NO: 863748 - RNA, 19 nt, Homo sapiens
  misc_RNA (1)...(19): siRNA sense strand
aaaugaagcugaccaagaa

SEQ ID NO: 863749 - RNA, 19 nt, Homo sapiens
  misc_RNA (1)...(19): siRNA sense strand
gaacauggcaggacgcauu

SEQ ID NO: 863750 - RNA, 19 nt, Homo sapiens
  misc_RNA (1)...(19): siRNA sense strand
gaacagcccauccuacuug

SEQ ID NO: 863751 - RNA, 19 nt, Homo sapiens
  misc_RNA (1)...(19): siRNA sense strand
ggagguggaugauuacuuc

SEQ ID NO: 863752 - RNA, 19 nt, Homo sapiens
  misc_RNA (1)...(19): siRNA sense strand
gaggaagaauguacgcuuu

SEQ ID NO: 863753 - RNA, 19 nt, Homo sapiens
  misc_RNA (1)...(19): siRNA sense strand
guacggagcuauacacucu

SEQ ID NO: 863754 - RNA, 19 nt, Homo sapiens
  misc_RNA (1)...(19): siRNA sense strand
ggaagaauguacgcuuuga

SEQ ID NO: 863755 - RNA, 19 nt, Homo sapiens
  misc_RNA (1)...(19): siRNA sense strand
gcaggacgcauugaauuua

SEQ ID NO: 863756 - RNA, 19 nt, Homo sapiens
  misc_RNA (1)...(19): siRNA sense strand
gaaguuugaugauguggau

SEQ ID NO: 863757 - RNA, 19 nt, Homo sapiens
  misc_RNA (1)...(19): siRNA sense strand
ggugaaccaucgagagauu

SEQ ID NO: 863758 - RNA, 19 nt, Homo sapiens
  misc_RNA (1)...(19): siRNA sense strand
gcucgggucucaagaggaa

SEQ ID NO: 863759 - RNA, 19 nt, Homo sapiens
  misc_RNA (1)...(19): siRNA sense strand
agaaggaucugaaugucuu

SEQ ID NO: 863760 - RNA, 19 nt, Homo sapiens
  misc_RNA (1)...(19): siRNA sense strand
caggacgcauugaauuuaa

SEQ ID NO: 863761 - RNA, 19 nt, Homo sapiens
  misc_RNA (1)...(19): siRNA sense strand
ggaguucauugcugagaau

SEQ ID NO: 863762 - RNA, 19 nt, Homo sapiens
  misc_RNA (1)...(19): siRNA sense strand
gcuccucuguccuguguuu

SEQ ID NO: 863763 - RNA, 19 nt, Homo sapiens
  misc_RNA (1)...(19): siRNA sense strand
uggaugaugugucagauga

SEQ ID NO: 863764 - RNA, 19 nt, Homo sapiens
  misc_RNA (1)...(19): siRNA sense strand
ggagaaggaucugaauguc

SEQ ID NO: 863765 - RNA, 19 nt, Homo sapiens
  misc_RNA (1)...(19): siRNA sense strand
caaaggagaaggaucugaa

SEQ ID NO: 863766 - RNA, 19 nt, Homo sapiens
  misc_RNA (1)...(19): siRNA sense strand
gugagcaccugaaggaaga

SEQ ID NO: 863767 - RNA, 19 nt, Homo sapiens
  misc_RNA (1)...(19): siRNA sense strand
ccaggugacuguauacuac

SEQ ID NO: 863768 - RNA, 19 nt, Homo sapiens
  misc_RNA (1)...(19): siRNA sense strand
gcucaaggcagaagaagau

SEQ ID NO: 863769 - RNA, 19 nt, Homo sapiens
  misc_RNA (1)...(19): siRNA sense strand
gaggaaguuugaugaugug

SEQ ID NO: 863770 - RNA, 19 nt, Homo sapiens
  misc_RNA (1)...(19): siRNA sense strand
agaggaaguuugaugaugu

SEQ ID NO: 863771 - RNA, 19 nt, Homo sapiens
  misc_RNA (1)...(19): siRNA sense strand
gaacucagaccacccaacu

SEQ ID NO: 863772 - RNA, 19 nt, Homo sapiens
  misc_RNA (1)...(19): siRNA sense strand
ugugucagaugaagauauu

SEQ ID NO: 863773 - RNA, 19 nt, Homo sapiens
  misc_RNA (1)...(19): siRNA sense strand
gaaaacacccacccuagaa

SEQ ID NO: 863774 - RNA, 19 nt, Homo sapiens
  misc_RNA (1)...(19): siRNA sense strand
gguggaugauuacuucuuc

SEQ ID NO: 863775 - RNA, 19 nt, Homo sapiens
  misc_RNA (1)...(19): siRNA sense strand
gagcugugcccaggccuua

SEQ ID NO: 863776 - RNA, 19 nt, Homo sapiens
  misc_RNA (1)...(19): siRNA sense strand
agaagcagcugcggaggaa

SEQ ID NO: 863777 - RNA, 19 nt, Homo sapiens
  misc_RNA (1)...(19): siRNA sense strand
gaaugagacagcagugaug

SEQ ID NO: 863778 - RNA, 19 nt, Homo sapiens
  misc_RNA (1)...(19): siRNA sense strand
gaucgcauguccuuuccau

SEQ ID NO: 863779 - RNA, 19 nt, Homo sapiens
  misc_RNA (1)...(19): siRNA sense strand
gaggugaaccaucgagaga

SEQ ID NO: 863780 - RNA, 19 nt, Homo sapiens
  misc_RNA (1)...(19): siRNA sense strand
ggcaggacgcauugaauuu

SEQ ID NO: 863781 - RNA, 19 nt, Homo sapiens
  misc_RNA (1)...(19): siRNA sense strand
ggagcuauacacucuguga

SEQ ID NO: 863782 - RNA, 19 nt, Homo sapiens
  misc_RNA (1)...(19): siRNA sense strand
auguggagguggaugauua

SEQ ID NO: 863783 - RNA, 19 nt, Homo sapiens
  misc_RNA (1)...(19): siRNA sense strand
gcaccugaaggaagagaaa

SEQ ID NO: 863784 - RNA, 19 nt, Homo sapiens
  misc_RNA (1)...(19): siRNA sense strand
agacccagcugcccucugu

SEQ ID NO: 863785 - RNA, 19 nt, Homo sapiens
  misc_RNA (1)...(19): siRNA sense strand
gaugaugugucagaugaag

SEQ ID NO: 863786 - RNA, 19 nt, Homo sapiens
  misc_RNA (1)...(19): siRNA sense strand
gaagaccucccagcagaau

SEQ ID NO: 863787 - RNA, 19 nt, Homo sapiens
  misc_RNA (1)...(19): siRNA sense strand
gcucugagacccaggacuu

SEQ ID NO: 863788 - RNA, 19 nt, Homo sapiens
  misc_RNA (1)...(19): siRNA sense strand
guauugaugcugaagagaa

SEQ ID NO: 863789 - RNA, 19 nt, Homo sapiens
  misc_RNA (1)...(19): siRNA sense strand
gaaggaagagaaacuccau

SEQ ID NO: 863790 - RNA, 19 nt, Homo sapiens
  misc_RNA (1)...(19): siRNA sense strand
cagcugcccucuguaaauc

SEQ ID NO: 863791 - RNA, 19 nt, Homo sapiens
  misc_RNA (1)...(19): siRNA sense strand
gagaucuccagcagugaua

SEQ ID NO: 863792 - RNA, 19 nt, Homo sapiens
  misc_RNA (1)...(19): siRNA sense strand
gaagauauugauguggaaa

SEQ ID NO: 863793 - RNA, 19 nt, Homo sapiens
  misc_RNA (1)...(19): siRNA sense strand
gagaaacuccaugccaaga

SEQ ID NO: 863794 - RNA, 19 nt, Homo sapiens
  misc_RNA (1)...(19): siRNA sense strand
ugaagauauugauguggaa

SEQ ID NO: 863795 - RNA, 19 nt, Homo sapiens
  misc_RNA (1)...(19): siRNA sense strand
gacgcuggaugauguguca

SEQ ID NO: 863796 - RNA, 19 nt, Homo sapiens
  misc_RNA (1)...(19): siRNA sense strand
gguugugacugccgacugu

SEQ ID NO: 863797 - RNA, 19 nt, Homo sapiens
  misc_RNA (1)...(19): siRNA sense strand
gccugacgcuggaugaugu

SEQ ID NO: 863798 - RNA, 19 nt, Homo sapiens
  misc_RNA (1)...(19): siRNA sense strand
ggacuuccaggaguucauu

SEQ ID NO: 863799 - RNA, 19 nt, Homo sapiens
  misc_RNA (1)...(19): siRNA sense strand
agaugaagauauugaugug

SEQ ID NO: 863800 - RNA, 19 nt, Homo sapiens
  misc_RNA (1)...(19): siRNA sense strand
cauuaccuccacaccauua

SEQ ID NO: 863801 - RNA, 19 nt, Homo sapiens
  misc_RNA (1)...(19): siRNA sense strand
ugucuucucucucccuguu

SEQ ID NO: 863802 - RNA, 19 nt, Homo sapiens
  misc_RNA (1)...(19): siRNA sense strand
aagaggaaguuugaugaug

SEQ ID NO: 863803 - RNA, 19 nt, Homo sapiens
  misc_RNA (1)...(19): siRNA sense strand
gagaaugagacagcaguga

SEQ ID NO: 863804 - RNA, 19 nt, Homo sapiens
  misc_RNA (1)...(19): siRNA sense strand
cagaugaagauauugaugu

SEQ ID NO: 863805 - RNA, 19 nt, Homo sapiens
  misc_RNA (1)...(19): siRNA sense strand
ggaucugaaugucuucucu

SEQ ID NO: 863806 - RNA, 19 nt, Homo sapiens
  misc_RNA (1)...(19): siRNA sense strand
ggauggcugugggaacaug

SEQ ID NO: 863807 - RNA, 19 nt, Homo sapiens
  misc_RNA (1)...(19): siRNA sense strand
ccuggucuauuaucaagug

SEQ ID NO: 863808 - RNA, 19 nt, Homo sapiens
  misc_RNA (1)...(19): siRNA sense strand
caagaggaaguuugaugau

SEQ ID NO: 863809 - RNA, 19 nt, Homo sapiens
  misc_RNA (1)...(19): siRNA sense strand
ggaaaacacccacccuaga

SEQ ID NO: 863810 - RNA, 19 nt, Homo sapiens
  misc_RNA (1)...(19): siRNA sense strand
uugaccaggugacuguaua

SEQ ID NO: 863811 - RNA, 19 nt, Homo sapiens
  misc_RNA (1)...(19): siRNA sense strand
gagaaggaucugaaugucu

SEQ ID NO: 863812 - RNA, 19 nt, Homo sapiens
  misc_RNA (1)...(19): siRNA sense strand
cgcauugaauuuaauccaa

SEQ ID NO: 863813 - RNA, 19 nt, Homo sapiens
  misc_RNA (1)...(19): siRNA sense strand
gcugugggauggugaagac

SEQ ID NO: 863814 - RNA, 19 nt, Homo sapiens
  misc_RNA (1)...(19): siRNA sense strand
gcucagccucuuucccaaa

SEQ ID NO: 863815 - RNA, 19 nt, Homo sapiens
  misc_RNA (1)...(19): siRNA sense strand
ggacgcauugaauuuaauc

SEQ ID NO: 863816 - RNA, 19 nt, Homo sapiens
  misc_RNA (1)...(19): siRNA sense strand
gugaaaggagagccuggua

SEQ ID NO: 863817 - RNA, 19 nt, Homo sapiens
  misc_RNA (1)...(19): siRNA sense strand
gaagauuccagcggcucua

SEQ ID NO: 863818 - RNA, 19 nt, Homo sapiens
  misc_RNA (1)...(19): siRNA sense strand
ccagcgccauaacucugua

SEQ ID NO: 863819 - RNA, 19 nt, Homo sapiens
  misc_RNA (1)...(19): siRNA sense strand
ccagcugcccucuguaaau

SEQ ID NO: 863820 - RNA, 19 nt, Homo sapiens
  misc_RNA (1)...(19): siRNA sense strand
uggcaggacgcauugaauu

SEQ ID NO: 863821 - RNA, 19 nt, Homo sapiens
  misc_RNA (1)...(19): siRNA sense strand
gggaagaaugugguuguga

SEQ ID NO: 863822 - RNA, 19 nt, Homo sapiens
  misc_RNA (1)...(19): siRNA sense strand
gugacuguauacuacuuug

SEQ ID NO: 863823 - RNA, 19 nt, Homo sapiens
  misc_RNA (1)...(19): siRNA sense strand
ugucagaugaagauauuga

SEQ ID NO: 863824 - RNA, 19 nt, Homo sapiens
  misc_RNA (1)...(19): siRNA sense strand
agaccucccagcagaauga

SEQ ID NO: 863825 - RNA, 19 nt, Homo sapiens
  misc_RNA (1)...(19): siRNA sense strand
cgggauggcugugggaaca

SEQ ID NO: 863826 - RNA, 19 nt, Homo sapiens
  misc_RNA (1)...(19): siRNA sense strand
ugaagagaagcaagaacuu

SEQ ID NO: 863827 - RNA, 19 nt, Homo sapiens
  misc_RNA (1)...(19): siRNA sense strand
uauugaugcugaagagaag

SEQ ID NO: 863828 - RNA, 19 nt, Homo sapiens
  misc_RNA (1)...(19): siRNA sense strand
ugaggagccugaaaaugaa

SEQ ID NO: 863829 - RNA, 19 nt, Homo sapiens
  misc_RNA (1)...(19): siRNA sense strand
ggucucaagaggaaguuug

SEQ ID NO: 863830 - RNA, 19 nt, Homo sapiens
  misc_RNA (1)...(19): siRNA sense strand
gaagaaugugguugugacu

SEQ ID NO: 863831 - RNA, 19 nt, Homo sapiens
  misc_RNA (1)...(19): siRNA sense strand
ggagcagaggccagucuug

SEQ ID NO: 863832 - RNA, 19 nt, Homo sapiens
  misc_RNA (1)...(19): siRNA sense strand
gcagagugcagaggaacug

SEQ ID NO: 863833 - RNA, 19 nt, Homo sapiens
  misc_RNA (1)...(19): siRNA sense strand
guggaucgcauguccuuuc

SEQ ID NO: 863834 - RNA, 19 nt, Homo sapiens
  misc_RNA (1)...(19): siRNA sense strand
cccaggacuuccaggaguu

SEQ ID NO: 863835 - RNA, 19 nt, Homo sapiens
  misc_RNA (1)...(19): siRNA sense strand
agaaacuccaugccaagaa

SEQ ID NO: 863836 - RNA, 19 nt, Homo sapiens
  misc_RNA (1)...(19): siRNA sense strand
cugaggagccugaaaauga

SEQ ID NO: 863837 - RNA, 19 nt, Homo sapiens
  misc_RNA (1)...(19): siRNA sense strand
ucuauugcccgaagauugu

SEQ ID NO: 863838 - RNA, 19 nt, Homo sapiens
  misc_RNA (1)...(19): siRNA sense strand
aggagaaggaucugaaugu

SEQ ID NO: 863839 - RNA, 19 nt, Homo sapiens
  misc_RNA (1)...(19): siRNA sense strand
ggugacuguauacuacuuu

SEQ ID NO: 863840 - RNA, 19 nt, Homo sapiens
  misc_RNA (1)...(19): siRNA sense strand
gugaacagcccauccuacu

SEQ ID NO: 863841 - RNA, 19 nt, Homo sapiens
  misc_RNA (1)...(19): siRNA sense strand
gcuuugaccaggugacugu

SEQ ID NO: 863842 - RNA, 19 nt, Homo sapiens
  misc_RNA (1)...(19): siRNA sense strand
ucagaugaagauauugaug

SEQ ID NO: 863843 - RNA, 19 nt, Homo sapiens
  misc_RNA (1)...(19): siRNA sense strand
cucauuaccuccacaccau

SEQ ID NO: 863844 - RNA, 19 nt, Homo sapiens
  misc_RNA (1)...(19): siRNA sense strand
gauuaaaugccagguggau

SEQ ID NO: 863845 - RNA, 19 nt, Homo sapiens
  misc_RNA (1)...(19): siRNA sense strand
cagcugcggaggaagaaug

SEQ ID NO: 863846 - RNA, 19 nt, Homo sapiens
  misc_RNA (1)...(19): siRNA sense strand
ccaaaggagaaggaucuga

SEQ ID NO: 863847 - RNA, 19 nt, Homo sapiens
  misc_RNA (1)...(19): siRNA sense strand
gaaagaagaugcuggagau

SEQ ID NO: 863848 - RNA, 19 nt, Homo sapiens
  misc_RNA (1)...(19): siRNA sense strand
caagaaccguuaucauuga

SEQ ID NO: 863849 - RNA, 19 nt, Homo sapiens
  misc_RNA (1)...(19): siRNA sense strand
uaaggaagauugcgauaga

SEQ ID NO: 863850 - RNA, 19 nt, Homo sapiens
  misc_RNA (1)...(19): siRNA sense strand
gauagacgcugccuguuuc

SEQ ID NO: 863851 - RNA, 19 nt, Homo sapiens
  misc_RNA (1)...(19): siRNA sense strand
ugacucagaugaacaagug

SEQ ID NO: 863852 - RNA, 19 nt, Homo sapiens
  misc_RNA (1)...(19): siRNA sense strand
gaacaucgugaacuaccua

SEQ ID NO: 863853 - RNA, 19 nt, Homo sapiens
  misc_RNA (1)...(19): siRNA sense strand
ucaagaaccguuaucauug

SEQ ID NO: 863854 - RNA, 19 nt, Homo sapiens
  misc_RNA (1)...(19): siRNA sense strand
ggucauuuguguuggagaa

SEQ ID NO: 863855 - RNA, 19 nt, Homo sapiens
  misc_RNA (1)...(19): siRNA sense strand
gcccuggacuuucgugaga

SEQ ID NO: 863856 - RNA, 19 nt, Homo sapiens
  misc_RNA (1)...(19): siRNA sense strand
cgauagacgcugccuguuu

SEQ ID NO: 863857 - RNA, 19 nt, Homo sapiens
  misc_RNA (1)...(19): siRNA sense strand
cagauggucuucccgaaca

SEQ ID NO: 863858 - RNA, 19 nt, Homo sapiens
  misc_RNA (1)...(19): siRNA sense strand
uggcucaccuuucuaccua

SEQ ID NO: 863859 - RNA, 19 nt, Homo sapiens
  misc_RNA (1)...(19): siRNA sense strand
ugaacuaccuaccgugcaa

SEQ ID NO: 863860 - RNA, 19 nt, Homo sapiens
  misc_RNA (1)...(19): siRNA sense strand
caguaccucuggucauuug

SEQ ID NO: 863861 - RNA, 19 nt, Homo sapiens
  misc_RNA (1)...(19): siRNA sense strand
ggagauccuguuugaguug

SEQ ID NO: 863862 - RNA, 19 nt, Homo sapiens
  misc_RNA (1)...(19): siRNA sense strand
ucccgaacaucgugaacua

SEQ ID NO: 863863 - RNA, 19 nt, Homo sapiens
  misc_RNA (1)...(19): siRNA sense strand
cagagugccuuggaugaga

SEQ ID NO: 863864 - RNA, 19 nt, Homo sapiens
  misc_RNA (1)...(19): siRNA sense strand
ggugguugauucuggcuau

SEQ ID NO: 863865 - RNA, 19 nt, Homo sapiens
  misc_RNA (1)...(19): siRNA sense strand
gaugagagcaacaccuauc

SEQ ID NO: 863866 - RNA, 19 nt, Homo sapiens
  misc_RNA (1)...(19): siRNA sense strand
ugggaggguuccaauagaa

SEQ ID NO: 863867 - RNA, 19 nt, Homo sapiens
  misc_RNA (1)...(19): siRNA sense strand
gcagcagagugccuuggau

SEQ ID NO: 863868 - RNA, 19 nt, Homo sapiens
  misc_RNA (1)...(19): siRNA sense strand
cugcagaugucccuguaug

SEQ ID NO: 863869 - RNA, 19 nt, Homo sapiens
  misc_RNA (1)...(19): siRNA sense strand
cuccugagauguucuuuag

SEQ ID NO: 863870 - RNA, 19 nt, Homo sapiens
  misc_RNA (1)...(19): siRNA sense strand
gcuccugagauguucuuua

SEQ ID NO: 863871 - RNA, 19 nt, Homo sapiens
  misc_RNA (1)...(19): siRNA sense strand
uucaagaaccguuaucauu

SEQ ID NO: 863872 - RNA, 19 nt, Homo sapiens
  misc_RNA (1)...(19): siRNA sense strand
ugcaguaccucuggucauu

SEQ ID NO: 863873 - RNA, 19 nt, Homo sapiens
  misc_RNA (1)...(19): siRNA sense strand
ccaauagaaacuuuagugu

SEQ ID NO: 863874 - RNA, 19 nt, Homo sapiens
  misc_RNA (1)...(19): siRNA sense strand
ggguuccaauagaaacuuu

SEQ ID NO: 863875 - RNA, 19 nt, Homo sapiens
  misc_RNA (1)...(19): siRNA sense strand
ugaccggaguggugguuga

SEQ ID NO: 863876 - RNA, 19 nt, Homo sapiens
  misc_RNA (1)...(19): siRNA sense strand
gcaguaccucuggucauuu

SEQ ID NO: 863877 - RNA, 19 nt, Homo sapiens
  misc_RNA (1)...(19): siRNA sense strand
uggagauccuguuugaguu

SEQ ID NO: 863878 - RNA, 19 nt, Homo sapiens
  misc_RNA (1)...(19): siRNA sense strand
ucacaaagcgccuguucag

SEQ ID NO: 863879 - RNA, 19 nt, Homo sapiens
  misc_RNA (1)...(19): siRNA sense strand
ccgccuaucuccucaagag

SEQ ID NO: 863880 - RNA, 19 nt, Homo sapiens
  misc_RNA (1)...(19): siRNA sense strand
gggaggguuccaauagaaa

SEQ ID NO: 863881 - RNA, 19 nt, Homo sapiens
  misc_RNA (1)...(19): siRNA sense strand
ggaugucccgagaggagua

SEQ ID NO: 863882 - RNA, 19 nt, Homo sapiens
  misc_RNA (1)...(19): siRNA sense strand
gagccugggcaucgacauu

SEQ ID NO: 863883 - RNA, 19 nt, Homo sapiens
  misc_RNA (1)...(19): siRNA sense strand
ugcuggagauccuguuuga

SEQ ID NO: 863884 - RNA, 19 nt, Homo sapiens
  misc_RNA (1)...(19): siRNA sense strand
ccggaguggugguugauuc

SEQ ID NO: 863885 - RNA, 19 nt, Homo sapiens
  misc_RNA (1)...(19): siRNA sense strand
ccucuggucauuuguguug

SEQ ID NO: 863886 - RNA, 19 nt, Homo sapiens
  misc_RNA (1)...(19): siRNA sense strand
gcuggucucccacgugaug

SEQ ID NO: 863887 - RNA, 19 nt, Homo sapiens
  misc_RNA (1)...(19): siRNA sense strand
gaugcuggagauccuguuu

SEQ ID NO: 863888 - RNA, 19 nt, Homo sapiens
  misc_RNA (1)...(19): siRNA sense strand
ugacccgcgugcagccuuu

SEQ ID NO: 863889 - RNA, 19 nt, Homo sapiens
  misc_RNA (1)...(19): siRNA sense strand
uggaugagagcaacaccua

SEQ ID NO: 863890 - RNA, 19 nt, Homo sapiens
  misc_RNA (1)...(19): siRNA sense strand
gcggcaagacgcuggaguu

SEQ ID NO: 863891 - RNA, 19 nt, Homo sapiens
  misc_RNA (1)...(19): siRNA sense strand
ccgaccagcugcagauguc

SEQ ID NO: 863892 - RNA, 19 nt, Homo sapiens
  misc_RNA (1)...(19): siRNA sense strand
gccugggcaucgacauuug

SEQ ID NO: 863893 - RNA, 19 nt, Homo sapiens
  misc_RNA (1)...(19): siRNA sense strand
cugggaggguuccaauaga

SEQ ID NO: 863894 - RNA, 19 nt, Homo sapiens
  misc_RNA (1)...(19): siRNA sense strand
uguuugaguugcugcaugu

SEQ ID NO: 863895 - RNA, 19 nt, Homo sapiens
  misc_RNA (1)...(19): siRNA sense strand
gcagagugccuuggaugag

SEQ ID NO: 863896 - RNA, 19 nt, Homo sapiens
  misc_RNA (1)...(19): siRNA sense strand
uguuucagcuggagacagu

SEQ ID NO: 863897 - RNA, 19 nt, Homo sapiens
  misc_RNA (1)...(19): siRNA sense strand
caggaucucuccgccuauc

SEQ ID NO: 863898 - RNA, 19 nt, Homo sapiens
  misc_RNA (1)...(19): siRNA sense strand
gacauuugccauccugaca

SEQ ID NO: 863899 - RNA, 19 nt, Homo sapiens
  misc_RNA (1)...(19): siRNA sense strand
ggaugagagcaacaccuau

SEQ ID NO: 863900 - RNA, 19 nt, Homo sapiens
  misc_RNA (1)...(19): siRNA sense strand
gugagcauaugaggaugug

SEQ ID NO: 863901 - RNA, 19 nt, Homo sapiens
  misc_RNA (1)...(19): siRNA sense strand
gcuacgugccgcagaaucu

SEQ ID NO: 863902 - RNA, 19 nt, Homo sapiens
  misc_RNA (1)...(19): siRNA sense strand
guucacaaagcgccuguuc

SEQ ID NO: 863903 - RNA, 19 nt, Homo sapiens
  misc_RNA (1)...(19): siRNA sense strand
ggguggcuccugagauguu

SEQ ID NO: 863904 - RNA, 19 nt, Homo sapiens
  misc_RNA (1)...(19): siRNA sense strand
ggacguccuuuccagcaua

SEQ ID NO: 863905 - RNA, 19 nt, Homo sapiens
  misc_RNA (1)...(19): siRNA sense strand
gggagaugcuuugcuacua

SEQ ID NO: 863906 - RNA, 19 nt, Homo sapiens
  misc_RNA (1)...(19): siRNA sense strand
ggagaugcuuugcuacuac

SEQ ID NO: 863907 - RNA, 19 nt, Homo sapiens
  misc_RNA (1)...(19): siRNA sense strand
ucccuuagcucacuucaug

SEQ ID NO: 863908 - RNA, 19 nt, Homo sapiens
  misc_RNA (1)...(19): siRNA sense strand
gggcagacaccauauacuu

SEQ ID NO: 863909 - RNA, 19 nt, Homo sapiens
  misc_RNA (1)...(19): siRNA sense strand
gcacaagcagguucuguuc

SEQ ID NO: 863910 - RNA, 19 nt, Homo sapiens
  misc_RNA (1)...(19): siRNA sense strand
gcuacuacuuacuaccuuu

SEQ ID NO: 863911 - RNA, 19 nt, Homo sapiens
  misc_RNA (1)...(19): siRNA sense strand
ugugggagaugcuuugcua

SEQ ID NO: 863912 - RNA, 19 nt, Homo sapiens
  misc_RNA (1)...(19): siRNA sense strand
ggaacucccuacuguuguc

SEQ ID NO: 863913 - RNA, 19 nt, Homo sapiens
  misc_RNA (1)...(19): siRNA sense strand
gaugcuuugcuacuacuua

SEQ ID NO: 863914 - RNA, 19 nt, Homo sapiens
  misc_RNA (1)...(19): siRNA sense strand
gagggaggagggcucauuu

SEQ ID NO: 863915 - RNA, 19 nt, Homo sapiens
  misc_RNA (1)...(19): siRNA sense strand
ggcagacaccauauacuuu

SEQ ID NO: 863916 - RNA, 19 nt, Homo sapiens
  misc_RNA (1)...(19): siRNA sense strand
caaagcauccuuggacuca

SEQ ID NO: 863917 - RNA, 19 nt, Homo sapiens
  misc_RNA (1)...(19): siRNA sense strand
ccaucugucuggccuguug

SEQ ID NO: 863918 - RNA, 19 nt, Homo sapiens
  misc_RNA (1)...(19): siRNA sense strand
gcagacaccauauacuuuu

SEQ ID NO: 863919 - RNA, 19 nt, Homo sapiens
  misc_RNA (1)...(19): siRNA sense strand
gcuuugcuacuacuuacua

SEQ ID NO: 863920 - RNA, 19 nt, Homo sapiens
  misc_RNA (1)...(19): siRNA sense strand
uaccauggcugugggagau

SEQ ID NO: 863921 - RNA, 19 nt, Homo sapiens
  misc_RNA (1)...(19): siRNA sense strand
gagaugcuuugcuacuacu

SEQ ID NO: 863922 - RNA, 19 nt, Homo sapiens
  misc_RNA (1)...(19): siRNA sense strand
cuacuguuguccuuuccuu

SEQ ID NO: 863923 - RNA, 19 nt, Homo sapiens
  misc_RNA (1)...(19): siRNA sense strand
gcuccuagcaguguuuauc

SEQ ID NO: 863924 - RNA, 19 nt, Homo sapiens
  misc_RNA (1)...(19): siRNA sense strand
cgagggaggagggcucauu

SEQ ID NO: 863925 - RNA, 19 nt, Homo sapiens
  misc_RNA (1)...(19): siRNA sense strand
acaagcagguucuguucac

SEQ ID NO: 863926 - RNA, 19 nt, Homo sapiens
  misc_RNA (1)...(19): siRNA sense strand
gaacauguuuaucaagaug

SEQ ID NO: 863927 - RNA, 19 nt, Homo sapiens
  misc_RNA (1)...(19): siRNA sense strand
gggaacauguuuaucaaga

SEQ ID NO: 863928 - RNA, 19 nt, Homo sapiens
  misc_RNA (1)...(19): siRNA sense strand
caaccaggaugagcuuaaa

SEQ ID NO: 863929 - RNA, 19 nt, Homo sapiens
  misc_RNA (1)...(19): siRNA sense strand
ggaacauguuuaucaagau

SEQ ID NO: 863930 - RNA, 19 nt, Homo sapiens
  misc_RNA (1)...(19): siRNA sense strand
aaacugcggaagcaacuua

SEQ ID NO: 863931 - RNA, 19 nt, Homo sapiens
  misc_RNA (1)...(19): siRNA sense strand
cugaagaugugaugguuug

SEQ ID NO: 863932 - RNA, 19 nt, Homo sapiens
  misc_RNA (1)...(19): siRNA sense strand
gaucaucuggauaaagaaa

SEQ ID NO: 863933 - RNA, 19 nt, Homo sapiens
  misc_RNA (1)...(19): siRNA sense strand
agacaaaggaaaugauuga

SEQ ID NO: 863934 - RNA, 19 nt, Homo sapiens
  misc_RNA (1)...(19): siRNA sense strand
ugagggcccugcagaagga

SEQ ID NO: 863935 - RNA, 19 nt, Homo sapiens
  misc_RNA (1)...(19): siRNA sense strand
gcugaaggguuuuaacuug

SEQ ID NO: 863936 - RNA, 19 nt, Homo sapiens
  misc_RNA (1)...(19): siRNA sense strand
uuaaagcucucaaggucau

SEQ ID NO: 863937 - RNA, 19 nt, Homo sapiens
  misc_RNA (1)...(19): siRNA sense strand
uuguggaccuggacacuaa

SEQ ID NO: 863938 - RNA, 19 nt, Homo sapiens
  misc_RNA (1)...(19): siRNA sense strand
gagacaaaggaaaugauug

SEQ ID NO: 863939 - RNA, 19 nt, Homo sapiens
  misc_RNA (1)...(19): siRNA sense strand
ugagacaaaggaaaugauu

SEQ ID NO: 863940 - RNA, 19 nt, Homo sapiens
  misc_RNA (1)...(19): siRNA sense strand
cagccucucugaagaugug

SEQ ID NO: 863941 - RNA, 19 nt, Homo sapiens
  misc_RNA (1)...(19): siRNA sense strand
gcgguaccuuguagaagug

SEQ ID NO: 863942 - RNA, 19 nt, Homo sapiens
  misc_RNA (1)...(19): siRNA sense strand
gcggacaagcggcagauug

SEQ ID NO: 863943 - RNA, 19 nt, Homo sapiens
  misc_RNA (1)...(19): siRNA sense strand
aaggucaucuugaaaggau

SEQ ID NO: 863944 - RNA, 19 nt, Homo sapiens
  misc_RNA (1)...(19): siRNA sense strand
gugcugcgguaccuuguag

SEQ ID NO: 863945 - RNA, 19 nt, Homo sapiens
  misc_RNA (1)...(19): siRNA sense strand
ucgggaacauguuuaucaa

SEQ ID NO: 863946 - RNA, 19 nt, Homo sapiens
  misc_RNA (1)...(19): siRNA sense strand
ucaaccaggaugagcuuaa

SEQ ID NO: 863947 - RNA, 19 nt, Homo sapiens
  misc_RNA (1)...(19): siRNA sense strand
aagaugugaugguuugcuu

SEQ ID NO: 863948 - RNA, 19 nt, Homo sapiens
  misc_RNA (1)...(19): siRNA sense strand
gacaaaggaaaugauugaa

SEQ ID NO: 863949 - RNA, 19 nt, Homo sapiens
  misc_RNA (1)...(19): siRNA sense strand
ugcgguaccuuguagaagu

SEQ ID NO: 863950 - RNA, 19 nt, Homo sapiens
  misc_RNA (1)...(19): siRNA sense strand
gcugcgguaccuuguagaa

SEQ ID NO: 863951 - RNA, 19 nt, Homo sapiens
  misc_RNA (1)...(19): siRNA sense strand
gaguaaagguggaaacaua

SEQ ID NO: 863952 - RNA, 19 nt, Homo sapiens
  misc_RNA (1)...(19): siRNA sense strand
gaauggacuuguuauagaa

SEQ ID NO: 863953 - RNA, 19 nt, Homo sapiens
  misc_RNA (1)...(19): siRNA sense strand
gcgaauacaucaugaggaa

SEQ ID NO: 863954 - RNA, 19 nt, Homo sapiens
  misc_RNA (1)...(19): siRNA sense strand
gucauaagaucuucaguaa

SEQ ID NO: 863955 - RNA, 19 nt, Homo sapiens
  misc_RNA (1)...(19): siRNA sense strand
gaaagauaaucacggaaau

SEQ ID NO: 863956 - RNA, 19 nt, Homo sapiens
  misc_RNA (1)...(19): siRNA sense strand
ucacggaaauacuccuuua

SEQ ID NO: 863957 - RNA, 19 nt, Homo sapiens
  misc_RNA (1)...(19): siRNA sense strand
aaaacgaccucgauuauua

SEQ ID NO: 863958 - RNA, 19 nt, Homo sapiens
  misc_RNA (1)...(19): siRNA sense strand
gcugugauguuaggaaaua

SEQ ID NO: 863959 - RNA, 19 nt, Homo sapiens
  misc_RNA (1)...(19): siRNA sense strand
ugaauggacuuguuauaga

SEQ ID NO: 863960 - RNA, 19 nt, Homo sapiens
  misc_RNA (1)...(19): siRNA sense strand
gggauagaguuauuauuga

SEQ ID NO: 863961 - RNA, 19 nt, Homo sapiens
  misc_RNA (1)...(19): siRNA sense strand
gaucuaagcuucauuuuca

SEQ ID NO: 863962 - RNA, 19 nt, Homo sapiens
  misc_RNA (1)...(19): siRNA sense strand
aaucagagauggaaacaga

SEQ ID NO: 863963 - RNA, 19 nt, Homo sapiens
  misc_RNA (1)...(19): siRNA sense strand
gaaacauaauggaacagaa

SEQ ID NO: 863964 - RNA, 19 nt, Homo sapiens
  misc_RNA (1)...(19): siRNA sense strand
cggcaaagcuugucauaag

SEQ ID NO: 863965 - RNA, 19 nt, Homo sapiens
  misc_RNA (1)...(19): siRNA sense strand
gaauuggugugcaaagaga

SEQ ID NO: 863966 - RNA, 19 nt, Homo sapiens
  misc_RNA (1)...(19): siRNA sense strand
caaacaagguaucaauauc

SEQ ID NO: 863967 - RNA, 19 nt, Homo sapiens
  misc_RNA (1)...(19): siRNA sense strand
gaagaagagguggauauuu

SEQ ID NO: 863968 - RNA, 19 nt, Homo sapiens
  misc_RNA (1)...(19): siRNA sense strand
gagaauuggugugcaaaga

SEQ ID NO: 863969 - RNA, 19 nt, Homo sapiens
  misc_RNA (1)...(19): siRNA sense strand
acacaacucucauagacuu

SEQ ID NO: 863970 - RNA, 19 nt, Homo sapiens
  misc_RNA (1)...(19): siRNA sense strand
ugaaagagcuaggugacuu

SEQ ID NO: 863971 - RNA, 19 nt, Homo sapiens
  misc_RNA (1)...(19): siRNA sense strand
cagggaaaguguugaagaa

SEQ ID NO: 863972 - RNA, 19 nt, Homo sapiens
  misc_RNA (1)...(19): siRNA sense strand
guagagaauuggugugcaa

SEQ ID NO: 863973 - RNA, 19 nt, Homo sapiens
  misc_RNA (1)...(19): siRNA sense strand
cauaagaucuucaguaacc

SEQ ID NO: 863974 - RNA, 19 nt, Homo sapiens
  misc_RNA (1)...(19): siRNA sense strand
acaccuugcugugauguua

SEQ ID NO: 863975 - RNA, 19 nt, Homo sapiens
  misc_RNA (1)...(19): siRNA sense strand
gauauuuacucugcaacuu

SEQ ID NO: 863976 - RNA, 19 nt, Homo sapiens
  misc_RNA (1)...(19): siRNA sense strand
ugacacaacucucauagac

SEQ ID NO: 863977 - RNA, 19 nt, Homo sapiens
  misc_RNA (1)...(19): siRNA sense strand
ggcaaagcuugucauaaga

SEQ ID NO: 863978 - RNA, 19 nt, Homo sapiens
  misc_RNA (1)...(19): siRNA sense strand
gaauacaucaugaggaauc

SEQ ID NO: 863979 - RNA, 19 nt, Homo sapiens
  misc_RNA (1)...(19): siRNA sense strand
aagaagagguggauauuuu

SEQ ID NO: 863980 - RNA, 19 nt, Homo sapiens
  misc_RNA (1)...(19): siRNA sense strand
ccacaagcccagcaaagaa

SEQ ID NO: 863981 - RNA, 19 nt, Homo sapiens
  misc_RNA (1)...(19): siRNA sense strand
gagcagugauauuuacucu

SEQ ID NO: 863982 - RNA, 19 nt, Homo sapiens
  misc_RNA (1)...(19): siRNA sense strand
uagagaauuuguucagaug

SEQ ID NO: 863983 - RNA, 19 nt, Homo sapiens
  misc_RNA (1)...(19): siRNA sense strand
gaacuucacugggauuuuc

SEQ ID NO: 863984 - RNA, 19 nt, Homo sapiens
  misc_RNA (1)...(19): siRNA sense strand
gauaaucacggaaauacuc

SEQ ID NO: 863985 - RNA, 19 nt, Homo sapiens
  misc_RNA (1)...(19): siRNA sense strand
aguaguagcucccuucaag

SEQ ID NO: 863986 - RNA, 19 nt, Homo sapiens
  misc_RNA (1)...(19): siRNA sense strand
gugcaaagagaguaagaaa

SEQ ID NO: 863987 - RNA, 19 nt, Homo sapiens
  misc_RNA (1)...(19): siRNA sense strand
gcaaagcuugucauaagau

SEQ ID NO: 863988 - RNA, 19 nt, Homo sapiens
  misc_RNA (1)...(19): siRNA sense strand
aaacgaccucgauuauuaa

SEQ ID NO: 863989 - RNA, 19 nt, Homo sapiens
  misc_RNA (1)...(19): siRNA sense strand
gggaaaguguugaagaaaa

SEQ ID NO: 863990 - RNA, 19 nt, Homo sapiens
  misc_RNA (1)...(19): siRNA sense strand
ggaaacauaauggaacaga

SEQ ID NO: 863991 - RNA, 19 nt, Homo sapiens
  misc_RNA (1)...(19): siRNA sense strand
ggugaauggacuuguuaua

SEQ ID NO: 863992 - RNA, 19 nt, Homo sapiens
  misc_RNA (1)...(19): siRNA sense strand
agaaagauaaucacggaaa

SEQ ID NO: 863993 - RNA, 19 nt, Homo sapiens
  misc_RNA (1)...(19): siRNA sense strand
ucauggagaguuugaguaa

SEQ ID NO: 863994 - RNA, 19 nt, Homo sapiens
  misc_RNA (1)...(19): siRNA sense strand
aagcagcaauccagggaaa

SEQ ID NO: 863995 - RNA, 19 nt, Homo sapiens
  misc_RNA (1)...(19): siRNA sense strand
aaacagaaagaguaggaaa

SEQ ID NO: 863996 - RNA, 19 nt, Homo sapiens
  misc_RNA (1)...(19): siRNA sense strand
cagaagaagagguggauau

SEQ ID NO: 863997 - RNA, 19 nt, Homo sapiens
  misc_RNA (1)...(19): siRNA sense strand
caaagcuugucauaagauc

SEQ ID NO: 863998 - RNA, 19 nt, Homo sapiens
  misc_RNA (1)...(19): siRNA sense strand
ugucauaagaucuucagua

SEQ ID NO: 863999 - RNA, 19 nt, Homo sapiens
  misc_RNA (1)...(19): siRNA sense strand
guggaaacauaauggaaca

SEQ ID NO: 864000 - RNA, 19 nt, Homo sapiens
  misc_RNA (1)...(19): siRNA sense strand
gauggaaacagaagaagag

SEQ ID NO: 864001 - RNA, 19 nt, Homo sapiens
  misc_RNA (1)...(19): siRNA sense strand
agggauagaguuauuauug

SEQ ID NO: 864002 - RNA, 19 nt, Homo sapiens
  misc_RNA (1)...(19): siRNA sense strand
agacuuuacugacaugaag

SEQ ID NO: 864003 - RNA, 19 nt, Homo sapiens
  misc_RNA (1)...(19): siRNA sense strand
ucgauacgaugaauuugau

SEQ ID NO: 864004 - RNA, 19 nt, Homo sapiens
  misc_RNA (1)...(19): siRNA sense strand
ccuuagggauagaguuauu

SEQ ID NO: 864005 - RNA, 19 nt, Homo sapiens
  misc_RNA (1)...(19): siRNA sense strand
gcacaauuccuccgugacu

SEQ ID NO: 864006 - RNA, 19 nt, Homo sapiens
  misc_RNA (1)...(19): siRNA sense strand
ucaucuggguagagaauug

SEQ ID NO: 864007 - RNA, 19 nt, Homo sapiens
  misc_RNA (1)...(19): siRNA sense strand
uacuauaccugaugacuac

SEQ ID NO: 864008 - RNA, 19 nt, Homo sapiens
  misc_RNA (1)...(19): siRNA sense strand
gcaaagagaguaagaaaac

SEQ ID NO: 864009 - RNA, 19 nt, Homo sapiens
  misc_RNA (1)...(19): siRNA sense strand
gccuuuacuuucccgaauu

SEQ ID NO: 864010 - RNA, 19 nt, Homo sapiens
  misc_RNA (1)...(19): siRNA sense strand
uuacaccgccuccucagaa

SEQ ID NO: 864011 - RNA, 19 nt, Homo sapiens
  misc_RNA (1)...(19): siRNA sense strand
guaaagguggaaacauaau

SEQ ID NO: 864012 - RNA, 19 nt, Homo sapiens
  misc_RNA (1)...(19): siRNA sense strand
gugaauggacuuguuauag

SEQ ID NO: 864013 - RNA, 19 nt, Homo sapiens
  misc_RNA (1)...(19): siRNA sense strand
cagaaagaguaggaaacuu

SEQ ID NO: 864014 - RNA, 19 nt, Homo sapiens
  misc_RNA (1)...(19): siRNA sense strand
gcccagacaggauggcuuu

SEQ ID NO: 864015 - RNA, 19 nt, Homo sapiens
  misc_RNA (1)...(19): siRNA sense strand
uuacagcucuuuugaggaa

SEQ ID NO: 864016 - RNA, 19 nt, Homo sapiens
  misc_RNA (1)...(19): siRNA sense strand
gcccucggcgguaccuuua

SEQ ID NO: 864017 - RNA, 19 nt, Homo sapiens
  misc_RNA (1)...(19): siRNA sense strand
ccucagaacacuauuacau

SEQ ID NO: 864018 - RNA, 19 nt, Homo sapiens
  misc_RNA (1)...(19): siRNA sense strand
gaagagguggauauuuuaa

SEQ ID NO: 864019 - RNA, 19 nt, Homo sapiens
  misc_RNA (1)...(19): siRNA sense strand
uaucagcgaauacaucaug

SEQ ID NO: 864020 - RNA, 19 nt, Homo sapiens
  misc_RNA (1)...(19): siRNA sense strand
gcucugccgcugcacaauu

SEQ ID NO: 864021 - RNA, 19 nt, Homo sapiens
  misc_RNA (1)...(19): siRNA sense strand
cauagacuuuacugacaug

SEQ ID NO: 864022 - RNA, 19 nt, Homo sapiens
  misc_RNA (1)...(19): siRNA sense strand
guuucgauacgaugaauuu

SEQ ID NO: 864023 - RNA, 19 nt, Homo sapiens
  misc_RNA (1)...(19): siRNA sense strand
aggcuuuccuguaaaauua

SEQ ID NO: 864024 - RNA, 19 nt, Homo sapiens
  misc_RNA (1)...(19): siRNA sense strand
gggagaagauccgcucacu

SEQ ID NO: 864025 - RNA, 19 nt, Homo sapiens
  misc_RNA (1)...(19): siRNA sense strand
aaauacuccuuuacaccuu

SEQ ID NO: 864026 - RNA, 19 nt, Homo sapiens
  misc_RNA (1)...(19): siRNA sense strand
cugcaacuuuaucaacaaa

SEQ ID NO: 864027 - RNA, 19 nt, Homo sapiens
  misc_RNA (1)...(19): siRNA sense strand
agaagaagagguggauauu

SEQ ID NO: 864028 - RNA, 19 nt, Homo sapiens
  misc_RNA (1)...(19): siRNA sense strand
ucauagacuuuacugacau

SEQ ID NO: 864029 - RNA, 19 nt, Homo sapiens
  misc_RNA (1)...(19): siRNA sense strand
gcacaauaucgggcagaaa

SEQ ID NO: 864030 - RNA, 19 nt, Homo sapiens
  misc_RNA (1)...(19): siRNA sense strand
ccagggaaaguguugaaga

SEQ ID NO: 864031 - RNA, 19 nt, Homo sapiens
  misc_RNA (1)...(19): siRNA sense strand
aaugagcagugauauuuac

SEQ ID NO: 864032 - RNA, 19 nt, Homo sapiens
  misc_RNA (1)...(19): siRNA sense strand
uuacuauaccugaugacua

SEQ ID NO: 864033 - RNA, 19 nt, Homo sapiens
  misc_RNA (1)...(19): siRNA sense strand
uaaagguggaaacauaaug

SEQ ID NO: 864034 - RNA, 19 nt, Homo sapiens
  misc_RNA (1)...(19): siRNA sense strand
ggaaucagagauggaaaca

SEQ ID NO: 864035 - RNA, 19 nt, Homo sapiens
  misc_RNA (1)...(19): siRNA sense strand
gaguuucgauacgaugaau

SEQ ID NO: 864036 - RNA, 19 nt, Homo sapiens
  misc_RNA (1)...(19): siRNA sense strand
cauggagaguuugaguaaa

SEQ ID NO: 864037 - RNA, 19 nt, Homo sapiens
  misc_RNA (1)...(19): siRNA sense strand
ggaccacaagcccagcaaa

SEQ ID NO: 864038 - RNA, 19 nt, Homo sapiens
  misc_RNA (1)...(19): siRNA sense strand
gagaguaagaaaacguuua

SEQ ID NO: 864039 - RNA, 19 nt, Homo sapiens
  misc_RNA (1)...(19): siRNA sense strand
aguaaagguggaaacauaa

SEQ ID NO: 864040 - RNA, 19 nt, Homo sapiens
  misc_RNA (1)...(19): siRNA sense strand
ccuggugaauggacuuguu

SEQ ID NO: 864041 - RNA, 19 nt, Homo sapiens
  misc_RNA (1)...(19): siRNA sense strand
gcuugacacaacucucaua

SEQ ID NO: 864042 - RNA, 19 nt, Homo sapiens
  misc_RNA (1)...(19): siRNA sense strand
cacaauaucgggcagaaag

SEQ ID NO: 864043 - RNA, 19 nt, Homo sapiens
  misc_RNA (1)...(19): siRNA sense strand
acaacucucauagacuuua

SEQ ID NO: 864044 - RNA, 19 nt, Homo sapiens
  misc_RNA (1)...(19): siRNA sense strand
gcaauccagggaaaguguu

SEQ ID NO: 864045 - RNA, 19 nt, Homo sapiens
  misc_RNA (1)...(19): siRNA sense strand
caucuuuacuauaccugau

SEQ ID NO: 864046 - RNA, 19 nt, Homo sapiens
  misc_RNA (1)...(19): siRNA sense strand
ucaagcacuuuaacaagcu

SEQ ID NO: 864047 - RNA, 19 nt, Homo sapiens
  misc_RNA (1)...(19): siRNA sense strand
agagauggaaacagaagaa

SEQ ID NO: 864048 - RNA, 19 nt, Homo sapiens
  misc_RNA (1)...(19): siRNA sense strand
caacucucauagacuuuac

SEQ ID NO: 864049 - RNA, 19 nt, Homo sapiens
  misc_RNA (1)...(19): siRNA sense strand
cgaccucgauuauuaaaag

SEQ ID NO: 864050 - RNA, 19 nt, Homo sapiens
  misc_RNA (1)...(19): siRNA sense strand
ggaguuucgauacgaugaa

SEQ ID NO: 864051 - RNA, 19 nt, Homo sapiens
  misc_RNA (1)...(19): siRNA sense strand
guacaauucugucuacuuc

SEQ ID NO: 864052 - RNA, 19 nt, Homo sapiens
  misc_RNA (1)...(19): siRNA sense strand
guucagcucugcaccaagu

SEQ ID NO: 864053 - RNA, 19 nt, Homo sapiens
  misc_RNA (1)...(19): siRNA sense strand
ccaucgcccuguacaauuc

SEQ ID NO: 864054 - RNA, 19 nt, Homo sapiens
  misc_RNA (1)...(19): siRNA sense strand
cuacuucaucgucuucuuu

SEQ ID NO: 864055 - RNA, 19 nt, Homo sapiens
  misc_RNA (1)...(19): siRNA sense strand
acaauucugucuacuucau

SEQ ID NO: 864056 - RNA, 19 nt, Homo sapiens
  misc_RNA (1)...(19): siRNA sense strand
gaaggccaagauucagaaa

SEQ ID NO: 864057 - RNA, 19 nt, Homo sapiens
  misc_RNA (1)...(19): siRNA sense strand
ucgcugaucuucugcaacu

SEQ ID NO: 864058 - RNA, 19 nt, Homo sapiens
  misc_RNA (1)...(19): siRNA sense strand
ggguucagcucugcaccaa

SEQ ID NO: 864059 - RNA, 19 nt, Homo sapiens
  misc_RNA (1)...(19): siRNA sense strand
gccacgaccucaagaucuc

SEQ ID NO: 864060 - RNA, 19 nt, Homo sapiens
  misc_RNA (1)...(19): siRNA sense strand
ccugagcugccucgaguuu

SEQ ID NO: 864061 - RNA, 19 nt, Homo sapiens
  misc_RNA (1)...(19): siRNA sense strand
cguccgaucucucgcugau

SEQ ID NO: 864062 - RNA, 19 nt, Homo sapiens
  misc_RNA (1)...(19): siRNA sense strand
aggccaagauucagaaacu

SEQ ID NO: 864063 - RNA, 19 nt, Homo sapiens
  misc_RNA (1)...(19): siRNA sense strand
ccuguacaauucugucuac

SEQ ID NO: 864064 - RNA, 19 nt, Homo sapiens
  misc_RNA (1)...(19): siRNA sense strand
gugcugaaggccaagauuc

SEQ ID NO: 864065 - RNA, 19 nt, Homo sapiens
  misc_RNA (1)...(19): siRNA sense strand
ggccaagauucagaaacug

SEQ ID NO: 864066 - RNA, 19 nt, Homo sapiens
  misc_RNA (1)...(19): siRNA sense strand
agaagaaggugggcaauua

SEQ ID NO: 864067 - RNA, 19 nt, Homo sapiens
  misc_RNA (1)...(19): siRNA sense strand
ggaaaggggucaacaagua

SEQ ID NO: 864068 - RNA, 19 nt, Homo sapiens
  misc_RNA (1)...(19): siRNA sense strand
ccacagagcaugagaagaa

SEQ ID NO: 864069 - RNA, 19 nt, Homo sapiens
  misc_RNA (1)...(19): siRNA sense strand
gauucgaaaugccauauaa

SEQ ID NO: 864070 - RNA, 19 nt, Homo sapiens
  misc_RNA (1)...(19): siRNA sense strand
gaaaugccauauaacaucu

SEQ ID NO: 864071 - RNA, 19 nt, Homo sapiens
  misc_RNA (1)...(19): siRNA sense strand
guacuauccuccagacuuc

SEQ ID NO: 864072 - RNA, 19 nt, Homo sapiens
  misc_RNA (1)...(19): siRNA sense strand
gaugaaaugccaccucugu

SEQ ID NO: 864073 - RNA, 19 nt, Homo sapiens
  misc_RNA (1)...(19): siRNA sense strand
ggacauggcggacaaugag

SEQ ID NO: 864074 - RNA, 19 nt, Homo sapiens
  misc_RNA (1)...(19): siRNA sense strand
cgaaaugccauauaacauc

SEQ ID NO: 864075 - RNA, 19 nt, Homo sapiens
  misc_RNA (1)...(19): siRNA sense strand
ucacagggcauccucauca

SEQ ID NO: 864076 - RNA, 19 nt, Homo sapiens
  misc_RNA (1)...(19): siRNA sense strand
caacugcgacuacgugauc

SEQ ID NO: 864077 - RNA, 19 nt, Homo sapiens
  misc_RNA (1)...(19): siRNA sense strand
ggagacggacgccauguuc

SEQ ID NO: 864078 - RNA, 19 nt, Homo sapiens
  misc_RNA (1)...(19): siRNA sense strand
uggcggcucugcugaaguu

SEQ ID NO: 864079 - RNA, 19 nt, Homo sapiens
  misc_RNA (1)...(19): siRNA sense strand
gaagaaggugggcaauuac

SEQ ID NO: 864080 - RNA, 19 nt, Homo sapiens
  misc_RNA (1)...(19): siRNA sense strand
gaaggugggcaauuacuac

SEQ ID NO: 864081 - RNA, 19 nt, Homo sapiens
  misc_RNA (1)...(19): siRNA sense strand
gcugggacauggcggacaa

SEQ ID NO: 864082 - RNA, 19 nt, Homo sapiens
  misc_RNA (1)...(19): siRNA sense strand
gcauggguguucguuacaa

SEQ ID NO: 864083 - RNA, 19 nt, Homo sapiens
  misc_RNA (1)...(19): siRNA sense strand
gaccgcagcacacucaaga

SEQ ID NO: 864084 - RNA, 19 nt, Homo sapiens
  misc_RNA (1)...(19): siRNA sense strand
ggugggcaauuacuacaca

SEQ ID NO: 864085 - RNA, 19 nt, Homo sapiens
  misc_RNA (1)...(19): siRNA sense strand
ugaaaugccaccucugugu

SEQ ID NO: 864086 - RNA, 19 nt, Homo sapiens
  misc_RNA (1)...(19): siRNA sense strand
caucauccgauucgaaaug

SEQ ID NO: 864087 - RNA, 19 nt, Homo sapiens
  misc_RNA (1)...(19): siRNA sense strand
agaaggcgcugcccacacu

SEQ ID NO: 864088 - RNA, 19 nt, Homo sapiens
  misc_RNA (1)...(19): siRNA sense strand
ccaccucugugucaacuac

SEQ ID NO: 864089 - RNA, 19 nt, Homo sapiens
  misc_RNA (1)...(19): siRNA sense strand
cggcauggguguucguuac

SEQ ID NO: 864090 - RNA, 19 nt, Homo sapiens
  misc_RNA (1)...(19): siRNA sense strand
ggacaagcagaaacucaag

SEQ ID NO: 864091 - RNA, 19 nt, Homo sapiens
  misc_RNA (1)...(19): siRNA sense strand
gaggacaagcagaaacuca

SEQ ID NO: 864092 - RNA, 19 nt, Homo sapiens
  misc_RNA (1)...(19): siRNA sense strand
gggacauggcggacaauga

SEQ ID NO: 864093 - RNA, 19 nt, Homo sapiens
  misc_RNA (1)...(19): siRNA sense strand
gaccacagagcaugagaag

SEQ ID NO: 864094 - RNA, 19 nt, Homo sapiens
  misc_RNA (1)...(19): siRNA sense strand
agaaggugggcaauuacua

SEQ ID NO: 864095 - RNA, 19 nt, Homo sapiens
  misc_RNA (1)...(19): siRNA sense strand
cauggguguucguuacaau

SEQ ID NO: 864096 - RNA, 19 nt, Homo sapiens
  misc_RNA (1)...(19): siRNA sense strand
agacuguccuccggaaaca

SEQ ID NO: 864097 - RNA, 19 nt, Homo sapiens
  misc_RNA (1)...(19): siRNA sense strand
cgauucgaaaugccauaua

SEQ ID NO: 864098 - RNA, 19 nt, Homo sapiens
  misc_RNA (1)...(19): siRNA sense strand
gcauccucaucauccgauu

SEQ ID NO: 864099 - RNA, 19 nt, Homo sapiens
  misc_RNA (1)...(19): siRNA sense strand
gagacuguccuccggaaac

SEQ ID NO: 864100 - RNA, 19 nt, Homo sapiens
  misc_RNA (1)...(19): siRNA sense strand
ucacaaagcuuaaugguau

SEQ ID NO: 864101 - RNA, 19 nt, Homo sapiens
  misc_RNA (1)...(19): siRNA sense strand
uaagauaguuuccuccaua

SEQ ID NO: 864102 - RNA, 19 nt, Homo sapiens
  misc_RNA (1)...(19): siRNA sense strand
acacagggauuucagaauu

SEQ ID NO: 864103 - RNA, 19 nt, Homo sapiens
  misc_RNA (1)...(19): siRNA sense strand
caaagaugcucauuaacau

SEQ ID NO: 864104 - RNA, 19 nt, Homo sapiens
  misc_RNA (1)...(19): siRNA sense strand
ucccaaagaugcucauuaa

SEQ ID NO: 864105 - RNA, 19 nt, Homo sapiens
  misc_RNA (1)...(19): siRNA sense strand
gaugauugcugcccugaau

SEQ ID NO: 864106 - RNA, 19 nt, Homo sapiens
  misc_RNA (1)...(19): siRNA sense strand
ccaaagaugcucauuaaca

SEQ ID NO: 864107 - RNA, 19 nt, Homo sapiens
  misc_RNA (1)...(19): siRNA sense strand
ccucucaguugucucuuua

SEQ ID NO: 864108 - RNA, 19 nt, Homo sapiens
  misc_RNA (1)...(19): siRNA sense strand
ccacuacaaucccaaagau

SEQ ID NO: 864109 - RNA, 19 nt, Homo sapiens
  misc_RNA (1)...(19): siRNA sense strand
caucacaccucucaguugu

SEQ ID NO: 864110 - RNA, 19 nt, Homo sapiens
  misc_RNA (1)...(19): siRNA sense strand
gagaaugacacagggauuu

SEQ ID NO: 864111 - RNA, 19 nt, Homo sapiens
  misc_RNA (1)...(19): siRNA sense strand
ucugacaccuuucuuaaug

SEQ ID NO: 864112 - RNA, 19 nt, Homo sapiens
  misc_RNA (1)...(19): siRNA sense strand
gcacuacacagucaucaug

SEQ ID NO: 864113 - RNA, 19 nt, Homo sapiens
  misc_RNA (1)...(19): siRNA sense strand
ccauguaccuggucacugu

SEQ ID NO: 864114 - RNA, 19 nt, Homo sapiens
  misc_RNA (1)...(19): siRNA sense strand
cacagggauuucagaauuu

SEQ ID NO: 864115 - RNA, 19 nt, Homo sapiens
  misc_RNA (1)...(19): siRNA sense strand
ggaauaaagacauaaagag

SEQ ID NO: 864116 - RNA, 19 nt, Homo sapiens
  misc_RNA (1)...(19): siRNA sense strand
gcaacagccucagugaugu

SEQ ID NO: 864117 - RNA, 19 nt, Homo sapiens
  misc_RNA (1)...(19): siRNA sense strand
gauggccuaugaucgguuu

SEQ ID NO: 864118 - RNA, 19 nt, Homo sapiens
  misc_RNA (1)...(19): siRNA sense strand
gagcagagucaucaccuau

SEQ ID NO: 864119 - RNA, 19 nt, Homo sapiens
  misc_RNA (1)...(19): siRNA sense strand
ucugaggaauaaagacaua

SEQ ID NO: 864120 - RNA, 19 nt, Homo sapiens
  misc_RNA (1)...(19): siRNA sense strand
gcagagucaucaccuaugc

SEQ ID NO: 864121 - RNA, 19 nt, Homo sapiens
  misc_RNA (1)...(19): siRNA sense strand
guucugacaccuuucuuaa

SEQ ID NO: 864122 - RNA, 19 nt, Homo sapiens
  misc_RNA (1)...(19): siRNA sense strand
guacgggccuaggugugua

SEQ ID NO: 864123 - RNA, 19 nt, Homo sapiens
  misc_RNA (1)...(19): siRNA sense strand
caacagccucagugaugua

SEQ ID NO: 864124 - RNA, 19 nt, Homo sapiens
  misc_RNA (1)...(19): siRNA sense strand
ucuacagucugaggaauaa

SEQ ID NO: 864125 - RNA, 19 nt, Homo sapiens
  misc_RNA (1)...(19): siRNA sense strand
ucucaguugucucuuuauu

SEQ ID NO: 864126 - RNA, 19 nt, Homo sapiens
  misc_RNA (1)...(19): siRNA sense strand
ucauuaacauccagacaca

SEQ ID NO: 864127 - RNA, 19 nt, Homo sapiens
  misc_RNA (1)...(19): siRNA sense strand
gcaucacaccucucaguug

SEQ ID NO: 864128 - RNA, 19 nt, Homo sapiens
  misc_RNA (1)...(19): siRNA sense strand
uggcugugauggccuauga

SEQ ID NO: 864129 - RNA, 19 nt, Homo sapiens
  misc_RNA (1)...(19): siRNA sense strand
acacagagcagagucauca

SEQ ID NO: 864130 - RNA, 19 nt, Homo sapiens
  misc_RNA (1)...(19): siRNA sense strand
ccacaacucacacacaagu

SEQ ID NO: 864131 - RNA, 19 nt, Homo sapiens
  misc_RNA (1)...(19): siRNA sense strand
ggaaucugcucaucauccu

SEQ ID NO: 864132 - RNA, 19 nt, Homo sapiens
  misc_RNA (1)...(19): siRNA sense strand
caccuugccuguucugaca

SEQ ID NO: 864133 - RNA, 19 nt, Homo sapiens
  misc_RNA (1)...(19): siRNA sense strand
uugcagcccuuccucuuug

SEQ ID NO: 864134 - RNA, 19 nt, Homo sapiens
  misc_RNA (1)...(19): siRNA sense strand
ccucugcacuacacaguca

SEQ ID NO: 864135 - RNA, 19 nt, Homo sapiens
  misc_RNA (1)...(19): siRNA sense strand
ucacugugcucgggaaucu

SEQ ID NO: 864136 - RNA, 19 nt, Homo sapiens
  misc_RNA (1)...(19): siRNA sense strand
cuccauacgugcaaucuca

SEQ ID NO: 864137 - RNA, 19 nt, Homo sapiens
  misc_RNA (1)...(19): siRNA sense strand
caugaacccucggcucugu

SEQ ID NO: 864138 - RNA, 19 nt, Homo sapiens
  misc_RNA (1)...(19): siRNA sense strand
acagggauuucagaauuug

SEQ ID NO: 864139 - RNA, 19 nt, Homo sapiens
  misc_RNA (1)...(19): siRNA sense strand
ggcuguuucuguccaugua

SEQ ID NO: 864140 - RNA, 19 nt, Homo sapiens
  misc_RNA (1)...(19): siRNA sense strand
cacaaagcuuaaugguauu

SEQ ID NO: 864141 - RNA, 19 nt, Homo sapiens
  misc_RNA (1)...(19): siRNA sense strand
ugacacagggauuucagaa

SEQ ID NO: 864142 - RNA, 19 nt, Homo sapiens
  misc_RNA (1)...(19): siRNA sense strand
ucacaccucucaguugucu

SEQ ID NO: 864143 - RNA, 19 nt, Homo sapiens
  misc_RNA (1)...(19): siRNA sense strand
cccuuuaucuacagucuga

SEQ ID NO: 864144 - RNA, 19 nt, Homo sapiens
  misc_RNA (1)...(19): siRNA sense strand
gaaugacacagggauuuca

SEQ ID NO: 864145 - RNA, 19 nt, Homo sapiens
  misc_RNA (1)...(19): siRNA sense strand
uguuucaucuccacuacaa

SEQ ID NO: 864146 - RNA, 19 nt, Homo sapiens
  misc_RNA (1)...(19): siRNA sense strand
gucacaaagcuuaauggua

SEQ ID NO: 864147 - RNA, 19 nt, Homo sapiens
  misc_RNA (1)...(19): siRNA sense strand
agagcagagucaucaccua

SEQ ID NO: 864148 - RNA, 19 nt, Homo sapiens
  misc_RNA (1)...(19): siRNA sense strand
ucauccaccuugccuguuc

SEQ ID NO: 864149 - RNA, 19 nt, Homo sapiens
  misc_RNA (1)...(19): siRNA sense strand
cugacaccuuucuuaauga

SEQ ID NO: 864150 - RNA, 19 nt, Homo sapiens
  misc_RNA (1)...(19): siRNA sense strand
cuucagaggaaagcaauaa

SEQ ID NO: 864151 - RNA, 19 nt, Homo sapiens
  misc_RNA (1)...(19): siRNA sense strand
acccacaacucacacacaa

SEQ ID NO: 864152 - RNA, 19 nt, Homo sapiens
  misc_RNA (1)...(19): siRNA sense strand
uauuguggcuguccuucug

SEQ ID NO: 864153 - RNA, 19 nt, Homo sapiens
  misc_RNA (1)...(19): siRNA sense strand
ugcaacagccucagugaug

SEQ ID NO: 864154 - RNA, 19 nt, Homo sapiens
  misc_RNA (1)...(19): siRNA sense strand
gauaguuuccuccauacgu

SEQ ID NO: 864155 - RNA, 19 nt, Homo sapiens
  misc_RNA (1)...(19): siRNA sense strand
ugccuguucugacaccuuu

SEQ ID NO: 864156 - RNA, 19 nt, Homo sapiens
  misc_RNA (1)...(19): siRNA sense strand
gcucgggaaucugcucauc

SEQ ID NO: 864157 - RNA, 19 nt, Homo sapiens
  misc_RNA (1)...(19): siRNA sense strand
ucgggaaucugcucaucau

SEQ ID NO: 864158 - RNA, 19 nt, Homo sapiens
  misc_RNA (1)...(19): siRNA sense strand
gaggaauaaagacauaaag

SEQ ID NO: 864159 - RNA, 19 nt, Homo sapiens
  misc_RNA (1)...(19): siRNA sense strand
ucugggacuuucugaggaa

SEQ ID NO: 864160 - RNA, 19 nt, Homo sapiens
  misc_RNA (1)...(19): siRNA sense strand
ggaaguacaaggcauuuuc

SEQ ID NO: 864161 - RNA, 19 nt, Homo sapiens
  misc_RNA (1)...(19): siRNA sense strand
ggaaccagagaaugacaca

SEQ ID NO: 864162 - RNA, 19 nt, Homo sapiens
  misc_RNA (1)...(19): siRNA sense strand
uugcugcccugaauuccuu

SEQ ID NO: 864163 - RNA, 19 nt, Homo sapiens
  misc_RNA (1)...(19): siRNA sense strand
acaccuuucuuaaugacau

SEQ ID NO: 864164 - RNA, 19 nt, Homo sapiens
  misc_RNA (1)...(19): siRNA sense strand
aaagcuuaaugguauugug

SEQ ID NO: 864165 - RNA, 19 nt, Homo sapiens
  misc_RNA (1)...(19): siRNA sense strand
cauccuggccacaaucuca

SEQ ID NO: 864166 - RNA, 19 nt, Homo sapiens
  misc_RNA (1)...(19): siRNA sense strand
ucuccaaccuguccuuugc

SEQ ID NO: 864167 - RNA, 19 nt, Homo sapiens
  misc_RNA (1)...(19): siRNA sense strand
cuaagauaguuuccuccau

SEQ ID NO: 864168 - RNA, 19 nt, Homo sapiens
  misc_RNA (1)...(19): siRNA sense strand
gacacagggauuucagaau

SEQ ID NO: 864169 - RNA, 19 nt, Homo sapiens
  misc_RNA (1)...(19): siRNA sense strand
uaucuacagucugaggaau

SEQ ID NO: 864170 - RNA, 19 nt, Homo sapiens
  misc_RNA (1)...(19): siRNA sense strand
ugacaccuuucuuaaugac

SEQ ID NO: 864171 - RNA, 19 nt, Homo sapiens
  misc_RNA (1)...(19): siRNA sense strand
gugcaucacaccucucagu

SEQ ID NO: 864172 - RNA, 19 nt, Homo sapiens
  misc_RNA (1)...(19): siRNA sense strand
aagauaguuuccuccauac

SEQ ID NO: 864173 - RNA, 19 nt, Homo sapiens
  misc_RNA (1)...(19): siRNA sense strand
ggccaauucuguaguauua

SEQ ID NO: 864174 - RNA, 19 nt, Homo sapiens
  misc_RNA (1)...(19): siRNA sense strand
ugaagaaacugaugagauu

SEQ ID NO: 864175 - RNA, 19 nt, Homo sapiens
  misc_RNA (1)...(19): siRNA sense strand
gaaacaacauucuggauca

SEQ ID NO: 864176 - RNA, 19 nt, Homo sapiens
  misc_RNA (1)...(19): siRNA sense strand
gaaauaaggacaugaagga

SEQ ID NO: 864177 - RNA, 19 nt, Homo sapiens
  misc_RNA (1)...(19): siRNA sense strand
gaugagauuucaccacaaa

SEQ ID NO: 864178 - RNA, 19 nt, Homo sapiens
  misc_RNA (1)...(19): siRNA sense strand
uauguaagcccuugcauua

SEQ ID NO: 864179 - RNA, 19 nt, Homo sapiens
  misc_RNA (1)...(19): siRNA sense strand
uaacagggcuuccaaagac

SEQ ID NO: 864180 - RNA, 19 nt, Homo sapiens
  misc_RNA (1)...(19): siRNA sense strand
guaagcccuugcauuauuu

SEQ ID NO: 864181 - RNA, 19 nt, Homo sapiens
  misc_RNA (1)...(19): siRNA sense strand
gaccaaagcaauuauaguu

SEQ ID NO: 864182 - RNA, 19 nt, Homo sapiens
  misc_RNA (1)...(19): siRNA sense strand
aucaugaucuggaguauua

SEQ ID NO: 864183 - RNA, 19 nt, Homo sapiens
  misc_RNA (1)...(19): siRNA sense strand
gaucauuucuugugugagu

SEQ ID NO: 864184 - RNA, 19 nt, Homo sapiens
  misc_RNA (1)...(19): siRNA sense strand
gccaucuucuacuuaauua

SEQ ID NO: 864185 - RNA, 19 nt, Homo sapiens
  misc_RNA (1)...(19): siRNA sense strand
gaucucaucuuacuguagu

SEQ ID NO: 864186 - RNA, 19 nt, Homo sapiens
  misc_RNA (1)...(19): siRNA sense strand
uguaagcccuugcauuauu

SEQ ID NO: 864187 - RNA, 19 nt, Homo sapiens
  misc_RNA (1)...(19): siRNA sense strand
ccucucauccuuauucuua

SEQ ID NO: 864188 - RNA, 19 nt, Homo sapiens
  misc_RNA (1)...(19): siRNA sense strand
gauaagaccaucagcuaug

SEQ ID NO: 864189 - RNA, 19 nt, Homo sapiens
  misc_RNA (1)...(19): siRNA sense strand
ucauccaacucuauguuua

SEQ ID NO: 864190 - RNA, 19 nt, Homo sapiens
  misc_RNA (1)...(19): siRNA sense strand
gaucuggaguauuaguuug

SEQ ID NO: 864191 - RNA, 19 nt, Homo sapiens
  misc_RNA (1)...(19): siRNA sense strand
ucacaccucucauccuuau

SEQ ID NO: 864192 - RNA, 19 nt, Homo sapiens
  misc_RNA (1)...(19): siRNA sense strand
aaagaggaauugcaaguca

SEQ ID NO: 864193 - RNA, 19 nt, Homo sapiens
  misc_RNA (1)...(19): siRNA sense strand
uaacacagccaucauucuu

SEQ ID NO: 864194 - RNA, 19 nt, Homo sapiens
  misc_RNA (1)...(19): siRNA sense strand
ccaaagcaauuauaguucu

SEQ ID NO: 864195 - RNA, 19 nt, Homo sapiens
  misc_RNA (1)...(19): siRNA sense strand
acaacauucuggaucauuu

SEQ ID NO: 864196 - RNA, 19 nt, Homo sapiens
  misc_RNA (1)...(19): siRNA sense strand
ccaauucuguaguauuaug

SEQ ID NO: 864197 - RNA, 19 nt, Homo sapiens
  misc_RNA (1)...(19): siRNA sense strand
gcaaguuccucacccucuu

SEQ ID NO: 864198 - RNA, 19 nt, Homo sapiens
  misc_RNA (1)...(19): siRNA sense strand
gaaggaugcccugaagaaa

SEQ ID NO: 864199 - RNA, 19 nt, Homo sapiens
  misc_RNA (1)...(19): siRNA sense strand
guacacucacucugaauuu

SEQ ID NO: 864200 - RNA, 19 nt, Homo sapiens
  misc_RNA (1)...(19): siRNA sense strand
gcuguuauguccuaugauc

SEQ ID NO: 864201 - RNA, 19 nt, Homo sapiens
  misc_RNA (1)...(19): siRNA sense strand
gaagaaacugaugagauuu

SEQ ID NO: 864202 - RNA, 19 nt, Homo sapiens
  misc_RNA (1)...(19): siRNA sense strand
gcuuuaggcauuauaauug

SEQ ID NO: 864203 - RNA, 19 nt, Homo sapiens
  misc_RNA (1)...(19): siRNA sense strand
cuagaucuauguuucacaa

SEQ ID NO: 864204 - RNA, 19 nt, Homo sapiens
  misc_RNA (1)...(19): siRNA sense strand
guaguauuauguacacuca

SEQ ID NO: 864205 - RNA, 19 nt, Homo sapiens
  misc_RNA (1)...(19): siRNA sense strand
ccucacaccucucauccuu

SEQ ID NO: 864206 - RNA, 19 nt, Homo sapiens
  misc_RNA (1)...(19): siRNA sense strand
ugaaggaugcccugaagaa

SEQ ID NO: 864207 - RNA, 19 nt, Homo sapiens
  misc_RNA (1)...(19): siRNA sense strand
guaacagggcuuccaaaga

SEQ ID NO: 864208 - RNA, 19 nt, Homo sapiens
  misc_RNA (1)...(19): siRNA sense strand
ccaaagaccagggcaaguu

SEQ ID NO: 864209 - RNA, 19 nt, Homo sapiens
  misc_RNA (1)...(19): siRNA sense strand
guauuaguuuggccaauuc

SEQ ID NO: 864210 - RNA, 19 nt, Homo sapiens
  misc_RNA (1)...(19): siRNA sense strand
uauauccuauggcuacauu

SEQ ID NO: 864211 - RNA, 19 nt, Homo sapiens
  misc_RNA (1)...(19): siRNA sense strand
ccaaagcugugcugagaac

SEQ ID NO: 864212 - RNA, 19 nt, Homo sapiens
  misc_RNA (1)...(19): siRNA sense strand
ugccaaagcugugcugaga

SEQ ID NO: 864213 - RNA, 19 nt, Homo sapiens
  misc_RNA (1)...(19): siRNA sense strand
uauguacacucacucugaa

SEQ ID NO: 864214 - RNA, 19 nt, Homo sapiens
  misc_RNA (1)...(19): siRNA sense strand
caugaaggaugcccugaag

SEQ ID NO: 864215 - RNA, 19 nt, Homo sapiens
  misc_RNA (1)...(19): siRNA sense strand
gaucuauguuucacaacca

SEQ ID NO: 864216 - RNA, 19 nt, Homo sapiens
  misc_RNA (1)...(19): siRNA sense strand
ggaacuauuaucuacaugu

SEQ ID NO: 864217 - RNA, 19 nt, Homo sapiens
  misc_RNA (1)...(19): siRNA sense strand
cauucuggaucauuucuug

SEQ ID NO: 864218 - RNA, 19 nt, Homo sapiens
  misc_RNA (1)...(19): siRNA sense strand
gucaugaacccacaucuau

SEQ ID NO: 864219 - RNA, 19 nt, Homo sapiens
  misc_RNA (1)...(19): siRNA sense strand
uugcaucucuccuggauuc

SEQ ID NO: 864220 - RNA, 19 nt, Homo sapiens
  misc_RNA (1)...(19): siRNA sense strand
cauuauaauuguccucaca

SEQ ID NO: 864221 - RNA, 19 nt, Homo sapiens
  misc_RNA (1)...(19): siRNA sense strand
gaauaccuguggaucucau

SEQ ID NO: 864222 - RNA, 19 nt, Homo sapiens
  misc_RNA (1)...(19): siRNA sense strand
ggaccaaagcaauuauagu

SEQ ID NO: 864223 - RNA, 19 nt, Homo sapiens
  misc_RNA (1)...(19): siRNA sense strand
cuauggaacuauuaucuac

SEQ ID NO: 864224 - RNA, 19 nt, Homo sapiens
  misc_RNA (1)...(19): siRNA sense strand
gcaaugaauaccuguggau

SEQ ID NO: 864225 - RNA, 19 nt, Homo sapiens
  misc_RNA (1)...(19): siRNA sense strand
uggcuguuauguccuauga

SEQ ID NO: 864226 - RNA, 19 nt, Homo sapiens
  misc_RNA (1)...(19): siRNA sense strand
uggaucauuucuuguguga

SEQ ID NO: 864227 - RNA, 19 nt, Homo sapiens
  misc_RNA (1)...(19): siRNA sense strand
aguauuaguuuggccaauu

SEQ ID NO: 864228 - RNA, 19 nt, Homo sapiens
  misc_RNA (1)...(19): siRNA sense strand
gucgccaucuucuacuuaa

SEQ ID NO: 864229 - RNA, 19 nt, Homo sapiens
  misc_RNA (1)...(19): siRNA sense strand
gguaacacagccaucauuc

SEQ ID NO: 864230 - RNA, 19 nt, Homo sapiens
  misc_RNA (1)...(19): siRNA sense strand
caaagaccagggcaaguuc

SEQ ID NO: 864231 - RNA, 19 nt, Homo sapiens
  misc_RNA (1)...(19): siRNA sense strand
uuacuguagugucuauguu

SEQ ID NO: 864232 - RNA, 19 nt, Homo sapiens
  misc_RNA (1)...(19): siRNA sense strand
ucagcuauguggguuguau

SEQ ID NO: 864233 - RNA, 19 nt, Homo sapiens
  misc_RNA (1)...(19): siRNA sense strand
gcucauuuacaccuuaaga

SEQ ID NO: 864234 - RNA, 19 nt, Homo sapiens
  misc_RNA (1)...(19): siRNA sense strand
accuguggaucucaucuua

SEQ ID NO: 864235 - RNA, 19 nt, Homo sapiens
  misc_RNA (1)...(19): siRNA sense strand
cuauguggguuguaucauc

SEQ ID NO: 864236 - RNA, 19 nt, Homo sapiens
  misc_RNA (1)...(19): siRNA sense strand
agaggaauugcaagucaua

SEQ ID NO: 864237 - RNA, 19 nt, Homo sapiens
  misc_RNA (1)...(19): siRNA sense strand
ggguaacacagccaucauu

SEQ ID NO: 864238 - RNA, 19 nt, Homo sapiens
  misc_RNA (1)...(19): siRNA sense strand
gugucuauguucuauggaa

SEQ ID NO: 864239 - RNA, 19 nt, Homo sapiens
  misc_RNA (1)...(19): siRNA sense strand
uuuccuagaucuauguuuc

SEQ ID NO: 864240 - RNA, 19 nt, Homo sapiens
  misc_RNA (1)...(19): siRNA sense strand
caaguuccucacccucuuu

SEQ ID NO: 864241 - RNA, 19 nt, Homo sapiens
  misc_RNA (1)...(19): siRNA sense strand
caucagcuauguggguugu

SEQ ID NO: 864242 - RNA, 19 nt, Homo sapiens
  misc_RNA (1)...(19): siRNA sense strand
agucucaacccgcucauuu

SEQ ID NO: 864243 - RNA, 19 nt, Homo sapiens
  misc_RNA (1)...(19): siRNA sense strand
gguaacagggcuuccaaag

SEQ ID NO: 864244 - RNA, 19 nt, Homo sapiens
  misc_RNA (1)...(19): siRNA sense strand
uguagugucuauguucuau

SEQ ID NO: 864245 - RNA, 19 nt, Homo sapiens
  misc_RNA (1)...(19): siRNA sense strand
gcccuugcauuauuuugua

SEQ ID NO: 864246 - RNA, 19 nt, Homo sapiens
  misc_RNA (1)...(19): siRNA sense strand
ccgcucauuuacaccuuaa

SEQ ID NO: 864247 - RNA, 19 nt, Homo sapiens
  misc_RNA (1)...(19): siRNA sense strand
gucucaacccgcucauuua

SEQ ID NO: 864248 - RNA, 19 nt, Homo sapiens
  misc_RNA (1)...(19): siRNA sense strand
caacauucuggaucauuuc

SEQ ID NO: 864249 - RNA, 19 nt, Homo sapiens
  misc_RNA (1)...(19): siRNA sense strand
uacacucacucugaauuug

SEQ ID NO: 864250 - RNA, 19 nt, Homo sapiens
  misc_RNA (1)...(19): siRNA sense strand
aagcugugcugagaacgaa

SEQ ID NO: 864251 - RNA, 19 nt, Homo sapiens
  misc_RNA (1)...(19): siRNA sense strand
auaagaccaucagcuaugu

SEQ ID NO: 864252 - RNA, 19 nt, Homo sapiens
  misc_RNA (1)...(19): siRNA sense strand
aaacaacauucuggaucau

SEQ ID NO: 864253 - RNA, 19 nt, Homo sapiens
  misc_RNA (1)...(19): siRNA sense strand
uaucauccaacucuauguu

SEQ ID NO: 864254 - RNA, 19 nt, Homo sapiens
  misc_RNA (1)...(19): siRNA sense strand
cgccaucuucuacuuaauu

SEQ ID NO: 864255 - RNA, 19 nt, Homo sapiens
  misc_RNA (1)...(19): siRNA sense strand
ugaucuggaguauuaguuu

SEQ ID NO: 864256 - RNA, 19 nt, Homo sapiens
  misc_RNA (1)...(19): siRNA sense strand
ucaacccgcucauuuacac

SEQ ID NO: 864257 - RNA, 19 nt, Homo sapiens
  misc_RNA (1)...(19): siRNA sense strand
guggaucucaucuuacugu

SEQ ID NO: 864258 - RNA, 19 nt, Homo sapiens
  misc_RNA (1)...(19): siRNA sense strand
acaccucucauccuuauuc

SEQ ID NO: 864259 - RNA, 19 nt, Homo sapiens
  misc_RNA (1)...(19): siRNA sense strand
uuauguacacucacucuga

SEQ ID NO: 864260 - RNA, 19 nt, Homo sapiens
  misc_RNA (1)...(19): siRNA sense strand
ggaguugucgccaucuucu

SEQ ID NO: 864261 - RNA, 19 nt, Homo sapiens
  misc_RNA (1)...(19): siRNA sense strand
uuuggccaauucuguagua

SEQ ID NO: 864262 - RNA, 19 nt, Homo sapiens
  misc_RNA (1)...(19): siRNA sense strand
cucagaugcuggucaacuu

SEQ ID NO: 864263 - RNA, 19 nt, Homo sapiens
  misc_RNA (1)...(19): siRNA sense strand
uagugucuauguucuaugg

SEQ ID NO: 864264 - RNA, 19 nt, Homo sapiens
  misc_RNA (1)...(19): siRNA sense strand
guuauguccuaugaucguu

SEQ ID NO: 864265 - RNA, 19 nt, Homo sapiens
  misc_RNA (1)...(19): siRNA sense strand
uaaagaggaauugcaaguc

SEQ ID NO: 864266 - RNA, 19 nt, Homo sapiens
  misc_RNA (1)...(19): siRNA sense strand
gcccugaagaaacugauga

SEQ ID NO: 864267 - RNA, 19 nt, Homo sapiens
  misc_RNA (1)...(19): siRNA sense strand
aggaugcccugaagaaacu

SEQ ID NO: 864268 - RNA, 19 nt, Homo sapiens
  misc_RNA (1)...(19): siRNA sense strand
caggaguugucgccaucuu

SEQ ID NO: 864269 - RNA, 19 nt, Homo sapiens
  misc_RNA (1)...(19): siRNA sense strand
caguugaaaugucuguuuu

SEQ ID NO: 864270 - RNA, 19 nt, Homo sapiens
  misc_RNA (1)...(19): siRNA sense strand
cagcgaaaagcaaugaaua

SEQ ID NO: 864271 - RNA, 19 nt, Homo sapiens
  misc_RNA (1)...(19): siRNA sense strand
ugaugagauuucaccacaa

SEQ ID NO: 864272 - RNA, 19 nt, Homo sapiens
  misc_RNA (1)...(19): siRNA sense strand
cugaagaaacugaugagau

SEQ ID NO: 864273 - RNA, 19 nt, Homo sapiens
  misc_RNA (1)...(19): siRNA sense strand
gcacuucauuccuccuuua

SEQ ID NO: 864274 - RNA, 19 nt, Homo sapiens
  misc_RNA (1)...(19): siRNA sense strand
ggaaguaguucucuuugug

SEQ ID NO: 864275 - RNA, 19 nt, Homo sapiens
  misc_RNA (1)...(19): siRNA sense strand
guaguucucuuugugguua

SEQ ID NO: 864276 - RNA, 19 nt, Homo sapiens
  misc_RNA (1)...(19): siRNA sense strand
ggaaaccuguucaucauca

SEQ ID NO: 864277 - RNA, 19 nt, Homo sapiens
  misc_RNA (1)...(19): siRNA sense strand
ccacugggcuucagaaagu

SEQ ID NO: 864278 - RNA, 19 nt, Homo sapiens
  misc_RNA (1)...(19): siRNA sense strand
ccaauguacuucuuccuuu

SEQ ID NO: 864279 - RNA, 19 nt, Homo sapiens
  misc_RNA (1)...(19): siRNA sense strand
caacuuuacuuuguucuug

SEQ ID NO: 864280 - RNA, 19 nt, Homo sapiens
  misc_RNA (1)...(19): siRNA sense strand
gcauuacacuguccucaug

SEQ ID NO: 864281 - RNA, 19 nt, Homo sapiens
  misc_RNA (1)...(19): siRNA sense strand
caaguucauugcccucuuu

SEQ ID NO: 864282 - RNA, 19 nt, Homo sapiens
  misc_RNA (1)...(19): siRNA sense strand
guacugagcaugcaaucaa

SEQ ID NO: 864283 - RNA, 19 nt, Homo sapiens
  misc_RNA (1)...(19): siRNA sense strand
gaucagggcaaguucauug

SEQ ID NO: 864284 - RNA, 19 nt, Homo sapiens
  misc_RNA (1)...(19): siRNA sense strand
ccucuaaucuacacucuca

SEQ ID NO: 864285 - RNA, 19 nt, Homo sapiens
  misc_RNA (1)...(19): siRNA sense strand
gaaaguguuuaggacaugu

SEQ ID NO: 864286 - RNA, 19 nt, Homo sapiens
  misc_RNA (1)...(19): siRNA sense strand
ggacucccaucuccacaca

SEQ ID NO: 864287 - RNA, 19 nt, Homo sapiens
  misc_RNA (1)...(19): siRNA sense strand
ugaugacacugacaggaaa

SEQ ID NO: 864288 - RNA, 19 nt, Homo sapiens
  misc_RNA (1)...(19): siRNA sense strand
gaaaagaccaucucguaug

SEQ ID NO: 864289 - RNA, 19 nt, Homo sapiens
  misc_RNA (1)...(19): siRNA sense strand
caauguacuucuuccuuuc

SEQ ID NO: 864290 - RNA, 19 nt, Homo sapiens
  misc_RNA (1)...(19): siRNA sense strand
uuucaaaccucucauuucu

SEQ ID NO: 864291 - RNA, 19 nt, Homo sapiens
  misc_RNA (1)...(19): siRNA sense strand
uguguagaccuuugcauua

SEQ ID NO: 864292 - RNA, 19 nt, Homo sapiens
  misc_RNA (1)...(19): siRNA sense strand
gcuggaaguaguucucuuu

SEQ ID NO: 864293 - RNA, 19 nt, Homo sapiens
  misc_RNA (1)...(19): siRNA sense strand
cagaaaguguuuaggacau

SEQ ID NO: 864294 - RNA, 19 nt, Homo sapiens
  misc_RNA (1)...(19): siRNA sense strand
gugguuaucuugaucuucu

SEQ ID NO: 864295 - RNA, 19 nt, Homo sapiens
  misc_RNA (1)...(19): siRNA sense strand
guucaacuuuacuuuguuc

SEQ ID NO: 864296 - RNA, 19 nt, Homo sapiens
  misc_RNA (1)...(19): siRNA sense strand
ucagaaacaagcauguaaa

SEQ ID NO: 864297 - RNA, 19 nt, Homo sapiens
  misc_RNA (1)...(19): siRNA sense strand
ggccucagcuggaaguagu

SEQ ID NO: 864298 - RNA, 19 nt, Homo sapiens
  misc_RNA (1)...(19): siRNA sense strand
acacaccaauguacuucuu

SEQ ID NO: 864299 - RNA, 19 nt, Homo sapiens
  misc_RNA (1)...(19): siRNA sense strand
guugucacaccgagucuua

SEQ ID NO: 864300 - RNA, 19 nt, Homo sapiens
  misc_RNA (1)...(19): siRNA sense strand
cuucauuccuccuuuacuu

SEQ ID NO: 864301 - RNA, 19 nt, Homo sapiens
  misc_RNA (1)...(19): siRNA sense strand
cuucuuggguaauugguuu

SEQ ID NO: 864302 - RNA, 19 nt, Homo sapiens
  misc_RNA (1)...(19): siRNA sense strand
gacaucgccuaguggauca

SEQ ID NO: 864303 - RNA, 19 nt, Homo sapiens
  misc_RNA (1)...(19): siRNA sense strand
uaauuggccucagcuggaa

SEQ ID NO: 864304 - RNA, 19 nt, Homo sapiens
  misc_RNA (1)...(19): siRNA sense strand
gaaacaagcauguaaaagg

SEQ ID NO: 864305 - RNA, 19 nt, Homo sapiens
  misc_RNA (1)...(19): siRNA sense strand
gcacuucugcguuuaucau

SEQ ID NO: 864306 - RNA, 19 nt, Homo sapiens
  misc_RNA (1)...(19): siRNA sense strand
uuauguagcuguguguaga

SEQ ID NO: 864307 - RNA, 19 nt, Homo sapiens
  misc_RNA (1)...(19): siRNA sense strand
uaaucuacacucucagaaa

SEQ ID NO: 864308 - RNA, 19 nt, Homo sapiens
  misc_RNA (1)...(19): siRNA sense strand
uuccagcacuucugcguuu

SEQ ID NO: 864309 - RNA, 19 nt, Homo sapiens
  misc_RNA (1)...(19): siRNA sense strand
gaaaccuguucaucaucau

SEQ ID NO: 864310 - RNA, 19 nt, Homo sapiens
  misc_RNA (1)...(19): siRNA sense strand
guagcuguguguagaccuu

SEQ ID NO: 864311 - RNA, 19 nt, Homo sapiens
  misc_RNA (1)...(19): siRNA sense strand
ccagcucuaucccucaguu

SEQ ID NO: 864312 - RNA, 19 nt, Homo sapiens
  misc_RNA (1)...(19): siRNA sense strand
gguucaacuuuacuuuguu

SEQ ID NO: 864313 - RNA, 19 nt, Homo sapiens
  misc_RNA (1)...(19): siRNA sense strand
aaucuacacucucagaaac

SEQ ID NO: 864314 - RNA, 19 nt, Homo sapiens
  misc_RNA (1)...(19): siRNA sense strand
ucaucaucauccugucaua

SEQ ID NO: 864315 - RNA, 19 nt, Homo sapiens
  misc_RNA (1)...(19): siRNA sense strand
ggaaaagaccaucucguau

SEQ ID NO: 864316 - RNA, 19 nt, Homo sapiens
  misc_RNA (1)...(19): siRNA sense strand
acauguggagcccaucuua

SEQ ID NO: 864317 - RNA, 19 nt, Homo sapiens
  misc_RNA (1)...(19): siRNA sense strand
agaaaguguuuaggacaug

SEQ ID NO: 864318 - RNA, 19 nt, Homo sapiens
  misc_RNA (1)...(19): siRNA sense strand
gaccuuugcauuacacugu

SEQ ID NO: 864319 - RNA, 19 nt, Homo sapiens
  misc_RNA (1)...(19): siRNA sense strand
guguagaccuuugcauuac

SEQ ID NO: 864320 - RNA, 19 nt, Homo sapiens
  misc_RNA (1)...(19): siRNA sense strand
ugacacccaugcaaaugag

SEQ ID NO: 864321 - RNA, 19 nt, Homo sapiens
  misc_RNA (1)...(19): siRNA sense strand
ugguucaacuuuacuuugu

SEQ ID NO: 864322 - RNA, 19 nt, Homo sapiens
  misc_RNA (1)...(19): siRNA sense strand
uggaaguaguucucuuugu

SEQ ID NO: 864323 - RNA, 19 nt, Homo sapiens
  misc_RNA (1)...(19): siRNA sense strand
gucuuaauccucuaaucua

SEQ ID NO: 864324 - RNA, 19 nt, Homo sapiens
  misc_RNA (1)...(19): siRNA sense strand
cggaaaagaccaucucgua

SEQ ID NO: 864325 - RNA, 19 nt, Homo sapiens
  misc_RNA (1)...(19): siRNA sense strand
guguguagaccuuugcauu

SEQ ID NO: 864326 - RNA, 19 nt, Homo sapiens
  misc_RNA (1)...(19): siRNA sense strand
guucucauaccucucauuc

SEQ ID NO: 864327 - RNA, 19 nt, Homo sapiens
  misc_RNA (1)...(19): siRNA sense strand
gagucuuaauccucuaauc

SEQ ID NO: 864328 - RNA, 19 nt, Homo sapiens
  misc_RNA (1)...(19): siRNA sense strand
cugcguuuaucauguguug

SEQ ID NO: 864329 - RNA, 19 nt, Homo sapiens
  misc_RNA (1)...(19): siRNA sense strand
cuucagaaaguguuuagga

SEQ ID NO: 864330 - RNA, 19 nt, Homo sapiens
  misc_RNA (1)...(19): siRNA sense strand
caaccacugggcuucagaa

SEQ ID NO: 864331 - RNA, 19 nt, Homo sapiens
  misc_RNA (1)...(19): siRNA sense strand
ccucguuucugccacuugu

SEQ ID NO: 864332 - RNA, 19 nt, Homo sapiens
  misc_RNA (1)...(19): siRNA sense strand
gggcagcgaagagacuauu

SEQ ID NO: 864333 - RNA, 19 nt, Homo sapiens
  misc_RNA (1)...(19): siRNA sense strand
ucuacacucucagaaacaa

SEQ ID NO: 864334 - RNA, 19 nt, Homo sapiens
  misc_RNA (1)...(19): siRNA sense strand
ggacauguggagcccaucu

SEQ ID NO: 864335 - RNA, 19 nt, Homo sapiens
  misc_RNA (1)...(19): siRNA sense strand
ccacacaccaauguacuuc

SEQ ID NO: 864336 - RNA, 19 nt, Homo sapiens
  misc_RNA (1)...(19): siRNA sense strand
gaucuucuaccugaugaca

SEQ ID NO: 864337 - RNA, 19 nt, Homo sapiens
  misc_RNA (1)...(19): siRNA sense strand
cuucugcguuuaucaugug

SEQ ID NO: 864338 - RNA, 19 nt, Homo sapiens
  misc_RNA (1)...(19): siRNA sense strand
uuuacuaucucagcacuuc

SEQ ID NO: 864339 - RNA, 19 nt, Homo sapiens
  misc_RNA (1)...(19): siRNA sense strand
uugcaugguucaacuuuac

SEQ ID NO: 864340 - RNA, 19 nt, Homo sapiens
  misc_RNA (1)...(19): siRNA sense strand
caucuccacacaccaaugu

SEQ ID NO: 864341 - RNA, 19 nt, Homo sapiens
  misc_RNA (1)...(19): siRNA sense strand
gcagcgaagagacuauugg

SEQ ID NO: 864342 - RNA, 19 nt, Homo sapiens
  misc_RNA (1)...(19): siRNA sense strand
ucucagaaacaagcaugua

SEQ ID NO: 864343 - RNA, 19 nt, Homo sapiens
  misc_RNA (1)...(19): siRNA sense strand
guacuucuuccuuucaaac

SEQ ID NO: 864344 - RNA, 19 nt, Homo sapiens
  misc_RNA (1)...(19): siRNA sense strand
gggcuucagaaaguguuua

SEQ ID NO: 864345 - RNA, 19 nt, Homo sapiens
  misc_RNA (1)...(19): siRNA sense strand
cagcacuucugcguuuauc

SEQ ID NO: 864346 - RNA, 19 nt, Homo sapiens
  misc_RNA (1)...(19): siRNA sense strand
ccuuucaaaccucucauuu

SEQ ID NO: 864347 - RNA, 19 nt, Homo sapiens
  misc_RNA (1)...(19): siRNA sense strand
cucagaaacaagcauguaa

SEQ ID NO: 864348 - RNA, 19 nt, Homo sapiens
  misc_RNA (1)...(19): siRNA sense strand
guagaccuuugcauuacac

SEQ ID NO: 864349 - RNA, 19 nt, Homo sapiens
  misc_RNA (1)...(19): siRNA sense strand
caugguucaacuuuacuuu

SEQ ID NO: 864350 - RNA, 19 nt, Homo sapiens
  misc_RNA (1)...(19): siRNA sense strand
aaaccucucauuucuggau

SEQ ID NO: 864351 - RNA, 19 nt, Homo sapiens
  misc_RNA (1)...(19): siRNA sense strand
gaaacgaagugggcaauua

SEQ ID NO: 864352 - RNA, 19 nt, Homo sapiens
  misc_RNA (1)...(19): siRNA sense strand
caacagaagagaagaauaa

SEQ ID NO: 864353 - RNA, 19 nt, Homo sapiens
  misc_RNA (1)...(19): siRNA sense strand
cuaaggaacuacuagauaa

SEQ ID NO: 864354 - RNA, 19 nt, Homo sapiens
  misc_RNA (1)...(19): siRNA sense strand
gaggaaaucuauaccuuug

SEQ ID NO: 864355 - RNA, 19 nt, Homo sapiens
  misc_RNA (1)...(19): siRNA sense strand
ucacagacaucaagcauug

SEQ ID NO: 864356 - RNA, 19 nt, Homo sapiens
  misc_RNA (1)...(19): siRNA sense strand
gauauaaccuccaggaaag

SEQ ID NO: 864357 - RNA, 19 nt, Homo sapiens
  misc_RNA (1)...(19): siRNA sense strand
gaauggagcugcuauugag

SEQ ID NO: 864358 - RNA, 19 nt, Homo sapiens
  misc_RNA (1)...(19): siRNA sense strand
acauaaaggugacugauuu

SEQ ID NO: 864359 - RNA, 19 nt, Homo sapiens
  misc_RNA (1)...(19): siRNA sense strand
ucaagaaccucaaauguag

SEQ ID NO: 864360 - RNA, 19 nt, Homo sapiens
  misc_RNA (1)...(19): siRNA sense strand
gagcauaggcgucguaaug

SEQ ID NO: 864361 - RNA, 19 nt, Homo sapiens
  misc_RNA (1)...(19): siRNA sense strand
gcauaggcgucguaaugua

SEQ ID NO: 864362 - RNA, 19 nt, Homo sapiens
  misc_RNA (1)...(19): siRNA sense strand
ggaaagauuugcccucaag

SEQ ID NO: 864363 - RNA, 19 nt, Homo sapiens
  misc_RNA (1)...(19): siRNA sense strand
gagacaagguggaucauuc

SEQ ID NO: 864364 - RNA, 19 nt, Homo sapiens
  misc_RNA (1)...(19): siRNA sense strand
ggaaaucuauaccuuugga

SEQ ID NO: 864365 - RNA, 19 nt, Homo sapiens
  misc_RNA (1)...(19): siRNA sense strand
gagaccaaccaauguauua

SEQ ID NO: 864366 - RNA, 19 nt, Homo sapiens
  misc_RNA (1)...(19): siRNA sense strand
gcuaaggaacuacuagaua

SEQ ID NO: 864367 - RNA, 19 nt, Homo sapiens
  misc_RNA (1)...(19): siRNA sense strand
gcuggaagcucugcuguga

SEQ ID NO: 864368 - RNA, 19 nt, Homo sapiens
  misc_RNA (1)...(19): siRNA sense strand
agaauaagccguccacuga

SEQ ID NO: 864369 - RNA, 19 nt, Homo sapiens
  misc_RNA (1)...(19): siRNA sense strand
aaagcagucuuauugauga

SEQ ID NO: 864370 - RNA, 19 nt, Homo sapiens
  misc_RNA (1)...(19): siRNA sense strand
ccaauuacacuucagauga

SEQ ID NO: 864371 - RNA, 19 nt, Homo sapiens
  misc_RNA (1)...(19): siRNA sense strand
gagcugcuauugaggaaau

SEQ ID NO: 864372 - RNA, 19 nt, Homo sapiens
  misc_RNA (1)...(19): siRNA sense strand
gauaguggcuuagauaaaa

SEQ ID NO: 864373 - RNA, 19 nt, Homo sapiens
  misc_RNA (1)...(19): siRNA sense strand
ccucaaauguagagagaaa

SEQ ID NO: 864374 - RNA, 19 nt, Homo sapiens
  misc_RNA (1)...(19): siRNA sense strand
caagguggaucauucaaag

SEQ ID NO: 864375 - RNA, 19 nt, Homo sapiens
  misc_RNA (1)...(19): siRNA sense strand
uauuagagaugaugaagga

SEQ ID NO: 864376 - RNA, 19 nt, Homo sapiens
  misc_RNA (1)...(19): siRNA sense strand
ccaaguacccugcuaaauc

SEQ ID NO: 864377 - RNA, 19 nt, Homo sapiens
  misc_RNA (1)...(19): siRNA sense strand
caucauacaucuggaacaa

SEQ ID NO: 864378 - RNA, 19 nt, Homo sapiens
  misc_RNA (1)...(19): siRNA sense strand
gcugauaguggcuuagaua

SEQ ID NO: 864379 - RNA, 19 nt, Homo sapiens
  misc_RNA (1)...(19): siRNA sense strand
aaauguaccuugugaugga

SEQ ID NO: 864380 - RNA, 19 nt, Homo sapiens
  misc_RNA (1)...(19): siRNA sense strand
guaaggacaacuuugauau

SEQ ID NO: 864381 - RNA, 19 nt, Homo sapiens
  misc_RNA (1)...(19): siRNA sense strand
ggauggagaacucaaagaa

SEQ ID NO: 864382 - RNA, 19 nt, Homo sapiens
  misc_RNA (1)...(19): siRNA sense strand
aaacgaagugggcaauuaa

SEQ ID NO: 864383 - RNA, 19 nt, Homo sapiens
  misc_RNA (1)...(19): siRNA sense strand
gauaugugcaguucaaguu

SEQ ID NO: 864384 - RNA, 19 nt, Homo sapiens
  misc_RNA (1)...(19): siRNA sense strand
caaccaauguauuagagau

SEQ ID NO: 864385 - RNA, 19 nt, Homo sapiens
  misc_RNA (1)...(19): siRNA sense strand
aaucacagcuaaggaacua

SEQ ID NO: 864386 - RNA, 19 nt, Homo sapiens
  misc_RNA (1)...(19): siRNA sense strand
gaacgagaggugaacauuc

SEQ ID NO: 864387 - RNA, 19 nt, Homo sapiens
  misc_RNA (1)...(19): siRNA sense strand
gcaaccaaguacccugcua

SEQ ID NO: 864388 - RNA, 19 nt, Homo sapiens
  misc_RNA (1)...(19): siRNA sense strand
caaagucucgcaucagcua

SEQ ID NO: 864389 - RNA, 19 nt, Homo sapiens
  misc_RNA (1)...(19): siRNA sense strand
gagaauggagcugcuauug

SEQ ID NO: 864390 - RNA, 19 nt, Homo sapiens
  misc_RNA (1)...(19): siRNA sense strand
ggaauagucauugaagcua

SEQ ID NO: 864391 - RNA, 19 nt, Homo sapiens
  misc_RNA (1)...(19): siRNA sense strand
ccaguaaggacaacuuuga

SEQ ID NO: 864392 - RNA, 19 nt, Homo sapiens
  misc_RNA (1)...(19): siRNA sense strand
gaagcucugcugugaaguu

SEQ ID NO: 864393 - RNA, 19 nt, Homo sapiens
  misc_RNA (1)...(19): siRNA sense strand
caaguacccugcuaaaucc

SEQ ID NO: 864394 - RNA, 19 nt, Homo sapiens
  misc_RNA (1)...(19): siRNA sense strand
gauggagaacucaaagaaa

SEQ ID NO: 864395 - RNA, 19 nt, Homo sapiens
  misc_RNA (1)...(19): siRNA sense strand
gaauaagccguccacugaa

SEQ ID NO: 864396 - RNA, 19 nt, Homo sapiens
  misc_RNA (1)...(19): siRNA sense strand
ucauacaucuggaacaagu

SEQ ID NO: 864397 - RNA, 19 nt, Homo sapiens
  misc_RNA (1)...(19): siRNA sense strand
ggugagaccaaccaaugua

SEQ ID NO: 864398 - RNA, 19 nt, Homo sapiens
  misc_RNA (1)...(19): siRNA sense strand
gcucacagaaucacagcua

SEQ ID NO: 864399 - RNA, 19 nt, Homo sapiens
  misc_RNA (1)...(19): siRNA sense strand
acauaaggauugagaaugg

SEQ ID NO: 864400 - RNA, 19 nt, Homo sapiens
  misc_RNA (1)...(19): siRNA sense strand
aagcucugcugugaaguua

SEQ ID NO: 864401 - RNA, 19 nt, Homo sapiens
  misc_RNA (1)...(19): siRNA sense strand
caaccaaguacccugcuaa

SEQ ID NO: 864402 - RNA, 19 nt, Homo sapiens
  misc_RNA (1)...(19): siRNA sense strand
guucaaguuucacaucuag

SEQ ID NO: 864403 - RNA, 19 nt, Homo sapiens
  misc_RNA (1)...(19): siRNA sense strand
gaagcaaaguaggagugaa

SEQ ID NO: 864404 - RNA, 19 nt, Homo sapiens
  misc_RNA (1)...(19): siRNA sense strand
guuaaaagcagucuuauug

SEQ ID NO: 864405 - RNA, 19 nt, Homo sapiens
  misc_RNA (1)...(19): siRNA sense strand
caucagcuauagcauaucu

SEQ ID NO: 864406 - RNA, 19 nt, Homo sapiens
  misc_RNA (1)...(19): siRNA sense strand
cgcaucagcuauagcauau

SEQ ID NO: 864407 - RNA, 19 nt, Homo sapiens
  misc_RNA (1)...(19): siRNA sense strand
gaaaauguaccuugugaug

SEQ ID NO: 864408 - RNA, 19 nt, Homo sapiens
  misc_RNA (1)...(19): siRNA sense strand
cucaagaaccucaaaugua

SEQ ID NO: 864409 - RNA, 19 nt, Homo sapiens
  misc_RNA (1)...(19): siRNA sense strand
caaagaaaauguaccuugu

SEQ ID NO: 864410 - RNA, 19 nt, Homo sapiens
  misc_RNA (1)...(19): siRNA sense strand
gggcaacuuuacagaagga

SEQ ID NO: 864411 - RNA, 19 nt, Homo sapiens
  misc_RNA (1)...(19): siRNA sense strand
cuauaccuuuggaagaaua

SEQ ID NO: 864412 - RNA, 19 nt, Homo sapiens
  misc_RNA (1)...(19): siRNA sense strand
ugaaaucaagggagaaaug

SEQ ID NO: 864413 - RNA, 19 nt, Homo sapiens
  misc_RNA (1)...(19): siRNA sense strand
aaggacaacuuugauaugu

SEQ ID NO: 864414 - RNA, 19 nt, Homo sapiens
  misc_RNA (1)...(19): siRNA sense strand
uagagaugaugaaggaaug

SEQ ID NO: 864415 - RNA, 19 nt, Homo sapiens
  misc_RNA (1)...(19): siRNA sense strand
gaaaaugcagucuggaauu

SEQ ID NO: 864416 - RNA, 19 nt, Homo sapiens
  misc_RNA (1)...(19): siRNA sense strand
agauauaaccuccaggaaa

SEQ ID NO: 864417 - RNA, 19 nt, Homo sapiens
  misc_RNA (1)...(19): siRNA sense strand
cgucguaauguacauguua

SEQ ID NO: 864418 - RNA, 19 nt, Homo sapiens
  misc_RNA (1)...(19): siRNA sense strand
ggagaacucaaagaaauuc

SEQ ID NO: 864419 - RNA, 19 nt, Homo sapiens
  misc_RNA (1)...(19): siRNA sense strand
cauugaagcuacagacaag

SEQ ID NO: 864420 - RNA, 19 nt, Homo sapiens
  misc_RNA (1)...(19): siRNA sense strand
gaugaugaaggaauggaaa

SEQ ID NO: 864421 - RNA, 19 nt, Homo sapiens
  misc_RNA (1)...(19): siRNA sense strand
cagaaucacagcuaaggaa

SEQ ID NO: 864422 - RNA, 19 nt, Homo sapiens
  misc_RNA (1)...(19): siRNA sense strand
gaaaaggagaacuacauuu

SEQ ID NO: 864423 - RNA, 19 nt, Homo sapiens
  misc_RNA (1)...(19): siRNA sense strand
gcuauagcauaucuucaca

SEQ ID NO: 864424 - RNA, 19 nt, Homo sapiens
  misc_RNA (1)...(19): siRNA sense strand
gugcagaaucuuuaauuuc

SEQ ID NO: 864425 - RNA, 19 nt, Homo sapiens
  misc_RNA (1)...(19): siRNA sense strand
guuauuacguggagaacca

SEQ ID NO: 864426 - RNA, 19 nt, Homo sapiens
  misc_RNA (1)...(19): siRNA sense strand
gaucugaaacuggaaaaua

SEQ ID NO: 864427 - RNA, 19 nt, Homo sapiens
  misc_RNA (1)...(19): siRNA sense strand
auggagaacucaaagaaau

SEQ ID NO: 864428 - RNA, 19 nt, Homo sapiens
  misc_RNA (1)...(19): siRNA sense strand
ugaggaaaucuauaccuuu

SEQ ID NO: 864429 - RNA, 19 nt, Homo sapiens
  misc_RNA (1)...(19): siRNA sense strand
caaacuccuuccagcugaa

SEQ ID NO: 864430 - RNA, 19 nt, Homo sapiens
  misc_RNA (1)...(19): siRNA sense strand
cccagaaaguguugaggaa

SEQ ID NO: 864431 - RNA, 19 nt, Homo sapiens
  misc_RNA (1)...(19): siRNA sense strand
uaaccuccaggaaagauuu

SEQ ID NO: 864432 - RNA, 19 nt, Homo sapiens
  misc_RNA (1)...(19): siRNA sense strand
uaaacuuucuucggugaga

SEQ ID NO: 864433 - RNA, 19 nt, Homo sapiens
  misc_RNA (1)...(19): siRNA sense strand
uaacaggcaauaaacuuuc

SEQ ID NO: 864434 - RNA, 19 nt, Homo sapiens
  misc_RNA (1)...(19): siRNA sense strand
gugguuaacaggcaauaaa

SEQ ID NO: 864435 - RNA, 19 nt, Homo sapiens
  misc_RNA (1)...(19): siRNA sense strand
uaucagugcccacgacuau

SEQ ID NO: 864436 - RNA, 19 nt, Homo sapiens
  misc_RNA (1)...(19): siRNA sense strand
guacauagagaucugaaac

SEQ ID NO: 864437 - RNA, 19 nt, Homo sapiens
  misc_RNA (1)...(19): siRNA sense strand
cuacagacaaggaaacaga

SEQ ID NO: 864438 - RNA, 19 nt, Homo sapiens
  misc_RNA (1)...(19): siRNA sense strand
ggaagaauauugggaaaag

SEQ ID NO: 864439 - RNA, 19 nt, Homo sapiens
  misc_RNA (1)...(19): siRNA sense strand
gcuuuggaauagucauuga

SEQ ID NO: 864440 - RNA, 19 nt, Homo sapiens
  misc_RNA (1)...(19): siRNA sense strand
gaaaucaagggagaaaugg

SEQ ID NO: 864441 - RNA, 19 nt, Homo sapiens
  misc_RNA (1)...(19): siRNA sense strand
uaaggacaacuuugauaug

SEQ ID NO: 864442 - RNA, 19 nt, Homo sapiens
  misc_RNA (1)...(19): siRNA sense strand
agauguacuuuguguaugu

SEQ ID NO: 864443 - RNA, 19 nt, Homo sapiens
  misc_RNA (1)...(19): siRNA sense strand
aaacacaacagaagagaag

SEQ ID NO: 864444 - RNA, 19 nt, Homo sapiens
  misc_RNA (1)...(19): siRNA sense strand
guuaacaggcaauaaacuu

SEQ ID NO: 864445 - RNA, 19 nt, Homo sapiens
  misc_RNA (1)...(19): siRNA sense strand
cauaagugacugugcuaaa

SEQ ID NO: 864446 - RNA, 19 nt, Homo sapiens
  misc_RNA (1)...(19): siRNA sense strand
gugggacuccuaucuauau

SEQ ID NO: 864447 - RNA, 19 nt, Homo sapiens
  misc_RNA (1)...(19): siRNA sense strand
gauguacuuuguguauguu

SEQ ID NO: 864448 - RNA, 19 nt, Homo sapiens
  misc_RNA (1)...(19): siRNA sense strand
gcauaucuucacaauaaug

SEQ ID NO: 864449 - RNA, 19 nt, Homo sapiens
  misc_RNA (1)...(19): siRNA sense strand
gaaauucuggauaggaaag

SEQ ID NO: 864450 - RNA, 19 nt, Homo sapiens
  misc_RNA (1)...(19): siRNA sense strand
gaagcuacagacaaggaaa

SEQ ID NO: 864451 - RNA, 19 nt, Homo sapiens
  misc_RNA (1)...(19): siRNA sense strand
ggucaucggcuccaaauuu

SEQ ID NO: 864452 - RNA, 19 nt, Homo sapiens
  misc_RNA (1)...(19): siRNA sense strand
agagagugcuccugaauga

SEQ ID NO: 864453 - RNA, 19 nt, Homo sapiens
  misc_RNA (1)...(19): siRNA sense strand
gcuccaaauuugaccagua

SEQ ID NO: 864454 - RNA, 19 nt, Homo sapiens
  misc_RNA (1)...(19): siRNA sense strand
guaccuggcuugcauucug

SEQ ID NO: 864455 - RNA, 19 nt, Homo sapiens
  misc_RNA (1)...(19): siRNA sense strand
ggccgacguugcccacaua

SEQ ID NO: 864456 - RNA, 19 nt, Homo sapiens
  misc_RNA (1)...(19): siRNA sense strand
gucaucggcuccaaauuug

SEQ ID NO: 864457 - RNA, 19 nt, Homo sapiens
  misc_RNA (1)...(19): siRNA sense strand
gaccgugccuccuuugaag

SEQ ID NO: 864458 - RNA, 19 nt, Homo sapiens
  misc_RNA (1)...(19): siRNA sense strand
cagcagccgugucgucaug

SEQ ID NO: 864459 - RNA, 19 nt, Homo sapiens
  misc_RNA (1)...(19): siRNA sense strand
guucggugguugucccaaa

SEQ ID NO: 864460 - RNA, 19 nt, Homo sapiens
  misc_RNA (1)...(19): siRNA sense strand
gcagccgugucgucauguu

SEQ ID NO: 864461 - RNA, 19 nt, Homo sapiens
  misc_RNA (1)...(19): siRNA sense strand
caaauuugaccaguacaug

SEQ ID NO: 864462 - RNA, 19 nt, Homo sapiens
  misc_RNA (1)...(19): siRNA sense strand
ccagagagugcuccugaau

SEQ ID NO: 864463 - RNA, 19 nt, Homo sapiens
  misc_RNA (1)...(19): siRNA sense strand
ccauugacacugccagcua

SEQ ID NO: 864464 - RNA, 19 nt, Homo sapiens
  misc_RNA (1)...(19): siRNA sense strand
ucacugaccgugccuccuu

SEQ ID NO: 864465 - RNA, 19 nt, Homo sapiens
  misc_RNA (1)...(19): siRNA sense strand
acacagaugccuuccucuu

SEQ ID NO: 864466 - RNA, 19 nt, Homo sapiens
  misc_RNA (1)...(19): siRNA sense strand
aggaguaccuggcuugcau

SEQ ID NO: 864467 - RNA, 19 nt, Homo sapiens
  misc_RNA (1)...(19): siRNA sense strand
ugaccgugccuccuuugaa

SEQ ID NO: 864468 - RNA, 19 nt, Homo sapiens
  misc_RNA (1)...(19): siRNA sense strand
cgacguugcccacauacuc

SEQ ID NO: 864469 - RNA, 19 nt, Homo sapiens
  misc_RNA (1)...(19): siRNA sense strand
ggaguaccuggcuugcauu

SEQ ID NO: 864470 - RNA, 19 nt, Homo sapiens
  misc_RNA (1)...(19): siRNA sense strand
cagagagugcuccugaaug

SEQ ID NO: 864471 - RNA, 19 nt, Homo sapiens
  misc_RNA (1)...(19): siRNA sense strand
gacacugccagcuacaaga

SEQ ID NO: 864472 - RNA, 19 nt, Homo sapiens
  misc_RNA (1)...(19): siRNA sense strand
cacagaugccuuccucuuc

SEQ ID NO: 864473 - RNA, 19 nt, Homo sapiens
  misc_RNA (1)...(19): siRNA sense strand
gacguugcccacauacuca

SEQ ID NO: 864474 - RNA, 19 nt, Homo sapiens
  misc_RNA (1)...(19): siRNA sense strand
gcacagccauuaucaugua

SEQ ID NO: 864475 - RNA, 19 nt, Homo sapiens
  misc_RNA (1)...(19): siRNA sense strand
ccaaggagcagaagaaaua

SEQ ID NO: 864476 - RNA, 19 nt, Homo sapiens
  misc_RNA (1)...(19): siRNA sense strand
gaagaauacuuugaagaga

SEQ ID NO: 864477 - RNA, 19 nt, Homo sapiens
  misc_RNA (1)...(19): siRNA sense strand
agaaauaucuccugcuguu

SEQ ID NO: 864478 - RNA, 19 nt, Homo sapiens
  misc_RNA (1)...(19): siRNA sense strand
aaacuugccugugcagaua

SEQ ID NO: 864479 - RNA, 19 nt, Homo sapiens
  misc_RNA (1)...(19): siRNA sense strand
ccacaauuguaguuucaua

SEQ ID NO: 864480 - RNA, 19 nt, Homo sapiens
  misc_RNA (1)...(19): siRNA sense strand
caagggaaguucagaggaa

SEQ ID NO: 864481 - RNA, 19 nt, Homo sapiens
  misc_RNA (1)...(19): siRNA sense strand
aaucuuggcuguucucaaa

SEQ ID NO: 864482 - RNA, 19 nt, Homo sapiens
  misc_RNA (1)...(19): siRNA sense strand
gcagauacccacaucaaug

SEQ ID NO: 864483 - RNA, 19 nt, Homo sapiens
  misc_RNA (1)...(19): siRNA sense strand
uaacauccaucagagaguu

SEQ ID NO: 864484 - RNA, 19 nt, Homo sapiens
  misc_RNA (1)...(19): siRNA sense strand
caauauaacauccaucaga

SEQ ID NO: 864485 - RNA, 19 nt, Homo sapiens
  misc_RNA (1)...(19): siRNA sense strand
gaagagagugcugggagua

SEQ ID NO: 864486 - RNA, 19 nt, Homo sapiens
  misc_RNA (1)...(19): siRNA sense strand
ggucuuggccggagcaauu

SEQ ID NO: 864487 - RNA, 19 nt, Homo sapiens
  misc_RNA (1)...(19): siRNA sense strand
ccacaucaaugagaacaug

SEQ ID NO: 864488 - RNA, 19 nt, Homo sapiens
  misc_RNA (1)...(19): siRNA sense strand
uguguuacuucuaccuuua

SEQ ID NO: 864489 - RNA, 19 nt, Homo sapiens
  misc_RNA (1)...(19): siRNA sense strand
caucagagaguuccuccua

SEQ ID NO: 864490 - RNA, 19 nt, Homo sapiens
  misc_RNA (1)...(19): siRNA sense strand
gccauuaucauguauguug

SEQ ID NO: 864491 - RNA, 19 nt, Homo sapiens
  misc_RNA (1)...(19): siRNA sense strand
gacaauauaacauccauca

SEQ ID NO: 864492 - RNA, 19 nt, Homo sapiens
  misc_RNA (1)...(19): siRNA sense strand
ggauucagaugcuccucuu

SEQ ID NO: 864493 - RNA, 19 nt, Homo sapiens
  misc_RNA (1)...(19): siRNA sense strand
gaacucagaagugaagaau

SEQ ID NO: 864494 - RNA, 19 nt, Homo sapiens
  misc_RNA (1)...(19): siRNA sense strand
cuugauucaucuuguguua

SEQ ID NO: 864495 - RNA, 19 nt, Homo sapiens
  misc_RNA (1)...(19): siRNA sense strand
cagauacccacaucaauga

SEQ ID NO: 864496 - RNA, 19 nt, Homo sapiens
  misc_RNA (1)...(19): siRNA sense strand
ccccuuaucuguagucuua

SEQ ID NO: 864497 - RNA, 19 nt, Homo sapiens
  misc_RNA (1)...(19): siRNA sense strand
cuuaggaacucagaaguga

SEQ ID NO: 864498 - RNA, 19 nt, Homo sapiens
  misc_RNA (1)...(19): siRNA sense strand
acucagaagugaagaauac

SEQ ID NO: 864499 - RNA, 19 nt, Homo sapiens
  misc_RNA (1)...(19): siRNA sense strand
gaaauaucuccugcuguuu

SEQ ID NO: 864500 - RNA, 19 nt, Homo sapiens
  misc_RNA (1)...(19): siRNA sense strand
gagacaauauaacauccau

SEQ ID NO: 864501 - RNA, 19 nt, Homo sapiens
  misc_RNA (1)...(19): siRNA sense strand
caucuuguguuacuucuac

SEQ ID NO: 864502 - RNA, 19 nt, Homo sapiens
  misc_RNA (1)...(19): siRNA sense strand
ugauuggacucguuuaugg

SEQ ID NO: 864503 - RNA, 19 nt, Homo sapiens
  misc_RNA (1)...(19): siRNA sense strand
ugugaaaucuuggcuguuc

SEQ ID NO: 864504 - RNA, 19 nt, Homo sapiens
  misc_RNA (1)...(19): siRNA sense strand
ugaagaauacuuugaagag

SEQ ID NO: 864505 - RNA, 19 nt, Homo sapiens
  misc_RNA (1)...(19): siRNA sense strand
guggugauguccuaugauc

SEQ ID NO: 864506 - RNA, 19 nt, Homo sapiens
  misc_RNA (1)...(19): siRNA sense strand
gauguccuaugaucuguac

SEQ ID NO: 864507 - RNA, 19 nt, Homo sapiens
  misc_RNA (1)...(19): siRNA sense strand
guccacaauuguaguuuca

SEQ ID NO: 864508 - RNA, 19 nt, Homo sapiens
  misc_RNA (1)...(19): siRNA sense strand
cagccaagcccaucuccuu

SEQ ID NO: 864509 - RNA, 19 nt, Homo sapiens
  misc_RNA (1)...(19): siRNA sense strand
uuucacagccucuuuaauc

SEQ ID NO: 864510 - RNA, 19 nt, Homo sapiens
  misc_RNA (1)...(19): siRNA sense strand
gugcagauacccacaucaa

SEQ ID NO: 864511 - RNA, 19 nt, Homo sapiens
  misc_RNA (1)...(19): siRNA sense strand
caaacuugccugugcagau

SEQ ID NO: 864512 - RNA, 19 nt, Homo sapiens
  misc_RNA (1)...(19): siRNA sense strand
ucagagaguuccuccuacu

SEQ ID NO: 864513 - RNA, 19 nt, Homo sapiens
  misc_RNA (1)...(19): siRNA sense strand
agaauacuuugaagagagu

SEQ ID NO: 864514 - RNA, 19 nt, Homo sapiens
  misc_RNA (1)...(19): siRNA sense strand
gugaagaauacuuugaaga

SEQ ID NO: 864515 - RNA, 19 nt, Homo sapiens
  misc_RNA (1)...(19): siRNA sense strand
ggaacucagaagugaagaa

SEQ ID NO: 864516 - RNA, 19 nt, Homo sapiens
  misc_RNA (1)...(19): siRNA sense strand
cagccauuaucauguaugu

SEQ ID NO: 864517 - RNA, 19 nt, Homo sapiens
  misc_RNA (1)...(19): siRNA sense strand
ucaaugagaacauggucuu

SEQ ID NO: 864518 - RNA, 19 nt, Homo sapiens
  misc_RNA (1)...(19): siRNA sense strand
aaauaucuccugcuguuuc

SEQ ID NO: 864519 - RNA, 19 nt, Homo sapiens
  misc_RNA (1)...(19): siRNA sense strand
ggugauguccuaugaucug

SEQ ID NO: 864520 - RNA, 19 nt, Homo sapiens
  misc_RNA (1)...(19): siRNA sense strand
gcccaaggauucagaugcu

SEQ ID NO: 864521 - RNA, 19 nt, Homo sapiens
  misc_RNA (1)...(19): siRNA sense strand
ugauucaucuuguguuacu

SEQ ID NO: 864522 - RNA, 19 nt, Homo sapiens
  misc_RNA (1)...(19): siRNA sense strand
auacccacaucaaugagaa

SEQ ID NO: 864523 - RNA, 19 nt, Homo sapiens
  misc_RNA (1)...(19): siRNA sense strand
gagagugcugggaguagaa

SEQ ID NO: 864524 - RNA, 19 nt, Homo sapiens
  misc_RNA (1)...(19): siRNA sense strand
gauccaaucaagggaaguu

SEQ ID NO: 864525 - RNA, 19 nt, Homo sapiens
  misc_RNA (1)...(19): siRNA sense strand
cauccucugugcuauccuu

SEQ ID NO: 864526 - RNA, 19 nt, Homo sapiens
  misc_RNA (1)...(19): siRNA sense strand
gccaagcccaucuccuuug

SEQ ID NO: 864527 - RNA, 19 nt, Homo sapiens
  misc_RNA (1)...(19): siRNA sense strand
agagagugcugggaguaga

SEQ ID NO: 864528 - RNA, 19 nt, Homo sapiens
  misc_RNA (1)...(19): siRNA sense strand
gauacccacaucaaugaga

SEQ ID NO: 864529 - RNA, 19 nt, Homo sapiens
  misc_RNA (1)...(19): siRNA sense strand
aauaucuccugcuguuuca

SEQ ID NO: 864530 - RNA, 19 nt, Homo sapiens
  misc_RNA (1)...(19): siRNA sense strand
uauccuugauucaucuugu

SEQ ID NO: 864531 - RNA, 19 nt, Homo sapiens
  misc_RNA (1)...(19): siRNA sense strand
aagggaaguucagaggaaa

SEQ ID NO: 864532 - RNA, 19 nt, Homo sapiens
  misc_RNA (1)...(19): siRNA sense strand
ugguggugauguccuauga

SEQ ID NO: 864533 - RNA, 19 nt, Homo sapiens
  misc_RNA (1)...(19): siRNA sense strand
ccaagcccaucuccuuugc

SEQ ID NO: 864534 - RNA, 19 nt, Homo sapiens
  misc_RNA (1)...(19): siRNA sense strand
uauguuggacccagauaug

SEQ ID NO: 864535 - RNA, 19 nt, Homo sapiens
  misc_RNA (1)...(19): siRNA sense strand
ccaccucugugugauugga

SEQ ID NO: 864536 - RNA, 19 nt, Homo sapiens
  misc_RNA (1)...(19): siRNA sense strand
guaggccccagaaaauuua

SEQ ID NO: 864537 - RNA, 19 nt, Homo sapiens
  misc_RNA (1)...(19): siRNA sense strand
uguccacaauuguaguuuc

SEQ ID NO: 864538 - RNA, 19 nt, Homo sapiens
  misc_RNA (1)...(19): siRNA sense strand
ucaauccccuuaucuguag

SEQ ID NO: 864539 - RNA, 19 nt, Homo sapiens
  misc_RNA (1)...(19): siRNA sense strand
caaggagcagaagaaauau

SEQ ID NO: 864540 - RNA, 19 nt, Homo sapiens
  misc_RNA (1)...(19): siRNA sense strand
gugauuggacucguuuaug

SEQ ID NO: 864541 - RNA, 19 nt, Homo sapiens
  misc_RNA (1)...(19): siRNA sense strand
ucccaccucugugugauug

SEQ ID NO: 864542 - RNA, 19 nt, Homo sapiens
  misc_RNA (1)...(19): siRNA sense strand
gcagauugcucuuauuaaa

SEQ ID NO: 864543 - RNA, 19 nt, Homo sapiens
  misc_RNA (1)...(19): siRNA sense strand
gaagggaaaucuagaaguu

SEQ ID NO: 864544 - RNA, 19 nt, Homo sapiens
  misc_RNA (1)...(19): siRNA sense strand
gcagacaucucuuacauga

SEQ ID NO: 864545 - RNA, 19 nt, Homo sapiens
  misc_RNA (1)...(19): siRNA sense strand
gaaagaagcugggcagaug

SEQ ID NO: 864546 - RNA, 19 nt, Homo sapiens
  misc_RNA (1)...(19): siRNA sense strand
gaagaaagaagcaugauuu

SEQ ID NO: 864547 - RNA, 19 nt, Homo sapiens
  misc_RNA (1)...(19): siRNA sense strand
gcagaaagacagagaaaua

SEQ ID NO: 864548 - RNA, 19 nt, Homo sapiens
  misc_RNA (1)...(19): siRNA sense strand
ggagaccucuuacaaaugu

SEQ ID NO: 864549 - RNA, 19 nt, Homo sapiens
  misc_RNA (1)...(19): siRNA sense strand
gggaaagcauggacccuua

SEQ ID NO: 864550 - RNA, 19 nt, Homo sapiens
  misc_RNA (1)...(19): siRNA sense strand
gaagagaggaccagaguau

SEQ ID NO: 864551 - RNA, 19 nt, Homo sapiens
  misc_RNA (1)...(19): siRNA sense strand
ccaaagcaguggaaagauu

SEQ ID NO: 864552 - RNA, 19 nt, Homo sapiens
  misc_RNA (1)...(19): siRNA sense strand
gaagaaaugcauaagcaaa

SEQ ID NO: 864553 - RNA, 19 nt, Homo sapiens
  misc_RNA (1)...(19): siRNA sense strand
gggcagauugcucuuauua

SEQ ID NO: 864554 - RNA, 19 nt, Homo sapiens
  misc_RNA (1)...(19): siRNA sense strand
gaacaggugccauguacuu

SEQ ID NO: 864555 - RNA, 19 nt, Homo sapiens
  misc_RNA (1)...(19): siRNA sense strand
gaagguguuagcaaauuua

SEQ ID NO: 864556 - RNA, 19 nt, Homo sapiens
  misc_RNA (1)...(19): siRNA sense strand
gaaagaccuuauccuacuu

SEQ ID NO: 864557 - RNA, 19 nt, Homo sapiens
  misc_RNA (1)...(19): siRNA sense strand
gaguguguaccuuuaauua

SEQ ID NO: 864558 - RNA, 19 nt, Homo sapiens
  misc_RNA (1)...(19): siRNA sense strand
aaaguuagaugccaaagca

SEQ ID NO: 864559 - RNA, 19 nt, Homo sapiens
  misc_RNA (1)...(19): siRNA sense strand
acauuuaggugucaagaaa

SEQ ID NO: 864560 - RNA, 19 nt, Homo sapiens
  misc_RNA (1)...(19): siRNA sense strand
ggucagauaccaaggcuuu

SEQ ID NO: 864561 - RNA, 19 nt, Homo sapiens
  misc_RNA (1)...(19): siRNA sense strand
aauuaaaggugcaggcaua

SEQ ID NO: 864562 - RNA, 19 nt, Homo sapiens
  misc_RNA (1)...(19): siRNA sense strand
aaacauugccggaugcuaa

SEQ ID NO: 864563 - RNA, 19 nt, Homo sapiens
  misc_RNA (1)...(19): siRNA sense strand
gauuguaaaugcuggaguu

SEQ ID NO: 864564 - RNA, 19 nt, Homo sapiens
  misc_RNA (1)...(19): siRNA sense strand
ugaaagaccuuauccuacu

SEQ ID NO: 864565 - RNA, 19 nt, Homo sapiens
  misc_RNA (1)...(19): siRNA sense strand
gcuugaagguguuagcaaa

SEQ ID NO: 864566 - RNA, 19 nt, Homo sapiens
  misc_RNA (1)...(19): siRNA sense strand
caugaaagaccuuauccua

SEQ ID NO: 864567 - RNA, 19 nt, Homo sapiens
  misc_RNA (1)...(19): siRNA sense strand
ugaagguguuagcaaauuu

SEQ ID NO: 864568 - RNA, 19 nt, Homo sapiens
  misc_RNA (1)...(19): siRNA sense strand
ugaugaguguguaccuuua

SEQ ID NO: 864569 - RNA, 19 nt, Homo sapiens
  misc_RNA (1)...(19): siRNA sense strand
ggaguuaaccgaauuucau

SEQ ID NO: 864570 - RNA, 19 nt, Homo sapiens
  misc_RNA (1)...(19): siRNA sense strand
ggaacagaaugccuugaca

SEQ ID NO: 864571 - RNA, 19 nt, Homo sapiens
  misc_RNA (1)...(19): siRNA sense strand
gaguuaaccgaauuucaua

SEQ ID NO: 864572 - RNA, 19 nt, Homo sapiens
  misc_RNA (1)...(19): siRNA sense strand
cauggacccuuaggagaua

SEQ ID NO: 864573 - RNA, 19 nt, Homo sapiens
  misc_RNA (1)...(19): siRNA sense strand
cagaaagacagagaaauaa

SEQ ID NO: 864574 - RNA, 19 nt, Homo sapiens
  misc_RNA (1)...(19): siRNA sense strand
gcagaagggaaaucuagaa

SEQ ID NO: 864575 - RNA, 19 nt, Homo sapiens
  misc_RNA (1)...(19): siRNA sense strand
gagagaaaaugguguguug

SEQ ID NO: 864576 - RNA, 19 nt, Homo sapiens
  misc_RNA (1)...(19): siRNA sense strand
ccagugugccgaacuuuaa

SEQ ID NO: 864577 - RNA, 19 nt, Homo sapiens
  misc_RNA (1)...(19): siRNA sense strand
gcaaauacugaugacuaua

SEQ ID NO: 864578 - RNA, 19 nt, Homo sapiens
  misc_RNA (1)...(19): siRNA sense strand
ugacaaagugcccauguga

SEQ ID NO: 864579 - RNA, 19 nt, Homo sapiens
  misc_RNA (1)...(19): siRNA sense strand
gaaaauccauacuuuagca

SEQ ID NO: 864580 - RNA, 19 nt, Homo sapiens
  misc_RNA (1)...(19): siRNA sense strand
caaauacugaugacuauag

SEQ ID NO: 864581 - RNA, 19 nt, Homo sapiens
  misc_RNA (1)...(19): siRNA sense strand
gaagaugcaaaguuagaug

SEQ ID NO: 864582 - RNA, 19 nt, Homo sapiens
  misc_RNA (1)...(19): siRNA sense strand
gaacagaaugccuugacau

SEQ ID NO: 864583 - RNA, 19 nt, Homo sapiens
  misc_RNA (1)...(19): siRNA sense strand
gaaagacagagaaauaagg

SEQ ID NO: 864584 - RNA, 19 nt, Homo sapiens
  misc_RNA (1)...(19): siRNA sense strand
caaagcaguggaaagauug

SEQ ID NO: 864585 - RNA, 19 nt, Homo sapiens
  misc_RNA (1)...(19): siRNA sense strand
aagcaaauacugaugacua

SEQ ID NO: 864586 - RNA, 19 nt, Homo sapiens
  misc_RNA (1)...(19): siRNA sense strand
gcagaagcccagcggcaaa

SEQ ID NO: 864587 - RNA, 19 nt, Homo sapiens
  misc_RNA (1)...(19): siRNA sense strand
uucugaagaugcaaaguua

SEQ ID NO: 864588 - RNA, 19 nt, Homo sapiens
  misc_RNA (1)...(19): siRNA sense strand
ccagaacagauuaaugaaa

SEQ ID NO: 864589 - RNA, 19 nt, Homo sapiens
  misc_RNA (1)...(19): siRNA sense strand
gagaggaccagaguaucua

SEQ ID NO: 864590 - RNA, 19 nt, Homo sapiens
  misc_RNA (1)...(19): siRNA sense strand
cauaagcaaauacugauga

SEQ ID NO: 864591 - RNA, 19 nt, Homo sapiens
  misc_RNA (1)...(19): siRNA sense strand
ggagcucuuuccagcagaa

SEQ ID NO: 864592 - RNA, 19 nt, Homo sapiens
  misc_RNA (1)...(19): siRNA sense strand
agaaggcagacaucucuua

SEQ ID NO: 864593 - RNA, 19 nt, Homo sapiens
  misc_RNA (1)...(19): siRNA sense strand
ugcaggagauguagauguu

SEQ ID NO: 864594 - RNA, 19 nt, Homo sapiens
  misc_RNA (1)...(19): siRNA sense strand
agacagagaaauaaggaaa

SEQ ID NO: 864595 - RNA, 19 nt, Homo sapiens
  misc_RNA (1)...(19): siRNA sense strand
ggaaaucuagaaguuguga

SEQ ID NO: 864596 - RNA, 19 nt, Homo sapiens
  misc_RNA (1)...(19): siRNA sense strand
gcauggacccuuaggagau

SEQ ID NO: 864597 - RNA, 19 nt, Homo sapiens
  misc_RNA (1)...(19): siRNA sense strand
guuauauggugcaguuugu

SEQ ID NO: 864598 - RNA, 19 nt, Homo sapiens
  misc_RNA (1)...(19): siRNA sense strand
gaugaguguguaccuuuaa

SEQ ID NO: 864599 - RNA, 19 nt, Homo sapiens
  misc_RNA (1)...(19): siRNA sense strand
ccaugugugugucuuacuu

SEQ ID NO: 864600 - RNA, 19 nt, Homo sapiens
  misc_RNA (1)...(19): siRNA sense strand
caaagugcccaugugauga

SEQ ID NO: 864601 - RNA, 19 nt, Homo sapiens
  misc_RNA (1)...(19): siRNA sense strand
acaaagugcccaugugaug

SEQ ID NO: 864602 - RNA, 19 nt, Homo sapiens
  misc_RNA (1)...(19): siRNA sense strand
aaagacagguaaagagaac

SEQ ID NO: 864603 - RNA, 19 nt, Homo sapiens
  misc_RNA (1)...(19): siRNA sense strand
gagcuuauggucuugaaca

SEQ ID NO: 864604 - RNA, 19 nt, Homo sapiens
  misc_RNA (1)...(19): siRNA sense strand
gaagcugggcagaugcaaa

SEQ ID NO: 864605 - RNA, 19 nt, Homo sapiens
  misc_RNA (1)...(19): siRNA sense strand
ccagaagaaagaagcauga

SEQ ID NO: 864606 - RNA, 19 nt, Homo sapiens
  misc_RNA (1)...(19): siRNA sense strand
gaucugaguaugcugacuu

SEQ ID NO: 864607 - RNA, 19 nt, Homo sapiens
  misc_RNA (1)...(19): siRNA sense strand
ggaugugguuacaaugcuu

SEQ ID NO: 864608 - RNA, 19 nt, Homo sapiens
  misc_RNA (1)...(19): siRNA sense strand
uguguuauauggugcaguu

SEQ ID NO: 864609 - RNA, 19 nt, Homo sapiens
  misc_RNA (1)...(19): siRNA sense strand
uuacggaggcuucuaguuc

SEQ ID NO: 864610 - RNA, 19 nt, Homo sapiens
  misc_RNA (1)...(19): siRNA sense strand
gggcagaagggaaaucuag

SEQ ID NO: 864611 - RNA, 19 nt, Homo sapiens
  misc_RNA (1)...(19): siRNA sense strand
ugucuuacuucaaccuuug

SEQ ID NO: 864612 - RNA, 19 nt, Homo sapiens
  misc_RNA (1)...(19): siRNA sense strand
caaccuuugguguguuaua

SEQ ID NO: 864613 - RNA, 19 nt, Homo sapiens
  misc_RNA (1)...(19): siRNA sense strand
gugccgaacuuuaaacacu

SEQ ID NO: 864614 - RNA, 19 nt, Homo sapiens
  misc_RNA (1)...(19): siRNA sense strand
gaaaugcauaagcaaauac

SEQ ID NO: 864615 - RNA, 19 nt, Homo sapiens
  misc_RNA (1)...(19): siRNA sense strand
ggaggcuucuaguucugaa

SEQ ID NO: 864616 - RNA, 19 nt, Homo sapiens
  misc_RNA (1)...(19): siRNA sense strand
guucugaagaugcaaaguu

SEQ ID NO: 864617 - RNA, 19 nt, Homo sapiens
  misc_RNA (1)...(19): siRNA sense strand
uguaaaugcuggaguuaac

SEQ ID NO: 864618 - RNA, 19 nt, Homo sapiens
  misc_RNA (1)...(19): siRNA sense strand
uugaagguguuagcaaauu

SEQ ID NO: 864619 - RNA, 19 nt, Homo sapiens
  misc_RNA (1)...(19): siRNA sense strand
aggcagacaucucuuacau

SEQ ID NO: 864620 - RNA, 19 nt, Homo sapiens
  misc_RNA (1)...(19): siRNA sense strand
gugaugaguguguaccuuu

SEQ ID NO: 864621 - RNA, 19 nt, Homo sapiens
  misc_RNA (1)...(19): siRNA sense strand
uggaacaggugccauguac

SEQ ID NO: 864622 - RNA, 19 nt, Homo sapiens
  misc_RNA (1)...(19): siRNA sense strand
gaacugaggaucauaaaac

SEQ ID NO: 864623 - RNA, 19 nt, Homo sapiens
  misc_RNA (1)...(19): siRNA sense strand
gccugcugauccagaaaua

SEQ ID NO: 864624 - RNA, 19 nt, Homo sapiens
  misc_RNA (1)...(19): siRNA sense strand
agcaaauacugaugacuau

SEQ ID NO: 864625 - RNA, 19 nt, Homo sapiens
  misc_RNA (1)...(19): siRNA sense strand
gaacaaaaugagccugaaa

SEQ ID NO: 864626 - RNA, 19 nt, Homo sapiens
  misc_RNA (1)...(19): siRNA sense strand
gaaggcagacaucucuuac

SEQ ID NO: 864627 - RNA, 19 nt, Homo sapiens
  misc_RNA (1)...(19): siRNA sense strand
aaagaaggcagacaucucu

SEQ ID NO: 864628 - RNA, 19 nt, Homo sapiens
  misc_RNA (1)...(19): siRNA sense strand
caggugccauguacuuugu

SEQ ID NO: 864629 - RNA, 19 nt, Homo sapiens
  misc_RNA (1)...(19): siRNA sense strand
ucuagaaguugugauggaa

SEQ ID NO: 864630 - RNA, 19 nt, Homo sapiens
  misc_RNA (1)...(19): siRNA sense strand
augaagaaaugcauaagca

SEQ ID NO: 864631 - RNA, 19 nt, Homo sapiens
  misc_RNA (1)...(19): siRNA sense strand
gaauccaucaggagcuuau

SEQ ID NO: 864632 - RNA, 19 nt, Homo sapiens
  misc_RNA (1)...(19): siRNA sense strand
caucauacaugcggaacag

SEQ ID NO: 864633 - RNA, 19 nt, Homo sapiens
  misc_RNA (1)...(19): siRNA sense strand
aaagacagagaaauaagga

SEQ ID NO: 864634 - RNA, 19 nt, Homo sapiens
  misc_RNA (1)...(19): siRNA sense strand
uagaaguugugauggaaca

SEQ ID NO: 864635 - RNA, 19 nt, Homo sapiens
  misc_RNA (1)...(19): siRNA sense strand
agggaaaucuagaaguugu

SEQ ID NO: 864636 - RNA, 19 nt, Homo sapiens
  misc_RNA (1)...(19): siRNA sense strand
gagcagcaccaggacaaga

SEQ ID NO: 864637 - RNA, 19 nt, Homo sapiens
  misc_RNA (1)...(19): siRNA sense strand
ccgggcagauugcucuuau

SEQ ID NO: 864638 - RNA, 19 nt, Homo sapiens
  misc_RNA (1)...(19): siRNA sense strand
caaaagacagguaaagaga

SEQ ID NO: 864639 - RNA, 19 nt, Homo sapiens
  misc_RNA (1)...(19): siRNA sense strand
gugacaaagugcccaugug

SEQ ID NO: 864640 - RNA, 19 nt, Homo sapiens
  misc_RNA (1)...(19): siRNA sense strand
cuuaggagauaaugaagag

SEQ ID NO: 864641 - RNA, 19 nt, Homo sapiens
  misc_RNA (1)...(19): siRNA sense strand
cauguacuuuguaggaugu

SEQ ID NO: 864642 - RNA, 19 nt, Homo sapiens
  misc_RNA (1)...(19): siRNA sense strand
gugcggagcuccuguuuga

SEQ ID NO: 864643 - RNA, 19 nt, Homo sapiens
  misc_RNA (1)...(19): siRNA sense strand
ggaauucuggugcugauua

SEQ ID NO: 864644 - RNA, 19 nt, Homo sapiens
  misc_RNA (1)...(19): siRNA sense strand
gaauucuggugcugauuaa

SEQ ID NO: 864645 - RNA, 19 nt, Homo sapiens
  misc_RNA (1)...(19): siRNA sense strand
uaagaaacaucgagucacu

SEQ ID NO: 864646 - RNA, 19 nt, Homo sapiens
  misc_RNA (1)...(19): siRNA sense strand
ggaaccugcucaucuggau

SEQ ID NO: 864647 - RNA, 19 nt, Homo sapiens
  misc_RNA (1)...(19): siRNA sense strand
gaucaagaagaauuugcua

SEQ ID NO: 864648 - RNA, 19 nt, Homo sapiens
  misc_RNA (1)...(19): siRNA sense strand
agaaacaucgagucacuuu

SEQ ID NO: 864649 - RNA, 19 nt, Homo sapiens
  misc_RNA (1)...(19): siRNA sense strand
ucaucuggaucaagaagaa

SEQ ID NO: 864650 - RNA, 19 nt, Homo sapiens
  misc_RNA (1)...(19): siRNA sense strand
guuugacgguauuaagaaa

SEQ ID NO: 864651 - RNA, 19 nt, Homo sapiens
  misc_RNA (1)...(19): siRNA sense strand
cugcucaucuggaucaaga

SEQ ID NO: 864652 - RNA, 19 nt, Homo sapiens
  misc_RNA (1)...(19): siRNA sense strand
uaaaagagcggccagaguu

SEQ ID NO: 864653 - RNA, 19 nt, Homo sapiens
  misc_RNA (1)...(19): siRNA sense strand
ggccagaguuguucaucca

SEQ ID NO: 864654 - RNA, 19 nt, Homo sapiens
  misc_RNA (1)...(19): siRNA sense strand
ggaggaacccugggacauc

SEQ ID NO: 864655 - RNA, 19 nt, Homo sapiens
  misc_RNA (1)...(19): siRNA sense strand
gcuccuguuugacgguauu

SEQ ID NO: 864656 - RNA, 19 nt, Homo sapiens
  misc_RNA (1)...(19): siRNA sense strand
gaaacaucgagucacuuug

SEQ ID NO: 864657 - RNA, 19 nt, Homo sapiens
  misc_RNA (1)...(19): siRNA sense strand
ugggugagcuggacuacca

SEQ ID NO: 864658 - RNA, 19 nt, Homo sapiens
  misc_RNA (1)...(19): siRNA sense strand
caggaauucuggugcugau

SEQ ID NO: 864659 - RNA, 19 nt, Homo sapiens
  misc_RNA (1)...(19): siRNA sense strand
aaacaucgagucacuuugc

SEQ ID NO: 864660 - RNA, 19 nt, Homo sapiens
  misc_RNA (1)...(19): siRNA sense strand
ggaggaagaucaggaugaa

SEQ ID NO: 864661 - RNA, 19 nt, Homo sapiens
  misc_RNA (1)...(19): siRNA sense strand
gcaauggcaucuacaucaa

SEQ ID NO: 864662 - RNA, 19 nt, Homo sapiens
  misc_RNA (1)...(19): siRNA sense strand
gcagaugacccagaaauau

SEQ ID NO: 864663 - RNA, 19 nt, Homo sapiens
  misc_RNA (1)...(19): siRNA sense strand
ccucagacgugguaacugu

SEQ ID NO: 864664 - RNA, 19 nt, Homo sapiens
  misc_RNA (1)...(19): siRNA sense strand
gcacauuggcagagaagga

SEQ ID NO: 864665 - RNA, 19 nt, Homo sapiens
  misc_RNA (1)...(19): siRNA sense strand
aaacaggccaugaaccauu

SEQ ID NO: 864666 - RNA, 19 nt, Homo sapiens
  misc_RNA (1)...(19): siRNA sense strand
ugagggagauagaaacaca

SEQ ID NO: 864667 - RNA, 19 nt, Homo sapiens
  misc_RNA (1)...(19): siRNA sense strand
cuacugcuggcaucauuua

SEQ ID NO: 864668 - RNA, 19 nt, Homo sapiens
  misc_RNA (1)...(19): siRNA sense strand
ccaaauacgggcuucaugu

SEQ ID NO: 864669 - RNA, 19 nt, Homo sapiens
  misc_RNA (1)...(19): siRNA sense strand
gugccuagccgcagcauga

SEQ ID NO: 864670 - RNA, 19 nt, Homo sapiens
  misc_RNA (1)...(19): siRNA sense strand
ggcaauggcaucuacauca

SEQ ID NO: 864671 - RNA, 19 nt, Homo sapiens
  misc_RNA (1)...(19): siRNA sense strand
cagaugacccagaaauaug

SEQ ID NO: 864672 - RNA, 19 nt, Homo sapiens
  misc_RNA (1)...(19): siRNA sense strand
gauagaaacacagacugaa

SEQ ID NO: 864673 - RNA, 19 nt, Homo sapiens
  misc_RNA (1)...(19): siRNA sense strand
gcugcucugugaugaguga

SEQ ID NO: 864674 - RNA, 19 nt, Homo sapiens
  misc_RNA (1)...(19): siRNA sense strand
caaauacgggcuucaugug

SEQ ID NO: 864675 - RNA, 19 nt, Homo sapiens
  misc_RNA (1)...(19): siRNA sense strand
aacaggccaugaaccauuu

SEQ ID NO: 864676 - RNA, 19 nt, Homo sapiens
  misc_RNA (1)...(19): siRNA sense strand
ucaggucacuguggauguu

SEQ ID NO: 864677 - RNA, 19 nt, Homo sapiens
  misc_RNA (1)...(19): siRNA sense strand
gcucugugaugagugaaga

SEQ ID NO: 864678 - RNA, 19 nt, Homo sapiens
  misc_RNA (1)...(19): siRNA sense strand
gaucgccgcacucuuguuc

SEQ ID NO: 864679 - RNA, 19 nt, Homo sapiens
  misc_RNA (1)...(19): siRNA sense strand
ccucagaguuccacuuggu

SEQ ID NO: 864680 - RNA, 19 nt, Homo sapiens
  misc_RNA (1)...(19): siRNA sense strand
gcaucaaacaggccaugaa

SEQ ID NO: 864681 - RNA, 19 nt, Homo sapiens
  misc_RNA (1)...(19): siRNA sense strand
ggagauagaaacacagacu

SEQ ID NO: 864682 - RNA, 19 nt, Homo sapiens
  misc_RNA (1)...(19): siRNA sense strand
ggcagccacugacuugugu

SEQ ID NO: 864683 - RNA, 19 nt, Homo sapiens
  misc_RNA (1)...(19): siRNA sense strand
cugauagucucaaggacaa

SEQ ID NO: 864684 - RNA, 19 nt, Homo sapiens
  misc_RNA (1)...(19): siRNA sense strand
gcaucuacgucugccaugu

SEQ ID NO: 864685 - RNA, 19 nt, Homo sapiens
  misc_RNA (1)...(19): siRNA sense strand
gcucaugucccgauaccau

SEQ ID NO: 864686 - RNA, 19 nt, Homo sapiens
  misc_RNA (1)...(19): siRNA sense strand
ugugaucgccgcacucuug

SEQ ID NO: 864687 - RNA, 19 nt, Homo sapiens
  misc_RNA (1)...(19): siRNA sense strand
aaauacgggcuucauguga

SEQ ID NO: 864688 - RNA, 19 nt, Homo sapiens
  misc_RNA (1)...(19): siRNA sense strand
aauggcaucuacaucaaug

SEQ ID NO: 864689 - RNA, 19 nt, Homo sapiens
  misc_RNA (1)...(19): siRNA sense strand
ucaaacaggccaugaacca

SEQ ID NO: 864690 - RNA, 19 nt, Homo sapiens
  misc_RNA (1)...(19): siRNA sense strand
cagcagaugacccagaaau

SEQ ID NO: 864691 - RNA, 19 nt, Homo sapiens
  misc_RNA (1)...(19): siRNA sense strand
cccagcagaugacccagaa

SEQ ID NO: 864692 - RNA, 19 nt, Homo sapiens
  misc_RNA (1)...(19): siRNA sense strand
gaguucuccucaagggauu

SEQ ID NO: 864693 - RNA, 19 nt, Homo sapiens
  misc_RNA (1)...(19): siRNA sense strand
ggaggaggaagaucaggau

SEQ ID NO: 864694 - RNA, 19 nt, Homo sapiens
  misc_RNA (1)...(19): siRNA sense strand
cuacugcacuccaaauacg

SEQ ID NO: 864695 - RNA, 19 nt, Homo sapiens
  misc_RNA (1)...(19): siRNA sense strand
gggauucucaggucacugu

SEQ ID NO: 864696 - RNA, 19 nt, Homo sapiens
  misc_RNA (1)...(19): siRNA sense strand
agaugacccagaaauauga

SEQ ID NO: 864697 - RNA, 19 nt, Homo sapiens
  misc_RNA (1)...(19): siRNA sense strand
agauagaaacacagacuga

SEQ ID NO: 864698 - RNA, 19 nt, Homo sapiens
  misc_RNA (1)...(19): siRNA sense strand
gggcagccacugacuugug

SEQ ID NO: 864699 - RNA, 19 nt, Homo sapiens
  misc_RNA (1)...(19): siRNA sense strand
uagcugcucugugaugagu

SEQ ID NO: 864700 - RNA, 19 nt, Homo sapiens
  misc_RNA (1)...(19): siRNA sense strand
ggaggcugcauucccauca

SEQ ID NO: 864701 - RNA, 19 nt, Homo sapiens
  misc_RNA (1)...(19): siRNA sense strand
cgucugccaugucagcaau

SEQ ID NO: 864702 - RNA, 19 nt, Homo sapiens
  misc_RNA (1)...(19): siRNA sense strand
guccagccguuccuucaag

SEQ ID NO: 864703 - RNA, 19 nt, Homo sapiens
  misc_RNA (1)...(19): siRNA sense strand
ggugagggagauagaaaca

SEQ ID NO: 864704 - RNA, 19 nt, Homo sapiens
  misc_RNA (1)...(19): siRNA sense strand
caccucagaguuccacuug

SEQ ID NO: 864705 - RNA, 19 nt, Homo sapiens
  misc_RNA (1)...(19): siRNA sense strand
ccgaggaggaggaagauca

SEQ ID NO: 864706 - RNA, 19 nt, Homo sapiens
  misc_RNA (1)...(19): siRNA sense strand
ucacuguggauguucuuga

SEQ ID NO: 864707 - RNA, 19 nt, Homo sapiens
  misc_RNA (1)...(19): siRNA sense strand
gcaaggcccagcagaugac

SEQ ID NO: 864708 - RNA, 19 nt, Homo sapiens
  misc_RNA (1)...(19): siRNA sense strand
gcuacugcuggcaucauuu

SEQ ID NO: 864709 - RNA, 19 nt, Homo sapiens
  misc_RNA (1)...(19): siRNA sense strand
caauggcaucuacaucaau

SEQ ID NO: 864710 - RNA, 19 nt, Homo sapiens
  misc_RNA (1)...(19): siRNA sense strand
caucaaacaggccaugaac

SEQ ID NO: 864711 - RNA, 19 nt, Homo sapiens
  misc_RNA (1)...(19): siRNA sense strand
ccacggugagggagauaga

SEQ ID NO: 864712 - RNA, 19 nt, Homo sapiens
  misc_RNA (1)...(19): siRNA sense strand
gcuacugcacuccaaauac

SEQ ID NO: 864713 - RNA, 19 nt, Homo sapiens
  misc_RNA (1)...(19): siRNA sense strand
uggcagagaaggagcuaug

SEQ ID NO: 864714 - RNA, 19 nt, Homo sapiens
  misc_RNA (1)...(19): siRNA sense strand
gaagauaccuggaaagcuu

SEQ ID NO: 864715 - RNA, 19 nt, Homo sapiens
  misc_RNA (1)...(19): siRNA sense strand
gugcugaucuuucugauua

SEQ ID NO: 864716 - RNA, 19 nt, Homo sapiens
  misc_RNA (1)...(19): siRNA sense strand
gggaagaacuggaaacuca

SEQ ID NO: 864717 - RNA, 19 nt, Homo sapiens
  misc_RNA (1)...(19): siRNA sense strand
gaaagaaacugcccuucca

SEQ ID NO: 864718 - RNA, 19 nt, Homo sapiens
  misc_RNA (1)...(19): siRNA sense strand
ugaaagaucugcuacugaa

SEQ ID NO: 864719 - RNA, 19 nt, Homo sapiens
  misc_RNA (1)...(19): siRNA sense strand
caacagcgaugaagaacga

SEQ ID NO: 864720 - RNA, 19 nt, Homo sapiens
  misc_RNA (1)...(19): siRNA sense strand
gaagaacgauacagauaca

SEQ ID NO: 864721 - RNA, 19 nt, Homo sapiens
  misc_RNA (1)...(19): siRNA sense strand
gcaagcagugggacuauua

SEQ ID NO: 864722 - RNA, 19 nt, Homo sapiens
  misc_RNA (1)...(19): siRNA sense strand
gaagaacgacauagagaaa

SEQ ID NO: 864723 - RNA, 19 nt, Homo sapiens
  misc_RNA (1)...(19): siRNA sense strand
ggaaguggcaggaucgaua

SEQ ID NO: 864724 - RNA, 19 nt, Homo sapiens
  misc_RNA (1)...(19): siRNA sense strand
gauccaagauggcagauuc

SEQ ID NO: 864725 - RNA, 19 nt, Homo sapiens
  misc_RNA (1)...(19): siRNA sense strand
gcacgugcauuuccauaug

SEQ ID NO: 864726 - RNA, 19 nt, Homo sapiens
  misc_RNA (1)...(19): siRNA sense strand
ugacagcgaugaugaugaa

SEQ ID NO: 864727 - RNA, 19 nt, Homo sapiens
  misc_RNA (1)...(19): siRNA sense strand
gcaaaggaccuagaugaaa

SEQ ID NO: 864728 - RNA, 19 nt, Homo sapiens
  misc_RNA (1)...(19): siRNA sense strand
gaaacugcccuuccaucua

SEQ ID NO: 864729 - RNA, 19 nt, Homo sapiens
  misc_RNA (1)...(19): siRNA sense strand
ggacauuccucugguuaug

SEQ ID NO: 864730 - RNA, 19 nt, Homo sapiens
  misc_RNA (1)...(19): siRNA sense strand
ggacuauuaugccagaaga

SEQ ID NO: 864731 - RNA, 19 nt, Homo sapiens
  misc_RNA (1)...(19): siRNA sense strand
gauaaaccauggcguaaac

SEQ ID NO: 864732 - RNA, 19 nt, Homo sapiens
  misc_RNA (1)...(19): siRNA sense strand
uaaugaagauaccuggaaa

SEQ ID NO: 864733 - RNA, 19 nt, Homo sapiens
  misc_RNA (1)...(19): siRNA sense strand
cagggaauaugcagaaaga

SEQ ID NO: 864734 - RNA, 19 nt, Homo sapiens
  misc_RNA (1)...(19): siRNA sense strand
caaaggaccuagaugaaaa

SEQ ID NO: 864735 - RNA, 19 nt, Homo sapiens
  misc_RNA (1)...(19): siRNA sense strand
ugacugagaccgaagauga

SEQ ID NO: 864736 - RNA, 19 nt, Homo sapiens
  misc_RNA (1)...(19): siRNA sense strand
gaccgaagaugauagugau

SEQ ID NO: 864737 - RNA, 19 nt, Homo sapiens
  misc_RNA (1)...(19): siRNA sense strand
ggaccuagaugaaaaugaa

SEQ ID NO: 864738 - RNA, 19 nt, Homo sapiens
  misc_RNA (1)...(19): siRNA sense strand
gaacuggaaacucagagaa

SEQ ID NO: 864739 - RNA, 19 nt, Homo sapiens
  misc_RNA (1)...(19): siRNA sense strand
cuggaaagcuuacugugaa

SEQ ID NO: 864740 - RNA, 19 nt, Homo sapiens
  misc_RNA (1)...(19): siRNA sense strand
gauguuaucggucagacua

SEQ ID NO: 864741 - RNA, 19 nt, Homo sapiens
  misc_RNA (1)...(19): siRNA sense strand
acauacagguccuuucuga

SEQ ID NO: 864742 - RNA, 19 nt, Homo sapiens
  misc_RNA (1)...(19): siRNA sense strand
gaggaaaccagacauaagu

SEQ ID NO: 864743 - RNA, 19 nt, Homo sapiens
  misc_RNA (1)...(19): siRNA sense strand
aaacugcccuuccaucuac

SEQ ID NO: 864744 - RNA, 19 nt, Homo sapiens
  misc_RNA (1)...(19): siRNA sense strand
ccaugaaagugaagaagga

SEQ ID NO: 864745 - RNA, 19 nt, Homo sapiens
  misc_RNA (1)...(19): siRNA sense strand
gaaacagcacuucuucuca

SEQ ID NO: 864746 - RNA, 19 nt, Homo sapiens
  misc_RNA (1)...(19): siRNA sense strand
gaaagugaagaaggagaua

SEQ ID NO: 864747 - RNA, 19 nt, Homo sapiens
  misc_RNA (1)...(19): siRNA sense strand
gaagaugaaacugcugaaa

SEQ ID NO: 864748 - RNA, 19 nt, Homo sapiens
  misc_RNA (1)...(19): siRNA sense strand
ugaaaggccagaagaagaa

SEQ ID NO: 864749 - RNA, 19 nt, Homo sapiens
  misc_RNA (1)...(19): siRNA sense strand
ucacagagcaagucgagaa

SEQ ID NO: 864750 - RNA, 19 nt, Homo sapiens
  misc_RNA (1)...(19): siRNA sense strand
cgaagacuguacuauggaa

SEQ ID NO: 864751 - RNA, 19 nt, Homo sapiens
  misc_RNA (1)...(19): siRNA sense strand
uuacuucuccuccuucuuu

SEQ ID NO: 864752 - RNA, 19 nt, Homo sapiens
  misc_RNA (1)...(19): siRNA sense strand
gcaccuggaagcauuaaug

SEQ ID NO: 864753 - RNA, 19 nt, Homo sapiens
  misc_RNA (1)...(19): siRNA sense strand
gccgaagacuguacuaugg

SEQ ID NO: 864754 - RNA, 19 nt, Homo sapiens
  misc_RNA (1)...(19): siRNA sense strand
cagcaccuguaaaucuuaa

SEQ ID NO: 864755 - RNA, 19 nt, Homo sapiens
  misc_RNA (1)...(19): siRNA sense strand
gaaguggcaggaucgauau

SEQ ID NO: 864756 - RNA, 19 nt, Homo sapiens
  misc_RNA (1)...(19): siRNA sense strand
gcgaugaugaugaagauga

SEQ ID NO: 864757 - RNA, 19 nt, Homo sapiens
  misc_RNA (1)...(19): siRNA sense strand
gaagaaggagauagucaca

SEQ ID NO: 864758 - RNA, 19 nt, Homo sapiens
  misc_RNA (1)...(19): siRNA sense strand
aaagaggaaaccagacaua

SEQ ID NO: 864759 - RNA, 19 nt, Homo sapiens
  misc_RNA (1)...(19): siRNA sense strand
agaacgacauagagaaaga

SEQ ID NO: 864760 - RNA, 19 nt, Homo sapiens
  misc_RNA (1)...(19): siRNA sense strand
aaagagaacgcaccagaga

SEQ ID NO: 864761 - RNA, 19 nt, Homo sapiens
  misc_RNA (1)...(19): siRNA sense strand
agagaaagaccgagauaga

SEQ ID NO: 864762 - RNA, 19 nt, Homo sapiens
  misc_RNA (1)...(19): siRNA sense strand
gaagaacuggaaacucaga

SEQ ID NO: 864763 - RNA, 19 nt, Homo sapiens
  misc_RNA (1)...(19): siRNA sense strand
ggucagacuauaacuauca

SEQ ID NO: 864764 - RNA, 19 nt, Homo sapiens
  misc_RNA (1)...(19): siRNA sense strand
aagcuacaccugcagaaua

SEQ ID NO: 864765 - RNA, 19 nt, Homo sapiens
  misc_RNA (1)...(19): siRNA sense strand
caacauacagguccuuucu

SEQ ID NO: 864766 - RNA, 19 nt, Homo sapiens
  misc_RNA (1)...(19): siRNA sense strand
gcguaaaccuggugcugau

SEQ ID NO: 864767 - RNA, 19 nt, Homo sapiens
  misc_RNA (1)...(19): siRNA sense strand
gaucacaguccuacaccaa

SEQ ID NO: 864768 - RNA, 19 nt, Homo sapiens
  misc_RNA (1)...(19): siRNA sense strand
gagauuaccuggggcaauu

SEQ ID NO: 864769 - RNA, 19 nt, Homo sapiens
  misc_RNA (1)...(19): siRNA sense strand
caaguacugccuccagaaa

SEQ ID NO: 864770 - RNA, 19 nt, Homo sapiens
  misc_RNA (1)...(19): siRNA sense strand
gcugaucuuucugauuauu

SEQ ID NO: 864771 - RNA, 19 nt, Homo sapiens
  misc_RNA (1)...(19): siRNA sense strand
agaccgagauagagagaga

SEQ ID NO: 864772 - RNA, 19 nt, Homo sapiens
  misc_RNA (1)...(19): siRNA sense strand
cagcgaugaugaugaagau

SEQ ID NO: 864773 - RNA, 19 nt, Homo sapiens
  misc_RNA (1)...(19): siRNA sense strand
ggagagcaccgaagcuaca

SEQ ID NO: 864774 - RNA, 19 nt, Homo sapiens
  misc_RNA (1)...(19): siRNA sense strand
ccaccuccaucucuuauac

SEQ ID NO: 864775 - RNA, 19 nt, Homo sapiens
  misc_RNA (1)...(19): siRNA sense strand
gcaggcgacgggcaaauga

SEQ ID NO: 864776 - RNA, 19 nt, Homo sapiens
  misc_RNA (1)...(19): siRNA sense strand
gcacuucuucucagucuca

SEQ ID NO: 864777 - RNA, 19 nt, Homo sapiens
  misc_RNA (1)...(19): siRNA sense strand
ggcaaaggaccuagaugaa

SEQ ID NO: 864778 - RNA, 19 nt, Homo sapiens
  misc_RNA (1)...(19): siRNA sense strand
gaguuuacuucuccuccuu

SEQ ID NO: 864779 - RNA, 19 nt, Homo sapiens
  misc_RNA (1)...(19): siRNA sense strand
agaaagaccgagauagaga

SEQ ID NO: 864780 - RNA, 19 nt, Homo sapiens
  misc_RNA (1)...(19): siRNA sense strand
gaaaagaagcgggcaguga

SEQ ID NO: 864781 - RNA, 19 nt, Homo sapiens
  misc_RNA (1)...(19): siRNA sense strand
uaguagacgucgccaugaa

SEQ ID NO: 864782 - RNA, 19 nt, Homo sapiens
  misc_RNA (1)...(19): siRNA sense strand
cgaagaugauagugauagu

SEQ ID NO: 864783 - RNA, 19 nt, Homo sapiens
  misc_RNA (1)...(19): siRNA sense strand
uggcaaaggaccuagauga

SEQ ID NO: 864784 - RNA, 19 nt, Homo sapiens
  misc_RNA (1)...(19): siRNA sense strand
gaauaugcagaaagagguu

SEQ ID NO: 864785 - RNA, 19 nt, Homo sapiens
  misc_RNA (1)...(19): siRNA sense strand
cgauacagauacagggaau

SEQ ID NO: 864786 - RNA, 19 nt, Homo sapiens
  misc_RNA (1)...(19): siRNA sense strand
gaugaagaacgauacagau

SEQ ID NO: 864787 - RNA, 19 nt, Homo sapiens
  misc_RNA (1)...(19): siRNA sense strand
gaaaggccagaagaagaaa

SEQ ID NO: 864788 - RNA, 19 nt, Homo sapiens
  misc_RNA (1)...(19): siRNA sense strand
ggauacgaaugggacuuga

SEQ ID NO: 864789 - RNA, 19 nt, Homo sapiens
  misc_RNA (1)...(19): siRNA sense strand
agguagauuuggauucuuu

SEQ ID NO: 864790 - RNA, 19 nt, Homo sapiens
  misc_RNA (1)...(19): siRNA sense strand
ugauguucaugucacuaua

SEQ ID NO: 864791 - RNA, 19 nt, Homo sapiens
  misc_RNA (1)...(19): siRNA sense strand
gggcaaaugagaacagcaa

SEQ ID NO: 864792 - RNA, 19 nt, Homo sapiens
  misc_RNA (1)...(19): siRNA sense strand
caggagacacaaacacaaa

SEQ ID NO: 864793 - RNA, 19 nt, Homo sapiens
  misc_RNA (1)...(19): siRNA sense strand
gagggagcgugaucacagu

SEQ ID NO: 864794 - RNA, 19 nt, Homo sapiens
  misc_RNA (1)...(19): siRNA sense strand
gagaaagaccgagauagag

SEQ ID NO: 864795 - RNA, 19 nt, Homo sapiens
  misc_RNA (1)...(19): siRNA sense strand
gcaaaugagaacagcaaca

SEQ ID NO: 864796 - RNA, 19 nt, Homo sapiens
  misc_RNA (1)...(19): siRNA sense strand
gauagucacaggagacaca

SEQ ID NO: 864797 - RNA, 19 nt, Homo sapiens
  misc_RNA (1)...(19): siRNA sense strand
gaaagaggaaaccagacau

SEQ ID NO: 864798 - RNA, 19 nt, Homo sapiens
  misc_RNA (1)...(19): siRNA sense strand
ucacaguccuacaccaagu

SEQ ID NO: 864799 - RNA, 19 nt, Homo sapiens
  misc_RNA (1)...(19): siRNA sense strand
agagagaaagaccgagaua

SEQ ID NO: 864800 - RNA, 19 nt, Homo sapiens
  misc_RNA (1)...(19): siRNA sense strand
gcuccaccuccaucucuua

SEQ ID NO: 864801 - RNA, 19 nt, Homo sapiens
  misc_RNA (1)...(19): siRNA sense strand
caaaugagaacagcaacau

SEQ ID NO: 864802 - RNA, 19 nt, Homo sapiens
  misc_RNA (1)...(19): siRNA sense strand
gaagaugauagugauagug

SEQ ID NO: 864803 - RNA, 19 nt, Homo sapiens
  misc_RNA (1)...(19): siRNA sense strand
gaagcuacaccugcagaau

SEQ ID NO: 864804 - RNA, 19 nt, Homo sapiens
  misc_RNA (1)...(19): siRNA sense strand
agagagagacagagacaga

SEQ ID NO: 864805 - RNA, 19 nt, Homo sapiens
  misc_RNA (1)...(19): siRNA sense strand
ucucuuauaccaacaauag

SEQ ID NO: 864806 - RNA, 19 nt, Homo sapiens
  misc_RNA (1)...(19): siRNA sense strand
gcaccacaguaugggaguu

SEQ ID NO: 864807 - RNA, 19 nt, Homo sapiens
  misc_RNA (1)...(19): siRNA sense strand
ggccgaagacuguacuaug

SEQ ID NO: 864808 - RNA, 19 nt, Homo sapiens
  misc_RNA (1)...(19): siRNA sense strand
aagaugauagugauaguga

SEQ ID NO: 864809 - RNA, 19 nt, Homo sapiens
  misc_RNA (1)...(19): siRNA sense strand
cgaugaagaacgauacaga

SEQ ID NO: 864810 - RNA, 19 nt, Homo sapiens
  misc_RNA (1)...(19): siRNA sense strand
agagaacgcaccagagaga

SEQ ID NO: 864811 - RNA, 19 nt, Homo sapiens
  misc_RNA (1)...(19): siRNA sense strand
gaaguugaaaggccagaag

SEQ ID NO: 864812 - RNA, 19 nt, Homo sapiens
  misc_RNA (1)...(19): siRNA sense strand
ggaaacucagagaaagaaa

SEQ ID NO: 864813 - RNA, 19 nt, Homo sapiens
  misc_RNA (1)...(19): siRNA sense strand
cagcagggaagaacuggaa

SEQ ID NO: 864814 - RNA, 19 nt, Homo sapiens
  misc_RNA (1)...(19): siRNA sense strand
ggaaauaucuacuaugcaa

SEQ ID NO: 864815 - RNA, 19 nt, Homo sapiens
  misc_RNA (1)...(19): siRNA sense strand
gcaacaggcuccuacaguu

SEQ ID NO: 864816 - RNA, 19 nt, Homo sapiens
  misc_RNA (1)...(19): siRNA sense strand
auucaaagguugccuauaa

SEQ ID NO: 864817 - RNA, 19 nt, Homo sapiens
  misc_RNA (1)...(19): siRNA sense strand
ucagagaccugcaagaaau

SEQ ID NO: 864818 - RNA, 19 nt, Homo sapiens
  misc_RNA (1)...(19): siRNA sense strand
caagaaauaugcaggaaac

SEQ ID NO: 864819 - RNA, 19 nt, Homo sapiens
  misc_RNA (1)...(19): siRNA sense strand
ucacagacaucgacaucuu

SEQ ID NO: 864820 - RNA, 19 nt, Homo sapiens
  misc_RNA (1)...(19): siRNA sense strand
ggaccaggcucuccucucu

SEQ ID NO: 864821 - RNA, 19 nt, Homo sapiens
  misc_RNA (1)...(19): siRNA sense strand
caacaggcuccuacaguuu

SEQ ID NO: 864822 - RNA, 19 nt, Homo sapiens
  misc_RNA (1)...(19): siRNA sense strand
gugcauggaucugaaaguu

SEQ ID NO: 864823 - RNA, 19 nt, Homo sapiens
  misc_RNA (1)...(19): siRNA sense strand
caggaaauaucuacuaugc

SEQ ID NO: 864824 - RNA, 19 nt, Homo sapiens
  misc_RNA (1)...(19): siRNA sense strand
gcaagaaauaugcaggaaa

SEQ ID NO: 864825 - RNA, 19 nt, Homo sapiens
  misc_RNA (1)...(19): siRNA sense strand
ggucaggaacuaagauuau

SEQ ID NO: 864826 - RNA, 19 nt, Homo sapiens
  misc_RNA (1)...(19): siRNA sense strand
ucacaggaaauaucuacua

SEQ ID NO: 864827 - RNA, 19 nt, Homo sapiens
  misc_RNA (1)...(19): siRNA sense strand
cacaggaaauaucuacuau

SEQ ID NO: 864828 - RNA, 19 nt, Homo sapiens
  misc_RNA (1)...(19): siRNA sense strand
gucaggaacuaagauuauu

SEQ ID NO: 864829 - RNA, 19 nt, Homo sapiens
  misc_RNA (1)...(19): siRNA sense strand
ucauggacguguucacaga

SEQ ID NO: 864830 - RNA, 19 nt, Homo sapiens
  misc_RNA (1)...(19): siRNA sense strand
gaacaggaaaaguuaauga

SEQ ID NO: 864831 - RNA, 19 nt, Homo sapiens
  misc_RNA (1)...(19): siRNA sense strand
gaaaaguucacguugauug

SEQ ID NO: 864832 - RNA, 19 nt, Homo sapiens
  misc_RNA (1)...(19): siRNA sense strand
gggaguugcuguguauauc

SEQ ID NO: 864833 - RNA, 19 nt, Homo sapiens
  misc_RNA (1)...(19): siRNA sense strand
gcaaggucaggaacuaaga

SEQ ID NO: 864834 - RNA, 19 nt, Homo sapiens
  misc_RNA (1)...(19): siRNA sense strand
uaugcaaggucaggaacua

SEQ ID NO: 864835 - RNA, 19 nt, Homo sapiens
  misc_RNA (1)...(19): siRNA sense strand
gauaugugcauggaucuga

SEQ ID NO: 864836 - RNA, 19 nt, Homo sapiens
  misc_RNA (1)...(19): siRNA sense strand
cagagaccugcaagaaaua

SEQ ID NO: 864837 - RNA, 19 nt, Homo sapiens
  misc_RNA (1)...(19): siRNA sense strand
agacaucgacaucuucaga

SEQ ID NO: 864838 - RNA, 19 nt, Homo sapiens
  misc_RNA (1)...(19): siRNA sense strand
uaaugacaguucggacuau

SEQ ID NO: 864839 - RNA, 19 nt, Homo sapiens
  misc_RNA (1)...(19): siRNA sense strand
uucaaagguugccuauaaa

SEQ ID NO: 864840 - RNA, 19 nt, Homo sapiens
  misc_RNA (1)...(19): siRNA sense strand
cggacuaucacaggaaaua

SEQ ID NO: 864841 - RNA, 19 nt, Homo sapiens
  misc_RNA (1)...(19): siRNA sense strand
uuaaugacaguucggacua

SEQ ID NO: 864842 - RNA, 19 nt, Homo sapiens
  misc_RNA (1)...(19): siRNA sense strand
uaagauuauugggaagguu

SEQ ID NO: 864843 - RNA, 19 nt, Homo sapiens
  misc_RNA (1)...(19): siRNA sense strand
ggacuaucacaggaaauau

SEQ ID NO: 864844 - RNA, 19 nt, Homo sapiens
  misc_RNA (1)...(19): siRNA sense strand
acaucgacaucuucagaga

SEQ ID NO: 864845 - RNA, 19 nt, Homo sapiens
  misc_RNA (1)...(19): siRNA sense strand
cuucagagaccugcaagaa

SEQ ID NO: 864846 - RNA, 19 nt, Homo sapiens
  misc_RNA (1)...(19): siRNA sense strand
gcucuucgggcaccuacuu

SEQ ID NO: 864847 - RNA, 19 nt, Homo sapiens
  misc_RNA (1)...(19): siRNA sense strand
ggucauggacguguucaca

SEQ ID NO: 864848 - RNA, 19 nt, Homo sapiens
  misc_RNA (1)...(19): siRNA sense strand
ucaggaacuaagauuauug

SEQ ID NO: 864849 - RNA, 19 nt, Homo sapiens
  misc_RNA (1)...(19): siRNA sense strand
gaaaaguuaaugacaguuc

SEQ ID NO: 864850 - RNA, 19 nt, Homo sapiens
  misc_RNA (1)...(19): siRNA sense strand
ugauugcaguggucaugga

SEQ ID NO: 864851 - RNA, 19 nt, Homo sapiens
  misc_RNA (1)...(19): siRNA sense strand
ggcaacaggcuccuacagu

SEQ ID NO: 864852 - RNA, 19 nt, Homo sapiens
  misc_RNA (1)...(19): siRNA sense strand
ggacguguucacagacauc

SEQ ID NO: 864853 - RNA, 19 nt, Homo sapiens
  misc_RNA (1)...(19): siRNA sense strand
ucaaagguugccuauaaag

SEQ ID NO: 864854 - RNA, 19 nt, Homo sapiens
  misc_RNA (1)...(19): siRNA sense strand
guucacagacaucgacauc

SEQ ID NO: 864855 - RNA, 19 nt, Homo sapiens
  misc_RNA (1)...(19): siRNA sense strand
gacuaucacaggaaauauc

SEQ ID NO: 864856 - RNA, 19 nt, Homo sapiens
  misc_RNA (1)...(19): siRNA sense strand
ggaagguucacgaaaaguu

SEQ ID NO: 864857 - RNA, 19 nt, Homo sapiens
  misc_RNA (1)...(19): siRNA sense strand
aaguucacguugauugaug

SEQ ID NO: 864858 - RNA, 19 nt, Homo sapiens
  misc_RNA (1)...(19): siRNA sense strand
aggcucuccucucucaauu

SEQ ID NO: 864859 - RNA, 19 nt, Homo sapiens
  misc_RNA (1)...(19): siRNA sense strand
cacgaaaaguucacguuga

SEQ ID NO: 864860 - RNA, 19 nt, Homo sapiens
  misc_RNA (1)...(19): siRNA sense strand
gcuaugagcuccagcauuu

SEQ ID NO: 864861 - RNA, 19 nt, Homo sapiens
  misc_RNA (1)...(19): siRNA sense strand
ugaaaugucucacaagcua

SEQ ID NO: 864862 - RNA, 19 nt, Homo sapiens
  misc_RNA (1)...(19): siRNA sense strand
gaaaaugucucccgaagaa

SEQ ID NO: 864863 - RNA, 19 nt, Homo sapiens
  misc_RNA (1)...(19): siRNA sense strand
aagaggagauugagacuuu

SEQ ID NO: 864864 - RNA, 19 nt, Homo sapiens
  misc_RNA (1)...(19): siRNA sense strand
ggcaaucucucuaauaugu

SEQ ID NO: 864865 - RNA, 19 nt, Homo sapiens
  misc_RNA (1)...(19): siRNA sense strand
gcacacagauuaauuaccu

SEQ ID NO: 864866 - RNA, 19 nt, Homo sapiens
  misc_RNA (1)...(19): siRNA sense strand
auaacaaucugcucuguaa

SEQ ID NO: 864867 - RNA, 19 nt, Homo sapiens
  misc_RNA (1)...(19): siRNA sense strand
gaacaacacacuggugaaa

SEQ ID NO: 864868 - RNA, 19 nt, Homo sapiens
  misc_RNA (1)...(19): siRNA sense strand
ggacagacaaacauucuug

SEQ ID NO: 864869 - RNA, 19 nt, Homo sapiens
  misc_RNA (1)...(19): siRNA sense strand
ggucugggauuggcuauga

SEQ ID NO: 864870 - RNA, 19 nt, Homo sapiens
  misc_RNA (1)...(19): siRNA sense strand
gcuaguaagugccauucuu

SEQ ID NO: 864871 - RNA, 19 nt, Homo sapiens
  misc_RNA (1)...(19): siRNA sense strand
gcucucagcgugcuaguaa

SEQ ID NO: 864872 - RNA, 19 nt, Homo sapiens
  misc_RNA (1)...(19): siRNA sense strand
ggaggaaguuucauuuuga

SEQ ID NO: 864873 - RNA, 19 nt, Homo sapiens
  misc_RNA (1)...(19): siRNA sense strand
gaauggcaaucucucuaau

SEQ ID NO: 864874 - RNA, 19 nt, Homo sapiens
  misc_RNA (1)...(19): siRNA sense strand
cuaaauagggcccuggaua

SEQ ID NO: 864875 - RNA, 19 nt, Homo sapiens
  misc_RNA (1)...(19): siRNA sense strand
caaaggaagaggagauuga

SEQ ID NO: 864876 - RNA, 19 nt, Homo sapiens
  misc_RNA (1)...(19): siRNA sense strand
auucuaggaucuacaguua

SEQ ID NO: 864877 - RNA, 19 nt, Homo sapiens
  misc_RNA (1)...(19): siRNA sense strand
uaagugccauucuuucuuc

SEQ ID NO: 864878 - RNA, 19 nt, Homo sapiens
  misc_RNA (1)...(19): siRNA sense strand
gggcuggacugcugucaau

SEQ ID NO: 864879 - RNA, 19 nt, Homo sapiens
  misc_RNA (1)...(19): siRNA sense strand
gugccauucuuucuucaua

SEQ ID NO: 864880 - RNA, 19 nt, Homo sapiens
  misc_RNA (1)...(19): siRNA sense strand
ugagcacacagauuaauua

SEQ ID NO: 864881 - RNA, 19 nt, Homo sapiens
  misc_RNA (1)...(19): siRNA sense strand
uaaauagggcccuggauau

SEQ ID NO: 864882 - RNA, 19 nt, Homo sapiens
  misc_RNA (1)...(19): siRNA sense strand
augcauaucuuaaggaaug

SEQ ID NO: 864883 - RNA, 19 nt, Homo sapiens
  misc_RNA (1)...(19): siRNA sense strand
cauuguggccuugauauua

SEQ ID NO: 864884 - RNA, 19 nt, Homo sapiens
  misc_RNA (1)...(19): siRNA sense strand
uuuaaggaguggcaagaua

SEQ ID NO: 864885 - RNA, 19 nt, Homo sapiens
  misc_RNA (1)...(19): siRNA sense strand
caaacauucuuguguacau

SEQ ID NO: 864886 - RNA, 19 nt, Homo sapiens
  misc_RNA (1)...(19): siRNA sense strand
gagauugagacuuuaaaug

SEQ ID NO: 864887 - RNA, 19 nt, Homo sapiens
  misc_RNA (1)...(19): siRNA sense strand
auggaaaucugacagcuuu

SEQ ID NO: 864888 - RNA, 19 nt, Homo sapiens
  misc_RNA (1)...(19): siRNA sense strand
caagucugccugugucuuu

SEQ ID NO: 864889 - RNA, 19 nt, Homo sapiens
  misc_RNA (1)...(19): siRNA sense strand
caggaaaggcucuaugaga

SEQ ID NO: 864890 - RNA, 19 nt, Homo sapiens
  misc_RNA (1)...(19): siRNA sense strand
gacgucggcuuuagucuag

SEQ ID NO: 864891 - RNA, 19 nt, Homo sapiens
  misc_RNA (1)...(19): siRNA sense strand
aaauagggcccuggauaua

SEQ ID NO: 864892 - RNA, 19 nt, Homo sapiens
  misc_RNA (1)...(19): siRNA sense strand
ucuaggaucuacaguuaug

SEQ ID NO: 864893 - RNA, 19 nt, Homo sapiens
  misc_RNA (1)...(19): siRNA sense strand
aaaauuggguguuugcuaa

SEQ ID NO: 864894 - RNA, 19 nt, Homo sapiens
  misc_RNA (1)...(19): siRNA sense strand
uugaguggcuucuuuacaa

SEQ ID NO: 864895 - RNA, 19 nt, Homo sapiens
  misc_RNA (1)...(19): siRNA sense strand
ccaugcauaucuuaaggaa

SEQ ID NO: 864896 - RNA, 19 nt, Homo sapiens
  misc_RNA (1)...(19): siRNA sense strand
ccgaagaaauggaaaucug

SEQ ID NO: 864897 - RNA, 19 nt, Homo sapiens
  misc_RNA (1)...(19): siRNA sense strand
cuacaguuauggucauuca

SEQ ID NO: 864898 - RNA, 19 nt, Homo sapiens
  misc_RNA (1)...(19): siRNA sense strand
gaggagauugagacuuuaa

SEQ ID NO: 864899 - RNA, 19 nt, Homo sapiens
  misc_RNA (1)...(19): siRNA sense strand
cgaagaaauggaaaucuga

SEQ ID NO: 864900 - RNA, 19 nt, Homo sapiens
  misc_RNA (1)...(19): siRNA sense strand
gaucuacaguuauggucau

SEQ ID NO: 864901 - RNA, 19 nt, Homo sapiens
  misc_RNA (1)...(19): siRNA sense strand
auagggcccuggauauauu

SEQ ID NO: 864902 - RNA, 19 nt, Homo sapiens
  misc_RNA (1)...(19): siRNA sense strand
ggagauugagacuuuaaau

SEQ ID NO: 864903 - RNA, 19 nt, Homo sapiens
  misc_RNA (1)...(19): siRNA sense strand
guaagugccauucuuucuu

SEQ ID NO: 864904 - RNA, 19 nt, Homo sapiens
  misc_RNA (1)...(19): siRNA sense strand
ugaauggcaaucucucuaa

SEQ ID NO: 864905 - RNA, 19 nt, Homo sapiens
  misc_RNA (1)...(19): siRNA sense strand
gcaaucucucuaauaugua

SEQ ID NO: 864906 - RNA, 19 nt, Homo sapiens
  misc_RNA (1)...(19): siRNA sense strand
cuaguaagugccauucuuu

SEQ ID NO: 864907 - RNA, 19 nt, Homo sapiens
  misc_RNA (1)...(19): siRNA sense strand
cuggauauauucaacacuu

SEQ ID NO: 864908 - RNA, 19 nt, Homo sapiens
  misc_RNA (1)...(19): siRNA sense strand
auuguggccuugauauuaa

SEQ ID NO: 864909 - RNA, 19 nt, Homo sapiens
  misc_RNA (1)...(19): siRNA sense strand
ggucauuguggccuugaua

SEQ ID NO: 864910 - RNA, 19 nt, Homo sapiens
  misc_RNA (1)...(19): siRNA sense strand
ggucauucaugcuccaaag

SEQ ID NO: 864911 - RNA, 19 nt, Homo sapiens
  misc_RNA (1)...(19): siRNA sense strand
gaaaauuggguguuugcua

SEQ ID NO: 864912 - RNA, 19 nt, Homo sapiens
  misc_RNA (1)...(19): siRNA sense strand
gacgagaaagcaaugaaug

SEQ ID NO: 864913 - RNA, 19 nt, Homo sapiens
  misc_RNA (1)...(19): siRNA sense strand
agauaugccuguugacgau

SEQ ID NO: 864914 - RNA, 19 nt, Homo sapiens
  misc_RNA (1)...(19): siRNA sense strand
gccaggaaaggcucuauga

SEQ ID NO: 864915 - RNA, 19 nt, Homo sapiens
  misc_RNA (1)...(19): siRNA sense strand
cauaacaaucugcucugua

SEQ ID NO: 864916 - RNA, 19 nt, Homo sapiens
  misc_RNA (1)...(19): siRNA sense strand
gcaaugaauggcaaucucu

SEQ ID NO: 864917 - RNA, 19 nt, Homo sapiens
  misc_RNA (1)...(19): siRNA sense strand
agaggagauugagacuuua

SEQ ID NO: 864918 - RNA, 19 nt, Homo sapiens
  misc_RNA (1)...(19): siRNA sense strand
auggcaaucucucuaauau

SEQ ID NO: 864919 - RNA, 19 nt, Homo sapiens
  misc_RNA (1)...(19): siRNA sense strand
gaaaagacgagaaagcaau

SEQ ID NO: 864920 - RNA, 19 nt, Homo sapiens
  misc_RNA (1)...(19): siRNA sense strand
gugaagggccugggcauug

SEQ ID NO: 864921 - RNA, 19 nt, Homo sapiens
  misc_RNA (1)...(19): siRNA sense strand
gcuaaguauucuaggaucu

SEQ ID NO: 864922 - RNA, 19 nt, Homo sapiens
  misc_RNA (1)...(19): siRNA sense strand
ugaguggcuucuuuacaau

SEQ ID NO: 864923 - RNA, 19 nt, Homo sapiens
  misc_RNA (1)...(19): siRNA sense strand
gaagaggagauugagacuu

SEQ ID NO: 864924 - RNA, 19 nt, Homo sapiens
  misc_RNA (1)...(19): siRNA sense strand
gaaagcuuaaccuguggaa

SEQ ID NO: 864925 - RNA, 19 nt, Homo sapiens
  misc_RNA (1)...(19): siRNA sense strand
auucaacacuuccauugug

SEQ ID NO: 864926 - RNA, 19 nt, Homo sapiens
  misc_RNA (1)...(19): siRNA sense strand
cgaugucauugguacuuug

SEQ ID NO: 864927 - RNA, 19 nt, Homo sapiens
  misc_RNA (1)...(19): siRNA sense strand
cuggugagguggccaacuu

SEQ ID NO: 864928 - RNA, 19 nt, Homo sapiens
  misc_RNA (1)...(19): siRNA sense strand
aagcuuaaccuguggaauc

SEQ ID NO: 864929 - RNA, 19 nt, Homo sapiens
  misc_RNA (1)...(19): siRNA sense strand
uaugagagcaggucaaggu

SEQ ID NO: 864930 - RNA, 19 nt, Homo sapiens
  misc_RNA (1)...(19): siRNA sense strand
cuuguugcaugccuuuaaa

SEQ ID NO: 864931 - RNA, 19 nt, Homo sapiens
  misc_RNA (1)...(19): siRNA sense strand
gugagcacacagauuaauu

SEQ ID NO: 864932 - RNA, 19 nt, Homo sapiens
  misc_RNA (1)...(19): siRNA sense strand
ggccaugcauaucuuaagg

SEQ ID NO: 864933 - RNA, 19 nt, Homo sapiens
  misc_RNA (1)...(19): siRNA sense strand
cauucaugcuccaaaggaa

SEQ ID NO: 864934 - RNA, 19 nt, Homo sapiens
  misc_RNA (1)...(19): siRNA sense strand
ucaagguggccaugcauau

SEQ ID NO: 864935 - RNA, 19 nt, Homo sapiens
  misc_RNA (1)...(19): siRNA sense strand
uacuuugaguggcuucuuu

SEQ ID NO: 864936 - RNA, 19 nt, Homo sapiens
  misc_RNA (1)...(19): siRNA sense strand
gaugucauugguacuuuga

SEQ ID NO: 864937 - RNA, 19 nt, Homo sapiens
  misc_RNA (1)...(19): siRNA sense strand
uuaaggaguggcaagauau

SEQ ID NO: 864938 - RNA, 19 nt, Homo sapiens
  misc_RNA (1)...(19): siRNA sense strand
gaaagcaaugaauggcaau

SEQ ID NO: 864939 - RNA, 19 nt, Homo sapiens
  misc_RNA (1)...(19): siRNA sense strand
cuuaaccuguggaaucgaa

SEQ ID NO: 864940 - RNA, 19 nt, Homo sapiens
  misc_RNA (1)...(19): siRNA sense strand
aauggcaaucucucuaaua

SEQ ID NO: 864941 - RNA, 19 nt, Homo sapiens
  misc_RNA (1)...(19): siRNA sense strand
caacccuuguggucauugu

SEQ ID NO: 864942 - RNA, 19 nt, Homo sapiens
  misc_RNA (1)...(19): siRNA sense strand
cuauauuggucugggauug

SEQ ID NO: 864943 - RNA, 19 nt, Homo sapiens
  misc_RNA (1)...(19): siRNA sense strand
gagcacacagauuaauuac

SEQ ID NO: 864944 - RNA, 19 nt, Homo sapiens
  misc_RNA (1)...(19): siRNA sense strand
aaaugucucccgaagaaau

SEQ ID NO: 864945 - RNA, 19 nt, Homo sapiens
  misc_RNA (1)...(19): siRNA sense strand
gcuuuagucuagcaagucu

SEQ ID NO: 864946 - RNA, 19 nt, Homo sapiens
  misc_RNA (1)...(19): siRNA sense strand
uggcuucuuuacaaucauu

SEQ ID NO: 864947 - RNA, 19 nt, Homo sapiens
  misc_RNA (1)...(19): siRNA sense strand
gcuaggugauccagguuuu

SEQ ID NO: 864948 - RNA, 19 nt, Homo sapiens
  misc_RNA (1)...(19): siRNA sense strand
cuaaguauucuaggaucua

SEQ ID NO: 864949 - RNA, 19 nt, Homo sapiens
  misc_RNA (1)...(19): siRNA sense strand
acaguuauggucauucaug

SEQ ID NO: 864950 - RNA, 19 nt, Homo sapiens
  misc_RNA (1)...(19): siRNA sense strand
ccaggggcguggaaaauau

SEQ ID NO: 864951 - RNA, 19 nt, Homo sapiens
  misc_RNA (1)...(19): siRNA sense strand
uaaggaguggcaagauaug

SEQ ID NO: 864952 - RNA, 19 nt, Homo sapiens
  misc_RNA (1)...(19): siRNA sense strand
ggaagaggagauugagacu

SEQ ID NO: 864953 - RNA, 19 nt, Homo sapiens
  misc_RNA (1)...(19): siRNA sense strand
uaaguauucuaggaucuac

SEQ ID NO: 864954 - RNA, 19 nt, Homo sapiens
  misc_RNA (1)...(19): siRNA sense strand
uucaacacuuccauuguga

SEQ ID NO: 864955 - RNA, 19 nt, Homo sapiens
  misc_RNA (1)...(19): siRNA sense strand
aauagggcccuggauauau

SEQ ID NO: 864956 - RNA, 19 nt, Homo sapiens
  misc_RNA (1)...(19): siRNA sense strand
gguggccaugcauaucuua

SEQ ID NO: 864957 - RNA, 19 nt, Homo sapiens
  misc_RNA (1)...(19): siRNA sense strand
uggaggaaguuucauuuug

SEQ ID NO: 864958 - RNA, 19 nt, Homo sapiens
  misc_RNA (1)...(19): siRNA sense strand
ccuguggaaucgaacaaca

SEQ ID NO: 864959 - RNA, 19 nt, Homo sapiens
  misc_RNA (1)...(19): siRNA sense strand
acaacacacuggugaaaau

SEQ ID NO: 864960 - RNA, 19 nt, Homo sapiens
  misc_RNA (1)...(19): siRNA sense strand
gaccgaggcuuacuagaaa

SEQ ID NO: 864961 - RNA, 19 nt, Homo sapiens
  misc_RNA (1)...(19): siRNA sense strand
guagagcacucauaacaga

SEQ ID NO: 864962 - RNA, 19 nt, Homo sapiens
  misc_RNA (1)...(19): siRNA sense strand
guacauagccugugucauc

SEQ ID NO: 864963 - RNA, 19 nt, Homo sapiens
  misc_RNA (1)...(19): siRNA sense strand
ggaccgaggcuuacuagaa

SEQ ID NO: 864964 - RNA, 19 nt, Homo sapiens
  misc_RNA (1)...(19): siRNA sense strand
ggaagguucugaccaguag

SEQ ID NO: 864965 - RNA, 19 nt, Homo sapiens
  misc_RNA (1)...(19): siRNA sense strand
gcccagaacuacaggaaga

SEQ ID NO: 864966 - RNA, 19 nt, Homo sapiens
  misc_RNA (1)...(19): siRNA sense strand
ucccagaaguggacgauuu

SEQ ID NO: 864967 - RNA, 19 nt, Homo sapiens
  misc_RNA (1)...(19): siRNA sense strand
gcgcggaaguguucaagca

SEQ ID NO: 864968 - RNA, 19 nt, Homo sapiens
  misc_RNA (1)...(19): siRNA sense strand
gcugugcacucugcccaua

SEQ ID NO: 864969 - RNA, 19 nt, Homo sapiens
  misc_RNA (1)...(19): siRNA sense strand
gggaguacauagccugugu

SEQ ID NO: 864970 - RNA, 19 nt, Homo sapiens
  misc_RNA (1)...(19): siRNA sense strand
guaccuggacggcagcaua

SEQ ID NO: 864971 - RNA, 19 nt, Homo sapiens
  misc_RNA (1)...(19): siRNA sense strand
gcuggaggaccgaggcuua

SEQ ID NO: 864972 - RNA, 19 nt, Homo sapiens
  misc_RNA (1)...(19): siRNA sense strand
cagcauaggcguucugauc

SEQ ID NO: 864973 - RNA, 19 nt, Homo sapiens
  misc_RNA (1)...(19): siRNA sense strand
cauagccugugucaucuug

SEQ ID NO: 864974 - RNA, 19 nt, Homo sapiens
  misc_RNA (1)...(19): siRNA sense strand
guacagcgccucugcuuuu

SEQ ID NO: 864975 - RNA, 19 nt, Homo sapiens
  misc_RNA (1)...(19): siRNA sense strand
gaucggccucaccauauuu

SEQ ID NO: 864976 - RNA, 19 nt, Homo sapiens
  misc_RNA (1)...(19): siRNA sense strand
cggaaguguucaagcauga

SEQ ID NO: 864977 - RNA, 19 nt, Homo sapiens
  misc_RNA (1)...(19): siRNA sense strand
gggaagguucugaccagua

SEQ ID NO: 864978 - RNA, 19 nt, Homo sapiens
  misc_RNA (1)...(19): siRNA sense strand
uaacagauggguuuaacuc

SEQ ID NO: 864979 - RNA, 19 nt, Homo sapiens
  misc_RNA (1)...(19): siRNA sense strand
ggaggaccgaggcuuacua

SEQ ID NO: 864980 - RNA, 19 nt, Homo sapiens
  misc_RNA (1)...(19): siRNA sense strand
acucauaacagauggguuu

SEQ ID NO: 864981 - RNA, 19 nt, Homo sapiens
  misc_RNA (1)...(19): siRNA sense strand
caguagagcacucauaaca

SEQ ID NO: 864982 - RNA, 19 nt, Homo sapiens
  misc_RNA (1)...(19): siRNA sense strand
uccaugaccucucaacuag

SEQ ID NO: 864983 - RNA, 19 nt, Homo sapiens
  misc_RNA (1)...(19): siRNA sense strand
cgauuguccuguggcguua

SEQ ID NO: 864984 - RNA, 19 nt, Homo sapiens
  misc_RNA (1)...(19): siRNA sense strand
ggugauauuccuucuguca

SEQ ID NO: 864985 - RNA, 19 nt, Homo sapiens
  misc_RNA (1)...(19): siRNA sense strand
ugaucggccucaccauauu

SEQ ID NO: 864986 - RNA, 19 nt, Homo sapiens
  misc_RNA (1)...(19): siRNA sense strand
cauaacagauggguuuaac

SEQ ID NO: 864987 - RNA, 19 nt, Homo sapiens
  misc_RNA (1)...(19): siRNA sense strand
ugauauuccuucugucauc

SEQ ID NO: 864988 - RNA, 19 nt, Homo sapiens
  misc_RNA (1)...(19): siRNA sense strand
gcagcauccuggccguguu

SEQ ID NO: 864989 - RNA, 19 nt, Homo sapiens
  misc_RNA (1)...(19): siRNA sense strand
gaccaguagagcacucaua

SEQ ID NO: 864990 - RNA, 19 nt, Homo sapiens
  misc_RNA (1)...(19): siRNA sense strand
cauuguggguguccugguu

SEQ ID NO: 864991 - RNA, 19 nt, Homo sapiens
  misc_RNA (1)...(19): siRNA sense strand
aagcagcacccgccugaaa

SEQ ID NO: 864992 - RNA, 19 nt, Homo sapiens
  misc_RNA (1)...(19): siRNA sense strand
ucacgaagcccagaacuac

SEQ ID NO: 864993 - RNA, 19 nt, Homo sapiens
  misc_RNA (1)...(19): siRNA sense strand
ucaaacuccucaucgacau

SEQ ID NO: 864994 - RNA, 19 nt, Homo sapiens
  misc_RNA (1)...(19): siRNA sense strand
cuucugucauccauaugua

SEQ ID NO: 864995 - RNA, 19 nt, Homo sapiens
  misc_RNA (1)...(19): siRNA sense strand
ccuguucagugucuccauu

SEQ ID NO: 864996 - RNA, 19 nt, Homo sapiens
  misc_RNA (1)...(19): siRNA sense strand
gggucaaacuccucaucga

SEQ ID NO: 864997 - RNA, 19 nt, Homo sapiens
  misc_RNA (1)...(19): siRNA sense strand
ccauauguauaguggucaa

SEQ ID NO: 864998 - RNA, 19 nt, Homo sapiens
  misc_RNA (1)...(19): siRNA sense strand
ucugaucggccucaccaua

SEQ ID NO: 864999 - RNA, 19 nt, Homo sapiens
  misc_RNA (1)...(19): siRNA sense strand
uuuacugucuccguuauga

SEQ ID NO: 865000 - RNA, 19 nt, Homo sapiens
  misc_RNA (1)...(19): siRNA sense strand
acacgucacuacgagaugu

SEQ ID NO: 865001 - RNA, 19 nt, Homo sapiens
  misc_RNA (1)...(19): siRNA sense strand
gcccauagggaguacauag

SEQ ID NO: 865002 - RNA, 19 nt, Homo sapiens
  misc_RNA (1)...(19): siRNA sense strand
aguggacgauuuccuguuc

SEQ ID NO: 865003 - RNA, 19 nt, Homo sapiens
  misc_RNA (1)...(19): siRNA sense strand
gguacagcgccucugcuuu

SEQ ID NO: 865004 - RNA, 19 nt, Homo sapiens
  misc_RNA (1)...(19): siRNA sense strand
ucugucauccauauguaua

SEQ ID NO: 865005 - RNA, 19 nt, Homo sapiens
  misc_RNA (1)...(19): siRNA sense strand
accaguagagcacucauaa

SEQ ID NO: 865006 - RNA, 19 nt, Homo sapiens
  misc_RNA (1)...(19): siRNA sense strand
gauuuccuguucagugucu

SEQ ID NO: 865007 - RNA, 19 nt, Homo sapiens
  misc_RNA (1)...(19): siRNA sense strand
acgauuuccuguucagugu

SEQ ID NO: 865008 - RNA, 19 nt, Homo sapiens
  misc_RNA (1)...(19): siRNA sense strand
gaggaccgaggcuuacuag

SEQ ID NO: 865009 - RNA, 19 nt, Homo sapiens
  misc_RNA (1)...(19): siRNA sense strand
gaguacauagccuguguca

SEQ ID NO: 865010 - RNA, 19 nt, Homo sapiens
  misc_RNA (1)...(19): siRNA sense strand
ggggugauauuccuucugu

SEQ ID NO: 865011 - RNA, 19 nt, Homo sapiens
  misc_RNA (1)...(19): siRNA sense strand
guggcugccuuuacugucu

SEQ ID NO: 865012 - RNA, 19 nt, Homo sapiens
  misc_RNA (1)...(19): siRNA sense strand
cuacgagauguuugaguga

SEQ ID NO: 865013 - RNA, 19 nt, Homo sapiens
  misc_RNA (1)...(19): siRNA sense strand
gagaagaacuacuugauua

SEQ ID NO: 865014 - RNA, 19 nt, Homo sapiens
  misc_RNA (1)...(19): siRNA sense strand
gaugugacccagauauuua

SEQ ID NO: 865015 - RNA, 19 nt, Homo sapiens
  misc_RNA (1)...(19): siRNA sense strand
gaaauucugugugguacaa

SEQ ID NO: 865016 - RNA, 19 nt, Homo sapiens
  misc_RNA (1)...(19): siRNA sense strand
gcaguucgcugacgagaag

SEQ ID NO: 865017 - RNA, 19 nt, Homo sapiens
  misc_RNA (1)...(19): siRNA sense strand
guugguagcagacuucuua

SEQ ID NO: 865018 - RNA, 19 nt, Homo sapiens
  misc_RNA (1)...(19): siRNA sense strand
ugaagacuaugagaaauug

SEQ ID NO: 865019 - RNA, 19 nt, Homo sapiens
  misc_RNA (1)...(19): siRNA sense strand
cagaugccuuugcuacuuu

SEQ ID NO: 865020 - RNA, 19 nt, Homo sapiens
  misc_RNA (1)...(19): siRNA sense strand
gaaccuccuucgggauaaa

SEQ ID NO: 865021 - RNA, 19 nt, Homo sapiens
  misc_RNA (1)...(19): siRNA sense strand
ucacaacuuugccaucaug

SEQ ID NO: 865022 - RNA, 19 nt, Homo sapiens
  misc_RNA (1)...(19): siRNA sense strand
aaacagauccgagacuuga

SEQ ID NO: 865023 - RNA, 19 nt, Homo sapiens
  misc_RNA (1)...(19): siRNA sense strand
cagauugccuuacguugug

SEQ ID NO: 865024 - RNA, 19 nt, Homo sapiens
  misc_RNA (1)...(19): siRNA sense strand
ggacggaugaugagcaguu

SEQ ID NO: 865025 - RNA, 19 nt, Homo sapiens
  misc_RNA (1)...(19): siRNA sense strand
ggauuaugcugagagaaug

SEQ ID NO: 865026 - RNA, 19 nt, Homo sapiens
  misc_RNA (1)...(19): siRNA sense strand
ccagauauuuaacaacauc

SEQ ID NO: 865027 - RNA, 19 nt, Homo sapiens
  misc_RNA (1)...(19): siRNA sense strand
cgagaagaacuacuugauu

SEQ ID NO: 865028 - RNA, 19 nt, Homo sapiens
  misc_RNA (1)...(19): siRNA sense strand
cauuugauauugcuucaga

SEQ ID NO: 865029 - RNA, 19 nt, Homo sapiens
  misc_RNA (1)...(19): siRNA sense strand
uaugagaaauugcuucagu

SEQ ID NO: 865030 - RNA, 19 nt, Homo sapiens
  misc_RNA (1)...(19): siRNA sense strand
ucagaugccuuugcuacuu

SEQ ID NO: 865031 - RNA, 19 nt, Homo sapiens
  misc_RNA (1)...(19): siRNA sense strand
ugauagacuuugagggaaa

SEQ ID NO: 865032 - RNA, 19 nt, Homo sapiens
  misc_RNA (1)...(19): siRNA sense strand
gauccgagacuugaagaaa

SEQ ID NO: 865033 - RNA, 19 nt, Homo sapiens
  misc_RNA (1)...(19): siRNA sense strand
gaacaaaauuacgacacua

SEQ ID NO: 865034 - RNA, 19 nt, Homo sapiens
  misc_RNA (1)...(19): siRNA sense strand
ugacccagauauuuaacaa

SEQ ID NO: 865035 - RNA, 19 nt, Homo sapiens
  misc_RNA (1)...(19): siRNA sense strand
aaccagacauaaaguguug

SEQ ID NO: 865036 - RNA, 19 nt, Homo sapiens
  misc_RNA (1)...(19): siRNA sense strand
gaaccugaaacucaugaug

SEQ ID NO: 865037 - RNA, 19 nt, Homo sapiens
  misc_RNA (1)...(19): siRNA sense strand
gggauuaugcugagagaau

SEQ ID NO: 865038 - RNA, 19 nt, Homo sapiens
  misc_RNA (1)...(19): siRNA sense strand
cgucacaacuuugccauca

SEQ ID NO: 865039 - RNA, 19 nt, Homo sapiens
  misc_RNA (1)...(19): siRNA sense strand
aagaaaggacggaugauga

SEQ ID NO: 865040 - RNA, 19 nt, Homo sapiens
  misc_RNA (1)...(19): siRNA sense strand
ugacaaaguauaucagcaa

SEQ ID NO: 865041 - RNA, 19 nt, Homo sapiens
  misc_RNA (1)...(19): siRNA sense strand
gauuuacuaaccagacaua

SEQ ID NO: 865042 - RNA, 19 nt, Homo sapiens
  misc_RNA (1)...(19): siRNA sense strand
ccuggaccgucacaacuuu

SEQ ID NO: 865043 - RNA, 19 nt, Homo sapiens
  misc_RNA (1)...(19): siRNA sense strand
uuaaacagauccgagacuu

SEQ ID NO: 865044 - RNA, 19 nt, Homo sapiens
  misc_RNA (1)...(19): siRNA sense strand
uggcucagcuagcacaaga

SEQ ID NO: 865045 - RNA, 19 nt, Homo sapiens
  misc_RNA (1)...(19): siRNA sense strand
gucccaacauccaguuuga

SEQ ID NO: 865046 - RNA, 19 nt, Homo sapiens
  misc_RNA (1)...(19): siRNA sense strand
ccacagauugccuuacguu

SEQ ID NO: 865047 - RNA, 19 nt, Homo sapiens
  misc_RNA (1)...(19): siRNA sense strand
caacuuugccaucaugaca

SEQ ID NO: 865048 - RNA, 19 nt, Homo sapiens
  misc_RNA (1)...(19): siRNA sense strand
uuaacaacaucuugagaag

SEQ ID NO: 865049 - RNA, 19 nt, Homo sapiens
  misc_RNA (1)...(19): siRNA sense strand
cauccaguuugaagccuuu

SEQ ID NO: 865050 - RNA, 19 nt, Homo sapiens
  misc_RNA (1)...(19): siRNA sense strand
ggauaaaagucccaacauc

SEQ ID NO: 865051 - RNA, 19 nt, Homo sapiens
  misc_RNA (1)...(19): siRNA sense strand
uuaaguacguggaguuguc

SEQ ID NO: 865052 - RNA, 19 nt, Homo sapiens
  misc_RNA (1)...(19): siRNA sense strand
uuacuaaccagacauaaag

SEQ ID NO: 865053 - RNA, 19 nt, Homo sapiens
  misc_RNA (1)...(19): siRNA sense strand
ccggagaaccugaaacuca

SEQ ID NO: 865054 - RNA, 19 nt, Homo sapiens
  misc_RNA (1)...(19): siRNA sense strand
gccuuacguugugggauua

SEQ ID NO: 865055 - RNA, 19 nt, Homo sapiens
  misc_RNA (1)...(19): siRNA sense strand
cggagaaccugaaacucau

SEQ ID NO: 865056 - RNA, 19 nt, Homo sapiens
  misc_RNA (1)...(19): siRNA sense strand
acccagauauuuaacaaca

SEQ ID NO: 865057 - RNA, 19 nt, Homo sapiens
  misc_RNA (1)...(19): siRNA sense strand
uugcuacuuucaaggauuu

SEQ ID NO: 865058 - RNA, 19 nt, Homo sapiens
  misc_RNA (1)...(19): siRNA sense strand
uuguggagauccuguuaaa

SEQ ID NO: 865059 - RNA, 19 nt, Homo sapiens
  misc_RNA (1)...(19): siRNA sense strand
gagauuucuuuaaguacgu

SEQ ID NO: 865060 - RNA, 19 nt, Homo sapiens
  misc_RNA (1)...(19): siRNA sense strand
aaagaugugacccagauau

SEQ ID NO: 865061 - RNA, 19 nt, Homo sapiens
  misc_RNA (1)...(19): siRNA sense strand
gagaaccugaaacucauga

SEQ ID NO: 865062 - RNA, 19 nt, Homo sapiens
  misc_RNA (1)...(19): siRNA sense strand
uaaccagacauaaaguguu

SEQ ID NO: 865063 - RNA, 19 nt, Homo sapiens
  misc_RNA (1)...(19): siRNA sense strand
ugccuuacguugugggauu

SEQ ID NO: 865064 - RNA, 19 nt, Homo sapiens
  misc_RNA (1)...(19): siRNA sense strand
aaagaaaggacggaugaug

SEQ ID NO: 865065 - RNA, 19 nt, Homo sapiens
  misc_RNA (1)...(19): siRNA sense strand
gccaucaugacaaaguaua

SEQ ID NO: 865066 - RNA, 19 nt, Homo sapiens
  misc_RNA (1)...(19): siRNA sense strand
acaugaaccacuugucaaa

SEQ ID NO: 865067 - RNA, 19 nt, Homo sapiens
  misc_RNA (1)...(19): siRNA sense strand
gcaagccggagaaccugaa

SEQ ID NO: 865068 - RNA, 19 nt, Homo sapiens
  misc_RNA (1)...(19): siRNA sense strand
uaaacagauccgagacuug

SEQ ID NO: 865069 - RNA, 19 nt, Homo sapiens
  misc_RNA (1)...(19): siRNA sense strand
ugaaccuccuucgggauaa

SEQ ID NO: 865070 - RNA, 19 nt, Homo sapiens
  misc_RNA (1)...(19): siRNA sense strand
cuacuugauuaaacagauc

SEQ ID NO: 865071 - RNA, 19 nt, Homo sapiens
  misc_RNA (1)...(19): siRNA sense strand
agaugugacccagauauuu

SEQ ID NO: 865072 - RNA, 19 nt, Homo sapiens
  misc_RNA (1)...(19): siRNA sense strand
gacgagaagaacuacuuga

SEQ ID NO: 865073 - RNA, 19 nt, Homo sapiens
  misc_RNA (1)...(19): siRNA sense strand
uuucugagcagcuuccaaa

SEQ ID NO: 865074 - RNA, 19 nt, Homo sapiens
  misc_RNA (1)...(19): siRNA sense strand
acagauugccuuacguugu

SEQ ID NO: 865075 - RNA, 19 nt, Homo sapiens
  misc_RNA (1)...(19): siRNA sense strand
gaacuacuugauuaaacag

SEQ ID NO: 865076 - RNA, 19 nt, Homo sapiens
  misc_RNA (1)...(19): siRNA sense strand
ggagaaccugaaacucaug

SEQ ID NO: 865077 - RNA, 19 nt, Homo sapiens
  misc_RNA (1)...(19): siRNA sense strand
aaucagcccaaacucauug

SEQ ID NO: 865078 - RNA, 19 nt, Homo sapiens
  misc_RNA (1)...(19): siRNA sense strand
gugggauuaugcugagaga

SEQ ID NO: 865079 - RNA, 19 nt, Homo sapiens
  misc_RNA (1)...(19): siRNA sense strand
ucgcugacgagaagaacua

SEQ ID NO: 865080 - RNA, 19 nt, Homo sapiens
  misc_RNA (1)...(19): siRNA sense strand
gacggaugaugagcaguuc

SEQ ID NO: 865081 - RNA, 19 nt, Homo sapiens
  misc_RNA (1)...(19): siRNA sense strand
uauuguggagauccuguua

SEQ ID NO: 865082 - RNA, 19 nt, Homo sapiens
  misc_RNA (1)...(19): siRNA sense strand
uuagugcucauccucauau

SEQ ID NO: 865083 - RNA, 19 nt, Homo sapiens
  misc_RNA (1)...(19): siRNA sense strand
ugacgagaagaacuacuug

SEQ ID NO: 865084 - RNA, 19 nt, Homo sapiens
  misc_RNA (1)...(19): siRNA sense strand
cauccucauauccuguuua

SEQ ID NO: 865085 - RNA, 19 nt, Homo sapiens
  misc_RNA (1)...(19): siRNA sense strand
aagaugugacccagauauu

SEQ ID NO: 865086 - RNA, 19 nt, Homo sapiens
  misc_RNA (1)...(19): siRNA sense strand
gauagacuuugagggaaaa

SEQ ID NO: 865087 - RNA, 19 nt, Homo sapiens
  misc_RNA (1)...(19): siRNA sense strand
uugccaucaugacaaagua

SEQ ID NO: 865088 - RNA, 19 nt, Homo sapiens
  misc_RNA (1)...(19): siRNA sense strand
uauucgacaugaaccacuu

SEQ ID NO: 865089 - RNA, 19 nt, Homo sapiens
  misc_RNA (1)...(19): siRNA sense strand
uuucaaggauuuacuaacc

SEQ ID NO: 865090 - RNA, 19 nt, Homo sapiens
  misc_RNA (1)...(19): siRNA sense strand
gauaugaugucaggauuca

SEQ ID NO: 865091 - RNA, 19 nt, Homo sapiens
  misc_RNA (1)...(19): siRNA sense strand
caucgacucccuucagaaa

SEQ ID NO: 865092 - RNA, 19 nt, Homo sapiens
  misc_RNA (1)...(19): siRNA sense strand
ccagugcuguggcgcauau

SEQ ID NO: 865093 - RNA, 19 nt, Homo sapiens
  misc_RNA (1)...(19): siRNA sense strand
gcuacaacaucaucuucug

SEQ ID NO: 865094 - RNA, 19 nt, Homo sapiens
  misc_RNA (1)...(19): siRNA sense strand
cauuguggcuggcgucuuc

SEQ ID NO: 865095 - RNA, 19 nt, Homo sapiens
  misc_RNA (1)...(19): siRNA sense strand
agagcaacaucaaguccua

SEQ ID NO: 865096 - RNA, 19 nt, Homo sapiens
  misc_RNA (1)...(19): siRNA sense strand
gcggaacauuuacauugug

SEQ ID NO: 865097 - RNA, 19 nt, Homo sapiens
  misc_RNA (1)...(19): siRNA sense strand
gacgauaucgaucugcaaa

SEQ ID NO: 865098 - RNA, 19 nt, Homo sapiens
  misc_RNA (1)...(19): siRNA sense strand
ggaccucaacgucuacuuc

SEQ ID NO: 865099 - RNA, 19 nt, Homo sapiens
  misc_RNA (1)...(19): siRNA sense strand
gcgcauauggcccugaaga

SEQ ID NO: 865100 - RNA, 19 nt, Homo sapiens
  misc_RNA (1)...(19): siRNA sense strand
ccgcggaacauuuacauug

SEQ ID NO: 865101 - RNA, 19 nt, Homo sapiens
  misc_RNA (1)...(19): siRNA sense strand
uguccgaccucaccaaagu

SEQ ID NO: 865102 - RNA, 19 nt, Homo sapiens
  misc_RNA (1)...(19): siRNA sense strand
uggauaugaugucaggauu

SEQ ID NO: 865103 - RNA, 19 nt, Homo sapiens
  misc_RNA (1)...(19): siRNA sense strand
gaguccaucuucacgaaag

SEQ ID NO: 865104 - RNA, 19 nt, Homo sapiens
  misc_RNA (1)...(19): siRNA sense strand
acugggaccucaacgucua

SEQ ID NO: 865105 - RNA, 19 nt, Homo sapiens
  misc_RNA (1)...(19): siRNA sense strand
gcaagugggaugaguccau

SEQ ID NO: 865106 - RNA, 19 nt, Homo sapiens
  misc_RNA (1)...(19): siRNA sense strand
gucaucgacucccuucaga

SEQ ID NO: 865107 - RNA, 19 nt, Homo sapiens
  misc_RNA (1)...(19): siRNA sense strand
caacgucuacuucaauugc

SEQ ID NO: 865108 - RNA, 19 nt, Homo sapiens
  misc_RNA (1)...(19): siRNA sense strand
cgcggaacauuuacauugu

SEQ ID NO: 865109 - RNA, 19 nt, Homo sapiens
  misc_RNA (1)...(19): siRNA sense strand
ccaucgugcucaucuucuu

SEQ ID NO: 865110 - RNA, 19 nt, Homo sapiens
  misc_RNA (1)...(19): siRNA sense strand
ggauaugaugucaggauuc

SEQ ID NO: 865111 - RNA, 19 nt, Homo sapiens
  misc_RNA (1)...(19): siRNA sense strand
cucaacgucuacuucaauu

SEQ ID NO: 865112 - RNA, 19 nt, Homo sapiens
  misc_RNA (1)...(19): siRNA sense strand
gggcucugcgggagaauau

SEQ ID NO: 865113 - RNA, 19 nt, Homo sapiens
  misc_RNA (1)...(19): siRNA sense strand
acaacaucaucuucugguu

SEQ ID NO: 865114 - RNA, 19 nt, Homo sapiens
  misc_RNA (1)...(19): siRNA sense strand
gaccucaacgucuacuuca

SEQ ID NO: 865115 - RNA, 19 nt, Homo sapiens
  misc_RNA (1)...(19): siRNA sense strand
gcauauggcccugaagacu

SEQ ID NO: 865116 - RNA, 19 nt, Homo sapiens
  misc_RNA (1)...(19): siRNA sense strand
ccucaacgucuacuucaau

SEQ ID NO: 865117 - RNA, 19 nt, Homo sapiens
  misc_RNA (1)...(19): siRNA sense strand
ugacccggaugcauggaau

SEQ ID NO: 865118 - RNA, 19 nt, Homo sapiens
  misc_RNA (1)...(19): siRNA sense strand
ggacgauaucgaucugcaa

SEQ ID NO: 865119 - RNA, 19 nt, Homo sapiens
  misc_RNA (1)...(19): siRNA sense strand
ggcuggaguugucuuccuu

SEQ ID NO: 865120 - RNA, 19 nt, Homo sapiens
  misc_RNA (1)...(19): siRNA sense strand
gggagaauaucugcuugcu

SEQ ID NO: 865121 - RNA, 19 nt, Homo sapiens
  misc_RNA (1)...(19): siRNA sense strand
gggaguucuucgagagcaa

SEQ ID NO: 865122 - RNA, 19 nt, Homo sapiens
  misc_RNA (1)...(19): siRNA sense strand
caaagugacccggaugcau

SEQ ID NO: 865123 - RNA, 19 nt, Homo sapiens
  misc_RNA (1)...(19): siRNA sense strand
uaucugcuugcucaacuuu

SEQ ID NO: 865124 - RNA, 19 nt, Homo sapiens
  misc_RNA (1)...(19): siRNA sense strand
gaauaucugcuugcucaac

SEQ ID NO: 865125 - RNA, 19 nt, Homo sapiens
  misc_RNA (1)...(19): siRNA sense strand
gcuguccgaccucaccaaa

SEQ ID NO: 865126 - RNA, 19 nt, Homo sapiens
  misc_RNA (1)...(19): siRNA sense strand
agacaucgaggcagugaag

SEQ ID NO: 865127 - RNA, 19 nt, Homo sapiens
  misc_RNA (1)...(19): siRNA sense strand
cagcuacaacaucaucuuc

SEQ ID NO: 865128 - RNA, 19 nt, Homo sapiens
  misc_RNA (1)...(19): siRNA sense strand
gauggugggcguggugaug

SEQ ID NO: 865129 - RNA, 19 nt, Homo sapiens
  misc_RNA (1)...(19): siRNA sense strand
gaagaaaguugugagaauu

SEQ ID NO: 865130 - RNA, 19 nt, Homo sapiens
  misc_RNA (1)...(19): siRNA sense strand
caacaaaggcuauggagua

SEQ ID NO: 865131 - RNA, 19 nt, Homo sapiens
  misc_RNA (1)...(19): siRNA sense strand
agaagaagcucucaacaaa

SEQ ID NO: 865132 - RNA, 19 nt, Homo sapiens
  misc_RNA (1)...(19): siRNA sense strand
ggaaagagagaggaaauua

SEQ ID NO: 865133 - RNA, 19 nt, Homo sapiens
  misc_RNA (1)...(19): siRNA sense strand
ggaaagacuauaacacaua

SEQ ID NO: 865134 - RNA, 19 nt, Homo sapiens
  misc_RNA (1)...(19): siRNA sense strand
gaugacuacugaaaugaua

SEQ ID NO: 865135 - RNA, 19 nt, Homo sapiens
  misc_RNA (1)...(19): siRNA sense strand
gggacaagauacugauaua

SEQ ID NO: 865136 - RNA, 19 nt, Homo sapiens
  misc_RNA (1)...(19): siRNA sense strand
ggauuuaucuucagacaca

SEQ ID NO: 865137 - RNA, 19 nt, Homo sapiens
  misc_RNA (1)...(19): siRNA sense strand
gcacccaaauugaagauga

SEQ ID NO: 865138 - RNA, 19 nt, Homo sapiens
  misc_RNA (1)...(19): siRNA sense strand
ucagaauagucacaaguua

SEQ ID NO: 865139 - RNA, 19 nt, Homo sapiens
  misc_RNA (1)...(19): siRNA sense strand
gagaggaaauuaugauuac

SEQ ID NO: 865140 - RNA, 19 nt, Homo sapiens
  misc_RNA (1)...(19): siRNA sense strand
gagaaggugucgcuguauu

SEQ ID NO: 865141 - RNA, 19 nt, Homo sapiens
  misc_RNA (1)...(19): siRNA sense strand
gaacgcagagcgccuauug

SEQ ID NO: 865142 - RNA, 19 nt, Homo sapiens
  misc_RNA (1)...(19): siRNA sense strand
ccagagauuugguugauga

SEQ ID NO: 865143 - RNA, 19 nt, Homo sapiens
  misc_RNA (1)...(19): siRNA sense strand
gaauuaauuugugguguga

SEQ ID NO: 865144 - RNA, 19 nt, Homo sapiens
  misc_RNA (1)...(19): siRNA sense strand
cuacugaaaugauaaagga

SEQ ID NO: 865145 - RNA, 19 nt, Homo sapiens
  misc_RNA (1)...(19): siRNA sense strand
gaagacuaaucccagugua

SEQ ID NO: 865146 - RNA, 19 nt, Homo sapiens
  misc_RNA (1)...(19): siRNA sense strand
uauacaggauggaacaaua

SEQ ID NO: 865147 - RNA, 19 nt, Homo sapiens
  misc_RNA (1)...(19): siRNA sense strand
ugaagaaaguugugagaau

SEQ ID NO: 865148 - RNA, 19 nt, Homo sapiens
  misc_RNA (1)...(19): siRNA sense strand
agaagaugcugaugaaguu

SEQ ID NO: 865149 - RNA, 19 nt, Homo sapiens
  misc_RNA (1)...(19): siRNA sense strand
guccaaagcugacaaugug

SEQ ID NO: 865150 - RNA, 19 nt, Homo sapiens
  misc_RNA (1)...(19): siRNA sense strand
ggcagaagaugcugaugaa

SEQ ID NO: 865151 - RNA, 19 nt, Homo sapiens
  misc_RNA (1)...(19): siRNA sense strand
gaaagagagaggaaauuau

SEQ ID NO: 865152 - RNA, 19 nt, Homo sapiens
  misc_RNA (1)...(19): siRNA sense strand
uaguggagauacaguaaua

SEQ ID NO: 865153 - RNA, 19 nt, Homo sapiens
  misc_RNA (1)...(19): siRNA sense strand
gaguaucagagcaauauua

SEQ ID NO: 865154 - RNA, 19 nt, Homo sapiens
  misc_RNA (1)...(19): siRNA sense strand
agacugggaugaugaagaa

SEQ ID NO: 865155 - RNA, 19 nt, Homo sapiens
  misc_RNA (1)...(19): siRNA sense strand
ggauuuggcuuuggauaau

SEQ ID NO: 865156 - RNA, 19 nt, Homo sapiens
  misc_RNA (1)...(19): siRNA sense strand
gagaauaucaagcugcaaa

SEQ ID NO: 865157 - RNA, 19 nt, Homo sapiens
  misc_RNA (1)...(19): siRNA sense strand
aaagggaguuggaaagaga

SEQ ID NO: 865158 - RNA, 19 nt, Homo sapiens
  misc_RNA (1)...(19): siRNA sense strand
ccaaauugaagaugacuaa

SEQ ID NO: 865159 - RNA, 19 nt, Homo sapiens
  misc_RNA (1)...(19): siRNA sense strand
gagauuugguugaugagau

SEQ ID NO: 865160 - RNA, 19 nt, Homo sapiens
  misc_RNA (1)...(19): siRNA sense strand
ggaaguguauccuguugag

SEQ ID NO: 865161 - RNA, 19 nt, Homo sapiens
  misc_RNA (1)...(19): siRNA sense strand
auacugcacuuauugaaga

SEQ ID NO: 865162 - RNA, 19 nt, Homo sapiens
  misc_RNA (1)...(19): siRNA sense strand
gaacaauaccugguccuau

SEQ ID NO: 865163 - RNA, 19 nt, Homo sapiens
  misc_RNA (1)...(19): siRNA sense strand
ccaacagcauggugauuug

SEQ ID NO: 865164 - RNA, 19 nt, Homo sapiens
  misc_RNA (1)...(19): siRNA sense strand
cugaugaaguuauggguaa

SEQ ID NO: 865165 - RNA, 19 nt, Homo sapiens
  misc_RNA (1)...(19): siRNA sense strand
cagaauagucacaaguuaa

SEQ ID NO: 865166 - RNA, 19 nt, Homo sapiens
  misc_RNA (1)...(19): siRNA sense strand
ggaguaagcauucuucaac

SEQ ID NO: 865167 - RNA, 19 nt, Homo sapiens
  misc_RNA (1)...(19): siRNA sense strand
aaagagagaggaaauuaug

SEQ ID NO: 865168 - RNA, 19 nt, Homo sapiens
  misc_RNA (1)...(19): siRNA sense strand
ugagguaacuugugaacca

SEQ ID NO: 865169 - RNA, 19 nt, Homo sapiens
  misc_RNA (1)...(19): siRNA sense strand
gguggagucuggucacaug

SEQ ID NO: 865170 - RNA, 19 nt, Homo sapiens
  misc_RNA (1)...(19): siRNA sense strand
ggagagacugggaugauga

SEQ ID NO: 865171 - RNA, 19 nt, Homo sapiens
  misc_RNA (1)...(19): siRNA sense strand
gacaagauacugauauaca

SEQ ID NO: 865172 - RNA, 19 nt, Homo sapiens
  misc_RNA (1)...(19): siRNA sense strand
ucaaguuacuguuucuguu

SEQ ID NO: 865173 - RNA, 19 nt, Homo sapiens
  misc_RNA (1)...(19): siRNA sense strand
gaagaugcugaugaaguua

SEQ ID NO: 865174 - RNA, 19 nt, Homo sapiens
  misc_RNA (1)...(19): siRNA sense strand
aaugaugacuacugaaaug

SEQ ID NO: 865175 - RNA, 19 nt, Homo sapiens
  misc_RNA (1)...(19): siRNA sense strand
acaggaguguguguucuua

SEQ ID NO: 865176 - RNA, 19 nt, Homo sapiens
  misc_RNA (1)...(19): siRNA sense strand
cagaagaagcucucaacaa

SEQ ID NO: 865177 - RNA, 19 nt, Homo sapiens
  misc_RNA (1)...(19): siRNA sense strand
caucaucucgucucaaguu

SEQ ID NO: 865178 - RNA, 19 nt, Homo sapiens
  misc_RNA (1)...(19): siRNA sense strand
caaaggcuauggaguaagc

SEQ ID NO: 865179 - RNA, 19 nt, Homo sapiens
  misc_RNA (1)...(19): siRNA sense strand
aacaaaggcuauggaguaa

SEQ ID NO: 865180 - RNA, 19 nt, Homo sapiens
  misc_RNA (1)...(19): siRNA sense strand
gagagaggaaauuaugauu

SEQ ID NO: 865181 - RNA, 19 nt, Homo sapiens
  misc_RNA (1)...(19): siRNA sense strand
gaaacuaaugcaucuaucu

SEQ ID NO: 865182 - RNA, 19 nt, Homo sapiens
  misc_RNA (1)...(19): siRNA sense strand
gauagaagcaaacgucaag

SEQ ID NO: 865183 - RNA, 19 nt, Homo sapiens
  misc_RNA (1)...(19): siRNA sense strand
gugcugguguugaacugua

SEQ ID NO: 865184 - RNA, 19 nt, Homo sapiens
  misc_RNA (1)...(19): siRNA sense strand
cuuccaacauugcaaauau

SEQ ID NO: 865185 - RNA, 19 nt, Homo sapiens
  misc_RNA (1)...(19): siRNA sense strand
acgagaaggugucgcugua

SEQ ID NO: 865186 - RNA, 19 nt, Homo sapiens
  misc_RNA (1)...(19): siRNA sense strand
gcauggugauuuggauuug

SEQ ID NO: 865187 - RNA, 19 nt, Homo sapiens
  misc_RNA (1)...(19): siRNA sense strand
caaguuacuguuucuguug

SEQ ID NO: 865188 - RNA, 19 nt, Homo sapiens
  misc_RNA (1)...(19): siRNA sense strand
gaguuaauaugaagguucu

SEQ ID NO: 865189 - RNA, 19 nt, Homo sapiens
  misc_RNA (1)...(19): siRNA sense strand
ggaacaauaccugguccua

SEQ ID NO: 865190 - RNA, 19 nt, Homo sapiens
  misc_RNA (1)...(19): siRNA sense strand
acuaaugcaucuaucuuug

SEQ ID NO: 865191 - RNA, 19 nt, Homo sapiens
  misc_RNA (1)...(19): siRNA sense strand
uaaucccaguguauucuuu

SEQ ID NO: 865192 - RNA, 19 nt, Homo sapiens
  misc_RNA (1)...(19): siRNA sense strand
aagcauagcuauuuuggaa

SEQ ID NO: 865193 - RNA, 19 nt, Homo sapiens
  misc_RNA (1)...(19): siRNA sense strand
gauuuggcuuuggauaauu

SEQ ID NO: 865194 - RNA, 19 nt, Homo sapiens
  misc_RNA (1)...(19): siRNA sense strand
gauuuacgccuccgaguuc

SEQ ID NO: 865195 - RNA, 19 nt, Homo sapiens
  misc_RNA (1)...(19): siRNA sense strand
aacaauaccugguccuauc

SEQ ID NO: 865196 - RNA, 19 nt, Homo sapiens
  misc_RNA (1)...(19): siRNA sense strand
agauuugguugaugagauu

SEQ ID NO: 865197 - RNA, 19 nt, Homo sapiens
  misc_RNA (1)...(19): siRNA sense strand
uagguggaguuaauaugaa

SEQ ID NO: 865198 - RNA, 19 nt, Homo sapiens
  misc_RNA (1)...(19): siRNA sense strand
ccuggaagcauagcuauuu

SEQ ID NO: 865199 - RNA, 19 nt, Homo sapiens
  misc_RNA (1)...(19): siRNA sense strand
ggaagacuaaucccagugu

SEQ ID NO: 865200 - RNA, 19 nt, Homo sapiens
  misc_RNA (1)...(19): siRNA sense strand
gaugaagaaaguugugaga

SEQ ID NO: 865201 - RNA, 19 nt, Homo sapiens
  misc_RNA (1)...(19): siRNA sense strand
cccaguguauucuuuguga

SEQ ID NO: 865202 - RNA, 19 nt, Homo sapiens
  misc_RNA (1)...(19): siRNA sense strand
ugaaggaacaggagugugu

SEQ ID NO: 865203 - RNA, 19 nt, Homo sapiens
  misc_RNA (1)...(19): siRNA sense strand
cagacacacuucuccaaca

SEQ ID NO: 865204 - RNA, 19 nt, Homo sapiens
  misc_RNA (1)...(19): siRNA sense strand
gagaauuauacugcacuua

SEQ ID NO: 865205 - RNA, 19 nt, Homo sapiens
  misc_RNA (1)...(19): siRNA sense strand
ggauguggcgggacgagaa

SEQ ID NO: 865206 - RNA, 19 nt, Homo sapiens
  misc_RNA (1)...(19): siRNA sense strand
cagaagaugcugaugaagu

SEQ ID NO: 865207 - RNA, 19 nt, Homo sapiens
  misc_RNA (1)...(19): siRNA sense strand
uugcaaauauuccagagau

SEQ ID NO: 865208 - RNA, 19 nt, Homo sapiens
  misc_RNA (1)...(19): siRNA sense strand
uaagcauucuucaaccaau

SEQ ID NO: 865209 - RNA, 19 nt, Homo sapiens
  misc_RNA (1)...(19): siRNA sense strand
gcugacaaugugaaacuaa

SEQ ID NO: 865210 - RNA, 19 nt, Homo sapiens
  misc_RNA (1)...(19): siRNA sense strand
gcaggacuguaaggcagaa

SEQ ID NO: 865211 - RNA, 19 nt, Homo sapiens
  misc_RNA (1)...(19): siRNA sense strand
gcacuuauugaagaaagaa

SEQ ID NO: 865212 - RNA, 19 nt, Homo sapiens
  misc_RNA (1)...(19): siRNA sense strand
caagauacugauauacaug

SEQ ID NO: 865213 - RNA, 19 nt, Homo sapiens
  misc_RNA (1)...(19): siRNA sense strand
gagggacaagauacugaua

SEQ ID NO: 865214 - RNA, 19 nt, Homo sapiens
  misc_RNA (1)...(19): siRNA sense strand
gcagaagaagcucucaaca

SEQ ID NO: 865215 - RNA, 19 nt, Homo sapiens
  misc_RNA (1)...(19): siRNA sense strand
agacuaaucccaguguauu

SEQ ID NO: 865216 - RNA, 19 nt, Homo sapiens
  misc_RNA (1)...(19): siRNA sense strand
guugaacuguauccuggaa

SEQ ID NO: 865217 - RNA, 19 nt, Homo sapiens
  misc_RNA (1)...(19): siRNA sense strand
uaaagggaguuggaaagag

SEQ ID NO: 865218 - RNA, 19 nt, Homo sapiens
  misc_RNA (1)...(19): siRNA sense strand
guucauggaccuuucuuuc

SEQ ID NO: 865219 - RNA, 19 nt, Homo sapiens
  misc_RNA (1)...(19): siRNA sense strand
gggaugaugaagaaaguug

SEQ ID NO: 865220 - RNA, 19 nt, Homo sapiens
  misc_RNA (1)...(19): siRNA sense strand
uuagguggaguuaauauga

SEQ ID NO: 865221 - RNA, 19 nt, Homo sapiens
  misc_RNA (1)...(19): siRNA sense strand
caaagcugacaaugugaaa

SEQ ID NO: 865222 - RNA, 19 nt, Homo sapiens
  misc_RNA (1)...(19): siRNA sense strand
auaucaagcugcaaaucuu

SEQ ID NO: 865223 - RNA, 19 nt, Homo sapiens
  misc_RNA (1)...(19): siRNA sense strand
gguccuaucgcacaacguu

SEQ ID NO: 865224 - RNA, 19 nt, Homo sapiens
  misc_RNA (1)...(19): siRNA sense strand
gaagaagcucucaacaaaa

SEQ ID NO: 865225 - RNA, 19 nt, Homo sapiens
  misc_RNA (1)...(19): siRNA sense strand
ucacuguaauaaccucaga

SEQ ID NO: 865226 - RNA, 19 nt, Homo sapiens
  misc_RNA (1)...(19): siRNA sense strand
gaaagacaaauggcuugga

SEQ ID NO: 865227 - RNA, 19 nt, Homo sapiens
  misc_RNA (1)...(19): siRNA sense strand
gugaaacuaaugcaucuau

SEQ ID NO: 865228 - RNA, 19 nt, Homo sapiens
  misc_RNA (1)...(19): siRNA sense strand
uauaguggagauacaguaa

SEQ ID NO: 865229 - RNA, 19 nt, Homo sapiens
  misc_RNA (1)...(19): siRNA sense strand
caggaaaucugcuuaaaga

SEQ ID NO: 865230 - RNA, 19 nt, Homo sapiens
  misc_RNA (1)...(19): siRNA sense strand
ccgcagcgcucccuacaaa

SEQ ID NO: 865231 - RNA, 19 nt, Homo sapiens
  misc_RNA (1)...(19): siRNA sense strand
cuacaaaggcucugagauu

SEQ ID NO: 865232 - RNA, 19 nt, Homo sapiens
  misc_RNA (1)...(19): siRNA sense strand
gaagaagaaauucaggaaa

SEQ ID NO: 865233 - RNA, 19 nt, Homo sapiens
  misc_RNA (1)...(19): siRNA sense strand
gaaagcacgcuaucgaaga

SEQ ID NO: 865234 - RNA, 19 nt, Homo sapiens
  misc_RNA (1)...(19): siRNA sense strand
gaagaaaagucauuacuac

SEQ ID NO: 865235 - RNA, 19 nt, Homo sapiens
  misc_RNA (1)...(19): siRNA sense strand
ucaguggucucaauguauu

SEQ ID NO: 865236 - RNA, 19 nt, Homo sapiens
  misc_RNA (1)...(19): siRNA sense strand
ggagaucccuuugcccaau

SEQ ID NO: 865237 - RNA, 19 nt, Homo sapiens
  misc_RNA (1)...(19): siRNA sense strand
gaaaagucauuacuacaga

SEQ ID NO: 865238 - RNA, 19 nt, Homo sapiens
  misc_RNA (1)...(19): siRNA sense strand
ccaaguagcugggauugca

SEQ ID NO: 865239 - RNA, 19 nt, Homo sapiens
  misc_RNA (1)...(19): siRNA sense strand
gcacaggccgucgcuauga

SEQ ID NO: 865240 - RNA, 19 nt, Homo sapiens
  misc_RNA (1)...(19): siRNA sense strand
uggagcaacugaagaagaa

SEQ ID NO: 865241 - RNA, 19 nt, Homo sapiens
  misc_RNA (1)...(19): siRNA sense strand
ugucaguggucucaaugua

SEQ ID NO: 865242 - RNA, 19 nt, Homo sapiens
  misc_RNA (1)...(19): siRNA sense strand
uacaaaggcucugagauuc

SEQ ID NO: 865243 - RNA, 19 nt, Homo sapiens
  misc_RNA (1)...(19): siRNA sense strand
gugaacggcuugccaaagg

SEQ ID NO: 865244 - RNA, 19 nt, Homo sapiens
  misc_RNA (1)...(19): siRNA sense strand
aaagaaagcacgcuaucga

SEQ ID NO: 865245 - RNA, 19 nt, Homo sapiens
  misc_RNA (1)...(19): siRNA sense strand
gcagcuuuaugcucggaaa

SEQ ID NO: 865246 - RNA, 19 nt, Homo sapiens
  misc_RNA (1)...(19): siRNA sense strand
gaagaaauucaggaaaucu

SEQ ID NO: 865247 - RNA, 19 nt, Homo sapiens
  misc_RNA (1)...(19): siRNA sense strand
agaagaaauucaggaaauc

SEQ ID NO: 865248 - RNA, 19 nt, Homo sapiens
  misc_RNA (1)...(19): siRNA sense strand
gacagcggcuccacaucug

SEQ ID NO: 865249 - RNA, 19 nt, Homo sapiens
  misc_RNA (1)...(19): siRNA sense strand
gaucagcgucuccuaagag

SEQ ID NO: 865250 - RNA, 19 nt, Homo sapiens
  misc_RNA (1)...(19): siRNA sense strand
ccuggagggugaaguggaa

SEQ ID NO: 865251 - RNA, 19 nt, Homo sapiens
  misc_RNA (1)...(19): siRNA sense strand
ccaugucaguggucucaau

SEQ ID NO: 865252 - RNA, 19 nt, Homo sapiens
  misc_RNA (1)...(19): siRNA sense strand
gagcaacugaagaagaaau

SEQ ID NO: 865253 - RNA, 19 nt, Homo sapiens
  misc_RNA (1)...(19): siRNA sense strand
ugccucagccucccaagua

SEQ ID NO: 865254 - RNA, 19 nt, Homo sapiens
  misc_RNA (1)...(19): siRNA sense strand
aaagcacgcuaucgaagag

SEQ ID NO: 865255 - RNA, 19 nt, Homo sapiens
  misc_RNA (1)...(19): siRNA sense strand
cgaucagcgucuccuaaga

SEQ ID NO: 865256 - RNA, 19 nt, Homo sapiens
  misc_RNA (1)...(19): siRNA sense strand
gagaucccuuugcccaauc

SEQ ID NO: 865257 - RNA, 19 nt, Homo sapiens
  misc_RNA (1)...(19): siRNA sense strand
ggacgcuggagaucccuuu

SEQ ID NO: 865258 - RNA, 19 nt, Homo sapiens
  misc_RNA (1)...(19): siRNA sense strand
caucgccugugccugcauu

SEQ ID NO: 865259 - RNA, 19 nt, Homo sapiens
  misc_RNA (1)...(19): siRNA sense strand
gcucagagucucgcugugu

SEQ ID NO: 865260 - RNA, 19 nt, Homo sapiens
  misc_RNA (1)...(19): siRNA sense strand
ugacagcggcuccacaucu

SEQ ID NO: 865261 - RNA, 19 nt, Homo sapiens
  misc_RNA (1)...(19): siRNA sense strand
ucucggagccggaguucuu

SEQ ID NO: 865262 - RNA, 19 nt, Homo sapiens
  misc_RNA (1)...(19): siRNA sense strand
aagcuccgccuaccagauu

SEQ ID NO: 865263 - RNA, 19 nt, Homo sapiens
  misc_RNA (1)...(19): siRNA sense strand
guuuggagcaacugaagaa

SEQ ID NO: 865264 - RNA, 19 nt, Homo sapiens
  misc_RNA (1)...(19): siRNA sense strand
gcagcgcucccuacaaagg

SEQ ID NO: 865265 - RNA, 19 nt, Homo sapiens
  misc_RNA (1)...(19): siRNA sense strand
acacaggugcuggauggua

SEQ ID NO: 865266 - RNA, 19 nt, Homo sapiens
  misc_RNA (1)...(19): siRNA sense strand
aagaaagcacgcuaucgaa

SEQ ID NO: 865267 - RNA, 19 nt, Homo sapiens
  misc_RNA (1)...(19): siRNA sense strand
gccugugccugcauuuauc

SEQ ID NO: 865268 - RNA, 19 nt, Homo sapiens
  misc_RNA (1)...(19): siRNA sense strand
ucaggaaaucugcuuaaag

SEQ ID NO: 865269 - RNA, 19 nt, Homo sapiens
  misc_RNA (1)...(19): siRNA sense strand
ccagaagccacacaagucu

SEQ ID NO: 865270 - RNA, 19 nt, Homo sapiens
  misc_RNA (1)...(19): siRNA sense strand
gcaacugaagaagaaauuc

SEQ ID NO: 865271 - RNA, 19 nt, Homo sapiens
  misc_RNA (1)...(19): siRNA sense strand
uucaggaaaucugcuuaaa

SEQ ID NO: 865272 - RNA, 19 nt, Homo sapiens
  misc_RNA (1)...(19): siRNA sense strand
agucauuacuacagagauc

SEQ ID NO: 865273 - RNA, 19 nt, Homo sapiens
  misc_RNA (1)...(19): siRNA sense strand
ccauugguuucuuuuguuu

SEQ ID NO: 865274 - RNA, 19 nt, Homo sapiens
  misc_RNA (1)...(19): siRNA sense strand
gaacagaaauggacuaugu

SEQ ID NO: 865275 - RNA, 19 nt, Homo sapiens
  misc_RNA (1)...(19): siRNA sense strand
caaauuauccagugaguuu

SEQ ID NO: 865276 - RNA, 19 nt, Homo sapiens
  misc_RNA (1)...(19): siRNA sense strand
guaauggccuuucuuauac

SEQ ID NO: 865277 - RNA, 19 nt, Homo sapiens
  misc_RNA (1)...(19): siRNA sense strand
ggacuauguugaagacaaa

SEQ ID NO: 865278 - RNA, 19 nt, Homo sapiens
  misc_RNA (1)...(19): siRNA sense strand
uguaauggccuuucuuaua

SEQ ID NO: 865279 - RNA, 19 nt, Homo sapiens
  misc_RNA (1)...(19): siRNA sense strand
gaaauggacuauguugaag

SEQ ID NO: 865280 - RNA, 19 nt, Homo sapiens
  misc_RNA (1)...(19): siRNA sense strand
gugaguuuguguucaauaa

SEQ ID NO: 865281 - RNA, 19 nt, Homo sapiens
  misc_RNA (1)...(19): siRNA sense strand
gcuguaauggccuuucuua

SEQ ID NO: 865282 - RNA, 19 nt, Homo sapiens
  misc_RNA (1)...(19): siRNA sense strand
gcauguagguguaaaaguu

SEQ ID NO: 865283 - RNA, 19 nt, Homo sapiens
  misc_RNA (1)...(19): siRNA sense strand
ccagugaguuuguguucaa

SEQ ID NO: 865284 - RNA, 19 nt, Homo sapiens
  misc_RNA (1)...(19): siRNA sense strand
gaaaagaaagcacagcuaa

SEQ ID NO: 865285 - RNA, 19 nt, Homo sapiens
  misc_RNA (1)...(19): siRNA sense strand
gaugucggcuuccuuaguc

SEQ ID NO: 865286 - RNA, 19 nt, Homo sapiens
  misc_RNA (1)...(19): siRNA sense strand
caagauggagucagaguau

SEQ ID NO: 865287 - RNA, 19 nt, Homo sapiens
  misc_RNA (1)...(19): siRNA sense strand
gaagaaguuauucaagaug

SEQ ID NO: 865288 - RNA, 19 nt, Homo sapiens
  misc_RNA (1)...(19): siRNA sense strand
agaaauggacuauguugaa

SEQ ID NO: 865289 - RNA, 19 nt, Homo sapiens
  misc_RNA (1)...(19): siRNA sense strand
aaaaggagauucugaugaa

SEQ ID NO: 865290 - RNA, 19 nt, Homo sapiens
  misc_RNA (1)...(19): siRNA sense strand
gaaagcacagcuaacacuu

SEQ ID NO: 865291 - RNA, 19 nt, Homo sapiens
  misc_RNA (1)...(19): siRNA sense strand
aagauaagccugagcaugu

SEQ ID NO: 865292 - RNA, 19 nt, Homo sapiens
  misc_RNA (1)...(19): siRNA sense strand
agauaagccugagcaugua

SEQ ID NO: 865293 - RNA, 19 nt, Homo sapiens
  misc_RNA (1)...(19): siRNA sense strand
guggagaaagcuuuaauau

SEQ ID NO: 865294 - RNA, 19 nt, Homo sapiens
  misc_RNA (1)...(19): siRNA sense strand
caauaacccaaacaucaaa

SEQ ID NO: 865295 - RNA, 19 nt, Homo sapiens
  misc_RNA (1)...(19): siRNA sense strand
ucaauaacccaaacaucaa

SEQ ID NO: 865296 - RNA, 19 nt, Homo sapiens
  misc_RNA (1)...(19): siRNA sense strand
gacaaauuauccagugagu

SEQ ID NO: 865297 - RNA, 19 nt, Homo sapiens
  misc_RNA (1)...(19): siRNA sense strand
aaagaaagcacagcuaaca

SEQ ID NO: 865298 - RNA, 19 nt, Homo sapiens
  misc_RNA (1)...(19): siRNA sense strand
gucagaguauucaucgaaa

SEQ ID NO: 865299 - RNA, 19 nt, Homo sapiens
  misc_RNA (1)...(19): siRNA sense strand
gcaacuguccgggcuguga

SEQ ID NO: 865300 - RNA, 19 nt, Homo sapiens
  misc_RNA (1)...(19): siRNA sense strand
uauucaagauggagucaga

SEQ ID NO: 865301 - RNA, 19 nt, Homo sapiens
  misc_RNA (1)...(19): siRNA sense strand
aagcacagcuaacacuuuu

SEQ ID NO: 865302 - RNA, 19 nt, Homo sapiens
  misc_RNA (1)...(19): siRNA sense strand
ucaagauggagucagagua

SEQ ID NO: 865303 - RNA, 19 nt, Homo sapiens
  misc_RNA (1)...(19): siRNA sense strand
uggacuauguugaagacaa

SEQ ID NO: 865304 - RNA, 19 nt, Homo sapiens
  misc_RNA (1)...(19): siRNA sense strand
aagacaaauuauccaguga

SEQ ID NO: 865305 - RNA, 19 nt, Homo sapiens
  misc_RNA (1)...(19): siRNA sense strand
cagaaauggacuauguuga

SEQ ID NO: 865306 - RNA, 19 nt, Homo sapiens
  misc_RNA (1)...(19): siRNA sense strand
acagaaauggacuauguug

SEQ ID NO: 865307 - RNA, 19 nt, Homo sapiens
  misc_RNA (1)...(19): siRNA sense strand
cagcaguaaacaagauaaa

SEQ ID NO: 865308 - RNA, 19 nt, Homo sapiens
  misc_RNA (1)...(19): siRNA sense strand
caaaaggagauucugauga

SEQ ID NO: 865309 - RNA, 19 nt, Homo sapiens
  misc_RNA (1)...(19): siRNA sense strand
uucaauaacccaaacauca

SEQ ID NO: 865310 - RNA, 19 nt, Homo sapiens
  misc_RNA (1)...(19): siRNA sense strand
uguggagaaagcuuuaaua

SEQ ID NO: 865311 - RNA, 19 nt, Homo sapiens
  misc_RNA (1)...(19): siRNA sense strand
cuucagcaguaaacaagau

SEQ ID NO: 865312 - RNA, 19 nt, Homo sapiens
  misc_RNA (1)...(19): siRNA sense strand
gccugagcauguaggugua

SEQ ID NO: 865313 - RNA, 19 nt, Homo sapiens
  misc_RNA (1)...(19): siRNA sense strand
gggcuguaauggccuuucu

SEQ ID NO: 865314 - RNA, 19 nt, Homo sapiens
  misc_RNA (1)...(19): siRNA sense strand
gaguauucaucgaaaagaa

SEQ ID NO: 865315 - RNA, 19 nt, Homo sapiens
  misc_RNA (1)...(19): siRNA sense strand
agaaguuauucaagaugga

SEQ ID NO: 865316 - RNA, 19 nt, Homo sapiens
  misc_RNA (1)...(19): siRNA sense strand
aagauggagucagaguauu

SEQ ID NO: 865317 - RNA, 19 nt, Homo sapiens
  misc_RNA (1)...(19): siRNA sense strand
uggccuuucuuauacucua

SEQ ID NO: 865318 - RNA, 19 nt, Homo sapiens
  misc_RNA (1)...(19): siRNA sense strand
gaguuuguguucaauaacc

SEQ ID NO: 865319 - RNA, 19 nt, Homo sapiens
  misc_RNA (1)...(19): siRNA sense strand
gauggagucagaguauuca

SEQ ID NO: 865320 - RNA, 19 nt, Homo sapiens
  misc_RNA (1)...(19): siRNA sense strand
aaggagauucugaugaaga

SEQ ID NO: 865321 - RNA, 19 nt, Homo sapiens
  misc_RNA (1)...(19): siRNA sense strand
agucagaguauucaucgaa

SEQ ID NO: 865322 - RNA, 19 nt, Homo sapiens
  misc_RNA (1)...(19): siRNA sense strand
gauaagccugagcauguag

SEQ ID NO: 865323 - RNA, 19 nt, Homo sapiens
  misc_RNA (1)...(19): siRNA sense strand
acuuguggcuguggagaaa

SEQ ID NO: 865324 - RNA, 19 nt, Homo sapiens
  misc_RNA (1)...(19): siRNA sense strand
gaaggaggcugcuguguua

SEQ ID NO: 865325 - RNA, 19 nt, Homo sapiens
  misc_RNA (1)...(19): siRNA sense strand
ugacagagcucacgcuuga

SEQ ID NO: 865326 - RNA, 19 nt, Homo sapiens
  misc_RNA (1)...(19): siRNA sense strand
gagcagggcagaagauuua

SEQ ID NO: 865327 - RNA, 19 nt, Homo sapiens
  misc_RNA (1)...(19): siRNA sense strand
gaacuuccaucuuccagaa

SEQ ID NO: 865328 - RNA, 19 nt, Homo sapiens
  misc_RNA (1)...(19): siRNA sense strand
gcuacaaacugaacaaaga

SEQ ID NO: 865329 - RNA, 19 nt, Homo sapiens
  misc_RNA (1)...(19): siRNA sense strand
ggacuugacugugaaaugu

SEQ ID NO: 865330 - RNA, 19 nt, Homo sapiens
  misc_RNA (1)...(19): siRNA sense strand
gauuuaagcucaaguucuu

SEQ ID NO: 865331 - RNA, 19 nt, Homo sapiens
  misc_RNA (1)...(19): siRNA sense strand
ggagacagaugcuggugaa

SEQ ID NO: 865332 - RNA, 19 nt, Homo sapiens
  misc_RNA (1)...(19): siRNA sense strand
acaaagagcuggagaucug

SEQ ID NO: 865333 - RNA, 19 nt, Homo sapiens
  misc_RNA (1)...(19): siRNA sense strand
caagagcacucaugguuca

SEQ ID NO: 865334 - RNA, 19 nt, Homo sapiens
  misc_RNA (1)...(19): siRNA sense strand
cgaccaaacucaaagaugu

SEQ ID NO: 865335 - RNA, 19 nt, Homo sapiens
  misc_RNA (1)...(19): siRNA sense strand
gaacuggucaaaccugaaa

SEQ ID NO: 865336 - RNA, 19 nt, Homo sapiens
  misc_RNA (1)...(19): siRNA sense strand
gcugugaucuugccuaaag

SEQ ID NO: 865337 - RNA, 19 nt, Homo sapiens
  misc_RNA (1)...(19): siRNA sense strand
cuagaacaauccuugaauu

SEQ ID NO: 865338 - RNA, 19 nt, Homo sapiens
  misc_RNA (1)...(19): siRNA sense strand
uagaagcacuagcuaauca

SEQ ID NO: 865339 - RNA, 19 nt, Homo sapiens
  misc_RNA (1)...(19): siRNA sense strand
aaaccaaggcucuauauau

SEQ ID NO: 865340 - RNA, 19 nt, Homo sapiens
  misc_RNA (1)...(19): siRNA sense strand
gcaaauccaauguuccaaa

SEQ ID NO: 865341 - RNA, 19 nt, Homo sapiens
  misc_RNA (1)...(19): siRNA sense strand
gacagaugcuggugaacuu

SEQ ID NO: 865342 - RNA, 19 nt, Homo sapiens
  misc_RNA (1)...(19): siRNA sense strand
agacaauaguccucucuuu

SEQ ID NO: 865343 - RNA, 19 nt, Homo sapiens
  misc_RNA (1)...(19): siRNA sense strand
gaacaaagagcuggagauc

SEQ ID NO: 865344 - RNA, 19 nt, Homo sapiens
  misc_RNA (1)...(19): siRNA sense strand
cgaaaagcauucagacaua

SEQ ID NO: 865345 - RNA, 19 nt, Homo sapiens
  misc_RNA (1)...(19): siRNA sense strand
ugaauuggcucgguauuuc

SEQ ID NO: 865346 - RNA, 19 nt, Homo sapiens
  misc_RNA (1)...(19): siRNA sense strand
guucuuagccaaaguuauu

SEQ ID NO: 865347 - RNA, 19 nt, Homo sapiens
  misc_RNA (1)...(19): siRNA sense strand
gaaaagcauucagacauaa

SEQ ID NO: 865348 - RNA, 19 nt, Homo sapiens
  misc_RNA (1)...(19): siRNA sense strand
gaguuuggaugucuucgaa

SEQ ID NO: 865349 - RNA, 19 nt, Homo sapiens
  misc_RNA (1)...(19): siRNA sense strand
aaacacagcagaaguacuu

SEQ ID NO: 865350 - RNA, 19 nt, Homo sapiens
  misc_RNA (1)...(19): siRNA sense strand
gaacguuucacuuuccauu

SEQ ID NO: 865351 - RNA, 19 nt, Homo sapiens
  misc_RNA (1)...(19): siRNA sense strand
gcagaagauuuaagcucaa

SEQ ID NO: 865352 - RNA, 19 nt, Homo sapiens
  misc_RNA (1)...(19): siRNA sense strand
gaagauuuaagcucaaguu

SEQ ID NO: 865353 - RNA, 19 nt, Homo sapiens
  misc_RNA (1)...(19): siRNA sense strand
gugacacccucgugaauga

SEQ ID NO: 865354 - RNA, 19 nt, Homo sapiens
  misc_RNA (1)...(19): siRNA sense strand
aaagugggcuugaccagau

SEQ ID NO: 865355 - RNA, 19 nt, Homo sapiens
  misc_RNA (1)...(19): siRNA sense strand
gacaauaguccucucuuug

SEQ ID NO: 865356 - RNA, 19 nt, Homo sapiens
  misc_RNA (1)...(19): siRNA sense strand
gaucaaguggacagagaua

SEQ ID NO: 865357 - RNA, 19 nt, Homo sapiens
  misc_RNA (1)...(19): siRNA sense strand
ggaaggagauucugaaaac

SEQ ID NO: 865358 - RNA, 19 nt, Homo sapiens
  misc_RNA (1)...(19): siRNA sense strand
gauaucaacugucuaugcu

SEQ ID NO: 865359 - RNA, 19 nt, Homo sapiens
  misc_RNA (1)...(19): siRNA sense strand
gugaauugcugaaguaugc

SEQ ID NO: 865360 - RNA, 19 nt, Homo sapiens
  misc_RNA (1)...(19): siRNA sense strand
ugagucagcuacacuuuua

SEQ ID NO: 865361 - RNA, 19 nt, Homo sapiens
  misc_RNA (1)...(19): siRNA sense strand
ccuggaagcugugaucuug

SEQ ID NO: 865362 - RNA, 19 nt, Homo sapiens
  misc_RNA (1)...(19): siRNA sense strand
cacagaagaugcuagaaca

SEQ ID NO: 865363 - RNA, 19 nt, Homo sapiens
  misc_RNA (1)...(19): siRNA sense strand
caauaguccucucuuugga

SEQ ID NO: 865364 - RNA, 19 nt, Homo sapiens
  misc_RNA (1)...(19): siRNA sense strand
aaugagaacguuucacuuu

SEQ ID NO: 865365 - RNA, 19 nt, Homo sapiens
  misc_RNA (1)...(19): siRNA sense strand
aaccaaggcucuauauauc

SEQ ID NO: 865366 - RNA, 19 nt, Homo sapiens
  misc_RNA (1)...(19): siRNA sense strand
ccgcuuaucuaccauuuua

SEQ ID NO: 865367 - RNA, 19 nt, Homo sapiens
  misc_RNA (1)...(19): siRNA sense strand
ugugugaauugcugaagua

SEQ ID NO: 865368 - RNA, 19 nt, Homo sapiens
  misc_RNA (1)...(19): siRNA sense strand
gaccaaacucaaagaugua

SEQ ID NO: 865369 - RNA, 19 nt, Homo sapiens
  misc_RNA (1)...(19): siRNA sense strand
ccaaggcucuauauaucug

SEQ ID NO: 865370 - RNA, 19 nt, Homo sapiens
  misc_RNA (1)...(19): siRNA sense strand
gacaaaggaggaaaugaga

SEQ ID NO: 865371 - RNA, 19 nt, Homo sapiens
  misc_RNA (1)...(19): siRNA sense strand
ggucaaaccugaaaacaag

SEQ ID NO: 865372 - RNA, 19 nt, Homo sapiens
  misc_RNA (1)...(19): siRNA sense strand
gauacaucguugcuuuaug

SEQ ID NO: 865373 - RNA, 19 nt, Homo sapiens
  misc_RNA (1)...(19): siRNA sense strand
agaacuaaaucuagaagca

SEQ ID NO: 865374 - RNA, 19 nt, Homo sapiens
  misc_RNA (1)...(19): siRNA sense strand
agacagacuuggucaugau

SEQ ID NO: 865375 - RNA, 19 nt, Homo sapiens
  misc_RNA (1)...(19): siRNA sense strand
cagguucuauuuggaguuu

SEQ ID NO: 865376 - RNA, 19 nt, Homo sapiens
  misc_RNA (1)...(19): siRNA sense strand
ucacugaggagaugaacaa

SEQ ID NO: 865377 - RNA, 19 nt, Homo sapiens
  misc_RNA (1)...(19): siRNA sense strand
gcauuguucaguucucuuu

SEQ ID NO: 865378 - RNA, 19 nt, Homo sapiens
  misc_RNA (1)...(19): siRNA sense strand
aaaacaagauucuggacua

SEQ ID NO: 865379 - RNA, 19 nt, Homo sapiens
  misc_RNA (1)...(19): siRNA sense strand
gcugcuguguuauggauga

SEQ ID NO: 865380 - RNA, 19 nt, Homo sapiens
  misc_RNA (1)...(19): siRNA sense strand
ggagaucugcccaagacaa

SEQ ID NO: 865381 - RNA, 19 nt, Homo sapiens
  misc_RNA (1)...(19): siRNA sense strand
acugacaacugugaaguaa

SEQ ID NO: 865382 - RNA, 19 nt, Homo sapiens
  misc_RNA (1)...(19): siRNA sense strand
ccagaaauugucaaacuau

SEQ ID NO: 865383 - RNA, 19 nt, Homo sapiens
  misc_RNA (1)...(19): siRNA sense strand
uugcagaacuaaaucuaga

SEQ ID NO: 865384 - RNA, 19 nt, Homo sapiens
  misc_RNA (1)...(19): siRNA sense strand
cagacagacuuggucauga

SEQ ID NO: 865385 - RNA, 19 nt, Homo sapiens
  misc_RNA (1)...(19): siRNA sense strand
aagcugugaucuugccuaa

SEQ ID NO: 865386 - RNA, 19 nt, Homo sapiens
  misc_RNA (1)...(19): siRNA sense strand
ucaaagaacagcuauugca

SEQ ID NO: 865387 - RNA, 19 nt, Homo sapiens
  misc_RNA (1)...(19): siRNA sense strand
ugaagaggcuguuuaaaag

SEQ ID NO: 865388 - RNA, 19 nt, Homo sapiens
  misc_RNA (1)...(19): siRNA sense strand
uccagaaauugucaaacua

SEQ ID NO: 865389 - RNA, 19 nt, Homo sapiens
  misc_RNA (1)...(19): siRNA sense strand
caaauccaauguuccaaaa

SEQ ID NO: 865390 - RNA, 19 nt, Homo sapiens
  misc_RNA (1)...(19): siRNA sense strand
cagcaggcccucaacauuc

SEQ ID NO: 865391 - RNA, 19 nt, Homo sapiens
  misc_RNA (1)...(19): siRNA sense strand
cuggugaacuuccaucuuc

SEQ ID NO: 865392 - RNA, 19 nt, Homo sapiens
  misc_RNA (1)...(19): siRNA sense strand
agaagaugcuagaacaauc

SEQ ID NO: 865393 - RNA, 19 nt, Homo sapiens
  misc_RNA (1)...(19): siRNA sense strand
auugauacaucguugcuuu

SEQ ID NO: 865394 - RNA, 19 nt, Homo sapiens
  misc_RNA (1)...(19): siRNA sense strand
gaaugagucagcuacacuu

SEQ ID NO: 865395 - RNA, 19 nt, Homo sapiens
  misc_RNA (1)...(19): siRNA sense strand
ccgcuugccuccaccauca

SEQ ID NO: 865396 - RNA, 19 nt, Homo sapiens
  misc_RNA (1)...(19): siRNA sense strand
ccagcaggcccucaacauu

SEQ ID NO: 865397 - RNA, 19 nt, Homo sapiens
  misc_RNA (1)...(19): siRNA sense strand
ugaaggaggcugcuguguu

SEQ ID NO: 865398 - RNA, 19 nt, Homo sapiens
  misc_RNA (1)...(19): siRNA sense strand
aaguauggcucuaagaaag

SEQ ID NO: 865399 - RNA, 19 nt, Homo sapiens
  misc_RNA (1)...(19): siRNA sense strand
gcugaaguaugcaguucug

SEQ ID NO: 865400 - RNA, 19 nt, Homo sapiens
  misc_RNA (1)...(19): siRNA sense strand
ggaggcugcuguguuaugg

SEQ ID NO: 865401 - RNA, 19 nt, Homo sapiens
  misc_RNA (1)...(19): siRNA sense strand
ugucuaugcugggccauuu

SEQ ID NO: 865402 - RNA, 19 nt, Homo sapiens
  misc_RNA (1)...(19): siRNA sense strand
agagauaucaacugucuau

SEQ ID NO: 865403 - RNA, 19 nt, Homo sapiens
  misc_RNA (1)...(19): siRNA sense strand
gggccacuccuuagauuug

SEQ ID NO: 865404 - RNA, 19 nt, Homo sapiens
  misc_RNA (1)...(19): siRNA sense strand
aaaguauggcucuaagaaa

SEQ ID NO: 865405 - RNA, 19 nt, Homo sapiens
  misc_RNA (1)...(19): siRNA sense strand
gucaaacuauuaagugucu

SEQ ID NO: 865406 - RNA, 19 nt, Homo sapiens
  misc_RNA (1)...(19): siRNA sense strand
gaaagccgguugggaucuc

SEQ ID NO: 865407 - RNA, 19 nt, Homo sapiens
  misc_RNA (1)...(19): siRNA sense strand
gcaggcaggccccaaauaa

SEQ ID NO: 865408 - RNA, 19 nt, Homo sapiens
  misc_RNA (1)...(19): siRNA sense strand
uagcuaaucaccaagaaau

SEQ ID NO: 865409 - RNA, 19 nt, Homo sapiens
  misc_RNA (1)...(19): siRNA sense strand
gcuagaacaauccuugaau

SEQ ID NO: 865410 - RNA, 19 nt, Homo sapiens
  misc_RNA (1)...(19): siRNA sense strand
gcucaaguucuuagccaaa

SEQ ID NO: 865411 - RNA, 19 nt, Homo sapiens
  misc_RNA (1)...(19): siRNA sense strand
gcacugcuuccuccugaug

SEQ ID NO: 865412 - RNA, 19 nt, Homo sapiens
  misc_RNA (1)...(19): siRNA sense strand
ggacuaccucaccagcuuu

SEQ ID NO: 865413 - RNA, 19 nt, Homo sapiens
  misc_RNA (1)...(19): siRNA sense strand
ggaggaaaugagaacguuu

SEQ ID NO: 865414 - RNA, 19 nt, Homo sapiens
  misc_RNA (1)...(19): siRNA sense strand
gagaucugcccaagacaau

SEQ ID NO: 865415 - RNA, 19 nt, Homo sapiens
  misc_RNA (1)...(19): siRNA sense strand
uuggaaagcucuacaacag

SEQ ID NO: 865416 - RNA, 19 nt, Homo sapiens
  misc_RNA (1)...(19): siRNA sense strand
gcaaggacuggaagcugaa

SEQ ID NO: 865417 - RNA, 19 nt, Homo sapiens
  misc_RNA (1)...(19): siRNA sense strand
ucuuuggacuugacuguga

SEQ ID NO: 865418 - RNA, 19 nt, Homo sapiens
  misc_RNA (1)...(19): siRNA sense strand
gaaaaccaaggcucuauau

SEQ ID NO: 865419 - RNA, 19 nt, Homo sapiens
  misc_RNA (1)...(19): siRNA sense strand
gauguacagaggcaguuaa

SEQ ID NO: 865420 - RNA, 19 nt, Homo sapiens
  misc_RNA (1)...(19): siRNA sense strand
ugacaaaggaggaaaugag

SEQ ID NO: 865421 - RNA, 19 nt, Homo sapiens
  misc_RNA (1)...(19): siRNA sense strand
gggaagggaccgagagaca

SEQ ID NO: 865422 - RNA, 19 nt, Homo sapiens
  misc_RNA (1)...(19): siRNA sense strand
ugacaacugugaaguaacc

SEQ ID NO: 865423 - RNA, 19 nt, Homo sapiens
  misc_RNA (1)...(19): siRNA sense strand
ccaaauguaaugguucuau

SEQ ID NO: 865424 - RNA, 19 nt, Homo sapiens
  misc_RNA (1)...(19): siRNA sense strand
gcaaagacauuagauagga

SEQ ID NO: 865425 - RNA, 19 nt, Homo sapiens
  misc_RNA (1)...(19): siRNA sense strand
ugaaacaccucucuccaua

SEQ ID NO: 865426 - RNA, 19 nt, Homo sapiens
  misc_RNA (1)...(19): siRNA sense strand
caagucacaugaugaaauu

SEQ ID NO: 865427 - RNA, 19 nt, Homo sapiens
  misc_RNA (1)...(19): siRNA sense strand
gaacaaacuagacgugaaa

SEQ ID NO: 865428 - RNA, 19 nt, Homo sapiens
  misc_RNA (1)...(19): siRNA sense strand
gaacaagcaagucacauga

SEQ ID NO: 865429 - RNA, 19 nt, Homo sapiens
  misc_RNA (1)...(19): siRNA sense strand
caugauagauuggauguau

SEQ ID NO: 865430 - RNA, 19 nt, Homo sapiens
  misc_RNA (1)...(19): siRNA sense strand
gggaggaccuagaggcaaa

SEQ ID NO: 865431 - RNA, 19 nt, Homo sapiens
  misc_RNA (1)...(19): siRNA sense strand
gaaaggugcagcuguggaa

SEQ ID NO: 865432 - RNA, 19 nt, Homo sapiens
  misc_RNA (1)...(19): siRNA sense strand
gcaagucacaugaugaaau

SEQ ID NO: 865433 - RNA, 19 nt, Homo sapiens
  misc_RNA (1)...(19): siRNA sense strand
ugaggaacauuguauuugu

SEQ ID NO: 865434 - RNA, 19 nt, Homo sapiens
  misc_RNA (1)...(19): siRNA sense strand
aaacaccucucuccauaca

SEQ ID NO: 865435 - RNA, 19 nt, Homo sapiens
  misc_RNA (1)...(19): siRNA sense strand
acaccucucuccauacaaa

SEQ ID NO: 865436 - RNA, 19 nt, Homo sapiens
  misc_RNA (1)...(19): siRNA sense strand
gaggaacauuguauuugug

SEQ ID NO: 865437 - RNA, 19 nt, Homo sapiens
  misc_RNA (1)...(19): siRNA sense strand
cagauuucaugauagauug

SEQ ID NO: 865438 - RNA, 19 nt, Homo sapiens
  misc_RNA (1)...(19): siRNA sense strand
gaggcaaagacauuagaua

SEQ ID NO: 865439 - RNA, 19 nt, Homo sapiens
  misc_RNA (1)...(19): siRNA sense strand
acaagcaagucacaugaug

SEQ ID NO: 865440 - RNA, 19 nt, Homo sapiens
  misc_RNA (1)...(19): siRNA sense strand
agaacaaacuagacgugaa

SEQ ID NO: 865441 - RNA, 19 nt, Homo sapiens
  misc_RNA (1)...(19): siRNA sense strand
ggaaagagaugggcaaaac

SEQ ID NO: 865442 - RNA, 19 nt, Homo sapiens
  misc_RNA (1)...(19): siRNA sense strand
ggaccuagaggcaaagaca

SEQ ID NO: 865443 - RNA, 19 nt, Homo sapiens
  misc_RNA (1)...(19): siRNA sense strand
ccagauuucaugauagauu

SEQ ID NO: 865444 - RNA, 19 nt, Homo sapiens
  misc_RNA (1)...(19): siRNA sense strand
gauaggagaccaccagaac

SEQ ID NO: 865445 - RNA, 19 nt, Homo sapiens
  misc_RNA (1)...(19): siRNA sense strand
gugcagcuguggaaaugga

SEQ ID NO: 865446 - RNA, 19 nt, Homo sapiens
  misc_RNA (1)...(19): siRNA sense strand
aaauagggagcuacuuaaa

SEQ ID NO: 865447 - RNA, 19 nt, Homo sapiens
  misc_RNA (1)...(19): siRNA sense strand
caagcaagucacaugauga

SEQ ID NO: 865448 - RNA, 19 nt, Homo sapiens
  misc_RNA (1)...(19): siRNA sense strand
ugaacaagcaagucacaug

SEQ ID NO: 865449 - RNA, 19 nt, Homo sapiens
  misc_RNA (1)...(19): siRNA sense strand
gggagcuacuuaaaauuuu

SEQ ID NO: 865450 - RNA, 19 nt, Homo sapiens
  misc_RNA (1)...(19): siRNA sense strand
caaacuagacgugaaaggu

SEQ ID NO: 865451 - RNA, 19 nt, Homo sapiens
  misc_RNA (1)...(19): siRNA sense strand
ccuagaggcaaagacauua

SEQ ID NO: 865452 - RNA, 19 nt, Homo sapiens
  misc_RNA (1)...(19): siRNA sense strand
uaggagaccaccagaacaa

SEQ ID NO: 865453 - RNA, 19 nt, Homo sapiens
  misc_RNA (1)...(19): siRNA sense strand
ggaacauuguauuugugau

SEQ ID NO: 865454 - RNA, 19 nt, Homo sapiens
  misc_RNA (1)...(19): siRNA sense strand
gaaacaccucucuccauac

SEQ ID NO: 865455 - RNA, 19 nt, Homo sapiens
  misc_RNA (1)...(19): siRNA sense strand
aagcaagucacaugaugaa

SEQ ID NO: 865456 - RNA, 19 nt, Homo sapiens
  misc_RNA (1)...(19): siRNA sense strand
cauccagauuucaugauag

SEQ ID NO: 865457 - RNA, 19 nt, Homo sapiens
  misc_RNA (1)...(19): siRNA sense strand
ggagugggaggaccuagag

SEQ ID NO: 865458 - RNA, 19 nt, Homo sapiens
  misc_RNA (1)...(19): siRNA sense strand
aggcaaagacauuagauag

SEQ ID NO: 865459 - RNA, 19 nt, Homo sapiens
  misc_RNA (1)...(19): siRNA sense strand
auagggagcuacuuaaaau

SEQ ID NO: 865460 - RNA, 19 nt, Homo sapiens
  misc_RNA (1)...(19): siRNA sense strand
uauuugugauugcauaugg

SEQ ID NO: 865461 - RNA, 19 nt, Homo sapiens
  misc_RNA (1)...(19): siRNA sense strand
ggagaccaccagaacaaac

SEQ ID NO: 865462 - RNA, 19 nt, Homo sapiens
  misc_RNA (1)...(19): siRNA sense strand
gagaugggcaaaaccaaaa

SEQ ID NO: 865463 - RNA, 19 nt, Homo sapiens
  misc_RNA (1)...(19): siRNA sense strand
cuguggaaauggaaagaga

SEQ ID NO: 865464 - RNA, 19 nt, Homo sapiens
  misc_RNA (1)...(19): siRNA sense strand
auccagauuucaugauaga

SEQ ID NO: 865465 - RNA, 19 nt, Homo sapiens
  misc_RNA (1)...(19): siRNA sense strand
gagaccaccagaacaaacu

SEQ ID NO: 865466 - RNA, 19 nt, Homo sapiens
  misc_RNA (1)...(19): siRNA sense strand
ggcaaagacauuagauagg

SEQ ID NO: 865467 - RNA, 19 nt, Homo sapiens
  misc_RNA (1)...(19): siRNA sense strand
ggaggcagcucaucuauug

SEQ ID NO: 865468 - RNA, 19 nt, Homo sapiens
  misc_RNA (1)...(19): siRNA sense strand
ggcaacugcuggcuuuguu

SEQ ID NO: 865469 - RNA, 19 nt, Homo sapiens
  misc_RNA (1)...(19): siRNA sense strand
gcucaucuauuggcaacug

SEQ ID NO: 865470 - RNA, 19 nt, Homo sapiens
  misc_RNA (1)...(19): siRNA sense strand
gugucaagaugaauacaug

SEQ ID NO: 865471 - RNA, 19 nt, Homo sapiens
  misc_RNA (1)...(19): siRNA sense strand
gcaacugcuggcuuuguuu

SEQ ID NO: 865472 - RNA, 19 nt, Homo sapiens
  misc_RNA (1)...(19): siRNA sense strand
auuggcaacugcuggcuuu

SEQ ID NO: 865473 - RNA, 19 nt, Homo sapiens
  misc_RNA (1)...(19): siRNA sense strand
ggaggcagcucaucuauug

SEQ ID NO: 865474 - RNA, 19 nt, Homo sapiens
  misc_RNA (1)...(19): siRNA sense strand
gagcucugcugucuucuca

SEQ ID NO: 865475 - RNA, 19 nt, Homo sapiens
  misc_RNA (1)...(19): siRNA sense strand
gaggcucuguugagaauca

SEQ ID NO: 865476 - RNA, 19 nt, Homo sapiens
  misc_RNA (1)...(19): siRNA sense strand
ggcaacugcuggcuuuguu

SEQ ID NO: 865477 - RNA, 19 nt, Homo sapiens
  misc_RNA (1)...(19): siRNA sense strand
gcucaucuauuggcaacug

SEQ ID NO: 865478 - RNA, 19 nt, Homo sapiens
  misc_RNA (1)...(19): siRNA sense strand
gugucaagaugaauacaug

SEQ ID NO: 865479 - RNA, 19 nt, Homo sapiens
  misc_RNA (1)...(19): siRNA sense strand
gcaacugcuggcuuuguuu

SEQ ID NO: 865480 - RNA, 19 nt, Homo sapiens
  misc_RNA (1)...(19): siRNA sense strand
cugaggcucuguugagaau

SEQ ID NO: 865481 - RNA, 19 nt, Homo sapiens
  misc_RNA (1)...(19): siRNA sense strand
cuggagcucugcugucuuc

SEQ ID NO: 865482 - RNA, 19 nt, Homo sapiens
  misc_RNA (1)...(19): siRNA sense strand
auuggcaacugcuggcuuu

SEQ ID NO: 865483 - RNA, 19 nt, Homo sapiens
  misc_RNA (1)...(19): siRNA sense strand
agagagagcuucaaaauua

SEQ ID NO: 865484 - RNA, 19 nt, Homo sapiens
  misc_RNA (1)...(19): siRNA sense strand
gagcugcuuucucggauaa

SEQ ID NO: 865485 - RNA, 19 nt, Homo sapiens
  misc_RNA (1)...(19): siRNA sense strand
cagaggaauuuaucaaaga

SEQ ID NO: 865486 - RNA, 19 nt, Homo sapiens
  misc_RNA (1)...(19): siRNA sense strand
gaaaagugacagugaaaua

SEQ ID NO: 865487 - RNA, 19 nt, Homo sapiens
  misc_RNA (1)...(19): siRNA sense strand
ugacauugaugaucuucuu

SEQ ID NO: 865488 - RNA, 19 nt, Homo sapiens
  misc_RNA (1)...(19): siRNA sense strand
caacagaggaauuuaucaa

SEQ ID NO: 865489 - RNA, 19 nt, Homo sapiens
  misc_RNA (1)...(19): siRNA sense strand
gguagaaauugacauugau

SEQ ID NO: 865490 - RNA, 19 nt, Homo sapiens
  misc_RNA (1)...(19): siRNA sense strand
agacagugaugaagagaga

SEQ ID NO: 865491 - RNA, 19 nt, Homo sapiens
  misc_RNA (1)...(19): siRNA sense strand
gcagaagaagaguguauga

SEQ ID NO: 865492 - RNA, 19 nt, Homo sapiens
  misc_RNA (1)...(19): siRNA sense strand
gaaauugacauugaugauc

SEQ ID NO: 865493 - RNA, 19 nt, Homo sapiens
  misc_RNA (1)...(19): siRNA sense strand
gauaagaggcaugaggaaa

SEQ ID NO: 865494 - RNA, 19 nt, Homo sapiens
  misc_RNA (1)...(19): siRNA sense strand
ugccagagguagaaauuga

SEQ ID NO: 865495 - RNA, 19 nt, Homo sapiens
  misc_RNA (1)...(19): siRNA sense strand
caaaccaacagaggaauuu

SEQ ID NO: 865496 - RNA, 19 nt, Homo sapiens
  misc_RNA (1)...(19): siRNA sense strand
acaggaagcucuuguagac

SEQ ID NO: 865497 - RNA, 19 nt, Homo sapiens
  misc_RNA (1)...(19): siRNA sense strand
acagaggaauuuaucaaag

SEQ ID NO: 865498 - RNA, 19 nt, Homo sapiens
  misc_RNA (1)...(19): siRNA sense strand
agguagaaauugacauuga

SEQ ID NO: 865499 - RNA, 19 nt, Homo sapiens
  misc_RNA (1)...(19): siRNA sense strand
cuacaaaccaacagaggaa

SEQ ID NO: 865500 - RNA, 19 nt, Homo sapiens
  misc_RNA (1)...(19): siRNA sense strand
gaaaugccagagguagaaa

SEQ ID NO: 865501 - RNA, 19 nt, Homo sapiens
  misc_RNA (1)...(19): siRNA sense strand
gcucuacggcugcgaggaa

SEQ ID NO: 865502 - RNA, 19 nt, Homo sapiens
  misc_RNA (1)...(19): siRNA sense strand
ggauaagaggcaugaggaa

SEQ ID NO: 865503 - RNA, 19 nt, Homo sapiens
  misc_RNA (1)...(19): siRNA sense strand
gcacggguuuucuuccaaa

SEQ ID NO: 865504 - RNA, 19 nt, Homo sapiens
  misc_RNA (1)...(19): siRNA sense strand
uaagaggcaugaggaaacu

SEQ ID NO: 865505 - RNA, 19 nt, Homo sapiens
  misc_RNA (1)...(19): siRNA sense strand
guagaaauugacauugaug

SEQ ID NO: 865506 - RNA, 19 nt, Homo sapiens
  misc_RNA (1)...(19): siRNA sense strand
aaaccaacagaggaauuua

SEQ ID NO: 865507 - RNA, 19 nt, Homo sapiens
  misc_RNA (1)...(19): siRNA sense strand
agaagaaaugccagaggua

SEQ ID NO: 865508 - RNA, 19 nt, Homo sapiens
  misc_RNA (1)...(19): siRNA sense strand
agagguagaaauugacauu

SEQ ID NO: 865509 - RNA, 19 nt, Homo sapiens
  misc_RNA (1)...(19): siRNA sense strand
agaaaugccagagguagaa

SEQ ID NO: 865510 - RNA, 19 nt, Homo sapiens
  misc_RNA (1)...(19): siRNA sense strand
agagcugcuuucucggaua

SEQ ID NO: 865511 - RNA, 19 nt, Homo sapiens
  misc_RNA (1)...(19): siRNA sense strand
gcugcuuucucggauaaga

SEQ ID NO: 865512 - RNA, 19 nt, Homo sapiens
  misc_RNA (1)...(19): siRNA sense strand
agaggaauuuaucaaagag

SEQ ID NO: 865513 - RNA, 19 nt, Homo sapiens
  misc_RNA (1)...(19): siRNA sense strand
gagguagaaauugacauug

SEQ ID NO: 865514 - RNA, 19 nt, Homo sapiens
  misc_RNA (1)...(19): siRNA sense strand
ggcuggugcuggaggaaug

SEQ ID NO: 865515 - RNA, 19 nt, Homo sapiens
  misc_RNA (1)...(19): siRNA sense strand
acaaaccaacagaggaauu

SEQ ID NO: 865516 - RNA, 19 nt, Homo sapiens
  misc_RNA (1)...(19): siRNA sense strand
cauugaugaucuucuugau

SEQ ID NO: 865517 - RNA, 19 nt, Homo sapiens
  misc_RNA (1)...(19): siRNA sense strand
cggcugcgaggaagaagaa

SEQ ID NO: 865518 - RNA, 19 nt, Homo sapiens
  misc_RNA (1)...(19): siRNA sense strand
ccgcagaagaagaguguau

SEQ ID NO: 865519 - RNA, 19 nt, Homo sapiens
  misc_RNA (1)...(19): siRNA sense strand
gcagacagugaugaagaga

SEQ ID NO: 865520 - RNA, 19 nt, Homo sapiens
  misc_RNA (1)...(19): siRNA sense strand
ccaacagaggaauuuauca

SEQ ID NO: 865521 - RNA, 19 nt, Homo sapiens
  misc_RNA (1)...(19): siRNA sense strand
gcaaguuccugcagacauu

SEQ ID NO: 865522 - RNA, 19 nt, Homo sapiens
  misc_RNA (1)...(19): siRNA sense strand
caaccacccucacaucauu

SEQ ID NO: 865523 - RNA, 19 nt, Homo sapiens
  misc_RNA (1)...(19): siRNA sense strand
gcaaaggcauccucaaacu

SEQ ID NO: 865524 - RNA, 19 nt, Homo sapiens
  misc_RNA (1)...(19): siRNA sense strand
ggacgcaggcgacguguuu

SEQ ID NO: 865525 - RNA, 19 nt, Homo sapiens
  misc_RNA (1)...(19): siRNA sense strand
ggagggagauugagaucau

SEQ ID NO: 865526 - RNA, 19 nt, Homo sapiens
  misc_RNA (1)...(19): siRNA sense strand
gagaucaugucaucacuca

SEQ ID NO: 865527 - RNA, 19 nt, Homo sapiens
  misc_RNA (1)...(19): siRNA sense strand
ccaaagggcauucucaaga

SEQ ID NO: 865528 - RNA, 19 nt, Homo sapiens
  misc_RNA (1)...(19): siRNA sense strand
cggaagggcugaucaaguc

SEQ ID NO: 865529 - RNA, 19 nt, Homo sapiens
  misc_RNA (1)...(19): siRNA sense strand
gcgcgaagcuaggcauuuc

SEQ ID NO: 865530 - RNA, 19 nt, Homo sapiens
  misc_RNA (1)...(19): siRNA sense strand
gaccauaagauccuaguga

SEQ ID NO: 865531 - RNA, 19 nt, Homo sapiens
  misc_RNA (1)...(19): siRNA sense strand
aaucaaagaugagcaagau

SEQ ID NO: 865532 - RNA, 19 nt, Homo sapiens
  misc_RNA (1)...(19): siRNA sense strand
caaugggaauaucaagauu

SEQ ID NO: 865533 - RNA, 19 nt, Homo sapiens
  misc_RNA (1)...(19): siRNA sense strand
ugccauccaugaaguguuu

SEQ ID NO: 865534 - RNA, 19 nt, Homo sapiens
  misc_RNA (1)...(19): siRNA sense strand
gcgcgagucuggcuacuac

SEQ ID NO: 865535 - RNA, 19 nt, Homo sapiens
  misc_RNA (1)...(19): siRNA sense strand
ugacacggcugaugacacu

SEQ ID NO: 865536 - RNA, 19 nt, Homo sapiens
  misc_RNA (1)...(19): siRNA sense strand
uaucaagauugcugacuuc

SEQ ID NO: 865537 - RNA, 19 nt, Homo sapiens
  misc_RNA (1)...(19): siRNA sense strand
agauugagaucaugucauc

SEQ ID NO: 865538 - RNA, 19 nt, Homo sapiens
  misc_RNA (1)...(19): siRNA sense strand
ugaagaagcaggcggugaa

SEQ ID NO: 865539 - RNA, 19 nt, Homo sapiens
  misc_RNA (1)...(19): siRNA sense strand
gcacauacggagggagauu

SEQ ID NO: 865540 - RNA, 19 nt, Homo sapiens
  misc_RNA (1)...(19): siRNA sense strand
ggugucagccucugcagaa

SEQ ID NO: 865541 - RNA, 19 nt, Homo sapiens
  misc_RNA (1)...(19): siRNA sense strand
cccagucucuccacaguga

SEQ ID NO: 865542 - RNA, 19 nt, Homo sapiens
  misc_RNA (1)...(19): siRNA sense strand
ucuccaaccucuaccauca

SEQ ID NO: 865543 - RNA, 19 nt, Homo sapiens
  misc_RNA (1)...(19): siRNA sense strand
ucucugccgugcacuauug

SEQ ID NO: 865544 - RNA, 19 nt, Homo sapiens
  misc_RNA (1)...(19): siRNA sense strand
gcagaagccuccgcaagcu

SEQ ID NO: 865545 - RNA, 19 nt, Homo sapiens
  misc_RNA (1)...(19): siRNA sense strand
ccaaugggaauaucaagau

SEQ ID NO: 865546 - RNA, 19 nt, Homo sapiens
  misc_RNA (1)...(19): siRNA sense strand
gcaggcgacguguuuguga

SEQ ID NO: 865547 - RNA, 19 nt, Homo sapiens
  misc_RNA (1)...(19): siRNA sense strand
gaucaugucaucacucaac

SEQ ID NO: 865548 - RNA, 19 nt, Homo sapiens
  misc_RNA (1)...(19): siRNA sense strand
uccaugaaguguuugagaa

SEQ ID NO: 865549 - RNA, 19 nt, Homo sapiens
  misc_RNA (1)...(19): siRNA sense strand
aaaggcauccucaaacuca

SEQ ID NO: 865550 - RNA, 19 nt, Homo sapiens
  misc_RNA (1)...(19): siRNA sense strand
ucaagucaauccggaagga

SEQ ID NO: 865551 - RNA, 19 nt, Homo sapiens
  misc_RNA (1)...(19): siRNA sense strand
ucgcaaaggcauccucaaa

SEQ ID NO: 865552 - RNA, 19 nt, Homo sapiens
  misc_RNA (1)...(19): siRNA sense strand
gcaugaccauaagauccua

SEQ ID NO: 865553 - RNA, 19 nt, Homo sapiens
  misc_RNA (1)...(19): siRNA sense strand
uggagaacauccucuugga

SEQ ID NO: 865554 - RNA, 19 nt, Homo sapiens
  misc_RNA (1)...(19): siRNA sense strand
ucacaucauugccauccau

SEQ ID NO: 865555 - RNA, 19 nt, Homo sapiens
  misc_RNA (1)...(19): siRNA sense strand
cagcuggacuugccugaac

SEQ ID NO: 865556 - RNA, 19 nt, Homo sapiens
  misc_RNA (1)...(19): siRNA sense strand
uggaggauguggccaguca

SEQ ID NO: 865557 - RNA, 19 nt, Homo sapiens
  misc_RNA (1)...(19): siRNA sense strand
ccaccuaaacccucugaug

SEQ ID NO: 865558 - RNA, 19 nt, Homo sapiens
  misc_RNA (1)...(19): siRNA sense strand
accauaagauccuagugaa

SEQ ID NO: 865559 - RNA, 19 nt, Homo sapiens
  misc_RNA (1)...(19): siRNA sense strand
ggagauugagaucauguca

SEQ ID NO: 865560 - RNA, 19 nt, Homo sapiens
  misc_RNA (1)...(19): siRNA sense strand
gggccaaggugugcagcuu

SEQ ID NO: 865561 - RNA, 19 nt, Homo sapiens
  misc_RNA (1)...(19): siRNA sense strand
gggcgaccuuuaugacuac

SEQ ID NO: 865562 - RNA, 19 nt, Homo sapiens
  misc_RNA (1)...(19): siRNA sense strand
acagugacacggcugauga

SEQ ID NO: 865563 - RNA, 19 nt, Homo sapiens
  misc_RNA (1)...(19): siRNA sense strand
cauaagauccuagugaaac

SEQ ID NO: 865564 - RNA, 19 nt, Homo sapiens
  misc_RNA (1)...(19): siRNA sense strand
ccauaagauccuagugaaa

SEQ ID NO: 865565 - RNA, 19 nt, Homo sapiens
  misc_RNA (1)...(19): siRNA sense strand
agcaagaucugaugcacau

SEQ ID NO: 865566 - RNA, 19 nt, Homo sapiens
  misc_RNA (1)...(19): siRNA sense strand
cgaccuuuaugacuacauc

SEQ ID NO: 865567 - RNA, 19 nt, Homo sapiens
  misc_RNA (1)...(19): siRNA sense strand
gagggagauugagaucaug

SEQ ID NO: 865568 - RNA, 19 nt, Homo sapiens
  misc_RNA (1)...(19): siRNA sense strand
caagaucugaugcacauac

SEQ ID NO: 865569 - RNA, 19 nt, Homo sapiens
  misc_RNA (1)...(19): siRNA sense strand
auaagauccuagugaaaca

SEQ ID NO: 865570 - RNA, 19 nt, Homo sapiens
  misc_RNA (1)...(19): siRNA sense strand
agcauucgcucaagaaguc

SEQ ID NO: 865571 - RNA, 19 nt, Homo sapiens
  misc_RNA (1)...(19): siRNA sense strand
ggggcgaccuuuaugacua

SEQ ID NO: 865572 - RNA, 19 nt, Homo sapiens
  misc_RNA (1)...(19): siRNA sense strand
gcggaagggcugaucaagu

SEQ ID NO: 865573 - RNA, 19 nt, Homo sapiens
  misc_RNA (1)...(19): siRNA sense strand
ggaaggacaaaaucaaaga

SEQ ID NO: 865574 - RNA, 19 nt, Homo sapiens
  misc_RNA (1)...(19): siRNA sense strand
gccaaggugugcagcuucu

SEQ ID NO: 865575 - RNA, 19 nt, Homo sapiens
  misc_RNA (1)...(19): siRNA sense strand
gccaaugggaauaucaaga

SEQ ID NO: 865576 - RNA, 19 nt, Homo sapiens
  misc_RNA (1)...(19): siRNA sense strand
gcgaagcuaggcauuucuu

SEQ ID NO: 865577 - RNA, 19 nt, Homo sapiens
  misc_RNA (1)...(19): siRNA sense strand
auaucaagauugcugacuu

SEQ ID NO: 865578 - RNA, 19 nt, Homo sapiens
  misc_RNA (1)...(19): siRNA sense strand
gcuggcggcaggauccuuu

SEQ ID NO: 865579 - RNA, 19 nt, Homo sapiens
  misc_RNA (1)...(19): siRNA sense strand
ggcccagucucuccacagu

SEQ ID NO: 865580 - RNA, 19 nt, Homo sapiens
  misc_RNA (1)...(19): siRNA sense strand
agaagucccgcaaggagaa

SEQ ID NO: 865581 - RNA, 19 nt, Homo sapiens
  misc_RNA (1)...(19): siRNA sense strand
caaggugugcagcuucuuc

SEQ ID NO: 865582 - RNA, 19 nt, Homo sapiens
  misc_RNA (1)...(19): siRNA sense strand
ccaagccccuaaugaagaa

SEQ ID NO: 865583 - RNA, 19 nt, Homo sapiens
  misc_RNA (1)...(19): siRNA sense strand
ucaagaagucccgcaagga

SEQ ID NO: 865584 - RNA, 19 nt, Homo sapiens
  misc_RNA (1)...(19): siRNA sense strand
gcacuauugccaucagaac

SEQ ID NO: 865585 - RNA, 19 nt, Homo sapiens
  misc_RNA (1)...(19): siRNA sense strand
gaagcggcaccaccacaag

SEQ ID NO: 865586 - RNA, 19 nt, Homo sapiens
  misc_RNA (1)...(19): siRNA sense strand
gaagaagcaggcggugaag

SEQ ID NO: 865587 - RNA, 19 nt, Homo sapiens
  misc_RNA (1)...(19): siRNA sense strand
caaaggcauccucaaacuc

SEQ ID NO: 865588 - RNA, 19 nt, Homo sapiens
  misc_RNA (1)...(19): siRNA sense strand
cgccagcauucgcucaaga

SEQ ID NO: 865589 - RNA, 19 nt, Homo sapiens
  misc_RNA (1)...(19): siRNA sense strand
ggaugccaaugggaauauc

SEQ ID NO: 865590 - RNA, 19 nt, Homo sapiens
  misc_RNA (1)...(19): siRNA sense strand
ccuguccucugaguccuuu

SEQ ID NO: 865591 - RNA, 19 nt, Homo sapiens
  misc_RNA (1)...(19): siRNA sense strand
gcaagagcaaccucaagcu

SEQ ID NO: 865592 - RNA, 19 nt, Homo sapiens
  misc_RNA (1)...(19): siRNA sense strand
cugauccgguggcuguuga

SEQ ID NO: 865593 - RNA, 19 nt, Homo sapiens
  misc_RNA (1)...(19): siRNA sense strand
ucacucaaccacccucaca

SEQ ID NO: 865594 - RNA, 19 nt, Homo sapiens
  misc_RNA (1)...(19): siRNA sense strand
gcuggagaacauccucuug

SEQ ID NO: 865595 - RNA, 19 nt, Homo sapiens
  misc_RNA (1)...(19): siRNA sense strand
gugcacuauugccaucaga

SEQ ID NO: 865596 - RNA, 19 nt, Homo sapiens
  misc_RNA (1)...(19): siRNA sense strand
gaaaggcgcuacagucuga

SEQ ID NO: 865597 - RNA, 19 nt, Homo sapiens
  misc_RNA (1)...(19): siRNA sense strand
ggaaugggcuccacaccua

SEQ ID NO: 865598 - RNA, 19 nt, Homo sapiens
  misc_RNA (1)...(19): siRNA sense strand
gcaauacucuuaucccauu

SEQ ID NO: 865599 - RNA, 19 nt, Homo sapiens
  misc_RNA (1)...(19): siRNA sense strand
gcacugggauacggaauua

SEQ ID NO: 865600 - RNA, 19 nt, Homo sapiens
  misc_RNA (1)...(19): siRNA sense strand
acaggaagcugcaacguua

SEQ ID NO: 865601 - RNA, 19 nt, Homo sapiens
  misc_RNA (1)...(19): siRNA sense strand
gaaauccuguucaccuuga

SEQ ID NO: 865602 - RNA, 19 nt, Homo sapiens
  misc_RNA (1)...(19): siRNA sense strand
ggaccaaccuacuuagaug

SEQ ID NO: 865603 - RNA, 19 nt, Homo sapiens
  misc_RNA (1)...(19): siRNA sense strand
aaacaucccuuauacaaca

SEQ ID NO: 865604 - RNA, 19 nt, Homo sapiens
  misc_RNA (1)...(19): siRNA sense strand
guaauuaccaccauugaaa

SEQ ID NO: 865605 - RNA, 19 nt, Homo sapiens
  misc_RNA (1)...(19): siRNA sense strand
gaucagauggaauuacaua

SEQ ID NO: 865606 - RNA, 19 nt, Homo sapiens
  misc_RNA (1)...(19): siRNA sense strand
cuaccuggcuuuauucauu

SEQ ID NO: 865607 - RNA, 19 nt, Homo sapiens
  misc_RNA (1)...(19): siRNA sense strand
gaaacuuggugccagagaa

SEQ ID NO: 865608 - RNA, 19 nt, Homo sapiens
  misc_RNA (1)...(19): siRNA sense strand
gcagugggauauuuauuag

SEQ ID NO: 865609 - RNA, 19 nt, Homo sapiens
  misc_RNA (1)...(19): siRNA sense strand
caaauucguuggguuuauu

SEQ ID NO: 865610 - RNA, 19 nt, Homo sapiens
  misc_RNA (1)...(19): siRNA sense strand
gaacggcuaugcugugucu

SEQ ID NO: 865611 - RNA, 19 nt, Homo sapiens
  misc_RNA (1)...(19): siRNA sense strand
cauuguaacugcuuucauu

SEQ ID NO: 865612 - RNA, 19 nt, Homo sapiens
  misc_RNA (1)...(19): siRNA sense strand
gaaauaaucacugggucua

SEQ ID NO: 865613 - RNA, 19 nt, Homo sapiens
  misc_RNA (1)...(19): siRNA sense strand
gcgaacacuugcauacauu

SEQ ID NO: 865614 - RNA, 19 nt, Homo sapiens
  misc_RNA (1)...(19): siRNA sense strand
gauacggaauuauacagaa

SEQ ID NO: 865615 - RNA, 19 nt, Homo sapiens
  misc_RNA (1)...(19): siRNA sense strand
gaaugcaccuguguccaaa

SEQ ID NO: 865616 - RNA, 19 nt, Homo sapiens
  misc_RNA (1)...(19): siRNA sense strand
aaacggaccugcaauacuc

SEQ ID NO: 865617 - RNA, 19 nt, Homo sapiens
  misc_RNA (1)...(19): siRNA sense strand
guaccuagccaucauguau

SEQ ID NO: 865618 - RNA, 19 nt, Homo sapiens
  misc_RNA (1)...(19): siRNA sense strand
ugucaagacuuaucucaau

SEQ ID NO: 865619 - RNA, 19 nt, Homo sapiens
  misc_RNA (1)...(19): siRNA sense strand
cgaagagacuggccugcaa

SEQ ID NO: 865620 - RNA, 19 nt, Homo sapiens
  misc_RNA (1)...(19): siRNA sense strand
gcuacagucugaagaguuc

SEQ ID NO: 865621 - RNA, 19 nt, Homo sapiens
  misc_RNA (1)...(19): siRNA sense strand
ggaauuacauacuuuaacc

SEQ ID NO: 865622 - RNA, 19 nt, Homo sapiens
  misc_RNA (1)...(19): siRNA sense strand
cagauggaauuacauacuu

SEQ ID NO: 865623 - RNA, 19 nt, Homo sapiens
  misc_RNA (1)...(19): siRNA sense strand
ccucaggucuaagaguuua

SEQ ID NO: 865624 - RNA, 19 nt, Homo sapiens
  misc_RNA (1)...(19): siRNA sense strand
gaaaucaaacaacagugaa

SEQ ID NO: 865625 - RNA, 19 nt, Homo sapiens
  misc_RNA (1)...(19): siRNA sense strand
ggaaacugguggaguggau

SEQ ID NO: 865626 - RNA, 19 nt, Homo sapiens
  misc_RNA (1)...(19): siRNA sense strand
gggucuaccuggcuuuauu

SEQ ID NO: 865627 - RNA, 19 nt, Homo sapiens
  misc_RNA (1)...(19): siRNA sense strand
gaagagacuggccugcaaa

SEQ ID NO: 865628 - RNA, 19 nt, Homo sapiens
  misc_RNA (1)...(19): siRNA sense strand
uaccugagcagcguaauua

SEQ ID NO: 865629 - RNA, 19 nt, Homo sapiens
  misc_RNA (1)...(19): siRNA sense strand
uaacugcuuucauuaccuu

SEQ ID NO: 865630 - RNA, 19 nt, Homo sapiens
  misc_RNA (1)...(19): siRNA sense strand
gcugagagugccauuguaa

SEQ ID NO: 865631 - RNA, 19 nt, Homo sapiens
  misc_RNA (1)...(19): siRNA sense strand
ggagaaaucaaacaacagu

SEQ ID NO: 865632 - RNA, 19 nt, Homo sapiens
  misc_RNA (1)...(19): siRNA sense strand
gcaacuccaccgccacuuu

SEQ ID NO: 865633 - RNA, 19 nt, Homo sapiens
  misc_RNA (1)...(19): siRNA sense strand
ccaaccaucagcuaucaua

SEQ ID NO: 865634 - RNA, 19 nt, Homo sapiens
  misc_RNA (1)...(19): siRNA sense strand
gagaacggcuaugcugugu

SEQ ID NO: 865635 - RNA, 19 nt, Homo sapiens
  misc_RNA (1)...(19): siRNA sense strand
gaagcugcaacguuaauug

SEQ ID NO: 865636 - RNA, 19 nt, Homo sapiens
  misc_RNA (1)...(19): siRNA sense strand
cagaaauccuguucaccuu

SEQ ID NO: 865637 - RNA, 19 nt, Homo sapiens
  misc_RNA (1)...(19): siRNA sense strand
gaaggacucgggaggaaau

SEQ ID NO: 865638 - RNA, 19 nt, Homo sapiens
  misc_RNA (1)...(19): siRNA sense strand
guucaucgagucacaguuu

SEQ ID NO: 865639 - RNA, 19 nt, Homo sapiens
  misc_RNA (1)...(19): siRNA sense strand
gucaggaucuuaagcaaca

SEQ ID NO: 865640 - RNA, 19 nt, Homo sapiens
  misc_RNA (1)...(19): siRNA sense strand
gugauauucccaauguuua

SEQ ID NO: 865641 - RNA, 19 nt, Homo sapiens
  misc_RNA (1)...(19): siRNA sense strand
gaugggauuuggaaaggau

SEQ ID NO: 865642 - RNA, 19 nt, Homo sapiens
  misc_RNA (1)...(19): siRNA sense strand
gcgcgcagauucucauugg

SEQ ID NO: 865643 - RNA, 19 nt, Homo sapiens
  misc_RNA (1)...(19): siRNA sense strand
gaucugcaguggugugucu

SEQ ID NO: 865644 - RNA, 19 nt, Homo sapiens
  misc_RNA (1)...(19): siRNA sense strand
ugcaauguuucuugugaua

SEQ ID NO: 865645 - RNA, 19 nt, Homo sapiens
  misc_RNA (1)...(19): siRNA sense strand
caaccuacuuagaugacaa

SEQ ID NO: 865646 - RNA, 19 nt, Homo sapiens
  misc_RNA (1)...(19): siRNA sense strand
gcccugcagugggauauuu

SEQ ID NO: 865647 - RNA, 19 nt, Homo sapiens
  misc_RNA (1)...(19): siRNA sense strand
gcgcagauucucauuggaa

SEQ ID NO: 865648 - RNA, 19 nt, Homo sapiens
  misc_RNA (1)...(19): siRNA sense strand
gacaaugcccggacuagau

SEQ ID NO: 865649 - RNA, 19 nt, Homo sapiens
  misc_RNA (1)...(19): siRNA sense strand
cguagaagaugaggagaga

SEQ ID NO: 865650 - RNA, 19 nt, Homo sapiens
  misc_RNA (1)...(19): siRNA sense strand
gagcagcugucaggaucuu

SEQ ID NO: 865651 - RNA, 19 nt, Homo sapiens
  misc_RNA (1)...(19): siRNA sense strand
aaggagaaaucaaacaaca

SEQ ID NO: 865652 - RNA, 19 nt, Homo sapiens
  misc_RNA (1)...(19): siRNA sense strand
cagaaugacccucguuuca

SEQ ID NO: 865653 - RNA, 19 nt, Homo sapiens
  misc_RNA (1)...(19): siRNA sense strand
guggacuucuuauugguuu

SEQ ID NO: 865654 - RNA, 19 nt, Homo sapiens
  misc_RNA (1)...(19): siRNA sense strand
gcagcugucaggaucuuaa

SEQ ID NO: 865655 - RNA, 19 nt, Homo sapiens
  misc_RNA (1)...(19): siRNA sense strand
acacuugcauacauuccua

SEQ ID NO: 865656 - RNA, 19 nt, Homo sapiens
  misc_RNA (1)...(19): siRNA sense strand
gcaguggugugucuuuacu

SEQ ID NO: 865657 - RNA, 19 nt, Homo sapiens
  misc_RNA (1)...(19): siRNA sense strand
uaccuggcuuuauucauuu

SEQ ID NO: 865658 - RNA, 19 nt, Homo sapiens
  misc_RNA (1)...(19): siRNA sense strand
ucaaauucguuggguuuau

SEQ ID NO: 865659 - RNA, 19 nt, Homo sapiens
  misc_RNA (1)...(19): siRNA sense strand
cucggaggcuacauuauaa

SEQ ID NO: 865660 - RNA, 19 nt, Homo sapiens
  misc_RNA (1)...(19): siRNA sense strand
gacccucguuucauuggaa

SEQ ID NO: 865661 - RNA, 19 nt, Homo sapiens
  misc_RNA (1)...(19): siRNA sense strand
ugcagugggauauuuauua

SEQ ID NO: 865662 - RNA, 19 nt, Homo sapiens
  misc_RNA (1)...(19): siRNA sense strand
caacuccaccgccacuuug

SEQ ID NO: 865663 - RNA, 19 nt, Homo sapiens
  misc_RNA (1)...(19): siRNA sense strand
uguaaacggaccugcaaua

SEQ ID NO: 865664 - RNA, 19 nt, Homo sapiens
  misc_RNA (1)...(19): siRNA sense strand
caaagucgccaagugauca

SEQ ID NO: 865665 - RNA, 19 nt, Homo sapiens
  misc_RNA (1)...(19): siRNA sense strand
cagcguaauuaccaccauu

SEQ ID NO: 865666 - RNA, 19 nt, Homo sapiens
  misc_RNA (1)...(19): siRNA sense strand
gaucuuaagcaacaugaca

SEQ ID NO: 865667 - RNA, 19 nt, Homo sapiens
  misc_RNA (1)...(19): siRNA sense strand
ugucagagaccuaccaaga

SEQ ID NO: 865668 - RNA, 19 nt, Homo sapiens
  misc_RNA (1)...(19): siRNA sense strand
agaaaucaaacaacaguga

SEQ ID NO: 865669 - RNA, 19 nt, Homo sapiens
  misc_RNA (1)...(19): siRNA sense strand
uuuauuagguggacuucuu

SEQ ID NO: 865670 - RNA, 19 nt, Homo sapiens
  misc_RNA (1)...(19): siRNA sense strand
cgccuuaccucacuucauc

SEQ ID NO: 865671 - RNA, 19 nt, Homo sapiens
  misc_RNA (1)...(19): siRNA sense strand
gaaugcaguuuguuuuguu

SEQ ID NO: 865672 - RNA, 19 nt, Homo sapiens
  misc_RNA (1)...(19): siRNA sense strand
ucagguccguagaagauga

SEQ ID NO: 865673 - RNA, 19 nt, Homo sapiens
  misc_RNA (1)...(19): siRNA sense strand
gcccaaccaucagcuauca

SEQ ID NO: 865674 - RNA, 19 nt, Homo sapiens
  misc_RNA (1)...(19): siRNA sense strand
cuuaucccauucuuaguuu

SEQ ID NO: 865675 - RNA, 19 nt, Homo sapiens
  misc_RNA (1)...(19): siRNA sense strand
ggauacggaauuauacaga

SEQ ID NO: 865676 - RNA, 19 nt, Homo sapiens
  misc_RNA (1)...(19): siRNA sense strand
gacaggaagcugcaacguu

SEQ ID NO: 865677 - RNA, 19 nt, Homo sapiens
  misc_RNA (1)...(19): siRNA sense strand
ugugaaagcauuaaucuag

SEQ ID NO: 865678 - RNA, 19 nt, Homo sapiens
  misc_RNA (1)...(19): siRNA sense strand
gaugugaaagcauuaaucu

SEQ ID NO: 865679 - RNA, 19 nt, Homo sapiens
  misc_RNA (1)...(19): siRNA sense strand
ugaaggagaaaucaaacaa

SEQ ID NO: 865680 - RNA, 19 nt, Homo sapiens
  misc_RNA (1)...(19): siRNA sense strand
uuagguggacuucuuauug

SEQ ID NO: 865681 - RNA, 19 nt, Homo sapiens
  misc_RNA (1)...(19): siRNA sense strand
aaagaaaacuccuccuugu

SEQ ID NO: 865682 - RNA, 19 nt, Homo sapiens
  misc_RNA (1)...(19): siRNA sense strand
ccucaaauucguuggguuu

SEQ ID NO: 865683 - RNA, 19 nt, Homo sapiens
  misc_RNA (1)...(19): siRNA sense strand
ugcagaagcuguccaagag

SEQ ID NO: 865684 - RNA, 19 nt, Homo sapiens
  misc_RNA (1)...(19): siRNA sense strand
cuggcuggcuguguuaaua

SEQ ID NO: 865685 - RNA, 19 nt, Homo sapiens
  misc_RNA (1)...(19): siRNA sense strand
cuugugauauucccaaugu

SEQ ID NO: 865686 - RNA, 19 nt, Homo sapiens
  misc_RNA (1)...(19): siRNA sense strand
ccuaccagauccaagaguu

SEQ ID NO: 865687 - RNA, 19 nt, Homo sapiens
  misc_RNA (1)...(19): siRNA sense strand
ccagggagaauuccacgaa

SEQ ID NO: 865688 - RNA, 19 nt, Homo sapiens
  misc_RNA (1)...(19): siRNA sense strand
gucaagacuuaucucaaug

SEQ ID NO: 865689 - RNA, 19 nt, Homo sapiens
  misc_RNA (1)...(19): siRNA sense strand
uggaucagauggaauuaca

SEQ ID NO: 865690 - RNA, 19 nt, Homo sapiens
  misc_RNA (1)...(19): siRNA sense strand
gcaugugcuuucugaccuu

SEQ ID NO: 865691 - RNA, 19 nt, Homo sapiens
  misc_RNA (1)...(19): siRNA sense strand
ggacucgggaggaaauaau

SEQ ID NO: 865692 - RNA, 19 nt, Homo sapiens
  misc_RNA (1)...(19): siRNA sense strand
ccaaguucaucgagucaca

SEQ ID NO: 865693 - RNA, 19 nt, Homo sapiens
  misc_RNA (1)...(19): siRNA sense strand
gaccugcaauacucuuauc

SEQ ID NO: 865694 - RNA, 19 nt, Homo sapiens
  misc_RNA (1)...(19): siRNA sense strand
guccaaagucgccaaguga

SEQ ID NO: 865695 - RNA, 19 nt, Homo sapiens
  misc_RNA (1)...(19): siRNA sense strand
gaagaugaggagagaccuu

SEQ ID NO: 865696 - RNA, 19 nt, Homo sapiens
  misc_RNA (1)...(19): siRNA sense strand
gcacggcucuaucucauca

SEQ ID NO: 865697 - RNA, 19 nt, Homo sapiens
  misc_RNA (1)...(19): siRNA sense strand
ccagaaggauggugggaaa

SEQ ID NO: 865698 - RNA, 19 nt, Homo sapiens
  misc_RNA (1)...(19): siRNA sense strand
ggacugugccgaugacuug

SEQ ID NO: 865699 - RNA, 19 nt, Homo sapiens
  misc_RNA (1)...(19): siRNA sense strand
acacugcccugccugcaua

SEQ ID NO: 865700 - RNA, 19 nt, Homo sapiens
  misc_RNA (1)...(19): siRNA sense strand
gagcagaaccgggcacuga

SEQ ID NO: 865701 - RNA, 19 nt, Homo sapiens
  misc_RNA (1)...(19): siRNA sense strand
gcagcagaauaguguggua

SEQ ID NO: 865702 - RNA, 19 nt, Homo sapiens
  misc_RNA (1)...(19): siRNA sense strand
gguguggccuccuucaaga

SEQ ID NO: 865703 - RNA, 19 nt, Homo sapiens
  misc_RNA (1)...(19): siRNA sense strand
gcgacuuccuggccuguaa

SEQ ID NO: 865704 - RNA, 19 nt, Homo sapiens
  misc_RNA (1)...(19): siRNA sense strand
ggacaagaacugccaccuu

SEQ ID NO: 865705 - RNA, 19 nt, Homo sapiens
  misc_RNA (1)...(19): siRNA sense strand
cguggaggcugccgaagaa

SEQ ID NO: 865706 - RNA, 19 nt, Homo sapiens
  misc_RNA (1)...(19): siRNA sense strand
gcagaauagugugguaauc

SEQ ID NO: 865707 - RNA, 19 nt, Homo sapiens
  misc_RNA (1)...(19): siRNA sense strand
gcggaugccuggagacaag

SEQ ID NO: 865708 - RNA, 19 nt, Homo sapiens
  misc_RNA (1)...(19): siRNA sense strand
gcagaaccgggcacugaaa

SEQ ID NO: 865709 - RNA, 19 nt, Homo sapiens
  misc_RNA (1)...(19): siRNA sense strand
gauaagaagggcuacaucu

SEQ ID NO: 865710 - RNA, 19 nt, Homo sapiens
  misc_RNA (1)...(19): siRNA sense strand
aggaugagccgaagacuga

SEQ ID NO: 865711 - RNA, 19 nt, Homo sapiens
  misc_RNA (1)...(19): siRNA sense strand
gcgcacggcucuaucucau

SEQ ID NO: 865712 - RNA, 19 nt, Homo sapiens
  misc_RNA (1)...(19): siRNA sense strand
gcagacccaacaagaagaa

SEQ ID NO: 865713 - RNA, 19 nt, Homo sapiens
  misc_RNA (1)...(19): siRNA sense strand
uggccgguguggacaauaa

SEQ ID NO: 865714 - RNA, 19 nt, Homo sapiens
  misc_RNA (1)...(19): siRNA sense strand
ggagguguacaauauggaa

SEQ ID NO: 865715 - RNA, 19 nt, Homo sapiens
  misc_RNA (1)...(19): siRNA sense strand
acguggagguguacaauau

SEQ ID NO: 865716 - RNA, 19 nt, Homo sapiens
  misc_RNA (1)...(19): siRNA sense strand
gggaaagacggagcuggua

SEQ ID NO: 865717 - RNA, 19 nt, Homo sapiens
  misc_RNA (1)...(19): siRNA sense strand
ggcaggcucaagucaauuu

SEQ ID NO: 865718 - RNA, 19 nt, Homo sapiens
  misc_RNA (1)...(19): siRNA sense strand
agaauagugugguaaucug

SEQ ID NO: 865719 - RNA, 19 nt, Homo sapiens
  misc_RNA (1)...(19): siRNA sense strand
gaaggauggugggaaagac

SEQ ID NO: 865720 - RNA, 19 nt, Homo sapiens
  misc_RNA (1)...(19): siRNA sense strand
caaaggcaggcucaaguca

SEQ ID NO: 865721 - RNA, 19 nt, Homo sapiens
  misc_RNA (1)...(19): siRNA sense strand
gaauagugugguaaucugu

SEQ ID NO: 865722 - RNA, 19 nt, Homo sapiens
  misc_RNA (1)...(19): siRNA sense strand
ccagacaacccgagaagag

SEQ ID NO: 865723 - RNA, 19 nt, Homo sapiens
  misc_RNA (1)...(19): siRNA sense strand
aaggcaggcucaagucaau

SEQ ID NO: 865724 - RNA, 19 nt, Homo sapiens
  misc_RNA (1)...(19): siRNA sense strand
gaccaacuucuucgucaau

SEQ ID NO: 865725 - RNA, 19 nt, Homo sapiens
  misc_RNA (1)...(19): siRNA sense strand
gguggcagacccaacaaga

SEQ ID NO: 865726 - RNA, 19 nt, Homo sapiens
  misc_RNA (1)...(19): siRNA sense strand
guggagguguacaauaugg

SEQ ID NO: 865727 - RNA, 19 nt, Homo sapiens
  misc_RNA (1)...(19): siRNA sense strand
uaacgggaccauccacauc

SEQ ID NO: 865728 - RNA, 19 nt, Homo sapiens
  misc_RNA (1)...(19): siRNA sense strand
gaagggcuacaucuuucug

SEQ ID NO: 865729 - RNA, 19 nt, Homo sapiens
  misc_RNA (1)...(19): siRNA sense strand
ccgugucuguggauaagaa

SEQ ID NO: 865730 - RNA, 19 nt, Homo sapiens
  misc_RNA (1)...(19): siRNA sense strand
ggauaagaagggcuacauc

SEQ ID NO: 865731 - RNA, 19 nt, Homo sapiens
  misc_RNA (1)...(19): siRNA sense strand
gcagagagugccgccuaga

SEQ ID NO: 865732 - RNA, 19 nt, Homo sapiens
  misc_RNA (1)...(19): siRNA sense strand
ucaacaagguggugauccu

SEQ ID NO: 865733 - RNA, 19 nt, Homo sapiens
  misc_RNA (1)...(19): siRNA sense strand
auagugugguaaucuguga

SEQ ID NO: 865734 - RNA, 19 nt, Homo sapiens
  misc_RNA (1)...(19): siRNA sense strand
ugaaacgcuucucccucaa

SEQ ID NO: 865735 - RNA, 19 nt, Homo sapiens
  misc_RNA (1)...(19): siRNA sense strand
agaccaacuucuucgucaa

SEQ ID NO: 865736 - RNA, 19 nt, Homo sapiens
  misc_RNA (1)...(19): siRNA sense strand
cagcagaauagugugguaa

SEQ ID NO: 865737 - RNA, 19 nt, Homo sapiens
  misc_RNA (1)...(19): siRNA sense strand
cagaauagugugguaaucu

SEQ ID NO: 865738 - RNA, 19 nt, Homo sapiens
  misc_RNA (1)...(19): siRNA sense strand
gcuccgugucuguggauaa

SEQ ID NO: 865739 - RNA, 19 nt, Homo sapiens
  misc_RNA (1)...(19): siRNA sense strand
ccaacuucuucgucaaugg

SEQ ID NO: 865740 - RNA, 19 nt, Homo sapiens
  misc_RNA (1)...(19): siRNA sense strand
ugccagcccugcucacagu

SEQ ID NO: 865741 - RNA, 19 nt, Homo sapiens
  misc_RNA (1)...(19): siRNA sense strand
gaaacgcuucucccucaac

SEQ ID NO: 865742 - RNA, 19 nt, Homo sapiens
  misc_RNA (1)...(19): siRNA sense strand
gaugagccgaagacugaga

SEQ ID NO: 865743 - RNA, 19 nt, Homo sapiens
  misc_RNA (1)...(19): siRNA sense strand
guggcagacccaacaagaa

SEQ ID NO: 865744 - RNA, 19 nt, Homo sapiens
  misc_RNA (1)...(19): siRNA sense strand
guaacgggaccauccacau

SEQ ID NO: 865745 - RNA, 19 nt, Homo sapiens
  misc_RNA (1)...(19): siRNA sense strand
ccucaacggcgacuacaag

SEQ ID NO: 865746 - RNA, 19 nt, Homo sapiens
  misc_RNA (1)...(19): siRNA sense strand
aaaggcaggcucaagucaa

SEQ ID NO: 865747 - RNA, 19 nt, Homo sapiens
  misc_RNA (1)...(19): siRNA sense strand
ucaaaggcaggcucaaguc

SEQ ID NO: 865748 - RNA, 19 nt, Homo sapiens
  misc_RNA (1)...(19): siRNA sense strand
ugcccugccugcauaccua

SEQ ID NO: 865749 - RNA, 19 nt, Homo sapiens
  misc_RNA (1)...(19): siRNA sense strand
gaagugggauuacuacaua

SEQ ID NO: 865750 - RNA, 19 nt, Homo sapiens
  misc_RNA (1)...(19): siRNA sense strand
gaaugaagaugaugaugua

SEQ ID NO: 865751 - RNA, 19 nt, Homo sapiens
  misc_RNA (1)...(19): siRNA sense strand
gagaagaaauugucuguga

SEQ ID NO: 865752 - RNA, 19 nt, Homo sapiens
  misc_RNA (1)...(19): siRNA sense strand
gcaagcagcccuuuacaua

SEQ ID NO: 865753 - RNA, 19 nt, Homo sapiens
  misc_RNA (1)...(19): siRNA sense strand
gcacggaacuuuauuugau

SEQ ID NO: 865754 - RNA, 19 nt, Homo sapiens
  misc_RNA (1)...(19): siRNA sense strand
caacauugccgcagcauua

SEQ ID NO: 865755 - RNA, 19 nt, Homo sapiens
  misc_RNA (1)...(19): siRNA sense strand
gagaaugguuccucaguuu

SEQ ID NO: 865756 - RNA, 19 nt, Homo sapiens
  misc_RNA (1)...(19): siRNA sense strand
guagagcccuggaaucuuu

SEQ ID NO: 865757 - RNA, 19 nt, Homo sapiens
  misc_RNA (1)...(19): siRNA sense strand
agaaacagcugaugaaguu

SEQ ID NO: 865758 - RNA, 19 nt, Homo sapiens
  misc_RNA (1)...(19): siRNA sense strand
gcacaacucuuccaaggau

SEQ ID NO: 865759 - RNA, 19 nt, Homo sapiens
  misc_RNA (1)...(19): siRNA sense strand
gaacuucaagguagaauuu

SEQ ID NO: 865760 - RNA, 19 nt, Homo sapiens
  misc_RNA (1)...(19): siRNA sense strand
gaacagaauuccagcaucu

SEQ ID NO: 865761 - RNA, 19 nt, Homo sapiens
  misc_RNA (1)...(19): siRNA sense strand
gcauagaacaagagaaaua

SEQ ID NO: 865762 - RNA, 19 nt, Homo sapiens
  misc_RNA (1)...(19): siRNA sense strand
ucaaucagcucuuucuuug

SEQ ID NO: 865763 - RNA, 19 nt, Homo sapiens
  misc_RNA (1)...(19): siRNA sense strand
gcacaaagacuagaaguug

SEQ ID NO: 865764 - RNA, 19 nt, Homo sapiens
  misc_RNA (1)...(19): siRNA sense strand
gaacaaagaaggaagagau

SEQ ID NO: 865765 - RNA, 19 nt, Homo sapiens
  misc_RNA (1)...(19): siRNA sense strand
gcaaacguguguauaacuu

SEQ ID NO: 865766 - RNA, 19 nt, Homo sapiens
  misc_RNA (1)...(19): siRNA sense strand
ccuggaaucuuuaauguuu

SEQ ID NO: 865767 - RNA, 19 nt, Homo sapiens
  misc_RNA (1)...(19): siRNA sense strand
caagguagaauuugcuuua

SEQ ID NO: 865768 - RNA, 19 nt, Homo sapiens
  misc_RNA (1)...(19): siRNA sense strand
gugcggagcuuucccauug

SEQ ID NO: 865769 - RNA, 19 nt, Homo sapiens
  misc_RNA (1)...(19): siRNA sense strand
ugacaaggcuuucuuugau

SEQ ID NO: 865770 - RNA, 19 nt, Homo sapiens
  misc_RNA (1)...(19): siRNA sense strand
ugacagacauugacucaga

SEQ ID NO: 865771 - RNA, 19 nt, Homo sapiens
  misc_RNA (1)...(19): siRNA sense strand
ggacaguaguuuaccaaga

SEQ ID NO: 865772 - RNA, 19 nt, Homo sapiens
  misc_RNA (1)...(19): siRNA sense strand
gagaaugauuuccucacua

SEQ ID NO: 865773 - RNA, 19 nt, Homo sapiens
  misc_RNA (1)...(19): siRNA sense strand
cagaaggacugggaugaua

SEQ ID NO: 865774 - RNA, 19 nt, Homo sapiens
  misc_RNA (1)...(19): siRNA sense strand
gaacagaucgcucccaaag

SEQ ID NO: 865775 - RNA, 19 nt, Homo sapiens
  misc_RNA (1)...(19): siRNA sense strand
guucuuggcuuuccacuau

SEQ ID NO: 865776 - RNA, 19 nt, Homo sapiens
  misc_RNA (1)...(19): siRNA sense strand
ugacaucccugguucaguu

SEQ ID NO: 865777 - RNA, 19 nt, Homo sapiens
  misc_RNA (1)...(19): siRNA sense strand
agaaugauuuccucacuaa

SEQ ID NO: 865778 - RNA, 19 nt, Homo sapiens
  misc_RNA (1)...(19): siRNA sense strand
gaaauacuugcaagccuua

SEQ ID NO: 865779 - RNA, 19 nt, Homo sapiens
  misc_RNA (1)...(19): siRNA sense strand
gaugaugaauuguacucua

SEQ ID NO: 865780 - RNA, 19 nt, Homo sapiens
  misc_RNA (1)...(19): siRNA sense strand
guagagagaauuaaaguug

SEQ ID NO: 865781 - RNA, 19 nt, Homo sapiens
  misc_RNA (1)...(19): siRNA sense strand
gcucaugccuaaccuucua

SEQ ID NO: 865782 - RNA, 19 nt, Homo sapiens
  misc_RNA (1)...(19): siRNA sense strand
ggucacaaauucagucaga

SEQ ID NO: 865783 - RNA, 19 nt, Homo sapiens
  misc_RNA (1)...(19): siRNA sense strand
gagaguggguuugaagauu

SEQ ID NO: 865784 - RNA, 19 nt, Homo sapiens
  misc_RNA (1)...(19): siRNA sense strand
guugguagccuuugaagua

SEQ ID NO: 865785 - RNA, 19 nt, Homo sapiens
  misc_RNA (1)...(19): siRNA sense strand
gacuagaaguugucagaaa

SEQ ID NO: 865786 - RNA, 19 nt, Homo sapiens
  misc_RNA (1)...(19): siRNA sense strand
ccacaggcccuuccuauga

SEQ ID NO: 865787 - RNA, 19 nt, Homo sapiens
  misc_RNA (1)...(19): siRNA sense strand
aaacauuucuccuggauuc

SEQ ID NO: 865788 - RNA, 19 nt, Homo sapiens
  misc_RNA (1)...(19): siRNA sense strand
guucaagacccgaguauuu

SEQ ID NO: 865789 - RNA, 19 nt, Homo sapiens
  misc_RNA (1)...(19): siRNA sense strand
ggaguacauucugucuuua

SEQ ID NO: 865790 - RNA, 19 nt, Homo sapiens
  misc_RNA (1)...(19): siRNA sense strand
gggaauguauugacagaau

SEQ ID NO: 865791 - RNA, 19 nt, Homo sapiens
  misc_RNA (1)...(19): siRNA sense strand
aagcagcccuuuacauauu

SEQ ID NO: 865792 - RNA, 19 nt, Homo sapiens
  misc_RNA (1)...(19): siRNA sense strand
uggaagaacucaagaagug

SEQ ID NO: 865793 - RNA, 19 nt, Homo sapiens
  misc_RNA (1)...(19): siRNA sense strand
agaagucaguccagaagua

SEQ ID NO: 865794 - RNA, 19 nt, Homo sapiens
  misc_RNA (1)...(19): siRNA sense strand
guaauacauuuccacaaga

SEQ ID NO: 865795 - RNA, 19 nt, Homo sapiens
  misc_RNA (1)...(19): siRNA sense strand
gcucuaaagcccaauguaa

SEQ ID NO: 865796 - RNA, 19 nt, Homo sapiens
  misc_RNA (1)...(19): siRNA sense strand
cgagaagucuacaauggaa

SEQ ID NO: 865797 - RNA, 19 nt, Homo sapiens
  misc_RNA (1)...(19): siRNA sense strand
caacagaaggaucccauuu

SEQ ID NO: 865798 - RNA, 19 nt, Homo sapiens
  misc_RNA (1)...(19): siRNA sense strand
uggaguacauucugucuuu

SEQ ID NO: 865799 - RNA, 19 nt, Homo sapiens
  misc_RNA (1)...(19): siRNA sense strand
gaggaaggcugggacauca

SEQ ID NO: 865800 - RNA, 19 nt, Homo sapiens
  misc_RNA (1)...(19): siRNA sense strand
ugaaagcgcugggagauuc

SEQ ID NO: 865801 - RNA, 19 nt, Homo sapiens
  misc_RNA (1)...(19): siRNA sense strand
ggacaauuguggaagaaag

SEQ ID NO: 865802 - RNA, 19 nt, Homo sapiens
  misc_RNA (1)...(19): siRNA sense strand
gaaguaguagagaucuuua

SEQ ID NO: 865803 - RNA, 19 nt, Homo sapiens
  misc_RNA (1)...(19): siRNA sense strand
uaagguagcauuugaugaa

SEQ ID NO: 865804 - RNA, 19 nt, Homo sapiens
  misc_RNA (1)...(19): siRNA sense strand
gaaacuguaucucauucau

SEQ ID NO: 865805 - RNA, 19 nt, Homo sapiens
  misc_RNA (1)...(19): siRNA sense strand
ggaagagauugaaggugaa

SEQ ID NO: 865806 - RNA, 19 nt, Homo sapiens
  misc_RNA (1)...(19): siRNA sense strand
caacagugcacaaagacua

SEQ ID NO: 865807 - RNA, 19 nt, Homo sapiens
  misc_RNA (1)...(19): siRNA sense strand
gaguucauauucuuccuuu

SEQ ID NO: 865808 - RNA, 19 nt, Homo sapiens
  misc_RNA (1)...(19): siRNA sense strand
caaagaaggaagagauuga

SEQ ID NO: 865809 - RNA, 19 nt, Homo sapiens
  misc_RNA (1)...(19): siRNA sense strand
ggcaauauuuacugaagaa

SEQ ID NO: 865810 - RNA, 19 nt, Homo sapiens
  misc_RNA (1)...(19): siRNA sense strand
gauccugccugcaacuuau

SEQ ID NO: 865811 - RNA, 19 nt, Homo sapiens
  misc_RNA (1)...(19): siRNA sense strand
gguggcagcuguccagaga

SEQ ID NO: 865812 - RNA, 19 nt, Homo sapiens
  misc_RNA (1)...(19): siRNA sense strand
uaucagaaguacuugagaa

SEQ ID NO: 865813 - RNA, 19 nt, Homo sapiens
  misc_RNA (1)...(19): siRNA sense strand
gcuccuaccuccucuuuag

SEQ ID NO: 865814 - RNA, 19 nt, Homo sapiens
  misc_RNA (1)...(19): siRNA sense strand
gaagaagacagggacaauu

SEQ ID NO: 865815 - RNA, 19 nt, Homo sapiens
  misc_RNA (1)...(19): siRNA sense strand
gguagcauuugaugaagaa

SEQ ID NO: 865816 - RNA, 19 nt, Homo sapiens
  misc_RNA (1)...(19): siRNA sense strand
gaauccaaauccucauaug

SEQ ID NO: 865817 - RNA, 19 nt, Homo sapiens
  misc_RNA (1)...(19): siRNA sense strand
ggaauguauugacagaaug

SEQ ID NO: 865818 - RNA, 19 nt, Homo sapiens
  misc_RNA (1)...(19): siRNA sense strand
caugaaauccggcaaguga

SEQ ID NO: 865819 - RNA, 19 nt, Homo sapiens
  misc_RNA (1)...(19): siRNA sense strand
ggaaugaagaugaugaugu

SEQ ID NO: 865820 - RNA, 19 nt, Homo sapiens
  misc_RNA (1)...(19): siRNA sense strand
ugauuaagguagcauuuga

SEQ ID NO: 865821 - RNA, 19 nt, Homo sapiens
  misc_RNA (1)...(19): siRNA sense strand
agaagaagauuacaaugca

SEQ ID NO: 865822 - RNA, 19 nt, Homo sapiens
  misc_RNA (1)...(19): siRNA sense strand
cuacaggauuguucaaguu

SEQ ID NO: 865823 - RNA, 19 nt, Homo sapiens
  misc_RNA (1)...(19): siRNA sense strand
gcaaaaccgggcaauauua

SEQ ID NO: 865824 - RNA, 19 nt, Homo sapiens
  misc_RNA (1)...(19): siRNA sense strand
ccagcaaacguguguauaa

SEQ ID NO: 865825 - RNA, 19 nt, Homo sapiens
  misc_RNA (1)...(19): siRNA sense strand
gauuagagcacggaacuuu

SEQ ID NO: 865826 - RNA, 19 nt, Homo sapiens
  misc_RNA (1)...(19): siRNA sense strand
caugauaccaggaauugua

SEQ ID NO: 865827 - RNA, 19 nt, Homo sapiens
  misc_RNA (1)...(19): siRNA sense strand
gcaaaagugucugguuuaa

SEQ ID NO: 865828 - RNA, 19 nt, Homo sapiens
  misc_RNA (1)...(19): siRNA sense strand
uagcauagaacaagagaaa

SEQ ID NO: 865829 - RNA, 19 nt, Homo sapiens
  misc_RNA (1)...(19): siRNA sense strand
gacaguaguuuaccaagag

SEQ ID NO: 865830 - RNA, 19 nt, Homo sapiens
  misc_RNA (1)...(19): siRNA sense strand
gagaauccaaauccucaua

SEQ ID NO: 865831 - RNA, 19 nt, Homo sapiens
  misc_RNA (1)...(19): siRNA sense strand
cuugugaucucuuugauga

SEQ ID NO: 865832 - RNA, 19 nt, Homo sapiens
  misc_RNA (1)...(19): siRNA sense strand
gauccagacuccuuuacau

SEQ ID NO: 865833 - RNA, 19 nt, Homo sapiens
  misc_RNA (1)...(19): siRNA sense strand
ccaacgccuuucauuauug

SEQ ID NO: 865834 - RNA, 19 nt, Homo sapiens
  misc_RNA (1)...(19): siRNA sense strand
cagaaguacuugagaaugg

SEQ ID NO: 865835 - RNA, 19 nt, Homo sapiens
  misc_RNA (1)...(19): siRNA sense strand
gagcuauccuggccuuuua

SEQ ID NO: 865836 - RNA, 19 nt, Homo sapiens
  misc_RNA (1)...(19): siRNA sense strand
caagaaggacugcagauca

SEQ ID NO: 865837 - RNA, 19 nt, Homo sapiens
  misc_RNA (1)...(19): siRNA sense strand
ggaagcaacagcauuguca

SEQ ID NO: 865838 - RNA, 19 nt, Homo sapiens
  misc_RNA (1)...(19): siRNA sense strand
gcaagucaacucagcaaga

SEQ ID NO: 865839 - RNA, 19 nt, Homo sapiens
  misc_RNA (1)...(19): siRNA sense strand
gcagagccaguaauacauu

SEQ ID NO: 865840 - RNA, 19 nt, Homo sapiens
  misc_RNA (1)...(19): siRNA sense strand
ggauggaggcacuauuaaa

SEQ ID NO: 865841 - RNA, 19 nt, Homo sapiens
  misc_RNA (1)...(19): siRNA sense strand
caguauacauccaagaaug

SEQ ID NO: 865842 - RNA, 19 nt, Homo sapiens
  misc_RNA (1)...(19): siRNA sense strand
cagagacuaucagcguuua

SEQ ID NO: 865843 - RNA, 19 nt, Homo sapiens
  misc_RNA (1)...(19): siRNA sense strand
caaacuaccccacaaauaa

SEQ ID NO: 865844 - RNA, 19 nt, Homo sapiens
  misc_RNA (1)...(19): siRNA sense strand
gaagaagucaguccagaag

SEQ ID NO: 865845 - RNA, 19 nt, Homo sapiens
  misc_RNA (1)...(19): siRNA sense strand
gaaaauaacccagugaaga

SEQ ID NO: 865846 - RNA, 19 nt, Homo sapiens
  misc_RNA (1)...(19): siRNA sense strand
caagcaccaucccuacuga

SEQ ID NO: 865847 - RNA, 19 nt, Homo sapiens
  misc_RNA (1)...(19): siRNA sense strand
ugaucuggcugaaguagaa

SEQ ID NO: 865848 - RNA, 19 nt, Homo sapiens
  misc_RNA (1)...(19): siRNA sense strand
caaccuaccuuccuaucag

SEQ ID NO: 865849 - RNA, 19 nt, Homo sapiens
  misc_RNA (1)...(19): siRNA sense strand
gaauaaaccuguguucuaa

SEQ ID NO: 865850 - RNA, 19 nt, Homo sapiens
  misc_RNA (1)...(19): siRNA sense strand
gcacggacauucaauauuc

SEQ ID NO: 865851 - RNA, 19 nt, Homo sapiens
  misc_RNA (1)...(19): siRNA sense strand
cagaaucacuugcuauaaa

SEQ ID NO: 865852 - RNA, 19 nt, Homo sapiens
  misc_RNA (1)...(19): siRNA sense strand
caauguaccucucccauga

SEQ ID NO: 865853 - RNA, 19 nt, Homo sapiens
  misc_RNA (1)...(19): siRNA sense strand
cggcaaggcucccagauug

SEQ ID NO: 865854 - RNA, 19 nt, Homo sapiens
  misc_RNA (1)...(19): siRNA sense strand
gugacaggaucaauguuua

SEQ ID NO: 865855 - RNA, 19 nt, Homo sapiens
  misc_RNA (1)...(19): siRNA sense strand
acaagaugcugcaguuuga

SEQ ID NO: 865856 - RNA, 19 nt, Homo sapiens
  misc_RNA (1)...(19): siRNA sense strand
gcaaagacaggaagauauc

SEQ ID NO: 865857 - RNA, 19 nt, Homo sapiens
  misc_RNA (1)...(19): siRNA sense strand
gcaggagacuggcaaagac

SEQ ID NO: 865858 - RNA, 19 nt, Homo sapiens
  misc_RNA (1)...(19): siRNA sense strand
aaaccagaaucacuugcua

SEQ ID NO: 865859 - RNA, 19 nt, Homo sapiens
  misc_RNA (1)...(19): siRNA sense strand
gaacugggcacggacauuc

SEQ ID NO: 865860 - RNA, 19 nt, Homo sapiens
  misc_RNA (1)...(19): siRNA sense strand
gccacaagaugcugcaguu

SEQ ID NO: 865861 - RNA, 19 nt, Homo sapiens
  misc_RNA (1)...(19): siRNA sense strand
cagagaaacgagucuuuaa

SEQ ID NO: 865862 - RNA, 19 nt, Homo sapiens
  misc_RNA (1)...(19): siRNA sense strand
gcaagggccaggucuacaa

SEQ ID NO: 865863 - RNA, 19 nt, Homo sapiens
  misc_RNA (1)...(19): siRNA sense strand
cuucaguaccuuaucauua

SEQ ID NO: 865864 - RNA, 19 nt, Homo sapiens
  misc_RNA (1)...(19): siRNA sense strand
ccugaugaauguacaaugu

SEQ ID NO: 865865 - RNA, 19 nt, Homo sapiens
  misc_RNA (1)...(19): siRNA sense strand
gcaguuugaugagcucuuc

SEQ ID NO: 865866 - RNA, 19 nt, Homo sapiens
  misc_RNA (1)...(19): siRNA sense strand
acagagaaacgagucuuua

SEQ ID NO: 865867 - RNA, 19 nt, Homo sapiens
  misc_RNA (1)...(19): siRNA sense strand
aggaagauauccaacacuu

SEQ ID NO: 865868 - RNA, 19 nt, Homo sapiens
  misc_RNA (1)...(19): siRNA sense strand
gccaugaccugcucaacgu

SEQ ID NO: 865869 - RNA, 19 nt, Homo sapiens
  misc_RNA (1)...(19): siRNA sense strand
ggacauucaauauucacuu

SEQ ID NO: 865870 - RNA, 19 nt, Homo sapiens
  misc_RNA (1)...(19): siRNA sense strand
ggaagauauccaacacuug

SEQ ID NO: 865871 - RNA, 19 nt, Homo sapiens
  misc_RNA (1)...(19): siRNA sense strand
ggcaaagacaggaagauau

SEQ ID NO: 865872 - RNA, 19 nt, Homo sapiens
  misc_RNA (1)...(19): siRNA sense strand
gggcacggacauucaauau

SEQ ID NO: 865873 - RNA, 19 nt, Homo sapiens
  misc_RNA (1)...(19): siRNA sense strand
gcacuggagcucugugaca

SEQ ID NO: 865874 - RNA, 19 nt, Homo sapiens
  misc_RNA (1)...(19): siRNA sense strand
cuauaaaucauccugagaa

SEQ ID NO: 865875 - RNA, 19 nt, Homo sapiens
  misc_RNA (1)...(19): siRNA sense strand
ccagaaucacuugcuauaa

SEQ ID NO: 865876 - RNA, 19 nt, Homo sapiens
  misc_RNA (1)...(19): siRNA sense strand
caugauuacucgccacaag

SEQ ID NO: 865877 - RNA, 19 nt, Homo sapiens
  misc_RNA (1)...(19): siRNA sense strand
uggcaaagacaggaagaua

SEQ ID NO: 865878 - RNA, 19 nt, Homo sapiens
  misc_RNA (1)...(19): siRNA sense strand
cacaagaugcugcaguuug

SEQ ID NO: 865879 - RNA, 19 nt, Homo sapiens
  misc_RNA (1)...(19): siRNA sense strand
gcaccguguucaucuucug

SEQ ID NO: 865880 - RNA, 19 nt, Homo sapiens
  misc_RNA (1)...(19): siRNA sense strand
gcuauaaaucauccugaga

SEQ ID NO: 865881 - RNA, 19 nt, Homo sapiens
  misc_RNA (1)...(19): siRNA sense strand
guuuagcgcucaccaccau

SEQ ID NO: 865882 - RNA, 19 nt, Homo sapiens
  misc_RNA (1)...(19): siRNA sense strand
gcaccagcuuguugcuagu

SEQ ID NO: 865883 - RNA, 19 nt, Homo sapiens
  misc_RNA (1)...(19): siRNA sense strand
gcacuggcugguuuacaau

SEQ ID NO: 865884 - RNA, 19 nt, Homo sapiens
  misc_RNA (1)...(19): siRNA sense strand
ugugacaggaucaauguuu

SEQ ID NO: 865885 - RNA, 19 nt, Homo sapiens
  misc_RNA (1)...(19): siRNA sense strand
ugacaggaucaauguuuau

SEQ ID NO: 865886 - RNA, 19 nt, Homo sapiens
  misc_RNA (1)...(19): siRNA sense strand
ccagcuuguugcuagugua

SEQ ID NO: 865887 - RNA, 19 nt, Homo sapiens
  misc_RNA (1)...(19): siRNA sense strand
gacaggaagauauccaaca

SEQ ID NO: 865888 - RNA, 19 nt, Homo sapiens
  misc_RNA (1)...(19): siRNA sense strand
ggacgcaagggcagucauc

SEQ ID NO: 865889 - RNA, 19 nt, Homo sapiens
  misc_RNA (1)...(19): siRNA sense strand
ccacaagaugcugcaguuu

SEQ ID NO: 865890 - RNA, 19 nt, Homo sapiens
  misc_RNA (1)...(19): siRNA sense strand
gaaaccagaaucacuugcu

SEQ ID NO: 865891 - RNA, 19 nt, Homo sapiens
  misc_RNA (1)...(19): siRNA sense strand
gcaccagccugagggucau

SEQ ID NO: 865892 - RNA, 19 nt, Homo sapiens
  misc_RNA (1)...(19): siRNA sense strand
gacaggaucaauguuuaug

SEQ ID NO: 865893 - RNA, 19 nt, Homo sapiens
  misc_RNA (1)...(19): siRNA sense strand
agcacuggcugguuuacaa

SEQ ID NO: 865894 - RNA, 19 nt, Homo sapiens
  misc_RNA (1)...(19): siRNA sense strand
caugugcaccagcuuguug

SEQ ID NO: 865895 - RNA, 19 nt, Homo sapiens
  misc_RNA (1)...(19): siRNA sense strand
accagaaucacuugcuaua

SEQ ID NO: 865896 - RNA, 19 nt, Homo sapiens
  misc_RNA (1)...(19): siRNA sense strand
ggcaaggcucccagauuga

SEQ ID NO: 865897 - RNA, 19 nt, Homo sapiens
  misc_RNA (1)...(19): siRNA sense strand
ggcacggacauucaauauu

SEQ ID NO: 865898 - RNA, 19 nt, Homo sapiens
  misc_RNA (1)...(19): siRNA sense strand
cacagagaaacgagucuuu

SEQ ID NO: 865899 - RNA, 19 nt, Homo sapiens
  misc_RNA (1)...(19): siRNA sense strand
acaggaagauauccaacac

SEQ ID NO: 865900 - RNA, 19 nt, Homo sapiens
  misc_RNA (1)...(19): siRNA sense strand
gaaucacuugcuauaaauc

SEQ ID NO: 865901 - RNA, 19 nt, Homo sapiens
  misc_RNA (1)...(19): siRNA sense strand
cacggacauucaauauuca

SEQ ID NO: 865902 - RNA, 19 nt, Homo sapiens
  misc_RNA (1)...(19): siRNA sense strand
ugagggucaucgcgcauuc

SEQ ID NO: 865903 - RNA, 19 nt, Homo sapiens
  misc_RNA (1)...(19): siRNA sense strand
ggaucccaaucacccuuca

SEQ ID NO: 865904 - RNA, 19 nt, Homo sapiens
  misc_RNA (1)...(19): siRNA sense strand
acuggcugguuuacaauga

SEQ ID NO: 865905 - RNA, 19 nt, Homo sapiens
  misc_RNA (1)...(19): siRNA sense strand
caaucacccuucaguaccu

SEQ ID NO: 865906 - RNA, 19 nt, Homo sapiens
  misc_RNA (1)...(19): siRNA sense strand
agagaaacgagucuuuaag

SEQ ID NO: 865907 - RNA, 19 nt, Homo sapiens
  misc_RNA (1)...(19): siRNA sense strand
caacaucacuaucuugaaa

SEQ ID NO: 865908 - RNA, 19 nt, Homo sapiens
  misc_RNA (1)...(19): siRNA sense strand
gcgaggagcuggacaccua

SEQ ID NO: 865909 - RNA, 19 nt, Homo sapiens
  misc_RNA (1)...(19): siRNA sense strand
gcacagcaaccacuacuac

SEQ ID NO: 865910 - RNA, 19 nt, Homo sapiens
  misc_RNA (1)...(19): siRNA sense strand
gaaccucuacgaccacuuc

SEQ ID NO: 865911 - RNA, 19 nt, Homo sapiens
  misc_RNA (1)...(19): siRNA sense strand
gggccacacuggacccaaa

SEQ ID NO: 865912 - RNA, 19 nt, Homo sapiens
  misc_RNA (1)...(19): siRNA sense strand
gaucaacaucacuaucuug

SEQ ID NO: 865913 - RNA, 19 nt, Homo sapiens
  misc_RNA (1)...(19): siRNA sense strand
ggaaccagaaggagaccua

SEQ ID NO: 865914 - RNA, 19 nt, Homo sapiens
  misc_RNA (1)...(19): siRNA sense strand
gagcuggacaccuacauca

SEQ ID NO: 865915 - RNA, 19 nt, Homo sapiens
  misc_RNA (1)...(19): siRNA sense strand
gcugaagaacaacaugaaa

SEQ ID NO: 865916 - RNA, 19 nt, Homo sapiens
  misc_RNA (1)...(19): siRNA sense strand
agaccuaccugcacaucau

SEQ ID NO: 865917 - RNA, 19 nt, Homo sapiens
  misc_RNA (1)...(19): siRNA sense strand
gcaaagccagagccugaug

SEQ ID NO: 865918 - RNA, 19 nt, Homo sapiens
  misc_RNA (1)...(19): siRNA sense strand
gggcugaagaacaacauga

SEQ ID NO: 865919 - RNA, 19 nt, Homo sapiens
  misc_RNA (1)...(19): siRNA sense strand
aggaggagguggugaucuu

SEQ ID NO: 865920 - RNA, 19 nt, Homo sapiens
  misc_RNA (1)...(19): siRNA sense strand
ccaagggaaauauggcaaa

SEQ ID NO: 865921 - RNA, 19 nt, Homo sapiens
  misc_RNA (1)...(19): siRNA sense strand
ccggcaaguucuacugcua

SEQ ID NO: 865922 - RNA, 19 nt, Homo sapiens
  misc_RNA (1)...(19): siRNA sense strand
guggcuaccuggucaagca

SEQ ID NO: 865923 - RNA, 19 nt, Homo sapiens
  misc_RNA (1)...(19): siRNA sense strand
gaagggugaccgcggagau

SEQ ID NO: 865924 - RNA, 19 nt, Homo sapiens
  misc_RNA (1)...(19): siRNA sense strand
uacgaccacuucaacaugu

SEQ ID NO: 865925 - RNA, 19 nt, Homo sapiens
  misc_RNA (1)...(19): siRNA sense strand
cauguucaccggcaaguuc

SEQ ID NO: 865926 - RNA, 19 nt, Homo sapiens
  misc_RNA (1)...(19): siRNA sense strand
cuacgaccacuucaacaug

SEQ ID NO: 865927 - RNA, 19 nt, Homo sapiens
  misc_RNA (1)...(19): siRNA sense strand
caagggaaauauggcaaaa

SEQ ID NO: 865928 - RNA, 19 nt, Homo sapiens
  misc_RNA (1)...(19): siRNA sense strand
agaagcccaugcacagcaa

SEQ ID NO: 865929 - RNA, 19 nt, Homo sapiens
  misc_RNA (1)...(19): siRNA sense strand
gaucuucgacacggaguuc

SEQ ID NO: 865930 - RNA, 19 nt, Homo sapiens
  misc_RNA (1)...(19): siRNA sense strand
ggaggagguggugaucuug

SEQ ID NO: 865931 - RNA, 19 nt, Homo sapiens
  misc_RNA (1)...(19): siRNA sense strand
ggagguggugaucuuguuc

SEQ ID NO: 865932 - RNA, 19 nt, Homo sapiens
  misc_RNA (1)...(19): siRNA sense strand
gaggagguggugaucuugu

SEQ ID NO: 865933 - RNA, 19 nt, Homo sapiens
  misc_RNA (1)...(19): siRNA sense strand
cgugagaacgccaucuuca

SEQ ID NO: 865934 - RNA, 19 nt, Homo sapiens
  misc_RNA (1)...(19): siRNA sense strand
aggagguggugaucuuguu

SEQ ID NO: 865935 - RNA, 19 nt, Homo sapiens
  misc_RNA (1)...(19): siRNA sense strand
ggagcuggacaccuacauc

SEQ ID NO: 865936 - RNA, 19 nt, Homo sapiens
  misc_RNA (1)...(19): siRNA sense strand
caacaucacuaucuugaaa

SEQ ID NO: 865937 - RNA, 19 nt, Homo sapiens
  misc_RNA (1)...(19): siRNA sense strand
gcgaggagcuggacaccua

SEQ ID NO: 865938 - RNA, 19 nt, Homo sapiens
  misc_RNA (1)...(19): siRNA sense strand
gcacagcaaccacuacuac

SEQ ID NO: 865939 - RNA, 19 nt, Homo sapiens
  misc_RNA (1)...(19): siRNA sense strand
gaaccucuacgaccacuuc

SEQ ID NO: 865940 - RNA, 19 nt, Homo sapiens
  misc_RNA (1)...(19): siRNA sense strand
gggccacacuggacccaaa

SEQ ID NO: 865941 - RNA, 19 nt, Homo sapiens
  misc_RNA (1)...(19): siRNA sense strand
gaucaacaucacuaucuug

SEQ ID NO: 865942 - RNA, 19 nt, Homo sapiens
  misc_RNA (1)...(19): siRNA sense strand
ggaaccagaaggagaccua

SEQ ID NO: 865943 - RNA, 19 nt, Homo sapiens
  misc_RNA (1)...(19): siRNA sense strand
gagcuggacaccuacauca

SEQ ID NO: 865944 - RNA, 19 nt, Homo sapiens
  misc_RNA (1)...(19): siRNA sense strand
gcugaagaacaacaugaaa

SEQ ID NO: 865945 - RNA, 19 nt, Homo sapiens
  misc_RNA (1)...(19): siRNA sense strand
agaccuaccugcacaucau

SEQ ID NO: 865946 - RNA, 19 nt, Homo sapiens
  misc_RNA (1)...(19): siRNA sense strand
gcaaagccagagccugaug

SEQ ID NO: 865947 - RNA, 19 nt, Homo sapiens
  misc_RNA (1)...(19): siRNA sense strand
gggcugaagaacaacauga

SEQ ID NO: 865948 - RNA, 19 nt, Homo sapiens
  misc_RNA (1)...(19): siRNA sense strand
aggaggagguggugaucuu

SEQ ID NO: 865949 - RNA, 19 nt, Homo sapiens
  misc_RNA (1)...(19): siRNA sense strand
ccaagggaaauauggcaaa

SEQ ID NO: 865950 - RNA, 19 nt, Homo sapiens
  misc_RNA (1)...(19): siRNA sense strand
ccggcaaguucuacugcua

SEQ ID NO: 865951 - RNA, 19 nt, Homo sapiens
  misc_RNA (1)...(19): siRNA sense strand
guggcuaccuggucaagca

SEQ ID NO: 865952 - RNA, 19 nt, Homo sapiens
  misc_RNA (1)...(19): siRNA sense strand
gaagggugaccgcggagau

SEQ ID NO: 865953 - RNA, 19 nt, Homo sapiens
  misc_RNA (1)...(19): siRNA sense strand
uacgaccacuucaacaugu

SEQ ID NO: 865954 - RNA, 19 nt, Homo sapiens
  misc_RNA (1)...(19): siRNA sense strand
cauguucaccggcaaguuc

SEQ ID NO: 865955 - RNA, 19 nt, Homo sapiens
  misc_RNA (1)...(19): siRNA sense strand
cuacgaccacuucaacaug

SEQ ID NO: 865956 - RNA, 19 nt, Homo sapiens
  misc_RNA (1)...(19): siRNA sense strand
caagggaaauauggcaaaa

SEQ ID NO: 865957 - RNA, 19 nt, Homo sapiens
  misc_RNA (1)...(19): siRNA sense strand
agaagcccaugcacagcaa

SEQ ID NO: 865958 - RNA, 19 nt, Homo sapiens
  misc_RNA (1)...(19): siRNA sense strand
gaucuucgacacggaguuc

SEQ ID NO: 865959 - RNA, 19 nt, Homo sapiens
  misc_RNA (1)...(19): siRNA sense strand
ggaggagguggugaucuug

SEQ ID NO: 865960 - RNA, 19 nt, Homo sapiens
  misc_RNA (1)...(19): siRNA sense strand
ggagguggugaucuuguuc

SEQ ID NO: 865961 - RNA, 19 nt, Homo sapiens
  misc_RNA (1)...(19): siRNA sense strand
gaggagguggugaucuugu

SEQ ID NO: 865962 - RNA, 19 nt, Homo sapiens
  misc_RNA (1)...(19): siRNA sense strand
cgugagaacgccaucuuca

SEQ ID NO: 865963 - RNA, 19 nt, Homo sapiens
  misc_RNA (1)...(19): siRNA sense strand
aggagguggugaucuuguu

SEQ ID NO: 865964 - RNA, 19 nt, Homo sapiens
  misc_RNA (1)...(19): siRNA sense strand
ggagcuggacaccuacauc

SEQ ID NO: 865965 - RNA, 19 nt, Homo sapiens
  misc_RNA (1)...(19): siRNA sense strand
caacaucacuaucuugaaa

SEQ ID NO: 865966 - RNA, 19 nt, Homo sapiens
  misc_RNA (1)...(19): siRNA sense strand
gcgaggagcuggacaccua

SEQ ID NO: 865967 - RNA, 19 nt, Homo sapiens
  misc_RNA (1)...(19): siRNA sense strand
gcacagcaaccacuacuac

SEQ ID NO: 865968 - RNA, 19 nt, Homo sapiens
  misc_RNA (1)...(19): siRNA sense strand
gaaccucuacgaccacuuc

SEQ ID NO: 865969 - RNA, 19 nt, Homo sapiens
  misc_RNA (1)...(19): siRNA sense strand
gggccacacuggacccaaa

SEQ ID NO: 865970 - RNA, 19 nt, Homo sapiens
  misc_RNA (1)...(19): siRNA sense strand
gaucaacaucacuaucuug

SEQ ID NO: 865971 - RNA, 19 nt, Homo sapiens
  misc_RNA (1)...(19): siRNA sense strand
ggaaccagaaggagaccua

SEQ ID NO: 865972 - RNA, 19 nt, Homo sapiens
  misc_RNA (1)...(19): siRNA sense strand
gagcuggacaccuacauca

SEQ ID NO: 865973 - RNA, 19 nt, Homo sapiens
  misc_RNA (1)...(19): siRNA sense strand
agaccuaccugcacaucau

SEQ ID NO: 865974 - RNA, 19 nt, Homo sapiens
  misc_RNA (1)...(19): siRNA sense strand
gcaaagccagagccugaug

SEQ ID NO: 865975 - RNA, 19 nt, Homo sapiens
  misc_RNA (1)...(19): siRNA sense strand
aggaggagguggugaucuu

SEQ ID NO: 865976 - RNA, 19 nt, Homo sapiens
  misc_RNA (1)...(19): siRNA sense strand
ccaagggaaauauggcaaa

SEQ ID NO: 865977 - RNA, 19 nt, Homo sapiens
  misc_RNA (1)...(19): siRNA sense strand
ccggcaaguucuacugcua

SEQ ID NO: 865978 - RNA, 19 nt, Homo sapiens
  misc_RNA (1)...(19): siRNA sense strand
guggcuaccuggucaagca

SEQ ID NO: 865979 - RNA, 19 nt, Homo sapiens
  misc_RNA (1)...(19): siRNA sense strand
gaagggugaccgcggagau

SEQ ID NO: 865980 - RNA, 19 nt, Homo sapiens
  misc_RNA (1)...(19): siRNA sense strand
uacgaccacuucaacaugu

SEQ ID NO: 865981 - RNA, 19 nt, Homo sapiens
  misc_RNA (1)...(19): siRNA sense strand
cauguucaccggcaaguuc

SEQ ID NO: 865982 - RNA, 19 nt, Homo sapiens
  misc_RNA (1)...(19): siRNA sense strand
cuacgaccacuucaacaug

SEQ ID NO: 865983 - RNA, 19 nt, Homo sapiens
  misc_RNA (1)...(19): siRNA sense strand
caagggaaauauggcaaaa

SEQ ID NO: 865984 - RNA, 19 nt, Homo sapiens
  misc_RNA (1)...(19): siRNA sense strand
agaagcccaugcacagcaa

SEQ ID NO: 865985 - RNA, 19 nt, Homo sapiens
  misc_RNA (1)...(19): siRNA sense strand
gaucuucgacacggaguuc

SEQ ID NO: 865986 - RNA, 19 nt, Homo sapiens
  misc_RNA (1)...(19): siRNA sense strand
ggaggagguggugaucuug

SEQ ID NO: 865987 - RNA, 19 nt, Homo sapiens
  misc_RNA (1)...(19): siRNA sense strand
ggagguggugaucuuguuc

SEQ ID NO: 865988 - RNA, 19 nt, Homo sapiens
  misc_RNA (1)...(19): siRNA sense strand
gaggagguggugaucuugu

SEQ ID NO: 865989 - RNA, 19 nt, Homo sapiens
  misc_RNA (1)...(19): siRNA sense strand
cgugagaacgccaucuuca

SEQ ID NO: 865990 - RNA, 19 nt, Homo sapiens
  misc_RNA (1)...(19): siRNA sense strand
aggagguggugaucuuguu

SEQ ID NO: 865991 - RNA, 19 nt, Homo sapiens
  misc_RNA (1)...(19): siRNA sense strand
ggagcuggacaccuacauc

SEQ ID NO: 865992 - RNA, 19 nt, Homo sapiens
  misc_RNA (1)...(19): siRNA sense strand
gcccaccucagccuccuaa

SEQ ID NO: 865993 - RNA, 19 nt, Homo sapiens
  misc_RNA (1)...(19): siRNA sense strand
cggucaggcuggucuggaa

SEQ ID NO: 865994 - RNA, 19 nt, Homo sapiens
  misc_RNA (1)...(19): siRNA sense strand
gaaacaagccuauuaaaga

SEQ ID NO: 865995 - RNA, 19 nt, Homo sapiens
  misc_RNA (1)...(19): siRNA sense strand
ggagagaaaucuuacaaau

SEQ ID NO: 865996 - RNA, 19 nt, Homo sapiens
  misc_RNA (1)...(19): siRNA sense strand
ggagagaaaucuuacaaau

SEQ ID NO: 865997 - RNA, 19 nt, Homo sapiens
  misc_RNA (1)...(19): siRNA sense strand
cgacauagaagaauucaua

SEQ ID NO: 865998 - RNA, 19 nt, Homo sapiens
  misc_RNA (1)...(19): siRNA sense strand
ggagcaaccuuacaaaugu

SEQ ID NO: 865999 - RNA, 19 nt, Homo sapiens
  misc_RNA (1)...(19): siRNA sense strand
ugaaagagauggccuugaa

SEQ ID NO: 866000 - RNA, 19 nt, Homo sapiens
  misc_RNA (1)...(19): siRNA sense strand
gaucaaaggugaaauuggu

SEQ ID NO: 866001 - RNA, 19 nt, Homo sapiens
  misc_RNA (1)...(19): siRNA sense strand
agagaaaccuuacaaaugu

SEQ ID NO: 866002 - RNA, 19 nt, Homo sapiens
  misc_RNA (1)...(19): siRNA sense strand
gagagaaaccuuacaaaug

SEQ ID NO: 866003 - RNA, 19 nt, Homo sapiens
  misc_RNA (1)...(19): siRNA sense strand
ucacaacuuucacaucaua

SEQ ID NO: 866004 - RNA, 19 nt, Homo sapiens
  misc_RNA (1)...(19): siRNA sense strand
ugaagaaugugacaaaguu

SEQ ID NO: 866005 - RNA, 19 nt, Homo sapiens
  misc_RNA (1)...(19): siRNA sense strand
ugagaaaccuuacaagugu

SEQ ID NO: 866006 - RNA, 19 nt, Homo sapiens
  misc_RNA (1)...(19): siRNA sense strand
ugagaaaccuuacaagugu

SEQ ID NO: 866007 - RNA, 19 nt, Homo sapiens
  misc_RNA (1)...(19): siRNA sense strand
ugagaaaccuuacaagugu

SEQ ID NO: 866008 - RNA, 19 nt, Homo sapiens
  misc_RNA (1)...(19): siRNA sense strand
ggauguggcuauagaauuc

SEQ ID NO: 866009 - RNA, 19 nt, Homo sapiens
  misc_RNA (1)...(19): siRNA sense strand
ccaaaugcaugaugaagga

SEQ ID NO: 866010 - RNA, 19 nt, Homo sapiens
  misc_RNA (1)...(19): siRNA sense strand
ucaagaagaugaaagagau

SEQ ID NO: 866011 - RNA, 19 nt, Homo sapiens
  misc_RNA (1)...(19): siRNA sense strand
agagaaaccuuacaagugu

SEQ ID NO: 866012 - RNA, 19 nt, Homo sapiens
  misc_RNA (1)...(19): siRNA sense strand
agagaaaccuuacaagugu

SEQ ID NO: 866013 - RNA, 19 nt, Homo sapiens
  misc_RNA (1)...(19): siRNA sense strand
gaaguacacaugagagaaa

SEQ ID NO: 866014 - RNA, 19 nt, Homo sapiens
  misc_RNA (1)...(19): siRNA sense strand
ccacauauuucagaucaaa

SEQ ID NO: 866015 - RNA, 19 nt, Homo sapiens
  misc_RNA (1)...(19): siRNA sense strand
gagagaaaccuuacaagug

SEQ ID NO: 866016 - RNA, 19 nt, Homo sapiens
  misc_RNA (1)...(19): siRNA sense strand
ggauaucucuuccaaaugc

SEQ ID NO: 866017 - RNA, 19 nt, Homo sapiens
  misc_RNA (1)...(19): siRNA sense strand
gagagaaaccauacaaaug

SEQ ID NO: 866018 - RNA, 19 nt, Homo sapiens
  misc_RNA (1)...(19): siRNA sense strand
ggagagaaaccuuacaaau

SEQ ID NO: 866019 - RNA, 19 nt, Homo sapiens
  misc_RNA (1)...(19): siRNA sense strand
guaauucacuccugucaag

SEQ ID NO: 866020 - RNA, 19 nt, Homo sapiens
  misc_RNA (1)...(19): siRNA sense strand
ggagagaaaccauacaaau

SEQ ID NO: 866021 - RNA, 19 nt, Homo sapiens
  misc_RNA (1)...(19): siRNA sense strand
caaaugugaugaaugugaa

SEQ ID NO: 866022 - RNA, 19 nt, Homo sapiens
  misc_RNA (1)...(19): siRNA sense strand
ggaaacaagccuauuaaag

SEQ ID NO: 866023 - RNA, 19 nt, Homo sapiens
  misc_RNA (1)...(19): siRNA sense strand
guggcaagcucuuuaauca

SEQ ID NO: 866024 - RNA, 19 nt, Homo sapiens
  misc_RNA (1)...(19): siRNA sense strand
gcaaggcaauacagaagug

SEQ ID NO: 866025 - RNA, 19 nt, Homo sapiens
  misc_RNA (1)...(19): siRNA sense strand
ggcaagaccuucagucaca

SEQ ID NO: 866026 - RNA, 19 nt, Homo sapiens
  misc_RNA (1)...(19): siRNA sense strand
aauuguagcucacucuuaa

SEQ ID NO: 866027 - RNA, 19 nt, Homo sapiens
  misc_RNA (1)...(19): siRNA sense strand
gcuggaaacaagccuauua

SEQ ID NO: 866028 - RNA, 19 nt, Homo sapiens
  misc_RNA (1)...(19): siRNA sense strand
gcacagaccaacaugauca

SEQ ID NO: 866029 - RNA, 19 nt, Homo sapiens
  misc_RNA (1)...(19): siRNA sense strand
aaucacaacuuucacauca

SEQ ID NO: 866030 - RNA, 19 nt, Homo sapiens
  misc_RNA (1)...(19): siRNA sense strand
gcucaucccuuauauacca

SEQ ID NO: 866031 - RNA, 19 nt, Homo sapiens
  misc_RNA (1)...(19): siRNA sense strand
gaagaauucauacugcaaa

SEQ ID NO: 866032 - RNA, 19 nt, Homo sapiens
  misc_RNA (1)...(19): siRNA sense strand
gggaagugauguuggagaa

SEQ ID NO: 866033 - RNA, 19 nt, Homo sapiens
  misc_RNA (1)...(19): siRNA sense strand
cgucacugcucaucccuua

SEQ ID NO: 866034 - RNA, 19 nt, Homo sapiens
  misc_RNA (1)...(19): siRNA sense strand
gaacuccacauauuucaga

SEQ ID NO: 866035 - RNA, 19 nt, Homo sapiens
  misc_RNA (1)...(19): siRNA sense strand
gaauucauacugcaaagaa

SEQ ID NO: 866036 - RNA, 19 nt, Homo sapiens
  misc_RNA (1)...(19): siRNA sense strand
gagagaaaucuuacaaaug

SEQ ID NO: 866037 - RNA, 19 nt, Homo sapiens
  misc_RNA (1)...(19): siRNA sense strand
gagagaaaucuuacaaaug

SEQ ID NO: 866038 - RNA, 19 nt, Homo sapiens
  misc_RNA (1)...(19): siRNA sense strand
gaaauugguaaucaacuug

SEQ ID NO: 866039 - RNA, 19 nt, Homo sapiens
  misc_RNA (1)...(19): siRNA sense strand
aaucaacaaucacaccuuu

SEQ ID NO: 866040 - RNA, 19 nt, Homo sapiens
  misc_RNA (1)...(19): siRNA sense strand
guagcucacucuuaaggaa

SEQ ID NO: 866041 - RNA, 19 nt, Homo sapiens
  misc_RNA (1)...(19): siRNA sense strand
gagagaaaccauacagaug

SEQ ID NO: 866042 - RNA, 19 nt, Homo sapiens
  misc_RNA (1)...(19): siRNA sense strand
ggagagaaaccauacagau

SEQ ID NO: 866043 - RNA, 19 nt, Homo sapiens
  misc_RNA (1)...(19): siRNA sense strand
gcagagaaaccuuacaagu

SEQ ID NO: 866044 - RNA, 19 nt, Homo sapiens
  misc_RNA (1)...(19): siRNA sense strand
ggagagaaaccuuacaagu

SEQ ID NO: 866045 - RNA, 19 nt, Homo sapiens
  misc_RNA (1)...(19): siRNA sense strand
agaauugacuguggagaaa

SEQ ID NO: 866046 - RNA, 19 nt, Homo sapiens
  misc_RNA (1)...(19): siRNA sense strand
gaagaaugugacaaaguuu

SEQ ID NO: 866047 - RNA, 19 nt, Homo sapiens
  misc_RNA (1)...(19): siRNA sense strand
gucaagacauaccagaauu

SEQ ID NO: 866048 - RNA, 19 nt, Homo sapiens
  misc_RNA (1)...(19): siRNA sense strand
caucauagaguucauagug

SEQ ID NO: 866049 - RNA, 19 nt, Homo sapiens
  misc_RNA (1)...(19): siRNA sense strand
gaagugauguuggagaacu

SEQ ID NO: 866050 - RNA, 19 nt, Homo sapiens
  misc_RNA (1)...(19): siRNA sense strand
cagagaaaccuuacaagug

SEQ ID NO: 866051 - RNA, 19 nt, Homo sapiens
  misc_RNA (1)...(19): siRNA sense strand
ucacugcucaucccuuaua

SEQ ID NO: 866052 - RNA, 19 nt, Homo sapiens
  misc_RNA (1)...(19): siRNA sense strand
gggagcaaccuuacaaaug

SEQ ID NO: 866053 - RNA, 19 nt, Homo sapiens
  misc_RNA (1)...(19): siRNA sense strand
agucaggagucaucccuua

SEQ ID NO: 866054 - RNA, 19 nt, Homo sapiens
  misc_RNA (1)...(19): siRNA sense strand
ugaaggaggucuugucaac

SEQ ID NO: 866055 - RNA, 19 nt, Homo sapiens
  misc_RNA (1)...(19): siRNA sense strand
ugccugaacuccacauauu

SEQ ID NO: 866056 - RNA, 19 nt, Homo sapiens
  misc_RNA (1)...(19): siRNA sense strand
ggcaauaccuuccgucacu

SEQ ID NO: 866057 - RNA, 19 nt, Homo sapiens
  misc_RNA (1)...(19): siRNA sense strand
gaccuucagucacaaguca

SEQ ID NO: 866058 - RNA, 19 nt, Homo sapiens
  misc_RNA (1)...(19): siRNA sense strand
ucccuuaccugccaucgua

SEQ ID NO: 866059 - RNA, 19 nt, Homo sapiens
  misc_RNA (1)...(19): siRNA sense strand
uaaugaugcucccucaguu

SEQ ID NO: 866060 - RNA, 19 nt, Homo sapiens
  misc_RNA (1)...(19): siRNA sense strand
cuugagaagucuacuaaug

SEQ ID NO: 866061 - RNA, 19 nt, Homo sapiens
  misc_RNA (1)...(19): siRNA sense strand
gcuauagaauucucauugg

SEQ ID NO: 866062 - RNA, 19 nt, Homo sapiens
  misc_RNA (1)...(19): siRNA sense strand
caucguagacuucauagug

SEQ ID NO: 866063 - RNA, 19 nt, Homo sapiens
  misc_RNA (1)...(19): siRNA sense strand
gcagcaagaccuucaguca

SEQ ID NO: 866064 - RNA, 19 nt, Homo sapiens
  misc_RNA (1)...(19): siRNA sense strand
gagaaaccuuacaaaugug

SEQ ID NO: 866065 - RNA, 19 nt, Homo sapiens
  misc_RNA (1)...(19): siRNA sense strand
ccaggaaauugagaaagaa

SEQ ID NO: 866066 - RNA, 19 nt, Homo sapiens
  misc_RNA (1)...(19): siRNA sense strand
uguaaugaguguggcaaua

SEQ ID NO: 866067 - RNA, 19 nt, Homo sapiens
  misc_RNA (1)...(19): siRNA sense strand
agagaaaccauacaaaugu

SEQ ID NO: 866068 - RNA, 19 nt, Homo sapiens
  misc_RNA (1)...(19): siRNA sense strand
ugauagaugucacacuguu

SEQ ID NO: 866069 - RNA, 19 nt, Homo sapiens
  misc_RNA (1)...(19): siRNA sense strand
caaacccagauuucuaaua

SEQ ID NO: 866070 - RNA, 19 nt, Homo sapiens
  misc_RNA (1)...(19): siRNA sense strand
ugagaagucuacuaaugau

SEQ ID NO: 866071 - RNA, 19 nt, Homo sapiens
  misc_RNA (1)...(19): siRNA sense strand
gagaaaauccuuacaagug

SEQ ID NO: 866072 - RNA, 19 nt, Homo sapiens
  misc_RNA (1)...(19): siRNA sense strand
caucauagaauucauacug

SEQ ID NO: 866073 - RNA, 19 nt, Homo sapiens
  misc_RNA (1)...(19): siRNA sense strand
gugagaaaccuuacaagug

SEQ ID NO: 866074 - RNA, 19 nt, Homo sapiens
  misc_RNA (1)...(19): siRNA sense strand
gugagaaaccuuacaagug

SEQ ID NO: 866075 - RNA, 19 nt, Homo sapiens
  misc_RNA (1)...(19): siRNA sense strand
cauaagagaauucauacug

SEQ ID NO: 866076 - RNA, 19 nt, Homo sapiens
  misc_RNA (1)...(19): siRNA sense strand
caucauagaauucauacug

SEQ ID NO: 866077 - RNA, 19 nt, Homo sapiens
  misc_RNA (1)...(19): siRNA sense strand
ggacauugcaaagacauga

SEQ ID NO: 866078 - RNA, 19 nt, Homo sapiens
  misc_RNA (1)...(19): siRNA sense strand
gaauucacacugcagagaa

SEQ ID NO: 866079 - RNA, 19 nt, Homo sapiens
  misc_RNA (1)...(19): siRNA sense strand
gagcaaccuuacaaaugug

SEQ ID NO: 866080 - RNA, 19 nt, Homo sapiens
  misc_RNA (1)...(19): siRNA sense strand
auucagcccuucuaauuga

SEQ ID NO: 866081 - RNA, 19 nt, Homo sapiens
  misc_RNA (1)...(19): siRNA sense strand
uaaggaaacaccagauaau

SEQ ID NO: 866082 - RNA, 19 nt, Homo sapiens
  misc_RNA (1)...(19): siRNA sense strand
aaacaggaaguacacauga

SEQ ID NO: 866083 - RNA, 19 nt, Homo sapiens
  misc_RNA (1)...(19): siRNA sense strand
ugaaagucaucacauugga

SEQ ID NO: 866084 - RNA, 19 nt, Homo sapiens
  misc_RNA (1)...(19): siRNA sense strand
acacauaagauaggucaua

SEQ ID NO: 866085 - RNA, 19 nt, Homo sapiens
  misc_RNA (1)...(19): siRNA sense strand
agucggaaaucaaccauug

SEQ ID NO: 866086 - RNA, 19 nt, Homo sapiens
  misc_RNA (1)...(19): siRNA sense strand
ccagauaauccauuuagga

SEQ ID NO: 866087 - RNA, 19 nt, Homo sapiens
  misc_RNA (1)...(19): siRNA sense strand
uccaggaaauugagaaaga

SEQ ID NO: 866088 - RNA, 19 nt, Homo sapiens
  misc_RNA (1)...(19): siRNA sense strand
ucacagcuggcucgacaua

SEQ ID NO: 866089 - RNA, 19 nt, Homo sapiens
  misc_RNA (1)...(19): siRNA sense strand
gcucagaagaggaaaggaa

SEQ ID NO: 866090 - RNA, 19 nt, Homo sapiens
  misc_RNA (1)...(19): siRNA sense strand
guauguggcaagcucuuua

SEQ ID NO: 866091 - RNA, 19 nt, Homo sapiens
  misc_RNA (1)...(19): siRNA sense strand
ggaaacaccagauaaucca

SEQ ID NO: 866092 - RNA, 19 nt, Homo sapiens
  misc_RNA (1)...(19): siRNA sense strand
uguaaugagugcagcaaga

SEQ ID NO: 866093 - RNA, 19 nt, Homo sapiens
  misc_RNA (1)...(19): siRNA sense strand
uguaaugagugcagcaaga

SEQ ID NO: 866094 - RNA, 19 nt, Homo sapiens
  misc_RNA (1)...(19): siRNA sense strand
cagcagcgccuaugaguuu

SEQ ID NO: 866095 - RNA, 19 nt, Homo sapiens
  misc_RNA (1)...(19): siRNA sense strand
gggauccacuucuccauug

SEQ ID NO: 866096 - RNA, 19 nt, Homo sapiens
  misc_RNA (1)...(19): siRNA sense strand
gggcuccacugccagguaa

SEQ ID NO: 866097 - RNA, 19 nt, Homo sapiens
  misc_RNA (1)...(19): siRNA sense strand
gaagaugcgcgagcagauu

SEQ ID NO: 866098 - RNA, 19 nt, Homo sapiens
  misc_RNA (1)...(19): siRNA sense strand
acaaggaccuggagucucu

SEQ ID NO: 866099 - RNA, 19 nt, Homo sapiens
  misc_RNA (1)...(19): siRNA sense strand
ccuugcagcuguuugauga

SEQ ID NO: 866100 - RNA, 19 nt, Homo sapiens
  misc_RNA (1)...(19): siRNA sense strand
caagugcuccugggaagua

SEQ ID NO: 866101 - RNA, 19 nt, Homo sapiens
  misc_RNA (1)...(19): siRNA sense strand
ggaccuggagucucucaaa

SEQ ID NO: 866102 - RNA, 19 nt, Homo sapiens
  misc_RNA (1)...(19): siRNA sense strand
gcagcuguuugaugacuuc

SEQ ID NO: 866103 - RNA, 19 nt, Homo sapiens
  misc_RNA (1)...(19): siRNA sense strand
acucaaggaugguccaguu

SEQ ID NO: 866104 - RNA, 19 nt, Homo sapiens
  misc_RNA (1)...(19): siRNA sense strand
ggacucgugcugccuguug

SEQ ID NO: 866105 - RNA, 19 nt, Homo sapiens
  misc_RNA (1)...(19): siRNA sense strand
cccagaagcugaucaugca

SEQ ID NO: 866106 - RNA, 19 nt, Homo sapiens
  misc_RNA (1)...(19): siRNA sense strand
agcagucagucuccaauaa

SEQ ID NO: 866107 - RNA, 19 nt, Homo sapiens
  misc_RNA (1)...(19): siRNA sense strand
gccaggcccucacagaauc

SEQ ID NO: 866108 - RNA, 19 nt, Homo sapiens
  misc_RNA (1)...(19): siRNA sense strand
gaccuggagucucucaaag

SEQ ID NO: 866109 - RNA, 19 nt, Homo sapiens
  misc_RNA (1)...(19): siRNA sense strand
gcgcuucggcuucuguuug

SEQ ID NO: 866110 - RNA, 19 nt, Homo sapiens
  misc_RNA (1)...(19): siRNA sense strand
gacgugguguuugugauug

SEQ ID NO: 866111 - RNA, 19 nt, Homo sapiens
  misc_RNA (1)...(19): siRNA sense strand
cgacgugguguuugugauu

SEQ ID NO: 866112 - RNA, 19 nt, Homo sapiens
  misc_RNA (1)...(19): siRNA sense strand
ugaccacccugggcccuuu

SEQ ID NO: 866113 - RNA, 19 nt, Homo sapiens
  misc_RNA (1)...(19): siRNA sense strand
gcagucagucuccaauaag

SEQ ID NO: 866114 - RNA, 19 nt, Homo sapiens
  misc_RNA (1)...(19): siRNA sense strand
caacaaggaccuggagucu

SEQ ID NO: 866115 - RNA, 19 nt, Homo sapiens
  misc_RNA (1)...(19): siRNA sense strand
cagcagucagucuccaaua

SEQ ID NO: 866116 - RNA, 19 nt, Homo sapiens
  misc_RNA (1)...(19): siRNA sense strand
gagcagcagcagcgaggaa

SEQ ID NO: 866117 - RNA, 19 nt, Homo sapiens
  misc_RNA (1)...(19): siRNA sense strand
ggauccacuucuccauugu

SEQ ID NO: 866118 - RNA, 19 nt, Homo sapiens
  misc_RNA (1)...(19): siRNA sense strand
ggucaucaccaaccacaag

SEQ ID NO: 866119 - RNA, 19 nt, Homo sapiens
  misc_RNA (1)...(19): siRNA sense strand
aaaggccucuaccgcauca

SEQ ID NO: 866120 - RNA, 19 nt, Homo sapiens
  misc_RNA (1)...(19): siRNA sense strand
caguggaggcugccaagaa

SEQ ID NO: 866121 - RNA, 19 nt, Homo sapiens
  misc_RNA (1)...(19): siRNA sense strand
caaccugggacccuacuuc

SEQ ID NO: 866122 - RNA, 19 nt, Homo sapiens
  misc_RNA (1)...(19): siRNA sense strand
caaggaugguccaguucca

SEQ ID NO: 866123 - RNA, 19 nt, Homo sapiens
  misc_RNA (1)...(19): siRNA sense strand
caagccaggcccucacaga

SEQ ID NO: 866124 - RNA, 19 nt, Homo sapiens
  misc_RNA (1)...(19): siRNA sense strand
guccuggaguggcaagaga

SEQ ID NO: 866125 - RNA, 19 nt, Homo sapiens
  misc_RNA (1)...(19): siRNA sense strand
ccacuucuccauugugucu

SEQ ID NO: 866126 - RNA, 19 nt, Homo sapiens
  misc_RNA (1)...(19): siRNA sense strand
gcuagagcaccaagaccaa

SEQ ID NO: 866127 - RNA, 19 nt, Homo sapiens
  misc_RNA (1)...(19): siRNA sense strand
ccaccagcagcgccuauga

SEQ ID NO: 866128 - RNA, 19 nt, Homo sapiens
  misc_RNA (1)...(19): siRNA sense strand
cgcuucggcuucuguuuga

SEQ ID NO: 866129 - RNA, 19 nt, Homo sapiens
  misc_RNA (1)...(19): siRNA sense strand
gcagcagucagucuccaau

SEQ ID NO: 866130 - RNA, 19 nt, Homo sapiens
  misc_RNA (1)...(19): siRNA sense strand
cgaguccuacguacaaugu

SEQ ID NO: 866131 - RNA, 19 nt, Homo sapiens
  misc_RNA (1)...(19): siRNA sense strand
caucaccccucuccaacaa

SEQ ID NO: 866132 - RNA, 19 nt, Homo sapiens
  misc_RNA (1)...(19): siRNA sense strand
gcucgauggcauuaaguuc

SEQ ID NO: 866133 - RNA, 19 nt, Homo sapiens
  misc_RNA (1)...(19): siRNA sense strand
uggccgacgugguguuugu

SEQ ID NO: 866134 - RNA, 19 nt, Homo sapiens
  misc_RNA (1)...(19): siRNA sense strand
gaugcacaacugagaaucu

SEQ ID NO: 866135 - RNA, 19 nt, Homo sapiens
  misc_RNA (1)...(19): siRNA sense strand
aagaugcgcgagcagauug

SEQ ID NO: 866136 - RNA, 19 nt, Homo sapiens
  misc_RNA (1)...(19): siRNA sense strand
ccagagcggcuucgucaac

SEQ ID NO: 866137 - RNA, 19 nt, Homo sapiens
  misc_RNA (1)...(19): siRNA sense strand
caaaccugccucaguggau

SEQ ID NO: 866138 - RNA, 19 nt, Homo sapiens
  misc_RNA (1)...(19): siRNA sense strand
guacagccucgugguguuc

SEQ ID NO: 866139 - RNA, 19 nt, Homo sapiens
  misc_RNA (1)...(19): siRNA sense strand
ggacuaggcuccauuauaa

SEQ ID NO: 866140 - RNA, 19 nt, Homo sapiens
  misc_RNA (1)...(19): siRNA sense strand
ggcguugacuuguuaauga

SEQ ID NO: 866141 - RNA, 19 nt, Homo sapiens
  misc_RNA (1)...(19): siRNA sense strand
gaaaaggccuuagcaguag

SEQ ID NO: 866142 - RNA, 19 nt, Homo sapiens
  misc_RNA (1)...(19): siRNA sense strand
aaauagcagcgcaguguua

SEQ ID NO: 866143 - RNA, 19 nt, Homo sapiens
  misc_RNA (1)...(19): siRNA sense strand
cagcaagaaagacuguuua

SEQ ID NO: 866144 - RNA, 19 nt, Homo sapiens
  misc_RNA (1)...(19): siRNA sense strand
ggguggacaucgacgaauu

SEQ ID NO: 866145 - RNA, 19 nt, Homo sapiens
  misc_RNA (1)...(19): siRNA sense strand
cgaaaaggccuuagcagua

SEQ ID NO: 866146 - RNA, 19 nt, Homo sapiens
  misc_RNA (1)...(19): siRNA sense strand
ggacaucgacgaauuugac

SEQ ID NO: 866147 - RNA, 19 nt, Homo sapiens
  misc_RNA (1)...(19): siRNA sense strand
gcguugacuuguuaaugaa

SEQ ID NO: 866148 - RNA, 19 nt, Homo sapiens
  misc_RNA (1)...(19): siRNA sense strand
gaaaauagcagcgcagugu

SEQ ID NO: 866149 - RNA, 19 nt, Homo sapiens
  misc_RNA (1)...(19): siRNA sense strand
cgacgaauuugacgagaac

SEQ ID NO: 866150 - RNA, 19 nt, Homo sapiens
  misc_RNA (1)...(19): siRNA sense strand
gcggaacucucccgucaac

SEQ ID NO: 866151 - RNA, 19 nt, Homo sapiens
  misc_RNA (1)...(19): siRNA sense strand
ccaagaaucaagcugugaa

SEQ ID NO: 866152 - RNA, 19 nt, Homo sapiens
  misc_RNA (1)...(19): siRNA sense strand
gguggacaucgacgaauuu

SEQ ID NO: 866153 - RNA, 19 nt, Homo sapiens
  misc_RNA (1)...(19): siRNA sense strand
gagaagcccacagaaaaua

SEQ ID NO: 866154 - RNA, 19 nt, Homo sapiens
  misc_RNA (1)...(19): siRNA sense strand
aggacuaggcuccauuaua

SEQ ID NO: 866155 - RNA, 19 nt, Homo sapiens
  misc_RNA (1)...(19): siRNA sense strand
caagagcagugagauugag

SEQ ID NO: 866156 - RNA, 19 nt, Homo sapiens
  misc_RNA (1)...(19): siRNA sense strand
ugagcaggcugugcaguca

SEQ ID NO: 866157 - RNA, 19 nt, Homo sapiens
  misc_RNA (1)...(19): siRNA sense strand
uuacuccaguggcacgaaa

SEQ ID NO: 866158 - RNA, 19 nt, Homo sapiens
  misc_RNA (1)...(19): siRNA sense strand
agaaucaagcugugaagga

SEQ ID NO: 866159 - RNA, 19 nt, Homo sapiens
  misc_RNA (1)...(19): siRNA sense strand
ucgacgaauuugacgagaa

SEQ ID NO: 866160 - RNA, 19 nt, Homo sapiens
  misc_RNA (1)...(19): siRNA sense strand
ugcugaaagugcucacaaa

SEQ ID NO: 866161 - RNA, 19 nt, Homo sapiens
  misc_RNA (1)...(19): siRNA sense strand
ggaacucucccgucaacac

SEQ ID NO: 866162 - RNA, 19 nt, Homo sapiens
  misc_RNA (1)...(19): siRNA sense strand
uuugagaagcccacagaaa

SEQ ID NO: 866163 - RNA, 19 nt, Homo sapiens
  misc_RNA (1)...(19): siRNA sense strand
acuaggcuccauuauaaga

SEQ ID NO: 866164 - RNA, 19 nt, Homo sapiens
  misc_RNA (1)...(19): siRNA sense strand
gaacggcucuuuccucuua

SEQ ID NO: 866165 - RNA, 19 nt, Homo sapiens
  misc_RNA (1)...(19): siRNA sense strand
gaaaggagcucaauggaaa

SEQ ID NO: 866166 - RNA, 19 nt, Homo sapiens
  misc_RNA (1)...(19): siRNA sense strand
gaaaugaacgguagaauug

SEQ ID NO: 866167 - RNA, 19 nt, Homo sapiens
  misc_RNA (1)...(19): siRNA sense strand
gagaagacauggaugauga

SEQ ID NO: 866168 - RNA, 19 nt, Homo sapiens
  misc_RNA (1)...(19): siRNA sense strand
gaacagaugaagcaagaua

SEQ ID NO: 866169 - RNA, 19 nt, Homo sapiens
  misc_RNA (1)...(19): siRNA sense strand
ccaaauugcucgacuaaga

SEQ ID NO: 866170 - RNA, 19 nt, Homo sapiens
  misc_RNA (1)...(19): siRNA sense strand
gaacuuaagcgcacauuug

SEQ ID NO: 866171 - RNA, 19 nt, Homo sapiens
  misc_RNA (1)...(19): siRNA sense strand
gaaaaucacuggcauguug

SEQ ID NO: 866172 - RNA, 19 nt, Homo sapiens
  misc_RNA (1)...(19): siRNA sense strand
uaaagaggcuacccagaaa

SEQ ID NO: 866173 - RNA, 19 nt, Homo sapiens
  misc_RNA (1)...(19): siRNA sense strand
guaacauccuuucguguaa

SEQ ID NO: 866174 - RNA, 19 nt, Homo sapiens
  misc_RNA (1)...(19): siRNA sense strand
uagaugagaugaauggaaa

SEQ ID NO: 866175 - RNA, 19 nt, Homo sapiens
  misc_RNA (1)...(19): siRNA sense strand
ggagauugauaauucagaa

SEQ ID NO: 866176 - RNA, 19 nt, Homo sapiens
  misc_RNA (1)...(19): siRNA sense strand
gugcaaagguuaugaugga

SEQ ID NO: 866177 - RNA, 19 nt, Homo sapiens
  misc_RNA (1)...(19): siRNA sense strand
gccauuguauguagcuuua

SEQ ID NO: 866178 - RNA, 19 nt, Homo sapiens
  misc_RNA (1)...(19): siRNA sense strand
gcuaacacaucaacacaga

SEQ ID NO: 866179 - RNA, 19 nt, Homo sapiens
  misc_RNA (1)...(19): siRNA sense strand
uaacgugguuugugaugaa

SEQ ID NO: 866180 - RNA, 19 nt, Homo sapiens
  misc_RNA (1)...(19): siRNA sense strand
ggaagguggucgcagcaaa

SEQ ID NO: 866181 - RNA, 19 nt, Homo sapiens
  misc_RNA (1)...(19): siRNA sense strand
ccuaaauggucgcaaagua

SEQ ID NO: 866182 - RNA, 19 nt, Homo sapiens
  misc_RNA (1)...(19): siRNA sense strand
uaaagcaguuacagaaaug

SEQ ID NO: 866183 - RNA, 19 nt, Homo sapiens
  misc_RNA (1)...(19): siRNA sense strand
ggaaaggagcucaauggaa

SEQ ID NO: 866184 - RNA, 19 nt, Homo sapiens
  misc_RNA (1)...(19): siRNA sense strand
gcuccuagaguaccauuua

SEQ ID NO: 866185 - RNA, 19 nt, Homo sapiens
  misc_RNA (1)...(19): siRNA sense strand
gguaacauccuuucgugua

SEQ ID NO: 866186 - RNA, 19 nt, Homo sapiens
  misc_RNA (1)...(19): siRNA sense strand
caaggguuauggauuugua

SEQ ID NO: 866187 - RNA, 19 nt, Homo sapiens
  misc_RNA (1)...(19): siRNA sense strand
ugaaaguaaugaccgauga

SEQ ID NO: 866188 - RNA, 19 nt, Homo sapiens
  misc_RNA (1)...(19): siRNA sense strand
aagaagagcgccaggcuua

SEQ ID NO: 866189 - RNA, 19 nt, Homo sapiens
  misc_RNA (1)...(19): siRNA sense strand
caaaagaguuccccaaugu

SEQ ID NO: 866190 - RNA, 19 nt, Homo sapiens
  misc_RNA (1)...(19): siRNA sense strand
cuaaagcaguuacagaaau

SEQ ID NO: 866191 - RNA, 19 nt, Homo sapiens
  misc_RNA (1)...(19): siRNA sense strand
gaacggcagacggaacuua

SEQ ID NO: 866192 - RNA, 19 nt, Homo sapiens
  misc_RNA (1)...(19): siRNA sense strand
gcucgagucuccagaguca

SEQ ID NO: 866193 - RNA, 19 nt, Homo sapiens
  misc_RNA (1)...(19): siRNA sense strand
uaagguugaugaagcugua

SEQ ID NO: 866194 - RNA, 19 nt, Homo sapiens
  misc_RNA (1)...(19): siRNA sense strand
gcuccuaaauggucgcaaa

SEQ ID NO: 866195 - RNA, 19 nt, Homo sapiens
  misc_RNA (1)...(19): siRNA sense strand
cuaaagaggcuacccagaa

SEQ ID NO: 866196 - RNA, 19 nt, Homo sapiens
  misc_RNA (1)...(19): siRNA sense strand
uaaauaugcugcgggaguu

SEQ ID NO: 866197 - RNA, 19 nt, Homo sapiens
  misc_RNA (1)...(19): siRNA sense strand
acacgaagcagcugaaaga

SEQ ID NO: 866198 - RNA, 19 nt, Homo sapiens
  misc_RNA (1)...(19): siRNA sense strand
gcgcacauuugaacagaug

SEQ ID NO: 866199 - RNA, 19 nt, Homo sapiens
  misc_RNA (1)...(19): siRNA sense strand
gcucuuuccucuuauucaa

SEQ ID NO: 866200 - RNA, 19 nt, Homo sapiens
  misc_RNA (1)...(19): siRNA sense strand
ccagaaagcaguuaacagu

SEQ ID NO: 866201 - RNA, 19 nt, Homo sapiens
  misc_RNA (1)...(19): siRNA sense strand
gcauguuguuggagauuga

SEQ ID NO: 866202 - RNA, 19 nt, Homo sapiens
  misc_RNA (1)...(19): siRNA sense strand
uaaauggucgcaaaguauu

SEQ ID NO: 866203 - RNA, 19 nt, Homo sapiens
  misc_RNA (1)...(19): siRNA sense strand
gcagagaauggcaagugua

SEQ ID NO: 866204 - RNA, 19 nt, Homo sapiens
  misc_RNA (1)...(19): siRNA sense strand
gaaaguaaugaccgaugaa

SEQ ID NO: 866205 - RNA, 19 nt, Homo sapiens
  misc_RNA (1)...(19): siRNA sense strand
gcaaaagaguuccccaaug

SEQ ID NO: 866206 - RNA, 19 nt, Homo sapiens
  misc_RNA (1)...(19): siRNA sense strand
acgagaagcugaacuugga

SEQ ID NO: 866207 - RNA, 19 nt, Homo sapiens
  misc_RNA (1)...(19): siRNA sense strand
cguguaacgugguuuguga

SEQ ID NO: 866208 - RNA, 19 nt, Homo sapiens
  misc_RNA (1)...(19): siRNA sense strand
agaaaugaacgguagaauu

SEQ ID NO: 866209 - RNA, 19 nt, Homo sapiens
  misc_RNA (1)...(19): siRNA sense strand
uguuggagauugauaauuc

SEQ ID NO: 866210 - RNA, 19 nt, Homo sapiens
  misc_RNA (1)...(19): siRNA sense strand
ugccagaccucauccauuc

SEQ ID NO: 866211 - RNA, 19 nt, Homo sapiens
  misc_RNA (1)...(19): siRNA sense strand
gaacgagaagcugaacuug

SEQ ID NO: 866212 - RNA, 19 nt, Homo sapiens
  misc_RNA (1)...(19): siRNA sense strand
ccucauccauuccaaaaua

SEQ ID NO: 866213 - RNA, 19 nt, Homo sapiens
  misc_RNA (1)...(19): siRNA sense strand
gagaauggcaaguguacga

SEQ ID NO: 866214 - RNA, 19 nt, Homo sapiens
  misc_RNA (1)...(19): siRNA sense strand
guaacgugguuugugauga

SEQ ID NO: 866215 - RNA, 19 nt, Homo sapiens
  misc_RNA (1)...(19): siRNA sense strand
gcacgguuccacgguauaa

SEQ ID NO: 866216 - RNA, 19 nt, Homo sapiens
  misc_RNA (1)...(19): siRNA sense strand
uugaacagaugaagcaaga

SEQ ID NO: 866217 - RNA, 19 nt, Homo sapiens
  misc_RNA (1)...(19): siRNA sense strand
cuaaauggucgcaaaguau

SEQ ID NO: 866218 - RNA, 19 nt, Homo sapiens
  misc_RNA (1)...(19): siRNA sense strand
ucacuggcauguuguugga

SEQ ID NO: 866219 - RNA, 19 nt, Homo sapiens
  misc_RNA (1)...(19): siRNA sense strand
ugacugaggcgaugcucua

SEQ ID NO: 866220 - RNA, 19 nt, Homo sapiens
  misc_RNA (1)...(19): siRNA sense strand
ugaugaacgucuccggaaa

SEQ ID NO: 866221 - RNA, 19 nt, Homo sapiens
  misc_RNA (1)...(19): siRNA sense strand
ccuagaguaccauuuagua

SEQ ID NO: 866222 - RNA, 19 nt, Homo sapiens
  misc_RNA (1)...(19): siRNA sense strand
gcucuggacaccaugaauu

SEQ ID NO: 866223 - RNA, 19 nt, Homo sapiens
  misc_RNA (1)...(19): siRNA sense strand
ggauuuguaagcuuugaaa

SEQ ID NO: 866224 - RNA, 19 nt, Homo sapiens
  misc_RNA (1)...(19): siRNA sense strand
cccaggugcuccuagagua

SEQ ID NO: 866225 - RNA, 19 nt, Homo sapiens
  misc_RNA (1)...(19): siRNA sense strand
ccacuaaagcaguuacaga

SEQ ID NO: 866226 - RNA, 19 nt, Homo sapiens
  misc_RNA (1)...(19): siRNA sense strand
caacuacgcguaugugaac

SEQ ID NO: 866227 - RNA, 19 nt, Homo sapiens
  misc_RNA (1)...(19): siRNA sense strand
caaaauaagcccagugcua

SEQ ID NO: 866228 - RNA, 19 nt, Homo sapiens
  misc_RNA (1)...(19): siRNA sense strand
uaacgaguauaugcagaga

SEQ ID NO: 866229 - RNA, 19 nt, Homo sapiens
  misc_RNA (1)...(19): siRNA sense strand
aggcuuaccucacuaacga

SEQ ID NO: 866230 - RNA, 19 nt, Homo sapiens
  misc_RNA (1)...(19): siRNA sense strand
ggagaagacauggaugaug

SEQ ID NO: 866231 - RNA, 19 nt, Homo sapiens
  misc_RNA (1)...(19): siRNA sense strand
uaaagaacgagaagcugaa

SEQ ID NO: 866232 - RNA, 19 nt, Homo sapiens
  misc_RNA (1)...(19): siRNA sense strand
uacaaggucaggaaacuuu

SEQ ID NO: 866233 - RNA, 19 nt, Homo sapiens
  misc_RNA (1)...(19): siRNA sense strand
gcgcacgguuccacgguau

SEQ ID NO: 866234 - RNA, 19 nt, Homo sapiens
  misc_RNA (1)...(19): siRNA sense strand
agaagaagccacuaaagca

SEQ ID NO: 866235 - RNA, 19 nt, Homo sapiens
  misc_RNA (1)...(19): siRNA sense strand
guagaugagaugaauggaa

SEQ ID NO: 866236 - RNA, 19 nt, Homo sapiens
  misc_RNA (1)...(19): siRNA sense strand
gugggcaacauauucguua

SEQ ID NO: 866237 - RNA, 19 nt, Homo sapiens
  misc_RNA (1)...(19): siRNA sense strand
uuaccucacuaacgaguau

SEQ ID NO: 866238 - RNA, 19 nt, Homo sapiens
  misc_RNA (1)...(19): siRNA sense strand
ggaacuuaagcgcacauuu

SEQ ID NO: 866239 - RNA, 19 nt, Homo sapiens
  misc_RNA (1)...(19): siRNA sense strand
gcugaaagagcuauuaaaa

SEQ ID NO: 866240 - RNA, 19 nt, Homo sapiens
  misc_RNA (1)...(19): siRNA sense strand
uagccaaauugcucgacua

SEQ ID NO: 866241 - RNA, 19 nt, Homo sapiens
  misc_RNA (1)...(19): siRNA sense strand
acgaguauaugcagagaau

SEQ ID NO: 866242 - RNA, 19 nt, Homo sapiens
  misc_RNA (1)...(19): siRNA sense strand
agaagccacuaaagcaguu

SEQ ID NO: 866243 - RNA, 19 nt, Homo sapiens
  misc_RNA (1)...(19): siRNA sense strand
ccagguuguuaaucuuuau

SEQ ID NO: 866244 - RNA, 19 nt, Homo sapiens
  misc_RNA (1)...(19): siRNA sense strand
agaaagcuguagaugagau

SEQ ID NO: 866245 - RNA, 19 nt, Homo sapiens
  misc_RNA (1)...(19): siRNA sense strand
ggacaauuuaagucucgua

SEQ ID NO: 866246 - RNA, 19 nt, Homo sapiens
  misc_RNA (1)...(19): siRNA sense strand
gacaauuuaagucucguaa

SEQ ID NO: 866247 - RNA, 19 nt, Homo sapiens
  misc_RNA (1)...(19): siRNA sense strand
cuacaagcccaccaagcua

SEQ ID NO: 866248 - RNA, 19 nt, Homo sapiens
  misc_RNA (1)...(19): siRNA sense strand
gccaugcacccuacucuug

SEQ ID NO: 866249 - RNA, 19 nt, Homo sapiens
  misc_RNA (1)...(19): siRNA sense strand
gcacagccacaaguuacaa

SEQ ID NO: 866250 - RNA, 19 nt, Homo sapiens
  misc_RNA (1)...(19): siRNA sense strand
guuccacgguauaaauaug

SEQ ID NO: 866251 - RNA, 19 nt, Homo sapiens
  misc_RNA (1)...(19): siRNA sense strand
uaacacaucaacacagaca

SEQ ID NO: 866252 - RNA, 19 nt, Homo sapiens
  misc_RNA (1)...(19): siRNA sense strand
gaagguggucgcagcaaag

SEQ ID NO: 866253 - RNA, 19 nt, Homo sapiens
  misc_RNA (1)...(19): siRNA sense strand
gggcaacauauucguuaaa

SEQ ID NO: 866254 - RNA, 19 nt, Homo sapiens
  misc_RNA (1)...(19): siRNA sense strand
gauuuggauuuguaagcuu

SEQ ID NO: 866255 - RNA, 19 nt, Homo sapiens
  misc_RNA (1)...(19): siRNA sense strand
guuauggauuuguacacuu

SEQ ID NO: 866256 - RNA, 19 nt, Homo sapiens
  misc_RNA (1)...(19): siRNA sense strand
gcgccaggcuuaccucacu

SEQ ID NO: 866257 - RNA, 19 nt, Homo sapiens
  misc_RNA (1)...(19): siRNA sense strand
cacuaaagcaguuacagaa

SEQ ID NO: 866258 - RNA, 19 nt, Homo sapiens
  misc_RNA (1)...(19): siRNA sense strand
gcacauuugaacagaugaa

SEQ ID NO: 866259 - RNA, 19 nt, Homo sapiens
  misc_RNA (1)...(19): siRNA sense strand
ggauuuggauuuguaagcu

SEQ ID NO: 866260 - RNA, 19 nt, Homo sapiens
  misc_RNA (1)...(19): siRNA sense strand
caucaagaauuuuggagaa

SEQ ID NO: 866261 - RNA, 19 nt, Homo sapiens
  misc_RNA (1)...(19): siRNA sense strand
uacaaucacuagugcaaag

SEQ ID NO: 866262 - RNA, 19 nt, Homo sapiens
  misc_RNA (1)...(19): siRNA sense strand
uagcucagcgcaaagaaga

SEQ ID NO: 866263 - RNA, 19 nt, Homo sapiens
  misc_RNA (1)...(19): siRNA sense strand
guaaugcacagccacaagu

SEQ ID NO: 866264 - RNA, 19 nt, Homo sapiens
  misc_RNA (1)...(19): siRNA sense strand
caagaaagcugcagugucu

SEQ ID NO: 866265 - RNA, 19 nt, Homo sapiens
  misc_RNA (1)...(19): siRNA sense strand
gaacggagaggcuuucuga

SEQ ID NO: 866266 - RNA, 19 nt, Homo sapiens
  misc_RNA (1)...(19): siRNA sense strand
ggagaggcuuucugaguaa

SEQ ID NO: 866267 - RNA, 19 nt, Homo sapiens
  misc_RNA (1)...(19): siRNA sense strand
ggaagaugguggcaauuga

SEQ ID NO: 866268 - RNA, 19 nt, Homo sapiens
  misc_RNA (1)...(19): siRNA sense strand
caacggagaugugcuuuau

SEQ ID NO: 866269 - RNA, 19 nt, Homo sapiens
  misc_RNA (1)...(19): siRNA sense strand
aagaagagcucccagaaga

SEQ ID NO: 866270 - RNA, 19 nt, Homo sapiens
  misc_RNA (1)...(19): siRNA sense strand
ucaaagcccuucaguacuu

SEQ ID NO: 866271 - RNA, 19 nt, Homo sapiens
  misc_RNA (1)...(19): siRNA sense strand
ccauggagcuauauaaguu

SEQ ID NO: 866272 - RNA, 19 nt, Homo sapiens
  misc_RNA (1)...(19): siRNA sense strand
ugaagcaucucaccaagaa

SEQ ID NO: 866273 - RNA, 19 nt, Homo sapiens
  misc_RNA (1)...(19): siRNA sense strand
gauguagcauugucaacua

SEQ ID NO: 866274 - RNA, 19 nt, Homo sapiens
  misc_RNA (1)...(19): siRNA sense strand
cggagaggcuuucugagua

SEQ ID NO: 866275 - RNA, 19 nt, Homo sapiens
  misc_RNA (1)...(19): siRNA sense strand
gaagagcucccagaagaaa

SEQ ID NO: 866276 - RNA, 19 nt, Homo sapiens
  misc_RNA (1)...(19): siRNA sense strand
cagaagaaauccucuaaaa

SEQ ID NO: 866277 - RNA, 19 nt, Homo sapiens
  misc_RNA (1)...(19): siRNA sense strand
ggaagcagcacauggugaa

SEQ ID NO: 866278 - RNA, 19 nt, Homo sapiens
  misc_RNA (1)...(19): siRNA sense strand
gaaccauccucagaagaau

SEQ ID NO: 866279 - RNA, 19 nt, Homo sapiens
  misc_RNA (1)...(19): siRNA sense strand
gaaaugccaagcaccgaaa

SEQ ID NO: 866280 - RNA, 19 nt, Homo sapiens
  misc_RNA (1)...(19): siRNA sense strand
acggagaugugcuuuauga

SEQ ID NO: 866281 - RNA, 19 nt, Homo sapiens
  misc_RNA (1)...(19): siRNA sense strand
ccaacccgcucucagaaga

SEQ ID NO: 866282 - RNA, 19 nt, Homo sapiens
  misc_RNA (1)...(19): siRNA sense strand
gccacacccuucaagauug

SEQ ID NO: 866283 - RNA, 19 nt, Homo sapiens
  misc_RNA (1)...(19): siRNA sense strand
gaagaagagcucccagaag

SEQ ID NO: 866284 - RNA, 19 nt, Homo sapiens
  misc_RNA (1)...(19): siRNA sense strand
ggagcuauauaaguugguu

SEQ ID NO: 866285 - RNA, 19 nt, Homo sapiens
  misc_RNA (1)...(19): siRNA sense strand
cuacuuuacugcucaaucu

SEQ ID NO: 866286 - RNA, 19 nt, Homo sapiens
  misc_RNA (1)...(19): siRNA sense strand
aaagaaccauccucagaag

SEQ ID NO: 866287 - RNA, 19 nt, Homo sapiens
  misc_RNA (1)...(19): siRNA sense strand
uagcaaggcgccuaaguug

SEQ ID NO: 866288 - RNA, 19 nt, Homo sapiens
  misc_RNA (1)...(19): siRNA sense strand
cgccuaaguugcacucuga

SEQ ID NO: 866289 - RNA, 19 nt, Homo sapiens
  misc_RNA (1)...(19): siRNA sense strand
cagagugcccuuccaaaga

SEQ ID NO: 866290 - RNA, 19 nt, Homo sapiens
  misc_RNA (1)...(19): siRNA sense strand
agagugcccuuccaaagau

SEQ ID NO: 866291 - RNA, 19 nt, Homo sapiens
  misc_RNA (1)...(19): siRNA sense strand
gagaggcuuucugaguaaa

SEQ ID NO: 866292 - RNA, 19 nt, Homo sapiens
  misc_RNA (1)...(19): siRNA sense strand
gauacucacagggaagaua

SEQ ID NO: 866293 - RNA, 19 nt, Homo sapiens
  misc_RNA (1)...(19): siRNA sense strand
gcucgaggccagaucuuga

SEQ ID NO: 866294 - RNA, 19 nt, Homo sapiens
  misc_RNA (1)...(19): siRNA sense strand
gaagcggaggcucuuagaa

SEQ ID NO: 866295 - RNA, 19 nt, Homo sapiens
  misc_RNA (1)...(19): siRNA sense strand
ccaccauggagcuauauaa

SEQ ID NO: 866296 - RNA, 19 nt, Homo sapiens
  misc_RNA (1)...(19): siRNA sense strand
caacuacaacggagaugug

SEQ ID NO: 866297 - RNA, 19 nt, Homo sapiens
  misc_RNA (1)...(19): siRNA sense strand
cugauucuguugcugcuaa

SEQ ID NO: 866298 - RNA, 19 nt, Homo sapiens
  misc_RNA (1)...(19): siRNA sense strand
gaaguugccacggaagaug

SEQ ID NO: 866299 - RNA, 19 nt, Homo sapiens
  misc_RNA (1)...(19): siRNA sense strand
ccaugucucugaagcaucu

SEQ ID NO: 866300 - RNA, 19 nt, Homo sapiens
  misc_RNA (1)...(19): siRNA sense strand
agaagaagagcucccagaa

SEQ ID NO: 866301 - RNA, 19 nt, Homo sapiens
  misc_RNA (1)...(19): siRNA sense strand
cuucaaagcccuucaguac

SEQ ID NO: 866302 - RNA, 19 nt, Homo sapiens
  misc_RNA (1)...(19): siRNA sense strand
agaaccauccucagaagaa

SEQ ID NO: 866303 - RNA, 19 nt, Homo sapiens
  misc_RNA (1)...(19): siRNA sense strand
ggagaaugccaccaugucu

SEQ ID NO: 866304 - RNA, 19 nt, Homo sapiens
  misc_RNA (1)...(19): siRNA sense strand
ggagugguauccggaagca

SEQ ID NO: 866305 - RNA, 19 nt, Homo sapiens
  misc_RNA (1)...(19): siRNA sense strand
ggaccaaaggggcauguua

SEQ ID NO: 866306 - RNA, 19 nt, Homo sapiens
  misc_RNA (1)...(19): siRNA sense strand
gcaccgaaauuuugucaag

SEQ ID NO: 866307 - RNA, 19 nt, Homo sapiens
  misc_RNA (1)...(19): siRNA sense strand
cacggaagaugguggcaau

SEQ ID NO: 866308 - RNA, 19 nt, Homo sapiens
  misc_RNA (1)...(19): siRNA sense strand
gaacuccacccaagcucau

SEQ ID NO: 866309 - RNA, 19 nt, Homo sapiens
  misc_RNA (1)...(19): siRNA sense strand
ccagaagaaauccucuaaa

SEQ ID NO: 866310 - RNA, 19 nt, Homo sapiens
  misc_RNA (1)...(19): siRNA sense strand
aagcugcagugucuugguu

SEQ ID NO: 866311 - RNA, 19 nt, Homo sapiens
  misc_RNA (1)...(19): siRNA sense strand
ucaccaagaagcugcuaaa

SEQ ID NO: 866312 - RNA, 19 nt, Homo sapiens
  misc_RNA (1)...(19): siRNA sense strand
gcugcagugucuugguuga

SEQ ID NO: 866313 - RNA, 19 nt, Homo sapiens
  misc_RNA (1)...(19): siRNA sense strand
gaugguggcaauugacugu

SEQ ID NO: 866314 - RNA, 19 nt, Homo sapiens
  misc_RNA (1)...(19): siRNA sense strand
ggcaugccauccacaacga

SEQ ID NO: 866315 - RNA, 19 nt, Homo sapiens
  misc_RNA (1)...(19): siRNA sense strand
cuagcaaggcgccuaaguu

SEQ ID NO: 866316 - RNA, 19 nt, Homo sapiens
  misc_RNA (1)...(19): siRNA sense strand
cuauauaaguugguugaag

SEQ ID NO: 866317 - RNA, 19 nt, Homo sapiens
  misc_RNA (1)...(19): siRNA sense strand
agaaagcugcagugucuug

SEQ ID NO: 866318 - RNA, 19 nt, Homo sapiens
  misc_RNA (1)...(19): siRNA sense strand
ggcaauugacugugagaug

SEQ ID NO: 866319 - RNA, 19 nt, Homo sapiens
  misc_RNA (1)...(19): siRNA sense strand
ccagagugcccuuccaaag

SEQ ID NO: 866320 - RNA, 19 nt, Homo sapiens
  misc_RNA (1)...(19): siRNA sense strand
gaagaugguggcaauugac

SEQ ID NO: 866321 - RNA, 19 nt, Homo sapiens
  misc_RNA (1)...(19): siRNA sense strand
cuacaacggagaugugcuu

SEQ ID NO: 866322 - RNA, 19 nt, Homo sapiens
  misc_RNA (1)...(19): siRNA sense strand
cauccacaacgacuucaaa

SEQ ID NO: 866323 - RNA, 19 nt, Homo sapiens
  misc_RNA (1)...(19): siRNA sense strand
ugccacacccuucaagauu

SEQ ID NO: 866324 - RNA, 19 nt, Homo sapiens
  misc_RNA (1)...(19): siRNA sense strand
cccagaagaaauccucuaa

SEQ ID NO: 866325 - RNA, 19 nt, Homo sapiens
  misc_RNA (1)...(19): siRNA sense strand
caaaggggcauguuaguuc

SEQ ID NO: 866326 - RNA, 19 nt, Homo sapiens
  misc_RNA (1)...(19): siRNA sense strand
gcccuuccaaagaucaaua

SEQ ID NO: 866327 - RNA, 19 nt, Homo sapiens
  misc_RNA (1)...(19): siRNA sense strand
ccacacccuucaagauugc

SEQ ID NO: 866328 - RNA, 19 nt, Homo sapiens
  misc_RNA (1)...(19): siRNA sense strand
uaugacgaguacauucuuc

SEQ ID NO: 866329 - RNA, 19 nt, Homo sapiens
  misc_RNA (1)...(19): siRNA sense strand
acaacggagaugugcuuua

SEQ ID NO: 866330 - RNA, 19 nt, Homo sapiens
  misc_RNA (1)...(19): siRNA sense strand
cggaagaugguggcaauug

SEQ ID NO: 866331 - RNA, 19 nt, Homo sapiens
  misc_RNA (1)...(19): siRNA sense strand
ccacccaagcucauucaga

SEQ ID NO: 866332 - RNA, 19 nt, Homo sapiens
  misc_RNA (1)...(19): siRNA sense strand
gacaagaaagcugcagugu

SEQ ID NO: 866333 - RNA, 19 nt, Homo sapiens
  misc_RNA (1)...(19): siRNA sense strand
cgugacaccucccauaucc

SEQ ID NO: 866334 - RNA, 19 nt, Homo sapiens
  misc_RNA (1)...(19): siRNA sense strand
caccaugucucugaagcau

SEQ ID NO: 866335 - RNA, 19 nt, Homo sapiens
  misc_RNA (1)...(19): siRNA sense strand
uucuguugcugcuaaagua

SEQ ID NO: 866336 - RNA, 19 nt, Homo sapiens
  misc_RNA (1)...(19): siRNA sense strand
gacagccccuggacaagaa

SEQ ID NO: 866337 - RNA, 19 nt, Homo sapiens
  misc_RNA (1)...(19): siRNA sense strand
agaagagcucccagaagaa

SEQ ID NO: 866338 - RNA, 19 nt, Homo sapiens
  misc_RNA (1)...(19): siRNA sense strand
aggccaccauggagcuaua

SEQ ID NO: 866339 - RNA, 19 nt, Homo sapiens
  misc_RNA (1)...(19): siRNA sense strand
gucgauggcacuuggaaga

SEQ ID NO: 866340 - RNA, 19 nt, Homo sapiens
  misc_RNA (1)...(19): siRNA sense strand
aaaagaaccauccucagaa

SEQ ID NO: 866341 - RNA, 19 nt, Homo sapiens
  misc_RNA (1)...(19): siRNA sense strand
gaaugccacacccuucaag

SEQ ID NO: 866342 - RNA, 19 nt, Homo sapiens
  misc_RNA (1)...(19): siRNA sense strand
ugguggcaauugacuguga

SEQ ID NO: 866343 - RNA, 19 nt, Homo sapiens
  misc_RNA (1)...(19): siRNA sense strand
cagaaguugccacggaaga

SEQ ID NO: 866344 - RNA, 19 nt, Homo sapiens
  misc_RNA (1)...(19): siRNA sense strand
cacccaacccgcucucaga

SEQ ID NO: 866345 - RNA, 19 nt, Homo sapiens
  misc_RNA (1)...(19): siRNA sense strand
cccaagcucauucagagaa

SEQ ID NO: 866346 - RNA, 19 nt, Homo sapiens
  misc_RNA (1)...(19): siRNA sense strand
caacccgcucucagaagaa

SEQ ID NO: 866347 - RNA, 19 nt, Homo sapiens
  misc_RNA (1)...(19): siRNA sense strand
gaauaugacuaccuguuua

SEQ ID NO: 866348 - RNA, 19 nt, Homo sapiens
  misc_RNA (1)...(19): siRNA sense strand
gaccauggcugcugaaauc

SEQ ID NO: 866349 - RNA, 19 nt, Homo sapiens
  misc_RNA (1)...(19): siRNA sense strand
ccaagaaggugguggacaa

SEQ ID NO: 866350 - RNA, 19 nt, Homo sapiens
  misc_RNA (1)...(19): siRNA sense strand
cgaauaugacuaccuguuu

SEQ ID NO: 866351 - RNA, 19 nt, Homo sapiens
  misc_RNA (1)...(19): siRNA sense strand
gaugacacguacacagaga

SEQ ID NO: 866352 - RNA, 19 nt, Homo sapiens
  misc_RNA (1)...(19): siRNA sense strand
gcaaaacuaucaaacuuca

SEQ ID NO: 866353 - RNA, 19 nt, Homo sapiens
  misc_RNA (1)...(19): siRNA sense strand
ccaagaaugccaccaaugu

SEQ ID NO: 866354 - RNA, 19 nt, Homo sapiens
  misc_RNA (1)...(19): siRNA sense strand
ccagcgagaacgucaauaa

SEQ ID NO: 866355 - RNA, 19 nt, Homo sapiens
  misc_RNA (1)...(19): siRNA sense strand
gcaggagauugaccgcuau

SEQ ID NO: 866356 - RNA, 19 nt, Homo sapiens
  misc_RNA (1)...(19): siRNA sense strand
gagacgagcgccaagaaug

SEQ ID NO: 866357 - RNA, 19 nt, Homo sapiens
  misc_RNA (1)...(19): siRNA sense strand
cauggcugcugaaaucaaa

SEQ ID NO: 866358 - RNA, 19 nt, Homo sapiens
  misc_RNA (1)...(19): siRNA sense strand
gcgagaacgucaauaagcu

SEQ ID NO: 866359 - RNA, 19 nt, Homo sapiens
  misc_RNA (1)...(19): siRNA sense strand
agagcgaccucaccaccaa

SEQ ID NO: 866360 - RNA, 19 nt, Homo sapiens
  misc_RNA (1)...(19): siRNA sense strand
guacacagagagcuacauc

SEQ ID NO: 866361 - RNA, 19 nt, Homo sapiens
  misc_RNA (1)...(19): siRNA sense strand
ggagacgagcgccaagaau

SEQ ID NO: 866362 - RNA, 19 nt, Homo sapiens
  misc_RNA (1)...(19): siRNA sense strand
ggaccaucacuuccagcua

SEQ ID NO: 866363 - RNA, 19 nt, Homo sapiens
  misc_RNA (1)...(19): siRNA sense strand
caccacagccaaggaguuu

SEQ ID NO: 866364 - RNA, 19 nt, Homo sapiens
  misc_RNA (1)...(19): siRNA sense strand
cuaucaaacuucagaucug

SEQ ID NO: 866365 - RNA, 19 nt, Homo sapiens
  misc_RNA (1)...(19): siRNA sense strand
caagaaugccaccaauguc

SEQ ID NO: 866366 - RNA, 19 nt, Homo sapiens
  misc_RNA (1)...(19): siRNA sense strand
acacguacacagagagcua

SEQ ID NO: 866367 - RNA, 19 nt, Homo sapiens
  misc_RNA (1)...(19): siRNA sense strand
uggcaaaacuaucaaacuu

SEQ ID NO: 866368 - RNA, 19 nt, Homo sapiens
  misc_RNA (1)...(19): siRNA sense strand
ccgaauaugacuaccuguu

SEQ ID NO: 866369 - RNA, 19 nt, Homo sapiens
  misc_RNA (1)...(19): siRNA sense strand
cgccaagaaugccaccaau

SEQ ID NO: 866370 - RNA, 19 nt, Homo sapiens
  misc_RNA (1)...(19): siRNA sense strand
gcgccaagaaugccaccaa

SEQ ID NO: 866371 - RNA, 19 nt, Homo sapiens
  misc_RNA (1)...(19): siRNA sense strand
gccaagaaugccaccaaug

SEQ ID NO: 866372 - RNA, 19 nt, Homo sapiens
  misc_RNA (1)...(19): siRNA sense strand
ggucagagccucccuauga

SEQ ID NO: 866373 - RNA, 19 nt, Homo sapiens
  misc_RNA (1)...(19): siRNA sense strand
gcacaguauucuuggacaa

SEQ ID NO: 866374 - RNA, 19 nt, Homo sapiens
  misc_RNA (1)...(19): siRNA sense strand
gacaauuaaugggaaguuu

SEQ ID NO: 866375 - RNA, 19 nt, Homo sapiens
  misc_RNA (1)...(19): siRNA sense strand
caguauucuuggacaauua

SEQ ID NO: 866376 - RNA, 19 nt, Homo sapiens
  misc_RNA (1)...(19): siRNA sense strand
ggaccucuaccauuacauu

SEQ ID NO: 866377 - RNA, 19 nt, Homo sapiens
  misc_RNA (1)...(19): siRNA sense strand
aggaguaacuggauauuuc

SEQ ID NO: 866378 - RNA, 19 nt, Homo sapiens
  misc_RNA (1)...(19): siRNA sense strand
cuagaggaguaacuggaua

SEQ ID NO: 866379 - RNA, 19 nt, Homo sapiens
  misc_RNA (1)...(19): siRNA sense strand
cgcaggauccuacaccuua

SEQ ID NO: 866380 - RNA, 19 nt, Homo sapiens
  misc_RNA (1)...(19): siRNA sense strand
ugaugggacuagaggagua

SEQ ID NO: 866381 - RNA, 19 nt, Homo sapiens
  misc_RNA (1)...(19): siRNA sense strand
gaccucuaccauuacauua

SEQ ID NO: 866382 - RNA, 19 nt, Homo sapiens
  misc_RNA (1)...(19): siRNA sense strand
ggaguaacuggauauuuca

SEQ ID NO: 866383 - RNA, 19 nt, Homo sapiens
  misc_RNA (1)...(19): siRNA sense strand
gaggaguaacuggauauuu

SEQ ID NO: 866384 - RNA, 19 nt, Homo sapiens
  misc_RNA (1)...(19): siRNA sense strand
gcaggacccuaugaaugug

SEQ ID NO: 866385 - RNA, 19 nt, Homo sapiens
  misc_RNA (1)...(19): siRNA sense strand
uauuucaccuucaccuuau

SEQ ID NO: 866386 - RNA, 19 nt, Homo sapiens
  misc_RNA (1)...(19): siRNA sense strand
ggacaauuaaugggaaguu

SEQ ID NO: 866387 - RNA, 19 nt, Homo sapiens
  misc_RNA (1)...(19): siRNA sense strand
caauuaaugggaaguuuca

SEQ ID NO: 866388 - RNA, 19 nt, Homo sapiens
  misc_RNA (1)...(19): siRNA sense strand
ccucuaccauuacauuaca

SEQ ID NO: 866389 - RNA, 19 nt, Homo sapiens
  misc_RNA (1)...(19): siRNA sense strand
acaguauucuuggacaauu

SEQ ID NO: 866390 - RNA, 19 nt, Homo sapiens
  misc_RNA (1)...(19): siRNA sense strand
ggcuacaucugguacaaag

SEQ ID NO: 866391 - RNA, 19 nt, Homo sapiens
  misc_RNA (1)...(19): siRNA sense strand
auauuucaccuucaccuua

SEQ ID NO: 866392 - RNA, 19 nt, Homo sapiens
  misc_RNA (1)...(19): siRNA sense strand
caucccugcugauccagaa

SEQ ID NO: 866393 - RNA, 19 nt, Homo sapiens
  misc_RNA (1)...(19): siRNA sense strand
gcaggauccuacaccuuac

SEQ ID NO: 866394 - RNA, 19 nt, Homo sapiens
  misc_RNA (1)...(19): siRNA sense strand
caucuccagcagcaacuua

SEQ ID NO: 866395 - RNA, 19 nt, Homo sapiens
  misc_RNA (1)...(19): siRNA sense strand
gauauuucaccuucaccuu

SEQ ID NO: 866396 - RNA, 19 nt, Homo sapiens
  misc_RNA (1)...(19): siRNA sense strand
gauccuacaccuuacacau

SEQ ID NO: 866397 - RNA, 19 nt, Homo sapiens
  misc_RNA (1)...(19): siRNA sense strand
gaugggacuagaggaguaa

SEQ ID NO: 866398 - RNA, 19 nt, Homo sapiens
  misc_RNA (1)...(19): siRNA sense strand
ugcaggacccuaugaaugu

SEQ ID NO: 866399 - RNA, 19 nt, Homo sapiens
  misc_RNA (1)...(19): siRNA sense strand
aggacccucuuucuauuug

SEQ ID NO: 866400 - RNA, 19 nt, Homo sapiens
  misc_RNA (1)...(19): siRNA sense strand
uaacuggauauuucaccuu

SEQ ID NO: 866401 - RNA, 19 nt, Homo sapiens
  misc_RNA (1)...(19): siRNA sense strand
guccagaccuccccagaau

SEQ ID NO: 866402 - RNA, 19 nt, Homo sapiens
  misc_RNA (1)...(19): siRNA sense strand
uagaggaguaacuggauau

SEQ ID NO: 866403 - RNA, 19 nt, Homo sapiens
  misc_RNA (1)...(19): siRNA sense strand
ggacccucuuucuauuugg

SEQ ID NO: 866404 - RNA, 19 nt, Homo sapiens
  misc_RNA (1)...(19): siRNA sense strand
ccagggagcugaucgaaua

SEQ ID NO: 866405 - RNA, 19 nt, Homo sapiens
  misc_RNA (1)...(19): siRNA sense strand
ccugauggcuggccgagua

SEQ ID NO: 866406 - RNA, 19 nt, Homo sapiens
  misc_RNA (1)...(19): siRNA sense strand
gcaggcggcagccaucuua

SEQ ID NO: 866407 - RNA, 19 nt, Homo sapiens
  misc_RNA (1)...(19): siRNA sense strand
ugaguuggcuacguucaua

SEQ ID NO: 866408 - RNA, 19 nt, Homo sapiens
  misc_RNA (1)...(19): siRNA sense strand
gacccaaccuccaauuaca

SEQ ID NO: 866409 - RNA, 19 nt, Homo sapiens
  misc_RNA (1)...(19): siRNA sense strand
ggaagaugaaggcuacaaa

SEQ ID NO: 866410 - RNA, 19 nt, Homo sapiens
  misc_RNA (1)...(19): siRNA sense strand
gaagacccaaccuccaauu

SEQ ID NO: 866411 - RNA, 19 nt, Homo sapiens
  misc_RNA (1)...(19): siRNA sense strand
gaagaugaaggcuacaaag

SEQ ID NO: 866412 - RNA, 19 nt, Homo sapiens
  misc_RNA (1)...(19): siRNA sense strand
cggcagccaucuuacagaa

SEQ ID NO: 866413 - RNA, 19 nt, Homo sapiens
  misc_RNA (1)...(19): siRNA sense strand
gggaguuccugcccauugu

SEQ ID NO: 866414 - RNA, 19 nt, Homo sapiens
  misc_RNA (1)...(19): siRNA sense strand
gaauuuccccuaucuguuu

SEQ ID NO: 866415 - RNA, 19 nt, Homo sapiens
  misc_RNA (1)...(19): siRNA sense strand
ccaauuacaaauggacaua

SEQ ID NO: 866416 - RNA, 19 nt, Homo sapiens
  misc_RNA (1)...(19): siRNA sense strand
caggaaacauccgggaguu

SEQ ID NO: 866417 - RNA, 19 nt, Homo sapiens
  misc_RNA (1)...(19): siRNA sense strand
caaccuccaauuacaaaug

SEQ ID NO: 866418 - RNA, 19 nt, Homo sapiens
  misc_RNA (1)...(19): siRNA sense strand
cuacguucauacugggaua

SEQ ID NO: 866419 - RNA, 19 nt, Homo sapiens
  misc_RNA (1)...(19): siRNA sense strand
caguagagggcuugaguug

SEQ ID NO: 866420 - RNA, 19 nt, Homo sapiens
  misc_RNA (1)...(19): siRNA sense strand
ggcuugaguuggcuacguu

SEQ ID NO: 866421 - RNA, 19 nt, Homo sapiens
  misc_RNA (1)...(19): siRNA sense strand
ggaagacccaaccuccaau

SEQ ID NO: 866422 - RNA, 19 nt, Homo sapiens
  misc_RNA (1)...(19): siRNA sense strand
gcaugcagcugggguuuug

SEQ ID NO: 866423 - RNA, 19 nt, Homo sapiens
  misc_RNA (1)...(19): siRNA sense strand
gggagcugaucgaauagca

SEQ ID NO: 866424 - RNA, 19 nt, Homo sapiens
  misc_RNA (1)...(19): siRNA sense strand
ucaacacccgcaucacuga

SEQ ID NO: 866425 - RNA, 19 nt, Homo sapiens
  misc_RNA (1)...(19): siRNA sense strand
uguuucaacugcuggaaga

SEQ ID NO: 866426 - RNA, 19 nt, Homo sapiens
  misc_RNA (1)...(19): siRNA sense strand
aagacccaaccuccaauua

SEQ ID NO: 866427 - RNA, 19 nt, Homo sapiens
  misc_RNA (1)...(19): siRNA sense strand
uucaacugcuggaagauga

SEQ ID NO: 866428 - RNA, 19 nt, Homo sapiens
  misc_RNA (1)...(19): siRNA sense strand
ggacugcuggagcccauca

SEQ ID NO: 866429 - RNA, 19 nt, Homo sapiens
  misc_RNA (1)...(19): siRNA sense strand
caucaacacccgcaucacu

SEQ ID NO: 866430 - RNA, 19 nt, Homo sapiens
  misc_RNA (1)...(19): siRNA sense strand
ggaguuccugcccauuguu

SEQ ID NO: 866431 - RNA, 19 nt, Homo sapiens
  misc_RNA (1)...(19): siRNA sense strand
gaucauaaccuuggaagaa

SEQ ID NO: 866432 - RNA, 19 nt, Homo sapiens
  misc_RNA (1)...(19): siRNA sense strand
ggugagacauccuccauga

SEQ ID NO: 866433 - RNA, 19 nt, Homo sapiens
  misc_RNA (1)...(19): siRNA sense strand
gagacauccuccaugauuu

SEQ ID NO: 866434 - RNA, 19 nt, Homo sapiens
  misc_RNA (1)...(19): siRNA sense strand
gaucgaggcuggcauacac

SEQ ID NO: 866435 - RNA, 19 nt, Homo sapiens
  misc_RNA (1)...(19): siRNA sense strand
ugagacauccuccaugauu

SEQ ID NO: 866436 - RNA, 19 nt, Homo sapiens
  misc_RNA (1)...(19): siRNA sense strand
ggucaacggcgaacucaga

SEQ ID NO: 866437 - RNA, 19 nt, Homo sapiens
  misc_RNA (1)...(19): siRNA sense strand
ucagcuauguuucuaagau

SEQ ID NO: 866438 - RNA, 19 nt, Homo sapiens
  misc_RNA (1)...(19): siRNA sense strand
ggaaaagccagaauauuga

SEQ ID NO: 866439 - RNA, 19 nt, Homo sapiens
  misc_RNA (1)...(19): siRNA sense strand
caucagcuauguuucuaag

SEQ ID NO: 866440 - RNA, 19 nt, Homo sapiens
  misc_RNA (1)...(19): siRNA sense strand
gaguuggaccgguuaaaga

SEQ ID NO: 866441 - RNA, 19 nt, Homo sapiens
  misc_RNA (1)...(19): siRNA sense strand
ugagaucgaggcuggcaua

SEQ ID NO: 866442 - RNA, 19 nt, Homo sapiens
  misc_RNA (1)...(19): siRNA sense strand
uacacgggcuggucaguau

SEQ ID NO: 866443 - RNA, 19 nt, Homo sapiens
  misc_RNA (1)...(19): siRNA sense strand
caggacgagugcaagaaga

SEQ ID NO: 866444 - RNA, 19 nt, Homo sapiens
  misc_RNA (1)...(19): siRNA sense strand
cagcuauguuucuaagauc

SEQ ID NO: 866445 - RNA, 19 nt, Homo sapiens
  misc_RNA (1)...(19): siRNA sense strand
ggaguuggaccgguuaaag

SEQ ID NO: 866446 - RNA, 19 nt, Homo sapiens
  misc_RNA (1)...(19): siRNA sense strand
gacaggagggugagacauc

SEQ ID NO: 866447 - RNA, 19 nt, Homo sapiens
  misc_RNA (1)...(19): siRNA sense strand
gcaggacgagugcaagaag

SEQ ID NO: 866448 - RNA, 19 nt, Homo sapiens
  misc_RNA (1)...(19): siRNA sense strand
uggaaaagccagaauauug

SEQ ID NO: 866449 - RNA, 19 nt, Homo sapiens
  misc_RNA (1)...(19): siRNA sense strand
caucaucagcuauguuucu

SEQ ID NO: 866450 - RNA, 19 nt, Homo sapiens
  misc_RNA (1)...(19): siRNA sense strand
caguaugacauuuaaagug

SEQ ID NO: 866451 - RNA, 19 nt, Homo sapiens
  misc_RNA (1)...(19): siRNA sense strand
ugagcgagcccgugcuguu

SEQ ID NO: 866452 - RNA, 19 nt, Homo sapiens
  misc_RNA (1)...(19): siRNA sense strand
gcccugugccuggauauga

SEQ ID NO: 866453 - RNA, 19 nt, Homo sapiens
  misc_RNA (1)...(19): siRNA sense strand
cuaagaucauaaccuugga

SEQ ID NO: 866454 - RNA, 19 nt, Homo sapiens
  misc_RNA (1)...(19): siRNA sense strand
uggaagaaggagauauuau

SEQ ID NO: 866455 - RNA, 19 nt, Homo sapiens
  misc_RNA (1)...(19): siRNA sense strand
cuuggaagaaggagauauu

SEQ ID NO: 866456 - RNA, 19 nt, Homo sapiens
  misc_RNA (1)...(19): siRNA sense strand
uaagaucauaaccuuggaa

SEQ ID NO: 866457 - RNA, 19 nt, Homo sapiens
  misc_RNA (1)...(19): siRNA sense strand
uaaagaaaacgaugagauc

SEQ ID NO: 866458 - RNA, 19 nt, Homo sapiens
  misc_RNA (1)...(19): siRNA sense strand
gaguaaagguccagguuca

SEQ ID NO: 866459 - RNA, 19 nt, Homo sapiens
  misc_RNA (1)...(19): siRNA sense strand
cgagucagcugaaagaaca

SEQ ID NO: 866460 - RNA, 19 nt, Homo sapiens
  misc_RNA (1)...(19): siRNA sense strand
ucaaucagccgguugcuuu

SEQ ID NO: 866461 - RNA, 19 nt, Homo sapiens
  misc_RNA (1)...(19): siRNA sense strand
gcacaguucggccauguca

SEQ ID NO: 866462 - RNA, 19 nt, Homo sapiens
  misc_RNA (1)...(19): siRNA sense strand
aagaacacuuugcacaguu

SEQ ID NO: 866463 - RNA, 19 nt, Homo sapiens
  misc_RNA (1)...(19): siRNA sense strand
ggagacuggcuuucacaga

SEQ ID NO: 866464 - RNA, 19 nt, Homo sapiens
  misc_RNA (1)...(19): siRNA sense strand
ugacaaggagacuggcuuu

SEQ ID NO: 866465 - RNA, 19 nt, Homo sapiens
  misc_RNA (1)...(19): siRNA sense strand
caugucagaaggugcauuu

SEQ ID NO: 866466 - RNA, 19 nt, Homo sapiens
  misc_RNA (1)...(19): siRNA sense strand
gguccagguucacacuaga

SEQ ID NO: 866467 - RNA, 19 nt, Homo sapiens
  misc_RNA (1)...(19): siRNA sense strand
caaggagacuggcuuucac

SEQ ID NO: 866468 - RNA, 19 nt, Homo sapiens
  misc_RNA (1)...(19): siRNA sense strand
gugagaagaauuccuugga

SEQ ID NO: 866469 - RNA, 19 nt, Homo sapiens
  misc_RNA (1)...(19): siRNA sense strand
gaaugcacuacaacaggaa

SEQ ID NO: 866470 - RNA, 19 nt, Homo sapiens
  misc_RNA (1)...(19): siRNA sense strand
guaaagguccagguucaca

SEQ ID NO: 866471 - RNA, 19 nt, Homo sapiens
  misc_RNA (1)...(19): siRNA sense strand
gcgcugcguagaaguauca

SEQ ID NO: 866472 - RNA, 19 nt, Homo sapiens
  misc_RNA (1)...(19): siRNA sense strand
acaaggagacuggcuuuca

SEQ ID NO: 866473 - RNA, 19 nt, Homo sapiens
  misc_RNA (1)...(19): siRNA sense strand
cgucgagucagcugaaaga

SEQ ID NO: 866474 - RNA, 19 nt, Homo sapiens
  misc_RNA (1)...(19): siRNA sense strand
acaguucggccaugucaga

SEQ ID NO: 866475 - RNA, 19 nt, Homo sapiens
  misc_RNA (1)...(19): siRNA sense strand
gcguagaaguaucaaucag

SEQ ID NO: 866476 - RNA, 19 nt, Homo sapiens
  misc_RNA (1)...(19): siRNA sense strand
ggccaaaacuuccgcaaac

SEQ ID NO: 866477 - RNA, 19 nt, Homo sapiens
  misc_RNA (1)...(19): siRNA sense strand
ugucagaaggugcauuuua

SEQ ID NO: 866478 - RNA, 19 nt, Homo sapiens
  misc_RNA (1)...(19): siRNA sense strand
gcaccaccaucuccaaauc

SEQ ID NO: 866479 - RNA, 19 nt, Homo sapiens
  misc_RNA (1)...(19): siRNA sense strand
gaacaucacgcuacucaac

SEQ ID NO: 866480 - RNA, 19 nt, Homo sapiens
  misc_RNA (1)...(19): siRNA sense strand
agaagaugcuggccuccaa

SEQ ID NO: 866481 - RNA, 19 nt, Homo sapiens
  misc_RNA (1)...(19): siRNA sense strand
gagcugggcaccaccaucu

SEQ ID NO: 866482 - RNA, 19 nt, Homo sapiens
  misc_RNA (1)...(19): siRNA sense strand
ggaggcagccaagcucaug

SEQ ID NO: 866483 - RNA, 19 nt, Homo sapiens
  misc_RNA (1)...(19): siRNA sense strand
ccuacaugcuggacgucua

SEQ ID NO: 866484 - RNA, 19 nt, Homo sapiens
  misc_RNA (1)...(19): siRNA sense strand
gggcaccaccaucuccaaa

SEQ ID NO: 866485 - RNA, 19 nt, Homo sapiens
  misc_RNA (1)...(19): siRNA sense strand
cggaacaucacgcuacuca

SEQ ID NO: 866486 - RNA, 19 nt, Homo sapiens
  misc_RNA (1)...(19): siRNA sense strand
caucguggcccuggucuuc

SEQ ID NO: 866487 - RNA, 19 nt, Homo sapiens
  misc_RNA (1)...(19): siRNA sense strand
caacggcguggccaucauc

SEQ ID NO: 866488 - RNA, 19 nt, Homo sapiens
  misc_RNA (1)...(19): siRNA sense strand
caucggcucgggcaucuuc

SEQ ID NO: 866489 - RNA, 19 nt, Homo sapiens
  misc_RNA (1)...(19): siRNA sense strand
uagcaaagcauaucaauug

SEQ ID NO: 866490 - RNA, 19 nt, Homo sapiens
  misc_RNA (1)...(19): siRNA sense strand
gcaaagcauaucaauugaa

SEQ ID NO: 866491 - RNA, 19 nt, Homo sapiens
  misc_RNA (1)...(19): siRNA sense strand
uaucagcaccuuccuaguu

SEQ ID NO: 866492 - RNA, 19 nt, Homo sapiens
  misc_RNA (1)...(19): siRNA sense strand
gaauaucagcaccuuccua

SEQ ID NO: 866493 - RNA, 19 nt, Homo sapiens
  misc_RNA (1)...(19): siRNA sense strand
guagcaaagcauaucaauu

SEQ ID NO: 866494 - RNA, 19 nt, Homo sapiens
  misc_RNA (1)...(19): siRNA sense strand
aucagcaccuuccuaguuu

SEQ ID NO: 866495 - RNA, 19 nt, Homo sapiens
  misc_RNA (1)...(19): siRNA sense strand
agcaaagcauaucaauuga

SEQ ID NO: 866496 - RNA, 19 nt, Homo sapiens
  misc_RNA (1)...(19): siRNA sense strand
ucagcaccuuccuaguuug

SEQ ID NO: 866497 - RNA, 19 nt, Homo sapiens
  misc_RNA (1)...(19): siRNA sense strand
cuuccuaguuugggauuug

SEQ ID NO: 866498 - RNA, 19 nt, Homo sapiens
  misc_RNA (1)...(19): siRNA sense strand
gaagagacaugagauggua

SEQ ID NO: 866499 - RNA, 19 nt, Homo sapiens
  misc_RNA (1)...(19): siRNA sense strand
gaaagaaacccuacaagug

SEQ ID NO: 866500 - RNA, 19 nt, Homo sapiens
  misc_RNA (1)...(19): siRNA sense strand
gaaagaaacccuacaagug

SEQ ID NO: 866501 - RNA, 19 nt, Homo sapiens
  misc_RNA (1)...(19): siRNA sense strand
ggacuuaaccaguguagua

SEQ ID NO: 866502 - RNA, 19 nt, Homo sapiens
  misc_RNA (1)...(19): siRNA sense strand
ggagagaaacccuacauuu

SEQ ID NO: 866503 - RNA, 19 nt, Homo sapiens
  misc_RNA (1)...(19): siRNA sense strand
gagagaagcccuacaaaug

SEQ ID NO: 866504 - RNA, 19 nt, Homo sapiens
  misc_RNA (1)...(19): siRNA sense strand
ggaaugugauguuagagaa

SEQ ID NO: 866505 - RNA, 19 nt, Homo sapiens
  misc_RNA (1)...(19): siRNA sense strand
cuacaaaugugaagaaugu

SEQ ID NO: 866506 - RNA, 19 nt, Homo sapiens
  misc_RNA (1)...(19): siRNA sense strand
cuacaaaugugaagaaugu

SEQ ID NO: 866507 - RNA, 19 nt, Homo sapiens
  misc_RNA (1)...(19): siRNA sense strand
cuacaaaugugaagaaugu

SEQ ID NO: 866508 - RNA, 19 nt, Homo sapiens
  misc_RNA (1)...(19): siRNA sense strand
cuacaaaugugaagaaugu

SEQ ID NO: 866509 - RNA, 19 nt, Homo sapiens
  misc_RNA (1)...(19): siRNA sense strand
cuacaaaugugaagaaugu

SEQ ID NO: 866510 - RNA, 19 nt, Homo sapiens
  misc_RNA (1)...(19): siRNA sense strand
cuacaaaugugaagaaugu

SEQ ID NO: 866511 - RNA, 19 nt, Homo sapiens
  misc_RNA (1)...(19): siRNA sense strand
gcaaaguauuucaauguga

SEQ ID NO: 866512 - RNA, 19 nt, Homo sapiens
  misc_RNA (1)...(19): siRNA sense strand
gagagaaacccuacauuug

SEQ ID NO: 866513 - RNA, 19 nt, Homo sapiens
  misc_RNA (1)...(19): siRNA sense strand
gagagaaacccuacaaaug

SEQ ID NO: 866514 - RNA, 19 nt, Homo sapiens
  misc_RNA (1)...(19): siRNA sense strand
gagagaaacccuacaaaug

SEQ ID NO: 866515 - RNA, 19 nt, Homo sapiens
  misc_RNA (1)...(19): siRNA sense strand
gagagaaacccuacaaaug

SEQ ID NO: 866516 - RNA, 19 nt, Homo sapiens
  misc_RNA (1)...(19): siRNA sense strand
gagagaaacccuacaaaug

SEQ ID NO: 866517 - RNA, 19 nt, Homo sapiens
  misc_RNA (1)...(19): siRNA sense strand
gagagaaacccuacaaaug

SEQ ID NO: 866518 - RNA, 19 nt, Homo sapiens
  misc_RNA (1)...(19): siRNA sense strand
agagaaaccuuauagaugu

SEQ ID NO: 866519 - RNA, 19 nt, Homo sapiens
  misc_RNA (1)...(19): siRNA sense strand
gcacagcggaaucuauaua

SEQ ID NO: 866520 - RNA, 19 nt, Homo sapiens
  misc_RNA (1)...(19): siRNA sense strand
gagaaaccuuauagaugua

SEQ ID NO: 866521 - RNA, 19 nt, Homo sapiens
  misc_RNA (1)...(19): siRNA sense strand
gagagaaaccuuauagaug

SEQ ID NO: 866522 - RNA, 19 nt, Homo sapiens
  misc_RNA (1)...(19): siRNA sense strand
gagagaagcccuacguuug

SEQ ID NO: 866523 - RNA, 19 nt, Homo sapiens
  misc_RNA (1)...(19): siRNA sense strand
ccacacaccuuacuacaca

SEQ ID NO: 866524 - RNA, 19 nt, Homo sapiens
  misc_RNA (1)...(19): siRNA sense strand
gagaaacccuacauuugug

SEQ ID NO: 866525 - RNA, 19 nt, Homo sapiens
  misc_RNA (1)...(19): siRNA sense strand
gagaaacccuacaaaugug

SEQ ID NO: 866526 - RNA, 19 nt, Homo sapiens
  misc_RNA (1)...(19): siRNA sense strand
gagaaacccuacaaaugug

SEQ ID NO: 866527 - RNA, 19 nt, Homo sapiens
  misc_RNA (1)...(19): siRNA sense strand
gagaaacccuacaaaugug

SEQ ID NO: 866528 - RNA, 19 nt, Homo sapiens
  misc_RNA (1)...(19): siRNA sense strand
gagaaacccuacaaaugug

SEQ ID NO: 866529 - RNA, 19 nt, Homo sapiens
  misc_RNA (1)...(19): siRNA sense strand
ggagagaagcccuacguuu

SEQ ID NO: 866530 - RNA, 19 nt, Homo sapiens
  misc_RNA (1)...(19): siRNA sense strand
gagaaacccuacaaaugug

SEQ ID NO: 866531 - RNA, 19 nt, Homo sapiens
  misc_RNA (1)...(19): siRNA sense strand
ucacauaagagaagucaua

SEQ ID NO: 866532 - RNA, 19 nt, Homo sapiens
  misc_RNA (1)...(19): siRNA sense strand
ggagagaaaccuuauagau

SEQ ID NO: 866533 - RNA, 19 nt, Homo sapiens
  misc_RNA (1)...(19): siRNA sense strand
gagcaaaguauuucaaugu

SEQ ID NO: 866534 - RNA, 19 nt, Homo sapiens
  misc_RNA (1)...(19): siRNA sense strand
ggaaagaaacccuacaagu

SEQ ID NO: 866535 - RNA, 19 nt, Homo sapiens
  misc_RNA (1)...(19): siRNA sense strand
gagaagcccuacaaaugug

SEQ ID NO: 866536 - RNA, 19 nt, Homo sapiens
  misc_RNA (1)...(19): siRNA sense strand
ggaaagaaacccuacaagu

SEQ ID NO: 866537 - RNA, 19 nt, Homo sapiens
  misc_RNA (1)...(19): siRNA sense strand
cuacaagugugaagaaugu

SEQ ID NO: 866538 - RNA, 19 nt, Homo sapiens
  misc_RNA (1)...(19): siRNA sense strand
gcaacccuuucuucacaua

SEQ ID NO: 866539 - RNA, 19 nt, Homo sapiens
  misc_RNA (1)...(19): siRNA sense strand
cuacaagugugaagaaugu

SEQ ID NO: 866540 - RNA, 19 nt, Homo sapiens
  misc_RNA (1)...(19): siRNA sense strand
ggagagaaacccuacaaau

SEQ ID NO: 866541 - RNA, 19 nt, Homo sapiens
  misc_RNA (1)...(19): siRNA sense strand
ccucaacccuuauuaaaca

SEQ ID NO: 866542 - RNA, 19 nt, Homo sapiens
  misc_RNA (1)...(19): siRNA sense strand
ggagagaaacccuacaaau

SEQ ID NO: 866543 - RNA, 19 nt, Homo sapiens
  misc_RNA (1)...(19): siRNA sense strand
ggagagaaacccuacaaau

SEQ ID NO: 866544 - RNA, 19 nt, Homo sapiens
  misc_RNA (1)...(19): siRNA sense strand
ggagagaaacccuacaaau

SEQ ID NO: 866545 - RNA, 19 nt, Homo sapiens
  misc_RNA (1)...(19): siRNA sense strand
ccucaacacuuacuaaaca

SEQ ID NO: 866546 - RNA, 19 nt, Homo sapiens
  misc_RNA (1)...(19): siRNA sense strand
aaccaauccucaacacuua

SEQ ID NO: 866547 - RNA, 19 nt, Homo sapiens
  misc_RNA (1)...(19): siRNA sense strand
ggccagagcagaacauaaa

SEQ ID NO: 866548 - RNA, 19 nt, Homo sapiens
  misc_RNA (1)...(19): siRNA sense strand
gcacacaggagguuauaau

SEQ ID NO: 866549 - RNA, 19 nt, Homo sapiens
  misc_RNA (1)...(19): siRNA sense strand
ccucaucccuuacuaaaca

SEQ ID NO: 866550 - RNA, 19 nt, Homo sapiens
  misc_RNA (1)...(19): siRNA sense strand
ggagagaagcccuacaaau

SEQ ID NO: 866551 - RNA, 19 nt, Homo sapiens
  misc_RNA (1)...(19): siRNA sense strand
aaccaauccucgacacuua

SEQ ID NO: 866552 - RNA, 19 nt, Homo sapiens
  misc_RNA (1)...(19): siRNA sense strand
guacuccucugcccuuaau

SEQ ID NO: 866553 - RNA, 19 nt, Homo sapiens
  misc_RNA (1)...(19): siRNA sense strand
aaagaaacccuacaagugu

SEQ ID NO: 866554 - RNA, 19 nt, Homo sapiens
  misc_RNA (1)...(19): siRNA sense strand
gagagaaaccauacaagug

SEQ ID NO: 866555 - RNA, 19 nt, Homo sapiens
  misc_RNA (1)...(19): siRNA sense strand
aaagaaacccuacaagugu

SEQ ID NO: 866556 - RNA, 19 nt, Homo sapiens
  misc_RNA (1)...(19): siRNA sense strand
gagagaaaccauacaagug

SEQ ID NO: 866557 - RNA, 19 nt, Homo sapiens
  misc_RNA (1)...(19): siRNA sense strand
ggagagaaaccauacaagu

SEQ ID NO: 866558 - RNA, 19 nt, Homo sapiens
  misc_RNA (1)...(19): siRNA sense strand
ggagagaaaccauacaagu

SEQ ID NO: 866559 - RNA, 19 nt, Homo sapiens
  misc_RNA (1)...(19): siRNA sense strand
agagaaacccuacaaaugu

SEQ ID NO: 866560 - RNA, 19 nt, Homo sapiens
  misc_RNA (1)...(19): siRNA sense strand
agagaaacccuacaaaugu

SEQ ID NO: 866561 - RNA, 19 nt, Homo sapiens
  misc_RNA (1)...(19): siRNA sense strand
agagaaacccuacaaaugu

SEQ ID NO: 866562 - RNA, 19 nt, Homo sapiens
  misc_RNA (1)...(19): siRNA sense strand
agagaaacccuacaaaugu

SEQ ID NO: 866563 - RNA, 19 nt, Homo sapiens
  misc_RNA (1)...(19): siRNA sense strand
agagaaacccuacaaaugu

SEQ ID NO: 866564 - RNA, 19 nt, Homo sapiens
  misc_RNA (1)...(19): siRNA sense strand
cacaggagguuauaaugga

SEQ ID NO: 866565 - RNA, 19 nt, Homo sapiens
  misc_RNA (1)...(19): siRNA sense strand
gagaauguggcaaagcuuu

SEQ ID NO: 866566 - RNA, 19 nt, Homo sapiens
  misc_RNA (1)...(19): siRNA sense strand
ccuuauagauguagagaau

SEQ ID NO: 866567 - RNA, 19 nt, Homo sapiens
  misc_RNA (1)...(19): siRNA sense strand
aaccaguucucaacccuua

SEQ ID NO: 866568 - RNA, 19 nt, Homo sapiens
  misc_RNA (1)...(19): siRNA sense strand
uuagagauguggccauaga

SEQ ID NO: 866569 - RNA, 19 nt, Homo sapiens
  misc_RNA (1)...(19): siRNA sense strand
ccucgacacuuacuaaaca

SEQ ID NO: 866570 - RNA, 19 nt, Homo sapiens
  misc_RNA (1)...(19): siRNA sense strand
ccucuucccuuacuaaaca

SEQ ID NO: 866571 - RNA, 19 nt, Homo sapiens
  misc_RNA (1)...(19): siRNA sense strand
gcccuacguuugugaagaa

SEQ ID NO: 866572 - RNA, 19 nt, Homo sapiens
  misc_RNA (1)...(19): siRNA sense strand
gggaaagaaacauuacaaa

SEQ ID NO: 866573 - RNA, 19 nt, Homo sapiens
  misc_RNA (1)...(19): siRNA sense strand
gagauguggccauagaauu

SEQ ID NO: 866574 - RNA, 19 nt, Homo sapiens
  misc_RNA (1)...(19): siRNA sense strand
aaccaguccucaacccuua

SEQ ID NO: 866575 - RNA, 19 nt, Homo sapiens
  misc_RNA (1)...(19): siRNA sense strand
aaccaguccucuucccuua

SEQ ID NO: 866576 - RNA, 19 nt, Homo sapiens
  misc_RNA (1)...(19): siRNA sense strand
aaccaguccucaucccuua

SEQ ID NO: 866577 - RNA, 19 nt, Homo sapiens
  misc_RNA (1)...(19): siRNA sense strand
uaaccaauccucaacacuu

SEQ ID NO: 866578 - RNA, 19 nt, Homo sapiens
  misc_RNA (1)...(19): siRNA sense strand
ucucaacccuuauaacaca

SEQ ID NO: 866579 - RNA, 19 nt, Homo sapiens
  misc_RNA (1)...(19): siRNA sense strand
gagcagaacauaaaagauu

SEQ ID NO: 866580 - RNA, 19 nt, Homo sapiens
  misc_RNA (1)...(19): siRNA sense strand
cauaagauacuucauacug

SEQ ID NO: 866581 - RNA, 19 nt, Homo sapiens
  misc_RNA (1)...(19): siRNA sense strand
cauaagagaauucauacug

SEQ ID NO: 866582 - RNA, 19 nt, Homo sapiens
  misc_RNA (1)...(19): siRNA sense strand
cauaagagaauucauacug

SEQ ID NO: 866583 - RNA, 19 nt, Homo sapiens
  misc_RNA (1)...(19): siRNA sense strand
agagaaacccuacauuugu

SEQ ID NO: 866584 - RNA, 19 nt, Homo sapiens
  misc_RNA (1)...(19): siRNA sense strand
acguggacauggaaauuua

SEQ ID NO: 866585 - RNA, 19 nt, Homo sapiens
  misc_RNA (1)...(19): siRNA sense strand
gcaaagcuuuuaaccauuc

SEQ ID NO: 866586 - RNA, 19 nt, Homo sapiens
  misc_RNA (1)...(19): siRNA sense strand
uggcaaagcuuuucaccua

SEQ ID NO: 866587 - RNA, 19 nt, Homo sapiens
  misc_RNA (1)...(19): siRNA sense strand
gagaagcccuacguuugug

SEQ ID NO: 866588 - RNA, 19 nt, Homo sapiens
  misc_RNA (1)...(19): siRNA sense strand
ggucuuccuugguauuguu

SEQ ID NO: 866589 - RNA, 19 nt, Homo sapiens
  misc_RNA (1)...(19): siRNA sense strand
cgacacuuacuaaacauaa

SEQ ID NO: 866590 - RNA, 19 nt, Homo sapiens
  misc_RNA (1)...(19): siRNA sense strand
gcaaagcuuuuaaccaguu

SEQ ID NO: 866591 - RNA, 19 nt, Homo sapiens
  misc_RNA (1)...(19): siRNA sense strand
ggacauggaaauuuacagu

SEQ ID NO: 866592 - RNA, 19 nt, Homo sapiens
  misc_RNA (1)...(19): siRNA sense strand
aaccuggucuuccuuggua

SEQ ID NO: 866593 - RNA, 19 nt, Homo sapiens
  misc_RNA (1)...(19): siRNA sense strand
cauaagagaguucauacug

SEQ ID NO: 866594 - RNA, 19 nt, Homo sapiens
  misc_RNA (1)...(19): siRNA sense strand
agacauaagagaguucaua

SEQ ID NO: 866595 - RNA, 19 nt, Homo sapiens
  misc_RNA (1)...(19): siRNA sense strand
ccucaacccuuaguaaaca

SEQ ID NO: 866596 - RNA, 19 nt, Homo sapiens
  misc_RNA (1)...(19): siRNA sense strand
auacgagugugauaaaugu

SEQ ID NO: 866597 - RNA, 19 nt, Homo sapiens
  misc_RNA (1)...(19): siRNA sense strand
cacauaagauacuucauac

SEQ ID NO: 866598 - RNA, 19 nt, Homo sapiens
  misc_RNA (1)...(19): siRNA sense strand
gagcucagaugaugaauuc

SEQ ID NO: 866599 - RNA, 19 nt, Homo sapiens
  misc_RNA (1)...(19): siRNA sense strand
gaaguccucugaugggauu

SEQ ID NO: 866600 - RNA, 19 nt, Homo sapiens
  misc_RNA (1)...(19): siRNA sense strand
gaugaugaauucuuugaug

SEQ ID NO: 866601 - RNA, 19 nt, Homo sapiens
  misc_RNA (1)...(19): siRNA sense strand
ggacgagcaucaaggagaa

SEQ ID NO: 866602 - RNA, 19 nt, Homo sapiens
  misc_RNA (1)...(19): siRNA sense strand
gaagguggacauccuagua

SEQ ID NO: 866603 - RNA, 19 nt, Homo sapiens
  misc_RNA (1)...(19): siRNA sense strand
gaccagaccugugccauga

SEQ ID NO: 866604 - RNA, 19 nt, Homo sapiens
  misc_RNA (1)...(19): siRNA sense strand
gcaagaggaucgacuaugc

SEQ ID NO: 866605 - RNA, 19 nt, Homo sapiens
  misc_RNA (1)...(19): siRNA sense strand
gcaguggucgcaucacaua

SEQ ID NO: 866606 - RNA, 19 nt, Homo sapiens
  misc_RNA (1)...(19): siRNA sense strand
gaacaacucgcgcaugauc

SEQ ID NO: 866607 - RNA, 19 nt, Homo sapiens
  misc_RNA (1)...(19): siRNA sense strand
gcaucgagauccacgaaga

SEQ ID NO: 866608 - RNA, 19 nt, Homo sapiens
  misc_RNA (1)...(19): siRNA sense strand
aagaacaacucgcgcauga

SEQ ID NO: 866609 - RNA, 19 nt, Homo sapiens
  misc_RNA (1)...(19): siRNA sense strand
ugaggaaugucacggcuaa

SEQ ID NO: 866610 - RNA, 19 nt, Homo sapiens
  misc_RNA (1)...(19): siRNA sense strand
gaagcaagaggaucgacua

SEQ ID NO: 866611 - RNA, 19 nt, Homo sapiens
  misc_RNA (1)...(19): siRNA sense strand
guggagagcucagaugaug

SEQ ID NO: 866612 - RNA, 19 nt, Homo sapiens
  misc_RNA (1)...(19): siRNA sense strand
ggagagcucagaugaugaa

SEQ ID NO: 866613 - RNA, 19 nt, Homo sapiens
  misc_RNA (1)...(19): siRNA sense strand
ccaaccaggucuacagaga

SEQ ID NO: 866614 - RNA, 19 nt, Homo sapiens
  misc_RNA (1)...(19): siRNA sense strand
acacagagaucaccaacag

SEQ ID NO: 866615 - RNA, 19 nt, Homo sapiens
  misc_RNA (1)...(19): siRNA sense strand
cagcaagcgucucagcaaa

SEQ ID NO: 866616 - RNA, 19 nt, Homo sapiens
  misc_RNA (1)...(19): siRNA sense strand
ggacuugggcuacaugauc

SEQ ID NO: 866617 - RNA, 19 nt, Homo sapiens
  misc_RNA (1)...(19): siRNA sense strand
gcaggagugcuucaucaaa

SEQ ID NO: 866618 - RNA, 19 nt, Homo sapiens
  misc_RNA (1)...(19): siRNA sense strand
cgagaacuguaccggguuu

SEQ ID NO: 866619 - RNA, 19 nt, Homo sapiens
  misc_RNA (1)...(19): siRNA sense strand
ccaguggguuggaggauga

SEQ ID NO: 866620 - RNA, 19 nt, Homo sapiens
  misc_RNA (1)...(19): siRNA sense strand
gcagccaggucuacagcuu

SEQ ID NO: 866621 - RNA, 19 nt, Homo sapiens
  misc_RNA (1)...(19): siRNA sense strand
ggguacaccuggacacaga

SEQ ID NO: 866622 - RNA, 19 nt, Homo sapiens
  misc_RNA (1)...(19): siRNA sense strand
guaccggguuuccuugaga

SEQ ID NO: 866623 - RNA, 19 nt, Homo sapiens
  misc_RNA (1)...(19): siRNA sense strand
gaucgacuaugcccuguac

SEQ ID NO: 866624 - RNA, 19 nt, Homo sapiens
  misc_RNA (1)...(19): siRNA sense strand
acagagaguuccugaaguc

SEQ ID NO: 866625 - RNA, 19 nt, Homo sapiens
  misc_RNA (1)...(19): siRNA sense strand
gucuacagcuucuuccauu

SEQ ID NO: 866626 - RNA, 19 nt, Homo sapiens
  misc_RNA (1)...(19): siRNA sense strand
ggaaugucacggcuaauca

SEQ ID NO: 866627 - RNA, 19 nt, Homo sapiens
  misc_RNA (1)...(19): siRNA sense strand
gcagcaagcgucucagcaa

SEQ ID NO: 866628 - RNA, 19 nt, Homo sapiens
  misc_RNA (1)...(19): siRNA sense strand
gagagaagguggacauccu

SEQ ID NO: 866629 - RNA, 19 nt, Homo sapiens
  misc_RNA (1)...(19): siRNA sense strand
uaugagagcgugaacauca

SEQ ID NO: 866630 - RNA, 19 nt, Homo sapiens
  misc_RNA (1)...(19): siRNA sense strand
gagcgacuccuccaccuau

SEQ ID NO: 866631 - RNA, 19 nt, Homo sapiens
  misc_RNA (1)...(19): siRNA sense strand
gcaccaugccuuccucuca

SEQ ID NO: 866632 - RNA, 19 nt, Homo sapiens
  misc_RNA (1)...(19): siRNA sense strand
ugggcuacaugauccuuua

SEQ ID NO: 866633 - RNA, 19 nt, Homo sapiens
  misc_RNA (1)...(19): siRNA sense strand
guuggugucuauccuguga

SEQ ID NO: 866634 - RNA, 19 nt, Homo sapiens
  misc_RNA (1)...(19): siRNA sense strand
ccacgaagacagcgaggaa

SEQ ID NO: 866635 - RNA, 19 nt, Homo sapiens
  misc_RNA (1)...(19): siRNA sense strand
ccacgaaggacaucucugu

SEQ ID NO: 866636 - RNA, 19 nt, Homo sapiens
  misc_RNA (1)...(19): siRNA sense strand
gcucagaugaugaauucuu

SEQ ID NO: 866637 - RNA, 19 nt, Homo sapiens
  misc_RNA (1)...(19): siRNA sense strand
ccagcgugcuaaaggauga

SEQ ID NO: 866638 - RNA, 19 nt, Homo sapiens
  misc_RNA (1)...(19): siRNA sense strand
caccaugccuuccucucaa

SEQ ID NO: 866639 - RNA, 19 nt, Homo sapiens
  misc_RNA (1)...(19): siRNA sense strand
gacagguaaugcgcuauga

SEQ ID NO: 866640 - RNA, 19 nt, Homo sapiens
  misc_RNA (1)...(19): siRNA sense strand
gaaacuggacgagcaucaa

SEQ ID NO: 866641 - RNA, 19 nt, Homo sapiens
  misc_RNA (1)...(19): siRNA sense strand
cauggaguguguaguguuc

SEQ ID NO: 866642 - RNA, 19 nt, Homo sapiens
  misc_RNA (1)...(19): siRNA sense strand
ggaagaaugccauccucau

SEQ ID NO: 866643 - RNA, 19 nt, Homo sapiens
  misc_RNA (1)...(19): siRNA sense strand
ugugauugcugcugaagau

SEQ ID NO: 866644 - RNA, 19 nt, Homo sapiens
  misc_RNA (1)...(19): siRNA sense strand
gccacauccucaucaaguu

SEQ ID NO: 866645 - RNA, 19 nt, Homo sapiens
  misc_RNA (1)...(19): siRNA sense strand
cgaaauguccucagugacu

SEQ ID NO: 866646 - RNA, 19 nt, Homo sapiens
  misc_RNA (1)...(19): siRNA sense strand
gcucacgcccaaagaagaa

SEQ ID NO: 866647 - RNA, 19 nt, Homo sapiens
  misc_RNA (1)...(19): siRNA sense strand
gggcauggaguguguagug

SEQ ID NO: 866648 - RNA, 19 nt, Homo sapiens
  misc_RNA (1)...(19): siRNA sense strand
cagcaguggucgcaucaca

SEQ ID NO: 866649 - RNA, 19 nt, Homo sapiens
  misc_RNA (1)...(19): siRNA sense strand
ggucgcaucacauacaaug

SEQ ID NO: 866650 - RNA, 19 nt, Homo sapiens
  misc_RNA (1)...(19): siRNA sense strand
ggccggacaugcagaagca

SEQ ID NO: 866651 - RNA, 19 nt, Homo sapiens
  misc_RNA (1)...(19): siRNA sense strand
cucagaugaugaauucuuu

SEQ ID NO: 866652 - RNA, 19 nt, Homo sapiens
  misc_RNA (1)...(19): siRNA sense strand
cuacagagaguuccugaag

SEQ ID NO: 866653 - RNA, 19 nt, Homo sapiens
  misc_RNA (1)...(19): siRNA sense strand
gcuacaugauccuuuacau

SEQ ID NO: 866654 - RNA, 19 nt, Homo sapiens
  misc_RNA (1)...(19): siRNA sense strand
gcgugaacaucaaggaaag

SEQ ID NO: 866655 - RNA, 19 nt, Homo sapiens
  misc_RNA (1)...(19): siRNA sense strand
cagaugaugaauucuuuga

SEQ ID NO: 866656 - RNA, 19 nt, Homo sapiens
  misc_RNA (1)...(19): siRNA sense strand
ggaaacuggacgagcauca

SEQ ID NO: 866657 - RNA, 19 nt, Homo sapiens
  misc_RNA (1)...(19): siRNA sense strand
caggagugcuucaucaaaa

SEQ ID NO: 866658 - RNA, 19 nt, Homo sapiens
  misc_RNA (1)...(19): siRNA sense strand
ccacagggcaugaucuucu

SEQ ID NO: 866659 - RNA, 19 nt, Homo sapiens
  misc_RNA (1)...(19): siRNA sense strand
gcuaugagagcgugaacau

SEQ ID NO: 866660 - RNA, 19 nt, Homo sapiens
  misc_RNA (1)...(19): siRNA sense strand
cagccgacauccacaccuu

SEQ ID NO: 866661 - RNA, 19 nt, Homo sapiens
  misc_RNA (1)...(19): siRNA sense strand
ccucccagaucuucauugu

SEQ ID NO: 866662 - RNA, 19 nt, Homo sapiens
  misc_RNA (1)...(19): siRNA sense strand
uguguaguguucagcauug

SEQ ID NO: 866663 - RNA, 19 nt, Homo sapiens
  misc_RNA (1)...(19): siRNA sense strand
gagcgugaacaucaaggaa

SEQ ID NO: 866664 - RNA, 19 nt, Homo sapiens
  misc_RNA (1)...(19): siRNA sense strand
gcccuguacugcccugaug

SEQ ID NO: 866665 - RNA, 19 nt, Homo sapiens
  misc_RNA (1)...(19): siRNA sense strand
caucugcucugaggcuuuc

SEQ ID NO: 866666 - RNA, 19 nt, Homo sapiens
  misc_RNA (1)...(19): siRNA sense strand
gcaaccaccugcgcagaac

SEQ ID NO: 866667 - RNA, 19 nt, Homo sapiens
  misc_RNA (1)...(19): siRNA sense strand
uucgaaauguccucaguga

SEQ ID NO: 866668 - RNA, 19 nt, Homo sapiens
  misc_RNA (1)...(19): siRNA sense strand
ggagaagcagcgagaacug

SEQ ID NO: 866669 - RNA, 19 nt, Homo sapiens
  misc_RNA (1)...(19): siRNA sense strand
ggccacauccucaucaagu

SEQ ID NO: 866670 - RNA, 19 nt, Homo sapiens
  misc_RNA (1)...(19): siRNA sense strand
gagaagcagcgagaacugu

SEQ ID NO: 866671 - RNA, 19 nt, Homo sapiens
  misc_RNA (1)...(19): siRNA sense strand
agaagcagcgagaacugua

SEQ ID NO: 866672 - RNA, 19 nt, Homo sapiens
  misc_RNA (1)...(19): siRNA sense strand
cagguaaugcgcuaugaga

SEQ ID NO: 866673 - RNA, 19 nt, Homo sapiens
  misc_RNA (1)...(19): siRNA sense strand
gcauggaguguguaguguu

SEQ ID NO: 866674 - RNA, 19 nt, Homo sapiens
  misc_RNA (1)...(19): siRNA sense strand
gggaugagccaguggaacu

SEQ ID NO: 866675 - RNA, 19 nt, Homo sapiens
  misc_RNA (1)...(19): siRNA sense strand
aaagcaacauugacaucuc

SEQ ID NO: 866676 - RNA, 19 nt, Homo sapiens
  misc_RNA (1)...(19): siRNA sense strand
gcccaaagaagaacaacuc

SEQ ID NO: 866677 - RNA, 19 nt, Homo sapiens
  misc_RNA (1)...(19): siRNA sense strand
cacagggcaugaucuucuu

SEQ ID NO: 866678 - RNA, 19 nt, Homo sapiens
  misc_RNA (1)...(19): siRNA sense strand
gaggcuuucucgcuugucu

SEQ ID NO: 866679 - RNA, 19 nt, Homo sapiens
  misc_RNA (1)...(19): siRNA sense strand
ccuggcaccuucgaaaugu

SEQ ID NO: 866680 - RNA, 19 nt, Homo sapiens
  misc_RNA (1)...(19): siRNA sense strand
cgauguguccgacuucuuc

SEQ ID NO: 866681 - RNA, 19 nt, Homo sapiens
  misc_RNA (1)...(19): siRNA sense strand
ggucacacgagcccauuuc

SEQ ID NO: 866682 - RNA, 19 nt, Homo sapiens
  misc_RNA (1)...(19): siRNA sense strand
guaguguucagcauugaug

SEQ ID NO: 866683 - RNA, 19 nt, Homo sapiens
  misc_RNA (1)...(19): siRNA sense strand
gcuugucucucaccugaac

SEQ ID NO: 866684 - RNA, 19 nt, Homo sapiens
  misc_RNA (1)...(19): siRNA sense strand
ccacauccucaucaaguuc

SEQ ID NO: 866685 - RNA, 19 nt, Homo sapiens
  misc_RNA (1)...(19): siRNA sense strand
aagguggacauccuaguaa

SEQ ID NO: 866686 - RNA, 19 nt, Homo sapiens
  misc_RNA (1)...(19): siRNA sense strand
caaaaucagugcggccuau

SEQ ID NO: 866687 - RNA, 19 nt, Homo sapiens
  misc_RNA (1)...(19): siRNA sense strand
guaagcggacucaggucaa

SEQ ID NO: 866688 - RNA, 19 nt, Homo sapiens
  misc_RNA (1)...(19): siRNA sense strand
cuacaugauccuuuacauc

SEQ ID NO: 866689 - RNA, 19 nt, Homo sapiens
  misc_RNA (1)...(19): siRNA sense strand
gcggccagcgugucuauca

SEQ ID NO: 866690 - RNA, 19 nt, Homo sapiens
  misc_RNA (1)...(19): siRNA sense strand
guggucgcaucacauacaa

SEQ ID NO: 866691 - RNA, 19 nt, Homo sapiens
  misc_RNA (1)...(19): siRNA sense strand
gcgacuccuccaccuauga

SEQ ID NO: 866692 - RNA, 19 nt, Homo sapiens
  misc_RNA (1)...(19): siRNA sense strand
ggcauggaguguguagugu

SEQ ID NO: 866693 - RNA, 19 nt, Homo sapiens
  misc_RNA (1)...(19): siRNA sense strand
gguggacauccuaguaaug

SEQ ID NO: 866694 - RNA, 19 nt, Homo sapiens
  misc_RNA (1)...(19): siRNA sense strand
uaagcggacucaggucaag

SEQ ID NO: 866695 - RNA, 19 nt, Homo sapiens
  misc_RNA (1)...(19): siRNA sense strand
aaccaggucuacagagagu

SEQ ID NO: 866696 - RNA, 19 nt, Homo sapiens
  misc_RNA (1)...(19): siRNA sense strand
ucuacagcuucuuccauug

SEQ ID NO: 866697 - RNA, 19 nt, Homo sapiens
  misc_RNA (1)...(19): siRNA sense strand
uacagagaguuccugaagu

SEQ ID NO: 866698 - RNA, 19 nt, Homo sapiens
  misc_RNA (1)...(19): siRNA sense strand
gcaaggagcugaacaagag

SEQ ID NO: 866699 - RNA, 19 nt, Homo sapiens
  misc_RNA (1)...(19): siRNA sense strand
gaaaccagauggcagagaa

SEQ ID NO: 866700 - RNA, 19 nt, Homo sapiens
  misc_RNA (1)...(19): siRNA sense strand
agaaagagcucgaaagagu

SEQ ID NO: 866701 - RNA, 19 nt, Homo sapiens
  misc_RNA (1)...(19): siRNA sense strand
gcagaaagagcucgaaaga

SEQ ID NO: 866702 - RNA, 19 nt, Homo sapiens
  misc_RNA (1)...(19): siRNA sense strand
ucacgaagaugaaggagau

SEQ ID NO: 866703 - RNA, 19 nt, Homo sapiens
  misc_RNA (1)...(19): siRNA sense strand
gcucaaugccgaccucuuu

SEQ ID NO: 866704 - RNA, 19 nt, Homo sapiens
  misc_RNA (1)...(19): siRNA sense strand
ucaacuggcucgaccgaaa

SEQ ID NO: 866705 - RNA, 19 nt, Homo sapiens
  misc_RNA (1)...(19): siRNA sense strand
agagaaagaugaguaugaa

SEQ ID NO: 866706 - RNA, 19 nt, Homo sapiens
  misc_RNA (1)...(19): siRNA sense strand
caagagcaccgguaaggaa

SEQ ID NO: 866707 - RNA, 19 nt, Homo sapiens
  misc_RNA (1)...(19): siRNA sense strand
gaaagagcucgaaagaguu

SEQ ID NO: 866708 - RNA, 19 nt, Homo sapiens
  misc_RNA (1)...(19): siRNA sense strand
gagaagaacgugcucaucu

SEQ ID NO: 866709 - RNA, 19 nt, Homo sapiens
  misc_RNA (1)...(19): siRNA sense strand
agaacgugcucaucuuuga

SEQ ID NO: 866710 - RNA, 19 nt, Homo sapiens
  misc_RNA (1)...(19): siRNA sense strand
ccaaagugcaaguagagua

SEQ ID NO: 866711 - RNA, 19 nt, Homo sapiens
  misc_RNA (1)...(19): siRNA sense strand
cagcaaacuuuaccaaggu

SEQ ID NO: 866712 - RNA, 19 nt, Homo sapiens
  misc_RNA (1)...(19): siRNA sense strand
cagagaaagaugaguauga

SEQ ID NO: 866713 - RNA, 19 nt, Homo sapiens
  misc_RNA (1)...(19): siRNA sense strand
guacaaaucggaagaugag

SEQ ID NO: 866714 - RNA, 19 nt, Homo sapiens
  misc_RNA (1)...(19): siRNA sense strand
ccacagugcagucggauau

SEQ ID NO: 866715 - RNA, 19 nt, Homo sapiens
  misc_RNA (1)...(19): siRNA sense strand
aaagagcucgaaagaguuu

SEQ ID NO: 866716 - RNA, 19 nt, Homo sapiens
  misc_RNA (1)...(19): siRNA sense strand
gcacagcgcggucauaacg

SEQ ID NO: 866717 - RNA, 19 nt, Homo sapiens
  misc_RNA (1)...(19): siRNA sense strand
gagcugaacaagagcauca

SEQ ID NO: 866718 - RNA, 19 nt, Homo sapiens
  misc_RNA (1)...(19): siRNA sense strand
aaaucaccaucaccaauga

SEQ ID NO: 866719 - RNA, 19 nt, Homo sapiens
  misc_RNA (1)...(19): siRNA sense strand
acaagauccucgacaagug

SEQ ID NO: 866720 - RNA, 19 nt, Homo sapiens
  misc_RNA (1)...(19): siRNA sense strand
aauggcauccuuaacguua

SEQ ID NO: 866721 - RNA, 19 nt, Homo sapiens
  misc_RNA (1)...(19): siRNA sense strand
gucaggaggugaucaacug

SEQ ID NO: 866722 - RNA, 19 nt, Homo sapiens
  misc_RNA (1)...(19): siRNA sense strand
ccuacggccuggacaagaa

SEQ ID NO: 866723 - RNA, 19 nt, Homo sapiens
  misc_RNA (1)...(19): siRNA sense strand
caucgaagaaguggacuaa

SEQ ID NO: 866724 - RNA, 19 nt, Homo sapiens
  misc_RNA (1)...(19): siRNA sense strand
aaacugaggggcaagauua

SEQ ID NO: 866725 - RNA, 19 nt, Homo sapiens
  misc_RNA (1)...(19): siRNA sense strand
cgacaaaucagagaaugug

SEQ ID NO: 866726 - RNA, 19 nt, Homo sapiens
  misc_RNA (1)...(19): siRNA sense strand
agaaccagguggccaugaa

SEQ ID NO: 866727 - RNA, 19 nt, Homo sapiens
  misc_RNA (1)...(19): siRNA sense strand
ccaauggcauccuuaacgu

SEQ ID NO: 866728 - RNA, 19 nt, Homo sapiens
  misc_RNA (1)...(19): siRNA sense strand
ccucaucggcgacaaauca

SEQ ID NO: 866729 - RNA, 19 nt, Homo sapiens
  misc_RNA (1)...(19): siRNA sense strand
gugcacagcgcggucauaa

SEQ ID NO: 866730 - RNA, 19 nt, Homo sapiens
  misc_RNA (1)...(19): siRNA sense strand
ucaagcagacgguggaaga

SEQ ID NO: 866731 - RNA, 19 nt, Homo sapiens
  misc_RNA (1)...(19): siRNA sense strand
caucaccaaugacaaaggu

SEQ ID NO: 866732 - RNA, 19 nt, Homo sapiens
  misc_RNA (1)...(19): siRNA sense strand
gaaaacaaaaucaccauca

SEQ ID NO: 866733 - RNA, 19 nt, Homo sapiens
  misc_RNA (1)...(19): siRNA sense strand
gcguacuggugcagguaua

SEQ ID NO: 866734 - RNA, 19 nt, Homo sapiens
  misc_RNA (1)...(19): siRNA sense strand
caccaucaccaaugacaaa

SEQ ID NO: 866735 - RNA, 19 nt, Homo sapiens
  misc_RNA (1)...(19): siRNA sense strand
gaccugggcaccaccuauu

SEQ ID NO: 866736 - RNA, 19 nt, Homo sapiens
  misc_RNA (1)...(19): siRNA sense strand
gguacaaaucggaagauga

SEQ ID NO: 866737 - RNA, 19 nt, Homo sapiens
  misc_RNA (1)...(19): siRNA sense strand
acagugcagucggauauga

SEQ ID NO: 866738 - RNA, 19 nt, Homo sapiens
  misc_RNA (1)...(19): siRNA sense strand
uggcagagaaagaugagua

SEQ ID NO: 866739 - RNA, 19 nt, Homo sapiens
  misc_RNA (1)...(19): siRNA sense strand
agaaagaugaguaugaaca

SEQ ID NO: 866740 - RNA, 19 nt, Homo sapiens
  misc_RNA (1)...(19): siRNA sense strand
ccaagcagacgcagaccuu

SEQ ID NO: 866741 - RNA, 19 nt, Homo sapiens
  misc_RNA (1)...(19): siRNA sense strand
caagauccucgacaagugu

SEQ ID NO: 866742 - RNA, 19 nt, Homo sapiens
  misc_RNA (1)...(19): siRNA sense strand
ccaugaccaaggacaauaa

SEQ ID NO: 866743 - RNA, 19 nt, Homo sapiens
  misc_RNA (1)...(19): siRNA sense strand
gaggcugauuggacggaaa

SEQ ID NO: 866744 - RNA, 19 nt, Homo sapiens
  misc_RNA (1)...(19): siRNA sense strand
gagcaaggacgacauugac

SEQ ID NO: 866745 - RNA, 19 nt, Homo sapiens
  misc_RNA (1)...(19): siRNA sense strand
gacaagagcaccgguaagg

SEQ ID NO: 866746 - RNA, 19 nt, Homo sapiens
  misc_RNA (1)...(19): siRNA sense strand
gaaagaugaguaugaacac

SEQ ID NO: 866747 - RNA, 19 nt, Homo sapiens
  misc_RNA (1)...(19): siRNA sense strand
ccaugguccucacgaagau

SEQ ID NO: 866748 - RNA, 19 nt, Homo sapiens
  misc_RNA (1)...(19): siRNA sense strand
ccagauggcagagaaagau

SEQ ID NO: 866749 - RNA, 19 nt, Homo sapiens
  misc_RNA (1)...(19): siRNA sense strand
aaaacaagauccucgacaa

SEQ ID NO: 866750 - RNA, 19 nt, Homo sapiens
  misc_RNA (1)...(19): siRNA sense strand
ggcaaggagcugaacaaga

SEQ ID NO: 866751 - RNA, 19 nt, Homo sapiens
  misc_RNA (1)...(19): siRNA sense strand
caaagugcaaguagaguac

SEQ ID NO: 866752 - RNA, 19 nt, Homo sapiens
  misc_RNA (1)...(19): siRNA sense strand
ugagcaaggacgacauuga

SEQ ID NO: 866753 - RNA, 19 nt, Homo sapiens
  misc_RNA (1)...(19): siRNA sense strand
acaaaggucgucugagcaa

SEQ ID NO: 866754 - RNA, 19 nt, Homo sapiens
  misc_RNA (1)...(19): siRNA sense strand
gccaugaccaaggacaaua

SEQ ID NO: 866755 - RNA, 19 nt, Homo sapiens
  misc_RNA (1)...(19): siRNA sense strand
ggcgacaaaucagagaaug

SEQ ID NO: 866756 - RNA, 19 nt, Homo sapiens
  misc_RNA (1)...(19): siRNA sense strand
gacgguggaagacgagaaa

SEQ ID NO: 866757 - RNA, 19 nt, Homo sapiens
  misc_RNA (1)...(19): siRNA sense strand
gacccaccaucgaagaagu

SEQ ID NO: 866758 - RNA, 19 nt, Homo sapiens
  misc_RNA (1)...(19): siRNA sense strand
aaagaugaguaugaacaca

SEQ ID NO: 866759 - RNA, 19 nt, Homo sapiens
  misc_RNA (1)...(19): siRNA sense strand
gcugcaggauuucuucaac

SEQ ID NO: 866760 - RNA, 19 nt, Homo sapiens
  misc_RNA (1)...(19): siRNA sense strand
cccaucaucagcaaacuuu

SEQ ID NO: 866761 - RNA, 19 nt, Homo sapiens
  misc_RNA (1)...(19): siRNA sense strand
uccuauaccuacaacauca

SEQ ID NO: 866762 - RNA, 19 nt, Homo sapiens
  misc_RNA (1)...(19): siRNA sense strand
gcaagcacaagaaggacau

SEQ ID NO: 866763 - RNA, 19 nt, Homo sapiens
  misc_RNA (1)...(19): siRNA sense strand
caucagcaaacuuuaccaa

SEQ ID NO: 866764 - RNA, 19 nt, Homo sapiens
  misc_RNA (1)...(19): siRNA sense strand
gcagagaaagaugaguaug

SEQ ID NO: 866765 - RNA, 19 nt, Homo sapiens
  misc_RNA (1)...(19): siRNA sense strand
gauuagcgagcaggacaaa

SEQ ID NO: 866766 - RNA, 19 nt, Homo sapiens
  misc_RNA (1)...(19): siRNA sense strand
ggaguccuauaccuacaac

SEQ ID NO: 866767 - RNA, 19 nt, Homo sapiens
  misc_RNA (1)...(19): siRNA sense strand
gcgaacgggccaugaccaa

SEQ ID NO: 866768 - RNA, 19 nt, Homo sapiens
  misc_RNA (1)...(19): siRNA sense strand
ggcguggacuucuauacgu

SEQ ID NO: 866769 - RNA, 19 nt, Homo sapiens
  misc_RNA (1)...(19): siRNA sense strand
ucaaugugcugcgcaucau

SEQ ID NO: 866770 - RNA, 19 nt, Homo sapiens
  misc_RNA (1)...(19): siRNA sense strand
aguaugaacacaagcagaa

SEQ ID NO: 866771 - RNA, 19 nt, Homo sapiens
  misc_RNA (1)...(19): siRNA sense strand
gcggugaggacuucgacaa

SEQ ID NO: 866772 - RNA, 19 nt, Homo sapiens
  misc_RNA (1)...(19): siRNA sense strand
aaacaagauccucgacaag

SEQ ID NO: 866773 - RNA, 19 nt, Homo sapiens
  misc_RNA (1)...(19): siRNA sense strand
guggaagacgagaaacuga

SEQ ID NO: 866774 - RNA, 19 nt, Homo sapiens
  misc_RNA (1)...(19): siRNA sense strand
aaaacgcccuggaguccua

SEQ ID NO: 866775 - RNA, 19 nt, Homo sapiens
  misc_RNA (1)...(19): siRNA sense strand
acgagggcguggacuucua

SEQ ID NO: 866776 - RNA, 19 nt, Homo sapiens
  misc_RNA (1)...(19): siRNA sense strand
guaugaacacaagcagaaa

SEQ ID NO: 866777 - RNA, 19 nt, Homo sapiens
  misc_RNA (1)...(19): siRNA sense strand
ccgacaagagcaccgguaa

SEQ ID NO: 866778 - RNA, 19 nt, Homo sapiens
  misc_RNA (1)...(19): siRNA sense strand
gcgacaaaucagagaaugu

SEQ ID NO: 866779 - RNA, 19 nt, Homo sapiens
  misc_RNA (1)...(19): siRNA sense strand
agaugaguaugaacacaag

SEQ ID NO: 866780 - RNA, 19 nt, Homo sapiens
  misc_RNA (1)...(19): siRNA sense strand
gcccaaagugcaaguagag

SEQ ID NO: 866781 - RNA, 19 nt, Homo sapiens
  misc_RNA (1)...(19): siRNA sense strand
ggcagagaaagaugaguau

SEQ ID NO: 866782 - RNA, 19 nt, Homo sapiens
  misc_RNA (1)...(19): siRNA sense strand
gguggaagacgagaaacug

SEQ ID NO: 866783 - RNA, 19 nt, Homo sapiens
  misc_RNA (1)...(19): siRNA sense strand
aggcggagcgguacaaauc

SEQ ID NO: 866784 - RNA, 19 nt, Homo sapiens
  misc_RNA (1)...(19): siRNA sense strand
caauggcauccuuaacguu

SEQ ID NO: 866785 - RNA, 19 nt, Homo sapiens
  misc_RNA (1)...(19): siRNA sense strand
ccaccaacaccaucuucga

SEQ ID NO: 866786 - RNA, 19 nt, Homo sapiens
  misc_RNA (1)...(19): siRNA sense strand
ccacucaucaagaggaaca

SEQ ID NO: 866787 - RNA, 19 nt, Homo sapiens
  misc_RNA (1)...(19): siRNA sense strand
ucaagaggaacaccacgau

SEQ ID NO: 866788 - RNA, 19 nt, Homo sapiens
  misc_RNA (1)...(19): siRNA sense strand
caucaucagcaaacuuuac

SEQ ID NO: 866789 - RNA, 19 nt, Homo sapiens
  misc_RNA (1)...(19): siRNA sense strand
caaaaucaccaucaccaau

SEQ ID NO: 866790 - RNA, 19 nt, Homo sapiens
  misc_RNA (1)...(19): siRNA sense strand
ccuccaugguccucacgaa

SEQ ID NO: 866791 - RNA, 19 nt, Homo sapiens
  misc_RNA (1)...(19): siRNA sense strand
ggaaagaaauacuaagaga

SEQ ID NO: 866792 - RNA, 19 nt, Homo sapiens
  misc_RNA (1)...(19): siRNA sense strand
ggagaaagccugccucuga

SEQ ID NO: 866793 - RNA, 19 nt, Homo sapiens
  misc_RNA (1)...(19): siRNA sense strand
gaaaguuguugcccuguuu

SEQ ID NO: 866794 - RNA, 19 nt, Homo sapiens
  misc_RNA (1)...(19): siRNA sense strand
gaaccaaggugacacuuca

SEQ ID NO: 866795 - RNA, 19 nt, Homo sapiens
  misc_RNA (1)...(19): siRNA sense strand
gaacagaaguggcccuuuu

SEQ ID NO: 866796 - RNA, 19 nt, Homo sapiens
  misc_RNA (1)...(19): siRNA sense strand
gcauaucgcuguacuggau

SEQ ID NO: 866797 - RNA, 19 nt, Homo sapiens
  misc_RNA (1)...(19): siRNA sense strand
caaggacaauggugcauau

SEQ ID NO: 866798 - RNA, 19 nt, Homo sapiens
  misc_RNA (1)...(19): siRNA sense strand
ggaaaguuguugcccuguu

SEQ ID NO: 866799 - RNA, 19 nt, Homo sapiens
  misc_RNA (1)...(19): siRNA sense strand
gagccaaggugacacuuca

SEQ ID NO: 866800 - RNA, 19 nt, Homo sapiens
  misc_RNA (1)...(19): siRNA sense strand
guccuggcauuccuuaaua

SEQ ID NO: 866801 - RNA, 19 nt, Homo sapiens
  misc_RNA (1)...(19): siRNA sense strand
ggauuaggcuggagucucu

SEQ ID NO: 866802 - RNA, 19 nt, Homo sapiens
  misc_RNA (1)...(19): siRNA sense strand
gaacugacuuccauauucc

SEQ ID NO: 866803 - RNA, 19 nt, Homo sapiens
  misc_RNA (1)...(19): siRNA sense strand
gaugucacccuaggaaaua

SEQ ID NO: 866804 - RNA, 19 nt, Homo sapiens
  misc_RNA (1)...(19): siRNA sense strand
agaacugacuuccauauuc

SEQ ID NO: 866805 - RNA, 19 nt, Homo sapiens
  misc_RNA (1)...(19): siRNA sense strand
ccagcacagugacacaaua

SEQ ID NO: 866806 - RNA, 19 nt, Homo sapiens
  misc_RNA (1)...(19): siRNA sense strand
gcacagugacacaauauca

SEQ ID NO: 866807 - RNA, 19 nt, Homo sapiens
  misc_RNA (1)...(19): siRNA sense strand
ggaaguaacacugaauaau

SEQ ID NO: 866808 - RNA, 19 nt, Homo sapiens
  misc_RNA (1)...(19): siRNA sense strand
ucaggaaucuggagaguac

SEQ ID NO: 866809 - RNA, 19 nt, Homo sapiens
  misc_RNA (1)...(19): siRNA sense strand
caucuacucugaaguuaag

SEQ ID NO: 866810 - RNA, 19 nt, Homo sapiens
  misc_RNA (1)...(19): siRNA sense strand
gcaagggauuucgcuucua

SEQ ID NO: 866811 - RNA, 19 nt, Homo sapiens
  misc_RNA (1)...(19): siRNA sense strand
gcccaccuaucacaaugua

SEQ ID NO: 866812 - RNA, 19 nt, Homo sapiens
  misc_RNA (1)...(19): siRNA sense strand
ugaaggagacucugugguu

SEQ ID NO: 866813 - RNA, 19 nt, Homo sapiens
  misc_RNA (1)...(19): siRNA sense strand
gagcccaccuaucacaaug

SEQ ID NO: 866814 - RNA, 19 nt, Homo sapiens
  misc_RNA (1)...(19): siRNA sense strand
guaccucgggaaagaaaua

SEQ ID NO: 866815 - RNA, 19 nt, Homo sapiens
  misc_RNA (1)...(19): siRNA sense strand
uaaaagaacugacuuccau

SEQ ID NO: 866816 - RNA, 19 nt, Homo sapiens
  misc_RNA (1)...(19): siRNA sense strand
caagggauuucgcuucuac

SEQ ID NO: 866817 - RNA, 19 nt, Homo sapiens
  misc_RNA (1)...(19): siRNA sense strand
aagauucucugcgcacuuu

SEQ ID NO: 866818 - RNA, 19 nt, Homo sapiens
  misc_RNA (1)...(19): siRNA sense strand
cccaagagcccaccuauca

SEQ ID NO: 866819 - RNA, 19 nt, Homo sapiens
  misc_RNA (1)...(19): siRNA sense strand
gcggugagccucuccauca

SEQ ID NO: 866820 - RNA, 19 nt, Homo sapiens
  misc_RNA (1)...(19): siRNA sense strand
gcggaaguaacacugaaua

SEQ ID NO: 866821 - RNA, 19 nt, Homo sapiens
  misc_RNA (1)...(19): siRNA sense strand
ccauauuccucaugcaugu

SEQ ID NO: 866822 - RNA, 19 nt, Homo sapiens
  misc_RNA (1)...(19): siRNA sense strand
gguccuggcuccugucagu

SEQ ID NO: 866823 - RNA, 19 nt, Homo sapiens
  misc_RNA (1)...(19): siRNA sense strand
gaagagcugcaaccagugu

SEQ ID NO: 866824 - RNA, 19 nt, Homo sapiens
  misc_RNA (1)...(19): siRNA sense strand
agacccagcucucucuaga

SEQ ID NO: 866825 - RNA, 19 nt, Homo sapiens
  misc_RNA (1)...(19): siRNA sense strand
gauauaaggaaaguuguug

SEQ ID NO: 866826 - RNA, 19 nt, Homo sapiens
  misc_RNA (1)...(19): siRNA sense strand
gggcacugcugcucuacug

SEQ ID NO: 866827 - RNA, 19 nt, Homo sapiens
  misc_RNA (1)...(19): siRNA sense strand
uaucaucuacucugaaguu

SEQ ID NO: 866828 - RNA, 19 nt, Homo sapiens
  misc_RNA (1)...(19): siRNA sense strand
aaaugugguuuacucagaa

SEQ ID NO: 866829 - RNA, 19 nt, Homo sapiens
  misc_RNA (1)...(19): siRNA sense strand
acacccaggcccauuauuu

SEQ ID NO: 866830 - RNA, 19 nt, Homo sapiens
  misc_RNA (1)...(19): siRNA sense strand
ccaggcaucucaggaacaa

SEQ ID NO: 866831 - RNA, 19 nt, Homo sapiens
  misc_RNA (1)...(19): siRNA sense strand
gaggaugucacccuaggaa

SEQ ID NO: 866832 - RNA, 19 nt, Homo sapiens
  misc_RNA (1)...(19): siRNA sense strand
ggauauaaggaaaguuguu

SEQ ID NO: 866833 - RNA, 19 nt, Homo sapiens
  misc_RNA (1)...(19): siRNA sense strand
cagugacccugaccuguga

SEQ ID NO: 866834 - RNA, 19 nt, Homo sapiens
  misc_RNA (1)...(19): siRNA sense strand
gagaaaaugugguuuacuc

SEQ ID NO: 866835 - RNA, 19 nt, Homo sapiens
  misc_RNA (1)...(19): siRNA sense strand
ggaugucacccuaggaaau

SEQ ID NO: 866836 - RNA, 19 nt, Homo sapiens
  misc_RNA (1)...(19): siRNA sense strand
acaauauccuugagguuca

SEQ ID NO: 866837 - RNA, 19 nt, Homo sapiens
  misc_RNA (1)...(19): siRNA sense strand
gagccacugugacacuuca

SEQ ID NO: 866838 - RNA, 19 nt, Homo sapiens
  misc_RNA (1)...(19): siRNA sense strand
ggcaaaggcggaaguaaca

SEQ ID NO: 866839 - RNA, 19 nt, Homo sapiens
  misc_RNA (1)...(19): siRNA sense strand
gggcugaccgcgaacagaa

SEQ ID NO: 866840 - RNA, 19 nt, Homo sapiens
  misc_RNA (1)...(19): siRNA sense strand
cacaaauccuauaccaguu

SEQ ID NO: 866841 - RNA, 19 nt, Homo sapiens
  misc_RNA (1)...(19): siRNA sense strand
ugaaggagccacugugaca

SEQ ID NO: 866842 - RNA, 19 nt, Homo sapiens
  misc_RNA (1)...(19): siRNA sense strand
gaccacagucuuccaagga

SEQ ID NO: 866843 - RNA, 19 nt, Homo sapiens
  misc_RNA (1)...(19): siRNA sense strand
gagcguaggucggccaacu

SEQ ID NO: 866844 - RNA, 19 nt, Homo sapiens
  misc_RNA (1)...(19): siRNA sense strand
ggacacccaggcccauuau

SEQ ID NO: 866845 - RNA, 19 nt, Homo sapiens
  misc_RNA (1)...(19): siRNA sense strand
gcuucucacugacuacaga

SEQ ID NO: 866846 - RNA, 19 nt, Homo sapiens
  misc_RNA (1)...(19): siRNA sense strand
cagcuucucucugacugaa

SEQ ID NO: 866847 - RNA, 19 nt, Homo sapiens
  misc_RNA (1)...(19): siRNA sense strand
acaaauccuauaccaguuu

SEQ ID NO: 866848 - RNA, 19 nt, Homo sapiens
  misc_RNA (1)...(19): siRNA sense strand
gaggagaaaaugugguuua

SEQ ID NO: 866849 - RNA, 19 nt, Homo sapiens
  misc_RNA (1)...(19): siRNA sense strand
caagagcccaccuaucaca

SEQ ID NO: 866850 - RNA, 19 nt, Homo sapiens
  misc_RNA (1)...(19): siRNA sense strand
caaccucucucugacuaca

SEQ ID NO: 866851 - RNA, 19 nt, Homo sapiens
  misc_RNA (1)...(19): siRNA sense strand
aaagaacugacuuccauau

SEQ ID NO: 866852 - RNA, 19 nt, Homo sapiens
  misc_RNA (1)...(19): siRNA sense strand
guaaagauucaggguucua

SEQ ID NO: 866853 - RNA, 19 nt, Homo sapiens
  misc_RNA (1)...(19): siRNA sense strand
caaguccaagagccauuua

SEQ ID NO: 866854 - RNA, 19 nt, Homo sapiens
  misc_RNA (1)...(19): siRNA sense strand
caguagcccugugcacuug

SEQ ID NO: 866855 - RNA, 19 nt, Homo sapiens
  misc_RNA (1)...(19): siRNA sense strand
uguuauaguuccaguaucu

SEQ ID NO: 866856 - RNA, 19 nt, Homo sapiens
  misc_RNA (1)...(19): siRNA sense strand
cugcugaggcccugacuuu

SEQ ID NO: 866857 - RNA, 19 nt, Homo sapiens
  misc_RNA (1)...(19): siRNA sense strand
acaagucaguccgcuguga

SEQ ID NO: 866858 - RNA, 19 nt, Homo sapiens
  misc_RNA (1)...(19): siRNA sense strand
ucaggguucuacuggugua

SEQ ID NO: 866859 - RNA, 19 nt, Homo sapiens
  misc_RNA (1)...(19): siRNA sense strand
ccugcaagcuccacuuucu

SEQ ID NO: 866860 - RNA, 19 nt, Homo sapiens
  misc_RNA (1)...(19): siRNA sense strand
gagaaaccccagacaauau

SEQ ID NO: 866861 - RNA, 19 nt, Homo sapiens
  misc_RNA (1)...(19): siRNA sense strand
gugagauggugacacugaa

SEQ ID NO: 866862 - RNA, 19 nt, Homo sapiens
  misc_RNA (1)...(19): siRNA sense strand
ccagagagguuccccacaa

SEQ ID NO: 866863 - RNA, 19 nt, Homo sapiens
  misc_RNA (1)...(19): siRNA sense strand
gugaaacccaggaagauuc

SEQ ID NO: 866864 - RNA, 19 nt, Homo sapiens
  misc_RNA (1)...(19): siRNA sense strand
gcccugugcacuuggauuu

SEQ ID NO: 866865 - RNA, 19 nt, Homo sapiens
  misc_RNA (1)...(19): siRNA sense strand
cauguggaguaaagauuca

SEQ ID NO: 866866 - RNA, 19 nt, Homo sapiens
  misc_RNA (1)...(19): siRNA sense strand
ccucagcuccucacagaug

SEQ ID NO: 866867 - RNA, 19 nt, Homo sapiens
  misc_RNA (1)...(19): siRNA sense strand
ccuaucaucuacucugaag

SEQ ID NO: 866868 - RNA, 19 nt, Homo sapiens
  misc_RNA (1)...(19): siRNA sense strand
caugugaggccaacaaugg

SEQ ID NO: 866869 - RNA, 19 nt, Homo sapiens
  misc_RNA (1)...(19): siRNA sense strand
agaauucagggaacuacua

SEQ ID NO: 866870 - RNA, 19 nt, Homo sapiens
  misc_RNA (1)...(19): siRNA sense strand
gaagauucucugcgcacuu

SEQ ID NO: 866871 - RNA, 19 nt, Homo sapiens
  misc_RNA (1)...(19): siRNA sense strand
cgggaaagaaauacuaaga

SEQ ID NO: 866872 - RNA, 19 nt, Homo sapiens
  misc_RNA (1)...(19): siRNA sense strand
gggcaaaggcggaaguaac

SEQ ID NO: 866873 - RNA, 19 nt, Homo sapiens
  misc_RNA (1)...(19): siRNA sense strand
acugcuggcucucgagaaa

SEQ ID NO: 866874 - RNA, 19 nt, Homo sapiens
  misc_RNA (1)...(19): siRNA sense strand
gauggugacacugaaaguu

SEQ ID NO: 866875 - RNA, 19 nt, Homo sapiens
  misc_RNA (1)...(19): siRNA sense strand
gagcauccaucagcuucuc

SEQ ID NO: 866876 - RNA, 19 nt, Homo sapiens
  misc_RNA (1)...(19): siRNA sense strand
ggaaccaaggugacacuuc

SEQ ID NO: 866877 - RNA, 19 nt, Homo sapiens
  misc_RNA (1)...(19): siRNA sense strand
gguguaaggcagcaacaau

SEQ ID NO: 866878 - RNA, 19 nt, Homo sapiens
  misc_RNA (1)...(19): siRNA sense strand
ucaaggacaauggugcaua

SEQ ID NO: 866879 - RNA, 19 nt, Homo sapiens
  misc_RNA (1)...(19): siRNA sense strand
cggaaguaacacugaauaa

SEQ ID NO: 866880 - RNA, 19 nt, Homo sapiens
  misc_RNA (1)...(19): siRNA sense strand
aagcuccacuuucuguguu

SEQ ID NO: 866881 - RNA, 19 nt, Homo sapiens
  misc_RNA (1)...(19): siRNA sense strand
guacugguuuuaucaugaa

SEQ ID NO: 866882 - RNA, 19 nt, Homo sapiens
  misc_RNA (1)...(19): siRNA sense strand
ucuggaaacuacucaugug

SEQ ID NO: 866883 - RNA, 19 nt, Homo sapiens
  misc_RNA (1)...(19): siRNA sense strand
cugaaaaggcucugaauuu

SEQ ID NO: 866884 - RNA, 19 nt, Homo sapiens
  misc_RNA (1)...(19): siRNA sense strand
uguacuggauauaaggaaa

SEQ ID NO: 866885 - RNA, 19 nt, Homo sapiens
  misc_RNA (1)...(19): siRNA sense strand
gggaaagaaauacuaagag

SEQ ID NO: 866886 - RNA, 19 nt, Homo sapiens
  misc_RNA (1)...(19): siRNA sense strand
cagcacagugacacaauau

SEQ ID NO: 866887 - RNA, 19 nt, Homo sapiens
  misc_RNA (1)...(19): siRNA sense strand
caaauccuauaccaguuuu

SEQ ID NO: 866888 - RNA, 19 nt, Homo sapiens
  misc_RNA (1)...(19): siRNA sense strand
aaaaugugguuuacucaga

SEQ ID NO: 866889 - RNA, 19 nt, Homo sapiens
  misc_RNA (1)...(19): siRNA sense strand
uuccucagcuccucacaga

SEQ ID NO: 866890 - RNA, 19 nt, Homo sapiens
  misc_RNA (1)...(19): siRNA sense strand
aacaugcaguggccucuga

SEQ ID NO: 866891 - RNA, 19 nt, Homo sapiens
  misc_RNA (1)...(19): siRNA sense strand
gaaauugacugcugugaaa

SEQ ID NO: 866892 - RNA, 19 nt, Homo sapiens
  misc_RNA (1)...(19): siRNA sense strand
ggacacuucuagaggauaa

SEQ ID NO: 866893 - RNA, 19 nt, Homo sapiens
  misc_RNA (1)...(19): siRNA sense strand
caacagagauggccuuguc

SEQ ID NO: 866894 - RNA, 19 nt, Homo sapiens
  misc_RNA (1)...(19): siRNA sense strand
ggauaaggaugucucaguu

SEQ ID NO: 866895 - RNA, 19 nt, Homo sapiens
  misc_RNA (1)...(19): siRNA sense strand
uaacucagcuggaaagauc

SEQ ID NO: 866896 - RNA, 19 nt, Homo sapiens
  misc_RNA (1)...(19): siRNA sense strand
gcaauggauuucaguucua

SEQ ID NO: 866897 - RNA, 19 nt, Homo sapiens
  misc_RNA (1)...(19): siRNA sense strand
gaagaaggaaagagaaauu

SEQ ID NO: 866898 - RNA, 19 nt, Homo sapiens
  misc_RNA (1)...(19): siRNA sense strand
gaaauauacuuggaaugga

SEQ ID NO: 866899 - RNA, 19 nt, Homo sapiens
  misc_RNA (1)...(19): siRNA sense strand
ccacaagcaaguucaaaua

SEQ ID NO: 866900 - RNA, 19 nt, Homo sapiens
  misc_RNA (1)...(19): siRNA sense strand
caagcaaguucaaauaaca

SEQ ID NO: 866901 - RNA, 19 nt, Homo sapiens
  misc_RNA (1)...(19): siRNA sense strand
caagaacuauuuccacauc

SEQ ID NO: 866902 - RNA, 19 nt, Homo sapiens
  misc_RNA (1)...(19): siRNA sense strand
gagauuugguauacucuga

SEQ ID NO: 866903 - RNA, 19 nt, Homo sapiens
  misc_RNA (1)...(19): siRNA sense strand
ggaaagaucagcucuaagg

SEQ ID NO: 866904 - RNA, 19 nt, Homo sapiens
  misc_RNA (1)...(19): siRNA sense strand
gagaagaagaggaagcuaa

SEQ ID NO: 866905 - RNA, 19 nt, Homo sapiens
  misc_RNA (1)...(19): siRNA sense strand
gcugaaagcuacagacucu

SEQ ID NO: 866906 - RNA, 19 nt, Homo sapiens
  misc_RNA (1)...(19): siRNA sense strand
gagaugagaaugauguauu

SEQ ID NO: 866907 - RNA, 19 nt, Homo sapiens
  misc_RNA (1)...(19): siRNA sense strand
gaucagcucuaaggaugaa

SEQ ID NO: 866908 - RNA, 19 nt, Homo sapiens
  misc_RNA (1)...(19): siRNA sense strand
gaagaagaggaagcuaaua

SEQ ID NO: 866909 - RNA, 19 nt, Homo sapiens
  misc_RNA (1)...(19): siRNA sense strand
ggagcucccugccaucaga

SEQ ID NO: 866910 - RNA, 19 nt, Homo sapiens
  misc_RNA (1)...(19): siRNA sense strand
gagcuucagucguuguaug

SEQ ID NO: 866911 - RNA, 19 nt, Homo sapiens
  misc_RNA (1)...(19): siRNA sense strand
ggauuucaguucuaugcaa

SEQ ID NO: 866912 - RNA, 19 nt, Homo sapiens
  misc_RNA (1)...(19): siRNA sense strand
gauauggagaugagaauga

SEQ ID NO: 866913 - RNA, 19 nt, Homo sapiens
  misc_RNA (1)...(19): siRNA sense strand
guuugaaggugacacauug

SEQ ID NO: 866914 - RNA, 19 nt, Homo sapiens
  misc_RNA (1)...(19): siRNA sense strand
acacauugguucugagaug

SEQ ID NO: 866915 - RNA, 19 nt, Homo sapiens
  misc_RNA (1)...(19): siRNA sense strand
agacacaacacccagauaa

SEQ ID NO: 866916 - RNA, 19 nt, Homo sapiens
  misc_RNA (1)...(19): siRNA sense strand
ccaaccgucuggagagaaa

SEQ ID NO: 866917 - RNA, 19 nt, Homo sapiens
  misc_RNA (1)...(19): siRNA sense strand
ccacuucacuucaacuucu

SEQ ID NO: 866918 - RNA, 19 nt, Homo sapiens
  misc_RNA (1)...(19): siRNA sense strand
ugacugcugugaaauauac

SEQ ID NO: 866919 - RNA, 19 nt, Homo sapiens
  misc_RNA (1)...(19): siRNA sense strand
aaagggagauuugguauac

SEQ ID NO: 866920 - RNA, 19 nt, Homo sapiens
  misc_RNA (1)...(19): siRNA sense strand
cuaaggaugaagaaaguua

SEQ ID NO: 866921 - RNA, 19 nt, Homo sapiens
  misc_RNA (1)...(19): siRNA sense strand
ggcaccauauucuguguuu

SEQ ID NO: 866922 - RNA, 19 nt, Homo sapiens
  misc_RNA (1)...(19): siRNA sense strand
cuggaaagaucagcucuaa

SEQ ID NO: 866923 - RNA, 19 nt, Homo sapiens
  misc_RNA (1)...(19): siRNA sense strand
cuacucagcugggagaaga

SEQ ID NO: 866924 - RNA, 19 nt, Homo sapiens
  misc_RNA (1)...(19): siRNA sense strand
gucaggaguugguuucuug

SEQ ID NO: 866925 - RNA, 19 nt, Homo sapiens
  misc_RNA (1)...(19): siRNA sense strand
ggugacacauugguucuga

SEQ ID NO: 866926 - RNA, 19 nt, Homo sapiens
  misc_RNA (1)...(19): siRNA sense strand
cacaagcaaguucaaauaa

SEQ ID NO: 866927 - RNA, 19 nt, Homo sapiens
  misc_RNA (1)...(19): siRNA sense strand
caauggauuucaguucuau

SEQ ID NO: 866928 - RNA, 19 nt, Homo sapiens
  misc_RNA (1)...(19): siRNA sense strand
gaagucaggaguugguuuc

SEQ ID NO: 866929 - RNA, 19 nt, Homo sapiens
  misc_RNA (1)...(19): siRNA sense strand
gggagaugcugguccuugu

SEQ ID NO: 866930 - RNA, 19 nt, Homo sapiens
  misc_RNA (1)...(19): siRNA sense strand
gcugugaaauauacuugga

SEQ ID NO: 866931 - RNA, 19 nt, Homo sapiens
  misc_RNA (1)...(19): siRNA sense strand
guacagcagacaacagcua

SEQ ID NO: 866932 - RNA, 19 nt, Homo sapiens
  misc_RNA (1)...(19): siRNA sense strand
gaaagaucagcucuaagga

SEQ ID NO: 866933 - RNA, 19 nt, Homo sapiens
  misc_RNA (1)...(19): siRNA sense strand
gauaaggaugucucaguug

SEQ ID NO: 866934 - RNA, 19 nt, Homo sapiens
  misc_RNA (1)...(19): siRNA sense strand
ggccuuugcuccagucugu

SEQ ID NO: 866935 - RNA, 19 nt, Homo sapiens
  misc_RNA (1)...(19): siRNA sense strand
cacagucccucgcuacaga

SEQ ID NO: 866936 - RNA, 19 nt, Homo sapiens
  misc_RNA (1)...(19): siRNA sense strand
ggaccacauucuucaaagg

SEQ ID NO: 866937 - RNA, 19 nt, Homo sapiens
  misc_RNA (1)...(19): siRNA sense strand
ggaagucaggaguugguuu

SEQ ID NO: 866938 - RNA, 19 nt, Homo sapiens
  misc_RNA (1)...(19): siRNA sense strand
cagaagaaggaaagagaaa

SEQ ID NO: 866939 - RNA, 19 nt, Homo sapiens
  misc_RNA (1)...(19): siRNA sense strand
gauuugguauacucugaga

SEQ ID NO: 866940 - RNA, 19 nt, Homo sapiens
  misc_RNA (1)...(19): siRNA sense strand
gucguuguauguugaugua

SEQ ID NO: 866941 - RNA, 19 nt, Homo sapiens
  misc_RNA (1)...(19): siRNA sense strand
guaaaccugagcugugaaa

SEQ ID NO: 866942 - RNA, 19 nt, Homo sapiens
  misc_RNA (1)...(19): siRNA sense strand
ugaaauauacuuggaaugg

SEQ ID NO: 866943 - RNA, 19 nt, Homo sapiens
  misc_RNA (1)...(19): siRNA sense strand
caccauauucuguguuuga

SEQ ID NO: 866944 - RNA, 19 nt, Homo sapiens
  misc_RNA (1)...(19): siRNA sense strand
auaaggaugucucaguugu

SEQ ID NO: 866945 - RNA, 19 nt, Homo sapiens
  misc_RNA (1)...(19): siRNA sense strand
aagcugggaucuucuuauc

SEQ ID NO: 866946 - RNA, 19 nt, Homo sapiens
  misc_RNA (1)...(19): siRNA sense strand
gcucuaaggaugaagaaag

SEQ ID NO: 866947 - RNA, 19 nt, Homo sapiens
  misc_RNA (1)...(19): siRNA sense strand
ucacuucaacuucuucaga

SEQ ID NO: 866948 - RNA, 19 nt, Homo sapiens
  misc_RNA (1)...(19): siRNA sense strand
gcgaggucauccugucaga

SEQ ID NO: 866949 - RNA, 19 nt, Homo sapiens
  misc_RNA (1)...(19): siRNA sense strand
gaccacauucuucaaagga

SEQ ID NO: 866950 - RNA, 19 nt, Homo sapiens
  misc_RNA (1)...(19): siRNA sense strand
cggaggaagucaggaguug

SEQ ID NO: 866951 - RNA, 19 nt, Homo sapiens
  misc_RNA (1)...(19): siRNA sense strand
gaaggaaagagaaauugac

SEQ ID NO: 866952 - RNA, 19 nt, Homo sapiens
  misc_RNA (1)...(19): siRNA sense strand
acaagcaaguucaaauaac

SEQ ID NO: 866953 - RNA, 19 nt, Homo sapiens
  misc_RNA (1)...(19): siRNA sense strand
gcugggagaagaagaggaa

SEQ ID NO: 866954 - RNA, 19 nt, Homo sapiens
  misc_RNA (1)...(19): siRNA sense strand
agguggagcuucagucguu

SEQ ID NO: 866955 - RNA, 19 nt, Homo sapiens
  misc_RNA (1)...(19): siRNA sense strand
caaguucaaauaacaaugg

SEQ ID NO: 866956 - RNA, 19 nt, Homo sapiens
  misc_RNA (1)...(19): siRNA sense strand
aauaaaagcugggaucuuc

SEQ ID NO: 866957 - RNA, 19 nt, Homo sapiens
  misc_RNA (1)...(19): siRNA sense strand
cuucagucguuguauguug

SEQ ID NO: 866958 - RNA, 19 nt, Homo sapiens
  misc_RNA (1)...(19): siRNA sense strand
gcacaggggauaccacauu

SEQ ID NO: 866959 - RNA, 19 nt, Homo sapiens
  misc_RNA (1)...(19): siRNA sense strand
uggcaauuaucgaugcauu

SEQ ID NO: 866960 - RNA, 19 nt, Homo sapiens
  misc_RNA (1)...(19): siRNA sense strand
agaaggaaagagaaauuga

SEQ ID NO: 866961 - RNA, 19 nt, Homo sapiens
  misc_RNA (1)...(19): siRNA sense strand
cuguaaaccugagcuguga

SEQ ID NO: 866962 - RNA, 19 nt, Homo sapiens
  misc_RNA (1)...(19): siRNA sense strand
ucgggaaucuggacuguac

SEQ ID NO: 866963 - RNA, 19 nt, Homo sapiens
  misc_RNA (1)...(19): siRNA sense strand
aauuaucgaugcauuggau

SEQ ID NO: 866964 - RNA, 19 nt, Homo sapiens
  misc_RNA (1)...(19): siRNA sense strand
cacagaagaaggaaagaga

SEQ ID NO: 866965 - RNA, 19 nt, Homo sapiens
  misc_RNA (1)...(19): siRNA sense strand
gcaaguucaaauaacaaug

SEQ ID NO: 866966 - RNA, 19 nt, Homo sapiens
  misc_RNA (1)...(19): siRNA sense strand
agaagaagaggaagcuaau

SEQ ID NO: 866967 - RNA, 19 nt, Homo sapiens
  misc_RNA (1)...(19): siRNA sense strand
ugaaagcuacagacucuca

SEQ ID NO: 866968 - RNA, 19 nt, Homo sapiens
  misc_RNA (1)...(19): siRNA sense strand
gcaccauauucuguguuug

SEQ ID NO: 866969 - RNA, 19 nt, Homo sapiens
  misc_RNA (1)...(19): siRNA sense strand
acucugagguaaagacaca

SEQ ID NO: 866970 - RNA, 19 nt, Homo sapiens
  misc_RNA (1)...(19): siRNA sense strand
gaagaggaagcuaauaccu

SEQ ID NO: 866971 - RNA, 19 nt, Homo sapiens
  misc_RNA (1)...(19): siRNA sense strand
caacagagaaaacaacaug

SEQ ID NO: 866972 - RNA, 19 nt, Homo sapiens
  misc_RNA (1)...(19): siRNA sense strand
uaacaauggcaauuaucga

SEQ ID NO: 866973 - RNA, 19 nt, Homo sapiens
  misc_RNA (1)...(19): siRNA sense strand
agaaauugacugcugugaa

SEQ ID NO: 866974 - RNA, 19 nt, Homo sapiens
  misc_RNA (1)...(19): siRNA sense strand
aauugacugcugugaaaua

SEQ ID NO: 866975 - RNA, 19 nt, Homo sapiens
  misc_RNA (1)...(19): siRNA sense strand
aaagaucagcucuaaggau

SEQ ID NO: 866976 - RNA, 19 nt, Homo sapiens
  misc_RNA (1)...(19): siRNA sense strand
gacucugacuugcaaugga

SEQ ID NO: 866977 - RNA, 19 nt, Homo sapiens
  misc_RNA (1)...(19): siRNA sense strand
ggagaugagaaugauguau

SEQ ID NO: 866978 - RNA, 19 nt, Homo sapiens
  misc_RNA (1)...(19): siRNA sense strand
caaaggagagagagugacu

SEQ ID NO: 866979 - RNA, 19 nt, Homo sapiens
  misc_RNA (1)...(19): siRNA sense strand
ugucuacucugagguaaag

SEQ ID NO: 866980 - RNA, 19 nt, Homo sapiens
  misc_RNA (1)...(19): siRNA sense strand
caggacacuucuagaggau

SEQ ID NO: 866981 - RNA, 19 nt, Homo sapiens
  misc_RNA (1)...(19): siRNA sense strand
gguaucaucggcacuacug

SEQ ID NO: 866982 - RNA, 19 nt, Homo sapiens
  misc_RNA (1)...(19): siRNA sense strand
gagaaauugacugcuguga

SEQ ID NO: 866983 - RNA, 19 nt, Homo sapiens
  misc_RNA (1)...(19): siRNA sense strand
ggaugucucaguugucuac

SEQ ID NO: 866984 - RNA, 19 nt, Homo sapiens
  misc_RNA (1)...(19): siRNA sense strand
cuucuuaucccacaagcaa

SEQ ID NO: 866985 - RNA, 19 nt, Homo sapiens
  misc_RNA (1)...(19): siRNA sense strand
ugacacauugguucugaga

SEQ ID NO: 866986 - RNA, 19 nt, Homo sapiens
  misc_RNA (1)...(19): siRNA sense strand
ugcaauggauuucaguucu

SEQ ID NO: 866987 - RNA, 19 nt, Homo sapiens
  misc_RNA (1)...(19): siRNA sense strand
aaacucaggauccuauugg

SEQ ID NO: 866988 - RNA, 19 nt, Homo sapiens
  misc_RNA (1)...(19): siRNA sense strand
gaggaagucaggaguuggu

SEQ ID NO: 866989 - RNA, 19 nt, Homo sapiens
  misc_RNA (1)...(19): siRNA sense strand
aagaagaggaagcuaauac

SEQ ID NO: 866990 - RNA, 19 nt, Homo sapiens
  misc_RNA (1)...(19): siRNA sense strand
ggagaagaagaggaagcua

SEQ ID NO: 866991 - RNA, 19 nt, Homo sapiens
  misc_RNA (1)...(19): siRNA sense strand
ggacaacuaugguaagaaa

SEQ ID NO: 866992 - RNA, 19 nt, Homo sapiens
  misc_RNA (1)...(19): siRNA sense strand
gaaggaaagugcagccauu

SEQ ID NO: 866993 - RNA, 19 nt, Homo sapiens
  misc_RNA (1)...(19): siRNA sense strand
gcaccuaccugcagaugaa

SEQ ID NO: 866994 - RNA, 19 nt, Homo sapiens
  misc_RNA (1)...(19): siRNA sense strand
gagaagaacaggccaagua

SEQ ID NO: 866995 - RNA, 19 nt, Homo sapiens
  misc_RNA (1)...(19): siRNA sense strand
ggacagcgcguucuuuaaa

SEQ ID NO: 866996 - RNA, 19 nt, Homo sapiens
  misc_RNA (1)...(19): siRNA sense strand
ccagcacacuugucuaaua

SEQ ID NO: 866997 - RNA, 19 nt, Homo sapiens
  misc_RNA (1)...(19): siRNA sense strand
caaccugucucgagaagaa

SEQ ID NO: 866998 - RNA, 19 nt, Homo sapiens
  misc_RNA (1)...(19): siRNA sense strand
cagcacacuugucuaauaa

SEQ ID NO: 866999 - RNA, 19 nt, Homo sapiens
  misc_RNA (1)...(19): siRNA sense strand
uaauaaaguuccugucguu

SEQ ID NO: 867000 - RNA, 19 nt, Homo sapiens
  misc_RNA (1)...(19): siRNA sense strand
caccaagucugcccacuaa

SEQ ID NO: 867001 - RNA, 19 nt, Homo sapiens
  misc_RNA (1)...(19): siRNA sense strand
gcacacuugucuaauaaag

SEQ ID NO: 867002 - RNA, 19 nt, Homo sapiens
  misc_RNA (1)...(19): siRNA sense strand
caggacagcgcguucuuua

SEQ ID NO: 867003 - RNA, 19 nt, Homo sapiens
  misc_RNA (1)...(19): siRNA sense strand
cuacagcaaugaccacuuc

SEQ ID NO: 867004 - RNA, 19 nt, Homo sapiens
  misc_RNA (1)...(19): siRNA sense strand
gaagccauguguucaguac

SEQ ID NO: 867005 - RNA, 19 nt, Homo sapiens
  misc_RNA (1)...(19): siRNA sense strand
ugaagaagccucugaaugc

SEQ ID NO: 867006 - RNA, 19 nt, Homo sapiens
  misc_RNA (1)...(19): siRNA sense strand
gcaagaagccauguguuca

SEQ ID NO: 867007 - RNA, 19 nt, Homo sapiens
  misc_RNA (1)...(19): siRNA sense strand
ccagagaucgauccaaaga

SEQ ID NO: 867008 - RNA, 19 nt, Homo sapiens
  misc_RNA (1)...(19): siRNA sense strand
agagaucgauccaaagaca

SEQ ID NO: 867009 - RNA, 19 nt, Homo sapiens
  misc_RNA (1)...(19): siRNA sense strand
aagaacaggccaaguacua

SEQ ID NO: 867010 - RNA, 19 nt, Homo sapiens
  misc_RNA (1)...(19): siRNA sense strand
gugaagaagccucugaaug

SEQ ID NO: 867011 - RNA, 19 nt, Homo sapiens
  misc_RNA (1)...(19): siRNA sense strand
gcacaaccugucucgagaa

SEQ ID NO: 867012 - RNA, 19 nt, Homo sapiens
  misc_RNA (1)...(19): siRNA sense strand
ggaaagugcagccauuaac

SEQ ID NO: 867013 - RNA, 19 nt, Homo sapiens
  misc_RNA (1)...(19): siRNA sense strand
gugcagccauuaaccagau

SEQ ID NO: 867014 - RNA, 19 nt, Homo sapiens
  misc_RNA (1)...(19): siRNA sense strand
ccagauccuuggaagaaag

SEQ ID NO: 867015 - RNA, 19 nt, Homo sapiens
  misc_RNA (1)...(19): siRNA sense strand
ccagcuggcucuccacucu

SEQ ID NO: 867016 - RNA, 19 nt, Homo sapiens
  misc_RNA (1)...(19): siRNA sense strand
gacagcgcguucuuuaaag

SEQ ID NO: 867017 - RNA, 19 nt, Homo sapiens
  misc_RNA (1)...(19): siRNA sense strand
gaagaaaguggcacaaccu

SEQ ID NO: 867018 - RNA, 19 nt, Homo sapiens
  misc_RNA (1)...(19): siRNA sense strand
uaaaguuccugucguucag

SEQ ID NO: 867019 - RNA, 19 nt, Homo sapiens
  misc_RNA (1)...(19): siRNA sense strand
gagcaagaagccauguguu

SEQ ID NO: 867020 - RNA, 19 nt, Homo sapiens
  misc_RNA (1)...(19): siRNA sense strand
aagaagaggaagagagaaa

SEQ ID NO: 867021 - RNA, 19 nt, Homo sapiens
  misc_RNA (1)...(19): siRNA sense strand
gacacgaggucaccaucuc

SEQ ID NO: 867022 - RNA, 19 nt, Homo sapiens
  misc_RNA (1)...(19): siRNA sense strand
gagugcacccugaaggaaa

SEQ ID NO: 867023 - RNA, 19 nt, Homo sapiens
  misc_RNA (1)...(19): siRNA sense strand
cagcaaggccagcccaugu

SEQ ID NO: 867024 - RNA, 19 nt, Homo sapiens
  misc_RNA (1)...(19): siRNA sense strand
cgggacaacuaugguaaga

SEQ ID NO: 867025 - RNA, 19 nt, Homo sapiens
  misc_RNA (1)...(19): siRNA sense strand
ucgguucucuccucacaug

SEQ ID NO: 867026 - RNA, 19 nt, Homo sapiens
  misc_RNA (1)...(19): siRNA sense strand
ucaccaagucugcccacua

SEQ ID NO: 867027 - RNA, 19 nt, Homo sapiens
  misc_RNA (1)...(19): siRNA sense strand
aaggaaagugcagccauua

SEQ ID NO: 867028 - RNA, 19 nt, Homo sapiens
  misc_RNA (1)...(19): siRNA sense strand
aaccagauccuuggaagaa

SEQ ID NO: 867029 - RNA, 19 nt, Homo sapiens
  misc_RNA (1)...(19): siRNA sense strand
guucagcacccgcaucaca

SEQ ID NO: 867030 - RNA, 19 nt, Homo sapiens
  misc_RNA (1)...(19): siRNA sense strand
gccaugaacgccucgaugu

SEQ ID NO: 867031 - RNA, 19 nt, Homo sapiens
  misc_RNA (1)...(19): siRNA sense strand
ccucaucaccuacagcaau

SEQ ID NO: 867032 - RNA, 19 nt, Homo sapiens
  misc_RNA (1)...(19): siRNA sense strand
aaaagaagccccacgugaa

SEQ ID NO: 867033 - RNA, 19 nt, Homo sapiens
  misc_RNA (1)...(19): siRNA sense strand
ccgccuuccugucggcuaa

SEQ ID NO: 867034 - RNA, 19 nt, Homo sapiens
  misc_RNA (1)...(19): siRNA sense strand
gaagaacaggccaaguacu

SEQ ID NO: 867035 - RNA, 19 nt, Homo sapiens
  misc_RNA (1)...(19): siRNA sense strand
gaaagugcagccauuaacc

SEQ ID NO: 867036 - RNA, 19 nt, Homo sapiens
  misc_RNA (1)...(19): siRNA sense strand
ccgggacacuuuccagaag

SEQ ID NO: 867037 - RNA, 19 nt, Homo sapiens
  misc_RNA (1)...(19): siRNA sense strand
gaaauggccccuccucgau

SEQ ID NO: 867038 - RNA, 19 nt, Homo sapiens
  misc_RNA (1)...(19): siRNA sense strand
aaaaggaggaggaaaagaa

SEQ ID NO: 867039 - RNA, 19 nt, Homo sapiens
  misc_RNA (1)...(19): siRNA sense strand
gcaaggccagcccauguac

SEQ ID NO: 867040 - RNA, 19 nt, Homo sapiens
  misc_RNA (1)...(19): siRNA sense strand
ggacacgaggucaccaucu

SEQ ID NO: 867041 - RNA, 19 nt, Homo sapiens
  misc_RNA (1)...(19): siRNA sense strand
ccccagagaucgauccaaa

SEQ ID NO: 867042 - RNA, 19 nt, Homo sapiens
  misc_RNA (1)...(19): siRNA sense strand
caagaagccauguguucag

SEQ ID NO: 867043 - RNA, 19 nt, Homo sapiens
  misc_RNA (1)...(19): siRNA sense strand
uaaccagauccuuggaaga

SEQ ID NO: 867044 - RNA, 19 nt, Homo sapiens
  misc_RNA (1)...(19): siRNA sense strand
cuccagcacacuugucuaa

SEQ ID NO: 867045 - RNA, 19 nt, Homo sapiens
  misc_RNA (1)...(19): siRNA sense strand
uguuguauaugaaggagau

SEQ ID NO: 867046 - RNA, 19 nt, Homo sapiens
  misc_RNA (1)...(19): siRNA sense strand
ucacaugcauccgcugacu

SEQ ID NO: 867047 - RNA, 19 nt, Homo sapiens
  misc_RNA (1)...(19): siRNA sense strand
cacaaccugucucgagaag

SEQ ID NO: 867048 - RNA, 19 nt, Homo sapiens
  misc_RNA (1)...(19): siRNA sense strand
ugacuccccucaucaccua

SEQ ID NO: 867049 - RNA, 19 nt, Homo sapiens
  misc_RNA (1)...(19): siRNA sense strand
caggagccgagcagcgaua

SEQ ID NO: 867050 - RNA, 19 nt, Homo sapiens
  misc_RNA (1)...(19): siRNA sense strand
aagaagccauguguucagu

SEQ ID NO: 867051 - RNA, 19 nt, Homo sapiens
  misc_RNA (1)...(19): siRNA sense strand
aaaagaagaggaagagaga

SEQ ID NO: 867052 - RNA, 19 nt, Homo sapiens
  misc_RNA (1)...(19): siRNA sense strand
aggaaagugcagccauuaa

SEQ ID NO: 867053 - RNA, 19 nt, Homo sapiens
  misc_RNA (1)...(19): siRNA sense strand
gcaaaagccuagugcauug

SEQ ID NO: 867054 - RNA, 19 nt, Homo sapiens
  misc_RNA (1)...(19): siRNA sense strand
gcgcuuggccguuuuguua

SEQ ID NO: 867055 - RNA, 19 nt, Homo sapiens
  misc_RNA (1)...(19): siRNA sense strand
uggccuggcuuccugguaa

SEQ ID NO: 867056 - RNA, 19 nt, Homo sapiens
  misc_RNA (1)...(19): siRNA sense strand
ggagagacucagcagacaa

SEQ ID NO: 867057 - RNA, 19 nt, Homo sapiens
  misc_RNA (1)...(19): siRNA sense strand
acucugcgcuuggccguuu

SEQ ID NO: 867058 - RNA, 19 nt, Homo sapiens
  misc_RNA (1)...(19): siRNA sense strand
gagagacucagcagacaag

SEQ ID NO: 867059 - RNA, 19 nt, Homo sapiens
  misc_RNA (1)...(19): siRNA sense strand
ccagagccuuugccacagu

SEQ ID NO: 867060 - RNA, 19 nt, Homo sapiens
  misc_RNA (1)...(19): siRNA sense strand
caaccucccugaaaaucuu

SEQ ID NO: 867061 - RNA, 19 nt, Homo sapiens
  misc_RNA (1)...(19): siRNA sense strand
ccaccucauccgucuguuu

SEQ ID NO: 867062 - RNA, 19 nt, Homo sapiens
  misc_RNA (1)...(19): siRNA sense strand
guggguggguugguuuaug

SEQ ID NO: 867063 - RNA, 19 nt, Homo sapiens
  misc_RNA (1)...(19): siRNA sense strand
caccucauccgucuguuug

SEQ ID NO: 867064 - RNA, 19 nt, Homo sapiens
  misc_RNA (1)...(19): siRNA sense strand
gaugugcaaccucccugaa

SEQ ID NO: 867065 - RNA, 19 nt, Homo sapiens
  misc_RNA (1)...(19): siRNA sense strand
guuuaugccuaucaaugca

SEQ ID NO: 867066 - RNA, 19 nt, Homo sapiens
  misc_RNA (1)...(19): siRNA sense strand
uugcagagccucaucuaca

SEQ ID NO: 867067 - RNA, 19 nt, Homo sapiens
  misc_RNA (1)...(19): siRNA sense strand
uggguugguuuaugccuau

SEQ ID NO: 867068 - RNA, 19 nt, Homo sapiens
  misc_RNA (1)...(19): siRNA sense strand
guugguuuaugccuaucaa

SEQ ID NO: 867069 - RNA, 19 nt, Homo sapiens
  misc_RNA (1)...(19): siRNA sense strand
cggagagacucagcagaca

SEQ ID NO: 867070 - RNA, 19 nt, Homo sapiens
  misc_RNA (1)...(19): siRNA sense strand
ccuagugcauugggagaug

SEQ ID NO: 867071 - RNA, 19 nt, Homo sapiens
  misc_RNA (1)...(19): siRNA sense strand
aagcugcccugcccuuguc

SEQ ID NO: 867072 - RNA, 19 nt, Homo sapiens
  misc_RNA (1)...(19): siRNA sense strand
ggaagcgcauccaauacca

SEQ ID NO: 867073 - RNA, 19 nt, Homo sapiens
  misc_RNA (1)...(19): siRNA sense strand
gcgcauccaauaccagcua

SEQ ID NO: 867074 - RNA, 19 nt, Homo sapiens
  misc_RNA (1)...(19): siRNA sense strand
ggacaucucccaggacaac

SEQ ID NO: 867075 - RNA, 19 nt, Homo sapiens
  misc_RNA (1)...(19): siRNA sense strand
aaaacacgcugcaggaguu

SEQ ID NO: 867076 - RNA, 19 nt, Homo sapiens
  misc_RNA (1)...(19): siRNA sense strand
cguggaggcuguggaacaa

SEQ ID NO: 867077 - RNA, 19 nt, Homo sapiens
  misc_RNA (1)...(19): siRNA sense strand
augggaagcgcauccaaua

SEQ ID NO: 867078 - RNA, 19 nt, Homo sapiens
  misc_RNA (1)...(19): siRNA sense strand
acuucgaccuucucaacua

SEQ ID NO: 867079 - RNA, 19 nt, Homo sapiens
  misc_RNA (1)...(19): siRNA sense strand
ccgacaagcccgaggagaa

SEQ ID NO: 867080 - RNA, 19 nt, Homo sapiens
  misc_RNA (1)...(19): siRNA sense strand
gcuccuacaugggccacuu

SEQ ID NO: 867081 - RNA, 19 nt, Homo sapiens
  misc_RNA (1)...(19): siRNA sense strand
ccacuucgaccuucucaac

SEQ ID NO: 867082 - RNA, 19 nt, Homo sapiens
  misc_RNA (1)...(19): siRNA sense strand
ucucaacuacuucgccauu

SEQ ID NO: 867083 - RNA, 19 nt, Homo sapiens
  misc_RNA (1)...(19): siRNA sense strand
ucaacuacuucgccauugc

SEQ ID NO: 867084 - RNA, 19 nt, Homo sapiens
  misc_RNA (1)...(19): siRNA sense strand
aaagaugcuucagccuugu

SEQ ID NO: 867085 - RNA, 19 nt, Homo sapiens
  misc_RNA (1)...(19): siRNA sense strand
gaccgcuacaccauccaua

SEQ ID NO: 867086 - RNA, 19 nt, Homo sapiens
  misc_RNA (1)...(19): siRNA sense strand
gaagaaacaccaucaggaa

SEQ ID NO: 867087 - RNA, 19 nt, Homo sapiens
  misc_RNA (1)...(19): siRNA sense strand
ggaccuaucaggaggguua

SEQ ID NO: 867088 - RNA, 19 nt, Homo sapiens
  misc_RNA (1)...(19): siRNA sense strand
gaaacaccaucaggaagaa

SEQ ID NO: 867089 - RNA, 19 nt, Homo sapiens
  misc_RNA (1)...(19): siRNA sense strand
gaagaaacacaagaagaaa

SEQ ID NO: 867090 - RNA, 19 nt, Homo sapiens
  misc_RNA (1)...(19): siRNA sense strand
ucaagaaggagaucaauga

SEQ ID NO: 867091 - RNA, 19 nt, Homo sapiens
  misc_RNA (1)...(19): siRNA sense strand
acaagaagcacaagaagaa

SEQ ID NO: 867092 - RNA, 19 nt, Homo sapiens
  misc_RNA (1)...(19): siRNA sense strand
gagaagcccuggaguugag

SEQ ID NO: 867093 - RNA, 19 nt, Homo sapiens
  misc_RNA (1)...(19): siRNA sense strand
cagaggagaugcugcugaa

SEQ ID NO: 867094 - RNA, 19 nt, Homo sapiens
  misc_RNA (1)...(19): siRNA sense strand
ggagcuggaugacaaugga

SEQ ID NO: 867095 - RNA, 19 nt, Homo sapiens
  misc_RNA (1)...(19): siRNA sense strand
agaagaaacacaagaagaa

SEQ ID NO: 867096 - RNA, 19 nt, Homo sapiens
  misc_RNA (1)...(19): siRNA sense strand
ccaagaguguuccuaccuu

SEQ ID NO: 867097 - RNA, 19 nt, Homo sapiens
  misc_RNA (1)...(19): siRNA sense strand
gggagaagcccuggaguug

SEQ ID NO: 867098 - RNA, 19 nt, Homo sapiens
  misc_RNA (1)...(19): siRNA sense strand
gugccuggcuggaugaaga

SEQ ID NO: 867099 - RNA, 19 nt, Homo sapiens
  misc_RNA (1)...(19): siRNA sense strand
gggcagaagagcacaagaa

SEQ ID NO: 867100 - RNA, 19 nt, Homo sapiens
  misc_RNA (1)...(19): siRNA sense strand
gccauggagugcacaagaa

SEQ ID NO: 867101 - RNA, 19 nt, Homo sapiens
  misc_RNA (1)...(19): siRNA sense strand
ggagaagcccuggaguuga

SEQ ID NO: 867102 - RNA, 19 nt, Homo sapiens
  misc_RNA (1)...(19): siRNA sense strand
cagaagagcacaagaacca

SEQ ID NO: 867103 - RNA, 19 nt, Homo sapiens
  misc_RNA (1)...(19): siRNA sense strand
acaagaagaaacacaagaa

SEQ ID NO: 867104 - RNA, 19 nt, Homo sapiens
  misc_RNA (1)...(19): siRNA sense strand
agaaacaccaucaggaaga

SEQ ID NO: 867105 - RNA, 19 nt, Homo sapiens
  misc_RNA (1)...(19): siRNA sense strand
gaugaagacaguaaucucu

SEQ ID NO: 867106 - RNA, 19 nt, Homo sapiens
  misc_RNA (1)...(19): siRNA sense strand
caauggagaccucaagaag

SEQ ID NO: 867107 - RNA, 19 nt, Homo sapiens
  misc_RNA (1)...(19): siRNA sense strand
auggagaccucaagaagga

SEQ ID NO: 867108 - RNA, 19 nt, Homo sapiens
  misc_RNA (1)...(19): siRNA sense strand
gcacaagaagaaacacaag

SEQ ID NO: 867109 - RNA, 19 nt, Homo sapiens
  misc_RNA (1)...(19): siRNA sense strand
gagcacaagaaccagacua

SEQ ID NO: 867110 - RNA, 19 nt, Homo sapiens
  misc_RNA (1)...(19): siRNA sense strand
ugaagaggaaccuauggaa

SEQ ID NO: 867111 - RNA, 19 nt, Homo sapiens
  misc_RNA (1)...(19): siRNA sense strand
caagaagcacaagaagaaa

SEQ ID NO: 867112 - RNA, 19 nt, Homo sapiens
  misc_RNA (1)...(19): siRNA sense strand
agaggaaccuauggaagga

SEQ ID NO: 867113 - RNA, 19 nt, Homo sapiens
  misc_RNA (1)...(19): siRNA sense strand
ugaagacaguaaucucucu

SEQ ID NO: 867114 - RNA, 19 nt, Homo sapiens
  misc_RNA (1)...(19): siRNA sense strand
caagaagaaacacaagaag

SEQ ID NO: 867115 - RNA, 19 nt, Homo sapiens
  misc_RNA (1)...(19): siRNA sense strand
gcacaagaaccagacuauc

SEQ ID NO: 867116 - RNA, 19 nt, Homo sapiens
  misc_RNA (1)...(19): siRNA sense strand
ucaaugagcggcugcuuac

SEQ ID NO: 867117 - RNA, 19 nt, Homo sapiens
  misc_RNA (1)...(19): siRNA sense strand
gacaauggagaccucaaga

SEQ ID NO: 867118 - RNA, 19 nt, Homo sapiens
  misc_RNA (1)...(19): siRNA sense strand
aagaagaaacacaagaaga

SEQ ID NO: 867119 - RNA, 19 nt, Homo sapiens
  misc_RNA (1)...(19): siRNA sense strand
ugccaagccucagcucaaa

SEQ ID NO: 867120 - RNA, 19 nt, Homo sapiens
  misc_RNA (1)...(19): siRNA sense strand
agaaacacaagaagaaaca

SEQ ID NO: 867121 - RNA, 19 nt, Homo sapiens
  misc_RNA (1)...(19): siRNA sense strand
uaaugaagaggaaccuaug

SEQ ID NO: 867122 - RNA, 19 nt, Homo sapiens
  misc_RNA (1)...(19): siRNA sense strand
cacaagaagcacaagaaga

SEQ ID NO: 867123 - RNA, 19 nt, Homo sapiens
  misc_RNA (1)...(19): siRNA sense strand
acaagaagaaacaccauca

SEQ ID NO: 867124 - RNA, 19 nt, Homo sapiens
  misc_RNA (1)...(19): siRNA sense strand
gauaaugaagaggaaccua

SEQ ID NO: 867125 - RNA, 19 nt, Homo sapiens
  misc_RNA (1)...(19): siRNA sense strand
ggccauggagugcacaaga

SEQ ID NO: 867126 - RNA, 19 nt, Homo sapiens
  misc_RNA (1)...(19): siRNA sense strand
ccauggagugcacaagaaa

SEQ ID NO: 867127 - RNA, 19 nt, Homo sapiens
  misc_RNA (1)...(19): siRNA sense strand
aaacacaagaagcacaaga

SEQ ID NO: 867128 - RNA, 19 nt, Homo sapiens
  misc_RNA (1)...(19): siRNA sense strand
gguuguggauaaugaagag

SEQ ID NO: 867129 - RNA, 19 nt, Homo sapiens
  misc_RNA (1)...(19): siRNA sense strand
acaagaaccagacuaucga

SEQ ID NO: 867130 - RNA, 19 nt, Homo sapiens
  misc_RNA (1)...(19): siRNA sense strand
ggaugaagacaguaaucuc

SEQ ID NO: 867131 - RNA, 19 nt, Homo sapiens
  misc_RNA (1)...(19): siRNA sense strand
acaauggagaccucaagaa

SEQ ID NO: 867132 - RNA, 19 nt, Homo sapiens
  misc_RNA (1)...(19): siRNA sense strand
cacaagaaccagacuaucg

SEQ ID NO: 867133 - RNA, 19 nt, Homo sapiens
  misc_RNA (1)...(19): siRNA sense strand
cacaagaagaaacacaaga

SEQ ID NO: 867134 - RNA, 19 nt, Homo sapiens
  misc_RNA (1)...(19): siRNA sense strand
caagaaggagaucaaugag

SEQ ID NO: 867135 - RNA, 19 nt, Homo sapiens
  misc_RNA (1)...(19): siRNA sense strand
agccucagcucaaacucaa

SEQ ID NO: 867136 - RNA, 19 nt, Homo sapiens
  misc_RNA (1)...(19): siRNA sense strand
cgggagaagcccuggaguu

SEQ ID NO: 867137 - RNA, 19 nt, Homo sapiens
  misc_RNA (1)...(19): siRNA sense strand
auaaugaagaggaaccuau

SEQ ID NO: 867138 - RNA, 19 nt, Homo sapiens
  misc_RNA (1)...(19): siRNA sense strand
gaccacauguuuggaauua

SEQ ID NO: 867139 - RNA, 19 nt, Homo sapiens
  misc_RNA (1)...(19): siRNA sense strand
gaacgcagaucaccuacau

SEQ ID NO: 867140 - RNA, 19 nt, Homo sapiens
  misc_RNA (1)...(19): siRNA sense strand
gcauguggcuauccuguga

SEQ ID NO: 867141 - RNA, 19 nt, Homo sapiens
  misc_RNA (1)...(19): siRNA sense strand
ucacucagcuucuccacaa

SEQ ID NO: 867142 - RNA, 19 nt, Homo sapiens
  misc_RNA (1)...(19): siRNA sense strand
cccaggaggugguacaaua

SEQ ID NO: 867143 - RNA, 19 nt, Homo sapiens
  misc_RNA (1)...(19): siRNA sense strand
ccacauguuuggaauuaug

SEQ ID NO: 867144 - RNA, 19 nt, Homo sapiens
  misc_RNA (1)...(19): siRNA sense strand
ugaggaaacuguggaagaa

SEQ ID NO: 867145 - RNA, 19 nt, Homo sapiens
  misc_RNA (1)...(19): siRNA sense strand
gaguucaagugcaagcaua

SEQ ID NO: 867146 - RNA, 19 nt, Homo sapiens
  misc_RNA (1)...(19): siRNA sense strand
ggauggagauaccaacaca

SEQ ID NO: 867147 - RNA, 19 nt, Homo sapiens
  misc_RNA (1)...(19): siRNA sense strand
caacuuggguccagaagac

SEQ ID NO: 867148 - RNA, 19 nt, Homo sapiens
  misc_RNA (1)...(19): siRNA sense strand
ggauggugcuggaguucaa

SEQ ID NO: 867149 - RNA, 19 nt, Homo sapiens
  misc_RNA (1)...(19): siRNA sense strand
cuaacagacuugcuacuca

SEQ ID NO: 867150 - RNA, 19 nt, Homo sapiens
  misc_RNA (1)...(19): siRNA sense strand
gacuggagaccacauguuu

SEQ ID NO: 867151 - RNA, 19 nt, Homo sapiens
  misc_RNA (1)...(19): siRNA sense strand
gagaggugccgaaguuuca

SEQ ID NO: 867152 - RNA, 19 nt, Homo sapiens
  misc_RNA (1)...(19): siRNA sense strand
ggagaccacauguuuggaa

SEQ ID NO: 867153 - RNA, 19 nt, Homo sapiens
  misc_RNA (1)...(19): siRNA sense strand
caugauguauucacaaguc

SEQ ID NO: 867154 - RNA, 19 nt, Homo sapiens
  misc_RNA (1)...(19): siRNA sense strand
gagaccacauguuuggaau

SEQ ID NO: 867155 - RNA, 19 nt, Homo sapiens
  misc_RNA (1)...(19): siRNA sense strand
cuacaucggacuucaauuc

SEQ ID NO: 867156 - RNA, 19 nt, Homo sapiens
  misc_RNA (1)...(19): siRNA sense strand
gcuacuaacagacuugcua

SEQ ID NO: 867157 - RNA, 19 nt, Homo sapiens
  misc_RNA (1)...(19): siRNA sense strand
caucggacuucaauucauc

SEQ ID NO: 867158 - RNA, 19 nt, Homo sapiens
  misc_RNA (1)...(19): siRNA sense strand
gcagccaagugcuuugaca

SEQ ID NO: 867159 - RNA, 19 nt, Homo sapiens
  misc_RNA (1)...(19): siRNA sense strand
ucaccaccuucaacacgua

SEQ ID NO: 867160 - RNA, 19 nt, Homo sapiens
  misc_RNA (1)...(19): siRNA sense strand
ggggagaggugccgaaguu

SEQ ID NO: 867161 - RNA, 19 nt, Homo sapiens
  misc_RNA (1)...(19): siRNA sense strand
ggagaggugccgaaguuuc

SEQ ID NO: 867162 - RNA, 19 nt, Homo sapiens
  misc_RNA (1)...(19): siRNA sense strand
gaagacuggagaccacaug

SEQ ID NO: 867163 - RNA, 19 nt, Homo sapiens
  misc_RNA (1)...(19): siRNA sense strand
gggaugaccgguucuccuu

SEQ ID NO: 867164 - RNA, 19 nt, Homo sapiens
  misc_RNA (1)...(19): siRNA sense strand
gugaggaaacuguggaaga

SEQ ID NO: 867165 - RNA, 19 nt, Homo sapiens
  misc_RNA (1)...(19): siRNA sense strand
ggagauaccaacacaucca

SEQ ID NO: 867166 - RNA, 19 nt, Homo sapiens
  misc_RNA (1)...(19): siRNA sense strand
gauguauucacaagucuuc

SEQ ID NO: 867167 - RNA, 19 nt, Homo sapiens
  misc_RNA (1)...(19): siRNA sense strand
ggaguggcauguggcuauc

SEQ ID NO: 867168 - RNA, 19 nt, Homo sapiens
  misc_RNA (1)...(19): siRNA sense strand
gagcgccuuugcugcuguu

SEQ ID NO: 867169 - RNA, 19 nt, Homo sapiens
  misc_RNA (1)...(19): siRNA sense strand
ucaccuacaucggacuuca

SEQ ID NO: 867170 - RNA, 19 nt, Homo sapiens
  misc_RNA (1)...(19): siRNA sense strand
caucagcuuccuccugcua

SEQ ID NO: 867171 - RNA, 19 nt, Homo sapiens
  misc_RNA (1)...(19): siRNA sense strand
uggcugggccuucuacaug

SEQ ID NO: 867172 - RNA, 19 nt, Homo sapiens
  misc_RNA (1)...(19): siRNA sense strand
ugggaacgcagaucaccua

SEQ ID NO: 867173 - RNA, 19 nt, Homo sapiens
  misc_RNA (1)...(19): siRNA sense strand
gaucaccuacaucggacuu

SEQ ID NO: 867174 - RNA, 19 nt, Homo sapiens
  misc_RNA (1)...(19): siRNA sense strand
gacuucaauucaucagcuu

SEQ ID NO: 867175 - RNA, 19 nt, Homo sapiens
  misc_RNA (1)...(19): siRNA sense strand
cgucggcugucaccaccuu

SEQ ID NO: 867176 - RNA, 19 nt, Homo sapiens
  misc_RNA (1)...(19): siRNA sense strand
uaucugccauccucagcau

SEQ ID NO: 867177 - RNA, 19 nt, Homo sapiens
  misc_RNA (1)...(19): siRNA sense strand
cggaguggcauguggcuau

SEQ ID NO: 867178 - RNA, 19 nt, Homo sapiens
  misc_RNA (1)...(19): siRNA sense strand
gaggugccgaaguuucauu

SEQ ID NO: 867179 - RNA, 19 nt, Homo sapiens
  misc_RNA (1)...(19): siRNA sense strand
ggccagcggacacuccuau

SEQ ID NO: 867180 - RNA, 19 nt, Homo sapiens
  misc_RNA (1)...(19): siRNA sense strand
gaccacauguuuggaauua

SEQ ID NO: 867181 - RNA, 19 nt, Homo sapiens
  misc_RNA (1)...(19): siRNA sense strand
gaacaagggauuucaaaga

SEQ ID NO: 867182 - RNA, 19 nt, Homo sapiens
  misc_RNA (1)...(19): siRNA sense strand
gcaguuaggucaucuguag

SEQ ID NO: 867183 - RNA, 19 nt, Homo sapiens
  misc_RNA (1)...(19): siRNA sense strand
gaacgcagaucaccuacau

SEQ ID NO: 867184 - RNA, 19 nt, Homo sapiens
  misc_RNA (1)...(19): siRNA sense strand
aguaagagcuucaaggaaa

SEQ ID NO: 867185 - RNA, 19 nt, Homo sapiens
  misc_RNA (1)...(19): siRNA sense strand
gcauguggcuauccuguga

SEQ ID NO: 867186 - RNA, 19 nt, Homo sapiens
  misc_RNA (1)...(19): siRNA sense strand
ucacucagcuucuccacaa

SEQ ID NO: 867187 - RNA, 19 nt, Homo sapiens
  misc_RNA (1)...(19): siRNA sense strand
cccaggaggugguacaaua

SEQ ID NO: 867188 - RNA, 19 nt, Homo sapiens
  misc_RNA (1)...(19): siRNA sense strand
ccacauguuuggaauuaug

SEQ ID NO: 867189 - RNA, 19 nt, Homo sapiens
  misc_RNA (1)...(19): siRNA sense strand
ugaggaaacuguggaagaa

SEQ ID NO: 867190 - RNA, 19 nt, Homo sapiens
  misc_RNA (1)...(19): siRNA sense strand
gaguucaagugcaagcaua

SEQ ID NO: 867191 - RNA, 19 nt, Homo sapiens
  misc_RNA (1)...(19): siRNA sense strand
ggauggagauaccaacaca

SEQ ID NO: 867192 - RNA, 19 nt, Homo sapiens
  misc_RNA (1)...(19): siRNA sense strand
caacuuggguccagaagac

SEQ ID NO: 867193 - RNA, 19 nt, Homo sapiens
  misc_RNA (1)...(19): siRNA sense strand
ggucaucuguagaggaaga

SEQ ID NO: 867194 - RNA, 19 nt, Homo sapiens
  misc_RNA (1)...(19): siRNA sense strand
ggauggugcuggaguucaa

SEQ ID NO: 867195 - RNA, 19 nt, Homo sapiens
  misc_RNA (1)...(19): siRNA sense strand
cuaacagacuugcuacuca

SEQ ID NO: 867196 - RNA, 19 nt, Homo sapiens
  misc_RNA (1)...(19): siRNA sense strand
uagaggaagagcaguguua

SEQ ID NO: 867197 - RNA, 19 nt, Homo sapiens
  misc_RNA (1)...(19): siRNA sense strand
gagcugaaagaagcaguua

SEQ ID NO: 867198 - RNA, 19 nt, Homo sapiens
  misc_RNA (1)...(19): siRNA sense strand
gacuggagaccacauguuu

SEQ ID NO: 867199 - RNA, 19 nt, Homo sapiens
  misc_RNA (1)...(19): siRNA sense strand
uaggucaucuguagaggaa

SEQ ID NO: 867200 - RNA, 19 nt, Homo sapiens
  misc_RNA (1)...(19): siRNA sense strand
gagaggugccgaaguuuca

SEQ ID NO: 867201 - RNA, 19 nt, Homo sapiens
  misc_RNA (1)...(19): siRNA sense strand
ggagaccacauguuuggaa

SEQ ID NO: 867202 - RNA, 19 nt, Homo sapiens
  misc_RNA (1)...(19): siRNA sense strand
caugauguauucacaaguc

SEQ ID NO: 867203 - RNA, 19 nt, Homo sapiens
  misc_RNA (1)...(19): siRNA sense strand
gagaccacauguuuggaau

SEQ ID NO: 867204 - RNA, 19 nt, Homo sapiens
  misc_RNA (1)...(19): siRNA sense strand
cuacaucggacuucaauuc

SEQ ID NO: 867205 - RNA, 19 nt, Homo sapiens
  misc_RNA (1)...(19): siRNA sense strand
gcuaccaccaguaucauaa

SEQ ID NO: 867206 - RNA, 19 nt, Homo sapiens
  misc_RNA (1)...(19): siRNA sense strand
cgaacugccuaccacauca

SEQ ID NO: 867207 - RNA, 19 nt, Homo sapiens
  misc_RNA (1)...(19): siRNA sense strand
gcuacuaacagacuugcua

SEQ ID NO: 867208 - RNA, 19 nt, Homo sapiens
  misc_RNA (1)...(19): siRNA sense strand
caucggacuucaauucauc

SEQ ID NO: 867209 - RNA, 19 nt, Homo sapiens
  misc_RNA (1)...(19): siRNA sense strand
gcagccaagugcuuugaca

SEQ ID NO: 867210 - RNA, 19 nt, Homo sapiens
  misc_RNA (1)...(19): siRNA sense strand
ucaccaccuucaacacgua

SEQ ID NO: 867211 - RNA, 19 nt, Homo sapiens
  misc_RNA (1)...(19): siRNA sense strand
ucaagugcaagcauaguaa

SEQ ID NO: 867212 - RNA, 19 nt, Homo sapiens
  misc_RNA (1)...(19): siRNA sense strand
gaccagcuaccaccaguau

SEQ ID NO: 867213 - RNA, 19 nt, Homo sapiens
  misc_RNA (1)...(19): siRNA sense strand
ggggagaggugccgaaguu

SEQ ID NO: 867214 - RNA, 19 nt, Homo sapiens
  misc_RNA (1)...(19): siRNA sense strand
ccacaucaccaucaguguu

SEQ ID NO: 867215 - RNA, 19 nt, Homo sapiens
  misc_RNA (1)...(19): siRNA sense strand
ggagaggugccgaaguuuc

SEQ ID NO: 867216 - RNA, 19 nt, Homo sapiens
  misc_RNA (1)...(19): siRNA sense strand
ggaacaagggauuucaaag

SEQ ID NO: 867217 - RNA, 19 nt, Homo sapiens
  misc_RNA (1)...(19): siRNA sense strand
aacaagggauuucaaagag

SEQ ID NO: 867218 - RNA, 19 nt, Homo sapiens
  misc_RNA (1)...(19): siRNA sense strand
gaagacuggagaccacaug

SEQ ID NO: 867219 - RNA, 19 nt, Homo sapiens
  misc_RNA (1)...(19): siRNA sense strand
cacaucaccaucaguguuu

SEQ ID NO: 867220 - RNA, 19 nt, Homo sapiens
  misc_RNA (1)...(19): siRNA sense strand
gggaugaccgguucuccuu

SEQ ID NO: 867221 - RNA, 19 nt, Homo sapiens
  misc_RNA (1)...(19): siRNA sense strand
guaagagcuucaaggaaaa

SEQ ID NO: 867222 - RNA, 19 nt, Homo sapiens
  misc_RNA (1)...(19): siRNA sense strand
gugaggaaacuguggaaga

SEQ ID NO: 867223 - RNA, 19 nt, Homo sapiens
  misc_RNA (1)...(19): siRNA sense strand
ccagcuaccaccaguauca

SEQ ID NO: 867224 - RNA, 19 nt, Homo sapiens
  misc_RNA (1)...(19): siRNA sense strand
ggagauaccaacacaucca

SEQ ID NO: 867225 - RNA, 19 nt, Homo sapiens
  misc_RNA (1)...(19): siRNA sense strand
gauguauucacaagucuuc

SEQ ID NO: 867226 - RNA, 19 nt, Homo sapiens
  misc_RNA (1)...(19): siRNA sense strand
ggaguggcauguggcuauc

SEQ ID NO: 867227 - RNA, 19 nt, Homo sapiens
  misc_RNA (1)...(19): siRNA sense strand
cggaacaagggauuucaaa

SEQ ID NO: 867228 - RNA, 19 nt, Homo sapiens
  misc_RNA (1)...(19): siRNA sense strand
gagcgccuuugcugcuguu

SEQ ID NO: 867229 - RNA, 19 nt, Homo sapiens
  misc_RNA (1)...(19): siRNA sense strand
ucaccuacaucggacuuca

SEQ ID NO: 867230 - RNA, 19 nt, Homo sapiens
  misc_RNA (1)...(19): siRNA sense strand
gcugaaagaagcaguuagg

SEQ ID NO: 867231 - RNA, 19 nt, Homo sapiens
  misc_RNA (1)...(19): siRNA sense strand
cugagggagucgacuucua

SEQ ID NO: 867232 - RNA, 19 nt, Homo sapiens
  misc_RNA (1)...(19): siRNA sense strand
caucagcuuccuccugcua

SEQ ID NO: 867233 - RNA, 19 nt, Homo sapiens
  misc_RNA (1)...(19): siRNA sense strand
uggcugggccuucuacaug

SEQ ID NO: 867234 - RNA, 19 nt, Homo sapiens
  misc_RNA (1)...(19): siRNA sense strand
ccaccaguaucauaaucag

SEQ ID NO: 867235 - RNA, 19 nt, Homo sapiens
  misc_RNA (1)...(19): siRNA sense strand
ggagcugaaagaagcaguu

SEQ ID NO: 867236 - RNA, 19 nt, Homo sapiens
  misc_RNA (1)...(19): siRNA sense strand
ugggaacgcagaucaccua

SEQ ID NO: 867237 - RNA, 19 nt, Homo sapiens
  misc_RNA (1)...(19): siRNA sense strand
gaucaccuacaucggacuu

SEQ ID NO: 867238 - RNA, 19 nt, Homo sapiens
  misc_RNA (1)...(19): siRNA sense strand
aagaagcaguuaggucauc

SEQ ID NO: 867239 - RNA, 19 nt, Homo sapiens
  misc_RNA (1)...(19): siRNA sense strand
ccaagauggagcucucgaa

SEQ ID NO: 867240 - RNA, 19 nt, Homo sapiens
  misc_RNA (1)...(19): siRNA sense strand
auaguaagagcuucaagga

SEQ ID NO: 867241 - RNA, 19 nt, Homo sapiens
  misc_RNA (1)...(19): siRNA sense strand
gacuucaauucaucagcuu

SEQ ID NO: 867242 - RNA, 19 nt, Homo sapiens
  misc_RNA (1)...(19): siRNA sense strand
uaucugccauccucagcau

SEQ ID NO: 867243 - RNA, 19 nt, Homo sapiens
  misc_RNA (1)...(19): siRNA sense strand
uaccaccaguaucauaauc

SEQ ID NO: 867244 - RNA, 19 nt, Homo sapiens
  misc_RNA (1)...(19): siRNA sense strand
cgucggcugucaccaccuu

SEQ ID NO: 867245 - RNA, 19 nt, Homo sapiens
  misc_RNA (1)...(19): siRNA sense strand
gaggugccgaaguuucauu

SEQ ID NO: 867246 - RNA, 19 nt, Homo sapiens
  misc_RNA (1)...(19): siRNA sense strand
cggaguggcauguggcuau

SEQ ID NO: 867247 - RNA, 19 nt, Homo sapiens
  misc_RNA (1)...(19): siRNA sense strand
ggccagcggacacuccuau

SEQ ID NO: 867248 - RNA, 19 nt, Homo sapiens
  misc_RNA (1)...(19): siRNA sense strand
gaaagaggacaaugccuua

SEQ ID NO: 867249 - RNA, 19 nt, Homo sapiens
  misc_RNA (1)...(19): siRNA sense strand
gggaagagauguggacuuu

SEQ ID NO: 867250 - RNA, 19 nt, Homo sapiens
  misc_RNA (1)...(19): siRNA sense strand
gacaaugccuuaugggaaa

SEQ ID NO: 867251 - RNA, 19 nt, Homo sapiens
  misc_RNA (1)...(19): siRNA sense strand
gcgaagagaugaaaauuuu

SEQ ID NO: 867252 - RNA, 19 nt, Homo sapiens
  misc_RNA (1)...(19): siRNA sense strand
gauaaggccuucuggaaag

SEQ ID NO: 867253 - RNA, 19 nt, Homo sapiens
  misc_RNA (1)...(19): siRNA sense strand
gaggcaagauccaugcuuu

SEQ ID NO: 867254 - RNA, 19 nt, Homo sapiens
  misc_RNA (1)...(19): siRNA sense strand
ggaaagagcccuccuugag

SEQ ID NO: 867255 - RNA, 19 nt, Homo sapiens
  misc_RNA (1)...(19): siRNA sense strand
gaagagauguggacuuucc

SEQ ID NO: 867256 - RNA, 19 nt, Homo sapiens
  misc_RNA (1)...(19): siRNA sense strand
ggauaaggccuucuggaaa

SEQ ID NO: 867257 - RNA, 19 nt, Homo sapiens
  misc_RNA (1)...(19): siRNA sense strand
agaagaaacuaaugcacaa

SEQ ID NO: 867258 - RNA, 19 nt, Homo sapiens
  misc_RNA (1)...(19): siRNA sense strand
ggaaagagaccggaaccuu

SEQ ID NO: 867259 - RNA, 19 nt, Homo sapiens
  misc_RNA (1)...(19): siRNA sense strand
agaaagcccugugggaaga

SEQ ID NO: 867260 - RNA, 19 nt, Homo sapiens
  misc_RNA (1)...(19): siRNA sense strand
gggaagaggagagaccuuu

SEQ ID NO: 867261 - RNA, 19 nt, Homo sapiens
  misc_RNA (1)...(19): siRNA sense strand
ggcauccucucccaguauu

SEQ ID NO: 867262 - RNA, 19 nt, Homo sapiens
  misc_RNA (1)...(19): siRNA sense strand
gaagaggagagaccuuucu

SEQ ID NO: 867263 - RNA, 19 nt, Homo sapiens
  misc_RNA (1)...(19): siRNA sense strand
gcggcauccucucccagua

SEQ ID NO: 867264 - RNA, 19 nt, Homo sapiens
  misc_RNA (1)...(19): siRNA sense strand
ggaagaggagagaccuuuc

SEQ ID NO: 867265 - RNA, 19 nt, Homo sapiens
  misc_RNA (1)...(19): siRNA sense strand
agaggacaaugccuuaugg

SEQ ID NO: 867266 - RNA, 19 nt, Homo sapiens
  misc_RNA (1)...(19): siRNA sense strand
gcugauaaggaagauguuu

SEQ ID NO: 867267 - RNA, 19 nt, Homo sapiens
  misc_RNA (1)...(19): siRNA sense strand
ccaguauucgccagaagaa

SEQ ID NO: 867268 - RNA, 19 nt, Homo sapiens
  misc_RNA (1)...(19): siRNA sense strand
ggauggggcuugccugcuu

SEQ ID NO: 867269 - RNA, 19 nt, Homo sapiens
  misc_RNA (1)...(19): siRNA sense strand
aggauaaggccuucuggaa

SEQ ID NO: 867270 - RNA, 19 nt, Homo sapiens
  misc_RNA (1)...(19): siRNA sense strand
aaagcccugugggaagaua

SEQ ID NO: 867271 - RNA, 19 nt, Homo sapiens
  misc_RNA (1)...(19): siRNA sense strand
aaagagaccggaaccuucu

SEQ ID NO: 867272 - RNA, 19 nt, Homo sapiens
  misc_RNA (1)...(19): siRNA sense strand
gaagaaacuaaugcacaag

SEQ ID NO: 867273 - RNA, 19 nt, Homo sapiens
  misc_RNA (1)...(19): siRNA sense strand
gcacaagcugcaggaggaa

SEQ ID NO: 867274 - RNA, 19 nt, Homo sapiens
  misc_RNA (1)...(19): siRNA sense strand
gggaggaagagaaaacuuu

SEQ ID NO: 867275 - RNA, 19 nt, Homo sapiens
  misc_RNA (1)...(19): siRNA sense strand
gaagauauaccaacaugaa

SEQ ID NO: 867276 - RNA, 19 nt, Homo sapiens
  misc_RNA (1)...(19): siRNA sense strand
gcucuggaauacuuucuua

SEQ ID NO: 867277 - RNA, 19 nt, Homo sapiens
  misc_RNA (1)...(19): siRNA sense strand
gagcaggguuucuucaguu

SEQ ID NO: 867278 - RNA, 19 nt, Homo sapiens
  misc_RNA (1)...(19): siRNA sense strand
aacacaagcucuaaacuuu

SEQ ID NO: 867279 - RNA, 19 nt, Homo sapiens
  misc_RNA (1)...(19): siRNA sense strand
ccgauuaggugucgauauu

SEQ ID NO: 867280 - RNA, 19 nt, Homo sapiens
  misc_RNA (1)...(19): siRNA sense strand
uuaggugacuguauuauga

SEQ ID NO: 867281 - RNA, 19 nt, Homo sapiens
  misc_RNA (1)...(19): siRNA sense strand
caacacaagcucuaaacuu

SEQ ID NO: 867282 - RNA, 19 nt, Homo sapiens
  misc_RNA (1)...(19): siRNA sense strand
guacagggcaucauugugu

SEQ ID NO: 867283 - RNA, 19 nt, Homo sapiens
  misc_RNA (1)...(19): siRNA sense strand
gaagacguaugaugaugca

SEQ ID NO: 867284 - RNA, 19 nt, Homo sapiens
  misc_RNA (1)...(19): siRNA sense strand
ggguuuaggugacuguauu

SEQ ID NO: 867285 - RNA, 19 nt, Homo sapiens
  misc_RNA (1)...(19): siRNA sense strand
gugaagauauaccaacaug

SEQ ID NO: 867286 - RNA, 19 nt, Homo sapiens
  misc_RNA (1)...(19): siRNA sense strand
guuagaagacguaugauga

SEQ ID NO: 867287 - RNA, 19 nt, Homo sapiens
  misc_RNA (1)...(19): siRNA sense strand
ugacacaguuaaggguuua

SEQ ID NO: 867288 - RNA, 19 nt, Homo sapiens
  misc_RNA (1)...(19): siRNA sense strand
gagcuuaugacacaguuaa

SEQ ID NO: 867289 - RNA, 19 nt, Homo sapiens
  misc_RNA (1)...(19): siRNA sense strand
cagauggaauugcugguuu

SEQ ID NO: 867290 - RNA, 19 nt, Homo sapiens
  misc_RNA (1)...(19): siRNA sense strand
ggacaaauacaagcagcua

SEQ ID NO: 867291 - RNA, 19 nt, Homo sapiens
  misc_RNA (1)...(19): siRNA sense strand
gaggcuaaacggcaauaua

SEQ ID NO: 867292 - RNA, 19 nt, Homo sapiens
  misc_RNA (1)...(19): siRNA sense strand
guuaaggguuuauuaccaa

SEQ ID NO: 867293 - RNA, 19 nt, Homo sapiens
  misc_RNA (1)...(19): siRNA sense strand
gcagaguggugaggcuaaa

SEQ ID NO: 867294 - RNA, 19 nt, Homo sapiens
  misc_RNA (1)...(19): siRNA sense strand
caacaugaaggaaucaguu

SEQ ID NO: 867295 - RNA, 19 nt, Homo sapiens
  misc_RNA (1)...(19): siRNA sense strand
aaacggcaauauaaaggaa

SEQ ID NO: 867296 - RNA, 19 nt, Homo sapiens
  misc_RNA (1)...(19): siRNA sense strand
gcaaauguuauucgguauu

SEQ ID NO: 867297 - RNA, 19 nt, Homo sapiens
  misc_RNA (1)...(19): siRNA sense strand
ugauauuggugguagguaa

SEQ ID NO: 867298 - RNA, 19 nt, Homo sapiens
  misc_RNA (1)...(19): siRNA sense strand
agauggaauugcugguuua

SEQ ID NO: 867299 - RNA, 19 nt, Homo sapiens
  misc_RNA (1)...(19): siRNA sense strand
uggaauugcugguuuauac

SEQ ID NO: 867300 - RNA, 19 nt, Homo sapiens
  misc_RNA (1)...(19): siRNA sense strand
ugucuggaguuaauaaaga

SEQ ID NO: 867301 - RNA, 19 nt, Homo sapiens
  misc_RNA (1)...(19): siRNA sense strand
uguaguauauccucuagau

SEQ ID NO: 867302 - RNA, 19 nt, Homo sapiens
  misc_RNA (1)...(19): siRNA sense strand
acaguuagaagacguauga

SEQ ID NO: 867303 - RNA, 19 nt, Homo sapiens
  misc_RNA (1)...(19): siRNA sense strand
guaccgagccucuuauuuu

SEQ ID NO: 867304 - RNA, 19 nt, Homo sapiens
  misc_RNA (1)...(19): siRNA sense strand
uacaugcucuggaauacuu

SEQ ID NO: 867305 - RNA, 19 nt, Homo sapiens
  misc_RNA (1)...(19): siRNA sense strand
aggcuaaacggcaauauaa

SEQ ID NO: 867306 - RNA, 19 nt, Homo sapiens
  misc_RNA (1)...(19): siRNA sense strand
gauuaggugucgauauugg

SEQ ID NO: 867307 - RNA, 19 nt, Homo sapiens
  misc_RNA (1)...(19): siRNA sense strand
cuauucaugucuggaguua

SEQ ID NO: 867308 - RNA, 19 nt, Homo sapiens
  misc_RNA (1)...(19): siRNA sense strand
agacugcuuugugaagaua

SEQ ID NO: 867309 - RNA, 19 nt, Homo sapiens
  misc_RNA (1)...(19): siRNA sense strand
gcuaaacggcaauauaaag

SEQ ID NO: 867310 - RNA, 19 nt, Homo sapiens
  misc_RNA (1)...(19): siRNA sense strand
gugacuacaugcucuggaa

SEQ ID NO: 867311 - RNA, 19 nt, Homo sapiens
  misc_RNA (1)...(19): siRNA sense strand
acaagcagcuauucauguc

SEQ ID NO: 867312 - RNA, 19 nt, Homo sapiens
  misc_RNA (1)...(19): siRNA sense strand
gacuacaugcucuggaaua

SEQ ID NO: 867313 - RNA, 19 nt, Homo sapiens
  misc_RNA (1)...(19): siRNA sense strand
gugcuuugguguugguauu

SEQ ID NO: 867314 - RNA, 19 nt, Homo sapiens
  misc_RNA (1)...(19): siRNA sense strand
gauauaccaacaugaagga

SEQ ID NO: 867315 - RNA, 19 nt, Homo sapiens
  misc_RNA (1)...(19): siRNA sense strand
uagaagacguaugaugaug

SEQ ID NO: 867316 - RNA, 19 nt, Homo sapiens
  misc_RNA (1)...(19): siRNA sense strand
auucaugucuggaguuaau

SEQ ID NO: 867317 - RNA, 19 nt, Homo sapiens
  misc_RNA (1)...(19): siRNA sense strand
cacaguuaaggguuuauua

SEQ ID NO: 867318 - RNA, 19 nt, Homo sapiens
  misc_RNA (1)...(19): siRNA sense strand
uuucauugcucaaguugug

SEQ ID NO: 867319 - RNA, 19 nt, Homo sapiens
  misc_RNA (1)...(19): siRNA sense strand
gguuuaggugacuguauua

SEQ ID NO: 867320 - RNA, 19 nt, Homo sapiens
  misc_RNA (1)...(19): siRNA sense strand
cgagcaggguuucuucagu

SEQ ID NO: 867321 - RNA, 19 nt, Homo sapiens
  misc_RNA (1)...(19): siRNA sense strand
cagaaaagcggcuguuuga

SEQ ID NO: 867322 - RNA, 19 nt, Homo sapiens
  misc_RNA (1)...(19): siRNA sense strand
ggcaaauguuauucgguau

SEQ ID NO: 867323 - RNA, 19 nt, Homo sapiens
  misc_RNA (1)...(19): siRNA sense strand
cacaagcucuaaacuuugc

SEQ ID NO: 867324 - RNA, 19 nt, Homo sapiens
  misc_RNA (1)...(19): siRNA sense strand
auaccaacaugaaggaauc

SEQ ID NO: 867325 - RNA, 19 nt, Homo sapiens
  misc_RNA (1)...(19): siRNA sense strand
gucuggaguuaauaaagaa

SEQ ID NO: 867326 - RNA, 19 nt, Homo sapiens
  misc_RNA (1)...(19): siRNA sense strand
gcagaaaagcggcuguuug

SEQ ID NO: 867327 - RNA, 19 nt, Homo sapiens
  misc_RNA (1)...(19): siRNA sense strand
gcuuugguguugguauuau

SEQ ID NO: 867328 - RNA, 19 nt, Homo sapiens
  misc_RNA (1)...(19): siRNA sense strand
uuagacugcuuugugaaga

SEQ ID NO: 867329 - RNA, 19 nt, Homo sapiens
  misc_RNA (1)...(19): siRNA sense strand
uaaacggcaauauaaagga

SEQ ID NO: 867330 - RNA, 19 nt, Homo sapiens
  misc_RNA (1)...(19): siRNA sense strand
acacaagcucuaaacuuug

SEQ ID NO: 867331 - RNA, 19 nt, Homo sapiens
  misc_RNA (1)...(19): siRNA sense strand
aggguuugguguuucagua

SEQ ID NO: 867332 - RNA, 19 nt, Homo sapiens
  misc_RNA (1)...(19): siRNA sense strand
ggcuaaacggcaauauaaa

SEQ ID NO: 867333 - RNA, 19 nt, Homo sapiens
  misc_RNA (1)...(19): siRNA sense strand
guaguauauccucuagauu

SEQ ID NO: 867334 - RNA, 19 nt, Homo sapiens
  misc_RNA (1)...(19): siRNA sense strand
gacaaauacaagcagcuau

SEQ ID NO: 867335 - RNA, 19 nt, Homo sapiens
  misc_RNA (1)...(19): siRNA sense strand
ugguguugguauuauauga

SEQ ID NO: 867336 - RNA, 19 nt, Homo sapiens
  misc_RNA (1)...(19): siRNA sense strand
gguuugguguuucaguaca

SEQ ID NO: 867337 - RNA, 19 nt, Homo sapiens
  misc_RNA (1)...(19): siRNA sense strand
ucaugucuggaguuaauaa

SEQ ID NO: 867338 - RNA, 19 nt, Homo sapiens
  misc_RNA (1)...(19): siRNA sense strand
agcaggguuucuucaguuu

SEQ ID NO: 867339 - RNA, 19 nt, Homo sapiens
  misc_RNA (1)...(19): siRNA sense strand
cuuugguguugguauuaua

SEQ ID NO: 867340 - RNA, 19 nt, Homo sapiens
  misc_RNA (1)...(19): siRNA sense strand
cguggcgccuucuccaaug

SEQ ID NO: 867341 - RNA, 19 nt, Homo sapiens
  misc_RNA (1)...(19): siRNA sense strand
uagacugcuuugugaagau

SEQ ID NO: 867342 - RNA, 19 nt, Homo sapiens
  misc_RNA (1)...(19): siRNA sense strand
ggagcuuaugacacaguua

SEQ ID NO: 867343 - RNA, 19 nt, Homo sapiens
  misc_RNA (1)...(19): siRNA sense strand
uacaagcagcuauucaugu

SEQ ID NO: 867344 - RNA, 19 nt, Homo sapiens
  misc_RNA (1)...(19): siRNA sense strand
cuaaacggcaauauaaagg

SEQ ID NO: 867345 - RNA, 19 nt, Homo sapiens
  misc_RNA (1)...(19): siRNA sense strand
ucaguacagggcaucauug

SEQ ID NO: 867346 - RNA, 19 nt, Homo sapiens
  misc_RNA (1)...(19): siRNA sense strand
gauggaauugcugguuuau

SEQ ID NO: 867347 - RNA, 19 nt, Homo sapiens
  misc_RNA (1)...(19): siRNA sense strand
gcgacaauucaaggguuua

SEQ ID NO: 867348 - RNA, 19 nt, Homo sapiens
  misc_RNA (1)...(19): siRNA sense strand
cggcagcuguguccaagac

SEQ ID NO: 867349 - RNA, 19 nt, Homo sapiens
  misc_RNA (1)...(19): siRNA sense strand
acugcuuugugaagauaua

SEQ ID NO: 867350 - RNA, 19 nt, Homo sapiens
  misc_RNA (1)...(19): siRNA sense strand
uuagaagacguaugaugau

SEQ ID NO: 867351 - RNA, 19 nt, Homo sapiens
  misc_RNA (1)...(19): siRNA sense strand
cuccauuucuugucuccuu

SEQ ID NO: 867352 - RNA, 19 nt, Homo sapiens
  misc_RNA (1)...(19): siRNA sense strand
gcuauucaugucuggaguu

SEQ ID NO: 867353 - RNA, 19 nt, Homo sapiens
  misc_RNA (1)...(19): siRNA sense strand
gaacagggacaguuaguua

SEQ ID NO: 867354 - RNA, 19 nt, Homo sapiens
  misc_RNA (1)...(19): siRNA sense strand
ggaagaagauacagauuau

SEQ ID NO: 867355 - RNA, 19 nt, Homo sapiens
  misc_RNA (1)...(19): siRNA sense strand
ggaaugaggcaguaucuua

SEQ ID NO: 867356 - RNA, 19 nt, Homo sapiens
  misc_RNA (1)...(19): siRNA sense strand
gaaggaaaguucacacaga

SEQ ID NO: 867357 - RNA, 19 nt, Homo sapiens
  misc_RNA (1)...(19): siRNA sense strand
gaggagggaucagcuaaua

SEQ ID NO: 867358 - RNA, 19 nt, Homo sapiens
  misc_RNA (1)...(19): siRNA sense strand
gaaacagcuuugucucuuu

SEQ ID NO: 867359 - RNA, 19 nt, Homo sapiens
  misc_RNA (1)...(19): siRNA sense strand
ggaaauguuugaagcgauu

SEQ ID NO: 867360 - RNA, 19 nt, Homo sapiens
  misc_RNA (1)...(19): siRNA sense strand
guacuuggauacaauauuc

SEQ ID NO: 867361 - RNA, 19 nt, Homo sapiens
  misc_RNA (1)...(19): siRNA sense strand
gaaaagcuguccaccauuu

SEQ ID NO: 867362 - RNA, 19 nt, Homo sapiens
  misc_RNA (1)...(19): siRNA sense strand
gggaucagcuaauauguau

SEQ ID NO: 867363 - RNA, 19 nt, Homo sapiens
  misc_RNA (1)...(19): siRNA sense strand
uagcuuugcugaagaauga

SEQ ID NO: 867364 - RNA, 19 nt, Homo sapiens
  misc_RNA (1)...(19): siRNA sense strand
uaaugaagcaugacguuua

SEQ ID NO: 867365 - RNA, 19 nt, Homo sapiens
  misc_RNA (1)...(19): siRNA sense strand
caacuugagccaaauaauu

SEQ ID NO: 867366 - RNA, 19 nt, Homo sapiens
  misc_RNA (1)...(19): siRNA sense strand
caagaaagccaucaccuau

SEQ ID NO: 867367 - RNA, 19 nt, Homo sapiens
  misc_RNA (1)...(19): siRNA sense strand
gaauauaccagguugcuau

SEQ ID NO: 867368 - RNA, 19 nt, Homo sapiens
  misc_RNA (1)...(19): siRNA sense strand
aaacaucccuguaaucucu

SEQ ID NO: 867369 - RNA, 19 nt, Homo sapiens
  misc_RNA (1)...(19): siRNA sense strand
ggacuagcuuugcugaaga

SEQ ID NO: 867370 - RNA, 19 nt, Homo sapiens
  misc_RNA (1)...(19): siRNA sense strand
aaauacaacuugagccaaa

SEQ ID NO: 867371 - RNA, 19 nt, Homo sapiens
  misc_RNA (1)...(19): siRNA sense strand
gagauggacuacagacaug

SEQ ID NO: 867372 - RNA, 19 nt, Homo sapiens
  misc_RNA (1)...(19): siRNA sense strand
gcagugguaccaugacaua

SEQ ID NO: 867373 - RNA, 19 nt, Homo sapiens
  misc_RNA (1)...(19): siRNA sense strand
gaagaaaccaagaaguuca

SEQ ID NO: 867374 - RNA, 19 nt, Homo sapiens
  misc_RNA (1)...(19): siRNA sense strand
ggcaguaucuuacagacuu

SEQ ID NO: 867375 - RNA, 19 nt, Homo sapiens
  misc_RNA (1)...(19): siRNA sense strand
gaaaugaugaaagccauaa

SEQ ID NO: 867376 - RNA, 19 nt, Homo sapiens
  misc_RNA (1)...(19): siRNA sense strand
agaaagccaucaccuauca

SEQ ID NO: 867377 - RNA, 19 nt, Homo sapiens
  misc_RNA (1)...(19): siRNA sense strand
gaaucagguuuaguucuuu

SEQ ID NO: 867378 - RNA, 19 nt, Homo sapiens
  misc_RNA (1)...(19): siRNA sense strand
guaaauagagcaaagaagu

SEQ ID NO: 867379 - RNA, 19 nt, Homo sapiens
  misc_RNA (1)...(19): siRNA sense strand
gcugaagaaugaaaugaug

SEQ ID NO: 867380 - RNA, 19 nt, Homo sapiens
  misc_RNA (1)...(19): siRNA sense strand
aaauucaccugguaacuga

SEQ ID NO: 867381 - RNA, 19 nt, Homo sapiens
  misc_RNA (1)...(19): siRNA sense strand
ggugguaacaguaagauuu

SEQ ID NO: 867382 - RNA, 19 nt, Homo sapiens
  misc_RNA (1)...(19): siRNA sense strand
gagcauuguuggaggcauu

SEQ ID NO: 867383 - RNA, 19 nt, Homo sapiens
  misc_RNA (1)...(19): siRNA sense strand
ggacaguuaguuaauaaga

SEQ ID NO: 867384 - RNA, 19 nt, Homo sapiens
  misc_RNA (1)...(19): siRNA sense strand
agaggaagcauuugacuuu

SEQ ID NO: 867385 - RNA, 19 nt, Homo sapiens
  misc_RNA (1)...(19): siRNA sense strand
uuaauaagaccaucgauga

SEQ ID NO: 867386 - RNA, 19 nt, Homo sapiens
  misc_RNA (1)...(19): siRNA sense strand
aaugaagcaugacguuuaa

SEQ ID NO: 867387 - RNA, 19 nt, Homo sapiens
  misc_RNA (1)...(19): siRNA sense strand
ugaaacagcuuugucucuu

SEQ ID NO: 867388 - RNA, 19 nt, Homo sapiens
  misc_RNA (1)...(19): siRNA sense strand
cagcuaauauguaugcaau

SEQ ID NO: 867389 - RNA, 19 nt, Homo sapiens
  misc_RNA (1)...(19): siRNA sense strand
ggagggaucagcuaauaug

SEQ ID NO: 867390 - RNA, 19 nt, Homo sapiens
  misc_RNA (1)...(19): siRNA sense strand
gagccuauuuucaagauua

SEQ ID NO: 867391 - RNA, 19 nt, Homo sapiens
  misc_RNA (1)...(19): siRNA sense strand
aagcaaugguuguuagaaa

SEQ ID NO: 867392 - RNA, 19 nt, Homo sapiens
  misc_RNA (1)...(19): siRNA sense strand
gaugaaagccauaaaauug

SEQ ID NO: 867393 - RNA, 19 nt, Homo sapiens
  misc_RNA (1)...(19): siRNA sense strand
gaccaucgaugagccuauu

SEQ ID NO: 867394 - RNA, 19 nt, Homo sapiens
  misc_RNA (1)...(19): siRNA sense strand
cagggacaguuaguuaaua

SEQ ID NO: 867395 - RNA, 19 nt, Homo sapiens
  misc_RNA (1)...(19): siRNA sense strand
gaagaggagggaucagcua

SEQ ID NO: 867396 - RNA, 19 nt, Homo sapiens
  misc_RNA (1)...(19): siRNA sense strand
uuacagacuugaaaccuau

SEQ ID NO: 867397 - RNA, 19 nt, Homo sapiens
  misc_RNA (1)...(19): siRNA sense strand
gaauugcagugcugguaau

SEQ ID NO: 867398 - RNA, 19 nt, Homo sapiens
  misc_RNA (1)...(19): siRNA sense strand
ggaagaaaccaagaaguuc

SEQ ID NO: 867399 - RNA, 19 nt, Homo sapiens
  misc_RNA (1)...(19): siRNA sense strand
ucaggugguucuuccagua

SEQ ID NO: 867400 - RNA, 19 nt, Homo sapiens
  misc_RNA (1)...(19): siRNA sense strand
gcauauaccagcaaaauuu

SEQ ID NO: 867401 - RNA, 19 nt, Homo sapiens
  misc_RNA (1)...(19): siRNA sense strand
ugaaaccuauggagcaaga

SEQ ID NO: 867402 - RNA, 19 nt, Homo sapiens
  misc_RNA (1)...(19): siRNA sense strand
gaaagguucccacauugau

SEQ ID NO: 867403 - RNA, 19 nt, Homo sapiens
  misc_RNA (1)...(19): siRNA sense strand
aacgaaagguucccacauu

SEQ ID NO: 867404 - RNA, 19 nt, Homo sapiens
  misc_RNA (1)...(19): siRNA sense strand
gcuaucaaacuugguguua

SEQ ID NO: 867405 - RNA, 19 nt, Homo sapiens
  misc_RNA (1)...(19): siRNA sense strand
ugaaggaaauaaugaagca

SEQ ID NO: 867406 - RNA, 19 nt, Homo sapiens
  misc_RNA (1)...(19): siRNA sense strand
agacauugaugacgagaau

SEQ ID NO: 867407 - RNA, 19 nt, Homo sapiens
  misc_RNA (1)...(19): siRNA sense strand
caaacaaagaccacagaaa

SEQ ID NO: 867408 - RNA, 19 nt, Homo sapiens
  misc_RNA (1)...(19): siRNA sense strand
uagcagagauggacuacag

SEQ ID NO: 867409 - RNA, 19 nt, Homo sapiens
  misc_RNA (1)...(19): siRNA sense strand
uggacuaccuccugaauuc

SEQ ID NO: 867410 - RNA, 19 nt, Homo sapiens
  misc_RNA (1)...(19): siRNA sense strand
gaugauucccugagacuug

SEQ ID NO: 867411 - RNA, 19 nt, Homo sapiens
  misc_RNA (1)...(19): siRNA sense strand
gaauguggugguaacagua

SEQ ID NO: 867412 - RNA, 19 nt, Homo sapiens
  misc_RNA (1)...(19): siRNA sense strand
caucaccuaucaagcaaug

SEQ ID NO: 867413 - RNA, 19 nt, Homo sapiens
  misc_RNA (1)...(19): siRNA sense strand
ccagguugcuauagacaga

SEQ ID NO: 867414 - RNA, 19 nt, Homo sapiens
  misc_RNA (1)...(19): siRNA sense strand
gagaauuauggaagcaaua

SEQ ID NO: 867415 - RNA, 19 nt, Homo sapiens
  misc_RNA (1)...(19): siRNA sense strand
cucaugaguuacugaauaa

SEQ ID NO: 867416 - RNA, 19 nt, Homo sapiens
  misc_RNA (1)...(19): siRNA sense strand
ccagaagacuuggaugauc

SEQ ID NO: 867417 - RNA, 19 nt, Homo sapiens
  misc_RNA (1)...(19): siRNA sense strand
aaacaaagaccacagaaaa

SEQ ID NO: 867418 - RNA, 19 nt, Homo sapiens
  misc_RNA (1)...(19): siRNA sense strand
uggaagaucaugacauuga

SEQ ID NO: 867419 - RNA, 19 nt, Homo sapiens
  misc_RNA (1)...(19): siRNA sense strand
agaaugaaaugaugaaagc

SEQ ID NO: 867420 - RNA, 19 nt, Homo sapiens
  misc_RNA (1)...(19): siRNA sense strand
gaacuuugucauuugguau

SEQ ID NO: 867421 - RNA, 19 nt, Homo sapiens
  misc_RNA (1)...(19): siRNA sense strand
cauaccaacuaauggaaga

SEQ ID NO: 867422 - RNA, 19 nt, Homo sapiens
  misc_RNA (1)...(19): siRNA sense strand
ugacauacuuagcagagau

SEQ ID NO: 867423 - RNA, 19 nt, Homo sapiens
  misc_RNA (1)...(19): siRNA sense strand
agggacaguuaguuaauaa

SEQ ID NO: 867424 - RNA, 19 nt, Homo sapiens
  misc_RNA (1)...(19): siRNA sense strand
gaaaccuuguggaaaccaa

SEQ ID NO: 867425 - RNA, 19 nt, Homo sapiens
  misc_RNA (1)...(19): siRNA sense strand
ggauuucauggcacuauaa

SEQ ID NO: 867426 - RNA, 19 nt, Homo sapiens
  misc_RNA (1)...(19): siRNA sense strand
cgaaagguucccacauuga

SEQ ID NO: 867427 - RNA, 19 nt, Homo sapiens
  misc_RNA (1)...(19): siRNA sense strand
guaccuacucugaaacuga

SEQ ID NO: 867428 - RNA, 19 nt, Homo sapiens
  misc_RNA (1)...(19): siRNA sense strand
acauguagguuuaaaguac

SEQ ID NO: 867429 - RNA, 19 nt, Homo sapiens
  misc_RNA (1)...(19): siRNA sense strand
ucacgcauauaccagcaaa

SEQ ID NO: 867430 - RNA, 19 nt, Homo sapiens
  misc_RNA (1)...(19): siRNA sense strand
ggagagaauuauggaagca

SEQ ID NO: 867431 - RNA, 19 nt, Homo sapiens
  misc_RNA (1)...(19): siRNA sense strand
cgaauguggugguaacagu

SEQ ID NO: 867432 - RNA, 19 nt, Homo sapiens
  misc_RNA (1)...(19): siRNA sense strand
uggaagaaaccaagaaguu

SEQ ID NO: 867433 - RNA, 19 nt, Homo sapiens
  misc_RNA (1)...(19): siRNA sense strand
gcaguaucuuacagacuug

SEQ ID NO: 867434 - RNA, 19 nt, Homo sapiens
  misc_RNA (1)...(19): siRNA sense strand
gacuagcuuugcugaagaa

SEQ ID NO: 867435 - RNA, 19 nt, Homo sapiens
  misc_RNA (1)...(19): siRNA sense strand
agaacuuugucauuuggua

SEQ ID NO: 867436 - RNA, 19 nt, Homo sapiens
  misc_RNA (1)...(19): siRNA sense strand
gagacuuggucagcucaaa

SEQ ID NO: 867437 - RNA, 19 nt, Homo sapiens
  misc_RNA (1)...(19): siRNA sense strand
ugaugaacagggacaguua

SEQ ID NO: 867438 - RNA, 19 nt, Homo sapiens
  misc_RNA (1)...(19): siRNA sense strand
acaagaaagccaucaccua

SEQ ID NO: 867439 - RNA, 19 nt, Homo sapiens
  misc_RNA (1)...(19): siRNA sense strand
uuugguaucugaagaggaa

SEQ ID NO: 867440 - RNA, 19 nt, Homo sapiens
  misc_RNA (1)...(19): siRNA sense strand
acgaaagguucccacauug

SEQ ID NO: 867441 - RNA, 19 nt, Homo sapiens
  misc_RNA (1)...(19): siRNA sense strand
uuaaugaucacguuggauu

SEQ ID NO: 867442 - RNA, 19 nt, Homo sapiens
  misc_RNA (1)...(19): siRNA sense strand
uaccuacucugaaacugaa

SEQ ID NO: 867443 - RNA, 19 nt, Homo sapiens
  misc_RNA (1)...(19): siRNA sense strand
gcagggugauuuggucugu

SEQ ID NO: 867444 - RNA, 19 nt, Homo sapiens
  misc_RNA (1)...(19): siRNA sense strand
ccagagggcuaguuuacac

SEQ ID NO: 867445 - RNA, 19 nt, Homo sapiens
  misc_RNA (1)...(19): siRNA sense strand
ccuguaaucucucauacca

SEQ ID NO: 867446 - RNA, 19 nt, Homo sapiens
  misc_RNA (1)...(19): siRNA sense strand
gaaugaggcaguaucuuac

SEQ ID NO: 867447 - RNA, 19 nt, Homo sapiens
  misc_RNA (1)...(19): siRNA sense strand
gggaagggaaggaaaguuc

SEQ ID NO: 867448 - RNA, 19 nt, Homo sapiens
  misc_RNA (1)...(19): siRNA sense strand
cuuacagacuugaaaccua

SEQ ID NO: 867449 - RNA, 19 nt, Homo sapiens
  misc_RNA (1)...(19): siRNA sense strand
aggaaauaaugaagcauga

SEQ ID NO: 867450 - RNA, 19 nt, Homo sapiens
  misc_RNA (1)...(19): siRNA sense strand
gaugcuucaugcuaugcua

SEQ ID NO: 867451 - RNA, 19 nt, Homo sapiens
  misc_RNA (1)...(19): siRNA sense strand
caaaaucuguccuuagaag

SEQ ID NO: 867452 - RNA, 19 nt, Homo sapiens
  misc_RNA (1)...(19): siRNA sense strand
gacauguagguuuaaagua

SEQ ID NO: 867453 - RNA, 19 nt, Homo sapiens
  misc_RNA (1)...(19): siRNA sense strand
gaacaaaccuccaacagaa

SEQ ID NO: 867454 - RNA, 19 nt, Homo sapiens
  misc_RNA (1)...(19): siRNA sense strand
gaauggaccucaccaagua

SEQ ID NO: 867455 - RNA, 19 nt, Homo sapiens
  misc_RNA (1)...(19): siRNA sense strand
gaacaagggugaucauuca

SEQ ID NO: 867456 - RNA, 19 nt, Homo sapiens
  misc_RNA (1)...(19): siRNA sense strand
gaaagaagaugaggugauu

SEQ ID NO: 867457 - RNA, 19 nt, Homo sapiens
  misc_RNA (1)...(19): siRNA sense strand
gagcagagcuacaguguug

SEQ ID NO: 867458 - RNA, 19 nt, Homo sapiens
  misc_RNA (1)...(19): siRNA sense strand
ggagacaucugcccacauu

SEQ ID NO: 867459 - RNA, 19 nt, Homo sapiens
  misc_RNA (1)...(19): siRNA sense strand
cagcaaagcuugacacaga

SEQ ID NO: 867460 - RNA, 19 nt, Homo sapiens
  misc_RNA (1)...(19): siRNA sense strand
ggaauccucucucaacaaa

SEQ ID NO: 867461 - RNA, 19 nt, Homo sapiens
  misc_RNA (1)...(19): siRNA sense strand
ggacaaagcucugcagaag

SEQ ID NO: 867462 - RNA, 19 nt, Homo sapiens
  misc_RNA (1)...(19): siRNA sense strand
acaagaagcugaagaagga

SEQ ID NO: 867463 - RNA, 19 nt, Homo sapiens
  misc_RNA (1)...(19): siRNA sense strand
gaaagagaauuccagaaag

SEQ ID NO: 867464 - RNA, 19 nt, Homo sapiens
  misc_RNA (1)...(19): siRNA sense strand
gaacagaagagaaacauca

SEQ ID NO: 867465 - RNA, 19 nt, Homo sapiens
  misc_RNA (1)...(19): siRNA sense strand
gaagcaagcacaggcauua

SEQ ID NO: 867466 - RNA, 19 nt, Homo sapiens
  misc_RNA (1)...(19): siRNA sense strand
ggauaugggucaaagaaug

SEQ ID NO: 867467 - RNA, 19 nt, Homo sapiens
  misc_RNA (1)...(19): siRNA sense strand
gacaagacguugaaagaga

SEQ ID NO: 867468 - RNA, 19 nt, Homo sapiens
  misc_RNA (1)...(19): siRNA sense strand
ucaagaaucugcacgaugu

SEQ ID NO: 867469 - RNA, 19 nt, Homo sapiens
  misc_RNA (1)...(19): siRNA sense strand
aagaggaaaucauugcuua

SEQ ID NO: 867470 - RNA, 19 nt, Homo sapiens
  misc_RNA (1)...(19): siRNA sense strand
gaagaacagucucgaagag

SEQ ID NO: 867471 - RNA, 19 nt, Homo sapiens
  misc_RNA (1)...(19): siRNA sense strand
gaaggucgccaaugagaaa

SEQ ID NO: 867472 - RNA, 19 nt, Homo sapiens
  misc_RNA (1)...(19): siRNA sense strand
caacaucgaguuacuagaa

SEQ ID NO: 867473 - RNA, 19 nt, Homo sapiens
  misc_RNA (1)...(19): siRNA sense strand
gagcuacaguguuguucua

SEQ ID NO: 867474 - RNA, 19 nt, Homo sapiens
  misc_RNA (1)...(19): siRNA sense strand
ccagaaaguuggaggaaga

SEQ ID NO: 867475 - RNA, 19 nt, Homo sapiens
  misc_RNA (1)...(19): siRNA sense strand
ugcaagagcuggagaagaa

SEQ ID NO: 867476 - RNA, 19 nt, Homo sapiens
  misc_RNA (1)...(19): siRNA sense strand
aauccucucucaacaaaua

SEQ ID NO: 867477 - RNA, 19 nt, Homo sapiens
  misc_RNA (1)...(19): siRNA sense strand
ccacagaacuugaaaugac

SEQ ID NO: 867478 - RNA, 19 nt, Homo sapiens
  misc_RNA (1)...(19): siRNA sense strand
ugaaagagaauuccagaaa

SEQ ID NO: 867479 - RNA, 19 nt, Homo sapiens
  misc_RNA (1)...(19): siRNA sense strand
ggaacaaaccuccaacaga

SEQ ID NO: 867480 - RNA, 19 nt, Homo sapiens
  misc_RNA (1)...(19): siRNA sense strand
caccaucacugcaaacuga

SEQ ID NO: 867481 - RNA, 19 nt, Homo sapiens
  misc_RNA (1)...(19): siRNA sense strand
acaaagagccugcagcaaa

SEQ ID NO: 867482 - RNA, 19 nt, Homo sapiens
  misc_RNA (1)...(19): siRNA sense strand
agaagccuaugaugcauua

SEQ ID NO: 867483 - RNA, 19 nt, Homo sapiens
  misc_RNA (1)...(19): siRNA sense strand
caaagaagccuaugaugca

SEQ ID NO: 867484 - RNA, 19 nt, Homo sapiens
  misc_RNA (1)...(19): siRNA sense strand
acaaagcucugcagaagga

SEQ ID NO: 867485 - RNA, 19 nt, Homo sapiens
  misc_RNA (1)...(19): siRNA sense strand
caacuggaauccucucuca

SEQ ID NO: 867486 - RNA, 19 nt, Homo sapiens
  misc_RNA (1)...(19): siRNA sense strand
guacagccacccacagaua

SEQ ID NO: 867487 - RNA, 19 nt, Homo sapiens
  misc_RNA (1)...(19): siRNA sense strand
gaauuuggguccaguaaac

SEQ ID NO: 867488 - RNA, 19 nt, Homo sapiens
  misc_RNA (1)...(19): siRNA sense strand
caaagagccugcagcaaag

SEQ ID NO: 867489 - RNA, 19 nt, Homo sapiens
  misc_RNA (1)...(19): siRNA sense strand
gcaaagagcaugagaagcu

SEQ ID NO: 867490 - RNA, 19 nt, Homo sapiens
  misc_RNA (1)...(19): siRNA sense strand
agaaggagcuggagaagca

SEQ ID NO: 867491 - RNA, 19 nt, Homo sapiens
  misc_RNA (1)...(19): siRNA sense strand
gaagugagcagccugaaca

SEQ ID NO: 867492 - RNA, 19 nt, Homo sapiens
  misc_RNA (1)...(19): siRNA sense strand
uggaggagcugucauuaga

SEQ ID NO: 867493 - RNA, 19 nt, Homo sapiens
  misc_RNA (1)...(19): siRNA sense strand
agagaaacaucaugaagga

SEQ ID NO: 867494 - RNA, 19 nt, Homo sapiens
  misc_RNA (1)...(19): siRNA sense strand
gaaaaugaaugacaugcuu

SEQ ID NO: 867495 - RNA, 19 nt, Homo sapiens
  misc_RNA (1)...(19): siRNA sense strand
agaaggagauagaagagaa

SEQ ID NO: 867496 - RNA, 19 nt, Homo sapiens
  misc_RNA (1)...(19): siRNA sense strand
gagagcaggugaacuacau

SEQ ID NO: 867497 - RNA, 19 nt, Homo sapiens
  misc_RNA (1)...(19): siRNA sense strand
ggagagagacagagaagug

SEQ ID NO: 867498 - RNA, 19 nt, Homo sapiens
  misc_RNA (1)...(19): siRNA sense strand
aaagagaauuccagaaagu

SEQ ID NO: 867499 - RNA, 19 nt, Homo sapiens
  misc_RNA (1)...(19): siRNA sense strand
gaagagaaacaucaugaag

SEQ ID NO: 867500 - RNA, 19 nt, Homo sapiens
  misc_RNA (1)...(19): siRNA sense strand
acaagaagcuagaggagau

SEQ ID NO: 867501 - RNA, 19 nt, Homo sapiens
  misc_RNA (1)...(19): siRNA sense strand
agggagaacuugaagcuuu

SEQ ID NO: 867502 - RNA, 19 nt, Homo sapiens
  misc_RNA (1)...(19): siRNA sense strand
aagaugagaugcugcaaga

SEQ ID NO: 867503 - RNA, 19 nt, Homo sapiens
  misc_RNA (1)...(19): siRNA sense strand
aagaugaggugauucucua

SEQ ID NO: 867504 - RNA, 19 nt, Homo sapiens
  misc_RNA (1)...(19): siRNA sense strand
uaaacagugucaucugaga

SEQ ID NO: 867505 - RNA, 19 nt, Homo sapiens
  misc_RNA (1)...(19): siRNA sense strand
gggagaacuugaagcuuug

SEQ ID NO: 867506 - RNA, 19 nt, Homo sapiens
  misc_RNA (1)...(19): siRNA sense strand
uuaaaccucuacagggaua

SEQ ID NO: 867507 - RNA, 19 nt, Homo sapiens
  misc_RNA (1)...(19): siRNA sense strand
cagaggaguugcagacuuc

SEQ ID NO: 867508 - RNA, 19 nt, Homo sapiens
  misc_RNA (1)...(19): siRNA sense strand
ggaagaccuugcaggacaa

SEQ ID NO: 867509 - RNA, 19 nt, Homo sapiens
  misc_RNA (1)...(19): siRNA sense strand
agacuaccaucaccaaaga

SEQ ID NO: 867510 - RNA, 19 nt, Homo sapiens
  misc_RNA (1)...(19): siRNA sense strand
caaaugcaaguuagaagaa

SEQ ID NO: 867511 - RNA, 19 nt, Homo sapiens
  misc_RNA (1)...(19): siRNA sense strand
ugaggaagcuugaaaauuc

SEQ ID NO: 867512 - RNA, 19 nt, Homo sapiens
  misc_RNA (1)...(19): siRNA sense strand
gcaagcagcccagugcaaa

SEQ ID NO: 867513 - RNA, 19 nt, Homo sapiens
  misc_RNA (1)...(19): siRNA sense strand
gcagacuucuuacuauucu

SEQ ID NO: 867514 - RNA, 19 nt, Homo sapiens
  misc_RNA (1)...(19): siRNA sense strand
uuacuagaaugccaaguga

SEQ ID NO: 867515 - RNA, 19 nt, Homo sapiens
  misc_RNA (1)...(19): siRNA sense strand
gaacagcagccacgacaag

SEQ ID NO: 867516 - RNA, 19 nt, Homo sapiens
  misc_RNA (1)...(19): siRNA sense strand
gagcaaagagcaugagaag

SEQ ID NO: 867517 - RNA, 19 nt, Homo sapiens
  misc_RNA (1)...(19): siRNA sense strand
acaagacguugaaagagaa

SEQ ID NO: 867518 - RNA, 19 nt, Homo sapiens
  misc_RNA (1)...(19): siRNA sense strand
gaugaaagccgagaacaca

SEQ ID NO: 867519 - RNA, 19 nt, Homo sapiens
  misc_RNA (1)...(19): siRNA sense strand
gaagaggaaaucauugcuu

SEQ ID NO: 867520 - RNA, 19 nt, Homo sapiens
  misc_RNA (1)...(19): siRNA sense strand
ucaaucacgugaccucaga

SEQ ID NO: 867521 - RNA, 19 nt, Homo sapiens
  misc_RNA (1)...(19): siRNA sense strand
ggagucagagguggaauuu

SEQ ID NO: 867522 - RNA, 19 nt, Homo sapiens
  misc_RNA (1)...(19): siRNA sense strand
cagaagagaaacaucauga

SEQ ID NO: 867523 - RNA, 19 nt, Homo sapiens
  misc_RNA (1)...(19): siRNA sense strand
ggacaaacgggagcaguug

SEQ ID NO: 867524 - RNA, 19 nt, Homo sapiens
  misc_RNA (1)...(19): siRNA sense strand
gaaagacaaguuccuccaa

SEQ ID NO: 867525 - RNA, 19 nt, Homo sapiens
  misc_RNA (1)...(19): siRNA sense strand
ucaagaacuucgaaauaag

SEQ ID NO: 867526 - RNA, 19 nt, Homo sapiens
  misc_RNA (1)...(19): siRNA sense strand
aaagcucaauacggaauua

SEQ ID NO: 867527 - RNA, 19 nt, Homo sapiens
  misc_RNA (1)...(19): siRNA sense strand
ugacacagacccaagagaa

SEQ ID NO: 867528 - RNA, 19 nt, Homo sapiens
  misc_RNA (1)...(19): siRNA sense strand
gaaaagaggcagcuucaga

SEQ ID NO: 867529 - RNA, 19 nt, Homo sapiens
  misc_RNA (1)...(19): siRNA sense strand
aaaggucucucaacaggau

SEQ ID NO: 867530 - RNA, 19 nt, Homo sapiens
  misc_RNA (1)...(19): siRNA sense strand
gaagagaagaagaugaaag

SEQ ID NO: 867531 - RNA, 19 nt, Homo sapiens
  misc_RNA (1)...(19): siRNA sense strand
uagaagagaagaagaugaa

SEQ ID NO: 867532 - RNA, 19 nt, Homo sapiens
  misc_RNA (1)...(19): siRNA sense strand
ugaagaaggagauagaaga

SEQ ID NO: 867533 - RNA, 19 nt, Homo sapiens
  misc_RNA (1)...(19): siRNA sense strand
auaaagagauagcccuuca

SEQ ID NO: 867534 - RNA, 19 nt, Homo sapiens
  misc_RNA (1)...(19): siRNA sense strand
caaagcuucuggaggacaa

SEQ ID NO: 867535 - RNA, 19 nt, Homo sapiens
  misc_RNA (1)...(19): siRNA sense strand
aguaaacagugucaucuga

SEQ ID NO: 867536 - RNA, 19 nt, Homo sapiens
  misc_RNA (1)...(19): siRNA sense strand
caagggugaucauucaaag

SEQ ID NO: 867537 - RNA, 19 nt, Homo sapiens
  misc_RNA (1)...(19): siRNA sense strand
ggaaugaucagauuaugac

SEQ ID NO: 867538 - RNA, 19 nt, Homo sapiens
  misc_RNA (1)...(19): siRNA sense strand
gcucaauacggaauuaaga

SEQ ID NO: 867539 - RNA, 19 nt, Homo sapiens
  misc_RNA (1)...(19): siRNA sense strand
gcuggaagaggaaaucauu

SEQ ID NO: 867540 - RNA, 19 nt, Homo sapiens
  misc_RNA (1)...(19): siRNA sense strand
gaagaaacugacacagguu

SEQ ID NO: 867541 - RNA, 19 nt, Homo sapiens
  misc_RNA (1)...(19): siRNA sense strand
acaaguuccuccaagagaa

SEQ ID NO: 867542 - RNA, 19 nt, Homo sapiens
  misc_RNA (1)...(19): siRNA sense strand
gaaacaucaugaaggacau

SEQ ID NO: 867543 - RNA, 19 nt, Homo sapiens
  misc_RNA (1)...(19): siRNA sense strand
agaaacgacugucugaagu

SEQ ID NO: 867544 - RNA, 19 nt, Homo sapiens
  misc_RNA (1)...(19): siRNA sense strand
agcagaaggucgccaauga

SEQ ID NO: 867545 - RNA, 19 nt, Homo sapiens
  misc_RNA (1)...(19): siRNA sense strand
gaggaaaucauugcuuaug

SEQ ID NO: 867546 - RNA, 19 nt, Homo sapiens
  misc_RNA (1)...(19): siRNA sense strand
guugcagacuucuuacuau

SEQ ID NO: 867547 - RNA, 19 nt, Homo sapiens
  misc_RNA (1)...(19): siRNA sense strand
gaagaaggagauagaagag

SEQ ID NO: 867548 - RNA, 19 nt, Homo sapiens
  misc_RNA (1)...(19): siRNA sense strand
ccaaugagaaacuaggaaa

SEQ ID NO: 867549 - RNA, 19 nt, Homo sapiens
  misc_RNA (1)...(19): siRNA sense strand
ccgagggaaugaucagauu

SEQ ID NO: 867550 - RNA, 19 nt, Homo sapiens
  misc_RNA (1)...(19): siRNA sense strand
ggaauuuggguccaguaaa

SEQ ID NO: 867551 - RNA, 19 nt, Homo sapiens
  misc_RNA (1)...(19): siRNA sense strand
gaggagcugucauuagaac

SEQ ID NO: 867552 - RNA, 19 nt, Homo sapiens
  misc_RNA (1)...(19): siRNA sense strand
gggaaugaucagauuauga

SEQ ID NO: 867553 - RNA, 19 nt, Homo sapiens
  misc_RNA (1)...(19): siRNA sense strand
caagaacgauucagaaaga

SEQ ID NO: 867554 - RNA, 19 nt, Homo sapiens
  misc_RNA (1)...(19): siRNA sense strand
ggaaauaaaugugacuuga

SEQ ID NO: 867555 - RNA, 19 nt, Homo sapiens
  misc_RNA (1)...(19): siRNA sense strand
ggacacagcaggacaagaa

SEQ ID NO: 867556 - RNA, 19 nt, Homo sapiens
  misc_RNA (1)...(19): siRNA sense strand
cacaaaccauuaaugcuua

SEQ ID NO: 867557 - RNA, 19 nt, Homo sapiens
  misc_RNA (1)...(19): siRNA sense strand
ugaccaacauggcuaguuu

SEQ ID NO: 867558 - RNA, 19 nt, Homo sapiens
  misc_RNA (1)...(19): siRNA sense strand
ggacaagaacgauucagaa

SEQ ID NO: 867559 - RNA, 19 nt, Homo sapiens
  misc_RNA (1)...(19): siRNA sense strand
gaccuuggcucauaagcuu

SEQ ID NO: 867560 - RNA, 19 nt, Homo sapiens
  misc_RNA (1)...(19): siRNA sense strand
gauagaagaaugcaaacaa

SEQ ID NO: 867561 - RNA, 19 nt, Homo sapiens
  misc_RNA (1)...(19): siRNA sense strand
gaaccaaagccugcaauga

SEQ ID NO: 867562 - RNA, 19 nt, Homo sapiens
  misc_RNA (1)...(19): siRNA sense strand
gagaagugccauacaggua

SEQ ID NO: 867563 - RNA, 19 nt, Homo sapiens
  misc_RNA (1)...(19): siRNA sense strand
uaagagccacaaaccauua

SEQ ID NO: 867564 - RNA, 19 nt, Homo sapiens
  misc_RNA (1)...(19): siRNA sense strand
gacaagaacgauucagaaa

SEQ ID NO: 867565 - RNA, 19 nt, Homo sapiens
  misc_RNA (1)...(19): siRNA sense strand
ccacaaaccauuaaugcuu

SEQ ID NO: 867566 - RNA, 19 nt, Homo sapiens
  misc_RNA (1)...(19): siRNA sense strand
gcaucaagauccagcuaug

SEQ ID NO: 867567 - RNA, 19 nt, Homo sapiens
  misc_RNA (1)...(19): siRNA sense strand
guucagcacuacuacagaa

SEQ ID NO: 867568 - RNA, 19 nt, Homo sapiens
  misc_RNA (1)...(19): siRNA sense strand
gauauaccacggauucuug

SEQ ID NO: 867569 - RNA, 19 nt, Homo sapiens
  misc_RNA (1)...(19): siRNA sense strand
uguggaagcuauauuuaug

SEQ ID NO: 867570 - RNA, 19 nt, Homo sapiens
  misc_RNA (1)...(19): siRNA sense strand
gaaauguacaugcuguugu

SEQ ID NO: 867571 - RNA, 19 nt, Homo sapiens
  misc_RNA (1)...(19): siRNA sense strand
ggauucuuguuggaaauaa

SEQ ID NO: 867572 - RNA, 19 nt, Homo sapiens
  misc_RNA (1)...(19): siRNA sense strand
gaaauaaaugugacuugag

SEQ ID NO: 867573 - RNA, 19 nt, Homo sapiens
  misc_RNA (1)...(19): siRNA sense strand
ccauguggaagcuauauuu

SEQ ID NO: 867574 - RNA, 19 nt, Homo sapiens
  misc_RNA (1)...(19): siRNA sense strand
ccauacagguacccacaga

SEQ ID NO: 867575 - RNA, 19 nt, Homo sapiens
  misc_RNA (1)...(19): siRNA sense strand
cauguggaagcuauauuua

SEQ ID NO: 867576 - RNA, 19 nt, Homo sapiens
  misc_RNA (1)...(19): siRNA sense strand
gagcaugguucagcacuac

SEQ ID NO: 867577 - RNA, 19 nt, Homo sapiens
  misc_RNA (1)...(19): siRNA sense strand
ccacagacuuggcacaaaa

SEQ ID NO: 867578 - RNA, 19 nt, Homo sapiens
  misc_RNA (1)...(19): siRNA sense strand
cagcacuacuacagaaaug

SEQ ID NO: 867579 - RNA, 19 nt, Homo sapiens
  misc_RNA (1)...(19): siRNA sense strand
ccaaugauaaugaccaugu

SEQ ID NO: 867580 - RNA, 19 nt, Homo sapiens
  misc_RNA (1)...(19): siRNA sense strand
caacauggcuaguuuucau

SEQ ID NO: 867581 - RNA, 19 nt, Homo sapiens
  misc_RNA (1)...(19): siRNA sense strand
gaacgagcgguggagauug

SEQ ID NO: 867582 - RNA, 19 nt, Homo sapiens
  misc_RNA (1)...(19): siRNA sense strand
caguaugccuuuguuugaa

SEQ ID NO: 867583 - RNA, 19 nt, Homo sapiens
  misc_RNA (1)...(19): siRNA sense strand
uguaugauaugaccaacau

SEQ ID NO: 867584 - RNA, 19 nt, Homo sapiens
  misc_RNA (1)...(19): siRNA sense strand
gaucggcgacuccaaugug

SEQ ID NO: 867585 - RNA, 19 nt, Homo sapiens
  misc_RNA (1)...(19): siRNA sense strand
uuucauagccuaccaucuu

SEQ ID NO: 867586 - RNA, 19 nt, Homo sapiens
  misc_RNA (1)...(19): siRNA sense strand
acaguaugccuuuguuuga

SEQ ID NO: 867587 - RNA, 19 nt, Homo sapiens
  misc_RNA (1)...(19): siRNA sense strand
ucagaaagagcaugguuca

SEQ ID NO: 867588 - RNA, 19 nt, Homo sapiens
  misc_RNA (1)...(19): siRNA sense strand
ccugaagccugaaccaaag

SEQ ID NO: 867589 - RNA, 19 nt, Homo sapiens
  misc_RNA (1)...(19): siRNA sense strand
aacgagcgguggagauuga

SEQ ID NO: 867590 - RNA, 19 nt, Homo sapiens
  misc_RNA (1)...(19): siRNA sense strand
gcaagacaugccugaccua

SEQ ID NO: 867591 - RNA, 19 nt, Homo sapiens
  misc_RNA (1)...(19): siRNA sense strand
uagccuaccaucuuggaua

SEQ ID NO: 867592 - RNA, 19 nt, Homo sapiens
  misc_RNA (1)...(19): siRNA sense strand
aaauguacaugcuguuguc

SEQ ID NO: 867593 - RNA, 19 nt, Homo sapiens
  misc_RNA (1)...(19): siRNA sense strand
ccuaccaucuuggauagaa

SEQ ID NO: 867594 - RNA, 19 nt, Homo sapiens
  misc_RNA (1)...(19): siRNA sense strand
gcuguugucuucguguaug

SEQ ID NO: 867595 - RNA, 19 nt, Homo sapiens
  misc_RNA (1)...(19): siRNA sense strand
gcaugguucagcacuacua

SEQ ID NO: 867596 - RNA, 19 nt, Homo sapiens
  misc_RNA (1)...(19): siRNA sense strand
acacacacaguaugccuuu

SEQ ID NO: 867597 - RNA, 19 nt, Homo sapiens
  misc_RNA (1)...(19): siRNA sense strand
caaugauaaugaccaugug

SEQ ID NO: 867598 - RNA, 19 nt, Homo sapiens
  misc_RNA (1)...(19): siRNA sense strand
uguacaugcuguugucuuc

SEQ ID NO: 867599 - RNA, 19 nt, Homo sapiens
  misc_RNA (1)...(19): siRNA sense strand
gagccacaaaccauuaaug

SEQ ID NO: 867600 - RNA, 19 nt, Homo sapiens
  misc_RNA (1)...(19): siRNA sense strand
aguaugccuuuguuugaaa

SEQ ID NO: 867601 - RNA, 19 nt, Homo sapiens
  misc_RNA (1)...(19): siRNA sense strand
gcuagccaaugauauacca

SEQ ID NO: 867602 - RNA, 19 nt, Homo sapiens
  misc_RNA (1)...(19): siRNA sense strand
acagguacccacagacuug

SEQ ID NO: 867603 - RNA, 19 nt, Homo sapiens
  misc_RNA (1)...(19): siRNA sense strand
cacggauucuuguuggaaa

SEQ ID NO: 867604 - RNA, 19 nt, Homo sapiens
  misc_RNA (1)...(19): siRNA sense strand
aaugauauaccacggauuc

SEQ ID NO: 867605 - RNA, 19 nt, Homo sapiens
  misc_RNA (1)...(19): siRNA sense strand
cacaguaugccuuuguuug

SEQ ID NO: 867606 - RNA, 19 nt, Homo sapiens
  misc_RNA (1)...(19): siRNA sense strand
uuugcuagccaaugauaua

SEQ ID NO: 867607 - RNA, 19 nt, Homo sapiens
  misc_RNA (1)...(19): siRNA sense strand
guggaagcuauauuuauga

SEQ ID NO: 867608 - RNA, 19 nt, Homo sapiens
  misc_RNA (1)...(19): siRNA sense strand
cacacaguaugccuuuguu

SEQ ID NO: 867609 - RNA, 19 nt, Homo sapiens
  misc_RNA (1)...(19): siRNA sense strand
cagcaggacaagaacgauu

SEQ ID NO: 867610 - RNA, 19 nt, Homo sapiens
  misc_RNA (1)...(19): siRNA sense strand
aaccauuaaugcuuaguca

SEQ ID NO: 867611 - RNA, 19 nt, Homo sapiens
  misc_RNA (1)...(19): siRNA sense strand
uuaagagccacaaaccauu

SEQ ID NO: 867612 - RNA, 19 nt, Homo sapiens
  misc_RNA (1)...(19): siRNA sense strand
agagcaugguucagcacua

SEQ ID NO: 867613 - RNA, 19 nt, Homo sapiens
  misc_RNA (1)...(19): siRNA sense strand
agaacgagcgguggagauu

SEQ ID NO: 867614 - RNA, 19 nt, Homo sapiens
  misc_RNA (1)...(19): siRNA sense strand
ccacggauucuuguuggaa

SEQ ID NO: 867615 - RNA, 19 nt, Homo sapiens
  misc_RNA (1)...(19): siRNA sense strand
gcgcaucaagauccagcua

SEQ ID NO: 867616 - RNA, 19 nt, Homo sapiens
  misc_RNA (1)...(19): siRNA sense strand
auagaagaaugcaaacaac

SEQ ID NO: 867617 - RNA, 19 nt, Homo sapiens
  misc_RNA (1)...(19): siRNA sense strand
ugauaaugaccauguggaa

SEQ ID NO: 867618 - RNA, 19 nt, Homo sapiens
  misc_RNA (1)...(19): siRNA sense strand
gagaacgagcgguggagau

SEQ ID NO: 867619 - RNA, 19 nt, Homo sapiens
  misc_RNA (1)...(19): siRNA sense strand
gcaggacaagaacgauuca

SEQ ID NO: 867620 - RNA, 19 nt, Homo sapiens
  misc_RNA (1)...(19): siRNA sense strand
ggauagaagaaugcaaaca

SEQ ID NO: 867621 - RNA, 19 nt, Homo sapiens
  misc_RNA (1)...(19): siRNA sense strand
uagaagaaugcaaacaaca

SEQ ID NO: 867622 - RNA, 19 nt, Homo sapiens
  misc_RNA (1)...(19): siRNA sense strand
cuuaagagccacaaaccau

SEQ ID NO: 867623 - RNA, 19 nt, Homo sapiens
  misc_RNA (1)...(19): siRNA sense strand
acacaguaugccuuuguuu

SEQ ID NO: 867624 - RNA, 19 nt, Homo sapiens
  misc_RNA (1)...(19): siRNA sense strand
acacacaguaugccuuugu

SEQ ID NO: 867625 - RNA, 19 nt, Homo sapiens
  misc_RNA (1)...(19): siRNA sense strand
agaagaaugcaaacaacau

SEQ ID NO: 867626 - RNA, 19 nt, Homo sapiens
  misc_RNA (1)...(19): siRNA sense strand
agaaauguacaugcuguug

SEQ ID NO: 867627 - RNA, 19 nt, Homo sapiens
  misc_RNA (1)...(19): siRNA sense strand
acaagaacgauucagaaag

SEQ ID NO: 867628 - RNA, 19 nt, Homo sapiens
  misc_RNA (1)...(19): siRNA sense strand
acaaaccauuaaugcuuag

SEQ ID NO: 867629 - RNA, 19 nt, Homo sapiens
  misc_RNA (1)...(19): siRNA sense strand
uuggauagaagaaugcaaa

SEQ ID NO: 867630 - RNA, 19 nt, Homo sapiens
  misc_RNA (1)...(19): siRNA sense strand
uucauagccuaccaucuug

SEQ ID NO: 867631 - RNA, 19 nt, Homo sapiens
  misc_RNA (1)...(19): siRNA sense strand
cuugagaagugccauacag

SEQ ID NO: 867632 - RNA, 19 nt, Homo sapiens
  misc_RNA (1)...(19): siRNA sense strand
gaccauguggaagcuauau

SEQ ID NO: 867633 - RNA, 19 nt, Homo sapiens
  misc_RNA (1)...(19): siRNA sense strand
gggcacuccuacaauguca

SEQ ID NO: 867634 - RNA, 19 nt, Homo sapiens
  misc_RNA (1)...(19): siRNA sense strand
ugugggcacuccuacaaug

SEQ ID NO: 867635 - RNA, 19 nt, Homo sapiens
  misc_RNA (1)...(19): siRNA sense strand
gccugcagauucucuacga

SEQ ID NO: 867636 - RNA, 19 nt, Homo sapiens
  misc_RNA (1)...(19): siRNA sense strand
uguccugccugcacucugu

SEQ ID NO: 867637 - RNA, 19 nt, Homo sapiens
  misc_RNA (1)...(19): siRNA sense strand
ccaaguacaaguucaucuc

SEQ ID NO: 867638 - RNA, 19 nt, Homo sapiens
  misc_RNA (1)...(19): siRNA sense strand
ggaaggagguggaacaaau

SEQ ID NO: 867639 - RNA, 19 nt, Homo sapiens
  misc_RNA (1)...(19): siRNA sense strand
gaaggagguggaacaaaua

SEQ ID NO: 867640 - RNA, 19 nt, Homo sapiens
  misc_RNA (1)...(19): siRNA sense strand
ggagguggaacaaauauuu

SEQ ID NO: 867641 - RNA, 19 nt, Homo sapiens
  misc_RNA (1)...(19): siRNA sense strand
ccgccguccuggauuauug

SEQ ID NO: 867642 - RNA, 19 nt, Homo sapiens
  misc_RNA (1)...(19): siRNA sense strand
ucaccuacguccuguucug

SEQ ID NO: 867643 - RNA, 19 nt, Homo sapiens
  misc_RNA (1)...(19): siRNA sense strand
gagguggaacaaauauuuc

SEQ ID NO: 867644 - RNA, 19 nt, Homo sapiens
  misc_RNA (1)...(19): siRNA sense strand
ccucuacggcuucaucuuc

SEQ ID NO: 867645 - RNA, 19 nt, Homo sapiens
  misc_RNA (1)...(19): siRNA sense strand
gggaaggagguggaacaaa

SEQ ID NO: 867646 - RNA, 19 nt, Homo sapiens
  misc_RNA (1)...(19): siRNA sense strand
cauggugcacgucuacuga

SEQ ID NO: 867647 - RNA, 19 nt, Homo sapiens
  misc_RNA (1)...(19): siRNA sense strand
gcauggugcacgucuacug

SEQ ID NO: 867648 - RNA, 19 nt, Homo sapiens
  misc_RNA (1)...(19): siRNA sense strand
gagaggccgagcaugguua

SEQ ID NO: 867649 - RNA, 19 nt, Homo sapiens
  misc_RNA (1)...(19): siRNA sense strand
gcaggagggcccaguugaa

SEQ ID NO: 867650 - RNA, 19 nt, Homo sapiens
  misc_RNA (1)...(19): siRNA sense strand
ggcggucagugcacaauga

SEQ ID NO: 867651 - RNA, 19 nt, Homo sapiens
  misc_RNA (1)...(19): siRNA sense strand
guggagagccugguguuug

SEQ ID NO: 867652 - RNA, 19 nt, Homo sapiens
  misc_RNA (1)...(19): siRNA sense strand
gcgcucagacucagaccaa

SEQ ID NO: 867653 - RNA, 19 nt, Homo sapiens
  misc_RNA (1)...(19): siRNA sense strand
gcucagacucagaccaaga

SEQ ID NO: 867654 - RNA, 19 nt, Homo sapiens
  misc_RNA (1)...(19): siRNA sense strand
uggagagccugguguuugg

SEQ ID NO: 867655 - RNA, 19 nt, Homo sapiens
  misc_RNA (1)...(19): siRNA sense strand
gcacaaugaacuggagaag

SEQ ID NO: 867656 - RNA, 19 nt, Homo sapiens
  misc_RNA (1)...(19): siRNA sense strand
ggucagugcacaaugaacu

SEQ ID NO: 867657 - RNA, 19 nt, Homo sapiens
  misc_RNA (1)...(19): siRNA sense strand
gagagaggccgagcauggu

SEQ ID NO: 867658 - RNA, 19 nt, Homo sapiens
  misc_RNA (1)...(19): siRNA sense strand
caacaaagauggaccaaca

SEQ ID NO: 867659 - RNA, 19 nt, Homo sapiens
  misc_RNA (1)...(19): siRNA sense strand
gcccagaccuucauaaguu

SEQ ID NO: 867660 - RNA, 19 nt, Homo sapiens
  misc_RNA (1)...(19): siRNA sense strand
agaaauaucugcugaucuu

SEQ ID NO: 867661 - RNA, 19 nt, Homo sapiens
  misc_RNA (1)...(19): siRNA sense strand
aaucaugaguggaguauuu

SEQ ID NO: 867662 - RNA, 19 nt, Homo sapiens
  misc_RNA (1)...(19): siRNA sense strand
ccucaauucuuccuuuauu

SEQ ID NO: 867663 - RNA, 19 nt, Homo sapiens
  misc_RNA (1)...(19): siRNA sense strand
guuggugucucuacugauu

SEQ ID NO: 867664 - RNA, 19 nt, Homo sapiens
  misc_RNA (1)...(19): siRNA sense strand
uggcaagagucauuauuga

SEQ ID NO: 867665 - RNA, 19 nt, Homo sapiens
  misc_RNA (1)...(19): siRNA sense strand
gcugaucuuuggagcguuu

SEQ ID NO: 867666 - RNA, 19 nt, Homo sapiens
  misc_RNA (1)...(19): siRNA sense strand
gugaagguuugaagaguau

SEQ ID NO: 867667 - RNA, 19 nt, Homo sapiens
  misc_RNA (1)...(19): siRNA sense strand
gaacuuucuucuuuacaac

SEQ ID NO: 867668 - RNA, 19 nt, Homo sapiens
  misc_RNA (1)...(19): siRNA sense strand
gaagguuugaagaguauaa

SEQ ID NO: 867669 - RNA, 19 nt, Homo sapiens
  misc_RNA (1)...(19): siRNA sense strand
gagcguuugucucugucua

SEQ ID NO: 867670 - RNA, 19 nt, Homo sapiens
  misc_RNA (1)...(19): siRNA sense strand
caaccagcgcuccagauaa

SEQ ID NO: 867671 - RNA, 19 nt, Homo sapiens
  misc_RNA (1)...(19): siRNA sense strand
ccaccgagccguugcguau

SEQ ID NO: 867672 - RNA, 19 nt, Homo sapiens
  misc_RNA (1)...(19): siRNA sense strand
gcguuugucucugucuaua

SEQ ID NO: 867673 - RNA, 19 nt, Homo sapiens
  misc_RNA (1)...(19): siRNA sense strand
aaagauggaccaacacaga

SEQ ID NO: 867674 - RNA, 19 nt, Homo sapiens
  misc_RNA (1)...(19): siRNA sense strand
guuccgauuugcauauuau

SEQ ID NO: 867675 - RNA, 19 nt, Homo sapiens
  misc_RNA (1)...(19): siRNA sense strand
gaccaacacagaaauaucu

SEQ ID NO: 867676 - RNA, 19 nt, Homo sapiens
  misc_RNA (1)...(19): siRNA sense strand
gggcaccugggcauucuua

SEQ ID NO: 867677 - RNA, 19 nt, Homo sapiens
  misc_RNA (1)...(19): siRNA sense strand
agugaagguuugaagagua

SEQ ID NO: 867678 - RNA, 19 nt, Homo sapiens
  misc_RNA (1)...(19): siRNA sense strand
guucauggcaagagucauu

SEQ ID NO: 867679 - RNA, 19 nt, Homo sapiens
  misc_RNA (1)...(19): siRNA sense strand
acaaccagcgcuccagaua

SEQ ID NO: 867680 - RNA, 19 nt, Homo sapiens
  misc_RNA (1)...(19): siRNA sense strand
gaaauaucugcugaucuuu

SEQ ID NO: 867681 - RNA, 19 nt, Homo sapiens
  misc_RNA (1)...(19): siRNA sense strand
cgacugcuggccuauguuu

SEQ ID NO: 867682 - RNA, 19 nt, Homo sapiens
  misc_RNA (1)...(19): siRNA sense strand
ggaccaacacagaaauauc

SEQ ID NO: 867683 - RNA, 19 nt, Homo sapiens
  misc_RNA (1)...(19): siRNA sense strand
gugaauacccuaucugacu

SEQ ID NO: 867684 - RNA, 19 nt, Homo sapiens
  misc_RNA (1)...(19): siRNA sense strand
gggcauucauggagauucu

SEQ ID NO: 867685 - RNA, 19 nt, Homo sapiens
  misc_RNA (1)...(19): siRNA sense strand
ggaaucaugaguggaguau

SEQ ID NO: 867686 - RNA, 19 nt, Homo sapiens
  misc_RNA (1)...(19): siRNA sense strand
uuucgucccuuguuugguu

SEQ ID NO: 867687 - RNA, 19 nt, Homo sapiens
  misc_RNA (1)...(19): siRNA sense strand
ucuccucaauucuuccuuu

SEQ ID NO: 867688 - RNA, 19 nt, Homo sapiens
  misc_RNA (1)...(19): siRNA sense strand
uccgagaaauguuccgauu

SEQ ID NO: 867689 - RNA, 19 nt, Homo sapiens
  misc_RNA (1)...(19): siRNA sense strand
guuugucucugucuauauc

SEQ ID NO: 867690 - RNA, 19 nt, Homo sapiens
  misc_RNA (1)...(19): siRNA sense strand
ggcuugggcuuuggaauca

SEQ ID NO: 867691 - RNA, 19 nt, Homo sapiens
  misc_RNA (1)...(19): siRNA sense strand
cugauuucgucccuuguuu

SEQ ID NO: 867692 - RNA, 19 nt, Homo sapiens
  misc_RNA (1)...(19): siRNA sense strand
gcucgcccuuuaugucuuc

SEQ ID NO: 867693 - RNA, 19 nt, Homo sapiens
  misc_RNA (1)...(19): siRNA sense strand
cuccucaauucuuccuuua

SEQ ID NO: 867694 - RNA, 19 nt, Homo sapiens
  misc_RNA (1)...(19): siRNA sense strand
ccucaucgccggagcuuuc

SEQ ID NO: 867695 - RNA, 19 nt, Homo sapiens
  misc_RNA (1)...(19): siRNA sense strand
ugagacagcacccucuaug

SEQ ID NO: 867696 - RNA, 19 nt, Homo sapiens
  misc_RNA (1)...(19): siRNA sense strand
aaauaucugcugaucuuug

SEQ ID NO: 867697 - RNA, 19 nt, Homo sapiens
  misc_RNA (1)...(19): siRNA sense strand
uuugauggcugugagaaga

SEQ ID NO: 867698 - RNA, 19 nt, Homo sapiens
  misc_RNA (1)...(19): siRNA sense strand
gggcauccuccuuaucguu

SEQ ID NO: 867699 - RNA, 19 nt, Homo sapiens
  misc_RNA (1)...(19): siRNA sense strand
aauaucugcugaucuuugg

SEQ ID NO: 867700 - RNA, 19 nt, Homo sapiens
  misc_RNA (1)...(19): siRNA sense strand
ugauggcugugagaagaaa

SEQ ID NO: 867701 - RNA, 19 nt, Homo sapiens
  misc_RNA (1)...(19): siRNA sense strand
cagugaagguuugaagagu

SEQ ID NO: 867702 - RNA, 19 nt, Homo sapiens
  misc_RNA (1)...(19): siRNA sense strand
uuaucuugcugcauguauu

SEQ ID NO: 867703 - RNA, 19 nt, Homo sapiens
  misc_RNA (1)...(19): siRNA sense strand
ccggagcuuucuucugguu

SEQ ID NO: 867704 - RNA, 19 nt, Homo sapiens
  misc_RNA (1)...(19): siRNA sense strand
ggaguauuuuccuuuguga

SEQ ID NO: 867705 - RNA, 19 nt, Homo sapiens
  misc_RNA (1)...(19): siRNA sense strand
uauaaacccaggugagaca

SEQ ID NO: 867706 - RNA, 19 nt, Homo sapiens
  misc_RNA (1)...(19): siRNA sense strand
gauggaccaacacagaaau

SEQ ID NO: 867707 - RNA, 19 nt, Homo sapiens
  misc_RNA (1)...(19): siRNA sense strand
uguuccgauuugcauauua

SEQ ID NO: 867708 - RNA, 19 nt, Homo sapiens
  misc_RNA (1)...(19): siRNA sense strand
gccguugcguaucaucuuc

SEQ ID NO: 867709 - RNA, 19 nt, Homo sapiens
  misc_RNA (1)...(19): siRNA sense strand
cauggcaagagucauuauu

SEQ ID NO: 867710 - RNA, 19 nt, Homo sapiens
  misc_RNA (1)...(19): siRNA sense strand
ccagugaagguuugaagag

SEQ ID NO: 867711 - RNA, 19 nt, Homo sapiens
  misc_RNA (1)...(19): siRNA sense strand
ugguuggugucucuacuga

SEQ ID NO: 867712 - RNA, 19 nt, Homo sapiens
  misc_RNA (1)...(19): siRNA sense strand
agauucuccucaauucuuc

SEQ ID NO: 867713 - RNA, 19 nt, Homo sapiens
  misc_RNA (1)...(19): siRNA sense strand
cgagguggcucuggacaug

SEQ ID NO: 867714 - RNA, 19 nt, Homo sapiens
  misc_RNA (1)...(19): siRNA sense strand
uggagauccugaagcagua

SEQ ID NO: 867715 - RNA, 19 nt, Homo sapiens
  misc_RNA (1)...(19): siRNA sense strand
gaucagccaggccuucgau

SEQ ID NO: 867716 - RNA, 19 nt, Homo sapiens
  misc_RNA (1)...(19): siRNA sense strand
agguggcucuggacaugua

SEQ ID NO: 867717 - RNA, 19 nt, Homo sapiens
  misc_RNA (1)...(19): siRNA sense strand
ucagccaggccuucgauga

SEQ ID NO: 867718 - RNA, 19 nt, Homo sapiens
  misc_RNA (1)...(19): siRNA sense strand
ggccuucgaugacgauucc

SEQ ID NO: 867719 - RNA, 19 nt, Homo sapiens
  misc_RNA (1)...(19): siRNA sense strand
gaaaugacaugcuacagaa

SEQ ID NO: 867720 - RNA, 19 nt, Homo sapiens
  misc_RNA (1)...(19): siRNA sense strand
agaacaagcuggagaguua

SEQ ID NO: 867721 - RNA, 19 nt, Homo sapiens
  misc_RNA (1)...(19): siRNA sense strand
caaagcaggugaagaguuu

SEQ ID NO: 867722 - RNA, 19 nt, Homo sapiens
  misc_RNA (1)...(19): siRNA sense strand
caacaguucuccaugauga

SEQ ID NO: 867723 - RNA, 19 nt, Homo sapiens
  misc_RNA (1)...(19): siRNA sense strand
ggaagcagguguuaaggaa

SEQ ID NO: 867724 - RNA, 19 nt, Homo sapiens
  misc_RNA (1)...(19): siRNA sense strand
gaagauccuuugacuauca

SEQ ID NO: 867725 - RNA, 19 nt, Homo sapiens
  misc_RNA (1)...(19): siRNA sense strand
gaaaagaaaugacaugcua

SEQ ID NO: 867726 - RNA, 19 nt, Homo sapiens
  misc_RNA (1)...(19): siRNA sense strand
caaacaugauugccucuuu

SEQ ID NO: 867727 - RNA, 19 nt, Homo sapiens
  misc_RNA (1)...(19): siRNA sense strand
gaaaugaccaaacagaaga

SEQ ID NO: 867728 - RNA, 19 nt, Homo sapiens
  misc_RNA (1)...(19): siRNA sense strand
cagaaccaguuauuccuua

SEQ ID NO: 867729 - RNA, 19 nt, Homo sapiens
  misc_RNA (1)...(19): siRNA sense strand
gaguaugaguccaggauaa

SEQ ID NO: 867730 - RNA, 19 nt, Homo sapiens
  misc_RNA (1)...(19): siRNA sense strand
ggacagaaacuggaggaua

SEQ ID NO: 867731 - RNA, 19 nt, Homo sapiens
  misc_RNA (1)...(19): siRNA sense strand
agaaagaaauggagcaguu

SEQ ID NO: 867732 - RNA, 19 nt, Homo sapiens
  misc_RNA (1)...(19): siRNA sense strand
caucaacaguucuccauga

SEQ ID NO: 867733 - RNA, 19 nt, Homo sapiens
  misc_RNA (1)...(19): siRNA sense strand
gagaagccaucauuugaca

SEQ ID NO: 867734 - RNA, 19 nt, Homo sapiens
  misc_RNA (1)...(19): siRNA sense strand
uaauaaggguagugggaua

SEQ ID NO: 867735 - RNA, 19 nt, Homo sapiens
  misc_RNA (1)...(19): siRNA sense strand
gacagaaacuggaggauac

SEQ ID NO: 867736 - RNA, 19 nt, Homo sapiens
  misc_RNA (1)...(19): siRNA sense strand
ccaaacagaagauagagua

SEQ ID NO: 867737 - RNA, 19 nt, Homo sapiens
  misc_RNA (1)...(19): siRNA sense strand
ugacaacagugagacauuu

SEQ ID NO: 867738 - RNA, 19 nt, Homo sapiens
  misc_RNA (1)...(19): siRNA sense strand
gaacccagccuuuaauaag

SEQ ID NO: 867739 - RNA, 19 nt, Homo sapiens
  misc_RNA (1)...(19): siRNA sense strand
gaagaggaagcagguguua

SEQ ID NO: 867740 - RNA, 19 nt, Homo sapiens
  misc_RNA (1)...(19): siRNA sense strand
ggaggauacuguucguuau

SEQ ID NO: 867741 - RNA, 19 nt, Homo sapiens
  misc_RNA (1)...(19): siRNA sense strand
gagcaacaacaaugaaauu

SEQ ID NO: 867742 - RNA, 19 nt, Homo sapiens
  misc_RNA (1)...(19): siRNA sense strand
ucccaaagaugcagaacua

SEQ ID NO: 867743 - RNA, 19 nt, Homo sapiens
  misc_RNA (1)...(19): siRNA sense strand
gggagaagccaucauuuga

SEQ ID NO: 867744 - RNA, 19 nt, Homo sapiens
  misc_RNA (1)...(19): siRNA sense strand
gaacuuggcaacggucuuu

SEQ ID NO: 867745 - RNA, 19 nt, Homo sapiens
  misc_RNA (1)...(19): siRNA sense strand
gcaacggucuuugguccua

SEQ ID NO: 867746 - RNA, 19 nt, Homo sapiens
  misc_RNA (1)...(19): siRNA sense strand
gaagcagcaugaacaaugg

SEQ ID NO: 867747 - RNA, 19 nt, Homo sapiens
  misc_RNA (1)...(19): siRNA sense strand
gaaagaaauggagcaguuu

SEQ ID NO: 867748 - RNA, 19 nt, Homo sapiens
  misc_RNA (1)...(19): siRNA sense strand
cagcgaaacuugacuuugg

SEQ ID NO: 867749 - RNA, 19 nt, Homo sapiens
  misc_RNA (1)...(19): siRNA sense strand
ggaaacacaauauggauuc

SEQ ID NO: 867750 - RNA, 19 nt, Homo sapiens
  misc_RNA (1)...(19): siRNA sense strand
cgagagaggaaacacaaua

SEQ ID NO: 867751 - RNA, 19 nt, Homo sapiens
  misc_RNA (1)...(19): siRNA sense strand
caacuccuuucaucccuaa

SEQ ID NO: 867752 - RNA, 19 nt, Homo sapiens
  misc_RNA (1)...(19): siRNA sense strand
ggagugagcaacaacaaug

SEQ ID NO: 867753 - RNA, 19 nt, Homo sapiens
  misc_RNA (1)...(19): siRNA sense strand
aaacuugacuuuggaaaca

SEQ ID NO: 867754 - RNA, 19 nt, Homo sapiens
  misc_RNA (1)...(19): siRNA sense strand
aacagaagauagaguauga

SEQ ID NO: 867755 - RNA, 19 nt, Homo sapiens
  misc_RNA (1)...(19): siRNA sense strand
ggaaaugaccaaacagaag

SEQ ID NO: 867756 - RNA, 19 nt, Homo sapiens
  misc_RNA (1)...(19): siRNA sense strand
gaacagcgaaacuugacuu

SEQ ID NO: 867757 - RNA, 19 nt, Homo sapiens
  misc_RNA (1)...(19): siRNA sense strand
aggcuaaucuuguuaagga

SEQ ID NO: 867758 - RNA, 19 nt, Homo sapiens
  misc_RNA (1)...(19): siRNA sense strand
aaaagaagaugccgagaaa

SEQ ID NO: 867759 - RNA, 19 nt, Homo sapiens
  misc_RNA (1)...(19): siRNA sense strand
agaacaaggagaacaauaa

SEQ ID NO: 867760 - RNA, 19 nt, Homo sapiens
  misc_RNA (1)...(19): siRNA sense strand
aagcagguguuaaggaauu

SEQ ID NO: 867761 - RNA, 19 nt, Homo sapiens
  misc_RNA (1)...(19): siRNA sense strand
caucacuucuuaagcugua

SEQ ID NO: 867762 - RNA, 19 nt, Homo sapiens
  misc_RNA (1)...(19): siRNA sense strand
gcaaagcaggugaagaguu

SEQ ID NO: 867763 - RNA, 19 nt, Homo sapiens
  misc_RNA (1)...(19): siRNA sense strand
gaaacacaauauggauuca

SEQ ID NO: 867764 - RNA, 19 nt, Homo sapiens
  misc_RNA (1)...(19): siRNA sense strand
ugaugaaccuugaugacaa

SEQ ID NO: 867765 - RNA, 19 nt, Homo sapiens
  misc_RNA (1)...(19): siRNA sense strand
ggauaaagagcuuagaaca

SEQ ID NO: 867766 - RNA, 19 nt, Homo sapiens
  misc_RNA (1)...(19): siRNA sense strand
gagcagugcguggacuuua

SEQ ID NO: 867767 - RNA, 19 nt, Homo sapiens
  misc_RNA (1)...(19): siRNA sense strand
ugaugagccuccaugauga

SEQ ID NO: 867768 - RNA, 19 nt, Homo sapiens
  misc_RNA (1)...(19): siRNA sense strand
ugcagaaggucuugagaaa

SEQ ID NO: 867769 - RNA, 19 nt, Homo sapiens
  misc_RNA (1)...(19): siRNA sense strand
caaagaugcagaacuacaa

SEQ ID NO: 867770 - RNA, 19 nt, Homo sapiens
  misc_RNA (1)...(19): siRNA sense strand
uggaagauccuuugacuau

SEQ ID NO: 867771 - RNA, 19 nt, Homo sapiens
  misc_RNA (1)...(19): siRNA sense strand
guuugccagugguaaauua

SEQ ID NO: 867772 - RNA, 19 nt, Homo sapiens
  misc_RNA (1)...(19): siRNA sense strand
aaacaugauugccucuuuc

SEQ ID NO: 867773 - RNA, 19 nt, Homo sapiens
  misc_RNA (1)...(19): siRNA sense strand
auuacaaccuccucaagua

SEQ ID NO: 867774 - RNA, 19 nt, Homo sapiens
  misc_RNA (1)...(19): siRNA sense strand
guagugggauaguuaccaa

SEQ ID NO: 867775 - RNA, 19 nt, Homo sapiens
  misc_RNA (1)...(19): siRNA sense strand
gaaacuggaggauacuguu

SEQ ID NO: 867776 - RNA, 19 nt, Homo sapiens
  misc_RNA (1)...(19): siRNA sense strand
gagagaggaaacacaauau

SEQ ID NO: 867777 - RNA, 19 nt, Homo sapiens
  misc_RNA (1)...(19): siRNA sense strand
gauaauguccaucaacagu

SEQ ID NO: 867778 - RNA, 19 nt, Homo sapiens
  misc_RNA (1)...(19): siRNA sense strand
gaacaaggagaacaauaac

SEQ ID NO: 867779 - RNA, 19 nt, Homo sapiens
  misc_RNA (1)...(19): siRNA sense strand
ucacugaagguaucuggua

SEQ ID NO: 867780 - RNA, 19 nt, Homo sapiens
  misc_RNA (1)...(19): siRNA sense strand
ggucuuugguccuaauauc

SEQ ID NO: 867781 - RNA, 19 nt, Homo sapiens
  misc_RNA (1)...(19): siRNA sense strand
uaauguccaucaacaguuc

SEQ ID NO: 867782 - RNA, 19 nt, Homo sapiens
  misc_RNA (1)...(19): siRNA sense strand
gggauaacaagcagaaaga

SEQ ID NO: 867783 - RNA, 19 nt, Homo sapiens
  misc_RNA (1)...(19): siRNA sense strand
cagcagcaguaaugcagaa

SEQ ID NO: 867784 - RNA, 19 nt, Homo sapiens
  misc_RNA (1)...(19): siRNA sense strand
ggaagauccuuugacuauc

SEQ ID NO: 867785 - RNA, 19 nt, Homo sapiens
  misc_RNA (1)...(19): siRNA sense strand
caaguauauuugcagauuc

SEQ ID NO: 867786 - RNA, 19 nt, Homo sapiens
  misc_RNA (1)...(19): siRNA sense strand
uggaggauacuguucguua

SEQ ID NO: 867787 - RNA, 19 nt, Homo sapiens
  misc_RNA (1)...(19): siRNA sense strand
gcagauucuuggaugaagu

SEQ ID NO: 867788 - RNA, 19 nt, Homo sapiens
  misc_RNA (1)...(19): siRNA sense strand
ccaagaugccuuugacugu

SEQ ID NO: 867789 - RNA, 19 nt, Homo sapiens
  misc_RNA (1)...(19): siRNA sense strand
gagaggaaacacaauaugg

SEQ ID NO: 867790 - RNA, 19 nt, Homo sapiens
  misc_RNA (1)...(19): siRNA sense strand
cagggacuaugaaagcaaa

SEQ ID NO: 867791 - RNA, 19 nt, Homo sapiens
  misc_RNA (1)...(19): siRNA sense strand
gaacuuugaggacccuguu

SEQ ID NO: 867792 - RNA, 19 nt, Homo sapiens
  misc_RNA (1)...(19): siRNA sense strand
gcacgcacaguguacagaa

SEQ ID NO: 867793 - RNA, 19 nt, Homo sapiens
  misc_RNA (1)...(19): siRNA sense strand
gaagaguuugccaguggua

SEQ ID NO: 867794 - RNA, 19 nt, Homo sapiens
  misc_RNA (1)...(19): siRNA sense strand
ggaagaggaagcagguguu

SEQ ID NO: 867795 - RNA, 19 nt, Homo sapiens
  misc_RNA (1)...(19): siRNA sense strand
ugacagcaacacagaugua

SEQ ID NO: 867796 - RNA, 19 nt, Homo sapiens
  misc_RNA (1)...(19): siRNA sense strand
agaaaugacaugcuacaga

SEQ ID NO: 867797 - RNA, 19 nt, Homo sapiens
  misc_RNA (1)...(19): siRNA sense strand
gagccuccaugaugaacug

SEQ ID NO: 867798 - RNA, 19 nt, Homo sapiens
  misc_RNA (1)...(19): siRNA sense strand
acgguggcaucacuucuua

SEQ ID NO: 867799 - RNA, 19 nt, Homo sapiens
  misc_RNA (1)...(19): siRNA sense strand
cagaacaaggagaacaaua

SEQ ID NO: 867800 - RNA, 19 nt, Homo sapiens
  misc_RNA (1)...(19): siRNA sense strand
cagagaagcagcaugaaca

SEQ ID NO: 867801 - RNA, 19 nt, Homo sapiens
  misc_RNA (1)...(19): siRNA sense strand
uagcaaagcaggugaagag

SEQ ID NO: 867802 - RNA, 19 nt, Homo sapiens
  misc_RNA (1)...(19): siRNA sense strand
gauaaagagcuuagaacag

SEQ ID NO: 867803 - RNA, 19 nt, Homo sapiens
  misc_RNA (1)...(19): siRNA sense strand
gaugacaagcagagcauug

SEQ ID NO: 867804 - RNA, 19 nt, Homo sapiens
  misc_RNA (1)...(19): siRNA sense strand
uggaugaaguacaguccua

SEQ ID NO: 867805 - RNA, 19 nt, Homo sapiens
  misc_RNA (1)...(19): siRNA sense strand
gaggaaacacaauauggau

SEQ ID NO: 867806 - RNA, 19 nt, Homo sapiens
  misc_RNA (1)...(19): siRNA sense strand
ugaccaaacagaagauaga

SEQ ID NO: 867807 - RNA, 19 nt, Homo sapiens
  misc_RNA (1)...(19): siRNA sense strand
agaagcagcaugaacaaug

SEQ ID NO: 867808 - RNA, 19 nt, Homo sapiens
  misc_RNA (1)...(19): siRNA sense strand
caagauggagugagcaaca

SEQ ID NO: 867809 - RNA, 19 nt, Homo sapiens
  misc_RNA (1)...(19): siRNA sense strand
aaaugagugugcagaacuu

SEQ ID NO: 867810 - RNA, 19 nt, Homo sapiens
  misc_RNA (1)...(19): siRNA sense strand
gaaccaguuauuccuuaug

SEQ ID NO: 867811 - RNA, 19 nt, Homo sapiens
  misc_RNA (1)...(19): siRNA sense strand
gaggauacuguucguuaug

SEQ ID NO: 867812 - RNA, 19 nt, Homo sapiens
  misc_RNA (1)...(19): siRNA sense strand
aacaggaaaugaccaaaca

SEQ ID NO: 867813 - RNA, 19 nt, Homo sapiens
  misc_RNA (1)...(19): siRNA sense strand
uaacaagcagaaagaacaa

SEQ ID NO: 867814 - RNA, 19 nt, Homo sapiens
  misc_RNA (1)...(19): siRNA sense strand
caacggucuuugguccuaa

SEQ ID NO: 867815 - RNA, 19 nt, Homo sapiens
  misc_RNA (1)...(19): siRNA sense strand
acaaccuccucaaguauau

SEQ ID NO: 867816 - RNA, 19 nt, Homo sapiens
  misc_RNA (1)...(19): siRNA sense strand
ugucagugaugauuagcaa

SEQ ID NO: 867817 - RNA, 19 nt, Homo sapiens
  misc_RNA (1)...(19): siRNA sense strand
gaaacuugacuuuggaaac

SEQ ID NO: 867818 - RNA, 19 nt, Homo sapiens
  misc_RNA (1)...(19): siRNA sense strand
gacaugcuacagaaagaaa

SEQ ID NO: 867819 - RNA, 19 nt, Homo sapiens
  misc_RNA (1)...(19): siRNA sense strand
gagacaagcuaaagaauug

SEQ ID NO: 867820 - RNA, 19 nt, Homo sapiens
  misc_RNA (1)...(19): siRNA sense strand
gaaccuaccuugugccaau

SEQ ID NO: 867821 - RNA, 19 nt, Homo sapiens
  misc_RNA (1)...(19): siRNA sense strand
gcagagauguucccguuga

SEQ ID NO: 867822 - RNA, 19 nt, Homo sapiens
  misc_RNA (1)...(19): siRNA sense strand
ggaagaagacaaccaauug

SEQ ID NO: 867823 - RNA, 19 nt, Homo sapiens
  misc_RNA (1)...(19): siRNA sense strand
ggucuuaaaucacaacuug

SEQ ID NO: 867824 - RNA, 19 nt, Homo sapiens
  misc_RNA (1)...(19): siRNA sense strand
gaagucaccaggcccauua

SEQ ID NO: 867825 - RNA, 19 nt, Homo sapiens
  misc_RNA (1)...(19): siRNA sense strand
guagaacucugugguguaa

SEQ ID NO: 867826 - RNA, 19 nt, Homo sapiens
  misc_RNA (1)...(19): siRNA sense strand
gaaaauaccuacaagucua

SEQ ID NO: 867827 - RNA, 19 nt, Homo sapiens
  misc_RNA (1)...(19): siRNA sense strand
gaagauguguguaguuugg

SEQ ID NO: 867828 - RNA, 19 nt, Homo sapiens
  misc_RNA (1)...(19): siRNA sense strand
cgaaacaucuucuacaagu

SEQ ID NO: 867829 - RNA, 19 nt, Homo sapiens
  misc_RNA (1)...(19): siRNA sense strand
gagcagaucuuuugaguga

SEQ ID NO: 867830 - RNA, 19 nt, Homo sapiens
  misc_RNA (1)...(19): siRNA sense strand
ggacagccauccuucugaa

SEQ ID NO: 867831 - RNA, 19 nt, Homo sapiens
  misc_RNA (1)...(19): siRNA sense strand
gaaggagacuaugaaguug

SEQ ID NO: 867832 - RNA, 19 nt, Homo sapiens
  misc_RNA (1)...(19): siRNA sense strand
gaagagaaaucaaaacuca

SEQ ID NO: 867833 - RNA, 19 nt, Homo sapiens
  misc_RNA (1)...(19): siRNA sense strand
uaagacagaugaagaugug

SEQ ID NO: 867834 - RNA, 19 nt, Homo sapiens
  misc_RNA (1)...(19): siRNA sense strand
gaagaagacaaccaauuga

SEQ ID NO: 867835 - RNA, 19 nt, Homo sapiens
  misc_RNA (1)...(19): siRNA sense strand
ggagaagucgcaaauagaa

SEQ ID NO: 867836 - RNA, 19 nt, Homo sapiens
  misc_RNA (1)...(19): siRNA sense strand
gaaacaucuucuacaaguu

SEQ ID NO: 867837 - RNA, 19 nt, Homo sapiens
  misc_RNA (1)...(19): siRNA sense strand
ugaaggagacuaugaaguu

SEQ ID NO: 867838 - RNA, 19 nt, Homo sapiens
  misc_RNA (1)...(19): siRNA sense strand
agaguuagccauucagaua

SEQ ID NO: 867839 - RNA, 19 nt, Homo sapiens
  misc_RNA (1)...(19): siRNA sense strand
caagaggaaugcuaaugau

SEQ ID NO: 867840 - RNA, 19 nt, Homo sapiens
  misc_RNA (1)...(19): siRNA sense strand
gccaauguacgucagauua

SEQ ID NO: 867841 - RNA, 19 nt, Homo sapiens
  misc_RNA (1)...(19): siRNA sense strand
gcugauaccauguuaaaga

SEQ ID NO: 867842 - RNA, 19 nt, Homo sapiens
  misc_RNA (1)...(19): siRNA sense strand
gaagaaaucaggcuaugag

SEQ ID NO: 867843 - RNA, 19 nt, Homo sapiens
  misc_RNA (1)...(19): siRNA sense strand
gcauaauccugugagaauu

SEQ ID NO: 867844 - RNA, 19 nt, Homo sapiens
  misc_RNA (1)...(19): siRNA sense strand
gguaguagaugaagcugau

SEQ ID NO: 867845 - RNA, 19 nt, Homo sapiens
  misc_RNA (1)...(19): siRNA sense strand
ugaagcugauaccauguua

SEQ ID NO: 867846 - RNA, 19 nt, Homo sapiens
  misc_RNA (1)...(19): siRNA sense strand
caauguacgucagauuauu

SEQ ID NO: 867847 - RNA, 19 nt, Homo sapiens
  misc_RNA (1)...(19): siRNA sense strand
gaaaagaaccuaccuugug

SEQ ID NO: 867848 - RNA, 19 nt, Homo sapiens
  misc_RNA (1)...(19): siRNA sense strand
cuuuaagccuccaguguua

SEQ ID NO: 867849 - RNA, 19 nt, Homo sapiens
  misc_RNA (1)...(19): siRNA sense strand
ggcagagguucauucagua

SEQ ID NO: 867850 - RNA, 19 nt, Homo sapiens
  misc_RNA (1)...(19): siRNA sense strand
gaggaaugcuaaugaugau

SEQ ID NO: 867851 - RNA, 19 nt, Homo sapiens
  misc_RNA (1)...(19): siRNA sense strand
ccagagaguuagccauuca

SEQ ID NO: 867852 - RNA, 19 nt, Homo sapiens
  misc_RNA (1)...(19): siRNA sense strand
gagccagagucuccacuga

SEQ ID NO: 867853 - RNA, 19 nt, Homo sapiens
  misc_RNA (1)...(19): siRNA sense strand
caacaggaugucagaauga

SEQ ID NO: 867854 - RNA, 19 nt, Homo sapiens
  misc_RNA (1)...(19): siRNA sense strand
ggacgaggccuagacuuga

SEQ ID NO: 867855 - RNA, 19 nt, Homo sapiens
  misc_RNA (1)...(19): siRNA sense strand
gauaugccuucaaguaugg

SEQ ID NO: 867856 - RNA, 19 nt, Homo sapiens
  misc_RNA (1)...(19): siRNA sense strand
gggaagaagacaaccaauu

SEQ ID NO: 867857 - RNA, 19 nt, Homo sapiens
  misc_RNA (1)...(19): siRNA sense strand
cuucaaguauggaugagua

SEQ ID NO: 867858 - RNA, 19 nt, Homo sapiens
  misc_RNA (1)...(19): siRNA sense strand
uacagaagcagccacaaua

SEQ ID NO: 867859 - RNA, 19 nt, Homo sapiens
  misc_RNA (1)...(19): siRNA sense strand
ucaacaggaugucagaaug

SEQ ID NO: 867860 - RNA, 19 nt, Homo sapiens
  misc_RNA (1)...(19): siRNA sense strand
gguagaagacccagccaaa

SEQ ID NO: 867861 - RNA, 19 nt, Homo sapiens
  misc_RNA (1)...(19): siRNA sense strand
gcagagguucauucaguaa

SEQ ID NO: 867862 - RNA, 19 nt, Homo sapiens
  misc_RNA (1)...(19): siRNA sense strand
ucaggcugguugucaauuu

SEQ ID NO: 867863 - RNA, 19 nt, Homo sapiens
  misc_RNA (1)...(19): siRNA sense strand
gagcaccccuuuauuuuga

SEQ ID NO: 867864 - RNA, 19 nt, Homo sapiens
  misc_RNA (1)...(19): siRNA sense strand
ucaagaggaaugcuaauga

SEQ ID NO: 867865 - RNA, 19 nt, Homo sapiens
  misc_RNA (1)...(19): siRNA sense strand
caucugcgcucauucuuac

SEQ ID NO: 867866 - RNA, 19 nt, Homo sapiens
  misc_RNA (1)...(19): siRNA sense strand
ugauaugccuucaaguaug

SEQ ID NO: 867867 - RNA, 19 nt, Homo sapiens
  misc_RNA (1)...(19): siRNA sense strand
uggcagagguucauucagu

SEQ ID NO: 867868 - RNA, 19 nt, Homo sapiens
  misc_RNA (1)...(19): siRNA sense strand
gaagggauuacuugaagga

SEQ ID NO: 867869 - RNA, 19 nt, Homo sapiens
  misc_RNA (1)...(19): siRNA sense strand
uaaagauugugguaguaga

SEQ ID NO: 867870 - RNA, 19 nt, Homo sapiens
  misc_RNA (1)...(19): siRNA sense strand
cgacuucuggauauaauaa

SEQ ID NO: 867871 - RNA, 19 nt, Homo sapiens
  misc_RNA (1)...(19): siRNA sense strand
ucccugaggucuuaaauca

SEQ ID NO: 867872 - RNA, 19 nt, Homo sapiens
  misc_RNA (1)...(19): siRNA sense strand
gccagagucuccacugaau

SEQ ID NO: 867873 - RNA, 19 nt, Homo sapiens
  misc_RNA (1)...(19): siRNA sense strand
ucaccaggcccauuauuga

SEQ ID NO: 867874 - RNA, 19 nt, Homo sapiens
  misc_RNA (1)...(19): siRNA sense strand
aaaguuguguggcuaagau

SEQ ID NO: 867875 - RNA, 19 nt, Homo sapiens
  misc_RNA (1)...(19): siRNA sense strand
ggaggaauccccagcauuu

SEQ ID NO: 867876 - RNA, 19 nt, Homo sapiens
  misc_RNA (1)...(19): siRNA sense strand
ccugaggucuuaaaucaca

SEQ ID NO: 867877 - RNA, 19 nt, Homo sapiens
  misc_RNA (1)...(19): siRNA sense strand
ucggagaagucgcaaauag

SEQ ID NO: 867878 - RNA, 19 nt, Homo sapiens
  misc_RNA (1)...(19): siRNA sense strand
gcagauacuggcucaggaa

SEQ ID NO: 867879 - RNA, 19 nt, Homo sapiens
  misc_RNA (1)...(19): siRNA sense strand
ggucaaacuaggccuuaaa

SEQ ID NO: 867880 - RNA, 19 nt, Homo sapiens
  misc_RNA (1)...(19): siRNA sense strand
agaaugaccuugggcuaug

SEQ ID NO: 867881 - RNA, 19 nt, Homo sapiens
  misc_RNA (1)...(19): siRNA sense strand
uguaaagauugugguagua

SEQ ID NO: 867882 - RNA, 19 nt, Homo sapiens
  misc_RNA (1)...(19): siRNA sense strand
aagcauaucuauacauucg

SEQ ID NO: 867883 - RNA, 19 nt, Homo sapiens
  misc_RNA (1)...(19): siRNA sense strand
gagaagucgcaaauagaaa

SEQ ID NO: 867884 - RNA, 19 nt, Homo sapiens
  misc_RNA (1)...(19): siRNA sense strand
gaaugaccuugggcuaugu

SEQ ID NO: 867885 - RNA, 19 nt, Homo sapiens
  misc_RNA (1)...(19): siRNA sense strand
gggacgaggccuagacuug

SEQ ID NO: 867886 - RNA, 19 nt, Homo sapiens
  misc_RNA (1)...(19): siRNA sense strand
aggagacuaugaaguugua

SEQ ID NO: 867887 - RNA, 19 nt, Homo sapiens
  misc_RNA (1)...(19): siRNA sense strand
agaggaaugcuaaugauga

SEQ ID NO: 867888 - RNA, 19 nt, Homo sapiens
  misc_RNA (1)...(19): siRNA sense strand
caaacuaggagcagaucuu

SEQ ID NO: 867889 - RNA, 19 nt, Homo sapiens
  misc_RNA (1)...(19): siRNA sense strand
guguaaagauugugguagu

SEQ ID NO: 867890 - RNA, 19 nt, Homo sapiens
  misc_RNA (1)...(19): siRNA sense strand
cuuccuaugucuacaaaga

SEQ ID NO: 867891 - RNA, 19 nt, Homo sapiens
  misc_RNA (1)...(19): siRNA sense strand
augaagauguguguaguuu

SEQ ID NO: 867892 - RNA, 19 nt, Homo sapiens
  misc_RNA (1)...(19): siRNA sense strand
ugaagagcccguuaaguca

SEQ ID NO: 867893 - RNA, 19 nt, Homo sapiens
  misc_RNA (1)...(19): siRNA sense strand
gaagagcccguuaagucau

SEQ ID NO: 867894 - RNA, 19 nt, Homo sapiens
  misc_RNA (1)...(19): siRNA sense strand
gcaaagcacaaugggaaga

SEQ ID NO: 867895 - RNA, 19 nt, Homo sapiens
  misc_RNA (1)...(19): siRNA sense strand
aaagauggguuuucaacaa

SEQ ID NO: 867896 - RNA, 19 nt, Homo sapiens
  misc_RNA (1)...(19): siRNA sense strand
aagcugauaccauguuaaa

SEQ ID NO: 867897 - RNA, 19 nt, Homo sapiens
  misc_RNA (1)...(19): siRNA sense strand
agagacaagcuaaagaauu

SEQ ID NO: 867898 - RNA, 19 nt, Homo sapiens
  misc_RNA (1)...(19): siRNA sense strand
gauagagagacaagcuaaa

SEQ ID NO: 867899 - RNA, 19 nt, Homo sapiens
  misc_RNA (1)...(19): siRNA sense strand
gaugauuccugugggacuu

SEQ ID NO: 867900 - RNA, 19 nt, Homo sapiens
  misc_RNA (1)...(19): siRNA sense strand
gugauaagacagaugaaga

SEQ ID NO: 867901 - RNA, 19 nt, Homo sapiens
  misc_RNA (1)...(19): siRNA sense strand
caggaagaccagauugaaa

SEQ ID NO: 867902 - RNA, 19 nt, Homo sapiens
  misc_RNA (1)...(19): siRNA sense strand
gacgaggccuagacuugau

SEQ ID NO: 867903 - RNA, 19 nt, Homo sapiens
  misc_RNA (1)...(19): siRNA sense strand
aaacuaggagcagaucuuu

SEQ ID NO: 867904 - RNA, 19 nt, Homo sapiens
  misc_RNA (1)...(19): siRNA sense strand
agaauuaucacuggagaaa

SEQ ID NO: 867905 - RNA, 19 nt, Homo sapiens
  misc_RNA (1)...(19): siRNA sense strand
agagagacaagcuaaagaa

SEQ ID NO: 867906 - RNA, 19 nt, Homo sapiens
  misc_RNA (1)...(19): siRNA sense strand
gaugaagauguguguaguu

SEQ ID NO: 867907 - RNA, 19 nt, Homo sapiens
  misc_RNA (1)...(19): siRNA sense strand
gaguauguccaucaggaaa

SEQ ID NO: 867908 - RNA, 19 nt, Homo sapiens
  misc_RNA (1)...(19): siRNA sense strand
gaagcugauaccauguuaa

SEQ ID NO: 867909 - RNA, 19 nt, Homo sapiens
  misc_RNA (1)...(19): siRNA sense strand
gagcuuuauucgagagcaa

SEQ ID NO: 867910 - RNA, 19 nt, Homo sapiens
  misc_RNA (1)...(19): siRNA sense strand
aaacucagcaauccacaga

SEQ ID NO: 867911 - RNA, 19 nt, Homo sapiens
  misc_RNA (1)...(19): siRNA sense strand
gcccauuauugacuuugaa

SEQ ID NO: 867912 - RNA, 19 nt, Homo sapiens
  misc_RNA (1)...(19): siRNA sense strand
gaagcagccacaauagaca

SEQ ID NO: 867913 - RNA, 19 nt, Homo sapiens
  misc_RNA (1)...(19): siRNA sense strand
gaaaaucacagggcugaaa

SEQ ID NO: 867914 - RNA, 19 nt, Homo sapiens
  misc_RNA (1)...(19): siRNA sense strand
ccaauguacgucagauuau

SEQ ID NO: 867915 - RNA, 19 nt, Homo sapiens
  misc_RNA (1)...(19): siRNA sense strand
cugaagagcccguuaaguc

SEQ ID NO: 867916 - RNA, 19 nt, Homo sapiens
  misc_RNA (1)...(19): siRNA sense strand
caagcuaaagaauugauga

SEQ ID NO: 867917 - RNA, 19 nt, Homo sapiens
  misc_RNA (1)...(19): siRNA sense strand
gagagacaagcuaaagaau

SEQ ID NO: 867918 - RNA, 19 nt, Homo sapiens
  misc_RNA (1)...(19): siRNA sense strand
ggugccaacucccauucaa

SEQ ID NO: 867919 - RNA, 19 nt, Homo sapiens
  misc_RNA (1)...(19): siRNA sense strand
ccaaggagcuggaagagaa

SEQ ID NO: 867920 - RNA, 19 nt, Homo sapiens
  misc_RNA (1)...(19): siRNA sense strand
gagaagaccauuugcacua

SEQ ID NO: 867921 - RNA, 19 nt, Homo sapiens
  misc_RNA (1)...(19): siRNA sense strand
gagacaaccuggccaagga

SEQ ID NO: 867922 - RNA, 19 nt, Homo sapiens
  misc_RNA (1)...(19): siRNA sense strand
gagaagcaaugcagagauc

SEQ ID NO: 867923 - RNA, 19 nt, Homo sapiens
  misc_RNA (1)...(19): siRNA sense strand
gcagagaucaauucaagga

SEQ ID NO: 867924 - RNA, 19 nt, Homo sapiens
  misc_RNA (1)...(19): siRNA sense strand
gccaucaucuugagugaga

SEQ ID NO: 867925 - RNA, 19 nt, Homo sapiens
  misc_RNA (1)...(19): siRNA sense strand
gcacuaaggauaaggaaag

SEQ ID NO: 867926 - RNA, 19 nt, Homo sapiens
  misc_RNA (1)...(19): siRNA sense strand
ccaaggagaagaccauuug

SEQ ID NO: 867927 - RNA, 19 nt, Homo sapiens
  misc_RNA (1)...(19): siRNA sense strand
aggaacagcugguugaaug

SEQ ID NO: 867928 - RNA, 19 nt, Homo sapiens
  misc_RNA (1)...(19): siRNA sense strand
ccaaggagcucaacuucac

SEQ ID NO: 867929 - RNA, 19 nt, Homo sapiens
  misc_RNA (1)...(19): siRNA sense strand
ucaaggacaugaacaagag

SEQ ID NO: 867930 - RNA, 19 nt, Homo sapiens
  misc_RNA (1)...(19): siRNA sense strand
gcaaugcagagaucaauuc

SEQ ID NO: 867931 - RNA, 19 nt, Homo sapiens
  misc_RNA (1)...(19): siRNA sense strand
cagcuagccuggaggaguu

SEQ ID NO: 867932 - RNA, 19 nt, Homo sapiens
  misc_RNA (1)...(19): siRNA sense strand
agaagaccauuugcacuaa

SEQ ID NO: 867933 - RNA, 19 nt, Homo sapiens
  misc_RNA (1)...(19): siRNA sense strand
gaagaccauuugcacuaag

SEQ ID NO: 867934 - RNA, 19 nt, Homo sapiens
  misc_RNA (1)...(19): siRNA sense strand
cgaaacagaagguggagaa

SEQ ID NO: 867935 - RNA, 19 nt, Homo sapiens
  misc_RNA (1)...(19): siRNA sense strand
ggagauagccaaggagaag

SEQ ID NO: 867936 - RNA, 19 nt, Homo sapiens
  misc_RNA (1)...(19): siRNA sense strand
aacagaagguggagaagga

SEQ ID NO: 867937 - RNA, 19 nt, Homo sapiens
  misc_RNA (1)...(19): siRNA sense strand
uggaggaguucaagaggaa

SEQ ID NO: 867938 - RNA, 19 nt, Homo sapiens
  misc_RNA (1)...(19): siRNA sense strand
gagaucaauucaaggacau

SEQ ID NO: 867939 - RNA, 19 nt, Homo sapiens
  misc_RNA (1)...(19): siRNA sense strand
aaagcgugcugcugaacaa

SEQ ID NO: 867940 - RNA, 19 nt, Homo sapiens
  misc_RNA (1)...(19): siRNA sense strand
acacgaacaaucagaggua

SEQ ID NO: 867941 - RNA, 19 nt, Homo sapiens
  misc_RNA (1)...(19): siRNA sense strand
gaaagcgugcugcugaaca

SEQ ID NO: 867942 - RNA, 19 nt, Homo sapiens
  misc_RNA (1)...(19): siRNA sense strand
ccauuugcacuaaggauaa

SEQ ID NO: 867943 - RNA, 19 nt, Homo sapiens
  misc_RNA (1)...(19): siRNA sense strand
gaccaaggagcucaacuuc

SEQ ID NO: 867944 - RNA, 19 nt, Homo sapiens
  misc_RNA (1)...(19): siRNA sense strand
gaagcaaugcagagaucaa

SEQ ID NO: 867945 - RNA, 19 nt, Homo sapiens
  misc_RNA (1)...(19): siRNA sense strand
gaccuggaccgcaucaaug

SEQ ID NO: 867946 - RNA, 19 nt, Homo sapiens
  misc_RNA (1)...(19): siRNA sense strand
augcagagaucaauucaag

SEQ ID NO: 867947 - RNA, 19 nt, Homo sapiens
  misc_RNA (1)...(19): siRNA sense strand
gacaaggacaaguuugaga

SEQ ID NO: 867948 - RNA, 19 nt, Homo sapiens
  misc_RNA (1)...(19): siRNA sense strand
cuggacaccugcaucaaga

SEQ ID NO: 867949 - RNA, 19 nt, Homo sapiens
  misc_RNA (1)...(19): siRNA sense strand
ccgagggccuauacaguca

SEQ ID NO: 867950 - RNA, 19 nt, Homo sapiens
  misc_RNA (1)...(19): siRNA sense strand
caaggacaaguuugagaug

SEQ ID NO: 867951 - RNA, 19 nt, Homo sapiens
  misc_RNA (1)...(19): siRNA sense strand
augcagauguggcugaaug

SEQ ID NO: 867952 - RNA, 19 nt, Homo sapiens
  misc_RNA (1)...(19): siRNA sense strand
gcucggaauuggccuccau

SEQ ID NO: 867953 - RNA, 19 nt, Homo sapiens
  misc_RNA (1)...(19): siRNA sense strand
ccaagucgcagccgaugau

SEQ ID NO: 867954 - RNA, 19 nt, Homo sapiens
  misc_RNA (1)...(19): siRNA sense strand
gaucaauucaaggacauga

SEQ ID NO: 867955 - RNA, 19 nt, Homo sapiens
  misc_RNA (1)...(19): siRNA sense strand
gucaggaggcgaaacagaa

SEQ ID NO: 867956 - RNA, 19 nt, Homo sapiens
  misc_RNA (1)...(19): siRNA sense strand
cgagaacucagaccuccaa

SEQ ID NO: 867957 - RNA, 19 nt, Homo sapiens
  misc_RNA (1)...(19): siRNA sense strand
ugaccaaggagcucaacuu

SEQ ID NO: 867958 - RNA, 19 nt, Homo sapiens
  misc_RNA (1)...(19): siRNA sense strand
ggaggaacagcugguugaa

SEQ ID NO: 867959 - RNA, 19 nt, Homo sapiens
  misc_RNA (1)...(19): siRNA sense strand
caucuugagugagaagcaa

SEQ ID NO: 867960 - RNA, 19 nt, Homo sapiens
  misc_RNA (1)...(19): siRNA sense strand
ccuauacagucagcuccua

SEQ ID NO: 867961 - RNA, 19 nt, Homo sapiens
  misc_RNA (1)...(19): siRNA sense strand
gagcuggccaucagaaacu

SEQ ID NO: 867962 - RNA, 19 nt, Homo sapiens
  misc_RNA (1)...(19): siRNA sense strand
ggacaaggacaaguuugag

SEQ ID NO: 867963 - RNA, 19 nt, Homo sapiens
  misc_RNA (1)...(19): siRNA sense strand
gaacaaucagagguacaug

SEQ ID NO: 867964 - RNA, 19 nt, Homo sapiens
  misc_RNA (1)...(19): siRNA sense strand
acaccugcaucaagaccaa

SEQ ID NO: 867965 - RNA, 19 nt, Homo sapiens
  misc_RNA (1)...(19): siRNA sense strand
cgaccuggaccgcaucaau

SEQ ID NO: 867966 - RNA, 19 nt, Homo sapiens
  misc_RNA (1)...(19): siRNA sense strand
ggaaggaacgagacaaccu

SEQ ID NO: 867967 - RNA, 19 nt, Homo sapiens
  misc_RNA (1)...(19): siRNA sense strand
cggaggaacagcugguuga

SEQ ID NO: 867968 - RNA, 19 nt, Homo sapiens
  misc_RNA (1)...(19): siRNA sense strand
gccaaggagaagaccauuu

SEQ ID NO: 867969 - RNA, 19 nt, Homo sapiens
  misc_RNA (1)...(19): siRNA sense strand
ccaaggagcaacugcaaaa

SEQ ID NO: 867970 - RNA, 19 nt, Homo sapiens
  misc_RNA (1)...(19): siRNA sense strand
gagcuggaagagaagaaga

SEQ ID NO: 867971 - RNA, 19 nt, Homo sapiens
  misc_RNA (1)...(19): siRNA sense strand
aggaaagcgugcugcugaa

SEQ ID NO: 867972 - RNA, 19 nt, Homo sapiens
  misc_RNA (1)...(19): siRNA sense strand
gagauggaccuucguaacc

SEQ ID NO: 867973 - RNA, 19 nt, Homo sapiens
  misc_RNA (1)...(19): siRNA sense strand
gaggaacagcugguugaau

SEQ ID NO: 867974 - RNA, 19 nt, Homo sapiens
  misc_RNA (1)...(19): siRNA sense strand
ucaucuacacgaacaauca

SEQ ID NO: 867975 - RNA, 19 nt, Homo sapiens
  misc_RNA (1)...(19): siRNA sense strand
gaggaguucaagaggaaga

SEQ ID NO: 867976 - RNA, 19 nt, Homo sapiens
  misc_RNA (1)...(19): siRNA sense strand
gcgaugccuugcucuucau

SEQ ID NO: 867977 - RNA, 19 nt, Homo sapiens
  misc_RNA (1)...(19): siRNA sense strand
caaugcagagaucaauuca

SEQ ID NO: 867978 - RNA, 19 nt, Homo sapiens
  misc_RNA (1)...(19): siRNA sense strand
gcgcuacuucuuccucuuc

SEQ ID NO: 867979 - RNA, 19 nt, Homo sapiens
  misc_RNA (1)...(19): siRNA sense strand
aggacaaguuugagaugga

SEQ ID NO: 867980 - RNA, 19 nt, Homo sapiens
  misc_RNA (1)...(19): siRNA sense strand
uggacaaggacaaguuuga

SEQ ID NO: 867981 - RNA, 19 nt, Homo sapiens
  misc_RNA (1)...(19): siRNA sense strand
gugagaagcaaugcagaga

SEQ ID NO: 867982 - RNA, 19 nt, Homo sapiens
  misc_RNA (1)...(19): siRNA sense strand
ggagcuggccaucagaaac

SEQ ID NO: 867983 - RNA, 19 nt, Homo sapiens
  misc_RNA (1)...(19): siRNA sense strand
ccagucaggaggcgaaaca

SEQ ID NO: 867984 - RNA, 19 nt, Homo sapiens
  misc_RNA (1)...(19): siRNA sense strand
acaaggacaaguuugagau

SEQ ID NO: 867985 - RNA, 19 nt, Homo sapiens
  misc_RNA (1)...(19): siRNA sense strand
ggccaaggagcaacugcaa

SEQ ID NO: 867986 - RNA, 19 nt, Homo sapiens
  misc_RNA (1)...(19): siRNA sense strand
gcugguugaaugcgugaaa

SEQ ID NO: 867987 - RNA, 19 nt, Homo sapiens
  misc_RNA (1)...(19): siRNA sense strand
gagauagccaaggagaaga

SEQ ID NO: 867988 - RNA, 19 nt, Homo sapiens
  misc_RNA (1)...(19): siRNA sense strand
ugcgaugccuugcucuuca

SEQ ID NO: 867989 - RNA, 19 nt, Homo sapiens
  misc_RNA (1)...(19): siRNA sense strand
ucaugcagauguggcugaa

SEQ ID NO: 867990 - RNA, 19 nt, Homo sapiens
  misc_RNA (1)...(19): siRNA sense strand
ucgucucccucauccaauu

SEQ ID NO: 867991 - RNA, 19 nt, Homo sapiens
  misc_RNA (1)...(19): siRNA sense strand
agcuagcgcuggaggagaa

SEQ ID NO: 867992 - RNA, 19 nt, Homo sapiens
  misc_RNA (1)...(19): siRNA sense strand
gccaaggagcaacugcaaa

SEQ ID NO: 867993 - RNA, 19 nt, Homo sapiens
  misc_RNA (1)...(19): siRNA sense strand
cgggucaucuacacgaaca

SEQ ID NO: 867994 - RNA, 19 nt, Homo sapiens
  misc_RNA (1)...(19): siRNA sense strand
gaagagaauccaccugaga

SEQ ID NO: 867995 - RNA, 19 nt, Homo sapiens
  misc_RNA (1)...(19): siRNA sense strand
gaaaagauccggaagaaau

SEQ ID NO: 867996 - RNA, 19 nt, Homo sapiens
  misc_RNA (1)...(19): siRNA sense strand
gagaaaagauccggaagaa

SEQ ID NO: 867997 - RNA, 19 nt, Homo sapiens
  misc_RNA (1)...(19): siRNA sense strand
ggaagacuauuuucuguau

SEQ ID NO: 867998 - RNA, 19 nt, Homo sapiens
  misc_RNA (1)...(19): siRNA sense strand
ggccaguucuacuucuuaa

SEQ ID NO: 867999 - RNA, 19 nt, Homo sapiens
  misc_RNA (1)...(19): siRNA sense strand
cuagugcccucugaccuua

SEQ ID NO: 868000 - RNA, 19 nt, Homo sapiens
  misc_RNA (1)...(19): siRNA sense strand
gagagugucuaugggaaau

SEQ ID NO: 868001 - RNA, 19 nt, Homo sapiens
  misc_RNA (1)...(19): siRNA sense strand
gagugucuaugggaaauga

SEQ ID NO: 868002 - RNA, 19 nt, Homo sapiens
  misc_RNA (1)...(19): siRNA sense strand
ugaggacaaucaugaggaa

SEQ ID NO: 868003 - RNA, 19 nt, Homo sapiens
  misc_RNA (1)...(19): siRNA sense strand
ggaccaucccuuugaguau

SEQ ID NO: 868004 - RNA, 19 nt, Homo sapiens
  misc_RNA (1)...(19): siRNA sense strand
gaccugaggacgccuuauu

SEQ ID NO: 868005 - RNA, 19 nt, Homo sapiens
  misc_RNA (1)...(19): siRNA sense strand
gaggacgccuuauucuucu

SEQ ID NO: 868006 - RNA, 19 nt, Homo sapiens
  misc_RNA (1)...(19): siRNA sense strand
ugaggacgccuuauucuuc

SEQ ID NO: 868007 - RNA, 19 nt, Homo sapiens
  misc_RNA (1)...(19): siRNA sense strand
gaccaucccuuugaguauc

SEQ ID NO: 868008 - RNA, 19 nt, Homo sapiens
  misc_RNA (1)...(19): siRNA sense strand
ggaggaccaucccuuugag

SEQ ID NO: 868009 - RNA, 19 nt, Homo sapiens
  misc_RNA (1)...(19): siRNA sense strand
ggacgccuuauucuucuuu

SEQ ID NO: 868010 - RNA, 19 nt, Homo sapiens
  misc_RNA (1)...(19): siRNA sense strand
caagaggaaguaccuagug

SEQ ID NO: 868011 - RNA, 19 nt, Homo sapiens
  misc_RNA (1)...(19): siRNA sense strand
ggacaaucaugaggaagac

SEQ ID NO: 868012 - RNA, 19 nt, Homo sapiens
  misc_RNA (1)...(19): siRNA sense strand
gaggaagacuauuuucugu

SEQ ID NO: 868013 - RNA, 19 nt, Homo sapiens
  misc_RNA (1)...(19): siRNA sense strand
ccaguucuacuucuuaauc

SEQ ID NO: 868014 - RNA, 19 nt, Homo sapiens
  misc_RNA (1)...(19): siRNA sense strand
ggacaagaggaaguaccua

SEQ ID NO: 868015 - RNA, 19 nt, Homo sapiens
  misc_RNA (1)...(19): siRNA sense strand
uauguggccuacagugaug

SEQ ID NO: 868016 - RNA, 19 nt, Homo sapiens
  misc_RNA (1)...(19): siRNA sense strand
ccaacuguaugaggacaau

SEQ ID NO: 868017 - RNA, 19 nt, Homo sapiens
  misc_RNA (1)...(19): siRNA sense strand
gugaugagagugucuaugg

SEQ ID NO: 868018 - RNA, 19 nt, Homo sapiens
  misc_RNA (1)...(19): siRNA sense strand
uaccaugggccaacuguau

SEQ ID NO: 868019 - RNA, 19 nt, Homo sapiens
  misc_RNA (1)...(19): siRNA sense strand
ggccuacagugaugagagu

SEQ ID NO: 868020 - RNA, 19 nt, Homo sapiens
  misc_RNA (1)...(19): siRNA sense strand
ugccugaucuggacaagag

SEQ ID NO: 868021 - RNA, 19 nt, Homo sapiens
  misc_RNA (1)...(19): siRNA sense strand
gccuuauucuucuuuguca

SEQ ID NO: 868022 - RNA, 19 nt, Homo sapiens
  misc_RNA (1)...(19): siRNA sense strand
guauguggccuacagugau

SEQ ID NO: 868023 - RNA, 19 nt, Homo sapiens
  misc_RNA (1)...(19): siRNA sense strand
aaaagauccggaagaaaua

SEQ ID NO: 868024 - RNA, 19 nt, Homo sapiens
  misc_RNA (1)...(19): siRNA sense strand
acaaucaugaggaagacua

SEQ ID NO: 868025 - RNA, 19 nt, Homo sapiens
  misc_RNA (1)...(19): siRNA sense strand
gaucuggacaagaggaagu

SEQ ID NO: 868026 - RNA, 19 nt, Homo sapiens
  misc_RNA (1)...(19): siRNA sense strand
ggagaaaagauccggaaga

SEQ ID NO: 868027 - RNA, 19 nt, Homo sapiens
  misc_RNA (1)...(19): siRNA sense strand
gagaccugaggacgccuua

SEQ ID NO: 868028 - RNA, 19 nt, Homo sapiens
  misc_RNA (1)...(19): siRNA sense strand
aggaggaccaucccuuuga

SEQ ID NO: 868029 - RNA, 19 nt, Homo sapiens
  misc_RNA (1)...(19): siRNA sense strand
ugagagugucuaugggaaa

SEQ ID NO: 868030 - RNA, 19 nt, Homo sapiens
  misc_RNA (1)...(19): siRNA sense strand
ccaugggccaacuguauga

SEQ ID NO: 868031 - RNA, 19 nt, Homo sapiens
  misc_RNA (1)...(19): siRNA sense strand
uggccaguucuacuucuua

SEQ ID NO: 868032 - RNA, 19 nt, Homo sapiens
  misc_RNA (1)...(19): siRNA sense strand
gaagacuauuuucuguaug

SEQ ID NO: 868033 - RNA, 19 nt, Homo sapiens
  misc_RNA (1)...(19): siRNA sense strand
gaaagcagcugguuaucaa

SEQ ID NO: 868034 - RNA, 19 nt, Homo sapiens
  misc_RNA (1)...(19): siRNA sense strand
ggugauggcuuauaagaga

SEQ ID NO: 868035 - RNA, 19 nt, Homo sapiens
  misc_RNA (1)...(19): siRNA sense strand
gaaaauugcucuuuggauu

SEQ ID NO: 868036 - RNA, 19 nt, Homo sapiens
  misc_RNA (1)...(19): siRNA sense strand
caaaggauguucaggaugu

SEQ ID NO: 868037 - RNA, 19 nt, Homo sapiens
  misc_RNA (1)...(19): siRNA sense strand
gcauggugauggcuuauaa

SEQ ID NO: 868038 - RNA, 19 nt, Homo sapiens
  misc_RNA (1)...(19): siRNA sense strand
gaaggauucucguucauca

SEQ ID NO: 868039 - RNA, 19 nt, Homo sapiens
  misc_RNA (1)...(19): siRNA sense strand
gaacagagaaccuuucaag

SEQ ID NO: 868040 - RNA, 19 nt, Homo sapiens
  misc_RNA (1)...(19): siRNA sense strand
cagagaaccuuucaagaug

SEQ ID NO: 868041 - RNA, 19 nt, Homo sapiens
  misc_RNA (1)...(19): siRNA sense strand
gaugucauguucuacagua

SEQ ID NO: 868042 - RNA, 19 nt, Homo sapiens
  misc_RNA (1)...(19): siRNA sense strand
gaggaacccuucuggcaaa

SEQ ID NO: 868043 - RNA, 19 nt, Homo sapiens
  misc_RNA (1)...(19): siRNA sense strand
ucaaagagauuggagcaaa

SEQ ID NO: 868044 - RNA, 19 nt, Homo sapiens
  misc_RNA (1)...(19): siRNA sense strand
caagaugaguacgaaauuu

SEQ ID NO: 868045 - RNA, 19 nt, Homo sapiens
  misc_RNA (1)...(19): siRNA sense strand
ggacagcucaggucauuug

SEQ ID NO: 868046 - RNA, 19 nt, Homo sapiens
  misc_RNA (1)...(19): siRNA sense strand
gaaagccauucucaucuca

SEQ ID NO: 868047 - RNA, 19 nt, Homo sapiens
  misc_RNA (1)...(19): siRNA sense strand
gaacugaucaacaauacug

SEQ ID NO: 868048 - RNA, 19 nt, Homo sapiens
  misc_RNA (1)...(19): siRNA sense strand
caccaaaccuggaagacuu

SEQ ID NO: 868049 - RNA, 19 nt, Homo sapiens
  misc_RNA (1)...(19): siRNA sense strand
gccaaguucuucaguccua

SEQ ID NO: 868050 - RNA, 19 nt, Homo sapiens
  misc_RNA (1)...(19): siRNA sense strand
gcaguagugugaauauuuu

SEQ ID NO: 868051 - RNA, 19 nt, Homo sapiens
  misc_RNA (1)...(19): siRNA sense strand
gaauguugguauagaagug

SEQ ID NO: 868052 - RNA, 19 nt, Homo sapiens
  misc_RNA (1)...(19): siRNA sense strand
ccuagaaacuguugugaca

SEQ ID NO: 868053 - RNA, 19 nt, Homo sapiens
  misc_RNA (1)...(19): siRNA sense strand
ugaugaacaugcuggaauu

SEQ ID NO: 868054 - RNA, 19 nt, Homo sapiens
  misc_RNA (1)...(19): siRNA sense strand
aaagaaacuucaacaggau

SEQ ID NO: 868055 - RNA, 19 nt, Homo sapiens
  misc_RNA (1)...(19): siRNA sense strand
ggauucucguucaucauuu

SEQ ID NO: 868056 - RNA, 19 nt, Homo sapiens
  misc_RNA (1)...(19): siRNA sense strand
caacaauacugugcuguac

SEQ ID NO: 868057 - RNA, 19 nt, Homo sapiens
  misc_RNA (1)...(19): siRNA sense strand
gaugcucccucgaguuuca

SEQ ID NO: 868058 - RNA, 19 nt, Homo sapiens
  misc_RNA (1)...(19): siRNA sense strand
uggcucagcucucaaagga

SEQ ID NO: 868059 - RNA, 19 nt, Homo sapiens
  misc_RNA (1)...(19): siRNA sense strand
gggugugaauguugguaua

SEQ ID NO: 868060 - RNA, 19 nt, Homo sapiens
  misc_RNA (1)...(19): siRNA sense strand
caaagagauuggagcaaag

SEQ ID NO: 868061 - RNA, 19 nt, Homo sapiens
  misc_RNA (1)...(19): siRNA sense strand
agagaaccuuucaagauga

SEQ ID NO: 868062 - RNA, 19 nt, Homo sapiens
  misc_RNA (1)...(19): siRNA sense strand
acagagaaccuuucaagau

SEQ ID NO: 868063 - RNA, 19 nt, Homo sapiens
  misc_RNA (1)...(19): siRNA sense strand
ggauguagaagcaaagaug

SEQ ID NO: 868064 - RNA, 19 nt, Homo sapiens
  misc_RNA (1)...(19): siRNA sense strand
ggagcauccuggagccaaa

SEQ ID NO: 868065 - RNA, 19 nt, Homo sapiens
  misc_RNA (1)...(19): siRNA sense strand
gaaccuuucaagaugagua

SEQ ID NO: 868066 - RNA, 19 nt, Homo sapiens
  misc_RNA (1)...(19): siRNA sense strand
uugcuaccaucauuucaua

SEQ ID NO: 868067 - RNA, 19 nt, Homo sapiens
  misc_RNA (1)...(19): siRNA sense strand
cagcucaggucauuuggau

SEQ ID NO: 868068 - RNA, 19 nt, Homo sapiens
  misc_RNA (1)...(19): siRNA sense strand
agagaaagcagcugguuau

SEQ ID NO: 868069 - RNA, 19 nt, Homo sapiens
  misc_RNA (1)...(19): siRNA sense strand
ugaacaugcuggaauugga

SEQ ID NO: 868070 - RNA, 19 nt, Homo sapiens
  misc_RNA (1)...(19): siRNA sense strand
ugacuauguuccaguugaa

SEQ ID NO: 868071 - RNA, 19 nt, Homo sapiens
  misc_RNA (1)...(19): siRNA sense strand
gaacccuucuggcaaaauu

SEQ ID NO: 868072 - RNA, 19 nt, Homo sapiens
  misc_RNA (1)...(19): siRNA sense strand
uacgauagcaguaguguga

SEQ ID NO: 868073 - RNA, 19 nt, Homo sapiens
  misc_RNA (1)...(19): siRNA sense strand
gauagcaguagugugaaua

SEQ ID NO: 868074 - RNA, 19 nt, Homo sapiens
  misc_RNA (1)...(19): siRNA sense strand
guggugccauccuaaagaa

SEQ ID NO: 868075 - RNA, 19 nt, Homo sapiens
  misc_RNA (1)...(19): siRNA sense strand
ucaacaauacugugcugua

SEQ ID NO: 868076 - RNA, 19 nt, Homo sapiens
  misc_RNA (1)...(19): siRNA sense strand
gacacuggcucagcucuca

SEQ ID NO: 868077 - RNA, 19 nt, Homo sapiens
  misc_RNA (1)...(19): siRNA sense strand
ucaagaugaguacgaaauu

SEQ ID NO: 868078 - RNA, 19 nt, Homo sapiens
  misc_RNA (1)...(19): siRNA sense strand
auacugugcuguacgauag

SEQ ID NO: 868079 - RNA, 19 nt, Homo sapiens
  misc_RNA (1)...(19): siRNA sense strand
acaauacugugcuguacga

SEQ ID NO: 868080 - RNA, 19 nt, Homo sapiens
  misc_RNA (1)...(19): siRNA sense strand
ugacaggaccguuccacuu

SEQ ID NO: 868081 - RNA, 19 nt, Homo sapiens
  misc_RNA (1)...(19): siRNA sense strand
gagccaaacuucagauacc

SEQ ID NO: 868082 - RNA, 19 nt, Homo sapiens
  misc_RNA (1)...(19): siRNA sense strand
gggaacaaucugacuaugu

SEQ ID NO: 868083 - RNA, 19 nt, Homo sapiens
  misc_RNA (1)...(19): siRNA sense strand
ccuauugagugccaccaaa

SEQ ID NO: 868084 - RNA, 19 nt, Homo sapiens
  misc_RNA (1)...(19): siRNA sense strand
gacaggaccguuccacuuc

SEQ ID NO: 868085 - RNA, 19 nt, Homo sapiens
  misc_RNA (1)...(19): siRNA sense strand
ggauccagagccaucauuu

SEQ ID NO: 868086 - RNA, 19 nt, Homo sapiens
  misc_RNA (1)...(19): siRNA sense strand
ucaacaggauucaaaccau

SEQ ID NO: 868087 - RNA, 19 nt, Homo sapiens
  misc_RNA (1)...(19): siRNA sense strand
ggaggaguguggccuuagg

SEQ ID NO: 868088 - RNA, 19 nt, Homo sapiens
  misc_RNA (1)...(19): siRNA sense strand
caacaggagcugguaagga

SEQ ID NO: 868089 - RNA, 19 nt, Homo sapiens
  misc_RNA (1)...(19): siRNA sense strand
gagaaccuuucaagaugag

SEQ ID NO: 868090 - RNA, 19 nt, Homo sapiens
  misc_RNA (1)...(19): siRNA sense strand
gaauagaggaacccuucug

SEQ ID NO: 868091 - RNA, 19 nt, Homo sapiens
  misc_RNA (1)...(19): siRNA sense strand
guucacauccucccaguag

SEQ ID NO: 868092 - RNA, 19 nt, Homo sapiens
  misc_RNA (1)...(19): siRNA sense strand
caccaaauuacgucaguuu

SEQ ID NO: 868093 - RNA, 19 nt, Homo sapiens
  misc_RNA (1)...(19): siRNA sense strand
ucagugacauuaugaucca

SEQ ID NO: 868094 - RNA, 19 nt, Homo sapiens
  misc_RNA (1)...(19): siRNA sense strand
aagagaaagcagcugguua

SEQ ID NO: 868095 - RNA, 19 nt, Homo sapiens
  misc_RNA (1)...(19): siRNA sense strand
uagcaguagugugaauauu

SEQ ID NO: 868096 - RNA, 19 nt, Homo sapiens
  misc_RNA (1)...(19): siRNA sense strand
cgauagcaguagugugaau

SEQ ID NO: 868097 - RNA, 19 nt, Homo sapiens
  misc_RNA (1)...(19): siRNA sense strand
ugugaauguugguauagaa

SEQ ID NO: 868098 - RNA, 19 nt, Homo sapiens
  misc_RNA (1)...(19): siRNA sense strand
ccucgaguuucaaauuguu

SEQ ID NO: 868099 - RNA, 19 nt, Homo sapiens
  misc_RNA (1)...(19): siRNA sense strand
uggaugcucccucgaguuu

SEQ ID NO: 868100 - RNA, 19 nt, Homo sapiens
  misc_RNA (1)...(19): siRNA sense strand
gaaguuaaaaccagagcua

SEQ ID NO: 868101 - RNA, 19 nt, Homo sapiens
  misc_RNA (1)...(19): siRNA sense strand
cauccaaugauaugaaguu

SEQ ID NO: 868102 - RNA, 19 nt, Homo sapiens
  misc_RNA (1)...(19): siRNA sense strand
ggucaaggccaaggagaga

SEQ ID NO: 868103 - RNA, 19 nt, Homo sapiens
  misc_RNA (1)...(19): siRNA sense strand
uucaaugccucauccaaug

SEQ ID NO: 868104 - RNA, 19 nt, Homo sapiens
  misc_RNA (1)...(19): siRNA sense strand
gguggugccauccuaaaga

SEQ ID NO: 868105 - RNA, 19 nt, Homo sapiens
  misc_RNA (1)...(19): siRNA sense strand
uuggacagcucaggucauu

SEQ ID NO: 868106 - RNA, 19 nt, Homo sapiens
  misc_RNA (1)...(19): siRNA sense strand
cugacuauguuccaguuga

SEQ ID NO: 868107 - RNA, 19 nt, Homo sapiens
  misc_RNA (1)...(19): siRNA sense strand
ccugggauguagaagcaaa

SEQ ID NO: 868108 - RNA, 19 nt, Homo sapiens
  misc_RNA (1)...(19): siRNA sense strand
gauccagagccaucauuuc

SEQ ID NO: 868109 - RNA, 19 nt, Homo sapiens
  misc_RNA (1)...(19): siRNA sense strand
aaggcauggugauggcuua

SEQ ID NO: 868110 - RNA, 19 nt, Homo sapiens
  misc_RNA (1)...(19): siRNA sense strand
acgauuugcuggccuguuc

SEQ ID NO: 868111 - RNA, 19 nt, Homo sapiens
  misc_RNA (1)...(19): siRNA sense strand
ugacuuccaacacgauuug

SEQ ID NO: 868112 - RNA, 19 nt, Homo sapiens
  misc_RNA (1)...(19): siRNA sense strand
gugauggcuuauaagagaa

SEQ ID NO: 868113 - RNA, 19 nt, Homo sapiens
  misc_RNA (1)...(19): siRNA sense strand
auugagugccaccaaauua

SEQ ID NO: 868114 - RNA, 19 nt, Homo sapiens
  misc_RNA (1)...(19): siRNA sense strand
uaauggugcugagugacuu

SEQ ID NO: 868115 - RNA, 19 nt, Homo sapiens
  misc_RNA (1)...(19): siRNA sense strand
uucaggaugucauguucua

SEQ ID NO: 868116 - RNA, 19 nt, Homo sapiens
  misc_RNA (1)...(19): siRNA sense strand
gaugaacagagaaccuuuc

SEQ ID NO: 868117 - RNA, 19 nt, Homo sapiens
  misc_RNA (1)...(19): siRNA sense strand
agaugaugaugaacagaga

SEQ ID NO: 868118 - RNA, 19 nt, Homo sapiens
  misc_RNA (1)...(19): siRNA sense strand
uaagagaaagcagcugguu

SEQ ID NO: 868119 - RNA, 19 nt, Homo sapiens
  misc_RNA (1)...(19): siRNA sense strand
cagaggcuguugaacugau

SEQ ID NO: 868120 - RNA, 19 nt, Homo sapiens
  misc_RNA (1)...(19): siRNA sense strand
aaauugcucuuuggauuac

SEQ ID NO: 868121 - RNA, 19 nt, Homo sapiens
  misc_RNA (1)...(19): siRNA sense strand
agaagaaggcgcugacucu

SEQ ID NO: 868122 - RNA, 19 nt, Homo sapiens
  misc_RNA (1)...(19): siRNA sense strand
gugacauuaugauccagaa

SEQ ID NO: 868123 - RNA, 19 nt, Homo sapiens
  misc_RNA (1)...(19): siRNA sense strand
gaugaacaugcuggaauug

SEQ ID NO: 868124 - RNA, 19 nt, Homo sapiens
  misc_RNA (1)...(19): siRNA sense strand
cucaaaggauguucaggau

SEQ ID NO: 868125 - RNA, 19 nt, Homo sapiens
  misc_RNA (1)...(19): siRNA sense strand
guuaaaaccagagcuauuu

SEQ ID NO: 868126 - RNA, 19 nt, Homo sapiens
  misc_RNA (1)...(19): siRNA sense strand
gcuguacgauagcaguagu

SEQ ID NO: 868127 - RNA, 19 nt, Homo sapiens
  misc_RNA (1)...(19): siRNA sense strand
ucccucgaguuucaaauug

SEQ ID NO: 868128 - RNA, 19 nt, Homo sapiens
  misc_RNA (1)...(19): siRNA sense strand
aagccauucucaucucaga

SEQ ID NO: 868129 - RNA, 19 nt, Homo sapiens
  misc_RNA (1)...(19): siRNA sense strand
uacgaaagaagaaggauuc

SEQ ID NO: 868130 - RNA, 19 nt, Homo sapiens
  misc_RNA (1)...(19): siRNA sense strand
ggugcugagugacuuccaa

SEQ ID NO: 868131 - RNA, 19 nt, Homo sapiens
  misc_RNA (1)...(19): siRNA sense strand
aagaggagguuuuccagaa

SEQ ID NO: 868132 - RNA, 19 nt, Homo sapiens
  misc_RNA (1)...(19): siRNA sense strand
gaauucucccucaaugaca

SEQ ID NO: 868133 - RNA, 19 nt, Homo sapiens
  misc_RNA (1)...(19): siRNA sense strand
uagcuaaccuaaccacuaa

SEQ ID NO: 868134 - RNA, 19 nt, Homo sapiens
  misc_RNA (1)...(19): siRNA sense strand
gaugagggaugcaauuguc

SEQ ID NO: 868135 - RNA, 19 nt, Homo sapiens
  misc_RNA (1)...(19): siRNA sense strand
caagagacaauucuaagga

SEQ ID NO: 868136 - RNA, 19 nt, Homo sapiens
  misc_RNA (1)...(19): siRNA sense strand
ggaggagcaugcaacaaca

SEQ ID NO: 868137 - RNA, 19 nt, Homo sapiens
  misc_RNA (1)...(19): siRNA sense strand
gagcaugcaacaacaagaa

SEQ ID NO: 868138 - RNA, 19 nt, Homo sapiens
  misc_RNA (1)...(19): siRNA sense strand
gcaacaacaagaaacaaau

SEQ ID NO: 868139 - RNA, 19 nt, Homo sapiens
  misc_RNA (1)...(19): siRNA sense strand
agacaauucuaaggacuuu

SEQ ID NO: 868140 - RNA, 19 nt, Homo sapiens
  misc_RNA (1)...(19): siRNA sense strand
ccacuaaugacgcaagaga

SEQ ID NO: 868141 - RNA, 19 nt, Homo sapiens
  misc_RNA (1)...(19): siRNA sense strand
gcaagagacaauucuaagg

SEQ ID NO: 868142 - RNA, 19 nt, Homo sapiens
  misc_RNA (1)...(19): siRNA sense strand
gcuaaccuaaccacuaaug

SEQ ID NO: 868143 - RNA, 19 nt, Homo sapiens
  misc_RNA (1)...(19): siRNA sense strand
gagacaauucuaaggacuu

SEQ ID NO: 868144 - RNA, 19 nt, Homo sapiens
  misc_RNA (1)...(19): siRNA sense strand
gggaugagggaugcaauug

SEQ ID NO: 868145 - RNA, 19 nt, Homo sapiens
  misc_RNA (1)...(19): siRNA sense strand
ggaugagggaugcaauugu

SEQ ID NO: 868146 - RNA, 19 nt, Homo sapiens
  misc_RNA (1)...(19): siRNA sense strand
ucuaaggacuuucaaaaca

SEQ ID NO: 868147 - RNA, 19 nt, Homo sapiens
  misc_RNA (1)...(19): siRNA sense strand
gaggagcaugcaacaacaa

SEQ ID NO: 868148 - RNA, 19 nt, Homo sapiens
  misc_RNA (1)...(19): siRNA sense strand
uuugaaauuccuccucuaa

SEQ ID NO: 868149 - RNA, 19 nt, Homo sapiens
  misc_RNA (1)...(19): siRNA sense strand
acgcaagagacaauucuaa

SEQ ID NO: 868150 - RNA, 19 nt, Homo sapiens
  misc_RNA (1)...(19): siRNA sense strand
ggagcaugcaacaacaaga

SEQ ID NO: 868151 - RNA, 19 nt, Homo sapiens
  misc_RNA (1)...(19): siRNA sense strand
uucaugcuauuggcuauuu

SEQ ID NO: 868152 - RNA, 19 nt, Homo sapiens
  misc_RNA (1)...(19): siRNA sense strand
uaaugacgcaagagacaau

SEQ ID NO: 868153 - RNA, 19 nt, Homo sapiens
  misc_RNA (1)...(19): siRNA sense strand
acaauucuaaggacuuuca

SEQ ID NO: 868154 - RNA, 19 nt, Homo sapiens
  misc_RNA (1)...(19): siRNA sense strand
uaaccuaaccacuaaugac

SEQ ID NO: 868155 - RNA, 19 nt, Homo sapiens
  misc_RNA (1)...(19): siRNA sense strand
cuccucuaauuucagaaua

SEQ ID NO: 868156 - RNA, 19 nt, Homo sapiens
  misc_RNA (1)...(19): siRNA sense strand
gacgcaagagacaauucua

SEQ ID NO: 868157 - RNA, 19 nt, Homo sapiens
  misc_RNA (1)...(19): siRNA sense strand
guacuuaguucaagaaaug

SEQ ID NO: 868158 - RNA, 19 nt, Homo sapiens
  misc_RNA (1)...(19): siRNA sense strand
gaagggauaugucaacaau

SEQ ID NO: 868159 - RNA, 19 nt, Homo sapiens
  misc_RNA (1)...(19): siRNA sense strand
gagaauugauuacaucuug

SEQ ID NO: 868160 - RNA, 19 nt, Homo sapiens
  misc_RNA (1)...(19): siRNA sense strand
gaacuaggauacccguuga

SEQ ID NO: 868161 - RNA, 19 nt, Homo sapiens
  misc_RNA (1)...(19): siRNA sense strand
gcagagaggcugaauauca

SEQ ID NO: 868162 - RNA, 19 nt, Homo sapiens
  misc_RNA (1)...(19): siRNA sense strand
gaucaccaaugcauuugua

SEQ ID NO: 868163 - RNA, 19 nt, Homo sapiens
  misc_RNA (1)...(19): siRNA sense strand
caaguggaauuucaucaaa

SEQ ID NO: 868164 - RNA, 19 nt, Homo sapiens
  misc_RNA (1)...(19): siRNA sense strand
gagcuacgcuuacucaaag

SEQ ID NO: 868165 - RNA, 19 nt, Homo sapiens
  misc_RNA (1)...(19): siRNA sense strand
caaguaagccaagaaauuu

SEQ ID NO: 868166 - RNA, 19 nt, Homo sapiens
  misc_RNA (1)...(19): siRNA sense strand
gugcugagauguucauuug

SEQ ID NO: 868167 - RNA, 19 nt, Homo sapiens
  misc_RNA (1)...(19): siRNA sense strand
caaagucacucgucuucuu

SEQ ID NO: 868168 - RNA, 19 nt, Homo sapiens
  misc_RNA (1)...(19): siRNA sense strand
gaagauuggacuauacuuu

SEQ ID NO: 868169 - RNA, 19 nt, Homo sapiens
  misc_RNA (1)...(19): siRNA sense strand
gaaggaguauacugaccua

SEQ ID NO: 868170 - RNA, 19 nt, Homo sapiens
  misc_RNA (1)...(19): siRNA sense strand
ucaggaauauucuucauga
